United States Patent Application Publication US 2026/0103690 A1 - sequence listing, part 27

SEQ ID NO: 121319 - protein, 386 aa, unidentified
MSQPSDFNRSRTVLEQDCTLIAVVEMSLKSWLVAAIVPGIERHPLKKLAVDEHALFRLLRRWQAEARKAGHNVKRVAVAFEAGRDGFWLARWLRARSVEAYVIHASSVAVSREHRRAKTDRLDTELLKRAFIGWLRGEPHHCHMAAIPTIEEEDAKRANRERENLVCERSRIINRMKACLIRFGVRSFKPTLRKASELLAKVRTPEGVPLPPNTIAEMRRDMGRLRFVRDQIKEIEAARLQRLAQAPKQRTHAMVRLLARVIGVGIETADMLVHEVLSRSLRDRRAVARYAGITGSPDESGRKRREKGLARAGNARVRRGMIQLAWRFLRFQKDSALVQWYRMRTTNARAGTRNTMIVALARKLLISLWRLVTVGEVPAGVAMRAA

SEQ ID NO: 121320 - protein, 351 aa, unidentified
MIIVGVDYHPSVQQVAFLDTETGETGERRLSHSDGEAERFYRDLQRRQAKVRVGIEATGHARWFERLLAELKFELWIGDPARIKAARVRKQKTGRQDAQLLLRLLVESRFPQIWVPSPENRDLRQLIWHRHRLVQMRTRAMNQIQAVAMNEGVRRKKTLWSKTGRRQLEALPLAPWATRRRQDLLELVDRLNTTIGELTAAVEQEARQRPEVLRLMTHPGVGPITAMAFVLVLGSPDRFACGHQIGSYLGLIPCEDSSADHQRLGHITKQGSSLLRFLLVEAAQATVRRDPDWRSRFIHLAMRRDRRIAKVAMARKLAVSLYWMWRKGLDYPQTLQFGSHAGKPVHVHGVK

SEQ ID NO: 121321 - protein, 430 aa, unidentified
MPYRIAGIDVHKKMLAVVVSDVEVDGEFHFEQRRFGSNPEQLRSLAAWLLEQEAEEVVMESTAQYWQPVWEALERYWKPIREKQQGAGRRSGTLHLAQAQSNRGRRGRKRDFPDAERLVKRLVARELTLSFVPDAEQRLWRTVTRRKYQLTRDKVRLQNQLESLLEEAHIKLSSLVSNLLGASARRMLKALADGETNPVALAALADQNLRATPEQLCDALGACTDLKPVYRRLLKMALEQLQFLEQQIGQLDQEMASLLSQHQDAVQRLAEVPGLGVDSAQQIIAEVGPTAATFPSEKCLSSWVGACPGDDESAGVNYSHRSPQGNRHMRRLLNQSANAAARTKGSIFEIVYRRSIVRLGHNQAIGAIAHRQCRLIWLILHQGARYEERGPAVTKRSKQKRTARMIRQLRSLGYRIEPPSPQHLTPTAAE

SEQ ID NO: 121322 - protein, 388 aa, unidentified
MSRPNDLSRSLTPFVQGSTLVAVIELSLSSWLVAGLVPGVARQPLKKLDPDEAQLLRLLQRWRDEAVRSGCTIERIVVAYEAGRDGFWLARWLRTHGIEAHVIHPTSVAVSREHRRAKTDRLDTAMLLRVFMGWLRGEPGHCGMVAVPTIDEEDAKRPSRERENLVGERTRIVNRMKAALIRLGIRGFKPELRRAPKKLDDLRTPEGLPIPPNTLDEIRRDLARLAMVREQIDMIEQARLARIEQAPETGPNAMVRLLASVVGVGVETADMLVQEVLSRNLRDRRAVARYAGLTGSPDESGSKRREKGLAKSGNARVRRGLIQLAWRFLLFQKDSALAQWYRARTGGANGARKTTMIVALARKLLIAMWRMVTTGEIPEGVRLRPVAA

SEQ ID NO: 121323 - protein, 313 aa, unidentified
MIITPRCVGIDVSKHHLDIFDEGIGVSERVANTPHAITELVARWRCDALVVFEATGVYDLELRAALRAADIRFARINPARARDFARASGQLAKTDPIDARMLAAFARAMRPATEQVSTPARNALARLAKRRDQLVLMRAQEKNRRSEAGDRAMVERICRLIEVLDHEIAEIEADISALITAEPEIADDAQLMRSLPGVGPVACMQLSAQMPELGHVGPKQAAALAGLAPFNVDSGAYRGKRKIGGGRKRVRNALYMAALNAVRRADRFKAFYAKLRQAGKPAKLALMAVARKLLTILNAMMRDRKAYMPAQQT

SEQ ID NO: 121324 - protein, 367 aa, unidentified
MEKSSTAFVGMDVHKESVDIAIADGREARLFGRVGGEAAAVDRAVRKIRSVHRDAMFVYEAGPCGFWLYRRLRAQGLRCMVVSPSMTPRRAGDRVKTDRRDALQLARLARAGELAPIYVPDARDEAIRDLVRAREDAVCMQRQARQRLQALLLRNEIRYVGKSAWTQAHRRWIAHLKLPDPAQQIAFEEYVQAVEEAGRRLERLEGSIAAQVEHWRWRPVIQALQALRGVSAIHGVRIVAELGDLARFESPRKLMGYLGLTPSEDSSGKRRRQGGITKAGNSSARRAFIEAAWAYAHPARVSWVIARRHTGLAKSVTDLAWKAQLRLCSRFRRLAARRLPRNKVVVAIARELSGFVWAIARQVKPAA

SEQ ID NO: 121325 - protein, 361 aa, unidentified
MTGMVTYAGLDVHARSTHAAAIDVSTGELLRARFGPGVEEPVAWLQGLPGPVRACYEAGPTGFGLYRAASAAGVAVEVIAPGKTPRGPSDRVKTDRKDAELLARLLLAGSLTAVVVPPVEVEAARELMRAHDACRRDLMTARHRVSKMLLRHGRVYPESSTWTVAHRRWLSRQQFQEAVSDLVFADLIASVDGLSARKAAIAERLSRLAQDEAWWPTVARLRCFRGVDTLTAFALHLELGGDWQRFQRANALSAWLGLIPSLHQSGESSHQGSITKTGSGFARRLLVESAWHYGRPPRIGATLKNRQQGQPEHVLQISNRAQQRLHRVYHRMRGRGKPHNVTVVACARELACFLWAAATAD

SEQ ID NO: 121326 - protein, 425 aa, unidentified
MHSISNKKINQVTEQTLVVGMDIAKKKHYACFVDERGRVLKKPFPVLQSKEGLEWLYQCIVEAMKEFGKTEVIVGIEPTGHYWLNLAYFLDEKGIPLVMTNPMHVKRSKELDDNLPTKHDAKDALVIARLVKDGRFSYPRILKGMEAELRVGATFRSKLVEEQGAIRNQMIRWLDRYFPEFSQVFPSFGKMALAVLEYTPFPSDLAGKELEEVLTLYRQSEGLQSPQRPKAKKLIELAQHSIGVTEGQQMARIEIATLVRRYRQLEKEIEALTEQLIELVQTSVEYEWLKTVPGLGDATIVELLSEIGSFSHYQDPRQLIKLAGLTLREHSSGQHKGQKRISKRGRRRLRALLFRVMMPMIRHNEAFRQLHEYYTTRPDNPLRKKQSIVVLCGKLLKVLHAVCTKRQAFDVKRMIQDIFGLETAA

SEQ ID NO: 121327 - protein, 342 aa, unidentified
MRAVAGIDTHKDTLAIAVVDDAGREQADAMFDNNTAGHHALESWLAAQPPVTRIGIEGSGGLGRAVALALQHAGWDVCEVPPQLTARDRRHDTKAGKTDQRDAVLIARITLREETLPAIKPEGLGEDLAALLAHRDHLVSERTRTANRTHALLSVVAPGYAARCRQLRTQAHLRSAGDVVEDLEGVRVGLVRRNLERLHDLDIEIRVITREVDELVTASGTSLTTVHGVGPLVAARILSLVGDPARYPTKHKFARANGTAPIPASSGRTQRHRLNRGGNRQLNRAIYTVALTQIRHYPPAQAYYARKLTEHKTKRDAMRCLKRRVSDAIYRQLRADARALDA

SEQ ID NO: 121328 - protein, 343 aa, unidentified
MQSISTVGLDIAKSVFQVHGVDAFGQVVIRRQLKRRYVLEFFQKLRPCLVGIEACASSHHWSRQLQALGHTVRLMPPAYVKPYVKRQKNDAADAEAICEAVTRPNMRFVPTKTVEQQSCLVLHRTRHLLMRQQNSVINAIRAHLAEFGIVAPVGRNGVEQLLRVVADSKDSRLPEIARACVAVLGAQLQMLKAQILESDRMITAWHRSSEVSKRLDEIPGVGPVLATALVASVVEPKAFRSGRDFSAWIGLVPKQNSSGGKERLGNISKRGDRYLRSLFTIGALAVIRYAKIHGTKHRPWLAAMLARRPAKVAAIALANKLARMAWAMMARSERYKEPVALAA

SEQ ID NO: 121329 - protein, 347 aa, unidentified
MNKVMAGIDLHSNNAMLGLMDEGGRRLAHQKVECDLKEILGFLAPYKDRLESVAVESTYNWYWLVDGLKAEGYPVVLANPAKIDQYSGIKHADDKNDAFFLAELSRLKILPTGYVYDPVLRPVRDLLRRRMSLVHQRTSLMLSFKSLYTRTTGRAMKLSQLKGMTVSEAKALYEHPANQLIAQVQKGHIEGLSKSIQKIEEVVLKASSQLPYYPKLKTLPGVGLVLGLTITMEVGEIGRFADAGHFASYCRAVDSQRLSNNKKKGENNQKCGNKYLAWAFVEAAHFARRSDDLCRRWYDRKAAKTSTVIATKALACKLAKAAWYLMAESSEYDAKRVFPELAEKAQK

SEQ ID NO: 121330 - protein, 342 aa, unidentified
MTIVAGFDVHRAQITFDALDTDTGELRRGRIDSTPAAVERWIGRLSGDEVHVALEACTGWLFVARALQRAGAVAHLAEPVETRALRGRKRRAKTDREDARWLRQLLGEGRLPESWIPPEHVREWRSRARLRKALLDERTRWLQRIRATLFHHGVDGAPERLRTGDGREFLEKLELPADALERIEIALEMVDSLERQLRPLEAELRKLARRQRGCRALMDLYGMGELTSLVTLTELGDVQRLSASRKAVRMAGIDIGVHRSDRRTRVGRLNRQGSPQLRWALYEAAQSACRPSSPDRKDYLALKARGLSHTRASLTIARKLARRSFHVLRALGPAALEPIPTA

SEQ ID NO: 121331 - protein, 480 aa, unidentified
MNVKAKRTKKQVNVENQAINLLSKEELNRKIEVIKKELRAYTWRDLETNGKFAKNDKLSFITDDMLIAGCDIGSETHYIRAIDVRGRELSSGAFGFSNTSEGFENAKAWVLALAAKNDKKQIVLGLEPTGHYWFALAAWMISNGISVVQVNPYAVKQSKEIEDNSQLKDDRKDPKLIANLVKDGNYGMPYLPEKVYADMRRLSMFRDQLTEDRIRNINRLHRELKIYFPEYMDAFGKIDGAFTLEVLKVSAIPTDITALGAEGMKNIWHNAKLRGRGYSRANEIVSYAKKSVGLTDGTDAGREAVKWYAEQILRLDEQLAEIESALHEKCREIPYAENILAINGVGENILAGILAEMGDISRFDDVKEIQKLSGMGLVACSSGKHKGQTKISHRGRKRLRYWLFQAAKSAVSHADEFKQLHEYYTTRSNNPLKKMQSLVVIACKILRVIYTILKTGTTYDPQKLLKDIKHPAASQAPMAA

SEQ ID NO: 121332 - protein, 343 aa, unidentified
MKIIRVGVDLAKNVFQVHGVDGSEKPVWRRKLKREEWLKVLQEKVEPGYEIGMEACGAAHHWARKLQALGYRVKLIAPQFVKPYVKSNKNDANDAEAICEAMSRPTMRFVTIKTVEQQDVQAVHRIRAELMEQRNAKANQIRGLVSEYGIVAPKQISNLRAAIPEWLEDAENGLTSQFRKMLNGMWADFLLLDQRVKELDHEITAIAAADPVAQRLQQLRGVGPMIATALIATVGDATQFKNGRQMAVSLGLTPKQSSSGGKEKLLGISKRGDAYVRCLLVHGARSMINWSKGKDDRLSRWVTRIATTRHPNVAAVAMANKTARIAWAMIRKGTDYQPDLASA

SEQ ID NO: 121333 - protein, 339 aa, unidentified
MKKVFIGIDFSKLKFDAAIYSVDTKAIVATEVFDNEQSGYVDFLQWVKATTRCQKSGMLFCGEHTGYYSGNLSVFLYDSGYDMWLVSGLEIKLTQGIKRTKTDRVDACKIAEHAYRYQDKVVLFQPVCKSLDEIRELLSYRERLVETRKMLTTSAKEMKRVKDNASCDYIYRDSIEYIKTLNASVRDCEKRIEALLKQDISLKTNYKLVSSVVGIGLVNAALILVATDNFTKFDNPRKFGCYCGVVPFEHSSGTSVRGKTRVSKMANKHLKTKLTLAAQNAVRFDPDLKEYYQRKRSEGKNNWLVLNNVKNKLIHRIFAVVRDGQMYEKQYVHPLKQVA

SEQ ID NO: 121334 - protein, 433 aa, unidentified
MEEVTSEPLYRDRVCGIDIGKAQIAVTIRVPSDKDPARRMAETRSFGTTKSQVLALADWLRCWQVNAVVMEATSDYWRPVFYRLEAEGLECVLADPKQVRKLPGRPKRDPSDSKWLAACFERGAVASCFVPTPEFRVIRLHTRYRRDLIEERTREKQRAEKLLESAAIKLSSVVTDLHGVTGRDIMNHLIAGERDPKVLAQLARGRARRKIPQLQAALEGAQFFTPQIAALLQSMLTRIDHINAEINKLTAVIETLLAPWEEQLQQAESMPGWGRRSAQDIIAETGVDMTRFPTPAHLASWAGRTPLDNSSGKRTGSAGHKKGNRYIAAITGETATAAGKTQTREGARYRKISRRRGKNKANVALGNTQLRVLHALLTHPGSRHHDLGPDYYERQRDHRRHVSQLVGKLGALGYEVTLCRLPDPEPSPANTPA

SEQ ID NO: 121335 - protein, 404 aa, unidentified
MLHDHPSVGPTAILTQFGAIFVSLELSRSKWVVTSLSPGNGERMSQYSLTAGDIGGLLARFADFKRKARERTGSDYPVITIHEAGLDGFWVHRVLRNEGIESHVVDAASIATSRRRRRAKTDKIDGEALLRALLAFKRGEPRVCAMVVAPSPEEEDRRRLCRERQTLIAERIIHVNRIKGLLFAQGISDYAPLRRDRRKRLEGLRTGDRRSLPVHLKTQVSRELDRLELLLEQIGKVEAEQEALLAVESKVASGQEPCNREPRNREPRNREPCNAVTMLLAVKGIGEHSAAILWSEGLYRQFANRRQVAAYAGLAATPWRSGAVVHEQGLSKAGNPQLRTTMVQLAWLWLRHQPQSALARWFRARGERGRKGSIVALARKLLVALWKYVTHGVIIEGAVMKPAA

SEQ ID NO: 121336 - protein, 343 aa, unidentified
MQTITTIGLDIAKSVFQVHGVDTEGNVVLRRQLKRRYVLAFFQKLPPCLVGIEACASAHHWSRALQALGHTVRLMPPAYVKPYVKRHKNDSTDAEAICEAVTRANMRFVATKTPEQQSCLTLHRTRHLFIRQQTSVINAIRAHLAEFGIVAPVGRNGVDQLLGVAADSNDKRLPEVARACVAALGAQLQTLKAQILEFDRMIRAWHRSSEASRRLDDIPGVGPVLATALVASVADPKAFRSGRDFSAWIGLVPKQNSSGGRDRLGHISKRGDRYLRSLFTTGALAVIRYANIHGTKHRPWLTALLARRPTKVAAIALANKIARMAWAIMAKGERYKEPAALAA

SEQ ID NO: 121337 - protein, 339 aa, unidentified
MARYIGVDLHRNRFTVCVLAENGREYLSEHRLEQFPQFVRKLRPTDELAVEVTGNTRLFYNAVASHVAKVVVVNPTQFRVIRQSVKKTDPHDARTLAFYLSKDMLPEVRMKDTLHAQLSSLTQTRDTLVKQRTALKNKVNNILSAHGINLRKESLASDVGLDRVLEMTFDAIVQTELRVIVGQIRALNQSIAELEKTIKTEGAKLPGHRNLKSIKGIGDLGATVLLTAIGDINDFAHPGKLAAYFGIVPRVRNSNETEHSGRITKRGTKLGRTTLVQCALIAMRYSSYLAKFYHKVARRRSTGKAIIALARKFLSVIYHTLKNNWIFEDFPNFVIAGAA

SEQ ID NO: 121338 - protein, 357 aa, unidentified
MTGIRNVGIDLGKRTYEMKVIGPDGKVSGTGGLTSLSGRKALYRKLRPTDRVGIEVCSLAMVMAKEMEREVGCEVVLLNPSRIALIYRSLKKNDKEDALKLARLVQKYNNEELPKVELPTEHEENLRQMLSELRQLKNDRTKEINRLHAVFVENGITEVKKKDLATDMNRCGAIKALKGIFLSQAERILKRLSLIEEQIADSEGMLAGETAGDKNIERLTEIPGVGKQLAAGYVAFLGDGSRFPNASAVGAATGLVPRQDISSTVVRLGHITKCGNRNLRSLLILAAWSHVRAKKAGALKEKYLYMTQVQSKGKKVAIVAVARKLAELMYTLLKTGASYEKRALPAVSQIAGEALAS

SEQ ID NO: 121339 - protein, 343 aa, unidentified
MECYVGLDVSLKQTSICVVSGTGSVVREGVVASDPDAIAAFVRSKAPGAIRIGLETGPTSTWLWTELKRLGVPVICIDARHAKAVLKMQINKSDRNDAAGIARIMQTGWFKEVRVKDLDSHTLKALLISRALLVKIKRDLENQIRGLLKNVGLVIGRAKFNVFAVRAAELIEDRPELIAVVGPLLKARKAIEQQTDDLDRKVVKLARYDAQVRRFMTVPGVGPITALCFKATVDDPTRFKRSRSAGAYVGLTTRRHASGEIDWTGRISKCGDAMLRSYLFEAAGVLLTRVPKWSALKAWGMRLAKRNGLRKATVAVARKLAVILHRMWMDRTEFNWSKKEVAA

SEQ ID NO: 121340 - protein, 429 aa, unidentified
MTDNDDTPQRVALVAVDIAKNYHDVLIEPSPRGRRRRLRLANNLEDFEQLAGYLRSLKSLVLIGFEATGNYHRPLAYFLHRQGFELRLIPTLALARTREAMHNSWDKNDPKDAQVILHLLKTGLAQTWHDPVVKGINDIQELSKTHFQVTLARVRVWHTLRNHYFALYFPEIDRFIRSDHSVWLVQLLASFPTPASIAALSEEEFQTRAWNLVGRKVSKRALLAEIYAAAKRSIGVPAPLDSAAVAMFRLVLEEYLTLHRLREHIAEQAAILLGDNPDSRRLMTVPGIGLANALTILAEAGDLRRFRHHRQFLNFCGLNLSTLQSGKSRGQSHISKYGNARLRTALWMAAQTAIRMRENSFRRKFDNYVRGNPLDADLRRKAYTAIAAKLARVIFGLIKSGADYRPFFEHKFQVEEPSRARAVGATSTP

SEQ ID NO: 121341 - protein, 343 aa, unidentified
MEIAVVGIDLGKNKCSVVGLDAAGKVVTRRRMQRESVLKFKASLPPCVVAMEACCGAHHIGRIVLSQGHQVRLMSPEYVKPYVKAQKNDDRDAEGTAEAATRPTMRFVELKSQAQLDMQTLHRARDRLVGERTALINQLRAILLERGIVVAKGRRKLEVALDAMLTEPDGLQLTPRMLELVQDMRAQWRTLDQRIEAFGDEFAARARSDEPARLLSTIPGIGVINATALVAAIGRGETFDRARDLPAWLGIVARQDTTGGKPRLLGITKRGNRYLRKLLIHGARAALPSLSQSNTPLGAWLRGLLARRHHNVAVVALANKLARIAWAVLRTGRPYHTNARNPS

SEQ ID NO: 121342 - protein, 395 aa, unidentified
MFIVGTDVAKRSHEVCMITSDGQTVQRPFSIRNNCTGYNLMLEKIRKHTNIKSQIVFAMESTAHYWLALFTRLRKDGYHVILLNPIQTSAMRDMFIRKIKTDAKDSFIIAELIRFGRYAESNVAQDRLLALKELCRNRFYLVDMAGDLKRKLIALIDRVFPEYEAQFDTIFCKSSVALLKKYPTPQKLSTAHLDKLTELLWNSSNGHFGEWKARELRELARNSFGVEDCDGAYSTLILLMLDQIQSLSGKADALEKEIFRLFQSFDTTVTTIPGVGPIIGAVILSEVGDISRFSSADKLAAYIGVDPSVNQSGEFQAAHAHMSKRGSPYLRRCIWMASQVAVQRDPMFRAYYEKKAAEGLKYMTIIGHVTRKMTAVVFAILRDHKVYEPVLPTAA

SEQ ID NO: 121343 - protein, 343 aa, unidentified
MEHTTIAVDLAKSVFQVAVSHRPGRVDEEHRLTRARVLRFFAERPAATVLLEACGSAHHWGRELERLGHTVQLLPPYDVHRYVRRSKTDRADAKALLEAARNDEIHPVPVKTVSQQALTTLHRIRSTWQATRTMRLNSLRGLLREFGVTIPAGAHHVVPRVRALLEDPEAPVPMSVRPSLAVLCDEVRRLEDQINDLERQLAALAKQLPLVAHLRTIPGVGLLTATALVACVGDVRRFPSGRYFASYLGLTPKEHSSGSRRRLGAISKQGDRYLRTLLIHGARSVLWRAKSQPTPDAFRTWALALERRRGHNKAAVAVANKLARMIWRIWQSDRPFRESPGAA

SEQ ID NO: 121344 - protein, 345 aa, unidentified
MIIVGCDFHPSWEQVAWLDTETGETGEQKLVHSEGEAERFYRQLPAPALIGLEATGNCHWLQDRLAEMGHEVWIGDAAQIRASYVRKQKTDKRDAAHILQLLVEGRFPRLWVPDCEQRDLRQLLIHRQKLVEIRTRVKNGLQHLALNQGVQKKSRLWSRAGLEVLRALPLAPWASRRREDLLGLLRSLQEQIRPLDRAVAEAAQHNPNARLLMTQPGVGPITALAFVLTIGDVGRFPRGKQVASYLGLIPREHSSAGRQKLGAITKQGNRMMRMLLVEAAHQAVRYDPEFRKQYWHRCHSMPKNVAQVAAARRLAVRLYWMLRTQMPHPEIVRIESSSRVPLVGQ

SEQ ID NO: 121345 - protein, 404 aa, unidentified
MNYLGIDISKKLYRCVILDNEGEALCKSFSIASSLDGFNSLIEKLEKLNLKPENLLTGLEATGNFWENLYSFLTEKKFKVIVLNPYQTSKFRQVLMKKAKTDDIDAYVIAGLLRSNHYGSSFVPEQTVQDLRDIIKLRYELMKDRKDYKRQVMSLLSLVFPEHTKTALKNPFTIASIKVLKKYPTAKHIAKTKVKHIERIVSKIQGHIFNIGAIDQLITTAKKSIYSGRSREARALKLTILLEHIEKLNNSIELLDQEISETLNPKDDNNNFPGSNLLTIPGVGLKTVAAVISTVGTEGNAFSTATQYIGYIGFFPKIHQSGDKTYENVISKRGPRYIRWAHYMAAVASVMYNEEMRTLFHKKVSQGKSKKEALVYVAKKLAHMMLSMLKSGETYHRERVFVNC

SEQ ID NO: 121346 - protein, 333 aa, unidentified
MKSGTVHIGVDVSKEKLDIYVPAKKEGSRPLTKEVDNDINGFRELRNLARKAKATVCVEPTGGYELELIAFMHKFDVPVAYTDALRVRQFARAEGSLSKNDAIDAALISRFADKIGVRVLEAQEVEAVELKRKAKFRQTMVDSRTAMINRLETEIDPEMKALLKEQIRLAGRIIDKAERLCLDTVKKNDRMNSLRERFTAVGGVGDLTAISILSGLPEIGTLSDGKLNRLVGIAPEEKQSGTKEWQRRIWGGRKDVRNALYMAAVASIKWNAILGGYYRKKRAEGHPHKWAIVPTMRKLLSLLNRIARDPGFIPMPEPESTKQNANVGRKKAA

SEQ ID NO: 121347 - protein, 438 aa, unidentified
MKPGGKRTKFAAVVGIDWADKKHDICVWDAESEALDRSVLEHRPELLHDWARKLRDRYKGLPVAIGLEQSRGSLAYLLMQYGFFTIFFIHPATVARMREAWAPSGAKDDPGDAELIMEITRDQNQKLTAWRPDTPETRRLQLLCEKRRKFVNLRVKLTNRLRSMLKAYYPLANEVAGDKLHEALALDFLTKWPTLQALKRARPSTIHSFYTRHSSRYMDTIEKRIAAIAAAEPVTEDPVIIETHAMEVAGIVAQLKVLRKTIKEYDSVIGKLYTQHDEATLVASLPATGRVFGPRLIAALGTDRGRFNSAGELANFSGIAPVTERSGKSEWIHRRWKCPVFVKQSFHEWANETTKHSLWARAFYIQAKGRGMGHHQAVRALAFKWIRIIYKCWKEQIPYDEMHYLSILKRRGSSIWKIIAEDPDAIRLNGPVESQFLR

SEQ ID NO: 121348 - protein, 369 aa, unidentified
MQNTMFVGLDVHKATISVAIAHGARDGEVRHWGTIPNRADHVRRLAEKFGSDGRQLYFCYEAGPCGYGLHRQLTELGHDCMVVAPSLIPVKAGDRVKTDRRDALMLAKLHRAGELTAVWVPDRAHEAMRDLIRARATAVSVAGKARQHLQGFLLRHGRIHPGKKGWTKAYRRWLSTVRFEHSAQQIVLQDYVHAVTDAEARIERLTKQIADLLPSWSLATVVEALQAMRGVAFIVAVTVVAEVGDFSRFDNPRQLMAYLGLTPSEHSTGKTIRRGGITKAGSGLARRVLIEGAWSYRMQARVGRKLVDRIEALPATVRDIAWKGQLRLCQRYRHMMAAGKPKVVATTAIAREMVGFIWAIARAVTPVSA

SEQ ID NO: 121349 - protein, 473 aa, unidentified
MRLYIGLDLGSKSQSEAVAVDESGKIVGEPVRFTPERSSMDEMVATLCGGALPEEVMFISEPTGTIWHSVESYLSSRGYGFFLVSPQKTHDLRRFYKRHAKTDTIDAYTLAKMALVHPEGLFRPSTMEPLWHNLRRGAKKEAKIARLIGDYKRTIQAKAEIALPGISSVVDEVDSPLAKCLYTKYLDPRKAVKLGKARLERSLGKAAGYSEKLFSEIWRCIETAAEIETDCDYDDLRVDIDEDFEVLECLKAQWESVKRRNLRTYCRLDPGRLLCTVYGVGDTLAPAILAGIGDGGRFKSIKHFLSYTGFTPRVEESGQREAKGTRMTKAGPPWLRRALYLAADVARRWDPQLAEVYYRCMLNKGHAHTKALCVVASRLAMRIYAVVKEQRPYELRDVDGRPVTAQEAKAIVEARYKVPEEVRCQRRNAVGNHSMKRSGRPRTTQSRSGCPTLRLTAPLPKVNEGSLRPLDTT

SEQ ID NO: 121350 - protein, 400 aa, unidentified
MIDTSDIGAFLGLDVGKGEHHATAVTPAGKKAFDKRLPNSEPKLRELFEKLQAKHGTVLVVVDQPASIGALPLTVARDAGCQVAYLPGLTMRRIADLYPGEAKTDARDAFIIADAARAMPHTLRALELEDETVAELEMIVGFDDDLAGEATRISNRLRGLLTQIHPSLERVLGPRIQHPAVLLMLDQFGSPAQLRKAGRRRLVNLIRAKAPRMAERLVDDVFTALDEQTVVVPGTDAAALIVPSLANQLKSVLDQRKLLAARIEELLEAHPLSKVLTSMPGIGVRTGARILIDVGDGSSFPSAAHLAAYAGLAPATRSSGSSIRGEHPSRRGNKQLKRAFFLSAFAALADPASRTYYDKKIAQGKHHTQALLCLARRRADVLFAMLRDGTFYDPKPAPTG

SEQ ID NO: 121351 - protein, 351 aa, unidentified
MMIIGVDYHPSFQQIAFLDQETGECGEQRLNHSDGEAEKFYRELKQRGVSVLLGLEATGYSRWFERLLAELGIEVWIGNAAEIKTKRVRKQKTDRQDAKLLLKLLLENRFPRIWVPNPENRDLRQLLWHRHRLVQMRTRIMNQLQAVAMNEGYRWKKKLFSEKGRAQLEKLSLASWASRRRKELLELLDQLDPKIEELTAAVEQEAKKRPEVLLLMTHPGVGAITGLVYVLVIGTPDRFPCSKQIGSYTGLIPSEDSSAGRQRLGHISKQGNALLRYLLVEAAQAAARCNPDWRRRYIHLAMRRQKSIAKVAMARKLGVRLYWMWRNGWDYSQLVEFGSHAGKLVIGHGVK

SEQ ID NO: 121352 - protein, 363 aa, unidentified
MLASSWLSRLRTDPVLVFLTPERLVERRFACSHAQGRDMKTMSGSSVMVGIDVASAHVDVACLGAVLPSELAHVSNDAEGHSALADALVKLQPGLVLMEATGGYEAALACALQAVGLRVAVINPRMARDFARAMQRLAKTDRIDAATLAEFAAVLAQRPDCERFVRPLSEPEQQDLAALVTRRRQLVAMQLSERQRLRLARPVTRPSIDALLEAIARQLDDVDAEMVRHVEQHHAVMAKLLQSVAGIGRIAAATLIAELPELGRLNRRQICALVGVAPYAKDSGSSRGRRRITGGRFEVRRALYMATLTATRFNPAIRAFYKRLVAAGKLKKVALIACMRKLITHLNAITRDHLNAQNQPFTA

SEQ ID NO: 121353 - protein, 364 aa, unidentified
MYIMAFDVSKGKSYMVLYKSLELIYEGEIKHNQTTFNELLPFLKRNKVELVFEATGVYSKLLEHLFETNGFNYYCLNPLEVSFQTATLRQMKTDQTDAHRLALSHLKFNRQITIPPSLRYKELKAMSFSYHQVHDELLVNRNYLHSELQYTFPGIEEIYKDNLSQYILKVLEKYPHPDYVNDHSRTKIKNFIKKQTKKRISDQQAGDKAEWIQKCAEKSYPIVNKDSFRVKQVRKRIKNIDRLLDEKREIRKELISEATVLTEFSILESIPGIGEVTSALLLAELGDIQRFKTNKQLNAFVGIDIRRYQSGTIYKRDRIQKRGNKRARMILYYTVQNMIKRHKYIDNHIIDYYYKLNCNNYCDK

SEQ ID NO: 121354 - protein, 342 aa, unidentified
MQVTTIGLDIAKNVFQVHGIDAAEKVVVRKQLRRGQVLAFFKALPPCLIGMEACATAHYWARELTKLGHRVRLMPAKDVKAYVKRNKNDAADAEAICEAVRRPTMRFVQTKSAEQQGRLMLHRVRDLLMRQRTQVINALRAHLAELGITAAQGTAGLKELLKIIASDADERLPVDAHASLVVLAAELQAMQTLVGSLEKRIMAQHRGNEASKRLETIPGIGFIGATAIAATVTDPTAFRSGRDFAAWIGLVPRQDSTGGKQKLGPISKQGDRYLRRILVVGAHAVLRYAKQNPEKYPWLTQLLARRPFKVVAVALANKMARMAWALLAHGGTYRAPALAAAA

SEQ ID NO: 121355 - protein, 357 aa, unidentified
MSYIGVDLHSDKFTAAFRDKMNNDTLKSYYLDKYEIDNFKRNLKKDDYIFIEASTPTFAFTDLLKDTVKKTIVIDPFKFRAIADSRKKTDKIDARQLARMGKYHIEGDKKFLPEVYVVEKRIRKLRSLFTTYRLLNKEITMIKNRIHSLFKQNLKPYSKSHIFNDIMTGLKPIDLDEEYKIQVEVLFDVLSKLEEKKSKIKEKILLTGEPFLADIDILVSISGISVFVALGLISDYATIERFKNAKQFSKYLRSTPKSEESNKKVKTGKTQKNGRKLSIELMLQSINHFRRESLFIDKFYRRLKKGKGGCKARIAVVRKMFVAIYFMLREREYYRYMNKKLHDKKMREYKRFLVKNK

SEQ ID NO: 121356 - protein, 341 aa, unidentified
MSDYSYFCGIDLAKNHFSLHAVDQNGKVILHKSVTRSKLLTTIANMPLMRIGVEACGGAHYWARTLNKLGHDACIMAVKYVIPYRTKGKNDLNDAVAICEAVQRPLTRFVPVKSPEQQAILSVHRMREHWVRERTALMNRMRALLSEFGLIIPVGRSSLMKQVPLMLEDAENELPHLARTVIADAYHHLGELNQRIADTEQVFDSFAKVSDNVQRVMKVRGIEPQTATAILASIGNGAQFDKSRDFSAWLGLVPKQYSTGGKPRLGRITKHGDKYLRTLLVHGARTVIANLGDKQDKLSQWCRGVLERRGMNRAIVALAAKNARIIWSLLHNQTEYENYAA

SEQ ID NO: 121357 - protein, 315 aa, unidentified
MEGEVMVGIDVSKARLDVAVLPGEEIFSEEHDSRGIAALIERLKKIAPALVVLEASGGLETGLVAELVAAGLPAAVVNPRQVRDFARATGQLAKTDKLDARTLARFGDRMRPQLRKLPDQQELALKALVVRRRQLVEMMVAEQNRLDRAPKVLHRQLRRHIDWLRKQIHSLDRDLDHELRNSPVWREKETLLRSVPGVGPVVCSTLIAGLPELGTLSRRQIAALVGVAPLNRDSGTLRGRRMVWGGRGQIRTALYMSTLVAVRFNPALKSFYLRLRAAGKPPKPALIACMRKLLTILNAILKNRKPWSPQCLNLT

SEQ ID NO: 121358 - protein, 433 aa, unidentified
MPTTHPYDLVIGLDRSDRKADLHLIDTRTGTVQKQTVATSPEALHDWLVQLRRDHPQARVAICLEQPAANLIVFLETYSWITLYPINPISLQKFREAFVTSRAKDDGKDAQYLAELLLSHPDKLKAWQPDDSQTRQLQQLVLHRRAVVDQRTGLTNRLKALLKQYFPQALDLCGEDLWRPLARAFLLKWPTLQSLKKARKESLKQFYYLQGSRSQTLIEQRLERIDKAVPLTDELALLQSYTLRVQLLCKELQLLLKTLQQFDQQIAKVFQQHTDRRIFEAFPGAGPVLAPRLLASMGSERERFAQPENLQSFSGVAPVTKQSGGTCSIHRRYLCPKFLKQSFHEYAKESILHSRWAAAYYGQQRNKGCGHHTAVRALAYKWQRIIWKCWQTRTIYKEAIYEAALKKNKSPLIGLLDQIELGKSPVKSRAKKS

SEQ ID NO: 121359 - protein, 408 aa, unidentified
MKRYYIGVDWGDRLHQVYIGDEKGKKVREIKVPETVEGLAEIGRWLDEKRAEDFELWAAIEKPAGRIVDFLLDHGVEVYPVNPKAVDRVRDRYRMSGSKSDAFDAYVLAEFLRTDQAHLRALRPSSEKAQELKMLCRDQHRVVRHKTRLRNQLTTTLKEYYARPLEVFEDIETEVALDFLKRYPTPAHLSALKRKEFNRFATQQHSLSKQRCEQLWEQLQKPQLAVPEHVVRAKAQLVEVLIDQLRAWIKAVKTYNHKVESFFASSPVAELAKTLPGGKSGTLVATLWAELGDAQGRWESFGHLQAEAGAVPVTKASGKSHVVHFRFACNKQLRYSMYWFSFVSLNNSEWAKLYYRGQRDKGHNHPQALRALGAKWLKIIFVMWRDHKPYDENYHLANIALQKMRQAA

SEQ ID NO: 121360 - protein, 408 aa, unidentified
MEVVHERCAGLDVHQDNVVACLRVAAGGRIEQEVKTFATTTQGLLELSDWLTERGCTHAAMESTGVYWKPVWHVLEGSFELVLANAMHIKNMPGRKTDVNDAMWIADLLAHGLIRGSFVPPTPVQELRDLTRTRKQLVREIAQHTQRIQKTLEDANIKLTGIISDVLGKSGRAMLEALIAGETNPEKLVELTSRRLKATRAELVEALRGRVREHHRFLLKLHLGQVDTLQAAVRDVEARVGETLQPFHDLAELLTTMPGVSDTVAHVIVSEIGVDMSRFPTAAHLISWAGLCPRSDESAGKRRSTRIRKGAPWLKTVLVQAAWAAARTKDSYLRAQFLRLKSRRGPMKAIVAVAASMLTAAYHMLRDGVEYEDLTGSYFDTRDRTKLAKRLIRRLQDLGLTVEVRATA

SEQ ID NO: 121361 - protein, 410 aa, unidentified
MIEAILERCAGIDVGKKFVVVCVMTGGARDQPHTQIKKFGTIVSELQRLSEWLVSEGCTHAVMESTGSYWKPVFNLLEAHVQVILANAADVQNRRGHKTDPNDSRWLAHLLRHGMIRPSFIPPLVIRELRDLTRRRRQLIGENSRERNRVQKVLEDANVKLGDVLADVFCVSGRLMLAALLDGQMTAEQIADLAKKKAREKIPQITASVADHRLSDHQRFLIRHAIRHLEFLDQEVEALNQEIRRRMEDPALAEAFHLLQSIPGIKEESAASILAEIGADMEQFPTAAQLSSWAGLCPANHESAGVKKSVRTNRGNVWLKTTLTQSAWAATNRKGSRLQSRYHALKARCGNKRAIVALGHTLLKTVHAVLSAKMPYREDPPIMRSDRNVERAQHHIRSLKKLGYNTFAVE

SEQ ID NO: 121362 - protein, 283 aa, unidentified
MTASYDYHIGVDYHKSYSHLVVQDSGGKTLRSGRVKNDRQSLGGFLERYRDNSHAVVEATRNWMVMYDWLDDICDDVVLAHPLKVKAIADAKIKTDKIDATVLAHLLRADLVPEAWAPSDKARELRVALRERMFYVRLRTMTKNRIVTVFDRYPEQTAQLKKLGDLFGKAGRVQLAQVNVSEIDRIQINRGLEFIGDIDVRIKQSEATIRAMTKANANVKLLKTIPGIGEFFARLIDAEIDDINRFRNPKKLAAYAGLVPSTYSSGGKTFHGKIIKQGNKWLR

SEQ ID NO: 121363 - protein, 406 aa, unidentified
MRVLYERCCGLDVHKQSITACALTPEGKEIRTFGTLTDDLEELVDWLKEKKVTHVAMESTGVYWKPVYNLLEAEPIEVLVVNAQHIKAVPGRKTDVKDAEWIADLLRHGLLKGSYIPHRAQRELRELVRYRRSLIEERARELNRIQKVLEGANIKLSSVVSDINGISARLIIRALIEGKDDPAALAQLAKGRLKQKTEELRRALKGMIGPHQRMMLAEQWRHVEYLDEAIARLDREIEERTSPFHEALELIDTIPGVGRQSAEQIVAEIGTDMSRFPTDAHLASWTGMAPGNHESAGKRLSGRTRKGNKKLRSCLVECARAAARTKNTYLSAKYHRIAKRRGANRASVAVGRTILEMIYYILTRKEPYRELGADYWDRQREASIVRQTVKRLEGLGYEVKLEKTSA

SEQ ID NO: 121364 - protein, 429 aa, unidentified
MNVVDDIRLEQFRQMRKGIRGSKDYLIVGIDIAKNKHYAFFGTATGKTLLKKFIFENTIDGFERLLIQEDALKVQHCLKKVIYGLEPTANYHKPLGEHLIRCARNVVLVSGVAVKRNRESMDGRWDKNDSLDSSVIADVVSQGKFLFYEYSTMPIRDLRNLLALKRRLKKQEQGQKVRIRNQLLAQYFPELDGYYKTLSAEGLAVVRWCLDPSVIAGLEYEEFVRIVAPNRRGGIRQQERLKAVWNKAVDSIGCRAGTSLYFEAKVMVEGLKEIRKVIRVTEDEIEDICNKLPEYSYILSIPGFGPDISSKVLGAIGNPFRFNTGKQVLKMAGLDLNARRSGTKSDTVTPVLSKKGKADLRYALYQAALIASYKNKVFMRYFTNKLRGREKEKGIKTKMRIKLAAKLLIIAWTLMKKQEAFNPHYINIE

SEQ ID NO: 121365 - protein, 349 aa, unidentified
MGEVITIGVDIAKSVFQIHGVDADGTVVIRRRVGRARVLEFFADLPPCRVGMEACATAHQWARELEKLGHDTRLMPPTYVKAYVKRGKNDAADAAAICEAVTRPSMRFVPIKNVEQQSVLMLHRTRDLLIRQRTQLINALRAHLAELGLVAAKGREGLHQLVTVVTECGDERLLSNARFACQAIVTQLHAVQIEISGLDKRITQIHRTNADSKRLDTIPGFGVILSTAVVATMTDPKVFRTGRDFAAWIGLVPRQNSTGGKERLGSISKQGDRYLRRLLVVGATSVINCARARPYKYPWVIELLGRRPTKVVAVALANKMARIAWAVLAKGEPYRAPTRSSNAVVPAAA

SEQ ID NO: 121366 - protein, 360 aa, unidentified
MDTKHDTSLSFKDQDFFIGIDVHKKQWTLSIISMNMLLKKYLSIDPQPSALLKYMHKHYPDGNYYATYEAGFSGFWAARKLNNLGVNCMVVHPADIPSSQKERLNKNDRVDSRKMARSLNNGDLIPIYIPEKIAEEYRYLNRHRLKTVKDQTRLKNRIKSVLHQFGITIPLQFQERRWSGAFIKWLFSINFDTQYAQFAYEDLIDQLIQTRARITKHLKKMREMTKEQKPFNIIIPLLLSIPGIGFITAMTLATEVIDMSRFKTLEKLAAYVGLVPSIQSSDETEINLGISPRRNKYLRTMMIEAAWKAVKIDPALTMKFNQLSRRMNRNKAIVRIAKILLNRIRYVWKNQKPYVLSVVN

SEQ ID NO: 121367 - protein, 349 aa, unidentified
MQQTHYFIGIDLHKTVVQVCVLDGQGSVVEEFRMRLERPELGQEVITRLIRWRATGRVVVEAVGFNRWFVNACRAAGLSVVVADAVKLGLAKLGKKTDRRDAYELARRLFLGDIDRHAATYYPSDEEYGVRKIERVRHRLVAIRQQVVNQIRGLLNAYLLPAPGTSLYSARSLAALKEMALPTPELTLCLQTLVTSLTAVQEQIERLTQTIRERAAAPAVQQFAAHLPNVGPQTALTLHAELGDLSRFRGSRQVSAYVGLAPRVTNSADTRHHGRLTKRGNPELRWIVSQWAVRLLARGEPQVQHWAASRLRRMHKNKVRLALARRLLVGLYVSHCRGEEFSLDRCLVG

SEQ ID NO: 121368 - protein, 532 aa, unidentified
MTASFNRLFCQAAREENRLRKLMVLTLSRKPLMNHKHGAKIMVSCKKAHHLQNLPSHAVNLKRGGAIMSVLNVGIDLGVTSKHQAEIRDEQGKKVRPSFSFFGSKEGLDALCNHALEDGPEGAKLRFICEPTSMSWFPLAVYAISRGHEMVRVKGQKAHDLREYYSKHKKRDRIDAKVLSLMPVVDRDSLEEVHLPDKIIYALDRRCRQREKLAKSISAAKTRFKSLYHWVMPELTSCLENPFGSRARAFYAKYTNPFKVKQLGLSRLTSFLSKSGRQKMEPGLPEKVYQVAMEACRLYESASKKIDFDELQQEVECELQMLEFYEKVQAQVETAIERLYDQAHPSKNIETIVGISETLGPVFLGIIREPGRFPSQSKMRGYSGMIPKQDDSGESSKKGLNITKDGSPRYRRGLYLAADIGRQWDPQLAKIYYDQMVHKGNCHTQAVCAVATHMPARIQVVLKEDRPYELRDIEGKPISKKDAKVLIQREFTVPEEVRQRTRSRKKRRRRKEGHKRDQVRGLATTLQASRFA

SEQ ID NO: 121369 - protein, 344 aa, unidentified
MKALKSHVAGIDVHKEMLAITVLIGELDGEPKEYQFESSTFTDDLMALGLKLKEMGVTDVAMESSGIYWKPVFNVFNPLGLKVVVANAAHIKNVPGRKTDMNDSRWIAELHRFGLIRASFIPDGEFQRMRLLSRHRTNLTEDLARVKNRIQKVLEDGNIKLSIVVSDIFGVSGLKVLKQIAGGYTHPNILITEVTTKIKRMEEMKKALTNCLTTEHCFVINVLMKQYEELKNRIEEGENELCKKVEPYAHLVEELDKIPGIDAILAMGIIAEASANMSSFKDERAFAAWSAVASGNNESAGKKKRAKCRKGNPALRKMLIQAAQKVTTARNPFIALNTTNSAFA

SEQ ID NO: 121370 - protein, 345 aa, unidentified
MQPMYYIGLDVHKRVISYCVKDSSGKIFSEGSLPATRLSLDLWMKTLPQPWSAAMEATMFTGWIYDHLKPHAATLKVAHPLMLRAIAAAKKKNDRIDANKICDCLRCDFLPECYMASTAIRERRRTLRYRNLLVRQMVQTKNKISMLLMEAGVNYSKQRLHQAGYFRELLATNPDINEGLKPLLQLCRETVVRLQKTESALVRSLERDSLLMDRVERLMTIPAVGPITALTWALEVGDVQRFSSIKKAISYCGLCGAEKSSGGTVQRTPLSKQRNKHLQTTLIEAAKMAPRYSPDLAMLYDREKQKGNANRATLAVARKLVAYLMAVDRGQRNFQVVQTSNCVAA

SEQ ID NO: 121371 - protein, 339 aa, unidentified
MRKLCVGIDVAKSKFDVMYTIDGENYFGYSTFPNDKKGIKKFVKQAEKFLKQEKCEQIHFCMEATGIYHCELCEYLQNSAHIVSVVNPVRTKSFSKSLQLRTKNDKVDSQMIAHYTLLYNPTQTPKVPKELQHFRRLVKFKETLVDDRAKELMRVKTALDSDVKQLINKRINFLEKQIKETMYKIETIVKENEFLSRNFNLLITVDGINFNVAWRILAELNYETINDITPKSLVAHAGLSPRENSSGDKYGKVTISKIGKSDLRKIMYMPALSCIRHDNYFTSFYLHLLEKGKPKKVAITAVMRKMLLTAMGVLRNQEPFDPEWSKKVQAKYQEKLKVA

SEQ ID NO: 121372 - protein, 433 aa, unidentified
MISRALAALEGFVLVGGVAVVLFVGDDWAEDHHDVEVQDHTGRRLGKARLPEGVAGIVGFHELIAGFLGEDMAEDTDAEQVLVGIETDRGPWVAALVAAGYQVFAVNPRQVARYRERHGTSGAKSDAGDAHALADMVRTDAHQLRPIAGDSPLVEGIKVVARAHQTMIWERHRHMLRLRSSLREYFPAALEAFDDLTAADTLDLLEAAPDPQRAARLSRSRIAGALKRARRRDVEAKAERIQALLRADHLNQPPELVVAYAATTAATVAVITAFTAQISALQGQVEACFGRHPDAEIYRSQPGLGEILGARVLGEFGDDPDRYQGARARKNYAGSAPITRASGKKTVVLARFVRNQRLAGPLQWQAFCALRASPGARAYYDQIRARGAGHQAALRQLSNRLVGILHGCLKHRTCYDEHTAWGHHQTQDQQAVA

SEQ ID NO: 121373 - protein, 403 aa, unidentified
MNNVAGIDVSKGKSMVSVLRPFGEVVAKPFSIGHTGSELKELADYLKSLDGETRVVMEHTGRYYEPVARFLHDEGVFVSAVNPKLIKDYGNNTLRKVKTDKADSRKIARYGLDNWAELRQHTPMDTIRMQLKTLNRQQSLYTKTKTMMKNNLIALLDQTYPGVNALFDSPVREDGSQKWVDFATTFWHVDCVRNMSLTAFAERYRKWCKRHGYNFSQSKAVEVHAGAQDLIAMLPRDALTKTMVRQAIDALNAISTSLERLKAEMQALAAQLPEYPVVMAMHGVGDSLGPQLMAELGDVTRFTHRNAITAFAGVDPGADQSGTHEAKSTRVSKSGAPELRRALFLVMDCLLKTQPQDDPVYRFMDKKRAEGKPYLVYMTAGANKFLRIYYGRVKEYLASLEGN

SEQ ID NO: 121374 - protein, 311 aa, unidentified
MNNTIGIDISKDTLDAHRLADGQHKQFLNGKTGHAQLVKWIGKQSDPLIIFEATGAYHRQLERVLCTHIIPFVKVNPKQAHRFAQASGKLAKTDRVDCEMLAKMGAALQLMPKPFTAENLYDLRELLSARRALIKDRTAAKARKATVINALIKQQLEKRLRQIKNDVAKIDALMLDVAREDQYMSERLDILFSIPGIGVITALMILVDMPEIGALNNKQVASLAGLAPMSQSSGKWMGKARIQGGRPNLRNAIFMPALVAIRHNADLKTKYDQLVTAGKEKKVAITAVMRKLLVLANALLRDNRKWAEKAA

SEQ ID NO: 121375 - protein, 316 aa, unidentified
MESYVGIDVSKKALDAHVLPAGEALHVSRGGKGLEELVSWLRARQPRIIAVEATGGFERVVAAELDAAGLPVVVVNPAQIRHFAFAVSQRAKTDAIDAAVIARFAEATKPAVRPLPDEQTRALADLVTRRRQIVQMLGAERAREQRAPNRRVARSCQRLIKALERELADADDAIDGALRASAEWRAKQELLQSVPGVGPAVSSTLIAELPELGSLDRRSIAALCGLAPWTRQSGQWRGKSFIGGGRSGVRSRLFMAALVAAQHNPVFVDFYKRLLAKGKPKTLALIAVARKLLVVLNALLRSGERWNEAKHVQPSI

SEQ ID NO: 121376 - protein, 319 aa, unidentified
MVKGGFVGIDIAKNSMEVTVYGNKDHWEYANDENGLAKLMIKIKRLAPALIVMEATGGYEITVAAELQARGYPVGVVNPRHIRDFARSVGILAKTDTLDARVIARYAATVRPVPRDLPDSETQRMGMILMRRRQVIAMLTSEKNRLYQAGPAVRERIKEHITFLERELDDINKELSKIVEDNPEWKEKSDIMQSVPGVGPNLAITLLADFPELGNLNRKQTAALVGVAPFSRDSGKMRGKRSVWGGRNTVRNAAYMSTFVAIRFNPLLKAFFERLKAAGKPHKVAMVACMRKLLCILNAMLKNHTLWQKSVPQLIGPCH

SEQ ID NO: 121377 - protein, 391 aa, unidentified
MTAVMIGVDPAKRSHAMAVLDRNENEQAALQVRNDNDGYREMLRLAKRWKLRTWAVQGAGGVGVQLAQRLVADGESVVDMPPKLATRARIFDTGHGRKNDPGDARTVAVVAIRTKGLRQVVLDDERLALRLLSERRRELVRSRTQTVNHLHQLLMELLPAGAEQKLTATKAKALLATVRPRHAAGKARRQLAVDFLDDLVTFDRKIKDINGRIKTAVEATGTTLTNIKGVGITTAAVVLGEVGDVRRFPSKHHFASYTGTAPLEVSSGEVVRHRLSRAGNRKLNSALHHAAMSHKRTDEQGIAYYGRKVAEGKGKKGALRCMKRRLSDAVYRVLLEDQARAAAAGREGHSGATLQSSASDPTPTVSPSDKSLTRPAAADATPQPPRVKRAS

SEQ ID NO: 121378 - protein, 329 aa, unidentified
MQAILHNCCGMDVHKDSVVACILKTPEPIATERKREVADKEIRVFGTFPDDLVQMRDWLESRNCHHVAMESTGVYWQPIYEALEDAAGGEMEILVVNARHMKNVPGKKTDMKDAEWIASLLRSGLLSGSFIPPQDVRELRQLTRYRKNVVQDISTQKNRVEKTLQQAGFKLSTFLSDVFGVSGRNLIRILIKSGKLFPSDVENETKRISKEKKAEIKRAITGQLTEKQRHFLQLQITLLDGLLAHLESIESSIAELSAKWEDDIERLNTIPGIGLTSATAIIGEIGSDVSKFPTAEHFCSWAGLAPGDNMSAGKKKVQELLLETHILKA

SEQ ID NO: 121379 - protein, 378 aa, unidentified
MKTVRFIGLDVHAQTIAVAVAEPDGEVRSIGIIPNHPAAVSKLMKKLGKPAQLRVCYEAGPTGYVLYWQLTKLDIKCEVVAPTLMPMKAGDRVKTDRRDAERLARSYRSGDLTAVWVPDAAHEALRDLVRAREAAKRDQLRARHRLGKFLLRQGRRAPLGLTAWSCRYLQWVKQQHFEQPAQQATLIDYLHEVEHMACRIEQLEQAIDSAIDTVPTKMRAVVDALQALRGIAKISAVSVVAELGEISRFAHPRRLMGYSGAVPREHSSGARVQRGSISKTGNAHLRRIVIEAAWAYRHRPGMGMALAARQRLTNEAVRQIAWKAQHRLHQRYRRLMGKGKPKQKVITAVGRELLGFIWAIGVQVERSCEAATSMQCAA

SEQ ID NO: 121380 - protein, 420 aa, unidentified
MEIDRGEQHLIERVAAIDIGKAEMVCCVRVPGAGRARAQEVRTYSTMTPSVLEMADWLTGLGVTRVVMEATSDYWKPVFYLLEEQVAETWLVNARDVKHLPGRPKTDRLDAVWLCKVAERQMLRASFVPPAPIRRLRDVTRYRADLVAVRTAEKQRVEKMLEDAGVKLSVVASDIFGVSGRAMLAALIAGERNPARLADMALGRMRARTGLLEKAFMARFTDHHAFMLTTMLARVDTATADIAAMDDRITVILTEELHDAATRLTTIPGIGAVTAVAILAEIGTDMTRFPTAAHLCSWAKFTPLTSESAGRTKGRQSTGHGNRYLARALGEVAVMAGRSHNFLSARYHRIARRRGKPRAIVAVGRSILVIIWHLLSRPGTTFVDLGADYYETRVNHQRTARTHVRALEDLGYQVTLATAS

SEQ ID NO: 121381 - protein, 386 aa, unidentified
MNVKSRRTKKVNVENQAINLLSKEELDKKIEVVEKELRSYTWRDLETNGKFAKNDKLSFITDDMLIVGCDIGSENHYIRAIDVRGRELSRGAFEFSNTSEGFENAKAWVLALAAKHDKKQIVLGLEPTGHYWFALAAWMISNGISVVQVNPYAVKQSKEIENNSQLKDDRKDPKLIANLVKDGNYGMPYLPEKVYADMRRLSMFRDQLTEDRIRNINRLHRELKIYFPEYMDAFGKIDGAFTLEILKVSAIPSDITALGAEGMKNIWHNAKLRGRGYSRANEIVSYAEKSVGLTDGTDAGREAVKWYAEQILRLDEQLAEIESALHEKCREIPYAENILAINGVGENILAGILAEMGDISRFDDVKEIQKLSGMGLVACSSGKHKG

SEQ ID NO: 121382 - protein, 340 aa, unidentified
MSEVTCGTNVHVGIDVSKRKLDCAILLDGKIKSKVVGNDPAGFGLLDAWLRERGADIQHTHLCLEATGPYSEQAALALVDAGWTVSVVNPARIKGFAQSELARNKTDRADAALLARFCAAMHPATWTPPSVAYRHLRALVERMQALKDMHQQETNRLEAHQASGETNIIPHVKSHLAWLNTQITALQKAIDDHIDGHPELKQDADLIASIPGLGDITVAKVLAYAGDVRRFANGKALAAFIGVTPRQRESGSSVRGRTMISRTGHAALRKALYMPGLVALRHNPVLQVFGARMKVNGLAPKAVVGAAMRKLVHLIYGVVKSGRPFDAKIALQGLACQDGI

SEQ ID NO: 121383 - protein, 348 aa, unidentified
MRPSDTQPELREIANDARQIRRLFERLKREGPVAACYEAGVSGYDLHRQITGLGVACAVIAPALTPRRPGQRIKTDRRDAAKLVRLFRAGELTAIHVLDESEEAVRDLVRCRDDIRRDVLRWRHRVLKLLARHGHAYLTGKNWSHAHWRWIREQRFDLPPLQRAVEATVFALEQALARQAELDKELEALAATAPYREPVGWLRCFRGIDTLSAIILLAEVVDFQRFRRPRELMAYLGLVPSEYSSGETQRRGALTKAGNSHARRVLVEAAWHYRHRPTIGRALANRSQGQPDEIVSHAWRAQQRLHRRYRHLLGHGKRTPVAVAAVARELVGFIWAAMTRHESRRQAA

SEQ ID NO: 121384 - protein, 425 aa, unidentified
MAVDNAVGIDVSMHESTFVGLRRPEEIVLTLRKVPHTAEELEKIAAEILALPGSTVAFCECTSVYHEPVVKALREAGVPIVPLNPLLIHEFGGDTLRKVSTDKSAARKIALYGLTWGHKFDSSAEEEPTRVMLKAISRQYAFFMKQKTAQRNHLHALSERVFPGIQDLFTSKDRYDGSVKWVDFLKEFPHAECVSKLSLAKFTGRYKKWCRMHGYHAVRAAEIYAHAKSCVASFPKNADTQLLVQTAITQVNQVSKTVAVYRKRMVELASSLPEYEVVMKIFGCGDSTGPQLMAEIGDVRRFVLNKGYKSLAAFAGVSPGDSQSGKRDPNSNQIEKRGSPYLRRALFCAVNAYLLKSPEDEPVYKTLDKKRSEGKKYLVYMTAAMNKFLKVYYARVMEHFTRLASAEIIPSVPVSNNDFDVAVAV

SEQ ID NO: 121385 - protein, 412 aa, unidentified
MDVVYRCCCGIDVHKASVTVCVLWAETKGKSRQEKRMFATFTQDLLALSDWLHACGVTHVAMESTGVYWKPVWHILEGHFELLLVNAQHVKAIPGRKTDRKDSAWLAELLQHGLLKSSFVPPEPIRELRDLTRYRVNLAQECNRIANRIQKVMEDANLKLASVATDALGASGRAMLKAIITGERDVEKLADMSRGLLRRKIPELQLALEGYVSQHHRFLLQELLDHLEFVESKMTRLEQEIAERLRPFEDTVRRLCTVPGIDRVSAWGIISEIGLDMHQFEDAKHLASWAGLCPGNWESAGKRKSGRIRKGSAWLRRHLCQSAWGVSTKQKNYLSALFRRLAARRGVKRATIAVAHALLRIAYRILRDPVEYRDLGPDYFDKLHPVRLKNRLVKRLEGLGFQVTLEARSLPA

SEQ ID NO: 121386 - protein, 457 aa, unidentified
MSQRQRKARKSKIKVNNLPPHLRHINLNAAGIDIGSDRHVVAVPEGSDEISVRQFGAFTTDLHEIADWLKKCGVTTVAMESTGVYWIPLFELLEQRGFEVKLVDARHVKNVSGRKSDVLDCQWIQQLHTYGLLQGAFRPTDEVCVLRSYARQKEMLTQASTMHIQHMQKALQQMNLLLHNVVSDITGVTGMKIIKAILAGERDADVLALNRQEGCRNSKETIAKSLVGNFRDEHMFALKQAVDLYEFYQALIVECEQALIEHLERRPDITDDQPPDSGKHVRLRERMRADVDVREKLFKMTGVDLFAIPGLAADTLLTLASEVGFKMEPWKSEKHFTSWLGLCPGTKISGGKRLDRKTKRNSNRAALAFRIAASSLARSQTALGAFYRRIRSRTDGRRAITATAHKIARIYYSMLTKGTAYVEAGQQTYEQAYKERKINALKKQAHSLGFQLQPCGS

SEQ ID NO: 121387 - protein, 320 aa, unidentified
METERFVGIDVAQATLAVAIWPEQRTWEAANTVEGIEQLVGELRGLAPERIVLEGTGGLQAPLVAALGLAGLPVVVMNPRQIRDFAKGKGQRAKTDRIDALVLAEFGALHRPPVRPLADAETVQLSALVTRRRQLVEMRRAEEQRLARLEAQRAARRVRADVSEHIAWLTRRIERLDAELDAAIAASPLWHAQDSLYQSVCSVGPVVAHTLITQLPELGRVSSKAIAALVGLAPFTRESGVWRGRARIEGGRVEVRRILYLAAMIGVRRNPVLRTFYTRLVERGKPKKVALVASAHKLLTILNAMARDQRPWTPSSVQAS

SEQ ID NO: 121388 - protein, 350 aa, unidentified
MKIVGCDFHPSYQQVAIFNTETGEVEDKKLIHATGEAEKFYRELETPALVGMEATGNSRWFELMVEKLGHQLWIGDAAKIRASYVRKQKTDKRDAGHILKLLVEKRFPRLWVPDVRQRDMRQLLTHRHKLVRVRTRLKTELQHLALNQGIQKKRQLWNEKGRALLASLPLQGWAQQRRKDLLQLLELVEPQIEQLDKAVEQAAKADPQAVLMMSQPGVGPITALAFSVTIGDVSRFERSKQVSSYLGLIPTEHSSGSKRRLGSISKQGNVFLRALLVEAAQSVVRHDPGFRKEYQHRCHHKEKGIAKVAAARKLAVRLYWMLKSNKSYTELVLNGGSPRHPVAAKAKPLS

SEQ ID NO: 121389 - protein, 343 aa, unidentified
MVTVTRFLGLDYHQDSVQVCVMDAEGNTLTNRSVPNSWRCIGAVVGGTVLPAEFVAVRASIECCSGAAHLAEELIEQLGWSVTLAHPGIVSRMKQNPEKSDWADAHILADLMRLGYLPRVWLAPTEIRQLRSLVRYRYQQVKQQTRLKLRIRALLREHRIPKPKEFGAWSLMWFAWLKCLELDDVTRFLMDQYLEELRQVQRKIADAKKLLFARTRNDALIAKLLKLDGIGPITAITMRAEIARFDRFDTGKQLARYCGLTPRNASSGKRQADAGLVKAGNTQLRMVIIQAAQRLINFNPHWGQFAARLMQRGKPRNVAVAAVANRWIRRLYHQMQPEQLVAM

SEQ ID NO: 121390 - protein, 466 aa, unidentified
MEAAVITAVGIDVSKSKSTVAVRRPGGEIVLRPFDVRHTNSDLKKLTSTLKKLGGDIRIVMEHTSTYWRPIALTLKEAGFFVSVVNAMLIHDFSDNTIRKLKTDRADALKIANYALTFWDTLPPFNNEEETRLLLKMQSRANERITATATALRNGLIALADQIFPGVNIAFDPNTKNANGHEKWVDFFLRYWHKDCVCQYSMEAFTESYRGWCKRKNYKFRTDTAHQIYLLAQEGVATLPKCESTKMLITQACKSLNAVCEAKQSTQLEMQRLAAMLPEYEVVMQMEGAGPITGPALMAEIGDVRRFKNKKALVAFAGIDAPPFQSGAFESKSRHVSKRGSPHLRRTIFIVSNIILTRSNPENAVYCFMDKKLLRAGKHPKGSPKRTKEQDVAFSTHFKAILEASRRLMLKQFSLYVVCVLSVRLEQWVLLYLSSTHCFACFFTIFAIYAYAAIDFCCDWMYYTIK

SEQ ID NO: 121391 - protein, 427 aa, unidentified
MFHVTARRKREGKVIMSRQVRRNPRSVKRGPGPSSTLLTPDRAGNVVGVDPHKRTLTATVVDPRGGIVASEPFRVSGDGHRALEAWARQFGPIVRWGIEGASAWGRHTAVFLAGRGYDVRDVCPNRTGRQDRARQRGKSDVLDSERVARETLAHPLLPRAFKRAGDDAGPDEQAELLAVWWQARCSLIKRRQQLLSETEALLRDLPLALIERLPDVKPVRPRLSALERATRRRALDPPTALRVRLLSEHGRQIAKLDSEEKTIRRELRTLVQASGSTLEQLCGLSTVSVAELLVEVGDARRFTEGGFARFNATAPLVASTGEGPGEPVRHRYNPGGNRRVNAILHRMAVTQLRCDPRAKRIYATARTDGHHTKKEARRILKRHLSDVVYRRMIRDLASHPGPLLAAPPRAAAARSKVARQGRAQRAA

SEQ ID NO: 121392 - protein, 471 aa, unidentified
MNNHRRRPGKHRRHRPGKPRTSPSVLERINPNVAGIDCGSAEHFVAVPPDRDPCPVQSFRTVTSDLVRLADWLVACGVMSVAMEATGVYWIPVYDILEARGLNVLLVNARHIKNVPGRKSDVSDCEWLRELHSVGLLRGSFRPTATIVALRTYLRHRQTMIEDASTYIQRMQKALVQMNVQLPLVVTDITGVTGMSILRAIVGGQRDPERLAECRDPRCQASKAEIIEALTGHYQADHLFVLQQNLALYDACQQQIAACDRAIEAHVQILVATVEPPSTPLPPARARTGLKNEPAFEIRSPLHQLTGGVDLSQIEGIAPYSALKLLSEIGTDMTRWSTEKHFTAWLTLAPKNRISGGRLLSSKTQSSANRAAQILRMAAMSLGKTQTALGAFYRRLALRIGKPQAITATARKLAVLVYRALKGELVYRDPGADAYTAKQRTRIVRHLRQRAGSFGFDLVNRETGEIVSAVS

SEQ ID NO: 121393 - protein, 403 aa, unidentified
MGSPSETAGLAGPALRHAERRREVPNHLAASDGLHHLWDGPPPLRSGVVRRILIAFTEEDRHDTGSGNRHRHGKTSFHLVALDATGAIQWKKKVSRTQLMRQMEALPRCLVGMEACCGAHHLARELAIFHHDVRLMAPQFVKPFLKSNKNDYLDAEAIAEAVQRPTMRFVPAKSVEQLDLQALHRVRERLVSRRTAVINQIRAFLLERGIVFRTGRRYMAREMPKLFTDERSTLSPRMRTILQQLWNEWCGLDTDIATVTKEIEAIAAADEGCRRLLAIPGVGPLVATALVAAVADGTGFKRGRDLAAWLGLVPRQHSTGGRSTLLGMSKRGNSHLRRLFIHGARSASMHMKREQGLGPWLDQLETRVHKNVAVVALANKIVRISWAVLARNELYRPLTPIAA

SEQ ID NO: 121394 - protein, 369 aa, unidentified
MLPPQQQVMLMRGTKDKEHAMAEALRIAFVGIDIGKNSFHVVGLDGRGAIVLRQKWSRGQVEARFANIPPCLIGMEACVGAHHLSRRLQRLGHDARLMPARYVRPYSKGQKNDFRDAEAIAEAVQRPTMKFVATKTADQLDLQGLHRVRERLVSQRTGIINQIRAFLLERGVAVRQGLRFLRAELPDILAAPSDALSPRMVRIIEDLAGDWRRLDERVERLSKEIEAIARRDAGCERLISVPGIGPIISSAVVAAIGAGDVFSKGRDFAAWLGLVPRQISTGDRTILGKISKRGNRYLRVLFVQAAWVVLIKPQSWERHGLKSWIEAARKRLHRNVLAIALANKLARIAWSVLAHGRSFEASKLAAAST

SEQ ID NO: 121395 - protein, 428 aa, unidentified
MTEDTTLTSQTWLVAIDIGKSFHAVLVEAADGRRQHFRMANSVEDYDRLVAFLRALLGTVRIALEPTGDFHRTLAHRLLREGFPVVSVSSVAGARYREAMFNSWDKNDPKDATVILHLLKQGIVQHYHDPLLAGDHDLQELAKTYHQVVLARKRLADSLLNHYLPLYFPEMGRYWESTRVEWFVDYLEKFPTPVAVCALPKEEFVKAAWSVIGRKVNKRAKLEELYELAHQSIALPVSVDSVAIETFRLQLGQLRRLAELRQALEVRAHALLKDRADFQHLCSLPGVAAVLAMVILAEGGDLRRFPHHRQFLKYCGLDLAKCQSGQFCGRETLSKRGNARLRMAFWMAAQRAVRMNENSFRDKYERYTKQDPGNPDVRRKALTAVAAKMARVAYAVVKRNQPCRGYHEHALPSGSIPLMRAVGASATP

SEQ ID NO: 121396 - protein, 466 aa, unidentified
MAYKRKNVKSKERKRMPRSLKAIQPNAAGIDLGSREHWVAGPPLEDETPNVECFGTTTPELLRLADWLKEQGVETVAMESTGVYWIPLFEILDSRGFEVVLANARQIRNVPGRKTDIEDCQWVQLLHACGLLRGSFRPSDDICQLRALIRERNTMVEQRADWVRRMQKCLDQMNVCVHQAVSDITGVTGMAIIRAIMDGERDPHALARLRDRRCRKSEAQIAENLTGNWRAEHLFNLRQALKMYDQLCAVIADYDSEILSYITTLQPADTSDESAPPPASKSKAKNLVKRGQEPMRQGLYRLCGFDMTTIDGIGVDTATVIVSELGLDFTVFPNENHFVSYLRLAPNLSISAGKKVPKKSKASTCTRVATALRMSALTLRNSKTALGGYYRRVAWRKGASVAVFATARKLAQLIYRLVRYGQAYVDTGVEAYEARFNQRRLKFYTKALNDMGYNVEPVKTEEAILA

SEQ ID NO: 121397 - protein, 433 aa, unidentified
MDVVHERCAGIDISKADAKVCVRVQGRGRRRTEQSVRTWGATTGQILALRDELLELRVGLVVMEATGDYWKPFYYLLEDAGFEVVLANPRRVRAIPGRKSDVSDAAWLADLGAHGLVAGSLVPPPPIRELRDLTRTRTAIIRERSREYQRLEKVLEDAGLKLSTQTSSLTLVSVRRMLEALVAGERDPRVLAEMAQGQLRNKIPALAEALVGRFTEHHAFLVRLHLDLIDRHAEAIEELTGRIDAQMEPFRGFHTLICTIPGVSTLVADVVVAETGGDMTRFATSARLAAWAGLAPGDNESAGKRKYAAARPGNRYLRAAMTESAWATARTRTRPGARFRRLARRFGKGHEKKAAIAVAHTLICIAWAVMARGQDYADAGEDYYDQHDQRNREHLIRHHQQALARLGCQVTLVPPGDGSPPPDTASPHPGQAA

SEQ ID NO: 121398 - protein, 331 aa, unidentified
MGCDIAQDTFAFCLRDQSKVVCQGEVSNSKKAIQAWLKELKQIYHVDLSSVIFCLEHTGIYGMILMRTLHTRSLIVCVEGASNIKLSLGLQRGKNDRVDARRIAEYAMRYTDRLKQWKPKREVLERLQLLNGMRSRLVKALKVLNSHTKEAGRFLGKNEYMLLKKGTQDSINAIESNIKKADKSIEALIKSDENLKRLSDLVTSVASIGMVTCAAILVKTNEFQDFREAKKFACTSGLAPFEHTSGKSVRGKTRVSHRAHKDLKTLLHMCALGAISRKGELQDFYQRKVGQGKNKMSVINAVRNKLIHRVFAVVRDGVMYQKNYQYNLVMS

SEQ ID NO: 121399 - protein, 422 aa, unidentified
MILQAGLGATGNYIKAKKGDQMNPVIGLDIAKGESQGQAFLDKGKPYGKSFTVYHTQEGLEAFHSFLKLVEEESNQQPMIILESTGHYHLPVTRFLEEHNFLFFVVNPILSYQAKKSSSLRKVKTDTVDAYALCELFYKEDFKNYKTRGVQLLNLRNLTRQHNAITGLYIQIKLQFQAVLDQVFPEYKGVFGDLHSAVSLKTLLEFPTSDAVLRAGKMNISEKIAFICMRRSERWAMDKAEALLAAARRNPFRKAPFQSHLISLEMYVSMLLHYREHLTALEKQMNALANEIEEYKIIQSIPGIGEKIAATIISEIGEIDRFNHPKKLVAFAGVDPSVHISGKFTATINRITKRGSSRLRHTLFLAVLCSLRRTGSKKMKTFYDKKIAEGKPYKVAMIACVNKLLHWIFALLRRKETFLDLA

SEQ ID NO: 121400 - protein, 288 aa, unidentified
MTVPQTTPHHPKPALIGSQPVYVGLDVAKAHLDVAIRTVAGPGAQWRSPNTDAGIRALATQLSALAPALIVLESTGGYSARPAAGLAAAGLPVVVVNPRYVRDFAKATGLLAKTDAFDAAMLALFAERMRPEVRPLPDPAQRALSALLQRRRQVVEMSVGESARLESVTGALATRIKRHIAWLAREIAALDAELATHIEHSPVWRARHQLLRTTRGVGPVVATTLLAELPELGQLNRRQVSALVGVAPFARDSGTWRGKRSVWGGRRRVRAVLHMAAVTALRCNPVIR

SEQ ID NO: 121401 - protein, 320 aa, unidentified
MSQNTSAIMNDKKTSVYAGLDIAKASLQLHLQGKSYDLANTTEGHAQLIKRLAAVPGSHVICEATGGYERAGVAALHAAAIPVSVLNPARVRQFARAAGKLAKTDPIDAAMLTAFGQAFTPAPTPQRTATELKMAALVTRRAQLLELRVAETQRADTCADLDLRKLFTPWLAQIKKQIAKVEALVEALLQAQAPLASQVQRLDDIMGVGRLTAVMVLATMPELGTLNRQQAAALAGLCPYNRDSGQWAGKRCITGGRAEVRRALYMAALSASRSNHLLKPFYDRLIAAGKPAKVALTAVMRKLIVLMNHLLKNPNFSLAH

SEQ ID NO: 121402 - protein, 379 aa, unidentified
MEIITRNEKILYVGIDVHKDTYSLCCFDFFRNELSDEMTIKATTKAVIKYLEAIKKKYKEEILFACGYEAGPTGYGLCRGLQKAGYGCVVMAPTTMSNPDGKKRVKTDRIDARAIARILAYKSYSQVHLPSEEMEALKEYTRARDAKKRMFKKAKQELLSFLLRNGKSYPESGNYWTEKFFKWIKTVQFSEKWMQEAFSEYLSEVYSLKDKIKLMDTKIREIAELEIVKDKVDRLICFSGIDVITAVETVVEINDFSRFATAAQFVSYLGLCPGEDSSGKTKNMLPLTKAGNKRVRALFCESAKAIKRTNPYGEKSKRILERQKNASPEIVAYADKATKRIRTKMKHLEERGKNYNVSSAAGARELACFVWGMMNSKIA

SEQ ID NO: 121403 - protein, 346 aa, unidentified
METTTKYVGMDVHTEAISIAVVNSAGKVVMESILETKANTILEFFQGLRGNVQVTFEEGTWAAWLYDLLKPHVTTVVVCNPRKNALLKDGNKGDKIDARKLAKLLHLNNLKPVYHGENGIRTLKELSRSYLTISKDLGRVMNRLKALYRSWAIPCAGQQVYAPRHRSEWLSKITEAGVRRRAEYFYQQLDALQTLRREVRRDLLVESRKQTATKLLRQIPCIGPIRAALLIALIQTPHRFRTKRQLWNYSGLGIETHDSAQYRFVGGELQRSKKPQQLRGLNKNHNHDLKNIFKGAATMATISAGPFHDFYEALLAKGRKPTMARLTLARKIAAITLIVWKSTFRR

SEQ ID NO: 121404 - protein, 371 aa, unidentified
MDKGIKVFVGLDVHKDSISMALAQATGGEARCVCTLGHDVAKLIKLLGRYGQPGEVRVVYEAGPTGYGLYRALIERGYECQVIAPSLIPKRAGVRIKTDRRDALKLAGLARAGELTAVWVPDEADEAMRDLVRAREDAVEARHGARMQLKAFLLRQGVRYSGKTSWGPAHARWLATLGFAHPGQQLAFAEYCQAVRAAHERVERFNGALNQALGGWRFEPVVRALMSLRGLDVLSAFTLVAEIGDIARFASARELMGYLGLVPSEHSSGAAVRKGAITKTGNAHARRVLTEAAWNYRFGARIARGLSLRQEALAEPIRAISWKAQLRLCARFRALSARGVHQNKVCVAVARELAGFIWAIARQVSSPPTTA

SEQ ID NO: 121405 - protein, 340 aa, unidentified
MQHVAIDLGGRESQVCVRTGEGQILLEQKVATRTLGNFFKRQPHSRVVLETCAEAFRVADLALSYEHEVRVVPATLVRSLGVGARRIKTDRRDAQVLSEVSCRIDLPSVHVPSDLARQRRTMCGVREGLVASRTALINCVRGWTRTQLLKVPPATSATFPKRIRDSATAQPDGLPEYIERLLKVIDSINEQIALADQELKELAENDPICSRLMSVPGVGPVTSMRFVAAIDDVSRFRSAHAVESFLGLTPGENSSSERKQRTGITKAGSAAVRGALVQAAWNLRRSRPLDPISQWATNIEQRRGKFIATVAVARKLAGVLFALWRDGSLYAPNHASPQAA

SEQ ID NO: 121406 - protein, 309 aa, unidentified
METIVGIDVSKERLDVAVIPQGEGFQVANDHGGIDELAKRLARLRPEVIALEATGGFETLAAADLAAAGFAVIIVNPAQVRAYGQALGRKAKTDTIDAALIAAFVQATKPQIRPLPDAQTQELSALVTRRRQIVQMITAEENRSQMVLARPARKSIKRLLTALRRELERLEADLDDHIRASPVWRVRESLMTSVPGVGVTVARTLIAELPELGSLDRRQIAALAGLAPWTRQSGKWKGKSFIAGGRSKVRTVLFMAALVASRFNPVLKAFRDKLVAAGKPKIVAVVATMRKLLTILNAIIRDGKPWQTT

SEQ ID NO: 121407 - protein, 354 aa, unidentified
MRTYYVGMDVHRASIVIVVLNGAGKVVMQSVIETGAERVRGFLKQLRGKVYVTFEEGTQANWLHDVVRPLVTEVVVCDPRHNKLLLSGNKSDRVDAQKLAELLRNGSLRAVYHGDNGMRTLKELVRTYDCLVSDTTRVMLRLKAIFRGRAIACAGHDIYRQDRRRQWLEKLGEPGARQRAKFLYNQLAALRPLRHEAKLMMVKEARRQPAYPWLMSMPRLGSVSVAQLLAVVGTPHRFRSKRQFWTYVGLAVVTRTSAEHEVVDGVLRRSRRPIATRGLNRNHNHLLKKVFKSAATSACHSGPFKAAYDARVKQGMDPSLARLTIARQLAAITLSLWKRSQQFNPERMKQQTAA

SEQ ID NO: 121408 - protein, 359 aa, unidentified
MQRNKISFKGQKVFVGIDVHKDSWRVAVAPEVGVVRGHSQKPSAKELFDFLNKHYPDGDYLAVYESGFSGFSTYYALREVGIACIVIHAADVPTTQYDEAMKTDKVDAAKLVRSLKAGLLKGIYIHGKDDLDARAVVRLRKTIQKQLSGYKARVKHMLHCNGVLYPERFSRNGSHWSRAFMRWLKEDVKLLSSTRYSLDILISQVETIRTSLLAATRKMRELSQSERYKVGFSLLTSIPGIGVSVAMALLTEIGDFNRFRNEREFASYLGLIPTSHSSGEKVAHGEKTFRGNKKLGPQLVEASWITICRDRGLGAAYFHYKKRMEPQEAIIRIARKLSNIILSVIKTGQKYEPYRWIEK

SEQ ID NO: 121409 - protein, 360 aa, unidentified
MSEIIRIGIDTSKSVFVLHGVDGTEKPALRKKLRRRDLVGFLAKLKPTRIGIEACGAAHYWGRTFQALGHEAVLLPTQLVKPYIARNKNDGADAEGICEAMSRPRMRFVPIKTAEQQAAQMLIGLRDRLVRQRTQVSNAIRGYAAEFGLVAAKGLDKIEPLLARIADAPDLPDLAKELFALHSQEYVQLKVRLRQIEAKLMAWHRHNELSRRLAEIPAIGPIGACALAIKVTDPGAFRCGRDFAAWLGLTPKDHSTAGKQRLGAITRAGDEMLRSVLVVGATAVIQQARRQRGKATPWLIDLIKRKPPKLAAVALANKTARIAWKLMVSGERYDPHHQGRGRSNPPSPPAVSTAPGSHGA

SEQ ID NO: 121410 - protein, 328 aa, unidentified
MNIENNTVHNFVGIDISKKVFDVCFLSQNGQMEQRQLEQSPKGYQTLIELIGQDAICVMEATSTYHLPLALWLHDQGVQVVIENPLKIKRFSQMHLQRCKSDKADARMIREYATTIVSKKINLWRPQADEIQQLKQCDTLSQSLNKELTAITNTHEALGQLSVVNTAVKQIIQRTIKHLKTALSELDKQMQQLIKKHYNDTYQLLLSIPGVGPKTSVMLICQTDNFKNFDDVKKFLSYIGMSPRTFESGSSIKGKGHITKVGNGRLRSLLYMCSWTAKTCNLQCASIYEKMLQKGKPEKVIKVAIAHKLLRQAFGVIKRQQPFDPEFA

SEQ ID NO: 121411 - protein, 365 aa, unidentified
MKKISTVHAFESEIFKEQKLTIGVDLGDRWFYCVKDEAGQVILEQKLPTTQEAMKQTFGKIPRSLMALETGTHSPWVSRLLTQLGHEVIVAHAQKVQLITKSSRKDDRHDARTLARLARIDPELLGPVRHRSAQAQIHLTVIRARAELVSARTALVNAARGLVKSYGERLPKCGTQQVSRELAAELSTELRDVLEPLLKEIESLNERIKEYDERMEKIAKEVYPEVYLLKQVKGVGTQIALTYVLTIEDPHRFLKSREVGCFLGLRPGRRNSGESEPQKRISKEGDRYLRTMMVQGAHYILGPFGEDSDLRRWGLKLAERGGKNAKKRAVVAVARKLAVLLHRLWVSGEVYEPLRNSQKAMRAVA

SEQ ID NO: 121412 - protein, 360 aa, unidentified
MNKHKYVAMDVDSANIVAGVYDSKGVALMQCCLRNNGQVLREFFKTMSGTVQVTFEEGTQAVWLYGLIRPLVAEVIVCNPRENKLLKAGNKSDRIDVAKLGKLLRLGELRPVYQGPSSGQGLKQLVHSYEALVDDATRVKNRLKALYRGRGLNTKGETVYGQEQRQQWLTQLETKELQTRAGSLYAELDCVLRLRAEAEKLMCRAAHKHEGYKSISSAPGLGAIRTAQVLATAITPHRFRGKRQFWPYCGLAVVTRSSSDYEWVDGGTRRKRKPIQTRGLNQNYNRTMKAVFKGAALSALQQHPEFQEYYQRLCAQGTRPEMARLTVARKLAAIVLILWKKGERYDSERLNQAAPGAGQQ

SEQ ID NO: 121413 - protein, 351 aa, unidentified
MMIIGVDYHPSFQTIAFLMEETGECGEQELNHSDGQAEKFYRDLKQRGISVRVGMEATGYSRWFERLLAELGFEVWMGDPAEIKAKRVKKQKFDREDARLLLRLMRENNFPQVWVPGPENRDLRQLLWHRHRLVQMRTRIMNQLQALAMNEGYRWKKKLFSEQGRAQLEKLALAPWASRRRQELLELLERMNPTIEELTAAVEREARKRPEVMRLMTHPGVGPLTALAYVLIIGTPTRFQRGKQIGTYVGMIPCEESSARKQRLGHISKQGNSLLRFLLVEAAQAATRIHPHWRRRYIHLAMRRHKSIAKVAMGRRLAVRLYWMWRNGCEYSRSLEFGSYAGQLGTGHGVK

SEQ ID NO: 121414 - protein, 421 aa, unidentified
MKNAVASKLRQIPQGYLIIGVDPHKKTHAAVLITQDFTTHAKFKFSNTMEGLEMMLQRTKAEMIKTGCRGVIFAIETGGHYWRNLAYVLDERGIPFHFINQFTLKRRREGKGLNRRKNDYRDSEVAAQLLCTGEFTESKLPQGVYAELRAAHNAYRRLVKERTRITNLLKGLLDSLFPEFTQVFKDPCALTAMSVLSTCAIPKVISNMSEDEFVTTVKAGHHGRLMRKKLLVLHHIARTSIGIEASAGSVSMEISFLVEKFNLIKQHIHTIEGTLVRLVDETEEGKYLLSIRGLNYIAVAGLLAEIGSFKQYRNAKQLIKMAGSNPTESESAGKRGSHTPMSKHGRPVLRYCAWTSVIPMLRFNSDFRAWAKNMRERPAHANPLNGREVVGACLNRLLRLSFALAKKQSYYQMPELARTAV

SEQ ID NO: 121415 - protein, 411 aa, unidentified
MDVLYERCCGIDVHKKMVVACLITPDATGTPTKETRTYGTMTADLLEMQDWLVDAGCTHVAMESTGVFWKPLYNLMEGALEILVVNAAHMKTVPGRKTDVKDAEWIADLLRHGLLRASFIPDRPQRELRELTRYRTSLLQERSAEVNRLQKTLEGANIKLAGVATDIMGKSGRDMLAALVAGRTDAAALAQLARGKLREKLPQLEKALRGQFAAHQRFLVAQQLAHIDGLDDIIERVSAEIAERVRPFEREIEQVDTVTGIGRRTAEVLVAEVGTNLTRFPTHRHLTSWAGLCPGNNESAGKRHGGKTRKGSPWLRAALVEAAKAAGRSKKTYLGAQYRRIAARRGAKRAAVAVAHSILVIVYHILTRHEPYHDLGVTYFDERDRQAVERRLVKRLQALGYDVLLQPLTAA

SEQ ID NO: 121416 - protein, 354 aa, unidentified
MKRNSKYVGLDVHQAMTAVTVRGEGGRVIMRSVIETNERSITEFFSALGGTVRVALEEGTQAQWLYDLLSPRVGQVIVCDLRGERRSGNKGDRVDADHLSEQLLRGGLRSVYHGSGDRADLKELTRAYRNLVEDSTRVMLRLKALFRARAIRTIGSGVYKPTERAVWVAQLPGHGARLRAQTLYAQLDVLRTQRKKAKAAMVAEAKRDPAWGVLETIPYFGPVRISLLLATIGTPWRFRTKRNLWAYSGLAVVTVASAEYEMFDGRARRRGRRPLTRGLNRNHNRVLKSVFKGAATTATGKPGPLQDFYHAMLERGMREELARVTLARKLAALTLRLLKTGEVFDPTQLSRPQT

SEQ ID NO: 121417 - protein, 416 aa, unidentified
MSQKLKEQRLKELAFVGVDTHKDEHTACIANCFGQSLGVFTSENRPKELKGLLEKVDETAKSHNLKPVFGLEDVMGLGQHLARSLISGGYHLKEVNPIETERKRLKNAHPDKSDPLDALAISRVLITDFDKLPTIQSLNEIYLAIHELSNRRDSLVKEKTRIKNKLHILLHREYPYYQTMFKNTFSKAALAFWERFPIASLLKGIGVERLAQYLRANSNNTVSTKKALSILKLVDKDSVPSCLNLVHSSIIRNLVKHLRFIEEQIAIVEKELEPLVDETGMKLSTLTGVDLVTAAKLIAEIGDVNRFSSSDKLARCAGIAPQQKSSGKKLKFKKSNRGRRQLNTAIYHIALSQISRDRSGKPRNSKARDYFLRKISEGKTKKEALTCLQRRLCDIIYAMMKNKTEYRFQRTTNLVT

SEQ ID NO: 121418 - protein, 385 aa, unidentified
MGIELSVSQIGLDIHRKFSKVTARDCDGKVAWRRRVEHGDRPRMRAELAGWPAGTPVVLEGTFGWGWMSDELAAAGLDPHLASSGKVAGWRKARGIAKSNRTDADLLSELWSEHQRWWEVWLAPPEVRAQREWLRYRMTLVRLQTGLKNRIHAILHRHGILHEQSDLFGRDGRRFLNLLIAPNDATLPSSARATLKGYLQLLDHARRQIASATREFCKQVRTDPNAMRLRTLPGIAWILSYTIAAEIGQIERFRTAKHLVSYSLLAPLADDSGDEDDEPPKGRHIGRVGRRTLKWALIEAAHGAVRKGGRFREIFDRRTNGGKREKNRGYIVVAHELCRIVYVCWKKQVDYTSTPPSRPGIRRRRKRTSRSELGQPDDAMVVARR

SEQ ID NO: 121419 - protein, 314 aa, unidentified
MHAPLFVGIDVSQARLDVALRPGTAQTLSHDDAAIATLVDQLRVRHPTLIVLEATGGLEIPLTSALATAGLPVVVVNPRQVRDFAKASGQLAKTDTLDAQVLAQFAEVMRPQPRPLPDADTRALAALLARRRQLVEMLGAEKSRLLSAPTSIRKSLRAHIAWLERELEHTDRGLADAIRQSPVWREKEELLRSVPGVGPVLTSTLLANLPELGTLTHKQIAALVGVAPLSRDSGRLRGRRTVWGGRAQVRAVLYMSAVVAARFNPVIRTFYQRLHQAGKATKVALTACMRKLLTILNAMLKHRTPWRQMEVPHA

SEQ ID NO: 121420 - protein, 342 aa, unidentified
MSQSYYIGLDVSARTINLCVVNADGQVAHERKLSSNPEEIAQHILSLPLPVVRVGLEAGMLSQHIYGHLAEAGIPIVCVETRHMKAALSAQLNKTDRHDARGIAQMMRVGLFKPVHVKTPTSQRLRTVLTARQLLRNKLQDVENEIRGLIRNFGYHLGKVTARDFEPRVRELIAGSDLHIVADTLLLARRSLREQFGRLDDLLVRLARDDTVSRRFMTVPGVGPLVAVDVPSRFTRSRTVGAHFGLTPRKHQSGEVDRTGRISRWGDAMTRSALYEAAQVLLTRVKRWSTLKAWAAQVSRRRGHKKAIVALARRIGVILHRMWVDGTEFDWGKRPEAAAPLT

SEQ ID NO: 121421 - protein, 394 aa, unidentified
MKKVCGLDVHKDTVFLCILAENGQTFLREFGTLTAEVEEMRDLIKEQHVSEVAMESTGIYWMPIWRILQGHVEMKLVNPYFIKQLPGRKTDVKDSQWIATVLQKKLIKGSYIPGKHIQELRQYERRYVHICEQVTRIEQAIDRQLHRCNIRITNFTSKVGSVSVLGVVKGLVNGETTPEQLIKHIHGRITNKHKEKIAASLKGVVSGSDRFIFRQNYEELELLTRQQQECVREMEQICDTLYKEEMNLLCSVPGIQKLSAMTIIAELGVDMKTFLTAAALVGWAGLRPRNDESAKKIKSRKITNGDKYLRRILVQCAWAITRSKKCWLSGKFNELAKRRSQKKALIAIARKLLVIIWHILSKHEVYKEYKPKLSPEQKQKRIARLEKQILELQA

SEQ ID NO: 121422 - protein, 331 aa, unidentified
MSIFDNRSGEITEKRLAHPQEAIAFYQGLKEPARVGIEAGAPCQWFRRLLAECGHELWVGDAAKIRAAETRKQKTDRRDAELIMRLMVEGRFPRIWVPSEEERDVRQLLMDRHHRLRARTAAKNQLQFLAMNQGVQKGQRLWTEAGRQLLANLEMMPHAARRRDQLLGWVGLLDQQSAALDVLIAAEVKQRAEARRLMTHPGIGSQTALATVLTLGDVSRFAHARKVPSYRGLVPSEYSSGGKQRLGHISKQGSALLRFLLVEAGQTAVRFDEELKRVYKRMCARKGNRAVAKVMVARRWAVRLYWMLRNQWTYAELVRHAGEPESFRGKQ

SEQ ID NO: 121423 - protein, 411 aa, unidentified
MHNRQNYLYVGVDLHKEHHTAVIINCWQEKLGEIQFDNKPSAFSKFLLEVETYVSDGLLVVFGLEDVGGYGRALAKYLVDHERVVKEVNPALSFLERKSQVMIQKNDSWDAECVAHILVNKFEQLPDAKPNDLFWSIQQLVSRRNALVKAQSALKNKLHIQLNHHYPSYKKFFSEVDGKTALAFWKQYPSPSCLEGVSVKQLTAFLLNVSHNTCSVKKASDILKLVKEDGHTMKEYQDTRDFLVRSIVREIEFKKKEMKYIERELKQLVNLLDYQLETMPGIELVTASALIAEIGDIRRFLNANKLARFAGIAPVYFGSGGKGKTHKSKQGNRALHALFYNLAVQQVQVAKGSKKPRNPVFHAYYQKKLKEGKTKGQALVCIMRRLVNIVYGMMKYKIAYELPVVEEKEVV

SEQ ID NO: 121424 - protein, 346 aa, unidentified
MNHNPFVSCGIDIASQKFDVFLMDQDENGIHQSFDNSALGIQEYISFLEKNSYQGKVVMESTGRYHELLATTLYSNGYSTFVINPLRVKKYHQAGIQKVKTDKNDSKILAEMGIKEKKLDPFVCDAKEIRNRKKISLVRSLEDKIQEMKAMINNYASSQNVLGNSLSKFEQELQLLIKRLEKQKNNIQAEIVEEVFPADNPEAQEDKKILTSISGVSPYYAALIYCYYSFKDVKNAASWISFTGLAVSVFESGKWKGAGRLSKRGNHYLRKRNYTAAWGAYMHDGAFKDYYDYLKAKRGRTHKEALIIIGKKILRIAYSCLKNKTYFDPQILTKQMNSLVGCSNCA

SEQ ID NO: 121425 - protein, 343 aa, unidentified
MESIHYIGLDVHKKTITYCIKTITGETVREGTIRSDRQSLGQWQTELPGSWMGAMEATMFTGWIYDYLKPYAAELKVAHPEMLKAITAAKKKNDRADAETLADLLRVNLLPECTVMSKELRELRRILRYRNMVVRTAVRTKNKISGLLMEVGATYDKRRLHRRLYFNQLLERIEDVPESVVDLLKLSRSNLELFEAVQKKLIKRLGKDSQIKERVELLMSIAGVGEVTALTWVLEIGDVERFSNSRQAISYCGLCSAQKASAGKEHRGPISKKRNKHLQTILIEAAKLAPYWNPHLAAIREKELTRGNRNRATLAVARKLVEYMLAVDRRGTPFAMEELPKGA

SEQ ID NO: 121426 - protein, 353 aa, unidentified
MLTIGVDAHTRVHAAAALDDAGREVGRWRGPNSPDGWRDLLRWASALGEPRQWGVEGAWNYGRGLAQHLVAADEVVYEVNPRWTAKGRRGARRPGKSDALDARAVALTVVREAPGLPLVQQDDETAVLDLLVTEREAAVAEATRLRNQVHAHLQQLDPEYRTRVPNLQTQAGLAAIGSYAVPEDAAALDQERAAAIRRLTQRLRLALDQAEELADRIRERADARFSPLTRLCGVNLLTAGALAGILGPGRRWRTDAQLAAHAGVAPLEASSAGVTRHRLNRGGNRRLNAILYRIALTQARHSPEGRAYLDRRVAEGKTSREAFRALKRFLVRAIWRLWQECLDAETDVPAVAA

SEQ ID NO: 121427 - protein, 314 aa, unidentified
MEESVFVGIDVSKARLDIVMRPSGSKESIANEEAQIAELVKQLSTLPTALLVVEATGGLERRVVRALAAAELPVIVVNPRQVRDFAKATGRLAKTDKIDAEILAHFGEAVRPALRAVPEPASEDLRAQIARRRQVTEMLTAETNRLDHSAKAVGKRIEAHIRWLKAELDRVDSELDQSIRQSPIWREQEELLKSVPGIGPVISRTLLAELPELGKLNRKQIAALVGVAPLNWDSGMMRGRRAIWGGRATVCAALYMAALVASRCNPKIREFHRRLRAGGKAPKVALVACMRKLLTILNAMIKHRTRWSVIAETQ

SEQ ID NO: 121428 - protein, 347 aa, unidentified
MNFYTKEHLFYCGVDLHARSMYICVLDQSGQILLHRNLPADPQRFLDVISPYRQDIVVCAECMFSWYWLADLCAQESIPFVLGHALYMRAIHGGKAKNDKIDSGKIAALLRGGMIPQAYVYPAPMRSTRDLLRRRNYLVRKRADLLSHIQNTNSQYNLPEFGKKITCRSHRTGVVEHFPDPNIQLSIKTNLELIDHYDKLINALELFVLNNARGHDPGALYLLQTAPGIGKILSLVILYEIGDIDRFPSVGNFVSYARLVACAKESAGKKQGTSGRKIGNMHLKWAFSEAAVLFLRKNPQGMKYKKRLEQKYGKSKALSILAHRLGRATYYVLRRQQPFDMKRFLSH

SEQ ID NO: 121429 - protein, 401 aa, unidentified
MQETQQHDAIDIFIGVDVGKGQHHAVALDRNGKRLYNQALPNDEVKLRALIAELKTHGRLLFVVDQPSTIGALPVAVARAEGILVAYLPGLAMRRIADLHAGEAKTDARDAAIIAEAARSMPHTLRSLRLADEQLAELTMLCGFDDDLAAQVTQTSNRIRGLLTQIHPALERVLGPRLDHPAVLDLLERYPSPSALAAASEKTLANRLIKLAPRMGKNLAAEIVHALNEQAVIVPGTQAATIVMPRLAQQLAALRKQRDEIAAEVERLVLAHPLWPVLTSMPGVGVRTAARLLTEVAHKAFASAAHLAAYAGLAPVTRRSGSSIRGEHPSRRGNKVLKRALFLSAFAALRDPVSRAYYSRKIQQGKRHNQALIALARRRCDVLFAMLRDGTIYQPKSAPNA

SEQ ID NO: 121430 - protein, 408 aa, unidentified
MIKGIVERVAGLDVHKDTVVGTVLLENPGGDPLKETRSFGTMSQKLKELASWLTQQGVELAVMESTGIYWKPVFEALEEVGLKVFLVNARHVRNVPGRKTDVKDSEWLAELARCGLLRPSFVPPKDLRELRSVSRYREKMSGMLASEKNRLQKILDECGIRLSSVVSDINGVSARKMIQALINGMPITEIPELAVGSLRGKKEELLSALEGTLSERHRFLLRQIESHIRFLSDELAQIDTLLIEGMAPYRQEWQRLQTIPGLDQIGAALLLVEIGTDMERFGSAARLSAWAGMCPGNNESAGKRKSGRTPHGNKHVRQILCEAANCARRTKSQFSGLYQGMVIRRGHKRTIVAIGHKMLRISFALLKNGEHYRDPGIDYEKLVVQRNGPRWLQALKKFGLLQREPVTA

SEQ ID NO: 121431 - protein, 505 aa, unidentified
MKTPAPVPNPEAKAKTRRKPKAKRKTRQADQWQGTLPVVHPHAAGIDVAAASDLWAAVAPQAGRSAKETIRPFAPTTAGLRKLADWLAKESITTVAFEATGIYWLPLYHLLSERGFQIVVVNPRDTKALRKKTDIADAQWLQYLHGVGLLKASFVPPAEILGMRGIWRHRDDLVRLAGSQVQHMQKALDEMNIKLHFFLDDLTGKTGLAIVDAILAGERDPVQLAKLRDYRCQASEEAIAAALEGQWLAHCLFILGQARAAWRQTQEQIAACDALLEKQALALLVAMGKTWDEAAAKENPAGKEIKRKSKKANKTRQPTKNEPAGSAWPELCRALFGVDLMKVPGIGVGVVLSLLCEIGVCWSAFGSAGQLSSWMGLCPNNKVSGGKVIRRGVMPGQQWLRNMLRHAAASLARHESVLGEHYRRMRGRMGPIGANTIVAHKIARILWHLVTHQQEYDESVLTKLDAGRDARRLARLNRQAQALNLRLVPFTAPPTESHPPVQEAA

SEQ ID NO: 121432 - protein, 346 aa, unidentified
MAIVGGLDIHRRQITFDYLDTATGETCRGQLSPATRLELRAWLDQFDPQQASFALEATTGWRFVTEELERVGIDVHLAEPADTRALRGPTRRAKTDRTDARHLRELLRAGTLPESWPPPAHIADARTQVRLRRALVGARTGWYQRIHAVLFHHGLPDRCYLLTADGRAWLASIQLPTVARGAVDLALRMIDHLDAELDTLDTALARIARAQPGCKALTRRYGIGWLTAVAIWAEFGDVRRFANSRQAVRFTGLDITISESDGRRARGHLARQGAPILRWALHEAAMCAARPGSPDHAYYLAVKQRLGGKRAALSVARKLAREAYHTLHDLGDQALAPVAVQLPTAA

SEQ ID NO: 121433 - protein, 340 aa, unidentified
MSEITTIGLDLAKHVFQVHGIDAQGTTVVRKRLRRGQVLAFFSRIPRCVVGLEACATAHYWARELGALGHEVRLMPAQYVKAYIKRNKHDAADAEAICEAVQRPTMRFVPVKTAEQQAAQLLHRGREQLVRQRTMLVNALRAHMAEFGIIAAQGLRNVGQLIAIVRDDGDTRLPDMARQVLQVLANQIEQIETTVAALERQLLAWHKTNPVSQRLASIPGIGPIIATAIATTVADPKVFRSGREFAAWLGLVPRQNSTGGKTRLGGITKRGNRYLRRLLINGASANLLRSKATKADPWVIGLRRRRPPLVVAVALANKTARIAWAVMLREKEYQPRAMAA

SEQ ID NO: 121434 - protein, 408 aa, unidentified
MNTLYVGIDVSSKSNVVYFMLPDGSKHCNFSVANSHTGSSQLVKRILSAMTSCSLDTVLIGLEATSVYGDNLVYFLREDAALARFNSKIHVLNPKQVSKFKEAYNDLPKNDLIDSFVIADCLRFGRINKEVYIGDYRYKALQNLTRARYFAVSNLIKEKQRFMNILFKKYSTMTQEKVFSDTFSTTALAVYDEFESAEALADMDLHELTAFIMEKGKNRFPNPNAVAKAIQKAARSSYRLPKTVNDSVNQVLSISITSMKALESQIKEFDKAIKAQMELLPNVLISIPGIGPVYSAGIMAEIGDINRFNSQAALAKYAGLAWKQHQSGGFESEVTRLIPSGNRFLKYYLCEAAFSLVRCDKEYSDFYHLKYKEVNRCQHKRALALTARKFVRLVFRLLKDNRLYCPAK

SEQ ID NO: 121435 - protein, 354 aa, unidentified
MRKMQEFFVKGNRIFIGLEDSKRTWKVCVRCERMIVHEASMPAKYEVLRAYLANRFPECEVTVLYEAGFQGFWLHDLLEADGHTCIVTPANKVTEAKDARVKTDKRDARRLAKNLENGDYVSCHVPDRERREDRQISRTLEQIKKNIIATKNRIRGLLDYHGLNEGLKKIGAWTDRDYLDLSRLDLPHSLKVSLDADLHLLETQFTLRKQLQAELRALCDKERYRMPVRIKSSPSGIGWFTAIRLSLEWGDLHRFKTGKHFASFNGLTTSEFSTGDTVRRGRITGQSSDAVRSWLIECAWRAIKKDPVLMDKYRRVRHNSGSSKKAIVAVARKLAVRLWKLETTGQLYCPGVIE

SEQ ID NO: 121436 - protein, 345 aa, unidentified
MKPMYYIGLDVHKQKISYCVKDSSGCIHSDGWIPATRHDLDCWMKNLPRPWSAAMEATMFTSWIYDHLKPHATALKVAHPLMLRAIAAAKKKNDRIDANKICDCLRCDFLPECDMAPTAIRERRRTLRYRNLLVRQLVQMKIKISTLLMEAGVSYNKQKLHKAGYFRELLASNPDINESLRSLLRQCREMVVRLSKMEAALIQSLQQDRLLVERVERLMSIPAIGPITALTWALEIGEVRRFSSIKKAISYCGLCGAEKSSGDTVRRTPLSKQRNKHLQTTLIEAANMAPRYSPTLALLYDREKQKGNANRATLAVARKLVAYLMAVDRGQTHFFVIDQETRTAA

SEQ ID NO: 121437 - protein, 424 aa, unidentified
MKVTFQTCCGVDVHKSFLVATIIKTTGGIEPSYQKRRFSTFNNSILEFKKWLLENECLYVCMESTGKYWIPVFNLLEDEINVTIANPKWVKAVKGNKDDTKDSKWIGDLFRLGLVRGSYIPCKKIRILREFTRYRYKLVSCRSSEKNRYQNALTVCNVALDSVVSDVFGKSSTSIIDYLLEQSGTSIDHEMIASKLLKRLKAKEDAVIESIEGYQMTDSQKYRMHLVRAHMDYITAAINDVDSEIESLISSDPDYQNAAELLYTIPGVKHDSAITIISEIGIDMSQFSGSKRLCCWAGLTPGSNESAGKKKSVRITRAGVYLKPALVQCAHAAVKSNKSPYYKKKYESLVKRRGKKRAIIAIARMILTAIFQMLTTGETWNPCDLYKIDMPEALLEKQKQKAIKQAQKLLIREGLLPPTEPIAS

SEQ ID NO: 121438 - protein, 343 aa, unidentified
MQTITTIGLDIAKSVFQVHGVDAAGEVVIRRQFKRRSVLAFFQKLPPCLVGIEACASSHYWSRELQALGHTVRLMPPAYVKPYVKRQKNDMADAEAICEAVTRANMRFVPTKTPEQQSCLMLHRTRHLFIRQQTAVINSIRAHLAEFGIIAPVGRKGVAELLHIVADPSDKRVSEVARACLAALGTQLLSLKQQIVEFDRMIMAWHRSSQTSKRLHYIPGVGPMLATALVASVADPRTFRSGRNFSAWIGLVPKQHSSGGKDRLGSISKQGDRYLRSLFVAGALAVIRYAKIHGTKHRPWLTALLGRRPTKVAAIALANKIARMAWAMMAKGERYRNPVALAR

SEQ ID NO: 121439 - protein, 392 aa, unidentified
MIYVGIDVAKDKHDCFITNSNGEVLFKSFTIPNNRAGFETLFQRIEAVSDDLTKVKVGLEATGHYSYNLLGFLLDKGLTTFVFNPLHTNLYRKSLSLRKTKTDKVDSRTIATMMMSDMNLKSYSDTSYHNEELKSLTRYRFDKVKERAKLKSSVSRLVCILFPELEKLVPTLHMASVYALLFEFPGADAVANAHLTRLSNLLSESSKGRYGKETAVMFRDTARHSIGSHMPAKSPELKHTIKLIQELTIEIDEIEAAIKRIMDEEIQSPILTIPGISYRMGAMIIAEIGDFSRFDSADQILAYAGMSPSTYQSGQLDNCYSHMEKRGSRYLRYALYHATKYVCHWDKSFGAYLEKKRSEGKHYNVAISHAAKKLVRLIFAMEKSRKAYLPTA

SEQ ID NO: 121440 - protein, 322 aa, unidentified
MKYIGIDVSKATFVVAYSSDKGGEIRTFDNTTAGIRKFIGTLLKEGNIHCVMEATGNYSALLLYMLNVAGITVSMENPLKVKNFAKAMLSTVKTDKSDARLIALYGEKMNPLPFKVQGEAILRLRQKRTVIRQLTKQITAMSNLRGSLACLPVPDKGATHTVDETIRFLEKKRDRLQSELTDLVEAEFSRQLALLTTIKGIGITLATALIITTGGFTYFHNAKQMSRYLGICPTYEQSGTSVNIRGHINRNGDAYTRGLLYVAAWTASRFNAQCGETYTRLKQNGKSGKLAMIAVANKLVRQAFAVVSHDKEYIDGFVSNKP

SEQ ID NO: 121441 - protein, 350 aa, unidentified
MTSLSEIVDVVIGVDTHVHTHSVAALDARTGGVLGELTVEATPDGYEQLVAFADEHSALRAWAIEGTGGHGSGLARLLGDRSEVVVELDRPERTKRRNGAKSDPLDAIRAAREALSRAKLGTPRSAGDRQALSVLLAARRSAVESAGDAQRQVFSLVIAAPEVLRTKFRGKKIPAMLSTATRLRVSSAWDVETATTATVLRDLARRSLDLSAEAARHEKAIVAIVRSWRPELLDQPGVGPIVAATLLCAWSHPGRVRSEAAFAMLAGVAPIPANSGQTTNRFRLNRYGDRQLNRALHTVVLSRLRYDKTTQVYAERRIAEGKTPREIKRYLKRYLARDFYRLLENPPSAA

SEQ ID NO: 121442 - protein, 414 aa, unidentified
MESVYRSIAGIDVHKKMLAVVVRRNCGEQVAYDRRQFRTNRADIQHLAAWLQVHGVSEVVMESTAQYWRPVWNGLEAHFRLHLTHPLKTLAPRGRKFDFRDARRLADRWSAGDLQESFIPGCEQRAWRWLTRRRVQLKKEMSVAYSHVEGLLEQGGIKLSAVVSDLFGVSGWAMLEGIVQGVTDVEVLAGEARGALRKKVSQLKAALAGQLKPVYRLVLRQQMEQVRLLRRQAEEINQALAEAMQEHLAALHRLTKIPGVDLYAAQELLAEIGPKAAAFASAEQFASWVGVCPGSQQSAGVNYSHRSANGNRYLRRLLCQIAWAAIHTKDTFFASLFARLKPKVDGKGAAWAVAHRIAKIVWLVLHQEVEYNEQGSAPPNERTLVRKFKRMLKEFASLGLDVRALLDQQLPSTT

SEQ ID NO: 121443 - protein, 376 aa, unidentified
MKKELYLGLDVHKDCIITAVAQEGRKGEVRDTGVISNDLHALEKWVGRLRKAHGSDVVLRACYEAGPCGFGIARRLKQLGVECEVVAPSLTPKRAGERVKTDRRDARKLARLLRAGELSPVYIPESTDEAIRDLCRARTDAVDDRCRSRHRLKGFLLRHGYHYQGKSSWSAAHERYLRELVLPHPAMKVILEEYLQGIAAAGERIARCEEAMRALLEKWHLRPAVKALMAMKGFRTVAAMILVSELGEVHRFSHPRQVMAYLGLVPTENTSSDRRRQGHITKCGNAHARWLLVECAQHYATPPKVSKELSRRQEGQPREVRALSWKAQNRLHGRFARLSARRLQRNKALVAIARELCGFIWELLHMQPCYQAQPPS

SEQ ID NO: 121444 - protein, 312 aa, unidentified
MNEFVGIDVSKAKLDVCAHASGASFTVENNEAGLQQLCERLATMGPELVVLEASGGYERLCAAALAHAGLPVALVNARQVRAFAQATGVLAKTDRLDARVLAHFAAAVRPALRPLPDAQSQALDELLSRRRQIVAALVAEKNRLALARAPLVKRTVREAVRTYERMLDLIDHELDGLIQASPLWREKEDLLRSFKGIGPVSARTFLADLPELGTLNRKQIASLAGLAPIARESGAWRGRRSIFGGRGQVRAVLYMATVCAIKTNTVIRGFYHRLREAGKPAKVAIVACMRKILTILNAMMRNRTRWQPPLNA

SEQ ID NO: 121445 - protein, 357 aa, unidentified
MHTTQQISFAKVHFFIGLDAHLRNWKVTIRLDGLELKTFSMNPSPLELITYLQKHYHDGIYHIVYEAGFCGFWALRIFRQHNIDCIIVNPADVPTTNKEKVNKSDPIDSRKLARTHENKDLHGIYIPDTFHEELRALMRLRYRIIQSQTRIKNRIKGLLYCQGIQIPLQFSGRARWSHPFILWLQQLQMKTSAGNFTLQNLILQLKEIREHNKNVLKQLRTEARHPDIAPIMKALQGVPGVAFITAMYLYTEIMDMNRFANDNHLVSFVGLVPSTQTSDENVYVNGISVRQNPFLRTMMIEAAWTAVREDPAMTLKFKELSKRMKSQDAIIRIAKKLVTRVRHVWLKQEEYVYALVA

SEQ ID NO: 121446 - protein, 420 aa, unidentified
MARKVEIVYPVCCGMDIHKSFIVACVAVTDEHSHTEHHIKRFSTFSGDLRRLADWLAFYHCRDVCMESSGKYWIPVFNALEKTCNVCLTHPKYVKAIKGKKTDKKDAKWIAELFKCDLVRSSFIPPPDIRQLRDLCRYYVKLTSFVSSEKNRAQNCLTVCNFKLDDVFADVFGKSATRVLDALLEHGNGNFELDGLLSSKCKSSPEKVRAALDGELNPMQTEKLFLIRRHMNDLSSLKESLETLIYSLAAKFKPQIDLLLTVPGISTQLTAIRILAEIGADMSVFETAKQLTSWAGLTPQNQESAGKKKTTRIGRAGAYLKPLLVQIALSCGKSDKSPELKNKYLALKKRRGGKKAVIAIARKLLAAIWHILSKNQPYNADLYTSSDQTPVAREFTTAQAVAFLRGKGFVIVDGETGEVA

SEQ ID NO: 121447 - protein, 316 aa, unidentified
MNKLVVQNLNVGVDVGKDFLDIHIRPLGEYLKVSNDKKGIGEAIKRLRKLTVERIVIEATGRYEIAFVSACAKAALPFSVVNPIHVKRFAGAIGRKAKTDKLDAALIAHFSEVIQPALSTLKPENIQKMADTVARRNQLLEMQTREKNRLQIMPKTVQSSIKAILTVLKKQIQKMDGELADLIESCPEYQAKSELVQSMPGIGKVSAAALISYLPELGMMNSKQVAALVGVAPMNKESGRYKGKQVTQGGRHQVRTVLFMAMMSAMQCNAKFKATYERLVAAGKPKKVAIIACVRKMVVILNSMVRDGVIWEEKAA

SEQ ID NO: 121448 - protein, 330 aa, unidentified
MKKEQVFIGIDVSKATLDVCTLDENGAKHAQISNTTKSIKSYFKKLKKELNYVECLVCMENTGQYNWPFYEVLEHLDIKLYVVNALHLKRSMGMVRGKTDKADALRIADHIKRHHSKYKTYQVPRKQIRAIQCLLALRRRLMRSKKTFLVPMNELVKINPQMAKLIKTQSKKTILSLTIRIREVEAQIKKLIKEDPKLSELQKYITSVPGVGKVVTWNLLVKTNEFKQLYDPRKLACYAGVVPFEYQSGTSIKRKPRVSNMADKKLKTVLHMASIRAVRLEGELRDYYLRKTGNGKNKMSVLNAVRNKILARVCAAVNNQRVYQKHLVLS

SEQ ID NO: 121449 - protein, 425 aa, unidentified
MSLEFVFCTRFCGLSVVDTFSHIFIKKGSFIMKLVGIDIEKKHFFCIMDKDSGEVLLQPSSFSNTKDGFDSLIQKLSSYSKDSILIVMEDTGHYHFALLKYLLEKNFTVALINPKTTDYTRKIQNGITKNDKLDTLTICDVLDTPVRKKQYRITKVNSFDLYEQKQLTRHHHNLKEELNVYTNRLQKCIDIVFPEFNSLFSSKYGIIYMNVLKTFGSAENIASTDIRTIRKCFEIKGRGNRISLTAQQLKDSAKSSIGISSAAEVIKIKHLISQIELINEQLAETDKKIEEFSIQNNSPILSIPGISHFFGTSILAELGEISNYSKPSKIIKAAGVAPYHYESSQYNAQHTAITKKGSPYLRKTLYQIILPVINNNNPVFKQYYDLKISQGKGHHCACGHCVRKLLRIIYHLSSTNQQFDDALLR

SEQ ID NO: 121450 - protein, 333 aa, unidentified
MIQENVLGIDVSAATLAVVIQRGKRRYPVAIFDNDPVGHRKLIQWATKGGKHARVGVEATGVYSLDLTLALHHHPKIEVMVINPRASRNFAGAMMKRAKTDPVDAEVILEFVLRMPFVGWSPPCEEVLQLQAITRRIYQLKKALNREENRLHADTHRQALGAIITTDIEVNIRHLERRITRLEQQGLALIASVPELEAKLQHLISAKGIAEASGLRLLAEVLVLPDDLGPEQWVAQSGLDPRPRESGTSVHRPRFISKAGNKYLRAALYMPALVAIQHQPNVKAFYEKLIAAGKLPMQAIVAVMRKLLRCIWAMLKYGQDFEGEKEAVAGPVE

SEQ ID NO: 121451 - protein, 350 aa, unidentified
MNYVGIDLHKNTIVLCVMNQDLKVLTRRTLACCEPEAIREYFAGLGPFRAVVEATASYEWLVALIEPLADKVILANPKKLRVIDESVKKTDQLDAQVLAEFLARDMVPQAHRPSPRQREHRALVRHRQYLKQCATALKNKMRRIASDYNADRNDLFSAEGWKRLEQVKLSASDRFVLDQLHAQWQSLEKQLWELAKRLKEFAAAAPPREAEARAKLATIRGVGPVTIDVVVSELGDVSRFPSSKAVTAYAGLAPAVRQSAGKGKNLGITKEGSPLLRWALVEASWRVIRQSMAWERIYERIKKRAGGKKAIVAVARRLLCVMYAMVRDGTNYDLLKVGEPPPQSALRAAV

SEQ ID NO: 121452 - protein, 453 aa, unidentified
MGTVKTLSRGDRNRNRRLSRMRELVPSTSAVVGLDLADRTQVAAVVDHDARVLARRVAHCRAWQVEALLDWALEQARLAGFSSVTVACEATGHRWRVVEKLTAERGLALVCVQSVLVWRAREREDLTWDKSDPKDAMIIARLATQLHCYEPERSDETWSRLRHLGARRSRLIEESVACGHQLRELLECVWPAALETAKHPLESVTWCAAMTVVLGKAAGGDLSPVRRMGPDRFLAAVRRELVSWGGQRICLRIVRALFAALGDVVGLVRHRYGAFERAGFVADDWRATRAGLAEVEARMVGVLDELELTGLVTSIPGLSAVGAAAVLAESGDPARFTSARALVKHAGLCPRDNSSGSHRGRGRLSGRGRPGLRVAAWRAGWGAQHANPVLAARYAHLTRREHNRLNRGQARAACAATLLRWIHGVAVRRVPWDADIAAGTRSAARGGGIAAAA

SEQ ID NO: 121453 - protein, 400 aa, unidentified
MISVGIDVSKEKSTICILKPYGEIVSKPFEVCHTEKELSELTSMLLRLNDDVRVVMEATGIYHLPVLCYLKEKGLFVAVVNPFEMKEYRCQGLRRVKTDKQDAVTISNYGIDHWYRLKEYEPEESIYAELKLLGRQYRHYMRMRVESVLELTHLLDYTMPGIKTLLKGWNETNGKDKLGDFVEEYWHYDNITKKSEEQFIESYQKWAKEKGYHQSQDKAAKIYMLAKEGIPTVSSDTPSTKMLVQEAVRVLREIDNTLMTILTQMQALAKSLPEYPVVRAMGGVGNVLAPKLIAEIGDVRRFHSGKALIAHAGIDAPPYQSGQFTGRERKISKRGSSSLRKIGYEVMRCLKTHKEPEDAAVYRFILKKEKEGKSKRAAKIAGLNKFLRIYYARVMEVYQK

SEQ ID NO: 121454 - protein, 341 aa, unidentified
MELYAGLDVGLKVTAICVVVGGGRLIWRGKETSRPEAIARALVPFRDGLVKVGLESGSLSPYLSRGLGALGVPVVCMDARRAADAIRSRRVKSDEGDARALAEMLRTGWYTPVHVKSESSHRIKALLGARDQLVRAKRALGNQIRGILRPFGVRLPARQGTKRFAAAVEEAVAGDAVLRVAVRSLLEALVAIEGEVARLDEAARDLAGRSQVCWRLTSIPGVGPITALAFVAAVDDIERFSRLRDLGAYLGLTPGRYQSGATDVRLGITRQGDTMARHYLYEAANVLLSTVRRRSVLKSWGLQVLKRRGPKRARVAVARKLACLMGRLWREEAHFEPAPAG

SEQ ID NO: 121455 - protein, 444 aa, unidentified
MSTLSILDTHAAFVDVGSEHMHVSVAGGPPQVFGTVTTQLHALRDWLVQQGVRSVAMEATGVYWLPLYGVLEAAKLDVRMVNGRQMRNLPGRKTDMKDCQWGATLHAHGLLHAGFVPPAHIRRLQDYLRLRVDHISMAGSHVQHMQQALERMNIKLHDVISSLTGASGLAVIRAILDGQRDPQRLLPLCDVQIRRAKAERVTESLRGTWADEHLFALRQALQSWDHYQGQIAEVDRQVQALLFVMCSDPTASEPATPAQCTSRRPRKRPGVNAPAIPDLRNILVQICGQDLTVLPALTEYSALQLISEVGTDLSKWPTEKHFTAWTGLAPGSHQSGKRKGSVKRNRNRAGRLFCVLARSLARSKDLALGGFYRRMSARRGGLVANNALARKLAALFWRVMVKGMDYVEEGLARYEAKVIESKQRSLRRLARQLGQELVPVRAPA

SEQ ID NO: 121456 - protein, 391 aa, unidentified
MSQYFVGIDISKYKHDCCIINAADQSIVAKFTIGNNKDGFNELLTSLQSLSTPEDIRIGFESTAHYALNLELFLEKAHHSFMEVNPVLISEYKKSTSLRRTKTDSIDCESIARWLMTIEYKPHSKGFYHAYSLKSLTRLRDRLIRQRSFYLVKITNVLDHTFPEFKPFFQERFSKTALYLLENYGSAEKMARMNSASYDNLRRISRGKFTPQKFIELKALAANTVGVNNSIFDTELTCLLTLYKEAANQISVLEAQITELIEEVHPHYMSIPGIGPISAAVIYAEYGDISNFSSPAQMLAFAGLEPGISESGTESHKGRMVKRGSSQLRYTLMNCALPLIRFDVTFATYYAKKRSEGKPHRVAISHVTKKLVRVIFALERQNTDFVATALR

SEQ ID NO: 121457 - protein, 358 aa, unidentified
MVTGPKHQKEKRSMEHFAGLDVSVNETSVCIVDDTGRIVREAKVASEPEALLAALKNRAYHFKRIGLEAGPLSQWLFSALAEAGLPVICVETRHMKAVLKAQINKTDRNDARGIAQMMRAGLYRPVHVKTLRSQKLRMLLTHRKLLQSKAIAIENDLRGTLRNFGLKVGVVGKVKFEARIHELVENLPDLAVLVEPLLVVRRVLREQIVILHRRVLAIVRDDEVCRRLMTTPGVGPVVALTYRATVDVPARFRKSKSVGAVFGLTCAKYQSGELDWSGRISRCGDEMMRSMLYEAAQSMLVHSKKWSWLKAWAMQIARRRGMKKAIVALARRLAVIMHRIWVDGTEFRWTREQAAAAA

SEQ ID NO: 121458 - protein, 462 aa, unidentified
MHKRGNKGGTKSKRPSRQSLPVLRPKVAGIDIGSREHWVCGPALPGGGVNVRVFFTTTSSLNQLADWLIEQGVESVAMESTYIYWIPVYELLESRGIEVVLVNARQLRNVPGRKTDMQDCQWLQLLHSCGLLRGSFRPGESICRLRSLHRQRCNLIEQRSRTVQWIQKSLDQMNVQVHRAVTDITGKTGMLIVRAIVDGERDPLKLAAFRDQRCKKTEEEIAEHLTGNWRDEHLFNLASALRLYDVLQAEAELFDQHILEVLIELQPPQRRHDNVPAHPNPQKRYDIKHRGEQAQRNELWRFAGCDLTQIDGISPSTAAIVLTEIGIDLSDFPSEKHFVSWLHLAPRRPISGGKQLHKRRNGTGSNRIAGALRIAALSLSHSKTALGAYYRRTARRKDGKTAVFATARKLAQLIFRMLRYGQDYIDIGERAFEEHFRQNHLIGLRRAAEALGYTLTSHASGG

SEQ ID NO: 121459 - protein, 341 aa, unidentified
MEQATTIGLDIAKHVFQVHGADAAGHVLFRKRITRGKLLGFLAAQAPCVVAMEACAGAHYWAREVGKLGHRVRLIAPAYVKPFIRRQKNDAADAEAICEAAQRPSMRFVPVKTEEQQANGIVFRARDLLVRQRTQCVNALRGHLMEYGHVFPKGITHVETLVAVVEDPQSSLPDSVRVILKLLVDTFTALEAQITALDAEINQRSKSDPTARRLMTIPGVGPIASTAITALVPAAEGFPAGRDFAAWLGLTPLQKSTGGKQKLGAVSKRGERTIRRLLIIGASAVVQQASRRGAPKGSWLAQMLARKPKMLVTVALANKMARIVWALLVKGGTYRTPTAAA

SEQ ID NO: 121460 - protein, 410 aa, unidentified
MTDNATTPVRFIGLDIHKHYFVATGINAQQEVVLGPQRVPNSRMQAFIQKRLTPYDALVIEMTTNTWEVHDLLVGHVHSVTVAHPPHVALIARAQVKTDKKDSLVLAQLLAAGLLPGVWIPPQEVRDLRALIAQRWKMITLRSVAKNRLHNVLHRHQWLPPEEGKLFSPDTRDWWVALPVSPAEASNIECDLATLDFADQQAKRIEAAIQQLAAEEERLPLLVQVPGISLITGMTILAAIGEIERFPSAKKLVGYAGLGARVSQSGTHYRTGRITKAGRKDLRHAMVEVARSASNTHPRWQAELERLEPRIGRKKAVVAIARKLLVAVWHILTHQQADRFASDWRVAAGLHLLAYKIGVRRLPEQSAKHFVRNQLDRLGIGADLTHVPWGTKQVKLPPSRLQTSEEGLPN

SEQ ID NO: 121461 - protein, 334 aa, unidentified
MDQPIIIGIDLAKSVFQVHGVSAHGTAVLRRQLRRGQVLAFFSRLKPCLIGMEACSGAHHWARELVAVGHEVRLMPAAYVKPYVKRGKTDRADAEAICEAVTRPTMRFVPVKSAEGQAALLDHKARDFLIRQQTQTVNTIRAHLTEFGIVVAKGIHNVDRLLAAAEQAPEAARPALDLLADQLRDLRERIETVTKRIEAAQKADPLARRLATIPGLGPIASSAFAVTTPDVAVFRSARDYSAWLGLTPKPHSSGGKERLGRISKAGNRYLRRLLYLGAMAQIAARRRGRPGDDRLWGMLQRKPVKVVAVALANRMARIVWALIRTGESYRSAPA

SEQ ID NO: 121462 - protein, 434 aa, unidentified
MSQQNISTPSTPPVYAAFVGLDWGDEKHALSLCAAGATVIERTTLPQTPEALADWANVLRSRFPSGKIALCLEQARGALLAGLMQYEHIVPYPVNPKTLACFREALYPSRSKDDPIDADLLLDLLLKHREHLRAWQPDTVQTRQLALLNEQRRHFVDHRTALTNELLSHLKAIFPQALELVGQSLASRLATDFLKKWPTLQAVQKVKPAVLRQFYYGHNSRSQELITGRLERVKNAVALTSDPALLAVHSLAIQTLAGQLQALRPFLDQHEQQIAELFAAHPDAALFDSLPGAGSALAPRLLAALGSDRSRFPDALSIQCYSGIAPVTERSGKTQYWVHLRWSCPKFMRQSWHEFANCSLKFSTWARACYQDLNKRMDHHEAIRKLAYKWQRIVWRMWQERQPYDETRYLRSLQKRGLKIYADLVPQPIAPAGE

SEQ ID NO: 121463 - protein, 345 aa, unidentified
MPIVGGLDIHRKQITFDYLDTATGEVRRGQIAPADRAHLRAWLARFAGRDDVACALEGCTGWRYVAEELAAAGVTAHVAEPADTAFARGRKRHAKTDKTDARHLRVLLEQGRLPECWIPPAQILECRALLEAYHDLRREHTAWIERIHAVFFHQGAPRLGEGALRTDRGLAALRQAAACHLSPAGQLQVATALDMLAAVEARMEVLRQQLLHAARHLAGARALQARLYGVGPLAGLAMTCWLGGAGRFSSSRKAVRFAGLDVTVYSSDGRRSPGHLSRQGPEILRWVAYEAGKTHGRASAPGHDYYAQVKDRQDGKIAALSQARKLIRQACHILAELGDDALTAA

SEQ ID NO: 121464 - protein, 373 aa, unidentified
MMQYTTKYVGLDVSKDTIAVAIAEAGRERARYWGTIQNEPAAVRKLIRQLGKKEELEVCYEAGPTGYGLYRLLKDMGVSCVVVAPSLIPARPGERVKTDRRDALRLAELHRAGELTGVYVPTAEDEALRDLVRARDDAREDVHRAKQRLIKFLLRHGIRKPEHLKNRWTKRYRAWLGTLKFELAAQETTFREYLHAIYEAEERVRRIETSLLEVASEGAHAKVVEALQGLKGVAFLTAVCLVAEIGRFHRFRNPRQLMAYLGLVPREYSSGQTVRRGKMTKAGNGHARRLMVEAAWSYRHQPGVKGALAKRLEGMDADIQMISWKAQTRLYGKYRRLVARGKQKNVAIAAVAREFVGFVWAVACLAESGQQSA

SEQ ID NO: 121465 - protein, 340 aa, unidentified
MQLYAGIDLHSTSNHLGVINDNDRRIFRKKLVNDPVVILEALEPFHQHLKGVVVESTFNWYWLVDALMDQGYQLHLANPSAIRKYEGLKHSDDTHDAFWLAHLLRLGILPEGYIYPKTQRPVRDLLRKRGHLVRLRTSLILSLQGIIQRNTGLRVNVNQVKKVTTDEVLPLLAGQEDLEFSGRVSKESIDFLSCKIRQIENSVQKKVKLKQAFKYLPSICGVGKILSLTIMLETGPIKRFARVGNYVSYCRKVPTQWTSVGKRKGKGNKKNGNRYLAWAFSEAAEFARRYDPDARAYFNRKASRTNRMVAHSAMAHKLARAAYVVMRDVVPFDAAKLFAK

SEQ ID NO: 121466 - protein, 339 aa, unidentified
MQVTTIGLDLAKNVFQVHGITEDEEVVFNRPLRRAQLLPFFSKLDPCLIGMEACSSAHHWARELAALGHDVRLIPPIYVKPYVKRGKSDAIDAEAICEAVTRPTMRFVAVKTVEQQALLSLHRARDLLVRQRTQLINGLRGMIAEFGICIARGLARVIGFAEDILAGEVLDLPEIANEVIHNLCEHLMALHRRIRWYEDRLKLVAKEDARVRLLRTIPGVGAVTASAIIASIGDGHQFSNGREFAAWLGLTPANKSSGGKEKLGRITKMGDQYLRSLLVVGMTSLVRQTKSHPERASKWLTSLLERKPARVATVAMANKTARIVWAVLTRNEPYTPHTA

SEQ ID NO: 121467 - protein, 351 aa, unidentified
MQITTVGLDLAKRVFQVHAVDAFGSVVVRKALRRSQVLPFFTKLPPCLIGMEACGTSHHWARELTDLGHKVRLMPPAYVKPYVKRGKNDAVDAEAICEAVTRPTMRFVAMKSAEQQAALSLHRSRNLLVKQRTQLVNMIRGLLAEFGIDIPEGVERALGLARTIAAKETTPDVPAMAMQVLGLLCDQVLDTHVRLQAIDRSILALQRSDEVARRLSTIPGIGPVGATAFAASVADPGLFRSGREFAAWLGLTPSQNSSGGKDRLGRITKMGDRYLRKLLVVGATSLIRRARSKPETADPRLVALLARKPVRVASVAMANKMARVVWAVMARGEIYQCRHVPEPCGVKLGGR

SEQ ID NO: 121468 - protein, 314 aa, unidentified
MHYVNNTELSSHEETRCQFNGGTGAIKLGINVHQDFYVVVEQVGGSNPKPPQRFRKEAFLHWAARLKQKSGVQVHAVYEACGFGFSLQRKLSALSINCYVVCPQKLDEQNRRVKTDGLDAKALCLKLDRFGQGNRDALAIVRVPSEEEEQARAIHRQREQLVKARKQLEAHGRSLMVNHGLEPVQNWWKPRNFAALPAPQWLKDLLANSQPILVALQQKIVALTVQLQSAASPDQPRGLGKMTSVIIDREIGDWNRFNNRRQVASYTGLCPGEYSSGNTRLQSCVTKHGNPRLALRWWSWPGGWSASSPITNRL

SEQ ID NO: 121469 - protein, 412 aa, unidentified
MSKSLRRVGIDWGSESHQVCRIDGEEEPKQRSFPHTGTGLAALVGFVTGEDVDPGQIAVAIEVNHGAVVEALLSKGLRVYAINPKLLDRLRDRFSMAGAKDDRRDAFVLAACVESDAHAFRRIEPGNEGNTRLRAATRLREELKSEARANANRLWNELREYRPELLPLCPGADEPWLWALIEKAASPSQGAKLTRASISGILKRHRIRRLTAEDVQTALRGEALSLSSVYVESHVARALVLTARLKLAQTQIAEIEKQIQTAVAERVKSEEETERRDLTILLSLPGFGPLTVATALGESGDAFERRDYKALRGICGAAPITKQSGGTRHVVMRQVCQPRLRVALHLAAFRASRVDPKLGELYNRARARGQTVGRALRNIVDRLLFLAIQLLKKNQLYDIQLRQPAPEMAATS

SEQ ID NO: 121470 - protein, 436 aa, unidentified
MTLINFVAANQKYYAFNLLSVFIMVFWSVQYLLQHLLVQTQVSHQLLQPLILILQLPQTPQFRHARPGKFFLPVNGMDYFLPLRLTVRNVLTRRITMNIVFLGIDLAKNVFQLCGLNQAGKPVYTKRTGRKELLQTLANIPACLIGIEASTGAFYWQREFEKLGHKVKVISPQYVRPFVRGQKNDGNDAQAIAVALMQPTMQFVPPKSPEQQDIQALHRARQRIVNHRTATVCQIRGLLLDRGIPIGSAVSRARRAIPLILEDAENGLSSRMRRTIAELYDLFNDLGRRIHFFDKEIETVFRQSEACPRIAKVKGIGPKTATVVVAAIGKGTEFKNGRHFAAWLGLVPRQHSSGDRQVLMNMTKKGDKHLRTLFIHGARAVVRVATNNNDGHMNQWVNQLKERRGFNKTTVAVANKNARIIWSMLRNDTGYQVVCN

SEQ ID NO: 121471 - protein, 458 aa, unidentified
MYRELQPFREALSKELKASLFPAAAGVDPNKLLQTYLDRLTMYTGVDVADQTFTVLAMDAGKEILGSLEGCANDPDGFQRFVTWARDLRDQHGLRIIAIAGETAGIYYWALWDFLGEQPDVARVLYNPRTTEHMGEVLSKKVRNDLVDALLLAEQLRLGSTPEVLLQEDADLLTARYYSRAARDLAQQTNRKKNQLRALVRAYCAPLSRVFPGSKLHHPAVYALLQEYLFPDEFAQAGDEALAAILTAHCRDAFGLAEAHQLVEACQQALTRPVGRDAIRHLVYGYVEDITTFQQRKTFYLKAGYSLIETRQETKLLRTVKGAGPSNTLALVSEIGDVSRFPSGAYLASFLGLTTSKHISGTTLYSSKRITKQGSPNGRYAAVNVAQHLSQYVPRYQAMYQRIKGRKPPRKGHFIALVAIARDFVTNVLYNMWCYKRPFFLEVEGYRTYRRAHPRSDD

SEQ ID NO: 121472 - protein, 309 aa, unidentified
MVVGIDVAKAALDVAVRPQGEERHLANDAAGIAEIVGWLRALNPHVIVVEATGGYEAPLVAELGGASLPVAVVNPRHGRDFARATGRLAKTDRLDAQALAHFGQAVRPTPRPLPDEAAQALVALVERRRQVVAMRTAEENRLGATRVALVRARIQAHLAWLEADLGEIDEDLRQRLRASPLWREQDDLLQSVPGIGPIVSLTLLAELPELGRLSHGQIAALVGVAPLNRDSGTLRGRRAVWGGRRAVRAALSMGTLRATRCNPAIQPFYDRLLAAGKAKKVALVACMHKLLTILNAMVKHQAHWQAQAA

SEQ ID NO: 121473 - protein, 343 aa, unidentified
MKLSRIGIDLAKNVFQLHGVDRHGKTVWKRRLPRSKWLKALSDQAEPGCEIGMEACGGAHHWARELQSRGYTVKLIPPQFVKPYVKSSKNDANDAEAIVEAMSRPNMRFVTVKSVAQQDIQATHRIRAELKGQRNAKANQIRGLVAEYGLVAPLTLGALRTAIPCWLEDADNGLTDYFRALLHSLQADLTGLDERVLDLDRQIEKLANSNAVTRRLQQLRGVGPMVATALVATVGDGGQYHQGRQMAASLGLTPRQCSSGDKHRLLGITKRGDVYLRTLLIHGARAVVSQAKYKDDRLSRWVTGIAQRRHPNVAAVALANKTARMAWAMLRNETDYDPDYAIS

SEQ ID NO: 121474 - protein, 356 aa, unidentified
MGQKMVKLFFKFKIKSMQILKRNYLGIDVSKPWFDVSILCVINHQKQPMITERFDNTPGGMKEFKKWLVIQGISFDSNSLLVIENTGVYHRLIWSFCSKHQLPLHIGNAAHIKWSLGITRGKSDKIDSQRLCTYCCKQADELQATPALNPVFMKLKDLMSSRSRLVTQLHSTKNYIKEIQCTDDKVLLAMLDKAHKAALEGIKKSIVQLEELINKIIHEDKAIYNNYQLIKSVPGIGHLTAVYIICCTNNFAAKPSGKQLASYAGVVPFEHSSGISIKGKNRVHKMANKDLKKMLHLCALTAIKYCPEFRQYFDRKKAEGKNGMLVLNAIRNKLLLRVVAVVNNQKSYVENVQIAA

SEQ ID NO: 121475 - protein, 350 aa, unidentified
MEQYIGMDIHRKFSQVCLMDQDGQIRQQRRLWHEDPQQVEEFFGSIAPASQVTMEATCGWMWLAELAEGFGHQVHLAHPAGVELIAKSRLKTDKVDARTLAHLLRTGFLPEAYLAPGHVRDQRLLLRYRQALVGVRTGLKNRVHAVLMRYNVHLEQSDIFGVQGTRILRELELPEPARLVLDGFLDCIEFLNEKIVQHEQHLRKALEADQRVEWLVSLPGVGKLTACYLIAEIGQIERFASAKKLVSYCGLCPSTRASARMLVHGRTGPAGRSLLKWSLVEAAHTAVRRDSYFATLFHRIERKRSKQKAYVAVARKMAEMIWRMLTQQRPYVAKGKKSRVGSARPVVVRP

SEQ ID NO: 121476 - protein, 409 aa, unidentified
MSSENCTEVFAGLDWAVHTHAVCVIDAAGGVLERFEVTHDRDGLAELMRRLARFGGHVRIAIERPSGLIVDALVEAGHHVFPIHPNAVKASRPRYRSHGAKCDASDAYLLADLLRTDGHRWRQLSPQSDSIRALRALVRSRDDLVATRVALSNQLRSTLEAFWPGAACIFADISSPIALAFLRRYPSATAGAKLTEATLARFCKSQHYSGRRSAAELLARLRSAATGLAGTQTNDAAGQLVRSMVAVLQPLVAQIADLTRRIERFVESLPDGQIVMSFPRAGHVCAAQILAELGDVRERFPTADQLAAEAGTVPVTYQSGKTRSVAFRWACNHRLRQAITCLADNSRHANEWARSVYTEARQRGHDHPHAIRILARAWLRVLWRAWIDRTPYDPALHNAAQRLVPAGGG

SEQ ID NO: 121477 - protein, 456 aa, unidentified
MTTSKRKRQQRQDLPVVHPRAAGVDIGSQFHVVAVPADCDPEPVRSFRSFTGDLYQLAEWLEQVGVTSVAMESTGIYWIPVFEILEAKGFEVFLVNARDVKQVPGRKTDINDAQWLQKLHEYGLLRASFRPRQEIVALRSYVRQRERLLEFCASHIQHMQKAMMEMNLQLHHVVADVTGETGMKIIRAIVGGQRDPSELVKHRDPHCKKPVEVLRAALVGNYQAEHVFELSQAVALYDFCQAQVAQCDVKIEESLKQLNAGTEPPAQPLPTARGRQKQRTNAIGFDVRAALYGLLAIDPTQIHGIGPYVALKLVSECGTDMSRWPSAKHFASWLCLAPGNKISGGKVLSSRTRHSANRAAAALRLAATTVGKTDTALGAFYRRLSARIGKAKAVTATARKIAVLFYNTLRHGMSYDDPGATYYEERYRRRVLDNLRRRAESLGFVLQERAAVVSAG

SEQ ID NO: 121478 - protein, 432 aa, unidentified
MTHTGYMGEQGAKLPTSPKMLYTYVGIDSHKDAHTAVFINCFFEKIGELNFSNRQSHFETFLKRAQVHRPEGGTLMFGMEDCSSFGLMLTKFLVSKSQAVKHVNALLVSRERKNRNITEKSDAVDAECAARVLLSKFGELPDAKPDDTFWVLRSLVARRLLLVRHRAAAKNYLHSLLIHQYPNYRDYFDNIDCKTSLAFLERYPSPSTLEHTAEEELAAFLEIPSNKHVGLPKAKEILATLPDTTVQFQEIRDTVVQSAVRQIVFYAKEIEQLEESIAVFLKRFNCTLTSMAGIDTVTAAQMLSCIGDIRKFATPAKLARYAGVAPVNYASGKRDLQFANQRGNRELNSIFFWLAVRVSMPMGANHFIANSFFYNYYQRKLSEGKTKRQALKCVERRLVNIIWTMLTNNEEYVNPPMIEVPKKMTKKGHSKE

SEQ ID NO: 121479 - protein, 342 aa, unidentified
MAKIIGCDFHPRFQQIAFLEQETGEFGERRLSHPEEAERFYRSLAGHAVRIGVEATGNFGWFQRLMQELGHEVLLGDATEIRASNPRKQKTDKRDARHILSLLVQDRFPAIWQPPVENDEMRQLLLHRCRMVRMRTRIKNQLDGMAKNEGWLSPRVWSPRRREQIEGLPLTGWRAERRRDLVALLEDLNRRIGPLDEAVRAAAEANGEARLLMTHPGVGPVVSLAYVLVIGDWRRFARGKQVGSYLGLIPVEESSGSKRRLGQVSKQGNSLVRWLLVEAAATAQRYDASWHRQYVRLSMTKHHGVAKVAIAHKLAVRLYWMLRSGENYEQVVERGSHAGRSE

SEQ ID NO: 121480 - protein, 256 aa, unidentified
MKKSIGIDVSMNTLDVSVFDGDSFTNTKYKNTIAGFISLENDLLDINKSELIITMEATGIYHLNVATFFNSKDYTVSIVNPLIIKRYGEMKMLRAKTDSVDARIIAEYGFYEKPYFFTPKNRQREHILQLLKQIDALHKMQSENRNRLHAIQRVPNVDETAISIYEELKIILKEQENKAIKKIREIVKATYSLDSKRLAQIPGVGERASSVIIGFFGQFETFENAKQVSSYIGINPSVKQSGISLNRQGGVSKKGE

SEQ ID NO: 121481 - protein, 439 aa, unidentified
MATIGIDAHKNFAEVAILEPGRPVRHRRIGTTPAELKAFVEGLGPQDQVVLEASFNTWALADLLQQHAGRVVVSNPMRTKAIASAKIKTDKVDAQVLAQLLAADFIAEVWVPDPTLRALRRRVSQRSALIHQQTALRNRVHAVLNRNLLDCPATDLFGKAGRQWLSKAPLPPEERQQVESALRLLAVLEAEIEAVERPLAETALGDARVLHLMTIPGVGLVTALAIVGVIGDVRRFPRPNQLVGYLGLDPCVRQSGERAARTGHISRQGQGHARGLLIEAAHSAVRTPGPLRAFHERIRSRRSRQIALVAVARKLAVLAWHLLHDDTDYRWASVTLTAGKLRQVERKAGQPIQQAPRSPARGQTTRREQERRLQLQAEEAYRAMVAARHAEMNAAASNGERLAGSRPDARRRSHPQPPLLSTRVDRVPPQPSPAPHATA

SEQ ID NO: 121482 - protein, 412 aa, unidentified
MEVLHPHCAGLDVHKDTVVACVRHTVEGKVEREVRSFKTTTQDLMTLSEWLSAEGCTHIVMEATGIYWKPVWHILSDGEFELVLANAAHVKNVPGRKTDVNDATWLADLMAHGLVRGSFVPDEQTQEMRDFLRTRKQFVRERSSHIQRIQKTLEDANIKLDSVITDIIGLSGRRMIEAIIAGETAPNVLAALAHRRIKAAPSELEAALRGRVTAHHRFMLRLHLDHMTALDEAIARIDKEVEAHLEPFRAAVELLSTIPGISQLSAEVILAEIGLDMSRFPTQGHLISWAGLCPKNDESAGKRRSTRMRKGAPWLKSTLIQCAWAAARKKGSYLQAQFLRLRSRRGPKKAIGAVAASILTAAYHMLKTGALYADLGAAYFDGRTKARQVARLVNRLQNLGFAVQLTSEKVPA

SEQ ID NO: 121483 - protein, 453 aa, unidentified
MKLLYRCCAGLDIHRDTVSACIRKRVRGQADALIEEQVFGTYTQELERLRSWLKKRHVHRIAMESTGVYWIPVWNVLEGNFTLQLVNPASVRALQGQKTDRIDARRIAEYLQYGLLRGSFIPPKPIRELRDLTRMRVHIQQDRNRVVNRIARLLETVNIKLASVASNIVGKSGHAMLRLLAAGKRDPEELAECALGQLRSKTAELIVALDGRPDEHFRWMLSELLRKLDRLDEELARVESRIEKLAVPYNDVVERLATIPGVDHTTALVLVSEFGTDMAQFPTPAHLASWAGLCPGNAESAGKRFSGRTRKGDRYVRRVLVQSAWAASRTHDCFLAAVFFRTARRRGMKKAAVAVAHRILVIAWHILAEQGARYQERGGDFFDRSRPERTARKLARRLDHIGYQVTLVRKTYAPERPPKAIIPASDCPRCHRWQLPACICLCRHKGKPKNSTQ

SEQ ID NO: 121484 - protein, 414 aa, unidentified
MKVTRWIGRAIGLDVHRDFCVVAICEDGVTSSAGRVPATPEGIRALAESLLPSDRVALEVTGSCWEVARILEPHVNRVIVVSPDDTGITSARAKTDKLDARTLASLLWRGELEAVWMPDERCRVLRRRLARREQLVRSRTRTKNEIHACLQRRLQGKPPCSDLFGVKGRQWLAGLELPLEERESVDAGIRHVEFLDSEIAAVEKLIAQQALFWPEIRRPMRVPGVNLICAASFIAAVGDPNRFLTSRKLVAYLGLDPKVKQSGEAPARSGRISKRGSPAARWALVEAAWTAVLQPGPLHAFYERTKNRRGHGKAIVATARKLAVLFWCMLTRSEDYAHQQPSLTKKKLRRLEITAGAPKNTRRSAGIWSTNDLMRQAERELALQAEASYKRMVTDQQAGAPARKVGASVTPERA

SEQ ID NO: 121485 - protein, 369 aa, unidentified
MNDITYVGLDVHKATVCVATAESGRGGEVREVGVFENRPDVLRKMVARLGRQRRRLNFCYEAGPCGYGLHRLLIGLGHDCVVVAPSLIPMKAGDRVKTDRRDALMLVKLHRAGELTPIWIPDAAHEAMRDLVRARATAVRAVSKARQHLQGFLLRHDRIYHGARAWTLAYRRWLTTVRFDHPAQQIVLQDYIHAVEDAEVRRDRLTRQIEELMPSWSMAPVAAALQAMRGVALIVAVTVVAEVGDFRRFANARQLMAYLGLVPSEHSSGSSIRRGGITKAGNALARRVLIEGAWTYRMSARVSRKLHDRLEPLSPAIRDIAWKAQVRLCARYRRLAASGKPKVVVTTAIAREMVGFIWAIARVTQPELS

SEQ ID NO: 121486 - protein, 343 aa, unidentified
MEHYVGLDVSLKQTSICVVNQVGSVVREGVVDSEPEAIAAFVRSKAPGAVRIGLETGPTVTWLWTELKQLGLPVICIDARHARAVLKMQINKSDRNDAAGIARIMQTGWFKEVRVKDLDSHSVRALLASRALLVKIKRDLENQIRGLLKNVGLVIGRAKFNVFAVRAEELIADRPELIAVVRPLLEARKAIEQQVDDLDRKVLKLARHDLQVRRFMTVPGVGPITALCFKATIDDPTRFKRSRSVGAYVGLTTRRHASGETEWTGRISKCGDAMLRSYLFEAAGVLLTRVPKWSALKAWGMRLAKRNGLRKATVAVARKLAVIMHRMWIDRTEFNWSKKEVAA

SEQ ID NO: 121487 - protein, 345 aa, unidentified
MEKITTVGIDLAKTVFQVHAIDAGGAVIVSRAVRRAGLLQLLGKFPPCLIGMEACATSHHWARELTKLGHQVKLIPPAYVKAYVRRQKNDAADAAAICEAVGRPSMRFVPVKTVDQQAALMLHRVRALLVAQRTALICALRSHMAEFGVIAPVGSRNVAPLLAILADKADDRLPALARAALRPLARRMTMLKLEIERLDRRLLDWHRSSPVSQRLATIPGVGPLTATALAASIADPSMFRSGREFAAFLGLVPRQASSGGKERLGRISKMGDRYLRTLFVMGATAVLRHAKAGGSSSRVWAEALLAKKPFKLVAVALANKTARIAWAVMARGEVFREGIEVRAAA

SEQ ID NO: 121488 - protein, 363 aa, unidentified
MFTERTSVGLDVHARSVAAAAIDSVTGELIQTKLTPSHEHIRSWVQDLPGPVAVTYEAGPTGFGLYRALSAAGIRCEVAAPSKLQKPSGDRVKTDAKDAVHLARLLRLDEVTSVAVPSVDQEAARDLVRGREDCRGDLMRARHRLSKLLLRHGIVYYDGDAWTGKHDTWLRHDALPQLSNRATRLTFDSDYENVLMVKARRDRLDTAIAEMAADSEFTDLVHRLGCLRGVSTLTGFALAVEIGDWHRFTGNTIGSFVGLVPSEYSSGKSRVQGSITKTGNTHVRRLLVEAAWHHRARYTVGKTMRDRWDLAPAAARVRGDEGNRRLHQRWVRFIDRRKKNTIANVAIARELAGWCWSLAVLEE

SEQ ID NO: 121489 - protein, 352 aa, unidentified
MKKTLFIGIDFAKANFVASALLGEDPDPVCLPKSFSNDDKGAKSLISWIVKLLPETCSLSDVLVCGEHTGSYSLLLPRRLFDAGIDCWLENAVCIKNGSGRIVREKSDSADATMIAEYARTFYQKRVRLFVPESPVLSELRECNDIRRRLVKEQAGLMCKRHDAEVRLKAKPGSKAIVMNIKILDRQLAYIKEQIAKVDRQMCSLIRADKKLTRINDIIVSINGVGPVTAIALIVLTSGFTTFGSKRSLACFLGIAPFRSESGTSIQHGSHRSRQADSYYSGLLYMVAVSAMNWNPEIALYRERLLKKGKSKLVIINNIKNKLITIIWAMVKNDTLYDPDHHLKVAQQNQTA

SEQ ID NO: 121490 - protein, 352 aa, unidentified
MELQVLKQALGIDVAKDSLSLCLGTLKQDLEKEFTVSVDVTNDAKGFQKIEKWLGKLGAQKEKLVIVMEATGVYHETLAIYLYQKGYTVSVMQSGRVKRYAQSLNQRSKTDALDSRMLAMLGCERKLTAWSPPDKTLRHLKALSRERSFLLKEKNVEKNRLHAIETSAYSNQREIKRQARRLKLMERQLREIEEEMKELVASSEVLAEKIQYLESIPGVSFISAATVVGETCGFNEITSAKQLTSYAGYDVMLKESGTFRGSTRISKKGNSHIRSMLHMPSMTAVRVNPTLKQFYQRLKPNKAKPIVALVAVQRKLLLLMYSLYKKNEYYDAKFEIKKQQEQKPLLHRIEVV

SEQ ID NO: 121491 - protein, 416 aa, unidentified
MNAVGIDVSSRKSTVAVLRPLGEVVCLPFDVTHDIAGLASLVEKLKALDGETRVVMEHTGRYYEAVEKALHEAGLFVCAVNPLLIKEYGANSLRRVKTDKADAVKIARYALDNWADLRDFTPMDAIRYDLKTLNRQFQLASKQRTASANNLIALLEQSFPGIRKCFDSPVRSDGTQKWVDFAHSFWHVDCVRKQPFAAFCERYRKWCKRHAYLFKQSNAEEVYALAKRAVVLTPKSKVVKVLVQEAANQLISISRSVEVYRAEMDRLAAMLPEYPVVMAMYGVGKSYGPQLMAEIGDVRRFERKQALVAFAGIDPMPNQSGDKNVRSNKSSKRGSPYLRKTLFNVIRTYLQCAPQDEPVFQFLNRKRAEGKPFYVYMLAAANKFLRRYYAKLRDYFASLDTLQPVAPIPTILEAAL

SEQ ID NO: 121492 - protein, 462 aa, unidentified
MQDSDQRKDNADSSKQIAGLPVVRHKVAGIDLGSERHWVCAPTVEGSGREVADFGATTCELIRMAKWLKARKVESVAMESTGVYWIAPHEVLEAEGLEVMLVDTRQLARVPGRDKKSDPFDCEWIQRLHSCGLLMGSFRPKEAVCMLRTLVRDKGNLVAEAGDWLRRMQKSLDQMNVRVHRAVSDIDGVTGMAILRAIVDGERDARQLAKLRNPRCHKSEEEIAEQLSGHWREDHLFSLRQGLKMYDAIQERITDYEKEILQKLAKMEREECRGQEVPKSKNPKKGRAIQSQGAEPMRQALYRMSGVDLTGIDAIGVETVQVVLSEYGPDLSRFPTEKQFVSHVTLAPHKPTSAGKPVKKKKRNSASTRVAAALRMAASSLRHSETALGAYYRHIARRIGGDVAVFATARKLATIIYRLLRWGQPYVDEGAQTYEQRYRENRIKSLTARAKELGYQLTPTTA

SEQ ID NO: 121493 - protein, 394 aa, unidentified
MKLIGIDIGKNKHFFCVMDQQTGEIISQPVSFSNDKEGFDFLVQKIKSYPKDSILIGMEDTGHYHFALLKYLLDLQYTVALINPKTTDFNRKMQGGITKNDKLDTINICDVLDTPERKKQYRITKVNSFDLYEQKQLTRHHHNLKEEENVYKNRLQKCIDIVFPEFNKLFNSKYGIVYMNILKMFGSAENIANTDIRTIRKCFEIEGRGNRISLTPERLKECARSSIGISSSAEVIQIKHLTAQIELIEEQLTEIDKKIEEFSIQNNSPILSIPGISHFSGTSILAELGDISNYSKPSQIIKFAGVAPLHHESSQFNAQHTAITKKGSKYLRKTLYQIILPVIRHNPVFNKYYQLKISQGKGHRCAQGHCVRKLLRIIYHLLKTNQQFNPQLLR

SEQ ID NO: 121494 - protein, 349 aa, unidentified
MHYCGIDLGSSKTQVCIIDDDERVLTNTKVSSDIGSVLTVLQEYSPDNVKIVAESTFNWDWLVDGLRDQGYSIILAHTLGMHAITYAKVKTDRRDARTLAKLLRGGMIPEAYACPKEIRDVRDILRSRWNLVADRAKEYRSQRLLLYRQGRWDHNLSDIKSLTCEDAAWLSASPDLSCIGRHSLERVELLSRQIDEVEGLLVNRMADRYATAYRHIKTLPGIGITLGQTMILETGEIVRFKDSRRYSSYCRVVPGCANSCDRQRRGRNSKQGNRYLKWAFMHAAMKAVQWDDQFKQLHQRYASRHQGSGGKIKAYNTVAQRMAQVVFHILRDGVPYQPELLFPRSKTKA

SEQ ID NO: 121495 - protein, 425 aa, unidentified
MDFKQNQKINQVTENTLVVGIDIAKRKHFACFVDDRGRVLQKSFPVLQSSDGFQCFYQRILTAMKEYEKTEVIVGIEPTGHYWLNLAYFLEERGIPLVMTNPLHVKKSKELDDNLPTKHDRKDALVIARLIKDGRFSYPRILKDMEAELRVGSTFRGKLTEELSAVKNMIIRWLDRYFPEFTQIFPSFGKMAMAVLECTPFPSDLQQKQADEVLSLYRKIEGLKSPQRPKAVRLIEVAAYSIGVTEGREMARIEIATLVRRYHQLEQDIERITQHLVELVKTSVEYEWLSTVPGLGDTTIVDLLAEIGSFSYYEDPRQLIKLAGLTLRESSSGQHKGQKRISKRGRRKLRALLFRVMMPMIRHNEAFRKLHEYYTNRQVNPLRKKQSIVVLCGKLLKVLHGISTKHKAFDAQRMMKDIPSLAEAI

SEQ ID NO: 121496 - protein, 353 aa, unidentified
MQIGSALDVHRRQITTKTLDLETGEVRRGRIRPAAREPVREWPSQFAGSDAHFALEATTGWRFIAEEIERAGLTARLADPAETAAKRGRKRRAKTDKADCDLQLKLLLCGEVPEAWIPPPHILELRVLVRTRKALLDERTGWQQRLQAQLFHQGIPPGLRLWTASGREALLAAALSLAGQTLATVGARMIDVLARELAPLERTLRQVARRQPGCRALIERLYGVGELTSTAILAELGDARRFARSADAVRHTGLDATVWESDSRRAPGHLSRQGPQVLRWALFEAAQCAARPASPDHAYYLQVEERHDHPRACLSVARKLCRRGYHLLRELGEEALAPVYGLLPQAGEVAQAA

SEQ ID NO: 121497 - protein, 343 aa, unidentified
MQAITTIGLDIAKSVFQVHGVDADGNVVIRRQLKRRYVLAFFQKLPPCLIGIEACASSHHWSRELEALGHTVRLMPPAYVKPYVKRHKNDAVDAEAICEAVTRANMRFVATKTPEQQSCLTLHRTRHLFIRQQTSVINAIRAHLAEFGIVAPVGRRGVEQLLGVVSDASDKRLPDVARACVAALGAQLQTLKVQILEFDRMIRAWHRSSEASRRLDDIPGVGPALATALVASVADPKVFRSGRDFSAWIGLVPKQNSSGGKDRLGSISKRGDRYLRSLFTTGALAVIRYAKIHGTRHRPWLTALLARRPTKVAAIALANKIARMAWAMMARGERYKEPAALAA

SEQ ID NO: 121498 - protein, 370 aa, unidentified
MKKRITFVGLDTHKNSIEAALADEGRNTEVRLYGTIGGDLASLDKMIRKLQTTGVELRFVYEAGPCGYEIYRHLRAHGFHCDVVAPSMVPKRSGDRIKTDRRDARNLARLYRAGELTAIYVPREDDEAMRDLIRGRQDAIHAQRKARQQLGGFLLRHGFRYSGKCVWTLAHRRWMAEIKMPHPSQQVILEDYVHSVEECTQRVHRLTEQILQLMPDWRMHPLVTALQALRGVAPVVAATAVAEIGPMGRFERPRQLMAYLGLVPSESSSGGSTRRGAITKTGNGHARRALIEAAQAYSHPARISRVILKRQEAVPEPIRQIAWKAQLRLCARFRKLTARGKSRNRVVTAIARELSGFMWAIAKQVPVPQD

SEQ ID NO: 121499 - protein, 317 aa, unidentified
MTAPELFVGIDISKKQLDVAIDPGGQAFTCPNTEDGIQKLVRRLRKLNPQIILLEATGGYEFLAVAALREANLPACFINPKLVRNFARSAGIAAKTDRLDAQVLALFASRIRPQPRPLPEAKQQELKHLMTRRRQLLDMLRMEKNRLDPTPLPRIDRGIRHNIQSLEAQLQDLDREIDDFFNQHPLWVEMEKTLTSVLGVGRLSALFLIAYLPELGRLNRKEIAALVGVAPFNRDSGQWRGQRHIEGGRSRLRQALYMSTLAATRFNPVIQACYQRLLANGKAKKVALVACMRKLLTILNAMLKKQQPWCPPVLNTP

SEQ ID NO: 121500 - protein, 381 aa, unidentified
MNTEKTLTSQNNRFEPYLYLAFELSQTQWKLGFTTGVAQRPRIRNITARDLHALQHEIQAAKQRFRLPADVSVLSCYEAGRDGFWIHRYLAKQGIQNLVVDSSSIEVSRRARRRKTDRLDVNKLLAMLIRDHCGEQKVWRVVHVPNAAAENARQLHRELMTLKSERTRHNNRIKGLLISQGISIAVKSDLPDRLETLRLWDGSRLPEELVMRLQREYQRWVLVNQQIDQLTAHRKELLKTSQRASVEQVRQLMRLKGIGVNSAWLFVMEFFSWRNFRNRREVGACAGLTNAPYQSGDTSRDQGIEKAGNRFIRAIAIEIAWSWLRYQPESKLSQWYQRRFGHGSKRQRKIGIVALARKLLIALWRYLETGTVPEGALLKAA

SEQ ID NO: 121501 - protein, 453 aa, unidentified
MAKRSKTKQKKVQSMPVLQPNAAGIDIGAKEIFVAVAGDRDPNPVRHFPTFTPDLHEAAQWLKELGVESIAMESTGVYWIPVFEVLESYGFEVFLVNARHVKNVPGRKTDVQDCQWLQYLHSVGLLQASYRPPKEICAVRALRRHRENLVKAAVSHVQHMQKALTQMNIQIHNVISDITGVTGLAIIDAILAGERDPKKLADLKDPRIHAEKKVIAKSLQGHYLPEHLFTLKQALDCYRHYQKMIVDCDRETEKLLQTIENHGKPPNIPFTRPAPKAQKKRSHDPNFDLASYLERILGTDLTQIEGIRATTAHTFFTEVGTSNELSKFKTDDHFTSWLGLCPGNKISGGKVLSSKTRKVENRLAIALRLAAQSLWRSESYLGNYFRKMKARHGIPKAITATAHKLARIIYAMVKYQIPYDQRILEQQEKLYKEQKIEYLKKQAKNYGFQLVPA

SEQ ID NO: 121502 - protein, 317 aa, unidentified
MLQTSTNTAGIDTSKLKLDVAVHGRTECWQVANALPGWRSLVVNLIKAGVARVGIEASGGYERGVVEHLRAAGFVVLVLQPSQVKAYARVHLRRAKNDALDAVLIAACAATIDAPRIAPDPRLVKLAGYLTFLEQTEEDIARFKTRLEHVDEPGLRRIVTNDIARLKARRSAQILLIERQLRTHPDLGRRLDLVLSVPGIGKRTALALIIRMPELGRVSREEAAALAGLAPFDDDSGKRKGQRHIAGGRGRLRRSLYAAALPAAFRWNKALVELYARLIARGKAHNAILIACARKLLVYANTVVQRGTPWIESAVRV

SEQ ID NO: 121503 - protein, 457 aa, unidentified
MMETKRRREQRSMLPVHPDAAAIDIGATVHVAAVGPARDPEPVRSFGTFTGDLHRLADWFAQCGIKTVVMESTGVYWIPIYEILEQRGFEVRVVNARDAKHVPGRKTDISDAAWLQRLHEFGLLRGSFRPQGAIAALRAYLRQRERLLDYAAAHIQHMQKALTQMNLQIHHVISDITGATGMRIIRAIVAGERDPDTLASYRDIRCHSSAETVRQALIGNYREEHLFALAQGVELYEVYQAKVATCDEKIEGVLERLKQPGRAPAKPLRAARHKTRQPNAPAFDARGALYAVLGVDLTQIHGLGPYLALKLISECGTDLSAWPSAKHFTSWLSLAPGNKISGGKILSSRTRPSGNRAAALLRLAATTVGRTETALGAFYRRLSARIGKAKAVTATARKIAVLFYNAVRHGMDYTDPGASYYEERYRQRVLTNLQRRAKAFGYVLQPTEIKVVSMAVS

SEQ ID NO: 121504 - protein, 483 aa, unidentified
MQGVTEGTMQTTIPGVVACGMDVHKDKIDVCVRIGDGSADGNVIIKTFGTMRKTLFELRDWLISLKCFKVLMESTGVYWMPIYWLLEEISGMNVGIGNARDLKNAPGRPKTDKEDAKWLSRLCMFGLVLKSFIVGRPFQALREYTRYHKKLVQERARQVNRIEKLLQMNGLKLSTVLSDITGASGKKILTKLADKGELSVSDIRAELDRRCKSTPEEIECAINGALKPTSRMLLKLQLRKIERCDMEISEVYQHMLHLSHEHASAVQIIASIPGMNTQSAIYIIAEIGTVLSSFKTANHLTAWAGLAPKDNKSADKVRPSKTKKANQYVKTLLIQCAWAATKTRNTRLSLWYWRNLSRLGDKKAITAVARKLLCYIYAMLGSGAFYDKNLDVAYAEQIGAQKLDAARKIIGSRTINVPFSDYCSDNMHAQLASVHDDIRTGLQVDNWNAEDGKQTEKGIQSPTDIVTPKKRERPRKPVAPCPL

SEQ ID NO: 121505 - protein, 368 aa, unidentified
MKVPVYCWRSSFARPNPGGFIMRFLTATAASYVGVDLHARTLFVCVLDQAGAIKLSRNLPAKPQPFLNAVEPFLPDLVVGCECMHSWYWLADTCRAHNIPFALGHAFGIKAVHASKTKSDAHDAEVLARLLRGGNFPLAYAYPSERRGLRDLLRTRLRLVRQRAELYGHIHTVRRQLNLEPVGSDVKYKSKRDGAAEDITDPHTRRGVEARLNLLAPLDTEIRRLERDIEAAAEEHYPTELAALQTIPGVGRIISMTILLEIDTVTRFESRQQFCSYARLISPKQESGGKIVGVGNKKAGNAWLKWAFSEAAVLGAQKDERMKKCLAKLQSKHGSGKGLSIFAHKLGRVVYHLLRTKKVFDVERFVRG

SEQ ID NO: 121506 - protein, 345 aa, unidentified
MSIVGGFDIHRQQITFDYVDTITGEVKRGQIGHADRHRFAAWLRRFEGREDVEFAVEGCTGWRYVVEEMVRAGITPHLAEPADTAAARGRKRHAKTDRTDSHLIRDLLLQGRLPSCYIPPSDILELRALLECYQDLRRDHTAWIQRIHAVLFHQGAPAWASHGFSSDQAGKQLRRIAAEHLSPAGQTQVEVALLMLEATEAEMGILHGRLVTHAKRLRGARYLSEKLYGVGPLTALALTCWLGGAGRFSSSRKAVRFTGLDITVYSSAGKRGPGRLSRQGPSVLRWLLFEAGKQHGRGSAPDHKYYANVKARIDGKRAALAEARKLVRHAVHLLNELGDDAFIYD

SEQ ID NO: 121507 - protein, 396 aa, unidentified
MVDDNGTVLGEKQVEHSGDGIRECIDWLLQLAGGDASSIAVAIEVPHGAVVESLIENNLAVFAINPKQMDRFRDRHTVAGAKDDDLDAFVMADSLRTDQRCFHRVELDEPAILRLREWSRMEQDLQTDGNRLANQLWEQLRRYYPQMLKLSPAANEAWLWDLLASAPLPGDAAKLKLAKVKAILRSHRIRRVTAEEVLEQLRQPALRLAPGAAEAAAEHVLMLLPRLRLLEEQQAAAAKRMRGILEELCAAPPESEGREHRDAEILLSLPGIGPVIAATMLAEASQPLRDRDYQALRHYGGAAPVTRRSGKRKVIVMRYACNERLRNALYHWSRCSMQKDARAKQHYAELRQRGHSHGRALRGLADRNMAMLMSMLKSGTLYDPARRGSAAVAEAS

SEQ ID NO: 121508 - protein, 411 aa, unidentified
MNNTLFVGIDISKRSNVATFMNCEGKVVGRLAFSNNGSGADRLVAKILSYYEKGDFEAIRIGMENTSVYSKNLVWFLYEQEALNEHKLSIIPLNAIMVANYKKSFLDMDKDDITDSFAIADFIRIRPGLLPFKLDDRQEALKIMTRSRYNYVQALSRMKSQFLTRLFLSFSEMEAGKPFYSIFSKTSLSLLEEEFTLDELAEKPIPELVEFLQEKGGGKFQNPEEIAKVLKKAASSSYRVPAMVRESLNRTMASDMEIMRILENEIHNCDKNIEKLMKSVPAILVSIPGIGPVLAAGIMSEIGDISRFQKQESLGKMAGFKWKRNQSGKKESEDKAAVLSGNKKLRYYLVEAANRVRIHDPVFEAYYRKKYAESKTHAHKRALILTARKLVRVIFYLLKENKLYKPDVGIS

SEQ ID NO: 121509 - protein, 404 aa, unidentified
MSVHLAPVMSSTIVVAVDVGKTSVMLSATDSDRRRVFGPVECAVTRSELAATVHRVSAVVPRSAQVKVGIEAAGHYHRPVLDYRWPAGWEVLEFNPAHVAEQRRVAGRRRVKTDVIDLEAITELALAGRGRLSGDREVIIGELAAWASHRSRRVATRTATKNQLLSQLDRAFPGLTRALPDVLGTRIGRLVAAEFADPARLSALGASRLIRFAAVRDVAVRRPVAERVVSAARDALPTRDAVVARRVLAADLGLLADLDTQIESAGCELAALVPLSPYATLTSVPGWGVVRVSNYAAALGDPDRWPGPRQIYRASGLSPMQYESAGKRRDGKISREGSVALRRALIDLGIGLWLTELAAKAYAAELKSRGKHGGIIGCALAHRATRIAYALVRDHASYDPSRWS

SEQ ID NO: 121510 - protein, 365 aa, unidentified
MKTVAYVGIDYHQSFLAVVVLLEGQPEPIDRVKLPNVPKNLKNYFSKLCERYFLKTCYEASSCGYVFYREMTRWGHSCQVVAPSKIPKKPGDHVKTDFKDAENLAYQFRNGSLSFVHIPSEEEEAARALIRCRRALKEDCKRVKLRISSLLKSVGHVYSGSLWTQKHENWLNQVSLLPMLDSVLMEYRTQRVYLENRIAELDCQIEALAKTEKYAEKVKTLKTLRGIGTLTAMTLVGELVDISRFPTAKALMSFLGLTPSEYSSSTVRRTGRITRAGNAECRRVLIESAQHYRRKPYPTQAMRDKWTDRPPEQIDHSIRCMKCLHKRYLTLQMRKPKNVALVAIAREFVGFIWSLLQPMRPARSA

SEQ ID NO: 121511 - protein, 450 aa, unidentified
MSKPQVIDDQEHERVHDRVAAIDVAKDSGMVCTRLPHPSRPGARQSTVWTVRARMNAIGKLGRQLKDSGIELVTLESTSDYWRIWFFVLEACGLAVQLVNAAQAKNLPGRPKTDKLDAQWLARLTELGLLRASFVPPKAIRALRDYTRARTRLVQERTRCYQRLEKLLESALVKLSSVASKLATESAKDMVKAMIAGQRDPKVLAGLARTRMKAKHDDLVEALDGMFDDHHGELARMLLDQIAFLDQHVTQLTARIAAAVAAMPAAWGVDADGTTGPDAGAGPDAAVLPAAARLAEIPGISPDLARAIIAETGLDMSRFSTAGHLVSWAGLCPSARQSGPRTRAGKKGQGNTWLRGYLGQAANGAARTATFLGERHGRIARRRGKAKAQVAVARSILVIIWHLLADPAARFTDLGPGYYQARTDKDKKIKNHIRQIEALLGHPITITKAA

SEQ ID NO: 121512 - protein, 339 aa, unidentified
MTLYCGIDLHARNNYMVVIDDQRHRLFEKRLGNDLSAIIQVLEPFRGELKGVVVESTYNWYWLVDGLQAAGYAVHLANPSGMQKYSDLKYSDDHRDAYWLACLLKLGILPEGYIYPRDQRAVRDLLRKRGNLVRLRTSLLLGLQNILVREGKAKLGSAKLKSSTVESVIEYIVEPEATLLAGTASKRVIDVMTTEISGIEREVLKREKLKPEFVKLLTLPGVGDILGLTIMLETGAIGRFNRVGDYVSYCRKTRSVCTSNDRVKGQGNRKSGNKYLSWAYAEAAVHAQRWNKTCRRFYDRKLKQRGYAVAHNALAHKLARAAYFIMRDNVAYDEARLFG

SEQ ID NO: 121513 - protein, 441 aa, unidentified
MAMRKRNDEVVFPNAAGIDVGGSSHWVAVPTHLVEEPVREFGAMTDDLNAMAKWLLNCGVDTVALESTGVYWIPVYEVLEQQGLKVWLVDARQMKYVPGRKSDVQDCQWLQKLMSFGLLRGAFRPTDEVCVVRAVVRQREVLLTEQATWVQRMLKALVQMNIQLGEVLTDVMGMTGQAIIRDIVAGQRDPAKLAKYRNGRVKAKEEDIKRALTGNWREEHLFVLTQALGMYDSLAQRIVECDAKIEALLTPLGHHEVTLAGPAKRAGKNTPRFDLHTVLARWAGVDLTRINGLAVSSVLTILSEVGPDLSRFANVKHFCSWLGLCPGTKISGGKVLSARTRRSTNRVRQALKLAAMSLSRNGSALGAFYRRLCARMDKPRANTAVAHKLARMVYFMITRGEDFVDRGQQQYEEQQRQRSIAALKRRAADLGFQLSPAPVAA

SEQ ID NO: 121514 - protein, 401 aa, unidentified
MIDKEAPVLAFDASKGSSHCQGYLSFGKPSSKPIKAAHSRSGMAAAEGISEALERKTGRKPKVVMECTGVYSKPVIRWAESSGMEVYLISPLESAKVRKSRLRPTKTDALDCGVIAEVAYTRDVRKLTAASSLYSQLYSLSRRRAAIVDRLVASKNQYRKSLDAVWPLLDETCDPFSGYAMWAVGRYRHPEALAKAKEGSIVTGLERAKVRTGAISKAAAASKLFAYAKDAISGCPADGGEVDSLLSALDDVIRDTRALDEITDRLLSLAKELPHFALIASIDGIGDALAALLCAEIGEPSRFACRNGIVAYAGLDPTILQSGKNDGLHYSITRKGNSFLRKYLYLAVGNMVMSKADNAITRFYSKKKSSGLCHKAAATAACRKLLVTIWGMLRSGSFFER

SEQ ID NO: 121515 - protein, 419 aa, unidentified
MRSIQAKKVRIVNYETLIVTVDIGKTKNFGYCRCPNGIDIKPFGFHNNGYGLKYFWDKITQMKKAHNLKAVVVGFEPTGPYGEPLVHYLRKKKVKLIQVNPMHTKRVKELQGNSPNKTDQKDPKVIADIMELGHALTIVLPEGTAAELRRLTHSRERAMQRRTSFFNQLQNLLFVIFPEFYQVMKNVKTKSSMYILEHCPTPEDIIKYTLKNLTVTLRKVSRGQIKEERARELYTAAKTSVGIKEGRKSILFEIKEILSMIKATEHFIAEIEKKMSHHLKDIPYSKFIISMKGIGEITVAGLIGEVGDFREYKTISEVLKLAGLDLFEISSGKHKGQRRISKRGRPLMRKLLFFAAINVVRKGGIMREYYQGCLERGMLKMKALIAVSRKLLGLIFVLVRDQSEYIEDYVEKQKLKKAA

SEQ ID NO: 121516 - protein, 366 aa, unidentified
MRVVHERCAGLDVHKSSVVACALLPEGKQLRTFGTMTWQLEQLADWLRSLEVPVVAMESSGVYWKPVFNVLEAAGFELLVANARHIKAVPGRKTDVKDAEWIGDLLRHGLLKPSFIPGREERELRELTRYRRTLIEERAHEVQRLQKVLEGANIKLEDIISNVVGLNGRRFLGALIAGDYDPQAVAATANYGLQRKRELLAQGLRGSIGSLDFLEQRITALDREVKQRSLPFEAAIAHLDQIPGVGTRAAEEILAEIGTDMSRFPTHRHLASWAKVCPGNNESAGKRRSGYAGKGNRWLRSILVECAWSASRKKDSYFKAQYHRLAARRGRKRALLAVGHSLLTLIYHLLREGVLYQDLWNEPSPM

SEQ ID NO: 121517 - protein, 368 aa, unidentified
MLYVGIDVAKNKHDVTALNVQGKTVLKPLTFSNTRAGFELLDLSLRQLNQDCLIALEDTGHYAFNLLKFLHEQGYKVYTYNPLLIKEFAKSLSLRKTKTDKKDARIIALKLLSDPNREQFQHDNRKEELKILTRHIHRLKKKQSDWKVQYTRCLDIIFPELDKIVGKHSEYTHQLLTRYPSPQKMLEAGFDNLIEIKRLTASKIQDSLSVAPLSIGTTSPAREFELIDKAEKQANELMTEINSVITTVTGIGNRLGAVILAEIRNIHAFDNPAQLQAFAGLDPSIYQSGKIDLAGKMVKRGSPHLRWALIQAAKACARFSPAFKAYLRTKLDQGKHYNVAIIHLAKKLIRTLFYLLKNKLPFDEQKVI

SEQ ID NO: 121518 - protein, 397 aa, unidentified
MVAVGIDVSKAQSTVAMLNDDGSIRAKPFTMYHTLADMNALVNYLKDLDDPPIILMEYTGHYHYPVLKKLQSEGFRVCLINPYQMKKYGDMEIHKAKTDKKDALRIAAYALEKRYKLVPYSSVDQKYEDLKFLSRQYCQRISALTVSKVQLLNLLDETMPGITRILPLKSRHPEECVLLLFIKRFGSFDEVKRIGKTRFLSSYSVLCKKSKNRYALSKGLRIYEMANDGITTRGDNVFMLAAQNQLVSLLSDAQNAADEINIQMQNIAETIPEYKILRSMNGVGDRLGPIILAEIGDIRRFHSAKALNSYAGNDAPPYQSGQFESKNRHISKRGSSALRKACFEVMQALKLTKPQDDPVYLFILKKEQEGKPFNVAKMAGVNKFLRIYYARAMELYK

SEQ ID NO: 121519 - protein, 347 aa, unidentified
MLIIGCDFHPGFQQVAIFDNRTGEIEEKRLQHPVEAERFYRTLAGQPVRVGMEACGHYPWFERLLEELGIELWMGDAAKVRASVVRRQKTDRRDAEHLLRLLMENRFPRIWVPSLEVRDVRQLLVHRHKQVQARTRTKNQLQAMALSCGMQKKRKLWTKAGRTELEQLPLLPYAAERRKRLLEALDGLEVEISELDRRVAEEARERPEAVRLMTHPGVGSVTALAMVLTLGPAERFESAKKVGSYFGLIPSEESSGGKQRLGKISKQGSSFLRFLLVEAGQTAARLDPQLKRFYRRLAARKNRGVAKVAVAGKLATRLYLMLREDWTYAQLCQAVMQVSPSHSVAGE

SEQ ID NO: 121520 - protein, 565 aa, unidentified
MNTIGVGIDTARYGHRVTFLDEHRQPAAPALSIQETRDGYAALEAAFRRLQGKFPEATFRIRIDAAGQYAANLESFLRQLPERLEISFGQPKQNKDYRQVHFPKRKSDDTDSQAAARYAVVETPPAEAGCPPELLALREVASWLQSQAVDCTRAKNQLHNLLARVFPELATLTKSIASARILRLLSKYPTPALLARARLATVQRIPHLPSDLAERLQQAARGSVASLRGEVAAQLVQHQVRQLQLRLRAKRQLEQFLQETFLKIPGSACRQVATIPGIGLPTAAALVAKIVEIDRFASPAQLVGYFGCFPEERSSGVDQAGRPLPSKSCRMSRKGNDLVRHYLWMAAQCACLHNPAIRALYRRQRQAGKRGAVALGHCVRKLLHLVYAVWKTDRPFDPQHHAWEALAQEAPAVAESPKAERAAETEVTPATTLTVPPASPTSKLLPSPIRPRQRRGKSIDYRYLREQLSIAQVLELLHYPHSLQGTGDQVRGPCPLHAEERRRSTFSVNLKRGVFRCFASECGAHGNALDLYVKATGLSLHDAALELADKLHLQLQRNREEEPVT

SEQ ID NO: 121521 - protein, 422 aa, unidentified
MSDKYKLLVGVDWAAERHRACVLDLNRSVEFECWIEHSGAGIGAFVERLLAASEGIPEDVAVGIEMTSGPVVETLIERGFHVYGLNPKQMDRFRDRHTVAGAKDDRRDAFVIADALRTDRHLYRRLDPSAAEVIELRELCRIDEDLRNAQNRAGNRLVTQLRRYFPAVLKLSPYASEPWVWALLEKAPTPASVARLRPSQVTRILRENRIRRLDAKGVLAVLREQPVYVAPGTTEAATRQLTVLLPQLKLLHTQRASCKKDMEQLLKQLAVSESPEPGQPDEHRDAAILLSLPGVGRVVAAMMLAEASQAIANRDYGALRALAGVAPITRASGKKSRVVMRRACNDRLRFASYHWARVASQYDERSKQQYKALRQRGHSHGRALRTVADRLMRILFGMLKSGSLYDPSRFTAGAATPAVGAC

SEQ ID NO: 121522 - protein, 427 aa, unidentified
MAYRVAGIDVHKRMLAVVVTDVEVDGEYVFERRVIGTTPDQLRTLVTWLVEREVEEVVMESTAQYWRPVWDALEREWQPTQRLRAEAGPTSGALHLAQALSNNGPRGRKKDFPDAERLVKRLVAHELTLSFVPDVTQRLWRTVTRRKYQLTCNRVQLHNRLECLLEETHIKVSTLVADLLGPSARRMLRAVAKGETDPATVAALGSRRLHATPDQLRDALGPCSDLDPVYRRLLALTLDELELIEAHIRQLDEELARLLRVHQDAVERLAAVPGLGVDSAQQIIAEVGATAATFATAKRLASWVGACPGHDESAGINHSHRSPNGNRQMRRLLNQAANAAVKTKGSIFQLVYRRLVIRLGHAQAIGAIAHRLCRLIWKILHDGVAYDERGPAVTKHRAQRRAAKMIRELRALGYRVEQMSAPASVLA

SEQ ID NO: 121523 - protein, 343 aa, unidentified
MSEVTTIGVDLAKNVFQVHGIDASGQVVVRRQLRRSQVLPFFEKQVACVVGLETCATSHHWAREIAKLGHDVRLMPARYVKPYVKRNKNDAADAEAICEAVTRPTMRFVAVKTEEQQSVLMLHRTRQLFVRQRTTLINAIRAHMAEFGIVAGVGRNGVERLLRLIDEGADGRVPPVARECLQALRTQLVLVKRQILKADRRILAWHRSNELSRRLETIPGVGPLIATALVASIPDPHAFGSARDLPAWIGLVPKQNSTGGKERLGGISKAGNRYLRSLLVVGALSVIRRAKQVGYTRRAWLAELMARRPVKVAAIALANKIARIAWALMVNGTRYEEPVPQAV

SEQ ID NO: 121524 - protein, 432 aa, unidentified
MTTNRLQAGIDFSQKKADFCLLFPDGRPLEQHRSFDNSLPGYSLAKALMIDALETYQFDGLDVSGEATGFLWLPFFNQLAADPDLEAYDLNIFLLNPRWVKWFKKCFPQDDKTDQKDSFYIADRTRTRRPDATWSPQLDTLPLRFYTRLRFHLVQNLAREKCYFSAFLFLKASSYRRLKPFSDVFGVTSRQVLSEYTTLDELATIPVEDLAQTLHEMSGHHLPDPFDNARKLHRVAVESFPLPDALALPVHRILDLTLEHIRFLEGQIALVEDWITAEVQLHPNIMKLATIPGVGPVFSSGNGAEIGDTQRFLQAQKWDKRRKRYRPRNLRDAEDAVAKLAGLWWPRTDSGDFEAEDRHMAKTGNRYLRYYLIQAANLMRQNSPEYAAFYRRKYRESSKHHHKRALVLTARKSVGLVVGLLHRNEAYRPREV

SEQ ID NO: 121525 - protein, 356 aa, unidentified
MQNNFQSPESVILGVDTHLDIHVGAVISQAGKLLGTRIIQTNQIGYQELFDWAKSFGVLERAGIEGTGTYGAALTRFLIKNGIYVVEVNRPDRSKRRLEGKSDPLDAENAARTVLSGSSKAIPKMQSGACEALRIISVARRSAVKARTQAINQLRSLLVSAPQDVRDKLWKSKPHECVAACINCEVSEYSPLRIALYSTLRSLAKRWGALTEELNELDESLDKLTRKYASNLRSQFGVGPQTAATLLAVAGDNPERLKNEAALASLCGVNPLPASSGKTVRHRLNRGGSREANNALWAIALVRMRSDPRTRIYVDRRTGEGLSTKEILRCLKRYIVRELYPLILSDLTYANRPLLT

SEQ ID NO: 121526 - protein, 422 aa, unidentified
MAIYCGIDWAEGHHDIALIDGEGTLIGKRRIEENLDGVAALTAMLAAAGDRPDEPIPVAIETPRGLLVAVLRAAGRPIYPINPLAVARYRERTSVSGKKSDHLDAMALANILRTDAHLHRMLPDDSPLARSITVLARAYQDAVWRRTKIVQELRARLREYYPGFLAAFAAGSGSGRGLSTTQLASADARAVLAIAPSPAEGLTVSKARIETALRRGGRQRRIARLAATVAAQLRTPQLRQDPVVEQAMRIETVAMLGVLNAVCDSVDQLAAALSDAFAQHPDYEIITSFPGLADISGAVVLAEIGDDRDRFVDDRALQAFAGSAPITRASGKSRTVTRRRTKNNRLAAVGYCWAFTAAARPSPTRNHYLRRRERGDGHAAALRHLFNRMLGQLHHCLATGQTYDPAKAFPHAATTPAGPVAA

SEQ ID NO: 121527 - protein, 421 aa, unidentified
MADQLLWLIGIDWATSEHEACLMDRDRQACQYCTVRHTAEGLAAFVDWILQQAGGDPREIGVAIETPHGALVETLVERGFPVFAINPKQLDRFRDRHTAAGAKDDRRDALVLADSLRTDRPAFRRVRVDDPRIIHLRALSRLEDDLQADLSRVTNRIREQVYRVAPTLLTLCPAADEPWFWTLVELAPTPEQQHRLATRQIERLLVRHRIRRLNAPAVRNTLQQPAVRVARGVAEAVISQLRCTIPQARLLHEQRRDCAAQIERLLNALAADDAENPAEHPREHRDVTLLRSLPGVGQQITATMLAEASQPLNDRDCDTLRTYSGAAPVTKRSGRRQHVVIMRYACNPRLRDALYHWSLGSIKTDPASRAYYDMLRARGHHHGRALRSVGDRWLRILVAMLRDRTLYDPTRFSLRQVVAVA

SEQ ID NO: 121528 - protein, 443 aa, unidentified
MQVVYRRCCGIDVHKDSVTATILVFPPQGERELRTQQFGTHWKELQRLAQWLRSSKVEKVAMESTGVYWKPVWNILEKTLPLVLANPYQVKNVPSRKTDRKDSEWLAELLAHGLIKPSFVPPPEIRELRDLTRYRVKLTGEYNRAHNRIHKVLEDANIKLDTVLSDLMGASGQAMIRGIIAGRTDPGWLADYAKGTLRGKREELQLVLRGDIRDHHRYLLAELMADLNFIKDKLLRVEAEIARRMQPYADQIARLCSIPGVDELTAWTLMAELGADMTVFPTAAHAASWAGLCPGNRESAGKRLGNRTKKGNRWLRRALCQSAWGVTRKQDCYLQAHYLRRVAKSGVKKAIIATAHQLLIIAYHLLRDGGLYRELGGSYYDSLHPVRTQNRLIRRLERLGLQVHVRPAQPITPLPVDATAHKRRRGRPCKCLERAIHCKHTQL

SEQ ID NO: 121529 - protein, 405 aa, unidentified
MILLIGIDWSQDHHDVCIMNEAGAVIVRFEISHSSEGFAKLEKNIDKLNVPSANCLVALETAYNLLIDFLWSRGYTVFIVAPSVTRSSRGRYGSSGAHTDADDAFLLADLLRTDRARFAPWKPDGLLVTQIKAKLSLVDSLTKSITRHSNQLHALLLRYYPQVLETFNDLKTQICLQFVITYPTPYAAQAISYGQLDAFCRVHHYTHPKLIPELYARLSRPSLKPDSTIVLALQDQAGFLARLLLNLVQQKARTIREVQKLFNGHPDSPIFGSLPGAGDLLAPKLLVMFGDHRDRFPCPSAIQSLAGTCPVTDQSGKRRRVYFRKACNRDHRNTAQQFAKSSTLQAEWAATYFSQGLARGMSNSHAYRCLANRWLGIIWKMWQSGQVYDEAYHMQQINKHRKSRR

SEQ ID NO: 121530 - protein, 353 aa, unidentified
MKSYIGLDVHQATISVAVVDSQGKLIMESILETKASTILEFLAGLRGTLSVTFEEGTWAAWLYDLLKPHVAHLVVCNPRKMAVLKQGNKSDKIDARKLAERLRLHDLKPVYHGETGVRMLRELARSYLTVVKDLSRVMNRLKALYRSWAIPCAGRDVYYTRHRSQWLEKIPEAGTRRRAEQLYQQLDMLQHLRQQARRELLAESRKHTITAKLRQIPSLGPIRSALAVALIQTPHRFRSKRQLWTYSGLGLETRDSGEYHFVKGQVRRRKKQVWIRGLNKDYNHDLKGLFKAAAIRASVLPGPFQDFYQRSLSKGIKPTMVRLTLARKIAAITLTLWKKGENFDIEKLKSQAA

SEQ ID NO: 121531 - protein, 406 aa, unidentified
MKVYVGIDWSDRKHDVFVVDESGRKIGYFEIEHSQTGFEQLEKWREKAGLLREECKVGLETAHNLLLDFLWGTGYTDIYVVPPNIVDASRPRYRQGGAHNDKSDAYTIADLLRTDGHRFVSWHPGSELLQQMRAAVSSARFYTKHSVAVANRLQASLKRYHPRVLKVFTNWPSPIACHLIKAYPTPQHLQTLTYEEFTGFLKAHRHTKPSKWLEYYDLLKASAPVPTPATVHAYQHEVVQLADLLLNSLDLEKQTLAQLQTLFRNHEDAPIFDSLPGAGELLAPSLLVKFGEDRQRFSQPGALQALAGTAPVTKQSGGRYSVHFRRACDKDFRYFMQQFARCSLPNSPWAAAYFHNATQRGLAPSHAYRCLANRWIVIIWRLWQDRTTYDEAYHIQRRSERRAPKS

SEQ ID NO: 121532 - protein, 339 aa, unidentified
MELYCGVDLHGDNGMYGIMDERGKRVFKKRLPNDLGVVLQALEPFRDRLSNGIAVESTFNWYWLVDGLKENGHRPRLANPAAMEQYDGLKNTDDETDAFFLAEMMRLGILPEGYIYPKEERPVRDLLRRRLLLVHQKTAHVLSFQNLVARERGEQMSGNSIMKLTPAQVDPMFEDSRLALMGRTNVEAIRFLEKQINEIEKAVYGEVKLKPEYEKLLTVPGIGRILAFTIMLETGDINRFKKVGNYTSYCRCVKSTRLSNQKKKGENNRKNGNKYLSWAYIEAANFIRRYCPEAKKWHQCKLARSKQVVATKAMASKVCKACYFIIKDQVDFDVKKIFG

SEQ ID NO: 121533 - protein, 428 aa, unidentified
MKYNTQNAKIESITEKTLIVGIDVGSETHYARAFDWRNYEYSKKPLEFSNNEAGFVTFKVWMEELAEKYGKDVVIPGMEPTGHYWFNLGAYLQDNGMKPVHVNPHHVKKSKELDDNNPNKNDRKDPKTIAALVNEGRFSYPYIPTGVYAEIRSLSNLRLQAQEEITRIKNRIARWFSIYFPEIKDVYKNPGAVSGLMILKVAPLPKDIVKLGVDGVNQIWRDAKLRAAGLKRAKTLVTAAEHSIGSQEACDSARIELKILLNDYEIYHQREEELMELIEEKLSEVPYIDKLLEIKGIGMKTVSGFVAEVGDIKRFDNPKQLQKLAGYAIVECSSGKHKGESHISYRGRKRLRYVLYEPAISLIARNTEFKEIHRYYQTRGKNSLKKMQSVIAVACKALRIFYAILTKGVTYDGAKMLQDIKRPQLKVA

SEQ ID NO: 121534 - protein, 409 aa, unidentified
METVVERPAALDVHKESVTACVRVPGAGGSREQQLHAFKTTVAGLLTLRDWLRAHGATQVALEATGVYWKPVWAILEDDFDCLLVNARHVKQVPGRKTDVQDAAWLCQLLEAGLLKRSFVPPKPIRTLRNLTRYRKAQLRERQREANRLHKILEDTGIKLDCVATDILGVSGRAMLEALVAGTTDPAVLAELARGRLRKKLPALREALEGRFSDEHALVVSSILAHLDFLDEQIERLSDAIEQAIAPFASAVELLCTIPGVQRRTAEVIVAEIGVDMSQFASAGHLVSWAGLCPGQDESAGKRRNARTRRGSKWLRSALLEAALAATRTSDTYLAAQYRRLKPRRGHSRASIAVCHSILAASWHMLTTGELYRELGGDYFQRRDPERTTRRLVRQLEALGHTVILEAAA

SEQ ID NO: 121535 - protein, 465 aa, unidentified
MAKAHKSRSKSRAKQNHRAKLKPQDCTLGLQVVNPKAAGIDVGNGEHWVAVPPDLDPEPVRRFGCFTSDLLEMANWLVGCGIETAVMQSTGVYGTALYDILAERGIRVFVVNARDTKNLPGRKTDIQECQWLLKLHVYGLLRNSFRPEEEILMMRTYWRQRQQHIGDASRCIQHMQKALTQMNVQLANAISDISGTTGQAILSAILAGERDPRALAKLRDPRVKASEATVAKSLEGNWRPELLFVLKQEQESYQAFQTKIAECDRQLHQHYETMEAKADPQRLPPIPRDKRPHGNIPAGFDLREELYRTTGVDLTAIDGLNVLTAQTLIAEVGSDMNRFDTEAHFVSFLGLSPRNKISGGKVVGREKCKTKNRAGTALRLAAGTLLNSGTYLGAQYRRLRTKLGAPKARKAMANKLARIAYRMLKYGEEYVDKGKEFYEQKYRQLQIRMLTKKATELGLQLVQPA

SEQ ID NO: 121536 - protein, 342 aa, unidentified
MNAVTIIGVDLAKRVFNAHGSHSDGSVAFRKRLSRSQVLTFFAKQPRCTVAMEACATAHEWGRAIGELGHEIRLIPPAYVKPFVKRQKNDTSDAEAIAEAAARPTMRFVAVKTEEQQARSMIFRTRGLFVRQRTQLINALRGHLAEHGVIAPHGPANVRLLAAALNAADRSLQSLVRDIGAVYLEQISILNVKIGDLEKVLRREAQRGADTSRLQTMPGIGPITAMAIETFAPPMQTFKRGRDFAAWLGLVPVQHSTGGKQRLGRTSKMGQRDIRRLLIVGAMSVIRWASRRGAPEGSWLSRMLARKPLMLVAMALANKMARTAWAMLIKQENYRVPVMMAA

SEQ ID NO: 121537 - protein, 357 aa, unidentified
MTQSKTLDFNGTTIFCGIDVHKKNWRINIQDSEFELEDFSQNPDPASFYKHLIRKYPGAKYRVCYEAGFSGFGAQRWLSQQGVDCWVVNAADVATNNKEKRQKSDKIDARKLCEHLQTKKAKSIYIPETHWEHGRSLVRLRERIVSNQTRCKNRIWQLLHFSGLTLPQGYEAGQYWSKNFINQLEAIDCKSDVLKTTLRLYIRDYQQTRSLLLEATRSIRSLCKTALYQNDMHLLRSIPGIGEINGAIILFELQDVTRFKHFDYLCSYVGLVPDTSDSGDKKVSKGITKRSNNNLRCALVESSWTVIRKDPAMLMKYKEYCKRMDKNKAIIRVTKHLLSRINYVLKNKKEYVAGVVA

SEQ ID NO: 121538 - protein, 354 aa, unidentified
MIIIGVDFHPEFQPIALLNTRTGEVEEKRLAHPEEAEKFYRALAGAGETVRIGMEASGHARWFERLVAELQFDLWIGDAAEIRTKRVRKQKTDRQDAQLILSLLLEDRFPKIWVPSWENRDLRQLLWHRHRMVQARTRVMNQLQAVALNEGLRCKKKLWRERGRQQLESFGLAPWASRRRRDLLELLDRFNPAIAELTQAIEREVENCPAAQRLRTHPGVGVLTALAFVLILGDAERFHCGKQVASYLGLVPLEDSSGNRRRLGHITKQGSSILRFLLVEAAQVAVRSLPEWRSKYFHLVLRRGRKIAKVAMARRLAVQLFWMMRKEWNYEQLKKFGSHAGQPGNRHGVQSNTE

SEQ ID NO: 121539 - protein, 399 aa, unidentified
MDRNRTVAGLDVHKDSIYLCIMGHDEAIIFEKTYGVLTPELRQMCQDMVEHGVTEAAMESTAVYWVPVWNELSDSMELKLVNPYFIKQLPGRKSDVKDAQWIAECLLKNLIRGSFVPEPIVQDMRKLNRRIFDLQEDISYYTNKLDAALQRCGFRLSNYVCKITGKSYRKAVASIAEGKTDPETILKCIHGRVINKHGRDTLLAAVTASFSRTDITVIRQYWELIAIYVRQSEESQSQLTALCENNFPTEYKRLQTIPGVKERAATAIIAETGVDMKMFATAAALVGWCGLKPRNDVSNGRYKSRKITHGNKYLRHILIEISWTASRTRNCFFSNFSYIQVTQKHKSKMKIQVAIARKILVAVWHMLSKGEDFIDIYLERLEQQRLMEEKLKSLESKMA

SEQ ID NO: 121540 - protein, 410 aa, unidentified
MVKENFIYVGIDLHKETHTAVMIDCYNQKLGEITFPNRPADFPKLVAKVKKCNTDGETIVLGLENAYGYGRALAVWLIDKGYLVKDVNTAISHRQAKHRGAMYRKSDSDDAEAIALATLNMLDKLPDAYPNDAYWSLGQLVHRRDNIMKQRTRLVNQLHEQLCIAYPSYKQFFNDISRPTALYFWEHYPSRKYLKGKSVEDLRTELVPVSHNRCSTKNCEKILDAVASDKVKNNAYQDARDMVTLSIVSDLQHYDSQLAEVDKMLEQMYKMLGCTLTTIPGVNVITAVKILAEIGDIKRFSNANKLAQFAGIAPLHLSSSGKGKDVATKQGNRRLQATIYFLAIQMVQVSSKGTPRNSVVRAYYEKRKAEGKTSQQALICISRRLISIIYGMLKHGTEYRMPVVESAGEK

SEQ ID NO: 121541 - protein, 420 aa, unidentified
MRNAGIHANSLLEVRRMYNAVGIDVSKGKSTVAVLQPGGTVIRKPFDVSHTSPNLNELADYLSSLDGTTKIVMECTGRYHEPMVKALSEAGLFISIVNPHLIKNFGNNSLRKVKSDPADAHKIARYTLDNWTELRQYSSMDSTRTQLKTLNSQFSFFMKQKVAAKANLIALLDNTYPGVNKLFDSPTREDGSEKWVDYAYSFWHADCVRKIGLKAFTERYMSFCKKHHYIFQQDKPEKLFNASKELVAVFPKEKTYKLLIQQSIQQLNLASEHVERLRREMNELASTLPEYSTVMSIYGVGKTYGPQLIAEIGDVSRFTHREALTAFAGVDPGVDESGQHKSKSNRASKVGSARLRKTLFQIMTTLLQNAPEADPVYRFLDKKRSQGKPYYVYMTAGANKFLRIYYGKVKECLRNLEQTE

SEQ ID NO: 121542 - protein, 468 aa, unidentified
MSGTKKARRKRDISPTHPNAAAIDIGATLHVAAVGPDQDPEPVRSFGTFTGDLHRLADWFQQCGVRTVAMESTGVYWIPAFEILDQRGFEVILVNARDAKHVPGRKTDISDAQWLQRLHEYGLLRASFRLKGEVAVLRGYLRQRERLLDYAGSHIQHMQKALTQMNLQLHHVVTDITGTTGMAIIRALVAGERDPAVLAAHRDRRCHASTETIRQALVGNDREEHIFALTQALELYDVYHAKVALCDGRIEAVLKRLRTASSSPAGKPPPVRTPKKQANALAFDVRAALHGLLGCDVTQIHGLGPYLALKLVGECGTNLSAWPNAKHFTSWLCLAPSNKISGGKVLSSRTRRFGSRAAALLRLAAVAVGRTETALGAFYRRLSARVGKAKAVTATARKIAVLFYNTLRHGMEYSDPGASHYEERYRRRVLTNLERRAKSLGYVLHEAPHQHECFLGMPYATRSCHKRY

SEQ ID NO: 121543 - protein, 317 aa, unidentified
MVRSAVVGIDVSKAFLDVAWWVPDHAARYANSPQGLAELTRALTQQAPELVVLEATGGYEIAAVDALQAAKIAVAVVNPRQVRDFARASGKLAKTDALDAKVLAWFGATMRPAPLPPIDPSHSAIANLVARRRQVIEMLIAERNRLEHAGAGVRRWIEEHILTLKTQLAQLDAAVALAVEASPSLHRRNEILTSVIGIGRLTAAVLIAELPELGSIGNKQVAALVGVAPFNQDSGNRRGERHIAGGRYSVRCALYMATLVAVRFNPALQSFYRRLRDAGKPAKVALVAAMRKLIIILNALVRDDILWQPNHALQDGC

SEQ ID NO: 121544 - protein, 317 aa, unidentified
MQEPTVFIGVDVSQTELVISMSPERAPYDVANNATSIARWLDQVPSHALIGMESTGRYHSVLAHLASQAGLQVYVLNARDVFFYARALGSRAKTDRVDSKIIARYLAEHHARLHRWQPGNSLQQRLQDLLLRRAQVVMHRSALNQIMTGVDARDLDASQLQVAFDGFLTAIDARVQELIASDAQLASGCKRLRTITGIGPQTSALLASLFSRLQFANADAVVAYSGLDPRPNDSGTKRGRRRLSKKGPPLLRRQMYLAGLTASHSKALKPLYQSLRAKGFATTEAFVIIGRKLLRVAFAVWKGIESFDPVRLWPKPA

SEQ ID NO: 121545 - protein, 374 aa, unidentified
MSEIIVHVGLDVHKESIDVALASNQSAEVRHYGTIGGDIASLDRVVRKLSSEYSQLRIVYEAGPCGFEIYRYCRKKHIECWVVAPSRIPKQPGERVKTDRRDAAMLARLSRAGELKGIYVPTEADEALRDMTRARETAMIHYGRSRKELLSFLLRNGVIYTGKTNGKKEHLNWLARITLPLPAQQIVFQESLHQIQESHQRLERLSLQIEQQVETWRWKPVVLALQALRGVRLVVSAGIVAELGDMSRFPHPRALMGYLGLVPSEYSSGPHRRQGALTKTGNVHVRRLLIESAWAYIKGPRVSEIIRKRQQNLPQPIIDIAWKAQLRLCRKYRRMVLRGKNNKVAAVAVARELIAFMWAIHRQVVLHERSMVAA

SEQ ID NO: 121546 - protein, 347 aa, unidentified
MKKIIIGIDISKEKIDASAIDVRNSQLGVLKLDYQAFENRPMGFRRMLVWARHLIKGVTQEEVMFCCETTGGYDRSLCDYLFAKGLDIWRESSLQIKKSSGLRKGKDDKADSLTIAEYAMRHMDKAVYYISPSETVRELKALLLYRRKLEQEKTSKKVRVAELKATAAKSKSVSFILRDAQKSIRALEKSIKECEKQILALYDSDEELKRSYDHLTSIKGISIVNATAMIAYTNNFKNITTSRKLASYYGIAPFREMSGTSVNKKAEVKCYSSSMLRAYLTQAAQWTIKEHGIYREYYLRMSAKGKCYGVILNNVKNKLLHLSVSLIANDMDYEENHEFLRAQRMAQ

SEQ ID NO: 121547 - protein, 348 aa, unidentified
MPNYNQPHQFYAGVDLHARSMFVHVLSAKGKTVFERDLPAEPDAFLDAVKPFRKNLVVGCECMFAWYWLADLCEDHSIPFVLGHALYMKMIHGGKAKNDRIDAAKLAGLLRGGLFPMAYVYPRAKRQTRDLLRRRSLFVRQRAQLIAHIQNTNSQFNLPPFPKKLTYAGNRTPQIAERFAHLSTQLSIAADLKMIDAFDDQIADLERHLIQHAKVDDPVTFHLLRTTPGIGPILGLILLYEIDAIGRFPEVGNFLSYSRLVRCQHESAGKIKGAGCTKIGNAHLRWAFGEAACLMLRCHEPAKRWLARQQKKGSKARALGVLAARIGRTVYHLWRKQVAFDARRFLTS

SEQ ID NO: 121548 - protein, 451 aa, unidentified
MSKRKGSKVASLPLVEPNAAGADIGATQIFVAVPPDRDAEPIRCFDTFTADLERLADWLEQCQIRTVAMESTGVYWIPLFQILEERKIEACLVNAQHLKNVPGRKTDVEDCQWIQHLHSVGLLRGSFRPDQEICAIRSLWRHRDNLIQLATVHLQHMQKALDQMNLQIHHVISDLAGTTGLAIVDAILAGERDLAKLAKLRDWRIRASEDTIMKSLVGDYREEHLFTLRQSLESYRHYQKLIQDVDAQVKQMMRRLPAKIDVGEKPLPKEKNPRKTPWRNEPPQLREDLYRAFGVDLTQIPGINTLTAQMLLTEVGPDLSRFPTVAAFCSWLRLCPEPKISGGKVLSSKTRPTKNRAALALRMAAQGLHRSQTFLGDYFRRMKARLGTPKAMTAAAHKLARIVYHMIATHQEYDTTVFQELERRVQDRKRMKLRAQARELGFDLVARAVVP

SEQ ID NO: 121549 - protein, 371 aa, unidentified
MRYEIKILKYAVGIDISKADFKACFVSIDNNQHIKIIASRSFSNSNAGFKKLDQWINQKRKDNAIGLVLVLEATGVYYENLAFFLQDKQYALSVVLPNKAKKYLEYLGLKSKTDKIDAQGLAQMAAQQQLRLWQPATKFWYELRALTRHYQNLQEQKTAVGNQLEAATHSANSSNFVLKSLKLQIKRLNLEVKKAAIAIKAQVQKDEKVYAKILGICKLKGLAILSVTTVLAETFGFELFENYKQLISYAGYDVVENQSGKRSGKTKISKKGNSRIRRILYMPAFVAVEYQQTVFCNLYNRIYEKSGIKMKGYVAVQKKLLVTIFAMWKNNTAYDNDYHKINIRRNGSVGVSLSGTSSSEAAIITNEPMIV

SEQ ID NO: 121550 - protein, 345 aa, unidentified
MPIVGGLDIHRKQITFDYLDTATGEVRRGQIAPADRAHLRAWLARFAGRDDVACALEGCTGWRYVAEELAAAGVTAHVAEPADTAFARGRKRHAKTDKTDARHLRVLLEQGRLPECWIPPAQILECRALLEAYHDLRREHTAWIERIHAVFFHQGAPRLGEGALRTDRGLAALRQAAACHLSPAGQLQVATALDMLAAVEARMDTLRQQLLHAARHLAGARALQARLYGVGPLAGLAMTCWLGGAGRFSSSRKAVRFAGLDVTVYSSDGRRSPGHLSRQGPEILRWVAYEAGKTHGRASAPGHDYYAQVKDRQDGKIAALSQARKLIRQACHILAELGDDALTAA

SEQ ID NO: 121551 - protein, 410 aa, unidentified
MSEGQITVGVDVGSHMHRVAIGTPEEKIAEEFDLPHNKDGFEKFFGRITHYEETYQVPVVVAMEGFNGYARPLDRMVQKKGYRLLNVNNLKLRRFKEIFPSPAKTDVIDARKILELVRLQPLLTDQEVILQEVREVPKEHQVLKRLTRRRRQLVREKASVMNRMQSDLHAVSPELADLARNKDGLAFLRFLTCREDLRQLERVQKRTLLGIKGIGEVFAGKVKEWQKKAQFSEEAEYAGPMIIEDGRRILELKERIKALDKQIGELCERSDLAGIVRSIPGFGLTCTSEIVAEIGSMDRFRSEGSLAMYLGMAPLDNSSGKRRGTRHAKQVNIRARSAMMTAMNRHILRVEESERYYRKKRNEGKRHNQAIRSLGRHMVRVMWSMTRDGHFYENREKNNMVEVAKEAIPA

SEQ ID NO: 121552 - protein, 445 aa, unidentified
MSDAWTTAPSEPEWAAFAAIDWADQKNFWRLLPAGSRRSEAGELENTPEAVDAWAADLQQRFGGGPIAVIVEQSRGALVYMLTKYPQLVLFPVHPSTAAGYRRTFAPSGAKSDPSDTESLLDLLLRHRARLRPLEPDTVETRLLHFLVEERRQMVDERTRQSHRLTACLKLYFPQVLQWFDDVTSPLVGDLLDHWSTLEPLQRAHPGTLRKFFHDHNCRSAERNEERIAAIYQATPATKDQAVVEGCVLIAHGLVALLKTLRANIVAFDKRIAELAAVHPDTAIFASLPGAGAVLAPRLIVAFGTRRDRYQDAYEVQCYSGIAPVTESSGNSKWVHFRSACPKFLRQTFHEFAGSSIQWSEWAKAYYRHLREEEKKSHHAAVRSLAFKWIRIIFRCWKDGKPYNEAIYMQSLRRRGSLLGAALGVTTNAMWKTVAGFQKLSENNA

SEQ ID NO: 121553 - protein, 338 aa, unidentified
MQTYAGIDLHSSNNFIGVINDKDKILYGKRHPNRLDDVLRALDPFKDSLQGVVVESTFNWYWLVDGLQEQGFSVHLANPSAIQQYEGLKFTDDQWDSVWLAHMYRLGILPEGYIYPKEHRAVRDLLRRRLLFVRHSTSHILSLQSMISRNLGFKMSNNEIRKLKSEDIDGLFACPNLVFMANNSLSAIKFLKKISLDIEKKVKSQVKMRKEFEMLLTIPGIGNILGLTIMLEVGDIGRFAKVGDYSSYSRCVESKRLSNGKKKGENNKRNGNKYLAWAYVEAAQFARRYCVKAQSFYQSKEAKTKPVVAIKALSNKLSKASYYIMRDQVAFDEEKLFG

SEQ ID NO: 121554 - protein, 320 aa, unidentified
MTKSSTKTAGIDTGKAYLDIAIQAGSDSLRVNNDSDGHHKIVAWLKTHKVKRVGIEASGGYERAVVAHLRKNGFEVALLQPRQVRAFAIYKLRRAKNDRIDAALIAECTANLGDLREPPDPRLAALAEHLLFIEEIEFDIARLKTRREHFVDKRILNQVDRDIKAQQRRCDAELVRLQATVRKHDDLASRLELIASVDGVGIRTALTLVILLPELGKVSREQISALVGVAPFDDQSGKRSGERHIAGGRSRVRRALFNAARAASQFWNKALVAQYSRLKSRGKVHHQALIACVRKLLIFVNAVVERGTPWIKNPPPKNAA

SEQ ID NO: 121555 - protein, 368 aa, unidentified
MVKHSKDQHAKKASIRSAKRTIAQRWIGVDLGDRWSEVCLLDGTDADRTRVRTTPGHFRAYFAQFAGAAVALETGTHSGWASRVLSECGLAVTVANAREVRKIHQSHRKNDRNDAQTLARMLRFDRELLSPVEHRSPQMQADIAILRARDVAVRARTMQINAVRGLVKAHGDRLPACGADSFAGRVLEQLPPALKPALLPLVQAIADLTKRIRGYDRLVKVTADERYPETALLTQVTGVGPVTSLAFVLTIGAKDRFCRSRDVGPYLGLVPRQYDSGAHQSQLPISKAGNKYLRRLLVQSAHYILGPFGPDCRLRAYGERLAQRGGKNAKKRAVVAVARKLAVLLHHLWTTGARYDPAYGANFAPLAA

SEQ ID NO: 121556 - protein, 373 aa, unidentified
METPFNVSKYGVGIDMGKDEFHVCLSAIDQTQRVKIKATRAFKNTLRGFAEFSKWVDHHAKEPGLPVHFLMEATGVYYEQLALFLHQRQAHVCVVLPQKTACYIKALGIKSKNDRIDAQALATMACQQRLDAWKPITEAMYKLRQLTRQHTELQELKTQLSNKLMAVELGMYQSAVVQKQQAQLIKAIDKQLAECVKLIQKAISENAEWKRKVEQIYAIKGVGVLTVAQIITETNEFALFENQRQLVSYAGYDVVESQSGKRVGKTRISKRGNSRIRRAMHMASLMVVRYEQRPFVSLYERVFERTKIKMKGYVAVQRKLLTLIYALWKKDALYEENFGSEGQKKVAPTKGATLHRPQVDVLEKANMVEMIDS

SEQ ID NO: 121557 - protein, 437 aa, unidentified
MLSYLNLNAAGVDIGATEIYIAVPGDRDPQPVRCFSTFTEDLHAAADWLKACHIETVAMESTSVYWIPLFQILEARGFQVFLVNAHHVKNVPGRKSDVSDCQWLQYLHSVGLLRGSFRPEQAVCTVRSILRHRDGLVQMASSHVQHMQKALDQMNLQLHHVISDITGRTGITILEAILAGERNPHQLAKLRDRRVKATEETIAKSLVGDYRREHLFTLRQSLAAFRQYQDWIADCDHEIAQYLEQFESKLDPPPRPTSPSEDGSKPKANEQRFDLQTHLHRIFGVDLTQVPGIQVLTAQTLLAEIGPDLSRFEDGSALASWLGLCPDNRISGGKVLSVKTRKVKNRAATALRMAAHSLHHSQSFLGHFYRRMRAKLGAPKAITATAHKLVRIVYHMVTTGHAYDETICAQNELQNRQRLEAKLRKQARELGLQVVAA

SEQ ID NO: 121558 - protein, 430 aa, unidentified
MNQINRNRLEEFRQLRKEIRHSEEYLIVGMDIAKDRHYAFFGTATGKTLLKRIVFSNDHEGFRKLLDQAEALRVQHGLKKVVYGMEPTANYHKPLGEYLINLGRMVVLVCGVTVARNRESLDGRWDKHDGKDSANVADLISQGKCLYYEHPSAELRGLRGLLSLKKRLKKQEHGYRVRIRNQLIAQYFPEMDRDYERLGVEGLSIVKWCLPASEIAQLDVDPFIDRVTSRRIRMEKRRRLEEVWEKAGESIGCEGVPGVDHEAKIMVEGLKQIREMIKETEDKIKELCKQFPEYHYILTIPGFGPDVSAKVLGAIGDPDRFQNGKQILKMGGLDLSADRSGKDSDKAIPEISKRGKADLRYALYQAALVASLQNRDVMIYYTNKIRGREREKGIHVKMRVKLAAKLLVIAWTLMKKKEAFNPACLSAELN

SEQ ID NO: 121559 - protein, 319 aa, unidentified
MAQNDCVVVGIDVAKDKVDACIRAVSLRQTFPSTAEGRRKLISWLRKHKVTAAVMEASGGYEREWAKALREKAVEVRIVDPKRVRNFARSAGRLAKNDAIDAEMIAWFAETFGEASSQAHDAAREKLVQIVNARCALIDLQTKLQNREEHPAPEPVQKMQARLLRQLAREIAGLEAAIAAMIKATAHFAELAEIIESVPGLAEITSAGLIAAMPELGQVSNQAIAALLGVAPYDDDSGKRRGERQIKGGRRKVRNLFYMACLGAATRHNPVLKAFYDRLIAKGKERKVALVACMRKLIVILNTMIARREKWDASRYALS

SEQ ID NO: 121560 - protein, 378 aa, unidentified
MPKCLNVKSEEERVVLQKAELNGNVDSENNHGGSSSIMYYIGLDVHKKTISYCVKDVSGQVHREGKIGTTRNELDCWVGTLPQPRIMAMEATIFTGWIYDYLLPHAEQVKVAHPLMLRAIAAAKKKNDRIDAGKIADCLRCDFLPECHMASTEIRDRRRTLRYRHLLVRQMVQMKNRISGLLMETGVTYNKQRLHKMGYFGELLSSNEEVHENIRPLLRLSRETIVRCQRTEYALVSSLQRDPLLAERLRRLRTVPGVGPITALTWALEVGDVSRFRSVKQAISYCGLCGEEKSSADKVLRTPISKQRNKHIQRVLVEAAKLAPRQNHELALIHEREKNKGNRNRATLAVARKMVAYLLAVDRGEREFVPAEGRGKAA

SEQ ID NO: 121561 - protein, 343 aa, unidentified
MYDTIIGIDLAKHLIQICVVINGKVMSNTEITAQEFSAWLVNTKPAMIIFESCATSNYWQQVAKDAGHDARIISAKLVANIRQHQKTDKNDALAIVQASQLIDIKFINGKTFSQQELQSIMRMRELTVKHKVALRNQIEGLLLEFNIKVSARKGGLNGVVQAVLEDAENNFCMPFRDALNATWQLYLQTVENIKESERLLSEVIKLHPECKKLLALEGVSIINAIQLYIAIGCGEAGLFQSGRDAAACIGLTPIQHSSGGKVKLGSIGRFVKNVSLRSYLVNGAMSVVYHVGKREPRTQKEKWIKELLNRKSKKCVAVALANKTVRTAYAMLTKGTEYKAMPL

SEQ ID NO: 121562 - protein, 337 aa, unidentified
MTIKVLGIDLGKRYFHIHGVDSNGTLVTRKKFKRKELLLFLSNLEPCLIGMEACGGAHYLARKCAEFGHEPKLMAARFVKPYVKSNKNDFLDAEAICEAVQRPSMRFVTPRSQDQQALGALVKVREALVRRRNVVSNQIHGFMLEFGIEYPKGRKTVLRLREITAQHEGELPASMVVLLYRLEEEFRTLVAQIVDVEDDMQSIVLADDRGARLLEMPGVGLITAACLLAWVGDAKHFRSGRDLAAWIGLVPKQSSTGGKTTLIGIGKRGNTRLRCNLIHGARSALQWHIDKPSRWSSWAQSLKATKKPNVVAVAMANKMARMIWVILARNEKYQAFA

SEQ ID NO: 121563 - protein, 365 aa, unidentified
MSRMTGKTGVVVGGVDTHSQTHHAAVIDDLGREVSDCEFPATAAGYEALAGWLRSFGELTLAGVEGTSSYGAGLARYLCQAGVSVVEVDRPDRRARRAHGKSDPIDAYAAARAALSATCTTVPKTGEGIVEAIRVLRVTRRSAVKARTQTTNQLKSLLVTAPSEVRERLAGLKTLALVQACARLRTSGSASDPLQALKVALRRLARRHQHLTTEIKDADAELHSLVATAAPGTTDLLGVGVEVAGQLLTTVGDNPQRMRSQAAFAHLCGVAPIPASSGKTRRHRLNRGGDRAANNALYTVVPTRLRLDERTHRYVARRTTEGLSQREIIRCLQRHVARELYQALVRGPPSSSSKPPQRLERVGQP

SEQ ID NO: 121564 - protein, 406 aa, unidentified
MISCGIDWAEAHHDVALVDDTGHTIARARVSADAAGFTELLGLIAEHGGDQDSTPVAIETEKNLFVVGLAAAGFTVYPINPRAVARYRERHAQAGGKSDPGDAAVLAHVLRTDRHLHRTLPQISDQALAVKALARQHQEAIWAWHQTLSRLRSLLLEFYPQAVKAFPNLKHHAATALLAVAPSPAAAGRLTRRKVVSVLHQCGRRNDPSLVEQILTDLKAPALRQPDVVEAALGLAVSGLVAVVVAMRSTVDQLEKALAAEFDQHALAPILRSAPGLGPVLGARVLAEVGDDPARFTSADGLRAFAGTAPITRASGRSHYVKARKVRNKRLGDACHWWAYATLTRSAGARAHYDRRRAVGDHHNAALRNLANKLVGRLWWCMINNQPWDDNAAWPTSTTVQLSAAA

SEQ ID NO: 121565 - protein, 391 aa, unidentified
MTKPKTKTVNDFSRCLDPLDMDATLIAVIEMSQSSWLVAGIVPGVEREPLKKLAIDEHALLNLLRRWRAEAEKQGHRITRIAVAFEAGPDGFWLARWLAAQGVEAHVIHASSVAVTREHRRAKTDRLDTGLLKRGFLGWLRGERGHCKTVAVPTLAEEDAKRPSREREKLVGEASRIITRVKAAFVRLGIRGFNPKLKAAATRLETLRTPEGEPIPPNTLAALKRDLERHQIVKKQIREIEQTRLDVLKQAPEKGPHAMVRLLARVIGVGVETADMLVQEVLSRTMRDRRAVGRYAGLTGSPDESGAKRRDKGLARSGNARVRHGMIQLAWRFLLFQKDSALAQWYRQRTADAPSMRKTLIVALARKLLIALWRLARDGVVPEGVRLRPAA

SEQ ID NO: 121566 - protein, 482 aa, unidentified
MKKRNIFQNQSQEIFAMFEAAGNRSKVMCVPIDYAKKNHLTMFCNGNGRIIRKPFTIENSLDGKNYLVDQVARSCRHHGIKLEHVFFGGEDCGSYADNFITTLRYENWIVAGVNAHDAKTYRENMQASTDRLDLLGISKMLLNCGGNCSPAQSGIYWNLRALVRQRRKLVNIKTGVKNRIHTIVDRIFPGFLDEKKSGILPFSKCSLLLMEDRFSIHQIQRRRRSTLIKFLSRQAVKHPDRCAEKLQNYAIQVLKPPDKHIGTLQLSLTQQVKLYCCLQDNITQLGEEIAAYLAQTQGAFLTSIRGIGITLAAGVCGEIGNPNMQNSINNLISYSGIIPKVKQTGGTEKKPQMKKVGKRCNRILKDYVVQSASHIGLHGPEDLMLDYNRRNAQGQHADFGMGRRFLRMAMGLMRTSQTYLPESLRGKKSSMKGRGRYYLMSWPKLREKWRNTNALEIAFAKDMPLGQWRNMIQELYGIELTL

SEQ ID NO: 121567 - protein, 353 aa, unidentified
MPAIKPPIVPLKYVVGIDIAKDSFVACLGYLEVGQQLHFGKEATFDNTASGFADLLQWVAKHQAADSPRWFVVEATGVYYEELAYFLADNQQLLSVLLPNKVKHFARSTEQKSKTDQLDARLLCRLGLERALPAWQPPTPALRQLRGLARERQVLTRQGAQLKTRAHAYAHSYQPDRRTLARLTAQQQFVVQQLKALDQDLADLLTAEPELARKLAHLTSIPGIGLTTAIVVVAETSGFVLVENERQLTSYAGLDVVQRQSGLSTPATRISRRGNVRLRTALYLPAVSSLRYNPQQMAFYARLRARQPSGKPGVIAVMRKLLVLCYSLWKNDCPYDPHYHPAHVAEKEVAPTT

SEQ ID NO: 121568 - protein, 426 aa, unidentified
MVDDEYRIYVGIDWATEAHQGCVLDDTGRVLAERSFAHSGEAIAAFAQWLHGVAGGDPGQAAIAIEVPRGAVVETLVEHGFHLYAINPKQLDRFRDRHSVAGAKDDRRDAFVLSDSLRTDRARFRRIRLDDPLVIQLRELSRVDEDLAREVNRLTNRLREQLHRFYVQALKVCPSADEPWLWALLERAPSPAAGSRLQRKTIERLLRQHRIRRLNAQDVVAALRAPALWVAPGVVEAATEHIGLLLPRLRLVHTQRQRCGARLDALLDKLAAVEGDEGQQRERRDVEILRSLPGVGRVVAATVLAEASGPLAERDYHALRTHAGIAPVTKQSGKRRTVVMRYACNGRLRYALYHWARVAVTCDPASKTYYAALRQRGHSYARALRSVADRLLRILVAMLKSESLFDSTHPRRSPHPAAAPEAPCAT

SEQ ID NO: 121569 - protein, 451 aa, unidentified
MEEPREVQDEEHERVYERVAAIDVAKASGVVCTRVPDEDRPGRRKMHVWTVKATVPAVTELADHLRCHQIQVVTLESTSDYWRIWWAVLETAGLTVQLVNARHVRNVPGRAKTDKKDAVWLAKLTERGLLQPSFVPPPEIRRLREFTRLRADLVHERSRYWARLEKLLERALIKISAVASTLDTDSCRAMIEALIAGERNPEVIAELAIGRMRPKRAALAEALDGDWQPHHGELARILLDQIDALTAQIDALTARVSDLIAQIPAAQGVDADGVTGPEAGTGPDAIILPAVTRLDEITGCGIVAAQAVIAEIGLDMTVFGTPGRLVSWAKRCPRTRQSGKKNAGGKTGKGNPYLNGILGEIAASASRTSTFLGERYRRIARRRGKRKALAAVARSILVIIFCLLADRQARFRDLGPDWYDRSIDKHRKTRTLIRQLEALGHTVTLGTPAAA

SEQ ID NO: 121570 - protein, 391 aa, unidentified
MSMYFIGIDISKYKHDCCIISAADQKVVSKVTIKNNKAGFNELLTIIHSLANPADIRIGFESTAHYALNLELFLENSLLTFMEVNPVLISEYKKSKTLRRTKTDSVDCESIARWLMTVEYKPHSKGFYHAYSLKSLTRLRDRLIRQRSFYLVKITNVLDHTFPEFKPFFNERLSKTALYLLENYGSAEKMARMNSVSYEKLRSISRGKFSPQQFIALKELAANTVGVNNSIFDVELNSLLILYKTLVTEINTLEKEINLLIEEVHPHYLSVPGIGSISAAIIYSEYGDISNFDNPGQMLAFAGIEPGINESGTESHGGRMVKRGSSQLRYALINCCLPLIRFDMTFATYYAKKRAEGKPHRVAITHVAKKLIRVIYALERQNTDFCVQKLR

SEQ ID NO: 121571 - protein, 379 aa, unidentified
MSSTDATAGAREIVYAAIELSKKTWLLGIAHPDRDRPSIHRVCGGNIMELVSRLRLAARNNRRILVCYEAGYDGFWLARALAKIGIECRVLDPASIQVNRRARRVKTDRIDVLALLRALIATDRGERHVCAIVRVPSVEEEDARRSHRERQRLVRERTGHINRIKGLLFAQGIRDIKPKLRRTRIDFAALETAEGHPLPDRLRRELEREYARLALIEAQLREVEKERDTTDAQDPVVEQKRQMLVAVKGVGGTSAAILAREVFARSFANRRQLGSYLGLTPSAYDSGSMTRSQGISKAGNSWARRVLIEVAWLWQKYQPASPLSNWYIQKTTGQSSRIRRIMLIALARKLAISLWRYVETGLVPEGVVIARAESRCALA

SEQ ID NO: 121572 - protein, 386 aa, unidentified
MQTVADRPEPPSAIRNDLGAIFVSFELSRSTWLITSLSPSGGGKMSKHSVRGSDIAGLLERFAELQKKAQARTGRNFPIIVIQEAGLDGFWIDRVLQNEGIESHVVDPASVATSRRRRRAKTDSIDGEALIRTLLAYKRGEPRVCSMVKAPTPEEEDRRRLCRERKVLTAERVRHVNRIKGLLFCQGINRYEPLGRNRRERLEQVRTGDGRLLPDHLKAQVRRELDRLELLLKQIKAVEAERDALLAEQQVAAPASMLLDIKGIGPEFAAILWSEGLCRHFDNRRQVASYAGLAPTPWQSGSVDHEQGVSKAGNPRLRTTLIQLAWLWLRHQPQSALALWFEQRVKRNAGRLKKTTIVALARKLWVALWKFVTAGIVIEGAVMKVH

SEQ ID NO: 121573 - protein, 460 aa, unidentified
MMNRNRSKSRVARTMPMVNPNAAAIDVGATMHMAAVGTDRAPEPVRSFGTFTADLHRLVDWFTECGVETVVMESTSVYWIPIFELLDARGFTVFLVNARDAKHVPGRKTDVSDAQWLQRLHSFGLLRASFRPKGQIAVLRSYVRQRERLLEYAASHIQHMQKALTEMNVQLHHVVADITGATGLRIIRAILAGERDPEVLARLRDSRCHASAETIAKALTGNYRSEHLFALEQALALYDAYHEKASACDVRIEAVLKELSMHRGRGHGEVPPLRRRYRTDQANALAFDVRAALFALLGRDITVINGLGAYLSLKLIAECGDDLSSWPSAKHFTSWLGLAPSNKVSGGKMLSSRTRRSGGRAAALLRLAAVTVGRTDTALGAFYRRLSSRIGKAKAVTATARKVAVLFYNAVRHGMEYLDPGASSYETRYRTRVVNNLHRRAKAFGFVLQPMEPKAGAAVS

SEQ ID NO: 121574 - protein, 543 aa, unidentified
MAASNAQLRVNCWSALNRSNSGTVAADISLAVIHKRAKRPGTARRSELVNNCAAGENFAGERPAPARSQSQSPHPKRVIGRLLAEPEALAPTSNRKTPPEGRYISKMDGRAKRRKNHKEQKQTMNDSQQWQQHRAFGALDWASEKHSVVLVNQTGKVIEDFEIEHSALGWKKFREKLQPYGSIPFAIETSQGVAVEQLLEAGMLVYPLNPKSAQAYRERKAPSGVKDDRLDAWSFADALRMDGQNWKALRPEEPLIKELRLLCRDEVTLIEQRTAFVNQLRHALAEYYPAALEAFEDWTSLSAWMFLQRFATPESLAQAGKRQWQKFLHSRRLWGSDQGPRRMEIFAHATEFTGTPPTVKAKSLLAQSLVQMLFAIEKQLAVYRQRIEELFARHPDHDLFGSLPGAGPKIAPRLLSEIGDDRQRFGGDPQNLQCLAGSAPVTKRSGKQRKYWPVHQRWACDKHLRHALHLFSEQSLSRCAWAEIYYQHHRQKNQSHANALRRLSHRWLKIIYKMWIDRTPYNAELHHRNQLQHGSWIFQLQKS

SEQ ID NO: 121575 - protein, 352 aa, unidentified
MEKTTRRLRKAQATIGLDLGDKRHTFCVLDTGGEIVNKGSMRNERNELAKLASAYPGALVVMEAGMHSPWTSRFLDSLGMGVVVANPRKTRTISQSERKSDERDALVLARLGRADRNLLSPIVHGSEETQHDLLQIKLRDSLVRARVALVNSVRFTLKSLGYRVSNPSSERFHKLVVEELPESVRALIVHSVASIAELTARIKALEISIARLASEKYPQTIYLQQINGVGPITSLYLVLKIENPQRFTRTRNIGAFVGLGPKRDPSGETDKELRISKCGDRYLRRLLVSAAQHILGPFGTESALRDYGLRLAQDGTAKAKKRAVVAVARKLAVLLLTLWKSRQPYEPFPTMA

SEQ ID NO: 121576 - protein, 385 aa, unidentified
MDVLMECCCGLDVHKDMVEACIIKGSLEVPLIHRSRFLTDRTSLIALTQWLSDHACYHIAMESTGIYWRTVYETIEEYAPRWDALFVVNAQHMRNLPGRKSDVKDAEWIATLLRHGLLQNSFIPPKDERMIREYSRLHRALLGEKVRCANQLEKFLQLHGFKLSGVMNDIHSVIGRRLLNHLARHGKLEEEDVAQCAGNRLKRPLGEICAAVCGRLHPAEQRMLQLLLLRLDEVAGHIAEVDEQLFQLTAPYQEQMEILVSIPGISTLSAAMILGEIGTCPRDYFPTSAQLTSWAGLVPRNDQSAGKVKSRKILPGNPYIKSILCQVSWVAVRTRKSHYHEWFWSRQGKLGRKKAIVAVSRKMLKLIYYLLATNQCYDLELARAV

SEQ ID NO: 121577 - protein, 343 aa, unidentified
MEEVSIIGVDLAKNVFQLHGAAADGAVVFRKKLSRLQFARFMTDHPACDVAMEACPSAHHWARELSAYGHSVRLIAPHYVKPFIKRQKNDAADAEAIVEAAMRPTMRFVEPKTEAQQARAVAFRAREQIVKQRTEAINALRAHLYEFGHVAPEGVGYIPRLAKVVEDPGSGLPDLARDICRMVLEQIELLTSRLTAVSAKLAAASRAAAMPRQLQTMPGVGPITALAVETFAPPMDQFRRGRDFAAWLGLVPRQHSSGGKQRLGKTSKMGQRDIRRLLVTGAMAVVRWALRRGAPQNPWLQRMLERKPPMVAAFALANKMARGIWAMLTRGEDYRVPVIASAA

SEQ ID NO: 121578 - protein, 407 aa, unidentified
MKHVIALDVSKGKSTIAIYDGYRQCEFEGELYHTRIDFKQLHLRIKEITALDGQAPEIVFEATGVYSKPVEKFLRDHGHTYCRMNPLEANLQMASMRRHKTDISDAHELAKTHFKLERETTYVQNDYYEQMRAITRYYDEIEEELILLRNRMHAILHISFPELERLITPSSALFLNFVQLYPHPALLLAHSKTIIKNRLKSNTRKKLSLERAEKIAIMLLEAAKNSYPAIEPTDIRCNQVRDYAQRIADLIEKKDQLVKQMVMMSEGRKEYTVLRSFPGIGDATACRLIGELGDIRRFKNAKQLNAYVGIDIMRYQSGNTQYRDRINKRGNKKLRKILFFMICTMLMAKGKPNHLVDYYYKLKTQPQRKPHKVAIVACINKFLKVTFQLLTHGILYDYESALPAQKS

SEQ ID NO: 121579 - protein, 357 aa, unidentified
MTTMTQSASTQVTVGVDTHLDVHVAVVKDQLGRRLATTSVATTPAGYAELLGWAEQVGPVEAWGIEGTGSFGAALTRFLRAHGQVVVEVNRPDRAARRRRGKSDSLDAEAAARTAQAHQGSMPKAGDGLVEMIRVLRVARASAMKARTQAINALKALVVTAPEELREQLRTLSTLRLVKTAAELESGAATDPSAAAKLAVRLLARRYQALTAEIMTLDAELDRLTATAAPKLLARFGIGSDSAGALLVAAGGNPARLRSDTAFAMLCGASPLEASSGKVRRHRLNRGGDRQANAALYRIVVARLRHDQQTRDYLARRIREGKSKKEAIRCLKRYVAREVFAVLRGNAQLQPAALPSP

SEQ ID NO: 121580 - protein, 316 aa, unidentified
MVPSVTPFTRILGCDVGDAMIVVHDTASSSIRKIPHHPGALAAFAADLDQTCLVVCEATGGYELDLLAALLAAGVPAHRADARKVKAFIRSFGTLGKTDDLDARALARYGQDRGGQLTLWRARDEQRVKLQALVLLRQDLVDDRHAYKNRRKAPGAAALAGIIDPIIEAFSTQIETLEKQIEEVVASCEAVARSVTTLTGICGVGFTTAVSLIALLPELGHASKKQIAALAGLAPHPDQSGAADRYRRTRGGRQHLKPTLFMAAMAAARHHPTLKIFFKRLIEKGKKRLVALTAVMRKIVVIANAQIKTENRRQLS

SEQ ID NO: 121581 - protein, 426 aa, unidentified
MKYNISSHNRFYQPPIAIGIDWGDSKHAFAIACHDQDIETGSIDHSSETLHQWLQALEKRFAAQPVTVILEAGSVPLIAALREYHWIQIFSICPLASAAYRKSIRPSGAKDDRPDAVLLLGMLLSNHQRLSPLPDRDDSLPHLLDRLVVHRRRLVDDRTAKTNQLMAALKSYFPQALELLPKELYRPFVICFLRKWSNLLDLKKARSSTIERFYLKAGHRRPQTIQAHLKLIKQARLLHKDHALTAIGELHVAHLIEQIECLNHQISETEKQIRPLFQEHENASFYRNLPGAGANMAPRLLAAMELLPTDNVQDAQKYIGVAPVTQRSGKQCWVHRRFHPPQFLHQTLVEWAGLTVQFSPWAKAYYQHAKKQGKKRFVILRSLAFKWLRILDGCRKTKTDYDEQKYIQCLIKKQVPWARGLQTPTT

SEQ ID NO: 121582 - protein, 426 aa, unidentified
MNYKQNEKILQVTEKTLVIGIDIAKEIHYARVFNFRRIELDKVISFRNSLDGFNSFKEWLRAVMSKHNLDSVIIGFEPTGHYWFNFAEYCRNNDLKYVMVNPFHVKRSKELDDNSQTKNDRKDPKTIAMLVIDGRFSETYVATGIYAELRNVVKMYDHVIGCKSVVQNKITQWLDIYFPEFAMVFGDWEGKAAMITLSSFPLPSMIVELGEAKVLETWKKEIKQGIGIKRASKLYEVAQASVGCAEGLKMAVKELEYLLREYEMYTMQLEEIKAEMEELLKQIPGAKEILEIKGMGLVSAASIISEIGDISRFEDARQIQKYAGLSLIENSSGKHKGQTTISKRGRKRLRAVLFRVIMPMVAKNQEFKELHLYYTTRKDNPLKKKQSLISLCCKLIRIIFAMLTKKVAYDGKKLMKDIKRPEEVAA

SEQ ID NO: 121583 - protein, 413 aa, unidentified
MRLFAGDDWAEDHHDVELMDTAGRRLAKARLPEGVAGIARLHAMIGEQLGEDADEEDAGQVVIGIETDRGPWVAALIAAGYTVFAINPLQASRYRERHGVSGAKSDAGDAHVLADMVRTDSHQLRPVAGDSAQAAAVKVVTRTHKTLIWERTRCTQRLRHALRDYFPAALEAFEDLDAPDTLELLARAPDPASAAKLTTAQISAALKRTRRRGIAQKAKRIQAVLRAGHLGQPDIVTAAYAASARALIAVLATLNEQVKVLQGQVEAYFGQHPDAEILLSQPGLGPILGARVLAESGDDPGRYASAKARKNYAGTSPITRASGKKKVVLARYVHNDRLIDALMAQAFTAISTSPGARAYYDHQRARGSEHNPALRQLANRLTGILHGCLKTRTLYDEATAWPHHAAKTEKAAA

SEQ ID NO: 121584 - protein, 353 aa, unidentified
MAGRRRHVIGGVDTHGKTHHAAVIDRTGRVLGDQEFRATTAGYQQLLAWLNSFGRISEVGIEGTGSYGAGLTRHLAGAGITVVEVDRPDRAQRRRQGKSDPIDAIAAARAVLSGRATATPKLRTGPVEAVRVLQVTRRGAVKARTAAFNQLRAIIVTAPEPLRGQLSGLTPAALLAACRDLPVDEDRLHDPAQATAAALRALAERITTLTAQTTQLAGWLSSLVATTAPRLTAMLGVGPDVAAQLLATAGDNPDRLHSEAALARLTGAAPLPASSGRTDRHRLSRSGDRQANKALYTIVLTRLRYDPRTRAYVQRRTQQGLTIKEIIRCLKRYIVREVYQALIADFKALTAAT

SEQ ID NO: 121585 - protein, 375 aa, unidentified
MEGAPMLDTTTFIGLDVHARSIKAVSLDVMTGEVRCATFGYDAGAVAGWVRSVDPRARCVYESGVTGFDLQKRLSGLGVDCVVGAVSKMIKPSADRRRKNDRNDAEFLARMLSVGNVVEVWVPDDECEAARDLTRALEDARDDLSRSKQRLSKFLLRHGLVFDERTPTGRRKGNWTRAHWSWIESIRFAEGADNDVLAYYVDAVRRAAEEKARLEGLVEAEARKPRWRRRVDSLRCLKGVDTATAADLVFEAGEFSRFKNARSFAAWAGLTPSEHSSGESVRKGGATKAGNKHLRKTLAEAARHYPTCSAHSKDLAEGQAPNQAARRHATKGIRRLVTRRGSMPERGMRKNKANVATARELACWVWAVRLMAEEG

SEQ ID NO: 121586 - protein, 352 aa, unidentified
MSQKSNCAIAVIGIDIGKNSFHVVGHDRRGAIVLRQKWSRGQVEARLANLPACLIGMEACVGAHHLSRKLRMLGHEARLMPAKYVRPYSKGQKNDFRDAEAIAEAVQRPTMKFVATKTVDQLDLQALHRVRERLVSQRTGVINQIRAFLLERGVAVRQGLRFLRVELPGILATRTDVLSPPMLRILEDLAGDWRRLDERVEGLSNEIEAIAQQDAGCERLMSVPGIGPIISSAMVAAIGAGDVFSKGRDFAAWLGLVPRQISTGDRTILGKISKRGNRYLRVLFVQAAWVVLIKPKSWERHGLKSWIEAAKKRLHRNVLAIALANKLARIAWSVLAHGRHFEATKVGGAIAQ

SEQ ID NO: 121587 - protein, 352 aa, unidentified
MVKGNSGMTVGIDIGDRYSHLCVLDEHGELAERARVATTRTAMEGWFSRRARCRVVLEACCHSPWLSRLLDSLGYEVVVANPRQLKLIFKSKRKNDPIDSERLARLGRVDTELLSPIRHRSEDVQRDLHVLKSRDVLVGSRTRLVSHIRSVVKSLGGRVPLKVRAETFYAKASEHVPTGLLPSVKPLLRALKCIDAEIKELDKQIHRLCLESYPETAILRQVTGVGEIVALTFVLVIEDPKRFENSRDVPAYLGLVPRQWQSGAVDRNLHITKAGDRFLRKLLVQSANYILGPFGPDCDLRRWGQQLAERGGRGGSKRARVGVARKLSVLLHHLWATGQVYKPVLSPSAVAA

SEQ ID NO: 121588 - protein, 350 aa, unidentified
MGKLYHIGVDLHKKNLQVAVLNNAGEILDMRRLGNNDKEGLKEYFSSFPEETPVVVEATTGWEWLSDLLEEEELAVKLANPHKVKLIAEATIKTDKIDARTLAQLERANFLPLSYLAPREVRERRELLRHRMILVKLRTSLKSRIHSILNKKGIIVEERTDLFGKKGREILKEVELPEIYREETDTYLDLIDRLDEHIKEKEKQISKIVSEEELARLLMSIPGISYFSGLLILSEIGDIKRFNSAKKLCSYAGLAPTTSQSDEAVYHGHLKKDSNKYIKWVLIEAVEHIIKKDPQLAYKYEKVLSKKGKNKARVAVAQKLCISIYCMLKNRQPYKTRERKRNRILFRVSP

SEQ ID NO: 121589 - protein, 326 aa, unidentified
MTLSHSLDNTFIGIDVGGASLDVAWHRGASAHYANRLEAIAALVERLQMGPKVTRIVVEPTGGYEKALVKALRRAQLPVEIIHTTRFKAYRELVGAKAKSDTSDARLLAAYAAAPDEVRGRKADYVELPEDAIREALAELASRRDQLKHMIHAETCRLGTVRRAELHEAITTHLEVLRAEDKQMHRMMLALVRQRADLQRDQRLLKTIKGIGMKSALAFLASVPELGRVDNKAAAALIGVAPFVRQSGTMNAPARIHGGRAAVRSILYMAAVSASRHNPVLRPFYERLLAKGKPPKLALIAVLRRLVVFANAVLKSGQPWKGAIAS

SEQ ID NO: 121590 - protein, 366 aa, unidentified
MNKISTDAMNRIENLKGDQLTIGLDLGDRFSHYCILNASGEVIAEHHLATTAKGIDEVFGRIPRNRIALETGTHSPWVSRQLTRLGHEVIVAHARNVRLIGDSSRKDDQFDARTLARLARIDPGLLGPVQHRSAQAQIHLTVIRARAGLVGARTALVNTVRGLTKSYGERLPKCGTQRMNREVAQGLSQELRDALDPLFREIESLNERIAEYDRRIERIAKEVYPQVALLKQVKGVGTLIALAYVLTVDDPYRFRRSRDAGCFVGLRPGRRNSGMSQPQLHISKEGDVYLRTMLVQGAHYILGPFGEDSDLRRWGLKLAERGGKNAKKRAVVAVARKLAVLLHKLWVSGEVYEPLRNNHKVVAAVA

SEQ ID NO: 121591 - protein, 359 aa, unidentified
MSDGSKEHPHMTAGLDLGDKYSYLCLIDQHSGEVIEEGRLRTTPEAFKRRFASEQPMRIAIEAGTHSPWASRVLEECGHEVLVANARKTRLIYANKRKTDEIDAENLARLARLDPKLLYPLKHRGEESQAHMAIIRSREALVSCRTQLVNHVRGAVKSFGARLPKCPAVSFHNKAAEHIPEALIPALGPILEQIGALTQRIRDYDRQLETISKERYPETELLRQVEGVGPLTALTFVLTLEDPYRFEKSRSVGAYLGLVPAQDQSGDRDPQRRISKEGDELLRRLLVSCAHYILGPFGSDSDLRRHGEKIAARGAKNSKKRAVVAVARKLAVLLHSLWISAEVYEPLRNTQRSSGGQAA

SEQ ID NO: 121592 - protein, 353 aa, unidentified
MNITTVGIDLAKDVITAYAQDAQGRCVLSRNFRFKELAEWLVQLPDGCLIGMEACSTAHHWGRRMQTMGLQPRLMAAEFVQAFRKSRSAKNDHNDAEAIAIAVRQPTMRFVAIKNETQQSRLAWHRVREGWKEERTALINRCRGLLLEFGYPIARSATAFQRGLQTCLHDEHLPDNLRRLLAQIDDQLRQLDQQLALCDREIAQSARDDEAAKRLQAVAGVGVITADAVCASVGNAHDFKNGRQFAAWIGLTPRQYSSGGKTQLGRITRRGDAYLRSLLVQGARSTLQATLKKAPDKLNRMQQWIIRLYGRVGYHKTLVAIANKHARQLWALLAKGETYDLNAWQQYAIGEPS

SEQ ID NO: 121593 - protein, 350 aa, unidentified
MRYAQINSKYVCGIDLHARQMYACVMNRTGEILFHRNMRTDFYQFKKKMQPFLPDLSVGVESTHMYYWLADACRKEGIPFYLGHAYYMKTIHGGKTKTDRLDCRKIADLMRTNYYPLAYAYPEEMRATRDLLRRRHRLSRLRAECYRHINSLFHQQGIDVNPRDIKSVKARRELVRTHLSDDIFANAQTDLDMIDFLDPVIKESEQKIRAQAKCHDRASLNILMSVPGIGDIFSLIILYEVNNINRFTSHQHFCSYARLVRCERSSAGKHTGGGNAKIGNPYLKWAIADIIIHAASKSKPIGEYYQKLQARFGKRKAKSIISHKFGVAIYYMLKNKQVFDEKRFVLTQMK

SEQ ID NO: 121594 - protein, 405 aa, unidentified
MDITPIHRRVIGLDVHQNKITACALIEQADGSVAVEQGEFGGFKRDRRALAAWVHGLAPDIVVMESTGIYWKSPYAALEKVGIAAWVVNARHVKNVPGRKTDISDAQWLATLARAGLVRASFIPPAEIRHLRLIARQRQKLGGMLAAEKNRLHKVLADAGIRLNVLLSDLHGQSARAMVKALLADQPIHAILERAGRLRASREDLFEALQPEELSAKHRFVLNEIMAHIQYLEATMARFEQQLLVGLAPWEPQMSLLETVPGIDRLGAAMLLVEIGTDMDSFGSAERLASWVGICPGNNESAGKRKSGRTRKGNAWVRRLLCEFAQAASRTRCALKDKFSALAIRKGHKRSIVALAHKMLRIVYAMLANTTPYQDRTVDYEALMVGRNAPRWLKMLAKHGYIATA

SEQ ID NO: 121595 - protein, 418 aa, unidentified
MKSMEITAVGIDVSKSKSTVAIRRPGGVIVARPFDISHSNHELEKLVSILKTTGGDIRVVMEHTSNYWKPIALTLKEAGFYVSVVNAMLIHDFSDNSIRKLKTDRADSLKIANYALTFWNELPPFNDEDETRLVLREQSRMYERLSSTATALRNGLIALADQTFPAIDQAFGHAIKNADGHEKWVDFFSIYWHRDCVLRLSIEKFTESYRKWCLRRNYKFRTNTAHKLYALAQDAVPTLPKSNGTKALVLQACKSLNAVCEAKQATQEEMNRLASLLPEYEVVMQMEGTGPITGPALMAEIGDVRRFKNKKALVAFAGIDAPPFQSGNFESKSRHVSKRGSPHLRRTVFLVANIILTLSHKDNSVFCFMDKKRAEGKHYYVYTIAGSAKFLRIYYARVTEYLRAQEPTATAICLDCKD

SEQ ID NO: 121596 - protein, 450 aa, unidentified
MEKKTTAVFEELRRNVAGIDLAWRADHYVCGPRGEDGECEIASFGTTTPELHRMLRWLKERRVESVAVESTSVYWIPTADLLESNGIEVVLVDAREVRMVPGRKSDVQDCQWLQKLHSCGLLRGAFRPPEAVAAARTILREKETLTAMRTQAIQQMQKSLNQMNIRVHHAVSDIDGKTGTAIIQAILEGERNPARLAALRDKRCKKSEREIADHLTGTWRDEHLFNLGQAFKTMQFLDERIAEYERKASQMFSALAGPPGDPPPPLPGGKPAAKERANAAGIADLHRFLGFDITEIPGIGYDTAAVVVSELGKDFDRFPDESRFSSYIGLAPSLGKSAGKNVRHKHCKNTSRVGRALRMAASTLHRSQTELGAFLRNVARRTDKKTAVKATARRMAHMIYRGVKYGQEYIDRGADEYEARSRARTLKTVNRLIKSLGINGSEIAAALVAV

SEQ ID NO: 121597 - protein, 429 aa, unidentified
MNCTQNKKIEQVKETTMIVGIDVGSEKHYFRAFNWRGIELTRKPVAFSNSMEGFNSFYNTIVELMQKSELEEALVGIEPTGHYWFDLGQFMGEKDIKFVMVNPHHVHKTKELDDNSPSKNDRKDPRVIAGLVRDGRYFYSYMPTGAYAELRNASNRRFVLVEEQTRAKNRLQKWIAVYFPEYKGIYTHIDAKGGMLVLKKAPTPEEIVRLGVEGIIKIWKDAKLRGNGHKKAMLILNAAMKSIGLKSGLTEARMEIQDLIEDYELQTKRLERVNDLIKELCQQVRYADKLLEIKGIGITTVAGFIAEVGDITRFDSTKELQKLAGLELVSDSSGKHNGKTKISKRGRKRLRYLLFEAAISVVGKNEEFKEIHRYYTTREKNPLKKMQSLIVVACKLIRVFHAILTKGIRYDASKMLKDIRHPGEQLKAA

SEQ ID NO: 121598 - protein, 317 aa, unidentified
MNTINNQNEINVGVDTGKTQLDIYIRPLDIYFTVENNQSGIKHAIQILKKHPVTRVTIEATGRLEQPFIIACAEANIPFVIANPVNIKRFAGAIGQKAKTDKLDAQLIAHFGEAIKPPLSSLKPEQMRLMSDLLSRRRQLMDMQTMEKNRSQIMPKTLSSLIKPILTALKNQIDKVDLKLQKLVSECDEYKAKNAIIQSVPGVGNVVAFNLLSDMPELGYVNNKEAASLVGVAPFNRESGVYQGKRMIRGGRPKIRTAMYMAMMSAIQCNAKFKDLYQRMVKAGKPKKVAIIACIRKLVVIINSMVRDGVMWDPKMV

SEQ ID NO: 121599 - protein, 359 aa, unidentified
MSEITFIGLDVHARSVAAGVLDGASGEVRSCTAPPRSAELVAWLQRQGESLSVAHEAGPTGFGLARACAAAKIPCLVAAPSRIARAPGERVKTDGRDALKLAKLLRLGELVAVRVPSVAEEGARDLVRAREDARGDLMRARHRLSKLLLRQGFVWEGSAWTLAHEHWLASQSFEARGLGIAYEEAVAAMMSVRARRDAFDRAIAEEATKEPWATTVARLACLRGVSTLTAFGLAVEIGDWQRFNGRSIGAYLGLVPSESSSGEHRRQGAITKTGNTHARRLLVEAAWHHRRPSSHLGRELARRRAGQPALVRERAEAAGRRLQKRWRSFDARGKRSTVAAVAVARELAGWCWSLAVMDL

SEQ ID NO: 121600 - protein, 288 aa, unidentified
MSRDIKYIGMDVHKEAIVIAVLNGGGKLVMETILETKASSILQFIHGLRGELHVTLEEGTWAAWLYDLLQPQVQQVLVCNPRRNALLKEGNKSDKVDARKLAELLRTGMLRPVYHGENGLRTLRELGRSYQTISKDLTRVMNRLKALYRGWGIPCAGSQVYARRYREEWLHKIPQAGVRRRAELLFQQLDGLQALRRNLRPEFLAESRKHKAAQLLRQIPCIGPIRAARLVALMQTPHRFRSKRQLWTYSGLGIETHDSAQYRYVGGQLQRSRNPSSSVVSIRTTTMS

SEQ ID NO: 121601 - protein, 313 aa, unidentified
MNQKEPERFVGIDISKQELVVAVRPTTDLQTFTNTEEGLATLVRFLQELSASSIVLEATGGFARAAVNAMALAALPVVVVNPRQIRDFARSVGLLAKTDAIDARIIARFAEAVRPEFRPLKDLETQKLGDLNNRRCQIVEMITAEKNRLGMAPVWSQKDIRAHIAWLEKRLKKVNDDIDNLIKQSPIWRQKEKILTSVLGVGPVVTTTLLCGLPELGTLSARKLSALVGVAPFNRDSGQHRGRRACWGGRAHVRAALYMAALTASRCNPVIRAFYLRLRNAGKPAKVALVACMRKILVILNAMLKNNTCWQQA

SEQ ID NO: 121602 - protein, 321 aa, unidentified
MTTDSPPVFVGIDVAEATLEVHLRPHDTHVVVANDQAGLDDLVDRLSHHTVALIVLEATGRLETMAAAHLANAHLPVAVVNPRQTRQFARAKGLVAKTDKIDADALAHFAEAIQPTPRPIPDAQQEALDQLMSRRRQLIKMRTAEKNRLKRMTDPEVTDSLTEHIDWLDGQLKDLDNQIRRRIRRSPLWRERDDLLRSVPGIGPVTASALIAELPELGAANRQQISALVGVAPFNCDSGRCRGQRRIAGGRAGVRATLYMACLSAMRFNPVIQPFYQRLCDRGKPKKVAIVACMRKLLTILNAVVQSGVPFDPCRAHVVET

SEQ ID NO: 121603 - protein, 334 aa, unidentified
MHYVGIDLHKPFLVLCVQDADGHTLAQRRFDCCKSADVARFFEKHQPFRAVIEASSSYRWLYELLSPLGEVVLAHPLQLRAIVAGRAKTDKLDAALLAKLLRAGLIPEAYVPPKAYQTLRDLARARARLSREATKAKCQMHALLTRRNIQPRYRNPFGKRGRRWLASLELGGVDNLLRDELLARLDHYAERLITLDRMLESVATQFPENEVLTDLYGIGLYSALLIVGEIGEPGRFRDKRKVGAYAGLTARVNQSGGHCYTGHITHQGSPWLRWILVQAAMKLVRRDRQLGKFYQRIRKRSGTKIARVAAARKLAGICWVRLMRWHRRQAAQAV

SEQ ID NO: 121604 - protein, 410 aa, unidentified
MYYVGLDVHELRSSVEILDCNGKLFKRTEVKGRWPLLIEELKKVPKPFSICYEASCGYGHLYEQFSKLAQEVKVAHPGALAWIFKSKRKHNRIDAIKLAKLLFLDEVPAVHVPSAMVRTWRQTIEFRQKLLRSRVMAKNQLRAFLRERGIAAPKSLWTRKSQAWLKTLELEEGEAIRRDLLLDQLEESDQKLKRVDKYLNKIGANHPGVTLLKTIPGVGPRTAEALVAYIDDARRFGGLKRAGAYFGLVPCQDASADKNRLGHITRDGPGTVRKLLCEAAWTGVRCSPTIRSYYQRLTHDDPDRKKIAIVATAHHLVHVAVSMLKTGQCWKESAKEDSSPKTDRGGGENPSRPQGFSPPPVTGDGSPQASLPPPLSASPFSPEAAKGQDNQCDRLNRDEQTVEKPETVGA

SEQ ID NO: 121605 - protein, 343 aa, unidentified
MEAITTIGLDIAKSVFQVHGVDAAGNVIVRRQLKRRNVLAFLEKVPPCLVGIEACATSHHWSREITALGHTVRLMPPAYVKPYVKRQKNDAADAEAICEAVSRANMRFVETKTPEQQACLMLHRTRHLFIKQQTSVINAIRAHLAEFGIVARVGRNGVEELLRVAADPGDRRVPEVALACIAALGAQLRMLKAQILEFDRQIMAWHRSNETSKRLDEIPGVGPALATALVASVADPKAFRSGRNFSAWIGLVPKQYSSGGKDRLGSISKQGDRYLRSLFTAGALAVIRYAKIHGTRHRPWLAALLARRPTKVAAIALANKIARMAWAMMVKGERYKEPATLAV

SEQ ID NO: 121606 - protein, 346 aa, unidentified
MSHKPAAAVAHTIGIDTGKNILHLIGLDDQGAIVLREKIARSRIAARFANVPRCLIGIEAGMATHYVARELSALGHDVKQVPPAYSKPFRQGHKNDFRDAHAIAEAVQRPSTRCVPVKTDDQLDLQALHRVRSRLVGQRTAVINQIRGFLLEHGIAVRQGLRFLRQQLPDILAKRSDVLSPRMIRILEDLSGDWRRLDERIEHVSKEIEVLAHSSESCRQLMTVPGIGPLIASAMVAAIGNGAAFVKGRDFAAWLGLVPKQMSTGDRTILGRISKRGNRYLRTLLMQGARVILLRPANWAKHSFGPWLTAAANRLHHNVLATALANKLARIAWTVLMQARSYEARV

SEQ ID NO: 121607 - protein, 359 aa, unidentified
MNEITRVGVDLAKRVIQVFAVNAAGLRVTGRALARDKFLAWCAQLPAGCLVAMEASSSAHYWARKLLALGLDARIIAAPHVVPYRLQGKSGKNDANDAAAICEAASRPHMHFVPIKSVEQQSMLCIHRLREGVKADRTACINRIRGLLAEFGLVFAQSPEALRQVLPDAMEDASNELGALARLTLQRAYAQWQELDAHLRWCDERIAAHGKASDQVRQAEQLLGVGTGHGIRGGGPTVGDFKQFKNGAQFGAWLGLTPRQNSSGGKNNLGRITKRGDAYLRTLLIQGAKSIVLTAHRRDDPISRWVQALRERSGWQKAVVALANKNARILWAVFARGRAFDAHHVSTKPPGAIAAVIAV

SEQ ID NO: 121608 - protein, 347 aa, unidentified
MEQYAGLDVSLKAVSICVSDGTGLVVWRGDVVNDPAAVVATLGRHAPDLVRAVLETGSCGIHLYRELEAAGVPIVCICARQAKGVLKCKVNKSDANDAEGLAQLARTGWYRQVYVKSIDAHVIRAHLMARRQIAKARRNFENQMRAMLRIFGLKVGTVSRGRFEERVRRLLSKVPALRVPLDQLLMSRRSLMQAEDALKDEAKHLAAADERCRILQTMPGVGPLSALAFVSAMDGPARFAKSSSVGAYLGLTPRGYQSGEVAWTGRISKTGDGLARALLYEAANSLMARVKAKAPMTAWPPLKLWALNLAERVGGKKARVALARKMAVILHRMLADGTAYRWAPKAA

SEQ ID NO: 121609 - protein, 346 aa, unidentified
MVIVGCDFHPSWQQVAIFDSVTGEIAERKLMHADGEAERFYRGLSAPSLIGIESCGNSQWFQELLERLGHQVWVGDAAQIRASYVRKQKTDKRDAAHILKLLMEGRFPQVWTPDAEVRDLRQLLIHRHRLVQIRTRVKNGLQHLALNRGMRKKHGLWTEVGQREFLALPLPNWAQRRRADLLQLLRCVDEQIRPLDAAVDKAAWSHEQARLLMTHPGVGAITALAYVLTMGDVGRFQRGKQVASYLGLIPGEYSSGGKQRLGAISKQGNRFLRMLLVEAATTAVRLEEGMKKKYQHRCHFKQKGVAKVAAARKLAVRLYWMLRTNTAYPEVVHNESSSRVPLAGAS

SEQ ID NO: 121610 - protein, 343 aa, unidentified
MKDTIFNHYIAIDWSIENMAIARMTKKSNKIILIDVPSDIAEMKVYLKRLKGSKILVVEETTTSQWLYAELRDYVDRMVVCDPYRNKLLSDGPKTDKIDATKLVHLLKAGLIKEVYHSTDKFLYLRRFVSGYEDLVKAGVRLKNQRYSFLRACGKRGFERAGMKLDAEDDQFVLDCMDRQIETQKQEKEAYEKEFGRLSRDYPEIRHQKSLPGIGPIHAVKIVARIVTPYRFGDKGNFLSYLGLIKLEKISGGRSYGRKNSRYCRQLKSVYKTSTWAAIGGNNPINDYYEYLIREKGYPEHNARHKACRRLAILSLGVFKSGKKYQPYRRNHVEGKKEVTSGL

SEQ ID NO: 121611 - protein, 431 aa, unidentified
MNYNQNHKITQITSETLIVGVDIAKHNHVARAQDFRGLELGKTCFFENTKAGFHSFLDWINQLVKECKLNQVIVGMEPTGHYWLNLAHLLKENNIKFVSVNPLHVKRSKELDDNSPTKNDVKDAKVIAQLVKDGRYAEPTIPQGIYAELRVAKKLRDLLNVDLQVVQGQVHNWLDRYFPEFLTVFKSWEGKAAIHFLKLEALPHQLVNYTDEELLLSLRQVVKRSIGLKKIRALKEAANRSIGIRQGAAMAKLELRALLEKYDFIQVKFEELDHQLDQLLEHIPGVTQMLEVSGIGRDTVAGFFAEVGDLRDYQHPRQIVKLAGLSLKENTSGKHKGQTKITKRGRKKLRALLFRAAMILVAKNKAFKALHIYYTTRSHNPLKKMQSLIALCNKLIRILFSIGKKQFTFQEDKMLKDIPHMATFVVHQTVA

SEQ ID NO: 121612 - protein, 353 aa, unidentified
MANPMANLTIGVDLGDRYSELYVVDGAGACVETGRIRTTVAGLEQWFGGRPPARVVLEAGTHSPWASRVLPRLGHEVLVANPRKLRGLYENDSKDDRVDAEYLARVGRLDPALLKPITHRGEAAQADLAVLSSRDVLVRARTLLINHTRGVVKALGGRLPRCSAEAFARRVGPHVPPAVRPALAPVLEQLQQLTTTIRGFDRAVEHRCAQSYPETARLRQVTGVGPVTALAYVVVLDDPTRFRRSRAVGAYLGLRPRRSQSGEQDPQLRITKAGNPFLRRLVVQAAHYILGPHGPDCDLRRHGERIAARGGKNAKKRAVIAVARKLAVLLHHLWISGEVYEPLRHRPALAQAS

SEQ ID NO: 121613 - protein, 418 aa, unidentified
MTEVLITSQDILVISTRLEREVVKFSLTEVFAMKYVGIDVAKETHYGCVTSQNNKILIAPFSFKNDIDGYNLFLSKFKKFPKSDVVIGLESTGVYGENLIAFLSGHGYKIALINPIETSELRRKRVRKAKTDKIDSKTICKYLFQEEYRLLEQHELSVLELRGICRFRQSLVKQNARLKIQLVSYLDVVFPEYHTLFSTVHGKASYAVLSEFSSPAAISKANITKLENTLKSASRGRFGRVKAEELKELAKKSIGNNSHDKGFQITHTIAQIRLFDSQLDDTENHLKKLWNDIDTVLKTIPGIGAIDGAMIYSEIGNISRFSRPDQLIAFAGLDPVTSQSGNFRAQSTEMSKRGSPYLRYALVNAAWNVSMNNSTFGEYYNLKLAEKGRHYRALGHVAGKLTRVIFAMLKNNMNFNLT

SEQ ID NO: 121614 - protein, 322 aa, unidentified
MEAQAKFVGIDVSKARLDVGVWPGAESFSTSNDERGIAQLVERVLRLAPRAVVLEASGGLESVAAGELLAAELKVAVVNPRQVREFARSLGRLAKTDRLDALVLAQFAQSADSNGRLTTMRMLDPAQAELKALVARRRQLMQMLVAETNRHERAPKIIRKSVVQSIKGLKRAIAVVEKQVAEVIANSPVQQAKAKLLRAVPGVGPELTAGLLADLPELGELGRRAIASLVGVAPHAHESGIFQGRRMIWGGRAHVRTKLYMAALSAVRFNPLLRAHYVALLERGKARKLALVACMRKLLLILNAMLRDQQTWRPPLELQHSR

SEQ ID NO: 121615 - protein, 355 aa, unidentified
MSSEKYIGLDVHQATISVAVLDSTGKLVMESILETKAATILEFFAGLRGTVSVTFEEGTWAAWLYDVLKPHVAKLVVCNPRKNALLKDGNKSDRIDAHKLAELLYLNKLSSVYHGETGVRMLRELARSYLTIVKDLTRVMCRLKAVYRSWAIPCAGRDVYYTRHRDEWLGKINEAGVRRRAERLYQQLDMLQYLRQQARRELLAESRKHAISVKLRQIPSLGPIRSALAVALIQTPHRFRTKRQLWAYSGLALETRTSAEYCYVKGGLRRSKKQISIRGLNKDHNHDLKGLFKGAATRASVLPGPFQDFYQRSLARGIKPTMARLTLARKIAAITLTLWKKGENFDADKLKSQAA

SEQ ID NO: 121616 - protein, 355 aa, unidentified
MNYIGVDCHISSLDFAVVNEKGTVSQRAKVNTGVKEFIEFVKSIPKPRKIFIEEGELAGWLLETSLKFREELVITDPKTNKWIGKAGQKNDTIDAEKLAQLARGKYVKEVYHPVNDRRKFKDLVFAYHDTVKNQSRIKNKIKAKFRSNGIKCSGTTVYLETHRDKWREKLSSNSMTRLIVEELWVQMDQLRNSKEKLKKTIRIQSKRYSEIKKFMEVPGIGLIHGATISAIIETPHRFANKKKLWMYAGIGLMERSSGGTIYSRKLTIEYNRPLKNAIKQSTEAAISAKDNQFRRQYLKLTIEKGIASHRAKLTVARSILAALYGMWKKGEEYDSEIDKKRENKKFVRTISPRLV

SEQ ID NO: 121617 - protein, 460 aa, unidentified
MSQRRKKQKRAGQGGGAVPSLSCIEPNAAGIDVGATEIFVAVPQDRDPSPVRSFETFTEDLQRLKNWLQQCGITTVAMESTGVYWIPLFQILEKAGMEVCLVNAQHVKHVPGRKSDVIDCQWLQYLHSVGLLRASFRPEERICAIRSLLRHRDSLVQMAAAHVQHMQKALTQMNLQLHHVLSDITGQSGLAILDALLAGERNPPVLAQLRPARVQASEEIITKSLVGDYQREHLFTLRQSLQAYRYYPSLITACDQEIEEQLQNLDSRTPPDASPLPPERYPHRPRKNEFRFDMRSELYRIYGTDLTAIPSINALTGYTVLAEVGTDWSKFRNGDAFASWTCLCPQNKKSGGKILSAHTRRSANRVNRALRLAAQTLERSTSYLGAYYRKMRARHGAPAAITAAAHKLARIIFHLVTTREAYDESLFAAEEQRQRKRMENKLKRTAKQLGYQLIPLGQTA

SEQ ID NO: 121618 - protein, 401 aa, unidentified
MSNKVIFNLDELFISVGIDVGADFSWMSIALPNQQFVGKPYKILHNSIDSLTTAVSKIKEAEELYSLESRIFLESTGIYHYPLFCYLRDKGFNCSVINPIITKNSTNINIRKVHNDRFDSKKAALVGLKPDLKVSLMPSDLALNCRNLCREYYDLMDNRSAYVNKLQGELRMAFPQYLGIFSKVTINTSLTLLETYTSPSAFLEADKQEIIDIIKSTARFGLTYAQNKYNAIIQAATDANQFGYIIDSNIKRIRLYISFIRKYDEEINSILESLHELVDANEDADFVKQIHLIETSKGAGFLSAVSIMGEIGDFSAFSKPKQLFTYFGLDPAVKQSRKFEGTKVQMSKRGSAIARRVIHTLTLQSISISRNGEAKNPVLREYYLKKCDSKPKLVAMGGCFT

SEQ ID NO: 121619 - protein, 391 aa, unidentified
MYLVGIDISKFKHDCFIMTETGEVINNSFSFDNNDSGFTLLLNTLKSLDQSQKIKIGLEATGHYGNNLKLFLTENNYSFMELNPYLVKKFSQALTLRRTKTDKLDAMTIASVLGSPNLTYEPYQISSYHISSLKSLTRYREAFIKERSLHLVQLTNIMDQIFPEFKPFFNGKFGTTAIYILKKYKTPERISTLTDEDILKIKNVSRKISAAKLVKLRELAKNTVGHSSISNQILLKSILNLYTNVDDEVTEIEKQIDSIMSEYKNHIVSIPGISKYSAAQIIGEVGDFKRFSSASKLLAFAGMEPSTIQSGTMDFKGKMVKHGSGHLRYVLMNIAITIIIHNPTFYSYYSKKHHQEGKNHRVALSHVVRKLVRIIYHLEVTNQDFNLNLLK

SEQ ID NO: 121620 - protein, 466 aa, unidentified
MVVARKQKRMSAQVVEDEDYQLRYEIAAGIDVAKESAVVCVRMPPAAGRKHRTSHLQAVPATVPAITELAAELLAAGVQMVSMEATSDYWRIWFVVLEEAGLAVQLVSSSQARNLPGRPKTDKEDARWIARLTEMGMLRSSFVPPPEIRALRVYTRHVWDLTADRTRYWQRLEKLLEDALCKLTSVVSRLAGHQTARAVIEAMVAGERDPRVLAALGQGKMRNEKLPALAKALSGMRFGPEHAHAAASLLRAIDLLDAELKDLQERVTAHLAAIPGSWGVDCDGVTGPGAGRTADAAALPAAERLDEIPGLGRESAMALIAEIGLDMSRFPTPEALVSWAGLTPTARQSGPRSGRGKKGHGNTYAKRIAVLAAYAAANTDTFLGERFRRLSSRPGGGGRKKAGCAVGRSILIIVWHLLNDPAARYRDLGSDWHARHTDRSRKARNARRQLEALGYDVVITLREDAA

SEQ ID NO: 121621 - protein, 407 aa, unidentified
MWAVKHTIRAIDTRGRELSKSAFPFNNDSDGFQSAKVWAVKIAAEHNKSQIVPGLEPTGHYWFCLATWMISNGISVVQVNPYAVKQTKEVEDNSQLKDDTKDPKLIANLVKDGNFGMPYLPEKLYAELRRLSMFRDQLNEDRIRTVNRMHREMKIYFPEYKDALGKVDGAFSLELLKQAPFPDELVTPGEDGIRQIWHDAKLRGRGYSRAREILQYAKASVGIKDGAAAGRSAVKWFVQKILELDAELAVVEEQIDQKCQEIPHASNILEISGIGENTLSGILAEMGDISRFDDVKEIQKLGGLGLVACSSGKHKGETKISHRGRKRLRYWLFQGAKSAVAHAEEFRELHIYYTTRADNPLKKMQTLIVIACKLLRIIYTILKNGTVYDPKKMLMDIRHPEKKVDAA

SEQ ID NO: 121622 - protein, 371 aa, unidentified
MNSIVYVGMDVHKEQYTLCCYSYDTDKVEYKQTIPSDYKLVLKYMEQVRSRYEGEVSFVCGYEAGCLGYSLYQQLKDHAVDCKILAPSTMAVTNTHHVKTDKRDAANIARCLAFHTYSEVYVPDNDDNDVKEYIRMRDDQKLYLKKVKQQILAFILRQGKRFEGGKTYWTIAHLKWLKTLGLSDLQREALDEYLLTYEYLTEKISRFDERIEELASVERYEEKVKHMSCLLGIKTHTALSMIVEVGDFERFEKAPKFASFLGLVPSEDSSDTRVNRYSITKAGNSHLRRLLVEAAQSYTKGNVGHKSAALKQRQKGNPPEVIAYADKANERLRRRFYKMTLNKGVNRNVAATAIARELACYIWGMMTEPVS

SEQ ID NO: 121623 - protein, 394 aa, unidentified
MRKQYASVAYGGMDVHLNFSQVTFRDPAGKVVCRERLEHRDREGLREQIRRWPRGIVMVLEASYGWGWLSDELEAAGLKPQLSNCYKVDRMREARGMAKTNEKDADLLSLLPAEATRWWEVWRAPPAVRDRREWMRYRSDVVGVQTETKNRIHALFHRQGVFYEESTDLFGGRGRRFLQALCEDGRHAGGVLEGGVLEALRGLVDLLMYLREQLTTVAKHLRGQLERDPLIRRLDEIPGFGLILSHTVASEIGEIGRLRSHRALASYACLAPRSWDTGEADPTRAPLGRHLGDRGNRTLKWAFIEAAHGAVKSGGKWRALFDRVTQGGKKNTGRGYIKVARELVTVVFVVWSRDVRYTETPPARPGSRPRRRTQKDSRPGTGQPCHAMVHAARR

SEQ ID NO: 121624 - protein, 342 aa, unidentified
MERITTIGLDIAKLVFQVHGIDATGEVVLRRRLTRARLVPFFAKLAPCLIGIEACATSHYWARELRKLGHVVRLMPPSYVKPYVKRQKNDTADAEAICEAVTRPTMRFVEVKTPQQQSVMVLHRMRLMLMRQRTQLSNAIRGHMAEFGLVAPVGRRGLLAFIDTLHDETDDRVPAEARHCLQMMAAQLRLVNAQVLENDRRIRTSARATDVGRRLMGIPGVGPVLASAFVASVPDPAMFKSGRNLAAWIGLVPRQNSSGGKERLGGITKQGNRYLRQLLFIGSIAVIRYAERHGTRRPWLVRLMGRRPTRVAAAALANKTARMIWAIMTNGQAYREPELRSV

SEQ ID NO: 121625 - protein, 341 aa, unidentified
MKITTVGIDLAKDVFQIHGVDAQGQVVLKKQLRRVQMASFFVNLPQCLIGMEACGSAHYWARKLQDQDHTVRLMAPQFVKPYVKTNKHDMADAEAICEAVRRPNMRFVPIKNVEQQAVLSVHRVRQGLIKARTAQANQIRGLLSEFGLVLPVGISFLYQRVPILIDQAKDELPGMFQELIWRLLEHLKDLDRQVNELERQINVWHRSNKLSRKLEKVPGIGPITASALVASIGDAKSFANGRQLAAWLGLVPKQHSTGGKSNLLGISKRGDTYLRTLLIHGGRAIIRCAALKPPQANSWLARLLARRHKNVATVALANKNARIVWALLAHDREFQVDYAGA

SEQ ID NO: 121626 - protein, 373 aa, unidentified
MKTYTLKDGTLKATPVACAKEIKNEKAPKAKLIAVGIDTGLGNNQASRKVDNAAIGPVQKLRSETELLLYVDKQLELAQEVVVVYEAGPFGYGLYRKLTARGAKCLVSAPDSTQQKRKRRKNNAIDSRTLTSNLSNYLNGNEAALQLVRVPTPEQEQARLVSRQHDQLVEERKRLGAQGNALLLSQGFGSWKNWWRPQAFKALERVVPQWVLEMLQTWVDLLRVLDEKIQKAKAGLAKGWSGPRPKGAGANSLVQLQSQVLDWNLYSNRRKIACLAGMVPSEWSTGKNQRLGSITKVGVPAIRRIITEMVWRMILFQPHYRPVQKWQEVLRGTNRALKKKAVVAIGRQLIVDLWRLQTGRISAQELNLVMIGG

SEQ ID NO: 121627 - protein, 394 aa, unidentified
MKLVGIDVGKNSHHFCVMDKETGEFNVTPSSFSNNKEGFDFLINSLKPYSKKSILIGMEDTGHYHVALLKFLLSNGYPVALINPKTTDLTRKMEGGITKNDKLDTITICDVLDTPERKKQYRITKVDRFDLYEQRQLTRHHHNLKEELNVYCNRLQKSIDLVFPEFNTLFSSKYSIVYMNLLKTFGSAEAIASTDIRTIRKCFEIKGRGNRISLTPEKLKECAKNSIGISSEVETIQIKHLVSQITLIKEQIAEIDKKIEEFSITNNSPILSIPGISHFSGTSILAELGDIGNYSKPSQIIKFAGVAPYHYESSQYNAQHTGITKKGSKYLRKTLYQIILTVINNNPVFKKYYRLKISQGKGHRCAQGHCIRKLLRIIYHLLETGQSFDPALLR

SEQ ID NO: 121628 - protein, 312 aa, unidentified
MKFICGVDVSKAKLDACIEPGAVFRSFDNDATGVAALAEFCRQQQASLVVMEASGGYERRAFVLLWQAGVPCAMTNPRSVRYYAEAMGVLEKTDRLDASLIARFAHAKDLKPTALPDAAQLRLKALVARLRQVTDDLTVQKQRRASLLDNAEMLASLDEVIALLKRQSRTLEGEIASMIDDDPLWSQLAQTWRAMKGVAGRTVARLMADLPEIGTYSNKAIAKLAGLAPIANDSGKRLGKRPVRGGRRSVRSVLYLVAAIAARYDKSLADFRQRLIDAGKEKMVVRIALARKLLVRLNAKARDVRIAYANAA

SEQ ID NO: 121629 - protein, 337 aa, unidentified
MDITNVGLDLAKHVFQVHGLDEAGNILVKRRLRRSQVISFFASLRPCLVGMEACATAHFWARELRSLGHEVRLMPPQYVKAYVRRGKNDAADAAAICEAVTRPSMRFVPVKTEEQQAVLIIHRARELLVRQRTQLINAVRGHLAEFGVIEAHGPWNVTRLLARMEEVGTRVPELARQVVDLLADQLDEVGRRIGALDAEIAAWHKADAISQRLATIPGIGPLVATAIAATVPDPAVFRSGREFAAWLGLVPRQNSTGGKPRLGRISRQGDSYIRRLLIIGAQSVLRCSKMARSNPWLQGLLAKRPRLVVAVALANKTARIAWAVMARQQIYRQAVPA

SEQ ID NO: 121630 - protein, 397 aa, unidentified
MVVVAVDVGKNTVACSVTDDRRHRLLGPVDFAMTRSGLDSTVARIRQLLPATAGVKVGVEAAGHYHQPLMMLSSWPCGWELLELNPAHVSEQRRVQGRRRVKTDAIDLEAITELVLAGQGAPVTERAEVLGELAAWVGHRSRRVEARTALKNQLLGQLDRAFPGLTLALPDVLATKVGRLVAEHFTDPARLASLGEARFIRFAATRGLIVQRRVAGRLVGAARDALVTRDAVVAREIVANDLRLLTVLDQQVAQAEDHLGLLLPSTPFATLTTVPGWATIRASRYGAAIGDPGRWPGPRQIYRASGLSPMQYESAGKRRDGAISREGNVELRRALIDLGIGLWLNDPPAKAYAAGLRARGKKGGVIACALANRANRIAYALVRDQRPYDPSLWVQEV

SEQ ID NO: 121631 - protein, 323 aa, unidentified
MKYSGIDLHSNNSVVTVTDEEDRVIAEKRLPNDLTRIVGFLLPWRDELKAVVVESTYNWYWLVDGLQEAGFIVKLANTSAIRKYDGLKHSGDEADARQLAHLLRLGILPTGTILPPEQRALRDLARKRMQLVRSRTSHILAVENIVARQQGAKIGGRQIKQLTADVVDQMGLPPDVALAIKSNLAVILTLNAQIDVLEKHLQKKVGERKEFVLLSSVPGIGRILATIILLEIGTIDRFAEVGNFASYARCVDSQHMSNGKKKSEGNTKNGNKYLAWAFIEAANFAQRFNAEAKRFYERKKQRQTRRLPPRHWRTNWHGRVTTS

SEQ ID NO: 121632 - protein, 374 aa, unidentified
MGNVIEAFVAFDTSKLRNAVAIAEAGRAGEVRFLGEIENTAVAVAKLVRKLAGKYGRLTFCYEAGPTGYGLYRQIEGLGYECLVAAPSLILKKPGERVKTNRRDAVSLVKQLRAGDLTAVWVPDPHHEAMRELTRARETAVEDLRRKRQQVSAFLLRQGLHYPGERAWTKTHRDWLASQKLEYAEHRTAFEEMLLAMRQAQERIERLEQAIRLAVPDWSLAEVVTALMALRGIDFISASAFLAEIGDLSRFRTPRELMAYLGLVPSEASTGDTVRRGPITKTGNRRARRILVECSWSYQHPPRVGKEKQERVAAAPPAVREIAWKAQCRLSARYRALTRKGKLKTVAVTAVARELSAFIWAINRQIANSRAAAR

SEQ ID NO: 121633 - protein, 354 aa, unidentified
MEARTQNAVPILTTIGIDIGKDVFHIVGVDADGKIGLRRKIKRLTLAETFKKLPPCVVGMEACLSARFVSRTLQALGHEPRIIPAIYVKPFVKGQKNDYNDAEAIAEAALRPNLRAVSEKTQDQLDLQACHRVRSRLVSRRTATINQIRAFLIEQGITVRPGARALRNSLFEILRNRADEISPRTGQLIVGLYEDWLWLDERIETITKEIGEISQSEANCQRLMSIPGVGPLISTAMVAAIGTGEAFDRGRDFGAWLGLVPRQYSTGGKSILGRISKRGSRYLRTLFIQAAKIILMRPHNWEKYSFGTWLKEAAKRLHRNKAATALANKLARIAWSVLRNDKTFDMSHSEVPAI

SEQ ID NO: 121634 - protein, 376 aa, unidentified
MRVVGMDIHVRNSFLCVTDADGQMVGQGRVGNSLAEISQFLGSLPGGDQPLRAVLESTTNSRAIQRMMLDYGKGAGIEVQAQVLDPRKLRVIAESVSKCDKLDAAVLNELARSKLKLPACYIPDDEMFALREHLRARSDLVRMRTMLKNRIHSILHRRGILNPLKDLFTKDGRRWLGEMKLDEAGRLILDGYLRTLDQLQETIDESTSALSKLSRTQRWCKQAALLKTMPGIGPITSLTILAELGDINRFKSRQGVSNYAGIVPVIRNSNQKSFSGHITHRGPAHLRSALVEAAWTAVGRVPQYGAIYNRIAAKKAKQIAIVAVARRILEDAWTMLKRDEVFRLMTVTSNVTDVLISEKAAADAESATAVTVPNAG

SEQ ID NO: 121635 - protein, 320 aa, unidentified
MSKKKSTSFIGIDVSKRLLEVAAHQSDYQFRCANKASAFGELIVELIALRPARIVLEATGGLEIPVVAALHAAGLPVVVINARQVRDFAKALGQLAKTDRLDARVLAHFAAAIKPPLRPIKSKEELELDALAGRRGQLIEMLTAEKNRRVSAATETVRKEIKEHIDWLEDRIAELDEQLQTLLKSSKLWRVKDEVLQSVPGIGPVVSFSMIADLPELGTLNRQQISKLVGVAPLNRDSGQQRGTRHIYGGRARVRSMLYMAALTATRCNPVIKEFYERLLANKKLFKVAITACMRKLLAIINVMVRDCTRWKTKDDPVST

SEQ ID NO: 121636 - protein, 369 aa, unidentified
MSETSVAFQSFVGVDLHKCTVSLVAVDPAGNEIAKLKVPTKCVGKITSWLRSLPDPVWMAVEACPFVEWFIDRFQRCVYRMDIADATELSNRRGKRRKNDINDAEDIALRLARGECPLGFIADDQLMQLRKRGRHWRQLSHLLSRTKHSMKSMLNAANIPGPKFDAAGAHRWFLAHGHLLKPVQQVCFADFLDTLMLLERQRERLRREIILANRSDEFTEITTLLKSVPGIDEIWACIIAAEIGPFDRFPNADALEFWAGMTADLKESAGRTQSGHITKAGSRTLRWALCKAAVTLCRSDAKQEATRQRTIRQVGGVKAKANVAMGRRLLGILYAMVRDGKPYEIGEPTNHNRAANRARAARKQRKEAA

SEQ ID NO: 121637 - protein, 427 aa, unidentified
MYVAIPPDRDAEPVRVFPTFTADLEALADWLIERGITTVAVESTGVYWIPLYQVLEDRGLRPCLVNARHMRNVPGRRTDWHECQWLQYLHTSGLLRPAFRPQQDVCAVRSLVRHRHEMVQMACQHIQHMQKALTQMNFQVQHVIDDMTGVTGTAIVDAILAGERDPGKLAKLRQGRIKADEETLRKSLEGDWRAEHLFTLRQSREMYDAYRKQIEACDQELVKYLGDFEAKVDVVEKPLPKRVGPSRKRRAKRTGDYRFDVRQEAYRLWGVDVTRIPGLDGMALSLFSELGSNLTVKFPNSGEFSSWLGLCPDNDKTGGKVVWKGVRKINNRAGQMFRQAASALHRSRSPLGDLLRRMKAKLGPEAGITATAHKIAIIFYTLVTKQVEYDDSAWAERDRQRQQRFEQKLKRQARHLGYQLVPIQASV

SEQ ID NO: 121638 - protein, 400 aa, unidentified
MMTPDDIDVWVGLDVGKSAHHAHALDHDGNTLYDKPLQQDEKAIRTMLGKLSKHGRVLLVVDQPNTIGSLPLTVARNMGIAVAYLPGTAMRRTAQLLPGDAKTDRRDAHVIAWAALKLPETLRDAGPDDETLAALKLLAGHDEDLAHESTRHVNRLRSLLLQTHPAFERALKGERITRDATLALLERYGGPMGVKRAGIEDVKDWAKSNGLRAGRIIDDMFKAIGEQTVTVPGTLMAETIIPSIAHDIKTIRDRRREVGRQVEKLLEDHPLLTVLTSMPGIGVRTASNILLGIGGDIANFKSSAHLAAYAGISPVTGQSGTSIKGERPSRRGNKRLKNALWQTAFVASTKHPPSVAYYKRKREQGKHHNAAIICLARRRCDVIYSMLKNGTLYQEPALVA

SEQ ID NO: 121639 - protein, 379 aa, unidentified
MTEITGGVDAHSDTHHAAALDERGRLLGDAAFAASLEGCRELLAWLESFGPVGCVGVESTGSYAAGLTRFLAARGIAVVEVNQPHAHTRRRRGKSDPLDAEAAARSVLAGEATASPKHTGGIVESIRQLRVAREGAVKATTAALNQLHGLVISAPDELRQQIAARKTSRGKVTLCLRLRPDRTQLHEPLQAAKLALRTIAERVRDLDRQIELLDRHLVQLVATAAPRTTSLLGVSTQHAGQLLTTAGENIERLANDGAFARLCGASPIPASSGRTSRHRLNRGGDRNANRALHLIVVCRLRYCERTRAYATRRTAEGLTKPEIIRCLKRYIARELYHTLRADLADLNPSIPPTGHAVTISCGAGPTGTTRTSRRRRART

SEQ ID NO: 121640 - protein, 309 aa, unidentified
MDAQYVGIDVSKARLDVSVRPSGEAFVVARDDKGLAELVERLHGLAPRLIAVEATGGYETVVAAAIGGAGLPLAVVNPAQVRHYAQALGKRAKTDPIDAEVIARFAEATRPEPRAMPDEATQALAELVTRRRQIIGMMVAERQRATRLPKRLRKSCERVVRMLEKELAALDIDIDTTVRGSPAWRATEDLLASVPGVGAITARALIAELPELGRLDRRSAASLVGLAPFTQQSGQWRGKAFISGGRRSVRAALFVATMAAVRHNSIIRDFRQRLLAAGKPKMVAMIACMRKLLTILNAIVRDQKPWQPA

SEQ ID NO: 121641 - protein, 402 aa, unidentified
MGVDLHKQHHTAVIMNCWQEKLREIQIENKPSAFSTFLLEVNQLAGEQLTPVFGLEDVGGYGRALAKYLMDHEQIVKEVNPALSFAERKSHMTTQKSDSWDAECVARILVNKLDHLPDAKPNDLYWSIQQLVTRRNALVKAQSALKNQLHIQLSYHYPSYKKFFSEVDGKTALAFWERYPSPSCLDGVSVKQLTCFLLDVSHNTCSVNKANEILKLVKEDGHTMKEHQDTRDFLVRNIVQEISFIKQGIGKVERKLKELMSLLDFQLETMPGIDLVTASGFIAEIGDIRRFPNANKLARFAGIAPVYFGSGGKGKEQKSKQGNRTLHTLFYNLAVQQVQVAKGSKLKRNPVFHAYYQRKLKEGKTKGQALVCIMRRLVNIIYGVMKHKTAYQMPKMKGNEVV

SEQ ID NO: 121642 - protein, 387 aa, unidentified
MTVRTVSNLPAATHGETVRCLFAIELSKHSWVIGFVTPLSARIRRRILNGGDWKGLLELIEEVRARVSREMGRPVEVMSCYEAGYDGFWLHRQLEAHGVRNYVIDPASLQVDRRLRRVKTDRIDTERLLRSLMAYLRGEPKVWSVVRVPSVAEEDARRLHRERDRLICERVQHVNRIKGLCALQGIYDFHPLRPQAMARLEQLRTAQDGALPPRLKSEIKRELHRLALVVEMIATLEAERDAIVEDEASTHVNAEKIQALHKLKAIGPEFAAVLVGEIFHRDFNNRRQLASYVGYAPSPFRSGNVAHDQGISKAGNRKGRTTGLELAWLWLRYQPDSDLSVWFRARVGTVKGRIRRIAIVALARKLLVALWRYLETGLVPRGAVLKG

SEQ ID NO: 121643 - protein, 369 aa, unidentified
MNKNILFIGMDVHKESIEIAIAEGANTEVRRYGKIGGTHDAMRKTLRKLVSLGKTLHFCYEAGPCGYELYRYLVSEGHDCWVVAPSLIPKKAGDKVKTDKRDAIQLARLYRAGELTPVYVPDREDEAIRDLSRAREDAMLIQKSARQRLKSFLLRHDIRYQGKSSWTEAHLRWLADEVRCPSPAQQIVFQEYVDTVTEAQHRLQRLNEQIEIFVKQWRLSPVVDALMSMRGVKMVVAVTVISELGDLSRFDNPKQLMSFLGLTPSEYSSGQRQTRGRITKTGNGHVRRILIEAAWCYRYPAKVSPEIQKRQENLPLAIRNIAWKAQLRLTQRYKHMQQKGKPHNVTVVALARELAGFMWAIANEVKYPR

SEQ ID NO: 121644 - protein, 341 aa, unidentified
MQNDTRIGVDLAKTVFEIALSNRPGRVSRRERLPRAQFLNFFALQPRATVVMEACGSAHYWGRRIEGLGHRVVLLPPHHVRPYVRRNKTDRTDAKGILEASRNEEIRAVPVKTVAQQVLTSLHRLRSGWMKQRTARINTLRGLLREFGIFIPLGARQVVPAVWAFLEDADAEVPDALRPFFAELCREIREIEARILQVERQLTAMSKQLPLVGQLLTIPGIGLLTATALLAFIGDIKRFPSARHLGSYLGLTPREYSSGLKRRLGRISKRGDGYLRTLLIHGARSVLLHARTSRPDRLREWAHGLAETHVHNKAAVAVANKMARIVWAVWTRSQPYQPAAA

SEQ ID NO: 121645 - protein, 313 aa, unidentified
MAMETSDFIIGIDVAKAELVVHFQSHGTQMSLSNTKPEIKRWLKQQPGNTALCVEATNVYHLDVVEMAHEKGFKVYVVDGFQLSNYRKGIGGRSKTDASDAALLGRYLERESRELRPWAPPPAVYGKLQSLLRRRAALVTMRTALSQSWGNEQLLKAAFKSFTQQMDKLDLLVQKKLKELLKEAGLLEQVARCQAIEGIGFLTATALVMAFIRGEFKNSDAFIAFLGMDLRVSDSGQKTGLRRLTKRGCPEIRRLLHNASMSASRSAAWKETYEHYRNKGKATTEALVILSRKLARVAFALMKKKEEYVSRTA

SEQ ID NO: 121646 - protein, 407 aa, unidentified
MDLLIGIDWADDHHDICLMDPEGKILKEFQILQGIDGFHQFGIELKKYEKDQVLICIETNHGLLFEHLACMPHKLFVVNPGALVDYRKRYHVSGAKDDKIDARLLANFLRTEKHRLRPYQMNGDLVETLKLLTEDRARLLKNKIRMQLQLIDTLKQYYPIALELFSDIATAIGLAFLEEYPTPEKAQKVSLNELKRFLKKQRYSWPKRLEEIFSLLQKEQPRARALFVEAKTQFVMVMIPQIRLITGQIAFYDKRISECFKQHPDHDMFSSLPGVAEGLGPRLLSSLGDFRDRFSGFNEIQCLAGTAPVTKRSGKQCFVHFRVACNKSFRNTMQQMAFSSLKESIWAKHYYQEQRQKGKTHNMAVRALANKWLRAIYALWIHGTSYDENVHLAHMKRISLIANIAAA

SEQ ID NO: 121647 - protein, 403 aa, unidentified
MNMNAVGIDVSKGKSMVAILRPYGEIVSSPFEIKHTSSNIQSLIAQIRSIEGESRIVMEHTGRYYEPLARELYLAGLFVTAVNPKLIKDFGAHSLRKVKSDKADSVKIARYTLDSWTELKQYSLMDELRNQLKTMNRQFGFYMKHKTAMKNNLIGILDQTYPGVNTYFDCPAREDGSQKWVDFATTYWHVDCVRKLSLNAFVDHYQKWCKRRKYNFSKDKAEEIYGAAKELVPILPKDDLTKLIVKQSIEQLNTASRTVEELRTLMNDTAAKLPEYPVVMGMKGVGPSLCPQLMAEIGDVTRFTHKGAITAFAGVDPGVNESGTYEQKSVPTSKRGSSSLRKTLFQVMDCLIKTKPQDDPVYAFIDKKRAQGKPYYVYMTAGANKFLRIYYGRVKEYLMSLPE

SEQ ID NO: 121648 - protein, 429 aa, unidentified
MSYRIAGIDVHKKMLAVVVSDVEVDGEYQFERRMFGSNPEQLRSLAAWLLEQETEEVVMESTAQYWKPVWETLERYWKPVRQKREGASRRSGTLHLAQAQSNRGPRGRKRDFPDAERLVKRLVARELTLSFVPDAEQRLWRTVTRRKYQLTRVRVRLQNHLESLLEEAHIKLSSLVSDLLGVSARRMLKALAEGETNPAALAALADRKLRATPEQLCDALGACTELNPVYRRLLNMMLEELRLIDEQTGQLDQEMANLLSRHQDAVERLAEVPGLAVDSAQQIIAEVGATAATFPSAEQLSSWVGTCPGNEESAGVNYSHRSPKGNRHMRRLLNQTANAAVKTKGSIFEIVYRRSVPRLGHNQAIGAISHRQCRLIWLILHQGVRYEERGPAVTKQSKQKRTARMIRQLRRLGYRIEPPKPQPSQAPVQ

SEQ ID NO: 121649 - protein, 372 aa, unidentified
MTMMQHHRYIGLDVHRATIAVAFADPDQTAVSYGTIPNTPEAIHKVIDKLGGPERILHVAYEAGPTGYVVYRQLTSMGVDCQVVAPSLIPIRAGDRVKTDRRDALKLARLLRSHDLTPVWVPDQEHEALRNLVRARAAAKADQLRAKHRLGKFLLCLGARPPVGVHNWSKRHFAWLRTLEFSHAADQVVFDDYLAEVIAAGERVKRLETALRQCAKTTRQVAVIQALQALRGIGFISAVTIVAEAGDLRRFPTAPLFMGYTGAVPSEASSGPKQHRGHITRTGNHALRHILGEAAHHARHAPCLSDDLKRRQQHVPRAVIDLAWRAQLRLHARYRHLSMRIGPRKAIVAVARELAGFVWAVGQALHPETVTA

SEQ ID NO: 121650 - protein, 330 aa, unidentified
MPTYYLGIDVAKQKLDVVLLLDPDTLKKRQKTVPNTPAGYEALELWYHQQTGAAPDACQVILEATGPYHEAAALALHEAGFAVSVVNPKVIKDFAKGLGIKAKNDGLDALTLARFGYLIKPARWQPDPPEYRRLTVLLRRLEALETDRQRELNRLEKARVSQPADADVVASLERSVQFLEAEQERLLVTINDHVDQHPTLYQDRHYLLSIPGIGPVLSVLMVALLQHGQRFQSAAQFVSYLGVIPTEHQSGSSVRGKPHLSKTGPARVRGKLYMAALVAIRHNPDVRAFYERLLAKGKSKMAALGAAMRKLAQICFGVIKHQTPYQSQVA

SEQ ID NO: 121651 - protein, 397 aa, unidentified
MIAVGIDVSKSKSTVAILNSDGTTLVKPYTMLHTQADMCALADYLRVFDEPITILMEYTGHYHYPVLKKLQQEGFPVCIINPYQMKKYADVEIHKAKTDKKDAIRIATYALEKSYKLVPYNSLEQKYEDLKFLSRQYNQRISSVSYTKVQLINLLDQTMPGITRILPLKSRNPEQCVLLLFIKRFKSFDEINKIGKTRFLSSYATLVKKTRDRHAPSKGLAIYELAANSITTRGEDPYIQLAQNQCVDLLSTSQNAADEIILQMQTIAETIPEYKVLRSMAGVGDRLGPIILAEIGDIRRFHSGKALNSFAGNDALPYQSGQFESRNRHISKRGSAALRKACFEVMQALKLTKPQDDPVYLFMLKKEQEGKPYNVAKMAGVNKFLRIYYARAMELYK

SEQ ID NO: 121652 - protein, 352 aa, unidentified
MCGLLWLGCFHCESPLFVSPIGAVLVSTDSPANAHGYRRLLDFARQHIPGRRCWALEGIGSYGAGLAVFLNQASEQVVEVCRPKRAANRGGRNTDMIDAVRAAKEALVSEHLIQPRLRGEREALRVLLATRHCAVLASTAAINQLKALIISAPDDLRSELRKLKRPAQIAYCAQFRDRPAQNLEHRMTVRAMRSTAQRVQALQVEAKELENEILTLVRQQAPALLDLLGVGPITAAQILVSLSHQGRFRSEAAFASFAGVSPIPASSGLTNRHRRNRSGDRQLNRAMHTITLIRMRLDPSTKTYVARKIAEGKTSRDAQRCLKRVVCRQVFKTLERSDRNQLSNVEELTQAA

SEQ ID NO: 121653 - protein, 328 aa, unidentified
MAKHTTICAGIDTGKRKLDVALDRSSEQQLLIDNTPEGYKVLLDWLRRRRVKRIGIEASGGYEQAVVAELRRKGFVVVVFQPAQVRAYAKFHRQRAKNDKIDAALIAACTAAVKTVHAPPDARLQPFAEHLTMIDQIGEDIARLKNRLETCRNPRFQQTWKEDIARLAKREKIELKALVATIREHRDLAERLDLIESVDGIGQPTAVAILVRLPEIGRITREQAAALAGVAPYDDDSGEQVGIRHIDGGRQRLRRALYTAALPASLRWNPQLIALYRRLIAAGKEHKRALIACARKLLIFANTVVARGTPWDRERPAVASTSAVPQAA

SEQ ID NO: 121654 - protein, 311 aa, unidentified
MENYVGIDISKRYFDIHCLPEAKQLRFENNRNGISQCLKFLSENKPKLTVMESTGGYEMALACQLQAAGLAIAVVNPRQIRNFAKAVGQIAKTDKIDAKIIAKYASIIQPPSREIINGKSRQLMNLVARREQLSKMHVEECNRMEHAVDKSVISSIRAILKVIERQIGDIDEQISDHIEQDQNLKRKSDIVSSAPGVGNTTAFMLVTKLPELGTLNRRQIAALVGLAPMNRDSGTFRGKRMTGGGRGSIRTGLFMPTLVATRYNPVIRQFYQRLIAAGKKKMTAVIAAMRKLLTILNSMVAKNEYWNPKNA

SEQ ID NO: 121655 - protein, 409 aa, unidentified
MQESRCIAGIDVHKKMLAVVVGRTHDRSLQLERAKFGTTTEHLELLSDWLEAHGVQEVVMESTGQYHKPVWLQLEGRFQLHLAQAHSNRGPKGRKRDFADAVRMVRRFLSDDLILSYVPGMEQRLWRRLTRTKTSIGDQRKRVQCQVEGLLEEMMIKLSSVISDLFGLSGLRILAAIAAGEQDPVKLAALGDDRLKVSKEALQAALKGKVQPEHRLLLGLYLEQVDLIDRQTAALEREISAAMRPHAAAVERLAEIPGLGIDSAQQIIAEIGPEAATFPSAGQVASWVGVCPGREESAGESHSNRSPKGNRPMRRLLNQVAWAAVRTNGSSFQDLFRRLLVRKGPKLSIWAVAHRLLRVIWKVLHKKVSYIEHGPRSAHPKVIEKRKRALVRQLRGLGYSVQITPIPAG

SEQ ID NO: 121656 - protein, 372 aa, unidentified
MRHHSEAFIGIDTSKSHNAVAIAEGVRGGEVRFLGEFPAIEAGMRKLIAKLAAKYNRLTFCYEAGPTGYGLYRLIKSLGHECIVVAPSLIPKKPGERVKTNRRDAISLAKLLRAGELTEVWVPDERHEAMRDLSRARLAANKDLQGKRQQISSLMLRLGRCYPGKTTWGPAHMKWLMSQKLEHREQRMALEELLHGIRQEGERVERLEQAIREAVPEWSLAEVVTALQAMRGINLIAAVAILAEIGDLSRFQNPRELMAYLGLVPSESSTGDTVRRGGITKAGNGRARRILVEAAWSYRYPARVGREKQPKVAAAPRRVREIAWKAQTRLCGRFRSLLRKGKLPTVAVTAIARELSAFIWAINREVVATRQP

SEQ ID NO: 121657 - protein, 322 aa, unidentified
MSQPNPLCVGIDVSKATLDIAASSDVAQFTVSNDSDGFNAIITGLRRHSVALVLMEATGGLEVAVACSLQAEGFEVAVVNPRQARDFARAMGYLAKTDRIDARVLTQMAEVINRHPERKRFIRALPDAERQALAAMVVRRRQLIAMLVAERNRLYPSHPQNKKSINTIIKALEDELARLEKDMNSHIRNHFKEIAERLSSIKGVGTMTVSAMLAEIPELGALSRREISALIGVAPVNRDSGTMRGRRTIFGGRAGVRSALYMAALVATRFNPVIKTFYVRLLAAGKAKKVALVACMRKLLTILNAMLRKNEEWDESYHHVAP

SEQ ID NO: 121658 - protein, 340 aa, unidentified
MQISTIGIDLAKNVFQVHAANQHGKTLLQKKLRRDQVAPFFANLQPCLIGMEACGGAHHWARKLQALGHTVRLMAPQFVKPYVKSNKNDVADAEAICEAVTRPTMRFVPIKNVEQQSVLALHRVRQGFIKARTAQANQIRGLLSEYGVIVPKGIGFITSRVPELIEDATNELPGLFRRLVDRLLDHLRLLDKQVSEIEAQIKAWHREDEMSRKLEKVPGIGPITASALAATVGDAKNFESGRQMAAWLGLVPRQNSSGGKQVLLGISKRGDTYLRTLLIHGARSVLYRSTQKNDPNDWLTKLTGRRCANVAAVALANKNARIVWALLARDREFQSGNAAL

SEQ ID NO: 121659 - protein, 431 aa, unidentified
MIAAVVERCAGIDVGKKFIAVCVMTGPANGEARSEIRTFGTTVAELKQARAWITGEGCTDVIMESTGTYWKPVFNVLEGHMRVALANPQEVKARKGHKTDHKDAWWLAHLLRHAMVTPSFIPPRPQRELRDLTRRRRKLIQTASAEKNRVSKVLEDGNVKLGNVLSDVFGVSGQLMLEALLEGKADAAQIASFAKAQAKKKIPALIAALEEHGMTDHHRMMIRFSLEHMRFLEEQLTEIDEQIRKKITVSGYTQQWELLRSLPAVRENAAAVLAEMGPDPAQFPNEKHLASWSGLCPGNNRSAGRSKSSHTNQGNRWLRAALTESAWAVSRMKEGHLREKFWRIASRGEPKRSRPIAVVAIGHDLLKLAYFVLQRGTPYEEKRGSPISEEQKQRLIRHHVRRLGKLGIRLHSSQLSAATTQCRNQPIAVNR

SEQ ID NO: 121660 - protein, 423 aa, unidentified
MQVCVPEDRDGDNNRCFGTFTCDLHEISAWLKACKIDTVAMESTGIYWVPLYMRLVADGFDVLLGNAKAIKNIAEKKTDEVDAEWIMLLHSYGLLKASFQPCNHAREIRNLTRHRDNLLRNSSKEVLHMQKYMEMMNIKLGNVISDILGKSGQDIITAIIKGERDAKVLASLADPRCKASPFEIEKSLEANWDENLLFMLGQSYHLYHYIQKQMVETEKKVETLILKYKADLPQEIIQQTDCKRSNKVETAKNKISIDIEQYAYELWGVNIMRIPGIKKGSLFRLVGELGHDFVSKFNSYKDFCNWANLVPNNKISGGKLLSSKVPKRKNPVGQILRVAANSLKNERSSLGFYFRKIQTRKGYQPAIVATANKIGRIIYTMIKNKTEYIEPLGQEEQAKILKIKLKRTQKELEKLQKQLRECA

SEQ ID NO: 121661 - protein, 342 aa, unidentified
MEISTIGLDLAKSVFQVHAIDEAGEIVVRKALRRSQVLPLFGKLQPCLVGMEACGTSHHWAREILKLGHEVRLMPPAYVKPYVKRGKTDANDAEAICEAVTRPTMRFVPVKSPEQQAALALHRTRDLLVKQRTQLVNMIRGLLAEFGIEMARWLHHALALAKRLTDGDAADVPELAQRVVASLARQVGTLQEQLASLEKELLAWHRSNELSQRLATIPGIGVVAATALAASVTDPERFRSGRQFAASLGLTPLQKSSGGKEKQGRISKMGDRYLRQLLVVGMTSLVRRARTAPGSVDPRITAMLQRRPARVVTVAAANRAARVAWAIMTRGETYRKPLAAAA

SEQ ID NO: 121662 - protein, 473 aa, unidentified
MNVKGTKKKNQVVNIFEQQEIIAKADVIKNNLKASTWHELETKRKFDKNEKLSFISDDMLILGCDIGSETHYVRAIDTRGREFSKSAFSFSNTLEGFQSLIDWATKIAAANDKKQIVLGLEPTGHYWFALATWMVSNGISVVQVNPYAVKQTKEVEDNSQRKDDRKDPKLIANLVKDGNFGMPYLPEKLYADIRRLSMFRDQLNEDRIRNLNRLHREMKIYFPEYKDAFGKIDGAFCLEVLKVAPFPDELVELGTDGIRQIWRDAKLRGRGYTKAASIYEIAKKSIGIKEGADVSKQAVKWFVNRILELDEQLSDIENQLNQKCMEIPHAENILAIAGIGENTLSGILAEMGDISRFDDVKEIQKLSGLGLVACSSGKHKGETKISHRGRKRLRYWLFQAAKSAVAHAEEFKELHVYYTTRKDNPLKKMQSLIVIACKILRVIYTILIKGTTYDPKKMLGDIVRSDRQKVQAA

SEQ ID NO: 121663 - protein, 352 aa, unidentified
MLIIGCDFHTRYQQIAMAREETAELLVQRRLDHESGEAHAFYRELQSSKEPVRVGIEATGPMHWFERLLGELGHELWIGDSAKIHASEVRKQKTDERDARLILELLLAKRFPKIWVPTPAERDLRQLLWHRHKLVRLRTMLGNQLHFLAMSQGLCRKRKLFTKKGRAELGSLALGPWASRRREELLKLLGQLEAPIAELDRAVLEEAQRREDAVLLMTHPGIGPVTALAFVLAIGPITRFPCSKKIASYLGLNPSEASSGGRRRLGAISKQGNTMVRWLLIEAAQFAARLDPELRQDYQRLKFRRGHAVAKVAIARKLAVRMFWMLRSGADYAQLVRRQGSPGNVLVDVSLP

SEQ ID NO: 121664 - protein, 343 aa, unidentified
MRYYVGVDLHKKLTVLCVMDQARRVLRTKRFLNSNPAALTGFLQGLGEFELVLEATASYEWFVKLVEPLAQRVVLAHPRKLRIIAESTRKSDKVDARLLAEFLVLDVIPPAHRPTPRQRAHRRLVRHRVYIRGRLTSLKNRLRHLAAEYNADRKDLFTRTGLAYLQKLPLEPVDRFLAQRLLRELRLYQVELRAVERELASFIRQAPPQEAQQRKLLDSIPAVGPVTRETFLAETAGPERFGSQKKLTSYVGLAPGQRESAGKRLDLGITHTGSPALRWVLHQAAWQLIRRDAYWAGLYDALARRRGRKKAITAIARRLLCLMLAVIRSGQPYRPRGPGVCAA

SEQ ID NO: 121665 - protein, 312 aa, unidentified
MQVGKLIVGADVAKAELVIHHDDRDEIIKVKNTKPEIKKWLKQQPLNTAIAVEATNVYHLDLVELAHSLGFEVYVIDGFQLSNYRKSVGVRVKTDPTDARLLLRNEGEDLRPWTPPPAVYGKLQSLLRRRAALVTARTAMTQSWANEALLKAAFTTFVKSIDRLDLLIQKKIKEVLREAGLHEQVARCQAVEGIGFLTATALVMAFMRGEFKSSDSYIAFLGMDLRVIDSGQKNGRRRLTKRGCSEIRRLLHNAAMSASRTATWKGLYEQHRNAGKATTQALVILARKLARVAFALMKNQDEYVTKGGKAPC

SEQ ID NO: 121666 - protein, 346 aa, unidentified
MNYIGVDCHISTLDFAVVNETGKLKQKARVKTGVKGFMGFVKSVPKPRKIFIEEGTLASWLLETSMRHGEELIIADPKINKWIGKSINKDDEIDAEKLAHLARGGYVKSIYHPVNESRRFKELVFAYHDTVKNQIRIKNKLKARFRTEGIQCKGVTVYSENYRNEWRDRLPKNPIARLIADELWNQLGQLHEAKKTLKKSIGIESKKYSEIKRFMKVPGIGLIHASTIYAIIDTPYRFSNKKKLWMYAGIGLAERASGGTVYSKKLTREYNRHLKNAIKKAVESAIFAYDSQFKRQYLRLTLEQGLLPHKAKLTVARSILATLYGMWKNGEAYDPDIDKKRKGNKK

SEQ ID NO: 121667 - protein, 319 aa, unidentified
MNSKNNQNEINVGVDTGKTQLDIYIRPLDIYFTVSNDDKGINKAIKEIKKHHPTRIVIEATGRLEQAFIIVCAKEKLPFVVANPVHIKKFAGAIGQLAKTDKLDAKLIAYYSEALKPKLSTLKPETLRKMSDLLSRRCQLMEMRTMEKNRLQILPKALESTINPILTVINNQLTKIDNKMIKLIEQCDEYQIKNDIIQSVPGVGNVVAFSLLSNMPELGYITNKEAAALVGVAPINRESGSFKGKRMIRGGRHQIRTAMFMSMMSAMQCNPVFKATYQRLVAAGKPKKIAIIACVRKMIVILNSMVRDGVYWDSKMNNN

SEQ ID NO: 121668 - protein, 341 aa, unidentified
MKLVGIDVGKNSHHFCVMDKETGEFNVTPTSFSNNKEGFDFLINSLKPYSKKSILLGMEDTGHYHVALLKFLLSNGYTVALINPKTTDLTRKMEVGITKNDKLDTITICDVLDTPERKKQYRITKVDRFDLYEQRQLTRHHHNLKEELNVYCNRLQKSIDLVFPEFNTLFSSKYGIVYMNLLKTFGSAEAIASTDIRTIRKFFEIKGKGNRISLTPEKLKECAKNSIGISSEVETIQIKHLVSQISLIKEQIAEIDKKIEEFSIPNNSPILSIPGISHFSGTSILAELGDIGNYSKPSQIIKFAGVAPYHYESSQYNAQHTAITKKGSKLLIAKLIEYENQ

SEQ ID NO: 121669 - protein, 424 aa, unidentified
MDVIYERVAGLDVHKETVVATVRVMAEGKVERECRTFETTTAGLLALLAWLTEARCSHAAMEATGVYWKPVWNILSDGAFELIVANAAHIKNVPGRKTDVNDATWIADLLACGLIRGSFVPSEKFQELRALQRTRKQMTREQTRHVQRLQKTLEEANIKLDSVISDIMGLSGRRMIEAIIAGVRGPRTLADLADRRIKATPKELYDALHGRVTDHHRFRLRLHLAQYDALAEAIAALDKEIDAAIGRIDKERECAGQALFRAASREVCEVPGVNLLAANMILAEIGLDIARFPTAGHLVSWSGLCPGHNESAGKRKSSRLRKGAPWLKTTLVQCAVSASNKKDSYFRAQFLRLKSRRGAPKAFCALAASLLTAIYHMLRDGTKFRDLGKDHFDKRPAQAKINRLLAQLAKLGYQADLRPLTNVP

SEQ ID NO: 121670 - protein, 469 aa, unidentified
MAIRVGIDIACRAHHRAACATTDGTLLWSNVRFQTRAEELENIWRRIPDGETDVTIVMEPTRNAWVPLAAWFRRHGAKIVLVPPEQSSDLRAYYNKHAKTDRLDAELLARLPSLHPEGIHHERGIGPAQPLRRTVKIRSSLVKRRSACMHRLDALLEILGPDWIAAVGSAMTITILHLLSRWPDPHQVIRLGRSRLALWLRRQSRGKWGTEQAEAIIQAAQATIRLWGHDGMDFEALAADIALEAQLALELTAQVDKLEERISVYYKQADPLQILTTVPGIGPTLAAQITGRLGDIERFATLSAVRSYSGLVPRHSSSGLAGATGGLSKKGDACLREAVCIAADLARRCDPSLAHRYHRLMMENGKHHTSAVCSVGAVLITRIVACIRKREPYVIRDFDGQPITMQEGRSLVKQHYSIPEDVRKSRRTVNRNLTCQKQANEDRVRGGAATAGVAKRSKARTTPQPACND

SEQ ID NO: 121671 - protein, 413 aa, unidentified
MATTSPPTRFVALDIHRKYLVVGAVDPQQQVVLTPRRFGFEAFSAWATTHLSPSDAVVLEATSNAWLLYDQLEPLVGSVTVAHPLAVKLIAAARVKTDSRDTIKLAHLLAANLVPAVWVPPGPVRELRALVSHRKRLVNQRTQVRNRLHAVLHRHNLTVPPGKPFAAHQQEWWLALDLSSSEKLRVQQDLSLLQSLEELIGAVEAELGRLSTCDPWVKQVPFLVQLPGLGVLSVMSILAAIGDITRFPSAKKLVGYAGLGASVHDSGETHQGGHITKEGRRDLRGVMVEAAWVAVEHHPHWKVQFERLTQRIGKQKAIVAIARKLLVTVWHVLSEQQADTNAQAQAVARKLMNWIAHAGVTPGQHRDRLLLLYQYLDELGLSEELEEIDYYGTTYRLSVRQKLLREAQKSKRS

SEQ ID NO: 121672 - protein, 438 aa, unidentified
MSNKVIFNLDELFISVGIDVGADFSWMSIALPNQQFVGKPYKILHNSIDSLTTAVSKIKEAEELYSLESRIFLESTGIYHYPLFCYLRDKGFNCSVINPIITKNSTNINIRKVHNDRFDSKKAALVGLKPDLKVSLMPSDLALNCRNLCREYYDLMDNRSAYVNKLQGELRMAFPQYLGIFSKVTINTSLTLLETYTSPSAFLKADKQEIIDIIKSTARFGLTYAQNKYNAIIQAATDANQFGYIIDSNIKRIRLYISFIRKYDEEINSILESLHEVVDANEDSDFVKQIHLIETFKGAGFLSAVSIMGEIGDFSAFSKPKQLFAYFGLDPAVKQSGKFEGTKVQMSKRGSAIARRVIHTLTLQSISISRNREAKNPVLREYYLKKCDSKPKLVAMGAVSHKVCNMIFAILRDNKPFKIIAPQEHIKQYNSAKCDIAA

SEQ ID NO: 121673 - protein, 330 aa, unidentified
MSVFVGVDIAAKTFDLVNRKGGKASKVESFSQSAQGHAKAIKRLQNLKPTLITMEATGIYYFDLAVALVQAGLPVAVINPKSFHHFAKLKLAGSKTDGVDAALLAEYGERMEPSLWTPPDEVRLALRDIGRQINRLTGTRTQAKNRLHALQAKNSTRSLLVEDEQEGIAYLDRRIERLSQAALALIAECETLSRYLTHMCAAKGVGKASALIVLAELCVLPSSLKAPQVSRFAGLDVRLTQSGSSVNRPARLSKAGNAYLRAALYMPAMSAIQHDPRVKAFYDALVSRGKKKIQALCAVMRKYLTGLWASIQTETAFDSAMLFSEEHLKA

SEQ ID NO: 121674 - protein, 341 aa, unidentified
MSIITVGIDLAKNVFAVHGVDDNGKPALVKPKVSREHLLPLIAQLPPCLIGMEACSGAHHWARLFRQHGHTVRLMAPKFVIPYRLSGKRGKNDAADAAAICEAVTRPQMRFVPVKEEHQQIILALHRTRTGFVEERTATYNRLRGLIAEVGIVCPQKITALRRALMDHLEDLPGYLNRCVGDLLAHADSLDVRIAEYDRIIRDAAREDARSRRLMDLPGIGPNTASALLASIGGGHDFKNGRQVAAWIGLTPGQYSSGGTTRLGRITKAGDRYLRSLLVMGAKAILSGLGEKQDRFSRWARSLVERRGYWKAVVAIAAKNARLAWAVLRFGEEFRLRQADA

SEQ ID NO: 121675 - protein, 412 aa, unidentified
MQDILTCAMGLDVHRDIIVACLVKGAVDAEPEAETRTFSTLIPEMQKLRDWVIESECRNIAMESTGIYWQPIYEMLESCFDGEISILVVNARHMKNVPGRKTDIKDAQWIATLLRAGLLKGSFIPDKAFRELRHLTRYRKSVVHDITAQKNRIDKFLQSSGFRFTAFLSDTFGASGRNIIRHLIEHGSIDREALDKCLKTKTRNRIDEILVALNGSLSEHQRRFLNMVFRHLEDLEAHKHTVEDEITEEVLKHTDALNLLCSIPGIDVTAAAAIIAEIGTDMSSFPDSQHICSWAGLSPGNNESAGKRKSVHINKGNPYLKSMLCEVAWIMASHRKLYLSGWYWKVKQRKGAKRATIALARKILSIIYTMLKTGTPYNEECFEQRRLRCERKRANRLVNELQKLGYVVVAPD

SEQ ID NO: 121676 - protein, 349 aa, unidentified
MAEQRISYAGERIDVGIDVHKETYTVICLCQRQMVKTATVPADPVRLAESLARWFPGARIFSAYEAGFSGFVLHRVLTTAEITNMVVNPASVAVAANDKVKTDRRDAKKLARDLADGRLRGIYVPTAAEELARLLPRTRAQLVAHRATITRQIKAKLHQFGLITPGSRRLMSSRYLREMAAWALPPELHVSLTLLADQWRFATRQLLEVRRLLREQAKAQAGLETVYRSVPGIGEVVARTLATELGDMTRFANERALFSYTGLTPSEYSSGAATRRGHISRQGVSRLRHVLVETAWRALPGDPILQVMFDRIAATRGKQRAIVAIARRLIGRIRACFRHGTTYAVGTIG

SEQ ID NO: 121677 - protein, 332 aa, unidentified
MNNIYFIGVDVSKKKLDFCVMFENKVVHEEIVANHQHAVIDLIHQLKKEFGIDNAQMLVCAEHTGQYTYPLVCACEIAECRLWLEHASSIKYSSGVQRGKNDRIDAKRIAVYASRFEDKLRLYKRPEQEIERLKQLEAERSLYVVDLAKYKAQLKDQKDYVPERIFKDKSKRLKKLMDNLEEVIDSITQEMQEIVKSSEILSKQYRLLQSVDGVGPVIALNMIIVTEAFTKFENARQFNCFAGIAPFQYTSGSSQHSRARVSHRADKCIKTLLHLAAVSVIGKAGGEMKSFFLRKVEEGKHKMSVINALRAKIVARMFAVIKNNKYYKPILS

SEQ ID NO: 121678 - protein, 423 aa, unidentified
MTKHLYNPTDAVLVAIDMSKHRQEVLMERPEGGRRRRMTVMATKNDYDRLVDELAVIGRPIVVGFEATGNYHRTLAHRLLMAGFQLRLISSVALARTREALHNGWDKNDPKDAQVILHMLRIGATQVYVDPLAAGINDLQELSKTHEVISKAKTQTWHRILNHYLPLYFPEIARFAGNSRSDWFLALIERFPTPSSMTSLGREGFVAEAWPLVGRKVSKARLINDIYETACSSMALPIAEEAVAISMFRMVIGQARSLIRERNRIEQIAQAMLSDHRDYQLLCKIPGIGPINALTILAEAGDLRRFGHHRQFLKFCGLDLATSQSGTFRGRTKLSKYGNARLRRTFWMAAQVASRQRDNSFRDKLGRYMAGNADDADRRRKAMIALTAKMARVAHAVVKTKTEYRPFMERSGTRWKDPSLQVP

SEQ ID NO: 121679 - protein, 354 aa, unidentified
MTSTKYIGMDVHKESISIAVMNAVGKIVMECVIETKANMILQCIDGLRGDLYVTFEEGTSAAWLYDLLKPHVTKLIVCDPRKNASMREDNQNDKIDARRLAELLRIDHLTPVYHGEHGLRTLKELVRSYLTVTKDLARVKTRIKAIYRSWAIPCDGKQVYAACHRAEWLEKINEPGVRRRAEFYYQQLDALRVLRREVRRELLAESKKQKAWKRLCQIPAIGPIRAAVLLGILQTPHRFRAKRPLWKYSGLAVETCSSADHRSVNGQLQRSKKTSVRGLNQNCNHDLKNLFKGAAVIGSSKAGPFQEFYAALLAKGMRPEMARLTLARKIATIVLIVWKKGVCFDAQHLKPQTA

SEQ ID NO: 121680 - protein, 356 aa, unidentified
MKNSKLDFTGQTISVGIDTHKKDMVITPRCQGMQLKTISMDPEPEQLVRYLHKNYPNARYESVYEAGFSGYWMDRKLREAGIKNIIVNPADVPTKQKEKRKKTDKIDSRKLARELSAGNLEGIYIPSEEHEAIRALSRLRKQITKDQTRLKCRIKSLLNFVGITLPENSELKHWSGRFIKYLSEMEFKHKAMKITLERLLESLINGRQILLGIVKNLREIVKENAEMKKITGYLQSVPGIGFITAITLYTEIMEIKRFGKFDELSSYVGFSPSTDSSGEKDKVIGLSKQQNRYLRNMLIESSWLAIRKDPALLQAYGNLVRRMSKQKAILRIAKKLLSRITYVWRNEKHYVCAVVS

SEQ ID NO: 121681 - protein, 356 aa, unidentified
MERFIGIDVHKDSCTVAVMGPSGRRIRCDVVETNGAVLIELLRLIPGERRVCIEETGQSEWLCEILKPHVTEMVVEGTAERKDRSHRKDDERDAWGLAERLRTGTVKNRVCKPPRELSKLRDAVRAYGIVVGDLVRVKNRLNAVYRSRGIAVEGNEIYRSNSREEFLAKLPESRRALAKVLSQELDALEALKAEAEEQLEQEARSHPAVARLTTAPGFGTIRAAQVVAIGITPRRFRTLRQFWSYCGLAVVMRTSSDWTRENGQWVRSDNVAKTRGLTRKRQPVLKAVFKGAATVVVGRMTDHPLTRKYQQLCEAGTKPSLAMLTIARKIAAAVFAMWKNQEVYDPEHRGRCPQPA

SEQ ID NO: 121682 - protein, 313 aa, unidentified
MKKTICGVDVSKAKLDVCIEPERRFASFDNDTAGIAELAAFCRQNAAELVVMEASGGYERRAFVELWGHGISCALTNPRSVRRYAEAMGVLEKTDRIDASIIARFADAKNLAPTPLPSQTQQRLKALVARLRQITGDLTVQKQRRSSMFDNVEMQASVDEVIALLKRQCRSLEGEIASMIDDDPLWAKLAETWREVKGIAGRTVARLHAELPEIGILSNKAIAKLAGLAPIADDSGKRKGKRFTRGGREGVRTILFLVAATAARYDENLRTFRDRLLKAGKEKMVVRIALARKLLVILNAKAREARMEYANAT

SEQ ID NO: 121683 - protein, 318 aa, unidentified
MSSAAPAFVGIDVAKAELVITIRPSGEHWTIANDVAGIHTLGQRVRGHAPTLIVLEATGGYERAAVAALAAAQLPVVVANPRQVRDFARATGQLAKTDRIDADILALFAERVRPAPRALPDDAAQALDALLTRRRQVLEMLIAERNRLEHAVPTVRRGITQHIRWLERQLADVDRDLDDTIQASPVWRAKENLLRSTPGVGPVLSRTLIGELPELGTLPRKQIAALVGVAPLARDRGTLKHKRLVWGGRAPVRAALFMAALVGTRCNPVLRAFYRRLLEAGKPKKVALTACMRKLLTILNARMRTNTAWRHIDLSPTT

SEQ ID NO: 121684 - protein, 499 aa, unidentified
MEWDWRASEVGARRKTKQKPAMVEPVEIPDAEHELVVDRGAAIDVAKAAGKVCVRLPGKSGRRFSRVWDVPARTGAITELAEQLVELGIEKVTVESTSDYWRIWYYLLEDAGVDVQLVNSRDVRNVPGRPKTDKLDAVWLAKLTEKGLLRPSFVPPAPIRVLRDYTRLREDLIRERTRYWQRLEKLLEDAAIKVSAVASKLDTLSTRDMVEALIAGERDSRRLADLARGRMKTKRSELITALDGRFDDHHAELARLLLGQIDALTAQIGALSARIERLIDAMDESDHPTGDRGRSGGGGPQVTGAPSTGGQATAPARRTTTAIGVDSDTATVVEPQRLTAVERLDEITGVGQCAAQTIIAEIGLDMARFPTPEHLVSWAKLCPRTIQSGPVIRGGKTGKGNPYLKGALGEAAAAAARTDTFLGERYRRLVKRRGRLKALVAVARSILVIVWQLLSDPTARFHDLGPDYHTSRVVTERKIRNHIAHLTAMGFHVTLQPAA

SEQ ID NO: 121685 - protein, 386 aa, unidentified
MPGNAFSPTEYDIFAGLDVDRKSLSVTFTSHQGFLRSLRMPSSVDHLVHYVRKHFADQRVAFAYEAGPTGYGVYDGLVAQAYPCLIAAPAMIPRAPGQRVKTNRLDSRALSEHLRGGQLTSIHVPSPVYRELRHLTQLRDTVVSQVVATKQRTKSLLLFEGLPFPPAPAGRGQWSVRVKAQLRQLPCAPTVRFKLDQLLDTLAFAEQQVLQTTRAIRCFCQTEPELARCIQYLLTVSGIGWIVASQLLARIGDWRALNNIRQLGGFLGVVPAEHSTGEGAHRGAITRTGDARLRAKLIQAAWAAIRHDAELRHFFRAVCQRHPPDRGPRIASVAVARKLSVRIAVVLRRQRPFVVRDQVPSAPVTQEETVPQGTTRRQAEPGEASP

SEQ ID NO: 121686 - protein, 371 aa, unidentified
MNSILYVGMDVHKENYTLCCYSFDRDKVEYRQTVPSDYRLILKYLEQVRRKYPEEVEFICGYEAGCLGYSLYHQLTDHGVKCIILAPTTMGITNTNRVKTDRKDAANIARCLAFHTYSAVYVPDGEDNAVKEYLRMRDDQKLALKKIKQQITAFVLRLGKRYTGGKSLWTENHLKWLRGLDLTLLEKETLQEYLITYDYLTDKLERLDARIEELARNERYGERVRRLGCFIGIKPHTALSLLVEVGDFRRFEKAPNFAGFLGLVPGEDSSGGGRNRLAITKAGNSHLRRLLVESSQSYSRGTIGFKSKELKKRQEGNPPEVVAYADRANERLRRRYYRMTLKNGAKRNVAIVAVARELACFIWGMMTDEIA

SEQ ID NO: 121687 - protein, 356 aa, unidentified
MGQNGSVNIPFNKSGVGIMKITTIGLDIAKSIFHSYAINHTGRLIRKKQLKRKQLLAYFAKLEPSIVVMEACGGANYWAREFIKQGHQVKLIAPQYVKPFVKGNKNDYNDAQGIAEASQRSSMRFVPIKSLEQQDLQNVHRQRERVKKERTALANQIRGLLAEYGIVIKKGISAIRNELPSIIEDAENDLTVMSRALFNELLEEFHAMGDLLEHCDKKIKIANKNNDICTRLGDVLGIGDITSNALYAAAGDGKNFVNGRHFSAWVGLVPGQHSTGGKPRLLGISKRGNSYLRTLLIHGARAVLRHSEKKNDRFSLWAQALLKRRGQNKACVAVANKLARMAWVIMAKGETYRPAM

SEQ ID NO: 121688 - protein, 468 aa, unidentified
MDLAPLEPPDRTGASMSRKKTKLQSVTQPPEVRPDAAGIDISPEVIYVAVDPRKDAKPIRHYGTVTAELYRIANWLRACGVRTVAMESTGVYWIPLYQVLDERGFEVCLVNARHYQNVPGRKTDVCDSAWLQYLHAVGLLQGSFRPAQEICAFRTILRHRATLVEAASKHVQHMQKALDQMNVQVHRVLSDLTGVSGLAMLDAILAGERDGHRLAALRDGRVRASEESIVAALEGDYRTEHLFTLRQSLDSYRHYQKLIADCDRQIREQLEALEGPGGDGEPPESRKHMRSAHDEQLRQKFFRIVGVDLTAIPSVNVGTVEVLLGEVGPDLKRFRSSGAFANWLGLCPNNAITGGKIQSSKTKRCANRLAGALRMAAESLCRDKSYLGQFYRRMKMQLSGGPEAITAAAHKLARIIYAMVTKRAEYDETRFAEIEKRSNERTRQRLTKQARKLGFILAPIHGPAEFVS

SEQ ID NO: 121689 - protein, 324 aa, unidentified
MKSKSLERFIGIDICKARLDVADDANSLPWSVANNDAGIASLVERLQTLHPALIVMEATGGLETLLYAALTTAGLPAVVMNPRQVRDFAKALGTLAKTDALDARILARFGAAIQPAVRPMKDDTTQELTALVTRRRQLLAMLTAEKTRLQQAAKWIRKDINAHIASLENRLQTIEGHIAEIIKKTPGWKEKDSLLRSVPGVGNVLSMNLLSSLTELGTLNRREIATLVGVAPLNRDSGNFRGKRRVWGGRAQVRAALYMAALSASRFNPVITPFYQRLIAQGKQPKVALTACMRKLLVILNTMVKTQTAWNPNHFSTLDFNHGC

SEQ ID NO: 121690 - protein, 375 aa, unidentified
MKEKLRFLGLDVHAETIAVAIAESDGEVRSLGTIPNRLESIRKLIKKLGPTEKLRACYEAGPTGYVVYWQLAELGVKCDVVAPTLVPVKAGDRVKTDRRDAEKLARSHRSGDLTAVWVPDEGSEALRDLVRTREAAKQDQLRARHRLSKFLLRSGQRPPTGIRPWTRPYLIWVAQLRFTQMAQEATRLDYLHEVEHMRERVERLERAITEAVKLASPALQQVINDLQALRGIADISAVTIAAELGQVSRFDGARQLMGYCGAVPSEDSSGKRTRRGSITKTGNAHLRRIVVEAAWSYHRPPCIWYGLRKRQESISEEVKEIAWKAQHRLHKRYMRLAAAGKDKRKITTAVARELLGFIWAIGTRAETTVRQRIAA

SEQ ID NO: 121691 - protein, 408 aa, unidentified
MNTLYVGIDVSSKSNVVYLMLPNGDKHSNFSVANSHEGSTQLVKRILSALTSHSLDTVLIGLEATSVYGDNLVYFLREDATLAPFNRKIHVLNPKQVKKFHDTYNDLPKNDYVDSFVIADCLRFGRINKEVYMGEYRYKALQNLTRARFFAVQNLVKEKQRFMNVLFKKYSTMTQEKVFSDAFSTTALAVYDEFESAEALANMDLHELTDFIIEKGKNRFPDPVAVAKAIQKAARSSYRLPKTVNDSVNQVLSISITSMKALESQIKEFDKAIKALMELLPNVLISIPGIGPVYSAGIMAEIGDINRFDNQASLAKYAGLAWKQHQSGGFEAEVTRLIPSGNRFLKYYLCEAAFSLVRCDKKYSDFYHLKYKEVNRCQHKRALALTARKFVRLVFRLLKDNRLYCPAK

SEQ ID NO: 121692 - protein, 421 aa, unidentified
MNQLTDTQYTAYVGIDWAAEKHDICVQTADDGRREFACISSQPEGIEAWAQDLYQRFGGPIAVALELSKGPIVSALQKYDFFVLYPINPSTLAKYREAFTPSGAKDDPTDAELAVDLMTRHAERFSPLKPQSVDMRKLIGLVEKRDKFASDQGRVVNRLGHALQQYYPQVLEWFSEHNTVVFCDFLSQWPTLTQVKRARKASLERFFKSHHVNSAELIERRITAIKAAMPLTADPAVIEPHRLQVEMLIEQLRITIKALKRFDDEISATAHKLPDYDLLFSPLPGAAKVLAPRLLAAFGEDRQRYPQADALQKYSGIAPVTKRSGKSTWVHWRWQCPTFVRQTFVDWAAQTINKSAWAGAYYRQQRAKGCSYQVAVRALAFKWIRILHRCWQDRTPYDESKYLEALRRKGSPLLKYLAEAA

SEQ ID NO: 121693 - protein, 326 aa, unidentified
MTLSSSLDNRFIGIDVGGASLDVAWHRGDSAHYANRPDAIAALVRRLQAQSGITRIVVEPTGGYEKALVKALRQAQLPVEIIHTSRFAAYRTLLGAKAKSDTSDARLLASYAAASDEVRGRKAGHVELPEDAVREALSELASRRDQLKHMIHAETCRLGTVRLAELRQAITSHLEVLRAEDKQIHHRMLVLVRQRTDLQRDQRLLKTIKGIGIKSTLAFLASVPELGRVSNKAAAALIGVAPFVRQSGTMKAPARIHGGRAAVRSILYMAAVSASRHNPVLRPFYERLLAKGKPPKLALIAVLRRLVVFANAVLRSGQPWRGAIAA

SEQ ID NO: 121694 - protein, 340 aa, unidentified
MTITTVGIDLAKNVFAVHCVDQHGKTVLVKPKVSRAALPELIASLPPCVIGMEACSGAHYWARLFRQYGHEPRLMAAKFVSPYRMAGKSGKNDAADAQAICEAVRRPHMRFVPVKDESQQAMQCLHRIRQGFIEEKTATYNRLRGLISEFGVIAPQSTDALRHMVSEQKSSLPLQVQQCVNDLLEHIDRIEDNITEYDRILSRMAKTDHRSQRLMELKGIGPTTACALVASIGNAHDFKNGRQLAAWLGLTPSQYSSGGKSKLGRITKAGDSYLRTLLVQGARSVLIGAEKRTDLFSRWVCSLVDRRGYWRAVVAIAAKNARLCWASLHYGDDFRLYSAS

SEQ ID NO: 121695 - protein, 403 aa, unidentified
MYYVGIDVAKEKHYVCILDTSKELAVKPFWIYSDILGLRDLVKRFAELSLNNDDFIIGVESTGAFSENLYEYISDADYKVILLNSYQTAKYRDFSTMKKIKNDSIDAYVIAELLASGKYKESHISNDDYQSLKVLGRLKRSLDDKIKTIKREISTVMATVNPEITKVFPNIFSKTALSIIKAYPTAVDIAQSTPKKLTKIFRHIKGNNFNEEKAKFLIELASSSIYAGRTHEARALMIKTNIKILELLSQEKAEIEQQIESLVYGKIETIDSSIDNLKSIPGVADKTISAILGECGDIKRFDSAKAFIGYLGLYPTLYQSGNSMSVGRLAKRGIPIAKHALYMAAVSSVMHNTEINKLFRDKVSIGKSKKEALIIISKKLATIIYSVFKYNKPYEPKRVFIPR

SEQ ID NO: 121696 - protein, 351 aa, unidentified
MIIGVDPHKSSHTAAALDPATNARVASVRVDASLAGYRELMRWAKPMPDRRWAVEGARGLGRHLAQWLVARGEVVVDVPSTATARVRELSRGSGRKTDVIDAAAAASVAALQGDAMPVVGEDHTTVFAMLEERRANLAAQRVRVANQLHAALRDLVAGGAPLAITAKSASTMLRSVRPVSPSEHTRKELAQDLVRDLRAVDGSLVDIEKRMSAALDECGSSLRDVDGVGAVTAVRLIGRTGHAARFATSDAFATYAGVAPIEVASGERTRHRLSRRGDRQLNSAIHLIAVTQVRMRDSIGRRYFDAKIAEGKTRNEAMRCLKRRLANYLWRLMIADERRAAAGVQDHEIAA

SEQ ID NO: 121697 - protein, 483 aa, unidentified
MTMAMANDANTDDSSCRCNKCYCYYIGGDVSKGYCNFVIMDQDRKIIENDFQLDDTPKGHQKLLSILTDIRTKSPDALIFAGFESTGGYENNWYQLLWKLKDTINLQVTRLNPLGVKHHKIANLNRMDNDEISAQQIADYLISHPNVPVYNYEDTFASIRRQWKFIRLLKKQKAQLKQQLESMVYEAHPQMLKYWDEQLSEWFLQVLINYPTAKELAIVTVKKLSAIPYLTEDKARQLIQDARISVASATKPWMGHCIKSLAQQILVQKKTIMQLEKEMLESYSSPEINILTSFKGIGSFSAFGLMIEIGSIERYRSVKNLASHFGVNPVFKASGDKVLIARMSKKGRKEPRWILYNVALSAIVHNEMIRELYEGYLKGGKAKMSAVGIIMHKILRIIYGMLKHRTNYDPEIDKVNRNREVSKKCDIDKDMTKPKTDKSRRYQSYDNDAPISKRQSKKREEAVDLKESIEAPNERTLRSKRRE

SEQ ID NO: 121698 - protein, 346 aa, unidentified
MMIIGCDYHPSWQQICWLDTETGETAEQKLEHASGEAEKFYRQLPGPALIGMESTGNCQWFVEMAATLGHEVWIGDAAKIRASEVRQQKHDRGDAALILKWMRERRFPRIWTPSGEEKDLRQLLIHRYKLVRIRAQVKNELQHLAMNQGVTKKKKLWSKAGEQVLRELPLKPWASRRREDLFQVRGMLDDRIAPLDQAVTEVAEKNEKARLLMTQPGVGPITSMAFVLTMGDVSRFQRGKQVASYLGLIPREYSSGGHQRLGSISKQGNRFLRMLLVEAAQTAVRYDPGFRNEYLHRCHTKAKGVAKVAAARKLAIRLYWMLRTNRGYPEVVRVESSSRVPVVGAS

SEQ ID NO: 121699 - protein, 342 aa, unidentified
MGRVYVGLETGSRSCSLAVRTPEGDVIDRRTFETGEKTLIEAFTSLPGEVHVHLEASELSAWVRRVIKPLVARVVVSHPKSNAWIGKDPLKNDRIDADKLSEMLRQGNVHEVYYGDDEGRTEFKRLVQHYDQVTRDEARLKRDIKARLRAQGLIVKDQSIFTKEGRSEILARVTCLTARASIGQLYAILEAALKAQDLADRLMRKESRKYPEIARFDEAPGIGPVLACRFSAYIQTPHRFSNKRKVWRYCRLGVAWRTSDGQPLNHQSLDRNGCGALKDFSRKAFQGMLITKKDNAFKRAFRSACQSTGNPTHARLTVQRKIVATLWSMWKKGERYQDNYAG

SEQ ID NO: 121700 - protein, 420 aa, unidentified
MNDGRRWDVKQQAERAAGLDVHRDNVVAATRVNEPGGEVAVTKKRFPTTRRGVRELAAFLSEAGVTRVAMEATGVYWKTIYYALEGLFDELWLCNAQHVKNVPGRKTDLGDAEWLADVAAHGMVRPSFVPPPEIRELRELTRYRKTQVDARAREIQRLEKTLQDAGIKLTSVASAVWSVSSRKIIEALIAGERNPAVLASLVLGKLRPKIAQLEEALDGHFGPHHAIVCRQVIEHIDFLDGSIAALSEEITARLIPFEAAVTLVCSITGIAELSAQAIVAEIGVDMSRFPTAGHLCAWAGVAPASHESAGKRRPAGTRHGSTWLKRVLIEVARAASRTKGSYFSAQYSRIARRRGPNKAAVAVANSILAVIWHVLTNGCIYEDPGADYFERRHDPAVEAKRLQARIEALGFDVTLTLKAA

SEQ ID NO: 121701 - protein, 343 aa, unidentified
MKLHVLGIDLGKTVFHLVGLDSTGKVVIRKKCSRTQLLAFTANLQVQLIGMESCSGSHFLGRALREQGHEVRLMPAQYVKPYVQTNKSDFLDAEAIAEAVQRPRMRFVPIKTEEQLDLQALHRVRERWVMRRTAVVNQIRSLLLERGLTLPKGRSYVDRQLPRILEDGELRLSGCFRILLAQLKLELEQLSARIEEMDRVIQKTAKENEDCQRLTEIPGVGPVTATALIAAVGNASAFEKGRNLAAWMGIVPREYSTGGKQKLLGISKRGNKYLRTLFIQGARSVVQQRHKQAPGLSHWLEQLLGRTHQNVVIVALANKLVRMAWAVLCKNERYRAPVLTVTT

SEQ ID NO: 121702 - protein, 399 aa, unidentified
MLAVGIDISKSKSVAAILNQDGSMHTSPFEFHHTQPELDAFIKYILNSNQSATILMENTGHYHYPVLKAFREAGLPVCMVNAYQIKKFGDMDLRKAKTDKKDAVRIARYALEKSYSLVPYTSMEQKYEDLKFLARQYNQRMLTLKTNKVFLLNLLDETMPGITNILPLTTRTPETSLSVLFINRFKSYDRIKKMGKSRFLDAFEKITRKSRNRQTKTYGLAIYEAALRNITTRGENEYTLAAQDQCLELVCESQKAADSIILKMKTLAETLPEYAVLRSMAGVGDRLGPLILAEIGDIRRFHSGKALNAYAGNDPPPYQSGTFESYNRHISKRGNAALRKYCFEVMQTLKLTRPQDDPVYLFLLKKEQEGNPYNVAKMAGVDKFLRIYYARAMETLKQQ

SEQ ID NO: 121703 - protein, 324 aa, unidentified
MSNAIIGVDVSKLDLSISLLIDKIYHQTKIDNNQEGFKIFSKWLKKHRITKVTACMEATGNYGTFFANFLYKNNHEVSVVNPLCISAFAKSKLSRHKTDKIDSMIIAEYASKNDISLYVPKNSDLQELQNLYRCLQNLKEQYKQSQNYLENKDHLSSTICSSYKKLSQNITKEINKIELEIDKLLIHNHELKQKADNIQTIPGIGKLTAVAILAESPDFAYFSNARELAAYAGLTPKHKMSGTSVRGKSRISKIGSSRLRKALYFPAIVAKNHNPLFKEFSQKLGSKGKPTKVIIVAIMRKLLHIVFGVVKHNTSFNPRFGLDC

SEQ ID NO: 121704 - protein, 312 aa, unidentified
MTECCAAGIDVGRDFFDVGLAPSGQVFRTANGAKGVETVVARLRRAGVVRVVLESIGGYAARLVRGLAEAGFEVGVIDPKRIRALRIAEGRKAKTDRLDARLIARFALIMQDAARPVPSAKAFEIRSLSTRRRQLVEMAAMEKVRLKQTLDEAVAASCRQIIAWLTEERARVEDLLQAELLAAADGAARSRLLQTIPGVGPAVSMTLLADLPELGALDRKAVASLAGLAPHPNQSGTRTGQAHISGGRPCVRAALYMAAVSATRSDAGFKREYLALRQAGKPAKVALVAIARKIAVAANSMLKAHQPWSKPA

SEQ ID NO: 121705 - protein, 370 aa, unidentified
MLNTITTHFVGLDVHQATIAIAVADPGRGDPRVMPTIPNDFKTLIKSLKRLGDLDHVLCCYEAGPTGYGLYRQLKKAGVRCVVIAPSLVPVKSGRRIKTVRRDAAKLAGYLRSGDLTPIHVPDEATEAVRDLERARDDAKRSERVARHHLSKFLLRQGRIYTGATRWGKPHAGWIAGQTFEHPASQHVFGDYREAVELATARVERLTLRLREVADAWDRAPLIKALQALRGVEMVSSVTLVAEIADFRRFASAAELMSYVGLVPSENSSGSSRRLGGITRAGNGHVRRILVESAWQYRRPPGMSKALRARNEGVEPEVRAIAWKAQHRLHSRLKKLLNRGKPANQAVTAVARELVGFIWAIARTEVLMAK

SEQ ID NO: 121706 - protein, 301 aa, unidentified
MFPFGIDVSKNTLDLCMLYDGIKGRIKTRNIQNNRHSVENILRWLRLQHCGPEDVHVVMEATGVYHERLATELHDAGFYVSLANPHRSREFARGMGIMTKTDKVDAYMLACYAFLKNPHRWEPPAPEIRYLGALLRRRDVLLGDALREENRLEKYLSTDTPADIISSCMHMAQLLREEVSNIERQIKAHIKASPALRRDYTLLTSIKSVGPQLGMHMLVVLRSHDFSSAEQAAAFLGVVPIEKRSGTSVRSRPRMSKIGPPQLRAKLYMSALCGKIYNKRSVIFTTRCACGVNLKWWPLVR

SEQ ID NO: 121707 - protein, 391 aa, unidentified
MIYIGIDVAKDKHDCFITNSDSEVLFKAFTIFNNLDGFNDLYQKIESVMDDVTKVKVGLEATGHYSYNLLGYLIDKGLPTYVINPLHTNLYRKSLSLRQTKTDKVDARTIASMLMSDVNLKSYSDTSYHNEELKSLTRYRFDKVKERAKLKTSVSRLVCILFPELEKLVPTLHMASVYALLSEFPSAKHVATAHLTRLTNLLSESSKGRYGKDTAITFRDSARASIGSNMPAKSLELKRTIKLIQDLGSEIDDIENEIYIIMDEIYSPILSIPGINYRMGSMIIAEIGDFNRFDSPDKILAYAGFSPSTYQSGQLDGAYAHMEKRGSRYLRYALYNATKYVCHWDPTFAAYLAKKRAEGKHYNVAISHAVKKLVRVIYHLEKTKQQYIKAA

SEQ ID NO: 121708 - protein, 320 aa, unidentified
MLSFCGIDVSKDRLDVMVLPDEYSSSVPNDPAGWAILVEQLRGFSIAAIGIEASGGYERGAVRSLQAAGMPVRQVNPFKLRQFAKASGVLAKNDPLDARMIASFVGIMPTRPAQPTTPAAEQLVEMLAVRRQLSAEKTAAENASRLLEDLMLQRLSRRRIARLAADIELLDKRLVEIVATDATLAHRYRLLTSMPGVGPVLACTLIALLPELGGMSRKQVAALVGVAPYAFESGTLKGRRCIWGGRANVRQVLYMAAMSASNWNPALKLFHDRLKRAGKLPKVVIVAVMRKMITTLNAMVRDDIAWADRLSGRHSVTTAR

SEQ ID NO: 121709 - protein, 355 aa, unidentified
MKYYASSTEYNCGIDLHARQMYVCVMDRQGKKLVHTNVKDNDFKYFLKLVEPYKHDLTVCCECMFGWYWLADACQGAGLTFVLAHALYVKAIHGGKNKNDRIDSEKLTHLLRSNLIPPAYVYPSEKRPLRALLRQRIFYVWRRAELLARIYSHQLAHNRIPAKQTRRVRDPWEEQLLTAEDNPLRQIALKNDLAMIKHFDHQIFQLEEELQRQTKKVAGREYALLQTVPGIGESLGLTILYEIGDIERFPTVKDFLSYCRLVKGTVASAGKIKGLRGAKLGNPYLRWAFGEAAVIAKRDHFRIRPLAQRLEQQMGGNKFKANTVVAIKLARAVYFMLKNKTVFDPERLVAALAKK

SEQ ID NO: 121710 - protein, 407 aa, unidentified
MIFVGDDWAEDHHDVEILDEAGRRLARRRFPEGVAGVGQLHALIAEHATEPAGVAVGIETDRGLWVSSLVAAGYQLYAVNPKSVARYRERHGVSGAKSDPGDAKVLADLVRTDRHVHRTVAGDSEVAEAVKVLERAQQRLIWDRQRHLNNLRSTLREFYPAALVAFGTELAHSDALAVLGRAPTPGEGRKLSPSAIEAALRRGGRKRNVEDRARAVAEALRSPQLDAPAQVSTAFGASVRATVAIVAEMTRQLGQLEEEMTKSFESHPDTEILRSLPGLGVVLGARVLGEFGDDPNRYQDGRCRRNYAGTSPITKASGKKHAVLARFVRNRHLADACYLWAFCALTASPGARALYDEHRAKGEGHNQALRVLSNRLVGILDGCLRHRCLYDEDVAWAHRSEAKAKAA

SEQ ID NO: 121711 - protein, 342 aa, unidentified
MKITTIGIDLAKSVFQVHGVDQRGKTVLKKQLKRAQMAGFFANLSPCLVGMEACGGAHHWARKLQGFGHTVRLMAPQFVKPYVKTNKNDAADAQAICEAVARPSMRFVAIKSVEQQAVLALHRARQGFVKSRTAQANQIRGLLGEYGLILPQGIAHIAKRVPELIEDASNELPGAFRILVDRLMDHLKGLNQQVAQLEAQIKAWHRDSDASRRLEQVPGIGPITASALVASIGEARSFDNGRQVAAWLGLVPRQHSSGGKPTLLGISKRGDSYLRTLLIHGARSVILAARRKTAQGGWLQELLKRRNPNVAAVALANKNARIAWALLAHDRRYRADYAGAGV

SEQ ID NO: 121712 - protein, 392 aa, unidentified
MFYLGIDVGKKHHVASMLGEGVKKPLFKGFSFANTTEGAEDLAARISEITSNVGEVSIGMEATGHYWLALYSFLFDKGYTIHVINPIQTDGWRKGIEIRKRKTDDIDSVLIADLIRYGDFSETRLADEAVQSLRTLSRFRTYLVDSISDLKRKVICVLDQVFPEYESLFSDVFGATSKELLLQYSSPAELEKLSVESLTTFLETASRKKCGEAKAEQIIQTARHSFGVTHCRDTFSFQLRALLEQMRFIEKQVADTEAEISAIMEELNSPITTIPGIGPVLGAVILGEIGDIRRFESPAKLVAYAGIDATVAQSGEFEASHNRMSKRGSPYLRRALFIAANVAIHFDPDLGAFYQRKHAEGKHHSTCLGAVSRKLCYIIHAILTENRPYIKH

SEQ ID NO: 121713 - protein, 333 aa, unidentified
MGFEPEPSKEGSWTMAQNDLVVAGIDVAKDKVDACIRALSQRQTFPSTAQGRQQLISWLRKHKATKAVMEASGGYEREWAKALREKDVEVRIVDPKRVRSFARSAGRLAKNDTIDAEMIGWFAETFGEAKGQPHDAAREKLRQMVNARQGLLDIKTMLNNKGEQDLPEPVQRMHTRLLKKIIAELAALELVIAAQVKATPHFAGLAEIIESVPGLAGTTSAGLIAAMPELGLVDGKVAAALLGAAPYDDDSGKRRGERQIKGGRRKVRNLFYMACLGAATRHNPVLKAFYDRLIARGKEKKVALVACMRKLIVILNTMIARGEKWDASRYAVS

SEQ ID NO: 121714 - protein, 356 aa, unidentified
MSYDVKYIGMDVHKEAIVIAVLNEGGKLVMESVIETKASSILQFLHGLRGELHVTWEEGTWAAWLYDLLQPQVQHIVVCNPRRNALLKEGSKSDKVDARKLAELLRTGMLRPVYHGENGLRTLRELGRSYQTISKDLTRVMNRLKALYRGWGIPCAGTQVYAPRYREAWLNKIPQAGVRRRAELLYQQLDGLQGLRRNLRPELLAESRKHKAAKLLRQIPCIGPIRAARLLALMQTPHRFRSKRQLWTYSGLGIETHDSAQYRFVSGQLQRAKKPQQIRGLNRNHNHEMKEIFKSAATRASCGRGPFHDFYAALLAKGMKPEMARLTLARKIAAITLTLWKKEERFDIELLKTQAA

SEQ ID NO: 121715 - protein, 348 aa, unidentified
MDGGRSPVAVAGMDTHKDTLAVAVIDGQGRELDRTELENSAAGHHRLVGWLRRFQLERVGIEGSGSYGRAVALAVHGAGFEVVEVPPQLTAQARKRQRSNAKSDPIDALLIARITLREPDLPLTRPDGDVEDLRVLVRYRRELRAERNRQANRLHADLVQLRPGYQRRIGRLTTERNLDRARRLLAGDDGVRARTARQRVTRLRQLNRQMAEVTAEVRQRSATIRSGLTTIPGVAELSAAELLAEIGDAARYRTKAQFAMANGTAPLPASSGRTQRHRLNRGGNRQLNRIIHYIALTQISRHPEGRTYFDHKKAEGKTTQEAMRCLKRRISDRIFQTLRDTRTPASAG

SEQ ID NO: 121716 - protein, 422 aa, unidentified
MQYAPTPSTPSSLPTEPPSGVTAGIDWASTDHVACVVDGRGQVTARFTVAHTTTGLTDLVRRLRQAGAGEVAIERSDGPLVEALLAADLPVVVISPNQIKNLRSRYGSAGNKDDRFDAYVLADTLRTDRHRLHPLTPDSPATQTLRATVRARRDLVAHRVALANQLRAHLQRVFPGAVGLFRDLDSPISLAFLARFDCQDRADWLSPRRLAAWLASVGYSGRKDPTVLLAHLRAAPRGATGEPGAAAAHTTRALLAVLASLVEQIRALSEQIAEQLALHTDAQIFTSLPRSGTVRAARLLAEIGDCRARFPDPEALICLAGVAPSTRQSGKHEVVTFRWAVNRQLRDAVCDFAADSRKTNPWAAHLYNQAIARGKDHPHATRILARAWLYVIWHCWQDHTAYDPARHGALQRLLNQDQTAAA

SEQ ID NO: 121717 - protein, 322 aa, unidentified
MRYIGIDVSKATFVVAYSSDKGGEIRTFNNTTAGIRQFIGTLPKDGSIHCVMEATGNYSALLLYMLNVAGITVSMENPLKVKNFARTMLSTVKTDKSDARLIALYGEKMNPQPFKVQGEAILRLRQKRTVIRQLTKQITAMSNLRGSLVCLPVPDKGATHTVDETIKFLEKRRDRLQSELTELVEVEFSRQLALLTTIKGIGITLATALIITTGGFTYFQNAKQVSRYLGICPTYEQSGTSVNIRGHINRNGDAYTRGLIYVAAWNASRFNAKCGETYTRLRQNGKPGKLAMIAVANKLVRQAFAVVAHDKEYVDGFVSNRH

SEQ ID NO: 121718 - protein, 336 aa, unidentified
MHTDQTVLTYALFVGVDIAAKTATVATQRPGTKTGRSLTIEQTPEGYTSLLQQLQATGSVPSQVLVVMEATGSYWISLATRLVHAGFAVSVINPAQAHHFAKALLKRAKTDAIDAQTLAQLAMVLQPEPWTPPPQIYYALQQRLAQRDDLLNLRQQVRNQLHALVQHPEVIPEVHARMERLLTTFEAQLVEVEREIAVALTQDSAWAAAATRLQSIKGVGWVTAAWTLVTTLNFTSCDTVDSLTAYAGLAPMPRQSGSSVWYRPAIGHTGNSRLRTAFYMATLSAAQHNPIIKAFYARLREAGKPEKVARCASARKLLHIAWAVVKKDQRFDPHYA

SEQ ID NO: 121719 - protein, 438 aa, unidentified
MSALPVIDPKAAAIDVGSEQMHVSIAGGDPKVFGSTTAQLHALREYLLSQSVSSVAMEATGVYWLCPYEVLEKAGLHVVMVNGKYVKNLPGRKTDMKDCQWQATLHAHGLLKGGFVPQEHIRRLQDYQRLRADHIAVAASCEQHMQKALERMNIKFHDVISDLTGISGLKVVRAILAGERNPVALLALCDCQIQKKKASRVCESLVGTWKQEHLFALRQALAAWEFYRAQIGECDQALEQVLKELTQDQPGPPAALPSWGRRSGGNAPEIPQLREMLWKLCGGKDPSAIPGISDYTLLQLLAETGTDLAAHWKSDKHFTAWLGVAPGARQSGKRRGSQKRSRNRAGRIFCLIARAVGRTADRALGGFYRRLRARRGGLVANLALARKLAQLFWRTMVHGVAYVEQGLQKYQDRVAKTEQTWLQRMAQKYGMTLQPKAA

SEQ ID NO: 121720 - protein, 338 aa, unidentified
MFIIGIDPHKGSHTAAVLDERETLVGELRVDADRRQRDRLLAFAAPYAPRTWAIEAAGGLGALLAQQLVEVGETVVDVPPTLSARARLLDAGQTDKTDPHDARSAAVVALRHASLQQVRPVDHTAVLRLLADRRHDLIGLRTRTVCRLHALVCLLIPGGISQRLCADRAAKVLRSIRPTEAVALERKHMALELLADLRRVDQQLAAVGERIVTAVDASGTTVTDVYGVGPIMAAAILGHTGHISRFATAGHYARYNATAPIAASSGPKVRHRLNPRGNRHLNHALHIAAVTQIAHDTPGRVFFEKKLAEGKTRKEARRALKRRISDAVYRQLVIDARR

SEQ ID NO: 121721 - protein, 435 aa, unidentified
MPDRQDVFVGIDVSRRHHQCSFITKDRKPVSKTLKINEDREGYQTLIERMYDIAHEKGSVSFNIGLEATGHYHQNLASFLHSIDDLDLKVSCINPLQTKRFIQMLMLREQNDKVDSRAIAEFMCVQRPDQTSQKRSEMRPLRDLSRLRDQLVSQKTACINQLHALLDQVFPEFEQIFPDVKTEPLAWAVLYRYPCPKNILAAKTRRLMAVQKRKGGRYLGEEKALQLKALAKQTIGSSKGDVYVFQIRILTQNLSSLHQQIEDTEKTIENAINSMNLPPWKTIPSVGVLTMATLLGDVGDPRLFGSAKKFSSFLGLTPRGKQSGSSVNRKGHISKCGPSHIRQKLYMCVVSALATKKNPLVLDVYNRLVSKGKPKNVAIVACMNHLARAIYAVFKSNQPFDPDFSVAKRSPGLPQYGNLSTIMSGVNIPRPENKI

SEQ ID NO: 121722 - protein, 382 aa, unidentified
MITMTRTSESTAPTGGLLLAFELGQRSWKLGFTVGMGQRPRIRQMPAGAVSALVTEIERAKKRFGLSSDTPVTSCYEAGRDGFWLHRYLVAYGITNYVVDSSSIEVNRRARRAKTDRLDLAGLLSLLARYVLGDRRAWRVVRVPTVAEEDARHLPRTLEALTQDRSRLMSRLKSLLTTQGVSLPIDGQFLKQLKAAHLWDGTPLPPGLHERLTRTWTQLRDVNGQIRDLKALRLTRPENLTPATSRVLAQLLTMRAIGPIGASVLATEIFGWRRIRNRRELGALVGLVPAPYQSGETDYDQGITRAGNAHVRRVIVQLAWGWIRHQPDSALTHWYQQRFGAGGKRLRKIGIVALARKLLIALWRYLETGAVPDGAQLKPMEV

SEQ ID NO: 121723 - protein, 362 aa, unidentified
MKKNSTRTKKSKSDRNAPRQTIGLDLGDRNSRFCRLGADGRILEESSVPTQATAIQKVFGAMRRCRIALEVGTHSPWVSRLLTELGHEVIVANPRQVALIGASSRKNDRMDAQALARLARVDPQLLQPIRHRSREAQEDLMVIRVRATLVEARTSLVNAARGLTKALGKRLPQCDADQMSMEKAASLPGALQESLRPLLEEVASLTEKIHALDAQIEQIARDQYPETALLTQVHGVGTLIALTFVLTIDDKQRFAKSRDVGCYLGLRPQQRASGARDPQLRISKEGDVYLRKLLVQGAHCILRRRAPDTDLQRWGLRLCARGGKNARKRAVVAVARKLAILLHRLWVTGEVYEPSRQQAVAA

SEQ ID NO: 121724 - protein, 337 aa, unidentified
MIVIGVDVHKHSLSAVAVDEVGRQLDCIETSDGEELISWSKRVGRRRLWALEDCRHVTRGLERTLQRQRQHLVRVPPRLTAPERRRGRVRGKSDLIDALAIARAALREPLLDSPRPEEARLRELKLLVDHRDDLVDERRRCQQRLRWHLHELDPSLRVPLGALDRTVWLERLSRQLTRHQQTTQVRIARQLLGRCRSLSRSIGELDRELQAQTTTLAPRLLELPGCAALTAAKLLCEIGPIDRFRSDAQLARHAGVAPLDASSGKHQRHRLDRGGNRQLNCALHRIAVTQGRVHPPAKAYLERKQAEGKTRREALRCLKRQLARTVYTTLKSELLLT

SEQ ID NO: 121725 - protein, 341 aa, unidentified
MSEVRTIGLDLAKQVFQVHGADASGSAVFRKQLRRGQVLKFFSGLPRCLVAMEACGSSHFWAREIGRLGHEVRMIPPAYVKPFLKRQKNDAADAEAICEAAQRPTMRFVSVKSEETQGAVVALRSRDLLIRQRTQTINALRGHLAEFGKVVPQGSTNASKLIAMVEDPQTALPEAARTSLRFLTAILSQLTDQIRALDAQIVRQAREDETSRRLMTIPGVGPLIAAALVALAPSPETFKRGRDFAAWLGLVPRQHSTGGKQRLGSTTKMGERSLRRLLIMGANSVVVWRARKGAAPGTWLAKMLARKPPMLVRVALANKMARIVWAIMARGEIYRAPVAVA

SEQ ID NO: 121726 - protein, 408 aa, unidentified
MDVFHERCAGLDVHKEVIFICVLIGRGSGYQKIKLKFGTFHHQLVEMRQKLVELGVTHVLMESTGVYWMPVYDALEGFVEIVVGNAQHIMNVPGRKTDESDAEWLAKLLRFGLVKPSFVPAREFRELRQLTRYRRAVVQTRASEQNRVEKHLQIAGVKLSSVASHVFGVSGTDMLNRIAKGTTDPGELAGLARGRLRKKMPQLRDAFAGSISEHTQHLIALQMEQMNRLESTIAQAELKIDEKVKPYEEILARIDAMPGLNLRSSIDVLAEIGTDMSPWATHRQIAAMAGLCPGNYISAGKRLKNRSRQGNPYLKSILVQAACSAINVDGSYYQAKFKALKKRRGHKRALVAIAHAMLVAIYHMIKKGEPYREIGAKVVSDHEHGRKKEYLVKQLQNLGYSVSLTQTA

SEQ ID NO: 121727 - protein, 351 aa, unidentified
MDAHKRYSLAERENIVTGQVQQQRIEHRRGAIAAYLADVEPGTPVAVEATGNWYWIVEEIEQAGCVPRLVHPRKAKLMFGCINKTDKLDVHGLNRLQRTGTLPTVWIAPGPIRDQRELPRTRMFFSQHRARLKNRIQANLTKFALNVEGYSDVFGVRARQRMQEQIRLLPPCTQAMTQALLRQLALVEEQIAAQEQQIRAWVRQTPDMQRLQTLPGIGEILAVVIALEIGDLPRFGTAERLAAYAGTTPRVHSSGDKTRFGRLRPDVNRYLKWAFVEAANCVRLHAKYHAHRHVTRLYRRVASRKGHPKAVGAVARHLAEAAYYVLSRKEAYQEPKIRRVRNQGSASATAA

SEQ ID NO: 121728 - protein, 319 aa, unidentified
MEAIKFEQIVKVGCGIDVHQNLIVASIRKSNEEVDTREFTAYTSSLTSLRDWCRDEGVTHVAMESTGVYWKPVFNILEEDFEILLVNARHVKNVPGHKTDKKDSRWLSKLLLSGLLKGSFIPPRDIRDLRDLVRYRKKVVAQAAADKNRIIKILEDGNIKLSSVLTNIDGSVGTKIIDKMIEGVTDIDELMKFYHGKIKVRREEFRLALEGCLTDHHRLMLQIYKDSIADKELQIKRLDAEIEKATKSYQVEIDLLQTIPGVGKDSAITIISETGVDMDKFPDEHHLSSWSGMSPGNNESGGKKKRPKRFMVTRTFRAL

SEQ ID NO: 121729 - protein, 352 aa, unidentified
MSMVCGLDLHRGQITFDALEVDSGEAWRGRIWKPDRQRFRRWLEDEVGPRVGGDGQVAIAVEGCTGWRYVVEEIQAVGFEAHVAEPADTQAMRGRKRHAKTDRTDARLLRDLLHAGELPESWIPPAPVLEWRERTRLYKSLVDQRAVWVQRIHAELYQHGVPLPAEHIRSDQTRQILADQTGLELSDAARQRIEVGYRIIDATHTEAEALREQIARFARRQKACRALMDQLYGFGPTAAVVVWSELGDCQRFKRSRQVVRHTGLDVTVDASDTRRGGGYLSRQGPGTLRWALFEAGLCGARATSPDRDYYRSVKARADGKLAAMCVARKLARRSYHILKSMDPDDVYAVADT

SEQ ID NO: 121730 - protein, 409 aa, unidentified
MERQLERCCGLDVHKETVAACVRVGGRTGQAEQHVQTFGTTVGDLLVLRDWLAAHGVTHVAMESTGVYWKPVFYALENDFTCLLVNAAHIKQVPGRKTDVKDCVWIAQLLEHGLLRGSFVPPAPIRDLRDLTRYRKALIHDRTRVANRLHKALEEAGMKLASVASDILGVSGRAMLAALVQGTTDPAVLADLARGRLRGKLPALRQALASRFRPHHAFVLGQLLAHLDYLEEAITTLSAEIERVMAPWAEPLRRLDTIPGINQRTAEVILAEVGADMSVFPSARHLASWAALCPGHHESGGKHKSGKTRKGNRWLRTALIEAAAGASRAKNSTLQARFRRVLRRRGPKKAVVAVAHALLRVVYHVLADGTVYREAGANAYDRHHSQRVTRRALQTLERQGYRVTLEPAA

SEQ ID NO: 121731 - protein, 416 aa, unidentified
MPKLLFVGIDVSSNHNVVCCLPEDHQAKPLGRFTVLNDDPGIYQFRDRIQSIMGKHGLTHIRFGLEHTGCYSSHLARYLQSVLVFTPYEHEVYVFNPSLIKQFKKAHFLDAPKNDRIDAWFIAAKLRSGHLPRAFTWSESLAALQRLTRARFHVMENLTRETNFLLTNLFLKFSSYSTGPFQKTTSATSLAVIEQFHSAEDIVQMSQEELLAFVIKKGKNRFKDPQGVVNSLQKAARSSYRLPKAMVDSVNLAMASNICIIRTLQEQAKSLEKTIAEHLATLPQTLTSIPGISTIFAAGMLSEIGDISRFPDHKALSKFGGIAWRENQSGDFKATETRLIRSGNRYLKYYFIEAAKSVQVRDTIFAEYFNQKIAEPAKYAEKRALVLTARKLVRLVDHLLRTNRLYEPKGGIRQKV

SEQ ID NO: 121732 - protein, 425 aa, unidentified
MNSISNKKINQVTDQTLVVGMDIAKKKHYACFVDERGRVLKKPFPVLQSREGLEWLYQCIVEAMKEFGKTEVIVGIEPTGHYWLNLAYFLDEKGIPLVMTNPMHVKRSKELDDNLPTKHDAKDALVIARLVKDGRFSYPRILKGMEAELRVGATFRSKLVEEQGAIRNQMIRWLDRYFPEFTQVFPSFGKMALAVLEYTPFPSDLAGKELEEVLALYRQSEGLQSPQKPKAKKLMELAQHSIGVTEGQQMARIEIATLVRRYRQLEEEIEALTQQLTELVQTSVEYEWLKTVPGLGDATIVELLSEIGSFSHYQDPRQLIKLAGLTLREHSSGQHKGQKRISKRGRRRLRALLFRVMMPMIRHNEAFRQLHEYYTTRPDNPLRKKQSIVVLCGKLLKVLHAVCTKRQAFDVKRMMQDIFGLETAA

SEQ ID NO: 121733 - protein, 356 aa, unidentified
MAMLAESVDGVIGVDTHRDTLTAAAVNNLGGVLAQTTTSADAAGYQRLLDFACVQVAGRRLWAVEGAGSFGAGLAVFLQQRGEQVVEVARPKRSASRTGAKSDALDAVRAARQALGQDHLATPRRRGEREALRVLLTTRRCATLARVAAIGQLKALIVGAPEELRAELRGRSTAQQIQHCASLRRRPARSLEYQATMRALRATAQRIQALQTEADQLQTELTTLVGAVAPWLLEVPGVGPLSAAQVLVSWSHAGRFRSEAAFAALAGTNPIPASSGQVTRYRLNRGGDRQLNRALHTILLVRLRTDPDTRTYVARRTAEGKSRRDAKRCLRRVIARQLFRLLERYDQPGVEILRAA

SEQ ID NO: 121734 - protein, 383 aa, unidentified
MSHGTVDQSRIAPSTIFIGLDVHKESVTLAVLPSDAAAPTKVDKLPYDLKKLRRYLEKLGPADTLRTCYEASGAGYVLQRELATWGIACTVIAPSLIPTKPGVQRKHDKYDASQLARLFRAGELTAVHVPTEAEERVRDLVRCRSTFQREILKSRHYVLKFLARRGLVYREGTPWRQPHYEWLRRLARADSPLAAEDRIVFGEYLALLEYKLSRRDELDRQIAALALTPALAPKVARLQCFRGLDTHGAMVLATELADWRRFGSARELMAYFGLVPREHSSGDRQRRGSITKAGNSHVRHVLVQAAWSYRFAPKVGVALKRRQEGQDPRVIAHAWKAQHRAHKVFHRLSAARPPQVAVVAVARELVGFLWAVMRDAPDPLARA

SEQ ID NO: 121735 - protein, 352 aa, unidentified
MLIIGCDFHPGFQQVAIFDNLTGEIEEKRLQHRAEAEQFYGSLAGQEVRVGMEACGHYPWFERWLAELGFELWFGDAARVRASVVRKQKTDRRDAEHLLHLLIENRFPRIWVPSLEVRDVRQLLVHRHKQVQARTRTKNQLQAMALSHGVQKKYKLWTQAGRAELEQLPLLPYAAERRQKLLEELDGLETEIRQLDRRVAEEAGQRPEAVRLMTHPGVGPVTALAMVLTLGPAERFESAKQVGSYFGLIPSEASSGGKQRLGKISKQGSSFLRFLLVEAGQTAARYDPQLKRFYKRLAMRKNRGVAKVAVARKLATRLYLMLREDWTYAQLNQAVLSASPSHSVVEQQKPTA

SEQ ID NO: 121736 - protein, 446 aa, unidentified
MNHARLSQHRQFLAGKIVVGIDPSKDKHQAAVVDPQGSQMGRSFSFPTTRAGYDRLLSSELPKILGTSAPERVVFALETACNLWETLAFFLHHRGYTVVLVSPLSTHHARPILSIEFSRTDPKDAYVVATVAQRGAFTVYERFPAANNATHLLAITYDKLRKELAQNRARVRAMLDRLFPEFPRIINPHTDSAVYLLKRYLFPDDFLALDIDLESEALAKISRRQLGREELLELRAAACTSIGVVRQDDERIAERLALDAFLATIETLEHQFTQLERELLKRVEPLEQYQRLTSLSGVGKRLAALFLAEVRDLSRYTHFKSIEKLAGFNLRLFDSGRFTGTRHISSLGNTRLRWILYKMAEETARRVPEVRRKYLRRQIKRRSHIRNVVACVPTLLQLIIAMEREKRPYQHRQDHLNELNELEAKYQALRAASPKNTKRKEAKAAA

SEQ ID NO: 121737 - protein, 338 aa, unidentified
MKLYGAIDLHSNNNVTVVIDEQDKVVYEKRLPNDLAIVAQQLSAYQSSLEGIVVESTYNWYWLVDGLMDKGHKLHLANTAAIQQYEGLKYTDDHSDARWLAHILRLGVLPQGYIYPKDERAVRDLLRKRGQLVRQRTANLLSIQNLITRNTGSSMNSNRIKTLQPQQVDDLLADGDLALAVKANVAMVQCANGQIEILERTVRDRVKLRPEFCFLKTVPGIGQTLALTIMLETGDIGRFADVGNYASYCRCVGSQKISNGKRKGKGNTKNGNKYLSWAFVEAANFAIRFSARIKSFYQRKKAKSHGVLAIKAVAHKLCRACYYIMKNRVAFDVTKAFA

SEQ ID NO: 121738 - protein, 384 aa, unidentified
MKNTTSTTPAVYVGLDVHKSSITVAYALPGGGDPVYHGKLGGSNAALANGLVKLRKKLDVPKEALRICYEAGPTGFVAARRLIELGYDTIVVAPSKIERAAGDRVKTDKKDALKLARLHRSGDLKGIHIPDPTDEAVRDVCRARTDASEDRRKAKQRLSAFLLRNGIHYTGKSKWTAAHMRYLRDLKLPSAAHQFVLEEYLQAIDSAHDRAERLADHLETLLLTWERADHVLALMAMRGFKLVAAMTIISELGDLSRFKHPRQLMAYLGLVPGEHSSGQRRRQGGITKCGNGHARWMLIECATHYRLKPKVATPLSYRQDGQSKAVKALSWRAQNRLFNRYVKLSMRRLHHNKVTVAVARELSAFIWELAGIVDTELTAQSHQK

SEQ ID NO: 121739 - protein, 332 aa, unidentified
MYFDHYLGIDISKATLDAALIIKEGEVVGQTKVANNSHGFNDLASWIRKLKVKLSDVLVCAEHTGIYGYDLQIWLDDMQISFAFVSALEIKRSLGIRRGKNDAVDALRIAEYAYIRRESISLSHKPSDVIFQLRALLGERKQYVRMRAALLARKDALHQYESKESIDRREEIIDKYAEYIASVDKQMRGLMEHDDEIRRNYELISSVKGIGLVNAINTLVYTNNFTSFQTPRQYACYCGIAPFEHTSGTSIKGRTAVSKMGNQQLKCELTMAARSAIIHDPWMKQYYKRKMMSKGNAPGAHGIVLNAIKFKLIVRMFSVVKSGIPYKVMAYC

SEQ ID NO: 121740 - protein, 320 aa, unidentified
MASRESLFIGIDVSKQTLDVAFGADPHAPRETIPSTDEGVQLLVTRLQRLQPTLIVLEATGGLERMVFAQLLQAGVPTARVQPRRVRALAHAEGRQAKTDRLDARLLARFAERVRPPHHQATDEQRASLRDLLVRREQVIQMRTAEINRLTAAAPNLRPGIQQHIDWLDQEIRALEQERDNEAERTDEVRRKRELRESVPGIGAITARNLLLRLPELGTINRKEAAAVVGVAPYANQSGAQHKPRHSSGGRRDVRSVLYMATLAATRRRLVRRAFDQRLCQAGKPRKVAIVAAMRKLLTILGAILRQQKPWDPAVHTSAP

SEQ ID NO: 121741 - protein, 413 aa, unidentified
MKQMLDPVAGLDVHRDNVVAAIRTVGAEGEVAFTKARFPTTRRGVGELAATMSQAGVVRVAMEATGVYWKSLFYALEGLFPELWLCNAQHVKNVPGRKSDLSDAEWLADVAAHGMVRPSFVPPPEIRELRELTRYRKTQIDERAREIQRLEKTLQDAGIKVTSVASSVWSVSSRKIVEALIAGERDPIKLASLAVGRLRPKTAELEEALAGHFGPHHGMVCAQVIEHIDFLDSSIAKLSEEIAARLLPFEAAVALVSSVPGIGEISAQVIIAEIGVDMARFRTAGHLCAWAGLAPASHESAGKRRPAGTRNGSRWLRRTMIEAARVAARSRGTYFSAQYSRIARRRGPNKAAVAVANSMLAAIWHLLTTGAFYEDPGADYFERHHDPVLEAKRLQTRIKALGFVVTMTPKAAA

SEQ ID NO: 121742 - protein, 342 aa, unidentified
MRGFAARKFEGEDESMVTPALGIDVSKDRLDIELAAAGKPRAKCFGNSPEGWRQLMAWLKEQKIKRVHACLEATGRHSLGVALALCEAGHIVSIVNPAQIRDFARTKLGRNKTDGVDAGHIREYAEIFKPLPWIPPSPAMRRLGELQTIRAAIVSSLSEWKNRCESGLADDTVLALAKATIAHFAAQLAAVDKAIARTVADDSELSAKRDLLLSISGVGEVLAGLVLAELPGTNILRSSGQAVAYAGLNPRLHRSGSSIDRPTRISKIGNATLRAALYMPALSAMRHNPVVAALAARLRAQGRLKGKQIAVAAMRKLLVLCFGVLKSGKPFDPAVAMPTRGI

SEQ ID NO: 121743 - protein, 379 aa, unidentified
MKKNTIVNLQVTKSQIRRMAAKQRLTVGLDLGDRTSRYCILDEAGEKANEDQLPTTKTGLETMFGRMPPCRIALEVGTHSPWVSRQLKAMGHEVIVANPRKVKLITESVKKNDRMDAEQLARLARVDPKLLSPIQHRGAEAQADLAVVRARMALVDARTELVNSARGLAKPMGERLKKCDTDYVKESLADGLSEAAQNAIRPLLKSVEEINKQIGVYDQRIEEIAKRYPEMKLLKQVHGVGTLIALTYILTIEDAERFAHSREVGPYLGLTRKLRDSGDSRPELGISKAGDELLRRLLVQGAHCILRDGAPDSDLKVWGKAMLQSGGKKVSKARKKKAVVAVARKLAVLLHRLWVTGEVYDPQYNRKAAQAAKGKGKAA

SEQ ID NO: 121744 - protein, 343 aa, unidentified
MDHFAGLDVSVKETSLCIVDDAGRIVREVKVASEPEALLAVLTNPAYCFKRIGLEAGPLSQWLFSALAEAGLPVICVETRHMRAALKAQINKTDRNDARGIAQMMRAGLYRPVHVKTLRSQKLRMLLTHRKLLQSKAIAIENDLRATLRNFGLKVGVVGTVKFEARIKELVESTTDLVVLVEPLLIVRRVLREQLGILHRRLLAIVRNDAVCRRLMTVPGVGPVVALTYRATVDVPSRFRNSKAVGAGFGLTPSKHQSGESDRTGGISRCGDEMMRMMLYEAAHIMLVRSAKWSWLKAWAMKIARHRGLKKAIVALARRLAVIMHRIWVDGTEFRWTREVAAA

SEQ ID NO: 121745 - protein, 373 aa, unidentified
MIECLPEAGCGRSIDLGSNKTVGKRGRHTRISNKARTVVRVNQTRMMQGRAKKEKKPMTEEVVCVGVDVAKSTLDVAVSNSKATRQFKNDHEGITSAVRYIAGLKPARIILEATGHFEMPLAAALQASCLPVVIVNPRQVRDFARATGVLAKTDKIDARILALFGLQVKPEVRLLPDQKAREMGSLLARRRQLIEMLTAEHNRLLQADDSIRPSIEIHIQWLEKAISTINDDLDRQIRSSPSWHEKDNLLKSVPGVGKVVSTTLLIELPELGQLNRRKIAALVGVAPLNHDSGTMRGKRTVWGGRAKLRAVLYMAALVGVRRNPVIAAFYQRLLNAGKAKKVALVACMRKLLTILNAMIRSKTVWQIVAVEAK

SEQ ID NO: 121746 - protein, 363 aa, unidentified
MKEAKRRFVGIDLGKREYTMAIIGKKGKMIIHHGKTSIYGRIGLYQLLEKSDKIALEAGNLAFILAREILERVGSEVRVLHSSKLPLIWDSPTKTDKEDAMKLAHLVEERKDEKLPLVPLPSEQELEQRKTLASYGREMRNRTRMINTLHAMFVHQGHTTVVKQALATGERRRVAVEVLQGQEREEAEWILKYLVLHEQRIEELKSKIQQKAKENESMKLLQTVAGVGPIVAYAYVAHIGDGSRFNTGAQVSNYLGFVPRLDYSGTIQRHGHISKRGNGYLRALLVQAAWSTVRSKSGGALKERYTYLTAYKGASKKKTIVSIARRLSELMYAVLKTKTEYKPLPWKGSQHKRAILVEQALSA

SEQ ID NO: 121747 - protein, 346 aa, unidentified
MEYVALDVHKNYTWARVENSQGARLYESRLAHGHGTIKNFVNRWSGRSPVAVETVGNWYWVVDEIEAGGGTPQLVNARLAKLMMGNVNKSDKLDCQGMNRLQRTGTLPTVWIPSSSVRDGRELARTRMVLSRQRTQLKNRIHATLGKYGYTVKGASDAFGKKGREIIEELLLKLPPHTQQALRLILDELDHVTDNLKAIEGHMIEIFSPCPQTQWLKSLPGVADILAVVIWTEIGTIERFNRAEQLASYCGLVSRESSSGGKIRLGPVRRDVNVYLKWAFVEAANSALLNAGRCGYGHISRLYERIKPRRGHGKAKVAVARHLAEASFWMLKKGEPYREPMPSTQR

SEQ ID NO: 121748 - protein, 406 aa, unidentified
MFDTEDVGVFLGLDVGKSAHHGHGLTPAGKKVLDKQLPNSEPKLRAVFDKLTAKFGTVLVIVDQPASIGALPLTVARDAGCKVAYLPGLAMRRIADLYPGEAKTDAKDAAVIADAARTMPHTLRSLELTDEITAELTVLVGFDQDLAAEATRTSNRIRGLLTQFHPSLERVVGPRLDHQAVTWLLERYGSPAALRKAGRRRLVELIRPKAPRMAQRLIDDVFDALDEQTVVVPGTSTLDIVVPSLVRSLAAVHEQRRALEAQINALLEAHPLSPVLTSMPGVGVRTAAVLLVTVGDGTSFPTAAHLASYAGLAPTTKSSGTSIHGEHAPRGGNRQLKRAMFLSAFACMNGDPASRTYYDKCRARGKTHTQALLRLARQRISVLFAMLRDGTFYEPREPRTATPVAA

SEQ ID NO: 121749 - protein, 347 aa, unidentified
MRFYTGQHQHYCGVDLHARSMYLCILDQTGTVRLHKNVRATPEAFLKAVAPYREELVVAVECMCTWYWVADLCAAEDIPFVLGHALSMKAIHGGKAKNDRIDAHKIAVLLRGGMLPQAYVYPARMRATRDLLRRRLHFTRKRAELLTHIENTNSQYNRPAFAKKLTYAANRVAVSERFADPAVQQSMAVDLGLIAYYDGMLRELENFILRTAKHHDANALYRLRTVPGIGKILALVILYEIHDLTRFARPQELASYARLVKCASASAGKIHGTSGAKIGNVHLKWAFSEAAVGFLRKNPAGKAYYERLVRKHGKGKALTVLAHKLARAVYYIWKRDQVFDQEKCLAA

SEQ ID NO: 121750 - protein, 364 aa, unidentified
MKDVYYVGLDVHKETIEMSVFRNWDKEPEFEKRIANGTQDLIKIIRKLKKHGKVETCYEAGCMGFNLKRELDNEGIECRIVSPGKIPRKPTERIKTDRRDARLLAKTLRAGEAAAIHVPTIHDETVRDYIRARDDVKLDMRRAKQQLLNYLLRLGYRYENNRYWKGKHLQWMKGIKFSDTIQEETFTVYFTRIVELEERLGLMGKRIREFAESERYKSNVGKLRCLKGIDYLTALALVTEVGDFQRFKNAESFMSYLGLVPREQSSGEKRRQGGITKSGNGHLRRLLVEASWHYRYHAVPSKQLVSRREGQGFETIAYADRAMRRLQRKFSKIVFRGKSKNVAVTAVSREMAGFIWGLMTGNIA

SEQ ID NO: 121751 - protein, 409 aa, unidentified
MDQLIERCCGLDVHRDTIAACVRVPGPNGKRQHEVRTFGTTAVELLALRDWLEAHAVTHIAMESTGVYWKPVFYVLEEAFTCLLVNAAHIKQVPGRKTDVKDCMWIAQCLEHGLLRGSFVPPAAIREIRDLTRHRKVLIQERTRAANRVHKLLEDAGIKLASVATNILGVSGRAMLEALVHGTTDAEVLADLARGKLRKKLPALRQALAGRFRPHHAFLVSQLLAHVDYLDEAIATVSEEVEGRLAPFAAQLTQLDTIPGINKRTAEVIIAELGVDMSSFPSDRHLASWAGICPGNNESAGKHKSGKTRKGNRWLRMTLIEAAAAATRTKDSALQARYRRVMRHRGHKKAVVAVAHAMLRAVYHLLAEGTTYREPGAAYYDRPHTHRVTRRAIQLLERQGYRVVLEPAA

SEQ ID NO: 121752 - protein, 394 aa, unidentified
MIYAGVDIAKTDHVIGAVDERGAEMCPPMPFKNTEAGLERAVAWLEGLAGSPSDVVVGMEATGHYWMACYSFLVARGYSVAVINPMQVKAVRKLKGLDKVKNDRVDAGLIAEALRIGQYDETRLATDEMASLRSLSRYLQSLRGMVAELKTQCICLMDAHFPEYAGIFSDMFGAGSRAVLSKSPLPFELARRRADSLARDIAEASRRGGKSSGYAAKIKAAAKSSIGVRLGQEAASFQVKSLIRQIEFADSECAGVEARLRSLLDEVEPLVLTIPGVSYVTGAQIVSEIGDVSRFRNAPALVSYAGLNSSVSQSGQFDSGGGPITKHGSPYLRRALWLAANRARRYDPGLRAFYDRKRAEGKPHRVAVTAVARKLCHIVFAVMRDQVPYDPGRE

SEQ ID NO: 121753 - protein, 412 aa, unidentified
MRVVYERCCGLDVHKSSVVACVLAMGASGEPQKEVRTFGTMTADILALAEWLVGWGCTHVAMESTGVYWKPLWNLLESSFTLLLANARHIKAVPGRKTDVRDSEWIADLLQHGLLQPSFVPGRPQRELRELTRYRTSLIRERAAEVNRLQKTLEGANIKLAAVATDIAGKSGRQMVAALVGGTTDPAALADLAKGRMREKLPALERALAGSVGPHQRFLLAEQLAHVEYLDASIDRVSREIQERLRPDEDAIARLVTIPGVARRTAEVLVAEIGTDMRQFPTARHLASWAGLCPGNNESAGKRKSGRTRKGNPWLRTALVEVAQAAGRARQTYLGAHYRRLASRRGKKKACVAVAHTILGIAYHVLDRRTTYEDLGPQYFDRRDRAAVERRLVGRLESLGYKVTIEPITPAA

SEQ ID NO: 121754 - protein, 322 aa, unidentified
MFLGLDVAKRDFHAALLDGKERPRVKAFPNNPKGFEQLFAWLANRSIQNVHACLEATGGWSEALATELYRHGHRVSLVNPQRVRDFGRSEGQRTKTDKADAALIARFCSTHDPAPWSPPRAELLALQAFVRRRESLIDMRTQERNRLSGPITDELVRKSIHDHLAFLDVQIADIEKQIDDLIDNDTDLRNQRDLIKSIPGLGHRSASSITAEFPELAKYRDAKAVAAHAGLCPAIEQSGTSLARSHLSRSGSSKLRRLLYFPAIVAMKHNPAIASFAGRLQSRGKQKMVIVAAAMRKLLVLAYGVVKSGRPFDASLTTQHGI

SEQ ID NO: 121755 - protein, 407 aa, unidentified
MEGLSERVPVDRVIVAIDPGKVLNRVWITTADGLVGRPLSLPTSRSGLERLDELVGVNGPPVFALEATGSLHRAWAAELERRWPGSLRMFAPSQTKAARSQLGTRKFKTDDRDCAALVWLARQGAGEPASDSVVEALRAAVSHRRQLVLALKPLRQRLHDQLNALAPGLSAPKGHGRALALETSTGRAVLACAVAFAGRPPSVRSLKARADGRLSDATAAFWSTRWQDCLPPPPDAELRAERMDRDLARFDALREDIAFVDEQIEQLLADSAGEILTSLPGVSTTRAAAFAAHTLPIERFETPERLYSATGLAPTSYESSTVRRRGGISRTGLPEHRDALIGIAWGLGQFAPAFKQRLAELRARGKSPLEARVALARHACRLCWRMLRTQEPYDDRRYDRARRDRGR

SEQ ID NO: 121756 - protein, 355 aa, unidentified
MIVLGVDPHKDLLVVVAVDSNGRQLDVTSAPARPRGVKSLLRWARQYGERLWAVEDVRHVAGGLMRGLLAAGEPAVWVPTQLTARYRRVGRGQGKSDPIDALAVARAALREDLPPARPEDESRVVKMLLDHREDLVGEMVRMCSRLRWLLHDLDPDFAETIPARKLHKRRWVTHVRDYLAAQAGSVGLSIAAELLDRVEELARRADQLERELHELMKVQAPQLLALPGCGPLSAARIVAETGDVRRFHSSAAFAMHTGTAPIPASSGATHRHRLNRGGNRRLNAAVHRIAITQARVDDRARRYLDNRKAMGNSRTEAIRALKRHLARHVYGLLITAKRLSGEVAVPGQDGLPAVP

SEQ ID NO: 121757 - protein, 431 aa, unidentified
MLKINPLSTLYVGIDVSSKSNYVCALDFYKNKYINSSFANNQPGAEELALKILECLKEHPDITTIVAALESTSVYSIHIANYLSSCEELMRFKPYVFVLNPKCTANYKKSYIGLGKSDPIDAFVIADYARAGNIESEPWRGSQFLALKRLTRHRLHLVECMTREKTYLVSNLYLKFSELQMLEGDDQPFCDIYGATSSSVLMEYFSPEEILDSSEEDLIAFLAKKSRNRIKDISKTVDLLKKAARESYRLDKALYEPLNVSIASSFNCIETFKREIKVIDNAIEKEIKGLNPNAFIILQSIDGIGPVFAGGIIAEIGDITAFHSSDALAKYAGLTWKSNQSGDFDGEDTPMIKAGNRYLRYYLGEAANSMRKHNVEYGTYYRKKYNEVPKHQHKRALALTSRKFVRLVYGLLARNQLYSGVSLDTSIKDSN

SEQ ID NO: 121758 - protein, 395 aa, unidentified
MNKIVHYIGLDVHKETIAVSIASQNSTEVRRYGIIGGTLDAVDKLVKKLAQENVELRFAYEAGPCGFVLCRHLCHKGIHCEVIAPSLIPKKASDRVKTDRRDADQLARLYRAGELTAVHVPDQEDEAIRDLVRARTSAMTDQRQGRNRLKGFLLRLGFRYTGKSSWNDAHKRYLSGLVMPQGPQQIAFQEYIHAVNDATDRLERLAKAVEDASLGWKWEPVVRALMSLRGVQVLTAMTLVAEVGDFSRFEDPRSLMHFFGLTPSEHSSSDKRVQGGITRCGNAHCRRVLTEAAWHYRLQPKVSEAIQKRQEDQSKEVQLIAWKAQERLHKRFKQLAAKKKSVVAATAVARELVGFVWAIACRVKPAEQPAAPEIIRTCRGKVYRLDPEKKFQKKK

SEQ ID NO: 121759 - protein, 363 aa, unidentified
MDTNIQTGPDKLRVSFSGRQIFLGIDVHKKNWNISVFIDDIFFQNFHQEANSLLLLNYLNSHFPEARYLACYEAGFSGFSIQRELESLGIDCIVVNPSDIPQTNQGILSKTDTSDSRRLGMALSRGLLTPIYIPDKLTESDRQLIRYRKKTLTDLQKKRKILKSAFHSMGIIIPKEYDKPYWTKKFIDWIRNLKPKEVSSQILISHVIDDVEFLRKRLLQINKDIRHLSSHERYKEVYSILISAPGIGIITAMTMLTEIGEIKRFNNFAKFNSFIGLCPSEFSSGENIRKGKMTPRANSALRPLLIEAAWIAIRTDPALALKFQELIKSRTKKRAIVVIARKLLSRIYHIWTNTRLYEKGLLR

SEQ ID NO: 121760 - protein, 407 aa, unidentified
MDVIIERACGMDVHKDNITACIITPEGKEIKTFSTKTVFLIQLVDWIKQHNCTHAAMESTSVYWKPIVNLLESEEIEFLVVNAQHIKSVPGRKTDVKDAEWIAKLLRHGLIKASYIPDRNQRELRELVRYRRSIIEERARQHNHIQKVLEGANIKLGSVVSDIMGVSARDMLNAIADGEDNPEILANFARRSMKKKKEELELALKGYIHSHQRLMLKTILKHIDFLTEQIEMLDSEVEERMQSYQEDIERLDSIPGIARRMAEQILSEIGFDVKKQFPSASHMCSWSGVVPGHNESAGKRKSSKTKKGNKYLRSALTEAAHSVSGTKNYLGALYRSTASRKGRKRAGIVFAHAILRISYYLLTRKEMYVDLGEDYFDKKRQQSIVRHSLRRLESLGYTVTIQEPQAS

SEQ ID NO: 121761 - protein, 383 aa, unidentified
MLYSGIDLHKRDLVIATVDAAGHSVTAKRIKPTSQAVRAYFEQFPPETEHRAVVEATRSWYWLCDVLRTMPQTAPVTLTLANHGRLRAISAAKVKTLKTLKTLKTLKTLKTLKTDAVDADTLAQLLRADLIPEAHMVSAELREIRDLLRTRLEFVRRHARCRNAVGSLMAQYNVSAVSLLPPLARASALLQLEQDAMLQDHAQRIERALRPALVRTDPVRRLLTIPGIGLITAYTIYLEVDGIERFSDFRHFASYARLVGGSDNFGGKVRNTRSRSGNAHLKLVFAHAAVRAAQHYPEIRAWYERMARRKGKPLAHSLVAKELGRIAFAILSKGESFNGQFKGRQVIRPKVATGRLPAAGSRFRTPEQILTKLSARAPMRNSE

SEQ ID NO: 121762 - protein, 369 aa, unidentified
MKDNITYVGLDVHKNSIDVALADSEKTGEVRHYGTIDGDLGSLEKLIRKLVSQGRELRFVYEAGPCGYEIYRHLSHQGLDCIVVAPSLIPKKTGSRIKNDRRDSEMLARLHRAGELTAVYVPHLEDEAMRDLCRAREDAKSAERKAKQQLGAFLLRSGFRYSGKTNWSLAHWRWLSDIKMPHPVQQIVLQEYINAVRACTERMDRLAEQIRVLVPEWRLASVVEAIQALRGVSLIVATTVVAEIGDIGRFDNPRQLMAYLGLVPSEHSSGETIKRGSITKTGNGHARRVLVEAAWAYRLPARVSRRLLERHQNLPEVIRSIAWKAQLRLCGRYRRLVAKGKQAQIVIIAIARELAAFIWAIARNVPATT

SEQ ID NO: 121763 - protein, 460 aa, unidentified
MRTIGIDLAVKAVHKAVVVNANGKFVTPVLSFHTRWEEIAQVVARAREGVASDYPLRAVMEPTGMAWLSVAIALRRLNVIPYLVNGQRSHDLRRFYKRHSSSDRIAARVLAKMPIVDEESLYPLEIPSAMQFACHRGCKELNRLRDQSTAIKNRMRDSDRFAWPGLENVFTDIFSPAARLFRQTWYDPARVVNAGVDELRRTFRPLADQEEDLAWVEHLVRLSTEVLMLYGTDALDYDLLQREVYRDQRLLVSLEEEANLVWRETIRPLYRKLHPSRNLETLYGVGEQSAAVYACFIGRAARFPTNRKFRGWHGLVPDSRQSGDAESKGLRVSQAGPDLVKKYAFLGGGVARRFDPQIAVIYHSQMTRKGQHHNQAVCACATHLLDRVRVILLEDRPYELRDVDGTPVSPEQAKAIVAERYTVPEEVRIRNNRRARRERAERRAERKHQRRQQRRSRSRM

SEQ ID NO: 121764 - protein, 368 aa, unidentified
MEKHSEIFVGLDVAKVRHAVAVAEDGRAGEVRYIGEIGSDAESVRRLVGKLEKRHGRLHFCYEAGPTGYGLYRQLTTLGHHCTVVAPSLIPRKPGDRVKTNRRDALQLARLLRAGELTAVWVPDEAHEAMRDLVRARQVAVDDIRRKRQAISSMMLRQGRTYPGKKTWGARHVQWLQAQRFDQLAQHLVLQELLLAVSHADERRERIEAAIAELLPQWSLAAVVEALQALRGVNVITAVTVMAEVGDLRRFESPRQLMGYLGLVPGERSTGDTVHRLGITKAGNGRVRQALVESAWCYRHLPRTSRTKYYAYERVPPAVRDIAAKAQTRLCGRYRTLSQRGKKLTVAVTAIARELAGFIWAIGREVQA

SEQ ID NO: 121765 - protein, 412 aa, unidentified
MEQVIIGVDPHKLSATIEVVNNQEHLLGSGRFTTDQRGYTAMRSYVKAWPNRVWAVEGANGAGRPLAQRLVEDGEQVVDVPAKLAARVRLFDTGHNRKTDALDAHSIAIVAVRTKGLRVLAADGELEALRMLTDRRDELGHLRVQTVNRLQRLLSELFPGQRKKDLSALQAKAMLTTVRPRDIAGKTRRRMAAEELADLVAVDAKLKKIKAELKAMVIARGSTLLQINGIGPAGAARTLADVGDITRFADRNRFASWTGTAPLDASSGEQIRHRLSRAGNRRMNHVLHIAAIVQLRNDTEGRAYFQRKVAAGKTRMEALRALKRRLSDVLYRRLTADARTRDLDAKSRGLIDDGTGPGGHCGATQESSAADLPPHVDTSDQPLPGPARPTLPRPNRTRKTATSPSSLNRLLT

SEQ ID NO: 121766 - protein, 345 aa, unidentified
MQAEYDGRQIVGIDLHRRWSVIVRMSEAGEKLETVRIDNDPVALGLEIAKAGPDPEVVLEATYGWYWSVDVLAAAGARVHLAHPLGVKGFAYRRVKNDARDAADLADLLRMGRLPEAYVAPPAVRELRELVRYRAKLVAWRSGLKASVHAVLAKQGVHIAVSDLFGVGGRELLARAPLDGAYRGRVSSLCRLIDAVDFEIDAVAGPIRARLCGHRGYTAVQAIPGVGPVLAAVFVAEIGEVDRFPGPAQLASWAGLTPRHRESDLVVHRGRITKQGSTLVRWAAVEAAHGVPHSAGWLTGTRARIAERRGRNIATVAVARKLLTLVYYGLRDGHIRALSQARAAA

SEQ ID NO: 121767 - protein, 348 aa, unidentified
MGKHTTIAVDIAKSVFELAVSEEPGKIVQRRRLSRGQMLGEFTKREPATVVMEACGTAHHWGRELQALGHQVVLLPARHVGAYRLGNKTDRTDVDALLEAHRNEKILPVPVKTVSQQALGFLHGARSGWMLTRTARLNALRGILRELGVCIPMGASRVLPGLAEAIGDGHVPEGLEPVVLAIAEEIRGLEKRIAECEKRLEIVGRQTVGVERVRSVPGIGLLCSTALASTIVDPRRFRSGRRMAAFVGLVPRENSSGNRRRLGSITKTGDPYLRTLLIHGARSVLLAAKRSKSNDRLRMWALEIQKRHGHNKAAVALANKMVRIAWAVWTKDTSYLSIRTTAGAPGVA

SEQ ID NO: 121768 - protein, 319 aa, unidentified
MNLIIAQNAGVDISKDFLDVAIHPAGQTTRFTNDATGLRALIKYLAPHQVARVVFEATGAYHRLFERTLAEAGLPMVKVNPRQARRFAEASGKLAKTDRCDAAMLARMGPALELQPRPVAGKTLDEMKELLNARDALIADRVAALTRQKTALSALIKRQIAARLRQIEAQIEAIDKKQKELRTADAGIQRQFEILDSIPGVGEVTANVLIVEMPELGDLDQGQAASLAGLAPIANDSGKSQGKRSIRGGRARVRNALYMAALSAVRFYPACKAKYDAMIKAGKLAKVALVAIMRKLLIVANALLRDKRLWTPGPVLKNA

SEQ ID NO: 121769 - protein, 386 aa, unidentified
MERNDLSRSLVAFDQNSTLVAVVELSLKSWLVAGLVPGLTRQPLKKQGADAAVLFGLLYRWRDEAAKAGRVIKRIVVAFEAGRDGFWLARWLRARGIEAYVIHPSSIPVSREHRRAKTDRLDTGLLLRAVLGWLRGEPKHCSMVAIPTLEEEDAKRPSREHESLVGERTRLVNRMKATLMRLGICGFNVKRRKAADGLAELRTPEGVALPPNTLAELRHDMARLRVIGEQLKEIERTRLERLRKAPREGTHPMMLMLAKVKSIGIETADMLVHEVLSRGLRDQRAVARYGGITGAPDESGSKRREKGLAKAGNARVRRGMLQLAWRWVMFQKQSVLAQWFRERTENAGGRHIRKTMIVALARKLLIALWRYVTTGEVPAGAILRAA

SEQ ID NO: 121770 - protein, 402 aa, unidentified
MKKVCGLDVHKDSIFCAIYNGENHSGVKEFSTMTPDIYSMGEYLQSEEVEEVALESTGIYWIAVWDLLYEMGFKLTLVNPYLIKQMPGRKSDIKDAQWIATLLHKGMLRGSFVPPPVIQELRVYSRKQGKLKQQVTRVLTVMDSILVKSGIRASSCLSSISSKSFLCIVEALIAGWTDPGYLVSLVYGNRKNKQSGKLKEALTGNLKAHHRQELSWAKQEYEMYQVQISECLSEMRRICDEHFSVMVKLLQTIPGISQIAAMTIIAETGGDMSAFESSDKLVGWAGLRPRNDESAGKYKSTATTKGNKYLRSILVQVSWAASRMKGSFFKEKFQRLAMRKPRKKALIAIARKLLVVIWNVLKYAKEYNPKLVTVQDPVKMKARLAYHKREYEKTANLLNITI

SEQ ID NO: 121771 - protein, 437 aa, unidentified
METMNTPATVAPAAAIVPFDQLNHFVGFDWASEKHDVCAVDHDGKVVFELEFPDTADGWAKLREAFKPLANVGVAIETSRGPAVERLLEMGVTVSPMNPKAAERFRDRKAPCGVKSDTLDAYSFADALRTDGHGWRPLRPDDPQTQFLRMLCRDEMGLIEQRTVFVLQLRQALREYYPAALEAFDDWTMPSAWEFIVQFPTPAVLVTAGKRRQQNFMHAHKLYRPEMAQKRLEIFARADKFASPSAPVTTAKSLLAVTLAKQLRILEAQIKEYRARIEQAFSEHPDGGIFGSLPGGGKKLAPRLLGEMGSNREVFDSAEALQCYAGTAPVTKKSGKSRFVNIRRACNKILRTTIHLWADESRHQCAWAQAYYQQKKSQGKSHAQALRCLGQRWLKILWKMWQNRTPYDEALHMKSLAKSNSWVIGLVPRVPVTPPPS

SEQ ID NO: 121772 - protein, 423 aa, unidentified
MPLALPEALFFTGIDWAAVTHAVCVMDSAGEIAAEFTIEHSADGIAALIRRLAGYGDPADMPVGIERPNGQLVDLLLEAGHPVVPVSPNAIKTWREGEVLSGAKSDAGDAAVIAEYLRLRQHRLRVATPYSGETKALRTVVRTRDDLVDMRVAATSQLSALLEAHWPGAKAIFADVESAISLAFLTRYPTPAAARHLGEKRIAAFCASQGYSGKRPAAVLLARLRAAPAGTTGEALTVALRDAVLALVAVLTALNAAIKGLGRSVAARLGEHPDGAVFTSLPRSGQTNAAQMLAEWGDCRQAYESPDSVAALAGCTPVTKESGKHRAVHFRWACNKRFRTAMTTFAGNSRHASPWAAKIYNDARASGKDHPHATRILARAWILVIWRCWQEGTAYDPAKHTALQRILDQQAAQAAAAGPRDTP

SEQ ID NO: 121773 - protein, 364 aa, unidentified
MYDSTTTVTVGLDVHARSVRLAAVCADELLEERTLPYDEQAVERALRRWPVVRCCYEAGPTGFGLQRHLVERGIDCQVVAPGLVPQRPGDRVKNDSRDARKLARLLAGGLLQAIHVPSRELEAARDLVRAREDARLDRMRDRQRLSKFCLRHGRRMPTSSWTVVRRKWLGEQRFELAPQQQTFDAYVHAVDLVDARVEQLGRAIRETADQQPWRGLVGKLRCLRGINTLTALALVAEIGDFDRFKTAEEFMAFVGLVPSEHSSGEQRRQGSITKVGNSHVRRLLVESAWHARRRPKVGYELARRQRGQDAVVVERTWRCQQRLYSRWLRMAGRGKPQQKIVVACARELAGFVWAIATEQPLRTS

SEQ ID NO: 121774 - protein, 410 aa, unidentified
MEVVHAHCAGLDVHKDTVVACVRHMTDGKVTTTIKTFNTATQELLALSDWLSAEDATHIAMEATGVYWKPVWNILSDGEFELVLGNAAHIKNVPGRKTDVKDAAWLADLMAHGLVSGSFVPDQTTQEMRDLLRTRKQLVRERTSHTQRIQKTLECANIKLDSVVSNVVGVSGRRMLEALIAGQTDPKELAAMAHGRLQATPAELEAALRGRVTAHHRFMLRLHLDQIDSFDEAIARIDKEVKDNDKNFRAAVELLKSVPGVGSLAAEVIVSEIGIEMNRFATAGNLVSWAGLCPKNDESAGKRRSNRLKAGAPWLKTTLVQCAWAAARSKGTYLHAQYVRIRARRGNQKAICAVAASILTTVYHMLKDGTFYEDPGPDYFDKRNKDQQANKLVNRLQNLGFNVTIQPAAA

SEQ ID NO: 121775 - protein, 339 aa, unidentified
MSEFTKKKHFIGIDISKDKLDLALVNEKSPGLFKDKIVDNSFKGFDDIQNWLSKQKIKLDDCLFCMEHTGIYGLLLFAWLGQMGIDYCVEPGLQIKKSLGMTRGKNDKVDARRIADYAITNRAKLAPFSFPSNLLIQIKQLLTYRDQLTRIKVSLKNSLKSHDQYQRVSGLQSISDGIKDQIDEGECRIEGIEEQIKDLIKSDETMKKNFDLATSVKGIGLVIAAFMLVTTNNFTGFENGRKYACYSGIAPFDNTSGKYKGKTKVSHLANKRMKTLLSNGANSARQWDPELRVYYDRKIQEGKEHNLVINSIKCKLVNRVFAVVKRQTPYVSIYQQNFA

SEQ ID NO: 121776 - protein, 338 aa, unidentified
MKFKRIAIDISKHVFTLHGVDEQERPVLRRDLKRTEVDFFFGKLEGTEVVIEACGGAHYWGRVLTRLGHKVRLIPAQYVRPFVRRAKNDRTDAEAINDAASRPGMPCVPLKTAQHQAELIILKHREMLKGQRTQAINALRGHAAEFGLVAAKGTAQVQPLLDKLAADPAIPAVARAMFMRIGEHIAGLDRQIAAVDADLLAQHKANPVSQLLAEVPGIGPITAITLARGVEPAAFASGRHFAAWLGLTPKEHSTGGKQRLGRISKAGNERLRSLLVVGAMAVIRHAKPGKPSTSAWLLALLARKPRKLAAVALANKTARIVWAMMARGEAYRRRPVAA

SEQ ID NO: 121777 - protein, 339 aa, unidentified
MELYAGIDLHSNNNYLAVIDDQDKRLYQKRLPNKPDVILAELDPFHERISGIVVESTFNWYWLVDTLMDNGYKTHLANPAAIQKYKGLKYSNDSHDAFWLAHLLRLGILPEGYIYPKEDRPIRDLLRKRGHLVQLRTSVINSLQGIISRNCGCSLSGNKIKQVKENHIAPLLAGQEDLELSGEVSKDVIDYLSRQIRKIENVVLEKVTLRKSFLGLQTIPGLGKILSMTIMLETGNIERFEKVGDFASYCRKVPTEWKSNNTKKGKGNSKNGNRYLAWAFSEAAEFSRRYDQAARTFYTRKAGKTNKMIAHSSLAHKLARAAYYIMRDGVEFDHKKLFA

SEQ ID NO: 121778 - protein, 343 aa, unidentified
MKITRVGVDLAKKVFQVHGVDAAGRRVWQRQLKRSSWLSVLTETVEPGCEIGMEACGGAHHWARELKSRGFKVKLISPQFVKPYLKSLKNDVNDAEAICEAMARHHMRFVAVKTVEQQDIQAMHRVREGLMNHRKAKANQIRGLVAEYGLVAPRQMGPLRKAIPCWLEDAENGLRSAFRALLHGLWEDLQNLDIRLKVLDKEILMLSENHADAKRLKQLRGIGPLTATAMVAQFGDGRHFKRGRQASASVGITPRHAGTGGKNYLFGITKKGNPYLRSILIHGARSVVSKAKHKDDRLSRWVTELAERKHPNVAAVALANKTVRIAWAMLRNGTDYDPELAMA

SEQ ID NO: 121779 - protein, 408 aa, unidentified
MDLTPMHRRVIALDVHQAKITACAVIEHDDGRLEITQRDFGAFKRDRRALAQWSLEIAPEVVVMESTGVYWKSPFAALEAVGITAWVVNARHVKAVPGRKTDMADAQWLATLARAGLLRASFIPPLLMRQLRLVARQRQKLVGMCSAEKNRLHKVLVDAGVRINVVVADIHGASARAMVKALIADKPMHEVLDRKGRLRASRDELFESLSTEQLSPVHRFVAEEILQHIEQIEQRIARLDEYLLQGLKAYEPQLRLLQTIPGIDLQGAAMLLVEIGSDMASFGSAERLASWVGICPGNNESAGKRKSGRIRRGNAWVRRLLCEFAQAAARTRCALKAKFESLAIRKGHKKSIVALAHKMLRTIYAMLSTGDHYKDKTVDYEALSVARNAPRWMKMLRKHGFIATPAAA

SEQ ID NO: 121780 - protein, 367 aa, unidentified
MRSVKKRGPGPSSSLMTPDHAGNVVGIDPHKRTLSATVADARGGILGSAHFRVSGEGHRELEAWARQFGQIARWGVEGAASWGRHTAMFLAGRGHDVRDVCANRTPRSDRARQRGKSDTLDSERIARETLAHPLLPKAFKRAGQEQGPDEQHQLLSLWNNRRRSILTGRQHLVGEAEYLLCELPLELRERLPDTKAVRPRLAALAQRNRRRRYDAPTRLRLQLLDDYRAQIKSLDRQERQVTAQLEALVDQSGSTLGELCGLSTRSVAELLVEVGDPRRFTEGGFARFNGTAPLPASTAEGPGEPIRHRYNPGGNRRVNAILHRMAVTQLRREPRAQRIYANARAGTPRKRPAACSSATSPTSSTGA

SEQ ID NO: 121781 - protein, 415 aa, unidentified
MALKIVYKICCGIDVHKTFVVACIASTNDKGITSYESHRFSTYTSGLKTLLQWLLDRDCKDVCMESTGKYWIPVYNILESDCSIILAHPKYVKAIRGKKTDKKDAKWIADLFKHDLVAGSFMPPADIRQLRDLMRYRFKLTCFKSSEKNRLQNCLTVSNIQLGNVVSDTFGKSAQAILDKILENPADTSFDLEPLVFKSLKKKLPELRDAIDGYITTEQAGKLKVIKAHYENLESRKAELEELILALAAPYQQELTILQTAPGISSPFTAIGIISEIGTNMEAFPSAKHLCSWAGLTPTNNESAGKKKSVRVSKAGCYIKPLLVQCANAVVASKKHPEIRNRYLRLKKRRGHKKAIIAIARMLLTALYHMLKNGENYNAELYQKSDLLPVDREITVEQALMIARNQGYKIKSATA

SEQ ID NO: 121782 - protein, 342 aa, unidentified
MDEYDGRQFVGIDLHRQRSVVVRQSESGEQLSAVRIVNDPVAWQLQLELAGSDPEVVPEATYGWYWAVDVLDACGARVHLAHPLGVKGFRYRRVKNDVRDAADLADLLRMGRLPEAWIAPPQTRELRELVRYRAKLVAIRSGLKAQIHAVLAKAGVLIAVSDLFGVTGRQRLSEVPPGPAYAQRIRSLLELIDILDSHEARFAAMIAERLSTHHGYQAIQQVPGIGPTLAAVFVAEIGDAHRFTDPAHLCSWAGLTPRHRESDTVVHRGHITKQGSKAVRWAAIEAVQRHPTTAKISADKQRIEARRGRNIAKVAAARKLLTLVYYGLRDGHIRALDRAKTA

SEQ ID NO: 121783 - protein, 351 aa, unidentified
MVIIGIDPHSTTHVAAAVDEHGQLLGSIQVGASPQQLQGLAGWVGGFQGPRLVAVEGARGYGLALTRVLLAAGERVVDVAPALTAAGRRRGRARGKDDRIDAIAVARLARQEPGLPALSLVGLNADLKLLVDARDQLVVEAGRVRNRLHALLLVLAPGYRTSTGALAKLPALRRARRLIERAAPGEAVRARLALAAVARLEALEDECAQLEHEVKAALTPLRPTRLLAICGVGALTAAKLLGETHSVDRFASAAAFAAHTGTAPIPVSSGNTQRHRLSRSGNRQLNRALFTIAMCQARWDPNARAYLARKPSEAKSPAEARRCLKRHLANVVYRAMVADAQALQATPTPTA

SEQ ID NO: 121784 - protein, 341 aa, unidentified
MNSVAIVAIDLGKHTFHLHAQDDRGHELYHKKFNRAGLAMHLASLEPCTVAMEACGGAHYMAREAAKWGHVPKLIAPHLVRPYVKSNKNDFADAMAICEAASRPTMRFVSPKTEAQQALAMLNSQRDAYIKERTASVNRIHAGLLEVGISLSPGFYAIKELPALLEECSFSAQIKQLLLGLRDHFNYLDGQVKALDKQVERQAAEDDLASRLMTIPCVGPITSSVLAAELGNGQQFKCGRDYSASIGLVPKQHSTGDKTVLLGISKRGDRNQRRLLIQCARVYLMGLERQTGALADWVRQLLARHHCNRVVCALANKLARIAWSIAAHHDEFKARPSAMNA

SEQ ID NO: 121785 - protein, 349 aa, unidentified
MIVIGIDPHKQTHTAVAIDRATGEVLEELTVRARRPGFERLVAWARNLDDERLFAVEDGRHVSGHLERYLIGRGERSVRVPPRLMGEARRADRVRGKSDAIDATAVARSALAHPDLPEATLAGPEREIGLLGAHREQMVNERTAIQSKLRWLLHDIDPDLAPGARTLDRFATLDRLETRLRELAPTADVRICLDLVARCRQITVRANELEREIASLVEAAAPSLLQIPGCAALTAAKIMAETARVQRFPTEGHFARYAGTAPVPASSGATHRHRFNRRGNRQLNAALHRIAVTQLRVHQPAKDYVAKKRSEGMSKTEAIRALKRRLSRVVFKTMTSMTPPTDDLISVAA

SEQ ID NO: 121786 - protein, 347 aa, unidentified
MRFYTPQHKAYCGIDLHARTMYICILSHAGEFLINQNYTANPETFLKVVAPYRDDLVVAVEWIFTWYWLADLCAREGIAFVLGHTLSMKAIHGGKAKNDCIDAQKVAVLLRGGMLPQAYVSPAEMRATRDLLRRRIHLTRQRAELLTHGQNINSQYNLPAIGKEIAYKANRAEIAQHFPDPAVQKSVEVDLALIDHYDHVLNGVELSILNTVTQHDAPTLYLLRTVPGIGKILSLVLLYEIHDIARFPRVQDFVSYCRLVKCAKESAGKRYGTSGTKIGNAYLKWAFSEAAVLFLRANPTGQQYLARLEQKHGKGKALTVLAHKLARAVYYMLKRNTGFDMPTFLHG

SEQ ID NO: 121787 - protein, 344 aa, unidentified
MITIGIDPHKASHTAVALDGGGRVQGELRCLANQATLERLLRWAERWPERIWAVEGAAGLGHLLAQQLVAREETVLDVPATLVARARLLAPGHGRKTDGIDAASVATVAQNQPDLRRVGPEDHSAVLRLLSDRRDELSGERRRAVNRLHRLLRDLRPGGAPTELSAARASELLGHIRPGAVVDLERKAMARALVADLRRIDRALVENRARCAVAVAASDTTLTDIVGISDVLAAKILGHVRDITRFGSADRFASYSGTAPIEVSSGEVTRHRLSRSGNRSLNNALHLAARVQTMHPGPGRDHYGRKLAEHKSSREALRSLKRQLAKVVYRHLVADQVRRLDLAS

SEQ ID NO: 121788 - protein, 346 aa, unidentified
MQSTTIAVDTAKLVFEVVVSDGHRVIENHRLNRAEFQAFIVHQPPSRFVMEACGGSHHWARLMLAHGHSVRLLPVPYVRAYRRRNKTDRADCMAMLEADRNPEILSVPVKGVDAQAIQGLHRARSAWMGCRTARINTLRGLLREFGVILPLGAQAALKQMAAAIDDPAVPELLKITLLELLAEVHDLDDKIARVERQLATIARQTPAVRLLQDIPGIGLLTSTALYASAGDAKHFRSGRHLASWLGLTPKEHSSGSRRHLGGISKRGDKYVRTLLIHGARTVLLGARRNENAGRPLSPLQQWALGVQARSNHNKAACAVANKLARIAWASWANGTCFDANYQAIAA

SEQ ID NO: 121789 - protein, 392 aa, unidentified
MEIYVGIDVAKETHWVCALDHAARVLLDRAVENDQAAIDRLVADLRGLGGDVLIGLDITGSLARFLEAILLAQGLRLVHVPGIAVNRAGHGFAGGERKSDPRDAHTIADLVRTRPLRPILPDDDTVIALRLKVMRRRELTDDQTRRVSRLRQFLGAIHPGLERQLDLTCKGPLVLVSRYVTAAEIRQAGLKRLVAHLKKTPHLHAAETLAQRALEAAHGQSIAVPGEAVFADMIRELAAEALQAREALARIDRDLEALLGRHPDGALIRTLPGMGAVLSAEFIACVGDIRRFASADALASAAGLAPVIRQSGKSTGWRRALGGDKALKRVFFQSAFCAVSTKHPLSKAFYDRKRSEGKHHTQAIIALARRRVTVLWTMLRTRQTFDPMKKAA

SEQ ID NO: 121790 - protein, 427 aa, unidentified
MKVIYPKACGVDVHKSFIVAVICDSTGQTTKYSKKRFSTFNNSLTEFRNWLIENDCQNVCMESTGKYYIPVYNALEGHISNVVVANPKWVAVIKGEKDDNKDAKWIADLFKLGIVRSSFIPSKDFRILREFTRYLYKLTCNKTSEKNRYTNALTVGNCKLDMVFTDIFGKSSQSIIDIIMNNDNFSDEDIISCLRKNCKSSHEDILSSVNGIQFTNEQKLRINIIKEHIDYLTNQINYLRDIVDTLVSPYEDYITLLMTIPGIDRYSAITILSEISNDMSQFSNHYRLSAWAGLAPGCNESAGKKKSVKISRAGVYLKPCLVEVAHCAVKDKTNPYYANKFNKISKRRGKKRAYIAIARKILVAIYHILSTGEVWNPKDLASNETSDKDRIKYTKNNFNQSLKQLLSLGLTSDELINIINQNANLDS

SEQ ID NO: 121791 - protein, 464 aa, unidentified
MSNPLIVAGDVSKGYGDFISIDSDKNVLLELFQLDDNSAGHAALTDQLKSLQKQHGAKRVLFVLESTGGLEDNWLRLVSSAPLCKFVEGYRINPKKTHHEYRIQGRNSVSDGVSSITLAHHVAKNLDNFIPSDIAENPEYAAARSLIRHLVGLAEQATEHKNSLQQLLYQYLPSLVQFVPQAWSAYFLNILVVYGSKRSIQSAASQGFKQLSRVPKGRASEIHQALRDGIDLKETPSLVVATIKSKARKILELQQEIKELESILCKEAPVDAGQVELLCSMKGMGRVAATILLCFIEDVDRFDNASSMAAFFGVPPRIKTSGDGKVTIGMSKQGSGIVRRELYLLAFRSLQHLPYLRSIYAKFRKKGMVHDAALGVLMHKLLRMIYGMLFSGTTFNPGIDQLNQVDPRDGKTDTGGVGKTAKEGPKRRWQDHSEAAPLSSRERRKRKKDQESQAATEAEIAGSS

SEQ ID NO: 121792 - protein, 343 aa, unidentified
MQITVIGIDLGKNSCSLVALDGSGAVIKRRRLRPENIAAFTQGLPACTIAMEACCGAHHLGRRLAAQGHQVRLMSPEYVRPYVKAQKNDDRDAEAIAEAATRPTMRFVELKSEAQLDLQTLHRARERLVGQRTALINQLRAILLERGIIIPQGRHRLAKELAERLGGGSDLALSPRMRALIEDMRAEWEALDRRIAAFEEEFAARARSDEAARRLATIPGIGVLNATALVAAIGQGEAFARARDLAAWLGLVPRQVTTGGRPRLVGITKRGNVYLRKLLIHGARSALASLSNSATPLGSWLRGLAARAHKNTVVVALANKLARIAWAVLRRGGGFDAAVGVKA

SEQ ID NO: 121793 - protein, 344 aa, unidentified
MDNHTQYSGVAGVDLAKKVMQIHFVTGDGEITDKQVKRAEFLDFFRNRTKCLIGMEACGASQDWARKLEAMGHEVHLMSPKAVKPFVSGQKNDYNDAIGIYKAMFNGVRRVPVKSTEIRDLQTLRRIRSQVTKDKVKEINHVRGLLAEYGIVMGKSITAFNKGISSALESLKERGDVSPLVAEELQTTVESIKTKTERQKRLDREIEQLARGCKNYENFLKTPGVGPFTAAMLCVLLCDPAIFANGRQFAAYIGLAPRSRGSGGKNFIIGIPSKFNCDSESRAVFVECAQALARYKNKSPWVDGILRRKPKKVAVIAIANKLARQVWAMANKGESFKQMTILTA

SEQ ID NO: 121794 - protein, 368 aa, unidentified
MHKRTYVGLDVHARSVKGCAIDRETGEILRQSLAANDAGIAEWVSGLPGPVLVVYEAGPTGFGLARCLNAAGIECVVAAPSKLQRPSGDRVKTDARAAEHLARLALLGQITPVRVPGPSQEAARDLVRAREDVRSDLMRARHRVSKLLLRHGLVYSGGHAWTETHHTWLHRQHFDDAALQAAYEAGLETAELTLDRRNRLDAKITAMAATEPYAPVVRALMCLRGISVLTAFGLAVEIGDWNRFTGSTIGAYLGLVPSEHSSGASRAQGPITKTGNTPARRLLVEAAWHHRRPYTHPRREVRARWDAADEASRVRGHQGNHRLHHKWEQFEARHKRRVIADVAVARELAGWCWSLAAPVQQEHPWTDD

SEQ ID NO: 121795 - protein, 362 aa, unidentified
MEYFTGLDVSVDETAICVVGDDGKVAFETAVETDPAAIAAALRPYADRMRRVGHEAGSLSPWLHTELLAEGVPAVCLETRHVRAALSAQRNKTDANDALGIAHIMRTGWFRQAHIKTDGCYRIRLLLVQRRNLKRKFLDLENAIRHSLKVFGIRLGKVGRGAMEKAVREAVADDAMTAGLMDCMLRARAALWAEYLTLHKLVVQLAMRDELCRRFMAIPGVGPVTALSFSSAIDDPQRFRRSRNVAAYFGLTAKRWQSGTSIDVHGRISKAGDPDVRRALYEAASAMLTRFKGSDMIKTWGLKLAKTKCHAKARVAVARKLAVVMHAMWRDGTFYVGDPNASADDIDTMNAAKRQRLSRANS

SEQ ID NO: 121796 - protein, 370 aa, unidentified
MQTVRSFVGMDVHKETISISVAEDGRNGPVRFIGVIPNQPDDIAKMAKRLAKHGELDFCYEAGGCGYNIYRQLTALGHSCTVAATSLIPRKPGERIKTDRRDSQKLAILHRSGDLTRVWVPDATHEALRDLVRARVDASMHLMRARQQLLAFLLRHGRSYPTGKHWTQRHRSWLAGQTFQQEVHRIVFQDYVETVWTAQERRDALIERISAMTASWSLGPLVEALRGLRGIDLLSAATFICTTGDLSRFESPRMLMGYLGLVPSEHSSGGSIRRGGITKTGNREARRMLIEAAWSYRYPARVAKEKAEILVRLPKNIRDIAWKAQTRLCARYRTMIARGKKPTVVVTALARELAGFIWAIGQEMRTPMTT

SEQ ID NO: 121797 - protein, 360 aa, unidentified
MTTSIPSKTTVSYDSVKLGIDAHAKYYWVSRQLDGATPQPVQKMTYDELLLFVVKQQKLTPNLVTCYEAGAFGFHLHRKFEQLGIKNYVVQPQDWDERGKGVKNDRLDAAALCQRLDRYQRGNTKAFSTVRVPSEDQERERAISRQRQQLMRERQRISAMGRSLLATHNIHVTGKWWKGKTWTVVQKLAPAWVVERLEVFIIILKPLEEQELKLMHQLQEAAQEQKIPRGVGPLTFEILRREVGDWGRFNNRRQVSSYTGLCPREHSSGGKRRSGSVSKSGNPRVRAMLVEMVWRMMRWQPEYKPLRKWAHVLYSPTPNAAAKKKAVVAIARQLAVDLWRIFTGQCKAETYGLIYLPEAV

SEQ ID NO: 121798 - protein, 344 aa, unidentified
MSNLDTCGIEVSAKELVVRVRRQEDLEPLRNFTNTPEGHLMILRYLRRAGRGVRVCMESTGLYGLDLALALSGQQGIEVMVANPRAVRPFAHALMQRSKNDRIDTGVLEQFAVHMPFKPWQRPSVAMLGLHAIARRLRELVQIQTAEKNRQHAAGLSAAIPAVVRRDLARSLRAQERAIQRLTQQARKLIAQDSQLTERFELLDSVPGIGETSAVQLLGELGALAPDLDARQWVAYAGLDPREYSSGSSVHKKPRISKAGNKYLRHALYMPALVAVRHDPHLRAFYQHLLAKGKVKMQALVAVMRKLLHALHAMFKAHQPYDGSKLFPLAPTPPQEVAHAPLAP

SEQ ID NO: 121799 - protein, 355 aa, unidentified
MKVKKKVSTNKKVRTNKLNTFTELEGYDHYLGLDYSQEGYSLGRVSSKMKNPKIVNGSKRVEDIQLQLKELRGKKILTIEETTSTHWLYVELKEYVDKIVVCDPYRNSLLSEGAKDDDIDSGKLSLLLRGGFLKEVYHSMEEDYVIRKLISAYEDLIKSGVRVKNQQSSLYRSLGLSYKARESLGTNTIVKFIETQQNISIGLYEETKEKYIKEFEQLRTKVSVIEYMCKVAGINTISSVKIYGTVIEAKRFLTKNKYWGYCGLVYHQKISGNRNYGKRKTRYSRVLKGVYKTAALAAIRGNNDIREYYKHLLSNGLSEDKARNQIARYIATVTYAIMKYETEYIPYMWKKPMVA

SEQ ID NO: 121800 - protein, 357 aa, unidentified
MTSITPHSAPITEVAAGVDTHQDTHTAAVIDPVGRVLGTEQFPATPTGYTALLTWMRTFGHLTRVGVEGTGAYGAGLTRLLQAEHIDVIEIDRPDRKTRRFQGKSDPIDAIAAAKTALAGDRTGTPKQRDGRIEALRNLRVARRSAIDQRADVQRQIKTLVVTAPESLRERLRGLPAMKLIAACAALRPDPHDAATPTTAVQIALRSLARRHQQLTAEITDLDELLQPLVAAINPRLVAVHGVGTDVAGQLLVTAGENHDRLRSEAAFAMLCGVAPIPASSGKNRRHRLNRGGDRQANAALYRVVLCRLRWDPRTRAYMERRTQDGLSKKEIIRCLKRYVARELYQIITTNDLQLAA

SEQ ID NO: 121801 - protein, 444 aa, unidentified
MLRFVGCDIHKRTAVFTMLLEDGTLFASYTVPVTREALTVFAERQRKKEDRLAMEATTNTWAVAGVLRPFVAEVVIGNALRVRAIAEAKIKTDKVDSRVLAELLRCEYLPVVWQPDADTQRLRRLTHRRAALVSDRTRLKNRLHSILHHTLVPLPGFDLFSKRGIVWLRELPLAEEEAQARDSDLCLLEQTELEIAELEKRLVREAWQDEKVRLVMSIPGIDYTVAQTCLAAIGDIARFPNAKKLAAYLGLNPSTRQPGAHCYHGPITKQGNAHARWLLVQAAQHLGQYRGPLGQTMRRIIQRKNRSVAVVACARKLAVLLWHVLSSGEPFRYALPQSLEAKYSRLRVRATGRRRRGGVAKGTPRSPRYGRGRTRALPSLPQVLAQNDLPQIAPLARGEKIMLERKKLDGFYHELQTPSRIQANTPKPQQQETEEDLKSELTQS

SEQ ID NO: 121802 - protein, 430 aa, unidentified
MKSNTQNAKIEAITEKTLVLGIDVGSETHYARAFDYRGIEYSKKPFKFSNTEVGFATFKEWILELKERHEKDKVVPGMEPTGHYWFNLGKFLQDNEMKPVLVNPHHVKKSKELDDNHPTKNDRKDPKVIAGLVREGRYMIPYLPDGVYADLRTASNIRFQLQAELTRIQNRISRWFNIYFPEYKTVYGKPDAKSGMLILKAAPLPEDILTLGIDGVNQIWRDAKLRAVGKARAKTLIEAAEHSIGSKEGTMSARMEIRMLLEDYESRNTRLQEVMVLIEELVKEIPMAEKLLEIKGVGIRTVSGFLAEVGDISRFNNPKELQKLAGLALVENSSGKHKGETTISRRGRKRLRYLLFEVATSLVAKNPEFRELHTYYTTRRLNPLKKMQSLMAIAAKLIRVFYAMLTKGVDYDPKKMISDIKRPAVYLQAA

SEQ ID NO: 121803 - protein, 344 aa, unidentified
MQIVVLGIDLGKNSCSVVGLDDGGHVVVRRRMHRMNVIKFAGGLAPCVVAMEACCGAHHLGRLLRAQGHEVRLMSPEYVRPYVKAQKNDDRDAEAIAEAATRPTMRFVELKAEEQLDMQTLHRVRDRLVGERTALLNQLRAVLLERGIAIPQGRRKLEQHFDAMLGAPEWLGVAPRMRCLLQDMRTEWQALDRRIEAFDEEFAVRARTDPDARRLATIPGIGVLNATALVAAIGNGQTFARGRDLAAWLGLVPRQATTGGRPRLLGISKRGNKYLRKLLIHGARAAMPSLAKSSTALGGWLRGLLARAHPNTVVVALANKLARIVWAVLRHGREFERAGVLASA

SEQ ID NO: 121804 - protein, 469 aa, unidentified
MVKSVGIDLAGIGEHKVRCLDEKAQLCDGFGFETTPQGLAKLEEHIFRDGSNPVIVFEPTGLAWVAVAVYLRSRHPECRLVRTQSRNVAALRKYLRRSSKSDKIDAITLAKMPFVDAERLAEVFLPSAKIYAIQRLSRQRRHLELDIASRKTRISSILDGYLPGVRQTISNLWSKQARVFLSSRINPLTVAREGEDALTLFLATARPRRKADAIDSHMLYQSCQAAATIYLMSESAGTINDDFFSTLQEEIARELRLMDVEEAESESITKHVNELYQEFHPSNNLGTIPGVGEHTAPIFLSVIGDPTRFRSQAAFANYTGVVPDSRQSSKVEAKGLPMTKAGPAIMKWALYQSADMGRRYDPQMAWLYYREMVHNGKNHKQSMGAVMSHIGSRILAVLRENKPYELRDVDGTPISWEAARRLILTRYQVPEEIRRDRRRRTASNASLKKPLSNQREMAAIGVHKAAEAP

SEQ ID NO: 121805 - protein, 446 aa, unidentified
MGDRTGLSRGDRNRNARLARLRRLLPPGNAIVGIDLADDKQAAVVTDHDSRVIARRRVTARAWELGELLDWALARALTAGFASVTVACEPTGHRWRVLDQLAAQRGLALVCVQPLLVCRARVGEDLTRDKSGPKDAVLIARLASELRCYEPERADAVWARLRHLGARRLQLTTDATGQVNQVRDLLECAWPAVLAAAGRPFRSSTWCAALAVTLDRGAGDLARVRRLGPARFEAAVRRELPRWGATRPCLRIVRNVFGALADGAGVIAHRPGALERAGLALAGWHDTRERLADVEARMVAVLDELELTGLVTTIAGLTAVGAAAILAETGDPARFATPRSLVKHAGLCPRDNASGEFQAKTPISGRGRPGLRVAAWRAVWAALPDNDVLAAKFTHLTTRDDNRLARQQARTACAAALLRWIHVVITRRVSWDPAIAAGSTPLQQAA

SEQ ID NO: 121806 - protein, 336 aa, unidentified
MHRAGLAFASMSQNNKTNNILTFYAGIDIAKATLELNVGAASSSLTNDPKGHARILKLLAAAEAARPGYKIHVIVEATGGYEAALVEALHHAGRRVSVIQPSRVRHFANAKNTRAKSDPIDAAILAAFGEAIQPLPTPPPSAAQTHLVKLVGRRAQLLDTRTAELNRSAHYNDKLLRTQSRQLLALLTRQIAQCDRAIAAQLAADEAMKARAERVQQVPGIGPVVAAVLQAHLPELGSLKEGEAAALAGLAPYDRDSGPRKGPRRICGGRAPVRCALYMAALSAVRHDAILRDFYARLCAAGKKPLVALTAAMRKLVELLNHMLSKPNFKLAVRPN

SEQ ID NO: 121807 - protein, 332 aa, unidentified
MYLGIDVHKRYAQVAVMAEDGKIVEEVRVENANLDDLAQQYAGAQAAIEATSNYYHIHDALSEHLDVTVAHPKELNQIADTDKKTDRVDAKELARMVRLNSVPESYVPTDEISEARARVRGRQSLVEHRTEYANKVHGLLSDHGINEDVKPLTQEGREFLRELSLPTPWDSVLASYLEVIETLTDEIQNLEETIEERAGSLEETQLLMTIPGVSYYTALTIYAELGEIGRFDGDKEVVSYVGLNPVIRESGDSRIEGELSKRGSGRVRWLLVQATHTAVHTCNDGYLGRFYERLASRKNSQKAIVATARKMLVSIYHMLDRGEVYDPPGVSA

SEQ ID NO: 121808 - protein, 361 aa, unidentified
MSDATTIEETKLTVGLDLGDRHIQVCVLDEAGEVIEEARLATKPQALRRRFCGADQLRIVLEAGTHSPWVSRLLADLGHEVIVANPRKLRLIYANDSKSDRVDAEYLARVGRLDPALLAPLTHRGAETQADLALLRSRNALVRARTRLISHARGTTKSLGARLPACSAESFAAKAGACVPDELRPALDPVLVVIAGLCAEIRALDERIDELAWQRYPETALLTQVPGVGTLTAMAYVLTLEDPERFPRSRSVGSYLGLRPRQRDSGSLQPQLRITKAGDEHLRWLLVGAAHYILGPFGPDTDLRRWGLGLAAQGGRAGKKRAAVAVARKLSVLLLRLWVTGEVYEPLRNARLRGELLPAST

SEQ ID NO: 121809 - protein, 344 aa, unidentified
MQIAVIGLDLAKNVFQVHGIDDSGQAVLKRKLRRSEVLPLFAGLAPALVGIEACHTAHYWGREIAALGHDVRLMPPQFVKPYVKSQKNDAADAEAICEAVQRPTMRFVPIKSADQQAVLMLHRTRDLLIRQRSSLISAIRAHFAEFGIVVGQGIRNVERLLALLETAGDQRLPALAAEMLGILAAQLRRVAEQVKEVEVKLLAWHRADETSRRLQSVPGLGPITASAIVATVGDPKQFKSGRQFAAWLGLVPQQRSSGGKERLGGISKRGDGYIRRLLVHGARAIVGWRKRSATHKTPWIERLLARRPTNVATVAYANKLARIAWAIMMHGNRYNPALAFATMP

SEQ ID NO: 121810 - protein, 416 aa, unidentified
MKIYPRTRPIQRYIALDIHKEYVVAGGMSARQEWVLPPHRIEMSKFGEWAKKNLCEADAVVIETTTNVWDIYDIVQPLVGHAVVAHAGAVRQIAEARVKTDKEDVKRLIRLLIADILPEVWVPPTPVRELRGLISYRQRLVKTGSMIRNRLQSLLHRHNLLLPEEGLADGDWWEQQEKIPALEKLQIRQELAMLERIEKYKVEVDQELGRQSLGEMWGQQALRLMQLPGIGVVIAMTILSAIGDIHRFADARHLVGYSGLGAGVHDSGKEHIEKRITKSGRRELRWALVEAAWRAVRMSPYWKEQYEKFLKRMRRPNQAIVVVARKLLVAVWHVLSNEETDERASEEDLAYKMLLWSWSLSAEARQGLTHKQFAKYALMRLGVQTDLTRFVRGKVPRRIASREEVLVRMAELGLNG

SEQ ID NO: 121811 - protein, 339 aa, unidentified
MSETWYLGIDISCDTFDFALLDAQEKVLKGDRLPNTPTGFSALMDVLGSCGAAVSQLHACMEATGVYYQQLAYFLHAAGVKLSVMNPAQIHAFGKSLLRRAKTDRMDAQLIALFAIRQQPHSWVPQTDLLAELQCLTRARDELTTSIVQLKNKKHTAGHAFYAMDFLEEQRQAQLELLERQQKDLERKIKELIQRDQQVKQQLDSLLSLPGVGFKIATVFLSETSLMNFESGSKLVAFAGLNPQIQESGKYRGHASISKKGNTRLRKAAYQAAVCSVKTQSFFSSFYKRLRAKGKPAKVAFVALAHKILCTALAVVKQQSTYQEDFHRLHLCLPEEPTK

SEQ ID NO: 121812 - protein, 442 aa, unidentified
MVRTRVAGADLGSEQHWVCGPTIDAGGREIADFGATTPELLRLAEWLKQRRVESVAMESTGVYWIAPHEVLEAQGLEVLLVDTRQLARVPGRDKKTDPSDCEWIQRLHGCGLLQGSFRPRESICMLRTLVRDKANLVAEGSDWVRRIQKSLDQMNVRVHRAVSSIEGTTGMAILRAIVAGERDPRQLAKLRDPHCHKSEEEIAEQLSGHWREDHLFSLQQGLQMYDSIQERIAAYEAEILRRLNEMERPESVGAGAPPLRNANKARLIRSRGQEGKRQALYRMSGVDVTQIDAVGVEAVEVVLSEYGPDLSRFPSEKQFVSHATLAPHVPKSGGKPVKKKKRNSASSRVANVLRMAAVSLRHSNTALGAYYRHTAQRLGADVAVFASARKIATLIYRLLRWGQPYVDEGAQAYEARYEELRLKSLKHKAKQMGYEVTPLSPA

SEQ ID NO: 121813 - protein, 380 aa, unidentified
MQPTQGNNVKAVMAVSLETSGKSWKLAATDRQRERPTLFVGRASEARARLEETVERIDQLARKWGMPEDRQVVVIYEAGQEAFWIARALASRGIRALVVDPASIPVPRQARRAKTDRLDALLLLDCLLAWLAGQRGCMRVVHLPEPQAEMHRHLSRDRGLLQKEIGQHRDRIRKLLRTVGCWQELQGDVCAQLHAGELVCWDGQPIPQQLRQRLEREGARLQLAQQQFAALERGLLGQLPEPLRQRVAQLAQLKGVGWVGAMRLVLELYWRNFRNRQQVGSCVGLVAQPYDSGDSRVDQGISKQGNRRVRALLIEMAWMWLRYQPASAMAQWFTQRTAASAANKRGKRIAIVAVARRLAIALWRYLADGVVPQGAQLKKA

SEQ ID NO: 121814 - protein, 343 aa, unidentified
MDHFAGLDVAVKETSVCIVDDTGKIVREVKVASEPAALLAVLKNPAYRFKRIGLEAGPLSQWLFSALAEAGLPVICVETRHMRAALKAQINKTDRNDARGIAQMMRVGLYRPVHVKTVRSQKLRMLLTHRKLLQSKAIAIENDLRATLRNFGLKVGMVGTVKFETRIKELVENLSDLTVLVEPLLIVRRAIREQIGILHRRLLAIVRDDDVCRRLMTVPGVGPVVALTYRATVDVPARFRNSKAVGAVFGLTPSRYQSGESDRAGGISRCGDEMMRAMLYEAAHIMLVRSTKWSWLKAWAMQIARRRGMKKAIVALARRLAVIMHRIWVDGSEFRWTRQAAAA

SEQ ID NO: 121815 - protein, 351 aa, unidentified
MSRKTEAGLACTIGIDTGKNTLHLVGLDAKGAVVLRDKLARGRIAARLANVPPCLIGIEAGMATHYVARELLVLGHDVRQVPPSYAKPFRQGHKNDFRDAHAIAEAVQRPSTRCVPVKTDAQLELQALHRVRSRLIGGRTAAINQIRSFLLERGITLRQGLRFLRQQLPQVLATRTDVLSPRTIRIIEDLSSDWRRLDERIEHVTEEIELLASDSEACRQLMTVPGIGPIIASAMVAAIGNGAAFAKGRDFAAWLGLVPKQMSTGDRTILGRITKRGNRYLRTLFMQGARVVLLRPTNWAKHSFGPWLAAAAKRLHHNVLATALANKLARIAWTVLAQGRSYERRAAPGII

SEQ ID NO: 121816 - protein, 337 aa, unidentified
MKFCGIDLHSNNSVVVVTDETDRVLVSRRCPNQLTPILSLLEPHRAELVGVVVESTYNWYWLVDGLKAAGFEVKLAHPVAMKRYDGLKHSDDKDDATFLAHLLRLGILPTGYIHPPQERALRDLARKRIQLVRSRTQHILSVENIMARQFGQRLSCNEVKGLSATSVDRLGLPTDVALAMKANVAIVQALQIQIDFLEERLLHEAYLRPEFSLLKTMPGIGEVLAMVIMLETGNIERFADVGHFASYARCVKSAHYSNGKKKGEGNAKNGNAYLIWAYIEAANFARRFSEDAKRFFEKKKAKTNAVVATKALAHKLARASYHILKEKQPFDARRCFA

SEQ ID NO: 121817 - protein, 453 aa, unidentified
MARKRKQGSKTNSAALPVMRPDAAGIDIGATEIFVAVPADRAAGNVRSFPTFTQDLYALADWLMQCGVKTVAMESTGVYWIPLFQILESRDFEVCLVNARHVKNVPGRRTDVCDCQWLQFLHSVGLLKASYRPDQEVCAVRSLLRHRESLVQMAATHVNHMQKALDQMNLQLHHVISDIVGQTGLAIVDAILAGEHNPQILAKLRGEPIKASEEVIAKSLVGDYRHEHLFTLKQSLAAYRSYQKLIEDCDHEIGAHLEEFQPPSSPATPTEAPSAPASNRSSADGILKSELRRVFGIDLTKIPGIRTGIAQILFGEIGPDFTKFRSASAFASWMGLCPDHDISGGKVLWVGTRKVNCRAATALRMAAQSLHHSKSALGDFYRRMRAKLGAPKAITAAAHKLARIIFHLISTRQEFDDSKFASDQLRFQKRQEIKLRAKAKSMGFELIPLQQAG

SEQ ID NO: 121818 - protein, 311 aa, unidentified
MNNTIGIDISKDTLDVHRLTDGQHMQVLNGKRGYTKLLRWIGAQPTPLIIFEATGAYHRQLEQALGAKAIPFVKVNPKQARRFAQASGKLAKTDRVDCEMLAKMGVALQLVPKPTSTESLYDLRELLTARRALIKDRTAAKTRLATSTVPLVRCQLTKRLRHIESDISHIDAVMLALARQDQIMATSLDVLFSIPGIGMVIALTVLIDMPKIGALNSKQVASLAGLAPMSQSSGKWQGKERIQGGRPNLRHSIFMPALVAIRFNPDLKAKYDQLVAAGKEKKVAITAVMRKLLVLANALLRDNRKWTEKLA

SEQ ID NO: 121819 - protein, 343 aa, unidentified
MEYYAGIDVSLKESSVCVVDAAGKVVREVKVASEDEALVRYFDELDLAVSRIGLEAGPLSQWLHAGLMAAGRDAVLLETRHVKAALSAMTVKTDRKDARGIAQLLRMGWYRPVHAKSAPCKDTRALLAGRKLLQGKLLDVELSIRGILRGYGLKVGEVSRGRFEARIRELTAGHAILETVIGAMLAARMALWNEFTRLHREMLKIARADRVCRRLMSAPGVGALVALTYRSAVDDPSRFAKSGAIGAYFGLTPKKYQSGETDRDGGVSKVGDGMVRTALFEAAHIMLTRAVRFSSLKRWALAVAQRRGMKRAKVALARKLGVVLHRMWVEATEFRWSNAVPAA

SEQ ID NO: 121820 - protein, 317 aa, unidentified
MAEVTFPQLVQRACGIDVHLKVVVATIDGVDLERETRSFKTFTSSLNELKEWLLSNGVTHVAMESTGVYWKPVYKILEGSIPNVWIVNARHIKNVPGHKTDKMDSEWICKLLLAGLLKPSYIPPKEQRQLRDLTRYRNKLIQQIASEKNRMMRILEDCNIKLSSVVSNTSGSTATSLIDMLCEGKKLTLDDIKSVYHGKLSASPEELLEACTGFVEEHHIYLLQMIRKDIDQTQILVDKLSQRIKTLLSKYENVLELLKEIPGFSTKVVEDLVSEIGLDMSHFPSEKHLSSWAGLSPGNNESAGKKKAQESLTETNK

SEQ ID NO: 121821 - protein, 341 aa, unidentified
MWIIGCDFHPRFQQIAFVNTEGGEWGQRRLEHRGEAEQFYRGLAGQTVRVGMETCGSSRWFERLLEELGQELWIGDAAKIRAAETRKQKTDARDAEHLRELLCNGMFEKMRIWIPPADNRDLRQLLWHRHRLVQTRTRVKNQLRSLATSEGMERKPGLWSRAGQQQFQALELAPWAQRRRQDNLELLAQLLQRTAPLDEAVAQQAAQQPEVVRLMTHPGVGPITALAFVLVIGDPARFPNSKKLTSYLGLIPSEDSSGGKQRLGHISKQGNAMLRGLLVEAAHVAVRRDPEWKRYYRRLAMKKHRSIAAVAVARKLAVRLWWMWRRGVDYAELGASGSHAG

SEQ ID NO: 121822 - protein, 407 aa, unidentified
MSKGNTFVGMDVHQRSIDLTLAEGGHDGAITHFASIGGDLDSLDRAVATLRQRTTELYFVYEAGPSGYGIYRHLRAAGLRCAVVAPAQVPKRAADRVKTDRRDSRTLALQHRAGALRPIYVPDEDDEAMRDLVRAREDAVHNRRRARQRINSFLLRHGRSYPHGKKNWGARHRRWLAAQSFERTAQRITLEEYVGTADEAEARVTRLTEQIRSLLAAWRWQGVVEALQALRGVSLIVAVTVVAEVGDLTRFTPRELMAFLGLVPSEHSSGARRRQGAITKTGNAHVRRVLAEAAHAYRATPALTPFVRQRQIHLPKEIRDLGWKAQLRLCHRFRHLSAARKHPHKVRMAIARELTGFMLAIARRVTSPPRAGAPEPSAPTEIIVLRRPARPRRTTTGTRARNTAKAS

SEQ ID NO: 121823 - protein, 403 aa, unidentified
MVLMGIDWGEVHHDVCLVDTAGKTLARRRVPDGLVGVTQIHELVAEHAAEGEPVCIGIEVDHGLLVRALVAAGYEVYAINPMAVSRYRDRHAVARTKSDAGDAKLLADLVRTDRHLHRQLRGDSELASAIRILARSHQEAIRSRRRHANQLRTQLREYYPGLLEGFELVEDPEAVELLLAAPTPWLGRRLSRHKIAAVLRRGGRQLRIDERAVVIQECLRRPQLEQPALIAEAFAKTASSLARRLKQLNQEVATLEGQLAELFEMHPDAEIYRSLPGLGIVLGARVLGESGDDPTRYANARARRSYSGNAPRTVASGKSLRVAIRQARNDRLADAYYQAAFVCLTRSVEGNAYYRRLRASGKSHSHALRALANKLAGVLDGCLRRRQTYSAAVAWPSLMEKVA

SEQ ID NO: 121824 - protein, 431 aa, unidentified
MPGENQDKLMSGNQPEVQYAAFLAIDWADQKHVWSLQEANSSARERGEVDHMPEAVETWVAQLSQRFAGRPIAVAVEQSRGALVFLLSKYAQLHIFPVPPAMTANLRKAFYSSGAKNDPTDADLLLDLVQQHREKLRRLSPDTEATRRIQNLVEERRKLVDEKTAQSNRLEAHLKIYFPQIPHWFGDVGSPMVCALLERWPTLEALQKARPDTLRSFFRKHHCRKEELIESRIKAIGEAMPALKDRAVVQTKVAVVKVSVQLIQVLHEGIEGLNRQIQEAAEAHPDFFIFDSLPGAGAVMAPRLLAAFGSQRERYQNAVEMQTFSGIAPVTESSGKSSWVHFRFACSKFLRQSFHEWAALSITQSQWARAYYELQVRRGKKHHAAVRALAFKWIRIIYRCWKERVAYDENVYLAALAKHNSPLVAATKAAL

SEQ ID NO: 121825 - protein, 320 aa, unidentified
MSKIKLVAVDLAKRCYQLGAIDVEGKVLFNRKLSPRKFAVTIAQLEPTVIAMEACAAAHYWGRRLMRLGHEVRLVPPQHAKAFRRVHKSDAHDTISIAEASQRPNLHFVPVKSVAQQDLQTLGRIRERLVAQRTAIINQARGLAREYGVDFPKSRPALLELLPIALADADNELSPIAREALGELLQQIRQTSHAMTDVMQRITALASEDPAYERLCTIPGIGPTIAPALLASVGHAQQFQNARACAAWLGLVPRQCSTGGVTHLGGITKNGNRSLRVMLIHGARTVIRWADKHDHAQSRWIKQLVARVGKNKPSSHSPTR

SEQ ID NO: 121826 - protein, 315 aa, unidentified
MLIHYIDIAKRNFVIAVSSLSKTKTETNNPKGIAHTIEYLKKHKVALVVTESTGGLEIPAAKAIRRAGIAVIIANPRQTHQFAQSQPLTKTDAKDAKMPAFFTQMMTQKEDWQTMPYQPPTEAEEVLEALVNRRNQSADMRTAEKNRLHQVHETQVGSVKQLIAHFDRLIDESDKQIDDHTHTHFDGKDQVAEQIKGIGSITTATLMAMLPELRRLSHKRIAGLAGIAPHPRESGETKFKSRCFGGRSAVRKALHMATVAATRFEPLIRDFYQRLLSEGKPYKAAVTACMRKLLTISNARMRDYFAENDTAENGI

SEQ ID NO: 121827 - protein, 466 aa, unidentified
MENNYILYVGMDSSKGKADAAILKVSDRRSVKPKFLRKKLSFKFVKSEVTSFLETVRSYSDDNCTSICFALEVTGIYSTNVYNFIKDNLNDNESIKFLNTDFVNQWRNAHNIAKSDPLDAQTISTIIGTDSDVQYVNDNVFENKNGYQDLKALVHRHYQIKKIYSQEINRLIAQCDCLFPELQYVFEPKSAAFIAVLSSYPTTHDIINASRVEVFDVVYEATKHRCSMDKVDKLIELCQDTLVPNDISSYGKSIILDLVENIKNIKGQLKSIERYIKDIASLNPAYKLLLTITGCGPITAATVIAETGNIRRFKNADCFVSYSGTSPRNKRSGTSVETMGKISKKGSRYLRHAIYMIAEFARRHNPVLKHQFERIKNGNKKRHKLANIAIANKIARYIYSIMKNKSSFVILHDHIMRLPEETRDTFFNSISLDFPKNTRKQIYQYSDINGELHRFVYIKTDEMIPA

SEQ ID NO: 121828 - protein, 453 aa, unidentified
MSLMIAVRCPRARSVPRHRGIGTSHNGARNVMRAEHLWFEHSLETGGLPMTSDDRPLIFLGLDIGKSAHYAVGVDRAGQTVYSEPVANEESALRLLVLWARAHQATVIVDQPGGTAALLLKLCWDAAIDIGYVPGLAMARARDFYAGDAKTDPKDAFVLADVARAHPNRVVWLRETSAARTQLELLNSYDADLREDAHRLTNRIRALLATYWPAFERAFGDLFHTIRGPDLLQSCSIAPKLRQAGAKRLVTLLRATHRVHQPEPWVEQLLVAAKSQTVVVAGADTAAGLIAELAEQLHRVLARRQRLEKEIERAFFNLPEASILRSMPGIGPRLGARILIEIGDIRQFRTSAQLAAYAGLGPTPHQSGTSIRGNRATRFGNHRLKDAFFLAAFSSLKHPPSRTYYDRKRKEGKRHSQAVLCLARRRVDVLHAMLMTNTHYQVPSHPSDLKTAA

SEQ ID NO: 121829 - protein, 396 aa, unidentified
MLYLAIDQHKHHLTINIRNEQGDVMQKGQVSTNHAEIDDFFVAFAKKARKHRGYMAIVEVCGFNDWLLEKLKKTRCSEIVVIQPENSAVNKTDKRDANALGELLWNNRKRFQGGQRPNGIRRIFPADPADAQMRQLVNFRHHLVSQRTRIVNKIKGIINKHNMAQDAPTEIYSTTKFKNWITSVPLPVVDRLEVNMNVEAWDLYDKQILEVESELVKRSEASRTKMSDVYRLKAIPGISAIGAITLLSRIGDVKRFQNPASLANYFGLTPGCHNTGGKHRVGSITKRGNALARQVLNFAVIHITRKDAAMKEWYKKIKKRRGAKTARVAVMRRLATIIWHMLRWGKPYQFHYDPPIAARKEGDRRSPKEVLGGISNSHHSRRHSKTPLKCRGKTRT

SEQ ID NO: 121830 - protein, 358 aa, unidentified
MASIASTSRVVIGGIDTHKDLHVVAVLDTAGVLLGTEAFSTTRAGYRALVGWLRGFGDVRLVGIEGTGSYGAGITRHLGEAGIQVLEVDRPDRSDRRRRGKNDTLDAENAARAALAGRRTSTPKSKDGTVEALRVLRLTRTTAVKSRRVALQLLGNHIVAAPEELRDQVRNLTRMQLIRTCATWRPDTSGFRDPVVATRIALKSLARRILELNDEIAELDQLITTLVGELAPQLLAAVGIGVETAGQLLVTAGDNPQRLRSEPAFAMLCAAAPLPASSGKTQRHRLNRGGDRQANSALHLIVVTRMRVDPRTKDYVARRIAQGHSKLEIIRCLKRYVAREIYYLLKPPTQANMKSRAA

SEQ ID NO: 121831 - protein, 437 aa, unidentified
MEEVTDEPLYRDRVCGIDIGKAGMVATIRVPSDKDPARRAAETRSFGTTKREVLALADWLRCWQVPAVVMEATGDYWKGPFYRLEAEGLECVLADAKQVKNLPGRPKRDPSDSRWLAACFERGAVTGCFVATPEFRLIRLHTRYRRDLTEERGREKQRAEKLLESAALKLSSVITDLHGVTGRDIMDHLIAGERNPKVLAQLARARARRKISQLEEALEGAEFFTEDHAALLAAMLERIDRVNAEIDELTAVIERLLAPYEEQLAQAGSMPGWGRRSAQDAIAETGVDMTRFRTGPHLASWAGRTPLDNQSGKRTGRSKSKKGNRYLAAITGETAIAAGKTQTREGARYRRLARRRGKPKAQVALGNTQLKVYHKLLSNPGMRYDDLGPDYYERQRDVRRQIAHHVGKLGALGFEVTLARTPEPEPEPTRPGSTQAA

SEQ ID NO: 121832 - protein, 491 aa, unidentified
MTSIFQRKNPAIEKLFAAAGSAKKVLCIPIDYAKRQHTALACNAEGLQLRGAFHIHNNPAGVEFLEEVIGGLCRKHSIRKAHVFFGGEDCSAIAFNFIHALLQKGYLGIGLNARDAARERENQVASTDKLDLLGIASLLINKKWGRTLSAEYGEARILRELTHHRAALVKAHTASSYRIHHLVDQLLPGFLDEKQSGLTPFAQPSLWVMSGNFSPRQILTRKSDTLAEKLRLFMVQDAAAKVAQLKTLARSALPPPASLCETLQINLTHEVSVYQHLGSCLQDVDKAIARRLAATPGAMLTTASGIGVTLAAALYAEIGDPARDRALKRLTSYAGIVARLKQTGGPDKEAQTLGRSRRACVPLKRCLMDISLKMGQYGHAELKADYQRRENEGQDPRLTMGRRVLRICAHLIRHTDFFVPPSLLRDGEYDARRDYYARAWDKVLIKWRDAAAIQQAFAEGTPLEQWRTLLNERYDLKLGKLSPQYDRLRQR

SEQ ID NO: 121833 - protein, 411 aa, unidentified
MHNRQNYLYVGVDLHKEHHTAVIINCWQEKLGEIQFENKPSAFSEFLLEVETYVSNGLSVVFGLEDVGGYGRALAKYLVDHEQVVKEVNPALSFLERKSQVMIQKNDSWDAECVARILVNKFNQLPDAKPNDLFWSIQQLVSRRNALVKAQSALKNQLHIQLNHHYPSYKKFFSELDGKTALAFWQQYPSPSCLEGANIKQLTAFLLDVSNNTCSVKKASDILKLVKEDGQTMKEYQEMRNFLVRSIVREIEFKKKEMKYIERELKQLVNLLDYQLETMPGIELVTASALIAEIGDVRRFPNANKLARFAGIAPVYFGSGGKGKTHKSKQGNRALHALFYNLAVQQVQVAKGSKMPRNPVFHAYYQKKLKEGKTKGQALVCIMRRLVNIVYGMMKYKTAYELPIVEEKEVV

SEQ ID NO: 121834 - protein, 391 aa, unidentified
MIIVGIDVAKDKHDCYIVNSDGEVLAEVFTIPNDQIGFNLLFQTLQSVAPDLSKVKVGLESTGHYSYNLLGFLLDKGLHTYVINPLHTNLYRKADSLRRTKTDPIDAHTIAGMIMSNVDLTSYTAKSYHNEKLKSLTRYRFDKVQDRARLKTSVTRLVNILFPELEKLVPTLHMNSVYALLSEFPGAKQIASCHLTRLVHLLSESSKGHYNRNKAIEIREAASTSIGSVMPAKSLELKHTIHLIKVLSEEIDEIETLIREIMDENPSPILSIPGISYRMGAMILAEIGDFTRFNSPDQILAYAGLSPSTYQSGKLANAYPHMEKRGSRYLRYALFNATKFVCNWDPVFAAYLAKKRAEGKHYNIAISHAAKKLVRVICAIQKSGKPYCPAT

SEQ ID NO: 121835 - protein, 408 aa, unidentified
MKDSRKRYIGLDVHKHYLIAIGVDNELNVVLPARRVELSYLEPWMKKNLSKQDEVVLEMTTNTWQLYDELVVYAGSVLVVHPPHVALITRSQVMNDKIAASILARLLAKGLLVGVWVPLQEIRELRGLVAQRKKMTGLATQAKNRLHAVLQRHHWLPPEGNPFHASQKNWWLTLAMGPLEKVNVQSDLETLQFAEKQLRQLTSMMAEIANQSEEVTRLLQLPGFGVVTAITVWAAIGDVQRFEDAQHLVGYAGLGTKVHDSGMTSRSGRITKAGRRDLRVVLTEAAQVAANSHPHWKAELARLQPRLGRNKAIVAIARKLLVTTWYVLAQHKTDRFAQPEAIAQKLLKFAYQVGKEHRPAGQSAAQFVRQRLDVLELGQDLTSIAWGSKKPIPLPPSTNKLSDVPNTK

SEQ ID NO: 121836 - protein, 366 aa, unidentified
MKKPSTVRVNGNMIFKGHKLTIGLDLGDRSSNYCVLDEAGEILLEQKLATTPEAMKQTFERIPRSLMALESGTHSPWVSRLLKELGHEVLVAHAQKVELISKSNRKDDRHDARTLARLARIDPELLGPVRHRSAKAQIHLTVIRARAELVSARTALVNAARGLAKSHGERLRKCGTEQVSRELAAELSAELREVLEPLLKEIESLNERIKEYDVRMEKIARESYPQVALLKQVKGVGTQIALTYVLTLDDPHRFAKSREVGCFLGLKPGRRDSGQSQPQMHISKEGDRYLRTMLVQGAHYILGPFGEDSDLRRWGLRLAERGWKSAKKRAVVAVARKLALLLHRLWVGGEVYEPLRNSHKAMRAAA

SEQ ID NO: 121837 - protein, 369 aa, unidentified
MDHHSVAYVGFDTSKTKHAVAVAEGGREGEVRYLGEIEAAPAAVERLLRKLACKYKILHVCYEAGPTGYGLYRHIRALGHVCDVIAPSLVPTRPGDRVKTNRRDAVTLARLLRAGELTPVWVPDAVHEAVRDLVRAREAAARDLRHKRQQVLSFLLRHGRIFTGHRHWSRAHLRWLAGQAFDHPAQQIVFQDQVDAVADAQARLERLDRQLAELVPTWSMAPVVAACQAMRGVSFLVAVTFVAEIGDVRRFESPRQLMAFLGLVPCERSTGDTVRRGGLTLAGNRRVRRALVEGAWSYRHPARITETIRGRLEGLPKVVREIAWKAQVRLCSRYRRLMAAGKRAPVAVAAIAREMAAFLWAIGRVVEPT

SEQ ID NO: 121838 - protein, 355 aa, unidentified
MATVPHEEVRVTIGVDTHEDAHVAVALDQLGRWLGELAIPTTRRGYAQVLEWASGFGVIDTFGVEGTGSWGAGLSRWLRAESLVVIEVDRPDRKTRRHGKSDTIDAEAAARAVLSRKATTVPKTGDGPVEMIRILRMTRRSAVKNRTMTANQMSSLVATAPEALRTQLRGLSTGKRVALAVKFRTGEDLSNVLEATRYSLRELARRYQHLTEQIDRLDGQLDRLVADTAPDLLAKKGVGTHTAAALLVTAGDNPERLAHEGSFAHLTGSAPLDASSGKQQRHRLNRGGDRDANSALYLIALTRLATDEDTKLYMNRRLAEGKTRREVFRCLKRYIAREVHQSLVNNPVIQPALDT

SEQ ID NO: 121839 - protein, 301 aa, unidentified
MITLSVDPHPGTHTVVALDPNGSTLASITVPNTPDGLCQLHQFAVPFASRRWAIEGAGNHFIAVLVAQLLERSEIVYSIPPSLTSQYRSRRGRKKNDVVDAENVGRALLANSQLTPLHNTEQQRELQELTRTQRRLSEQLSANRVALQELLAESAVRDIIEQVIAVLLKQLAALEKQIRVAIHAVMPSLLQLPGVGPIVAGVLLAETGDPKRFASPHHFASYCGAAPVERGSGQNRRMQINPGGNRRLNWALHIVAMVRLRMNGGRSKRFLERAQLRGKTKRSGLRLLKPTSLVNYFEFYP

SEQ ID NO: 121840 - protein, 353 aa, unidentified
MWSDCSKDELATCFGQLFLPLQEKHKATSLFINSPKGFKELLKWSDKLSEQGVEVEFVIEATGVYHEKVTNFLFDAGKKISVILPNHARHFAQTLKTRTVNDKESSKMLASFGLQKQLDGWLKPDAVYAKLKGLTREYSQLKDELTMIKNQYHAEEHSAFPINETLTRIKKRIAFMDNQIEQILKDINSIIKANPELAKKIKKICSIPGVALLTTVKIIGETNGFNLIRNKKQLTAFAGYDVITKDSGTSVKGKPRISGKGNKHIRKAMHFPALTSVKYEKHNQDLYIRLEAKSGIKMKAYTAVQRKLLILIYTLWKKNEYFDPDYQTKKTNNNKLLEQPITVALNELDQVRS

SEQ ID NO: 121841 - protein, 356 aa, unidentified
MERYIGIDAHSESCTFAVMGPSGKRIRQQVVDTQAKVLIDLLKGITGHKYVCIEEGQLAEWLVEALTPHVKELVVVQPKEHRGRKSDADDAWALAEQIRVRAQGTYVFKPTTQYRSLREAARAYGVATKEQTRAKNRFRSLLRSRGVTKLDGSIYDPSIRPKWIGKLPPAYRRRAEWLGHQCDATTEAHEVAESWLKEEAKKCPEVQRLKTVPGLGDVRAAQVVAIVVTPHRFRKTRQFWSYCGLGIVTRASSEWKRNSSNGSWQHVQSNVQTRGLNLNRQPVLKAVFKGAATIVLARQNPLHPLREHFDRLVASGTSPHLARLTIARRIASATLVIWKKQEDYEPTKHRSLTEAA

SEQ ID NO: 121842 - protein, 416 aa, unidentified
MNAAGIDVSSRKSTVAVLRPFGEVVRIPFEVSHSAEGLASLVQQLKAIEGETRVVMEHTGRYYEAVANVLHEAGFFVSAVNPLLIKEYGGNSLRKVKTDKADAVKIARYALDNWANLRDYTPMDRIRYDLKTLNRQFHLASKQKTATSNNLIALLEQSFSGVRKCFDSPVRRDGTQKWVDFAHDFWHADCVRKYSLAAFTERYRKWCKRHGYHFRQGTAQRVYDLAKSVVVLVPKSDLTKVLIQEAANQLTTISKSVETYRAEMDRLASLLPEYPVVMGMYGVGDSLGPQLMAEIGDVRRFERKQSLVAFAGVDPMPNQSGEKNVRSNKSSKRGSPYLRKALFNVMICYLQKAPADEPVFQFLDRKRAQGKPYYVYMTAGANKFLRRYYGKIMEYLSTLEDLPPVDMDSTELPKHP

SEQ ID NO: 121843 - protein, 475 aa, unidentified
MPRKGRRKAESLEIVTRDCAGIDIGKDTHYVAVDPERCEEPVRSFDAFTPDLEEMAAWLSSCGVEKVAMESTSVYWMPVFEVLDRAGFEVMLVPPRMTKQISGRKSDVLDCQWIRQLLSYGLLRGAFRPGDAVCPLRSYVRQAKRLTDDRSRSVLHMQKALTEMNVRLDSVITDITGVTGQRILRAIIDGERDPRRLAALRDGRIKASHDRIAAALQGTWREEHVFALTQAMQRFDFLTEQIATCETQIAMQIDSLTPPHDGPDDDQLPGSPGPSRSGTGLPKAPRSNHAKRTAKERATAEALHRMMGVDLTVIPAIGVNTALTIAAEIGPDFSAFPSAQHFSSWLGLAPGTRISGGKSLPGRAPKAINKVAQSLRMAAMSARRSQAFIGARHRGRLARKDAPVAITATARELACLIYTLVTRAEEYVERGIETYERRRVDRSVSNLGRRAKQLGYQLVRMPEDTDGTIGAESIA

SEQ ID NO: 121844 - protein, 411 aa, unidentified
MDLLYARCAGLDVHKATVVACVRMPGPRPDARHAETTTFATTLRGLEALAAWLTAHGVTHVAMESTGVYWRPVFAVLEGTVQVQLVNARHMKMLPGRKTDVRDCEWLAQLLECGLLRGSFIPPAAVRDLRDVTRLRKALIRERGHHVNRIAKTLELANIKLGSVVTDIMGKTGRAILQALSAGLEDPEQLAACAQGSIRKKQAALREAVEGRLTPHSAFLLEHHLALIDPLDAHITTLDARIEAAMAPFAEAAALMQTMPGVATRAASAILAETGMDMSPFPTAAHFASWARLCPGNHESAGKRRPTTTGKGATWLRATLQEVAWAAVKTKKSYYRALYHRLKARGGPKKAIVAVQHAMLVALWHMLKRRVPHQDLGADYFAQRNTERTLRHHVRRLEQLGYQVLLAKEAA

SEQ ID NO: 121845 - protein, 356 aa, unidentified
MSNYIGIDFHKQFSQVAVMDDKGKIIDERRLDHDRREELTAYFSQFGRETSVAIEATRNWYWLVDLLQEHNMDVKLVHAKKVRIIAESTIKTDKVDARTLAHLDRCNFLPQAYIASPETRSERELLRYHISLIKVQSSIKNRVHSILSKHNIQHNFTDLFGRAGREFLKVVELPPIFRLELNGYLEILDKVGTVLNQAKKEIERHCRAWPEADLLTTTPGIGDYGGLLLAAEIADINRFSTVKKFCCYGGTASSTHQSANTQYNGHIIKDSNKYIRFVVLEAVPHAIRKDTKLWRFYSKIEKRKGKKKAKIATARKLLVIIYHMLKNRVPYKIVHNDHICQANPCAKLGTLVAPCK

SEQ ID NO: 121846 - protein, 338 aa, unidentified
MTIIRIGVDTAKHVFELHGVDEHEQPVLRRQLRRGQVEPFFAKLAPTRIGLEACGAAHHWARVLQTLGHAVVLIPPQYVKPYVKRGKNDAIDAAAICEAMSRPSMRFVPVRTAANQAELMLHGARALLIKQRTMLVNAIRGHAAEFGVIAAKGARGLHDLVARLTEPEVPALAREIFTAMAQQIERVDVAIRGLEKKLLAWHRGNPRSRRLAGIPGVGPIGAAALAVKVPDPAVFRSGRHFAAWLGLTPKDHSTAGRQRLGVITRAGDETLRGLLVSGATAVVKYAKPGRTAPWLLALLARKPRRLAAVALANKNARIAWAMMMRGEAYRRAMPGLPA

SEQ ID NO: 121847 - protein, 355 aa, unidentified
MNDEKYIGLDVHQATIVVAVMDSTGKLVMESILETEAATILQFFAGLRGTLSVTFEEGTWSVWLYDLLNPHVDKLVVCNPRKNALLKDGNKSDRIDARKLAELLRGNQLKPVYHGETGVRMLRELSRSYLTIVKDLSRVMNRLKAVYRSWAIPCAGRDVYYRRHRAQWLDKIREAGVRRRAERLYEQLDMLQHLRQQARRELLAESRKHAITAKLRQIPYLGPIRSALAVALIQTPHRFRTKRQLWAYSGLALETRISAEYRLVEGQVRRSKKLLSIRGLNKDHNHDLKGLFKGAATMASVRPGPFQDFYQAALAKGIKPTMARLTLARKIAAITLTLWKKGENFDAEKLKSQAA

SEQ ID NO: 121848 - protein, 432 aa, unidentified
MKFNQSNKQNQRISRISETTLVIGTDIAKHNHVARAFNYRGIELGKRCLFQNDENGLLNLLAWAESIKQEQGLTDVLLGVEPTGHYWFPLFHFLKQRGIEVVLVNPHHVKKSKELDDNSPTKNDIKDAKVVAKLVIDGRYTQPQLPEGVYADLRVLMNQRDRLCGDLNRVKGRIHNWLDRFFPEYTQVFKDWEGKASLITLQNFPLPQDVIAAAETTIAAIWKKNGVPRAVGPKRAELLYRKARKSIGLTEGATAARHELAMYMEQYVMLCRQIEQLMELVAGLVEQIPGAAHMMSMPCIGLITVAGFLAEVGDLSGYDHSQQIVRHAGLSLRENSSGLRKGETTISKRGRCRLRALLFRAALTMVAKNPEFRALHLYFTTRRENPLKKKQSMIAICNKLIRVLFELGRKQKNYDASKVLGPHREAQLQAAA

SEQ ID NO: 121849 - protein, 331 aa, unidentified
MDQWNHMGIDVSAKTLDVALAGEGIPVISATFPNTSMGHRQLIKWATKRGRSARVCLEATGVYSASIALAIQRHPRLDIMVVNPKAIRNYGQARMQRAKTDRIDAQLILDYGQRMPFVSWQPPSENMLQLQAITRRITQLKSESQREKNRLHAESYRATPTDLIERDIQVHIRHMEQRIQYLTEKGMALVRAVSALSGPFQRLRSIPGIGQTSALRILAELAVLPKDMKPVQWVAHAGLDPRPYESGSSIHPPRKITKIGNKFLRTALYMPALVAIRHQCQIKAFYEKLIAAGKNPRLAITAVMRKLLHTIWGVWKHDQDFDGQKFYRVAV

SEQ ID NO: 121850 - protein, 345 aa, unidentified
MLYLGLDVHGKWTTMVGFDPETGEVVERKRVGNEAETMAGVLGSLGGPLHGVMEVGTNSWAMYRQLQPFFAQLVIADSAQLWDRKRDRQAKTDRRDALRMAQLLYRGEIKGIYVPDERTQDLRVLARSKVRASRWVTKLTNEIGSLLRSWGYVGQRSLLSKGGRKELDQAELPGRSARVLRLWREMLEKAQAIESELEAAVKEEAEVEPVCALLQSMPSVGPLTALVVRAEIGEIRRFGGPEALVSYAGLAPRVFQSGEHCRYGGLGRWGNRWLKYVLGLLANRIGRSARENRLHRLYWRTCLRRDKSSAKMAVARKAAHLIYHLLRQGEAWLEPEEEKRVTASA

SEQ ID NO: 121851 - protein, 412 aa, unidentified
MAKQTTKSSKTNKSLKAKKITLSSEQAEASIPSAAPAAAPAAAPAAAPASQTSAAMPAVLPELMVLGIDVHLRQHVVCRKTDASTVQPAQRMKPQELVAWVVKQKSHAKRIVCCYEAGPFGYTLQRQLAAHGITCHVVRPQDWDRHGERVKTDSRDARELAEALARYEAGNKHALAVVRVPEVEQEQRRLITRQRESFVRQVRRFGAMGRSHGMSQGHEISNHWWRKGAWSALSKRLPQHLKDLLEPLSQLLLKLEEFIKQRTEQIKALATAAAKRPKGLGALTERIIENEVLDWSRFSNRRQVSSYTGLCPSEHSSGGKRRQGSVNKHGNPRLRHALVECVWRFIRLQPGWKRLLKVVERLKKGKGAGRGAVERKKTAVALARELSVDLWRLNTGRTTLEALGLIAAEAAP

SEQ ID NO: 121852 - protein, 411 aa, unidentified
MDKVYDICCGIDVHKKLIVTCLRKGNKNEIREFGATTRELLAMADWLKENGCQMAAMESTASYWKPLYNILESSNLSAMVVNAHHMKAVPGRKTDVKDAEWIADLLQHGLLQASYIPDKDQRELRELVRYRKSLVGERTQELNRLQKMLEGANIKLSGTVRDINGKSARNILEYILTGKNFDEAKYDEMYEQNVIAHNLKASKEQIIDDLNGVMTPLQRRMMKELLSHLDELNVHIKNLDDEIDNFMKPEEKKASQIIQDITGIGNTSAQAIISVIGTEMSRFKTDAHICSWAGLCPGNNESAGKRKSGKTRKGNSLLRTTLITCAHSAVKHKTSYFYAQFMRISAHRGKKRAYVAVAHSMLIAIYHIIKDGVVFKDLGADYYNQFNKERKINAYLKKLKALGWEAPVVAV

SEQ ID NO: 121853 - protein, 364 aa, unidentified
MPVGVDGPTASCAKVELFISNERAARMKFKRIAIDTSKHVFTLHGVDELERPVLRRELKRDQFEAFFSKLPAMEVVLEACGGSHHWARVLQGMGHEVRLIPPQYVKPFVKRSKNDRNDAEAISEAAARPSMRSVAVKTVDQQAKGIIVKHREMLVGQRTQAINALRGHATEFGIVVAKGTAKVAPLLAVLAGDMAIPAAAREMFVQMGAHIDALESRIVGLDGELAALHKAHPVSRLLAEIPGVGPMIATTMALTVEPENFASGRHFAAWLGLTPREHSTGGKQRLGKISKAGNERLRSLLVVGAMSVIRFAKPGSKSASPWLLQLLERKPRKLAAVALANKMARIIWAMMARGEAYRRQPIVA

SEQ ID NO: 121854 - protein, 362 aa, unidentified
MFRPHTLYIRIRIVRKVHEPVFAMRDQDVSDVIKTKNRTAMQYIGIDVSKATFVVAYSSDKGGEIRTFNNTPAGIKQFIGTLPKDGSIHCVMEATGNYSALLLYMLNVAGITVSMENPLKVKNFARAMLSTVKTDKIDARLIALYGEKMNPQPFKVQGEAILRLRQKRTVIRQLTKQITAMSNLRGSLACLPVPDKGATHTVDETIKFLEKRRDRLQSELTDLVEVEFSRQLALLTTIKGIGITLATALILTTGGFTYFQNAKQVSRYLGICPTYEQSGTSVNIKGHINRNGDAYTRGLLYIAAWPASRFNAQCKETYTRLRQNGKPGKLAMIAVANKLVRQAFAVVAHDKEYIDGFVSNRP

SEQ ID NO: 121855 - protein, 358 aa, unidentified
MNSEKVKIKKFSYFIGIDVSRNTLDYAVIQDKQLLFHREALNEADNITAFLQELKTLPKFTMSKAVFCMEHTGIYCNHVLNAIKKVKGNVALENALQIRNSLGVIRGKYDKIDAIRIAQYASKNRDDLKLWVPARPALLQLKSLFALRNRLMGTQLALRTPLKEQVTFIKKGLQVQSTKLCKKSIEAIKADLADIEAAIDLNISSDENLKRLISIIVSVPNIGRITAIQIIISTNEFKDINNPKQFACYAGVAPFVKESGLFKGRGKVSPIANKKVKALLHICAMSAIISKGEIKDYFIRKTTIEGKPKMLVLNAIRGKLILRIFSCVNQNRHYQGDYRPVDQHCLPTAQIHEDYCLT

SEQ ID NO: 121856 - protein, 344 aa, unidentified
MMNKPLKQMDPDAKPALFAGIDVGAEELILVIRKNGKPFDPQKFTNTPADCARLVKKLVKLPGLIVCLEATGIYHFDLAIALHDAGVLLMVINPKASHNFAKVLMKNSKTDVVDANTLAEYAARMDFVAWTRPSNEKLALRSFARRINALTGQKAAAKNHLHALTATQETPKAVLKDAKLAIAQLEKRIDLLTAETLLLIGKCPELQRVLTLLIGIKGIAKTSAIALMGELLLLPPDLSHREWVKFAGLDPKAFDSGKSVHKKTRLSKAGNRHIRSALYMPALSAKTHDPHVSAYFQHLLDNGKKPLQAVCAVMRKLLHAIHGILKHDKPFDNTRFYAIPVTAG

SEQ ID NO: 121857 - protein, 390 aa, unidentified
MRYFIGIDVAKFKHTACVIDTDGTVLVESFDFTNDIIGFQSLLKNIKPFLKKKHLVGMEDTGHYGDNLRNFLLEKQYRVVMLNPIVTSHIRKASNKAKNDRIDCFIIANTMMNPNFYRDQHAQSIDYATVRQLTRMHHTHTEEINRYKCQLQKSIDIVFPEFNSLLNTKYSKTYLEILDTYHSAYTIANTDIRLLRNTLKNDGLGRSVSISAEQLKKAAKESIGQHNLAIEMDIPFLISLIRRLTSILGEIDTKIEEFSHQLNSPILDISGISHFSAMSIISELGDITYFSNEKKLIKFAGVNPCVYESGTYSMTHTRLEKKGSKYLRKTLYQIIDSVIRFNPIFQAFYQKKISQGKSYRCAQGHCIRKLLRVIYKIISTGEGFDSAKLK

SEQ ID NO: 121858 - protein, 431 aa, unidentified
MNRSVEFLSVGIDVGADFSLMAFALPSQELLGKPYKIIHSSQRSLNGAVEKIKTLSQKYQLPARVFMESTGIYHYPLYHKMKDAGFDVFVLNPLVTHAGRDLNVRNIHNDKYDSQKIALLGLRPGLKTSLIPSDQVISMKVILREYYAVKKEISMYICRLKNQLRQAFPQFLPLFSKVNGVTAMAILCEYPNPESLLNAGEHAVADFMKSVSHNGPLKVQKKAAALIQAAQDARSFGHWNHGISILIRHYIEMIRLLDVRAKTLLAQAKALLAEQDSKTLAHQTELLQTIPGIGFLSALTLICELGDFSAFKRPKQLFSYFGLDPIVRQSGNYNRTNLKLSKRGSPFARRCIFVIALQSISLNIHKEPKNPVLRTFYEEKCMCKAKMTAIGAVMHKICNLIFAVLRNDAPFVLQTPEQHNAAYLSKTHSVA

SEQ ID NO: 121859 - protein, 370 aa, unidentified
MSVRRILAKTIDTDLEYEAIGIDLAKNCVSAALLTTDGEVVCIDRLDYSELEKSAQALSPTTFAMEPCTEMNYLVQKLEAWGHRCLVIGGKNVQNYVENHYSGQKTDLNDAQALAFLAQDKQLRTIKAKDIEQQKYASLTTLREQYIKQYRQTIVSLKGICQAWGLNISKGISGKAQLKDLIENHAAFPEELRESLVDMVTHAQTAQKALNKITKTLEVLAKNDKVCQLIQTIPGLGTICSCRLRATIGDIKRFKNPKDFPAYYGLVPRSIATGHNEKKGKITHRGDRTMRSLMVQGAGCVIRLATCGKLKSKQLTKWILKKQKEKMPWGKLVCAVAAKLLRIVRAILISSKPYNPKIAGVAKCSLSKGS

SEQ ID NO: 121860 - protein, 408 aa, unidentified
MRYYIGGDWADQQHAVWVEDERGQRVTARMVPHTAAGFSEWGRELDEWRAVGIELWSGIERPEGRVVDFLLDHGVVVYPVNPKALDRARDRVRQSRAKDDLFDAQVLASFVRTDHGHLTALKPSSDAAQELKLLTEDYHRQVRQQTRLVNQLTATLKAYSPRALEVAELTTALAREFLQAYPTPEAVAALSERQWHRWARAHRLSDARTAALWGILKQPQLPVPGHVVRAKARLMLALVGELAAVVDAVASYREAVEDFFACMPAAWARTLPGGESGVVVPTVYARLGDAPGRWKSFRHLQAQAGMVPVTEQSGKQQVVSFRFACDKQLRYAVDQLAWLSLQRSEWARAYYDQQRARGHRHRRALRALGAKWLKIIFVMWQRQVAYDEEHHLAMMARQALRRQEKKIA

SEQ ID NO: 121861 - protein, 374 aa, unidentified
MKNGTRFVGLDVHKDTIAVAVAEASGEVRSLGTIPNDGEAVRRLVRKLEGPEGLHACYEAGPCGYVLYWQLAKLGVRCDVVAPTLIPVMPGDRVKTDRRDAEKLARLLRGGDLTAVWVPDAEHEALRDLVRAREAAKADQRRARQRLLKFLLRRGCAPPQGMRSWTDKHHEWMMKLKFEQRALEETLTDYTTEADHQRDRVARLERAIDEAVDKVPVKMRAVIDALQSLRGVSKLTATTIVAEVGELSRFDRAAQLMGYSGAVPSEHSSGGKTRRGGITKTGNSHLRRVLIEAAWTYRHRPRIYGALRARQEGIEEPVKAIAWKAQHRLHRRYRRLAERGMPHQKVVTAVGRELLGFIWAVGVHVERQHLAPAS

SEQ ID NO: 121862 - protein, 351 aa, unidentified
MNLAKINTDYFCGIDLHKKTMYVCIMDRMGKIHFHQNMPCNFETFLLRVAPWHRHMAVGVEAMSNYYWLYDGCVEAGIPFYLGHPYYMKAIHGGKKKNDRLDSQKIADLMRANHLPIGYPYPKAMRPTRDLLRRRHRLVQLRSACYTRIQTTLSQNGLFNVDSSAVKSKKTRRQLVHRCDNPEIQAAIETDLDLIDFCDPKIRTLEHQIHTQAKHYHRRELNILLSIPGVGVILALTILYEIGTIDRFPSVQNFSSYARLVKCDRTSARKKAGGGNQKIGNPYLKWAFGEIITQAQTTSAVIAKFYQRLQSKFGSARARSIIAHRFGVAVYFMLKNKTVFDENLFVKTTMK

SEQ ID NO: 121863 - protein, 317 aa, unidentified
MTNVTFPQLIQRGCGIDVHLKVVVATIDGVGIHKETRSFNTFTSCLTEMKEWLLANGITHVAMESTGVYWKPVMRVLEEDIPNVWIVNARHIKNVPGHKTDKMDSEWICKLLLAGLLKPSYIPPKEQRQLRDLTRYRNKLIQTIAAEKNRMMRVLEDCNIKLSSVVANTSGVTATALIDMLCEGRKLTMADIESVYHKKLSASPQELLEACTGFVEEHHVYMLQMIRKSIAQTQGLVDDLSKRIKEILIKYDNVLELLKEIPGFNTKVVEDLASEIGLDMSAFPSEKHLASWAGICPGNNESAGKKKAEESLTVTNK

SEQ ID NO: 121864 - protein, 274 aa, unidentified
MDNIVGIDVSKDRLDVALAASDTAFFVENSHAGIDDLAQRLKGVNADIVALEATGGFETLAVAKLSAAGFAVIVVNPAQVRAYANAIGRRAKTDAVDAAVIAAFVSATKPQIRPLRDQQTQLLSALVDRRRQIVQMIVAEENRLRMALEKATRKSIQRLLAALHREVDSIDAEMDDHIRKSPVWIASLAGLAPWTRQSGKWKGKSFIGGGRGKVRAVLFMAALVAARYNPVLKAFRDRLVQAGKPKIVAIVATMRKLLTMLNAIIRDTKPWQNA

SEQ ID NO: 121865 - protein, 460 aa, unidentified
MNRKRSKPRVDRTLPMMHPNAAAIDVGATIHMAAVRADRAPEPVRSFGTFTTDLHRLVDWFTECGVETVVMESTSVYWIPIFELLDARGFTVFLVNARDAKHVPGRKTDVSDAQWLQRLHSYGLLRASFRPKGQIAELRAYVRQRERLLEYAASHIQHMQKALTEMNLQLHHVVADITGSTGLRIIRAILAGERDPEVLACLRHYSCHSSAETIAKALTGSYRTEHLFALEQALALYDAYHEKASACDVRIEAVLKELSIHRGRDVGSVPPASRRQHRTDQANALAFDVRAALFALLGKDITRIDGLGPYLSLKLIAECGDDLSSWPSAKHFTSWLGLAPSNKVSGGKMLSSRTRRSGGRAAALLRLAAVTVGRTDTALGAFYRRLSARIGKAKAVTATARKVAVLFYNAVRHGMEYVDPGASSYETRYRTRVINNLHRRAKAFGFVLQPLELKADAVVS

SEQ ID NO: 121866 - protein, 448 aa, unidentified
MDVLQLDVEDEEEVLARVAAIDVAKATGMVCTRVPHENSPGRRVTKVWQVSATTNAIIDLADHLVCAGIERVVVESTSDYWRPFFYLLEARGVRVWLVNARDVKNVPGRPKTDKLDAIWLAKLNERGMLRPSFVPPVQIRHLRDYTRLRLDLTTERSRHAQRLEKLLEDALIKISTVATDIMGVSGRAMIEALIAGQRDPHALADLAKGRMRVKHDALVQALTGQFDHHHGELAQILLDQVDALSAQIDHLTARIDELIAAIPAAQGVDADGTTGPHAGTGPDAAVLPAIARLDEVPGIGARAAQIIIAEIGLDMNQFPTAGHLASWAKLCPRANQSGAKNRSGATGKGNRYLKGVLGEVAAAAAKTNTFLGHRYRRLVKRCGKLKALVAVARSILVIIWHLLSDPASRFHDLGPDFYDNRLGPERTKRNHIRQLEALGYKVTLEPAA

SEQ ID NO: 121867 - protein, 338 aa, unidentified
MNIVFLGIDLAKNVFQLCGLSQAGKPVYTKRTGRKELLQTLANIPACLIGIEASTGAFYWQREFEKLGHKVKVISPQYVKPFVRGQKNDGNDAQAIAVALMQPTMQFVPPKSPEQQDIQALHRARQRIVNHRTATVCQIRGLLLDRGIPIGSAVSRARRAIPLILEDAENGLSSRMRRTIAELYDLFNDLKRRIHFFDKEIETVFRQSEACQRIAKVKGIGPKTATAVVAAIGKGTEFKNGRHFAAWLGLVPRQHSSGDRQVLMNMTKKGDKHLRTLFIHGARAVVRVATNNNDGHMNQWVNQLKERRGFNKTTVAVANKNARIIWSMLRNDTGYQVV

SEQ ID NO: 121868 - protein, 342 aa, unidentified
MKDSIYDHYIAIDWSIKNMAIARMTKKSNKITVIDVDSDIEDLQAYLKNLRGTKILTIEETTTSQWLYTELREYVDRIIICDPNRNKLLNEGAKTDKIDASKLVQLLKAGLIKEVYHSTNKFLYLRRIVSGYEDLIKAGVRLKNQRYSLLRVCGKSGNEKIGSRFGGQGEQFVLECLDRQIEAYEKDKQGYEMQFTKLARSYSEIKHQKSLPGIGVINAVKIVARVVTPYRFPDKGHYLSYTGLIKLAKISGGRSYGKRNPRYSRQLKSVYKSGVLAAIGGNNPINDYYNSLIQDGYAQHNARQKACRRLAILSLGVFKSGKRYQPYRRNHVKGAKEGTSSL

SEQ ID NO: 121869 - protein, 461 aa, unidentified
MSSKKPEGKRHKSVSTKMEWKALEVVHPDAAGIDIGGSEHWVAVSPERDPEPVRCFGCFTADLREMARWLVVKGVRSVAMQSTGVYGMPAFEVLQQHGLEVFLVNARHTKNVPGRKSDVQECQWLLKLHSFGLLNNSFQPSDEIRIARTLWRQRGNLVAEASSVIQRMQKVLIEMNIQLSTVLSDISGLSGMSIIGAILAGERDPWTLAALVEPEVQATPEEIAKGLEGNWRKELLFVLRQEVELYRIYQNKIRNCDRELRKHLQSFASVVDLKKQPIGPQPKHKKVAKNAPSFDLRSELYRITGIDWSQVNGINVLTAQTVIAECGADLSGFPSEQQFTSWLGLVPTNEQSGGKILKRRTRKVVNRAATAFRQAATTLLRSQSYLGAQYRRLRTRLGAPKAITAMARKLACRFYRLIKHGQQYVDKGNEYYEAKYRDQQIRALAKRAQKLGVQVVLPALA

SEQ ID NO: 121870 - protein, 381 aa, unidentified
MVWTASPGGIKVPRTWSIGRPRMGRPSVKKATLKFARVGIDLAKNYFQIHGLPADGGPAVTRKVRRCKFLEFFEGLAPCEIGMEACGSAHYWARELSKLGHKVVLMPPIYVKPYVKRGKNDAVDAGACCEAMTRPTMRFVPIKTAEQQATLALHKTRELFTKQRTMSINALRGVLSEFGLVVAKGASHVCELILLAQADATLPEAAKQAVAVLGRQIDALTKEINALEKKIVQTARASEPYALLVSIPGVGPIIASAVMALAPDAKQFLSGRDFAAWLGLTPRQNSTGGKDRLGSITKQGNRYLRKLLVLASTSLLRIVGSRTGALSEWILGLLAKKSRRLTTVALANKLARIIWAVMSTGEFFRQEIFLRVEKTAAVVAA

SEQ ID NO: 121871 - protein, 299 aa, unidentified
MKQVNQIGVDVDSEALVSMMQRGGQRLPLARFANTAAGHKKFIRWATKGGHRARVCLEATGIYSLEFALALHHAKNVEVMVVNPRAIKDFVRACMQRAKTDAVDAGGILDYLERMPFVAWQPPAPEILELQAINRRIVQLNTELTREKNRRHASEFAGASANAIANDIEVNMHHLERRLERMNQSGLNLVRGVPALATKLAHLVSTKGIGEASAMRLLAELLVLPDDLAAPQWVAHAGLDPRPYESGTSVHRPRRISKVGNRHLHCCTPFGACSNTIRISTAINSSISPQKPLDRKESI

SEQ ID NO: 121872 - protein, 320 aa, unidentified
MDTTLAVVPQYVGIDVAKAHLDWVVGPTASERGDYTAAMLTQLVTRLQALPAVHVIVEATGGLEAPLLAALWAAKIPVTRVNPQRVREFAKASGRLAKTDRLDARLLAQFGAALQPAATPPPSATGQALAALLERRRQLLEMRTMEQNRRLSAPPALHERIDKHLAWLDTEIAALEQELSTGIQQDPAWAEKEAVIDSAPGVGTITAHTVLIGLPELGDLNSKQIAALVGVAPFNHDSGRLRGKRTIQGGRYAVRSVLYMATLSATRYNPVIRTFYERLLAAGKAKKVAIVACMRKLLVILNAMVRDMQPWNPTAGHTRT

SEQ ID NO: 121873 - protein, 340 aa, unidentified
MGEITTIGLDLAKNIFQVHGVDETGTAVLIKRLRRSQVIAFFAGLPPCLVGMEACATAHHWARELTKLGHEVRLMPPQYVKAYVKRNKNDAADAAAICEAVKRPSMRFVPAKTIEQQSALLMHRARDLLIRQRTMLVNALRGHMAEFGLIEAQGLHKVAGLIAVVMDDRDERIPQMARQALKMITGQINELQTRIAILEKQVLAWHKNNPVSQRLATIPGIGPIIATAIAATVPDPNVFRSGREFAAWLGLVPRQSSTGGKARLGGISKRGDGYLRRLLVNSAHTVLLCSKAAKVDPWLISLRGRKPRLVVAVALANKTARVAWAVMSRQDTYRCAAVAA

SEQ ID NO: 121874 - protein, 388 aa, unidentified
MLHHPTDGLTAIRTHIGAIFVSLELSRSNWLVTSLSPGQGEKMSKHSLGAGDVVGLMNLFADLRRKAQARTGESYPIITIQEAGLDGFWLHRVLQQNGIESHVVDPASIAMPRRRRRAKTDRIDGQTLLRALLAYKRGEPRVCAMVVAPSPEEEDRRRICRERQSLIAERIRHVNRIKGLLFAQGISDYAPLRRDRRARLETLRTGDGRELPSHLKAQIGRELDRIELLLEQIEAVETERDALLAAARKPASQAAAPDPVAMLLALKGLGANFAAVLWSEAFYRPFSNRRQIAAYAGLAATPWQSGGIRHEQGVSKAGNPRLRTTMIQLAWLWIRHQPQSALTRWFKQKSPQGRKRAIVALARKLLVALWKYVTQGVVIEGAVMKPAA

SEQ ID NO: 121875 - protein, 410 aa, unidentified
MTSDVRYYIGVDWADRDHAVWVEDEHGLKVTAHTVTQTAEGWATWGRWLHERRAEGTELWAGIEKPEGRVVEFLLDHGVIVYPINPRAIHKARDRFRTSGAKSDQFDARVIATFVRTDHAHLRPLAPNSEATQELKLLTRDYQRLVRQQTRLLNQLTATLKEYFPLALELFDDLTSAAAREFLQQYPTPDVARTLTAPQWRRWARAHRLSEARTTARWETLQAPPLPIPPGVVRAKARLVGALLRQLTPTLSAVEEYRAEIDRFFATVPAAEWARTLPAGRSGTTLPTLWAELGDAPGRWQSWQHLQAQAGSVPVTTASGQSKAVGFRFACNAQLRAAVQQLAFLSLQRSDWARAYYTACRKRGHQHHHALRALGAKWLKIIFVMWSRHVPYDETHHLATIARQRMRQAA

SEQ ID NO: 121876 - protein, 317 aa, unidentified
MSAPAASFVGIDVSKQQLDIAVRPRRETWTVAHNEAGLSALVTRLRAHAPTLIVLEATGGLEVALAGALAAAALPVAVVNPRQVRDFARSTGTLAKTDRLDAQMLAQFAEAVRPEPRPLPDAQAQELTALLQRRRQLVEMLTAEKNRLTMASQRIRPQLQAHIEWLHKQIAQFDEDLRQLLRSSPLWREKDDLLRSTPGVGPVLATTLVAALPELGTLSRRQIAALVGVAPLNRDSGTLRGRRTVWGGRAQVRAVLYMSTVVAVRHNPVLTAFYQRLRAAGKAPKLALTACMRKLLTILNAMLKHHTRWAPVMAQHA

SEQ ID NO: 121877 - protein, 323 aa, unidentified
MLQFVGIDVSAKKLEVAAQKQFEVANTAEGHKKIVRYLTRKGRTARVCMEATGNYGLDLALALQRAEGVEVMLVNPRAAHHFAKAMMKRSKTDPVDARVLREYAQRMDFHPWTPPAKELLELRALARRTVALSGMVTQEKNRLHAAESTSELAFIRHDIEVNIRHLKRRLEELEKQQRRLIERNVQLRDAIRHLTSTKGIAMTSAVQIYGEICVLPADMTPRQLTAHAGLDPRHFESGTLVGKTRISKRGNKYLRRALYMPVLSGVQHDPHMKAFYEKLVNNGKAKLQAQVAVMRKLLHSIHGMLRHSEDFNGQKFYALPESP

SEQ ID NO: 121878 - protein, 381 aa, unidentified
MDYFAGLDVSVKDTSVCIVDGTGKIAREVKVASEPAALLAVLTGSSYRFKRIGLEAGPLSQWLFSALAEAGLPVICVETRHMRAVLKAQINKTDRNDARGIAQMMRVGLYRPVHVKTLRSQKLRMLLTHRKLLQAKVIAVENDLRATLRNFGLKVGVVGTVKFEAHIKELVESFPDLVALVEPLLVVCRVLREQIAILHRRVLATVRDDKVCRRLMTVPGVGPVVALTYRATVDVPARFRKSKSVGAVFGLTPARDQSGERDRPGAISRCGDEMMRTTLYEAAQVMLLRSAKWSWLKAWAMKIARHRGMKKAIVALARRLAVIGRRSGRENREIRRHILSGRQSIFRGLFLPPRSETARNGRLAHSRVFLGSVEREFCRRP

SEQ ID NO: 121879 - protein, 351 aa, unidentified
MNIIGCDLHTRFQQIAMLDTETGEIVGRRLEHETGEAQRFYAALAAPARVGIEATGYARWFERMLAEQGHELWIGDASAIRAARVRQQKTDVRDALLLLDLLVAGRFPKIWVSSPAERDLWQLLRHRDKLVRLRTSVRNQLHAQAMGEGVCRKKKLWSKRGRQELQALPLGEWANRRRQELLELLGRFDASVQELDQAVAQQAERHPAAVRLMQQPGVGPITGLALALAVGPIERFRNSRKLVSYLGLNPRESSSGGKQRLGAISKQGNSLVRWLLVEAAQTASRKDEGLRRVYHRLAHRRGRAVAKVAIARKLAVRLYWQLRLAGAQPSPPTRTQGSSPNPVVGATRPMP

SEQ ID NO: 121880 - protein, 388 aa, unidentified
MARESAQNTYPIALDYDSTLVLAIELSNTSWVLAAQVPGLQRVKAKQSIESTAEALLAAIDGYRDRARAAGRTVERVVATYEASWSGFWLARWLLRRGVETYVVQPSSVPVDRRARRAKSDGIDAELLLRTLLAWLRGEPRVCSMVPIPDEADEDERRRVREREDLVAERVSLVNRIDAVLATLGVRDYNPLRRDRRQCLEALCTALGDPLPPHARSRILRMLDRLELVCAQIAELERERDAVLEEEAPDKAEEMIQQLAGLRGIGVQSATVLVREAFVREFANGKALGSYAGLTATPFSSGGTEREQGIDKAGNRRLRTVMIELAWLWQRYQPGSAQVIWFRERVGGTGKRMRKVMVVAMARRLLIALWRYATQGVVPEGAVMKSVP

SEQ ID NO: 121881 - protein, 482 aa, unidentified
MKPKKNNASKIKTHPTAKANTRGGNKKTLLPESLRQVNLNAAGIDVHPTELWVAVPSDRDTKPVRRFGTFTHDLEQMADWLVGCGLTTVAMESTGVYWIPPFQVLERRGLDMKLVNARHVKNVTGRKGDISDCQWLQQLHTFGLLRNSFRPTDQVCVLRSYLRLRDQLLRARSRQILHLQKALHQMNVQLHHVLSDITGASGQAILRAIVEGQRDPVKLAAMVDKRVRAPQDKIARALAGDYREEHLFALQIALELYDEYTRKITACDERILEYLSSLESKVDLKEKPLPAPKPSLAKKAKSNPTSQGALEVRAQIYRVSGVDLTAIEGIGAQTAQILMSELGWDLSRFPSEKHFTSWLALCPDHRISAGKILSRQTRHAPNRAANALRLAASTLEQSPSALGNYFRRMKGKLGATSAITATAHKLARIVYRLIKHGEAYVALGQHEEEQRYRERRLYNLRRNAARLGFQLIERQGHAKPVS

SEQ ID NO: 121882 - protein, 355 aa, unidentified
MVGIGVGMVVVGVDAHKRTHTLVAVDQVGRKLGERTVASTSDGHLQAVRWAAQWPQPQVTFALEDCRHLTRRLEADLLRAGHRVVRVPTRLMATARRSGRQPGKSDPIDALAVAQAALREPDLPAAHLDGPTRQVKLLCDYRADLVVERTMLCNRLRWHLHELDPELEVPSRGLRRYKVIDELAAHLAGIDGTVAQIARELLGRCRELTVRINQLERDLRDLVRVLAPGLLAIPGCGVLSAATILGETAGAARFRSRHAFARFNGTAPIPVWSGNSVRVRLNRGGNRTVNWALHMIAVTQARGVGPGKAYVERLLGAGKTHTEALRLLRRRLSDVVFRVLLADEHRQIESVPQAA

SEQ ID NO: 121883 - protein, 409 aa, unidentified
MDVVITRCAGLDVHQATVVATVRVPDDQGGRRVVTDTFGTMTADLLALRDWLHAYGVTHVALESTGVYWKPVYYMLEDAFTLLLINMQELKRVPGRKTDVKDSEWLAQLLECGLLRPSFVPPPPIRELRDLTRYRVQQVRDRSQEVNRLCKVLEDAGLKLTTVITNVMGKSGRAMLQALVDGTTDPAVLAELARGKLRKKLPELRRALQGRFRPHHAFLIEQIFAKIDFLDEALERLTTEIDQRLVPFEPMLTAQDTIPGVDRIGAISIVAETGGDMTRFLTAGHLCSWGAMCPGQNESAGKRRSGKTRKGNRYLRGTLIQAGLGAMRKNGSALQARYHRVARHRGHKKAVVAVGHQILEIAFYIMRDGVTYDELGADYFNRRHAEKAVRRHVRQLEALGFHVTIEKAA

SEQ ID NO: 121884 - protein, 356 aa, unidentified
MSRDIKYIGMDVHKEAVVIAVLNNSGKLVMESIVETKASSLLQFIHGLQGELHVTWEEGTWAAWLYDLLKPHVHQVLVCDPRRNALLKEGNKSDKIDAQKLANLLRTGMLRPVYHGEHGLRTLRELARSYHTISQDLIRVMNRIKALYRGWGIACGGTQVYAPRYREEWLGKIEHVGVRRRAELLYQQLGDLQTLRRTLRPELLAESRKHKATKLLRQIPCIGPIRAARLLALMQTPHRFRSKRQLWTYSGLGIETRDSAQYCFVRGKLQRVKKPQQIRGLNRNHNHEMKDIFKGAATRASCGVGPLRGFYVALLDKGMKPEMARLTLARKIAAIALTLWKKEERFDAEELKTQAA

SEQ ID NO: 121885 - protein, 387 aa, unidentified
METVNPICDAQSSVSAEAATLFISLELSRARWLVTSLSPGSSKISRHFVVGGDSRDLLRLLADLRAKAERNMGATVKIVTIQEIGFDGFWIHRILASNAIESHVVEAASIAVPRRRRRAKTDTIDGELLLRTLMAFKRGEPRVCAMVVVPSPDEEDQRRLSRERKTMIKERIEHINRIKGLMACQGITGFEPMRANAQEKLGELRTGDGRAIPERMKAEIRRELDRLALLRQQIADVETERDALLHTEEAPNGSPGAQLLKLRGIGPEFASVIWQEGLYRRFANRRQLAAYAGLAPSPWRSGDMKREQGISKSGNARLRTTMIEAAWLWLRHQPGSALSRWFQERVRADRGRLRRVSIVALARKLLIAFWRFTSHGEIPEGASLKAA

SEQ ID NO: 121886 - protein, 487 aa, unidentified
MHPRTTNKFLETFDVYRFSFESAGALALDNEYSGFAVLPAHYIAFAERKRARPWTSIYHFGRYDVKPLATQQFTAYVGIDWADTKHDVCLQAPGAESREFDCIRHQLADIDQWAQSLHQRFGGAIAVALELAKGPIVYALQKYDFFVLFPINPLTLAKYREAFMPSRAKDDPTDAELALDLLMRHPERFTPLRPQSVQMRTLLSLTEHRRELVGDKTRFTNRLTNTLKQYYPHALDWFEQHDTLLFCDFLTRWPTFTQVKRARRASLEAFFYAHNGRRPNVISARLDAIKAAIPLTQDMGVIAPCRLQVLVLIEQLRTTLQAIDRFDREIAQLAPRLPDYCLFQDLPGAGPHLAPRLLAAFGEDRQRYQHADELQKYAGIAPVTERSGKKSWVHWRLRCPTFLRQTFVEWAGQTINKSFWAGAYYRQQRAKGSSYQAAVRSLAFKWIRILYRCWQTRTPYDESKYLNALRKRGSPLLKHLELDAQSA

SEQ ID NO: 121887 - protein, 422 aa, unidentified
MEIIKTKKVRAVNSQTLIVTVDLGKETNTGYFRCPDRSESKPFEFRNNRNDFEKMWLLVTKTQRAKNLKNIIVGFESTGCYGEPLQHFLKDKPVKLVQVNPLHTKRLKELQGNSPAKTDQKDPKVIADIIELGHGLTVIIPEGAAAELRRLTQARERAVKRRTALLNQLQDLVFISFPEFLQVMKGVKTKSAQHVLRHFKTAQDIVEQGLEALASTLRRVSRGQLGMAKAEALYEGAMQSVGIREGRIAVTLEIQEMLCSIEACDSLVNLLEREMSHRLDEIPYSYLILSMKGIGKVTAAGLIGEVGDFNNFDCAKELLKHAGLDLFEISSGRHKGNKRISKRGRPQLRKLLYFAALGTVRKGGVMHEHYQRHLQKGMKRIKALVAIARKLLCVIFALVRDQSEFVEGYQEYRSSQLLKRAA

SEQ ID NO: 121888 - protein, 428 aa, unidentified
MHRRRRGRLRVLEVKMEAIIEKSCGLDVHQGMIVACLLVGRADQKPRKEVRTFGTMTKDLKDLRRWLQSEGCTHVGMESTGIYWMPVYAILEGGFQLVVGNATHIKNVPGRKTDVKDSEWIADLLRHGLIKSSFVPPKPLRDLRDLLRYRRKLVESQTAERNRLLRLLETANIKLATVASDVFGVSGRRMLRALVDGDMSPEEMAELAKGRLRDKKDQLALALEGRVEEHHRFMLAIQIERLEQVETAIRKVDDRIDVRIEPYREQHNRLVQIPGVDWVGAAVIIAELGVDMSVFPTVRHAAAWAGVCPGNNESAGKRKGQPGRKGNVHLTTALVQAAVCASRKKGTYLSQKYWRLKARRGPLRAAMAVGHKILIAAYAILSAGVEYRDLGAAYLDKRTTAQTRNTLVRRLESLGYRVILEPREAPAM

SEQ ID NO: 121889 - protein, 339 aa, unidentified
MEHVAIDLGARKSQICVRSADGQILEERRWPTKDLDTYLAARPTSRVIVETCAEAFCVADAARKLGHETRVVPATLVKTLGVGARRLKTDLRDARALSEVSSRIDLPSVHIPRTESRDRKTMCGMREALIGARTKIINTVRGWLRSRGRRIERGGKASLRQRVEVAWEGQLPSYVDRQLKLIEVLNTQIAEADAEVKSWATADETCTRLMTVPGVGPLTALRFVAALDDVTRFESAHQVESYLGLVPGESSSSERQQRLSITKAGPRALRWVLVQAAWALHLRCRRPEAIPLQLWAHRIEQRRGRRTAIIALARKLAGILFALWRDGSVYEGSRGAKMI

SEQ ID NO: 121890 - protein, 342 aa, unidentified
MSEVTIIGIDLAKRVFQLHGARHNGSVVFRKKLSRAQLLAFVAQHPRCLVAMEACATAHGWGREFEKLGHDVRLIPPVYVKPFVKRQKNDMADAEAIVEAALRPTMRFVAVKTEDQQARAMLFRTRQIFVGQRTQMINALRGHLAEHGLVAARGPAHLKRLADAIGDSDTALPSEVRELGQMYLEQIEALNARIAELDGKMKRAAKDADVARRAQTMPGVGPITALAIETFAPDLATFRRGRDFAAWLGLVPKQHSTGGKARLGKTSKMGQRDIRTLLVSGAMAVLQAVERFDTPNNGWLKRLLTRKPRMVVAIALANKMARALWAMLTKQEDYRNPVAAMA

SEQ ID NO: 121891 - protein, 407 aa, unidentified
MLFVGDDWAGDHHDVCLQDAQGRVLAARRLPEGVAGITRLHELVAGHLDGDDPSQVVVAIETDRGPWVRALVAAGYRVYAVNPKQAARHREVVAVSGKKDGTFDAATLADMGRTRRHQLREVAADSDEAEAVKVAARAHQKLVWERTRHALRMRSALREYFPAALEAYGPLTLTGTDTLELLAKAPEPAAAARLTIAQISAALKRARRRDVAGKARQIRAALREQHLGQPEIVTEACAAGVRASAAVIAVLNEQVKVMEARVESFFRRHPDAGVYLSQPGIGVITGARMLGEFGDAPGRYAGAKARRNYAGTSPLTIASGKKKTVHARFIHNDHLVAAMHDQAFGAISASPGARAYYDELRAREIDHTDALRRVANRQAGILHGCLKTGTAYDEHTAWGHRSQPAAA

SEQ ID NO: 121892 - protein, 342 aa, unidentified
MKFYCGIDLSARDCHVCVIDEQLKVMVQQKLRNELPKICRLLGPYKANLKIVVESTFNWYWLIDGLQAAGFEVVLAHTLGLYLITGAKVKTDRRDAYALAKLLLVGVVPAAYIYPVETRPVRDLLRRRLHLVQVRAGEYGSLRRLLLRQGILSSKQQEIKTATETELEQWFAHPLVRLHASQELQRIELYSQQIAELEKTILLLAKTEQSYELLLKLPGVGQTIALTILYEVGELTRFANVKVFSSYCRVVPGIAQSGNVSRRGRASKQGNHYLKAAFSQAAVHAVRCYPKVRRYYERQLKRHQGRGRQMICYNIIAHKLAQAAFHVLKEQTEYREELLFGR

SEQ ID NO: 121893 - protein, 331 aa, unidentified
MHYSHYIGVDISKNTLDAAIYAAEMRRSDTKHLTNDKAGLKELVAWAKAAGAKPKDMLICAEHTGVYGNELQLFCEKKGIAICLESPLQIKRSMGLVRGKDDQIDAIRIAQYAYDHKDKLKLFHRPSGNIITLANLLRERRLYVRQKATLMTQQAEIGSYENATSRNRRERLIDRYAAAVKSVEKQMMEIIKGDDTLKKTYDLISSVVGIGLITAIDTIVYTNNFQNFETPRQYASFIGVAPFDHTSGTSVNGRTRVSQFCRKQQKVSITMAARSAIVNDPWMKNYYHRKMKEKGEQRNQHGVVLNAVKFKLVLRMFSVVKSGTPYKVMKY

SEQ ID NO: 121894 - protein, 350 aa, unidentified
MNILAMDLGKNNTVICNYDSETGKHKFTKLKTLPQEIHDMLVENAPDRVVFEIGALTGWVYDIAAALKFEVQVANTIHQAWRWKNVKKKNDRTDALKLAQLSAMNQLSLVHIPVNEVRQKRALIQYRQNLVKRRTQIKNNIRSILERQGCHKVLPSGKNGWSKNSVEMLNKMSIDFNLCNMDQLWKGELNLELKQLEAIEKCINETEKRLDKLAEGDENIKVLRSINGVGARLAETVAAFVDEPGRFKTGKQVGSYVGLTPRQYQSGQMDHQGKISGAGNKVLRSLLVEVCWLGLRHNKWMNETYHRILRGSKSRKKIAITAVARKLLVRCWAMMRDKKNWCDVEVKKVA

SEQ ID NO: 121895 - protein, 460 aa, unidentified
MNPKRSKSRNGGKMPMVHPNAAAIDVGATMHMAAVRADRAPEPVRSFGTFTADLHRLVDWFTECGVETVVMESTSVYWIPIFELLDARGFTVFLVNARDAKHVPGRKTDVSDAQWLQRLHSFGLLRASFRPKGQIAELRAYVRQRERLLEYAASHIQHMQKALTEMNLQLHHVVADITGATGLRIIRAILAGERDPEALACLRHYSCHSSAETIAKALTGSYRAEHLFALEQALALYDAYHEKASACDARIEAVLKDLIVHRGHGHGSAPRASRRRNRTNQANALAFDVREALFALLGKDITTIGGLGPYLSLKLIAECGDDLSSWPSAKHFTSWLGLAPSNKVSGGKMLSSRTRRSGGRAAALLRLAAVTVGGTDTALGAFYRRLSARIGKAKAVTATARKIAVLFYNAVRYGMDYVDPGASSYETRYRTRVVNNLHRRAKAFGFVLQPLEPKVGAAVS

SEQ ID NO: 121896 - protein, 346 aa, unidentified
MDQIIRIGMDTSKQIFQLHGVDPCERVVLRRKLRRKEVLGFFAALAPTVVGIEACGGSHYWARELTRLGHTVRLLAPQYVKPYVKRGKNDAADAAALCEAMSRPTMRFVPVKSAESQAALMLAGLRERLVRNRVQLANAIRGYAAEFGLVAAKGRAKLEPLLVRLQTDATVPALARQLFAVHAREYAELDAQLAAIDTKLMEWHRANEPSRRLARIPGVGPVIATLLAMKTPDPHAFRSGRQFAAWIGLTPKDHSTAGKLRLGVITRAGDETLRSLLVVGATAVIWQVRRGTGRAASPWLIALLQRKPPKLAAVALANKIARIAWKLMTTGESYDPRRCCATPAAA

SEQ ID NO: 121897 - protein, 337 aa, unidentified
MMIVGCDFHPSFQQVAVLDTESGELQAHKLMHATGEAEQFYRRLIAPSLIGMESVGNSQWFVQLIEQLGHEIWIGDAAQIRASYMRKQKTDKRDAAHILKLLAEGRFPRIWVPDAEMRDQRQLLIHRHKLVQIRTRVKNELQHLMMNRGVQKKHKLWSVRGRAELEQLPLQHWAGRRREDLLCLLKMLDQQIEHMDQAVSVAAQQNDQVRLLMTQPGVGPVTALAFVLTIGDVKRFARSKQVASYLGLIPSESSSGGKQRMGAISKQGNRLLRVLLVEAANSAVRFDPEFRKEYAHRCHQKHRAIAKVAAARKLAVRLYWMLRTQTPYPKVVTSRAA

SEQ ID NO: 121898 - protein, 429 aa, unidentified
MNFRPIAGIDVGKFFSEMAILSPSNEVIARMKIRHDSSTDVERAVELLKKTEKDFDSRPFVVMESTGHYHKILFHSLYKAGFEVSVINPIQTDSIKNIGIRKVKNDKVDARKIALLYRFQELKTTNIPDEDIECLRSLCRQYYKLSDELTAYKNRLMGIVDQLMLNFKDVFPNIFSKAALAVLEKYPAPVHILKANRNKLIALIQKNSRRSLKWATAKYELLNSKAKEFAPLSISNSSNVAMLGVYISMIKTLEENLEKVLKAIRSLIIEDMAKDMPMLALTLELLQSIPGIGLISAVTILAEIGDFSAFSKPGKLVAYFGIDPSVMQSGEFTGTQNKMSKRGSRLLRRVLFTIALANIRTKRDKTAYNPVLMEYYKNKCQSKPKKVALGAVMRKLVNYIFAVLRDRKPYELRSPQEHAQMLAAKHTAA

SEQ ID NO: 121899 - protein, 408 aa, unidentified
MEVLHERCAGLDVHMEVVVACARWPVGAVVHYETGEFATTTTGLLKLADWLDEHGCTHVGMEATGVYWKPVWHVLEGRVEQVLANAAHVRNVPGRKSDVSDARWLADLLAHGLIRASFVPPTPIQALRDLTRTRKQLVREVSQHTLRIQKTLEDANIKITGVVSEILGTSGRAILRALIAGETDPEKLLACTTGKLKAPRERLVEGLRGLVSDHHRFLLRLHLDQIQAIERGIAKVERQIARLIRPFRADVERLTTMPGVSDTVAQAIVAEIGLDMTRFPTAGHLVSWAGLCPRMDESAGKRRSTRLRKGAPWLKTMLVTAAWAAACAKGSYFRAQFQRLKARRGAKKAVVAVAASMLTAAYFMLRDGKPFHDLGADYFDKRDRSNVVRRLKRRLEALGYQVEVKPAA

SEQ ID NO: 121900 - protein, 455 aa, unidentified
MRQQQPRVLRSQRKIIGHFDIVNPKGAGIDAGAEHHLVSLPEECSNEPVRTFATFTKDLHALADWLSECGITTVAIEATGVYWIPLYEILEEQGLDPKLIDSRSIERRSKKTDVLDCQWIRQLHTYGLLDPAFRPPAEMLAVRAYTRQRKMLIECAADHVRHIQKALDLMNVKLHLVVSDTVGVTGLRILRKILDGERDVSKLAALREPSCSASEQTFVNALIGNYRKEHLFALQQAVELFDIYQEKIAACDGQLAAVLAAFEKRSDPAKKIAKVRASRRKNQPHFDARTLLYDLAGVDLTAIHGFDSSTVLTIVSETGTDMSPWNSGKHFAAWLSLSPNNRITGGKPIRKKGPVIRPNRAAQAFRIAAQTLERAQCALGAFFRRIQVRCGRQTAIKATAHKLALVFYSMLKTKTEYRDAGVAYYELRYRDNLVKSLSKKAASLGFTLAPLQEVH

SEQ ID NO: 121901 - protein, 381 aa, unidentified
MTTPATRTAYGTTPAGTLWMALELSEKNWKLGFTTGPAQKPRERTVTALAQERVLDEITQAKRRLGLPEMAAVVSCYEAGREGFWLHRFLEAHGITNHVVDSSAIEVSRRQRRAKSDGLDVRKLLSMLMRYEQGERQVWQVVHVPSVEAEDQRHLHRDLETLKRERARTTARIHGLLSSQGLRVTSLTKLPEQLDALRLWDGSPLPSGLRQRVLRVYAHHIFLSEQIAAVEAERRALLQTSTDASIDKIRQLMMLKGIGINGAWLLVMEFFGWRAFTNRREVGGLAGFTPTPYQSGESAREQGISKSGNRHVRWMTTELAWSWLRYQPDSALSVWFRERFGSGGKRLRRIGIVAVARKLLIALWRFLETGGLPEGAVLKEG

SEQ ID NO: 121902 - protein, 365 aa, unidentified
MQKISTMRRSGKNILQGQLTVGLDLGDRFSTYCVLNEAGEIVLEHKLTTTPEAMEQVFAPMPRSRIAMETGTHSPWVSRQLAALGHEVIVAHAQNVRLIAKSRRKDDRRDARTLARLVRIDPELLSPVQHRSAQAQLHLTEIRARAGLVSARTALVNAARGLVKSSGERLGKCGTQQFRRDLASGLRTGLREALEPLLREVEALNERIQEYERRIAKMAKERYPETALLKQVKGVGDLIATTYVLTIEDPHRFQKSRDAGCFVGLQPGRRNSGESAPQLHISKEGDEYLRTLLVQGAHYILGPFGEDSDLRRWGQKLAARGGKNAKKRAVVAVARKLAVLLHRLWVSEEVYEPLRNSQRATSAVA

SEQ ID NO: 121903 - protein, 403 aa, unidentified
MVFVGIDWAEAHHDICVVNEEGQVLAKRRVPEGLDGVGKLHALIAEHAEDPSRVVVGIEIDRGLLVGSLVAAGYQIYAINPLASSRYRDRHATSGAKSDPGDARVLADLVRTDRHKYRPLAGDSNLAEAVQILARAHQGLVWTRQRQVNQLRNALREFYPGALSAFDDLDAADAVAILERAPTPVRGRALSQAKIISALRHGGRERNLEAKAAQIQAQLRLPQLEAPALLVEAYGHSVAATVAVIKQLNLQIAALEQELAASFETHPDAEIYLSLPGLGVVLGARAMAEFGDDRTRFLHPKARKSYAGTAPITKASGTRKVVLARVARNRRLADACYQWAFSALTRSEGARHRYDVLRARGQTHHQALRALANRLVGILHGCLVNRQAYSERLAWSALVEVAA

SEQ ID NO: 121904 - protein, 348 aa, unidentified
MEKSQYWIGIDLHSRVVQVCVLDRAGETCHQARIRGAGLHQGLELVEELAKRFPRSRVAVEAVGCNRWFVAACREAGLCVTVVHAARLELKRSGRKTDRRDAYELARRLRLGDLDRNATSYHPTDEEYGLRQLLRRRHKFVQTRTNFVTQVRGMLRAHRIEQPGEIPRPKNLALLRAIRLQDENEAVALEALTDAVEALEASIRKLDKQLVRACRSHAGAAMLQTLPYVGPVTGLTLAAELGDVQRFRNSKAVASYAGLVPRVCESADRSFHGRLVPHGNRELRFVLGEWAVQLLARHPEVKLWAEPRLQRSPRNKVRIALARRLLIGVWHTLRTGEMFSMERCLASA

SEQ ID NO: 121905 - protein, 355 aa, unidentified
MEHKKYIGMDVHQATISLAVMDSAGKVGMESVIETKAATILEFFQGLRGNLVVTFEEGTSAAWLYDLLRPHVEKVVVCDPRKNALLKGGNKNDRVDARKLADLLRSGLLSPVYHGESGVRLLKELARSYLILTKDLTRVMNRIKGLYRSWAIPCAGQKVYSPRHRSAWLKQLTEAGVRRRAERLYQQLDDLQPLRREARQELLAESRKHPANALLRPIPWLGPVRVALLIALIQTPHRFRTKRQLWAYSGLALRTRVSGEYRITGGQLQRAKRPPALRGLNENHNHQLKEVFKSTATRASASAGPFGKFYAALLATGMKPSMARLTVARKIAAIVLTIWKKGGRFDPAHLKRQAA

SEQ ID NO: 121906 - protein, 346 aa, unidentified
MMVIGCDYHPSWQQICWLDTETGEIEEKKLDHASGEAERFYRQLSTPALIGMESTGNCQWFVEMATTAGHEVWIGDAAKIRASEVRQQKHDRRDAALILKLLVEGRFPRIWTPSGQEKDLRQLLIHRYKLVRIRVQVKNELQHLAMNQGVTKKHKLWSKAGEKVLRELPLKPWAGRRREDLCKVREMLNAQLDRLDQAVVDAAEKNEKARLLMTQPGVGPITSMAFVLTMGDVNRFQRGKQVASYLGLIPREYSSGGKQRLGSISKQGNRFMRMLLVEAAQSAVRCDPQMRSEYLHRCHKKAKGVAKVAAARKLAIRLYWMLRTNTKYPEVVRAESSSRVPVVSAS

SEQ ID NO: 121907 - protein, 371 aa, unidentified
MSELPAGTKPARLKVGVSPRPPWACKPGTELGAAPTFAVPNPDSRLGLSPHSQGRVMDEPSAVFVGIDVSKDHLDVHLRPTGETLCVPRDAKGLDSLAGHLNDVPVALVVLEATGGFEATVAAALAGVGLPLCVVNPRQIRDFARAMGRLAKTDTLDAEVIALFAERVRPQTRPLPQKERSHLAELVGRRRQIIEMIGMETNRRGQVIDKQLARRLDRHVVFLEKELAEVDRDIGQAIKTSPVWRETEALLKSVPGIGDVTARTLLAELPELGTIGRHQLAALVGVAPINRDSGLMRGRRTIAGGRTSVRNVLYMAALTAIRRGSPFRAFYDRLTSRGRPKKVALVAVMRKLLTTLNAIVRDQTPWQPLNA

SEQ ID NO: 121908 - protein, 344 aa, unidentified
MKITTIGIDLAKNVFQVHGVDERGKVVLKKQLRRDQMATFFVNLPPCLIGMEACGSAHHWARKLQGMGHTVRLMAPQFVKPYVKTNKNDAADAEAICEAVGRPNMRFVPVKNVEQQAVLALHRVRQGFVKARTAQANQIRGLLGEFGIIIPQGIGYIASRVPDLIEDASNDLPGTFRMLVQRLLDHLKELDRQVDELEAQIQAWHRSSELSCKLAQVPGIGPITASALVASIGDAKNFENGRQVAAWLGLVPRQHSSGGKSNLLGMSKRGDTYLRTLLIHGARSVIYRAGQRTESCQWINGVVNRRNKNVAAVALANKNARIVWALLAHERHYQAGYVRAVATS

SEQ ID NO: 121909 - protein, 423 aa, unidentified
MRNNAARKLKQVPKGYLVMGVDPHKKRHAAVAVTQDFTTHSKFKFNNSRKGFETALERARAEMMRTGSRGVIFAIETGGHYWRNLAYFLDERGIPFHFINQFTLKQRWEGKDLNRRKNDYRDSEVAAQLLCTGEFTDTKLQHGVYAELRAAYNAYRRLVKERTRITNLVKGLLDGLFPEFTQVFKDPCGLTALSVLSICPVPVVITKMTEEEFVNAIRAKHQGRLMKRKLCALHYAARTSIGIEAGAQSVSSEISFLVEKLRLIRRQTRRIDEALARLVDETEEGKYLLSIIGLNYISVAGLLAELGSFRSYRSAKQLIKMAGSNPTESESGGKRSAHTPMSKKGRPVLRYCAWTAVIPMLRFNPDFRVWAKELRERPAHANPLGGREIVGAALNRLLRLAFALVKKQTFYQVPQLEVAQAVI

SEQ ID NO: 121910 - protein, 458 aa, unidentified
MAKNTKKAKRSQAKAFTQEQIALLSINPNAAGIDIGSAEHWVAVPKGRAEHSVRKFGCFTADLHAMAVWLKLCGITTVAMESTGVYWIPPFQILESHGFEVKLVNARHVANVSGRKTDVSDCQWIQTLHTYGLLAGSFRPDNEMCVLRSYYRHRDNLVKSASSQILLMQKSLIQMNLQIHKVISDITGATGMRIIRAILAGERDAQILALMRAPGVKRTKEDIMKALQGDYRVEHLFTLNHAVELYDTYQEKIRQCDEKIELCLKGFDGQEICDDMPPSAKKGKNKNAFTLQTELYRITGVDFTAIDGLSALAVSIIISEVGFDYTAFPTEKHFASWLGLSPNNRITGGKIKKTSTKRVFNRAANMFRLAAQSLANSRCAIGAFYRRLRSRLGAPKAITATAHKLARIFYAMWKTKSTYNDVGADYYEKQYKERLIHNIKRKAKEFGFKLVPLMELAA

SEQ ID NO: 121911 - protein, 330 aa, unidentified
MSNLYWLGIDLSKATFYAALAPVGGAPDAWATLPNKEFPNSKEGIAALCAWLLEHGFEKKTAAGVCLEATGRLAWTFVAHLDDRLGPISIVNPARPVAYARSLGLRDKTDRIDACILALYGVANRPVPRDLPSPRLRELKELATHYCNERAELLACRNRLQEAYQSSFIRKQLAAKRRTLERRLEAIEAEMDKLIEQDPQMKADAQLIQTIPGVAEKTTRILLAQFGDLRQYTRNEIVALAGLYPKQFRSGTSVHRKPRLAKAGGARTRAALYMAALSARRYCPQLKRFNTRLLDTGKHNALVHGAIMRKLLLLIRTIVITQQPYDPNYA

SEQ ID NO: 121912 - protein, 394 aa, unidentified
MRLWVGFDVGKAFHWVCVLDDEGEVLLSRRVEAEERDIETCCEEIAALGRSDERLVATDLLGGPATLLEAVLLGRGERLFHLPGIAVNRARDGYRGESKSDARDARVIADQIRMRWRSLQEVRPREDAAAELRTLVAHRRGLVEDQARVITRLRALLLEVFPGLEAALDLSTDRALLATTRVATPSAARRLGASRLARWLKDRGIRRSEELAGKVVEAAKVQRRELPAAETKAALVSEMAAEVLRTRGRVATVDTRLEELMAAKPEAAVVRSMPGMGPLFTAEFLSEVGDSSRFASADALAAAAGLVPATRQSGDGSFQRRARRGNRRLKNLLYRSAFSCTVHHAPSRIYYLRKRAEGKAHHRAVIALARRRVNVLWAMLRDGELYRDPVAEAA

SEQ ID NO: 121913 - protein, 374 aa, unidentified
MNNSITYVAMDTHKKEHKAALHYPGDEEIVQFAVKNTVSDIRKMVNKIKNKAPANVEFCYEAGVCGFNLKRRIEALGCRCKVIAPSLTPVKPGDHIKTDRRDAVKLLSMFKADLLTEVYAPDEKQEAARELTRCRQSAQENLKRIRHQLLKFLTRHGYIYTDGDHWTQKHLRWLGGLEFDQPMLREVFDCYFTEMQHCIQRLSSLDRQVEKLAGSEPYCQIVGLLRCFHGIDTLTAITTVTEIFEFGRFSSPGEFMSYLGLTPSEDSSGEKTCKGSITKAGNKRIRKLLIEAGWHYRHPCNVTSKALKQRRKDQPQWVINIADRAGQRLRKRYWYLINRGKSPCVATVAIARELAGFIWSVFKEYEARNGKNVA

SEQ ID NO: 121914 - protein, 410 aa, unidentified
METVVERPAALDVHKEQVTACVRVPAQDGSREQHVAEFPTTVAGLLTLFDWLEAFGVTQVVMEATGVFWRPVWAILEDGFECVLVNARHVKQVPGRKTDVKDAEWLCQLAEAGLLRASFVPPKPIRALRNLTRYRKTQIQERAREANRLHKALEDTGIKLDCVASDILGKSGRAMLDALVNGTRDPEVLAELARGRMRSKIPALKEALEGRFDHLHAVWIGAILEHIDFLDGQIASLTEAIGEQIAPFEKAVELLCTIPGVQRRTAEVIIAEIGIDMSVFPTDKQLASWAGMCPGNDQSAGKRRSGKTRKGSKWLDWALEEAAMAAIRTKDVYLAAQYARLRPRRGHKKALGAVKHSILIACWHMLTTGELYNDLGGDYFRKRDPERITKRLIAQLEALGHHVTLEAAAA

SEQ ID NO: 121915 - protein, 355 aa, unidentified
MNSEKYIGLDVHQATIVVAVTDASGKLIMESILETEAATILQFFAGLRGTLSVTFEEGTWSAWLYDLLNPHVDKLVVCNPRKNALLKDGNKSDRIDACKLAELLRGNQLKPVYHGETGVRRLRELSRSYLTIVKDLSRVMNRLKAVYRSWAIPCAGRDVYYRRHRAQWLDKIREAGVRRRAERLYEQLDMLQHLRQQARRELLAESRKHAITARLRQIPYLGPIRTALAVALMQTPHRFRTKRQLWAYSGLALETRISAEYRMVEGQVRRSKKLLSIRGLNKDHNHDLKGLFKGAATMASVRPGPFQDFYQAALAKGIQPTMARLTLARKIAAITLTLWKKGENFDAEKLKSQAA

SEQ ID NO: 121916 - protein, 339 aa, unidentified
MMLTPVGIDIAKNVMQLHYVDQETGEIVNKPVKREQLLEHFANRAPCLIGMEACGGAHHWARELSKMGHQVKLLPAEFVKAFNIRNKNDAADARAIWFAVQQPSKPIAIKTEMQQAMLALHRARQQLVEFRTMQINGLRGMLAEFGEVMGRKRAGMVSAIPDVLARVAERLPAVLIDTLREQWNRILQLDEAIRGIERRMREWKKDDRAVKAISEIPGVGLLTATATVAMMGDAKAFKSGREFAAWLGLVPKQTGSGGKTNLHGISKRGDAYLRTLLIHGARSVMTNARDPGLWVQQLKKRRSWNVVIVALANKMARTIWAVLAHDRPYQKGYVSVKPT

SEQ ID NO: 121917 - protein, 353 aa, unidentified
MDGEVLISVDPHKASSTLAVFDPVTRTAIDGARFANTKEGYRELARFAGRWAHRRWAVEGCHGAGRSLAQRLVADGERVVDVPAKLAARVRVFSQGHGKKTDRHDAVSIGLAALDAVGLHDVALDDAAVTLRLLSDRRQELVSLRTQAICRLHRLLAELTPGGVRRELNATKAAAVLGRLRPRDEPGRIRRQLAMDHLGDVRSLDRRIKAVGVQITDVVATTGTTLVGIFGVGPVLAARILAEVGDTARFPDKDHFASYNGTAPIDASSGEQQRHRLSRVGNRRINHALHMAAVTQLRNPTSAGRAYYERKLAGGKTRKEALRCLKRRLSDVVFRQLVIDLQPAATAPNTITP

SEQ ID NO: 121918 - protein, 393 aa, unidentified
MVCVGIDVAKDKHDCFIISSEGEVPTDVFTIPNSREGFEILLQRIHSCTTPTDKIKVGLEATGHYSYNILGFLLDNGLATFVINPLHTNLYRKSLSLRKTKTDRVDARTIATMLMSDVDLKSYTDTAYHNEELKSLTRYRFGKVRDRAKLKQSISRLVNILFPELEKLVPSLHMASVYTMLNEFPGAKQISRAHLTHFKTVLSEASKGRYGRNKAIEIRDAAKNSIGSVMPAKSLELRHTIALIRELDTEIEEIEAEIQAVMEAIQSPITTIPGIGVRMGAMILAEIGDFSRFDSPDKILAYAGLSPSTYQSGQFSMNGVYSHMEKRGSRYLRYAIYNATKYVCLWEPSFAAYLAKKRTEGKHYNVAVSHAAKKLVRLIFAMEKSGQPFRSAA

SEQ ID NO: 121919 - protein, 410 aa, unidentified
MEVLYPVCCALDVHQASVTACLRAPGDGPQRRQEVRTFGTTTRELRCLADWLTAAGCTHVAMESTGIYWRPVYNILEGSFELSLVNAQHVKMVPGRKTDVRDSEWLAQLLEFGLLRRSFVPPAAQRELRDLVRYRKRLIEERAREANRVQKVLETANIKLASVVTTVLGVSARAMLKALIAGEGAPDQLADLAKRRLRRKRAALGEALTGRVTAHHRFLLDHLLRHIEFLDGAIAACDRQVETLTAPHAEALTQLDTIPGVARRTAEVIAAELGCDMTRFPTAGHAASWTGLCPGNHESAGKRLSGRTRHANRTLRQALVESARGAVRKRDSYLAAQYRRLVKRRGDKKAIVAVAHSILVIAYHVLRDGQPYRELGGDYFEQLNADRLTRYHTKRLAALGYTVTLTKDAA

SEQ ID NO: 121920 - protein, 453 aa, unidentified
MSRRRASINLKTAKSRAALTLTYPNAAGVDIGSASHYVAVPPDRDDTPVREFPSFTVDLNAVADWLTACKVDTVAMESTGVYWIPLFELLESRGFTVLLVNARHVKNVSGRKSDVLDCQWIQQLMTYGLLSGAFRPADQVCVLRSLWRQRATLLRSQGRHVQHMQKALTQMNVQLANVISDIAGETGQKILRAIVAGERDGHILGAMKNARIRASIDEIAKSLEGNWRAEHLFALKQALAGFDFIGTQLSECDGEIEQQLQRLQAHDGEPAKGKQRGRSRNAPKFDLRTQLFKMCGVDLTRIDGIDVTTALAVINETGADMSRFATVGHFTSWLGLCPGTKITGGKVMSGKTKRCANHAAQALRLAAAALRPSQSAWGAYYRRMCTRMDKPKAVAATAHKLARLIYTMLTKGEEYVDQGQDYYEQRYRQRVLRQLSMRAEKLGMKMVAIEQPA

SEQ ID NO: 121921 - protein, 432 aa, unidentified
MKELEKPIQAWIGVDWADQKHDVSLYEVSTGKTEWYEIRHTPEAIQEWLGDLRSRYRDGYVAVALEQGRGGLLNAFMSCEFLVLYVINPKALSSYREAFYGSGAKSDPVDAELIRDMVRLNPTRFRPWRPDDVLTRSLRLLTEGRRNLVDQSTALTNQMTSLLKGYYPQALAWTGKLDTEWACDFLEQWPTLQALQHSSRRQILGFYGRHPRPSIDLEQQLLDIQQAQPLTQDAAVLEYSGLMITALIPQLRALIVSIAEFDRKIAEVFRKHPDRLIFDSFPGAGAALAPRLTAAFGADRDRFSAATEVQQFSGIAPVTEKSGTKCWVHWRFACPKFIRQTFQEFADHSRRWCSWAKAYYQLQIQRGKSHQSAVRALAYKWIRILFRCWKDRTPYRDEIYSKSLLHHQSPIARMIAPAVGQTEKRVRVAATS

SEQ ID NO: 121922 - protein, 427 aa, unidentified
MKYTQNDRISQLTETTLIVGVDIASQIHYARAFDFRGIEHGKVVKFTNDLEGFMKLQLWIEDLCARHKKDHIVIGMEPTGHYWFSLAEHAKSHGIKAVLVNPYHVKRFKELDDNNPTKNDRKDPKTIAMLVKDGRYVTPYIPDGVYSDLRTAMSIRSRITKQLSSVKNRVKRWFAIYFPEFNTVFASWEGKAAQICLEKFPTPLLVLEQGVSGITHHWKEARLRAVGIKRATKLYKAAQRSVGISQGLMAAREELNLLLEEYTLLKRQEQRIMAMVEELLPQIPVCQELLKIKGVGLITVAGFLSEVGDITRFDSPKQIQKHAGLNLKENSSGKHKGRTTISKRGRSGLRALLFRTVMPLVAKNDEFRELHRYYTTRPENPLTKKQSLVALMCKLIRVFYAILTKNVAYDGRKMLNDIQRPALQLAA

SEQ ID NO: 121923 - protein, 417 aa, unidentified
MAMKIVRFNCCGMDVHKNLVVATIGITDSKTNITEYFQRSFSTLNSDLYRLKDWLRSHHCSDVCMESTGKYWIPIFNILEDEINVRLTHPKYVKAIKGKKTDKKDSKWICDLFKHDLIKFSFIPPKEIRELREIARYRYKLVCMRSSERNRYQNCMTVSNVGLASVVSDPFGKTASNIMKEVMKSNVIDDDKILKLVHKNCKNKDKILDSLHGYRIESDQRFKMEKSLDHMEYLDQLIDSCEVELIKRAYPLRRSFQHITQIKGISALSAILIISEIGIDMSQFESDKQLVSWAGLSPANNESAGKKKSVRISKAGQYLKPLLVQCALSAIKDKASYFGRKYSNIKKRRGHKKAIIAIARMMLVSIYHMILTGEEFQPTDYESLMNPKSNTDQSLTVEKALNFLKRSGIDISSILVN

SEQ ID NO: 121924 - protein, 422 aa, unidentified
MLEQAQDDEQIIARVAALDIGKAEVMCCIRVPGDAPARRRRQEVQAYSTMTRSLLVMADRLRELRVTRVVMEATSDYWKPVFYLLEAHGFDPWLVNAKDVKHLPGRPKTDRLDAVWLCKIAERQMIRPSFIPPPPIRQLRDLTRYRVDLVSARTAEKNRAEKLLEDAQIKLSVVATNIFGVSGRDMMAALIAGERDPRVLAQMARVRLRAKMSQLEEAFHGHFSDHHAFLLAKMLARVDAITADIAEIDERIQAQLRPFADAVTTLQQIPGIGPVAAAVLIAEIGTDMARFPTAGHLASWARFTPTVKQSAGRNKGNGSTGRGNPYLARILGEAVVAAGRTSTFLGERYRRLARRRGKQKAIVAVGRSMLTITWHLLSNPTTQFTDLGPGFYDSRIQPDRKKREHIRQLEALGYKVNLEPAA

SEQ ID NO: 121925 - protein, 457 aa, unidentified
MEQALAQRNRSLNLNSGRSRQALTITHPNAAGIDIGSASHYVAVPPDRDEQPVREFKSFTADLHHLADWLDACGVDTVAMESTGVYWIPLYELLDARGFTVLLVNARHVKNVSGRKSDVLDCQWLQQLMSYGLLRGAFRPGDEVCVLRALSRQREMLLKSQARHVQHMQKALTQMNIQLANVISDVAGETGQKILRAIVAGERDGKTLAAMKNARIRASVDEIAKSLQGNWRSEHLFALKQALALFDFYATQLTECDCAIEQQLQRLHVHDGEPTTAKKRGRARNAPKFDLRAHLFKMCGVDLTRIDGIDVTTALAVISEVGADMSKFPTVKHFTSWLTLCPGTKITGGKLISGKTRRSANRAAQALRLAAAALRTSQSALGAYFRRLCARMDKPKAVTAAAHKLARLIYTMLTKGEEYTDQGQDYYEERYRERVLRQLSKRAEKLGMRLVASEQPA

SEQ ID NO: 121926 - protein, 428 aa, unidentified
MEESTEEPVGLVERVCAIDIGKAGLVVCVRIPHESKPGRRVQEVREYATTTPALLGLADWLHDQRIELVAMEATSDYWKPVFYLLEAEGFECWLLNAKHVKNVPGRPKTDKLDAVWLAKVVERGMCRPSLVHPKPIRQLRDLTRYRRSLVREQSREKQRLEKTLEDAQIKLDTVISNLYGVSGRQMLQAMIDGQRDPKVLAEMAHGRMRPKIPQLRQALTGHFDDHHAFLCAAMLRRIDTLAADITGLDARIDELIAPFVQAVEKLDEITGIGIRSAQEIIAEIGVNMDAFPTAAHLVSWAKFAPIDRQSAGKNKGASTGKGNPWLAATIGESVAALARTDTFLGERYRRLVRRRGKKRAIVAVGNSMLTIIWHLLADPNARYHDLGPGYYELKINKQRRQRDLVRQLEHLTGRKVILQPPPELPTAA

SEQ ID NO: 121927 - protein, 316 aa, unidentified
MGERSVFVGIDVAKAQLDLAQRPEGPGLSAANTESGIATVVAHLRIVKPTLIVLEATGGLERPLVRALVDATLPVVVVNPRQVRDFAKATGQLAKTDALDAQVLARFAQAVRPALRPVPDAPTQELAALIARRRQVVEMLTAERNRLGGAPKRVQRRIQVHLNWLTAELARAGDDLDQAIRNSPIWREQEDLLQSVPGVGPVVTRTLLAELPELGTLNRKQIAALVGVAPLNRDSGMLRGRRMVWGGRAQVRAVLYMGAIVAARFNPVLRAFYQRLRAAGKAKKVALTACMRKLLIMLNAIMKHRTPWRTEIAQCA

SEQ ID NO: 121928 - protein, 315 aa, unidentified
MRNCIGIDVSKGSFDVFVLEKNKALVMTNDSEGICKCVELCQQIQPELIVMEATGGYEALLASTLQAKGFPVAVVNPRRIRDFAKAVGQMAKTDKLDAQIIARFAATLEPMPHELIDSNSRKLKALMSRRKQLVEMHTAECNRKEHAIDIEVTRSIEAIVNAIESQLSNVEKELDSWIQQMPELKQKAEFLQSIPGIGKTTAHMLVIELPELGVFNRRQIAALVGVAPINRDSGVFRGKRMTGGGRRHVRARLFMPTLVATQFNPVLRKYYRTLVDAQGKCKMVALTASMRKLLCIMNAMLKNEQYWQPNLIENA

SEQ ID NO: 121929 - protein, 336 aa, unidentified
MYNFIGIDVSKFTLQIYVEANESSVEIDNDEKNLKLFYKKLKKLYKNDKPFVFIYEPTANYSVVLTRFCAKNNIYAYVVNTFISSNFSKSLGNRNKTDISDAQMLFNMQIMINKKDIAVPVINPTVDAIRELVGYYRFLQKQKVAFKNYNEAVTTNKSSSYILNDVKKNIARIDKEQQELINKAKAIINNDETLKKSFAHITSIKGIGTLVGIFLLHLFLNYPNANRQQITALLGLDPITIESGTSVKKRSRISKKGLSMYRGVIFYSILSTVRFNEEFKTYYEHLKDRKKHTTSAQIAVMRKLILLAHSLYKNNVDYNPEQFKLEKRVKKGEYAS

SEQ ID NO: 121930 - protein, 403 aa, unidentified
MAVMIGVDPHKGSHTAVALDEHEEPLGELRVRSAANQVERLLTWAAPLGERTWAIEGAGGLGYLLAQQLVAVGERVVDVQPKLAARVRLLATGASNKNDPNDARSVAVAALRSATVPEVCVEDHAAVLKVWAKRHRDLSRQHNRVACRLHSVLCDLVPGGIAGEISPAHATRLLDELEPVGAVAAARHELAVDLVADLDRLRVQRHEARQRISAAVTASKTTLTELFGVGPIIAATVIGDVGDIARFPTRDRFAADNGTAPVEVSSGERRKVFRLSRRGNRRLNHAIHMAAVTQIRYRHTDGRAYYDRKIAEGHSGKEAIRALKRRISDAIYTRLRHDAEQTTRVVGAGPGGHTGNDSVACAAGSHPEHRLFDQATPGPGTTLRPTGTRGHSPRPKASTRRTT

SEQ ID NO: 121931 - protein, 400 aa, unidentified
MPDVWAGIDSGKSAHHCVVIDQSGTVLLSKRVENDETALLQLIAETAESAAGGEICWATDLNAGGAALLIELLAAHAQHLLYIPGRIVHHAAATYRGDGKTDAKDARIIADQARMRTDLQAFRSADQISVDLRMLTARRTDLICDRVRAINRLRATLLEYFPALERAFDYSKKAPLTLLSGYQTPEGIRRIGLTRLTGWLRKRGCRNSAKMAEKALAAANAQHTVLPAQSMGSALVVRLADQISSTDAEIADVDAQITDLFRQHDSADVLLSMPGFGPVLAATFLANIGGNLDGFDSVDRLASVAGLAPVPRDSGRISGNLHRPRRFNRRLLRTCYLAALSSLKNSPASRTYYDRKRGEGKSHKQALIALARRRINVIWAILRDHTEYREPAAAICVQAA

SEQ ID NO: 121932 - protein, 482 aa, unidentified
MKPKPQEKTKKATDHPRQQHWREMNRQQRREMMRNIQSEDISLEVVHPDAAGIDIGNESHYVAVPPSRNSQPVRRFGCTTAELKAMADWLQQCGIRTVAMQSTGVYWIAVYDVLEQAGLEVYLVNARETKNLPGRKTDVQESQWLMKLHTYGLLRNSFRPSQEIRMMRTYWRQRNDLVQSAGRHIQRMQKALTQMNIQLANVLSDVSGVTGQAIIKAILGGERDPHKLAAFRNPRVKASEEQIARSLEGNWQEDLLFVLKQEQDGYEFCEKQMAECDRQLNQYLKQRADRSHGAPLPEEKRKGRLKKKSGNKPQFDLRTGLFRMSGTDLTRVDGIDVITATTILSEAGWDMSKWVTEDHFVSWLRLCPDNRISGNKVIGKGRLPTNNRVTIALKMAASTLRLSDTYLGAQFRRFRTRLGAPVAIKAMAAKLARLVYRMLCYGMKYVDKGAALYQAQHRHLQIKQLNRKAASLGYQLIPVPAA

SEQ ID NO: 121933 - protein, 368 aa, unidentified
MTERVHGIDRHKQFSTISVLNRGGQEVRFERACKDLRAYVEGLGTADAVVLEASTGAFWWADQIEGRGAKCYVMDPHKFRIIKDSWNKTDKQDARNLAKALWVHVVTGEFAIPTVYKPTEVVRELRKLFAQYCLLNRQIRMHKNTAQAILVENGIEVNRQLRSRLLTPQLRVEVMKELNISAASRVCAELTLGLLDKVEEAKEQLVAEILIAGESLKSQVELLISIKGVTPLIALAFLADMADIRRFKTLRKMSAYLGLVPRADDSGGKSRPGHINRESRKLTRTVLTQCVRHVVSSSTYLERYYFDLMDRRGAGRARVALIRKLCGMMRRMLLSGEQYRWIDQRLFDKKLSQYERVLKRVKEERPAA

SEQ ID NO: 121934 - protein, 377 aa, unidentified
MGREQREEKIGQLSVGVDLHKSQLTICVMREGGELVQEGMYRTTAEGYRAFVQKMHEWEQELGCSVAMAVETTGNARYFRNRMEAEGFSVVVVNTNKFKVISQSTKKNDRGDAATLAYYLGKGMLPESHLADQSSEELRRMIKCRSLLVSSMVKMKNQIHGMLLGYGIATKAAQLQSNKKRQALVKDLADQGFTEAAASLEVILGIIEGVQEQIKVLEKRLHEMVRDDEDVDLLMSIPGVGFLTASTIAAYTKDLDKRFCGDFKRFASYVGIVPSVHNSNETVHMGRITKHGPQELRTALVQATMGMIRLSKITGEWRLMTDYRAMKTGKGSGKSIIATTRKLARIIFAMLHNREPFNPALMVRDKCLFTIEEVIGA

SEQ ID NO: 121935 - protein, 408 aa, unidentified
MEVVHLRCAGLDVHKDTVVACARVVEGKQVEQEVRTFRTTTKELLRLSDWLTERRCTHVAMESTGVFWKPVWHVLEGSFELVLANAGAIRNLPGRKTDVNDAIWIADLLAHGLIRGSFVPPQPVQELRDLTRTRSQLVRETARHTQRIQKTLEDANLKLTGLISNVLGVTGRAILEALIAGETDLDALANLRRRGIKASHEELVEALRGSVRDHHRFLLQLHLRQIDALEQAVRALEGRMETLLEPFRPELELLTTIPGVSETTARVLLAEIGFDMACFATSGHLISWAGLCPRSDESAGRQRSNRLRPGNTWLKTTLVQAAWAASRKKDSALRAQYLRLKSRRGPKKAVIAVAASMLTSAYFMLQRGVPYADLGPSHLDARDPKKTAQRLVRRLNDLGFEVELRRAA

SEQ ID NO: 121936 - protein, 343 aa, unidentified
MSDKLYFGVDVSKHWLDIAYYDGIDVDWKHGHIRVDNDERGFAQLGRWLDRLCVGKGTCIFCMEYTGLYSQEFRQWLERMKIVYGMVSPRKMHRFEPDLGENERALDRIKTDEMDSFRIAIYCKEHSMKIRRKPSHLPSDAYFKLKRLLAERRQYVKQSALYKQQLHDIGKYDTEASRHRKEAELASLTEKTLQTSKEMETIIREDADIRRSYDLLLSIKGIGLVVAAETVVLTENFTSITNPRRYACYIGIAPGRKESGVSIQGSDHVGRKGFTQAKADLSMAALHAIHYDKGIRAYWLRRKTEGKHSGVVLNAVKFKIVLRMFAVIRRQKPYVEMEEYGKK

SEQ ID NO: 121937 - protein, 355 aa, unidentified
MTSTKYIGMDVHKESISIAVRNAAGKVVMECVIETKASMILQFIDGLRGDLQVTFEEGTSAAWLYDLLKPHVTKLVVCDPRKNKSMREGNQNDKIDACRLAELLRLDHLTPVYHGEHGLRTLKELVRSYLTVTKDLGRVMSRMKAIYRSWAIPCTGKQVYAPRHRAEWLGKITEPGVRRRAEFYYQQLDALRVLRQQVRRDLLAESKKHKAWKRLCQIPAIGPIRAAVLLGILQTPHRFRTKRPLWNYGGLAIEMHSSADHRSVDGHLQRSRKNVLVRGLNRNCNHDLKNLFKGAAVIASSKPGPFQEFYAALLTKGMRPEMARRTLARKIATIVLIVWKKGVCCDANHLKPQTA

SEQ ID NO: 121938 - protein, 313 aa, unidentified
MSQNNTSILYAGLDIAKASLELHLAGKSHPLANDAAGHAVLLKLLHAHPGVQVICEATGGYERAPVRALHTAAIALSVVEAGRVRHFARAQGQRAKTDPIDARVLSDYGTAVRPPLTPPPTAQQERLEALDTRRRQLIETLIAERNRSAHYTEALCCRQARTLLKALEKQQTQCEEAIAELIAADEKLQTQAQRLDAIPGVGAITAAVLLAGLPELGTLSDEAVAALAGVAPYNQDSGGQSGVRHIAGGRCAVRCALYMAALSAVKHDAILKAFYLRLRGAGKKPKVALVACMRKLVVLMNRLLKNPKLELAH

SEQ ID NO: 121939 - protein, 409 aa, unidentified
MRYYLGVDWADQTHAVWVVDGSGMKITARAVLHSAEGLGEWGRELDEWRAQGIELWAAIERPDGRVVDFLLDHGVVVYAVNPKALDRARDRFRQSGAKSDPFDARVLADFLRTDHGHLRALQPSSEAAQELKLLTEDCQRHIRQQTRLINQLTAILKAFYPRALEVGVLTTALVREFLQAYPTPAALTALTHRQWQRWAQTHRLTEARTRELWEVLQRPQLPVPAHVVRAKTRMMQSLVEQLAPVVAAVAQYRKVIDDFFGSMPAAQWARSLPIGKHGVTAPTLWARLGDAPGRWESFRHLQAHAGTVPVTKRSGKQRMVQFRFACDKALRYVVDQVAFLSMLSSEWARAYYDQQRARGHSHRQALRALGAKWLKIIFVMWQRQLPYDEQYHLATMTRQQLRQRQQQTA

SEQ ID NO: 121940 - protein, 392 aa, unidentified
MVVSVGIDVSKDKHDCFIVSSDGEVLADVFTISNTLDGFHGLLQRIQECSAPQDKIRVGLEATGHYSYNLLGFLLDNGLATYVLNPLRTNLYRKSLSLRKTKTDRVDARTIASMLLSDAGLKPYTDTAYHNEELKSLTRYRFDKVKERAKLKSSIARLVCILFPELEKLVPSLHIASVYALLEEFPGAKQVAAAHLARLKALLETASNGHYKRDMALEIRDTAKNSIGSQMPAKSLELQHTIRLIRELNREIDEIEEQIQSIMDELHSPITTIPGLGFRMAAMILAEVGDFTRFDSPDKLLAYAGMSPSTYQSGQLKNCYPHMEKRGSRYLRYALYNATKYVCHWDSAFADYLAKKRAEGKHYNIAISHAAKKLVRLIFAMEKSRQPYCSAA

SEQ ID NO: 121941 - protein, 315 aa, unidentified
MTSTQVFVGVDISKAQLDLALRPEGQFSVPNNEAGFAQVLEHLNAVHPTLVVLEATGGLELPLTGVLAAAGVPVVVVNPRQVRDFAKATGRLAKTDALDAQMLAHFAEVMRPEPRPLPDEQTQALAAILARRRPLVEMLPAEKNRLGTAGKPVRKSLRTHIAWLERELSHTDRGLAQTIRESPVWREKEALVRSTPGVGPVVTTTLLATLPELGTLTGKQIAALVGGAPLNRDSGTWRGKRTVWGGRAQIRAVLYMAALVAARCNPVIRACYQRLRAAGKAKKVVLTACMRKLLIVLNAMLKHRTPWRAELVQCA

SEQ ID NO: 121942 - protein, 327 aa, unidentified
MQYIGFDIHKRYTFYTQMDGMGQIQRQGKLTNSREALAEFFGDMAEPARVVIEASMNWYHLYDLLEELEIPVTLAHPLRTRAIAEAKVKTDKIDSTILAHLLRTDLVPAAYIPPRAIRDLRELLRYRAALVKLQTMIKNRIHAILLKHGYQCPHSDAFGVKGRAWLTTLDLRSVYQQALRGLLAVLDTLHAQIQEASRTIDQQAKATPMAQQLCTLPGVGHYTALLILAEIGEVARFPDPKHLVSYAGLAPSVHGTGGRVYTGHISKQGSTWLRWILIEAAIHAATRPGRFQHLYQRIAQRKGPKLARVVVARELLTTTYWMLRHAH

SEQ ID NO: 121943 - protein, 444 aa, unidentified
MRERSGEERVEEVTDEPLYRDRVCGIDIGKAGLVATIRVPSDRDPARRMQETRSFGTTKREVLALADWLRCWQVPAVVMEATGDYWKGPFYRLEAEGFDCVLADAKQVKNLPGRPKRDPADSRWLAACFERGAITSCFVATPEFRIIRLHTRYRRDLTEEPTREKQRAEKLLESAAIKISSVLTDLHGVTGRDIMDHLIAGERNPKVLAQLARAAARRKIRQLEEAVEGAEFFTAEHAALLAKVLARIDRLAADIDDLSQVIERLLAPYEEQLQQAESMPGWQRRAAQDAVAETGVDMTRFRTGPHLVSWAGRAPQDHQSGKRKGRAKAKKGNRYLGAITGETAVAAGRTQTREGARHRRLARRRGTAKACVATGNTQLKVYHKLLSNPGMRYEDLGPDYYDRQRDTRRQIAHHVGKLGSLGFEVTLCRVPEAEPDETDPTQAA

SEQ ID NO: 121944 - protein, 427 aa, unidentified
MTKTDNTTAEQVLVAIDISKSRQEILVALPGKKRRKRLTILSNKEDYDRLAGYLTSLKAPVQIGFEATGNYHRTLAWRLHQAGFELRLISSVSMARTREALYNSWDKNDPKDAQVILYMLALGQSQRFYDPLVEQINDLQEVSKTHEVVSKAKTELWHRIQTHYLPLYFPEAERYKNRSRSGWLLALLEKFPTPHSITCHSKTAFSRLAWDVVGRKVSKQLLLNDIYETACSSIGLPVPLDSTAIIMFRMVLREALGLIAQRDEIERQAKALLGDHPDFIRLQQIPGIGPINALTILAEAGDLRRFKHHRQFLKFCGMDLSTQQSGTFRGQSKLSKYGNARLRRTFWLAGQVAVKQKENSFKDKFNRYIKQDRSNRHLRRKAYTAVAAKVARVAHAVIKSDTDYRPFYEAAMPDGRTSLCRAVEASR

SEQ ID NO: 121945 - protein, 317 aa, unidentified
MTELKSPLFIGADVAQDAVVVAAHGQSTSRSIGNTPAALKAWLKALPPGAQIGLESTGSYHERLALLAHRAGFTVYVLNPKDVRHYAHAVGKRAKTDHVDALLLARFIAHEHADLHPWQPPTREQRHLDTLLKRRATLVKAQGMLRQTLAHLSPLKTESKAMLASLAKLIATIDRTLEQAVAANPGLQAKADCVQSVPGIGLLTGTALVNLFSRLPSARADALVAFTGLDPRPCDSGKKRGTRRLSKRGPGELRRLLFNAAMSAAKTRVWKPFYERERAKGLPTTAALVCLARRLVRVAFALYRNNAHFNPEAIHCA

SEQ ID NO: 121946 - protein, 408 aa, unidentified
MSDHDDPGIEVWIGLDVGKHDHHATLIDTAGGQLADRAVRNRQDDLEALLDTAQGVGRAALVIDQPGSIGSLAVQAARARDMPVAYVPGLVMRRAAELYPGESKTDRRDSMVLADTARLHAARLHWLPEDDEVLQALQLLCGMDDDFAHDVTRVSNRLRDLLLQAHPPLESVLGKRLEHPAVLQLLTRYPTATTLRKAGKGRILQTLKHHAPRMAERLRDDIWAALEQQTIVVPAERTIGSIVAGQAKNLQTLRRDRAALEEQIGELFASHPLAPVLESLPGIGTRTGARILSEIGDPTRFATAGHLAAYAGLAPVTRQSGSSIRGQSRSRRGNHRLKNALWLSAFCSLHHPPSRTYYDRKRAEGKRHNAAIMCLARRRCDLLHKMLRTQTLYRFEGAGSAGPLTQTT

SEQ ID NO: 121947 - protein, 397 aa, unidentified
MYIVGIDIAKRKHEAAVIDGEGTVIIKPFSFTNNCSGYNRLLAMLTKAKLPLDEVSFAMEATGHYWLALFTRLQKEGFRVQVINPVQTNSIRSFYIRQAKTDPRDALLIAEVIRFGHFSESTLHPENIYELRELCRGRHAIVSMQADVKRKVVALLDQVFPEYETAFTNLFSDTSMAILQTCPTPKELSEMPLEELCHLIEVSSHKRFRMAKAQELQVLARNSFGFAMAGDVFSTMIRLYAKHLVFLKQQVREMDRKIAEIMDTLDTPITTITGIGPTLGAYILSEIGDISRFSSAAKLAAYAGIDPTMRQSGEYNGVRNRMSKRGSPYLRHAIWLAASSAVLHDPALKLYFQKKRDEGKPYMASVGHACRKMVSIIYAVMRDNKAYTPYIPNEISA

SEQ ID NO: 121948 - protein, 341 aa, unidentified
MSDYSYFCGIDLVKNHFSLHAVDQNGKVLLHKSVTRSKLLTTIANMPLMRIGVEACGGAHYWARTLNKLGHDARIMAVKYVIPYRTKGKNDLNDAVAICEAVQRPSTHFVPVKSPEQQAILSVHRMRKHWVRERTALMNHIRALLSEFGLIIPVGRSSLMKQVPLMLEDAENELPHLARTVIADAYHHLGELSQRIADTEQVFDSFAKVSTNVQRVMKVRGIGPQTATAILASIGNGSQFDKSRDFSAWLGLVPKQYSTGGKSRLGRITKHGDKYLRTLLVHGARTVIANLGDKQDKLSQWCRGVLERRGINRAIVALAAKNARIIWSLLHNQTEYENYTA

SEQ ID NO: 121949 - protein, 431 aa, unidentified
MLKINPLSTLYVGIDVSSKSNYVCALDFYTNKYINSSFANNQPGAEELALKILECLNQHPDLTMVVAALESTSVYSIHIANYLSSCEELMRFKPYVFVLNPKCTANYKKSYIGLGKSDPIDAFVIADYARAGNIESEPWRGSQFLALKRLTRHRLHLVECMTREKTYLVSNLYLKFSELQMLEGDDQPFCDIYGATSSSVLMEYFSPEEILDSSEEDLIAFLAKKSRNRIKDISKTADLLKKAARDSYRLDKALYEPLNVSIASSFNCIETFKREIKVIDNAIEKEIKGLNPNAFIILQSIDGIGPVFAGGIIAEIGDITAFHSSDALAKYAGLTWKSNQSGDFDGEDTPMIKAGNRYLRYYLGEAANSMRKHNVEYGAYYRKKYNEVPKHQHKRALALTSRKFVRLVYGLLARNQLYSGVSLDTSIKDSN

SEQ ID NO: 121950 - protein, 338 aa, unidentified
MVNYKNTVGFDVSKKTLDVCVLLGTNMVFTARIQNSIEALEKLQKKLKKKGVDQKQTLFCFENTGVYSQHLMLWSTINKLQIWMENPLQIKKSMGLVRGKSDQTDAYNIALYAFRFKDKVKLWKAPRRELKKLRDLYTVRKKLVEHKKALQVHIKESKAFKSVSDHKAMASYTKKTLAGLLSDIKNIEKEIQKLISNDKELKRLFNIITSVKGIGSMTAILLLIVTNEFKNMNKAKKIACYAGIAPFPHTSGTSVRGKNRVSPFACKPLKALLHMCALVAIRSDTEHKGYYQRKIEAEKKPPMLVLNAVRNQLLARICACVRDNRKYEKNYAKSLVIT

SEQ ID NO: 121951 - protein, 400 aa, unidentified
MNAVGIDVSKGKSTVAIMRPFGEVVAEPFEVLHTDTELRKLACFLEKLPGETKIVMEYTGNYWQPIANVLHDAGIFVSIVNALLIYKYGNNSIRKGKTDKLDAVKIANYCLDRWTVLERYTPVDQIRQALKTCRRQYDQYIRLKVNLKNNLIALLDGTFPGLNILFKSAPRDMDGHEKWVDFAEKFWHRECICGNSEKAFTSQYKKWCAKAGYRFREEKASSIYAHAVSQVNTLPMTDSIKCLVTLAVSQLNTIIETISVIQHEMLTLAAQLPEYPVVMRMFGVGPVLGPQLMAEIGDVRRFDRKQSLVAFAGVDAPPCQSGTFESKNRHISKRGSPRLRKTLFQVMSTIIQHAPADDPVFQFLDRKRREGKHYYVYMTAAANKFLRIYYGTVIAYLEKL

SEQ ID NO: 121952 - protein, 520 aa, unidentified
MHQTKYRGIITEGRIIDVSSLGASGFPLVKPLRKSVNPFGGDLCFGWLGSLRLYLYKPLGCVSTLWKWMPAGKDITMHYHKVLEMFESIPYLSVGLDVGADFTWMSIMLPNGILTGKPFKIIHSDPQSRELAVSKIKEAQEMYSLESRCFLESTGIYHIPLLYFLRDKGFDCAVINPIITKNSTNRNVRKLHNDKFDSKKAAKVGLDASLKTSIVPDDAIIDLRNLVRDYYYFKDLQSAIVLKLNAELKVSFPAYLNVFSKVTTQTSLKLLEAYPLAADMLAAPKDELVEIIRSTARFGEKYALAKYDAICTAAKDAAVFGRALKSNALRIRLYIKMYWEYHAHLDSILEELHQAVDKLEGTPDYDRICLIQTLHGIGFLSAVVLIAEMGSFDLFPSPKKLYAYFGLDPGVNDSGKFHGDRVHMSKRGSSLARRILHMVAINNLKVDKATKAPVNPVIYNYYIRKCASKKKIVAVGAVMHKICNIIFAMLRDNKLFELITPKEHCEHYATEHPESVNNAA

SEQ ID NO: 121953 - protein, 343 aa, unidentified
MKLMRVGVDLAKSVFQVHGVDRGEQVVWRRKLTRAHWLKVFLETVEPGCEVGMEACGGAHHWARVLQARGYRVKLIAPQFVKPYVKSNKNDANDAEAICEAMSRPSLRFVAVKTVAQQDVQAVHRVRAEVSKQRKAKGNQIRGLVSEYGLVAPKELVHLRAAVPAWLEDAENGLTARFRRLLNALWHDLRALDQRMSELDHEIALIATADPPAKRLQQLRGVGPVIATALVATIGDAKQFANGRQLAAALGLTPRQNSSGGKERLLGISKRGDAYLRTLLIHGARSALRTAKNKEDRLSRWVSRIAAHRHPNVAAVALANKTARIAWAMMKDGTDYEPNRAAA

SEQ ID NO: 121954 - protein, 354 aa, unidentified
MKRTNKYVGLDVHQATTVVSVREGSGRVILRSVLPTEAGALLELFGLMRGAVHVAFEEGTQAQWLHDLLLTVVERVVVCDRRGETRRGNKGDQSDADELSRRLRSGDLRAVYHGGHERATLRELTRTYRGVVEDGTRVMLRLRALFRARAIPTRGTRLFSPTSRQEWLVKLPDRGGRFRAETLYTELDVLRELRPRVKAAMVAEARRDPAWQILRTVPFLGPVRVATLLATVQTPWRFRTKRNLWAYAGLAVVTRSSADHHFVEGKLQRRRRAPLTRGLNPNHNRVIKDVFKGAAVAAIGREGALQDFYHGMLERGMREEMARLTLARKLAALTLRLWKEGERYDPTKLTVQMK

SEQ ID NO: 121955 - protein, 329 aa, unidentified
MEEILIIGVDVSKSTLDIFIKPIGFATRIDNHLCGFKNWFAELKKLCSAESKILVVMEHTGQYSNRFETFLRTNGIGYCKIAALEIKRSLGMTRGKSDKVDAKRIAEYGWLRKEILVADPACLANTQQLKQLLSLRAIMVKERAGYLTRIKEMKDTGTCSTKDIQYKIQRQIIDLLGEKIAQLEQQIKSLISQDEAINKTCQLLRSIKGIGWITAAFMIGCTENFTRFTDARKFNCYAGLAPFAHQSGSSIKGRARVSHLANKKAKALLNLAASSAIQHNPEMKAYYQRRVAEGKRKMSCLNIIRSKLVARMFAVIKRQTPYQPLAPAA

SEQ ID NO: 121956 - protein, 365 aa, unidentified
MKKISTIEKSRKGSLKDRKLTIGLDLRDRSSSYCVLDESGEVLREHQLGTTPKAMKDAFGKMPRSRIALETGTHSPWLSRLLTQLGHEVIVAHARNVRLISESSRKDDRLDVRTLARLARIDPELLGPVQHRSAKTQIHLTVIRARAGLVSARTALVNTARGLAKSYGERLRGCGTAQVSRELAAGLSVELREVLDPLLREVESLNERIKEYDARIEQMTKENYPEVSLLKQVKGVGNLIALTFVLTIEDPHRFRKSRDVGCFLGLRPGRRNSGQSQPQLHIGKEGDRYLRTMMVQGAHYILGPFGEDSDLRRWGLRLAKRGGKNAKKRAIVAVARKLAVLLHKLWVSGEVYEPLRNSHKVQVAA

SEQ ID NO: 121957 - protein, 371 aa, unidentified
MVDDIRFVGLDVSKKTVAVGIAPGDPREAVRYFGVIEHTPDALRRVCKKLSRGGSSLHFCYEAGPFGYHLHRRLEGWGHACDVIAPSMIPKRPGERVKTDRRDALSLASLLRAGQLTSVWVPDAIHEAVRSLVRLRRLAACDVVRTKQQILGFCLMHERVYSDGRSHWTKTHRRWLVEQKFDHGALAFTYSELLDRLERAEAMLARVRTELKEVISEWALLPVVEALQALRGFNWENATMVVAEIGDFHRFPTARHLMAYVGLVPSEYSSGDRRKRGEITKAGNGLVRRVLVEAAWTYRFPARQSHLIRQRSAHLAEPIRDKAWKAQTRLCGRMRHLSRQGNHHNTVLAAVARELAGHVWAVARMVQPKMA

SEQ ID NO: 121958 - protein, 356 aa, unidentified
MIFKGHKLTLGLDLGDRWSCYCVLDEAGEILLEQKVATAPEAMKTDILFEKIPRSLIAVETGTHSPWVSRLLTELGYKEIVAHAQKVQLITKSNRKDDRHDARTLARLARIDPELLGPVRHRSAQAQIHLTVIRARAELVRARTALVNAARGLVKSYGQRLPKCGTQQVSRELGAGLHAELREVLEPLLQEIESLNERIKEYDVRMEKIARESYPQVELLKQVKGVGTQIALTYVLTLEDPHRFPKSREVGCFLGLRPGRRDSGESQPQMRISKEDDRYLRTMLVQGAHYILGPFGEDSDLRRWGLKLAARGGKSAKKRAVVAVARKLAVLLHRLWVSGEVYEPLRNSKKAMSTAA

SEQ ID NO: 121959 - protein, 465 aa, unidentified
MQHQPRRRAPKPRHSPAALERLHPHAAGIDCGAAEHFVAVPPDRDATPVQSFPTFTGDLHRLADWLTACRITHVAMEATGVYWIPIFEILDARGFQVILVNARHVKNLPGRKSDVSDCEWLRDLHMLGLLRGSFRPADGIVALRGYLRHRTTLIESAGALVQRMQKALVQMNVQLPLVVSDITGVTGLRILRDIVAGQRDPQHLAQHRDVRCRASEAELIAALRGNYRAEHVFVLQQNLELFDIYQQQLAACDRTIEGHLAQLAVTASSAPPLPAARRRPRTAKDNEPAFDLRTPLHQLTGVDLSQIDGIGPYNALRLLSEIGTDMTRWPTVKHFTSWLTLAPQNRISGGRLLSSRTQPSANRAATILRMAAMALGRSQTALGAFYRRLAFRIGKAKAITATARKLAILVYRTLKDHLVYNDPGAEAYEAQDRSRVVRRLRQRAEHLGFGLVNLSTGEVTPGAVS

SEQ ID NO: 121960 - protein, 357 aa, unidentified
MKILGCDLPAKQQTIAMVDRETGEFTEKTLSHEGNEVREFYAALEGPVVVGIEATGAMQWFLELLEELGIVCRVGHPAKIRAAETRKQKHDRRDARLMLELLIEDRFPEIWMPSIEERDLRTLLRDRHQWVKIRTRVQNTLQAMALNHALRRGRGLWTATGQKALQALSLPSYTSQRRDELLRLYGQLQRRIQELDGQVEKQVQQRPQALRLLTHPGVGPVTALATEVFLGDPSRFANGKNVASYIGMIPCEHTSGKRQRLGKLTKEGNSLLRYLWTEATIHAVRKDPELKRFYRRKLIQKGMGKARIAAAHKLGIRLWIMLRDQIDYKEFCRRGQQRQCGEAHAGMPNYNSGPALQ

SEQ ID NO: 121961 - protein, 358 aa, unidentified
MRIIGCDLHARQQTIAMLDTDTGELEEKTLGHEGETVREFYSALSGPILVGIEATGSMQWFVEMMEELGIECRVGDPAKIRKAETRKQKHDRRDARLLLTLLAENRFPTIWMPSTEQRDLRTLLRHRHQWVRLRSRVQHTLQSMALNHGLRRGPSLWNQAGQHALRVLPLAPHASERRAALLSLYPRLQESIDELDQQVGQQVQQHPQARRLMTHPGVGPITALATEVFLGDPLRFIDGKALASYIGMIPSEHSSGRRQRLGAMSKQGNALLRYLWCEAAMHAVERDPELKRFYRRKLVQKGLGKARVAAARKLGIRLWIMMRDQIDYQEFCRRGKARQENGSVCAGMPDITSGPAEV

SEQ ID NO: 121962 - protein, 352 aa, unidentified
MKRYEQIAVKGKSLFAGIDIHLVQWHVTIRTEDVEIFSGSIPGTWEGLRKLLDRFPGAVFHTVYEAGYFGFWLHDKLVEYGAQCVVTPPSLLPIEYGNKVKTDRRDSRKLAQLLAKEMLKRVWVPSPEERFHRQVIRRRRQLISDRVRTQNRIKAELRFYGIQIPETASKWSKAYLMNLHRLKFNNYWMQESFQRLLEEYDFLSEQIKKQTTVLQALAELPLYKERVKILRTVPGIGLIASMELLLELQEMERFRRADQLAAYVGLTPSQYSSADKVRMGRITAIGKNDLRGTLIEVAWRLIGKDRAMRKRYERIKVRAGGKRAIVAIARITLLMTRRMLLDNKPYVMGRAA

SEQ ID NO: 121963 - protein, 344 aa, unidentified
MSITMIGLDTAKSVFQIHGVDETGKTEIRRKLSRNDLISFFKKHELCTVVLEACGAAHHWARILTGLGHDVKLIAPEAVKPFVKKGKKNDAADAAALCAAASRPDMRFVPAKSLEQQGILALHSARSLLVKQQTMLANAMRGLATEFGLTVPKGIGKLEELAVLVEEDETFPMKARQAFTGLFDQCKALTESIMTFEAEIVAHARHDETARRLATIPGIGPITASLIAATVGDISMFKSARHFAAWLGLVPRQHSTGGKTRLGRITKTGNREIRKLLVLGATSMVYRAPQWNSAAGLWFRGVLERRPVRLATVALANKMARIAWALMTRNEVYQAKGRVAAAAA

SEQ ID NO: 121964 - protein, 340 aa, unidentified
MSTINILGIDIGKFTFHLVGHDLSGREVCRKKFSRPKLIQFLSTIELTTIAMEACGGCHWLARKCQEFGHKVLLIPPQYVKPYVKTNKNDFIDADAIAEAATRPTMRFVSVKTESSQVISVIQRIRSSYVKDRTACMSRIGATLLEFGMSFPKSHAKMKVLFQWLAEHGEPIPPMLLLELRDHHDYYLKLNQMILVQEKKLKEIVDHDERAQLLKTIPGVGTLTASRCISDISNAADFKNGRHLAAWIGLVPRQFSTGGKPTLLGISKRGNKGLRELFIHGARAVLVRPEKAVAVFGNWILELLSRKHFNVVVIALANKLARIAWSVLSTKQAFEVRVQA

SEQ ID NO: 121965 - protein, 375 aa, unidentified
MQTNYYVGMDLHSNNTYIGVLDEQERRVWSGKIANEFEAILNALKPFQDHVVGIVVESTFNWYWLVDGLMEQGYKLHLANPVAFQQYRGIKFTDDKHDAFFLARMLRLGILPEGYIYPKEERQVRDLLRKRLMLVRQRSQHILSFQSLVNRNLGFSLDSNQVKKLKSDDIADWFSSEHLFYSARTNLDAIDYLKKEIRDLEWIIQHSSVLHHKQELLSTVPGIGKALSMTIALETGDISRFKTVGDYASYCRCVPSNRISNGKSKGKNNSKNGNKYLSWAYVEAANFIKRFNPRARVFFDKKAKQRNQTVATKALAHKVARACFYILRDEVPFDELKMFCNPNPCDKGSSSEPERGLHRECIAPIGPSAAANLNE

SEQ ID NO: 121966 - protein, 346 aa, unidentified
MSKIYQEVNMKYVGLDIHKEFCVATEMDEEGNIIRDGRIETSREAIEEFFSSVERGKVAIESTGIWDYIYEILDVLGLEVKLVNPVKARAIAAAKIKTDKVDATILAHLLRSNLIPEVYIGNREMRELKRLINERLLMKKIGNQIKNRIRSELLRRGIRPEMNIFTKKGEQYLRALRINSIIRELRVLESVEKEIHSIDEELLEYYENNEDAQLLATIPGVGYYTALTLAAVIGDINRFPSSERLSSYFGLVPSTKQSANTVYRGPITKEGSSTVRWLLIQCAWVHVTHCTDSFLTKFYQRIAKKKGKRKAIVAMARKMTRVIYWMLKTKEPFHVEGYKIRDIHAE

SEQ ID NO: 121967 - protein, 452 aa, unidentified
MKYQALQAKRKFIANRFVVGIDPSKKKHQAVVLDPQGLQLRMFTFATSAQGFRQELWKRMTGAIPTAALPETVFAIETACNLWQTLAYYLHSQNYKVVLVSPLTTHRARPMINHDFSRTDPKDGLLVASNTRDGYFDFYKSYSPTISAMHELSMDYSKLRRNMLQQRARMRASLEHVFPEFFEVVRLNTATARHLLRDYFLPEHYLLLDLDKVGQEIAKISQSQYGVETLKRLQERARTTIGIPKRDAEVTVARATVTTWLTLEKQFQTPMADTLTMLIALARQIPAFALLTSLKGIDETMAALFLAETRDLSFYRHYKQIEKLAGYNLRQSQSGQYVGSRRISHIGNRRLSWILYWMTKEAVRYVPEVRIKFLTRQLVKLNFRKNVVACAPVLLKLICKIVKAQRPYEYKPEAVARLAQLEQEYQAKYPPKTKQTKTIRRQRPAPALKRAA

SEQ ID NO: 121968 - protein, 349 aa, unidentified
MNQSEVLLGVDTHLDTHVGAVISEAGKLLGTLAVPTNLDGYCELLVWAKSFGKLRRAGVEGTGTYGAGLTRVLRDHEIEVLEVNRPDRAARRSKGKSDPIDAENAARAVLAEKATAIPKTQSGAAEAMRAVSVARRSAVKAKTQAINQLRALLVSAPQDVRERLLKVKAAECVKRCLRLRSLGTSVMEQALTATLRLLAKRWASLADELKTLDAMLERLTTEYAPRLRERFGIGPQTAATLVAVAGDNPGRLHSEAALAALCGTSPLQASSGKTTRHRLNRGGDRTANNALWTIAMVRMRSDPRTRTYVERRTQEGLSSKEIHRCLKRYIVREIYPLIMADLAVSRGCG

SEQ ID NO: 121969 - protein, 375 aa, unidentified
MMRWTPPGDLNGIEVPKSSRCVITNRQEESDVKNTTIAIDLAKSVFEVGVSDRPGHVAANHRLSRDEIVRFMANQQTTTVVMEACSSAHYWGRTFQSLGHDVKLLPPLYVRPYVQRSKTDRADVKGMLEAWRNADIRPVPVKTESQQQLTALHRVRAGLIGTRTMRINSARGLLREFGIVFPLGAAALAGRVQELIEDADSTLSMPLRQLLHEMVSEIGELERRIKLIDKQLEAIAVQTPVVEALLTVPGIGPLTSTALVGFIGDVSRFPSGRHFAAYLGLTPREHSSGLRRRLGRISKQGDVYLRTLLIHGARAVLVAAQRQSNPTGLHLWGLQLQRRIGNNKSAVAVANKMARIVWAVWKSGRPFKSHLQDVP

SEQ ID NO: 121970 - protein, 344 aa, unidentified
MKPVAIIGLDIAKTVFQVHGVNAAGQVVVRQRLTRGRVLAFFEKLTPCLVGIEACGNSHYWARELIARGHEVRLMPAQYVKPYVKRGKNDAADAEAICEAVGRPTMRFVSVKTPEQQSVMMLHRVRLMLNRQRTQLSNSIRSHLSEFGIVAAIGRRGIDQLLAIVADEKDTRVPSDARLCLQMLAALAVVKEQILENDRRVRAIARQNELGRRLMEVPGVGPLLASAFIATIADPAVFKTGRDLAAWIGLVPKQNSSGGKERLGSITKAGNRYLRQMLVVGAMAVIRYAERHGTRRPWLVQLMARRSAKVAAVALANKLARIIWALMTSGERYREPILTDLVAA

SEQ ID NO: 121971 - protein, 339 aa, unidentified
MKQITTIGLDLAKKVFQIHAVDASGAVVLQRVLRRGKVQEFLAGLPPCLVGMEACATAHYWARELSKLGHEVRLIPPAYAKAYVRRNKNDAADAAAICEAVSRPNMRFVVAKTEAQQAAAGVHKTRELLVKQSTMIINHLRGMMAEFGIVVAEGRQHAAELVAILLDPADTRIPAPLHQTLRVMADLWAGIERKLQGIDQQLLDWGRGNQTCRNLITIPGYGPILSSAMAAIVVDPSVFRSGREFAASLGLVPRHEGTGGHVKLGPISKRGNGYLRRLLVNGATSVLNSKRGKQDPWLRRLLESKPRKLVAVALANKMARIGWAIITRQENFRAAPATV

SEQ ID NO: 121972 - protein, 428 aa, unidentified
MNYNTQNAKIASITEKTLIVGIDVGSETHYARAFDWRNYEYSKKPLEFSNTEAGFLTLKAWMEDLSEKYGKTAVIPGMEPTGHYWFALGKFLQDSGMKPVHVNPHHVKKSKELDDNNPNKNDRKDPKTIAALINEGRFSYPYIPTGIYAEIRSLSNLRFQTQEELTRIKNRIARWFSIYFPEYKAVYADLKAVSGRMVLKEFPLPEDIVKLGVEGVNQIWRDAKLRGAGMKRAKALVSAAEHSIGSKEGPEAARIELKNLLNDLEVYASRLEELLWSIEEKLKEIPYIDKLMAIKGIGLITVSGFIAEVGDIGRFDNPKQLQKLAGYAIVANESGKHNGESRISYRGRKRLRYVLYEAAISLIGKNEQFREIHEYYRGRKENPLKKMQSVVAVACKVIRVFYVILTKGVDYDAEKLMRDIKRSQMQAA

SEQ ID NO: 121973 - protein, 381 aa, unidentified
MSIVALDIASKAATFCVLGTQGITGQGSLTFDYDGFSSFFASEQVSDASLFVMESTGGYHLPLYHFLLNHGRKVRIINPLLIKQFHDGQTLRRTKTDALDAVTIARYAQSHMSALEEERMQLDSESKMLARRRARNAEDLAKAKTILKSDLSVAFPELLRFNVFIKTLLEFLSIYGCAKDVLAATEEQLQQALDVQKGRKSDVVTVQKIQELARISIGVSYRAAMVRDSAKAVLACQQRDEELTKALVELENALHKRQMEILTSIPGIGEVTASHFLSEIPDITQFATYQKLIAFAGTDPGIYESGNTSKALKISKRGNPLLRKYLYLMADSCMRHNIVFHAYYHKKREEGFPHRKAMVATMNKLIRTLHALLTKDETYSI

SEQ ID NO: 121974 - protein, 389 aa, unidentified
MISIGLDLGREAHQFHIIEGKRTLETGVISNASWAVEPWVLHVEATYGTGVQLAIESVNGLATPLDQFVEERGWRVLQIPPSTVKSYRENVMGQQNKTDATDAYALAALANDAGERFQSRKQPRRALRRLTRQRQALIKEQTQTINRLRCALAAAWPEATEALVPDLTAAYILTILERHPDPAEIASLGVQGLRLVLRSGPKSCGTGVTNARLQSLVDLAASNTIAPAEKRVILAEVRFLVRRVRHLVDDLRELESIMAEAIAGDKEAARIDQLAGISTVAAATFMGEVQDIQNFESERKLASYAGLGLVRRQTGKTLNRNRAQMRSNRQLKLCIHNMALGRLFHHAESKEYYNRKRSEGKNHKQALRALARHLLRLLYRTLQPPRVAA

SEQ ID NO: 121975 - protein, 311 aa, unidentified
MSHVFVGIDVAQGHLDVHVLPTAEAFASANDPAGVAALVQRLQELRPALIVLEATGGYESLVAAELAAADLPVAVVNPRQPRELARALGILAKTDQIDARTLALFAEKVQPRCQTPRDERELRLKALVTRRRQLVVMRTAELNRRPQAGVEVRKSIDKVVKLLNRQIEELEHDIDGTIRHMPLWREKDDLLQSVPGVGPGTAHMLLAALPELGTLNRRQIASLVGLAPFNRDSGKLRGQRTICGGRRDVRATLYMAALAASRFNPPIRIFYKRLLAAGKKKKVALTACMRKLLVILNALLRTRQQWQPQNA

SEQ ID NO: 121976 - protein, 341 aa, unidentified
MQITTIGLDIAKNVFQVHGIDATEKVVVRKQLRRGQLIKFFEALAPCLIGMEACATAHYWARELTKLGHQVRLMPAKDVKAYVKRNKNDAADAEAICEAVRRPTMRFVAVKSAEQQGRLMQHRVRDLLMRQRTQLINAMRAHLAELGIAAAQGRAGIKELLAIVAQEGDRRLPVDAHASLIVLAAQLQAVQTTIGSIEKRIVLQHRSNEESKRLQSVPGIGVLGATAIAATVPDPKVFRSGRDFAAWIGLVPREDSTGGKQKLGPISKQGDRYLRRILVVGACAVLKQARQQPEKYPWLTQLLARRPFKVVAVALANKMARVAWALLAKGGTYRAPQLKAA

SEQ ID NO: 121977 - protein, 428 aa, unidentified
MMTHHDRLQSFHELRKTVRSSDSMLVVGVDVAKNKHHAFFGTPTGKTLWKKLLFDNSIHGFKSLRAMSDNLMAQHGLQDCVYGVEPTATFHKPLAEYLIRQGQQVVYVSNVAVKNNRKTLDGRWDKNDTKDAANVADLVSRGRCQFYDLADGDVLELRSLIAYRTKLKKLEHALRMRLRNQLVAQYFPELDQLIPQGGQDALILDLIRRNFAPARIAETPFETFRVQHRVQQRHISQERRLRTIYELSKESVGCTLPAAAAWEGQMLVAQLEQTRKIKKELEDRLKTTGQHFPAYSHLLTLPGFGPIVTTMVLAAIGDAHRFTNRKQVLRLAGLDLSASRSGTKSDSAIPVISKQGKAGLRYALFQAATIASYKDETVRNHFTRLLEGREQERGIKMKMRVKLAAKLLVVAWTLMKHNEDYDPDHFTS

SEQ ID NO: 121978 - protein, 394 aa, unidentified
MKLIGIDIGKNKHFFCVMDQQTGEIISQPVSFSNDKEGFDFLVKKIKSYPKDSILIGMEDTGHYHFALLKYLLDLQYTVALINPKTTDFNRKMQGGITKNDKLDTINICDVLDTPERKKQYRITKVNSFDLYEQKQLTRHHHNLKEEENVYKNRLQKCIDIVFPEFNKLFNSKYGIVYMNILKMFGSAENIANTDIRTIRKCFEIEGRGNRISLTPERLKECAISSIGISSSAEVIQIKHLTAQIELIEEQLTEIDKKIEEFSIQNNSPILSIPGISHFSGTSILAELGDISNYSKPSQIIKFAGVAPLHYESSQFNAQHTAITKKGSKYLRKTLYQIILPVIRHNPVFNKYYQLKISQGKGHRCAQGHCVRKLLRIIYHLLKTNQQFDPQLLR

SEQ ID NO: 121979 - protein, 339 aa, unidentified
MVKATTIGLDIAKQVFQVHGADKAGRTVLRRKLRRSEVARFFSEQPPCLVGIEASGSAHHWARVLGGMGHTVRLIAPQFVKPYVKSNKNDANDAEAICEAVTRPTMRFVPQKSVEQQDLQCLHRVRSRLVACRTQLVNQIRGLLAEYGIVLPQHPGQVRRGLPAVLEDAENQLTGFGRELFQSLYEELVQLDEKIGDADDRIQIAFQRTPNCQRIAAVEGVGPLIATAIVAAISNGRAFENGRQFSAWLGLVPRQNSSGGKSRLLGISKRGDTYLRTLLIHGARSVVYRAKAKTDKRSLWINDKQQRLGTSKACVAVANKNARIIWSLIAREQEYRRAA

SEQ ID NO: 121980 - protein, 474 aa, unidentified
MTSIQKSRTELAALPMLPNEALYIGVDIGKFKHVAGFLSKTLLERHKHFENCPAFTFEQSREGFRAFVERIQAYCPLEHCFLLMEQTGHYHRPLQQYLLELDLPVYIIHIQRRQAGMIKTDKRDALGLANQLYTQLELGAQVADTLQVIRRAIPPSEAAAQLKGLMRHRYELVNEATRRKNKLIAICDELFPEFTNVLKDPNAPIALDLREHFPTPSAIAAANPVELRKIRRRNHPSEAQFLQIQQLAVQSIGTKDAARQHSLIIEQALLIQELRLLQNHLAQLEEEISQIVEQSREGQILTSIPPISPLYAAAILATIGSIGNFEDAAHLKSYFGWAPTRAQTGVSFDRTRLTRGGSREMKKVMFLVAWKAIQTDTEWAKLYKRLVPRLCTYDERMQAHKGKGKVLGHIIGRLITLIFALLKKDYELLNRLSPGTEPPPPTIYDPELHQRHRTGHYASLRREGPKNRIVQLSQ

SEQ ID NO: 121981 - protein, 325 aa, unidentified
MQGKEVSEQETRNCTAGIDVSKSWLDAHVLPVAQSLRVANTTAGLRQLKRWLLRLKVERVVVEATGKWHRQAVRSLRASAITIGVVDPYRVRMFAKAQGIVAKTDRLDAKVLAMFAAVMSFDIRQDVPQALEAMQELVTARAGAVDEQVALKNQRSAAEQPFLKRQFERRIHQLDTHIQAIEKECLRQIKADPALARRFAILTSVPSFGPVVAITLIACLGELGSLSDKQVAALGGLAPVANDSGQRIGPRVIWGGRAAVRRILYLAAVSAKSCNNDMKPFYQRLIANGKKPKQALIAVARKLLVLANILIAKDRLWMQSAPKSA

SEQ ID NO: 121982 - protein, 350 aa, unidentified
MTTLPPRITGGVDTHLEVHVAAALDHQGALLGVESFETTPAGYRALHDWLSGFGDVEQVGVEGTGSYGAGLTRSLHREGVRVVEVDRPNRQRRRRRGKSDPQDAITAARAAQSGDAHGQAKTRNGNVEAMRVLRVARTSARKARTQALNQMRSLISTAPDDLRGELRDLNVYRLLERCSVYRPGTGRDPRTLTKLTLRLLARRALSLEAEVAELDRILEPLVGDTAPELVARVGIGTECASALLVAAGDNPDRLRNEATFAHLCGASPIDASSGKQERHRLNRGGDRQANSALWKIVITRMVYDPRTRDYVQRRTKEGLTKKEAFRCLKRYIAREVYNCLPRHQLALDGP

SEQ ID NO: 121983 - protein, 364 aa, unidentified
MQSFLRYCVGLDVSKDTLQVCLSVIDLTGRVSVKATTKVDNKPTGFTQLLGWVGRHRKLDLPLTYVMESTGVYHEAVAWHLYQLDALVSILLPNKAKHYLQSLGYKSKNDKIDAQGLSRMGLEQQLAPWKPLSKNIYALRLLTRQHQRLQELKTQSTNQQHALAHSAFDSSFIDRQLASTVTFYDQHLVELERAVKVLIEADTELKPRVERLVAIKGMGLLSVAVLIAETNGFEGFHNQRQLVSYAGYDVVENQSGHHRGRTRISKKGNSRLRRILHLPAFTAVRFGEPTCQALFERVYASSKVKMKAYVAVQKRLLLMVYALWRKGCAYEADYVAKLAEAAKKIVPTSGTTQDQEAEAMLSYV

SEQ ID NO: 121984 - protein, 421 aa, unidentified
MPNIEIGVDSMVKENFIYVGIDLHKATHTAVMIDCYNQKLGEITFPNRPADFPKLVTKVKKCNTDAKEVVYGLENAYGYGRPLAVWLIDKGYFVKDVNTAISHRQAKHRGAMYRKSDSDDAEAIALATLNMLDKLPDACPNDAYWSLGQLVHRRDNIMKQRTRLVNQLHEQLCIAYPSYKQFFNDISRPTALYFWEHYPSRKYLKGKSVEDLRAELVPVSHNKCSTKTCEKILDAVASDKVKNNAYQDARDMVTLSIVSDLQHYDSQLAEVDKMLEQMYKMLGCTLTTIPGVNVITAVKILAEIGDIKRFSNANKLAQFAGIAPLHLSSSGKGKDVATKQGNRRLQATIYFLAIQMVQVSSKGTPRNPVVRAYYEKRKAEGKTSQQALICISRRLISIIYGMLKYGTEYRMPVVENAGENR

SEQ ID NO: 121985 - protein, 370 aa, unidentified
MLDTTTFVGLDVHARSIKAVSLDVMTGEVRCATFGYDAGAVAAWVRSVDPRARCVYESGVTGFDLQKRLSGLGVDCVVGAVSKMIKPSADRRRKNDRNDAEFLARMLSVGNVVEVWVPDDECEAARDLTRALEDARDDLSRSKQRLSKFLLRHGLVFDERTPTGRRKGNWTRAHWSWIESIRFAEGADEEVLAYYVDAVRRAAEEKARLEGLVEAEARKPRWRKRVDSLRCLKGVDTASAADLVFEAGEFSRFRNARSFAAWVGLTPSEHSSGESDRRGAITKAGNKHLRKTLVEAAWHYLTCPGRPKDLAKGQAPDRGARRHAAKGVRRLVERREALLARGVHGNKANVATARELACWVWAVGLMAEEA

SEQ ID NO: 121986 - protein, 352 aa, unidentified
MIVIGADTHKSSHTLVAVDATSGQRLAVVTVASTSSGAFDALGWARRVAADGRVWAVEDCRHVSGRLERCLVSAGEAVMRVAPRLMAGARAGGRERGKSDPIDALAVARVALREGIERLPVARLEGAELDVRLLLDHHDDLVAARSDQQRRLRWHLHDLYDDLDIPPGALDRSVWLDRIAGRLRRSPKTTRVRIARELVAHIRQATRRIHQLDREIAVLVNQVCPQLVAEVGCGPLTAAKLVGEIAGADRYSSDAKLARTAGVAPIPASSGRRHRHRLDRGGNRQLNLALHRLAINRARHDPQTAAYLTRKQAEGKTRKEALRCLKRHLARRVWHLLTNDPTETPRTTAALT

SEQ ID NO: 121987 - protein, 427 aa, unidentified
MTDQLKHKAYHSWVAIDIAKDFNVVMVELTDGKTRRFRMANSGKDHDRLIEVIRELPQPCHIGFEATGNYHRPLAYRLLTEGFDVSLISSLASARYREAIFNSWDKNDPKDAGILLELLKRGIVQTYIDPIRSGYHDIQELSKTYSNITLSRTRLQHSILTHYLPLYFPEMAKFWCSTRNAWWINYLLHFPTPASVIQYSEQAFCQIASPIIGRKMNKQAKLLELYEAAQHSIGLPIASDSLACQTFQLQLQRYQELTNQRQQLEQQAETTLSMNPDYCLLKTVPGIGPIVAMTILAEGGDLRRFNHHRQFLKYCGLDLAKNQSGNFRGQDKLSKRGNARLRLALYMASLHAIRQTENSFRNKFHRYTQATPKDADCKRKAMTAVMAKMARVIHALIKSGTPYQGYFEVSPSGSIPLSRAVGATRTP

SEQ ID NO: 121988 - protein, 415 aa, unidentified
MTYLKNKSFPITAGLDIHKNDIACIILLDKDKTVRAKFARNREGIRLLIEHLKRYGCEQVVMESTGPYYRIIYDQLSAAGLNPYLVNALDNSNKGKIKTDFRDAERLARKFIAGEVKPSYVPKSPIKELRKLVRRRMKLVAMRTMLKNLVRAELDELVIPIDTLFSSLGKKARELLLTLTTSGDMEGLLSKYPALREKMEAIERLVNTKIPEESALIISILVKLMIEIDEAIKEIDRALRQIVIRNKKLLRSVELLMTIPGVGFIAVVTIIAEVGDISRFPSPKSLAMYAGLCPRIFQSGGRIYHGPLPWRCNKRLRWIMYQVAIALLRTRSQLKRFYERIKRRRGHKVAVIALARKIIVAIWCMLTRGEEWREGIKSPRRVPRVRVEKETVLRAINLLRSLGYIVVKGGEGNVF

SEQ ID NO: 121989 - protein, 403 aa, unidentified
MNMNAVGIDVSKGKSMVAILRSYGEIISKPFEVKHTVSGIRSLIEQIQSIDGESRIVMEHTGRYYEPLVRELSKADLFVSAINPKLIKDFGDNSLRKVKSDKADAVKIARYTLDSWTELRQYSLMDEIRNQLKTMNRQFDFYMKHKTAMKNNLISILDQTYPGDNTYFDSPAREDGSQKWVDFSATYWHVDCVRKLSLNAFIDHYQKWCKRRKYNFSRSKAVEIYEASKELVSILPKDDLTKLIIKQAVEQLNTASQTVEQLRTMMNEAASKLPEYPVVMAMKGVGKSLGPQLMAEIGDVSRFTHKGAITAFAGVDPGVNESGSYEQKSVPASKRGSSTLRKTLFQVMDVLIKTKPQDDPVYLFMDKKRAQGKPYYVYMTAGANKFLRIYYGRVKEYLSSLPE

SEQ ID NO: 121990 - protein, 349 aa, unidentified
MSQSHNSAVAVIGIDIGKNSFHVVGLDDRGAIVLRQKWSRGQIEARLANLSPWLIGMEACVGAHHLSRKLKALGHDARLMPAKYVRPYSKGQKNDFRDAEAIAEAVQRPTMKFVATKTADQLDLQALHRVRERLVSQRTGIINQIRAFLLERGMAVRQGLRFLRAELPRILAAPPDVLSPRMVRLIKDLAEDWRRLDERIDRLSNEIAALAQQDAGCERLMSVPGIGPIISSATVAAIGTGDAFSKGRDFAAWLGLVPKQISTGDRTILGKISKRGNRYLRVLFVQAAWVVLIKPMSWDRHGLKHWIEAAKKRLHRNVLAIALANKLARIAWGVLAGGHTFEASKLQIA

SEQ ID NO: 121991 - protein, 339 aa, unidentified
MKQITRIAIDLSKGAFQLHAIDAEERVVLCRQLKRGQVLGFFAKMAPCRVGMEACASAHYWAREIGALGHEVVLIPPAFVKPYVKRGRKNDANDAAAICEAMARHSVTTVPVKTPGQQAVLMLHRARKMLVGQRTMLANALRAHLAEFGIVAPCGGKGLATLIALAVDAADPALPALAREALAMLAAQLRDAEAKIDALDHRIREACVTDEACRRLATIPSIGPITASAIVATVGDPRRFKTGRDFAAWLGLVPSQHSTGGRTVLGPITKAGDRHIRSLLVLCATGMLRYGKRSPWIAALLGRMEARKATVAIANKLARIAWAILAHGGTYRRQAGLNV

SEQ ID NO: 121992 - protein, 329 aa, unidentified
MNYKWFVGIDIAKKTLDVVLYKKELQKKSPYCQILNNSDGFNNLMKWLKEQNVVLKHTLFCMESTGIYGMALVNFITEKANYCLESPLHIKRSLGLTRGKSDKIDAFQIARFCYLHRDELVPSRPGSKIMLTLRSLINERERLVRTRTIDKTIVKELNYKENKSCIERAKNRINILTEDITQIEKEIKAVLRENLLIERNYNLAKSVTGIGLVNAVMFILFTNNFSSITDARKYACYSGIAPFEHSSGTSILGKTRVSKLSNKRIKVNLTNGARSAIINDPELKLYYKRKTDEGKEHGTVMNAVKFKLITRVFATVKRGTPYVKLRQAG

SEQ ID NO: 121993 - protein, 322 aa, unidentified
MRYIGIDVRKATFVVAYSSDKGGEIRTFNNTTAGIRQFIGTLPKDGSIHCVMEATGNYSALLLYMLNVAGITVSMENPLKVKNFAKAMLSTIKTDKSDARLITLYGEKMNPRPFKVQGEAILRLRQKRTVIRQLTKQITAMSNLRGSLACLPVPDKGATHTVDETIKFLEKKRDRLQSELTDLVEVEFSRQLALLTTIKGIGITLATALIITTGGFTYFQNAKQVSRYLGICPTYEQSGTSVNIKGHINRNGDAYTRGLLYIAAWPASRFNAQCKETYTRLRQNGKSGKLAMIAVANKLVRQAFAVVAHDKEYVDGFVSNRP

SEQ ID NO: 121994 - protein, 359 aa, unidentified
MQKKVKTISFKGQNIYVGIDVHLKSWTVTIIVGLITHKSFSQDPSAELLAAYLCRNFPEGNYFSVYEAGFCGFSVHRQLESNGITNLVVNPADIPTTDKERSQKEDRRDSRKLAKSLKNGELTGIYIMSSQQEELRSLVRYRKTTMKEICRHKNRIKSFLYLKGIHIPKQLNTASKYWSASFTKWLKQLELTTEYGHMVLNQTIETAEFLRGKLLKVNREFRQLEKRSQYTEDLKQLRSIPGVGLIVAMTFLSELDNIKRFNNLDKLCSFVGLIPSTHSSGEKEVAANITRRTNKPLRAAIVESSWVAIRYDPALSLKYNQLRSRMEPNQAIIRLANNMLNRIRYVLLNHKDYVCSVVE

SEQ ID NO: 121995 - protein, 596 aa, unidentified
MLPQPAPAPQPPRRVGVGIDTSRYGHYAAFLRDDLQPAAPELQFAESAAGYALLRQRLECIAQRHPPAHFVVRLDAAGQYAENLPHFLHRRATPPADPLAPAARLALTISCGDPQRNQNYRAAVFGPQKSDPVAARAAARFALTERPGRDRPLSLPLRTLRQVAGRLQAVVRQRTRLINQFHHLLALTFPELALQTRDLAAGWVLELVHRYPTAVCLAGASLADLLDVPYLPDAQAGPLLEHARASVASLGGAATEELVRDHVRQLRDAGARQKRLEKLLVSAYQTLPRDNHRATIPGIGDVTAAVLTAFVLDIDRFATPGQLVAYFGVLPIEASSGVDREGQARGPRRYVMSRRGNDLVRRYLWMAALSAVRYNPAVRALYARVVAKHPGRKAIAIGHAMRKLLHLAFAIWKSGRPFDPGHYPWQAPGHVETRGQDKGTEEEAGGKGPAEGDQAAGHRPDTQPARQVVTAACADSVAGAVPFGEATAIDFAHLKRQLPIARALDQLGLSDRLRGRGPQRRCACPLHRGDARGRSFSVNLEENVFQCFDRQCGRKGDVIDLWAAAHGYALREAALDLVRTFGLEPTPRSGTEKRNG

SEQ ID NO: 121996 - protein, 402 aa, unidentified
MWFAGIDWAESHHDAVVINETGQPAGSLRVAHTKAGLDELKRFLLEIAKTAEQLACIVETSQGLLIASLLEAGFTVYPVNPKTVDRRRNAAGVKTDAVDAYLLAKTGRADLADLRQLKPDTPIVAELKLLTRDQDRLIQSRTRLVNQLTACLKTYYPAALTLFSKLHQRSTLVFLQTYPTPAAAQAASVEEIEAVLRKEHHPQPAAVAQHIVQILREPQLVADAVTIRAKSRLMLALVSQLLPLLEQISQYDKEITRLFLSHEDNEVFSSLPRAGKHLAPRLLAEIGQDRTRYADAASLQALAGTAPVAFQSGTYAKARKRYACLKPLRNALYQFAWQSTLAEPWALAYYQRKRAEGKSHTVAVRALANVWVRIIYAMWLNHTCYERATFEAAQHAHARVAA

SEQ ID NO: 121997 - protein, 378 aa, unidentified
MRIVCGLDVHKDSVYLCILSSTGEIVEKVFGVLTFQLAKMRDLMLKHHVQEVGMESTSVYWIPIWRVLEPHFKLKLVNPYFIKQLPGHKSDVKDAQWIAECMLKELVRGSFVPPERIQQLRQYDRRIFDLDDEINRKLSKLDATLQRCNIRLSNYVSNTDSKSYKEVVARISEGVTDPKVLVEEIHGRIINRHGRKTIIEALTGVITQADSDMMRQIREEIDVAERHKQECIDKMQEICEKEYSDQLRNLQTIPGVKLRAATSLIAEIGTDMSHFETANHLASWSGLKPRNDESNKVIKSKRITHGNRYLRRTIGECGWAASRTKGCFFSRFSYHQTQVRKKTKMKVQIAISRKLLICAWHILSKNVPYQDFCKREIS

SEQ ID NO: 121998 - protein, 387 aa, unidentified
MVMDAVDQPAAPAPHRPWGVAGIDPHKRTFTVAVLDERGGLHGVASFDTSEQGLAVALAWLGEVGFDLDRVGVEGSAWLGNQVATFLAAAGYDVREVQASRTAERRRRRRRAKTDAEDAQAIARETLAHPDLPPAGKQHAPDPDWEELVALRNQRRSLIAQRRRLLNEAESVLVGLPLVVRAVLPDTSQVRPRLRALTQGAADQLELTGADRVHLAWLAASAADIGRLDQRIGQLDQRIPAVLARHCCTLTEEVGIAAVGAMELLVEVGDPTRFTTEARFARWCGAAPVAVSSGEGDGEPERHRLDLGGNRRVNSVLHTMHITQARCYQPAKDYLGGKRAEHKTAREARRAHKRLLANVIIRRMWADHQRRRSPTLNLSKATTPKAA

SEQ ID NO: 121999 - protein, 373 aa, unidentified
MTERSTFVGLDTSKAAIQVALLREDGTFLEWKEKTDAKSVTRLVRRLKKEAVGELQVCYEAGPCGYALQRQLTAAEVACVVVAPSLIPVKPGERIKTDRRDARHLAQCHRAGTLTVVRPPTEAEEAARDLCRAREAAREDLGRCRHRLGKLLLRRGLHHPGRAWTVAHRRWLQSLRFAEAAEQLVFDDYLRAIEHLDERLRELERAISELSQAAPYREPVAWLRCYRGIDTVTAMALVTELHGIERFGTARALMAYVGLVPSEHSSGATRRQGGITKAGNRRVRRLLIEASWHYRHKPAVGAKLRARRNGQPGWVIAHADRAQARLHKRYWRLLLQGKATNKAATAIARELAGFVWATLVHGHLETATAVRKA

SEQ ID NO: 122000 - protein, 357 aa, unidentified
MKKGYQKEKTLAIGKNVFIGMDVHKESWHVSARIDGEEVFHGNMPSAYGSLQKLLERFKDCTIKVAYEAGPCGFWLYDKLIADGIETIVVPPSLIPLESGNRVKTDKRDSRKLAQLLEKGMLKRVHVLSEEERLHREILRTRRQLIEHRSDVARQIKSKLLFHGIEFPGEAGSGWNRQFIRWLRELGATHQVLSLSLGFLIDLWEHLTDQIKKITKDVFLLAKNKKYAQSISLLKTIPGIGRLVATEILVELQDIKRFKSSENIASYMGLTPSEYSTGQYTRQGRITRCGNARVRSCLVESSWVLIYRDPAMKEKYEKLKSRKGAKRAIVAIARNLIIRIRRMLLSNEPYMCRLKTS

SEQ ID NO: 122001 - protein, 299 aa, unidentified
MHQSRTLDVGMDVPTESSAVAYVAKEHDAEVISLGTFGTRQCDSDTLMRKLQAQATHLVCVSEAGPCGSGLSRSLTKKDSGCWVVAPSFMPQKAGARVKTDRRDARPLARLLRSGDLTPVSVPAGAAEASRALRRAREDTRRDRKAATLRLKAFFLRHDIRDTGRATWSPAPLRWLSEVGWPTPAQPSVLQAYVQTVTEQRARLGRLALARHEQGKTWRFAPGVEALQALRGVQCPVAGTTGAAWGDLTRVANPRQLRHSLGRTPSAYARGARRQQGRLTQTGHTHARRALGEGAWAYR

SEQ ID NO: 122002 - protein, 363 aa, unidentified
MSVQYVGMDVDKQKIVLARLGAGRDTRAIEQVIANTPSAVKKYFTSLLGAAEVHATYEAGCFGFGLYRQLSAMGVTVVLAAPGLIPRKPADRIKTDRRDAHSLALALRAGQLTGIYIPTEQDESVRDYLRMYESLRGDVRICKQRVLQFLLRRGIRYDGGGPWTVKHRHWLSALEFSQARDRQTLDMYLSQMQELEAKCEEAATEVESIAAQDCYRQQTKKLTAFKGIKTLIALSFITDIGDFRRFSNARQFMAFLGLVPSEHSSGNKRRQGRITKAGNSHLRRLLVEAAWHYRSYHPSSRDLIERRRGVDPAVLSYANRAGRRLNRKYLHLLLRGKRSQVAVTAISRELAGFLWGAMTDQVA

SEQ ID NO: 122003 - protein, 410 aa, unidentified
MEVLYPHCAGLDVHKDTVVACVRHMVNGSVRREVRSFKTTTKELLALSDWLAGEGCTHVAMEATGVYWKPVWHVLSDGDFTLVLANAAHVKNVPGRKTDVNDATWLADLLAHGLIRSSFVPDGQTQQMRTLLRTRKQLVRECSRHVQRLQKTLEDANIKLDSVICDIVGLSGRRMIEALIAGETEPGALAAMAHRRIKATPDELEAALRGRVTRHHRFLLQLHLQQIDAVNAAIDQIDQEVDAYVEPFRATVRLLTTIPGIDELSACVILAEIGRDMSRFPTAGHLISWAGLCPKNDESAGKRRSTRMRKGAPWLKTTLVQCAAAAARKKASYLQAQFHRLRARRGAKKALGALAASILTSVYHMLISGELYRDLGPHHFDQRAKAVNTRRLVVRLQNLGYAVQITPLAA

SEQ ID NO: 122004 - protein, 360 aa, unidentified
MIVIGTDPHKQTHTAAALDAKTAEQLDERTVKARDVGNEQLLAWARTLDEERIWAIEDCRHVSGGLERFLLRSGERVVRVAPKLMAGARKSARDFGKSDPLDADAVARAAIREGIETLPAARLSGPEREIALLLDHREDLVKERTRIQARLRWLLHDIDPEIELRERSLDQPSTLKSLSGRLQRMQQTTPVRICREHVRRCSELSRAANGLERQLRPLVKAQAPQLLALPGCGTLTAAKLIAEVASVDRFASDRQLAKLAGVAPLDASSGQQQRHRLNRKGNRQLNLALHRIAITQARIHAPAPAYLARREADGKTRKEALRALKRHLARRVHRVLSAPIHHDRGTRIELDTAISVPCLT

SEQ ID NO: 122005 - protein, 362 aa, unidentified
MSPATQSFVGVDLHQCTVTLAAVDPLGEKIAQLKISTKSVGKIEDWLAALPRPSHLAVEACPFVEWFIERFGPCVDRIDIADATELANRRGKRRKTDRNDSLDIAQRLARGECPLGFIAPPELMQLRKLGRHWRCLSRLLSRTKHSMKSMLNAANIRGPKFDGAAAQRWFLANRDLVGAAQQDAFADFIDILNLVERQRARLRRQMIFASRSGKYAATMVRLMTVPGIAEIWATIITAEIGPFDRFPNADTLEFWAGLTADMKESAGRAQSGHITKAGSATLRWALGKAAVTLCQSDAGQEAIRRRLIARLGKPKANVAMARRLLRVLYAMMRDGKGYQAGPRRDRTAAANKARLGRKKQVA

SEQ ID NO: 122006 - protein, 318 aa, unidentified
MRKSSIEFEQVIERGCGLDVHRDTVVATVMGKGIKTETRTFGTTTSSLKELGDWLESMRVTDGAMESTGIYWKPVLHILREYPINIMVVNARHIKNVPGRKTDKADSQWICKLLISGLLKGSFIPPENIQELRNLHRYKKKLIGTIASEKNRIIRILEDANIKLSSVVSDTSGVTANYLIKGLIEGRKDLDNLISECYHKKLQASPQQIKEAITGRLTAHHAFILKSMQKHIASLEAQIAEIDVEIEKYIKDFEKEIELLQTIPGVRKEGAIGIVAEIGVDMDVFPSEHHLASHSGMCPGNNESAGKKKAIEIETKGK

SEQ ID NO: 122007 - protein, 358 aa, unidentified
MIAMKYYTSTTQFNCGIDLHARQMYVCLMDRDGHKLVHTNIKNNDFDYFLQRVAPWRHDLTVCAECMFGWYWLADACQAAGLTFVLAHALYLKAIHGGKNKNDRIDSEKIAHLLRTNLIPPAYVYPAAKRPLRALLRQRILYVWRRSELLARIQSHQLAHNRSPVRQTRSNRDPWEQQLLAQEDHPVRQLALQNDLALIRHYDAQINTLEVQLQQLTKENAPRDYALLQTTPGIGEHLGLTILHEIGDIARFPTVKDFLSYCRLVKGTVASAGQIKGLRGAKLGNPYLRWAFGEAAVIAKRDPAVIGPLAQRLEARMNGNKFKANTVLAIKLARAVYYMLRNHTVFDPERLVAALTHK

SEQ ID NO: 122008 - protein, 355 aa, unidentified
MIKYSIGIDISKNDFHACLSSIDGGQHVKVIRSGKFKNNKTGFTELTQWINSSCSNKDVPVSILMEATGIYYENCALFLFSKGFNVSVVLPNKSKKYIAALGLKTKNDKVDAKALSRMGAEQALDSWQPMGEYFYKLRSLTRHNQSLKEMRTSVANQLEAAELCMFIDKGTTRSLSKLIKTLDTQIKDNTKAISAHIKSNAEVAQKVSNITVMKGVGELTVAVILAETNGFELFKNIGQLVSYAGYDVIENQSGRHLGKTKISKKGNSRIRRALHLPALCVVKNNEKIFKDLYERTVDKHGIKMKSYVAVQKKLLSIIYTLWKKNEKFDEDYQSKNITSDVEAVHSSRHSFAEAE

SEQ ID NO: 122009 - protein, 391 aa, unidentified
MHISVGIDIAKDVHWVTALDAQGVVQLDHSLHNSPAAIAQLIDELRLLGDVRIGLDVIGGIAGLAQAMFAQAGMVLLHVPGLTVNRARQGSVGGENKSDPRDARTIAEQVRTRTDLRPIEPQTEIDLEIRLLVGRRQDLVMAQTQRLARLHDLLVGIFPGLERALDFSTKGALFLLTRFVTPAELRAAGPQRILRHLRTAGGVPHLQELADRALAAAREQTLSTPGERMSARLIKELALEALATRERLGTLDRELQALLDNHPDAALIRSLPGMGAVLTAEFIAEAGSVSRFRSPDALAAAAGIAPVLRQSGKTRYLRRALGGNRALKRVFYQSAFCSLGHPLSRAFYDRKRREGKRHHQAVIALARRRVNVLWAMLAHRQPFHAELKNVA

SEQ ID NO: 122010 - protein, 382 aa, unidentified
MRTTSPRSDESTVSDRPLFVAVELSTAEWRVAFTTGLSDRIEQRVLPAGDRERLRRVLADAKRRCGLAATAPVRSCYEAGRDAFWPHRLLEAEGVTNVVVDSSSIEVSRRARRPKTDRLDARKLVTMLVRWVLGDGQVWQVVHVPPPEVEAARQAPRTRETLTKERTRWRNRIHAVLATVGVRLRITAAFPVRLETASQWDGTPVPAAVRERALVAWRLLQQIDGERRTLARTLQTERRTARSRAAETVRRLTQLRGIGEGVAWMLATEVCSRDLRNRRQVGALTGFTATHYQSGTVARDQGISRAGLAAVRRVAVETAWVWVKWQPESDLTQWYLRRFGRGGPGPRRVGIVALARKLVIALWRYDREGTVPAGAVLRAAVA

SEQ ID NO: 122011 - protein, 363 aa, unidentified
MTSMTTTTLDVTGGVDTHGKTHHAGVLDPLGRQLGDREFPTTPAGYRALVSWLRSYGQLQRVGVEGTGTYGAGLTRHLRVAGVLVVEVDRPDRKARRAKGKSDPLDAYSAARAALAGTASGVPKTRDGRVEAIRALRVARSSAVKARSQTTNQLKSLLVTGPAELREQLRELSATALVVTCARLRPTVDLADPEQATKAALCRLARRHQYLSEEIADADGELRTLVTVAAPRLLALRGVGPEVAGQLLATAGDNPDRLRSEAAFAHLCGVAPIPASSGRVHRHRLNRGGDRAANNALHIVVLGRLRHDPRTRQYAQRRTTEGLSKPEIIRCLKRYVAREIFTALTTRATDDQPSAPPTMSMAA

SEQ ID NO: 122012 - protein, 347 aa, unidentified
MIIIGCDLHSRMQVIAMLDTETGEVVERELEHESGEARAFYEGLKEPALVGIETTGYTRWFAELLSELGHELVVGEAGKIRALKTRKQHYDRGDAEHILNLLVRGDFPKVWLPPAEERDVRVFLEHRHQLVEMRTRAQNGLQAIALSYGLRRRRGLWSEAGQKALQKLPLREAMERRRADLLRLVRQLNTWIRELDRRIDQEVAQREEAQRLMTHPGVGPQTALATVLVLGPVERFPDDRHLTSYLGLIPQEESSAGRQHFGHLTKQGNRLLRWLLVEAAQTASRSDPQLRRAYRRLVFRKGRPVAKVAIARKLAIRLYIMLRDKIDYPEFCRRGSHAGMPEEVALA

SEQ ID NO: 122013 - protein, 453 aa, unidentified
MCLEDRPVLEPNAAGIDVGAREMFVAVPPGRDEKPVRVFATFTEDLERLTDWLEQCGVTTVALESTGVYWIPLFEILEQRGIRPCLVNARHMKNVPGRRTDWHECQWLQFLHSVGLLRAAFRPGQDVCAVRTILRHRNELVAAASQHVQPMHKALTQMNLQIHHVISDITGSTGRAIVDAILAGQRDGAELAKLRDPHIKADTETMRKSLEGNWRPEHLFTLGQSRDLYRIYQQQIVNCDLEIEKMLQGFAPRIDPGERPLPPDRKRNRAGSKRRRKNGHPHPEFDLRTEAYKLFGVDVSQIPGLEENALPLFSEVGRDMSRWPSAAHFVSWLALCPDNDISGGKLLWRGARRVKNRAGHLFRMAAYALHRSPTPLGNYLRRMKAKLGPQAATMATAHKIAVIFYTMIKNQVEYDETIWDARDAARGKRLQARLKRQAKQLGYELVPIQPQAA

SEQ ID NO: 122014 - protein, 342 aa, unidentified
MAIVTIGLDLAKNVFQVHGVDEFGKPVLRRQLRRSDVEKFFGSQPACLVGMEACGSAHHWARQLSALGHEVRLIAPTRVKAYVQRGKKNDANDAAAIAEAVTRPHMTFVPVKTEAQQGVLMLHRTRDLLVRQRTMLINALRAHLAEFGIVAAKGRGKVADLIDGLDDADIPALARTALRQIAEQIGACDARVEALEKEILGWHKSDQTSRTLATIPGIGPITASALAASVPDPAAFDSGRKLAAWLGLVPRQNSTGGKDRLGPITKAGDSYLRRLLVIGATSVLRYARDKAPGKADWLKALLERKPARLASVALANKMARIAWSVMVRGDVYRETYPVSQTS

SEQ ID NO: 122015 - protein, 389 aa, unidentified
MQIIADRPEALSAIRSDLGAIFISLELSRSTWLITSLSPSGGEKMSKHSVPAGDICVLLARFSEIRQKAFARTGKSFPVIVIQEAGLDGFWIHRVLQNEGIESHVVDPASIATSRRRRRAKTDRIDGEALLRALLAYKRGEPRVCAMVKAPAPEEEDRRRLCRERKVLIAERVKHVNRIKGLLFTQGVSDYEPLRRDRRRRLEELRTGDGRPLPSHLKTQISRELDRLELLLQQIKAVETERDALLAVQRVTARAPAAMLLDIKGIGPEFAATLWSEGLFRHFDNRRQVASYAGLAPTPWQSGSVDREQGVSKAGNPRLRSTLIQLAWLWLRHQPQSVLALWFEERVRRNGGRFKKTTIVALARKLLVALWKYVTAGVVIEGAMMKAAR

SEQ ID NO: 122016 - protein, 351 aa, unidentified
MNYIAFDSHKHYTQACVQDLSGNILQECRIEHERGALARFLRRWNPGSPVALETLGNWYWIVDEIESAGMKPRLVHARKAKLMMGMINKTDKLDARGLNLLQRNNTLPTVWIPPSGLRDLRDLPRTRMVATRERARLKNRIHATLSKYAVKIDEVRDMFGVRGRKILELKLSLLPPHTEYATRALLAQLDASTQMIKTLEARMHKTFDTSPELDLVRSLPGIGFILGTVIMLETGDIKRFPSAEKYASYSGTAPRVSSSGGHTHIGRLRADVNRYLKWAYIEAANVVCVNHKKYPERHISKLYARIARKRGHGKAIGAVARHLSEASFWMQTKGESYREPALRVPVLSTGG

SEQ ID NO: 122017 - protein, 411 aa, unidentified
MNQQHRLFVGVDWAKDNHTICVLDAEQKVIERRTIEHSGTGVGQLGDLLAKLSEGDHGCLAVAIETPRGAVVESLVERGFAVYSLNPKQMDRFRDRHTVAGAKDDRRDAFVMADALRTDLHLFHRVKLDDPLIIRIRELSRAEEDIQHEQVRAGHQLRELLNRYYPQMLGLCPAVDEPWFWDLIELAPLPVPEARLSRSKIEKLLRSHRIRRLDADGIRQALSVPALKLASGAAEAASEHVLLILPILRLFLRQRKELERRIEAVLEQMSTEGQFAEHRDVTILRSLPGVGRVITATMLAEASQPLAERDYHALRSYGGAAPITRQSGKRKSVLMRQSCNPRLRNAIYHWSRVSTQCDQRSKEHYAELRAKGHSHGRALRGVADRLLAVLIAMLDSGTTYDPSRRAAVAPQ

SEQ ID NO: 122018 - protein, 389 aa, unidentified
MKSSQHTDTPVAVEECGTLYVAFELGKASWQVGIVLSGSRKLSRYVVDGGDIEAAWKVIRKAQEKAQKRLGLPVRIVSCYEAGYDGFWLHRELLARGVESLVLDAASIQVNRRSRRAKTDRLDLEHLIRVLMRHDGGEPRVCSVVRAPSVEQEDARRPWRERDRLVEERNAHVNRIKGLLHGQGVRDVQPRAKGFLEQLKTARTGDGRAVPANLVVEIRDEHERLALVDKQITRIEAEAKAARTEAKAGSMAARINQLIELKGLGPVSAQLLVGEVFWRDFQNRRQVGAYFGLTGTPYDSGQSAREQGISKAGNGRAREMAVELAWLWRRNQPGSALSRWFNERVGTQKGRIRRITIVAVARKLMVALWRFLEHGVVPEGAVLRAAPQR

SEQ ID NO: 122019 - protein, 488 aa, unidentified
MSAAGQQEGKKDPTLNARAPKRKARGSRCPQGKGHRRRSKLTITNPDAAGIDVGSRVHYVAVPEDRAPVSVRSFGAYTGQLDELVQWLKDCGIKTVAMESTGVYWIPLYQKLEEAGFEVLLVDAHQAKHVPGRKSDVQDCQWLQQLLTYGLLRAAFRPEDSVCRLRTLQRHRKNLVESAAMWVQHMQKALNEMNLHLHHVLSDISGLSGLRILDGILAGERDPAKLASLAHHRVQKSQAQIEAALTGDYRPELLFVLGQSLQNYRQIQQQITQCDLSIEKQLAKMTDCATPRQAAEPMPSSPELAGGKSGKRKPPVALETSMAGHLKRILGVDLTTIPGLNVLAILTLISEIGTNMTKWRNEKAFVSWLGLSPNNKISGQRVLSSRTRKVVNRAATILRLAAMIVGKTDTPLGSFYRRKRAQLGGPKAVTATARKLGCLVYRLIKNGQGYNAPDLHTYELKYKDQILNSLRKRANTFGFDLVELPKAA

SEQ ID NO: 122020 - protein, 328 aa, unidentified
MMVVLGTDAHKRTHTVVAADGGGAEVGSITVPATSEGHLRALQWAAQWESRRWAIEDCRHLSRRLEADLLAAGELVVRVPPKMMAGARRSARTRGKSDPIDAVAVARAALREPDLPTARLDGPAREVKLLVDYRESLVRERTALQCRLRWRLHELAPGFEPSAGSLDVSKTLDQVEEILGAHHGMVADLALREVARIREITREANQLKNEITARVGEIAPSLLELPGCAGLTAAKLVGEAADVTRFKNRDAYAMFAGTAPIPVWTGNNQKFRLNRGGNRQTNAAIHRIAVTQLRIHPPAQQLIARHIVPCQVSETDFWLGMFGWGVCR

SEQ ID NO: 122021 - protein, 370 aa, unidentified
MSQSSTLFIGMDVHKDTIAVAYVAQDHGAEVTYLGTIGTRQCDIDQLIRKMQSKAKHLIFVYEAGPCGYWLYRYLRQKDYDCWVVAPSLIPQKAGDRIKTDRRDAMQLARLARSGDLTAVYVPTVEDEAIRDLTRVREDTLSDLKAAKFRLKAFLLRHDIRYTGRANWSPAHLRWLSEVVCPTPAQQIVFQEYVRAVNEHTERLQRLEQELQDHVHAWRLHSVVEALQALRGVQFTVAVTMVAELGDLTRFDSPRELMKFLGLVPSEYSSGERRQQGSITKAGNTHARKALVEGAWAYRYPAKVSRHLQLRLEKQPKMIQDISWKAQVRLCKRYRQLVARGKHANVVTVAIARELAGFMWAIAKQVPVAA

SEQ ID NO: 122022 - protein, 438 aa, unidentified
MNKSNELANLPPVTEFGAFVGVDWGDEEHALSLRAANGKVIERFTLQQTPEALAQWLNTLRTRFANQKIAIALEQSRGPLLAGLTQYEHIVVFPVNPKSLARFREALYPSRPKDDLGDADLLLEFLLKHRDHLRPWQPDTVETRQMAILNEQRRGFVDSRTELTNRLLAHLKMIFPQAIDLVGGNLTSPMAADFLKQWPSLSMVKKVSPSNLRKFYYGHNSRSEELIAERLELVKNAVALTTDAALVAAHSLAIQTLASQLAALHPFIEKHDDQIAELFAAHPDAPIFESLPGAGPSLAPRLLVSLGTDRGRFSSAVEVSCLTGIAPVTEQSGKSKWVHIRWSCPKFLRQSWHEFANCSIRFCPWARDLYNEYRKHNISHQEAIRKLAYKWQRIVWRMWQDRQPYDEARYEAALLKKRGPKTSAPTLQSNSLSGEQKN

SEQ ID NO: 122023 - protein, 334 aa, unidentified
MLYVGLDVHQNRSSLCILDHNGKTVKQELINGPWPQMIDRLRGIGEPISVCYEASCGYGHLYDRIAPLATHVAVAHPGQLRLIFKSKKKHDRVDAAKLAKLLYLDEVPRVHVPNVAVRSWRKLIEFRQTLLGKRVAAKNQIRAVLRGNGVAAPRGLWTKKAMRWLATLDEELPAGEQLTLEMALQEIAELTAKIKRVEQELAKIAARHPGVMLLMTIPGVGIRTAEAFCAYVDDVKRFARNRQVGCYFGLVPCLDSSAGRDRFGHITREGPGTVRKLLCEAAWSCVRYNPKLRSFFQQVTHDDPDRRKIALVATAHRLCRIMAAMLRSGEVWRP

SEQ ID NO: 122024 - protein, 310 aa, unidentified
MTSIDQNYIGCDVSKARLDFFDPARGRHCRIANEAAAMEAFVAGLRPGVDFVVMEATGHYDRLLRLALSAGGIAFSRHNPQHTHHFSRSVGRRAKTDRQDAVMLAEYGRLHKPAPDAAPDAEVERLQALARRRDQLVDIRARERKHLAEAFDPDVRADIEALVAILNTRIAALEAGIRDTIGQSRDMARNYAILTSAPGVATVTALTLIAHMPELGRRSPKTIAALAGLAPIANESGRRIGKSAIAGGRTRVRCALYMAALGAIRASARFKATYEQIAARAGSRKLAIIAIARKLLVALNAMIRDQKQFI

SEQ ID NO: 122025 - protein, 348 aa, unidentified
MVVIGVGSHKRTHTVVAVDGTGRKLAERTVATTGEGHLELLNWSRRWLERTWAVEDCRHLTRRLEADLLKGGEAVLRVPPKLMAGARRSAREPGKSDPIDALSVARAALREPNLPVARLDGIERELRLLVDYRDVLIAERTRHEARLRWFLVELGVAEPAARTLAQPVVLAAIDRQLVGRPEPCARIGGYLVTRIAELTEAIDALAREIRERTETVAPALLDLVGCGPLTAAKLVAETAGIGRFRSRAAFAAHNGTAPIPVWSGNLVRHRLNRGGNRQLNLALHRIAITQLRCPGPGREYVAKRMAAGDTKTEAIRALRRRLSDEVFRRLHTDEAARAALEGVARAAA

SEQ ID NO: 122026 - protein, 472 aa, unidentified
MKDRRLVGIDLGITSAHTVRILDGEGTTIAKRKCWPTTESLSEVETEALRGCAAATALEVVMEPTGPAWLPIAVFFSARGHQVFRVSSQKASDLRRFLSRHTKTNGIDAETLARLPLFDPTGLQALELPTAERAGLDRRVRACDRLTQAGATHKRRIKDLMRQLIPMSPLSGDLGVADMAVLERYADPNALVRLGEKRLGDLIAKVSHGHQGLERAREWLGAARAALELYEGHPAVAFSDLAAEVASEVRLLGAVQRELAAHGAVREEAYRVVDPDALARSLPGLATIGGPALVATMGDPGRFTQGKQFRSFSGLTPKASETGETDRKGQPMSKAGSSLLRTTLVRAADTARKLDPQLARIYFVQMTERGKDHLGALCVVAANLAERSWAVMARGTPYVICDTDGRAVDAEEAKAIIAERFTVPPEVRARRRSKKSGGKAPKNVLSGQSTPRAQGGSTRGYLPPDVSSALAS

SEQ ID NO: 122027 - protein, 480 aa, unidentified
MNVKARRTKKQVNVENQAINLLSKEELNKKIEVVEKELRSYTWRELETNGKFAKNDKLSFITDDMLIVGCDIGSETHYIRAIDVRGRELSSGAFEFSNTSEGFANARAWVLALAAKNDKKQIVLGLEPTGHYWFALAAWMISNGISVVQVNPYAVKQSKEIEDNSQLKDDRKDPKLIANLVKDGNYGMPYLPEKVYADMRRLSMFRDQLTEDRIRNINRLHRELKIYFPEYMDAFGKIDGAFTLEVLKVSAIPSDITALGAEGIKNIWHNVKLRGCGYSRANEIVSYAEKSVGLTDGTDAGREAVKWYAEQILRLDEQLSEIESALHEKCREIPYAENILAINGVGENILAGILAEMGDISRFDDVKEIQKLSGMGLVACSSGKHKGQTKISHRGRKRLRYWLFQAAKSAVSHADEFKQLHEYYTTRSNNPLKKMQSLVVIACKILRVIYTILKTGTTYDPQKLLKDIKRPTASQAPMAA

SEQ ID NO: 122028 - protein, 354 aa, unidentified
MSNVNSAIATIGIDIGKNSFHVVGQDERGALVLRQKWSRHQVEARLANLPACLVGMEACVGAHHLSRKLQALGHDARLMPAKYVRPYSKGQKNDFRDAEAIAEAVQRPTMKFVATKSTEQLDLQALHRVRERLVGQRTGIINQIRAFLLERGIAVRQGLRFLQTELPSILATRSDALSPRMLRLIDDLAGDWRQLDGRIEDVSEEIEALACQDPACERLMTVPGIGPIISSAMVAAIGTGDAFSKGRDFGAWLGLVPKQISTGDRTILGSISKRGNRYLRALFVQAAWVVLVKLGKKWERYGLRSWIEAAKKRLHHNVLAIALANKLARIAWAVLHKGRAFECAKIDALSARPI

SEQ ID NO: 122029 - protein, 368 aa, unidentified
MVQRFHGIDRHKRSSTISVLNREGVEVAFIASCASFSTYIEKLGAEDAVVMEVGMGSFWWADKIESKGASCYVIDPYRFRIIKDSWKKTDKHDSRTMAKALWVQTVSGEFGLPVVWKPTVLIRELRKLFAQYMDLNVHICMLKNRVQSLAVENGITLTLMQKKELLSPRTGAETLGKLELSDASRLAVRMNQEILWGVVKQKELLAQEILRMGSPLAKEVKLLLTIKGVTFLTALAFLADVGDVRRFRTLRKMNAYLGLVPRLRESGQKSHAGHINRASRSLTRTLLTQSVNKALEGSAALRRFYEQVRERSGTGRARIAVIRKLCGVMRQMLLKGEGFRETKEELYAKKLRLYERRLEELKGEQKSA

SEQ ID NO: 122030 - protein, 362 aa, unidentified
MNEVITIGVDLAKNVFQVHGIDGLGAVIIGRQLRRSQMLPFFKKQPPCLVGMEACATAHHWARQLVALGHAVKLMPPKYVKPYVKRNKNDMADAEAICEAVTRPTMRFVEIKTRDQQSVLMLHRTRQLFVRQRTTLINALRAHLAEFGIVAGVGRNGLERLLKVIEDGEDDRVPAAARDCLLALRDQLEMVKGQVLDADRHILAWHRSSEVSQRLDDIPGVGPLIATALVASVPDPHVFKSGRDLAAWIGLVPKQNSTGGQGSSRSHLQGGQSIFAHAVGRWRPLCDPPCQASGLHPSALADKAIATPLDQDRGHRAGQQDRPHGLGDDGPWNILPGASIRGRLKHAPALPALKRLERTPDE

SEQ ID NO: 122031 - protein, 409 aa, unidentified
MRCYLGVDWADQTHAVWVVDEAGTKLTARAVPHTAEGLSEWGRELDEWRAQGIELWAAIERPEGRGVDFLLDHGVVAYPVNPKALDRGRDRFRQSGAKDDPFDARVLADFLRTDHAHLHALQPSSEAAQELKLLTEDYHRQVRQQTRLVNQLTITLKAYYPRALEVAELTTALAREFLQTYPTPEAVTALTKRQWQRWAGAHHLSETRTRALWEVLQQPQLPVPAHVVRPKARLMRTLVAELAAVVAAVGEYREAIEDFFASMPTAQWIRTLPIGDHGITAPTLWARLGDAPERWESFRHLQAQAGAVPLTKRSGKQRVVQFRFACDKALRYVVDHVAFLSLRSCEWARAYYDHQRARGHSHRQALRALGAKWLKIIFVMWQRQASYDDQYHLAAMARQQLRQPQKKIA

SEQ ID NO: 122032 - protein, 321 aa, unidentified
MTYIGIDVSKATFVVAYSSAKTGRTKTFKNTVKGVREFIRTISATEHHCVLEATGNYSALLVYLLSEARITVSLENPLKIKNFARAMLSVNKTDEIDARLIALYGERMQPVPYKLRSDSILILKQKRTVLRQLKKQLVATRNLKGSLEVLPSFDPECKKTIEKTIVFLEKQIKAMEEKITSLAQGEYKKQMDLLTSIKGIGATLAAALIVATGGFTYFDNAKQLTRYLGLSPTYQQSGTSVNVKGHINRNGDSNLRSQLYVAAFSSLRYNTECKACFERLRSNGKPGKVAVVAVANKLVRQAFAVVTQGKPYVDGFKSERQ

SEQ ID NO: 122033 - protein, 331 aa, unidentified
MAITAWLGIDIAKQKFDVALNWKTRRRAKVFRNDAEGWQALLRWLKDLGIGPVHACLEATGRYGDGLALHLHDAGHRVSVVNPAQIKHFGRVKLGRNKTDRADAALIGEYCRLFEPAAWTPPTAALRELRDLVRTREALTASRVEWTNRRGSGQGTAAADAAMAGVIARLEAEIAALDQAIEDAIGQDEAVQARHDLLVSVPGIGTHTAAVILSELPGPEVLHTAREAAAYTGLNPSHRQSGSSLDAPSRISRIGNATLRTALYFPALAALRWNPLVVALRQRLRDQGRLKPKQIVVAAMRKLLHLCFGVLKTGKPFDPNHTTSKETTVAA

SEQ ID NO: 122034 - protein, 401 aa, unidentified
MATVRDNAIRVKRFRELKATLRTDRTRLLVGIDVAQAEHVVQLRHAHTRVVVPTFTIPNSTRGFTQLWTWIQQAQRTTGCRDVVCGLEPTGTYHQALATFLEAQGADVVRCSSSVAYWNRRTQDRTWDKNDRKDAANCADLLEQGKVLFASQPTGPLAELRHLVKCLRRARTELAACKARWRTTLRPALAPMGDALPQRLWAELPAALQAWERAAPGRPAVPKGRLPLGLATACADLGAQVTAVQGRTATLEAALTPLAERLPAYTLLRTIPGVGPTVGAILLAEIGDIGWFTKFSQLRKLAGLDIVRVQSGKFAGQFRISKCGRGLLRWALYHAAVGLARTAAGQARLAALKTKRRGDRYAGFKAVTELAAKQLRVVWGVWRSGMPYDPTRAGGLRRQPR

SEQ ID NO: 122035 - protein, 412 aa, unidentified
MKRIRERVAGLDVHRDTVVACCQVKQPDRSIEVTKQSFATTVKGLGEMAAWLSDAGVDTVAMEATGVYWKPVYYCLEGLFDELWLCNAQHVKNVPGRKTDLSDAEWLADVAAHGMVRPSFVPPPEIRELRDVTRYRKTQVEARAKEIQRLEKTLQDAGIKLSSVASKVWSKSSREMIEAMIDGERDPKVLAQMAKSRLRAKIPQLEEAFSGRFGPHHALVCRQVIEHIDFLDRSIATLTADVTERLCPFESAVTLLCSIPGVSRTTAEVMIAEMGVDMTRFPTSGHLCAWARVAPASHESAGKRQPVGTRQGSTWLQRALVEAARGAARTKGTYLSAQYSRLARRRGSNKATIAVAHSILDISWHLLTNGALYDDPGARFFELRHDPAIEAKRLQRRIEALGFKVSIAPAAA

SEQ ID NO: 122036 - protein, 386 aa, unidentified
MHEQQSQDQSAIRTDLGAIFVSLELSRSTWLVTSLSPGAGERLSKHSIPAGDIGGLLARLAQLQQKAAARLDRNFPVIAIQEAGLDGFWIHRVLQGEGIESHVVDAASILTSRRRRQAKTDRIDGETLVRTLLAYKRGEPRVCSMVRPPSPEEEDRRRLCRERKTLLAERIKHTNRIKGLLCAQGIFDYDPLLRNRRVRLHGLQTGDGRPLPDRLTAQISRELDRIELLMTQLKTVEAERDVLLEPVSGGSPTPAIMLAQLKGIGSQIATMLWSEALYRHFDNRRQVAAYAGLAPTPWKSGSIDHEQGVSKAGNPRLRTTMIQVAWLWTRHQPTSALSQWFFQRVERNGGRMRKTTIVALARKLLVAFWKYVTSGVVIEGAVMQAT

SEQ ID NO: 122037 - protein, 402 aa, unidentified
MSNPVGRVVIGVDPHKLSATIEVLDQHEKKLGTGRFTTDHAGYTAMRTYASTWPDRVWAVEGANGAGRPLAQRLLEAGEHVVDVPAKLAARVRLFDTGHNRKTDALDAHSVAVVGVRTKSLRVLRRDGELEAVRMLSDRREALTRRRVQTVCRLHALLAELLPGQAKKDLTSGQAKVMLASVRPRDIAGKTRRRIAAEELADLIAIETKMKKATAELKAMVQARQSHLMDIHGIGPVVAARILADVGDVARFADRNRFASWTGTAPLDASSGEQNRHRLSRAGNRRVNHVIHIAAVTQLRLDTDGRAYYRRKRAAGKKPAEALRCLKRRISDVIYKQLVADAIAAGASPGGHCGASQESSAVDLPPHIDTSDQPLPDPHSRRYAAPVPPRKSTVTRTLEATR

SEQ ID NO: 122038 - protein, 362 aa, unidentified
MKEILQSAQEQFGPAGISTTIGLDLGDRWSRYCVVDCSGAVVEEDRVRTSTAGLEQRFRQMPSTRIVLEAGTHSPWVSRLLESQGHEVIVANARKVRLIYESDRKNDRLDARMLARLGRVDVSLLAPVRHRGAETQADLAVVRGRDALVAARTQLVNAVRGMVKTAGGRLPKSTTAAFSRKVLPLIPVELKLAVEPLLASIASLTEQIRNADEHVATLADEKYPETKVLQQVKGIGPLISLTYVLTLEDPYRFSKSRTVGSYLGLRPRQKESGDSSPQLGITKAGNHHLRWLLVQAANYILGPLAPDSGLRRWGLRLAARGGKNGKRRAVVAVARKLAVLLHRLWVTAEVYEPLYGVESEAA

SEQ ID NO: 122039 - protein, 344 aa, unidentified
MKKVLIGIDFSKEKFDVAIIVKSTSTQEHALFDNKVSGYRKMIKWINSVVEDVPCSSWLFCGETTGGYSRMMSDWLYAQGYDVWIENALVIKRTFPLKRLKNDTVDAFMIAEYALRFEDRVQLYEPLSQALTELREIFLYRHHLVRHRCSFEVRRIEKRFTQQKSANKNVISQSARHIITEINKEIAKCDEKIKEYIESDDQLSSIFAIVTSMPGIGTINAVSLMVYTNNFTKFAYNPRKIACYYGIAPFGRDSGTSVHTDPRVGFIANKMLKSLLTQAALASVRTCPQIAKYYQRLIERGKKPMVALNNVKNKMIAIITAMVRTGCMYQPDNICLATQSVIVK

SEQ ID NO: 122040 - protein, 316 aa, unidentified
MPVEHFGCDADKAFLTVACHERPGHLQRIGNDVGPIDEWLSGLAPDSVLAVEATGTCHQVLLERAVRHSLTIYLLNPRDVRHYAESMRRRAKTDRVDAQVIARYVARERDNLRPYVPPSAASARLQVLLRRRASVVQNFTGLKLSLSDLEMPEKDHLYTGYAALLKALDEQVDAVIAQEERGVQQREQLRTIPGVGPLSSAALVSLFWRLPGITADGLIAFVGLDPRPRESGSFRGQRKLSKRGDPELRRLTYMAAKTFGRHELGRALYERYRQRGLSAIATYVILARKILRLAHALITKDTFFDPERFAAACVRT

SEQ ID NO: 122041 - protein, 343 aa, unidentified
MQTITTIGLDIAKSVFQVHGVDAGGQVVIRRQLKRRYVLAFFQKVPPCLVGIEACASSHHWSRELKALGHNVRLIPPAYVKPYVKRQKNDAADAEAICEAVTRANMRFVETKTPEQQSGMVLHRTRHLCMRQQISVINAIRAHFAEFGIVAAVGRKGVEELLNIVADPSDKRVPEIARTCLAALGTQLRRLKEQILEFDRMIRAWHRSSEMSMRLDVAPGVGPVLATALVATVADPNAFRSGRNFSAWIGLVPKQHSSGGKNRLGSISKQGDRYLRGLFVIGALAVIRYAKIHGTKHRPWLTAFLARKPAKVAAIALANKMARMVWAMMARGERYKEPVALAR

SEQ ID NO: 122042 - protein, 341 aa, unidentified
MSEVRTIGLDLAKNIFQVHGADASGAVVFRKQLRRGQVLKFFGGLPRCLVAMEACGSSHFWAREIGRLGHEVRMIPPAYVKPFVKRQKNDMADAEAICEAVQRPTMRFVAIKNEETQGAAVMLRARDLLIRQRTQTINALRGHLAEFGEVAAKGSTYASKLIAMVDDPQTALPETARTALRYLTAILSQLNDQIRTLDAQIMRRAREDETARRLMTIPGIGPLIATALVALAPSPETFKRGRDFAAWLGLVPRQHSTGGKQRLGSTTKMGERSLRRLLIMGANSELVWRTRKGATPGTWLAKMLAHKPPMLVRVALANKMARIVWAIMAKGGTYRAPVAAA

SEQ ID NO: 122043 - protein, 451 aa, unidentified
MKKHKEIGEPLGDVHPNAAGLDIGSREIWTCVPADRDAERVRRFGTFTPDLHHLIDWLAQCGVDTVAMESTGVYWIPVFEILEARGFEVYLVNARHLKNVPGRKSDYQDCQWIQKLHRLGLLARSFRPDAEMCRLRGYLRHRAQLVQHRSPHILHIQKALQQMNIQLPQVLTDVMGTTGQAILRAIVAGERDAVRLAQWRHPACHSSEDMIAKALTGDWKEEQLFILKQSLELYDFYTTQIAACDAEVERQFSVMKPRWTVTDPLPPSKPKRRHRHSPAVDVQTAAIRLTGVDLTMVDGLSAALVQTILSEIGTDMSKWPTVKHFASWLGLAPHNAISGGKVLHSETLPTTNRAGQAFRQAALAVARSPSAFGAYYRRKRAQAGPQFAQVATAHKIARTVYFLLTHHVPYQDLGAEAYEQKHRERELTALRKKAAKLGFALISPQPAQIET

SEQ ID NO: 122044 - protein, 381 aa, unidentified
MHPDPLQCCPPARLARAGPPPDQQKELAITTIAHPERPRVTVGVDTHLDVHVAHAKDQLGRRMETVSIPTTPAGYQDLLAWARGLGEVEAWGVEGTGCYGAALTRFLGDQGQVVLEVNRPDRQARRRRGKSDPVDAEAAARSVQAGEVTTVPKAGNATVEMIRSLRVARQTAIKARTQAINALKALLVTAPAQLREQLRGRSAAMLVRQAAALEPGPLVTPTAAAKLALRCLACRYQALHAEVATLDAELDRLVAKAAPGLVARFGVGPDSAGALLVAAGDNPGRLRSDACFSMLCGSSPIEASSGKTRRHRLNRGGDRQANAALYRIVVVRLRWHQPTKDYMARRLTEGKTTKEIIRCLKRYVAREMFTVLNQTVPTPAT

SEQ ID NO: 122045 - protein, 309 aa, unidentified
MEIVVGIDVSKDRLDVHVWPSGEAFAVPRHHAGLLELQARLDGLGPARIGVEATGGYETVVAASLAGQGHPVVVVNPAQVRAFAVALGQRAKTDPIDAAVIARFVAATRPEIRPLPDAATQLLADLVARRSQIVAMIGAEQQRRKRTGERRLLRSLDRLVAALEKELSQVETAIDDAVRGSPAWREKEDLLASVPGVGPQTARRLIADMPELGALDRRQVAALAGLAPFTRQSGRWRGRSVIGGGRASVRSALFVAAMVAARHNPVLKAFADRLKAAGKPRIVALVAVARKLLTILNAVLRDKTPWRTT

SEQ ID NO: 122046 - protein, 432 aa, unidentified
MAQLVEEYAMEVMYERAAGLDVHKATIVGCVRIGTGRKVTRECRTFETTTDGLLALSAWLVECRCSHVAMEATGVYWMPVWKILGEGDFVLVVANASHIKNVPGRKSDMNDAMWIADLLACGLIKSSFVPEEDVQELRSLLRTRKQLGREQTRHVQRIQKTLAEANIQLDSVLSDIMGASGRRVIEAMIEGIRNPRQLAALASARIKATPKQLYDALHGRLTDHHRFLLKLHLRQWDGLDATIREIDLEVEARIARMDKEVKAGEAPFCDLIELLCTIPGVSTLSARTILSEIGRDMSRFQTAGHLVSWAGLCPGQNESAGKRKSARLRKGAPWLKTMLVQCAWAAKRKKDSYYRAQFFRLQSRRGPQKAICAVAASILTAIYHILRDGTEHQDLGADHFNHRSAEGQTRRLVAQLAKLGFDVQLQPTAEAA

SEQ ID NO: 122047 - protein, 351 aa, unidentified
MYYAGLDLHRKYFTLCVLTSEGQVVCDHRRLPADLEPLLSLLRAVGGPVTVTVEATLQWAWLHDRLTAAGFTVQVAHPQQVKLICHARCKTDPIDARKLAELTRVNLLPSIWVPSPAVRSWRQLIRGRAALVRWRTRAKNRIHGCLAAENLRVATTDLFGRAGREWLAHAPVSPTARRDIEVQLAVITALETQITGYDTDVKRIAKQPEAQRLQTIPGIGVFGAALLLAEIGTIQRFHSAHELAAYAGLVPSTRSSGDKTSHGGVSGASNRWLKWILIEAVQTLKQVPGPVRFHYERLLRAKGKPKATVAAARKLCTYIYWMWTQGLTYATWLETETKRVGCPMQTLASSA

SEQ ID NO: 122048 - protein, 344 aa, unidentified
MTYYAALDVSLRSVAICIIDDQGAVCLERTVGSEVNDIVGCLRGFDQPIETVGFEAGTLSQYLAQGLQSDGFEVVCLEARQVSAALSAMRNKTDRNDARGIAQILRTGWYARVHVKSRASHYSRALLSSRKAVLQKCIDLENEIRGLFKVFGIKLPASLGHGPFDARVRPLIEQDVELAEALLPVLEARLMLYRTYLVLDRRVKQEARNDAVCRQLMTVPGVGPITAMTFKAAVDDPHRFRRSRTVGAHFGLTPRRHQSGEHDNPGRISKAGDGDVRAVLYAAANALMGRTQRWSALKAWGLRLQRTKGRRRMLVAIARKLAVILHRMWIDGTTFQWGKEAEAV

SEQ ID NO: 122049 - protein, 330 aa, unidentified
MSLFIGIDIAAKTFELTLRANGKSSKTEQFKQTPEGHAQVVKKLLALSPSLIVMEATGIYYFDLAVALTKAGLPVAVINPKSFHHFSALKLNTNKTDAVDSALLAEYGERMGPRLWTAPQDDQLGLRDIGRQLNRLTASRTQAKNRLHALMSKGATLSLLIEDEMDGIEQLERRIKRLTQAAMKLIEQNDKLAAHFEHMTAAKGVGQTSAIAILAELNVLPGTMKSPQISRYAGLDVRATQSGTSLNKPPRLSKAGNAYLRAALYMPAMSAVRHDPRAKAFYETLIGRGKKKIQALCAVMRKYLVGIWACMQTQTPFDSTLLFSESHIKT

SEQ ID NO: 122050 - protein, 391 aa, unidentified
MIFVGIDVAKNKHDCFITNSDGEVLFKSFTISNNLDGFDELYQKIESVMEDVSKVKVGLEATGHYSYNLLGYLLDKGLTTFVINPLHTNLYRKSLSLRQTKTDKVDARTIASMLMSDVNLKSYSDTSYHNEELKSLTRYRFDKVKERAKLKISISRLVCILFPELEKLVPTLHQNSVYELLYEFPGARQVANAHLTRLTNLVATASKGHYTKDTALVFREAARTSIGSNMPAKSLELKHTIKLIRELDAEIEEIENEIKTIMDEINSPILSIPGISYRMGAMIIAEIGDFSQFDSPDKILAYAGMSPSTYQSGQLDNCHSRMEKRGSRYLRYALYNATTYVCLWDPTFKAYLAKKRSEGKHYYVALSHATKKLLRVIYQLEKTGQQYIKAV

SEQ ID NO: 122051 - protein, 346 aa, unidentified
MQYDAGIDVSLEQSSVCVVDAAGKIVKEAKVATDPHVLVTFFKGLGFPVTRIGLEAGPLSQWLYAGLIQAGFDVVLLETRHVKAALSAMVVKTDRKDARGIAQLIRMGWFRAVHAKSASSQEIRALLTGRRLLLDKLRDVELSLRGVLRGFGLKLGKVTQRAFETRVRELVANHPMLQQITRSMLLARATLQREHNVLHKALLKIVRRDKVCRQFMTAPGVGPIVAITYKTAVDDPQRIKKSKGAGPLFGLTPKRYQSGETDVIGGISRSGDAMVRAMLYEAANSLLSRTTRFSALKRWGLAVAKRRGMKRAKVAVARKIAVILHRMWIDGTSFRWSNKEKADAHA

SEQ ID NO: 122052 - protein, 498 aa, unidentified
MSDVGIEIAKAPLDSAVRPSGQQWVSAHDEAGIAEVSARLQALQPQLLVLAATGGREVALVVALVVALVVALVATLGAAGLPVAVVHPRQGRDARPPVAASGQLATTDALDAALLARVAQVVHPTPRPLPDAATQEVAALLARRRQLVGMLTAQQQRLDTALPAVARHLQRPIAWLEQELGERERRRRERAQASPLWRAREDRVRSVPGIGPTTALPRLADLPELGRLDRKAIAALVGVAPLSCESGAWRGRRVVWGGRARVRTVLSRATLVATRHNPVIRAFSARLCAAGKPKKVALTACMHKLLLILKEWAECRATISRLDTILSDMRKYGFTLATSLFTASALFGGFGNSTPSPTPQDRAAAFISIMVLILVLFFMDTYYQTLLNGAVERALDLEKVTQRQVDITDYLSTNAARNWSTYATVFVYVGLLFTTGFVGFSVAGTSSILDITAWTYTQRLLAGWFGALALLMVSYWLLAQIRTGGFTMKDRSGITSSS

SEQ ID NO: 122053 - protein, 333 aa, unidentified
MNKITLIGIDTAKQIFHLVGVDAHGRYVWRKQVRRARLLTILAQIEPCEVVLEACGASHHWARSIKASGHTVRLIAPQHVKPYRRGQKNDYRDAEAIISAALSPGMRFVGVKRVDQQAEQALHRVRSRLMSHRNAAANELRGLLGEYGVVFGRGLKPLREGARCFAETEEAQVLGLVELVNDVLEEMDVLQQRMDHYERLIERRVQTDETSRRLRDELSGVGKLSASALRVKVADVRDFGNGRHFAAYLGLAPGHSGTGGKVHIGHIKRGHDRYLRQLLIHGARSALRHLGDKQDSQSRWLRGLLERRGFNIASVALAHKNARQAWAIMAREQ

SEQ ID NO: 122054 - protein, 346 aa, unidentified
MTIVEDACAIIGGVDTHADAHVAAALDSIGGLLGVREFPATAAGYCGLLDWLGGFGPVALVGIEGTGSYGAGLARHLAAAGIRVVEVDRADRQDRHRAGKSDPLDAVSAARAAQSGRAAGAPKGRDGAVEAIRALMVAKRSAGHERTQAINQARALIVTGPEELRARFARHTPAQLVAELAALRPRPGDVTGYATRVALRELGRRARFLDAQIDQLDELIVPLVTARAPGLLALHGVGPDTAARLLIAAGDHPARLRSEAAWAHLCGAAPIPASSGKVTRWRLNRGGNRDANHALWRIVICRMASHPATRAYVARRSKEGLSKKEIIRCLKRYVAREVYPHLRPAR

SEQ ID NO: 122055 - protein, 326 aa, unidentified
MSRIQGKTTSSQLVTEQVYVGIDVSKSRLDVFLHPIAQSQSVSNDKVGLQQLVRLLRKYPPELIVLEATGSYHRRAHRHLHDAGFAVAVMNPFRTRKFADMLGQLAKMDKIDARSLALFAAMVQPGAKAPPAPAQADLAALLVARRQATQAKGALNNQLNVSEHRLVRQQLKARIAMAERHLKALDAEVQQLLRNEPALKNRFDILTSIPGVGPVSAVTMIAELNELGDASATQIAALVGVAPMNCDSGAMRGQRHIRGGRCAVRNALYMAAVAAVRSNTDFSAFYQRLRDNGKPFKVAITAVIRKIAIVANTLISENRKWEPVRP

SEQ ID NO: 122056 - protein, 312 aa, unidentified
MYHMKEELVYVGVDIAKAYLDAAIGNEKRRFANDTLGHRQLINWIKQMPASVQVICEPSGGYERALVRALVAAQLKISLVPANRVRQFARAAGILAKTDRMDAKVLCAFGEAMQPGTISASQLEQEHLRELESQRRHLTHLLVMEQNRAVRMSDLWVCKLNRRLITQIKKQIEQVDLLIQQQIKASRELSSKAEKLTAISGVGARTAALLLAQMPELGQLNRREVAALVGVAPFNRDSGRMRGKRAIYGGRRSVRHGLYMAALVAARHNPILRAFYLRLRAAGKPAKVALTATMRKLLIVLNSSLKPDLTYA

SEQ ID NO: 122057 - protein, 311 aa, unidentified
MAPSVYVGIDVAKAALDVATLPPVLAPVQYANDSAGSARLVRALEAVGPALIVLEATGGYETAVASALALAGLPVAVVNPRQVRDFAKALGQLAKTDALDAGVLALFAERIRPTPRALPDEAHTELLALVTRRQQLLDMLIAERNRLAMARPSTKRSLDEHIRWLQARIRDTEELLHAALKRSPIWRAQEQLLRSVPGIGPQTASRLLVSLPELGRLSGRAIAKLVGVAPLNVDSGQHRGHRQIWGGRAPVRSALYMATLVAVRHNPTLRRYYQHLRGLGKPPKVALIAAMRKLLVILNAMIKHQQPWQPA

SEQ ID NO: 122058 - protein, 422 aa, unidentified
MLEESRDDEQLITHVAGLDIGKESLMCCARVPDENKPGRRLQEVQTYSTMTRSLIDLADRLTTLRVTRVVMEATSDYWKPVFYLLEAHGFDVWLVNARDVKHLPGRPKTDKLDAVWLCKVAERQMIRPSFVPPAPIRILRDLTRYRVDLVVQSGAERSRAEKLLEDAQIKLSVVVSDLFGVSGRAMMTALIAGERDPQTLADMARTRLRGKIPALREALTGRFSDHHAFLLGKMIARVDAIEADVREVEARIEAHLAPFAAAAVRLLEIPGIGPAAAATIIAEIGVDMTRFPTPAHLAGWAKFAPGVKESAGRRKGRGSTGYGDRYLARTLGQIAVSAARTRTFLGERYRRIARRRGTKRAIVAVGRSVLTIIWHLLSDPDSRYHDLGADFYLSRTDTERRKRNHIHQLEALGYRVTLDLAA

SEQ ID NO: 122059 - protein, 351 aa, unidentified
MRKIAYLGMDVHSKHCVLGDMDFKGNFKGTQTFPTSEQNIIKALEAIKAKNKYLTLEEGNLAYWAAQVAAPYVTEVIPCDPKENALIYRGPNKNDKVDTRKLCRLLRLGELKRVYHPETDERAIFKAAAQHYMDLRDQQIALKQKIKAMYYHWGVIDVAGEAVYSTAKRNDYLRQIKHIEIRNQVSRLYYVMDQTESMQENALKAMKQLGRKYPEIKQFKKIPGIGDILAHFFDAFIQTPHRFANKHRLWRYCRLGVTDRTSDGKPLGFKRLDRSGVAELKSLSYRAWMSALRGDNEVRRFYTTSLQRTFSRVHARLNTQRKIIATMYGMWKRGEPYNPKRFLDSPQSGAV

SEQ ID NO: 122060 - protein, 339 aa, unidentified
MNHYAGIDVSLECSSVCVVDTSGKILREARVPSEPEALIAWFHSLGFELERIGLEAGPLSQWLFAAMREAGLAVELLETRHVRKAFEAMPVKSDRNDARGIAQLMRLGWFRPVHCKSMNAQETRAILTARKLVQSKLRDVENSLRGILRGFGLKVGKTTELKFAGRIEELVESHPHLTRIADALLAVREVLRKEFAAFEKQTRKLARSDLRTRLLMSTPAVGPIVALTYVSAIDDPSRFKSSKQAGAHFGLTPKKHQSGETDYTGRISKIGDASVRTALYEAAHVMLTKPLKGCSALKSWAMRIARRAGMSKAKVALARRLAVIMHRMLADGKPFNAAA

SEQ ID NO: 122061 - protein, 355 aa, unidentified
MQKYNISFKGQNIFVGIDVHLKTWHVTTLTESGYKYSFAQHADARELFERLNKKFPEAHFKSAYEAGFCGFSVHYALTEYGIENIVVNAADIPTTGKEKAMKTDAVDSEKIAWSLKRGELTGIYIKDKRFMDDTNLMRLRQRFIKDLSRQKNRTKHLLYTQGVIYPKRFLNSRTHWSRNFMQWLREEVELLSEEKLTLALLCEQVENTRRAILTVTREIRRLSMTEKYKDNFDLLTSVPGFGLIMAMTMLTEFDNNIMRFPNERKFVSMLGLIPTCHDSGEKKTNGEKTFRGNKQLGPLVVESSWVAIQRDCELASYYSKCCQCMRPPRAIIKVARKLACKAYAVLKNQKAYVQP

SEQ ID NO: 122062 - protein, 417 aa, unidentified
MWNKATRVKSSVESASNKHIGGILMVCVGIDVAKDKHDCFIISSEGEILADVFTIPNNAEGFDTLLQAIRRSTRPEDKIKVGLEATGHYSYNILGFLLDKGLPTYVINPLHTNLYRKSLSLRKTKTDRVDARTIAAMLMSDVDLKSYTDTAYHNEELKSLTRYRFDKVRERAKLKQSVSRLVTILFPELEKLVSSLHSASVYALLSEFPGAKQISSTHMTHLKAVLKNASQGRYGQEMAETIRNAARSSVGSVMPAKSLELQHTIRLIRELDAEIEDIETAIQAIVDEMQSPITTIPGMGVRMGAVILAEIGDFSRFDSPDKILAYAGMSPSTYQSGQLSLSGAYSHMEKRGSRYLRYALYNATKHVCHWDPTFAAYLAKKRAEGKHYNVALSHAAKKLVRLIFAMEKSQRPYCAAA

SEQ ID NO: 122063 - protein, 332 aa, unidentified
MKYNTFIGVDVSKLTIDAHLHLINASKTFSNNEKGFASLLAWVKKHGKVSDLTKAIIAFEHTGMYSIKLAMYLNEVNVSFAMLPALQIKQSIGIRRGKSDQVDAQRIAEYAWLHRETLQPTILPAKGILRLQSLLTLRDRLVRDRGGFEATWKEQNKALDGKEYKEMFQIYKSLIQNLTLQIKKLESQIKVVIESDEKIKANYKLLTSIKCVGPVLAANMIACTHNFTRFTNWRKFACYVGTAPFEHQSGTSIKGKTRVSSLSNRQIKKLIHLVAICACAYNPELKGYYKRRVSEGKNKMSTLNVIRNKLIARMFAVVNRGTAYVDLMKYAA

SEQ ID NO: 122064 - protein, 340 aa, unidentified
MDVAIGIDPHKATHTAVALGEGELELARLEVRSGRSQLERLLDWATPFPQRRWAIEGAEGLGFLLAQQLVAADQLVVDVPATLAARTRLLGNGRTNKNDPNDALSVAVTALRHRELRTVTTAGYSELLRLLAKRHIDLSNQRTRLVARLHALATELSPGGIGKKLNSTDAAKFLAAITPTDAVAQLRWDLIAELADDIARIEAQTKQSERRLRDAVAVSGSTVTDIYGIGPIIAAMLIGNTGDINRFANRDRYAAYNGTAPVEFSSGGRVVHRVSERGNRTLNHALHLAAMCQLRQPRSDGRTYFDRRVAEGKTNKEAIRALKRQISNIVYRHLVADAAH

SEQ ID NO: 122065 - protein, 387 aa, unidentified
MYFVGIDISKFKHDCAIIDELGNVITSSWSFNNDCEGFSLFRELLNALDGEKKIGFESTGHYGHNLKLFLENNNFSFMEFNPLLISRFVRGKSLRNTKTDSLDAQSIAQYLMTVEYKPYPPSFYHMDQLKSLTRFRDSLIRQHSKQLVELTNILDKVFPEFKPFFDGRFSGTALYILAHYQSPEKIANMNAKSYEALRKKSRGKFSMVKFAQLKTLAKNTVGRSDDFLLKQMEITIDIENQLDAKIDEITVQISECIRGLNPPILTIPGIGELTAAVILSEYGDINKFESPAQMLSFAGLEPGYYQSGQAEHAGHMVKHGSSHLRYALMNACLPLITYEPVFAEYYAKKRAEGKPHRVALTHVAKKLLRVIYTLQTKNITYDPAMIR

SEQ ID NO: 122066 - protein, 330 aa, unidentified
MPVGRVPSPSCRASGPDQSRPRRRPGKESTRCTCWQRSSSSPVGVDTHKHTHTAAVVVAATGAVVTQVTVPAAPAGYRQLLGLADRHDGRRVWAIEGTGGYGAGLTRFLHAHAEQVVELDRPKRAARRHGAKSDSLDATRAAREALGRDRLAQPRAAGQRAALQVRLTARRSAVQAATDAQRQLHALVVAAPDTLRSRLRGLTTPRLVATCRRLRLRADTDPETTATAASLRAVARRIQHLNTEIAEHTRAITALVRAWHPELLTPTGVGPIVAAVVLCAWSHPGRCRTDAAFAMLGGAAPIPVSSGQTVRVRLTGPGTATSTRPSTWSC

SEQ ID NO: 122067 - protein, 416 aa, unidentified
MNAVGIDVSSRKSTVAVLRPLGEVVCLPFDVTHDIAGLASLVEKLKALDGETRVVMEHTGRYYEAVEKALHEAGIFVCAVNPLLIKEYGANSLRRVKTDKADAVKIARYALDNWADLRDFTPMDAIRYDIKTLNRQFQLASKQRTASANNLIALLEQSFPGIRKCFDSPVRSDGTQKWVDFAHSFWHVDCVRKQPFPAFCERYRKWCKRHAYLFKLSNAEEVYALAKRAVVLTPKSKVVKVLVQEAANQLISISRSVEVYRAEMDRLAAMLPEYPVVMAMYGVGKSYGPQLMAEIGDVRRFERKQALVAFAGIDPMPNQSGDKNVRSNKSSKRGSPYLRKTLFNVIRTYLQCAPQDEPVFQFLNRKRAEGKPFYVYMLAAANKFLRRYYAKLRDYFASLDTLQPVAPIPTILKATL

SEQ ID NO: 122068 - protein, 392 aa, unidentified
MIFVGIDVAKDKHDCFISNSDGKVLYKVFTITNNLEGFHDLYQKISSVMVDAAKVKVGLEATGHYSYNLLGYLIDKGLTAYVINPLHTNLYRKSRCLRQTKTDKVDARTIASMLMSDVNLKSYSETSYHNQELKSLTRYRFDKVKERAKLKVSIARLINILFPELEKLVPTLHMASVYSLLSEFPGASHVASAHLTRLTNLLSKASKGHYDKDTAIHFREAAKNSIGSVMPAKSLELKHTIKLIQELTTEIDEIETAVKRIMDEEIRSPILTIPGISYRMGAMIIPEIGDFHRFDSADKILAYAGMSPSTYQSGQLDNGYSHMEKRGSRYLRYALYYATKYVCHWDESFGAYLEKKRSEGKHYNVALSHAAKKLVRTIFAMEKSGQAYKATS

SEQ ID NO: 122069 - protein, 357 aa, unidentified
MTSMTITHGSVTGGVDTHGQTHHGAVLDHIGRQLGDQEFPATPSGYRALLQWMSGYGTLAQVGVEGTGTYGAALTRHLLEAQVRVVEVDRPDRKARRAQGKSDPLDAYSAARAALSGTASGVPKARDGRVEAIRALRVARSSAVKARSQAVNQLKALLVTGPAALREKLRHLSTPAMITACARMRPADDIGDPAQAIKTALRRLARRYQQLTEEITDADADLHQLVKHVAPTLLALPGVGSEVAGQILTTVGDHPGRITSEAAFAHLCGVAPIPASSGRTRRHRLNRGGDRAANNALYIVVLGRMRHDARTRAYVERRTHQGLSKPEIIRCLKRYIAREIYGALELTKVDKPLEIAT

SEQ ID NO: 122070 - protein, 347 aa, unidentified
MDKISVVGLDLAKNVFQVHAVNAQGRVVERKQLRRSEVLSWFAKIEPCRIGLEACGGMHYWARKLSELGHTVRPMAARFIKPYLKSNKSDMLDAEAICEAVQRPGMRFVSVKSAQQQAVLHLHHSRRLLVEQRTALINHIRGMLLEFGIVIAVGPSALRKRLPELLEDTGDELPPMCRDLAAVLRDQLSALDERIALLEHRIQQWHVSNEASQRLAGIPGVGVISATAITAAIGDARAFTNGRQFAAWLGLVPRQASSGGRQRLLGISKRGDRYLRTLMIHGARAVIRHLRARQQAGKPPGNAWIAQLLARCHPNVATVALANHNARVAWALLAKNETYRAGYAAEA

SEQ ID NO: 122071 - protein, 396 aa, unidentified
MKGRYNLMKIYVGIDIAKLNHFAAAISSDGEILIEPFKFSNNYDGFYLLLSHLAPLDQNSIIIGLESTAHYGDNLVRFLISKGFKVCVLNPIQTSFMRKNNVRKTKTDKVDTFVIAKTLMMQDSLRFMALEDLDYIELKELGRFRQKLVKQRTRLKIQLTSYVDQAFPELQYFFKSGLHQNSVYAVLKEAPTPNAIASMHLTHLAHTLEVASHGHFGKDKARELRVLAQKSVGVNDSSLSIQITHTIEQIELLDSQLFSTELEMANLVTCLHSVIMTIPGIGVVNGGMILGEIGDIHRFSNPKKLLAFAGLDPTVYQSGNFQAHRTRMSKRGSKVLRYALMNAAHNVVKNNATFKAYYDAKRAEGRTHYNALGHCAGKLVRVIWKMLTDEVAFNLE

SEQ ID NO: 122072 - protein, 311 aa, unidentified
MNNTIGIDVSKDTLDVHRLADGQHKQFLNSKTGHAHLIKWIELQPDPLVIFEATGAYHRLLERKLGNRLIRFVKVNPKQARRFAQASGKLAKTDRVDCEMLAKMGAALQLVPKPLTAEILYDLRDLLCARRALIKDRTAAKARNATVTHALLKGQLAKRLRHIECDIAKIDTAMLALANQDRQMRERLDILSSIPGIGVTTALMILVDMPEIGGLDGKQVASLAGLAPMSQSSGKWQGKARIQGGRPNLRHAIFMPALVAIRHNADMKAKYNQLIAVGKEKKVAITAVMRKLLVLANALLRDQRKWMENMA

SEQ ID NO: 122073 - protein, 317 aa, unidentified
MGGVNAAIEVGKHELKVCLGSEGELFSEPNQPRAINRIIKRLSQAGCARVLIEGGSYQSVLIAALRAAGLPVVIVNPRRVREFAKSIGQLAKTDEIDARVLALFGERTEPPLRELADEQTQSLRTLWVRREQLIEMLVMEENRLEHVPAKAKAVHHNLRSHIDYLRKQIKQADDDLDREVRNSPLWDRYEMLSSVPGVGRVLSVALLSDLPELGRLNRGEIAALAGVAPFNCDSGTLRGQRRIAGGRTRLRRTLYMAAVSAVRCNPVLKPFYLRLRAAGKPGKVALVAVMRKLLLILNAMLKTRSAWRALPCPTANS

SEQ ID NO: 122074 - protein, 322 aa, unidentified
MAVIGVDIAKRSFDLAVLQSNGKHRTKGRLSNDPSGFAVFADWLQQHAEPGAWIVMEATGTYHEALAEHFHALGYRIAVLNPSQIARYAQSQLQRSKTDKLDAKLIATYGQRHEDSLRAWHPEPVSIRTLRALTRRLEDLQSLRQMELNRLEVSPEKVQNSIQAVVQRLDEQIAWTLEQIKRHIDDDPDLSGKRDLLVSIDGIADKTAALILAELGDIGRFADARAVTAFAGLNPRLQESGLYRGHTGISRMGSVRLRSALYLPAVVALTYNPAIKAQAERLKTRGKKGKQTVCAAMRKLLTIAYGVLKSGKPFDPALAIAH

SEQ ID NO: 122075 - protein, 368 aa, unidentified
MKNTSNATQRRKQTELATSRRNQIVGVDVSDKTSHYCVLGDEGEILAEGTLRTTPAGFTAQFPSANRCRIVLEVGTHSPWISRLLCGLGHEVIVANAGRVRMIYDNDNKNDRVDARTLARLARMDTGLLHPIRHRSAEAQADLAVLHARDCLVSLRTKLVNTVRSMVKSFGSRLPSASPEYFPRRVRSHIPDSLQPALLPFLDQMETITSQIRAYDKQIEQLTRTKYPRTQLIQQIHGVGALTSLAFVLTLDDPHRFQKSRDVGGYLGLRPRRDDSGQSRPQLSITKAGNHFLRRLLVGCAQYILGYFGADSDLRRWGHALMARGGKNAKKRAVVAVARKLAVLMHSLWVNGDVYEPLRKSVRIQEVA

SEQ ID NO: 122076 - protein, 348 aa, unidentified
MEHYAGIDVSLEQSSVCVVDAGGKYVREVKVASDPAALIDYFGSLGFAVTRIGLEAGPLSQWLYAAMKEAGLAVELLETRHVHDAFKAMPVKSDRNDARGIAQLMRLGWFRPVHCKSIGAQELRAMLGARKFIQSKLRDTENHLRGILRGFGLKVGKTTAKSFPGRIRELVAGQANLEVIAQAMLEAHAVLLREFNGFEKRVRRMAREHAKARLLMTTTAVGPIVALTYAGAIDDPARFKSSKQTGAHFGLTPKKYQSGETDVSGRISKIGDAAVREALYQAAHVMLTKPLKGCTALKSWAMRIARRAGMRKAKVALARKLAVIMHRMLADHKPFNPAAGTIPVAAEA

SEQ ID NO: 122077 - protein, 337 aa, unidentified
MNVSTIGLDIAKTVFQIHGENAEGEVIIQKRLGRRGMMAFFAKLSPCLVALEACGTAHYWGRTLRAFGHEVRLIPAAYVKPFVKRNKTDARDAEAICVAARRPDMRPVAIKSEAQQASRALERSRELMVKQRTQLMNSLRAMLAEFGVVAAQGHRGFAELTARLRSENPGLPETLVAALRIVLAQLDSLTPAIEAMEDRIKAVVKADPDLRRLARIPGVGFITAHAVASAVGDGRQFGSARDFAAWGGMTPRESSSAGKRRTRGVSRQGESRLRKLFALGAATLMRNARSRQDRATPWQRGILARRPMKVAVMAQAAKTARIVWAVLTSGKEYATAA

SEQ ID NO: 122078 - protein, 355 aa, unidentified
MDNVKYIGMDVHKAAISIAVLNSSGKLVMESTIETKAITILDFLKGLRGSLHVTLEEGTWAAWLYDRIKPQVTELVVCNPRRNALLKEGSKSDRMDARKLAELLRSNMVRAVYHGEHGVRTLQELSRSYLTISTDLIRVMTRVKAIYRSWGIPCRGKQVYAERYRAQWLGQIQQAGVRRRAEFYYQQFDALRSLRQQVRRELLAEAQQHDAWKLLRGIPFIGPIRAALLIALMQTPHRFRTKRQLWTYSGFGIETHSSAEQRFVQGELRRAKKPPSIRGLNRNHNHELKNVFKSAATVAASQAGPFKEFYDALLAKGIRPEMARLTLARKMAAITLIVWKKGVRFDAQHLKPQTA

SEQ ID NO: 122079 - protein, 380 aa, unidentified
MTRATRGGEYSGQTEKILHVSFELGMKDWKLGFTTDLGTKPRLRTMPARELGRLEREIAEAKGYFGLAATARVRSCYEAGRDGFWLHRYLVSRGIDNGVVDSSSIEVNRRMRRAKSDGLDARKLLTMLVRYHAGERKVWSVVRVPTVEEEDRRQLHRELRTLKKERTRTTNRIKGLLANQGIRLEKSGDMSQRLGRLRLWDGSPLPAGLLARLQREREHAEFLHRKILELERERRQAIVEGRSPALEKVRQLMLLKAIGPSGSWVYVHEFFGWRRFRNRKEVGAAAGLTPTPYQSGDGSREQGISKAGSRHIRAVAIEMAWCWLRYQPRSKLSLWYQERFGRGGKRARKVGIVAVARKLLIDLWRFLEHGVIPEGATLKA

SEQ ID NO: 122080 - protein, 343 aa, unidentified
MQAVTTIGLDIAKSVFQVHGVDAHGNVVVRRQLKRRYVLPFFKKLSPCLVGIEACASSHHWSRELQGLGHTVRLMPPAYVKPYLKRQKNDAADAEAICEAVVRPNMRFVETKTADQQSCLMLHRTRHLFVRQQNAVINSIRAHLAELGIVAPVGRNGVEELLDVVADPDDDRVPEVARDCVAALGAQLRMLKGQILEFDRRIMAWHRSNETSKRLDEIPGVGPALATALVASVADPKAFRSGRDFSAWIGLVPKQNSSGGKEKLGSITKRGDRYLRSLFTAGALAVIRYAKIHGTKHRPWLTALLARRPTKVAAVALANKIARMAWAMMSNGERYREPAALAR

SEQ ID NO: 122081 - protein, 377 aa, unidentified
MSKVRFVGLDVHADTIAMAVAEVGGEVRSLGIIPNRLESIRKMIGKLTPIETLKCCYEAGPTGYVLYWQLTQLGVACEVMAPSLIPTKAGDRVKTDRRDAEKLARCYRAGELTAVWVPDANHEALRDLVRAREAAKKDQLRHRHRLGKFLLRHGKRPSDAGKAWTQKYLNWIRIHVHFEQAALEATLQHYREEVDHIAERIVKLEQAIDEAVKQAPPEIRAVIEALQALRGVAQTTAATVVAELGSLSRFASPSQLMGYSGLVSSERSSGNRVQRGAITKSGNAHLRRVLIESAWTYRHRPNVQGRVLRRQKSLALSEEAKRIAWKAQQRLYKRFTALTTRGKENNVAAIAVARELLGFMWAVAVHTESQSKPAKAA

SEQ ID NO: 122082 - protein, 396 aa, unidentified
MVTVGIDIGGRSHAVARCRDGMPKADREVLRVGQSRAGFAALDVWLERQPEPVGLVTMESSGHYWMPLASHLHRRDVPVAVVNPLAAKYFAKSRLARTKSDPADARSLAEMAMRDQPVVRDPLVGVELRQAARFAMTLVTEQAKVCQRLIRLVELGFPELGELFDDPTCRTAREVLRVAPTARAASRRRTSTLANANAGPGHRRLGQVKAERLQAAAASSIAVPELDAEVAFEVGLLLDQYDLLEGQIAAADQHVASLLDGELARRLRTIPGVGPSIAATLIAEIGDIDRFTDFDQLLAFAGVHPAERSSGRKGSNPETAWHMSKAGNSHLRAAAYRMAIVGIQHNPVIAAHYARKRAAGKSKMNALGHCMRKALSIVWGVWRNGQDFDPTWRLEA

SEQ ID NO: 122083 - protein, 407 aa, unidentified
MAKVIIGVDPHKLSATIEVVDSHEKLLGSGRFSTDQPGYTAMRAYAKTWPERIWAIEGSNGAGRPLAQRLLEAGEHVVDVPAKLAARVRLFDTGHNRKTDALDAHSIAIVAVRTKTLRVLRPDGELEALRMLCDRREELTRLRVQTVNRLHRLLAELVPGKAKKDLTALLAKAILATACPRDIAGKTRRRIAAEELADLLTVEAKMKKATAELKVLVKARGSRLMDLPGVGPVVAARTLADVGDIARFADRNRFASWTGTAPLDASSGEQNRHRLSRAGNRRMNHMIHIAAVSQIRLDTDGRAYYRRKQAAGKTKLEALRCLKRRISDALYRQLLADAEQAQLLCAAQPVDTGPGGHCGASQESSAVDLPPHIDTSDQPLPGPATQTLQPAGPTGKTSQPRTPQTTG

SEQ ID NO: 122084 - protein, 346 aa, unidentified
MLYVGLDLSRQRLDVHVLDEEGRTVEVLAVHPDADALRTLAGKVLRHGQEVSAVIESMTGSRFVHDTLERLGWDVAIADPVKAKGLAPLAAKTDKIDARVLAELARRDLVPEIWLPDPTIRADRERARFRLHLVHHRSALKCRIHATLMTFGHTVPVTDLFGTSGRELLAGLALPEPWARTLATSLAMVDELDQRIDECGRELARRGADHPYIPLLLTVPGVGPLLAYTIASEIGDIARFASPKKLTGYTGLCPIVRQSGNHDFRGPLAKNGPKYLRWALVEAATHAARDPHYRDRYERNKCRLGRQRGAKVARIDIARQLAEAIWHVLTKNEPFAPASPAILLVA

SEQ ID NO: 122085 - protein, 338 aa, unidentified
MRTYYVGMDVHQASIVIAVLNGAGKVVMESIIHTGAETVRGFLKQLRGKVYVTFEEGTQATWLYDLVRPLVTEVLVCDPRHNKVVGNKSDRVDARQLAEWLRNGSLRAVYHGDKGVRTLKELVRNYDCLVRDTTRVMNRLKAIFRGRAIDCAGHDVYRHERRGHWLTKLSEPGAQQRASFLYQQLAALKPLRHEAKRLMLKEARRHPEYQLLSSMPLLGPISVAQLIAIVGTPFRFRSKRQFWTYVGLAVVTRTSAEYVLVNGVVRRSSRPVATRGLNRNHNHLLKKVFKSAASSARLSGPFKPAYDARVAQGMDASLARLTIARKLAATTLAIWKRG

SEQ ID NO: 122086 - protein, 351 aa, unidentified
MQRFIGIDVHGQSCTLVVMGPSGRRLGEHVVETSAKALIERIRSIPGDKYVCMEEGTQSEWLYEVLESHVKQIVVTQPLKRAGSKSDAIDAWALADMLRRDALERTVFKSPKTSTALRQAARGYIAVRRDMVRAKCRLNALYRSRGRNPKGEIYDPDTRNSWLAKLPPAYRTLGELLSEQLDGLCQSHQAAESWLLKEAERIPVARRLATAPGIGPIRAALLVAIVVTPTRFRTSRQFWSYSGLAIVTRSSSDWVRDGRGWTRKLTAQTRGLNRNRQPELKAIFKGAATTVIQQMPNHPLHKDFQRMTDAGIKPNLAKLTLARRIAAATLAMWKHQEDYDPSKQTRAPQSQ

SEQ ID NO: 122087 - protein, 346 aa, unidentified
MNHIIRIGMDTSKHIFQLHGVDAAERPVLRRKLRRHQMLEFFAELSPTVIGIEACGAAHYWARELRKLGHEVRLMAPQHVKAYVKRNKNDGRDAEGLCEAMGRPTMQFVPVKTEEQQAALMLAGVRQQLIARRTQLSNAIRGYAAEFGLTAAKGLDKIEPLLAAIAQDSRVPALARELFAFQGKDYARLQVEVKAIEAKLRAWHRANETSRRLAQIPGVGPIGATALVMKTPDPGAFASGRHFAAWLGLTPKDHSTAGKTRLGKITRAGDEMLRSVLVAGATAVIQQARNGHGHPSPWLVALLARKPPKLAAVALANKIARIAWKLMATGESYDGARMLDASPLAA

SEQ ID NO: 122088 - protein, 404 aa, unidentified
MYNAVGIDVSKSKSTVAVLQPGGTVIRKPFDVSHTSQNLNELADYLSSLDGTTKIVMECTGRYHEPMVKALSEAGLFVSIVNPHLIKNFGNNSLRKVKSDPADARKIARYTLDNWTELRQYSGMDNTRTQLKTLNSQFSFFMKQKVSAKANLIALLDNTYPGVNKLFESPTREDGSEKWVDYAYSFWHADCVRKIGLKAFTERYMSFCKKHHYIFQQDKPEKLFNASKELVAVFPKEKTYKLLIQQSIQQLNLASEHVERLRREMNELASTLPEYSTVMGIYGVGKTYGPQLIAEIGDVSRFTHREALTAFAGVDPGVDESGQHKSKSNRASKVGSARLRKTLFQIMTTLLQNAPEADPVYCFLNKKRSQGKPYYVYMTAGANKFLRIYYGKVKECLRNLEQTE

SEQ ID NO: 122089 - protein, 353 aa, unidentified
MRRPKEKLIAGLDLHSNNVMIGVINQDGKRVAHRKVGCDLNEVVQFLKPFKPQLQSMAVESTFNWYWLVDGLRGQGYAIDLANPAKIEQYRGLKHVDDKDDAYHLADLQRLNILPKAHVYDPALRPVRDLLRRRTNLVHQHTALLLSFKSLYARTTGQSLDLSDAKKMAPKEAPKLYEHPANQLIAQVQAEHIGALAKSISRLEKAVLASAREIPLYPKLLTIPGIGRILGMTITMEVGEVKRFKTDGDFASYCRMVDAKRLSNGKCKADNNQKCGNKYLAWAFVEAANFARRYDEPCRRWYDRKAAKTSKVIATKALGCKLAKAAWHVMAGPCDYDEKRMFPELANKPMKTN

SEQ ID NO: 122090 - protein, 423 aa, unidentified
MEIMHERVAGLDVHKAMIVGCVRLASEGKTSRECQSFETTTAGLSSLLAWLTDSGCSHVAMEATGVYWKPVWNILSEGPFDLILANAAHIKNVPGRKTDVNDATWIADLVACGLIRASFVPDQATQELRSLMRMRKQLIQEQTRHTQRIQKTLEEANIKLDSVISDIMGVSGRRMIEAMIAGIRNPARLAALADGRVKATPKHLYDALHGRLTDHHCFMLRLYLEQYDALDKAIIEIDRAVDAAIAAMDQQVAPGRATFRSLIHLLNTMPGISTLSATSILAETGTDMSRFATAGHFVAWAGLCPGQNESAGKRKSSHLRKGGRWLKTVLVQCAWSAVKKKDSYYKAQFNRLRSRRGPKKAICAVAAAMLTAIWHMLTNGVVHQDLGIDHFDRRSAECKARRLVAQLTKLGFQVELQPIAEAP

SEQ ID NO: 122091 - protein, 400 aa, unidentified
MRAVFGIDVSKTSSEVAILVNGEKVHGYTILNDAIGFNRLLGDLKTVHNPEIIFEATGVYSRRLQAFLEEYSYAYTRLNPLEAKKQLDSLRVRKTDKIDAEKLAKSQLVHNRKPTYVQEEVYQHLRDLSRFYQNMTEDLVRTKNRLHKVLQVTFPELENLLSTPTGEQYWNLVMAFPCKEFVLSLSQSNLCEIVRQSTSKRISEKRITYLTDKLIKLAKQSFCAVKKTSPMLEEVRYYAQELLRLSERRQVVLNDMVALAQPLPEYDILRSIPGIAETTATSIIGELGDIRRFQSSNQINAFIGIDLRHYESGNFLAKEHITKRGNPYARKILFKCIHNIASASHTNPCHIADFYEKRKRQSTIASTKPHTIASIHRLIRTMYYLITHNKLYDYSLTQNR

SEQ ID NO: 122092 - protein, 427 aa, unidentified
MKSNTQNKKIEAITEKTLVIGIDVGSETHYARAFDYRGIEFSKKPFKFSNSEAGFEMFKTWILDIKEKHEKDKVVPEMEPTGHYWFNLGKFLQDNQMKPVLLNPHHIKKSKELDDNNPTKNDRKDPKVIAGLVKEGRYMIPYLPDGIYADLRTASNMRFQIQSELTRVQNRISRWFNIYFPEYKTVYGKPDAISGMMILKKAPLPEDILTLGVEGVNQIWRDAKIRAVGKKRAQTLVEAARHSVGTKEGAKAARIEIRMLLEDYESRNNRLQEVMLLIEELVKQIPMAEKLMEIKGVGIRTVSGFLAEVGDITRFSSPKELQKLAGLALVENSSGKHKGQTTISRRGRKRLRYLLFEVAMSLVGKNPEFGALHHYYTTRKVNPLKKMQSLMAVAAKLIRVFYVMLTKGVEYDSAKMLGDIKRPAVYM

SEQ ID NO: 122093 - protein, 312 aa, unidentified
MTTMCVAGVDVGRDFLDVSLAPSGRTWRAANAPAGVRQVVARLKAAGVAKVVLESIGSYGARLVRALADAGLQVGVVDPKRIKALRLAEGRKAKTDRLDAKLIARFALLMSDAARPVPDARTFEIRALSTRRRQLVEMIAMEKTRLKQTLDLPIADSCRAMIDQLGAERRRIEARLEALTLARPQDQTRASLLKTIPGFGPAVTMTLMADLPELGLIVRKAIASLAGLAPHPNQSGLRIGASHIQGGRPCVRTALYMAALSASRSQAGYKAEYKAMRAAGKPAKVALVAIARKLVTTANAILKSGQPWSASA

SEQ ID NO: 122094 - protein, 310 aa, unidentified
MEQMFVGIDVAKDRLDVHLRPSGEAFAVARDGEGVAGLAERLRAAGPQLIVLEATGGFEQVVAAQLAGANLPLVVVNPRQIRDFARATGRLAKTDRVDAAVIAHFAEAVRPPVRPLPDEQARLLGELVNRRRQVIEMMVAEGNRARQVETKRLKKRIERHRSTLQTELTEIEVELDETIRGTPIWRENEDLLKSVPGVGDVVARTLIAELPELGTLTRRQIAALVGVAPFSRDSGTMRGKRTIWGGRAAVRAALYMGALVASRCNPVIAAFYQRLLAAGKSKKLALVACMRKLLVTLNAILRERTPWQNA

SEQ ID NO: 122095 - protein, 360 aa, unidentified
MAKARSLVGLDVHAAKVVAAVLDVETGELQFFRVGGDADEAAGLCGGLPRPVRAAYEAGPTGFGLARELERRGVGCVVAAPSKIPRASGDRVKTDRRDAEHLVRLLLAGKLHPVRVPGAEEEALRDLVRAREAVRVDLMRCRHRLSKLLLRHAIRFTDGRAWTEHHRAWLADVCLAWPAAQSTLADAIGAVDALVHRRGQLEREIIALLPDSPWQVQVGRLRCLRGIDSLTAAGLCAEIGDFERFARAEQLMSYVGLVPSESTTGQQRRLGAITKTGSGHARRLLIEAAWHYRKRPAIGRALRERHDGQPAEAVAIAWSAQQRLHRTWTRLEQRAKRRTIIAVAAARELAGFAWSIARIE

SEQ ID NO: 122096 - protein, 342 aa, unidentified
MSTQFLGVDMAKDTFDAALWVNDQAQWLGTFPNTLAGFQDLQTRILPQTAETGETIHLIVEPTGGYELALVNFACEQRWQISLPNPKQVRDWAKGQGRRAKTDQQDAMLLAKYGAKEQPRLWSPLPEAVATLDDLLRRRDDLELMLRQERNRQSAFDSRPVVSTSVQASVEQVIRVLEEALQSIERTIKQHMHSHPDLDRAAKLLLSVPGIGQKTVLPILVVMIRWHTLTDGQGVAKGLVAYVGLDPQPNESGTSVRKRATISRMGNRVVRRKLFMAALGGVRGNNALQHFYRRLVGRGKPKMVALVAAARKLLVWAWAVFRTQTAFDPARHEAQPLLKCLT

SEQ ID NO: 122097 - protein, 360 aa, unidentified
MEKNRIEGLIHQVTEETISIAVMNSANSAGKVLMESIIETKASTILQFFSGLEGDLRVTFEEGTWAAWLYDLLKPHIRHIVVCNPRKNALLKEGNKSDRIDARKLADLLRLNYLKPVYHGENGIRMLKELSRTYLTINRDLVRVMNRLKALYRGWGIPCGGKSVYSPRNREDWLNKIKETGVRRRAEHYYQQLDALQQLRREVRRDLLQESRKHSAAKILRGIPAIGPIRSALLVALIQTPNRFRTKRQLWAYSGLALETHDSAQYRCLDGQIIHSQKPQQVRGLNHNHNHDLKSIFKGAAQNATAGSGPFRDFYERSLQKGTKPSMARLTLARKIAAITLTLWKKGARFDPEQLKSQAA

SEQ ID NO: 122098 - protein, 307 aa, unidentified
MGNSVGIDVAKHALEWCIGREGKIEHIRNEPRPIAGLVRRLVALAPERVVVESTGGYERTLVAKLAEAGLPVVVVNPRRVRSFGQAMGILAKTDAIDARLLALFGEKTEPPIRPILQGRARLLADLVARRRQLVALVVAEKNRRETAAPPVRRSIQTMLDALTKELRRLERRIDQALAEDAETAELSTLLQSVPSVGPTVARTLLVDLPELGHLGRREIASLVGVAPFARDSGKLRGLRRIRGGRASVRTVLYLAAMTGARFNPVLRDLYQRLRAAGKPPKLAFVAVARKLLTILNAIARDRRAWQT

SEQ ID NO: 122099 - protein, 457 aa, unidentified
MRRKSKRTRGIEEAHPFSGMSQVNPNAAGVDIGAIEIVACVAADEHTQIVKAFGNYTVDLQALACWMKSHNIRTVAMESTGVYWIPLFEELERQGLECLLISSRSMRRVAGRKSDISDAQWIQTLHSYGLLEGSFRPQAELVALRTLLRHRNQLVEHRSPHVQHMQKALLQMNVQLSQAVSDITGITGQNIIRAILAGGRDPQTLAAMREPGCKKSEEEIGKALTGTWREEHLFILKQSVAMYDFYTQQLQACDEEIARVYGLTRPDWETGEVQPYTRRKKNSHSKNIPHNPEGIRRHLKRISGVDLSVVDGFGVSLAQTVIMEVGTEMNKFPDEKHFCAWLGLAPKHEISGGKVLKNSTLKTKNRAGQAFRMAAHSGKQADCVFGVMYRRLRARLGPAQATVATAHALARLVYRMLKYQVEYEPLSVNEYQKHYEEQQIKYMRKKAAKFGFQLVPA

SEQ ID NO: 122100 - protein, 320 aa, unidentified
MEGSREITDATTYAGIDVAKDRLDVVLRPSGEYLEAANDEPGIGSVLRRLRRENVALVVLEATGGMEQPAAAAFAVAGIAVAVVNPRQVRDFAKATGRLAKTDRLDAAVLAHFAEAVRPEPRPLADEHARELSAVVLRRRQILAMTTAEGNRARTAPKAVRRIEAHLRWLRKEVERVNGELERAVKESLVWKERAALLMSVPGVGPTLSATLLAELPELEHLDRRRLAALVGVAPLNRDSGTLRGIRTVWGGRSGVRTTLYMATLSATRHNPAIREFYGRLVASGKPKKVALTACMRKLRTILASVPRNATTWDPAMAPT

SEQ ID NO: 122101 - protein, 367 aa, unidentified
MCQKGVKMTNSENSITIGIDISKEFFDIYVYESAKTMRFDNNNRGIKLFIKYITSLKPTLVAMEYTGGLERQVFFALQNNNIPCCCIKPTNIKNFSKTIDAKAKTDLISSKLIAHYAKILKPAPQPKPDKSLLILKDLASRHLQLTEFLVSEKNRLSSSTFAKTKSQINKSIKVFEKLIEDNKKQFKELICSNPDLKAKIELLDTMPGVGEHSAMMLAVLLPELGTISGKQISSLCGVAPFVNQSGKYSGKAFIRGGRDKVRKLLYMVALVSITYNPVIKDYYNRLVKKGKPAKVAIVACMRKIITILNAMLTNNLPFIAEYYKLDLREQNYDSKIILTKKDEKNKEEADLVLTNTNLKEPVSKNIS

SEQ ID NO: 122102 - protein, 355 aa, unidentified
MRPYTLGIDLHKRSSVWVLLDGEGNEVWKDSVPCHPDNITKTLEWLPVPGSDIQAALEPTCGWRWVAALLEEAGVEVHPANVNKVRLIAESTQKHDLGDARALANLLRLGYLPESYRVPDSIYELRLFLRHRAYLVRLRVSAKNRLHGMATAVGLHRIARRNPLSKAGKAGIMAGDDMSMKELHTLIEELDRRVVECDARCEEIAKGEPLVPILRSMPGIGIITALTVIAEVGDFTRFASTKHISSFSGLIPRQRSSGESVRFGHITNQGSRTLRMIMVEASFRIRPTNAPELYAFVARLAPVCGKKRARIALARKMLCILWHMAKTKTPYDQNKVIVHSPRIANVSHIDTYRGA

SEQ ID NO: 122103 - protein, 360 aa, unidentified
MKTAQRKVLDFNGQNIYVGIDVHLKSWSVTVLSDILVLKKFSQIPQPEALYKFLVTNYPGASYHSVYEAGFCGFWIHERLTALGINNIVVNPADVPTKNSEKLRKTDLVDSGKLARSLRAGELKGIYTPNSVALEMRSLIRLKNSITKDMTRQKNRIKSQLRYLGVEIPLEYIEPHSRWSKRFIAWLKDVSMLTPSGRRALDIQIRHLEELRKQKLEMTRALRELGNTEQFRESLRLIMTIPGVGQATGMTFLSEICDISRFENAEQLAAYIGMIPMCNSSGEKDGTGDITVRKHAIMRSNLIETAWVAIRQDPAMSLFYMENCKRMIPSKAIVKVARKLVNRLFFVLKRRTEYVNGIVS

SEQ ID NO: 122104 - protein, 337 aa, unidentified
MEYFAGLDVSMAETQVCVMGRNGAVIHKAKVPSTPADIAAELAQLPTCRRIVFETGRMAPMLYHGLRQLGLPVICVESRQAYQALKLLATHKTDHNDARGLAHLARTGFFKPVHVKSLPAHAVRSLIIARKKLVGQRVTLENQIRGLAVVFGVRLPRALSSTFIRQALQASEGIPGLSAAMQGLVAARTAVLAAIVAIDGDIRRMVRASDACRRLMSIPGVGQLTALAFTAAVDDPKRFRRSRDIGAYLGLVPRRHQSGEIDYTGSISKCGDRRVRTLLYEAANVMLTRYKGALKLKEWAFAVAKRSTMRKARIALARRLAIIMHAMLRHGTEFKAA

SEQ ID NO: 122105 - protein, 343 aa, unidentified
MNISRIGIDLAKNVFQLNGVDRSGKTVWKRRLKRNQWLKVVCDQIGTDCEIGMEACAGAHHWARELESRGYTVRLIAPQFVKPFVKSNKNDANDAEAICEAMNRPNMRFVTVKSVAQQDIQATHRVRSELISQRTAKANQIRGLVAEYGLVAPQSLRALQATIPDWLEDAENNLSDDFRLLLHGLWSDLTTLNDRVLELDRMILQIANSNEVTRRLQQLRGVGPLVATALVATVGDARQYHRSRQMAAAIGLTPRQHSSGGKDRLLGISKRGDVYLRCLLIHGARAVVSQAKHRDDRLSQWASGIAQRRHPNVAAVALANKTARMAWAMLRNESDYDPDYAIS

SEQ ID NO: 122106 - protein, 351 aa, unidentified
MSQKTDAVVASTIGIDTGKNTLHLIGLDDQGTIVLREKLSRSRIVSRLANVPRCLIGIEAGMATHYVARELIALGHDVRQVPPAYARPFRQAHKNDFRDAYAIAEAVQRPSTRCVPVKTDDQLDLQALHRVRSRLVGQRTAVINQIRGFLLERGIAIRQGLRFLRQQLPEILAKRIDVLSPRMIRIIEDLSGDWRHLDERIEHVTEEIEVLALGSESCRQLMTVPGIGPLIASAMVAAIANGAAFAKGRDFAAWLGLVPKQMSTGDRTILGRISKRGNRYLRMLFMQGARVILLRPANWAKHSFGPWLTAAAKRLHHNVLATALANKLARIAWTVLAQRRNYEARVIADAA

SEQ ID NO: 122107 - protein, 464 aa, unidentified
MTIGKKLWRNRKERKEWAKRLQAEDPGLDVVHPHAAGVDVGNEAHYVAVGPNRDPEPVRRFECFTADLHRLAEWLKICRVKTVAMQSTGVYWIPLYEILEERGFEVYLVNARHTKNLPGRKSDVQESQWLLKLHTYGLLNNSFQPPAEIRVLRTYWRQRGEHVRGAATCIQRIQKALTQMNVQLANVISDVSGFTGQAIIRSIVAGERDPRTLAELSDPRIQASQEEIVKSLEGTWRPELLFVLEQEVEMYDTYQRRIAECDQQLQKHLAGFVDSVPQQPQVKPSRKKSKRAKNAPRFQLSSELERITGVDLTRIDGIDVMVAQTLISEVGLDMSRWKTEAHFASWLGLCPDNRISGDKVLSRGTRRVVNRAATALRMAAVTLLRSRTYLGAQYRRLRTKLGAPKAITAMAHRLARLVYRMLKYGQQYVDKGTEYYEQRYRQQQIQFLQKKAAKLGLQITVAQS

SEQ ID NO: 122108 - protein, 346 aa, unidentified
MNNHNKKCTIKVLGIDLAKQSFQLHGVDEQGKVVLRKNLSRNKLTSFVANLPPCLIGLEACGGAHHWVRVFKSLGHTVRMMAPQFVKPYVKSNKNDAVDAEAICEAVQRPNMRFVPEKSISQQDIQCIHRIRSQLIARRTAQANQIRGLLMEYGIIIPKGISYIRKVIPHILEDADNKLTSLLRELLNELYDEMVYLDELISSLENKLKIISHQNEDCQRLLTIPGIGLLTATALIAAIGNISVFRSGRELAAWLGLVPRQHSTGGMPTLMGISKRGDCYLRTLLIHGGRTVVRVAHLYTDKRNLWISELDKRRGKNISAVAVANKNARIAWALLSKKESYQVTAI

SEQ ID NO: 122109 - protein, 522 aa, unidentified
MSFSPTGTYDPAYAVFRFSGYHKQNRHPWFIQVAHRHCRPAANETVLDLRRAVGTEVVHRLGANKPAYKLDPEFLEHPRLSPRVVIGPGARFLEFLFRGPHADDATQEKVMELLHRRCCGLDVHKETVVACLRLVSNGKVTTEVRTFQTTTADLLRLSEWLAANDCTHVAMEATGVYWKPVWHILDDGEFELVLANAAHVKNVPGRKTDVNDATWLAELLAHGLIRASFVPDTQTQEMRNLLRTRKQLVREQSSHVLRVQKTLEDANIKLDSVLSDLMGKSGRAMIEALIVGETNPAKLASLADRRVKASPEELREALRGRVTKHHRFLLRLHLNQIDALDAAMATLDAQVAANLGPFRTAVDLIMSVPGIKNLGAQAIVSEIGIEMSRFPSDAHLISWAGICPRNDESAGKRRSNRLRKGAPWLKTTLVQCAWAAVKKKNSYLQAQFYRIKARRGPNKAIMAVAASILTAIYHMLKDGTMYQDLGRDHFDRRSTDQQKKSLVKRLADLGYAVEIKPLVASA

SEQ ID NO: 122110 - protein, 388 aa, unidentified
MGHQSARTREGAGRVTSSGTRGAWDAPDEVVLGVDTHLDFHVAVALDRLGRRLGEVKVPTTAEGYGRVLRWAEGFGPVRCAGIEGTGSYGAGLARHLKAAGIAVLEVERPKRRHLRRRGKSDPIDAEAAARAVLAGQAAGEPKSGDGRTEMIRTFRSARQSAVKARSQAANQLQSFVVTAPEKLRHRLRGLSTKDKELVAAAARFRPGDDPQDVEAATRFAMRSVARRHEALSEEIAELDAHLHRLVAEAAPGLISLPAIGTHHAATLLVLAGDNPERLNSEASFASLCGVSPVEASSGKVVRHRLNRGGNRDANRALHMICVVRMGSDERTRRYVSRRTAEGKSKWEIMRCLKRYIAREVYRVLLSSAATELPPSKITKPLLGAEIP

SEQ ID NO: 122111 - protein, 355 aa, unidentified
MDKTKYIGMDVHKETISIAVLDSSGKLVMESVIETKGSTIVQFIRGLRGELHVTLEEGTWAAWLYDLLKPYVHQVLVCDPRKNALLKAGNKSDQIDARKLAELLYLNKLTPVYHGEHGVRTLKELSRSYLAISGDVTRVMTRLKAVYRSWAIPCAGKQVYAPRYRAEWLGKIREAGVRRRAEFYYQQLDELRALRQQVRRELLAESAKHQASKLLCQIPSIGPIRAAQLIAILQTPNRFRTKRQLWAYGGLAIETHSSADHRYVNGQLRASKRPVSLRGLNRNHNHELKNIFKGAAIIAATQAGPFQEFYAALVAKGIRPEMARLTLARKIAAITLIVWKKGVSFDAQHLKPQTA

SEQ ID NO: 122112 - protein, 316 aa, unidentified
MEAIAIFVGIDVSKARLDVAVRPWGQSESVTNDEAGIKSLVKRLGEIQPALIVLEATGGVERQLTRALVNAELPVVVINPRQVRDFAKATGQLAKTDSIDALVLARFAEAVRPALRPLPDEVTLELRGLIARRRQLTEMIVAERNRLGGASKTVRKRIDAHVRWLEAELQRADGDLDQSIRQSPIWQEKEDLLRSIPGIGPVISRTLLAELPELGGLNRKQIASLVGIAPLNRDSGTLRGRRAIWGGRASVRAALYMAALVASRRNSVISVFYKRLRTAGKAPKVALVACMRKLLTIINSMINHKTRWSENILQTS

SEQ ID NO: 122113 - protein, 369 aa, unidentified
MAKSTTIIAFDQHAATTVAAVLLPGQRTPALHTLASDSPTILRFVDRLQRQRPIQCCYEAGPCGFQLQRALTGRGMACDVIAPALIPRRAGVRIKTDRRDAGQLAVLYRAGALTAIHIPTEQEEAARDLLRCREDIRADLLRARHRLSKFLLRHGRRFTATKKAWSKRHDVWLRAQTWSIAALDHTHRAYLRAVEETVARLRAVEDDLRALLDLEPLRPRVQRLRCFRGIDDLTALTIAAELGDARRFPSAPSTMAFVGLVPSEHSSGTKRTQGVITKTGNAHLRRVLVEAAWHYRHHPFVSDALRRRQHGAPPTIVAQAWTAQHRLHRRYARFAARGKPKQHIVTAIARELTGFVWAALTHASDRPTS

SEQ ID NO: 122114 - protein, 309 aa, unidentified
MEQSTVVGIDVSKDRLDVHVLPEGQGWSVPRDGDGVAELCRRLASAELIAVEATGGYENIVAAALSCDGLPVVVVNPAQVRAFAKALGQRAKTDPIDAEVIARFVQATRPQIRPLPDSAARLLGDLVARRRQIVEMIASERQRLRRTELPRVRKSITRLVTALDKELASVDHDIDDSVRGSPMWREKEDLLASVPGIGRIIARTLLAELPELGQLNRKQIAALAGLAPFTRQSGVWKGKAQIAGGRSAVRTALFIGAQVAKRWNPSLKAFYDHLIAAGKPKMVATIAVARKLLTILNAILRDQKPWQIA

SEQ ID NO: 122115 - protein, 401 aa, unidentified
MTKIIRIGMDTSKSVFVLHGVDAAEQPILRRKLRRKQVLEFFAKLEPTKVGLEACGAAHYWARELRALGHEVVLVPPQYVKPYVKRNKNDAADAEAICEAMSRPTMRFVPVKTAEQQAALMLAGTRDGLIRRRTQLTNTIRGYAAEFGLTAAKGLDKIEPLLARIAEAALPKLAKELFATHAREYARLKIEIAKIEAKLMAWHKHNELSRRLEEVPGVGPIGASLAAMKVPDPHAFRCGRDFSAWLGVTPKDHSTAGKTRLGVIPRAGDEALRSVLVVGATAVIQKVKQGKGQPSPWLVELLRRKPPKLAAIALANKNARIIWKLMVSGERYNPARAVAARGEGVEVPSCTSVTPCSPPSRTLRAAAGGGPRGPSLTAAALGVTGPRQVGTQKRPQVEQRN

SEQ ID NO: 122116 - protein, 349 aa, unidentified
MAKDTVVIVGLDVSDRFSSYCMIDALSGEAIEEGKVATRAASLAARFDAKTPLRVVLETGTHATWIARLLRGLGHEALVADARRLRFIWGSERKDDEVDARMLAKVGRLDPSLLHPVRTRSPETDEGLAVLRSRDALVEARTKLVNSLRGQMKRMGLPLPRLTTDAFAAKAREHVPQRLLPVFLPLLDAVGALTTQIRAYDEEIDKLCAQRPETAKLRQVKGVGPVTSLCYALVIDDPSRFAKSRQVGPYLGLAPGRDQSGDTDKQMRVTRSGDKLLRKLLVGSAHYVLGPFGPDTDLRRWGLLRAARGGGQGKKRAVVAVARRLAVLLHALWVGGKPYRPLRAEPAAT

SEQ ID NO: 122117 - protein, 343 aa, unidentified
MQITTIGLDLAKHWFQVHGVDANGQVVVRRRLWRSGVIAYFRSLEPCLVGIEACATAHHWGRELIALGHTVKLMPPAYVKAYVKRNKNDAADAEAICEAVTRPSMRFVPIKDAEQQSVLMLHRARSLLVRQRTMLVNALRAHMAEFGIVAPQGLRHVEMLTKTITHQQERLPELARSILQTIADQLNGTMARIQEIEGRLVRWHRQSRVSRLVATVPGVGIMGASAIAATVPNPSLFRSGREFAAWLGMTPRQNSSGGKERLGRTSKRGNKYIRSLLTAGAVAVLRHARNRPTRDGAWVRALLARKPTKVAAVALANKTARIVWAVMVREAGYQPHEVFRQPA

SEQ ID NO: 122118 - protein, 335 aa, unidentified
MKLSVIGVDLAKEVIQVKTVTTKGKINKAIKRAQFLEFMNQQPRSLIGMEACGSAHYWARKLQLQGHTVKLMHPAYVTPFVMGQKNDMNDASACRTAVIQDDMRFVPIKTIEQQDIQMVLRIKERLEKQQTALVNQIRGLLREYGIYIPQGIHKVFKKLPEILEDGENELTMQARQIISLLGDELRSARENLQRHEEIIQAMVRDNELCQIIIKQVRGIGPITALTLVNDIADGSHFKNGRHLSAWIGLVPRQYSSGGITKLGRISKRGSSALRRLLFMGARSVIRSSKDKTDKLSLWVQSLLARHPHKKVAIAVANKMARMAWAVLNNHQTQSA

SEQ ID NO: 122119 - protein, 453 aa, unidentified
MKKGKKIFKVIHPNAAGIDVSSRDYYVAVPEDRYKEPVRTFGCFTQDLHEIANWLKECKITSVAMESTSVYWMQLFIVLQDQGFEVFLVNAHQIKNVSGKKSDVEDCQWIQQLHTYGLLNNSFQPDNLTRELRTYVRQRKKLTEDASKEVLRMQKSLAQMNIKLDRVISDIMGKSGKNIIEAILAGERDANVLVKLADSRLKASKEDLIKSLEADWRKEYLFTLRQCYDLYEFYQLKIAECDKQIETLLLLYPKANLKNSKKKGEEFNPYKIKQKQKTDFKFNPDDYLKTIYGIDVTKIPGFSSVTAVTVLSETGTNLKEKFPSKKQFLSWLNVVPNNKITAGKIISSKVKKKKNKAGQSFRFAANALKNSKCPIGDYFRKVKSREGHGKAIIATACKLASIFYILVTNEVEFNYDIYMKSYKFNIERHIKKLDKKIIDLKKQMLYTTELQHV

SEQ ID NO: 122120 - protein, 404 aa, unidentified
MKGPIISIDVSKGKSDYQAFKNLNVKYTGSRSIKHTKEGFDEIVNLVREMEKKLETEVCVVYEATGVYHRVLKKVLEDNNIKQFIINPLLSAKTRKNDSLRCPKTDKLDPKSIAKTYYSHSLHNSHKQETIYHELRELSRYYEDILVHIRKDKVAFRAQLDIVFPGYDTLFDDLYGPVALAVIEKYPHPEMLQKKKINTVSKVIQSKTCHRQAVSDTMADKAIEYSKTIYSGCDKDDIEVLILQRFIKKLNEDMAEAERTIGEMIKLAQELPDFSIIKSIPGIGDNLAARIIAELGDMTRFKKKNELVAFAGLDPRISESGKNDGDHMHITKKGNKRLRCLLYLAVTCSIRLKRDDNSIKDFYIKKKQQSNPMCSKAAKTACASKLVRIIYSMCKTGELYQYNK

SEQ ID NO: 122121 - protein, 452 aa, unidentified
MKETLSSINDAKAENQQQSYAAWIGLDWADQKHFWSMRTADGKLQRGQLDNTPESIKIWASELGQRFAGRSVAVAVEQARGAVINMLSMYAHLVLFPVHSTTVANYRKSFAPSGAKSDPQDGDLILDLLTKHPERFKCLRPDTVETRKLQLLTEERRKLVNLHTSQVQYLTNWLKQIFPQILLWFDDPSTKLVEDLLLCWPTLPQLQKVSPKKLLKFLQLHNCRSEARNQQRLAEIRQAVPATTDPALLSGGTLCIQNSVRLLAQLRDSIAVFDRHIQEVFQSHPDRFIVESFPGAGAALEPRLIAAVGTFRDRFESAADLASFAGIAPVTESSGKSRWIHWRWACPKFIRQTFHEWAGCSIQHCEWARAYYDKKRASGKGHHAAIRALAFKWIRIFFRCWRDQVPYDEKRYLQATQARLPKRAQDVPPTPVKPTVVLKTCGDFKKLVEFSY

SEQ ID NO: 122122 - protein, 339 aa, unidentified
MVYLGIDVHRKRSHVVALRADGEMILSRRVRSRPEDMLRIFGELGPEPLEVVFEATFGWGWLADLLAEAGIPAHMAHPLATKAISASRVKNDAVDAKTLAHLLRGNLLTEAWIAPPAAREARRLARMRASLMRLGSRLKCQVHAILADHGVTLELSDSFGARGRRQLELLDLSAVSQRRVEASLRLIDGIKAEVALADRELKGMWAGDPRVERLLPIPGIGFISAAIVVSEIWDVHRFPAARQLACWAGLTPREHSSAERTRHGHISKQGSRWLRWILVEAATQHALRDPKLRDLFLRVQRGKPERNRIARVAVAHRLLTLCFYALRDEGGCRAYPVSS

SEQ ID NO: 122123 - protein, 408 aa, unidentified
MNAVGIDVSKGKSMVAALRPMGEVALLPQEFLHTAPGLDQMAHAILALGEDTRVVMEATGRYHEPVAAALSAYGIYVCILNPLYIKQSGAGSIRKVKTDKADSLKIAKYGLDNWVDLREHTAMDTIRQQLKLCSRQYNIYMKTEVSLQNNLISLTDKTFPGVNELFSSPARADGHQKWIDFVMTFWHCDCVFRISEKAFTARYEKRCKRKGYHFRAEKAAEIYAQSCELFVTLPKDDNTKLLITTAAQQLLAGKMTLAALRAEMTRLAQQLPEYDTVRAMYGVGETTAAQLMAEIGDVRRFPRRSSIVAFAGVDPAITQSGKHEVQSTATTKRGSPHLRKTLYQIVCTYLRKSPEDEPVYQFLDKKRGEGKPYFVYMTAAQNKFLRIYYARVKECLEAFDTQQNTVQD

SEQ ID NO: 122124 - protein, 457 aa, unidentified
MLDPAWETAAASFSAQPIVVLRARIAESVICTGSQARLLEVHQLEVVHSRCSGIDVHKAEVVVGTRIALSNGRASKEIRRFGTTTRDLLELADWLSQNGITHVAMESTGSYWRPVYNILEGLFDLTLVNAQHMRNVPGRKTDVKDAEWIADLHAHGLLKASFVPDAEQRGIRDLTRTRSSLVGERARLANRIQKTLEDANIKLGNVATDVLGVSGRQMLHAMVAGEQDIEKIAQMSHGALRKKLPELRLALEGRVREVHRILLKVLLDQVGALDKSIEELNAEIDRALIGSPRPFESAKQLLVTAPGVGRITAEAVLAEIGVDMTRFLSDAHISSWAGICPGNHESAGKRLSGRTRRGNTALRPVLITIAHVASRQKGTYCHALFKRKAAGRGKKRAIVAVAHSLLVAFYHMLKDGVPYQELGADYFDRLSKPKTVHNLTKRLQSLGYDVKLTEVAV

SEQ ID NO: 122125 - protein, 348 aa, unidentified
MQTFQYHLGIDLHKKTSYWTLMDHERNILYHRNLPTSVEGLEQGVREMGVAPTLVEAAIEPVSQWGWYGDLLEKAGFTVHLVDAYKSKLIAASKLKNDKVDAKILAELMRSGFLPTAHRAKQDIRDLREFVRHRAFLVRMRSRIRGRIHQILWKHGIINPFSDLFGKKSLEWLKSLELRYPYASERDEFIELWHGLNQRIAEHDARCKFMVSQSKEMGVLTSLPGIGVITSLTIMAEVGDFSRFERPEQLTAYAGLVSSSYSSGEHTRLGHITHRGSVWLRTAMVEATVTVNPKWSQLYDFYSRIAVKRGSKVARVALARKMLGLCWHLIKSGEPFKRRMPVVDSVKR

SEQ ID NO: 122126 - protein, 430 aa, unidentified
MEEVTDEPLYRDRVCGIDIGKAGMVATVRVPSEMNPARRMAETRAFATTKRGVLALADWLRCWQVPAVAMEATGDYWKGPFYRLEAEGFECVLADARQIKNLPGRPKRDSSDSAWIAVCFERGSITSCFVPTGEFRLIRLHTRYRRDLTGDRTRDKNRVEKLLESAAIKISAVLADVHGMTGRDIMQQLIAGQRDPKALAQLARRRARAKIPQLEQALEGADFFTEAHAGLLKAMLERIDRADEEIARLSQVIEQLLSPYEEQLQQAESMPGWARRAAQDVIAETGVDMSRFPTPGHLASWAGRTPLDHQSGSRRGKARRKHGNRYIGAVTGETAVAAGRTDTREGARHRRLARKRGKGKACVATGNTQMRVFHVLLSNPGMRYTDLGPDWYADERQAARRLTRLVGALDAMGYEVTLCRKPEPQDSPAA

SEQ ID NO: 122127 - protein, 417 aa, unidentified
MKYALARVLPDVPPGGVSAGIDWGTASHAACVVGAAGRVADEFAVADDRAGLAALTARLRRAGVAEAAIERGDGPLVDALTAAGITVVVITPRQVSRLRERHVSSGAKDDGFDAFVLADALRTDRARLRPLVPDSPQALALRAAVRARKDLVAQRVAACNRLRAHLLTAFPGAAGLFSALDSRLSLAFLDAFPSRASAAGLGEAGLAAWLETVPRRGGCAPPAVLARRLAAAVPGTGHDAHLAAVTRALAGTVAGLAARIRDLESAVAAQLAAHPDAEVFLSLPRAGTLRAARLLAETGDSRARYPDAKALAGAAGVAPVTRRSGKWTSHEFRWAANAHLRDAWCDWAGDSRHANPWAAALYDAARQRGKDHPHAARILACNWITVIWPCWQQGVPYDPAKHRALQEAIARQAREDR

SEQ ID NO: 122128 - protein, 342 aa, unidentified
MQITTIGLDIAKNVFQVHGIDAAEKVVVRKQLRRGQILGFFEALPRCLVGMEACATSHYWARELTKLGHQVRLMPAKDVKAYVKRNKNDAADAEAICEAVRRPTMRFVQIKSVEQRGQLMLHRARDLLMRQRTQLINALRAHMAELGIVAAQGREGVKELVKIIASEQDARLPVDAHTSLVVLAAGLQALQTMIGSIERRIIAQHRSDEASKRLRSIPGIGIVGATAIAATVPDPKVFRSGRDFAAWIGIVPRQDSTGGKQKLGPISKRGDQYLRRILVVGAHAVLKRACHQPEKYPWVTRLLERKPFRVVAVAVANKMARVAWALLARGGSYRAPALAAAA

SEQ ID NO: 122129 - protein, 351 aa, unidentified
MITLGIDAHKRTHTVVAVDELGRQLATRTTTTTTTADHLGLLCWAETLDGGDERQWAVEDCRHLSRRLEADLLAAGERIKRVPPKLMAHARDSARTYGKSDPIDALAVARAALRHPDLPVAQLDGPARELRLLVDHREDLVNERTRCINRLRWHLHELDPSWDPTARSLTSYRNIDAVGSRLAAMDTMVARIAADIAVRIRELTVQERTLEREITTRVKVLAPTLLVLVGVGALTAAKIVGEVADIRRFYSKDAFARHNGTAPLPVWSSNQPRHRLARTGNRQLNAAIHRIAITQARCHPDARAYLERRTAMGNTPSEARRALKRHLSDNVFRALLADANTASTTPLADAA

SEQ ID NO: 122130 - protein, 408 aa, unidentified
MVYVGVDVAKADHCLGAIDAQGQVVQKPVRFTQDAEGFARLAGLLRRLGPPEEVVVGMEATGHYWVLLAEELQRLGYPPQVFNPILSGDAIRMSVRGRKTDADDCLAIARVVRDGGFQPVRLPDAAMGELKRLCRYRQAAVERSANLKKRLLGLLDLVFPEFAHLFSECSGAAARAALMAGPSARLMAAVPINDLVAQVHAASRGRLGRERAQAVILAAKTSIAAARTDTATEMAIRMTLQEIALLDDQITTYDAAITPLAPAGKDLLTTIPGIGPILAAVILAEIGTIERFIPAKGDPRPSDGIHRLLAFAGLDPRITESGQTRGKPRMSKRGSRTLRTALWRAAFLAHRHDAFRDLYQRHRVTMKQPQKIALSHVARKLTQAIYGVLRYQTPFNLDAFRGKPRIAA

SEQ ID NO: 122131 - protein, 318 aa, unidentified
MSHGYDKFVGIDVSKDGLDVHGLPDGSPSRFDNTAAGRAKLLSLLPPAGACLSVVEATGGYERDLVAEAVTAGHHIAVVNPRQVRDFAKALGLLAKTDRIDASVIARFAETTRPVPKGYDERQEQLRELIVRRRQLLDHRTAEKNRSEMAHSSLVRKSVLKLIETLNKDIQRIEKAILQLVESNDDWRERFEKLKGVPGVGGQTAATLMAELPELGHLNRQQVAALVGVAPFNRDSGQFRGRRAIWGGRQSVRNALYMAALSAKKHNPVIREFAARLMAKGKPPKLVLTACMRKLLIILNAMLQSGDSWSPRLATLTP

SEQ ID NO: 122132 - protein, 414 aa, unidentified
MEVLYPRCCGLDVHKSSIAACALLREQGRVRTERRRFTTMTQDLQDLAAWLRQLQVTHVAIESTGVYWKPVWNILEGQFTIILANAQHVKNVPGRKTDAKDSEWIAELVQHGLLRSSYVPPEIIRDLRDLTRGHATLSQEASRIASRIQKVLEDANIKLSSVASNTLGKSGRAMLDAIVAGQLDPEQLADLALGHLRAKIPQLQLALSGKVREHHRFLLKRLLHQWRFIENEIDLVDQRLEQLGEQYPVLAAAVGRWSTVPGMDRVGAWSLAAEIGVAMEQFPTAAHLASWAGLCPGNCESAGKHLSGKTRKGSPWLGRMACQCAWAAARTKNTYLSVQFRRLAAKRGKKRAIIAVAHSILIIAYHLQRKQCDYRDLGSDYFDRLNADGLKRYLIRRLEALGHKVTIEAAGDAA

SEQ ID NO: 122133 - protein, 339 aa, unidentified
MGLYTAFDLHSNNAYLGIIDETGKRLFKKKLPNETEMIKTTLLPFKAAIEGIVVESTYNWYWLVDMLMEEGYQVHLANPAKIQQYSGLKYSDDKHDAFWLADMLRLGILPKGYIYPKESRPIRDLLRKRSHLVKLRTSLIISLQNIIARNVGSKLKASDIKVLTIDRVKPLLEYNEDLALAGKVSKDAIDSLSQQIKTIEKTIGGRIHLRSPYDHLLSIPGVGPIIGSTIMLETGSISRFPKVGNYCSYCRKVPTGRFSNDKRKGSGNPKNGNHYLACAYSEAAEHAKRYDEESRKFFNRKLKSTNAPIAHNALAHKFSRAAYYIMRDGVDFMPEKAFA

SEQ ID NO: 122134 - protein, 344 aa, unidentified
MHIASIGIDLGKTTFHLVALGERNKVLIRKKFSRAQLLAYTANLPSSLIGLEACAGAHFLGNKLREQGHEVRLIPAQFIKPYRKSNKNDFLDAEAIAEAVTKENMRFVQIKTEEQLDVQAMHRVRDRLVQRRTALINEIRGFLLERGIIFALRPIQLRKNLLGVIEDAEQNLSSRLRWLLERLWQEWKQVEVDLKTITDEIECISEENALCRRLRQIPGFGPLVSTATVAAIGNGAAFRRGRDFAAWLGVVPRQYSTGGKQKLLGISKRGNIDLRRMLIHGARAVLFRVKYETGGFGQWVHRLAQRAPRNKVVVAIANKLARMAWAVLSSGKDYRHQSLQPVAA

SEQ ID NO: 122135 - protein, 390 aa, unidentified
MTYFVGIDIAKFKHDCFIADEAGCVIRDSFSFKNDKDGFNVLLSILKDLKSKGQIKIGFESTGHYHFNLKLFLEANGFDYVEFNPLLVHKFMCTQTLRRTKTDKKDSSMIAKYLMTVDYKPYVNSFYHIHNLKSLCRLRETLITDRTRFLNQITSYLDQIFPEFKPLFEYGLNQSAFYLLTYYMTPKKMSMLDSNKYSKMKSELKHPIPYQKFCQIKQAAIHSIGYSSKELEYALKASLDIYLHFDKQIKDLESKIKEIYLSLDYRCHTIKGMGILSAAGIVAEYGNLDKFTTRNQMFAYAGLEPSKNDSGEHNGSGKMVKHGSSYLRKYLMNCAETFYTFNPTISDFYWKKRNEGKSHRVALSHVARKLVNTIFTLEKHKVDFDSNLLK

SEQ ID NO: 122136 - protein, 365 aa, unidentified
MSEVTRSQVFRVGVDLSKRVFHVHAVDRTDRVALNKEMAPQAFYTWCAQLPAGCLVAMEACGGAHHVARRLRSLGLDARLIAGHLVTPYRMAGKRGKNDANDAAAICEAASRRQMRFVPIKTVEQQGQLTVHRLREGFKEERTAMINRIRGILTEFGLVFPQSPEALRKALPEVIEDAGNELPGVARLAVQRAHLHWIDLDLQIAWCDERIGHHVRSDARANKAATLLGIGPVTASAIVASVGDFAQFSNGRQFGAWLGLVPSQNSTGGKVSLGRITKRGDDYLRTLLIQGAKSAVMSAGKRDDRISHWLRQLRERVGWQKAVVALANKNARILWAVLTRDTVFNPDHVPAIPAARSAAMTPAPA

SEQ ID NO: 122137 - protein, 421 aa, unidentified
MSNSTLSKKLASVKPGTLFVGVDLALDRNVAVVLTERAEQLGRFGFPNDRDGYDYFYRRLEAAQEGQQAPAVLVGMEPTNYFWKLLAADIEQHCPDYSYRLVNPYTVKKNREGDQLDRSKDDNRDAFTIADLLRTGKYTETQLLRGTYAELRQYVTLYSRLQRDIRRQKTLIRNIAGQLFPELPRVFKDLTGETALAMLHHHAAATAVRRMSQEAFIASVRADFQGRRLQVAKLRRAYVLAKRSVGLKDGVEALQLALRTHIETLKTLQQQLEEARTALVDVFLSLPESDYLLSVHGLGVITAAIILSEIGDPSHYTNGRQLIKLAGTQPVLNTSGRKTRSKTPMSHKGRPRLRTALFFAVMRLVQVDEAFAREYLHLQTRKKNPLTKMQALGVLMNKLLRILWALMRHRTFYNPDFQGAA

SEQ ID NO: 122138 - protein, 338 aa, unidentified
MERQYVGIDLHRRRSVIVRMGEDGEELGTVKIENDPIALSLAVAEAGPNPEVALEACYGWYWAADVLQADGAVVHLVHPGGLNWDNRRVKNDKRDAMELANRLRRNDLPEAWIAPPKVRQLRELVRYRAKLVALRTGLKAQVHSVLAKQGLFPPVTYLWGPEGKKFLNDAPLDPGFLHRLESLRDLVAIFDKEVDLLEREIYRWLRDDPGYWAIQQLNGVGHTLAAIFVAEIGDVSRFPGPQQLCSWAGMTPKHRESDLKVRRGRITKQGSVLVRWAAVEAISRVRGTEKIKQDYHRIAERRGKNIARVAAARRLLTLVYYGLRDGEIRCLASHNEAG

SEQ ID NO: 122139 - protein, 348 aa, unidentified
MKYIGLDLHKRKIFATVLDENGNVLKRNTIGAGKDDIYYYLNKILKEDEIKVAMEASYNWQYTYRAVETVTDNIVLAHPLKTRIIGEAKIKTDKIDSYILAYMLKANMLPRAYVPTKIAMENKMLLRARISLVKQRTELKNRIHAIIDRNRDYYIGLDSLTDIFGKTGISILKNTKIADIDYKILSQYLTLIEDINVKISIFEKIISNRIALDSDIELLKTIPGIGTFTAFILKSEIDDINRFISKERLCSYAGLIPSTHQSGSKSYNGRITKQGNKFIRWALTEAAQVAIRYSAYFRYHYNKVKAKSGANVATVAVARRILEIAYIILKEKRSYIEKPINYIKMAAL

SEQ ID NO: 122140 - protein, 429 aa, unidentified
MNGVDTTRLESFRQLRKEIRGSNEHLIVGIDVAKDNHHAFFGTARGKTLLKRLVFNNNLQGYEKLSTYVEAAKVKNNLNKVVFGLEPTANYHKPLGEHLIKCGFDVVLVAGTAVKRNRELLDGRWDKHDTKDAANVADLVSQGKCLFYEYPIMLLRELRNLLSFKRRLKKQEHGTRVRIRNHLLAQYFPELDPYFARMPASSLSVVKWCLEPSLIAGLEYEEFLRLVAPGKRTIKQREHVKLIWEKAFESIGCSVGETVQFEAKMMVEELQHVRESISEVEEKIEEICLDFPEYKYLLTIPGFGKDISSKVLGAIGNPLRFDNAKQVIKLSGWDLNANRSGKSSGYATAVISKKGKADLRYALYQAALVASSRNQLFVAYFTEKLRQRSREKGIKTKMRVKLAAKLLVIAWTLMKKREPFNPEYLKVTL

SEQ ID NO: 122141 - protein, 429 aa, unidentified
MTLPQPTPEPRVLVAIDIAKQRHDALIEAPGWRRAKRFAIPNESHELSRFRQYLRSFALPVHVAFEATGDYHRGIAHFLLQAGFRLHLVSSLALARTREALHNSWDKNDPKDAQVILYMLRAGQTLHYHDPLANGTNDLQELSKTHFQISLEKTRTLHRLKTHFLPLYFPEVEAYMHSSRTEGILRLLHAFPTPECICALPRDHFVREAWPLVGRKVAKQRLLEDIYRTAGSSIGLPVTPESEAVAMFRLVLAEMLALCERRSAIEGRADALLSGQGDYVRLRQIPGIGPINALTILAEAGDLRRFAHHRQFLKFCGLDLATHQSGQYRGQSRLSKHGNARLRCAFWMAAQIAVRMKENSFRYKYERYLRGSSADPDAKRKALVAVAAKVARVAHSLIKTGADYRPFFEAAVPGGRACSPGAVEAHATS

SEQ ID NO: 122142 - protein, 339 aa, unidentified
MRETCCSQVRFGLAITCPILGIDVDSKYLVVHLLLLDGTNRTRQFKNGPAGFKELVEWLAQLTASDALICMEATGRYGEKLAKHCHGLGFKVVVANPNFISRHKESLNKHNKTDPTDALAIADYARCFEGRLRAWEPLSPVREKLRDVLGQIAKLKKARTMFSNRNHCGLNDVLVRDSNDESIAFVSAQIDKLSEYRDSLFEELPALKVARAALMQTVGIGKEIATALVVRVQMQNFASGRELGAFLGCASAEWSSGKQKRRGRQPKAGDSDLRSLLRLGAASALRTSFYRDFVDRLTKRGLSKGQVIGAVARKMLLIAHAVLRSGKPFDRNYKSPLAT

SEQ ID NO: 122143 - protein, 343 aa, unidentified
MDHFAGLDVSVKDTSVCIVDGAGKIVREVKVASEPDDLLQVLRNPAYCFKRIGLEAGPLSQWLFSALAEADLPVICVETRHMRAVLKAQINKTDRNDARGIAQMMRVGLYRPVHVKTLRSQKLRMLLTHRKLLQAKAIAVENDLRATLRNFGRKVGVVGAVKFEARVKELVDNFPDLVTLVESLLVVRRVLREQISILHRRVLSAVRNDEVCRRLMTVPGVGPVVALTYCTTVDVPARFRKSKSVGAAFGLTPARDQSGERDRPGAISRCGDEMMRTTLYEAAQVMLLRSAKWSWLKAWAMKIARHRGMKKAIVALARRLAVIMHRIWIDGTEFRWTREAVAA

SEQ ID NO: 122144 - protein, 403 aa, unidentified
MEGPLISLDVSKGKSNYRFFENGTDRKGKKGVIRHDIQGFDSIRDEAEKMEERLRIKLSVIFESTGVYSDVVEKYFTDKGFDVYVISPLLSASMRKEGVRPAKNDSLDTLSIAKVFYSKDDLRKCSENDKKAERLREMSYELDMMNRRIRPMKCQFLRLLDKVWPCLDEVSDYSSRFMLDFIIAFGHPENIKTVKGVLSVIRKSEMGTAGRKDKIAQDLFDYCHTHLSAVSKDSSYVELLKRMAIELKAMAKKKSELIDRMAEEARNKDEFARLLTIPAVAKTTALKIMARVGDISRFRNAEALVAYCGLDPRVYQSGKMTGEHRTITKKGDCILRSTLFLAVKLMVMLYPDTKVARFVAAKAKNGLSYKQAVVAGSAKLARIIYSMLTHHENYVEFNADIVA

SEQ ID NO: 122145 - protein, 347 aa, unidentified
MKHYAGIDVSLNSSSVCVVDESGKIVREVKVPSEPVALIHCIKSLGVRVERIGLEAGPLSQWLYGALRESGLPMELLETRHVKAALSAMPVKTDRNDARGLAQLMRLGWFRPVHCKSMAAQEVRALLTARKLVQSKLYDIEMSLRGILRGFGLKVGPTTSRSFAARINHLAAGHPSLEMVAEALLSTHAAALCAFKNLEKNVRQIGRADARVRLLMSTPGVGPVVALTYISAIDDPKRFTSSKRVGAHFGLTPKKYQSGETDISGRISKIGDSSVRAVLYEAAHIILTRPIHGGALKSWAMRLAKRAGMKKAKVALARKLAVVLHRMWVSASTFDFEKANGCMRAAA

SEQ ID NO: 122146 - protein, 414 aa, unidentified
MNRPQVIDDQEHERVRERVAAIDVAEDSGMVCTRLPHPSGPGARRSTVWTVKARMGAIRGLGRQLARDGIEVVTLESTSDYWRIWFFVLEAAGLAVQLVNAAQAKNLPGRPKTDKLDAQWLARLTEMGLLRASFVPPQAIRDLRDYTRARTRLTQERTRCFQRLEKLLEGALVKLSSVASKLTTESAQDMIKAMIAGERDPRTLAGLARTRMKARHDDLVEALDGMFDDHHGVLARMLLDQIAFLDQRITQLTTRITGAVAAMPEAGGVDGDGTTGPQAGTGPDAAALPAVARLAEIPGLSEDLARAIIAETGLDMSRFPTAAHLVSWAGLCPPARQSGARTRAGQKGQGNGYLRGYLGQAATGAARTATFLGERYWRIARRRGKAKAQVAVARSILVIISLGDLGVGLAKARK

SEQ ID NO: 122147 - protein, 366 aa, unidentified
MGWMAPLRHLSAKLLSDRNSSEWEPSMGEVTTIGLDLAKHVFQVHGVDAEGATVLRKQLRRAQVLAFFSRLPPCLVGLEACATAHYWARELRALGHEARLMPAQYVKAYIKRNKHDAADAEAICEAIGRPTMRFVPVKTADQQAAVLLHRGRERLVRQRTGLVNALRGHLAEFGVIAPQGLRNVGKLIAIVRDEGDARLPDLARQVLQVLAAQIEQLEAAVAAIEKQLMAWHKSNPVSQRLASVPGIGPIIATALAATVVEPSGFRSGREFAAWLGLVPRQNSTGGKHRLGGISKRGNQYLRRLLINGASANLLRSKATKADPWVIGLRRRRPPLVVAVALANKTARIAWAVMHRHENYQRVAAAA

SEQ ID NO: 122148 - protein, 454 aa, unidentified
MNHQSSPEPIQPKSPESKPENSSQAAVPDFEVVIGIDRSDAKIDICRRERDGSKSASQISTAPEQLHKWMSALIEEHPESGAIAVAFEQPSRSMLAFLGAYHGQITIYALNPATPAKFREAFRTSRCKDDVTDAETIADLVAHHSTLLRPWHPQGELSRRLEQLTRARRQAVDERTRLTNQLTDTLKSHFPQALQILGDDLWRPIVTAFLTKWPTLQDAQKSREQTLRNFYYANRCRRMDTVEKRLAVIKDGVALSDDPAILECARIKVRMLAKQIEGYTRAVANFDAAIAEAFAEHPDAEIFSSLPMAAAVLAPRLLAAFGDRRDQIGDAKELQCISGVAPVTKQSGKSKIIHRRYRCSKFLRQSFVEWAGLSIQLSRWALAYYESQIAKGKKHHTAVRALAYKWQRILFRCWQSGETYDEERYIKALKRAGSPLIARMKPIENEETPAPATG

SEQ ID NO: 122149 - protein, 317 aa, unidentified
MENEQAYIGIDVSKNSLDLAVHGRHEVRRFANTAAGIAKTVRHAKESSPVLVVIEATGGYEMELAAAMAEDGIPTAIVNPRQVRDYARSTGKLAKTDAIDARILADFGASVHPEPRLLADSQTMELRDILARRGQISEMITAEKNRLQRSRGLLRDQIREHIVWLQKALSDMDSELKHFIEDSPLWREKDNLLKTVPGIGPVLSSTLVADLPELGTLDRKQIAALVGVAPFNRDSGKMRGKRACWGGRANVRATLYMATLVATRHNPVIQAFYQRLCAAGKAKKAAITACMRKLLTIVNAMIRHHTPWHYTSDAAIS

SEQ ID NO: 122150 - protein, 347 aa, unidentified
MNFYTKQHKFYCGIDLHTQRMFVCIIDAGGTVRVHQNIHTDPEAFLRIIAPFREDIVVAVECMFTWYWIADLCIQENISFVLGHALYMKAIHGGKAKNDKIDSLKIATLLRGGMLPQAYVYPARMRATRDLLRRRNHFMRKRAELFAHIQNTRSQYNLPDPLGCIAKPQNREGIVDRFNDPSVQKSMAVDLEVIEAYDRLLTQLERDIIACAKEHDLRSYALLQTIPGVGRILGLVILYEIESIERFPRVQDFVSYCRLVKCIKESNGKKYGSSGKKIGNAHLKWAFSEAAVLFLKGNEPAKKYLERLARKHGKAKALSILAHKLGRAAYFILKNKEAFNQKKFLGL

SEQ ID NO: 122151 - protein, 385 aa, unidentified
MQRNDMSRSLVAFDQNSTVVAVVELSLSTWLVAGVVPGLKRQPLKKLSADADKLVALLERWRAEAIKAGQVINRMVVAFEAGRDGFWLARLLRDRGIEAYVIHASSIAVSREHRRAKSDRIDTQRLMRSLLGWLRGEAEHCRMAAIPTLAQEDAKRPNREHECLVADRTRLVNRMKAALIRLGIRNFNIKLRKAAEGLAALRTPEGEPLPPNTLAELGRELERLALIRAQIRAIEQARLQRLKAAPQQATHPMILMLAKVMGVGVETADMLVHEVLSRPLRDHRAVGRYAGLTGSPDESGSSRREQGLAKAGNARVRRGMLQLAWRWLMHQKDSALTQWYRSRTADGRKDTRKTMIVALARKLLIALWRYVTTGEVPQGVVLKAA

SEQ ID NO: 122152 - protein, 361 aa, unidentified
MKRVSELANDGKEIFCGIDLHERSMLAGVAIGRGDLNYHSLCTDDGGISRLIEILKSYRDKNAGSEVWVSYEASGCGFRLADLLESEGFIVSVLAPTHLPTSPKRRSNKTDKRDVIRILEVLRGHVLAGNDLPAVWVPSAELRDDREVVRRRLRLKEDSTNVKNQIHGLLRRYGIRKPEWMKENWTKKHIRWLHSLETVLNPGASVVLMSLLRQLDFYEGELIKVEQELIKLSEAERYKSRVEALIQIPGVGLLTAMVFLTELGDLSRFPNRRKLANYLGLVPRSWESGDQDDRKGHISKLGPSRVRKVLNQAAWLFVRYDPEFGRWFRERTPKKKYRRKMITAVMRRLGILMWHTALSAA

SEQ ID NO: 122153 - protein, 339 aa, unidentified
MTIVGCDFHPGWQQVAVFDAETGEIRELRLENGNGEAERFYRQLSAPALIGFEACGNTQWFEDLLDRLGHEVWMGDAAAIRASYVRKQKTDRRDAAHILKLLMESRFPRLWRPSAGERDLRQLLIHRHKLVGIRARVKNGLQHLMLNRGVQMKRKLWSEAGQKALRALPLEGWAAQRRQDLLHLLSGLDPQIRQLDVAIERAAQQNPRAQLLMTQPGVGPITALAYVLTLGDVNRFKRGKQVASYLGLIPSEHSSSKRRRLGSISKQGNSFMRMLLVESAQTVNRLDEGFRKQYQHRCHRMARGVAKVAAARRLAVRLFWMLRTNTAYPEIAHIESSPR

SEQ ID NO: 122154 - protein, 356 aa, unidentified
MMIIGVDHHPSFQTIAFFVEETGECGEQELNHSDGQAEKFYRDLKQRGICVQVGMEATGYARWFERLLAELGFELWIGHPAEIKAKRVKKLKYDREDARLILRLMRENNFPRIWVPGPENRDLRQLLWHRHRLVQMRTRILNQLQALAMNEGYHWRKKLFSEQGRALLEKLSLAPWASRRRQELLELLDRLNPTIEELTAAVEREARKRPEALRLMTHPGVGPITALAYVLIIGTPARFECGKQIGTYVGMIPCEESSGGKQRLGHISKQGNSLLRYLLVEAAQAAAHLHPDWRRRYMHLAMRRHMSIAKVAMGRRLGIRLYWMWRNGCEYSPSLESVRTRDSSVVPVARSSASST

SEQ ID NO: 122155 - protein, 347 aa, unidentified
MNTTTVGLDIAKSYFQVHGVDEHGKATLHKQLRRAEVLRFFANMPACLIGIEACGSAHHWARKLGELGHQVKLMPAQFVKAYVKTNKNDARDAEAICEAVARPNMRFAAVKTIAQQELLMLHRVRQRLVMDRTAKANQLRGLLAEFGIVMPQGLHRLRDLMPEILADAENGLSCRLRERFSDLFSHLRELDVTVIEWERQIVAWHRENPLSRRLDKIPGIGPLGASALVASMGDVRTFKNGRQLAAWLGLVPRQDSSGGKTRLLGISKRGDRYLRTLLILGARSVLRQMQRHPPRAQSWLGRLTARSHPHIAAVALANKNARIAWALLAHEREYQADYRGRVALAVA

SEQ ID NO: 122156 - protein, 397 aa, unidentified
MYIVGIDIAKRKHEAAVIDGEGTVIIKPFSFTNNCSGYNRLLAMLTKAKLPLDEVSFAMEATGHYWLALFTRLQKEGFRVQVINPVQTNSIRSFYIRQVKTDPRDALLIAEVIRFGHFSESTLHPENIYELRELCRGRHAIVSMQADVKRKVVALLDQVFPEYETAFTNLFGDTSMAILQTCPTPKELSEMPLEELCHLIEVSSHKRFRMAKAQELQALARNSFGFAMAGDVFSTMIRLYAKHLDFLKQQVREMDRKIAEIMETLDTPITTITGIGPTLGAYILSEIGDISRFSSAAKLAAYAGIDPTMRQSGEYNGVRNRMSKRGSPYLRHAIWLAASSAVLHDPALKLYFQKKRDEGKPYMASVGHACRKMVSIIYAVMRDNKAYTPYIPNEISA

SEQ ID NO: 122157 - protein, 353 aa, unidentified
MTSVKYIGLDVHKESISIAVRNDAGKIVMECVIETKANIILDFIHGLRGELQVTFEEGTWATWLYDLLKPHVTKLVVCDPRKNARQGNKNDQIDARELSDRLYMNKLSSVYHGGAGVRTLKELARSYLTISKDLARVMSRVKAIYRSWGIPCAGKQVYAPRHRAEWLAKITEVGVLRRAEFYYQQLDALRSLRHEARRDLLAESKKHKAAKLLCQIPSIGPIRAALLIALIQTPHRFRTKRPLWKYSGFAIETHSSADYRSVKGQLQKAKKQVSVRGLNRDCNHDLKNLFKSAATIASVKPGPFQEFYAALVAKGMRPEMARLTLARKIATIVLIVWKKGVSFDAQYLKPQTA

SEQ ID NO: 122158 - protein, 363 aa, unidentified
MTMVGIEGMETKVEVILGVDTHLDFHVAVVLDHLGRRLGELSVPTTAKGYEKLLCWVEGFGPVRCAGIEGTSSYGAGVARYLKAQGIEVLEVERPKRRRRSSRRNAEKSDPLDAEGAARAVLAGETSGVPKSGEGRVEMIRALRAARRSAMKARTQAANQLQGLRVTAPEELHHRLRGLSTKELVAVAARFRLGDDPHDVAAATKFALRSVARRYKALSAEIAELDAQLDRMVRQAAPELVSLAGIGTDHAAALLIVAGDNPERLRSEASFASLCGVSPVEASSGKVVRHRLNRGGNRDANRALYMICLARMRRDRRTKEYVTRRSAEGKSKREIIRCLKRYVAREVYRVLVSRVACSSPIGP

SEQ ID NO: 122159 - protein, 477 aa, unidentified
MAKRKMSTFERLQRGERLERRERRQIQRQLDMGDPQLKVVHADAAGIDVGNESHFVSVPAGRDPEPVQEFGSWTADLHRLGKWLKACRIRTVAMQSTGVYWIALVEVLEQEGLEVYLVNARGTKNLPGRKSDVQECQWLMKLHTYGLLRNSFRPPEEIRGVRSIWRQRSRLVEDVGRAIQQMQKALTTMNVQLANVISDISGVTGMAIIRAIVKGERDPRALARLRDRRIQASEEEIAHSLEGHWRSETIFELGQVVDSYDFYYKQIAACDVELQARMSAVPNGRMAAADAVAKQPEGASKRRYKSKNQPSFDLRMELRRIFGVDLTRIDGIDVITAQVILSELGPDLRAFPSEGAFSSWLELVPRNDITGGKVIRQKARKSKNRVAHALRMAAESLSHSDSYLGARYRRLRSRMDGQEAVKAMAHYLACLVHRLLSKGQEYVDRGASYFEARRAERDVATLHRKAAELGLKLVPLA

SEQ ID NO: 122160 - protein, 354 aa, unidentified
MNTTQNSTKSKIVKVIGVDLAKDHCDVIGYDENGKICLRLDGCSYAKLREILANLPQAVVLMEACKGSMFHARSIADLGHEVRLVKGADVKALRNVNHKNDLRDAAYIAKLYFVPGTTYVYIKSQQQQSLQFLQNEYKSLQELRIQAGNQIHAGLEEFGCPVRKSSKFIKTRMVAHLEKHAELIPEDVMASFKRRREIWLNLLQQEEEAKRRLEQVAATDANAKRIMTVPCVGPQTAVGLLVHVGVDFGRFKNSRQFAASLGLVPKQNSTGGNNTLNHITKCGPKRLRSNLVQCAQLVLMYAEKWKGNFGDWVRKMRDSGKKHGVIVCAIAAKLARIIYRLMKDKVDYTPVLSC

SEQ ID NO: 122161 - protein, 332 aa, unidentified
MAYDFVIGVDVGKYFHHACVLDPQGRQVLSKRINQHEGSLRKLFGQFLADNTSVLVIVDQPNNISRLTVAVAQDMGADDRYLPGLAMRQLSRIHVGNCKTDVRDAYVIAHAGLKLPDALRSVDRVEEVFIQLKVLNGIDEDLARAYTRLINQMRSALVGTYPAFEHVLRGQMIHRKWILHLLAKYGGPTKIRRIGKTRLAAFARSHKARNPEPVIDAMLAAIHGQTVSIAGAEYAELGVAMSAKDALAKLEHRKEIEAQVLKLIQDIPQTEILLSMPGIGPRSAAQILMTVGDMSDFPDAAHLASYAGLSPRTNQSGTSIMPNSPNRAGNKN

SEQ ID NO: 122162 - protein, 414 aa, unidentified
MESLYTCCAGLDVHKQTVVACLLRPDGDGERKEIQTFGTTTAALEDLRDWVRAAGCTHVAMEATGSFWKPVHNILDSHVEILVVNAAHMHALPGRKTDIRDAEWIATLLKHGLLRASFIPSREQRELRDLTRTRTSLTDERSAAVNRIQQVLEDANIKVAGVATDIMGKSGRDILAALLEGEMDAAAMADLARGRMRSKRAALEQALRGRMGDHHRLLIALHLEHVDLLDEQIAHLSAEIAERLRPYEAALLRLETIPGVGRRTAEILAAEMGLDMSRFPTAGHLASWAGMCPGVHESAGKRKSGKRRAGNKALRRALTEAAQAAARTKKANRTYLRGQYRRMIVRCGKKKAAVAVGHTILRIAHHLLREEETYQEGVLVHLDEHRRARVQQRALDQLKALGYDITITPKEPAA

SEQ ID NO: 122163 - protein, 293 aa, unidentified
MRNAVGLDISKLTFDASAMVGKTEHSAKFDNDSKGLDQFSDRLKSLGCQNLHICMEATGNYYEEVADYFAQYYSVYVVNPLKISKYAESRFKRTKTGKQDAKLIAQYCRSAQESELVKRQKPTDEQYRLLRMTAAYAQIKSECAAMKNRHHAAKDEEAAKAYAQIIKAMNEQLEVLKEKIKEQTEKPNCKEGVKRLETIPAIGRMTAAVLFHHLTSSKFETSNKFAAFAGLSPQQKESGTSVRGKGKLTKFGNRKLRAVLFMPAMVAYRIRAFPGFIKRLEEKKKPKKSSSQH

SEQ ID NO: 122164 - protein, 371 aa, unidentified
MNSIVYVGMDVHKESYTVCCYSFDTDEVLYKQKMSADYKMILKYIEQLRNRFSDDAEFVCGYEAGCLGYSLYHQLTDHGVKCIILAPTTMAITNTNRVKTDKRDAGNIARCLAFRTYSEVHVPTDEDNSIKEYIRMRDDQKITLKKTKQQILALVLRHGKKFEGGKTYWTIAHMKWLKSLQLEGVFQETLDEYLITYEYFTEKIKRLDQRIEELGTGEKYQEKVKKLGCLIGVKTHTALSMVVEVGDFERFAKPEKFAAFLGLVPSEETSDEKQNRYGITKAGNSHLRRLLVEAAQAYTRGHIGHKSVALRQRQQGNTPQVIAYADKANERLRRRFYKMTLNKRLNRNIAATAIARELACFMWGLMTDNIA

SEQ ID NO: 122165 - protein, 431 aa, unidentified
MLKINPLSTLYVGIDVSSKSNYVCALDFYKNKYINSSFANNQPGAEELALKILECLKEHPDITTIVAALESTSVYSIHIANYLSSCEELMRFKPYVFVLNPKCTANYKKSYIGLGKSDPIDAFVIADYARAGNIESEPWRGSQFLALKRLTRHRLHLVECMTREKTYLISNLYLKFSELQMLEGDDQPFCDIYGATSSSVLMEYLSPEEILASSEEDLIAFLAEKSRNRIKDISKTADLLKKAARDSYRLDKALYEPLNVSIASSFNCIETFKREIKVIDNAIEKEIKGLNPNAFIILQSIDGIGPVFAGGIIAEIGDITAFHSSDALAKYAGLTWKSNQSGDFDGEDTPMIKAGNRYLRYYLGEAANSMRKHNVEYGAYYRKKYNEVPKHQHKRALALTSRKFVRLVYGLLARNQLYSGVSLDTSIKNSN

SEQ ID NO: 122166 - protein, 409 aa, unidentified
MLYVGVDWAEAEHAACLLDAAGAVVGRLTIPQRRAGLARLRAAIAAVEPEPVAVLVAIERPDGLLVDGLLAAGYVIYALNPKAVDRYRERTRLSGGKTDPADAELLARILVTDRDRHQPLRPSSAVVEELRVLARQDEVASRDQTRLHNRLRQDLLAAFPAVLDAFPDLAALSALRFLERWPTAAEADALSEAELAAFLRAQGHFRADVAAGRSHAALHADVLAAPPHLAAARAGAIRLAARQLLLLREQRAAWEKRLREILAGERAHPDGEILLSLPGLDARLAARVLGEVGDRRERFPTPAALQSYAGTAPVTKASGRTRVVVARTACNRFLRQALLRWAFCSLTTSAWARTYYDQHRQAGKTHFSALRCLAHRWLVILHHLLASGQRYDEAVHQRNRAHASNETAA

SEQ ID NO: 122167 - protein, 342 aa, unidentified
MSVMIGIDPHKGSHTAVVINGDEVVIEEIRVRASARQVGELQEWASGYEDRCWAVESARGLGYLLSQQLVAAGERVLDVPAMLASRVRVLDSSKSQKNDPNDARSVAIAALRHSGLTPVVADDHTRVLGLLAKRHRDVARLKNKAACRLHALLGELTAGGLASEMTVNKANSLLASVVVTDEVTRQRIEIATELVDDIARFNAQMRASKQRIRTAVVASGTSLCDIRGIGPIGAAIILGSVGDITRFPTKGHFASYNATAPIDASSGNHKRHRLNPRGNRKLNHVLHVAAVCQLRYPCEGRDYYQKKLTEGKTSKEAIRALKRRISDVVYRQLKADVHRSTS

SEQ ID NO: 122168 - protein, 346 aa, unidentified
MKITTIGIDLAKNIFQLHGVDKRGKIAVRRAMKRDDMLPYFANLEPCLIGMEACGSAHHWARKLITLGHTVKLMAPQFVKPYVKSNKNDARDAEAICEAVTRPNMRFVPLKNVEQQAELSVHRARQGFIKARTAQGNQIRGLLSEFGIVIPKGIAHVYKRVPEILEDGENGLPGSMRHLILRLTDNLKGLDEQVVSLEKEIKQLHAGNEPGRKLAEVNGIGPLTASALVATVGDAKNFDRGSQMAAWIGLVPKQHSSGGKTVLLGISKRGDTYLRTLLIHGARAVIRHAQNKPGYADSWLGKLITRRGKNVAAVALANKNARIAWALLSKEGKFRPDYASVQPTAA

SEQ ID NO: 122169 - protein, 423 aa, unidentified
MSYRIAGIDVHKKMLAVVVADMEVEGEYQFERRLFGSNPDHLRLLANWLIEQQVEEVVMESTAQYWKPVWGALERYWKPTGQKREGTGPMSGALHLAQAQSNRGARGRKKDFPDAERLVKRLVANELSLSFVPDAEQRLWRTVMRRKYQLTRNRVQLQNRLEALLEEAHIKLSSLVSDLLGASARRMLRALADGETDPAALASLADKNLRATPVQLCDALGACTELNPVYRRLLKMFLEELQLIDQQTGQLDKEMATLLSQDQAAVERLAEVPGLGVDSAQQIIAEVGAKAATFASAKHLSSWVGACPGEDESAGVSKSHRSPKGNRHMRRILNQCANAAAKSKGTIFQIVYGRLVSRLGHNQTIGAIAHRLCRLIWIILHQGVRYEERGPAVNAKSRRRRTNRMIRELRSLGYRVEAVGSPA

SEQ ID NO: 122170 - protein, 337 aa, unidentified
MTQVQILAIDLAKRSFQVCGTDRGGAVLFNRVLSRARLQQLLSEQSPCIVAMEACATSHFWGRFAQGCGHNVRLIPPIYVKPFVKRQKNDAADAAAIAEAAQRPNMHYVEVKSAEHQARAIAFRTHQCFVRQRTQLINALRGHLGEFGIIVAQGPANLTAVVGILADETNDLPAGVREIGQLYLDQIRLLTEKIDGLMLKLRDATKANEDMRRPCTVPGVGPVTAGAILAFAPDLRAFKSGRNFAAWLGLVPRQHSTGGKTRLGGVSKMGQTDIRKLLIVGAMSLIRWIVRKGVLPDNWLGGILGRKPRMVAAVALANKMARIIWAMMTREQNYRMA

SEQ ID NO: 122171 - protein, 341 aa, unidentified
MKNYNTSGVDCAKNVMQISVDSPNNNQLQNKALSRKKFSEFLAKQKPSLVAFEACATAHYWARMAQRYGHSVKIIPAKTIVPFRQGHKTDSNDALAVAEAARRPNIKEAPMKSVEQQGMQSIQRSRELLIQEKTALSNHIRGLLMEFGVVIPQGFAALTRAIPEVLEDGDNELPDSYRPTLARMYTRFLQLKEDATFLDKEIEQLVKHNAACTRLTKLEGVGPIGSLLLFASFGTGKAFHNGREYSAYIGLTPKQYSSGGKTNIIGISKHVANRRLRAVLIQGARAYVHKMKEPKTRKDQWLCSLIQRAGYGRAAVALANKNVRTAWALLTQGTEYNAQHA

SEQ ID NO: 122172 - protein, 421 aa, unidentified
MRAFGLDVHRDFCEVAIAEGGAIRSAGRVATRVGSLELVAQSLVAGDVVALEATSGADRIVSLLQANGIRVVVANTRKLRSITEAKAKTDRLDARTLARLLVSGLLDEVWTPDERTRSLRRLTNRRERLVRARTRAKNEAHGVLARNLCERPPVTDAFGKAGRRWLARLDLPVDERLTLDGCLRQVDFLDAEIAALDSEIARAALAWPEVLRLMTVPGVNVQTAATFMAAIGDIRRFPSPRKLVSYLGLDPRVRQSGSTPARHGRISKAGASEPRHMLGEVAWKVMLTPGPLHAFFERVRARRGPQVAATATARKLTVLLWHLLTREEDYAFARPAMTRNKVRRLELLAGAPAQKGRKGIAGGKSKAVFEAERELSRQAEAAYRRLVSDWRSSGPPKAGAGATPGRASSKPSKGKATRQTP

SEQ ID NO: 122173 - protein, 426 aa, unidentified
MKVMHDRVAAIDVHKDMVKVAVRVPGERRGARKTDVLEFRTFYGVLEEMGRELRRRGVTHVVMEASGVYTEPVYYALAGLDFTEVMVINPAHAKALKGHKTDAKDAIRLLDLYECGLLSGSYIPAPDLKEVRDLARYRMKTVQARASEIQRLQKTLETAGIKLSSVVSDVTGVSATAMIEALIDGERRGAVLAGLAQGRLRTAGKMADLSMALAGRFTDHHALMCRLHLDRMQALGEAVAGLDAKIAPLAARHAREAGLLKSLPGFGDVVVAGWLGEIGPAPHQHFATAQRLASWATVCPGNYMSAKKSKGGRTGDGGNYIKPLLVQAAWAAVRVPGRLQARFHRLVRRFGGARNKGAIKRAIMAIAHTLLKIAYQVLKTGTPYTDLGADFYASRETPQARQDYLIRQLQKLNPGCVITVTPAEAA

SEQ ID NO: 122174 - protein, 354 aa, unidentified
MNKIKQLSFEGKVIYCGLDVHKTNWKINARMEGIEMAAFSQNPDPLLLKNYVDKNYPGAELKVVYEAGFCGFEIQRSLKSLGIECIVVNPADVPCSDKDRKRKDDKRDARKLSIELAKGNLKGIYIPDKQMQDARSLVRQRHRLVQDQTRCANRIKHLLLSNGITTGEKSERWSLRFIKKLQQLDCGSISLKSSLQFAIEQYLQTRRIVKEITLAIGDLSKQEPFKKVQAVLGSIDGIGLINGMVIQTEIGDIHRFKRLDSLCDYAGFVPDIYSTNDRMVIRGISKRGNEFLRETIIESSWVLIRKDPAMLMKYNEYRSRMSANKAIVRIAKHLLSRIRFLWKTEQTYVRGIIG

SEQ ID NO: 122175 - protein, 422 aa, unidentified
MPSLAAAGQANTEMSGTVSGRFALIKNHDEVDIFIGVDVGKSNHHAVAIDRAGKRILDRALPQDEAKIRAIIKAVADKGTVLLVVDQPSTIGALPVAVARAEGILVGYIPGLAMRRIADLHPGEAKTDARDAAIIAEAARSLPHTLRSIVFADEQAAELSMLCGFDDDLAKQATATSNRIRGLLTQIHPALERVIGEHLDHPAMAELLIKYPSPEKLRKAGQARVTTLLAKHAPRAGKRWAADIITALGEQTVVVSGTGAAGIVLAQLAPMLKQLRTARDELLTQVEALVEAHPLDQVLTSMPAVGVRTAARIITEVAGKEFQSSGHLASYAGLAPVTWRSGTSIRGDHPSRKGNKTLKRAFFLSAFAALKDPLSRAYYDRKRAEGKKHNQALIALARRRCDVLFAMLRDGTLYDAPTPKTT

SEQ ID NO: 122176 - protein, 423 aa, unidentified
MPYRIAGIDVHKKKLAVVVADVEVEDEYQFERRWYGSNPEQLRVLSEWLIEQQIEEVVMESTAQYWKPVWGTLERYWKPRCQSREGAGRMSGTLHLAQALSNRGRRGRKKDFRDAERLVKRLVSQELVLSFVPDTEQRMWRTLTRTRYQRTRDKVRLQNQLEALLEEAHIKLSSLVSDLLGASARRMLKALADGETDPAALAALADQRLRATPAQLHDALGACTELNPVYRRLVKMTLEDLQFVEQQIGQLDQEMASLLRQHQDAVERLAVVPGLGVDSAQQIIAEVGAKAATFPSGEKLSSWVGACPGEEESAGVNRSRHSPKGNRQMRRVLNQAANAAVKHKGSIFEIVYRRLVPRLGHNKTIGVIAHRLCHLIWIILHKGVRYEERGPAVSEKSRQRRTARMVRTLRILGYRVEPLANPT

SEQ ID NO: 122177 - protein, 338 aa, unidentified
MLHVGLDLHKRFSTVATMDEDGNVLQEDKLYHDDRGRLTEFFDNLAGKAVVTVEATRNWYWLYELLEEHGVEVKLAHARKVRLIAEAKLKNDKVDAKRLAELELKDFLPEAYIPPREIRDNREYLRYRLTLVQLRTKLKNKVHALLDKLGISHPFTDLFCPAGRRFLSELQLRPVYQEELTNYLALVDDIESRIATATKAIKQQLKPDPRAELLMTIPGIGHLTAYLLLNEIGDIKRFPTAAKLCAYGGIVPIVRQSADHCWQGHITREGNRYIRWALTESACKAPSKDYALGSFHRRLAARRGPLKARVAVARKLLVAVWHVLTYGEPYKVTAFPKV

SEQ ID NO: 122178 - protein, 475 aa, unidentified
MNVNGKRKKNQVVTANIFEQQELLKKAEVIRENLTASTWRELETNGKFDKNEKLSFISDDMLILGCDVGSEIHYLRAIDTRGRELSKSAFSFSNESEGFQSAKEWAVKIAAEHNKNQIVLGLEPTGHYWFCLATWMISNGISVVQVNPYAVKQTKEVEDNSQMKDDRKDPKLIANLVKDGNFGMPYLPEKLYAELRRLSMFRDQLNEDRIRTINRMHREMKIYFPEYKDALGKVDGAFSLELLKQAPFPEDLTALGEDGIGQIWHDAKLRGRGYSRAGAILRYAKTSVGIKDGAAAGKTAVKWFVQKIMELDVELAVIEEQINQKCQEIPHAGNILEISGIGENTLSGILAEMGDISRFDDVKEIQKLSGLGLVACSSGKHKGETKISHRGRKRLRYWLFQAAKSAVAHAEEVKELHVYYTTRPDNPLKKMQSLIVIACKLLRIIYTILKNGTVYDPKKMLMDIRRPEKKEAIAA

SEQ ID NO: 122179 - protein, 361 aa, unidentified
MAQVRSWAGLDVHASKVLAATVDRETGELGVRRLSGQTTEVVTFCAGLAGPTRVAYEAGPTGFALARGLQDAGVGCVVAAPGKIERPAQDRVKTDRRDAERLVRLLMVDGLHPVRIPSSEEEALRDLVRAREDVRGDLMRARHRLSKLLLRHDVRFDGPARAWTVAHRDWLGRVDLGGPAQLTLLDYLGAIDALIVRRDTLEGHLERLVPDSPWAKTIARLRCLRGIDTLSAVGLCAEIGDFERFARPGRLMSFLGLVPSEHSSGERRAQGHITKSGSRHARRLLVEAAWHYRRAPAKGVALRRRQSGQDPHVLAISWQAQQRLHRTWRRLDHERGKRSTIVAVACARELAGFCWAVAGAD

SEQ ID NO: 122180 - protein, 340 aa, unidentified
MLYVGLDIHTKHIALCVLSETGQVVQRARVRGIEEMLRLLKGLPDRFEVCYEASCGYGHYHDLLQPLAARVVVAHPGRLRLIFRSRDKNDRKDAERLAKLLYLGEAPTVHVPSLDVRTWRELINCRGQVIAKRTRAKNALRALLRGAGVGPPKSPGLWTKKGLAWLRQLGLPTASQQLRRDLLLEEVEALNGQVRRIEQELNRRAQQTPAVARLRSIPGVGIRTAEAVAAFIDDPHRFPQAKAVGRYFGLVPSQDQSGDKNRLGHITREGPAVVRQLLAEATWQAARRSPTVRAFFERVQRGDPQRKKIAVVATAHYLVRVMWALLKRGTVWQEKEAPGK

SEQ ID NO: 122181 - protein, 407 aa, unidentified
METMLPRCAGLDVHKSSVVACSRITVDGKVTEEIETFATTTAALLTLLDWLDVRGVTHVAMEATGVYWKPVWHILEGSFELVLANAAHIKNVPGRKTDVKDSAWVAKLLAHGLIRSSFVPPTPIQETRDLTRTRKQLVRECGQHVQRIQKLLEDANIKATEVISDLRGTTGRAVLAALIAGETNPEHLADLCGRLRARRSEIVESLRGRVTNHHRFLLKLHVTQIDALEDAVASIQLRLGELIGPFREAVHLLKTIPGVSDVAANAIVSEIGLDMTRFPSAGHLIAWAGMCPRSDESAGKQRSTRLREGSPWLKTVLVQCAWAATRKKGSYFQAQFHRIRARRGAKKAVVAVAASMLTAAYHMLLRSKPFEDLGADYFDRRDKNKQVGRLVRRLEALGLKVTIETAA

SEQ ID NO: 122182 - protein, 429 aa, unidentified
MDYPPVAGIDVGKNFSEMCILSPNNEIYHRIKIYHDSIDSIKKAIGLLQKAEKDFAIRPVVVLESTGHYHKILFHYLSDSGFEVSIINPIQSDSIKNIGIRKVKNDKFDAHKIALLYRFYFIKTTVVPDDVIDCLKSLCRQYYKLGDELTTYKNRLIGIIDQVMLNFTDVFQNVYSNTALAVLDRYPSPKQILKANKQTLISLIEKTSKKGLGWSTEKYELLVLKAKEFKDLSISNPGNLAILKVNISMVRTLQDAQKDILDAINEIILADSLEDNPVLAPIINLLCSIPGIGILTAATILAEVGDFSAFSSPNKLVAFFGIDPSVNQSGEFIGTRNKMSKRGSRLLRRVIFTTALANIRSKRNGDKTNPVLYEFYQKKCTNKPKKVALGAVMRKLVNIIFAVMRDKKPFELRTPEEHEELLLTRSSVA

SEQ ID NO: 122183 - protein, 342 aa, unidentified
MSPKLGIDIGKNSFHVVGLDRRGAIVLHQKWSRGQLATRLGNLPPCLIGMEACVGAHHLSRKLTSLGHDARLMPAKYVRPYSRGQKNDFRDAEAIAEAVQRPTMKFVATKSAEQLDLQALHRVRERLVSQRTGIINQIRAFLLERGVAVRQGLRFLRAELPRILATPCDGLSPRMVRVLEDLACDWRRLDERIEGLSSEIEVLARRDAGCERLMSVPGIGPIISSAMVAAIGTGDAFTKGRDFAAWLGLVPKQISTGDRTILGKISKRGNRYLRALFVQAAWVVLIKPKSWDRHGLKPWLEAAKKRLHHNVLAIALANKLARIAWSVLAHGRAFEASKIQVA

SEQ ID NO: 122184 - protein, 335 aa, unidentified
MTITTIGLDTSKAWFQVHCVDADGRTVLRRKLARSKVLSFFANIPSCLVGLEACGGSHFWARELAKLGHDARLMPARYVRAYVKTNKHDAADAEACCEAVQRPGMRFVPVKTEEQQSMLMIHRTRDLLVRQRTAAVNALRGHLAEFGIVAAKGTAKAHELMRLAGDDERLPPTAREALGYIVAQIHDIESRLKIFEQRILSLAKEDEVCRRLMTVQSIGPYIATAIAATVGDPRNFASGRHFAAWLGLTPKQHSTGGKEKLGGISKRGDSYIRRLLIHGARATVARVRSGQMKSAWLSGLLSRRHFNVATVALANKTARVAWAVMSAEQTYRRAA

SEQ ID NO: 122185 - protein, 408 aa, unidentified
MEVLYPRCAGLDLGKDALVACVRIHGREVQQECRTFGMTTRELLALSGWLTGYGITPVAMEATGTYWKAVWHLLEPAFALVLANAAHVKGVPGRKSDVNDAMWIADLLAHGLIRGSFVPPEPIQDVRDLTRTRKQLVREIAQHTQRIQKTLDIANLKITGLISDVLGVTGRSILRALIAGETDPVRLADLARGTLKAKRAALIEALTGRVTAHHRRLLKLHLHLIEQLEAAVAEIDQQLGETLAPFREAVTRLDGVPGINTIAAQAILGEIGLDMTRFPTHEHLVSWACLCRRLDDSAGKRKSTRTRKGAGWLKTVLVQCAWAAVRTKDSYLRAQFLRLRARRGPQKAIVAVAASILTAIYYIVRDGVEYRDLGGRYFETLDQAQITKRLVQRLERLGYRVELQHVAA

SEQ ID NO: 122186 - protein, 336 aa, unidentified
MVQIYGIDLGMSSFDVSFLSESGGVRHLSGVKNTVHGISKFLLSLPSSAVLCAEHTGVYGDLLLRLCTLNRICLCFVPGYQIKHSLGLQRGKSDPLDACRIREYAERFYDLLRPCFYPGEEMSELQELYRTRSLLVESRKRLDTLNIGDNCKSSVSLAADHARRAVLAELNTQISGLDHEIEALIQNSSEFSRNYQILTSIVGVGPVTSCELIIKTENFRKLDTAKKCAAYAGIAPYPKESGKMKCGHKISPMGDKQLKTLLFLCARSAKEHNKEIRLYFLKKHKVEKKHFFVAMNNIANKLLRLIYSLIQKQQTYDRDYIQRDPRCVVISDTNKC

SEQ ID NO: 122187 - protein, 358 aa, unidentified
MIVIGADTHKATHALAAVDAGTGRARGTREIDADGSGHLQAVRWARGVDEERVWAIEDCRAVSRRLEQALLAAGERVVRVPPHRMGASRKGERERGKSDEIDALAIARAVVKEGVARFPCAYLNEQATEIRLLFDHRADLVAERTRIVNRLRWHLLELCPDLERSLNRGSLGNRRTLDRVGRSLRMLPADARVRVAREQVLGLRGLNRQIDALQDELVALVAAHRPRLLAELGCGALTAAILIGRTAGNEHFRSDASFALQSGTAPIPCSSGRRIQHRLNRGGDRQLNHALHVIAITRAQRDPATKEYLARKQAEGKTSKGALRCLKRHLARRFYQLLSEPSNDGSTPVEREHPEAPK

SEQ ID NO: 122188 - protein, 365 aa, unidentified
MTKSISRKSTQRSEQLGTWWDRVSTIGIDLGDRSSHCCGIDDEANIVAEFRVATDATSFEEAFRGLARKTIAIETGAHSPWVSRLLESLGHEVIVANSRKLRFIYENRRKDDRVDARSLARVARLDRTLLEEIRHRREGAQVDLELVRARDVLVTTRTRLVNHVRGVVKSFGKRLPACDPSALPRKATTAIPPVLLEALTPLLDMIESLSDQIRLYDRAVEHLATIEHPEVAKLRQVSGVGALTGLAFALTLDDPHRFRQSRSVGAWLGLVPAKDDSGERRPQMRISKEGDHYCRRLLVGSAQYILGPFGPDCDLRRHGLAIAARGGKNSKKRAAVAVARKLAVLLHKLWVSDAVYEPLYNKIVA

SEQ ID NO: 122189 - protein, 342 aa, unidentified
MQITTIGLDIAKNVFQIHGIDAKEKVVVRKQLRRSQVIAFFTALPPCLIGMEACATAHYWARELRKLGHEVRLMPAKDVKAYLKRNKNDAADAEAICEAVRRPTMRFVQIKSAEQQGQLMQHRTRDVLIRQRTQIINAMRAHLAELGIVAAQGEAGVNELRAIVADDRDERLPIDARASVIVLAAQLEALQTLIGSIEKRIKMQHRSNEASQRVETIPGIGVLGATAIVTTVADPMIFRSGRDFAAWIGLVPRQDSTGGKQKLGPISKQGDRYLRRILVVGAIAVLRRARENPGKYPWLTQLLTRRPFKVVAVALANKMARTAWALMAHGGTYRAPELAEAA

SEQ ID NO: 122190 - protein, 344 aa, unidentified
MDHFAGLDVSVKETSICIVDDTGRIMKEVKVASEPQALLKVLGNPAYRFKRIGLEAGPLSQWLFSGLAEAGLPVVCVETRHMQAVLKAQINKTDRNDARGIAQMIRVGLYRPVHVKTLRSQKLRMLLTHRKLLQSKAIAIENDLRGTLRNFGLKVGMVGKVRFEARIQELVENIPDLAVLVEPLLIVRRVLREQIVILHRRLLAIVREDEVCRRLMTTPGVGPVVALTYRATVDVPARFRKSKSVGAVFGLTCSRYQSGEIDWSGKISRCGDEMMRTMLYEAAQSMMHSKKWSWLKAWAMQIARRRGMKKAIVALARRLAVIMHRIWVDGTEFRWTREQAAAAA

SEQ ID NO: 122191 - protein, 510 aa, unidentified
MLSKVMHHRGKHSGQGTRPKVVNNFAAGYSVSGEQLATAETRLVVPHPARVTRRSPTPPTAPGPSAKRTPPHEGSNIRSRPSQAPAPLRAARIMNTNWNEQPYFAALDWAKDHHDVVVVDRVGTIVADFHFEHTAKGWEEFGQKMQPFGKCPLTIETSAGMAVDQLLQRDYPLYPINPLAAKEYRKRKAPSGNKTDRHDAWSLADALRLDGHTWRQLLAQDEATATLRLLCRDEIALIENRTALVNQLQAALVEYYPLALESFEDWAKPPAWAFVKAFPTPAALSAAGKRKWQSFLHARKLWRPETATERLERWACGQQLNASPAVVRAKSLLALSLVNVLESLQRQIQQYRSRITEAFTQHPDQDIFGSLPGAKETLAPRLLSLIGSRREVFPEADSLLCQAGVSPVAYQSGKLRKAHIRFVCDHFLRHTVHLWADASRKTCAWAQAYYQAKRDNGHNHASALRCLGKRWLKLLWRMWQDHTAYDENKHLNALKQHGSFVWGTLQAEAP

SEQ ID NO: 122192 - protein, 346 aa, unidentified
MNITTVGVDLAKLVFQVHGVDARGKVGLRKQLKRHQIVAFFTQMAPCLVGMEACGGAHFWARKLTELGHTVKLIAPQFVKPYVKTNKNDAADAEAICEAVGRPNMRFVPIKNTEQQALLGLHRARKGFVIERTAQANQIRGLLSEFGLVMPVGIRSIERKLPEFLENAENDLSVASRALFARLFEHFRALDRQVEELEREINAWHREDTASQRLQAIPGIGPLTASALVASVGDAKVFHNGRQFAAWLGLVPRQSSSGGKTNLLGISKRGDTYLRTMLIHGARSVLLHLKSHPDQAEGWLARLANRRNPNIAAVALANKNARTVWALLAHGRDYQAGYRSVNRIAA

SEQ ID NO: 122193 - protein, 394 aa, unidentified
MILVGIDIGKNKHTFSIIDKNSGEILLSPSDFSNNLKGFLFLIPKLSSYTKSELLIGMEDTGHYHFALLKYLLDRRYTVALINPTTTDLTRKLQGGITKNDPLDSLTICDVISSNHRNKPYRVTTLNRFDLYEQKQLTRHHHNLKEELNTYKNRLQKCIDIVFPEFNSLFHSKYGIVYMNILKAFSSAKAIANADIRSIRKCFEFKGQGKRISLSAEQLKLTAKSSIGIPSVAEEIQIRHLVSQIELLEKQLSEIDKRIEEFSLKNNSPILTIPGISHFSGTSIISELGEICNYTKASQIIKFAGVAPYHYESSQFTAQHTAITKKGSKYLRKTLYQIILPVISNNEVFYAYYTKKLNEGKCHRCAQGHCIRKLLRVIYHLLSTRQPFNPKLLV

SEQ ID NO: 122194 - protein, 480 aa, unidentified
MNVKATRTKKQVNVENQEIKHLSKEELGIKIEVIKKELRSYTWRDLETNGKFAKNDKLSFITDDMLIAGCDIGSETHYIRAIDVRGRELSSGAFEFSNTSEGFANAKAWVLALATKNDKKQIVLGLEPTGHYWFALAAWMVSNGISVVQVNPYAVKQSKEIEDNSQLKDDRKDPKLIANLVKDGNYGMPYLPEKVYADMRRLSMFRDQLTEDRIRNINRLHRELKIYFPEYMDAFGKIDGAFTLEVLKISVIPSDITALGAEGIKNIWHNEKLRGRGYSRANEIVSYAEKSVGLTDGTDAGREAVKWYAEQILKLDEQLAVVESTLHEKCREIPYAENILEIKGAGENILAGILAEMGDISRFDDVKEIQKLSGMGLVACSSGKHKGQTKISHRGRKRLRYWLLQAAKSAVSHADEFKQLHEYYTTRTNNPLKKMQSLVVIACKILRVIYTILKTGTTYDPQKLLEDIRRPTASQAPMVA

SEQ ID NO: 122195 - protein, 348 aa, unidentified
MNLKRIGLDTSKAVFTLHGVGQDEKAVLRRDMRRAEMEAFFAKLPPTHVALEACGGSHHWGRRLAAMGHTVQLIPPQYVKPFVRRGKNDRNDAEAISEAAARPDMPSVPVKSAEQQAEAIVLSARELLVRQRTQLVNAVRGHAAEFGIIAAKTISQLPGLLETVAAAETVPATAKQMLAFLGEQVAQLDERIAELERRMKQQHKANPVSQLLAEVPGIGPVSALTLALTIDPGRFQSGRHFAAWLGLVPKQHSTGGRQRLGGISRAGNERLRQLLVLGAMAVIRFAKPGSKSASAWLLALLERKPRKVAAVALANKMARIVWAMMATGEAYRGSKRVATPAAGAAAVA

SEQ ID NO: 122196 - protein, 422 aa, unidentified
MIGADPHKHSVTIEVVDERERILHKGRYSTDTDGYRQMLAAARRYPRRRWAVEGCNGIGRHVAQRLVADGESVVDVPAKLAARARVFDTGNGRKSDPADAHSVAVVALRTRHLTVVRADDELVALRLLVDRRDELGRTRTQTINRLHRLLLELIPGGAKRFLSAAQAQALLGSVCATDVAGRVRHQLATELLAEIVVLDAKMKASDKTLRQAVTATGTGLLDLYGIGTASAARILGDVADVARFGTRARFASWNGTAPLDASSGAQERHRLSRAGNRRINRALHIMAIVQIRHDTEGRAYFRRRVAAGKTKMEALRALKRRLSDVVYRQLVADMKKASPAGHPEATTTSSAADPTPTVSSSDQSQPGLATEPTTARHSRRPTAFRRSTRIRTAAPGPDPRRPAPADTHDGPGPRQHPTPGHS

SEQ ID NO: 122197 - protein, 330 aa, unidentified
MKNYDEVVGIDVSKKTIDAYCHQTQIHKEFVNDLLGYKSLIKWVLKVTKVSSVFYCFENTGYYSLKLALYLSSQDLVYVEESPLKIKRSSGVVKEKTDKLDAKLIARYAWLYREELTPSSVKSTSHLELGRLLALRDQIVRNNAGLKGTLKEMKVLLSSPTTDFGCISLKRSIDYLSKQVKGIETRIKEIISEDESMDKNYELLTSLKGFGLVVACQLIYHTGNFTRFESWRAFSSYCGTAPFEHRSGTSIYRRKQCHYLGDRKMKSLLSMASVSAIQHDIELRLYYKRKLAEGKDKMLAINNVRNKLIARAFAVVKRGTPYVVLQQHAA

SEQ ID NO: 122198 - protein, 320 aa, unidentified
MTYIGIDVSKDSFVAAYPTKGDYKTQKFPNTTGGVRKFIQSLPAECHCVMEATGNYSMLLLYLLQQANITVSMENPQKIKHFARAMLSTTKTDEIDAKLITMYGEKMEPTPYKIPSDSIVRLKQKRTVLRQLKKQLTMMINLQHSLSVLPKQDPTAKVATEQTIKFLRKQISKLEEEITHLSNKEFKRQMELLTSIKGIGENIASALIMATGGFTYFSSAKQISRFLGLCPTYQQSGTSINFKGHINRNGDTHLRSQLYIVAVASIKCNTACRDTFVRLRERGKSGKAAIIAVANKLIRIAFAVVTNNRPYIDGYVSTLA

SEQ ID NO: 122199 - protein, 313 aa, unidentified
MSQNNPTIYAGLDVAKDSLALEFQGRTYTLNNDPRGHARLVRILGGQPKVHVILEATGGYEQPAVRALHGASITLSVLEPSRVRAFARAKGLRAKTDPIDAAVLRAFGEALAPRPSTAPTAQQQQMGELVTRRRQLTESATCEANRAAHYSDPMARRQAAVLLRLLRLQIAQCEKAIASLIAEDQTMALRAARLQEVPGVGPITAATLMAEMPELGDLRDESVAALAGVAPYNRDSGPFAGSRRIAGGRTSVRCALYMAALSASRHDPILKAFHQRLIANGKKPRVALTAVMRKLIVLLNRLLKNPGFQLQAA

SEQ ID NO: 122200 - protein, 362 aa, unidentified
MVYLGVDLHRKRSVVTALAEDGTVLLSRRIASRPDDFRHVFGELEPRTLSVTFEATYGWSWFADLLADAGIEAHMAHPLATKAIAAGRVKNDSVDARTLAHLLRTHLLPEAWIAPPAVRERRRLARTRTSLVRIRSRLQCQVHAILADHCVQPPVDSIFGAAGRRFLQTVELLAVDRGRVDAALRLMDAVTAEVIALDKELRAAFTCDERIRRLTAIPGIGFLSAAVVLAEIGEVSRFASPDQLASWAGLTPTERSSDEHTQRGHISKQGSRWLRWVMVEAASRRFRDPRYVASKSASRAAAARRSPASRWRAGCSRSPSMRCGTRRAAGPSPYAHAHHGRSAQARSLGVMASPSGTAARTD

SEQ ID NO: 122201 - protein, 449 aa, unidentified
MAQRKRPTTQSAITLTHPNAAGIDIGSASHFVAVPPDRDDEPVREFASFTGELNRLVDWLDACRVDTVAMESTGVYWIPLYELLESRGFTVLLVNARHVKNVSGRKSDVLDCQWLQQLMSFGLLHGAFRPAEQVCVLRCLNRQRMMLLRNQGRLVQHMQKALAQMNIQLANVISDVVGQTGQRILRAILAGERNGMALAKLKSARIHASEDEIAKSLQGSWRAEHLFALKQALDAFDFCATQLAECDAQIQAQLQALHVREDEPAAGSKRARGRARNAPKFDLRTQLFQMCGVDLTRINGIDVTTALVVVSEVGADMSKFPSDKHFASWLGLCPGTRITGGKVMSGKTKRCANRAAQALRLAAASLRSSQSALGAYYRRMCARMDKPKAVTAAAHKLARLIYAMLTRGQEYTDQGQEYFEERYRQRVLHNLTQKAKVMGMQLVPCDNAA

SEQ ID NO: 122202 - protein, 349 aa, unidentified
MRIIGCDFHPGYQQIAMWDKASGEMLECSLSHERKEEVRAFYAGLQGPVRVGIEASGQSQWFERLLVELGHEVWIGDAAKIRASCERKQKTDRRDAELLVKLLDENRFPQIWVPTPEERDARQLLWHRAKLVRMRSQVKNQLQALALNQGVQRKRKLWSATGRKQLENLPLLPWASRRRTELLALHDQLDASIGELDLAVIEQAHKRPAVRRLMTHPGVGPITALAFVLTLGPAGRFRRGKQVASYFGLIPAEHSSGGGGQRLGHISKQGSSFLRGLLVEAVQSAVRHEPGMRREYQRLAQRKCRALAKVAMARKLAVRLYWMLRTEMDYAQLLQGSHAGQLESFRGRS

SEQ ID NO: 122203 - protein, 391 aa, unidentified
MLKYSVGLDISAKTIHACISSIDAGQKVTVKSSCKIDNTKSGFKQLDTWIAKHHQQKDIPLVTAMEATGVYYENCALHLFSGGYAVSIILPNKAKKWMQAEGLKSKNDKIDAAGLSKMAAEKALELWEPASEYYYQLRALTRQHQALQEHRTAVSNQLHAELSGMYQNKQVMKQLKQLIALIDKQLDELSTAIEQHLSSDLQVAGKVEKICKIKGLGKLTVAVILAETNGFALFKNAPQLVSYAGYDVKEDESGTHTGKTRISKQGNSRIRRALHMPALCVVTHKQKPFVGLFERTFERHRIKMKSYVAVQKKLLVLIYALWKQDADFDENFKNKHTKEQEQELSLGSASAEAGIDNMGGVQKNSPTKDGLHKVNTPSELSQYASSRLPQS

SEQ ID NO: 122204 - protein, 336 aa, unidentified
MIHLGVDLHRTFCYVTALDANGKVLHQGRINNEWAAIERYLAGWPEPPRVVFEACSFWPAFVEAVEGRVAELYMVHPQRVKAIASAKLKNDRVDSLTLAHLLRADLLPLAWLADRETRQRRTRTRARIELGRMRTRLKNRMHALLHQQGLRCPYSDVFGKQGRAWLAAAALGAAEGEAMQVYLTLLDSCEEQIRKSQNRLIKENRGEDRVRWLSSIPGIGEYGANIILAEIGDITRFDRKALFSFAGLVPRVRESADKSWYGPITRAGSSRLRWIMVEAAVTAVRSSPAARAFFERLCRRKPRHVARVALARKLLGAVYALLRDGVCFDEQVFATM

SEQ ID NO: 122205 - protein, 400 aa, unidentified
MSVGYEPKKEAESSRRSYIKVIAIIRIYARKVNRPEETAMEKHSTQTRKVQVIHIGIDVHKSSWRVTEMRDGVALKTYSASPSAAELGARLRREYPGAEYRSVYEAGFCGFHVHRELEAQGIRNIVINAADVPTSGKERANKNDTVDSRKLARELSNGSLEPIYVPSPANLLLRGVVRCETQTVKDVTREINRMKGILAQRGEEPPRINGGALKLRLEQAVREGDEEMALAVGRLMTRRSERARAVQAERRTVEALGLWPLLHRLMTVPGVGFRTAVVVLSEIWDMSRFPTENHLVSFAGLAPRLTGSGEHERTGGIGHRKHRLLQGILIEAAWTAGRKDAELHDKYWALAMRKTARKAVVAVARRLLLRIRAVWLHGADYVPKQASDKAGGTGNDGHGE

SEQ ID NO: 122206 - protein, 400 aa, unidentified
MYKYFLGIDISKDSFDFCFTDETEKVLYKDHYQMDITDFTKLSNYLSSFSKDEILIIMEATGIYHLNLLSYLLEQGLNVSAVNPLFIHAFTKSMTIRKTKTDAKDAHIISLFAKRNYATIRLSSATDIETIKPIVREKEKLTNQISAIKTDIKSLVNQLFPEILKNTNIFLKSSLNLLLQAPSKRIIRNLKEKKIASYLSQDSTRGAKPKLSAREILLLAKSSIGINNQSLEKILVSKIKQLEFLQLQLDEYNETIEKFVDEHYNNDIDLLTSIGGVGKPSAASFLTELGDINNFATHKQLIAFIGTDPAIYQSGTSVNVKGSISKRGNSHLRRSIWHMARSATVWNPILKEYYDKKRSEGKTFKQSVIAVANKLIRIIFSMLKNNTKFSANYQCKGAIA

SEQ ID NO: 122207 - protein, 345 aa, unidentified
MKIVGCDLHTRYQQIAMLDDETGELTERRLEHASGEAKEFYTKLSGAVRVGIEATGHTRWFERLLAELGHELWVGDAARIRAAEVRKQKTDARDAALLLELLRTGRFPRLWRPTGAERDLRHLLWHRQKLVWMRNAVGNQLHALAMGEGLCRKKQLFTKKGRGELQALKLDRWASRRRQELLQMIDPIDASLKQFDEAVNQQAAGTPEAVRLMTHPGVGPVTSLAFVLLVGPVSRFQRSKQLVSYLGLNPREHSSGGRQRLGAISKQGNPMLRGLLVEAGHTAARLDPELRQDYQRLRLRRGGSVAKVAIARKLAVRMYWMLRRQVNYTQLVRMQGSSRATLVQQ

SEQ ID NO: 122208 - protein, 371 aa, unidentified
MGWSAPSSRSIIWAVTTKEVAISPRNAPRPAAVYGVDIGKNIFHVVGLDSDGKPVQRVRFRRDTLMKFFERAAPAIVGMESCAGSQWIARRLQALGHKVRLIPAQFVKPYVKSNKSDIIDAEAIAEAATRPTMRFAAIKSEEQADLQAVHRVRDQMIGTRTRLINQMRAFCLEYGIALRQGAGLFKLDLPLVLDDLSNDLSPAMRKLLVDLFADLRQLEQRINDVTREIAAIADREDVARRLMTIPGIGALGATALLAAVGTGCQFQKARDLAAWLGLVPREYSTGGKQKLHGISKRGNRYVRKLLVHGARSCFRHLDRNRDRLGSWLDGLQSRMHPNKTVVALAAKMARIVWVVLTKPGALYERRDPAFA

SEQ ID NO: 122209 - protein, 255 aa, unidentified
MEQFSFFTGIDVSKLWLDIAVFKPGYGIVYQTRVNNNTKEIRSFLKGLKKQLKAEITGNLFCMEHTGKYGHAFLNASILEQAKVWVELPIQIKRSQGLVRGKTDKWDAIRIAQYAYRFVDKAVFWMPANKIIQDIKELQVKRNRLVKAHSQLSQENKNDPLFKKPLLALKLGIEAIELKMEQLIEQNELANHQYELLKTVPGIGKQTAMALIIVTNGFTRLTDSRKLSCYSGLAPFPYQSGSSVKGRTKVSKMGG

SEQ ID NO: 122210 - protein, 388 aa, unidentified
MEARLVDTTSTARNDAPARCLIAIELSKASWVVGVQTPLSNKTSQYRLTAGDWKSLLKLIERIRRQVGGELGRPVEMLSCYEAGYDGFWLHRLLEAHGVRNHVLDPASLLVNRRARRAKTDRIDVERMLRALGRYLRGEPDACSVVRVPSVEQEDARRLHRERHRLIRERVQHVNRIKGLCATQGIYDYEPLRSDRKAQLEGLRTGDGRALPARLKAEIIRELHRLELVLKMVAEIEAERDAIVTEAAPQHLNAGKIKALANLKSIGPEFATTLVGEVFYRSFDNRRQVGSYPGLAPSPFSSGSTDRDQGISKAGNPKARSTMIELAWMWLRYQPDSTLSIAFRQRVGDRKGRVRRIAIVALARKLLVALWRYLETGLVPAGAVFKTR

SEQ ID NO: 122211 - protein, 310 aa, unidentified
MDKFVGIDISKDSLDLCIEPDGEVLHLAYDDKGIAQVVKRLAQGAPTLIVMEATGGLEMRLASELAAKGLPVAVINPRQARDFAKATGQLAKTDLVDAAVLAAFARAIRPAVRPIKDVDTRELDDLVTRRRQLIDMRVQETLRLGTASTLQRKSVTAHIAWLDKRIVKLDDDLSKRLRASDAWRTKDDLLQGIPGVGAITSLTMLAKCPELGQMNRREIAALVGVAPRANDSGKHRGKRFVWGGRADVRAVLYMATVSAIRCNNDIKAFAARLKQVGKPAKVILVACMRKLLTIMNAMVKNNAQWAPKTA

SEQ ID NO: 122212 - protein, 354 aa, unidentified
MKYFAGLDVSLEETAICVVDEVGHMIKEARAASEPDALHVTLASFNLSFERVGLEACSLTAWLHGELRSAGWPAICIESRHAKAAMGAMPNKTDRNDAHAIAQIMRTGWFKAVHVKTPICRSWRSLLVARRAVLNEMRTIENVVRAILRETGLKLGTPARKDFIVRARELIAGEQTLASMIEPLLEILGTMLREFARLTKQVVTIVRDEPICRRLMSAPGVGPLTALAFRATIDRPERFRKSRDVGAHLGLTPRRYQSGETDIQGHVSRCGDELARTALYEAAHSLLIRSKKWSSLRAWGMKIAKHRGMARARVAVARKLATILHRMWIDNAEFRFGQEHNIAPTVKAIAGAAA

SEQ ID NO: 122213 - protein, 354 aa, unidentified
MKILALDLGKFKSVACIYVAGSDEQTFETIRTEYLEVFRLVEEVKPDRVVIEISPLAGWIGDLIREQGIELQVANPNGGAWSWRRVKRKTDRLDALKLAQMSAMNQLPQVYLPEPKVREWRAFIGYRQSLVGRRTRIKNRIRAILDRLGIARLPASKSGWTHKALAELREKARPLEKCRRGEYWRGELWEELEQLDHVQATLVRVEAKLDGLAQKDKRVRRLRTIPGVGPRLAEMVVAVLDDPHRFRRGKQVGAYLGLTPRQYQSGTMDRQGRISGQGHKHLRSMLVEVAWLGLRYNPWMREVYQRVYRGSPARKKIAIVAVARRLLIRCWAMLRDETRWRGASPGNQLAARVA

SEQ ID NO: 122214 - protein, 368 aa, unidentified
MFKVGGKSKSVLSGRGTVPKLRVTRRRAMSKVSEAVRSAVFAGIDVSAATLAVAVQQEGRDGFRQKEFANSGSGHTQLIAWLLQCGDRVRVSLEATGTYSLDVALALDEAEGIEVAVLNPKTVNRFAQTLRRSKTDAADAAALAEYSRRMEFVAWQRPSRSGLELRTLSRHIQTLTEDHTRWGNRLHAAQASRTTPRCVLDDLKRGRAAIAKRILKLRKQAVARVAEDKDLARRFQQLNGIKGIGETSAVQLLGELAGLDPEMTVRQWVAHSGLDPVHQVSGSSVRKQSRISRHGNRHLRRALYIPALVGARHDPHMRAFYELLQTRHKTKLQALIAVARKLLHAIFGIFKTGTPYDGAKLFPVLKTA

SEQ ID NO: 122215 - protein, 422 aa, unidentified
MAKIQTKKLKFVNDKTLIATVDIGKTLNMGYARSPDRSEVKPFEFANNRAGFDKFWNSLEEARKAKNLDNIVVGFESTGAYGEPLQHFLKNKPVQLVQVNPMHTKRVKELQGNSPNKTDSKDPKVIADIIELGHALTVVIPEGAAAELRRLTQARERTMKRRTALYNQLQDLIFVSFPEFLQVVKNVKAKTARHLLQSCPDPQDIIMLGLDALGTMIKRVSRGRLGTAKARDLFEAARASAGITEGRFSVALEIQTTLEAVIACDDFIVRLEEEMSRHLEEISYSRLLLSMKGLGRITVAGLIGEVGDFNSFDTQRELLKHAGFDLFEISSGKLRGSRRISKRGRPLLRKLLFFAALNTVRKGGVMHAHYQRHLKKGMKKIKALVAIARKLLGIIFALVRTKHEYQEDYQKIQAAATIPMAA

SEQ ID NO: 122216 - protein, 426 aa, unidentified
MTNSLFIGVDVSLQSNQICVVNFDQHKFFNLKFPNTPDGCEEAINRIKDIYDKFYFDKIIVVCEATGMYSFHLACYFSSHEYLNNFNTEVYQINAHDFAKYKDSFPDVEKTDPSDAYILADFARVGRTKQLHPFRGSQHIALQRLTRQRYHISKNLVKEKLYVMNNIYLSFSGLIIANKKNKPFSNMFGATSCAIFDNFDSPDQIAETPVDELLDLISKVGKNRTKNPNEKIDLLNKAIRSSYRLDQTAYNGINIAVASSLSTIRFLENELKQIDKAILDTVSGLNSNAYNSLISIRGIGKVYAAGILAEIGDINYFKHNSNLAKYAGLYWNRTQSGKFEKEDKKFSQHANKYLRYYLIEATASCVRMNFPFIKNFYDSKFKEVTKHQHKRALVLSARKLVRLIFGLLRKNQYYSPIDSNTQSLIN

SEQ ID NO: 122217 - protein, 355 aa, unidentified
MSQEKYIGMDVHQATISVAVMDAHGKLIMECLLETKAATIVEFIRGLHGTLSLTFEEGTSAAWLHDLLKPHVSRLVVCDPRKNALLKDGNKSDRIDARKLAELLRVNQLHPVYHGEHGVRTLKELGRSYLTITQDVTRVMNRIKALYRSWAIPCAGATVYSPCHRAEWLAKIAEPGVRVRAERLYQQLDLLQPVRLEARRELLAESHKHSAVKLLRQIPSIGPIRSALLVALLQTPDRFRTKRQLWAYSGFAVQTHDSGEYRSVRGKLQRNRERMTVRGLNDNHNRDLKNLFKGAAISASTRPGPLRDFYVARVEKGMRPTMARLTLARKMAAISLTVWKKGVDFDPQQLQRQAA

SEQ ID NO: 122218 - protein, 398 aa, unidentified
MTESSDYESVQVFIGVDVGKDTHHAVAINRSGKRLFDKALPNDENKLRSLISDLKQHGQILLVVDQPAAIGALPVAVARSEGVLVGYLPGLAMRRIADLHAGEAKTDARDAAIIAEAARTLPHALRTLKLADEQIAELSMLCGFDDDLAAQTTQTSNRIRGLLTQIHPALERVLGSRLDHPAVLDLLQRYPSPEKLASLGEKKLAAQLCKLAPRLGKRLAADIAQALAEQTVVVPGTNAAAVVLPRLALQLITLRKQRDEVALEVEQRVLAHPLYPVLTSMPGVGVRTAARLLTEVACRAFASVAHLAAYAGLAPVTRRSGSSIRGEHPSRRGNKALKRALFLSAFAALRDPLSRAYYTRKMSQGKRHNQALIALARRRCDVLFAMMRDGSFYTPQAS

SEQ ID NO: 122219 - protein, 319 aa, unidentified
MSDATAVVVGIDVSKSHVDVAAVEGTLEPGRYANDADGLQALAEALKAISPSLVILEPSGGYEAELVCVLQAAGFAVVLVNPKQARDFARSMGERAKTDQIDAQMLARFGSVLRLRPDLEALLKPKLPVEQQDLAAMVNRRRQLIAMLSAERTRLAMARAAVRPSIEAMIKAIRKQLDNVDTEMAANLKRHHAAQAKLLQSAAGIGPVACAWLIATLPELGKLNRREIAALVGVAPYPRESGKIRGRRAIAAGRFELRRVLYMATLTATRYNPAIRAFYTRLIAAGKPHKVAMVACVRKFVTILNAMARNSSPFQPTSV

SEQ ID NO: 122220 - protein, 343 aa, unidentified
MQTVATVGLDIAKSVFQVHCVDAAGQVVFRRQLKRRYVLAFFQKLPRCLIGIEACASSHYWSRELQALGHNVRLMPAAYVKPYVKRQKNDATDAEAICEAVTRANMRFVETKTPEQQSCLMLHRTRHLLIRQQTAVINAIRAHLAEFGIVAPLGRLGVEELLGVVADPKDERVPDVARACLAALGSQLRVLKTQILEFDRMINAWHRSNETSKRLDEIPGVGPALATALVASVANPRVFRSGRDFSAWIGLVPRQHSSGGKDKLGSISKQGDRYLRGLFTAGALAVIRYAKIHGTKHRPWLAALLARRPTKIAAIALANKIARMAWAMMAKGERYKEPVALAA

SEQ ID NO: 122221 - protein, 430 aa, unidentified
MKSNTQNAKIEAITEKTLVLGIDVGSETHYARAFDYRGIEYSKKPFKFSNTEAGFVTFKEWILDIKERHEKDKVVLGMEPTGHYWFNLGKFLQDNEMKPVLVNPHHVKKSKELDDNHPTKNDRKDPKVIAGLVREGRYMIPYLPDGVYADLRTASNIRFQLQAELTRIQNRINRWFNIYFPEYKTVYGKPDAKSGILILKEAPLPEDILTLGIDGVNQIWRDAKLRAVGKARAKTLIEAAEHSVGSKEGAVSARMEIRMLLEDYESRNIRLQEVMGLIEGLVNQIPMAEKLLEIKGVGIKTVSGFLAEVGDIRRFNDPKELQKLAGLALVENSSGKHKGKTTISRRGRKRLRYLLFEVAMSLVAKNPEFRELHNYYTTRRLNPLKKMQSLMAIAAKLLRVFYAILTKGVGYDPKKMVNDIRRPAAYAQAA

SEQ ID NO: 122222 - protein, 380 aa, unidentified
MDSQQFEVIRLKCAGLDVHKKSVVAAVCTSDPVTLTASYKTKVFHTTNSDITALRDWLLAQDCRDVCMESTGKYWIPIFNILEPHMHVILTHPKYVKAIKGKKTDKRDAKWIANLFRFDIVKASFIPPSDIRALRELSRYRLKLSYMRTAEKNRYQNSMTISRIRIDCVLTDPFGLSATRIMDYLLSDEPFDEAKCRSLIDRRVKASPDEVMDAVHGYHILEEQKFKMTHAKAHMDFINKSIDEIETELFLRSRQYDAHIRRIATVTGITELSALFILSETGADMSVFESDRHLCSWAGLTPANNESANKKKSTKCSKAGQYLKPLLIQCALAAVKSKKEPYFAAKYQRIAKRRGKKKAIIAIARTVSYTHLTLPTILRV

SEQ ID NO: 122223 - protein, 404 aa, unidentified
MASPDDIDVWIGLDIGKTGHAAWVLDGEGAELFARAVANDEADLDGLLDRAAEHGTAALVVDQPGSLARLVLAVAGRRGTPVAYVPGLVMRRAADLYPGEAKTDRRDAYVLAETARTRRRQVHWLDASDDELLEQLRVLNGYDADLAADATRLSNRLRDALTSVSPALERVLGPRLQQRGVRDLLARYGAPQALSAAGRGRIERTLRKRSPRSATALAAAVLEALDAQTVVVPAEATTGRVIAELAAELERTLQRRARLEGELAKLFEAHPFGRILGTLPGVGPRTGSRILAEIGDGAAFADGSRLASYAGLAPVTRQSGSSLHGESRSRRGNRRLKNAMFLSAFASLRDPASRAFYDRKRAEGKKHNAAIICLARRRCDVILAMLHRRAPYRYRAPREMPAAA

SEQ ID NO: 122224 - protein, 401 aa, unidentified
MVSDFRKGRYNLMKIYVGIDIAKLNHFAAAISSDGEIIIEPFKFTNDADGFQLLVSKLESFDKNSLIIGLESTAHYGDNLVRYLVTELYQVCVLNPIKTCQMRKNNVRKTKTDKVDTYVIAKTLMMQDNLRFISFFDLDMMDLKALGRFRQKTIKQRTRLKIQLTTYVDQVFPEIQYFFKSGLHQHAVYALLKEAPSPKEIASMHMTHLANLLKVNSHGHFTKEQAKELRVLAQKSVGANDSAISIQITQTIQQIELLDSQLEKIEAEMTDIMKFNDSVIMTIPGIGYINGGMILGEIGDIHRFSNPNKLLAFAGLDPSVYQSGNFQAKTTRMSKRGSRVLRYALVNAAWNVVRNNATFKAYYDAKRAEGRSHYNALGHCAGKLVRVIWKMLTDEVEFNLE

SEQ ID NO: 122225 - protein, 427 aa, unidentified
MKKADLLSTLFVGIDISSRENVVAVMDFESTKPIASFAVPNNEPGAEEMAKKISTFITPESGLKRLVIGLESTSFYGVHIANYLSTCRELMPFHTEVYCLNPKSIANYKKSYIGLSKNDYIDAFVIADFARVGRITTKPWRGCQYLALQRLTRHRLHLVKALTREKTYMLSNIFLKFSEFTMLDTEEQPFSNEFGATASAVLTEFLSTEEIVDMPMEKLVEFICEKGRNRFPDPQKTAKLLHTAASNSYRLDKCLYEPLTVAIASSFTMISTYNAEIKKVNQAIEKTIKGLNTNAFLSLQSIPGIGPVMAAGIMAEIGDITVFKSQESLAKYAGLVWRENQSGQFKADDTSMSKAGNSYLRYYLLEATSHIKLHCPEYREYYSKKYAEVKTHQHKRALALTARKATKLIFGLLAKNQLYSRSRVGQA

SEQ ID NO: 122226 - protein, 455 aa, unidentified
MAHKGKKTKPTPEDLPLVHPHAAGIDVGAEEHWVCVPADRDVQPIQKFSAFTCDLYRLTDWLTTCRITTVVMESTGVYWIPLFQILEARGFAVALVNARHVKNVPGRPKTDRFDCRWLQKLHSYGLLAPSFRPPEHICQLRSLLRHRDNLLQMMVKHIQHMQKALDQMNLHLHHVISDVTGVTGMRILRAIVAGERDPHTLAQYRDYRIKSSLETIAKALEGDYRSEHLFTLTQSLALYDFTQQQIADCDQEIERVLSTFEALVDPATHPLPPPTTTHRQPQRNEPAFDLRTHLYRITGVDLTQVPGLQAPTIHVILAEVGLNMHKWPTEKHFASWLGLCPDNQISGGKVLATGSRRVQNRASRALRMAAQSLRTSPSYLGAFFRRMRSKLGPAKATTATAHKLAKIIYHMLKEHTPYRERSAKDYLHKDQERKIQQLRKQAKALGFTLVPQTSP

SEQ ID NO: 122227 - protein, 323 aa, unidentified
MAKRITICAGIDTGKRKLDVALDGSSERLQVENTAEGHKTLMEWLWCHKVKRVGIEASGGYEQAVVAALRRERFVVVVFQPAQVRAYAVFHLQRAKNDKIDAALIATCTAAVKKIHPAPDPRLLPFAEHLTMIEQIGEDIAKLKNRLESCRSERIQKLWKEQIALLAKCKRAEFKALVAAIRKHHDLAARLDLIYSVGGSGLPTAVAVLVRMPEIGQISREQAAALAGLAPYDDDSGDQLGIRHIDGGRERLRRALYTAALPASFRWNPQLIALYNRLIAAGKGHKRALIACARKLLVIINAVVARATPWVAEPPKTATAPAT

SEQ ID NO: 122228 - protein, 389 aa, unidentified
MKKNSIAKLQVKLKSGTNQIRPLVAKQRLTVGLDLGDRSSRYCILDEAGEKVSEDKLPTSKAELESTFGKMPRCRIALEVGTHSPWVSRVLAAMGHEVIVANPHNVKLITKSVKKNDRIDAEHLARLARVDPKLLSPIRHRGEEAQADLAVIRARAELVETRTALINCARGMAKPMGKRLKQCDADQVKEGLADGLGAGLQEVIRPLLKCVEAMSKQIEVYDEKIKAIAKRYPEIELLTPVWGVGTLIALTYILTIEDAQRFEHSREVGPYLGLTRKRRDSGDSEPELGISKQGDALLRRYMVQSAQCVLRDGAPDTDLKVWGRAVQNAGRKTSQKKQKGSKRAKKKAVVAVARKLAVLLHRLWVTGEVYDPHYNRKAAAAAQRKNKAA

SEQ ID NO: 122229 - protein, 397 aa, unidentified
MYIVGIDIAKRKHEAAVIDGEGTVIIKPFSFTNNCSGYNRLLAMLAKAKLPLDEVSFAMEATGHYWLALFTRLQKEGFRVQVINPVQTNSIRNFYIRQAKTDPRDALLIAEVIRFGHFSESTLHPENIYELRELCRGRHAIVSMQADVKRKVVALLDQVFPEYETAFTNMFSDTSMAILQTCPTPKELSEMPLEELCHLIEVSSHKRFRMVKAQELQELARSSFGFAMAGDVFSTMIRLYAKHLVFLKQQVQEMDRKIAEIMDTLDTPITTITGIGPTLGAYILSEIGDINRFSSSAKLAAYAGIDPTMRQSGEYNGVRNRMSKRGSPYLRHAIWLAASSAVLHDPALKLYFQKKRDEGKPYMASVGHACRKMVSIIYAVMRDNKAYTPYIPNEISA

SEQ ID NO: 122230 - protein, 455 aa, unidentified
MAKKGKKTKPIPDNMLIIHPHAAGIDVGAEEHWVCVPADRDAQPVQKFSAFTCDLHRLADWLTACRITTVVMESTGVYWIPLFQILEARGFEVALVNARHVKNVPGRPKTDRFDCRWLQKLHTYGLLAPSFRPPEDICQLRSLLRHRENLIRMTVKHIQHMQKSLDQMNLHLHHVISDITGVTGMRIIRAIVAGERDPRTLAQYRDYRIKSSADTIAKALEGDYRTEHVFTLTQSLALYDFTQQQIAACDQEIERVLATLDSQVDPDAHPLPPPTTTHRQPQRNEPAFDLRTHLYRITGVDLTQVPGFQAPTIHIILAEVGLNMHKWPTDKHFASWLGLCPDNQISGGKVLATGSRRVQNRASRALRMAAQSLRTSPSYLGAFYRRMRSKLGPAKATTATAHKLAKILYHMLKEKTSYRERGAEYYPHRDQERKLKQLRKQATHLGFDLVPQASH

SEQ ID NO: 122231 - protein, 525 aa, unidentified
MIATTRRRSAASSPAFDHLGKPHGILSPRVRAVGPEHFGIVAVDCAKASSKWLLVDFYGKVLIAPTVLDHRRDAFDHAIAQIRQAMASHQLKDLVVVVERTGRYHQPVQRAFTATGLDVRVIHPMISRHFRHAAHPDEKTDDTDLEGIVQATCNGYGLVDPPWEPIYCQIQLWARYRRDLVQKSTQLCCQILEHLESCLPGYARCFDDVFKSGIALVIPGAYGTPQAIVEAGFPGLVELAGRQGVRVQKSTLIRILAWAQDAPSPDREAILHQRLLGDLNRDRITKEEYIQASERELVALLAQTPYVRLLALPGINVVLASELAGELGPIVHYATARVITGRAGLFPRRHQSGPVDYRRGLVCQANRRLRQVLLLAAETLCRCNNHFQVLSQRWFSHGKDPRDVYVRVAGRLSRITFQMVAGSAAFRHPACQEPPAVLEKLMEFHDEHEINLTTTRTNLQHAAAQLPGAEQAREREVWKAQRAEIRGKRGRGPKRLAAILPAVLKQLVGGELAGLIESKASGETP

SEQ ID NO: 122232 - protein, 322 aa, unidentified
MQGKTTSVRASDAVYVGIDVCKAWLDAYVHPTGQNFRVPNSKEGIRQLRKELADAKVALVVMEATGKLHRLAHRMLSQAGYAVAAVNPSRPREFAKAIGQLAKTDKIDARLLALYGAYLSPAATPVPAKTVAELQELVLARQAAKADETALKNRYGAAESAVLKRLLKRQLAAYERAEADLEAAIAALIEGDTALKSRYDILLSIKGVGPAVAATLVACLPELGLLPAAKAAALAGVAPFNDDSADSKGLRRIQGGRAHVRTALYMAAVSAARCNPDLKAFYARLRARGKEAKLALTAVMRKLVILASALIRENRKWTEKHA

SEQ ID NO: 122233 - protein, 403 aa, unidentified
METIIERCCGIDVHKKTIVACLIIGQSHEKPKETIKTFSTMTRDLLACRDWLVAEGCTQVAMESTGVYWKPVFNILEDRNVKNVPGRKTDVKDCHWIARLLRHGLIEGSFIPPKPIRELRDLTRYRQKLIDQRSSEINRLQKFLEDANIKLSSVVTDITGVSAQDMIQHLIQEDMTSQEMAQLAKGRLRNKIEQLERSLEGYLSDHHRLLLRLSLQMIAFHDEAIEKLNMEIDKRMEPHRELSQRLETIPGVKKKTIEILMAEIGSDMSRFPSQAHLASWAGVSPGNNESAGKRKSGRTTHGNKWLKKALVESAWAASKAKDSYLKARYQRLVSRRGKKRAALAVGHTILIIAYHIIKEQCVYLDAGADFFDRLNEQHLINRLTARINALGYKVDVEKLPMAA

SEQ ID NO: 122234 - protein, 427 aa, unidentified
MNTTTSNEFAALIGIDWASQRHALCLYDCATGKRESSILEHTPEAIAQWAQALQARFAGKKIALCLEQTRGPLIYALLEYPFFVPYPVNPATTARYRQAFKTSRAKDDPSDAQICLELLLHHREKLTPWLPEDAQTRELSCLLQHRRTAVDLRTLLSNMLRDALRAYYPQALELAGQDLFAPLGCQFLLKWPSLQELHKARKESVRKFYYAHNCRRLDVIEKRLHAIAHLTPLCRDRALIEPAIVQVKMLARQLLQLGAALKEYDAKIEHLFAQHGDALIWKSFPGAGPTLAPRLACAFGTQRSRYQSALAIQQYSGVAPVTEKSGKNQHWVHRRWGRPHFTHQSFFEYASQSVLHCGWAKVFIQDQLARGKTYPTAVRALAFKWQRIMFVCWRDHVPYDETTYLQSLTRRGSHLARKLNQELPKAA

SEQ ID NO: 122235 - protein, 439 aa, unidentified
MRIASSVPMPNEVPIENEIVAYVGLDWADQQHVICWQAAGSAQVQSAVVQQRPEELQAWVAELRQRFPQGLVAIALEQSRGAVIAALMHFDFLRLYPINPKSLARYREAFASSGAKDDPDDAGLLLELLVKHRDRLTPWVPDDALSRELALRVEHRRQLVNLQTKLIQQLRSHLKVYFPQALDWVGELDSLQACDFLQRWPTLAAVQKARPSQLEKFYHQHHCRRPQLIQQRLEQIRQAQPLTQDPAIVQAYSQMVLALVAQLRVLIPTLQQWQQQISQLFAQHPDAALFASFPTAGPVFAPRLQAAFGSRRDRFGSAAEVLQFSGVAPVTKRSGKSRQVQRRWARPKFLHQSFVEFTGLSIPHCCWARALYQQLRARGHHHWAAIRVVAYKWIRILFRCWQDRVPYDEQKYLKSLERRNPTLWAAIQQLPAQPSRKEV

SEQ ID NO: 122236 - protein, 399 aa, unidentified
MHKKLIVACLKKGNTQEIREFGATTRELLEMADWLKDGGCEMVAMESTASYWKPLYNIFESSDLNAIVVNARHMKAVPGRKTDVKDAEWIADLLTHGLLQASYIPDKDQRELRELVRYRKSLVGERNRELNRLQKMLEGANIKISGTITDINGKSARNILEHILSGKQIDSAEYDILYEKKVIAHNLKASKEQIIDDLNGVMSDIQRKMMRLLLKHLDELNAIIKELDDDIDSFMKPQEKQAAKVIQDIPGIANTSAQAIISVLGTDMERFPSDRHLASWAGLCPGDNESAKKRKSGKTRKGNALLRETLVICAHSAVRNKKSYFYAQFMRISAHRGKKRAYVAIAHTILIAIYHILKEGVTFKDLGADYYNQFNKERKINAYLKKLKALGWEAPVVAA

SEQ ID NO: 122237 - protein, 398 aa, unidentified
MDLPVYYELETNNGNRDYRIQIGGHYMNYNTVYVGMDVHKESFTLCSCKYEDEKASHYQRTPASYKNVLRYLAFLRTIYGEDTRFVCGYEAGCLGYSLYHQLENFNVECVILAPTTMLEQRSKRRIKTDKRDAEIIARSLAQHNYSPVHIPTETDNQTKEFIRMRDDHKAELKKIKQQILSFCLRQGYQYDGSGNWTAKHVKWLRSLKPAGLYKEILDEYLLTYTILTDKLNRLDQRIEELASKEEYKESVSKLTCFLGIKTHTALSVIVEVGDFQRFVSARKFAGYLGLVPGQHSSGDDRNGLGITKAGNTHVRRLLVESAQSYTRGKIGYKSRVLRSRQSGNSPQVINYADRANERLRRRYYKMVLKDGKKYNIAKTAIARELACFIWGMMTDNIY

SEQ ID NO: 122238 - protein, 429 aa, unidentified
MRTESTPGARGPVFCGVDTHADSHWLCVLDWRGRKVLSRQFPADAAGYEALAGAIAAAGEPACVAMEGTSSYGAGLTRHLASLGMPVREALSPARMQRRRPGQGKCDEADAERAARAAMSGSRLGTPKSQDGWVDGVRCMLAARSGAVKARTSAINTARSLLTTAPEGLRSRFRGMGGPRLMEELPSVRAEGALGAALGALADLWGAARDAALDMERAIEASLEENCPALLAMYGCGPVSAAKLAVAAGDNPGRLRSEASFAAICGACPIPASSGKTVRHRLNRGGDRQANSALHEIARQRVMRDPETAEYAERARARGKSDREVMRCLKRYVAREAYRALMHPHEIRRPGDASELVAARRAARVSQVRAASILGTSEKYISMLERGQRELKPIRRAYEAWVEAGLPLDWDRRAFEAERKMDSKKHLAK

SEQ ID NO: 122239 - protein, 377 aa, unidentified
MGRGEVRLRREGPSAETLRAPQPTPSRRRKTTMEQQRQYVGIDLHRRRSVIVRRSSEGETLEVTKIDNDDLAAFEQAVMAAGEHPEVVLEACYGWYWATDLLDELGCKVHLAHPLGNNWGNRRVKNDTRDAEDLADLLRLGRLAEAWIAPPEVRELRELVRYRAKLVCLRTNCKLQTYAVLAKEGVAVPMTDLFGVSGTELLETCHLATAYRTRVESLRDLIEVFDREIKKLEADVRHELRGQVGYEAIQQIPGVGPLFAAVFVAEIGDVTRFRSPAQLSSWAGLTPKHHESDLTVRRGPITKQGSRLVRWAAVEAAQRQASGTKLRADFARIAAHHGDTVGGRKIARVAVARKIVTLVFYGLRDGTIRSKAIEQAA

SEQ ID NO: 122240 - protein, 368 aa, unidentified
MTPRLMLGVLMVKRFEEAPVSEQYVGRQFVGMDLHRRRSVLVRMTESGQQLETVRISNDPEYLRQVMARAGEAPEVVLEATYGWYWAADTLAELGATVHLAHPLGVKMFSLRRVKNDERDAADLADLLRMGRLPEAWIAPPATRELRGWVRHRAKLVGLRSGLKCQIHAVLAAAGVHVPMSDLFGPTGRKLLAAAPLAVESRSRVESLLRIITALEFEIDLYTGLVARRLREDPGYAAIQQIPGIGPVLAAVFVAEIGDITRFHRPEQLASWAGLTPKHHESDTTVHRGRITKQGNRLVRWAAVEAVQRIPTSTRLGRYRDRVGERRGRNIGVVAAARELLALVFYGLRDHHLRCLPPPPQRPRPRAA

SEQ ID NO: 122241 - protein, 345 aa, unidentified
MAAIGIDTHKATLAACAIDELGRPIGEATFANDPPGHAAFITWARSMAPDATVGIEGSSSFGAPLARSAQLAGLAVREVPPHLSRVERRRTRRPGKSDPGDALAIARVTAREANLPPIRLPDRSTELRLLLEAREDLVGEATRMRNRLHAHLLVLVPGYGGTVANLVAACHRAKVAGLLRGNATVQAELARSLLVRLARLEREIEVLKRRLGARVAGHPLLGLPGAGPITVARLIAEVGDIRRFRSPDALAALAGVAPIPASSGQVQRMRLNRGGNRQLNRALYVIALSQSRFHPPAKAYVNRRMEVDGKTWREAIRALKGMRPAHSGTCDRTIKRARPDAANLE

SEQ ID NO: 122242 - protein, 366 aa, unidentified
MKKVSTAATKQSRNFSEQKLTIGLDLGDRSSHYCVLDESGGILVESKVSTSPHAMQGIFGSMPRSRIALETGTHSPWVSRLLSELGHEVIVAHARNVRLIGESRRKDDRLDAQTLARLARIDPQLLCPVKHRSARAQADLTVIRARAGLVRARTALVNTARGLAKSYGERLRGCNVRNMNAEKADALSPELQTALQPLLAAIEILSEQIREYNEHIEKLAEESYPQVELLQQVKGVGTLIALTFLLTLEDAHRFKKSRDVGCYLGLQPGRRNSGQSEPQMHISKEGDPYLRTLLVQGAQHILGPFGADCDLRRWGLKLAERGGRNAKKRAIIATARKLAVLLHHLWISGEDYDPLHNSQRAIAAAA

SEQ ID NO: 122243 - protein, 324 aa, unidentified
MTRGVFVGVDVSKDRLDVAFRPGGENLSVPNDRRGITRLLRTISRFTPECVVLEASGGYERRLLERLAEEELPVALVNPRNVREFARASGRLAKTDAIDAAVLAHFAEVMRPELRRLPDPETRKLRALITRRNQLVRMMTAEQNRRLQALENVHAGLSAIIRCLKKQIGVLDKQLAVLIRATPAFRQKAELLRSAPGVGQVVSATLIAHLSELGTLNRKKIAALVGVAPFNRDSGKLKGKRAIWGGRGEVRSMLYMSTLVAVRLNPSLRIFHDRLRRAGKSPKMALTACMRKLVVMLNAMLKAGNRCVEERAHPVKMIAAPAPT

SEQ ID NO: 122244 - protein, 382 aa, unidentified
MRTAKPRTDESSLSVGPLYVGLELSTREWRFAYTSGLGARRWQTVIPAGDRVRLRTVLAQAKGRCGLVATAPVRSCYEAGRDAFWPHRLLEAEGVENVVVDSSSIEVSRRARRTKTDRLDAQKLVTMLVRWVLGDATVWHVVHVPSAAVEAARHAPRTAATLTKERTRWRNRIHAALATRGVRLRLTGDFPARLAAAQQWDGTPVPPAVQARVLLEWGLLQQIEAARRTVHRTLQTARRAEPSAAAATVRQLTQLRSIGEGFAWMLATEVCSRDLRNRRQVGALTGFTSTHYRSGDVARDQGISRAGLAAVRRAAVETAWVWVKWQPASELTQWYLRRFGQGGPAQRRVGIVALARKLVIALWRYAREGTVPAGAMLRAGAA

SEQ ID NO: 122245 - protein, 353 aa, unidentified
MTTNIPEVTVGVDLGDKFSHICVLNSAGQKIEESRLATTPEAVRQRFSGMPRARIALETGTHSRWFSKLLEECGHEVVVANAREASRLCRRESKTDRLDAEQLARFARVDPTILRPIVHRSDAKHADLAIIRARDTLVRSRTQLVNHVRGTLKAHGVRAKGCTTRSFEKKVVAVIPECLKPAMLPLLETLHGLSKRIAHYDRLIDRLCNDVYGETKLLQQIKGVGSLTSLAFVLTLGDPRRFKSSRRVGAYLGLRPKKRQSGDVDPELRITKMGDRYLRRILVTSAHYILGPFGEDSDLRRWGLELAGRGGKNAKKRAVVAVARKLAGLLHRLWVTGEVYEPLRQRTPRKLAS

SEQ ID NO: 122246 - protein, 383 aa, unidentified
MKSVCGLDVHKDSVYLCILSEFGELIEKVFGVLTYQLEEMRDLMLHHHVVEVSMESTSVYWIPIWRVLSPHFKLNLANPYFIKQLPGRKSDVKDAQWIAECTMKELIRGSFVPPETIQQLRQCDRRIFDLNEEIVRKLSKLDAVRQRCNIRLSNYVSNVDSKSYKAVVRAISQGITAPEELVKLIHGRIINHHGTDVITASLKGVVSLAEIDMISQLRDELDMAEAHKEKCQARMLEICEREFPEELRRLQTIPGIKERTATSLIAEIGTDMNKFETANHLASWSGLKPRNDESNKKIKSRSITHGNVYLRKTIIECAWAASRTKDCFFSRFSYHQTQVRKKNKMKVLVAVARKMLIAVWHVLHDNTIYIDFTTDRKTSQTRG

SEQ ID NO: 122247 - protein, 412 aa, unidentified
MLERGKCIFVGVDVHKATHTAVIVDPWGEMIGKAITFNNNPAKFPAFVDTVSAFSEEDKTIVFGLEDVGGYGRSLAVFLIEQGFVVKSVNPALSYAERLSKPTFKKNDDWDAECVAKVLVRSINQLPDANPSDIYWTIGQMVGRRDALIKTHATLKNQLHGYLSNQYPSYKKFFSEIDGKTALAFWQRYPSPCHLKGVSSEELKEYFLTISKSCSQRKADAILSLVEADGQTQRSYQSSRDMLIQSIVRQLSFIKDELKMLEKELASLISQLGYQLTTMPGINIVTASALIAEIEDINRFPNQNKLASYAGVSPIFIGSGGTGKIEKSRQGNRKLNSLFYELAVQQVQFAKGKEKKARNPVMRAYYERKIEEGKSKGQALVCVMRVLVRVIYGMMKNKTAYQQPEMYEKQAV

SEQ ID NO: 122248 - protein, 345 aa, unidentified
MEQISRIGMDTSKHIFQLHGVNTAEEPVLRKKLRRKEMFAFLEKLAPTVIAIEACGASHHCARLLQSFGHSVKLIAPQLVKPYIKRGKNDAADAEALCEAMSRPTMRFVPVKTAEQQAALMLVGVRDRLIRNRTQLTNAIRGYAGEFGLTAAKGKAHLDPLLERIQADESLPALARELFAAQAKEYAQLQAQIDEVDARLMAWHRADECSQRLTKIPGVGPIGAVLLKMKTPEPELFRSGRQFAAWIGLTPKDHSTAGKVRLGVITRAGDEGLRAVLVVGATSVIQHVQRGGRPSPWLTELLKRKSPKLAAVALANKMARIAWKLMVTGENYVAKSAPATLAGAA

SEQ ID NO: 122249 - protein, 369 aa, unidentified
MGYKRISIDTSKHVFAIHGVDEAERPTLRLELRRSQIEAFFARLAPTEVALEACGGAHHWGRQLSAMGHQVKLIPPQYVKPFIKRNKNDRHDAEAIGEAASRPSMPTVAVKTVDEQAATMIAKHRELLVGQRTAAINALRGHAAEFGVIAAKGTAKIEALLVVLTSEPGIPAARKSDVRGNGRAYCRSRCEAHRRRETTSRAAQALSGQSAARSDPWRGPITAITMALSVNPANFESGRHFAAWLGLTPRERSTGGKQRLGRISKAGNERLRQLLVVGATAVIRVARPGRPSSSAWLLGLLARKPKKLAAVALANKVARIIWAMMARGEAYRHQPITPEPRAGAKGSRALGEDGNRSIRRATIRTYPWP

SEQ ID NO: 122250 - protein, 452 aa, unidentified
MAKPKKRRHRKLDRSLPEMRPNAGGIDMGATEIFAAVPADRDSESVRSFPSFTQDLHELADWLQRCRVDTVAMESTGVYWIPLFQILEARGIEVHLVNAQHVHHVPGRKSDVLDCQWLQYLHSVGLLKASFRPEHAVCEIRSLMRHRQTLVEMACVHVQHMHKSLDQMNLQIHHVISDITGVTGLAIVDAIIAGITNPKELAKLRDHRIKASIETVTKSLVGDYRPEHIFTLKQSLTAYRYYQQLIADCDQEIQQRIQAFDTKDDGPTAAAAVDSSNSTTATPSSFDLHSHLERIFGVDLTRIPGFECLRIQTIFSELGADLSKFPTDDGFCSWLNLCPKDGSSAGRRIRGPKVKTKNRVAQAFRLAAQSLHHSQSYLGDYYRSQRARHGAVKATKNTAHKLARIFYHLVTTRQPYDETVFAKLEARSHKRRLHKLQSLAKQMGYSLVEANA

SEQ ID NO: 122251 - protein, 412 aa, unidentified
MEVVYERCAGLDVHKKTVTACRIIPHQTEGWQREIRTFKTMTADLLGLADWLANADITHVAMESTGVYWKPIFNILESQFQVLLTNAQHVKYVPGHKTDVKDAQWLAELLQHGLLKASFIPSAPQRALRDLVRYRTQLIQERSREINRLQKVLEDSNLKIGSVVSDVLGASSRDMLTAIIGGQQDPSLLAQFARGRMRSKIAELQAALSGRVQDHHRLLLRIHLERIDELASKIETLSQEIAMLTPDFDTKDEIERLDEIPGVGLQVAEGILAELGTDMTRFPSANHAVSWAGLAPGKNESAGRNRSSRTTKGNKHLKSLLVQAAHTLARSKDNYLGALFRRIASKRGKKRAAVAVARSILVIVYHLLKRGSRYIELGSDYFDRLNQQRTTQRLIKRLEQLGHQVILQPISA

SEQ ID NO: 122252 - protein, 343 aa, unidentified
MQQPLSVVGIDLAKRVFHVAGMDDKGKIVLRKRLTREALLPFIARLPPVVIGMEACGGAHYWGRRFRQYGHTVKLIAPQFVKPYVKSNKNDPADAEAICEAVTRPTMRFVPLKEVDQQDLQALHRARERVVKARTALVNETRGLLAEYGIVLPHSVTKFRHAFLATLEAEQAKLTPLSTAFFTQLYEEFGALEKRLAYYTAKLEAISAAHPVCQRLETIPGIGPLTATALVAAVSETSTFKNGRQFAAWLGLVPRQHSTGGKARLLGISKRGDVYLRKLLVHGARATLRWVGLKADRRSQWLRGLLERRGKNKTAVALANKNARIAWVLLTTDQVYTLEGVAA

SEQ ID NO: 122253 - protein, 339 aa, unidentified
MFMIGIDPHKGSHTAAAVDRSESVIATLRVEADRDQRQHLLDWAASFEPRTWAVEGATGMGALLAQQLVAAGERVVDVPPKLSARVRLLDNGRIDKTDPNDARSAAVVAWRTPTLNEVIGVDEHRVVLRLLADRDHQTTAQRTRTICRLHALLCLVIEGGATRSLTVDRAEKMLATVIADDPVSRARVVAAGEFLDEINALDAVRKDVRRRTAVAVKASASTVTDVYGIGPMMAAIIIGHTGDVRRFPTAGHYARHNGTAPIEASSGPNKRHRLNPRGDRQLNHAMHMAAVTQVGHDTPGRIYFLRKRAEGKSSKEAMRALKRQISDAAYHRLLTDANR

SEQ ID NO: 122254 - protein, 344 aa, unidentified
MGEVITIGLDIAKSVFQVHGVDGLGAVVIRKRVSRARMLEFFAGLPRCLIGIEACPAAHHWARELQAIGHIVRLMPPSYVKAYLKRSKNDANDAAAICEAVTRPSMRFVAVKTKEQQAASMLHRARQLLVRQRTMLSNAIRGHLSELGIVSAKGRNGTDELLEIIGKDADSRIPLAARSVLKVLAAQYSAIGAEIASISKSILAWHRSCEPSRRLEEIPGIGPIVATALVAEISDWKAFSSGRGLAAWIGLVPKQHTTGGRDKLGSITKQGNRYLRWLLVNGAMAVIRYAQKHGTKKHPWLGRLMARRPTKVAAVALANKIARMAWAIMTRGERYREPVLLLAA

SEQ ID NO: 122255 - protein, 379 aa, unidentified
MKKNSKQTASIETVKKNSKETAKVETVPANRWGEKPKVTVGLDLGDRYSYYCMINADGEVFEEGRIQTNEEGLHRHFHGQGRWRIALEAGAHSPWVSRKLRAWGHQAIVANPRQIPALTETDSRNDRNDAENLARFAYCDPCLLKPIEHRSVERQRDLNLLKVRDTLVRARTMMINSLRGLVKSEGQRLPKCDADNFVSRAELFIPAGLRPASQPVLEQIQQLTQHIQDLEKQIKKLAEHYPEMELLQTAQGVGPIIAAAYVLTLDRPEAFPSSRQAGAFLGLRPRQKQSGNSDVQCRISKRGNQYLRRLLVQGAQRILGPKGEDSALRRWGLKLASTGGKRGKKRAVVAVARKLAVILHSMWKNNEPFRPFPETAAAA

SEQ ID NO: 122256 - protein, 422 aa, unidentified
MDSEACEVEYAAFIGLDWGSEKHSIALQAAASKEIEIYTLKQTPEELHGWIIKLRDKFAGRPVAVAIEQTKGAVIHALLGHDFVHVFRINPLSLANYRKAFSPGGAKDDPTDAEYLLEWVKLHRNRIKPWVPDDAPTRALQKLVEFRREIVNQRIALTNQLIQALKEYFPQALDWAGEIDRVMACDFLSKWPALEKIKKARPDKIREFYLQHGCRNRELIEERVKAICTAQALTEDSQVIETSVFVVQTMVRTLRPTIESLGRIDKEIEDRFQAHPDMAIFDSFPGAGPVLAPRLLAALGSDRSRFDSASEVQQYSGIAPVTERSGKHVWIHRRFACPKFQRQTFHEFAGQSIKFCDWARGYYDMKRAAGMRHHAAVRSLAYKWIRIIFRCWKDRLAYNEEMHLQSLRKKGSQILNFIAKAA

SEQ ID NO: 122257 - protein, 324 aa, unidentified
MTCFVGLDVSQKMTALCVVDNAGRRLWRGQCPTVPEEISVLLRRHAGDDARIGIETGAMTPWLVHELRNLGLEVVCLDARHARAALEMQINKTDQNDAEGLAQIVRTGWYRSVHVKSFDSHRARALLGARTQLIGMTTRLSNHIRGVLKTFGLLPGAMRGLPFDRKVEALLAGRSDVALIVRPMIVAWRQLRKQITAFDKVIRALVRSNSACRLLMSVPGIGVLSSLAYVSTVEDPGRFSRSRSVGAHLGLTPRQYQSGEVDRSGRISRCGDTLARTLLYEACRDPRAGQKSLELEGMGTRNRQAIGKWQSACGSGQKALRYFA

SEQ ID NO: 122258 - protein, 412 aa, unidentified
MDANMEVVYERVCGIDVHKREIVACLITGQRKMVTRKFGTLTRELREMVEWLKSGDCQIVAMESTGSFWKPLYNIFELEGIEAIVVNPQHMKAIPGRKTDMNDAQWIAKLMRHGLLRASFIPDKDQREYRELTRYRNSRIEERARDINRLQKMLEGANIKLASKISDITSFTATSMIQLVVQDEEITIDQIAKVRNNRCNSSAEEFLDAMTGIVSQLQRELFGEVLRVIEEQTRQIERIEEMVKAHTTEAYDIAASALGAIPGIGRISAEQIIAEIGVDMTRFPSANHLCSWAGLSPGDNESAGKRKSGKTRKGNRTLKKTLVQCATSAVKNKDTFFSAQYQRLVVRKGGKKAVVAVAHSMLISIYYVMLGCEYKDLGADYYTQFNKEKKIQSHLKQLKKLGWEEPCPAIAS

SEQ ID NO: 122259 - protein, 367 aa, unidentified
MEKSSTVFVGMDVHKESIDIAIADANEARHFGRIGGDAAAVDRVIRKLRAVHRKPMFVYEAGPCGFWLYRKLVAQGLPCMVVSPSLTPRNAADRVKTDRRDAMKLARLARAGELEPIYVPDALDEAIRDLVRTREDAVSMQRQARQRLQALLLRNEIRYVGKCAWTQAHRRWISGLKLPNPAQQIAFEEYVQAVHEAGARLERLGASILAQLEHWRWRPVVEVLQALRGVQAIHAVRIVAELGDFQRFESPRKLMAYLGLIPSEDSSGPRRRQGSITKAGNSSARRALVEAAWAYAHPARVSWVIARRQARLSKSVCDTAWKAQLRLCARFRKLAARGLPRNKVVVAIARELSGFIWAIARQVKPLT

SEQ ID NO: 122260 - protein, 352 aa, unidentified
MKSEIKYAGIDLHQSTCFIVLEDQTGQELSQSVVKTDAENLRSYFRGIGGTIHVAFEVGTQSAWLYEILKQVVSSITVCDVRQHKKRGNKNDRIDARKLARGLRMGDLKGVYQGDRNLRKLRELAHGYLGTVSDSVRVMNRIKAVYRSWAIRCGGRDVYYKRNREEWLLKFPIHESRMRAEGYYDQFDLLREQRKATRKAFLKEARRYPVQKILRGIPGFGPVRSALVIAVMGTPQRFRTRRQLWSYSGLSVVIQTSSDHQVIKDQIIRKQRQHGTRGLTRDFNRILKGVFKSAAKEAIRRDPLIGAIYRKKIATGIRPEMALLSIARRLATIVLVLWKRGEQFNSAKLISN

SEQ ID NO: 122261 - protein, 355 aa, unidentified
MDQIIRIGMDTSKHVFQLHGVNAAERPILRKKMRRKEMVDFFATCPPTVIAIEACAASHHWARLLTGFGHEVKLIAPQLAKPYVKRGKNDAADAEALCEAMSRPTMRFVPVKSADQQAALMLVGMRERAVAAQTQLANTIRGYAAEFGPTAAKGMSHLPLLLERIMIDESIPAVARELFASLVEEFAQLGERLKAVEAKLMAWYRNNECCRRLAKIPGVGPIGAVLLVMKAPAPEQFRSGRQFAAWMGLTPKDHSTAGKVRLGIITRAGDEALRKTLVVGATSLLRQVRAGRGRNASLWLIELLNRKAPKLAAVALANKIARIAWKMMVTGEAYKGNAARPAGLSQTFSERAIIP

SEQ ID NO: 122262 - protein, 390 aa, unidentified
MSSVSSAASALPVLAAAVAAVRPIIYLGMDVHKDSITIAVLPAGAKSPTRLERLPNDLPKLKKWLERVARDGEVRACYEASGAGYVLHRALTEWGYACDVIAPSLIPKRPGVQRKHDKRDAVDLARLHRAGELVAVRIPSDADERVRDVVRCRETFQREILKSRHYILKFLARRGFVFREGTNWCTPHLKWLLHLTTDGSALAPDDRLVFREYHALLMYKLQRRDALDRQIEQLALLPALAPMVSRLQCFRGISLHSAMVLATEIVDWRRFDRPAQLACYLGLVSREDSSGDRTRLGSITKAGNTHCRHVLVQAAWSYRHRPQTSVDLKRRQQGQPPAVITHAWRAQQRLHQRFVHLSDRKRPQIAVVAVARELVGFLWAVMRDLESVAV

SEQ ID NO: 122263 - protein, 365 aa, unidentified
MKIMQWVGIDDHADKWTIAHYTGNEEKPTREFELVPDSKGYRSLLSYLKGLKGEVRVVYEAGPCGFEQYRRLKAAGVNCQVAAPTLTPRKPGEKVKTNRRDAAKLGRELRSGGLTMITVPEPEQESLRDLIRARQTIQKDVGRLRKQIIQLLLRYGHRFRDGQSWTKRFWVWLKAIKLTGSYSSFVLADKIVELEHRIEQLARYDDEIERATQKPEYQTYVAAIRTLRGVETLSAMTILSEMGDLRRFAAAPQLMAAVGLVPSESSTGDKTNRYGITKTGNAHMRHIAVQAAWQYQRQATASAKIKARRKDQLPEVVAIAEKCEARLNRRFQRLTGRHKKSTVAVVAVARELIGFIWAIGQIVHP

SEQ ID NO: 122264 - protein, 408 aa, unidentified
MDKLFVGIDVGSRDNAVHIMLPDGEKHSSFSVGNNLGGSQTVSKKVVSAMVEQGLKNLEIGIEATGVYGDGLMCFLNEDGAIGRFEKRLYILNPKQVEKFKQAYSDLPKNDPVDAFVIADSLRFGRIKTNPFQDDYRYKALQTLTRSRYRAAQDLTREKQRFMNCLFRKCSGLAQEQVFSNNFGAAALAVFEEFETPDDMINIDVDQLAAFIAEKGKNRSPRPDEIAREVQAAARGSYRLPKTVNDSVNQVLSISVSSMRAMQAQIKALDKEIERQFENIPNTLKSIGGIGHVISAGIIAEVGDVNRFTKGQAGLAKYAGLVWKEHKSGTFVGQNTRMIKSGNRFLKYYLCEAAFSLVRCDTEYRRYYDLKYKEVNKYQHQRALALTARKFVRLVFRLLKDNRLYRPA

SEQ ID NO: 122265 - protein, 426 aa, unidentified
MRVLFERVAGIGVHKDMIKVGVRTPGHRAWTRTSEVLEYRTFYGVLQTVARDLRKRDISHVVMEASGVYTEPVYCALTEQDFEQVAVIGPAHAEALKGHKADAKDALRLAGLFECGLLRGSYIPPQALKDLRDLTRYRIKTVQGRTSEIQRLAKALESAGIKLDPVVPDLTGKPAGLMIEALIDGGRRGKVLADLAIGRMRTAGKLADLSQALAGRFTGHRAVLCRLHLDRIALFNTAVAGLEAKITVKVTAYQRELDLLKSINGFGDAVAQAWLAEIGPAPHEHFATQEKLASWVTLCPGNHMSAGKRRHGRTGDAGTCIKPVLVQAAWSAVKSQGRLQARYHKLVRRFGGPKNPAAVKKAILAVAPTLLKIACQVLKSGKPYKDLGAGFYTQRESPEQRRAYLVRQPEKLSPGCTITITPAEAA

SEQ ID NO: 122266 - protein, 332 aa, unidentified
MENNCFIGIDVSKNKLDICVLQGKEVLQEDVIDNNPSAIHRFLVDMAEKRGLDLCSCLVCAEHTGNYTYPLTLACRDLGCRLWLENPAQLKYSSGVHRGKNDRVDARRIALYASRFNDKAMLYHELTPELERVKQLRQERSLYRSDLSKYKGQLSDQKNFMESTVYKAKANRLKHVIKELEKMIDVVEREITGIIDSCDVLKRQMKIITSVEGIGRETALCFIVETAAFTRFTDSRKFACHAGIAPFQYTSGSSVRSRNRVSRRANKQVKTLLHMAALSITRKKKSELKVYYKRKVEEGKNKMTVINAIRAKLVARVFAVIRKNDSYSINFT

SEQ ID NO: 122267 - protein, 361 aa, unidentified
MLARGAKDKEHAMSQTLNNRIAVIGIDIGKNSFHVVGLDGRGAIVLRQRWSRSQVETRFANMPPCLIGMEACVGAHHLSRKLQGLGHDARLMPAKYVRPYSKGQKNDFRDAEAIAEAVQRPTMKFVATKTADQLDLQALHRVRERLVSQRTGIINQIRAFLLERGIAVRQGQRFLRAELPRILASPTNALSLRMVQVIEDLTGDWRRLDERIEHLSKEIEAIARLDSGCERLMSVPGVGPIISSAMLAAIGTGDGFSKGRDFAAWLGLVPRQMSTGDRTILGKISKRGNRYLRVLFVQAAWVVLIKPKSWERYGLKPWLEAARKRLHHNVLAIALANKLARIAWSVLARDRGFEANKVQIA

SEQ ID NO: 122268 - protein, 405 aa, unidentified
MKQPATRHYAGVDWASRTHAVCVVDQHGAIRARFDIPNTGKRFTGLCKRLAKLKVAGVAIERPDGPLVEAMLDAGLKVVVITPRQVKALRSRYGASGAKSDPADAYLLADVLRTDGHRLAPLTPDSDPTKILRALSRTRKDLQEARVALCNQLTAQLERCFPGAIGLFADLHSPVAVAFLRRYPTSHAAAGLTQAKLAAFLRRLHYPGRTPVAILLGRIQTAPVSGIGPAEAAGRAVCVLALLDAIQVTARQERELEAEIIERLEVHADAKVFTSLPKAGHGVRAAALLGELGDVRARFPDNDCLAALAGAAPVTITSGKRRVVKFRWACDKKLRAALIDFADDSRHASPWAAKVYADALARTGRHPHAVRILARAWIRVIWRIWQDGMAYDPAKHQGAVRLLAA

SEQ ID NO: 122269 - protein, 346 aa, unidentified
MFFAGLDLSRKRLDVHVVDVAGRTVLETAAPPDADGLRGLVERVEPLGAVRAAIESMNGARFVHDRLERLGWEVEIADAQKVKGLAPLACKTDRIDAWVLAELGRRDLVPAIWLPDPAVRAERERARWRLHLVRHRVQLKNRVHATLIAFGTPCPVSDLFGQRGRRLLARLEVPDPWRSDVLAAVALIDELDRQIGGCERELRRLGAEHRYVPLLMSAPGIAWVLGYTIAAEIGDIDRFGSPKKLAGYTGLCPRVYQSGGRDHRGSLAKNGPKFLRWALIEAATHAARHPCYRDHYQRTAQRLGRQRGKKIARVEIARKLSEAIWHMLTRNQPFAPAGPTSCSLAA

SEQ ID NO: 122270 - protein, 344 aa, unidentified
MKTTEAFNQVCCGMDLHSSNVYICVMEKDGTISYSKRLKNDLPSILDALKTCEGLKHIAVESTFNWYWLVDGLMEHDYKVHLANPAQLTDCAAPKVTGDRHDAARLAYLLQRGELPEGYIYPKEVRPVRDVLRRRLMLVRQRTQTILSLQGMYARTTGKQISGSKLKKWTLLDVEKTFEQDADQFCAAELLATIQGLEKRVKKMDDYVRKFLKSYPDYQRILGVPGIGLALSLTILLETGPIERFACPGQYASYCRAVPSKRISNGKSKGQNNRKNGNKFLGWAYVEAAQFAQQHHPRIHSWFQKKQRRTCRNVALKSLAAKLSKATYIMLRDQSDFNEQLLFG

SEQ ID NO: 122271 - protein, 310 aa, unidentified
MEKASIIGLDLAKNVFQLHGALADGSVAFRRTISRAKLLSFFTRIPRCLVAMEACASAHHWARQIAALGHDVRLIAPIYVKPFVKRNKNDVVDAEAIAEAASRPTMRFVAVKSVEKQAAGVAFKARDLLVRQRTQAINAVRGHMAEYGIVAPNGPVHVERLAAATQDPESGLPVSILGVCRLLLQHIATLSEQIELLERELRERTRADETARRLMTIPGIGVICATAMEALAPPPESFAKGRDFAAWLGLTPKQNSSGGKTKLGGTSKMGQRDLRRLLVSGAITQVRWAARKGPPEGPHTIDRQSAQSAD

SEQ ID NO: 122272 - protein, 414 aa, unidentified
MKKRNYRAKKVNNTHWDQIKEQLAGEAAVFAIDVAKKQQFGLLSTEDDTVSVLLKWNHPEQTGELLRALKDLDCPLTMVMESTGTYGDALRYQFRQNGFEVDQISAKRVCDAREVYDGVPSLHDAKAATVITRLHRSGLSRPWRESTDDERCLDALRREYDLHQSQYQRNQNRLEAYLGRHWPEVLYLLPLDSVTLEYLLREYGTPERIVEASSEAAKNMRSWGKSGLTQDKIERVIQSAAHTLGQPCIESERQYLQALAEEMRHSRLQQKKAKHALEAIIKSDDELRPLGYILGMVTTAVLISCRLDPRQYDCARSYQKACGLNLKEKSSGQYVGQLKITKRGSSVARHYLYFTALRLIYRDPVVKIWYQHKVDPRAKNKTVIALMRKLSKALWHVARGERFDASKMLTVSTA

SEQ ID NO: 122273 - protein, 316 aa, unidentified
MTEATPIYVGVDISQERLDIATTVKDKIWSVGYDDEGLKKVRAHLRRLKPERIILEATGKLERPLVAALVADGLPVVVVNPRQVRDFAKALGILAKNDRLDARILARFGESTKPELRPLADDTRQALAETVTRRRQLVEMITMERNRLSRTLPPVRQQIEAHIRWLEAQLRARDDDLAQTLEKSPHWQTDYNLLQSVPGIGPATAAVLIAHLPELGTLTHKQIAALAGVAPFCRDSGTLRGRRTVWGGRSTVRSALYMATVVAVRHNARLRTFYQRLLTAGKAKKVALVACMRKLLVILNAMLRNQTPWENLPATT

SEQ ID NO: 122274 - protein, 347 aa, unidentified
MRNITTVGIDLAKLVFQVHGIDARGRVTLRKQLKRSQVVTFFAQLAPCLIGMEACAGAHFWSGKLVEFGHTVKLIAPQFVKPYVKTNKNDAADAEAICEAVGRPNMRFVPIKNTEQQALLGLHRARQGFVGARTAQANQVRGLLAEFGLVMPAGIRCIERKLPEVLQDADNGLSDASRALFARLLEHFRVLDRQVEELEREIGAWHREDSASRRLEAIPGIGPITASALVASVGDAKVFHNGRQFAAWLGLVPRQRSSGGKTNLQGISKRGDTYLRTLLIHGARSVLLSLKRDPARADGWLAHVANRRNPNIAAVALANKNARTVWALLAHGREYQAGYRSANSMAA

SEQ ID NO: 122275 - protein, 440 aa, unidentified
MNEEDRSRLEEFRQFRKEVRGSSEYLLVGIDVAKEKHYAFFGTARGKTLFRRLVFENNIEGFGKLLAQAGAMKVQNGLKRVVFGMEPTANYHKPLGEHLIRCGHFVVLVSGVAACENRKTLDGRWDTNDTRDAANVADLVSQGKCLFYEFPVGVLQDLRNLLSLKRRFKRVEQGYRVRIRNHLLAKYFPELDRYYEQSESTGLAIVRWCLDPSVIAGLEYKQFVQMVSSSRWRSSQEKRLEAIWKLAVDSVGCEAGPVVEFEAQVMVEGLKQIRESIRQMDEKIHEACSQFPEYECLLSIPGFGPDVSSKVLGAIGNPFRFQNGRQVLKLAGLDLSAKRSGKSSERVIPVISRKGKADLRYALYQAALIASVKNPDFIGYYTDKLRGREREPGIKIKMRVKLAAKLLRMAWTLMKKKEPFHPSYLRAAGPSVSTGDGRER

SEQ ID NO: 122276 - protein, 394 aa, unidentified
MKLIGIDIGKNKHFFCIMDKDSGEIVSQPASFSNDKEGFDFLLQKIKSYPKDSVIIGMEDTGHYHFALLKYLLDLQYTVALINPKTTDFNRKMQGGITKNDKLDTINICDVLDTPERKKQYRITKVNKFDLYEQKQLTRQHHNLKEELNVYKNRLQKSIDIVFPEFNSLFKSKYGTVYINILKTFGSAENIANTDIRTIRKCFEIDGRGNRISLTPERLKERARSSIGISSLAEVIQIKHLSAQIDLIEEQLSEIDKKIEEFSIQNNSPILSIPGISHFSGTSILAELGDISNYSKPSQIIKFAGVAPLHYESSQFNAQHTAITKKGSKYLRKTLYQIILPVIRHNPVFNKYYQLKISQGKGHRCAQGHCVRKLLRIIYHLLKTNQQFDPQLLR

SEQ ID NO: 122277 - protein, 354 aa, unidentified
MGNLTTIAVDLAKSVFEVAVSEVPGRVSERKRLNRGGLVAFFSNRPPAVVLMEACGSAHHWGRELERLGHEVRLLPPARTARYRIGNKTDRADADAILEANRNEKIHPVPVKTIPQQSLSTVHHLRHAWMETRTARLNALRGVMRELGVAIPVGAKAVLPRVTESMAEGRVPEDLHALLQASMAEIRKLEENVKESDLLLARLARSIPVARALQEIPGIGPLGSTALIPAVGDPNRFRSGRKMSAFFGLVPREFSSGNKRRLGSITKRGNTYVRTLAIHGGRSVLVAAHRRKNPDRLHRWALEVERRQGRNRAAVALANKIIRMAWAVWARGTRYDGALAGPSAETRARTTGAF

SEQ ID NO: 122278 - protein, 355 aa, unidentified
MDSKKYIGMDVHKESISIAVMNSAGKIVMECVIETKASMILQFIDGLRGDVHVTFEEGTSAAWLYDLLKPHVTKLVVCDPRKNASMREGNQSDKIDARRLAELLRLNHLNPVYHGEHGLRSLKELVRSYLTITKDLGRVMTRVKAIYRSWAIPCTGKQVYASCHRAEWLGKIGEPGVRRRAEFYYQQLDALRTVRQQVRRELLAEGKKHQAWKRLCQIPSSGPIRSAVLLGILQTPHRFRTKRQLWTYSGFGIETQSSADHRSVYGQLQRAKKQISIRGLNQNHNHDLKNLFKGAAIVASSKPGPFQEFYAALLTKGIRPEMARLTLARKIATIVLIVWKRGVSFDAQHLKPQTA

SEQ ID NO: 122279 - protein, 334 aa, unidentified
MENVALIGIDLGKHSFHIHCQDKSGKAILRKKFTRTKLMQFLATCPPSIVVMESCAGAHFMARRINDIGHEAKLIAPQFVRPFVKSNKNDFVDAEAICEAASRPSMRFVQPRTEVQQAMRALHRVRESLIRDKVKTINQIQGFLLEFGISLPTGDVVIKRLSLVLAEHEIPEYLSRLLMRLHAHYLYLVEQITELELELNQSIKTDDTAQRIMTIPGVGPITASMLSSQLGDGKQFSCSRGFAASTGLIPRQYSTGGKATLLGISKRGDKNLRRLLVQCARAFMMRLEHQQGRLAEWVRGQLSSKHSNVVACALANKLARIAWAITTNHNEYQA

SEQ ID NO: 122280 - protein, 410 aa, unidentified
MQTTIERCAGLDVHQATVVATVRVPAAPGGRQEGTETFGTTTRALMTLRDWLQAHGVTHVAMESTGVYWKPVYYVLEDAFTVLLVNVQQLKHVPGRKSDVRDSAWIAQLLEWGLLRGSVVPPAPLRDLRELTRYRKHQIEDRAREVNRLHRVLQDANIKLTSVATDVMGVSGRAMLEALLQGTTNADLLADLARGKLRRKLPALREALVGRFRSHHGFMVGQILAKIDFLDETVETLTQEIDRLVAPFEATLGLLDTIPGVNRRAAITLLAETTGEMSRFPSPGHLSSWAAICPGQNESAGKRRSGKMRHGNHYLRTALIESGLAASRANGTALQARYLRVKRHRGHKKAVVAVGHHILEIAFFVMRDGVSYQELGADYFDRRRPDRVLHYHVRRLEALGYRVTLEKPAA

SEQ ID NO: 122281 - protein, 335 aa, unidentified
MDFCYFIGIDIAKDTLDWAVYTQQGLQLNTHTSNTLAGIKIALAEFKALPDWTLKQAVFCMEHTGIYNAHLLELLYELKLAVWLESSVQIKQAGGMQRGKTDQVDAQRIAQYALRFRDQMRLWEPPREIIQKLAFLSATRQRLNQAYNLLAVPVAEQETFIGKSLQKTLKGNVSKSLSALKEEQKVVEKQIKELIQADSRLKELFELMVSVPGIGPVIATELLIATNEMQTINDPKKLACHAGVAPFEYRSGSSIRGKTKVSHQARKRLKSLIHMGSMSAIQVKGDLQDYYVRKLGEGKHTMLVLNAVRNKLIHRVCAVVRRGEKYDKNYTSILA

SEQ ID NO: 122282 - protein, 386 aa, unidentified
MIYVGVDVAKYKHQVAIIDDKGEIHEDNLVVVNNKSGFKKLYEILCRIESHTEQECQIAMEDTGHYNLPILQFLKQMNYRVYRYNPILIKEFSKVHTLRKTKTDKTDAMVIAKKLMSDFEKREQLSDRTSAELKELTRYRQRLGKHQALLKTQYTRILEKSFPELAAYGQIRYSKYMMELLKKYPSPKRIAAAYEKTLSRFLGVSSSQIRPDTIKQLAKESIGYHSEITEFELTQTIEQMYLYEKQIKEVDKRIQEMMDTLDSPIVTIPGISYRLGSVIIAEIGNIHNFNNPGQLLAFAGMEPSIYQSGKYTGAGKMVKRGSPYLRWAMYHASRLVAIYSPTFKAYYEKKLSEGKHYNVVLSHIAKKLMRVIFYLMKTDEDYKEAR

SEQ ID NO: 122283 - protein, 422 aa, unidentified
MFEKGEVTVDLVHPRCAGIDISKRDAKVCVRVASAGRAKATSTVTTWGSVTNQVLALREHLVAEQVTLVVMEATSDYWKPFYYLLEDGPFEVMLVNARHVRNLPGRKSDVSDAAWLAQLGAHGLVRGSFVPPEPIRQLRDLTRTRTAIVRERAREIQRLEKLLEDAGIKLSAVATDITGVSGRAMLEALIEGQRDPVVLADLAKRRLRSKIPELTEALTGRFGEHHGFLARLHLDLIDNHTHAISELAARIEVVIEPFRGARDLIVTIPGISTNVADVIIAETGADMTRFPTAGHLASWAGTCPGSNESAGRIKSTHTRPGNPYLKGALGVAAMSASRSKNTYLAAKFRRIASRRGPIKAVVALEHAMLVAVWNMLDTGTFYGDPGEDFFTRLNPDRAKSRALEQLRKMGYAVTLSPLAASA

SEQ ID NO: 122284 - protein, 394 aa, unidentified
MAFKIFRKNCCGLDVHKTWIYACMGITDTNGRTEYKQARFSSFTKGLQELADWLAKYDCNDVCMESTGKFWIPVFNILEKTCWVTLAYPKYTKPQKGNKTDHKDAKWICDLYMCDMVNPSFIPPPDIRQLRDLMRYRSKLTNIMTSEKNRALNCLTVSNLKLDDVFSDVFGKSSRSVIRYILEHPGETFQVAPFIDRRCKYPVEEIQAVIDGTISHQQAVKLRECLQHLDELEVHKTNVEKEILCLVQQYPYQLELLQTVLGFSGNIMTAIALISEIGADMSVFPSAKHLVSWAGCCPRNDQSSKKVKSTRISRAGVYLKPLLVQVAIQPFTANADKLSAAGALEIRCQICDGRFLSMWAALFIFLGCPLSPCPKNLHVHNGRIVILASVAWIF

SEQ ID NO: 122285 - protein, 475 aa, unidentified
MNLKGTKKKNQVSNANIFEQQELLKKIEVVRENLTASTWHELETKGKFDKNAKLSFICDDMLILGCDVGSETHYLRAIDTRGRELSKSAFSFSNNADGFSKAKEWAVKIAAEYDKKQIVLGLEPTGHYWFCLATWMISNGLSVVQVNPYAVKQTKELEDNSQLKDDAKDPKLIANLVKDGNFGMPYLPEQLYADLRRLSMFRDQLNEDRIRSINRLHRELKIYFPEYKEALGKTEGTFSLELLKQAPFPDDLAALKEDGIRQIWHNAKLRGRGYSRAGEILEYAKASVGIREGKETGKLVVQWFVQKILELDAELALIETQINQKCLEIPHTDKVLEICGIGENTLSGMVAEMGDISRFDDVKEIQKLSGLGLVASSSGKHKGETRISHRGRKRLRYWLFQAAKSAVAHAEEFKELHVYYTTREQNPLKKMQSLIAIACKLLRIIFTILKKGIKYDPRKMLKDIRRESRQESLAA

SEQ ID NO: 122286 - protein, 347 aa, unidentified
MRFYSGNHRYYCGVDLHARTMYLCLTDHQGTVRLHERVDCTPEAFLEAVEPYTDDLVVCAECIFCWYWLADLCAAHNITFILAHALYLKAIHGAKTKNDRIDSETLVVLLRGGSIPYAYVYPPAMRATRDLLRRRLFFTRKRSELLTHVRNTFHQYNLPAPKGTLLTQKSRVQIPACFDDPIVRTSVEADLELSAAYDGIIRDLEKTVRRQAGTHDAHSLHVLQTTPGIGRILGLTILYEIHTIDRFPRVQDFSSYARLVKATRESAGKRVGTGGAKMGNAHLKWAYSEAAVCFLHNNPRGKQHIKRLRNRYGKGKALSILAAKLGRANYFMLKQKRAFDMDRFFPN

SEQ ID NO: 122287 - protein, 408 aa, unidentified
MNPLFVGIDVSSRNNVAYLMKSDGSKHSSFSVQNNLGGAKMLSEKIVSALRSMQLERVVIGLEATSIYGDSLVYALWEDGSLGRFQRKIHVLNPKQVKKFKEAYPDLPKNDFVDAFVIADHLRFGRIAKEVYMDDYRYQALRTLTRARFDVIQNLTREKQRFANYLFLKCSGMAQDKDIPNTSATTIALMEHFETVDDLANANLEELTAFITETGRGRFADPDATAKAVQAAAKGSYRLPKTVNDTVNQAMSVSIASMRALKEQVKVLEKAIEQQFEIIPNTLTSVPGIGKVYSAGIIAEIGDIHRFESQASVAKYAGLVWNRNQSGDFEAEHSRMIKSGNRYLRYYLLEAANSVRRCDSEFRRYYDLKFKEVNKYQHKRALALTARKLVRLVFRLLKDNRLYIPPGG

SEQ ID NO: 122288 - protein, 350 aa, unidentified
MELHTIGIDLGKTVFHLVGLNLRGEVVVRKKLSRKQLLHFTANLRAERIGMEAYGGSHFLGRALREQGHELRLIPAQYVKPYVKTNKSDYIDAESIAEAVGRPTMRFVPIKSDDQLDMQSLHRVRERWIMHRTAVVNQIRGLLLERGITVRKGRCHLDAALPGLLEDASMKLSGAVRLLLAQLKQELDQLTIRPEEADALVQKTAQESEVCRRLDAIPGIGPLTAPALIAAIGNGATFRKGREFAAWVGLVPREYSTGGKQKLLGISKRGNSYLRRLFVQGARAVLQFREKQSSGLRAWLTQLISRTHYNVAGVALANKLARIAWAVLAKEEDYRPPVLGDSTAVGLACR

SEQ ID NO: 122289 - protein, 345 aa, unidentified
MTTITIGLDLGDRWSEACVLDADGTVRATRRVPTTAPGLTRWFATQPGSRVVLEVGTHSPWVSRLLRRLGHEVLVANAHQLRLIYASPRKSDQVDAETLARLGRLDPALLKPIRHRGAQAQADLAQVRARDCLARARAQLINHVRGAVKSQGERLPASSAPAFAPRAAPRVPEGLRPALEPLLQVIAALTQQIRGMERSLAQMAAQRYPETARLQQVSGVGPLIALAYVLTLEDPHRFARSRAVGAYLGLCPRQRDSGSARPQLRITKGGDPLLRRLLVTGAHYILGPFGPDCELRRWGQRLAARGGKNAKKRAVVAVARKLAVLLHRLWVSGARYEPLRSGLAA

SEQ ID NO: 122290 - protein, 407 aa, unidentified
MEVLYPRCAGLDVHKDVVVACVRCVSAPVQQEVRSFRTTTTGLLDLAEWLNSCSCTHVAMEATGVYWKPVWHILEEDFQLVLANAAHIKNVPGRKTDVNDATWIADLLAHGLIRSSFVPPAAIQELRDLTRTRKQLVREMSQHSLRIQKTLEDANLKLGSVLSNVLGRSGVAMLEAIIQGETDPEKLADLAQGNARKKRAELIEALRGRVTAHHRTILKFHLNLIRAIQKTLEEVDAAVGKALTSIQERAQLLTTMPGISDIAAQVMVAEIGVDMTRFPDPGHLISWAGLCPRNDESAGKRRSTRVRKGAPWLKTTLVTAAWAAVRTKNSYLQAQFLRIKSRRGAKKAILAVAASMLTAAFFMLRDGVAYKDLGADHFSRHDKTKTIQRLLRRLSDLGCTVAMPEPA

SEQ ID NO: 122291 - protein, 408 aa, unidentified
MADKIAGIDVHKKVLMVVVMDTRTPEEKPERRRFATMPSELRRLSNWLQAQGVEEAVMESTAQYWRSVWMELEPHMCLHLAQAFSNRAPRGRKHDFKDAERLARRLIAKELILSFVPDGEQRIWRNLSRMKLQLVRDRVRLRSQIECLLEEMRIKLSVVVTDLLGSSGIRILHALAQGETDAKRLALLGDERLKCSEEQLIEALTGRTHPVHAQMLMLQLERLRLFDEQITKLNNLLAQAMMPHQDAVIRLAEVPGLGIDSAQQVIAEVGVTAATFSSAAEFTSWVGTCPGREESAEKNSSSRSAKGNKYMRRVLNQAAHAAARSKGTHFQAVFRRLLPRLGYQSAVWAIAHRICRIVWKILHEGVSYIEQGTQPEPKLLIHRAQYLAKQLRKFGYTVQITPAGRAPA

SEQ ID NO: 122292 - protein, 307 aa, unidentified
MFVGIDVSKNRLDVHLRPSGDAFAVPRDGEGVEALAVRLDEIAPELVVIEATGGFETVVAAGLAAAGLPLAVVNPRQIRAFARAVGQLAKTDPLDAAVIAHFAEAVRPEPRPVPDAAARALGELVARRRQIVEMMVAERNRRRLMTQKKAIRTVERVLDTLQAQLSDIENEIDGAIRGTPAWRDKEDLLISVPGIGPKIARTLIAELPELGQLDRRSLAALAGIAPFNRDSGKMRGRRAIAGGRAPVRSALYMAVLVSIRHNMPLAETYDRLVQAGKPAKVAIVACMRKLLGILNAILRDQTPWQNN

SEQ ID NO: 122293 - protein, 351 aa, unidentified
MIIIGVDYHPSSQQIAFMDQETGECGERELNHSDGEAERFYRELKERGVGVRVGMEATGHARWFERLLAELGFELWIGDPAEIKTKRVRKQKTDREDARLMLRLLLENRFPRIWVPSPENRDLRQLLWHRHRLVQMRTRIMNQLQAVAMNEGYRWKKKLFGQQGRALLEKLSLAPWASRRRQELLELLDQLNPKIAELTAAVEREANKRPEVVRLMTHPGVGPITGVAYVLVIGTPDRFPCGKKIGSYTGLIPCEDSSAGRQRLGHISKQGNTLLRFLLVEAAQAAARCDADWRRRYMHLMMRREKGIAKVAMARKLAVRLYWMWRNNWQYSQLVEFGSNAGKLGIVHGMK

SEQ ID NO: 122294 - protein, 331 aa, unidentified
MDQRNYVGIDVSARSLEVALVGAERRSATATFANTSTGHRQLIKWATKRGRLAQVCLEATGVYGLAVAFALHHHPKTEVMVVNPKAIKNYAGATMQRAKTDAVDAQLILDYGRRMPFARWQPPSDEVLQLQAITRRISQLKVELNREANRLDAEDYKVATTDFIERDIQVNLRHLNRRMVRLEKEAVALVLSVPHLSMLFQRLLSIPGIGETSALRLLAELSVLPEGMKPPQWVAHAGLDPRPHESGQSVHRPRAITKAGNKYLRAALYMPDLVAIRHQPNVKAFYDQLIDAGKKPLQAITAVMRKLLHAIWGVWKHDQDFDGQKFYKIAI

SEQ ID NO: 122295 - protein, 316 aa, unidentified
MKEEKTFIGIDVSKEKLDVGVRPQVDFMTFANTEDGISLMTDFVKSKQPELIVLEATGGLEMAALRSLVVAKLPAVCVNPRQVRDFAKAMGVLAKTDKIDAHVIARFADSVRPEIRPLKTEETEMLDAFNTRRSQIIIMLTAEKNRLTTASKWTKKDVEKSIKGLEKALVKINREVENLIKKSPHWRHMDKILQSVPSIGPVMSLTILADLPEIGTMNRRQIAALVGVAPLNRDSGKYKGRRAIWGGRARIRSVLYMCAVSGICHNPKIKAFYNRLISSGKKHKVAITACMRKLMIILMQAVMATLCFFPELINLL

SEQ ID NO: 122296 - protein, 361 aa, unidentified
MEAGMAKLNRVQDVCTIGIDLGDRSSEICVLDRVSGEVMERGQIVTTPMSLRKRFAGLAPTTIVIEVGTHSPWVSRLLQECGHRVLVANAGKIRLIYQNQKKTDRTDAEWLARLGRLDERLLSPMQHRSEPTQADLAMLRSRAALVAARTGLVNHVRGAVKALGARLTKCSTSSFHRRAATGIPDVLRPALEPVLTMIEALTYQIAQMERALEQLAAHKYPHIKLVTQVSGMGTLTGLCFVLTIEDPHRFHRNRSIGPYIGLVPRRDQSGDSDPQLGITGAGDTQLRSLLVQSAHYILGPFGPDSDLRRWGLALTRRGGKNTKRRAVVAVARRLAVLCLSLWKSAQVYEPLRETRLAGVTK

SEQ ID NO: 122297 - protein, 415 aa, unidentified
MLKIVYPICCGLDVHKDFVYACIATSVNGVTTYKSHRFSTFTKGIRELLSWLLEHNCKDVCMESTGKYWIPVYNILETDCKIVLAHPKYVKAIRGKKTDKKDAKWIADIFKHDLVSGSFIPPADIRQLRDLVRYHTKLTNFTTGEKNRAQNCLTVSNLKLDSVFSDVFGKASSNIIGHILANPSEKLSDVSAFRTKHMKATDDAILEAIDGEFCPEQAEKLRIIREHMSNLDLCKLNLQSLILTTAEKYISEIELVCTVPGISTFSAISVIGEIGVDMSVFPTSKQLCSWAGLTPQNDQSAGKKKTTRISRAGACIKPLLVQCALAAIKAKNKHPEIFNRYSALKKRRGHKKAIIAIARMLLTAIYNILKKREPYNPELYRNSDTTPEHRNVTIEEAVFILQRQGYIISSPTSVG

SEQ ID NO: 122298 - protein, 403 aa, unidentified
MTIFVGLDWGGSSHAVCIVDAGGKVLDRFVVAHDRDGLADLVARLRRHGRPEETPVVIERPSGLIVDVLIEAGFVVTPVHPNVVKACRPRYRAVAAKSDPGDAYILADILRTDGHRLTPLKPQSDAIKALRALVRGRDDLVATRLVLANQLRALLESFWPGAASLFADIASPIALAFLQRYPTPESAARLGEKRMAAFLAQNQYCGRRSVADVLGRLRAAPTTMAAEAEADAKGELARAIAAALESIVTQIAKLSSRIEHAVAELPEGRIVMSFPRAGKICAAQITAELGDVRARFQSQEHLAAEAGVAPVTYQSGKSRSVTWRWACNKRLRAALTCFADNSRHASPWAAKLYQDARKRGCRHPHAVRILARAWLRILWRAWQDGTPYDPSKHTAAYAMLAKG

SEQ ID NO: 122299 - protein, 371 aa, unidentified
MYIVGIDIGKNHHEASIVSPEGKQIGRSLRFATTHKGADSLMSFIFKNIGNSPCVFGMEATGHYWYPIYSFLKAKGYTIYVINPIQSDSLRKMYIRQTKNDSIDSFLIAEVIRFGQFGTTSMADENILAMRQLCRYRDSVISSRTEIKLRIGTIMEQIFPEYEKQFSSLWVSTSMGILEKYLTPENIENAPIDELFEIIKDKSHNRLTRAKAISIKEAAADTFGIKIAQDAFSFQLKQLIDRMNFLDKQIEALDCQILEYYKNFDCYLHTIPGTGMIAAATILAEIGDINRFKSSSALVAFAGIDPTVRQSGEFSSTHNHMSKRGSPYLRHAIFLAATARSFHNSPLNAYYKKKRDQGKHHLTATGAVARL

SEQ ID NO: 122300 - protein, 320 aa, unidentified
MRNTVGLDISKLTFDATAIVGNAEYSAKFDNDSKGLDQFSDRLKSLGCQNLHICMEATGNYYEEVADYFAQYYSVYVVNPLKISKYAESRFKRTKTGKQDAKLIAQYCRSAQESELVKRQKPTDEQYRLSRMIAAYAQIKSECAAMKNRHHAAKDEEAAKAYAQIIKAMNEQLEVLKEKIKEQTEKPNCKEGVKRLETIPAIGRMTAAVLFHHLTSSKFETSNKFAAFAGLSPQQKESGTSVRGKGKLTKFGNRKLRAVLFMPAMVAYRIRAFPGFIKRLEEKKKPKKVIIAALMRKLAVIAYHVHKKGGDYDPSRYKSA

SEQ ID NO: 122301 - protein, 388 aa, unidentified
MQVLYERCAGVDVGKDVIAVAVRLPGDGPDGRQTVKRMFKTFYGVLREAAGWLSSLGVTHVAMEATGICSMPVCHALLEHGNFGQVLVCNAGHVKNVPGRKSDLADAEWLAHLLECGLLRGSFIPPTAIKAARDVLRYRTKVVQSRTSEVQRLGSVLQDAGIKIDSVASSIAAKSGLAMIEALIDGERRPQVQADLAKGKMRVKIPDLELALEGRFGGHHALMCRLHLDHIGLLDEMIARLDAQVEAMMAPFRAERDLLITIPGTGALAAAAIISEIGTNMPGFFPDAAHLASRAGICPGTHEPAGKRRSGKRRHGKRAPAAGPGGKRPGGGPPPGLPQVPLPPARHEMGRLPQPHRQEESDHRRRPRDASHHLARPGRRRPLRRAGC

SEQ ID NO: 122302 - protein, 402 aa, unidentified
MNCVGIDVSKGKSTIAVMRPFGEVVVSPFEVCHTVNELSELARQLKSLDGETRVVMESTGNYHAPVAWLLHDAGLYVSVVNAMLVHDYGNNSLRRAKTDKKDAVKLANYGLDHWLTLPRYIPEEDTRLMLKICYRQYQQYSKVQTMLKNNLISLLDTTFPDANRLFTSPPRADGSEKWVDFVATFWHCECVCGRSEKAFTTQYQKWCRKHGYNFSEDKALDIYASACRHFGVIPKTDTAKLLVEQAISQLQTTSSALAALKQEMQSLAASLPEYPVVMEMFGVGPTLGPQLMAEIGDVRRFHSKKALVAFAGIDAPPYQSGQIDVRSRSISKRGSASLRRTLFLVMGVLLQCAPMDEPVYQFMDKKRSEGKPYRVYMMASANKFLRIYYASVKAYLDSLEHD

SEQ ID NO: 122303 - protein, 316 aa, unidentified
MKTQVFVGLDVSKQHLDVAVRPQGRHFVTPNNDRGIKQLVKRLAALKPQLIVLEASGGYEFLATAALAEAQLPVALINPLAVRKFAGATGKLAKTDKIDAQVLAHFAEALRPEPRPLPDQAQQLLKAALQRRLQVVKMIGQEKNRLEKTFIPALRQDIQAHLTWLIQRLKQLDRDLSDQIRRSSLWRDRDRLLRTIPGIGPSVSRAVIAQLPEAGTLPGKKAAALVGVAPYNRDSGRFRGKRMIRGGRSYLRRMLYMAAVVASRWNPVIRAFYQRLLAAGKPKKLALTACMRKLVLILNAMVKNNQPWNQFITQVP

SEQ ID NO: 122304 - protein, 362 aa, unidentified
MRKIISKGTAKKENGVVMGIDLGDRFSQYAVIDGKGVIIEEGRVPTVSEGFTKLLGARQPMRVVIETGTPSPWVSRLVASFGHEVVVANSRKVKLISQSKNKRDRVDARMLARLGRADVELLSPVRHRSELTQRRRAWLLARDAAVQARTQLINHTRGIVKSLGQRLPSCSAESFVKKAVPSIPQTLQAALSPLVPVIEALTNAIRQYDQQLAALSREHYPITERLQQVAGVGPITALAYVLTLEDPGRFRGSRSVGAYLGLVPGTHESGEQVPQMHITKQGDVMMRRLLVNAAQYILGAFGPDCDLRRHGLRIAERGGKIAKKRAVVAVARKLAVLLHKLWTDQVDYDPFFVSKRLQSHAA

SEQ ID NO: 122305 - protein, 375 aa, unidentified
MGERNTTDVGLDTSKNSIQVAMLLPGGDKAVEWEIANEPRAVRRMAKRLKREAVGELRVGYEAGPCGYVLQRQLRELDVNCVVVAPSLIPVKPGDRVKTNRRDAKKLAVMLRAGALTEVHPPTPEEESVRDLCRCRDDIREDLIRARHRLGKMLLRRGWTYPGKAWNDPHRRWLRNLALEHDADRAVFDDYLRAIEHLEERLCAIEITIEATSHREPYREPVAWLRCFRGIDMVTAMSLVAELHDFGRFQSARELMSYLGLVPSENSTGDRQRRGAITKTGNKQARRLLIEASWHYRHKPAVGQKLRKRREGQPGWVIALADRAQARLHRRYWRLLTHGKAHNKAVTAVARELSGFLWATLREHGAAKRSGASVG

SEQ ID NO: 122306 - protein, 343 aa, unidentified
MEKSLFIGIDFSKKTFDVSLIDGNNLNGIPGYKQFDNTKEGCNQLLKWVKLWSKIPVSEWLFCGEHTGLYSVLLSEFLIKKNLFVWLENPLQIKLSTGIKRDKNDKVDSREIALYALRFQDKAKESQLSDKSLKSLELLLGFRDRLIGNKHALLVSAAELRTVLNRDVTARYIYEQSQKDIERINKEIKCVEAKMKEVVDSNDAIKETYEVVSSIKGVALINTVAIIVATKNFSRFENSRQFACYAGMAPFGKQSGTSIKTGPHVSHLANKRIKTLLTQAAQCAIRYNSDLKQYYTKKVAEGKNKWVALNNVRNKLIHCIFALVREKQLYQEGYLQHLGKSIA

SEQ ID NO: 122307 - protein, 432 aa, unidentified
MTIVPPTSRLLALQLFRERLESASRFNQAGAIEKAAQAVVPVTRSTSRGLEPASGPRDAVTMTAMQRAPLVKSWVLNGTNHQEAHEMLYAGLDLSRQKLDVHILDETGQTVELLAVRPDADALRTLAERIGRYGQPVEAAIESMNGARFVHDTLERLGWDVEIADAAKARGLAPLAAKTDKIDARVLAELARRELVPAIWLPDPSVRAERERARFRLYLVRYRTSLKNRIHATLIAFGQSVPVSDLFGMRGRELLAAMPIPEPWATTLTTSLRLVDELETQIDEIEAELRAMGAHHRYVPLLMTVPGVGWVLAYTIAAEIGDIGRFAGPKRLTGYTGLCPRVYQSGLSDRRGPLAKTGPKYLRWALIEAAATASRNPHYHDRYERTKRRLGKQRGSKVARVELARELAGAIWYILTRQEPFRAGGPTSGLVA

SEQ ID NO: 122308 - protein, 292 aa, unidentified
MLIIGCDYHPSVQQIAWVDTETGECGERRLTHRGGEAEQFYRELKKKGISVRVGMEATGHSRWFERLLAELNDELWVGDPAQIRAKRVRKQKNDRRDAEHLLKLMLENNFPRIWVPTPENRDVRQLVLHRHRLVGMRTRVLNQLQAIAMNEGVRRKRGLWTEKGRAQLESLPLPPWTTRRRQELLELLDRFDPSIDQLSQAIVQEAARVPEVQRLQTHPGVGPITALAFVLVLGTPCRFGCGKQVASYLGLIPCEGSSADNWRLGHISKQGNALLRFLLGQAAQSVARSEEQ

SEQ ID NO: 122309 - protein, 311 aa, unidentified
MNATDVFIGMDVSKDTLDVAVRPTGEEMSFANTEDGIGVMRDFIQSFSPRLIVLEATGGWEAVAVSALAEKGLPVVVVNPRHVRNFAKATGLLAKTDKIDARTIARFAEAVKPEVRPLKDEEAQRLDAFLARRRQLLQMSTAEKNRLVLAPRWTKKDIQAHIEWLEKEVDKVNRELHKLIQKSSLWRERDEILQSVKGVGPAMSITLISDLPELGALSRKKIAALVGIAPLNRDSGKYRGRRIIWGGRSQIRVVLYMAARAAIRFNPVIRAFAERLKKAGKPYKVVVTACMRKLLTILNAMVKNGTRWQAA

SEQ ID NO: 122310 - protein, 318 aa, unidentified
MLSKKKTNNIGIDISKQLLELAVHESDFRYRCPNRASAFAELVAELIALRPARIVLEATGGLEKPVVAALHAAHLPVVVVNPRQVRAFAKAIGQLAKTDRLDAAVLAHFGAAIKPPLRPLKAKEEQELEALMGRRGQLVDMLVAEKNRRHSATNEAVRETIKEHIDWLEDRIAEIDEQLQARLVSSAAWQNKDAILRSVPGIGPVVSFSLLADLPELGTLNRQRISKLVGLAPLNCDSGQQRGMRHIFGGRARVRSMLYMAALTALRFNPVIKEFYQRLVGKGKPHKVALTACMRKLLSIVNLMVRNQTSWKTDPVSA

SEQ ID NO: 122311 - protein, 387 aa, unidentified
MQASTMDTRTAGHCGTIFVAIELSQRSWLVTLRSPDKDKMSRHKLEGGDHAELLALVGRVRERAARALGAVPAVVSRYEAGYDGFWLHRLLLAAGITNYVFDPASIAVDQRARRVKTDRIDGEKMLRTLMAYLRGEPQVVRIVRVPAPEQEDARRASRERGRLIKEQTAHTTRIKALLRLLGMAVGNPRRRDWLNWLAAQRDWQGQAVPPQMLAEIKYEHARLMLVREQLEGLAQASAQADPAPAAAQMTERSELLLRLKCLGPAFATTLASEVFYKDFRNRREVASYFGLTPSPWQSGGIDRDQGISKAGNPRARCAAIELSWLWLRHQPESALTRWFRSRTHNNASKRNKRIAIVALARKLMVALWRYLTTGLVPDGALLKAVKA

SEQ ID NO: 122312 - protein, 352 aa, unidentified
MEQFIGCDAHKKFSVFVAVNEKGQAGDALRVMHDRQLYREFLARLPPHSAIAVEATGHYSWIVDEMESAGHLPKLANALEAKRRMALTKKTDKLDARGLAILLRNGTLPEVWIPPRELRDQRELLRLRIFLVHLRTRVKNRIHGTLARHNIQVPGADLFGVTARLQLGARLPELPPHSREAIEQELATLDFLETQIEAAEQRLEMIMTVSVEADLLKTLPCVGKILSMVLMLEIGRVDRFPTAAHLASYAGLVPRVHSSGGHTRMGQVCANVNRNLKWAFVETGNLIVINQRGLAGTHAVRLYHRIKRAKNHQKAVVAVARHLAEAAWWVLTKQEVYREPQGPQQALSSTHG

SEQ ID NO: 122313 - protein, 370 aa, unidentified
MLNTTTFVGLDVHARSIKAVALDAMTGEVRSATFGYDAAEVAGWVSSVDPSAKCVYESGVTGFDLQKRLASMGIDCVVGAVSKMIKPPADRKRKNDRNDAEFLARMLSVGNVVEVWVPDDGCEAARDLVRALDDAREDLKRCKQRLSKFLLRHGCVFSETTPTGRRKGSWTAAHWAWIKSISFPEKADNDVLAYYVDAVRQAMEDKARLERLVEAEASKPRWKRRIDSVRCLKGIDVTSAADLVFEAGEFSRFKSARSFAAWLGLTPSEHSSGESARQGGITKAGNKHLRRVLVESAWHYLGCSPRSKDLAKGQVPDPAERRHAAKGVRRLVERRRAMLERGVHKNKANVATARELACWCWAVGRMIENG

SEQ ID NO: 122314 - protein, 344 aa, unidentified
MSVYVGIDVHRKRSQVAVIDQSGEVLANRNVPNGVEPILKVIGGLPPGTPAAFEAAFGTGWLVELLKDYGFDPHLVHPLRCKAIASARLKNDKVDAAILGQLLRADLLPEAWIAPPEVRQLRALLRHRAQLVRLRTLLRNRIHAVLADYGHDRPSGCWSGPGRAWMASLQLPAVSREVVDDDLALIDALETVTGRLDWEIHQRARSDPRVKVLTQLPGVGPFTALVILAEVGDISRFGSARKLASWAGLTPTVRGSDRVAHYGHISKQGSVWLRWVLCEAAQTAKRSPQFAAGYQAIATRRGKKIATTAVARKLLTRAWHLLTDAEHAAATQPAAASAPQAGTR

SEQ ID NO: 122315 - protein, 494 aa, unidentified
MATGESTTTQQAKQRKAYRRRKARGQARAARAQEAEAARVEGLPVTQAHAAGIDIGSRSHWVCVGCCGNDGDDLIQEFPAHTEGLHQILAYLRQHGVVTVALESSGVYWIPLYELLEANGFEVLLVDPSYTKQVKGRPKTDRRDCQWIYRLPGVGLLAGAFRLDEKTCQLRSYLRQRANLIRYAGQHIQHMEKALEQMNLKLTESVSDITGVTGRAIIQAILKGTRDPHKLAKLRNRRCKASEAEIAQALNGSYRDEHLFALRQAYEAWQFYQKQVGALEEQIELQLGRMKQDRALRPLKPRPGNGGRKPNQPRFDVRSALYYVVGIDLTELEGIGEQTALTIISEIGPEVSRFATVKHFCSWLGLCPQLQKTGGRVRSSRTRPGVNRAAVAFRLAANGLYASQGALGAFLRRQKARLGAPQAVTATAHKLARIVYLALKHGLAYVRQSQEEYEVRLREQQVKAVKRKARQLGLEVIDKQASAETADAETAARC

SEQ ID NO: 122316 - protein, 392 aa, unidentified
MVVSVGVDVSKDKHDCFIVSSEGEVLADVFTIPNTMDGFHYLLQRIRHCTAPQDKIKVGLEATGHYSYNLLGFLLDNGLTTYVLNPLHTNLYRKSLSLRKTKTDRVDARTIASMLLSDAGLKPYTDAAYHNEELKSLTRYRFDKVKERAKLKSSIARLVCILFPELEKLVPSLHIASVYALLEEFPGAKQVAAAHLTRLKALLETASNGHYKRDMALEIRNAAKNSIGSQMPAKSLELQHTIRLIRELDREIDEIEEQIQSIMDELHSPITTIPGLGFRMAAMILAEVGDFTRFDSPDKLLAYAGMSPSTYQSGQLKNCYPHMEKRGSRYLRYALYNATKYVCHWDPAFADYLAKKRAEGKHYNIAISHAAKKLVRLIFAMEKSRQPYCSAA

SEQ ID NO: 122317 - protein, 417 aa, unidentified
MLKIVYRNCAGIDVHKKIIVVTIAKTNEQDITEYQTKSFLTFTEDLIKCRNWLLSNNTKDVCMESTGKYWIPVFNILEKDCNCVITHPKYVRTILGKKTDKKDSVWIADIFKHGLVEPSFMPPEDIRQLRDLMRYRNKLVYNRTGEKNRFQNSLTVSNVQIANVLTDVFGKTSQSILKLMLEQPNLTLEDIKPLLRKNLKSSPEDILKSINATFDECQSSKMAICLKHYDSINECIEALEEQILKIAIKFKTEINLLLTVPGIKELSAIFIIAEIGTNMNVFVDDKHLISWAGLSPRCNESARKKKSVKITKAGVYIKPLLVQCALCAIKDKTCPYIKARYESLKRRRGHKKAIIAIARLLLTSIYHILNTGEVFDYERFDKLLNRNFKSQQKAKNTPEEMISYLTSLGYEVTMQNT

SEQ ID NO: 122318 - protein, 407 aa, unidentified
MRQIYERCCGLDVHKKTVVACRVTPEGRKTRTFGTMTDELIQLREWLLEGGVTHVAMESTGVYWKPVFNLLEDHGMELLVVNARHVKAVPGRKTDVKDAEWLAELLEHGLLKASFIPNRENRERRELVRYRRSLVEQRAHLVQRIQKLLEGANIKLGDVASDVMGVSGRAMLQALAEGIDDPAAVAGMAKTALRNKIPELERALTGSVGHHQRFLLRSQFRLLESIEAEVASLDEEVAERMHPFQVALERLDEIPGIGRRAAEQILVETGTDMSRFPTSAHFASWARVCPGNNESAGKRQNTSIGGGNRWLRNALLEAAWSVAHSRKPTFFTARYRRIAARRGKKRAAIATAHSLLIAVYHVLKEGVVFQDLGPTYFERRNREAIARRSIHRLEALGYNVKVEEMPA

SEQ ID NO: 122319 - protein, 405 aa, unidentified
MDAATPGRVAGLDWASRLHAVCVLEADGQVRARFEVPHTGKDLRGLTKRLTGLGVTQIAIERPDGPVVDALLAAGLAVVVIPGRQVKHLRGRYGTAGNKDDRFDAYVLADVLRTDWRRLDRLHPDSPETAALRAISRARKSLVATRVALANELRANCEIAFPAAVGLFADIDSPVSLTFLRRFPCATQAAWLTPARLGAFLRRIGYCGRTPIDQLYQRLADAPQGLTDTHGQARATVTLGLVTALQAIRAQIEELDGEITERLAVHADAHIFTSLPRSGQVRAAALLAEIGDCRQRFPDVASLECLAGAAPSTRQSGQHKTVTFRYACDKKLRNAVMDFAGDSRLANPWAAHLYNQAIARGHRHPHAVRILARAWLRVIWRCWQDHTAYDPTRHGAYQRLITQEG

SEQ ID NO: 122320 - protein, 355 aa, unidentified
MSQEKYIGMDVHAATISAAVKNAEGKLLMECVLETKAATILEFIQGLRGTLALTFEEGTLAAWLHDLLQPHVSRLVVCDPRKNALMRDGNQNDRADARNLAELLRTNQVKAVYHGKNGIRALKELGRSYLTLTKDSTRVMNRIKSVYRSWAIPCAGTSVYSRRHRAQWLAKLVEPAVRIRAEHLYQQLDSLEPVRQAARRELLRESRKHAAVKLLRQIPSIGPIRSALLVALLQTPHRFRTKRQLWAYSGFAVQTYDSGEFRIVRGKLQRNRERITVRGLNHNHNHDLKNLLKGAAVSAIERPGPLQDFYAALVEKGIRPSMARLTLARKIAAITLIMWKKGVSFDPKQLQRQAA

SEQ ID NO: 122321 - protein, 449 aa, unidentified
MKKRVSLEVVNPNAAGIDVGSKSHFVAVGQTKNDVKEFGVFNEDLQEICAWLTEHQIETVAMESTGTYWQSLFTVLQEAGFRVILCNGKFTKNIKGKKTDVQDCQWIQKLHTIGLLSGSFLPDQATEQLRTYCRHRSNLIDNAADTTRKMQKYLRLLNLRLDVVVKDITGLTGLKIINAICAGETCPQKLASFRNGNCKKSEEEIAKALHTNGRQDYLFALKHEYFMYQTLQKSIEECDVQIKSMLDEQINSDENKKQLYIDKKVHKRVNKNTPKNIDLNLMAYQYFDGVDLFAIEGVSHATVLSIISEVGLEGFFKFPTGKLMTAWARLVPNNKISGGKVLSHKVPKGSTRLKIALRNAAQAIGQLNGTPLSDFFKRIHCRKGPVAAITATARKLLVIIYSMVTKKQPYRNEHNYEFLDQKRKRKVQEMKKLIHKFNVSTEELGLQFQ

SEQ ID NO: 122322 - protein, 343 aa, unidentified
MQAITTIGLDLAKSVFQVHAVDAKGNVVLRRQIKRRYVLAFFQKLPPCLVGIEACASAHHWSRQLQALGHTVRLMPPAYVTPYVKRHKNDAIDAEAICEAVTRPNMRFVATKTREQQSCLTLHRTRHLLIRQQTSVINAIRAHLAEFGIVAPVGRNGVDQLLGIVADASDKRLPELARACVAALGTQLGTLKAQILQFDRLIMAWHRSSEASRRLDDIPGVGPALATALVATVADPRAFRSGRNFSAWIGLVPKQHSSGGKDRLGSISKRGDRYLRFLFVAGALAVIRYAKIHGTKHRPWLTALLARRHTKVAAIALANKIARMTWAIMAKGEHYKEPVALAA

SEQ ID NO: 122323 - protein, 337 aa, unidentified
MEYFAGLDVSMEETHICILNREGELVREGKASSTPKAIAAFLAEGPLCTKAVFEIGRMAPMLFHGLTQLGIPVVCIESRQAYQALKSLAGHKTDRNDARGLAHLARTGFYKPTHVKSLSAHAIRSLIAARKKLVGQRVTTDNQIRGLVVVFGVRLPRALSPAFKDAALSVSDGVPGLHAALRGLFAAREAILAAVAAIDSDIKVMTRKSEVCTRLMTVPGVGPITALAFAAAIDDPTRFKRSRDIGPYLGLVPKRHQSGEVDYTGSISKRGDVRVRTLLYEAANVMLTRYAAPLKLKSWALAIGARSTMRKARVALARRLAIILHAMMRDQTDFQIA

SEQ ID NO: 122324 - protein, 338 aa, unidentified
MALYCGIDLHSRDCWLAILDEKLKVIQESKVGNDIEELIQVLEPYREDMEGVAVESTFNWYWLVDGLGDAGYQMHLVNTWAVKQWEGLKYSDDRHDARWLAHLLALGILPEGYIYPKHERSVRDLLRRRAFLVRKRTSFLLAMRGAFECRTGLRTTSNEVKEWTTEDVESYLDDPTAALGITCLLEPMKALTDQIRTLEKEAYKRARLRDEFAPLLTVWGVGKVLALTMMYEVGEIARFRKVGNFASYCRLVKSARLSAGKRKGSGNPRNGNPYLSWAFSEAAHHAVRYYPPAKKYFQRKMSKTNGIIAIRALAHKLARAAYYVMKDQVDFDPDKVFG

SEQ ID NO: 122325 - protein, 370 aa, unidentified
MEQYTEAFVGIDTAKNKHALAIADPGRDGEIRYLGEIDSAPAAVQRMIRKLAGRYEKLYFCYEAGPTGYGLYRQVRALGHDCIVVAPSLVPKRPGERVKTNRRDAVTLARLLRAGDLTPVWVPDAVHEAVRDLVRARTAASEDLRRKRQQLLSFLLRHGRIYSGRKHWTKMHLHWLAQQKFDHPAQQIVLQDAVDAIEDAATRLRRLDQQVAEIVPSWSMAPVVEAYQAMRGVSFGVAATFVAEIGDLRRFDNPRQLMAFLGLVPSERSTGERVRRAGLTLAGNKRARRVLIEGAWSYRYPARVSQTLQTRLEGLPKTVRAIAWKAQIRLCARYRRLTAAGKKRPLVIAAIAREMAAFLWAIAQHVAPAA

SEQ ID NO: 122326 - protein, 313 aa, unidentified
MSTSSEIFAGIDVSKSHLDLALRHSQKSWRFSNDPEGIRKLTDLLLKHQPTLIVLEATGGYEQATFRSLSTRQLAVAIVNPRRVRDFARANGRLAKTDRIDAHNLAHFAQVVRPHPQPPSTEAKQRLVGFMARRRQLHRMITAEKNRLRNAQPVVQLHLQEHIDWLRNSLKELDAQINDLLQGDPDLKAKADLLCSAPSVGFVTAASLLADCPELGTLDRKKIAALVGVAPMNKDSGRKSGRRRIMGGRAPLRAALYMATLSASRFNPAIQHFYARLLGNGKVKKVALTACMRKLLTMLNAMMRDNKHWNPAL

SEQ ID NO: 122327 - protein, 359 aa, unidentified
MTSMIPVPAHRRVIVGVDTHKHVHVAVAVNDLGAVLDSRSFAADSSGYAQLIDWSLTLGGRLTFGIEGTGSYGAGLTSAVRRRDIGVIEVVRTDRRDRRLRGKSDTLDAENAAKTVLAGTATALPKSADGVVEMIRTIKVAKDVAVKARTSAMITLKQVLVNAPPALREELQPLSRMALIRRCAALRPGQVDDVTAAAKHTLRAIARRWLALDTEITAHEKLLAELTAAAAPDLAAAFAVGPDTAAEMLIVAGDNPDRIRSEAAFARLCGVAPIPASSGMTTRHRLNRGGHRQANAALYRVVIVRMQHHEPTKAYLARRTAEGKSKPEIIRCLKRLLARELWAAMRPLRTPASSPAHAA

SEQ ID NO: 122328 - protein, 398 aa, unidentified
MTESSDYESVQVFIGVDVGKDTHHAVAINRSGKRLFDKALPNDENKLRSLISDLKQHGQILLVVDQPATIGALPVAVARSEGVLVGYLPGLAMRRIADLHAGEAKTDARDAAIIAEAARTLPHALRTLKLADEQIAELSMLCGFDDDLAAQTTQASNRIRGLLTQIHPALERVLGPRLDHPAVLDLLQRYPSPEKLASLGEKKLAAQLCKLAPRLGKRLAADIAQALAEQTVVVPGTNAAAVVLPHLALQLITLRKQRDEVALEVEQRVLAHPLYPVLTSMPGVGVRTAARLLTEVACRAFASAAHLAAYAGLAPVTRRSGSSIRGEHPSRRGNKALKRALFLSAFAALRDPLSRAYYTRKMSQGKRHNQALIALARRRCDVLFAMMRDGTFYTPQAS

SEQ ID NO: 122329 - protein, 387 aa, unidentified
MSKKIVTPAYVTAMERAEADPSTARFWVGLDVGYKNTAVCVVDCDGAIVHQVSMKSSATEIGRYLRKNFKSHVTLIGMESGGLAPHLTTKLRAQGFQVTVLDARQVHRVLSVKRNKTDTNDARGIAEITRTGREYLTEVYVKSNLCFEIRAYLTMRDRLVKQRRETEAMIRGLVRVYGGRIEGGTETAASYRSRAIDQMCLIADTEGIDLRPRVLPLLDLCEGFYVEANRIERELELLAASNPICRRFMEIPGVGTITALSFYSAIEDPTRFRHVDDVAAYLGLTPRVYQSGESLTHGGISKMGNQLTRTHLVGAATVMLSSTKSFSTLKDWGLKLSKRIGFNKAKVALARKLAIIMFSLWRDGTHFMAKAADVPEHRALMQSRLPA

SEQ ID NO: 122330 - protein, 482 aa, unidentified
MAKRKMSTFERLRSGKMNRKERKEWQQRLYAEDAGLEVVHPDAAGIDVGNASHFVAVPPDRDEQPVREFGSWTADLRRMAEWLKRCGIRTVAMQSTGVYWVAVQEILEREGLEVYLVNARGTKNLPGRKSDVQECQWLMKLHTYGLLRNSFHPPEQIRAVRTIWRQRDRLVKEAGREVQQMQKALTTMNVQLANAISDVSGLTGQAIIRAILRGERDPQQLAKLRDYRVAASEAEIAHSLEGNWREDVLFELQQVVDAYDFHQKQIAACDVQLQRYLSALPIRSGPGAGERSPADAPSEKPKKQRKHKLQKNQPVFDLAAELQRTMGVDVTAIDGVDVMTTQVLLSELGPDLSASFPSEDHFASWLELAPRRDISGGKIIRQKSRKSNNRVATALRMAAQSLWRSDSYLGARYRHLKARLGGQKAVKAMARYLACLIYRLLTKGQAYVDRGAAHFESKRTERELLALQRKAAELGMQLVAVS

SEQ ID NO: 122331 - protein, 381 aa, unidentified
MQSIDTWVGIDVSAKTLAAERWRENENREKAREFANDAAGHRELLKWIGKAARVCMEATGVYHLQLALTLAADGVEVMVINPRVAKDFGRALANRSKTDRVDAWTLLEYVRRMEFVAWKAPSAAVRELRELGRRLSELVQAGADEKNRLHAKSAAAISVTVINDVKAHVAQIEKRIKQIEKAAAIVIRGDADLREQFEILTKITGVGRRSAILLLVELAVLDPTMTVKQIVGHAGLDPREYESGTSVQKPPRISKVGNARLRAILYMNAITAIRHDRGARLFFAQLVARGKKRMQAIVAVMRKLLHGIWIVLQRRVPFDSSVLFAASLAKAESSDSAVADNQPEPSDDHPKGRSEAQELRQQLDRRSAEATRLRKKRSKAA

SEQ ID NO: 122332 - protein, 481 aa, unidentified
MGEKKSAPRGKSGHGGKRRGRGVQKTLQVVNPDAAGIDIGAESHYVSVPEDRSGEPVRQFGCYTPQLEEMAGWLIECGIKTVVMEATGVYWIPVFRVLESRGLEVLLVNPKHVKHVPGRKSDVADCQWLRQLHTFGLLRGAFVPPQDVAAMRTYWRQRRTLVEAASREILHMQKALTQMNLHLHVVLSDVTGVSGMKILRAIVAGEHDPVQLAGLAGTQVRASREEIAQALSGHYTGEHLFVLGQALELFDVFQAKIRDCDGQLAIHLSRFEGKAGAGAPPSNPKRSRRVSRRKNEPYFDLRAELWRLTGVDFNRIDGIDSLTAFTVLSETGFDVSAFATEHHYASWMGLCPNNSITGGRVKRRHTRRVINRAADALRIAAQSLWRSKSYLGAYYRRLAARMGAPKAITATAHKLACIMYRAVKYGQQYVDKGEQYLEEQHRKRNLKSLVHRAKDLGYMLVHSETGECLSLTNQPLTRCVS

SEQ ID NO: 122333 - protein, 453 aa, unidentified
MPHAPAPAFDEIQRNVAGIDIAGHADHYVCGPRRDDGNHDIAHFGTTTRELHQLLGWLKERGVVSVAMESTSVYWIPVADLLESAGIKTVLVDTREVRMVPGRKSDVKDCQWLQKLHSCGLLRGGFRPSENIAAIRTILRERENLTGVRTQCIQQMQKSLDQMNVRIHHAVSDIDGKTGLAIVGAIVEGQRDPMTLADLRDPRCRKSREQIAEELTGVWRDEHLFNLAQAYRTLLFIDERIAEYDEKAASMFKALATASGNEPPPPPCKGEKPSQKERRDADEKRALLQLAGFDFTIIPGIGYDTAATVVSEIGTDLSRFPTERHFAAYIGLSPSLGKSAGKNVRQRRRCKNTSRAGLALRMAASTLHRSQTELGAFFRSVARRSDRKTAIKATARRMAHLIYRAVRYGVDYIDRGAEAFEARTRERTLRTVRNLIKSHKINELELKSALMTV

SEQ ID NO: 122334 - protein, 412 aa, unidentified
MSKLRYVGLDVHKDLIVVAVADSGSSPAKLLVQLEWSESRLLTELRKLGPLENLRVCYEAGPTGYGLQRYLAAAKVNCVVIAPALVPQMQGCHIKTDRRDACKLAHFLRSGDLTTIWVPDEQTEALRDLVRARDDARLAERRIRQQLLKFLLRQGRRCPEGMNHWTQAHWTWIRQQQFSSEAQTRVLADAIQTAESAASRIQRLDEDLAECVEGWRSAPLVKNLQAFRGIKLVTAVGLAAEIGDFGRFPRASKLMAFVGLVPRENSSGQTRRQGGLTKAGNHHVRRLLIEAAWQYIGAPLILSQYLVRRREGVPEAVVTIADRALRRLRTKAHKLSLRKKSSTKIAGAVARELAGFVWAAARATTGPETPATPPAKPTTKAGKSKPPSKSQANTGQSSVSPRKRLAAAGATR

SEQ ID NO: 122335 - protein, 347 aa, unidentified
MKHFAGLDVSLDETTVCVVDEAGGIVREARVPSEPEALVAFFRGLGLAMERIGLEACSLAAWLHEGLTSAGLPAVCLETRRAKAAMGAMPNKTDRNDARGIAQIVRTGWFRAVHVKSPACRSWRALLAARRLVLNKMRDLENGVRALLREAGLKLGRPARKELAARVRELVGADAVLSASVEPLLAIVATMAHELARLTRRVLAIVRDEPVCRRLMGVPGVGPLTALAFRATIDRPERFRRSRDVGAHLGLTPKRYQSGETDVQGGISRCGDELARTALYEAAHSLLVRSRRWSSLRAWGMQVARRRGMARARVAVARKLACVLHRMWADDAEFRWGKQETASAVPG

SEQ ID NO: 122336 - protein, 344 aa, unidentified
MTYYAALDVGLHKTAVCIVDEDGAVLAERMIASEVDDLIAFLQDFGEEISIVGLEAGTLTQWLTYGLRDAGYHTVVMEARHVKSALGAMRNKTDRNDARGIAQILRTGWYREVYVKSLESHYTRTLLASRKALLSKCVDLENEVRGLLKVFGIKLRAGLGHGPFDKAAREPIMQNEALAYALMPLLEVRLQLYQAYLELDLRVKRLASNDPVCLLLMTTPGVGAITALTFRAAVDDPRRFRRSRTVAAHFGLTPRRYQSGERDSPGHISKAGDPGVRAALYAAANSIMTRSGKWSSLKAWGMRLQRSKGRKRALVAVARKLAVILHVMWVDGTVFSFTEPEAVQ

SEQ ID NO: 122337 - protein, 345 aa, unidentified
MTEAYDGRQVVGMDLHRQRSVLVRMTEDGRKLETARIANSPAALRAVLARAGENPRVVLEATYGWYWAADTLEAAGAEVHLAHPLGVKAFSYRRVKNDERDCADLADLLRLGRLPEAWIAPPPVRALREVTRYRHKLVGQRTSCKDQVHAVLAKSGIPVTRSDIFGPGGGIWLDGLPLPQPYAGKVASLRALTGVLDGEVARLEEQAAAMLAGDRGYAAIRQLAGIGPVLGAVIAAEIGDITRFRTPGQLASWAGLTPRHYESDTRVIRGHVSKQGSRMLRWAVVEAIQRQPAGTRPRQVKDAIIDRRGAGARGIAKTAAARILLTQVFYGLRDGHVRRAASQAA

SEQ ID NO: 122338 - protein, 344 aa, unidentified
MTYYAGLDVSLRSTHICVIDDEGELLAEGKTYSEVAEIIAFLDDLDVEITEVGLEAGTLTQYLTYGLQFAGFDVVCMEARQVKAALSAMRNKTDKNDARGITQLLRSGWYSRVHVKSIESHQVRALLSSRKAVLTKCIDLEQEIRGLFKVFGIKLPPKLGHGSFDPKVRPLIETDQALSQSLLPMLDARLVLYRTFLTLENRVRNLAKQDRVCQLFMTAPGVGPITALTFKAGVDDPTRFRRSRTVAAHFGLTPRRFQSGEIDFDGHISRAGDANVRSTLYVAANSMLTRSSKWSPLKAWGMKLAKTRGHKKAVIAVARKLAVILHRMWIDDTQFQWSAEAARS

SEQ ID NO: 122339 - protein, 322 aa, unidentified
MATLGIDISKADFHAFLIDGDRKAKHSFPNTAAGFKQLLSWLKNRGVTEISACMEATGSYWEALAIHLYEAGHRVSLVNPRQTKSYAQSELLRTKTDSVDAAMIARFALAHKPEAWEPPPAESRMLQGLVRHLEDLKTTRAQELTRIQTPGLPAFVEQSIQRLIDSLSGQIDEIERALRDHINRHPALKDRYDALRSIKGIGETTASLLMAEMPTIERFSSGKAVGAYAGLSPRLVQSGTSLRKRGKISKTGNSRLRKALFFPAMTAMRFNPVLKAFAQRLRNVGKPRMVIVVAVMRKLLTLAYGVLKSGHGFTPALAGRAA

SEQ ID NO: 122340 - protein, 342 aa, unidentified
MEHYAGIDVSLEYSSVCVVDANGKIVREGKAASEPDALISWLGSLGYKLSRIGLEAGPLSQWLFAAMREAGLAVELLETRHVRKAFEAMPVKSDRNDARGIAQLMRLGWFRPVHCKSIGAQETRSLLTARKLVQSKLRDVENSLRGILRGFGLKVGKTTELKFAGRIKELVAGHPHLEMIAEALLAVHAVLRSEFMAFEKQVRKIARSDTRARLLMSTPAVGPIVALTYTSAIDDPGRFKSSKQVGAHFGLTPKRHQSGETDYTGRISKLGDRSVRTALYEAAHIMLTKPLKGCSALKSWAMRIARRAGMSKAKVALARRLAVIMHRMLVDGKPFNVAVAGA

SEQ ID NO: 122341 - protein, 340 aa, unidentified
MNATTYGLDIAKRVFQMYWVDNQTGEITNRRFRRDELITFLAQRPAGRVALEACGSAHWWARKILALGHNVVLLHAKFIRPFVQTNKTDAADARAIWTAVQQPGMRTVAAKTEDQQAMLGLHRMRSLLIKFRTMEVNQLRGLLYEFGVSFRAGRAAGLAEMRVRIPELEDVLPATMFSGLRDQLARIDRIEQDIEQLERQIGAWHKQEAECQAIAAVPGIGRLTATALVATIGNAKTFRSGREFASFLGLVPRQSGTGGKIQLGPISRRGDPYLRTLLIHGARSVMCHAKVPTPWQKAILERRPANVAAVALANKMARTAWAILARGEAYDRNHVSVRPV

SEQ ID NO: 122342 - protein, 340 aa, unidentified
MKNASTLKRFGQCSGLGIDVSQASLEVCGTENETVWRVELTNTRADIEALARTLHQGNYHGKIVCESTGHHHLLLGLVFADYDLDLRIINPLQSSKHQKSRIRKTKTDQMDGYVLATMCVTERDLPKAAQLRPKQVLMRLKQGQLQALDKQIQRMSRSLATYAKTYQNLSLDPGDSVEMLTDILKQLKAVKRQLEKELEALFIDQANRDDIDRVRALPGFSPLVSGLVSCVFDRQAKSDRSWIAFAGYDVSVRESGTWKGKGKLTKRGNSYIRKRLYCAAWGANMHYPEVHQYYETLKAQGRNHVEALCIIAKKLLRVAYAVLVKGKTYDAEIAFPAPTG

SEQ ID NO: 122343 - protein, 394 aa, unidentified
MEALLECCCGIDVHRDTLQVCILKGLTDTPEVIRAEFKTMQEDLQELVQWLRQYNCNHIAMESTGVYWRPVYEAIEEYHSSYQSLLVVNAHHMRNLPGRKSDIKDSEWIATLLRHGLLSPSFIPDKTIRTLREYSRLYRSFSSEKSRYLNRLEKFLQTHGFKLSSVLSNIYGVSGRRLLYKLAEKGYLVSTDVLEAVDRRVKASKEEIHAAIKGKLVIAERRLLTTLLSKIDQVQNEIEEILAIMKEVATPYVPAVEQLDSIPGVEILAAYMMIAEISANPQQYFSTSAKLCSWAGLSPRNDESEGKVKSRKILHGNPYIKSILCQVAWSAVRVRNSSFAVWFWSHQGKLGKKKAIIAVARKILTLSYKLLQSGEFYDPIVALQAFSSPPLPNS

SEQ ID NO: 122344 - protein, 317 aa, unidentified
MLQGRFIGIDVSKARLDVAFRPGGESFSVSNDSRGIARLIKITKSAEPHCVVLEATGGFELMLLEKLSADSVPVVVVNPRQVRQFARASGRLAKTDTIDAAVLAHFAEVMQPSQRTLPDAKTRELRALLARRRQLVEMITAETNRRAHALELVRRGIAVTVRCLKGQVAALDRELSAFVQEMPAWRRKAELLRTTPGVGPITSATLLAQLPELGTLNRKQIAALVGVAPFNRDSGTMRGQRRIWGGRSQVRTVLYMCTVAALRPNPVIRAFYQRLRAAGKPGHVAVVACMHKLIMILNAMLHQETGWRPPLLVNQVP

SEQ ID NO: 122345 - protein, 407 aa, unidentified
MEVMYPRCAGLDVHAKTVVACVRVATGGKVTYAHQTVATDTRGLLALADWLATFEVTHVAMEATGVYWKPVWHVLEDAFTLVLANAQHVRNVPGRKSDKNDAKWLADLLALGLIRSSFVPPAPIQELRDLTRTRKQLVRELSRHTQRIQKTLEDANVKLTEVISDVLGQSGRAILTALVAGETDPERLIDLTHGLKASRAELVQAVHGRVTPHHRFMIQLHLTQVAALEQGIADLDARIGDALAPFRAAVDLLTTMPGLKTTAAAVIIAEIGVDMSVFPSAGHLISWAGLCPRLDESAGKRRSRRTRQSTPWLKATLVQIAWPASRKKESYFHAQFLRLKSRRGPKKAIVAVAASMLTDVYYMLRDGVEFRDLGNQYFVERDKNRITKRLLQRLRDMGVNVEVKNAA

SEQ ID NO: 122346 - protein, 352 aa, unidentified
MRIIGCDYHPSWQQISWMETNTGETGEMQLQHASGEAERFYRQLPGPVLIGMESTGNCQWFVDLIAALGHELWVGDAAKIRASDPRQQKHDRRDAALILKLLLEGRFPRIWISSGEEKDLRQLLIHRYKLVCIRTQVKNELQHLAMNQGITKKRKLWSKAGEKVLRELPLRPWGSRRREDLFRIREMLNGQLDLLDGAVEEAAQKNEKAKLLMTQPGVGPITSMAFVLTMGDVNRFQRGKQVASYLGLIPREYSSGGKQRFGSISKQGNRFLRMLLVEAAQVAVRCDPQMRNEYLHRCHRKAKGVAKVAAARKLAIRLYWMLRTNKGYPEVVRVESSSRVPLVSASLPVQAS

SEQ ID NO: 122347 - protein, 414 aa, unidentified
MQQIHDRVAGLDVHRDSVVACFRRLGPKGGVVREKERFTTTTAGLHMLGGWLAERDVQLVAMEATGVYWKPVLYALEAQFTVWLCNARHVKKVPGRKTDLSDAEWLADVAAHGMVRPSFVPPLPIRELRELTRYRKTQIDARVAEIQRLEKVLQDAGIKLTSVASKVLTQSGRSMIEALADGERDPAKLAELAKGKMRPKVPALTEALTGHFGEHHAVASRRILAHLDFLQETISALTEQIDARTAAFEAIYTSLLPVPGFDRLTIDVIIAETGADMTRFPTAGDLASWTGVCPGSYESAGKRRNVSTTGGNQWLRRALIESARAAVRTKGSYFGAQYRQIARRRGPNRAAVAVAHSLIELVWHLLSTGEVFKDLGDDYFTARRDPERQARRLVAQLETLGFTVTLEAAPDLAA

SEQ ID NO: 122348 - protein, 465 aa, unidentified
MSTDNKLWRNRKARKELARRLQSESPGLEVVHPHAAGIDVGNGVHYVAVRPDRDAQPVRRFECFTADLHRLADWLQSCGVKSVALQSTGVYWIPLYDILEERGFEVYLVNAQHTKNLPGRKSDVQESQWLLKLHTYGLLNNSFQPPSNVRVLRTYWRQRLQHVTGAATCVQRMQKALTQMNIQLANVISDLSGVTGQLIVRAIVAGERNPWKLAELSHPRIQASRAQIAKSLEGTWRRELIFVLQQELEMYDTYQRRVAECDQELQKHLTVFADRVPPPAKENLSPKKKKKQNKNNPQFNLTDELQRITGVDLTRIDGVDVMVAQTVVSEVGLDMSPWKTEGHFASWLGLCPDNRISGDKVLARGTRHVLNRVATALRLGASTLLRSQTYLGAQYRRLRSKLGAPKAITAMAHRLARLVYRMLKYGQQYVDKGAEYYERRNRQHQFEFLRKKAAQLGLQLTPIRP

SEQ ID NO: 122349 - protein, 389 aa, unidentified
MILVGIDVAKDKHDCFIQTANGKVLFKAFSFANNYEGFEELYAKILSCDDADVRIGLESTGHYSYNLLGFLLSKELPTFVFNPLQTNQFRKSLSLRKTKTDKVDAKTIALMLATESDENAYSLQAYQNEELKSLTRYRADKVSQRSKLKQSLSRLVTILFPELESAVSTVHSNSIYAMLLKYPSAKDVAKSQFHSLVNLLESTSRGKIDKDKAKEIRNLARKSVGVYVSAKVLELRHTIKLIQILDEEVAEIEERIQNHMQELHSPLESIPGISTRLAAVIEAEVGDFQRFSSPDKILAFAGLSPTTYQSGKYTSQNATMEKRGSRYLRCALFLAAHLVGRYSKTFAAYLKKKRDEGKHYFVALSHVAKKLVRVIFHLQRTRKSFSDFA

SEQ ID NO: 122350 - protein, 341 aa, unidentified
MGEVSTIGLDLAKTVFQAHGADASGGVIFRKKLRRDKLLEFFAGQPRCLVAMEACASAHYWAREIGALGHETRLIPPAYVKPFVKRQKNDMADAEAICEAAQRPTMRFVTPKSAEAQGAAVVFRTRDLLVRQRTQLINALRDHLAEFGFIVRQGVGHVSKLIDLVDDPSTDLPPEARPVLAVIADSLQAIQARISVLDREIAVRAKADPLAKRLMTIPGIGPVVATALVALSPEANTFRRGRDFAAWLGLTPKQHSSGGKERLGRTSKMGERSLRRLLILGASSAAKNAGRPGSRASPWLVGMLARKPRMLVTVALANKMARVVWALMAHGGTYKAPATAV

SEQ ID NO: 122351 - protein, 421 aa, unidentified
MKYKMQDKQNQLIERISDQHLVVGVDIAQQFHVARAVNYRGIVIGDPLTFENDEIGFARLQEWMNELKDSKGHSTEIVGMEPTGHYWLNLSEWLYNQNIDVVTVNPHLVKKNKENRDNTQSKSDKKDALVIADMVKNGYYSFVRPTTEAFEKLRVLMSNRDVIVKRSVSAANQINRWVDVVFPEFKQVFKDVKGKGALTTLRLFPTPKELRSMEVQDIVKGWKTMMKRQPGIKKAQALIQLAKHSVGNNKAHDAYKLHLTQLLEEFNLAATQLEIVEKEVAEVLESISFADKLIGIKGLPQITLGGILGETGDLSNFAHGNSLLRHAGLNLAEASSGKWKGQIVISKRGRSRLRRYLFLATMSLVANNPEFKELHAHNVKVKKMKKMKSIMKLIGKFARLLVGIARSNEPYCPEKVQPLAA

SEQ ID NO: 122352 - protein, 370 aa, unidentified
MAHVTSIGLDVHARSVSACAFDPFTGEVTQRAFGTDAGEIAEWIKGFEGPKAVYESGPTGFALCNGLRALGVDCVVGAVSKMQRPAADRRRKNDRRDAAFLARLLATHNVVEVWVPPAEVEAARDLSRSLDDAREDLQRARQRLSKFLLRRGHVFDEVDALGRRRGAWTVAFWRWVRRLRPAEPAAAAAFDHYVACVRCAESDKRALERRVAEVAATERWRPAVEALSCIKGVDTVTAFCLAAEAGVFSRFRSAGAYASWLGLTPSEHSSGETEARGGITKAGNSASRRALVEAAWHFQACSPKPKGAPKGSSVPPAVKRRCDEATARLCRRHEALRAAGKRPCVANVAVARELACWVWEIGCRAEGTLS

SEQ ID NO: 122353 - protein, 349 aa, unidentified
MQITTIGLDIAKNVFQVHGIDAAEKVAVKKQFRRVQVTKFFEALPPCLVGMEACATAHYWARELAKLGHEVRLMPAKDVKAYVRRNKNDAADAAAICEAVRRPTMRFVAVKSADQQGQLIQHRTRDLLVRQRTQVVNALRAHMAELGIVAAQGHEGLKKLLAIVADEKDERLPVDARASLIVLTAQLQALQTMIRVIEKRIIAQHRASEASKRVATIPGIGPLGASAIVATLTDPSAFRSGRDFAAWIGLVPRQDSTGGKQKLGPISKQGDRYLRRLLVVGAHSALRRAKQSPQNHPWLVQLLARRPFKVVAIALANKMARVAWALLARGSRYRARGGRTYRAPQLAAA

SEQ ID NO: 122354 - protein, 409 aa, unidentified
MDVIHTHCAGLDVHKKTVVAAIIVPGKQETRTFETMTTDLLALSDWLMVVGVTHVAMESTGEYWKPVFNILENNFEVLLVNAQHIKAVPGHKTDVKDAEWIADLLRHGLLKASFIPPLGQRELRELTRYRTTFVKEKATLVNRVQKVLESANIKLASVASNVVGVSGRAILAALIEGKATPSQMAELSKGKLREKRDQLIKAMEGQVKAHHRFVLSELLCQIDSLDETIARFDEQIEEYCRPFEEMVILLDTIPGVARQSAEVIVSEIGTDMSRFESANHLAAWAGVAPGNNESAGKRLSGKTRRGNKALGVALNQAAHAAAHMKNTYLSAQYHRLAGRRGQKKAIVAVAHSILVIAYHIIKRKEPYRELGGDYFDKRRPDITAKRLLKRLEQLGFSIALAPSTVPLAA

SEQ ID NO: 122355 - protein, 429 aa, unidentified
MNHSASATPPIVAWVGLDWADQQHDICLQASGSTDLEHAVVEQQSQALQLWVAELRRRFPQGAVAIALEQSRGALFYALMHYEFLLLYPIPPKALADYRRALYPSGSKDDPIDAQLLLEFLRKHPERFRPWVADDVETRQIALLSEHRRQLVDDGTALSNHLTALLKGYFPQALEWAGDLTAPLAWDFLAQFPSLEQAQRASRVELLKLYRAHTRRTPEQLEALGVQIRTALPLTTDRAVIESSVLVVQTLLGQLRVVQAGVKGLERKLRDLFAAHPDQAIFQSFPGAGKALAPRLLAAWGSNRQRFEGADNMQCFGGPAPVTVRSGKTQWVHRRFACSTFLNQTFHEFAAQSRLHSPWAKAYYQQRREGGAGHHAAVRALAFKWIRIMFRCWKDGTPYDEARYQQALRRRGSPLAITLSRLATPPARA

SEQ ID NO: 122356 - protein, 383 aa, unidentified
MRKLYVGIDLGCKTCAGAVRDSRGKLLETCGFPTSAENLINFVGKQEGEARVLIEECELAGWVYRTLLPHAKSVEVSDPRHNAWIARGKRKSDPIDAAKLAELLRGGFYRAVYHPGDEEMANLKIAVQHYDQMTRTTTRLQNQIKARFRQQGIMTTGKGVYGASGRQKAISMVKSEAIAEMLRQDFRLLDHAQKERAGASRLVTKLSGGLPVIKRLKRIPGVGTISACRFVAYVANPHRFNTKGLVSFSRLAVVKKESGDSIVCGEHLSREGNGAMKALSRTVFNGAMRTTRINGIRDYYLRSLSRTKNETHARLNTQRKILVRLQLVSPNRVSLGCMVHGTNGSQNSAEQVGYALAVMNAVWRDETEYRDNVVTGNGAKRPL

SEQ ID NO: 122357 - protein, 452 aa, unidentified
MHSTPSPAFDEIRRTVAGIDIAGHADHYVCGPRRDDGIRDVAHFGTTTAELHRMLAWLKARGVESVAMESTSVYWIPVADVLEATGVECVLVDTRDVRMVPGRKSDVKDCQWLQQLHSCGLLRGGFRPPERIAAVRTVLRERENLIAIRAQCIQQMQKSLDQMNVRIHHAVSDIDGKTGMAIVGAIVGGQRDPAALAALRDRRCKQTEAQIAAHLTGTWREEHLFNLAQAYRTLLFVDERIAEYDEKAASMFQALAIASGNTPPPPHAGAKPSQKDRRDAAEKRALHQIAGFDITTVPGVGYGTAATIIAELGTDFSRFPTEKHFASYIGLAPALGTSAGKNVRQKRRCKNTSRAGRALRMAASSLYKSQTELGAFYRSVARRSDRKTAVKATARRMAHMIYRAIRYGASFIERGAEAFETRMRERTLRTVRKLIKTHKINEMELKSALAGT

SEQ ID NO: 122358 - protein, 431 aa, unidentified
MLKINPLSTLYVGIDVSSKSNYVCALDFYKNKYINSSFANNQPGAEELALKILECLKEHPDITTIVAALESTSVYSIHIANYLSSCEELMRFKPYVFVLNPKCTANYKKSYIGLGKSDPIDAFVIADYARAGNIESEPWRGSQFLALKRLTRHRLHLVECMTREKTYLVSNLYLKFSELQMLEGDDQPFCDIYGATSSSVLMEYFSPEEILDSSEEDLIAFLAKKSRNRIKDISKTADLLKKAARDSYRLDKSLYEPLNVSIASSFNCIETFKREIKVIDNAIEKEIKGLNPNAFIILQSIDGIGPVFAGGIIAEIGDITAFHSSDALAKYAGLTWKSNQSGDFDGEDTPMIKAGNRYLRYYLGEAANSMRKHNVEYGTYYRKKYNEVPKHQHKRALALTSRKFVRLVYGLLARNQLYSGVSLDTSIKDSN

SEQ ID NO: 122359 - protein, 403 aa, unidentified
MERTAGIDLASEEHRLVVVDGDGRRRDERRYGHSEEGIAALLRRLLELDVARVALERPNGLVVDRLLEAGIAVVPVHPNQLAAARDRYRTGGGKSDGFDAYVLAELARTDMHRLRVLEPDADETRALRALTRAREDLVQTRVGLANQLRAQLEAFWPGATRIFSEVDSPIALAFLARYPTPEEARALSEKRLRAFLTRNGYSGKRSPGELLARLRQAPMGRAGELEQEARLQAVLGLVGTLKPLVAQIKLLTSEIRGLLAEHPDGHIFRSLFRDPKTVVTAAELLAEIGDRRERYPSSAPLEARAGQSAVAVESGKRKVGSFRWACNKHLRDAVSCLADTSRKHNPWAQKIYADAIARGKNHPHAIRILGRAWLRVIWRIWQDRTPYDPARHRSLQRLVAARG

SEQ ID NO: 122360 - protein, 324 aa, unidentified
MIDGILGIDVCKNTLDVSISSYTKVRTKSFTNSPDGWRHLLDWLIAQKIQRVHACLESTGRYSLGIACALYEADHVVSIINPAQIRDFVRTKLGRNKTDGVDASHIREYCELFKPSPWAPPSEAHRRLGELQTIRSGIIAGLTEWKNRKNSGIIDAEAQALADATILHFTSQIGAVDKAIALAIENDADLRSKRDLLLSISGVGDTLAGVVLAELPGPDVLRSSAEVVAYAGLNPRQHQSGTSIDRATRISKIGNAVLRAALYMPALSAMRYNSAIVALVARLKSRGRLKPKQIVVAAMRKLLVLCFGVLKTGRPFDAAIAMGG

SEQ ID NO: 122361 - protein, 360 aa, unidentified
MTDPTPIVAFDQHAASVMAAVLLPGERVPALQPLAPDLPTIGRFLERLAASGVRCCSEAGPCGFDLQRYLHAKGIACDVIAPALIPRRVGNRVKTDRRDAAQLAVLYRAGALTAIHIPTEQEEAVRDLLRCREDICTDLLRAKHRLSKFLLRHGRRCPDGRAWSKRYFAWLTVQRWPLAALEQTFTSYRRAIDDTVARLRAVDTDLQAALTVAPLAPRVARLRCFRGIDDLTALTIAVELGDATRFPAARQVMGFTGLVPSEYSSGATQKRGGITKTGNAHLRRVLVEAAWHYRHRPAISHRVRMRQRDAPPAAIRCAWSAQHRLHARYRRLLARGKSPQLAVTAVARELSAFVWAALTQ

SEQ ID NO: 122362 - protein, 428 aa, unidentified
MRFIGLDIHRDFCEIAISEGSKARSAGRVNTTPEALAVLGQSLLPDDKVILESTGNALEIARVLEPFVSEVVIANPMHVRAISHAKVKNDQFDARTLAELLAADLVPRVWIGDERTRVLRRLTSRRTQLVRQRTRPKNEITAVLVRNLKGRPPMSDLFGKRGRVWLAELELPDDERDTVQACLRQIDFLTTEIAHVDRQLAEQALQSPEIKRLMTIPGIDVTTAATLIAAIGDIHRFPSAKKLVGYLGIDPRVRQSGQSPARQGRISKQGSSNCRHVLGEAAWSAVKTPGPLRAFYQRVKARRGAQVAIIATARKLACLCWQLLTTEQDYAFKRQTIVDRKLRTLELRAGAPTRHGTQHTKGTPTIKQRTLQERQLTQQAELAYQRLIQDWQATAISRNGAGAAPGRASQRPSSGTAARQGTAPEPAL

SEQ ID NO: 122363 - protein, 335 aa, unidentified
MKDVSVIGIDLAKQEFELVELDDRGHVLWRRRLRRDQLLAFMAQQPPTRVGMEACAGAHDWGRRLSALGHEVRLLPMHQVKPFRRGTKNDRNDALAIAEAAMRASLKGVAIKSQAQQDMLSIHRCRQLLMRQRTALINQGRGLLMEYGVVLRRGAGQFRRGLPLLLAEADNGLTPSIRETLALIGRQVSELDERIEGLERRLKAQADAVSRRLRSRPGVGWLTATAFAASVGDPRTFRDGRQVAAWLGLVPRQHSSGDQIRLGRISKRGDRYLRTLLIEGAHSYLRRAPHYDTRLSRWAVALQARVGLQKAAVALANKNARVLWSLMASGEVHQD

SEQ ID NO: 122364 - protein, 330 aa, unidentified
MTHYIGIDVSKNKLDIAWLKATDNLKFKTKVFKNDYGDYAALINWLIANITDDLSNIHITVEATGVYHENIAYYLFDKGLNVSIINPAYIKSYAASLGSRNKTDKKDSMLLARYTYSAKPKLWTPPPAEARHLKSLLSRLDALQEDLQRELNRLEKAQATDTAPIVKASIEHMIASLQAAIVKLNGDIDDHIDHHHNLKQDQTLLQTIKGVGPVVSKQMVSLMHNKQFSQASQMAAFLGLVPKHSESGLFKGKSRLAKNGSSDIRAKLYMPALVAIKHNPDIKAQYERLLANGKCKMQAVCAAMRKLVHICFGVIKHQQSYQAKVELISA

SEQ ID NO: 122365 - protein, 408 aa, unidentified
MEVSVLISVGVDVSKGKSTVCILKPYGEVLMSPSDYEHTQRDLKKLVDQMDSFEDEIHVTMEATGNYHFPIATYLKKRDYDVRIVNPLEMKRYRCQGIRNPKTDSIDAIMIAQYGIDFWFRSFQEYVASDERMELKTLGMQYFKTMKTRQDRYLVLESVIDRTLPGIGGVLNGYDKSTGKDKKSDFVYDFYHAEKITVYSENRFCDRYESWSKKKGYRYSEKEARQLYSIAKDSIPTLPSSKNTKLVIQDAVKILREVDSALYSILNQMNVIAKKLPEYTTVMKMKGVGISIGPRLIAEIGDPRRFHSAKALIAYAGIDAPPYQSGKFTGTERHMSKRGSRIMRKLGFELMDTINKHQKLYAGDPVCEYFLAKRNEGKKYRVAMFAAYNKFLRIYHSRVSSVLNESEK

SEQ ID NO: 122366 - protein, 343 aa, unidentified
MDHTTIAVDVAKSVFEVAVSEHPGRVRERHRLSRARFRQFLAEHLPATVVMEACSSAHHWARQAQSQGHRVVLVPPHAARPYVLRNKTDRTDAKGLLEAFRNDDLRPVPVKSETQQALAALHRLRSAWVATRTARLNTVRGILREFGVMIPTGAHHVVPHVRALLEELDAGVPGLLRVALGEALREIGELEERIRAIERQLATAAEPALVIRRLRTIPGIGVLTATALVAAVGDVQRFPSARHFASYLGLTPREHSSGQRRHLGAISKQGDTYLRMLFIHGARSVLHHAKSKTAPATRLRTWALQVERLRGHNKAAVALANKLARISWAVWRSGNDFAAAPAV

SEQ ID NO: 122367 - protein, 346 aa, unidentified
MIIVGCDFHPAWQQIAVFDSEAGEITEYKLINGNGEAEQFYRQLPSAGLIGIEACGNSQWFVDLLQRLGHEIWIGDAAQIRASYVRKQKTDRRDAAHILKLLMEGRFPRLWMPSAEERDLRQLLVHRHKLVSIRTRVKGGLQHLALNRGLQKRSKLWTEAGQKALRELPLGTWAACRREDLLGLLADLDKQISKLDAAVAQAAEDHPQARLLMTQPGVGPITSLAFVVTVGDVSRFKRGKQIASYLGLIPRERSSGGRQRLGAINKQGNSFMRTLLVESAQSVTRLDEGFRKQYVHRCHRMAKGVAKVAAARRLAVRLFWMLRTNTKYPEIVHIESSPALAVVGES

SEQ ID NO: 122368 - protein, 368 aa, unidentified
MGTLYIGLDVHKVSISVSIAEDGRDGAVRFLGEVPNTPTDVAKLAKRLAKDGAQLEFCYEAGCCGYGIHRQLTELGHGCIVVAPSLIPKKPGDRIKTDRRDSQKLAILHRSGDLTRVWVPDPVHEAMRDLVRARLAAMTALMRARQQLFSFLLRHGRTYEKGKPWTQRHRVWLAEQVFEQPVHQIVFQDYVEAIFTAQDRRDQLVARITTLVPSWSMGPLVEALRGLRGMEMVSAVTFVAGIGDLSRFDNPSQLMAYLGVVPSEHSSGDSARRGGITKTGNSEARRMLVEAAWSYRYPPRVAGENVEVLVRLPKPVRDIAWKAQVRLCERYKKLSHSGKKPTVVVTAIARELAGFVWAIGQQVRPAAP

SEQ ID NO: 122369 - protein, 287 aa, unidentified
MYEIKRIAIDTSKSVFTLHAVDGGERAVWRGNLRRRELLNFFAKQPPVEVVLEACGGSHHWGRCLLALGHRVRLLPAQYVKPFVKRGKNDRNDAEAISVAAAQPSIGSVPVKSAEQQAPAMLLSVRELLVRQRTQLVNALRGHAAELGVVAPLGNKGLAALRREIAAADETAVPVPAKQAIVLLGHQADRLERQLAAIEVRLMQQHKANPLSRRLATIPEVGPISALSFSLRVDPRQFKSGRHLAAWLGLVPRERSTAGKQRLGAISRAGNERLRQLLVLGATAVIR

SEQ ID NO: 122370 - protein, 353 aa, unidentified
MKQYIGCDAHARYSIFVSIDEKGRASSPVRVEHDELEVRRFLSSLPAGSAVALESSGNWYWLVRAMEEAGLEPHLAHALEVKKRMPGRNKTDTLDATGLAVLLRNHALPEVWIPPAKLLEVRDLMRTRLSIRQQGTLLKCRIQAALRRYGVRDYSERADLFGKNSRAKLATAIGRLPQETRIATLHEWELLDFLEAQIAALEERIRERIASLGWVRLLKTLPGVGTILGCTIYLEIGDVSRFPDAAHLASYAGLVPTVHASGGKLWQGPTPRSANHFLKWAFVEAANVIVCHQKRWADRHVVRVYQRLRASKCHGKAVTAVARHLAESSWWILRKKEGYREPAPATLSSSENG

SEQ ID NO: 122371 - protein, 391 aa, unidentified
MNKNNLVIGFRKPIAMLFPSSALQRLDGTLGLKACISTMITYREFTTKSMRSKEMNSLCTVFGIDVSKKSLSVCLLSSEKEEYFTVPNNVKSFDSFLKKIDYLDLSNAKFVMEATGIYHLRIAKQLAERNYDVRVLNPLIIKRYTQMQMSRIKTDKTDSFMIARYASTLLEQYGKFKLRTNVQYKIELMLKAIDDLNKQNTMLNNQIKALNCYPFADSQIKSCYKRLVSHIDRTISKLEKQTKEILKKEFPNTYNLLKTIPGIGIRMNAIIISMLSSFKEFSNAKKAASFLGICPSPHESGSSVRGKGSISKKGSSYIRKMLFMCALSAVRYNRPCKNMYLRLKAKGKTWKQIAIAVANKLIRQAFGVLKSGLAFDANFVEKRFEKSCKSA

SEQ ID NO: 122372 - protein, 315 aa, unidentified
MSDVPCFVGIDVAKAQLDIALRPSGERWAVPNDASGVATLVNRVQTLHPTLIVLEATGGLERAATSALAAAGLPVVVVNPRQARDFARATGQLAKTDALDARALAHFADVIRPTPRPLPDAQTQELRALLGRRQPLIVMRTAEQNRLVGTSERLTKDIVAHITWLNADIATLDNDLETTLRASPLWRENDDLLQSAKGIGPVCAHTLLLELPELGTLTRQQIAALVGVAPLHCDSGTLRGRRTIWGGRAHVRTVLYMGTLVATRFNPQIKVFYERLLAAGKVKKVALTACMHKLLTILNAMLKHRTPWQPQEVQN

SEQ ID NO: 122373 - protein, 370 aa, unidentified
MRTDFKTFVGLDVHKDSIAIAYADADFGQAPRFLGTTGYSVISLTKALATLGEPKELSLCHEAGPCGYGLVRSLLKRGYATEVIAPSRTPRRPADRIKTDRRDALLLARLHRSGDLTPIVIPDPKDEAVRDLVRTREDAMHDRQRARLRLRSFLLRQGHSYTGRRWGPAHQLFLSKIKFEDSAHHIAFTEYRLAVHFRTECVERLESALRAEVQSWRSLPVIKALMTLRAIDFLSATTIVAELGDLRRFPHPRELMGYLGLVPSEHSSGPTQHRGELTRTGNTHVRRILIEAAWNYRFAARIGESLQPRLEGQSKEIVTIAWKAQVRLCARFRHLRARGVHHNKVTAAIARELCGFIWDIGRRITVSGAG

SEQ ID NO: 122374 - protein, 401 aa, unidentified
MKTVLSVDVAKNKSMIMLMNSDGEILIDTKEIKHNLEAFEKVKEEITEINPQNLTVFMESTGTYHLPIERYFKENGFNTLVINSLTTKNNYDTIRKTKTDKKDCYRLAKLFFVNEVEYHDLSKKDLYANLKAMTRQYFYLLQQNVSCKNRYKRLLNICFPELEKIFKSTRIYDDTALNFIKEFPHAEIVKEKRIDALYNNLYKTNGRNLNFYKKLATTIKVASNNSYPGVGKEHEDAKNLSDMAKIVQSNNNIINELREKMIETAKQSPYYEIINSFYGIGEILTAELLGELGDITRFDSPKEIIAFCGLDPTIKQSGKSINVKGAISKRGNKYARYILFNCSQMVVKLGASNYPEHPVYIYYQSKKAEGKHYYESLTACSTKILRMLYSMCKNNKQFLEN

SEQ ID NO: 122375 - protein, 419 aa, unidentified
MFKIFRKNCCGLDVHKTWIFACIGITDTNNRTEYKQARFSSFSKGLGELAEWLAKYSCTDVCMESTGKYWIPVFNILEKTCFVTLAHPKYTKPQKGNKTDKKDAKWICDLFMCDMIKPSFIPPPAIRELRDLMRYRRKLTNMKTGEKNRALNCLTVSNLKLDGVFSDVFGKTSRSILYYILEHPGETFDVTPFVDKRCKKPIEEIQAAVDGAISPSQTIKIRQCLAHIDELEGHKADIEQEIQQLSIPYAPVLKLLRTIPGLNTNPMTAIAILSEIGADMSVFASSKNLISWAGCCPRNDRSAQRVKSTRISQAGNYLKPLLVQVANAVIRSKEHPEFGNRYRRIKSHRGHKKAIIAICKMLLTAIWNVLSKVEPYDPTGYFVESQMSIRTSKVLTQTQALALLRSRGYVITDKTDAAN

SEQ ID NO: 122376 - protein, 351 aa, unidentified
MPAPTQIAVSVIGIDIGKNSFHIVGLDQRGAIVLRQKWSRGQVDVRLANMPPCLIGMEACVGAHHLSRKLRALGHDARLMPAKYVRPYSKGQKNDFRDAEAIAEAVQRPTMKFVATKTADQLDLQALHRVRERLVSQRTGIINQIRAFLLERGIAVRQGQRFLRVELPRILATPPDVLSPRMVRVIEDLASDWRRLDERIEALSSEIETLARQDAGCERLMSIPGIGPIISSAMVAAIGTGDGFSKGRDFAAWLGLVPRQISTGDRTILGKISKRGNRYLRVLFVQAAWVVLVKVKPNRWDGHGLKHWIEAAKKRLHHNVLAIALANKLARIAWSVLARGRAFEASKLQAA

SEQ ID NO: 122377 - protein, 340 aa, unidentified
MNHYAGIDVSLEASSVCVIDGSGKIVREAKVASEPEALIAWFGSLGSSLTRIGLEAGPLSQWLYAALRDAGHAVELLETRHVRNAFKIMPVKTDRKDAHGIAELMRLGWFRPVHCKSMEAQETRAMLTARKLVQKMLHEVEMSLRGVLRGFGLKVGKTTPVQFEARIKELVAGHQNLEVIAHSLLAARATLRREFNGFEKRLRALARSDARARLLMSTPGVGTIVALTYAAAIDDPARFKSSKVVGAHFGLTPTRYQSGETDRTGRISKIGDGSVRAALYESAHIILTKPIKGCTGLKSWAMRIAKRAGMNKAKVALARKLAVIMHRMLADGTTFTTQPA

SEQ ID NO: 122378 - protein, 346 aa, unidentified
MQVSTIGLDLAKQVFQVHGVNAEGAVVLRRRLRRPEVVKFFSMLPSCLIGIEACATAHHWARELSRFGHEVKLIPPSYVKAYVKRGKTDAADAEAICEAVSRPSMRFVPLKSAEQQSALMLHRGRDLLVRQRTMLVNAVRGHFAEFGIVAPQGVRRVGELAALLIEEDATTLPPVARQALRVLLAQLQALDDQIANLEAAVIASHRDNEASRRLASIPGVGPITASAIVASVANAHQFKSARHFAAWLGLTPRSYSTGGKERLGGISKQGDPYLRRLLVTGATCVIRYARRKAPGEAGWVKALLARRPARLVSIALANKMARIVWALLVRGNTYQAPAATMTAATT

SEQ ID NO: 122379 - protein, 412 aa, unidentified
MNSVYERCVGIDVHKRNVVVCAITPDAQGQRQKEQRTFSTMMPDLLRMRQWFQSLNVTHVAMESTGSFWKPIFNVLEGHMEVLVVNAQHLKAVPGRKTDLKDAEWIADLLQHGLLRPSFVPPAFQRELRELTRYRTSVIEERSRTINRLQKILEDTNIKLSAVASDLMGQSAREMLAALVAGEADPTVLAQLARGKMRAKHDLLVQALQGQFKPHHRVLISEQLAHIDTLDEEIERLSAEIAQRLRPYEAQLKRLETIPGIKRRLAEVILAEIGPDMQRFPSARHLASWAGMCPGNRESAGKRLSGKTRKGSPWLRTALVEAAHAATHCKESYLSAQYHRLVLRRGGKKATIAVGHTLLVIVYHVLADEKDYQELGGNFFDEHDRQAVQKRLVHRLEKLGYEVTLVPTSPAA

SEQ ID NO: 122380 - protein, 349 aa, unidentified
MLATTGQTIRVVGIDIGKNSFHIVGLDDRGAIVLRQKWSRGQVQARLANLPPCLIGMEACVGAHHLARRLQALGHDARLMPAKYVRPYSKGQKNDFRDAEAIAEAVQRPTMKFVAVKTPDQLDLQALHRVRARLVSQRTGIINQIRAFLLERGIAVRQGQRFLRAELPRILTAACEVLSPRMARVIEALAGDWRRLDGRIDELSAEIQALADADSACERLMSVPGIGPIISSAVVAAIGTGEAFTKGRDFAAWLGLVPRQMSTGDRTILGRISKRGNRYLRVLFVQAAWVVLIKPTSWHRHGLKAWIEAAKKRLHHNVLAVALANKLARIAWSVLAHGRAFEVSRPQAA

SEQ ID NO: 122381 - protein, 381 aa, unidentified
MKPTKKLTPTSHQQTEATAEVIKLGIDIHKTKYVVIRQIDNQAAQSPQSFSPDEFIVWVQRQRLLAKRVVSCYEAGCFGFVLHRKLAEVGVDNFVVRPRNWDEYGSSVKTDARDARELCGHLDRYLAGNERALCVVRVPTEEQEQARSLSRQRETLAKERKRLQNVGTSSGLYHGVDVPANWWKPKVFTKLCTEIPEFMKLILDPFQQVLEIIDKQLRETTAREERKANRKIPVGLGALTTSILDQEFVDYTRFSNRGQVSSFTGLCPGESSSGNKRQQGSINKHGNPRIRHMLLEAVWRMIQFQPDYKPVLHWKARMANEPFGAAKKKKMAVAIARQFAVDWWRIQTGRITPEDVGLRVDFPSAYSTRALREGRVSKVYA

SEQ ID NO: 122382 - protein, 395 aa, unidentified
MSAEGEAIRSNDYRKDTTVKAPSTRPAAVLGLDVGKSSHWACLIDRDGEVLASAPVRNREAELDALFASAPAGTLVVVDQFRNIGPLAVRRARAAGLGVAYLPGLAASRAAGLFAGEAKTDERDAAVIARTALGVPDSLSGVPGRGEALEAARALSSQRDHVVACATRDKNRLRAVLLESCPALEAAVDLSDRRWLELLAGFGGAWGIARSGAEGPRAEAAGEAAAASTAPPPALVEAENRQVRFLAARISEALDEAGALEAETAALLEGDETYACLLTVPGIGPRTAAQLAVSVDIGRFPDHDHLASYCGIAPRVRSSGTSVRSVRASRRGDARLKSLLIFSCNSLVRSSGRYGEYYRACRARGMGHGRALKAVARKRLRAIYAVMRDRVPYRE

SEQ ID NO: 122383 - protein, 334 aa, unidentified
MNYIGMDIHKQFTVAVAKDRDGNLLAKDKFDNNKTNFETFLKIFVPEETKIVIESSSIWEYIYEILEGMKFEVKLANPTKTRAIAEARIKTDSIDADTLCDLLRANLVAESYIPPKEIRNLRNIMRQRKAIVKGRTQIKNKIHAVLLMNGIKLPYTTLGKTAMKWIIDEINITTIKTILVSYINLLEQYDFELKKIEERINQIAMQNNEAKLLTTIYGIASVRALELVSEIGDIKRFNSPQKLCSYCGLIPSIKQSGSTLRFGRLVKQSNRSLKSTLIESSWNLIRLQGENPFREFYKKLSKKKGKQKAICAVARKLCCVVYVMLSKNQEFMLL

SEQ ID NO: 122384 - protein, 317 aa, unidentified
MGDVFVGIDVSKARLDVAVRPSGEIWRFSNDEAGFASLVERLKPLAPKLVVLEATGGYQAPLAAALTVGRITVAVVNPRQVRDFGRAMGQLAKTDVLDAEVIARFAEAVRPEARPLPDSETAELHGVVSRRRQLVEMITTETNRMATALPAVRRDIEEHITWMQRRLKDVDKDLYTRLKKSPLWRVKEQLLRSAPGIGPVTSCSLLADVPELGKLDGRKIAALVGVAPFNRDSGTLRGKRAIWGGRAAVRATLYMATMAAVRRSPSMKAFHDRLIAAGKPWKVAQVACMRKLLVRLNAMMRDGVAWTEDVQAPAAAV

SEQ ID NO: 122385 - protein, 352 aa, unidentified
MRSKIQGCDYHPSFQQVAFVDTESGELGERRLLHREEAEQFYGKLREQGREARVGMEASGHSRWFERLLRDLQFESWIGDAAEIRTKRVRKQKTDRQDAQLLLRFMLEDRFPRIWVPDAENCDLRQLLWHRHRLVQMRTRVMNQLHVVALNEGLRRKKALWRAAGRQQLQSIALAPWASRRRQDLLDLLDQLTPKIQELTRALEAEVEKRPVAHRLLTHPGVGALTALAFELVIGTPQRFPCGKQIASYVGLVPAEQSSGERRRLGHISKQGNVLLRFLLVEAAQVTVRSQQEGRHQFFHLAMRRGRKIAKVAMARKLAVHRYWMWRQGCDYGAWQKLGLHAGVPGNPDGER

SEQ ID NO: 122386 - protein, 400 aa, unidentified
MTVMIGVDPHKASHTAVAIDRAEVELAAVQVRSSSRQVGELLAWAGELRDRTWAVESAGGVGYLVAQQLVAAGERVLDVPATLAARARLLGSGRSNKNDRNDAYSVAVAALRAPALPTVAPADHAWVLRLLAKRNKQLGSQRTRTACRLHALLVELVPGGISKEITVNRAGRLLESIRPSSAVEVTRHELALEHLDDLRRLDGQIGTLHKRMADAVKASQTTVTELFGFGPVGSALAIGHTRDVRRFASRDRFAAYNGTAPIEVSSGGRLTHRLSRRGNRQLNHAIHMAAITQIRHSHSPGYPYYQRKLAEGKTNKEAIRALKRRISDALYERLVADAKRHAGPGGQAGTTAEADAAGFQPRQPALQVSYSRTRSERRGRRANTPATRAARSRKPARTRT

SEQ ID NO: 122387 - protein, 348 aa, unidentified
MAGSTLPHRWSVGIDLHKDTLTACVYCSCCGEIRFQKIACRCRKQIAEFFGSLPRPHVVAIEAVGFYRWLWEMLEPLVERLVLADATQARALAGRRMKTDREDAQNVAELLACNRLPLAYAPPFEVQVLRDCSRQRNALSRQHAHVLHRVKSVMNANNRPGPARMASSGLIRYLEAFQSKLPERHGRYLWLCVDQLALIERQRAQLERELERLLAQPLFAETSAILNSFPGVGLVTCATVLAEIGDFGRFSYRKSISRYGGFDPRTFDSAGKQRTGHISKRGPSNLRWVLVQAAWAALRLDPQVKRIWLRISRKAGKKAATVAVARRLLVWMWKAVRTGQPYRAPVAV

SEQ ID NO: 122388 - protein, 391 aa, unidentified
MVCVGIDVAKDKHDCCILDSEGTTLVDCFTIPNNMDGFKSLLQTIQDCSQKSDKIKVGLEATGHYSYNILGFLLDNDLPVYVMNPLHTNLYRKSLSLRKTKTDRVDAKTIATMLLSDVDLKSYTDTAYHNEELKSLTRYRFDKVQERAKLKQSVSRLVTILFPELEQLVSSIHGTSIYALLSEYPGAKQISEAHLTRLANILVKTSRGHYRKDRATHIRDAARTSIGSVMPAKSLELKHTIKLIQELTSEINEIEDAIRKIMDELKPPILSIPGMGFHSAAMILAEVGDFSNFNSPDKVLAYAGCSPSTYQSGKLTNCYAHMEKRGSRYLRYALYTATKYVCYWNPVFTEYLTKKQAEGKHYNVALSHATKKLVRLIYALQKSGKAYLAIT

SEQ ID NO: 122389 - protein, 338 aa, unidentified
MKKIVIGIDISKKKLDWCVMVDKEIAGFHDTANRMDDIYNKFAEVLEYGKIDIGEVLVCAEYTGKYIYPLVLACHKCRVDLWLESGYNIKCEARKERGKDDRTDARRIAEYGRKNQDDARIYRLPAESIATLRGLLSERAMYCSQRAAHKGQLRDMRGFMSPEAYTARAVRQLSLIKELDRLIEEVDNSMAEIVASDPELLRQQRLLLSVPGIGMVCAAALIAVTAGFSLFDNGRELCCFAGLAPFAYTSGTSIRSKRRVSCRADHQLKALLHMCALVSATRMKSGRFAEYYQRKTAEGKNKMSVLNAVRAKLMLTAFAVVRDNTPYDKNFKINLAES

SEQ ID NO: 122390 - protein, 362 aa, unidentified
MEFFSGLDVSIDETAICVVDDKGEVHLRIKVATDPGAIVEALRPFLPRLRRVGHEAGSLSPWLQPELKSRGLPAICLETYHVRAAMAAQRNKTDAADALGLAHIMRTGWFRQAHIKTEACYRMRLLLTQRRTLKAKFLDIENTIRHSLKAFGVRIKGTGRGGFEAAVREAIADDKLTSEVIDAMLTVRKALWAQYCKLHALVVKIVARNELARRFMQIPGVGPVTALNFIAAIDDPARFRRSRDVAAYFGLTSKRWQSGGSIDIQGRISKAGDPDVRRALYEAASGLLTRFKGKDMIKSWGLKIAKRSCHRKAAVAVARKLGVVMHAMWRDGSFYVGDAAATKAEVSSRAKIKNRKLLGATA

SEQ ID NO: 122391 - protein, 329 aa, unidentified
MKNEVLGIDISKLTFDVYLYCKESYQLFSNDKKGFSKLKKWLKQNKVILEELLVCFEHTGMYSYQLSEYLSLNNIDYVMESAIQIKRSLGLVRGKNDKVDAKRIAEYAFMRRDKLKLSKPPTKNISRIEKLLSLRETMVKHRAIYKVLLSENTRILNKTEHKCFFNAQSKLIKDLNRQIDKIELEILSIIKSNKEMNEVYRLVTSVKGVGFVLGAYFISTTSCFTKFSNGRKYSCYCGTAPFEHSSGTSLNLKKRVNHMANKKMKSLLNMAARCVIVHDPELKVYYNRKVEEGKNKMSTLNAVRNKIIHRVFAVVNRGTPFVTLQNHLS

SEQ ID NO: 122392 - protein, 349 aa, unidentified
MTVYVAVDFHAREQTISWCDTADGEVHRTKLRHQHDDVRAFYQQFNDEVIVAFEASGYSAWFEQMLAELGHTVWLGNPAEIRRKAPRRQKNDRRDADLMLDLLLKGDFPRVHGFSEESRTVLRQLRYRHKLVKVRTIAKNSLHAIGINAGLPLKRRLLTEQGIAQLQALSLSPVLTQQRDEWLQLIGSMNERIAAVEAQLQQRAQNDAAIALLQTHPGIGLLTSLALRYTLLPTARFSTTRQVTAYVGLDCMEDQSAERRRMGSISKAGSKLLRFLLNEAGHTAARHDPELKKFYRRLLHRRDKPKAKVAVARKLLVRSFIMLRDQIDYAEFVRRGVAARVAREAHSLP

SEQ ID NO: 122393 - protein, 326 aa, unidentified
MSSSDFIPLGIDISKKKIDCALMLGAKFKNKVFANNPEGFVVLCAWIDQHAQGAVHVCMEATGIYWEAVAVHLANAGHRVSVINPALAKAHAQSLGLRSKTDAIDARALADYCRQRQPALWVAPSLSEQRLKALVLRLQGLVAMRAEEKNRIESARDSVRDSLDKHLQWLDEEIKRIERQISQTLDDDPTLRGKRELLNSIPGLGERTLSVLLAYGLGGERFDKARQFVAFAGLSVREYESGSSVRAKPRLSKVGHSRLRSALYMPAMVALYRTDWGRRYRDRLASSGKPAKVIIGAMMRKLVHVAFGVLKSGRKFDPELHIACAA

SEQ ID NO: 122394 - protein, 367 aa, unidentified
MKKVSTVAAKPSKKISQQKLTVGLDLGDRNSWYCVLDESGQIELEERVRTNGKALREVFGGMPHSRIGLEIGTHSPWISRLLSELGHEVIVANARKVRLIGESRKKDDRLDAQRLARLARIDPELLSPVKHRSAQAQADLMMIRARAGLVRARTGLVNTARGLAKSYGERLRGCNVRNMNPEKAEGLSPELQSALEPLLAGMEVLSEQIREYNERIEKLAQESYPQVALLKPIKGVGTLIALTFLLTLEDPHRFRKSRDVGCYLGLQPGRRNSGQSEPQLHISKEGDPYLRTLLVQGAQHILGPFGVDCDLRRWGLKLAERGGRNGKKRAIVATARKLAVLLHHLWVSGEVYEPLHNSSPTTVAAAA

SEQ ID NO: 122395 - protein, 330 aa, unidentified
MQCTTLPRQILGIDVSKKTLDFCELSGKRRASHVIENDAGAIEAFLESYKVSETVIAMENTGRYNWALYEVLAQKEFIVYVLNPIHLHKSLGLVRGKDDKIDAYRVAEYTSRHLDQLQRWQPEDDDVQELKLLLNERNQLVATKKRISVRLSEFDLINLKDYSERLHRRSLRSQQEVDRDIKEVEREINELISANDHLSNVAQWITSVTGVGKVLCWYLIAKTNAFRNINNPRKIACYCGVAPFNHQSGTSLKKRPGVSQFADKQLKTLLHMGALTAVKYDPELRLYYRRKVEEGKCKMSVLNAVRNKLLQRICAVVRNEKNYERRLVLS

SEQ ID NO: 122396 - protein, 378 aa, unidentified
MKRILKIGMDVHITNYTLCAMEPIIGEDDRVFATIKVTPDYKNILMFIENLKMKLGLDDEYDIQCGYEAGCLGYSLYNQLTAAGVKCVILAPTTMLTPQGVRIKTDMRDAYMIAQCLSYGGYHAVYIPTEDDDSVKEYLRMRNDHKLALKKIKQQINAFCIRHGFCYDGTKWTLAHLKWLKKLEITNALYRETLNEYMASYEEQEAKIERYDKRIEEIAEQTKYHDKVKKLGCFLGIKTHTALSLIVETGDFERFAKGNQYASYLGLAPGENSSSDSIHRLGITKAGNSHLRQLLIEASGGICKGAVGHKSKELRARQNGNTAEVIAYADKANTRLRSRYYKFIRHGKKRNVAVAAIARELACFVWGMMTDNIEMKAA

SEQ ID NO: 122397 - protein, 423 aa, unidentified
MGKTIPICCGVDVHKKFLVATILTGDYLIPQCKQKHFGTSFKNLLAFKQWLLDNNCKDVCMESTGKYWVPVWNVLEGIVNVVIANPKWVSAVKGNKDDKKDSKWIGNLFRMGLVPSSYIPGKDIRILREFTRYRSKLVSMRASEKNRYQNAFTVCNLTLDAVVSDMFGKSAMAIENYLLDTDVVDPEFCVSLLQKKLKKKSAEIIEAVEGFNMTQEQKERVRIIQGHFADIDKRISQIDEIIGRLTAEYEGTISLLCTIPGIDRRLAITIISEIGTDMSEFGSSRRLCSWAGLVPGNNQSAGKKKSVRITRAGVYLKPALVEAAHAAVKATEKSPYFRIKYEKIMKRRGKKRAIIAIARMILTSIYAMVSTGEVFNPSDLLKYDMPEELLKKRTLAEAKDAVKLLVSLGLVAEGSISLEALAS

SEQ ID NO: 122398 - protein, 422 aa, unidentified
MKKIAQFHEPDKPNSKHLVLAVDVSSRLLDIYSRYRRSGREFELSESFLNDLPSIHHKLDEYHEQARGLGYSGLSIVVEPSGCYEKKLTYAALQRGCDVWTVNPERMYKAGVVHHGDDGKSDPLDGKVLFMMAQMGKVSRLVPLPPQWQKLRQLGQWMEDCTLAGADARIHIGVIRRELFADWRQSGDLTWGPTGMAIQHLYGFDPWKITKSSFSSYIAKMRAHHKGLHQRCLANIWEQAQSSCRAPLSPVQREAIAGQLEHYWQIWTLQNSRKVQLGEQMIKVVDELEPGHWIPPLMSGFTELTRAKILAETGPLRQFPHWRALLTYAGLKVRMRRSGKYRGQDKITKKGRVLLRKHLGQAAWVLARKDRILGPYYHRKLSEGMPARKAKVACMRKLVKLLYGAAKSSQQFNPERVYRSAG

SEQ ID NO: 122399 - protein, 386 aa, unidentified
MRGKAFIPRDYDVFAGLDVDKKSIAATFSDQQGFIRSLQMPYSVEHLLNHVRKHFGNQKIAFVYEAGPTGYGLYDGLAAQGYQCLIAAPSMIPRAPGQRVKTNRLDSRGLSESLRGGQLKSIHVPSPVYRELRHLTQLRDTLVREAAAHKQRIKALLLLESIGFPPAPAGSQWSFMVKHELRKLACSRVVRFKLDQLLDNLEFCEKQVVNATKEIRRFCKEDAELSRSIEYLRSIPGIGWIVGSQLLARIGDWRQIDNVRQLGSFLGLVPTENSTGDTVDRGSITRVGDGRLRSKLIQAAWSAIRQDAELREFYRSVCRRNPRGKGPRIAIVGVARKLSTRIYAVLKNQRPYIVREQVRSAPLTQEETSPQGTTRRCAEPGETKNS

SEQ ID NO: 122400 - protein, 384 aa, unidentified
MKVVCGLDVHKDSVFCCILCANGEKIQHKFGVLTEELVTLRDLMVSEGVEECAMESTSIYWIPIWRVLEGSVKLHLVNPYFIKQLPGKKSDVNDAEWIATCLSKELIASSFVPDDKIQRLRQYDRRIFDLNVSISRNLVKLDQCIQRCNIRISNYISTTDSKGYRSIVKLISQGVTDAEVLVKELHGRTINRHGRETLVKALTGVVSETDIDMINQLVEEIELQQRHKDEAQEKMTALCMEWFPQEVENLQTIPGVKERSSTSIIAEIGTDMTHFQTPKKLVSWVGLRPRNEESAGKIKARGITHGNRFVRKTMIECSWGAARMKDSFFAEFSYRQCIERRKNKMKVQVAIARKILVAVWYVLSQGTQYIKPTDHYTATDMTAV

SEQ ID NO: 122401 - protein, 406 aa, unidentified
MAVVATVVEREMEGGIEQQIEYEGRRFGSGTREREHLVAWLRERQAGEVVMESTAQYWKPVWMDLEPHFPKLHLAQAQSNKAPKGRKNDFADARRLTRRMAAGELILSFVPGAEQRTWRAMTRGKQQLVRERVRLQSQTEALLEEMRIKLSSVVSDLFGVSGRRILGALAEGETDPGKLADLGDDRLKCGREELVDALTGHGEPIQVEILKLSLERLRLLDRQIEAFDQMAAGALKKHANAVARLAQVPGFGVDSAQQVIAEVGFDAKTFPGAGELCSWVGTIPGSDISAERNHSSQSPKGNQFLRRIFTQAAQAAVKTKGCHFQNLFRRLIIKLGYNGAIWAIANRLCRLAWKILHDGVGYVEQASEPTPQAKKRRVQRLTQALRKLGYQIAITPITPKAEGAQG

SEQ ID NO: 122402 - protein, 379 aa, unidentified
MSNSNKVRFVGLDVHADTISVAIAETGLEVRSLGTIPNRLESIRKLMHKLAPVEQLRACYEAGPTGYVLFWQLTQLGVSCEVIAPSLVPSKAGDRVKTDRRDAEKLARCYRAGDLTAVWVPDEAQEALRDLVRAREAAKKDQLKARHRLGKFLLRHGRRPPDSKAWTKQYLEWIKSHVHFQQAALEATLCDYLEEVDHVAARIVKLEKAIDEAVSQAPPEIRAVIEALQALRGVAQTTAATIVSELGSLSRFPSPRQLMGYSGLVAREHSSGNRVQRGGITKTGNGHLRRVLVEAAWAYQHRPNVTGYLLRRQKNLALTEEAKKIAWKAQQRLHNRYKVFAARGKNKNQIVTALGRELLGFVWAIALETEKQQKLGKAA

SEQ ID NO: 122403 - protein, 364 aa, unidentified
MDVHLRSTTVCALDAETGEAVTRRFRGNPWGEVAEWMSGFPGPSLAAYESGYLGFAPQRELSALGVDCVVAAVSRVPRSAADLSSKNDRNDAARMAKAILSHDVTPVWVPSPEIEGLRDLAGAHDAATARLAAAKQRLLAFLARRGYAYGGTTPAGNPRRYWTYDFLRWLDKVRPADDGGIRALAALRSEVEAAAETRDDLLAEYRAAVAAGPLSAEVEALQSIKGCGFALAAAFASEVGDFSRFRSGRQVTAYFGLAPKQRSSADSVRLGGISGAGNALVRRLAVEGSWSYVQASHQPKLMPKGSGVPLEVRMHGRKGSERLLRRREEMLARGMPQAKANAATAAELVRWLWALGAMCREATE

SEQ ID NO: 122404 - protein, 378 aa, unidentified
MKRIMRYVGMDVHAETIAIVVVEADGSERDLGVIANRPEAIRKWLKRLGPAEELHCCYEAGPTGYVLYWQLTQMGIECTVAAPTLIPTKAGDRVKTDRRDARKLARYLRSGDLTAVWVPDEAHEALRDLVRARQAAKIDEKRARHRLQKFLLRHGQRAAQGVTAWTARHRAWLAALQLEQPTLQVVLQEYLHEVLHSEQRVRRLDTAIEQAVEGAPEAIRAVVEALQGLRGVRTVTAVGVMAEIGRFSRFAHPRQLMGYSGAVPSEFSTGGPGKHQRGAITKAGNAHLRRLLGEAAWCYRYRPAVRYPLKKRQEPLPPKVIDISWKAQLRLCHRYRRMVARGKLKQKVVIAVARELLAFMWAIGVEIEKRHEPPRAAA

SEQ ID NO: 122405 - protein, 468 aa, unidentified
MSKLSKRDSRFGTQMEVRPFEGLSQIQVHVAGADIGAHEIVVCVSEAGDTQIIRTFGNYTIDLQAMAKWLLEQGIRSIAMESTGVYWIPLFETLEDFGLQCCLISATAIKRFPGRKSDVLDCQWIQTLHSYGLLADSFRLEADLIALRTLLRHRAQLIQHRSPHILHMQKALLHMNIQLSQVLSDIMGLTGQQIIRAIVEGERDPHKLAAFRNYHCKKDEGEIAKALTGTWRAEHLFVLKQSLALYDFYTQLLEACDAEIERTYTAIRPAWSDSNNSPSLPAQKPNSCSKNSPRQGQVRKHLQRITGVDLVAVDGISLSLAQTILSEIGTDMSKFPEEGNFCSWLGLAPHNDISGGKVLHSYTLQTNNRAGQAFRQAAATTVRADCSFGAFYRRLKSHLGPAQANVATAHKMARVVYHMLKFKIEYQTMTAGEYEQRFREREINYLQRKASRLGFALSLIVNPLPAVS

SEQ ID NO: 122406 - protein, 354 aa, unidentified
MSQTLNAAIAVVGIDIGKYSFHVVGHDERGAIVLRQKWSRGQVEARFANMPRCLIGMEACVGAHHLSRKLRALGHDARLMPAKYVRPYSKGQKNDFRDAEAIAEAVQRPTMKFVATKTADQLDLQALHRVRERLVSQRTGIINQIRAFLLERGIAVRQGQRVLRAELPRILGMPPEVLSPRMVRMIEGLTGDWRRLDERIDGLSGEIEAIARRDAGCERLMSVPGIGPIISSAMVAAIGTGDVFNKGRDFAAWLGLVPKQISTGDRTILGKISRRGNRYLRVLFVQAAWVVLIKPKIWERHGLKPWIEAAKKRLHHNVLAIALANKLARIAWSVLARGRAFEARKMDQAANQSA

SEQ ID NO: 122407 - protein, 347 aa, unidentified
MRFYTKQHPFYCGIDLHARTMDICILDQAGETRFHRNMPATPEALLKAIAPYHDQIVLAAECMFTWYWLADLCAEHGLPFVLGHALYMKAIHGGKAKNDKIDSQKIAALLRGGMLPQAYVYPAKMRATRDLLRRRMPLAHKRAELLAHVQHTNSQYHLPAIGKKLADKANRDGVAERFADPAVQKSIEVDLALITYYDALLGAVERTIVNTAKHHDATTLYLLHTVPGIGKILGLVLLYEIHEINRFPRVQDVVSSCRLVTCAKESAGKRLGTSGAKIGNAHLKWAFSEAAVLFRRDHPAAQTYLARLEKKHDKGKALTVLAQKLARAVYYMLQHQVAFEKEQFFQR

SEQ ID NO: 122408 - protein, 378 aa, unidentified
MPTTTRESESSVRPAVLFMAFELGSTQWKVAFAVGLGTRPRMVQVPARDVPGVWKEVARAKTRFGLSAEAPVRSCYEAGRDGFWLHRALLAHGVTNVVVDPSSIAVDRRARRAKTDRLDAIALVTQLILADAGDRRGWREVRVPSVEAEAARQLHRERETVRHALRAVDNRIQGLLLLYGVTVRAGRLTPEAVRALRDWAGAPLPAAVRARLAREADAGQALATRLRLVDRDLHARVKADTDVVAQQARTLTRLRGVGELGAVTLSTELFAWRAFTNGRQVGAIVGLTPTPYCSDQSQREQGISRSGNRRVRTLLVEMAWAWVRWQPVSALTQWYQARFAQHGRARKIGIVALARKLLIALWRWVDQGVVPAGAIVRG

SEQ ID NO: 122409 - protein, 480 aa, unidentified
MATRKAARRPAAERVPALELPVLEPAAAGIDLGATELCAAVAPERGSPSIRTFGTFTAELQELAAWLRQCEIRTVAIEATGVFWVPVLQILETAGFEVCLVNPRHLQNVRGRKTDVVDAQWLQHLHAVGLLQPSFRPPEAICALRTLWRQREHLVRAAAEQIQLMQKSLTQMNLHLHHVLADLAGKTGLQIVDAILRGDRDPQTLARLRDPRVQSDEATLAAALTGDWRPEHLFTLRQARQTFQHYQDLLQACDAELEAWLQSHPSVPRAPSAGGAGGAGGAATADALPPSARPSAPKAARKTSRNAVALPTLDLRQELAQRFGVDLVAVPALGLTSVAALYAELGSDLKAFPRLKQFTSWLALCPDPRKTGGKVVASHTRNVQHRVARIFRQAAQTLARSDCHLGRFYRRIRGKLGGPQAVTAAAHKLARIFYHLVTTQEAYDESVFQREDAQYQARRLAAVHRQAKSLGYSLTPCEVS

SEQ ID NO: 122410 - protein, 409 aa, unidentified
MDVLYSRCAGLDVHKKTVAVCLLTPGEAGEPRRRIREFGTATFELRALAEFLRKHRITHAAMESTGVYWKPVFNLLESQCEIILVNARHVRNVPGRKSDVADCQWLASLLRHGLLEASFVPPRHVRELRDLCRMRTSLVRDAVRCGNRLRKVLEDANIKLDSVASNTLGVSGRSMIVALIGGEEDPVVLAELARGRLRDKMPKLVAALEGRMSDHHRFLLREWMWNFERLEEQIARLESRIDEQMEPFEWAAALLETMPGVRRVAACAMIAEIGVEMNRFPSARHLVSWAGLCPGKNESAGKRKGAKSHRGNRWIKGLMTEVAWAAARTKNTYICAQYNKLAPRCGAKRAIVATANSHLQAAWHILAKRIPYRDLGPDYFDNRNQERLTRHLVKRLEKLGHQVHLNPVA

SEQ ID NO: 122411 - protein, 413 aa, unidentified
MAEETFAWFVGVDWGSEKHQVCILDQQGTIVGERHFPHGGAGLAELGNWLVSVAGTVTAVAVGIEVPHGPVVDSLIDRGFVVHAINPKQLDRLRDRFSVAGAKDDRRDSYVLADSVRTDRRLFRRLHVADPRLVELRAWSRLAEELTEERVRLGNRVHHELWRYYPQMTKLTDDVAASWFLELWTIAQTPAKARQLRKATVGQLLKQHRIRRIDAETVIRTLREPAIKVADGVAEAASVHMRSLIARLHVVNRELREAERQLDKICAEIGATEAASGDGLQRQDVMILRSMPGIGRINLAALLSEGSGPLSRRDYPALRTLCGAAPVTRRSGKSQIVIMRYAAHVRLRNTVYHWARVASQHDPTSKSRYAALRQRGHSHGRALRGVADRLLGLACVLLQRQTPFDPQYGHPAT

SEQ ID NO: 122412 - protein, 431 aa, unidentified
MAKVFIGVDPHKLSATIEVVDDRERVLATGRFGTDKAGYAAMRRHVAGWRERVWAVEGSNGAGRPLAQRLLADGEDVVDVPAKLSARARLFDTGHNRKTDAHDAHAVSVVAVRTQGLRVLSYDEQLEALRMLADRREELTRQRVQTVNRLHRLLAELTPGKGKKDLTALQAKGILASARPRDLAGKTRRRLAVEQLAELVAVEKKIKALTKELKAMVIASGSGLMDLRGVGPVVAARVLADVGAVARFADRNRFASWTGTAPIEASSGEIVRHRLSRAGNRRMNHMIHIAATTQIRLDTPGRAYYRRKQTAGKTRAEAMRCLKRRISDALYRQLVADARAARTGPGGHWGATLTSSAADLPPHIDTSDQPLPGPVPTPLPATTADATPRPGSAPQTTRRRAGAVKVQRPTGRTTLTATSAGAHSKEPIPAS

SEQ ID NO: 122413 - protein, 313 aa, unidentified
MAFLHHQPQLCLGFDIAKHTITVCDGATTRTIANQRRAIRALLKSYKQIDLVVCEPTGGYEGLLLEECLRAGIACHRADTLRVKSFIRSFGTQGKSDAIDAGMLCAYGRERWVKLPLWQAPDVDEVRLRALVRRRQELIATKVAEKNRAKAPGSRDLAASFKAVIKVVERQIQVINAEIRELIANSNTLKQRAAICTAMDSLGPIVAAKLLAGLPELGSMTRRQAAALAGVAPHPNDSGLKKGYRKIRGGRPEVRSTLFMPALRAAAGKGEFAAFYKRLRANGKKPMVAIAAVMRKIIVTLNARLRDALIPQS

SEQ ID NO: 122414 - protein, 432 aa, unidentified
MNRLQVGIDFSQKKADFCLLFPDGQLLESHVSFANSCSGYSSAKQLLLDALNTYAFDGVDVSGEATGYLWLPFFLQLSADPDLTLRDMDLFLLNPRWVKWFKKCFAEDHKCDGKDPFYIAERTRTRRPDVAWSPSDCLPLRFYTRLRFHIVQNLAREKCYFSAFLFLKASSYRCIKPFSDVFGVTSRLVLTQQPTLDELADLPIEDLASHLCELSGNHLPDSLDNARKLQRVAQESLHLDQSLVLPVQRILDLTLDHIRFLEAQRDQVDRWITAELENHPVIAQLVTIPGVGPVFSSGLGAEIGGVQRFLQGQKWDKKRKRYRPRNLRDAEDAVAKIAGLWWPRADSGDFEAQDRHMAKSGNRYLRYYIIQAANLMRLHIPEYAKFYARKHKEASKHHHKRALVLTARKSVGLVVGLLHRDEPYRSKGDHRT

SEQ ID NO: 122415 - protein, 349 aa, unidentified
MSEPYAGRQIVGIDLHRRRSVLVRMTEAGERLETIRISNDPDYLREVMTRAGEAPEVVLEACYGWYWAADTLAELGATVHLAHPLGVKMFSYRRLKNDERDAADLADLLRMGRLPEAWIAPPATRELRGWVRHRAKLVGLRSNLKCQVHGILANAGITVPMSDLFGASGQRLLATADLATESRSRIDSLQRMITALDFEVELFAKLVAGRLRTHPGYQAIQQIPGVGPILAAVFVAEIGDITRFRRPEQLASWAGLTPKHHESDTTVHRGRITKQGSRLVRWAAIEAVQRLPGHTRIGQVRDRVAARRGRNIGVVAAARELTELVFYGLRDHRVHALAVHSPARTPLPA

SEQ ID NO: 122416 - protein, 411 aa, unidentified
MLKIVYPICCGIDIHKTFVVACIASTNDRGVTTYQTKRFSTYTKNLNELSNWLDANDCKDVCMESTGKYWHPVWNVLERTCRPVLAHPKYLKAIRGKKTDKKDAKWIADVFKHDLVSGSFIPPEIIRKLRDLMRYRVKLTNYTSGEKNRAQNCLTTSNIQLDHAFTDVFGKSATRILNHILEHPGENFDVTPFVHRGCKTPIEEIQLSIDGDISPEQAEKLKIIRSHMDSLELCKLNLESAILFLAEPLLPQINLVSSVPGIKDFSAIAVIAEIGFDMSVFPTSKHLCSWAGLAPQCNESGGKKKSSRISKAGVYIKPLLIQCANAVVKSDKHPEIKNRFLAIKKRRGHKKAIVAIARMLLTAIFHILSKSEPYNPDLYRHSDVSPVDLVEQAVKMLEKRGFVVSQPVVNS

SEQ ID NO: 122417 - protein, 342 aa, unidentified
MTAIGIDTHKATLAACAIDELGKPVAEATFANDPGGHVAFIAWARSTAPEATVGIEGSSSFGAALARSAQHAGLSVREVPPHLSRVERRRTRRPGKSDPADALAIARVTARETNLPPIRLPERTSELRLLLEAREDLVGEATRVRNRLHAHLLVLVPGYGGTVTNLVAARHRTTVGRLLRGNGAVQAELARALVARLARVDREIAGLTLRIDQLVAGHPLLGLPGVGSITAARLIGEVGDVRRFRSADALAALAGVAPIPASSGQIQRMRLNRGGNRQLNRALHVIAVTQARFHPAAKAYVARRIEVDGKTWREAIRALKRQLVRPVFRLLLEGSVAELPIA

SEQ ID NO: 122418 - protein, 342 aa, unidentified
MKSATTIGIDLAKNSFSLYGVDDKGKTVLSRTLTRAGVVRFFANLPSCLVGMEACASSDYWARTIESLGHEVRRIHPQYVKAYLLGAKNDTNDAAAICEAVQRPNMRFVPHKSPEQIDIQCIHRTRQGYIKSRTALVNQARGLLAEYGIIIRQGISAIRNQLPLIIADEENALSGLMRRNIASLYESICFFDSQILEQDKLLKTVAKENEACQQLMQVPGIGIMTATILLTVAGVASNFKNGREFAAFLGLVPRQNSTGGKTRLLSISKRGDYYIRTLFIHGARSAITRILAGQTPKYRPNPWVIELIARRGRNKACVAMANKTARIAWSMLAQGTEYRHAA

SEQ ID NO: 122419 - protein, 311 aa, unidentified
MEIYVGIDVSKKSFDVHITGLKKDKSFDYTRAKVKECIKWLASLKPVLVLMEATGGYEQTLVAELFAASLPVKVMNPRRIRDFAKAKGQMAKTDKIDARIIADFAQTFQPPPQEEIDEISQKIKSLVSRRRQLVAMRVQELNRKEHAFDTDIAKSIDKLIKTFDQEIAKIESQISNHIDNSPKLKQKTDLLTAMKGIGKTTAMCITAELPEIGLLNNRQIASLIGVAPLNRDSGAFRGRRMTGGGRREVRTQLYMPTLVAIQHNPVIRAYYQHLLKNGKNKMVAVVACMRKLIITLNAMVAKNQPWIDNYA

SEQ ID NO: 122420 - protein, 482 aa, unidentified
MKPKSPEKAKPATRRPMQGNWHQMNRKQRREMTRRIQSEDLSLAVIHPDAAGIDIGNESHYVAVPPTRDSQPVRRFGCTTAELKEMAVWLKQCAIRTIAMQSTGVYWIAVFDILEAAGFEVYLVNARETKNLPGRKSDVQESQWLMKLHTYGLLRNSFRPSQEVRTLRTYWRQRNDLVQAAGRHIQRIQKALTQMNIQLANVLSDVSGMTGQAIIKAILSGQRDPHELAAFRDPRVKASAEEIARSLEGNWQEDLLFVLRQEQHGYEFCQKQMAECDQQLQQYFSHSEDRSQGASMPQEKRKERLRKKKGNKPQFELRAELFRITGTDLTRIDGIDVMTAMTILSEAGWDMSKWKDEDHFVSWLRLCPDNRISGDKIIGKGRLPSKNRVTIALKMAACTLRTSNSYLGAQFRRLRTKLGPPVAIKAMAAKLARLVYHMLRDGMQFVDRGAQFYEAQHRNLQIKSLKRRAAALGFQIIEAAAA

SEQ ID NO: 122421 - protein, 371 aa, unidentified
MKKSIMFVGLDVHKNSIEIAFAEGGRDDEVRSFGKVSGNLEALDKVIRKLVAKGCELNFAYEAGPCGYEIYRHLNSKGFDCTVVAPSMIPKQSGNRIKNDRRDAQMLARLHRAGELTKAYVPCVEDEAMRDLTRAREDAKGLEKRAKQRILAFLLRQGYRYSGRSPWSRAHFRWIATLKMPHPAQQIVLQEYLETLSECRQRVAHLTEQIQALLPQWRLSPVVRALQSLRGVSLIVAATTVAEVGDLTRFDSPVELMSYLGLVPSEHSSGGKTRRGSITKTGNGHVRRVLIEAAWAYRLPARVSLKLQQRQEGLSQNICAISWKAQLRLCARYKRLLAKGKATQLITTAIARELCAFMWAIAMAVKAPETV

SEQ ID NO: 122422 - protein, 351 aa, unidentified
MKEFIALDAHKRYSWMEREEVKSRKIRHARIEHAPGAIRECLEGREEGTPVAVEATGNWYWIVDEIEQAGLEPKLVHPRKAKLMMGLVNKTDKLDAHGMNQLQRNGTLPTVWIPPRELRDQREITRARMVLTRHRSRLKNRIQATLSKYGWNGGEASDPFGKKARGELRKAIRGLPPQTAQITEMLLQQLDFVHAQIEALEEKTRELVRDTAEMDRLRSQPGVGWILSAVIALEVGEMSRFASAERYASYAGTTPRVHASGDKVRYGRLRPDVNRYLRWAYIEAAHSVCLYRQTYPERHVSQLYERIRERKGHGKAIGAVARHLAEATYHVWIREEPYQDPVLRKGRSTEV

SEQ ID NO: 122423 - protein, 419 aa, unidentified
MAFKILRKNCCGLDIHKTWIFACIGITDSNGRTEYKQARFSSFSNGLRDLADWLAKYSCLDVCMESTGKYWIPVFNILEKTCWVTLAHPKYTKPQKGNKTDRKDAKWICDLYMCGMVKPSFIPPPDIRQLRDLMRCRVKLTNMLTGEKNRAQNCLTVSNLKLDDVFSDVFGKSSRSIIQYILEHPGEQFDVTPFIHRRYKHPVEEIQAAVDGVVSREQAAKLKECLLHIDQLNAHRERIEAEILRLAEPYPYQLELIRTVPGFAAAPLTAVALISEIGVDMSVFPSAKHLASWAGCCPRNDQSNKKVKSTRISRAGYYLKPLLVQIANAVIKSDRHPECRERYRRIKARRGHKKAIIAVCRMLLTAIWNVLSKLEPYSAKGYLADKLTEHSVVISKAEGLALLRKRGYIFKDELAVESG

SEQ ID NO: 122424 - protein, 379 aa, unidentified
MSFDYYVGLDVSQRTTSICVIDHQGKKHFEGKSNTRPEDIRGWLLNRVEEGKTLRIGLEAGTMSSWLYTGLTKFGFDVVCMETLQAHRFLKTYRNKTDKNDARGLAQLLRMGGEDFLKVVQIRSQAAQETRVLLAMRDHLVTQKLSLENHISGVLKPFGIIIERGAVSGDTFYKRTLEALAQAERNGVNVRGYVLPSLHLYMEAVGRIAPLTEKITEIARSIEIVRRFMEIPGVGPVTALSFYAAIDNPERFSKSSDVAAYFGLTPRQFQSGETDYMGHISRRGDPGTRRVLVIAATVLLSASQEWSTLKAWGVRLAKRIGFSKARIAVARKLAMIMHKIWLNNDRFRPKIISAQERLKLKQELVAASSRSRPVASAPV

SEQ ID NO: 122425 - protein, 394 aa, unidentified
MAFKIFRKNCCGLDVHKTWIYACMGITDTNGRTEYKQARFSSFTKGLQELADWLAKYDCNDVCMESTGKFWIPVFNILEKTCWVTLAYPKYTKPQKGNKTDHKDAKWICDLYMCDMVNPSFIPPPDIRQLRDLMRYRSKLTNIMTSEKNRALNCLTVSNLKLDDVFSDVFGKSSRSVIRYILEHPGETFQVAPFIDRRCKHPVEEIQAVIDGTISHQQAVKLRECLQHLDELEVHKTNVEKEILCLVQQYPYQLELLQTVPGFSGNIMTAIALISEIGADMSVFPSAKHLVSWAGCCPRNDQSSKKVKSTRISRAGVYLKPLLVQVAIQSFTANADKLSAAGALEIRCQICDGRFLSMWAALFIFLGCPLPPCPKNLHVHNGRIVILASVAWIF

SEQ ID NO: 122426 - protein, 411 aa, unidentified
MYYVGIDIAKNFHVVSIIDDNETKVINKPFRINNDVKGFDKLLTILDSVTLDKDRFLIGLEATGIYGENLLEFLKSKGYSVKLLNPFQTSRYREQITMKKVKNDNIDSLVIALFLKDGKYSSGYVTDDEYQSLRTLYRNRASIQSDMKEVKKRIITQITVTFPEFESFTNPFTISGLALLDKYPTAHHYKHSSVDRIMKIFSHIQGNNFNKDKALKLLELSKESIYSGKAKDARAIAIRSTTRLLKMYLSEIDIIEAEILSLLDKKGINSNTLNELPEDNTLMDNLKTIPGVSDKTIAAVISECGDLTRFPSIPKFIGYLGLFPTENSSGNSKSIGHLSKRGSSLVKHALYLSAVSCLLHNKQMKQLYDTKRSQGKSKKEGLVAVSRKLATIIYSIFKYNTPYNPNRVFTN

SEQ ID NO: 122427 - protein, 350 aa, unidentified
MLIIGCDYHPGFQQIACVDTDTGELREHRLAHREEAEAFYRVLKQRNFSPRVGMESSGHSRWFERLLRELQFELWIGDAAEIRTKRVRKQKTDRQDAQLLLKLMIEDRFPRIWVPDAENRDLRQLLWHRHRMVQMRTRVMNQLHVVALNEGLRRKKALWRPAGRMELESIVLAPWASRRRQDLLDLFDQLTPKIQELTRALEEEVEKRPVTRQLMTHPGVGPLTALAYELVIGTPERFHCGKQIASYVGLVPSEESSGDRRRLGHISKQGNALLRFLLVEVAQVTVRSQPQWRSKFFHLAMRRGRKIAKVAMARKLAVHLYWMWRQGWDYGQFAKLGSHAGEPGNLHGGK

SEQ ID NO: 122428 - protein, 425 aa, unidentified
MKNNFLKTLFVGIDVSSKTNVLCALDFEGNKLLNLKALNDQNGAESILESLLDCLISKELENAVIALESTSVYSIHIANFLSSSDELLPFNTVVYCLNPKTIVNYRKSFTDMDKTDPLDAYVIADFARCGRISSSPWRGSQFLALQRLTRHRLHLVECITREKAYMVSNIYLKFSQLAILDKEEKPFSNNYGATSKAVLTEFLSLDDITYAPLDELVTFVKEKGKNRFADPQATAKLLKKAANDSYRLDKVLYEPLNISLASSFNVIKTFETEIKSIDKAIERNIKGLNTNEYQSLMSIPGIGPVFAAGILSEIGSINAFDSNNALAKYAGLTWRTNQSGDYTSDETHMTKTGNRYLRYYLIEATNSVKNNVLEYKVFYNKKFGEVKTHQHKRALALTSRKFVRLIFGLLTKNQIYSGDKVGEIQ

SEQ ID NO: 122429 - protein, 347 aa, unidentified
MRLYTRQHKHYCGIDLHARSMYVCVLSQAGDVLLHRNLQCEPALFLAAIGPYREDLVVGVECIFTWYWVADLCAKEGIAFVLGHALYMRAIHGAKAKNDRVDSRKIAALLKGGLMPQAYVYPAEMRATRDLMRRRLHFVRQRGQLLAHIQMTHHQYNLPSPGRKISYRSNRDGIGEGFEDASTRESITADLAMVDQYERVIGEMELEVVRQARGHDHNSFQLLRSIPGTGRVLALTILYEIHDIARFERVQDFASYSRLVKCQHSSGGKVVGSGSGKIGNAYLKWAFSEAAVLFLAKCPQGKPLLARIERKHGKAKALSILAHRIGRAVYFMLARQRAFELERFLRS

SEQ ID NO: 122430 - protein, 345 aa, unidentified
MEKTKYFIGLDISADDFSASCITTPDNIIFSAQKFQNNLDGFSEFFAFLLSREIKPTETIVCMESTGVYCEGIAYFLYSKGFNVSIEAPHKVKQKIKDTPRKNDFIDSLAIAEYSYRYLDKLPIWKPQMEILQQLKTLLSTREHLVTQKTASENVLKTLKRKYIQTPLALEIYEENIKKFNEQIKQIDKEIKALIEKDDNFKTKIDLAMSVPGIGLLLATNLLVLTDGFTKHLNYKEIASYVGICPYEQISGRTLHKKPRSKRYGPSRLRKLLYLAALSVATYNLNFRKYYLRKVEEGKSKRLVLNNIENKLLKIIFAVIKSGTKYIENYRSVNPIYLKKCLTMS

SEQ ID NO: 122431 - protein, 341 aa, unidentified
MYYIGLDVHKKTISYCIKDASGQVYREGTIGAARNELDVWIQTLPLPRMMAMEATIFTGWIYDHLLPHAEQVKVAHPLMLRAIAAAKKKNDRIDAGKIADCLRCDFLPECHMASTEIRDRRRTLRYRHLLVRQMVQMKNRVSGLLLETGVSHNKQRLHKVGYFRELLSSEEVHENIRPLLRLSRETIVRCQRTEYALVSSLERDPLLAERIKRLRTVPGVGIITALTWALEIGDVARFRSVKQAISYCGLCGEEKSSADKVLRTPLSKQRNKHIQHVLVEAAKLAPRQNHELALIREREMQKGNRNRATLAVARKMVAYLLAVDRREREFVPAEVCSTVAA

SEQ ID NO: 122432 - protein, 483 aa, unidentified
MKPKPEEQNKRATNHPTQHHWHEMNRKQRREMMRKMQSEDLSLEVIHPDAAGIDIGNESHYVAVPPGRDSPSVRRFGCTTAELKAMAAWLKQCGIRTVAMQSTGVYWVAVFDILEQAGLEVYLVNARDTKNLPGRKSDVQESQWLMKLHTYGLLRNSFRPLQEIRVMRTYWRQRNDLVQSAARHILRMQKALTQMNLQLANVLTDISGATGQAIIKAILAGERDPHKLAEFRDPRVKASEEQIAQSLEGNWQEDLLFVLKQEHEGYEFCQKQMAECDRQLQQYLQQREDRSHGAPLPEEKRQGRRKKKRANKPQFDLREGLFRMTGTDLTRIDGIDVMTATTVISEAGYDMSKWQTENHFVSWLRLCPDNRISGERIIGKGRLPTNNPISIALKMAASTLRESKTYLGAQFRRLRTRLGAPIAIKAMAAKLARLVYRMLRHGMKYVDQGAAVYELRHRELQIKRLKAKAEKLGYRVTPIPAAA

SEQ ID NO: 122433 - protein, 366 aa, unidentified
MISVAPAAERIYVGMDVSRDKIAVAVLGPGEDVPAVEVISHDGEMVRRLIGKFADRSVLAACYEAGPGGYELYRLLAAAGVACDVVAPALIPKAAADRVKTDRRDCVRLALSHRAGLLTAIRVPSEQEEAVRDLVRTRADLVDDRKRMMQRIGALLQRHGRVWRAPRWTYQHRAWLDRQSFAEPALQAALRTYLAALDARDAELAVLETQLRGCWASVDPLASMVRQLGCYRGIAELTALTLAAEVADFRRFASAPAFMGFTGLTPSEYSSGARTRRGAITKAGPQLVRGALIEAAWSYRHRPAIGATLRRRQAGCAAETLARSWKAQQRLHATYAKLTRRGKIPSVAVTATARELAGFVWAEMTS

SEQ ID NO: 122434 - protein, 316 aa, unidentified
MSEPVYVGIDVAKSSFEVAVSGQSQTLNLSNDEAGHAQLVDQLRPLHPRLVLLEATGGYEQPLALALAGAGLPVSVINPRQARDFARCMGKLAKTDRIDALALRGFAALLDAQGHQPRALADEQQRELTALVVRRRQLIAMLVAERQRLAQAHPKAKPSILNIMEAIAAQLQDVDGQLKAHVLQHHADLAALLTSVKGVGPTTASTLLAQLPELGRLNRKQITSLVGLAPINRDSGTLRGQRHIFGGRADVRRVLYVAALVGTRFNPVLRDFYARLLAAGKPKKVALVACMHKLLIILNAIARTKSPWRNDFNAVQ

SEQ ID NO: 122435 - protein, 402 aa, unidentified
MNAVGIDVSKSKSVVAIMRPFGEIVSTPFEIKHTASDIHSLVELINSVEGESRIVMEHTGRYYEVLAHQLSEANLFVSAINPKLIKDFDNDSLRKVKSDKADAVKIARYALDKWQNLKQYNVMDELRNQLKTMNRQFGFYMKHKTAMKNNLIGILDQTYPGVNTYFDSPARSDGSQKWVDFASTYWHVDCVRKMSLNAFIDHYQNWCKRKKYNFSQSKAEEIYGKAKELVPVLPKDAITKLIIKQAVDQLNSASTTVESLRTLMNETASKLPEYPVVMAMKGVGTSLGPQLMAEIGDVSRFTHKSAITAFAGVDPGVNESGTYERKSVPTSKRGSADLRKTLFQVMDVLIKTHPQDDPVYQFLDKKRAQGKPYYVYMTAGANKFLRIYYGRVKEYLASLPES

SEQ ID NO: 122436 - protein, 345 aa, unidentified
MELFTLGIDLGKTTFHLVGMNQRGDVVVRKRFSRTQLLHFTANLKVELIGMEACGGSHFLGRALREQGHEVRLIPAQYVKPYVKTNKSDYIDTEAIAEAVGRPRMRFVPIKSDDQLDLQSLHRVRERWVMRRTAVVNQIRGLLLERGITLRKGRRYVDAALPGILADSDSKLSGSVRVLLMELKLELEQLADKIERSDQSIEHIARENEACQRLVVMPGIGPVTATALIATIGNASAFRKGRDFAAWLGVVPEEHSTGGKQALWQIPLRGNQYLRRLFVQCARAVMQHKTKQSSGLSAWLVQLTARTHHNIAIVALANKLARMAWAVLAKNEVYRPPILVDAIAG

SEQ ID NO: 122437 - protein, 316 aa, unidentified
MQSALFIGVDVAKDNVVVACSQATFPVRTVPNKPAALKTFLRSLPPQSSIAMEATGSYHQDLADLAHQMGLRVYVLNPRDLHHYAKGVGLRAKTDRVDAGLIARFLANEGPRLRPYQPPTAEQRKIDQLLRRRAKIVTLKTALQLACHDMPSIRTETANLLKSFTALLKKIDQQLATLQQAIPERAQQLQRLQSIPGVGPLTACWLANLLDRIRFANSDALVAFTGMDPRPCDSGQKRGQRRLSKRGPAEGRRLLFNAAMAAARCQVWKHTYEHYRERGWTTTEAVLILARKMLRIALAMYKTQKSFDAQFIGKTA

SEQ ID NO: 122438 - protein, 341 aa, unidentified
MNQPQTIVGIDIAKSVFQIHEVDKETGEVTSRQIKRARLLQHFINREPCFIGMEACGGAQHWARQFVAMGHTVKLLPAQSVRPFAVGNKNDIADARAIWIAVQQPGIKAVAIKTEAQQAVLALHRMRQQLVKFRTAQINALRGLLAEYGEVMPLGRDAVAKALPSVFARLVDRLPGVLIESLREQYTRIAQLDKEVSNIERRLQEWHRDDESCRRITAIPGVGLLTATATVAAMGDPGAFSSGREFAAWLGLVPRQTGTGGRVKLLGISKRGDRYLRTLLIHGARSVLMTSKTPPAWAANLAKRRPLNVAVVALANKMARTLWALLAHQRAFQSGYVSRPA

SEQ ID NO: 122439 - protein, 358 aa, unidentified
MRIIGVDLHTRQQTIAMLDPETGELVEKTLKHEGEAVREFYSALPHPVLVGIEATGSMYWFLELLEELGIERQVGHPTEIRAAEPRKQKHDRRDAALLLKLQVENRFPSIWMPSAELRDLRALLRHRHQWVRMRTRVQNTLQAIALSHGLRRGQSLWSQAGQQAIARLPLAPHAAQRRTELQTLYGKLGKQVDELGEQVMDQALQRPGAKLLMTHPGVGPVTALATDVFLGDPARFDDGKAVVSYVGMIPSEYSSGGRQRLGGLSKQGNPLLRFLWCEAGIHAVRQDPELKRFYRCKLPQKGLGKTRVAVARKLGIRLWIMLRDQIDYQEFCRRGQMRQKSGGARAGMPEGVHSPARS

SEQ ID NO: 122440 - protein, 344 aa, unidentified
MRIAILGVDLGKNVCSFVGLDQAGAVVMRRRARRDTLIKFVSNLPACVIAMEACCGAHHLGRLFAACGHEVRLMSPEYVRPYVKAQKNDDRDAEGIAEAATRPTMRFVEVKTQAQLDMQTLHRSRDRLVGERTALINQLRAILLERGIVVPQGKRKLECYLVALMEEPEGGALTARMRMLIADMQAQWLELDRRISAFEAEFVAFAKEDEDARRLTTIPGVGVTIATALIAAIGKAETFAHGRDLAAWLGLVPRQWTTGGKPRLMGISKRGNKYLRKLLIHGARAALPHVAERDTSLGRWAKGLLARVHPNVAVVALADKLARICWAVLRSGQNFSAKGAPLAA

SEQ ID NO: 122441 - protein, 458 aa, unidentified
MQQPVEVQVDEHEQIMPRVAAVDVAKASGMVCLRTPHETVPGRRVTKVWPVQATTAALVELGDHLRCERVQRVVLESTSDYWRPFYYLLEAAGLTVWLVNAAQAKNVPGRPKTDKIDAVWLAKLAERSMVTPSLVPTEPMRQVRDLARARFDLVEDRTRVKQRIEKLLEDALIKISSVLTDVLGVSGRAMIEALTAGQRNPKVLAELAKGRARRNRAALERALHGRFTEHHARLARLLLGQLDELTVRIEEVTGLLDTAIRALPTSTSTTPTATTGAGGATNAESSTALPAPAGYDGAIARLCAVPGGGPDSVRAVLGEIGLDMSVFGTAGRLCSWARVAPHTRQSGRHNARARTGKGNPYLKSALAQIATGAAKTDTFLGQRYRRLIKRMPKAKALVALQRSILVIFFHLLADPTAEFTDLGSDFYAKRIDRARRTTHLLRQLHALGYEVRLAELSA

SEQ ID NO: 122442 - protein, 313 aa, unidentified
MSQNNPHILYVGLDVAKLTLQLHLAGRFHLLANDAKGHAQLLKHLRGQPAAHVVCEATGGYEQAVVRALQTAEVPVSIVEAGRIRYFARAQGQRAKTDPIDAAVLSEYGTLFKPAATEPASPQQQQLAELAQRRRQLIHLLISERNHAEHYTDAFRVRQARQLVKALEKQITQCDEAITTLIAQDPELARKAERLKTIPGVGPVVAATMLAEMPELGSLTTQTAAALAGVAPYNRDSGGQTGVRRINGGRVAVRCALYMATLSAVRHDRILKEFYLRLRAAGKKPLVAMTACMRKLVILMNRLLKNPDFQLAN

SEQ ID NO: 122443 - protein, 398 aa, unidentified
MSRIWAGTDCGKTHHHCLVMDSEGGTLLSRRVANDEPELLQLLGDVLDLADGRAVTWALDMTGGEPALLIALLVNHGQELLYIPGVMVNRASDGYRGQGKTDARDARVIADQARMRRDLQPIRPDDDAIVELRLLTERRVDLVAERTRTINRLRSLLTSMFPALERALDLGTSGALLLLTGYQTPAAIRRTGQRRLTTWLRTRRVRGAEALAAKAVGAAERQHTAVTGETAIAAMVLTFTREVIALNDKISEADKRIEGRFREHELAEVIQSLPGIGTVLGAEFLVAVGGDLEAFPSPDRLAAFAGVTPAPRDSGKVSGNLHRPQRYHRRLQRVFYTSALVSIQRDPNSRRFYDRKRAEGKRHVQAVLALARRRVNVLWALIRDRRCYQVAPPVTHAA

SEQ ID NO: 122444 - protein, 345 aa, unidentified
MSTTIGVDVAKSVFEVAVSDRPGRIVKRHRLSRGQFARFLATRAPATVVMEACGMAHFWGRQAVASGHRVVLLPPHAVRPYVPRNKTDRADATALLEAARNAAIHPVPVKSVTQQALTGLHRLRSTWLATRTARINIVRGLLREFGVTIPVGARQVVPRIAALLAGPDDTVPAVLHPALAAVISELRELDVRLRTVEQQLTAIAAAMPAVERLRTIPGIGLLTATGLVAFVGDARRFPTARHFASYLGLTPREHSSGLRRRLGAISKRGDTYLRMLLIHGARAVLCHAKKAITPARLQRWALHLERLRGHNKAAVALANKLARIAWAVWTSGTEFRVAHLTPTPA

SEQ ID NO: 122445 - protein, 337 aa, unidentified
MTRYVGVDLHRRRSVIVVLEADGTELWTTGIDNDPLTLGLEIEKAGPAPEVVLEATWGWYWAADVITEAGGRVHLAHPLGIAGFENRRVKNDRIDARLLADLLRMGRLPEAWIAPGSIRQQRELVRYRRKLSQLRAGLKSQVHAVLGKEGLLPPLNYLWGPGGKTWLDETEMGEAYETRVRSLRRLIKTYDTEITKLDARIASEFKGHPGYEAIQVIHGVGPVFGAIFTAELGDVTRFHSAKHVCSWAGLTPRHRESDTKIHRGSITKQGPPLVRWAAIEAVSKNHGDDPIKDLYRRVAERRGRNKGRVAAARKILTLVYYGLRDHEIRSLAPPEAA

SEQ ID NO: 122446 - protein, 461 aa, unidentified
MNKKKFRGGQKGSAQKKVDWKALEIVHPDAAGIDIGGSEHWVAISPDRDSEPVRRFGTFTADLHEMARWLVEKAVRSVAMQSTGVYWMPVLEILEQHGLEVYLVNAQHTKNVPGRKSDVEECQWLLKLHAFGLLNNSYQPSDEIRIARTLWRQRGNLVAEAASAIQRMQKVLIEMNIQLSNVLSDLSGVSGMTIIGAILQGERDPWILASLVQPEVKATPLEVAKSLEGNWRQELLFILSQHVELYRIYQNKIVDCDLQLRKHLETFGSKVDLQTQPIGPKPKGKKGSRNAPQFDLRTELYRITGIDWAQINGMDVLTAQTVIAEAGADLSAFPTEKQFTSWLGLCPTNEQSGGKILKRRTRNVVNRASGAFRNAASGLIRSQSYLGAQYRRLRTRLGAPKAITAMARKLACLFYRLIKHGQQYVDKGTEYYEARYREQQIRSLARRAQKLGLQLVIPETA

SEQ ID NO: 122447 - protein, 323 aa, unidentified
MNLPSLGIDLAERSFVAALRFSTQAVSKAQFPNHGGGFRQLATWLKRHNAGCVRAGLESTNTYGDALATWLHAQGHAVYLLNPERTACYARSLGQRNKTDPADAVTIAAYVAQYDGTLWQPPSPEQKALRSLTRVRQQLVETSQQLRNQLRTAAPLARAHLQGVLREIQRHLTAVVKEIAAHLRAHPALDTAVRHLMTCKGVGLVTAAITVAELPPVTPQTDPRSLCAWAGLTPRRHQTGNTEWRARLSRKGNVYLRQALFMPALVAKRYNPVLRAFAQNLAARGKRPGAILGAVAHKLLRILIGLLRSNSDFNPLWQPAKNN

SEQ ID NO: 122448 - protein, 384 aa, unidentified
MKESSTLYVGLDVHKDSIDIATADAGREGEVRHVASLGGDLVGLDKALRRLISKGHRLHVVYEAGPCGFVIWRHLRAQGIECEVVAPSSIPKRSGDRVKTDRRDAMMLARLARSGDLTAVRVPGAADEAVRDLARSREDAVRECRNARHRLKALLLRNGIGYAGKSAWTAAHLRWLATLKLEHAAQQIALQEYLHAVTDATARIARLEQAMRDTLPEWSLAPVVQALQAMRGVQLVAAMTLVAELQDFLRFDNPRQLMAYVGLVPGEHSSGPKRRQGSITKAGNSAARRMLVEVAWHYQHSPRVSPIIAKRHDELPKAVTDIAWKAQLRLNAKFKRLVARRMLKNKAVVAVARELTGFVWAIGREVQTCGWQGIKTELAGNTAD

SEQ ID NO: 122449 - protein, 394 aa, unidentified
MTATRTVSIGNPTSVLYLAFELGAHDWKLAFSTGPADAPRLRSIGAGNTQGLLAEIAKAKKRFGLAEDAPAVSCYEAGRDGFWLHRYLLAQGIANQVVDSSSIEVKRRGRRRKNDRLDAGKLVSMLIRWNQGEKNVWSVVQVPSVEDEDRRQLHRDLLELKAQRTQHVNRIKALLAGCGLRLAKVDADFPEVLAGLRNWDGQPVPAELQQRLQREHQRWQLVDRQIKDLENERARRIRTSTDEPVAKVRQLLNLRGLGANSAWLFVMEFFGWRRIGNRKQLASLAGLTPTPYQSGDSDHEQGISKAGNRRLRAMAVEIAWCWLHYQPQSALSEWYRRRFGAGKSRLRRIGIVALARKLLVALWYYLDKGVAPAGAEVLCWETKKQRPQSATAGV

SEQ ID NO: 122450 - protein, 337 aa, unidentified
MNVTTLSIDLAKSVFQVCGVNQAGTEVFNRQVRRNKLLETVLLYPEAEIVMEACSGSNYWGRAFIQHGFRVKLIPPQHVKPFVRGNKNDRNDAFAIAEASRRPNLIFSQPRSIAATDMAVLHRIRDRRQSSLTRLTNQIRGLLNEYGIVIPQGVEPLRRHIPLVLEDAENELSHLMRAELQSLFEEWCMMESLIKQHDKAIEQYARNDAQATLLMTARGIGSITATALMSVMGSPAHYKNGRHFASSLGLTPSEHSSGGKQRLGRITKRGSRYVRRLLVQCAMSHIRHLNNRTDNLSIWLKKLKERRGPQVAAIALANKLARISWAMLHKQQEFKLN

SEQ ID NO: 122451 - protein, 352 aa, unidentified
MKISRVGIDLAKNVFQLHAVDDRGKRVWKRQLKRGNWISALVEKVEPDCEIGMEACGGAHHWARELKSRGYQVKLIPPQFVKPYVKGNKNDASDASAICEAMGREDMTYVAVKSVEQQDIQAIHRVRASVMGRRTASSNQIRGLVAEYGLVAPKDLEPLRRAIPQWLEDAENGLTDRFRRLLHGLWEELLRLDQRLEALDREIKVIAESHADAKRLLKLRGVGPLVATTLVARFGDGSHFKRGRQAAASVGLTPRHHGTGGKNRIYGLSKEGDRYLRSILIHGARAVVSQAKRRDDRLSVWVTDLKERSHMNVAAVALANKTVRMAWAMLRNGAEYDAELAAGERYRGWVMA

SEQ ID NO: 122452 - protein, 409 aa, unidentified
MRIISKRCLGLDLHKKQITAHLRVQRRSNQLPLGEDLQFGTMPDQLQQLRQWIIDQKVEDVVMESTSVYWMHLYELIEDVTRPLVANASHVKKVPGRKTDVGDAQWLAELGAHGLLRPSFVPPKEIRELRSVARYRTRCVAMQTAIRNRTIKLLETAGIKLSSVVSDCFGVTGRGILDALTKDEPVDVVKLAKMSLRKKTDELARCLGKGLLSALQRGLLKMHLEAYDAMDAQIAQTELVLATLAKPYTKAVTALDAIPGINALGAITLIAEIGVEMSAYRNDAHLTALAGLAPGNSVSADKRRRIGVRKGNHHLKRICVQIAWAAARKKGSFLRVRFLRLQNRIGRNKAVVALARQMLVLVYHVLCGKPYTDLGQTFYDERDKVRAVDRYTQKLVALGYNVQLVKKPA

SEQ ID NO: 122453 - protein, 346 aa, unidentified
MKKIFIGIDFSKEKFDATLIKAEGLKECAPSMHEVFDNKTSGFRRLVRWVKAQSEGLPIDTWIFCGENTGAYSIGLSNYLYASGYDMCLECAYKIKHSAGILRVKNDKADSKAIAEYAMRNYDKVRLHKPQSSSLTCLREVFLYRHSLVRQKVALTVRRDEKRLTQEKSDARAFMSFTSKHLITEINKAIYKCDQKIKETIAADDELREIFDIITSMPGIGVQNATCLMVYTDNFQKFDMDSRKIACYYGIAPFGRQSGTSVNGRPKVSPFANRMIKSLLSQAALAAIKSDINVYNYYQRLIERGKHPLLVHNNIKNKMLHALVAMVRDRIKYNPDYVYQTNKSVA

SEQ ID NO: 122454 - protein, 356 aa, unidentified
MSQQSNCATAVIGIDIGKNSFHVVGHDQRGAIVLRQKWSRGQVEARLANLPPCLIGMEACVGAHHLSRKLQLFGHNARLMPAKYVRPYSKGQKNDFRDAEAIAEAVQRPTMKFVATKTADQLDLQALHRVRERLVSQRTGIINQIRAFLLERGIPVRQGLRFLRAELPGILAMRTDVLSPRMSRVIEALAGDWRHLDARIEGLTGEIETLARQDQHCERLMTVPGIGPIISSAMVAAIGTGDVFCKGRDFGAWLGLVPKQISTGDRTILGSISRHGNRYLRGLFVQAAWVVLVKLGPKHWERYGLKSWIEAAKKRLHHNVLAIALANKLARIAWAVLNKGRAFACAKTDAMASRPA

SEQ ID NO: 122455 - protein, 424 aa, unidentified
MLAESQDEEQIIERVAALDIGKAEVACCVRVPGPEGSRKRLQEVSTHSTMTRSLTELAHHLLDLGVDRVVMEATSDYWKPVFYLLEAHGLDPWLVNARDVKHLPGRPKTDVIDAVWLCKVAERQMLRPSFVPPAPIRRLRDLTRYRIDLVGVRGAEKNRVEKLLEDACIKLSVVASDIFGVSGRAMMAALINGERNPKVLAQMARASMRTKIGALEEAFTGHFDDHHRFLLATMLDRVDNINADIAAVDAQIEVALAPFADAAARLDEIPGIGPVAAATIVAEIGVDMSRFPTSGHLASWAKFSPGIKSSAGKIKGNGSTGHGNRYLARTLGEVAVCLGRTNTFLGERYRRLARRRGKKRAIVAIGRSILVAIWHLLNNPDTRFHDLGPNHYTQRTNPDTRKRGHIRQLEALGYNVTLTPATAA

SEQ ID NO: 122456 - protein, 325 aa, unidentified
MTASHLADNSFIGIDVGGSALDVAWHRGDSAHYANRPDAIAALIDRLAQQPVRRIVIEPTGGYEKALVKALHQAQLPFEIVHTTRFKAYRDLVGVKAKSDTSDARLLASYAAAPDDVRGRKANHVELPQDTTRDALSELASRRDQLKHMIHAETCRLGTTRLDELRQAITTHLEALKAEDKRIHRRMLELVRQRLDLKRDQKLLKTIKGIGPKSALVLLASVPELGLIDNKAAAALIGAAPFVHKSGTMVAPARIHGGRAAVRRILYMAAVAASRHNPVLRAFYDRLVAKGKPAKLALIAVLRRLVVFANAVLKSGEPWKGAART

SEQ ID NO: 122457 - protein, 316 aa, unidentified
MDNKLAKIIVGVDVSKDHLDIYIIPVNKHIRIKNSDTGFKKLLKELSSYEVQCIAFESTGGYEAPMARLLEQSGYQTWLIDPVRIKAFIKSEGIKAKTDIIDAKMIAMFVAQKERKYTPKPLPAEHFELRALVKRRESLTDMISMEKKRLKMPTQTEYCKELINDLVQSLEKQKDIVEKTINSFIARNDDWKRKSLIIQSIPGVGSVTASALISHMPELGTIENKPIAALLGVAPYTRQSGNYLGNASIYGGRPTPRWPLYMAALAATRFNPVFKEFYQRLINAGKAFKVALVATMRKLICTINVMLKNNAHWRFA

SEQ ID NO: 122458 - protein, 372 aa, unidentified
MGWSPQPETASEVPKCGEWEFPQTREATEMKITTIGIDLAKNVFQVHGVGERGKAVLRKPLKREQMAPFFANLPPCLIGMEACGSAHFWANKLQALGHTVKLIAPQFVKPYVKTNKNDAADAEAICEAVSRPSMRFVPIKNGEQQAILALHRARQGFVKARTAQANQIRGLLAEHGIIIPQGIGHIAKQLPEILEDGGNGLSGTFRRLIDRLGDHLKELDRQVQELEVQIQTWHREHAVSKKLAQIPGIGPITASALVASIGDARNFEDGRQLAAWLGLVPRQNSSGGKQTLLGISKRGNTYLRTLLIHGARSVIRVTERKAQHAGSWLAGVMGRRNKNVAAVALANKNARIVWALLAHGRDYQADYGSAAA

SEQ ID NO: 122459 - protein, 428 aa, unidentified
MKNRNVQKLEAITPGTLVVGVDIAKETQWAQFVDYRGLELREALKFKNHKNGFDSILASIEVICKNRRLDNIMVGMEPTGHYWKPLANYLLKNKVNVVMVNPYHTKRAKELDDNSQTKSDKKDALTIARLVRDGRYYEVYMPQDIFAELRVLSNSRISLMKRSNALKNTITAVMDEYFPEIVTVFKNPLKGKAAMQILKSCPFPSLILELGIDGVLFEIKKAVKKTVGRKKAQQLVETAKNSIGVGYGLVSAKLKLGLMIEELELLIKQLGQLETAMEKALADTGYGEIILGIPGIGVVTAASLLGEIGDPMRFDHPRQICKMAGYNLIENSSGKNKSRTVISKRGRKNLRSILYQMAMTMVAVNEEMKKLYKYLKTRPNNSLKKKQALVVISKKIVTVIYNLIKKQTEYQAELVLGEFRKNQIKQAA

SEQ ID NO: 122460 - protein, 370 aa, unidentified
MKKHNSREKSPRRSKAALEHDPVTIGIDLGDKTSRYCALTGSSDKGAEGSVATTRKAMAQKFGAMPACRIAIEVGGHSRWVSQLLASFGHEVIVANAREVKAITASSRKNDQTDARMLARLARVDPALLRPIRHRGKQAQEHLMKIRVRAALVETRTSLINTARGLAKSAGERLPGCDADQMGMARAEGLPEWLIEQLKPLLVQVEQLTVQIKKCDRELEQIARTEYPETKLLEQVWGVGTLIALTFVLTIDEPHRFGKSRDVGCYLGLRPRRSQSGERKPELPITKEGDRYLRVLLVQAAHRILSRPGPDTDLKRWGWKLAQGGGKSKKAKKRAIAAVARKLAVLLHRMWVTGEVYEPLRNSGAMAAAA

SEQ ID NO: 122461 - protein, 411 aa, unidentified
METIFERVGALDVHKAQVTACVRVPGPDGRREPEVTEFASTVQGLMALRDWLAAHRVTHVAMEATGVYWQPVWHILEEDFQLTLCNARHVKNVPGRKTDVSDAQWLCQLMEAGLLRGSFVPPKPQRRLRTLTRYRKTQIAERQREANRLHKALEDTNIKLDCVASDILGKSGRAMLDALVGGTTDPEVLADLAKGRLRAKIPALKQALEGRFEPHHALVVGAILAHLDFLDEQIQRLGEAIEEQLGPTGLAGVALASTITGVGARTAEVMVAEIGTDMTVFPSARHLASWAGRCPGNDQSAGKRRSGRTRNGSKWLGIALEEAALAAIRSKNTYLAAQYQRLKPRIGHGRALGAVKHSMLTAYWHMFKTGETYRDLGGDYFQRRDPARATKRLVAKLQALGHHVTLQQLPA

SEQ ID NO: 122462 - protein, 343 aa, unidentified
MPHYVGLDVSQKTTAICVVDAQGKRLWRGVCATDPGPISARISQHAGVDAKVGIETGSMTPWLVHGLRAAGLDVACLDARRVKAALQMQLNKTDENDAEGLAQIMRTGWYRAVHVKSLDAHRARALLGARAQLVGMTTRLSNMIRGVLKTFGLLPGAGRGLRFDRKVEALLEGAPEIALVVRPLLATWRQLRQQIAVFDKAVLQQVRADPICRLLMTVPGIGALSSLMYVSTVENPSRFSRSRAVGAHLGLTPRRYQSGETDRSGHISRCGDGLARTLMYEAATVILHRVKRPLHLKDWAEAIERRSGSGKARVALARKLSVILHSVWRSGVPFRWATPAMAA

SEQ ID NO: 122463 - protein, 340 aa, unidentified
MSLVLQSFLPCPDSCQGTSPHQQGRDTKMAEHFFCGIDVAKDRLDVMMSPEGLCFSVRNDAPGWAELVVRLRPLKISAIGLEPSGGYERGVIRTLLAAGLSVRRINPNKLRQFARARGVLAKNDRLDARLIAEFVAIMPTRVVRRDKAAERLAEIVTMRRQLCDEHVTVENQATHLEDAMLRRLSKRRLARLEADIHLLDKRLANMVAADSALAPRYQMLISMPGVGPVLAFTLIALLPELGQMSRKQIAALVGLAPYDFDSGKLKGHRSIYGGRMQVRNILYMAALSASRYNPALKAFHDRLTRGNKKPKVIIVAVMRKMITTLNAMLRDNAPWQPKSA

SEQ ID NO: 122464 - protein, 470 aa, unidentified
MAAVMIGVDPHKASHTAVAISAAEEPLGELRVRACAVQAERLLAWAAAWPQRTWAVEGAGGLGHLLAQQLLAAGERVLDVPPKLGARVRLLAAGDTNKNDPNDARSVAIAALRSAGVREVRPDDHAAVLKIWSKRHRDLGRSRTQVVCRLHAVLCQLIPGGVSKAITAAAAARLLESITPAGAVEAARAELAAAFLEDLRGIDARIRQTRKKLAVAVQAAGTSLTGLYGVGPVVAAAVIGDVRDVSRFPGRDHFAAYNGTAPIEVSSGPRKIYRLSRRGNRRLNHAIHMAAVTQIGHRHSQGRAYYEKKLAQGKTPKEALRALKRQISNAIFACLQADAQRAAARAKGPGGQQGNDSVASAAGLHPRHRLFGQATPGPGHHTTTAASNPAPGPARARGRAGHSSIAAILPSAQPQVQVERPQRSEDERPGGAARRRPHSAARKARGQGSPRKPQRPNGTSQAAKNTCGAP

SEQ ID NO: 122465 - protein, 434 aa, unidentified
MSSLEKIIKNCAGIDIGSEKVFVAIEGEEVKSFRTFTRTYKELGVYMQEHAITHVAMEATGIYWITLYDILEAMGFEVYLINPADSKNLPGRKTDVQDCQWIQQLFSYGLLRKSFVPEDIVRKLRVYTRMREDKLQMASSHILHMQKALVQMNIRLPEVLSQTHGASGMAMIEAILDGERDAQVLLSYCTTDLRKRKGADILLALEGNYKEEYIFELQQAYDGYMFYLNQVHLCDKETEKILIEFKNKSNNDYKDDNRIKPIRHNKPDIKNLHDLLMGIHGANPTVLPGLTDYSLMRLTAELGNNIEQWPNVKAFVSWLGLAPGKNQSGKMNKRSKKKAMTRSGQIFKQAAQSLLLSKQPGLGAFARKLKARRGAAIAIKATARKLAELYYKTFRNGMQYVEKGVEIYLQKQKEQQIRFLTKKATELNMQLIDI

SEQ ID NO: 122466 - protein, 461 aa, unidentified
MGRAKVKRIPATVVEDEDYQLTHERTCGIDIAKDKADIAVRLPPERESGRRTTRTWTLPSTVAAITELGAELTGAGVELVVLEATSDYWRSWFYLLEAMGLNVRLVNPSHARQLAGRPKTDKLDCQWLARLAEMGLLRASFVPPPAVRALRDLTRTCLHLTRDRTRQWQRLEKLLEGALIRLSSAVGKMAGNGSVLKILQAIVDGERDPDALAALAHGNVKGGRGGVRAHLEGMMPRPHHIELISMHLRVITMLEREVNRTGDLIREHMDAMEQAWGVTADGVPSPDPGPDAAVPAAAQRLAEIPGVTIELATWIIAELGLDMSRFPTAGHLVSWAGLSPVSQQSGKHTKKAKKGNGDAYLKGYCTAAALGASSTATFPGERYRRLSRRIGGAKAQVAVARSILIIIWHLLSDPAARYQELGPDWHLRTTDRNRRTHSHVQQLRALGYDVTLTPADPATAA

SEQ ID NO: 122467 - protein, 412 aa, unidentified
METIFERVAGLDVHKESIAVCSRRREGASFREEVCEFGTTTSQLRLLATWLKERQVTHVAMESTGVYWKPVWNVLEGGFELLLVNPLDLKQVPGRKSDIRDCQWIAKLLQHGLLRASFVPPAALRELRDLTRHRAQLQDEHTRIANRIHKTLEDANIKLGSVASDILGVSGREMLQALLKGTASPAEMAELARGRMRRQIPALREALEGRVTAHHRFMLTQLLAHLSQLESQVETFNARIQEAIRPFLSREDEERLDAIPGMNRISIENVVAEIGTNMSQFPTAKHLASWAGMCPGNEESAGKRKRTKTTKGNRWVRRALCEAAWAAARTRESYLGAQFRRLVGRRGKKRALVAVGHSILVIVHHLLSHPGTQYKDLGKDFFARLEPERQRRYLVQRLETLGYEVTLELKTA

SEQ ID NO: 122468 - protein, 424 aa, unidentified
MKVTYQTCCGVDVHKSFLVATIVKTTGGIEPSYQKKRFSTFNNSILEFKQWLLDNHCHDVCMESTGKYWVPVFNLLEDKINVVIANPKWVKAVKGNKDDTKDSKWIGDLFRLGLVKGSYIPCKKVRILREYTRYRYKLVSCRSSEKNRYQNALTVCNVALDSIVSDIFGKSSTSIIDYLLEQSGTSINHEEIASKLLRSLKSKEDAVIESVEGYQMTDAQKYRMRLVRAHMDYITAEINDVDKMIENMISSNPDFENAVQFLCTIPGVKRDSAITIISETGTDMSQFSSSKRLCCWAGLTPGSNESAGKKKSVRITRAGVYLKPALVQCAHAAVKSDKSPYYKKKYESLVKRRGKKRAIIAIARMILTAIYQMLSTGEQWNPGDLYKIDMPVALVEKQKAKAIKQAKKLLQREGLLPPDEPLAS

SEQ ID NO: 122469 - protein, 413 aa, unidentified
MGRKTAEVELYYERCCGLDVHKELIVACFRDGTKNTIREFGATSKELRILAEWLNCAGCEMTVMESTGSYWKPVYNILELLGLEVMVSNARDVKNLPGRKTDVKDAEWMARLLAQGLLKPSYIPDRGQRELREVTRYRKSLTEERAREINRLGKMLEGANIKLTSVVDDVLGKSSRKLLEAALEGEPLTELTIEGLIHKSMIGKSSLLVDAMDGVLSKTQRLLIRAVLEHIDDMARRVADLDDFIEDEMKKYDNAIKRLDKVPGVGVLSAQTILAEIGLDMNQFPTPGQLAVWSGVCPGNNMSAGKRKNSKTHKGNKTLRATLVQCAQAAVLTKGTFFRAQYDRLVVRRGKNRAKMAVAHSIIIAIWHMLKYETEFHELGGNYYNNFNPEKKINMYLKKLAELGWVPPTPAIA

SEQ ID NO: 122470 - protein, 410 aa, unidentified
MAERFVGIDVALREHRVAVLDRDGEAAGPSFTIAASKDGMATLLRTLAARDATAAQTLIGLEASGHLWENLEAALVGAGYRVLVLNPLPTRRYRDVLRRKAKTDDIDAHVIAGLIRSGAAQASYVPDEYIQSLRELARLRARLMDDWQDYLRQLIAQLDVVLPEHRTALGDLRSARARGILAQFPTAQHLAQASPRAIRRAAEDAGTRGFTLDDAIAVRGAARQSLYSGKAAAARAQVVRTLVNQLDRLSTAIDEVDRAAIALLPPSEPGTGPSDADLLQTIPGIGPHTAATLLGELGAPMRFTDAPALVAYVGFYPVITESGQRVGTPRLSAVGSRIARRALYLAAVNAVRRSAEWRTIYLRKRAQGKSAKQALIVVAVKLLHTLYAMLKHRRPYNPSRLLVATATIGT

SEQ ID NO: 122471 - protein, 404 aa, unidentified
MSVHVAPVTSSTIVVAVDVGKTSAVLSVTDAARHRLLAPSEFAMTGSGLTAAAARAMAVAPAAVQVKVGVEAAGHYHRPVLDHQWPDGWEVLELNPAQVAEQRRVQGRRRIKTDVIDLEAITELVLAGYGRPVTDRDVVIGEISAWAVHRSRRVATRTATKNQLLGQLDRAFPGLTLALPDVLATKIGRLVAAEFTDPARLAGLGVNRLIRFAATRDLQLRRPVVERLVAAAHDALPTRDAVIARRILAADLVLLGDLDDQIQSAETALGSLLPRSPYATLTSVPGWAVVRASNYAAALGDPKRWPGPQQIYRASGLSPMQYESAHKRRDGGISREGSVALRRALIDLGIGLWLNEPAAKNYAQGLKDRGKPGGIVACALAHRANRIAHALVRDHATYEAARWA

SEQ ID NO: 122472 - protein, 412 aa, unidentified
MPRIVYPVCCGIDVHKTFVVAAIASTNNNGVTTHQTKRFSTYTKSLRTLCEWLHVNNCKDVCMESTGKYWHPVYNILEPTCNIVLAHPKYLKAIRGKKTDKKDAKWIADIFKHDLVSGSFIPPADIRELRDLMRYRSKLTNYATGEKNRAQNCLTTSNIQLDHAFSDVFGKSATAILKHLLEHPDEKDFDVSQFVDRRCKTPIDEIKLAIDGSISREQAEKLKIIRSHMDSLEACKLSLESEILTLAEPYLTQTTLVLTVPGIKLFSAIAIIAEIGVDMSVFTTAKHLCSWAGVAPQCNESGGKKKSSRVSRAGVYIKPILIQCANAVVKSNNHPEFKNRYLAIKKRRGHKKAIVAIARMLLTAIYNILKKNEPYNPELYRKADILPVNHERRAVLFLEQHGYTISKADIST

SEQ ID NO: 122473 - protein, 422 aa, unidentified
MLQEDQQVEEIVARVAALDIGKAELVCCVRVPHPTRPGKRMQEVVTYRTMTRSLLVMADRLAGLGVSEVVMEATSDYWKPPYYLLEARGLNPKLVNARDVKHLPGRPKTDKLDAVWLAKLAERGMLRPSFVPPPKIRRLRDVTRYRADLVEVRTAEKQRVEKLLEDAQIKLSVVASDIFGASGRDMLAALIAGTRDPKVLAALARGRMRAKLTDLEEAFTGYFTDHHARLLTTMLARIDGLSADIAELEVMIEEMVAPFTDAVAKLDEIPGIGRVAASAILAEIGLDMSRFPTDGHLCAWARFAPGTKESAGKKKGAGSTGHGNRYLAKVIGEAVAGAAKTDTFLGERYRRLARRRGGKKAMVAVGRSMLVIIWHLLSDPDARFVDLGSDFHAKRTDPDRRRRAHVHQLEALGYTVTLTPAA

SEQ ID NO: 122474 - protein, 416 aa, unidentified
MKIVRPICCGMDVHKNIIVATIGITNKKTRITEYIQETFSTLNPDLLNLKQWLINHKCFDACMESTGKYWIPIFNILEDEINIYLTHPKYVKAIKGKKTDKKDSKWICDLFKHDLIKFSFIPPKEIRALREISRYRYKLVGMRSSERNRYQNCMTVSNIGIGSVFSDPFGKSAQAIMKEVLESDIIEDEKILKCIHGSCKNKDKILDSIKHCNIETDQRFKMNESMTHMEELQVHINNCEIEMIKRAAPMFDQFMHITQLPGISTLSAILIISEIGVDMKQFESYKQLTCWAGLAPANNESANKKKSVRISKAGQYLKPLLVQCALGAIKDKEGYFGIKYSRIKKRRGHKKAIIAIARMMLVSIYHMILTGETFNPSDYESFRNPNPPIKQQVLTEESAIEFLKKSGFDVSKLTKP

SEQ ID NO: 122475 - protein, 377 aa, unidentified
MKKELYIGLDVHREAVAIAVAEQGRKGEVRDYGQISNDLHALERFITRLRQTHGKRVTLRACYEAGPCGFGVARRLQQLGVECAVVAPSLTPTRAGDRLKTDKRDARKLARLLRAGELSAIYIPEPTDEAIRDLCRARSDAVDDRRRSRHRLKAFLLRHGYRYQGRTSWNAAHERYLRELMLPHPAMKVILEEYLISVQLAGERIARTEAAMSDLLGKWRLEPAVRALMAMKGFQTVAAMIVVSELGAVDRFTHPRQVMAYLGLVPSEKSSSDRRRQGAITKCGNAHARWLLVECAQHYAAPPKVSKELSRRQQNQSRQVRLISWKAQNRLHQRYCRLMARWLQRNKVIVAVARELCGFIWELLRTQECYHSPSPSR

SEQ ID NO: 122476 - protein, 427 aa, unidentified
MKKKDYLSTLFVGIDIGSRVNVVSALDFEQEYLIKMVSIPNAQSGAEQMEAMITAVLEKHTEFKSVIIGLESTGFYGVHIANYLSTSDKLMPFSPYVYCLNPKEIANYKKSFIGLGKNDGIDSFVIADFARVGRIHNEPWRGSQYLALQRLTRHRLHITECLTREKTYMLSNIFLKFSEFALLDASDHPFSNKYGSTAAGILTEYMSTEDIANASIDDLVAFINKRSRGRIGDPEQTAEILQQAARNSYRLDKCLYEPLTTSISCSFNCIQAFSSELKSINKAIERAVQGLNPVEYQILTSIPGIGPVYASGILAEIGSVKCFPNNDTLAKYSGIVWKENQSGNFTAEDTPMSKAGNRYLRYYLIEAAGSVSMHVPEYQYFYQKKFAEVTTHQHKRALALTSRKLIRLIFGLLDKNQLYSSNRVGNP

SEQ ID NO: 122477 - protein, 342 aa, unidentified
MEHYAGIDVSLECSSVCVVDATGKIVREGKVASEPEALISWFRLLGFAAERIGLEAGPLSQWLYAAMKQAGLAMELLETRHVRDAFKAMPVKSDRNDARGIAQLMRLGWFRPVHCKSMAAQETRAVLTARKLVQSKLRDVENSLRGILRGFGLKVGKTTQRSFAERIRELMANHASLEMIAEALLSVHAVLLREFKAFEKQVRLMARSDAKARLLMSTPAVGPIVALTYASAIDDPARFKSSKQAGSHFGLTPRKYQSGETDVTGRISKIGDASVRTALYEAAHIMLIKPVKGCSQLKSWAMRIARRAGMQKAKVALARKLAVILHRMLANRTLFNAAAAAA

SEQ ID NO: 122478 - protein, 373 aa, unidentified
MESVLYVGLDVHKSGISIATAEGERGGEVKFVGEIPNTPATVEKMVKSLQRKASQIEFCYEAGPCGYGIYRQITALGLNCIVVAPSLIPKASGDKIKTDRRDAQKLAVLHRSGDLVSVWVPDATHEAMRDLVRARTDAMISLMRARQQLLAFLLRHGRIYGEGRKYWTHRHREWLAGQNFDDPAQCIVFQDYVETVWTATDRRDALIKRIGELVPEWSLGPIVQALRCFRGLDVVSAATFVASVGDLTRFDNPRQLMAYLGLTPSEYSSGNRICRGGITKTGNREARRMLVEASWSYRYPARVSQDKAHHMVKQPKIVRDIAWKAQERLCKRYRKLSNRGKKSTVVVTAIARELSGFIWSVGQELSPQMELKG

SEQ ID NO: 122479 - protein, 499 aa, unidentified
MKLTTVGIDLAKNVFQVHGIDEHGKVLVKKQLRRDQMATFFVNLPPCLIGMEACGSAHHWARKLQTMGHTVRLMAPQFVKPYVKTNKNDAADAEAICEAVGRPNMRFVPIKNVEQQAVLALHRVRQGFVKARTAQANQIRGLLGEFGLIVPQGIGYIASRVPELIEDAGNELPGSFRVLVQRLLDHLKELGRQVQELEAQIQAWHRSSDLSTRLAQVPGIGPITASALVASIGDAKNFDGGRQLAAWLGLVPRQHSSGGKSNLLGISKRGDSYLRTLLIHGARSVIYRAGQKADPCSWINAVVQRRNKNVAAVALANKNARIVWALLAHDRHYEMGYKKAAEVLWPKANRAATVHTTTSGRNTTDCSGDHEVMARQVRPWLTKPVLSGAPRVRVSDRGANQQIPSGTAAKSCTHSPNVREQSSPSRCHELRDWHRGRSCTPEVLIPQPKAGVLQWAISLGSADDAVPARRRVQAARSWRHSMISSAPSRCPIGKFLAPK

SEQ ID NO: 122480 - protein, 482 aa, unidentified
MKATPKEPAPKATGQSTQPNWHQMNRKQRRDMERKIQRADLSLQLVHPNAAGVDIGNESHYVAVPPDRDSQPVRHFGCTTAELRTMADWLKQCGIRTVAMQSTGVYWIPVYDLLEQAGLEVYLVNARETKNLPGRKSDVQESQWLMKLHTYGLLRNSFRPSQQIRRMRTYWRQRKDLIESAGRHIQRMQKTLTQMNIQVANVLSDVSGVTGQAIIQAILAGERDPQKLAAFRDPRVKASEKEIARSLEGNWQEDLLFVLKQEQAGYEFCQKQMAECDRQLEQYLRQLEDRSQGATLPEEMRKDRLQKRKGNKPKFDLRQQLFRMAGTDLTQIDGIDVMTAATILSEAGWDMIKWQDEDHFVSWLRLSPDNRISGDRIIGKGRLPTTNRVTVALKLAASNLRTSQSYLGAQFRRFRARLDTPVAIKAMAAKLARLVYRMLRYGTKYVDRGAQFYEVQQRTRQIKHLKQKAAKLGFHLVQAPAA

SEQ ID NO: 122481 - protein, 539 aa, unidentified
MTGTFSTSHPKEAGEPVGLSSPACFGGALKLPQWYLRDTMKTKKTTQSPASIYRNQNALLRTLFERAADPRKVLCVALDYAKRKHVALCCDGNGEILRAPFAVDNTVEGVAFLIEQISATARRRKIPQCDIFLGGEDEASYVANFTAALRARQYLVLRVNAAEAKENRENQIASTDLLDLLGIAKTLLSRRARSTGPLGLKDKKATQDIYFEIREITRCRRTLVRQQTAASNRIHAYVDQLFPGFLEHSKSGLTPFCEASIALMRERFSVPEIARRRPRTLATFLARHGVRQPDEVAAKLIALASGALPPAPHRLAALQRTLCATVDLRQCLTRNASELRCQAAILLASTPYVMLTSISGIGFTLAAGTAGELGDPSRLSGVDSLCAFAGIVPRTFQSGGPDQPACQGHSPARCNHILKDWTVQSAQKILLYGPPELKDRITRWNANGQHGIFAGARRYLRLLRSLVLNRTPYLDPASRSSTASSALCADAALQAWLILIRKWRTIPGGIAIITNKDTPLGFWRCTAMESRDVVLPLKP

SEQ ID NO: 122482 - protein, 513 aa, unidentified
MEIANATGDRSGLVKHLPAPREQWLVTRVTERNGQAQLVDRGGGEMEKAIGIDPDAVGFVCAVVDGQTERPATKRFSVAVEGLEQFIRWTKAQGECIVALEGIHGQSRPIERALRQAGVVFHSFKPSDTDKFRKAVLGQNKNNERDAESVARFALALKAQGKLERFRRVWEPNMELQLLTRRHESVGKQLTAEGNRMWKLLRQASPDLYLILAGKVEGVDCPPGVLRNEGILTLLATKPQIGEWDGLSEDELMQGMGGGEYKGRRSFLQQIGKVTSSFPQISRPMAFIIGSSAEQLRQLRREQTQIKRMLVEITEELPSVQALKQIAGIGSITASMMMAEIIDIRRFPSEDNLAGYNGLGRVEHNTGDRERMVSPRTYNRRLKDAFMTAAQNVVRYDPNCHLAGYHRNLVKAGMKPTEATKRVARALVRVIYRTLTALIELDQEAQPDEAQQEGQRGVASGERRGDKKHLSNTPPPSPKVSRPSPRRQVKRTAKRTGSVTNTRKKRLPIKQTA

SEQ ID NO: 122483 - protein, 348 aa, unidentified
MALTIVEDTRAVTGGVDTHADMHVAAALDPVGGLLGVGEFPATAAGYARLLGWLGGFGTVCLVGIEGTGSYGAGLARHVTAAGIRVVEVDRSDRQDRRRQGKSDPLDAVSAARAAQSGRARGEPKGRDGAVEAIRALMVAKRSARSERTQTINQARALIVTGPDDLRARFARHTAAGLVSELAALRPCPGATVGYATRIALRELGRRAEFLDGQLGRLDELIVPLVTARAPALLALHGVGPDTAALLLIAAGDHPHRLRSEAAWAHLCAVAPIPASSGKRTRHRLNPGGNREASHALWRIVITRMSSHAPTRAYVDRRTKEGLSKKEIIRCLKRYAARQVYRHLRPAG

SEQ ID NO: 122484 - protein, 350 aa, unidentified
MEEYIAFDSHKRYTWVEHLQVSTGKVREYRLEHAPGAIRQALAGCTPGTAVAIEATANWYWITDEIEQAQCVPRLVHPRKAKLMMGQINKTDKLDTHGLNTLQRTGTLPTVWIPPGPLRELRELTRTRVVLVAQRTRWKNRITATLAKWGLPASEYSDPYGKKAREELEQRLERLPEQTRWATQQMLRQLDGLSEQIREFEERLEELVEVTPEMQLLLSLPGVGVILAATIALEIGEIARFLSAERLASYSGTVPRVHSSGDRTRYGRTRPDVNRYLKWAFAEAGNSTAVNHRRFPERHVSQLYARLRARKGHSTAVGAVARHLAEAAFHVLSRKRVYRDPAAVGRTTEV

SEQ ID NO: 122485 - protein, 367 aa, unidentified
MNTLYIGLDIHKATITIAVAEEGRNGEVRPQGTFENTPANVDKLLKRLTRQDRQLHFCYEAGCCGYGLHRQITDAGHLCSVIAPSRIPHKPGERVKTDRRDAIKLARLLRAGELDTVWVPDSAHEAMRDLVRSRGDAMECLKSAKQQLQAFLLRHGRVYSSPTSWTRSHYIWLSDQKFGHPAHQIVFQDYINAIHDGEKRHDQLVKQIEQLLPQWSMKPLVDAISLMKGINMLAAATLLSVTGDLRSFPSPMQLSSYFGLVSGEHSSGNKVNRTGITKTGNSEARRVLIQGAWCYRFPARITQPKEPKLSAAEKAIRDVAWRAQVRLCSRYRRFIANGKQAPVACAAVARELATFIWEMGQIVPLTS

SEQ ID NO: 122486 - protein, 355 aa, unidentified
MSQEKYIGMDVHQATISVAVMDAQGKLIMECLLETRAATIVEFIRGLHGTLSLTFEEGTSAAWLHDLLKPHVSRLVVCDPRKNALLKDGNKSDRIDARKLAELLRGDQLHPVYHGEHGVRTLKELGRSYLTITQDVTRVMNRIKALYRSWAIPCAGATVYSPRHRTEWLAKITEPGVRVRAERLYQQLDLLQPVRLEARRELLAESHKHSAVKLLRQIPSIGPIRSALLVALLQTPHRFRTKRQLWAYSGFAVQTHDSGEYRSVRGKLQRNRERMTVRGLNDNHNRDLKNLFKSAAISASTRPGPLRDFYLARVEKGMRPTMARLTLARKMAAISLTVWKKGVEFDPQLLQRQAA

SEQ ID NO: 122487 - protein, 457 aa, unidentified
MPKSFSEDGLMKQKKPSKKRSTKLPKHLQHLNQHAAGIDVGSRSHFVAVPEGTDEQPVREFSTFTDDLERLAKWLRSCGVTAVAMESTGIYWIPVFELLERHGFEVRLVNARHVKNVPGRKSDVLDCQWLQQLHTYGLLRGAFRPTDQICTLRAYVRQRATLVRSSASHIQRMQKALAQMNLQLHNVVTDITGVTGMGIIKAIIAGERDPKTLAGLRDKRCKNSVETIARSLHGNYRAEHLFSLQQAVELYEFYLQKIADCDQQILTQLKSFDSSDGNGSDSEPPRSIEEALQQMSGVDLSSINGINTNTALKIIAEIGTDMNRWKTVKQFTSWLGLCPGSKISGGKVLSSATKPVANRAAAALRMAALTLFNSKSALGAYLRRQRSRLGAPKAITATAHKLARLVYSMLKHGTDFVDAGQEQYEERYRSRVVQNLKRRAQEMGYNLVAIQDEPQTV

SEQ ID NO: 122488 - protein, 406 aa, unidentified
MKKLNTNVACAGMDVHYKFSNVTFRDTNGDVVSRQRLDHPDRRKLRQRLAQWPPGLPVIMEASFGWGWLSDLMDEYGMKVALSNCFKVEQMRRARGGVKTNKKDADLLSLLGFEQTDWWKVWRAPSEVRNRREQMRFRADLVAMQTAVKSRIHAIFHRHGIFHDFSDLFGAKGRVFLNELCMKNTAHLSVEALAALRGQVKLLDHLRRQLADVTRVLHRQMARTPLTVRLKTVPGIGLVLAHVLAAEIGHIERFRTHKSLAAYSLLAPRSSDTGEADPRHSPQGRHLGVQGNRTLKWAWIEAAHGAVRSRGRWRDLFERVTDGGRKDRGRGYIKVARELVKVTYAVWSKGADYRDVRPTRGGSDTSTSKSKNMSKSMSKCKCKTRRKPSRSETGQLYHPMVHALTA

SEQ ID NO: 122489 - protein, 363 aa, unidentified
MIVIGADTHKATHTCAAVAAATGQLAGELTVAARKPGFIELLAWARELDPDRVWAIEDCRHVSGALERFLVAAGERVVRVPPKLMGQSRRGERSAGKSDPIDALAVARAALREGPETLPAAHLDEAALELKLLLDHREDIVKARSADQQRLRWHLHDLWPELELPAGCLDRPTWLDRLARKLARAEQGARVRVARELVVEIRRRARRAKELEGEIAALVSRRAPELLELKGCGTLIAAKLVAETAGAARLASDAKFARLAGVAPVPASSGKRVRHRLDRGGNRQLNCALHRIAVCQGRVHPPAQEFLERKQAEGKSRREALRCLKRHLARRVWRLLIDSEREISPTTVDTQKGTLAPQFAVAT

SEQ ID NO: 122490 - protein, 350 aa, unidentified
MTIRHYIGFDVHKKSVSYCVKTADGRIVEEGKLRATHEALRQWASQRQEPWHGAMEATLFSGWIYDTLQPFAAELQMGHPARMKAIFAFKKKNDKLDARKIADLVRVNLLPACYVGPAEMRELRRMLRYRNLVVGQAVQMKNRMSGMLMEVGAEYSKQRLHGKEYFSELLDRLEEVPESVKDLLRLSRGALEMFETVQRQLLGRLQKEPLLRQRVALLRSIRGVGEVTALSWALEICDPQRFASIGDAVSYCGLTSALVESADKQQRGPISKQRNAHLQTVLIEAAKLAPRWNPQLAALHERALQHGHRNRATLEVARKLVAYLLAVDKSGQPFEVRTAPATETEAQQVA

SEQ ID NO: 122491 - protein, 393 aa, unidentified
MYYIGIDVAKRGHCMSVIEKGGEKTIEDFKFPNTKEGFDNMFAKLGSAGVTHTGSRVVTESTGHYGKLLCAHLRRHGFEVAVANPIQTHGFRNSGSVRKVKNDAADSLALAQWLAIGHPVSTSSAAGITEELKAIARLRTFQSQIIGDSKRKAVAILDQSFPEYEDFFSDAFGKSSLAVLKRYPGACAISTARIDSLSKLIEKASRGKLGRDCAQRLKALAKGSIAAALDDFGLSFALIALIELIEVIKRQQDETDARLSELMATISTPIVTIPGISTILGATILGEIGDVSRFKGAPSLVAFAGLDVTVFESGEFKGTKRHLTKRGSSYLRWALWLAADRSLRCDPYLSSYYWKKRSEGRGHKEAVCALARKLCGVIFAVLRDNKPYIRPDL

SEQ ID NO: 122492 - protein, 343 aa, unidentified
MAIVILGIDLGKNICSLVGVNEDGAVVLRRRMRRQTVLTFAAKLPSCVVAMEACCGAHHLGRLLTAQGHTVKLMSPEYVRPYVKAQKNDDRDAEGIAEAASRPTMRFVDLKSQEQLDLQSLHRVRSRLVGVRRTLLNQLRAILLERGHMFPQGRRKLEAAIDTLVTDPACEISSRIRQLVIDIRSEWQALDSRIEALNGEFVAIARHDETARRLVTIPGVGVLNATALVAAVGDGAAFRRGRDLGAWLGLVPKQHTTGGKPKLLGISKRGNKYLRMLFIHGARAAMPSLSASQSPLGEWLRGLLARTHRNIAIVALANKLARIAWATLRRKTSFDLRHLAVAG

SEQ ID NO: 122493 - protein, 324 aa, unidentified
MRFYTKQHKAYCGIDLHARTMYVCILNHGGEILVHRNMKANPESFLQVIAPYRDDLVVAVECMFTWYWLADLCAREGLAFVLGHALYMKAIHGGKAQHDKIDAHKIAVLLRGGMLPQAYVYPAAMRATRDLLRRRMHLMRKRAELLAHIQNTNSQYNLPEIGKKLAYKANRNGVAERFVDPAVQKSIEVDLALIDHYDCLLRDMELSILKTAKQHDANTLYLLRTVPGIGEILSLVLLYEIHDIQRFPRVQDFVSYCRLVKCAKESAGKRYGTSGTKMGNAYLKWAFSEAAVLFLRANPAGQKYLARLEKKPSKGKALTVLAHK

SEQ ID NO: 122494 - protein, 324 aa, unidentified
MSQNLNSAVAVIGIDIGKNSFHVVGLDYRGAIVLRQKWSRGQIEARLANMPPCLIGMEACVGAHHLSRKLKAFGHDARLMPAKYVRPYSKGQKNDFRDAEAIAEAVQRPTMKFVATKTAEQLDLQALHRVRERLVSQRTGIINQIRAFLLERGVAVRQGLRFLRAELPRILAAPPDVLSPRMGRVIKDLAEDWRRLDERIDQLSNEIAVLARQDTGCERLMSVPGIGPIISSAMVAAIGTGDAFSKGRDFAAWLGLVPKQISTGDRTILGKISKRGNRYLRVLFVQAAWVVLIKPMKLGTPWAQALDRGSQEETAPQRARDRAR

SEQ ID NO: 122495 - protein, 410 aa, unidentified
MAERFVGIDVALRAHRIAVLDRDGEAVGPSFTIAASTDGVATLLRTLAARAATAAQTLIGLEASGHLWENLEAALVGAGYRVIVLNPLQTRRYRDVVRRKAKTDDIDAHVIAGLLRSGAAQASYVPDEQIQSLRELARLRARLMADRQDYLRQLVAQLDVVLPEHRTVLGDLLTARARGILAQFPTAPHLANANPRAIRRAAENAGARGFSLDDATGVRDRARRSLYSGKAAAARAHVVRTLVSQLERLTSAIDEVDRAATTLLPPSEPGTGPSDAELLQTIPGIGPQTAATLLGELGAFTRFIDARALVAYVGFYPVINQSGDRVATPRLSRVGSRIARHSLYLAAVNAVRRSGEWRTIYLRKKAQGKTAKQALVVVAVKLLHAVYAMLKHRQPYNPSRLLVAPATIGS

SEQ ID NO: 122496 - protein, 342 aa, unidentified
MDPIGIDVHKNASQVCIRTETGQLIERRVRTDRESFAKLLEKRPRARIVVESSTESEWVARCLEELGHEVIVADPNFAPMYAQRSRKVKTDRRDARALCEACELGAYRPAHRSSDRSRALRAQVAVREALVQTRTRHISLIRALLRQQDYRVRSGGAATFFERVDELELPDALRAQMAPLLGVMGSVNAQLKVMDKALEQQAKTHEVAKRLCTAAGVGPVTAISFLATVDRVERFDNAKQVRAYLGLVPRELSSGEKQHRGHITKAGNRRMRALLVEASWQLLRSRRADTEALRAWAHRIALRRGKRIAAVALARKLAGILFAMWRDGTDFGKTTTSAPHAA

SEQ ID NO: 122497 - protein, 320 aa, unidentified
MEIWIGIDISKDTFDAAWEQDGKKEHEKFSNTTAGFKALLKWVPDGSKFVMEATGTYHLRCATFLAGSGLHVSVENPLAIKRFIQSDLRRCKNDVSDSFSIVKYGREKSPRAWTVPSEEAREARRLQGLIELLREQISAQTNYFHALQQEDLMDDAQKLCKASITKMKVAIVDAEDRFKSIVSRFWKDDVERISSIPGVGKMSACKLIAKVEDFNRFEDSRQFMSWLGMTPRNMQSGTSIHVNGGITKMGDGRLRTQFYMCAVSAIQSNGRCRAMYERMVSKGKPVKVALVAVACKLLKTAYALVTKKQMYNANFLQFAP

SEQ ID NO: 122498 - protein, 357 aa, unidentified
MTNDKYVGLDVHQASTSIVVLDCNGKTISESVVRTRADAIRDFISGLSGTIHLTFEEGTQAAWLYEVIRRMVAELVVCDPRQNKALAVGNKGDRIDAMKLAELLRAGLLKSVFHSNHDTKMLKQLTHNYDSLVSDTTRVMSRIKAVFRGQGIPCSGRDVYYKRNREQWITRLAEPGLRTRAQFLFDELEPLKALRRAAKRVMLKEARRNQAFKILSEVPTLGPIRIAQIIAAVGAPHRFRTRRQFWAYCGFAVVTRSTDDYRFDENGPLRRSRPPATRGLNRNFNRRLKHVFKSAALQGASKEPFKSYYQARVAAGMRPEMARLTLARKIANITLTLWKNGGQFNERKLSAQHDRAQ

SEQ ID NO: 122499 - protein, 425 aa, unidentified
MNLLILKGVPMALKIVYKICCGIDVHKTFVVACIASTDSNGVTTYECHRFSTYTSGLKNLLQWLLKHNCKDICMESTGKYWIPVYNILENDCTIVLAHPKYVKAIRGKKTDKKDAKWIADLFKHDLVAGSFMPPADIRQLRDLMRYRFKLTCFQSSEKNRLQNCLTVSNIQLGNVVSDTFGKSAQAILDKLLENPADTSFDLEPLVYKSLKKKLPELRDAIDGYITPEQAGKLKVIKAHYENLESRKAELEELILALAAPYQQELAILQTAPGIRSDFTAIGIISEIGTNMEAFPSAKHLCSWAGLTPTNNESAGKKKSVRVSKAGCYIKPLLVQCANAVVTSKKHPEIRNRYLRLKKRRGHKKAIIAIARMLLTALYHMLKNGENYNAELYRKYDLPPVDWEITVEQAIIIARNQGYKIKSATA

SEQ ID NO: 122500 - protein, 340 aa, unidentified
MEELHIIGVDLAKRVFQVHGSDRAGRVLFRKKLSRQQFKKFLCEIPSCTIAMEACATSHHWGREAEEAGHIVRLIPPNYVKPFVKRHKNDAVDAEAIVEAALRPSMSFVAVKTKEQQAQAVMFRSRDLYLRQRTQLINAMHGHLAEYGVLLPTSRASVARMVAMAKERSEDLPAPVFEMAVLMADDIERLTAKVATIDKALKMLAQASPEAKRLRTMPGVGPITAVAIQAFCPAANSVDSGRGFAAWLGLVPRQNSTGGKDRFGRITKMGQRDVRRLLVIGALSVISASERKGRCDDPWLANMLKKKPRLVVAVAFANRMARQLWAMMVTKKNYEIRAAV

SEQ ID NO: 122501 - protein, 330 aa, unidentified
MKKDRITLGVDVSKKTLDICHWGTHDFIKIENNSSGFKQLAKWMRGKGFVSSQVFFIMEYTGGYEYRFLQYCESKGLSYTRKSGLEIKKSMGMVRGKSDKQDSFRIAQYGEEKAYMLEPSGKLNSTIFDLKQLISFRKRLVREMAGYKASSSERKAMYGKDAGKAILKVSKTMIDVYKKEIYRVEREILQLIESDESLNRNYQILKSVKGIGPVNAWMTIVYTENFKAFTDPRKYAVYAGVIPFEHTSGTSIRGRKRVSHMANKAIKQELNQAAKIAITHDKTLREYTQRKLTTKAYPLVLNNVKFKLILIMFSLIGRQEMYREDYHYAA

SEQ ID NO: 122502 - protein, 391 aa, unidentified
MLICGIDIGKNHHEASLIDETGRLITKSIRFPNSTSGANALIDYFTLNNPDSHIIVIGMEATGHYWLSLYCFLFDQGYQVNVINPIQSDAVRNLFLRKTKNDSKDSFLIAETIRIGRFSNTTLADESILAMRQLCRHRMDLVDYISDQKRKIIGVMDRVFPEYQHFFSDMFGKSSTELLSKAITPEEILAIPTEELCAILQKASRGKFGIDKVQQIRNAAQTSFGITIATSAFSMQLRQLLEMIELLERQLSDLDEEIAKLLHAMDTCITSCPGVGDVLGAVILGEIGDISRFPEPKKLVAFVGVDPSVKQSGEFTGTQNKISKRGSPHLRRAIWLAATVAAFHDPVLSAFYQKKRAEGKHHSTAIGAVARKLTLIIYAVLRDNEPYVPNC

SEQ ID NO: 122503 - protein, 359 aa, unidentified
MIVVGIDPHMKTHTAVALDVATGRSIASKTVACDDRGHDALLLWARSLGPDLYFAIEDCRHVSGRLERHLLPRGERVVRVPPKMMAGARSSARTYGKSDPIDAVCVARAALREPGLPEASLSGPAHDVRLLVDHRADLVQERGRIQNRLRWNCHDLEVGLELPPRVLERYVWLDRLQGLLEALPESTRRRIALSELGRIRELTIEVRDLEREIRGLMRELAPDLMAIPGCSAIGAAHLVGQVAGVSRFSGEAAFAMHVGTAPLPVSSGKSCRHRLNRCGNRKLNSVIHMIAVTQARMHPPAMAYMERKRSEGMSNREALRCLKRHISRAVYKTMVRAERARTGRVLEVEFTTDPLAVAV

SEQ ID NO: 122504 - protein, 410 aa, unidentified
MEPILISCAGMDVHEKKVDVCIAHGPLDKPPVFEIRTYSTMTSDLEDLKSWLKGHGVTAIAMESTGVYWKPIFNIMEDEFEVVLANPQHIKALRMNKTDIKDCKRIANLLRHGLVPRSFIPPRGIRELRDLNRTRRKLVGIMVSEKNRVVKVLEDANIKLSSVVTRIYGVSSLNMIRALLEKDKLSREEISELAKGKLKKKVDKLEKALNGRLTDHHRFLLRMHLENIQYHAGQIKKLDEEIQQKMIPFQKEAKLIQTLPGISEVSASAILAEIGADMSQFPDEAHLCSWAGVCPGNSESAGKRKSGKTRKGNSFLKAALTEAAWAASRTKGSAYHAIYNNLAKRIGRKKALVAVAHRMLIDIYYVLKTGEPYQDVGAKVADERAIQRRERSMIRSLEKAGYSVTRAATA

SEQ ID NO: 122505 - protein, 429 aa, unidentified
MTRISVGVDVSKNRSTVCIMDQDGKFIMRPFLVWHSTEELDFLADTLKRLNGEVRVIMESTSIYQYPIALHLKEKGIFISIVNAYKVNKFANTDFRGGKTDKKDSRTIASYGISYWDKLVEWQIPKDTYFNLDLLNRTYMNAKKHRQIILQELQHYIDCAMPGMDKELHSLNLNTKKDFMLDFVEKFWHRDEIVNMTEAEFTEVFTAWAKKKGYRPVEGKAAKIYAIAKSCIPYYPANPTVKTILQCIVDKLSGVNRTLVTIVTQMIEEAKKLPEYQIVREMPGVGDPLAARFFGSAGDIRRFKNSKALVAYAGIDSPPDESGDFSSTHRHITKKGSKVFRDTGYEIMMALRAQKRTWEKVRKNPEVYDYMLKKEAEGKPRKVAKIAALNKFLRIVYARIKELYDNMALAERAKTKTRSKTRAKTKVTA

SEQ ID NO: 122506 - protein, 410 aa, unidentified
MRVVYERCCGLDVHKKTVVACVLISETSGEMQRHIRTFSTMTAGLLALADWLESMHIPVVAMESTGVYWRPVFNLIEEGRTIILVNAQHMKAVPGRKTDVKDAEWLADLLRHGLLTASFIPPAPIREIRDLVRYRKTLVQERAQEVNRIQKVLETANVKLSSVATDVLGKSGRDMLHAIIEGTTDAEVLANLARGLLRKKLPQLQEALDGRVQPHHRILLKHILAHVAFLEQELEQLQQEIEQRLPPFEEEMGLLLSIPGIQALSAAAILAEIGADMSRFPSAKHLASWAGVCPGNKQSGGKRLSGKTRKGNATLRAALAEVVWVISHTKDNYLAAQYHRLARRIGKNKAAMAVAHSVLVIIYHVLDTRKPYSDLGADYFQKQDANRVAQRSLRQLEALGYEVTLTPKVA

SEQ ID NO: 122507 - protein, 441 aa, unidentified
MSNIVNPNAAGIDISSKEHYVAVPEERSKESVRCFQSFTRDLHELANWLKECKVETIAMESTGVYWYHLYTVLLDYGFDVYLVNAYHVKNVPGRKSDVSDARWLQQLHSFGLLRGCFQPDNPTRSLRNYVRQRKQLITQMSREVQRMQKALEQMNIKLNNVIRDIQGKTGMAIISSILEGERDPQVLAQFRDPRIRASKEKLIMSLEGNWREEQIFNLKQAYDHCFFLQGQLTECDKECERLVEDMSDDDIPKKEIKSGTKQKNSPDFNVSQHLYNALGVDVTQIYGMKSINALTVFSETGPGLKEKFPTEKQFLSWLNVVPDNKITGGKVIYSRVKRKKNKAGLAFRDAANALWKAKNPLGEYLRRKKAISGGRQAIVATARKIASIYYKMVTESAEFDPQVLKFKTQEYLNKRLIYLERSLQKTKMLLADNEIVSEVVI

SEQ ID NO: 122508 - protein, 360 aa, unidentified
MEARTVYNPPPAAPHDDAVRCVLAIELSKKSWIVAVNTPLSEKISRHTLGACDWKELLKLCERIRTRIARELRKDVELVSCYEAGYDGFWLHRLLEAHGIRNYVIDPASLQVDRRARRAKTDRVDVERLLRSLMAYLRGEPKVWSVVCVPSVAEEDDRRLHRERGRLINERIQHVNRIKGLLAIHGIYDYPALRHDRMQQLEGLRTADGRTLSPRLKAEILRELQRLELVIGMIKTIEAERDAIASAKIETEHGSAKRIQDLAKIKCIGPEFATTLVGEVFYRSFDNRKQLASYVGLTPAHFQSGETCRDQGISKAGNAKARRVMIELAWLWLRHQPASPLSVWFHDRVSPTCAVGGRFR

SEQ ID NO: 122509 - protein, 375 aa, unidentified
MKEKVRFLGLDVHAETIAVAVAEPDGEVRSLGTIPNRAESIRKMIKKLGTAEKLRACYEAGPTGYVVYWQLAELGVQCEVVAPTLVPVKAGDRVKTDRRDAEKLARCYRSGDLTAVWVPDEGSEALRDLVRAREAAKQDQMRARHRLSKFLLRSGQRPPTGVRPWTRPYLIWVAQLRFTQSAQESTRQDYLHEVEHMRARVARLEQAIMEAVKLASPALQQVINDLQALRGIADISAVTIAAELGQVSRFGSARQLMGYCGAVPSEDSSGKRIRRGSITKTGNAHLRRIVGEAAWSYRRPPGIWYGLRRRQESISEEVKEIAWKAQHRLHKRYMKLGAAGKPQGKIITAVARELLGFIWAIGTRAETAVSQRAAA

SEQ ID NO: 122510 - protein, 495 aa, unidentified
MKTPASSAAAKRHARHTKKLQQQAKHAQRVEQSQQVQSLDELTPVHRRAAGIDIGSTENYVAIPNEGLAEGEAAVRVFGVFSAEQDALVEWLRAHQITTVAMEATGIYWLSLFDKLEAAGLEVYLVDAHAVKAVPGRKSDWMDCQWLQKLHTYGLLAKAFRPEAPIRRLRTLTRQRLDLIQCGAAHQERMEKALIPMNVQLNLAVSDIIGETGLRIIEAILKGQRDPKELVKLRDPRCHKTTVAEMEAALTGTYNDEDLFVLRQSLEGWKFYQRQMRRCDQKIEQVLAVIPKSKPATQLPPRKSLPAAAQATPKRKRTDTGHNAPSIDFSESLRTICGVDLMKVCGLNVLSVLMLIAEIGTDMAPWRNARAFCSWLGLCPGTKKSGGKVLSRRTRHVKNRASTILRLAAWAAGKTDTWIGRFYRRVKARRGAPKAVTATARKLACVIYHRLKYREEFQLLDMSAYEVQAREHRLCRLKKEAKIMGFDLVELQRVA

SEQ ID NO: 122511 - protein, 355 aa, unidentified
MSQEKYIGMDVHQATISVAVMDDDGKLIMECLLETKAATILEFIQGLRGTLSLTFEEGTAAAWLHDLLKPHVSRLVVCDPRKAALLKQGNKSDRIDARKLAELLRTNQLTPVYHGEHGIRTLKELGRSYLTVTKDLTRTMSRIKSLYRSWAIPCPGTTVYAPHHRLEWLVKIVQPGVRVRAEHLYEQLDTLQPIRQQARRELLLESHKHPAVKLLRQIPSIGPIRAALLVALLQTPHRFRSKRQLWAYSGFAVETHDSGEYRYVRGKVQRNRERITVRGLNDNHNRDLKNLFKGAAISASTRPGPLHDFYVARIAKGMRPTMARLTLARKIAAITLTMWKKGVSFDPQQLSRQAV

SEQ ID NO: 122512 - protein, 400 aa, unidentified
MRVVFGIDVSKASSEVAILINGEKVHGYTIPNDAIGFNRLLGDLKTVHQPEIVFEATGVYSRRLQAFFEDNSYAYTRLNPLESKKQLDSLRVRKTDKIDAEKLAASQFILNRKPSYVQEALYQELRDLSRFYQNLTEDIVCAKNRLHKVLQVTFPELENILSAPTGEQYWNLVMTFPCNSFVLELDDAALRAIIRQSTSKRISEKRVTYLVDKLTKLANQSYCAVKKTSPMMEEVKYYAGELLRLSERRQGVLEEMVTLAQPLPEYEILLSIPGIAETTATSIIGELGDIRRFHSANQINAFIGIDLRHYESGDFLAKEHITKRGNPYARKILFKCIHNIASASHTNPCHIADFYEKRKRQSQVTSTKPHTIASIHRLIRTMYYLITHNKLYDYTSTQNR

SEQ ID NO: 122513 - protein, 341 aa, unidentified
MQAPRHIGIDLHRNQFTCCVRLENGRNYLTDWKLEDLPRFIKKLRPNDEVAVEVTGNTRLFRDAVAPYVARVVAVDPNQFKVISHSVKKTDPNDARNLALYLEKDLLPEVRMKDKTQAQLASLTQTRDTLVKLRTSLKNKINNILSAHGINLEKEALSSEKKLNEVLAMPFEAMIRIELKVIVEQIRSLNRSISELEKTIAEEGSKLEGHKNLKSIKGIGPLTGSILLSVIGDIHDFADEGKLAAYFGIVPRVSNSNETERSGRITKRGSKLGRTALVQCALIAQRYSPYLKRYYEQVKARRGTGKAIIALARKLLGIIYRTLKNNWVFEDFPNFVLAEGA

SEQ ID NO: 122514 - protein, 375 aa, unidentified
MKEKLRFLGLDVHAETIAVAVAEPEGEVRSLGTIPNRAESIRKLIKKLGPASKLRACYEAGPTGYVVYWQLAELGVECEVVAPTLVPVKAGDRVKTDRRDAEKLARCYRSGDLTAVWVPDAGSEALRDLVRAREAAKQDQTRARHRLSKFLLRSGQRAPTGVRPWTRPYLIWVAQLRFTQIAQESTRQDYLHEVDHMRERVARLEQAITEAVKLASPALQQVINDLQALRGIADISAVTIAAELGQVSRFDSARQLMGYCGAVPSEDSSGKRTRRGGITKTGNAHLRRIVVEAAWSYRHPPGIWYGLRRRQETVSEEAKEIAWKAQHRLHKRYMRLGAAGKDQRKIVTAVARELLGFIWAIGTRAEAISGQQVAA

SEQ ID NO: 122515 - protein, 425 aa, unidentified
MSERDYNRQVVKRQRIGRATLVVGVDVGNACNAVGFMDKEGNVLGSCAKLYNSREGFEQFVKMTEGFKKRQGMKDVLIGLEPTGHYWRKLAYFAKDQGYEVRFVRTTALKHHRELDESSSAKSDKRDALTIANITREGKYIDTVIEDGVMRQLRTLSKLRERLLRYSVGAKNALHAALDDYFPELHEIFWSMNSRSLWAVLDRCPFPEDVVLMKRSILRELIARSSRKKAGAAEKAKALYQGAKKSIGLKRIGSADRYRVKICLQEVKRTVLMLKDIDRQLKSILKEIPSSEYLLSIPGIGPLSAAIFLGELGDPACFQNARQIVKYAGYDPQESDSGYRISRKFISKKGRWLFRKCLFFMSMRVVVLSNYFQEYYQRKLQTKNRVGQLPRRKEILCAVVIKLIKVIFALLRDKRRFQDTVNVTA

SEQ ID NO: 122516 - protein, 346 aa, unidentified
MEHYVGLDVSLKLTAICVVDRTGKIEREGVVHSDPEAIAAFIKSNAPHVARIGLETGATSTWLWTELKKLELPVICIDARHAKAALKMQINKSDRNDAVGIARIMQCGWYKEVCVKDLDSHTIKALLVSRALLVKIKRDLENQVRGLLKNLGLVIGPAKMNAFALRAAELTEDRPELAVAVTPLLTARVAIEQQIADLDRKIMKRARNNAQVRQFMTAPGIGPVTALCFLATIDDPGRFRRSRSVGAYVGLTTRRYASGEIDWTGRISKCGDKMLRRCLYEAANVLLTRVAKWSALKAWGIRLAKRSGLRKAKVAVARKLAVILHRMWIDGTDFKWSSKETANQTA

SEQ ID NO: 122517 - protein, 424 aa, unidentified
MQNTAARKRKQVPEGYLVVGVDPHKKRHAAVAITQDFTTQAKFKFDNTREGLEAMLDRAKVEMVKSGCRGVMFAIETGGHYWRNVAYFLDEHGIPFRFINQFTLKRRREGKDLNRRKNDYRDSEVAAQLLCTGEFTESKLPQGVYAELRTAHNAYRRLVKERTRITNLLKGLLDALFPEFTHVFKDPCALTALSVLSTCSIPKVIAGMTEDEFVAAIEAQHKGRRLMRKKLRALHYSAKTSIGIDAGARSLSSEIAFLVEKLELIRGHICTIERTLVRLVDETEEGKYLLSIRGLNYIAVAGLLAELGCFKAYRSARQMIKMAGTNPTESESAGKKRARTPMSKQGRPVLRYCAWTSVIPMLRFNEDFRAWAKQRRERPVHANPLGGREVVGAALNRLLRLAFAMVKNQTYYQVSKSELTLVAV

SEQ ID NO: 122518 - protein, 311 aa, unidentified
MSASIFVGVDVSKDKLDAFLSTGELRQYDNTGPGIRALRKWLASHKPELIVLEATGGLEGPLAGELYRAKLPVVVVNPRCVRDFGRAMNILAKTDAIDARLLALFAERVRPPLRPMASQEHKALAELVKRRRELVAMLTMEQNRLRTAPAIVRPSHERMVKWLLEELDQADQGMGEALSCSEDLSAKVALLASVPGIGTATSRALVALFPELGGLGPKQAAALAGLAPFAFDSGRMKGKRRIRGGRSEVRSALYMPALVAMKHNPTLRAFAARLRALGKPAKVVITACMRKLLVIRNAILRDMTPWRAETC

SEQ ID NO: 122519 - protein, 349 aa, unidentified
MGQVSTIGVDIAKSVFQIHGVDADGTVVIRRRVGRARVLEFFADLPPCRVGMEACATAHQWARELKQLGHDARLMPPTYVKAYVKRGKNDAADAAAICEAVTRPSMRFVPIKNVEQQSALMLHRTRDLLIRQRTQLINALRAHLAELGLVAAKGREGLHQLVTIVMECGDERLPSNARFACQAIVTQLHAVQIEISGLDKRISQIHRTNADSKRLDTIPGFGVILSTAVVATMTDPKAFRTGREFAAWIGLVPRQNSTGGKERLGSISKQGDRYLRRLLVVGATSVINCARARPYKYPWVIELLGRRPTKLVAVALANKMARIAWAVLAKGEPYRAPTRSSNAVIPAAA

SEQ ID NO: 122520 - protein, 353 aa, unidentified
MNDTASIAWLGLDAHSKNCVLGQLDDRGTEVKSWSFVTQPQQLIQRIKAIPATDKRLMLEESNLARWISQLLKPHVQQIVVCDARRNRLISQDHHKHDQRDAFALARLLRLNEFKPVWQPTEDQRVLFKRIAKAYENAVQRQTRLKLQLKSLFQHWGLFPAGATVFSKPGRVTWLKQLPYDTLRAQALLLYELLDQALAGQAQFRRLMCQTGRQFPEIQRLSTTPGVGLVGSHLFVAYLQDPKRFGKFSRLARYCRLGIRDRTSDNKPLGYEQLDRQGIGTLKAISYRAYLQAAKRRAGPVWEFYQLSLHQTGSTTHARLNTQRKILLTLWTLWLTGREFDPKQFFRAQPIDV

SEQ ID NO: 122521 - protein, 339 aa, unidentified
MTVETVGLDLAKDVFQVHGISESGRVIFNRAIKRAKLLAFFETLPPCTVGMEACGSSHHWGRQLRKFGHDVRLMPANYVKPYVKRGKTDAVDAEAICEAVRRPTMRFVEIKTEDQQAILSIHRTRDLAVRQRTQLANMIRSLLREFGHILPIGIEAVTAFAKRHLDGDHPDMPEIANGMLGIQCYQFIGLNERIEGYSKMIEQHALLNADARRLMRMPGIGPITASAIVATIGDAKQFRTGRDLAAWLGLTPLNKSSGGKERLGKITKAGDRYIRKLLVVGMTSRAVMAKRSPEKVDLWTAKIIADKPFRLATVAMANKAARSIWAMLIKKQEYRQPAF

SEQ ID NO: 122522 - protein, 385 aa, unidentified
MQERKVITMITHYIGIDAHTTNYTLSTASDFEEKPYNTSKYAAKLHYILKYANTLCKKDKIQKENILLGYEAGCLGFKLQRDLNKEGFNCIVIAPSSIPGTEMNRKRNKKTDYRDAEAIAKALRNNDYSAVATPDEQDEAIRDYIHEREAQKKTLKAIKQRIGALCNRQGFHYECGGYWTKKHLDWLKSLTFPNEFFREVLDSLLLEYEHVTEKIETMDKRIEAFAEMDKYRESVHKLVCFKGIKTLTALAVIVEVGDFARFMKAKNFVAFLGLSVGEQSSSTDHNQGGITKQGNCFIRRLLTEAAQCFSRVTSSKSKALKERQEGNSEEVIAYADKGNERLRKRYYHLIIHNMKNPNKAKTAVARELACFIWGMMTDNIHTVLS

SEQ ID NO: 122523 - protein, 315 aa, unidentified
MMNEQTYCGIDVAKRHFVIGLSTQKRTKTETNNPKGIAHTIEYLRRFSVDLIVLESTGGLELPLAKALHRTGFRVVIANPRQTNQFAMSQSLAKTDNKDAKMLAFYAQMLAMRDNVAQQLYIPPTPEQEQLEALVSRRNQLIEMRFAEKNRLEQVHSTQVFSVEQHIDYLSLRIDELDREIEQHLKHFDDTIKKFKDIKGLGTQTIAVLMSMLPELGQYTHKQIASLVGVAPHPKESGNTKWKSRCSGGRKAVRNALYMATFVCVRFEPKLKQLYERLRANGKAFKVAINACMRKLLTILNAIVRDDSQWDAHAL

SEQ ID NO: 122524 - protein, 354 aa, unidentified
MLAELVDQVIGVDPDRDRITAVVVDAMSGGEIEHAEFVTTARGYAAAIAWADEHSSPDTRVWAIEGTGSYGSGLSQTLLNEGEWVIEFDHPNAYGRPDGAKSDRLDALRAARETLGRKNWAQPRARGAREALRTLLSTRDGALKDRTRATNKLKALVLSAPVALRDDLAGLSTIGLVKACAKMRPGTAIGAELAGTKTSMRALARRINMLSEEIGELTAAMEPLVEELGPQLLDETGIGYVLAAQVLVSWSHPGRCRNDAAFCRLSGTAPIEATSGQNQTRHRLNRGGDRQLNRALHQIILVRTTHDQRTKDYINRRQTEGKTRREARRCLKNYLARHLYRILETPPQTPTLTT

SEQ ID NO: 122525 - protein, 482 aa, unidentified
MTLVSSDDDLDWEFVFDSRLGHPTGRSEEPMVKRSKKRCEELPILHPHAAGIDVGASELFVAVSADRDPQPIRSFPTFTRDLNALADWLQQCGVRSVAMESTSVYWIPVYQILESRGLEVCLVNAQHVKNVPGRKTDVSDCQWLQYLHSVGLLRASFRPPGFICAIRSLWRHRSSLIQMAAEHVRHMQKALDQMNLQIHRVLNDITGLSGLRILEAILAGERDPVTLARLCHGGVKNSEDTIAKSLEGDYRPEHLFALRQSLAAFHYYQQLVVEVDQEIQGQLGSLETATTAEPTVPKRTKASAYQRRRYEPKTFDLRGELYRIFGVDLTNVPGISAITAQTVLCEIGTDVSRFRNASAFASWLGLCPENKISGGKVLYTKSRRVRSRVATALRMAANSLHHAKDYLGEFFRRITRKLGKPQAITATAHKLARIVYHLLSTKEAYNETVFHRCDEEAIKRAQYRLRKQAAHLGFQVIPLQNG

SEQ ID NO: 122526 - protein, 408 aa, unidentified
MRIIGLDIHRAFAEAVAWKDGKLSRLGRVIMRRERLEEFAKQLSNSDIVVIEATGNAASVAAVIGPHVGRVVIANPKQVRLIAHAKIKTDKIDAGVLAQLYASGFLPEVWIADEPTQALRRQVTRRNQIVRQRSRLKNIIQSILHAHLIPSCPHQNLCGPKGRAWLSEQILPGDERLAVERHLREFDRLTDDLKAIERDLAQSALADERVKRLMTIPGIDMVVALALIAAIGNIERFARPEQLVGYLGLNPSVRQSGPGPAYHGRITKQGRGHARGMLVEAGWAAARSPGPLRSFFLRVQSRRGQHVAAVATARKLAILIWHLLTKNENYLWARPALHARKLRDLELKAGYKPARGQKGTAHAYNLQSQRDQERRWVEQAETAYTRFVAGWNARGPKARTGAAKEERR

SEQ ID NO: 122527 - protein, 377 aa, unidentified
MKNCTRYLGLDVHAQTITAAIAEGRGRIRSLGKFPNRPEAVRRLIERLDGQRNLKVCYEAGPTGYALYWQLTKLGVDCEVIAPSLAPKKVGDKVKTDRRDAERLAQSYQAGDLTPVWVPTPEHEALRDLVRQRAAAKTDESRAKHRLVKLLLRHALREPDESRAWTHPWWRWVQGLKFEHEARQVAFADCIAEVLRMGERLARLDQAIERLVQSAPEHMRAVIEALQAFRGVAKLTAVTIVTEVGTFQRFRRPSELMGYTGLVPCEYSSGERQAKGSITHTGNAHLRSVLVESAWHARHRPWLNLRLKKLLPTLPAGVADIAWKAQERLHRKYTKMFYCRKHAGVVATAVARELVGFIWAVGCLVEAQHANPQERAA

SEQ ID NO: 122528 - protein, 453 aa, unidentified
MPKKRQNREVKLPVLRPDAAGIDIGAEEIFVAVPADRDSQPVRRFPTFTQDLNALADWLTKCEIRTVAMESTGVYWIPLHQILESRGFEVYLVNAQYVRNVPGRKSDVSDCQWIQYLHCVGLLRASFRPPAEICPIRSLWRHRESLIQMASQHTQHIQKALDQMNLQIHHVLSQITGWSGLRILDAILDGDRDPVALAELCNWRVRTSRDIVAKALEGDYRPEHVFTLKQSLAGYRYYQNQIAEVDEELNKYLRDLPNAVEGQASPPPRTKTRVYQKQHNDPAFDLRGELYRIVGVDLTDIPGVNELTAHTIVSEIGTDVSRFRNASAFASWLGLCPEKQVSGGKVLYTKTRPVKNRVANALRLGAHCLYHANNYLGEFFRRMRRKLGAAEAVTATAHKLARILYHVLRTKEAYNESVFLRHDQEAIKRAEDRLRKQAAKLGFQIVPQQPSEV

SEQ ID NO: 122529 - protein, 450 aa, unidentified
MTREPQEIEDEEHEQVVERVAAVDVAKASGMVCTRVPHPSRPGRRLSRVWEVAATTGAIIGLAEQLVGQGIEKVTVESTSDYWRPFLYLLQAGGLSVQLVNARDVKNVPGRPKTDRLDAVWLAKLTERGMLRPSFVPPAEIRQLRDYTRLRVDLTHERARYWQRLEKLLEDALIKVSSVASTLDTASTRDMVEALIQGQRDPRVLAGLARGKMKAKHAALVEALTGRFDDHHAELARMLLDQIDALGAQITKLTARIQQLLGAIPAAQGVDADGTTGPGAGSGTDAAVLPAAARLDEITGIGPGAAQVVIAELGLDMGVFPTPGHLVSWAKLCPRTIQSGAKTRAGKTGKGNPYLKGVLGEAAAAAAKTDTFLGERYRRLVKRRGKLKALVAVARSILVIVWHLLADPAARYHDLGAGYWADRIDKGKKARNHIRQLEALGFTVTLAPAA

SEQ ID NO: 122530 - protein, 320 aa, unidentified
MAETKSKSFIGIDVCKQQLEVAAHESDYQFRCANKVSAFGELIAELIALRPILIVLEATGGVETRVVRALQTAGLPVVVINPRQVRDFAKALGQLAKTDRLDARVLAHFAAAIKPPLRPIKAKEQQELDALTGRRGQLVEILADEKNRRASAASDTVREQIKEHIDWLEDRIAELDEQIKALLQTSPRWQVKDQILQSVPGIGPVASFSMIADLPELGTLNRQQISKLVGVAPLNRDSGQQRGTRHIYGGRAGLRRVLYMAALTASRHNAVLKAFYQRLRANHKPFKVAITACMRKLLSIINVMIRDNTTWKIKDAPLSA

SEQ ID NO: 122531 - protein, 344 aa, unidentified
MDHFAGLDVSVKDTSVCIVDDTGKIVREVKVASEPAVLLAVLKNPAYQLKRIGLEAGPLSQWLFSSLAEADLPVICVETRHMQAVLKAQINKTDRNDARGIARMMRAGLYRPVHVKTLRSQKLRMLLTHRKLLQSKAIAIENDLRATLRNFGLKVGVAGKVKFEARIKELVENLPDLVVLVEPLLIVRRVLREQIVALHRRLLAIVRDDDVCRRLMTVPGVGPVVALTYRATVDVPARFRKSKAVGAVFGLTCSKYQSGEVDRNGRISRCGDEMMRVMLYEAAQSMLRSKKWSWLKAWAMQIVRRRGMKKAIVALARRLAVILHRLWVDGTEFRWTREQAAAAA

SEQ ID NO: 122532 - protein, 383 aa, unidentified
MKEKLRFLGLDVHAETIAVAVSEPEGEVRSLGTIPNRAESIRKLIKKLGPAAKLRACYEAGPTGYVVYWQLAELGVECEVVAPTLVPVKAGDRVKTDRRDAEKLARCYRSGDLTAVWVPDEGSEALRDLVRAREAAKQDQTRARHRLSKFLLRSGQRPPTGVRPWTRPYLIWVAQLRFTQIAQEFTRQDYLHEVEHMRERVARLEQAIMEAVKLATPALQQVINDLQALRGIADISAVTIASELGQVSRFESARQLMGYCGVVPSEDSSGKRTRRGGITKTGNAHLRRIVVEAAWSYRRPPGIWYGLRRRQETISEEAKEIAWKAQHRLHKRYIRLGAAGKDQRKIVTAVARELLGFIWAIGTRPAKTKLLKKESQEHQTDER

SEQ ID NO: 122533 - protein, 352 aa, unidentified
MERYVGLDVHAASCTFAVMSQAGKRLTSRVVETNGQALIEAVRCIPGGIHLCLEEGTQSAWLHELLSPHVAELVVAMPEKNRGPKDDLRDAWARAEDIRTGRIRTRVYKAPAFLAGLRSAASALRFATGDVVRTKNRMRAVWRSRGLAVDRGVYDPETRPRWLKELPSGYRGLAEWLGRELDQMVVLRDEAEEWLLRESKSHPIIRILSTAPGMGPIRTAQLVAIVVTPDRFRTSRQFWSYSGLAIVLRSTSDWDQGKDGEWVRRKMSQARGLTRKRQPVLKSLFKGAATTVVTQLPDDPLHAHYQRMLKSGIKPNLAKVTVARRIAATVLSMWRHKEVYDPKRHAVVTDKA

SEQ ID NO: 122534 - protein, 331 aa, unidentified
MEEVKRFVGIDVAKVALDVFIGSAGAAFSVTNDEVGIRELLRHLAPDDFVILEATGGLEMPVASALAAAGIAVAIVNPRQVRDFARATGQLAKTDRLDAEVLARFGEAVRPAARPLANEQAQALEALVTRRRQLVEMLTAEKNRRARAPKILHHSIDEHIRWLEKRLTGFDDELGELIRDTPLWRERDELLRSVPGVGKVLSITLLAQLPELGMLNRKQIAALAGLAPFNRDSGTLRGSRCIWGGRAQVRRVLYMATVAGVRCNPTIRTFYLRLRTNGKHAKPALIACMRKFLVILNAMLHNKTHWQTPALTSSTIALSPLPGAVSEHGCC

SEQ ID NO: 122535 - protein, 333 aa, unidentified
MKNLSTIQHFVGCDVSKDTLDFAIFEHGKDYRMFEHIQVDNSQEGFQQLRKWLRTFKINLKDTVIAMEHTGFYSSALSEWCFKKGIPFVMLHPMDVKMACTRGRNKTDSTDAKFIADYVYTMREKLDLSAPEPAGIRLLRELRNERRMAVRARTAYLNQLKTVKDKETQRRIKKVIDSFTEQIKDIESAIKKEIENDPEMSKNYHLLISIPGIGLVNAMTTIVATGNFTRFRNARQYAKFACVSPLSRESGTSIRGGNHVTRIGHIDIKSTLTEGARSAMTHDPQIKAYYERKRSQGKSYGCIMNAIKFKLICRMFAVVKRNTPYVNTEAFRS

SEQ ID NO: 122536 - protein, 338 aa, unidentified
MLYVGLDISSARVALCVLDRDGATVHQTVVSSEPGAIAEALAPHREKIETVGLEAGPTSAWLARSLREHGLPTIVIDASHASAALRTGFRNKTDRNDARGIADLMRVNKYRPVWVKSPKAQRDRSLLAVREQLRRQSLDLRNAAWSILQAEGLRPPKLARTAFDACLAEALNDPGLAPALEPLVRLIETIDQELAQIDRAIASRAKADETCRLLMTVPGVGPLVALTYVSGMDDPSRFAKSRDVGVHFGLTPRRYQSGDTDWSGGISRAGDAGVRRALYQAANVLIHHSRGWCALKSWAARLAKRRGLGKAKVALARKLAVVLHRMWRSGEPYRHAAA

SEQ ID NO: 122537 - protein, 347 aa, unidentified
MDYVGIDLHKKESQICILSEGGQLSECRIRTEPQRFAEVLGARPRARILLEASTESEWVARCLEGLGHEVVVADPNFAPMYATRTRKVKTDRRDARALQEACLLGAYRPAHRLSDAQRHVRGRLAVRDALVRTRTGYIALTRALLRRHGWRVPTGSAETFSRRVMALSLPGRLLSEVAPLLAAMRTVNQQLAYSDGVIEAVTRPDARVQRLRTVPSVGPVTAAAFVATIDDAQRFHRAHEVAAYLGLVPREVSSGESQRRGRITKAGNTRMRWLLVQAAVSILRLRDPRTADLRRWATGIAARRGKKIAVVALARRLAGLLYAMLRDGTRYDACAVSRRAAKAAVPA

SEQ ID NO: 122538 - protein, 347 aa, unidentified
MSHSTPESDRIMIGIDPHKASWTAAAVGPGLQPLATVRVPVGPHGYRDLRRFVARWPDAIWAIEGAGGLGAPLAARLSADGIAAVDVPAKLAARVRVLSTGHGRKNDDADAISVAVAALSAAGLRTVTVDEEVTALRALVEHRDDVVKTRTQTVNRLHVLLTQLIPAGAPRQLTADTAAQLLRTVRPRSLGPRTLRRLAADLITEIRRLDRRITVANTEIADAVQASRSTLSELRGIGNLTTGKILARVGDVHRFRSAAAFASYTGTAPIEVSSGDVVRHRLSRAGDRQLNCCLHTMAITQLQRDSPGRVYYLRKRADGKSHKEALRCLERRLSDVVYRCLIRDADP

SEQ ID NO: 122539 - protein, 365 aa, unidentified
MKKIAYVGIDYHLNSLSLAVVVKGKNEPVDMVRLKNDDKLIRKYMSKLSDRFEIKTCYEASSNGYSFQRKMAAWGYPCEVIAPSLIPRKPGDHRKNDFRDARDLAQNYAHGTLSIVHPPTEEEEAVRSLVRCRFAFKEAAKRVKQQINSFLLAQDQHWNRSKWTSQHRKWLWEMRMPNAYLQQVLDEHLAHLDYLETRLAHLDDQIEQVATSPVYAPSVKKLAAMKGIKTLTAMLLIAEITDFRRFPNPRALMAFLGLIPSEDSSGDKRKDGAITRAGNKRCRSALIESVQHYARSPHMSAQMKSDLSQLDAHSAGVAVKCLKRLHKRFWSLTLKGKLRPVAITAIARELVGFIWAMMQPQPAIA

SEQ ID NO: 122540 - protein, 365 aa, unidentified
MKKIAYVGIDYHLKTLTCAVLIEGEKELFDTMRFTNIDKNIKKYMKKLSDTYDIRTCYEASCNGYSFQRKMQSWGYHCDVIAPSLIPKKPGDRRKNDFRDARTLVQNYAHGMLTIVHPPTEQEEAVRSLIRCRIAMKKNEKSLKQQINSLLLAQGLHWEKSKWTIQHRIWLKKIESQDENTQLVLDEYLGLLEYLSSRIQYLDQKIEDIANSKIYAPSVKKLKAFKGIRTLTAMLLIAEITDFRRFPNPRALMAYLGLIPSEDTSDDKQKGGTITKAGNSRCRTQIVESVIHYIKRPIISATMKSDLKNVDAYSANIAIKCMKRLHKRYWFLVMKGKNSNKAKTAIAREFVGFIWAMMQPEPAAI

SEQ ID NO: 122541 - protein, 330 aa, unidentified
MSAPIETESAPSKKLQMIGVDVAKQKLDVSVDDDTVLTIDNNEESFKNLLKLIPDSGAVCFVMEATGGYERKLVAFLQAREIAVAVVNPKRVRDYANAMGAYAKNDRIDADMIRHYAQAAYDKNRLQLRESLTEAAQRRESLLRRRNQLVGQRATEKQHLESAMDKDTVRSIKRIIKQLDKEIEKIETLIKTDIDGDDNLKKSMEQLIQVPGIGEVTVLTLLTQLPELGKLSNKEIAALVGLAPYARDSGKKTGRRAIFGGRMHIRSTLYMATLSATRFNQPIRVFYQHLLAQGKLKKVALVACMRKLLTILNSMAKTGKEWNPDFAKQA

SEQ ID NO: 122542 - protein, 344 aa, unidentified
MDHFAGLDVSVKETSICIVDDTGKIVREVKVASEPEALLAVLKNPAYHFKRIGLEAGPLSQWLFSALAEAGLPVICVETRHMQAVLKAQINKTDRNDARGIAQMMRAGLYRPVHVKTIRSQKLRMLLTHRKLLQSKAIAIENDLRGTLRNFGLKVGMVGKVKFEARIRELVENLPDLVVLVEPMLIVRRTLREQIVILHRRLLAIVRDDEVCRRLMTTPGVGPVVALTYRATVDVPARFRKSKAVGAVFGLTCAKYQSGEVDRNGRISRCGDEMMRVMLYEAAQSMLRSKKWSWLKAWAMQIARRRGMKKAIVALARRLAVIMHRIWVDGTEFRWTREQATAAA

SEQ ID NO: 122543 - protein, 352 aa, unidentified
MQFVGIDWAYRCAAWCAKSKSGEIVAEGVTPADEDGLAKLAIALGSEVNACVEMMSGAVWVRDRLRAAGWQVEVADARKVKAIAPLACKTDKVDARVLAELCRRDLVPAVWVPSFSDRELRERLNRRAHLIRLRTAAKNRVFGALSQWGLRIPLRVLRSRDPMTLLERRGLPQVWRRSVAEALAVVDMLDARIAALEAELRPLAQADPRVRLLVTIPGVGEHLGLMIAAEIGDVARFPGPRNLIGFAGLAPRIAQSGQSSRTGALSKAGSRALRWAAIEAAQCAWRPTNPWNRLYLDVKQRTGKSNPAKTAVARKLLIAAWHVLAREEPFKPSRAERGTNPVPASSHFHLAA

SEQ ID NO: 122544 - protein, 348 aa, unidentified
MGLYAGIDLHSKSNHLAIIDENRKRVLKKKLANDPDLILGVLAPYQGEIAGIVVESTYNWYWLVDLLQENGYRVHLANPAAIQKYSGQKHVDDTHDAFWLAELLQLHILPEGYIYPKETRALRDLLRKRQQLVRVRTSLILSLQNIVTRNFGIKLSASDLKTLTEDRVQPYLQENEDLLLAGSANKSCIDSLTLQIVRIEKAVEKKLKLLPPYIQLLTLPGVGRTLAMTIMLETGPISRFDKVGRYASYCRKVSSKWTSNEKVKGHGNKKNGNRYLAWAFSEAAEHARRHHAGSRHFYQRKLRQKKNMMVAHNALAHKLARAAYWILRDNVPFQEAKMFGQLEATLYN

SEQ ID NO: 122545 - protein, 398 aa, unidentified
MTESSDYESVQVFIGVDVGKDTHHAVAINRSGKRLFDKALPNDENKLRSLISDLKQHGQILLVVDQPATIGALPVAVARSEGVLVGYLPGLAMRRIADLHAGEAKTDARDAAIIAEAARTLPHALRTLKLADEQIAELSMLCGFDDDLAAQTTQASNRIRGLLPQIHPALERVLGPRLEHPAVLDLLQRYPSPEKLASLGEKKLAAQLCKLAPRLGKRLAADIAQALAEQTVVVPGTNAAAVVLPRLALQLITLRKQRDEVALEVEQRVLAHPLYPVLTSMPGVGVRTAARLLTEVACRAFASAAHLAAYAGLAPVTRRSGSSIRGEHPSRRGNKALKRALFLSAFAALRDPLSRAYYTRKMSQGKRHNQALIALARRRCDVLFAMMRDGTFYTPQGS

SEQ ID NO: 122546 - protein, 398 aa, unidentified
MITCGIDPSRGDLAVSIVKDGKEIDYFKVLNERKGYQKMFNRLETLDTLPAVYIEGHGDFAKRFALQCMQNNIKLYEINPLKSKKLKETITWDKSDHIDAYVAALMPFNNSNLNPLTLDTKVEGLKKLSREYDKMGNTMTAYKNRFHSYLNQNYGFVYKKLFSAVNATSLNFFISFPNPDLVKKASIKEIQNTLIKSGAKCYMGKNGIKKATEIKKIIAESNPNNFDVFTEMTSNLIVSMAKLLLEFIKQRNNLAKEIDKALKKYFPEYIGVFEGKLKSVATITLASLIAEIGNIKSFANDGKLAAFAGQAPRNLQSAKVRKKGKRKSYDRYLAKTVHMIALNNSKEGGLFHDYYEEKKKHFAKKLRALKSVKRLVCTIIFKVLTELNKKTMSNENAA

SEQ ID NO: 122547 - protein, 459 aa, unidentified
MGRARARKIPAQLVEDEEYQLRHERVAGIDIGKDKADVCTRLPPARAGGRRVSRTGEVPARAADIAELAGRLLADGAELVVMESTSDYWRIWYYLLEAAGLNVQLVNSAQCRQLAGRPKTDRLDAQWIARLAEMGLLRPSFVPPPEIRALRDLTRTRLQIVRDRTREWQRLEKLLEGAVVKLSSAVWSLSESKTARRILEAIAGGETRPAALAALASPRVTGGRAAVAAALAGMQVADHHRLLIRVHLDHITLLDRQAAAVGDEIEAALDAIPAAWGADATGETGPGAGRGPDPAVLPAAERPGEIPGVSPALARAIIAETGLDMTRFPTPAHLASWAGLAPAARQSGARTRKPGKGHGNAYLKGYCTQAAAGAAGTATFPGERHARLARRLGGNRAKCAVGRSILTIIWHLLKDPAARFADLGPGWHQRKASRDRKIRAHLRALQALGVNLEPTGATA

SEQ ID NO: 122548 - protein, 320 aa, unidentified
MSASSVVVGIDVAKAHVDVSVLDAKLDVQRFDNQTEGHSALTAALKPLGVALVVMEATGGYEAELACSLQAAGLPVAVVNPRQARDFAKSMGRLAKTDTVDARMLAEFAAVLLRRDDLVRFLRPLADPQQQWLAALVTRRRQLLAMMLSERQRLQITPKGLHPSIEAIVAAIKAQLDEIEAQMVGHVREHFTELDRLLQSASGIGPVASATLIAELPELGRLNRREIAALVGIAPMANDSGSSKGRRRIQGGRFDVRRVLYMAALTASRRNPVVKAFYERLIAAGKLPKVALVACMRKLLTTLNAMVRTNKPWDNSLQGT

SEQ ID NO: 122549 - protein, 385 aa, unidentified
MQVMMEGQSHFPPFGLPYWGSENLNKGVGSMTATYEYHIGVDYHKSYSHLVVQDSGGKTLRSGRVKNDRQSLGGFLERYRENSHAVVEATRNWMVIYDWLDDICDDVVLAHPLKVKAIADAKIKTDKIDATVLAHLLRADLVPEAWAPSERSRDLRVALRERMFYVRLRTMTKNRIVTVFDRYPEQTAQLKKLGDLFGKAGRTQLAQVKVSEIDRIQIDRGLAFIGDIDVRIKQSEATIRAMTKANANVKLLKTIPGIGEFFARLIDAEIDDINRFRNPKKLAAYAGLVPSTYSSGGKTFHGKIIRQGNKWLRWAFVEAVSPAIASDPQLRAQYEHLKIRGTNKARVAIARKLLTIAFQILRDQRAYEPRGESNMEGTSTISRLS

SEQ ID NO: 122550 - protein, 466 aa, unidentified
MPINGRKAAQPDNEAEVEGFPVVRRNVAGIDLGSTEHWVCAPNRDRSDRDVERFGATTPELEKMSEWLKDRKVESVAMESTGVYWIPPHEVLEKQGLEVVLVNTRELARVPGRKKTDRVDCKWIQRLHSCGLLTGSFRPCEQVCMLRTLVRDRGNLVDESGDWLRRMQKSLDQMNVRVHRAVSDIDGVTGLAIMRAIVAGERDAQKLAQLRDRRCRKSEDEIARQLSGHWREDHVFSLRQALKMYDAIQERIGDYEKEILRKLAEMEREECRGQQAPKLKNPEKAKAIRKRGQDPMRQALYRMSGVDLTAIDAIGVETVQAVLSEYGPDLSRFPTEKQFVQHITLAPHRPTSAGKPVKKKKRGSGSTRVAGALRMAALALRHSNTALGAYYRQIARRAGPDVAVFASARKLATLIYRLLRWGQPYVDEGADAYEKRYQEVRIRSLTAAAKNFGLQLLPRTSDPAPA

SEQ ID NO: 122551 - protein, 426 aa, unidentified
MRVLYERVAGIDVHKDMVKVAVRSPGDKPWTRKTEILEFRTFYGVLQHMAGELARRGVTHVVMEASGVYTEPVYYALCERDFTEVAVINPAHAKALKGHKTDAKDCARLAELFECGLLRGSYIPPAELKEVRDLTRYRMKTVQARTSEIQRLAKALESAGIKLGSVASDITGKSATAMIEALIDGERRGAVLADLAKGPMRTAGKLADLSMALTGRFTEHHALLCGLHRDRIAVFDTAVADLGERIAGKAARWQREAGLLTTVPGFGDIVAWAWLGEIGPAPHRYFASPGKLASWVTLCPGNNISARKRKHGRTGDAGTYIKPMLVQAAWSAIRVRGRLQARYNRLVRRFGGEKNPAAKKKAITAIAHTLLKIAYQVLKSGQPYRDLGPDFYTRRESPEQRQAYLLRQLQKLNPGATITITPPEAA

SEQ ID NO: 122552 - protein, 235 aa, unidentified
MLIYSTVKKFTNAKVGFNQLVRWATSEMDKDVPVLFLMEATGVYHEELAHHLHRIGKQVHVVLPNKFKHFAASLNVKSKTDAIDAKLLARFGVDQEHRPWSPAEPVLKQMRHLSRYRVQLNEQKTAISNILHSKDHSHAVSADIKQSTKRIIAVLDKEIKKLSKEMEIVVKSDPVIASKVNKLCTIPGCAITTVTAIVAETNGFKEFNSAKQLTSYAGPNSTHSKSASRIERRSL

SEQ ID NO: 122553 - protein, 388 aa, unidentified
MEARTVNALPPAAADHAAIRCLLAIELSKKSWVVAINTPLADKISRHTLPGCDWTGLLELIRRVRTRVVRELGRPVEMISCYEAGYDGFWLHRLLEGQGVHSLVVDPASVQVDRRARRAKTDRIDVERLLRSLMAYLRGEPKVWSVVRVPSVAEEDDRRLHRERDRLIAERIQHVNRIKGLCAIHGIYDYQPMRPDRTRRLEQLRTGDGGALPPRHKAEIARELQRMELVLEMLKEIDAERNAIASARMSAHTNAKKIQDLVKLKAIGPEIATVLTGEVLYRPFNNRRELASYVGLTPSHFQSGSTCRDQGISKAGNPKARTTMIELAWLWLRYQPDSAFSVWFRERVGNLKGRIRRITIVAMARKLLIALWRYLETGVLPTGAALKV

SEQ ID NO: 122554 - protein, 380 aa, unidentified
MRNVRFIGLDVHAETIAVAVAEPGGEVRSLGTIPNRPEPVARLIRKLGKPEQLRACYEAGPTGYGLYWQLSELGVKCEVIAPTLVPVKAGDRVKTDRRDAEKLARCYRAGDLTPVWVPDAAHEALRDLVRARLAAKRDQLRARNRLGKFLLRHGRRAPEGTTAWRTKHLKWVKDQSFEQAAQQATLVDYLHEVEHAADRIERLERSIDTAIETLPEKMSAVIDALQSLRGIAKISAVSIMAEVGELSRFESARQLMGYSGAVSREHSSGERIRRGSISKTGNAHLRRIVIEAAWAYRHRPGLGAALLARQRDQGEDIKAIAWKAQHRLHSRYAKLLAKGKPKQQVITAVGRELLGFIWAIGVAAERSQSDAPRRALKRAA

SEQ ID NO: 122555 - protein, 346 aa, unidentified
MQKIAYLAMDVHARSCTLGHMDDSGTFKGNLHFTTSEKNIIDALKSVKAQNKLLTIEEGTLTHWAAQVASPHVSQVIACDPRENALIFKSPNKKDKVDTRSLCRLLRLGELKPVYHPQDDDRAIFKAAAQHYLDLRDQLTRLKHKIKATYRRWGIIGVFSNSVYSTSGRDKYLKQLKHRPIRNQLKRLYHLMDQTEALRMSALHSMKQLGLKYPEIGEFKKIPGIANINAHVFDAFIQTPHRFAKRNQLWKYCRLSITDRSSDGKQLGYKRLDTSGVGELKALSFRAFMAAMRGNNEVKRFYLDSLNRTHDHKHARLNTQRKILTVMFGIWKKGEIYRPELFSGSA

SEQ ID NO: 122556 - protein, 383 aa, unidentified
MEALLYCACGLDVHKDIIEACIMRGIDAGPEIIRDSFGATKPELQRLMQWLLDNDCYTVAMESTGVYWKPIYQILETESVYLEHIWVVNAHHMRNLPGRKSDVKDAEWIAKLLRHGLLEKSFVPCIAIRDLREAARLRRTFVQERCRYVNRLEKFLQTHGFKFSSVMSDILCMSGKKLLHILCETGTLTQKDVQENCRRLRRSSDEIAAAVCGNLTAAERRLLARLLHKLDSCQEDIDGILEDMRLLCSPFQEQLAIVDSIPGFDQESSMEIIAEISAAPQEYFSSPQRLCKWAGVVPRNDETAKKIKSKKILHGNTYVKSILCQAAWAAVKVRGSPFHNWFWSHQRKIGQKKAIIAIARKLLMLIYLLLNTGQMYRQPVTET

SEQ ID NO: 122557 - protein, 337 aa, unidentified
MDMHVGLDVSQRTTSICIIDASGQRTWQGTAPTEPAAIVHMLRAHGAGEARVGMETGPLAVWLYHAMRQQGVNIDCIHARHVHAALTVQLNKTDRNDAFGIAQLVRSGWYRATHVRSLECHQVRLMLTVREKLISLRTATNNQIRGLLKTFGVVLGAGKNRVFETSVQDADPLRDGIKPVIGILLDTWRHLTTKIRELDRSIQRQVNQDSVCRLLMTVPGVGVITAASFRTAVDDPSRFKHVSDIGPFLGLTPRKYQSGEVDRNGTISKQGNRQTRSMLYEAALAMLKRYGKETNLAQWGAKLERRMGLRKAVVALARKLATVLLSMWRSGEQFRCA

SEQ ID NO: 122558 - protein, 408 aa, unidentified
MQVTFGIDVSKSNSTVCELIGESKNELTITNDRPGFIQLLHELAAFSKHPQIIFEATGVYSRRLQAFLEDYGYEYVVLNPLKAKKEMNMGLRYNKTDKTDAYHLALIQRLYRHPVNQSESQTYKQLNALSRFYDQLTSDLVIAKNRLHQALQSTFPEIENLFSIARGKNYWQIVARYPHCDLVRKDDKKQIINWLMKLKGIAFNHAQRTTDKLIELAHLAYPVVSCSDIEVQQAQYYARRLLNLSNQRQRIITKMVKLAKTLPNHDLENLESIPGFAQTTAVRVLAELGDLRRFSNPNKINAFIGIDPGRYQSGEMDSNLSITKHGNAVARKLLYRAIGQIDNAAKTNPCHIADYYESKKLSSQTKGFKKIAIASIHKLIRTIYALIINDQPYDYNVATHNQKDFSRN

SEQ ID NO: 122559 - protein, 342 aa, unidentified
MSRYIGVDLHRNRFTACVRSERGRQYVSTWKLEGLSKFVSRLRATDEVAVEVTGNTRLFYDAVEPRVKRLVVVDPRQFEVIRKSVKKTDAHDARALALFLSKDMLPEVRMKDPAHAEMASLVQTRDTLVKARTALKNKVNNLLSARGINLSRESLASDKGLREVLGMRFGTTVDVELEVLVGQIRSLNQSIARLEKAIADQGPKLPGHGNLKSIKGIGDVGAGVLLSVIGDVHDFNDEGKLAAYFGIVPRIANSNETEHSGRITKRGSKLGRTVLIQCALIAKRYSVYLQRYYERIQARRGTGKAIVALARKFLGIIYLTLKQNLVWEDFANGVIRDAEVSP

SEQ ID NO: 122560 - protein, 344 aa, unidentified
MAIVGGLDIHRRQITYDWIDTDNGETCRGQLSPATRVELRAWLARFTGQQADFAVEATTGWRFVAEELEHAGFGAHLAEPADTRALRGPKRRAKTDRTDARHLRELLRAGTLPESWMPPAHIADARTQVRLRRALVGERTAWQQRIHAILFHHGLPDRSYLLTADGRAWLARAELPAVARQTVDLAVRMIDHLEVELDRLDTELAGIARAQPGCKALMGRYGIGWLTAVAIWAEFGDVRRFANSRQAVRFCGLDITISESDGKRARGHLARQGSPVLRWALHEAAMSAARPGSPDHPYYLQVKQRLGGKRAALSVARKLAREAYHTLRELGDQALVPAELPTAA

SEQ ID NO: 122561 - protein, 355 aa, unidentified
MKRTAKYAGLDVHQATTVAVVREETGRVIARTILPTDATALPAFFRTMRGRVEVAYEEGTQAQWLHDLLVPLVARVVVCNRRDVPRHGNKGDWQDAEELAALLQRGALRAVYHGGGPHSAELKELARTYVTLVEDATRVMARVKALYRARAIPTKGRAVYQAGERATWLAKLPAGSVGFRATTLYRELEVLLALRAKAKAALLGAAQQDPAWTGLRTIPFLGPVRVALLLGIVQTPWRFRTKRQLWAYAGLAVVTRTTAEYTLEGRTPVRRHRAPMTRGLNRNHHPLIKMLFRSAATAATARPGALQEYYQGLVARGMREELARLTLTRKLAALALRLWKTGEAYDPAKLTRPAG

SEQ ID NO: 122562 - protein, 363 aa, unidentified
MNTTTVGVDLAKLIFAVCMLDGNGRVLLRRELRREAFAEWLAQLPAGAIVAMEACSGAHYWARRCLALGLQPRVIAAQFVTPFRKSRRSKNDRNDAEAIATAARQGNMRFVAVKTVDQQARLSWHRVREGYKEESLKVTNRIRGLLAEFGVVLAKSHVALRRALVDILEREDLPREFVEMLQGLREHWQQIQARLRMCDQRIETHALGDERCRRVRKLTGVGALTADAVVASVGNGCDFKHGRQMSAWIGLVPQQDSSGGHQRLGPISCSGDAYLRTLLIQGARSSVQAANRVMPEKATPEQIWIRQLATRLSFGKLLVAVANKHARQIWAMLARGEAYDPHAWLRHPMTQRSASRKSMQGAA

SEQ ID NO: 122563 - protein, 410 aa, unidentified
MLPVVVTGLARRTPVAFGLTPRVACRPATTNSVEWLKRGLFDPKLVCPPRNRNPFEQRNNVPSTLNTSTPSVMIAIDPHKRSWTAAAVDTRLQPLATIRVPVSRDGYRTLLRFARRWPDTAWAIEGASGLGAPLTVRLRQDGITVLDVPAKLAARVRLLSRGHGRKSDEADAVSVGVAAHTSSSLNTAEIDSATTALRALVEHRDDLVKTRTQTINRLHTVLTHLIPGGASRDLNTARAAELLRTVRPRDTAGKTLRALAADLISELRGLDRRIDKAVHDIETAVKICGTTLTELHGIGALTAAKIVSRVGSIHRFDSPAAFASYTGTAPIEVSSGDVVRHRLSRAGDRQLNYCLHVMAITQIRRDTPGRTYYLRKRANGKSHSEAMRCLKRRLSDSVYRQLLNDANTTT

SEQ ID NO: 122564 - protein, 354 aa, unidentified
MMIIGCDYHPAFQQIAFVDTDTGELQERRLQHREEAEKFYRDLAAQGMKVRVGMEASGQARWFERLLAELNFELWIGDAAEIRTKRVRKQKTDRQDAQLILKLMLKDDFPRIWVPSWENRDLRQLLWHRHRMVQARTRIMNQLQAVALNEGLRCKKRLWREAGREQLEAFRLAPWASRRRRDLLELLDRLNPTITDLTRTIEQEVEKCPEAQRLMTHPGVGALTALAFVLIIGTAERFQCGKQIASYLGLVPLEESSGNRRRLGHITKQGNALLRFLLVEAAQVSARSIPEWRNKYFHLAMRRGRKIAKVAMARRLAVQMFWMWRKGWDYEQVRKFGSHAGQPGNRDGVQSNTE

SEQ ID NO: 122565 - protein, 390 aa, unidentified
MIYVGIDVAKNKHDCCILNQEADPLFPVFTIENNLAGYEQLYEKIRSVSKDLTKIKVGLEATGHYSYNILGSLLEHGYRTCVINPLHTNLYRKGQSLRKTKTDKVDARSIAEMLVTDKTLKPYTDTSYHSEELKSLTRYRFDKVQERSKLKTSLSRLVNILFPELEKLVPTLHMSTVYALLEEMPGASFVADANLTHLKSLLEKASKGHYQRDKAVEIRNAAINSVGSAMPAKSMELKHTINLIRVLTEEIDEIEASIKKIMDKCDSPITTIPGIKYRMGAMILAEIGDFSRFDNADQILAYAGMSPSTYQSGQLESSYAHMEKRGSRYLRYALFNATQYVCIWDERFRLYLTKKRAEGKHYFIAISHAAKKLLRTIYRMEMTHTAYQPL

SEQ ID NO: 122566 - protein, 309 aa, unidentified
MVAYSSDKGGEIRIFNNTTTGIKQFIGALPKDGSIHCVMEATGNYSALLLYMLNVARITVSMENPLKIKNFARAMLSTVKTDKIDARLIALYGEKMNPQPFKIQGEAILRLRQKRTVIRQLTKQITAMSNLRGSLACLPVPDKGATHTVDETIEFLEKRRDRLQSELTDLVEVEFSRQLALLTTIKGIGITLATALIITTGGFTYFQNAKQVSRYLGICPTYEQSGTSVNIRGHINRNGDAYTRGLLYVAAWTASRFNTKCGETYTRLRQNGKPGKLAMIAVANKLVRQAFAVVTHDKEYVDGFVSNRP

SEQ ID NO: 122567 - protein, 427 aa, unidentified
MKYNTQNAKIESITEKTLIVGIDVGSETHYARAFDWRNYEYSKKPLEFSNNEAGFVTFKVWMEELAEKYGKDVVIPGMEPTGHYWFNLGAYLQDNGMKPVHVNPHHVKKSKELDDNNPNKNDRKDPKTIAALVNEGRFSYPYIPTGVYAEIRSLSNLRLQAQEEITRIKNRIARWFSIYFPEIKDVYKNPGAVSGLMILKVAPLPKDIVKLGVDGVNQIWRDAKLRAGLKRAKTLVTAAEHSIGSQEACDSARIELKILLNDYEIYHQREEELMELIEEKLSEVPYIDKLLEIKGIGMKTVSGFVAEVGDIKRFDNPKQLQKLAGYAIVECSSGKHKGESHISYRGRKRLRYVLYEAAISLIARNTEFKEIHRYYQTRGKNSLKKMQSVIAVACKALRIFYAILTKGVTYDGAKMLQDIKRPQLKVA

SEQ ID NO: 122568 - protein, 317 aa, unidentified
MPVPARSDAEVPVTVGVDTHLDLHVAVALDHLGRRLDDLTVPTTEAGYAKLLRWAEALGNLERVGIEGAGSFGAGLARFLRERGVEVLEVGRPKRRDQHRSGKSDPIDAELAARAVLAGTAIGEAKDSEGTVEMIRVLRAARRSAVKARAQAAKQLKALLVTAPENLRTELRGLSTAKLVRRAAGFRPGDLPEDVAAATKFALRSIARRYRTLSEEIRELDGHLARLVTDTAPALVAVHGVGVDTAATLLVAVGQDPKRLKSEAAFAHMCGVAPIPASSGKVVRHRLNRRLNRDANRALHVVAAERMSPDERTRAYA

SEQ ID NO: 122569 - protein, 372 aa, unidentified
MKSTTKFIGLDVSKEKISVAIADEGHDKPRYYGTIAHTAPALRKLIKELGPASTLSFCYEAGPTGYETYRWIESMGAACVVIAPSLIPKRSGDHVKTDRRDAEQLARLFRAGELTPIYVPAREDEALRELVRARESAKEDAHRARQRVLKFLLRHQIHPPEHIKRRWTKKYRVWLGQLTFPHTPMQIAFTEHLHAMDEIEQRIGRLEKALIEEAATSSKSDLIQILQSLRGIGFLTAVTLAAEIGSFARFRSPAQLMAYLGLVPREHSSGIRTQRGSLTKAGNGRLRRTLIESAWSYRHRPAVKGDLARRLEGLPADIQLISWKAQERLHRKFRRLVYGLNKHKNVAVTAVARELTGFIWAVARTLELPNAQ

SEQ ID NO: 122570 - protein, 345 aa, unidentified
MERYHYVGLDVHKKMISFCVKKVDGTLVDEGVVRATRKDLTKWVATVPTPWVGGMEATLFTGWVYDFLLPHAHELKVGHSYMLRAICASKRKNDKLDARKITDALRCDWFPACHMAPAGVRELRRVLRYRNFLVREATRMKNKTAGLLMETGAEYDKQRVHGTRYFDALLGRLEDIPDSVLDLLRLTHSNMKVFDSNQKKPLSALSRHPGLKKRVELLMTIQGVGETTALTWALEIDDPGRFSSIKKAVSYCGFCSAQHESAGKGHRGPLSKQRNKHLQTMLIEAAKLAPRWNPSLAWVYDKERSRGANKNQATLAVARKLVAYLLCVDKTGKPFERREAQKDID

SEQ ID NO: 122571 - protein, 474 aa, unidentified [sequence omitted]

SEQ ID NO: 122572 - protein, 375 aa, unidentified
MTVTRTLSGSVSEPTLYVAFELGKKEWKLAMTSSFGVQPWLRTVASRDWVRVERALTQGRARFGLPATAVVVSCYEAGRDGFWIHRALLQRDIRNRVVDSASIEVNRRARRAKTDRLDALKLVMMLVRVCAGEQRVWSEVRVPTVAEEAGRHVSRERTALTQEQTRLVNQMRGWLATWGATLPSRRRGSWWTTVRDWAGAPLRSTVQARLARAEVRLQMLEAQIVELDAQQAAALGTATPTSALRQLVQLKGVATTSASVLLDEGLVWRAFRNRRQIGGLLGFAPTPYDSGERTREQGISRAGNARLQAIAIQLAWNWVRWQPHSALTAWYRTHFGKGKRARRIGIVALARKLVIALWRYVTSGVVPDGAIVKVA

SEQ ID NO: 122573 - protein, 382 aa, unidentified
MQTIDTIKPTILLAIELSASTWLVAARVPGWEKPHLHRIDGGDTAALLALISSLQARAARGLDATIGVVCCFEAGRDGFWLHRLLAAHGVVCHVLEPTSILVNRRARRAKTDRLDAEGMLRVLAAYLRGDHQACSMVRVPTPEEEDAKRTHREREKLVQERQRIENRIEALLFTQGIRKRPSLRSWERDLAVLRTGDGREIPRHLRAELDRLRRRLVMTLELIREVEAERDQAAKTKPQDRACHKIAALSRIRGIGENFAAVLTREVFYRSFDNRRQIASYVGITPMPYQSGGMDRDRRISRAGNPRARTTMIQLAWLWLRYQPGSELAEWFRERVGTLAGRTRRIAIVAMARKLLIALWRYAETGVIPAGAEIRAEITVAA

SEQ ID NO: 122574 - protein, 458 aa, unidentified
MKNFYLGADVSKGYSDFMLLDAKKRRIEEDFQLDDTFDGHQKLYQILAALCDQHPNAQIYAAVESTGGSENNWFDALVKFQSSLPLKTARLNPCGVHNNSKAGLERNITDRISAENVAKYLIEHPENITYQQQDPLASLRKQWSFVKMLLKQKTQLLNQLESNLYAANPEVLAYCKNGVPNWVLSLLARFPTATKLAKAKKSSLASIPYVTEKKAKALIQSAKKSIASATDPITAQIIKATVKQIRQLIKTIEAQEKILTETCSIPEVQLLKTFPGISDISAIGLMLEIGAVERFATAKKLASFFGLHPRYKQSGDGSWGFHMSKIGRVVPRQILYMVAMVAIQCNPLITEIYLKHTEKGMKQKAALGLCMHKICRILYGMLKHNMAFDANIDRNNRKKSRKGKTTKIRKDKRRRYQSFDAKAPISGRHNKKRKERKQSQSDNIAQNGIIEASVPVSV

SEQ ID NO: 122575 - protein, 428 aa, unidentified
MTVKDCTSVKEFWQLKKEIRGSKDHLIVGIDVAKDDHKAFFGTAYGKTLLKRLSFKNDIEGFEKLLARVKEMKVKHSLNELVLGLEPTGNYHKPLGDFLIRCGHMVVLVSGVSVKRNRELLDGRWDKNDTKDSANVADLISQGKCLYYEYAPVLLKDLRGLLSLKRRLKKQEHGLRIRIRNSLLAQYFPELDRYYSKWEPEILSVVRWCLDPSVIAGLEYDQFVSLVSPGSKNIRQQGRLEWIWKKAVDSIGCDAGEAAEFEAKVMVEELRHIREIIKETDAKIKDVCIRFPEYDYLLTIPGFGPDVSSKVLAAIGNPFRFNSLSQVLKMAGMDLNANRSGKSSDTAVPVISKKGSAYLRYALYQAAFIASCKNKYFIRYYTNTLRGREREKGIKTKMRVKLAAKMLVIAWTLMKKREPFDPVYLKID

SEQ ID NO: 122576 - protein, 401 aa, unidentified
MQDTQQRDAVDVFVGVDVGKGQHHAVALDRNGKRLYNKALPNDEAKLRALIAELKTHGRLLFVVDQPSTIGALPVAVARAEGVLVAYLPGLAMRRIADLHAGEAKTDARDAAIIAEAARSMPHTLRSLRLADEQLAELTMLCGFDDDLAAQVTQTSNRIRGLLTQIHPALERVLGPRLDHPAVLDLLERYPSPTALASTSEKTLANRLTKLAPRMGKSLATEIVQALSEQAVIVPGTQAATIVMPRLAQQLAALRKQRDEVAAEVEQLVLAHPLWPVLTSMPGVGVRTAARLLTEVAHKAFASAAHLAAYAGLAPVTRRSGSSIRGEHPSRRGNKVLKRALFLSAFAALRDPISRAYYSRKIQQGKRHNQALIALARRRCDVLFAMLRDGTIYQPKSASTA

SEQ ID NO: 122577 - protein, 391 aa, unidentified
MSERFFGLDLHKKYATICGISQQGEVVVKEDHLPLDRLPTWAAGTLTGEDAVALEASTNTWWAYDCLAAHAGRVVVVNPIKTRLIAQARISTDELSAEALARLLQSNFICEVWVPDERTRGYRQVISHRIRLAQEGTRVKNRIHATLHRQQIRSPYSNLFSRAGRAWLGNLELPELEKLLLRQNLELLNSSEEALAEVDQLLARLAQEDQRVPILMQIPGINIFSALATLAEIGEIDRFASAKKLCSYAGLVPSLHRSGQKHTTGPITKAGRSRLRWVLVEAAHVAARHDPQLGRFYYRLRAKKGTNVAVVATARKMLVVIWHLLSGDGVYRGRQVQMIARKFLEWGWKVGQKDRCGSNTEFVFTRLHQIQINNLTHDQAGRHAYALSGEI

SEQ ID NO: 122578 - protein, 408 aa, unidentified
MEVIHECCAGLDVHKETVVGCLRVRERGRVRREVRRWATTTAELLKLGDWLRQAGCTHVAMEATGVYWKPVWHMLEGEFELLLANPAHIRNVPGRKSDINDATWIADLLAHGLIRASLVPPGPIQELRDLTRTRKQLMREIAQHKQRIQKVLEDANVKLASVVSDVFGESGRRMLKALCAGHTDPWQLAALRDGRLSASRETLAVALQGKVTAHHRFLLSQHLRMIEYLEQTIRDFEGQVEVVVAPFRAAVGCLVTIPGISATAAHVIIAEIGVDMSRFPTVAHLRSWAGLCPQLNESAGKIMSRRLRHGAPWLKTVLVQCAWAATRNKHNYLYAQFVRLRARRGPQKAIIAVAASILSIAYYCLRNQVPYRDLGALYFTRADEERTAQRLARRIKELGYEVHIRKAA

SEQ ID NO: 122579 - protein, 350 aa, unidentified
MLIIGCDLHTRFQVIAYLDLTTGEIVTRRLEHENCEARKFYAGLGEQARVGIEATGCTQWFERLLGELGHELWIGHPGEIRARAVRRQKTDTRDAEHILDLLLSHRFPRIWVPSVQERDVRQMLRHRDKLVQMRTSVKNQLHYLAMSQGICRQRQLWSERGRQELEGLPLGPWASRRRQELLELLDRLEPRIEELDKAVKEEAKRRPQAVRLMQQKGVGPVTALAFVLTLGPVERFANSRKVVSYLGLNPREDSSGGRQRLGHISKQGNLMLRWLLVEAGQSASQHDPELRRRYQRLKFRRGANVAKVAMARRLAVLLYWKLRQAPKVPTPVRTPGSPTRTLGDESPSRS

SEQ ID NO: 122580 - protein, 377 aa, unidentified
MKRILRIGMDVHSTNYTLCAMEPVIGEDDRIFANIQVTPDYKNILMFIENLKMKLGLDAEYDIQCGYEAGCLGYSLYNQLTAAGVKCVILAPTTMLTPQGQRVKTDARDALMIAQCLSYGGYHAVYIPTEEDDSVKEYLRMRDDHKTALKKIKQQINALCLRHGYHYEGTKWTIKHVAWLRKLELLPLYRETLDEYMASYDEQTAKIERFDKRIGELASQSSYEEKAKRLGCFLGIKTHTALSLLVETGDFSRFAKGSTYAAFLGLAPGENSSGEKINRTGITKAGNRHLRQLLIEAARGICKGAIGHKSRELRARQSGNTAEVMAYADRANTRLRSRYYKLIRHGKKKNVAVAAVARELACFVWGMMTDNTGMKMA

SEQ ID NO: 122581 - protein, 357 aa, unidentified
MQKNTISFKGQKIFIGIDVHKKNWDVAVAPEVGVIKRHPQKASAHELFVFLKKHYPDGDYLAVYESGFTGFSTYYALKDVGINCIVIHAADVPTTQYEEVMKTDKVDSVKLARTLKAGLLKGVYVRERDNLDDRSVIRIRKTIQKDLSSYRVRIKHLLHNNGVSIPERFEKSGSYWSRAFMRWLKEDVNLLSSSKNSLNLLISQVEAIRSTLLESTLLMRELSQTERYKKNVDLLTTIPGIGVTIAMCILTEVYDVSRFRNEREFASYLGLIPTTHSSGEKTMHGEMTFRGNKQLSTMVIEAAWVAIGQDVGLGSLYQHYRERLKPQEAIVRIARKLSNVIFAVLKNRTEYVPYVDN

SEQ ID NO: 122582 - protein, 275 aa, unidentified
MTQTNITTAGIDTSKLKLDVAVHGRTERWRVANALSGWRALVANLAKAGVTRVGIEATGGYERGVVEHLRAADFTVLVLQPIQVKAFGRVHLRRAKNDALDAELIAACTAAIDQPRIAPDPRLAELAGYLTFLEQLEEDIARFKTRLEHIDEPGLRRIVNSDIARLKARKAAQIRDIAKRLRAYSDLAKRLDLVLSIPGIGERTALALLIRMPELGRVSREEAAALAGLAPFDDDSGQHRGQRHIAGGRGRLRRSLPNVIGSSPSAAQFLGTERN

SEQ ID NO: 122583 - protein, 346 aa, unidentified
MEHYAGIDVSLELSSVCVVDGQGKIVKEAKVASEPEALVCFFKGLGFPVKRIGLEAGPLSQWLHAGLVQAGFESVLLETRHVKAALSAMTVKTDRKDARGLAQLIRMGWFRAVHAKSIGSQEIRALLVARKQLLGRLLDVELSIRGILRGFGLKVGQVTRKEFEGRIRELVTGQATLERIAGAMLSARATLRAEYEKLHKAVLAIVREDAICLKLMTVPGVGPLVAVTFKSAVDDPNRIAKSKAVGALFGLTPKKYQSGEKDVTGGITRAGDEMVRTALYEAANVLLSRITRFSKLKRWGMDVAKRRGSKRAKVALARKIGVIMHRMWVDGTTYQWTEAKLIAAQA

SEQ ID NO: 122584 - protein, 387 aa, unidentified
MPRPNDLSRSLVALDQDSTIIAVVEMSQSSWLLGGVLPGIERQPCKKLEPSAERLLGLLHRWRDEAVRAGSSITRIALAFEAGRDGFWLARWLQAHGVEAHVIHPSSVAVSREHRRAKTDRLDTELLKRGFLGWLRGERGHCSMARVPTIAEEDAKRPNRERECLVGERTRIINRMKGTLARLGIRTFKPTLRKAAERLATLHTPEGSPLPPNVSAELQRDMARLGFVISQIKDIEVARQKRLEQEPETGPHAMVRLLARIVGVGIETADMLVHEVLSRRMRDRKAVARYAGLTGAPDESGAKRREQGLAKAGNARVRRRMIQLAWRFLLFQKQTALAQWYLARTADRRAGTRKTMIVALARKLLIALWRFVTTGETLEGVILRPVG

SEQ ID NO: 122585 - protein, 352 aa, unidentified
MNDRSRKLYVGIDIHSREHKAALVPVTLLEHPGEPWRSVNSLSIRNNINDFECLNSAIKLHVSNAEEVAIAVDHTGGHYSEPIVHFLQTRGYDVCHLESRAVKAAREGLLDQEIKSDLVDATSTAYLLYLRDVHGLSFRISAIIPDFGSNAIALNSLILQRWQMNKLVNQATNRLHQFLLAVFPEGEARYFKQLLKITPYYPTPKDILASNGLETIENLRQKDKENILELASDTVGVPGQIYQWLIKDLSWQRIRSIERRDTITSIIREQIAVHPYGDILLSFPHIGEIAAATIIGIIKDIERWPDKKKFKKALGVYSSLTQSGASSGRGRPGKEGSRHGRRVLFQVCFGCI

SEQ ID NO: 122586 - protein, 391 aa, unidentified
MIYVGIDVAKDKHDCFITNSDGEVLFKAFTITNNLDGFNDLYQKIETVMKDITKVKVGLEATGHYSYNLLGYLIDKGLPTYVINPLHTNLYRKSLSLRQTKTDKVDARTIASILMSDVNLKSYSDISYHNEELKSLTRYRFDKVKERAKLKSSVSRLICILFPELEKLVPTLHMASVYALLYEFPGSKQVANAHLTRLTNLLSEASKGRYSKDTAITFRDAARTSIGSNMPAKSLELKHTIKLIKELDSEIDEIENEIKIIMDEINSPILSIPGINYRMGAMIIAEIGDFSRFDSPDKILAYAGFSPSTYQSGHLYGAYAHMEKRGSRYLRYALYNAAKYVCHWDPTFTAYLAKKRAEGKHYNVAISHAVKKLIRVIYHLEKTNQQYIKAS

SEQ ID NO: 122587 - protein, 341 aa, unidentified
MSEVSTIGLDLAKRVFQAHGADACGRVVFRKRLRREQVLTFFAGQPACVVAMEACSSAHYWARAIGELGHVVRLIPPAYVKPFVKRQKNDTTDAEAICEAAQRPTMRFVSVKSETAQANAVVFRARDLLVRQRTQAINALRGHLGEYGVVVAKGPSHVAKLIAHVEDPAAGLPEAARTVLRVLIASLQFLSERIDLLDREVARRAREDKEVRRLTTIPGVGPVIATAVAALAPPAGAFRRGRDFAAWVGLTPSQHSSGGKQKLGATSKMGERTLRRLLIIGASSVVRKAIKHGTRSGSWLGQMLARKPRMLVIVALANKMARTVWALLATGEIYRAPLAAA

SEQ ID NO: 122588 - protein, 318 aa, unidentified
MQSVSFFGIDASKDELVIAKDGESAVRRTPNSRSAIGAWLKTLPGHARLGIEPSGRYHLLLADLAVRRGFAVYVLDPRRVHHYARALGYRGKTDRIDALVIARYLASEIERLRAYQPPTPAQRRIDAMLRRRAKLVVMRAQLNQMSRALPGAHAAMVALREKLSALIATLERQAGLLAQTDPAQAALRQRLERIPSFGSLAGTALSNLFCRVPFRHADQAVAFVGLDPRPHDSGRHRGRRKLTKHGPSELRRLLYLAAMSASRTTLWKPFYLHDTMRGLSTTEALNVLARRLLRVAWAIATSGREFDPAMVRGAGPKP

SEQ ID NO: 122589 - protein, 438 aa, unidentified
MSNNVIFNPDELFISVGIDVGADFSWMSIALPNQQLVGKPYKILHSSMNSLTTAVSKIKEAEELYSLESRIFLESTGIYHYPLFCYLRDKGFNCSVINPIITKNSTNMNIRKVHNDRFDSKKASLVGLKPDLKVSLMPSDLALNCRNLCREYYDLMDNRSAYVNKLQGELRMAFPQYLGIFSKVTINTSLTLLETYTSPNAFIEADKQEIIDTIKSTARFGLTYAEKKYNAIIQAAHDANEFGYIIDSNIKRIRLYISFIRKYDEEIAGIMDALHDLVDSNEDTDFVKQIHLIETFKGAGFLSAVSLMGEIGDFSAFTKPKQLFAYFGLDPAVKQSGKFEGTKVQISKRGSAIARRVIHVLTLQSISTSRTGEAKNPVLRDYYLKKCESKPKLVAMGAVSHKVCNMIFAILRDNKPFEIITPQEHIKQYNAAKCDEAA

SEQ ID NO: 122590 - protein, 427 aa, unidentified
MSYKIAGIDVHKRMLHVVVSDVEVDGEYDFTRRIFGSLPEALRSLAAWLVEQQVQEVAMESTAQYWKPIWGALERYWKPICQTREAAHATSGKLHLALALSNRGRRGRKKDFRDAERLVKRLVAHELVLSFVPDVEQRLWRTVVRTKYQLTRNRVQLQNRLEALLEEAHIKLSSLVSDLLGASARRMLQAIADGETNCETLAALGDRGLRATQEQLQDALGVCKELNPVYRRLIRMVLDEVASIDKRIAQLNQEMANLVRPHEDQIKRLAEVPGLGVDTAQQIIAEVGATAATFPSEKHLSSWVGACPGDEESAEVNRSRRSPQGNRHMRRILNQAANAAVKHKGSIFEILYRRYVPQLGHNQTIGIIAHKLCRLVWKILHRGMRYEERGQEVSKASKQKRTRKMIQALRRLGYRIEPSPSQSAIPA

SEQ ID NO: 122591 - protein, 400 aa, unidentified
MYVGWDWAGKTHDVSVLDEQGRLVEHFAVDHDEAGFKQALRRLGRHGPAEEMPVAIERPSGLVVERLVEAGHPVIPIHPNAFNAARARWGASRAKSDPGDSYRLADYLRTDGRRLRRLRPLDEATRQLRALVRMRDDHIEARVAASNQLEALLNAHWPGAVCIFETVASDIALHFLDRYPTPDAAARLGETRLAAFLKRRCYSGRRTPAQLLERLRRAPTAASGLDPEVLAELVRHQVDLLRTLLHTCKELEHAIAAVLPDHGKARILAGLPRIGDGVNLAQVLSEVGPILDASLNVDHAAAQCGACPVTKASGQSRGVQFRWAANTHARQALQTFADNSRHASPWAARLYAKHVAAGKRHPHVVRILMRAWLRVIWSCWHSDIPYDPARHRNELRLAGA

SEQ ID NO: 122592 - protein, 413 aa, unidentified
MDVLHPRCCGLDVHKSSISACILLREAGRVQKHQRRFGAMTQELQELAEWLRQFGVTQVAMESSGVCWKPVWNILEGHFTVVLANAQHIKNVPGRKTDQKDAEWIAQLLQYGLLRASYIPCEIIRDLRDLTRMRTSLSQEASRISSRIQKVLEDANVKLASVATNVLGKSGRAMLEDIITGEDNPENLASLALGHLRVKIPQLRLALEGKIRSHHRFLLRRLLDQIQFVEHEIALLDERLEDIGRQRPDLAQAVARWDTIPGIDRVAAWTLLAEIGDNMAQFPTAEHLASWAALCPGNHESAGKRLRGTTRQGSPWLCRMACQCAWAAARTKNTYLSSQFRRLAARRGKKRAIIAVAHTLIVIGYHLQKNQSNYEDLGGNYFDRIHSDGLKRYLVKRLQQLGHKVTLEPMEAA

SEQ ID NO: 122593 - protein, 325 aa, unidentified
MSGATVVIGIDVSKARLDVAQLPDAATWSVTNDGASIRAAVERLAALAPHLIVLEATGGYERAVVAALAAAQLPVVVANPRQIRAFARAIGLLAKTDRLDAGLLARFGQQVQPVPRPLPDAQAQALEALLTRRRQLLEILVSEKHRLGIAPRPVVRSIREHIRWLEKRVENLDGELDGVIQASPVWRAKDDLLQSVPGVGPGLSRTLLGALPELGALSRKQIAALVGVAPLAKDSGAFRGRRRVWGGRAPVRTALYMAAVTAAHHNAVLRPFYQRLRAAGKPAKVAFTAIARRLLTILNAMVRSNTAWRVSPDALLAPAGDTVAS

SEQ ID NO: 122594 - protein, 412 aa, unidentified
MDPVVGLDVAKGESQVQMFLDKKMPYKNSVKVEHTVEGLEELHSYLLDLERQTGMKPPVVLESTGHYHAPVVQFLEAREYIVIIVNPLVSYRAKSSSLRKTKTDAIDAYHLGEMYYKEDLEPQKKRGIQLLNLRHLTRQHENMTGVMVQTKLQFQAVLDQVFPEYKGVFGSLYADISLKTLQNFPTSESVLKAGVEEIAQYINMHCKARSLDWAHEKAEELIAAAKRNPFQSTLYHSLLVSLNMYIDLLQAYHQQLSTLEREIDELAVQLEEYELLQTIPGVGEKIAATIISEIGEIDRFSHPKKLVAFAGLDPSVFESGRFKGTKNHITKRGSARLRRMLYTAVRCSIRDSRKKKTTDETIARNKRLRAFYDLKREEGKPYRVAIIACANKLLHWIYAMLKTKTPFQETAQ

SEQ ID NO: 122595 - protein, 310 aa, unidentified
MTSQVTVIGIDVAKETLSLCDARTGEVFELPNEARAIKAWLKTLPSNCAIAIEATGIYHVLVASLAHARKHRIYLINGFRLSNYRKGIGGRNKDDRSDAQLLARYLSHEQAQLEPWQPPSKVYCRLQALLHRRAVLVRNVTSLRQSFSQDPMLARALKPVLKRMAVLEQRLETQIQLVLEEAGLKEQSKRCQAIEGIGPLTAAALILAFLRGHFRNSDAFIAFLGLDVRLKESGRYSGRRKLTKQGDPEIRRLLHNAAMAAARTKRWRELYQGYLARGLKTTEALTVLARKLARIAFALMQTQTTYQPRG

SEQ ID NO: 122596 - protein, 339 aa, unidentified
MRKDEFECIGVDVSKKTLDVALFRGKVDWNEGHIKVDNNSSGYKELRKWLRLKKVEKKQLRICMEATGLYTHDFRSWLEQEGITYYVVDPKRMRHFAPPQSIKGIRQTKNDKADAFRIAIYCSLFHESMEPSRLPSAAYFKLKRLLAERRQYVKQSVLYKQQLHDISVYDSVGSRIRKEDEVKNLNANIKQTDAEMKEIIDSDLTIKRNYDLLTSIVGVGIVVAVTTIVLTENFTVFASPRKYASYIAIAPFPHESGTSVRGATRVSKQGFRQAKADLSISVLSAMSHDSELKEYWLRKKAEGKHAGTILNAIKFKIVLRMFAVVKRGTPYVNTKGYRR

SEQ ID NO: 122597 - protein, 319 aa, unidentified
MFVGIDVAKAELVVSIVPAMERFTVANDERGVRSLVERLRAVAPTLIVLEATGGYELLGVAALAAAALPVVVINPRQVRDFAKATGQLAKTDRIDADILARFADVVRPAVRPIADDEAQELEALLTRRRQLLEMLQAERNRAGQVFGTGKRFVKKSLKAHISYLEREQRITDPDLGAMIQASPVWRARDELLQSVPGVGPVLSRTLLADLPELGRLSRREIAKLVGVAPLSRDSGTMRGRRFVQGGRATVRGVLYMAALVATKRNAVIRTFYLRLVTAGKPKKLALVACMRKLLTNLNVMVRTAQPWTIEIAAEARIPA

SEQ ID NO: 122598 - protein, 408 aa, unidentified
MSQVVIGMDPHKRTATIEVMAGDEAVAGRGRYATDAAGYAAMLAEARRWPQRMQAIEGCQGIGRHIANRLLADGEHVVDVPPKLSARTRVFATGQGRKTDATDAHSVALAATRMQGLRPAVDDQQLAVLRILADRRRSLGEDHTRMICQLHRLLLELIPGGAKKSLSAAQAKVLLARVRPRDAAGRARRMVAAELISDLERIHQRKKAANKELNALLKASTTTLTTLHGIGPSGAARLLVEVADVTRFPDKAHFASWNGTAPIDASSGDQVRHRLSRAGNRQINRVLHIMAVVQLRNPTEGRAYYDRKVAAGKTPMEAMRCLKRRLSDIVYHQMVLDARAKAASPGGHVGTATGSSAAGLHPAAGTSEKSLPGPATSDPAPPRPARFSGRSAASPPRRTAAAVKRPFA

SEQ ID NO: 122599 - protein, 359 aa, unidentified
MQRNKISFKGQKIYIGIDVHAKTWEVCVLTESGYKERHPQQASAKTLFDFLKKHFPDGEYHAVYESGFSGFSTYYALTEYGINCVVTHAADVPTTQYEEVMKTDKVDAAKLARSLRAGDIRPIYIREKENIDDRSVIRIRKTIQKQLSGYKARVKHLLHCNGVEIPEQFARPGTHWSRAFIKWLKEDVVLLSSSRLSLDLLVKQVETIRQTLLDATKSIRRLAQTNRYRNNYELLMSIPGIGVSVAMCILTEIYDVKRFRNENQFASYLGLIPTCHNSGEKTASGEKTFRGNKHLGPMIIEAAWIAIYRDYGLGMAYARYKQSMKPQEAIVKIARKMSNIIFSVLKNSRKYEPYRWDKE

SEQ ID NO: 122600 - protein, 366 aa, unidentified
MKKVAFLGVDYHIKTITIAVYLGTEKKFYETIRLNNDDKTIKKYMKKLSTQFDLKICYEASCSGYVFQRKMQSLGYHCDVIAPSLTPRKPGDRRKNDTRDAKKLAQNYANDLLTIVHPPSQEEESVRSLIRCRITMKESAKRVKQQINSFLLSKGCRWPKSKWTKQHHLWLSKIEMPNLYLQQVLDEYLGHLSYLESRLQHLEQQIEQIANSKLYAPSVNKLRTLRGIETLTAMILIVEITDFRRFPSPRSLMAFLGLIPGEDSSDDTRKDVSITKAGNHRCRNALIEAVQHCVKKPRISVKMKQLLSEVDAQSAVIAQKCMYRLHKRYWALVMKGKARQKAIVAIAREFVGFIWALMQPVFCAVA

SEQ ID NO: 122601 - protein, 309 aa, unidentified
MNKAVVYIGVDVAKASLDVAWAERSRRFANNKSGLSALTKWVKQSPFAVHLICEASGGYERGLLDAAEQNGIKVSLVQANRVRQYARAAGILAKTDKVDARVLCAFGSAMQPEPTPPLSAQQKRLRELETQRQHLSRMMVAEQNRLAQLNDKELQRLTRSLLATLKKQMAAIDMRMVGLIAEDQILKQKAQKLTAIAGVGTRTAVLLLARMPELGTLNRTQAAALAGLAPFNRDSGTLRGKRTIFDGRRALRCGLYMAALVAARHNLILRNFYQRLRSNGKPHKVALTAVMRKLLLALNHTLKPTACFV

SEQ ID NO: 122602 - protein, 337 aa, unidentified
MYYVGHDGHKDNSVFCITTSSGNVKETFEVPATPAGMDVLIEKMKGKKFKVLAEASTYTIDLHDYLVSKGVESYLAHPHDLKLVTESCRKTDRNDSKTLASYLRLWDKHELDISISFVVDGDNRSLRELCRLRESISEMKGSTMQQIKSHMRINGQYVEFEDLKTMKARKHIRENFCEDLCLMMLLDMYVVFEDKGKILDSEIERRFGDRNEVQLLATIPGVGITTAAQLMSMIVDVHRFPTADKMRSYFGMAPTVRDSGGSLKHGHITRRGDPMMRKILSRVVAQMIKNAPSDNLAVYRESHRSAMRPGMLMVACMNRLLDIIYAVLVRGTPYIHM

SEQ ID NO: 122603 - protein, 337 aa, unidentified
MKRYLGVDLHRTQFVVCTRWENGEQETRQWRMGELARFVEQLQAEDQIAVEAMGTTARFHDAVVGGVARVVVVNPHQFKVISESVKKTDRNDAQALALYLEKDLLPEVRMKAKPNRELMHLAETRDLLVKQRSALKGKINNLLAMQGMELKREALSSKIALKRVLASPVSGMVQLELRVLVEQIRSLSESIAELDERLEEEGQQLPGYENLTSIKGIGSLSATVLLTVIGKISDFADENKLAAYLGLVPKIANSNESERSGRITKQGNKLARTALVQCGLVAKRYSPYLQGFYERIKQRRGGGKAKIALARKLVKIVYDTLKNRWVFEDFPSFTLAA

SEQ ID NO: 122604 - protein, 288 aa, unidentified
MAEALKNSIAVVGIDIGKNSFHVVGLDKSGAIVLRQKWSRGQVEARFANMPPCLIGMEACVGAHHLSRGLQRLGHDARLMPARYVRPYSKGQKNDFRDAETIAEAVQRPTMKFVATKTADQLDLQGLHRVRERLVSQRTGIINQIRAFLLERGVAVRQGLRFLRNELPSILGAPSDALSPRMVRILEDLAGDWRRLDERVEGLSKEIEVIARRDAGCDRLISVPGIGPIISSAIVAAIGAGDVFAKGRDFAAWLGLVPRQISTGDRTILGKISKRGNRYLRVLFVQAA

SEQ ID NO: 122605 - protein, 360 aa, unidentified
MFTERTSVGLDVHARSVAAAAIDGVTGELTQTRLTPSHDHIRSWIEELPGPVAVVYEAGPTGFGLYRTLTRAGVRCVVAAPSKLQRPSGDRVKTDTKDAIHLARLLRLDEVTPVAVPSVDQEAARDLVRAREDCRGDLMRARHRLSKLLLRHGIVYSDGRAWTGAHDTWLRRQRFTNPATRMAFESDYDAVLTVRARRDRLDTAITVMAADSEFTPLVQRLGCLRGVATLTGFALAVEIGDWHRFTGKTIGSFVGLVPSEYSSGASRTQGPITKTGNTHVRRLLVEAAWHHRPRYVTGKTLRDRWELAPPAARARGDAGNRRLHDRWVTFNLRRKRHVVANVAVARELAGWCWSLAVMQQ

SEQ ID NO: 122606 - protein, 431 aa, unidentified
MNYNQNHKIAQITSKTLIIGIDIAKHHHVARAQDYRGIELGSTCFFDNTQEGIRTFINWINQIKDSYEMESVITGMEPTGHYWLNLAHILKEEQIKFVTVNPLHVKHSKELDDNSPTKNDVKDAKVIAQLVKDGRYSEPTIPQGVFAELRVAKKLRDLLNVDLQIVQGQIHNWIDRYFPEFFTVFKSWEGKAALHLLKLEALPEELVRYTEEELLEYLRQAVKRSIGIKKIRALKEAANRSIGIRQGAMMAKMELRTLIQKYELIQKKFEELDQTLDTLLQDIPGVDQMLKITGIGRDTVAGFFAEVGDLSEYNHPRQITKLAGLSLKENTSGQHKGRTRITKRGRKKLRALLFRASMILVAKNKAFKALHYYYTMRPDNPLKKMQSLIALCNKLIRILFSIGKKQFVFQEEKMLKDIPHMHAFIQEPIAA

SEQ ID NO: 122607 - protein, 404 aa, unidentified
MYNAVGIDVSKGKSTVTVLQPGGTVIRKPFDVSHTSQNLNELAAYLDSLDGDTRIVMECTGRYHEPILKALSEAGLFVSVVNPHLIKNFGSNSLRKVKSDPADARKIARYTLDNWAELRQYSGMDNTRTQLKTLNSQFSFFMKQKVAVKANLIALLDNTYPGVNKLFDSPVREYGSEKWVDYAYSFWHVDCVRGIGLKAFTERYQAFCKRHHYIFQADKPEKLFNASKELAAVFPKEKTYKLLIQQSIQQLNLASGHVERLRREMNELASTLPEYSTVMGIYGVGRTYGPQLIAEIGDVSRFTHREALTAFAGVDPGVDESGQHKSKSNRASKVGSARLRKTLFQIMTTLLQNAPEDDPVYRFLDKKRSQGKPYYVYMTAGANKFLRIYYGKVKECLRNLEQES

SEQ ID NO: 122608 - protein, 340 aa, unidentified
MDHYAGIDVSLESSSVCIVDAQGKIVKEAKVASEPEALIAWFVSQPILPARIGLEAGPLSQWLFAGLKSAGLAVELIETRHVRDAFKAMPVKTDRKDARGIAQLMRLGWFCPVHCKSLPAQEVRALLTARKLLQAKRHDLEMSLRGVLRGFGLKVGPTTPKTFEGRVRDLVAHHGTLGMIADALLKARTVLMQEFKAIEKRLYAFARGDTPTRRLMTMPGVGAMVALTFSSAIDDPGRFRSSRVVGAHFGLTPRKHQSGESDVTGRISKIGDHGVRVALYEAANVILTRVVKGSDLKNWALGIAKRAGMRKAKVALARKLAVVLHRMLADGTSFMPWAVW

SEQ ID NO: 122609 - protein, 367 aa, unidentified
MMAPFHAIEALRAVWRSKIAIGTSSGPEWLNELKVRITREGSTKMAKHTTICAGIDTGKRKLDVALEGNREQLQVENTSEGHAVLLAWLRRHRVKRVGIEASGGYEQPVVVELRRQRFVVVVFQPAQVRAYAKFHLQRAKNDKIDAALIAACTAAVRKIHAAPDPRLLPFAEQLTMIDQINEDTARLKNRIESCRNARIKKLWNEDIARLEKREKAELKALVASIRKHPDLAKRLGLINSVHGIGLPTAVAILVRLPEIGQITREQAVALAGLAPYDDDSGEQVGVRHIEGGRKRLRRALYTASLAASFRWNQQLIQLYQRLTAAGKEHKRALVACARKMLIFANTVVARGKPWQDCPPEKAALTTG

SEQ ID NO: 122610 - protein, 347 aa, unidentified
MDTVSLIGIDLGKHCFHLHGQDASGRMVFRKKLTRSQMFTLLGNFPRCIVVMEACAGAHWIARRLQALGHEAKLISPQFVKPFRQGNKNDFADAQAICEAAARSSMRFVSPHNEAQQIVSALHRVRERLVRDRTGTINQIHAFLLEFGISLPRGMAVIRRLPAVLEAESLPPRLVVVLERLQAHFKYLDEQIHQLERELLTQLHEDERSERLLEIPGIGPMTASVLMSELGDAQQYGSARQFAASVGLVPRQYSTGGKPTLLGISKRGDKELRRLLVQCARAIMQRIEHRTDALGVWIRSLLARRHSNVVACALANKLARIAWAILAKGTHYRSIGTYPSFCGRGIS

SEQ ID NO: 122611 - protein, 339 aa, unidentified
MDLYVGIDLHSSNSFIGILNKNAERVMSRRLPNDREKILMALSPYREKIKGIAVESTYNWYWLVDSLMEEDYQVHLGNPAAFQQYKGLKYVNDKHDAFWLAQMLALGLLPEGYIYPKEERGLRDLLRRRLQLVRHRTSMKMSLQQICINQTGGCITNNFIERIGDEDIKKIFEDEEWRMNGESLLSTLDFIKGEIDKIERYTLKQIKERTCYTSLTSIPGIGEILGMTISLETGPIGRFASSGEYASYCRCVPSSYWSNEKKKGQGNTKNGNKYLAWAFAEAASFCIRYCEEAKRYYQRKKAKANTPKAYRAVSNKLAKCAYYLMKKGSLFDAEKLFGS

SEQ ID NO: 122612 - protein, 416 aa, unidentified
MQNLLDICCGLDVHKEVLVACLLKGRLDEEPEPEIREFPTLLNGLDEFKKWIIENNCRHVAMESTGVYWFPIYNVLESILYDDDEQKNVKIIVANPHHMKNVPGKKTDIKDAHWIATLLRAGLLAPSYIPPKKIRELRDWTRYRDILIKEMVGHKNRIEKYLQQCGFKLSTILTDIFGVSGIQLIKRLCEKGKLTASDVDECLKGTLRNKMEDVQLAVAGQLSDHDRLFLKNLVKVKENCDSEIEEVENRISEYAGKYEPALELLETIPAVQRRASTIIISELGTDLSMFPTAGHLVKWAGLCPGDNESAKKKKTARLTKGNPRIKSVMVQCAWAATRCKNFFLRDWFYRLKARRGIKKALIAVARKLLVIIWNLLTSGEEYSEEHYEQTKKNQEERRKQKLKSEATKLGFKLVPA

SEQ ID NO: 122613 - protein, 421 aa, unidentified
MKELRARSIRMVKEGTLIATVDIGITNNTGYCTTLDGRSTKSFSFDNTKEGFEKFWYMTVASKNRFGCDEVLVGYESTGPYAEPLVHYLANKQVKIVQVNPMHTKKMKEVNDNSPLKTDDKDPRVIADIIRLGRALTIVVPEGDAAYLRRLNNARERHVGEQTALLNQLQQLVFLIFPEFKTVLKNMKGKTAQHILKRYTIPGRIGTLSKEVLGEEMRKRSMGKFGIKEAESLIGLARETVGIKEGIAGIFMDIRHILMQLEAEVRFISEIEAEMGAGLERIPYSVRLLSIKGLGTVSVAGLIGEVGDFSKFSTQSEIMKLAGLDLYEISSGKRKGQRRISKRGRSLLRKILFYAAIQMIRKNGIMYDYYARLTGRGMERMRALIAVSRKLLRIIHAIVRDNSNYVGQYQTLERRVIKMAA

SEQ ID NO: 122614 - protein, 431 aa, unidentified
MNEVDRNRLEEFRQLRREIRHSQEYLIVGIDVAKDRHHAFFGTATGKTLLKRFVFDNTYEGFRKLLDQTEAVRVQHQLSKVVYGMEPTANYHKPLGEGLIELGRRVVLVSGVMVKRNRESLDGRWDKHDEKDSANVADLVSQGKCLYYKYPSPELRGLRGLLSLKKRLKKQEQSYRVRIRNQLIAQYFPEMDRYYERLGEEGLSIVKWCLAASQITQLDVDLFIERVTSRRITGEKRRRLEAIWEKAGESIGCEEVPGVDHEGKVLVEGLKQIREMIKETDKKIEELCKQFPEYPYLLTIPGFGPDVSAKVLGAIGDPDRFEKGSQVVKLAGYDLSADRSGKDSDKAIPEISKRGKADLRYALYQAALVASSQNRELMIYYTNKIRGREREKGIHTKMRVKLAAKLLVIAWTLMKKKEAYNPAYLNTDKGE

SEQ ID NO: 122615 - protein, 358 aa, unidentified
MRIIGCDLHARQQTIAMLDTDTGELEEKTLEHEGDTVREFYSALRGPILVGIEATGSMQWFLELMEELGIECRVGHPQKIRQAETRKQKHDRRDARLLLTLLTENRFPTIWMPSTEQRDLRTLLRHRHQWVHLRSRVQHTLQSMALNHGLRRGHALWSQAGQHALWVLPLAPHASERRAALLSLYPRLQESIDQLDQRVGQQVQQHPQARRLMTHPGVGPITALATEVFLGDPLRFSDGKALASYIGMIPSEHSSGGRQRLGAMSKQGNALLRYLWCEAAMHAVERDPELKRFYRRKLVQKGLGKARVAAARKLGIRLWIMLRDQIDYQEFCRRGKARQESGSVHVGMPDLDSGPATQ

SEQ ID NO: 122616 - protein, 423 aa, unidentified
MAAYCGIDWAEGHHDIAVVNDEGKLIAKRRIEESLDGLAEFAAMLDAAGDSPEAPIPVAIETPRGLLVAVLRASGRPVYPINPLAVARYRERTSVSGKKSDHADAMALANILRTDAHLHRMLPEDSALARSITVLARAYQDGVWRRTKLVQELRARLREYYPGLLAAFAAGVGRSLSTTQLASGDARAVLAIAPSPAEGLKVSKTRVEAALRRGGRQRRAATLAATIVAALRVPQLRQDPVVEQAMRTEALALLGVLDAICASVDQLAAALIEAFAQHPDYEIITSFPGLADISGAIVLAEIGDDRERFHDDRALQAFAGSAPVTRASGKSRTVTRRRTKNNRLASAGYSWAFSAAARPSPAREHYLRRRERGDGHAAALRHLFNRMLGQLHHCLQTSQTYDPVKAFPHAAAARQEPLSEAAA

SEQ ID NO: 122617 - protein, 339 aa, unidentified
MNEVTLIGIDLGKHSFHLHAQDAAGRMVFRKKLSRQQLLRTLANVPCCRVVMEACAGSHWLARQLAGMGHEPRLISPQFVRPFVVGNKNDFGDAQAICEAACRPSMRFVSPRNEAQQTVSAMHRLRERLVRERTATVNQIHGFLLEFGISLPRGAALMSRLPTVLDHETLPPRLVGLVVRLRAQVHYLEEQLRQVEQDLKASLREDDKSRRLLEIPGIGPITASALAVELGDARQFANARQFAASIGLVPRQYSTGGKPTLLGISKRGDRNLRRLLVQCARAVMQHTASRTDALSLWVKTLSTRRHSNVVACALANKLARIAWAVLARGTHYQARALTT

SEQ ID NO: 122618 - protein, 328 aa, unidentified
MYLCILDSAGTVLLHRNLPTDAQHLLEAIRPYREDIVIGVECIFTWYWIADLCSQHALSFVLGHALYMKAIHGGKTKNDKLDSQKIAGLLRAGMLPLAYAYPQAMRSTRDLLRRRMYLMHQQSELLAHIQNTNAQYNLAAFEKRINYQTNRAQLSQHFPEPMVSKSIQADIDVLEALHNVLLSVEREVLQQARAHDPLSLQLIRSVPGIGKILSLVILYEVHDISRFSSAGNFISYSRLVKCARESAGKKSGPRNSKIGNVHLKWAFSEAAVTFLRNNEPAQRYHHKLVCKYGKAKALSIIAQKLGRTLYFMLKHKEAFDPIRFFQDG

SEQ ID NO: 122619 - protein, 347 aa, unidentified
MDHIGMDVHKKESQLCILTEEGELSERRIRTEPQRFAAVLGDRPRARILLEASTESEWVARCLEGLGHEVIVADPNFAPMYATRTRKVKTDRRDARALAEACLLGAYRPAHRLSDGQRHVRGRLLVRDALVRTRTGYISLIRALLRQHGYRVPSGSAKAFLQRVLAMALPGRLLSEIAPLLAVMRHLNHQLSYSEHVIEEITAHDERVQRLRTVPSIGAVTAAAFVATIDDVRRFRRAHQVEAYLGLVPRELSSGETQRRGHITKAGHARMRWLLIQAAVSILRRRPPQAEALRTWAIRIAARRGKHVAVVALARRLAGILYAILRDGSVFDPQRVRHPIAVATLAA

SEQ ID NO: 122620 - protein, 366 aa, unidentified
MVERGRRVVGGVDTHKDIHVAAAVDDVGRILGTEEFPTTARGHRALLAWLGRFGVVVRVGVEGTGAYGAGLARYLAKAGVDVVEVDRPNRQTRRRRGKSDPVDAEVAARAALSGEASGRPKSRTGAVEMIRALRVARRSARKARTQAVNQIRDLIITAPDELRATLRDLTLKEVVDRAERWRPGPVTSPAAATKLALSVLAQRYQALGAEMERLDVELDRLVAETAAPLLERRGLGTDTIAALLVAAGDNPQRLKSEASFAALCGASPVDASSGKQQRHRLNRAGDRQANEALWRVVLVRMATDPRTKDYVARRVKEGKTKKEAIRCLKRYVAREIYHELMASLPDPAVAAPTPYRRSSGRTPCLL

SEQ ID NO: 122621 - protein, 411 aa, unidentified
MIKENYMYVGIDLHKETHTAVIIDCYNQKLGEITFPNRPADFPKLVTKVKKCNTDGKEVVYGLENAYGYGRALAVWLIDKGYFVKDVNTAISHRQAKHRGAMYRKSDSDDAKAIALATLNMLDKLPDACPNDAYWSLGQLVHRRDNIMKQRTRLVNQLHEQLCIVYPSYKQFFNDISRPTALYFWEHYPSRKYLKGKSVEDLRAELVPVSHNKCSTKTCEKILDAVASDKVKNNNFQDARDMVTLSIVSDIQHYDKQLVEVDKMLEQMYKMLGCTLTTIPGVNVITAVKILAEIGDIKRFGNANKLAQFAGIAPLHLSSSGKGKDVATKQGNRRLQATIYFLAIQMVQVSSKGTPRNPVVRAYYEKRKAEGKTSQQALICISRRLISIIYGMLKSGTEYRMPVMENTGETV

SEQ ID NO: 122622 - protein, 415 aa, unidentified
MGYKVAGIDIHKKVLMVVVMLMQAGGLVEKIERRRFGTTTPELEKLAAWLQALGVQEAVMESTAQYWKPVWGALEGKIPTLHLAQAFSNRARRGRKDDFRDAERWVRRRVAGELVLSFVPPPEQRNLRTMTRMQVHLTQDRGRLHNQVECLLEEMRIKLSSVLSDLFGVTGRHILGTLAKGETDPQKLAAWAGNRLQCTSQELVAALTGKVLAMHQRLLGLYLQRLQLIDDQIDELKPMIAAALAAHQEAVQRLAEVPGFGADSAQQMIAEVGPQAATFPSAGEMSSWVGTCPGQNESAEENHSSRSAKGNRYARRLLTEAANAAVKTKGSHWQVVFRRLLPRLGYQQAVWAVAHRLCRVVWKILHDKVRYVEQGVNRDPKARSNRARTLARALRQLGYSVELTPLTPAPAPTSP

SEQ ID NO: 122623 - protein, 341 aa, unidentified
MEDVTLVGIDLGKHVFHLHGQNTAGKAVFRKKVSRKQLVEFFATLHACTVVMEACAGAHHMARKLTTFGHQVKLISPQFVRPFVKGNKNDFVDAEAICEAAARPSMRFITPKTESQQTLLALHRVRESLMRDRVRATNQIHGFLLEFGVSLPKGEAVIKRLASVLAEHPLPPRLIAVLERLHAHIKYLNEELDEINGELARQLADDDLGQRLLTIPGVGPVTASVLTAEMGDGKQYGCSRDFAASLGLVPRQYSTGGRSNLLGISKRGDKHLRWLLVQCARAAMRWLDRQCGQMADWVRSMLTRRHPNVVACALANKLARVAWALAAHNTTFNAGSAVLPA

SEQ ID NO: 122624 - protein, 352 aa, unidentified
MEVTTIGLDLAKSIFRVHGVDTTGEVVVRRPLRRAQMLPFFARLPSCLVGMEACGTSHYWARELIKLGHEVRLMPPAYVKPYVKRGKTDAADAEAVCEAVRRPTMRFVPVKSPEQQAVLSMHRARDLLVKQRTQLVNMIRSLLAEFGLNIPKGLERALLMARRIVDGKAPDVPMEVAKIVSTLSQQALDIHVRLRQIDRDLLVWQRGNDVARRLMTIPGIGPVGATALAASVTDPHQFRSGRQFAAWLGLTPLQKSSGGKERLGRITKMGDKYLRKLLIVGMTSLVCRAKHNPETIEPRLANLLARKPVRVATVAMANKTARTIWAIMTRGETYRAGHQPALAHKNNVTRIS

SEQ ID NO: 122625 - protein, 375 aa, unidentified
MQEKLRFLGLDVHAETIAVAIAEPDGEVRSLGTIPNRAESIRKLIKKLGPVEKLRACYEAGPTGYVTYWQLAELGVKCEVVVPTLVPVKAGDRVKTDRRDAEKLARCYRSGDLTAVWVPDEGSEALRDLVRAREAAKQDQLRARHRLSKFLLRSGQRPPSGIRPWTRPYLIWVGQLRFTQVAQEATRLDDLHEVEHMRERVARLEQAIAEAVKLASPVLQQVINDLQALRGIADISAVTIAAELGQVSRFDGARQLMGYCGAVPSEDSSGKRTRRGSITKTGNAHLRRIVVEAAWSYHRPPCIWYGLRKRQQSISEEAKEIAWKAQHRLHKRYMRLAAAGKDKRKITTAVARELLGFIWAIGIRAETVARQRIAA

SEQ ID NO: 122626 - protein, 347 aa, unidentified
MRFYTQQHPFYCGIDLHARTMYLCILNQAGETLLHRNMTATPEALLKAIAPYRDQIVLAAECMFTWYWLADLCAEHGIPFVLGHALSMKAIHGGKAKNDKIDAHKIAVLLRGGMLPQAYVYPAEMRATRDLLRRRMHLARKRGELLAHVQNTNSQYNLPAIGKNIAYKTNRDGVAERFADPAVHKSIEVDLALITYYDALLRDVELTIVKTAKHHDANTLYLLQTVPGIGKILSLVLLYEIHQIDRFPRVQDFASYCRLVQCAKESAGKRSGTSGTKIGNAHLKWAFSEAAVLFLRDNPAGQKFLTRLEKKHSKGKALTILAHKLARAVYYMLQHKTAFDMPKFLNS

SEQ ID NO: 122627 - protein, 423 aa, unidentified
MTGERELGENDLRGSRSICLKARGESRVTLNVREAPRLNCYKPKSARGADKSESLHGKDGRARRARSGSPGGQTKTTPIMKANILLVGIDVGRRELVVAIRSGEQIHVQRFANDPVGRRHFVAAMLRRAASGTIRVALEATGPYSFELALLLSKTARFEVSVINPKTIKHFLRAQGARGKTDQIDARGILQYLELMPFRPWRAPAPVLLALQAIARRLYQLNVERTREANRLEALEVLGAAGKTVAADLRQAIRQIDRRMEKLEAAAVELFRSDAVLHRKYELVTSITGIAQKSAIRLLGELLILDPTMKGTQWVAYAGLDPRPRQSGTSLDGHRYISKAGNRYIRAALYMPALVAIRHEQVITQHYQHLAEERGKPKMIAIVATMRKLLLCLHSMLKNNTPFDPTKLAPRTTLENPAFINTA

SEQ ID NO: 122628 - protein, 367 aa, unidentified
MKKISTVAVKQSKNFSEQKLTIGFDLGDRSSWYCVLDEAGSVLLEQRVSTTPKAMKEVFGGMPRSRIALETGMHSPWVSRLLSELGHEVIVAHARNVRLIGESRKKDDRMDAQTLARLARVDPQLLSPVKHRSAKAQADLTVIRARAGLVRARTALVNTVRGLAKSYGERLRGCNVRNMNPEKAEGLSPELQRALEPLLAGIESLSERIRECNEGIEKLVQESYPQVAMLKQVKGVGTLIALTFLLTLEDAHRFRKSRDVGCYLGLQPGRRNSGQSEPQMHISKEGDPYLRTLLVQGAHHILGPFGADSDLRRWGLKLAERGGKNGKKRAVIATARKLAVLLHHLWVSGEVYEPLHHSNQRAMPAAA

SEQ ID NO: 122629 - protein, 400 aa, unidentified
MLSIGIDVSKGKSTVCGMKPGGEIVYTPFEIQHTREGMSELVSLLHNSGEEVRAVLESTGSYHCPVVTALLENGIFVSVVNSLRMKRFCSQSIRKVKTDRIDAMQIALYGLAYWQELQPTRLPEDTYRELQLLARQYYQMTSLLIKAKVDFNAICDQVLPGMQELMNDHAGRHKLSDFVLRYRHTTHILEMGETRFRKDYCKWAEKKGYRNHERMAALIFATAQNGIPVLPNAPSTQIVITEAIRVLHTVEASRDAILTQMQALAKTLPEYSLVREMPCIGDTLAPRLIAEIGDVRRFHSKRALIAYAGIDAPPYQSGKFCANNRHISKRGNRYLRKTGYEVMQSYVMHKPANDPIFTFIEKKRGEGKSGKLAMVAGLNKFLRVYYGKVTELYRSLPAIE

SEQ ID NO: 122630 - protein, 343 aa, unidentified
MKQVSTIGLDLAKNVFQVHGCDEAGQVVVRRQLRRGDVLKFFAKSPPCLVGMEACASAHYWGREIAALGHQVRLMPPTRVKPYVKWGRKNDQVDAAACNEAVTRPSMQFVPIKTVDQQAVLMLHRSRKLLIEQRTRIGNALRAHLAEFGIATAKGETGFAAALAVVDQQEDQRLPAVARQALAALAAQWRSASEQIAALDREIVACHKSNEASRRVATIPHIGPVIASTLVATVGDATRFKNGRQFSAWLGLVPSQNSSGGKERLGGITKTGDRYVRQLLVLAALGMLRRVRKDEAVSPWLAQLLKRKPPKQAAIALANKLARITWAILAKGGIYQEPARIAA

SEQ ID NO: 122631 - protein, 451 aa, unidentified
MTIMEEAMAVRKRAVLELAHPNAAGIDIGSASHYVAVPADRDDESVREFKSFTDDLERLADWLVACGIDTVAMESTGIYWIPLFELLESRGFTVYLVNARHVKNVSGRKSDVLDCQWLQQLMSYGLLSGAFRPKDEICALRAVSRQRDMLLSYQARHVQHMQKALAQMNVQLANVISDIVGETGQKIVRAIIAGERDGARLAQMKNVRIRASEAEIAKSLRGNWREEHLFALRQAMALYDAYGERLAECDQQLEALLAALQPEAAGDPGKNRRRSRARNAPKFDVRAYLFGMCGVDLTRINGIDTTTALKVISEVGPDLSRFKSAKHFTSWLGLCPGTKISGGKVLSGASKRTANRAAQALRMAAAALRSSQSALGAYYRRLCARLDRPKAITATAHKLARLIYTMLTKGTEYTDQGQDYYEERYRQRVMHHLAKRAEKLGFQLTPLAVTT

SEQ ID NO: 122632 - protein, 316 aa, unidentified
MHPSNLVAIIKTDQKGEVELGCRKLTIDKWVKELHKRFGSPIAVAVELKKGPIVYALQRYDFIVIVPINPTTLAKYRTAFKPSKAKDDPTDAEFALELMLRYPNHFPPLNQQSVNMRKLMFLVEHRRKVVDDKQRVVNQMINAIKQYYPQANEWFCKKDTHIFCDFIARWPTIQQAKKAHKSTLVKFFNDHGIHKSTIVDHRVSLIKKAKPLTDDKAVIDSHAMLVTFYIERIVNSMKCIQEYNKSISELMDKLPDTPIFNSLPGAGAALSSRLLAAFGEQRDRFKSAQEVQQYAGIAPVTERSGQKSWVHWRWQC

SEQ ID NO: 122633 - protein, 385 aa, unidentified
MFQAPQMLDPLAALVDVGSEHMHVSVGGNRPQVFGTVTSQLHALRDWLLAQGVRSVAMEATGVYWLPLYGVLENAGLDVRMVNGRQTRNLPGRKTDMTDSQWGATLHMHGLLHAGFVPPADIRRLQDYLRLRADHVAAAATCVQLMQKAFERMNIKLHDVISSLAGVSGLAVARAIVAGERSPEALVALCDVQIRRRKAQAVIEALRGTWADEHIFALAQALQSWDHYQKLIAECDARIATVLPPHDDTQPPLPRSTRRASVNAPDIAGLREILAQMCGGRDLTKLPALSSYGVLQLIGEVGTDLSAWPTEKHFTAWTGLAPGSHDSGKRRKGVRRGRNRTGRPKAWCAAATLRWVVSTAGSRPAAAAWWRPRRWRASSPPGSGA

SEQ ID NO: 122634 - protein, 345 aa, unidentified
MKMTTIGLDLAKNIFQVHGVDEQGQVMLKKSLKRTKVLPFFANLEPCRIGMEACGGAHYWARQFERFGHTVKLMAPQFVKPYVKTNKNDAADAEAICEAVTRPSMRFVPIKPPEQQAVLALHRARQGFVKARTAQANQIRGLLTEYGLVIPQGIGQIAKRLPVVLEDGENALPEVFRALLQRLGEHLKTLNRQVEELDEQIQRWHREQAASRKLAAIPGIGPLTASALVATLGDARQFENGRQLAAWLGLVPKQHSSGGKPTLLGIGKRGDTYLRTLLIHGARAVIRVAKRPSNHVGNWLAQLLHRRNPNVAAVALANKNARRVWALLAHDREFQPDYAPAAIGV

SEQ ID NO: 122635 - protein, 304 aa, unidentified
MHLHDAGWRVVNDASGWDALIAKLKESQADLVVVEATGGYERGLVTALHRAQLSVARVNPRQARDFAKSMGVLAKTDRVDARCLRDFADVLARHEDRHKYITLPADPEREVLAALMTRRRQLIDMRVAESNRLEGATARTVRSIRSVIKTLDKQLQDIDGDIDQQLEQHFKPQKELLDSVRGVGPVTILTLTSALPELGRLGRRQIAKLVGVAPLADDSGRRKGVRRTAGGRSEVRAVVYMATLTAIRHNPVIKSFYGRLVEAGKPKKVAIVACMRKLLTILNAIVRDQAPWRTDATLTSSRST

SEQ ID NO: 122636 - protein, 351 aa, unidentified
MTVAVDADLVVGVDTHLDTHTAAICDARGRAAGQLQVAATTAGYAELLAWASAAAAGRRLAWAVEGTRHYGLGLARYLAGEGQQVSEIDSTRHVGKRRAGKSDSIDAVRAARELLARPRPAQMRADGDREALRLLMVDRDNAVASCKTARAALASVLVTAPAQLREQLRPLPRVRRARACAELACPHDADRLTRVTHQTLIRLGQRIAALAEIAAGLEAQIAAIVEDMAPGLVAAEPGLGALSAAQILLSWSHAGRIASEAAFAMLSGTAPVPVSSGRTDRHRLNRLGDRQLNRAIHVIAVNRMRHHPPTLAYVQRRQAEGKTDKEIRRCIKRYLARHLYRTLNHRTLSQA

SEQ ID NO: 122637 - protein, 414 aa, unidentified
MKNDHQKFTVWIGLDWANRKHDVCIQTADQPDRSFGVIGSTPEAIEAWIQDLHKKLNGQIAMALELNKGPIVYALQKYAFVTLFPVHPLMLARYHQAFSSSGAKDDPSDAALALDLMIHYPEKIKPLTSPSCELQKLRHLVEQRRTLVEDKRRLVNRLINALKQYYPQPLEWFAHRDTDLFCNFINRWPTLQQLKRAHQTTVRRFFVSRGGRTVPKTDERIDAIKQAVALTHDRAVIESHSLLVTTLSKQIQLLNAAIREFDQEIEVLFESMDDARLIKSLPGIGHCLGPRLLVAMGEDRNRFQHAGEVQNYAGIAPVTERSGQKAWVHWRWRCAKFLRQSFIEWARKTVKTSYWAGLYYEQQRAKGSSHQAAVRSLAFKWIRILFRCWKSRTPYDESKYLKALRKRNSPLIAT

SEQ ID NO: 122638 - protein, 343 aa, unidentified
MGEVITIGLDIAKSVFQIHGVDADGAVVIRKRVSRAKVLETFAALRPCLVGIEACPTAHHWSRELLALGHTVRLMPPSYVKAYLKRSKNDANDAAAICEAVTRPSMRFVPTKSEQQQSGLMLHRSRQLLVRQRTMLSNAIRGHMAELGMISAKGRNGTAELLKVIADNDGRIPVLAHFSLDVLARQYAAITAEIGAIEKRIHAWHRSCEESRRLEEIPGVGPIVATALIAEVGDWKAFSSGRNLAAWIGLVPKQHSTGGKDRLGGISKQGNRYLRWLLVTGAMAVIRYARLRGTKRLWLARIMERRPVKVAAVALANKIARMAWAMMVRGEQFKEPRLLPAAA

SEQ ID NO: 122639 - protein, 407 aa, unidentified
MSEDTGFDIWCGLDVGKQAPHACALDAAGRKVFDKPLPQDQTKLEDLFHNLAEHGRVLMIVDQPNTIGALPIAVARSMGITVAYLPGLAMRRAADLYPGNAKTDAKDAFIIADTARTMPHTLRRVDAGEETLAELKVLVGFDEDLAAEATRLSNRIRGLLTQIHPALERVVGPRLTTKQGLAVIEQLGGPQGIAGLTKSKLLRVITKAYPRNAQAFADAITTALGEQTVIVAGTAAAEQVLPKLAASLRQVLDQRAELALQVEKVVDAHPLAEVLTSMPGVGVRTAAQILLDVGDASQFPTAGHLAAYAGLAPVTRRSGISIRGEFPARAGNKRLKRALFLSSFAALKDPTSRAYYDRKRAQGKKHNAALICLSRRRCDVLFAMLKNKEPYRAPTPAPEPPSMPLAA

SEQ ID NO: 122640 - protein, 368 aa, unidentified
MGEITSFVGLDVHKETISVAVAQGGRNGGVRFLGEIPNTPAALDRLAAKLAKDGRSPQFCYEAGPCGYGVHRHLAERGHDCIVVAPSQIPRKPGDRVKTDRRDAVMLAGLHRAGQLTPVWVPDAGHEAMRDLVRVRAAAVASGRAARQQLLGFLLRHGRRFEGRPWSRTHRAWLSGQRFDRAAQQIVLQDLIDTVDAAAERVARLTRQIEVQVAEWSLAPLVAALQAMRGVALIVAVTLAAELGDLGRFASPAQLMAYAGLVPSERSSGAKTRRGGITKAGNGQVRKALIEAAWTYRRPARISEPKQRKVGAAPRPVREIAWKAQVRLCARYRRLAAAKPLQVVVAAIAREMLGFVWAIAREVRPAPA

SEQ ID NO: 122641 - protein, 349 aa, unidentified
MTIVEDKPVITGGVDTHADLHVAAALDPIGGLLGVRQFPATAAGYADLLEWLGGFGDVGLVGVEGTGSYGAGLARHLAAAGVAVVEVDRADRQDRHRQGKSDPLDAVSAARAAQSGRASGVPKGRDGAVEAIRALMVAKRSARHERTQAINQARALIVTGPDELRTRFAGHGPASLAEAIAALRPRPGDVPGYATRVALREPVRRDRFLDAQLERLDELIGPLVTARAPGLLSLFGVGPDTAALLLVAAGDHPERLRSESSWAHLCGAAPIPASSGKTSRHRLNRGGNREANHALWRIVITRMGSRPGHPATRAYVERRTKEGLSKKEIIRCLKRYVAREVYHQLRDGT

SEQ ID NO: 122642 - protein, 390 aa, unidentified
MQVKADRPEAPSAIRSDLGAIFVSLELSRSIWLITSLSPGAGEKMSKHSVPAGDIGALLARFSEMKQKAFARTGKSFPIIVIQEAGLDGFWIHRVLQKEGIESHVVDPASIATSRRRRRAKTDRIDGEALLRALLAYKRGEPRVCAMVKAPTPEEEDRRRLCRERKVLTTERVQHVNRIKGLLFCQGVSGYEPLRRNRRQRLDELKTGDGRLLPDHLKAQISRELDRLELLLEQIKAVEAERNALFAVAKAAAPTAAPVAMLLDLKGIGPEFAAVLWMEAFFRSFANRKQIAAYAGLAPTPWQSGSIDREQGVSKAGNPRLRTTLIQLAWLWLRHQPQSALAIWFKERVMCNGGRFKKTTIVALARKLLVALWKYVTAGVVIEGAVMKTV

SEQ ID NO: 122643 - protein, 318 aa, unidentified
MPSAAPAFVGIDVAKAELVIAIRPSGERWTMANDAVGIQTLVQRVRVHAPTLIVLEATGGYERAAVAALAAAQLPLVVANPRQVRDFARATGQLAKTDRIDAGILALFAERVRPAPRALPDDAAQALDALLTRRRQVLEMLIAERNRLEHAAPAVRRSITQHIRWLERQLHDVDRDLDNTIQTSPVWRAKEDLLRSTPGVGPILSRTLIGELPELGTLPRKQIAALVGVAPLARDSGALKHKRLVWGGRAPVRAALFMAALVGTRCNPVLRAFYRRLLAAGKPKKVALTACMRKLLTILNAMVRTNTTWRHIDPSPFS

SEQ ID NO: 122644 - protein, 350 aa, unidentified
MRFYHIQPQQHYFCGIDLHTQMMYLCVFDQHGAIVLHKNIRTRPEAFLKAIAPFRDGLVVACECIFCWYWLADLCQREEITFVLGHALYMKAIHGGKSKNDKLDAEKIALLLRGGMLPQAYAYPKQKRATRDLLRRRSYLVRMRADLLGHVQLTRHQYNLPAFHKRITYKTNREGISERFSDEVVQRNVSVDLEMIGSFDQQIRPLELYLVSQAKLHDQQAFYLLRSVPGIGKVLALTILYEVEDIRRFKRVQQFCSYARLVKGQKVSAGKRLGTMGAKMGNRHLKWAFSEATVLFLRESEQAKAYLARLEKKHSKGKALSILSAKLGRAVYFMLLRKEPFDIERFFAQA

SEQ ID NO: 122645 - protein, 351 aa, unidentified
MMIIGVDYHPSFQAMAFLMEETGECGEQELNHSDGQAEKFYRDLKQRGMCVRVGLEATGYSRWFERLLAELGFELWIGDPAEIKAKRVKKLKTDRKDAQLLLRLMLENNFPQIWVPSPENRDLRQLLWHRHRLVQMRTRIMNQLQALAMNEGYRWKKKLFSEQGRAQLEKLALAPWASRRRQELLELLDRIHPTIEELTAAVEQEAQKRPEVLRLMTHPGVGPLTALAYVLIIGTPERFHCGKQIGTYVGMIPCEDSSARKQRLGHISKQGNSLLRFLLVEAAQAAARSNPEWRRRYMHLAMRRNKSIAKVAMGRKLGVRLYWMWRNGCAYSPSFEFGSYVGQLGTGHGVK

SEQ ID NO: 122646 - protein, 412 aa, unidentified
MDVLHPRCCGLDVHKSSISACILLREAGRVQKHQRRFGAMTQELQELAEWLRQFGVSQVAMESSGVYWKPVWNILEGQFTVVLANAQHKNVPGRKTDQKDAEWIAQLLQYGLLRPSYVPCEIIRDLRDLTRMRASLSQEASRISSRIQKVLEDANVKLASVATNVLGKSGRAMLEDIISGEDDPEHLASLALGHLRVKIPQLRLALEGKVRSHHRFLLRRLVDQIQFVEHEIGLLDERLEEIAQQRPELSQAVARWDTIPGIDRVAAWALLAEIGDNMAQFPTAGHLASWAALCPGNHESAGKRLRGTTRQGSPWLCRMACQCAWAAARTKNTYLTSQFRRLAARRGKKRAIIAVAHTIIVIGYHLQKNQSNYEDLGGNYFDRIHSDGLKRYLVKRLQQLGHKVTLEPMEAA

SEQ ID NO: 122647 - protein, 489 aa, unidentified
MTVPVTTIDENGGEREYCMRGSCPEPGRIILVVPLSPQRSLTGEPRGTTNCRRHRRWRAREGDSPPKRLPPDLIQEETMQVVYMRCAGLDVHKKTVSACVSVCDAGAGKRQQTRTFGTCTGDLLELADWLREQGVTQVAMEATGVYWRPVWAVLEGQFEQMLVNPQHIKAVPGRKTDTKDCEWIADLLQHGLLKGSFVPPTPIQDLRDLTRYRVELRQSQNRVANRIQKLLEQANVKLASVASNALGVSGLRMLEAIIAGEANAAQLAQMARGKLKSKIPQLEQALEGRVRNHHRFLLAEYLDEWKSLGERIRRIEAEIDQRIRPFESAVALWQTIPGVDRVTACNLVAEIGVDMNQFPNAQHLASWAALCPGNHESAGKRMSGHTRDGNKWLRRSLCQAAWAVTRQKNCYLSAQFHRLAARRGVKRAVMAVAHTMLVIGYHMLKTGQTYHELGAAYLEQINKDQLQRYFVKRLQRLGLNVTVTPAIAA

SEQ ID NO: 122648 - protein, 427 aa, unidentified
MSVTQNEKIRQVTDTTMVIGVDIASEFHWARAFDWRGLELGKAVKFENSAEGFNFFLRWVSELTVEQKKDSVMVGLEPTGHYWFTLAAHLQGGDFKLVLVNPYHVKRSKELDDGHPSKSDKKDPKTIAKLVLEGRYVYPYIPQGLYAELRVAMNCRWRIRKELASLQNQIQRWLKIYFPEHSKVFGRFTGAGSMALLHSAPFPSDLISLGVEGISGIWKQMKLRGIGRKRAQRIYEAAQTSVGCTTGMEAARMELQILLEDYDAKLQQYERVMQVVENLCSQIPAVAELLKIQGLGLVTVAGLFAEIGDIRRFESPRQIQKLAGLAITENSSGKHKGPTEISRRGRSRLRAILFRAAIPLLAKNREFQLLHRYYTTRQNNPLQKIQSVIAICCKLLRVFYALATKGCAYSPEKMLADIQRNQPLKAA

SEQ ID NO: 122649 - protein, 344 aa, unidentified
MKDTNILAIDLAKNIFQVCKRDPKGKVLFNRELSRAKLKEMLVKQPRSLVAMEACGSAQYWARLARALGHEVKVISARTVKPFQTKQKTDRNDALAIAIAASQEHIHGARVQSAEEQALQSLERARHLAKTHQIAQSNQIRGLLGEFGIIVPPSLSQLRKHIPFILEDAENSLPQSFRKTLNYLWQHLLQQIEHVAILERQLEGAVKYDTTCQKLMKLEGVGPIGALGLAVRLGQGENFTNGREASANIGLTPKQHSSGGKERIGHISKRHADKRLRSTLFQGALSVITQVSKRPARTSKECWLQALVERRGKKIAAVAFANKTVRTAYAILKNNTEYQPISLA

SEQ ID NO: 122650 - protein, 410 aa, unidentified
MELLYRRCCGLDVHKETVVACLRIVSDGQVTTEVRTFQTITADLLRLSGWLAENGCTHVAMEATGVYWKPVWHILDDGEFTLLLVNAAHVKNVPGRKTDVNDATWLAELLTHGLLRASFVPDTQTQEMRTLLRTRKQLVREQSSHVLRVQKTLEDANIKLDSVLSDLMGKSGRAMIEALIAGETNPAKLASLANRRIKASPEELREALRGRVTKQHRFLLRLHLNQIDALEAAMATIDAQVEEGLQPFRTAVELITSTPGIKSLSAQVIVSEIGIDMSRFPSAEHLISWACLCPRNDESAGKRRSNRARKGSVWLKTTLIQCAWAAVKKKDSYLQAQFFRITARRGKKKAILAVAASMLTAIYHMLKDGTTYQDLGRNYFDRRSTHQQKKRLVKRLADLGYAVELTPLAA

SEQ ID NO: 122651 - protein, 381 aa, unidentified
MKQDIKTKQNRGNEESLEAPQETCDLGRRRWKVQRVGLTVGLDVGDKISHYCVLNEEAEVVERGKLKTTPAALQPWLEALPAGTRVVLETGTHSSWISRLIEQVGQEALVGQPRKMPQIYASKRKNDRRDAEKLARTGRLDPNSMGPIRHRSAEQQADLAVIQARDALVQVRTQLINTVRGLVKGTGERLRGCSAPSFARQAEAQIPQRLRGALLPLVSQIGSLSEQIERYDAEVEKLAQKKYPETELLRQVSGVGPVTSLAFVLTVGDRWRFRHSRDVGPFLGLVPAQDESGESSPQLGISKAGNPYLRRLLVGSANYILGPFGPDCELRRWGMKRSERGDKNARKRAKVGVARRLAVLLHKLWVSGEVYEPLPEKRAAA

SEQ ID NO: 122652 - protein, 347 aa, unidentified
MAFIGVDLHTNSFTICRLHDDGSEAFETFTLSASALQAFCMSLDADDEIAVEATGNTAWFCDEIRPCVGRIVVVNPRQFQVIRKSVNKTDKNDARSLAFFLSKDMLPETRLKSTAEAELGSLVATRDVFVKQRTMLLNKIHAMFVRRGTKLKKEGLASKKRLRELDVSQFTALEQVELNALRNQALGLTETLAELDKAIEAAGAELPGHEGISSIKGIGSRSAAILLSGIGNIDDFESADKLAAYVGIVLKVSQSNDTDNRGRITKRGNKLMRTTLVQCTLIAIRYSGYLNAFYQRIKERRGAGKAIIATARKLLSIIYDTLKNGWVLEDFAEFKIKQNQCPTGQPS

SEQ ID NO: 122653 - protein, 414 aa, unidentified
MPFSYRVVGIDVHKKMLAVVVSDVAAAGEWEWERRTFGTLDSELRQLAEWLAEREVREAVMESTAQYWMPVWRALETQCQMHLAHAQSNRAPCGRKRDFADAERLVRRLVAGELILSFVPDAQQRLWRTATRARHQLTSERVRLQNQLEALLEDAQIKLSSCVSDLLGLSSRRMIGAIAEGETDPAVLAALAAPGLRATPEQLIDALHGARHMSAVHRQLLGLLLERLQLVDRQREILNQTIAQALLEHSEAVARLTEIPGFGVNSAQQIVAEVGPQAAPFDSAAQLASWAGVCPGRNESAGVSSSDRCPKGNRTMRRVLCEVALAAVKTKGCLFQSLYRRLVTHLGHAKAIWAVAHRLCRLVWKILHQGVRYEERGACPNASVARQRTRRLIRQLQALGYQVQLTPITPEQAS

SEQ ID NO: 122654 - protein, 405 aa, unidentified
MKVYIGIDWSENKHDVCMMHESGEVLLVKQIAHTIAGFRQLDQVRQSLGVDRQEVRIGLETAHNLLVDYLWEQGYEQIYVLPPSTVKSAQKRYRQSGAKDDRWDAHLIANLLRTDQQCYTPWKPDSPLTRQIRAEVRFAQQLGRELVQGQNRLRSILLRYYPAALDAFPHLDSVVGLAFLQIYPTLSQAQALCFEQLKVFLREHHHTQARSWPTIYAGLHADHPQADSTLDAAYAPLAQAQAKILETLLRSRSQCLTRLEKLYSLHPDRQIYDSLPKAGTLLAPALLAKLGDDRDRYPTPAILQAVAGTCPFTKRSGKHSYVLFRQACDRAFRHIAQQWARLTLDVSPWAATYYHTVRPHCRTDNDAIRRLANRWLEIVWRLWVDRKPYDEALHLKQHTRRNQTH

SEQ ID NO: 122655 - protein, 347 aa, unidentified
MRFYTEQHAHYCGIDLHARTMYMCILNQAGAIVVHRNMQTDPDVFLKAIAPYRQDIVVAVECMFTWYWLADLCAQEEIGFVLGHALYMKAIHGGKAKNDKIDAHKIAALLRGGMMPQAYVYPAEMRSTRDLLRRRMHLMRQRAELLGHIQLTNQQYNLPDIGKKIAYRSNREGVAERFADPSAASNVRFDLKRIGFYDGLLNEIELEILRHAKQHDANTLHLLDTIPGVGKILGLVLLYEIHDISRFPTVQDFASYCRLVKSKKESAGKVYGTSGDKIGNAHLKWAFSEAAVGFLRNNPQGQAYLARLEKKHGKAKALTALAHKLARAAYHMLRRKEAFDIKRFVNR

SEQ ID NO: 122656 - protein, 343 aa, unidentified
MNVFIGLDVSLASTAICVLGPQGKVVEELEAASEPEALVRAMTSLPYAVDAIGLEAGPLSQWLSKGIEEAGFDVVLMETRLVKAALKAMPIKTDRRDAQGIARLLQMGWYRPVHRKSVSSQEIRALLTARKSVQQGIINLELSMRGVLRNFGLKLGHVTRIRYEARVRELVEQNEILSASTEALLRARATLRAELAELDATIADLAKQDDVCRLMMTMPGVGRIVALTVKSAIDDPTRFARSKDVGPWVGLTPRRTQSGEMDIVGQITRAGDRALRTALYQAAMILMHRGSPNWLQAWALRVAHRRGSKRALIALARRIGVVLHRMWRDGTPFRHAQSHPATV

SEQ ID NO: 122657 - protein, 316 aa, unidentified
MKRPECIVGIDVCKRTLEVVVRPEGSRWTVNNDEKGIGELAGALRRMKPTMVVLEATGGLEMPLVAALAQAKLPVVVVNPRQVRDFAKATGKLAKTDAIDAAVIAHFGDAVRPEIRPIKDEKAQELSALLARRRQLVDMLTAEKNRLQTARKRIRKDIQAHIAWLEKRLKDVDGDLSKSIKEIPAWRQKDEILQSTPGVGPVLSVTLLAALPELGSLNRREVAHLVGVAPLNRDSGQHQGKRCVWGGREEVRSVLYMSTLSAVRCNPVICAFYKRLMGAGKGHKVAMTACMRKLLVILNTMVKTGAAWRPDYASGT

SEQ ID NO: 122658 - protein, 367 aa, unidentified
MIWTPSTRGGTVGAILDGAKRSNREKESMVKITTIGIDLAKTTLSVHGVDDNGKVVLRKSMSRSKLLEFMANRESCLVGMEACGGAHDLARRLIASGHRARLMAARFVQPYRKSQKNDGNDAEAICEAIARPNMRFVPVKSAEQQALLSVHRIRLELIESRTALINQLRGLLAEFGILMPKGRYQLRAHITPALEHPDLPELGRTVLKELNTRISTLDLEILNQERRIEAYARDNVLAQRLIAICGIGPISASAIVASVGDAKLFKNGRQFCAWLGLVPRQYSTGGKARLGRITKRGDVYLRTLLVHGARAALNVLAKRTDRLSTWTQALIARRGYKKAIVALAAKNARIAWAVLATGKAYNAKSCT

SEQ ID NO: 122659 - protein, 407 aa, unidentified
MQEATQHDAVDVFVGVDVDVGVDVGKGQHHAVALDRNGKRLYNKALPNDEVKLRALIAELKTHRRLLFVVDQPSTIGALPVAVARAEGVLVAYLPGLAMRRIADLHAGEAKTDARDAAIIAEAARSMPHTLRSLRLADEQLAELTMLRGFDDDLAAQVTQTSNRIRGLLTQIHPALERVLGPRLDHPAVLDLLERYPSPSALAAANEKTLANRLTKLAPRLGKNWAAEIVQALNEQAVIVPGTQAAAIVMPRLAQQLAALRKQRDEIAAEVERLVLAHPFWPVLTSMPGVGVRTAARRLTEAAPKAFATAAHLAAYAGLAPVTRRSGSSTRGEHPSRRGNKVLKRALFLSAFAALRDPVSRAYYSRKIQQGKRHNQALIALARRRCDVLFAMLRDGTIYPPKSAPNA

SEQ ID NO: 122660 - protein, 345 aa, unidentified
MKVTKVAERLGIDIGKNVFYLFGVDAQGTPVLRKKLRRGALLEFLAQQPSCLIGMEACGGAHYWAREIRELGHEVRLMAGQFVKPYVKGNKNDYNDAEGICEAVGRSTMRFVSIKTVEQQDVQGFHRMRQAAIKARTALVNQMRSLVAEYGIVFGTGVAQARRRVPEILEDGENRLTDRFRRWLNGLYEQLREWDRCIDEYDQEIDVLFRANERCGRIAEIPGLGPVGATALVGAYGDARQFESARQFSAALGLVPRQHTTGGKPRLLGISKRGDRYIRTLLIHGARSVVCRAMNKTDARSRWIQRLVTERGKNRAAVALANKNARIIWAMLTRGEAYRAPAPAT

SEQ ID NO: 122661 - protein, 349 aa, unidentified
MRFYTKQHRHYCGIDLHARTMYVCILDSAGQVLVHQNLPAKPEAFLEVIAPYREDLVVAVECIFTWYWLADLCAAEGIVFVLGHALYMKAIHGGKAKNDRIDALKIATLLRGGMLPQAYVYPAEMRATRDLLRRRLHIVRKRGELLAHIQMTSHQYNLLPLGKRIAYPSNREGVAEHFEDRVVRKSIEVDLALLERYDALVSDLESYLVRQAKQHDPQAFAFLRSIPGIGKVLGLTILYEIHDVRRFDRVQQFASYARLVKCAKESAGKRHGTSGAKMGNVHLKWAFSEAAVLFVRHSAQGKQLLARLEKRFGKGKALSILAHKLGRAAYYILLRGKAFEIERFVATVN

SEQ ID NO: 122662 - protein, 315 aa, unidentified
MATSSGKFVGIDVSKDRLDVAVLGEKSGWQVDNNETGIQELVEQLQEWDVELIVVEATGGYQRLVAELLFRSGLAVAVVNPSRVRQFARACGLLAKTDKLDAQILAVFGERVQPRLYQGVSAKERELSGWLVRRRQLEEMLKAEKNRLRTMQPSIQGSVQRIISCLQDEKKAVEAQIHAYVTEQGEWQGQRQILESAPGVGPVTTATLLADLPELGKLDGKQIAALVGVAPMNHDSGKKRGYRKTKGGRAAVRSVLYMATLVACRYNPVIKAQYQHLLKRGKEKKVAITACMRKFLVILNAMMRDQQPFRYAPTA

SEQ ID NO: 122663 - protein, 343 aa, unidentified
MQSVTTIGLDIAKSVFQVHGIDAEGNVVVRRQIKRRYVLAFFQRLPPCLVGIEACATAHHWSRELQAIGHSVRLMPPAYVKPYVKRHKNDATDAEAICEAVTRPNMRFVATKTEGQQSCLTLHRTRHLFIRQQTSVINVIRALLAEFGIVAPVGRNGVEQLLAVAADASDQRLPEVARVCVIALGAQLQMLKAQILQFDRMIMAWHRSSEASRRLDDIPGVGPALATALVASIADPKVFRSGRDFSAWIGLVPKQNSSGGKDRLGNISKRGDRYLRSLFTTGALAVIRYAKIHGTKHRPWLTALLARRPTKVAAIALANKIARMAWAIMAKGERYNEPAALAA

SEQ ID NO: 122664 - protein, 435 aa, unidentified
MPTTLAEWRIDMDVMYARVAGLDVHKAMVVATVRIVSDGKVKRECRTYETTTAGLTELLGWLTESRCTPVAMEATGVYWKPVWSILSDGDFELVLANAAHIKNVPGRKTDVNDATWIADLMACGLIKASFVPDEEIQHLRSLQRARKQLTHEQGRHTLRIQKTLEEANIKLDAVISDILGVSGRKMIEAMIAGVRNPAKLAALADRRIKASPKQLYDALHGRLTDHHRFMLELYLGQYDAVEKAIIKIDQEVAAAIERMDGEVEAGKEGPFRSRITLLSTMPGLSALSATTVLAETGTDMSRFATAGHVVAWAGLCPGQNESAGKKKSSRLRKGAPWLKTAMVQAAWSAVKRKDSYYRAQFHRLKARGGTKKAICAVAASMLTAIYHMLKNGVEHHDLGAHHFDQRSTDLKARRLVAQLTKLGFEVALHPLEKAA

SEQ ID NO: 122665 - protein, 349 aa, unidentified
MEVSTIGVDIAKRIFQLHGVDKHGKTLFKKKLMRDQVLTFMANLPKCLVGIEACGGANHWAREITKLGHEVKLMAPQFVKPYVKTNKNDQADAEAICEAVSRPNMRFVPIKSIEQQDILSIHRIRERLVKNRTALSNEIRGLLHEFGFIIPQGINKVTAKLTEILDEGKLSGMSYQTFSELKEEFLDNDKKIKELEKRLKIIANGLDKYQQLTAIPGLGLITATALIASIGNAVNFDNGRQLSAWLGLVPKQHSSGGKDKLLGISKRGDIYLRTLLIQGARAVLNAKLRFTTEAQKTNKDFSKFTDWMFNLSERRGHNRTIVAIANKLARVVYAVLSSGNDYNESKVCS

SEQ ID NO: 122666 - protein, 330 aa, unidentified
MKQYNHFFGVDVSKKTVDITHEHNQQLTHRQFTNDDDGMDQLMEWLNELTPAFENTLFCMEATGLYCFPLTRFLAANSIDIWIEHAAQIKKATALSRGKNDKVDSQRIALYATKNLDRLRLWRPMNATLEKIKHLARLRNRLVETKKKLVTPIKEFEDMGNTAMAKLLTKTIKSSLTAIDKDLQNIESKIIGIVNEDENLNLLYKLVTSVVGIGFVTAINLLVHTNGFTILKDARKLACYCGVAPFEYSSGSSVRGKTKVHFMANKKLKCNLHMASLSAIKLDADLKAYYERKVLEGKHKMSVLNAVKNKLLARVIAVVNKQEEYVKKSA

SEQ ID NO: 122667 - protein, 416 aa, unidentified
MNAAGIDVSSRKSTVAVLRPFGEVVKLPFDVRHSAEDLAALAEQLKSIEGETRVVMEHTGRYYEGIAKVLHEAGLYVSAVNPLLIKEYGNNSLRKVKTDKADAMKIAKYALDNWIELRDYTPMDAIRYDLKTLNRQFQLASKQKTATANNLIALQEQSFPGIRKLFDSPVRSDGTQKWVDFTHDFWHVDCVCGGSQNAFAERYRKWCKRNRYQFSMEKAVEVYALAKSAVVLVQKTSVTKTLVQEAANQLTAISRSVETYRSEMNKLSSQLPEYPVVMEMYGVGESLGPQLMAEIGDVRRFERKQSLVAFAGIDPSPSESGDYCSRSNKTTKRGSPYLRRTLFNIMTVHLQRAPADEPVYQFLDRKRAEGKPYYVYMTAAGNKFLRRYYGKVMAYFSTLKDLPPVDMDSTGLQHAE

SEQ ID NO: 122668 - protein, 366 aa, unidentified
MQFIGVDLHTNKFTCCYRDENSGSEGKGKKETATFELSDYGITQFIQTFTSETYVLVEATITTFAFVRLIQPLVKQVIVANTYELKQISFARKNTYKIDADILCRILKMQVLSGEQTISPVVVPPEEIQELRGLFTTYRLCKKQTTQIKNRIHSVVKEKLYGFTQEQIFGKNSRKKIRALENNTAMSFQINMFFDLLEYYEGQIQCLKDKIKEQAEPYMKEIKILTSMKGIGIFTAIAIIADIIKVDRFKNSKAFASYLRSAPQVASSNTSVSIKGTNKKGRKLAATLVTQSLTHVLKASPKLNKWYTELTKHKKPGLVRTGLRRRVFAEMYQMLKKGEYHYGREVRIHEAKISQYERFLKKGKIF

SEQ ID NO: 122669 - protein, 409 aa, unidentified
MANNARNFLDRTSRGINIGAAQLGDQQMAPTDLVALEQDSTVIAVVELSLSSWLVAGIIPGIDRHPLKKLKADEQALLRLLHRWRDEATKAGRNINRIAVAFEAGRDGFWLARWLQAHGVEAYVIHASSIAFSREHRRAKTDRLDTDHLKRAFIGWLRAEPDHCHMAAIPTLEQEDAKRPTREREKLVGERTRIINQVKSCLARFGVRGFKSKLRKAAERLEALRTPEGVALPPNTLAELRRDLLRLRVIMDQIKAIEVGRLERLKKAPKARPNAMVRLLARVIGIGIETADMLVHEILSRNLRDRRAVARYAGLTGSPDESGKRRREKGLARAGNARVRRGMIQLAWRFLKFQKDSALAQWFQSQTTNARCRTRKTMIVALARKLLIALWRLVTSGEIPIGVALRPAA

SEQ ID NO: 122670 - protein, 359 aa, unidentified
MKRVMAGMDLHGNNVMIGIVDADGTRLRHRRLACDLEEVIAFLNPYKPFLDRVAVESTFNWYWLVDGLKAAGFPVVLANPAKIDQYEGIKHADDKNDAYFLAELLRLGILPTGYIYDPESRPVRDLFRRRMGLMRLRTTLLLSSKSLHHRTTGHSLAVGQLKALSPADLAAFYSHPANRLTAEIQKELIEALNQCIRRIEKMVASEALKKPYYKRLQTLPGIGVILGLVISMEVGEIERFAEPGRFASYCRTVDSNRVSNGKKKGNKYLAWAFVEAAHAARRYDAHCRRWFDRKSAKKGTTIATKALACKLAKAAWHVMAEAVDYDPAKMFPELAAGRIEQISGRQTSASKGVGPEPED

SEQ ID NO: 122671 - protein, 357 aa, unidentified
MTQSNRISFKGQNIYVGIDVHLKSWSVTILSETSVLKRMSQSADPDALHRFLTSHYPEAEYYSVYEAGFCGFWIHDRLTELGIHNIVVNPADVPTMSSEKLRKTDAVDSRKLAVSLRAKQLKGIYTPDSETLEIRSLIRLKNSITKDMTRQKNRIKSQLRYLGIEIPKEYLEPRSNWSKTFLNWLKEVEMKTPSGRQALDILIMQFEYLRTQKAEMTRKLRALSHTERFEETLGLLMTVPGIGQTIGLALMAEIVDITRFANAEQLAAYVGMIPMCHSSGEHEGVGDITLRKHAILRSNIIEAAWVAIRQDESMQLCYLNNCKRMVSSKAIVKVARKLVNRIYFVLKRHQPYVNAVV

SEQ ID NO: 122672 - protein, 429 aa, unidentified
MDLLLERCAGVDIGKDEVVACVRTPGPGGRGRRKETRTFPSFTGELEAMADWFAAEGVTEVVMEATGSYWKPVWYVLEGRSFELKLVNAQHVKILPGRKSDVLDAEWLAELLEHGLLRGSFVPPASIRELRDLTRYRKRLIQAHTSECQRIQKTLEDAGIKLDSVASDVLGVSGRAMLHALVAGERDPEVLAELAKGRLRKKIPELRQALRGRFRDHHALVIRLCLEHTAHLEAATAELDERIDTLFASNTSEARIPFERARDHLDTITGVGKRAAETIIAEIGVDMSRFPTAGHLASWAGMAPGNNITGGKRGSGKTTKGDVWLRDILTQCAWAAARTRDTYLSAQFWRLARRIGKKKAAIAVGHSILVICWHLLTNDCDHDDLGGDYFTRRAHPDNQRDRAIQQLLNLGYHVTLKKTAPPDPQTTHG

SEQ ID NO: 122673 - protein, 411 aa, unidentified
MIKENYVYVGIDLHKETHTAVMIDCYNQKLGEITFPNRPADFPKLVTKVKKCNTDGKEVVYGLENAYGYGRALAVWLIDKGYLVKDVNTAISHRQAKHQGAMYRKSDSDDAEAIALATLNMLDKLPDACPNDAYWSLGQLVHRRDNIMKQRTRLVNQLHEQLCIAYPSYKSFFNDISRPTALYFWEHYPSRKYLRGKSVEDLRKELVPVSHNRCSTKNCEKILDAAASDKVKNNAYQDARDMVTLSIVSDLQHYDSQLAEVDKMLEQMYKMLGCTLTTIPGVNVITAVKILAEIGDIKRFSNANKLAQFAGIAPLHLSSSGKGKDVATKQGNRRLQATIYFLAIQMVQVSSKGTPRNSVVRAYYEKRKAEGKTSQQALICISRRLISVIYGMLKNGTEYRMPVVESAGENR

SEQ ID NO: 122674 - protein, 370 aa, unidentified
MSVRRILAKTIDTDLEYEAIGIDLAKNCVSAALLTTDGEVVCIDRLDYSELEKSAQALSSTTFAMEPCTEMNYLVQKLEAWGHRCLVIGGKNVQNYVENHFSGQKTDLNDAQALAFLAQDTQLRTIKAKDVEQQKYASLTTLREQYIKQYRQTIVSLKGICQAWGLNISKGISGKARLKDLIENHAAFPEELKESLVDMVTHAQTAQKALNKITKTLEELAKNDKLCQLIWTIPGLGLICSCRLRATIGDIKRFKNPKDFPAYYGLVPRSIATGHNEKKGRITHRGDKTMRSLMVQGAGSVINMATRGKLKSKQLTKWILKKQKEKMPWGKLVCAVAAKLLRIVRAVLISSKPYNPQIAGVAKCSLPKGT

SEQ ID NO: 122675 - protein, 405 aa, unidentified
MNIIYERCCGLDVHKKTIVACFRNGKKAELRKFDTLTEDLKELCSWLLENNCQMVAMESTGSYWKPIYNILELNGIEVMVVNAQYIKNVPGRKTDVKDAEWIAQLLQHGLVKASYIPDKEQRELREIVRYRKNLVEERSREINRLEKTLEGANIKLSSFVSSITGKSSRKLLREAMYGQVTADNIDSLIHISMINKKDVLLKAMDGVMSDTQKRLVKAILDHIDDMTRRIDDMSDFINQKMQDHTDEIKRLEEIPGIGKITAETILAEIGVDMNRFPTAMHLASWAGLCPGNNQSAGKRKSSRTNHGNRYLKSMLIQAAKSAVKNKKSFFHAQYQRIVVRRGYNRATVAVAHSMIIAIYHMLKNNTVFKELGVDYYTRFNKEQKARYYIKKLLDLGMPLPVSTAI

SEQ ID NO: 122676 - protein, 340 aa, unidentified
MNIKTVGLDIAKTIFHSVGLDKHGKQVAKKKLRRGQLLAYFANLPLCTIAMEGCSSSYYWQRELTKLGHQVKLLPAQHVKAFVRGNKNDYNDALAIAEASRVPELREVTPKTIEQQSIQALHRLREITVGERTALSNQIRGLLAEFGIIFNQGILNIKKGLPLVLEDATNGLTHTFRDALALRYAHFQQLDKMIEELGKLIKEAASEHKEIELLQTIPGFATLVASSYYSVIGDGRSFAKSRDVAASVGVVPRQHSTGGKNVLLGISKRGDKYLRKMLVNGARSVVNHAHKKDDALNVWITRLVEKRGRNKATIALANKLARIAWAVTVSGKPYQENHMI

SEQ ID NO: 122677 - protein, 299 aa, unidentified
MNLSRIGLDLAKQVFQVHGVDRHEHVVCRRQLKRAQVRDFFRQLPPCLVAMEACGSAHYWARELRELGHTVRLIAPQFVKPYVKGDKHDAHDAEAICEAASRPSMRYVPVKSAEQQAVQSVHRVRSRLVRARTALCTMGELLRELKDELQTLEARIARLERQIQAHVRGDARIQRLLAVDGIGPISASAVAASAGDARQFRTGRQFAAWLGLVPRQHSTGGQQRLGNISKRGDTYLRTLLIHGARAVVRCCANKTDARSRWLQGLLQRRPANVVAVALANKNARILWALLSRETCYRPG

SEQ ID NO: 122678 - protein, 361 aa, unidentified
MAATMTWVGLDVHARSTHAAAIDRESGELVRSRFGPGSESVVTWLAQLPQPIHACYEAGPTGYALYRAATRAGLRIDVVAPSKTPRAPGDRVKTDRKDAELLVRLLLAGSLVPVAVPPPAFEAVRDLARAREQVRADLARLRHRVSKLLLRHGRVYERDGGTWTRAHQRWLAAQRFEHPATELAYLDALAAIDGLLARRQALDERLSRLAHDPALWPTVARLRCFRGIETLTALVLHLEVGDWTRFRRPAQLAAWLGLVPALHQSGESETRGGITKTGSGYARRLLVEAAWHYLREPRIGVALHERQQGQPDHVLQIAWRAQHRLYRLHRSLRGRGKPGNVAVVAVARELACFLWAAAVAE

SEQ ID NO: 122679 - protein, 482 aa, unidentified
MKKNNIYQNQSQQLLSLFEQAGNNAKVMCVPIDYAKKDHVVMFCNGYGDILRKPFSVKNSPQGVDYLTDQVMRSCRQRGISQNHVFFGGEQVGAFADNFVTTLRSRGWLVAGVNAYEAKTQRENLQASTDRLDLMGIAKSLLNRRANCAPAQSGIYLNMRTLVRHRRKLVEITTEVKNRIHSVVDRLFPGFLNESKSGITPFSKSSLWLMKERFSAPQIRRRRRTSLIEALRQRGTKKPEDTADRLQQYASQVLNPPQDHVHMLQLSLAQHVKHFCCLQEGIGQLETEIALNLAQTQGAFLTSVRGIGIVLAAGVSAEIGNPFEQKPLNNLVSYSGIIPRVKQTGGPQGKTKTGKVARRCNRILKDYVVRSASHLGLYGPTDLNSDYQRRQANEQHADFGMGRRYLRMAMCLMRTSQIYLPSRLRKADSHIQDRADYYVMSWPQLRDKWQKSGALQTAFNADQPLGQWRKIVQQFYGIKLTL

SEQ ID NO: 122680 - protein, 317 aa, unidentified
MQEVQVFVGVDVAKAELVIARHGQAGAVAIPNEVQAISTWLCGLPPGACVAMESTGRYHQLLARLAHAVGMQVFVLNARDVHFYAKALGARAKTDRVDAHVIARYVAEQHTRLHRWIPPCPALQQVHSLLGQRWAVVNKRTALRLSLQGCDEEITTQVQVLEAGFAALLKAIDARIVALLEQDVRVRERQRLLQSIVGVGPQSSALLASVLSRVNFVSADALVAYSGLDPRACDSGSSRGRRRLSKRGQPALRHQMYLAAMSACHTSTFKGTYAALRGRGLKTTEALVVLARKLLRIAFAVWRSGQPFDPQRFAPAA

SEQ ID NO: 122681 - protein, 352 aa, unidentified
MYQYFVGLDVHKQVIAYCIKAADGTIVNEGSIKARRFDIDQWVRSIPGPWRGGLEATMFSHWIYRRLAPHAARLELGNPARMKAICSGKKKSDKLDARTLADLLRCDMFPVAYVMPPELEGLRRQLRFRRLVVQETTVFKNRTASLLMETGIEYEKRRLHGKRYFQKLLTDNEFIDSELRPLLQHSRKQIESLEGMHEQILATLTRHPQLKQRVLALSAIPGVGPVTALTWALEVAEPQRFPSIKKAISYAGLCSALRESAGRIQRGPLSKHRNKHLQSALIEAAKIAPIWNPTLRAVHEKAKQKGNANEATIAVARKLVAYLLAADRAFHTTRLSAAKPVGVCSGMADLSK

SEQ ID NO: 122682 - protein, 422 aa, unidentified
MLGVGIDWAEAFHLVALGRPDQGVIELRRVEHTPAAVDQLIAQIAALEPDPAEVRVVIETRHGLLVERLVDAGYVVLPVNPDLIARRRGPARKKDDAEDARIACLLALDRHASLRPLVPHGELAGELRAIARDDERAARDQRRLLNRLRQDLISTFPAALAIAGDNLAAPTMLRLLERWPTRDQLATASRQELVAFARAGRHGWPDRLADKITVALAGDQFTPRDYLVRAKADTIRLTATQLLVIGAQRRAWEQRMAELLVGAPRIGRAKQPREERPGQALPGGKVYLSFPGLGDRLAARVAGEIGDHPQQFGSPNALACYAGKAPVTRRSGKSELVVATRLACNRYLANAVQQWAFCSLRRSTWAREFYDTQRARGKTHHAALRALGNRWLEILWHCLMHGQLYNEALHIANRNRALGRAA

SEQ ID NO: 122683 - protein, 414 aa, unidentified
MEVVHPRCAGVDVSKRDAKVCVRVAGRGPAKTRSTVTTWGSVTNQVLALRDHLIAEQVTLVVMEATSDYWKPFYYLLEDGPFEVMLVNARHVKNLPGRKTDVSDAAWLADLGAHGLVRGSFVPPPPIRQLRDLTRTRTTITRERAREIQRLEKLLEDAGIKLSSVATDISGVSGRAMLAALVAGEREPAVLADLAKRRLRSKIPELTEALTGRFGEHHAFLTRLHLDLIDQHTTAIDELTARIEVVIEPFRRVRDLIVTIPGISTLVADVVIAETGADMTRFPTAGHLASWAGTCPGSNESAGRIKSTATRPGNPYLKGALGIAAMSAARSKGTYLSAKYRRIAARRGPIKAIVAVEHAMLIAMWNMLTTGEHYNDPGDDFYTRLNPDKAKNRALEQLRKMGYAVTLKPSPTAA

SEQ ID NO: 122684 - protein, 447 aa, unidentified
MKQKKPFKKGSIKLPKHLQHLNQHAAGIDVGSRSHFVAVPEGADEKPVQEFSTFTDDLERLAKWLRSCGVTAVAMESTGIYWIPVFELLERHGFEVRLVNARHVKNVPGRKSDVLDCQWLQQLHTYGLLRGAFRPSDQICTLRAYVRQRATLVRSSASHIQRMQKALAQMNVQLHNVVTDITGVTGMGIIKAIIAGERNPKVLAGLRDKRCKNTEETIARSLHGNYRAEHLFSLQQAVELYEFYLLKIADCDQQILEQLKSFDSSDGNDPGSKPPRSIEEALQQMSGADLSSINGINTNTALKIIAEIGTDMNRWKTVKHFTSWLGLCPGSKISGGKILSSATKPVANRAASALRMAALTLFNSKSALGAYLRRQRSRLGAPKAITATAHKLARLIYSMLKHGTDFVDAGQEQYEERYRSRVVQNMKRRAQEMGFKLVSLQDEPQTV

SEQ ID NO: 122685 - protein, 383 aa, unidentified
MACVMGGDGAVTGRFSFSHDAVAIKAMVRRLRSAGVAGVAIERGDGPVVEELLAAGLAVFVVPSRQIKALRSRYGPAGNKDDRFGAYVLADTLRAGGHRWKPLRPGTEPTRALRALCRSRKDLAGTRVQVLAQLRANLELAFPGAIGLFSKPASAISLAFLRRFPTAARAAWLSPARLAGWLRSAGYTGGVTAGVLHGRLASAAPGLTGAEGDARGQITLAFVVMVSALNEQISALDAEIGRLFSAHPDQHIFASLPRSGTIRAASLLAEIGDCRQRFPTDDALAALAGACPSTRQSGKRSQAVFRWSCSKKLRAAVMDFANGSRMSDPWAAGIYAAATGRGCRHPHAIRILARAWLRIIWRCWQDGTAFDPAHHRSRNAPAT

SEQ ID NO: 122686 - protein, 361 aa, unidentified
MNKNRTFAGLDVHARSVTGHAMDEWTGEVWQRLLPADPVEVSRWLESLPQPVKATYEAGPTGYGLARFLSSRGITCSVAAPSKLQRPVGSRIKTDARDAEQLWRLLRLGEIVEVALPDVQQEAARDLVRAREDVRSDLMRVRHRVTHLLLRQGIVYGGGKSWTAAHQRWLQTQRFDAPARQLVFEDAVEAVVLMTDRRDRLDKAIEAMAADSNYTLLVRRLCCLRGISTLTGFGLAVEIGDWRRFTGSSIGAFLGLVPTEDSSGQSRSQGSITKAGNTHVRRLLVEAAWQHRRSYRSPSKIIRERWELAPSAARIRGHQGNRRLHQRWRYFQARKKKNTIAAVAVARELAGWAWSLAIMDD

SEQ ID NO: 122687 - protein, 341 aa, unidentified
MKQLLRKNYLGIDVSKPWFDVSLMVVIDHVKKPIVTERFDNNSAGLKLFKAWLKAASVTLDEKSLLVIENTGVYHRQLWSFCSKHNLPIHIGNAAHIKWSLGITRGKSDVIDSVRLCQYCCKQSDELKATPALNPVFMRLKDLMTSRTRLVTQLHSTRNYIKELQCGNDKLLMATLAKAHKAALEGIKKSILQIEELIDQIIQEDSVIYKNYLLIKSVPGIGHLTAIYIICCTNNFAAKVTGKQLASYAGVVPFEHSSGISIKGRNRVHKMANKDLKKMLHLCALTAIKYYPEFRQYFDRKKAEGKNGMLVLNAIRNKLVLRVVSVVNKQQPYVDNMKTAA

SEQ ID NO: 122688 - protein, 422 aa, unidentified
MNTERIDSDEIAAFVGIDWADGEHEVCLMVAAGGPPERSCLKQSPEALSEWAHALRDRFGGRKIAVAIEQRKGPLIYALMSYEWLVLYPVNPKSLARYREAFSVSNAKCDQTDAELLMEMVRSHRDRLRVWLPEDEDTRLLQMLVEERRRVVDQVTRLTNRLTSVLKEYYPQALEWAGELKSEQALDFLSKWPTLEDLKRARPATVERFYHQHGVRNKEKLQGRLAGIGAAKHLTRDRAVVRASTMKMRVTVEQLRVLLKATHEFDVQIEELFEQHPDASLFKSFPCAGKVLAPRLASAFGTDRQRWDDAAEVQKFSGIAPVTRASGQTRVVEKRRACPKFLRQTFMEYAAQSVKKSLWARCYYTAMRAKGVKHRAALRALAYKWIRIMFRCWKERIAYSEEAHQAALVRANSPLASRLAGS

SEQ ID NO: 122689 - protein, 480 aa, unidentified
MADKTNQEASRGKRLTRKQRKDLGRQIWSASPGLEVVHRDAAGIDIGSREHYVAVGPDRDAEPVRSFGCFTVDLGRMAAWLAACGIRTVVLQSTGVYWIPVYDVLEQNGFEVWLVNARETRNLPGRKSDVQESQWLLKLHTYGLLRQAFRPPAEIRALRSCWRERAEYVQLAGACVQRMQKALTEMNVQLATVLSDLSGVTGLQIIRAIVDGERDGHTLARFRDPHVKASPETIAKSLQGTWWPEQLAILRRQLADWDHLQKQMANCDQDLAALLKALPTAPPAPPAPAAAPGSPRTGKRRRKKASKNQPAFDMAGEFKRITGVDLTRIDGIQPMTIQTVISEAGLDMSRWPTEHHFVSWIGLAPRNDISGGKVLKKKTRKVVSRLATALRMAASSLRDSQSYLGAQFRRLRSRLGAPKAITAMAAKHARLVYRMLKYGQEYVDHGMLHYEQKHQQQKLQYITKQAAQHGFALVPLAIPL

SEQ ID NO: 122690 - protein, 395 aa, unidentified
MKKITMTPRIQTIGIDLGDKTHRVCMLDAAGQVVLEGSVTNTKTALERMFSTLPKALIALEAGTHSPWIAPALQSWGHEVLVANPRKVKAISASQNKTDRNDARLLARLARADRELLSPIRHRAAGTQADLALLKARHALVKARTGLINHCRGIVKSLGGHLPSSSAESFHKLGDAVPPELRQALEPLMRAIGETTTKIRQFERKIEALAEEKYPASERLRAPGGVGLLTALAFMLVVEDPARFDKSRQVGAYVGLAPAKDQSGTVDKQLHITKAGDGLLRALLVQCAQTILRRNAKPCELKRWGLKLAERGGKAAKKRAVVAVARRLAVQMHRLWASGETYDPFYATKRREAAEATKKQSPERKTKTMNKAKPARVRRAKPAARARAGAVGPTG

SEQ ID NO: 122691 - protein, 339 aa, unidentified
MKKRYMGVDLHRNCFTVFTRLEDGSGASQEWSIGSLKAFSKTVKGKDEVAVEATGNVRFFCEALKGRGCRIVVVNPHQFQVISRSVKKTDEHDAKVLAEFLSKGMLPEVRMKDEVHARVASLAQTRDKLVKLRTTLKNKVNNLLAARGILIRKESLSSEKGLAEVLASPVSELELMELEILVGEIRHLNDSIKKLEELLREQGRNLPGWENVTSIKGIGDTGGSILLSTIGNIEDFADEGKLAAYFGIVPRVSNSNETERSGRITKRGCKLGRTALVQCALIAARYSPYLKKYYRRIAATRGTGKAIIALARKFLGIIYNTLKNNWIFEDFPRFVLANG

SEQ ID NO: 122692 - protein, 350 aa, unidentified
MVVVGADVHKRTHTFVAVDEVGRKLAEKVVVATSAGHAEAVMWARERFGAQLVWAIEDCRHLSARLERDLLTAGQHVVRVPPKLMAQTRASARTRGKSDPIDALAVARAFLREPDLPVASHDEVSRELKLLVDRREVLVAQRTATINRLRWRIHELDPERAPKPASLDRAKHRAALGAWLDTVAGLVAELARDELAEVTRLTETINALAKRIGDRVRQVAPVLLTLPGCGELTAAKLVGETAGVTRFNSEAAFARHAGVAPIPVWSGNTAGRVRMTRSGNRQLNAALHRIAVTQIRLDGLGQAYYRKRLTAGASRTEALRCLKRRLTRVVFHHLHTDQQQRQTACQPTAA

SEQ ID NO: 122693 - protein, 351 aa, unidentified
MHYIGVDYHKKYSYVVVKDREGKVERRGKVDNTKEEFRQLLKPYQAGKAVVEATRNWGLVYDWLEEILDDVALAHPLKVRAIAEARIKTDKISADILCDLLRSNLLPEAYVPNKGTREAKNILRQRMFFVRVQTMVKNRIYTILDRHPEILSQAPDVSDLFGASGMMWLRQAVLPGQDNRLLTSELELLEILKRKISESNGIVRELARGDKKVKLLRSIPGLGPFFSVLVAKEIDDISRFRDEKKLCAYAGLVPSTYASGGKVFHGRITKTGNKWLRWAFIEAVQPAISCDADLFAYYQRLKMRKDANAAKTATARRLLIIVYRVLSQERFYERRNRRLIRPLVPAALVAS

SEQ ID NO: 122694 - protein, 442 aa, unidentified
MEELREDHDDGTVTRVAAIDIAKASGMVCLRVPHDTIEGRRVQKVWTVASTTNTILELGDRLVCQGVERVVMEATGSYWRPFFYLLEARGLDCWLVNARDVKNVPGRPKTDKLDAVWLAKLAERGMVRASFVPPKPVRQLRDYTRTRTVFVQERTRHKHRVDKGLQDAQIKLSDVVSDLFGMSGRAMLDALVAGERNPRTLADLAKGTLVKKKPALIEALTGQFEDHHARLLRVLLGTVDHLTAQIGELDRLIARTLEEITTPPDSSGTGSEPATTVSARALAEKLDAVPGIGPATAQIILAEIGADMSRFPTPEHLVSWAKLCPRTIQSGAKHTAGPAGQGNPWLKGALGEAVNAAARTDTFLGARYRRIVKRRGHAKALVAVARSILVIAWHLINDPDASYQELGADWHRRHLDPARKTRDLVRQLQALGHQVAITPASA

SEQ ID NO: 122695 - protein, 350 aa, unidentified
MIIGVDYHPSFQTIAFCVEETGECGEQELSHSDGQAEKFYRELKQRGVRARVGMEATGYSRWFERLLAELGFELWIGDPAEIQAKRVKKQKTDRNDARLLRRLMLENNFPQIWVPSPENRDLRQLLWHRHRLVQMRTRIMNQLQALAMNEGHRWKKKLFSEQGRAQLEKLALAPWASRRRQELLELLDRLNPTIEELTAAVEREARKRPEVLRLMTHPGVGALTALAYVLIIGTPTRFQRGKQIGTYVGMIPSEDSSGGKQRLGHISKQGSSLLRFLLVEAAQAAARVHPDWRRRYSHLAIRRHKSIAKVAMGRRLAVRLYWMWRNGCEYSQSLEFGSHAGQLGTGHGVN

SEQ ID NO: 122696 - protein, 429 aa, unidentified
MPQRRKKSRKIKSPKGLPKHLRHININAAGIDVGSDRHVVAVPEGRDAVSVREFGTFTADLQAIGDWLEKCGVTTVAMESTGVYWIPLFEVLEQRGFEVKLVDARHVKNVSGRKSDVLDCQWIQQLHTYGLLAGAYRPPDEICTLRGYMRQREMLVQAASMHVQHMQKALQQMNVLLHNVVSDITGLTGMTLLKAIIAGERDPKRLAENRHENCRNSKETIAKSLEGNYREEHLFALKQALELYEIYQCKIAECEKAIVAQLAKQPDVTDDERPDGGKRVPTRECIRGDMDVREKMFKLTGVDLFSIPGLGADTLLTLTSEVGVDMKPWKTVKHFTSWLSLCPGTKISGGKVLSKRTKRNANRAAQAFRMAAASLARSQNALGAFYRRVRSRSTAIQAVTATAHKIARIYYAMLTTRKPYVEAGLHAYE

SEQ ID NO: 122697 - protein, 355 aa, unidentified
MNATTVAVDLAKNVFALAVADGNWKIVECARLTRAQFERWFDNRRVDLVVMEACGSAHHWARVLRARGIEVRLLPAKYVRAYVKRDKTDATDARALLEAARASDIKPVAVKSIEQQALQALHRTRSGWMSTRTRRINTLRGFCREFGLVVPEGAATGLACMARYLADEHSRLPELLRPSMRLMIEEIRLTEARIGQLEQALSQLAKHSPACHWLQSVPGIGLLTSTAMVAAVSDPKSFASGRCYSSFFGLTPREFSSGNSRYLGRISKRGDRYIRMLLTHGARSVLRAATVARRTGRPLDRLRTWALQVQQRTNHNKAACALANKLARIAWAVWVKQENYQATRVPSRSAEALGV

SEQ ID NO: 122698 - protein, 350 aa, unidentified
MNVNHYIGFDVHKKSINYCVKMADGQIVEEGRLRATHDALRRWAGRRQEPWRGAMEATLFSGWIYDTLKPFAAELQMGHPAMMKAIGASKKKNDKIDSRKIADLVRCNLLPACYVAPAEMRELRRLLRYRNVVVAQGVRMKNKMSGLLMEVGAEYNKQQLHGKKYFTELMGNLEEVPESVKDLLRLSRGALEMFEATQRQLLDRLRKEPRLVERVAVLESIRGVGEVTALTWALEICDPQRFRSIADAESYCGLTSALDCSADKQHRGPISKQRNGHLQTVLIEAAKLAPRWNPQLAQVHERELERGNRNRATLAVARKLVAYLLAVDKSGQPFRIRNQPAPTTEVATAA

SEQ ID NO: 122699 - protein, 339 aa, unidentified
MRLYAAFDLHSSNSYLGISDEKGKRIFKKKLPNDSATIKETLRPFKADIEGIVVESTYNWYFLVDLLREEGYRVHLANVMKTQQYSGLKYSDDKNDAFWLVEMLRLGILPEGYIYPKEERPIRDLLRKRGHLVRLRTSLIVSLQNIIARNLGSRLKANDVKVLTTDRVSPLFQGNEDLALAGKVSKEAIDFMTRQIKTIEATIDGRIHLSNPYNRLLSMPGVGKILAFTIQLETGSIDRFQKVGNYVSYCRKVPSGRFSNDKKKGTGNRKNGNKYLAWAFSEASDHARFFDAESRKYYQRKLQKTNAPIAHNALAHKLARAAYYIMRDGVIFMPDKAFA

SEQ ID NO: 122700 - protein, 387 aa, unidentified
MTGQAQVSRFIPDEYDIFAGLDVDKRSIAMTFSDHKTLIKSQRLPYSSEQLLNYVRKHFPGQRVAFVYEAGPTAFGLHDDLTANHHTCLVVAPSMVPTAPGQRVKTNRIDSKKLSLGLRGGELRSIHVPSRSYRELRHLVQLRDTQVQQLKATKLRIKALLLCEGIPFPEAPPSSQWSARVVAELRVLPCTSEVRFKLDHLIGTLYFHFNSAAVVQKRIRRFCQNDPELRQSISLLKSLPGIGWIVAAHTVARLGDWREIENVRSIAGFLGLVSSEHSTGEKVNRGSITRSGDSRLRNKLIQSAWVAIAKDPELRAFYRGVFERQPKKVAARKAIVAVARKLTTRMYAVLKQQRPYVIRPDISSAPLTIEETVGPRERLDSAQSDQP

SEQ ID NO: 122701 - protein, 328 aa, unidentified
MIEAWVGVDVSKDSLDVAVRPSDEAWSEQNNQAGIKALTRRLKKLAPQRIVLEATGGYEYELALQLGKAGLPVAVVNPRQVRDFARAVGRLAKTDPIDAKILSHFAEAVKPPCRLVKNPKLDGLDQLVTRHRQLVEMIVAERNRRMSLRGDAQNDIDVTIRFLKGRLKQVDERLKALIDKDPEWNRRAELLNSVPGVGPVLISSLIAELPELGTINRKQIASLVGVAPFNNDSGKSKGRRHIWGGRAHLRALLYMAVIAGLRFNATVRCFYQHLRQAGKPAKVALVACMRKLLVQLNAMAKSAQTWNAHLPIPGVLASAELNLAKLPA

SEQ ID NO: 122702 - protein, 391 aa, unidentified
MLAFLGNVLRNVVSVFLLPTNYTNPNREDAMGVYNICFGKEMTGSELFVGIDVHKTSWHITAVDQEQETITSFSQPAGIDVLIARLEKAREVGIHVNCVYESGYFGYKLQRTLESAGFPCIVTPPNMIPVQVGKKVKTDRLDSRKLAVFHCKGLLEKVWVPSKEMHDHRALQRARDEVQKAKKALMVQIKAKYSEYGIAFPESHHWTKKLIASLAAMPLGSDSLEMVRDRQIMRLRGLMEDVAFYDAKIKKLSGHHFYQETVSRLLTIPGVGMITAMRLMLEIGGYHRFHSGDRLASYSGLTPSQYSSGDTVRMGHISRCGRPQIREILIEAAWVLTGRDAGMKQFFERIALRRDRKRAIVAVARKLLTIMWSMATKGTNFLPRQVHPIST

SEQ ID NO: 122703 - protein, 381 aa, unidentified
MIENAIWVGMDVHKKSISVAIVATGEDAVERLTVPNNASSVHRLVKRLRAYQKPLKSCYEAGPCGFVLQRKLRQADIKCAVIAPTLIPVQKGNRVKTDKRDALKLAKLLRAGLLTEVHVPTEAEESVRDLYRCREDAKEDQTRARHRLLKFMLRRGVVYSAGKRCWTGCHYQWLRQLRFDDRNAQRVFDDYMAVLEQQDARLTALDDELEKVASSQPYQEPAGWLRCFRGIDTTSAIGLLSELGDIARFGSARGLMGYVGQVPSENSSGEKIHRGGITKTGNRRLRRLLIESSQHCRLRPAVKGEVLKRRRGQPPWAIAIADRAMRRLHQRYWHLVMKGKPHNVAITAVSREFVGFIWEVLVEGRQRAALRDGQPPTETFC

SEQ ID NO: 122704 - protein, 318 aa, unidentified
MMSHDLWFVGIDVSKDTLDLAFVRGEEEMTCQVANSPTGWAELVAVCKKRCVDRIVLEATGAYERRAVAELLAAALPVVVINPRQARDFVKATGRLAKTDRLDALGLARFAEAIRPPIRPMPDEKTAELQEKLARHRQLVHMHTAESNRLAQAYSKPVRRSIEAVVKIIEQQLEAIDQDIDQRIEECPAWQDKDRILQSVPGIGRHTARTLLCSLPELGQCSRQQIAFLVGVAPLNRDSGKMRGMRSIYGGRGQVRQALYMATLAATRFNPLIREHYQHLLGLGKRKKVAIVAYMRKLLCIVNAMLREHETWNSKASP

SEQ ID NO: 122705 - protein, 338 aa, unidentified
MFYTGIDQHRLRSTLTTFAATGERVGEATVVNDRAVLIRYFAQFPGPHQAVVEATGRWYWLRDLLMPRGIDLHLAHAKFLKAIAYAKVKTDAVDAATLGHLLRTDLIPDAHMISDALRGPRDVLRARLRMVTRRTSAKNSLDRLLEKWNVPCVADLPPLYQVQAAAQTALITVLTEQIHALEVAVRPQLLDSPAVQRLLWIPGIGRQTAFSIFLEVDDIHRFPTVRQFWSYCRLVPGAADSAEQRRHRRSKDGNRYLKLAFSHATVRAIQYFPEVRHWYQRWKRKKPVRIARALVAKELAQSVFHVLKDDVDFNQQFKGTPLTRQKQARWPRRASPPA

SEQ ID NO: 122706 - protein, 347 aa, unidentified
MVTLGADAHKRSHSLVAVDDIGRKLGAHTVAATSTGHLEALRWARRWRPRRWAVEDCRHVTRSLEKDLLRAGEVVVRVPPHVAAEGRRSLRERGKSDPIDALAVARTALREGDMPEAHLDDHCREVKLLLDHREDLVGERTRIQNRLQWLLHELEPEFQVASGALSRRPAIKRVEALLEGRHGVVAELARELTVRTAELSSRIDELEQQLAAMMPALAPSLLALPGCGVLTAAKLLGETADVRRFRSRAAFAMHNGTAPIPASSGKQQRHRLNRGGNRQLNAALHRIAVSQIRRAGRSHDYFQRRLAAGNTKREAYRALRRRLSDEVFRLMLTDQQTDASGVQAPAA

SEQ ID NO: 122707 - protein, 405 aa, unidentified
MTIEAMLAGASTARQDVTLYASVELGSTGWLLTSRSSTQNKMQRTRVRTNDWQGVIEELERQQKARQAGRIVCGYEAGREGFWPYRALRGAGIEVGVIDPSSLAVSQRGRRTKTDRTDGIIELEAIEGLDSGRRTAARLVVVPTEEQEDARQPSRTRQRLVKDRTALIAYIKSALARVGADLPAANQPGWLERLAEVRQWNGQPLPRHLRHDIELAHERLQLVCRQIAALEADQKAAARAQDKSGKRRQPKSRQAAQAWQAEASPAEQVVAEKAERLNRLVGIGLVIAFVLAGEVYWRDFVNRRQVGGYLGLGGAEHSSGAQQRELGISKAGNRRARAMLVELAWLWIVHQPDSALTQWFMSRAPKGASARQRRIAIVALARKLAVALWHYLEDGIVPEGARLKG

SEQ ID NO: 122708 - protein, 409 aa, unidentified
MERIVERAAGLDVHKDVIVAEVHLAGGRADQGRFLTTTPGLVVLRDWLLARGVTRVGMESTGVYWKAPYYMLEDAMQVWLLNARHMRNIPGRKTDVADASWICQLIEFGLVRPSFVPPAPIRELRNLTRYRKAQIEERTREAQRLDKILQDAGVKLSSVASDILGVSGRAMLAGLVSGTTDAEVLADLALGQMRHKIPALRAALTSRFSTHHAVIVSAILAKLEFLDELIAGLTTEIEVVIGPFSHQVELLDTIPGVSLRTAQGLLAEIGADMAVFNTASRLASWAGVCPGHHESAGRARSGKTRKGPKWLGIYLHDAAMATIRTKNTYLGAQYNRLRPRLGHAKALVAVEHSILVAIFHMLDRDQPYHDLGADYFARRNDPARRARRLISQLETLGYSVHAEPPPTAA

SEQ ID NO: 122709 - protein, 315 aa, unidentified
MSDTFVGVDIAKAEFVVACRPEGVGWTATNDAEGIAGTVARLRTLTPALIVVEATGGYERALVAAVAAAGLPLVVANPRQVRDFAKATGPLAKTDRLDANILALFADRVPPTPRPLLAPVLQQLDARMTRRRQLLDMLTAERNRLEHAAVPIRRNLADHIRWLERRVADVDRDLDRTIESSPIWRAKENLLRSVPGIGPVVSRTLLADLPELGRLNRKQIAALVGVAPLARDSGTLRGKRMVWGGRAPVRAVLYMGALVATRRNPVISAFYRRLLAAGKPKKLALTACMRKLLTILNAMMRTNTTWRQIAQPENA

SEQ ID NO: 122710 - protein, 355 aa, unidentified
MKQFIGCDAHRRYSVFVAREESGKTNRPVRVVHDGFALKAYLQGLPAGSEIAVESTSNWSWLIDAMEAAGHVPHLVHSYRARKRMPSPNRTDERDAEALANLLYDGTIGEVETWIPSGPLRDLRSLMRTRLAFVALRTKLKNRVLAAVNRHGLRADELSDLFVGKGRVQLSVYVGSLPPETRQAATLEWQMIDELRKQIEQLEERLQERLGRLGWVRLLKSLPGVGDVLGATIWLEVGDVTRFPSAAHLASYAGLVPTVRSSGGRSRPGGVSRQANHYLKWAFVEAANAIVCHQKKLAGEHVMRIYRRLKQKKCHGIAAVAVARHLAEATWWILKRKQPYRAPQVSAAKASSPHG

SEQ ID NO: 122711 - protein, 438 aa, unidentified
MAGPHAGGAMTEEKTMDMLHERVAGLDVHKNTVVGCVRQHVGGETRRECRTFATTTEGLLALGAWLEESRCTHVAMEATGVYWMPVWKILCGGDFELIVANAAHIKNVPGRKTDINDAMWIADLQACGLIKASFVPPEEMQELRSLTRTRKQLVREQTRHAQRIQKTLAEANIRLDSVLSDIMGASGRRIIQAMIDGVHQPRKLAELASNRIKASPKELYDALHGRLTDHHRFLLDLHLRQWDGIDAAIRKIDLEINQRITRMDAQVEPDTPPFRDLMDLLNTAPGVSTVAAPSILSEIGRDMSRFPTAGHLVSWVGLCPGHNESAGKRKSSRLRKGAPWLKTMLVQCAWAAKRKKGSYYRAQFFRIQSKRGPQKAICAVAASLLTAIYHMLKYGIPHHDLGADHFDRRPPELKAKRLVAQLAKLGFAVQLQPAAQVA

SEQ ID NO: 122712 - protein, 360 aa, unidentified
MRHSTSIGIDAHAKTNSVCALVHDTGEVREARLSSDPAELVAWIRAQRLPEPLRCVYEAGPTGFVLARALEEAGILCDVAATSKLPKRSDRVKNDRVDAEWLARMLESGAVRAVRVPSEREESLRHLSHLRGQLASRLREAKQRTSSLLLLTGTRYTLTRKMWTKAFRKWAKGSPMAQAADNFALEALVGEVEHLESALAGVQAELERLVAADAALAAAAARLRCLPGVGPVTSVALVAEVGDLSRFRDGAAFASFLGLCPSERSSGQKVSRGGVAKTGSSHLRRLVVEAACAYEREGRGETGPAGDAAPEPARACAARAARRLRRRYLDLRAAGKPACKARCAVARELACWMYHVASAA

SEQ ID NO: 122713 - protein, 310 aa, unidentified
MMASLDVFVGIDVSKDRLDVHVRPLGVGFSVSNETTGHAALIARLRPLRAKRIVLEATGGYERALWLALSEAGLVAAVVNPRHVREFARAAGRLAKTDRLDAAVIAHFAETFVPRPGKPDAVADRLGEHVRYRRSLQEEIVALEHQRRRLETPALRERAERRHAALRAEVKEIEREMRAIVDGDPGKKALFACLTALKGVGLVLACTLIANMRELGTLTRHQAAALIGVAPLNHDSGVRRGYRAIAGGRRRVRNVLYVATLSAVRSNPVIREFYRRLSADGKPAKVALVACMRKMLVMLNGRVRDHLATA

SEQ ID NO: 122714 - protein, 508 aa, unidentified
MKILYRRCAALDVHKKTVCACIRKSCGKGPIEIERETFGTYSCDLDRLGEWLTEHKVRRVAMESTGVYWIPVWNVLEATRFRLELMLVNPATVKALPGCKTDPKDAARIAELHQYGLLRGSFVPPRWIRQLRDLVRRRTHLQQDRNRITNRLAALLETANVKLGSVASDITGVSGRRMLYAISEGESDAVRLAGLALGRLQDKQGDLVKALQGRFSGHFRAQLRDLLEDLQYTEKKVERVEQEIRRQMEPHADLIARLCTIPGVDQVAAWTIVAEIGVDMSVFPTAAHVGSWAGLCPGNDESAGKRRSGRTRKGNRYLRRMLVQCAWAVTHSQEGFLYSLFLRIARRRGMKKAALAVAHRILVIAYHIIGDGVTYRELGQDHADRQHPLRTTRRLVERLANLGFDVELRPKAPESSAPAAASGLPAVRRGRPPGSRNRRPYVRSRVSCPRCDKRGIPCIHGGKPVLPERPANPDPGCPKCKAWGIPCIHARNQLRCPSGGDSSDLSGA

SEQ ID NO: 122715 - protein, 379 aa, unidentified
MQYIGLDLHSTSFNLAVLDEHSEVLWEQASRTSGENLIRLVSTLAGDKTVALEESTLADWAFRLLSPYATVIVADPRHNRWIAGDEKIDDAAAARKLAELLRAGLLKPVHHSQSLERQEFKELVQAYHDHSKQVTRFRNKLKAKFRRRNVSCPGSKVLALDARDEWLEKLSGEGARFQARLLLETLDHLQLQQEALERKLAGLAKQFVQVKRFRAVPGIGPIRAATFFAFIDTPHRFATKSKLWTYCNLGIAKQSSGQTSGPEHLTRFGNRALKNALKGAALSAIRARDNAFADKYHRQVAEGMAPELALLNVARAIASALWTMWLRDEEYQPHRPVAPQWQRADHRSTHDTATTTATASVSETAKTTATTGAAMTPSA

SEQ ID NO: 122716 - protein, 391 aa, unidentified
MERPMQKLNDLSRSRSALVQDSTIIAVVEMSLASWLVAAIVPGVERHPLKKLEPDQDGLLRLLHRWQDEAVQAGRTITRIAVAFEAGRDGFWLARWLRARGIEAYVIHPTSIAVSREHRRAKTDRLDTALLKRAFLGWLRGEPDHCSMAAIPALADEDAKRPSRERENLVNERTRLGNRMKATLARFGIRSFRPTLRTAPEQFEALRTPEGVPLPPNTLAEMRRDLARLQVVREQIKEIEQARLERLDRAPGERHNTMVRLLARVIGVGVETADLLVNEILSRDLRDRRAVARYAGLTGAPDESGAKRREKGLARVGNARVRRSMLQLAWRFLRFQADSDLARWYRARTADGRGATRKTLIVALARKLLIALWRLATTGDLSQGIILRPAA

SEQ ID NO: 122717 - protein, 480 aa, unidentified
MNVKTRKAKKQVNLKHQSINLLSQEELNKKIEVIAKELKSYTWRELETNGKFSKNDKISFITDDMLIVGCDIGSEFHYIRAIDVRGRELSHGAYEFSNTVEGFGSAKAWVLELAAKNDKKQIILGLEPTGHYWFALATWMISNGINVVQVNPYAVKQSKEIEDNSQLKDDRKDPKLIANLVKDGNYGMPYLPEKIYADMRRLSMFRDQITEDRIRNINRLHRELKIYFPEYMDAFGKIDGAFTLEVLKVSAIPSDIKSLGEEGIKNIWRDAKLRGRGYSRASVIVSYADKSVGLKEGADVGREALKWYAEQILKLDEQLVAIESALHNKCREIPYAENILSISGVGESILSGILAEIGDISRFDDVKEIQKISGMSIVSCSSGKHKGKTKISYRGRKRLRYWLFQAAKSAVSHADEFKQLHEYYITRSNNPLKKMQSLIVIACKILRVIYSILKTGTSYDPQKMLKDIKRTVETQSVLVA

SEQ ID NO: 122718 - protein, 466 aa, unidentified
MKGKKKTDPNADRKKERLSKHLEQVNLYAAGIDIGSQMHYVAVPEGLDTEPVRSFPCFTGDLKKMAAWLVEIGIATVAMESTGIYWIPAYEILEEYGLEVLLVNARNVKNVSGRKSDVLDCQWLQRLHTYGLLQGAFRPPEHITSLRAYMRQRDTLIRYASSHIQHMQKALRQMNLLLDNVVSDITGKTGMTIIRAILAGERNPDKLAVHRDGRCKKSEKEISESLHGHYRDEYILSLRQSLHLYETYQEQIGECDLAIEKLLDTFESNGDSNSLPPSKDRKSASAPSFNAREELFRITGVDLTRIPGISEVTALKVISEIGTDMSRWKSAKHFASWLGLSPGTNVSGGKVLSKKTKRTANRASSALRMAAFAVTNSKSAIGAYHRRMRARHGSPKAITATAHKLARLIYSMLKNGTEYVDQGQDYYEREYKDRVLKNLKRRVAEMGFKMVPAQNQENVSLDGTTC

SEQ ID NO: 122719 - protein, 377 aa, unidentified
MIAAVRSEVSVNDPVLYVAFEIGKKEWKLAMTSGFDRQPWLRTIASGDLDAVERAMRSGRQRFGLPPTAPVVSCYEAGRDGFWIHRALRALGVENRVVDSASIEVNRRARRTKTDRIDALKLVMMLVRACCGEARVFAEVRVPSAEAEAARHQSRERTALVQEQTRLRNQIGSWLATCGCRVTARTRQQAAWWTGARDWANAPLPPPVQARIARAAARLAVVAEQIATIAASQTTTVQQADPQSALARLVQLKGVATTSASVLLDEGVVWRAFQNRRQIGGLLGFAPAKYDSGESERDQGISRAGNKRLQSVMVQLAWGWLHWQRQSALTRWYRERFGRGKRARRVGIVALARKLLIALWRYATAGVLPAGAVLKGA

SEQ ID NO: 122720 - protein, 452 aa, unidentified
MVKKKKSGRKKAIKYLHVLQPNSAGIDIGATEIYIAVPEDRSSKPVRRFDTFTDDLHDAAKWLKECGIESIAMESTGVYWIPIFQILDIYGFEVILVNARHVKNVPGRKTDVIDCQWLQYLHSVGLLRGSFRPAQDICAVRSLLRHRNNLVKAASSHIQHLQKSLTQMNLQIHNVISDITGVTGLAIIDAILSGERNPKILAELRDPRIKADKKTIVKSLTGDFRSEHVFTLKQTLQSYRNYRQLIQDCDGEIENHLNEFESSIDLDDSPPIPPSTPKRKPKGNELNFDLRKHMYRLLGTDLTQIDGISNLTAHVIFTEIGPDLSKFKNVKHFCSWLGLCPNNKISGGKILSSHTRPGSNRAAQALRISANSLWNSKSYLGNYFRRMRSRHGAPKAITATAHKLARVIYHLVKNQKLFDDTIFAEQEKNHQKRFEKRNITQAKSLGFKLIPV

SEQ ID NO: 122721 - protein, 301 aa, unidentified
MDVTTVGIDLAKQVFQVHGVSNRGAVLIRKQLKRAEVAKFFATLPPCLVGMEACASAHHWARTIQAHGHTVKLMAPQFVKPYVKSHKNDAADAAAICEAVSRPSMRFVPIKNIEQQSVLALHRVRLGFIKARTAQANQIRGLLGEFGLVVPQGIGYITQRVPALLERAAGDLPGAFRQLIGRLLEHLRLLSLQVTDIDEQVKAWHRSTEASRRLEKIPGIGPITASALVATVGDAKNFDSGRQLAAWLGLVPRQHSSGGKPMLLGMSKRGDPYLRTMLIHGARSVIYRATQKASRCPHDIQ

SEQ ID NO: 122722 - protein, 438 aa, unidentified
MSNKVIFNLDELFISVGIDVGADFSWMSIALPNQQFVGKPYKILHNSIDSLTTAVSKIKEAEELYSLESRIFLESTGIYHYPLFCYLRDKGFNCSVINPIITKNSTNINIRKVHNDRFDSKKAALVGLKPDLKVSLMPSDLALNCRNLCREYYDLMDNRSAYVNKLQGELRMAFPQYLSIFSKVTINTSLTLLETYTSPSAFLEADKQESIDIIKSTARFGLTYAQNKYNAIIQAATDANQFGYIIDSNIKRIRLYISFIRKYDEEINNILESLHELVDANEDADFVKQIHLIETFKGAGFLSAATIMGEIGDFSAFSKPKQLFAYFGLDPAVKQSGKFEGTKVQMSKRGSSIARRVIHTLSLQSISISRNGKAKNPVLREYYLQKCDSKPKLVAMGAVSHKVCNMIFAILRDNKPFEIITPQEHIKQYNAAKCDIAA

SEQ ID NO: 122723 - protein, 420 aa, unidentified
MRTLIERGCGLDVHQATIVACLLVGKAGGKVRKEIRSFATTTAGLLQLRDWLMQEGCSHVGMESTGVYWRPVYALLEHEFTVVVGNAQRIKNVPGRKTDVKDCEWIADLLRHGLIPPSFVPERPIRALRDLMRFRRSLVDARTNCRNRIIQVLESANIKLANVASDVFGVSGMAMLKALAAGGKTPGEIADLAKGLLRKKLVQLELALQGSMTDDHQFMLNELLKSLAQDEQRIEAAEQRVDEKLKPYLREHGLLTTIPGVDWAGAAGMIAEHGVNLAPFGTVERFAAWSGSAPGNNQSGGKNRRARARKGNVYLKTILCTAAVSAGRTKTGYLREKYHRIKARSGPGIAAGAVAHKISIAAYHILTTGQPYRDLGADYLDKRSERRTKKHLLQRLERMGYDVTLTPKAPNAETPSCARG

SEQ ID NO: 122724 - protein, 475 aa, unidentified
MIFVGVDWAEAHHDVHVQDQDGARLGGGRLPDGVEGIARFHELAAAHADDPDQVVIGIETDRGLFVAALVAAGYQVFAVNPLSTSRYRDRHGTSGAKSDPGDAKVLADMVRTDRHNHRPVAGDSDLAGAVKVLARAHQSMIWNRRRQANQLRSVLREFYPAALAAFGDLTSGDAVEVLRVAPAPAAGQGLSRPKIAAALRRGGQQRLIEHRAGEIQAALRSPQLRAAPATEAAMGASVAASAAVIAEMSTQISALAQALEADFEQHPDAVVVRSLPGLGIILGARVLGEFGAEPDRYLTAKSRKNYAGTSPVTRASGTRRVVLARHTRNDRLADALYLWAFAALTASPGARAYYDQHRAAGDTHHQALRALGNRLVGILHGCLAHHTTYDETTAWGHRNRVERLTARRSHRYDRPPGRRLGRLGLRPNGLISGRGAAPCIDLAARAAIRIAKLSRALPYATPGKLPGNPRLKPSS

SEQ ID NO: 122725 - protein, 417 aa, unidentified
MRVLHERCCGLDVHQKTVVACVLITAPEGAVQRRVQTFGTMTADLLALSDWLDGYGVTEIAMESTGVYWRPVYNILEGEARAITLVNPQHMKAVPGRKTDVKDSEWLADLLRHGLVKPSFIPPAPIRDLRELTRYRKTLVQGRTQEVNRLHKLLEGANLKLGAVAADILGKSGRAMLDALLGGEQEPTVLAELARGRMRAKLPLLRQALEGRLRPVHLVLLAAILGHIDYLDAMIARLHDEIAADLAPFAEAVELLQTIPGISAVAAATIVAEIGVDMARFPSHKQLASWAGVCPGNKQSGGKRLSGKTTKGSVWLRAVLTEVAWANARSTTGYLGAQFRRLARRRGRLKALVAVAHSVIVIIYHVLREHRPYVDLGADYFATLEAERVERHHVRRLNALGFSVTLSPLPAPEPVPA

SEQ ID NO: 122726 - protein, 347 aa, unidentified
MRFYTQQHQFYCGVDLHARSLYLCVLDQAGEVRLHRKLQATPDAFLKAVAPYREDLVVAVECIFTWYWLADLCADEGIAFVLGHALYMKAIHGGKAKNDRIDAHKIAVLLRGGMIPEAYVYPPEMRATRDILRRRLHFTRKRAELLTHIENTNSQYNLPAFSKKLTYRGNRTGVVERFAETSVQKTIAVDLELIAFYDQLLRDLEAFILRTAKGHDANTLYRLRSVPGIGKILSLVILYEIHDISRFARAQELASYARLVKCARESAGKVRGNGGQKIGNAHLKWAFSEAAVGFLRKNPEGRAYYEQLVRKHGKGKALTVLAHKLARAVYHIWKHDQVFDQQKFLST

SEQ ID NO: 122727 - protein, 333 aa, unidentified
MLIIGCDFHPSVQQVAVLDTATGRRWEGRLTHEGDQVRKFYAELPRPVRVGLECSGYSLWFEELLEELGIEYWVGDAAKIRAAEPRKQKTDRNDARLLLKLMEEDRFPKIWVPDRATRDLRQLLMHRHKLVSMRSAVKNQLQAIALNRGVQKHKRLWNKQGREQLRSFVLPPWTRRRCDELLRLHEQWDEQIAELDRVVWHEAQANPDAAYLMKKVCGVGPISALATVLTLGPVSRFPNARKVASYAGLVPAEWSSGPHQRLGHISKQGSPFLRFALVEAAGVAARYDAEFKRVYWRLVERRGKSVAKVAIARKLLTRLYWLLRLRSEKAKAR

SEQ ID NO: 122728 - protein, 386 aa, unidentified
MKVAANRIESPDAIRTALGAIFISLELSRSKWLITSVSPGAGEKMSKSVVSGGDIAALLARLADLQRKAQARTGQDFRIVSIQEAGLDGFWIHRVLEQEGIESYVVDPASIATSRRRRRAKTDKIDGETLVRTLMAYKRGEPRVCAILRVPTPGEEDRRRLMRERKALVNERIRHVNRIKGLLFSQGASGYEPLNRDRREHLERLMTGDGRPLPNALKAQISRELDRLELLIEQIAEAEDARDAMLAAAEQSAREPALLLKLKGIGPEFAAVLWSEGLSRQFDNRRQVAAYAGLAPTPWQSGQISHDQGVSKSGNPRLRATLIQVAWLWVRHQPTSALTAWFKGRVAQNGGRQKKSTIVALARKLLVAPWKYVNAGVIIEGAVART

SEQ ID NO: 122729 - protein, 404 aa, unidentified
MYSVGIDASKGKSTVCILKETGECILTPRDFNHTKDDLEALDQTIQKLTGKNDVRIVMEATGIYHWPLLLFLKRKGYFVSVINPLRMKLFAKSYNFRGIKTDKYDSTIIAAYGCEKWFSLQQWDFNDDTRDELKRLARSYVSYQKPKISVKQSLDLELEKCMPGIKNLFSDDQKLYSFILFFHHYDNLTALSKNKFLDKFNRWAKKKGYQFHSSTPTKIYELASSGIPTVPFDDSCVLIIENLVNTLITIDKGLNDILTRMHQLASSLPEYDVVLNMSGVGYTLAPLIIAEIGDVRLYRSKKSLVCAAGIDVPPYESGQFKASHRVITKKGNSNIRRHLYLVMNSLYVTKPKKDSAVYEFMIRKKAEGKLHKQVIVAGMRKFLHIYYARVKERYQDIGLWQTLS

SEQ ID NO: 122730 - protein, 387 aa, unidentified
MSQPNDQSRSLAVFEQNVTLVAVIELSQSSWLIAGTVPGIERQPLKKIVPDERELLRVLHRWHDEATRSGRTITRIAVAFEAGRDGFWLARWLTGHGVEGHVIHSTSVAISREHKRAKTDRLDTAMLMRVFLGWLRGERGHCGMVAVPTIEEEDAKRPSRERENLVGERTRIVNRMKAALARLGIRGFKPELRRAPQLLDSLRTPEALPVPPNTLEEMRRDMARLGVLREQIAAIEQARLERLEQAPQAGPNAMVRLLASIIGVGVETADMLVHEVLSRNLRDRRAVAHYAGLTGSPDESGAKRREKGLAKSGNARVRRGLIQLAWRFLIFQKDSALVQWFRSRTEGAKGARKTKMIVALARKLLIALWRMVTTGEVPQGVVLRHVA

SEQ ID NO: 122731 - protein, 412 aa, unidentified
MNLMYERCAGLDVHKRNVFVCATTPDAQGQRRKERRTFSTMTPELLRMRHWLQDLGVTHVAMESTGSFWKPIFNILEGHIEVLVVNAQHLKAVPGRKTDVKDAEWIADLLQHGLLRASFVPPAPQRELRELTRYRTSLIEERSRIINRLQKTLEDANLKLASVASDLMGRSARDMLAALLAGEVDPSVLAQLARGRMRAKRDLLEQALQGLLKPHHRFLLSEQLADIDALDEAIERMSTEIAQRLRPYETLLQRLETIPGIKRRLAEVILAEIGPDMSRFPSARHLASWAGMCPGNNESAGKRLSGKTRKGSPWLRSALVEAAHAAIHCKDSYLSAQYQRLAIRRGGKKATIALGHTLLVIIYQLLSEDKDYEELGGNYFDEWDRQAVQKRLVRRLEKLGYAVKLEPTSPAM

SEQ ID NO: 122732 - protein, 370 aa, unidentified
MVGCIWSYLPVNTAVPGAVKSDSTLSCGATAIRSYELFVGIDVSAATVTVSWMALSGCPSRSVTIDQRADGYRQLQAQLLATGVSAPAILIVLEATGSYWITLATTLAEAQFAVAVINPAQAHDFAKALLKRAKTDALDAQMLAELGTRLQPEPWTPPPNVYAEMQQRLMQREALIQIRTQVRNQRHALLRQPRVIVDVQRRMDSLLETLNDQIAEIEGELTIAMRQDESWAAAAEHLQTITDVGMLTANWILVTTLKFTLCPTPEAAASHAGLAPYVRSSGSSVRGRAQIGQFGNRHLQRALYLATFSAVRYSPIIKSYYDRLRAAGKPAKVARCAAARKLLHIAWAVVTKEQDFNPQQCVRTALHAAA

SEQ ID NO: 122733 - protein, 346 aa, unidentified
MKKIFIGIDFSKEKFDATLIQAEGLKECAPSVHEVFDNKTSGYRRLVKWVKTHAEGFTADTWLFCGENTGGYSIGLSNYVYASGYDMWLECAYKIKHSAGIQRVKNDKADSRAIAEYAMRNYDKMILYKPQSASLTCLREVFLYRHSLVRQKVALQVRRDEKRLTQEKSDARAFMSFTSKHLITEVNKAIAKCDQKIKDIIAADDELRETFDIITSMPGIGVQNATCLMVYTDNFQKFDLNARKIGCYYGIAPFGRQSGTSVNSRPQVSPFANRMIKSLLSQAALVAIKFDMNVYNYYQRLKERGKHPLLIHNNIKNKMLHALVAMVRDRVKYNPDYVYRTNKEIA

SEQ ID NO: 122734 - protein, 423 aa, unidentified
MKPAIEPSFAALVGIDWSDRKHDFCLQAAGSPQREFGVLVHSPEAITLWAKALYRRFGGPIAVCLEIAKGPLVHALQRHEFIVLFPVNPATLAKYREAFVPSRAKDDPTDAQIALELLLRHRDKLQPLQPQSTDIRTLATLVEQRRLLVGDKTRITNRLNGTLKEYFPQALDWFEDRDTVLFCDFLQRWPSLKHAKRARQATLRSFFSAHNLRRAQIIEERIHGIRSATALTDDPAVLGPHQLLVQALVVQLRVTLQAIDHFDAEITAVAKRLPDYALFAALPGAGSILAPRLLVAFGEQRERYASAAQLQQYAGVAPVLERSGNKCWVHWRLACPTFLRQTFVEWAGSTIPRSFWASAYYHRQRAKGSSHQAAVRALAYKWIRILYRCWQTRIPYDESVYLLALKRRGSPLIAAMATTPQNT

SEQ ID NO: 122735 - protein, 358 aa, unidentified
MRIIGVDLHTRQQTVAMLDVETGELIEKTLKHDGDEVRKFYSALPGQVLVGIEATGSMHWFLELLEELGIERQVGHPAKIRAAEPRRQKHDRRDAALLLKLQVENRFPAIWMPSTERRDLRTLLLHRHQWVRMRTRVQNALQAIALSRGLRRGKTLWSQGGQHSIESLSLPPNAAHRRTELQRLYRNLNEQIDELDKRVNGRALQRPGAKLLMTHPGVGPVTALATDVFWGDPARFEDGKAVVSYVGMIPSEYSSGGQQRLGGLSKQGNPFLRFLWCEAAVHAVRRDPELQRFYRRKLAQKGLGKARVAAARKLGIRLWIMLRDQIDYQEFCRRGQMRQKNGGACAGMPEVGHSPAMQ

SEQ ID NO: 122736 - protein, 400 aa, unidentified
MMTPDDIDVWVGLDVGKSAHHAHALDHDGNTLYDKPLKQDEKAIRTMLGKLSKHGRVLLVVDQPNTIGSLPLTVARNTGIAVAYLPGTAMRRTAQLLPGDAKTDRRDAHVIAWAALKLPETLRDAGPDDETLAALKLLAGHDEDLAHESTRHVNRLRSLLLQTHPAFERALKGERITRDATLALLERYGGPMGVKRAGIEDVKDWAKSNGLRAGRIIDDMFKAIGEQTVTVPGTLMAETIIPSIAHDIKTIRDRRREVDRQVEKLLEDHPLLTVLTSMPGIGVRTASNILLGIGGDIANFKSSAHLAAYAGISPVTGQSGTSIKGERPSRRGNKRLKNALWQTAFVASTKHPPSVAYYKRKREQGKHHNAAIICLARRRCDVIYSMLKNGTLYQEPALVA

SEQ ID NO: 122737 - protein, 344 aa, unidentified
MDYYAGIDVSLECSSACVVDASGKIVREAKVASEPEALADWFRALGFGLERIGLEAGPLSQWLFAAMKRAGLAVELLETRHVSDAFKAMPVKSDRNDARNIAQLMRLGWFRPVHCKSMGAQEVRAMLTARKQIQTKLQDIENSLRGILRGFGLKVGKTTKRRFAARIGELVTGHPALETIAAAMLAVHMALLREFNGLEKRVRAMSVLDAKARLLMSTPAVGPIVSLTFACAIDDPSRFTSSKRAGPLFGLTPKKYQSGETDYSGRISKTGDASVREALYEAAHIMLTKPIKGCAQLKSWAMRIARRAGMNKAKVALARKLAVIMLRMLKDNLPFNPAATAATP

SEQ ID NO: 122738 - protein, 416 aa, unidentified
MEVIVACCAGLDVHQASVVACVNSTGRGGRSHKEVRTFGTMRDDLIALRDWLKDAGVTLVAMESTGVYWKPVYDALEDHFETIPACAGTVNAQHIKNVPGRKTDVKDCEWTSDLLRHGLVRPGFVPPRDIRDLRELNRYRRKVAQVQAGERNRLIKVLETVGIKLAGVASDVFGVSGRAMIRALIDGEDTAEAMAELARGTLRGKRADLARALDVPLKPHQRFMLRTQLARIEQAEADLERIDTMLREMIAPYDNYMGLLMSIPGVEWINAVTIIAEIGVDMSAFASPAHLASWAGLCPGNNESAGKKRSGKSRKGNVFLKTALVSAAISGCRRRGSTYLAEKYRRLTARRGKMRAAVAIAHKILVSIWHMLTDGTFYQDLGAGFLDRLDRERTAKHLVRRLAAMGFDVQLQEKAA

SEQ ID NO: 122739 - protein, 334 aa, unidentified
MNYIGLDIHKKNTQACMKNEAGKVLLTGRFPSRPKDLNAFIEKVEEAGGPASFVIESTGFCIPVYDIIAGRGHQIKVAHPLKVKALTAGRAKTDKNDAEMLAELLRLNAIPESYIPPAELRELRELTRFRRSLVRNSTEIKNQIHAFLASRGIETPPEHRSPFSKKHQDWLRSLHLIQIDDLLDIYLLLLTKIEKVEGEIKRSNQKKDDVELLKTIPGVGDVIANTLVAEICDIRRFSSPENLFSYAGMVSSIHQSGEKGWTGPITKQGNARIRHIVVEAAYSHVRCSKDSDLTRSFERKRSEKGTKKAIVAMARKLLGVIYQMLKKREVYHAH

SEQ ID NO: 122740 - protein, 366 aa, unidentified
MKKTSTVRVNGNMIFKGHKLTIGVDLGDRWSNYCVLDEAGEVLLEQKLATTPEAMKQTFERIPRSLVALETGTHSPWLSRLLKELGHEVLVAHAQKVELISKSNRKDDRHDARTLARLARIDPELLGPVRHRSAKAQIHLTVIRARAELVSARTALVNAARGLAKSHGERLRKCGTEQVSRELAAELSAELREVLEPLLKEIESLNERIKEYNARMEKIAKESYPQVALLKQVKGVGTQIALTYVLTLDDPHRFPKSREVGCFLGLRPGRRDSGQSQPQMHISKEGDRYLRTMLVQGAHYILGPFGADSDLRRWGLRLAERGGKNAKKRAVVAVARKLAVLLHRLWVSGEVYEPLRNSHKAMRAVA

SEQ ID NO: 122741 - protein, 344 aa, unidentified
MLYVGLDLSRKRLDWQALDLYGERVAVGAVPPDRDGLAKLGQRLGDAAVLAVIESMSGARFVHDQLERAGWDVRIADALKARGLAPLACKTDKIDCWVLAELARLNLVPEIWLPDPEVRAERERARFRLHLVKHRRALKNRVHSILFQHSVANPHSDLFGVGGRRLLERLALPEPWASTVESSLSLIDTLDEQTHACEREPRRLGADHPYIPLLVTCPGIAWTLAYTIAAELGDLSRFASPRKLVGYTGLCPKVEQSDERDRRGPLRKNGPDYLRWALIEAAHVAGRNPRYQPIVERMRARHGRTRGSKIAAIEIARRLTESIWHMLTTKQPFAPAGAPCPLAA

SEQ ID NO: 122742 - protein, 410 aa, unidentified
MEVLYPHCAGLDVHKDTVVACVRHMANGSVRREVRSFKTTTKELLALSDWLVGEGCTHVAMEATGVYWKPVWHVLSDGDFTLVLANAAHVKNVPGRKTDVNDATWLADLLAHGLIRSSFVPDEQTQEMRTLLRTRKQLVRECSRHVQRLQKTLEDANIKLDSVISDIVGLSGRRMIEALIAGQTEPGALAAMAHRRIKATPDQLEAALRGRVTRHHRFLLQLHLQQIDAVNAAIDQIDQEVDACVEPFRATVRLLTTIPGIDELSACVILAEIGRDMSRFPTAGHLISWAGLCPKNDESAGKRRSTRMRKGAPWLKTTLVQCAAAAARKKASYLQAQFHRLRARRGAKKALGALAASILTSVYHMLISGELYRDLGPQHFDHRAKAVNTRRLVMRLQNLGYAVQITPLAA

SEQ ID NO: 122743 - protein, 344 aa, unidentified
MEHYAGIDVSLELSSVCVVDAQGKIVRETKVASEPAMLVAFFKEMSASVARIGLEAGPLSQWLYAALIEAGFDAVLLETRHVKAALSAMTVKTDRKDARGIAQLLRMGWFRPVHCKSLGSQEVRALLTARQQLLSKLTDVELSIRGILRGFGLKMGVTTRKNFEHRARELAAGQTMLETVIAAMLTARAALLAEQNRLHKAVLRIVHDDQICRRLMSVPGVGPIVAITFKTAVDDPTRIAKSKAIGPLFGLTPRKYQSGETDVTGAVSCVGDTKVRTALYEAANILLSRVKRFSALKRWGMDVAKRRGPKRARVALARKIGVIMHRMWIDGTEFRWTAAERAAA

SEQ ID NO: 122744 - protein, 481 aa, unidentified
MALEPLAGYPPLPLRARVSVSCTDPGPWPPARLVPIGSGLPLQEVADGMKVMYERVAGIDVHKDMIKVAIRSPGDKPWTRKTEILEYRTFYGVLQEMARELRRRGVTHVVMEASGVYTEPVYYALCEQDFTEVAVINPVHAKALKGHKTDAKDCARLAELFECGLLRGSYIPSAEQKEVRDLTRYRIKTVQARTSEIQRLGKALESAGIKLGSVASEITGKASTAMIEALIDGERRGGVLADLAIGRMRSAGKLADLSMALTGRFTGHHATLCRLHLDRINVFDDAVDGLDDRIAAGAARWQREAGLLKSVPGFGDVVTCAWLAEIGPAPHKWFSRHEKLASWVTLCPGNNISAKKRKHGRTGDAGASIKPMLVQAAWSAIRVRGRLQARYSRLVRRFGGDKNPAAKKKAITAIAHTLLKIACQVLKSGTPYQEPGADFYTRRESPEQKQAWLERQLQKLHPGCAITITIGPPEAALPPGG

SEQ ID NO: 122745 - protein, 411 aa, unidentified
MVNGNGVSRGDRNRNARLVRLRELVPLENAIVGIDLADRKQMVVVTDHDSRVLARRTFRCKAWDLGAALDWARERAAAQGFAGVTVSCEPTGHRWRVLGQLAADRSMPFVCVQPMQTSWARRSEDLTFDKTDDKDAVLIARLTAQLRCYVPEPVDETWGRLRHLGARREELITANVAQIQQIRDLLECVWPAAIETARQPFRSKTWAAAMTVILDRDGGDLDRTHRLGWVRFERAVRREITRRGGQKPSLRIARNLFVALGDSAGVLAHRRGGLERIALVLEDWEIDQQRLAETERRMVSVLDELELTSLVTSIHGISAVGAAAILAETGDPHRFLTARAMVKHAGLAPREKLSGTFTGRTKLTGQGRPRLRVAAWRAVWGSLQTNTVYAARYRHLTGREHNKLTPTRPRP

SEQ ID NO: 122746 - protein, 255 aa, unidentified
MSEPQVFVGIEVSTARLDVALRPTDDGWHVGHAESGIAGVVERLRTVQPMLVVLEATGGLEVPVTGALAEAGLPVVVVNPRHARDVAKATGRIAKTDTLDARGLAHVAEAVRPTPRPLPDAQAQALSALLTRRRQLVQMLTAERRRLQTAPQPIRADIQAHITWLTRRLARRDDDVAAAIHASPLWRATDEMLQSTPGVGPILARTLVAEVPELGLLNRQESAALIGVAPLNRESGTMRGKRAGWGGRAPVRAVL

SEQ ID NO: 122747 - protein, 390 aa, unidentified
MRYFIGIDVAKFKHTACVIDTYGIVLVESFDFTNDIIGFQSLLKNIKPFLKKKHLVGMEDTGHYGDNLRNFLLEKQYKVVMLNPIVTSHIRKASNKAKNDRIDCFVIANTMMNPNFYRDQHAQSIDYATVRQLTRMHHTHTEEINRYKCQLQKSIDIVFPEFNSLLNTKYSKTYLEILDTYHGAHTIANTDIRLLRNTLKNVGGGRSVSISAEQLKKAAKESIGQHNLAIEMDIPFLISLIRRLTSILGEIDKKIEEFSHQLNSPILDISGISHFSAMSIISELGDITYFSSEKKLIKFAGVNPCVYESGTYSMTHTRLEKKGSKYLRKTLYQIIDVVIRFNPVFQAFYQKKISQGKSYRCAQGHCIRKLLRVIYKILSTGERFDPEKLK

SEQ ID NO: 122748 - protein, 344 aa, unidentified
MMIIGCDFHPGWQQIAFVDTQTGETGERKLMHGNREAERFYRGLCGQVRIGLESCGNSHWFLDMVTDLGHEVWVGDAARIRAKEVRKQKTDRRDAALILELLMKDDFPRIWTPSKQERDQRQLLIHRYKLVMLRARVKNELQHLAMNQGMQKGRALWSKEGQKLLEQVRLDYWAGVRRKNLLDMLKGMDQQITVLDQAVKKAAEENEKARLLMTQPGVGPVTSLAYVLTMGDVARFHRGKKVASYLGLIPREYSSAGKQRFGAISKQGNRFMRMLLVESAQVAVRYDPGFRSEYLHLCHSKPKAVAKVAAARKLAIRLFWMLRTNTPYPEIVPIESSSRVPLAG

SEQ ID NO: 122749 - protein, 337 aa, unidentified
MILIGCDFHPSFQHIAILDTETGVTEDHKLMHAAGEAERFYRKLASPAVVGIEAVGNDQWFVQLLQKLGHEVWIGDAAQIRASYVRKQKTDRRDAKHILQLLVEGRFPRIWVPSAEMRDHRQLVVHRHKLVQIRTRVKNELQHLMLNQGMQKKQKLWSAEGRATLGSIPLEPWADRRRRDLLNLLAMLDGQLEMLNDAVAQVAKQYPEVHLLMSQPGVGAVTALAFLLTIGDVRRFQRGKHVASYLGLIPREYSTGGKQRMGGISKQGNRLLRFLLVEAANIAVRFDPVFRKEYLHRCHQKHFTVAKVAAARKLAIRLYWILRTKTPYPQVLTSGVA

SEQ ID NO: 122750 - protein, 409 aa, unidentified
MEVVHEVCCGLDVHKKSVTACVLWASGRRKQIREFGTFTRDLLELADWLRSCGVTHAAMESTGVYWKPVWNLLEGQFEVLLVNAQHIKAVPGRKTDQKDSEWIADLLQHGLLRASFVPPTPTRELRDLTRYRASLAQEINRIANRIQKVLEDANIKLASVATDTLGASGRAMLEAIIKGEQDRQRLAEMSQGKLRNKIPELQQALEGRVTAHHRFLLRELLDHLYFVESKMRRIEQEIAERLGPFQSEVARLCTIPGVDRVTAWGLVAEIGLNMAQFPDAQHLASWAGLCPGSHESAGKRKSGKIRKGSLWLRRCLCQGAWAVSMQKNNYLSALYRRLAARRGSKRATIAVAHNLLVIAYYILRDKVCYRDLGPDYFDRMNPEGLRRRLTKRLEGLGFKVTLEPLAQVA

SEQ ID NO: 122751 - protein, 411 aa, unidentified
MRRVIGMDLHRTFAEVVVWEDGRLRHAGRVDMTRSGLEGFARTLQASDEVVIEATGNAMAVSHLLKPHVARVVIANPLQVKAIAHAHVKTDKIDAGVLANLYAAGYLPEVWTPDAATERLRRLVARRNQVVRHRTCLKNETHAILHAHLVPPCPHADLFSRVGRAWLERQALPDDEHAAVRRHLREFDALGEDLAVLDRAIGEATVDSPVVRRLLTVTGINVTVAAGLAAAIGDVRRFPSPQKLVSYFGLNPRVRQSGLGLAQHGRISKAGRSHARAMLVEAAWAAAKAPGPLHAFFVRVRARRGHQIAAVATARKLAVLCWHLLTKEADYLWARPALVATKVRGLELQAGLPQKKGNRRGPAYAYNVKALREQEMEIARRAETAYEQVVAHWTPRPSKAARGRLKPAGLG

SEQ ID NO: 122752 - protein, 354 aa, unidentified
MNSVRYVGMDVHRDTISVAVLDESGRLMMQSVLATRAGAILDFIHGVRGTLQVTFEEGTHSAWLYDVLVRRVEKLVVCNPRKNALMKSGSKSDAIDARKLAELLRAGMLSPVYHGETSALEVQQVARSYSQLTEDTTRVMARLKAVFRGQAVSCAGKKLYGKRHRGEYLAQLGGGLRRRAEHLYEELDALQPLRHEVRRELIVECRKHAAARWLQSVPFLGPIRAALLIGRVQTPHRFRTKRQFWTYCGLGLETRDSGQYRMVNGQVERRRKPVLIRGLNWNHNHAMKNLFKSTATAASVREGVWREFYLGLLDKGMRPEMARLTLARKIAAITLKIWKKGETFDAEHLKLQAA

SEQ ID NO: 122753 - protein, 407 aa, unidentified
MIFVGVDWAEAHNDVAVMDAGGAVLGRGRFSVGVAGLGQLHALLADHAEEPAEVAIGIELDRGLLVDSLLGAGYQVYGINPLAASRYRDRHTTSGAKSDASDAKLLADLVRTDRHNHRPLAGDSERASAIRVLARAHQGLVWMRQRQANGLRSALRDYFPGALAAFGTDLAAADALAILAIAPTPERARSLSRAKIAAALSRAGRRRNLDQRATEIQAALRAEQPQTAAVVADAFGAAAAARVAVLVSLNQQIAELEGALGEHFDRHPDAEILRSLPGLGLVLGARVLGEFGDDPSRFADAKGRKAYAGTAPITRASGRSLVVLARVARNRRLADACERWAFCSLTLSTGARRYYDALRARGKTHSQATRQLANRWVGILHVLLERRQAYREEVAWPEREGAHRLVA

SEQ ID NO: 122754 - protein, 317 aa, unidentified
MSKSSTIAGGIDVAKTHLDIAIHGCKQSWQVANSVEGFGELVRLVRQHQVRLIGLEATGGYEHDVVEHLRAAGLTVIVLQPKQVRAYAEIKLRQAKTDRIDAALIAAFVSEHGIVRETPDPRLGALAEQLTYLEQIEEDMARIKTRLEHVRDAGLRGNWTNDLARLRQRRASLIAKLLTLLRNHHDLAIRLDLLLSIDGIGPRTAIALLIRMPELGRLSRGEAAALAGLAPFNNDSGKRSRSRTIAGGRTRLRTSIYAAALPAAFRWNAALVRLYNRLKAAGKPHKLALVACARKLLTFANTVLERGTPWVQVAAPV

SEQ ID NO: 122755 - protein, 372 aa, unidentified
MKSTTKFIGLDVSKEKISVAIADEGKDKPRYYGTIAHAPAALRKLIKELGPASSLSFCYEAGPTGYETYRWIESMGAHCVVIAPSLIPKRSGDHVKTDRRDAEQLARLFRAGELTPIYVPAREDEALRELVRARESAKEDAHRARQRVLKFLLRHQIHPPEQIKRRWTKKYRVWLGQLTFPNAPMQIAFTEYLHAMDEIEQRIGRLEKALIEEAATSSKADLIQILQSLRGIGFLTAVTLAAEIGSFARFRSPAQLMAYLGLVPREHSSGVRTQRGSLTKAGNGRLRRTLIESAWSYRHQPAIKGDLARRLEGLPADIQLISWKAQERLHRKFRRLVYGLNKHKNVAVTAVARELTGFIWAIARTLELPNAQ

SEQ ID NO: 122756 - protein, 402 aa, unidentified
MNCVGIDVSKGKSMIAVMRPFGEVVVSPFEVRHTANELSELAGLLKSLDGETRVVMESTGNYHAPVAWLLHDAGLYVSVVNAMLVHDYGNNSLRRAKTDKKDAVKLANYGLDHWLTLPRYIPEEDTRLMLKICYRQYQQYSKVQTMLKNNLISLLDTTFPDANRLFTSPPRADGSEKWVDFVATFWHCECVCGRSEKAFTTQYQKWCRKHGYNFSEDKALDIYASACRHFGVILKTDTAKLLVEQAISQLQTTSSALAALKQEMQSLAASLPEYPVVMGMFGVGPTLGPQLLAEIGDVRRFHSKKALVAFAGIDAPPYQSGQIDVRSRSISKRGSASLRRTLFLVMSVILQCAPIDEPVYQFMDKKRSEGKPYRVYMMASANKFLRIYYASVKAYLESLEHD

SEQ ID NO: 122757 - protein, 450 aa, unidentified
MAERYAGVDWASDKHDVLVQDAAGGEVLATTFTHDERGLRALCATLVRLGVVLVAIERPDGLLIERMLDAGLRVMAIHPNQVAAARPRFRTSGGKSDRFDAFVLCELARTDSHRFRVLVADSDDTKALRALSRAREDLVQARVELANQLRAELDRFWPGATVIFREIDSPIGLAFLARYPSPIDANGLGEKRLAAFLARHAYCGRKPADELLAKLRSAPQGRAGDAEIEARRAIVLALVAALKPIVAKISELTSEIAHRVRAHPDGHVFLSLFKDPNSVVCAATLLAEIGDCRARYRSAEALAADAGMSPVAVESGKRKVACFRHGCDHRLRAAIATLADATRHWHPWAQDRYATARARGQDHQRAIRTLGRAWCRVLWRCWQDNAAYDPARHRGLQDHIAVAVPDGSRLSLDLTATQRMAGAAVTPRAAQSDEREALDSKPTSATNTGG

SEQ ID NO: 122758 - protein, 341 aa, unidentified
MKNKSFIGIDISKNVIDASIFCEGTPIKDFPHAVFNNSRKGFGEMCTWLKKNHVVLSNCLFGMEFTGSYSMELEKFLYARNYQFCMLSTHVVKHYPMGPKDKSDKIDSAKIADFLYRYNGTECVKPYNMPDKTMQRLKALMNERKFLVEQRTCFMNRRQLCITKEDAQLYDGYIKKFSRDIENIELEEQKLLATDDSLLSTYKNLLTIPGIGFVNAINAIVITRNFTAFETARQYASYVGVAPHSHTSGTSVRWRPRPSARCDGQAKADLSMAATVVVQYDAELQSFYNRKLGGKQDSDTKRKALNAVKFKLVLRMFAIGKQNRKWEPLDSKSSNEKLAIS

SEQ ID NO: 122759 - protein, 394 aa, unidentified
MKLIGIDIGKNKHFFCIMDQQTGEIISQPVSFSNDKEGFDFLIQKIKSYPKDSILIGMEDTGHYHFALLKYLLDLQYTVALINPKTTDFNRKMQGGITKNDKLDTINICDVLDTPERKKQYRITKVNSFDLYEQKQLTRHHHSLKEEENVYKNRLQKCIDIVFPEFNKLFNSKYGTVYMNILKTFGSAENIANTDIRTIRKCFEIEGRGNRISLTPERLKECARSSIGISSSAEVIQIKHLTAQIELIEEQLTEIDKKIEEFSIQNNSPILSIPGISHFSGTSILAELGDISNYSKPSQIIKFAGVAPLHYESSQFNAQHTAITKKGSKYLRKTLYQIILPVIRHNPVFNKYYQLKISQGKGHRCAQGHCVRKLLRIIYHLLKTNQQFDPQLLR

SEQ ID NO: 122760 - protein, 338 aa, unidentified
MKTYAGIDLHSSNNYTAVINEHDQRLYRKRLPNRLDAVVSALEPFKDTLEGTVVESTYNWYWLVDGLQEHGYKVHLANPSAIKQYEGLKHTDDQWDSFWLAHMLRLNILPEGYIYPKEERPVRDLLRRRLLFVRHRTAHILSLQSMISRNLGTQMSGNAIKRLEQGDAEMLFNHPHLVLAATNNIAVIHFLKERISGIEREVKSVIKLRDQFTYLLSVPGIGDILALTIMLEVGDINRFPKVGDYSSYCRCVKSERLSNGKKKDENNKRNGNRYLSWAYVEAANFSKRFSPHAEAFYQRKKAKRGGIVALKALSNKLARASYYIMRDQVPYDVNKLFR

SEQ ID NO: 122761 - protein, 423 aa, unidentified
MAAMKECCCGVDVHKNFIVAVIARFEGREVTFSSYKRFSTFTKGLREFKDWLRSNNCYDVCVESTGKYYIPVYRIISDETFHVDVVHPKYVKAPRGKKNDKRDAKRIADMYMRDHIAEYSIIPSADILAIRDITRYRRKTVNAITSEKNRMSNCLTVSCIKLDEVLSDTYGKSGQAIIEQIIAHGGCDFDPIPYIDKRVKATPELIEMALDGNVTPSTLTKMSMIQQRLKFLGNQKAELELTMASLSKDFSRQLEILDSAPGVDSLSAISIIAEIGTDMKQFGSVKKFLSWVGIVPQNNESAGKKKSTRIGVGNTWLKPVIVQCANAAINDKKHPEIHEKYLALKKRRGHRKALIAIAKRLMTAIYYMLLRNELYQPYLGKDSAPDRGKIELEKLIEYYRLKGYTIVSNGQSVTPISEVENAV

SEQ ID NO: 122762 - protein, 421 aa, unidentified
MTQTSHDTFAAFVGLDWADAQHDGCLQGAGSAQREYFQLAHTPEAIDAWVTTLRTRFYGQPVALCLELTKGPLVSALRKYDFLVLFPINPLTLARYREAFTPSRAKDDPTDAELQLELLLTHRDKLRPLQPQSPTMRALAQLVEHRRRVVGDKVRITNRLTSALKNYFPQVLHWFQDKDTRIFCDFLSRWPTLKAAQLARRSTLETFFRDHHVRTADVLATRLHAIKTATPLTTDEGIIAPNVLLVQTLVSQLRVTLDAIEAFDQAIAQRALHHPDFPLFQALPGAGPVFASRLLVAFGEQRERYASAAELQKYAGIAPVTERSGKKAWVHWRLQCPKFLRQTFVEWSAESIRHSFWAQVYYQQQRDKGNTHQAAVRALAFKWIRILYRCWQERTPYDESTYLQALMRRNSSLIPNRVKAS

SEQ ID NO: 122763 - protein, 429 aa, unidentified
MTSNPSITAPTVWVAIDVAKLTHQVLIELPNGRRRTMRVANTKSEIDGLVEVLRALGHRCEIAVEPTGDYHRPLAYVLGQAGFHLCLVSSIAVARTREALYNSWDKNDPKDAQVILHLLKNGTTQRYLDPLLTGHLDLQEMANTYRQVSLRKVRLQHSLLTHHLPWYFPEAERYLHSSRAEWFTALLLFTPCPAAVRQYSKAAFVKAASAQIAGRKVDRARWLADFYDTACHSIGLPVAPESETVRMLRVVLEEYRALCALRKQLEAEVATRLATQPDFVRLQTLPGIGPILALIILAEARDLRRFGCARQFLKYCGFDLCTEQSGQFRGTTHLSKRGNARLRYAFWMAGTVAIRMQQNSFRRKFEDDIRPDPKNADRRRKGYTAVAAKMARVVYAVVTTGTDYRRFPEATRPGGRIPSPGAVEALATS

SEQ ID NO: 122764 - protein, 361 aa, unidentified
MNATTAAIDLAKNVFQVALADANARVLEQHRLTRAQFERFFDNRKVARIVMEACGSAHHWARVFTARGIEVMLLPAHYVRAYVRRSKTDAADALALLEAARCADIVAVKVKSVEQQSLQALHRTRSLWMGTRTSRINALRGFCRELGLHVPVGARTGLEAMARAVADDQSPIPALLRPIMQQLLEEIRVLEVRIAQLERQLAQLARECSACRLLMSIPGVGLLSATAILAATSGNVAHFKSARHFASWFGLTPKESSSGGTRRLGRISKMGDKYLRMLLTHGARSVMRAATVAKLRGQELLGVRHWALQLQGRSNHNKAACALANKMARICYAVLRDQTPFGQPATRLSKKMQRQSFELAH

SEQ ID NO: 122765 - protein, 348 aa, unidentified
MSASYIGIDLHRNVIQICVLDERGETLAEENIRYESLEEGLAAVAFVRRFAPGCRVAVEALGLNRWFVNACLAAGIPVLVCDARKLGLRNLGKKTDRRDAYEIARRLWLGDLDRMARTYYPSDAEYGRRKLLRVRHRLVQMRQQTVNQLRAMLNAYQVPAPRTVLYTRPSQEKLASVRLPETELQLAFDALRSVLERLQEQILALARRIEKLPRTEPEIGALVATLPHIGAQSAATLCAELGDPRRFRNARAVAAYAGLVPSVAQSADHAHHGRITKQGNRELRWILSQWAVRLMKDDPLVRAWAAKLRRRVHRNKARMALARRLLVGVWILLSRGEAFDLRRCLGIA

SEQ ID NO: 122766 - protein, 391 aa, unidentified
MVCVGIDVAKDKHDCCILDSDGTVRADCFTIPNNMDGFKQLLQTIQSCTQKSDKIKVGLEATGHYSYNILGFLLDNGLPTYVINPLHTNLYRKSLSLRKTKTDRVDARTIATMLLSDVDLKSYTDTAYHNEELKSLTRYRFEKVQERAKLKQSVSRLVTILFPELEQLVPTLHIASVYSVLSEYPGAKQVSEVHLTKLTNLLTTASKGHYGKDKAIQMRDVARTSIGSVMPAKSLELKHTIKLIRELTSEIDEIEDSIQQIMDELNPPILSIPGMGIHSAAMILAEIGDFSNFESPDKILAYAGCSPSTYQSGKLTNCYAHMEKRGSRYLRYALYNATKYVCHWNPVFAEYLAKKRAEGKHYNVALSHATKKLVRLIYALQKSGKAYLTAA

SEQ ID NO: 122767 - protein, 401 aa, unidentified
MNAVGIDVSKGKSMVCVMRPFGEVVLEPFEVLHTAQSLNDLAGKLKALDGETRVVMEATGNYHKPVAFVLHDAGLFVSVVNPVLIHDYDNNSLRRVKTDRKDAVKIANYTLDKWTRLRQYLPEDDTRLALKNCYRQYQQAVAIRTMLKNNLISSLDLTFPDANKLFTSPAKNNGCEKWVDFIGDFWHSECVSSLSPDAFSKKYLKWCQKHGYYFTRSKSDEVYACAVSAASLPKSTTSKILIQQQVAQLKAVSQSVAAFQQEMLRLSQQLPEFDTVMEMYGVGPSLGPQLMAEIGDVRRFSSKKSLIAFAGIEPQPNDSGKVVGNDKGISKVGSAVLRRTLFLIMSVILQTQPQDEPVFQFMNKKRSEGKPYKVYMMASANKFLRIYYARVKAVMDSERSQ

SEQ ID NO: 122768 - protein, 347 aa, unidentified
MTIIGGLDVHRAQITFDYVDTETGETERGQVSPATRVVLRSWLAARFQGRADVALAVEGCTGWRFIVEELQRAGIEPHLAEPAETSHARGPKKRAKTDRIDARLLRDLLLQGRLPESYIPPAHMLEVRALGRHYQALAADRRAWLQRIHAQLFHQGAPAVAALLTETGRHQLESAGLSPAGRQMLTSALTMVQAIDRELDPLRQQLRAAGRSLPGPRALDKLFGIGELCAVIIWAELGDVRRFRNAGQVVRLAGIDVSVWSSAGKRSPGRLVRQGPPMLRWALYEAGKAAARSSSPDYDYYQQVKGRLDGKRAALSVARKLAKRCFHALRELGDEALAAAELKTEAA

SEQ ID NO: 122769 - protein, 335 aa, unidentified
MTKLAELIDAVVGVDTRRDTHEVEIALPTGTPIKTRRFSNDNSGFAELLAWIVDYAPGPRVVVSIEGTRSFGVGLARAVAAAGLTVIECEQPNHKARRGKGKSDPIDAHLAVLAALRLDADRLPVPRADGDREALRILLGTRHELAVANTAQTNRLRALLLGGGDTERDLARASLTDHVLRALARRREPRQASREQTVRHGEIRRLALAVRAGRAALAANRAQLQTIVDEMAPGLTERRGIGPVTAVQAIVSFSDPGRCRSDAAFAALSGTSPVQASSGKTVRHRLNRGGDRALNCAIHTIALTRMRSCPTTKEYAAHSRAEGKSNREIRRCLIG

SEQ ID NO: 122770 - protein, 347 aa, unidentified
MRFYTSQHKYYCGIDLHARRMYVCIIDGQGEIREHRNMKTDRDAFLKTIAPYREDVVVAVECIFTWYWIADLCQNEGIPFVLGHALYMKAIHGGKAKNDRIDSRKIAALLRGGMMPMAYVYPARMRATRDLMRRRNHLMRKRSELYVHIQNTNIQYNLPDSFGPISRPRNRDGIAEQFEHPCVQKSIAADLEMIKTYDSILSQLESSIVKMANNHDPASYALLQTIPGVGRILALIMLYEIENIRRFDTVQDFVSYSRLVKCARESNGKKCGSGGAKIGNVHLKWAFSEAAVFFIKGNDLAKRFLDRLVKKHGKSKALSILAHKLGRTVYFMLRNREVFDQKKFLNT

SEQ ID NO: 122771 - protein, 342 aa, unidentified
MEQNNIIGLDLAKRAFQLHGARCDGSVAFRKKLSREKVLTFLAEQPRCIVAMEACGSAHHWGRAISGIGHEVRLIPPVYVKPFVKRQKNDAADAEAIAEAASRPTMRFLAVKTEEQQARAMLFRTRDLLVRQRTQLINALRGHLAEHGIVAPQGPAKLTVLEQAVEDTGQSLPILVIELARIYLDQVDRLSEKIAELEKATAHEAKRGAMTRRLQTMPGVGPITAIAVETFAPPMEVFQRGRDFAAWLGLVPRQHSTGGKQILGKTSKMGQRDIRRLLIIGAMAVVRAACRKGAPEGTWLHRMLARKPRMLVAIALANKMARSIWAMLTKNQDYRVPVAAAA

SEQ ID NO: 122772 - protein, 327 aa, unidentified
MNYIGIDVDSRFLVCAAQRDDKSVEEATFTNDSAGHKKLIRWATRRKQRAQICMEATGVYSLPAALALSKSAEIDVMVANPKAIKNFSVALLQRGKTDRLDARTILQFCQKMPFRTWQPPAEEVLQLQYLSRRVRQLTTERTRETNRLKAAKRLGPLTRLVVNDIEVNVRHIEGRIKRTRQLMLELVRSSSDLSPLYDLLISVVGISIRSALAILAELAVLPGDMTGRQWVAHAGLDPRPYESGTSIHKPSRISKKGNSHLRHALFYPGMVAVNHDPNVKAFYEKLTAAGKKPRQAYTAVMRKLLLAIWGIFKSQQPWDGQKFYQMT

SEQ ID NO: 122773 - protein, 411 aa, unidentified
MDVYCGIDWAEDHHDIAVVDRDGKLLARRRISDDAGGLATLLALLAEHGDTAGDPVPVAIETPRGLLVACLRATGRAVYPVNPMAVARYRDRHSVSGKKSDHGDAVVLANVLRTDMGMHRPLPADSELAQAIAVLARAQQDAVWDRTTAHNKLRSCLREYFPGFLAAFAGARGGITRPEARAILAAAPTPAAAAVLTLAQLRSLLAKAGRSRGIDTEAARLRDAFRIQQMRQLPLVEQAMGQQALALLRQLDAAFASADDLEQAAVASFNQHPDAGIITSFPGLGPLTGARVLAEIGDDRSRFQDAKGLKAYAGAAPITRASGKTKSVTRRKVKNNRLSAVGYTWAFSALTASPGARAHYDRRRDAGDKHAGGLRNLFSRLLGCLHHCLTTGQHYDEATAFPAPTKQPAAA

SEQ ID NO: 122774 - protein, 367 aa, unidentified
MKKVSTRAAAQSRNISQQKLTIGLDLGDRNSWYCVVDEAGQIAVEQRVRTNAKALQEAFGPMPRSRIALEIGTHSPWISRLLSELGHEVIVANARKVRLIGESRKKDDRLDAQTLARLARIDPELLYPVKHRSAQAQADLMLIRARAGLVRARTGLVNTARGLAKSYGERLRSCNVRNLNPEKAESLSPELQAALEPLLNAIESLSERIVEYNERIENLAQQSYPQVALLKQIKGVGTLIALTYMLTLEDPHRFGKSRDVGCYLGLQPGRRNSGKSEPQMHISKEGDPYLRTLLVQGAQHILGPFGIDCDLRRWGLKLAERGGKSGKKRAIVATARKLAVLLHHLWVSGEAYEPLHNSSRTTVVAAA

SEQ ID NO: 122775 - protein, 442 aa, unidentified
MSQTDPSRTDPTPAPTATDPGAGSSNAPFARLTHFGGFDWAGAEHQFVVVDPQGRIVLSLRFADDAEGWAQFRQKVAGFARPGVAIETSCGPAVERLLDVGLAVYPMNPKAAERYRDRKAPAGAKDDELDAWSFADALRTDGHGWRPLLAQDPLTTELRLLCRDEIGLIGQRTALVNQLRAALHEYYPAALDAFDDWVCEAPWRFVIAFPDPQALVKAGKRKWEKFLHAHKLYRPETSPKRLACFADALTFANPNAAVARAKGLLAVTLAKQLCLLQSQLDEYRGRIGKLFRDHPDHDCFGSLPGAGPKIAPRLLSELGGNRDVFRTAQALQNYAGTSPVTRQSGRSRVVTMRRACNKTLRATVHLWADLSRRACAWAEAYYRKKKADGMGHAAAIRCLGQRWVKILWKMWQTRTAYDEALHLKNQTEHGSWVIRLLPSVQA

SEQ ID NO: 122776 - protein, 312 aa, unidentified
MAMLSFCGIDVSKDRLDVVVLPEGWFFSVSNDTAGWAELVVRLRPLTVSAIGLEPSGGYERGIIRALLAAGLSVRRINPNKLRQFARARGVLAKNDRLDARLIAEYVAIMPTRVVQRDAAVERLAEIVTMRRQLCDEHVAAENQAAHLEDAMLRRLSKRRQTRLEADIRLLDKRLAEMVAANVALAQRYELLTSMPGVGPVLAFTLIALLPELGKMTRKQIAALVGLAPYDFDSGKLKGHRSIYGGRMPVRNVLYMAALSASRYSPALKAFHNRLADADKKSKVIIVAVMRKMITTLNAMLRDNAAWQPQSA

SEQ ID NO: 122777 - protein, 345 aa, unidentified
MKKVVAGMDLHSNNVMIGIMDMDGKRLAHRKVDCDLKEVVKFLAPYKSRLEKAAVESTFNWYWLVDGLKALDYPVVLANPARIEQYSGLKHADDTNDAFFLAELLRLNILPTGHIYDPDLRPVRDLLRRRMMLVHQRTALMLSFKSLYARTTGLEMGLGRLKELGVKEAQKLYENPANQLIAGMQIQHIDYLSQSIEKIEKVVLDCARHLPFYSKLTTLPGVGKILGMTITMEVGDIKRFASPGEFASYCRTVEAQRTSNDKKKAENNSKCGNKYLAWAFVEAANFARRFSPECRAWFDRKAAKTSNVIATKALACKLAKAAWYVMADGTDYQGTRMFGPAAKNQ

SEQ ID NO: 122778 - protein, 362 aa, unidentified
MRIIGCDLHARQQTLAMLDTTTGEVVAMILTHEGDNVREFYSALPRPVRVGIEATGSMQWFVNLMEELGMECLVGHPAQIRAAEPRKQKHDRRDADLILKLLMENRFPAIWLPSKELQDLRSLLRHRHQWVRMRTRIQNALQSIALANGLRRGPALWSHDGQSRIASLSLAPHTAYRRSELQAMYKQFEAEIEKLNQRVEQQASQRPGARLLMTHPGVGPITALATEVFLGNPARFADSKALASYVGMIPREYSSGGRQRLGGLSKQGNPLLRFLWGEAGAHAARKDPELQRFYRRKLVQKGLGKASVAVARKLGIRLWIMLRDQIEYHEFCRRGQKQQKSSGACAGMPETPYGAKSHRPVD

SEQ ID NO: 122779 - protein, 349 aa, unidentified
MDRTTYGLDLAKNAMQLHWVETQTGEIGRKKLPRTKLAEFFAQRQPARIAMEACAGAHHWARVLGSLGHQVELLPTKQVKPFVRSNKDDAADARAVWLAANQADIRRVPIKTCEQQTVQALHRTRSHWVSVRTATINVLRSLLYEFGVTLIGGRKAGLRALAQQRAQIDEQLPTTMSCLVNGQLEMLAQVQQHIDALEYEIAAQEQQLDNAAVLRKVPGIGVLGATALAAKLGNGQGWRSGRDFAASLGLVPAHSGTGGKTHMGGISKRGDPYLRTLLIHGARAVIAHAKNKPKWLEDLLVRRPLNVAAVALANKMARTAWALVAYGREYQSGWRNNLPTGGAEIHCTA

SEQ ID NO: 122780 - protein, 324 aa, unidentified
MNYAALDLHERTVQCVLKDQDGRIVKESKTVKDEGRILAFLDGTDASVVMESGRNHQHIYDVLKERGYDVTVAHPLMVKAIAYAKVKTDRVDARVLADLLRADMIPESYVPGRDIREIRDLVRRRHYMVKLRTMQKNKVHAELATRWLKYEGDPFTEDGKNYLRSLAIDAVNDYLETIEFLNRKIHQLDEKVRRVVESDKYAKLLMTVPGISYYSALLISSEIADIRRFPDHEHLCSYAKLSPGVRQSGETQHTSKSMGNSMMNWIMIQCTRIHVRRYDSAITRFYQQVSKRRGEKVAIVAAARKLMRAIYIMLKEEQAFRLDG

SEQ ID NO: 122781 - protein, 349 aa, unidentified
MFAGVDTHKDTLAVAVIDHAGRVVRQLELPNQDSGYARLLALLTSHNVVRVGIEGSGNFGWPAAIYLLKRDLNVVEVPPLMTSRERLSRPGQGKTDPVDAVAIARITAREPSLPPVRPMTGHAADLRVLTEYRDQLVNERTATANRVHTDLLWLRPGYQHQLPHLTNTAHLRAALELLSGDDSVRAAVTRSRLDRMLTLTDQLAELRIQIDALVKASGSTLPDVYGVGPVVAATIIGHVFDVRRYPTRHHFATANGTAPIPASSGRTVRHRLNRSGNRQLNRALYTIAITQIRADTEGRAYYLRKRAEGKTSREALRCLKRRLSDLIYRTLRADLANAAQRTPTLSIAA

SEQ ID NO: 122782 - protein, 366 aa, unidentified
MKKNSTVATRRKQIFKHKQLTIGMDLGDRFTYYCVLDEAGEVMVEQKLPTTRQAMKQVFGGMPSSRVALETGAHSPWVSRQLTQLGHEVIVAHARNVRLIGESSRKDDRLDARILARLARLDPRLLSPVQHRSAEAQVHLTVIRARAVLVGARTALVNAARGLAKSYGERLRKCGTQQVNRDSASVLSPELRAALEPLLAEVESLNQRIAEYDRRIEQIATEVHPEVARLKQVKGVGTLIALTYVLTVGDPRRFRRSRDLGCYLGLRPGRRNSGSSQPQLHISKEGDRYLRTLMVQGAHYILGPFGQDSDLRRWGLKLAERGGSNAKKRAVVAVARKLSVLLHKLWVSGEVYQPLRNHNAALGEVA

SEQ ID NO: 122783 - protein, 371 aa, unidentified
MKDKKNNAVSGDGSSQASVEFNGDRVLKLGLDMHYHQVTVAMQEDGGRIKTVGKMSHPAFGNWVEKKLKAGWQICSCYEAGASGYWLHRDLEQMGVENLVVAPKAMGQGGKQQKTDRRDSGELTDALERYLRGQDRALSVVGVPSVEQEQKRALIRYHRQIMADRNRYEARGKGLLCAQGIEVYGLWWEAKGWEELKHHPRLKEWMKEQLEGWRSKLLSAEGEQRRLRERVEALAPALLPKGLGTYSAVVLEYEMKGWERYENRRQVGSYTGLCPGIHLSDGRGKEGSINRCGNRAVRWTLVEAIWRLMIWQPLYRPVRQLAAGLVRSKRAKKRLVVKAARQLAIDLWRLHTGQTTAEKLGLIMQFHPHGD

SEQ ID NO: 122784 - protein, 357 aa, unidentified
MQLQDAFSIPKIFIGLDIHKKSWTVSIQTDLFFHKTYSMPSNAEDLYQYVERTFPNHAVDLVYEAGCCGFSAARYFLNLGWNVLVVNPSDVKTGDKERYQKTDALDSKNLSNQLKSGVLKGIFIPTEEHEQFMTLARHRTQVTKKLRQTKSHIKSMLLFHGIKVPEEFDNSNWTIAFIAWLEEIKFSTSCGDLALQGKIRMFKFIKSEYLEIANQMRAYCRKNNKKDYNLLKSIPGIGGYLASVILAECGDLRRFNNEGQFSSYIGLVPGMYNSGGSEKCLGITPRSRSQLRSYLVEAAWIAIRKDTEMQNYYRKHQGKNVKSVIIKVAHKMARRILSVIKTETPYQINRNLVLEEQ

SEQ ID NO: 122785 - protein, 365 aa, unidentified
MEYCNTSVRAIQPQAYDAFVGMDVDKRSIIGLQIDHLGVEKRLQMPNDAAIMIGHLKRHLPGKRVALVYEAGPTGFGLADELLQAGYDCMVVNPACVPTARGKKVKTNRLDAQQLAMQLRGGDLKGILVPNPKYRHLRELVTLRKMFMNESAKCKQRIKALFLRYGFPWPSSNASGTWSNALIQQLQAYECAPVLKYKLDSLINQMLFARIQAFYAQKEMRRFVAADPDLADSVRYAMSVPGIGWIVATYAIARLGDWQQLRTSPQTSSFFGLAQSENSTGDTIKRGSITKAGDPVLRSLLIQASWTAIRHDSELASCYQRIKDRRAKDKGACIAIVAVARKLATRLHCVLQERRLYHARAVAPV

SEQ ID NO: 122786 - protein, 371 aa, unidentified
MKKYSTFVGMDVHKNSIEIAIAQRGRNGEVRSYGKIDGTLDALDKVVRKLVSKGGRLHFVYEAGPCGYGIYRHLTAKGYDCSVVAPSRVPKKSGDRIKNDRRDACMLARLDRAGELTPVYVPCAEDEAIRDLTRAREDAKTDEKRSKQRLKSFLLRHNLRYAGTASWSKAHMRWLSDIKMDHPGQQIVLQEYIDTIGECSRRVQRLTDQIRQLVAQWRMAPIVKALQALRGVSLIVATTTVAEIGDLNRFENPTELMSYLGLVPSEHSSGQKTRRGSITKSGNGHVRRVLTEAAWAYRLPARVSRALLKRQEGLPEKVCDIAWKAQVRLCSRYRQLWAKGKPRQVVVTAIARELCAFMWAIAGEIDIPSTT

SEQ ID NO: 122787 - protein, 330 aa, unidentified
MTITTMAAAGKQYNHIIAFDVGKSTLFTATSAKGDATSEEIINTPAHVRRHLKRQIKHNTMADLGEMLVICEATGGYERHVLAIARELGLACHRAHATSVRHFARYKGTHAKSDPIDAATLVDYARQTPRLRLYEPPTKAVMRLRALSERRTQIIAMIGAEECRIEHAIDAMVKKSIKAIVRVLTREKESIEAQITKLMKSEKQLTKANKLMQSVTGIGERTVQTVLAFVPEIGQLTRGQVAAIAGLAPFAHDSGTTNKPRHIFAGRAVVRRCLYMAATVAVRHNHILKAFAEGLTRRGKPWKLVITAVMRKLIITLNAIMRDQEPWKHA

SEQ ID NO: 122788 - protein, 355 aa, unidentified
MHSVRYIGLDVHRDTISAAVLDAEGKQLMQSVLATRAAAILDFIHGIQGTLHVTFEEGTHSAWLYDLLVRRVAKLVVCNPRKNALLKSGNKGDAIDARKLAELLRNNALSAVYHGESSGLEVQHLARSYGMLTEDTTRVMGRLKAVFRSQAVSCAGKKLYGKRHREHYLAQLGTGNLRRRAECLYQELDALQPLRRQAKRELMAECRKHAAARWLQSVPFLGPIRAALLIGRVQTPHRFRTKRQFWAYCGLALETRDSAEYRVVNGQVERRRKPALIRGLNWNHNHELKNLFKGAATTASACSGVFREFYLGLLAKGMQPEMARLTLARKIAAITLKIWKKGEAFDAEHLKPQAA

SEQ ID NO: 122789 - protein, 412 aa, unidentified
MNIVYERCVGIDVHKRNVVVCAITPDAQGQRQKEQRTFSTMMPDLLRMRQWFQSLNVTHVAMESTGSFWKPIFNVLEGHMEVLVVNAQHLKAVPGRKTDLKDAEWIADLLQHGLLRPSFVPPAFQRELRELTRYRTSVIEERSRTINRLQKILEDTNIKLSAVASDLMGQSAREMLAALVAGEADPTVLAQLARGKMRAKHDLLVQALQGQFKPHHRVLISEQLAHIDTLDEEIERLSAEIAQRLRPYEAQLKRLETIPGIKRRLAQVILAEIGPDMQRFPSARHLASWAGMCPGNRESAGKRLGGKTRKGSPWLRTALVEAAHAATHCKESYLSAQYHRLVLRRGGKKATIAVGHTLLVIVYHVLADEKDYQELGGNFFDEHDRQAVQKRLVHRLEKLGYEVTLAPTSPAA

SEQ ID NO: 122790 - protein, 416 aa, unidentified
METKREVVCGADIHKQFLLATILSNSGQKIQARFDMDFEGLLSFRKWLLDHSCQKLAVESTANYWQPIYLIIGKDVEFVLANAYQIKHIPGRKTDVLDSEWIAELCLKNLIAPSRIFSGEYRDLRAITRTRENYVKMRSQIKNRIHQELESACIKLSSVLSDIFGKSGIHIIRGILSGSNIEDILNRIPSKKIKAKREEIRNAIQVNISPVQVDLIGRLLDSIDFLSKEIASIDMQIQTLTAGRQEDLKIAMSIPGMGITSATTILAEIGNFADFKTGEQLAAYCGLVPSVYQSAGKLITGHITKRGSPHVRRMLIEVAHAISRTKADSKLKRFYFRIKSRHGAKVAVVALARKVICILHHLIVNKEMFEDETKNKFRRVKSVRSSSSPEMIVSDAIQILIRAGYVVQKRSEQEGG

SEQ ID NO: 122791 - protein, 368 aa, unidentified
MLYLGIDQHARQITISLRDESGDVVQARQVSTQPEKVHAFFQQLTRERLTADESFVAVLEVCGFNDWLIRMLHEYRCHKVILIQPEERKLRKTDRRDAAALSELLWVNRDRLLQGKPVRGLRQVDIAGGTDQENRRLTTLRKDAGQARTRLVNRIRHILRRHNLQWQMPTKKFPSKSGLAWLKQLALPEIDRLEMDHLLADVEQVQQRRKELEQVIARRCGVSAEAVLLSSMPGVSYFTAVALACRVGRVGRFPRAASLANYWGLTPGCRNSGENNQRLGSITKAGSSMARWLLGQVTIKVLRRDARLREWFKRLKRRRGASIARVAVMRKLATVIWHMLSRRMTYAECRAVGEAGTKAREEQECGRE

SEQ ID NO: 122792 - protein, 438 aa, unidentified
MSALPLIDPKAAAIDVGSEQMHVSIAGGEPKVFGSTTAQLHALRDYLLSQGVSSVAMEATGVYWLCPYEVLEKAGLQVMMVNGKYVKNLPGRKTDMKDCQWQSTLHAHGLLKGGFVPAEHIRRIQDYQRLRADHISAAASSEQQMQKALERMNIKFHDVISDLTGVSGLKVVRAILEGERDPAALLGLCDEQIKKKKADRVLESLVGTWKTEHLFALRQGLAAWEFYRGQIRECDQALEQVLKELTADKPEPPGPLPTWGRRKKPNTPQIGQLRQMLWKLCDGKDPTTLPGVTDYTLLQLISETGTDLARNWKTDKQFTAWMGLAPGARQSGKRRGTQKRSRNRAGRILCVVARSVGKSVDRALGGFYRRLRARRGGLIANVALARKLAQMYWRVMVHGVAYVEHGLQRYQDRVAETEQRWLRKLAGKHGMILQPKAA

SEQ ID NO: 122793 - protein, 411 aa, unidentified
MKRFAGIDIGSERHVVAVVDEHGAVLLKPTPFGEEAAGYRRLMELLGSPQGCLVAMEATGHYWRNLFAYLIAEGFTVALLNPVRTRRFAEEELERTKTDAVDALGIARFAAQKDPPASQLAEEGLDELREVVRLRERLLQDFGDRVRQLHRALDLSFPEFTRYVRSLDSELATTILTHYPTAAALRTVSVKKLAGLRYDGRHRVGEELAHELLAAARISVGRHQSEPYRLRIRYACEDIVMLRRRLHQLKADIEQRLERHQVGKLLTTIEGIGPQTAACIIAELGDPARFGSVKALASYVGVIPRLRQSGKRRLSGRRMLPLGNARLRRALWMPTLSAIRVNPWLRAYYLRLRGAGKRPKVALIAAMHKLLAAIFSVARRRQPFVASLVSPPATIVAGGAVVDPAAGLTAR

SEQ ID NO: 122794 - protein, 456 aa, unidentified
MNRNRSKSRVDRTMPMVHPNAAAIDIGATMHMAAVRADRAPEPVRSFGTFTADLHRLVDWFTECGVETVVMESTSVYWIPIFELLDARGFAVFLVNARDAKHVPGRKTDVSDAQWLQRLHSFGLLRASFRPKGQIAELRAYVRQRERLLEYAASHIQHMQKALTEMNLQLHHVVADITGATGLRIIRAILAGERDPEALAGLRHYSCHSSAETIAKALTGSYRIEHLFALEQALSLYDAYHEKASACDVRIESVLKELIIHRGHDHGSAPPVSRRRNRTDQANALAFDLRAALFGLLGKDVTTIDGLGPYLSLKLIAECGDDLTSWPSAKHFTSWLGLAPSNKVSGGKMLSSRTRRAAGLLRLAAVTVGRTDTALGAFYRRLSSCIGKAKAVTATARKIAVLFYNAVRHGMDYVDPGASSYETRYRTRVINNLHRRAKTFGFVLQPLEPKAGAAVS

SEQ ID NO: 122795 - protein, 311 aa, unidentified
MNNTIGIDISKDTLDAHRLADGQHKQFLNGKTGHAQLVKWIGKQSDPLIIFEATGAYHRQLERVLCTHIIPFVKVNPKQARRFAQASGKLAKTDRVDCEMLAKMGAALQLMPKPFTAENLYDLRELLSARRALIKDRTAAKARKATVINALIKQQLEKRLRQIKNDIAKIDALMLDVAREDQYMSERLDILFSIPGIGVITALMILVDMPEIGALNNKQVASLAGLAPMSQSSGKWMGKARIQGGRPNLRNAIFMPALVAIRHNADLKTKYDQLVTAGKEKKVAITAVMRKLLVLANALLRDNRKSAEKAA

SEQ ID NO: 122796 - protein, 393 aa, unidentified
MICVGIDVAKDKHDCFILSSEGEVLADVFTIQNNAEGFDMLLQTIRRCARPEDKIKVGLEATGHYSYNILGFLLDKGLDTYVINPLHTNLYRKSLSLRKTKTDRVDARTIAAMLMSDVDLKPYTDTAYHNEELKSLTRYRFDKVRERAKLKQSVSRLVTILFPELEKLVPSLHLASVYALLIEFPGAKQVAGAHLTHLKATLSDASKGRYGRDMAVTLRDAARCSVGSVMPAKSLELQHTIRLIRELDAEIEDIETAIQSMMDEMQSPITTIPGIGVRMGAMILAEIGDFSRFDSPDKILAYAGMSPSTYQSGQLSLSGPYSHMEKRGSRYLRYALYNATKYVCLWDPAFAAYLAKKRGEGKHYNVALSHAAKKLVRLICALEKSQQSYRNAA

SEQ ID NO: 122797 - protein, 354 aa, unidentified
MIIIGCDYHPAFQQIAFVDTETGELQERRLQHREEAEKFYRDLAAQEMGVRVGMEASGHARWFERLLAELQFELWIGDAAEIRTKRVRKQKTDRQDAQLILKLMLKDDFPRIWVPSWENRDLRQLLWHRHRMVQARTRMMNQLQAVALNEGLRCKKRLWREQGRAQLESFRLAPWASRRRHDLLELLDRLNPTIAELSQAVEQEAEKCPEAQRLMTHPGVGPLTALAFVLIIGRAERFQCGKQIASYLGLVPLEDSSGNRRRLGHITKQGNSLLRFLLVEAAQVTVRSLPEWRGKYFHLAMRRGRKIAKVAMARRLAVRMYWMMRKGWNYEQLKKFGSHAGQPGHRDGVRLNTE

SEQ ID NO: 122798 - protein, 351 aa, unidentified
MKYIGLDCHKQYDHATMIDTETGEIKAKRLAHIKEDFSDFIGDRDGTRMVIESCRDWSRTYELSEDLVEEIILAHPLKVKAIASAKIKTDAIDSQTLARLLMADLIPQAHLRKAENRVKQRVISHRAFMVVMRTRVKCRIHDSVDSQLLPPDVLKAKPINLFSKKGMKWLTSLEWARDEDKKLVESHLRVMEAINQEISITNDMVKEIYEKDRDAQLLTTIPGIGVTLATLISTEIDGIERFRSPSKLCSYAGLVPSTHSSGGKTYHGKITSEGNRWLRWALVEAALPASYGDTEIKERLETLRAKKRANVAKTAMARWLLKVVYHVLKEKRAYITAYNNQTKARAAFYFA

SEQ ID NO: 122799 - protein, 314 aa, unidentified
MSIQESKVYVGVDVASKHLDLFFPDTRKHERIANDAEQIKSLCTRLKSNSQYMVVMEASGGYESILCTQLGNHAISYAVVNARRVREFARSMGADAKTDEIDARMISQFAAVLKPIATEAQSDEERRHSALVTRRSQLVDLITQERNRLKQTWDAYAKKSVQKMLKHLEKELEAIDKLLVKMLRNDTKNKRKIEILQSAKGIGDVSTSVLLAHLPELGKLNREQIAKLVGVAPMNRDSGGTTGKRFIMGGRGNVRAILYMSTLVAIRHNAKIRAYYKHLKSQKKESKVAIIACMRKLITILNYLIKTDQVWTTQ

SEQ ID NO: 122800 - protein, 344 aa, unidentified
MEHFAGLDVSVKDTSVCIVDDTGKIVREVKVASEPAALLAVLKNPAYRFKRIGLEAGPLSQWLFSALAEVGLPVICVETRHMRAALKAQINKTDRNDARGIAQMMRVGLYRPVHVKTLRSQKLRMLLTHRKLLQSKAIAIDNDLRGTLRNFGLKVGMVGTVRFEARIRELVENLPDLAALVEPLLIVRRTLREQFCILHRRLLAIVRDDEVCRRLMTTPGVGPVVSLTYRATVDVPARFRKSKSVGAVFGLTCAKYQSGEVDWDGRISRCGDEMMRVMLYEAAQSMMRSKKWSWLKAWAMQIARRRGMKKAIVALARRLAVIMHRIWVDGTEFRWTREQAAATA

SEQ ID NO: 122801 - protein, 421 aa, unidentified
MYQLAGGPYTAYVGIDWADAKHDICVQAAGSEERDFDRIVHKPERIEVWAQALYQHFGGPIAVALELTKGPIVSALQKYDFFVIVPIDPIRLASYRKTFTPSGAKDDPTDAEFALDYMLRHPEKLKVLKPQSVPMRKLSYLVEARDRLKGDQSRFVNRLIQALKQYYPQPLDWFSERNTVVFCDFLIQWPTLQKVKRARKTKLESFFKAHNVRFAHVIEARIDAIKAATPLTHDEAVIQAHRLQVEALVEQLRLTIQAMKRFDKEIVATAEHLSDYQLLFTPLPGAGNVLAPRLLAAFGEDRERYPCAEELQRRTGIAPVTKRSGQSEWVHWRWQCSKFLRQTFIDWSAQTINKSAWAGAYYRQQRAKGSSHQAAVRALAFKWIRILYRCWQDRSPYDESKYLEALRRSGSPLLQQLAEAA

SEQ ID NO: 122802 - protein, 421 aa, unidentified
MTRLPVEEFAAFVGIDWADAKHHVCLQAAGSQKREFSILEHQPDTIDEWVSTLRTRFKAQPIAICLELNKGPIVSALRKYDCLVLFPVNPLTLARYREAFTPSHAKDDPTDAELLLELLLRHRDKLSPLQPQSPTMRALEQLVEHRRRLVGDKVRITNRLTSTLKNYFPHVLQWFHDKDTTIFCDFLTQWPTLKAVQLARRSTLERFFRDHHVRYTDVITHRLDAIKSATPLTTDDGIITPNALLVQALVAQLRVTLHAIEEFDQAIAQRAQSHPDFPLFAALPGAGAVLAPRLLVAFGEQRDRYASADELQRYAGIAPVTERSGNKAWVHWRLQCPKFLRQTFVEWAAESTRHSFWARAYYQQQRDKGASHQAAVRALAFKWIRILFRCWQNRTRYEEAIYLNALKRRGAPLLHSLARGS

SEQ ID NO: 122803 - protein, 278 aa, unidentified
MEQYIGLDVSQKETAISIRQGNSRIWRGKCASDPTVLAAIIRKQAPHVKRVVFETGPLSTWFYHALSAEGLPVVCTEARHAQKILNETLNKTDANDADGLAQLAEAGFCKVVRVKGFDAMLTRTLIGVRKQVAGMSIQLSNQILGVMKTFGLIVPRSKGQVFEGHVRELLAGNDNLAKVMLPLVDAWRDIRKHVANLDRQVLAAARNSKAAKLLMTIPGIGAITSLSFSSAIEDPDNFKRSRSVGAWLGLTTRRYQSGEIDYDGHISRRGDSHLRSLL

SEQ ID NO: 122804 - protein, 310 aa, unidentified
MEHTTVVGIDVSKDRLDVHVLPSEEAWAVSRDAEGLAELCRRLAGMSGVVALEATGGYESIVAATLSSAGLPLVVVNPAQVRAFAKALGQRAKTDPIDARVIARFAEATKPAVRPLPDQATRLLADLLARRRQIVEMMASEGQRLRRTEVPRVRKSIERLVVAMKRELGDVDHDIDDTMRGSPVWREKEDLLASVPGVGRIIARTMVADLPELGTLGRKQISALAGLAPFVRQSGKWKGQARIGGGRPTVRTALFIGAQVAKRHNPVLKAFYERLITAGKSKMAATIAVAHKLLTILNAILRDKKPWQIA

SEQ ID NO: 122805 - protein, 345 aa, unidentified
MPIVGGLDIHRKQITFDYLDTVTGEVKRGQIAPADRAHLRAWLARFAGCGDVAFAVEGCAGWRYVAEELAAAGIAAHLGEPADTAALRGRKRHAKTDKTDARHLRSLLAEGRLPECWIPPAQVLEYRALLETYHDLRREHTAWVQRIHAVFFHQGAPPLGEGALRTEPGLEALRAAAAAHLSAAGQQQVATALDLLAATEAQLGPLRHQLREAARHLTGAKVLAERLYGVGPVTGLALTCWLAGKDRFSSSRKAVRFTGLDITVHSSDRKGPPGRLSRQGPPVLRWAVYEAGKTHARAAAPDHPYYAAVADRKNTKRAALSEARKIVRQACHILAELGDDALTAA

SEQ ID NO: 122806 - protein, 350 aa, unidentified
MKKVIKQSVGIDVAQKELVVCIGRLYDDLSTELYAHKNFVNTAKGFISLVQWALKLTESTVNIRFVMEATGVYHELLACYLADHGYSLSIILPNKISNYFRSLSIKTITDKTASEAITLFGLERNLEDWKRPKPEFKYLRQLTRERNQLVQERSMIKNQLHAEKSESDPNSSTLKRMKQRIELLNKQEKVIKEEIAMLAKKEKELKQELTLLCTIPGIGSLTAATILAETNGFELVRNKRQLASYAGFDVQEKQSGTSVKGKSRISKKGNKNLRQAMHLPALTAIRHDERFKLIFIRLVSKHGIKMKAVVAVQRKLLEMCYTIFNTQIGYNKNYLQNAHVSRQDHEMQMA

SEQ ID NO: 122807 - protein, 349 aa, unidentified
MTTQRLSYVGQSVYVGVDVHKDTYAVTCVCNKQIVKTATVKADPAGLTASLSQWFPGARLYTAYEAGFSAFVLHRALTKAGLMNIVVNPASIAVAANDKVKTDRRDSKKLAIDLSDGRLQGIYVPTEDEELARLLPRTRAQIVEHRATIARQIKAKLHQFGLIAPASRRLISNRYLREIDAWPLPPDLRVRLTFLAEQWRFATRQLIEMRRLLREQAKAHPAIEQVSRSVPGIGEVVARTLATELGDMTRFANERALFSYTGLTPSEYSSGPSVRRGHISRQGSSRVRHLLIETAWRALPRDAVLKEIFDRIAATRGKKRAIVAIARRLTGRIRACFRQGTTYAVGTYA

SEQ ID NO: 122808 - protein, 345 aa, unidentified
MEPMYYIGLDVHKRKISYCVKDASGQLHSEGSLPATRFDLDSWMKTLPRPWSAAMEATMFTGWIYDHLKPHAAALKVAHPLMLRAIAAAKRKNDCIDANKICDCLRCDFLPECYMASTAIRERRRTLRYRNLLVRQMVQMKIKTSSLLMEAGVSYNKERLHKAAYFRELLATNPDIDDSLRSLLRQCRETVLRLSKTENALIYSLQHDRLLAERVERLMSIPAIGPITALTWALEIGDVQRFSSAKKAVSYCGLCGSEKSSGSTVRRTPLSKQRNKHLQTTLIEAAKMAPRYSPSMALLYDREKQRGNANRATLAVARKLVAYLVAIDRGQTHFLVLDRESRIAA

SEQ ID NO: 122809 - protein, 414 aa, unidentified
MRVVHERCAGLDVHKSSVVACALLPEGKQSRTFGTMTGQLEQLAEWLRGLDIQAVAMESSGVYWKPVFNILETVGFELLVVNARHIKAVPGRKTDVKDAEWIADLLRHGLLKPSFIPNREERELRELTRYRRTLIEERAHEVQRLQKVLEGANIKLEDVISDVVGLNGRRFLSALIAGDYDPEAVAATANYGLQRKRELLAQGLRGSIGSHQRFLLDQLLSHIDFLEQRIAALDQEVKQRSRPFEAAIAHLDQIPGVGSRAAQEILAEIGTDMTRFPTHRHLASWAKVCPGNNESAGKRRSGFAGKGNRWLRSILVECAWCASRKKDSYFKTQYHRLAARRGKRRALLAVGHSLLTVIYYLLRDGVLYQDLGSNYFDQRDRSQIARQAIRRLERLGYQVALTESRLESTFRVNG

SEQ ID NO: 122810 - protein, 357 aa, unidentified
MLSSNVKYIGLDVHKEAVAIAVLNGAGRLVMESIVETKVNTLLDFLQGLRGELHVTLEEGTWAAWLYDVLKPHVAEILVCNPRRNALLKEGSKSDKVDARKLAELLRSGMLRAVYHGEHGLGTLRELARSYLTISKDQRRVMSRLKALYRSWGIPCSGKQVYTPRNREQWLNKITQPGVRRRAELLYQQMDGLLVVRHTVRGELLAESRRHPAIKILRQIPLIGPLRATLLLALMQTPHRFRSKRQLWTYSGLAVETHDSAQHRYVDGQLQRSKKPQQIRGLNQNYNHEMKEIFKSTALSASRCAGPLQDFYEGLLAKGMKPDMARLTLARKIAAITLTLWKKGERFDAEHLKSQAA

SEQ ID NO: 122811 - protein, 344 aa, unidentified
MSNLDTCGIEVGAKELLLRLRRQGELQPLRSFTNTPEGREMVVRYLRRAGRVVRVCLESSGLYGLDLALALSAAPGLEVMVANPRAVRHFATALMKRSKNDPVDAGVLEEFAARMPFRAWPRPSPAALALHALARRLRELVEIQVAEKNRQHAAGISETTPTVVRRDLARSLGAQQRAIERLTRQARKLIAQDPQLRERYELLDSIPGIGETSAVQLLGELAVLAPDLEARQWVAYAGMDPRQYSSGSSVHKKPRISKAGNKHLRHSLFMPALVAVQHDPYLGAFYQHLLAKGKFKMQALVAVMRKLLHAIHAMFKNHQPYDGSKLFRLPSVPAQEVPSAAVVA

SEQ ID NO: 122812 - protein, 322 aa, unidentified
MSVSNQRCAGIDVSKGTLDIAISNIASQFTVPNGTDGFTQVLRELKRNETRLILMEATGGLESCVACYLQSEGFDVVVINPRQARDFARAMGYLAKTDRIDARVLLQMSEVINQHPERERYIRPLPDAHRQILAAMVVRRRQLTSMLTAERNRLHPSHPLSHASIRSIISALKGELARIEGEMAIHIKEHFSELSELLNAVKGVGSATVAVLLAEVPELGSLSRREISALIGVAPVNRDSGTMRGRRTVFGGRASVRTALYMSALVGTRHNPVIKEFYTRLVAAGKPKKVALTACIRKLLTILNAMLKKNEAWDPMYHQHAS

SEQ ID NO: 122813 - protein, 352 aa, unidentified
MHASTVAIDLAKEVFELAFADAQGRVIERKRLSRRAFIRSLETRPPLRVLMEACGGAHGWARRFQRQGHTVRLLPARDVRPYVRGNKTDRNDVAGILEADRCAGMAEVPVKTAEQQGIQALHRLREHLKAERTATLNLLRGILREFGVAVPLGSAKVPAAVRDALEDGDNEVPMALRHSLAEQIDRLSQLGRDMVAIEQRLEELASRDVAVQRYRTVPGVGLLTATALRASAGDLSRFRSGRQFSAWLGLTPREHSSGRQRRLGGLTKRGDVYVRTLLIHGARAVLQAARMKQRRGHALDPLKAWAMKVQDSRGHNKAACALANKLARRLWAMEHHGTPFDPRHVSERPRAA

SEQ ID NO: 122814 - protein, 408 aa, unidentified
MTVVGIDVSKGKSMVAAMKPGGELVAAPYEVRHSDIELSRLALDVLCMEPDTRVVMEATGRYHEPVAALLHSEGIFVSILNPLLIKQSGAGSLRKVKSDPKDALKIAKYGLDNWSTLREYTPTEAIRQQLKLCERQCDLYSKNIVMLTNNLISLSDKTFPGVNELFSSPEKADGHLKWVDFYRTFWHCDCINRMSPDAFGERYKKWCKKKGYHFSADATDALYAASCGLYTTLPRDNNAKLLVTVAADQLIALRENQSKLEAEMLNLCKQLPEYETVMAMYGVGKSTGPHLMAELGDIRRFPHRSSIVAFAGVDPGVVGSGKMQRSSVATSKRGSPQLRKALFQVVSTYVKRKPENEAVYQFYAKKRDEGKPFFVCTTAAANKFLRIYYARVKECLNAAESAVQTEEG

SEQ ID NO: 122815 - protein, 365 aa, unidentified
MQKISTMRTSGRKIFKGQLTIGLDLGDRSSSYCVLDEAGEIILEQKVPTTAEAVEQTFKRMPRSRIAMETGTHSPWVSRVLTELGHEVIVAHAQKVRLIVKSQRKDDRMDARALARLARIDPELLSPVQHRSAQAQLHLTEIRARAGLVSARTALINAARGLVKSYGERLQKCGAFQVSREIGSGLSAGLREALEPLLREVESLNERIKEYDRRIEKMAGEKYPETALLKQVKGVGDLIATTYVLTIEDPHRFRKSRDAGCFVGLQPGRRNSGESEPQMHISKEGDEYLRKLLVQGAHYILGPFGEDSDLRRWGQKLAARGGKNGKKRAVVAVARKLAVLLHRLWVSGEVYEPLRNSQKAITVAA

SEQ ID NO: 122816 - protein, 430 aa, unidentified
MEEVVEQELYVERIAALDLGKAVLEACVRLPHPTRAGRRVQEVRTYPTTTARLLELADWLRCQQVTRVVMESTSSYWKGVYFLLEAEGFDCQVANAREVKNVPGRPKTDKIDAVWLAKVAERGMFRPSLVHPEPIRRLRDYTRYRRSLVRDRARERQRVEKLLEDAQIKLSSVISDIFGVSGRAMLDALAGGQRDPKVLADLARTRMRGKTTVLVEALTGFFTDHHGELLAMMLNNVDRLTEQITALEARIEELVAPFSRQVEQLAEIPGIGRTAAAEIIGEIGVDMTRFPSAAHLVSWAKFAPAVHESAGTKKQKKRPKGNPWLAATLGNAAGTQTRSRTFLGARYRRIARRRGKGKAIVAVGNSILTIAWHLLSDPDARFHDLGADYYDTRINTERRVRSLAAALQAATGQKIIILNGKAVIIDPAAA

SEQ ID NO: 122817 - protein, 465 aa, unidentified
MTADKKLWRNRKERKQWARRLQSEDPGLEVVHPHAAGIDVGNGSHYAAVRPERDPEPVRRFECFTADLHRLADWLQNCGVRTVAMQSTGVYWIPLYEILDERGFEVYLVNARHTKNLPGRKSDVQESQWLLKLHTYGLLNNSFQPSAEIRVLRTYWRQRAEHVHGAATCIQRMQKALTQMNVQLANVISDVSGLTGQTIVRSIVAGEHDPRKLAELSDPRIHASREEIAKSLEGNWRPELLFVLQQEVEMYDTYQRRIAECDQQLQKHLASFADPVPPQPPQGEAKGKKAKPAKNAPRFDLSSELQRITGVDLTRIDGIDVMVAQTLVSEVGLDMSRWKTEAHFASWLGLCPDNRISGDKVLGKGTRHVINRAATALRMAANALMRSRTYLGAQYRRLRTKLGAPKAITAMAHRLARLVYRMLKYGQRYVDKGAEYYEQRYRQQQIQLLSKKAAKLGLRITAARA

SEQ ID NO: 122818 - protein, 369 aa, unidentified
MNKFSKYVGLDVHQETIAVAVADTAGEVRYMGEIVNTPEAIEKVVAQLKRGTGRLALCYEAGPCGYTICRQLRGLKQDCQVVAPSLIPKKPGERVKTDRRDALSLARLHRAGELSPVWIPDEAQEALRDLTRAREDMKHLQRQAKQRLLSLLSRHGHRYMGRSRWTQAHWRWLEGIKFARPEQQIVLQEYIDTVQACGRRVASLDREVETAAHASPVWPVIEALMALRGISLLAAVTVVAELGDLARFSGAPQLMAYLGLVPSEHSSGKRERRGGITKTGNSHVRRVLIEAAWTYRHAARKTAILQRRAERTAPEIQEIAWSAQKRLCQRFRNLMARGKLKNQVCTAIARELVGFIWAIGQHVIPLSRA

SEQ ID NO: 122819 - protein, 321 aa, unidentified
MSKAFLGIDISKASFDVAILLPNDNIKTRKFSNNKSGFKLLKVWLKLHSYENLHACMEATGIYGEPLANFLYQANFTVSVVNPLKIKGFGMSELSRNKTDHSDSKLIARFCKAMNPPVWHPIEPERKELQALVRRLEDLQNLLRQENNHLEATLSINIKKSIKLVIKFLEKQIEELKNSIRDNINNDPHLKDQKTLLETIPGIGEATIIQIVSFIDVKNFNNIKQLTAFIGLNPKQRQSGTSVNGQSKISKIGNSSLRKAFYLPAIVAKRYNPTIKIFCERLKASGKQTMVIICAAMRKLIHIIYGVLKSGRPFDAALVNI

SEQ ID NO: 122820 - protein, 360 aa, unidentified
MNTLTQSHPTEICQAIKLGIDAHARFYYVARQVDGATPQPVQKMTFEGLLHFVAKQQRLAREVFTCYEAGAFGYHLHRRLTKMGVTNYVVQPQDWDEQGKGVKNDRLDALALCQRLDRFTRGNRKAFSIVRVPTPDEERERALSRQRQQIVRERQLLQAMGRSLLASHGIHVTGKWWKGRTWSLIRSEAPGWVVERLEVFIRLIEPIDAEEAKLTAVVEQVGGEVKIPRGVGALTFEVLRREVGDWGRFTNRRQVSSYTGLCPREHSSGGKRRGGSINKSGNPRVRAMLVEMVWRMTRWQPTYHALKKWLSVLGDPSRSAAARKKAIVAVARQLAVDLWRLFTGQTTAEKLGLVYLPDAA

SEQ ID NO: 122821 - protein, 343 aa, unidentified
MDYFAGLDVSVKETSVCIVDDAGKIVREARVASEPEALLQVLTNTIYRFKRVGLEAGPLSQWLYSVLAEAGLPVICVETRHMRAVLKAQINKTDRNDARGMAQMMRAGLYRPVHVKTLRSQKLRVLLTHRKLLQSKAIAIENELRASLRNFGLKVGMIGTMKFEARIRELVERLPDLAVLVEPLLIVRRVIREQLGILHRRLLAIVRDDDVCRRLMTIPGVGPVVALTYRVTVDAPARFRKSKAVGAVFGLTPAKYQSGENDRTGAISRCGDEMMRIMLYEAAQSMLVRTAKWSWLKAWAMKIARHRGMKKAIVALARRLAVIMHRMWVDGTEFRWTRELPVA

SEQ ID NO: 122822 - protein, 375 aa, unidentified
MDENSAVYVAFDTSKLSNAVAVAESGRSGEVRYLGEIENTPEATSKLVRRLSKKHARLTFCYEAGPTGYGLYRQLTKLGHECIVVAPSLIPQKPGNRVKTNRLDALSLAKQLRAGELTAVWVPDDHHEAVRDLSRARQAAKESERRKRQQVSALLLRQGRVYAGKTSWGKAHMTWLASQKLEHLEQRLALEEMLHGVRQEGERIKRLERAIAEAVPRWSLGGSVTALMALRGIDLIAATTLMAELGDLTRFGSARELMGYLGLVPSESSTGDRVWRGGITKTGNRRARRMLVESAWTYRYPPRVGAAKLRRVAAAPPEVRDIAWKAQVRLTARYRALMRAGKPDVVAITAVARELAGFVWAVARAASPPSLAPAE

SEQ ID NO: 122823 - protein, 349 aa, unidentified
MTLFVGLDVSVKETAVCIVDDAGKVVREQKVPTEPDDIVSLLASIGEDYGRVGIEAGPLSQWLVNGLTAAGLPVVCVETRHMMALLKAPQINKSDRNDARGIAQMMRVGLFKPVHVKTQMAQEQRMLLTSRKLLQRKLLDVESDLRGTLRNFGLKVGVVSAGKFEARIRELVAGYPRLALVVEPILAVRRVMRQQFAVLHKMLLDTVRHDPVCRRLMTAPGVGVVVALTYRATVDQPQRFIHSRAVGAHVGLTPRRHQSGEIDYDGGVSKSGDTMLRTMLYEAAQSLLTQSGKWSWLKAWGMRVAQRRGMQRAIVAVARRLAVVLHRMWVDGTEFRWSNSTTAVPSQAA

SEQ ID NO: 122824 - protein, 387 aa, unidentified
MPQANDLSRCLVTLEQDNTLIAVIELSQASWLVAGIVPAIERQPVKKIEADEVALLRLLERWRDEATKAGRRITRVCVAFEAGRDGFWLARWLRARGIEAYVIHPSSVAVSREHRRAKTDRLDTELLKRAFLGWLRGERGHCTMAAIPTVEEEDAKRPNREHASLVGERTRIVNRMKSTLARLGVRGFKSTLRRASERLGTLRTPEGMPLPPNTLAELGRDMARLRFVMDQIKEVEAARFEQLARRPEEGAHAMIRLLARIVGVGIETADMLVREVLSRNLRDRRAVARYAGLTGSPDESGRRRREKGLAKAGNARVRHGMVQLAWRFLLFQKESALARWYRERTADARGGTRKTMIVALARKLLIALWRLVTTGQPPEGVVLRPAT

SEQ ID NO: 122825 - protein, 466 aa, unidentified
MQPFYMGLDVSKGYADFMIIDHRKQPVIKGFQLDDTFSGHSCLYDVLSRFFADHPDATLFAAMESTGGYEDNWYNALRHFQGVLNIRTARLNPLGVVHNSKADLKKNTTDKISAQNVAEYLVAHPEKVTYQQDDQMAGLRKQWGFIQMLTKQCTQIRNQFNTLLYTAFPELLNYCQDGVPDWVLKLSVKYPAAVKLKNARVNTVAKVPRITIQRAQKLIAQAKDSVASTTDPVTQQLIKDTARQILRLKQTIATQKLRMAKQCQVPEIKLLKSFIGISDWSAIGLLIEIQTIKRFASAKKLASFFGLHPVYKISGDGSGSIAMSKQGRAAPRKILYMVALSAINSNPLIKQLYEKHQQRGKHNLSAIGICMHKIVRIIYGMLKNNQPFDPNIDLAHQQRGIKAAAKGRVESKARRFQDYDDSAPVSRRQRKKRLERKQSHSVADTKSGISAPVPLGNILADILPQL

SEQ ID NO: 122826 - protein, 358 aa, unidentified
MTSMPDPAPRITGGVDTHRDFHVAAALDEMGTALATAQFATTRAGYLDLVAWLESFGEVARVGVEGTGSWGKGLTRVLTQSGISVVEVIRPNRQTRRRYGKSDITDAIAAARAVLNGEASAQPRDPQGPVESIRLLKVARSSAIKQRSAVANQIHAVLSTATEPVRGPLTTMTLVQIINRVTRYRPGDVSCPTQAAKLALKTLGQRHRNLSTEIETIDEHLTTLVELAAPPELINMFGVGTQTAAELLITAGSNPQRITSEASFAALCGVSPVDASSGKQIRHRLNRGGDRQANSALYRIVIVRLRHHQPTRQYMERRTAQGLTKKEIIRCLKRYLAREIWQHLTNHQTHQHTIPKAA

SEQ ID NO: 122827 - protein, 368 aa, unidentified
MNTDKYVGLDVHKDTTVVAIAEGGREGECRVYGTISSDLHALEKLLRKLGGDGVCLHVVYEAGPTGYVIYRRLAQLTIDCIVVAPSRTPQPQGQRQKTDRRDALMLARLHRAGELTGIHVPDAVDESIRDLTRARADAVHDLTRAKQRLKSFLLRQGYRYSGKANWSEAHQRYLRELVLPLPALKAVLEEYLLAISQRLAAVERLDELIAVQVPQWKMYPAVQALRCLRGVQLNAATVIVAEVGNIHRFAHPRHLMAFLGLVPKEHTTGDSRKLGGITKTGNAHARWMFGEIVQHAFLIPKVSAQLALRQQGRPLAYRELGWKMQTRLYKRGRHLLGRGIIKPKVTVALARELCGFVWALLRQVPACA

SEQ ID NO: 122828 - protein, 323 aa, unidentified
MTPHLQGRDQQIMNNCIGIDISKNTFDVHCLADGSDHHIDYTEKNIRDTVRHFVSAKPELIVMEATGGYEIPLAEELFAAGLPVAIVNPKRIRDFAKAIGQTAKTDRIDARVIARFGATLQPPATDAPDKNVVRIRVLTARKRQLKKMRTAEKNRTEHSRDEFTAQSLQTVINTLNAQIAAVDEQVRTLIPASPELKQKAEIIQSFPGIGEKTAAALVTDMPELGTLSRRQAAALTGTAPINRDSGQFRGKRMTGGGRCEVRTMLYMPTLAAIRHNPVIRSYYNRLVSGGKEKMVAVVACMRKIIVIINCMAAKNESWNPNFA

SEQ ID NO: 122829 - protein, 440 aa, unidentified
MAKPKNKISVVNNNTAGIDIGSRKIFIGIADKPVVSYDTFTDDYLHAVTYLKTNNITSVAMEATGVYWISLYDILDQSGFDVILCKADQAKNIPGRKTDVADCQWIQQLHSYGLLRSSFIPPQHIRTLRTFVRQRRTNLQLASDHIRRAHKALELMNIKLQNVITQINGKSGLAMLTAIINGNHNPENLAALCEESILKKKKEAVIKSLKGNFSDENIFLLKQAVDAYLFYLKHVDDCDKQIENHLSQITQELPRPEKLNKPKPIRHHKPNIDDLHLKLMKLTGGKDASQITGLTDSTLLQVISEVGTDLSRFPTEKHFTSWLGLAPNCHQSGLTNKKKKFKRHTSAGQIFRLAAQAIAQSKHLALTSFYHRIKARKGSLGAIKATARKIAVIFYNVMTKGIEFVEQGIKLYEQKIKERQIKYLHKQAHRFGLTLIAQVE

SEQ ID NO: 122830 - protein, 416 aa, unidentified
MEVIVSRCAGLDVHKNTVMACVRVPGPNGGRTSTVRQFRTFTAGLRQLRDWLVAEQVSQVVMEATGVYWKPVWHVLDATPGLELMLVNAHAVKNMPGRKTDVADAVWLAELGECGLLRPSFVPPPVIAQLRDLTRYRKKLIEERARETQRIQKLLEDAGIKLDSVVSDILGVSARQMLEALIAGVRDVAALAELARTRMRPKIPQLRQALEGRFGAHHALMLRMHLEHLDQLSVSIDRLDSEVDRVIRPFRSALQRLITIPGVGRRTAEVIIAETGADMRRFRTAGHLASWAGMCPGNHESGGKRRSGRARKGNAALRAALCEAAWAASHARSGYLPAQYRHLLRTFGKKGQTRAVFAVGHSILVIAWHLMAHDRDYADLGGDHFTRATDAEARERYLVRQLEALGHKVTLEPAAA

SEQ ID NO: 122831 - protein, 353 aa, unidentified
MITIGVDAHKRVHVAVALDEAGRELGQWRGPNSTAGWQGLAQWILALGGDRQWGIEGAWGYGRGLAQHLVAAGETVCEVNARCTASGRRSARRPGKSDRLDARAVALLVRQEAPTLPQVQAEDETAVLDLLTTEREQALSEATRLRNQIHALLLQLDPEYQAHLPVLKSRASLAALETYIAPGGGPLQLERAASVRRLAQRLRLALTQAEELASRIRDSAAEDFSPLTRLCGVNLLTAGTLAGVLGPGRRFATDAQLAAYAGVAPLEASSAGLVRHRLNRGGNRRLNAIVYRIALTQAHHSSEARAYRDRRVAEGKTRREAIRALKRFIIRAIWRLWQECRSVSNTSLEVRAA

SEQ ID NO: 122832 - protein, 338 aa, unidentified
MFIIGVDPHKGSHTAAVLDRDEQLVGEIRVRADRHQRDGLLSFATRFEPRTWAIEGATGTGALLAQQLVAAGEVVLDVPPKLSARVRLLATERSDKTDAYDARSAAVVALRHPGLRVVAVEDHAAVLRLLAKRHHDLVAHRTRVVCRLHAVLCQLVAGGLTRNLTATRAAAVLRRIRSTNAVTQERRRLAVELLGELRRADTDLTELKARISAGVIASGTTVIDVFGVGPTMAAYLLGYSGDIRRFPSAAHYARYNGTAPIEASSGERIRHRLNPRGNRQLNHALHIAAVTQIRNQTPGRAYYDRKVAEGKTRKEALRALKRRISDAVHRQLLADATR

SEQ ID NO: 122833 - protein, 360 aa, unidentified
MFTERTSVGLDVHARSIVAAAIDTQTGELHRARLVPSSQVVIDWLAGLAGPVAVTYEAGPTGYWLCRALTGAGWRCEVAAPSRLPRASGDRIKTDRRDALKLAEALRADQVVSVAVPSVAREDARDLTRAHNDARLELMSARHRISKMLLRRGIVYSGGTTWTITHDRWLRAQRPPGRGARAAFDDYYDNVVTITARRDRLKDEILAMAADSEFTQISDRLACLKGISTLTGFALAAEIGDWHRFTGSSIGAYLGLVPAEYSSGDKTVRGPITLAGNAHARRLLVEAAWHHTPGYRPSAALRARWDKVTDPNIRARAHAGNRRLATRRGALANRGKDSRITNTAIARELAGWCWSLAVMD

SEQ ID NO: 122834 - protein, 318 aa, unidentified
MSSEPVFVGLDVSQATLEVALRPTAEAWPVANDEAGIAELVARLRRLKPALLVGEATGGFERPVVAALAAAGIPVVVANPRQVRDFAKATGQLAKTDRIDAAILALFAERVRPKPRPLADEAAQLLDALLTRPATPRDAGGREEPAGGCAPAAPPRDPAAHSLVGASAGRRHGRVGGPDRGEPRVARPGRSAAERPGIGPIVSAVLLGELPELGSLSHKQIATLVGVAPLARDSGTLRGKRLIWGGRAPVRTALYLAALCGRRWNPQLKVFYDRLIAAGKPKKVALIACARKLLTVVNAMVRDHERWAVPAPSVQHSC

SEQ ID NO: 122835 - protein, 370 aa, unidentified
MKHTDKYIGLDVHKDTITVAIAEGVRLGEVRQYGKISNDLHALEKLLPKLGGENVRLHFVYEAGPTGFVIHRWLLKRGLDSIVVAPSKTPTEKGGRQKTDKRDAEQLARLHRAGELRAIHVPDELDEAIRDLTRGRSDAVDDLRRAKQRLKSFLLRHGYKYQGKADWSEAHRRYLRELVLPIASQKAVLEECLMAITDATNRLQRFDDLIAAQVPQWRMYPAVQALMCLRGFQLTAATILVAELGNVRRFEHPRHLMGYLGLVPKEDTTGDSRHLGAITKAGNCHARWILIEAVQSSFLPPKVSAQLSARQQGQPKLYHELAWKTQVRLFKRGRHLLSRGLMKQKIIVALARELCGFVWDLLRQVPEPKG

SEQ ID NO: 122836 - protein, 308 aa, unidentified
MAKPVEKITLGIDVAKDKHAIYNWQTEKLTMLPNERSAIKTFLKAFHGPVQIAIEPTSHYHLVMIEEAHTLGYEVYLINPRQLVHYRQAVNVRNKTDPLDAWLLARYLEREGSQLRPFKPQDPRAQRLWCLILRRATLVKSRQQIRQSLAGTQLPIKGLLTQFQRMLGYIDRQVIILIKELGWWSDYLYCHSIPGIGDGNASALVAAYHRGAFASSDAFISYLGLDVKIRESGYFKGRRKLTKRGEPELRRLLFCASQGARSYRRFADYHQRQLDKGLSKIAARVILARKLARIAFTLMRNEEMFIKH

SEQ ID NO: 122837 - protein, 387 aa, unidentified
MRAVCGLDVHKDSVFLCILCETGEIIEKVFGVLTHQLREMRRMMQSHGVSEVTMESTAVYWIPVWRVLEPHFHLKLVNPYFIKQLPGRKSDVKDAQWIAECTLKDLVRGSFVPPERIQQLRQYDRRIFDLDAEIVRKLAKLDAVMQRCNIRLSNYVSNTDTKSYKNVVRKLCEGVTDPEELIKEIYSRITNRHGRETILAALTGVVSDAEKDTMRQLRDELDLAERHKQECMDKMSHVCRTYYPEELRRLMTIPGIGERAATSLIAEIGVDMTKFQTAAHLASWSGLKPRNDESNKKIKSRRITHGNIFLRKTIIECAWGASRTKDCFFSRFSFHQTQVRKKNKMKVLVAVARKLLIAIWHVLHDETDYKDFYAKNDCETSGSESNG

SEQ ID NO: 122838 - protein, 360 aa, unidentified
MQEQINKLSFKGQSIYAGIDVHLRSWSVTILSEHNHHKTFTQPADPTRLAAYLHTHFPGGTYYSVYEAGFSGFWTHFRLESMGIKNIVVNAADVASTQKEKLQKDDAVDSRKLARELRSGDLSGIHVPCISTLEDRSLVRTRSALVKDMSRFKQRIKSHLYFYGVRFPDQFEKSGTHWSKRFMKWLKEDICHRDGCGKHALEILIAEAEQQRKLLLEVTRKVRSLSNDAKYADKIRLLRTIPGIGFITSISLLTEFENINRFHNTDHLAAYVGLVPNRHTSGEKENVGEMTFRGHRLLRSYLIESAWFAARLDPALSLCFNTCCRRMESNKAIVKIARKLLNRIYYVLKNEKEYVCSVVK

SEQ ID NO: 122839 - protein, 371 aa, unidentified
MQKKALYVGLDVHKASISITVAEDGRDGAVRFIGAIPNTPPDIAKLAQRLSKDGHRLEFCYEAGGCGYGIYRQLLNLGHSCMVVAPSLIPRKPGERIKTDRRDSEKLARQHRVGDLTSVWVPDPVHEAIRDLVRARMDATAQLTRARQQCLAFLLRHGRIYGPNRKNWTLRHRRWLGLQTFEQAPHQIVFQDYVEAAWTAQDRRDQLEARIAAMLPDWSMAPLVEALRAMRGLDTISAVIFLASVGDLSRFEAPRQLMAYLGLVPSEQSSGTRVWRGGITKAGNSEARRMLVEAAWSYRYPPRLASEKVLIVERQEKPVRDIAWKAQVRLCGRYRKLSATGKKPTVVVTAIARELCGFVWAIGQEVAPAPS

SEQ ID NO: 122840 - protein, 340 aa, unidentified
MSEITTIGLDLAKHVFQVHGIDAQGTTVLRKRLRRGQVLAFFSRIPRCVVGLEACATGHYWARELRALGHEVRLMPAQYVKAYIKRNKHDAADAEAICEAVGRPTMRFVPVKTAEQQATALLHRGREQLVRQRTMLVNALRAHLAEFGIVAARGLRNVSQLIAIVRDDADIRLPAVAQQVLQVLANQIEQIETAVAALERQLLTWHKTNPVSQRLTSIPGIGPIIATAIATTVADPRVFRSGREFAAWLGLVPRQNSTGGKTRLGGITKRGNRYLRRLLINGASANLLRSKATKADPWVIGLRRRRPPLVVAVALANKTARIAWAVMLREKEYQPRAVAA

SEQ ID NO: 122841 - protein, 360 aa, unidentified
MQLQDAFSIPKIFIGLDIHKKSWTVSIQTDLFFHKTYSMPSNAEDLYQYVERTFPDHAVDLVYEAGCCGFSVARYFLNLGWNVLVVNPSDVKRGDKERYQKTDALDSKNLSNQLKSGVLKGVFIPTEEHEQFTTLARHRTQVTKKLRQTKSHIKSMLLFHGIKVPDEFDNSNWSKAFITWLENIKFSSSCGDLALQGKIRMFKFIKSEYLEIANQMRAHCRKNNKKDYNLLKSIPGIGGYLASVILAECGDLRRFNNESQFSSYIGLVPGMYNSGESEKCLGITPRSRSQLRSYLVEAAWIAIRKDTEMQNYYRKHQGKNVKSVIIKVAHKMARRILSVIKTETAYQINRNIVPIAIGVE

SEQ ID NO: 122842 - protein, 418 aa, unidentified
MKIVYPICCGVDVHKTFLVATLITSQGNTPRYSKKRFSTFNSSIRQFKQWLVDNNCFDVCMESTGKYWVPIYNLLEDTIRITIANPKWVKAVKGNKDDTKDSKWIGELFRHGLVPGSYIPEKPIRILREYTRYRSKLVSCKSSEKNRFQNALTVCNVALDAVVSDMFGKSASSITDYLLSSESFDPKHCVSLLQKSLKKKADIVIESIEGYQITTEQKERMIMVRSHLEYVQQSIVKLDEKLDKMITPYKNTISLLCTIPGVDRTSAITIISEIGTDMSLFANPKRLCCWAGLTPSNNESAGKKKSVRISRAGVYLKPALVQVAHASVKSNISPYYKNKYERIYKRRGKKRAIIAIARMILTAIYHMFVTGETWNPSDLFKIDIPQEMLEKQKEKAIKQAVKLLISNGLIKATDISVA

SEQ ID NO: 122843 - protein, 472 aa, unidentified
MAAERRLAGIDLGIASAHTVRVLDETGETVAKRKCWPTVVSLTEIEAAALAGAGEGCRLEVIMEPTGPAWLPIAVFFASRGHAVFRVSSQKASDLRKFFSKHAKTNGIDADTLARLGIVDPAGLIELRLPDAPRAALDRRVRATDRLTRQAAEHKVRIKDLVRQVLPMSPLTGDLGVADLAVLERFADPNVLVKAGARRLTVLIARASHNHLGDERAGQWMAAAEASLALYAGHPAVAFAELAAEIVTEVRLLRAIQAELAVHADAREAAYAAVDPAALARSLPGLAEVGGPALVATMGDPARFARGKQFRSFTGLVPRASETGDTDRKGQPMSKAGSSLLRTTLVRAADTARKQDPQLARIYYTQMVERGKDHLGANCVVAAALAERSWTVMSRGEPYQIRDTDGRPVTAAEAKAIIAENWTVAGQVRARRRSKKAGKAPKNVLAGQSKPRAQHAGQRGDLPLPSSSSLAS

SEQ ID NO: 122844 - protein, 344 aa, unidentified
MTIIRIGLDTSEHVFHVHGVDGHEQPVLRRRLQRSQVEKFFAKLPPTRIGLEACGASHHWARVLRSLGHEVVLIPPQYIKPYVKRGKNDAIDAEAICEAMSRPGMHFVPVKSRDEQAALMLLKVRDLLMKQRTMLTNAIRGHAAEFGVIATKGPQNLAELLERIGEDANVPAPARELLNSLAGQIAALEVRLEALEAKLMAHHKADPRSRLLATIPGVGPITALSLTLKVPDATVFRSGRHFAAWLGITPREHSTAGRQRLGKISRQGDEGLRQSLVLGATAVIQQVERRIKAQRVSRTDPPWLLQLLARKPEKVAAVALANKMARIIWAMLVSGELYRQPQEV

SEQ ID NO: 122845 - protein, 355 aa, unidentified
MNDTKYIGMDVHRESISIAVMNSAGKIVLECIVETKASIILQFIDGLRGDLHVTFEEGTWAAWLYDLLKPHVTKLVVCDPRKNASMKQGNKSDKIDARRLAELLRLDHLNPVYHGEHGLRSLKELVRSYLTITKDLGRVMSRVKAIYRSWAIPCTGKQVYAPRHRGEWLGKISELGVRRRAEFYYQQLDALRTLRQEVRRDLLAESKKHQAWKQLCQIPSIGPIRGAVLLGILQTPHRFRTKRQLWTFGGLGIETYSSADHRYVEGQLQRSKKPAWIRGLNENCNHDLKNLLKGAAVVASSKPGPFQEFYTALLAKGIRPEMARLTLARKIATIVLIVWKKGVCFDAQHLKPQTA

SEQ ID NO: 122846 - protein, 362 aa, unidentified
MDDATTPICKDKVTVGLDLGDKYTHICVLDSDGEVCEESRLRTTPMALRRRFAPMPRARMVLEAGAHSPWISRLLKECDHEVYVANPRKLRLIYQNDSKSDRVDAQYLARIGRLDPALLAPFQHRQADTQTDLALIRSRDVLVRSRARLINHVRGAVKSQGGRLSTCSSATFAAKALPDLPAQLEPALAPLLEVIATLDEQIRSYDRRIEEPAKERYPETALLRQVAGVGALTALTYVLTLEDPARFPDPRAVGSYLGLRPRRADSGDLSPQLHITKAGDEMLRRLLVSSAHYILGPFGPDTDLRRWGLALAERGGSRGKRLALVAVARKLSVLLLRLWATGEVYEPLRNSAGHGGSLPCSA

SEQ ID NO: 122847 - protein, 412 aa, unidentified
MEVYCGIDWAEDHHDIALVDRDGQLLARRRISDEAAGLAALLDLLAEHGDTPDDPVPVAIETPRGLLTACLRATGRPVYPINPMAVARYRDRHSVAGKKSDHGDAVVLANVLRTDRHAHRPLPADSELAQAIAVLARAQQDAVWDRTTAHNKLRSHLREYYPGFLAAFAPVKGGIMRAEARTILAAAPTPADAARLTVTQLRALLKKAGRSRGLDTDAARLREAFRVPQMRQLPLVEQAMGQQATALLRQLDAACAAAADLERAATESFNLHPDAGIITSFPGLGPLTGARVLAEIGDDRSRFQDAKGLKAYAGAAPITRASGKAKSVTYRRVKNNRLNAAGYSWAFSALTASPGARGHYDRRRDDGDRHAAAQRHLFGRLLGCLWHCLITGQDYDETTAFPAATKKISQAA

SEQ ID NO: 122848 - protein, 322 aa, unidentified
MRYIGIDVSKATFVVAYSSDKGGEIRTFNNTTAGIRQFIGTLPKDGSIHCVMEATGNYSALLLYMLNVAGITVSMENPLKVKNFAKALLSTVKTDKSDARLITLYGEKMNPRPFKVQGEAILRLRQKRTVIRQLTKQITAMSNLRGSLACLPVPDKGATHTVDETIKFLEKKRDRLQAELTDLVEVEFSRQLALLTTIKGIGITLATALIITTGGFTYFQNAKQVSRYLGICPTYEQSGTSVNIKGHINRNGDAYTRGLLYIAAWPASRFNAQCKETYTRLRQNGKSGKLAMIAVANKLIRQAFAVVAHDKEYIDGFVSNRP

SEQ ID NO: 122849 - protein, 426 aa, unidentified
MNSNNSRLKFFRQLKEEVRGSKEHLLVGIDVAKDKHNAFFGTATGKTLLRRLIFENNKNGFELLRSRAEELQIEFNLKKVVYGLEPTSNYHKPLGEYLIKSNDNIVMVSGVAVSKNRELLDGRWDKHDAKDSANVADLISQGKCLYYDFPSLELRDLRNFLSLKRRLKKQDHSTKIRIRNHLIAQYFPELDKYYNVGSEGLKIVKWCLDPAVISNLEYNDFVKLITPGNMNVSQERRLQAIWKAAEISIGCKAGVVLDFEAKLMIEDLEHIKKAITAVEEQIKNICLKFEEYNYLLSIPGFGPDISSKVLGAIGDPFRYNKAKQVIKMSGFDLCASRSGTKSDMMIPVISKRGKASLRFALYQAAFIASTQNKYFRAYYINKLRGREKEKGIKTKMRVKLAVKMLTIAWTLMKKREAFDPSYLRLE

SEQ ID NO: 122850 - protein, 356 aa, unidentified
MAKRNTRGRGVTIGLDLGDKWSEGAVLDARGELSERARVRTTQKGFAQAFTGYEGARLVLEVGTHSPWASRSFAARGFEVIVANPRRTRLIAESDKKNDRFDAEQLARLGRIDPDLLSPIVHRGEEAQRDRILLLSRAGMVRARTQLINQARGFAKSLGTRLPSSSSEVFAKRVRAAVSEDLFPGLSTMLGMIEQLTQEIRTMDREVERLCRDRYPETALLRQVSGVGPQTALAFVLTLEDPWRFAKSRSVGAYLGLRPRHRDSGGQRPQLRITKAGDVLLRCLLVSAAQYILGPFGPDTDLRRFGLRLAEHGGKSAKKRAAVAVARKLSVLLHRLWVTGEVYEPIGYGERHEQAA

SEQ ID NO: 122851 - protein, 337 aa, unidentified
MKFCGIDLHSNNSVVVITDEMDKRLVRRRCPNDLDTILNVLSPHKPELSAVVVESTYNWYWLVDGLMSAGFEVKLANTVAMKRYDGLKHSDDEDDAAHLAHLLRLGILPTGYIHPPAHRALRDLGRKRIQLVRTRTQHVLSVENIMARSFGSRESSNVIKRLAVEQVDSLGLSSDVALAMKSNVAIITVLNTQIGLLEHRLLAGANSLPEYALLKTIPGIGEVLAIVILLETGDITRFAQVGNFASYARCVSSAHFSNGKKKGQGNTKNGNAYLVWAFIEAANFARRFCTEANAFYEKKKVRTNGVLATKALAHKLARASYHILKDKRAFEVKRCFA

SEQ ID NO: 122852 - protein, 367 aa, unidentified
MKKVSTAAAKQIRNLCEEELTIGLDLGDRSSWYCVLDEAGNVLLEQKLSTTPKAMKEVFGGMPRSRIALETGMHSPWVSRALSELKHEVIVAHARNVRLIGESRKKDDRLDAQTLARLARIDPQLLSPVKHRSARAQADLTVIRARAGLVRARTALVNTARGLTKSYGERLRGCNVRNMNPEKAEGLSPELQTALEPLLAGIESLSERIREYHERIEALAQESYPQVALLKQVKGVGTLIALTFVLTLEDAHRFRKSRDVGCYLGLQPGRRNSGQSEPQMHISKEGDPYLRTLLVQGAQPILGPFGSDSDLRRWGLKLAERGGRNGKKRAIIATARKLAVLLHRLWVSGEVYEPLRNSSRMMMPAAA

SEQ ID NO: 122853 - protein, 389 aa, unidentified
MKIFVGIDIAKLNHFAAAISSDGEILIEPFKFTNDADGFQLLVSKLESFDKNSIIIGLESTAHYGDNLVRYLVAEFYQVCVLNPIKTCQMRKNNVRKTKTDKVDTFVIAKTLMMQDDLRFITFFDLDMMDFKALGRFRQKTIKQRTRLKIQLTTYVDQVFPEIQYFFKSGLHQNAVYALLKEAPSPKEIASMHMTHLANLLKVNSHGHFTKEQAKELRVLAQKSVGANDSAISIQITQTIQQIELLDSQLQKIEAEMTDIMKFNDSVIMTIPGIGYINGGMILGEIGDIHRFSNPNKLLAFAGLDPSVYQSGNFQAKTTRMSKRGSRVLRYALVNAAWNVVRNNATFKAYYDAKRAEGRSHYNALGHCAGKLVRVIWKMLTDEVEFNLE

SEQ ID NO: 122854 - protein, 316 aa, unidentified
MNEITLIGIDLAKNIFRINCVDKKGKRIRNHSLHRDGLIRFLTTLPQCTVAMEACASSHYWGRAAASLGHTVKLIHPRYVTPYRLGNKNDANDAAAICAAAQRSDMRFVRLRSQRQSDIQSLHRVRSGLVQERTATINRVRALLVENGIVLKQGPSVVFALLPDILDDENNTLSTIMRRVLRSQYEHLLHLREQVKELEGTLKTLIAEDEDCRCLMQIPGIGQLTATMLASEIGNGAGFSCGRSFAAYIGLVPKQHSTGGKHTLLGISKRGNSYLRTLLVHCARAALRIIVFGKTPFGGSVDRWIRPLTWILHERL

SEQ ID NO: 122855 - protein, 339 aa, unidentified
MTVKTIGLDLAKDVFQVHGISESGRVIFNKAIKRAKLLAFFETLPPCMVGMEACGSAHHWGRTLRKFGHDVRLMPANYVKPYVKRGKTDAADAEAICEAVRRPTMRFVEIKTKDQQAILSIHRTRDLAVRQRTQLANMIRSLLREFGHILPIGIEAVTAFAKRHLDGDHPDMPEIANGMLGIQCYQFIGLNERVEGYSKMIEQHALLNADARRLMRMPGIGPITASAIVATIGDAKQFRTGRDLAAWLGLTPLNKSSGGKERLGKITKAGDRYIRKLLVVGMTSRAVMAKRSPEKVDLWTAKIIAEKPFRLATVAMANKAARSIWAMLTKRQEYRQPAF

SEQ ID NO: 122856 - protein, 419 aa, unidentified
MTFYLEQGYIQQTCLWNKAVSNNEKRSHKMIYVGIDVAKDEHDCLITDSEGGVLAGPFTFSNNIAGFKGLLGKLTDCSEDLSAIKVGLEATGHYSDNLLEFLISKDLPTTVINPLHTSLYRKSLSFRKTKTDRVDAHSIVTMLRTERLKPYSQSSYHVKELKSLTRYRFSLVQDCAELKSSYSRLCAILFPELEKIVPSLHLASVYSLFSELPNAKAIAGCHLTRMARLLSGASKGRYGKEKALEIRDAAKVSIGTYSEVKSLEIQQTIQLIQMMESQIKQVEAKINPIVDSLHSPIMTIPGISYRMAAIIIAETENFKDFGSAEKILAFAGLEPSVYQSGQLVSTHARMVKRGSKYLRYALFNAAKFVCHWDPVFGAYLAKKRAEGKAYNVAVSHVAKKLTRVIFHLVKTDQPFLRQA

SEQ ID NO: 122857 - protein, 370 aa, unidentified
MQHSSTLFVGLDVHKEAISVAYVAQELGSEVVSLGSIGTRQSDIDKLIRKLKGKASKLVFVYEAGPCGYWLYRYLTKQKLTCRVVAPSLIPKKAGDRVKTDRRDAVQLARLMRSGDLTAVYVPAVEDEAIRDLSRARQDATQDLKAAKYRLKAFLLRHDIRYEGRATWNPAHLRWLSQVVCATPAQQIVFQEYVRTVSERHDRLQRLESELQAAVKTWRWSAVVEAIQALRGVQFTVAVTLIAELGDLTRFDNPRQLMSYLGLTPSEYSSGPVRRLGGITKAGNTHARRALIEGAWAYRYPAKVSRHLQLRLEKLPKAIQDLSWKAQVRLCKRYRQLVARGKHVNKVVVAIAREMAAFLWAIARVVQQAH

SEQ ID NO: 122858 - protein, 307 aa, unidentified
MRFYTQQHQFYCGIDWHARTMSLCSLNQDGEILAHRNMPAGPEPFLKAVAPSREDVVVCVACLFPWDWLADLCAREGMPFVLGHALSMKAIHGGKAKNDTIDSQNMAVLLRGGMLPQASVSPAAMRATRDVLRRRMPLMRTRAELLAHVQHTHSQYHLPGMGKNIAYKANRDGIAERFPAPAVQQSLAVDLALIGHDDHLVNDVEFSIVHTAQQHDPQTLSRRPSVPGIGTILRLVLLDDIHPIDRLPRVHDVVSSCRLVTCAQASAGKRSGTSGATIGHASLKWAFSEAAGLLRRTHPAGQKSLAR

SEQ ID NO: 122859 - protein, 319 aa, unidentified
MNCIGVDVGKQELVTYDGVEHRTFPNDRSLDEFSRYAQRRKDLLVVYEPTSTYSRRLEAFCRTDRIVCCPLNPRVIPHLRQVSCRRSKTDETDAELLYRYGIERGEKEAGLLFHDEVVQSVSAHLAYYRVIQKARVACQGLMEALKEDPAASDELIAELEGEIAVMKEKEARHLEEAQELIAADEAGTCQLEALLTIPGIGPITAVTLIVMFRKYVNASRGQMVALAGLDPVLFQSGTSVHKKSRISKRGNREVRKRLYEATLSAARYNPSIKGIYQRLKEEGKPDKVARIAAARKLLLIAYAVYKSGKRFRLLNECQP

SEQ ID NO: 122860 - protein, 348 aa, unidentified
MAQAHGAEVTYLGAMGPRQGDIDQLIRTMPSKATHLLFVYEAGPCGSWLDRSLTKKGYDCWVVAPSLIPQKPGERVQTDRRDAVHLARLARSGDLTAVSVPKVDEEAMRDLPRAREDAIRDHKDATYRLTAFWLRHDIRYVGRAHGGPAHLRWLSAVVCPPPAQHIVLQEYLRAVSDHHDRLQRLAQALQEHVKAWRLSPVVDALQALRGVPCTVAVPLVAAMGDLTRFESPRELMKFLGLIPSEHSSGAPRRQGSMTKAGNTHARRVLVAGAWASRSPAMGSRHLHLRLEKQPTIIQDIRWKAQVRLCQRYRRLVARGKQAHGGTVAMARELRGFIWAMAKEVPRGA

SEQ ID NO: 122861 - protein, 393 aa, unidentified
MVYVGIDVAKDKHDCFIANSDGEVLYDVFTIQNDMDGFEDLLFKIKIASKDLNKVKVGLEATGHYSCNILGFLHNKGLTTIVINPLYTSLSRKSVSLRKTKTDKVDARTIASMIMSDVSLKPYSDTVYHNEDLKSLSRYRFDKVSDRSKLKQSVSRLVNILFPELKKLVSSLHTKAVYELLSEFPGAHQVASANLKHLTALLSTASKGHFGREKANAIREAAKRSISSYLPAKSLELRHTIKLIRELDAEIAEIETEIKKIMDSIDSPILSIPGISYGIGAMIVSEIGDFSRFDSPDKILAYAGCSPTTYQSGQLYSSHAVMEKRGSRYLRWALINAARYVCNWEPTFTAYLEKKRSEGKHYYVALSHAAKKLVRLLYHLETTGEKYIPQTLS

SEQ ID NO: 122862 - protein, 343 aa, unidentified
MTKITTIGLDLAKNVFQVHGVDGSGAVVVKRQLRRADVEKFFAKLPPCLVGAEACGSAHHWARVISRYGHEVRLMPPAYVKPYVKRNKNDGRDAEGVCEAVRRPTMRFVAVKSVEQQAILAVHSTRALLVRQRTMAANALRAALSELGIVAAQGYEGLRKLIARLEEPSEDIPQMMRGALLVLARHWQALDADERVLEQQIAKAARCNQEARRLMEVPGVGPIIASAILAKVADAKLFRSGRDFAAWIGLTGKDHGTGGKHRPGRISKQGDRMLRALLISGASAHLRQQKARGVTDPWLRDLLARRPYKVAMVAFAGKTARIIWAMLVKGEPYRDRASAPAAA

SEQ ID NO: 122863 - protein, 352 aa, unidentified
MNHLNYIGMDVHKATTVIAVVDAAGEVLQETIIQTKAEAILDFIKGQRGTPHVAFEEGTQAAWLYDLIQPHVARVVVCDPRKIASQGRKADKPDAKRLAELLRTNSLSAVYHGERSTRVLKELAQSYVGVVGDCTRVKNRLKALFRARGIDCDGSAVYSAERREEWLGKLDGAAVRARAFRLWEELKCLVPLSEEAGSELVAEGRKHADTKILRSVPGIGPVRAALILGVAGTPHRFRTKRQFWAYCGLGIVTKTSSEYTVVDGQVRRSKKRPLVRGLNRNYNRALKWVFKGAAKTVASGPWKSEFEAMVAQGTSESLVRLTLARKIASITLALWKRGERYNEKKLKFKHAA

SEQ ID NO: 122864 - protein, 437 aa, unidentified
MLSENKALNQTMNKALQFAATIGLDWADRKHDVWLRPSDGSKAEHLRVEQTPEALQEWVAKLRTRWANRPVAIGIETSRGPVISALLAHEFIVLFPINPKALKDYRAAFSVSGAKDDRTDAQLLEEFIRLHRDKLKALEPDTELTRKLAGLCENRRRLVDERTRLVNQLHATLKTYYPLAETLLEGQMNKALAAAFLARWPDLESLQRVKLQTLRAFFYKHNSRSAKKMEERLALLQQAKALTTDPAIILPARLLVTTLAAMLKPLHQALAGLDKQIEQAMNQHPDAAIFRSFPSAGPALAPRLLVAFGTNRDRFQNATEVAQFYGLAPVVIQSGNSLTTHMRHRCPKFGRQTFHENANCAAKEHSWARLYYEHHRKRHDDKHHQACRALAYKLIRIYFACWKHHTTYQPDRYLLALGKHGSPLHKKLQTQAPQPSE

SEQ ID NO: 122865 - protein, 354 aa, unidentified
MQIDAMLVPNLTIGLDLGDKSSWVCELDARAQVVTSGSIPTTPAGIEAYFGNRTACRVVLEVGTHSPWISRLLARLGHETVVANPSAVYGKRRRKRRNDAKDAQYLARQGRADPLLLHPIRHRGPESQKHLGLLRARDSLVSTRTKLINHVRGAVKATGSRIERCSAEVFARRAAQQIPLDLEPALGPLLLTIGHVTQSIRAFDRQIETLVDEQYPEARHLQQIRGVGPVTALAFVLLVDDPHRFECSRSVGAYFGLVPRLDESSESTPQLRITKTGDKLGRRLLVSSAQYILGPFGTDCDLRRHGELIAARGGKNAKKRAAVAVARKLAVVMHRLWIRREAYDPDHVAKHRAA

SEQ ID NO: 122866 - protein, 423 aa, unidentified
MNKYKYRATKFQQVNWKRVQEKAVDGRVILTIDVAKEDMYSVLLKPDRTVIETFRWSHPHETRLFVEQIVAIGADRVEAVLEPSGTYGDALRRLLGEAGVTVYRVSPKRVHDAAEVYDGVPSLHDAKAAYLIGRLHLEGVSRPWTEHDERRRTLRAQLTIVDFYQERYQRGLNRLEALLARHWPEAPYCLDLDSVSLLRLLAQYGDPAAVAAEPQAAEELLRKAGGPGLKPAKIEALLGSAGTTVGVPCLEAEREVIIWLAAELLEARAGRREIERALEPEVAMQPSLTRMVAGVGKRTAVVLYCALGDPENYTDAQSYAKAAGLNLKERSSGKHKGKLKLTKRGPGVARRYLYFAALRLITKDGPAKRWYDAKVARDGGVKGKAIAAIMRKLVKALWHVGRGAEFMEYKLFDTVKRGLREAA

SEQ ID NO: 122867 - protein, 345 aa, unidentified
MRSDLSIGLDVSLDQTSVCVVDESGRTVWRGRCKSTPDAIAATVQRHAPDVARVGLECGQLSTWLFHELKARGLPVVCIDARHAKAALSLKINKTDANDAYGIAQIVRVGWYKEVTVKSMDTHAVRALLAARTQLVCQLTTLKNTVRGILKTFGLIMPPGSGRQFERRVREMIDEHAVLTLVLTLLATLDTLRLQIAKLESAVGKKARADQVVRRLMTAPGVGAVVALAFTSAIEDPARFRRSSSVGAYLGLTPTRHQSGEVDRAGRISRCGDGLVRSYLYEAACTLIKRCKRPCALRRWGLSLIDRVGSKKAYVAVARKLAVILHQMWRDSSTFRWDEERLATV

SEQ ID NO: 122868 - protein, 369 aa, unidentified
MGEYSEAFVAFDVSKTKHAVAIAGGGRGSEVRFLGEVANTPAAVERLIGKLAGRYGKLHFCYEAGPAGYGLYRQIEALGHACLVVAPALIPKRPGERVKTNRRDAVTLARLHRAGELTGVWVPDTPHEAVRDLVRSREAAADDRRRKRQQLLSFLLRHGRIYSGGGHWTLAHRRWLATQSFEHPAQQIVFQEAIDAIADADQRLRRLEQQLAVIVPSWSMAPVVEAYQAMRGASFIVAVTFAAEIGDVRRFDNPRQLMSFLGLVPAESSTGERVRRKGLTLAGNRRARRVLVEAAWTYRYHARVGETLRARLEGLPKIVRDIAWKGQVRLCARYRRLSNAGKKLPVVVAAIAREMAAFLWAIGRQVAPA

SEQ ID NO: 122869 - protein, 387 aa, unidentified
MPQPNDLSRSLVALDQDSTIIAVVEMSQSSWLVGGVLPGIERQPCKKLEPSAERLLGLLHRWRDEAVKAGSHITRIALAFEAGRDGFWLARWLRARGVEAHVIHPSSVAVSREHRRAKTDRLDTELLKRGFLGWLREERGHCTMARVPTIAEEDAKRPNRERECLVGERTRIVNRMKGTLARLGIRNFKPTLRKSAERLATLHTPEGSPLPPNVLAELQRDMARLGFLICQIREIEETRQKRLEQEPETGPHAMVRLLARVVGVGIETADMLVHEVLSRPMRDRKAVARYAGLTGAPDESGAKRREQGLAKAGNARVRRGMIQLAWRFLLFQKQSALARWYQARTADARAGARKTMIVALARKLLIALWRFVTTGETLEGVVLRPAG

SEQ ID NO: 122870 - protein, 397 aa, unidentified
MKGFCISLDVSKGSSFYQGFKGLDEPIVKPKKIEHNLEGFKELLKLKEIIRKEYDSDCIVIFESTGVYHKALQTFLDEHDFKYTIISPLLSAKVRKSDIRGTKTDAKDCASIAKVFYLKELRIYSKMDEIYGDLKEKCRYYDFLVDEMKRWKIEFRRLLDIIYPGFDKIFEDLYIDYVQALLLEYPHPEIIRKKRLDTIAKFIEKHTCHKESFSLKQAQALKDYAENCASGCSYKSYLVSQFDTVIHTLNSQINHLETTLDEIIEIAKKLPNYEIIRSIPGIADNLASRILTEIGDIDRFDNASQLVAYAGIDPQIYQSGQTSGLHFKISKKGNKKLRCLLYLAVTCMIKTNRDTKIVEFYKRKKADGLAARSALVASMNKLLRIIHSLCKNGCLFK

SEQ ID NO: 122871 - protein, 391 aa, unidentified
MVCVGIDVAKDKHDCCILDSDGTIRADCITIPNNMDGFKQLLQTIRDCTKKSDKIKVGLEATGHYSYNILGFLLDNDLAVYVMNPLHTNLYRKSLSLRKTKTDRVDARTIATMLLSDVDLKSYTDTAYHNEKLKSLTRYRFDKVRERAKLKQSVSRLVTILFPELEKLVPSLHIASVYALLSEYPGAKQISEIHLTKLTNLLATASKGRYGKDKAIQIRDAARTSIGSVMPAKFLELKHTIKLIRELTSEIDEIEVSIQKIMDELNPPILSIPGVGIQSAAMILAEIGDFSNFESPDKILAYAGCSPSTYQSGKLTNCYAHMEKRGSRYLRYALYNATKYVCHWNPVFAEYLAKKRAEGKHYNVALSHATKKLVRLIYALQKSGKAYLVAA

SEQ ID NO: 122872 - protein, 403 aa, unidentified
MNLNAVGIDVSKDKSMVAILRPYGEIVSSPFEIKHTSGNIQSLIERIKSIEGESRIVMEHTGHYYEPLARELSLAGLFVTAVNPKLIKDFGDHSLRKVKSDKADAVKIARYTLDSWTQLKQYSLMDEIRNQLKTMNRQFGFYMKHKTAMKNNLIGILDQTYPGVNTFFDSPAREDGSQKWVDFATTYWHVDCVRKLSLNAFVGHYQKWCKRRKYNFSKDKAEEIYGAAKELVPVLPKDDLTKLIVKQAIEQLNTASKTVEELRTLMNETASKLPEYPVVMGMKGVGPSLGPQLMAEIGDVTRFTHKGAITAFAGVDPGVNESGTYEQKSVPTSKRGSSSLRKTLFQVMDCLIKTKPQDDPVYAFIDKKRAQGKPYYVYMTAGANKFLRIYYGRVKEYLMSLPE

SEQ ID NO: 122873 - protein, 328 aa, unidentified
MEREYIGIDLHKAVFQACAVTATGQRHWEQRWPTTDAGIAGLLTRCGPQSHVAVEASSPTWAFVDRVVDHVGAVHVVDTRKTRIKAGYAAKTDRLDAQRLADALRRDSVVGIYYPPPAIRDLRELGRYRCHLARLQASLKQRIQALLLRHGVPVPVKGLFTTRGTVWLDALRLPGWAGASLAGLRQVLTDVRAQLVPVLTVMRTTATTDPIARALDARPGFGPVFSVTLRAEIGTMTRFPDGPHLASYAGLVPRVERSGSRRWSGRITKTGSPWMRWTLIEAAIHQFRRQDEFGRWARQLAVRKGILKARVAVARALCTEVFDTWPRA

SEQ ID NO: 122874 - protein, 426 aa, unidentified
MKYRIAGIDVHKRILAVVITDIAGDGEFQFERRKVGTSPSELCRLADWLAAEQVEEVVMESTAQYWRPVWAALEQRWRPKRLQEGAGARSGQLHLAQAQSNRGAAGRKKDFPDAERLVKRLAAQELRLSFVPDVEQRLWRTIMRRKHQLTRNRVQFQNRLECLLEEAHIKLSSLVSDLLGKSARRMLQAVAEGAASPEAIAALADRRLQATAQQLSDALGVCGDIHPVYRQLLKMALEELKLIEAQIDTLDQEMARLLSAQRDVVQRLAEVPGLGADSAQQIIAEVGPAAAAFPSAKHLASWVGVCPGEQESAGVNYSHRSPKGNRQMKGLLNQAANAAVRTKGSIFEFVYRRLVVRLGHAQAIGAIAHRLCRLIWMILHQAIRYEERGPAVSRSKTERRAKLMIRELRRLGYRVEPMAAQAGVSE

SEQ ID NO: 122875 - protein, 330 aa, unidentified
MTYVGIDVSKDTFTVAYSSNKNSKTKTFKNTVKGIHEFIQTISKEETHCVLEATGNYSALLVYLFSEAGITTSLENPLKIKNFARVMLSVTKTDDVDARLIAMYGEKMNPSPYKLKDESILVLKQKRTVLRQLKKQLVATRNLKGSMEVLPFVDSTCKRTIDKTIIFLEKQIKNMEENITSLATQEYKKQMDLLTSIKGIGVTLAAALIIATGGFTYFDNAKQFTRYLGLSPTYQQSGTSVNVKGHINRNGDSTLRSQLYVAAFASLRCNSECKECYDRLRSNGKPGKVAVVAVANKLVRQAFAVVTKEKEYVDGFISEKPQKLQKHISA

SEQ ID NO: 122876 - protein, 321 aa, unidentified
MNANEQIVVGIDVAKDTLEVATSAAERWACSNDPKGQRALRERLRHSGVSLIVVEATGGYETALVSTLAQANLPVVLVNPRQVRQFARALGKLAKTDRIDAEVLVRFGQQAAPEVRPLPDEQTQLLDALLTRRQQLLEMIQAERNRLEHALGPIRTDIRETIAFLVKRLKQTDRDLDDQLRHSPVWREKEQLLKAIPGVGRQMLLTVLATLPELGRIPRKQLAALVGVAPYNCDSGTLRGRRHCWGGRAQTRQVLYMATLSATRCNPQIRPYYQRLLAMGKPKKVALVACMHKLLLIMNAMVRDNTAWNPPHAEGQLTEIS

SEQ ID NO: 122877 - protein, 288 aa, unidentified
MENVVVGIDISKEQLDIHILPSQDSFSVSRDSEGLGQLITQLSSLQPKLVVMEATGGFETIVAAALAAARLPLAVVNPRRIRAFAQALGYLAKTDRLDARIIALFGEAAKIEPQTVPDEAALALGELVARRRQIVETMGVERNRKRSLTQRRLFKGVDRILALLQKELSDLERDIDQAVRGTPAWREKDELLQSVPGVGSKVSSMLIAELPELGTLTRRKIAALAGVAPMADDSGKHHGRRHIQGGRAQVRSGLYMAALVAARHNPILTAFYQRLRTKGKTPKQALTA

SEQ ID NO: 122878 - protein, 421 aa, unidentified
MEVIASRCAGIDIGKETLKATVRVQGGRGRKTRREVRTFDTTTGRLLELRDWLVAEGVTLVGMESTGVFWKPVYYVLENVMECWLLNAQHLKKVPGRKSDVSDSEWIAELVAHGLVRPSFVPPPGIRRLRDLTRYRTALTQDRTREIQRLQNVLEDAGIKLDCVASDLMGKSARAMLAALIAGERDPRVLAELALGRMRPKVGALQEALVGRFDDHHARLCSKMLAHIDDLTATICELTGEVQSEIEPFQHSRKRLKAIPGVSDRLAENLIAETGGDMSRFPTPQQLASWAGMCPGNNESAGKHFSGRTRKGNRWLRGALGEAAAAAARTKGTYLSARYRRLASRRGKKRAMVAIGHDILVAAWYIMRDDVDYADLGADYFDTHAMDPNARQRASPSNSKRWAIGSPSSTSPELRLFSSEP

SEQ ID NO: 122879 - protein, 393 aa, unidentified
MFFVGIDIAKNSHEAAVIDGSGKIVAKPFKFPNSIGGFEKFLAAVKGVSEDLSQFEFGMEATGHYWLNLYTKLMDFNVVVHVINPVQSDAWRGLYIRKTKNDAKDAFIIAELIRFGRYSETTLSDSDLLSLRELTRQRFYLVDCVSDAKRKAISFIDKIFPEYQTLFSDTFGATSVELLQTYTSPDVIAELDTELFTHFLKSVSHGRFGRSKAEEIQSVAKNTFGSFLFADSATLAIRQFIQQIKLLEEQIAEIEDFISEKFASFDCKLDTIVGVGTTLAASFLAEIGDITRFESPDKLAAFAGIDPSVKQSGEFNGTRNKMSKRGSPYLRRAFWLAAVSGIRANPALKAVYDKKRAQGKHHAVAVSAVMHKLCNIVFAILKTNQPYKIILPE

SEQ ID NO: 122880 - protein, 367 aa, unidentified
MEKSSKVFVGMDVHKESIDITLAEEGGEVRRLGQIGGDRGSLLKMVRRQQSKGRELVFVYEAGPCGFWIYREITALGQACMVVSPSLIPRRAGDHVKTDRRDSERLASLARAGELEAIHVPDIRDEAIRDLVRGRDDAVIAQRRVRQQLKALLLRNDIRYVGRTSWTGAHRRWLSELKLPEPAQRIVFEEYVDAIVVATARIERLTRAIESEVTTWRFAPVVAGLQAMRGIQFVHAVTLVAELGDLTRFHSARQLMGYLGLVPREDSSGEHRHQGSITKAGNSYARRALIEAAWAYRHPARVTRIIATRQTGLPKAACDIAWKAQLRLSAKYRRLNARHLNHNKIVVALARELSGFVWAIGQCVKPH

SEQ ID NO: 122881 - protein, 389 aa, unidentified
MQIIADRPEAPSAIHTDLGAIFISLELSRSTWLITSLSPGGGGKMSKHSVPAGDISALLARFSEFRQKAFARTGKSFPIIVIQEAGLDGFWIHRVLQNEGFESHVVDPASIATSRRRRRAKTDRIDGEALLRALLAHKRGEPRVCAMVKAPTPEEEDRRRLCRERKVLTNERVLHVNRIKGLLFSQGVSWYEPLRRDRRQRLDELRTGDGGRPLPKHLKAQISREFDRLELLIEQIKAVEAERDALLAAQRVAAPAPAAMLLDIKGIGPEFAAILWSEGLFRHFDNRRQVASYAGLAPTPWQSGKVDREQGVSKAGNPRLRTTLIQLAWLWLRHQPQSALALWFKERVGRNGGRFKKTTIVALARKLLVALWKYVTAGVVIDGAVMKAA

SEQ ID NO: 122882 - protein, 341 aa, unidentified
MEEYIGLDVSMKETSVSIRRAGERIWRGKCASDPRIIAELIRKRAPAVRRVVFETGPLSIWFYHSLRTEGLPAICIDARHAKAALDMATNKTDANDADGLAQLAEVGFFREVRVKGFDSMLTRTLVGARTRLVRITTELSNQIRGVMKTFGLLVPAGKGSIFEKNVRSLLADQDGLASIVLPMLEAWRGIRIRAAELGRQLVRDARQNQACRILMSIPGIGAITATAFTTAIERPDNFKKSRSVGAWIGLTTRRYQSGEVDYDGHISRRGDAHLRGLLYEAAAVILTRSSTDSTLRTWGLKLRERIGFKRAAVAVARKLTVIMHTMLKTGELFNPNAGAIA

SEQ ID NO: 122883 - protein, 414 aa, unidentified
MDVIYKRCAGLDVHKQTVECAVRRAEPDGNARVEVRQFGTMTDDRLEMVEWLQAQEVTHGAMESTGVFWKPIYNILEGHFTVRLVNARPVQQVPGRKTDVRDCQWLAQLLQCGLLKGSFIPPCWQRELRDLTRERTQRVEEQTRVANRIHKVLEDGNIKLGSVASDILGVSGRDILQGLIHGEQDADRLAEKARGRLRAKIPELRRALRGYLREHHRFQLRLHLDHLRRLEELIERLNERIAELCQPHREHLERLDGIVGVDQAGAESIVAEVGVDREVFPSDGHLCSWAGIGSGHPESAGKRRSGRIPKGDRWLRRRLVLAAQAAGHAKDSFLASRFRRLAARRGRKRACVAVAHSILRIVYHVLKEGCPYQDLGGNYFDRLDPERLTRYLIRRLERLGHKVILEPAATVSSV

SEQ ID NO: 122884 - protein, 318 aa, unidentified
MNTKINQSINVGVDTGKTQLDIHIRPLDLFFSVENNDKGIKKALKTIKSHSPERIVIEATGRLEMPFVLACAEAQLPIVRANPVHIKRFAGAIGRRAKNDRLDAELIAHYGEAIKPALTVIKPKNIRLMSDLVIRRNQLLSMQTMEKNRIQILPASLHPTIKPMLTTIKNQITKLEEKLVKLIEDSTEYQAKNTILQSVPGIGNIAAASIISNVPELGYITNKQAASLIGVAPITRESGRYKGKRVIQGGRAQVRTVLYMAMMSAMQCNPIFKATYARLLAAGKPKKVAIIACVRKMVVTLNSMLRDGAMWDENTAKN

SEQ ID NO: 122885 - protein, 360 aa, unidentified
MKSSVATKKRQNVNQLTIGIDLGDRWGHYCILDEHGEVLEEGRVPMTRKALTAHFSGVPARIAMEAGAYSAWISEHLSAMGHEVIVANARELRAISGSNNKNDRADAEKLARFARVDPKILRPIQHRSLAAQKHLTVIRARAAAVRARSLVVNAVRGLVKPFGCRLTLCSTAAFPSRHHDSLPDELRPALEPLLATITELSIRIKGYDKQIVAMSETLYPDTHRLREVHGVGPLTALTFILTLEDKQRFQVSRDVGCFLGLRPRQYQSGSSDPQLHITKAGDVYLRTLLVECAQHILGPFGTDSAIRRWGLSLVERGGKIAKRRATIAVARKLAVLLHRIWVTDEPYQPFYGLKSEPQTA

SEQ ID NO: 122886 - protein, 375 aa, unidentified
MKNKVRFLGLDVHAETIAVAVAEADGSVRNLGTIPNRAESIRKLVKKLGAVDRLRACYEAGPTGYVLYWQLAELGVPCDVIAPTLVPVKAGDRVKTDRRDAEKLARCHRAGDLTAVWVPDAGSEALRDLVRAREAAKQDQLRARHRLSKFLLRSGQRPATGLKAWTQLYMAWVRQLGFAQVAQESTRLDYLHEVEHMAERVVRLEQAIVEAVKLASPEIQAVVKDLQALRGIAQISAVTIAAELGNITRFESARQLMGYSGAVPREDSSGKRTQRGSITKTGNAHLRRIAVEAARSYRLRPGVGPALRKRQEGVPEELKEIAWKAQHRLHKRYCRLAAAGKDQRKIITAVGRELLGFIWAIGIKAEAAARQRMAA

SEQ ID NO: 122887 - protein, 341 aa, unidentified
MDKGLGRSQATVFTGIDVSAATLAVAVQQEGRDGFRQKEFANSASGHKQLIAWLLRCGGGVRVSMEATGTYSLDVALALDAAVGIEVAVLNPKTANRFAQTLRRSKTDAADAQALAEYSRRMEFVAWQRPSRSGMELRTLSRHIATLTEDHTRWGNRLHAAKASKTTPRCVLDDLKRARAAIAKRILKLRKQAVAMVRQDPQLTRKFEQLKGIKGIGETSAVQLLSELAGLDPEMTVRQSVAHSGLDPVHQVSGSSVRKQTRISRHGNSHLRRALYIPALVGVRFDPHMRAFYELLQSRHKTKLQALVAVARKLLHAIFGIFKSGTDYNGAILFPKLIPTS

SEQ ID NO: 122888 - protein, 467 aa, unidentified
MSTARSGPGRKVKTRIPFVILNRHAAGIDIGAFEHWVAVPVDADPEPVRCFGSCTSDLEALADWLQACKVTSVAMESTGVYWIPLFELLESRGFEVRLVDARQTRALPGRPKSDVHDCQWIHRLHSCGLLQGAFRPDDQVVVLRSYLRQRQMLISCASDHIRHLQKALEQLNVKLPEVVSDITGVTGMSIIKAILAGERDPLALAKLRDPRCKQDERTIARALQGNWRAEHLFCLRQALELYEFYQRQLAVCDQQLDAQLQTFEDRSTRAPLPARPVGKIKKRRKYKGNVPNFDARERLYRMSGVDLTQIEGIEEGTALVLLSEIGLDMNRWSTEKRFCSWLGLCPQHKISGGRILSRKIRPGVNRAAQALRLAARGLEHSKSALGAYYRRLKARLGAPKAVTAAAHKLARLVYNLLKYGHAYVAKSMEQYERDHQERLLRTLSRKARELGYELTKPAQFASIPYPG

SEQ ID NO: 122889 - protein, 338 aa, unidentified
MSIVMGLDQHRAQITADWLDTDTGEVKRGRVAPADRAGVRRFLERFVGRELEVALEATTGWRFLVEELRRVGAVVRLAEPAETADLRGSKKRAKGDRADARHLRELLMIGRLPESWIPPDHILDLRARVRLRHELGEQRSEWQQRIQATLYHHGCPQRRQLMVGDGRDWLAQQPLPDTAREQVTIALAMIDALELQIRPIEKELRAYARRQIGCRALMAHYGIGELTAVTILAELGDCTRFSSSRQAVRYAGMDITVYQSDRHRAPGHISRQGPPALRWALYEAAQVARRPGSPDRDYYVQAAERIGGNRACLSVARKLLKRSYHTLRELGEEALAPA

SEQ ID NO: 122890 - protein, 343 aa, unidentified
MADIFALDVSMGKSYCVWYRGKHCLKEFSLVHTKAGFNALRDMIKKAQKPIIYFEATGIYSRVIEHFCETNGLRFCHLNPLELHLKSESLRRVKTDQKDAHRIALTVQENTFRLIVPWKKDYLQLHELSRFYNQLNADWNYRLNHLHTALEQVFSELKQLFVNRTSKLALNIVELFPHPALVRPYSRIKLKNILMASTDKRISKMKAYKYADRLIDLAQKSYPTVSGDAIQVDEVCYYARQLIALTRKKEEVIKRMESIAQRLPDYILYCSFPGIGKQTAAQLMGELGDISRFDNANQLNAFVGIDIRRCQSGTYLGQDHINKRGNPIARKLLYFTVGNMIRQ

SEQ ID NO: 122891 - protein, 389 aa, unidentified
MFYVGIDVASEKHDCCILNEKKKIIRSFSFLNSPVGFQSLLSALSGIQPDEIKIGLEATGIYSENLSVFLRRKGFNVTTINPLLLKKHQCATTLRKTKTDKADAKGIALFIAEEGFQPDLPVSYHIQELKSLTRARFSFVQDRSALKNKVKRLVVLLFPELLEQFSDIFGASATALLKQYPSAEKLAACHTDALAALLRKSSRGRFGRAKAAYLKQLAKCSIGNHSPARVMELKMLLARIDLLSEQIKDYDKQIKIIMDELDSPVLTIPGIGYTLGATIIAEVGNISRFSSPAKLLAFAGLEPSIYQSGKFVPASGRMVKRGSPFLRWALLQAAGYVPNYSSTFALYREKKLSEGKSAAVARSHVAKKLVRIIHSLMTHSTAFSDQLTA

SEQ ID NO: 122892 - protein, 349 aa, unidentified
MDQITRIFIDTSKSVFQLHGVNEAEHVVLRRKLRRSEMIAFFTKLSPTVIGLEACGASHHWARVLSGLGHEVKLVAPQHVKPYVKRNKNDGRDAEGGCEAMSRPTMGFVPVKTAEDQAALMLMGVRERLVRQRTQLTNAIRGHAAEFGLVAARGLDKIESLLARLADEGSVPPLARDLFAELGQEYAALGERLEAVEVRLRAWHRADADSRRLAKIPSVGPIGACLLVMKTPDPNSFKSARHFAAWIGLTPKDHSTAGKQRLGVITRAGDEALRSVLVSGAMAVIQQAQRRPDRASPWLLDLLRRKSPKLAAVALANKTARIAWKLMTTGQDYDPARTRGEPISIAKAA

SEQ ID NO: 122893 - protein, 309 aa, unidentified
MSAAYVGIDVSKDRLDVHVLPSGQAFAVARDGNGLSELVTMLSGLECRAIGVEATGGFETVVAAGLGAAGLPVVVVNPAQVRAYAQALGRRAKTDPIDAAVIARFMEAVKPALRPLPDEATVRLADLVARRRQIIEMIVAERQREKRASVQSRKSILRLLKALEKELSAIDTDIDDMVRGSPAWQATQDLLQSVPGVGPIVARTLMAEVPELGTLNRRQIASLAGLAPWTRQSGKWRGKSLIGGGRAPVRTVLFTAAMTAARFNPPLRVFHQRLIQAGKPKMVAIIAVARKLLTILNAIIRDQKPWQNA

SEQ ID NO: 122894 - protein, 482 aa, unidentified
MKKRNIYQNQSQELLYLFENAGSNDKVMCVPMDYAKKDHLVMFCNGHGDILRKPFSVKNTPEGLSYIEDQVIRSCTKRGIKKEHVFFGGEDANSFAKNFVSTLRSKGFLVANVNAHDAKKQRESVQASTDRIDLMGIAAMLLNCRGNCCPAQSGIYRNLRLLVRHRRKLVQMLTEVKNRVHGIVDELFPGFLKEQNTGIVAFTESSLYLMEDRFSPKQICRRKRKKLIEILNRFGTSHAEQTAAKLQQYAAKVLHAPVEYVGTMQLSLSQHVKHIRCLKESIAQMEKEIASNLAQTQGAFLTSVRGIGLVLAAGVTAEIGAPNDQKPLNNLSSYAGIVPRVKQTGGIEGKTYTGPVARRCNRILKDYVVQSAHHLGWHGPKDLMNDYKRRDASGQHANFGMGRRYLRMAMCLMRTSQVYLPSALRKEGYTLEEKAGYYMMNWPYLRAKWKKVDALEEAFAINRPLGMWRQIVQELYGIKLKL

SEQ ID NO: 122895 - protein, 341 aa, unidentified
MNSSKNVVGIDIAKRVFQLHSIDMETGEIVSLQLKREKFLEHFANRQPCLIGMEACGGAQHWARKLTAMGHQVKLLPGKAVKGFVTGNKNDRHDARAIWTAVQQPHVKAVAIKTEEQQAILALHRMRSQLVKFRTAQINGLRGLLTEYGEVMPQGKAGVRKGITEALARLEDRLPAMVIDTLREQWARIEKLDSEIATIEQRIKLWLKSDDACKRIAEIPGVGPLTATAAVAIMGDAKAFKSGREFAAFAGLVPRQTGTGGRIKLLGISKRGDTYLRTLLIHGARSVLTHAKEPGPWVTELRQRRPLNVAIVAQANKMARTIWAILAHERTYQREFVSQPV

SEQ ID NO: 122896 - protein, 349 aa, unidentified
MTRFAGLDVSVRETSVCVVDDAGKVLAERKVATEPDVLIELLRSISSEYGRIGLEAGPLSQWLVNGLAEAGLPVVCVETRHMKALLTAQQINKSDRNDARGIAQMMRVGLFKPVHVKTLASQERRMLLTSRKLLQKKLLDVESDLRGTLRNFGLKVGTVSTSGFEARIRELVEGFHSLAAIVGPMLIVRRVLREQFAVLHRMLLGLVRRDPVCRRLMTAPGVGPVVALTYRAAVDQPQRFLHSKAVGAHAGLTPKRVQSGESDYDVGISKTGDVMLRTMLYEAAQSLLTHSGTRWSWLKAWGLRVAQRRGMRRAAVAVARRLAVVLHRMWVDETDFRWSNKSPAAAMVA

SEQ ID NO: 122897 - protein, 357 aa, unidentified
MIAQEKQQTMFVGIDVHKDTHTAVGVSPFGEKLFEITVGNYKKDFEVLVKKVVEMKGQLSPYFGLEDCHGYGERLSEYLFENGHQILAVPAIMVDRARQKATHPEKSDSLDAFGVAKVMMMNLDNLPAYRISEESKKAKQVKEISMEREYLVEERTRLKNQLHSLLHRIWNTEYKDMYKDPFSLKALRYWSKAKPKCDPYILRSTKRKTKRLLDLVDEIKTLEKELETLIEGNYTIQTAPGCGTVLASVIIGEIGDINHFRSPGALAKYAGCAPRECSSGKTHRHKKTRSGNRRLNCAFHRMTLSQISRMGNDKARVYFKRKVSEGKSKSQALVCLRRQMVNIVWMMLKHKTEYKKS

SEQ ID NO: 122898 - protein, 342 aa, unidentified
MKDMMIGVDLAKNVFQVHGALRTGEVHFRKKLTRKQFLTFMAKQEPCLVIFEACGSAHYWAREMETLGHEVKLIAPQYARPFVKRQKNDAADAEAIVIAARQPEMRFVEPKTGEQQSRAAVFRGRERLVHQRTADMNALRALLYEHGHVFPAGIRYLDRMTALVEDEASDLPALIREECQDLLAQIAEKTARIIERTAKLKALAAQSDRARRLQTMPGVGPLTAVAVEAFGPDMAQFKTGRDFAAWLGLVPRQRSSGGKERLGRMTKAGQADIRRLLIIGAMSRLGWLGQRSIVEGSWLSRMLARKPRMLVAIALANKMARQIWAMLTRNEDYKDPALAGAA

SEQ ID NO: 122899 - protein, 344 aa, unidentified
MNTIDYIGLDIHKKTISFCAKAQDGTILDEGTIPALRKTLLAWAQARPRPWIGAMEATLFTGWIYDFLKPWAQALKVAHPPMLKALTAAKKKNDKVDARTIADLLRCNLLPECHMAPCAIRDLRRVLRYRNLVVRQATRIKNRIAGLLMETGTPYNKRRLHGKAYFGELLGSLQEVPPSVVELLKLSRGQVEFFAAMQRRLLKGLKEDAELNQRVMRLQTIPGVGEILALTWALEVGEVKRFSSIGHAASYSGLTSAQRGSAGKEQREPISKQRNKHLQVVLIEAAKLAPRHNRQLAAVHKRELQRGDRNRATLAVARKLVAYLMAVDQSGQPFTMRASTQEAA

SEQ ID NO: 122900 - protein, 344 aa, unidentified
MDHFAGMDVSVKETSVCIVDDTGKIVREVKVASEPEALLAVLKNPAYRFKRIGLEAGPLSQWLFSALAEAGLPVICVETRHMRAVLKAQINKTDRNDARGMAQMMRVGLYRPVHVKTLRSQKLRMLLTHRQLLLSKAIALENDLRGTLRNFGLKVGMVGKVKFEARIRKLVENLPDLAVLVEPMLIVRRVLREQIVILHRRLLAIVRDDEVCQRLMTTPGVGPVVSLTYRATVDIPARFRKSKSVGAVFGLTCAKYQSGEVDWDGRISRCGDEMMRTMLYEAAQAMMRSKKWSWLKAWAMQIARRRGMKKAIVALARRLAVIMHRIWVDGTEFRWNREQAAAAA

SEQ ID NO: 122901 - protein, 347 aa, unidentified
MDHVGMDLGKRESQIAILTDDGELINMRIRTERHRLVEVFGRRPKAKIIVEASTESEWVARCLEDLGHEVIVADPNYAPMYAQRTRRVKTDRRDAHALAHAGKAGTYRPAHRTSTERRDLRARLAVREAVVRTRAAWITRIQSLVRREGSRLRTGAPETFLTRVKELALPPTLTTVIAPLLELLGPLNKQIAALDEELERIVAADEVTRPLTTVPGVGPVTATAFVATVDDVTRFRDAHQVEAYLGLIPCEWSSSEAQRRGRITKAGNGRMRWLLVQAAWCILRRRKRPETAALRDWADRIAGRRGRSIAAVALARRLAGILFAIWRDGTVYDATKGRGPMTARRAA

SEQ ID NO: 122902 - protein, 352 aa, unidentified
MARERTSVIAVIGIDIGKNSFHVVGLDERGAIVLRQKWSRSQVEARFANLPPCLIGMEACVGAHHLSRRLRALGHDARLMPAKYVRPYSKGQKNDFRDAEAIAEAVQRPTMKFVATKTADQLDLQGLHRVRERLVGQRTGISNQIRAFLLDRGIAVRQGLRFLRAELPGILARRCDVLSPRMVCLIEDLAGDWRRLDERIEGLSGEIDALARQDSGCERLMSVPGIGPIISSAMVAAIGAGDAFEKGRDFAAWLGLVPKQISTGDRTILGKISKRGNRYLRVLFVQAAWVVLIKPKSWERYGLKAWIEAARKRLHHNVLAIALANKLARIAWSVLARGRGFEARSIATAQPV

SEQ ID NO: 122903 - protein, 408 aa, unidentified
MTVVGIDVSKSKSMVAAMKPGGKLVAAPYEVRHSDIGLSHLALDVLCMEPDTRVVMEATGRYHEPVAAQLHSAGIFVSILNPLLIKQSGAGSLRKVKSDPKDALKIAKYGLDNWSTLREYTPMEAIRQQLKLCARQCDLYNKSIVMLTNNLISLSDKTFPGVNELFSSPEKADGHLKWVDFYRTFWHCDCINRMSPDTFGERYQKWCKRKGYHFSADAADALYAASCGLYTTLQRDNNARLLVTVAADQLIALRENQSKLEAEMLNFCKQLPEYETVMAMYGVGKSTGPHLMAELGDVRRFLHRSSIVAFAGVDPGVVGSGKMQLSSVATSKRGSPQLRKALFQVVSTYVKCKPENEAVYQFYTKKRDEGKPFFVCTTAAANKFLRIYYARVKECLNAAESATQVEEG

SEQ ID NO: 122904 - protein, 414 aa, unidentified
MQQIHDRVAGLDVHRDSVVACFRHPGPRGGVVREKERFTTTTAGLQVLEAWLADRDVRLVAMEATGVYWKPVLYALERRFTVWLCNARAVKKVPGRKSDLSDAEWLADVAAHGMVRPSFVPPLPIRELRELTRYRKTQIDARVAEIQRLEKVLQDAGVKLTSVASKVLTQSGRSMIEALIAGEQDPARVAALAKGKMRPKIPALAEALAGHFGPHHAVACQRILGHLDFLNDSITALTEQVDTRTAEFEAVYKSLLPVPGFDRLTIDVIVAETGADMSRFPTAGDLASWAGVCPGGHESAGKRRRVSTTPGNQWLRRALIEAARAAVRTKGSYFGAQYRQIARRRGPNKAAVAVAHSLIELVWHLLSTGEVYQDLGDDYFTNRQDPERRARRLVAQLEELGYAVTLEAAPVVAA

SEQ ID NO: 122905 - protein, 362 aa, unidentified
MASIIYVGMDVHTTNFTFCCYTADSDRGFAVAQTEPDYRQVIKYMERVQKQRGEECKFVCGYEAGCLGYSLYHQLTRCGVDCVILAPSTMHQEKGKRIKTDRRDAENIARCLAFSLYSPVYVPTTEEDAVKEYIRMRDDIKADLKRVKQQIIAFTTRHGFAFDGKSYWTQKHLKWLETLVFEHPLYKETLQEYLILYYMLDEKVAVYDTRIEEMPHLEHYEENVQKLCCFRGVAAHTALSLLVEVGDFQRFRSAKHFAAYLGLVPGEHSSSDKQIRTSITKAGNTHLRRLLVEAAQSYNRGAIGKKVQRSRPDRAAILPRSSLTRIKPMNACNANITASHLSPGTILPKPQLRANWPVLSGV

SEQ ID NO: 122906 - protein, 355 aa, unidentified
MRFYNQQHDYYCGIDLHARILYVCIIDSAGNTVVHKKVDANPDALLDTLAPFQDHIVVGVECMHCWYWVSDLCLDYAFDFVLGHALYMKAIHGGKTKNDRIDSYKIASLLRGGNFPLAYVYPKAMRATRDLLRCRTKIMRHGADLKAHVSNTFSQYNHPAPNLQLRYPYAREEVRNRFNEPAINHNLDIDLNVIAFYTKELASVEHFIEQNAKQHNPQDYQLLQTIPGIGRILALTILYEIGNIQRFPTVQQSNSPTVQQFASYSRLIKCKAESAGKQYGTNGNKIGNAHLKWAFSEAAVLYLRGNEKARKYLNRLQKRMSKAKALSALAHKLGRCVYFMLRNKTVFDEHKFLPE

SEQ ID NO: 122907 - protein, 309 aa, unidentified
METEVGCDISMDWIDVCVLEPPRHFRVANKPKPVERLARELPPGSRIGMEATGTMHQLLADTMCAAGHTVYELNPRWVHRYAGGVGARGKSDRGDAMVIARYVHAEGAHLHPYRSPTPQQREIRTLLHRRAQVMKLKTASRQSLGDQANEVVQKFEQLVKDIDRRIATLLGADPQWKGLAAKLRRIPGVGPLVAAHLVEALARRPFEAVAAFIAYTGMDPRPNDSGRKKGIRRLTHHGDAHLRAALFMGAMAACKVARWRAVYEHNRRKGLPSTAAIIVVARKLARVAFCLFKTGQDYDPERIGGVAPT

SEQ ID NO: 122908 - protein, 351 aa, unidentified
MPVPPAAPLKYVVGLDIAKDTFVACFGHIEVTQHLHFGKPATFANTSAGFAELLTWTVRQQAARAPLWFVVEATGVYYEELAYFLADKQQALSVLLPNKAKHFAQSTEQKSKTDLLDARLLCRLGLERVLPAWQPPTPALRQLRALSRERHSLTGQGARLKIRRHAYQHSYQPDARTLERLNMQQQLVDQQLKAVDKDLADLVKAAPDLARKLAHLTSVPGIGLTTAIALVAETTGFALVENERQLASYAGLDVVQRQSGLSAGATRISRRGNVRLRTALYLPAVSSLRYNPQQMVFYARLRSRHPTGKPGVIAVMRKLLLLCYSLWKNDQPYDPYYHPAHQPPKEVAPAV

SEQ ID NO: 122909 - protein, 338 aa, unidentified
MNYMGIDYHKQYSHITLMDEKGKKLKSGRVANYHSEVEKFLDGTGDAKAVIESGRSSYTMVDIMDELGIEITIAHPLQVKAIAKAKIKTDKRDSFMLAHLLRTDLIPEVYKRSGENRGNQRVLRQRAFYVGSITRTKNKIHALLAQQREEVRDKVSQKKNIFSRDGVKFLKTLSLPDTDKDLLSALLKTFTHLEKRKEETNGLVEKLYQQIPEARLIRSVPGYGVFLSVLAAVEIADIERFSKVSKFLSYAGVIPSTHSSGERSYHGKIVKQGNRWLRWAAVEAVYPGMKADFDIKSFYHRLKKRKGSNPAKVATARRMLTIIYRMLKENRLYIPYKR

SEQ ID NO: 122910 - protein, 416 aa, unidentified
MEVVYKHCAGLDVHKRTVVACVILSDVASESGTKPSKEIRTFNTMTADLLNLSDFLTARQVTHVAMESTGVYWKPIWNLLEANFSLILANAAHIKAVPGRKTDVKDSEWIADLARHGLIIQSFVPDRDQRETRELTRYRTSLVQERASEVNRLAKTLEGANIKLGSVATDITGVSARAMLQRLVSGSTDEVEIASLAKGRLREKTKELEQALRGVMGPHQRFMIAQQLDHIDDLETRIATISEEVIKRQLPFEEDIQRLDTIPGVGRRTAEIIIAELGNNMAQFPTPEQAAAWAGVAPGNNESAGKRRSGKSRQGNPALRAALVEAANAAARTKNTYLRARYHRIATRRGHKIAVVAIAHTILVIAYRLLQRKEEYRELGQTHGEQRSRETKERRLVKQLTSLGYAVTRPNANAAA

SEQ ID NO: 122911 - protein, 417 aa, unidentified
MAESNDTPEPISAFVGIDWADAKHDIYLHPADGSTASHEVIDAKPEALHDWILKMREHFSAAGKIYVCLEQSKGALIHQLMQYDFFVLYPINPKTLARFREAFRPSGAKDDRSDADLLCELVRLHTHRLRPWKPDDEQTRKLNAFCQNRRQAVGSAVRLLQQVREQLKLYYPLALELELNTVLACDFLQRWPTLEELRQAKPQTIRKFFYAHNFRRGDKIEQFVQKLQKQTPVTSDRAIIEPAAMQVRLLAAQLRVILNSIPEFDQTIAEIFHSHPDAAIFESFPGAGPQLAPRLLTAFGTDRDRLESAEQMSVISGVAPIKIASGKSFATHKRWACPKFIRQSFHEFAGCSIKFCAWAKAFYQAQRDKNKGHHTAVRALAFKWMRILFACWKNRKPYDDALYTGALQKRGSAFASP

SEQ ID NO: 122912 - protein, 357 aa, unidentified
MEPTRPTPSLPVVENIGLDLHMRQSQLAILTADGEVLELRVATTREALTRVLGPRPRARILLEAGTESEWVAACLEGLGHEAIVADPNFAPMYATLSRKIKTDRRDALALLDACRLGAYRPAHRTSAARRHVRAELAVRDALVRTRARYITLAKACIRREGLRVAPGASDRFLGRLAGVPLPEALAGELAPLVALLGPLNREIAAADHRIATLVARDPVMRCLMTAPGVGPVTAAAFVATLDTITRFRSAAEVMAYLGLVPSEDSSAERRLRGAITKAGNGRTRWLLVEAAWGVLRSTRADTADLKAWGERLVLRRGKRVAAVALARRLAGILYAMWRDGTEYGAGRRSAASAREAA

SEQ ID NO: 122913 - protein, 395 aa, unidentified
MTERRQERWISRTSTSSSAPGVGKTDHWATALSRDGRKVLDKALPNDEARLRSLYGKLADHGHLLVVVDQPATIGALAVAVAQDMGITVGYLPGLSMRRIADLTPGSAKTDAKDAAVIAQAARTMPHTLHAISTSDEETAALSMLTGFDLDLARQVNQTEGRIRGQPFTQTPPSPRDRGGALAGRTTPSWRSSPPGTAPADLKRAGKARIDARLKKHGCRRHATWAAQIVSALEHQSVVVAGTDAAAVVLPHLARQLIALHAQRADVAAQVETLVQAHPLYQVLTSMPGIGVRTAAVFLAETLGKTFDTGAHLASYAGLAPVTRRSGSSIRGEHVSHGGNKRLKRAMFLSAFASLRSDWTAGGFSDSACFVLQAAFFRSRKSLSTSFGVRYPRAE

SEQ ID NO: 122914 - protein, 354 aa, unidentified
MLIIGCDYHPSFQQIALVDTDTGELQERRLEHREEAEKFYRELAAQGVKVRVGMEASGQARWFERLLGELKFELWIGDATEIARKRERKQKTDRQDAQHILKLMLKDDFPQIWVPSWENRDLRQLLWHRHRMVQARTRIMNQLQAVALNEGVRCNKRLWREKGREQLESFRLAPWASRRRHDLLEWLDRLNPTIGALSQAIEQEVEKCPEAQRLRTHPGVGPLTALAFVLIIGKPDRFQCGKQIASYLGLVPLEDSSGNRRRLGHITKQGNSLLRFLLVEAAQVTVRSLPEWRSKYVHLTMRRGRKIAKVALARKLAVRLYWMMRKGWDYEQLKKFGSHAGQPGHRDGVKQNIE

SEQ ID NO: 122915 - protein, 416 aa, unidentified
MEVLYPRCAGLDVHKDTVVACVRVAANGAAHSEVRTFDTTTPGLLALGDWLGEHGCTHVAMEATGVYWKPVWHVLSDDDLTLILANAAHVKNVPGRKTDVADATWLADLLAHGLIRASFVPEPATQAMRALLRTRKQLVREQAGHVQRTQKTLEDANLKLASVLTDIMGLSGRAVLQALIDGQSDPDHLLTLIDRRVKAPREKLRAALQGRLTDRHRFLLRLHLRQIDALAAAIAEIDQEVDRDLDPFRDAVRLLCSIPGVSELTAQVIVSEIGTDMSRFPTAGHLISWAGLCPRNDESAGKRRSNRLRKGAPWLKTTLVQCAWAGARKKASYLNAQFQRLRHRRGPKKAICAVAASILTAAYHMLRDGTFYRDLGPDHFQNASPQAQAQRLASKITKLGFTCTITERRAVEVVSV

SEQ ID NO: 122916 - protein, 345 aa, unidentified
MLYAGLDLSRKRLDVEVRDGDGAVVAVTAVSPDADGLRTLVERLEPFGRVRAAIESMNGARFVHDELELLGWQVEIADAQKTKGLAPLACKTDKIDAGVLAELCRLALVPAIWLPDPAVRGERERARFRLHLVRHRVALKNRIHATLIAFGKPCPVSDLFGVGGRRLLAQLALPEPWSHTVEASLRLVDQLDQQISECERDLRRRGADHPYVGLLTTMPGVGWVLGYTIAAEIGTITRFSSPTKLCGYTGLCPRVYQSGSVDRRGPLAKNGPRYLRWALIEAAQHAARSVYYQPLYERTKTRLGRNRGSKIARVTVARKLAEASWHMLTRNQPFAPAGATSVLTA

SEQ ID NO: 122917 - protein, 354 aa, unidentified
MDKYIGFDIDCKKTVCCVVENGKNDIYQTIGSDVVAMREFLMSQKQAGYKVHLVFEVSGQAGFIYDSLVDSADTLTVANPSKMTWIYRTSKKNDRIDARKMAVLLSIGEVPSVYMPSKEVRQWRETILHRKKIVSKIVQIKNRIRSTLKSQGYSKPFEKGVWWKKVNFLWMRDICHCGIGECALWCMHLSNLLDEFDLLQSQLKRVSDYLDGYLANNRGGNLLMSIPGVGPRTAEAVLAYTDDVTRFGNYKDYCSYFGMTPKLDESGCCRRLGHISKHGPSVVRCVICESSWVAIRKSQGLRAFYERVMCGQDGRKKIAIVAVGRKMLSIMRAMLMTGELFNEELVNEMVKQAA

SEQ ID NO: 122918 - protein, 373 aa, unidentified
MELRERISQLVDRHDFDEIRFGLEHTGCYSTHAAMYLQRHLDFGCPDVKVYMFNPSLIKAFKKSHFLDAPKNDRFDAWFIAAKLKAGHLPHPFTWSEPMMALQRLTRARYHLVQALVRESNFLMTNLYLKWSDYTLVFDNKLSATSLAVMEEFESAEALVEISMDELVDFLVQHGKNRFDDPLAVAKELQKAARTSYRLPKAVNDSVNLAMASSIRVIRTVQEQLKSLKKAIEDHLETIPQTLDSVPGIGPIFASGILAEIGDVTQFESHKQLAKFAGLAWSQYQSGNFTASQTRLIHSGNRFLRYYLMEAANSVRMHDPVYAQYYAKKKAEPKQFAHKRALALTARKLVRLVFFLLKTNQLYQPEGGNRQNT

SEQ ID NO: 122919 - protein, 367 aa, unidentified
MQNTIVHYEGATSLEAVATKVKLSSARIKIGLDVHAQLYVAVAQYDHLLPKAARRLRPGEFVPWVESLLRQGHSVHVVYEACGFGFSLYRQLIAAGAHCYVIAPRKLDEECSRVKTDPRDATTLCQRLSRYLEGNTRELAVIRVPTPEEEQARHLSRQRSQLVCHRQKLEAQGRSLLLSHALPAPAHWWKEQTWTRLGRHLPQWIIIRLEIAQPALLTLERQINILTTQLEASIASALPRGLGKLTTAVLTREICDWHRFNNRRAISSYTGLCPGERTSGSKRVPGSVTKRGNARVRAALVECAWRMVRFQPQYPPVQKRLGILAKGSPALGAVRKKAIVAVARRLAVDLWRLHTGRCTAEQLGLEL

SEQ ID NO: 122920 - protein, 338 aa, unidentified
MKITTIGLDIAKSVFHLFGVNQMGRFVQKKQLKRKQVLAYMAKLEPCLIVMEACGGANYWAREFIALGHQVKLIAPQYVKPYVKGNKNDYNDAEAITEAGQRPNMRFVPIKAIEQQDIQNFHCQRERIKKERTALVNQIRGLLAEYGLVIHKGVAAVRRDLPEMLEDAENGLTPLGRELFAELLEELRMLDERFSQCDRRIKVMNQDNEVCQRLDGVLGIGFITASATYAAAGDGKDFMNGRHYSAWLGLVPGQHSSGGKTVLLGMSKRGNAYLRTLYIHGARAVLRHSANKDDRFSRWAQAVLARRGHNKACVAVANKMARIAWVIMAKGETFRVAT

SEQ ID NO: 122921 - protein, 416 aa, unidentified
MPEEGEPVHYYLGVDWADQTHAVWVVDERGTKITARTVPHTAEGLSEWGRELDEWRAQGLELWAAIERPEGRVVDFLLDHGVVVYPVNPKALDRARDRFRQSGAKSDPFDARVLADFLRTDHASFRALQPSSEAAQELKLLTEDCQRQIRQQTRLVNQLTATLKAYYPRGLEVAALTTALAREFLQAYPTPAAVAGLTERQWQRWARAHRLSEARTQELWAVLQRPQLPVPAHVVRAKARLLQTLLTELEPVVAAVGAYRQAVEDFFAALPAAQWIRTLPIGEHGITAPTLWARLGDAPGRWESFQHLQAHAGAVPVTVKSGKQHVVHFRFACDKMLRHVVDQVAFLSLRSSEWARAYYDQQRARGHSHRETLRALGAKWLKIIFVLWDRQVPYDEQYHLATMARQQLRQRSKKIA

SEQ ID NO: 122922 - protein, 414 aa, unidentified
MNPSTLYVGIDVARDRLDVSFLDADEEQVHLAQAYPNRPAGWQALVESLQGLSEQFRRIVCGMESTAVFHEGVARYLREQVELVYDVQVLNPLAVKRLGQAMLRNAKTDKADSRLIAQHVIRMKPEPTPPASPAHEALKEITRRRRRFVEDRSQESNRLHTLLHRHYPGYRQIVGKHLTVSLLTVLSQAQSPRAILAQPVADIARISIGTRRYIGLDLAGKFHQLARSAPSQQFPRSTELLLQMSARRILELKNHIKSLDECIAEMTKSLPEIALLQTIPGIGAVTAGTIVAEVGDIRRFPTKEKFVGYCGLYPIVWESGQVKRKYRMTRQGNRWLKTALLVASAPARLYNPRIAAFDQRLHASNKTTKAAGGALATKLAHFCWAILTKNQPWSDKVAKNAQRKAEAMLATKPS

SEQ ID NO: 122923 - protein, 310 aa, unidentified
MLDASILDACGGPEGVSRSFPNTPEGVADLIVFCQEHGAGLVAMEATGGYEQPVVASLQGAGLSAAILNPREVRRFAESMGRLEKTDRIDAGMIAWFASVRKVRVARPVRPEQAELRALVTRLGQLTRESVTQRNQLRQSSLPRVQESIRELLALIARQIKELAAEVAQLLAADPLWSRLDQALREIKGIADRSVGLLMAELPELGTLGAKAVSKLAGLAPIARDSGQHQGRRRVRGGRAEVRSLLYLVARGVAIYEPEFRQFQERLKKAGKPSKVIRIALAHKLLVRLNAKARDARRELALLDPQLARP

SEQ ID NO: 122924 - protein, 405 aa, unidentified
MIFAGVDWAETHHDVHLCDEQGRKLASGRLAEGVEGIARFHELAAAYAGEPGEVVIGIETDRGLFVSALAAAGYLVFAVNPMSVARYRDRHSVSGAKSDPGDAKVLAGLVRTGRHNHRPVAADSDQVLAVRALARGHQSMIWARRRQANQLRSALREFYPAALAAFDDLTSGDAIAVLRAAPQPAQGAALSRTQITAALRRGGRTRRLPERAAAVQAALRSPQLPPAPALAGAMGATVAAMAAVIGEMNTQITVLEQELSAGFEAHPDAQVVRSLPGLGIILGARVLGEFGDAPDRYPDAKSRKNYAGTSPITRASGARRAVLARHARNKRLADAIYLWAFASLTASPGARACYDARRAAGDTHHQALRTLGNRLVGILHGCLATRTPYSEHTAWAHRTHLTPAA

SEQ ID NO: 122925 - protein, 348 aa, unidentified
MRRVIGIDTHRTFGEVVIWEDGRLRYVGRVDMTRTALEGFGKKLLATDEVVIEATGNCMAVSRVLTPFVKRVVIANPLQVKAIAHAHVKTDKVDAGTLASLYAAGYLPEIWTPDAATERRRRLVARRYQVVRHRTRIKNEVHSILYAHLIPRCPHADLFGHLGRTWLTSQPLPDDERAAIERHLRELDRLGDDLRVLDQEIAQSALDDAAIKRLITITGVNLAVAAGLVAAIGDIGRFSSPQKLVSYFGLNPRVHQSGLGAAHHGRISKVGRSHARAMLVEAAWATAKAPGPLHAFFVRIRARRGHQIAAVAVARKLAVLCWHMLTKQTDYHWARPALIANKRRAMEL

SEQ ID NO: 122926 - protein, 392 aa, unidentified
MRYWIGFDVGKAFHWLCVLDEEGEEVLSRRVEATEEDLEAACSEVERLGGERAVGIDLLGGPATLLEAVLLGRDERVFHVPGIAVNRARDAYRGEAKSDSKDAHVIADQLRLRRASLHEVRPKDETTTEMRVLVAHRRDLLQDQTRRAARLREVLLGVFPGLEAALDLKREGALLAVTRVATPAAARKLGRARLYRWLKARDVRKAEDLAERIVEAAKAQRRELPAAETKAALVAEIASEILRTRERIAELDRRLEELLAENPAARIVRTMPGMGVVFTAEFLAEVGNLGRFASADALAAAAGVAPVLRASGATSYRRRARRGNKVLKRVLYRSAFSCISHHERSEAFYRKKRAEGKGHHQAVIALARRRVDVLWAMLRDGQRYSERPSQAA

SEQ ID NO: 122927 - protein, 349 aa, unidentified
MAVTIVDTARPVTGGVDTHLDVHVAAVLDGIGGLLGVEQFETTAAGNKALLGWLRSFGPPARVGVEGTGSYGAGLARYLRGCGVEVVEVDRPNRQERRRKGKTDTVDAIEAARAAQAERQLGQAKTRDGHVEAIRVLVVAKRSAKSSRIKTMNQIRHLGFTAPEEIRQVLHGVSRRLVAKKAAAMRPRAGQDPVTFATKTALRTLGQRAVALQAEMKQIDVLLGQLIREHWEDLLSLYVVGVDSAAALLVAAGDNPGRLRSEAAWAHLCGVAPIEASSGKVTRLRLNRGGDRQANAALWHIVTTRMSSDPRTRDYVERRTKEGRSKKEIIRVLKRYVAREVYYYLRPIS

SEQ ID NO: 122928 - protein, 337 aa, unidentified
MKFCGIDLHSNNSVVVVTDETDRVLVSRRCPNELTQILPLLEPYRRELLGVVVESTYNWYWLVDGLKAAGFEVKLANPVAMQRYNGLKHSDDKDDAAFLAHLLRLGILPTGYIHPPQERALRDLARKRIQLVRTRTQHILAAENIMARQSGHRLTCNEVKSLSATAVDRLGLPTEVALAMKANVAIVQALQTQIDVLEERLLHEASLRPEFCLLKTMPGVGEILATVIMLETGDIERFADVGNFASYARCVKSAHYSNGKKKGEGNTKNGNAYLIWAFIEAANFARRFSTDAKRFFEKKKAKTNAVVATKALAHKLARASYHILKEKQPFDAKRCFA

SEQ ID NO: 122929 - protein, 414 aa, unidentified
MSLALREAKFFTGIDWAAEIHAVCVMDATGKIVAQFTIAHSADGIATLIRRLARFGDPAEMQVAIERPNGRLVDLLPEAGHPVVPVKPNAIKAWREGEVLPGAKSDAGDAAVIAEYLRLRQHKLTVAVPYSGRTRALRTVVRTRGDLVQTRVATANQLTALLEDSWPGAAVIFADIDSPIALGFLARYPTPASAAHLGEKRMAAFCSGHGYTGRRTAAELLERLRSAPAGTTDQAVTIGLADAVLALVTVLTALGAAIKNLDRPAAARLGEHPDGEIFTSLPRSGQISAAQMLAEWGDCRQAYEHPDSVAALAGVTPVTKESGKHRSVQFRWACNKRFRQAVTAFADNSRHASPWAAQIYHDAIAGGKDHSHATRILARAWIRVIYRCWLDGVPYDPAKHGAAATLANQTAARG

SEQ ID NO: 122930 - protein, 345 aa, unidentified
MKIVGCDLHTRYQQIAMLDEETGEMVERRLEHATGEAKEFYAQLAGSVRVGIEATGHTRWFERLLAELGYELWVGDAARIRASAVRKQKTDARDAALLLELLLTDRFPRLWRPSARERDLRQLLWHRQKLVWMRNAIGNQLHALAMGEGICRRKQLFTKKGRSELEGLNLDPWASRRRQELLGMIDQLDASLKQFDEAVTQQAAESAEARQLMTHPGVGPVTSLAFVLIVGPVTRFERSKQLVSYLGLNPREHSSGGKQKLGSISKQGNPMLRGLLVEAGHTAARMDAELRQDYQRLRLRRGGSVAKVAIARKLAVRMYWMLRRQVNYAQLVRTQGSSRATLVQQ

SEQ ID NO: 122931 - protein, 341 aa, unidentified
MSVYVGIDVHRKRSQVAVIDAGGEVLANRNVPNGAEAILKVIGGLPPGTPAALEAAFGTGWLVAMLEDYGFAPHLVHPSRGKAIASARLKNDKVDAAILAQLLRADLLPEAWIARPAVRQLRALLRHRARLVRLRTSLRNRIHAVLADHGHDRPAGCWGGPGRAWLACLELPAVSREIVDDGLGLIDAVEARVDRLDWEIRQRARSGPRVKVLTQLPGVGPFTALAILAEVGDVSRFGSARKLASWAGLTPAVRGSDRVAHYGHISKQGSAWLRWVLCEAAQTAKRHPPFAASYQAIAKRRGKKIATTAVARKLLTRAWHLLTDAEHAAAPQPAAPPTAAR

SEQ ID NO: 122932 - protein, 351 aa, unidentified
MRHIGVDLSKRAFTVCFLAEDDSSDLVTYPLTDEGLGAFRAQLAPDDRLAVKVGTNAYFFHDQVIDAVAEVVLVSTYQFAVIAKSKKKTDRADAILLARFLKLDYLPRVVMPEPRIRQLRHLFTAREALVSMARGLKNMGHAALARNGIAVTRAAFASETGRRRLAHLEGLAPVDRQVLDMVLRQLETVDREIEEMERAIIQVGRYVPGVKRLLQVRGLGLIAAIGVLSEIGDVSRFPSAKQLVAYAGLATAVRQSGATDRRGHITKHGRQRLRGFMVEAVLSMMRNPADRRTPLVDFYQRKKQEKGAGKAICAAARKLLTVIYVILTKPLDYWFLEERLYQKKLKQLAAA

SEQ ID NO: 122933 - protein, 355 aa, unidentified
MYGLKHQKEKRSMDHFAGLDVSVKKTSVCIVDDMGKIVREVKVASEPEALLAVLKNPAYQFKRIGLEAGPLSQWLYSALAEAGLPVICVETRHMRAVLKAQINKTDRNDARGMAQMMRVGLYRPVHVKTLRSQKLRMLLTHRQLLLSKAIALENDLRGTLRNFGLKVGMVGKVKFEARIRELVETLPDLAVLVEPMLIVRRVLREQIVILHRRLLAVVRDDEVCQRLMTTPGVGPVVSLTYRATVDIPARFRKSKSVGAVFGLTCAKYQSGEVDWDGRISRCGDEMMRTMLYEAAQAMLRSKKWSWLKAWAMQIARRRGIKKAIVALARRLAVILHRIWVDGTEFRWTREQAVAA

SEQ ID NO: 122934 - protein, 343 aa, unidentified
MRVVRIGLDLAKYVFEVHGVDKHGKVVVRKRLRRDAVARFFANLPACLVGMEASNGAHYWARVLTELGHQVRLISPQFVTPYVKSNKNDRNDAEAICEAVGRPSMRFVPRKSTDQLAVQAVHRIRRRLVADRVRLVNQIRGLLSEHGIVIARDIAQLRRGLAIIAGNDNDGLSEMVRPLMRELQTELAELDRRIATYDRRIREIFRTSEQCQRLGKIEGIGPVTATALIAAVGDRTSFKNGRQFAAWLGLVPKQRSSGGRARLFGISKRGDRYLRTLMIHGARAALSRAGGKQDPRSLWLGKMRQRRHPNIAAVALANKNARIVWAMLSSDTAYEPGLSVKPT

SEQ ID NO: 122935 - protein, 409 aa, unidentified
MEVIYNSCCGIDVHKNKIVACLKIKGKQNVIKEFSGQTEDIRAMANWLMENKCEKIAMESTAAYWKPLVNIFEIKKLDYTVINARDYKNLPGKKTDVMDSEWIADLLQHGLLKYSYIPSREQRELREATRYRKSLIQERSRALNRLQKMLEGANIKITSVLSNVMGVSSRNLIEYILDNEESMTVEQADKLVVTRIHAKIEDVVKAMDGIITPFQKTLIKEVIAHIDELTERINKMDKIVDEYMKEYEKNKKKLEKMPGLGKRTSEVILAEIGQNMNRFPTAGHLCSWAGVCPGNNESAGKRRSGKTRNGNKTLKSILVECAQAASKHKDSFFYSQYQRIAIKRGKQRAKMAVAHSMLIAIYYMIKEDKEYKDLGADYYNQFNTEKKANSYIKKLKELGYDVQINAQAS

SEQ ID NO: 122936 - protein, 359 aa, unidentified
MEEYIAFDSHKHYTWVEHEKVGSGKVRQYRLEHAPGAIRRALARCEPGTAVALEATANWYWIVDEVEQAGLVPKLVHPRKAKLMMGLINKTDKLDAHGLNRLQRNGTLPTVWIPPGPLREVRELTRTRVVFVAQRTRCKNRLTAALANYGTPASEYSDPYGKGARPELEARIERLPEQAGWASRQMLAQVDTLGQQIEQFEQRLKGLVEVTPEMHRLRSLPGVGVILAATMQLEIGDLARFASAEHLAAYAGTTPRVHASGGHTRYGRTRADVNRYLKWAFAEAANSVAVNSTRYPERHASELYQRLRERKGHSRAVGAVARHLAEAAFHVLSRQQDYRDPAASRGRTREVEARSCHEP

SEQ ID NO: 122937 - protein, 419 aa, unidentified
MSTASNKSFTVFIGIDWADAKHDVCIQVAGEEQREFCCIEHNVEAIDAWAQSLYRRFGGPMAVALELCKGPLVYALQKYDFFVIFPVNPSTLAKYREAFTPSRAKDDPTDAELALDLIQRHADRFTPLMPQSVEMRTLASLVEQRRGLVNDRVRITNRLRNTLKQYYPQALEWFDRIDTALFCDFIERWPTLLQVKRARRATLQNFFHQHNMRRAQVLDMRLASIKAAHALTTDAAVITPHRLQAQALVDLLRVTLMAIKRFDEEIAELAPQHPDYELFRPLPGAGPSLAPRLLVAFGEQRERFKSAAELQRYAGIAPVTERSGKKHWVHWRWQCSTFLRQSFVEWAAQTVNKSYWAGVYYQQQRDKGCNHQAAVRALAFKWIRILYRCWVTRTPYDEAKYLKALQERGSPLLKMAEAA

SEQ ID NO: 122938 - protein, 389 aa, unidentified
MLYLAIDQHKCQLTVNVRNEQGDVVQNRQVSTNHNDIDEFFVSFSKKARKYRGYMAIVEVCGFNDWLLEKLKKTRCSEIVVIQPDNSAVNKTDKRDANVLGELLWNNRNRLRGGQRPNGIRRIFPADPADAQVRQLANFRQHLVTQRTRIINKIKGVLNKHNMAQDAPSKLYHTKKFRQWIATVQLPVVDRLEVDMNITSWNLYDKQIIDVEVELIKRSETKASDVFRLKAIPGISAMGAITLLSRIGDIKRFKNPDSLANYFGLTPGCHNTGGKHRVGGITKRGNAIARQVLNFAVIHIVRKDPAMKAWHKKIKNRRGAKTAKVAVMRKLATIIWHILRWDRPYQFRYDPPKKDDLRSSREVLRGMGNKNHSDKKRRPPLKSRGKTRA

SEQ ID NO: 122939 - protein, 351 aa, unidentified
MMIIGVDYHPSFQEITFLVEETGEYGEQKLNHSNGEAERFYRDLHARGIHVRVGMEATGFSRWFERLLAELDFELWMGDPAEIKAKRVKKQKYDREDARLLLRLMRENNFPKIWVPSSENRDLRQLLWHRHRLVQMRTRIMNQLQALAMNEGKRWKKKLWSAQGRTELEKLPLAPWASRRRRELLELLDRLDPSIEELSKAVEREARKRSDVLRLMTHPGVGALTALAFVLIIGTTERFQCGKQIGTYVGMIPSEDSSAGKQRLGHISKQGNSLLRFLLVEAAQAAARINPHWRRRYMHLAMRRHKSIAKVAMGRRLGVRLYWMWRNGCEYSSSLEFGSYVGQLGTGHGVK

SEQ ID NO: 122940 - protein, 430 aa, unidentified
MTKLSSTPADAVLVAIDMSKHRQEVLIERPEGGRRRRMTVMATKTDYDRLASDLADIGRPIVVGFEATGNYHRTLAHRLLTAGFELRLISSVALARTREALHNGWDKNDSKDAQVILHMLRIGATQRYVDPLAAGINDLQEMSKTHEAISKAKTQTWHRILTHYLPLYFPEIERFAGNSRSDWFLALLERFPTPGSMTALGQEAFTREAWSLVGRKVSKARLINDIYETACASVALPVDEDSVAIVMFRMVIAQARSLIRQRDEIERTAHAMLSENRDYQLLRMIPGIGPINALTILAEAGDLRRFAHHRQFLKFCGLDLATCQSGTFRGRTKLSKYGNARLRRTFWMAAQVAARQRDNSFRDKLGRYMEGHANDPDRRRKAMTALTAKMARVAHAVIKTGTEYRPFLERADTRWKDPSLLCREGATATL

SEQ ID NO: 122941 - protein, 431 aa, unidentified
MKSKPYASKRVNDVVVEEVIKGRDGQAVVVGVDVGKLELSVVARWGEKEFERPWRVTNPVEIPVLVGVLRDLGRGRSLRVALEPSGTYGDALRQALDDAGMETWRVSPKASCDYAEIFDGVPSQHDGKDAAVVAELAAAGKASIWAPRAPDAWEQELAYWVEWLEGQRRILMLWTGRLEALLARHWPEATRVLRGSSGTLLRVLAKYGGPAELAAAAEAEGQLRRWGGKFLSATKVGELLASARTSVGVRMGEWERRRVRDYAQQACQARRELRRSQRELRRLAKGHEVLPALGQAVGVPTACVVWVSTGDPRQYDSGPAYRKALGLNLKERSSGKYKGVLRITKRGHPRSRQWLYFAALRLVQRGGVRRWYEAKKARDGQVAKRALVGVMRKLTLAMYRVEQGKPFEASRLFPGKKRPAATGSRTCAGSD

SEQ ID NO: 122942 - protein, 287 aa, unidentified
MEDVSIVGLDLAKRVFQVHGATSDGRVVCRKKLSRGQIRAFFEQLPPCVVAMEACATAHFWAREISVLGHEVRLVPPAYVKPFVKRQKNDAADAEAIAEAASCPTMRFVEPETPRQQARAMVFRTRDLFVRQRTQSINALRAHLAEHGIVVPQGVWNLPGIQRLINEAGDDIEPLVIEMSRLYLAQITTLSAQITSLEAVLKKEAAQSDASSRMMTMPGLGPITAMAIEAFAPALTVFRKSRDFAAWLGLVPRQHASGGKQVLGRTSKMGQRDIRRLLIIGAMSVIR

SEQ ID NO: 122943 - protein, 419 aa, unidentified
MKKIKPKTTKAVNQKVLISTVDGGSDKHYGYYRRPDGSECKAFDFWNNGRGFKEFWERISSAARAQDLEEIIVGFESTGPYMEPLIQFLRSKKSVRLVQVNPMHTKRLKELTGNSPLKTDRKDPKVIADIIELGHALTVVIPEGPAAELRRLTQGRERTMASRTRLFNQLQSLLVISFPEFLQVMSDVKTASAQHLLRNYPTAQKIISLGEPALAALLRKVSRGKLGEDRARALFEGANESVGVREGRSSMLLEIGLLLDTIASYDHFIDSVETEMVRYLEQVPYSRAILSLKGIGPITAAGLIGEVGDFTKFGTISEVMKLAGLDLYEVSSGKHRGKLRISKRGRPLIRKLLYFAALSSVRKGGVMYEWYQRALGRGMVKTKALVAVSRKLLGLIFALVRDHSVYVENYLKPVLQEAA

SEQ ID NO: 122944 - protein, 337 aa, unidentified
MKYSIGLDISKSLISVYIPINSQSIEIENNTKDLKRLLSKLKKLYKKEFKHLVFVYEPTGSYSDLLRKFCFEKKIKSFILNPKRSSNFAKSMGERSKTDKIDAELLSNAIVLAKEEDIQIPTYDARVEDMSTLMSYYRFTVKSRVSLVNHLESITAKDGVAYAIDELREEIARYKNKEKNILLEIAKMINKDDELKQDFENIKSITGIGDKSAIVLLYLFLKYPDANQREITSLVGLDPIERSSGTSVRGKIHISKAGARIYRGTLFMGAMTAIRHSSHFKSFFERLQARGKHTTLIQIAVMRKMIVIAHSLYKNKKKFDEQRYAKDCGRCLVEQAA

SEQ ID NO: 122945 - protein, 384 aa, unidentified
MPKQSTATAFDHDSTLVLALELSGKGWEVGAVLPGVSRRPRRSLPARDMAALLQQIERWKAEVLRAGRTVRRTVLAYEAGRDGFWIARYLLACGIEVQIMHPASIPVERRGRRVKTDRIDLDMLLRTLLAWLRGEPRVCSIVRIPSEAEEDMRRPERERERLVSERVALENRIENLLCLQGITGFKPRLKKAAVRLDELRRPAGDPLPPQLLEELKRLMVRHRLLSEQLREIEAAREQTAMAAEPDHAVQQIQMLTRLVGLGLATATGLTREVFCRSFADRRAIAGFVGLTGTPFNSGGSEHEQGISKNGNPRVRRILLQLAWRWLRFQPDSALSCWFLERTGGAKGRIRKIMVVALARKLLVALWRYIETGELPAGARLAAAA

SEQ ID NO: 122946 - protein, 441 aa, unidentified
MVDTAVTTPEPVWAAFLALDWGSQKHAWILQPADGGKRNEGFVDNTPEAIAVWAAGLYQRFGGRPVAVALEQKRGSVVNLLLPYAHLVLFPVPASMSASYRKTFVPSGAKDDPTDAGWILDLLLRHRDRLRRLAPDDANTRLLLMLVEDRRQLVDDKTSLTLRLQDCLKQYFPQLAQWFDVDTALVADLLQQWPDLQHLQRCHDGTLRRFFRKHHGGEKLTGERIEAIRAAVPATDDPSVLEAGSMKARHLTESIAALRGQITRLECRRDELVADHPDAPIFASFPGAGPATVPRLIAAFGTCRERYQCAFDVECDSGIAPVHIRSGKVDLVSMRRACQKFTRQTFHEFAGQSIPRCQWASAFYHAHCTKPAEHHAAVRALAFKWIRIMFRCWKDRKPYDEQLYLTSQRRRSALLGPGLAAVTSLEWKNVAGFSKLSEKKA

SEQ ID NO: 122947 - protein, 364 aa, unidentified
MNNPQEIEDEEHEQVIERVAAIDVAKASGMVCVRVPHETRPGRRVSRVWEVPATTRAVTELGDHLVSEGIEKVTVESTSDYWRIWYYLLEAAGLDIQLVNARQARNLPGRPKTDKLDTVWQAKCTERGMLRPSFVPPAEIRQLRDYTRLRSDLTQERTRHWSRLEKLLEDALIKVTAVASTIDTQSVRAMIEALIAGERSPRVLADLAIGKMKAKRAALIEALTGRFDAHHGELARMLLDQIDALTTHIDALDGRIEALIAAIPAARGVDAAGTTGPGAGLGPDAAVRPAIDRLDEIPGIARHTAQVVLAEIGFDMTRFPTAGHLVSWAKLSPRTIQSGPKSWARPPPRRPRPTPSSARGTGGW

SEQ ID NO: 122948 - protein, 335 aa, unidentified
MKQEEKNSAVRYVGIDVSARVLVVAVGGEGLAWQVRELANTAAGQQQLQHMLGKTSGRTRVCLEASGNYSLDVSLLLHRLPGVELSVINPRMARRFAESLGERSKTDPVDARVLGEYAARMPLQPWAPPGAAALKLRGMTRAIDALVRTQTQGKNRKHAIAVSAALPRVVAQELARHEKYLAHRIEQLRKQARRLVEANAELQRQWQHLQSVPGIGETSALAILGELAVLPPTLDARQWVAHSGLDPRHHRSGSSIEWQPRISRAGNARLRAALYMPALVAVQHEPHLRRFYQRLLAHGKAKLQALTAVMRKLLHGIYAMLHHDEDYDGGKLCAA

SEQ ID NO: 122949 - protein, 327 aa, unidentified
MMFIGIDISKEKIDLSWLRDQLTNKIKTKVFKNKHQDFEKIEKWLLNTTKSVASELVITLEPTGVYHEALMYFLHEQGFNIILANTGKAKKYADALNIIHKTDKSDATMLAHYGCAKHAVVDYWQPEALEVRELKALIRRLDALESNRQREANRLDASEFSNVSTRVCQSIKVTIAFLDDEIKQLKSDIDNHIDNEPDLKRNRKLLESIPGIGPVLSRELTYLFAAKKFNKAKEAAAYCGLIPRHNESGKLKGRTTISKLGPARIRCKLYMAAIVAGQWNKRIKRHKLTLINNGKTPMQAVCANMRKLIHICFGVIKNQEAFKLQES

SEQ ID NO: 122950 - protein, 323 aa, unidentified
MEEGRIQSTVTALEKHFGGEPQMRIALETGTHSPWVSRLLKSYGHEVIVANPRKIPTLTGSESKNDRNDAEQLARMAAFDPKLLHPIEHRSLERQQDLNLIHTRSVLVRARTMLVNSARGLVKSAGGRLPSCSSEVFPEKVSVAVPRELKAACEPLLKQITQMNRTLAGMDKQIAGLAKKYPEIALLRTAPGVGPVVAACYVLTLGHPETMETNRQAGAYLGLRPRQQQSGDCDPQCGITKTGNSYLRSLLVQSAQYILGRFGPDSELRCWGLKLAACGGKRGKKRAIVAVARKLAVLLLSMWRNGKKFEPFPQSATQLAKAV

SEQ ID NO: 122951 - protein, 387 aa, unidentified
MPQPNDLSRSLVALDQDSTIIAVVEMSQSSWLVGGILPGIERQPRKKLDPSPERLLALLHRWRDESVRAGRTITRIAVAFEAGRDGFWLARWLEARGVEAHVIHPSSVAVSREHRRAKTDRLDTALLQRGFLGWLRGERGHCSMARVPTIAEEDAKRPNRERECLVKERTRLVNRMKGTLARLGIRNFRPTLRNAAEHLAALSTPEGSPLPPNVAAELERDIARLRLVIGQIKQIEEARRQRLEEQPEGGPHAMVRLLARVVGIGIETADMLVNEVLSRPLRDRRAVARYAGLTGAPDESGAKRREQGLAKAGNARVRRGMIQLAWRFLRFQKNSALTQWYQARTADRRGATRKTMIVALARKLLIALWRFVTIGEPLDGVTLRPAS

SEQ ID NO: 122952 - protein, 339 aa, unidentified
MKLYAGIDLHANNNYLVVIDERDQAVFRRKQANVGTEVLRNLAGFQGQLVGIVVESTYNWYWLGDELMPAGYRVHLANPAGIRQYEGIKQTNDWSDAHWLAHLLRLGILREGYIYPRERRAVRDLLRKRRQLVQQRSAQLISIQTLVNRNTGDQITSSHIKQLSCPEVEGWYEEPERVMAVQASLRVQQALEQEIKRIEKQVKGRVKLEAGYQRLLRVWGIGEILALTIMLETGELSRFASVGDYSSYCRCVQSQRLSNGRKKGENNAKCGNRYLAGAYVEAAHFAARFYDRAQAFVARKTAQVNRALALKALANKLCRASYYVMRDGVEFEPTQLFGS

SEQ ID NO: 122953 - protein, 388 aa, unidentified
MTSKLYVIMQDLMEWSAPLPKRPKWGQDGIFYPLLTEARQTMANDHTNTDNVVNVLGIDLAKQSFHLYGVDAAGQRVINKTLSRKQLAAFVANLPPCLIGLEACGGAHHWARRFSAFGHTVRMMAPQFVKPYVKSNKNDAVDAEAICEAVQRPNMRFVPTKGIEQQDIQSLHRVRSQLVSRRTAQANQVRGLLLEYGLVIPKGIHHVRKALPALLEDSENALSALFRELLNELYDEMGYLDQRIATLERKLAAISAQHEDCQRLMTIPGVGLLTATALLAAIGDISVFKSGRELAAWLGLVPRQHSTGGKPTLLGISKRGDAYLRTLLIHGGRSVSRVAHKHEDKHHLWISDIKRRRGENISNVAVANKNARIAWALLTKKENYRAAA

SEQ ID NO: 122954 - protein, 371 aa, unidentified
MSTTSTTPERMVIAIDPHKASWTAAVVDASQQPVATIRVPVSRDGYRALRRFANRWPDPTWAIEGASGLGAPLTARLRTDGIDVVDVPAKLAARVRILSTGHGRKNDDADAVSVAIAARSARTLNSAAVDGAVIALRAIVEHRDDLVKTRTQTVNRLHVVLTNLIPAGANRDLTAERAAELLRGIRPRDVAGKTLRSLAADLIAEIRQLDRRIAKAAADIQTAVTESGTTLTDLCGIGALTAGKILGRVGTIDRFRSAAAFATYTGTAPIDVSSGDVVRHRLSRAGDRQLNLCLHVMALTQIRQDTPGRAYYLRKRSQGKSHKEAMRCLKRRLSDVVYRQLRHDANNMEAGPGGHSGAALSSSAASSNPAH

SEQ ID NO: 122955 - protein, 355 aa, unidentified
MENAKYIGMDVHKDAISIAVLNSSGKLVMESIIETKANTILEFVHGLRGSLYLTFEEGTWAAWLYDLLKPHVTKLVECDPRRNDYLKQGSKSDRIDARKLAELLRSNLLRPVYHGEHGVRPLKELARSYLTITKDQARVMTRVKAVYRSWAIPCAGKQVYGQRHRLEWLGKIQEAGVRRRAEFYYVQLDALRSLRLVVRRELLLESRKHGASKLLSQIPSIGPIRAALLIALLQTPDRFRTKRQLWAYSGLAIETHDSAENQYINGQLQRSRKQASIRGLNQNHNHDLKNLFKSASAVAAAKAGPFQKFYDAQIGKGLKPEMARLTLARKIAAITLIVWKKGVSFDARYLNPQTA

SEQ ID NO: 122956 - protein, 322 aa, unidentified
MSQPGSLCVDIDVSKAILDIAASSAIEQFSVGNDSDGFDAIIAELRMYAIALVLMKATGGLETAIVCALQAEGFELAVVNPRQARDFARAMGYLAKTDSIDARVLSQMAEVLNRHPERERFIRALPDTECQVLTAMVVRRRQLITMLVAERNRLHPAHPLNRKSINIIIKALEDELARLDADMNSHIHSHFKELAKRLSSIKGVGTMTAAALLAEVPEQGNLSRREISVLVGMVPVNRDSGTMRGRRTIFGGRAGVRTALYMAALVATRFNPVIKVFYMRLLAAGKPKKVALVTCIRKLLTILNAMLRKNEEWNESYHHVAP

SEQ ID NO: 122957 - protein, 461 aa, unidentified
MAKKAKKVKSAKGAELRIVNPDAAGIDIADGIMQVCIPADRSKDNNRAFGAYTSDLHAISAWLRDCGIKTVAMESTGVYWIPLFCRLQEDGLDVVLTNARDVKNITERKTDESDAEWLMLLHQYGLLKASFQPHNDAKRMRTLTRHRDTLSREASSMVLRMQKAMQQMNIKLTLVLSDITGKSGIRIIEAILAGERDPNKLAELADIQCKTPKEEIAKALEGNWEEDLMFVLRQNYDTFKHYCTQLGECDAELEKLMENYRAEVAKVEDTSYSPAKKRRDYKKTRHTVSFDVERKAYEMWGVNVFEIPGISHLTALELMSELGHDFTRKFPSSKQFCCWCNISPNTKISGGKRISSHVPHRRNNVGLIFRSIASSLANAKNQLGNFYRRIRSRAGGKAAVIATAHKVAEIFFAMVANQTTYNPERVGIDEKVLLEKRITRYKRELERITGTHIEIGNACVP

SEQ ID NO: 122958 - protein, 500 aa, unidentified
MEIVYQCCTGLDIHKKDVKACLITTGPDGEIHKEIRTYPTKTQDLLQMRDWLKEAGCGHIAMESTGVYWKPVYNMLEGYFKLLVVNPQYVKALRGHKTDVKDAEWIADLFRLGMLKASFIPSTDQRELRELTRYRTRLGEERAREVNRLQKTLEDTNIKLGDVVSDVMGKAARMILYALANGETDPHRLASFAVGRVRASQEQLERALTGQVSAHHRFMLGEQLKQIENLDAAIKRVSQEIANRFAGQETDPITEKPQITPSKQEKPEPTKPTQESVGSCTNDQVVGPSLLDGPMSPPSTSQPAEGSRAQRDEDIQRAIQASESGLCGRATQLLSWHQAMELLCSIPGISERAAQGILAEIGLNMGQFPSARHLASWAGVCPGNNESAGKRFSGKTRQGNPWLRRLLVQVAHAAAHSKKSYLAVQYRRIASRRGAKRAAMAVAHSILVIIYHVLLEQKSYQDLGNNFFDERDRQVVEKQLVRRLERLGYRVDLQELPQTG

SEQ ID NO: 122959 - protein, 400 aa, unidentified
MEVLHPHCAGLDIHKDSVVACVRHMLDGKVTTEVKTFKTTTQELMALSDRLSAEGVTHIAMEATGVYWKPVWHILCDGEFELVLANAAHVKNVPGRKTDVNDATWLADLMAHGLIRPSFVPDEPTQQMRDLLRTRKQFVRERTGHTQRIQKTLEDANIKLDSVISNIVGISGRRMIEALIDGQAAPEALAALAHGRLQATPAELEASLRGRVTAHHRFMLRLHLDHLDALDAAIARIDKEVEDNVEPFRVAIEMLTTIPGVSSLSAEVIVSEIGIDMSRFPTEGENDESAGKRRSTRMKKGAPWLKTTLVQCAWAATRTKETYLHAQYLRIRSRRGAKKAIGAVAASILTAAYHMLKNGTLYQDLGANHFDKRAQGKHVLQLVNRLKNLGFAVQITPMAA

SEQ ID NO: 122960 - protein, 372 aa, unidentified
MRFYTTQHPFYCGIDLHTRTMDVCILDQSGEILVHRNMKTSPEAFLPVMAPYRQGIVIAVECMFPWDWLADLCADEGIPFVLGHALYMKALHGGKAKNDQIDSQKMAALLRGGLLPQAYVYPAHMRATRDLLRRRMPLAHKRAELLGHVQHTHSQENLPALGTKIASKANREGVAERFADPAVQKSIAVDLALITSYEELLRDVELPIVNTARHHDATTRYLVQTVPGIGKMLRLVLLYDIHDVNRFPRVQDCVSSCRLVKWARESAGKRDGTSGTKIGHAHLKWAFSEAAVLFLRDHPAAQKYRTRLEKKQDKGKARTILAQQWARAVYDLLKRQVACERETFFQRSGRGADEPGASLDTHGMHLQEARVL

SEQ ID NO: 122961 - protein, 343 aa, unidentified
MDQHIGLDVSLKDTSISVRQDGKRVWRGKCPSDPKLLAEVIRKRAPNAKRVVFETGPLSVWFFHALTAEGLPAICIDARHAKAALDMAANKTDANDADGLAHLAEVGFFREIRVKGFDSMLMRTLIAARRQLMKMRVQMSNQIRGLMKTFGLVIPKGAGSVFERNVVTLLEGENNLARIILPLLKAWGDIRLRVAELTKQLVVMAGTDQRCRLLTSVPGVGTVTATAFAAAVEDSINFKNSRAVGAWVGLTPKRYQSGEVDYEGHISRRGDAKLRTLLYEAASVILNRSSETSALRTWALALKERLGFKRAAVALARKLAVIMHSMLKTGELFDPNAGATAPA

SEQ ID NO: 122962 - protein, 344 aa, unidentified
MTYYTGIDVSLRSVSICIVNDRGEVCLETKVEAEIDAIVDRLRRFSSEVKSVGFEAGTLTQYLTYGLQAAGFEVICLEARQVSVTLAAMRNKTDRNDARGLAQILRTGWYSRVHVKSLQSHQVRALLASRKAILKKCVDLENELRGLLKVFGIRLPSRVGHGSFDAELRETVSSDEMLACALVPLLDARTVLYKTYLKLDNAVKGLVRVDPICRRLMSIPGVGPVTALTFKAAVDDPNRFKSSRTVAAHFGLTPRRFQSGEVDNPGHISRAGDADVRSALYVAAHSLLTRNAQWSTLKAWGVRLAKTRGHRRAVIAVARKLAVILHRMWIDGSEFRWGAAEAAA

SEQ ID NO: 122963 - protein, 381 aa, unidentified
MKIYVGIDIAKLNYFAAAISSDGEIILEPFKFTNDADGFQLLVSKLESFDKNSIIIGLESTAHYGDNLVRYLVAEFYQVCVLNPIKTCQMRKNNVRKTKTDKVDTFVIAKTLMMQDDLRFITFFDLDMMDLKALGRFRQKTIKQRTRLKIQLTTYVDQVFPEIQYFFKSGLHQNAVYALLKEAPSPKEIASMHMTHLANLLKVNSHGHFTKEQAKELRVLAQKSVGANDSAISIQITQTIQQIELLDSQLEKIEAEMTDIMKFNDSVIMTIPGIGYINGGMILGEIGDIHRFSNPNKLLAFAGLDPSVYQSGNFQAKTTRMSKRGSRVLRYALVNAAWNVVRNNATFKAYYDAKRAEGRSHYNAPWSLCRQACQSHLEDAH

SEQ ID NO: 122964 - protein, 382 aa, unidentified
MNRIIKIGMDVHSTNYTLCAMEPVLDGEDRIFTNIQVTPDYENVIQFIDNLKERLGSSGSYSIECGYEAGCLGYSLYHQLTKAGVKCTILAPTTMLTQQGKRVKTDKRDAAMIAQCLSYGGYHAVHVPTDQDASVKEYLRMRDDHKLALKKIKQQINAFCLRHGYIYDGHKWTLKHLAWLKKLNLSELYRETLNEYMTSYEEQTAKIERFDKRIEELAADSDYHENVRKLSCLLGIQTYTALSLIVETGDFKRFRKGNTYAAFLGLAPGESSSGEKISRTGITKAGNSRLRTLLIEAATGICKGQVGHKSKALCARQAGNPAEVIAYADRGNIRMRSKYKRMIRHEKKRNVAVAAVARELACYVWGIMTNHIEPREEGKKAA

SEQ ID NO: 122965 - protein, 411 aa, unidentified
MNPVVGLDISKGESQVQAFLDKGKPYRKSFKVDHTLEGLSSLVAFLEDIKRDSGKKPSVILEATGHYQAPVVHYLEDRGYLLIIINPLISYKARSSSLRKVKTDAIDAYLLCELFYKEELEPYKKRGIQLLNLRNLTRQHENITGVMIQTKLQFQAVLEQVFPEYKGVFGDLYSVVSLLTLSEFSSSEDILKASEEAITDKISEYCKSRSIKWANEKAIQLKAAAARNPFEKTIYQSHILSLGMYINILLQYKEHLSKLETELDALAKEIEEYNIIKSIPGIGEKIAATIISEIGEIDRFNNPKKLVAFAGVDPSVFESGKFTATKNRITKRGSSRLRHALYMAVRCSIRDCRKKKTTDEIIPRNKRMREFYDKKRGEGKPFKVAMIACVNKLLHWIYALLKNKTTFQDIA

SEQ ID NO: 122966 - protein, 359 aa, unidentified
MASKVKRNAISFNGKIVNIGVDMHKQSWRVTALVEGEVAFTGTLAKPNFVSFRKLLARFEGNYLRIAYEAGPGGFGLYDRLTVDGIECIVTPPSLIPTESGSRVKTDKKDSLKLAKLLESNMLKKVWVLSPEERAHRQLVRTRRQIVDHRSDVMRQIKSLLFFHSMDIPFSMHQQWTGPFIKWLHELDLDDQCLNQSLKTLLHLFDYLSAEKKRLTHEVIELAREEKYAQRVKLLNSIPGIGTLSSMEILVELQEITRFKTSDELAAYLGLTPSQYSSGEHIRMGHITHAGNDRVRTTLVESSWILIGKDPSMRRKYENIKHRRGGKKAIVAIARVLSACLRRMLLDQVPYEIGFSKAA

SEQ ID NO: 122967 - protein, 363 aa, unidentified
MQNSITWVGMDVHAENIVLAALRDSSDAVLFRAEFPNTPKGRDRLAGRLAENAPVRCVYEAGPCGYELRRFLEEKSIDCQVAAPALIPRKPGDRVKTDRKDAEKLARLHRLGELATVFVPTPAQEALRDLLRTREDAREDLLRRRHRLSKFLLRLGRRYTEGVRWTTRHWDWIRAQTFTDHNTETVFREYIVAIEQEVERIRRIEQQIVEESRSPEVGKAIARLRALRGVDTITAMTIITEVIDLNRFRSPRELMAFIGVVPRERSSGGRERRGSITKTGNAHIRRVLIESAWHYQRLPAGTPKTILVRREGQPPEVIETARKAELRLHRKFMKLLGRGKPKGIAAVAVARELAGFIWALGRG

SEQ ID NO: 122968 - protein, 345 aa, unidentified
MTTMNYIGLDVHKKTISYCVKDVSGRIQQEGKIGSTRRELDCWMKTLPQPWTVAMEATIFSGWIYDHLLPHATQIKVAHPLMLRAIAAAKKKNDQIDASKLADCLRCDFLPECHMMPRAIRDRRRTLRYRHLLVRQMVQMKNRVSGLLMETGVEYNKQRLHKVSYFRELLSANEGVPPSIRPLLKLSRETIERCQKTEYALVSSLQRDPVLADRIKRLRTVPGVGPITALTWALEIGDVSRFGSIKKAISYCGLCGDERSSADKAMRMPLSKQRNKHIQRALVEAAKLAPRQNHEMAVIYDQERQKGNSNRATLAVARKMVAYLLAVDRQQRDFVPAEERRITAA

SEQ ID NO: 122969 - protein, 318 aa, unidentified
MNIIGLDISKDTIDATLHKTNGSIHYMKFKNNDDGLKQFRLWIKGNRIRKVYIGMEATGIYYEKAADMLSSYYTVYVINPLKIKDYGKSRFNRTKTDKADSNLIADYIKRHQDTLIPYQIPKNKALQKLINLKNQLHQHQKQIKNRLHSTEEDFIRNIHQDLIDTIQDKMEQVKIAISEQIKKQTDNNHYRNLQTIPSIGKDTASVLYAQLTEKHFKTANQFVSYAGLNPAIIQSGTSVRGRGRLSRYGNRRLKSALYMPALCAYRFNAFLKLINNLKKAGKPKMVIIVAIMRKLAKLAYYIVKTGQPYDAERHRLNQ

SEQ ID NO: 122970 - protein, 388 aa, unidentified
MQVAADRTDASTAIQTDLPAIFASLELSRSTWLITSLSPGAGEKMSKHSIRAGDVASLLVRLAQLKEKARGRTGRDFPIIAIQEAGLDGFWIHRVLQSEGIESHVVDAASILTSRRRRRAKTDGIDGETLVRTLLAYKRGEPRVCAMVKAPTPEEEDRRRICRERKTLVGERVEHVNRIKGLLFAQGVSDYEPLKRNRRARLEGLKTGDGRPLPAHLKAQISRELDRLELVLPQLKAVEAERDALLKPVSEGCPAPAAMLAQLKGMGPEFTAILWSEGLFRSFSNRRQLAAYAGLAPTPWQSGSVAHEQGVSKAGNPRLRTTMIQFAWLWLRHQPTSALSVWFQERVQSNGGKMRKTTIVALARKLLVALWKYSTSGVVIEGAVMKTI

SEQ ID NO: 122971 - protein, 370 aa, unidentified
MHKYIWVGLDVHKVTIAVAVAKGEEVPHSLGTIPNDPDAIAKLMRKLGPSARLRVCYEAGPCGYVLYRQLTAMGIDCAVVAPTLVPVRAGDRVKTDRRDALKLARLLRSGELTAVAVPDESHEALRDLVRAREAAQKDLRRARHRLQKFLLRQGHRCPLRTKAWGVRYLAWVSGLRFAHAAQSVVHREYLAEVERLAERRTRLDRELEVALAQAPAAIQTVVRALQVLRGVAFVTAVTAVAEVGQFRRFTRARQLMAYSGLVPRESSSGDTVWRGAITKTGNAHLRRVLIEAAWQYRHQPRAGITIRQRRKGQAAALCAIAEKADHRLHLRYRRLLARGKSKRDAMRCIKRQLARHCYRLLVANPALAGP

SEQ ID NO: 122972 - protein, 331 aa, unidentified
MDNQIDLKYYIWRYSHALCGIDVAKNKHDVTALNVSGKTVLKPLTFSNNKAGFELLDLSLRQLNQDYLIALEDTGHYAFNLLNFLHEQGYKVYTYNPLLIKKFAKSLLLRKTKTDKKDAHGIALKLLSDPNREQFQHDNRQVELKILTKHIHRLKKKQSDWKVQYTRCLDIIFPELDKIVGKHSEYTYQLLTCYPNPQKRLEAGFDKLIEIKRLTASKIQDILSVAPRSIGTTSPAREFEIIENIKHYKRLIDKAETCVNDLMAEFNSVITTVTGIGNRLGAVILAEIRNIHAFDNPAQLQAFAGLDSSIYQSGQIDLAGRMVKRGSPHLR

SEQ ID NO: 122973 - protein, 344 aa, unidentified
MTYYTGIDVSLRSVSICVVNDKGEVCFEAKVAAEIATIVECLHRFDRDVKSVGFEAGTLTQYLTYGLQAAGFEVVCLEARQVSVTLAAMRNKTDRNDARGIAQILRTGWYSRVHVKSLHSHQVRALLASRKVILKKCVDLENELRGLLKVFGIRLPSRVGHGAFDTELRETVSGDEMLACALVPLLDARTVLYKTYLKLDNAVKGLVCADPICRRLMSIPGVGPVTALTFKAAVDDPSRFKSSRTVAAHFGLTPRRFQSGEIDNPGHISRAGDADVRSALYVAAHSLLTRNAQWSSLKSWGVRLAKTRGHRRAVIAVARKLAVILHRMWLDGSEFRWGSVPTQA

SEQ ID NO: 122974 - protein, 355 aa, unidentified
MSQEKYIGMDVHQATISVAVIDVHGKLIMECVLETKAATILEFVQGLRGTLALTFEEGTSAAWLHDLLKPHVSRLVVCDPRKNALLKDGNKNDRVDARKLAELLRTNQVKPVYHEKHGTRALKELGRSYLTVTKDVTRVMNRIKSVYRSWAIPCAGTSVYTARHRSEWLAKLVEPGVRIRAEHLYQQLDSLQPVRLEARRQLLLESRKHAAVKLLRQIPSIGPIRAALLVALLQTPHRFRTKRQLWAYSGFAVEVHDSGEYRWVRGKLQRNRERITVRGLNDNHNQDVKYLFKSAAISASTHPGPLHDFYLARVESGMRPTMARLTLARKIAAITLTMWKKGASFDPKQLPRQAA

SEQ ID NO: 122975 - protein, 436 aa, unidentified
MSKSQNPTKEVIPIMKKRIYRRIPVNDFQPQSISPADLGGKLVFAIDIAKVDMVAALACADGRVLHTICWKAPEENTTVLSILRSFRAAGVTVEAIMEPSGTYGDVLRHQLEREAFPVFMVSGKRTYDAKEIFDGVPSLHDAKSAAIIARLHADGLSTRLPDEVPERRQLKAALAIMDLHQERYLQLVHRLESWLARHWPELPTLIDLTSSSLMALLARIGGPADVAAHPDQATKLLRGISHRLIADDDVAAVIASANTSVGVPLVGLERDALMAIADDAYRAHRAFASAKTKVEQLAATTPAATLAPVVGPTTAAAIFAEVGDARSFSCTRAFLKAMGLNLKEKSSGTVHGQIKITKRGPSRVRQLLWLAIFRWIQKDPIANAWYQRKKQRDGGRASRAAVALMRKLAKGLFHVGRGGTFDSSKLFDTRRLQVAV

SEQ ID NO: 122976 - protein, 373 aa, unidentified
MEKDSTLYVGLDVHKESISVAYAVDAGAVESLGKIGTTKAEIDRLCKRLQSKAPHVRVVYEAGPCGYGLYRQLVERDFECMVCAPSLIPRKPGDRVKTDRRDAMKPVRALRADDLSAVHVPTVEDEAFRDLARAWASVREELRQAKQRLKSFLLAHGVRYTGRADWSEAHKRWISCYSFGNAWQQLAFEEHRRTIDDRLAQCDRLEAALREAVVDWRFYPVIQALQAMRGVQFLTAIGMVSELGDLSRFMHPRQLMAWFGVTPSEHSSGGKRRQGAITKTGNSYARKLLVEAAWSYRHAARVGPQIQRRHEGLPKVVIDRAWDAQVRLCQRYRKLAARGKNAGITIVAVARELVGFIWDIARLAMTATSPRSA

SEQ ID NO: 122977 - protein, 337 aa, unidentified
MEDIIYDHYIAIDWAATNMAIARMTKKSNKITVIDVPSDIAELHFYLKSLKGTKILTIEETTTSQWLYTELKDYVDKIFICDPCRNSLLKEGPKTDKIDATKLVQLLRADLMKEVFHSTDKFIYLRRIVSGYEDLVKAGVRLKNQRYSLLRVCGKSGYEKKDIQLASRDEQYVLECLDRQIQNYEKEKKGYEKEFERLSRKHPEIRYQKSIPGIGLINAVKIIARVVTPYRFSDKGHYLSYSGLVKHEKISGGRSYGKKNPRYCRMLKCVYKSGVIAAIGGNNPINDYYEYLITEKGYPEYTARNRACRRIATLSFGVFKSGEKYKPYRRVHVKEGQ

SEQ ID NO: 122978 - protein, 334 aa, unidentified
MNVTTYGLDVAKRVFQLYWVDAQSGEILNRRFGREELIGFLAKRPAGRVALEACGSAHWWARKIVALGHEVVLLHAKFIRPFVQTNKTDAADARAIWAAAHQPGMRTVAAKSEDQQAMLAVHRMRALLVKFRTMQINQLRGLLYEFGVTFRSGRKAGLAEMRMRMAQLEEALPGALLSGLQDQLQRIDVLQSDIETLEERIGAWNKQEAACRAIAQVPGIGRLTATALVATMGQAQAFKSGREFAAFLGLVPRQSGTGGKVRLGSISKRGDPYLRTLLIHGARSVMTHAKAPVLGRHKLPPGGRPMWRRWPWPTRWHERRGRSWHTGARIRGTT

SEQ ID NO: 122979 - protein, 428 aa, unidentified
MIPAVIERCAGIDVHKKFVMVCALLGPAQANPEPKIRRFGTYNAELEQLRDWLQELNCMHVVMESTGPYWKPVFNVLEEAGVQTTLANPQQVKNLRGHKTDMKDCQWLAHLLRHGMIRPSYIPPRPIRELRDLTRRRKQLVRNGAMERNRVQKLLEEANVKLGNVLSDVFGASGQEMLFALVQGEASAEQIAQLAKQRARKKIPQIQAALEGHRMNQTQRDLISQCMSHMAFLEQQIEEVDQQIQDKIRNFGLSQSYALLQTVPGMKKEAAATVLAEVGATVEAFSTPAKLSSWAGVCPGNNESAGKRKSTRTTKGNPYLRDMLLECAWASSHRKNSQMQHRYQRLQLRKGYKRAIVAVAHALIQAVYYVLSTRQPFVDTAEPTRSPATVHRLIRHHTRRLRKLNCWLERRAQTAQTSTFHKPQVTSG

SEQ ID NO: 122980 - protein, 349 aa, unidentified
MRTYYVAMDVHSASIVIAVLNGAGKVVMESVVETGAERVRGFLKQLRGKVYVTFEEGTQANWLHDVVRPLVTEVVVCDPRHNKLLQNGNKNDRVDAKKLAELLRLGSLKAVYHGDNGVRTLKELVRTYDCLVSDTTRVMNRLKAIFRGRAIACGGHEIYRQERRGQWLGKLSEPGAKQRAGFLYDQLAALKPLRHKAKLAMVKEVRRQAAYPWLISVPKLGSVSVAQLIAVVGTPHRFRSKHQFWTYVGLAVVTSSSADHEVVNGVLRRSTKPIATRGLNRNHNHLLKRVFKNAATSACQSGPFKAGYEVRVSRGMAPNLARLTIARQLAATTLVIWKRQEQFDPERKK

SEQ ID NO: 122981 - protein, 282 aa, unidentified
MNNSVIGLDIAKNIFHLFTLLADGKILKKKLKRSELLIFFATYPASIIGIEACGSAHHWARELTRLGHEVILLNARFVKNYVVGNKTDFNDAEAIYEAVMRPNKRVVAIKTVAQQDIQLVHNIRKELVDQRTALVNQTRGLLGERGLVINQGIGAFREQLPWLIEDAENGLSALSRELFAEQYEKFKALDAEIKAQDQRITRLCHANDLSKRFIEVPGVGPLTATIVAADIGEGGKGYKSSRDYAASLGVVPKQHSSGDKPHYLGISKRGNRYIRTLLIHGA

SEQ ID NO: 122982 - protein, 405 aa, unidentified
MGKVFVGHDWAETHHDVYVEDGAGQRLGKARLDEGVSGVARFHELVSSFVVDPGEVTVATETDRGLFVGALVAAGYRVLAVNPMSAARYRERHSTSGAKSDPGDAFVLAELARTDGHHHRPVAADSELAEAVKVLARAHQSMIWTRQRQVNQLRSTLREFYPAALSAFDDLASSDALAVLALASTPSLGRGLSRSKIASALRRGGRQRRIDERAAEIQTILRADTLQAPGLIAEAMGASVRALVAVISEQVAQTARLEAELADHFELHPDAKIIRSQPGLGMILGARALGEFGDDPNRYTDAKSRKNYAGTSPITRASGKHHVVLARHARNRRLADVCYQWAFAALTASAGARAFYDQHRAAGDTHHQALRALANRLVGILHGCLRHRTPYDEHTAWGHRTAAAA

SEQ ID NO: 122983 - protein, 326 aa, unidentified
MLNTETGDYSEHRLKHSDGEAERFYRDLKLHTPKIRVGLEATGHRRWFERLLMDLDCELWVGDAARIATMRVRKQKTDRQDAQLLLKLMMEDRFPRVWISSLEDRDLQQLLWHRHRTVQMRTRILNQLQSIAMNEGIQRRGGLRSVQGRKRLEQIPLGPWGARRRNDLLVHLDQMNQRVNELTAAVQQEAEKRPEAQLLMTHPGVGPVTALAFVLIVGYPERFQCGKQIGSYVGLIPAECSSGVHQRLGHISKQGNILLRFLLVEAAQAAARCDPEWHKKFAHLAMRREREIAKVAMARKLAVSLYWMWRRQRSSQMASQVGSYAG

SEQ ID NO: 122984 - protein, 402 aa, unidentified
MKPSSGQSAPERKSMKIIDFSNRVLYIGIDVHKTRWQVAVLCEGIVLSNTSIAASADELIAFLHRHYPGAAFRCVYECGAWGFTLCRQLWASGMECMVVNPADIPGSDKERRSKTDPIDARRMAKALESGMLEGVHVPTEKEQKQRSLIRYRKKLWGDLVRAKNRLKSEFKFQGIQIPEKYDNPHWSRNFLEWIEATALKDEWLKDTLLLMLEEVKVLRQLLLKTELKLRQLMRQEVHQKQAKLLQSIPGIGPLVAALFILEIGDIKRFKTFDQLNRFIGFCPDSNSSGEHETHTGISVRKHKSLRSHLVEAAWMAIRKDPAMLAEYQRLCKRMKGHKAAVRIARKLLRRIRAVLLSQKMYVKGISGNLTAEQIEAPELPAPKVKGRPKKVSAPAAGHHVTS

SEQ ID NO: 122985 - protein, 411 aa, unidentified
MDRVYENCCGIDVHKKLIVACFKQGSKQELREFGATTRELLEMADWLKEGGCEMAAMESTASYWKPLYNILESCDLKAMVVNASHMKAVPGRKTDVKDAEWIADLLQHGLLTASYIPDRDQRELRELVRYRKSLVGERNRELNRLQKMLEGANIKISGTVSDINGKSARNILEHILSGEKIDSAEYDILYQKKVIAHNLKATKEQIIDDLNGVMSGLQRKMMRILLNHLDELNAHIRELDDDIDNSMKPEEKKAAEVIQDIPGIGNTSAQAIISVIGTDMGRFPTDGHISSWAGLCPGSNESAHKRKSGRTTKGNALLRDTLVVCAHSAVKNKSSYFSAQFARISAHRGKKRAYVAVAHSMLVAIYHILKEGVAFKDLGADYYNQFNRERKINAYLKKLKALGWEAPVAAI

SEQ ID NO: 122986 - protein, 328 aa, unidentified
MKLQHIIGADLSKESIDLFSHEFQAHLKIENSFKGFRQMLKWLRDQKISCSNVMIVMEHTGLYSYHMEVFLHKHQISFTKVSALAIKRSLGLVRGKNDKIDVRRIARYGFEKKDVLVVTSKPDKAIERLRMLHSTRNRLVRHRASLICAIKEYKNILKQSDLIIKSQLSLVKSFTGQIKKIEAEISQLITKEQLVNQNFQLLKTIKGVGKVVATAAIIKTRNFTQFSNARKFACYCGTAPFEHSSGKTIRRKTRISHLADKEMKTLLDQSAKSAIQYDKELKSFYQRRIAIGKSKKSTINIVRNKILYRMFAVIKRQTPFIENYLKTA

SEQ ID NO: 122987 - protein, 346 aa, unidentified
MMLIGCDFHPSWQQVSWLDTETGETAEQKLVHAPGEAERFYRHLPAPALVGMESTGNCQWFVEMVTAAGHEVWIGDAARIRASDVRQQKHDKRDAALLLQLLMEGRFPRIWTPSSQQRDLRQLLIHRYKLVRLRAQAKNGLQHLAMNQGVQKKRHLWSEAGQKLLRELPLRPWASRRREDLLSVLALLDQKILSLDLAVKAAAEKDQNARLLMTQPGVGPVTSLAFVLTLGDVSRFPRGKQVASYLGLIPREYSSGGHQRLGSISKQGNRFMRMLLVEAAQGAVRYDPQFRSEYLHRCHQKPKGVAKVAAARKLAIRLYWMLRTHTAYPAIVSIESRSRVALVGAS

SEQ ID NO: 122988 - protein, 323 aa, unidentified
MNTIDVLGIDVAKKTFDVALLRNDKFRNKKFANNPEGFKQLDAWLAKQGTIRVHACLEATGSYSEALAVHLHQSGHIVSLVNPARIKAFGQAELQRNKTDRADAMLIARFCLKHNPAPWTPAPPEIRELQALVRHLDDLIGTRTQLRNRLTDGQRIESVLESLRSLIKSVDAEIKLTRKKIRQHLNHHPDLKADHDLLVTINGIGEKTATLLLAEIQHLRQYKHARQAAAYAGLSPMILDSGTSLKGSRLSKTGNARVRKALFMPAITASRHNPVLREFSERLAKRGKSKMVIIGAVMRKLLHLAFGVLKTRKPFDPNHAIGA

SEQ ID NO: 122989 - protein, 339 aa, unidentified
MWYSGIDQHKRDSVLTTYGPDGPRVKQARVANTPLAIAQYFAEFPGSHKAVVESTGGWYWLADVLAPLGVELVLAHATRLKAISAAKVKTDQVDSDVLALLLRADLIPVAHMIRPDQRGPRDLMRARLRLVEKCVSAQNSVGRLLEKFNVPEVGALAELYQLPAACHAAQIQLLTEQIATLERALYPHLIPNPDVQRLLWIPGLGKVNAFTIYTEIDGITRFPSESQFFSYSRLVPGADNSGGRTRHRSGSKAGNRYLKLAFSHAGIRAVQYYPEIRAFFKAKARKKPIRIARTLVALELARIVYHVLTKQEDFNGQFKHRPLSRQKHAQWPRRASPPA

SEQ ID NO: 122990 - protein, 403 aa, unidentified
MNMNAVGIDVSKGKSMIAILRPYGEIVSSPFEIKHTSSNIQSLIEQIRSIEGESRIVMEHTGRYYEPLARELSLAGLFVTAVNPKLIKDFGAHSLRKVKSDKADAVKIARYTLDSWTELKQYSLMDELRNQLKTMNRQFGFYMKHKTAMKNNLIGILDQTYPCVNTFFDSPAREDGSQKWVDFATTYWHVDYVRKFSLNAFVDHYQKWCKRRKYNFSKDKAEEIYGAAKELVPILPKDDLTKLIVKQSIEQLNTASKTVEELRTLMNDTAAKLPEYPVVMGMKGVGPSLGPQLMAEIGDVTRFTHKGAITAFAGVDPGVNESGTYEQKSVPTSKRGSSSLRKTLFQVMDCLIKTKPQDDPVYAFIDKKRAQGKPYYVYMTAGANKFLRIYYGRVKEYLMSLPE

SEQ ID NO: 122991 - protein, 347 aa, unidentified
MRFFTDRHQFYCGVDLHARSMYLCIIDDDGQTKLHKNIPTEPDAFLNAIEPFIEHVVVGVECIFTWYWLADLCAEQEIPFILGHALYMKAIHGGKAKNDRIDSMKIAALMRGGTFPLAYVYPAEMRATRDLLRRRNYLTRKRADLLSHIQNTNSQYNLDPFPERITYKKHRAEIADQFIDPDVRVSMEADLDLIDHLEQLKQKLELYIMRNAKQHDPQAIYRLRSVPGIGPIISLVILYEIGNIERFPRVQDFASYARLVKCAKESAGKRYGHSGGKIGNAHLKWAFSEAGVLFLRNNPDGMKYRKRFERKHGKAKSLSILAHKLGRAVYYMLKRDQAFDLGRFVQA

SEQ ID NO: 122992 - protein, 317 aa, unidentified
MSLNNEVVAGIDVHKAMLAVVVARPEQNETEYLSRKFGAGRWQLKELVDWLRELGVRRVAMESTAQYWKPVWYALEPFFQLILAQPRSTAAPRGRKMDFADAKRIVRRLLADDLTISFVPEAEQRRWRLLTRARTTAMQQITRLRNQIEGLLEEGQIKISGLLSDLLGLSGWRMLRALAKGESDPQTLAKLAHEHVRASQDQLQEALDGRMESAHRLLLRHSLDQIEQLRKQVEELDQQIARLFGQHHDAIERLCAAPGISLTAAFQIVAEIGPQAKTFASPGKLASWAGLCPGREESAGVSVSNRCARGNRTLKRC

SEQ ID NO: 122993 - protein, 404 aa, unidentified
MELKPLYRCVAALDVHQAKLTVCVLQEDAEGALQVELREFGGFKRDRREMAEWVASFHPEEVVMESTGIYWKSPYAALERCGIRALVVNARHVKQVPGRKTDIGDAQWLAILARSGLLRGGFVPPANFRELRLTSRQMQKLTGILAAEKNRLHKVLTDAGIRLPVVVSDIHGQSARAMVKGLIAGESPEQVLTYASKRLKATEEELLDALDGELTAEHRFVLGELMDHIEDLERRIVRFGNHLLRGLAPQQGLLQALQTIPGLDERGAAMLLVEIGDDMDAFGSGEKLASWAGVCPGNHESAGKRKSGKKRKGNPYVRRILCEAANAAARTRSALAELFKPLLIRRGRKRAIFALAHKILKIVFVLISRGDYYRDATVDYEAMSVERNAPRWMRMLRKYGYISA

SEQ ID NO: 122994 - protein, 404 aa, unidentified
MIFVGIDWSEHHHDVCVVDERGTQLAKVRVGEGVEGVARLHETIADHAAEPEEVIVGIEIDRGLLVGALVAAGYRVFAINPMSVDRYRDRRATSGAKSDPGDAKVLADLVRTDRHNHRPVAGDSELAESIKLIARTHQSFVWERQRHVNRLRSALREFYPHALQAFGTELASADAIAVLRVAPTPELGRRLSRSKIAAALARAGRQRNLQAKAEQIQRALRSEQLRASEGLERTYGVIVSSLVRLIDGLNDQIADLQEELEGSFEQHPSAEVLRSLPGLGIVLGARVLGEFGDDPTRYADARARRNYAGTSPITRASGTRRVVLARFARNERLFDACYLWAFSSLTKSPGARRHYDLQRARGKTHSQALRALANRLVGILHGCLRHGTIYREDVAWSGREQLVA

SEQ ID NO: 122995 - protein, 447 aa, unidentified
MATRKRATTESAISLTHPNAAGIDIGSASHFCAVPADRDDEPVREFKSFTADLHRLADWLDACGVDTVAMESTGVYWIALYELLESRGFTVLLVNARHVKNVSGRKSDVLDCQWLQQLMSYGLLHGAFRPQEQVCVLRSLTRQRAMLLRSQGRCVQHMQKALTQMNIQLANVISDVVGETGQRILRAILAGERDGMSLGRLKNSRIHASEDEIAKSLQGNWRGEHLFALKQALDAFDFCGRQLAECDVQIEAQLQTLQSCQGEPPKGKKRSRARNAPRFDLRTQLYQMCGVDLTRIDGIDVTTALVVVSEVGADMGRFASDKHFASWLGLCPGTKITGGKVMSSKTKRCANRAAQALRLAAAALRSSKSALGAYYRRMCARMDRPKAVTAAAHKLARLIYAMLTKGEEYTDRGQDYFEERYRQRVLHNLAQRAKAMGMQLVPSESPA

SEQ ID NO: 122996 - protein, 374 aa, unidentified
MSSQNNTIHVAIDLSNSLWLVGARLPGAERSRMRRITSGDTVALLALISDLRSRHSGGRDRSIEVACCFEAGRDGFWLHRLLTAEGIPTYVVEPASILVNRRAKRAKTDRLDAEGLLRVLAAHLAGDEQVCSMVQVPTPEEEDGKRPHRERQHLVQERTRFENRILALLATQGVRVRPSLRTWERDLATLQTGDGRKLPQHLRAELDRLRRRLVLTMELIRELDREREETLAAAPDELTSRKVVALRSIRGIGENFAAVLAREVFYRSFGNRKQLASYVGLTPMPHQSGGMDRDRRIGRAGNARARTTLVQLAWLWLRYQPDSALATWFRERVGTLQGRTRRIAIVAMARKLLITLWRFTETGEIPDGVVIKAA

SEQ ID NO: 122997 - protein, 357 aa, unidentified
MKKGYQKDKTLARGKDVYIGIDVHKANWHVAVRVDGEEVFHGSMASEYHSLRKLLDRFKECRIKVAYEAGPFGFWLYDKLMVDGIETIVVPPSLIPMESGNRVKTDKRDSRKLARLLESNMLKKVYVLTEEDRADRELTRTRRQLLEHRGDVMRQIKSKLLFYGIKSPFSNRREYWSKLYVKWLRELTFEHEVLKAPFESLIDLYEYLTLQVKKISKQVVKLSRSDKYNHKMNLIRSVPGIGILIGMELLVELADIERFKTAEEIASYMGLTPSEYSTGQHVRQGRITRCGNKRARTCLVESSWHLIVKDSLMRSKYMKLKSRKGAKKAIIAIARNLIIRIRRIFLNDEPYVVGMAA

SEQ ID NO: 122998 - protein, 369 aa, unidentified
MNDITYVGLDVHKATVCVAIAESGRGGEVRQVGVFENRPDVLCKMVARLGRDRRRLSFCYEAGPCGYGLHRLLIGLGHDCIVVAPSLIPMKAGDRIKTDRRDALMLAKLHRAGELTPIWIPDAAHEAMRDLVRARATAVRVLSKARQHLQGFLLRHDRIYHGARAWTLAYRRWLTTVRFDHPAQQIVLQDYIHAVEDAETRRDRLTRQIEELMPSWSMAPVAAALQAMRGVALVVAVTVVAEVGDFRRFTNARQLMAYLGLVPSEHSSGSTVRRAGITKAGNALARRVLIEGAWTYRISARVSRKLHDRLEPLSAAIRDIAWKAQVRLCARYRRLAAAGKPKVVVTTAIAREMVGFIWAIARVAQPELI

SEQ ID NO: 122999 - protein, 403 aa, unidentified
MTSNDFTSINVFCALDVGKSSHHGTALLADGRTVFDKPLPNGEPQLRELFARLGRRGKVLVVVDQPASVGTLAVAVARAGGCEVAYLPGLSMRRLADCHPGTGKTDARDAYVIADAARTMPHLLHSIDPAESVRAELTMVLGYDDDLAQDATRTSNRLRGLLTSIHPALERLLGPRLRHPAVLALLQTFGSPATLAQAPAEELIEVMTDAAPRMRTPRELAGQIHAALAEQTVQVPGTASAGEIISGLAESLAVLLKRREVLESRMTALLEAHPLAKVLTSMPGVAVRTGARILAEVGDASAFPTAAHLASYAGLTPTTRRSGTSIRGEGPPRGGNKTLKRALFLASFASLSSPESRAYYDRKRAEHKRHNAALICLTRRRVDVLHAMLKHRTLYQPGHQQTA

SEQ ID NO: 123000 - protein, 428 aa, unidentified
MIASSTTTQNGTFVAIDVAKLVHEVLVEPPTGRRQRWRIRNCQPDYETLRDRLRAVETPVLIGFEATGNYHRPLAYYLGQCGFELRLISSLAVARTRDALYNSWDKNDPKDTHVLLHLLKTGVSQRYHDPLVHAMNDLQELAQTHYQVSLRKVQVQHSIMTHYLPLYFPEAERYYTNSRAQWFTQLLHRFPCPAAITRYSQDVFEHEAWTVVGRKVNKRGFLADLYATASQSIGLAVAEDSEAIQMFRVMLAEHQHLCATRAAIEHQADQALQSHPDYHRLRTLPGVGPILALTILAEAGDLRGFPHHRQCLKFSGFDLSTQQSGQFRGMSRLSKHGNARLRYAFWMAANGAVRMRQNTFREKYARYIKADPQNPDRKRKALCAVAAKVARVAHGLMKTGTDYRPYFEALPPSGALRSRGPSRQALTS

SEQ ID NO: 123001 - protein, 402 aa, unidentified
MNCVGIDVSKGKSMIVVMRPFGEVVVSPFEVRHTASELSELAGLLKSLDGETRVVMESTGNYHTPVAWLLHDAGLYVSVVNAMLVHDYGNNSLRRAKTDKKDAIKLANYGLDHWLTLPRYVPEEDTRLMLKTCYRQYQQYSKVQTMLKNNLISLLDTTFPDANRLFTSPPRTDGSEKWVDFVAAFWHCECVCGLSEKAFTTRYQKWCRKHGYNFSEDKARDIYASACGHFGVIPKTDTAKLLVEQAISQLQTTSAALAALKQEMQSLAASLPEYPVVMEMFGVGPALGPQLMAEIGDVRRFHSKKALVAFAGIDAPPYQSGQMDVRSRSISKRGSASLRRTLFLVMGVLLQCAPMDEPVYQFMNKKRSEGKPYRVYMMASANKFLRIYYASVKAYLDSLEHD

SEQ ID NO: 123002 - protein, 434 aa, unidentified
MKVTRGMRRRSAKLERRPQLVTPDTLIAGVDLARRESVVVFVRARDKARLGRLRIPTTADGVRTLVRRAGELQRRHQLPRLVLGMEACSHYWKVLAKAATEIGLPYLIVQSFVLARAREFDDLTRDKTDPRDAALIADLVAELRFIDAQLETGVWAGLRLLAEERNGRCVERGAALQEQRAFLELVWPALLQQVPDLAGTHVQATLRLGLTPLEIAALPLDEFTGRLREEHRDRRFLRWMAQRIWSAAKAATDSDEMTAAILRVQFAAERVQAAGRAVAILDRRMLAAFERTGLGWLRGQIRGLGDVSLINLLALTGDLRRFDDARCLPKLAGSNPTERSSGQSHAPGGIHRRGRKALRLLAYQAAVCLVHHNPDFRQRFLALTQREHHRLEKRQAYVAVANKLLRTLWAMATSGHAYDSQIALGLTRGEVRAP

SEQ ID NO: 123003 - protein, 435 aa, unidentified
MDKRLQVGIDFSHKKADVCLMFPQGELLEPHLSFPNSLTGFGQLKSVLLDARDAYVFDGIDISGEATGYYWMPLFLRLADDPDLTEAALDLFLLNPRWLKWFKKSFPPDDKTDQKDPFYIAERTRTRRPAFTWQPQLETLSLRFYTRYRFHLAQDLTREKNYFTALLFLKLSAYRQFKPFSNTFGVTSSLILSGQLDLDELAQLPLDILAERLTQLSGNRLPEVDKNALKLHDALQHSFPLPPALLPPIQDVLNLTMQHIRFIQQQMTTTETHITAELEKHPAIQKLATIPGVGLIFASGIGAELGDTKRFLQGTKWDKRKKRNRPRTLRNAEDSVAKLAGLWWPKNASGDFEAEERKMAKTGNKYLRYYLIQASDQMRKRIPEYTRYYDRKYLEVNKHQHKRALVLTARKGVGLFVGLLHRNEAYLPEEERCPK

SEQ ID NO: 123004 - protein, 345 aa, unidentified
MKITTIGIDLAKNVFQVHGVDERGKAVLRKQLKRKDVVSFFANLEPCLIGMEACGGAHYWARKLAALGHTVRLMAPQFVKPYVKTNKSDRNDAEAICEAVARPNMRFVPVKTGEQQAVLSVHRARQGFVKARTAQANQIRGLLAEFGIVIPKGMGHIAKRLPEILEDGENGVPGMMRELLERLGENLKDMDKQVGELERQIKLWHRENERSRKLEAIAGIGPITASALVATVGDAKSFKNARQLPAWLGMVPRHEGTGGKAKLGRISKRGDVYLRTLLIHGARAVIRQFERKPDQADEWLKKLLARRNKNIAAVALAAKNARIAWALLANERPYQSDYVARRATA

SEQ ID NO: 123005 - protein, 425 aa, unidentified
MSEKIVVGIDVSKAFSDICILSPNNDIIKRLKISNDITGMRSLIYVLEKVEDEYKDRAVIIMEATAHYHQILANFFRKHNYEVIVINPIQSGALKNINIRKIKSDKTDAYNIALLYRIKNYNETITHSDTVNSIKKLCRQHKELTDEIVEHINRLIAFLDISFPDFKKVFADLQGKTPLSLLEKYPTIQEVLSPENKQDIIKLIKENSHKSSSYAEVKYEKLFKAAEKSIEVCIVSLSSAVLIQTTVRVIFSLQEALKAIDDEIKRLSLLDEKFHKEIVLLQSIPGVGEYTACVVLSELGDISNFSKPKELVAFFGLDPGVTQSGTYNRKNNKISKRGSPHVRSILHMLAKSNVYPNRNREYLNPVMRAYFEKKIAEKPYKVVMCAIMRKMVQIIFAVLRNQKSFELRTPEEHQKLIREKSKLVA

SEQ ID NO: 123006 - protein, 407 aa, unidentified
MDVVHPKCTGLDVHQQTVMACARAGSGKAVTYDRRTFGTSTPELLALGDWLATRGCTHVAMESSGVYWKPVWHVLDGHFELVLANAMHIRNIPGRKSDVNDATWIADLLAHGLIRSSFVPPPSVQELRDLTRTRKQLVREIAQHTLRIQKTLETANVKLTSVLADIMGGSGRAILAALVAGETHPERLAALASEKVKASRAELTDALHGRVTAHHRFMLKLHLGQIEALEAAVRDVEARLGEALAPFRAALEHLITMPGVSETVARVIVAEIGFDMTRFPSAAHLVSWAGLCPRLHESAGKRLSTRTRSSNPWLKTTLVQAAWSAARKKECYFRAQFLRIKSRRGPKKAILAVAASMLTAAYYMLRDGADYRDLGADHFDRRDKAKLAKRLIARLHDLGLIVDVRAA

SEQ ID NO: 123007 - protein, 355 aa, unidentified
MNGLRYIGLDVHQDTVSAAVLDGAGKLLMQSVFATRAVAILDFLHGIKGTLHVTFEEGVHSAWLYDLLRRRVARVVVCDPRKNKLLKSGNKGDLIDARKLAELLRNNSLSPVYHGGMSALEVQHRTRSYTMLTEDTTRVMNRLRAVFRSQAIRVHGRKLFRSDLRESHLAQLATPGLRQRAESLYRELDALHPLRLQAKREMLAECRKHPAMKWLRSVPFLGKVRTAVLIGRVQTPHRFRTKRQFWSYCGLALETHDSAEYRVLHGQVQRKSRPAQVRGLNWNHNHELKGLFKSAATMAAFRKGIFREFYSGLLAKGIRPEMARLTLARKIAAITLKIWKEGETFNAEHIKPQAA

SEQ ID NO: 123008 - protein, 411 aa, unidentified
MDVFCGIDWAEDHHDIALVDRDGQLLARRRISDDAAGLAALLGLLAGHGDNADDPVPVAIETPRGLLVACLRAADRKVYPVNPKAVARYRDRHSIAGRKSDHGDAVVLANVLRTDMHAHRPLPADTELAQGIAVLARAQQDAVWDRTTAHNKLRSHLREYFPGFLAAFAAARGGITRPEARMILAAAPTPAAAARLTLAQLRALLKKAGRSRSTDAEAQRLRDAFRTAQMRQLPLVEDAMGRQALALLRHLDAACTSADDLEQAAIESFNQHPDAGIITSFPGIGALTGARVLAETGDDRSRFTDAKGLKAYAGAAPITRASGKTRSVTHRKVKNNRLAAAGYNWAFSALTASPGARAHYDRRRDDGDRHAAAQRNLFGRLLGCLHHCLATGQHYDETTAFPARTAPPAAA

SEQ ID NO: 123009 - protein, 495 aa, unidentified
MKAKARKAKGKHSNSSKRGAKIAAKRGAEGMEIVHPHAGGIDCGAQEHYVAVPPQSVELGEPYVRCFSAFTEGLDALVEWLKACGVTTVAIESTGVYWIALCQKLEAAGIEVFLVNARHVHHVPGRKTDVKDCQWLQRLHSFGLLSASFRPEDLICRLRSLQRHRLNLVWTAGAEIQHMQKALQQMNLHLHHVVSDITGVSGLRIIDAILAGERAANQLAKLRDHRVYKSTLTQMEAALVGDYRPEHLFVLGQSLQAYRFYQARTQDCDAEIESLLQQLAERFDSSSALGAQLPQPEVLNDAAPSQNPRPAKRKVKRKPQANEPKIDLADYLRRICGVDLTQVIGLNVLSVLLIVSEIGVDMSKWRSAKAFCSWLGLSPRNKISGRKVLDTRTCKVINRVATTLRLAAQSVGRTNTAMGIFYRRKTGHLGPAKATTATARKLACLVYHLLKYKEQYREPDPAAYQLKVQKTILAKIQRQAAALGYKLLPTALVPA

SEQ ID NO: 123010 - protein, 313 aa, unidentified
MAQMVATVGIDVSKDRLDVAVHPTDEEFSVTNDAMGWRLLVRRLKPLMARAIGIEASGGYERGAISALLEAGLAVRSVNPWKLRLFAKAAGVLAKNDRLDAGVIARFVATMPSREVRRDVAVEHLAELVTARRQLVDAVQQTSNQTEHLRDCGLRRLQARRVRQLERDVAQLDQLIAEAIAASPLLSARRDLLCSMPGVGPVLAATLLALLPELGSLPNRSIAALVGVVPYDFDSGRMRGRRHIFGGRAAVRRVLFMATQVAGRFNPTLKAFKQRLLATGKKPKVAIIAAMRKLIVTLNAMVRDNLPWRSVAA

SEQ ID NO: 123011 - protein, 350 aa, unidentified
MVMIGTDSHKRTHTVVAVDDVGRRLGVKTVGTNSEGHLDLVRWSAQFDEITFALEDCRHLTRRLEADLLAAGRRVVRVPTKLMAGARRAAREPGKSDPIDAEAVALAALRHPDLPVAELDGPTREVKLLSDHRHDLVVQRTRIASQIRWYLHELDPDLEVPSRGLRRHCVVAELAVELDRFDGLVARLTRNLLARCDELNLQINALETELRGLVRAIAPTLLAIPGCGVLTAAVIIGETAGVHRFRGKDAYARFTGTAPVPVWSGASAGKVRLNRGGNRAVNCALHMIAVTQARGIGPGQAYLAKQQARGKDKTAALRLLRHRLSDTVFTALRADQQHQTQATPPVAIAA

SEQ ID NO: 123012 - protein, 391 aa, unidentified
MVCVGIDVAKDKHDCCILDSDGMVRADCFTIPNNMDGFKQLLQTIRNCTKKSDKIKVGLEATGHYSYNILGFLLDNGLPTYVINPLHTNLYRKSLSLRKTKTDRVDARTIATMLLSDVDLKSYTDIAYHNEELKSLTRYRFEKVRERAKLKQSVSRLVTILFPELEKLVPSLHGASVYALLSEYPGAKQISEVHLTKLTNLLTTASKGRYGKEKAIQIREAARASIGSVMPAKSLELKHTIKLIQELASEIDEIEDSIQKIIDELNPPILSIPGMGVNSAAVILAEIGDFSNFSSPDKILAYAGCSPSTYQSGKLTNCYAHMEKRGSRYLRYALYNATKYVCYWNPVFAEYLAKKRAEGKHYNVALSHSMKKLVRLIYALQKSGKTYLAAA

SEQ ID NO: 123013 - protein, 363 aa, unidentified
MTYERSTLVNSEKYIGLDVHQATISVAVMDSRGKVVMESILETKATTILDFLAGLRGTLAVTFEEGTWAAWLYDLLKPHVAKLVVCNPRKNALLKHGNKSDKIDARKLADLLRLNDLEAVYHGETGVRMLRELARSYLTIVKDLSRVMNRLKALYRSWAIPCAGRDVYYTRHRSEWLGKIPEAGTRRRAEQLYQQLDMLQHLRQQARRELLTESRKHAITAKLRKIPSLGPIRSALAVALIQTPHRFRTKRQLWAYSGLGLETRTSGEHCYVHGQLRRSKKQISIRGLNQDHNHDLKGLFKAAATRASVQPGPFQDFYQRSLTKGIKPTMARLTLARKIAAITLTLWKKGENFDAEKLKSQAA

SEQ ID NO: 123014 - protein, 370 aa, unidentified
MLDTTTFVGLDVHARSIKAVSLDVMTGEVRCATFGYDAGAVAEWVRSVDPKARCVYESGVTGFDLQKRLSGLGVDCAVGAVSKMIKPSADRRRKNDRNDAEFLARMLSVGNVVEVWVPDDECEAARDLTRALEDARDDLSRSKQRLSKFLLRHGLVFDERTPTGRRKGNWTRAHWSWIESIRFAEGADNDVLAHYVDAVRRAAEEKARLEGLVEAEARKPRWRRRVDSLRCLKGVDTATAADLVFEAGEFSRFRNARSFAAWVGLTPSEHSSGESDRRGAITKAGNKHLRKALVEAAWHYLTCSGRPKDPARGQAPDRVARRHAAKGVRRLVERREALLARGVHNNKANVATARELACWVWAVGLMAEEA

SEQ ID NO: 123015 - protein, 345 aa, unidentified
MTYYTGIDVSLRSVSICVVDDKGEVCLEAKVAAEIDAIVDRLHRFSGDVKSVGFEAGTLTQYLTYGLQAAGFEVICLEARQVSVTLAAMRNKTDRNDARGLAQILRTGWYSRVHVKSLHSHQVRALLASRKAILKKCVDLENELRGLLKVFGIRLPSRVGHGSFDAELRETVSSDEMLACALVPLLDARTVLYKTYLKLDNAVKGLVRVDPICRRLMSILGVGPVTALTFKAAVDDPNRFKSSRTVAAHFGLTPRRFQSGETDNPGHISRAGDADVRSALYVAAHSLLTRNAQWSTLKAWGVRLAKIRGHRRAVIAVARKLAVILHRMWIDGSEFRWGSQPQTVA

SEQ ID NO: 123016 - protein, 338 aa, unidentified
MNEITTVGLDLAKNVFHVVCRDHRGKEIKKRMLRRGQVAAYFAQLPACLVGMEACAGAHHWARTLQALGHEVKLIAPQHVKPYVLGNKNDYNDARAIAEAVTRPGMRFVPVKTAAQQDVQALHRLRQARVADRTALVNQVRGLLAENGLVIPQGLKSFRQQVPQILEDAENGLSDRFRRHINSCYEHLQQLDARIDEYTREIKRESREHEAVRRLQSAPGFGPILASVFYSVIGEGAAFKRGRDVSASLGLVPRQHSSGGKQRLQGISKRGDGYLRSLLVHGARSVVRRAVGKEDRLSRWIQRLVAERGVNKATVALANKLARIGWAILRHQTIYRTA

SEQ ID NO: 123017 - protein, 374 aa, unidentified
MTMMQHRQIRYIGLDVHKVSITVAIAEEAGAPTSYGSIPNDPSAIRKLMTRLGGPEVELRVAYEAGPTGYALHRQLAKMAIDCIVVAPSLIPKQPGNKVKTDRRDALKLARLLRSGDLTPVWVPDEAHEALRSLVRARADAKADQLRAKHRLSKLLLRQGCRPPSGVRTWSQRHVQWLRQLEFEHLPDRIVFADYLAEVTAAGERIKRLEAALHQCAQSSSQVAVIRALEAFRGIGFLSAVTLVAEAGDLRRFRTAPQFMAYAGLVPSESSSGGKQHRGSITKTGNSLLRHVLGETAHHARHAPRVSSKLKQRQADLPREIVELAWRAQLRLHARYRHLSSRIGSLKALTAIARELAGFIWAAGQVLQEVPTAA

SEQ ID NO: 123018 - protein, 465 aa, unidentified
MKRKSRRAKEQKVSPINDDLELIEPDAAAVDVGSRSHWVAVNPQRDPNPVREFGTFTTDLMSLADWLAQCGAKSVVMEATGVYWVSLYELLEERGFKVYVVDAHTVRHLPGRSKSDIKDCQWLRRLHSYGLLRGSFRPPAQIRRLRSYLRSRGNIIEAAAQQQLRMQKALTLMNVHLHHVISDISGLTGLSIVRAIVGGERDPKQLARLRDPRIVASRETIQKSLEGNWQEELLFDLKMTLESFDHFQGQIAAYDEQIRPELKEVPSKEGVVEQALPPVRLRACRKRPGMSQQDQLDLRAELYRISGVDLTRIDGISLQTAQKVLFEIGTDVKAWADEKKFTCWLGLSPNHRISGGKVLKRSSRKVVNPLSVALRLAARTLRNSHSALGANFRRLSARIGMPKAITAMARKLAVLIYRMLKYGTQYVDKGMQHYETKYQETKIHYLRAQAAKLGMLLLPKQPAAT

SEQ ID NO: 123019 - protein, 343 aa, unidentified
MEVYVGLDVSLKETSICVVDGSGKIVCEGTVLSEPLVLAEFLRARAGNAKRIGLETGPTTTWLWHELRALGLPVICIDARHAKAALSLQINKNDRNDAVGLARIMQCGWYKEVQVKSLPCHEVRAVLNSRAQLVKIARDLENQIRGMLKNLGLVMGRAGGTTFRRWAEELVGEHRLLREAVRPLLAVHEAVRRETAGLTRKLLGLARDNEASRRLMTVPGIGPINALAFCAAIDDPSRFRRSRSVGAYFGLTPRRYASGEIDWTGRISKYGDAMVRTYLFEAAGVLLTRVPQWCKLKAWGHRLWKRIGFKKAKIAVARKLAVILHRMWRDGTDFIWSTKETVA

SEQ ID NO: 123020 - protein, 401 aa, unidentified
MPFHGGLDWGGTSHAVCVVDGAGQVLVRIQARHDAAGIADMLARLKRVAAPADLPIAIERPSGLIVDALVQAGHPVMPIHPNVVKACRPRYRAAGGKSDPGDAYMLADILRTDGHRFRPLMPLGDDIKALRALVRGRDDLVAQRVMLANQLRSLLDSYWPGAAAIFAAIDSPIALAFVGRYPTPDSASRLGEKRLASFLAQHAYCGRRSPAELLARLRATPSGLASDAEADAKGELARALVAVLERLVPEIARLSSRIEHAVADLPDGRILMSFPRAGRICAAQILAELGDVRERFPTEDQLAAEAGVCPVTHASGKSRGVVFRWACNKNLRLAITCFADNSRHVCAWAAAIYGNARQRGCTHPHAVRILARAWVRVLWRAWQNRTQYDPKKHLGATITQL

SEQ ID NO: 123021 - protein, 421 aa, unidentified
MIPAVIERCAGIDIGKKFLAVCVMTGPANEEAQAEVRKFGTVRHELESLRKWLQSEGCTHVVMESTGVYWKPVLNILEDDPQYALKIILANPQQVKAVTGHKTDPHDARWLAHLLRHGMIRPSFIPPRAIRELRDFTRRRKQMIGIAAEERNRVQKVLEDANVKIGDVLSDVFGLSGQLMLEALVNGLGGDDPPSAFDIAQLARGHAKKKLNELTAALEGHQMRDSHRTLIRHAMRHMAFLAEEIEALDQAIAVLIREARLTPAYELLQTIPGIKSQAAATILAESGPDMKQFPKAANFSSWSGLAPGNNESAGKKKRAPAMKGNPHIKTALVEAAWSAARTKQSEFQDRYGRLRSKIGHKRAIVASAHTLALRIYEVLESGLPYQTHGGNLTPRSVNRLVRHHTRRLKCLHRWIKDQEIQ

SEQ ID NO: 123022 - protein, 314 aa, unidentified
MAVECFIGIDVSKETLDVHTFPDGNDLQFINDPDGIKAICRKFSKLRPNLIIIEATGGLQIPVATALSLKKFPVVVINPRQARDFARAKGRLAKTDKIDAEILALFGKQMEPEVRPLKDEQAQEMSAFMSRRNQLIRMLVMEKNRFSRAYGSVRHDIEKNIDWLEERLSEIDTHLGKIVRASPIWRERDNLLRSVPGVGDVLSRALLSNLPELGTLNRRAIAALVGVAPLNCDSGKHRGRRRVWGGRSDVRSVLYMAVLSAKKYNPVIRDFYNRLKEAGKPHKVAAVASMRKLITILNAMVRSGQPWAQCANAA

SEQ ID NO: 123023 - protein, 367 aa, unidentified
MKKGSTAATKQSRNFSQQRLTIGLDLGDRSSWYCVLDEAGEIVLEQRVGTTPKAMREVFGAMPRSRIALETGMHSPWVSRLLSELGHEVIVAHARSVRLIGESRRKDDRLDARTLARLARIDPQLLCPVKHRSAKAQADLTVIRARAGLVRARTALVNTARGLAKSYGERLRGCNVRNMNPEKAEGLSPVLQAALEPLLAAIEAVSEQIREYNERIETLAQQSYPQVALLKQVKGVGTLIALTFLLTLEDPQRFRKSRDVGCYLGLQPGRRNSGQSQPQMHISKEGDPYLRTLLVQGAQHILGPFGIDCDPRRWGLKLAERGGKSGKKRAIIATARKLAVLLHHLWVSAEVYEPLHNSSRTKVAAAA

SEQ ID NO: 123024 - protein, 386 aa, unidentified
MIVIGADTHKGSHALAAVDEGTGRVRGGREIKADDAGHLAAVRWARGLDEERVWAIEDCRACSRRLEQALLAAGERVVRVPPHRMGASRKGEREPGKSDEIDALAVARAVVGDGVEQFPVAYLDERAMEIRLISDHRGDLVADRTRTVNRLRWHLLELCPELERSVKRGAFNRSRVLDRVDRALRKLPADARVRVAREQISLIRGLNRQIDQLQRELAELVTAYRPMLLAEQGCGALTAAILIGHTAGVRQFRKPSSFGLQTGTAPIPCSSGQRTQHRLNRGGDRQLNHALHIIAITRAKRDPATKQYLARKEAEGKTTKGALRSLKRHLARRFYQLLAEPLAGEPQAANGRPITEPDAAMILERPRPGRATEEITTAPSPMVCIG

SEQ ID NO: 123025 - protein, 402 aa, unidentified
MNAVGIDVSKGKSMVAIMRSFGEIVSTPFEIKHTTSDIHSLVELINSVEGESRIVMEHTGRYYEILAHQLSEANLFVSTINPKLIKDFDNDSLRKVKSDKADAVKIARYALDKWQNLKQYSVMDELRNQLKTMNRQFGFYMKHKTAMKNNLISILDQTYPGVNTYFDSPVRSDGSQKWVDFASTYWHVDCVRKMSLNAFIDHYQNWCKRKKYNFSQSKAEEIYGKAKELVPVLPKDAITKLIIKQAVDQLISVSTTVESLRTLMNETASKLPEYPVVMAMKGVGTSLGPQLIAEIGDVSRFTHKGAITAFAGVDPGVNESGTYEQKSVPTSKRGSADLRKTLFQVMDVLIKTMPQDDPVYQFLDKKRAQGKPYYVYMTAGANKFLRIYYGRVKEYLASLPES

SEQ ID NO: 123026 - protein, 345 aa, unidentified
MVVLGIDAHKRTHTVVAVDDAGRQLGVRVTRSTSTAAHLDLVHWAGQFGPARRWAVEDCRHLSRRLEADLLAAGEQISRVPPKLMAATRKSARTYGKSDPIDALAVARAALREPGLPTARLDGPERELRLLTDHRDDLVAERTRAVNRLRWHLHELDPDWDPKPRSLTRRKTIAAVTVRLAGLDGLVARLAAGLAARISELTIQTDALEQEIAALVRQLAPSLLALPGAGYLTAAKIVAETAGAARFTSKDAYARHNGTAPLPVWSANKARHRLSRTGNRQLNCAIHLIAVTQLRCHPDARAYLQRRIAAGNTKTEAIRALKRRLSDVVYRALLADAASHLDQAA

SEQ ID NO: 123027 - protein, 415 aa, unidentified
MEDIPKAIVCRYIALDIHKHYCVVAGVDRDGQVVLQPVRVEHEDLEGWLKKNLLSSDQVVIESTTNAWHVYDLLEPLVAEVLVANPIKVKQIACARVKTDKKDTLILARLLAAKLVPVVWVPPQHVRELRQLISQRRRLVGMHTQVVNRMHSISHRHHLGHPRGKRFQEKDMGWREKLEGMERFQLDLDLETKKYLKGQIERITAELGRMSHEEPWAEGMLYLMQIPGFGVVTGMTVLAAIGDIERFESPKRLASYSGLVPGVEQSGMKLRGKRITKEGRRELRWAMVEVAQRAVKADPHWMQLFSRLERRMHRNQAIVTVARHLLTLVWYVLTRQEPYAHYSSERIAYKYYTWSWQLNEAQRKGLTRPQFVRYYLMRLGIGSELQKVALDPKHPHRLASEAEVLARMPELKPPG

SEQ ID NO: 123028 - protein, 356 aa, unidentified
MPLQDALIKPKIFIGLDIHKKSWTVSIQTDLFFHRTYSMPSVAEDLFQYVEQTFPNHEVDLVYEAGCCGFSAARYFSNLGWNVLVVNPSDVKTGDKERYQKTDALDSKNLSNQLKAGVLKGVYIPTEEHEQFTTLARHRTQVTKKLRQSKLHIKSMLLFHGIKVPDEFDTPNWNKDFIAWLEKIKFSSSCGELALQGKIRMYKFIRSEYLEIANQMRAHCRKTHTKDYNLLRSIPGIGGYLASVILAECGNLRRFNNEGQFSSYIGLVPGTYNSGGSEKCLGITPRSRSQLRSYLVEAAWVAIRKDAEMQNYYRKHQGKNVKSVIIKIAHKMARRILSVIKTETPYQINRNLVLEK

SEQ ID NO: 123029 - protein, 365 aa, unidentified
MEAKKKNGTRYVGLDLGKRTYEMAIVEENGKATMSNGRTFAAGRQALYKKLRPKDKVAIESGNMAFIIAKEIETSVGCKVYVLNPSQLALIYGSLKKTDKEDALKLAHILEDFREERLPVVPVPSEREMNRRKLLASYRRAQQGRNRDINQLHGLFVFQGITTKVKSDLATGESREESVKELTGIERREAEYLLKSLALIEERIAELEKEMKMESKGDEQIERLQSIPGVGPKTAFAFVAHVAAERFKNAGQVSNYLGLVPRIYMSGETVKYGRITKRGNGYVRALLVQAAWALVLSKGGGKLKERYEYMTKESSISKKKAIVAIARRLAEEMYVLLRDGTWHESRQFTPEKGKAKKLAQLALSA

SEQ ID NO: 123030 - protein, 350 aa, unidentified
MVWIGIDAHKSSLAVAVIDELGRELACAEFGNEVSEHEALHAWVIGQAPGERRFGIEGAGWLARGLACFLLERGEDVRDVRGMLTERERRRLRGAGKSDQRDALAIARVTAREELPRVRADSAARELKLLCDYRSQLQCERTRVANRLHVDLVTLRPGYQRRAPTLTSSARLEQAEQLLEEDESVQAALARRRIERLRELDAEIKQIGREIGGRVRATGTGLVELVGLSDLLAARIIGEVGDIDRIQTKDRFARINGTAPISASSGNTNRHRLNKGGNRRLNYALHMMALTQARMDPRARAYVERRRAEGRTYRDAIRALKRHLSDAVYRQLREDAKTSRRRCTPGVNLT

SEQ ID NO: 123031 - protein, 408 aa, unidentified
MNAVGIDVSKGKSMVVALRPMGEVALLPQEFLHTGVGLEQMAYAILALGEDTRVVMEATGRYHEPVAAALHEYGIYVCVLNPLYIKQSGGGSIRKVKTDKADAMKIAKYGLDNWVDLREYTPMDTVRQQLKLCSRQYNLYMKTVVSLQNNLISLTDKTFPGVNVLFSSPERADGHQKWVDFVMTFWHCDCVCRVREKAFTERYQKWCKRKGYHCSVEKALDIYASSCGHFTTLPKNDNTKLLITTAAQQLLAGKTTLAALRAEMTRLASQLPEYETVRAMYGVGETTAAQLMAEIGDVRRFPRRSSIVGFAGVDPAVDQSGKHETQSTPTTKRGSPHLRKTLYQIVCTYLRKAPADEPVYQFLDKKRAEGKPYFVYMTAAQNKFLRIYYARVKECLEAFDAQQSTSQG

SEQ ID NO: 123032 - protein, 368 aa, unidentified
MEEVCAFVGLDVHKATITVAVADAGRGGEVRHFGTIENTPTTIGKLARNLARRHGVVEFVYEAGSCGYNVQRQLVGMGLTCRVCAPSLTPRKPGERIKNDRRDAIALARLHRAGELTYVWVPDALHEALRDLVRARHAACQDVRRDRIRIQAFLLRCDFRFEGKPWSTRHRRWLCNRQFIHPAQQVAFQTYINALEHDEARKVEVEAQIRDLLAGSPWAKQMQALQALKGVGPIVAATIIAEVGDFSRFAHPRQLVAYFGLAPGEHSSGGTVRPRGITKAGSSIARTVLCEAAWNYRTTPKVGQWMKERCPPVPRDIVALAWKAQLRLHRTYSRLTARGKRSVVATAAVARELLGFVWSIGQRVPLGA

SEQ ID NO: 123033 - protein, 347 aa, unidentified
MNYIGVDCHISSLDFAVVNERGATTQKAKVNTSVKEFIYFVKSVPKPRKIFIEEGELAGWLLETSLKFGERLIITDPKINKWIGKAGQKDDTIDAEKLAQLARGKYIKPIYHPVDRRRRFKELVFAYHDTVKSQARIKNKIKASFRKNGIQCRGVTVYSDKHRAKWREKLSENKISRLIVEELWVQLDQLRASKERLKKNIRIQSKQYPEIKQFMQIPGIGLIHAASISAIIETPHRFGNKKKLWMYAGVGLRQRSSGGKVYSRKLTREYNRPLKNAIRQAVEASIHAHDNQFRRQYLRLTLKKGVVSHKAKLTVARSMLATLYGMWKKGEAYDPEIDAKRNSEDKK

SEQ ID NO: 123034 - protein, 353 aa, unidentified
MKYYTSTTKFNCGIDLHARQMYVCVMDRDGKKLVHTNIRNNDFEFFLKLVAPYRHDLTVCAECMFGWYWLADACQAAGLHFVLAHALYLKAIHGGKNKNDRIDSEKLAHLLRTNFIPPAYVYPADKRPLRALLRQRILYVWRRSELLSRIQSHQLAYNRPTCRQNLYNRQSWTEQLLASEPDPVRQLALQNDLALIGHYDAQLASLEKALLKLTKQTASRDFNLLQTTPGIGDYLGLTILHEIGDIARFPTVKDFLSYCRLVKGTVASAGKLKGLRGAKLGNPYLRWAFGEAAVIAKRDGVLGPLAQRLEARLGNKFKANTVLAIKLARAVYFMLKHKTAFDPDRLVATLSKN

SEQ ID NO: 123035 - protein, 420 aa, unidentified
MKAKKKAKLDLIDDDTLVVGIDVGKRNHYCRFINVRGYEIGKGFSFSNNRDGMEKAISKIEEAKIQNNLAKAVIGLEPSGHYWKPAAHYLSRSGYKLALVNPYHIKRIKEIEDNSQTKTDPKDSLLIAKLLRDGDFFDPNLASGTYAELRRMYRLRLKVKKSFIREKTKLKALLDEYFPEYQDLFCDILGATSEYIIDNYFLPEIVAKENILSLTGKIKTISRGRIGASKVLKLIECARASIGINTGKDAAVLEKTYILKDISNLKLKLACLNKKLKHYLDKIECSKYLLSIPGVGVVTAAGFLGEVGDISKYKSAKGIIKLAGLNLVEISSGVKKGKKKISKRGNDRLRCLLYQCAIVAISKNSQLKRYYCYQAETKNKMKMVVAVQCKLARIMFALLKYKKYYDPEEVLKSMVAQEVA

SEQ ID NO: 123036 - protein, 351 aa, unidentified
MIIIGCDFHTRYQQIAMADDETGELLLERRLDHESGEAHAFYRNFSVTVRVGIEATGPIHWFERLLAELGHQLWIGDSAKIRASEVRKQKTDERDARLILDLLLAKRFPKIWVPTPAERDLRQLLWHRHKLVCLRTMLGNQLHFLAMSQGLCRKRKLFTKKGRVELSGLALGPWTRRRREELLQLLDRVDAPIADLDRAVWEEAQHRDDAVLLMTHPGIGPVTSLAFVLAIGPVTRFCCSRKLVSYLGLNPSEDSSGQRRRLGAISKQGNTMVRWLLIEAVYPAVRKDLALRQDYQRLKFRRGHAVAKVAIARKLAVRMYWMLRSGADYAQLVRRQGSPGATLVDASPSLG

SEQ ID NO: 123037 - protein, 320 aa, unidentified
MKVVYPRCAGLDVHKKGVHVCVRIRPTGSNKIRTEFAQFATFYEDVERLHEFLRKHKVRRVVIESTGVYWMPIWNVLERMTWKYDLVLVNPQHVRALPGRKTDQQDCERLAELGQYDMLRGSFIPPAEIRALRDLTRRRAALQQDWNRLVNRVGRLLETANIKLGSVMSSLTSKTGMAMLEAIARGVWDRERLADLAQGSLKDKKLELIRALPERCSDHFRWLLRELLDELDTLENRRLKVEARIRHDMEPYAVQIRNLCTIPSVSEITAWTLIAELGVNMSQFPDPAHCASWAGLCPGNSESAGKRQSGRTRKGASVPS

SEQ ID NO: 123038 - protein, 457 aa, unidentified
MTKRRKKSKLQSFNVQSLPKHLQHINLDAAGIDIGSERHMVAVPEGRDAVSVREFGTFTADLQALADWLQQCGVTTVAMESTGVYWIPLFELLERRGFEVKLVDARHVKNVSGRKSDVLDCQWIQQLHTYGLLTAAFRPPDEVCVLRSYLRQREMLTQTASMHIQHMQKAMQQMNLLLHNVVSDITGVTGLKIIKAILAGERDPRVLARNRDERCQQTRATIAKSLVGNYREEHLFALRQAVDLYETYQTKIADCDQAIIKHVEKQPDISDDGPPPAEKPVKARERIRSGVDVRKLLFKKSGVDLFAIPGLAADTLLTLASEVGFDMKPWKTEKHFTSWLSVCPGTKISGGKMLDKKSKRNPNRAAQAFRMAATSQARSKTALGAFYRRIRSRSGGKQAVKATAHKIARIYYAMLTQGTSYVEVGQQAYEQKYKERRIDHLKTQAKSLGFQLVPCVT

SEQ ID NO: 123039 - protein, 355 aa, unidentified
MDNRKYIGMDVHKEAIAIAVLNAAGKLVMESIIETKANTILEFLKGLRGELHLTFEEGTWASWLYDLLQPHVKRVVVCNPRRNALLKEGSKSDRVDARKLAELLYTKMLRPVYHRDHGMRAVKELARSYVTISKDQARVMTRVKALYRSWGIACSGKQIYTVRHRASWLGKIKEASVRRRAEFYYQQLDGLRSVRRQVRRELLLESGKHKASKLLRQIPSIGPIRAALLLALVQTPHRFRTKRQLWTYSGFGIETHDSAEYHYVAGQLQRCKKPQQVRGLNRNHNHDLKNLFKSAATNAVAKSGPLQEFYLALVKRGIRPEMARLTLARKIAAITLAIWKKGVSFDAKHLKQQTA

SEQ ID NO: 123040 - protein, 381 aa, unidentified
MRLSARIGDCRVQANQEKSGGEEIEMAVYVGIDVHKHYCQAALMNNNGTIVKELRFDNTTQGASNLITLARTIDTQVQAVVEPSANFWIRVYEKLEQEGVKVKLSNPLRTKAIAEARIKTDRIDAKTLAYLLRGDLVAESYVPTRKNRERRALIRHRASLIQMRVDTKNRIHALLDKHELQHDYTDLFGKQSLEWLRSLHLPTPDQQILQSSLQIAETLTEQIRSMDIQIAKDATSEEKAKLLMTMPGVDYYAAMVLLSEIGDVHRFSSDEKLVSWVGLAPQVHQSGDSNWTGHITRKGSSRARWILGQCAQSARQHDPRMREFYERIERKHGPQKAVVAVARKMLAIMYVMLIRNEPYRGENPELTERKNKRLDSLVNST

SEQ ID NO: 123041 - protein, 450 aa, unidentified
MAKRSKKRCEQLPILHPHAAGIDVGASELFVAVSADRDPQPVRSFPTFTRDLNALADWLQQCGIRSVAMESTSVYWIPVYQILESRGLEVCLVNAQHVKNVPGRKTDVSDCQWLQYLHSVGLLRASFRPPGIICAIRSLWRHRSSLIQMAAEHVLHMQKALDQMNLQIHRVLSDLTGMSGLRILEAILAGERDPVTLARLCHGGVKSSEDTIAKSLEGDYRPEHLFALRQSLAAFHYYQQLVVEVDQEIQGQLGGLGTAATAEPTVPKRTKASAYQRPRYEPKTFDLRSELYRVFGVDLTNVPGISSITAHTLLCEIGTDVSRFRNASAFASWLGLCPENKISGGKVLYTKSRRVRSRVATALRMAANSLHHAKNYLGEFFRHITRKLGKPQAITATAHKLARIVYHLLSTKEAYNETVFHRCDEEVLRRQLPSWNHAFLAAYARMALGS

SEQ ID NO: 123042 - protein, 417 aa, unidentified
MKKRSWKHGLTENTLLVTVDIGKFKNTGYYRCPDGTDVPAFEFYNTGEGFKNFWSRIEHAQRKFNLPEVVLGLESTGSYAEPLLHFLRKRGVQLVQVTPAHTKKVKELYDNSPNKTDDKDPKVIADVIELGRALTVVIPEGVAADLRRLTGARERSQERRTALYNQLHDLVFLMFPEFESVMSDFSTKSARYLIENYGTPTRLLTLPLEELTQILRRVSRGRLGSERAQALYELAQTSVGISEGQSSIVAEIQHELHLIEDCDRFIAALEEQMLASLLKLPYSRFLLSIPKIGKVTVASLIGEVSDFGQFQTIAELLKYAGLNLFEISSGEHKGQRRISKRGRPLMRKLLYFAALRMIGKHGIFHEQYQKYLQHGMLKNKALVAICRKLLGLMLALVRDQREYIVNDATCSEYQNAA

SEQ ID NO: 123043 - protein, 406 aa, unidentified
MTVTPRLTPPGAPGIFGGADTHSDTIHVAAIDGWGRELGDREFPTTPAGYRDVLRFLESYGSVQVLGIEGTSSYGAGLTVAARSAGIEVREVIRPEATVRRMQGKSDPIDAYQAARAALTGRARTVPKDDDTEGLRAVLNARRSAVKARTAAMNQIHAQMITAPVAVREKYRQLSDKRLVDALAACRPSASTGVVASVMIALKMLAQRHQFLTAQAQLLEDQLRDLVAVVNLNLLSARGIGPVTAAQLLLTAGGNPERLASEASFAALCGTAPVPASSGKTTRYRLSRGGDRHANAALHTIATVRMSSDARTHDFVAAQRAKNRSNPELLRILKRAIAREVFKLLQAPNALASIDDLRRLRRERNLPLRKVVEALGTSQIHISRIERGITHDREFTDRYRTWLQAA

SEQ ID NO: 123044 - protein, 366 aa, unidentified
MKKTSTIRVNGNMIFKGHKLTIGLDLGDRWSFYCVMDEAGQIIVEQKLATTPEAMKQTFGKIPRSLIALETGTHSPWVSRLLTELGHEVIVAHAQKVQLISKSNRKDDRHDARTLARLARIDPELLGPVRHRSAKAQIHLTVIRARAELVSARTALVNAARGLAKSYGERLRKCGTQQVSRELAAELSVELREVLEPLLQEVESLNERIKQYDARMEKIARESYPQVELLKQVKGVGTQIALTFVLTLEDPHRFPKSREVGCFLGLRPGRRDSGESQPQMHISKEGDPYLRTMLVQGAHYILGPFGQDSDLRRWGLKLAARGGKNAKKRAVIAVARKLAVLLHRLWVGGEVYEPLRNSHKAMRAVA

SEQ ID NO: 123045 - protein, 340 aa, unidentified
MNEITTVGLDLAKNVFQVHGVDAEGTTVLRKQLRRAQVLAFFSRLPRCLVGMEACATAHYWARELRTLGHEVRLMPAQYVKAYVKRNKNDAADAEAICEAVARPTMRFVPAKTAEQQAAVLLHRGRERLVRQRTMLVNALRGHLAEFGVIAPQGLRNVGRLIAIIRDEEDARLPGLARQVLQVLAVQIEQLEAAIAALEKQLMGWHKSNPVSQRLATIPGIGPIIATAIAAMVAEPSGFRSGREFAAWLGLVPRQNSTGGKNRLGGISKRGNQYLRRLLINGASANLLRSKATNADPWVIGLRRRRPSLVVAVALANKTARIAWAVMHRQENYQRMATAA

SEQ ID NO: 123046 - protein, 462 aa, unidentified
MSKNGKTKRASNTQRIESLPILEPHAAGIDVGSKQHWVCAPTQDGTSREVVAFGATTAELQDLAAWLKARDVASVALESTGVYWIAVAEVLEEQGLEVWLVDTRQLAQVPGRNIKTDPIDCQWIQRLHSYGLLRGAFRPTEVIAQLRTLVRDKAILVAESADWMRRMQKSLDQMNVRVHRAVSDIDGTTGMAIVRAIVQGDRDPENLAKLRDYRCQKTEAQIARELQGHWRADHLFSLQQALKMYDSIAERIAAYDQEIQRQLAHMTPPERSDQTAPPLANANKVRGIKRRGEEQMRQALYRVSGVDATQIDGVGVQTVETVISEYGTDLSQFPTEKHFISHITLAPHMAKSGGKPLPRHKKPHSASTRVGNALRMAALALQHSDTALGAYYRHTAQRRGADIADFASARKIGVLIYRLLRWGQPYIDEGAQAYEKRYQQQQIKRLTAKAKTLGYQLIPATA

SEQ ID NO: 123047 - protein, 334 aa, unidentified
MQNVTLIGIDLGKHSFHVHCQDKSGKALLRKKFTRTKLIEFLAGCTSATVVMEACAGAHFMARRIVDLGHEAKLISPQFVRPFVKSNKNDFVDAEAICEAASRPSMRFVQPRTEAQQAMRALHRVRESLVRDKVKTTNQMHAFLLEFGISMPIGAAVIKRLSTVLAENELPSYLVQLLMRLHAHYLYLVEQIIGLETALEQELSRDETGQRLQTIPGVGPITASVLSSQLGDGKQYGCSRDFAASTGLVPRQYSTGGKNTLLGISKRGDKNLRRLLVQCARVFIQRIDYQSGKLADWIRAQLARKHSCVVCCALANKLARIAWAITTRQTVFER

SEQ ID NO: 123048 - protein, 355 aa, unidentified
MGSVAHLEVVRITVGVDTHRDEHVAVALDALGKKVATTSMPTTPKGYRDLLAWAEGLGAVEAWGVEGTGSYGAGLARHLQSAEHLVHEVIRPNRAVRRRKGKSDPIDAEAAARAVQAGVAAGVPKSGEGAVEMIRVLQIARSSAVKQHTQSINNMQGLIVTAPSELREALRSLSTPQLVAACCRLRPGELVSPTAAVKLALRCLARRHRDLTEEIKTLDAELATLTVKVAPALTELFGVGTQVASQLLVTTGDNPGRLHSQASFAALCGVSPVEASSGQTRRHRLNRGGDRQANAAIHRVVIVRLRHDGKTRAYMAKRTAEGKSKREVIRCLKRYVANEVYAALMAPDDKPQKAA

SEQ ID NO: 123049 - protein, 409 aa, unidentified
MDLVITRCAGLDVHKATVVATVRVPGEAGRRQVVTETFGTMTPDLIALREWLQAYGVTQVALESTGVYWKPVYYVLEDAFDLWLINMLHLQHVPGRKTDVKDSEWLAQLLECGWLRRSVVPPAPIRELRDISRYRVQQTRDRSQEVNRLQKVLEDAGVKLTSVLTDIMGVSGRAMVEALVDGTTDPQVLADLARGKLRKKLPLLRRALVGRVRPIHALLLQEILAKIDYLDEALERLTAEIDRRVAPFEPMLTALDTIPGLDRIGAISVLVETGGAMDRFPSAAQLCSWGGMCPGHDESAGKRRSGRTRKANRYLRTTLIQAGVAASRKRASALQALYARVKTRRGHKKAVVATGHQILEIAYYVMRDGITYHELGADYFQRRDRDRTVRRHVKQLEALGYVVIVNPAA

SEQ ID NO: 123050 - protein, 375 aa, unidentified
MTRIAENAQPGQRRARRVPERVVYGGVDTHKELHVAAVVDAGETVLGTRSFSTTRAGYRALLAWVGEYGQLARIGVEGTGSYGAGLTRHLAKAGVTVLEVDRPDRSDRRRKGKDDDLDAINAARAALHNHRTTIPKSKDGAVEALRVLRTARAQAVRERRNALQLLRMTIVAAPDEVRDHVRKLTRMQLIRVVAAWRPDVSNAADPITAYRVGLKSMARRYLELTDEITGLDDLITPLVEALAPQLLARLGIGIEIAGQMLVTAGDNPARMKSEAGFAMLCGVAPLPASSGMTQRHRLNRGGDRQANRALHLAVVSRIRMDPKTQAYMARKTAEGHSKLEIIRCLKRYLAREIYYLLNPGQQHIARRPYRRRTAA

SEQ ID NO: 123051 - protein, 331 aa, unidentified
MFPVGIDVSKKNLDLCMLYDGIKGRIKTRNIQNNRHSVENILRWLRLQHCSPEDVHVVMEATGVYHERLATELHDAGFRVSLANPHRSREFARGMGIMTKTDKVDAYMLACYAFLKKPHYWEPPAPEIRYLGALLRRRDVLLGDALREEKRLEKYLSTDTPADIISSCRRMAQLLREEVSNIERQIKAHIKASPALRRDYTLLNSIKSVGPQLGMHMLVVLRSHNFASAEQAAAFLGVVPIEKRSGTSVRSRPRMSKIGPPQLRAKLYMSALCGKIYNKRMRNIYDEMCLRGKPKMVAIGALMRKLVHWCYGVLKTGTVFNDEGLKQVLST

SEQ ID NO: 123052 - protein, 464 aa, unidentified
MGLRIVATSTRVRLSVSPLAPAGDLPLPPIQELAMEEVDEQELHVERVAALDLGKAALEACVRVPHESKPGRRLQEVRGYATTTGALLALADWLHSWGVTRVVMESTSDYWKGVYWLLEAEGFECWLVNARDVKNVPGRPKTDKADAVWLAKVAERGMCRPSLVHPRPIRQLRDLTRYRRSLIHDRTREMQRVEKLLEDAQIKLSVVASDIFGASGRAMLEALIAGQRDPKVLAQLAKRRLRAKIAALEEALRGFFTDHHAVILRMMLDNIDRLSEQIAALDTTIEEAIAPFASQVAQLDEVTGVGVTAAQELIAEIGVDMGRFPSAAHLVSWAKFCPQLHESAGKAKPKGRGKGNRWLAGTLGNIVATAARTDSFLGARYRRIAKRRGKQKAMVAAGNSVLVIVYHLLSDPEARFRDLGAEHYDARIDSQRRARNLAAQLQAVTGQRIVIRDGKAVIVQSEAA

SEQ ID NO: 123053 - protein, 467 aa, unidentified
MDIAKHVYQAHGADAAGHALFASHHAPEASWLLGFLASWLLGFLAAHAPCTIAMEACAGAHYWAREIAKLGHSMRLIPPVYVKPFVKRQKNDAADAEAICEAAQRPSMRFVPVKTEEQQANGVVFRARDLLVHQRTQCVNALRGHLFKYGYVFPQGITHVSTLVNHLEDPQSALPESARVILKLLVDTFTALEKQITELDAEINRRSKGDPTARRLMTIPGVGPIASTAITALVPAAEGFQTGRDFAAWLGLTPLQKSTGGKQKLGVISKRGERTIRPAHPRRECRGSPGQPARGASGLVAGADADTQAEDVGHRSPCQQDGPRRVGSAGQRRRLQNSSRGGVGWSRPRGRRASGRRLWRNTRRDGAGRSRAFHSASSTPWVRWTQSANSHTGRGGSTLHHRPYRWQHPTTRNDPDVFPCLEGGVHRWRADSRLGGWAILADCHHRAFYREFGGCRLKDRCVGELVL

SEQ ID NO: 123054 - protein, 385 aa, unidentified
MGIETFIPRDYDVFAGLDVDKKSISVTFTDHQGLLKSMRMPYSVDHLVNHVRKYYGDKKVAFAYEAGPTGYGLYDGLVAKQYPCLIASPSMIPKAPGQRVKTNRLDSLGLAENLRGGQLKSIHVPTTLYRELRHLTQLRDALVSEVVAMKQRIKSLLLMEGLEFPPAPPGSQWSFLVKAKLRKLPCSSVVRFKLDQLLDNLEFGEKQILKTTREIRRFCHNDPELSQCIDYLKSLPGIGWIVASQMMARIGDWRQIKNIRELPAFLGLVPTESSTGERTTRGSITHSGDPRLRSKLIQASWSAIRQDGELLKFFRTVAKKHPRHLGPRVAIVAVAHKLCVRAAVVLMKQRPYEMREKVQSAPLTQEETVPQGTTRRRRVPGEKIS

SEQ ID NO: 123055 - protein, 450 aa, unidentified
MGIRYAGIDWATEKHDVRVADETGAKLLAATFAHDEAGLSALCRTLVKMEVGLVAIERPDGVLVERLLDAGLKVLALHPNKVAAARDRFRVSGGKSDRFDAFVLCELARTDNHRFRVLEPDSDQTKALRAMTRAREDLVHTRTAVVNQLRAELDRCWPGPLRLFSHMDSEILLAFLERYPSPVDAHGLGIVRMQAFLKREGYSGGQKPEALLAKLRSAPEGRVGELELAARRQLVLTYVAMVRTLNGQIKSLEREIRTAVRAHPDGRVFLSLFKQAHSFITAAELLAEIGDCRARYPSRDALAADAGQSAVAKESGKRKTAQFRWGCNKRLRVAFSRLADSTRHWHPWAQAVYAQARQRGLEHPRAIRTLGRAWCRIVWQCWQSRTAYDPTRHRSLQRHVTVTIPSPSGPVTDLAATQRMAAALAPPAGTLEPSAQHLTTSLHPLTQTGG

SEQ ID NO: 123056 - protein, 366 aa, unidentified
MKKLTNTTGRRTRKMQGRRLTIGLDLGDRSSFYCVLEEAGEIIQEQKVSTTPKAMKDAFANMPQCRMAIETGTHSPWVSRLLSELGHEVIVANARNVRLIGESRRKDDRLDAQTLARLARIDPRLLAPVQHRSAQAQADLAVIRARAGLVRVRTSLINMARGLTKSYGERLRGCSPRKMSPQVCADLSPELRVALEPLLKVAEAVSARIREYDAQIEKLGEDRYPEVALLKQVNGVGTLIALTYVLTLEDPRRFRKSRDAGCYVGLQPGRRNSGQSEPQLHITKEGDCYLRTLLVQGAHYILGPFGEDCDLRRWGMKLAERGGKNGKKRAIIAVARKLAVLLHHLWVSFEEYEPLRNSSKVMLPAA

SEQ ID NO: 123057 - protein, 343 aa, unidentified
MEHFAGIDVSLEHSSVCVVDGVGKIVREAKVASEPEALVRFFRGLETGVTRIGLEAGPLSQWLHAGLVAAGFEVVLLETRHVKAALSAMVIKTDRKDARGIAQLLRMGWFRPVHAKSPGSQEVRALLVARKLLQAKLLDVEFSIRGILRGFGLKMGEVSKGRFAARVRELAAGHAMLERITEPMLRAREALRTEYARLHGEMLAIVKPDPVCRRLMTVPGVGALVAITFKSAVDNPGRFARSRVLGAHFGLTPRKYQSGETDVTGAISRVGDAMVRMALYEAAHIMLSRVTRFSSLKRWALNVARRRGLKRAKVALARKLATVLHRMWVDGTSFRWGKQAASV

SEQ ID NO: 123058 - protein, 495 aa, unidentified
MKAKACKAKGKHSNSSKRGAKITVRRGADGMEIVNPHAGGIDCGAQEHYVAVPPQSVEPGEPVVRCFSAFTEGLDALVEWLKACGVTTVAIESTGVYWIALCQKLEAAGIEVFLVNARHVRHVPGRKTDVKDCQWLQRLHSFGLLSASFRPEDAICRLRSLQRHRLNLISTAGAEIQHMQKALQQMNLHLHHVVSDITGVSGLRILDAILAGQRDASQLAKLRDHRVYKSTLAQMEAALVGDYRPEHLFVLGQSLQAYRFYQARTQDCDAEIERLLQQLAERFESSSVLAAELSQPEVLNDAAPSQNPRPVKRKVKRKPQANEPKINLADYLRRICGVDLTQVIGLNVLSVLLIVSEIGVDMSKWRSAKAFCAWLGLCPRNKISGRKVLDTRTCKVINRVATTLRLAAQAVGRTDTALGIFYRRKKAHLGPPKATTATARKLACLVYHLLKYKEQYREPDPATYQLKVEKTILAKIQKQAAALGYKLLPTALVPA

SEQ ID NO: 123059 - protein, 369 aa, unidentified
MKKDSTLYVGLDLHKDSIVVGYASSRGGDPVHLGAIGTRQCDIDALVRKLQSKGARLVFVYEAGPCGYWLYRYLTGKGLACLVVAPSLIPRKPGDRVKTDKRDALTLARLARSGDLTPVYVPQVADEAIRDLARAREDALGDLNDARFRLKALLLRHDIRYTGRANWGDEHRRWLARFVFPTPAQQIVFQEYVRTVTERTELLGRLEAALLEQAKTWRMYSVVEALQALRGVQFTVAIITVAELGDLTRFERPPELMKYLGLTPSEYTSANRRRLGGITKAGNGHARRALVEAAKAYRHRAKVSEQIQARQQHLPRAICDIAWRAQVRLCGRYRKMLARGKHPNTIAAAVARELIGFMWAIAKEQPVAA

SEQ ID NO: 123060 - protein, 394 aa, unidentified
MTTVRTNDCSTSAAVLYMAFELAESKWKLGFTTGLGQQPREREIEARACVCVEEEIQAAKERFGLPAETTVVACYEAGRDGFWLHRYLLSLGVKNSIVESSSIQVDRRKRRAKTDRLDLKQLLKMLVRWHQGEKDVWRVVNVPTSAEEEGRQLHRELETLRAEQTAHSNRIKGLLAACGVTLPTVDRHFPKRLKGVRLWDGSAVPADLHRRLLREFERMQGVNRQIRELEKERAQRARQDDADVGVVQTRELLGLKGIGINSAWQYTREIFAWRKIRNRRELGALVGLTGSPYRSGQVDHEQGISKAGNRRVRAMAIEIAWSWLHFQPQSALSGWYEQRFAHGGKRLRRIGIVALARKLLVALWKYLETRVPPEGAALSDWKTKIYDNTPSLQG

SEQ ID NO: 123061 - protein, 341 aa, unidentified
MAIMTIGIDLAKNVFAVHGVDENGKVLLVKPKVARKDLAELIARQPPCLIGMEACTGAHHWARQFRRYGHAVRLIAPKFVTPYRMSGRRGKNDAADAAAICEAVGRPNMRFVPVKEEHQQVILALHRTRQGFVEERTAAYNRLRGLISEFGVVAPQKVACLRRELMEQLETLPGELNRCVGDLLAHADALEARIAEYDRAIADAAKEDARSRRLMKLPGIGPNTASALLASLGAGHDFRNGRQVAAWIGLTPGQYSSGGKTRLGRITKAGDRYLRSLLVMGARAVLSALGDKQDRFSRWARSLVERRGYWKAVVAIAAKNARLAWAVLNYGEDFRLNREAA

SEQ ID NO: 123062 - protein, 420 aa, unidentified
MDVAIGAVGEAGRKHDRRMHVIETGDIDVYLGLDVGKGEHHATAVTPAGKKAFDKRLPNTEPKLRELFAKLQAKHGTVLVVVDQPASIGALPLAVARDMGCPVAYLPGLTMRRIADLYPGEAKTDARDAFIIADAARAMPHTLRSVDLEDETIAELEMIVGFDDDLTGEATRVANRLHGLLTQIHPSLERVLGPRLQHPAVLALLERFGSPAQIRRAGRRRLVTLLRPKAPRMAERLVEDIFTALDEQTVVVPGTEAAALIVPSLAASLAAVLDQRKLLAGRIEELLEAHPLSQVLISMPGIGIRTGARILIEVGDGSSFPSAAHLAAYAGLAPATRNSGSSIRGEQPSRRGNKQLKRAFFLSAFAALGDPASRAYYDKKIGQGKHHTQALLCLARRRADVLFAMLRDGTFYQPQPARSA

SEQ ID NO: 123063 - protein, 368 aa, unidentified
MSPMSQPVAPFATFVGVDLHKQSVTLRAVNAAAEPIAALTCDTKCVQRIEQWLAALPGPVHLAVEAVGFVEWFIDRFRPCVRRMDLADATELANRRGKRRKTDRNDADDIAVRLARGDCPLGWIADEPVMQLRKLGRHWRSLSRTLTRAKHGMRSMLLAANLRGPKLDGAAAQRWLLASGHLLKDAQRQAFGDFVDVVQLLERQREALRRRIIFANRGEHFSALTALLKSVPGVDEVWACVIAAEVGDFARFPNADALEFWAGMTPDNQSSAGRTQSGHITKAGSPCLRWALCQAAVTLCRSDARQEKVRQRLARRVGKARANVAMGRRLLRVLFAMARDGTVYQGQEPTGHERAANRARLKKRYKAA

SEQ ID NO: 123064 - protein, 438 aa, unidentified
MHFSGEVEEREEQLNKQKVVAWVGIDWADEGHEVWEYTVQTDSATCYAIKHSAESLQEWVNQLRIRHGGKPVAVVLEQARGGLIYALMNTGFMEIYPVNPESLAKFRKALYPSGAKSDPTDAELLGQMIRQNPGRFRAWVPGDEQTRSLQLLVEGRRKLVEDMTSLTNQFTSVLKSYYPQALEWAGHLDSEQACAFLEKWPTLMQLQKSRPFRIREFYQKYGRPNREALNERVEQIQKAQPLTLDGAVLKASVMMVQALVAQIRPLRLAIENYDQEIERVFGQHPDRAVFESFPGAGKVLAPRLLAAFGADRDRFQTALEVQEFSGIAPVTERSGKAIWVHRRLACPKFMLQTFHEFANCAWRFCAWSKLYYQQQRSWGKDHHAAIRALAYKWIRIMFRCWKDHTPYDDSLYVKSLTKRGSYLAEGLNRPSPGSVVEI

SEQ ID NO: 123065 - protein, 355 aa, unidentified
MMMTDAEKAATEVILGVDTHLDVHVAVALDRLGRRLGELSVPTTAKGYESLVRWAEGLGTVRCAGVEGTSSYGAAITRYLRTAAIRVAEVERPKRRHLHRNSKSDSRDAESAARAVLAGETAGEPKSADGRVEMIRVLRTARRSAVKSRTQAANQLRNLVVTAPDGLRHRLRELSTKELVAVVARFRLKDAPNNVWEATRFALRSVARRYEVLSEEIAQLDAHLDRLVLGTAPELVSLPGIGTDHAATLLIVAGDNPKRLRSEASFASLCGVSPVQASSGMVVRHRLNRGGNRDANRALYMICLARMRRDRRTKEYIARRTAEGKSRREIIRCLKRYVAREVYRVLVSPPHRSGH

SEQ ID NO: 123066 - protein, 314 aa, unidentified
MAEGERFVGIDVAGAHLDVAVAPGGEGWRVGNDPAGHADLVGRLRELGPALVVLEASGGYAAAAAAELGLAGLAVAVVNPRQVRDFARAVGQLAKTDALDAALLARFAGAVRPEPRPLPDAAARELKALLARRRDLIGMQTAEQQRLRQAHGAVRADVAAHLAWLKGRLAELDRRLGAAVAASPLWGATLALLCSAPGVGPVVATTLVAELPELGRLSRQQVAALVGVAPLNRDSGQQRGRRGTWGGRASVRAALYMAAVAGVRWNPVIREFHARKRAEGKAPKVALVACMRKLLTILTAMLRAGEPWTDRAGA

SEQ ID NO: 123067 - protein, 350 aa, unidentified
MIIIGCDYHPGFQQVAFVDTETGELQERRLQHREEAEKLYRELAAQGKKVRVGMEASGHARWFERLLSELKCELWIGDAAEIRTKRVRKQKTDRQDAQLILKLMLEDRFPQIWVPSWENRDLRQLLWHRHRMVQARTRIMNQLQAVALNEGLRYKKRLWREAGREQLEAFRLAPWASQRRRDLLELLDRLNPTIAKLTQAIEQEVENCPEAQRLRTHPGVGALTALTLVLIIGRADRFQCGKQIACYLGLVPEEESSGERRRLGPITKQGNSLLRFLLVEAAQVTVRSDQEWRNKYYHLMMRRGRKIAKVAMARRLAVRMYWMMRKGWDYEQLKKFGSHAGQPGPGDGVK

SEQ ID NO: 123068 - protein, 411 aa, unidentified
MRLLVGDDWAQDHHDIEVMDEAGRVLARARVPEGVAGIGQLHQLISRFLPEQGTDAEVQVGIETDRGPWVAALIAAGYTVFPVNPLQASRYRSRHGVSGAKSDGGDAHMLADTVRTDAHQLRPAAQDSSQAEAVKVLARTHKTLIWERTAVTQRLRAQLLEYFPAAVTAFEDLDAPDALELLGKAPDPARAAKLTRAQVSAVLKHAGRYKIAARTGAILAALRSPQLGQPPALTAAYAATVRSLIAVIATLNDQVAVLQGQVEAHFGQHPDAEIYLSQPGLGAITGARVLGEFGDDPHRYACAKARRNYAATSPITRASGKKKIVAARFVHNGRLIDALMIQAFAALRASPGARRFYDDLRARGIEHNDALRRLANRLVGILHGCLKTRTCYDEATAWGHRENTGQSPVAA

SEQ ID NO: 123069 - protein, 338 aa, unidentified
MQPTIIGLDIAKSVFQVHGVDAAGNVAVVRKLRRSQVEPFFAKLPPCRVALEACASAHHWARTIGALGHDARLISPQHAKAYARRNKTDAADAAAICEAASRPHMRFVPVKTPERQAVLSMHKARALLVNQRVRLANALRAHMAEYGLVAPTGRKGFAKLRERLERTPADMPAPLVRALMAQLQPLDALEIAIAAIEAEILAWHRHTPDSRRLAEIPGVGPLIASGLAASLTEPGVFRSARDFAASLGLTPRIDATAGKARLGPISKRGDPYLRRLLIGGAHAVLHTSRAKADPWIARLLAEKPRAKVAAALANKIARTAWVILARGETYRPGSLIAA

SEQ ID NO: 123070 - protein, 345 aa, unidentified
MSIVGGLDLHRKQLTFDYVDRATGELQRGQIAPADRRHLAVWLRRFHGVSDVEFAVEGCTGWRYVVEELQKAGVKAHLAEPADTAAARGRKKRAKTDRADSKLIRELLDGGRIPECWIPPVEVLEWRALLGLYHDLRREHTGWIQRIHAVLFHQGVEALGNGGISTEEGRARLRQVAAEQLSAAGQLQVATAVAMLEALEVHLDDLRQQLGHTARHLRGPKTLVEAIYGVGPITGLALCCWLGGGNRFGSSRKAVRFAGLDVTVYSSDGKRSPGHLSRQGPPVLRWCLYEAGKTSARTSAPAHAYYAQVKERVDGKRAALSQARRIVRHACHILTALGDDAFATV

SEQ ID NO: 123071 - protein, 303 aa, unidentified
MRAIAVLGVDLGKNSCSVAGLDAAGRVVLRRRLHRDGVMRLAAASPGCVVAMEACCGAHHLGRRLRDAGHEVRLMSPEYVQPYVKAQKNDERDAEAIAEVATRPTMRFVELKSEAQLDMQSLHRARDRLVSERTALINQLRAILLERGIIVPQGRRKLEIYLEALLAEERVPLSPRIRLLVKDQRAEWRELDRRIEAFDEEFAAAARSDEAARLLTSIPGIGPLNATALVAAIGRAATFGRGRDLAAWLGLVPRQMTTGGKRKLLRISKRGNVYLRKMLIHGARAALPTLLKGDTLLAGGYEA

SEQ ID NO: 123072 - protein, 424 aa, unidentified
MKVTYQTCCGVDVHKSFLVATIVKTTGGIEPSYQKKRFSTFNNSILEFKQWLLDNDCHDVCMESTGKYWVPVFNLLEDEINVVIANPKWVKAVKGNKDDTKDSKWIGDLFRLGLVKGSYIPCKIVRILREYTRYRCKLVSCRSSEKNRYQNALTVCNVALDSVVSDIFGKSSTSIIDYLLEQSGTSINHEEIASKLLRSLKSKEDAVIESVEGYQMTDAQKYRMRLVRAHMDYITAEIKDVDKMIENMISSNPDFENAVQFLCTIPGVKCDSAITIISEIGTDMSQFSSSKRLCCWAGLTPGSNESAGKKKSVRITRAGVYLKPALVQCAHAAVKSDQSPYYKKKYESLVKRRGKKRAIIAIARMILTAIYQMLSTGEQWNPSDLYKIDMPAALVEKQKAKAIKQAKKLLQREGLLPPDEPLAS

SEQ ID NO: 123073 - protein, 312 aa, unidentified
MADMVRLAGIDVSKQTLDVYVMPSGEHWTVSYDRRGLSRLRRQLLDLGVAVAAVEASGGYEREVSEALEDAGLVIHRLNPLRVRRFAQLRGRLAKTDRLDARTIAEFARAYPQDRQLRRDPRRDRLAEHLLVRRHVQDGIVDCINQLEHLRDSRLRRLVGARKAALERTLATVDRRLAELIAEHDDLVALSEQLRTVPGVGPVLATTLIALLPELGALTRRQVASLVGVAPFDRSSGQQVGAKSIHAGRVVVRNALYMAAMVASQRNPAIKAFAQRLAAKPGKVRLVACMRKLLVTLNAMVRDGAQWQPRTA

SEQ ID NO: 123074 - protein, 475 aa, unidentified
MNIKGTKKKNQVVTVNIFEQQELLKKAEVIREKLTASTWRELETNGKFGKNEKLSFVRDDMLILGCDVGSDTHYVRAIDTRGREFSKSAFPFSNTLEGFQSLMDWATKIAASNDKKQIILGLEPTGHYWFCLATWLIGNGISVVQVNPYAVKQTKEVEDNSQLKDDRKDPKLIANLVKDGNFGMPYLPEKLYADIRRLSMLRDQINEDRIRDLNRLHREMKIYFPEYKDAFGKIDGAFCLEVLKVAPFPDELVMLGVEGIRQIWHEAKLRGRGYVNATSIFENAKKSIGIQDGAESGKLAVKWFVHRMLESNEQLADIESRLHQMCMEIPYAENILEISGIGENTLSGILAEMGDISRFDDVKEIQKLSGLGLVACSSGKHKGETKISHRGRKRLRYWLFQAAKSAVAHADEFKELHVYYTTRKDNPLKKKQSLIVIACKILRVIFAILTKGTTYDPKKMLEDIVRPNEKSVQTA

SEQ ID NO: 123075 - protein, 369 aa, unidentified
MADRITYVGLDVHKDSIVVAVAAGGLRGEVREYGRIANTSTALDRLLRKLGGDGMRLRFCYEAGPCGYGIQRRLSTLGHECVVVAPSLIPKRAGDRVKTDRRDAASLAKLHRAGELTAVWVPDVGHEAMRDLVRARLDAVHGLRRARQQLSGFLLRQGCHYGRPAWTKLHRRWLAGLNFGQAVHHIVLEDYIAAVEVAEARRDRLTAQIEAMLPDWALAPVVAALQTMRGMALVNAATLTAELGDLSRFANPRQLMAYLGLVPSEHSSGASVKRGGITKAGNAAARRLLIEAAWSYRFPARLSRELLLRQESQPKLIRDIAWKGQLRLCARYRRLARTGKPANIVTTAIARELSGFVWAIARQVTVTTR

SEQ ID NO: 123076 - protein, 339 aa, unidentified
MSKRSILVQETIYCGIDVSAKTLTMAIQRVDQPVEQRNFPNASVGHKALIIWLRKAKSPVRVLLEATGIYSLDLAFALDAAEGIEVSVLNPKVANRFAQTIRRSKTDAADAEVLAEYARRMPFTAWVAPSLGSMRLRSIVRHVESLSVQSAQNQNRLHAAQGSTSTPGCILQDLKRSVASLELRIHKLRREAMTLVRQDDLLCKRFELLVSIPGIAHVSAMQLLAELSTLPSDLTVREWVAHSGLDPAYEISGSSVRKASRISRAGNRHLRRALYRPALVASRCDPHAKAFFENLLARKKARLQALIALARKLLHAIYGIFRSGLKYEGTKLFPGITLS

SEQ ID NO: 123077 - protein, 429 aa, unidentified
MQNESTPGARGPVFCGVDTHADSHWLCVLDWRGRKVLSRQFPADAAGYEALAGAIAAAGEPACVAMEGTSSYGAGLTRHLASLGMPVREALSPARMQRRRPGQGKCDESDAERAARAAMSGSKLGTPKSQDGWVDGVRCMLAARSGAVKARTSAINTARSLLTTAPEGLRSRFRGMAGPRLMEELPSVRAEGALGAALGALADLWAAARDAALDMERAIEASLEENCPALLAMYGCGPVSAAKLAVAAGDNPGRLRSEASFAAICGARPIPASSGKTVRHRLNRGGDRQANSALHEIARQRVMRDPETAEYAERARARGKSDREVMRCLKRYVAREAYRALMRPHEVRRPEDASGLVAARRAARVSQVRAASILGTSEKYISMLERGQRELKPIRRAYEAWVEAGLPLDWDRQAFEAERKMDSKKHLAK

SEQ ID NO: 123078 - protein, 388 aa, unidentified
MRQTDDLSKCLAPFVQGNTLIAVIELSLSSWLVAGVVPGVARQPLKKLEPDEAELLRLLQRWRDEAVKIGCTIERVVVAYEAGRDGFWLARWLRAHEIEAHVIHSSSVAVSREHRRAKTDRLDTVMLLRVFMGWLRGERGHCGMVAVPTIEQEDAKRPSRERENLAGEKTRIINRMKAALIRLGIRGFKPELRGAPQKLDGLRTPEGLPIPPNTLDEILRDLARLAMVREQIDLIEQARLARIQEAPETAPNAMVRLVASIVGVGVETADMLVQEVLSRDLRDRRAVARYAGLTGSPDESGSKRREKGLAKAGNARVRRGLIQLAWRFLMFQKDSALAKWYRARTDGGKGVRKTVMIVALARKLLIALWRMVTTGEVLEGVRLRPVVA

SEQ ID NO: 123079 - protein, 321 aa, unidentified
MAYFRDVVGIDVSKENLDLYVLSGQQRRTVANTAAGYGDLVSWLKSLGVRMAVMEASGGYERDVAKALRQAGFDVRIVDPKRVRHFAKAAGRLAKNDRIDAEMIAEFGAVFAAAQRCEIPLDAKREHLAGLVAARQALVDHQTSLQNQISACPKGPARQALAAALKPIPASIKQLDRLIAEAIAAHPQFAALAARLDTVPGVGPVTIAALIAWLPELGRLDRRALAALVGVAPFDDDSGKRTGQRYIKGGRGKLRNIVYMAVMGAATQHNPVLKAYYDSLLKRGKLKKVALIACLRKLLTILNTMVAKQQDWNPASMAIAA

SEQ ID NO: 123080 - protein, 408 aa, unidentified
MNLVYARCAGLDVHKKTRVPGPEPGERRGEVQTFPTTMAGLTALADWLTAHEVTHVAMESTGVYWRPVYAVLEGLMTVLLVNARHVKMVPGRKTDVRDCEWLAQLLECGLLRSSFVPPRPIRDLRDLTRLRKTLIRERGHHVNRIAKTLELANIKLGSVVTDLMGNTGRAILEALSLGIDDPDKLAACAQGLLRKKQAALREALVGRLTPHYAFLLQQHLSLIDALDAHIATLDARIAEAMAPFADAAALAQTMPGVAARAAQAILAETGMDMATFPTADNFASWARLCPGNNESAGKRRPTTTGKGATWLRATLQEAAWAAVKSKKSYYRALFHRLKARRGGPEKAIVAVQHAMLVALWHMLKHRVPHQDLGADYFTRRDTERTRRHHVRRLEKLGYQVLLVKEAAA

SEQ ID NO: 123081 - protein, 343 aa, unidentified
MQTVTTIGLDIAKSVFQVHGVDAGGQVIVRQQLKRRYVLTFFRKLSPCLVGIEACGSAHHWSRELQALGHTVRLMPPAYVKPYVKRQKNDATDAEAICEAVTRANMRFVPTKTPEQQSGLVLHRTRHLFIRQQTSVINAIRAHLAEYGIVAPVGRQGVVELLTVVADPNDRRVPEIARACLAALGAQLRRMKEQILEFDRLIRAWHRSNEMSMRLEEAPGVGPVLATALVAAVADPKSFRSGRNFSAWIGMVPKQHSSGGKNRLGNISKQGDRYLRGLFVAGALSVIRYAKIHGAKHRPWLTALLARRPTKVAAIALANKIARMVWVMMARGERYNEPVALAR

SEQ ID NO: 123082 - protein, 330 aa, unidentified
MNLGIDTHTRYAQVAVVDDDGNLQDELRVPNDQLEQLAEQYAGSDAVIEATGNYRPIYEVLDEHLNVTLANPSKNRLIADATVKTDRLDAKRLAHMLRSGMLAESYVPADEIRELRDLVRTRKGLVDERTAEKNRIRAVLKRTDNAYDSELFGPNGREFLAELSLSTADRTIIEAHLSVIDEYDAQVASLEDEIERHVLESPAAQRLLTIPGVGQFTAAVVVAEVGEIDRFDSDNALVSYAGLDPVVQQSGEKEIHGSISKEGSAQLRWALVQAAHTAVRCDDYFGNFYTRLKRRKNHQVAIVATARKMLVSIYYMLTRKEVYDPPEVSA

SEQ ID NO: 123083 - protein, 323 aa, unidentified
MNKDIKYFGIDISHLVFDVTDSEGNYNQFKNNPSGFKKFAKLLDQESHCVMEATGYYHYQLAYFLLESGIKVSVENPLAVKRFIQMKLTKNKTDKSDSKLICDYAEQVALKLWQGNSKHQIECLQMTRLLAVYTKQSTMLKNKLHGESVLGNPSKAVVSSLKRSLKHVKKELEAIETKLLLLVKQVHQDVLTRIKSIPGIGDKTAIMLVVLTDGFDRFTSGSELCSYAGLTPIIRQSGSSLKGRPRISKIGNQKLRNLLFMCSFNACKYNKACREIYERIVAKGKSKKLALIAVCNKLLKQAFAIAKSGLIYDDTYRSTLVKN

SEQ ID NO: 123084 - protein, 348 aa, unidentified
MAYFVGLDVSVKETSVCVVDDTGKVILEQKVLTEPDAIIALLTSLGVTYGRIGIEAGPLSQWLVNALTAAELPVICVETRHMKALLTAQQINKTDRNDARGIAQMMRVGLFKPVHVKTLVAQEQRMLLTSRKLLQRKLLDVESDLRGTLRNFGLKVGVVSSGRYEARVRELVAGFPRLAAIVEPVLSVRRVMRQQFAVLHKMLLDTVRGDPVCRRLMTAPGVGAVVALTYRATVDQPQRFHHSRAVGAHVGLTPKRYQSGETDYEGGVSKCGDALLRTMLYEAAHVLLTRGAKWSWLKAWGVRVAQRRGMRRAIVAVARRLAVVLHRMWVDGSEFRWSKDSTAVPAVA

SEQ ID NO: 123085 - protein, 424 aa, unidentified
MKVTYQTCCGVDVHKSFLVATIVKTTGGIEPSYQKKRFSTFNNSILEFKQWLLDNDCHDVCMESTGKYWVPVFNLLEDEINVVIANPKWVKAVKGNKDDTKDSKWIGDLFRLGLVKGSYIPCKKVRILREYTRYRYKLVSCRSSEKNRYQNALTVCNVALDSVVSDIFGKSSTSIIDYLLEQSGSSINHEEIASKLLRSLKSKEDAVIESVEGYQMTDAQKYRMRLVRAHMDYITAEINDVDKMIENMISSNTDFENAVQFLCTIPGVKRDSAITIISEIGTDMSQFSSSKRLCCWAGLTPGSNESAGKKKSVRITRAGVYLKPALVQCAHAAVKSDKSPYYKKKYESLVKRRGKKRAIIAIARMILTAIYQMLSTGEQWNPSDLYKIDMPVALVEKQKAKAIKQAKKLLQREGLLPPDEPLAS

SEQ ID NO: 123086 - protein, 350 aa, unidentified
MKIIGCDFHTRYQQIAMLDEATGELIERRLDHESGEARAFYRDLQGPVRVGIEATGPIRWFERLLAELGHELWIGDSAKIRASEVRKQKTDERDALLILDLLLAKRFPKIWVPTPAERDLRQLLWHRHKLVCMRTMLGNQLHALAMSEGLCRKKKLFTKKGRAELLQLGLEPWANRRREELLELLGQLEPAIVELDRAVMEEAQRREDAVLLMTHPGIGPVTSLAFVLAIGPISRFARSKKIASYLGLNPSEESSGGRRRLGAISKQGNTMVRWLLIEAVYPAVRKDPALRQDYQRLKFRRGHAVAKVAIARKLAVRMYWMLRSGAEYAQLVRRQGSPGATLVDASSSLG

SEQ ID NO: 123087 - protein, 340 aa, unidentified
MNQSMTTGIDLAKHVFFVAALDGSGKPPRRKKLRRHEVLSFLANHPGAVVGMEACSGAHHWAREIRALGHSVQLLPAQHVKAYLRGQKNDYNDALAIAEAVQHGRIRCVEIKTVDQQLDQSLHRLRQALVTEQAGLINRTRALLAEHGVDLPEGKHRFRQAVIAQLEDAQNGLPWRLRELLGRQYQLFIALEQELAWYEREIKTKAAENEACQRLMSVPGYGPIVSSAFYGWLGSGQQFRCGRDVAAALGLVPKQYSTGGKTVLGGISKRGDRHLRALLVHGARAVARYAKERDDRPSRWVCSLIERRGYNKAVVALANKLARIGWAVVVRGQPYQAIAA

SEQ ID NO: 123088 - protein, 389 aa, unidentified
MSQPFDASRSLTALEQDSTIIAAIEMAQSKWLVAAVVPGIKRQPLKQLDADEESLLKLLHRWRKEADQAGHPIRRVVVAFEAGRDGFWLARWLRTRGVEAYVIHPNSIAVSREHRRAKTDRLDTELLLRALLGWLRGEKRHCSMVAIPTIEEEDAKRPNRERDSLVTEQTRIGNQIKAILTRFGIRRFRLKLRKAERQLKELHTAEGSLLPENTCAELFRHLARLHMVREQIRAIEKARLQKLEANRDRKKSPYAMVHLIVRVVGIGVETADMLVTEVFSRQFRDRKAVARYAGLTGSPDESGKRRREKGLARAGNARVRTGMIRLAWRVLRFQEGSALAQWFQTRTADGRGNTRKTMIVALARKLLIALWRLVTTGEMSDGIVLRPAS

SEQ ID NO: 123089 - protein, 429 aa, unidentified
MTQDGVTLWLGIDWADQKHRWALRIDGEARIQQGELEHTPEAVEQFVSGLALRFPGQRVAVALEQSRGALLFLLSKYAHLVLYPLHPNMVNHYRKSVYPSGAKSDPSDAALILDLLCKHPERLRPFQPDTVETRTLQLLVEARREAVDDKTRYLNRLTAQLKMFFPQVLDWFSTVDTVVVGQLLLKWPTLDKLQRASATKVAAFLREHRIPESRITALQQLIQQSVVAIRDTAVLESSVFIVRRLVRQIEVLRASIVEHDERIAELAEAHPDYGIFSSLPGAGPAMIPRLIAAFGTQRERYATASAIQCYAGIAPVTETSGKQKWVHWRWACPKFLRQTFHEWAWLSTRKSAWAKSFYHQQRERNKSHHAAVRALSFKWLRIVFRCWKDHVPYEEARYILALQKRTAPKGVERRLKTSAGFTKLEGISC

SEQ ID NO: 123090 - protein, 347 aa, unidentified
MLHAGLDLSRKKLDICLLSDEGEHLDQLAVAPDVDSLRRLARRIDEVHVEPVSAVVESMTGARIVHDTLEAEGWSVEIADAQKVKGLAPLACKTDRIDSLVLATLSRRDLVPSIWLPDPEIREERELARFRLHLVKHKTALKNRVHSTLMSFGRACPVTDLFGVEGRRLLERLEVPEPWRSNVTASVWLIDELERQIEEINLRLREGHADHPYVPLLLSVPGIGWVLAFTIAAEIGEIERFSSPERFVGYTGLCPTVKQSGDSDRRGPLSKHGPRYLRWALIEATSHALRHPAYAERYQRNKKRLGKQRGARVAQIDIARRLAHAIWHMLTRNQKFAPRGATFRLAA

SEQ ID NO: 123091 - protein, 411 aa, unidentified
MRLFVGDDWAEDHHDVEVMDGAGKVLARRRLPEGVAGMAQLHALIGGFLGEDADGSEVIVGIETDRGPWVTALLAAGYRVYPVNPLLASRYRDRHGVSGAKSDAGDAHMLADLVRTDSHQLREAAGDSPEAEGTKVLARTHKTMIWERTREVQRLRHQLREYFPAALEAFDDLDAPDTLELLGKAPDPARAAKLTRAQVSAALKRARRRNIPDKATAILAALRGEQLSQPQALTDAYAATVRSLIAVITALNEQVKALQGQVEEHFGRHPDAEIILSQPGLGPILGARVLAEFGDDPHRYRDGKARRNYAATSPVTRASGKKKVVAARFVHNDRLVDALNAQAFASLNASPGARAYYDELRARGIEHNDALRRLANRLVGILHGCLKTRTLYDEATAWGHRENLPQSSAAA

SEQ ID NO: 123092 - protein, 416 aa, unidentified
MNAVGIDVSSRKSTVAVLRPLGEVVCLPFDVTHDIAGLASLAEKLKALDGETRVVMEHTGRYYEAVAKALHEAGLFVCAVNPLLIKEYGANSLRRVKTDKADAVKIARYALDNWADLRDFTPMDAIRYDLKTLNRQFQLASKQRTASANNLIALLEQSFPGIRKCFDSPVRSDGTQKWVDFAHSFWHVDCVRKQPFPAFCERYRKWCKRHAYLFKLSNAEEVYALAKRAVVLTPKSKVVKVLVQEAANQLISISRSVEVYRAEMDRLAAMLPEYPVVMAMYGVGKSYGPQLMAEIGDVRRFERKQALVAFAGIAPMPNQSGDKNVRSNKSSKRGSPYLRKTLFNVIRTYLQCAPQDEPVFQFLNRKRAEGKPFYVYMLAAANKFLRRYYAKLRDYFASLNPLQPVDPISATLKASL

SEQ ID NO: 123093 - protein, 358 aa, unidentified
MSTYYIGADVHSNSTELAIEKRGQIVASYSVPTSIPAIVNVLDSIQGKKHFAVEEGPMSGWLYRNLAGKVDQFISCDPRRNKLIASDGDKDDKIDAAKLASLLRGGFLRAVYHSDDESRAELKHWVSLYHDRVRDAVRGINKIRARCRMHGVKISRSALRDPAKRMNWLLKTNHTVLANQLKMLWIGYDATVQQVKFAKRQLSTLSKKHNIIHQWSLLPGIGLIRATTVFAYLDTPYRFKKKNKLWKYCGVGLQRTTSGTDKKGKPKPSRLQLPWSVNRTLKNAVLGAALSAINQKDNVFRDYYQRMVKDGIITSNARHAVARKMLTVLWAMWKTNSRFDEKIVHNELNSQTASALSR

SEQ ID NO: 123094 - protein, 427 aa, unidentified
MNCTQNHKIDQVTDETLVVGMDIAKRKHYACFVDARGRVLQKSFPVIQSKQGFEQLDQRIRQAMNEFGKTKVIVAIEPTGHYWLNLAYFLEEKGIPLVMVNPAHVRRSKELDDNLPTKHDAKDALVIARLAKDGRFSFPRLLRDIEANLRVGSTLREKFMKEHTAVRNAMIRWTDRYFPEFSAVFSSFGKMALAVLELTPFPEEITGRTVEELVEIYRQSEGLKAPQKPKIRKLLEVASHSIGVTEGQQMARLEIAALVHRYRQLEEEIAALDAELTALAQTTVEYQWLKTVDGLGDATIVDLLAEIGSFAHYRDPRQLIKLAGLTLKENSPGQHKGQKRISKRGRKQLRSVLFRTVIPLIRHNEAFRELHKYYTTRAANPLSKKPSIVVLCGKLLKVLLTICTKKQAFDGERMRQDVFAHVQVRAA

SEQ ID NO: 123095 - protein, 347 aa, unidentified
MHYVGMDCHITTLDFAVVDDAGRLVKSCKVDTSAKNFMEFVKSVAPPRIVYMEESALAAWALETCIRFGEKLVITDPKQNHWIGSSTQKDDPLDALKLAQLGRGDFIKEIRHPVGDRRRFRELMDSYHDTVKSTTRIKNKIKSQFRQNGIQCTGMTVYSETYREEWRQKLPQDQTLLLIVEGLWNQLRESEQTEKNLLKAARNFAKHYPEIKLFEDIPGIGFISAATISAILETPHRFANKRKVWMYAGLGITTRSSGGKTYSEKLSKDYNRLLKYTLKQVAETAVQAKDNPFRQKYMAMTTLRGIAPHRAKLTISRDLLATMWAMWKKGEEYNPEIRTNPGYKQVS

SEQ ID NO: 123096 - protein, 434 aa, unidentified
MALARPAASSLRAAPPSRVRALRAPAHAALDCDRRSGSKSNYESLDATASLINHWLKHEIPDNSAGGDPEQVVIAIEVPRGAVVETLVERGFHVFAINPKQLDRFRDRYTVAGAKDDRRDAFVLGDSLRTDQHCFRRVRLDDPLVIQLRELSRVDEDLMREGNQLTNRLRELLHRFYAQTLPLCPAADEPWLWALLELAPSPSVGRCLRPQRVQRLLREHRIRRLRAEEVVAALRAPALSVAPGVVEAATEHIALLLPRLRLVHTQRQRCGARIEALLDDLQAAQDEDEEQGEHRDVEILRSLPGVGRVVAATVLAEASGALAERDYHGLRALAGIAPITKQSGKHRTVLMRHACNGRLRNALYHWARVAAMCDPPSKTYYAALRQRGHSHGRALRSIADRLLRILIAMLNSGTLFDSSKACPPQLRVLSEKVA

SEQ ID NO: 123097 - protein, 326 aa, unidentified
MDDTGRIVREVKVASEPEALLQALTNPGYHFKRIGLEAGPLSQWLYSALAEAGLPVICVETRHMRAVLKAQINKTDRNDARGIAQMMRVGLYRPVHVKTLRSQKLRMLLTHRKLLQSKAIAVENDLRGTLRNFGLKVGVVGKVKFEARIKELVENLPDLAELVEPLLVVRRVLREQFVIQHRRLLAIVRDDEVCRRLMTTPGVGPVVALTYRATVDVPARFRKSKSVGAVFGLTCAKYQSGEVEWSGRISRCGDEMMRVMLYEAAQSMLLHSKKWSWLKAWAMQIARRRGMKKAIVALARRLAVIMHRIWVDGTEFRWTREQAAAA

SEQ ID NO: 123098 - protein, 388 aa, unidentified
MFEASTSLNCPVTFDHDSTLVVAIELSAKNWVLAAHVPGQPLNKAKQTIEASADALMSAINGYRVRAAANGRAAERVITVYEAGWSGFWLARWLIGRGIEANVVQPSSVLVDRRMRRAKSDGIDADLLLRTLLAWLRGEPRVCSMVPVPEEADEDARRSVRERAELIAERISLTNSIGAILATLGTGEYNPLRRDRWQRLEELRTALDTPLPPHARSKIIRLIGRLELVLEQIAQIDQERDAILQEVTPDAAGRMIQQLTQLRGIGVQSATILVREAFVRRFANGKALVSYAGLSPTPYNSGATEREQGIGKAGNRRLRTVMIELAWVWQRYQPDASQVRWFRERAGPTGRRMRKVMVVALARKLLVALWRFVTDGVVPEGAVMKPQS

SEQ ID NO: 123099 - protein, 344 aa, unidentified
MEHYAGIDVSLEQSSVCVVDATGWVVREAKVASEPEALARWFAKLALPLARIGLEAGPLSQWLYAGLREAGLAVELLETRHVRDAFKAMPVKTDRKDARGIAQLMRLGWFRPVHCKSLPAQETRALLTARKLLQAKLHDFEMSLRGILRGFGLKVGATTARTFEARIRELVAGHPTLGSIADALLAARRVLARELQGLETRVRRLARDDKRARLLMSAPGVGSIVALTYVAAIDDPGRFRSSKAAGAHFGLTPKKYQSGETNVTGRISKIGDAGVRATLYEAAHVILTRPVKGSALKSWAMRVAMRTGMRKAKVALARKLAVVLHRMLADNQPFDFGKAAAAAD

SEQ ID NO: 123100 - protein, 480 aa, unidentified
MYLRATNISTQTQDVYGFGFESAGALGFTNEYSGLAAESAQLYCFRRIQVRMPDIAGFVFWRRHMKTRIDNLYTAYIGIDWANSKHDICLHSIDGKPREFYKISHQVEKIEEWAKSLRKRFGGKIAVALELSKGPIVYALQKYDFLVLFPVNPTTLAKYREAFNPSGAKDDPTDAELILDLVLRYPNRFHPLKPQSVELRKLALLVEQRRKLVNDKIRVTNRLRDTLKQYYPQTLEWFDHIDTLLFCDFISRWPSLKQVKRARSATVEKFFHEHNMRFNHVLQARLTSIKKAKPLTLDEAVIDSHQLHAQHLADVLRITLNSIKHYDEVIAEVASRHPDYTLFSTLPGAGPSLAPRLLVAFGEQRERFNNATEFQKYSGVAPVTERSGKKCWVHWRWQCPTFLRQTFVEWAAQTINKSFWAGAYYRQQREKGCTYQAALRSLAFKWIRILYRCWETHTPYDESVYLKALQRRGSPLLKQL

SEQ ID NO: 123101 - protein, 337 aa, unidentified
MEHIAIDLGGRESQICVRASDGTVLAEERWPTGSLKKYLARRPKSRVVVESCAEAFSVAEAAEECGHEVNVVPATLVRALGVGARGLKTDVRDARNLSEVSCRMARLPAVHIPAKASRERKSLCSLRENLVEVRTKLANGVRGWLRSEGLGSPRVGQPERLWLRVQEHLKQRDRVMPGYVERNLKAINFLTEQIEEADRELGATAKADPTCRRLMTVPGVGPVTAVRFAGAVDQVERFPNSHALESYVGLVPGENSSSERKRITGLTKAGAQKLRWTLIQAAWSARRCRRNDPLVAWALQVEARIPQNALPNPMRSCGNVSSLEHGGLGAPQSPVIQ

SEQ ID NO: 123102 - protein, 375 aa, unidentified
MKEKVRFLGLDVHAETIAVAVAEPDGEVRSLGTIANREESIRKLVKKLGPPEHLRACYEAGPTGYVLYWQLTQLGVECAVVAPTLVPTKAGDRVKTDRRDALKLARSHRSDDLTAVWVPDGDSEALRDLVRAREAAKQDQLRARHRLSKFLLRMGRRPAAGMKAWTEPYMAWVRQVGFEQPAQQATLLDYLHEVDHMAARVKRLEQAITEAVKLASPRVQEVVKGLQALRGIAEISAVTIVAELGQISRFDTARQLMGYSGAVPSEDSSGKRKQRGSITKTGNAHLRRIAVEAAWSYRHRPAIGPRLRKRQEGVPEPIKEIAWKAQVRLSKRYARLAAAGKDQRKIITAVGRELLGFIWAIGVKVEADSKLRMAA

SEQ ID NO: 123103 - protein, 343 aa, unidentified
MEYYVGLDVSLKQTSICVVDQSGSVVREGIVDSDPEAISVYMRSKAPGAIRIGLETGPTSTWLWTELKRFGLPVICIDARHAKAVLKMQINKSDRNDAIGIARIMQTGWFKEVHVKDVDSYSVRALLASRALLVKIKRDLENHVRGLLKNLGLVIGRAKFNVFAVRAEELIEGRPELIAAIRPLLEARNAVEQQVSELDRKVMKLARHDAQVRQFMTVPGVGPITALAFKATIDDPARFARSRSVGAYVGLTCRRHASGEVDWSGRISKCGDAMLRSYLFEAAGVLLTRVPKWSAVKAWGAKLVKRNGLRKAKVAVARKLAVILHRMWIDGTEFNWSKEEIAA

SEQ ID NO: 123104 - protein, 306 aa, unidentified
MRIIGCDLHARQQSLAMLETATGEMVNLTLKHEGNEVREFYSQLPRPVLVGIEATGSMHWFLNLMDELGIECRVGHPATIRAAAPRRQKNDRLDADLILKLVAENRFPAIWLPTKELLDLRALVRHRHQWVRMRTRIQNALQAIALANGLRRGPSLWSYDGQAKIAFLPLLPHRRSALQAMYQKMDEEIEKLTQQVAEQAGQRSGARRLMTHPGVGPVTALATDVFLGDPKRFADSKALASYVGLIPREYSSGGRQRLGGVTKQGSPLLRFLWGEAGAHAVRRNPELKRFYRRKLVQKGLGRRAWQ

SEQ ID NO: 123105 - protein, 413 aa, unidentified
MQCLAVPGDDAMRFFVGIDWASQTHAVCVLDPRGHLHWQGTVPHTSEGLAALLGRLRRFRRRGPVRVALEHPSGLLVDTLVDAGFEVVPIHPNALKASRPRYSAAGGKSDPGDAFILADVLRTDGHRLRPLHPPSDDTRALRALVRGREDLVAQRVALANQLRALLERFWPGAAAIFADIASPIALAFLTRYPTPHRAARLGERRLAQFLGQHAYCGRRPVAELLARLHRAPASQVGQAEAEASGDIVRAIVAVLGPLVAHIQHLSAAIAAALPQHPDGRLVQSLPRSGAVNAAQILAELGDDRARFSTDDQLAAEAGLAPVTQASGKHHAVVFRWACNKRLRRALTTFADNSRHASRWAALVYQRARARGCRHPHAIRILARAWARVLWRCWQDRTPYDITRHRAAQAVAAA

SEQ ID NO: 123106 - protein, 499 aa, unidentified
MSQDTTSFERLRHLESHYANQVAAFRRRLALLGPDNVLVILLDIGKNVHWAAAYTAADRELVRPHRLPTTQSGLRQFLQMTNQLIADRQPAMVVLGHEPSGVYHEPWARIFLQHFEAHLQGQAQPPFDYRFFNPYQVKLARQTTYLRHRKTDPKDIAAMLDLALRGLGQPAFLPTGIDLLIRQEVGFIRAQSRLLGDLEELLRHLLDRLWPGAVVNLQQFRKAHPDLPRPIPIIQTRPFQRQTLRILLEHCPNPHDLCAMSDEEILALFRQHMGRAGPVLLHTLRSWANNAALLPQKAAAPLADQLQRLFRQYQHAETLIEEGRGRLVSLLPHTPARHLPAIPGLGEMDAAAYLAILGAAHRFRRATEVWAFVGYDPITDGTGDRPERIGHISKHGDPAGRDRLFQMGYRVAQNYPPVSLTFLNAFDRGKSEVEATIHAAHRVNRICFHLVQHDEPFEDRSTPQEWAEAERRWPLFRQAKRKRPNRRTRGRRRSRKRRR

SEQ ID NO: 123107 - protein, 387 aa, unidentified
MPQPNDLSRSLIALDQNSTIIAVVELSQSSWLVGGVVPGIERQPRKKLEPSPEQLLGLLHRWRDEAVRAGRPITRIALAFEAGRDGFWLARWLEARGVEAHVIHASSVAVSREHRRAKTDRLDTELLKRGFLGWLRGERGHCSMARVPTIAEEDAKRPNRERECLVGERTRIVNRIKSTLARLGIRHFKPTLRKAAERLASVYTPEGMPLPPNALAELPRDMTRLGFVVSQIKEIEDARQKRLEQQPETGPHAMVRLLAGIVGIGVETADMLVHEVLSRPMRDRRAVARYAGLTGAPDESGARRREQGLARAGNARVRRGMIQLAWRFLMFQKESALALWYRARTADSRIGTRKTMIVALARKLVIALWRFVTTGEPLEGVVLRPVA

SEQ ID NO: 123108 - protein, 392 aa, unidentified
MVIFMFFLGIDIGKNTHVASLLDEKAKIIFKAYSFANTLDAAEALLVKLEPYKDSLEIGMEATGHYWLSLYSFLAEHKFIVHVLNPIQTDGWRKGIEIRKRKTDVIDSVLIADLIRYGNFLETSLADEDILSLRNLSRFRVYLVNSVSDLKRKAIAVLDQIFPEYASVFSNVFGQTSKELLKSLSLPSDYENLSATKIEEVLSNITQKKKASKTISTLSDKASRSFGISFCKDSFAFQLKLIIEQICFIEEQIASVELEIDQLMSKLGTNIKTIPGVGSVIGAVILGEIGDIERFDNPSKLVAYAGLDASVSQSGEYEASSGKLSKRGSPYLRKALYMAAQRAEFCDPVFHAYYEKKRNEGKHHLVATNAVARKLCHTIYAILKKDIPYEVQ

SEQ ID NO: 123109 - protein, 323 aa, unidentified
METPQVSFKQVVSRGCGLDVHKKVVVATIDGEGLKKQTREFGTVTSSLKELRDWLLENGITHVVMESTGVFWKPVYNILEPAGITVWVVNAAHVKYVPGHKTDKKDSAWLCKLLLAGLLKPSFIPAKQQRELRDLTRYRTKLIQSNASNKNRIIRILEDANIKLSSVLSSTSGAVGTKLIDKICDGEEITMQDVDVVYHKKLAATKEEIFEACQGFVTDHHVYMLQIIRQEIANTNLTIGNMNQRIKEVLSPYGNALELLKKVPGISSKSVEDLVAEIGLDMGVFPTEKHLASWAGMSPGNNESAGKKKADAQPGETNRLKLC

SEQ ID NO: 123110 - protein, 318 aa, unidentified
MPRYSTAFGMDVHLRSTTVCALDAETGEAVTRRFRGNPWGEVAEWMSGFPGPSLAAYESGYLGFAPQRELSALGVDCVVAAVSKVPRSAADLSSKNDRNDAARMAKAILSHDVTPVWVPSPEIEGLRDLAAAHDAATARLAAAKQRLLAFLARRGYAYGGTTPAGNPRKYWTYGFLRWLDGIYPDDDGGIRALAALRNEVEAADETREALLAEYRAAVAAGPLSAEVEALQSIKGCGFALAAAFASEVGDFSRFRSGRQVTAYFGLAPKQRSSADSVRLGGISGAGNALVRKLAVEGSWRYAQAGHQPMLMFTKKWSE

SEQ ID NO: 123111 - protein, 386 aa, unidentified
MRPTLLCNAESVACAGSFDPRMAFGQSVAQPEPRTPCAPNSNRCQSLGYHRQLVYVRMSPNTITTMQTIPVTVYAGVDVAKATLQLHLQGRQAEFSNQAAGLVQLCQQLKTIPHIHVVCEATGGYERLLVQAMHQAQIPVSVTNPAQVRAAAQAQGQRAKTDRIDAALLTDYGQRYQPKPTSPTPASQDQLVALTQWLMQLVQAQALAKTQAEHHQAAFVCGRHTKLMAHYQSQIVAVEKQIRALLAQDAQLQQRVDCLDEIKGVGARTAWLVLAHMPELGQINRQQVAALAGLAPWTRQSGTMKGMRCIGGGRPEVRLALYMAALSAARCNSVLKPFYQRLRAKEKPAKVALTAVMRRLLVYMNHQLKALQATQTDTKLQNAKIP

SEQ ID NO: 123112 - protein, 421 aa, unidentified
MRTVYPICCGVDVHKRFFVATIITTEGIEPKYQKRRFSTFNNDILKFKAWLLENNCRDVCMESTGKYWIPVSNLLEDSINVTIANPKWVRIVKGDKDDDKDSRWIGNMFRIGLVPGSFIPCKDIRILREYTRYRFKLVSCKSSEKNRYQNVFTVCNVALDAVVSDMFGKSASSITDYIVGSDTFDPEHCVSLLHSKLKKKADEVLESIDGFQMTEAQKTRAKIVKEHYNYLLNHIQKIDAVIDELVKPYESEINLLCTSPGIKRHSAITVISEIGTDMSQFGSSKRLCRWAGLTPGNNESAGKKKSVRIMRAGVYLKPALVEIAHAAVQSNKTPYYRLKYERILKRRGKKRAIIAIARMILTAIFHMLSTGEVWNPSDLAQIDMPPELREKEVQKSLRRAAKLLVAHGLIPSDLIQFSETS

SEQ ID NO: 123113 - protein, 358 aa, unidentified
MQTQRKELNYEGQNIFVGLDVHLKSWNTSIYTDSLHHKTFSGPPKPEALLEYLNCNFPNGNYFSAYEAGFCGLWAHYKLEALGIHNIVINPADVPTTQKEQMHKSDPVDSKKIGRSLRANELKGIYIPQVETLEDRSLIRVRSTIVKDMTRIKQRIKSMLYFYGIEFPKEFENGNSHWSKRFIKWLKTIQLQHSTGTDSLQLWIKEAERQREILLEATKKIKDLSTSERYFKNIELIRSVPGIGLITGMILLVEIEDIARFENSDKLAGFIGLIPTCHSSGERENKGEITPRRHNSMRKTMIESSWIAARRDPALSLSFSKYCKRMEPNKAITRIARKLVNRIFFVLITQQKYESKIV

SEQ ID NO: 123114 - protein, 407 aa, unidentified
MDVVIERACGMDVHKDNITACIITPEGKEIQTFSTKTVFLIQLVDWIKQHNCTHVAMESTSVYWKPIVNLLEAEDIEFLVVNAQHMKAVPGRKTDVKDAEWIAKLLRHGLIKASYIPDRNQRELRELVRYRRSIIEERARQHNRIQKVLEGANIKLGSVVSDVMGVSARNMLNAIAEGEEDPEILANFAQRTLKKKKEELELALKGYISSHQRLMLKTILKHIDFLTEQIEMLDSEVVERVSSYQEDIDRLDSIPGIARRMAEQILSEIGTDVKNQFPSASHMCSWAGLVPGHNESAGKRKSAKTKKGNKYLRSALTEAAHSVKGSKNYLGALYRRTASRKGKKRAGIVVAHAMMRIAYYLLTREEMYVDLGEDYFDKQRQQSIVKHSLRRLESLGYTVTLEEPEAS

SEQ ID NO: 123115 - protein, 340 aa, unidentified
MNVTTYGLDIAKRVFQLYWVDIKSGEIHNRKFGKQDLIEFLAQQAAGLIALEACGSAQWWRRKLMALGHEVKLIHAKFVRPFVQNNKTDAADAKAIWTAIRQPGMRTVAGKTEEQQAMLALHRMRMSLIKFRTMQVNQIRGLLYEFGVTLKGGRQAGLSEMQQRMAELEEIVPGMLFEAIKEQLQRLANIEADIQDIERRIKAWQKQQGACRKIAEIPGVGMLTATALVATMGEANSFKSGREFAAFVGLVPRQSGTGGKVKLLGISKNGDTYLRTLLIHGARTVMFKAKDKGEWCEELLKRRPTNVAIVALANKMARMAWAILAHGREYQKGYVSQVPA

SEQ ID NO: 123116 - protein, 372 aa, unidentified
MGHHTEAYVGIDTSKSCNAIAIADGGRGGEVRYLGELPATEATIRKLVAKLAAKYRDLTFCYEAGPTGYGLYRLLKSLGHECLVVAPSLVPKKAGDRVKTNRRDAVSLAKLLRAGELTAVWVPDERHEAMRDLSRARQAVKKDLQGKRQQISSLMLRLGRIYPGKTTWGPAHMKWLMAQKLEHREQRIAFEELLEGVRQESERVERLENAIREAVPEWSLAEVVAALQAVRGIDLIAAVGVLAEIGDLSRFQNPRELMGYLGLVPSENSTGDKVKRGGITKAGNGRARRILVESAWSYRYPPRVSRDKQPKVEAAPRRVREIAWKAQTRLCGRFRSLERKGKRRTVIATAIARELSAFIWAINRELMAHRQA

SEQ ID NO: 123117 - protein, 358 aa, unidentified
MTNLAEKLDFSGHTISCGIDVHLKSWTISLYLGKQYLKSFVQSPPSVEGLRNFLLTSYPKAHYECAYESGFCGFWIQRAFAALSISCIAVNAADVPRTDKSTKNKNDRNDSRRIAEALQAGQLEGVYVPDPELEADRQLVRLNERYSNDLTRAKNRIKGLLRLMGIEIPHRFAKANWSNGFVDWLKQISCGESSIRVVLDRQISIMETIRSEKLDTLKEIRKLMCKVRYQSISKLLCSIPGIGPVTAAVLIVEIVDITRFEKSDRLNSFVGLCPMQHSSGEEDRKGSITTRQHRRLRYLLVESAWVGIRTDPALTLCYSRWSARIGSRRAIIKVARKLLQRIRYVWIHSVPYVPGLVK

SEQ ID NO: 123118 - protein, 376 aa, unidentified
MTTPHYIGFDVHKKTISFCVKTAAGEIVEEGSVAAQRAVLREWAAARPQPWRGAMEATLFSGWIYDTLKPYGAELAMAHPAKMKAISAGKKKSDTIDARTIADLVRCNLLPACYVAAPRIRELRRLLRYRSLVVREAVRMKNKMAGLLMETGAVYVKEKLHGKKYFASLLEELEEVPESVKDLLRLSRGALEMFESTQKRLVRELLADAELAERIERLMTIPAVGEITALTWALEVGDAQRFHSISDALSYCGLTAALKSSAGKQQRGPISKQRNHWLQTTLIEAAKLAPRWNPQLAALHARELERGHRNRATLAVARKLVAYLLAVDKSGQSFQLRALPEGWTQKPSSEGKKLKLTAIDRPFLANLGTGPRSSDS

SEQ ID NO: 123119 - protein, 343 aa, unidentified
MGEVSTIGLDIAKSVFQIHGVDAGGAVVIRKRISRAKLLEFFATLPTCLVGIEACPSAHYWSRRLQGLGHTVRLMPPSYVKAYVKRGKNDANDAAAICEAVTRPSMRFVATKSEQWQSGLMLHRSRQLLVCQRTMLSNAIRGHMAELGIISAKGRNGTAELLEIIADEHDDRIPSAARFSLDVLARQYAVVRAQVVAIEKRIHAWHRSSEESRRLEEIPGVGPIVATALVAEVGDWKEFTSGRSLAAWIGLVPRQHSTGGKERLGRISKQGNRHLRWLLVAGAMAVIRYARQHGTKRPWLARLMDRRPLKVAAVALANKIARMAWAMMVRGERFKEPKLLPAA

SEQ ID NO: 123120 - protein, 450 aa, unidentified
MREVKARTVFQGWPGVTKLAFQIHDERGNPSMKLFVGLDVSKAKLDVCFLSREDDSNTVIWQETVPNSDAGATMIKDQILHFHEELEFDKILVGMEATGQYSIHPALFFSNDPELQLINVQTIVENPRVIHRFSKVWTEEKNDQLDAKLIAEFLSTGKHTNTKPREEKFVSLLRLTRTRYQLVRQMTEAQQHYVENLYYKCNTLTSDLKAEKISTSVFSSTMIQLMNGDLTMADIRTMQTADLATLLQKYGRQRFKDPIKLAKVIRKSVSDSYRLSKLAQNTIDINLGVQMRVIRGFEQEIKTIDKAIKDIMETIDGAKILLSIPGIGPVFAGGIIAELGQIDRFDHESKLAKYAGLYWPKHQSGNYQRENNPMSKSGNRYLRYYLVQAANSVRRHIPEYEAYYQKKYDEVLKTQHKRALVLTARKLVRLVFALLSNHQLYIAKSEAIES

SEQ ID NO: 123121 - protein, 336 aa, unidentified
MRYSGIDMACKSSAVCITDEQGKIVSEFEIPTDEDGFRAGLSRWDDLFCVIEASPLAEWVARILEDLGHKVVVIDPRRAKAVICTKKKTDKLDARNLAKMGRTGWYTAVHRKSPEARLLRTHMQARAGLVQSGKAQAARIRGLLRAHGIKLGKVSEGGFANKVRAIIMKRQPELLPILEPLLSIWTQAKIEAKKMKKEIKRLSSKDKVCAQLMTAPGVGPLVVSAYVATIDDPKRFSSGDEIAAYIGLVPSVHQSGDTEYRGRITREGDGLLRTLLVEAANVLLTRTKRDFALKRWGLALQKEKGVGKARVAVARKLAVLLHHMWMTGEKFDWAKA

SEQ ID NO: 123122 - protein, 320 aa, unidentified
MQTPSVALNIGADVGKDEIVMACAERSFAPRKIDNRRAALLAFLKGLPARSRIGLESTGSYHELLAELAHKLGFVVYVLNPKDTRHYAKAMGLRGKTDRVDAELIARMLAHEHEKLHPWIPPTPEQRQINRLLKRRAKVSRIRAALTQSFKGLKGFSGELKALRQRLDKLLARIDAEVKALIETSVERKQDYARLRKITGVGAVVGSSVLNTLERVPLGSADAFIAFTGLDPRPDDSGQHRGRRRLSKRGPSELRRLLYLAAMAAAKTKTWNPLYVHYRAKGLSTTAALVILARRIARTAWSIYTHKTDFDPKRLTKALT

SEQ ID NO: 123123 - protein, 413 aa, unidentified
MPQKTDYVYVGLDIHKETHTAVLMTYMEERLGKIKITNNIAGYRRLQAYVDKFRGELIPLYGLEDVSHYGRDLAIYLLDQDYTVKEVNSALSCMERNSYATVKKSDEWDAQCISAVLSRRSAILPDANPQDYYWTMKHLVGRRDALVKNTSSLIQQFHEQIQKQYPSYKQFFHDIECQTSLAFFERFPSTGHLNGVTVEELGAFLREKSHNTCSDKRAELILKLVEQDHTKEREYQSGRDLILQSISRQVYFNQQEIKQLERMQGELLKELGYHLETIPGISTVTASALVAHIGDIKRFKNADKLANYAGVAPICHSSAGKGKDLQNKGMGNRNLYNVLYLLAMQQIQINRDGKARNPLLRAYFECKVSQGKTKIQAMICIMRRLVSIIYSMMKNQTSYRKPELEDQKEQMIS

SEQ ID NO: 123124 - protein, 354 aa, unidentified
MKRTTKYVALDVHQATTVASVREESGRVIARSVLPTDGPALTEFFRGMRGAIHVAFEEGTQAQWLYNLLAPRVDRVIVCDRRGQSRQGNKGDELDADELSEQLRRGGLRAVYHGSGPGAGLKELTRSYQNLVEDATRVMQRLKALFRARAIRTSGEGVYHPARRAQWLAQLPDGGARVLAEALYAELDALRALRPKAKAAMLVAAQQDPACAVLRTIPFFGPVRVALLLATMQTPWRFRTKRHLWAYAGLAVVTRSSADYAIVAGQPVRRRRAPLTRGLNRNHNRVLKDVFKGAATAATTRPGPLLDFYEGMIARGMRAELASVTLARKLAAITLRLWKKGERYDPTQLTTSAR

SEQ ID NO: 123125 - protein, 352 aa, unidentified
MPMLAELIDAVVGADTHRDTHQLEIAHPTGAPIDVRSISNDTCGFTEAVGWIAEHAPGSRVVVAIEGTRSYGAALTRALTEAGLTVIECEQPTRRARRRKGKSDAIDAHLAVLAALRLDAAKLPTPRADGDREALRVLLCARDELTTTGTGQTNRLKALLRDGDDTDRALARGKLTDITLNRLARRRPPREATRAQAVRQTEIRRLAVALRDQRRELKHNRAQLQAIVNDLAPGLTDHNGIGPVCAAQVIVSFSHPGRCRSEAAFAALGGTSPIEASSGRTTRHRLNRGDDRALNKAIHTIARTRMRDCPATQAYVTRRFAEGKNEAEIRRCLKRYIARQLHRFLTTAMAPA

SEQ ID NO: 123126 - protein, 316 aa, unidentified
MTATNEFVGIDVSKANLDVACWKSKEYKRYSNNPKGIQDLVEWLKELQPELIVLEATGGLELPLVVELAYAKMPVAVVNPRRIREFARSIGQLAKTDKLDAKVIAHFGAATHPEARKLPTQEEEKLSALMTRRRQVIEMLTAERNRLHSARFAMQERIEMHITWLEKELQDLDDEISQFIQQSPLWKEKDALLKSVPGVGPVTSATILAMLPELGTLNRQKIAALVGVAPVNKDSGKRQKKRRVFGGRANVRCVLYMAALSATKHNPKIKCFYDRLIRMGKEKKVALTACMRKLLVILNAIIRQNQIFRPEFVILS

SEQ ID NO: 123127 - protein, 338 aa, unidentified
MPIYAGLDVSDKATHICVVDIDGKVVRRDVVASDPEVLAKWLSRHCPDLVRVVLETGPLSTFLYHGLAERGVVVECICARHAKGVLSARVNKSDVHDAEGLAQLARTGWFKRVHMKASATHIDRAALRIRVQLITARTAMANQLRGLLKLFGLRMCTARTSGRRTERLAAIYAQRPDLAPLFAPLIASMEAIEEQLRASGQLLVERAASDPVCTRLMSVPGVGPITALTFTATVEDPRRFARGQDVGAYAGLVPRRNQSGERDTSDHISKAGDPMLRWSLYEAANVLLSRVKRPFALQQWGTKLAEAKGAKRARVAVARKLAALLHSLWLNETEFRWA

SEQ ID NO: 123128 - protein, 335 aa, unidentified
MQIYGIDLSMEKFDVNFIDQNGNEKNKTVKNEVNSIFNFFKEIPAGSILCAENTGVYGDLLLFLSNQMDIDIAFIPGYNIKHSLGLIKGKTDRIDAMRIREYGERFYDKIVPTQYEDETMRELQELYTLRGQLIRSRKALQASETGRKHQPMQSICAHTSAQSVIDNLNNEIQNVENELKKLILADQQVKDNYELATSVKGIGPVIATDLLIKTGNFNTIDTARKAASYAGICPFPNSSGKMVKKARVSPFADKKLKSLLYMGAKSAVKHNKEYRLYYQQKKLEGKPHYLIMNNISNKMLRTVYSVVKNEIPYNENYVCLDPRERKINSSKIKVA

SEQ ID NO: 123129 - protein, 390 aa, unidentified
MFEHFAGIDMAKDTFSFCVTDLNGKEVEKGCCNVDKEGFDKFFSVISSFSNIAVAVESTGTYHITLLSALVSANFTTYLITPVLVKKFAQSCSLRTIKTDRIDAKIISVFIARNHSTLIPAVSTGNEGLRELARLRESVTGDLGSTKTKLKQLLTTTFPELVRNFNIFTASMLVLIEAFPSANAFVNASETEIETPLKTKGKGRKISVSVKQFQELASKSVGKSDPMIEKAVLHQIRKIRFLTDELKKVTDELVEAAHICSGKEIEILTSIPGIGDTTAAQFIAEIGNIDKFDSVKQLTAYAGTDPGINQSGMSLKRKKISKKGNASIRRVGFLMTVHVIRFSDVFNKYYFKKRNEGMAKKKAIIATFNKLLRCMFAMLKNHSHFLFVYS

SEQ ID NO: 123130 - protein, 355 aa, unidentified
MSQEKYIGMDVHQATISVAVMDGSGKLIMECLLETKAATIVEFIQGLHGTLSLTFEEGTAAAWLHDLVKPHVSRLVVCDPRKASLMKEGNKSDRIDARKLAEMLRTNQLHSVYHGEHGMRTLKELGRSYLTVTQDVTRVMNRIKALYRSWGIPCSGTTVYASRHRAEWLAKLVEPGVRVRAEHLYRQLDSLQPLRLEARRELLQESQKHAAVKRLRQIPSIGPIRAALLVALLQTPHRFRTKRQLWAYSGFAVETHDSGEYRYVRGKPQRNRERITVRGLNHNYNKDLKNLFKGAAISASTRPGPLHDFYVARVEKGMRPTMARLTVARKIAAVSLTIWKKGVSFDPKRLQQQAV

SEQ ID NO: 123131 - protein, 338 aa, unidentified
MKLYAAIDLHSTNSYLTVIDEHDTPLIERRFPNDLERLLAALAPLRESLQGIAVESTYNWYWLVDGLQDAGYRVRLVNTAAVAQYDGLKHGDDRSDARWLARLLRLGVLPEGFIFPREQRATRDLLRRRSLLVRQRVQLMLSLESTLSRRTGKTWSTRAVTQLDEAAVEKLLPETTERFGFLIQFALYGSLQQQIDQIEQWLRVDCRADPALVNLKSISGVGDILGMTILLETGPVDRFASVGDYASYCRMVESVRFSNGKLKGRGNAKCGNRYLCWAFVEAANFAIRFNPAIAAWYQRKRSRKHRIVAIKAVAHKLARAAYYILRDRTAFDTARAFG

SEQ ID NO: 123132 - protein, 318 aa, unidentified
MHKETFDAALMINGECHHVVFGNHPVGFGRLRNWLVSKKAGQVHACMEATGQYGDALAEFLYREGHQVSVVNPLRIKRYGQSKLHRSKTDKADAILIAEFCAKETPALWRPLPPEIKQLRQLVRRLDDLQTAYQQERNRLLSGVSDAWVVKDIKEHIAYLHQAIKSAKAAIQQHIDTYPELKHNQALLRTIPGIGFLTAARLLAEIGDIKSFENAPQLAAYAGLNPKGTRSGTSVYKKTRISKEGRAFLRYILYMPAIVASKHNPIIHAFCQRLAQNGSQKMAIVAAAMRKLLHLVFGILKTQKPFDPLYLVNAQIAS

SEQ ID NO: 123133 - protein, 413 aa, unidentified
MDRVVDRPGGLDVHKDTVVAAVRVAAADGERVTELARFGTTTPALLALRDWLLAHGVTRVGMESTGVYWKPVYYVLEDAMQVWLLNARHMHNVPGKKTDLADAAWICQLVEYGLVRPSFVPPKPIRELRNLTRYRKAQIEERSREAQRLDKILQDAGVKLSSVASDILGVSGRAMLRALVAGTTDPTVLAELARGHLRRKIPALTDALTARFSRHHALIVAAVLSKLDFLDELIGRISVEIDEVIAPFAHHVELLDTVTGIDVRTAQGILAEIGADMGVFTTAARLSSWAGICPGNNESAGKRKSGKTRKGSKWLAIYLHDAARAAVRSKNTYLAAQYTRLRPRIGHAKALVAVEHSILVAIFHMLDRDLPYQDLGADYFIHRNDPEHQARRLINQLQRLGYTITATPPDVAA

SEQ ID NO: 123134 - protein, 384 aa, unidentified
MSKHNIVFIGMDTHKSFIEVAYIEDVRGVKPIHLGKIPSTKQAVKKLVRQFESKYPHATLHFVYEAGPCGYWIYRLITSLGHCCYVIAPSLIPKKPGDKIKTDKRDAMNLAKLLKSEDLTAIYVPEPEDEAVRDLSRARETAMKDLKDGKYQLKALLLRNNVTAKVKDNWSKQHLRWLTELILPHPAQQIVVQEYIQTITERMNRLKRLDNELEHHVKNWRYYPVVKAIQAMRGVRLLVATGVVAELGDLTRFDHPRKLMSYLGLVPSEHSSGGSRKLGSITKCGNSRARRLLVEGAHTYRFAANISKELQLRQEDLGKTIVDIAWKAQLRLCRRYQTMLRRGKHYNVIVTAIAREMIAYIWAISREIVLTPVEPKLRLSRVPA

SEQ ID NO: 123135 - protein, 395 aa, unidentified
MTNDKLIVGIDIGKRTHVAAIIDATGVQVTRPFSFQNTTVGGTLLLDRIAGVNTASAPVVFGLEATGHYWLALYSFLTGKGYPVSVINPYQSDAFRKVHLSTTKTDKEDSYLIADLMRFGSFQETKMAGEQMVSLRNLARFRVTMSQQITDTKRRIVTIMDQIFPEFETLFSDTFGKTAKALLEDYPIPESFETVTTRKLTNLIARLSKGHFKREKADEIKQKATASFGVNFALDSFKLELSLLLKQLDFLSAQIAVVESKIEQSMETIPTTLKTLPGVDTILAAAIISEIGDITRFKTSAQLVSFAGINPTVHQSGQFTGNKNHMSKKGSPYLRLALWKASITSVRFNPILKAYYEQKTKEGKNHMIVIGAVSRKLTGIIFAMMRDKKEFAENV

SEQ ID NO: 123136 - protein, 308 aa, unidentified
MIQHNYVGCDVAKDMLDIFDPRTGRFQRIVNTTLAITSFVEGLDRTRDFVVFEATGVHDRLLRHALAVAGIAYSRRNPVQTRRFAQARGLLAKTDRVDARMLAEYGSRFTPPPDPHPCPSRERIAALARRRDQLVEIRAREAKHLSEAFDAAVIADIEYLQAALTQRIKQLETLIKQAIAEADAATVATYKVLRSAPGVGKVTALTLIAHMPELGRSSPKTIASLAGLAPLNNDSGKRNGRRAIRGGRSRVRRALYMAALSAIRSIRFKGFYEALAARSASKKLALIAVARKLLTSLNAMVRDGKAFA

SEQ ID NO: 123137 - protein, 372 aa, unidentified
MEEYSGYVGLDVHKETISPALANPGRSKPESLGVIANTKKSIQNLVHRLSREGEVLGFCYEAGPCGYEVYRWIKETGHDCVVVAPSLIPKKPGERVKTDRRDGLKLASLFRSGELTPVWVPDEEQEAIRDLTRARGEMKRVELQLKQRVSAFLLRYSKRYTAGKSKWTQGYYRWLAEVKMKFPVQQIVLEEYVGAVKQTEERVRGLDKEMERVLANWSLKPVVESLMALRGVQLLTAMSLVTELGDISRFDSPRELMAYVGLVPSEHSSGGKQKRGGITKTGNGRVRRLLVEAAWSYRFPARQSYHMQKKAEKATKPAQAIAWKAQKRLCNRYRVLQRNGKEPGKVATAIARELSGFVWAIACAVMAEQKTK

SEQ ID NO: 123138 - protein, 317 aa, unidentified
MSETTQERFVGIDVSKESLEVGVRPEGKHWSVANDEEEISSLVQRLGDLKPTLIVVEATGGFQAMVVARLAAAALPVTVVNPRQVRDFAKATGHLAKTDAIDALILAHFGEAVRPEVRVLKDEQTQKLTALMTRRRQIVDMITAEKNRLVTAPKGICKEIRKHIQWLQGRLNVMNGQIDEEIKKSPVWREKDAILRSSPGVGPVLSVSLLAGLPELGSLNRKKLAALVGVAPLNRDSGGYRGARSVWGGRGQIRSVLYMATVSAARANPVIREFYQRLIGSGKKPKVALTACMRKFLTILNAMMKNGTHWNERKVNV

SEQ ID NO: 123139 - protein, 316 aa, unidentified
MASDGREVFVGIDVGKDRLDVHIRPLGQYLVVDNDQAGLAELARRLEGHAPRLIVLEASGGYERLAAIGLIERGLPVAVVNPRQTRKFAAALGQLAKTDKIDAAVLAHFAEAIRPAARAVADDAIDRLQKLLARRRQLVVMRNAEKQRLGKATDPITQRSLKAMITSLDKQLGVIDKAIGRLIEADPALAEKLARLKTVPGIGDVSARTLIAELPELGLASRHEIAALSGVAPISRDSGHYRGKRKIQGGRVEVRAPLYMATLVAIRHNPVIRPFYRRLREAGKPAKVALVACMRKLLTMLNAMLRDRRSWAPAEA

SEQ ID NO: 123140 - protein, 342 aa, unidentified
MSEIITVGLDLAKNVFQVHGADAAGRAVLRKKLRRDQVLAFFGQLPACVVAMEACGGAHFWGREIGNIGHEVRLIPPAYVKPFVKRQKNDMADAEAICEAAQRPTMRFVPVKSEETQGAAMVFRIRELLIRQRTQAINALRGHLGEFGKIVPQGAANVSKLIAIVEEPEGGLPADAIPTLKVLVATLAHLETEISKLDAEIARCAQDNEVARRLMTVPGIGPLIATAIAVLAPPPETFRKARDFAAWLGLTPRQHSTGGKQRLGATTRMGERSLRRLLIIGANSVIIKRHVHAAARPGTWLGGMLTRKPPLLVRVALANKMARIVWALMARGGVYKAPATAA

SEQ ID NO: 123141 - protein, 310 aa, unidentified
MSTIKVVGIDLAKNVFQVCVWMEDGSVASNRKISRQKFLDTIRAFPPETLIAMEACATSHYWGRTLQSMGYHVRMVPTQHVKAFSHHQKNDANDALAICETACRPGLHFVPIKTVEQQDIKALRRARQLMVEQRTALANQIRAFFAEQGIIVPVGIQKLQQHLPDILEEGDNALSCVLRRLLHTLWEDLQNLNVSTHEMDNEITALSRQQAGYGHLLTIPGVGPLIAAAFVSDVNASQFTNGRQLSAWCGLVPRQHSSGGKSRLSSLSKHGNRHLRTLIIHGARAMMQGVQKRDDPLGEWLEHGLPDVAP

SEQ ID NO: 123142 - protein, 397 aa, unidentified
MYIVGIDIAKRKHEAAVIDGDGAVIIKPFSFTNNCSGYNRLLAMLAKAKLPLDEVSFAMEATGHYWLALFTRLQKEGFRVQVINPVQTNSIRSFYIRQAKTDPRDALLIAEVIRFGHFSESTLHPENIYELRELCRGRHAIVSMQADVKRKVVALLDQVFPEYETAFTNLFGDTSMAILQTCPTPKELSEMPLEELCHLIEVSSHKRFRMAKAQELQALARNSFGFAMAGDVFSTMIRLYAKHLDFLKQQVREIDRKIAEIMDTLDTPITTITGIGPTLGAYILSEIGDISRFSSAAKLAAYAGIDPTMRQSGEYNGVRNRMSKRGSPYLRHAIWLAASSAVLHDPALKLYFQKKRDEGKPYMASVGHACRKMVSIIYAVMRDNKAYTPYIPNEISA

SEQ ID NO: 123143 - protein, 347 aa, unidentified
MLIIGCDFHPGFQQVAIFDNTTGEIQERRLGHRAEAEQFYRALAGQQVRVGMEACGHYPWFERLLAELGFELWLGDASRIRAQAVRQQKTDRRDAEHLLQLLLENRFPRIWVPSLEERDVRQLLVHRHKQVQTRTQVKNQLHALALSQGVQRKRKLWTQAGRAELEQLELLPYAAERRKHLLHALDRLEQEIAALNQRVESEVGQRPAAVKLQTHPGVGPVTALAMVLTLGPAERFASAKQVGSYFGLIPSEHSSGGRQKLGRISKQGSSFLRFLLVEAGQSAVRQDAELGRFYRRLAVRKHRALAKVAVARKLATRLYLMLREDWTYAQLCRAMVSVSPSHSVVEG

SEQ ID NO: 123144 - protein, 342 aa, unidentified
MECYVGLDVSLKQTSICVVDRTGLVVREGVVGSNPEAISVFVRSKAPDAIRIGLETGPTSTWLWTELKQLGLPVICIDARHAKAVLKMQINKSDRNDAIGIARIMQTGWFKEVHVKDIDSHSVRALLASRALLVKIKRDLENHVRGLLKNLGLVIGRAKFNVFALRTEELIEDRPELVAAVRPLLEARTAVERQVSELDRKVMKLARRDAQVRRFMTVPGVGPITALAFKATIDDPARFARSRSVGAYVGLTSRRHASGEVDWSGRISKCGDAMLRSYLFEAAGVLLTRVPKWSAVKAWGVRLTKRNGLRKAKVAVARKLAVILHRMWMDGTEFNWSKEIAA

SEQ ID NO: 123145 - protein, 339 aa, unidentified
MNEVTLIGIDLGKHSFHLHAQDATGRMVFRKKLSRQQLLRTLANVPCCRVVMEACAGSHWLARQLAGMGHEPRLISPQLVRPFVAGNKNDFGDAQAICEAACRPSMRFVSPRNEAQQTVSAMHRLRERLVRERTATVNQIHGFLLEFGISLPRGAALMSRLPTVLDHETLPPRLVGLVVRLRAQVHYLEEQLRQVVQDLKAALREDDKSRRLLEIPGIGPITASALAVELGDARQFANARQFAASIGLVPRQYSTGGKPTLLGISKRGDRNLRRLLVQCARAVMQHTDSRTDALSLWVKTLSTRRHSNVVACALANKLARIAWAVLARGTHYQARALTT

SEQ ID NO: 123146 - protein, 450 aa, unidentified
MAHGNGVSRGDRNRNARLARLRELVPPGNAIVGIDLADKKQMVVMCDHDSQVLARRTFRCKAWALGAALDWAAKQAAAHGFAGVTVSCEPTGHRWRVLGQLAADRDMSFVCVQPMQTSWARRSEDLTSDKTDDKDAVLIARLTAQLRCYAPEPVDETWGRLRHLGARRERLIVEMVAQVQQIRDLLECVWPAALETARQPFRSKTWAAAMWVIVDRDGGDLERTRRLGLDRFERAVRREITRRGGQKPCLRIVGKLFAALADPTGVLAHRRGALERVQLLLEDWADTHRKIADTEDRMTAVLDELGLTTLATSIHGLSPVGAAAILAETGDPHRFATARALVKHAGLAPRQRQSGTYTGQTRLTGKGRPRLRAVAWRAVWGTLQTNTVYANRYRHLTTRETNKLKPTQAQAVIAATLLRHLHAVITTGQAWDPAIAQHGTAPKQTATLAA

SEQ ID NO: 123147 - protein, 411 aa, unidentified
MEVLVERCAGLDVHMRSVSACVRTPGPGRSRRSEVRTFLTFDASLAELAGWLLAEGVTAVAMEATGVYWKPVWDVLEDVGLDVKLVNPQHIKAVPGRKTDVRDAQWIAQLLECGLLNASFVPPREIRELRDLTRYRRRLVESRARETMRLAKLLEGAHVKLSSVVSDLTGVTSRLILAALCDGERDPEVLAELAQRKLRRKIPELRQAVPGRFNEHYAFMVREVLVQIDELDAAIHRIDQRVEEVVAPFAWARDLLSTIPGIKTRNAEIIIAEIGVDMTRFPTPEHLASWAGVCPGNRQSGGRQRSGATRQGNPWLQSALIEAAWSASRTRNCSMQTRFWRIARRRGVNKAAMAVAHHVLIVVWHLLAERATYHELGPDYLARYDDPTRRQRHLVHQLEQLGLHVTVEPAA

SEQ ID NO: 123148 - protein, 398 aa, unidentified
MRGPVQQDTKEVLAELVGKLREKLDPKVGAASAGEEHQQGRPRPNLDRLTVGVDLGDQWSQYCILGLEGETLAEGQLRTTQEDLATFFQGLNEARVVVEVGTHSAWVQEVIRGCGHEVLVANPRLMDGSKRRKRKNDRIDANKLARLGRVDPESLYPIQHRSREVRQDLVMLRARDALVAARTEIINTTRGLVKSMGTRLPKCSSRSFAQKGEEAVAVEMREALLPLVRLAATLSADIKEYDKKIEELGREKYGHTALLRQVKGVGPITALAYVLTLENPQRFAKSRDVGPYLGLLTKQEHSGESQPQLGISKAGDTMVRKLLVGSAQYILGPFGPDTDLRRYGLRLCERGGKNAKKRAAVAVARKLAVLLHRLWVTGEVYEPLRHGMSATTVQAAAA

SEQ ID NO: 123149 - protein, 341 aa, unidentified
MKQYVGLDVSMEETKVCVLDDAGVVVFEGSVASRPAALAKLLNAKAPHAERIALETGSLSSWLWHELKAAGFPVVCLDARHAKAALSMRINKTDRNDARGLAELIRMGWYREAKVKSMESRQIRALLAARSKLVDLRRDLENQMRGLLKSLGLIIGKSGVHVLPNRIAALLRDAPHLRSLVNPLMTAHSTLAEQIATYDLQVRELAKTDQTIGRLMTVPGVGPVTALAFASTVDDPQRFARATDVGAYLGLTPRRYQSGELDRNGRISKRGDRLTRSYLFEAANVLISVVRRPSPLKSWATKLVKRIGRKKTTVAVARKLAVILHCIWTDGTEFDWGGVAA

SEQ ID NO: 123150 - protein, 338 aa, unidentified
MKLYAGIDLHSSNNFIGIIDENDKRRYSKRHYNNIDTVLKVLKPFKKSLQGVVVESTYNWYWLVDGLQEQDYSVHLANPSAIKQYEGLKHTDDRWDSFWLAHLLRLNILPEGYIYPKEKRAVRDLFRRRLRFVRHRTSTILSLQSMFARHKGSTPPGNVIKTFSQWEVEGRFDCSNLTFAAKADVAEIENLNTIIKSIEKKIRSQVQLIEEFELLHTIPGIGDILAMTIMLEVGDINRFEKVGNYSSYSRCVKSQRISNKKKKGEGNRKNGNRYLAWAYVEAAHFSIRYCASARKFYQRKKAKTNGAVATKALANKLARASYYIMRDRVPFDEEKLFR

SEQ ID NO: 123151 - protein, 341 aa, unidentified
MKKILTKNYLGIDVSKPWFDVSLLVVIDHVKQPMVTERFDNTDIGMKLFKSWLKTTSVSFDDNSLLVIENTGVYHRLIWSFCSKYHLPLHIGNAAHIKWSLGITRGKSDVIDSQRLCMYCFKQADELKATPVLNPVFMKLKDLMSSRSRMVVQLHSTKNYIKEIQCTNDKALLAMLDKAHKAAIDGIKKSIVQLEEMIQKIIAEDPAIYNNYLLIKSVPGIGHLTAVYIICCTNNFISKVTGKQLASYAGVVPFEHTSGISIKGKNRVHKMANKDLKKMLHLCALTAIKYYPEFRQYFDRKKAEGKNGMLVLNAIRNKLVLRVVAVVNKQQPYVNNTQIAA

SEQ ID NO: 123152 - protein, 347 aa, unidentified
MTIVEAPPGITGGVDTHLDVHVAAALDPLGRLIGTESFSTDAAGYRALLEWLRRFGEVTKVGVEGTGSYGAGLARFLRREHVHVVEVNRPNRQARRNSGKTDALDAVEAARSALSGNAKGHAKTRDGAAEAIRTLIVAKRSARQSKVKAKVQMRHLVVSAPETIHQRFIGLSGTALITEAASLRPERSPDPVTAATKSSLSSLARRIRFLEAELATLDEQIAALVAAAAPELLGLFGLGPDTAASLLVAAGDNPERLHSEAAWARLCGVAPKRADSGKVTGHFRLDDGGDRQANSALWRIVMVRIAHDPKTTAYFERRVKEGRTKRDVIRILKRYVAREVYRYLPRG

SEQ ID NO: 123153 - protein, 371 aa, unidentified
MKSIIYIGMDVHKKTYSLCALLKETGEIIGETKIPADVSLIIKFIENAKKSVDSDDVQIKTGYEAGCLGYSLYWQLAEKGIECDILAPSTMHRSAKNKVVKNDRRDAKNIAANLANGTYKSVHVPTDEDVEIKEYIRMMHDFKIELKKVKQHINAFLLRFGHQYPGKSKWVPAHIKWLKELELSDMHREILDEYLSQLEILSEKIERFKHRLEELSQKETYNEKIGQLRCIKGIDTIAAMTMHAETSDFDRFPTANAFASYCGLTPGEDSSGDSYHRLSITKQGNSMIRTTLVEAAQVLVRGTIGKKGKKVKSKQKDQDVKVIDYADKAVIRLQKKYHRMIFRGVKRNIAITAVARELACFVWGIETGHIS

SEQ ID NO: 123154 - protein, 404 aa, unidentified
MKGPIVSIDVSKGKSDYQAFKNLNVKYTGSRSIKHTKEGFDEIVNLVREMEKKLETEVCVVYEATGVYHRVLKKVLEDNNIKQFIINPLLSAKTRKNDSLRSPKTDKLDPKSIAKTYYSHSLHNSHKPETIYHELRELSRYYEDILVHIRKDKVAFRAQLDVVFPGYDTLYDDLYGPVALAVIEKYPHPEMLQKKKINTVSKVIQNKTCHRQATSDTMADKAIAYSKTIYSGCDKDDIEVLILQRLIKKLKEDMAEAERTIGEMIKLAQELPDFSIIKSIPGIGDNLAARIIAELGDMTRFKKKNELVAFAGLDPRISESGKNDGDHMHITKKGNKRLRCLLYLAVTCSIRLKRDDNSIKDFYIKKKQQSNPMCSKAAKTACASKLVRIIYSMCKTGELYQYNK

SEQ ID NO: 123155 - protein, 440 aa, unidentified
MAMRKREDLVFPNAAAIDVGASSHWAAVPPHATDAPVREFGAMTDDLNGLADWLIACGVDVVALESTGVYWIPVYEVLEQRGLQVWLVDARQVKYVPGRKSDVQDCQWLQRLMSYGLLRAAFRPGADVCVMRAVARQREVLLTQQASWVQRMQKALVQMNIQLTEVISDVMGQTGQAIIRDIVAGQRDAKALARHRHRRVKASEHDIVRALTGNWREEHLFVLEQALAVYDDLAKRLHECDAKLGELLAERSAASVDLGKAPRQGSKARAEYDARQQLANWAGADLTRINGLGLDSVMKILSEIGTDLSRFANVKHFCSWLGLAPATKISGGKVISARTKRSANRVRQALKMAAMSLSHSDSALGAFYRRLCSRMDKPRANTATAHKLARMVYFMLTRGEAYVDEGQQRYEEQQRQRSVAALKRRAAALGFQLNPVGTAA

SEQ ID NO: 123156 - protein, 343 aa, unidentified
MYYIGLDVHKMTISYCVKDAAGQVHREGKIGSTRRELDAWVMTLPQPRTIAMEATIFTGWIYDHLLPHAEKVKVAHPLMLPAIAAAKKKNDKIDARKIADCLRCDFLPECHMASTEIRDRRRVLRYRGLVIKQMVQMKNRVSGLLMETGVDYNKRRLHRVGYFEDMLKTNKEVNQSIRPLLKLSRETIERSQRLDYALVSSLERDPLLAERLRRLRTVPGVGPITALTWALEIGDFTRFPSVKEAISYCGLCGDESSSADKVLRMPLSKQRNKYIQRTLIEASKLAIRYNHELAEVYEKERERGNANRATLAVARKLVAYLLAVDRRKQDFVPAEVFRAMTAA

SEQ ID NO: 123157 - protein, 331 aa, unidentified
MCVVDEAGKVICEQKVPSEPDDIVTLLTSIGEDYGRIGIEAGPLSQWLVNGMAEAGLPVICVETRHMKSLLKAQQINKSDRHDARGIAQMMRVGLFKPVRVKTLASQEKRMLLTARKLLQGKMLDVDADLRGTLRNFGLKVGVVGQAGFETRVRELVKGLPRLAAIVEPMLTIRRVMRQEFTRLHRMLLDVVRHDPVCRRLMTAPGVGAVVALTYRATVDQPQRFVHSRAVGAHVGLTPRRHQSGEIDYDGGISKSGDTMLRTMLYEAAQVLLTQRGHWSWLKAWGMRVAQRRGQRRAIVAVARRLAVILHRMWTDGTDFRWGSEPAAAGA

SEQ ID NO: 123158 - protein, 347 aa, unidentified
MRFYTTQHPFYCGIDLHARSMYVCILSHDGELLLHRNMNAAPEPFLKAVAPYREGLVVAVECIFTWYWLADLCAAQGIPFVLGHALSMKAIHGGKAKNDKIDSQKIAALLRGGMLPQAYVYPAEMRATRDLLRRRTHLMRKRAELLAHVQNTNSQYNLPEIGKKIAYKANRAGVAERFEDPAVHKTIEVDLALITYYDQMLSDLELFILTTAKQHDAQTLYLLQTVPGMGKILSLVLLYEIHQINRFPRGQDVASYCRLIKCAKESGGKRLGTSGNKIGNAHLTWAFSEAATLFLRGNEPGQKLLARLEKKHGKGKALSILAHKLARAVYFMLKRHTAFDLEQFLRP

SEQ ID NO: 123159 - protein, 316 aa, unidentified
MEKPKFVGVDCHKNTIACFVNGKFKEFKTDFKGFKKALEWAGKDCYWALEGAYSYGLTFSTFLLESGCKVYEFNALATAKARKALSICGEKNDWGDAKVISIFAAQSKLQEVSTKTVKLKQIITKRKLLVTQRTQITNNLKSSFNQLGITPPFKSLTTIKAYKWLQNNEDICVQQFGKILQTLNETIKTLEQEIENLMPEQAKKLTQITGINTLTAGTIYTEIKGKKMTKAQFASYCGIAPVDCSSGMSEKHRNNHRGNRILNSILYATAIHQIRFDKIGNSYYTKKLQEGKAKKVARKHLQRQLANIIWKKLFND

SEQ ID NO: 123160 - protein, 345 aa, unidentified
MEIRTIGIDLGKTVFHLVGLNARGEVVVRKKCSRTQLLRFTSNLRACLIGMESCGGSHFLGRALREQGHDVRLMPAQYVKPYVKTNKNDYIDAEAIAEAVTRPTMRFVPIKSDDQLDLQSLHRVRERWVIRRTAVINQIRGFLLERGITMRKGRKHLEASLPGILEDAENKLSGALRALLTQLRIEMQYLHRQIEECDQLIVRIASELEPCRRLLAIPGIGPVIATATIAAIGNGAAFKKGRGFAAWLGVVPGEHSSGGKQQLTGTSRRGNKYLRKLFVLGAHTVLLQRTKQSPGLSTWLASLIARKRKQVATVALANKMARMVWAVLFKGEAYRPPLVPQLNAA

SEQ ID NO: 123161 - protein, 478 aa, unidentified
MEERRIIGLDLGIASEHTARVLSGDGKVVAKRKAVPTTESLSALEAAALEGAPPGTVLEVVMEPTGPAWLPIAVFFISGGHKVFRVPSAKAHDMRRYFSRHAKSNSIDADALARLAIIDPCGLRPLELDDADAAALDRRVRACDRLTQEAALHKVRIKDLVRQLLPMTPLTGDIGAADLAVLERWADPHDLVKAGRTRITRVIVAASNNHQRAERADEWLAAAHAALELYGEHPGVAFADLAAEVATEVRLLGAIEAELTVHERAREERYRAVDPAELARSLPGIKTVSAPALVATMGRATRFPSAAHFRSFTGLAPKASETGNTDRKGQAMSKAGNSLLRTTLIRAADWARKQDPQLARIYFVQMTERGKNHLAANCVVAAHLAERAWLVMRRGTPYVLRDIDGTAVTPKEAKAIIAERYSVNEETRQRRRSNKGGKAPQKVLTEHLKSHAKGTDRTRRPSPTTTSARSETGVKRTA

SEQ ID NO: 123162 - protein, 446 aa, unidentified
MKVLHERVAGIDVHKDMIKVAIRSPGVKPWTRKTEILTFRTFYGVLREMARDLRRRGVTHVVMEASGVYTEPVYYALREEDFTEVLVINPAHAKALKGHKTDARDCARLAEYLECGLLQGSYIPPPELREVRDLTRYRVKTVQARTSEIQRLGKALESAGIKLGSVASDIAGKGPTAMIEALIDGERRGAVMADLAMGRARTAAKLADLSMALEGRFTDHHALMCRLHLDRIKVHDAAVDDLDKRIKAKAAPWQREIDLLKTIPGFGDTAAWAWIAEIGPSPHQWFATSAMLASWVSLAPGNYISAGKRKHGRTGDAGTYIKPMLVQGAWAAVKAKGRLQARYNRLVRRFGGPKNPGAKKKAIVAIAHTLLKIAYSVLKSGTPYQEPGEDFYARRESPGQRQAYLESQLRKLYPGSTVTITISAPGNPPEATPLRARLPGSALTRS

SEQ ID NO: 123163 - protein, 334 aa, unidentified
MQNVTLIGIDLGKHSFHVHCQDKSGRAILCKKFSRAKLMDFLAGLPSVTVVMEACAGADFMARRIVAFGHDAKLISPQFVRPFIKSNKNDFVDAEAIGEAASRPSIRFVQPRTEAQQAMRALHRVRGSRVRDKFKTTNQMHAFLLEFGISMPIGAAVIKWLSTVLAENELPAYLAQLLMRLPAHYLYLVEQIAELETALEQALSRDETGQRLQTIPGVGPITASVLSSQLGDGKQYGCSRDFAASTGLVPRQYSTGGRNTLLGISKRGDKNLRRLLVQCARVFIQRIEYQSGSLAEWVKAQLERKHSNVVACALANKMARIAWAITTRKTVFER

SEQ ID NO: 123164 - protein, 429 aa, unidentified
MKPCEQTPQDWLAHRAFGGLDWASQKHNVVVVDPRGKVVEDFEIEHCALGWKKFRQRLAPYGAIPFGIETSQGSAVEQLLEAGMEVYPINSKSAKSYRERKAPSGVKDDRLDAWSFADACRIDGQGWRALRPEDPLIKELRLLCRDEVGLIEQRTSFVCQLRHALGEYYPIALEAFEDWSSVGAWMFVQRFPTPQILQEAGKRQWEKFLHARHMWRTESGPRRLELFAQATELCGTVPMANAKSQLALSLISMLFALEKQLGIYRQRIEELFHRHPDHDLFGSLPGAGPKLAPRILAEIGDDRGRFEEGPQALQCLAGSAPVTRRTGKCKVRDHWPCHQRWACDKYLRHAMHLFAEHTLNQCVWAQIYYSHHRQKGSSHADALRRLAQRWLKIIYRMWMDGKPYDPMLHHHNQLKHGSWVFELKTANCK

SEQ ID NO: 123165 - protein, 519 aa, unidentified
MSRSGVRSVKQPKPFLLQKPRGEVTPRVQAVGPEHFGILAIDCAKARSRYLFADFYGRTLLEPTTLPHTHGDFQAAIARVRQAMAQQDIRDGIVAIEMTGEYHRPVQRAFRAAAFETRLVHPFTSKQYRQPADPGNKTDDTDLAAIFRAATHGFGLLEPTWPDEYHTIQMLRRHRRDLVDKNSKLCCQIREVLHAAMPGYAELFCHLWETPTPLVLARHVTSAEAVKQAGVQGLRQIAVAAKISCRSDTLDKIVAWAEQAPLGHTHTHDLQRILRTLDDDRLAKTQQILELERSLAQLVVRTPYVLMLVIPGVNIVTCADLAGELGPMALYANANAITGRAGLAPMRYQSDQVDHANGPLRRRANRRLRAVLMQTADNLVQSNHHFRARADLWRRAGHDARWIRVKVAKNFSRLLFAMVGGRQLFPHPCCQQRHDILGKLLGFHTEHHTPLDQMRGDLEAAVEQLPDKSRRQESQPLQEQLDKLASRRGPQPLADILTLVLARLGLAMVQSEDRESAGP

SEQ ID NO: 123166 - protein, 344 aa, unidentified
MNSIKVVGIDLAKSVFQVCVWMSDGTVASNRKIPRNKLLDTLRQFPANTLIAMEACATSHYWGRTFKSIGLLVRLIPTQHVKAFTRHQKNDANDALAICEAALRPGIHFVTIKTVGQQDIKALRSARQLMVEQRTAVANQARALAAEQGIELPVGIHILSQRLPELIEDPALDISPVLRGLLFSLLENLHFLDERIRSTEHNILALCQQLPKYKVLMTIPGVGPLIAAAFLSEVNAEQFTNGRQLSSWCGLVPRQRSSGGKNNLSSMTKNGNRDLRTLIIHGARSVMFWSQKRDDALGSWMKHLIERRGKMKATVALANKLTRIIWRLLTGSENFNINKAFATN

SEQ ID NO: 123167 - protein, 347 aa, unidentified
MRFYTTQHPFYCGIDLHARSMYVCVLSQDGEILLHRNMKAAPEPFLKAVAPYRDGLVVAVECIFSWYWLADLCAAEGIPFVLGHALYMKAIHGGKAKNDKIDSQKIAALLRGGMLPQAYVYPAEMRATRDLLRRRTHLMRKRAELLSHVQHTNSQYNLPEIGKKIAYNANREGVAERFEEAAVQKTIAVDLGLITYDDELLKDLELYILKTAKHHDAHTLYLLQTVPGIGKILSLVLLYEIHRIERFPSVQDFASYCRLVKCSKESGGKRLGTSGKKIGNAHLKWAFSEAATLFLRNNPQGQKRLSRLEKKHDKGKALSILAHKLGRAVYLMLKRKVAFEMEMFLQT

SEQ ID NO: 123168 - protein, 325 aa, unidentified
MQGKLTSIDSAPAVYAGIDVSKDWLDVYVHPSGGRWRLSNDLIGLRRLRRQLEGFVVERMVLEATGKYHRAAHRTLAGWGFPVAVVNPLRARLFAQACGVLDKTDRVDARLLALMGQSLAPAPTALARPELEALQELVNARSAASAEAVAVGNRLKAAQISWLKTELKRRLKNLGAHIDRLAAQIERTIMADPGLAARASILCSIPGIGATVAAALLAGLSEMGTCSGKAASRLAGVAPVADDSGNRQGQRHIRSGRMAPRNALYMAALTAARYEPCLKTFYDRLLAKGKAKKLALTAVMRKLLVLANTLLINNRHYAKIPPITP

SEQ ID NO: 123169 - protein, 341 aa, unidentified
MYAIGIDTHKATLAACAVDELGVALAEQTFANDPAGHQAFRAWASVVAPTGRVGLEGSAGYGAALARDLVAHAFTVCEVPPQLSHRERLRTRRVGKSDPGDALAIARVTAREASLPPVRLADPSRELQLLVEAREDLVSEATRVRNRLHADLVVLLPGYQTKAANLVALRSRRSVGVRLRPLRGIQAELARDRLGRLGRLMAEAQVLERRIGALVAGHPLQAVAGAGPLTTAKIIGEAGDLRRFRSAAAFAMLAGVAPIPASSGQTNRMRLNRGGNRQLNRAFHSIALVQAQHHPPAKAFIARKRAEGKTRREAIRALKRHLARVVFRILVSPPILVEQAA

SEQ ID NO: 123170 - protein, 321 aa, unidentified
MRKVSFDQVIEVGCGIDVHRDNIVATIRRSESDFETREYSSFTSSLTELREWCKQSGVTHIAMESTGVYWKPVFNVLEEEDFEIILVNARHVKNVPGHKTDKKDSQWLSKLLLSGLLKGSFIPPQEIRELRDLVRYKKKIIGQIASEKNRIIKILEDANIKLSSVLSDVDGAVGSKIIQSLIEGNTDSEELSKFYHGKMKTPKEQFKEALKGRLTSHHQFMLKIIKQAMVDKENIVTLLEKQIDEMVKRYAVEIELLQTIDGVGYDTAVTIISEVGADMKVFPNEQHLSSWAGMSPGNNESGGKKKVQEPYTGTNIYNPLL

SEQ ID NO: 123171 - protein, 365 aa, unidentified
MQQIYIGVDFHARQQTICYLKTETGELVISELKHQHKEQVRAFYQQFQAPVIVGLEASGYSPWFETMLEQLGYEVWLGHATEIRRRARWRQKNDRRDAELIWDLMVHDEFPRLHRPALASREVLRMLRYRQKLIKLRTMAKNSLQAIALQAGLAKGPQLFTAAGQAQFRAVSLSPVLHWQREHWFALLQPLHQQLGETMVWFKAHSKDDPDIARLRTHPGLGLLTAVCLVHTLQPVSRFRNARKVAAYAGFDPVERSSAERQRFLGISKAGSRMLRYLLVEAAHTAVRNDEDLKRFYQRLAQRRGRPKAKVAAARKLLIRAYIMLRDEIDYAEFRRRAVAARLARTGQRPKVPDVLIGQPASPGQ

SEQ ID NO: 123172 - protein, 480 aa, unidentified
MAEKPSKPRKHGPAQTGDRRRKQRRKGMCLEDRPVLESNAGAIDIGAREIFVAVPPDRDQDPVRVFETFTEDLERMAEWLLRCGVTTVAMESTGVYWIPLYDVLEAKGVTPCLVDASHMRNVPGRRTDWHECQWLQYLHSVGLLRPAFRPAAEVCAVRALMRHRGELVAMASQHVQHMQKALTQMNFQIQHVISDITGVTGLSILDAILSGQRDPVELAKLRDCRIKVSEEVIRKSLVGNYRAEHLFTLRQSRDLYRTYQRQILDCDQEIEKFLSQFEPRVDPNKQPLPPDRKRYRKKNRKKTSHHCGTGFDLRTEAYKLYGVDVTQIPGLEATALSLFTEVGRDLSKWPTSAHFASWLSLCPDNDISGGRVLWKGMRLVKNRAGQMFRMAAYALHNSQTPLGVYLRRMKAKLGPAAATTATAHKLAVIFYTLVKNQVEYDETVWTRLDVLRQTRLAARLKRQAQQLGYKLIPIESNTAA

SEQ ID NO: 123173 - protein, 419 aa, unidentified
MDLTDLTSTDTEPASPAPPPGLVAGVDTHQDTHTLAVLTAQGAVIATSSFPADQQDYDDLTAHLDRLGPLTAVGVEGTSSYGAGLTRTLRQAGYDTVEVLRPSRRVRRHHGKSDPIDAIAAARTVLSGDGVSQAKDTTGPAEQLRLLLAARTRLISAATAITNSIHSLLTTAPEPLRERYRRLDTPALITRLARTRPTRTITTPQQAATSALHHMARTHQDLHHRAERLNQQMHHILTTHYPGLLAVYGAGTTVAAQLAVTAGGNPGRIHNEAAFAHLCATAPIPASSGKTTRHRLNPGGDRRANAALHRIALVRLRHDPTTKNYANRRTQEGKTTKEIIRCLKRAIAREVYRALTQPPPTDTTSTLAAHRKRHHLTQTDVAHALNTYPARISDIENHRRPLPQLTHRYHQYLTTLDTQ

SEQ ID NO: 123174 - protein, 458 aa, unidentified
MGRKGKRTKGIEEAHPFTGMSRVNPNAAGVDIGAVEIVVCVSGENNTQIVKAFGNYTVDLQSIGTWLKEHKIKTVAMESTGVYWIPLFEVLESMGFKCLLISSRSLRRVPGRKSDIEDAQWIQTLHSCGLLESSFRPQADLVAMRTMLRHRAQLLEHRAPHIQHMQKALLQMNVQLSQALSDVMGETGQAIIRTIVKGERSPQLLAAFRDPGCKKSEEEIGKALTGTWRDEHLFILKQSLELYDFYTQQLEVCDAEIDRMYALIRPDWETGELPPIPQKKRNSHSKNAPENAKEIRLHLKRINGVDLSLVDGFGISLAQTVTMEVGSNVSEKFPTEGNFCSWLGVAPKHEISGGKVLKNKTLKTKNRAGQAFRMAAQSVKNSDSVFGVMYKRFRARQGPAQATVSTAHAIARVVYRMLKYQVEYETISVNEYEKKYEEQQVKYLKKRVAKLGFQLVPA

SEQ ID NO: 123175 - protein, 352 aa, unidentified
MKRETNSAYDNKHLFVGIDVHKKRWVVSVRTYDLELKTFSMFPIAEELEKTLINSYPGALLHIVYECCFSGFWIYDYFHEKGYDIIVTPTNRIYRDGSIVKTDKIDSRKLAFQHSRELLREVKVPIMKIREYRSLFRIYDKEKMREGQILRQVRCILECKNHELKWEKWNKEFIEKLKLVRFQEDIFNRKFEVLIKEYEFVKEQIKDTEKRIKEIGEDEELGTKVKRLEQINGIGVISAVRLTIYLFDMKGRFESGEKLVHYVGLTPGEHSSGEEIIRSRTGLIGSRQLRSIIIQLAWVAVRKDGNLLNKFDRVYKNTGCKQKAIVAVARKLMMKVHAITEKEEAYEINKAA

SEQ ID NO: 123176 - protein, 465 aa, unidentified
MPPAERLLFNTKFKVMQKEKNNKQPKELSIQIINQNAAGIDVGDMFLSVAVPPGRDDVCVKDFGAFTCDLHAIAQWLKKCNVDTVAMECTGVYWKNIYSILIQHGFDVALVNARHTRNVSGRKTDEKDAQWIQRLHTCGLLSSCFLPDDVTQTVRTLVRQRRSLTQDSTRYILRMQKAMEMMNIKLHAVISNILGKTGTSIVEAIIAGERNPEKLLLFVRKGIKADKATLLKSLQANWRSEQLFLMEQSYRMYQFTQQEIKHCDLQIEQALQTFVAVNNDGLIEQITPLPKPRPTTKNKLAFDAYSYLHKIHGIDVTAIYGISEIAALEILAETGTNLSKWPTEKHFVSWLNLCPNNKISGGKLISSQMLKKKPNIASQAFRYAANTLQRSDHWLGDYFRRMKAKGGNKYAIVAASRKLATIYYKMVRYQQPFQPFDNDEYKNKFQRAKIAYLERTLQRLKSEVA

SEQ ID NO: 123177 - protein, 353 aa, unidentified
MNSLTDLREVVDVVIGVDTHVHTHSAAVVDAATGGVLDEITVEATAEGYSELVEFANNHAMLRAWAIEGTGGHGAGLSRHLLEMSEIVIELDRPKRAARRNGAKSDPLDAIRAAREAMARPRLGTPRTGGERQALSVLLAARRSAINASTEAQQQVFSLIIAAPEPIRLRFRGQKLAAMLNTAANLRVHASWDTETTSTVVALRTLARRAHAMLKEARELQKAIVAIIRSWRPDLLEEFGVGPIVAATVLCAWSHPGRIHSEAAFAMLAGVAPIPANSGQVTTRYRLNRYGDRQLNNALHTVVQSRIQYQPATRDYVARRTAEGKTGREIKRCLARYVARDLYRLLENTATAA

SEQ ID NO: 123178 - protein, 392 aa, unidentified
MYIVGIDIGKNHHEASIVSPEGKQIGRSLRFATTHKGADSLMSFIFKNIGNSPCVFGMEATGHYWYPIYSFLKAKGYTICVINPIQSDSLRKMYIRQTKNDSIDSFLIAEVIRFGQFGTTSMADENILAMRQLCRYRDSVISSRTEIKLRIGTIMEQIFPEYEKQFSSLWVSTSMGILEKYLTPENIENAPIDELFEIIKDKSHNRLTKAKAISIKEAAADTFGIKIAQDAFSFQLKQLIDRMNFLDKQIEALDIEIMKYYEQFDCYLHTIPGIGMIATATILAEIGDIHRFKSSSALVAFAGIDPTVRQSGEFSSTHNHMSKRGSPYLRHAIFLAATTCSFHNSPLNAYYKKKREQGKHHLTATGAVARKLTTVIYAVLRDGKPYEPKKFC

SEQ ID NO: 123179 - protein, 499 aa, unidentified
MQRDIFPDRSQVAAELLRSQPSSSVLIVPVDFAKREHVAQICSGTGEFLFQRPIIARNDAPGAAYLIERIEACCRRLGVPRSHVLVGGEDAPSYARNFLTALAAAGLHLLRVQPADAKRYRTNTRATTDKLALNGIAQAILCRRSYDLERLGGLYSTMKGAERTRRRLVWQETAAKNRIHRQVEWLFPGFLSQAQSGLLPFGSASLELMGEDFSVVHIRRLRTETLVRRLKQASVQHPAEAAEKLKALAGKTLAPPAEAIAYGSRSLALQVGLLRGLQGAMKAEENEMARCLAQTPGFLLTSIPGIGVVLAGGLVAEYGDPDHWPDPDRMASYGGIVPRHYQTGGPDAQGITGSLPLDCNHHLKDWLLQAAFHAGTTPHEAWDRMALPGDQHRLYEHYQRVELQEGHSRLSTAKLLLRIGRAMVRDRRAYLPANALDPQAQDALSPEALVQYLGLTAAAVARRWRGYDLSGLPEELNLLQQWHKEIEALTQFHARGTTL

SEQ ID NO: 123180 - protein, 430 aa, unidentified
MDSVNGSRLQQFCQFKSEIRGSTEYLVVGLDIAKEKHNAFFGTATGRTLHRGMFFDNTLEGFHRLLTQVEALKTQYGLSKVVFGMEPTANYHKPLAEHLIERGHMVVLVSPVSAAKNRELLDGRWDKHDTKDAANVADLIAQGKCLYYDYPEAAIRDIRSLLSFKKRLKKEEQALQVRIRNQLLAQYFPEMDRHFRSAVSLAVIRYCLDPSIIAGMEYDEFCRTVAPGRVNFRQQRLLQQIWELAHQSIGCRVGETVLFEAQTMISSLHRVRETIKAVDDKIEELCLPFSEYSFLLTIPGFGPEVSSTVLSAIGNPYRFSCGKQVLKMAGFDLCADRSGKTASHAVPVISKRGKVGLRCALYQAALVASNSNTYFMTYYTKKLKNRAQEQGIGTKMRVKLAAKLLIVAWTLMKKKEVFDPAYLEMGDTEV

SEQ ID NO: 123181 - protein, 346 aa, unidentified
MKKIFIGIDFSKEKFDATLIQAEGLKECAPDVHEVFDNKTSGYHRLVKWVKAHAEGFTADMWLFCGENTGGYSIALCNYLYASGYDMWLECAYNIKHSVGIQRVKNDKADSHTIAEYAMRNYDKMIPYKPQSSSLNALREVFLYRHSLVKQKVALQVRRQEKRLTQESSDIKTFMSFTSKHLLTEVNKAIAKCDQKIKEIIASDDELREVFDIVTSMPGIGVQNATCLMVYTDNFQKFDYDSRKIGCYYGIAPFGRQSGSSINGKPRVSPFANRMIKSLLSQAALAAIKTDIDIYNYYQRLTQRGKHPLLIHNNIKNKMLHRLVAMVRNRQKYNPDHIYRNAKEAA

SEQ ID NO: 123182 - protein, 341 aa, unidentified
MGIVGAFDVHRRQLTFDYLDTVTGEVKRGRILPADREHLRQWLARFAGQDYVHFGLEGCTGWRYVAEELAAAGITAHLAEPADTAALRGKKRHAKTDKTDSQHLRVHLAAGDLPECWIPPGHVQEARAVVRLYKDLVDERGAWHQRIAATLFHQGVPVSASMSTASGRAAVAGMQLSPAGRQAAETALRQIDRLTSELDPLRRQLDMLSRRQPGCRALRATQYGIGPVTSVAIWAELGDVRRFGNSGDVVRHTGLDITVYSSDGKRSAGHLSRQGPQLLRWALYEAAKSAARSAAPDHDYYTATRDRRTGGLATLSVARKLARRCYHTLRELGEEALQPAA

SEQ ID NO: 123183 - protein, 331 aa, unidentified
MKISETVGIDVSKLVVDVRIHSNQCFSQFENSQKGFKRLYEWALKNSGFLRGEMLFVFEHTGLYSHNLAVYFSELKVPFTIVPGLEIKRSLGISRGKDDRIDAAKIARYAYRLRDEIEPYRLPSKQLLELKTLLSLRDRMVRQRAGYKTSLKEQKRVYKSKGNHVLFNAQESLIKQLSKQIDAVDKEMIGIVCSNDQLQLIYKLIISIKSVGQQTALFMIAYTDGFTKFKDSRKFAAYCGIAPFPNSSGTSVRGKTKVSHLANKKIKSLFDLCAKNAIMHNSEMKKYYNKRVEQGKHKMCVINIIRNKLLSRIFAVVNRKTPYVDLLQYNT

SEQ ID NO: 123184 - protein, 339 aa, unidentified
MDLAKQVFQIHGADPAGRCVLRKQLKRREVLQFFAKLRPCTVAMEACGTAHYWAREIGKLGHCTRLIPPAYVKPYVKRGKNGAIDAEAICEAAGRPTMRFVPVKPMENQAIVMLHRSRDLVIKNRTMLVNALRAHLAEFGFVAGKGIWKLPDLVKIVSQAPAEALPELVRTTLSGLLDIIAAISSQLDAIEKRLREWHKKDARSKRLDTVPGIGLIAATACRALVPDPKLFRNGRHFAAWIGIVPKLDGTGGKTRLGRISKAGDRYLRRLFVLGATSLLRSLENKSTRLALWVQALLARRTKRAVTVALANKLARIAWAVMTRDEAYKPLAAAQPAGCA

SEQ ID NO: 123185 - protein, 341 aa, unidentified
MDVHKKTISYCVKHGGGEVYAEGVLNATRGALDGWLKRLPQPWTGAMEATMFTGWIYDYLRPHAAALKVGHPLMLRAIACSKKKNDRVDAGKIADLLRCDLLPESYMAPSALRERRRALRYRNLLVRQTVQMKNKLAGLLMETGVTYNKEKLHQKRYFAELLSHNAEVEENAKPLLKIGRETIERLSQTERALVRTLERDPLLAARLQRLISIPGVGIVTALSWALEMGEVSRFASLKHAVSYCGLCSGENSSAGMQKRSPISKQRNKHLQTVLIEAAKLAPRWNSDLALLYEKEKQRGNHNRATLAVARKIVAYLLAVDRREQPFQGGKKEKAPLAQTAA

SEQ ID NO: 123186 - protein, 345 aa, unidentified
MRKVVKQVAGIDVAQKELVVTLGRMLDDFSIELFSYKVFKNNDSGVKLLVDWVNKLTDYEVPVRYVMEATGVYHQKFAYYLVDNGCEISIVLPNKISNYIRTLELKTITDKTCSQAIAQFGLERKLDKWAKPKSIYKELQQLTRERDQIVQERSVIKNQIHAEKTESEPNQKSLERMQARIRFLNSQEKEIKADITDIVNKDSDLKQVINNITTIPGVGELTAAIVLAETNGFELIRNKSQLSSYAGLDVKEKQSGTSVKGKPRISKKGNRNLRKSMHLPSLTAVKWDENFKNIYAKLISKNGIKMKALVAVQRKILELIYILFKNETVYDKEYITKNSVQTQMV

SEQ ID NO: 123187 - protein, 362 aa, unidentified
MFRPHTLYIRIRIVRKVHEPVFAMRDQDVSDVIKTKNRTAMQYIGIDVSKATFVVAYSSDKGGEIRTFNNTTAGIKQFIGTLPKDGSIHCVMEATGNYSALLLYMLNVAGITVSMENPLKVKNFARAMLSTVKTDKIDARLIALYGEKMNPQPFKVQGEAILRLRQKRTVIRQLTKQITAMSNLRGSLACLPVPDKGATHTVDETIKFLEKRRDRLQSELTDLVEVEFSRQLALLTTIKGIGITLATALILTTGGFTYFQNAKQVSRYLGICPTYEQSGTSVNIRGHINRNGDAYTRGLLYIAAWPASRFNAQCKETYTRLRQNGKPGKLAMIAVANKLVRQAFAVVAHDKEYIDSFVSNRP

SEQ ID NO: 123188 - protein, 321 aa, unidentified
MDENSLTVVGIDVAKRTLEVALPGKKSLEIKNNTKEITNLLKKLPEAGQALIVLEATGGYENLLVGELLVAGYHVARVNPRQVRRFAQALGILAKTDRIDAAVITRFGEQIRPRTLSPLSQPHVELQQLVLRRRQLVDLRTMESNRLEQVTAKPAIKSIRKVLKVIESQIAELDEEIAQRIDSDEQWKNQAALLSSVPGVGTVTAATLITDLPELGELNRQEIAALAGLAPFNRDSGKQRGKRSIFGGRARVRAVIYMAAVTAMRWNPALREFNQRLESQGKLFKVRVTACMRKLLVILNTIKKTQTPWQSPHERAHPAVG

SEQ ID NO: 123189 - protein, 345 aa, unidentified
MHITSIGIDLGKTTFHLVALGERNKVLVRKKFSRAQLLAYTANLPASLIGLEACAGAHFLGTALQGQGHQVRLIPAQFVKPYRKSNKNDFIDAEAIAEAVTKQNMRFAQLKTQEQLDWQAMHRVRDRLVQRRTALINEIRGFLLERGITFAAQPIHLRKNLPVVIEDAEQNLSPRLRWLLDRMWQEWKQIETDIEAITEEIERISNEDARCRQLRQIPGFGPLVSTATVAAIGNGSAFRRGRDFAAWVGVVPRQYSTGGKQKLLGISKRGNIYLRRMLIHGARSVLFRVKYDTGGFGQWVHRLAQRAPRNKVVVAIANKLARIAWAVLSSGQDYRHQPLLQPAAA

SEQ ID NO: 123190 - protein, 321 aa, unidentified
MNKYNEIYGVDISKDVFDVMNTRAVHSQFSNDVKGFKKFAKSLSKDTLVVMEATGYYHYCLAQYLYGQGYLVSVVNPLSVKRFIQMKLSKIKTDKSDAKAICEYATFKEVPLYTAKDKNQAESHQLLRLIEVYSKQSTAIKNKLHGEKTLGFPSKVVYHSLNRSLKSIQREIKVLEERLTELVKGHQQKQLTLLKSIPGMGSKTALLLIVMTDGFSRFENSKQLCSYAGITPTIRQSGSSVRGRSRISKIGNKKLRNLLFLCSFSACKYNKACREIYERIVAKGKSKKLALIAVCNKLLKQAFAIIKSGLPYDEKIVSKLV

SEQ ID NO: 123191 - protein, 438 aa, unidentified
MSNKIIFNLDELFISLGIDVGADFSWMSIALPNQQFVGKPYKILHNSIDSLTTAVSKIKEAEELYSLESRIFLESTGIYHYPLFCYLRDKGFNCSVINPIITKNSTNINIRKVHNDRFDSKKAALVGLKPDLKVSLMPSDLALNCRNLCREYYDLMDNRSAYVNKLQGELRMAFPQYLGIFSKVTINTSLTLLETYTSPSAFLKADKQEIIDIIKSTARFGLTYAQNKYNAIIQAATDANQFGYIIDSNIKRIRLYISFIRKYDEEINSILESLHELVDANEDSDFVKQIHLIETFKGAGFLSAVSIMGEIGDFSAFSKPKQLFAYFGLDPAVKQSGKFEGTKVQMSKRGSAIARRVIHTLTLQSISISRNREAKNPVLREYYLKKCDSKPKLVAMGAVSHKVCNMIFAILRDNKPFKIIAPQEHIKQYNSAKCDIAA

SEQ ID NO: 123192 - protein, 343 aa, unidentified
MQIVRVGLDLAKYVFEVHGVDGRGKVVLRKTLRRDAVSSFFANLPSCLIGMEASNGAHYWARVLSGLGHEVRLISPQFVTPYVKSNKNDRNDAEAICEAVGRPTMRFVPAKSVDQLAVQAVHRIRSRLVSGRTRLANQIRGVLAEHGVIVARNIAKLRQNLADIVGNRGNGLSDLVRALVGELQQELADLDRRITTYDRRIRELYRGSEVCQRLGQIEGIGPLSATALVAAVGDRQGFKNGRQFAAWLGLVPKQRSSGGRDRLFGISKRGDRYLRTLLIHGARAALGRAGGKQDPRSRWLGKLRERRHPNIAAVALANKNARIAWALLSNGEAYDPGQTVGSA

SEQ ID NO: 123193 - protein, 288 aa, unidentified
MKNFSTFIGMDVHKETIAVATAGKHGSPRYYGEIANTAEALTKLVKKVVPSRSKAVFCYEAGPCGYGVHRQITDMGHRCDVVAPSLIPKKPGDRVKTDRRDAVTLVRLLRAEELTAVWIPDQQQEAMRDLSRIREDLKSMERCARQRLSGFLLRNKKVYAGQSNWTQAHFRWLERIIFDSPIQQIVFQEYVDVVKHLQGRVASVQQEMMKALAGWSLGVVVEALMALRGVNLVTAMTIVAEIGDMSRFESPRQLMAYLGLVPSEDSSGKQQKRGGITKTGMDMSGEYL

SEQ ID NO: 123194 - protein, 387 aa, unidentified
MSEMFNPSAAATAFDHTTTIVAVLELSGKSWLFGAVAPGLKTRAKRSLAARDIASVTKALEHLKAQAQKAGLAVARTVLAYEAGRDGFWIARALAQQGIEVHVMHPASVPIERRAKRKKTDRIDVDLLLTTLLGWLRGEPGRCTMAPIPTQEEEDMREPGRRRDALVGDRLKVENRIGALLTRYGIVGFKPRLKSAEKKLAGLKTYDGAPLPPETSKSLKRLLAQHRLLSQQLAEIEEERAKVVEVKTPDRLQRKIQRLAGLFGLGVETATVLVHEVLSRRFKDRRALGAFVGLTGTPYDSGGSKTEQGISKSGNPQVRRMLSQLAWRWLRHQPESELARWFHARLAGSKGRMKKVLIVALARKLLIALWRYVETGEVPAGVRLAAR

SEQ ID NO: 123195 - protein, 458 aa, unidentified
MKLYLGGDASKGYTDWVIISETKEKLLDNFQLDDTFEGHNQLYNAIKSCVDKYPKVEIYAALESTGGYENNWLNTLKGYQKVFNIQVARVNPLAVSHDSKANMTRTVTDAVSALSIAEYLINHPDKIRYEQDTSWKQLRSHWNFVEMQKKQRVQTINQLDVLLYSANPMLLTYKTDKLSKWLLEVIIQYPTANLLAKAKAEKLSKIPYLSLSKAKEIIASVQKSIASAIDKNTGVLIKQIALQIKMFDQTIESQMSLIEKEMVCPEIDILKTFKGIDTTSAIGLVLEIGAVERFHCVKSICSFFGLNPRFKQSGDKIIGVRMSKLGSKNMRKILFNITMGAIVHNPLIYQVYQRKVSEGMSKMASIGVCMHKILRIVYGMLKNKRAFDEQADKQNASRSANKQDEKNQQKNAYILKTRRFQEYDQNAPISIRQTKKRKEHVLSQCEITSHGAGSTHSF

SEQ ID NO: 123196 - protein, 352 aa, unidentified
MMLIGVDPHKSTSTATAVEPESNREVASIRIEATLREYRRLLTWAGRWPQRRWAIENAEGLGRHLASWLLARGEQVVDVPTTATARVRQLSRGGGRKNDRIDAAAAACVAALQGDARPLEAEGTTDVLGLLDERRANLSQARVRAVNQLHALLRALLAGGAPRGLSAAAAAALLRTVRPAGAAERVRKQLAGDLVVEIRSLDSRLKANEAAMAELVKSSGSTLTETVGIGPVTAARLVGRSGRPSRFPSSAAFAAYSGVAPVEVASAEHARHRLSRSGDRQLNSALHIVAVTQIRTAGSLGNIYYRTKMAEGKTEREARRCLKRRLADHVWRTMIADEKRQRAKPASASHAA

SEQ ID NO: 123197 - protein, 360 aa, unidentified
MEEYIVCGVDAHERTLDCQVGVGREEPRRRRFTNTREGRRELFEELGVMREQVGAGKVLLGYEASPLGYVLYDECVEEGMECVVLAPTKIARSVQDRKRKYDERDATRIFEALRAHVLAGNALPAIWIPGLQTRDDREVCRCRLDLTEKLTAVKAQVRMLLKRNRVEKPEEVGGSWTLGDRAWLEGLRLTEGAQAWLSCLLRQVDALEEEIERLDRALVKLAEEDRYRAASQALCGMGGIGVLTAMVFLAEMGDLRRFRNRKQIGAYLGLVPSSHESGEGDDRKGHITREGPARVRKVLCQAVWSRLRTDAGEADAYRRVVERNPKHKKIAVVACMRRLGILMWHRALDAQESSIRATAA

SEQ ID NO: 123198 - protein, 398 aa, unidentified
MTESSDYESVQVFIGVDVGKDTYHAVAINRSGKRLFDKALPNDENKLRSLISDLKQHGQILLVVDQPATIGALPVAVARSEGVLVGYLPGLAMRRIADLHAGEAKTDARDAAIIAEAARTLPHALRTLKLADEQIAELSMLCGFDDDLAAQTTQASNRIRGLLTQIHPALERVLGPRLDHPAVLDLLQRYPSPEKLASLGEKKLAAQLCKLAPRLGKRLAVDIAQALAEQTVVVPGTNAAAVVLPRLALQLITLRKQRDEVALEVEQRVLAHPLYPVLTSMPGVGVRTAARLLTEVACRAFASAAHLAAYAGLAPVTRRSGSSIRGEHPSRRGNKALKRALFLSAFAALRDPLSRAYYTRKMSQGKRHNQALIALARRRCDVLFAMMRDGTFYTPQAS

SEQ ID NO: 123199 - protein, 356 aa, unidentified
MSRDIKYIGMDVHKEAIVIAVLNGSGKLVMESSVETTASSILEFIHGLRGELHVTWEEGTWASWLYDLLQPQVEQVLVCNPRRNALLKEGSKSDKVDARKLAELLRTGMLRPVYHGENGLRTLRELARSYQTISKDLNRVMNRLKALYRGWGIACAGTQVYSLRYREEWLNKIPHVGVRRRAELLYQQLDGLQGLRRILRPELLAESRKHKAVKLLRQIPCIGPIRAARLLALMQTPHRFRSKRQLWTYSGLGIETHDSAQYRYVGGQLQRSKNPQQIRGLNQNHNHEMKEIFKGAATRASCGRGPLHDFYAALLAKGMQPEMARLTLARKIAAITLTLWKGGKAFDAEQLKPQAA

SEQ ID NO: 123200 - protein, 390 aa, unidentified
MLYLGIDIGKFHHAAALMDQRGKVIATLPSFSQTQNGFQKLLALISSQLPPTEELRIGMEATGPYWIPLAEWLKTHGWSPVILNPIKTASLRNYGVRGSKTDNIDSVLIANTLRIEGEQPQPASPKHSDELRHFTRLRADMVKDRTRTALRVTSLLDRLFPELLSSFSKTLSPSCLALLSEAPTPSKVLALGEEKLTTLLHKASGGKLGATRAKEIMDKAAVSVGVTSQALEEVLALLLEQINLIDSQLRTLVHRITELYEQANLYFTSIVGVGTLSAATILGEFGSVSKFAQPKQMVAFAGIDPKLRNSGQHQGQVHISKRGSRYLRRALYLACQVAVRNDDYFHSIYQRHRDKGKSHKEAIIAVMNRFIHVLYAIWRDNRPYYPLTSA

SEQ ID NO: 123201 - protein, 350 aa, unidentified
MIIIGCDYHPAFQQIAFVDTDTGELQERRLQHREEAEKFYRDLAAQGMKVRVGMEASGHGRWFERLLAELNFELWIGDAAEIRAKRVRKQKTDRQDAQLILQLLLEDRFPQIWVASWGNRDLRQLLWHRHRMVQARTRIMNQLQGVALNEGLRCKKRLWRAWGREQLEAFRLAPWASRRRHDLLELLDRLTPTIAELTQAIEQEVEKCPEAQRLQTHPGVGALTALAFVLIIGKAERFQCGKQIASYLGLVPLEKSSGNQRRLGHITKQGSSLLRFLLVEAAQVTARSLPEWRSQYYHLTMRRGRKIAKVAMARKLAVRLYWMMRKEWDYGQLTKFGSYAGKPENRDGVK

SEQ ID NO: 123202 - protein, 414 aa, unidentified
MNRMTDPPRNVTGGVDTHADVHVAAAVCSLSHQLLGTAEFDTTPVGYVKLLEWLASFGQLGWVGIEGTGTYGAGLARFLTAEGVTLIEVDRPDRSARRIHGKSDPVDAEAAARAVLSGRATGTPKTRVGLVEAIRTQQVVYRSAVKDRTAATNQFHAMTLTAPAEIRTDLQAMATKQRFERARRWRGRDGDDVVTRATRQALGELAQRIQLLTEQAERMEAELDVLTELAAPALRDVLGVGVHTAAQLLVTAGDNPERIRSEAAFAHLCGVAPIRASSGKTNRHRLNQSGDRAGNHALWRIAMVRRTCDERTQTYFARRTAEGLSNRDIMRCVKRYVVREIYRALTRPLPLAPRGTEMRQARIAAGLPQRVVADRFGITVARLSRIERCITRDPAIQTRIHAWLTEPATAQIAA

SEQ ID NO: 123203 - protein, 338 aa, unidentified
MKKNYFVGIDVSKQTIDVAFIIRENQQKTQPCWKIFDNNEYGFCQMQTWLQNNHVPFNEDTLFVIENTGLYHRLLVKFCNKHQLQLCIENGAQVKWSLGIARGKSDKVDSRRLAVYAVRFADRLKPSSVLHEGIQAIKDLITLRNRHIVQMSSLQTHLKELKVTTDLKAVKELIKIHVPLIKAMKGVIKKAETAIIKKIEANELTRRQYMLLLSIPCIGPVTASYLIACTNAFTTCNSGKQLACYCGVVPFEYQSGISIKGKHHVHKMANKNLKALLHLCAMSSIKYVAELRNYFNRKVKEGKNKMSIINAIRNKLALRAFSVIKNDKPFVENMCRTP

SEQ ID NO: 123204 - protein, 430 aa, unidentified
MKSNTQNAKIEAITEKTLVLGIDVGSETHYARAFDYRGVEYSKKPFKFSNTEAGFVTFKAWVLDIKEKHGKDKVIPGMEPTGHYWFNLGKFLQDNEMKPVLVNPHHVKKSKELDDNHPTKNDRKDPKVIAGLVREGRYMIPYLPDGVYADLRTVSNIRFQLQAELTRIQNRISRWFNIYFPEYKTVYGKPDAKSGILILKEAPLPEDILTLGIDGVNQIWRDAKLRAVGKARAKTLIEAAEHSVGSKEGAVSARMEIRMLLEDYESRNIRLQEVMGLIEGLVNQIPMAEKLLEIKGVGIKTVSGFLAEVGDIRRFNDPKELQKLAGLALVENSSGKHKGKTTISRRGRKRLRYLLFEVAMSLVAKNPEFRELHNYYTTRRLNPLKKMQSLMAIAAKLLRVFYAILTKGVGYDPKKMVNDIRRPAAYAQAA

SEQ ID NO: 123205 - protein, 345 aa, unidentified
MEAYAGIDLHSSSNFTAVIDETDKKIYGKQLPNKIDAVLSALRPFKENLKGVVVESTYNWYWLLDGLQEHGYRTHLANPSAIKQYEGLKHTDDRWDSFWLAHMLRLNILPEGYIYPKEERPVRDLLRRRLLFVRHRTAHILSLQSMITRNLGMKMSCRAIKRFSGEDAESLFDSPYLVLAAKNSISTIGFLTERIKKIEREVKLILDFKKEFKCLLTIPGIGLILGLTIMLEVGDIRRFAKVGDYSSYCRCVRSERLSSGKKKGENNKRNGNRYLAWAYVEAANFAVRFCPDAQRFYQRKMARSNRIVAIKALSNKLARASYYIIRDQVPYNGNKLFKQSARVQQ

SEQ ID NO: 123206 - protein, 344 aa, unidentified
MDIDILGIDLAKGVFQLHGADRRGHALHSSKVMRAELIGAVRKLQPRVIAMEACSSAHHWGRQFQGMGIEVRLISPQYVAPFVKTNKNDANDAAAIVEAACRPTMRFVTVKTVEQQDIRAVHRARELLVHQRTALINQVRGLLAERGVIMAQTPTAFKRSLPSILANCEGELTSICQTLVTELLEQLRVLEERIARTNQWIMSFMKSSELCKKIETIEGVGPITATAMVAAVGDAKEFKNGRHLSAWLGLVPRQYSSGGKARLQGISKRGDAAGFRSSSHAAKLSGRRHMWTCRRCTANLKFSECEPAIDHFGCYFLCLGCGYRNKLKNVGKPDGPIEFVQVGE

SEQ ID NO: 123207 - protein, 402 aa, unidentified
MNAVGIDVSKGKSMVAIMRPFGEIVSAPFEIKHTASDINSLVELINSVEGESRIVMEHTGRYYEVLAHQLSKANLFVSAINPKLIKDFDNDSLRKVKSDKADAVKIARYALDKWQNLKQYNVMDELRNQLKTMNRQFGFYMKHKTAMKNNLIGILDQTYPGVNTYFDSPARSDGSQKWVDFASTYWHVDCVRKMSLNAFIDHYQNWCKRKKYNFSQSKAEEIYGKAKELVPVLPKDDITKLIIKQAVNQLNSASTTVESLRTLMNETASKLPEYPVVMAMKGVGTSLGSQLIAEIGDVSRFTHKGAITAFAGVDPGVNESGSYEQKSVPTSKRGSSILRKTLFQVMDVLIKTHPQDDPVYQFIDKKRAQGKPYYVYMTAGANKFLRIYYGRVKEYLSSLPES

SEQ ID NO: 123208 - protein, 317 aa, unidentified
MNYFGIDISKSWFDSFDSSTNGHQQFANNVEGWQAFSDQLPENSWVVMEASGPYYLGLASWLADHQIPVSVVNPLVIRRYGQMLLTRTKTDAKDAQLIARYGSEQTLQRWTPPTKARQVMRQLISLSEGLIRQRGIVLGQKEAFSNSPVVDELTIELLDEQLERITDALQRIDRRLKQLTLTHYRTCYEAITTIPGIGPKTAILLICVTDGFTKFEDERKLASYVGICPRIYSSGSSTKGRGAICKLGGSQLRKLLYMCSWTAKKCNPACQQMYQRMKQAGKPEKVIKVAIAHKLLRQALAVGKSGTAFDKKKALAA

SEQ ID NO: 123209 - protein, 368 aa, unidentified
MPSAFILGWKDNRNGHACRALHFVIGGDPDRDTVDLAVLDTGAGRAHAHLADAADGAGYRRMLAWAGENAPGRRIWALEGTGSFAAGLVVFLVDAGETVVEVGALKRARGAKNDRIDAVRAARQALARDEQGAPRSGGLREALRMVFACREGVLISRTKAVNELKSLIVVAPEHLRAQLRGRSLTVQLTRIEHLRIPAAAPVEHRLSIFTLQSIAVRIRFLSQQLAELDPQLLDLIKQHPAGPVLLAEAGVGPVVAAQLLISWSHHGRVRNEAAFASLAGVAPLETSSGQRSRHRLNRGGDRALNRALHTVAITRMRCHPETRDYEIRRSAQGKTHRDIRRSVKRALARRLYRRIEAAVRVDQASAMV

SEQ ID NO: 123210 - protein, 314 aa, unidentified
MSNYIGIDISKATLDVYDGEKSYKFKNDQSGFEQIVSLSRDINNTILIFEPTGVYSYALSAFCSKREISTVLVGPKESRDFARSLKVRSKTDKIDAKILYKYQSHIEPNMVKVPIPNPQALKIQEMLNIYESIVSAKQKFKNQVESTSKEHKDLLRILQRLIDDLESKSQKLFAKIETLLLSDQETKESYDAVLSIPSIGQKSSLYLCAFFLKYPKANAKEITALLGLDPMKRESGTFKGKQRISKQGGQQIRNLLYLPVLCAIQNNGRIKKFYEGLTSRAKSKKLAVIASMRKLILMAFSIFKSKERYQPLAA

SEQ ID NO: 123211 - protein, 337 aa, unidentified
MDRQYVGIDFHRRRSVIVRMSSSGERLAVARVANDACEIAAVIADAGGAPLVVIEATYGWYWMVDLLQELGATVHLANPKALNWGERRVKNDVIDATDLADMLRLGRLPEAWIAPPAIRELRELVRYRAKLVQLRSGLKAQVHAVMAKEGVLPGTLDMFGPAGNRQLDRLELARNYAIRVQSLRELIAVYDGQIITLERDIRQHLRVHRGYRAIQAINGVGPTIAAIIVAEIGDVTRFATPEQLCSWAGLTPKHRESDVKAHRNEISKQGSRLLRWALIEGISRYHGGPLLAAKYREIAKRRGKNRARVAIARKVLTLAYYGLRDGEIRCLASATAA

SEQ ID NO: 123212 - protein, 356 aa, unidentified
MVLSTSTRVELERLEEWALRHTSTEDTLVLEASGNAFAVGARLRAIGREVEILDSHRAGKVGKVYCANDRVDAVKIARIYLSALSPIVWQPDQKILERREIFSAYQAVVKESTRAKQQLRSMLNEHCVRLEKGFRLCHPYAIGRLLKVREWTPARRMLLQQLHGSLLAARARRTMLRRHMAQEIVAEEALLRLSRLCGINLITLYGVVAAVGDVRRFTHSKKLVAYLGLNPSVSQSGNFQGSGALKRHGRGALRALLIQSGKKLLEVNNPLQKWGLAVAARRGRNKAAVAVARKLCVALWHLMMGHAIGTLERLDTLQTKLSKFATEIGPAALTAFGYNNRADFVQKKLYVLRSYP

SEQ ID NO: 123213 - protein, 410 aa, unidentified
MKIAGIDVHKKVLMVVVMDSSAPEEKPARRRFITLPSELQRFRIWLQEQGVEEAVMESTAQYWRSVWLELEPHMRLHLAQAFSNRAPRGRKHDFKDAERLVRRLVAEELILSFVPDGEQRTWRSLTRMKVQLTRDRVRLQNQMECLLEEMRIKLSIVVSNLLGASGLRILHALAQGETDPKKLAELGDERLHCTEEQLVDALTGRVQPMHRGMLGLQLQRLQLIDQQMTQLNHMIAQAMKSNQDAVIRLAEVPGLGVDSAQQIIAEVGAQAGTFSSAAELAAWVGTCPGKEESAEQNQSSRSAKGNKYLRRVLNQAAHAAVAKKGCHFQVVFRRLMPRLGYKSAIWAVAHRLCRVVWKILHEGVRYIEQGHEVGPREKKQRAQMLARALRKLGYEVTLTPINQLAPKPAI

SEQ ID NO: 123214 - protein, 402 aa, unidentified
MHRDSVVATVRVPGKGKSRRRRAQQTRGFGTTIRQLEQLANWLQGFGVTLIGMEATGIYWKPVFWVLERRFECWLLNAQHLHNVPGRKSDLIDSAWCCQLLEHGLVRPSFVPPPEIRRLRDLTRLRSTQMEERSRAIQRLEKVLQDAGIKLSSVASKTYSVSARAMLEALLGGVSDPIILAELAKGKLRAKIPQLQEALANRFELAHHGVLVAQLLAHIDALDETVANLDGRIIEATDPHAELITLLSTIPGVGRYIAEVLIAECGVDMTVFPNAEHLVSWAGICPGTNQSGGKRRSGKTRHGDRWLRTALSEAARAAARTKQTYLASHYWQIRGRRGEKKAIGATRHDILIAYYHITRDQVPFRELGPDWLARRHSVEHRTRRLVKQLEALGHAVTLEAAA

SEQ ID NO: 123215 - protein, 345 aa, unidentified
MPTAEVSTVAGIDVSAHELSVALRRGQGDDKPAMVKFPNQPSGHKALIACLLRGGGRVRVCLEASGNYSLDLALTLQAHRQVEISVINPRRARRFAESLGERSKTDPVDARVLCEYAARMPWVPWQPPSSVALHLRALTRAIADLGVIHTQQNNRAHAAAASQALPILVVKEMQRHQKYLEQRMTRLRREALRLIVRDPELDRRFRLMLTTTGIGETSALQILGELAVLPDMLDARQWVAFSGLDPRLFKSGKSVEKRPRISRAGSRHLRRALYMPALVALRRDPYLRAFYQNLLARGKARLQAVVAVMRKLLHALFAMFRTNQPYDGSKLCAVAMGVNTIAACA

SEQ ID NO: 123216 - protein, 367 aa, unidentified
MQKISTMQASESKNFQAGQLTIGLDLGDRWSFYCVLDEVGKVILEQKLPTTPEATKQVFQKIPRSRIAMETGTHSPWLSRLLTELGHEVIVAHAQKVELITKSTRKDDRHDAKTLARLARIDPELLGPVRHRSAKAQLHLTVIRARAELVRARTALVNAARGSVKSYGERLPKRGTQQVSRGLGAALSPELREVLEPLFQEIESLNERIKEYDRRIEKIAQQEYPETKLLEQVKGVGDLIALTYVLTIEEPHRFRKSRDVGCFVGLQPGRRNSGESEPQMHISKAGDEYLRTLLVQGAHYILGPFGEDSDLRRWGHKLAERGGKNAKKRAVVAVARKLSVLLHRLWVSGEVYEPLRNSQKKMMSAVA

SEQ ID NO: 123217 - protein, 299 aa, unidentified
MTSMTTTAAAVIGGVDTHADTHYAAVLDPVGRLLDSRQFRADGVGYRLLLTWLGSFGAVQCVGVEGTGCYGAGLTRFLRRNQIIVVEVNRPDRRQRRIRRKSDPLDAENAARRALAAQDAVVPKDTTTVVESIRALRIARHGAVKARSAALNQLKDLITTAPDPLRAGLRGKTLRAVAAEATRFRPNAARLTDPTQATKTALRSIGNRVMNLSDEIATLDTQLRHLVATAAPRTMALFAVSTQHAAQLLVTAGGNPHRLRSEAAFAALCAANPIPASSGKTTRHRSTPPVTATPTPPCT

SEQ ID NO: 123218 - protein, 337 aa, unidentified
MSKVTTVGIDLAKSVFQFHGIDASGEVILRRQIRRVQMPQMLSQLAPCVVVMEACGGAHYWARLSRELGHTVKLLAPRYVKAFVRGAKNDRNDARAICEAGCQPGMPTVAVKSETQQGCLALHRVRALAKKQRTMVANQVRGLLAEQGIVLAKRIGTIRRELPGVLPRLEPHLRRALELQWQQLQALDRQIAVLDQELKELASGSATCQRLMRERGVGPVIATAITAEVPEPRVFRNGRHFAAFLGLVPGQDSTGGRAKLLGVTKRGDAYLRTQLVHGARSALRRAAHHDDELSRWAQAVAQRRGFNRAVVALANKLARRLWAILRYGEAFRATAAA

SEQ ID NO: 123219 - protein, 343 aa, unidentified
MQTVTTIGFDIAKSVFQVHGIDAAGEVVIRRQLKRRQVIAFLQVLPSCLVGMEACASSHYWSRELQALGHSVRLMPAAYVKPYVKRQKNDATDAEAICEAVTRPNMRFVTTKTPEQQSGLVLHRTRHLVVRQQTAVINSIRSHLAEFGIVAPIGRNGVEELLNVVADASDKRLPDIARACVAALGAQLRMLKTQILEFDRMIRAWHRSSEMSMRLDHCPGVGPALATALIATVADPKAFRSGRNFSAWIGIVPRQHSSGGKDRLGSISKRGDRYLRGLFVAGALAVIRYAKVHGTKHRPWLTALLARRPTKVAAIALANKIARMAWAMMAKGERYKEPVALAA

SEQ ID NO: 123220 - protein, 405 aa, unidentified
MVFVGIDWAEKQHDVELISESGQRLRSLRISHGVQGLTKLQETISEFASESSQVVVGIESDHGLLVNVLVGSGYTVYPVNPKVAARYRDRQSPGGSKSDARDAEMLANLVRTDRHRHRPLAGDSDHGLEIRARARAHLRAVRVMLRMRNQLRSLLLEFYPAVLPLLAEDDIRDALAILSVAPNPLLGRGLSRSKIESTLRRHGRQRNLETRAIKIQELLRGPQLELKQPRLVSAHSDETASLVRRLLQARQEVALLEEQLGPTFRDHPDADIYLSFPGLADVLGARVLGESGDDPARYLDARSRRNYAGNSPVTRASGKKREVRRRVVRNRRLADATFCWAQSAINVSPGARQLYERLRARGKHHNEALRVVANKLVGILHACLRDRRLYDPDIAWRSQALADAA

SEQ ID NO: 123221 - protein, 350 aa, unidentified
MSPRNAPRPAAVYGIDIGKNVFHVVGLDSGGEPVQRARFRRDTLLQFFERAAPAIVGMESCAGSQWMARRLQALGHKVRLIPAQFVKPYVKSNKSDIIDAEAIAEAATRPTMRFATIKSEEQADLQAMHRVRDQMIGTRTRLINQMRAFCLEYGLALRQGAGLFKLDLPRVLDDASNDLSPAMRRLLTDLFADLRRLEQRIDGMTKEIAAIADREDVARRLMTIPGIGALGATALLAAVGNGRQFRKARDLAAWLGLVPREHSTGGKQKLLGISKRGNRYVRKLLVHGARSCFRHLDRTRDRLGNWLDGLQSRMHPNKAVVALAAKMARIVWVVLTKPGALYERRDPAFA

SEQ ID NO: 123222 - protein, 323 aa, unidentified
MRFVLDILGIDVGKNDLHAVLLQGQKSAVKSVPNSAIGIAHLRQWLKNRKADQVHVCLEATGGWSEAVALPLHEAGHVVSIVNPARIKAFAQSELLRTKTDAVDAALIARFCRMHAPAPWTPPAQEILALQGLVRRHQSLIQIRSEEQNRLQAPIVASAVKESIEMTLEHIARELERVNREIERVFDEYPPLRRQRDLLTSIPGIGETTAARILGEMPNIAEFRDVKAVAAFAGLSPRHHQSGTMRWPSRLAKTGNAHLRQALYFPAIAAIRFNPPLSQFAARLRERGKSKMTIIAAVMRKLLTLAYGVLKSGRAFDPAYATT

SEQ ID NO: 123223 - protein, 344 aa, unidentified
MTYYAGLDVSLRTVNICVIDDDGEFFAETKLASDVQDIVAYLDDLNLEIESIALEAGTLAQYLTYGLQSAGFEVVCMEARQVKGALSAMRNKTDKHDARGIAQILRSGWYSPVHVKSMHSHHIRMLLSSRKAVLSKCVDLENEVRGLFKIFGIKLPPKLGHGAFDVAVRDIIEVDKTLSHALLPLLDARLVLYQTFRVLDNRTRKMAHADPVCVRLMSVPGVGFITALTFKAGVDDPGRFKRSRTVGAHFGLTPRRFQSGEMDIDGHISKCGDADVRATLYTAANALLTRSSRWSPLKAWGMKLAKTRGHRRAVIALARKLAVILHRVWIDDTQFRWGTEGARS

SEQ ID NO: 123224 - protein, 339 aa, unidentified
MSVMIGIDPHKATHTAVAIGQGEEELGRVQVRATRRQVDQLVSWAAPFEIRTWAVESAGGLGYLLAQELVAAGEVVIDVPATLAARVRVLASGSSNKNDPNDAFSVAVAALRTPVLAKVAAADHVEILRLLAKRNTDIGNQRCRVVCRLHAALSELSAGGIAKELNASDADALLAAVAPRTPVERVRHQLALDLLDEVRTLDAQLKASHRRIAEAVRASKTTVTDIFGVGPIIACMAIGHSRDIRRFANRDHYAAYNGTAPVEFSSAGRVVHRLSRRGNRQLNHAIHMAAICQIRQPHSEGRAYFDRKVADGKTKKEALRALKRRVSDAIYRQLLLDTK

SEQ ID NO: 123225 - protein, 346 aa, unidentified
MEKVLFFVGIDIACDDFTAAIVDQPGHVIDTREKVPNRSDGFHDLDTWLGQQGVTMETCVICMENTGVYNEALCYYLAAVGYHVAVVPPHHAKKRFTTLSKTDRIDSKQLAEYACRYYDQLRFWKPREPVLEQIKVLYATREHFTRQLIANKNALTALERKVVKTPLASASYRDMITEITRRIKALDEEIAKLINANPTYKQLSDLADSVPGVGQPLANSLMVITDGFTTNKDHKKLCSLLGLAPHEHQSGKSILYRPRSVGHGNPRIRKLLHLAARSVATHIAEFRHYYLRKLAEGKPKLLIYNNIANKLIKIVLAVVQSRTPYIKGYRSVNPTYLASKTLSLCH

SEQ ID NO: 123226 - protein, 339 aa, unidentified
MKLYGGIDLHGDNSVIALVDEQDGVKYQRRLSNDLPRIVEELLPYQSSITGLAVESTFNWYWLVDGLMKEGYRVHLANPAAMQQYEGLKYTDDNYDARWLARMLRLGVLPEGYIYPKEERGVRDLLRKRGQMVRYRTANLLSVENLYNRNTGRKLRSSEVKKLSIEEAGSLFSATELNLAVKCNVAVMSCVEEQIGILERAVRERTKLRPEYRKLLSTPGIGPILGLTIMLETGDIRRFPQVGDFASYCRCVGSTRWSNGKKKGKGNTKNGNKYLGWAFVEAANFAVRYSPRIQQYYQRKKAKTKGVVAIKAVAHKLARACYYVMRDQVAFNVTRAFSG

SEQ ID NO: 123227 - protein, 339 aa, unidentified
MWYSGIDQHKAYCVITTYGPDGPRVKQARVASTPLAVRQYFAEFPGPHKAVVESTGAWYWLADTLAGVGVELVLAHATRVQAIAAAKVKTDKVDSTTLALLLRADLIPAAHMIAPAQRAPRDLMRTRLRLVAKAVSAQNSIDRLLEKFNARDVDELDKLYQLQANCHAAQIQLLEDQIGTLERALHPHLLPNAEVQRLLWVPGLGKVSAFTIYTEIDGIARFPSERQFFSYCRLVPGADNSGGHTRHRSGSKAGNRYLKLAFSHAGIRAVQYYPEIRGFFKAKARKKPIRIARTLVALELARIVYHVLTKQEAFNGRFKDRPLSRRKHAQWPRRASPPV

SEQ ID NO: 123228 - protein, 326 aa, unidentified
MLEGVNRKEDWIVEESVFVGIDVSKATLDIAMRPGGSRESIPNQEAQIGELVRRLSTLRVTLLVVEATGGVERRIVRALAAAELPVIVVNPRQVRDFAKATGRLAKTDKIDAEVLAHFGEAVRPALRTLPAPASEELRALIARRRQLTEMHTAETNRLAHSAKAVRKRIEAHIRWLEAELDRVDSELDQSIHQSPIWREQEDLLKSVPGIGPVISRTLLAELPELGKLNRKQIAALVGVAPLNWDSGMMRGRRAIWGGRATVRAALYMAALVASRCNPKIREFHRRLRAGGKAPKVALVACMRKLLTILNAMIKHRTRWSVIAEAQ

SEQ ID NO: 123229 - protein, 374 aa, unidentified
MGTGLMEDITYVGLDVHKATVCAAVAEGGRSGGVRQLGIFENRPEVLIKMATRLARGGSRLSFCYEAGPCGYGLHRLLTGRGHDCVVVAPSLIPMKAGDRVKTDRRDAMMLAKLHRAGELTPIWIPDAAHEAMRDLVRARATAVRVLSKARQHLQGFLLRHDRIYRGARAWTLAYRRWLTTVRFDHPAQQIVLQDYIHAVEDAELRRHRLTRQIEELMPKWSMAPVAAALQALRGVALVVAVTVVAEVGDFRRFTNARQLMAYLGLVPSEHSSGSTVRRAGITKAGNALARRVLIEGAWTYRMPARVSRKLHDRLEPLSPVIRDIAWKAQARLCARYRRLAAIGKPKVVVTTAIARELVGFIWAIARVAQPELI

SEQ ID NO: 123230 - protein, 459 aa, unidentified
MSTRNGTSGLGRCRWGPTGREAMGNCAGIDWAADEHDVLVEDAAGDQLLAETFAHDEDGVSALCAALRCFEVEVVAIERPDGLLIDRLLEAGLQVLALHPNQVKAARGRFRASGGKSDRFDRFVLCELARTDRHRFRILEPESDQTKALRASVRAREDLVGTRTGLCNQLRAELERFWPGPLGLFADLDGAISLAFLQHYPSPQDARRLGEKRLAAFLKAHHYPRRRTPRELLDRLRSAPTGRAGQTESDARRAVVLGLVGVLQTLNRQIAALEQQIAQALDAHPDGEIFRSFFRSRDSVICAATLLSEIGDCRARYPHRDAIAADAGHAPVAVESGKRKNATFRWACNKRLRSALGTLAHNSRRWNAWADDRYAQSRARGHNHPRALRTLGRAWSRIIWRCWQNHTPYDPARHTGLQQHLTVTIADPSGPRPDLAATQRMAGAVATHRATRKGRVHSA

SEQ ID NO: 123231 - protein, 347 aa, unidentified
MGSQLTLGVDTHLDVHVAALLDERGALLGVESFATTPDGYRDLLTWAASHGEVVLAGVEGTGSYGAGLTRHLHAEGVKVLEVDRPNRQRRRRRGKSDPQDAITAARAAQSGDAQGEAKTRDGNVEAMRVLRVARSSARKARTQALNQMRSIISTAPDQIRSELRDLNVYRLLERASAFRPGARRDVTSLTKLSLRTLARRALALEAEITDIDVILKELVHDTAPELVARVGIGVDSATALLVAAGDNPGRLRNEATFAHLCGVAPVDASSGKHERHRLNRGGDRQANSALWHIVITRMVYDPRTRDYIDRRTKEGLTKKEAFRCLKRYIAREVYNHLPHDQLAIDSP

SEQ ID NO: 123232 - protein, 404 aa, unidentified
MKETFAGIDWASEEHALCVVDADGGTLAGELFAHEEAGIGQLIARMRGLGVVRVAIERPDGLLVDRLLAAGFTVLPIHPNKLKATRSRFEASGGKSDGFDAFCLAELARTDSHRHRALRPDSDETKALRALTRSREDLVGAKVRLANELRAQLDAFWPGAARLFSDIDSPISLSFLERYPSPADARGLGEKRLAGVLARNGYSGRRSPAELLEKLRSAPEGCAGALEVEARRGAVLGLAAALGPIVAKIRELSAQIAHAVRSHADGDVFLPLFKDPKSVITAARLVAEIGDDRSRYPSSEVLAADAGMAPVARESGKRKVAGFRWACDKRLRDAVACLADSTRHHHPWARSVYLGARSRGLDHPHAIRVLGRAWLRVLWRCWQDEVSYDPAKHGNLRRLQPTGG

SEQ ID NO: 123233 - protein, 273 aa, unidentified
MSIKVVGIDIAKNLFQVCVLSADGQILSNRKVKRDKLLNTVRQFPEQTAIAMESCATSHHWGRIFQELGNRVALIPAQHVKPFVGRQKNDANDARAICEAFSRPDIHFVPVKSVEQQDLKAIRSVRKRLVENRTALANQIRGLAAEYGVVFPLSIKSLRSHLPLAIEDAENQLSHVMRSLLQTLYCKFINISDEIDKVTQSITRLSQQHPRYEAVKNISGFGPILTAAIISEVGSGKQFQNGRQFSAWCGLVPKQNSSGGKSSLGKVRISPAI

SEQ ID NO: 123234 - protein, 415 aa, unidentified
MKFEKDTSGIKRYIGFDIHKEYALVGGQNAQQEWVLAPRRIGMEKLREWAAANLRKGDAAIIETTTNVWDVYDMVEPLVSYAVVAHAGAVRQIAEARVKTDKKDIERLIRLLIADIVPEVWVPPVHVRELRGLISYRNRLVKTSTMIRNRLQSLIHRHNLILPKGALTDKTWWDAQTLSALEQIQIRQELALLEGLDKNKAEVDAELGRQSLGETWGKQAVRLLQLSGFGVVLTMTVLSAIGDITRFESAKQLVGYSGLGAGVHDSGKEHIEKRITKSGRKELRWAMVEAAWRAIRISPYWKEQYEKYLRRMRKPNQAIVVIARKLLVAVWHVLSKEETDIHVSEEDLAYKMLVLAWDLDENVRMGLTYKQFAKYALMKLGVENDITRFVRKNVPRRVAPKAEVLARMEELGLTC

SEQ ID NO: 123235 - protein, 350 aa, unidentified
MQIIGVDLHARQQTLAMLNVETGEIVEKTLQHEGDSVREFYSTLAGPTRVGIEATGSMQWFLELMEELGIDCQVGHPAKIRASEPRKQKHDRRDAALVLQLLVENRFPSIWMPSREQRDVRSLILYRHQWVRIRTRVQNALQAIALSHGLRRGSSLWSERGQQVIASLSLTRYTAERRTALQSLYRHLEEQIDGLNRKVEEVAWQRPQARLLMTHPGAGPITALATEAFLGEPKRFVDGKAVASYVGLIPSEHSSGGRQRLGRLSKQGNPLLRFLWCEAVGHAVRKDAELQRFYQHKLVQKGLGKAKVAAARKLGIRLWILLRDQIDYQEFCRRGQLRQKHGGAHAGVPA

SEQ ID NO: 123236 - protein, 369 aa, unidentified
MTDVTLFVGLDVHKKTISVALVDAAASATVRFYGTIVNTPDALLGLSKKLSKDGQALHFCYEAGPCGYGVQRQLTRLGHRCDVVAPALIPRKVGDKVKTDRRDAMMLAQTLRAGQLTVVWVPDEAHEAMRDLVRLRAQAMRDLRKTRQQLLSFLLRHGLVSPYGHWTKMHRRWLGELVFAHPAQHLAHEEMLQRIERAEALCDRLKGAILDLVPQWSLAPVVQAIQALRGVSLIVASVIVAEVGCFTRFDNPRQLMAYLGLNPSEHSSGSTIRRGAITKTGNALARTCLVEAAWTYRFPARVTQIIRDRLAGLPEPIRNVAWKAQVRLSARYRKLVAAGKPTPKVVVAIARELVGFIWAIARMVEPKFA

SEQ ID NO: 123237 - protein, 331 aa, unidentified
MDETRSEPCFVGIDVGKAHLDIFIYVPGHSAGHPPGHPPGRPSGEGFRLNRDQAGLDDLLARLKPLTPALIVLEATGGFERVVTAALWGAGLPVAVVNPRQIRDFARASGRLAKTDRLDPQVIARFAAAIRPDQRPQPDAAACELADLLARRRQLVEMISAETMRSHQVRLAAVRKRLAAHLAWLEEELSQLEADLDRAVQASPAWRERAALLLSVPCIGDATTRTLLADLPELGSLDRRRIAALVGLAPVAHDSGQHRGARHIQGGRGTVRAALYMAAWIGSRFNPVLKALYGRLRAAGKPRKVALLACMRRLLTILNAMVRDNTPWRAA

SEQ ID NO: 123238 - protein, 429 aa, unidentified
MAEAEEPFAIFVGIDWGSETHQVCVMDAQRKVLREAAFAHSGSGIEELVETVLALAGNEAGRVAAAIEVPRGAIVETLLEKGIAVFSINPKQLDRFRDRHTVAGAKDDRRDALVLADSVRTDRGAFRRVRLGDPLLVELRELSRVHDELKAERNALGNRLREQLQRYFPQILTIDSIYDSGWLWELLEAAPTPELAKRLSLAKLRSLLNRHRIRKVTPEQVREALGATPLHVAPGVTEASRKHVALLIPRLRLAHEQKTQVEHDIEALLEQLAAPVEGKAEHRDARLLQSLPGVGKLVCAAMLAEAWEPLENREYRTLRLLCGVAPVTKRSGKQYAVSMRHTCSRRLRTAIHYWAQGAAQRDEHWKARYAHLRSSGHSHGRALRGIGDRLLATLIAVLKTNTLYDPARRRDVHGPAPLPEQDSAHLCAC

SEQ ID NO: 123239 - protein, 420 aa, unidentified
MEVIYRRCAGLDVHEKSVFVCARIMRGKEVEIIEATFPTFTQDLEELKAWLLRNRIHRVAMESTGVYWIPVWNILEHPRGKFDLVLLNPQHVKALPGHKTDRVDAARIAELAQYDLVRPSFVPPPEIRELRDLMRRRLHVVQDRNRVSNRIHRLLELQNIKLSSVLGKVTGVTSRSILEALATEGTMKPEAFALLATHKRVRSKREQLARALRCQPTEHFRFLLRELLEELDHLTGKIKLLEIRIAERMQPYQELTERLCQMPGIDRITAWTVISEIGVDMSRFPASGNLASWCGLCPGNAASAGKRHSGRTSKGNRYIRRVLVQAAWAAARINRKRNFFTAFFYRISNRAGMKKAAVAVAHRMLTIMYSMIRNGSSYRENGVDYFDRLHPVRTANRLTARLERLGFYVRLEPKLLPETS

SEQ ID NO: 123240 - protein, 334 aa, unidentified
MEKITTVGIDLAKRVFALHGVDGAGRVGLRKTVRREQLVETVAALPPCLIGMEACSGAHEWARRFQELGHTVRLMAPVFVAPYRKSGKNDGNDAEAICEAVARPNMRFVPIKSTEQQAVLSLHRVRQGWIEERTATINRLRAVLIEFGVVLPNRAQHVHRGARAAAEALPELARRAVEDLRAHLGVLDERIAAYDRELEAQARASEAAQRLMCIRGIGPLTAVAMVATVGCARDFRSGRQFAAWLGLTPRQHSSGGKHRLGHISRRGDAYLRCLLVQGARSVLLTAMRHSDRLSRWALSVQARRGYHKALVAIAAKNARIAWALLSKNQTLQTA

SEQ ID NO: 123241 - protein, 462 aa, unidentified
MTIDKRRNRKERKELARRLRSEDPGLEVVHPHAAGVDVGNSAHYVAVRPDRDSQPVRRFECFTADLHRLADWLQSCGVKTVAMQSTGVYWIPLYDILEERGFEVYLVNARHTKNLPGRKSDVQESQWLLKLHTYGLLNNSFQPTSEIRVLRTYWRQRAEHARGIGTCILRMQKALTQMNLQLANVISDLSGVTGQKIVRAIVAGERDPRKLAELSDPRIRASKKEIAKSLEGNWRQDLLFVLHQEIKMYDVYQQRIAECDQQLEKHLAHLANTVPPQATEEAKKNRGKQNKNNPQFHLADELQRITGVDLTRIDGIDVMVAQTLVSEVGLDMSRWKTEAHFASWLGLCPDNRISGDKVLSRGTRHVVNRAATSLRMAATTLLRSQTYLGAQYRRLRTKLGAPKAITAMAHRLARLVYRMLKYGQQYVDKGAEYYERRNRQQQIEFLRKKAATLGLHITLAQA

SEQ ID NO: 123242 - protein, 355 aa, unidentified
MTQQTFNSKYYKTFIGLDVDKSSYSFSINDHSDMKISKRIPSKAEHLYNYIQKHFDSNKVICAYEAGPTGYHLHDYLNSRGVLCFITPPASIPKPANERVKNNRIDSIKILKHLMSGDLKPIRVPYGAYRELRNLVKIRENYATDRKTAKQRIKALLLYANLSTALKDSESKWSCNYIKELKQIDCSFATRKRLDMLIEDLEYARKKLLSTHLMIRSFYKEHQEINENIHYLRSIPGIGFVVSVTLLGKIGDPVRLQNSRELAGFVGLSPREKSTGDTVIRGSITHMGDKTLRFMLIEAAWVAIRKDTQLKQFYNRIRTKNHPKYGSKIAITAVARKLTQIIYRVLKDKRTYIQH

SEQ ID NO: 123243 - protein, 344 aa, unidentified
MEQYAGLDVSLEATSVCVVDATGRVVREAKAPSEPDALVAWFAGQDAAMVRIGLEAGPLSQWLFAGLADAGLPVELLETRHVRAALKTMTIKTDRKDARGIAHLMRMGWFRPVHCKSASAQEARALLTARKLLQAKRHDIEMSLRGVLRGFGLKVGPTTPKTFDARIRDLVEGNDTLAEIAEALLAARATLLRGFRSLESRLLAQARRDVRARLLMTTPGVGALTALTFAAAIDDPARFRSSRMVGAHLGLTPTKYQSGETDVTGRISKVGDHGVRVALYEAANVILTRPVKGSALKSWALAIARRAGMKKAKVALARKLAVVLHRMLRTGEAFAHDGRPAAAA

SEQ ID NO: 123244 - protein, 362 aa, unidentified
MSNSTTWVGMDVHKENIVTVSISGDSGTVMTRWETPNTAKGKERLAGRIAALGKARCVYEAGPCGYDLRRFLDGKGIPCDVIAPSLIPTKPGDRIKTDRRDAEKLARMHRMGELTAICVPTPAQEALRDLVRAREDANEDLVRCRHRLQKFLLRQGRRFEGKSWTREHWRWVRALTFDDANAGTVLAEYVLAVDQQLERVARLDARIEEEAQNPGIAPAVARLKTLRGVRTLTAMTIHSELIDLSRFASPRDLMSFIGLVPSEYSSGGKQRRGSLTRAGNSHLRRVLVEAAWHYRHPPHRTGETIRKRREGQPPEVIETARKAEVRLYRKFTRMVMRGKRTTVAAVAVARELAGFVWAIGRI

SEQ ID NO: 123245 - protein, 343 aa, unidentified
MQAITTIGLDIAKSVFQVHGVDAKGNVVLRRQIKRRYVLAFFQKLPPCLVGIEACASAHHWSRELQALSHTVRLMPPAYVTPYVKRHKNAAIDAEAICEAVTRPNMRFVATKTREQQSCLTLHRTRHLLIRQQTSVINAIRAHLAEFGIVAPVGRNGVDQLLGIVADASDKRLPELARACVAALGTQLGTLKAQILQFDRLIMAWHRSSEASRRLDDIPGVGPALATALVATVADPRAFRSGRNFSAWIGLVPKQHSSGGKDRLGSISKRGDRYLRFLFVAGALAVIRYAKIHGTKHRPWLTALLARRHTKVAAIALANKIARMAWAIMAKGEHYKQPVALAA

SEQ ID NO: 123246 - protein, 464 aa, unidentified
MTRGDRRRNARRERLRAVLPRDGAVIGIDLAEDKQAIAVIDHDVRVLARKTVQVKAFRLGEALDWAVGQARARGFALVTVACEPTGPRWLQVQRLCAERGLPLVCIQPLMSHIAREQQDYTTHKTDEADCVLIARLAVELHCYLPEELDETWAHLRHLGRRRAQLITSATASAQRIRDFLSVAWPTVTETCARPLESKTWLAALQVVTSRCGADPGKLAVMGPEAFTALVRGAVPGWGGKKGWGTICRRIFAALTSTEGVVVSSRRGLLRRCADELGDLQRTRAQLRAVEADMAAVLEELGLSRLADIPALTAVGAAAILAEAGDPRRYDSSSSLVKHAGMSPSDNASGAFYGEAHISRRGRPGLRLTVWRAVWPMLRYNPVMAAKYQAMTQAAGAAAQIAEAQSGAGSRQVSAAAAAARARRAKARVACAASLLRWIYSMVVHDTSWDPAAAAGTASCPAEAA

SEQ ID NO: 123247 - protein, 361 aa, unidentified
MTDRPLSLGHKVRAQAWVVTSISTQPEQLSGPFEPVSARPGGEAIMSQSERVIGIDVSKNLLDVAVVPETETWSVDNDEEGIRTLIKDVKRLRPRLIVLEATGGLETAVVALLAAARLPVVVVNPRQVRDFAKSLGKLAKTDKIDAQILANFGEATKPEVRPLKDQQAQQLSALVARRKQLVEMLTAEKNRLMTAPEPVDSDIKAHIAWLEQRLNDINKDLRKAIKASAVWRAKDELLRTVPGVGPVLSVSLLAGLPELGKLNRKQIAALVGVAPFNRDSGKFRGRRSVWGGRGQVRAVLYMGTLTAIRFNPVISAFYQRLCAAGKAHKVALTACMRKLLTILNAMMKNHAPWQPNFKEAA

SEQ ID NO: 123248 - protein, 386 aa, unidentified
MQTLNDFSRSRIALEPNATLIAVIEMSLSSWLVAGILPGVERQPLKKLAVDESALLKLLQRWREEAEKAGRRIERIAVAFEAGRDGFWLARWLKARGIEAHVIHAASVAVSREHRRAKTDRLDTALLKRAFLGWLRGERDHCKMVAIPTIKDEDAKRPNRERENLVSEQSRIINRMKATLIRLGIRGFNPKLKRAAGRLEDLRTPGGEPIPPNTLAELRRDMERRRLVRDQIRQIEEARLERFDHAPGDGSHPMVRLLARVIGVGIETADMLVHEVLSRNMRDRRAVARYAGLTGSPDESGRKRREKGLARSGNGRVRHGMIQLAWRFLLHQKDSALAQWFRARTENARGSRKRMIVALARKLLIALWRLVRQGVVPDGVVLRPAQ

SEQ ID NO: 123249 - protein, 413 aa, unidentified
MDVLHPRCCGLDVHKNSISACILVQEAGRVQKHQRRFGAMTQDLQELANWLRQFEATQVAMESSGVYWKPVWNILEGQFTIVLVNAQHIKNVPGRKTDQKDAEWIAQLLQHGLLRPSYVPCEVIRDLRDLTRMRASLSQEASRISSRVQKVLEDANVKLASVATNALGKSGRAMLEEIIAGQNDPEHLASLALGHLRAKAPQLRLALEGKIRPHHRFLLRRLLDQLRFVEHEIVLLGERLEDIGRERPELSQAVARWDTIPGIDRVAGWTLLAEVGNTMAQFPTAEQLASWASLCPGNHESAGKRLGGTTRKGSPWLRRMACQCAWAAARTKNTYLSAQFRRVAARRGSKRAIIAVAHSLVIIGYYMQKNQRNYEDLGGDYFDRIDSDGLKRYFVRRLEKLGHKVTLVPIKAA

SEQ ID NO: 123250 - protein, 419 aa, unidentified
MTLNHPLHDPLIAGMDTHRTTNVVHLENGRGESLGKPLRVSNNRPGIEGLAAQLDAAARAGGYDGIVLASEATGWYWLGAFYTLLTTCHVPTRLYALNPRLTANYKKVLMNDDHADVSDAAVIAERVRMGRDLPAPFAPETVYAPLRLLTRYRFHLMQGAVREKAYAATLVYLKASAYTAPERAAFSEVFGPTSRAVLTEFATCEEILAMPLADLAHWLDAHGRHHFADPTATARQLQAVARDSFVLPAAFAPALNDCLAVAVEQLAVLERQIQRLDAAIAQRLQAIPNTLTTIPGIGPVFAAGLIAEIGDIRRFDADDDKVAKYAGLKWRRHQSGEFEAEDTPLTLHCNHYLRYYFVEAAESLRNNEPEYAAYYAKKYAEVSKHQHKRAVVLTARKLVRLVTALLTTNQPYRAGRADG

SEQ ID NO: 123251 - protein, 345 aa, unidentified
MSQIKRIGLDTSKAVFTLHCVDESGKAVLRTNLRRAQMATFFKNLAPAEIALEACGSSHHWARELAALGHEVRLIPPQYVKPFVKRAKNDRNDAEAICEAAGRPGMRFVPVKTATQQAEGMVLKVRETLVNQRTQLVNALRGHAAEFGIIAAKGISQITPLLEAIEAATTIPSEAREMLTLLDQEIDHLDTRLEEIEVKLTAAHKANALSQRLATIPGVGRIIALTLAIEVDPMAFESGRHLAAWIGLTPKEHSTAGKQRMGGISRAGNERLRRLLVTGATAVIRFATRPGNKHASEWLLNLLKHKPRKLVAVALANKIARIAWAMMRSGEAYRRSTGIAATVAP

SEQ ID NO: 123252 - protein, 552 aa, unidentified
MKITLMDHDNTVETESAPAGAETDSVSTVSREYGIMRDVSAMATADAPTFIGAMCPTCRLSSARPMFNGRAAVELHGGVLPRQDFTSIPPKPSPCSYKEGQDMAGKTNRFEEVRRFVAGVDLAGHADHYVCGPRKDDGTHDIEHFGTTTNELKRMVAWMKERKVESAAMESTSVYWIPVYDTLESAGIEVVLVDTRTVKMVPGRKSDVKDCQWLQRLHSCGLLRGAFRPPEAFNAVRSVIRERGNVLQMRTQAIQAAQKALDQMNIHLHHAVSDIDGVTGMRILGAITDGERDPHALAKLRDKRCRKSESEIAEELTGNWREEHLFNLKQAYRTLCFLDERVAEYDRQIREMYARIAETFPPTDPPPGGGGKKLKDKEDANAKADLARICGGFDMTKIDGIGYDSAAAILAELGPDLSAFPTERHFVSYIGTAPSLGKSAGKNVSTRNKHKNTSRVGLILKMSASALFRSESSLGARIRCVRSRTCSRTAIKDVAREMGKRIYRGIKHGQAYVDEGEQAYMNRTRERTIRSMKKKISTLGISAEELGIRIAS

SEQ ID NO: 123253 - protein, 313 aa, unidentified
MITIGVDAHKGVHVALALDEAGQELSQWQGLNNAAGWEAISQWAASLGSPRQWGIEGAWGYGRNLAQHLVAAGETVYEVNPRWTAMGRRSARKPGKTDRLDARAVALLVRQEASALPRVHAEDDTAVLDLLTREREAAIAESTRLRNQIHALLLQTDPGYRAYLPTLKSQAALDALESYTAPGSNPLQAQRAAAVRRLTQRLRLALSQAEELAREIRDLARNRFSPLTNLCGINLITAGTLAGILGPGHRFATDAQLAAYAGVAPLEASSAGLVRPSPEPGRQSEAQCRALSYRADPGAPPACSQGVHRPASH

SEQ ID NO: 123254 - protein, 348 aa, unidentified
MQITIVGIDLAKNVFRLHGCDRQGRAVLRKQLTRGQLLAFVAQLPACTVAMEACASAHYWAGKIEQLGHRVRLISPRLVKPYVKANKNDANDAEAICEAAGRPSMRFVPVKTAAQLEVQALHRVRQQLVKSRTALINQVRGLLAEHGIVIPQGRAQLHRALPRILEDADHRLSGVMREILSEVGERLKYLEDRLHQYELRIERLFRQDQRCRRLAEVEGVGPLIATALVAAVGNAAEFRSGRQLAAYLGLVPRHRASGGRTIMQGISKRGDRYLRSLLIHGARAALWTSARRGDQRSAWATRLKVRRGSNVAAVALAHKNARVLWALLRSGEAYRAAPGCPRIAQAVG

SEQ ID NO: 123255 - protein, 420 aa, unidentified
MQVVYQTCCGVDVHKSFLVATIIKTTSGVEPSYQKKRFSTFNNSILQFKDWLIKNDCHDICMESTGKYWVPVFNLLEDEINVTIANPKWVKAVKGNKDDTKDSKWIGDLFRLGLVRESFIPCKEIRILREYTRYRYKLTSCKSSEKNRFQNALTVCNVALDSVVSDVFGKSATSIIDYLIEQSDNSINHEEISSRLLRSLKKKSDSVIESIDGYQMTDSQKYRMRLIRAHLDYITSTINDIDTIIESLIAPYENVVQLLCTNPGIERDSAITITSEIGTEMAQFSSSKRLCCWAGLTPGNNESAGKKKSVRITRAGVYLKPALVQCAHAAVKSEKNPYYKIKYERILKRRGKKRAIIAIARMILTSIYHMLSTGEVWNPSDLYKVDMPEPLKEKQKEKAIKQALKLLKSEGIIPDSLEVS

SEQ ID NO: 123256 - protein, 339 aa, unidentified
MKYTPVGVDIAKHVIQIHFINEHTGEVVDKQLRRQDFLTFFGNREPCLIGMEACGGSQHWARELTKLGHKVRLLQARFVKAFVMGNKNDVMDARAIWMAVQQPGKEIAVKTEEQQSVLVLHRTRMQLVKFRTAQINALHGTLLEFGETIHKGRAAMEREFPEALERMKERLPPYLIMVLENQYNRLNELDSLIEDIEKQLTSVARQNETCKRLLDIPSVGPLIATAAVATMGEASAFKSGREFAAYVGLVPKQTGSGGKVRLLGISKRGDTYLRTLFIHGARAVALVAKEPGPWITELKKRRPASVAIVAMANKLARTVWAITAHDRKYDRNHVSIRPY

SEQ ID NO: 123257 - protein, 334 aa, unidentified
MKQLVIGMDIAKTVFQLHSVDTNGEVKRLKLQRNEVMPFFTQLAPAIVAMEACGGAHEWGRKLSALGHQVKLLAPKSVRPFVQRNKTDAADAKAIWTAVQQPEARTVALKTEHQQGVLALHRMREQLMKFRIMQTNALRGILYEFGIVLPAGYPALTKAWTDALAEASERLPEVLVVSLQEQWARVQSLDREMAVIERRLTDSLRRTEQCKRLIEIPGVGLFTATAAVATIGDPATFKSGREFASWLGLVPRQTGTGGRVRQHGISKRGNVYLRTLFMHGARAIVARRGHSPWIEALLKRRPYSVVVAALANKLARTIWAVLSHGTRFNAPVPA

SEQ ID NO: 123258 - protein, 413 aa, unidentified
MDVVVSRCAGIDIGKAEVVVCLRVPGARRKRVSEVRTFRAFTGEIVRLAAWLTEHRVTHVVMEATGQYWKPVWDVLAECGFELMLVNARHVKIVPGRKTDVADAAWLAELLEHGLLRGSFVPPRVIRELRDLTRYRKRLVQTHTSEGQRIAKILEDAGIKLDSVASHLLGVSGRAMLRSLIAGQRDPDQLAELARGRLRTKIPALTAALEGRFHQHHAVMIALALDHFEYLERMVVRLDERIDELMVQHAVARDRLDTIPGVGKRAAEVIIAEIGADMSVFPTAGHLASWARLCPGNNITGGKRKSGSTGGGNRWLRETLVECAWAASRQKDTYLAAQFWRLARRIGKKKAALAVGHSILVIAWHLLHDESTYADLGSDWFVRRIDNNTRRRDRLIGELQGMGYRVQLDKAAS

SEQ ID NO: 123259 - protein, 355 aa, unidentified
MNDIKYIGLDVHLASISIAVLNAAGKLIMEVTIESQAAAVLDFMGGLRGALHVALEEGTYAEWLYGLLAPRVAQIVVCDPRQNPRRLGEKKSDRLDARKLAEGLRLGTLKPVYHGHPQGPALRELARSYRTLVSDTTRVMNRLKALYRGRGIRCAGTRVYSPRFRPQWLEQVKEPGGRCRAELLYQQLDLLLPLRHQARAAMLAESRRYAAQKILRSIPSLGPVRAALLMAWLKTPHRFRGKRQLWTYAGLALVTRSSADYRVVDGELERSRRRALILGLNANHHHELKALFKAAAASALARPGPLQEFYARRVAQGMKPELARLTLARKIAALALTLWKKGERFNVAHLKPQAA

SEQ ID NO: 123260 - protein, 428 aa, unidentified
MNFNTQNAKIASITEKTLIVGIDVGSDTHFARAFDWRNYEYTKKPLEFSNTEAGFQMFKAWVEDIAEKQGKTDAIPGMEPTGHYWFALGKFLQDSGMKPVHVNPHHVKKSKELDDNNPNKNDRNDPKTIAALVNEGRFSYPYIPTGIYAEIRSLSNLRFQTQEELTRIRNRIARWFAIYFPEYKDVYGDLMAVSGRMILKEAPLPEDIRMLGVNGVNQIWRNAKLRGAGMKRAKTLVSAAEHSVGSKEAPETARIELKNLLNDMDVYATRLEEILQNIEGKLKTIPYVDKLMEIKGIGLVTVSGFIAEVGDIRRFDNPKQLQKLAGYAIVANDSGKHNGESRISYRGRKRLRYVLYEAAISLVGKNAEFKEIHEYYRTRKENPLKKMQSVVAVACKVLRVFYAILTKGVDYDPLKLISDIKRPQLQAA

SEQ ID NO: 123261 - protein, 374 aa, unidentified
MRNVCGLDVHKDSVFMCILKENGEKIEEKFGVLTPELDRLRDLLVSHLVGEIAMESTSIYWIPIWRVLCSDFNVKLVNPYFIKQLPGRKTDAKDAQWIATVLQKELIKGSFIPEPIVQELRLYDRRIFYLNRNLQRAEQSIDLILQRCNIRLSNYVSDIGGKSMQKVIDAIIQGVMEPEVLLSLVHKRTRNKHGDDTIKAALTGIISKADRMMLKLSREETLMYERQIEECYEQMREICSSYFSEEIELLETIPGIKEDSAMRMIAEIGVDMKAFLTASAIVGWAGLKPRNEESAGKIKGRKTLHGNKYLRVLLIQCAWAACRTKQSRFFYKYSTLSKRMNHNKALLANARKLLVIIWNILKKKQSYVTTLRVA

SEQ ID NO: 123262 - protein, 344 aa, unidentified
MLHAGLDLSRARLDVCLVDESGEFVAHTAAPPDADGLRHLADRLRGHRVRAVIESMTGARFVHDALEEFGWEVLVADAQKVKGLAPLACKTDKIDARVLAELSWRDLVPVIWLPDPSIRRERELARYRLHLVRHRTTLKNRIHATLMTFGHPCPVSDLFGLAGRELLDRLALPDPWRRNVDASLELIDDLELQIAQLTVEMRRQGADHRYIPLLVTAPGFGWINAFTVASEIGDIERFASPAKLCGYTGLCPRVYQSGNSDRRGPITKNGSRYLRWALFEAAMHACTHPVYKERYQRTKRRLGRQRGPKVAQIDLSRKLTEAIWHMLTRNQPFAPAGAAFRLAA

SEQ ID NO: 123263 - protein, 366 aa, unidentified
MGWTPPRRPRCARVVAFVTTEQEASVSEVSTIGLDLAKHVFQAHGADASGKVVFRKRLRREKVLEYFASKPACLVAMEACSSAHHWARELARLGHAVRLIPPAYVKPFVKRQKNDTTDAEAICEAAQRPTMRFVAVKSETAQANAVVFRARDLLVRQRTQVINALRGHLGEYGLVVAKGPGHVSKLVEHVENPYSGVPDAASPVLRTLVEALRFVSERIDLLDREIARRARDDDEVRRLTSIPGVGPITATALAALAPPADAFRKARDFAAWVGLTPLQHSTGGKQKLGTTSKMGERTLRRLLIIGASSVVRKALRQGIAAVSWLGRMLARKPRMLVIVALANKMARIAWALQAKREVYRAPTVVA

SEQ ID NO: 123264 - protein, 372 aa, unidentified
MLYLAIDQHRKQLTVNLRNEEGDVTLKRQVSTEWKRVREFLEGVRNQSLPEGGFVAIVEVCGFNDWFLKLLAEYGCRVIVLVQPEKRSKNKTDRRDADALGELLWTNRQRLMAGKKVQNVRRIVPPSECDAADRQLTAVRQRQGQLRTRTINRVQHLLLKHNLQQECSTKGLQTKAAAKWLAKLPLGTMDRMELDQLLAQWQLWDKHIAELEQKIVERKAENKSAGLIATIPGAGGYSSLALACRIGSIDRFPHARSLAHFGGLTPGCRNSGDATRRLGSITNCTLGEFVFQVIHLSSRIHDHARHRGAIASHSNFLMGGILALLTSLGLVTLAGWFLTVFMPLYGFACIVYVTVFMAMVCLKFREQFGEET

SEQ ID NO: 123265 - protein, 404 aa, unidentified
MSELGCGVDVHRDLLVATVMGDSFKETKRFVNDVGSINGMKEWLKGHGCRRVVMESTGIYWVPLYLALEEAGFNVLLANAWQVKAIPGRKTDQTSSEWLAHLLRSGLVKASYVPEKRVRDLRELTRLRVKLVGTRTAFKNRCHKVLNRVNIRLGSRLSDVFGKAGSEVLEGLMEGKTVDDILEHTSNRWLKKRGDEIKEVVKGVLSQSDIFVLKHCVDMVKQADEKVLMMDAQIETLVNEHDVEIVASVPGVGRKSAAAITAEIGDAKRFLDGKKIASAAGLAPSVYQSAGKCFTGGITKQGSKWLRRIMVEVAHVAVRARDSKLRAFYLRVKARKGEKTAIVAVARKMLTIIHHLLVNGEKYVEEGFEKRFRSKGSARLRDVPLEEMVVVLRESGYVVRGPFG

SEQ ID NO: 123266 - protein, 317 aa, unidentified
MREFIMAGCDLHEGSMTLKVAVGTAAAEKWVVVNDARSRKKMIVRLKALSKAHRGMPILFGYEACGLGYYLRDELEAAGIRCLVLPSTSLPKSPKNKLNKNDEKDADRILAVLRSMQGGQVVSEVWVPPAEMRADRDLVRTRVSAAEKLASVRTQIRSLFKRVGRKCQGTTSRQDREWLQKQVERLPSGTAEALDSLLRQMDFYEREVAHLDERIHRLAESPGYRKLVEALRQEKGVGELVAMVFLTEMGDCLRFRNRRKVGGYLGLAPRSDETGEANDRKGHITHQGPGVVRKMLCQAVGVRTDASRRPRPATRSW

SEQ ID NO: 123267 - protein, 392 aa, unidentified
MSSKSERVVIGMDPHKRSATIEVMTCDETIHGGGRYGTDRDGYAAMLRYAKQWSERVWAIEGCAGIGKHIANRLLADGEQVVDVPPKLSARTRVFATGQGRKTDATDAHSVALVGTRMSGLRPVVNDEQLAVLRILVDRRRSLGEDHTRMVSQLHQLLLELIPGGAKKDLSARQAKALLAKVRPRDAAGKTRRRVAAELISDLERVYARKKAANKELTELLAATDTSLLDLPGIGPSGAARLLVEVGDITRFPTKAHSASWNGTAPIDASSGDQVRHRLSRGGNRQINRVLHIMARVQIRNPSTGRDYYDRKKADGKAPMEAMRCVKRRLSDIVFQQMLNDAIRHSGTGPGGQLGNDSDSSAAGSHPDAGSSDKPLPGPAKAKPKTPLRRAS

SEQ ID NO: 123268 - protein, 349 aa, unidentified
MTKISMIGLDLAKNVFQVHGIDAAGKVVVRRQLRRRQLEKFFAELPAGVVVGMEACSGAHHWGRVLERLGHEVRMMPPAYVKPYVKRNKNDGRDAEGICEAMGRPTMRFVPVKSLERQAVLVLHRTRRLLVRQRTMTGNAFRSALAEFGLVAAQGLKGLRSLMEALADPASAIPDRARLPLRVLDRQWETLNADICKLETEIVRAAKTDEVARRLMAIPGLGPIGATAILAAVADIRVFKTARDFAAWLGLTPRQFGTGGKHSSGGISKQGDRTLRTLLTVGATAHLRYERVRDTKDPWLQALLARRPFKVAAVAYAAKMARIIWAMLVTGEHYRAPNRRHSGSVQAAA

SEQ ID NO: 123269 - protein, 355 aa, unidentified
MKNITRVGVDLAKNVLQVCGVDALGKVVFNKSLSREKFLPWCSAELEPGCVVAMEACSGSHFWARELIKRGFNAKIIAASHVSPYRMEGKGGKNDANDAAAICEAVNRPSMRFVPVKSSNQQGILCVHRLREGLKEERTSCINRIRGLMAEFGIVVSRSPDKLRENLQDLIEDAENGLDWLARLAIQEQYAHWDAIDQRIAWSDQRINAHIAEDAQAKVAKQLIGVGPLTASALVATVVDFKQFKNGAQFGAWLGLTPRQSSSGGKAKLGKITKKGDTYLRTMLIQGAKAAVMTAHKRDDPISKWLLNLKEKSGWQIAAVAMANKNARIVWALMTKGTSFDPRHISVQQFRVSEA

SEQ ID NO: 123270 - protein, 343 aa, unidentified
MKVTTIGIDVAKSVFQIHATDERGDVALRRRLRRAQMVLFFSNLAPCLIGMEACASGHHWARKLSALGHTVRLMAPQFVKPYRKNDKNDGNDAEAICEAVQRPNMRFVPVKSPAQQAELALHRVRRRLMGQRTALINQLRGLLAEYGLVLAQGANHVRGKLPALLESSSESLPPLALELFRDLYEELQALEQRIALCDRRVQRLYRDNPLCQRLGQLEGIGALTATAFVATVAHAAQFKNGRQCAAWLGLTPKQDSTGGKTRLLGISKRGDVYLRTLLVHGARSLMRHTPKRSDLKSRWVEQLRRRRGENIAAVALAAKHARILWAFMVKGESSPQEAFDPQH

SEQ ID NO: 123271 - protein, 474 aa, unidentified
MIPKRMTSKGKQTPLKRRRQKRMHQRGTPQSMPVREAHAAGIDVGAREMYVAIPPDRDSEPVRVFPTFTCDLEALADWLVERGITTAAMESTGVYWIPLYQILEDRGVRVYLVNARHMKNVPGRRTDWHECQWLQYLHAVGLLRAAFRPEPEVVAIRSVVRHRRRLVEAAGVHIRHVHKALTQMNLQIHHVINDITGVTGTAIIESILAGQRDATELAKLRQPEIRADEETMRKSLEGDWRREHLFALRQSWELYGMYVRSIEACDQEICAMLGEREPKVDPEKKPMPSDTKRRTKRKHQRTGDFRFDVRTEAYKQFGVDVTRIPGLEGIALVLYSEVGNDMSRWSSASQFASWTALCPDNDKSGGRVLWTGVRQLKNRAGQLFRQAANSLHHSQTHMGEYLRRMKAKLGAEAGITAAAHKIARIFYAVVKNQVEYDQTTWHLQDQERQRRLEAKIRRQARGLGFQLVPIQPVP

SEQ ID NO: 123272 - protein, 475 aa, unidentified
MNVKGTKKKNQVVTANIFEQQEFLKKAEAIKESLTASTWRELETNGKFDKNEKLSFISDDMLILGCDVGSETHYMRAIDTRGRELSKSVYSFNNDSEGFQSAKEWEVQIAVEHNKSQIVLGLEPTGHYWFCLAAWMISNGISVVQVNPYAVKQTKEVEDNSQMKDDRKDPKLIANLVKDGNFGMPYLPEKLYAELRRLSMFRDQLNEDRIRTVNRMHREMKIYFPEYKDALGKVDGAFSLELLRQAPFPDDLISLGEDGIRKIWHDAKLRGRGYSRAGEILQYAKVSVGIKDGAIAGKAAVKWFVQKILELDAELAVIENQINQKCQEIPHAGNILEIPGIGENILSGILAEMGDISRFDDVKEIQKLSGLGLVACSSGKHKGETRISHRGRKRLRYWLFQAAKSAVAHAEEFKELHIYYTTRADNPLKKMQSLIVIACKLLRIIYTILKKGMVYDPKKMLMDIRRVEKKEAIVA

SEQ ID NO: 123273 - protein, 407 aa, unidentified
MEVLYPRCAGLDVHADSVTACVRVASGQDVVYQHRTVSTTTHGLLELADWLTAAGCTHVAMEATGVYWKPVWHVLEGPFTIVLANAMHIRNVPGRKSDTNDATWIADLLAHGLIRSSFVPPAPIQELRDLTRTRKQLVREIARHTLRIQKTLEDANLKLTRVVSDMLGTSGRAILKALIAGETDPTRLADLTHGRLKASRAQLVDALHGRVTAHHRYMIQLHLTQIEALEAAVTDLEAHLGDALAPFRAAINLLTTMPGISDTAARVIVAEIGIDMTRFPTAGHLVSWAGLCPRLEISAGKRHSTRTRHGAPWLKTTLVQAAWGATRKKGSYLQAQFLRLKSRRGPKKAILAVAASMLTAVFFMLRDGVEYHDLGPQHFARRDKDQIAKRLVQRLRDLGVNVEITAA

SEQ ID NO: 123274 - protein, 321 aa, unidentified
MTYVGIDVSKATFIVAYSSAKSSKTKTFKNTTKGVHEFIQTLSANEHHCVLEATGNYSSLLVYLLSRANITVSLENPLKIKNFARVMLSVTKTDETDARLIALYGQRMQPAPYKLRSDAILTLKQKRTVIRQLKKQLIATRNLKGSMEALPFFDPKCKKAIEKTIVFLEKQTKGLEEELAALAQSEYKKQIDLLTSIKGIGVTLAAALIMATGGFTYFDNAKQLTRYLGLSPTYQQSGTSVNVKGHINRNGDSSLRGQLYIAAMASLRCNAECKECFDRLRSNGKPGKVAVVAVANKLVRQAFAVVTQEKPYVDGFKSKKP

SEQ ID NO: 123275 - protein, 341 aa, unidentified
MKKFIRIGVDLAKNYFQVHALESENGPAVMRKLKRSKMHEFFSQIEPCFIGMEACGTAHYWGRELKAMGHEVLLMPPAYTKPYVKRGKNDAVDADAICEAMSRPGMRFVPIKSPEQQATLMLHKTRELLVKQRTMSVNALRGHLSEFGIVAAKGIGRVDELLDLAESDATLPNAARASVKVLAQALEGLDKAIDDLEKEISSAHAQNEMSRLLDKVPGIGKLIASVIAASVPDPSVFKSGRDFAAWLGLTPRQNSSGGKQTLGGITKQGNRYIRKMLVLGATSLLNVVGKRKGALRDWIVGLLAKKPARLVTVALANKLARILWAMMKTGECFRTEMFAKA

SEQ ID NO: 123276 - protein, 361 aa, unidentified
MKIVGCDLHARQQTIAMVDTETGEFTEKTLFHEGDAVRAFYAALEGSVVVGIEATGAMQWFLELLEELGIECRVGHPAKIRAQETRKQKHDRRDARLLLQLLSEDRFPEIWMPSIELRDLRTLLRDRDQWVRMRTRLQHTLQAIALNHALRQGRALWSAAGRSVLQALPLPPYTRQRRDQLLGLYAQLQKRIEELDKEVEAARQRPQARRLLTHPGMGAVTALATDVFLGDPSRFATGNQVASYIGMIPSERSSGKRQRLGKMSKQGNALLRYLWTEAAMSTVRKDPELQRFYRRKLIQKGMGKTRIAAARKLGIRLWIMMRDQIDYEQFCRRGRLRQKGKSHAGMPDFNSACNAVTGSTE

SEQ ID NO: 123277 - protein, 408 aa, unidentified
MLARRGVCGLDVHKDSIKACVRVPGEGRKRDQHIATFGSKTEDILALRDWLEQWKITDVAMESTGEYWKPIYYLLEDRFHVLLANAAHIKNVPGRKTDAKDGAWIAQLLECGLVAKSFVPPGPIREIRDLTRYRKTLIRQRTEEVLRLHGVLQRAGIKLSSVASNIMGVSGRAILKALVKGEKDPEAMAELARGQLRVKIPLLKRALEGQFTKHHGQLVSHMLSHIDYLEEMIADISKELAELLVPYEPQLALLETIPGVQRRTAEMIIGEIGVDMSQFPEDRNLSSWAGVCPGNRRSAGKRKPEKIRKGGQWLKPALTEATWAAVKENKSYLSAQYHRLVPSKGKKKAAVAVSHSMLVCVYHVLKKATAYRDLGSDYFLRRNQEATKRRCLRQLEQMGFGVTLQKLA

SEQ ID NO: 123278 - protein, 311 aa, unidentified
MSEEKSVYVGIDVAKKTLEVATSPEGLRLSLPNTPQGHRKLVAELKKLDVAKVVMEASGGYERTLSADLLDAGYDAVVEDPRRIRHFAKGMGKVAKTDRIDAAVIARYAEVVRPERSKIKADADLAALVGRRSQLVDMIRDEKNRLDTAGQRAVQKSLREGITWMKRQVAKLEREIAARIKADDDMSRKDKILQSVPGIKDKTSAMLLSRLPELGTLNRQEVAALVGVAPYDAQSGQWRGKSRIWGGRADVRRALYMPALAARRCNEKIRRFAQRLEKAGKPHKVILVACMRKLLVILNTMLRTNTTWQSA

SEQ ID NO: 123279 - protein, 389 aa, unidentified
MKIFVGIDIAKLNHFAAAISSDGEILIEPFKFTNDADGFQLLVSKLESFDKNSIIIGLESTAHYGDNLVRYLVAEFYQVCVLNPIKTCQMRKNNIRKTKTDKVDTFVIAKTLMMQDDLRFITFFDLDMMDLKALGRFRQKTIKQRTRLKIQLTTYVDQVFPEIQYFFKSGLHQNAVYALLKEAPSPKEIASMHMTHLANLLKVNSHGHFTKEQAKELRVLAQKSVGANDSAISIQITQTIQQIELLDSQLEKIEAEMTDIMKFNDSVIMTIPGIGYINGGMILGEIGDIHRFSNPNKLLAFAGLDPSVYQSGNFQAKTTRMSKRGSRVLRYALVNAAWNVVRNNATFKAYYDAKRAEGRSHYKALGHCAGKLVRVIWKMLTDEVEFNLE

SEQ ID NO: 123280 - protein, 341 aa, unidentified
MEEFIGLDVSLKDTAISIRRGGKRIWRGKCPSDPKLIAEVIRSRAPNAKRVVFETGPLSVWFFHALTAEGLPAICVDARHAAKALDMAPNKTDANDADGLAHLAEVGFYKEVRVKSFDSMLVRTLVNARTHLIQISTKLSNQIRGLMKTFGLVVPKGAGGIFDANVRELVSANEGLALIILPLLEAWRGVRRRVAELDRQLIATARRSSPCRQLMSIPGVGAVTATSFIAAIEEPENFRASRSVGAWLGLTTRRFQSGEVDYDGHISRRGDSHLRGLLYEAANAILTRVSSESSLRTWGLKLREQLGFKRAAVAVARKLSVIMHTMLKTGELFNPSAGAAA

SEQ ID NO: 123281 - protein, 443 aa, unidentified
MNTPHPYDLIIGLDRSDRKADLHLIDTRTGQHRSATIDTAPEALWEWLLELRQQHSQARVALCLEQPAVHLIAFLERYDWIALHPINPITLQKYREAFVTSRAKDDAKDALYLAELLLNHHHQLKIWAPEDSATRAVQQLVFHRRAVVDERTGLTNRLIALLKQYFPQALVLCGEDLWRPLATRFLLKWSSLQAVQKVKPATLKAFYYLNGSRSAKLLAQRLALIEKAVPVTDETAVIESLVMRVQLLCHQLQLVQQTIVRFEKQIAQAYAAHPDHAIFASLPGAGPVLGSRLLASMGAQRERFGAAADLQHYTGIAPVTKRSGGSCYIHRRYLCPKFHRQSFHEYAKESILWSRWAAAYYLQQRTKGSPHQTAVRALAFKWQRIIWRCWQDRQPYDEPRYEAALRRNGSELVKLFDRVELGKSPFKKPVNKLKKNVDGLPQR

SEQ ID NO: 123282 - protein, 369 aa, unidentified
MKNSNTAFIGLDVHKNSIDIAIAELGRTGEVRHYGAVGGDLDAFGKAVRKLRSRHSTLHFAYEAGPCGYEVYRYLQRQNLDCVVIAPSLIPRRSGDRIKTDRRDALQLARLHRAGELIPIYVPRPEDEAIRDLVRCREDARIARHKARQQLKALLLRNGIRYEGKSSWIPAHLRWLSELKLPLAAQQIAFQEYLDAVSLASERVARLEQQIRVQVDSWRMKPVVEALQSLRGVQLVIAVTIAAELGDLRRFDNPRQLAAYVGLVPSEHSSGASTRRGGITKTGNTHVRRVLVESAWAYRLPARVSRIIRLRQENLPQEINEISWNAQLRLCARYRKLMASGKCKQQTVTAIARELLGYIWDIANRVKVV

SEQ ID NO: 123283 - protein, 361 aa, unidentified
MPAAVTPRRGKGPFMAAVMIGVDPHKGSHTAVAIGPAEEPMGELRVRACTAQAERMLAWAVAWPDRTWAVEGAAGLGHLLSQQLLAAGERVLDVQPKLGARVRLLAAGAVNKNDPNDARSVAIAALRSPSRREVQADDHAAVLKVWSKRHRDLGRTRTQVACRLHAVLCDLVPGGVSKEITAGHAAQLLKAIKPSGAVEEARCELAAEFLEDLRRVDAQMGDTKKKLTAAVRASGTTLTEIFGVGPVIAATVIGYARDVSRFPDRDHFAAYNGTAPIEVSSGNRKIYRLSRRGNRRLNHAIHMAAVTQIRYHHSDGRAYYDKKLAEGKTPREAKRALKRRISDAIFAHLQNDTRKTSTVTR

SEQ ID NO: 123284 - protein, 402 aa, unidentified
MNCVGIDVSKGKSMIAVMRPFGEVVVSPFEVLHTDSELSKLAGLLKSLDGETRVVMESTGNYHAPVAWLLHDAGLYVSVINAMLVHDYGNNSLRRAKTDKKDAVKLANYGLDHWLTLPRYVPDEDTRLMLKTCYRQYQQYSKVQTMLKNNLISLLDIAFPDANRLFTSPPRADGSEKWVDFVAAFWHCECVCGLSEKAFTAKYHKWCRKHGYNFSEDKALDIYASACGHFGVMPKTDTAKLLVEQAIFQLRATSATLAALKQEMQSLAASLPEYPVVMGMFGVGPVLGPQLMAEIGNVRRFHSKKALVAFAGIDAPPYQSGQMAIRSRSISKRGSASLRRTLFLVMSVILQRAPMNEPVYQFMNKKRSEGKPYRVYMMASANKFLRIYYASVKAYLASLDHD

SEQ ID NO: 123285 - protein, 391 aa, unidentified
MVYVGIDIAKDKHDCFIMGEGGEVLHDVFQISNNIDGFDNLFSKIQAASQSLDNVKVGLEATGHYGYNLLGFLVNKGLPTFVINPLHTNLFRKSLSLRKTKTDKVDARTIAAMLASDVNLKSYSDTSYHNEELKSLVRYRFDKVRERAKLKQSISRLVNILFPELEKLVPTLHMVSIYALLQEFPGAHQIAEAHFTRLKNLLSSTSKGHYGDDTAMRFRDEARCSIGSFMPAKSLELRHTLKLIAQLDLIIDEIESRIKAIMDDMKSPIVTIPGISFRMGAMILAEIGDISRFDSSDKILAYAGLSPSTYQSGQLTSSYSHMEKRGSRYLRYAIFNATKFVCQWEPSFATYLAKKRAEGKHYNVAISHAAKKLVRLIFALERSRQPFASGS

SEQ ID NO: 123286 - protein, 354 aa, unidentified
MLALGDSALRKEADFVGCDLHTRMQQVAVLDTGTGEVSERQLAHDGSAIEEFYAALPGPVTIGIESTGYAVWFHALMQRLGHTVLVGDAAKIRAMVVRKTKTDRRDALHLLDLLRHDRFPTLWVPDPATRDLRALLTHRMRLVRIRTMVKNGLHAIALNYRLAGGSKLLRQAGLAQLQALALPPHTAQRRDQSLELLAGLNTQIHELDDAITTAALAHPDAPRLITHPGVGALTALATVVVLGPVARFSDSKHVVSYVGLAPTLNASADKYHLGHITKQGSTLLRFALGQAAAHAARMDADLKRTYFTLVHRRGRPKAKVAVARKLLVRLFIMLRDQIDYDEFQRRGRPAPVSA

SEQ ID NO: 123287 - protein, 375 aa, unidentified
MKEKVRFLGLDVHAETIAVAVAEADGEVRSLGTIANRAESIRKLVRKQGAGAQLRACYEAGPTGYVLYWQLTQLGVECTVAAPTLVPVKAGDRVKTDRRDALKLARCHRAGDLTAVWVPDEGSEALRDLVRAREAAKQDQLRARHRLSKFLLRTGRRPMPGVKAWTDRYMGWVRQLDYVQSAQAATLLDYVHEVEHMAERVGRLEQAINEAVKQAPVTMQAVIKGLQALRGIAQISAVTIVSELGQISRFDTPRQLMGYSGAVPREDSSGKRTQRGAITKTGNAHLRRIVVEAAWSYRLRPGVGPALRLRQEGVPEPIKDIAWKAQIRLSKRYARLAAAGKDKRKIVTAVGRELLGFIWAIGINAEAAGKQQRAA

SEQ ID NO: 123288 - protein, 388 aa, unidentified
MNYIGIDISKYKHDCFILGDFGEILNAEFSFTNDAKGFSELLQTISGYDREHTRIGFEATAHYALNLKLFLEKNGFSFMELNPALVSKFTKGQTLRKTKTDKLDARIIAQYMEQVVYNPHPTSFYHNYSLKSLTRLRDALVRQRSRYLVQLTNVLDCVFPEFKPFFGKRFSATALYILEHYGSPEAIANMNSRSYDILRRKSRGNFTMDKFVQLKQLATNTVGEFNAIYALKLDTLLEIYSQLNSKIAGLENEITRIVTDMNPPSLSIKGIGPLSAAIIVSEFGDFNRFSSPDKMLSFAGLEPGFFQSGTSAYTGRMVKRGSGHLRYAIFNCCRVIRLHNEVFSTYYHKKIAEGKPHRVALSHLAKKLVRLIFTLETTGATFDPAKLR

SEQ ID NO: 123289 - protein, 344 aa, unidentified
MIVIGIDPHKSSLTAVAVDDTGHELAARRFVVNAGTFTQLISWAQRWPQHRFAVEGAKGLGRGIAQQLAATGAGVVDVPATLAARARLLTTGGGRKTDATDAASIARVGLHHHRLDPVQPEDQSTILRLLTEHRDDLTHERTRILNRLHGLLRDLVPGGAPTGLSADKTAAALRGVRPATATDSCRRDIARQLLAALRRIDAQLKANETELDHAVTAARSSLTELPGIGVIMAAKILGHVGNVTRFPNADHFASYTGAAPIDASSGPRKRHRLNTGGNRQLNSALHIIAVVQAHHSDLGRAYYQRKLGEGKTPAEARRALKRRLANIIYRRILKDQKQAHPTAT

SEQ ID NO: 123290 - protein, 319 aa, unidentified
MTLAYPIAGIDISSTTLDVAVLHADGSFKASSVANSKPAARKLARQLASSGVRLAVIEATGGYELIAMAALAGEDVPVARVNPRQVRHFAKGIGRLAKTDPIDARLLATFGERARPRVTTLPSAQEARLKALSLRRRQLVDARVAEKNHLGMIVEKDIKAGVQRTIEALDEEIERIEDAIAQQIAACQPMRERRDLLESIPCIAAATSATVVAELPELGQRSTSVLKALVGVAPFNADSGGIKGERHIQGGRAPLRQALYMAAQTGYRCNPLLKPFYARLRAKGKSHKQAIIACIGKLVSIMNAIIKTAQPFNAKFATA

SEQ ID NO: 123291 - protein, 351 aa, unidentified
MIIGVDPHKSSHTVTAVSPATNTAVASLRIVATLAGYRALLRWAGSFPERRWAIENARGLGRHLAQWLIARGETVLDVPTTATARVRELSRGGRRKNDVIDASAAASVAVLHGDAAVIGIEDETTVFALLEERRANLAGQRVRAVNQLHALLRDLVSGGARTALTAANAAKILRTVRPASPSERTRKELCWDLVSEIRAVDARLADISSRMIVALDENGTRLLNVDGVGPVLAVRLLGRTGRASRFRSAAAFANYSGVAPIEVASGEHARHRLSRSGDRQLNSALHLVAVTQVRMRNSAGHRYFDHKIATGKTRNEAMRCLKRRIADHVWRLMLADERLRHRKIEEPFVAA

SEQ ID NO: 123292 - protein, 351 aa, unidentified
MKTSHSYTGKTLFVGVDVHKKTYSVAVYCEGELVKRDSMIAKPKQLIAYLRKYFPEAHIKSAYEAGFCGLHLHRAFLEAGIESIVVHAASIEINSRDRVKTDKRDALKIAVQLSVGRLKGIHIPSKKREDYREISRLRDDLVKQRNRISVKLKHKANYHGLIGPEDVKKVSKKWIEDLEQKKLADGLRYHIEALVEQWRFFDNKIAEVSKRIEDQGKEDVAYERVYRSVKGIGPTAARVLANELEDMSHFSSERALFSYTGLTPSEYSSGEHRRQGHISRQGKPILRKTLVQCAWVAIRYDSSLRDVYDRIAQRAGGKRAIVAVARRLVGRVRACFRTETLYQTNLAKEVA

SEQ ID NO: 123293 - protein, 409 aa, unidentified
MEVLIEPGVGLDVHKATVVATVRVPATGGGRLTVTETFGTMAADLLALREWLQAYGVTHVALESTGVYWKPVYYMLEGGFTLLLINMQLLKHVPGRKTDVKDSEWLAQLLECGLLKASFVPPPPIRELRDLTRYRLQQVRDRAQEVNRLCKVLEDSGVKLTSVLTDVMGVSGRSMLAALLQGTTDPVVLADLARGRLRKKLPELRRALAGRFRRHHAFLVEQILAKIDFLDETVERLNAEIDERLAPFEPLLARLDTIPGVNRVVATTIVAETGGDMTRFPTAGHLCSWAALCPGQNESAGKRRSGTTRDGNRYLRGQLIQGALGASHSKGTALQARYHRVKRHRGHKKAVVAVAHQILEIAYYVMHDGVTYDELGADYFDRRHADRAMRRHVRHLEALGFRVTIEKAA

SEQ ID NO: 123294 - protein, 400 aa, unidentified
MRVVFGIDVSKASSEVAILVNGEKIHGYTIPNDAIGFNRLLEDLGTVYQPEIVFEATGVYSRRLQAFFEDNSYAYIRLNPLESKKQLDSLRVRKTDKIDAEKLATSQFILNRKPSYVQEALYQELRDLSRFYQNLTEDIVCAKNRLHKVLQITFPELENILSAPTGEQYWNLVITFPCNSFVLESDDATLTAIIRQSTAKRISEKRVTYLVDKLTKLANQSYCAVKKTSPVIEEVKYYAGELLRLSEHRQGVVEEMVTLAQSLPEYEILLSIPGIAETTATSIIGELGDIRRFHSANQINAFIGIDLRHYESGDFLAKEHITKRGNPYARKILFKCIHNIASASHTNPCHIADFYEKRKRQSQVTSTKPHTIASIHRLIRTMYYLITHNKLYDYTSTQNR

SEQ ID NO: 123295 - protein, 379 aa, unidentified
MTTHKVIEPAPINESIAVIGGVDTHKNTHYAAAVDDHGRLLGHREFPAKDRGYADLLSWIQGHGDVAAIGVESTGSFGATLTRYLTAHAVRVVEVNRPNRLARHMDGKSDRLDAEQIARAVLGQTSTATPKAKSGMVEVIRTLRVTRSSAVKARTNAFNTLWGVMIGAPSPLRDELVVLSKKTLVNRCLRLRPESENLLELATDPDRLLMAGVKTALRDLARRWKQLDDEVKTLNKQIEALVRAAAPELIELHGVGIEIAGQFLVTAGDNADRIRNEAAFAKLCGVAPQPASSGRTSGRHRLSRGGDRAANSALYIVTIVRMRHHQPTRDYVERRTAEGLSKREIIRCLKRYIAREVYANLPRPAQTATTTSAPLPSAA

SEQ ID NO: 123296 - protein, 402 aa, unidentified
MNCVGIDVSKGKSMIAVMRPFGEVVVSPFEVRHTANELSELAGLLKSLDGETRVVMESTGNYHAPVAWLLHDAGLYVSVVNAMLVHDYGNNSLRRAKTDKKDAVKLANYGLDHWLTLPRYVPEEDTRLMLKTCYRQYQQYSKVQTMLKNNLISLLDIAFPDANRLFTSPPRADGSEKWVDFVATFWHCECVCGRSEKAFTTQYQKWCRKHGYNFSQDKALDIYASACGRFGVMPKTKTAKLLVEQAISQLQATSAALAALKQEMQSLAASLPEYPVVMGMFGVGPTLGPQLLAEIGDVRRFHSKKALVAFAGIDAPPYQSGQIDVRSRSISKRGSASLRRTLFLVMSVILQCAQIDEPVYQFMDKKRSEGKPYRVYMMASANKFLRIYYASVKAYLESLEHD

SEQ ID NO: 123297 - protein, 396 aa, unidentified
MRYWTGFDVGKTFHWLCVLDDEGNVILSRRIEATEEGLEAACSEIVKLGSPQERMAGIDLLGGPATLLQAVLLERGERVCYVPGTTVNKVREAYAGGEHKSDPRDAFVIADQLRLRWRSLSEVRLREEPLAELRVLVGHRKDLVQDQTRRICRLRGLLLEVFPGLEAALDLTKEGPLLAVSRVGRPVVARRLGEARLAQWLKARGVRKASTIAERVVAAAKAQKCELPAAKVKAALVAEIAKEVLETRKRLLALDARLKELVQADPRGEIVRSLPGMGLTLTAEFLAEAGDLLGRFGSPDRLAAAAGITPVLRASGSVSYQRRAKKGNRALKRVFYQSAYCAVTRHKLSKDFYQRKRAEGKAHHQAVIALARRRVNVLWAMLRDGCFYEERVPRTT

SEQ ID NO: 123298 - protein, 334 aa, unidentified
MEHVAIDLGGRKSQVCIRAANGDIVRETRVATRDLPKLMQQLTPSRVIVETCAEAFFVADAARAMGHDVRVVPATLVKALGVGARGIKTDQRDARALSEASCRVELPSVHISSALSRERKTLCAMREGLVRSRTQMINGVRGWLRAQALSLSAGNTEAFPKRIRKLEVALPSYVERQLVAIESVTTQIRDANRELARLAKSDSICTRLMSVPGVGPMTAIVFVATLDDISRFQGAHQVQSYLGLTPGEHSSSESQRRTGITKAGSTRMRWALVQAAWAARRTAGTHPMVAWSIEVEKRRGKRIAIVALARKMAGILYALWRDGTFYSAEVAPPT

SEQ ID NO: 123299 - protein, 275 aa, unidentified
MLNESFVGIDVSKDWLDVGWEPAQQSERLAHDEVAMVGLCERLVQERPCLIVLEATGGLETHLASALAAAGLPVAVVNPRQVRDYARACGRLAKTDRIDALVLAAFARAIRPQVRAPKDDETLELGALLARRRQLIDMRVQEKLRLERASPVQRDSIKEHIAWLTERIARLDTDLTHRLRSSSLWRDKEDLLKAIPGVGTITRVTLIALLPELGKLNRREIAALVGLAPFSRDSGQHRGERVIWGGRAQVRRACALRESLGRWHSSPVCENCSQS

SEQ ID NO: 123300 - protein, 357 aa, unidentified
MNSTKGNKLCFKGQTVFVGIDTHKNSNRLTFILNDQMMQTVKRSSDSSEIVDYLNFHFPEANYKSAYEAGFSGFSLHRDLVEAGIDNIVVHAADVPLSDKDKEQKSDKRDSRQIAKCLVAKLLEGIYIPNLDQESLRNMVRYRKQLVNDLSASRIRMKMWLHFMGYKTPPALANSKWNANFINWLAELEPTQNLNKWVLENYLERVEQHRAWLLKTNRQLRELSKSEQYQKDYNLLLSICGIGMVGAWTILSEIGPIERFSSEKKLHSYAGLIPKTYSSGEKHCSNKITNRGNKRLRAQLIESAWVAIRTDPALALFYQKKLKNKDKNIAIVSVAKKLLSRIRAVLINQTVYERNRV

SEQ ID NO: 123301 - protein, 348 aa, unidentified
MNYIGTDIHISTLDFKVVSNLGKVKMARTVKTSAPNFLDFIKSVPAPRQIIIEEGPLAAWLLEICNKNGEQLIISDPKRNKWIGASGEKEDPIDAGKLAQLARGGYIKEIHHPLGHRRRFRELITAYHDTNKSIVRIKNKIKAKFLQNGIQCQGRTVYSSKQRSEWRQKLPQEPALLVIIDSLWQQLDQIQDNLETILAEAKLQAKRYPEIALIDEIPGIGFVIAATIVAILENPHRFADKRKVWAYAGFGISKKSSANKTYSEKLGQEYNRTLKCVVEEAAQAAINRETDNAFRRSYARLTIQKGIDPHHAILTVSRDIIATAWAMWKKGEHYNPEIDKQIKTDVAA

SEQ ID NO: 123302 - protein, 403 aa, unidentified
MNNVAGIDVSKGKSMVSVLRPFGEVVAKPFSVGHTGSELKELADYLKSLDGETRVVMEHTGRYYEPVARFLHDEGVFVSAVNPKLIKDYGNNTLRKVKTDKADSRKIARYGIDNWAELRQHTPMDTIRMQLKTLNRQQSLYTKTKTMMKNNLIALLDQTYPGVNALFDSPVREDGSQKWVDFATTFWHVDCVRNMSLTAFAERYRKWCKRHGYNFSQSKAVEVHTGAQDLIAMLPKDALTKTMVRQAIDALNAVSASLERLKAEMQALAAQLPEYPVVMAMHGVGDSLGPQLMAELGDVARFTHRNAITAFAGVDPGADQSGTHEAKSTRVSKSGPPELRRALFLVMDCLLKTQPQDDPVYRFMDKKRAEGKPYLVYMTAGANKFLRIYYGRVKEYLASLEGN

SEQ ID NO: 123303 - protein, 341 aa, unidentified
MTEVSTIGLDLAKNVFQAHGASVSGAILFRKKLRRDQVLAFFAAQPRCLVAMEACASAHYWAREIAKLGHEVRLIAPTYVKPFVKRQKNNAADAEAICEAAQRPTMRFVAVKSEAKQASAVVFRTRDLLVGQRTQIINAIRGHLAEYGLIAPQGPSHVDQLIAQIEDHSSGIPDPARSCLAVLVETLRALQGKITALDTEVAARAKRDDGARRLMSIPGIGPLIATAIEALAPPVETFRSGRDFAAWVGLTPLQRSPGAQERLGKISRMGERTLRRLLIIGASGVVRWARRKGVPAGSWLARMLARKPPMLVIVALANKMARIAWALIAKGGSYRAPAVAA

SEQ ID NO: 123304 - protein, 311 aa, unidentified
MKDSIGIDVSKDHLDLYCLDDGRSARFGNDAAGFRKLKAWLPDAGCIARVVYEATGPYHAALERRFGGELPLVKVNPLQARRFAQSKGSRAKTDAVDARMLAQMGAALDLAPQAPMSESLRELKELQVARQALVKDKTRLENRIKTQSVAFVVKQGKARLALIKRQLRDIDAEIQTRIGAETPRARAFEIIRSIPGLGAVSTAAVLIECPEIGTMNRKQVASLAGLAPMTRQSGHWNGQAFIQGGRNHLRAALYMPAIVAMRFNPDLKAVYDKLRSAGKPAKVAITALMRKLIELANTLVKADRLWVQKGA

SEQ ID NO: 123305 - protein, 325 aa, unidentified
MNNEVYVGVDVHEGESQIAVLNKDGELLEEKRLPTCSLTKYVSSINGRKHVAIEAVGFVYPIYDKLKMLNDCTVSVASPSRLQLIAKSKLKNDRVDAIALSELLRTNYLPVSHMIDEQAREKKLLAMARYARRKARVIVEIKWLLKRRGIKVKGHDDLKELHLPEIDRRLRELEFVESTIEELDRQIKSIVADDHKAKLLDTIPGVAPYTALFLACILDDIDRFPDSKHACAYLGLVPWLDDSADTEHLGHITKKGNKWLRRNLVECARIAVRKDPHIREFYERVKHRRGEKKAIIAVARKLVSYAYWMLKRNITYEEPHPWLLA

SEQ ID NO: 123306 - protein, 405 aa, unidentified
MSTRDDRKLFAGIDWASKTHMICVVDQDGTIHGRFEITNTSKTFTGLVKRLTKLRVGGVAIERCDGPLVEALLDAGHQVFVITPRQVKGLRSRYRGSGAKSDAGDAYLLADVLRTDGHRLTPLTQDSDATQVLRSLSRTRKQLVEARVGLVNQLRAELEHCFPGAIGLFARLDSDVAIAFLRRYPTQHTAARLTQARFAAFLRRIAYCGRKPVEELFTRVHDAPVAGLSAEEADGHTACVHALLRAVEAVRTQERELEAEIIERLDAHADAHIFTSLPKAGHGVRAAALLAEIGDDRARFPDEEALAALAGVAPVTRASGKYRGIGFRWAADKKLRNALIDFADDSRHASPWAAKVYNDAIARGKRHPHAVRILARAWVRVIWRCWQNHTTYNPQLHGGAMQIAP

SEQ ID NO: 123307 - protein, 392 aa, unidentified
MLFVGIDIAKRNHEASVIAQDGSVVRKAMRFANSQAGYNKFMDMVRSLKEPVVFGMEATGHYWLTLYTHLRNDGFTVHVINPIQSDALRGMYIRKTKTDSVDSVIIADIIRFGRYCETSVEPGDLQAMRELCRQRFYIIDMASDLKRKVIALLDQVFPEYEKLFSDTFGVSSMELLSQYTTPEEMLSVSSQQLAEILEKASRGRLGAEKAVEIQNAAKNSFGIVMASCSFSLIIRQYIEQIRSLESSVDIFDTEIARLLSGFDTQLTTITGVGSTLAAVILSEIGGDIRRFSSPAKLAAYAGVDPTVKQSGDFSGTRMKMSKRGSPYLRRAIWLASTVTAFKDPAIHALYERKRAEGKDHMTVIGHICRKMISIIFAVLRDNTPYVPAAISD

SEQ ID NO: 123308 - protein, 439 aa, unidentified
MILIREGADAPIIMGISKPAGLKSPCGEVKIVNPLFVGIDVSSRNNVVYLMNPDGSKYSSFSVQNNLGGAKLLSERIVSALSSMRLSDVVIGLEATSIYGDSLVYALREDGSLGRFQRKIHVLNPKQVRKFKEAYPDLPKNDFVDAFVIADHLRFGRIAREVYMDDYRYQALRTLTRARFDVIQNLTREKQRFANYLFLKCSGMAQDKDIQNTSATTIALMERFETVDDLANADLDELTAFIAETGRGRFADPDATARVVQAAAKGSYRLPKTVNDTVNQAMSVSIASMRALKEQVKVLDKAIEQQFEIIPNTLTSIPGIGKVCSAGIIAEIGDIHRFNSQASVAKFAGLVWHKNQSGDFEAEHSQMIKSGNRYLRYYLLEAANSVRRCDSEFRRYYDLKFNEVNKYQHKRALALTARKLVRLVFRLLKDNRLYIPPEN

SEQ ID NO: 123309 - protein, 346 aa, unidentified
MIIIGCDYHPSWQQVCWLDKETGETAEQKLVHASGDAEKFYKQLAAPALIGMEATGNCQWFVEMATAAGHEVWIGDAAKIRANDVRQQKHDKRDAALLLKLLREGRFPRIWTPSSQQRDLRQLLIHRYKLVRLRAQAKNALQHLAMNQGVQKKGRLWSEAGQKLLRELPLQPWASRRREDLLKVMALLDTQILSLDMAVKEAAERDADARLLMTQPGVGPITSLAFVLTMGDVRRFARGKQVASYLGLIPREYSSGGHQRLGSISKQGNRFMRMLLVEAAQVAVRCDPGMRAEYLHRCHSKPKGVAKVAAARKLGIRLYWMLRTQKRYPEIVSIESSSRVPLASAS

SEQ ID NO: 123310 - protein, 337 aa, unidentified
MEREYVGIDLHRRRSVIIRKNAAGELISKVHIDNSPETLAAAVAAAGPEPEVVVEATFGWYWAVDLLQEMGAHVHLAHPLGNNWGNRRVKNDERDAADLVDLLRRGRLAESWIAPPEVRELRELVRYRHKLVRLRAGLKAQVHAVMGKHGVLPDRVDMFGPGGTAQLDALDLPDAYARRLASLRAMVKTFDTDIVELDRTIASSLANHRGYHAIQKLNGVGPIVAAVLVTEIGDIGRFPSPDRLCSWAGMTPRHRESDTKVHRGSITKQGSRLVRWAAVEAVSKNHGDDMIKSAYRRIAERRGRNIAKVAAARKLLTLVYYGLRDGEVRCLASSACG

SEQ ID NO: 123311 - protein, 340 aa, unidentified
MGVFVGIDVSLENSAVCAVDEHGKLVKEMKVASDPGALNACIRNMPGVVEAIGIEAGPLSQWLHKSLTDLGLPVVLMETRQVKAALKAAPVKTDRRDAAGLARLLQMGWFRPVHCKSLSAQELRVLLGARRSVQDAAINIEMSIRGMLRNFGLRLGRIGKVSFEDRVRELTDGNKLIQLSIEPMLRARAALRSELVRLERMARDITREDPVCRLMMTMPGIGPVVALTVRSTIDDPGRFRRSKDVGPSIGLTPRRYQSGETDIIGGVTKAGDLDMRTALYQAATVVIHRSKKPTWLRAWAERVVRRRGVKRAAVALARRMGVILHRMWVDNTEFQAARMA

SEQ ID NO: 123312 - protein, 338 aa, unidentified
MDTIGLDLHKRESQLCIGHGDGTITERRIVTSRERFTAVLGGQPPAHVLLEAGTESEWVARHLESLGHRVVVADPNYAPMYATRSRRSKTDKRDARTLMEACRLGAYRPAHRLSDARRHVRAELAVRDALVRTRTRYVALAKALVRRDGLRVPSGEAHRLPVHLRTLPLSPLLAAEVAPLVTLFAPLNEVIAAADQQLDALAATDPIVALLMTAPGIGPVTASALVATIDDITRFASAHQLEAYLGLVPRELSSGEQRRLGPITKAGNRRVRWLLVEAAWRVLRAKDSATAALRAWAGRLAARRGKRIAVVALARRLAGIVYAMWRDQAPYDGCKVRG

SEQ ID NO: 123313 - protein, 509 aa, unidentified
MTVVGLDVHKRVVEAVVLRAEDGRILHRERFACTREELVRFATKRLGPNARVALEATTNTWSIVELLRPYTGELVVSNPMRTRAIAEAKVKTDKVDALVLAQLLRADFLPRVWQPDGMTQARRRLTARRASLVSDRTRVKNRIHAVLHQRLMQPPVSDLFGTKGMRWLQMLELDAAGRLAIDSELRLLRQIEIEMTAVDEALAEDGYDDPRVRLLMTLPGVDVAVAQTLLATLGDIQRFKDPDAAASYMGLVPSTRQSAEHCYHGPITKQGKGQARWMLVQAAQHLSAHPGPLGVFFRRLAKKKNRNVAVVATARKLVTIAWHMLKNNEPYRYAIPRSTETKLSRMRVKATGERLRPGLPKGQPRPKAYGSGVRIRTVPALDTIYEREGLPPIAPLSDGELRMLRQQKVLKHVAQTSRPQRLPRRAAAPEPPDVPGAVSPRCPGPPRCRRASARGTAAGQVHADPFSRPEVDVNRCPELDMFIGSRTAPAGTASPDGLAARGTDRDDPR

SEQ ID NO: 123314 - protein, 414 aa, unidentified
MIAVGIDIGKRQHEACFMDEAGHEIGPSLRFAQRRGGVRLLQERLDALPESATVALEASGHYWIGLERWLRKGGIPVQVVNPLQVHAFREAGIRRTKTDRRDAWVLADLLRIGRTRPNYVPNDTILQLRELTRFRWGLIDQIGGAKRRVLAVLDQVFPEFADHFSDPFGVSARELLARGASAADFAAIELDELTALLEQASRKRFGREKAESIAKSARESLGVPGLEPVARLMVRSLLAQIAHLETQVAEVDAVAAELLAGVEQHLTSIPGVGPVLAATILAEIGDIDRFPRLTALVAYAGIDPSVFESGDFKGTRQHISKRGSPYLRRALYLATHSAQRQNTDLGDYLQRKLREGKSYKVALVATSHKLLARMYVVLKEGRPFEVRSGERRAHRKRREQSEDLLSLLRNNQQG

SEQ ID NO: 123315 - protein, 415 aa, unidentified
MKTFAELTHFAGLDWAKDHHDVVIVDRQGLIVAQFTFPHSAAGWQQWRQCVSSYPALGVALETSSGPAVEQLLDSGVTVFPMNPRSAQSYRQRKAPSGTKTDQLDGWSFADGLRTDGQGWRPLAPLDPLVQELRLLCRDEVELTQQRTALVNQIQQALGEYYPAALEAFDDWTAPYTWEFVKAFPTPADLVKAGRRRWQNFLHAHKLYRPQTVDARLEAFAQATALTASPAITRAKSRLVLTLAATLLALEKHLEQYRAAIAQLFAEHPDHDLFGSLPGAGQKLAPRLLSEVGQDRHLFEDAQGLQCLAGTAPVRFQSGQVDRARIRWHCNKHLRYAVHLWADCSRKYCTWAQTYYQAHRAKGASHASALRRLGQRWLKILWTMWQEHKPYDPERHSRNQQKHGSWLLKLEPAKS

SEQ ID NO: 123316 - protein, 434 aa, unidentified
MEEVTDEPLYRDRVCGIDIGKAGMVATIRVPSDKDPARRAQETRSFGTTRKEVLALADWLRCWQVPAVVMEATGDYWKGPFYRLEAEGFECVLADAKQVKNLPGRPKRDPSDSRWLAACFERGAVTACFVATPEFRIIRLHTRYRRDLTGERGREKQRAEKLLESAAIKLSSVVTDLHGVTGRDIMDHLIAGERNPKALAQLARARARRKITELEEALEGAEFFTDDHAALLKTMLGRIDRVNEEIGRLTEVIERLLAPYEEQLQQAESMPGWGRRSAQDAVAETGTDMTRFRTGPHLASWAGRTPLDNQSGKRTGRSKSKKGNRYLAAITGETAIAAGKTQTREGARYRRLARRRGKPKAQVAVGNTQLKVYHKLLSSPGMRYADLGPDYYERQRDVRRQIAHHVGKLGALGFEVTLCRSPETEPARSTEPTR

SEQ ID NO: 123317 - protein, 445 aa, unidentified
MHYKRLLTLIDGVSSYLSVGLDVGADFTWMSIALPNGSFVGKPFKIIHSDSRSRDLAVTKIKEAQEMYSLKSRCFLESTGIYHIPLLCFLRDKGFDCSVINPIITKNSTNINIRKLHNDKFDSKKAALVGLNVSLKTSILPDDSVVDLRNLVRDYYYFKDLQSAVALKLTAELKVSFPAYAKVFSKVTTQSSLKLLSSYPLPEDMLAASKDDIVYIIRSTARFGETYALRKYDAIIAAAQDAAVFGRALPSNAVRIRLYINSYQEYQKHLNTLLKALHETVDKLRDTLIYNQICLLQSLRGIGFLSAVVLIAEMGDFSFFSSPKKLYAYFGLDPAVKQSGKLNGDKVHMSKRGSSLARRVLHMVALNNVKVDKGSGTPVNPVVYDYYTRKCSGKKKPVAMGAVMHKICNIIFAMLRDNKPFEIITPEEHCKRFAAEHPDKIRNVA

SEQ ID NO: 123318 - protein, 320 aa, unidentified
MAQGTLLVGIDVAKAKIDACIRVLKQQRQFPASSEGQAELIAWLREHGVGVAVLEASGGYERAWAEALREADITARIVNPKRVRHFAEAAGRLAKNDPIDAEMIARFGEVFDEERVQSHDPAREDLQSIVVARQGLIDMQTQLASRYEHDVPKEVQKAFGIVDKALARAVAKLETAAKAAVNAKPEFTALAEIITSTPGLGAVSAAACIARLPEIGKIGNKQAAALLGSAPYDDDSGGRSGVRHIQGGRGDLRSMLYMAVVGAATQHNPVLIEFYKRLRAKGKPAKSAIVACMRKLIVILNTMVKNGQKWDPARHNPRSA

SEQ ID NO: 123319 - protein, 414 aa, unidentified
MTYKIAGIDVHKKVLMVVVIDASMPESKPERRRFATMPSDLRRLLTWLREQGVEEAVMESKAQYWRSVWLELEPYMRLQLAQAFSNRAPRGRKHDFKDAERLVRRLIANELILSFVPDGEQRSWRNLTRMKLQLTRDRVRLQSQMECLLEEMRIKLSIVVSDLLGASGLRILHALAEGETNPKQLALLGDDRLKCSEEQLVDALTGRPQPMHRQMLGLQLERLQLIDGQIAKLNGLIAQAMKPHQDAVIRLAEMPGLGVDSAQQVIAEVGVKASTFPSASEFASWVGTCPGRDESAEENRSSRCTKGNKYLRRVLNQAAHAAVRKNGSHFQAVFRRLLPRLGYQSAIWAIAHRLCRLVWKILHEGVRFIEQSSQSDPKVRKQRARILARALRKLGYDVAITPINPATTEMGMQM

SEQ ID NO: 123320 - protein, 309 aa, unidentified
MSEFIGIDVSKTTLDVAVHTSGEKLQAENSEQGLKRLSERLVELAPELVVMEASGGYERLCAATLAQAGLPVAVVNARQVRAFAVATGVLAKTDAVDARVLAHFAAAVRPAVRPLPDEQRAALDEIMGRRRQLMGMLVMEKNRLAQARNPGVRRDIKSLIAVLEKRIGGCDGELQRQIQASPVWRAQEDLLRSFNGIGPVNARVLLIELPELGTLDRKKIAALVGLAPIARDSGQHRGRRSIAGGRGQVRSSLYMATVSAIRANAVIRAFYQRLREAGKPAKVAIVACMRKILTILNAMVRTQTRWQNA

SEQ ID NO: 123321 - protein, 397 aa, unidentified
MDAAGRRLAAARLPEGVAGITRLHEMIGAQLGEDAGAGEDAGAGEVAIGIETDRGPWVSALVAAGYTVYAVNPLQAARYRERHGVSGAKSDKADAHTLADMVRTDAHQLRPVAADSPQAEAIKVVARAHKTLIWERTRHTLRLRYVLREYFPAALEAFDDLAAPDTLELLAKAPDPASAAKLNRSQIRAALKHARRRDIDMKTTRIQAALRSQQLGRAPVITAAYAATTRSIAAVLATLTEQISTLRGQVETHFGRHPDAEIILSQPGTGVLLGARVLAEFGDAPGRYADAKARKNYAGTSPITRQSGKRKITHARFVHNDRLVDALMSQAQSALLASPGARAYYDKQRARGLDHHAALRQLANRLVGILHGCLKTRTLYDEATAWSHHNQDQRTAA

SEQ ID NO: 123322 - protein, 398 aa, unidentified
MLSIGIDVSKGKSTVCGMKPGGEIVYTPFEVQHTREGMSELVSLLRGSGEEVRVVLESTGSYHCPVVAALLENGIFVSVVNSLRMKRFCSQSIRRVKTDQIDAMQIALYGLAYWPELQPTRLPENTYRELQLLARQYYQMTSILIKAKVDFNALCNQVLPGMQELMNDHAGRHKLSDFVLRYRHTAHILKMGETRFRKDYCKWAEKKGYRNHERMAALIFATAQNGIPVLPDAPSTQIVITEAIRVLHTVEASRDAILTQMQALAKTLPEYSLVREMPCIGDTLAPRLIAEIGDVRRFHSKRALIAYAGIDAPPYQSGKFSANNRHISKRGNRYLRKTGYEVMQSYVMHKPANDPIFTFIEKKRSEGKSGKLAMVAGLNKFLRVYYGKVTELYRSLPQ

SEQ ID NO: 123323 - protein, 302 aa, unidentified
MNEITLIGIDLAKNIFRINCLNENGKRVINRSLHRESLIQFLAPLKECTVAMEACASSHYWGRTIESLGHNVKLIHPCYVTPYRLGDKNDTNDAAAICAAAQRPDMRFVRLRTQHQSDIQSLHRVRSGLVQEQTATINRIRALLGENGIVIKQGPSAVFSLLPSILDTEGNELSVIMKRILRSQYEHLLHLRGQIQEQELMLKTMIAKNDDCQRLMQVPGIGPLTATMLASEIGNGAAFKNSRSFAAYVGLVPKQYSSGGKNVLLGISKHGNKYLRTLLIHCARSTLQTIISGKTPFGGSPG

SEQ ID NO: 123324 - protein, 372 aa, unidentified
MNKKLIYIGLDVDDTQYHGAAFDKETGEMVSFKCRPTLKGLVSQLEKMQKYFEAESLKLCYEASYIGHCLQRDLMQSGYYCDVISPGSIPRKGSKAIKTDRIDALDLAQFYANDLLTIVQIPDAETEQDRDLLRSRQQLMKQQVDLRRHVQSLLRRNGLHYKAETQNKTHWTKHHYCWLERTKEGSSGSLGVNLRLLLRQLESISEIVAAYGEEIESMAKQPNYKEAVSALTCYKGIKNLFALTMITEIGDVKRFSHPRQLGAWVGMDIREYSSGGKHNRFGITKQGNRYLRTAFIEANQRAYRTTKLSREIKTRRANANPEYIAIADRCLRRLSKKGNRLLEAGKHPNKVKVACAREMIGFVWESLNKVAA

SEQ ID NO: 123325 - protein, 416 aa, unidentified
MSQKLKEQRLKELAFVGVDTHKDEHTACIANCFGQSLGVFTSENRPKELKGLLEKVDETAKSHNLKPIFGLEDVMGLGQHLARSLISGGYHLKEVNPIETERKRLKNAHPDKSDPLDALAISRVLITDFDKLPTIQSLNEIYLAIHELSNRRDSLVKEKTRIKNKLHILLHREYPYYQTMFKNTFSKAALAFWERFPIASLLKGIGVERLAQYLRANSNNTVSTKKALSILKLVDKDSVPSCLNLVHSSIIRNLVKHLRFIEEQIAIVEKELEPLVDETGMKLSTLTGVDLVTAAKLIAEIGDVNRFSSSDKLAKCAGIAPQQKSSGKKLKFKKSNRGRRQLNTAIYHIALSQISRDRSGKPRNSKARDYFLRKISEGKTKKEALTCLQRRLCDIIYAMMKNKTEYRFQRTTNLVT

SEQ ID NO: 123326 - protein, 276 aa, unidentified
MTHYVGLDVSQKLTAVCIVDDTDRRVWRGQCTSDPEQIERVVRRHAEDGARIGIETGPMTPWLVHELRSRGLDVTCLDARHARAALKMQINKTDQNDAEGLAQIMRTGWYRSVHVKSFDSHRARALLGARPAGRYDNAIVEPYPWVLKTFSSCRVPMRGAPFDRRVEAMLADRDDIAPIIQPMLVAWRQLRQQIVTFHKAVRRLVKSRPACRHLIGVPGIGVLSVLAYVSMIEDPARFGRSRSVGAHLGLTPKQYQLGEIDRSGRISNAAIRLPAR

SEQ ID NO: 123327 - protein, 389 aa, unidentified
MPSVSERPEAPTAIQTHLAASFVSLELSRSIWLITSLSPGSGEKMSKHSVRAGDVAALLARFSELKRKASERTGKSFPIVVIQEAGLDGFWLHRVLQSEGVESHVVDPSSIATSRRRRRAKTDRIDGEALLRALLAYKRGEPRVCAMVKAPTPEEEDRRRLCRERKVLIAERVKHVNRVKGLLFSQGISGYEPLRRDRRQRLDELTTGDGRPLPVHLKTQIRRELDRLELLLDQIKEAEAERDALLAAPQPAAPAPAGRMLLEFKGIGAELAAVLWLEALFRHFDNRRQLASYAGLAPTPWQSGSVDHEQGVSKAGNPRLRTSLIQLAWLWLRHQPQSALTLWFKERVSGNGGHFKKSTIVALARKLLVALWKYVTAGVVIDGAVMKDA

SEQ ID NO: 123328 - protein, 344 aa, unidentified
MKVSTCGIDLAKNVFAIHGVDVHGRTILRKQLRRQDMAAFFARMEPCLIGMEACASAHYWARKLTELGHTVKLMAPQFVNPYVKTNKNDAVDAEAICEAVSRPTMRFVAIKTPDQQALLALHRARQGFVKARTAQVNQIRGLLGEFGIVIPQGIGHVFEELPFILDQIEETLPASFGHLLRRLGKNLEELDQQVGELEAEIKQWHRQSEACRKIADIPGVGPITATAIVASVGDAREFQNGRQLAAWLGLVPRQHSSGGKQTLLGISKRGDAYLRTLLIHGARAVIQAAARKVIAAQSWLGKLIARRNKNVAAVALANKNARIIWALLAKERKFRSDYCAVAHT

SEQ ID NO: 123329 - protein, 337 aa, unidentified
MENRSMSVGLDVHKETIDVSIAEGHRNGEVRHYGVIASDLEPLDKVVRALRAPNRRLHFVYEAGPCGFGIYRHLTNRGEACVVVSPSMVPKRSGDRVKTDRRDSVTLARLHRAGELRAIYVPDDADEAMRDLVRAREDAVGMGTQAKYRLKAFLLRQGRHYPGREGWTLPYRRWLTDLSFPTAPQHITLQEYRDTIDETERRIARLTEQLRHLAPTWRWAPVVAALQALRGVSFITGVALVAELGDLTRFGHPRELMAYPGLVPSEYSSGPSVRRGAITKAGNPHVRRLLAEAAWAYQGIPRIASGNLGEQTAGEVPRHCRRILRFHRSSPTRQVVR

SEQ ID NO: 123330 - protein, 313 aa, unidentified
MESESCFIGVDVSKASLDVATYPSNETWQVSNDAPGIDELVSQLSDRSVQLIVLEATGGLETPLAGALANRQLPIVIINPRQVRDFAKATGQLAKTDRLDAMVLARFADAIRPELRPLKTEQEQYLSALLTRRRQLIGMVLAERHRLSSAPSGIVKDIRKHIVWLEKRIKEADGDIDKFVKASPLWRAKDELLQSVPCVGPVLATSVLARLPELGQLNRRQIAHLVGVAPLNHDSGQHRGKRRVWGGRAELRSVLHMAALVGVRHNPVLKEFYERLCDAGKPKQVALTACMRKLLTILNVMVKTNTHWKYQPN

SEQ ID NO: 123331 - protein, 430 aa, unidentified
MKSNTQNKKIEAITEKTLVIGIDVGSETHYARAFDYRGIEFSKKPFKFSNSEASFEMFKAWILDIKEKHEKDKVVPGMEPTGHYWFNLGKFLQDNEMKPVLVNPHHVKKSKELDDNNPTKNDRKDPKVIAGLVKEGRYMIPYLPDGIYADLRTASNMRFQIQSELTRVQNRISRWFNIYFPEYKTVYGKPDAISGMMILKKAPLPEDILTLGVEGVNQIWRDAKIRAVGKKRAQTLVEAARHSVGTKEGATAARIEIRMLLEDYESRNNRLQEVMFLIEELVKQIPMAEKLMEIKGVGIKTVSGFLAEVGDITRFSSPKELQKLAGLALVENSSGKHKGQTTISRRGRKRLRYLLFEVAMSLVGKNPEFGTLHHYYTTRKVNPLKKMQSLMAVAAKLIRVFYAMLTKGVEYDPSKMLGDIKRPAEYMQAA

SEQ ID NO: 123332 - protein, 400 aa, unidentified
MTYVGVDIAKSKHAAAAVNEAGACVMKPRFFTQDAGGFASLFGALEEQGGAASVVVGMEATGHYWKVLRHALVARQYRVDVINPLITSREASADVRGRKNDKLDALAIANVMRKGGYSPAPAALAATDTLKALARHRKALVARSSDAKRRLISELDVAFPEAAKTLGDLFGAASLAVVRAFPSARLAAAADIRTLTSLFAKASGGQLGREAAEAYREAARHSLSLNMNTDGEEFVIAQIVDEIRAAAAQIADVERRILAEPQPKIASLLGSIKGAGKIQPMAVAAEIGDPSRFASADMAKKVLAYAGCDPRVRESGKWKGRTKMSKRGSPSLRHALYLMAGTIRLHTPAFNTVYKHQIAMGKHHNVALSHVVRKIVEVMCGMYKTNTRFMPPQTEAAPCQ

SEQ ID NO: 123333 - protein, 350 aa, unidentified
MLIVGCDYHPGFQQIAFVDTETGELQERRLAHREEAEKFYRELGASGVQLRVGMEASGHARWFERLLAELHFELWMGDAAAIRAKRVRKQRTDRQDAQHMLNLLLENRFPRIWVASWENRDLRQLLWHRQRMVQMRTRIMNQLQAAAINEGLRCKKRLWRERGRKQLEAFPLAPWASRRRRDLLELLDRLNPTIAELSQAIEQEVEKFPEAQRLMTHPGVGALTALAFVLIIGDAERFRCGKQVASYVGLVPTEESSGERRRLGHISKQGSTLLRFFLVEAAQVTVRSDPEWRSKYFHLAMRRGRKIAKVAMARRLAVRLFWMWRKQWDYQQWKAFGPHVGQPGTGVGVQ

SEQ ID NO: 123334 - protein, 337 aa, unidentified
MYYVGCDQHKKYSFVVCKDQNGSIVNQTKLYHANRDNMKDYFNALPKDSVVALETCGFDHWLTDMLQELGLSTKLSHTAKTKAIAEERIKTDKISASVLADLLRVDMLPQAYIPAKPIREARYFMRYRQNLIYVRTSIKNRIHSIIDNAGIQQEFSDLFGTQGRKFLLELNLKEPYKSIIENYLSIIDDLTNRINKVDNQLRRSLRKDKQAQLLKTIPGIGVITAHIILAEIGDINRFNNHHKFARYVGIVPSLHQSGQILHSGHITKQGNKYLRTAFVESAQTAIRKDPYLAAKFNIIKSKKGYGVAIVAIAHKLAKSTFVILKRQCEYKYRSNNG

SEQ ID NO: 123335 - protein, 342 aa, unidentified
MEQVSVVGLDLAKSVFQVHGVNAQGEAVLRRRLTRGQLVKLFEKLPPCLVGMEACASAHYWARELTALGHEVKLMPPQYVKPYVKRGKNDAADAEAICEAVTRPTMRFVGAKSPDQQATMMLHRVRKILTRQRTQISNALRAHMAEFGITAAIGRGGLERLIAVIADQDDARLPDEARACLAVLCTQLEMVKEQILDNDRRILADARKTEAGRRLMKIPGIGPLLASAIVACVPDPSTFGGGRSLSAWIGLTPRQNSSGGKERLGSITKAGNPYLRELLVVGAMAVVRRARQGSTKRPWVAQLLARKKPKVAAVALANKNARIIWAMMATGEPYREPELAAA

SEQ ID NO: 123336 - protein, 323 aa, unidentified
MSSLFQLGIDVAKAKLDCALRLPEGKLRHKVVENSPSGFQALSTWLTKQGATTVHVCTEATGTYWEAVAEYFAGIDGITVSVINPAQIKAFGASQMVRTKTDKVDARLIAQFCFERQPEPWQAPTPAELTLRALVLRLDALQAMRTQESNRLEGARSALKDSIATHIAWIDGEIERIIRSIRDHIDNDPALRDKQRLLDSVPGLGERTIAALLAFYAAPERFDNARQAVAFAGLDPRQHESGSSVRGKPRMSKIGHAFLRKALYMPAMVTLYRTDWGKQFRRRLATVGKPPMLIIGAMMRKLIHVAFGVLKSGKPFNPALHGA

SEQ ID NO: 123337 - protein, 401 aa, unidentified
MGRHIGLDVHSNFAQVAVLEDGNCRDEGRIGVTPEALREWAETLSGDDEVALEATGNSDAIAMLLTPLVRRVVVANPRKTRAIAEAKVKTDKVDARILAQLLAADFLPAAWLPDDRIRMLRRQVARRTHLVRQRTRLKNQVHAILARNLAPTCPVTDLFGKTGRHWLSRQDLPVDERRSVDALIRQLDFHGQELEVVDRELAIEALDDPTVARLMTIPGVDAIVALSIVAAVGDFSRFASPDKLVSYMGLNPKVRQSGDGPATHGRITKAGRAQARGMLVEAAWVASRAPGPLRAFYRRIKQRRGFQVAVVATARKMTVLCWHLVTKDEDYAFSRPSLNAHKRRKLELTAGQPSQVAKRGAAYDYNNKDHRRRERELVEHAERAYQVMISHWQPNNPASGG

SEQ ID NO: 123338 - protein, 449 aa, unidentified
MARKGKARKTDGAVLPVMRPHAAGIDIGATEIFVAVPADRDAENVRSFPTFTQDLYALADWLKRCGIETVAMESTGVYWIPLFQILEDRGFEVCLVNARHVKNVPGRRTDVSDCQWLQFLHSVGLLRASYRPDQEVCAVRSLLRHRESQMGATHVNHMQKALDQMNLQLHHVISDITGLTGLAIVDAILGGERNPFTLAKLRHDRIKASEEVIAKSLVGDYRIEHLFTLRQSLIAYRSYQQLIDDCDREIRRSLDTFQPPRTPADSNHQPESKKRPASADAGLRTELKRVFGVDLTKIPGIRTGIAQMLFGEIGPDFTKFRSASAFASWMGLCPDNDISGGKVLWVGTRKVKCRAATALRMAAQSLHHSKSGLGDFYRRMRAKLGAPKAITAAAHKLARIIFHLVTTRQEFDDTRFAADQLRYLKRQENKLRAKAHALGFQLTPLENAG

SEQ ID NO: 123339 - protein, 400 aa, unidentified
MIDTSDIDVYLGLDVGKGEHHATALSPVGKKVFDKRLPNTEPKLRELFDKLQARHGTVLVVVDQPASIGALPLAVARDMGCQVAYLPGLTMRRIADLYPGEAKTDARDAFIIADAARSMPHTLRSIDLEDETVAELEMIVGFDDDLTGEATRIANRLHGLLTQIHPSLERVLGPRIQHPAVLLMLEQHGSPAQLRKAGRRRLVSLIRPKAPRMAERLIDDVFTALDEQTVVVPGTEAAALIVPSLAGSLKAVLDQRKLLAARIEELLELHPLSKVLTSMPGIGVRTGARILIEVGDGTSFPTAAHLAAYAGLAPATRNSGSSIRGEQPSRRGNKQLKRAFFLSAFAALGDPASRTYYDKKIAQGKHHTQALLCLARRRADVLFAMLRDGTFYDPQPAPTP

SEQ ID NO: 123340 - protein, 388 aa, unidentified
MTQAPGALPTPTVLDYERTLILAIELSNTSWVLAAQIPGLPGVKAKRSIEPTPEALMAAIENYRTRAVKAGRNVERVVAIYEAGWSGFWLARWLAQYGIETHVIQPSSVPVDRRARRAKSDGIDAELLLRTLLAWLRGEPRVCSMVPIPAEADEDARRRVRERAELVAERVGLVNRIGAVLATLGVGEYNPLRRDRRQRLDELRTALGGSLPTHARAKIVRMLDRLELLLIQITELEKSRDAVLEDENPDKAASMIQQLAKLRGVGVQSATVLVREGFVREFANGKALGSYAGLTSTPYSSGGTEREQGIGKAGNVRLRTLMVELAWLWQRYQPDSAQVSWFRERVSGTGRRMRKVMVVGLARKLLIALWRFATQGVVPEGAVMKPAT

SEQ ID NO: 123341 - protein, 423 aa, unidentified
MKKVSKRSNGKKLEMVGKNAAKTEKTPERPKGSRAAKQEPGKETKKLQRLNVRCLLRKLEAAKNAPKEAAPEDGIGYWIGIDLGDKHSKYCFLDKNANIVAEDSLATTVTEFEQYFKAIPRSRIALEVGTHSPWVSSLLERLGHSVIVANPRKIGGGKKKGLRKNDKLDARMLARQVKSDPNLLYPIQHRSEGARHALVLLRARHAVVGARTKLVCAVRGLVKSDGKRLPRCSAESFHKVDRAEVSEALRDTLEPMFKQIEYLTEQIKAYDKKVKRLCEETYPETELLRQVDGVGVIVALAFILTLDNARRFAKSRDVGAYLGLIPRQYDSGDSQPQMRITKTGDRMMRALLVQSAQHILGRFGKDSDLRRHGLKIAARGGKNAKKRAATAVARKLSVLLHRLWITAEAYEPLRNSTPKEKVA

SEQ ID NO: 123342 - protein, 338 aa, unidentified
MKLYAGIDLHSNNSVVAVIDEQDHVVLQKRLPNDLERILVVLAGVKQWLVGVVVESTYNWYWLVDGLMQAGYAVHLANPAAIVQYQGLKYSGDEHDARWLAHLLRLGILREGYIYPREARAVRDLMRRRMQLVQTRSAQVTAMQTQFMRSTAQRPSSNELKGMLAEDIKARLSEANVASGVLANAAVVQTLNSEIARLEHEVLSQVKLAAQFEPLLSVAGVGRILALAIMLETGAIERFAKVGSFASYARAVEAKRLSNDKKKGQGNSKCGNKYLAWAFVEAAHFAVRYNARIKRFYERKAAKTNRIVAIKAVAHKLARAAYHVMRERVPFDEARAFA

SEQ ID NO: 123343 - protein, 331 aa, unidentified
MEQYIGLDVSMKETAVSIRREGKRIWRGKCASNPAALVKLVRKRAPHAKRVVFETGPLSVWFFHALKSEGLPAICIDARHAKAALDMAPNKTDANDADGLAHLAEIGFFREVRVKGFESMISRTRVAARNRLVRISVELSNQIRGLMKTFGLIIPSAKGGKFDEHVCRSLDGRNDLAPIMMPILEAWRSIRIRAAELGRQLLADARQSQACQLLMSIPGVGAITATAFTSAIEDPANLKKSRSVGAWIGLTTRRYQSGEIDYDGHISRRGDAHLRGLLYEEATVIMTRAAAESDLRSWGLKLREKIGFKRAAVAVARKLAVRSGSVCLNSL

SEQ ID NO: 123344 - protein, 416 aa, unidentified
MSGKREIACGVDVHKRFIIATILSTDGLKLQDRFETNLEELLRFKDWLKHNVCHKVAVESTANYWLPIYSILEGSVNFILANAYQIKHIPGRKTDTLDSEWIAELCLKNLISTSRIFPRDRRELRSLTRARESLIKVRTKIKNRITQELEAACIKLSSVLSDIFGKSGRHIIDGLLNGIDLEEILESIPSKRVRANREEIRGIVQANLSSSQIFLLRSHLNTIDALNKQIAEIESKISDQFSSRNEDLRIALSIPGMGFISACTILAEIGDFREFSSSNKLAAYCGLVPSVYQSAGKMINGHITKHGSPHVRWMIIEVAHAITRSKQDSRLKRFFLRIKARRGIKIAVVALARKVLCLLYHLMINQELYQDDLLSKPKDIKHPRAYPNAPISLDEMIRIITKAGYEVRKMDYLGSG

SEQ ID NO: 123345 - protein, 461 aa, unidentified
MITGKHVCRSRKERKEWERRLQSENPGLEVIHPHAAGIDVGNSMHYVAVRPDRDSEPVRRFECFTADLRRLADWLKSCGVKTVAMQSTGVYWIPLYELLEERGFEVYLVNARHTKNLPGRKSDVQESQWLLKLHTYGLLNNSFQPPSQIRMLRTYWRQRGEHIRGAATCIQRMQKALTQMNVQLANVISDISGLTGQAIVRAIVAGKRDPRQLAALSDHRVHASQEEIAKSLEGNWRPELLFVLQQEVDMYDFYQKRITECDEQLQKHLASFNPALSVDAPKQKAKKQAKNAPRFNLGSELQRITGVDLTRIDGIDVMVAQTIVSEVGLDMSRWKTESHFASWLGLCPDNRISGDKVLSRGTRRVINRAATALRQAANALIRSRSYLGAQFRRLRSKLGAPKAITAMAHRLARLVYRMLKYGQAYVDKGSQYYEEKYRQQQIHLLRKRATKLGFQIMEVGA

SEQ ID NO: 123346 - protein, 387 aa, unidentified
MENVYSRVACNGMDVHYEFSKVTFRDKAGRVVRRERLDHRDRERLRERVSQWPKGLPVVLEASFGWGWLSDLLEEAGLEPHLSNCYKVEQMRKARGWVKTNEKDADLVSLLPFETSSWWEVWRAPPEVRDQREQMRFRADLVALQTCVKNRIHAVFHRHGIFHDFSDLFGGQGRAFLSELCLHNPTGLPPQAWLALRGQVRLLDHVRHQLADIERNLHRQWTTTPLVRRLKTIQGIGLVLAHVLSAEVGRIERFGNHKRLASYSLLAPRANDTGQADPTTAPLGRHLGTRGNRTLKWAFIEAAHGAVRSGGRWRAMFDRVTEGGRKDRNRGYIKVARELVKVVYVVWAKGVPYSSTPPARPGRGKNQKPSRSGTGQLCHPMVHALPA

SEQ ID NO: 123347 - protein, 352 aa, unidentified
MELCTTICVDLAKQVFQLAGEDATGRVIYEDRIKSRQAFHDFLLRLPTTVAVLMECGPGAQAWARLLQTKGNPVRILPAQRVAEHRSGAKNDRNDCYAILRAGRDTSIASIPIKSTTALAIQALHRIRRGNIKRHTALGNQIRGLLLEHGVSMPQGDAAINKHVPRALEDASLPLPDLLRELLDELLMDWLSLGERITALSRRLEATAQEDKVAQRLITIRGVGPIIATAIVAKQTEPSRFASGRMYAAFFGIVPDQHSSGNKIRLGKMSKRGDGYIRSLLIQGAHAVLSQLRPDSDQPDDRRLLRWLSRLGRKEAAIRLANRNLRIIWALLQSDQVYQRKPNEKPEAAMSL

SEQ ID NO: 123348 - protein, 315 aa, unidentified
MTEDGQKLETTRISNDPEYLRAVMARAGESPEVVLEACYGWYWAADTLIELGASVHLAHPLGVKGFAYRRVKNDERDAADLADLLRMGRLPEAWIAPPACRELRELVRHRAKLVGLRTNLKCQVSAVLAGAGVQALPADVFGVAGRDLLQCVALPAAMRAKVNSALRLIEAIDFEIDTFTQLVTTRLRADPGWVAVQTIPGVGPILGAVFVAEIGDIHRFRRPGQLTSWAGLTPKHHESDTKVRRGRITKQGSKLVRWAAIEAVQRIGAHTRLGAYRDGVAQRRGRNQAKVAAARELVECVYYGLRDHHIRRLVA

SEQ ID NO: 123349 - protein, 316 aa, unidentified
MVPSPLFVGIDVAKATLDIAVRPTAETWSVSNDATGIDALVLCLGALAPTLIVLEATGGYQGPLVAALVAAALPVVVVNPRHIRAFAQAVGILAKTDRIDARVIAHFAEAVKPAPRPLPDAETQELRALLVRRRQLVEMVSAERARLDTAPPSIQDAIQAHIAWLTTQIAGLDDALTRASQTHPVWQAKDDVLQSIPGVGPVLARTMLGQVPELGTRGPKPLAALIGVAPFNRDSGTLRGRRTVYGGRAEVRAVLYMGALVATRHNPVIKTFYERLLAAGKAKKVALTACMHKLLTIMNAMVRDLKPWQPQEVPSA

SEQ ID NO: 123350 - protein, 336 aa, unidentified
MTIIRIGLDTSKHVFQIHGVDENEKPVLRRQLRRGEVGKFFAKLAPTRIGIEACGASHHWARLLRGLGHEVMLMPPQYIKAYVKRGKNDAIDAEAICEAMSRPTMRFVPVKTAEQQAALTMLGVRDLLVKQRTMLINAIRGYAAEFGVTAAKGPKQVTELLQRLATDEGVPVLAREMIGLLAGQLEAVNGKLKAIEARLMMWHRHDQTSQCLATIPGIGPIGGVSFALKVPDPKGFRSGRHFAAWIGITPRENSTAGKHRPGKISRQGDESLRRLLVLGATAVIQQAKRGRAAPWLLGLLARKPKKLAAVALANKMARVIWAMMVSGETYRRPKAA

SEQ ID NO: 123351 - protein, 369 aa, unidentified
MGDHITYVGLDVHKQGIVVAVAEDGLRGEVREYGRIANTPAALDRLARKLSREGVKLRFCYEAGPCGYGIQRHLSARGHECVVVAPSLIPRRAGDRVKTDRRDAASLARLHRAGELTAVWVPDAGHEAMRDLVRARLDAVHALRRARQQLSGFLLRQGCHYGRPAWTKLHRRWLAGLKFEQAVHHIVLEDYIAAVEAAQARRDRLTAQIEAMLADWTLAPVVAALQTMRGMALVNAATLIAELGDLSRFTNPRQLMAYLGLVPSEHSSGASVKRGGLTKAGNSAARRLLIEAAWCYRFPARVSRELLLRQEEQPKPIREIAWKAQLRLCARYRKLARTGKPANVVTAAIARELAGFIWAIARRVPPTAG

SEQ ID NO: 123352 - protein, 339 aa, unidentified
MENFVGVDLHKKVSQLATLREPKPASQVRFPNHTVTVEKVLKKLPQGSKIALEATGSWWWFVDLAQRTGHEVVMSHPKQTKAIASARLKSDKVDALMLAKLLKADLLPTVWIPPAAQRYVRELLTHRARLVRQRTSVINELHALYAKRNIDAGMIFHRVRPPAFRAEDLSGYGPRIVEEDVALLGFLNRQVQGLDKELKAIAEKDPESKRLMTIPGVGPVNAVAGSCWIGTIERFSNSKKLSSYFGLAPRVRQSGERERHGHITKEGNRMVRSLLIQAALWHIRRGPVSSRRHYLGVCKRRGKSIARVAAANKLLGIIFQMMKEKIDYEEFLRRGGNAQ

SEQ ID NO: 123353 - protein, 324 aa, unidentified
MSRLAIVDDELPILHALERLLRRDYPGATYVCGYESGFCGFWIQRKLEQRGICCQVLHAADIPQTAKEKLVKRDPVDSKKIGHALSLKEKNSIYIPDEESERDRSLVRYRERIQKDLTRCKNRIRSILYQFGINLPDQYQKGWSNRFIEWLKQCDQVEGSAKITLDHMLEQMIVHRSMLLRVNRDIRSLQNSEKYRQRMGWLTSIPGIGPLTAIIILVELIDIRRFSCFRQLNSFVGLYPMEHSSGDEEHKGAITIRHNKYLRKIFVEDSWTAIRHDPALTLAFNQLTQRMTSKRAIVKIARKLLSRTRYVLMNETFYETGIVK

SEQ ID NO: 123354 - protein, 337 aa, unidentified
MQVTLIGIDLAKNIFQVCGVNQAGRSVFNRQLKRNKLMGLLIQYPDAIIAMEACSGSNYWGRELKAQGFQVMLIPPQHVKPFVKGNKNDRNDAFAITEAARRPNLHCVEPRTLAQTDMIQIHRLRNRIVEQRTALINQQRGFLNEYGIVVNQGKERLLAALPDLLEDADNGLTPAARALFIQILQEWQQLNKAIAELDKSIKQQAHADEAARRLMQIKGVAEKTATAAIAHAGNGSAYKNGRHFSANLGLVPKEHSSGGKQKLGAITKRGNSYLRRMLIQGAWSVIRNVDKSDDRLSSWAKQLIERRGKHKAVVAVANKMARIIWSMLYHQTEYKAV

SEQ ID NO: 123355 - protein, 389 aa, unidentified
MFYVGIDIAKFKHDFAVLDDNGEEIVAPRTITNSSEGFAVLYDTISSLDHSQEIKIGIEATGHYGDNLKQFLLSKGLAFTELNPFLVKLFHEQISLRRTKTDRTDCEVIAMYMAQRASDSYQKSLYHFEALKSLTRTRQSLVEHRSQYIVMLTNMLDQEFPEFKDFFHGKLTETAIYILNKYGTAGRISDWTEEDLIDLHNKSRRIPVDRFKEIQEAAKKTVGNGQKYREDEMKIILSLYEYIDDQVTKIEDEIKDIMNELNPPTLSIPGMGVISAATILGEFGDLSRFPDSNKCVAFAGLDVGIYQSGTKCIHGKMVKHGSSHLRYALLNVVQTVCIHCPTFKAYWVKKKVTERKFFRVADSHVAKKLIRMIYHLETTHTYYDEQLCK

SEQ ID NO: 123356 - protein, 345 aa, unidentified
MPIVGGLDIHRKQLTFDYLDTATGEVRRGQIAPADREHLRAWLARFAGRDDVAFAMEGCTGWRYVAEELAAAGVAAHLGEPADTAAARGRKRHAKTDKTDSAHLRRLLAEGRLPECWIPPTQILEYRALLETYHDLRAVHTAWVQRIHAVFFHQGAPALGEGALRTEQGLAGLRVAAAAHLSPGGQLQVATALEVLAAVEARMEVLLTQLRDAARHLTGAKVLAARLYGVGPLTALALTCWLAGAGRFSSSRKAVRFTGLDVTVWSSDRKGPPGRLSRQGPPMLRWALYEAGKTHARASAPDHRYYATVKDRKNSKRAALSEARKIVRQACHILAELGDDALTAV

SEQ ID NO: 123357 - protein, 372 aa, unidentified
MKKNSTTAQSPKRAAARQAGPNTIGMDLGDKTSRYCMLGAGGETVSEGSVGTTKKAMTEKFGGMSGCRVAIEVGTHSPWVSRLLSSLGFEVIVANARQVPLISQNSRKNDRLDAQLLARLVRVDPQLLRPIRHRSEQAQTDLMAIRIRAGLVEARTSLVNTARGLAKALGERLPGCDTDWMGVEKLEGLPAAMREQLRPLLEAVKSLTEQIKTMDSTIEQIARTRYPETELLRQVSGVGTLIALTFVLTVEDRDRFQKSRDVGCYVGLRPKQSESGQSQPQLRISKEGDVYLRKMLVQAAHCILSRRGPDTDLKRWGLKLAERGGKNAKKRAIVAVARKLAVLLHRLWVCGEVYEPLRNSQAASSSKKKKAA

SEQ ID NO: 123358 - protein, 313 aa, unidentified
MDAKTGVFVGIDVSKQRLDVHVRPTGESFVVARADEALAGLVAPLGALAPQLIVLEATGGLQVKVAAALAAAGLPVAVVNPRQVRDFARAIGRLAKTDSIDAEVIARFAEAVRPEPRPLPTTAAQMLAALVARKCELVALRTAEKNRRRHAAADFVRRDLDASIEALARRIDALDQEIDQQVKGSPIWLARENLLKSVPGVGPGLARTLIAELPELGRLGRRKIAALVGVAPFNRDRGTLRGKRTIWGGRAAVRAILYMAAVSAARCNPAIAALYKRLRSAGKPAKVALTACMRKLLTILNAILRNQQPWQPA

SEQ ID NO: 123359 - protein, 359 aa, unidentified
MAKPRTLVGLDVHAAGVAAAVLDVETGELGAFSLPGDVVEVTEFCSVLPRPVRATYEAGPTGYALARELERRGVGCLVCAPGKIPRAPGDRVKTDRRDAEHLVRLLLAGKLHAVRVPGPAEEGLRDLVRAREDVRVDLMRARHRLSKLLLRHGLRFEARAWTARHAQWLAQVELAEPTAQATLLDYRGAVDGLVHRRDGLDRAITQSVATSDWAPQAGRLRCLRGIDVLSAAGLCCEVGDFARFERAGQLASFVGLVPSEDSTGERKRRGAITKTGSRHARRLLVEAAWHYRKPPRTGPVLEARQSGQPAAAVAISWSAQQRLHRTWRRLEQRGKPRNIVAVAVARELAGFCWSIARTE

SEQ ID NO: 123360 - protein, 386 aa, unidentified
MTQHSHITASHQLDYDRTLILAVEISNRSWVAAAQVPGLRQKGVKQQLAPRADALMAAIEGYKRRAAAAGMVVDRVIVAYESGGSGFWLARWLQQRGVEVYVMQPSSVPVDRRMRRAKSDRIDADMLLRTLLAWLRGEPRVCSMVPVPDEATEDARRPMREREELIRARVAIVNRIEAVLTVLGAGEYNPLRRDGRERLGQLRTALDQPIPPHARAQIERLLDRLDLVCQQLAELEAQRDQAVESEAAGQAEQMIRQLARVRGIGVQTATVLVHEAFVRRFRNARALGSYAGLTGTPYSSGGTHREQGISKDGNRRLRAMLVELAWLWLRYQPGCALSRWFHDRLGGSRGRLRKVMIVALARKLLIALWRYLRDGTSPQGMELKPA

SEQ ID NO: 123361 - protein, 416 aa, unidentified
MQNEFSAFVAIDWGDQQHAVAVQRLDQTIEQAMLPATAEALHGWLQGLGERCGHKPVALAIEAGRSAVMHALVGYKWLTVYPIHPATSERFRTAFTPSGAKDDLPDALVLLQILQQHRSSLRPLQLDMPATRELAALTEIRRGAVDRRTTLACELQSTLKTMFPQALSLCGDDLWTPLALDFLERWPELATLQRAKQETIRSFYVTHNSRRPSVISERLALIAQARPLTTDRAVIDPAILQIELLIAVLRSLQAQIERIEERIDVCFKAHPEAPLFVDLPGAGPTLAPRLVAAFGTDRSRYPNAASLQKFGGVAPVRVKSGRQVWIHWRWNASKFLRQTFVEWAGQTIPKCAWAKAYYRQQKQAGKRHQTILRGLAFKWIRILWRCWFDRTPYDEQRYLLSLQQKKSPLAQKLAAA

SEQ ID NO: 123362 - protein, 372 aa, unidentified
MKKNSSKKAQSSKRLKSRAGDRLTIGMDLGDKTSRYCVLNEAGEVVLEDSVATTAGAVSKKFQGLAACRIALEVGGHSPWVSRLLTKMGHEVIVANARKVQLISASSKKDDRLDAKLLARLARVDPELLGPIRHRSEAAQLDLMEIRVRSALVEARSSLINTARGLAKSIGQRLPSCDADTMDAGRLAGLPPEVAQVLKPLLEEVESLTERIKESNERVEQIAGTKYPETEQLRQVSGVGPLIALTFVLTIEDPTRFAKSRDVGCYVGLRPKRSESGESQPQLRITKEGDVYLRKLLVQGAHHILSERGPDTDLQRFGKNVAGKGSKNGKKRAVVAVARKLAVLLHRLWVTGEEYEPLRNSKAADLVKQQAA

SEQ ID NO: 123363 - protein, 424 aa, unidentified
MEEKEREKEIRAWIGIDWADEKHDVSLYEVASGKQEAVVIRQTPEALQEWLGQLRSKYEGGYVAVVLEQGRGGLLNALMGCEFLVLYIINPKSLSSFREAFYGSGATSDPVDAELMREMVRQNPSRFRAWRPDDVLTRSLRLLTEGRRNLVDQSTALTNQLTALLKGYYPQALRWVGNLDTTGACDFLEQWPTLQSLQVSSRRQILRFYEKHPRASLDLNEQLKQMQEARPLTLDEAVLESSALMVQALVSQLRSLLASIAAFDRKIAMIFRKHPDRPIFESFPGAGAALAPRLTAAFGTDRDRFQAATEMQELAGIAPVTEKSGKKSFVHWRYACPKFMRQTFQEFADHSRRWCKWAKAHYELLRRRGKSHNAAIRALAYKWIRILFRCWKDRQPYQDELYTKSLFKHGSPLAALLAPSVENL

SEQ ID NO: 123364 - protein, 412 aa, unidentified
MQRIYKNCCGLDVHKKVLVACLKKGNKQEIKEFGAQTKDIKEMANWLLENDCEMIAMESTASYWKPLVNIFEIKDLDFIVINAKDYKNVPGRKTDALDSEWIASLLQHGLLKASFIPKREQRELREATRYRKSLVEERARSLNRLQKMLEGANIKLSSLVSNINGVSSMNLLDYVLNNDEVLDEAILEKLITTKLKATNQEILEAMDGIITDFQKTMMKEVIKHYNELSERIKDMDKIIELNMEEYMSTLTKIIEIPGIGKRSGEIILAEIGLNMEIYPTQNHISSWAGICPGNNESAGKKKSGKTRKGNKILKSTLVQCAQSAVKNKESFYSAQYHKLMVKRGKKRAIVAVAHSMLISIYHMLKNNMDYVDLGSDYYNQFNTDKKVNSYLKKLKELGYEIHTENNNDFPSN

SEQ ID NO: 123365 - protein, 391 aa, unidentified
MIFVGIDVAKDKHDCFILNSEGTVLADVFTIANNRIGFETLLSRIQSCSQGESKIKVGLEATGHYSYNLLGFLLDSGLATYVINPLHTNLYRKSLSLRKTKTDRIDARTIAMMLMSDVDLKSYSNTAYHNEELKSLTRYRFDKVKERAKLKSSVARLVNILFPELEKLVSSLHIAVVYALLSNYPGASYIANANTEELAETLCTASKGRYTKSKTAEIQVAAGVSIGSKMPAKSMELKHTIALIRELDKEISEVESAIDKITSQMDSPIFTIPGIGRHMSAMILAEVGDFSNFASADKLLAYAGLSPSTYQSGQLQNCYAHMEKRGSRYLRYALFNAAKYVCLWCPTFSAYLEKKRSEGKHYNVAISHAAKKLVRLIFAMQRSGKAFLADY

SEQ ID NO: 123366 - protein, 422 aa, unidentified
MEAFNVSDFAALIGIDWADRKHDICEINRDTNTQHLSVISSDPKSINAWALELKQRYNGRPVAVACELKKGPLIYALSKFKHIVLFVINPSSVAKYRAAFTHSGAKDDPTDAIIQVEILQLHMDKLTVIRPDSEDVRCLAQLVEYRRKLLQDRVDLTNKIATTLKNYYPHVIDWFKEKDTQIFCDFLLRWPSLAHAKKARKQTLLDFFNQHNSRYPLINEKRIKEIKDAEILTDDMAVITPNLLLIECLVPQLKQLMLAITRFDDEIKTFYKQHADRAIFDSLPGAGPQLAPRLLAAMGSNRDRYKCAADIQKYAGIAPVTERSGKKEWIHWRYSCTKFLRQTFVEWAGLSVRYSFWAKAYYRQQEGKGKPHNTIIISLAFKWIRILFRCWKTHTPYDESTYLTALKSKGSPLLKFAVESEL

SEQ ID NO: 123367 - protein, 465 aa, unidentified
MSMIERTTETQDVRQQTVRSMKGLDVIHPGAAGLDLHKEVIVACAPMTAGETQHPVRKFGAYTSALLELAAWLKQHGVTTVAMEATGVFWLPVIGILRAKGLEVLLVNAREVRSVKGRPKTDKLDCEWIRRLHACGLLRGSFIPDAETEMLKSLWRHRLNMEEEAARAIQRMQKAFQIMNIRLDIAVTDIVGETGIRIIEAILAGERDPRKLAKLRDPRVAKSEREIADALTGNFKDEQLFIIRENLAHHRFLLERIRETDARMGAQMDTMKKKSDAAELPAATKPDRSRHGETLSRERLYELLGVDLTQIDGVGVLTVSSFLVNAGRDMSPWMTENHFASWLGLSPNVKQSAGKTRAGATRKTASALAHSFRMAVMTIGWLDSWLGAYYRRLKGRIGAPKAITATARKLAIIFYRAVKAGGTVKRLTAEAYEQANRNRILKALRQRAAHFGFDLTMKSHVPVEA

SEQ ID NO: 123368 - protein, 417 aa, unidentified
MSSMHGTVAGIDVHKKMLVVVILRSANPEVDYATGRFGTTHYALEQLAAFLRQHGVTEVAMESTAQYWRGVWMALEGEFQLTLAQARSTRAVRGRKRDLADARRIARRLLSDDLTVSYVPPPEQREWRLLSRARVAMQESVSRLHSQIEVLLEQAQIKLSSVVSDILGLSGRRILHALVDGISDPEQLAALAHHRLRASKEELSDALWGRMTSSQRLVLKFYLEQIEQTEKHMAELEKSLAAALSAEQDTIVRLCGHPGISTLSAQQIIAEVGPHAAAFASPGQLASWVGICPGSHESAGVSTSDRCPKGNRMLRRVLSQVAWAAIAAKGSEPQRRYRRWLSQHFDPSRAAWAVSHYILRVIWHMLHEAAAYRPPDRAALDEASILRKAKPVMAELRKLGYTVSVTPPITQAQAAKA

SEQ ID NO: 123369 - protein, 332 aa, unidentified
MRRVIGIDVHRTFGGVGFWENGRVRHAGRIDMTRTALEGFGKTLLASDEVVVEATANSMAVSRVLAPFVARVIIANPLQVKAIAQAHVKTDKIDAGTLASLQAAGYLPQIWTPDAETERKRRLVARRYQVVRHRTRLKNEVHSILHAHLIPKCPHADLFNARGRAWLAAQQLPDDERAAIDRHVRELDRLAEDLALLDREIAQDAMDDPAVNRLMTITGVNLAVAAGIVAAIGDIGRFNSPQKLVSYFGLNPRVRQSGLGAAHHGRISKIGRSHARAMLVEAAWTAAKAPGPLHAFFVRIRARRGHQIAAVAVARKLTVLCWHLLTKGEDYQ

SEQ ID NO: 123370 - protein, 344 aa, unidentified
MSEVSIIGLDIAKHVFHAHGVDEQGRAIFSKRISRRKLLDFFAAQPSCTVALEACGGAHHWARQLSQLGHDVRLIPPAYVKPFVKRQKNDAIDAEAICEAAQRPNMRFVAVKSEQQQAAGLVFRARDLLVRQRTQLINAIRGHLTEYGWIAPKGPAHVAMLGDLLEQEEMASSLPEAARAMFRLMLDLLAGLDGKITDLDTEIARRAREDEVSRRLMTVPGIGPISATAIAALAPPAETFAKGRDFAAWLGLTPLQRSTGGKHKLGSTSKMGERTLRRLLIIGSSAVVQQASKRGAPKGSWLEQMLARKPRMLVTVALANKMARIVWALLVKQENYRAPVAAKA

SEQ ID NO: 123371 - protein, 288 aa, unidentified
MRLFVGLDVSLAKTTICVVSEHGQILKEAEVPSEPEVLARWAGTLDGTIAAIGLEAGPLSQWLHRSLTEAGFKTVLMETRQVKGALKAMPIKTDRRDAEGIARLLHMGRFRPVHCKSISAQEVRAVLGARKAFQQTMIALEMSLRGLLRNFGLKVGAISRGRYEQRIRELAECNPMLEAATGPMLRARASLRQELAGLERRVRQLAQDDPVCRRLMSMPGVGAVVTLTYRSAIDDPSRFTSSKKVGPWVGLTPSRNQSGGRDVSGGITKAGDVNLRRALCQAAIVMMH

SEQ ID NO: 123372 - protein, 378 aa, unidentified
MHSMTQEDRLVVGGVDAHADTHHAAALDQRGALLSTNSFPTTTSGYRELLDWLSGHGEIDVVAIESTGSYAAALVRYLRQHDVRVVEVNQPHAHTRRRVGKSDPIDAEMAARLFLAGKAKAVPKQTDGIVESIRLLRVARHSAVKSRSAALVQVRDLIITAPQELRDRLSCRKTLRGKVTVCARFRPSGRELRSPLQAAKFALRSTAQRVQALDQEIGALDRELEQLVAAAAPRTVQLLGISTGHAGQLLVTAGQNIERLHGESSFAMLCGASPIPASSGKTTRHRLNYGGDRQANRALHLIAVCRLRYCERTRTYAKRRTAEGKTHREIMRCLKRYIAREIFNSLRADLADTAQPRPIVSTTIMCGNPGFGINRTRT

SEQ ID NO: 123373 - protein, 399 aa, unidentified
MLAVGIDISKSKSVAAILNQDGSMHTSPFEFHHTQPELDAFIKYILNSKQSATILMENTGHYHYPVLKAFQEAGLPVCMVNAYQIKKFGDMDLRKAKTDKKDAVRIARYALEKSYSLVPYTSMEQKYEDLRFLARQYNQRMLTLKTNKVFLLNLLDETMPGITNILPLTTRTPETSLSVLFINRFKSYDRIKKMGKSRFLDAFEKIARKSRNRQTKTYGLAIYEAALRNITTRGENEYTLAAQDQCLELVCESQKAADSIILKMQTLAETLPEYAVLRSMAGVGDRLGPLILAEIGDIRRFHSGKALNAYTGNDAPPYQSGTFESHNRHISKRGNAALRKYCFEVMQALKLTRPQDDPVYLFLLKKEQEGKPYNVAKMAGVNKFLRIYYARAMETLKQQ

SEQ ID NO: 123374 - protein, 397 aa, unidentified
MIAVGIDIPKAKSTVAVIDSDGTVLASPFTMAHTQPEMEAFVTYLKGLGEPTTILMEYTGHYHYPVLKKLQDEGFPVCIVNPYQMKKYGDVEIHKAKTDKKDALRIAAYALEKSYKLVPYSSMEQKYEDLKFLSRQYNQRISYVAKLKVQLIALLDQTMPGITRILPLNSRNPEKCALLLFIRRFKSFDEIHRIGKARFLASYDVLAKKTSERSASSKGLSIYELAVDSITTRGEDPYIWLSQNQCVDLLSTTQNAADEIISQMRNIAETIPEYKVLRAMRGVGDRLGPIILAEIGDIRRFHSGKALNSYAGNDAPPYQSGQFESRNRHISKRGSSTLRKACYEVMQALKLTKPQDDPVYLFMLKKEQEGKPFNVAKMAGVNKFLRIYYARAMELYK

SEQ ID NO: 123375 - protein, 350 aa, unidentified
MIIGVDYHPSFQEIAFLVEETGECDEGSLKHSNGEAEKFYRDLKARGISARVGMETTGYSRWFERLLAELGFEVWIGDAAEIKTRRAKKKKTDREDARLLLKLLLEDLFPRIWVPSPENRDLRQLLWHRHRLVQMRTRIMNQLQALAMNENRCWKGKLWSERGRAELERLPLAFWASHRRQGLLELLDRMNPAIDELTAAAEREAKKRPEAVRLMTHPGVGPLTALAFVLIIGTPERFGCAKQICNYVGLIPSEDSSGGRQRLGHISKQGSSLLRFLLVEAAQAAVRCNADWRRRYRHLAMRRQRNIAKVAMGRRLGARLYWMWRNGCEYSPSLEFGSHAGKLGTGNGGQ

SEQ ID NO: 123376 - protein, 343 aa, unidentified
MNEVITIGVDLAKNVYQVHGVDGSGGVVFRRQLRRGQMLPFFKKQRPCLVGMEACATSHHWGRELRALGHQVRSMPPRYVKPYVKRNKNDMADAEAICEAVTRPTMRFVEIKTIDQQSVLMLHRTRHLFVRQRTMLINALRAHLAEFGIVAGIGRNGLERLLKVIEDGENGRIPPSARDCLLALRDQLEVIKHQILDSDRRILAWHRASELSRRLDDIPGVGPLIATALVASVPDPHAFKSGRDLAAGIGLVPRQNSTGGKERLGHISKAGNRYLRMLLVVGALSVIRRAKQVGYTRRPWLTKLLERRSTKIAAIALANKNARTAWAMMAHGTCYQEPVSQAA

SEQ ID NO: 123377 - protein, 313 aa, unidentified
MSQNNTPILHVGLDVAKSSLQLDLAGQSHLLTNDAKGYARLFKLLRDHPTAQIVCEASGGYEQPVVRALHAAHLPVSIVEAGRVRHFARAKGQRAKTDPIDAVMLSAYGRALQPAPTAALPVQQTRLAELSARRLQLLQTLLAENNRAHHYLDKFCVRQAQQLRRLLEKQIEQCDAAIAQLIASDPGLQQKAKRLDTIPGVGAVTAATVLAELPELGRISNEAAAALAGVAPYNRDSGSSQGVRHIAGGRTAVRCALYMAALSAVKYDPILKAFYLRLRAVGKKPKVAIVACMRKLVILMNRLLKNPNFQLAF

SEQ ID NO: 123378 - protein, 343 aa, unidentified
MQAVTTIGLDIAKSVFQVHGVDAEGNIIIRRQLKRRYVLAFFQKLPPCLVGIEACASSHHWSRELRALGHRVRLMPPAYVKPYVKRQKNDATDAVAICEAEGRPNMRFVETKTTEQQGCLMLHRTRHLFIRQQTAVINAIRAHLAEFGIVAPVGRNGVDQLLGVVADANDKRLPSVARACVAALGAQLQMLKAQILQFDRLIRAWHRSSEASKRLDEIPGVGPALATALVASVADPKAFRSGRDFSAWIGLVPKQNSSGGKERLGSISKRGDRYLRSLFTAGALAVIRYAKIHGTKHRPWLAALLARRPTKVAAIALANKIARMAWAMMARGERYKEPAALAA

SEQ ID NO: 123379 - protein, 419 aa, unidentified
MSKSNIARQIMQVQPGSLHAGVDLALEKNVVIVINEKGQRLDHFSFPQEREGYDYFLRRLEELRQKHQAPGVVVAMEPSNYFWKLLAKELEQKQIAYRLVNAYTVKKHREGNQLDQSKDDQRDAAQIAELSRSGYYTKTCLQKGAYEELRQYAILHDQLIPAITREKNVIWGLVGQVFPELSQVFKNPARETSFALLGSCASATNIRLLSLEDFIATVRTAYSGKKLCVSKLRLVYRLAATSIGVSEGLHAIQLAIQVHLAELQTLQQQLNRVISAMSACLALMPESPFLLSMKSLNTVSAALFLAEVGDPYRYHSSAQWVKLAGIQPAPNFSGKKQRSKTPMSHHGRSRLRSMLYFTCLRLVHQDDHFAQLYAHLQRRPNNPLTKMQALGVLMNKLLHILWALIHNQTFYNPSFNQSI

SEQ ID NO: 123380 - protein, 383 aa, unidentified
MKSVCGLDVHKDSVYLCILSEFGELIEKVFGVLTYQLEEMRDLMLHHHVVEVSMESTSVYWIPIWRVLSPHFKLNLANPYFIKQLPGRKSDVKDAQWIAECTMKELIRGSFVPPEIIQQLRQYDRRIFDLNEEIVRKLSKLDAVLQRCNIRLSNYVSNVDSKSYKAVVRAISQGITAPEELVRLIHGRIINHHGIDVITASLKGVVSLAEIDMISQLRDELDMAEAHKEKCQARMLEICEREFPEELRRLQTIPGIKERAATSLIAEIGTDMNKFETANHLASWSGLKPRNDESNKKIKSRSITHGNVYLRKTIIECAWAASRTKDCFFSRFSFHQTQVRKKNKMKVMVAVARKMLIAVWHVLHDNTIYIDFTTDRKTSRTKG

SEQ ID NO: 123381 - protein, 372 aa, unidentified
MKKKTTNYALELALAAGATTNKDQNRPKAQRICVGIDTALKTYQAARKVDNGAIGPVANLYSEQGLLFYLEKQCEQAEEVVVVYEAGPFGYVLYRKLRARGIKCLVCVPDSSKQQRKRRKNNQIDARTLTSNLSNYLNGNEEALQLVRVPTEEQEQARLFSRQHDQLVKDRKRMAAEGNSLLMSQGLGSYSNWWRPKAFSRLQQSLPGWIVEMLQVWVDVLRKLDEKIQTAKAALAKRWSGPRPKGAGANSLVQLGAELLDWSLYTNRRKIACLSGMVPSEWSTGRGQRLGSITKVGVPAIRRIATEMVWRIIKFQPQYRPVQKWQPVLEGSNRALKKKAVVAIGRQLMVDLWRWQTGRATAEELNLIMVGI

SEQ ID NO: 123382 - protein, 358 aa, unidentified
MAVTGGTRRIVGGVDTHKDLHVAAVVDEQDRVIGTRSFATTRQGYRQMLAWMRSFGELQRIGIESTGSYGAGLLRFMQQAKVAVLEVTTPDKQDRRRRGKNDDLDAQNAAHAAFAGQRTVTPRSRDGMIESLRILMACRKTAVSARRVALQMIHNTIVCAPDGLRDQLRSLTRMQLVRTLASWRPDLTAYRDLDSAYRIGLKSLARRYLELHDEIADLDVMIAAIVDELAANLVARNSIGHIGAAQLLLTAGDNPERLRSEASFASLCGVSPVPASSGKTVRHRLNRGGDRAANSALHIIAIGRLRTDQRTKDYVARRIAEGHSKLDAIRALKRYLAREVFALITQRRKEINATRIAA

SEQ ID NO: 123383 - protein, 350 aa, unidentified
MLIIGCDYHPGFQQIAFVDTESGELSERRLAHREQAEQFYQELKQKNLAVRVGMEASGHSRWFERLLRELQFELWIGDAAEIRTKRVRKQKTDRQDAQLLLQLLLENRFPRIWVPDAANRDMRQLLWHRHRLVQMRTRVMNQLHVVALNEGLRRKKALWRPAGRMELESIVLAPWASRRRQDLLDLLDQLTPKIQELAHALEAEVEKRPVTRRLMTHPGVGPLTALAYELVIGTPERFHCGKQIASYVGLVPEEKSSGDRRRLGHISKQGNVLLRFLLVEAAQVTVRSHPEWRNKFFHLAMRRGRKIAKVAMARKLAVHLYWMWRQGCDYGQMQKLGSHAGEPGHPDGEQ

SEQ ID NO: 123384 - protein, 315 aa, unidentified
MRSTVAQSVGVDISKDTLDVAIHPGGESFRITNNPEGHRALIKRLKGFDIARIVFEATGAYHRLFQQAMVEVGLPWVKVNPCQARRFAQATGKLAKTDRCDAIMLARMGAVLDLETRAPASKTVEVMRELVNARDALIKDRVAALNRQAIAVSPLIKRQLAQRLRQIDGQIEAIDRRLKTLRNADSDLCQRFDILTSIPGIGEVTANVLVVETPELGRLEHAQAASLVGLAPVPRDSGQTHGKRSIRGGRPRARQALYMPALNAIRLNPEFKAKYEAMVKAGKPAKVAIVAIMRKLLILANALIRDRRKWAPANP

SEQ ID NO: 123385 - protein, 449 aa, unidentified
MFSHLSILSWILICEGCRCSMIMGFTKPIEHFNSQRKKGITMNTLYVGIDVSSKSNVVYLMLPNGDKHSNFSVANSHEGSIQLVKRIHSALTSHSLDTVLIGLEATSVYGDNLVYFLREDATLAPFNRKIHVLNPKQVKKFHDTYNDLPKNDYVDSFVIADCLRFGRINKEVYLGDYHYKALQNLTRARFFAVQNLVKEKQRFMNVLFKKYSTMTQEKVFSDTFSTTALAVYDEFESAEALANMDLHELTDFIMKKGKNRFPDPDAVAKAIQKAARSSYRLPKTVNDSVNQVLSISITSMKALESQIKEFDKAIKAQMELLPNVLISIPGIGPVYSAGIMAEIGDINRFNSQAALAKYAGLAWKQHQSGGFEAEVTRLIPSGNRFLRYYLCEAAFSLVRCDKEYSDFYHLKYKEVNRCQHKRALALTARKFVRLVFRLLKDNRLYGPAK

SEQ ID NO: 123386 - protein, 325 aa, unidentified
MQYLGVDVSKDTLEVADVSGKLRCSFHNTGAAIEELLLWSSQHFPEGDLHLVLEPTSTYHHLLVKALASKGVPYTLINPSHTAAFSRLQGRRAKTDRVDAHLLASLGESLHPKPSPPLEEEQEKLKVLSRHVEWLEKEMQGASNRLETARFSPWTPQAVLDSLERTIQQLEEEAKKVREEMAAHQQEQPEWNAQVKLLTSIPGIGERTAVLLLSEMPQVANCSNAKSWVAFCGLNPEPRESGKAHYSRLSRVGTARVRAGLYLPAVSALRWNPAVKALGKRLGEKGKLGRVRVVAAMHKLLRLCFGVLKSGRPFDMALHQSTLTA

SEQ ID NO: 123387 - protein, 335 aa, unidentified
MPDGIRWVGLDVHARESTLAIFDQATGEVTRKRVVGRPHELLPWLRAVERPARMVYEAGPTGYGVARRARAEGIELDVCAPGKTERPPADRVKTDKRDAVRLARLLAAGELVLVTIPSVEREQLRDLVRCREDIRVDLARARHRIDGFLLRREIYWVGTGEAWTRKHRSWLTSVRFADHASQATLADYLHAHDVLIARRDQVEADLATLAVSAPCAHTVARLRCLRGIDTLSAVGLCSEIGEWERFDHPDQLSSYLGIVPSEHTTGQQRRLGSITKAGSNHARRLLVEAAHHYRRGPVVGEALERRQRGQAPRSSTFPGARNVASTPAGASSDQS

SEQ ID NO: 123388 - protein, 423 aa, unidentified
MMKLKYSICCGLDVHKNVIVATIVTTNKDGISEYLQKSFSTINSDIQRFHNWLIENNCYHVCMESTGKYWIPIFNYLENDIDVCLTHPKYVKAIKGKKTDKKDSKWIADLYKFDLVRCSFIPPKDFRQLRELSRYRFKLVCMKSSEKNRIQNCMTISNVGIASVLSDPFGKTATEIISYLLEHTADSMDEKAVRKLIKKGAKSKSDEIIEAIKGYTIETDQAKKPELARGHLEYLDDMITQTEVELYVRIKPYYEFVEFVSTMPGMTELSSTIVLAETGVDMDIFDDAKHLCSWCGLSPANNESAGKKKSVRIAKAGDYLKPMMVQCALAAIKSKKQPYFAIKYGRIKKRRGHKKAIIAIARMMMVCIYHMVSEKKPFTPTDYEELMDPQNHVESVVLNENNVFAYLESLGYDSSKLVKRNDN

SEQ ID NO: 123389 - protein, 346 aa, unidentified
MDIAVLGIDLGKNSCSVVGLDGSGRVVLRRRMNRDSVVKLASGLPACIVAMEACCGAHHGRLFDEMGHQVRLMSPEYVRPYVKAQKNDDRDAEAIAEAATRPTMRFVELKSAEQLDMQSLHRARDRLVGERTALINQLRAVLLERGFTAPKGRRNLERALTTLLDEQGEPPPSFVLSSRVRRLVDDMRAEWAELDRRIAAFDDEFAATAKADATARRLATIPGIGVLNATALAAAIGDAATFARGRDLAAWLGLVPRQATTGGKPRLLGISKRGNVYLRRLLIHGARAAMPSLLTTNTALGAWLRGLVGRVHKNAATVALANKLARIAWAVLRRGETFDAAKLAAA

SEQ ID NO: 123390 - protein, 339 aa, unidentified
MNNSVIGLDIAKNIFHLFTVLADGKTLKKKLKRHELLAFFANYPASIIGIEACGSSHHWARELTKLGHEVNLLNARFVKNYVVGNKTDFNDAEAIYEAVLRPNKRVVAIKTVAQQDIQLVHNIRKDLVDQRTALVNQTRGLLSERGIVINQGIEQLREQLPLIIEDAENSLTDLSRELFAEQYEKIKTLDAEIKAQDQRINRLCNTNDLSKRFLDVPGVGPLTATIVAADIGDGGKGYKSSRDYAASLGVVPKQHSSADKQHYMGISKRGNRYIRTLLIHGARAVLKNCGKKTDKLSLWLQSLVARRGFNKAAVALANKNARILWAMASNGKDYEALVA

SEQ ID NO: 123391 - protein, 369 aa, unidentified
MDHHSVAYVGFDTSKTKHAVAVAEGGREGEVRYLGEIEATPTAVERLLGKLAHKYKTLHVCYEAGPTGYGLYRHIRALGHACDVIAPSLVPKRPGDHVKTNRRDAVTLARLLRAGELTPIWVPDEVHEAVRDLVRAREAAAQDLRHKRQQVLSFLLRHGRIFTGHRHWSRAHLRWLAGQAFNHPAQQIVFQDQVDAVADAQARLERLDRQLTDVVPTWSMAPVVAACQAMRGVSFLVAVTFVAEIGDVRRFESPRQLMAFLGLVPSERSTGDTVRRGGLTLAGNRRVRRALVEGAWSYRHPARVTETIRVRLAGLPKAVREIAWKAQVRLCTRYRRLIAAGKKAPVAVAAIAREMAAFLWAIGRVVEPA

SEQ ID NO: 123392 - protein, 382 aa, unidentified
MSKTEIEFPLETTVFAALELSKGSWLLAIHSTDRSQPSMHHIKGGDVAGLLTRLNRASEQHKLRTRKEAKVVVCFEAGYDGLWLARWLEEHDVRCFVIDASSLEVNRRARRPKTDRIDAAKLVRTLMAWCRGERDACSMVRVPSREDEDLRRSHRERSRLVRERTAHINRIKGLLFAYGVRITNIRYRCDKIKLDELLTGDGHPLPPRLRSELDREIVRLKLVKQQIAEVEKERDEADASCSKSEAIRHRLIKLRGIGPAFAAILTREVYYRSFENRRQVGSYIGLTPSPHDSGQSETCRGISKSGNAMARSVMIEAAWLWLKHQPSSRLSQWYQQRTAGHVGRIRRIMIVALARKLAVAFWRFLERGTIPDGAICAGLPRA

SEQ ID NO: 123393 - protein, 351 aa, unidentified
MNILAMDLGKSNTVVCFYDSESGKHKFGKVKTTPQQIHDLLVKHSPDRVAFEICSAAGWVYDVCSALKVETQVANSNTQGWRWKNVKNKNDRADALKLAQLSAMNQLPVVHMPKHSVRQKRAIIQYRQSLVRQRTRIKNGIRAILDKQGQSMPAGMSGWSMASIKRLMEMSLPLEKCDIDNLWRGQLRVELEMLEKTEGCIAEVEKKLDALGKQDKAIQLLQTTCGVGPRLAEAVAAFIDEPERFKSSKQVGSYAGLTPRQYQSGDMDHQGKISGAGNKVLRSLLVEVSWLGLRHNKWMNQTYHRILRGSESRKKIAITAVARKLLVRCWAMLRDGQPWCDSEIKADKQAA

SEQ ID NO: 123394 - protein, 345 aa, unidentified
MDYFAGIDGSLETANICIVDQDGTVLREEKVESTPEALIDALRRFRKPLKRIGLEAGPLSTWLYRELRQAGLTTILVETRHMKSALSAMRQKTDRNDARGIAQMMRMGWFRAVHAKSTDSQELRVLLTHRKTMIGKLIAIDNEIRGPLKAFGFKVGHTTRLTFERRVLELVQGMPRLDSMTRPMLRVRAVLLTEIATLHRMVLKEVRHDPVCRRLMTIPGVGPLVALTYKTGVDMPERFARSSDVGVHFGLTPRRYASGATDVSGSISKCGDGMVRTALYEAASVMIHHGRRWSALKAWAMKLAKRAGLKRAKVALARKLAVVMHRMWLDGTDFRWTSEQQAVRA

SEQ ID NO: 123395 - protein, 481 aa, unidentified
MKPKPKEKSKQATRPTPSKWHEMNRKQRREMTRKIQSEDLSLEVVHPAAGGIDIGNESHYVAVPPSRDSQPVQRFGCTTAELKAIADWLKQCGVQTVAMQSTGVYWIAVYDILEAAGLEVYLVNARETKNLPGRKSDVQERQWLMKLHTYGLLRNSFRPSQEIRTMRTYWRQRNDLVQSAGRHIQRMQKAMTQMNLQLANVLSDVSGVTGQAIIKAILAGERDPHKLAAFRDCRVKASEEEIARSLEGNWQEDLLFVLKQEQAGYEFCQKQMAECDRQIEQYLQQREDRSRGAILPEEKRKERLKKKKGNAPQFDLRAELFRISGTDLTRIDGIDVMTAMTILSEAGWDMSKWKTEHHFVSWLRLCPDNKVSGEKIMGKGRLPTNNRVTIALKMAASTLWASNTYLGAQFRRLKTKLGAAVATKAMAAKLARLVYRMLRYGMPYVDRGAEFYQAQHRQLQIKYLKWKATSLGFQIIQVPAA

SEQ ID NO: 123396 - protein, 351 aa, unidentified
MKTELTAQPKLYIGIDIHKRSWKIHCATDLFSGKSFTMPPKPEVLQAYVAKHFSNHEVTTAYEAGCCGYYAHRSFEKYGWNSLVVNPADIHRKGKEKYTKTDKIDAQLISRELKDGRLDSIHVPNIEREQLRSLFRRRNDLVKDFRRIKSTIKMQLLYFGVAIPEEFDNDHWSHKFRDWIDALKFMYPSARETLDSRMRSFRFIDQELRDVSSKIRAYCRKHFKKDYYLLRSIPGIGGIVASGIICELGDLRRFNSIKHLAGYVGLAPGVHQSGDNQRSTGITMRAHRLMRSYFIEASWQAIRTDPIMQAYYRKHVGKNVKSIIVKVARKLLSRTLGVIKSETPYAIGVIE

SEQ ID NO: 123397 - protein, 386 aa, unidentified
MASRISGQETKLRGIPHFAISHLNKGIGMKRVIKQVLGIDVAQKELVVCLGRMHDDLTSDLFAHHIFPNTAKGMGSLLAWVGKLTDPLLAVHYVMEATGVYHERLAYFLDDNARPVSVVLPNKISNYARSLSVKTVTDRTACEAIARFGLERHLEPWHKPQPVLGTMRQLTRERDQIVAERSMAKNQLHAEKAQAQPHAASVKRVQQRIRLLDRQEKEITAEIADVVREDGQVSESVKLLRSIPGVGLLTAASVLAETNGFELIRNKRQLTSYAGLDVVEKQSGTSVRGKPRISKRGNRYLRKAMHMPALTAIRHDQRFKGLFVRLVSKHGVKMKAVVAVQRKLLELMYTVHSTGVAYDRQYLEKQQNTGQQASSDVQWSKKLEAA

SEQ ID NO: 123398 - protein, 326 aa, unidentified
MNLMPLGIDIAKQKFNVCLRFAHDKLKHKVFTNNQAGFTQLHRWLQQHAGARVHACLEATGAYGEALAFYLHEQGHLVSIVNPAAVKAFAASCLSRTKTDRVDAELIARFCLAQQPPAWAPAPAEVRELQALVRRLASLIEMRVAEENRLAAGPTVAQVQRSLEELLAHLQAQIKRTEKLIRSHLDQHPGLRQQRDLLTSIPGIAETTAALLLAELPHLKQYRSARQVAAVAGLVPRERQSGSSVKGRVRLSKIGNARLRKALYFPAITALRCSPFMQQWAQGLRERGKSKLSVVGAVMRKLLHLAYGVLKTNQPFDPEWTTRAAG

SEQ ID NO: 123399 - protein, 315 aa, unidentified
MKREEIYVGIDVAKDRVDVAIRPGGDTWSADYDERGVSELVSSLRTAEPAAVLLEATGGLEVPLVSALAAAALPVIVVNPRQVRDFARATGKLAKTDALDAQVLAHFAEAVRPPVRPLRDEDTQELNSLTTRRSQLMTMLVAEKNRLRRASHAVHPSIRSHIRWLEQELSDLDKDLQKALRRSPVWREKDDLLRSVPGVGEQLSLSLLAYLPELGTLNRKRIAALVGVAPFNSDSGPRRGKRSVWGGRSRLRAALYMGALVASRYNPVLRVFYQRLLAAGKPKKLALTACMRKLLTILNAMVKTGQHWNHQDNPA

SEQ ID NO: 123400 - protein, 331 aa, unidentified
MAEAKRFIGIDVAKAQLDVALGPKGERFAVANDERGISALLKRLEPADLVIIEATGGLEVPVASALATAGIGVAVVNPRQVRDFARATGQLAKTDALDAQVLVRFGEAVKPQVRALPDAQAQALAAVVNRRRQLVEMLTAEKNRRANSPKVIHKSIDEHVRWLEKRLAGFDDELAALVRQTPIWRERDELLRSVPGVGPVLAATLLAHLPELGALNRKQIAALAGLAPFNRDSGKLRGSRCIWGGRAQVRRVLYMAVVSAVRSNPVIKDFYAQLRARGKYPKSALTACMRKLLVILNAMLHNQTHWHAPALTPSTSALSPLLGAVSEHGCC

SEQ ID NO: 123401 - protein, 366 aa, unidentified
MKKLRRAKNRFKGFTVGMDIHKKFIEYVILDQRGNEVSDGRIGANWEEIERLLNEWLKKGAVQVAFEASGSCYWVFDRLVEKLGREKVVVAHAGKVKVIAESGEKSDENDAWWLAYLQWDRRLPRAYLPEGKLRELRIAGREYRYVTEQRADLLRRIRSLMMQRGVRLPKQWWTSKVKRMVVREEILKLRGTLRRAVQKLRRQILSLGKDRKYWEKVLKQLNKELPDVEVIQAGMPGLKKITATIAYGELGDPRRFRSAKAYAKATGLTPQNRSSGGKKQRGRITKEGSVHARWAFTRAVVACLRCKKGAGVVLGDWVRHRMRNKPKKMVLVAAARKLAEGVWRLFQYGEVFDLERAFPRPRRRAA

SEQ ID NO: 123402 - protein, 397 aa, unidentified
MTDYAVYCGLDVGKQAHHACALDPAGNRVFDAELPQDEARLRTLFAQLLTHGPVLVVVDQPNTIGALPIAVARAMNIDVAYLPGLAMRRIADLHPGTAKTDARDAFVIADAARTLPHTLRRVDVGEDTLAELKVLVGFDDDLAGEATRLTNRIRGLLTQVHPALERVLGPRVSQKATLALLTKFGGPTGLRAAGRTRLMSTARKANPRGAHTLVDAIWAALHEQSVVVPGTAAADTILPKLAASLTDTLDQRRDIATQVEQVLDAHPLAPVLTSMPGVGVRTAARILLEVGDGSTFPTAGHLAAYAGLAPVTHRSGTSIRGEHPARSGNKNLKRAFFLSAFAALRADPTSRAYYDRKRAQGKKHNAALICLARRRCDVLHAMLRNNQPYQHRTPLAA

SEQ ID NO: 123403 - protein, 411 aa, unidentified
MEVYCGIDWAEDHHDIALVNQDGQLLARRRISDDAAGLAELLALLAEHGDSPGDPVPVAIETPRGLLVACLRAAGRQVYPVNPMAVARYRDRHSVAGRKSDHGDAVVLAGVLRTDRDMHRPLPADSELAQAIAVLARAQQDAVWDRTQAHNRLRSHLREYYPGFLAAFGNTRGGIMRPEARVILAAAPAPADAATLTLAQLRALLRKAGRSRGIDTEAARLREAFRTPQMRQLPLVEQAMGRQALSLLGQLDAACAAADDLEQAVTQSFNLHPDAGIITSFPGLGTLTGARVLAEIGDDRSRFQHAKGLKAYAGAAPVTRASGKTKSVTRRKVKNNRLNAAGYTWAFSALTASPGARAHYDRRKEAGDRHAAAQRNLFARLLGCLHHCLITGQHYDEATAFPATKKITQAA

SEQ ID NO: 123404 - protein, 392 aa, unidentified
MEVMIETCCGIDVHQKTIVCCILDGPLDTNKPKKLYKIFGTRTSELRKALEWLEENKVTDIFMESTGQYWVPVFNIFSEGNVNMVLANPEHIKNVPGRKTDMKDAEWIAQLGRVGLIQNSYIPAPEVMELRLMTRRRQSYTQKRTQSKNELHNILQRSNIKLTGYLSNIFGKTGQALLQLFINGEVLTLESVGACLHGKVKASSKDILQAMDGKISLTDRRLLDDSLDEYQFYTQKIKKIEHDIEQYILSHFPLEYELLQSIPGVKQHSAAIILAEIGPSIEAFRTVSHLASWTGLSPGSYESAGKKKSSRVTRGNKYLKTALITSGGMAGRSRDPAFRSLYHRVSNKGTKIKAVVACGHNLLRILYKILDDKVPYDEKRALGLRQQKLALN

SEQ ID NO: 123405 - protein, 424 aa, unidentified
MRFIGLDVHLDFCEIAICESGRVRSAGRVPSSPEGVQILANSLGPQDQVALEATGNALAIARLLESHVARVVVAARSELRAITEAKVKTDRHDARTLARLLAAGLLRGCWLPDDTTRALRRRLARRAQLVRQRTRAKNEVHAVLMRNLKGRPPVTDAFGKRGRAWLAELELPGDERQTVDGCLRQIDFLDAEIAILERVIAEHALASAEIKRLMTVPGVSLMTAATFIAAVGEIRRFHDPRKLVSYLGLDPKVRQSGIAPARHGRISKQGAAQVRQMLTEAAFVAVSTPGPMRAFYQRVRVRRGNQIAIVAVARKLAVLFWHLLTRGEDYAFGRPSLTRKKLRALELRAGAERHPGRRDLPTKNSYSQRTHRERERELSEHAELAYRRLVADWQASGPAKVGAGATPGRASRGPSKGQAARQTQ

SEQ ID NO: 123406 - protein, 340 aa, unidentified
MTKLYVGIDVAKDKFDVSYTVDGQNFFGYSTFTNDKKGIKKFFKQAEKFMQKYEQELIHFCMEATGIYHFELCEYLQNSAHIVSVVNPLKTKSFSKSLMLRTKNDKVDSSMLSLYAFLHNPPYTPKLPESIRKFRSLVRYKESLSESRTQELARLKSSLDADVKQLINKKIRFIEKQTAETIFKIQNLIKEDEFLSTQMKLLKTVDCVGDKVAWVMLAEFKFEDIESISPKAMVAHAGLSPREYSSGSSVRGRTHISRMGNSSLRKILFLPALGCIKNPNYFTGFYFNLIEKGKPKKIAITAVMRKILLTSMGVLKNQQPFDPDWAEKTRTKYLENLKVA

SEQ ID NO: 123407 - protein, 454 aa, unidentified
MTKKVTRSTTPEYYIGLDVHKSSISIACAAADGSAPEFYGKTTGSNLSVERALVKLLKKLGCEKADLRICYEAGPTGFVLVRRLVQLGYDCIVIAPSKIPQKSGDKVKTDRKDSKKLARLLRAGELEAIHVPSPIDEAIRDLCRARTDAVQARRRAKKQLLGFMLRNGMSYSGKTHWTQGHLNYIRKLAMPDPVQQVVLEEYIMEIDAAEERVARLFAHMEEKLESWPRRPMVCALMALRGLSLLRRALRPGFARECHQWLAVQVVTAMTTVAELGDLDRFETPRQLMGYLGIVPGEDSSGERRRQGAITNVSSVAFSEGGDRQLARALDARRERQRLRVQGHGVARPVQAPGRAEPRRQRALVARTGTPLLPPPAPLSQEATAQQSHHRHRTRALRFHLGARRRHTQGTARPATGGTLTPRLARRSPGDAGPQPEPFRRPTTIPADPRRLPDG

SEQ ID NO: 123408 - protein, 355 aa, unidentified
MIKVKTNFEGQTVFVGMDIHKSSWNLGIHLNDQFIRNVHQKTSPHTMIQFLLQQYPGANYKAAYEAGKFGFWIQRQLTASGVDCMVINPADIPKSQKDTLQKTDTRDARNIGLRLQSGVLRGIHIPDEQQEADRVFFRHRKRIWKDLTRCKNRIKGLLAFSGIDIPEQYDNANWSHNFINWLKALDCKQTSRRIALNYMISQMEFLRKELLTISNAIRKMMREQRYKKNYYLLRTIPGIGPLTAASILVEIGDIHRFGTFYHLNSFVGLLPMEHSSGQSDNKLSLTVRKHRQLRSDLVESAWTARRTDPAMALYYQEQIKRKDSKIVIIKIARKLLNRIRYVLLNQKPYEYGIVK

SEQ ID NO: 123409 - protein, 304 aa, unidentified
MNGIGIDVSKRRLDIGTTDGQTLQVSNSPSGYAELSTWLSTRPAIQIVLEATGGYEQTVLDFLHKAGHPVIRANALRARRLAQGLGKVAKTDRLDALVLAQMAALVELPSYQPLEPWQRKLREFVRARRQTMQALTVARQQQEMVTDRELRRQMQGNIIRLQTLVERLGKQISERVAQQPQLAVLKSMKGVGPALQAVLASYLPELGQISGKAIASLVGVAPISHDSGAMRGRRSIHGGRAEIRQVLYMAAMSAMRHEPRLRDFYRSLRARGKEGKVAIVAVMRKMLVILNARVRDAENGLVPA

SEQ ID NO: 123410 - protein, 324 aa, unidentified
MQTQSIGVDVGKTELVASIRDSDGNSAMPALFPNSSVGLKKFLVYLKTNNISSDDPILFESTGPYHWRACRELADEGYFIKVANPLHTKQIARLSIRKRKTDKVDSQNLAFLASQNYGYRFVETEAMAKSKAMVRHYWKLRQSATDHLRHDRYMKEYRGINDESVSKFMIKRCEALKKIIVKEWSKGNDVKYLDSIPGITPFLAATILAELLPLERFKTIDQIVAFSGLDPSVKQTGGKAGHHGHISKRGSPTLREALFLAAFGSFQHEPMKSIYVRYKARGLHHNTILCILGRKILRIAISLLKKRRVFDASKLSTDDDLTGT

SEQ ID NO: 123411 - protein, 402 aa, unidentified
MNCVGIDVSKGKSTIAVMRPFGEVVVSPFEVCHTVSELSELARLLKSLDGETRVVMESTGNYHAPVAWLLHGAGLYVSVVNAMLVHDYGNNSLRRGKTDKKDAVKLANYGLDHWLTLPRYVPEEDARLMLKTCYRQYQQYSKVQTMLKNNLISLLDTAFPDANRLFTSPPRADGSEKWVDFVAAFWHCECVCGLSKKAFTTKYQKWCRKHGYNFSEDKALDIYVSACGRFGVMPKTKTAKLLVEQAISQLQATSAALAALKQEMQSLAASLPEYPVVMGMFGVGPTLGPQLIAEIGDVRRFHSKKALVAFAGIDAPPYQSGQMDVHSRSISKRGSASLRRTLFLVMGVLLQCAPMDEPVYQFMNKKRSEGKPYRVYMMASANKFLRIYYASVKTYLDSLEHN

SEQ ID NO: 123412 - protein, 331 aa, unidentified
MKILDTVGIDISKLKIDVRIHSSQSYAQFENSVKGFNKLIKWVYKNSSFSKENILFVFEHTGLYSYEIAVYLTEKEVPFSIVPGLEIKRSLGIARGKDDKVDATKIALYAYRLRDEIQTYSLPSEEILSLKQLLSIRELLVKQRAGLKASYSERKHVLVKKENKILFSVQERTIKYLSKQIKKVEDEIKAIIQSNDKLNLQYELITSIKGVGDQTTFYMIVFTHAFTKFDTWRKFASFCGIAPFPNVSGTSIRGKTKVSNLANKNIKSLLDSCAKSAIQYNMEMKQYYNKRVKEGKDKMKVINIIRNKIVSRIFAIVLRGTPYVNTVKYIA

SEQ ID NO: 123413 - protein, 394 aa, unidentified
MILVGIDIGKNKHTFSIIDKNSGEILLSPSDFSNNLKGFLFLIQKLSSYTKSKLLIGMEDTGHYHFALLKYLLDRRYTVALINPTTTDLTRKLQGGITKNDPLDSLTICDVISSNHRNKPYRVTTLNRFDLYEQKQLTRHHHNLKEELNTYKNRLQKCIDIVFPEFNSLFHSKYGIVYMNILKIFSSAKAIANADIRSIRKCFEFKGQGKRISLSAEQLKLTAKSSIGIPSVAEEIQIRHLVSQIELLEKQLSEIDKRIEEFSLKNNSPILTIPGISHFSGTSIISELGDICNYTKASQIIKFAGVAPYHYESSQFTAHHTAITKKGSKYLRKTLYQIILPVISNNEVFYAYYTKKLNEGKGHRCAQDHCIRKLLRVIYHLLSTRQPFNPKLLV

SEQ ID NO: 123414 - protein, 444 aa, unidentified
MSKKHPTHLRGERGQAFAERVRGIPLDRILCVSLDIGKYFHFAMIHNGLGEIITPMFEVDMFQSGFERLCREIEAAKTRTQAQSVWIGLEPTSHCFENLARHLLECGYPVTLLNSFAVKQNRDQQMIQREKTDQIDAAAIGDLLRRGEGTPYRPMKGLYLRLQQLDRVRLSKVKIERMLKNQILGHLDRIFPGLVLHGEEAKGRYQALFGTDFWASQTLQQLIRVCPDPQRLGKMQPGELVQAYHEQGYRMGEKTALRIISYAKTVLLPDPELVAIRCELLKHDLELLTEIQSHTAALEEQEGQLLPQTPYHILTRLKGLGPIQVASLAAALGDPATYACANQIFRRSGLVSGRNDSGTRQKKGKGKGIVKTGDVYLRRILTNMVISLSLHQPVLGHYYQKLKKSKPDGVARVATARKMVHILWAVVRDQRSQSLTFRSEEANI

SEQ ID NO: 123415 - protein, 469 aa, unidentified
MTPRKSKNLRPSASRERLHVTHAHAAGIDIHAGQHWVAVAAEAAPPPGREHPPNLPAHVRCFGTCTADLICLADWLAQCGVQTIAMESTGIYWIPLFELLEARGFEVFLVNPRQARHVPGRPKSDVHDCQWLQRLHSYGLLTASFRPADQLVVLRSYLRQRQMLIRYAGQHAQHMQKALEEMNVKLPEVVSDVTGATGMAIIRAILQGQRDPLELAKLRNERCKRTQAEIARALYGSWRAEHLFALKQAVALYEFCRQQLRECDVQLQAHLGTFADQRHGRPRPRRQRRCRERRPNDPAFDVGSALYRMAGVDLMLLEGIDANTALVLLSEIGPDVSRFPTVKQFTSWLGLCPQHQGSAGKIRSRRIRHGMNRAGRALRLAVQGCYHAQHVLGAFYRRIRARAGAPKAIVATARKLAERVYGLLKYGADYTCQKIDAYEAAYRARVLKGLARKAAELGYRLEAASPAGG

SEQ ID NO: 123416 - protein, 387 aa, unidentified
MSQTTAALMPAAVDYERTLVLAIEVSNKSWVLAAQVPGLPHTKAKRTIEPEAEALLAAIAGYRARASAMGRSIERVIAVYEAGWSGFWLARWLMRQGVEVHVVQPSSVPVDRRVRRAKSDGIDSELLLRTLLAWLRGEPRVCSMVPVPDEADEDARRCVRERSELISERIGLTNRIGAILATLGVSDYNPLLRNRSRRLAELRTALGEPLPANAHAKIKHLLARLELVLTQIAELERERDAVMETEASDRASRMIQQLTTLRGIGVQSATVLVREAFVRCFANGKALGSYAGLASSPYSSGGIDREQGIGKAGNRRVRTVMVELAWLWTRYQPGVAQVCWFRERVGATGRRVRKVMAVALARKLLIALWRFVIDGVLPEGAVLKPAA

SEQ ID NO: 123417 - protein, 410 aa, unidentified
MEVLHPICCGLDIHKASIQACLLTSDAAGRAHRELRRFSTMTSDILAMADWLRAAGCLAIAMESTGSYWLPIWNLLEDEFALLLVNATHVKRVPGRKTDVKDAEWLADLLRHGLLPASLVLERGERELRELTRYRTTLVQERAAEVNRLQKTLEGANIKLGAVASEVLGKSGRAMVEGLIAGEDDPAVLAELAQGQLRHKLEPLRLALEGRVGPHQRFLLGQQLTHIDQLTTLIETLSSEIEARLAPFADLVTRLDAIPGIGVWTAQVLLAELGTDMTRFPTAKHLASWVGICPETRESGGARHSGHIGQGNNWVRTALVEAGYAAGRSKHTYLGAQYHRLKPRLGHKRATIAVGHSILVSVYHMLARGTAYHDLGADYLQGLNHEVATRRLVRRLERMGHTVIIEPVAS

SEQ ID NO: 123418 - protein, 343 aa, unidentified
MQDVATVGLDIAKQVFQAHGADASGETLFNTKIKRENVLEFFSKLKPCLIGMESCATSYYWARQLLEFGHDVRLIHTSYVKPFVKRGKTDANDAEAINVALTQKTMRFVPVKTLNQQAAITIFRTRSLFVSQRTQLVNALRGHLAEAGLVAAKGIQNYSKLVKLMESAADTVLPTVLKQALTDICDQIHRLNDLVTKLDKEIERRVQHDENACRLLTIPGVGPKTAMCVIATIPDIHRFPSGRHFSSWLGLTPRTHSSGGRSVLRRITKMGNSKLRTMLYLGGTVIMMRDSKTPIGRWAARLRARRPYKVAVIAVANRIARIIWALLTNGGVYDPTHGREASA

SEQ ID NO: 123419 - protein, 397 aa, unidentified
MYIVGIDIAKRKHEAAVIDGEGTVIIKPFSFTNNCSGYNRLLAMLAKAKLPLDEVSFAMEATGHYWLALFTRLQKEGFRVQVINPVQTNSIRSFYIRQAKTDPRDALLIAEVIRFGHFSESTLHPENIYELRELCRGRHAIVSMQADVKRKVVALLDQVFPEYETAFTNMFGDTSMAILQTCPTPKELSEMRLEALCHLIEVSSRKRFRMAKAQELQALARNSFGFAMAGDVFSTMIRLYVKHLDFLKQQVREMDRKIAEIMETLDTPITTITGIGPTLGAYILSEIGDISRFSSAAKLAAYAGIDPTMRQSGEYNGVRNRMSKRGSPYLRHAIWLAASSAVLHDPALKLYFQKKRDEGKPYMASVGHACRKMVSIIYAVMRDNKAYTPYIPNEISA

SEQ ID NO: 123420 - protein, 349 aa, unidentified
MNNLSKSKLDDRISMFVGMDLHKNYLQIAVMNEKGKVLENSRINNNLKQVGRFFDENIKKSNEKVRVVMESSSVWYNIYSYLSEEKHLNVVLSNPVKTRAIASAKIKTDKLDAAKLANLLRGGYIAECYVPDRRIMDLRELVRHRTALVRMRTKLKNKIHSIVLMRGIRISSKHCSFTHLYNEELKKLNDYRINGYLHLIESLDSEIKDVSKKIMMLAKEDEMASLLMTIPGIGYYSALLIVSEIGDINRFPDSYHLCSYAGLVPSTHSSGGITYHGSITKRGSKYLRWIMLECAHVHIRTNKNSNITQFYMRLAKIKGNSKAAVAAASKLLKVVYWVMKEKRKYHHHS

SEQ ID NO: 123421 - protein, 391 aa, unidentified
MPDVSSNAAVATTRLWVALDVHKNAITAGVLPAEGRELELVQLEHSEKALRRFVGRLAGPEGLAVCYEAGPCGYELYRLLTSIGVACDIVAPSLTPVRPGDRVKTDRRDARKLVRLYRAGELSFVAPPSPEQEGLRDLVRCRDDLRGARTAARHRVGKQLLRYGRVYREGKKSWTLKHRAWVCRQRLDEPLAQAALEQMLCLLAALDAQIAAVDRQLEEVARSARWCEPVRCLCCFRGISTLTALGLLAEIGDFRRFASARELMSFLGLTVSEYSSGERRARGSITKTGNRHARRLLVEAAWHYQHPPRLSARTRASGELVPPEALARAWQAQIRLHERHRHLTGNGKLATVATVAVARELCGFLWAAMTRQRLRVQQPAQPRQEEEVAAA

SEQ ID NO: 123422 - protein, 322 aa, unidentified
MMTTFHLGIDVAKTKLDCALRLPNGKFCAKVVTNDAHGHSDLVDWLAQKEAVDVHVCMEATGVYWEDSAQFLATQGITVSVVNPAQIKAYTASRLTRTKTDAVDARLIAAFCAERHPPPWQARSEAEVALRALVLRLDALQTMRLQKSNRLEVARDTVRTNIQEHLDWLEQQIETLTATINQHIDSNPNLKGKRELLDSIPGLGERTIAILLAFFADPSRFANSRQAVAFGGLDPRQHESGTSVKTKPRLSKIGHAFLRKALYRPARVTLYKTAWGKQFKERLARSGKPPKRISGAMMRKLLHVAFGVLKSGKKFDPALHDA

SEQ ID NO: 123423 - protein, 345 aa, unidentified
MKYYAGLDVSVKETSICIVDQTGKICREVKVTSHPDDLIAVLKDPAWNMERIGLEAGPLSQWLFVGLARAGLPVICIETRHTKAFLKAQPNKSARNDARGIAQMMRVHLYRAVHVKTLSSQKRRALLTARKLLQDKAIAIENDLRGLLRNFGLKVGVVGSAKFEARIRELVEGTLDLVEIVEPLLDARRNLREHFATLHRKLLMIARDDEVCRLLMTIPGVGPVVAVAYAATIDIPQRFKNSKAVGPILGLTPVLNQSGESHRVGRVSLCGDGMMRTLLYDAAQVLLNRVAKWSWLKAWAMSVAKRRGLQKAMVALARRLAVIMHRMWSDGTEFCWSREKLPAGA

SEQ ID NO: 123424 - protein, 312 aa, unidentified
MGTKREVVVGVDVAKDKLDVFYGGQHLVVANSTEGYETLFQRLRKYSVRLVAMEATGGYEADLAVALSEAGLPLAIVNPRHIRHFAKSMGWSAKTDKIDARAIAEFAALAGVKPQTLPDAEQTYLRELVDRRRTVNWMLVDEKNRLSKTRHDKIRIRVRNSITNFEKELAELDKEIDDTIKGSPVYQEKAELLQSVPGVGPKTTGVLLAELPELGAVSNKTISMLVGVAPLNRDSGTLRGKRTIYGGRKRVRTALYMAALVASKHNPVLKPVYERLLAAGKAKKTALVAIMRRLLVTLNALLRKQEIWVNPA

SEQ ID NO: 123425 - protein, 310 aa, unidentified
MNITPGYVGIDISKATLDIFDTAIGRAERLANAREPIAAQAEHWRRDGRFVLFEATGVYDRCLQEVLQSAGVPFARVNPARARDFARASGFLAKTDAVDARMLAVMAQRLRPEAQEPAAPERDRLAALQRRRDQLVAMRASERTRLKDALDAQEEHSLAGHIAWLSQEITRFEQRISAHIRATPQMARAYQTLRSAPGVGPVAATTLLALLPELGRRSPKAIAALAGLAPLNRDSGTFRGKRTIGGGRRRVREALYIAAFAAKRYCPHFRERYQDMRAAGKPMKVALIAIARKLLVRLNAMLRDDLCYQT

SEQ ID NO: 123426 - protein, 394 aa, unidentified
MKLVGIDVGKNSHHFCVMDKETGEFNVAPSSFSNNKEGFDFLINSLKPYSKKSILIGMEDTGHYHVALLKFLLSNGYTVALINPKTTDLTRKMEGGITKNDKLDTITICDVLDTPERKKQYRITKVDRFDLYEQRQLTRHHHNLKEELNVYCNRLQKSIDLVFPEFNTLFSSKYGIVYMNLLKTFGSAEAIASTDIRTIRKCFEVKGRGGRISLTPEKLKEYAKNSIGISSEVETIQIKHLVSQITLIKEQIAEIDKKIEEFSIKNNSPILSIPGISHFSGTSILAELGDIGNYSKPSQIIKFAGVAPYHYESSQFTAQHTAITKKGSKYLRKTLYQIILSVINFNPVFKEYYQLKISQGKGHRCAQGHCIRKLLRIIYHLLETGQSFDPALLR

SEQ ID NO: 123427 - protein, 391 aa, unidentified
MNRNTGMHAGQVIGWMSGLQVVGMDIAKSVFQLHTVDMKTGELRDKRLKRDKVLEYFRLMAPAMVAMEACGGAHHWARQLQKLGHQVRLVHARAVRPLVQGNKTDVTDARAIWLAVQQSGMRFVAVKTEAQQAALTLHRQRQQLIKMITMQLNGLRGLLYEFGVTLPLGRKAMLAQVVGAIDSVAPVLPKMTVDSLLQQVQRIVQLRQAVDEVEVSLKQLISQDRQMQRALSIPGVGILSATAAVATMGDPHHFKSGREFCAWLGLVPRQEGTGGKVKLLGISKRGDKYVRTLLVHGARSVLLRKDQSSDWQTELQKRRHKNVAVVAQAAKIARTIWAVLAKDQDYQANHKSVRAQHSSAAAQEPSQDGSPTCPPRRSFVAGDARRRGQVS

SEQ ID NO: 123428 - protein, 375 aa, unidentified
MKVYVGIDAHTTNFTLATRIEGSEKAINTSTLTPEVSSIVKYCDSIKKHYGEDVEIISAYEAGGLGFSLQKQLENEGIKCLVLAPTSIPGTDLNRRRKKKTDKRDAEGIADALHNKQYSSVYIPDEEDEAIRDYIRMREDHRKAWRVLKQQMVAFLHRHGYHYKDGKNYWTKKHLDWIRELPLEGVLKNVLDEYMLRYQLYKTQLEEIDRSIEEFAESEKYRENVHKLICFKGIQKLTALAIIVEVGDFSRFLKAKSFTAFLGLVSAESSSSNDHNLYGITKQGNTFIRRLLVEAAQCFCRATQQKSKLLIKRQEGNTSQTIAYADKANERLRKRYYHLVMHNKKSHNTATVAVARELASFIWGMMSGNTNLVTI

SEQ ID NO: 123429 - protein, 344 aa, unidentified
MGEVSTIGLDIAKAVFQVHGVDGAGTVVIRKRISRSKMLEFFADLPACLVGIEACPSAHHWGRELTGLGHTVKLMPPSYVKAYLKRSKNDANDAAAICEAVTRPSMRFVPTKTKQQQTALMLHRTGQLLVRQRTMLSNALRGHLAELGVVSAKGRNGTAELLRIIADGADNRVPSSARGILDVLARQYSALGAEIGSIDKSILTLHRSCEASRRLAEIPGIGPVVATALVAEIGDWKAFSSGRNLAAWIGLVPKQHTTGGKDRIGSITKQGNRYLRWLLVVGAMAVVRYAKKHGTKNRPWLARLMERRPTKVAAVALANKIARMAWAIMVRGDRYKEPTILMAA

SEQ ID NO: 123430 - protein, 369 aa, unidentified
MKEVTTIGLDLAKAVFQVHGVDAAGAVTLRRAVRRRQVLAFFAKLPPCLIGMEACATAHYWASEITKLGHDVRLIPPAYAKAYVRRNKNDPADAEAICEAVSRPSMRFVAIKTETQQAASGIHKVREMLIKQRTMLINALRGLMAEFGIVVAEGPHHVGELVAILADPAGRRIPTPLHEGLLAIAETLRGLERRIEIVEKQIVGWGRGNQTCRHLITIPGYGPILSSAMAAMVVDPVGFTSGRHFSASLGLVPRQEGTGGKVKLGPISKRGNGYLRRLLVNGAMSVLCSKRAKEDPWLVRLLETKERKVAACALANKMARIGWAVMMRQEDFRNRRHDQPCPDLGEPGAVLTAVTTAARAPAAVAFGQS

SEQ ID NO: 123431 - protein, 319 aa, unidentified
MKLYGAIDLHSNNNVTVLIDEQDQVVYQKRLPNDLPLITQELSGYQDRLQGIVVESTYNWYWLVDGLMDQGHRIHLANTAAIQQYEGLKYTDDHSDARWLAHILRLGVLPQGYIYPKEERAVRDLLRKRSQLVHQRTANLLSIQNLVTRNTGSSIRSNRIKTLDRETVDALLPNPDLALAVKANLAMIQCADGQIDILERTVTDRIKLRPAFGFLKTVPGIGQILALTIMLETGDIKRFSTVGDYASYCRCVGSQKLSNGKKKGSGNTKNGNKYLAWAFVEAANFAIRYSPRIKSFYQRKKAKSHGEGRDQRRRSVESL

SEQ ID NO: 123432 - protein, 342 aa, unidentified
MKNTTIAVDIAKSVFEVAVSEQQGRVSESHRLSRSTFLRFFAQRQPATVLLEACGSAHHWARQLQGQGHRVVLLPPHAVRPYVPRNKTDRSDARALLEAARNTDIKSVPVKSCAQQALTALHRLRSAWLATRTARINTVRGLLREFGVVIPVGPKYVQQHLRAAIEDVGSPLPETVRPALALMGEEIRQVEERIDLVDRQLQRLSKQMPVVARLQTIPGIGPISSTALVSFVGDVARFPSARYFASYLGLTPREHSSGLRRRLGAISKRGDTYLRMLLIHGARAVLWGTHRKGPHERIRTWAANVERQRGHNKAAVALANKMARLVWAVWKKDEDFQELPAV

SEQ ID NO: 123433 - protein, 392 aa, unidentified
MQPQPNVQPATAKAEIARLLVSFELSQSKWVLTIQSPHSAKPSHFNVRARDTEHVLALLSSHRAQAERRSGGRVQVVSIYEAGLDGFWLHRWLLAQGVESHVVDPASILGPQRRRQAKTDRIDGAKLLHSLAAWLGGDRRMCSMVVVPSTEQEDQRRLSRERSELVAQRTQLTNRIGGLLANQGIAGFMPLRRGAQEALEALRTGDGRALPGHLKASIGRMLSQLRLLTEQIKQVEAERDALLRAVPAETAQETPCDPRIGLLLLQLRGIGPEFATVLLRECLYRHFANRRQLAAYAGLAPSPWASGGGEHEQGISKAGNRRLRKTLVELAWSWTLHQPGSALTQWFRGKVKGQGRRMRRIAIVALARKLLVALWRYTQDGVVPEGAVLKAA

SEQ ID NO: 123434 - protein, 343 aa, unidentified
MHVNTIGVDLAKNVFQVHGVDSAGKVVITRQLRRKQVLDFFSKLPGCLVGMEACGTGHHWAREISKLGHTVRLMPPSYVKGYVKRSKNDAADAAAICEAVTRPSMRFVPIKSTDQQALLMLHRTRDLLIRQRTQLINALRAHLAEFGLVAETGREGLAQLGAIITDESNHESLPSAMKQALQAIVDQLAALELQVGALDRAIHAHHRANDMSCRLETVPGIGVIGATAIASTVTDPSDFKSGRDFAAWIGLVPRQHSTGGKERLGGISKQGDRYLRRLLVIGATAVVRQARLHPQKHPWIKRLLAKKPAKLVAVAVANKMARIAWAIMAKGGYYRAPELAAAA

SEQ ID NO: 123435 - protein, 451 aa, unidentified
MKKEIEKKVLIKLGKGLPVFNFHAAGIDIGDTLHYTAINDENGGHEVKVTSAFTCDLEEIVSYLLQHKITTAAMESTGIYWLSLYLMLEEAGIDVYLVNAKSVKNVSGRKKDDTDAIWIQKLHTCGLLQKSFQPDNEIRLLRTYTRQRKNIILLAADSVRRMQKALELMNIKIHTVISDILGKSGMKIVKAILHGERNPDFLATLCDPRIKASKEEIIKSLQGIWKEEYLFMLEQALENYEFHQGQIKKCDEKIEQQLIKQVAIVNDGDITGLKELVTKKTKGIKNQFSFQVAPFLKQITGTDLCKIPGISDVTALEFIAEIGTDMTKWKSAKHFAAWLNLTPNTKITGGKIISSKMEKKKNKAGQYLRQACSCLSTNKTAIGDYYRRKRSNLGGKGAVVATAHKLARIIYTLLLNKIDYSPEMLANNDLKYKENKIKYLEKQLEKLRKAA

SEQ ID NO: 123436 - protein, 358 aa, unidentified
MQRNKKTFKGQNIYIGIDVHKKNWQVAVITESGYTERLSTAADAKALFKFLKSHYPDGNYRAVYESGFSGFATHYALSELGISCVVAHAADIPSSQYELTMKSDRIDAEKLARALRAGLIRGIYVRPKDNLDDRGVLRIRKTIQIQVGGYKTRIKHLLHSNGVELPERFSRSGTHWSRAFIAWLREDVRLLSDTRRSLDLLLLQVETLRANLLEATRRVRALSMTDRYREDCALLMGIPGIGLTVAMTILTEVCDIGRFGNERQFASYLGLVPTSHSSGERVSHGEMTFRGNKHIGPLLVEASWVLIVRDRELGRMYTEYRWRMAGQKAIIKIARKLSNIIFAVLKTRKAYEPYRRDA

SEQ ID NO: 123437 - protein, 432 aa, unidentified
MNPLSVSPEPSPVAAWVGLDWADQQHVICLYEVATGQSTVSRLEQKPEALQDWLSQLRQRFGGAPVAIVLEQARGAVIYALLSADFVRLYPVNPQSLASYRKAYAPSGAKSDPADAVLLMEMVRKSPERFRVWKPDDADTRSLQLLTENRRQLVNQKTALTNQLTSLLKTYYPQALELAGALDSLQACDLLKQWPTLEALQQARPGQIRQLYREHGRPSSEQLDRRLEQIRQARPLTSDPAALLSGSMMVQVLVQQLRPLLAAIERFDRQIAVIFGKHPDRPLFDHLPGAGAVLAPRLVAAFGTDRDRFQSAQQAQQLFGIAPVTEQSGKQRWVHWRWACPKFLRQTFHEFAGHSRHWCGWAKALYQRLRRIGKGHHAALRVLAFKWIRILFHCWKTRTGYDEQIYLKSLQKRNPTLWAEIQLLPPRKTKAA

SEQ ID NO: 123438 - protein, 340 aa, unidentified
MQYVGLDVHKEFCQASVLDESGEEVSSIKVLTRKEELESFLDGFEDASFVLESTGIWEFVYETIERHGFEVVLAHPLKVRAIAEAKVKTDKVDARTLAHLLRADLVPRSYIPSKDLRDLRQLVRQRAYLVQRATSFKNRIHAELLRRGIRRPKELVKPFTHKSVAWMRSLSIPTVNSSLDCLEAIQLQVEQLNEQLLQEFDRRREAQLIATIPGIGFYGALLIWAEIAGVHRFPDPEHLCSYAGLTPTVSQSASKSHYGGVSKEGSKYLRWILTESTFIHIMNCPDSRLSHFHARVARRRGKQKATVATARKLLHVIYWMLINGEEYRSQGLDLGAKPAA

SEQ ID NO: 123439 - protein, 342 aa, unidentified
MGEVSTIGLDLAKHVFQVHGVDEQGNVTVRKPLRRGAVLKFFAELSPCTIGIEACSTAHYWARELTALGHSVRLMPPAYVKPYVKRGKNDAADAEAICEAVTRPTMRFVPAKSAEQQANAMVYKVRELLVRQRTQLINALRSHLAEMGIVAAKGLGKFDELVAIVHDKEDGRLPAPARQALQELAEQIAALDARIEPLQQEIVSQLRSNETVRRLTTIPGIGPLIAGALIAMVPDPAGFRSARHFATWLGFAPRQKSSGGKQRLGSISKQGNRYLRSLLILGAANVLRRRSASKSAWLMALRGRRPFRIVAVALAHKIARIAWALMVKGGSYRAANLAAAQG

SEQ ID NO: 123440 - protein, 382 aa, unidentified
MTTAAATHNAQSNTTEATLFVAFELSAKTWKLGFTTGHGQKPRERTVTARQQEHVLDEIAQAKRRLGLPETAPVVSCYEAGREGFWLHRFLQGHGITNQVVDSSSIEANRRRRRAKSDGLDVSKLLSMLIRYHHGERQVWQVVKVPSVEAEDQRHLHRDLETLKQERASTTTRIEGLLSSQGLRVTSLTKLPEQLEALRLWDGSPIPPGLRRRLLRVYAHHTFLTEQIAEVEAERRAQLQTSTEAHIDKVRQLMQLKGIGINGAWLLVMEFFGWRAFKNRREVGGLAGFTPTPYQSGESAREQGITKSGNRHVRWMTTELAWSWLRFQPDSALSVWFRERFGSGGKRLRRIGIVAVARKLLIALWRFLETGVIPAGAVLKEV

SEQ ID NO: 123441 - protein, 344 aa, unidentified
MNYHTALDVSLRSVSICIVDDEGTIQFEAKVPSEVEEIDKCLRRFNAEIKSVGFEAGTLTQYLTYGLQAAGYEVICLEARQVHAALSAMRNKTDKNDARGIAQILRTGWYSRVHVKSMESHLIRALLSSRKTILKKCVDLENEIRGLIRLLGIRLPGTLYHGVYDATVRQAIEADASMVDALIPMLDARLVLYQTYLKLDNQVKVLAREDTICQRLMTVPGVGAITALTFKAAVDDPTRFKRSRTVAAHFGLTPRRFQSGELDNPGRISKAGDPDVRSALYMAAHSLVVRSEQWCSLKVWGIQLMKTKGHRRATVAVARKLAVILHQMWINGTDFRYGSTEATS

SEQ ID NO: 123442 - protein, 412 aa, unidentified
MEVLYTSCCGLDVHQATVVACVRRAGKGRRRASTVRTFGATTAELLRLADWLTEQEVTHVAMESTGVLWKPVFNILEGTCEVILVNPQHFKAVPGRKTDVRDCEWLAQLLEHGLLRGSFIPPQPIRELRDLTRYRKVLIQQRVTEANRVRKLLESANIKLGVVATDVLGASGRAMLRALQSGERDGAVLAELAKGTLRQKRAALADALTGRFTGHHAALLGDLMEHIEFLEATIARVSQRIATAVMPMAEQVAHWQSIPGVDRVAAETILAEIGPDMSRFPSAAHLASWAGICPGNNESAGKRKTGKTRKGNRWLKPLLVECGWGAGRGRRTYLGAQYARLAHRRGKKKAALATGHSILVAAYHILRTGVAYRDLGPDHFDRLASDRLTRHYVHRLEQLGHRVTLNTVPGVA

SEQ ID NO: 123443 - protein, 338 aa, unidentified
MKIATIGLDIAKQVFQVHGADKSGKVVFRRKLRRSEVARFFAELEPCMVGMEASGSAHYWARVLTGSGHTVKLMAPQFVKPYVKSNKNDANDAEAIAEAVTRPHMRFVPQKSVQQQDLQCQHRVRSRLVASRTQLVNQIRGLLAEYGIVLPQHVGQLRSGLPSVLEDAENQLTGFSRQLFRGLYEELVQLEVRINAADHQIQLAFQGHEDCQRIGAVEGIGPLTATAIVAAISNGRAFANGRQFAAWLGLVPRQNSSGGKSRLMGISLRGDPYLRTLLIHGARSVVYRAKNKTDKRSLWIVDKQQRLGTTKACVAVANKNARIVWSLIARDQVYRPAA

SEQ ID NO: 123444 - protein, 413 aa, unidentified
MSQKAYLGIDLAKASSRVAAVDESGDEIVSPFNISNSREGIQKLLLKLSSYKKNLVIGMEISSNYWENMYSYLNQKDIACVLLNPYQVKKYRQALGSKIKTDSIDAISIAQLLRAKNYDVLCVSDDKVLELRELVRIAHSFERRVKDLKKSVLALLYLTFPEYTKVISYPFSKVSMQILSKYPTSFHMAGEATIGRLVKIFRRYQGCNFGADKAKELIACAKDSFYSGKASHSRGMSISMQIEEIGSLTSKIKDIEAEIKSILDPDDKKDGGGLDFDILNSIKGVGIGTIAAFIAAVGDVSRFSSSDKLISYIGFYPKIFESGKYRKKNPTIVKAGPKDLRYMLYMSSVAAIKHNICLKKYYHDMVSAGMPVKKALIKVAVKIARMMYSMLKNRQYYDSSRVFLQKAPAFVAA

SEQ ID NO: 123445 - protein, 347 aa, unidentified
MVTFGGDCHKRNHTLVAVDENGLPLGELRVAATPDGHVEALDWARRWPERRWALENCRHLSRGLERDLLTAGEVVVQVSPKLMGTARRSGREPGKSDSIDAVAVARAALREKHLPVAQLEGRARELKLLVDHREDLIGERTRIQNRLIWRLHELEPDLKLPPRGLVRQVVLTEVRARLQRHRGTLAEIARDEVVALLALTKSVKELERRIEALVAEQAPNLLRLQGCGALSAAKLVAETADVRRFRSAAAFAMHNGTAPIPVSSGNHQRHRLNRGGNRQLNAALHRIAITQLRLGGAAKLYVARRLSNGDTKTEAIRALRRQLSDEVYRRLRLDAQGPLAMPNAEAA

SEQ ID NO: 123446 - protein, 430 aa, unidentified
MKSNTQNAKIEAITEKTLVLGIDVGSEMHYARAFDYRGIEYSKKPFKFSNTEAGFVTFKEWILDLKERHEKDKVIPGMEPTGHYWFNLGKFLQDNEMKPVLVNPHHVKKSKELDDNNPTKNDRKDPKVIAGLVREGRYMIPYLPDGVYADLRTASNIRFQLQAELTRIQNRISRWFNIYFPEYKTVYGKPDAKSGMLILKAAPLPEDILTLGIDGVNQIWRDAKLRAVGKARAKTLIEAAEHSVGSKEGAVSARMEIRMLLEDYESRNTRLQEVMVLIEELVRKIPMAEKLLEIKGVGIRTVSGFLAEVGDISRFNNPKELQKLAGLALVENSSGKHKGETTISRRGRKRLRYLLFEVAMSLVSKNQEFRELHNYYITRRLNPLKKMQSLMAIAAKLIRVFYAMLTKGVDYDPKKMVSDIKRPAVYLQAA

SEQ ID NO: 123447 - protein, 338 aa, unidentified
MKLYGAIDLHSNNNVTVLIDEKDKVVYQKRLANDLPLVIEQLSPYASSMEGIVVESTYNWYWLVDGLMEKGHRVHLANTAAIQQYEGLKYTDDDSDARWLAHLFRLGVLPEGYIYPKEERAVRDLLRKRSQLVHHKTAHLLSIQNLYSRNTGASLSANRIKQLTSETVDARFSASDLALAIKANLSVMRSLETEITVLERVVKERIKLKPAYRYLLTVSGIGQILAFTIMLETGEIRRFPKVGNFVSYCRCVKSEKLSNGKRKGSGNTKNGNKYLSWAFVEAANFAIRYEPLIARFYQRKKAKRHRVVALKAVANKLARACYYVMRDEVPFDVARAFA

SEQ ID NO: 123448 - protein, 384 aa, unidentified
MKVVCGLDVHKDSVFCCILCANGEKIQHKFGVLTEELVTLRDLMVSEGVEECAMESTSIYWIPIWRVLEGSVKLHLVNPYFIKQLPGKKSDVNDAEWIATCLSKELIASSFVPDDKIQRLRQYDRRIFDLNASISRNLVKLDQCIQRCNIRISNYISTTDSKGYRSIVKLISQGVTDAEVLVKELHGRTINRHGRETLVKALTGVVRETDIDIINQLVEEIELQQRHKDEAQQKMTALCMEWFPQEVENLQTIPGVKERSATSIIAEIGTDMTHFQTPKKLVSWVGLRPRNEESAGKIKARGITHGNRFVRKTMIECSWGAARMKDSFFAEFSYRQCIERRKNKMKVQVAIARKILVAVWYVLSQGTQYIKPTDHYTAAHMTAV

SEQ ID NO: 123449 - protein, 453 aa, unidentified
MPKTKSSAPQNLTRMNPGAAAIDIGSTMHMAAVNPNSDDMPIRAFGTFTHDLHDLAAWFRSCGVTSVAMESTGVYWIPAFEILEQHGFEVILVNARYAKNVPGRKTDVNDAAWLRQLHSYGLLRGSFRPNAQIATLRAYLRQRERLVEYAAAHIQHMQKALMEMNLQLHHVVSDITGVTGMKIIRAIVAGERDPDVLASLRDVRCHSSVDTIRASLIGNDRDEHVFALSQSLQLYDFYQLKMIECDRKLEASIASMTAEPEAPLAPLPKIRTKTKQTNAPSFDVRAALYGLTGADLTQIHGLGSSLALKLIGECGTDLRAWPTAKHFTSWLCLAPGNKISGGKVLSSRTRRSSSRAAALLRLAATTIGRSDTALGAFYRRLAGRIGKQKAVTATARKIAVLFYNALRFRVIYRDPGAAAYDERHRGRVIANLQRRARSLGYQLEPMIAAECVS

SEQ ID NO: 123450 - protein, 320 aa, unidentified
MRNAVGLDISKLTFDAFAMVGNAEYSAKFDNDSKGLDQFSDWLKSLGCENLHICMEATGNYYEDVADYFAQYYSVHVVNPLKISKYAESRFKRTKTDKQDAKLIAEYCQSAKESELVKRQKPTDEQYRLSRLTAAYAQIKSECAAMKNRYQVVKDEEAAKAYAEIIKAMNEQLEVLKAKIKEQTEKPKCKEGVKRLETIPAIGRMTAAVLFYHLTSSQFETSNKFAAFAGLSPQQKESGTSVRGKGKLTKFGNRKLRAVLFMPAMVAYRIRAFPDFISRLEAKKKPKKVIIAALMRKLAVIAYHVHKKGEDYDPSRYKSA

SEQ ID NO: 123451 - protein, 391 aa, unidentified
MTYVGIDVAKDKHDCYIVNSDGEILANVFTISNDQIGFNLLFQTLQSVAPDLSKVKVGLEATGHYSYNILGFLLDKGLATFVINPLHTNLFRKSTSLRRTKTDKVDARTIAAMLASNVVLTSYTAASYHNEELKSLTRYRFDKVQERAKLKTSVARLVNILFPELEKLVPSLHMNSVYALLSEFPGAKQIASCHLTRLVHLLSKSSKGRYRRDKAIQIREAARSSVGSVMPAKSLELKHTIRLIEVLSEEIDEIETSIREIMDSNPSPILTIPGINYRMGAMILAEIGDFSRFDSPNKILAYAGLSPSTYQSGKLDNAYPHMEKRGSRYLRYALFNATRLVCTFDPTFAAYLAKKRAEGKHYIVAISHAAKKLIRVICAIQKSGKPYCPAT

SEQ ID NO: 123452 - protein, 376 aa, unidentified
MKTIGTERPDTELAVILGVDTHLDFHVAVAVDHLGRRLGEVSVPTSAKGYERLLRWAEGFGSVRCAGVEGTSSYGAGLTRHLRARRIEVLEVERPKHRRRSSRRNFEKSDSSDAEAAARAVLAGEASGVPKSGDGQVEMIRALRAARRSAIKARTQAANQLQGMRVTAPEQLRRRLGGLSTKELVSVAARFRLADGPRDVPTATKVALRSVARRYQALSEEIFELEAHLDRLVGQAAPGLVALLGIGTDNAATLLIVAGDNPQRLGSEASFANLCGVSPIEASSGKVVRHRLNRGGNREANRALYMVCLARMRRDPRTQEYVARRTQEGKSKREIIRCLKRYVAREVYRVLVCCGACSSPTGLQDAVHIAVGSSAA

SEQ ID NO: 123453 - protein, 315 aa, unidentified
MFPTIGLDVSKTTLDVCVLKGKDDREFYKFDNSDQGHQQFLDLLANLKVALVVCEPTGGYEASICAVLHRHNYAIHRVNTLSFHNFAKSLSLAKNDRIDAYKLAYYGVSMDIKANYHQSEYQQQLKDLVARREYLVSQLSSEKKNLKHKEYSNIQTSIVKHITYLEGAIKDLDKQIDDFASTETEQAKKVELACSVPGIGKTLSYKLLAFLPELGDDTFDLNELAAITGLAPYCRDSGNKSGKRFIRGGRKIPRDALYMAVLSGCHKIPLLKNLRARLLSKGKPQKVAIVACMRKLLGILHSIFKRREAFVEQIA

SEQ ID NO: 123454 - protein, 347 aa, unidentified
MLIIGCDFHPGFQQVAIFDNQTGEYEERRLGHREEAERFYRSLPGQSVRVGMEACGHYPWFERLLEECGHELWLGDAARIRAGQVRKQKTDRRDAAHLLELLQQERFPRIWVPSLEERDVRQLLMHRHKQVRSRTQIKNQLQAIALSQGMQKKRKLWSEAGRAELEKLELLPYAGERRHQLLDGLDRAEAEIARLNRQVEEEVKRRPQALQLMTHPGVGPVTALAMVLTLGPASRFRSGKEVGSYFGLIPSEYSSGGRQQLGRISKQGSPFLRFLLVEAGQSAARYDRELGRFYRRLAVRKHRALAKVAVARKLAVRLYLMLREDWNYAQLCRAVVQVSPGHPVVES

SEQ ID NO: 123455 - protein, 377 aa, unidentified
MTRATRCAEYTPCLYLAFELGSDAWKLGFTTELGATPRVRTMPARDLERLTREIADAKQWFGVQAATPVRSCYEAGRDGFWLHRYLTSSGIDNVVVDSSSIEVNRRLRRAKSDGLDARKLLGMLLRYHAGERAVWSVVRVPTVEAEDRRQLHRELRTLKQERTRVANRMNGLLANQGLWLPPGTDVGAAAKTVRLWDGSPVPAALRARLEREWEHAQFLRTRILELERERQRVIAHGRGEAIDKVRQLLRLRAVGPTGAWVYVNEFFGWRRFRNRKEVGAAAGLTPTPYQSGDGSREQGISKAGSRHIRAVAIETAWCWLRYQPQSRLSCWYQARFGRGGIRARKVGIVALARKLLIELWRFLECGVVPEGARLKTA

SEQ ID NO: 123456 - protein, 411 aa, unidentified
MDLVYPRCAGIDVHKRTAVTTIGWVDEQGQRRRKTRTFGTMTAEIEQLAAWLVEHQVTHVAMESTGVYWRPVFNLLEPHVEVVLANAAHVKAVPGRKTDVRDSEWLLDLMQHGLIRGGFIPEAPIRALRELTRYRTGVIEERTRALNRIQKVLEDTNIKLASVVSDILGVSGRAMLEALIGGETDPEVLAGLARGTLRKKHDALVQALQGRILDHHRFLLRTLLAHVDQLTASIAELNAEIARRLEPYAAAFDLLCTIPGIKRRVAEVVLAEIGTDLGRFADARHLCSWAAICPGNHESAGKRRSGRMRHGNRWLRGILVQAAWAAIKVRGSSFGARFRRIARRRGDKRAAIAVAHSLLTVVYHVLTRDEPYRELGGEYFDRRKPEHQARYYARRLAELGFDVTLDPVTAA

SEQ ID NO: 123457 - protein, 429 aa, unidentified
MDYPPVAGIDVGKNFSEMCILSPNNEIYHRIKIYHDSIDSIKKAIGLLQKAEKDFAIRPVVVLESTGHYHKILFHYLSDSGFEVSIINPIQFDSIKNIGIRKVKNDKFDAHKIALLYRFSFIKTTVVPDDVIDCLKSLCRQYYKLGDELTTYKNRLIGIIDQVMLNFTDVFQNVYSKTALAVLDRYPSPEQILKANKKTLISLIEKTSKKGLAWSTEKYELLVLKAKEFKDLSISNPGNLAILKVNISMVRTLQEAQKNILDAINEIILADSLKDDPVLAPIINLLCSIPGIGVLTAATILAEVGDFSAFSSPNKLVAFFGIDPSVNQSGEFTGTRNKMSKRGSRLLRRVIFTTALANVRSKRNGDKTNPVLYEFYQKKCINKPKKVALGAVMRKLVNIIFAVMRDKKPFELRTPEEHKELLLNRSLVA

SEQ ID NO: 123458 - protein, 447 aa, unidentified
MKKVFIGIDVGKFKNSISIIDTEGNPIIKKGLSIENDYYGFARLEEQIDLIINNYGFTYDDCIAGVESTGHYWFNLRDYLKDIGIETVMIKTDSVKHRRALEEGQKGKNDTLDARVIASCLRNGNYVYIRENERELRALQKLTRMRNDISDELVALKNKIHRCIDICNPVFFKIFENLNSKTGVALIKLYPSPEDIINVNLDNIKRELGEIVDKPNMRMVSLYKEECEIWGRLIKEPSYAEKVEMVAYIDKFLLQNKSKEHLDKQIKEIAKNIIPLYSEFEQIKGIPLIQLISVLSEIGDIRNFKNTRAILAFLGLSLKGNASGKYIGERRINKAGSRIVRKHLFNIMDSLVKHNEYFRIAYCYYKSYNHKNPTKKRSMQIAVMCKFVRVMYGMLKHNTNFDYKEMLKGYYFGDCNMKVFKEEFEGEKRTKKIENYKLGYSIFINYS

SEQ ID NO: 123459 - protein, 344 aa, unidentified
MEHYAGIDVSLEASSVCVVDGSGRILREAKVTSEPDALVLFFRELDCEVTRIGIEACPLSQWLHAELTAAGFAVVLLEVRHVKAAISAMAVKTDRNDARGIAQLLRMGWYRPVHCKSQPSQDTRTLLTARKQLLIKAVDVELCLRGLLRGYGLKMGVTTAPRFAARVRELTAGHPILEPLGETMLRARDVLRREIAVLHRQLLAIARTDHVCRHLMTVPGVGALTALTFKTGVDDPTRFTSSKRLGAHFGLTPRKYQSGTIDVTGSITKAGDAMVRSALYEAAHSMLTRVKSFSSLKRWAMAVVKRRGLGRATVALARKLAIVLHRMWIDGTDFRFGKEEAATA

SEQ ID NO: 123460 - protein, 473 aa, unidentified
MSKGSGLSRSERRRNARKERLRALVPRGGAVVGIDLGEDKQALALVDHDVRVLWRKTARVKVHELGEALDLAVGAARAAGLAAVTVACEPTGPRWMQVQRLCAQRGLVLVCVQPLASHIAREQQDYTSHKRDESDAVLIARLACELHCYVPEELDEAWALLRQLGRRREQLVRAATAAVQRVGDFLSVAWPAAEAAARVPFESSTWLACLEVVTGRCGGDPARIADLGEEEFFALARDAARGWGAGRITRRIARGVLAVLDDPGAVGWSRRGLFRRIAGELGDLRRARAQLAAVEAEMRAVLGGELGLARLGGIPGLTLTGAAVILAEAGDPRRYETAKSLVKHAGLSPADTSSGAFEGASRISRRGRPGLRTAAWRAVTPLLLHNPVMAAKYQAMVCAAEDAAAAAAAAARPGSAQAAQAGRAAKAARARARVACAAALLRWICFMTVRDAGWDPVAASGGRITRDDLPEAA

SEQ ID NO: 123461 - protein, 333 aa, unidentified
MQTAKKIVGVDIGKDWLDVCLPDGRKEHIRNIKSCRTRLIKKAAKLGAMVCFEATGPYEEPLADECLACGVKAVRLNAWGTRKFAESQGRLEKTDAIDCEMIRDYAASLKDNKLHFIKPRTEAQKRLKKSVRARKNLLKARAIIANQFEDDLDQETARHLRSALNSLDKNIAKVEAECDAAIASDERLRELDRRFREVKGVGSCLSRIVLAQCPEIGDFNSKSIAKMCGNAPLDRESCTIKGKAKPRRGRADLKKALYMAAVSASRNNHILRVFYQRLVANGKPCKVALTAVARRIAILLNTIAKHPDFKPAQDPKAPAKAAGAKRGRPRKAQ

SEQ ID NO: 123462 - protein, 407 aa, unidentified
MGEGMVAGIDWASEVHVACVLDGHGAVASRFSFTHDGPGIAAMAGRLRAADVAGVAIERGDGPVVEALMEAGLAVFVVPSRQIKGLRSRYGSAGNKDDRFDAYVLADTLRSDGHRWKPLRPDTDPTRALRAACRSRKDLVETRVQVLGQLRANLELAFPGAIGLFTKLYSTISLAFLQRFPTAAKAAWLSPKRLASWLRSMGYTGGVSARILHDRLAAAAPGLAGAEGEARGQITLALVTVIGTLNTQIAALDAEIGRLFAAHPDQHIFASLPRSGTIRAANLLAEIGDCRQRFPTDDALAALAGACPSTRQSGKRTPGRVPLVLQQETPCRGDGLRQRQPHGRPLGRRHLRRRDRPRLPALARHPDPGPRVAAHHLALLAGRHRLRPSPPPQPPLDIGHSYVWSSI

SEQ ID NO: 123463 - protein, 388 aa, unidentified
MSFDQHHEAPTAIQNNLAAIFVSLELSRSIWLITSLSPGFGEKMSKHSVRASDVAALLARFSELKRKASERTGKSFPIVVIQEAGLDGFWLHRVLQNEGVESHVVDPASIATSRRRRRAKTDKIDGEALLRALLAHKRGEPRVCAMVKAPTPEEEDRRRLCRERKALIAERIKHVNRIKGLLFSQGVSGYEPLHRDRRERLESLQTGDGRPLPGHLKAQILRELDRLELLLKQIKAVEGERDALLVEQDVATPAPAAMLLDLKGVGPEFAAVLWSEGLFRHFDNRRQVAAYAGLAPTPWQSGSVDREQGVSKAGNPRLRTTLIQLAWLWLRNQPQSALALWFKERLDSNGGRLKKTLIVALARKLLVALWKYVTAGVVIEGAIVKSAS

SEQ ID NO: 123464 - protein, 359 aa, unidentified
MQTQSNKIDFNGQNIYAGLDVHLKDWKVTIMTEKLTHKTFSQPPKPEALYHYLKKTFPGGTYHTAYEAGFSGYWIHNKLLNFGINSIVVNPADIPTTGKEIVMKNDTRDSIKIARSLRNGELNPIYVPSIPTLEDRTLIRTRTTLVKDLTRYKNRIKSFLYFHGIEYPEAFRRPQTHWSNRFNKWLEEVEMTESSGKASLNILLAQSSYLRASVLQTTKQIRELAKTDRYKTQHELLRSIPGIGLLTAMIILTEIETIDRFDTFDQFCGFIGLVPSTHSSGDHQVIGDITPRGHSVLRVAIIEAAWMAARLDPALNKCYHDYCKRMEPNKAIIRIARKLVSRIRFVLKNNQPYVCSVVK

SEQ ID NO: 123465 - protein, 371 aa, unidentified
MEKFSTLYVGLDVHKDTIDIAVAEAGRDGEVRHIGTVGGDLAAVDRALRKLQAKGARLHVVYEAGPCGFVLYRHLIGRGIEVDVVSPSSIPRCPGERIKTDRRDSLKLARLARAGELTPVVVPAAGDEAVRDLLRARNDVVKAQRSARHQLKALLLRNDIRYAGKTAWGAAHLRWLASVKLAHPPQQIVFQEYVHAVTEASERIVRLEAAIRETVALWRLAPVVEALQSLRGIALIAAATLVAEIGAIERFAHPRNLMAYLGLVPSEHSSGQSRRQGAITKAGNSHARRMLIECAWLYRYPAKVSPILQKRVEKVAPPIRDIAWAAQSRLCTRFRRLSARRLHHNKIVVAIARELAGFVWAIMREAQPLAR

SEQ ID NO: 123466 - protein, 451 aa, unidentified
MEKKNVKMEVINPNCAGIDIGSRSHFVAVGQELSDVREFGVYADDLVSICHWLDEYGITSVAMESTGSYWQNLYVELIRHGFEVVLANGKFTKNIKGKKTDVKDARWIQKLHSIGLLTGSFLPDEQTEKLRTYCRQRENWITLAAEATHKMQKYLKLLKFRLDVVVRDVTGLTGLTIIKDICEGNLDPESLAKHRHYNCRKSEEEIAKALKGNNREDFLFGLKQEYESYNFYQKKITECEKMINQFLKQQINTDPTKKKLKAPDKKQKRVNKNAIKGIDLNQASYQYFGGVDLMTIEGVSHSTILSIISEVGPEGFKEFPTAKQFTSWLRLAPNNKISGGKLLSSKTPKGSNRLKIALRNAANAIGNLKDTHLSNFFKRVCYKKGRTVAVSATARKLAVIIWNMVVKQIPYKPPTEYLFLDEKRKLGLVSRIRKQIDKFALTNADLGFATI

SEQ ID NO: 123467 - protein, 354 aa, unidentified
MERYIGLDVHAASCTAAVVDAQGKKLGAHVIETNGEALVKFLATQPGKPKVCMEEGTQSEWLYQVLSPHAQEVVVIRVEEKSSPRGQKNDELDAYGLADRHRRDALPRGVWKDAGRLTKLRQMVKVHSMIVGDTTRVKNRIKALYRSRGVNVAQKSVYSKKGRKAWLEKLPESSRAAIGHLYAQYDQLEEVRNQAQKELVTESHRHPISEILETCPGVGEIRAAQIIATVMVPERFRTRQQFWAYCGLGIVMRSSSDWIQTADGRWTRAQVQHTRGLNMSRNAMLKTVFKGAATSVLQQHRSSVLYADYARMVEAGTKPNLAKVTLARKIAATVLAMWKKKEAYDPAKRTSKTS

SEQ ID NO: 123468 - protein, 346 aa, unidentified
MKKFFVGIDFSKRKMDVSIVEKDFPERTIDCKQFINNAEGAKKMCEWVEYTTNTSTKLEGEVLFCCEHTGSYCLEVCDYLSENGKYIWLGNPLDIKRSMGLVRGKDDILDSRRIATFAAEKHHRAIMYMRPEDSTRALKYLLSIRNTLVEHKKALTCQIKENFPKLHDADLLCEIENELKHALDFIKTEIKKIEKMMLDIILSNKEYKHTFDILTSMKGVALINAAAIIVFTDNFKRFSFNSRKICTYWGITPFRNESGDSIRRGTHTSPIRNNWLKAILSEAVLCAIRYEKRLKEYFLRLIAKGKHRNVALNNTKNKLLKTLVAMVRDGKKFDENYVSIPQTCAV

SEQ ID NO: 123469 - protein, 352 aa, unidentified
MEKNNKLDFGGQHIYVGMDVHKKSWSVSIHTEQFEHKTFTQPPEVEKLTYYLERTFPGATYHTVYEAGFSGFWLHDKLRAKGIDCMVVNPADVPTKDKERAGKRDRVDCRKLARGLRDGEINGIYVPPRVKVEDRTLVRTRQSMVRKQTRCKNQITSILFFYGIVIPEEGRWSRRFINWIESIRMERASGDFALKAHLEELKHLRQIIANLNKAILSLSRDEEYRADVLLLKSVPGISTLTAMILLTELADFSRFSSLDKLASYAGLVPDIRSSGETEYAAGITFRRNAALRALLIESSWVAVRKDPALTMAFNKLSVRMKKTKAIVHVARKLLNRIRFVLKNRQQYVPAVV

SEQ ID NO: 123470 - protein, 340 aa, unidentified
MNEITTIGLDLAKHVFQVHGVDASGAPVVRKRLRRGEVLAFFARLPGCLVGMEACATAHYWARELQAVGHEVRLMPAQYVKAYVKRNKNDAADAEAICEAVRRPTMRFVPIKTAEQQAALLVHRGRERLVRQRTALVNALRAHLAEFGVIAPLGLRNVARLIAVVRDQSDARLPDLARQVLEVLATQVEQLEAAVAALEKQLAAWHKSNPVSQRLATIPGIGPIIATALAATVVEPSGFRSGREFAAWLGLVPRQHSTGGKARLGGISKRGNRYLRRLLINGASANLLRSKATHADPWVIGLRRRRPSLVVAVALANKTARIAWAVMHRQENYRRMATAA

SEQ ID NO: 123471 - protein, 322 aa, unidentified
MSENMTERFVGIDVAKATLDVRVEPTAPQVPAHLAYDDEGIKALCTALAELKPTLIVMEATGGLETRLACELTAFGLAVAVVNPRQARDFARATGELSKTDRIDARILCAFARAVRPRARPLKDAATRELAELLGRRRQLVDMRAQEATRLANTASKSMRKSLTQHIAWLDKRIAESDGDLAGRLRKSAVWAAKDDLLQSTPGVGKVLSLTMLALCPELGQLNRHQSAKLIGVAPLANDSGKFKGKRRIWGGRADVRSVLYMGAVTAMRHNPAVRELAQRLKAAGKPPKVVITACMRKLLTIMNAILKNNTPWNPDHHAQTA

SEQ ID NO: 123472 - protein, 368 aa, unidentified
MNKQDQSISSSGTSEASEDNDRKRVLRLGLDMHYRQVTVAMQEDGGRIKAVGKMSHGAFWSWVNKKLKEGWQIESCYEAGASGYWLHRQLEQMGVQNLVVVPKAMGQGGQKQKTDKRDSGMLCDALDRYLRGQDKALSVVAVPSVEQEQKRALIRNHLQIMADRGRFEARGKGLLCAQGIEVHGRWWKGKGWQELQTNPLVADWMREQLEDWRQKVLSAQEQQEGLRERIEALAPQSLPKGVGAYSAAVLEYEMKGFARFKNRRQVASYTGLCPGIHRSDSRGKEGSINRCGNPRVRWTLVEMVWRLSFWQPQYGPVRRLASGLAKRAKKRLVVAAARRLAIDLWRLATGQTTPEKLGLIMQNHTQSK

SEQ ID NO: 123473 - protein, 363 aa, unidentified
MTTHMKPTVGKKIKSLSLQAGENVYLGVDVHRRSYSVAVWSDQRGLISTWTQPAEPALLVEKLTPIAGQVAWVVYEAGPTGYGLVRALRAAGFKADVIATSKMLKSTAREGKSDRVDCRRIAEHAAKGLLKIIRVPTEEEEHDRQVMRLREQMVRKMRLARQQIKSFLLVHGVAYEGSVKAWSETGIKKLRELELPEALRTCLNVLLDAEQQARAQVARMNEAVAKLMTTSRHKAKVKVLRSVPGVGPVTAMTFRTELVAPERFNEPGEIAKMIGLAPLVQESGERRREGSITKAGNWRLRTILVEAAWRWVQKDEAARQVYRRYIRNTGDVKKAIVAMARKLAILLWRMVTREEMYRVRAAA

SEQ ID NO: 123474 - protein, 315 aa, unidentified
MSDVPCFVGIDVAKAQLDIAVRPSGERWAVPNDAGGAVTLVERLQVLHPALIVLEATGGLERVATAALATAGLPVVVVNPRQARDFARATGQLAKTDALDARALAHFADVIRPTPRPLPDAQTQELRALLGRRQQLIVMRTAEQNRLAGTSERLQTDIKAHITWLNERLVTLDDDIETLLRASPLWRENDDLLQSAPGIGPVCARTLVLELPELGTLTRQQIAALVGVAPLNCDSGTLRGRRTIWGGRAHVRTVLYMGTLVATRYNPRIKAFYERLLAAGKVKKVALTACMHKFLTILNAMLKHRTPWQSQEVQG

SEQ ID NO: 123475 - protein, 472 aa, unidentified
MKSKSSRKRNPVDPVAEEIPDAEHELEIERVAAIDVAKASGKVCVRLPGKTGRRFSRVWDVPARTGAVSELAEQLIESGVEKVTVESTSDYWRIWYYLLEAAGLDVQLVNARDVKNVPGRPKTDKLDAVWLAKLTEKGLLRPSFVPPAEIRQLRDYTRLRVDLTRERTRYWQRLEKLLEDALIKISAVASTLDTLSTRDMIEALIAGERDPGRLADLARGKMKAKRSELIAALDGRFDDHHRELARMLLDQIDTLTAQIATLTSRIEQLLAAMPDTRSRGDGGTGGDPDRPSTGHGVEPETAARFTDATLLTPVERLDEITGIGELNAQVVLAEVGLDMTRFPTPAHLVSWAKLCPRTIQSGPVTRGGKTGRGNPYLKGALGEAAAAAARTDTFLGERYRRIVKRRGKLKALVAVARAILVVIWHLLANPEARFRDLGPDYHTQRIHTERRLRNHIAQLTAMGYRVTLEPAA

SEQ ID NO: 123476 - protein, 338 aa, unidentified
MKNQLNYQHTLGIDISKAKLDYALKHHNKLIHQGEISNTLQGLKTLKKILKKLKIDLSKTLFCCENTGIYNSPILIFAEESKINLWLETPYTIKNTLGLARGKNDKADAERIATYAYRYQDEFRPWTPPKEAITKLQRLWKRRKTALKLSTQLKQNLNEIKDMQGKSAYNEAKKSFQHTLQSLEKDLKKIEADLKETLKSDKDLQRLHTIITSVPGVGTVTATYLIVLTEGFRRLNEPRKLACYGGVAPFPYQSGTSLQGKEKVSPFANKELKTLLHLCAVAILKMDNKFKDFYNKKIAEGKHVMSVINALRNKILHVLCACVRKNQEYEKNYTHSLA

SEQ ID NO: 123477 - protein, 390 aa, unidentified
MEATSVQSKTPTAVRTDLGAIFVSLELSRSTWLITSLSPGNGEKMSKHVVDGGNIAELLARFEQLQLEARLRTGKSFPIVTIQEAGLDGFWIHRVLEANGIESYVVDAASIATSRRRRRVKTDKIDGEALTRTLLAFKRGEPRVCAMVRAPAPEDEDRRRICRERKVLIAERVRHVNRVKGLLFAQGVSGYQPLRKDRRIRLEELCTGDGRGLPKYLKAQINRELDRLELLLEQIVEVESERNSLLSVHEPLASEAPAPAMLLTLKGVGAEFAAVLWTEALCRHFDNRRQIAAYAGLTPTPWMSGTIDHEQGVSKAGNPRLRTTMIQLSWLWLRNQPASALSRWFVDRVQSNGGRLKKAAIVALARKLLIALWKFVTAGVVIEGAVMKTA

SEQ ID NO: 123478 - protein, 364 aa, unidentified
MGRVHVAERHGQRSALTPAAGTAVFIAIDVSRSKWAFNVRWEGQERRHFTSPYGIEHVQALVRQYEGCELTVAYEACGFGYEIAWWLREQGIRAIVVPPSTVEKAPGSQVKTDRTDARKLCRKLEKGELKSAYIPSRCEHEQRQLSRSYTQVVKDRKRQQARVRSLMQEQGRIGPSPTQGWKAYRRWLDTQQLPEPVAFSVAQLLELREAAEQRTTRLAKALLELAKRPEHKAVVQALCAQKGVGALTAIRLVLEIGDIHRFTSAESFVNYLGLTPSEYSSGEEVKRGHVLKCGPGIVRAWLVECAWASLRGKRPDPKLYACFEPLAARAGRKRAIVAVARRLARKLRAVWLKALAPQTAAPAA

SEQ ID NO: 123479 - protein, 414 aa, unidentified
MEKFGATTPELERMVEWLKARKVESVAMESTGVYWIAPHEVLERHEFEVVLVNTRELARVPGRKKTDRVDCKWIQRLHSCGLLTGSFRPKEQVCMLRTLVRDKGNLVGEAGDWLRRMQKSLDQMNVRVHRAVSDIDGVTGMAIMRAIVNGERDARQLAKLRDRRCQKSEEEIAEQLSGHWREDHLFSLQQALKMYDAVQERIAEYERETLRKLGEMEREECRGQEAPKLHNPQKAKAIGKRGEEPMRQALYRISGVDLTGIDAIGVETVKVVISEYGPDLTSFPTEKQFVSHVALAPHKAMSGGKPVKKKKKRGSASTRVAGALRMAALSLRHSDTALGAYYRQIARRIGADVAVFASARKLATLIYRLLRWGQPYVDEGAAAYETRYQEGRLKRLAATAKDLGYQLTPKASQA

SEQ ID NO: 123480 - protein, 448 aa, unidentified
MSKSKTKKEKVKRISQLTVINPTAAGIDVSDTEMMVAYPINSEQLEIRVFGCFTRDLHSIANCLKQNGTTTIAMESTGVYWIPLFLLLQEYGFEVYLVNAKHVKNVTGRKDDESDAEWIQKLHSCGLLNASFQPDNMGRTLRSMVRHRKNLVRTSSTYLNRIQKALELMNIKLHTIISDIDGKTGLLILEAILAGERDPEVLADLRDKRIKASREDIIKSLEGHWTTEHLFELRQCYQLYCTHRQMIEECDQEIEKQLIVQIASKNEGIIPDIPKVKRKAAGKNKVQFNLTADLKEILEVDVTEVFGISELSALTILSEVGSDMTKWKTEHHFTSWLGLAPNTKISGGKVMSSRIMKKKHHAGQAFRMAANGLYNSKSPLGDYFRRIRAKAGAPKAVVATARKLAIIYYKMVANKEAFNPSALDDYRKKYNEKKINQLKRKIAQLEAA

SEQ ID NO: 123481 - protein, 350 aa, unidentified
MKHFIGIDVASEVCAVTAMSNSGQVLLQCMAKTEANELKTAVKSVSKPRIVVFEECCQAAWLYSIFEPLCEDIIVCNPKKNKDLSGHSKSDKSDSYNLAERARGGHLSRVWHGCEELHILRERLKLYEQLTKESTSLKNKIKAVFRGRGITVGDGIYTADKRVELVKSLPFDAQRERVLCSGELLDEVSKRREKAKLALVEAARKHPRFDRLMEIPQIGEISAASIIATVGSAERFRTRKQFWSYCGFAVVTHETGQFAIDDFGRIKQKDRKIRTRGLVRQYNRQLKYIFKNAAVKLCSQDWMEQYEKLRSNGVSVENAKLTIARKISAVALKILKTGEHYDEKLVFSSK

SEQ ID NO: 123482 - protein, 323 aa, unidentified
MNKDIKYFGIDISHLVFDVTDSSGNYYQFKNNPAGFKKFLKLLGIDSHCVMEATGYYHYQLAYFLLESGIKVSVENPLSVKRFIQMKLTKNKTDKSDSKLICEYAKQVELKLWKGNSKHQTECLQMTRLLSVYTKQSTMLKNKLHGEAVLGNPSKTVVSSLKRSLKQVQKEMKTLEEKLIVLVKEVHQDVLTRLKSIPGIGNKTSLMLVVLTDGFERFTSGSELCSYAGLTPIIRKSGSSVSGRSKISKMGNQKLRNLLFMCSFNACKYNKACREIYERIVAKGKSKKLALIAVCNKLLKQAFAIAKSGLIYDDSYRSTLVKS

SEQ ID NO: 123483 - protein, 412 aa, unidentified
MTTSIPTRFVALDVHRKYLVVGAVDAGQKVVLSPRRFGFEAFEAWAPTHLTPSDLVVLEATANAWLLYDQVKPFVADVLVAHPQAVKLISAARVKTDSRDTIKLASLLAANLIPAIWVPPHPVRELRALVAHRKRLVQQRTQAGNRLHGVLHRHNLTLPPGKPFAAHQREWWLSLDLPASEKLRLQQDLSLYQSLEELVKGGEAELSRLSTCHPWIKQVPFLIQLPGLGVLSVMSVLVAIGDITRFPSAKHLVGYAGLGASIHDSGETHRGGGITKEGRSDLRGVMVEAAWVAVEHHPHWKAQFERLTNRIGKQKAIVAVARKLLVATWHVLIEQEADSNAHIEAVARKLMNWIAHTGATPGKKRDRLLLLYEQLDRLGLSEEVEQVDYYGSTYRLSTKQKLIRAAQQRKET

SEQ ID NO: 123484 - protein, 374 aa, unidentified
MNYSIDEKAVSRVSLKFTINYQDMNTQITAVPKLYIGIDIHKRSWKIHCSTDLFSGKTFTMPPDPEQLRVYTERHFPVHQISVAYEAGCCGYSAYRSFKRYGWNALVVNPADIFRTGKERHTKTDKIDAQLISRELKYERLESIEVPGKQREELRSLFRRRNDLVKDFRRVKSYIKMQLLYYGIEVPEDFDNDHWSHKFRQWLDDLEFSFITGKATLESRMRYFRFVDQDLRLVSNQLRAYCRKHYKNDYYLLRSIPGIGGIVACGILSELGDLRRFSSIKHLAGYVGLAPGMYQSADTYKVKGMTPRAHRLIRSYFIEAAWQAIRTDPVMQQYYRKHYGKDTKKIIVKVARKLLSRTLAVIKTGIPYEIGIIE

SEQ ID NO: 123485 - protein, 340 aa, unidentified
MIATIGLDLAKNVFQVHGVDARGHVILKKTLRRAQVLTFFGQLPPCLVGMEACGGAHFWARKLQGFGHRVRLMAPQFVKPYVKSQKNDAADAEAICEAVTRPSMRFVPIKSIEQQAILAVHRVRQGLVKLRTAQVNQVRCLLAEVGLVLPRGIQHIRRVPVLLDEAADMLPTAFCQLMRQQFESIRELDRRIAELEGDIRRWHRENASSRRLAEIPGVGPLTASALVATIGDASTFDNGRQLAAWIGLVPRQCSSGGKPRLLGIGKRGDGYLRGLLVHGARSIVASSKRHLTGTTRWLDRLLLRRHTNIAIVAQANRTARIVWALLRHGDTYHGAGACAT

SEQ ID NO: 123486 - protein, 430 aa, unidentified
MGLIVPSTMHPEREDQPLPYDWFVGIDWGSQQHQVYVLDRDRRRVGERVVDHDGASLARLADWLWTVSAGQPQRVAVAIEVPRGAIVEGLLERGFHVFALNPKQLDRFRDRHSVAGAKDDRRDAFVLADSVRTDQPRFRRLQLDDPQLLVLRELSRAEETLLEDFRRSANRLRDQLHRFYPQMLQLCAAADESWLWDLLDLAPTPAHAALLSEEQVQRVLKAHRIRRVTAQDVLACLQTRALPVAPGAAEAAQAHCGFLLPCLRVLAEQLQACSHQVSALLRTLAQEPGEGEGPSDVAIVQSLPGVGRKITAWLFAEAAQPLAQRDYHVLRTHAGVAPVTRQSGKRRQVVMRRGCNLRLRHALYHMARVAMQRDAHFSQVYAALRAKGQRHGQALRNIGDRLLRILMAMLRDRTCYDGSRIRREPVVQIG

SEQ ID NO: 123487 - protein, 328 aa, unidentified
MKVLGLDLRGEIVLRRKLSRRQLLLFTANRSSMLIGIEACGGAHFLGRALREQGHEVRLMPAQYVKPHLKTNKNDYLDAEAIAEAVQRPTMRFVPIKTDEQLDLQALHRVRDRWVARRTAVMNQMRGFLLERGMTVRKGPSHLMAQLQEVLCEGGAFFSARLRGLLHELKQEWDELDRRIEQANDELQHIARENDACHRLMEVPGFGPLVSTALVAAIGDGVTFRKGRDLSAWIGLVPRQHSTGGKTNLLGISKRGNPYLRRMFLHGTRSVVAQAERNPPALSTWLANLAGRTHRNVVVVALANKMARIAWAILSKGIRYRVSELVVA

SEQ ID NO: 123488 - protein, 402 aa, unidentified
MNAVGIDVSKGKSMVAIMRPFGEIVSTPFEIKHTTSDIHSLVELINSLEGESRIVMEHTGRYYEVLAHQLSEANLFVSAINPKLIKDFDNDSLRKVKSDKADAAKIARYALDKWQNLKQYSVMDELRNQLKTMNRQFGFYMKHKTAMKNNLIGILDQTYPGVNAYFDSPARNDGSQKWVDFASTYWHVDCVRKMSQNAFIDHYQNWCHRKKYNFSKSKAEEIYGKAKELVPVLPKDDITKLIIKQAVDQLNSASATVESLRTLMNETASKLPEYPIVMAMKGVGPSLGPQLMAEIGDVSRFTHKGAITAFAGVDPGVNESGTYEQKSVPTSKRGSSDLRKTLFQVMDILIKTKPLDDPVYQFLDKKRAQGKPYYVYMTAGANKFLRIYYGRVKEYLASLPES

SEQ ID NO: 123489 - protein, 410 aa, unidentified
MEALYQGCAGLDVHKKTVVAAVRLTEGNKVVTEVKTFATTTAGLLALSDWLSKNGCTHVAMEATGVYWKPVWHVLSDGEFELILANAAHVKNVPGRKTDVGDAAWLAELLAHGLIRASFVPDGQTQELRVLLRTRKQLVREQTRHTQRIHKTLEDANIKIESELSDLLGKSGRAMLNAIIAGETDPIRLAALAHPGVKSPQAKLQEALRGRVTAHHRFLLKLHLGQIDQLDGAIATIDSEIEAHLAPFRTAVELVSTIPGVGALSAQVIISEIGTDMSRFPSAGHLLSWAGLCPRNDESAGKRRSNRLRKGAPWLKTMLIQCAWAAKRKKDSYLQAQFLRLRSRRGPQKAICAVAASILTAAYHMLKDGTLYQDLGAEHFIRRSKTTQTQRLVKRLEHLGYTVDLKPLAA

SEQ ID NO: 123490 - protein, 355 aa, unidentified
MYYYVGADLHKEQTWFYVMDHNGTKIDSKSIANSPDSLKSYFASIPTPFTLAVEATYNWYFFMDIAEQFAQTAYLANSYELKAFAKRHKKTDKIDARLIADILRKGFLPMVFIPSREIRNLKELLHYRINLVRDRCRNIFRLKNTLDKLGADSSGDFTTEKRLRTIPTDSLSERYRYIISGYINRIVTLSQRLHSMKTYLKKELLEDKEIQNLITIDGLDYFSAALIKSEIADINRFASFNRLCAYAGLAPRVSQSGNKEAHHGALMVNRRKNLQWILLETVFHFIKATSKRHARYEELKIRKGANTAKVIMARQYLKIIYHVLKEQRPYYREESERPEMVYQIQPVAAAALYGV

SEQ ID NO: 123491 - protein, 328 aa, unidentified
MHYLGIDVAKAKLDCSLLLDPNSAKRKAKSVANTQAGFAELLQWLRKQDIALSNIHAILEGTGVYHEQAAMALCDAGLAVSIINPAQVRDFAKGLAIRSKTDGIDSQVLARYGALVQPGLWTPPSPQARTLQALLSRREAIAQDLQRERNRQEKADATDTPELIRQSLADSIHFLQTQLKKLQQDIDDHIDRHPVLKDDLVLLNSIPGVGPQVGRHLLSVLHRHHFDHAEQLAAYLGLVPVEWQSGSSVPGRARLSKAGPAHLRAVLYMAAVVATKYNPHVKALYERLLTRGKCKMAALGAAMRKLVHLCFGVWKTRQLYQADYAKIS

SEQ ID NO: 123492 - protein, 354 aa, unidentified
MSEHYAGRQIVGMDLHRRRSVLVRMTDAGERLETVRISNDPEYLKAVMARAGEAPEVVLEAAYGWYWAADTLAELGATVHLAHPLGVKMFSYRRVKNDQRDAADLADLLRMGRLPEAWIAPPATRELRGWVRHRAKLVGLRSSLKCQVHGVLAHAGVWVPMSDLFGVAGQQLLAELSAGDRLSIESRSRLDSALRVIGALEFEIELFAKLVNGRLRTDPGYRALQAIPGVGPVLAAVFVAEIGDITRFHRPEQLASWAGLTPKHHESDTTVHRGRITKQGSRLVRWAAVEAIQRVSGHTRLGQHRDRVAARRGRNIGVVAAARELLTLVFYGLRDHHIRALDTPAAPVASTPAA

SEQ ID NO: 123493 - protein, 315 aa, unidentified
MQSMSYFGIDASGAELVVAASDQRHAPLTIANRAAAIGQWLDALPAHAVIGIESTGSCHAALVGAACARGLRVYLLNALDVRHYARSLGRRGKTDRVDAEVIARYVAQEHSQLHAYTPPAPDLATLEALLRRRALCVQCRAQIAQSLDPLPDVTAAAAALRAEFDHFITAIDDAITQRISADLDRRTRWQRLMTIPGVGPLVAAMLVSLFERVPFHRAQAVVAFTGLDPRPCDSGPKRGRRRLSKRGPPEVRRLLYLAAMAFARTLVGRTHLDHHRAKQLSSTAVYVILARKLIRIAWSINRSGKPFDPQCLAAA

SEQ ID NO: 123494 - protein, 405 aa, unidentified
MEVYIGIDWSENKHDIFFMNEAGAVIAQYTIPHTTEGFLKMDAIRRDLGLATDECLIGLETAHNLVIDFLWARGYSQVYVIPPSVVKSNRGRQGQSGARTDESDAWLLADILRTDRARLQPWFPDSLLTRQIRAKVGLIQYLTHHNVRHANRLRAVLLRYYPAAVQVFSSLQTQIALHFVSIYPTPQAAANLTWAEFQSFAQQHGYRHPKRLPACFARLQDDYPEASSETVLIYQDEAVHLAQLLLAGIRAKKESKRALRSLFQQHPDHTIFTSLPGAGELLAPALLAKFGDDRQRFPAPDGLQALAGTCPVTEKSGKRKRVRFRRACDRQFRHFAQQWAIASLSESVWATAYWNAVRPRCDSDSHAYRCLANRWLAVAWKLWQSRTVYDEAYHLQQRAKHGRPH

SEQ ID NO: 123495 - protein, 350 aa, unidentified
MVVVGADVHKRTYTFVAVDEVGRKLGEKVVPATTAGHHDAVVWVRTQFGSDVRWGIEDCRHLSARLQRDLLTCGQQVVRVPPKLMAQTRACARTRGKSDPIDALAVARAVLREPDLSVASHDEVSRELKLLVDRREDLVGQRTSTINRLLWRVHELDPAHAPKAGSLDRAKHRQLLGAWLATQPGLVAELARDELADITRLTEQINALAARIGDRVRLAAPALLSMPGCGELTAAKIVGETAGITRFKSEAAFARHSGVAPIPVWSGNTRGRVRMTRSGNRQLNAALHRIAVTQIRLDGLGRTYYRHRLAEGDSTTEALRCLKRRLARVVFGHLHTDHQNRQPACQTAAA

SEQ ID NO: 123496 - protein, 344 aa, unidentified
MYYYAGIDVSLEYSSVCVVDGTGKILRERKVASEPEALIAWFRSQGLALERIGLEAGPLSQWLYAALREAGFAVELLETRHVRDAFKAMPVKSDRNDARGIAQLMRLGWFRPVHCKSIEAQETRAVLTARKLLQSKLRDIENSLRGVLRGFGLKVGKTTECTFAERIRELVAGHPGLELVAKALLEAHAVLRREFNGLDKHTQKFARAHPQARLLMTTPSVGPIVALTYASAIDDPKRFRSSKATGAHFGLTPKKHQSGQTDYTGRISKIGDASVREALYQAAHVMLTKPVKNCSALKSWAMRIARRAGMRKAKVALARKLAVILHRMLADAKPFNPTAKAAAT

SEQ ID NO: 123497 - protein, 349 aa, unidentified
MQSKSQIRSIGIDLGKTTFHLIALGTRSQVVIRKKFSRTQLLEYTANLPSWLIGMEAGVGSHFLGRALREQGHEVRLIPAQFVRPFVKSNKNDYRDAEAIAEAVERENMRFVPIKTEDQLDLQALHRVRDRLVARRTSVINQIRAFLLERGISFRKGPASLRRQMPEILENADEKLSTAMRRLLDFLWQEWKGLQLQIETLNTELEQIASSDPSCVRLQQIPGVGPLVSTAVVSAIGNGAAFKKGREFAAWLGLVPRQWSTGGKAKLLGISKRGNPYLRKMFIHGARAAVLRVKREGSSLGKWMSGLETRTARNVVIVATANKLARISWAVLAKGNDYQPLHKAAVFPN

SEQ ID NO: 123498 - protein, 373 aa, unidentified
MSKIRFVGLDVHAETIAVAVAEPGGEVRSLGIIANRLESIRKLLGKVGPVQHLKACYEAGPTGYVLYWQLTQLGVDCEVIAPTLVPTKAGDRVKTDRRDAEKLARCYRAGELTAVWVPDAAHEALRDLVRAREAAKKDQLRARHRLGKFLLRHGQRPTDAGKAWTKKYLEWIKTHVRFDQPALEATLSYYVQEVEHMAERILHLEKAIEEAVAQASPEIRTVIEALQALRGVAQMTAATVVCELGSLSRFQSPRQLMGYSGLVSREHSSGNRIQRGAITKTGNAHLRRVLVEAAWAYQHRPNVTGFLLRRQKSLALSDEVKHIAWKAQYRLHKRYQTLAARGKNKNQIVTALGRELLGFLWAIAVHTEKQKAA

SEQ ID NO: 123499 - protein, 314 aa, unidentified
MYHYIGIDVSKKVLNIFDGKKDLIFDNKENLSSFKKYLKKRSPDFSSLVILFEATGIYSYHLRAFCATHNIKACIINPQASHNFAKSLGTRSKTDTIDARTIWAYHRLINDKDIRIPKIDPVLITLSSYLTSYRLTLKQKLALTNHLEGIKDKALYHLLKKEQERLCKLEHELLIQMDTYIKKYPKLNEDYQRLLSISGIGQKTAISLLTLFQTYPDTNRNQITALIGLDPIQRQSGTSVHGRSRISKHGNQMMRKCLYMPTLVSIQYNQKIKVFYDRLVLKHKPKKVAVIAAMRKLLLIAHAIYKNKTVYVPG

SEQ ID NO: 123500 - protein, 411 aa, unidentified
MEVIYKRCCGLDVHKEIVVACLLIREGGKVVKEIQTFLTMTVDLVVLHDWLKAHQVTHVAMESTGIYWKPVFNLLEEDFTVLLVNAAHIKTLPGRKTDVKDCEWIADLLSHGLLRGSFIPPEPIRDLRDLTRYRKSLTDERVRQVQRLQKFLEGANIKLASVASNVMGVSGRAMLEALTVGSTDPQVLSELAKGRLRKKLPELKKALEGRFRSHHGFMVAEILTHLDFLDEAIERVSQEVSSRIVPFSKMAELLDLIPGINQRAAEGILSEIGVDMSCFPTDGHAASWAGLCPGNNESAGKRKSGKTRKGNQWLRRYLIEAAWAATRKKGSYLSALYHRLVVRRGKKKAIVAVAHRLLVIIYHMLKDQTSYRELGSDHFNKLNAAYVQRHHVKRLESLGFKVILEPLPEAA

SEQ ID NO: 123501 - protein, 383 aa, unidentified
MNKMNSNVACAGMDVHYKFSNVTFRDTDGRIVSRQRLDHPDRQGLAVRLRRWPQGLPVVMEASFGWGWLSDMMEAAGLEVHLSNCYKVEQMRKARGWVKTNKKDADLVSLLPFEPSDWWRVWRAPPQVRDRREQMRFRADLVACQTEVKNRIHAIFHRHGIFHEFSDLFGGKGRRFLTTLCIEGSPCLSAQALQALRGQVRLLDHLRRQLADVAWVLRKQLAKTPLIRRLKGIDGFGLILSHVLTAEIGQIERFRSHKALASYCLLAPRSNDTGQEDPSQSPKGRHLGLRGNRTLKWAFLEAARGAVRSGGRWRALFDRVTAGGTKDRNRGYIKVARELVKVVHVVWAKGVDYQADPPARPGRCKKYTSRSGTGQLLHPMVHA

SEQ ID NO: 123502 - protein, 387 aa, unidentified
MQSVTSATAVATTALANDITLFASLELSKSKWVVTINSPGSEKFSKHVVEGGDGARLLDLLSRSRAKAEERYGVRVKAIVIQEAGLDGFWIHRLLLANGIESQVVDAASIAVDRRHRRAKTDSIDGETLLRTLMAWARGERRVCSMVRAPSPEEEDRRRLTRERGTLIKERIQHTNRIRGLLSGQGIRDYNPLRRDCFERLEALRTGDGRELPPLLKAEIRRELDRIAVAATQLAAVERARDALIRTNAEGRNNPAAHLLKLKGMGPEFASLLWLESLFRSFGNRRQVAAYAGLAPSPWQSGGVERDQGISKSGNRRLRHTMIELAWFWLRHQPDSALSRWFQARVGAGKGRVRRIAIVALARKLLVALWRYVTQGVVPEGAVFKTA

SEQ ID NO: 123503 - protein, 443 aa, unidentified
MTRRCFGLDVHREFAQVAIWQDGRVRQAGQVPATPEGLRTFADSLAPTDEVALEATCNTHAIAKLLEPRVARVVISNPQKTRAIAEAKVKTDKVDAAVLAELLAADYLPGVWLSDDATHALRRQVARRANIVRQRTRLKNQVQAILHRNLIPRCPAADLFGHKGRRWLAEQSLPADERQAVGALLRQLDFHGQELRLIDAELARVALSSADVKRLMTIPGVDAIVALSIVAAVGTFGRFSSPEKLVSYLGLSPRVKQSGGQPASHGRITKQGRAHARGMLVEAAWAASKTPGPLRAFYQRIRARRGMQVAVVATARKLAVLCWHLVTKGEDYAFARPSLTAQKMRRLELRAGMPSKRGQKGKAAGYSLKEIRARECALTEQAEHAYRQVVADWQAKGPAREVGVAAANGARLSRPSDGAIAARQASAPDPALRSGVDHAHSPA

SEQ ID NO: 123504 - protein, 338 aa, unidentified
MRLYAGIDLHSNNSVVVVQDEEDNVVGQRRLANDLRTVSAWLEPYRDDLAGVVVESTYNWYWLVDGLMDQGYPVHLANTVAIRQYAGLKYRDDASDARWLAKLLRLGQLPEGYIYPREERAIRDLLRKRSQLVRLATMNLLSIQNLFARNRGEGISANRVKQLTPETVDAAFEDSNVALAVKSNVKVLDCLLEQIVVLEKVIHGQVRLRNSYKRLLTVPGIGTILAQTIMLETGEISRFRDVGNYVSYGRLVGSSHLTNGKRKGSGNTKNGNAFLCWAFIEAANFAIRFDPTIRRYYQRKQARTKRIVALKAVAHKLARACYHMIKNDVKFDITRAFG

SEQ ID NO: 123505 - protein, 366 aa, unidentified
MKKISTVAIETMEIFKEHQLTIGLDLGDRWSFYCVLDEAGKIILEQKVASTPEAMKQTFGKIPRSLLALETGTHSPWISRLLTELGHQVIVAHAQKVELITKSNRKDDRHDARTLARLARIDPELLGPVRHRSAKAQIHLTVIRARAELVSARTALVNAARGLVKSYGERLPKCGTQQVSRELAAGLSTELREVLEPLLKEIESLNERIKEYDERMEKIAQEVYPEVSLLKQVKGVGTQIALTYVLTIEDPYRFAKSREVGCFLGLKPGRRNSGKSEPQKHISKEGDRYLRTMMVQGAHYILGPFGEDSDLRRWGRKLGERGGKNAKKRAVVAVARKLAVLLHRLWVSGEVYEPLRNSQKAMRAVA

SEQ ID NO: 123506 - protein, 355 aa, unidentified
MFKTLFVGIDISIKTATCCFLNQEDKHHGKPFDVDNNLTGFEELKQKITTLCQFKKYDLVCIGLEATSMYGFHLLNYFSNTTIDGVKFHVYQINAKYVNRFKKAFPEKEKTDPVEAGVIAEYLRFGKLPVEFKPEDPYLPLQRLVRYRYHLSKTIEREKKLYLANLFLKFPGWVQTRPVKSLGKTSFEVTTEFTLDQLVEMSLEELALFVAKAGKNRSPDPSAIASEIQKAARESYKIRPELSSSVTFILASIYKTILALKDSLKQLDKAILQESKGFVNPLISVKGIGHVYGTGIMACVGDVKRFSSHDQLARMAGLTWKRKQSGKFQSEETRLVRECDKYLRYYLVESANFIF

SEQ ID NO: 123507 - protein, 347 aa, unidentified
MKRIAVDLAKSVYQVAESVRSGQVVQRKRLNREAFRRYIQEQAEPVEWVMEACGTAHYWGRLAQSLGHQVKLLHPRYVRPYCRRNKTDRNDCDAMLEAARCTDIHPVPVKSHEQQQLQQLHGLRETWKKSRTQRINLLRGMLREAGIEAPASTADFIRAASELVDQPELAPLSRLLHIVLAEINLYEQCMAECEQQLKCWHADDEIVRKLDEVSGIGLLTASALTTSVGKPERFASGRQLSAWLGMTPREFSSGNSRKLGHISRQGNVYVRTLLIHGSRAALLAAQRCQARTPEKLTQLQRWAVQTAERIGHNKAAVALANKLVRICWAVWCHERRFNGNWQSVKPA

SEQ ID NO: 123508 - protein, 381 aa, unidentified
MQSIQTWAGIDVSAKSLEVRRSGGGKEETRTFTNDSSGHGELIQWLGKKARICIEATGVYHLQMSIATHRAKIEVMVVNPRVAKDFAGALSNRSKTDKVDAATLLEYVRRMEFEPWEPPRREVLELRELGRRIGQLVQLAADEKNRRHAKSVASISEAVFEDVQAHIRQLDERISAVEKRAMTVIEQDDDLREQYEILMRVTGIGRRSAVQLLTELSVLDPEMTVRQIVAHAGLDPRRYESGTSVDKPVRISKVGNARIRAILFMIALSAIRHDHNARRFYAALLVRGKKRMQAIVAVMRKLLHGIWIVLQRRVAFDSAILFPSPASLAQAESSDSAIAAPQPEPAQDHPKGRSKAEELREQLDPGPAEATRSRRKRSKAA

SEQ ID NO: 123509 - protein, 345 aa, unidentified
MNSVGIDLHRNRSHIAVIDDNGELTLSKRITNGRDAFLELLGALEGESEIAVEATYGWEWLAELLEDAGYDIHLAHPLRTRAIAAARVKTDAVDARTLAHLLRADLLPEAYIAPRELRDLRELLRHRIGLTSMRAALKNRVHAILAKHGITRVHSDLFGKGGREFLAELKLREAPQRRLSSLLALIDDFTREIDATTIEIEQRAKADDRVDVLTQIRGVGRYTAMLIIAEVGDIDRFPDARHLCAWAGLTPTVRSSDGKARLGHVSRQGSPALRCALVEAAQKCTTGGGPLRDQYERIAKRRGAKIAKVAVARQILTLSYYGLRDGEIRCLARRSRTSAKEKLAA

SEQ ID NO: 123510 - protein, 406 aa, unidentified
MQEFNAAEQPIETAAALAAVGAGGLPGGHAAYIGLDVHKETIAIAVAEPGRGEPSYRGEIANTPKKVEKLIAKLSEAYGGGLLLFCYEAGPCGYVLYRQLIASGHDCQVVAPSRIPKAAGERIKTDRRDALKLARLLRSGDLSAVWVPDREQERMRDLSRARDDLKAQERKARQQLNAFLLRHGYHWPKGKSRWTPAHENWLAGLKMDDPWQQVALQTYIDAERASGERVAQLTDQLMRALPEWSLAPVVDSLVALRGIDKLAAIVLLAELGDISRFDSPKQLMAFLGLVPSEHSSGGRRRQGAITLTGNTHARRMLVESAWSYRFPARQTKHLKAKASNASPAAQQIAWKAQVRLCGRYRTLTRAGKDTKLVCVAIARELAGFLWDIVRQEMPQLAQAQAAPQGI

SEQ ID NO: 123511 - protein, 331 aa, unidentified
MHAAIVIGIDVSKAQLVIAVQPTGETWTSETTAAAIEGLVARLRAMTPELIVMEATGGYEMPLAAACGAAALPIAVVNPRQVRAFAQALGRTAKTDAIDAEVLALFGARVQPSPRPIADAETQALASLVTRRRQLLEMLGAEQRRLEQAPPTGPVVRDLRTHIRWLQRRVRDVDDEIGTAIQRSPLWRVNEDLLRTVPGIGPATARTLLAELPELGRLDRRAIAALVGIAPFNCDSGTHRGRRQIRGSRASVRASLYMAALVASRHNPVLRTFYRRLRNAGKPPKVALIAVMRKLLTIVNALLRSQTRWNPEATSTTGSPSRSARAVAGVA

SEQ ID NO: 123512 - protein, 251 aa, unidentified
MTKEAVYVGVDVAKDTLDVADSGSRETRQFTNDHEGIAKAVQYIASLQPAGVILEATGNLEMPLAVALQAECLPVVIINPRQVRDFARATGALAKTDAIDARILALFGLRIKPEVRPLPDKQAREMGSLLTRRRQLMEMLVAERNRLSRSDEDVQLNIKDHIKWLKEALSDINNDLERRIQSSPSWHEKGNLLRSVPGIGKVVSTTLLIELPELGQLNRRKIAALVGVAPLNRDSGTMRGKRTVWEVVGQS

SEQ ID NO: 123513 - protein, 409 aa, unidentified
MEVLYGKCAGLDVHKDTVVACIRIHQGSEGELKVRTFGTTTRALLELSDWLSEHDVTHVAMEATGVYWKPVWHVLDGTFELVLANAMHIKNVPGRKTDVNDAQWIAELLAHGLIRASFVPPTSIQDMRTIMRTRKQLVRELTQHVQRIQKTLEDANIKIASVISNVVGVSGRAILRAIIDGRTNPIDLLRVTTGRLKASERELQEALRGRIRAPHRFLLKLHLEQIESLERSIAEVDKEVGALLEPFRAKCERLTTIPGVSDVVAEVIVSEIGIDMSRFPTPGHLISWAGLCPRNDESAGKRRSTRLRMGATWLKTTMVQAAWSAARCKDGYLPAQFHRIKARRGPKKAIIAVAASMLTAAFFVLRDDVEYRDLGSAHFQQTIDRDKAASRLVKRLTNLGFTVEIKNAA

SEQ ID NO: 123514 - protein, 400 aa, unidentified
MLSIGIDVSKGKSTVCGMKPGGEIVYTPFEVQHTREGMSELVSLLRSSGEEVRAVLESTGSYHCPVVAALLENGIFVSVVNSLRMKRFCSQSIRKVKTDRIDAMQIALYGLAYWQELQPTKLPEDTYRELQLLARQYYQMTSILIKAKVDFNAICDQVLPGMQELMNDHAGRHKLSDFVLRYRHTTHILEMGETRFRKDYCKWAEKKGYRNCERMAVLIFATAQNGIPVLPNAPSTQIVITEAIRVLHTVEASRDAILTQMQALAKTLPEYSLVREMPCIGDTLAPRLIAEIGDVRRFHSKRALIAYAGIDAPPYQSGKFCANNRHISKRGNRYLRKTGYEVMQSYVMHKPANDPIFTFIEKKRGEGKSGKLAMVAGLNKFLRVYYGKVTELYRSLPAIE

SEQ ID NO: 123515 - protein, 409 aa, unidentified
MEVLYPRCAGMDVHKETVVVCVLTPGPGPDPHKEIRQFATTTGELRKLAEWLKQEGVTHAAMESTGVYWKPVFNILESSCELILVNARHIRQVPGRKTDKADSAWLANLLRHGLLEASFVPPLEVRELRDLCRMRTTLVRECVQVGNRIRKVLEDANVKLDSVVSDTLGVSGRLMIQALMEGEQDPAVLAELARGRLRSKLAELTAALEGQVRPHHRFLLRQWTGLLSSLEQHIVEVEQEIERHMPPFEWAAALLVQMPGLDRTAACALIGEIGVDMSRFASARHLASWAGLCPGNNTSAGQSRSGKSHRGNPWIKGLMTEIAWAASRTKESYPAALYKRIAVHRGKKRALVAVANSSLQVVWHLLAHHQPYRDLGPDHFDRNNRQHLTQSLVRRLQKLGHTVTLTPAA

SEQ ID NO: 123516 - protein, 328 aa, unidentified
MFYLGMDVAKAKLDCCLLLDEISSKRKSKVVNNNKSGIADLLTWAAKQNVSPEKLHVVMEATGVYHEQAALALADANVMVSIVNPAQIKDFGRGLAVRTKTDGVDSFVLARYGALLKPTAWTPPAPEARMLQALLARRDAIAQDLQRERNRQEKANATDTPKLIQESLKESIEFLVMQLAKLQQDIDSHIDKHSSLKKDMALLQSIPAIGPQVGGNMLAVMRSHNFGSAEQLAAYLGLVPVERQSGSSVLGRARLSKAGPARIRAVLYMAAVVATRYNPHVKAVYERLLARGKTKMSALGAAMRKLVHLCFGVIKTQKPYQHDYPKIA

SEQ ID NO: 123517 - protein, 404 aa, unidentified
MFYCGIDIAKYKHEASVIDATGVALLDSISFPNSKEGCEKLLALYRRQGISKDDLLIGMEATGHYWLSVYGYLLDQGFEVKVINPIQSEAFRRMYIRQTKNDRKDSFIIAQIMRFGQFSATELAEEAVVALRQLSRYRLALVDTCGDCKRRIISLLDQVFPEYNRLFSDTFGATSKEVLAKYPTPEDLLAVSPEKLANMFEKVSHGRFGKEKAKQLKAAASTSFGVSFAKQSFALQIRQLIEQLEFLEGQIEELEEQISLLLKQTESHITTIPGIGDTLGAIILGEIGDIHRFDAPNKLVAFAGLDVRVSQSGEFIGTRQKISKRGSPYLRRAIWLAASRAAFCDPILSEYYQSLRARGKHHLTAIGAVSRKLCNIIFAILSENRLYETVPPREIRQTSAPFTM

SEQ ID NO: 123518 - protein, 459 aa, unidentified
MCPGAAAVTDTPWGVAPQRCCCERQYRAGFERHGGRTILKEVVNVNTRKWFAGVDWATEEHAVCLIDDAGDVLGERVFPHTGTGIAEMCTWLLDTTGAVAAALHVAIEMPHGAVVETLLERGMVVHSVNPKQLDRFRDRFTVAGAKDDRRDARVLADSLRTDAKCFRLLRLDDATVIELREWSRMADDLQHERVRLSNRIRQQLLRYYPQMLELADDVASDAFLALWALVPTPKHAARVREKAVAKLLIETRVRRYDANHVLSTLRQKPLTVAPGTTEAATAHIASVAERLRLLNRQIKDAHRRLDQLTSDLATREPEPGQLNEQRDVDILRSLPGVGRIVLATLLAEASQPLAERDYHAIRTLAGVAPVTKNSGKRRGNRSIVVMRNACSLRLRDALYHWARVATQHDPKSRVAYAELRGRGHSHGRALRTVADRLLRVACAMLRERKLFDISRRAAA

SEQ ID NO: 123519 - protein, 332 aa, unidentified
MDITTIGLDLAKSVSHVVCCNQAGKIVRKKMLRRTQILHFFSELPPCLVGVESCASAHYWAREIAKYGHQVKQIAPQHVKAYVRGNKTDFNDALAIAEAVVRPEMRFVRTKTQTQQDIQALHVMRKKCERDRLLNEYGIILPVGINHVYKSLPELFDRQVENGLSELFKELLERHYQKLVELDEHLNWYTKKIKQLSQHEACRRLQSIPGVGPIIASALYQHIGNGSEFKNGRAVSSSLGLVPKQHSSGGKHNLQGISKRGDSYLRTLLIHGARAVMRVSKHKETPLSQWIKRIEQTRGRNKAAVALANKLARIAWALLAQGGDYQPELTTA

SEQ ID NO: 123520 - protein, 339 aa, unidentified
MDKSDYASVEVSKDKLLVLVNRDEKTLREKVFPNTRSGHRAIGRHLGSRPTRVIMEATGVYYLDLAIFLTTQEGVEVMILNPQVSRHYAIATLKRAKNDSVDAKVLLDYVMTRPFVPFNPPSEVAYKLRAISRKIRSIIGNCARTRSQLHAEQSTVETPKAVIKASERSIRNDEKTIKMLMEEALKLVAGDPGLKREFEIVDSVPGFADGGTVQVLGELKTLPAHLSTRQVVAFAGLDPVEHKSGSSVDKKKGISKRGSKYLRIALFMAALTAVRYNPHVKAFHEHLIAKGKAPIVALIAVCRKLLHSIWGMLKNNETFDGNKFYRLPKQEPSSVVSAS

SEQ ID NO: 123521 - protein, 382 aa, unidentified
MQGMTHKDMRNCLSTKLRMVRSMEFIVGVDIAKRSYEATIIDAEGKIVRRAFSFSNNCSGYNLLLNHVRKLTNTKGQIIFAMESTAHYWMALYARLTKDGYHVVVLNPIQPHSLRNLYIRKTKTDAKDSLIIADVVRFGRCKASNVPQDKLAALRELCRGRSYLKDTAADLKRKLIAVLDKLFPEYETMFDFVFSKSSMAVLRKYPSPQKLKNANLNKLTQLLWETSNGHFGEWKARQMKELAHNCFGIEDCCEVYSSLLLMYLEQISALTEKADILEKKIEELFVEFDCPLTTIPGIAALLGATILCEIGDISRFSPADKLLANAGMDPSVKQSGELKGTFSRMSKRGSPYLRRAIWKASTVAVQFFVPIMRKRWRRVFAT

SEQ ID NO: 123522 - protein, 430 aa, unidentified
MKSNTQNAKIEAITEKTLVLGIDVGSETHYARAFDYRGIEYSKKPFKFSNTEVGFATFKEWILDLKERHEKDKVIPGMEPTGHYWFNLGKFLQDNEMKPVLVNPHHVKKSKELDDNNPTKNDRKDPKVIAGLVREGRYMIPYLPDGVYADLRTASNIRFQLQAELTRIQNRISRWFNIYFPEYKTVYGKPDAKSGILILKTAPLPEDILTLGIDGVNQIWRDAKLRAVGKARAKTLIEAAEHSIGSKEGTVSARMEIRMLLEDYESKNMRLQEVMVLIEELVRKIPMAEKLLEIKGVGIRTVSGFLAEVGDISRFNNPKELQKLAGLALVENSLGKHKGETTISRRGRKRLRYLLFEVAMSLVSKNQEFRELHNYYTTRRQNPLKKMQSLMAIAAKLIRVFYAILTKGVDYDPKKMVSDIKRPAVYLQTA

SEQ ID NO: 123523 - protein, 492 aa, unidentified
MTKSTRPFLKKQKEKRQKKKIEKSASSPSFDQVNPHAAGIDIGSKSHFVAVRTLTGEVTIKEFDSFTSDLYELSNHLKENKVTTVAMESTGVYWIPLYDLLEEEGFEVKLVNARHVKNVTGRKTDVEDCQWLQKLHSFGLLSGAFRPVEKIRPLRTYTRQRSLLIESMAIHIQHMQKALFQMNIQLSNVLNDITGVTGMKIIRAIVAGTRDPKVLAQFRDGRCVKSLGEIEKSLTGHWKKEHLFSLQQALELYDFYQKQILHCDEKIEQALRELNDGEKPGDANSQNHDGKSSKKSPKPHKNSLHFDVKAYLQSITGVDLTKIPGIDGVSALKIIGEIGADMRPWKSAAHFTSWLGLSPENKISGGKRLSSKTKPTANRVAQVLRMAASTLYRNDSALGGFLRRMKSRLGTPQGITATARKLAVLIYTMLKNGTDYIEAGLEAYERQYEERLLKNLQKQAAKFGLSLIPSLNNQPTASQTVLLSVMPTPLTS

SEQ ID NO: 123524 - protein, 386 aa, unidentified
MQASTVRTPTADDNGTIFVALELSQRSWLVTMHSPDRDKICRHKVTGGEHVELVALIERVRERAARKLGTKPVVVSCYEAGYDGFWLHRLLTAAGVTNHVFDPASIAVEQRGRRAKTDRIDGEQLLRTLMAHCRGEPRVVRIVQVPRPDQEDTRRATRERDRLVKEQGGHVNRMKSLLRLLGMAVGNPRRRDWLEWLARQRDWQGQPVPCRMLAELEREHARLMLVREQLAALEHPPEGVEQTAATAEMARRSDLLVRLKALGPVLARSLTNEVFYKDFRNRREVASYVGLTPTPWRSGATDREQGISKAGNPRARQKAIELAWLWRRHQPDSALSRWFEQRSAGASKRIRRVVIVALARKLIVALWRYLTTGLVPEGAVLKPVTA

SEQ ID NO: 123525 - protein, 480 aa, unidentified
MNVKATRTKKQVNVENQAIKLLSKEELGIKIEVIKKELRSYTWRDLETNGKFAKNDKLSFITDDMLIAGCDIGSETHYIRAIDVRGRELSSRAFEFSNTSEGFANAKAWMLALAAKNDKKQIALGLEQTGHYWFALAAWMVSNGISVVQVNPYAVKQSKEIEDNSQLKDDRKDPKLIANLVKDGNYGMPYLPEKVYADMRRLSMFRDQLTEDRIRNINRLHRELKIYFPEYMDAFGKIDGAFTLEVLKVSAIPSDITALGAEGIKNIWHNEKLRGRGYSRANEIVSYAEKSVGLTDGTDAGREAVKWYAEQILKLDEQLAVIESTLHEKCREIPYAENILEIRGVGENILAGILAEMGDISRFDDVKEIQKLSGMGLVACSSGKHKGQTKISHRGRKRLRYWLFQAAKSAVSHADEFKQLHEYYTTRTNNSLKKMQSLVVIACKILRVSYTILKTGTTYDPQKLLKDIKRPTASQAPMAA

SEQ ID NO: 123526 - protein, 412 aa, unidentified
MRLFAGDDWAEDHHDVEVMNEAGKVLARKRLPEGAAGMAQFHGLVGQFLPDDDPDGAEVVIGIETDRGPWVAALIAAGYTVFPVNPLQASRYRERHHVSGAKSDAGDAHMLADMVRTDSHQLRAAAGDSPEAAGIKVLARTHKTMIWDRTRQVQRLRHQLREYFPAALEAYDDLDAPDTLELLGKAPDPARAAKLTRAQVSAALKRARRRNIPDKATAILAALRSEQLGQPEPLTAAYAATVRSLIALIAVLNEQVKALQGQVEEHFGRHPDAEVYLSQPGMGKILGARVLGEFGDDPARYRDGKARRNYAATSPITRASGKKKVVAARFVHNDRLVDALNAQAFAALNASPGARAFYDELRAREIEHSDALRRLANRLVGILHGCLKTRTLYDEAAAWGHRQSTPQCSAAA

SEQ ID NO: 123527 - protein, 344 aa, unidentified
MQIARIGLDLAKYVFEIHGVDAHGKTVVRKTLRRHAVSLFFANLPPCLVGMEASNGAHFWAKTLGELGHDVRLISPQFVTPYVKSNKNDRNDAEAICEAVGRPNMRFVPVKSAEQLAVQAVHRIRSRLVGDRVRLVNQIRGLLGEHGIVVAKAIGNLRQALARIVGDIEDRNISGLLRSLMAELNTELTDLDSRIAGYDQKIREIYRQSEICQRLGKVEGIGPVTATALIAAVGDRNAFKNGRQFAAWLGLVPKQRSSGGRARLFGISKRGDRYLRTLLIHGVRSALARVRGKKDPRSQWLDRMRQRRHPNIVAVALANKNARIAWSLLTGETAYDAKLSIGAV

SEQ ID NO: 123528 - protein, 388 aa, unidentified
MKAETLSSLPPAATNHDAVSCYLAIELSKQSWVVAINTPLAHKIGRHTLPGCDWKGLLQLIERIRARVARELGRPVEMIACYEAGYDGFWLHRLLEAQGVRCCVIDPASLQVDRRGRRAKTDRIDAERLLRSLMAYLRGEPKVWSVVRVPSIGEEDDRRLHRERDRLIAERVQHVNRIKGLCAIQGIYDYEPRRPDRMQRLKQLRTGDGRALPPRLQAELTRELQRLELVLRMLAEIDAERDAIAAARMSAHSNAKKIQNLVKLKAIGPEIATVLAGEVFYRSFANRRQLASYVGLTPSHLQSGASCRDQGISKAGNPKARTTMIELAWLWLRHQPDSAFSMWFRERVGSLKGRIRRITIVAVARKLLIALWRYLEAGVVPAGAVLKV

SEQ ID NO: 123529 - protein, 365 aa, unidentified
MKKSSTAAAASKKNFEQRLTIGLDLGDRMSWYCVLDEAGEVISEQKLGTTRKAMQEMFAVMPRSRIALETGMHSPWVSRLLSELGHEVIVAHARNVRLIGESRRKDDRLDARTLGRLARIDPQLLSPVKHRSAQAQADLTVIRARAGLVRARTALVNAARGLTKSYGERLRGCNPLNLDAEKAQALSPELQAALGPLLQALESLSERIAEYNRRIEAIAQQSYPQTALLKQIKGVGTLIAMTYLLTLEDPHRFRKSRDAGCYAGLQPGRRNSGQSEPQMHISKEGDPYLRTLLVQAAHHILGPFGADSDLRRWGLRLAERGGKAGKKRAIIATARKLAVLLHRLWVSGEVYEPLRNTNRTRLAAA

SEQ ID NO: 123530 - protein, 428 aa, unidentified
MNCNTQNAKIASITEKTLIVGIDVGSETHFARAFDWRNYEYTKKPLEFSNTEAGFMMFKAWVEDIAEKQGKTAVIPGMEPTGHYWFALGKFLQDSGMKPVHVNPHHVKKSKELDDNNPNKNDRKDPKTIAALVNEGRFSYPYIPTGIYAEIRSLSNLRFQTQEELTRIKNRIARWFAIYFPEYKDVYGDLMAVSGRMILKEAPLPEDIRILGVNGVNQIWRNAKLRGTGMKRAKILVSAAEHSVGSKEAPEAARIELKNLLNDMDVYVSRMEELLQTIEEKLKTIPYVDKLMEIKGIGLITVSGFIAEVGDIGRFDNPKQLQKLAGYAIVANDSGKHNGESRISYRGRKRLRYVLYEAAISLVGKNAEFKEIHEYYRTRKENPLKKMQLVVAVACKIIRVFYTILTKGVDYDPMKLMSDIRRPQLQAA

SEQ ID NO: 123531 - protein, 391 aa, unidentified
MFYVGIDVAKHKHEAVVTDDSGSVIIKSFHFANSFTGYRVLIDKLKKITIIKSQFVFGMEATGHYWLALFTRLKKDGYNVQVFNPIQSDAIRGLYIRQNKCDSRDAFIIAEILRFGKYSATVVPQDKLMALRELCRNRSFLVDEQSDLKRKADALLDQVFPEYEKLFSNNFVHASTELLMKYPTPEKISKASVKTISNIISKASNGYYGLAKAQQIKIAAKDTFGITDTCGAYSSLIALYIHQIKTIDEQIDELNKKIEEIFNGLDSKITTISGIGTTLGATIISEIGDIHRFTSADKLAAYAGIDPTVKQSGNFAATRNHMSKRGSPYLRRAIWHACVVAVQFDPMFKAYYEKKAAEGKRYMVIIGHCTKKMMSVIYAVLRDNKEYNPCM

SEQ ID NO: 123532 - protein, 417 aa, unidentified
MKKNSKSPMKKEQKAKRAKAQRPAQREPKEVLAELVEKLRGKLEVKATSASPAEAGPRAELGPNLDRLTVGVDLGDQWSHYCILGLQGETLSEGQLQTREAEVAEFFQALPPARVVMEVGTHSPWMQEIISGEGHEVVVANPRLMEGSKRRKRKNDRIDAKKLARLGRVDPQSLHPIRHRSREVRQDLVVLRAREALVAARTELINATRGLVKSMGTRLPKCSSPSFGQKVKDAIPEKVREALLPLVQFADALSDSIQSYDQKIEELGSEKYGHTKLLRQVKGVGPITALAYVLTLENPEHFAKSRDVGPYLGLVPKQEDSGESQPQLGISKAGDTMVRKLLVGSAHYILGPFGPDSDLRSYGLRLCERGGKNAKKRAAVAVARKLAVLLHRLWVSGEVYEPLGYAASGAKVQQAAA

SEQ ID NO: 123533 - protein, 405 aa, unidentified
MEIIVEKGCGLDVHKGTVVACIMGVGIKKEIRTYTSMTNDLLRLREWLQGHGITHVAMESTGVYWKPVFNILEDHFEVILVNARHVKNVPGRKTDVQDSEWLCKLLRSGLVSGSFIPPRDIRELRDLTRHKRKLIQAIVAEKQRVEKVLEDANIKLSSIASDTFGASGKRIIEELIKGKLRAEEMAELSKGRLRQKRGDLKEALVGEVREHHKFMIQASLKHIRAMEKILSSIERKIQEKIDRQYKEEYALLQTIPGVKGEASTLIAEMGVDMERFPSEEHLSSWAGMSPGNNESGGKKKPGSTTYGNKCLKTMLTEFAWVASKTKDTYLRSKYHSLVGRKGKKKALVALGHKILIMCYHILKDRVAYKELGVDYLDQRRKDKIARSYIKRLKHLGYEVILQEAA

SEQ ID NO: 123534 - protein, 314 aa, unidentified
MNTLACVGIDVSQSQLDVAVRPGACFSVTNDEPGWTTVVAQLRRLAPVRIVLEATGGLDVPLAGALAADGLPVVVVNPRQVRDFARATGQLANTDALDAQILAHFAEVIRPQIRPLPNAQTQALAALATRRRQLIEMLTAEKNRLRTASPSIRKSLRAHMAWLQRARTHTATELAQAIQDSPVWREKDDLLRSVPGVGPVLTTPVLANLPELGTLTNKQMAALVGVAPLNRDSGTLHGKRMVWGGRAQVRATVYMAAIVATRYNPAIKTFYQRLCGVGKAKKVALVACMRKLLTMLNAMLKHRTRWRTDLPQHA

SEQ ID NO: 123535 - protein, 361 aa, unidentified
MSNNSIELVIGMDMSDKKSEICVLGMNGEVLKRDKVVNTIDGLDDFFSTFSEPSKVLVAMEAGTHSPWVSCYLTEIGLNVLVGNSRKLRAIWASEKKNDKRDAEMLARIARMDRNLFYPIRHRGKRSQSMLAVIKAREALVKSRTMLINSVRGMLKSMGIAIPKCSTQSFAATALETIPKEYHFGLLEMIDMIGKLSEKINIYDRKVKILCDKEFPETKIFSGISGVGPITSLSFILTIEDPGHFRKSRDIGPFLGLVPKQDQSGEIDKQLGISKAGNELLRRLLVQCAQYILGHFGPDCDLRRFGNKIAARGGSAAKKKAIIAVARKLGVLMHQLWATGAEYDPFFNTNKKNRKNIKKVS

SEQ ID NO: 123536 - protein, 392 aa, unidentified
MVVSVGIDVSKDKHDCFIVSSEGEVLADAFTIPNTIDGFHCLLQRIQDCTHAQDKIKVGLEATGHYSYNLLGFLLDNGLTTYVLNPLRTNLYRKSLSLRKTKTDRVDARTIASMLLSDAGLKPYTDTAYHNEELKSLTRYRFDKVKERAKLKSSIARLVCILFPELEKFVPSLHIASVYALLEEFPGAKQVANTHLTRLKALLETASNGHYKRDMALEIRNAAKNSIGSQMPAKSLELQHTIRLIRELDREIDEIEEQIQSIMDELHSPITTIPGLGFRMAAMILAEVGDFTRFDSPDKLLAYAGMSPSTYQSGQLKNCYPHMEKRGSRYLRYALYNATKYVCHWDPAFAAYLAKKRAEGKHYNIAISHAAKKLVRLIFAMEKSRQPYCSAA

SEQ ID NO: 123537 - protein, 343 aa, unidentified
MKITRVGVDLAKNVFQLHGVDRSDKCVWKRKLKRKNWLKVLLKETDPSCEIGIEACAGAHHWARILMSKGYQVKIIAPQFVKPYVKSNKNDANDAEAICEAMSRPHMRFVAVKTTEQQDMQAMHRVLDELKSHRTAKGNQIRGLVAEYGLVAPRQLYALRQAIPEWLEDAENGLSDIFRQLLKGLQEDLVRLDERIAEVNDAIEQIARTHPVAQRLQQLRGVGPLVSTAMIASVGTAEQFSRGRQMAASLGITPKQFSSGGKERLQGISKRGDAYLRRLLIHGARSVVTHAKNKDDRYSRWMTQLAQRSHMNVAAVAVANKTARMAWAMMVNETDYDPALASR

SEQ ID NO: 123538 - protein, 338 aa, unidentified
MPLYSGIDLHANNSVVVLLNEQDQVIYQRRLANHLPEILEALAPYQADVSGVVVESTYNWYWLVDGLMEAGYRVHLANPAAMQQYSGLKYTNDHSDARWLAHLLRLGVLPEGYIYPKAERAVRDLLRKRAHLVRQHTAQVLSVHNLLVRNTGVRFGAKRIEELTPSELVSMLSNPEQVLAVTSSLAVLHCLGQQIKTLEKAVQKRLKHTPAYAQLQTVDGIGTILAQTIVLETGDVGRFPTVGNYASYCRCVGSTKISNGKRKGQGNVKNGNPYLEWAYMEAAQFAIRFSPTVQRFYQRKQAKSHLMIARKAVAHKLARACYYIMRDLIPFDVHKAFG

SEQ ID NO: 123539 - protein, 448 aa, unidentified
MKKETSQKKSVVNMPLVNPNAAGIDIGDTIHAVAVPVDRDEVNVKSFGAMTCDLEEIIRWLHYCEIDTIAMESTGVYWKPLFTMLIRAGFEVYLVNSKQVRNVSGRKNDEDDAVWIQKLHSCGLLKSSYLPDDEQEALRTLVRHRKTLILDCNRFILRMQKALEMMNIKLHTVIRDITGKTGMAIVEAIIKGERRAEDFLVYVDKNIRADRATIVKSLEGNWRSEQLFILEDCYKNYQYYKERITCCDAAIERQLQQYQLDVFPTVIANKEIKSTKRATKNKPKFNTCSYLKAILGVDVTAIYGISDISAMEILSETGIDMSKWETSKHFVSWLNLCPNNKISGGKLISSMLMKKKPNTASQAFRNAANAVQRSDNWLGDYFRRMKAKGGNKYAMVATANKMATIYYNMVMYKQEFNPVDLHSYQQKYKQAKITYLERKLNDLKKEVA

SEQ ID NO: 123540 - protein, 412 aa, unidentified
MKDLLEISCGLDVHKEKIVACILTGPLGKPTRSEIREFSTLIPDMIALRNWIVSKNCHHVAMESTGIYWMPIYEILEDAFSGDITLLVVNARHMKNVPGKKTDMRDSEWISTLLRAGLLNGSFIPEKRIREFRDLNRYRKSVIRDITSQKNRIEKFLQSSGFRLSSFISDIFGASGRNIILHLVEHGQIDKTALDSCLKTKTRNRIDEILMSVNGTLSEHQKAFLRILMTHYDSLKKHLAEIETSLEEDMAPFALQVEQLNSIYGISTTASCAIIAEIGIDMKPFKTAEHICSWAGLCPGNNESAGKRKSTSVTKGNPYIKSMLCEIAWVIAGKRNTYLSAWYWRIKQKKGAKKAIVALARKLLVIIYTMLKQGTLFDESCFETRRKYCEQKQLSRYIRELEKHGYHVEAQS

SEQ ID NO: 123541 - protein, 356 aa, unidentified
MIVMKYYTSTTEFNCGIDLHAHQMYVCLMDRQGNKLLHTNIRNNDFEYFLGRIAPWRHDLTVCAECMFGWYWLADACANAGLHFVLAHALYLKAIHGGKNKNDRIDSEKLAHLLRTNLIPPAYVYPAAQRPLRALLRQRLHFVWERSRLLTRIQSHQQAHNRTSSVSANRDHWQEHLLAQEPNPVYQLALQNQLALIRHYDAQIAAVQSQLQQLTRVHAHRDYTLLQTVPGIGEHLGLTLLYEIGDITRFPSVKDFLSYCRLVKGTVASAGKIKGLRGQKLGNPYLRWAFGEAAIIAKRDHALIGPLYQRLEARMQGNKFKANAVLAIKLARAVYYLLKNKTVFDPQRLVAALAHN

SEQ ID NO: 123542 - protein, 319 aa, unidentified
MPSVIGIDVSKKTLDVASRGAELKLRRVDNDETGHATLIEALRALGEITLVVLEATGGYEMPIAAALAAEKIAVAVVNPRQVRDFAKGVGKLAKNDQIDAGVLAYFGEVVRPAAQAMPDQQQLELAALVTRRRQFVDMRSAEKNRRSLAQNLSSVVRSSIADHIEYLDQRVAELDGDIDQLIKQSTIWKANDDLMSDVPGIGSVTTRTLAALLPELGKLNRRQVAALAGLAPFAHDSGDTKGRRTIFGGRAAVRSVLYMATVTAITHNPLIAAHYARLIAAGKKGKVALVACMRKLLTVLNAMLRDRASWNPALVKANP

SEQ ID NO: 123543 - protein, 421 aa, unidentified
MKGLRSKRMRTVKEGTLIATVDIGATTNTGYCTTVDGKDIKVFKFGNTREGFEKFWHLVVAARNRFRCDEMVMGYESTGPYAEPLVHYLLSKPVKIVQVNPLHTKRLKEVNDNSPGKTDDKDPRVIADVIKLGHALSVVVPEGDAAYLRRLNNARERHIGERTALLNQMQQLVFIIFPEFKTVLKNMKTRTARFILKKYITPGRIGALDKNVLGEEMRTRSMGKLRIKDAELLISLAQSTVGIKEGVSGIALDLQHILAQLETAESFTAEIEAGMAATLVRIPCSARILSIKGLGVISVAGLIGEVGDFSKFDTQSEIMKLAGLDLYEISSGKRKGQKRISKRGRSLIRKILFYASIQMIRKNGILCHYYERLIGRGMLRMKAVVAVMRKLLGIIHAIVRDNRDYVGEYTVPKRRVIKKAA

SEQ ID NO: 123544 - protein, 314 aa, unidentified
MDHNTVYGVDVSKRNLVTAGYDAQTPVVVHNRPESIAAWLAGLPRGAAVAMEATGAYHQVLAHLAHAAGLRVYVLNPQTLKHYAWAIGQRGKTDQCDARMIARYAVHEQAKLRCWVPPARAADCLAQLLERRHTVVGVRQTLAQSLAMPMLKAPRESLLANFERILRRLDILIRHELARLPGMAALYERLKGIVGIGPVVAAQLVAVFNTLNFAQADSFIAYTGLDPRPDDSGDRRGRRRLSKHGPPLLRCLLYNAGMAAANSRLLKPVYKQLRERGLQTTEAIVILARKIARIAFALYKSGHCFDAQKHLKTA

SEQ ID NO: 123545 - protein, 343 aa, unidentified
MNITTIGLDLAKSVFHVVCFNKQFKEVKKRMLRRHQVLQFFTQLPPCRISMEACASSHYWGRELRIMGHDVKLIPPQHVKPYLRGNKNDYNDARAIAEASTRPSMPFVAIKTTEEQDMQAIHRMRAQCIRDRTALSNSTRGLLGEYGIVLPKGLSVLRKSIHGLLEDADNGLSDRFRNLLARRYDHLVELDGHIAFYTNELEILSQQDDACLRLQTVPGFGPIVSSAFRSVVGDGRAYGRGRDASASLGLVPRQHSSGGKNVLLGISKRGDRYLRSQLVHGARAVVIQAARKDDPLSKWINRIHEERGWNKAVVAMANKMARIGWAILRHNTIYQPASERSTR

SEQ ID NO: 123546 - protein, 344 aa, unidentified
MIHVGVDLHQRFCYMTAVRASGEMLRQAAVVNEAQALRRWLQGLPRPRQVVVEACGFWPAFARAVRPEAEQLLMVHPARVKAIAAASLKNDRVDSATLAHLSRCDLLPLAWMADPATQQARMRVRLRIALGRQRARCKNLVQAVLHQEGFPKPVTDVFGKRGRGWLREIELSAAGRVTVDTWLKLIDLLDQEIAEQERQLRQAAAADARARWLQTIPGVGAYAAMVILAEVGDIARFSDKKALANYAGLVPRVRESAGRRSYGGITRAGSETLRWILLQVAQVAARHSPAARAYYERLRRRKRPQVAKVALARKLLACMWALLRHGVGYDDQVFAAPPVQKTAR

SEQ ID NO: 123547 - protein, 352 aa, unidentified
MGEHSTICVGIDIGDQYCQIAVLDEDGDVSETSRIRTTPAAFKRYFEGKSPMRVAMEVGTHSPWLGQLVDELGHEALVANACKLRLIHRNDQKSDEVDAELLARLCRFDPQLLYPICHRGKNAQSAFAVLRTRDALVRSRTALINHARGIVKPTGYRLPKCSSRYFGKLQDELPETLRPVLEPILHTVSQLTDQIQAYGQQIERIGQDQYPQTLLLRQVPGVGPITSLAFVLTIGDPWRFAHNRDVGAYLGMTPRRSQTGQSDPELPITKAGSRYMRRMLVQCSHYILGPFGPDSDLRRSGERIASRGGKNAKKRARVAVARRLAVMLLSMLKTGEAYDPLYGSHDDEISAA

SEQ ID NO: 123548 - protein, 324 aa, unidentified
MDKVIGIDISKQVFDAFGKNKKRSFSYLKAKNCLTGFKDLVSEYGKDNVFVMEATGPYYMKLANCLYKQGAKVSIVNPLVIRRFHQMNLHRAKTDKKDAKTIHDYGSINKIKLWEPPKKEIFQMQQLITSIELVTKQITAVKNQKQSFKATGLLSAEHNSELNKMQKQLEAKKNKFEAMLEKIVSDNFFENKKLLESIPGIGPRAACLLIAITNNFENFFHYKQLIAYVGMSPRIFESGTSVKGRGSICKMGNSQARKQMYISAISARFHNKACLEMYNRLKEKGKPERVIKIAIANKLLKQAIAIVKSKRMYDSDFVSEKLVA

SEQ ID NO: 123549 - protein, 340 aa, unidentified
MKPVIGVDPHLDSFSLCVADPLGRQVEALTLPNAPGGWAEALGIAHRYRVTTVGIEGASGFGASLARHLDRAEIQVIDIPARVTVAGRNREAAGKTDPADARVVARAVLEGFGSPWSNQSLYEALRVVSHRREALVGDQTRDINRLRALLIDIDPPRAARLGRLRSTTAFKTLSRVRYGGDLHRQVTAQAIRTLATDCRRRLTQIRGLTRQLAKLLPPAAHQLINKIDGLGIISAATLLGELAGTDGFGSDARFARWAGAAPLDASSGREERHRLHRGGNRRINQVLHTIIITQARHGGEAAHYISRRHQEGKTKREATRAAKRHLARRIWKTLKQLELT

SEQ ID NO: 123550 - protein, 473 aa, unidentified
MSKGSGNGTTRGDRRRNARRERLRGLLPRDGAVIGIDLAEDKQALAVVDHDVRVLARKTVKVKAFRLGEALDWAVAQAKVKGFKQVAVACEPTGPRWMQVQRLCAERGLPLVCIQPLVSHIAREQQDYTPHKTDESDCVLIGRLAAELHCYIPEELDETWAQLRHLGRRRAQLITAATASVQRIGDFLSVTWPVVTEVCAQPFKPVTWLAALQVVTSRCGGDPARLAAMGPEEFTAVVRAAVPAWGGKKGWGTICGRVFAALTDTEGVVAWSRRGLLRRVADELGDLARTRAQLRAVAADMVMVLSELGLSRLGDIPGLTAVGAAAILAETGDPRRYDSSSSLVKHAGLSPSENASGAFEGQARISRRGRPGLRLTAWRAVWPMLRLNPVMAAKYAAMTQAADAAVASDAGSQPARAAASAARARRAKARVACAASLLRWIYSMVVHGTSWDAAVASGAAACQHAPRCQPEAA

SEQ ID NO: 123551 - protein, 366 aa, unidentified
MARYVGLDAHSKNCVYVIQDEHGKVVGEGSVPTTLEGLLLMRVRYELPPGTRVALESGTMAFFVARRLARLGLDPLVVDAHEVRSKALRPNQKSDRRDALELCEGLRRDSYRSVVHVPPEPIERLRETLGRRRHFVRLKTMQVNAAKRLLRAAGVPMPVRSLGTAAAWDKLLAAVTIDPSLHAFCVTHRAVWRCAHEQITTLEQSLDEQQEPLQRDFDRLQTVPGVGRIVALTVLAVFSDVQRFPTAKHAASYAGLVASTYDSGERVQHGRITRRGSSELRSMLCEAAHHAGKSNNPFNPYFSSLCVRRGYKMAVVAVAHRLCRILYAMLRHGTDFDVSKLGVEQGHFEQVRVRHYRRKSKAAMSA

SEQ ID NO: 123552 - protein, 348 aa, unidentified
MRGAVHMQITTIGLDIAKNVFQVHGIDAAEKVVVRKRLGRSQMLAFFKALPPCLVGMEACATAHYWARELTKLGHRVRLMPAKDVKAYIKRNKNDAADAEAICEAVRRPTMRFVAAKSAEQQGQLMQHRTRDLLMRQRTQVINALRAHLAELGIVAAQGDKGVKELLTIVTDKKDERLPIDARASVIVLAAQLEAVQTLIGSIERRIKTQHRANEASKRLETIPGIGVIGATAIAATVADPTIFRSGRDFAAWIGLVPRQDSTGGKQKLGPISKQGDRYLRRILVVGAHSVLRRAMQNPEKYLWLTRLLARRPFKVVAVALANKMARMAWALLAHGGTYRAPEPAAAA

SEQ ID NO: 123553 - protein, 425 aa, unidentified
MRSVGLDVHLDFCEVAIVEDGEVRSAGRVETKPERLELFAGSLCPDDRVALEVTGNAWEIARILEPHVAAVLVVSPSDTTIRQARAKTDRLDARTLARLLAAGSLDGVWMPDEATWVMRRRLSRRSQLVWARSRAKNQVHAVLMRQLVGRPPFSDVFGIKGRQWLAELELAFEERETVDSAVRQIAFLDSEIATVERLIAQAALQSGEIKRLMSVPGVNVIVAATFLAAVGDICRFKNPRKLVGYLGLDPRVRQSGPGPATHGHISKQGSTRARHALVEACWTTVRQPGPLHAFYQRVRGRRGHSVAIVAAARKLACLFWCLLTREQDYAYQQPSLTKKKLRRLEIAAGAPKFSPEASGIWAANDAMRQAELELARQAEVAYARTVRDYHATQAGKTAKVGASVTPGHASNKPKKGKAARQTTSP

SEQ ID NO: 123554 - protein, 339 aa, unidentified
MTEVSTIGVDIAKRLFQVHGVDRSGGVVVRRTVRRSQMLTWFGKLSPCLVGMEACATAHYWARELRKLGHEVRLIPPAYAKAYVRRNKNDPADAEAICEAVGRPSMRFVAVKSEAQQAAAGLHRVREILMKQHTMLRNQVRGLMGEFGIVAAKGRRGFAELTAILADPDDQRIPSPLREALAAIVETLRGIDRKLEALERQLVQAGRENATFRRLITARGYGPILASAMAAMVIDPAAFRRASDFAASLGLVPRQEGTGGKTWLGPISKRGNGYLRRLLVNGATAVLKSKRAKEDPWLAKLLATKPRKLVAVALANKMARVGWALMTRQEDYRNAPAVA

SEQ ID NO: 123555 - protein, 400 aa, unidentified
MKRACGLDVHKDTIFCATFNGKKHGPVTEYSTLTSSIRAMGKDLHTEGVYAIAMESTGMYWIPVWNIMEDMGFNLILVNPCLIKQMPGRKSDVKDAQWIATLLHKGLLRSSLVPSKEIRELRTYSRRYVKLQQRQTSVLQDMERTLEICSIRITSFVSNISSKSVLSVIEHIVQGETAPDVLVELIHGRIINAHTKQHIKESLTGFITEHHRLMLEFSLQEYTLLIGQSNTCLLKMEELCNIHYSNEMKLLLTIPGISNISAMIVLAETGADMKAFENSGKFSGWTGLRPRNDESAGKYKSTATTKGNRFLRAVLVQIAWAASRSKGCYFKEKFNQLAMRSSRKEALIAIARKVGVLIWNVLYYEQQYNPEKVIVYDPGRLKAKLSYHQKEYDRLQKLMK

SEQ ID NO: 123556 - protein, 425 aa, unidentified
MRVTYQTCCGVDVHKSFLVATIIKTTGGIEPSYQKKRFSTFNNSILLFKQWLLDNNCHDVCMESTGKYWIPVFNLLEDEINVTIANPKWVKAVKGNKDDEKDSKWIGDLFRLGLVKGSYIPSRPIRILREYTRYRYKLVSCRSSEKNRYQNALTVCNVALDSVVSDIFGKSSTSIIDYLLQQSGTSINHKEIASKLLRSLKSKEDAVIESIEGYQMTDAQKYRMRLVRAHMDYITAEINDVDSMIENLISSDPDYENAVQLLCTIPGVKHDSAVTIISEIGIDMSQFCTSKRLCCWAGLTPGSNESAGKKKSVRITRAGVYLKPALVQCAHAAVRSKTTPYYKNKYERIAKRRGKKRAIIAIARMILTAVYHMLSTGETWNPCDLYKVDIPPEMQEKQKQKAIKQAYRFLISVGELSADSLVQQT

SEQ ID NO: 123557 - protein, 350 aa, unidentified
MQIVGCDFHPQWQQVSFLDQETGEYREAKLVNGDGEAERFYRSLSPGALVGIESCGNAQWFIDLLGSLGHTVWVGDAAKIRASYVRKQKTDRRDADHILKLLVEDRFPRLWTPSAEQRDLRQLLIHRHKLVEIRTRVKNGLQHLAMNRGVQKQSRLWSVRGRAELEKLPLEGWSARRRKDLLELMKGLDQQIKELDEAVVQAAREDAKAELLMSQPGVGPITAMAFVLTIGDVSRFEYSGKVASYLGLIPSEYTSGGKRKLGAISKQGNRFMRQLLVEAAQTACRLDEGFRKQYQARCHHKPKAVAKVAAARKLAVRLYWMLRLNKPYPEIAHIESSSGVPLAIHGRDVE

SEQ ID NO: 123558 - protein, 356 aa, unidentified
MSEATSSDVIIGVDTHKQTHTAVAITGLGARVGELTVSACTQGYHDLEAWAASLGSIRGFAIEGTGSYGAGLSRFLRERRHTVHEVCRPDRRARHQHGKADHLDAEVAARTLLSGYHAAVPKSGTSEAEMIRHLKVARDTAVKARTQAMLTLKSLIVEAPAALREQLEALRGKKTLLRHLAALRPGAVTSTVASAKTSLRAIARRWLALDDEIRAHDAHLQDLVRRRSPALVEAHGIGVGTAAEMLVLVGDNPERIRSEAALAKLCGACPVPASSGKTSRHRLNRSGNRQANAALHRVAVVRMRAHEPTLRYVSRRTAEGKSKAEIIRCLKRFIAREIFGHLCAAPKPTSAAPQAS

SEQ ID NO: 123559 - protein, 387 aa, unidentified
MIYIGIDIAKNSHFASAVNSDGEVLVKPFPFENSRDGFNLFLNRFKAFSVNDCLVGLESTGHYGDNLICFLFPKGFKIGMINAIQTNSLRNSNIRKTKNDKIDTFLISKCLILGNYTSIQEKDINAIRLRTLCRFRFDVIQSQTRLKTQLTTCLDLIFPELHNFFKGNLHLKTSYALLEKYSSPLEISKTRIDTLTKLLASASRGKYSYDEAVILKNIAKLSIGVDNPAISIQIKCLIKQLDLLKEQISSIDKNIKEIMDNLNSPILTIPGIGYTLGAIILSEIGDIKRFSNPTKLLAYAGLDPSVRQSGNFNAKTTRISKRGSKHLRYAIHRASFVIVYNNDVFYEYYTTKRSKGKSHNNALGHVCNKLIRVIFKLLTENIPFNLS

SEQ ID NO: 123560 - protein, 338 aa, unidentified
MKFKRIAIDTSKHVFTLHGVDEQERPVLRRELKRAQVESFFAKQEATEVVLEACGGSQHWGRLLSRLGHRVRLIPPQYVKPFVKRAKNDRNDAEAISEAASRPTMRSVVVKTVDQQADGIILKHREMLVSQRTQAINALRGHAAEFGMVAAKGIVKVAALLGVLAADDAIPASARARFQQMGAHIEALDQQVEAMDDELAALHKANPVSQLLAAIPGVGPLGAITMVLTVEPGNFASGRHFAAWLGLTPKEHSTGGKQRMGKISKAGNERLRQLLFVGAMSVIRFAKPGSKSASAWLLQLLERKPRKLAAVALANKTARIVWAMMSRGEAYRRQPVAA

SEQ ID NO: 123561 - protein, 405 aa, unidentified
MSNDVFVGLDWAVHTHAVCIIDAAGAVLDRFEVTHDRDGLAELMRRLARHGQRLRIAIERPSGLIVDALVEAGHEVLPIHPNAVKASRPRYRSHGAKSDASDAYLLADLLRTDGHRWRALAQQSDSIRALRALVRSRDDLVAARVAAANQLTSTLQTFWPGAACIFADVTSPIALAFLRRYPSPDSARRLTEAQLQRFCKAQHYSGRRSAADLLTRLRAAATGRVGAQTEQAMADVVHAQVAVLVPRVTQIADLTRRSEQFMHSLPDGLLMMSFPRAGQVCAAQILAELGDVRERFPNADLLAAEAGAVPVTYQSGKTRSVAFRWACNHRLRQAITCLADNSRHANAWARSIYQAARGRGCDHTHAIRILARAWLRVIWRAWIDRKPYDPALHGSAVALTSAQGG

SEQ ID NO: 123562 - protein, 350 aa, unidentified
MLHAGLDLSRTRLDVCLLDEQGSTLQVTQAPPDTDGLRGLARQTAAYGQPVRAAVESTNGARFVHDQLELCGWQVAIADAAKVKGLAPLACKTDRIDARVLAELSRRDLVPEIWLPTPEVRAERERARFRLHLVRHRTSLKNRIHATLLAFGKPCPTSDLFGGGGRELLARLALPQPWAGSVAASLALIDDLEAQIDTCERDLRRLGADHPYIRLLVTTPGIAWVLGYTIAAEIGDIARFPSPKRLGGYTGLCPRVYQSGSRDHRGPLAKNGPTWLRWALIEAATHAARHPVYRDHHQRIRTRLGKQRGPKVARVEVARKLAEAIWHMLTRSQPFAPTAPARPPAHPLVA

SEQ ID NO: 123563 - protein, 343 aa, unidentified
MANHTLVAVDLAKAVFEVAVSHHPGQVARQKRYSREQFQLALAQLPQATVVMEACGSAHFWARRMLALGHKPVLLPPHAVRPYVRRNKTDRTDTKGMLEAHRNEEIRPVPIKSVAQQTLASLHRLRSGWLAERTARINTLRGLLREFGILIPLGAHHAVPSAWASLEDAESEIPDPLRPALAELCSEIRDLERRIKMIEHQLTALAAQTPAVAQLMTIPGIGLLIATALVAFVGDIHRFPSARHFASYLGLTPRENSSGLRRRLGAISKRGDVYLRTLLIHGARSVLNAAKRKTPDRLRAWALAREAARGHNKAATALANKLARIAWAVWKHDRPFHSTPHAV

SEQ ID NO: 123564 - protein, 360 aa, unidentified
MKTYYIGADVHSNNTELAIEYNGQIIGRHALPTAIPAIKDVLASVGGKIHLTFEEGPMAGWLYRNLKDSVEEVVVCDPRRNKLICSDGDADDKIDAGKLAALLRGGYLRAVHHSDDEDRAEFKQWVSLYHDRVRDAVRMINKIRARCRMYGIAIPRKVIRDKLQRPLWLAGIQNKPLANQLDMLWIGYDAVAAQVRRSKRQLCTLSKRYPIIKLWSQLAGIGTIRAVTAFAFLDTPWRFAHKNKLWKYCGIGLQRSASGTDKKGKPKPARLQLAWAVNRLLKNVILGAAHTAIHQNKNTFKSYYERMLHDGIMPSNARHAVARKMLTVMWGMWKTNSRFNEKLLEKVAVTADSSFSVSGR

SEQ ID NO: 123565 - protein, 408 aa, unidentified
MQRVIERSAALDVHKASVTACVRVPGEQRVEEFASTVRGLLSLRDWLAGFGVTHVAMEASGVYWKSPWAILEDEFECLLVNARHVKQVPGRKTDVGDAEWLCRLVEAGLLRANFVPPKPIRQLRNLTRYRKTQIQERAREVNRLHKALEDAGIKLDCVAADIMGKSGRDMLDALVAGERDPEVLANLARRQMRKKIPALREALQGRFEAHHALWIGAILAHLDFLDQQIERLTDAIGEQIAPLTSAVELLCTITGVQSRAAEVIISEIGGDMSRFPTARHLASWAGQCPGNDQSAGKRRSGKTRNGSKWLDWTLEEVAIAAIRVKGTYLQAQYTRLRPRRGHKKALGAVKHTVICAVWHMLSTGETYRELGGDYFTRRDPERRTKRLIQQLEQLGHTVTLTTAPHAQT

SEQ ID NO: 123566 - protein, 281 aa, unidentified
METMYYIGLDVHKKTIDYCVKDGSGRIYAAGSIRATRLELDMWMKTLPRPWTAAMEATIFTAWIYDHLQPHAAAVKVAHPLMLRAIAVAKKKNDRIDAKKIADCLRCDFLPECYMASTEIRERRRTLRYRNLLVRQAVQMKNKIAVLLMEAGVSYNKQKLHKVGYFRELLATNQDIDEGLKPLLRLCRETVVRLGKTESALVRSLQRDSLLVERVERLMTIPAVGPITALTWALEVGDVQRFSSIKKAISYCGLCGAESSSADITNARHCRNNATNICRRF

SEQ ID NO: 123567 - protein, 429 aa, unidentified
MTRISVGVDVSKNRSTVCIMDQDGKFIMRPFLVWHSTEELDFLADTLKRLNGEVRVIMESTSIYQYPIALHLKEKGIFISIVNAYKVKKFANTDFRGGKTDKKDSRTIASYGISYWDKLVEWQIPKDTYFNLDLLNRTYMNAKKHRQIILQELQHYIDCAMPGMDKELHSLNLSTKKDFMLDFVEKFWHRDEIVNMTEAEFTEVFTAWAKKKGYRPVEGKAAKIYAIAKSCIPYYPANPTVKTILQCIVDKLSGVNRTLVTIVTQMIEEAKKLSEYQIVREMPGVGDPLAARFFGSAGDIRRFKNSKALVAYAGIDSPPDESGDFSSTHRHITKKGSKVFRDTGYEIMMALRAQKRTWEKVRKNPDVYDYMLRKEAEEKPRKVAKIAALNKFLRIVYARIKELYDNMALAERAKAKTKSKTKAKTKATA

SEQ ID NO: 123568 - protein, 337 aa, unidentified
MEYFAGLDVSMSETHVCVVTQDGAVIHEVRAPSTPAGIVAALEQVPACRRVLFETGRMAPMLYHGLSQLGLPVVCVESRQAYQALKSLATHKTDRNDARGLAHLARTGFFKPVHVKSLAAHAVRSLIIARKKLVGQRVTLENQIRGLAVVFGVRLPRALSPAFIRQALRASEGISGLSAAMRGLVAARAAVLAAVVAIDADIRRMVRASGACRRLMSIPGIGQLTALAFTAAVDDPGRFRRSRDIGAYLGLVPRRYQSGEVDYTGGISKCGDRRVRTLLYEAANVMLTRYKGPLKLKDWAFAIAKRSTMRKARIALARRLAIIMHAMLRHGTEFKPA

SEQ ID NO: 123569 - protein, 383 aa, unidentified
MSMNPSASSQEEAPLKYICGIDVGSQSCAGCVYRLDKSLVVKPLAFANAKEGWNVLLDKLTQLDALPKQILIGMEATARYSENLYHALEQRGYRLCLLHPGQTHQFHERQGLRAKTDRLDAITIARVLLSGEARASYIPDEQVATYHELVRLYSQLSEQVARYQNQIHALVVVLFPEFTQVFADPCLPSALSVLKVYPSAQAMAQAEEAALYALLRMHKHAHYGHPTAKKLLSLASTSVSSQRAEAGRSLSLRILCGQLEQTQKYLEELQAELEQLIANDPAAKSLQQIPEFGTQTVAVLRAELGDVDRFARTDQAIAYAGLDVQIKESGLWKGKAKLSKRGSGPARGRCSIWRLCVAFICRGLPLGLTIRDWWHAVSRKAPP

SEQ ID NO: 123570 - protein, 389 aa, unidentified
MALFVGIDVSKEKFDACGVGDDGTKVFSVTCPMNREGFEKLVLHLPETALIGMESTASYHIALFSYLTAQGYRVAIINPLLIANFAKLSLRKTKTDKKAASTIAEFLLLKKEALAMETEPPRLGELKDLSRRRERLADQMTALKNDMLRILSVTFPELETITGVFTKSTLRFLVQFPSAHAIREAGYDAVATIVTSHSRGRKSAASVKTLMDTATTSVGVASPSKDLILTQEASLLLHVQEQAEEIMKVIVRLSDEKMKRDTEILTSMKGIGDKTALNFLIELGGDIKVFENDKKLIAAVGIDPTVHESGKYKGQSKISKRGNRHLRRVIWLMTTKVIISNEVFRAYYFKRRKDGLIYKMAVLATAHKLIRVMFSMLVNQRHFEPERRK

SEQ ID NO: 123571 - protein, 379 aa, unidentified
MDNMTKVDRDVVVGVDAHTDTHDAAVLDDCGRLLATRTFQADPAGYRELLGWGQSFGRLVLIGVESTGSYAAGLTRYLRAAGVEVREVNQPHAHTRRRRGKSDPIDAEMAARHVLADHSIVVAKDTTGIVEAIRQLRVARDGAVKARSAALNALEGLTVSAPDELREQLVTRKTLRGRATLCSRFRPDQARLHEPIHAARAALRSLARRVIDLDAEIAVLDQQLKRLVAAAAPTTTARIAVSTGHAGTLLVCAGQNIQRMRSEASFAALCGASPIPVSTGRTDRHRLSYGGNRDANRALHMIAVCRLRYCQRTRAYAKRRTAEGKTKTEIIRCKRYIAREIYHTLLADLLPQADAPRRTDPIVSITCGAGPIGRTIRTS

SEQ ID NO: 123572 - protein, 371 aa, unidentified
MNNIAYVALDVHKNTIVAGMSLKAGESIIMGEYANSSSGLKKLLSRLNKLKNDFAEIRICYEAGPCGYEVKRILEKNGYHCEVIAPSLIPQRSGDRIKTDKRDALKLARLYRAGELTAIAVPTEFQESVRDLVRCREDISRALLAARQKTNHFLIRHGHFYEGRNWTKGYFAWMKTIEFNNKYLKETLNQYITHIEHLYFQLEDLDREIAKIAESDDYKMKVDALKAYRGISTLSAMVLIVEVVSFNRFAKARELMSYLGLVPSEYSSGGTMKKGALTKCGNKRVRRILVEAAWHNRHEAKVTYSMKANLKKIDAELRNPPLKALKRLNKRYYHLIFAGKPKSKVAAAVARELVGFIWHSMIIVESRLCTN

SEQ ID NO: 123573 - protein, 339 aa, unidentified
MNYVGADLHKKTITLCVMNQDRKVLGRKTLYCVDPDSILEYLRAFQPFEIVVEATASYLWFADLVRPLAQRVVLANPSKLRVIAESTKKTDRLDAQTLAEFLARDMIPESHQPGPRQRQHRVLVRQRHYLRGRTTSVKNKIRRILGDYNADRKNLFSAELGLTYIQQVPLSDADRFVVNQLWAEYLYHDGQIRDLNALIKAFATKAPAREKEAREVLKTIPYVGPVTIEVVVSELGDVQRFRNAKAASAYSGLVPAVRQTGGKKSQDLRITKEGSGILRWALVESAWRLVGHSQRWKSVYERIKKRSGAKRAIVAVARKLMCVIYAMLKTMTPYKVITP

SEQ ID NO: 123574 - protein, 324 aa, unidentified
MVKVDILGIDISKDDFHVALLCEAGRSAKRSFPNAAKGFKQLEAWLKNRNVDLVHACMEATGPYWEALALHLHEGSHRVSVVNPSRTKAYGRSELLRTKNDTVDAALIARFCRAQSPSEWVPPTPEMRILQGLSRHLEHLKTTSAQEAARLKLPGLPDAVRTSIEGVVAALEAEIAHIEDEIRGHINRHPDLRRKQELLTSIPGIGDTTAFSILAEAPDLESFASAKAVAAYAGLSPAERQSGTSLRSRSHLCKTGNARLRKALFYPAMTAMRCNPALHAFAERLRAKGKAKMVVLAAVMRKLLVLAYGILKSRQAFDFTRQPT

SEQ ID NO: 123575 - protein, 317 aa, unidentified
MSKSFIGIDVSKNNLDVHILPEAMSLSYRYETKPMKTLIKKLKTYAPELVVLEATGGYEITIGIALADAGLPVAIVNPRQVRDYARALGILAKTDKIDAYVIARFAQDVKPEARGQLTFKEQELKSLVVRRQQLVEMRSAEVNRLSRTTIPQVKNGIQKVVRVLDAQIKAIDDDLDNEIKKNPIWSQKLEVITSFTGVGDHTANTLLFGLPELGTLNRQEIAALVGVAPFNRDSGMLRGKRTISGGRANIRKALHMPTLSAATRWNKDLMVFYQRLIARGKKHKVALTACMRKLLITLNAMVKNNEPYNPKFREVRP

SEQ ID NO: 123576 - protein, 399 aa, unidentified
MSLDRPFAETAAIRSELGAIFVSLELSRSTWLVTSLSPGAGEKLSKREVKAGDVCALLARLAQLRHKALARTGTSHPIIVIQEAGLDGFWLHRVLQEEGCESHVVDPASIAAPRRRRRAKTDRIDGEALLRALLAFKRGEPRVCSMVRPPTPEAEDERRICRERAELVGERVRHVNRIKGLLLSQGVGDYEPLRRDRRKRLLELRTGDGRPLGPHLKAQIERELDRLELLLEQVKTVEDARDRLLARLAESRTQDPTAPAEAQPSPVALLMSLKGVGPEFAASLWTEGLRRSFANRRQAGAYPGLTPTPWRSGKIEHEQGLSKTNPRLRTKMLQLAWLWLQHQPKSALAQWFHRRLPGMTGKAARKRLIVALARKLFVALWKFTSAGVVIEGAVMKTSA

SEQ ID NO: 123577 - protein, 485 aa, unidentified
MMASGSDIDDGMAFPGVVTLGPTDVLLGCLWTVLSGPRGTCSDGPGRVGHDLIRAWLSLINVLSAPPDQGCRPTRIESEGSSIMTAPTRPEAIAIGGADTHADTIHAAVITTLGREVADQEFPTTAAGYRAVIAFWASHGPIDQVGIEGTSSYGAGLADAVTKAGFRVVEVNRPSRADRRRQGKSDPLDAYHAARAVLSGRATSDPKDQSVEAIRSLHNTRRSAVKARTAATNQITAMLVTAPEAIRSKYRALKGQPLITALLKCRPSVADPVNAAVLTALKTLAQRHQFLTSQADELTVVIDRLVTTANPGLRAAYGVGPDTAAQLLITAGANPDRLRSEASFAALCGVCPVPASSGKTTRHRLSRGGDRHANYALYRITLVRMSHEPRTKQYVARQIAAGRTKPEIIRMLKRALAREIHRLLTRNIEVPEYADLRPTRQAKNITVTAAAKALNIWPTAISRIERGLRRDDNIATLYRTWLNAA

SEQ ID NO: 123578 - protein, 345 aa, unidentified
MNIIRVGVDIAKSVFHVHGVDRHGQTQWQGKYARNKWLTALSRKVPAGAEIGMEACASSHYWARELQKRGYFVRLIAAQFVKPYVKSNKNDRVDAEAICEAMSRPNMRYVAPKTVAQQDVQAAHRIREELVGQRTAKANQIRGLVGEYGVVAPVGIQQLRRALPEWLEDAENGLSESFRVLLHGLADDLRYLDDRITALDERITESVKQDPVARRLMTLRGVGPLTASALSGALGDGKAFRKGRDFAASLGLTPRQHSTGGRDRLLGISKRGDSYLRKLLVHGARAVLRHIGGKDDGLSHWLQALVSRKHVNVATVALANKTARIAWALVHNEAAYDEGLAAAGV

SEQ ID NO: 123579 - protein, 314 aa, unidentified
MKALRTHVAGVDVHKDILAITVMIGGGDEEPKVEQFTCSTFTADLMAMGIVLKERGVQSVAMESTGVYWKPVHNVWAPLGLEVIIGNASHMKNVPGRKTDINDSHWIAQLHRFGLIRASFVPEGEFQRMRLMSRHRTNLTEDLARVKNRVQRILEDGNIKWSSIVSDVFGVAGIAILNLIAEGVTNPKVLSQSVKTKIKRKEEAEKALTNCFTNDHCWLIKELMRQYRDIQTRISEVDGQLATKMLPYTHLIEELKKIPGIDSVLATGIIAEATTKMENFADERKFAAWAGVAAGNNESAGKKKDQNVEKEIHH

SEQ ID NO: 123580 - protein, 428 aa, unidentified
MSYRIAGIDVHKKVIAVVVADVAGEGAYEFERRKFGTRSEALRELAAWLVQQEVEEVVMESTAQYWRPVWDALEQHWQASRRQREGAGEMAGQLHLAQAQSNRGPRGRKNDYADAERLVKRLVAQELRLSFVPPPEQRLWRSVTRQRNQLTEQRVRLQNQLEALLEQGHLKLSSVVSDLLGVSGRRMLEALAAGVDNPSALAALAAAKLRATPQQLCDALSACTDLSPTYRKLLKMNLEQLDMVEKQMQELDHEISSLLQPYQDAVQRLAEVPGLGVASAHQIIAELGPRAASFPSAKDLTSWVGVCPGAEETAEVNRSSRSPKGNRNLRRLLTQAAHAAVKTKGSIFEVKFQRLRHGLEYAEAIWAIAHRLCRLIWKILYQEVRYEERGPAVDAKSKRARTGKMIRELRKLGYRVEFLDATEAAQPA

SEQ ID NO: 123581 - protein, 415 aa, unidentified
MDVIIERCCGLDVHQETVVACVLIGAPDQQPRKEVRTFRTMTRDLEALRDWLHALGVTQVGMESTGVYWRPVYAVLEERFALIVGDARHIRNVPGRKTDVKDAEWIADLVRHGLIAKSFVPPPPLRELRELLRYRRKLVESQAAERNRLLKLLETANIKLASVASDVFGVSGRAMLKALISANASPEAMADLAKGQLRRKRADLVLALEGRMEEHHRFLLATQLRRLEAAEHDIAALDERIAVKLEPYRVQHALLMQIPGVDWVVAAVLIAEIGVDMSVFLSVYHLTAWAGVRPGNHESAGKQKSGRARNGNIHLRTLLVGAAISASRTKGSYLKDKFHRLKARRGAMRAALAIAHKILVAAYHMLAKGLPYRDLGEAYLDQIAQTRTVANLKRRLERLGYHVTLEREAHAAPTA

SEQ ID NO: 123582 - protein, 412 aa, unidentified
MEVLYPHCAGLDVHKNTVVACVRHTVDGTIKREVRTFKTTTKELLALSEWLAAEGCTHIAMEATGVYWKPVWHILSDGDFALVLANAAHVKNVPGRKTDVNDATWLADLLAHGLIRGSFVPDQQTQEMRDLLRTRKQLVRERSRHVQRLQKTLEDANIKLDSVISDVMGLSGRKMIEALIAGESDPEQLAQLAHRRIRATPEELCEALRGRVTRHHRFLLSVHLQQIDAIDQVTRDIDQEIDAHVEPFRDTVLLLTTIPGVDELGACVILAEIGRDMSRFPTAGHLISWAGLCPRNDESAGKRRSTRMRKAAAWLKTTLVQCAWAAARKKASYLQAQFHRLRARRGAKKAIGAVAASILTAVYEMLKTGALYEDLGSHHFDRCGKRRQIHRLVSRLHNLGYAVQITPLPADA

SEQ ID NO: 123583 - protein, 356 aa, unidentified
MTTQQKSQCLYIGIDVHKDTHTAVGISPFGEKMFEITVGNYQNDFEKLEEKVKEHSSVLSPYIGLEDVRGYGERLSEFLYQRYPVYHVPSILVDRLRQNATHPEKSDSLDALGVAKVMIQSIDTLLPYTISQDGEKAKQLKEISIDREDLVLEQTRLKNQIHTLLYRIYNTEYAKKFKDPFSLKALRFWRNAKPKCDPFLLKTMKRKVRRLLDIHTEVYELEKDMQTLLDDNYTIQTASGCGVVLASTIVGEIGDINKFKSPASLAKYAGCAPRERSSGKKVRHVKSRSGNRRLNCAFHRMALSQISRMGNDKARTYFKRKISEGKSKSQALVCLRRQMVNIVWNMLKYKTVYRNA

SEQ ID NO: 123584 - protein, 373 aa, unidentified
MPRYSTAFGMDVHLRSTTVCALDAETGEAVTRRFRGNPWGEVAEWMSGFPGPSLAAYESGYLGFAPQRELSGLGVDCVVAAVSKVPRSAADLSSKNDRNDAARMAKAILSHDVTPVWVPSPEIEGLRDLAGAHDAATARLAAAKQRLLAFLARRGYAYGGTTPAGNPRRYWTYDFLRWLDKVRPADDGGIRALAALRNEVEAAAETRDDLLAEYRAAVAAGPLSAEVEALQSIKGCGFALAAAFASEVGDFSRFRSGRQVTAYFGLAPRQRSSADSVRLGGISGAGNALVRKLAVEGSWSYVQASHQPKLMPKGSGVPLEVRMHGRKGSERLLRRRGEMLARGMPQAKANAATAAELVRWLWALGAMCREATE

SEQ ID NO: 123585 - protein, 455 aa, unidentified
MGKSKKKGQKSVESLTPINPDAAGIDIGADSHWVSVPFERAEQNVREFSCYTPDLYALTAWLKECQIKTVVMESTGVYWIPLFQILETQGLEVLLVNSHHVKTVPGRKSDVLDCQWLQQLHSYGLLAGSFRPDDEICVLRSYIRHRDSLIRSAGTHVQRMQKALTQMNLQLHRVISDITGKTGQKIMRAMLNGEHNPKTLASFKDGRIRRTQSEIADALTGDYRQEHLFVLEQELQLYEFYQQQIEECDQKIEQYLLSLDDKIELEINQEVFSVPRKKKYSSNVPTFDLGSHLYRISGVDFTRIDGLGVLTVQTILSEVGLDPSRFPTVKHFCSWLGLCPGSRVSGGKVKSSQTRHVVNRAANAFRLAAHAVGKTQTALGGFYRRLRSRLGAPKAVTATAHKLARIFYCLWTKGGEYEDPGVDFYEQEYQQRLLKNLQKKAEQIGFELVPQSSTS

SEQ ID NO: 123586 - protein, 364 aa, unidentified
MVIIGCDYHPGFQQIAFVDTDTGELKERRLEHREPAEQFYRDLKQQKLAVRVGMESSGHSRWFERLLNELGFELWIGDPAEIRTKRVRKQKTDRQDAQLILQLMLENRFPRIWVPDAANRDLRQLLWHRHRMVQMRTRVMNQLHVVPLNEGLRRKKALWRPAGRKELESIALAPWASRRRQDLLDLLDQLTPKIQELTRALEEEVEKRPVTRLLMTHPGVGPLTALAYELVIGTPERFHCGKQLASYVGLVPEEKSSGDRRRLGHISKQGNVLLRFLLVEAAQVTVRSQQEWRNKFFHLAMRRGRKIAKVAMARKLAVHLYWMWRQGCDYGQTQKLGSHAGKPGNPDGVQFITDVMIGHPAPSK

SEQ ID NO: 123587 - protein, 338 aa, unidentified
MILIGIDPHKGSHTAVAIDHDETKLGELRLRSSKSQCDRLLEWAAAFPERRWAIESAAGLGYLLAQQLVVAGEDVVDVPPTLSSRVRVLGSGKAQKNDPNDALSTAIAALRGRRLRQVEADDHVAIVRMLANRHHAVVALHTQAVCRLHAQLANLSPGGVSGHLSPARAAKLLAGVRPVDGVVAERKRQAQDLLDDVVRLHRALVEVKARIAQAVLAAKTSVTDVYGVGPVGAAIILGHAGDPSRFISRNHFASYNATAPIEASSGPTKRHRLNQRGNRQLNHAMHIAALTQIRNDTPGRAYYLRKMEEGKSKKEAMRALKRKISDAVYRQLVLDAAR

SEQ ID NO: 123588 - protein, 380 aa, unidentified
MNTTTVGIDLAKSIFAICEGDSRGHGSRSSILKGGEFLKWLRTLPTGTVVAMEACSSAHSWGRTMQALGLEPRLIAAEFVRPYRKNQRIKNDARDAEAVLTALHAPGMRFVTIKTEEQQQRLAWHRLREGWKAERTALFNRIRGLLSEFGIVVELGAAKIRRKLAELESDTAYPQSIQLMAQSVRQQVGVLNQRLAECERQIALQSKRDPAVARLRSRPGIGPLTADALIATVGDARQFKNGRQFAASLGITPRQHGSGGKTHLGAITRRGDAYLRCLLVQGARCVLQAALRLYKNKPDTLNRLQLWMVKLNDRVGYHKAAVAIANKHARQVWAMISRGEAYNAEAYKDWEAAHATVRPSDIQKASNDDLSTAALAAASV

SEQ ID NO: 123589 - protein, 485 aa, unidentified
MAHRSRIKQESILIWQFFNQKKQTMAKELIFVGGDVSKGYADFVFLTKDKKEVIPSFQLDDNREGHDILKHEIKKLSKKYQVIFGVENTGGYERNWVFAVKSLTGAIKSIEVYKLNPKAVKHQIMSLMRRTVDDKVSAEGISMYMINNYESLRENWAKSMAEKDSISDGKMLHKMIHSLLKQQTMKKNQFEKVLYQAFPEMLTFTKDSPRWAFQFLKKYPTADAVKRAKIKGLTAIKNVTEQKAKEFKALAKISVSSKKGEIIELIISQQATDILTIGEEIKSLKKKLTDSYEESENVEILKSLDGVGDWSAVSFLIELGNPDRFESGSQLVSFYGVNPTYKQSGDGLYKSKMSKQGSAAMRATLFTIANNLVLHNEYFKAIYAKHRQKGKKHRSAIGVIMNKALRVMWGMLKNKTKFNADVDKQNQRTEVEPKAPISAKSRVLQPLSVSAPISRSNRKKRKAILASQAPSKGENTRSKYSPVQT

SEQ ID NO: 123590 - protein, 420 aa, unidentified
MKVVYQTCCGVDVHKSFLVATIIKTTSGVEPSYQKKRFSTFNNSILQFKNWLIENQCRDVCMESTGKYWVPVFNLLEDEMNVTIANPKWVKAVKGNKDDTKDSKWIGDLFRLGLVPGSYIPCKPIRILREFTRYRYKLTSCRTSEKNRYQNALTVCNVALDSVVSDIFGKSATSVIDYLIERSDNSINHEEIASRLLRSLKKKSDSVIESIEGYQMTDSQKYRMRLVRAHLDYITSTINDIDTMLDSLIAPYENAVQLLCTIPGVDRNSAITVISEIGTDMTPFSNSKRLCCWAGLTPGNNESAGKKKSVRITRAGVYLKPALVQVAHAAVKSDKSPYYKQKYERIMKRRGKKRAIIAIARMILTAIYQMLSTGEAWNPTDLYKIDIPEPLKEKQKEKAIKQAKKLLIREGILSESQLAS

SEQ ID NO: 123591 - protein, 395 aa, unidentified
MDLLLVGIDVSKAFFSAVGIDSEGKGCFSGSYPMDSSGFEGLIKAMTSHCEDLSKVVIGMESTGCYHINLYSFLISRQFHTIVINPLLIANYAKLSLRKTKTDKKDAGTIAKFLLDHRQEISQLSVTQDLQDLRDLSRERESLCHLISAIKVEIKRVLRTTFPELESIGNLYTRSMIRFVQEYPSARLVRAAKPKAIAKTLKQPSVGNKLTLTAEDIINAARNSVATVSPAKEIIVRGKIATLLHLQERLAEVTKLLTDLCQRTKLEDLGILRSIKGVGPNTAAPFLAEMGEVNNYSSHKKIIAYAGIDPSVHESGKFVGMSKLSKRGNRHLRRAIYLMTASVVSQNAFFKAYFLKRKRDGLAPQKALFATAHKLIRIIFAMLSQRTYFKVEEAQ

SEQ ID NO: 123592 - protein, 411 aa, unidentified
MRRVIGMDIHRTFAEVVFWEDGRLRHFGRVDMTRSGLEAFGRGLEKTDEIVVEATGNAMSVVRVLEPYVARAIVANPMQVKAIAHARIKTDKIDAGVLAQLQASGFLPEVWVPDAATERLRRLAARRNQVVRHRTRVKNEVHAILQAHLVPQCPHADLFNQRGRDWLTRQILPEDERLAIARHIREIDRLGDDLAELDADIAKDTVDNPDVARLLTITGVNVTVASGIVAAIGDITRFSEPQKLVSYIGLNPRVRQSGLGLAQYGRISKTGRSHARAMLVEAAWAAAKALGPLRAFFLRIRGKRGHQIAAVAVARKLVVLVWHMLTKKQDYHWLRPALVAAKKRQIALKSGAPSERGVGRRGSAYAYYVKDLRDREMAAAQIAERTYDQMIRRWQPRRPKGCTDATNGERP

SEQ ID NO: 123593 - protein, 341 aa, unidentified
MKKFIRIGVDLAKNYFQVHALESENGRAVTRKLKRSKMHEFFSQIEPCLIGMEACGSAHYWGRELKAMGHEVLLMPPAYTKPYVKRGKNDAVDADAICEAMSRPGMRFVPIKSPEQQATLMLHKTRELLVKQRTMSVNALRGHLSEFGIVAAKGIGRVDELLDLAESDATLPNAARASVRVLSQALEGLDKAIDDLEKEISSAHAQNEMSRLLDKVPGIGKLVASVIAASVPDPSVFKSGRDFAAFLGLTPRQNSSGGKQTLGGITKQGNRYIRKMLVLGATSLLNVLGKRKGALRDWIVGLLAKKPARLVTVALANKLARILWAMMKTGECFRTEMFAKA

SEQ ID NO: 123594 - protein, 408 aa, unidentified
MVYVGVDVAKADHCLGAIDAQGQVVQKPVRFTQDAEGFARLAGLLRRLGPPEEVVVGMEATGHYWVLLAEELQRLGYPPQVFNPILSGDAIRMSVRGRKTDADDCLAIARVVRDGGFQPVRLPDAAMGELKRLCRYRQAAVERSANLKKRLLGLLDLVFPEFAHLFSECSGAAARAALMAGPSARLMAAMPINDLVAQVHAASRGRLGRERAQAVILAAKTSIAAARTDTATEMAIRMTLQEIALLDDQITTYDAAITPLAPAGKDLLTTIPGIGPILAAVILAEIGTIERFIPAKGDPRPSDGIHRLLAFAGLDPRITESGQTRGKPRMSKRGSRTLRTALWRAAFLAHRHDAFRDLYQRHRVTMKQPQKIALSHVARKLTQAIYGVLRYQTPFNLEAFRGKPRIAA

SEQ ID NO: 123595 - protein, 324 aa, unidentified
MSNAIIGVDVSKLDLSISLLIDKIYHQTKIDNNQEGFKIFSKWLKKHRITKVTACMEATGNYGTFFANFLYKNNHEVSVVNPLCISAFAKSKLSRHKTDKIDSMIIAEYASKNDISLYVPKNSDLQELQNLYRCLQNLKEQYKQSQNYLENKDHLSSTICSSYKKLSQNITKEINKIELEIDKLLIHNHELKQKADNIQTIPGIDKLTAVAILAESPDFAYFSNARELAAYAGLTPKHKMSGTSVRGKSRISKIGSSRLRKALYFPAIVAKNHNPLFKEFSQKLGSKGKPTKVIIVAIMRKLLHIVFGVVKHNTSFNPRFGLDC

SEQ ID NO: 123596 - protein, 368 aa, unidentified
MNTVKFIGMDVHKKTITIAITDQGRQNQPRIYGAITNDLDALDKFCRKMVSTSTQLHFVYEAGPCGYGIYRHLNEKGFDCMVAAPSMIPKKSGDRIKNDSRDAVMLARLHRAGDLTAVFVPDAQDEAMRDLSRARGDAVIVAKKAKQRLKAFLLRNRVTFTGSSQWTKAYFRWLADIAMPHPAQQVALQEYIDAVHESLNRVGRLTDQIRQMVADWRLAPMVSALQAARGVSMVVAVIMLAELGDLTRFKKPSQLMAYLGLIPSEHSSGPRVKRGSITKTGNGNARRVLVEAAWSYRMQARVSRVLFKRQKNLSEQVCRIAWKAQLRLCARYRRLTAKGKPKQKVVTAIARELSAFLWAIAKQVPSVT

SEQ ID NO: 123597 - protein, 409 aa, unidentified
MKMAGIDVHKKVLMVVVVDTSALQEKPARRRFVTLPSELQRFRIWLQEQGVEEAVMESTAQYWRSVWLELEPHMGLHLAQAFSNRAPRGRKHDFKDAERLVRRLMADELILSFVPNGEQRIWRSLTRMKVQLTRDRVRLQNQMECLLEEMRIKLSIVVSNLLGASGLRILHALAQGETDPKKLAELGDERLHCTEEQLVDALTGRVQPMHRGMLALQLQRLQLIDQQMAQLNHMIAQAMKSHQDAVIRLAEVPGLGVDSAQQIIAEVGAQASTFSSAAELAAWVGTCPGKEESAEQNQSSRSAKGNKYLRRMLNQAAHAAVAKKGCHFQVVFRRLMPRLGYKSAIWAVAHRLCRVVWKILHEGVRFIEQGREVRPREKKQRAQLLARALRKLGYEVTITPINQLAPKPV

SEQ ID NO: 123598 - protein, 341 aa, unidentified
MKEVTIIGLDIAKNIFQAHGAYQDGGVAFRKKLSRGKVLSFLSAQPPCIVALEACASAHYWGREIGRIGHEVRLIPPIYVKPFVKRQKNDQADAEAIAEAACRPTMRFVAVKSEAKQALGMAFKTRDLFVRQRTQLINALRGHLAEYGVISPKGIVYLRRLQNVVEAPDNGLPGAVIALAGDLLKQIAELTNRIDALGREIRCRTSEDTQAARLMTIPGIGPISAAALEAFAPPAQSFRRGRDFAAWLGLAPRQYSTGGKERLGKISKMGQRDLRRLLITGAMSVVRQAARKGAPEGTWLASMLARKPRMLVAVALANKTARIVWALMASGEVYRNPVSAA

SEQ ID NO: 123599 - protein, 392 aa, unidentified
MVVSVGIDVAKDKHDCFIQSSEGEVLADVFTISNNMDGFHTLLEKIQVCTASQDKIKVGLEATGHYSYNLLGFLLDNGLATYVLNPLRTNLYRKSLSLRKTKTDHVDARTIAAMLLSDVGLKPYTNTAYHNEELKSLTRYRFDKVKERAKLKSSISRLVCILFPELEKLVSSLHLATVYALLEEFPGAKQIAKAHLTRLKSLLENASKGRYKRDMAVAVRDAARNSIGSKMPAKSLELQHTIRLIQELDTEIDEIEAEIEAMMEEIHSPITTIPGIGCRMGAMILAEVGDLSRFDSSDKLLAYAGMSPSTYQSGQLKNCYPHMEKRGSRYLRYALYNTTKYVCLWNPTFAAYLAKKRAEGKHYNVAISHAAKKLVRLIFAMEKSKQPYRSAA

SEQ ID NO: 123600 - protein, 400 aa, unidentified
MSVVGWDWASQAHDVTVLDDAGAVVDRWAFPHTEAGWVMALARLRRHGEPGGLPVIIEKTSGLIVDRLLAAGHPVVPVHPNAFYAARPRWGASGAKSDPGDSYKLADYLRTDGHRLRRLQPADPGLRELQALVRLREDQVRARTAATNQLWAMLGNYWPGPRDLFYSLASAIALAFLTAYPTPASAARLGEARMAAFLRRNSYRGGKSPALLLARLRAAPQAPLPLPAATLTAMVRTHVQQLRTLQAAITGIEHLIAARVAACPRARLLARLPGVGTLNLAQLLAEVGPILDRATSAEQAASECGTAPVTRASGKTTGGYFRWAASTRARKAITAFAHNARMQSPWAAKLYADARARGKRNPHATRIVARAWIRVIWACWHTGTPYNPATHHAARQPLTR

SEQ ID NO: 123601 - protein, 315 aa, unidentified
MTAGPVVGVDVAKDRLDVAVRPSGEVWSEANDETGITALVARLRPLCPALIVCEATGGFERAAIAALAAAGLPVVVANPRQVRDFARATGQLAKTDQLDAGILALFAERVRPTPRPLPDAAAQLLDAVLTRRRQLLEMLVAEKNRLGFAPKPLHRGIQAHIRWLERQLDDVTTELAGLIEASPVWRAKDDLLQSVPGVGPIVSSTLLGELPELGTLSHKQIAALVGVAPLARDSGTLRGKRMVWGGRASVRTALYMAALCGRRWNPTLKAFYERLKAAGKPTKVALIACARKLLTILNAMMRDQSRWTSPVQYSC

SEQ ID NO: 123602 - protein, 341 aa, unidentified
MQIAVLGIDLGKNSCSIVGLDVRGAVVLRRRMRREGIIKLAAKLKPCVAAIEACCGAHHLGRVLRAQGHEVRLMSPEYVRPYVKSQKNDDRDAEAIAEAATRPTMRFVELKSEEQLDMQTLHRARDRLVGERTALINQLRAVLFERGIIVAQGRRKLERQLTEMGTQIDALSQRMRMLIQDMRTQWYELDRRIAEFDKELTEWARDDEAARRLRTIPGIGVLNATALVAAIGHGESFARGRDLAAWLGLVPRQVTTGGKPRLVGISKRGNKYLRKLLIHGARAALPTLLESPTPLGGWLRALIARMHKNVAVVALANKLARIAWAVLRHGKTFGIEASTTA

SEQ ID NO: 123603 - protein, 424 aa, unidentified
MAGVVIGIDPHKGSHTAVALDVHEKQLGRLRVRASSRQVDGLLEWASGWPRRRWAIEGARGLGQLLAQQLIASGERVLDVPPKLAARVRLLDSGQINKNDPNDARSVAVAALRAHELPELAAEDHAMVMRVWARRYHDLARLRTQVVCRLHAVVCELVPGGVRKYLRASQATDVLDRIVADSPVAQAKLELARELVADLERIDAQRREAKRRTARAVAATRTSINDVYGVGPIVAGTVLGYVRDIRRFPTRDRFASYNGTAPIEVSSGDRKIYRLSRRGNRQLNHAIHMAAISQIRHHNSEGRAYYEKKIAEGMTGKTALRALKRKISDALYARMIDDARRLAAKDPGGHTGNDSASSAAGSHPETPALRKSHSRATANSRTGTDQRPLTLRPAPDRRRTSRRAAGVQVEPRPGPHRGRGQDRP

SEQ ID NO: 123604 - protein, 403 aa, unidentified
MNMNAVGIDVSKGKSMVAILRPYGESVSSPFEIKHTSANIRSFIEQIKSIEGESRIVMEHTGRYYEPLARELSLAGLFVTAVNPKLIKDFGDNSLRKVKSDKADAVKIARYTLDSWTELKQYSLMDEIRNQLKTMNRQFGFYMKHKTAMKNNLIGILDQTYPGVNTYFDSPAREDGSQKWVDFATTYWHVDCVRKMSLNAFVDHYQKWCKRRKYNFSQDKAEEIYGAAKELVPVLPKNDLTKLIVNQAIEQLNTASKTVEELRTLMNETAAKLPEYPVVMEMKGVGPSLGPQLMAEIGDVTRFTHKGAITAFAGVDPGVNESGTYEQKSVPTSKRGSSSLRKTLFQVMDCLIKTKPQDDPVYAFIDKKRAQGKPYYVYMTAGANKFLRIYYGRVKEYLTSLPE

SEQ ID NO: 123605 - protein, 346 aa, unidentified
MEHYVGLDVSLRLTAICIVDRTGKIEREGVVASDPETITAFIKSHAPHVTRIGLETGATSTWLWTELNKIGLPIICIDARHAKAALKMQINKSDRNDAVGIARIMQCGWYKEVRVKDLDSHAIKALLVSRALLVKIKRDLENQIRGLLKNLGLVIGRAKMNVFAVRAAELAEARPQLAAAVEPLLKAREAVGRQIADLDRKVMRLARNDARVRRFMTAPGIGPITALCFLATIDDPTRFKRSRSVGAYVGLTTRRYASGEIDWTGRISKCGDAMLRTYLYEAANVLLTRIAKWSTLKAWGIRLAKRSGLRKAKVAVARKLAVILHRMWIEGTEFKWSSKEAANQPA

SEQ ID NO: 123606 - protein, 364 aa, unidentified
MDAIHYIGFDVHKKSISFCVKRADGSIVAEGRVPAERQALRQWALQRSTPWHGAMEATLFSGWIYDTLKPYAAQLEMGHPALMKAIGAAKKKTDRLDAQRIADLVRCDLLPACYVAPPAIRELRQLLRYRNLVVRQAVRMQNKISGLLMESGVSYNKARLHGREYFQELLGRLEEVPESVKHLLRLSRGALEMFQSVQRQLLTRLRHDPGLKARVERLSTIGGIGEVTALTWALEIADPRRFRSLGQALSYCGLTAAFRSSADKVERGPLSKQRNAHLQTTLIEAAKLAPRWNPQLAVVHARELERGHRNRATLAVARKLVSYLLAVDKSGRPFVPPPALNQEQEKTKTPGKEKPKTLLSRQKP

SEQ ID NO: 123607 - protein, 392 aa, unidentified
MLFVGIDIGKNNHVASMMDEYGKVVFKAFSFSNTTDGGNALFSKLSSYSSNPSDFEIGMEATGHYWLSVYSFLFEKGFLLHVINPIQTDGWRKGTEIRKRKNDTIDSVLIADLIRYGQFVQTRLADEDLFSLRTLTRFRTYLVESIRDLKRKVVCVLDQIFPEYQSIFSDIFGKTSKEILLQFSSPIDFENISPESLAELLAQLSRQKVGAAKAEQLKAAASSSFGITFAKNSFTFQLKALIEQISFIENQVKETESEISNIMRKLDSPITTITGIGNVTGAAIISEIGDISKFDNPRKLVAFAGLDATVTQSGEFEASHNVMSKRGSPYLRKAIFQAALIASFHDPVLSVYYQKKKAEGKHHLTCVGAVARKMCNIIYTVLKNNQPYVPKA

SEQ ID NO: 123608 - protein, 325 aa, unidentified
MTSPMTLGLDVAKRTVDAALLSADRRAQHRQFANTQAGFLQLAAWLRPHPHHAIHAGLEATGTYGQALALFLHQQGLRVSVINPARIHAFAKSELARNKTDQLDAALIARFTATQQPAAWTPPPAAQRHLQALERRLEALQAMRQAERNRLDLEAADSLVLDSLHAHLAHLEAQMGELQQRLRDHVQAHTELQRQSALLQSIPGIGQTTAFKLLAELPNLGDWKSARQAVAYAGLNPRQRESGSSVHGRAHLSKLGNARLRRALYFPAVVAMGDNPLLKVFAARLRERGKPPMVIVGAVMRKLLHQAYGVLKHATPFNPNHAPAH

SEQ ID NO: 123609 - protein, 421 aa, unidentified
MKESIRIVGFDCGEDEHCAVLLDACGEFEERISIVNDREQIQEALAELLLEVGPDTQLVVVVESKRSHGRIVADTATELGCELWQVNTVALNHYRDLEGQPRKDDEWDAYLGARMVYLRMGGCREAIETTEEERSLSRLTRIHSRVTEDRKRFVARLRAVLLELAPEMLHAKWKGPRPDSKAMLYLLERWPGFDGLERAQLRSIEKILRQCRYGSKATDVAKLIRKAARKISMAAEERSSLTMELDLLVRQIRLCDESIAKVYAEIAGCVERHPLGQKLLEMDGIGPVIAGVLVSELFPVARVAAEPRSATYSGVTPLARKSGKSLDHDRLAQGVNKRVLHALYTSAVVAIKHSAVDRAYYQKKLRDYAGHPKPHVAAFIALSRQRHKLIYKLMTTDARYDKEILVASHLERIERDRIAAA

SEQ ID NO: 123610 - protein, 410 aa, unidentified
MSSVAYGSGFQRMIAGIDWAEGSHTVCVLDAGGDLLQRLTIPHSKAGISRLVALVTRYQVDAVGIERPDGPVVETLLAAGVTVFVIAPSQVKALRSRYGSAGNKDDRFDAFVLADTVRTDARRLTPLQRDSQATVALRQLCRARKDLVGHRIAIGNQLRAHLQIVLPGVIGLFWQLDTGVSRQFLTAFPTQDAVNALTVSDLAAWLTQNRYSGRKTADALYQHLTSAPAGPTGLAGQALAGITIAYLNALTVVAEQISSLEKQISDTLTAHPDGPVFTSLPRSGTVRAARLLAEIGDSRGRFPTAASLTGLAGVTPSTRQSGSTRIVTFRWAVDRQLRDAVCDFAADSRHANPWAAHLYQQARNRGHRHPHAVRILARAWLTIIWKCWTTNTPYDPSRHRQLQKLTGTRG

SEQ ID NO: 123611 - protein, 424 aa, unidentified
MLADEFDFYVGIDLAATKHRACVVDRTGKVIGEFAFEHSGPGLTDFIQSLDKLTGNISVDHIAIAAETPRGLVVESVLERGYLVFSINPKQLDRFRDRHTVAGAKDDRRDAFVLADSLRTDQPLFRRLARECANIIRLRELSRLEDDLTQDHNRLINQLREQLHRYFPQLLQLSGAAEDPWLWDLIEMAPVPVAARRLTRGRIERLLKQHRIRRLTADEVITALRVPALNLAPGTTEAASEHALLLLPRLRLIRQQRLHTATRMENLLDELAATDSDRDHPGLERPTDAAILRSLPGVGRVVAATLLAEASQAISERDYEALRSYAGVAPVTRQSGNKKTVMMRRGCNNRLRNAVYHWCRVATISDERSRNHYAKLRARGHSHGRALRTLADRWLNALVAMLTAHERFDSARWNVCVTPQAHKG

SEQ ID NO: 123612 - protein, 452 aa, unidentified
MIKKAKSKGSKHLSIPVVHPNAAGIDIGSRLMSVAVPPDRDPQCVREFGSFTCDLQQIARWLKQCDVDTVAMECTGVYWKNLFLVLTEHGFDVCLANARHTRNVSGKKTDESDAQWIQRLHACGLLSSSFLPDDLTARLRSLVRHRRSLTQDSSRYILRMKKALEMMNIKFHSLIRDLMGKTGTAIVEDIISGQTDPDKLLTHVNYRVKASREDLRKSLQGNWRQEQIFLLAQCYKMHRFVEEQIAVCDSQIEIALQAMEAIKHDGAIEEPKTIEIKPKQKKHPKFNTRSYLQKIHSVDVLAIYGISDIAAIEILSETGTDLSKWPTQQHFVSWLNLCPNNKISGGKLISSTLLKKKPNGATQAFKYAANGLQRSQHWLGDYFRRMKAKGGNKYAIVATARKLAIIYYKMVRYQQNFTPFDSQKYKSKFQRTKIDYLERLLAKLKQSTLTVI

SEQ ID NO: 123613 - protein, 409 aa, unidentified
MEQIIERCAGLDVHKAVVVATVRVPDGHGGRAVHTETFSTTTVGLLALHDWVQAYGVTHIAMESTGVYWKPVYYALEDDFTLLLVNTRHVKTVPGRKTDVKDSEWLAQLLECGLLRGSFVPPPPIRDLRDLTRYRRKQVDERGREVQRLHQTLEEAGIKLATVATDVMGVSGRAMIEALVKGTTDPATLADLARGRLRRKLPALRDALRGQFRAHHAFLIGQILAKIDFLDDALVELTREIDHLLLPFEATLARLDTIPGVSRTTATVIVAETGGDMSRFPTAAHLCSWAGLCPGHNESAGKRRSGRRRKGNPYLCHALVESALAATRAKNTAVQAQYRRILRHAGHKKAAVATAHQILEIAFYIQRDPVEYVEHGADYFDKRRRAQAVRRHVQQLEALGYHVSLAEAA

SEQ ID NO: 123614 - protein, 352 aa, unidentified
MDRYVGLDAHAKTCTLAVQSRSGKRLKSMVVETNGRALVDAVKGIAGDVHLCLEEGTQSAWLHEILSPYTCELVVSVPEKKRGAKDDLRDAWSRAEDIRVGRVQTRVYKAPKHLAGLRSAACAYRLATRDVVRTKNRLKAVFRSRGIRSDSGVYEPASRDRWLKQLPAGSRELASWFGEELDGLVPLRDEAEEWLRKEAKSHPIIRKLRTGPGMGPIRTAQVVAIVGTPHRFRTRRQFWSYCGLAVVTRSSSDWVHDQNGKWVRGQTYQTRGLTRQRHPVLKSIFKGAATSVIEQLPEDPLHQHYERMLASGIKPNLAKLTVARRVAAIVLAMWKHQEVYDPQRHVVEADKS

SEQ ID NO: 123615 - protein, 387 aa, unidentified
MYYIGIDISKFKHDCAVIDDSGEIVTPSWSFTNDAKGFSQLKLLLNSLDTETRIGLESTGHYGMNLKLFLESNNFSFMEFNPLLINRFVKSKSLRKTKSDSIDSMMIAHYLMTVEYKPYPSSFYHTEKLKSLTRFRDSLIRFRSRQLVELTNILDKVFPEFKPFFGSRFSVTALYILSNYSSPEKIANMNSKSYEALRKLSRGRFSTVDFAKLKQLAKNTIGTTEDYLLLQMQIVLDIYRQLDSKVDETEVSIKECVSDMNPPMLSVPGIGIESAAVILAEFGDFSKFKNASQMLSFAGLEPGYFQSGTSETTGKMVKHGSSYLRYALMNCAQTVVNYEPTFAMFYSKKRAEGKPHRVALSHVVKKLLRVIYTLQTKNIAYDADFVR

SEQ ID NO: 123616 - protein, 420 aa, unidentified
MNSLNKPSFTAFVGIDWADRKHDVCLQAADSLKREFSVIPHQVEAINDWAQSLLQRFGAPIAVAVELSKGPIVYALQKFDGFVIYPINPSTLARYREAFTPSRAKDDPTDAEFAVDLLLRHPERFKPLQPQSLEMRALSSLVEQRRSLINDKIRLTNRLRSALKHYYPQALDWFDHIDTPLFCAFIRQWPTLAQAKRARKNTLETFFHHHNLRFPQVLEDRLAAIKTAMPLTLDEAIIIPYRLQAQVLIEQLSVTLEGIKQFDQAIEKIACQHPDYALFRSLPGAGPSLAPRLLVAFGEQRDRYPSAADLQKYAGVAPVTERSGKKHWVHWRWECPTFLRQTFTEWAAQTINKSFWAGQYYRQQRAKGSTYQAAVRALAFKWIRILYRCWRTGKPYDESTYLKALEQRGSPLLKYSCGIS

SEQ ID NO: 123617 - protein, 321 aa, unidentified
MVSRGIDISKSSFVAAYPSTNGNPTKTFPNTTARMRELIGTLAVAEHHCVMEATSNYGCCCTCYIRTVLPSVLPPPKKQIKHFSRMMMPVTKTDEKDAYMIAMYGEKMNPPVYKMPSQAIILLRQKKTVIRQLRKQLVASKNLRESLVVLPYRDKACVRALDKTIDFLTRQIEQLEAELADIASAEFDKQLKALTSTKGIGITLATALILTTGGFTYFDNAKQLSRFIGICPTYQQSGTSVNIKGHINRNGDEHLRSLLYVASWSALRSNAACRESYLRLKANGKPSKVALIAVANKLVRQAFAIATTDSTYIDGFVSTKK

SEQ ID NO: 123618 - protein, 320 aa, unidentified
MPNAFKRVIGVDVASTKIDVCDSEQIVKGSIPNTPEAIRSTLVAQISDPHETVIVCEATGGYERTLVDVAHQEGIPVAVVNPRQVRDFAKGMGLLEKSDTIDAKVLCRFGQLVDFHLTAKTSEEDQQLQALVRCRIQLLEMIHQTRNRLAQTNERIARKILLSTLENLQKQLRKAEKQLQSLLTERAKHDPIVNILMSVPGIGVITVATLIAELPELGKLNRAQIAKLVGVAPILNQSGKFERKCSIRGGRSQVRNVLYMAALVAARHNPTIREFYQRLIQRGKPKKVALVACMRKLLTILNLMVRNKQPWQAAVAVNAG

SEQ ID NO: 123619 - protein, 338 aa, unidentified
MTKDIMIGVDLAKNVFQLHAASMTGQPTFRKKLSRQSFPKFMAEQPPAVVVMEACGSAHYWAREMIRLGHEVKLIAPHYVKPFVKRQKNDAADAEAIVIAAQRPEMRFVEPKSAAQQSRAILFRARERLVHQRTELINALRAGLYEYGHVVPQGIHQIKRIEEILDGPNSDLPDLMREECRDLLEQIAEKAVRIDARTGKIKALAAEADTARRLQTIPGVGPLTALAVEAFAPPMETFRCGRDFAAWLGLVPRQFSSGGKERLGRTSKAGQSDIRRLLIIGAMSRLNWLGRKSIPEGSWLARMAARKPRMLVAIALANKMARTIWALLTKNEDYRVPA

SEQ ID NO: 123620 - protein, 409 aa, unidentified
MQVIHARCAALDLGKDVLVAAARLQDAAGVTRQCRTFETTGQKLLSLATWLESEGVTHIVMEATGSYWKAVWHVLENRFDLTLANPAHIKNLPGRKSDVNDATWMADLHAHGLVRGSFVPPAEIGALRELTRARKQFVREINRHTQRIQKTLDIAGIKLTGAVSQVLGVSGRKILAALIAGETNAKKLAALAHPRLKASPDRLEEALQGRLTTQQRRLLGMHLSLIQTLEAAIAELDAEIVKAVDPFRGIVERLHEVPGLSEINVPAVLAEIGVDMTRFPTHSHLVSWARLCPRLAESAGKVHSTRTMKGAVWIKELMIQAAWAAIRTKDSYLRAQFLRLRARRGSKKAIVAVAASILTIVYHVIRDGTSYHDLGPNHFTARDRTHAARRLMARLQQLGYNVSVTAEVA

SEQ ID NO: 123621 - protein, 337 aa, unidentified
MKKIPVSVGIDYSMSGVQVCVQDMQGKLLRNKKCPDTWLAVAGIVGKDEAVQVAVIEACTGAADLADELRAHAGWPMQLAMPGIVKKMKLNPDKTDWQDAHVLCDLGRVKYVPRVWLAPQRVRELRLVTRYRQQLVNQRRAAKLRMGAILREQRVLVTGRRWSKPWQQAMAEHKDLSEQGRWVLRQHVQTVVKLSAEIAQVEAHLEAIGADDWMVRELMTYKGIGLVTACVMRAEIGSFERFKSAKSLSRYCALSPRNASSGARQADAGVIQAGNRIVRTILIEAAHRLVRYEPRWKALAADLRARGKHGNVIAVAVANRWIRGLYHNGMQLERAAA

SEQ ID NO: 123622 - protein, 399 aa, unidentified
MFYCGIDIAKYKHEASVIDMSGKALSNSITFANDRQGCEKVLAIFEKSEITPDNIVIGMEATGHYWLSVYTFFLELGYTVKVINPIQSEAFRKMYIRQTKNDSKDSYIIAQIMRFGEYSATSLSEENIIALRQLSRYRLALVDACGDCKRRVIALLDQVFPEYDKLFSDTFGKTSSELLLNCPTPEDMLAVSTRKLTNILNKASRGRFGKEKAEELKDAAKNTFGIAFAKDAFSFQIKQLMQQIIFTENQLSELEEQIANLLHETNQYITTITGIGDVLGAIIVSEIGDINRFERPNQLVAFAGLDVTVKQSGEFSGTKNKISKRGSPYLRRAIWLAAQRAAFCDPVLSDYYQSLKARGKHHLTAVGAVARKLCNIIFVILKENRPYFPTPPKKSQNLS

SEQ ID NO: 123623 - protein, 356 aa, unidentified
MDSTKYIGMDVHKEATTIAVMNSAGKLVMESIVETKAVTIVQFLEGLRGELYVTLEEGTWAAWLYDLLKPHVTKVVVCNPRKNALLKAGNKSDRIDARKLAELLRAGLLSAVYHGETGLRTLKELCRSYLAISKDLTRTMNRIKALYRSWSIPCGGTSVYAPRHRAEWLSKITEPGVRRRAELFYQQLDGLQKLRQEARGDLLAESRKHGATELLRRIPYIGPIRAAVLIALLQTPHRFRTNRQLWAYSGLALETHSSAEYHYVQGQLQRSRRPVALRGLNQNHNHDLKSIFKGAATKAGSAQGPFHDFYAALLAKGMKPTMARLTLARKIATITLIVWKKGVCFDAQQLKQQVSV

SEQ ID NO: 123624 - protein, 343 aa, unidentified
MSIVRVIGGVDTHADVHVAAAVDHNGGVLGIESFPTTQAGYEELAGWMAGHGLIERVGVEGTGSYGVGLARFLATTGIDVVEVDRPNRQTRRKYGKSDPIDAVAAARAALTGKASVTPKARNGPVEQMRVLLIARRSARQQRIQSLNQLRQLVLTAPEPIRIRFKDRYKAGLITEAANMRPRVGSDPVIFTTNIVIRDLARRIKALNTEMRNIDRMLTVLIGDTAPSLLKLYGLGPDSAATLLVTAGDNPERLGSEQAWAHMCGATPIPASSGKITRYRLNRGGDRNANAALYRIVLTRMSSHDQTRQYVTRRRAEGLTTGEIMRCLKRYVARQTFKHLPQAA

SEQ ID NO: 123625 - protein, 422 aa, unidentified
MGRLKIVYPICCGMDVHRDFVVACIANTNAQGVTSYATKRFSTFLGGLRDLRDWLAENNCKDVCMESTGKYWFPVHNILESTCNIVISHPKFVKAIKGKKTDKKDALWIADLFKHDLVRGSFIPPEDIRQLRDLCRYWCKLTSYTTGEKNRAQNCLTVSNFKLDSVFSNVFGKSASAIVSHMLEHPGKTFDVTPFVDGRCKTPIAVIQEAVDGCFSPQQAEKLKIIRNHIDFLVKLKLDLESEILGVAEKYLNQVELIMTVPGVSDPMTAIRIIAEIGADMTQFESAKHICSWAGLTPQNNESAGKKKTTRIGKAGQHIKPLLIQCAMAASNPRSAKNPEILSKYQQLKKRRGSKKAGVAIARRLLTAIYHILLKDEAYAPYILPAKETIPENRVLTTHQALALLRSKGFVISESVALSDSA

SEQ ID NO: 123626 - protein, 440 aa, unidentified
MNEEDRTRLEEFRQFRREIRKSAEYLIVGIDVAKDKHHAFFGTATGKTLFKRLVFENGIEGFGKLLVQAEAMKVQEGLKKVVFGLEPTGNYHKPLGEHLIRCGREVVLVSGVAAHENRKTLDGRWDSNDTRDAANVADLISQGKCLFYEFPVGGLQDLRNLLSLKRRLKRQEHGYRVRIRNHLVAKYFPELDRYFEQSEKTGLAVVRWCLDPSVIAGLEYPKFVETVSSGQRRLSQENRLQAIWKMAVDSVGCEVGPTVAFEVQVMVEGLKQIRERIRDIEEKIYEICSQFPEYEFLLSIPGFGPDISAKVLGAVGDPFRFQSGKQVLKMAGLDLSAERSGKTSQSAIPVISKKGKADLRYALYQAAFIASARNQAFIVYYTHKLRGREREPGIKTKMRVKLAAKLLIIAWTLMKKKEPFNPSYLRVEFQPFSAGAGRES

SEQ ID NO: 123627 - protein, 322 aa, unidentified
MTEFILGVDIAKGKFDVALLANQKLKHKVFVNNAEGFSELTMWLKKYGVDHAHICMEASSTYGEELAAYLYDAGHTVSVVNPARIKGFAQSELLRIKNDKVDAGVIARFCDKMRPDPWKPLSPEVRRLQALVRRVDALLVMRTQELNRVGATHETVLHSIKEHISFLDEEIAALKKEIADLIKKDPNLKTKADLLRSIPGIGEATIAAVLSELSLFEKCDSVRKVVAFIGLAPREFTSGSSIKGKPRICKTGSARMRKALYMPSLVSMQYNPVIISFCQRLTKKAKNGKVIVCAVMRKLVHIIFGVLKSGRPFDPNFGLKTA

SEQ ID NO: 123628 - protein, 457 aa, unidentified
MAAVHSIKHPTITPMKALPVLDPKAAAIDVGSEKLHTSIAGGPPKVFGTFTGDLEALRDWFKGQGVRTVAMEATGVYWLYLYEVLEASGFEVIVVNGRHVQNVPGRKSDMADCQWLATLHAHGLLRGGFVPSADIRQLQDYQRLRADHIASAAAQVQKMQQALERMNIKIHDVISDLTGVSGLKVVRAILKGERRPGELLALCDEQIQKKKSERVKESLRGCWKKEHLFALRQGLEVWEFFQKQIADCDREMESLLKEMAGSSDGGQSDGGSQIKLAPAKSPGKNTPVIGQFQELLARICGGRDATQIPGLSVYLVLQLISEVGTDMSRWQTEKHFSSWLGLAGGHKQSGKRKGSVKARRNRAGRMFCAAARALGRSVDKGLGGFYRRLRGRVGGLAANVALARKLALLFYRLLRFGIDYVEKGLKAYEAKVLETETRLLRKLASKQGFTLIPSLTN

SEQ ID NO: 123629 - protein, 343 aa, unidentified
MDYFAGLDVSVKDTSVCIVDGAGKGVREVKVASEPDALLQVLRNPAYCFKRIGLEAGPLSQWLFSALGEANLPVICVETRHMRAVLKAQINKTDRNDARGIAQMMRVGLYRPVHVKTLRSQKLRMLLTHRKLLQSKAIAIENDLRGTLRNFGLKVGIAGWTKFEARIEELVEDVPDLAVLVESLLVVRRVLREQIAVLHRRLLTIVRDDEVCRRLMTIPGVGPVVALTYRATVDVPARFRKSKSVGAVFGLTCSRDQSGERARPGAISRCGDEMMRAMLYEAAQAMLLRSAKWSWLKAWAMQIARRRGMKRAIVALARRLAVIMHRMWVDGAEFRWTKEAAAA

SEQ ID NO: 123630 - protein, 479 aa, unidentified
MVVKRPPGAPCSGGAEEGDSAGTGRELESRPSTRGRLGAQSTFTALTENWGGTAPAGSHLYVGIDAGRRHHVVAAIVQERMENGSWERAGAHRIPTNGQGFRELIAWLQASGRAPSQVRIGCEPTGGWYAETVAAWLVRHGYEVSWLQNWAVHERRQLAIGKQTKTDALDARLIARLLYEREFHDQDKGFLSGGPRSTDALRLLVRNRVRLIEQRTRHRLQLTAIEDVLFPELKDFFRSSISSSAVRRLLESFPTPQTIVAAAPEAIYEVLVRRGRARIHAARIGELQQLAAESAGLVGGIEPILHAQGWILRQLRGVADQIEDIERSTVKALEAWPVAQRAVLDSFPCMSVMRQAVLLSAIGDVAEFRNDGQLRKLLGWYPEARESGTTLSKHQLGNSGNRLGRREVWFWAMQLIAPRQQATPFAAYYKRLRQRGMPGHAAVGHLAGKLISVPFFCLRSGQPYNPLQHARALGFSDAR

SEQ ID NO: 123631 - protein, 462 aa, unidentified
MTRGDLRRNARRERLRAVLPRSGAVIGVDLAEEKQAIAVIDHDVRVLARKTARVKAFRLGEALDWAVGQARAKGFAQVAVACEPTGPRWLQVQRLCAERGLPLVCIQPLVSHIAREQQDYTTHKTDEADCVLIARLAVELHCYLPERLDETWAHLRHLGRRRAQLITSATASAQRIQDFLSVAWPVVTETCARPLLSRTWLAAVQLVTDGCGGQPGTLATMGEPEFTAMVRAAVRGWGGQRAFGPIAGRVFAALTDTEGAVISSRRGLLRRCADELGDLQRARAQLRAVEADMVVVLAELGLSRLGDIPALTAVGAAAILAETGDPRRYDSSSSLVKHAGLSPSDNASGAFYGQAHISRRGRPGLRLTAWRAVWPMLQFNPVMAAKYQAMTKTADAQADAGSQPATADAAARARRAKARVACAASLLRWIYSMVVHDTSWDAAVASGAASSQHAARYQAEAA

SEQ ID NO: 123632 - protein, 418 aa, unidentified
MKVVYPICCGVDVHKTFLVATIIASQGITPYYSKKRFSTFNNSILQFKQWLIDNNCFDVCMESTGKYWVPVFNLLEDVIRVIIANPKWVRAVKGNKDDVKDSKWIGDLFRLGLVPGSYIPNKPIRILREYTRYRSKLVSCKSSEKNRFQNAFTVCNVALDAVVSDMFGKSASSITDYLISSDSFDPQYCSSLLQKSLKKKAATVVESIEGYQITKEQKERIVMVRSHLNFVQQSITDLDAKLDKMVVPYKSAIALLCTIPGVARTSAITIISEIGTDMSQFDNSKRLCCWAGLTPGNNESAGKKKSVRITRAGVYLKPALVQVAHAAVKSNQVPYYKVKYERICKRRGKKRAIIAIARMILTAIYHMFVTGEEFNPSDLYKIDMPQEMMEKQKDKAIKQATKFLISLGLIKATNISAA

SEQ ID NO: 123633 - protein, 410 aa, unidentified
MKQVIRIVHERCCGMDVHKKIIVACVITPDNKEIRTFGTMTDDLHELVSWLQSHGCSHVAMESTGVYWKPIYNLLEHTGIEILVVNAQHIKAVPGRKTDVKDAEWIAELLRHGLLQGSYIPSREQRELRELVRYRRSLIEERSREVNRLQKVLEGANIKLASVVTDITGVSARSMIEAMIKGTDDTKQLAQMAKGALRNKLADLEKALKGSLGYHQKMMLSMQLKHIETLDESIKELDKEIADRMRPFEEALELLDTIPGVNRRNAEEIIAEIGVDMSRFPSAEHLSSWSGMAPGHNESADKRKSGKTRKGNQHLRTTLVQSARSAARQKDTYLASQYRRICSRRGSNRAAVAVGHSILIIAYHILKKKQPYIELGANYFEQRSKDAAIKRALQLLQNAGIEINLENIVA

SEQ ID NO: 123634 - protein, 334 aa, unidentified
MDQPIIIGIDLAKSVFQVHGVSAHGTAVLRRQLRRGQVLAFFSRLEPCLIGMEACSGAHHWARELVAVGHEVRLMPAAYVKPYVKRGKTDRADAEAICEAVTRPTMRFVPVKSAEGQAALLDHKARDFLIRQQTQTVNTIRAHLTEFGILVAKGIHNVDRLLAAAEQAPEAARPALDLLADQLRDLRERIETVTKRIEAAQKADPLARRLATIPGLGPIASSAFAVTTPDVAVFRSARDYSAWLGLTPKPHSSGGKERLGRISKAGNRYLRRLLYLGAMAQIAARRRGRPGDDRLWGMLQRKPVKVVAVALANRMARIVWALIRTGESYRSAPA

SEQ ID NO: 123635 - protein, 348 aa, unidentified
MLHVGMDLSRTRLDICVMDDTGTILEEAPWPPDADGLRHLVHHVAERFGEGEVLGVVESMNGARFVHDTLELGGWSVELADAQKVKGLAPLACKTDKIDARVLAELSRRDLVPAIWLPSPETRGARERARWRLHLVRHRTALKNRVHATLLAFGKPCPVSDLFGTAGRELLARLEVPEPWASDVLAAVGLIDTLDGQIDGIERDLRRLGPDHPYLPLLMTAPGIGWVLGYTIAAEIGDITRFSLPKKLVAYTGLCPRVYQSGAKDHRGSLTKNGPKYLRWALIEAATHAARHPAYRDHYERTAKRLGRQRGKKVARVEVARKLAEAIFYMLKKDEPFAPYVAAPRAAA

SEQ ID NO: 123636 - protein, 477 aa, unidentified
MAATRTSRLNRKQRKALARRLQSADPGLDVIHPNAAGIDVGNSSHYVAVRPDRDPNPVRRFDGFTADLHRLADWLKQCGVTTVAMQSTGVYWIPLYEILDARGLEVYLVNARHTKNLPGRKTDVQESQWLLKLHTYGLLRNSFCPAADIRVIRTYWRQRADHVCAVSICIQRMQKALTQMNIQLANVISDLSGWTGMRIVRAILAGERDPRALAALSHPGIHASRDTIAKSLEGTWRADVLFILQQEVAMYDAYQQRIAECDHELEQHLKGFADKLTDATPDGEPSAPTEARLRSGPKRRRKAGSHAPQFDLGRELHRISGVDLTRIDGIDVGVAQTVISEVGLDMTRWKTEAHFASWLGLCPDNRITGGKVIRKGTRHVVNRAATALRLAATTLLRSQSYLGGQYRRLRARLGAPKAITAMAHKLARLVYRMLKWGHEYVDKGLQYYEERHREQQVQLLKKRAAKLGLQIVEPDAA

SEQ ID NO: 123637 - protein, 438 aa, unidentified
MQTLPILDPKAAAIDVGSEYLHVSIAGGPPKVFGATTGQLYELRDWLKGQEVRSVVMEATGIYWLCAYEVLEKAGLQVIMVNGKYVRNLPGRKTDMKDCQWQATLHAHGLLKGGFVPPEHIRCLQDYVRLRSDHIMMAGSHEQHMQKALERMNLKIHDVISDLTGMSGLKMIEAILQGQRNPAALVALCDEQIQKNKAGRLRAALEGTWKNEHLFALRQAYELWQFYQKKIAECDQAIEKVLQELAGPEDPNQPAPRTPKKGGINSPQITHLHSLLWRLCGAKDPTQLPGIADYVLLQLLAEVGTDLSHWKSEKHFTAWLGVAPGSRQSGKRRGSQKRQRNRAGRLFCVIARSVGRSVDKALGGFYRRLKGKRGGLVANLALARKLAELFWRLMVHGLAYVEQGLQKYQEKVAATEQRLLQKLARKYNMMLTPGKPTI

SEQ ID NO: 123638 - protein, 326 aa, unidentified
MAQENKVDKIGIDVSKAKLDLALLRKQGKFRDKVIANSRKGFQELAAWLSKQGVIQAHICMEATGAYWEDLAEFLVDTGFAVSVVNPVLIKRFGASLGERSKTDRLDARVIARFCAERSPELWQAPSKAVRGLRALVRRREALIELRTEELNRRDSASEPRVLESIDKVIAMLDEQIAQIERQIRDHIGGDPTLKQQRELLESVPGIGKVVSGMLLSYYGGELRFESSKQAVAFAGLDTSRRESGSSVRGKPRLSKKGHSNIRGTLYMPAVVAMTKSAWGKAFAARLAAAGKPPLLIIGAVMRKIVAIAYGVLKSGQPFNPALHGA

SEQ ID NO: 123639 - protein, 390 aa, unidentified
MTYYVGIDIAKYKHDCFIADDSGCVIRDSFSFTNDKDGFNVLLSILKVLKPKGQIKIGFESTGHYHFNLKLCLEANGYDYVEFNPLLVHKFSSTQTLRRTKTDKKDAQLITKYLMTVDYKPYVNPFYHINNLKSLTRLRETLITDRTRFLNQITSYLDQIFPEFKPLFENGLNESAFYLLTHYMTPAKLSKLDSNKYSKMKSELKRPISYQKICQIKDAAINSIGHTSKALEYALRSSLNVYLYLDNQIDDLESKIIEIYDSLNCHIHTIKGIGKLTAAGILAEIGNFSKFLTPAQIQAYAGLEPSKNDSGTHDGLGIMVKHGSSYLRKYLMNSAETFYVYNPSISDFYWKKRNEGKHHRVALSHVARRLINTIFYLEKHNQDFDSKLVK

SEQ ID NO: 123640 - protein, 411 aa, unidentified
MEVLSPKCAGLDVHRDTVVACSRIASGDEVKREVRTFGTTTKELMALSAWLAEHGVTHVAMEATGVYWRPVWHVLEGDFELVLANAMHIKNVPGRKTDVSDAMWIADLLAHGLIRASFVPPEPVQDLRALTRTRKQLVRERASHVQRIDKILQDANLKLGSVISDILGLSGRRILDALVAGEEDPEKLVTHVDVRVRAPRADIVEALRGKVTAQHRFLLKLHLGQVDGLQKAIDAIDAEVGDRLLPFRDAAERLKGIPGVSDVAAAAIVSEIGVDMSRFPTVGHLISWAGLCPKNDESAGKRRSNRLRKGAPWLKTLLVQAAWSAARTKSSYFHAQFLRLKARRGPRKAIMAVAASLLTAAYAMLKNGTAYKDLGADHFSRIERIKTANRLLQKLGDLGFDTRGVRDLQAA

SEQ ID NO: 123641 - protein, 347 aa, unidentified
MRFYTMQHKFYCGIDLHARTMYLCILNQDGEIVLHRNMKAAPEPFLKAIAPYQEDLVVCVECIFTWYWLADLCAREGIPFVLGHALYMKAIHGGKAKNDRIDAQKIAVLLRGGMLPQAYVYPSEMRATRDLLRRRIHFMRKRAELLTHVQQTNSQYNLPEIGKKIAYKANRDGVAERFPHPAVQKSIEVDLALIGHYDHLLRDVELAVLKTAKQHNAHTLYLLRTIPGIGEILSLVLLYEIHHIERFPRVQDFVSYCRLVKCAKESAGKRYGTSGTKIGNAYLKWAFSEAAVLFLRNNPAGQNYLARLEKKHGQGKALTVLAHKLARAVYYMLKRGVAFDLNAFLQS

SEQ ID NO: 123642 - protein, 386 aa, unidentified
MADVMIGIDPHKSSHTAVAIGAGEEPLGDLQVRAGPSQAEQLLAWAAGWPGRAWAVEGAAGLGHLLAQQLVAAGEQVLDVPPKLAARVRLLQAGDTNKNDPNDAFSVAVAALRSPARRPVLAEDHAVVLKIWAKRHRDLARARNQAACRLHAVVCDLVPGGIRKEISASQAARILEQVRPADAVIRARCELAADFLTDLRRLDAQLREANKKLAAAVRASGASLTDIFGVGPVSAGIIIGDVRQVFRFPSRDHFAAYNGTAPVEVSSGEKKICRLSLRGNRRINHAIHMAAITQIRHKHSDGRAYYDKKIAEGKTHKEALRCLKRRISDAIYARLMADARQAAAATCPQGPGGQPGDDSASSAAGSHPAHRLFGQVVVSLRDAVLA

SEQ ID NO: 123643 - protein, 355 aa, unidentified
MDSKKYIGMDVHKESISIAVRNGAGKIVMECVIETKASMILEFINGLRGDLQVTFEEGTWAAWLYDLLKPHVTKLVVCDPRKNASMREGNQSDKIDARRLAELLRLNHLSPVYHGEHGLRSLKELVRSYLTITKDLARVMSRVKAIYRSWAIPCTGTQVYAPRHRVEWLGKISEAGVRRRAEFYYQQLDALRALRQEVRRDLLAECKKHQAWKQLCQIPSIGPIRAAVLLGILQTPHRFRTKRQLWTYSGFGIETQSSADHRSVNGQLQRVKKSSSIRGLNRNCNHDLKNLFKGAAIVASSKPGPFQEFYTALLAKGIRPEMARLTLARKIATIALIVWKRGASFDAQYLKPQTA

SEQ ID NO: 123644 - protein, 399 aa, unidentified
MKNGKNGKSNNVYASVTGVGMDVHYKFSSVTMRDAHGIVVHRERLDHRDRSALRERLSRWPKNVPIAMEASFGWAWLADLMTELELNPELSNCYKIQQMRQARGWVKTNRKDADLLSLLPYEKSDWWKVWMSPPDVRDRREQMRHRADVVVIQTETKNRIWALFHRHGIFCEASDLFGVAGRKFLAELCAAGRTADVVLPPGALEALRSLLDLLNHIRMQLAKIARELRKQLARSDLAKRFDGIPGIALILAHTMIAEIGVLERFSSHRQLASYSLLAPRSNDTGEPDGRAPLGRHLGRRGNRTLKWAFIEAAHGAVRSGGKWRDIYDRATDGGERNRNRGYIKVARELVKVVYSMWRNGTSYMDNPPARPGAVCRPSVCRMTETSLALSSARSGTGQP

SEQ ID NO: 123645 - protein, 365 aa, unidentified
MKTKATVQSPKRKSIRTMQSLTIGMDLGDKTSRFCVIDKAGNVVTEGGLATTRKAITEKFAGLKHCRIAIEVGTHSPWVSRLLVELGHEVIVANPRQLKLITESSRKSHRVDAQTLARLARIDPALLRPIRHRSERAQMDLMVVRARAALVQARTSLVNTARGLAKAIGERLPKVDAEALDMEDASGLPQSLREVLRPLLETVEHLTAKIKAADKEIERLARTDYPETKLLMQVSGVGPLIALTFVLTVEDKDRFQKSRDVGCFIGLRPRRQDSGERRPQLPITKEGDMYLRALLVQGAHCILSRQGPDTDLKRWGEHMCTGGKNAKKRAIVAVARKLAILLHRLWVTGEVYEPLRNSDALAAAA

SEQ ID NO: 123646 - protein, 375 aa, unidentified
MERVYIGLDVHKEQIVIGVAGIGDAHLYGQCSSDIRCFMKAMRGVERKYAVERAQLRICYEAGPSGFALARHLQRIGYAVEVVAPSLIPTKAGERVKTDRRDAKKLARLYRAGELTAVHIPDAEDEVIRDLCRARTDAIDDQTRAKHRLMMFLLRNGHRYGGKTAWNDAHRRYLRELVLVDPIQKLILEEYLQAVDRAGDRVESLQEQMRLRLEGWSRRPFVEALQGFKGFQLVAAMIVTSELGDLSRFKHPRQLMAYLGLVPSEHSSGNSRHQGSITKTGNSHVRWILVEVVHAYRLPPKVSTHLTLRQEKLHKSINALSWKAQKRLHARYVRLLMRRLHENKIKVAIAREMAAFIWELGRVMQDADVHTTVAA

SEQ ID NO: 123647 - protein, 332 aa, unidentified
MSAVVCGLDVHKETSYATVLDRDGQVLVQRKMMNEDIPAFLEMTHPDKLAMEASTYIIPLYRKLTESGYDVTVSHPRKTRLIAEARIKSDRVDSRALAELLRLDSLPTSYIPPRDIAAIREKVRRRAFMVRQVTKLKVKIRDVLAAEGVKPPTGHGLFTAKGVEWLRSLNLEPVDCYLRLIEPLKEEVKLVSGDLKRSAGKDDEVQLLMTIPGVGYYVALLVKSEIGDVRRFSSGDHLASYAGLVPSTRSSGGVERHGGITREGSRWLRWAMVEAAMVHVRYDTPVTRFYHGVAERRGKRAALVAAARKLTEVCFSVLVHGRPYFNPLDAQA

SEQ ID NO: 123648 - protein, 383 aa, unidentified
MKAVCGLDVHKDSIFLCILHSDGELFEQVFGVLTFHLEEMRKLLQKHHVFEVCMESTSIYWIPIWRVLSPHFTLRLVNPYFIKQLPGHKSDVKDAQWIAECTMKELVRGSFVPPEIIQQLRQYDRRIFDLNAEIVRKVSKVDGVLQRCNIRLSNYVSNIECKSYRDVVRRLSEGVTNPNELMKLVHGRIVNRHGAETILASLTGVVSQAEIDVLRQLHEEIGIAESHRNECQQRMLEICEKHFPEELERLQKIPGIKERAATSLIAEIGTDMSKFETANHLASWSGLRPRNDESNKKIKSRKITHGNVYLRNTIIQCAWAASRQKDCFFSRFSYHQTIVRRKNKMKVIVAVARKLLVAVWHVLHDKTDYVDFKPDREESANNG

SEQ ID NO: 123649 - protein, 342 aa, unidentified
MEEYVGLDVSKEETSFCVKDGAGNVLARGKALSDPDSLFEAMRDHTLCPARIVLETGTLSGWLARGLRAQGLPVDVIDARQAHAVMKLQHNKTDANDAVLLAEIARTGFCRPVSVGNEAEQKHRILVKARRHLVRQRCATENAIRGFLSSLGLRFPKGSGKLADRVRTVLETRPDLKAMIEPLLASAAAQREQIKRFDEEIAVQARASAAARLLMTVPGVGPIAALAFSATIGDPDRFSNSRAVGAYVGLTSRRNQSGEMDYSGRISKNGDSLLRSLLYETANVLLTVVCKAHPIKDWARRIRKRSSHKKACVALARKLAVIMHRMLVTGEAFRWPQKEAAQ

SEQ ID NO: 123650 - protein, 456 aa, unidentified
MKIPQSTIRLLTGRLVKILLNREVSTMKSNTQNAKIEAITEKTLVLGIDVGSKTHYARAFDYRGIEYSKKPFKFSNTEAGFATFKEWILDLKERHEKDKVVPGMEPTGHYWFNLGKFLQDNEMKPVLVNPHHVKKSKELDDNNPTKNDRKDPKVIAGLVREGRYMIPYLPEGVYADLRTASNIRFQLQAELTRIQNRISRWFNIYFPEYKTVYGKPDAKSGMLILKAAPFPEDILTLGINGVNQIWRDAKLRAVGKARAKTLIEAAEHSVGSKEGAVSARMEIRMLLEDYESRNIRLQEVMTLIEGLVKQIPMAEKLLEIKGVGIRTVSGFLAEVGDISRFNNPKELQKLAGLALVENSSGKHKGETTISRRGRKRLRYLLFEVAMSLVAKNPEFRELHNYYTTRRLNPLKKMQSLMAIAAKLIRVFYAMLTKGVDYDPKKMVSDIKRPAVYLQAA

SEQ ID NO: 123651 - protein, 428 aa, unidentified
MRFIGLDVHQGFCEVAIREEGKTRSAGRVATERAELELFAGSLSQSDEVVMEATGPAMEIARIIKPHVARVVVANAQEVRAISHARVKSDRFDARTLAELLAAGMLEPVWVPDVETSALRRRVARRAALVRQRTRAKNEIHATLSRCLLGRAPVSDLFGKKGRAWLDEQQLGIEESETVAGCLRQIDFLDCEVAQVDQRLSEWAVGSQDAKRLMSIPGVGAGVAVTLMAAIGDISRFSSPRQLVAYLGLDPKVRQSGDEPPRHGRISKRGNAQARSVLVEAAWIAMRQPGPLRAFGERIRVRKGAPVAAVAVARKLTCLCWQLLTKEEDYAFARPSHVRRKLRNLELDTGAARLPTRHNGQRISSSTAERAAERELTEHAETTYKRLIADWKASGPAKTGAGATHGRAPSTPSKRQATRQAPAQTPAL

SEQ ID NO: 123652 - protein, 342 aa, unidentified
MDYFAGLDVSVKDTSVCIVDHTGKIVREVRVASEPDALLGVLRNPLYCFKRIGLEAGPLSQWLFSALGEANLPVICVETRHMRAVLKAQINKTDRNDARGIAQMMRVGLYRPVHVKTLRSQKLRMLLTHRKLLQSKAIAIENDLRGTLRNFGLKVGTAGRTKFETRIKELVEDIPDLAALVEPLLIVRRVLREQIAVLHHRLLTIVRDDEVCRRLMTTPGVGPVVALTYRATVDVPARFRKSKSVGAVFGLTCSRDQSGERDRPGAISRCGDEMMRTMLYEAAQSMLRSTRWSWLKAWAMQIAKRRGMKRAIVALARRLAVIMHRIWVDGTEFRWTRQVAAT

SEQ ID NO: 123653 - protein, 428 aa, unidentified
MRFIGLDVHREFCEVAILEDGRVRSAGRVRTRRKELELFAQSLGSDDELALESTGGAVAIVRILEAHVARVVVVNTKKLRQISEAKAKTDRLDARRLAELLAAGYLAEVWCPDERTRALRRFVGRRAQLVRQRSRAKNEIAAALQRNLLDRPGVYDVAGERGRRFLQGVELPDDERQTIEGCLRQVDFLDEEITAVNQALAEAAVGCQEIRRLMTVPGVNLHTAATFMACVGDIGRFRDPRKLVSYLGLDPRVRQSGEEPARHGHISKEGASEARHMLCEAAWIVVRYPSPLRAFGDRIKARRGAGIATVAVARKLVVLFWHLLTRDEDYAFGRPSLTRQKLRRLELLAGAEPRRSGGRPTASAAAVRKAQNAAELELARQAEIAYRRLLADWQQAPKKGADATPGRASSGRQSGKQRGRASVPDPAL

SEQ ID NO: 123654 - protein, 342 aa, unidentified
MTYYAGIDVSLEYSSVCVVDGAGKIMREQKIASEPEALIAWFRGLGFGLERIGLEAGPMSQWLHAAMRAAGLAVELLETRHVRDAFKAMPVKSDRNDARGIAQLMRLGWFRPVHCKSMAAQEMRALLTARKLVQSKLLDVQMSLRGLLRGFGLKVGPTTPSRFAGRIRELVEGNATLEVIAAALLVVHETLRREFAGFEKRVRSIARSDGRVRLLMSTPGVGVIVALTYVTAIDDPARFKSSKGVGAHFGLTPKKYQSGETDITGRISKIGDEGVRTALYEAGNIILTRPLKGCTALKSWAMRLAKRAGMKKAKVALARKLAVIMHRMLVDGTLFKSAAVAA

SEQ ID NO: 123655 - protein, 499 aa, unidentified
MDVCMRTGVGPGAGEPPRSEPASRRTELVKRSGADRSPLLPVCLVPGRKRPCERTVSLRAKRDDREHPIRNAPALIAGEIIDLDVAINLGGAVHSNMNPSAPMQNPTCGLDVASISACACVQSAAGTILHELSLPATRAGEDRLLALLPPGTAVFMESTGRCHWSWARRLTAAGHRVYVLNALLAKRLIGATNALRQNKTDKIDARQLADIGRRDGASLQTYLFREDPGRLRLRTLCEVRTKQRQLLTDTLKSAAGLLQAMLPEAPWLKLAENRGLATLFLQIDSLAQLQRMRLPKLQTYACGKAEALHTVLRQPLSAAAVFDALLPALQAQLRLIESLREQQLALVAQIRQAVVAGHREAEVELVQTIPGYGPKTAPTIVACLPEDLRQWGSKQKVARKVQAYFGCDPKLKESGQWKGQVRMSKRGIELARTALFQAATCAMLHDPAMKAVFDRKKAEGKFYLVAVSHVMRIQLRRLVAVLYDRKPFVRRPENLFAAA

SEQ ID NO: 123656 - protein, 343 aa, unidentified
MAIAVLGIDLGKNSCSVAGLDGTGRVVLRRRLTRESVVRLAGTLPACVVAMEACCGAHHLGRVLREQGHEVRLMPPEYVQPYVKAQKNDERDAEAIAEAATRPTMRFVELKSEAQLDAQILHRARSRLVGQRTALINQLRAVLLERGIVVAKGRRRLEEYLIGLLDGDRPTLSPRTCLLIEDMRLEWSELDRRIAALTAEFVARAREDQAARRLATIPGFGALNATALVAAIGTGETFRRGRDLAAWLGLVPRQATTGGKPRLLGITKRGNTYLRTLLIHGARAALPSLSASQSRMGEWLRGLIGRAHKNKVIVALAGKLARIAWAVLRSGETYVKEGRPVAA

SEQ ID NO: 123657 - protein, 457 aa, unidentified
MESYYMGIDVSKGYADFVILDAKKDVVEPNFQLDDTFGSHCKLFEILKRFFDRHSGSVLFAAVESTGGYENNWLHSLGGFQGTLDIRSARLNPLGVRANSKASLRRVITDKISARDVAEYLIAHPEKVTYQQEDSLAGLRRQWGFVRLLVKQKTQILNQFESLLYTANPELIAYCQSGVPAWLLKLLKRYPTAVKLAKARATSVARIPYVTADRAKELIEQAKKSVASATDETTGNLVAAMAEQIIRMEETIRIQAQQMAKRCAIPEVALLKTIPGISDASAIGLMLEIQSVKRFSSVKKLAAHFGLHPAFKTSGDGTSGVRMSKQGRKEPRKILFMVAMVALTANPHIRKIYEEHTEKGMKKMAAIGLCMHKILRIIYGMLKNNQAYDSQVDQKNRENRTARKATHTVKNVNRRYETFDQQAPISRRQSNKRKEWKQSQGDNITQCGIGVPIPSAA

SEQ ID NO: 123658 - protein, 305 aa, unidentified
MTTYIGIDVSKLLLDIHHNGQAAQIPNTEKAIRAYLKSLPDDTMLVCESSGGYEATLITQAHAQRRPIARINARQVRDFAKAKGRLAKTDTLDARIITEFAQAFHPTPLCPADPLQIELSALVKLRSHILNQITQNNNLQETLSDKNILRILASTVAALKKQEVKIRNLIVATIKRSPSLTSNVSRLQEVQGIGLVTAFSLLSFMPELGTLSDTQAASLAGVAPFNHDSGQFRGQRHIRGGRSHLRSALYMAALVASRYNPILKPLYQRLLAAGKPKKLALTVLMRKLILLANRILKNPSFSLAS

SEQ ID NO: 123659 - protein, 399 aa, unidentified
MPITPFKNQNVFPANEREEEFIGDKGLHLNQVLFGMEPTANYHKPLGEFLINEGHNVVLVAPEAVKKNRSLLDGRWDKNDGKDCGNIADLISQGKCLYYEYPSLELRDLRNLLSLRRKLKKLEHGVRMRIRNHLVAQYFPELDEHCHWGEHEGLAMVRWCLDPAVVAELSDSELLARLHTQGRTLAQRRRLSALRQKAPTSIGCRFGPSVEFEGRMVVKLLKEIRQTLSDTEEKIEQVCLKFAQYPCLLSIPGFGPTLSAMVLGAIGNPWRFRSGPQVLKMVGLDLSASQSGKSKHGLPSISKKGKAELRYALYQAAWIASSRDKHFIAYFTDQLRGREKEKGIKTKKRVKLAAKMMMIAWSLMKKKESFDPRYLLSHEPVSSNDGGIPRVMSNGDRGL

SEQ ID NO: 123660 - protein, 383 aa, unidentified
MNSSNKNKKRTGQTVTPSVVGDRAKARVVPSLLPKSSNSCLGYPSPHVTQGRATLEPVQIIKEDCILEVSLIFVGIDVSKAQLDVAIRPTAQTLSVTNDKAGIKILVKHLEKLEPTLVVLESTGGLERQVMLALIGTEIPVVMANPRQVRDFAKATGQLAKTDRIDAAVLAHYAEAIRPKPRPLPDELTLELRALTVRRRQIIDMIVAEKNHLATASKAIKKRITAHITYLEQELDRADQDLDRFIQKNPTWKDNQEILCSTPSIGPVSSRTLVAELPELGTLGRKQISALVGVAPFPRDSGTLKGRRTIWGGRASIRSALFMATLSATRFNSVIRDFYKRLKAKGKPSKVALVACMHKLLTILNAMIKNKTRWSETFSHQTT

SEQ ID NO: 123661 - protein, 350 aa, unidentified
MPSKTDAVVATIGIDTGKNTLHLIGLDEKGAIVLREKVSRGRIVARLANAPRCLIGIEAGMATHYVARELIALGHEVKQVPPAYAKPFRQGHKNDFRDAHAVAEAVQRPSTRCVPVKTDDQLDLQALHRVRSRLIGERTAVTNQIRSFLLERGIPVRQGLRFLRQQLPDILAKRIDVLSPRMIRIIEDLIGEWRRLDERIDHVTTEIEVLARSNEGCRQLMTVPGLGPIIASAMVAAIGNGTAFATGRDFAAWLGLVPKQMSTGDRTILGRITKRGNRYLRTLFMQGARVILLRPANWAKHSFGPWLTAAAQRLHHNVLATALANKLARIALTVLVQGRGYETRVTSEAA

SEQ ID NO: 123662 - protein, 352 aa, unidentified
MISTQTTAVPKLFIGMDVHKKSWTVHFKTDLFDNKTVTMPAEPLALINYVEKNFSDHQVSCCYEAGCCGYWIARALNQKGWQVSVVNPADVPRNNKQDWQKTDKIDSRNLCKHLSGDNLKGIYIPDEQQEQLRSLFRRRIHLSRHLRSIKNHIKSQLLYYGIKLPEQYDNPNWSREMKTWIGNIKWKYSSAAESMRSRLKQLEFVWYEELHISNELRAYCRKHYKKDYYLYKSVPGIGGITAAAMIAELGDIRRFNRLDELAAIVGLVPGIYQSSDNKINFGLTKRSNHQLRSLLVEASWVAVRTDMALQQYYRKHAHKEPNKAIIKVAHKLLNRMRSVIHSGIPYQQGLIK

SEQ ID NO: 123663 - protein, 387 aa, unidentified
MYFVGIDISKFKHDCAIIDEIGDVIMPSWSFNNDLEGFSILREVLSSLQGDIKIGLESTGHYGQNLKLFLESNGFSFMECNPLLISRFVRSKSLRKTKTDSIDAVMIAQHLMTVEYKPYPASFYHMDKLKSLTRFRDSLVRQRSRQLVDLTNVLDKVFPEFKPFFKGKFYVTALYILANYPTPEKIANMNARSYEVLRKRSSGKFTMIQFAQLKTLAKNTVGSSDDYLLQQMEVLLDIYTQLDAKIEEVEAEIIECIIGIDPPILSIPGIGAMSAAVILSEFGDFAKYANPSKMLSFAGLEPGYFQSGQSEHTGHMVKHGSSHLRYALLNCCLPLIKNEPTFAAYYAKKRAEGKPHRVAMTHVAKKLLRVIYTLQTKNIPYNADLVC

SEQ ID NO: 123664 - protein, 429 aa, unidentified
MSRKAKLLENSGTPVAPENNMAELEVVYRRCYGLDVHKNVVVACSVSAYGQKSVKSFGTMTGSLIELCEWLKAENVEMVAMESTASYWKPIFNLLEMEGIPAMLVNAQHVKNLPGRKTDIKDSEWLAMLLRVGLLKASFVPNREHRELRELVRYRKSIVEERSREYCRMDKVLQGANIKLSSVAGSMDTVSGTLMIKAMVSGEDNMAVLASLAKGTMINKRDQLERALKGYIQPHQRMILKSMVDHIESLGRQIDVLDAEISKRLNDREDLVNRLCEVPGIGKQSAQTLIVEVGTDMDQFPDHKHLASWAGLCPSNNESAGKKKRGKQRKGNQTLRTTLVQCARAAARTKDTYLSSMYARIASRRGANVAAVAVARTILEIYYHMVAEGSNYNDLGACYYDARNLEHIRKRSIKRLEGLGYKVTLEEIA

SEQ ID NO: 123665 - protein, 347 aa, unidentified
MVTDSLDVVIGVDTHRDAHSLALVRSRDGVLIAEQELPANRAGYRAALALGKRLGAPRLWALEGTGSYGAGLARYLTERGERVCEVERPAREGSRARLKSDSLDALRAARAALAGQALASPRAAGRREALRVLLQTREGAVAIRRSGLNQLRALVVSAPEELREGLRGRGRDALVRACTRLRPHPRQQAERYATALALRSVARRVEQATQEAAELESELRRLVFELCPQLLSLEGVGPISAAQVLVAWSHRGRLRSEAAFARLAGAPPIPASSGKTVRHRLDRGGDRRLNRALHTIVLTRRRGDTATIAYIARRVSEGKSERDAIRCLKRYLARQLFRLLETTPTTG

SEQ ID NO: 123666 - protein, 340 aa, unidentified
MESFAGADLHKRVTQLAILRDGQPPSQFRFPNDPKTVQGVLRKLPKGTKIAVEATGSWWWFIEKARAMGHEVLLSHPKQTKAIAHARLKSDKVDAVMLARLLKAEFLPTVWIPGEKERYVRELLAHRMRLVRNRTAVINELHAVYAKRNVEVPGMIWHRIRPMPWRAEQLSGYALRIVSENVELLKVINRQIQDLDKELGKAGQEDPQAKRLMTVPGVGATTAVAVSSWVGDIRRFPNAKKLVSYFGIAPRVRQSADKERHGHITKEGSRMARWLLLQAALVNIRMAKQPARSHYLGVSKRRGKQIARVAATRKLVGVMYHLMKDQIDYKEFLRRGSNAQ

SEQ ID NO: 123667 - protein, 417 aa, unidentified
MFRRCAAGIDIHKKMLAVVVRRQEGGEVTYVKRKFGTTKVEIEHLAAWLKHEGVEEVVMESTAQYWRPVWYGLEPHFRLHLSHPLKTKAPRGRKRDYRDAQRLADRWCSRDLEESFVPLAEQRRWRWMTRVRVDLKRKVTRVRNQVEGVLEEGGIKLSSVASDIFGVSGWAMLERIADGETDVEVLAGEARAVLRKKKAQLQEALAGHLGPAYRMLLKQYMDQVRLLRKQVEELNKEIALAMKDHTDTLCRLCKVPGIGLDAAQELLAEIGPRAAAFPSAPQFASWAGVCPGCQESAEVCYSRRSAKGNRYLRRVLTQVAWAAIRNKENFFGGLFARLQPRIESKGAAWAVAHRIAKVVWLLLHEGVEYQEKGPGQPTVKSLTRKLRRMVKQFAAHGLDISAVLAQVNATTLTETAS

SEQ ID NO: 123668 - protein, 430 aa, unidentified
MKSNTQNAKIEAITEKTLVLGIDVGSKTHYARAFDYRGIEYSKKPFKFSNTEVGFATFKEWILDLKERHEKDKVVPGMEPTGHYWFNLGKFLQDNEMKPVLVNPHHVKKSKELDDNNPTKNDRKDPKVIAGLVREGRYMIPYLPDGVYADLRTASNIRFQLQAELTRIQNRISRWFNIYFPEYKTVYGKPDAKSGMLILKAAPLPEDILTLGIDGVNQIWRDAKLRAVGKARAKTLIKAAEHSIGSKEGTMSARMEIRMLLEDYESQNMRLQEVMVLIEELVKEIPMAEKLLEIKGVGIRTVSGFLAEVGDISRFNNPKELQKLAGLALVENSSGKHKGKTTISRRGRKRLRYLLFEVAMSLVAKNPEFRELHNYYTTRRLNPLKKMQSLMAIAAKLIRVFYAMLTKGVDYDPKKMISDIKRPTVYLQAA

SEQ ID NO: 123669 - protein, 335 aa, unidentified
MDKVTTVGLDLAKSVFSLHGVDAGGRVVLRKTVRRDKLMELVATLPPCRIGMEACGGTHQWARQFEQLGHRVGIMMARFVAPYRKSSKNDGNDAEAICEAVARPNMRFVPVKSAEQQAILSLHRVRQGYVEERTATINRIRGLLTEFGMVLPQRADEVRRAAVVLAEQLPLLAREAIADLRAHLTYLDQRVTHYEQQPTALNRHCVPAQRLLTLPGIGPLTASAITASVASGHEFSNGRQFAAWLGLVPRQNSTGGKTRLGRITRRGDAYLRTLLMLGARAVLQKAPHKTDRLSRWALALRVRRGYHRTVIAIAAKNARIIWAMLAKERDFVPVH

SEQ ID NO: 123670 - protein, 306 aa, unidentified
MVNVGVDVGKWVLDVCIYEKDIHWQDDNTPEGITRILKRLSYYRVERMVMEATGRYQLELATAAFKKAIPVCIIKPLSIRRYAGAIEQLAKTDKIDAYVIAEFAAVVQPEPTPKVSKNLRSIKDLLARRRQVMEMRTKELNRIQVMGKAFEVSCRRIIKCFDAEIARIEKKLDQYVERQSEWSERKAILKSAPGVGDTLVYTLLADLPELGTLTNKQVAALVGVAPINRDSGRSRGKRRIQGGRACVRTTLYMATLSATQCNPIIKGFYHQLVEQGKHKKVALTACMRKFITMLNAMVRDEAEWAY

SEQ ID NO: 123671 - protein, 452 aa, unidentified
MAKEKRNQGVIRMGSGLPVFNPHAAGIDIGDTLHCVAINGEHGGHEVMTTKAYTCDLKEIVEYLKNNGITTAAMESTGVYWIPLYLLLEEAGIDVYLVNASHVKNVSGRKKDDTDAIWIQKLHTCGLLQKSFQPEEHMRILRNYTRQRKKLIEMGSQSVRRMQKALELMNVKIHTVISDILGKTGMSMIKAILEGERDAEVLSALCDKRIKASKTEIVKSLEGVWSEEYLFILDQSLEAYEFYQKQMKSCDEKIKNHLLIQTAKLKEGDITSFEEGIEYVPRKGKKNQVDFNVEDYLKGIAGVDLTKVDGIGSVTALDFISEVGLDMTKWKDSNYFAAWLNLTPNTKITGGKIISSRMMKKKNRAGLILRQAASGLVGSKSPIGDFYRRTRARIGGKGAVIATAHKLSKILYTMMLTKTAYQHEILIQNQQKDKAEKIRKLEKQLERLKRTA

SEQ ID NO: 123672 - protein, 385 aa, unidentified
MTVRTVSRAATHGETVRCLFAIELSKQSWVVGFITPLSSRISRRILSGGDWKGLLELIEEVRARVSREMGRTVEVMSCYEAGYDGFWLHRQLEAHGVRNCVIDPASLQVDRRVRRVKTDRIDTERLLRSLMAYLRGEPKVWSVVRVPSVAEEDARRLHRERDRLICERVQHVNRIKGLCALQGIYDYHPLCPQAVARLEQLRTAQGGALPPRLKSEIKRELHRLEVVVEMITTLEAERDAIVEDEASTHVNAEKIQALHKLKAIGPEFAAVLVGEIFHRDFNNRRQLASYVGYAPSPFQSGNVAHDQGISKAGNRKGRTTGIELAWLWLRYQPDSDLSVWFRARVGTVKGRIRRIAIVALARKLLVALWRYLETGLVPRGAVLKG

SEQ ID NO: 123673 - protein, 451 aa, unidentified
MNNEPEIVLDDEHELVIERVAAIDVAKASGKVCMRMPHPSRPDRRMSKVRDVDATTRAVTELADDLLGEGIERVTVESTSDYWRIWFYLLEAAGLRVQLVNARDVKNVPGRPKTDKLDAVWLAKLTEKGLLRPSFVPPAPIRQLRDYTRFRVDLTHERARYWQRMEKLLEDALIKVSAVVSRMDSMSVRDMLEALIAGERDPRRLAGLARGKMRPKYKALVEALSGRFDEHHAELARMLLDQIDALGAQISTLTTRIDELLAALIDTPGPAADGSVRDGDGEVELMVTGLDAAERLAEITGIGPVSAQVIIAEIGLDMARFPTAAHLVSWAKLSPRTIQSGAIQRSGKAGKGNPYLKGALGEAAAVAARTDTFLGERYRRIVKRRGKLKALVAVARSILVIVWNLLSDPTARFHDLGPDYYTRRIDTERRARNHLAQLAALGYRVTVEPAA

SEQ ID NO: 123674 - protein, 340 aa, unidentified
MEKAIMIGLDIAKNVFEVHGRNAVGEVVLRRSLKRREVEKFFTKLPPTAIGMEACGSAHHWARLLGKVGHEARLMPPTYVKPYVKRNKSDAIDAEACWEAMGRPGMRFVPVKTVDQQAALSLHRSRELLVSQRTQLGNALRALLSEFGIVAGKGKAGVAHLVEELRAGRLELPADAAFAAMTMAEQHTALEATADALERRIAAQAKADNRARMLQTAPGVGPLSAHATLATIPDPAVFKSGRDFAAWLGLTPRLDGTGGKTRAGHITKQGNQPLRRLLVLGATAWLRQVKARPEKGSPWLRGMMARRPIKVVAVAQAARTARILWAMLTHNQPYRAPAIG

SEQ ID NO: 123675 - protein, 419 aa, unidentified
MNGIETKKLRVVNSQTLIVAIDIGKTTNTGYCRCPGGKDIKPFEFSNNAEGFRKLWDCICWMKRSHHLEEVVVGFESTGAYGEPLGHYLKGKAVRLVQVNPMHTKRMKDLQGNSPGKTDRKDPKVIADIIGLGHALSVVIPEGAAAELRRLTLARQRCLQRRTALYNQLQDLVFILFPEFLQVIKDVKTKTAQYLLRHYPTPQDIGQCGVETLSLVLKRVSRGKLGRVRAQALYSAARESVGLKEGTKGIVLEIDEIVCSLEACHRFIKRMEEEMVVYLQEIPYSDSLLSVKGIGEVTVAGLIGEVGDFRQFDALREVMKLAGLNLFEISSGKHKGNRHISKRGRPVLRKLLYFAAINTVRKGGVMHAAYQRYLDRGMPKTKALIAIARKLLRILFALVRDHSQYVETYSQKEALNLAA

SEQ ID NO: 123676 - protein, 410 aa, unidentified
MLDPVTKTPIEGARFANSTVGYRDLMAFAHRWKDRRWAVEGCHGAGRSLAQRLVADGEQVLDVPPKLAARIRVFSTGHGRKTDKDDALSIGLAALDGEGVQAVTPDDATVSLRLLCDRREELVALRTQAVCRLHRLLLELTPGGMRKDLSATKAASVLVRPRPEDEVGKVRFELANEQLADIEVLGTKIKASHVQINTLVKATGTHLPEPYGVGPVIAGRILAEVGDVARFPTKDHFASYNGTAPIDVSSGDQVRHRLSRAGNRRINHAIHMMAVTQIRQPLSPGRDYYERKRLDGKTPKEALRCLKRRLSDVVYRQLLADNRGRIEECGSPMTAGPTPSTSTSPTGLSRRAPRPASKPGRPRVSRRLSCSTGETTASLASKSSTPAPDSHKTSSRPRKSSTRKLKTGTS

SEQ ID NO: 123677 - protein, 424 aa, unidentified
MSDPLSTTAFRELTHFGGLDWAKESHQCTVVDRAGVIVLDLAFAHSAEGWASFREKISVFPKLAVAIETSCGPAVEQVLALNLPVYPLNPKAAQRYRDRKRPDGSKSDPIDAWSFADALRTDGHAWRVLRPMDALTMELRLLCRDEIVLIEQRTALVNQLQATLHEYYPIVLKAFDDWTAAWTWKFVIAFPTPQELAKAGKRRWEKFLHTHKLYRPLTAQKRLEFFAQAMDFTNPNPAVTAAKSFLAVTLAEQLLTLEGRLEKYRARINQLFAEHPDHDLFGSLPGAGEKLAPRLLGEIGADRELFASVEGLQSYAGVAPVTRKSGKSRWVSIRRACNKVLRATMHLWASLSIPQCAWAAAYYQRKKECGMGHAAALRCLGNRWLKIVWRLWQEGTPYDEARHTLDQVRHGSWVVKLLPQPAKA

SEQ ID NO: 123678 - protein, 354 aa, unidentified
MSDKSTASIATMGIDIGKNSFHVVGLDQRGAIVLRQKWSRAQVETRLANMPACLIGMEACVGAHHLSRKLRALGHDARLMPAKYVRPYSKGQKNDFRDAEAIAEAVLRPTMKFVATKTAEQLDLQALHRVRARLVSQRTGIINQIRAFMLERGIAVRQGLRFLRAELPGILASNTEVLSPRMVSVIAGLAEDWHRLDARIEEVSSEIEAVAREDAGCERLMSVPGIGPIISSATVAAIGSGDVFAKGRDFAAWLGLVPRQISTGDRTILGKISKRGNRYLRVLFVQAAWVVLIKPQSWERHGLKSWIEAHKKRLHHNVLAIALANKLARIAWAVLATGRGFEMTRIGDAVVRPA

SEQ ID NO: 123679 - protein, 412 aa, unidentified
MKRIRDRVAGLDVHRDTVVACCRVVDPDGEVEVTKQSFATTRRGLLELATFLSDASVETVAMEATGIYWRCVYYALEGMFNELWLCNAQHVKNVPGRKSDLSDAEWLADVAAHGMVRPSFVPPPEIRELRELTRYRKTQVDARGREIQRLEKALQDAGIKITSVASSVWSASSRMIIEALIAGEHDPKVLAEMAKGRMRVKIPHLEEALSGHFGTHHAILCRQIIGHIDFLDQSIGSLTKEITTRLVPFESAVAIVTSIPGIARTTAEVIVAETGADMRTFPSPGQLCAWAGVAPASYESAGKRRPAGTRHGSPWLRRALIEAARAGARTKGSYYSAQYVRIARRRGPNRACVAVANSMLFTIWHLLSNGQLYEDPGADYFNRRHDPAVEAKRLARRIEALGYDVSVIEKAA

SEQ ID NO: 123680 - protein, 370 aa, unidentified
MKDSIIFIGLDVHKDTIDIAIAESNGSKEVRHYGKIDGDLTALDKAVRKLQSKGSELRFVYEAGPCGYDIYRHLAKQKLSCIVVAPSLIPKKSGDRIKTDRRDAMGLARLYRAGELTAVYVPREDDEAMRDLSRAREDAVNASRTARQRLGAMLLRLGYRYNRRTTWNAAHFNWLSTIKMPHPAQQIAFQEYINAVKECGERVNRLTEQIQSLIPTWRLAPVVKALQALRGVSLMVATTTIAEIGDLSRFENPPQLMAYLGLVPSEHSSGKKEKRGGITKTGNGHVRRALVEAAQTYHYQARVSRILLARQEGLPDSVRKIAWKAQVRLCGRFRKLTGRGKPRNKVVTAIARELCAFMWAIAKEVPVQYV

SEQ ID NO: 123681 - protein, 414 aa, unidentified
MADEETISWFAGVDWGSERHQVCLLDARGTTAGEREFPHSGEGLTELGDWLLSMASVASTVAVAIEVPHGPVVDALIDRGFVVYAINPKQLDRLRDRFSVAGAKDDRRDAYVQADGLRTDRRLFRRLQVADPRLIELRAWSRLAEELRAERVRLSNRVRHQLWRYYPQMQKLTDDLAAPWFLELWAIASTPAKAVRLRKSTVERLLKQHRIRRIDAETALRILREPAIKVAEGVAEAACIHMRSLVARLRIVNRELRKAERKLDELCTAISEIEQTSGQGLQRRDVAILRSMPGIGRINLGTLLSEASGPLSRRDYEGLRTLSGAAPVTKRSGKSLIVVRRYAAHVRLRDTVYHWARVATQRDPKCRARYTAMRKRGHSHGRALRGVADRLLALACVLLQRQTLFDPYIGQPTA

SEQ ID NO: 123682 - protein, 438 aa, unidentified
MSNKVIFNLDDLFISVGIDVGADFSWMSIALPNQQFVGKPYKILHSSIDSLTTAVSKIKEAEELYSLESRIFLESTGIYHYPLFCYLRDKGFNCSVINPIITKNSTNINIRKVHNDRFDSKKAALVGLKPDLKVSLMPSDLALNCRNLCREYYDLMDNRSAYVNKLQGELRMAFPQYLGIFSKVTINTSLTLLETYTSPSAFLEADKQEIIDIIKSTARFGLTYAQNKYNAIIQAATDANQFGYIIDSNIKRIRLYISFIRKYDEEINNILESLHELVDANEDADFVKQIHLIETFKGAGFLSAVSIMGEIGDFSAFSKPKQLFAYFGLDPAVKQSGKFEGTKVQMSKRGSAIARRVIHTLTLQSISISRNGEAKNPVLREYYLKKCDSKPKLVAMGAVSHKVCNMIFAILRDNKSFEIITPQEHIKQYNASKCDMAA

SEQ ID NO: 123683 - protein, 466 aa, unidentified
MTPHKDYCLDPRPPATPTLPQSPVLADALQVCHPHAAGIDIGEAEHWVAVPPGCDPQPVRRFGTFTVDLDALADWLIDCGVTTVAMESTGVYWIPLFELLEARGVQVLLIDPRQAKRAPGRPKTDRLDGQWLQRLHAYGLLAGAFRPEDQVCVLRSSLRHRQMLLTSAAHHIQHMHKALQQMNLKLPQVVSDLTGVTGMAILKAIIAGERDPVTLAKLRNPHCHHDEDDIAKALQGTWRAEHLFALQQAVALYDFSHQQLALCDQQIKSHLATFADKSEGKPLPPKARRHKKTNEPRFDARTPLYRLAGVDLTTIEGIEENTALIILSAIGTDMHRWPSVKHFCSWLGLCPQHQISGGKILSRRVRPGAHRVTVALRLAARSLHHSQSALGAFFRRMKARLGTPKAITATAHKLARLVYSLLQHGSAYVHQGLDAYEAQYRERKVTTMAKQAKALGYTLVPLPAQG

SEQ ID NO: 123684 - protein, 351 aa, unidentified
MTRYIGLDAHSESCTLAVLGPSGKRLRYERLQTSTALLKSFIKEVPRPRQLCMEEGTLSEWLCEELAPVVDKLVVVVPDRNPGNKSDLIDACKLADDLRRGTIRRPVYKAPGQFRTLREAARTHYVLQRDKVRTKSRLHALCRGCGHADLGKSLYSSTTRAEALQRLPEHLRPRAALFGQQLDALLECSNQAEHNLREECSRVPIVQRLATAPGIGVVRAAYIVAVVMTPHRFRTTRQFWSYSGLAVVTRSSSDWVSEGAGKWRRSKTQQTRGLNHNRHPLLKNVFKGAALQITLMPEHPLGKAYQRLLTQTKPNLARLTIARRLAAAVLAMWKHGEDYEPTKHEIPTATT

SEQ ID NO: 123685 - protein, 319 aa, unidentified
MSRPSRPVYVGIDVARDQLVGHVRPLDQRFALANDPTGHRTLIKMLKSLRPHRIVLEPTGGYERLLLRALRDAALPAFLVNPHKLRAFAHSTRGLAKTDPLDAAALAHYAEIWQPPAPISREPPAERLAEYLSWRTLLVERRTALANRSAQLLDPALRRRARTNLAQLDAEIALAEVTMRRIVAEQLGLAQLWGRLKSAPGIGDLSAFALVANLPELGRVDGKRIASLVGVAPHPCDSGRLRGRRIIQGGRFDLRRTLYMAALAAVRQPGCLRTFFLKLQANGKPPKVALMAALRKLLCRLNAMVRDQCDWQEPRTMPA

SEQ ID NO: 123686 - protein, 377 aa, unidentified
MWSASSEAQDGGVRVTVGVDTHTDQHVGVALDQVGRRLGTRSVPTTPAGFAELLAWASGFGVLEQIGIEGTGSYGAGLSRWLRARGLTVIEVERPHRHDRQARRRRGKSDPIDAEAAARAVQAGTVIGQPKAGDGQVEMIRTLRLTRRSAMKARTQAANQLHALVVTAPDDLRARLRPLPMAELITLVAACRPVKAGTALSTPVAAAKLALQGLAIRSRQLSAEIDALDVHLERLVSTAAPELIAVKGVGTDIAGALLVAAGDNPERLHSEAAFASLCGVAPIPASSGKTNRHRLSRGGDRDANRALYLLALGRMGWDPATRTYVTRRTAAGLSKPEIIRCLKRYIARELYRILIAPTASPPHSADGDDAPASAIAS

SEQ ID NO: 123687 - protein, 345 aa, unidentified
METITTVGIDLAKTVFQVHAIDASGAVIVSRAIRRAGLLQLLGKFPACLIGMEACATSHHWARELTKLGHQVKLIPPAYVKAYVRRQKNDAADAAAICEAVGRPSMRFVPVKTVDQQAALMVHRVRALLVAQRTALICALRSHMAQFGVIAPVGSRNVAPLLAILADKADDRLPALARAALRPLARRMTMLKLEIERLDRRLLDWHRSSPVSQRLATIPGVGPLTATALAASIADPSMFRSGREFAAFLGLVPRQASSGGKERLGRISKMGDRYLRTLFVMGATAVLRHAKAGGSSSRVWAEALLAKKPFKLVAVALANKTARIAWAVMARGEVFREGIEVRAAA

SEQ ID NO: 123688 - protein, 350 aa, unidentified
MVVIGVDAHKRTHTLAVVDEVGRALANRTFPATLDGHSAALRWAQTWPERMFALEDCRHLTRRLEADLIRAGERVVRVPARLMATVRRTGRELGKSDPIDALAAARAALREPGLPAAQLDGETRRLRLLVDHREDMVGERTRMQSRVRWHVHELFPGLEIAPKSLGRLHVIAVLDRRLRPVEGTVAAIARELLGRIRDLTVRINELEREITQLVRPLAPNLMAMPGCGPLSAAKILGEVAGAARFRSRAAFARWNGTAPIPVWSGNDTRHRLNRGGNRQVNAALHRIALTQWRGVGLGRAYVQHRLGAGSTKTEALRLLRRRLSDEVFRRLRSDETAIARTSRREGVIAA

SEQ ID NO: 123689 - protein, 396 aa, unidentified
MLQENEGTISTQDQPTGSNIFVSVEMSRSKWVVGIHTPLADKIGLHTMACGDVEALLALIDRARVKLVASGSNSPAAMICYEAGYEGFWLYRRLIALGIRVVVIDPASLLVDRRAKRAKTDRIDARAMVRALMAWARGERQVLSEVRVPTVEQDDARRGLRERQRLVKERTAHGNRIKGLLKTQGIMDFDSRAADAAAHLDAIVTGDGRPLAACLKREIVRELDRLALVMRQIDQVETERDAVIQACDAGVGTDALAAEPERGAAMIGELNRLKGIGMNDATILVREAFWRDFRNRREVGGWSGFAPSPWASGSVVRDQGITKAGPPMLRAHMIQMSWRWLLWQPDSDLAQWFRKRTEGATGRMRRIMVVALARKLLIALWRYATTGMVPHGAIVT

SEQ ID NO: 123690 - protein, 311 aa, unidentified
MVDKTTVGIDVSKFALDVFIDTSERLIHLENSASGIMQLLKELEGLHISGVIMEATSRYHSLAESMLSSAGLPVAVINPRQIKNFARAMGKVAKSDSIDARIICEYGRRMKPEFRPARDKDLQDLALLLTRQRQLVQNRVMEANRLQEKNGMYIETGIAEHIAWLNSQIDTLDQEIKYQLNQNAALSSKRKMLEKVKGIGPVTQAAILSQLPELGALTRRQISALVGVCPYDRDSGQLRGKRAIWGGRAGLRATLYMAMLSAIRYNPQIKDFYTSLIARGKVKKVAITACIRKFITILNAMFRDQKDWVYS

SEQ ID NO: 123691 - protein, 444 aa, unidentified
MLRFVGCDVHKRTAVFTILLQDGTVFATYTVPVTREALAAFAERQLASEDRLAMEATTNTWAVAGVLRPFVKEIVIGNPLKIRAIAEAKIKTDKVDSRVLAELLRCSYLPVVWQPDEETQRLRRLTHRRAALVSDRTRLKNRLHSILHHTLVPLPEYELFSKRGITWLRQVPLAQEEALARESDLRLLELTELEIAELDQLLVREAWQDEKVRLVMSIPGIDYTVAQTCLAAIGEISRFPNAKKLSAYLGLNPSTRQSGPHCYHGPITKQGNAHARWLLVQAAQHLAQYRGPLGQTMRRIVKRKNRNVAVVACARKLAVLLWHVLSSGEPFRYAEPRTLQAKYSRLRIRATGRRRRGGVAKGTPRSPQYGHGRTRAVPSLPQVLAENGLPRVAPLSKGETGMLDRQKLDTFYRELQTPSRIEANTANPQVEEREEDPKSQLTQS

SEQ ID NO: 123692 - protein, 416 aa, unidentified
MSEYAALVAIDWADQQHAVCLLDPSSGKREHSIVKHTPQALQEWALSLRQRFAGPIAVGLEQSRGPLIYALLQYDFFVLYPINPATLAKYRQAFSTAHGKDDPSDADYLLDLLEHHRNRLRSWKSDDEKTRTLRLLVEQRRRLVSDRTRFSNRLTALLKGYFPQVLGWFEDIRTVLVCDFLERWPELAALQRARPDTLNKFFRSHHSTSNSTNQRRLAEIKSALPLTNDAAVMTSSVINVKALVAQMKTVIAAISEYDRHIEALCQTHDDYHLFAALPAAGAVHAARLTAALGSDRSRWQSADELVTFAGIAPLIERSGKQFRIRWRYFCPKFFRQTFHEYAAQSIQDSFWARAYYSSQRAKGKDHHAAVRALAFKWMRVIWKCWQTRTPYNEVIYLESLRKKGSSLLKFAADHQA

SEQ ID NO: 123693 - protein, 337 aa, unidentified
MTLYCGIDLHSNNSVVAVLDEQDRTVYEKRLPNDLETITEVLRIYQTELAACVVESTYNWYWLVDGLMDAGFPVRLAHTSALPEYSGLKYSNDFSDARYLAHLVRLGLLPTGYIYPKEERALRDLLRRRLLLVRQRSLHHVSLQSLIARHSGQRLNTLQIKQLTKEQLADYLQGHALLGGEITHQARCWLESAIQRIERELQHHIKPREDYQLLQSMSGVGPVLGTTIALETGTIERFASPGNYASYARCVKSEKISNKKRKGQGNKKNGNKYLAWAFMEAGHYGAIWDPRIKRFYQRKKAKAHILVAKKAVANKLARACYHMLKRGEEFDVTRAFS

SEQ ID NO: 123694 - protein, 452 aa, unidentified
MREEKISMSVVNPHAAGIDVGSRSHWVAIGQGAGDFKEFGVYNEDLYRISAWLKENEIETVAMESTGTYWQSLFSVLISEGLQVILCNGKFTKNVKGKKTDILDCQWIQKLHSIGLLSGSFLPDDATEHLRTLCRHRSNLLDAAASTSKKMQKYLRLLNLRLDVVVNDVCGQTGLSIIRAICGGETDPDKLSSFRHPNCRKSAEEIAKALQTNGRKDYLFALKQELEMYEMFQLKIQQCDIEIEKRLTDTIDNNPDKKQHFIEKNPYKKINKNTPKNIDLNLFSYQYFEGVDLMAIEGLSHSTILSLMSEVGLEGIRQFPSAKHFASWLRLAPNNKISGGKVLSSRIPKGSNRLKIALRSAANAIGNLKDSTPLSDFFKRINFRKGRVSAISATARKLAVIIWNMVVKGIPYKNPEGYMYLDEKRKLGVVKRIRKQIEKYGVTSEDLSFITT

SEQ ID NO: 123695 - protein, 309 aa, unidentified
MFHFTTLFIGMDVHKESFLLCYYDMMANQFKHSTKVGPNVSYIVNYVNELRRLYGQDAEVLCGYEAGCLGFTLYHQLQAHGIPCIVMAPTTVMKEGSKRVKTDKKDAAQLAKALAFRSYRPVHIPTAEDEQVKEYIRMRTDHKVALKKIKQQLLAFCLRHDFRYTEGRNNWTQKHVRWLHSLNPKGLYAEILTEYLLTYEKLVDQIARYDARIEQLGQSDSYQEEVSQLSCFIGVKTLTALSIVTEIGDFNRFATAQHSASYLGLTPSENSSGDKERRGAITKAGNSHVRRLLIEAAQSLAKGTIGYKS

SEQ ID NO: 123696 - protein, 397 aa, unidentified
MIAVGIDISKAKSTVAVIDSDGTVLASPFTMAHTQPEMESFVTYLKGLGEPTTILMEYTGHYHYPVLKKLQDEGFPVCIVNPYQMKKYGDVEIHKAKTDKKDALRIAAYALEKSYKLVPYSSMEQKYEDLKFLSRQYSQRITYVAKLKVQLIALLDQTMPGITRILPLNSRNPEKCALLLFIKRFKSFDEIQRIGKARFLASYDVLAKKTSERSASSKGLSIYELAVDSITTRGEDPYIWLSQNQCVDLLSATQNAADEIISQMRNIAETIPEYKVLRAMHGVGDRLGPIILAEIGDVHRFHSGKALNSYAGNDAPPYQSGQFESRNRHISKRGSSALRKACYEVMQALKLTKPQDDPVYLFMLKKEQEGKPFNVAKMAGVNKFLRIYYARAMELYK

SEQ ID NO: 123697 - protein, 344 aa, unidentified
MQHYVGLDVSVKETSVCIVDKAGKVIREVKVATKPAAILAVLTEEALAIERIGLEAGPLSQWLYGALAEAGLPVICVETRHMKAALSAQINKSDRNDARGIAQMMRVGLYQPVHVKTLASQKRRMLLTSRQLLQAKALDIENDLRGTLRNFGLKVGMVGTVKFEARIRELVADHPDLAAIVKPLLIARRVLREQLGVLHRQLLEIVRHDEVCRRLMTTPGVGPVVALTFRATVDVPSRFTSSKAVGAAFGLTPHRQQSGEIDRMGGISKCGDAMMRKMLFEAALVLMTHSRKWSWLKAWGMKIARHRGMKRAIVAVARRLAVIMHRMWVDGTEFRWSRQEAAAA

SEQ ID NO: 123698 - protein, 415 aa, unidentified
MGMRVLYARCAGLDVHKAIIVACVLLSASSAKTSKQVRTFATTTAGLQELAAWLASQGVSHVAMESTGIYWRPVFNLLEGRFEVILVNAQHMKAVPGHKTDIKDSEWIADLLRHGLLSASFIPPKAIRDLRDLVRARKTLVRQRAQAITRVQKVLETANIKLSSVATDVLGKSGRDMLEAMLSGVSDAESLAELARGRLRKKLPALREALEGRVEATHRVLLRQLLEQIDFLQGQIDALSADIDHLLRPYEPLLARLMQITGIGRLAASAILAEIGTDMSRFPSAKHLASWAGVAPGNKQSGGKRLKAHTNKGNTHLRAVLAEVVWVISHTHDTYLSAQYHRLARRIGKKKAIVAVSHSVLVIIYHLLRDEQDYHDLGPHFFATLDSTRQRDSAVRRLQALGYQVTLEELKEVRG

SEQ ID NO: 123699 - protein, 411 aa, unidentified
MMEVMFDRVAGLDVGKDSVTVCVRTPGPRGGRRSETRTFKTMFGSLRVMRDWLVEAGVSIAAMESTSTYWKPPFYCLEEVMVVWLLNAAHMKAVPGRKSDVRDAEWIAQLLEHGLLAPSFVPPPEIRRLRMLTRYRVQLMGDRRRDLVRLELMLEDASIKLSSVASSLKTVSARAILTAMINGESDPVRLADMAKGKMRRKIPDLAQALTGHFDANHARLARSMLRRLDLVEQALAELDAVIAEACQPWRHQIELLQTIPGVGPKVAETIVAETGADMTRFPTAAHLAAWAGVAPAMNESAGRQSPAGKRHGNKWLTAMLVEAAGSVGRMHGKNYLAAQHARLTRRRGMGRAQVAVAHSILVASYWMLKRDEPYHDLGADWHSRRSDEAHTRRLIAQLEHLGHTVIIDPAA

SEQ ID NO: 123700 - protein, 335 aa, unidentified
MEQRYVGIDFHRRRSVIVHKDAAGTVLETVHLDNDREAFARELAKAGEHPEVVLEACYGWYWLADFLEELGANLHLAHPLGNNWGHRRVKNDERDAEDLVDLLRLGRLAEAYIAPPELRELREIVRYRAKLVGLRSALKSQVHSVLAKEGVAVPMTDLFGTAGQDLLNIARLGRAYGIRVESLRDLISAYDKEIAMLEGEVDRWLAGDKGYLAIQAIPGVGPVLGAVFCAEIGDVSRFSSPDKLACWAGLTPRHRESDVHVVRGPITKQGSRLVRWAAVEAAQRRAGFQAERFERIAERRDSNKIARVALARHILTLVYFGLRDGEIRCLAEAIR

SEQ ID NO: 123701 - protein, 435 aa, unidentified
MEEVTDEPLYRDRVCGIDIGKAQIAATIRVPSEKNPARRASETREFATTKRGVLALADWLRCWQVPAAVMEATGDYWKPVFYRLEAEGFECVLADAKQVKNLPGRPKRDPSDSRWLAQCFERGAIRSCFVPDPEFRVIRLHTRYRRDLTDERTREKNRTEKLLESAAIKLSSVVTDLHGVTGRDIMDHLIAGERNPKVLAQLARARARRKITELEHALDGAEFFTAGHAALLRTMLERIDRLTADIARLTEVIEHLLAPHEEQLAQAESMPGWGRRSAQDAVAETGVDMTKFPTGGHLSSWAGKTPLDHQSGKRAGRARHKKGNKYLAAVTGETAVAAGKTATREGARYRKLARSRGKGKAQVAVGNTQLRVYHKLLSNPGMRYQDLGPDYYQRQAALRRKIAYHVREIEALGLEVTLARIPEPDPDGPASTQAA

SEQ ID NO: 123702 - protein, 392 aa, unidentified
MLFVGIDVAKSKHDCCIIDSDGVIITDSLRISNTKEGFDILYTTILSAIDSNDFSKVKIGLESTGHYSTNITNYLYSKGFSITVLNPLVTNAFRKAGTLRKTKTDKCDAKVIATMLFSDESKSYSPSSYQIQELKSLTRHRYRMVGYRSKLKLSVTRLIDIIFPELPDFVWSIHQASCYQLLLELPSPEAVSTCHLTHLTNVISKASRGKYDREKAIQLRELAAKSIGTSNRSLTFELQQTIRLIQSVQSEIDTLDKQIKLVVDELNTPLVTIPGIAYTIAAIILAEIGDINNFSSPAKLLAFAGMEPSTYQSGKYNASKTPMVKRGSTYLRWAIMQAARLVSMRDATFATYMAKKRSEGKHFSVAQSHVGKKLIRVIYSLLKNNTTYVSQM

SEQ ID NO: 123703 - protein, 366 aa, unidentified
MKKTSTVQALKNDLFKGRKLTIGLDLGDRWSFYCVLDEAGQIILEQSLPTTPEAMKQTFGKIPRSLLALETGTHSPWVSRLLSELGQEVIVAHAQKVQWITKSNRKDDRHDARTLARLARVDPELLGPVRHRSAPAQLHLTVIRARAELVRARTALVNAARGLVKSYGQRLPKCGTYQVSEKLGEGLSAELREVLVPLFQEIESLNGHIKEYDERMEKLAKEVYPEVSLLKQVKGVGTQIALTYVLTIEDPHRFPKSREVGCFLGLRPGRRNSGESEPQKGISKEGDRYLRTMLVQGAHYILGPFGEDSDLRRWGHKLAERGGKNAKKRAVVAVARKLAVLLHRLWVGGEVYEPLRNSQKAMRGVA

SEQ ID NO: 123704 - protein, 329 aa, unidentified
MTNATAQQAPATLEFVGVDMAQRSFVWGVHGLHETVSASNDEAGFAALLQALEQRRIGLIVIEATGGLERALALFLLHHGLPVAVVNPRAAREFARSMGHLAKSDSIDALALAHYAQTLAAKADQAGVLFSSPSAQLLALQTLLTRRAQLLGMRTAEKNRLAGPMRTLRSSIRAVVKTLNEQIAMLDKDINATLDQHFKEQTQRFEAIKGVGPITCAALQAFMPELGRISGASAAKLSGVAPLNNDSGKARGKRHIWGGRSLVRSTLHMAMLSAVRYNPVLKAFYERLIAAGKPKNVALTACSHKLLRALNAMARTGQPWRDDLHRTAT

SEQ ID NO: 123705 - protein, 346 aa, unidentified
MAYYVGLDVSVKETSICIMDDKGVVAARTDISTDPDLITNFISKHAPDVERVVHESGILAIWLTRELEKRGVPIICIDARLAHKALSGRINKSDQGDAEGLAQLARTGWFTQVHIRSEASERVRVLIGARERLIRMRKDLEGHVRGVLKVFGVCMTSVGTGKLRRDFRDQLAAAADTDPAIALLSETFIPLHKTLCIARDALDDQVRMMARESELARRLMTVPGVGPIVALAYIATLDDEKRFRKSVDVGAFLGLTPKRHQSGEVDWSGKISKCGDCDMRRLLYSAASTLISCTRKSSRLKEWATKLAERKGHKKAAVAASRKIAVLLHCLWRNETVFEPGMGGAS

SEQ ID NO: 123706 - protein, 443 aa, unidentified
MQEKEKRSVKQILEELKAEIRSSQNTLIIAVDVGKIRHCACFVSSSGKVLRRRFFFTNTIDGFNNLMRQTKFYQNKEKLPHALFGMEPSGYYWIHLYEDLVIREKTVVTVSPLAVNRNRETINVSKDKSDPKDAYNIADLMKQGKFYLPIYRDKEIRELKRFSNIYYRLIGQRASLRCRLRGAVGYIFPELEHYFKDILAKSTMIILKDCPFPSQIKKMGRSRFVSLLARGNPTLSRKRVAEIYELANQSVGITGEEKATLFEIKLLLDELEALQKNIAEVNARVHNIVRDRNDYHLLITIPGVGPITASSIIAEIGNITNFSSGKQLVKLAGLDLYGSESGISIHSLRHITKRGRKTLRTVLYQAAVSCIRCNAHLKACYLKLLANQPNKKKVKPKALVAIACKLLRMVYRMLTERRPFDSTYDQKLREKASLKMVKSSLLV

SEQ ID NO: 123707 - protein, 323 aa, unidentified
MPSVIGIDIAKRTFDIATQQPNGKYRTKAKLPNEVAGFEALQQWLLKHANAQAWIVMEATGAYHEALATWFHDKGYQVCVLNPAQVAYYARSQLQRVKTDKVDAKLIAEYGERHQGDLRAWQPEPPAVRRLKALVRRLEDLQEIQQMERNRLDLADASVQASIYSVLHHVERQIGETLRAIRDHIDDDPDLRNKRDLLTSIDGIGERSAALLLAELGDPLRFASSRAITAYAGLNPRLQESGSYKGQTRISRTGSSRLRAGLYMPAVCSLTHNPAISALRERLSAKGKSGKQIVCAAMRKLLHIAYGVLKSGQRFDPQLALAR

SEQ ID NO: 123708 - protein, 379 aa, unidentified
MRNDSTVYVGLDLHKDSITVAYAIDAGEVELLGKTGTTGADIDRLCTRLQSKAPHVRVVYEAGPCGYGLYRQLVQKGFDCMVCAPSLIPRKPGERVKTDRRDAIKLARSLRADDLSAVYVPGIEDEAFRDLARAWAAAREDLRRARHRLKSFLLAHGVRYTGSANWGEAHRRWLGRCSFPSAWQHLAFDEHRRTIEDRLAQCARLETALREAVISWRFYPVVLALQAMRGVQFVTAVGMVSEVGDLSRFEHPRQLMAWLGVTPSEHSSGGKRRQGSITKTGNSYARRLLVEAAWSYRHPARVSPEIQARLEGLPKAIIDRAWDAQVRLCRRFRRLTARGKPINITVVAIARELAAFIWDISRLAMSLAIPRSKLLAACV

SEQ ID NO: 123709 - protein, 449 aa, unidentified
MSTLNSAEKKRPSYAAHIGLDWADQKHFWTMLTDEGKRTRGELKHTPEAIEVWAVELARTFGGRPIALALEQVRGALVAVLSKYAHVHLFPLHPTKLAHYRLSVCPSGAKGDPSDADLILDYLVKHPERLHCLEPDTLETRSLQFLVEERRKLVNQHTCQLLILIYWLKQIFPQMLEWFDNLSTPLVGDLLERWPQLPKLQKASAKTLRKFFDQHNCRSEDRIQQRLEEIAQAVPATTDAALLRTGDLCVRLSLQLLASLRAGIAEFDTQIEAIYQTHPDRFITASLPGAGPALEPRLLAALGTNRERFASASNMACCFGIAPVTESSGKSRWVHWRWACSKFVRQTLHEWANCSIRTCGWAREHYDKQRLKGKGHHASVRSVAFKWIRILFRCWRDRVPYSEQRYLEALRTHGATSAPAAIAAEATSVLPGTKWESCGDFSKLAKVSS

SEQ ID NO: 123710 - protein, 336 aa, unidentified
MTKMLYAGIDVSKDKLDVAIASSKEKILLTAIFDNNLTGYRKLKSWSKKHSKSYDEIHFCMESTGIYHEEIAEFLQEEHFVVSVINPAQSKAFAESRLCRTKTDKVDAGILAHYCLLHQPEEMIKLPDDVKKLKRLMRFLNTQIEARAKEKTRLHSIKDEDVAHVLKGTISFLSDSIAKTQNLIKNHLKNSPELERKAKLLKTIPSIGEKTTWEILAEIHIEDGKNVNVKAQVAHAGLAPKDHLSGSSIRGKSKICKKGNANLRKALYMPAVNGITHNPILFGFYHRLLSRGKLKKVALVAAMRKLLAIAIGVLRNNQPFQVDWAEQKKATFALST

SEQ ID NO: 123711 - protein, 408 aa, unidentified
MTATNQFAAHVGLDWADKKHDVCVQFKNGERTFHVIEHTPEALDVWLTELHQKVKGRIAIAVELKKGPVVYALQKYPFITVFPVHALSLARYRQAFSPSGAKDDPQDAELALELMLRYPQKIKAIEPDNADIRLLQQLVEQRRQLVADKRRFVNRIINTLKQYYPQPLEWFSHRGSLLLCELIIRWPSLQQLKRARRDTIRNFLNAKGGRAMALTEQRVASIDNAILLTTDPSVIEANALMATALATQFKVVSEIIKTYDERIEALFDTLPDAELFKSLPGMGPRMLAALGDNRDRFNSAEEIQNYAGIAPVTERSGQKSWVHRRWQCTKFVRQTFVEWAAKTVNSSYWARLYYQGLREKGKSHQYAIRALAFKWIRIIYRCWKTRTQYDEAKYLLALEARHSPLLKP

SEQ ID NO: 123712 - protein, 395 aa, unidentified
MFIVGIDIAKRSHEAIIIAEDGQVVRKAFSFRNNCTGYNLLLEQVRRLTLVKSQIVFAMESTAHYWLALYARLLKDGYTVMVLNPIQSHSLRELYIRKTKTDARDSLIIADLVRFGRCKASNVPQDKILALRELCRSRAYLVDMAADLKRKLIALLDRIFPEYESLFDSVFSKASIAVLSKYSTPQKVKNANLRKLTDLLMESSNGHFGEWKAHQLKEAACSSFGIDDSGGVYSTLLGMFLEQILSLTAQADSLEKQISVFFQEFNNPLTSIPGVGTVLAATILSEIGDITRFSSADKLLAYAGLDPSVKQSGEFKSNQNRMSKRGSPYLRRAIWLASTVAVHRDPMFQTYYEKKISEGLHYMNVIGHVSRKMTAVIFAVLRDGQPYQPILQSAG

SEQ ID NO: 123713 - protein, 330 aa, unidentified
MHCIGVDVSKQELVTFDGMKERIFPNTSGLTEFGRFLKRSQDVLVVFEPTSTYSRRLEALCRTRRVSCCQLNPRVVPHLRLVGKGRSKTDSTDAELLYRYGIERGHREAALLESDALAESIQARLACYRVDQKARVAYQNVLEALSQDPATSRELLSELSAEISELKSKEKQHLDAAQQLVEGDEETSQRLGALLSIPGVGPITALTLLALFRKYPDANRSQIVALAGFDPIRIQSGTSVHGKSRISKRGNREVRKRLFEATLSAARYNPSIRSIYRRLKEAGKPEKVARIAAARKLLLIAHAIYKSGDPFRDPGSGVPEELPSYSDASE

SEQ ID NO: 123714 - protein, 340 aa, unidentified
MEGLYAGSDLHGNSNFLGIIDAQGKRVFKKKMPNELALIRETLQPFQGELLGIAVESTYNWYWLVDGLMEAGYRVQLANPSAIQQYSGMKHSDDRHDAFWLAEMLRLGILPEGYIYPKEERPVRDLLRKRGHLVKLRTSLIISLQNILSRNLGRKVNVNDVKAVKEDRISVLLEMDEDLALAGRVSKEAIDHLTRQIHKIEWVVQKRIVLKEPYRYLLTLPGVGKILSLTIMLETGPISRFETVGDYVSYCRKVPSQWMSNGKWKGAGNRKNGNKYLAWAYSEASEFARQLHPEPRAYYNRKMQKTNVACAHSALAHKLARAAYYIMKDHVPFRPEKLFG

SEQ ID NO: 123715 - protein, 354 aa, unidentified
MSQTLNAAIAVIGIDIGKNSFHIVGHDESGAIVLRQKWSRGQVEARFANLPPCLIGMEACVGAHHLSRKLNSLGHDARLMPAKYVRPYSKGQKNDFRDAEAIAEAVQRPTMKFVATKTADQLDLQALHRVRERLISQRTGIINQIRAFLLERGIAVRQGQRFLRAELPRILATPPDVLSPRMVRVIEDLAGDWHHLDERIEGLSEEIVGLARADASCERLMSVPGIGPIISSAMVAAIGAGDAFSKGRDFAAWLGLVPKQKSTGDRTILGKISKRGNRYLRVLFVQAAWVVLIKPKIWERHGLKPWIEAAKKRLHHNVLAIALANKLARIAWSVLARGRAFEVRKIDAAANQSA

SEQ ID NO: 123716 - protein, 380 aa, unidentified
MDRTAPETKVTTKSGGKLYMSLELSKASWKLAFSDGGQRVRTTAVPGGEIGAVLKMVASAKAKFKLAENVPTLSCYEAGRDGFWIHRALTAAGIGNVVVDAASIEVDRRQRRAKTDRIDAQKLVQQLVRHDERGDRLRVVRVPTPEDEDARRPGRELERLKKERTGHTTRVIALLALHGISGVKVRRGFGKLVRAMRGPSGEPLPAQLTAELAREAERLEVVRTQIRELETARVGALTKPTKAARMATSLMLLRAVGVNSATVLAYEFFSWREFKNGKQVGASAGMTGVPYDSGGTEREQGISKAGNRRVRALAIELAWGWLRYQPGAHLSHWYMERFGRGSSRARRVGIVALARKLLVALWRYVDQGIVPDGARMKTET

SEQ ID NO: 123717 - protein, 402 aa, unidentified
MYVGSDWASETHDITVLSVDGEVVIDRWALGHDAVGIDAAIERLGGHGRPEDLPVAIETTTGLVVDRLLAAGHPVVPVHPNAFNAARPRWGASRAKSDPGDSWKLADYLRTDGHRLRRLEPLDAATTEVRALSRMRDDHVEAKVAATNQLNALLARHWPGATTIFGRLDCEIALAFLDDYPTPASAARLGEARLKLFCRRHSYCGRRSPAELLERLRSAPAATNAVSGEVLAELIQAQVRLLRCVLRTIADLDRAIGACLLGHAKAQLLAPMPRIGEVNLAQIVGEVGPVLQRAVDVEHACAEVGATPVTKESGKGRAVNFRWAVNTKARKTLATFADNSRHASPWAAQLYADARARGKRHPHAIRILMRAWMRVIWACWHSDTAYDPARHGAEHRLANNAA

SEQ ID NO: 123718 - protein, 443 aa, unidentified
MQITCGIDWASDHHDVALLDQDGTLVAKRRVNDDAQGYQQLLDLLADAGDNPQAPIPVAIETPRGLFVACLRASGRPVHAINPLSASRYRERRRVTRAKSDHADAVMLANILRTDAHEHPPLPADTEQARAITVLARAQQDAVWRRTNLVNELRSHLHQYYPAALEAFTGRDEGLHHVDALGLLAAAPGPRAAARLTHARIVAALRRGGRVRYVEHRARQLHEILRREHLHQPPLIEEAMAHQTKALLAQLRVACDAARDLEQATVNAFDAHPDAGIYRSLPGVGDLIGPRLLAEIGDDRTRFADARALKAYAGSSPVTIASGKTHRVRHRKVKNRRLNAVGYPWAMAAIHTPGPRAHYDRRRTTGDLHTAALRNTYNRLLGCLHHCLRTGSAYDDALAFSSGTPVVGDQGAVDASASQLEPQVPRAPGPSGALLRLPHSAGV

SEQ ID NO: 123719 - protein, 400 aa, unidentified
MAVMIGIDPHKGSHTAVAVGAAEEPLGTLRVRACPDQAGTLVAWARAWPERTWAVEGARGLGGLLAQQLVAAGERVLDVQPKLAARVRLLHTGNTSKNDPNDARSVAVAALRSMARQEVVIADGHARVLKMWAKRHRDLSRARNQAVCRLHAVLCDLIPGGVPEEITAGQAARLLGQISPSGPVAQARCELAAELLADIRHLDARRREARTKLAAAVKASGTSLTEVFGVGPVIAATVIGDVVTVARFPTRDHFAACNGTAPAGVSSGERKIYRLSLRGNRRLNHAIHMAAITQIRHKHSDGRAYYERKIAQGKTHKEALRRLKRRISDAIYARLRADARIAGPGGQPGNHSVSRAAGSHPERQLFGQATPGPQTTLRATAAPTPAMPPEPPADNTRQAT

SEQ ID NO: 123720 - protein, 334 aa, unidentified
MEAYNMQTILHNCCGLDVHKDSIVACILKTSDFSCDSSNEENTKSEIRVFETFPNSLKELKSWLESEDCHHVAMESTGVYWCPVYEVLERAFDGNIELLVVNARHMHNVPGKKSDIKDAEWIAILLRGGLLAASFIPPVEVRELRQLARYRKNIVEDIGTQKNRIEKTLQMAGIKLSTFLTDVFGVSGRNLISVLIKKGYISQVDVEIETKRISREKKDAIKRVINNKLTTHQREFLRMQLTFLDEMLSHLETIEKSIAELSAQFQDDIDRLDTIPGIATTAATAIIAEIGTDMSKFPTAERFCSWAGVTPGSSMSAGKKKTTASHKVTHTSKV

SEQ ID NO: 123721 - protein, 342 aa, unidentified
MKEVSIVGLDLAKRVFQVHAAGSDGSVVLRRKLSRSHVLAFFTELPKCIVAMEACATAHYWAREIGKLGHDVRLIPPAYVKPFVKRQKNDAADAEAIVEAATRPSMRFVASKTESQQACSMIFRTRDLFVRQRTQLINALRAHLAEHGVIAPQGTANLPLLTQIIEEDRSGLELIVVETARLYLEQIEALSSRIIGLEKALKSEAKRSENTARLMSMPGMGPITAMAIEAFAPTMTTFRKSRDFAAWLGLVPRQHSSGGKQVLGRTSKMGQRDIRRLLIIGAMTVIRWACRKAPPENSWLARMLARKPRMLVAIALANKMARTIWAMMTKNEIYRNSSPAAA

SEQ ID NO: 123722 - protein, 423 aa, unidentified
MEVLHERVAGLDVHKDNVVACVRIMCAGKAKRECRTFDTTTAGLEALRDWLTSCECTLAAMEATGVYWMPVWKILAEGAFAVIVANARHLKAVPGRKTDVNDATWIADLAAFGLIRGSFVPDEELHELRTLMRTRKQLVREQTSHVQRLQKTLTEANIRLDSVISDIMGVNGRRIMEAMIAGVRDPRKLAALGDQRLKATPKELYDALHGRLTEHHRFLLKLHIAQHDALEATIRSLDVEAEKRVARLDRQVKAGNAPFSELIKLLASVPGVKQLSGTAILSEIGFDMSRFPTAGHLLSWTGLCPGQNESAGKRKRSRLRKGAPWLKSMLIQCAWAAKRKKDSYYRAQFFRLQARRGPQKAICAVAASILTAIYHILKNGVPHEDLGIDYFDKRKPEAKVKRLVAQLAKLGFEASLTPLANAS

SEQ ID NO: 123723 - protein, 325 aa, unidentified
MEKVFIGIDISKLTLDIYVKSYSSAQHYQIENNTKAIAKFFKSFNNTSNIIVAMENTGRYNFILYAVLSTMNFSLYVLNPLHLKRSIGLLRGKNDKLESQRICGFIEKYYMDLEPWKSSTLAIQKLSVLRAERRHRIKIKSGLMAQQKDKELLKDIVDKEMIKLNKAMITLIDKQIKVIEEKMMSIINASIELKDQYQRLQSIPGVGKVLATLMIIKTKGFTDIKSARKMACYSGIAPFEHQSGSSIYYKPRVSTMADMELKKILHLAAMSAIRLKNDLAVYYHRKVQEGKNKMAVLNAVRNKIIHRIYAIIKNNSVYENNLLLS

SEQ ID NO: 123724 - protein, 338 aa, unidentified
MRLYCGIDLHSNNALTKVLDEGDRTVYSKRLPNDLGLIVSALEPYRPDLVGIAVESTFNWYWLVDGLMEWGYRVHLANPSAMRQYEGLKYTDDSSDAGWLARLLRLGLLPEGYIYPKEDRPLRDLLRKRIHLVRQRTANLLSLQNILHRNTGRRLSGRALMSLDLEAVRAELGAGNLMMSVESTLQVLRCLDEQARRVEQEVLGQVRPDPVFRLLKTIPGVGEILATTIRLETGQIGRFASTGRYVSYCRAVGSQKLSNGKFKGQGNRKNGNAYLAWAWLEAANFGIRHHEMVRGWYQRKLSRTHRVVALKAVAHKLARAGYHVMRDGVPFEMPLAFG

SEQ ID NO: 123725 - protein, 388 aa, unidentified
MLLDHPSDGPTAIHTQFGAIFVSLELSRSNWLITSLSPGKGEKMSKHSVTAGNVAGLSALFAELKRKAEVRTGQGYPIITIQEAGLDGFWLHRVLQQQGIESHVVDPASIAMPRRRRRAKTDRLDGETLLRALLAYKRGEPRVCAMVVAPSPEEEDRRRLCRERRTLIEERVTHGNRIKGLLFAQGIFDFAPMRRDRRARLEALRTGDGRELPPHLKAQVGRELDRIELLLGQIKTVEAAQDALLAAARKPASEDAAPDPVTMLLALKAVGANFAAVLWSEAFYRQFANRRQVAAYAGLAATPWQSGGVRHEQGVSKAGNPRLRTTMIQFAWLWIRHQPQSALTRWFKERSPQGRKRAIVALARKLLVALWKYVTQGVVIEGAVMKPA

SEQ ID NO: 123726 - protein, 429 aa, unidentified
MEEVDEVELMVQRVAALDLGKATLEACMRVPHPSKPGRRMQEIRGYATTTAALLEMAIWLRQWGIERVVMESTSDYWKGVYYLLEAEGFDCWLVNAREVKNVPGRAKTDRADAVWLAKVAERGMCRPSLVHPPPIRRLRDLTRYRRALVSDRSREMQRVEKLLEDAQIKISSVLSDIHGVSGRAMMEALIAGQRDPWSLARLAKGNARKKTDRLEEALRGFFTDHHATILQMMLDNIDRISAQIAALDARIAETIGPFSRQAAQLADIPGIDTVAAAELIAEIGVDMTRFPTAAHLVSWAKFCPQTHQSAGKSRSKARGKGNPWLAGTLGRIVFSASHTDTFLGARYRRLARRRSKPKAIVAVGNSVLTVVYHLLSDADLSFFELGPAHYESRINKHRRARDLATQLQALTGQHIVIRDGKAIITDAAA

SEQ ID NO: 123727 - protein, 312 aa, unidentified
MEAKVIGIDVSKLKLDFDCLPVSAPQQFGNDAEGIGALVELVKGSGAERIIIEATGGYETAVVSALVVAKLPVVVVNPRQVRDFAKAIGRLAKTDRLDAGLLALFGERIMPALRPLPDEAQRALGDLLDRRTQLVAMRAQEKARLASVTPIARKNVLQHIVWLDKCIAKLDHDLEERLRKSPVWCEKVALLGSAPGVGQVTTFALLARLPELGQLNRQAIAALVGLAPFNDDSGIRRGARYIRGGRADVRCAMYMATLSAIKHNEPIKAMYERLTAAGKPFKLAMTACMRKLLTILNAMLKRNQKWKIQHSS

SEQ ID NO: 123728 - protein, 411 aa, unidentified
MEQIHGRVAGLDVHRDQVAVCVRTPGPRGGVQTQKARFDTTTGGLAALAEWLAGRAVTLAAMEATGVYWKPVYYALEDRFLVWLCNAHHVKNVPGRKTDMSDAEWLADVAAHGMVRPSFVPPPPVRELRELTRYRKTQADARAAEIARLEKVLQDAGIKLTSVASKVLTQSGRAMVEALIAGERDPAALAELAKGKLRPKIPQLTAALHGHFGAHHAIAASRILAHLDFLDQTIAALSGQIAARVAARYQSAARLLAEVPGLERASVEVIIAETGADMSCFPSPAHLASWAGLCPGNHESAGKRRKVATTPGNPWLRRTMIESARAAARAKDSYFGAQYRQIARRRGPNKAAVAVAHSLLDVIWHMLTTGEVFTDLGAGYFTSRQDKEHQTRRLVSQLEKLGYTVQLAAAT

SEQ ID NO: 123729 - protein, 394 aa, unidentified
MKLVGIDVGKNSHHFCVMDKETGEFNVAPSSFSNNKEGFDFLINSLKPYSKKSILIGMEDTGHYHVALLKFLLSNGYPVALISPKTTDLTRKMEGGITKNDKLDTITICDVLDTPERKKQYRITKVDRFDLYEQRQLTRHHHNLKEELNVYCNRLQKSIDLVFPEFNTLFSSKYSIVYMNLLKTFGSAEAIASTDIRTIRKCFEIKGRGNRISLTPEKLKECAKNSIGISSEVETIQIKHLVSQITLIKEQIAEIDKKIEEFSITNNSPILSIPGISHFSGTSILAELGDIGNYSKPSQIIKFAGVAPYHYESSQYNAQHTGITKKGSKYLRKTLYQIILTVINNNPVFKKYYLLKISQGKGHRCAQGHCIRKLLRIIYHLLETGQSFDPALLR

SEQ ID NO: 123730 - protein, 353 aa, unidentified
MSQTLGTVAVIGIDIGKNSFHVVGLDGRGAIVLRQKWSRGQIEARLANTRPCLIGMEACVGAHHLSRKLQLCGHDARLMPAKYVRPYSKGQKNDFRDAEAIAEAVQRPTMKFVAIKTADQLDLQALHRVRGRLVSQRTGIINQIRAFLLERGVAVRQGLRFLRTELPIILATRSDVLSPRMMRMIEALAGDWRRLDERIEGLSNEIEAVAYHDPACERLMTVPGIGPIISSAMVAAIGNGAVFTKGRDFGAWLGLVPKQISTGDRTILGAISRHGNRYLRALFVQAAWVVLIRIKDWDRYGLKAWIDAAKKRLHHNVLAIALANKLARIAWAVLRKECAFECMKTRAMASRPA

SEQ ID NO: 123731 - protein, 359 aa, unidentified
MLKYSVGLDISAKTIHACISVIDAAQKVTVKSSCKIDNTLSGFKQLDQWVNKHHRQKDVPLVVNMEATGVYYENCALYLFKEGYSVTVLLPNKAKKWLQSEGLKSKNDKIDAQGLSKMGAEKALELWEPAAEYYYQLRAMTRQQQSLQEFKTAVNNQLHAEEHGMYKNKMVIRQLKQQIKFIEKQIADLETAIEAHIAADEEVAAKVENICKIKGLGIQTVAVIIAETNGFVLFKNAPQLVSYAGYDVIESQSGDHIGKTKISKKGNSRIRRILFMPAFNMVRYNQTPFVDLYKRTFEKHGLKMKSYVAIQKKLLVLIYALWKNNTAYDIDYKNKYTRELEQALPPGLASIEARLADVV

SEQ ID NO: 123732 - protein, 347 aa, unidentified
MLHAGLDLSRKKLDVCLLSDRGEHLDQLAVPPDVDSLRRLARRIEEVHCQPVCAVIESMTGARIVHDTLEQQGWSVEIADAQKVKGLAPLACKTDKIDSMVLAVLSHRDLVPAIWLPDPSVREERELARFRLHLVKHKSALKNRIHSTLINFGKPCPVTDLFGVEGRRLLKRLEVPEPWRGNITACIELIDDLERQISEINRRLKEGHAEHPYVPLLLTVPGIGWVLAFTIAAEIGEIERFSSPEKFAGYTGLCPRVNQSGEKDRRGPLTKHGPTYLRWALLEATMHALRHPAYAERYERTKRRLGKQRGAKVAQVDIARRLSHAIWHMLSRKEKFAPRGAAFRLAA

SEQ ID NO: 123733 - protein, 365 aa, unidentified
MSIIHWIGIDDHADKWTIACFSGWEEKAGRQFEVVPNEGGYRKLISFAKGLDGEVRIAYEAGPCGYELQRRLTKAGLNCQVAAPSLTPRKPGERVKTNRRDAVKIARCNRSGDLTMIAIPDQGRESLRDLVRGRSAVQADLVSIRNQITKLVLRYGHRYRDGQAWTGRFWVWLRKIELSGYSQTVLEEMLLTHEHRFEQLARYDSEIELASKKPEYAPYVAGLSVLRGINTLSAMTLLSELGDLRRFPTAPQLMAAVGLVPSEYSTGDKTNRFSITKTGNAHVRHIVVEAAWQYQRRITNGARIKARRKGQPKALVDIAEKCDLRLHRKFIRMTSRGKRSTVAAVAVARELVGFIWALGQELNLT

SEQ ID NO: 123734 - protein, 421 aa, unidentified
MKNTAARKRKQVPEGYLIIGVDPHKKKHAAVAITQDFTLRDRFKFDNTREGLEFLLRRVKAEMVKSNCRGVMFAIETGGHYWRNVAYYLDERGIPFRFINQYTLKRRREGKDLNRRKNDYRDSEVAAQLLCTGEFVESVIPQGVYAELRTAHNAYRRLVKERTRIINLVKGLLDGLFPEFTHVFKDPCGLTALSVLSTCSIPGVIARMTEDEFVATIETRHRGRLMRKKLMALHYAARSSIGIAAGAKSLSSEISFLVEKLELIRGHICVIERTLVKLVDEAEEGKYLLSIRGLNYIAVAGLLAELGCFKSYRSAKQMIKMAGSNPTESESAGKKKSRTPMSKQGRPVLRYCAWTSVIPMLRFNSDFRAWAKQRRERPAHANPLGGREIVGAALNRLLRLSFALVKNRTYYRSPQLVQVTS

SEQ ID NO: 123735 - protein, 345 aa, unidentified
MNQISIVGIDLAKHVFQLHAADERGNKVFSKTVQRDQLRLTLAQLPPCRVAMEACGSAHYWAREIQALGHETELLPPQSVKPFVLGHKNDARDAAAIAEAAARPATPRVAIKTQAQQALQALHRVRSRLIRDRTATGNELRGLMSEFGLIVSQGHAVMRQGDVRELLDTQHEHLGDELHLLLTDLLGQWLELDTRVNHYDKRIQALAKASEQAQQLMSLPGIGPINATLLISHIGDPARFPNGRQFSASLGLVPRQYSSGGHVRLKGITKRGNGDVRRQLVHGARAALRQFQRQEHPDRLARWACALASRVGQRKAIVALANKLARICWSLLAKGQHYQPEGHAV

SEQ ID NO: 123736 - protein, 312 aa, unidentified
MNKIICGVDVSSDWLDARIGRDGAYERFANAPEGIDALYNWCRQASVDLAAVEATGGYERAIFTGLWARGIPVAILNPRAVRRFAEGMGLLEKTDRIDAGVIAWFAETKRVEPAKPASETQERLEALVTRLRQVTDLKLVQTNQRRLVSEPTVVKSFEDILALLARQIRELEAEIANLIDGDPLWRKLDEAFRSIKGVADRTVARLMAELPEIGTLSGKSVSKLTGVAPLARDSGKTTGKRPVRGGRPGIRSILFVVADIVRRYDDDFKAFHKRLSDAGKPKKVIRIALAHKLLVRLNAKARDARAEFGFTT

SEQ ID NO: 123737 - protein, 418 aa, unidentified
MRNSWTPYKFTFGGTRMYNAVGIDVSKGKSTVAVLQPAGVIIRKPFNVNHTSSELDELAKYIGSLEGETRVVLECTGRYHEPVVKTLSEAGLFVSAVNPHLIKNFGNNSIRKVKSDPADAKKIARYTLDNWIELRQYSSMDNTRTQLKTLNSQFSFFMKQKVAAKANLIALLDNTYPGINKLFDSPVRDDGSEKWVDYAYSFWHVDCVRKIGLKTFTERYQAFCKKHHYNFQPAKPAELFLASKDLIAVFPKEASYKLLIQQSIQQLNLASSHVEELRSKMNELASTLPEYTTVMGMYGVGKTFGPQLIAEIGDISNFSHREALTAFAGVDPGVDQSGTHNSKSNKASKCGSNRLRKTLFQIMSTLLQTAPEDDKVYQFLVKKRAEGKPYYVYMTAGANKFLRIYYGKVKECIRNLEQ

SEQ ID NO: 123738 - protein, 343 aa, unidentified
MSYPYALGIDLHKRTSCWTLVDSDRQLVWSKEEVPVSRAGVEAAMAALPVPVTGLPFAIEPTCGWRWVTDLLEARGLAPHIANPYRLRLIAESRKKTDAADSRILAEFLGLGYLPESYRCSDDIERLRNLIRGRAYLVQCRASLKSRLQSMVVSRGLEPLRNRSPKALTTLAKHPDFEFHESLVLLKEYTAHISVFDKTIDKEARGNETAQVLMTMPSVGRITALAIVAEVGLFSRFPTARQLASFAGLVPSEHSSGDTIRRGAITKTGSKLLRTTIIEAALRIREESAPDLYAFYLRIKKERGAMKARTALARKMLVIMWHMVKNNTSFDPSYSTAKREDLV

SEQ ID NO: 123739 - protein, 402 aa, unidentified
MATPEQVSVWVGLDVGKETHFADVLDNDGERLFARAVANGQADLEALLDRARQHGAPGLVIDQPGSIAQLALAVAARRGTPVAYVPGLVMRRAADLYPGEAKTDRRDAYVLADTGRTRRKQVHWLDTSSDELLAQLRVLNGYDIGLATDATRLASRLRDALTSIAPVLERAVGDRLHQAGVRDLLAAYPTLTALRAASQSRIERTVKARSPRIAAKVTIAIAAALAAQDVTVPAEAATGRVIAELAAELDRVCARRGAEIEEAFLAHPFGELLATMPGIGPRTGARILAEIGDGSAFANGSKLAAYAGLAPVTRQPGTSLAAESRSLRGNHRLKNAMFLAAFASLRDPASKAFYDRKKTEGKRHNAALICLARRRCDVILAMLRTRQPYQPARPAPSLAKAA

SEQ ID NO: 123740 - protein, 352 aa, unidentified
MKTVVKQVVGIDVAQDELVVSIGKMYADFSLEIVSRATFGNKLKGFEKLILWLDPLANKAVQLRFVMEATGVYHQSFAYYLNDNGYAVSIVLPNKISNYFRTLSVKTITDKTMSDTITQFGLERNLDDWQPPKGIYRMLQQLTRERSQLTDEKVVIKNQIHAEQAEARPHKKSIERSKKRLVLIEKQIAEIESELKTLIKSDEDVKKIVLLICTIPGIGLLTAATVLGETNGFELIRNKRQLTSYAGLDVKEKQSGTSVKGKPCISKKGNKHLRKAMHLPALSAIRHDERSKALFVRLVGKHGIKMKAAVAVQRKLLEMVYTIFKTQTAYDKNYFKTQENEVIIEQEVREVK

SEQ ID NO: 123741 - protein, 313 aa, unidentified
MNERCVGIDVSKARLDVAVEEGDRFSVANDLAGHVQLSERLAAVKPRLIVMEATGGLERSVAAHLTAQELPIRVVNPRQVRQFAQAAGILAKTDQLDAEVLVRFAKAMQLTPRALPSEQVQALQALIARRSELTEMLTMERNRLRLAHQSIRPHLKKSIRWLESQLGSTDHDIGGMLRECGIWRDKVELLESVPGIARVTSLRLVTTLPELGTLNRRQISALAGVAPFNQDSGQWRGKRRIYGGRAEARTALYMAALVGSRHNPVLRAFYRRLRAAGKPAKVALIACMRKLLTIINTMLREGSAWSPRLASTA

SEQ ID NO: 123742 - protein, 412 aa, unidentified
MTLPQSEYYVGIDWASNEHAVCVLNEDGRTRCAFTVPHTAAGFAELVRRLAKFGDAESTPVAIERPDGRLVDLLLEAGHPVVPVKPNAIKAWRDAEVLSGAKSDPGDAMVIAEYLRLRHHKLSQARPLSNQTKALRTVVRTRDDVVRLRVMATNMLSALLDSFWPGAKALFADVESPIALDFLARYPTPASALGEKRMAAFCVKHHYCGRRSPAQLVERLRSAPAGVMDPDHGEAGRDAVIALVAVLRALGTVKKDLDRSVAAHLAQHPDGHIFTSLPRAGLVNAAQILAEWGDSRAAYADADAIAAFAGVAPVTRASGRMRGVSFRWACNKRLRSALTTFAGNSRHSSPWAADVYQRARARGMDHPHAVRVLARAWIRVIHRCWLTNEPYQPDRHGGLQRLSAPPATLQAV

SEQ ID NO: 123743 - protein, 347 aa, unidentified
MVTLGCDSHKQTHTLVAVDGNGRQLGSRTVAATSEGHLEAVRWARRWAQRRWALEDCRHVSRRLESDLLTAGELVLRVPPRLTGGGRRSGRELGKSDPIDAAAVARAALREPGLPLARLEGREREARLLVDHREALVKQRTQLQNRLRWHLHELAPEFKVAPGALDRQRVLDAVSRRLELHPGLVARLASELVAQIRDLTGRIKQLETEIARLMAELSPRLLELEGCGALTTAKIVGETAGVARFRSRAAYAMHSGSAPIPASSGQVQRFRLNRGGNRQLNAALYRIALTQIRPGGRGQAYLQRRLDAGATRTEARRALQRRISDEVYRRLCEDQLQLARDSASTAA

SEQ ID NO: 123744 - protein, 354 aa, unidentified
MKNQAIQYLAFDVHQATVVASLRDESGKVVLRATMATEAKVILTFVKNAGPRVHVAFEEGTQAQWLHDLLIDHAERVIVCNVRGRSETTNKSDRIDADGLSELLRLGALKPVFHGVPEILTLKELVRCYIALVEDSTRVMLRIKAIFRARAIPTPGVSVYRASQRKQWLAKLEGGARMRATLLLTQLDTLLELRPKAKAAMIAAARRQPGWKVLRSIPFLGPVRVALILAIMRTPYRFRTKRNLWPYAGLAVVTRSSADQDYKNGKLQRSRKAPITRGLNRNHNPLLKSVFKGAATAASAKPGPLGEYYGASLARGVKEDLAKVTLARKIAAVVLRLWKKGELWDPKKLTMQAT

SEQ ID NO: 123745 - protein, 328 aa, unidentified
MNSYKIIVGVDVSKNSFTATVLYDNKRESFEVKSDPVEFERKIKPYLKKFKKSDMLIIMEHTGVYHLKLANYLYENNYQVAVVNPFSIRKFMEAKMTRVKTDKTDSYFIAEYGRTFFDGELYKPKPDVEKEIEVKLKILEDLQQQLTMLKNKRESLSHVPMKRLKENLEYYDELIRKIEKSIKELEKEIKELTKKNFQEEYKLLKSIPGVSDRVIGVVIAMFGGFKRFKSVKEAASYAGLNPSPYESGTSVKKSGKIKKMGNPYARKILYMAALSAIRFNKYCRELYERLVSKGKAKKLALVAVAHKLLRQAYGVLKNRRPFDENLCT

SEQ ID NO: 123746 - protein, 411 aa, unidentified
MKLFVGLDVSSFDIKVCFLNGEGDKLNSFTVENDLPGAISLRDEILQVAQGQSVNELRIGLESTSVYSFHPSMFLHNDEFIQALGGQVFVMNPKQIANFKKSYSDMDKTDEIDAFVIADYMRFGRLPMSVVKEEQYVALQQLTRARYQIVKQITQEKQRFLQYLSYKCNTFTEDVESSVFGKAMMDLFLESYSLEELSQMPLEDLADYLRVKGRNRFPDATQVAKSIQKAARSSYRLDKVVEDSIDAILSTSITLIRTFEKQIKELDKAIERIMKGVPQTLQTIPGIGPVFAAGIIAEIGQIERFDSEEKIAKYAGLYWRKHQSGRFTADVTSLSRNGNQYLRYYLVEAANSVRRQIPEYSEYYSKKYQEVPKHQHKRALVLTARKFVRLVDALLRKNQIYTPKRSVIYEA

SEQ ID NO: 123747 - protein, 392 aa, unidentified
MLFVGIDIAKRNHEASVIAQDGHVVRKAMRFANSQAGYNKFMDMVRGLSEPVVFGMEATGHYWLTIYTHLRNDGFTVHVINPIQSDALRGMYIRKTKTDSVDSVIIADVIRFGRYCETSVEPGDLQAMRELCRQRFYVIDMASDLKRKVIALLDQVFPEYEKLFSDTFGVSSMELLSQYTTPEEMLSVSSQQLAEVLEKASRGRLGAEKAAEIQTAARNSFGIVLASSSFSLIIRQYIEQIRSLEASVDVFDAEIARLLSGFDTQLTTITGIGPTLAAVILSEIGGDIRRFSSPAKLAAYAGVDPTVKQSGDFSGTRMKMSKRGSPYLRRAIWLASTVAAFKDPAIHALYERKRAEGKDHMTVIGHICRKMISIIFAVLRDNSPYVPAVIPD

SEQ ID NO: 123748 - protein, 355 aa, unidentified
MNSIKYIGMDLHSATISTAVVNEAGKLNMEATIATEAAAVLDFIAGVQGTLHVTFEEGIHAAWLYELLLPHVAEVVVCDPRQLPRHRGENKNDKIDAQQLAQWLRLGVLKPVYHRPTGLRTLRELVRSYRTLVSDATRVMNRLKAIYRARAIAAKGARVYSPRYREGWLKQLREPGVHHRAELLYRELDLLLSLRQEAKKAMLAESRKHAAQKILLSIPTLGAVRVAVLMAVIQMPHRFRRNRKLWTYTGLGLVTRSSANYRLVEGQLTRARKPALILGLNLNHNHVLKEIFKDAAATAVSRQGPFREFYARQLATGKDPEIARVIVARKLATIVLTLWKKGERFNAEHLKPQAA

SEQ ID NO: 123749 - protein, 443 aa, unidentified
MNTSHPYDLVIGLDRSDQKADLHLITTATGQRHSVVIGTAPEALWEWLRQLRQLHPQARVGLCLEQPAVHLIAFLEAYEWITLYPINPITLQKYREAFVTSRAKDDAKDADYLADLLLTHHAKLKPWAPEDSPTRTVQQLVFHRRAVVDERTGLTNRLMALLKSYFPQALVLCGEDLWRPLATAFLLKWPSLQTVQKAKPATLKQFYYLHGSRSARLLEQRLALVQKAVPVTDEMARIKSFTLRVQLVCRQLQLVQQGVTEFDRQMAAAYAAHPDRMIFASLPGAGPVLGPRLLASMGSQRERFTAATKLQHYTGIAPVTKRSGGSCYIHRRYLCPKFHKQTFHEYAKESILWSRWAAAYYLQQRTKGSPHHTAVRALAFKWQRIIWRCWQDHKPYDEPTYEAALRRNGSDLVKLFDRVELGKSPFKKPVNNLKNSVDGLPQR

SEQ ID NO: 123750 - protein, 413 aa, unidentified
MRIVYQNVAGLDVHKKVVVAATIVLQADGRWHQEKQTFGTMTMDLLQLSDWLLGHGVTHVAMESTGEYWKPVFNILENNLEIILVNAQHSSKVPGRKTDQGDAEWLAELMQYGLLKASFIPPPGQRELRELTRYRTSFVRERSNLVNRVQKVLESANIKLASVAADIMGVSSRAMLEAIIAGNARPEEMAELAKGRMREKREALAKSMEGRVKAHHRFVLTELLCQIDSLEETIARFDREIEDYCRPFEEAVVLLDTIPGVARQTAEIIVSEIGTDMSRFPTANHLAAWAGVAPGNNESAGKRHSGKTRKGNKPLGAALTQAAQAAAHTKNTYLAAQFHRLAGRRGKKKAIVAVAHSILVIAYYLIQRKEPYHELGGDYFDRRNPEAVSKRLVKRLEKLGYQVSLQLEPVLVP

SEQ ID NO: 123751 - protein, 355 aa, unidentified
MDNAKYIGMDVHKETISIAVLDSAGKLVMESVIETKAITIVQFIRGLRGELHVTLEEGTWAAWLYDLLKPYVHEVLVCDPRKNALLKAGNKSDQIDARKLAELLYLNRLTTVYHGEHGVRALKELSRSYVTISGDAARVMTRLKAVYRSWAIPYAGKQVYAPRYRAEWLGKIREAGVRRRAEFYYQQLDELRSLRQQVRRELLAESAKHQASKLLCQIPSIGPIRAAQLIAILQTPNRFRSKRQLWAYGGLAIETHSSADHRYVDGQLRASKRPVSLRGLNRNHNHELKNIFKGAAIIAATKAGPFQEFYAALVAKGIRPEMARLTLARKIAAITLIVWKKGVSFDAQHLKPQTA

SEQ ID NO: 123752 - protein, 362 aa, unidentified
MMQSTTIIAFDQHAATTVAAVLLPGHRTPALHALTSDNVTIGRFVDRVRRRGPVQCCYEAGPCGFELQRFLTAHHVPCEVIAPALIPRRPGDRIKTDRRDAGHLAILFRAGALTAIHIPTEQEEAARDLLRCREDIRADLLRARHRLSKFLLRHGRRFTATKKAWSKRHDTWLRAQVWPLPALDHTHRAYLRTVDEAVARLRAVELDLRDLLTLEPLAARVQRLRCFRGVDDLTALTIAAELGDARRFPTAPSTMAFVGLVPSEHSSGTKRARGAITKTGNAHLRRVLVESAWHYRHHPFVGRALQFRQRGAPAAVVQRAWAAQHRLHRRYRHLAGRGKPKQHVVTAVARELTGYLWAALTQ

SEQ ID NO: 123753 - protein, 368 aa, unidentified
MGTSPPIAMLWASTHKRNINLNQDLGGAQMKAYAGIDLHSSNNYVGIIDENDQRLYQKRLPNRLEDILQALKPFKKSLEGVVVESTYNWYWMVDGLQAGGYKVHLANPSAIKQYEGLKHTDDKWDSFWLAHLKRLNILPEGYIYPKETRPVRDILRRRLLFVSHRTAHILSLQSAITRNLGYKISSRDIKKLKESDIENLFSDPFLQLTVKNNISAIRFLGEKIKDIEKAVKSYVQLKPEFKYLLTMPGIGDILGLTIMLEVGDINRFTKAGNYASYCRTVKSEKISNNKKKGKGNCKNGNKYLAWAYVEAANFAVRFYPEPQSFYQRKKSQKNGIVAIKALANKLARASYFVIRDQVPYDASKMFRS

SEQ ID NO: 123754 - protein, 360 aa, unidentified
MTLAVLTSVRRRRPLVSESYSGQQFVGIDLHRRRSVIVRMTTDGDPLECIRISNDAERLATVMARAGESPEVVLEATYGWYWAVDALREQGAQVHLAHPLGVKAFEYRRVKNDERDARDLADLLRMGRLPEAWIAPPATRELRELVRHRAKLVGMRSNCKAQIHAVLAKCGIQVSMTDLFGLAGTELLDRLELPKPYAARIASLRRIITALDFEIDAFAGQVRGRLARDPGFVAVQSIPGVGPILGAVFVAEVGDVHRFARAEELTCWAGLTPKHHESDKHVHRGRITKQGSRLVRWAAIESVQILPKTSVVGRIRDRVGDRRGRNIGVVAAARVQLEFVFYALRDHRVRALQGTRPVAA

SEQ ID NO: 123755 - protein, 320 aa, unidentified
MTSKGAEEMQNDTIGVDVSKDHLDAHRLADGASRRFANDKCGRKAFVKWCAETPIVRVVFEPTGPYHRAFERALGVAGVPFVKVNPRQARRFAEAIGKLAKTDRLDAATLARMGAMLELNARPPRSEALLKLKELHLAREALVKDRTAAKNRGKILTAPLLKRHNAQRLEQIKRHIAAIEAEILKQVQADPDLAQRFAILTSIPGLSAITAFALLIEMPELGALEPGQAASLAGLAPMARQSGRWTGRAFIRGGRVEIRQALYMPALVAARFNPDMKAKYKQLTRAGKPAKVALTAVMRKLIVLANALLKANRNWTPKYA

SEQ ID NO: 123756 - protein, 424 aa, unidentified
MKVTYQICCGVDVHKSFLVATIVKTTGGIEPSYQKKRFSTFNNSIFEFKQWLLDNDCRDVCMESTGKYWVPVFNLLEDEINVVIANPKWVKAVKGNKDDTKDSKWIGDLFRLGLVKGSYIPCKIVRILREYTRYRCKLVSCRSSEKNRYQNALTVCNVALDSVVSDIFGKSSTSIIDYLLEQSGTSINHEEIASKLLRSLKSKEDAVIESVEGYQMTDAQKYRMRLVRAHMDYITAEIKDVDKMIENMISSNPDFENAVQFLCTIPGVKYDSAITIISEIGTDMSQFSSSKRLCCWAGLTPGSNESAGKKKSVRITRAGVYLKPALVQCAHAAVKSDQSPYYKKKYESLVKRRGKKRAIIAIARMILTAIYQMLSTGEQWNPSDLYKIDVPEALIEKQKAKAIKQAKKLLQREGLLPPDEPVAS

SEQ ID NO: 123757 - protein, 360 aa, unidentified
MSFNGTSVGLDVHALSVVAYAVDEETGHVERARLCPDHGEILAWLHQLRGPVRVAYEAGPTGFGLARALAAAQIDCVVAAPSKLIRPAGDRVKTDARDAAHLTRLLRLGEVTAVTVPEPDVEAVRDLVRAREDARADLMRVRHRLSKLLLRQGRVYSGGQAWNGVHETWLRRQRFDDSHTTAAFDHHFDAVLSATAARDRLDEQIVTVAASPRWADPVDRLGCLRGISALTGLALTVEVGDWTRFTGSSIGSYVGLVPTEYSSGASRVQGSITKAGNSHVRRLLIESAWHHRAAYRNPGPTMRARWAKVDPALKDRGHAGNRRLHQQWCRFNERKKPHVVANVAVARQLAGWCWSLATLT

SEQ ID NO: 123758 - protein, 413 aa, unidentified
MEVFCGIDWAEDHHDIALAGAGGQLLARRRISDDAAGLATLLELLASHGDRAEDPVPVAIETPRGLLTACLRATGRKVYPINPMAVARYRDRHSVAGRKSDHGDAVVLANILRTDAHAHRPLPADSELAQAIAVLARAQQDAVWARTAAHNKLRSQLREYFPGFLAAFADARGGITRPEARAILAAAPTPAAAATLTASQLQALLKKAGRKRGITAEAARLRTALRAPQMRQLPLVEQAMGQQALALLRQLDAACAAAADLEQAVIESFNQHPDAGIITSFPGLGPLTGARVLAETGDDRSRFADAKGLKAYAGAAPITRASGKTTAVLHRRVKNNRLADAGYTWAFAALTASPGARAHYDRRRHAGDRHAAAQRNLFNRLLGCLHHCLATGQHYDETTAFPPPAPTAHAKAA

SEQ ID NO: 123759 - protein, 389 aa, unidentified
MSELPVVVGIEVAKARLDLAVRPSGEQRQVSHDASGIAEVVTSLQELAPQVIVLEATGGYEVPVVAELGTAGLAVAVVTPRQVRDFAQASGRLAKTDRLDAQVLAPFAEALHPVPRPLPDAQGQEVAALVERRRQGVALRTAEQHRLGTTRTPAVRAPIQAHLEWLDADLRALDDELQRRVKASPWWQERAAVLRRAPGGGPIVSLTLRADLPELGRLSHAQLAALVGVAPLNRESGIWRGRRSVWGGRAAVRAALSMGTLRATRCHPVIRQFYERLLAAGKAKKVALVACMHKLLTILNAMVRHQTPWQALAGSGGLSLPGSGQGTSQLLICHRGIRQCRLALSTTATVTSGRPMKSGSAASRLCLVSMPPMSRSSWVHGERHAIKCR

SEQ ID NO: 123760 - protein, 365 aa, unidentified
MASMRMAREGAVRVTVGVDTHKDAHVARAKDQLGRRLGEKIIPTTPRGYRALLAWAKSHGEVATFGVEGTGSYGAGLARYLQSEGHVVIEVIRPNRQARRRHGKSDPADADAAASAVLAGDATGQPKAADATVEMIRALRVARQTAIKARTQASNAMKALVVTAPDDLRECLRELSTIALVRTCARLRPGKLVDPTTATKVALRSLALRHEALETEVKVLEAQLTRLTAGVAPELLAVFGLGTDSAGALLVAAGDNPRRLRSEAAFAMLCGASPVEASSGKVTRHRLNRGGDREANCALYHIVMVRLRWHQPTKDYMARRTTEGKSKREIIRCLKRYVAREIYAVLRSMQLSDVAIAGQAQGEVA

SEQ ID NO: 123761 - protein, 355 aa, unidentified
MNGTKYIGMDVHTATISVAVRDAAGKLIMESILETKASTILEFIHGLRGDVYVTLEEGTWAAWLYDLLRPYVTNIVVCDPRRNALLKEGSKSDRIDARKLAELLRSNLLRPVYHGEKGLRTVKELARAYLTISKDLTRVMNRVKAIYRGWGIPCAGQSVYHPCHRDEWLSRITPTSVRRRAELYYEQLDGLVLLRKKARQELLLESKKHPAWKLLRSIPSLGPIRTAVLMAIVQTPHRFRTKRPLWKYSGFGVVTHSSADHRYVEGQLQRSKKPVSVRGLDPGHNHQLKALFKGAAIQASTSGGPFREFYEALVAKGMRPEMAPLTLARKIATITLTIWKKGVAFEAKYLKPQTA

SEQ ID NO: 123762 - protein, 335 aa, unidentified
MVLTYCSSMQQTIDVHKKVLTVVVVDASTPEEKPAPRRFVTMPSELHRLLMWLREQGVEEAVMESTAQYWRSVWLELEPHMRLHLAQAFSNRAPRGRKHDFKDAERLVRRLIANELILSFEPNGEPRIWRSMTRMKLQLTRDRVRLQNQIECLLEEMRIKLLIVVSNLPGASGLRILHALAKGETDPKKLAQLGDERLQCTDEQLVDALTGRVQPVHGEMLALQLQRLQLIDEQMARLNSMIAQAMKPHQDAVIRLAEVPGLGVDSAQQIIAEVGAQASTFQSAAELPSWVGTCPGKEESAKQNRSSRSAKGNKYLRRVLNQAAHAAVAKKGSHF

SEQ ID NO: 123763 - protein, 320 aa, unidentified
MSKKKSKSFIGIDVCKQQLEVAVHESDYQFRCPNKASAFGELIAELIALRPALIVLEATGGLEIPVVNALHAVGLPVVVVNPRQVRDFAKALGQLAKTDRLDARVLAHFAAAIKPPLRPIKSKEEQELDALTGRRGQLIEMLTDEKNRRGSAASDTVRDEIKEHINWLEERIAELDDQLKALLQSSPSWQAKDEILQSVPGIGPVVSFSMIADLPELGTLNRQKISKLVGVAPLNRDSGKQRGTRHIYGGRARLRSVLYMAALTASRHNPAIKEFYERLCAKEKPFKVAITACMRKLLTIINVMVRDSTCWKSKEETVSA

SEQ ID NO: 123764 - protein, 339 aa, unidentified
MSKRSIQVQETMYCGIDVSAKSLTVAIQHVDQPVEQRSFPNTLVGHKALIVWLRKTKSPVRVSLEATGIYSLDLAFALDAAEGIEVAVLNPKVANRFAQTIRRSKTDAADAEVLAEYARRMPFTAWVAPSPGSMRLRSIVRHIESLSVQSAQNQNRLHAAHGSTSTPSCIVQDLKRSVASLELRIHKLRREAMTLVRQDDLLRKRFELLVSIPGIAQVSAMQLLAELSTLPPDLTVREWVAHSGLDPAHEISGSSVRKASRISRAGNRHLRRALYMPALVASRCDPHAKAFFDSLLARNKARLQALIAVARRLLHAIYGIFRSGLKYEGTKLFPRITLS

SEQ ID NO: 123765 - protein, 367 aa, unidentified
MKTLRCVGLDVHKASIAIAVAEPEGGEPSLVGTIPNDTRLLLQKLKKMGGGKRVRCCYEAGPTGYGLHRDLVAAGFRCEVVAPSLVPKQVGSRVKTDRRDAVKLARFLRSGDLTAVAVPDQATEAMRDLERARDDAKNVERSARHQLGKFLLRHGRIYQGKTAWSRGHFDWIRKQAFKHEAQQRVLTDYLRTVEQAAERVAQLTRDMEELVKSWSLAPLVKALQALRGVQLVTAVVIAAELGDLSRFKSAPQLMAYLGLVPSEHSSGDSKQRGRITRTGNSHVRRVLVESAWAYRFRASMSAAIRERNEGLPRPVRDIAWKAQERLHRRYARMSGRGVCKQKTVTAIARELTGFVWAIGQAQRKLAA

SEQ ID NO: 123766 - protein, 314 aa, unidentified
MLSPECFVGVDVSKAALDVAVRPAGVMWQMGNDKAGICELVRRLGQLEPVCIVLEATGGYERAAARALFKAGFPVAVVNPRHPRAYARATGRLAKTDRIDAQVLSRFGEVIRPRLVTSDDTARDELSGLQARRQQLMEMVTAEENRLQTAQPKVAREIREHLGWLKKKAKQLDKEIEERVQSRPEWSMTEEILRSVPGVGPVLSAAIIAGLPELGRTDRRQIAALVGVAPLNRDSGTLRGRRCVWGGRAPLRSVLYMATLAATRHNPVIGAHYRRLCAAGKPRKVALVACMRKLLTILNAMLRNRTPWRTSPVG

SEQ ID NO: 123767 - protein, 363 aa, unidentified
MKKFILSGCDLHDNSMLVKVACGTEAPQKRSFENTPEGRKALIAELQRRGKAAGGAQVVFAYEASGQGFGLHDELQDAGITCHVLAPTKMECSAKHRRNKTDEKDADRVLDVVRGHYLAGNELPSVWVPDPQTRDDRETVRARLDAQDKCSLVKAQIRAGLKRNGLRKRKAAGAGWTKAYRRWLQALSECDEPLQHGARQALASLLRQLQHLEQEVQTLDQELVALAQTERYAAKVQQLAQTFKGVGVITALVFLTEMGDLSRFHNRRQVGAYLGLVPSSDESGEATDRKGHITHQGPARVRYVLCQAVWNRVRYDQRERAVYERIAAKNPKHKKIAVVAAMRRLAVHMWHAASAVRGHTAAG

SEQ ID NO: 123768 - protein, 439 aa, unidentified
MKTQFQVVHPHAAGIDIGSEKVFVAVEDQSVKHFSTYTESYQNLVQYLIENKVTTVAMEATGVYWIPLYEILEQAGIDPWLVNPSDVKRVPGRKSDVQDCQWILQLHTFGLLNRCYIPDDKIRILRSYVRLRDDHISMRASHILHMHKALDLMNIKLHNVISQIDGVSGRRIVDAILSGERDPEKMVQLCDKQILKRKRSQVLLSLEGNYRPEHIFALGQAVDCYDFYQQKIEECDFQIAQLLDELTRSMPKPENISKPKPTRHNQPEIDNLHTLLLTMASGNDASSISGLSDLSFMKLIAETGTDLKKHWESPKHFVSWLGLAPIKNSSGKSNRRSKKKFTTPAGQIFRLSAQSVGKSKNYALGAFYRRISAKKGAPVATKATARKLAVMYYNAMTKGLQYVEHGIEQYNKQYQETQLRILMKKAKQFNFQLVPEPTA

SEQ ID NO: 123769 - protein, 338 aa, unidentified
MNYVGIDHHRQDSHITWLDGKGEVVKSGRVTNLRRELEEFLQGAMDVKAVIEAGRSSYTMVDVLADLGIETTVAHPKDVKAIAKAKIKTDERDSYKLAHLLRTGYIPEVHKRSRENRSSQRVLRQRAFYVGKKTAVKNRLRALLAQQGEEIRLEVERVEDLFTDKGMKILRGLALPEREAKLEGALVRTYDHLQARINETNALVKELYEKMPSAQLIQTVPGFGIFLAVLVAVEIEDIGRFEEVSQFHAYAGVIPSTHSSGDRSWHGKIIKEGNRWLRWAAVEAVWPALRADFDIRCFYDRLKSKKGANSAKVATARRLLTIIYRMLKENRSYIPYKR

SEQ ID NO: 123770 - protein, 367 aa, unidentified
MEDQKERSVGIDLSKKTMEVRIMTKDGKIKLSWHGKTDSKGRKKLMSYLKPGDKVFIEACQLAFTIAREIMANTEAQVYVLNPSKLHIIWQSVKKTDSEDALKLARLGLRFPIDELPIVPLPTEEEERLRELVHELNFLKKQRTRCINRLHAIYTGFGITTLTKKHLKTRESRKLSIEKLSGRKYSEASRIHQRIDITEEQIEEVETEQASLIVNNDSAKYIMSIPGVGVGFSAVFLGFVGNGERFSNAKQVSNYSGLVPRVDQSGDKTYYGGIIKASCSAIRRVAVLAAWALTRSKHGGSLMEKYEKKAKERGKLVAIVMLARRIVELCYLLIKNKMYYDNGEIVGENPKLKKLKIKIAKKEGKVA

SEQ ID NO: 123771 - protein, 350 aa, unidentified
MTTIARRITGGVDTHLDVHVAAALDERGAQLGVESFAATAAGYQELLGWLESFGTVELIGVEGTGSYGAGLTRHLLAHEVVVVEVDRPNRQRRRRTGKSDPHDAVAAARAAQGGEATGSAKTRDGNVEAMRVLRVARRSARGNRTQAINQMRSLISTAPEELRAELRNLSIYNVLTLASAFRHTGRTDVTTVTKLTLRTLARRALSLEEEVKEIDRLLKTLVAETAPELNAIDGVGTDVASAILVAAGDNPERLKSESTFAKLCGVSPLDASSGKQQRHRLNRSGDRQANSALWHIVFTRMVKDPRTKHYIERRMKEGRTKKEAIRCLKRYVAREVFAALPRSQFALDNP

SEQ ID NO: 123772 - protein, 450 aa, unidentified
MQFMKKKAGFPVLYPNAAGIDIASREHYVAVNPDAAEQSIRSFGSFTDDLHEIAAWLLQCKVDTVAMEATGIYWVSLYLILEEAGFEVVLVNAKHVKNVSGKKSDVKDAEWIRQLHSCGLLSKGFQPDHFTRTLRAYMRHRKNLTEMAATHIRMMQKALEQMNIKLQNVIADITGKSGQAIIKAIIDGEHDPQNLVKLLDGRIKATKESICKSLHGIWKTENLFELKQSFDLYHTYQEMIKECDLHIKRHIEEKASYCESDQIQSLYPVKKKYKTNKNNLNFDATDMLQKIVGTDLTEIFGITDTNATEIISEIGLDMSKWPTAKHFTAWLNLAPNNKVSGGKLLSSRVPRKRNKAGQIFKMAAFAVQRSKNWLAIFYNRIKMRSGTSRAVTATARKIAIIFYKLMKEKLRFCPLDRDQYLESFKVRQLKKLKQQATRLGLVLVPDNLVT

SEQ ID NO: 123773 - protein, 361 aa, unidentified
MKDATTSEETKLTVGLDLGDRYCQVCVLDDAGKVCEEGRVATRAAALRRRFSTAEPVRVVLEAGTHSPWVSRLLAELGHEVIVANPRKLRFIYANDSKSDRVDAEYLARVGRLDQALLAPLTHRSVETQTDLALVRSRNALVRARTRLISHARGTTKSLGSRLPACSSDAFASKAQAQVPAELAAALDPVLAIIAQLSAEISALDAQIEELARERYPQTALLTQVPGVGTLTATVYVLTVEDPARFSKSRSVGSYLGLRPRQASSGSLEPQLRITKAGDEHLRWLLVGAAHYILGPFGPDTDLRRWGLALAAQGGKRGKKRAVVAVARKLSVLLLRLWVTGEVYEPLRNARRRGELLAAQT

SEQ ID NO: 123774 - protein, 346 aa, unidentified
MNSMNYIGLDIHKKSISCCVRQADGTIIQESTITATRHALDEWMRQLPDPWIAGMEATLFTGWIYDHLVSGGAVVKVAHPAMLQAIAVGKKKNDRVDARKIADLLRCDYFPECHMAPREIRDRRRVLRYRNLLVRQAVQMKNKVSGLLMEAGVPYNQQKVHQKKYFAELLQKQKKDMPPSMPELLRLSRSTVEALTGMQRQLIRALESDALLAARVERLASIPGVGRVVALTWALEMGDISRFASVKKAVSYCGLCGAEKSSGGKTERTPISKQRNKHLQTMLIEAAKLAPRWNAELALVYDREKQRGNRNRATLAVARKLVAYLMAVDREERLFDTQVRVAGNAA

SEQ ID NO: 123775 - protein, 385 aa, unidentified
MKVRGLCRSRIRGLDRDRIHGGADMAQVRSWAGLDVHAAKVLAATVDRETGELGVRRLSGETGEVVAFCAGLPRPTRVAYEAGPSGFALARALEAAGVGCVVAAPGKIERPAQDRVKTDRRDAERLVRLLMVDGLHAVRVPSVQEEALRDLVRAREDVRGDLMRARHRLSKLLLRHDERFDGSARAWTTRHRDWLSRIDLGGPAQLTLLDYLGAIDALVVRRDTLEGHIERLVPSSPWAEPVARLRCLRGIDTLSAVGLCAEIGDWQRFQRASRVMSYLGLVASEASSGDRRRQGQITKTGSRHARRLLVEAAWDYRRPPRRGTTLAARQAGQDAHVLALSWKAQQRLHHTWQRLDTQRGKRRTIVAVAVARELAGFCWAIATAD

SEQ ID NO: 123776 - protein, 349 aa, unidentified
MIRNAPKNAAVFGIDLGKNVFHIVGTDAQGSVIQRVKFRRDTLLQFFERASPTIVGMEACPGSQWLARRLGAMGHTVRIMPAQFVKPYLKANKSDTLDAEAIAEAVTRPTMRFVPVKTTDQVDIQSLHRIRDQLVRQRTSLINQMRAFCLEYGVAIRQGAGVFKLDLPRVLADEENDLTPAIRRLLTDMFEDLRHLEARIKTITVEIEALVARDDVARRLTTIPGIGPLGASALLAAVGDGRQFRRARDLAAWLGLTPREHSTGGKQKLLGISKRGNTYVRRLLIHGARSCIIHLDRSRHRLGEWLDALQKRKHINKVTVALANKMARMAWVIITRPGALYERRDPALG

SEQ ID NO: 123777 - protein, 407 aa, unidentified
MSLAVRLVLVARPVRPAWLSGRRRFAADGPSIVAFAAELTGDDRVALESCTNAVAFHRLLCHHAGAVVVSNPLKTRVIAEAKVKTDKVDAEILARLLAADFLPPVWVPDAATDRLRHLVFHRQGLVTQRTQAKNRIHAVLHRNLLAPEVSDLFGRTGRRLLARVALPDDERTLLDADLRILDFFTGEIQATDQQLAQAALDDPEVRRLMTVPGLALTSAVALKASIGPVSRFAAAPKLVSYFGLNPSIYQSGQTAYHGHISRRGRSQARAVCVEVAHQLVKAPGPFHAFFERLRRRKPYNVAITAVARKLVVLVWHMLTHAEDYRYAPPARTRRKLNALHQLATGTPAPRSPRSAPHASPDDHQAGREAESHYRTNLQERFGSHHDPGPAAPPPRRPRTTGRSQKET

SEQ ID NO: 123778 - protein, 456 aa, unidentified
METKRRREQRSMLPVHPDAAAIDIGATVHVAAVGPARDPEPVRSFGTFTGDLHRLADWFAQCGIKTVVMESTGVYWIPIYEILEQRGFEVWVVNARDAKHVPGRKTDISDAAWLQRLHEFGLLRGSFRPQGAIAALRAYLRQRERLLDYAAAHIQHMQKALTQMNLQIHHVISDITGATGMRIIRAIVAGERDPDTLASYRDIRCHSSAETVRQALIGNYREEHLFALAQAVELYEVYQAKVATCDEKIEGVLERLKQPCRAPAKPLRAARHKTRQPNAPAFDARGALYAVLGVDLTQIHGLGPYLALKLISECGTDLSAWPSAKHFTSWLSLAPGNKISGGKILSSRTRPSGNRAAALLRLAATTVGRTETALGAFYRRLSARIGKAKAVTATARKIAVLFYNAVRHGMDYADPGASYYEERYRQRVLTNLQRRAKAFGYVLQPTEIKAVSMAVS

SEQ ID NO: 123779 - protein, 546 aa, unidentified
MERYVGIDLGLRTKHKVTVYDGPNRIGKPFAIETSYDGLEYLLKRATQGVEGPVNFVFEPTSTVWLPIAAYLDVAGHRTYMVKTQKSSDFRKFFSKHAKSDSIDSGVLARIPQIDPQGVNELLVPTAEETTLKRQVKRRERYVSDASKQKLRIQALLLMVNPFLICALGNDKFGVATVEFLKRYADPEKAVKRGRRRLEYFWDKHSKGQVDKQRAGKVFEACQKAVELYRSLRIEERLPFNYEAVQEEILEELELMEEIQSRAKRVEKQMIAMYKSLCPERVLEQLRGVGPIIAANIIAMVGNINRFKNGRKFVAYCGLCPRKNQTGNSDKKMKITKAGQSVLKKSLYLAADVARNWDPEFAAYYGRRYAKGDHHDYIVVALARKMALRVSALLKRCQASKRLKFFASETKNSDSVRYILRTPEGREVETKEAREIIEKKYTREVVAPQRAERDRVGKKGSGQNKKKKPTQSEKRWPPEDATNGSASASTTIIAAQNTPDNNKVSRNYKSEPVLLSELIAKNLKQLTSESLQQALKNMLEKSEQND

SEQ ID NO: 123780 - protein, 363 aa, unidentified
MFTERTSIGLDVHARSVAAAAIDGMTGQVTQTRLTPSYEHIQDWIKQVPGPVAVAYEAGPTGFGLYRALTSAGIRCEVVAPSKLQKPAGDRVKTDARDALHLARLLRLDEVTSVAIPSLNQEACRDLVRAREDCRGDLMRARHRLSKLLLRHGIVYYGGHAWTGTHDRWLRTDAVTRLQMPATRMAFDADYEHVLMLQARRDRLDAAIHEVAANSEFTPIVRRVSCLRGVSTLTGFALAVEIGDWNRFTGNTIGSFVGLVPSEHSSGSARVQGPITKTGNTHVRRLLVEAAWHHRPRYRVGPVMRSRWELAPVAARARGDEGNRRLHHRWVGFLARRKRSTVANVAVARELAGWCWSLAVMDD

SEQ ID NO: 123781 - protein, 334 aa, unidentified
MLYVGLDVHSKQSSLCILNSAGGTVNEIQLKGPRSAVVDRLRQLDQPFSICYEASCGYGHLYEQLRPIAHHVAVAHPGKLRLIYKSKRKNDKVDAQKLAKLLLLDMVPPVHVPSIDVRAWRSLIVLRQRVMSQVVRCKNQVRGVLRENDIAGAKWLWSKRQLAWLQSLQLHPIAKLRLELAVEEFKTLDARVKRIERELQAYADRHPAVKVLMTIPGVGIRTAETFVAWVDDVTRFRNNRQIGSYFGLVPCQDASADKNRLGHITRDGPPVMRKLICEAAWTAIKKDGTFRAFFEQVMGGKPERKKIALVATMHRMIKVMGAMLRSGEAYNGAR

SEQ ID NO: 123782 - protein, 410 aa, unidentified
MAERFVGIDVGLREHRIAVLDRDGEAVGQSFTIAASKDGVATLLRALDARDAPPAQTLIGLEASGHLWENLEAALVGAGYRVIVLNPLQTRRYRDVVRRKAKTDDIDAHVIAGLLRSGVAQASYVPDEQVQSLRELARLRARLMADRQDYQRQLIAQLDVVLPEHHAVLGDLLTARARGILAQFPTAQHLAQANPRAIRRAAEDAGARGFSLNDATGVRDSARRSLYSGKAAVARAHVVRTLVNQLERLINAIDEVDRAATALLPPSEPGTGPSDAELLQTIPGIGPQTAATLLGELGALTRFTDARALVAYVGFYPVIHESGDRAATPRLSRVGSRIARRSLYLAAVNAVRRSGEWRTIYLRKKAQGKTAKQALVVVAVKLIHALYAMLKHRQPYNPSRLLVAPATIGT

SEQ ID NO: 123783 - protein, 403 aa, unidentified
MNNVAGIDVSKGKSMVSVLRPFGEVVAKPFSVGHTGSELKELADYLKSLDGETRVVMEHTGRYYEPVARFLHDEGVFVSAVNPKLIKDYGNNTLRKVKTDKADSRKIARYGIDNWAELRQHTPMDTIRMQLKTLNRQQSLYSKTKTMMKNNLIALLDQTYPGVNALFDSPVREDGSQKWVDFATTFWHVDCVRNMSLTAFAERYRKWCKRHGYNFSQSKAVEVHAGAQDLIAMLPRDALTKTMVRQAIDALNAISASMERLKAEMQALAAQLPEYPVVMAMHGVGDSLGPQLMAELGDVTRFTHRNAITAFAGVDPGADQSGTHEAKSTRVSKSGPPELRRALFLVMDCLLKTQPQDDPVYRFMDKKRAEGKPYLVYMTAGANKFLRIYYGRVKEYLASLEGN

SEQ ID NO: 123784 - protein, 358 aa, unidentified
MVDKVTEAAVVGGVDTHKDLHVAAVVDQNNKVLGTQYFSTTRQGYRQMLAWMTSFGTLKRIGVECTGTYGSGLLRYFQNAGLEVLEVTAPDRMERRKRGKSDTIDAECAAHAAFSGIRTVTPKTRDGMIESLRVLKTCRKTAISARRVALHIIHSNIISAPDELREQLRNMTRMQLIRTLGSWRPDASEYRNVTNVYRISLKSLARRYLELHDEIADLDVMIAAIVDELAPELIKRNAIGYESASQLLITAGDNPQRLRSESGFAALCGVSPVPVSSGKTNRYRLNRGGDRAANSALHIIAIGRLRTDAKTKEYVARRVAEGHTKMEAIRCLKRYISREVYTLLRNQNRRINSIPITA

SEQ ID NO: 123785 - protein, 339 aa, unidentified
MVLYGGMDLHGDNVFCTVMDQAYRPLFERRLPNELPTILAALEPYRERLAGLAVESTYNWYWLVDGLQAQKYAVRLANPARMQENIGLKSANDKTDARFLAKQVAMGVLPEGYIYPKEERSVRDLLRRRMRLVHMRTGEWLSLEGQVARHSGKDMGIQALNGLQDGELGQLLGNDPLVLQAAQINYRHIAFLDREIRQIEKAVEPRLKLTDGYERLLNVPGIGRILAMTIRLETGPIARFPGPGNYASYCRAVKTEHTSNERKKGEGNGKSGNRYLAWAYIEAANFAVRYSPELRAWYQRKAARTKRVVALKALANKLAKACYFILRDGVEFDVKKLVG

SEQ ID NO: 123786 - protein, 346 aa, unidentified
MPETEVDTFAGIDVSARELSVALRRGKGEDKPAMAKFSNHPSGHKALIAHLLRGGRRVRVCLEASGNYSLDLALTLQAHRQVEISVINPRRARRFAESLGQRSKTDPVDARVLCEYVARMPWVAWQPPSSVALHLRAVTRAIADLGVIHTQQNNRAHASAASQALPVLVVKEMQRHQKYLEQRMTRLRREALRLIAGDSELDRRFRLMLSTTGIAETSALQILGELAVLPDMLDARQWVAFSGLDPRLFKSGKSVEKRPRISRGGSRHLRRALYMPALVALRRDPYLRRFYQNLLARGKARLQAVVAVMRKLLHALFAMFRTNQPYDGSKLCCAVDMAGNAIAACA

SEQ ID NO: 123787 - protein, 365 aa, unidentified
MIVIGTDTHKQSHTASAVDGATGRVIADRTVRARRRSFDDLLLWARGLDGERVWAIEDCRHVSGALERFLLVRGERVVRVPPKLTAGARNQARERGKSDAIDAVAIARAAIREGLETLPVAQLAGPELDVRLLVDHRERLVAARTRLSNDLRWSIHDMWPELEIPARALTTNRWQERLAGRLARTEQTVRVRIVRDELRRIRELTRSVDALQRELAALVGGLAPQLLAERGCGVLTAAKLLGEIAGIGRFATDAKLARIAGSAPIAASSGRTDRHRLDRGGNRQLNCALHRLAVTKGRLDPDTAAYLTRKQAEGKSRREALRCLKRHLARRVWHLLQPSPAAATPAPQPAVTIHCNTPYNSFTLT

SEQ ID NO: 123788 - protein, 307 aa, unidentified
MNSKNYIAIDIAKDSLAVTSDSFSGSFDYDNKGLKALLEQLRRIESALVVCEATGGYERKLMELLFSHEIPVALVNPARVRAFARSEGAKAKTDPIDALMILRFAQSKDLSPTPVPSEQQRTLQALMDRRGQLTESLAREKNRLQKSPKCVVKSVEKMIRIIERELKALEQKMEKLIDEDESMCRQDSIMQQVCGVGATTSWSILAYLGEITALKRNQLVALAGVAPYNRDSGKVKGKRRIEGGRAKVRKCLYMAAQSAAVHNPHIKEYVDGLRSRGKPYKCAIVAAMRKLLIHLQSLLKKQQLELA

SEQ ID NO: 123789 - protein, 423 aa, unidentified
MDVIHQRVAGLDVHKETIVACVRIMVDARVSRECRTFDTTTAGLKDLQAWLTASGCSHVAMEATGVYWKPVWNILSDGTFELLVANAAHIKNVPGRKTDVNDATWIADLMACGLIRGSFVPDQAFQELRTLLRTRKQLTREQTRHVQRLQKTLEEANIKLDSVISDVMGLSGRRMVEAMIAGERNPQKLAALADRRIKASPKALYDALHGRLTDHHRFRLRLHLAQYDVLAAAIGAVDQEVDAAIDQMDEAEKGGQAFFRSLIRLLSGIPGVNTLSAQTILAEITPDMTRFATAGHLVAWAGLCPGQNESAGKRKSSRLRKGAPWLKTTLVQCAASAVKKKDSYFKAQFQRLKSRRGPQKAICAVAAAMLTTIYHMLKDGTQFQDLGAHHFDRRPPEAKARHLVAQLTKLGYTVQLQPLAEAA

SEQ ID NO: 123790 - protein, 334 aa, unidentified
MHYVGIDLHKRFLVVCVHDFRGHTLAQRRFECCKSADVARFFEKQKPFQAVIEASSSYRWLYDLLSPLGEVVLAHPLQLRAIVAGRAKTDKLDAALLAKLLRAGLIPKAYVPPKAYQALRDLARARARLSREATKAKCQMHALLTRRNIQPRYRNPFGKRGRRWLASLELGTVDDLLRDELLARLDHFAEQLITLDRMLESVATQFPEHEVLTDLYGIGPYSALLIVGEIGEPGRFRDKRKVGAYAGLTARVNQSGGHCYTGHITRQGSPWLRWILVQAAMKLVRRDRQLGQFYQRIRKRSGAKIARVAAARKLAGICWVRLMRWHRRQAAQAA

SEQ ID NO: 123791 - protein, 347 aa, unidentified
MGYYAGIDTSLEASSICVVDADGKIVREANVLSEPEALIDWFGGLGLDVVRIGLEAGPLSQWLYAALKQAGLPVELLETRHVRDAFKAMPVKTDRNDARRIAQLMRLGWFRPVHCKSMPAQEVRALLTARKLVQSKLIDIEMSLRGVLRGFGLKVGPTSPTRFAIRIEELVVGHATLEIIGKALLAVHEALLRELKGFERRVRAMARDDQRVRLLMSAPGVGAIVGLTYVAAIDDPGRFKSSKHVGPHFGLTPKKYQSGEKDVTGRISKIGDASVRAALYEAANIILTRPVKGGGLKSWAMKLARRAGMKKAKVALARKLAVILHRMWVDGTPFAADKAGSAEPAAA

SEQ ID NO: 123792 - protein, 375 aa, unidentified
MTAATCSKVSLSESVLFVAFELGQEQWKLAMTSGFGVAPVVKTVRRGDWDAVDRALTAARQRLGLSSTVPVVSCYEAGRDGFWIHRALAARGIRNRVVDSASIEVNRRARRAKTDRLDALKLVAMLVRVVWGDRTVWREVRVPSVADEAARHVSRERQTLVQDRTRLVNQVRSYLTTWGAALPQARPEGWWTTVTDWQGQPLPAAVQARLARAHQRLVCLAAQLTALETAQREALAATAAEQPAARLLRLKGVAAISVSVLLEEGLAWRDFQNRRQLGGLLGFAPTPYASGTLQRDQGISRAGNTRMQSVMVQLAWSWVRWQPSSALTQWFQRRFGDSARARKVGIIALARKLLIALWRWAMQGTEPAGAIVAAA

SEQ ID NO: 123793 - protein, 346 aa, unidentified
MKQIIRIGIDTSKHVFQLHGVNAAEEPILRKKLRRHDLVTFFTKLPPTVIGIEACGGSHHWARLLQSLGHQVKMIAPQLVKPYVKRGKNDAADAEALCEAMSRPSMRFVRFKTAEQQAALMLVGLRDRLIRQRTQLTNAIRGYAAEFGLVAAKGLVKIEPLLERIREDDTLPALARELFEIHTREYAQLQAQLEEVEDKLMAWHRADECSRRLARIPGVGPIGASMLVMKTPAPEAFRSARHFAAWLGLTPKDHSTAGKVRLGVITRAGDEALRSVLVVGATAVIRHAQRSQARVSPWLIALLKRKPPKLAAVALANKIARVAWKLMVSGEHYVARVSPVGSGGAA

SEQ ID NO: 123794 - protein, 367 aa, unidentified
MSRMKRLTVQQLDVSMDYLVIGLDLAKTDTAVIAVTTDGELYAIDRLKYLDLLNQAKQLGPTVFAMEPCNGMTYLVHELEELGHECRVINGEAVKDYVKSHFAGQKNDLNDAQAIAFLAQDEMLKFIRTKAKSEMTMQTLQVVRQQLIKQRTCSVVCIKGICQNYGLIISKSIMSEAKIRPIIEESQKLPEEIKEPLKALLRNAARFTIDIKQIDKAIEQGLKGNDTAERLLEVPGLGPQCVSRLLTTIGDINRFEGPKNLAAYYGLVPRSHTTGHNEQMGKITKHGDRLMRSFLVQGAHAVLILHTRGRLPKSALKKWIGKKLSGGMPRSKLSIALAAKLLRIAFAVLKYKKKFDIKKAGVARCSL

SEQ ID NO: 123795 - protein, 324 aa, unidentified
MQTIPIGCDVSKGKIDLCIWLDDGKQEYLLIGNNQKGYLKALTEIERLNIKPHICMEATGIYYEGFADFMAEKGHLVSVVNPLKIKKFAESEFQKTKTDKQDARLIACYCLKMQPKADYVKPDPEQYAVRRNIALLKQLNADLNGIKNRIKVAKDEFVRQILSSQQREIKKHIKEVRQHLAKITEQTAAGQVAEKLEGIPAIGQTTALILAHYLNMYRFDSENKFVAFAGLAPGKHESGSSVRRPDKLTKYGNRTIKGALYMPAMVAYRFGYFGAFVNRLRNKGKPPKVILIAIMRKLAAIAWNLWKNGQTFDPARYGLNSKTA

SEQ ID NO: 123796 - protein, 390 aa, unidentified
MNQRVRWVRPITLIGTCCPFGSKAQIEYQACGLLESSSNRPFAQPLRDHLVEPKTNGEMNYIGIDVSKAKLDMALLDGKGRLLEHVVVRNTAQAITGRLRRWEREQGLLPYECLACLEPTGSYSDTALRTFVGVDIPTWRAHPLEIKRRMGMVRGKSDKVDALRIADYAMRYQDRKRLVTADTLAVMELKQLLAFRWRVVVDQGRHKGYRTEIYPGLHKDLAKFCNAYSQGRIKQAKAMVAQADRRIRELILSDPTMKRQYELLLSVERIGPLLAAHLIAATERFTRMREGRKLGCHAGVVPHEHSSGSSLRGRPRVSHQADKNLKSVLHMAVLGVAQGHGELGAYYTRKVAEGKNPMSVLNAVRNKVLHRACAVIKRGTPYQEKEPLST

SEQ ID NO: 123797 - protein, 322 aa, unidentified
MAMLSFGGIDVSKDRLDITVLPDEQCSSVSNDAAGWAELIEQLRGSSITAIGVEASGGYERGVVRALLAAGMSVRQINPFKLRQFAKASGILAKNDRLDARMIASFVAIMPTRPAQRQAPMIEQLAAMLTVRRQLSDHKVATENASRLLEGAMLQRLSRRRIAGLTADIDLLDQRLVEIVTADPALAHRFRLLTSMPGVGAVLACTLIALLPELGQMSRKQVAALVGLAPYDFDSGKLKGRRCIWGGRARVRHVLYMAALSASNWNPGLKAFHDRLEATGKKPKVVIVAVMRKMITTLNAMLRDGTTWVDRYSGRRSASTAR

SEQ ID NO: 123798 - protein, 339 aa, unidentified
MKHTTIGVDLAKNVIQLHYIDAETGEIVNKPVKRAAFLQHFANRAPCLIGMEACGGSQHWARKLVAMGHQVKLMPGKFVKAFVMGNKNDAADARAIWMAVQQSGKSIAVKTETQQAVLGLHRMREQLVRFRTMQINGLRGLLTEYGEVMGKGRAALDKAIPGVLERLVDRLPAILIDTLREQWNGLAELDAQIAGIERRLRAWMKEDSASRAIAAIPGVGLLTATAAVATMGEAKTFRSGREFAAWIGLVPRQTDSGGKVHLHGISKRGDVYLRKLLIHGARTVVCLAKAPGPWVEQIKKRRPLNVAIVAQANRMARTIWAILAHGRPYDKDYVSVKSV

SEQ ID NO: 123799 - protein, 343 aa, unidentified
MRYFAGLDVSLEETAICIVDEAGEIVREARVASEPDALVMFFDALGMTMERVGLEACSLTAWLHQGLSEAGIPVVCIEARQAKAAMGAMPNKTDRNDARGIAQIMRTGWYRPVHVKSPSCRSWRALLTARRMVLNKRRDVENGVRALLREAGLKVGTPSRKDFPARVRELAAGDAVLTGLVESLLSVIRVMTDEVARLTKRVLDEVRVEPTCRHLMTVPGVGPLTALAFRATVDRPDRFRRSRDVGAHLGLTPRRYQSGETDVQGRISRCGDELARTALYEAAHSLLIRSTKWSSLRAWGMQVAKRRGMARARVAVARKLAVILHRMWVDNSEFRWGKQAVAA

SEQ ID NO: 123800 - protein, 405 aa, unidentified
MNKLKRVCGLDVHKDIIFACVKKGKYQSEVKQFSTTTQGLSELSHWLHGEQVFKVAMESTGIYWMPVWRALENEFELLLVNPYFIKQMPGRKTDVQDAQWIATLLGKELLKGSVVPEKTIRVLRSYLRRYAQLQGQTTRCLQQIEKQLSQCNIKIASLSSTIGSKTVIDIVESISKGNYAPEQLLPLVHGRIVNRHGAIVKQSLDGIIEEHDVFLLRQVYEDYLHIERQCNELLAQAQKLAEIHYKEQLELLQTIPGIKQLSAVIILAELGGNIKLFETAQQLTGWCGLRPKNDESAGKIKSRSITKGNKYLRRILVQTAWAASRTKTCYLKTKFEQLAVRKSSKKALIAIARKQLVIIWNVLTKQEEYKEPQIKLSAEQISRKQKYYQEKLSKLQQQQIIEKAV

SEQ ID NO: 123801 - protein, 415 aa, unidentified
MKKRIYRARKVNQINWNQVKGYLAGEAVVFAVDVAKEKQYALLTNEDNSVSELFWWNHPADTHRLLNELHELACPMTVVMESTGTYGDALRYQFRQIGCDIYQASAKRVADAREVYDGVPSLHDAKAATIITRLHRAGLTRPWQELTAQERELNALRREYDMHQSQYQRNQNRLEAYLNRHWPEVCCLLALDSVTLEHLLREYGSAANIAADAEAATQKMKCWGRSRLTEEKIAQVIDSATHTLGQPCTRAERHYLQALAEEMGHNRCQRKQAKQALEAIIRSDDELQEMAALIGLVTTAVLLSCHLDPRRFLCARSYQKAMGLNLKERSSGRHIGQLKLTKRGSSIARRYLYFAALRLINNDPVVKQWYHNKVDPRARNKAVIAVMRKLAKALWHVGRGEVFDANKLLTVAKAA

SEQ ID NO: 123802 - protein, 355 aa, unidentified
MESVKYIGFDVHQTTISVAVLNAEGQLVMQSVLATHAAAILDFLHGLRGTLHLTFEEGTHSAWLYDLLVRQVARVVVCNPRKNALLKAGNKSDTIDARKLAELLRAGLLSPVYHGESSTMTVKQLGRSYAALTEDTTRVMSRLKALYRSQAIACAGKKPYGRRHRGAWLAQLREAGLHRRAERLYQQFDILQQLRREAKQELIVECRKHEAAKWLRTVPFLGPIRAALLIGRVQTPHRFRTKRQFWAYCGLALETRSSADYRFSDGQLMRTKKPVFIRGLNINHNHDLKNLFKGAATAASAMEGPFRLFYEGLLGKGMLPAMARLTLARKIAAIALHVWKKGEVFDAERLKPQAA

SEQ ID NO: 123803 - protein, 343 aa, unidentified
MEITTIGFDLAKHVFQVHGVNASGQAVVRKRLRRTEVLPFFASADPCLVGMEACATAHHWARELTMLGHTVKLMPPAYVKPYVKRGKNDATDAEAICEAVTRPNMRFVPVKSTDQQAVLMLHRTRALLVRQRTMLANSLRAHLAEFGIIVAQGLRSVGALIAKIFGEGVETAALPPLARIALQPLAGQFLQLHPQIKALEVEIVAWHKANEESRRLETIPGVGILTATAIAATVTDPSHFRSGREFAAWLGLVPRQNSSGGKKRLGHMSKMGDGYLRSLLFVGATAVIRFARSRSSPGTAWINGLLARKPAKLVAAALANKMARIAWAVLARQEAYRAPALAA

SEQ ID NO: 123804 - protein, 356 aa, unidentified
MSYDVKYIGMDVHKEAIVIAVLNGSGKQIMETIVETKASSILQFLHGLRGELHVTWEEGTWAAWLYDLLQPQVQEVVVCNPRRNALLKEGSKSDKVDARKLADLLRTGMLRPVYHGENGLRTLRELARSYQTISKDLTRVMNRLKALYRGWGIACAGTKVYAPRYREEWLNKIVQAGVRRRAELFYQQLDGLQVLRRNVRREFLAESRKHKAAKLLRQIPCIGPIRAGLLIALMQTPHRFRSKRQLWTYSGLGIETHDSAQYRFVRGQVQRSTKPQQLRGLNRNHNHEMKEIFKGAATRGSCCTGPFRDFYAALLTKGMKPEMARLTLARKIAAITLTLWKKGGRFDAEQLKTQAA

SEQ ID NO: 123805 - protein, 343 aa, unidentified
MDYFAGLDVSVKETNVCIVDETGKIIREAKVASEPDALLQVLRTGAYHFKRIGLEAGPLSQWLFSELAEADLPVICVETRHMRAVLKAQINKTDRNDARGIAQMMRVGLYRPVHVKTLRSQKLRMLLTHRKLLQSKAIAIENDLRATLRNFGLKVGMIGTTQYETRIKELVENFPDLMLLVEPLLVVRRVLREQISVLHRRLLAVVRDDEVCRRLMTVPGVGPVVALTYRATVDVPARFRKSKSVGAVFGLTCSRDQSGERDRPGAISRCGDEMMRAMLYEAAQAMLLRSAKWSWLKAWAMQIARRRGMKRAIVALARRLAVIMHRIWVDGSEFRWTKEAAAA

SEQ ID NO: 123806 - protein, 316 aa, unidentified
MAEEGYVGIDVSKAELVVAVRPGGERMTLTNDRAGIKRLVGRLAELKPQLVVVEATGGLQRQVVAALWLAGIAVAAVNPSWVRNFAKGRGVRAKTDRKDAELLALFAERERPEARPPADAETQALQELVMWREQLLEMLVAEKQRLTRASGTMRKELRHHIAYLEGRIKELEQDIDKTVRRSDAWRRKSEIVRSVPGFGQAFCAMVLAKVPELGTLNRKQIGALVGVAPMPDDSGSRHGRRIIAGGRFEVRNKLYMCAMVAVRHNPVLKQFYERLVARGKPKKLALAAVMRKLIVTLNAMLKTNSLWRPPCPDASV

SEQ ID NO: 123807 - protein, 335 aa, unidentified
MSTLTVFVGLDYHQDSVQVSVLDAQGNQLMNHACPNDWKKIVNAVKPLGTIQRVAIEACCGAADLSEELIGKAGWNVDLAHPQYVAHMKKSPDKTDYSDGRLLADLTRVGYLPKVWLPSAHERDLRQLVNHRQALVNNRRAVKLRIGALLREHRANTPKKMSRWSRAWINWVRITPQLSFDARWITGELLDELDHLNKKVSMADDRLRQSVGDDPLVQKLMEEPGIGEVTAWTLRAFVGRFDRFTSGKQLSRYCGLSPCNASSGARQADAGLVQGCNQILRATLIQAAHRLMRTEKRWVDLADQMKRRGKPAGLIVAAVANRWMRGLWHRMQLQD

SEQ ID NO: 123808 - protein, 452 aa, unidentified
MKGKKSPAPVRDLAALEQINLHAAGVDIGAAEIYVAIPPGRAAESVRSFAPFTADLHSCAAWLAACGIETVAMESTGVYWIPLFEILERRGFEVYLVNARHVKNVSGRKTDVLDCQWLQQLHTYGLLQPSFRPPEEICALRSLVRQRAMLIKYRGSHVQHMQKALQQMNLKLTNVLTDITGQTGLQIIRAIVAGERCPAVLARLRDRRCHKSELEIAQSLEGHYQREHLFALRQALELYDFYGQQIRACDVELEAMYQEFSVPAEPGTPPPAPRKGRRRKNHPHFDLGQAVYRLAGVDLTQVDGIDALLAQEILTTIGTDMSKWPTVKHFASWLRLAPNNKITGGQVKQRGTLPTQNRANTALRLAAQSLARSDSALGGFYRRVRTKHGAPVAVTATAHKLARIIYFMLKRQEPYRDPGAEYYDQQYQARVLRNLQRRAAKLGMRLEPIPIG

SEQ ID NO: 123809 - protein, 412 aa, unidentified
MDVLIERCAGLDVHKDTVMACVRFPGPGRERLQEVHEFGTTTDELLALRDWLSAHGTTVVGMESTGVYWKPVYYVLEDELECQLLNARHLRNVPGRKTDVKDAEWICQLVEHGLVRPSFVPPKPIRELRNLTRYRKAQIEERTREAQRLDKILQDAGVKLSSVASDLLGVSGRAMLGALVEGTRDPEVLAELARGKLRAKIPALKQALAGRFGSHHALIVGAILSKLEFMEEVISHLSAEISEVIAPFEAEVQLLRSIPGVDQRTAESLVAEIGVDMSRFGSAARLASWAGMCPGNDESAGKQRSGKTRKGSKWLRTALTESAKAAARSKGTYLAAQHARLKGRRGSPKATVAVGHSILVATYHILDRHQPYADLGADYFLRRHDPKRHADRLVRQLQAIGYRVTLEEVEAA

SEQ ID NO: 123810 - protein, 377 aa, unidentified
MHSENIAAYIGLDVHKETLAVAIAAPERLGEVRYYGTINNEAQAVRRLFQKLQGLYGNILSCYEAGPCGFGLYHQLTAMNIKCQVIAPSRIPKSPTDRIKNDHRDAISLARLLRAGELTPVWIPDLTHEAMRDLIRARAAAKRDSRVARQRILSMLLRTDKRYAGKHWTGKHRTWLANQSFSQPSQQIAFQHYCQSLEQIEDRILQLDQEISRLLPEWSLCNLVCQLQALKGVGQLTAITLVAELGDFSRFSSPKQLMAFLGLVPGEYSSGNSIRPRGITKVGNSELRRLLYEAARSYRTPAKVGAWLIYYRPDSVTQYSKDIAWKAQQRLCSRYRSLTAKGKKSQVAITAVARELTGFMWDIALAAQSSFSQQKQN

SEQ ID NO: 123811 - protein, 359 aa, unidentified
MLKYSLGIDASKKDLHVCLSVIDNRQQVKVKASSKFSNTDHGFKTMLQWLTKHRKESEVALVCTIEATGVYYEACALFLFKAGIDIAVVLPNKAKKYLQALGLRSKNDKIDAAGLARMGAEQCLELWKPMDEFFYKLRAMTRHHQTLQELRTSISNQIHADEHSIYSIKTITKQHKKLKDTIEKQIIEVEKSIYVHLQSNPEIAERVNAIIAIKGLGYMTVATILAETNGFTLFKSIAQLVSYAGYDVVENQSGKHVGKTRISKKGNARIRRALHLPAFNMIRYEVGAFKNFFDRILEKHHQKMKAYVAVQKKLLIVIYTLWKKNAAFNPDAQSKTSGKEETELSFALAQRANKEVALT

SEQ ID NO: 123812 - protein, 365 aa, unidentified
MTTMTHPPERAARVFGGVDTHKDVHVAAALDELGRLLGTGSFPTTTAGYQQLWRWLRSWGEVVAVGVEGTGSWGAGLARHLTAAGVDVREVMRPNRQHRRRYGKSDEADAIGAARAVLAGEAVGTPKAGTGQVEAIRLLRIARRSAMKARTQAGNQVHAVIDTAPDQLRRRFTGRPTDEIVAETALFRRRHAPTTPLEAARLTLRTLARRWNYLDDELTAIDAQLDELTASTAPTLRAINGVGTQVATAVLAAAGDNPERLRSSASFAALCGVSPIDASSGRQRHHRLNRYGDRHANWALHVIIISRLRWHPPTQAYMARRLAEGRTPKMIMRCLKRHVVREVYQAITTDLGVRHDHGPPPRIAA

SEQ ID NO: 123813 - protein, 366 aa, unidentified
MTVTSMPQLTLPTQPVPDPAEEVVLGVDTHKDVHVAAVITTLGASLAHQEFPTTAAGYRQLLVWARSFGVLHRAGVECTGFYGTALTRYLRGAGIEVVEINQPDRATRRKRGKTDAVDADAAARAVLSGRATTVPKTADGLAADMRILRLAKESAVKARTQALNQLKAILLAIDPDLRELLTGLSNPALVGTCAALDAGDRGEAVFTMRLLARRVQHLSDEVKELTRRTTRAVRSCRPQMLDLVGVGPDSAAVLLIAAGDNPDRITDEASFAALCGVSPVEQSSGKTQRRRLNRGANRQANAALYRIVMTRIRWDERTQKYLQRRTAEGMSKREIIRCLKRYVARELYRHIHPCGTSRKSALLLIL

SEQ ID NO: 123814 - protein, 352 aa, unidentified
MTDASRWVGIDLHRRRSHVAIVDGHGELTQSRRIANDRDTFLELLGDPAAGETHVALEATYGWEWLAELLEEAGYDLHLAHPLRTRAIAAARVKTDAIDARTLAQLLRCGMLPEAYVAPRELRDLRELLRHRATLTRMRSAVKNRVHAILAKHGIIHQHSDLFGKGGREFLAALELRDAPRRRLDSLMALICDFDREIADTTREIEQRAREDDRVDVLCQIRGVGRYTALLIIAEIGDVTRFPTSRHLCSWAGLAPTVRSSDGKARLGHISRQGSPALRWALVEAAQKTTTGSGPLREKFERIAKRRGRKIAKVAIAREILTLSYYGLRDGEIRCLARRSRASAKEKLAAVA

SEQ ID NO: 123815 - protein, 393 aa, unidentified
MLSSGGMESAVHFQRDHFLLGKVPNKKTAEFTVVKRKGRHMKQIINSSKKVYCGIDFHKNTSTLCALSQDGKQIEPLITVKTKLLVQYLSNKKEWVIGIEVTGGANDMAERLKECGHEVILINSNQFRGIGIGGKKTDQRDAVALANALRLGFIPEVHLRTKRSREIKSLLTSREHLVQARVDAINHIRGTLREYGITINAGVESFYSDAFGKINELSNEQIKRALLLIFERIKNLKNEEKQIEEDLQFFTKDDDKIEKLQSIPGVGPITALMMVAVVDDITRFKNSKLFAAYLGLVPKVSASANMRMMGSITRSGSEMLRRYLIHGARAWMRYSPKDDVNRIWAERLKERRGMNKATVALAHRIARICFAVLRDNTIYKPRLRKENTNEKVA

SEQ ID NO: 123816 - protein, 345 aa, unidentified
MSCKLEAAIATVIGIDIGKNSFHVVGQDSGGAIVLRQKWSRGQIEARLAHLPACLSGMEAGVGAHHLSRKLKTLGHDARLMPAKYVRPYSKGQMNDFRDAEAIAEAVQRPTMKFVATKTADQLDLQALHRVRERLVSQRTGIINQIRAFLLERGVAVRQGLRFLRGELPGILATRTDVLSPRMLRVIEDLAGDWRRLDARVEGLSSEIEALARQDRHCERLMTVPGIGPIISSAMVAAIGTGDAFSKGRDFGAWLGLVPKQISTGDRTILGSISRRGNRYLRTLFVQAAWVVLVKLGPRQWERYGLRSWLEAAKKRLHHNVLAVALANKLAGIAWAVLHKERVFQ

SEQ ID NO: 123817 - protein, 348 aa, unidentified
MTFYVGLDVSLNETAICIVDATGKIVREGKAESEPDAIVTWLGLATGPYERVGLEAGPLSPWLCEGLLALGLPAICIETRRMKGATAAMAVKTDRNDARAIAQAMRVGWFTAVHLKTLRSQELRMLLTNRKALLSGRVAIENAIRGTLKAFGLKVGPVTVDAFKDRVIELTADYPRLAEMMRPMLAAREALQLQCESLHAMLLKAVRSDAVCRRLLSVPGVGPVTALAYATAIDDPARFVHSRDVGAHLGLTPRKYASGEIDRNGSISKSGDRLAREALFLAAHTLLTRVTRWSALKAWGVALAKRRGLRRATIAVARKLAVIMHRMWLDSADFRWTREENTPVPAAI

SEQ ID NO: 123818 - protein, 397 aa, unidentified
MFQKSKSTIAILQPGGTIIRKPFNVPHTSQNLIELADYLGSLEGSTKIVMECTGRYHEPMLKALYEAGLFVSVVNPHLIKNFGNNSLRRVKSDPADARRIARYTLDNWAELRQYSGMDNTRTQLKTLNSQFSFFMKQKVAAKANLIALLDNTYPGVNKLFDSPPREDGSEKWVDYAYSFWHVDCVRRIGLKTFTERYRAFCRKHHYIFQPDKPEKLFHASKELVAVFPKEKTYKLLIQQSIQQLNLASGHVERLRQEMNALASTLPEYSTVMGIYGVGKTYGPQLIAEIGDVSRFTHREALTAFAGVDPGVDESGQHKSKSNRASKVGSARLRKTLFQIMTTLLQNAPEDDSVYRFLDKKQVQGKPYYVYMTAAANKFLPIYYGKVKECLRNLEQAE

SEQ ID NO: 123819 - protein, 349 aa, unidentified
MLADELDYVVGVDTHRDEHVLAVVAAATGAVLARRAVRANARGYWEALRVVGETDGSGRAWAIEGTGSYGAGLARFLADRGETVLEVGRTPRAERRLRGKDDSLDAARTARAALAGETLALPRSGQRREALRLLLIARRSAVDVRREALGQLRSVIVTAPDQLRQELRELPLGRLLERCRRLRRIRSASADELSTRLVLRSLARRIEAATAEADELERELLGHVRAVAPRLLDEPGIGPIVAAQLLVSWSHPGRVRSEAAFARLAGVAPVPASSGQTVRQRLSRGGDRQLNRALHTIVLHRRQHDPQTRDYIARRIAEGKSRRDATRLLKRYLARHLYRLLQNQEPLMT

SEQ ID NO: 123820 - protein, 391 aa, unidentified
MIFVGIDVAKDTHYAAVSDDSGAVLVKPFAFQNNAEGFCLLLKKLSEFDRSKLLIGLESTGIYSENLICFLYESGFRLAVINPIQTATLRKTAIRKTKTDKVDTMLIIKSLMVNSYRLYSQRDADSLKLRTLCRFRQNLKKSKARLKIQLAGYVNLVFPEFGKFFKSGIHIAASYALLKKYSSPKEIAALRTSTLCTLLSKASHGRFGKDTAEALKSLALSSVGVKNPYISIQIAQTIAQIELLEQQIKDLNSAIEEAMESINSVLMTVPGIGAVNAACILGEIGDIKRFSKPCKLLAYAGLDPTVRQSGQFTAKSTRMSKRGSALLRFALINSAWQLTLNDTTFKAYYDPKRSQGLNHYGALGHVAHKLTRVIFKLLTSDTPFNPAKLVA

SEQ ID NO: 123821 - protein, 439 aa, unidentified
MKEKKNVFPVLQPDAAGIDISSKEHFVAVNPARDDQPIRCFGSFTEDLYAIAEWLKKCHVNTIAMEATGIYWLSLFLVLEEAGFEVLLVNARHVKNVRGKKTDVSDAEWIRQLHSCGLLSASFQPDEFTRSLRSYMRHRKNLLQMAATHIMMMQKAMEQMNIKLQNVIADITGKSGMAIIDAILQGERNPENLVLLLDGRIKASRDIVKRSLQGVWKEENIFELQQSYEMYHLYRAKIKECDERIKNLIVQKSGPEQNINEPQKHHAKSNKNNLSFDAKQMLQQITGTDVTEIFGINDSNAIEILCETGFDMNKWPTEKHFTAWLNLAPNNKISGGKILSSKIPKKKNRAGQVFRLAAYAVQRSNNWLALFYHRIKSRAGVRKAITATARKIAVIFYKMIKDRIMFNPVSIENYAEDFKQRQIKKLQRQAKVLGLQLSL

SEQ ID NO: 123822 - protein, 448 aa, unidentified
MSKRQVIDDPVHQRVHERVAAVDVAKKDGTVCMRLPHPSRPGQRRSQVWTVTATMNQVRELAGQLSAGRVEKVTLESTSDYWRIWYYVLEAAGLDVQLVNASQAKNLPGRPKTDRLDAVWLARLTENGLLRPSFVPPAAIRALRNYTRARTRLAGDRTRCFQRLEKLLEDALIKLSSVASKLTTVSARDMIAAMIAGERDPVALAALARTRMKAKHDQLVEALTGMFDDHHGEVARLLLDQAAFCDAAIARLDILIKEHLAGITAARGVDASGETGPAAGTGPGAIVLPAVARLDEITGVSADLAAGIIAEIGLDMSRFPTAAHLVSWAGLAGRTIQSGARARNGHGHGNTHLRGYLGQAATGAAGTATFLGERYQRIARRRGKAKAQVAVARSILVIIWHLLADPSARFHDLGPRHYQTKIDKNRKTRSHIRQLEALGYTVTLTPAA

SEQ ID NO: 123823 - protein, 384 aa, unidentified
MRTEQAYTGSGDVLVLAVSLELAAAKWKVALHDGRRDKPAVHTVAEPQAAARLQEVLDLIEAHKEKWSLPADVRIAVSYEAGQEAFWICRALQARHIECYVVDPASIPVERHQRRAKTDRLDVIKLVINLRAWLRGERDRMHVVHAPSPQDEASRQLMRERGQLQKEVLQHLDRMRKLLATLGCWDAVNHRAFAGRLQRDEVCCHDGAPLPRQLRERLLRECERLALVEQQLAALEKTRQTEVPALARQRCDALERLHGIGEVGASRLALELFWREFKNRREVGACVGLVPQPYDSGDSQADQGISKQGNRRVRALLIEIAWNWLRYQPNSALTKWFNQRTQGTGPNRRARRIAIVAVARRLTIALWRYLRDGEIPKGAQLKSI

SEQ ID NO: 123824 - protein, 343 aa, unidentified
MQVVRIGLDLAKYVFEVHGVDSLGKVAVRKTLRRDAVARFFANLPRCLVGMEASNGAHYWARVLSDLGHEVRLISPQFVTPYVKSNKNDRNDAEAICEAVGRPSMRFVPPKSTDQLAVQAVHRIRRRLVADRVRLVNQIRGLLSEHGIVIARDISQLRRSLAVIVGNGDDGLSGMVRSLMRELQREMAEIDDRVATYDRRIRQIFRSSEQCQRLGKIEGIGPVTATALIAAVGDRTCFKNGRQFAAWLGLVPKQRSSGGRARLFGISKRGDRYLRTLMIHGARAALGKAAGKQDPRSLWLGKLRQRRHPNVAAVALANKNARIVWAMLSGGTFYEHAPSVKAA

SEQ ID NO: 123825 - protein, 337 aa, unidentified
MVFVIGIDPHKGSHTAAVLDVDERVVGELCVIADRRQRDRLLRFAQPFMPRTWAVESANGLGALLARQLVAVGEHVVDVPPTLSARVRLLDAGRTDKTDLHDARAAAIVALRHAGLRPVVPVDHAAVSRLLADRHHDLTALRTQAICRLHALMCHLVAGGLGRLLSADKATALRSVRPCDPVDTARKEVAHQLLGDVRRFDHQLGALKDRIAIEVLASATTVTNVHGVGRLGAATIIGHTQRVDRFPTAGHFARYNGTAPIETSSGPRVRHRLNPRGNRRINSALHVAAVTQIAHDTPGRTYYQRKLAEGKSRKEALRALKRQISDAVYKQLHADAK

SEQ ID NO: 123826 - protein, 311 aa, unidentified
MKTSVVYYVGIDVAKAELAVATSQSNAVFARDRAGLDRLVEWLRAQGPGAHVVLEASGGYEREVVAALQARDFAVSVVNAGWVRNFARSQGRWAKTDRIDARVLVDFASANAPRLRGPVSPEQQKLTDLVRARQQLVAVRTLLQNQLEHTRERLARRSQEELVELTDTRIRRLEKALAQLIAETPAWAAKVQKLSAVRGIGPTTAALLLAELPELGTLNKAEAAALAGLAPRNHDSGTFRGQRHIAGGRPAVRTGLWMPTLVATQHNPILKAFYQRLRAKGKPAKVALTATARKLLIHLNCLLKPSPLSPC

SEQ ID NO: 123827 - protein, 363 aa, unidentified
MASIALDRGDVIVGVDTHKDQHVAVAIDGVGGLIDEPKFLDANNGGYAELLAWARSLGKVHVFAVEGCGSYGIGLARFLRRHGHLPVEVSRPPRAGARRMSGKSDAIDAEHAARTALAGVGVVTPKLADGQVEAIRLVKIARDTAVKAHTTAMITLKAVLVTADQDLRDQLEVLSDFKLVTACSELDASADLADPAVAMRHTLASLARRWFDLHAEIKSHSKHLKALTRAAAPELLDAFGVGLDIAAQMLITAGDNADRVRSETAFAKMCGVAPIPTGSGKTSGRHRLNRGGNRQANAALYRAVIVRLRWHAPTIAYLERRTTDGLSKKDIIRCLKRYLARELFQLLPDVSAEQAPAPAARAA

SEQ ID NO: 123828 - protein, 340 aa, unidentified
MGELTTIGLDLAKHVFQVHGVDAEGATVLRKQLRRSQVVAFFSRLPRCVVGMEACGTAHYWARELRALGHEVRLMPAQYVKAYVKRNKNDAADAAAICEAVVRPTMRFVAVKTAEQQAAVLLHRGRERLVRQRTGLVNALRAHLAEFGIIAPQGLRNVGRLIAIVRDEDDARLPALARQVLEVLAAQIEQLEAAVAAIEKQLMAWHKSNPVSQRLATIPGIGPIIATALAATVTEPSGFRSGREFAAWLGLVPRQNSTGGKVRLGGISKRGNRYLRRLLINGASANLLRSKATNADPWVIGLRRRRPSLVVAVALANKTARIAWAVMLRKENYQRMAAAA

SEQ ID NO: 123829 - protein, 364 aa, unidentified
MDVHLRSTTVCALDAETGEAVTRRFRGNPWGEVAEWMSGFPGPSLAAYESGYLGFAPQRELSGLGVDCVVAAVSKVPRSAADLSSKNDRNDAARMAKAILSHDITPVWVPSPEIEGLRDLAGAHDAATARLAAAKQRLLAFLARRGYAYGGTTPAGNPRRYWTYDFLRWLDKVRPADDGGIRALAALRNEVEAADETREAVLAEYRAAVAAGPLSAEVEALQSIKGCGFALAAAFASEVGDFSRFRSGRQVTAYFGLAPKQRSSADSVRLGGISGAGNALVRRLAVEGSWRYAQAGHQPKLMPKGSGVPLEIRMHGRKGSERLLRRREEMLERGMPQAKANAATAAELVRWLWALGAMCREATE

SEQ ID NO: 123830 - protein, 345 aa, unidentified
MNKVMAGIDLHSNNLVIGIMDMDGKRVASQKLSCKLKEVVGFLSPFKQRLEQVAVESTYNWYWLVDGLQALGYPVVLANPAGMEQYSGIKHADDTNDAFFLAELLRLKILPTGHIYDEQLRPVRDLLRRRMTLVHQRTALMLSFKSLYTRTTGKEMTLSELKELEIKQAQDLYDHPANQLIAGMQIKHIEQLTESIERIEKVVLDCARELPLYTKLTTLPGVGTILGMTITMEVGDIKRFAEAGHFASYCRTVEAKRTSNGKKKAENNSKCGNKYLAWAFVEAANFARRYDEQCRKWYERKAAKRGKVIGTKALACKLAKAAWYLMALGTDYNAKRMFGQPATTQ

SEQ ID NO: 123831 - protein, 344 aa, unidentified
MVMIGIDAHKRSHTIVVVDEQGRQLAETTTGTGSSDHLQLLGWAARHGADRLWAVEDCRHLSRRLERDLLAAGERILRVPPKLMANARDGARSFGKSDPIDALAVARAALREPNLPVAKLDGRDREVRLLVDHREDLVQERTRMISRLRWHLHELDPENEPPARSLNHLRNLDKLALRLDGGDGLVARLARELTDRCRQLTIEIKELEKEITTLVATLAPSLVAICGCGPLTAAKILGETAGIDRFKSNDAYARHNGTAPLPVWSSNKQRHRLSRTGNRQLNAAIHRIALTQAHWHPDAKAMIARRRANGDGGLEALRILKRRLSDVVYRALKADAAVELLLAA

SEQ ID NO: 123832 - protein, 416 aa, unidentified
MHYVGIDIAKNFHVVTIIDENEVKVFKKAFRVENDLDGYTGFIEKLETISPDKTNFIIGIEATGIYGENLLEFLKLKAYNVKLLNPFQTSRYREQTTMKKVKNDNIDSLMIALFLKDGKYSEGYVTDDEYQSLRTLYRNRTTIQSDMQDLKKRILTNLAVTFPEFEYIVNPFTNIGLALLDKYPTAEHYKHSSVDRIVKVFRHIQGNNFTSEKAKQILEASKQSVYSGKAKDARAIAIKSSIRLLQMYLQEIEILEQEIFSLLEKQNISTQKFEEDMKTDDKTTTLINNLKSIPGVAERTIAAIISECGDLTRFPTTAKFIGYLGLFPTENSSGNSKNTGHLSKRGSSIAKHALYMSAVGCLLHNPELKTLYDTKKSQGKSKKESLIVVSRKLATIIYAIFKYNTPYNPNRVFAKS

SEQ ID NO: 123833 - protein, 460 aa, unidentified
MKNKSSKAKKHNKQKVTIDQNWQLINPDAAGIDVGSREHWAAIPPSRGGQTVRCFGATTPDLEALGNWLKEAKVSSVAMEATGVYWIAVFQVLERMGFKVLLVNSRQVKNVSGRKSDVLDCQWIQRLHTYGLLGGSFRPADPYCVVRSYLRYRDELVSARSTQIQHMQKALLQMNVQLSHVISDISGQSGLAIIGAIVAGERNPLVLAGKASQRIKSSRDKVARALIGDYRPEHLFVLQMAYSLYETYQTKIAECDQAMIEELNKLPDRVDVQAKPLPPRTEGKKINQALRQGLYQKMGVDLTAIEGIGAKVVLTMLTEVGPDLSAFPSEKHFTSWLGLCPDNRISGGKVLSSRTRRVVNRFSDALRLAATSLECSQSALGAYYRRMKGRLGAAEGVTATAHKLARLIYRLVKHGEEYVRLGLEQYEQKNKNRKLRSLQNIAATLGLQLVPVQAQTQGVS

SEQ ID NO: 123834 - protein, 347 aa, unidentified
MKVTTIAIDLAKNVFQVLGMTAEAKKVYNKRLNRAQLKELLCNTPACIVVMEACYSSHYWGRTAQEFGHTTKLIPAQHVTPFVRGNKNDSNDALAIFEASSRPNIRFVPIKSESQQEVLMMHRIRERIIKQRIACTNQARGLLVDFGIVFQQGFSAFERNMWDIINDSEQRPLLRYLVNQVYDDYLQMTKQLKGLNKLIKQKVEQTEAGLILLSMPGIGHVIASAFEACIDKGQAFNSPKELAVWLGLTPRQYASGNKSKIYGITKRGDSYLRKQLIHGARTVVCHAHKKDDALNQWITQLKARIGFNKATVATAHKLARIMWVLLRKQVLYQAQAGKIVEVTECAR

SEQ ID NO: 123835 - protein, 413 aa, unidentified
MDVILERCAGLDVHQATVAVAVRLPGPGKARTQLIQTFGTTTPDLLTLRDWLSAHGVTHFALESTGVYWKSVYYLLEDAFTVLLVNASHMKNVPGRKTDVQDCAWIAQLLEHGLLRGSFVPPPPIRELRDLTRYRKALIQDRTREANRLHKVLEDAGIKLATVATDVLGVSGRAMLAALVGGTTDPAVLAELARGRLRAKLPALRQALTGRFRARHAFLIAQILAHLDYLEETIATLSAEIAAQLAPFAAAVTRLRTIPGVDQRTAEVVVAEIGVDMSRFPTANHVVSWAGLCPGNYVSGGKRHRGTTRKGCKWLRATLIEAALGAIRKKDCVLGARYRRIMRRRGHKIAVVAIARTLLEIAYLLLARETTYQELGADFFDRRDKERATHRYVRLLQQLGHHVTLESTTPIVA

SEQ ID NO: 123836 - protein, 363 aa, unidentified
MRYIGIDLHKQNIVVAVGDSRGSRLVSRTFSTGNVVPVILFFKRQTPFTAVIEASCSYRWLYDLLSPLGEVKIAHPLRLRAIVSGRAKTDKLDSAMLAKLLMAGMIPESYVPPRPYQDLRDITRARARLSRNATKAKNEIHALLARANCRAPYRSPFGPRGRRWLLKANLGPGADCVKSELVRRLEHYESELAVMDAEIKNIAGMFPEIESLQDIHGFGLFSSLLVTGEIGEPCRFPSGEKVAAYAGLTARVNQSGSHSYHGHITRQGSPWLRWILVQAAMHVTRRDVKLRNFYQRVRKRSSAKIARVAVARKLAVISWVRLKLWHRRHGAKMQYCDKATRVTERSGLVLMTGERESSPVCAV

SEQ ID NO: 123837 - protein, 437 aa, unidentified
MDNYAGVDWASEKHDVVVQDEAGEELLAASFAHDEKGLRSLCRTLARLKVTLVAIERPDGLLVERLLDAGLRLLPLHPNQVAATRARFRAAGGKSDRFDAFVLCELARTDHHRFRVLEPDSDQTKALRAMTRAREDLVQTRVALTNQLRAELERFWPGPIGLFSDLDNLTSLAFLKRYPSPADTHGLGEQRLQAFLTRHRYSGHKPASELLAKLRRAPEGRAGELEGQAHRAIVLSLVAALEPIVAQIKQLERQIATAIREHPDGEIFTSLFRSPRSVITAATMLAEMGDCRARYPTRDALAGDAGQAAVALESGKRKVACFRWACNKRLRDAFDTLADSSRHHNPWAADHYARAIGRGHDHPRATRTLGRAWCRVVWSCWQTRTPYDAARHRALQQHMLVTVPTPSGPVPDTAATQRMLGVAVTRQGRPQARAQRA

SEQ ID NO: 123838 - protein, 324 aa, unidentified
MREYVGIDVSKETLDVCYLSSNQSLKPKHQVFDNTDKGHKALLRWLHQMTQKTFANIHVTLEATSVYHLAIAKCLQTKQVLVSVVNPLHSYHYAKGAGMNGKTDKLDGEMLAHYARERKPVAWHPAPKQLIELKALNLRLYAVEKDIRREQNRLESAELAAHSKAVIRLIKVSIRQLEKQAQTLVDLIEDVIESHNELKRNRELLQTIIGVGEVTSRYLVAEIYEGRFVSASQCAAYMGVIPIPEQSGKYLKTRLSKRGNRKMKAKLYMAAISAKQYNPVLKKHYDNLIARGKCKMSALCAVMRRLVQICFGVIKHQKEFCLLA

SEQ ID NO: 123839 - protein, 379 aa, unidentified
MQTIIKQCVGIDISKGSFTACVCRKLLSGEALLSSVESFENNKTGYNQFVKWSRKITIPSVEVLYLMEATGIYYEGLAYHLHKLKQSVCVILPNKVKHYAKSLNVKTKTDIVDARVIAQMGAERNLPLWQPPLPVLKQLRDLTRLYTDLKNERTVYLNRLDSEQASVVALPFVIKSNQLILNELEKQIKQCEKEIEKTIMSEEWLAEKVNKLITINGVGLITLAIVIGETQGFAMVSSRKQLASYAGYDVVQIESGTSVKGKTHISKKGNSRIRAALHFPALTASRYNQELKEDYQRINITKTSKMIGATALQRKLLLLIYTLWKNNDAFRTSGDHETKLLLRRDEVPKKVGNPKELPTQDELPYDLSTEILLSQVQRS

SEQ ID NO: 123840 - protein, 408 aa, unidentified
MEVVYRCCCGIDVHKKIIVACLNQGGEQSLREFGTTTSEIKSLATWLTESGCEIIAMESTGVFWKPLYNLFELMDLDAIVVNAAHMKALPGRKTDVKDTEWIADLLRHGLLKASYIPSREQRELREITRYRKSLTEERCRETNRLQKILEGANIKLDSVVKDINGKSARKLLEKIIEDDVPTSEEEISKMIHGRMRSKLGQLVTAIEGITTPLQRKLLAQVIDHIDDLNRRIADLDKLVQDYMDEYEAAITALCDIPGIARRSAEVILAEIGLDMSRFPSAAHLCSWAGVCPGNCQSAGRRKHGKTTKGNKPLKTILTQCAKSARSVKGSYFSAQYQRIAARRGKNRATLAVAHSMLIAIYHMLRNNVPFRDLGSDYYDSFNRDRKIHGYLKRLKALGWEPDALPGSA

SEQ ID NO: 123841 - protein, 347 aa, unidentified
MGEVSVIGLDLAKNVFQLHGVDAHGKVVLRRRLRRAQVEEFFATLPPCLVGMESCPGAHHWARVLQRLGHRARIMPADYVRPYRKGGKNDASDAEAICEAVQRPGMRFVAVKTAEQQGVLALHRARALLVRQEVALVNAMRAVLAEHGVVLGRGRREAVRAVAHLLEEGEGAEALPESVRVALAALLEAHRQLEARVRALDAALRTWHRGCEASRRLATIPGIGVLTATALVATVGEGGAHFRSGRHLAAWLGLVPRQHSSGERQRLGRISKRGNGYLRRLLVLGAQALLRHVRRHMAAGRPSALPWAERLLRRRPPNVVAVALANKLARQAWAVLHHGEPWRAQTA

SEQ ID NO: 123842 - protein, 338 aa, unidentified
MIVIGLDVHKQSVTAVAVDEAGRPLEEKLILVGSDELPAWAAGLDDERLWAVEDCRQLTRWLERQLLSVGEDVVRVPPKLTVPERRAGRTRGKSDPIDALAIARAAIREPDLSRPRPDERVYREIKLLVDHRDDLVDQRRRTQQRVRWHLFQLDPTYQVPLRMLGRSSHLERVARWLARQDQDLQVRLARELVNSCRQLNRQIAELDLQLEQRVRETAPRLLELPGCAAVTAAKLLAEIGPVDRFHTDAQLARHSGVAPLEASSGKSQRHRLDRGGNRQLNAALYRIAITQARYHAPAREYLERKRAEGKSRREAIRCLKRLLVRVVFNTLKTSPALT

SEQ ID NO: 123843 - protein, 319 aa, unidentified
MFNLGIDVAKAKLDCALRLPNGKHRNKVVDNNDKGYAELHAWLLKHEAGSPRVCMEATGTYWERVAEYLAGRGMLVSVINPAQIKAFGASRLVRTKTDKVDAQLIADFSHERQPEPWLAPSPAEQALRAMVLRLEALQAMRQQESNRLDVARAAVRQGIVDHITWLDGQIKELIRVIKRHIDDDPDLRGKRELLDTIPGLGERTIPVLLSYYANPERFDSAKQAVAFAGLDPRQHESGSSVRGKPRMSKVGHSFLRKALYMPAMVTVYRTAWGKRFGKRLSIAGKPPKLIIGAMMRKLVHVAFGVLRSGKIFDPTLHAA

SEQ ID NO: 123844 - protein, 330 aa, unidentified
MQKFKNRIGIDVSKLTLDMHSAEHNKHLKISNDSNGFKALLKWLKELNIELHDVLFVMEFTGGYEYRLVQFCTAKQIAFCRISGLAIKRSMGITRGKNDKVDAFRIAQYADEKQKTLEPSKPINTSILKLKELLALRKRLVRENAGYLSTIKGRKDMYDAPKSDLHVKILNSKLKENKQYIIQIEEQIQSLFEADDTLNNNYKLLLSIKGIGMVNAAMTIGYTENFTSFIDARKYAVYAGVVPFEYTSGTSIKGKKRVSQIANKELKQELNQAAKSAIQWDEEMKQYAHRLIDKKHYRIILNNVKFKLILRMFAVVKKGELYVDRYKLTA

SEQ ID NO: 123845 - protein, 317 aa, unidentified
MTFAGIDVSNPPRALPLVPNPPKPTRLRFPNTPEGRKALLAALAHLRPAWVALEPTGAYHLPLLKLLAENRLQVALVNPYHLAAFRKAKGERQKTDRHDALLLARYAQVYHGELRAYTLPPEALRELKALVGYREDLAGRERAILNQMEAVEWAGSGEVLALLQKELACVKGLLGEVEARIQALLATLPEAEALMALPGVGPQVAAAVLALLPPELWGRAKRAASYAGLTPEREESGKRVERSRLSKKGPPLLRRKLYMGALVAVRHDPEMRAFYHRLLSRGKRKKQALVAVAHKLLRRMMGRLREYYATQLDQGVA

SEQ ID NO: 123846 - protein, 462 aa, unidentified
MAKKAKKIKKGKHLELKIVNPDAAGIDVSSTEMQVCVPLDRDAEYNRKFGVFTEDLERISNWLVSCRITTVAMESTGIYWVPLYMNLVAHGIEVYLVNAGAVKNFSEDKTDEIDAESLMLLHAYGLLKPSFQLDNCVREIRNLSRHRDNLTRTAAKEIQHMQKSMELMNIKLGNVISDITGKSGQAIIAAILSGERDAQNLANLADHRCKTSKETIAKSLVGNWNEDLLFALQQSYELYLFIQNQIIECEKKMEKLLQKYSSKLPLQSREIIRCEKQIEKKTKVAFDIESYGYKIFGVNLMRIPGINQGSLLKIIAELGHDFTEKFDTYKKFCRWENLAPNNKITGGKIISSRLPKRKSPVGQIFREIAVSMSGSKSPFGDYYRRARSRKGPMGAIVATANKISKVVYTMVKTKTEYDERLIKINEPVLLMRKLHNMQKSMAKLQEQIQFYQIKPVLQIANN

SEQ ID NO: 123847 - protein, 443 aa, unidentified
MLSDALHVCNPHAAGIDIGEAEHWVAVPPGRDPQPGRRFGTFTVDLDALADWLIDCGVITVAMASTGVYWMPLFELLEARGVQVLLIDPRQAKRAPGRPKTDRLDCQWLQRLHAYGLRAGACRPDDQVCVLRAYLRHRQRLLTYAAHHIQHMHKALQQMNLKLTQVVSDLTGVTGMAIIKAILAGERNPQHLAKLRNPHCHHDADDIAQALQGTWRAEHLFALRQAVELYEVSHQQMAQCDQQITRHLETFADKSDGQPLPPKARRHKKTNEPRFDARTPLSRLAGVDLTTIEGIEENTALILLSEIGTDMHRWPSVKHFCRWLGLCPQHKISGGKVLSRRVRPGAHRVTVALRLAARRLHHSQSALGAFFRRMKVRLGTPKAITATAHKLARLVSSLWQHGSAYVQQGLDAYEAQYRERKVTTMAKQAKALGYTLVLLAAQG

SEQ ID NO: 123848 - protein, 342 aa, unidentified
MSDVSIIGIDLAKRVFQLHGACANGAVIFRKKLTRVQLLAFISQQPECTVAMEACATAHCWGREIEKLGHTVRLIAPNYVKPFVKRQKNDVADAEAIVEAASRPTMRFVALKSEAQQARAMLFRTRQMFIGQRTQTINALRGHLAEHGVVAPKGAIHVKRLAGAVADETIGLPEDVRELAQVYLAQIEGLNVQVAALDQRMKGAAKEAEAARRAQTMPGVGPITALAIETFAPDLNCFRRGRDFAAWLGLVPKQNSTGGKPRLGKTSKMGQRDIRRLLISGAMAVLQAVERFGTPHNSWLIAMLERKPRMLVAVALANKMARGLWAMVTKKEDYRTPAATMT

SEQ ID NO: 123849 - protein, 367 aa, unidentified
MKKVSTAVIKQSRNFSQQKLTIGLDLGDRSSCYCVLDETGRMVMEHKVCTTPKALQAAFGAMPRSRIALETGMHSPWISRLLSGLGHEAIVAHARNVRLIGESRRKDDRLDAQTLARLARIDPELLCPVKHRSAKAQADLTVIRARAGLVRARTALVNTARGLAKSYGERLRGCNVRNMNPEKAEGLSPELQAALEPLLMALESLSEQIREYNERIEKLAQESYPQVTLLKQIKGVGTLIALTFLLTLEDPHRFRKSRDVGCYLGLQPGRRNSGQSEPQMHISKEGDPYLRTLLVQGAQHILGPFGLDCDLRRWGLKLAERGERNGKKRAIIATARKLAVLLHHLWVSGEVYEPLHNGGRMAMPAAA

SEQ ID NO: 123850 - protein, 428 aa, unidentified
MLKINPLSTLYVGIDVSSKSNFVCALDFYKNKYINSSFANNQPGAEELAKKILECLKEHPDLNTIVAALESTSVYSIHIANFLSSCEELMHFKPYVFVLNPKCTANYKKSYIGLGKSDPIDAFVIADYARAGNIETEPWRGSQFLALKRLTRHRLHLVECMTREKTYLVSNLYLKFSELQMLEGDDQPFCDIYGATSSSVLTEYLSPEEIIDSSEESLINFLAEKSRNRIKDISKTAELLKKAARDSYRLDKALYEPLNVSIASSFNCIGTFKKEIKLIDTAIEREIKGLNPNAFIILQSIDGIGPVFAGGIVAEIGDISAFHSSDALAKYAGLMWKSNQSGDFNGEDTPMSKAGNRYLRYYLGEAANSMRKHNVEYGAYYRRKYNEVPKHQHKRALALTSRKFVRLVYGLLARNQLYSGVSLDTSNE

SEQ ID NO: 123851 - protein, 403 aa, unidentified
MNNVVGIDVSKGKSMVSVLRPFGEVVAKPFSVGHTGSELKELADYLKSLDGETRVVMEHTGRYYEPVARFLHEEGVFVSAVNPKLIKDYGNNTLRKVKTDKADSRKIARYGLDNWAELRQHTPMDTIRMQLKTLNRQQSLYSKTKTMMKNNLIALLDQTYPGVNALFDSPVREDGSQKWVDFAMTFWHVDCVRNMSLTAFAERYRKWCKRHGYNFSQSKAVEVHAGAQDLIAMLPRDALTKTMVRQAIDALNAVSASLERLKAEMQALAAQLPEYPVVMTMHGVGDSLGPQLMAELGDVTRFTHRNAITAFAGVDPGADQSGTHEAKSTRVSKSGPPELRRALFLVMDCLLKTQPQDDPVYRFMDKKRAEGKPYLVYMTAGANKFLRIYYGRVKEYLAQLENS

SEQ ID NO: 123852 - protein, 414 aa, unidentified
MIDERRWYAGVDWASESHHVFLTDENGRRIGEKIFRHSGEGLAEMAVWLSSTSGGVPAQIHIAIEVPHGPVVETLIERGFKVHAINPKQMDRFRDRFTLAGAKDDSRDAEVMASALRTDLRCFRPLAVADPVVIELREWSRIADDLGAERNRLTNRMREQLWRYFPAMLDLESDLGAEWLLDLWEIAPTPHKAIRVREATVAKVLKRNRIRRFDAAHVLDVLRKPPVQVAAGTTEAAAAHIKTLTARIRLVNHQLGEAHRQLDALTARLIPSEENGPGQRKQHDVEILASLPGVGRIVLATLLAEAFDALQRRDYTALRSLTGVAPVTKRSGKSCIVVRRQACHDRLANAMYHWARVAVQRDPRSRSKYAALRSRGHSHGRALRSIADRLLNVACAMLKTGTTFNPSLATEKTP

SEQ ID NO: 123853 - protein, 483 aa, unidentified
MQPLYRRCCGLDVHKKSLTVCVLAPVGKPELGIKERVFRTFTRDLREMRGWLKNCSVTEVVMESTGQYWRPVWNVLEGHIDKLVLMNPQHVKGLAGRKTDRKDARWLAEQLQGGRLRGSFVPPRAIRELRELTRSRVHLLEELNRVKNRIGQLCETGNIKVSSVATDLFGVSGRKMLAGLVSGLHDAPWLADYARGTLRSRGKQLELRRALEGTLTPHQRWLLSSELNHLNWLEAQVMEMEQAIVYHVAPYATQMAALATIPGVDVITAWTLLAELGADMSVFDDAEHVASWCAICPGNRESGGKRMSGRTRKGNCYIKRALCQAAWAASHTKDTYLAATYRRIRAARGHNKAIIALAHQMVIIAYHILRTGEPYQELGGDYYDQRNKPRITRRLVQRLTRMGFKVTLELDPASTAFIADSSASPMPAVAANDPAAREGRRGRGRPCKCAERGLQCHHKNSKLLGGATVPSPSDASVCAPDFS

SEQ ID NO: 123854 - protein, 466 aa, unidentified
MTPPRRQQPKRRRTSPSLLKRIKLHVAGVDCGAAEHYVAVPPDRDATPVRAFKTFTSDLHRLADWLAACRVTSVAMESTGVYWIPLYEILEGRGFEVVLVNARHVKNVPGRKSDVTDCEWLRELHSVGLLRGSFRPTAAITVLRAYLRHRETLVESAAAHVQRMQKALGQMNLQLHVVISDITGVTGLRILRDIVAGHTNPQDLAQYRDHRCHASEAEIAAALTGHYRPEHLFALKQNLELFDTYQRQLADCDAATEAHLQTLAAEATVVLTHPLPAPRSTAKPRRNEPRFDIRSPLHQLTGVDLTQVDAIGPYSALRLLAEIGTDMSRWPTEKHFTSWLTLAPKNKISGGRLLSSRTQPSANRAAAILRLAAMSLGRTETALGAFYRRLAYRVGKAKAITATARKLAILVYRTLKDGLVYQDPGAAAYDAHHRTRVLRRLRQRATALGFTLVNLETGEQLETVVS

SEQ ID NO: 123855 - protein, 372 aa, unidentified
MDQVTTTFVAMDTHKQTISVAIAEGGRRGETRFLGEISSHPDAVAKMVGRLAKKHGKLAFCYEAGPCGYGLYRQIVALGHECVVVAPSLVPTRPGDRVKTDRRDAVTQASLFRSGELTPVWVPDDAHEAMRDLCRARQAAMEALRRARQQVLSFLLRHGRVYSDGKHWTGKHRLWLAGQRFEPAARQIAFEELVQAMDEAQARRDRLAKQMQELLPSWSLAKVVTAIQALRGIAAISAITLVAEIGDFKRFADPRQLMAYLGLAPSERSSGAKTARGAITKAGNTRARRMLVEGAWTYRLPARMGAAILERNTILPQAIKDIAWKAQVRLCARYRRLARAGKPTNVVCVAIARELAAFVWAIATNAAVAAVA

SEQ ID NO: 123856 - protein, 410 aa, unidentified
MVKENFIYVGIDLHKETHTAVMIDCYNQKLGEITFPNRPADFPKLVTKVKKCNTDAKEVVYGLENAYGYGRPLAVWLIDKGYFVKDVNTAISHRQAKHRGAMYRKSDSDDAEAIALATLNMLDKLPDACPNDAYWSLGQLVHRRDNIMKQRTRLVNQLHEQLCIAYPSYKSFFNDISRPTALYFWEHYPSRKYLRGKSVEDLRKELVPVSHNRCSTKNCEKILDAAASDKVKNNAYQDARDMVTLSIVSDLQHYDSQLAEVDKMLEQMYKMLGCTLTTIPGVNVITAVKILAEIGDIKRFSNANKLAQFAGIAPLHLSSSGKGKDVATKQGNRRLQATIYFLAIQMVQVSSKGTPRNSVVRAYYEKRKAEGKTSQQALICISRRLISIIYGMLKNGTEYRMPVVESAGEK

SEQ ID NO: 123857 - protein, 387 aa, unidentified
MPQPNDLSRSLVALDQDSTIIAVVEMSQSSWLVAGMLPGIERQPRKKLEPSAERLLGLLHRWRDEAVKAGRKITRIALAFEAGRDGFWLARWLRAHGVEAHVIHPSSVAVSREHRRAKTDRLDTELLKRGFLGWLRGERGHCTMARIPTIAEEDAKRPNRERECLVRERTRIVNRMKGTLARLGIRNFKPTLRKAAERVTTLHTPEGSALPPNVSAELQRNMARLGFVVSQIKEIEAARQKRLEQEPETEPHAMVRHLARVVGVGIETADMLVNEVLSRPMRDRKAVARYAGLTGSPDESGAKRREQGLARAGNARVRRGMIQLAWRFLRFQKESALAQWYRSRTADSRLGTRKTMIVALARKLLIGLWRFVTTGETLEGVILRPAG

SEQ ID NO: 123858 - protein, 405 aa, unidentified
MVDIMVSDFRKGRYNLMKIFVGIDIAKLNHFAAAISSDGEILLEPFKFTNDADGFQLLVSKLESFDKNSIIIGLESTAHYGDNLVRYLVAEFYQVCVLNPIKTCQMRKNNIRKTKTDKVDTFVIAKTLMMQDDLRFITFFDLDMMDLKALGRFRQKTIKQRTRLKIQLTTYVDQVFPEIQYFFKSGLHQHAVYALLKEAPSPKEIASMHMTHLANLLKVNSHGHFTKELAKELRVLAQKSVGANDSAISIQITQTIQQIELLDSQLEKIEAEMTDIMKFNDSVIMTIPGIGYINGGMILGEIGDIHRFSNPNKLLAFAGLDPSVYQSGNFQAKTTRMSKRGSRVLRYALVNAAWNVVRNNATFKAYYDAKRAEGRSHYNALGHCAGKLVRVIWKMLTDEVEFNLE

SEQ ID NO: 123859 - protein, 451 aa, unidentified
MEEKISMEIVNSHAAGIDVGSRSHWVAIGQNDKDIKEFGVFNQDLFELADWFKEHGIKTVAMESTGTYWQNLYAVLLSSGFHVILCNGKFTKNIKGKKTDVKDCQWIQKLHSLGLLSISFLPDGETEQLRTYCRHRSNLIHNAASTSKKMQKYLRLLNLRLDVVVKDICGLTGLNIIRSICSGETHPERLADLRHGNCRKSKEEIALALQSNGRKDYLFALQQELDTYDHLQEKIRQCDVEIEKLLNEIINNDDNKKQHYIDSKPHKRINKNTPENIDLNLKSYQMFEGTDLLAIEGMSFSTVLSLMSEVGLEGIRKFPTAKHFCSWLRLSPNNKISGGKLLSSKVPKGSNRLKIALRNAANAIGNLKESTPLRDFFQRINFRKGRVSSISATARKLAVIIWNMVVKRVAYINPERYLFLDQKRKLGLVKRIKKQIDKFGLTNEELGFANT

SEQ ID NO: 123860 - protein, 412 aa, unidentified
MEVVYPCCCGLDVHKKRITACVLWAEAKGKSRKEKRGFGTFTHDLLRLADWLQECGVTHVALESTGVYWKPVWNILAEQFEVLLVNAQHIKAVPGRKTDQKDSEWIADLLQHGLLRGSFVPPRPTRELRDLTRYRVSLAQEINRIANRIQKVLEDANIKLASVATDALGASGRAILEAMLAGEQDPTRLAEMSKGLLRNKIPELKLALEGRMTEHHRFLLRQLFDHLRFTESKLSEIEQEIDRRTRPFEDKVTRLCIIPGVDKVTAWGMLAEIGLDMNQFPSSEHLSSWACLCPGSFESAGKRLSGKMRKGNVSLRRCLSQAAWAISMTKNNYLSALYRRIAARRGAKRAIMAVAHALLVIAYQMLKRQEDYRELGADHFDKIDINRIRRSLVRRLERLGHKVTLEPIAQSA

SEQ ID NO: 123861 - protein, 320 aa, unidentified
MQAVVGIDVAKAKLDVALKQPAGKWKTKVVANTAAGFEELRSWLAKHSVSSAHVCMEATGVYWEGVAQDLADHGFELSVINPAQIKAFASALGVRTKTDSVDAKVIAQFCASQAPARWQPPSKSVRRLRALVSRREAMVELRVQEMNRLEVAATDVVRRSIEQVMSTLNEQIAAIEREIAKDVDDDPTLRQQRELLASIPGVGDKTIANFLSHYGGELRFQKTRQAVAFAGLDTRQHQSGSSVHGKSRLSKAGHSSIRRALYMPAVVAMTRTTWGKAFAQRLLAAGKPKKLILGALMRKLLAIAYGVLKSGKPFNPALHA

SEQ ID NO: 123862 - protein, 395 aa, unidentified
MVVVDRAGKIVRSFRFDDTAEGWQSFRETLAPLQPLAVVVETRAGAVVERLLDSGLTVFPISPKAAQRYRDRKAPAGTKNDQLDAWSMADALRSDGHAGRAMRPDDPATQELRLLCRDEVHLIELRTALVLQLRAALGEYFPAALRLFEEWTLHAAWSFVVAFPTAAAARDAGRAAWKTFFTKHGLSRGKLMTRRLDILDHADALAGSPAVTAAKSRLAVTLARQLLLLDEQLGEQRRAIEARFEQHADSRVFASLPGAGVKLAPRLLSEFGSDRERFDSVEALQCHGGSAPVSFQSGQIHRVRFRRACNRFLRAALHLWANLSRRESAWAAAYYKQKRVEGKSHACALRCLAQRWLKILWRMWQTHTLYDESQHLANQREHGSWVPKLLDAPAA

SEQ ID NO: 123863 - protein, 359 aa, unidentified
MKPLQQSFQTVTQEEASMDRVTTIGLDIAKRVFHAHGVNERGEAVFSRKIGRSRLLEFFASLPRCLLALEACGGAHHWARELRGMGFEVRLIPPAYVKPFVRRQKNDALDAEAICTAARQPDMRFVAIKSEEQQSSAMLFRTRDLLVRQRTQTINAIRGHLTEFGHIAPQGTAHLEKLAAVVRMEETNLPSSARAMLSEMLDLVEGFDERIDRLDKEIGRRAREDEGARRLMTIPGIGPITATALMALAPAAETFSRGRDFAAWLGLTPRQHSSGGRQKVGRISKMGERTLRRLLIIGSSAVVQQAARRGAADGSWLQRMLARKHRMLTTVALANKTARIVWALLTKGEDYRAPAPVMA

SEQ ID NO: 123864 - protein, 343 aa, unidentified
MNITTLGIDLAKNTFSIVGMNQHGKVICRKTLSRNKLLPFIAQCPPCLIGMEACSGAHFWARSFEEMGHRVGIIAAKFVEPYRKGGKNDNNDAEAICEAVKRPNIWFVQVKSPDQQAALCIHRVRQGLVKDRTALLNQLRGLLAEFGIVIPKGRYPAQAMIPDILQNTNNGLPMLARNIITDLWERIQQANKQILSYDRDLAKLVREDDVAKRLMTIPGVGEQVASGVVASVPDPRLFKNSRQFCAWLGLVPRQYSTGGKTRLGRITKHGDKYLRMCLVHGARAVVASLKDEKQDHVSCWLRELINRRGYLRAVVALAARNARLIWTLMIKGEDYKCMPVMEA

SEQ ID NO: 123865 - protein, 410 aa, unidentified
MELLHPHCAGLDLHKETVVACVRHMADGKVTTDVKSFQTTTHELMELSDWLSSQGVTHIAMEATGVYWKPVWHILSDGEFALILANAAHVRNVPGRKTDVNDAVWLADLMAHGLIRASFVPDEPTQQMRDLLRTRKQFVRERSSHTQRIQKTLEDANIKLDSVITDIVGLSGRRMIEALIGGETDPEALAALAHGRIRATKAELEAALRGRVTAHHRFMLRIHLNHLDALNTTIADIDKEVDGNVEPFRVAIEMLTTIPGVSSLAAEVMVSEIGIDMSRFKTEGHLISWAGLCPKNDESAGKRRSNRMKKGAPWLKTTLIQCAWAASRTKASYLQAQYLRIRSRRGPKKAIGAVAASILTAAYHMLKDGTLYQDLGASHFDHRDKGKQALRLVNRLQSLGFTVQITSMAA

SEQ ID NO: 123866 - protein, 389 aa, unidentified
MWGGENCESIFSVQNNLGGAKLLSERIVSALSSMRLNDVVIGLEATSIYGNSLVYALREDGSLGRFQRKIHVLNPKQVKKFKESYPDLPKNDFVDAFVIADHLRFGRIAKEVYMDDYRYQALRTLTRARFDVIQNLTREKQRFANYLFLKCSGMAQDKNIPNTSATTIALMEHFETVDDLANADLDELTAFIAKTGRGRFADPDVVAKAIQTAAKGSYRLPKTVNDTVNQAMSVSIASMRALKEQVKVLDKAIEQQFEIIPNTLTSIPGIGMVYSAGIIAEIGDIHRFNSQASVAKFAGLVWHKNQSGGFEAEHSQMIKSGNRYLRYYLLEAANSVRRCDSEFRRYYDLKFKEVNKFPHKRALVLTARKLVRLVFRLLKDNRLYIPPEG

SEQ ID NO: 123867 - protein, 335 aa, unidentified
MQIYGIDLAKEKFDVSFFDLTSKKVSNQPSHKVVTNNLKGIGKFFKGLPSDAVLVAEHTGVYGDTLLKCCMDSNVKIAFVGGYVIHRYRATPDRAKTDVLDCALLRDFGERYPDKLKYKTFPEEALYELRQLARHREMLVEQRKQLITADKSEDCRPIRSLAVKRSMNRIKEMLDTEIAETEKEMLKVINGHESIHHNYELVKSVDGVGLITAVELLVKTENFTKITTARQYAAYAGTAPYEKSSGKMDKGAHISKIGNRRSKTLLYICAESARLHNKEIKLYYERRTLIDKKPRHYVLNAIANKLLRIIFTLVEKGEYYDANFIRQDPRVVKYN

SEQ ID NO: 123868 - protein, 377 aa, unidentified
MTIVADSHAAVDVGELTLGVDTHAETHVAAVIDPLGRHLGHATFDTTVAGFKALLAWATDIGPVSVAGVEGTGAYGAGLARFLTAEGIRVVEVDRPDRKIRRDQGKSDPIDAYAAARAAASGRASGTPKTRTGDVESVRVLRVARNGAVRARAKALTQIKALIVTAPDALRAQLEGLDGAALVTTCARLRSARGDAPTPSPFAKRPPRPGRLVDPTAATKRSLASIAERVQALDTEIAALDDDLEAILAPIAPTLLGLQGVGYDVAGQLLVTAGDNPERIRNEAAFAHLCGVAPIPASSGKTTNRHRLNRGGDRAANAALYRIVLCRLRWDPTTRAYLERRTQQGKSKKDIIRSLKRYIAREVYAAIQTDLNPTIAP

SEQ ID NO: 123869 - protein, 350 aa, unidentified
MKYYKSTTEYNCGIDLHSRQMYVCLMDKEGTKLLHTNIKGNDFDYFLKRIEPYKHDLTIVCESTFNWYWLADACCDAKLEFVLAHALYLKHIHGGKNKNDRIDSEKLAHLLRANLIPPAYVYPAEYRPLRALLRQRMKYVWARASLIGHLSMDQHAEGVVPVSTSSNREDWEQRILEQYTDPLHRLAVESDMELIRSYDKLIKRLENELEQRAKKFFRCNYVLLTTVPGIGKIMALTILLEIDTVERFPTVKDFTSYARLVKGSVASAGKVKGLTGGKMGNAYLRWAFGQIAILAKQHDPLINIYGERLVAKHGKFKGNAILSNKIARAVYFMLHNKTVFDVEQLIATSI

SEQ ID NO: 123870 - protein, 388 aa, unidentified
MSPFFDASKSVAALDQDSTLVAVIEMSQTKWLIAATVPGFERNPLKKLDADPDSVLRLLRRWRSEAIQAGREVRRIVVAYEAGRDGFWLARWLQARAVEAYVIHPSSVAVSREHRRAKTDRLDTELLMRAFLGWLRGEKRHCSMAAIPTINEEEARRPNRERDNLVRESTRIVNRIKAILARFGIRAFKPNLRKAAEKLEALHTAEGMPLPERSRAELRRNLGRLHLLREQIHEIEQERLRQLSVVPDTEKGPLAMVRLLSRIIGVGIETADMLVNEILSRGLRDRRAVARYAGLTGAPDESGQRRREKGLARAGNARVRYGMILLAWRFLQFQKDSALAHWFCARTADGRGGTRKTMIVALARKLLIAFWRLVTAGEIPTGVALRPV

SEQ ID NO: 123871 - protein, 422 aa, unidentified
MLEEAADREEIIQRVAALDIGKAELTCCVRVPAEGRPGRRLQEVQAYPAMTGSLLRLAGHLRCLGVTRVVMEATSDYWKPVFYVLEAHGFDTWLVNAKDVKHLPGRPKTGRLDAVWLCKVAERQMIRPGFVPPPEIRRLRDVTRYRIDLVAVRTAEKQRVEKLLEDACIKPGVVASDIFGVSGRAMLDALAAGERNPKALAQFARTRMRGKISVLEEAFTGHFTGHHAFLPAKMLARIDGLNADIAELDARIEEMTAPFASAVQRLDEIPGIGRIAAAVIIAEVGLDMARFPTASHLASWAKFAPGVKESAGKKKGKGSTGHGNRYLARVLGEAAVGAARTDSFPGERYRRIARRRGAQKAVVAVGRSLLVIAWHLLSDPQARYADLGSDFFSQRINPERRKRAHIHQLEALGYKVTLEPAA

SEQ ID NO: 123872 - protein, 357 aa, unidentified
MSEYGGQQFVGIDLHRRRSVIVRTTEAGETLESVRINNGLDSLAAVMGRAGEAPEVVLEATYGWYWAVDALQAGGADVHLAHPLGVKMFELRRVKNDFRDATDLADLLRMGRLPQAWIAPPATRELRELVRHRAKLVALRSGCKCEVHAVLAKLGVQVPMSDLGVPPACGGVGERGLALLERVSAPAPYLARVQSLQRLIAVLDEEVDLGVPPACGGVAGLARGRLAADPNYQAVQTIPGIGPILAAVFLAEIGDVHRFPGPEQLTSWAGLTPKHRESDTHLHRGHITKQGSKLTRWAAIESVHRVGPHTSVGALRERVGAHRGKNIGAVAAARRQLEHVYYALRDGHVRALHRVAA

SEQ ID NO: 123873 - protein, 374 aa, unidentified
MTDCSEVFVGLDTSKLRNAVAIAQSGRNGEVRYLGEIENTEAATRKLVKKLAASHRRLTFCYEAGPTGYGLHRQIKALGHECVVVAPSLIPKKPGDRVKTNRRDALNLAKLLRAGELTAVWVPDARHEAMRDLVRAREAAVDDLKSKRQQVLSLLLRLGLHYTGKRTWTRTHMRWLVGQKLAHREQRIAFEEMLLAVRQAEERVIRLEQAISAAVPEWSLAKVVTALMAVRGLNLISATIFLAEIGDLSRFASPRQLMAYLGLVPGEESTGDRVWRGGITKAGNHRARRILVECSWSYRHPPRVGKKKLAKVEAAPPAVQEIAWKAQARLTARYRALARRGKRSTLVVTAIARELSGFIWAVSRAVGAPATAAM

SEQ ID NO: 123874 - protein, 310 aa, unidentified
MDAIYVGIDVSQARLDVHVLPSGEAFAVARDGKGLEELIERLRAFSPQLIAVEATGGFETIVAAALAGAGLPLVVVNPAQIRHFAHALGKRAKTDPIDAAVIAHFVEAVKPELRALPDEAQRLLAELVGRRRQIIEMMVAERQREKRAANVRVRKSILRHIRVLEKELPEIDEDIGTLVRGSPVWRKKEDLLVSFPGIGNTLARTLLAEVPELGELTRREIASLVGVAPFTRQSGRWKGKSMIAGGRGSARTALYLAALVASRHNPILKAFYMRLLAAGKPKMVALIAVARKILTTLNAMLRDKRKWQSA

SEQ ID NO: 123875 - protein, 338 aa, unidentified
MKLYAGVDLHSNNNYLGIIDQKDKRVYKKKLPNELSKVLEGLEPYRKEMEGVVVESTFNWYWLVDGLMENGYKVHLANPCAIKQYEGLKHSDDTKESFHLARLLKLGILPEGYIYPKEERPVRDLLRKRLLLVRHRTAHILSFQNLVSRSLGTKMNGDEVEKLKEEEVEKIFSEKHLVLSGKANIAAIQFLLERIREIEKAVLQVAKLKGEYKKLLTVPGIGKILALTVMYETGDINRFPDVGNYVSYCRCVGSTRLSNGKQKGTGNRKNGNKHLSWAYVEAANFAVWYYPYIKKYYQKKMSKTNKIVAIKTVAHKLARASYYVMKNQEVFIPKKAFG

SEQ ID NO: 123876 - protein, 402 aa, unidentified
MNKPCISIDISKGKSFYQGFENYNQIFSKAKEVIHDIKGFSEIKELTNRLLNKTGSIPIVVFESTGIYHKPLQTYLDEQNIKYTIVSPLLSAKVRKSQIRSTKTDKKDCQNIAKVFYMNDCKIFDKQETIYDEIRNKSRYYDTVTEEKKRLKVEFRRLLDIVYPNFDKLYTNVYGGISLLVIKEYPHPELIRKKSVKAITANLRNKSTHKEAYCQKEAEKIKIFSENCASGCVKQSYTVHQMKKVLNNLIIKTDELNEELESLIFLAKETVNFRLIKSISGIGENLAARLTAEIGDIKKFNSADSLVAYAGIDPKIYRSGKISGEGLRITKKGNKHLRTLLYLAVTSMVKTKRDNIIVDFYNKKKRQERAMSSKAAFIACSNKLLRIIYSMCKNGCLFNNHK

SEQ ID NO: 123877 - protein, 403 aa, unidentified
MNAVGIDVSKGKSMVTILRPFGEIVSSPFEIKHTSSDIHPLIKLIHSIEGESRVVMEHTGRYYEALAHQLSAADLFVSAVNPKLVKDFNNDSLRKIKSDKADSVKIARYALDKWQSLEPYSITDELRAQLKVMNRQFHFYVKQKTAMKNNLIGLIDQTYPNANTYFNSPTRSDGSQKWVDFVSTYWHVDCIRKMSLNAFVEHYQNWCKRKKYAFNKSKAEEIYTKTKELVPVFPKNEITKHIIRQAIDQLNSTSVTVETIRTLMNETASKLPEYSIVMQFKGIGPSLGPQLMAEIGDVTRFTHKGALTAFAGVDPGVNESGSYAQKSVPTSKRGSSNLRKTLFQVMDVLIKTMPQDDPVYQFMDRKRTQGKPYYVYMTAGANKFLRIYYGRVKEYLSVLPDPS

SEQ ID NO: 123878 - protein, 422 aa, unidentified
MLQNTEEREEIVERVAALDIGKAELVCCTRVPRPDRAGQRMQEVTTYSTMTRSLQVMVDRLRELGVTRVVMEATSDYWKPPFYVLEAAGFETWLVNAKDVKHLPGRPKTDRLDAVWLCKVAERQMLRPSFVPPKPIRRLRDLTRYRFSLVANASAEKNRVEKLLEDAQIKLSVIATDIFGVSGRAMMAALIAGQRDPKVLAQMARARMRVKIPQLEEAFVGHFDDHHAFLLGQMLAHIDALQADISRIEERIDTEIAPFAEAVTRLDEIPGVGVTAARVIIAEIGVDMTRFPTAAHLCSWAKFAPGVKESAGRKKGNGATGHGDRYLASALGEAAVSAGKTNTFLGERYRRIARRRGKKKAIVAVGRSILVIIWHLLNDPETRFIDLGSDYYDTRLGTQRATLNHVRRLQALGYRVTLEPAA

SEQ ID NO: 123879 - protein, 353 aa, unidentified
MLAEDYDFVIGGDPDRDTIDLAVLDTGAGRVHAHLADSADGAGYRRMLTWAGQHAPGRRIWALEGTGSFAAGLVVFLGDAGEKVVEVGALKRARGAKNDRIDAIRAARQALARDEQGAPRSGGLREALRMVFACREGVLVSRTKAINELKSLIVGAPEELRAQLRGRSLAVQLARIEQLQITTVAPVEQRLSVFSLQSVAARVRFLYAQLAELDPQLLELIRQHPAGPALLAEAGVGPVVAAQLLISWSHHGRVRNEAAFASLAGVSPLEASSGQRPRHRLNRGGDRALTRALHTVAITRMRCHPETRVYEARRIAEGKSHRDIRRSVKRALARRLYRKIEAAVRLQDVTVPA

SEQ ID NO: 123880 - protein, 341 aa, unidentified
MKYVGADLHKKTVSLCVVEWHDHSTRVVQRKRLRCDEPDQIGEFLASLGEFCITVEATIGYDWFAALAEPLARRVVIAHPHKLRVIADSTRKSDKIDAQTLADFLAHNMIPEAWRATPRVRQHRSLIRRRQKVQNRITSIKTTIRALLTRYNADRRDLFTRIGRKALRQFQFLDEERWLVDDLLEDLDQARHHLANVDCRLREFAERAPLAEREAREVLATLPGAGPVTINVLLAELGDWRRFTSGDAVVAFAGLSPGFRESDGHRKALGITKAGSPLLRWAMIQLAHRVKQSSSRWRTTFERLSQRTGKKKATCAIARRLLLVVHAMLRDGRAYQFAAAK

SEQ ID NO: 123881 - protein, 400 aa, unidentified
MRAVFGIDVSKTSSEVAIVVNGEKVHGYTILNDAIGFNRLLGDLKTVHNPEIIFEATGVYSRRLQAFLEEYSYAYTRLNPLEAKKQLDSLRVRKTDKIDAEKLAKSQLVHNRKPTYVQEEVYQHLRDLSRFYQNMTEDLVRTKNRLHKVLQVTFPELENLLSTPTGEQYWNLVMAFPCKEFVLSLSQSNLCEIIRQSTSKRISEKRVTYLVDKLIKLANQSYCAVKKTSPMLEEVRYYAQELLRLSERRQVVLSDMVALAQPLPEYDILRSIPGIAETTATSIIGELGNIRRFQSTNQINAFIGIDLKHYESGNFLAKEHITKRGNPYARKILFKCIHNIASASHTNPCHIADFYEKRKRQSTIASTKPHTIASIHRLIRTMYYLITHNKLYDYSLTQNR

SEQ ID NO: 123882 - protein, 394 aa, unidentified
MFFVGIDVAKRKHEAVVIDDKGRIVQKSFSFPNSLSGYNSLISCVKRITSTRKDIVFGMESTSHYWLALYSHLIKDGYTAHVINPIQSDAFRGLFIRQTKTDPIDAVIIAEVIRFGKYSSTHFPQHKILALREMCRNRLYMVDAISDLKRKTIALIDQVFPEYDQLFSDTFLVSSIEVLYRYPTPKKLLHIRRDTLTNLLIKTSGGHFGSAKADEIIHAAKNTFGIDDPYDVYADLIKTFIKQIKFIQKNVSEIDQKITAIMDEIASPITSIPGIGVTLGAVILSEIGDISRFKSADKLAAFAGIDPSLKQSGDYSSIRNHMSKRGSPYLRRALWMACIPATQVDPMFRAYYLKKRSEGKSHMKTMGHVAKKMICVIYAVLRDNKEYQPILTAA

SEQ ID NO: 123883 - protein, 410 aa, unidentified
MEPILISCAGMDVHEKKVDVCIAHGPFDKPPKVEIRTFSTMTSDLEELMAWLKKYEVTTIGMESTGVYWKPIFNVMEGEFAIVLANAQRLKAIPRKKTDIIDCKRIANLLRYGLLPNSFIPPREIRELRDLNRTRRKLVGMMTSEKNRLIKVLEAANIKLSSVVSKIYGVSSLASIRSLLEKDKLSREEISQLAKGKLKKKVDQLEKALNGKLTDHHRFLLGMHLENIDHLAKQIKKIDEEIQRKMVPFQKESKLIQTIPGISEVNASAILAEIGVDMSQFPDAAHISSWAGVCPGNNESAGKKKSGRTQKGNSFLKGALTESAWAASKTKDTSYSAFYRNIVRRRGKKRALVALAHRMLIDIYYVLKSGEPYQDIGAEAVCERTMKRRERSMIRSLEKAGYSVVKAEAA

SEQ ID NO: 123884 - protein, 352 aa, unidentified
MQIAVLGIDLGKNSCSVVGLDATGRVVLRRRMNRDGVIKLASRLPACVMAMEACCGAHHLGRALQSIGHQVRLMSPEYVQPYVKAQKNDERDAEAIAEAATRPTMRFVELKSETQLDTQSLHRARSRLVGERTALINQLRAVLFERGISVAQGRRRLAQYLALILDSETSPPSHPPLPLSSRMRLLIHDMRAQWGELDRRITAFDAEFVAAARSDKTARRLVTIPGIGVLNATALIAAVGDARNFARGRDLAAWLGLVPRQATTGGRPRLLGITKRGNNYLRSLLIHGARAALPSLTTAEGALGNWLRGLSARAHRNTVIVALASKLARIAWAVLRSTATYNPTMGEQPATA

SEQ ID NO: 123885 - protein, 419 aa, unidentified
MDVVVERCAGLDVHKDTVVACVRVPAPGGGRRSETRTFGAFTVDLLALRDWLLAHGVTLVGMESTGVYWRPVFYVLEDVVECWLLNAAHMRNVPGRKTDVADAAWITQLIAHGLVRPSFVPPPPIRELRALTRYRKTQIEERTRETQRLDKVLQDAGVKLSSVASDILGKSGRDMLDALVTGTRDPDVLAELARGRLRAKIPMLGQALTGRFGPTHALVVGEILAHIDYLEEAIGRVSARIEEVIAPFTAERDLLTTIPGVDQRLAEALIAEIGVDMTRFGSASRLASWAGMCPGQHESAGKSRSGRARHGDSWLQRHLAVAAMAAGRSKDTYLAAQYARLVGRRGKARARKAVGHSILVAAFHMLAGGVPYEDLGGDYYLKRNSPERRARKSLSDLKAIGWTVTENPDSVTCRPPRAA

SEQ ID NO: 123886 - protein, 345 aa, unidentified
MVTIGIDAHKRSHTAVLVDEHGRELAQRTIGSRSSDHLELIAWARRQARERLWAVEDCRHLSRRLERDLIRSGERIVRVPPKLMAKTRTSARSYGKSDPIDAHTVARAALREPALPAARLDGEERELRLLVDHREDLVGERTRTLNRLRWHLHELDPDLEQAARSLTRVRSLDTLAASLEGLQGTVARLARELAGRCRELTLEIRALEREIAALALRLAPSLLAIVGCGPLTAAKIVGETAGIERFRSPDAYARHNGTAPLPVWSSNRARHRLSRSGNRQLNAALHRIALTQAHWHPGARALLARRKAQGDGGLEALRVLKRRLSDVVYRALKEDAARSEQALVA

SEQ ID NO: 123887 - protein, 422 aa, unidentified
MSYCPVAGIDVSKQFSDMCILSPDNKIFAQEKIYHDETSINRANALLQKAERLFFSKPVIVMESTSHYHLILFQFFSEHGYDVIVVNPLQSNSMKDFSIRKRKTDRVDAFKLAMMYRTKTLRPSQIPQTATRALRQLCRHRAELLNDVSSYKNRLTALLDQTFPGYDKVFSDVGGVTSCAVLVRFPTPTILLVEEESELVEVIATASKSGYSFAKKKAGLLISAAQKAQALGIHSCADETLIVCTIQMLRTLSESVLQIETAIDNLLAQIKEMRNNVSLLQSIPGIGSHSAALLLGEIGDISLFKKPKQLAAYFGLDPTERQSGSFRGTKNKLSKRGSSYARAALHMGIVNSICKRGKDSAANPVLLSYYEKKCKNKPAKVAQAASMHKLVFIIFAVLRDQKPFELKTPEQHAVEQGFVKAA

SEQ ID NO: 123888 - protein, 374 aa, unidentified
MSSNVCHQIIYLAIELSSSSWVIAYRVPPNDKAKLHRLEAGDGAGLLAFIAGLRHRLDPPDDASTLVVSCFEAGRDGFWLHRLLTAHGVINHVVEPTSILVTRGARRAKTDRLDAVGLLRVLAAKFAGDPGACRTVVVPSVEEEDAKRPHREREFLVQERVRIENRIAALLATQGVRERPSLRSWDADMRALRTGDGRPLPTHLVAELNRLRRRLSLTLEMIRELDAVREQALEAQHDSASRTVKALCTIRGIGVNFASVLTREVFYRTFDNRRQIASYLGLAPTPFQSGGMDRDRRINRAGNSRARKTLVQLAWLWLRYQPESSHAAWFRDRVGSLQGRIRRITIVALARKLLIAIWRFVTLGLAPEGAIIAA

SEQ ID NO: 123889 - protein, 483 aa, unidentified
MSQPTNIKRIKGIKFRELLQNYSPDELLFAPIEVAKHEHVASFVNYYGEIIIPHFSFPNNKQGVKLYLDKLNKASTNMNARKTIIGLESSGHYHENLLLSLENKGHDVVLFNPYIVWKERDSHIRKTDFVDLNPIASALIHNRGSLTKLKRDIQYKLQRAARTRRKFVQHRAQYKAIIKSLVDRIFPGYQDENDPLFSDFWGKTSLLILEKYPAPQRVISMGVKRLTHFFKKHNTKLGRPAAEKLVARAKNSLSRDYHELEIDILVLKKYLKLIKELSANIEKLEQQIARLFIQTPGVYLLSIRGISLIYASELMSEIGSFNYYRHYRQILDLAGASSKIRQSGQYEARGLPISGHGNKYLRTVINQIGNGLKSNGPRGCPYFSSFGQKLLDRGKHPRCVNFAVGSKFVRIAVTMVKSKSFFKPPNVKNHIDLNQKDFMISTYYSIIKKLSNFSSNLPVTEDNYLSKIRRNIESKYDVKLKSC

SEQ ID NO: 123890 - protein, 348 aa, unidentified
MLTDQSDVVIGVDTHAERHALALLEAGTARTLAFAEVAACREGYREALRIARRRAQAGRVWALEGSGSYGAGLARFLAARGERVLEVERPPAQGPRGRQKADALDAERAARAVLSGLAGSVPRRGEAREALRQLLVTREGAVAVRRAGLNELRALLLTAPEPLRERLRRLSRGALLARCAALRPDRRGGLERFASALALRSCARRVRAASAEAAALEREIERLVGRLAPALLAQPEIGPVSAAALLLAWSHPGRLRSEAAFARLAGAAPIPASSGKVVRVRLDRGGDRRLNRARNTLALSRRKHHPPTIAYIERRRSEGKSLREAIRCLKRYLARSLFRLLEGLPEPA

SEQ ID NO: 123891 - protein, 349 aa, unidentified
MAEQRISYTGERIDVGIDVHKETYTVTCLWQRQMVKTATVPADPVRLAESLPRWFPGARIFSAYEAGFSGFVLHRALTTAGIPNIVVNPASVAVAANDKVKTDRRDAKRLARDLADGRLRGIYVPTEAEELARLLPRTRAQLVAHRATITRQIKAKLHQFGLIAPASRRLMSSRYLREIAAWELPPELRVSLTLLADQWRFATRQLLEVRRLLREQAKAQVALETVYRSVPGVGEVVARTLATELGDMTRFANERALLSYTGLTPSEYASGTAIRRGHISRQGVSRLRHVLVETAWRALPRDPILQAMFDRIAATRGKQRAIVAMARRLIGRIRACFRHGTTYAIGTVG

SEQ ID NO: 123892 - protein, 319 aa, unidentified
MDDIIIGFDVSKKFFDFAFLKNDKKWFNQQLDYDKDGLNQLIKTIPSNSICVMEATGPYYIKLANFLYSKGFKVSVVNPLVIRRYSQMLLKRTKTDKADAQLIAMYGRDQIPDFWKPNSENIQRIRQINSVLESLIKERTSWINRIEAAKQDDNFDESSLKIMKQMVCLINRRIQKLEAELDKIIDTDFKQENDILRSIPGIGRKTSIMLLAITGGFTKFENYKQFSSYVGLCPRIFQSGTSVRGKARICKIGISRVRQLLYLCALTARKFNKACKELYNRLIEKGKPKKLALIAVANKLIRQAFGCVRNMTFYNAELC

SEQ ID NO: 123893 - protein, 371 aa, unidentified
MVWTAPDGINCARLRSVADLRHRRPSVEQIIRIGMDTSKHVFQLHGVNAAEVPILRKKLRRKEMVAFFEKLAPTVIAIEACGASHHWARLLQSFGHTVKLIPAQLVKPYVKRGKNDAADAEALCEAMSRPTMRFVPVKTSDQQAALMLVGVRDRLIRNRTQLANTIRGHAAEFGLTAAKGMANLVPLLARIQADESLPALARELFALQAKEYLQMQAQIKEIDGKLTAWHRADECSQRLAKIPGVGPIGAVLLRMKTPDPELFRSGRQFAAWIGLTPQDHSTAGKTRLGVITRAGDEGLRSVLVVGATAVIKQAQRSGKASPWLAALLKRKSPKLVAVALANKMARIAWKMMVTGETYMANSAPAVVANVA

SEQ ID NO: 123894 - protein, 422 aa, unidentified
MLRETQDREEIIERVAAVDVGKAEVVCCVRVPGEAGRSRRVQEVTTHSTMTRSLLHMADRLRELGVTRVVMEATSDYWKPPFYLLEAAGFETWLVNAKDVKHLPGRPKTDVLDAVWLCKVAERQMLRPSFVPPPPIRVLRDLTRYRWDQVAVRTAEKQRVEKLLEDAQIKLSVVVSDIFGVSGRDMLAALIADQRDPKTLAALARGRMRGKLSMLEEAFTGRFSDHHAFLLTKMLARIDQVSADIADLDNRIEAEIAPFAQAVTRLDEIPGIGVTAASVLIAEIGVDMSRFPTPAHLASWARFAPGVKESAGRKKGSGATGHGNRYLARVLGEAAVSAGKTDTFLGERYRRIARRRGKKKAIVAVGRSILIIVWHLLNDHDAHFHDLGPGFYDTRLGPERTKRNHVRQLEALGYTVTLQPAA

SEQ ID NO: 123895 - protein, 417 aa, unidentified
METLIERGCGLDVHKKSVAACVRVPGPKGTRESHVRTCGTMAAELAALREWLQSQGVTQVAMESTGVYWKPVWAVLEEAFTCLLVNAAHVKQVPGRKSDLLDGAWIAQLREHGLVRGSFVPPAPIRELRDLTRYRKRLIEERTREANRRPKRLEDTGIKLASVAPDMLGVSGRAMLEALGQGTTDPARLADWARGKLRAKLPALRQALAGRFRPHHAFLVSQRLAHLDYLDEAIDTLSARLTEVMAPFTAELGRLDTIPGVAQRTAEVLIAELGVDMTQFPSAGHAASWVGLCPGNHESAGKHKSGRTRKGNRWLRAALTEAAHAATRTDSALAAQYRRLMHRGHKKAVVAVAHSMLVIAYHLLSPQTTRIGSWGGLLRRPPRRADDAPRGPAARAPGLPRDAPAGGLSASDRRTAV

SEQ ID NO: 123896 - protein, 422 aa, unidentified
MLGIGIDWAEEFHDVALGTVEKGVIEQFRIDHDPAGVAALIERALRLEPDPAEVRVVLETRHGLLVEALIDAGFTVVPVNPDLVARRRGPARKKDDAEDARICCLLALDRHAALKTLIPHGEIGGELRAIARDDERATRDQRRLLNRLRADLQTTYPAALLLAGKDLGAPTVLRLLERWPTQPELAEASREDIEAFARAGRHGWPDRFADRVVAAVAAPSLPTRDYLVRAKAAGIRLAAVQLLALHEARRGWEQRMAELLLGGQRTGRDHTVKDPDPGKAFPGGEIYLSMPGLGDLLAARIAGEIGEHITQFDHPSGLQCYAGTAPVTRRSGKSDFVVARRLAHNHYLGAAVHQWAFCSLLQSGWAREFYDGKIAAKKGHHAALRALSNRWLEILWHCLTKSVLYDETVHVANRNRALGHAA

SEQ ID NO: 123897 - protein, 346 aa, unidentified
MLIVGCDYHPRWQQVAWLDTETGESGEQKLVNGDGEAERWYRQLPPPSLIGLEATGNSQWFIDLLNQLGHEVWIGDAAEIRASYVRRQKNDRRDAGHILKLLREGRFPRLWVPSAEQRDLRQLLIHRHKLVQIRSRVKNELQHLTMNQGMQKKARLWSVPGQQAFRQLPLAGWSECRRHDLLQLLVYLDQQIAPLDRAAQQAAEQDRQARLLLTQPGVGPITALAFVLTIGDVTRFRRGKQIASYVGLIPREHSSGGRQRLGAISKQGNGFLRMLLVEAAQSVVRLDEGFRKQYAHRCHSKPKGIAKVAAARRLAVRLYWMLRSQTPYPEIVRIESSPRVPLAGKS

SEQ ID NO: 123898 - protein, 424 aa, unidentified
MNRTRNALINQRIEKISCQHAVVGIDIAKDKHVAQVTDFRNRVLTPRAFTFSNSGEGFLRFQRWLEDVQAKHHLPAVLIGMEPTGHYWFNLANWLLEQSMEVVLVNPVLTHRNKENRDNSPSKNDSKDALTIADLVNRGLYTEYVPQPEAFEQLKTVMSNREFWSEELTRYSNRIVRWIDQYFPEFRKVFPDWTVPRALASLRAFPLPVDLKDLTADEVIEQWRKQGMKRCGGPTGKAKAVELLRAAAQSIGHRRAWDEARRDLQWLLGMYEQTLARMEESGHAIEALLRELPQAKPLQSMGLGMIAQAALLGFGGDLSRYQHGRQLLRRAGLNLAECTSGTFKGKIKISKRGDRALRKHLYLAMLQLVRHHADFRRWHERNLQKGMSKQKSIFKLMGKLARMAVGMVRKGEMYRPGEQSQMAA

SEQ ID NO: 123899 - protein, 313 aa, unidentified
MHHIGIDMSKDTFHVAFDESAVEIFENTVSGIQKFIVALAHRNYAADDTTIGTEATGVYHLLLCEHMRKSGWNIKVINPLLTHRMITSTLRRVKTDRHDALAIRKTLMTGVGYTYTDTPDVLALKTLVQEREALSRMRSETKQRIHAHRIREKASDGGLHDSFGGVIKLLSYEIGEIEQKMGRYVPDTQKLLRSIPGIGALSAAALVAYVGDITRFQSPEKLVAYIGLDCRVHQSGTSIHGKGYISKRGNKYLRFVLFNAAFIARQKNPTLRAYFEKKLKEGKHYYSALCAVERKLVHLIWAVWTRSTPFEKR

SEQ ID NO: 123900 - protein, 349 aa, unidentified
MVTIGADSHKRTHTLVAVDATGRKLAEKTAPATSPGHLELVRWAERWAERTFALEDCRHLSRRLERDLLLAGERVLRVPPKLMAGARRSSREPGKSDPIDALAVARAALREPDLPVAVLDGPERDLRLLVDHRDDLVAERTRAENRLRWHLHELMPGEEPGPRSLDRAATLAALEHQLADRPGTVARIARELVAGIRQVTIEINALEREICALTERLAPSLLALQGCGGLTAAKLVGETAGIGRFRSRAKFARHNGSAPQPVWSGNTIRHRLNRGGNRQLNVAIHRIAITQVRLGGPGRTYLDHRLAAGDTRTEAIRALRRRISDEVFRRMRHDDAGEAARPVGLAAAA

SEQ ID NO: 123901 - protein, 313 aa, unidentified
MSTSFVGIDVSKNVLDVAFSDGRVLQVSNDEAGFAALRQELAGKVPGLVLMEATGGLERSIAAELSAAGIPLRIMNARHVRHFAKATGALAKTDRLDAQALVQFAQALRPEPRSIQPEHMQALQALIVRRRQLLEMLMMEKNRLHTAHRGVRADLRSSIRGLEKRLKGVDEDIDGALQGCGALREKIELLESVPGIARVTAVNLVATLPELGTLNRREISALAGVAPFNRDSGQSHGRRSIWGGRALARSALYMAALVGARHNPVLRTFYQRLRQAGKPGKVALVACMRKLLVILNTMLKQQRPWSPQFTHPA

SEQ ID NO: 123902 - protein, 370 aa, unidentified
MKKHSTRPQSPRGAAARSKGPITIGLDLGDKTSRYCVVGDNGEVMSEGSVATTRKAVAQKFTGMGRCRIALEVGTHSPWLSRLLSKLGFEVIVANARQVQLISASSRKNDRMDAHMLARLARVDPELLRPIRHRSEQAQADLMTIRIRAALVEARTSLVNAARGFTKAMGERLPACDTDSLGVEKLEALPAALQPRLQPLLEQIEALTAQIKKLEGHIEQIARIEYPETRLLTQVSGVGTLIALTFVLTVEDRERFQKSRDVGCYVGLRPKQSESGQSQPQLRITKEGDRYLRTLLVQGAHLILNRRGPDTDLKRWGPKLAQRGGKNAKKRAIGAWARKLAVLLHRLWVCGEVYEPLRNSRPMPASKHAA

SEQ ID NO: 123903 - protein, 357 aa, unidentified
MNTTQKISFIDSHFFIGIDAHLRNWRVTIRFNGLELKTFSMNPSPLELLTYLQKHYPDGIYHIVYEAGFCGFWALRIFRQHNIDCIVVNPADVPTSNKEKVNKNDPVDSRKLARELENKSLHGIYIPDLAHEELRALMRLRYRIVQSQTRIKNRIKGFLHAQGIAIPLQFSGNARWSHAFILWLEQLQPLTSAGKFTLLNMIAQLKQIREHNKNVLKQLRSEARHPDIAPVINVLQSILGIAFITAMSFYTEIIDMKRFANDDQLANFVGLVPSIHASDENVYSNGISFRHNKFIRGLIIESAWTAVKEDPALSLKFKELSKRMKSQDAIIRIAKKLLKRIRHVWLKNEEYVYALVA

SEQ ID NO: 123904 - protein, 408 aa, unidentified
MKVLNRRCAGLDVHKDEVVVCVRLAGRGKSSHEVRRFATTTRGLLDLADWLEVSGVTHAAMEATGVYWKPVWHVLEERFQLVLANAAHVRNVPGRKSDVNDATWIADLTAHGLIRASFVPPAPIQELRDLTRTRKQLGREVVQHTQRIQKVLEDANIKLSSLITDVLGASGRRILKALIAGESDAGVLAALGGSRLKCSRQELKDGLEGRITPHHRFLVGQHLRMIEELEVAVAAFDARIEAALAPFRDAAERLTSLPGISNLAAQVILAEIGPDMSTFPTAGHLLSWAGLTPRLDESAGKRRSTRVKKGAPWLKPVLVQCAFAAARAKNTYLQAQFLRLKARRGPKKAAIAVAASILTAVYHMLRDGTFYADLGPDHFARYDKTRAVMRLVRRIKDFGYDVEIKAAA

SEQ ID NO: 123905 - protein, 523 aa, unidentified
MATKFKSRNRRPRRFLTIAKPSGSLHPRVQKAGPEHFGIVAVDCAKARSKWMLADFYGRILVPPTVVEHTKQGFDAAIAEIHRAIERHTLRDVIVAIERTGIYHLPVKRAFVSKNFEPRIVHPLTTRQYRLPADPGNKTDDTDLFAIHRATTNGFGLIEAQLDEIHGPLRLLTRFRRSLVRQNASLRNQMHALLDVLLPGYSSLFDDVFDNQAALAIARTVTSAAQVRALGTEGLAQVLKPLGVRYQRRTLAKILAWANGIEGAAEYSFMYNTILVSLDDERCARLQQIAKREQEMAGFLVRTPYVVLLSIPGIGIVTAAEFAAEMGPIANYASDQAITGRAGIYPSRYQSDKVDRCDGPLVRRANRTLRAAIMMIAENLLNCNRFFQTLKERWEAAGMDQRAMCVRAAKRFCRIAYQMVAGGQVFRHPSCQKRDAILHKLTCFHVDHGTSMAQVMADLQAATENIPKSEHATEAKSLFEAMQPSNRRQQCGPRRLGEILPVVLAKLGVTAVELSLKGENDLT

SEQ ID NO: 123906 - protein, 316 aa, unidentified
MAELTTQTNVGIDVSKDWLDIVVIPSGETWRTENTEGTIRELVKKLEQLKPERIVLEATGGYEQTAAAQIYLAGLPLCRVNPKRVRYFARSLGQLAKTDKLDAKVLALFGERVQPALTRLSTENEQILSAFITRRKQISDFLVAERNRLNTAPKKLHTSLNEHITWLKNQLKQLEHEIDDFVNTNPDFKEKSDLLVEVQGVGKKTAAKLIADVPELGSCDRKQIAALVGVAPYNRDSGNKAAQRSISGGRPDVRSILYMATLTATRRNPVIHEMYHRLLKTGKKKKVAIVACMRKLLTILNAIIRDHSHWNPAFSA

SEQ ID NO: 123907 - protein, 343 aa, unidentified
MDQYVALDVSLQKTAVCVLNVSGRVLIEADVPSEPAALIAFIQTHAPGAARVGLESGPTSPWLWHSLKAAGLPVVCMDARHAHAALSVRPSKSDRNDAHGLAEMVRMGWYREVQVKSLAAHERMALLGVRRRLVDMRVEIDGQIRGILKTFGLVVGSGNKGAFAQRARMLAQDHPVLSALIDKLIEVREVAVAKVAALDKEIRRFVRDDLTLRRFMTVPGVGPVTALAFRSTIDEPNRFKRARDVGPYLGLTPRRYQSGVTDRHGGISKCGDRFTRTCLYEAASVLLTKVQRWSPLKAWGTRLARRIGSKKARVAIARKIAVILRCIWTDGTEFWWTRETATA

SEQ ID NO: 123908 - protein, 421 aa, unidentified
MNFKTQDKQNQRIENITVSHLVVGVDIAQEVHVARAVSFRGITLGTPLEFGNHREGFMLFERWIQDLLKTHKLSNVIIGMEPTGHYWFNLARWLVAQSMEVVLVNPHLVKKNKENRDNTPSKSDRKDALVIADMIKNGYYSPVRFHPEAYEELRILMANRETVTKRLNSAVNQLHRWVDIVFPELRQVFKILTCTSAIATLRTFPLPSEISRLSTEQILDGWKQYVKRHAGVKRAELLISLAKSSVGTTKALHAYKLHLEQLLEEYDLAQRQLEQIERELHLILEHIPYAQKLLEIRGVSATSLAGVLGEAGDLSGYSHGNALLRHAGLNLAEASSGKWRGKLVLSKRGRPRLRHFLYLMTMCMVMTNPEIRALHRYNVEKKNLKKMKSIMKLCSKVARLLVGLAKSSETYDSTRVFSQAA

SEQ ID NO: 123909 - protein, 347 aa, unidentified
MNYCGIDLGGVSSYAFVTDEKGNKLWSGPIATEKVAFEQLAKKFAGGGLSIAIEAGNQTAWVHEELVKLGAEVTVVNPTKVKLIAESRRKTDKIDAKILCELLRLNALPHPVHMPGPQARELRGLLVARRQLVSARSKLSNVARGMLRQTGVLLPAGGLSSLVAWKRLLAGGFDQEHLLLIVSAYYDSFVALTKSIRELDRQLAQREKNEPRVQRLKTMPKVGRIASLTFLAAVDDVKRFSSSRKLVGYSGLAPTVRQSSERTEYGAISREGRSELRAVWVQIAHLVARDKTKATQPLRTWFNRVARKRGKKTALVALARRLLVIAYQLLRTEQDFDVGRLKKKRAA

SEQ ID NO: 123910 - protein, 312 aa, unidentified
MLKLYEKVCGLDVHKASITACIVTPEGKEIKTYGTMTADIIEMIEEIKSKECTHVAMESTGVYWKPIYNLLEAEDIEILVVNAAHIKAVPGRKTDVKDSEWIAELLQHGLLTGSYIPKRDQRELRELIRYRRSLVQERSREVNRLQKVLEGANIKLSNVVSNVLGVSGRKMVEELIKENNEKDIEVIAQLARGRMQEKIPQIIKALNGTIGKHQKMIIAAQLEHVDFLTKKIEDIDKEVEERMLPFKESLTLLDEIPGVGLRVAQEIVAEIGTDMERFSDSTRLSSWAGISPGNNESAGKRRLEKQQREINI

SEQ ID NO: 123911 - protein, 490 aa, unidentified
MKKRSIYGQQSQELLRIYEEAGTSKKVLVGAIDYAKRDHVVMLCNGNGDILRKPFPVKNTPEGVEFLLTQVGGTCRYHKINPKHAFFGGEDCGSYTENFAESLRNRGWLVAGVNAEDAKKQRENLQASTDRLDLLGIARMLINRRGNCAPSQSGPYRNMRTLVRHRRKLVRLSTEERNRMHCLVDRLFPGYLDETKSGLRAFHKPSLRLMEDRFSARQIAKRKRSTLAGLISRAGGQHPEDLAAKLQSYASTVLHAAPEYVPTLQLSLAQHVALYRCLRDNIDALEREMAVWLAQTQGAFLMTVKGVGMILAAGVAAEIGAPATQQPVNNLVSYAGIIPRVSQTGGPNGETFTGSVAHRCNRILKDCIVQSASHIGLHGVEDLMADHHRRTAAGQHANYGIARRYLRMGMHLMRNSAIYLPPALRGADVSREERVEYYQAFWPYLLEKWKNYNAHQVAFAPENPLGQWRNMIQELYNVELRIPGENTTKR

SEQ ID NO: 123912 - protein, 343 aa, unidentified
MPNYVGLDVSQKTTSICVVDEQGRRLWRGVCTTHPDPIATRVLRHAGEDAKIGIETGSMTPWLVHGLRAAGLDVACLDARRVKAALQMRLNKTDENDAEGLAQVMRTGWYRAVHVKSLDAHRARALLGARAQLVGMTTRLSNMIRGVLKTFGLLPGAGRGLRFDRKVEALLEGTPDLEQIVRPLLATWRQLREQIAVFDKAVLQQVKADPVCRLLMSVPGIGALSSLAYVTTVEEPSRFARSRAVGAHLGLTPRRYQSGEIDRSGHISRCGDGLARTLMYEAAIVILHRVKRPLHLKTWAKAIEQRSGPGKARVALARKLAVLLHSMWRSGQPFRWPSQPMPA

SEQ ID NO: 123913 - protein, 405 aa, unidentified
MWYAGIDWADEHHDAVVIDERGQRVAALRVAHTADGLQRLVDFLQGSGDVRTQPAQVACIIETNQGLLISSLLEAGVPVYPVNPKTVDRQRGAAGAKTDAIDAYLLARKGRSDLADLRRLQPDSPLIAELKVLTRDQDGLIQQQTRLVNQLTACLKAYFPAALTLFGKLQQPTTLAFLQTFPTLAAARAATVEELDALLRAAGHPQPRAKAAAIAAQLQQPQLTADPVLCRAKSRLMLTLVGQLQALLSAIAAYDAEIQRLFLTHADSAVFASLPRAATRLAPRLLAEWGDDRGRYADVASVQALAGTAPVPWTSGKLVTVHRRQACNKRLRNALQQFAWQSTQREAWAAAYYQEKRDAGKSHAMALRALANQWVRIIYALWSKHEAYDPAIFLAARKAHRAHAA

SEQ ID NO: 123914 - protein, 316 aa, unidentified
MNTEPVYVGIDVAKASLEVAVHQSADRWTVEYTDPAVAPLVARLTALTPSLIVVEATGGLEVPLVGVLAAGGLPVVVVNPRQVRDFAKATGRLAKTDTLDAAVLAHFAAAVRPPVRPLPDAATQGLAALVTRRRQLVDMLTAERNRLSCAPKVLHKELQAHIRWLERRITGVDADLEQAVRTSPVWRAQEDLLRSAPGVGPVVARTLLAQLPELGTLSHKTTAALVGVAPLNRDSGRFRGRRQVWGGRAAVRAVLHMGTLAAVRCNPVLRAFYLRLRAAGKLPKVALTACMHKLLTILNAMMKHQQRWDPNYAPTT

SEQ ID NO: 123915 - protein, 368 aa, unidentified
MAPYYVGLDVHSRQSVFVIEDAAGQVVGQGEVPTTPEGLQQLQTQHRLPAGTPVALETGTVAFFVARHLRRLGLEPVVVDAQEVRLKAHRPTQKSDRRDAYELCEGLRRDIYRILVHVPPPAVSALRDTLSRRRHFVRLQTAEINAVKRLLRAAGLGHLSRALRTEVGWGKLLAAVAPQPDLRAFVEHHRAAWRCAGEQVAALEHALGAQQRAFARDLERLETAPGVGPIVAATTLAVFSEVTRFPSAKHAASYAGLVPSTYQSGTRDAHGRITKRGSAELRAMLCEAAQHARRPTHPLHPYFTKLCAKRGYKMAVIAVAHRLARILFAMLRDGTDFDVHRLGIAVGPFTRTTVDAYRLKRAPRAHRA

SEQ ID NO: 123916 - protein, 361 aa, unidentified
MKTNVRALVDGYDHFIGIDHHKRTSYVTIKDREGEIVKKGGIVSTKASIADFIEAIPCDGDSLEVPRRIAVIECGRTYRPMYRWLSEIVDDVVLAHPGGLKIISDTVYKDDKIDSGKLSDLLMLGMIPEAHAASDEAWERRMVLRHRIMLVKMQTEVKNRIHVVVDLHPDALPRRPDVTDMFGKLGTAWLESLKIPDSDRRRLDELLEILEFLGAMIKKSDSLVRKMVREDKTCALLKTIPGIGDFYAALIAAEIDDIDRFRGPKNFVSYTGLVPGRDSSGGKESSGSIHKRGNKYLRWALVEAAIPATRSDLALKNKYDSVVARKGGGKDAKKLAKVAVAGKLAWIVYRVLKDRRPYEIR

SEQ ID NO: 123917 - protein, 356 aa, unidentified
MKNQATQYLALDVHQATIVATLRSADGSVRMRATVPTEARAVVNLVQGAGPHVRVALEEGTQAQWLHDVIAPVADDVVVCSTRGRSEIENKNDRIDADRLSELLRIGAVKPVFHSALDTLSLKELVRNYLTLVEDATKTKLRIKSMFRARGIRTPGRQVFIPEHRKEWLDQLPSPGARVHAEHLLTVLDTLTALRRRAKAAMVAEAQKRTAWKILRSIPVLGPVRISCLMAIVVTPHRFRTKRQLWPYCGLAVVTRSSGEHEFTDGVLRRRRKHAPATRGLNRNYNRTMKNVFKGAAAAALIKAGPLKDFYEHCVERGVRPELAKLTLARKIAAVTLRLWKKGELWDPKKLTMQAT

SEQ ID NO: 123918 - protein, 307 aa, unidentified
MDHFAGLDVSVKETSICIVDDAGKIVREVKVASEPEALLAVLKNPAYHFKRIGLEAGPLSQWLFSALAEAGLPVICVETRHMQAVLKAQINKTDRNDARGIAQMMRAGLYRPVHVKTIRSQKLRMLLTHRKLLQSKAIAIENDLRGTLRNFGLKVGMVGKVKFEARISELVENLPDLAVLVEPMLIVRRVLREQIVILHRRLLAIVRDDEVCRRLMTTPGVGPVVALTYRATVDVPARFRKSKAVGAVFGLTCAKYQSGEVDRNGRISRCGDEMMRVMLYEAAQSMLRSKKWSWLKAWAMQIARRPG

SEQ ID NO: 123919 - protein, 348 aa, unidentified
MRGAVHMQITTIGLDIAKNVFQVHGIDSNEKVVVRKQLRRSQVPAFFKTLPPCLVGMEACATAHYWARELTKLGHRVRLMPAKDVKAYVKRNKNDAADAEAICEAVRRPTMRFVQVKSAAQQSQLMLHRTRDLLMRQRTQVINALRAHMAELGIVAARGRDGIKELLKIIASEQDARLPVDAHTSLVVLATGLQALQTMIRSIEQRIVVQHRSNAASKRLATIPGIGVIGATAIAATVPDPKVFRSGRDLAAWIGLVPREGSTGGKQKLGPISKQGDQYLRRILVVGAHAVLKRARQQPEKYPWLTGLLARKPFRVVAVALANKMARIAWALLAKGGTYRAPALTAAA

SEQ ID NO: 123920 - protein, 397 aa, unidentified
MYIVGIDIAKRKHEAAVIDGEGTVIIKPFSFTNNCSGYNRLLAMLTKAKLPLDEVSFAMEATGHYWLALFTRLQKEGFRVQVINPVQTNSIRSFYIRQAKTDPRDALLIAEVIRFGHFSESTLHPENIYELRELCRGRHAIVSMQADVKRKVVALLDQVFPEYETAFTNLFGDTSMAILQTCPTPKELSEMPLEELCHLIEVSSHKRFRMAKAQELQALARNSFGFAMAGDVFSTMIRLYAKHLDFLKQQVREMDRKIVEIMETLDTPITTITGIGPTLGAYILSEIGDISRFSSAAKLAAYAGIDPTMRQSGEYNGVRNRMSKRGSPYLRHAIWLAASSAVLHDPALKLYFQKKRDEGKPYMASVGHACRKMVSIIYAVMRDNKAYTPYIPNEISA

SEQ ID NO: 123921 - protein, 370 aa, unidentified
MSVRRILAKTINTDLEYEAIGIDLAKNCVSVALLTTDGEVVCIDRLDYSELEKSAQVLCPTTFAMEPCTEMNYLVQKLEAWGHRCLVIGGKNVQNYVENHYSGQKSDLNDAQALAFLAQDTQLRTIKAKDMEQRKYASLTTLREQYIKQYRQTIVSLKGICQAWGLNISKGISGKARLKDLIENHAAFPEELKESLVDMVTHAQTAQKALNKITKTLEELAKNDKLCQLIRTIPGLGLICSCRLRATIGDIKRFKNPKDFPAYYGLVPRSIATGHNEKKGRITHRGDKTMRSLMVQGAGSVINMATRGKLKSKQLTKWILKKQKEKMPWGKLVCAVAAKLLRIVRAVLISSKPYNPQIAGVAKCSLPKGT

SEQ ID NO: 123922 - protein, 391 aa, unidentified
MIYIGIDVAKDKHDCFITNSDSEVLFKAFTIANNLDGFNDLYQKIESVMDDVTKVKVGLEATGHYSYNLLGYLIDKGLPTYVINPLHTNLYRKSLSLRQTKTDKVDARTIASMLMSDVNLKSYSDTFYHNEELKSLTRYRFDKVKERAKLKTSVSRLVCILFPELEKLVPTLHIASVYALLSEFPSAKHVATAHLTRLTNLLSESSKGRYGKDTAITFRDSARASIGSNMPAKSLELKHTIKLIQELDSEIDEIENEIKIIMDEINSPILSIPGINYRMGSMIIAEIGDFNRFDSPDKILAYAGFSPSTYQSGQLDGAYAHMEKRGSRYLRYALYNATKYVCHWDPTFAAYLAKKRAEGKHYNVAISHAVKKLVRVIYHLEKTKQQYIKAA

SEQ ID NO: 123923 - protein, 389 aa, unidentified
MSTCTATASTIESTASARVLLLAFELGETGWLLGFSPGFGEKVLRRKIASRDTAALMREIAKAKTHLRLGDEVAVRSCYEAGRDGFWLHRFLEMQGIDNAVIDSASIEVNRRKRRAKTDRLDVVGLLDLLARHWAGSHKPPFSIVSVPSPADEDLRHLGRELKLVKKDRTRISNRIKGLLANVGLVLNGRRDMKGQIERLRLWNGESLPQHLNARLLRYAADYELHSVRIRELEQERRALLRSEQAGASIAKVWRMLELKGVGIETAWCYGMEFFGWRDFANRRQVGSLAGLTPTPHDSGTQERERGIGKDGSRWVRGVAIEQAWAWLRFQPESALSQWYQSRFGGGSKRMRKIGIVALARKLLIALWRFVEFGELPEGAVTTLRARLA

SEQ ID NO: 123924 - protein, 341 aa, unidentified
MSLIKAAGIDLAKLVFSIHGVDANDKCKLRKTIKRNKLLEEVAKLPPCIIAMEACSGAHYWAREFTKLGHDVRIMASKFVIPYRQNEKNDANDAEAICEAATRPKTRFVSIKSEEQQAVLCLHRIRQGAIKDRTARINRLRGLLSEFGIIMPKGRYPAQKAIGGILEDAENSLPFLARELLNDLWQSIKLLNEEILKYDRKLYALANQMKDAKRLMSIPGIGEITATAVVATVNDAKHFDTSRSFAAWIGLVPRQYSTGGIVRLGRISKRGEKHIRTSLIHGARAVIANCKNKTDRTSLWVKDLVERRGFKRATVALAAKNARLIWALLHSEREYQVDYVK

SEQ ID NO: 123925 - protein, 368 aa, unidentified
MRVGDRCLDLQGVFKMGKKRIQQEVILGVDTHLDTHVGVIIDCCGKMLGVLSIETNITGYHQLLKWARSFGNLQRAGVEGTGTYGAGLAQVLSDYGIDVREINRPDRSMRRFRGKSDPTDAESAARTVLSGNARAIPKLRSGAAEAMRIASVARRSAVKARTQTINQLRALLVSAPERVRANLWKSKPEQCVENCVRLRTLGESSSLKTLATTLRLLAKRWLYLTAELKELDGTLEHLTNLAAKRLRQQFGVGPQTAATLLAVAGDNPERLRSEAALAALCGVNPLSASSGKTVRHRLNRGGNRAANNALWTIAMVRMRSDPRTRAYVARRTAEGKSTKEIHRCLKRYIVRGLYPLILADLNDAAATV

SEQ ID NO: 123926 - protein, 337 aa, unidentified
MEYFAGLDVSMEETHICILDRDGALILEGKASSTPKAITAFLAAGPTCTKVVFETGRMAPMLHHGLTELGVSVVCIESRQAYQALKSLAGHKTDRNDARGLAHLARTGFYKPTHVKSLSAHAIRSLIAARKKLVGQRVTIDNQIRGLVVVFGVRLPRALSPAFKDAALKVSDGVPGLHAALRGLFAAREAILTAVAAIDSDIKVMTHKSKICTRLMTVPGVGPITALAFAAAIDDPRRFKRSRDVGSYLGLVPKRHQSGEVDYTGSISKRGDVRVRTLLYEAANVMLTRYAAPLKLKSWALAIGQRSTMRKARVALARRLAIILHAMMRDQTEFQAT

SEQ ID NO: 123927 - protein, 421 aa, unidentified
MNFINQEVLQMNAVGIDVSKGKSTVAILRPMGEVVQTPIDVPHDAVSLERLAYQILSLGENTRVVMEATGRYHEPVAIELHDRGIFVSVVNPLVIHGYCSGGTVRKVKNDQKDSLKIAKFALDHWVDLREYTPMDTVRQQLKIFSRQYNLYMKSRVALQCNLISLTDKVFPGVNEIFTSPERSDGHLKWVDFVTTFWHCECISLVSEKAFTDRYQKWCKRMGYHFSASKASDIYIDSLGHIVTLPKNNNTKLLIQTAAKELTAMNELLAVVKDEMVRLAKELPEYETVHSMFGVGDVTAAQLMAEIGDIRNYPRRSSLVGFAGIDPEVNQSGKMNSESNPSTKRGSPHLRKTLFQLMTVCLRLSPADEAVYQFLDKKRAEGKPYYVYMTAGANKFLRIYYARVKECMAKLETPDETAEENG

SEQ ID NO: 123928 - protein, 424 aa, unidentified
MSENSTTHPEPEFVAFVGIDWADQKHAWCSQRAGATQREHGEVERTPEMVEVWVSQLAQRFGPGPIAVAVEQVKGALVYMLSKYECLHLFPVPSTMSASMRKSLYPSGSKDDPRDAELLLDLLLQHRNKLRRLMPDDEVTRRIQNLVEERRTLVDEKTTQLNRLTGYLKVYFPQMLEWFEKLDTKLVCDLLERWPSLEELQKVPPAELRKFFGQHRGRHQELTERRLEGIGQALPAIRDRAVLEAKRAMVQVSAQLLRILLEGIANLDSKIEEAASAHPDFFIFESLPGAGSALAPRLLAAFGSQRDRYGSAEEVQTHSGIAPVMEKSGKKKWVHFRWACPKFLRQSFHEWAGHSISQSTWARAYYQQQRGRGKDHHAAVRALAFKWIRILFRCWQDRVAYDENKYLAALARRGSPLSSVLTVL

SEQ ID NO: 123929 - protein, 414 aa, unidentified
MDVLHERCAGIDISKRDAKVCVRTPSPRRKGTFTQQTTTFGATTNAILDLREHLLGAGVTLVVMEATGDYWKPFYYLLIEELNVILVNARQMKNLPGRKTDVSDAAWLAQLGSHGLVRASFVPPQPVRELRDLTRARTQLTRERAQVVQRLEKLLEDAGIKLSAVVSDLMGVSGRAMLQALIDGQRDPQVLADLAKRRMRSKIPELSQALTGRFREHHAFLTRLYLDQYDHLSGAINQLTARIEEAMTPFRPALDLLDTIPGVNRAVAEVIVAETGGDIARFPSAKHLASWAGLCPGHHESAGRVRSTRVRPGNPYLKGALGMAAFGAARTKDSFLQARYKRLTARRGPIKALVAVEHSIITAIWHMLNDNVPYHELGGDYFTQRDPERAARRAVSRLNELGYRVTLDPMDAAG

SEQ ID NO: 123930 - protein, 420 aa, unidentified
MKVVYQTCCGVDVHKSFLVATIIKTTSGVQLSYQKKRFSTFNNSILQFKEWLVKNQCRDVCMESTGKYWVPVFNLLEDEINITIANPKWVKAVKGNKDDTKDSKWIGDLFRLGLVPGSYIPCKPIRILREFTRNRYKLTSCRTSEKNRYQNALTVCNVALDSVVFDIFGKSATSVIDYLIEQPDNSINHEEIASRLLRSLKKKSDSVIESIEGYQMTDSQKYRMRLIRAHLDYITSTINDIDTMLNSLIAPYENAVQLLCTIPGVDRNSAITVISEIGTDMTPFSNSKRLCCWAGLTPDNNESAGKKKSVRITRAGVYLKPALVQVAHAAVKSDKSPYYKQKYERIMKRRGKKRAIIAIARMILTAIYQMLSTGEAWNPTDLFKIDMPEPMKEKQKEKAIKQAMKLLIREGKISESQLAS

SEQ ID NO: 123931 - protein, 424 aa, unidentified
MNLTQNDRLKQVTSDTLIVGVDVGSQTHFCRAFDWRGFELSRRVFKFSNTGMGFLTFLRWTEELMNKTEMKKVIVGCEPTGCYWLTFQKFLQDHDVQLVTVNPFTVNRSMELDDNSPEKSDLKDPKTIALLVKDGRFSTSYLPSGVYAEIREASVCRDQIMKQHVRLSNQIQGWLQKFFPEYFECYADWDSTSGLMLLREAPLPQDILKIGAGGINQIWRDAKVRAAGIKRAQTLVEAAQNSVGLEAGEAARLEIWVLVNDYILKAEQLKRLDEYLEEKVKEVPNVEKLLAIKGVGMSTVIGFIAEVGDIGRFTDPKQIQKLAGLEIVKKSSGKKKGQPRISKRGRRKLRRTMYESARALMIWNPAFQDVFLYYRNRTKNPLGGMQAKIAVACKAIRIFYVVLQTGCDFDEEKFRKDIIRPEAA

SEQ ID NO: 123932 - protein, 356 aa, unidentified
MVTEIGSVVMKRIAVDLAKSVYQVAESVRSGQVVQRKRLNREAFRRYIQEQTEPVEWVMEACGTAHYWGRVAQSLGHRVKLIHARYVRPYRRRNKTDRNDCDAMLEAARCKDIYPVPVKPHEQQLLQQLHGLRETWKKSRTQRINLLRGILREAGIEAPASTTAFIRAAHELVDRPELDPLRHQLHIVLAEINLYEQCMAECEQQLKRWHADDEVVRKLDEVSGIGLLTASALTAAVGKPERFASGRQLSAWLGMTPNEYSSGERRRLGRISCKGNIYVRTLFIHGSRAALLAAQRCQARTPEKLTELQRWAVETAARIGHNKAAVALANKLVRICWAVWCHERRFNGNWQSTKPA

SEQ ID NO: 123933 - protein, 429 aa, unidentified
MKIIYPRVCGIDVHKKFIVAVICISESVEPIYLKKRFSTFHNDLIRFREWLIQNDCQNVCMESTGKYYIPVYNVLESHISNIVVANPKWVRAVKGEKDDDKDAKWIADLFKFGIVRSSFIPQKDFRILRELTRYRYKLVNMRSSEKNRFQNALTSGNCKLDMVFTDVFGKSASNIIDLILSDNPYTDEDILSKVHKKCKASPDMILDSVNGTDLTPVQKARIKLVNDHIKQLSSNIQKLDKLIDLMIEPYEDYISFLCQIPGVSRNSAIIILSEIGIDMNQFTTSRRITSWASLTPSSNQSAGKKKSVRISRAGVYLKPCLVEVAHAAVKDKSHPYYANKFNKISKRRGKKRAYIAIARKILVAAYHMLLTGEIWNPADLSEVETPVEQRIKYVKNNLKSDIKQLLDIGLTVEELTLMIQQNANIIATQ

SEQ ID NO: 123934 - protein, 346 aa, unidentified
MEHYAGIDVSLELSSVCVVDAQGKIVKEAKVASDPEGLIAFFASLGFAVKRIGLEAGPLSQWLQSGLKCAGLEVVLLETRHVKAALSAMTVKTDRKDARGLAQLIRMGWFRPVHAKSMGSQEVRALLVARKQLLGRLIDVELSIRGILRGFGLKIGLVTRKGFEARVRELVTGQATLEHITRAMLSARAVLRVEYEKLHKSVLAMVREDAVCRRLMTVPGVGPLVAMTYKSAIDDPSRITKSKAAGALFGLTPKKYQSGEKDITGGITRTGDEMVRTALYEAANVLLGRITRFSKLKRWGLDVAKRRGSKRAKVALARKIAVILHRMWIDGTTYRWSEAQMMATQA

SEQ ID NO: 123935 - protein, 286 aa, unidentified
MNHYAGIDVSLECSSVCVVDASGKIICEDKVASEPEALISWFASLGVSLARVGLEAGPLSQWLFAAMRQAGLAVELLETRHVRDAFKAMPVKTDRKDARGIAQLMRLGWFRPVHCKSMAAQEMRAMLTARKLVQAKLHDVEMSLRGILRGFGLKVGKTTPRRFEGRIKELVAGHPSLEGVAAALLAVRAVLRREFDTLEKRVRSMAREDARAWLLTSVPGVGAIVALTFASAIDDPARFKSSKSVGAHFGMTPKKYQSGETDVSGRISKIGDGGYAPRSMRPPTSS

SEQ ID NO: 123936 - protein, 461 aa, unidentified
MAEDKNRRAATKIAAEIEGLPIVRRYVAGIDLGSERHWVCAPALDGTGREMADFEATTPELLRMAQWLKERKVESVAMESTGVYWIAPFEVLEAAGFEVALVDTRQLARVPGRKKTDPVDCQWIQRLHSCGLLAGSFRPQEDICMLRTLIRDKGNLVAEAGDWLRRMQKSLDQMNVRVHRAVADLDGVTGMAILRAIVGGERDARKLAQLRDPRCRKSEEKIAEELTGHWREDHLFSLRQALKMYDAIQQRIEAYEKEILRRLAAMQREECRGQAAPAVKNPQKAKAIRKRGEEPMRQALYRMSGVDLTSIDAIGVETVQVVLSEYGPDLNRFPTEGQFVSHTMLAPYRPVSGGKPVKKRKRNSASTRVAAALRMAALSLRHSETALGAYYRRIARRIGGDVAVFATARKLATIIYRLLRWGQPYVDEGAEAYEKRYETMRIETLAAKAKDLGYQLTPTTA

SEQ ID NO: 123937 - protein, 482 aa, unidentified
MVLPVDDGVEVMPTRDYGVGIDCHSRFLEINVLVKRGPSFFEYCREVSTDWNAIKSAHEWVIHVLRTCSDPPVMLSSPLHYCIESTSTYHLPVLLAWEGTPSVVNPSIAGATKKKTDKLDARLLAVHDLTGIWRPFYVVPENVQDLRVLIGQRDYYSRLASAIGNRINSTILKFGFTVGKDGSVVKNTEVRAIVENLICDHPEPVSTDLPQRNIPEDTRHVLSEEYQLYDRFSLCVTDFDKQIRDKVCSMDWPVSGGKTVSGKKLLSILMTAPGIGERTAITWLANIMDPTRFPNAKAVAAYCSLDPSLKISAQKVTSTKKRKGNKALHSSLCMSASIVIAKHSEFFGRWGYRIYQQTGKWKKATNAVARRLATALYFMHMNAEPFSYEKYQLTKEVHVLDMALDDLVQLNGSFRRYIPVLKSAGILRTQSLIQSYYSCELRGCKGLGPKFYTLVKEFIETQDNYRELYNSFLTEKASKGES

SEQ ID NO: 123938 - protein, 344 aa, unidentified
MNTVYYIGLDIHKKTISFVIKTHAGQLIRRGSVEATRPALTAWADQIDQPWIGALEATMFSGWVYDLLQPHARELQVAHPLLLKAITCAKKKNDRLDADKICDLLRCDLLPRCYMAPGPIRELRRILRYRNLMVRQAVRLKNKIAGLLMEVGEPYVKQKLHRKKYFHTLLDDLEARDEVPASVRELLRLSRAQMEICARLERKLLGALEQHPKLAERVARLRTIEGVGAVVALSWALEIGEPERFGSIRKAVSYCGLCAAQKQSAGKDQRGPLSKQRNKHLQTTLIEAAKLAPRYNQTLAAVHERELKRGARNRATVAVARKLVAYLLAVDRRGDELQAKRQVA

SEQ ID NO: 123939 - protein, 544 aa, unidentified
MERNQTAKEKWTTMIRRTMGIDLGIQARSVAVVLDERGEVLVDGLGFELSVEELERVERAALENAESGTKLHVVIEKTFPTCEYVSGFFSARGHEVSFAKPDQVMEARKFLSPKVKTDRRDAWVMARLPYLDPRQLERVHVPTPDLRELKVLVSQRVSMIRQLTLLKNQLIRAANAIWPGISRVFDSLDSKHARAFLEELEPEVAVRLGEDGIADLLRKKGQNKVEQTRRLAARLMPVAKRAAGLLGLVDKNRWLALHRGHVSELIKLLKNLEELLRAKEQQILECYRRADPEELVTSIVGIGEGTAPTILSYFGEPERFPTSSKAQGFVGLYPETDASGTSDRKGTALSKRGPAQLRRDLFLVADSFRRHDPQGARLYYEQMANKGRHHHSALCVVANRLVIPRILAVLKEKRPYEIRDFDGNAITKEQARELVASFQVPEVVRERVRNKKRPPSKASLEQPVETQKSRSSQSPPMTSEPKAPRNGRALRPEDPSKQQMNLTKDQLAQFGYQEMDRLLNCGGNLEEIRLAVRVEAARFFEERT

SEQ ID NO: 123940 - protein, 324 aa, unidentified
MTCTICLGIDISKASFHAAVLKAQNRANVKEFANTEAGFEALSEWLAQQGVEQVHGCLEATSIYGHALATYLHSQGHVVSIVNPARIKGYGQSQLRRTQNDRADAKLIAQFCRDIKPAAWQPSEAMVQELQAFTRRLEALEQMVTQEKNRLGITPTALKGDIEAHIEFLEEQITAVKKRLHEHIQAQATLKDQHQLLTTIVGVGDYTASVVLAEIGCVRLFSSARQLAAFAGLTPQEHQSGTSVQGKTRLCKVGSVRLRKALYFPALNLIRRCPQIGAFRDRLLAAGKTKMQVVGAVMHKLIRVIYGVLHSKQPFDPTKLCPAP

SEQ ID NO: 123941 - protein, 346 aa, unidentified
MEHYAGIDVSLERSSVCVMDALGKIVKEAKIASEPAALVAFFEALGFAVRRIGLEAGPLSQWLHAGLKRAGFEAVLLETRHVKAALSAMTVKTDRKDARGLAQLIRMGWFRPVHAKSIRSQEVRALLVARKQLLGRLIDVELSIRGILRGFGLKVGSVTRKGFDARVRELVTGQPTLERIAGAMLSARVALKAEYEKLHKTVLAIVRDDALCRRLMTVPSVGPLVAITYKSAMDDPNRITKSKAAGALFGLTPRKYQSGEKDVTSGITRAGDEMVRTALYEAANVLMSRITRFSKLKRWGMGVAKRRGSKRAKVALARKIAVILHRMWVDGSTYRWTETQPIAAQV

SEQ ID NO: 123942 - protein, 375 aa, unidentified
MKKNSKTMRPHKNATQKTATSLSTRTVGIDLGDQTSYYCILDEQGEVVSEGTVRTTEAGFREQFRRMARARIVLETGTHSPWVSRYLERLGHEVLVANARQVRIIYDNDRKTDKVDAGTLARLARVDKSLLHPIRHRSAEAQADLAVLRARDLLVAVRSTLINCVRGMVKSVGGRLPSASGAYFATKVREQVPACISGALLPLLDEIEQLTVRIREYDKRIDELAKTKYPKTELMRQIPGVGVVTSLAFALTLDDPNRFHKSRDVGSYLGLRPKQSDSGSSKPQLSISKAGDHLVRRLLVNCAQYVLGHWGPDCDLRRWGLSLMAHGGKNAKKRAVVAVARKLAVLMHKLWVTGEVYEPMRQASEATQTQAAPAA

SEQ ID NO: 123943 - protein, 425 aa, unidentified
MSSSDVLSSPLDASGFASVVGIDVGSQACVYTVLQPDKRIIVKPTEVANRDTGFVQVHASLSHLGVPPQRILIGLEATSRSSENWYQFLAAQGYVLCLLHPRQTHQFAQQRGLRAKTDRLDAATIARVLLSGEARPGSVPDELIATYRELERLHSQLTDDGARYQNQIQALLVVLFPEFVQVFADPCRPTALALLKGYPSARALVEAGVEAVAATLREVAPRRYGRKTAQQLVALATQSSASGLATDARALSLKILCDQLQHTLANLAQVEHELDQVLDRDTGATGLKSTPEFGRNTVAVLRAELGDVTRFQRVDQVVAYAGLDLEVKQSGKWKGEVKLSKRGSGRLRRVLSLAALRSICLPASAFGAYYQRLVARGLKARDALTAVMRKMLIVAYHLLRSNETYDPTKVCAVAGPPPHTPSSGS

SEQ ID NO: 123944 - protein, 461 aa, unidentified
MSKRKKKTSAGTAKRGVLEPSIHPKSAGIDIGAEELVCAVPPDLDQQAVKTFPTFTRDLHALRDWLTSLGVTTVAMESTGTYWIATYEILEAAGIEVCLVNARHVKGVPGKKTDVCDAQWLQQLHAAGLLRASFRPSREVVAVRQLVRHRSDLVRESSRHIHHMQKTLIEMNIKLHHVFSDLDGMSAMAIVEAILAGERDPENLWLLRDRRCRCSREEFEKALEADWQSAQLFILGQSHRAWQQTHEAIAACDEAIENHLEQVSSESDDDLPPEEQNRRKQRGKNDVGFDIRSEAYRQYGVDLSRVDGISNGTLLVLLSEIGNAEELRKNFRSAKAFSSWLGLCPDNRISGGKVLKTKTRPVVNRVSNALRLAAFGVGRSDSALGDYCRRMKAKLGKAEGITATAHKLSRVIYGMIHSKQPYDEAIAFQTHPSTRTRRLKKLRKIAHSLGMQLTAIQPESI

SEQ ID NO: 123945 - protein, 404 aa, unidentified
MKRTKARGPVQRDAKEVMAEVLGKLTGKLHAPAVSTSAKEKRRGNTVGPNRDRLTVGVDLGDRWSQYCILGLEGETLAEGQLRTTQEEVGEFFQAMTAARVVVEVGTHSAWVQDVITEWGHEVLVANPRLMEGSKRRKRKSDRIDANKLARLGRVDPQSWYPIRHRSREVRQDLVVLRARDALVSARTELINTTRGLVKSMGTRLPRCSSPSFAQKVKDAIPVEVREALLPLVQLVETVNECIARYDQKIEELGRKKYGHTTLLRQVKGVGPITSLAYVLTLEDPQRFASSREVGPYLGLVPKQEDSGDSQPQLGISKAGDRMLRRLLVGSSQYMLGAFGPDSDLRRYGLRLCERGGKNAKKRAVVAVARKLAVLLHHLWVTGDVYEPLYRTETGTGTVPAAAA

SEQ ID NO: 123946 - protein, 321 aa, unidentified
MAYFRDVVGIDVSKENLDLYVLSAQQRRTVPNTAAGYRDLVSWLKSLGVRMAVMEASGGYERDVAKALRQAGFDVRIVDPKRVRHFAKAAGRLAKNDRIDAEMIAEFGAVFAAAQRCEIPLDAKREHLAGLVATRQALMDHQTSLQNQISACPKGPARQALAAALKPIPASIKQLDRLIAQAIAAHPQFAALAARLNTVPGVGPVTIAALISWLPELGRLDRRALAALVGVAPFDDDSGKRTGQRYIKGGRGKLRNIVYMAVMGAATRHNPVLKAYYDSLLKRGKLKKVALIACLRKLLTILNTMVAKQQDWNPASIAIVA

SEQ ID NO: 123947 - protein, 328 aa, unidentified
MGGRRCIGIDVSAYEITVAIEGRAERIALANDASGHAKLLRLITRGKGIARVCVEATGIYHLDLALALHRAPRVEVAVVNPAAVRDFGRALMQRSKTDGVDADVLLAFAERMPFVAWQPPAPEILDLRAIVRRMGALTLTRTQERNRLHAAGQCAELTEAIAWDIEAHLEHLAQSLERLEQQALTIVQAHADLTRRFDRLVSVRGIGTTSALRILAELAVLPADMSARQWVAHAGLDPRQLESGTSLHKPARISKKGNRHLRAALYMPALVAAREEPHVRGFYQHRIARGLKPLQALVAIERKLLHAIHGMWATDKDFDGAKFYVDPA

SEQ ID NO: 123948 - protein, 345 aa, unidentified
MIKSPIAVLGIDLGKNSCSVVGLSGTGEVVLCRRMRRDTVVTLGASVPPCIMAMEACCGAHHLGRLLAAQGHSIRLMSPEYVRPYVKAQKNDDRDAEAIAEAATRPTMRFVELKSEEQLDLQSLHRVRSRLVTARTALLNQLRAILLERGHVIPKGRRALEQTLAEIVASSDQMSGRVRRLMEEMRDEWTALDRRIDALNRELVERARTDAAARRLITIPGIGALNATALVAAVGDATAFRLGRDLAAWLGLVPRQHTTGGKPKLFGITKRGNKYLRMMLIHGARAALPWLAQAQTPLGAWLRGLLARAHRNVAIVALANKLARIAWATLRHGGSFEPRGLASAM

SEQ ID NO: 123949 - protein, 445 aa, unidentified
MSVRKSAVTGGLFLLQGELSIGKLKIVYPICCGVDVHRDFLVACIASTNSQGVTTYESKRFSTYTGQLRDFAKWLLDRDCHNVCMESTGKYWFPVHNILAPMGLNVVVSHPKFVKAIKGKKTDKKDAMWIADLFKHDLVRGSFIPPEDIRQLRDLCRYWAKLTYITTGEKNRAQNCLTISNFKLDDVFRNVFGKSATAIIDQLLINMGEPFDVTPYVHKRCKTPIDVIQTAVDGAFSPEQAEKLKLIRQHISDISELKATLEKLIFKLATPYHAQIELLLTVPGIANPMTAIRIIAEIGVDMSVFDSAKHLSSWAGLAPQNNESAGKKKTTRIGKAGAYIKPLLVQIALAASRMKKDNPEIADKFQSIKKRRGGKKARIAIARRIIVAIFHMLSKNQAYNGSLYLKAEIVPKQREVSPEQAFAILRKQGFSITGFDSTLKTKVFA

SEQ ID NO: 123950 - protein, 370 aa, unidentified
MAQPTPIFVGLDVHKDSIAVAQAQGECADPPVFIGAIGPRQADLNKLIRRLQAKTSHLVFAYEAGPCGYGLHRYLTGQGFTCQVVAPSLIPKKPGDKVKTDRRDAVELARLLRSGDLTRVYVPTVDDEAIRDLCRARDAARLTLKNAKLRLQAFLLRLGRHYVGRADWTDAHRRYLAKVVCPTAAQQVVFQESVRAVDEQVDRLRRLEAELLERAPAWRLYPVVQALQALRGVQWLVAITVVAELGDLTRFDSPRQLAAFVGLIPSEYSSGPARRQGGITKAGNGRARRALIEGAWAYRYPAKVSEHIQRRIDGLPKSIQDIGWKAQVRLCKRFRRLTARGKHPNVAVTAIARELIAFMWAIAKEVSVPA

SEQ ID NO: 123951 - protein, 397 aa, unidentified
MKDSTVYVGLDAHKKDHKIAAFFPGRDVPEEGMVVNTPKDIDRWVRSLQRKVPFQPIVVAYEAGVCGFALRRQIQREGVTCMVIAPSLMPIVPGQRVHTDRRDAAALGRNLRDGRLTEVHPPNEQQEAVRDLCRCREAAMDDLRRIRHQVLKFLLRRGVYYSQGQHWTGRHLEWLGAMRLGDVLAQEVFTGYLRELGHRQERVAELDKRVEAVAGDEPYRQNVGWLRCFQGIDTLTALTVLAELYAFERFSSPRKLMSYLGLTPSEDSSGQTVRKGPITKAGNRRVRRLLIEAGWHQRLRGTASKRLKARRKGQPGWVVAIAEKAQERLHRRFVRLSARGKPANQVVTAVARELAGFLWAVLQGPPQDAASRRPPGAEAVPAAPARRRHPAVAKVEP

SEQ ID NO: 123952 - protein, 421 aa, unidentified
MKVVYLTCCGVDVHKKFLVATIIKTTDGVQPSYQKKRFSTFNSDICHFKQWLLDNDCYHVCMESTGKYWVPVFNLLEDSIHVTIANPKWVKAVKGNKDDTKDSKWIGDLFRLGLVPGSFIPSKDIRILREYTRYRFKLTSCKRSEKNRYQNAFTVCNVALDAVVTDMFGKSASSITDYLIHSDEFDPDTCKSFLQKSLKKKGDLVVESIEGYQMTSSQKERMIMIHNHLDFVNETIHTLDTKLDELVAPYENAITLLCTNPGIDRTSAITILSEISTDMNQFNSSKRLCCWAGLTPSGNESANKKKSVRITRAGVYLKPALVQCAHAAVKSTTAPYYKTKYERIAKRRGKKRAIIAIARMILTAIYHMLTTGETWNPCDLFKIDMPHEMQEKQKQKAIKQAYKLLVSEGLIPSEIITSAAT

SEQ ID NO: 123953 - protein, 348 aa, unidentified
MPLYGGIDLHSNSNQSAILSEDRKRIMRRKVANDPDLILRFWEPYKPDLAGIVVESTYNWYWLVDLLQDNGYRVHLANPAGIQKYSGLKHADDNHDAFWLAELLLLGILPEGYIYPKELRALRDLLRKRQQLVRVRTALILSLQNIVTRNCGTKISAVHLKHLKEDRVQGYLQENEDLLLAGSANKTCIDALSRQILRIEAAVEKKLKLRLPYTHLLDLPGVGRILASTIMLETGPIERFAKVGCYASYCRKVNSRWTSNEKVKGHGNKKNGNKYLAWAFGEAAERARIFHKASREFYQRKLRQKKHPALAHGALAHKLARAAFYILRDNVPFDQEKMFGYPEEALDN

SEQ ID NO: 123954 - protein, 321 aa, unidentified
MSEKQWVGIDVCQKYLDIYVRPQGKLFQETNDEVGISQLVQTLEKIQPELIVIEATGGMEIDAAIKLTTSGLSVAVINPRQARDFAKATGQLAKTDVIDARVLAHFAEAIRPQVRQISDETNRQLEDLVARRRQISDMITAEKNRRRGKTNSVKASIDDHIKWLEEQLQEIESQIKSAIARCEDWQQKMKLLTTVPGIGEVVAVTLISSLPELGKISHKSISYLVGVAPLNHDSGKFRGKRRIWGGRSKVRCVLYMATLVAVRFNPKIKAFYERLLKKGKLKKVALTACMHKLLIFLNAMMKHNSSWRHEVSPLGQPQTTS

SEQ ID NO: 123955 - protein, 360 aa, unidentified
MIVQGTSVGLDVHALSVVAHAVDEETGKVARARLCPDHGEVLGWLHQLRAPVRVTYEAGPTGFGLARAITGAGMECLVAAPSKLQRPAGDRVKTDARDAAHLARLLRLGEITAVRVPEREIEAVRDLVRAREDARADLMRVRHRLSKLLLRQGIVYSGGTPWTCVHEEWLRRHRFDDIHLKAAFDHSFDAVLAATAARDRLDEQIMVVAASPRFADPVNRLGCLRGISALTGLALTVEIGDWSRFSGSSIGAYVGLVPCEYSSGNSRVQGSITKAGNTHVRRLLIESAWHHRKSYSTSGPTLRARWAKVDPALRARGHAGNRRLNKRWRSFTERGKNPLVANVAIARELAGWCWSLATMH

SEQ ID NO: 123956 - protein, 359 aa, unidentified
MTQHHRDRPDIVGGVDTHKDLHMAAVVDKHDRVLGTASFPTTRHGYKAMLAWMRGFGEVSRVGIECTGTYGAGLLRYLQRTGIATLEVTTPDKTVRRKRGKNDTIDAENAAHAAYAGIRTVTPKTRDGMIEALRVLKVCRKTAVAARRVALQMIQTQVISAPEELRDQLRNMTRMQLIRTLAAWRPDLSGYRDVTMAYRIALKSLARRYLELHDEVADLNVMIKAIVDELAPELVSRTAVGYESAAQLLITAGDNPDRIGSEASFAALCGVSPIPASSGKTQRHRLNRGGDRAANSALHIIAIGRLRLDATTQAYVSRRVTEGHSKLEAIRCLKRYIARELYYVLRHRYREINQTQIAT

SEQ ID NO: 123957 - protein, 350 aa, unidentified
MIIIGCDYHPSLQQIAFVDSETGELQERRLQHREEAEKFYRDLAAQGMKVRVGMEASGHARWFERLLAELQLELWIGDATVIRAKRGRKPKTDRQDAQHILKLMLKDDFPKIWVPSGENRDLRQLLWHRHRMVQARTRLMNQLQAVALNEGLRCKKKLWREKGRKQLEAIRLAPWASRRREDLLQLLDGLNPTIAELTEAIDQEVEKSAEARRLMTHPGVGPLTSLAFVLIIGRAERFQCGKQIAAYLGLVPLEDSSGERRRLGHITKQGNSLLRFLLVEAAQVTARSLPEWRSKYVHLTMRRGRKIAKVAMARKLAVRMYWMLRKGWDYGQLTKFGSHAGKPGPGDGVR

SEQ ID NO: 123958 - protein, 411 aa, unidentified
MRLFVGDDWAEDHHDVEVMNEAGKVLARKRLPEGAAGMAGLHELIGRHLGEGADDAEVAVGIETDRGLWVAALVAAGYAVFGVNPLQASRYRERHGVSGAKSDSGDAHMLADMVRTDSHQLREVAGDSAEAEGLKVLARTHKTMIWERTRQVQRLRHQLLAYFPAALEAFDDLDAPDALELLGKAPDPARAARLTRAQVSAALKRAGRRNITDRATKILAALRSEQLGQPPAVTAAYAVTVRSLIALIAALNEQVKILHGQVEADFGRHPDAEIYRSQPGIGAVLGARVLAEFGDDPHRYADGKSRRNYAGTSPLTRASGKKKVVAARFIHNDRLVDALNAQAFASLNASPGARALYDELRARGIEHNDALRRLANRLVGILHGCLKTRTLYDEATAWGHRQNLPQSSVAA

SEQ ID NO: 123959 - protein, 387 aa, unidentified
MTVRTVSNLPAATHGETVQCLFAIELTKQSWIIGFITPLSTRIGRRILSGGDWKGLLKLIDEVRARVSREMGRTVEVMSCYEAGYDGFWLHRQLEAHGVRNCVIDPASLQVDRRVRRVKTDRIDTERLLRSLMAYLRGEPKVWSVVRVPSVAEEDARRLHRERDRLISERVQHVNRIKGLCALQGIYDYHPLRPQAMARLEQLRTAQGVALPPRLKSEIKRELHRLELVVEMIASLEAERDIIAEDKASTHVNAEKIQALHKLKAIGPEFAAVLVGEIFHRDFNNRRQLASYVGYAPSPFQSGKVAHDQGISKAGNRKGRTTGIELAWLWLRYQPDSDLSVWFRARVGAVKGRIRRIAIVALARKLLVALWRYLETGLVPRGAVLKA

SEQ ID NO: 123960 - protein, 360 aa, unidentified
MYFAGLDAHLKYVTVAVRDRLGTLVLETTVSTREPERLLAVLAPLRPLEVVVETCPFWPWLSDLLVPAGIGFHLAHAQRLRAIATAPQKNDRVDARLLARMLLAGLIPEAYPRSGDQREQLRLLRHRTALVRARTRLAGRIHSQLHQQRLLLPREQLLRQATRTWLRETAWPRLTAEQQAIVTTHLALIDHLTPLIQALERRIDTAAGANPPAALLATIPGIGPYRSLLLAAELSPLSRFPRVEHLASYAGLAPVTRSSGGHTRHGSIPQGANRWVRGALVSAIPSHVRSAPTSAVTRAYAQLTARLGWRVARVAAARKLLRIVYLMLRRGEPWRGTGRVEADVRDEVHASHVARRPQYA

SEQ ID NO: 123961 - protein, 376 aa, unidentified
MSEHSEAFVGFDTSKLRNAVAIAEDGREGEVRFFGEIDNAADATAKLVRKLAGKYERLTFCYEAGPTGYGLYRQIRSLGHACSVVAPSLIPKKPGDRVKTNRRDAVSLAKLLRAGELTPVWVPDEGHEAMRDLTRARETAVIDLRAKRQQVSAFLLRLGRHYPQKRKTWTKAHMNWLASQKFAYPQQRFVFEEMLLAVRQVRERLLRLEEAIRGAVPEWSLAAVATALMAMRGIDVIAAATLLAEIGDLSRFRTPHELMAYLGLVPSEDSTGDTVRRGSITKAGNHRARRMLVECSWSYQHPPRVGPHKQHKVDAAPPAVREIAWKAQCRLHKRYRALIRRGKLKTVAVTAVARELAGFIWAINREITTAHRAVSV

SEQ ID NO: 123962 - protein, 425 aa, unidentified
MNDDVLIAVDPHKASNTAAVLDPVTKAVIETARFAHTEEGYAQLTGFAVRWSQRRWAVEGCHGAGRSLAQRLVADGELVLDVPAKLAARVRVYSRGHGRKTDKDDAVSVGLAALDGTGVTAVARDDATVSLRLLCDRREELGALRTQAVCRLHRLLAELTPGGMRRELTANKAQALLARIRPADDVAAIRVHVARDHLADIRALDARMKYIGAQIAALVAASGTGLTGLFGIGPVIAGRILAEVGDVARFPTKDAFASYNGTAPIDASSGEQIRHRLSRAGNRRINHALHMMAVTQIRYPATPGRRYYERKRREGKTPKEALRCLKRRLSDLVYYQLLADRRGTIGRCGSPTTRPPTRSTSTSPVTRSRRAAPPPRPAPRPASKGSSRSTGKTAGSSASRSSTPAPASATTSSTKPKPTTKQRPS

SEQ ID NO: 123963 - protein, 452 aa, unidentified
MARPKKGKYRKLNRSLPVMRPNAGGVDIGAREIFVAVPADRDTESVRSFPTFTQDLHALADWLQRCRVDTVAMESTGVYWIPLFQILEARGIEVHLVNAQHVHHVPGRKSDVLDCQWLQYLHSVGLLKASFRPEHAVCEIRSLMRHRENLVQMACVHVQHMHKALDQMNLQIHHVISDITGITGLAIVDAIVAGKTNPKELAKLRDHRIKASIETVTKSLVGDYRPEHIFTLKQSLTAYRHYQQLIADCDQEVQQRVRAFDTQNTKDDGPTATAESSTTTSTPSGFDLRSHLERIFGTDLTLIPGFECLRIQTIFSELGADLSKFPADDSFCSWLNLCPKDGTSAGRRIRGPKIQTKNRVANAFRLAAQSLHNNQSYLGDYYRSQRARHGAVKATKNAAHKLARIFYHLVTTRQLYDETVFAKLETRNHKRRLNRLQSLARQMGYSLLEVPA

SEQ ID NO: 123964 - protein, 340 aa, unidentified
MTIVGAFDVHRCQLTFDFFETATGEVKRGRIAPADREHLRRWLARFAGQDDVHFALEGCTGWRYVVEELAAAGIVPHLAEPADTAALRGRKRHAKTDKTDSRHLRVHLAGDLPECWIPPAHVLEARGVVRLYKDLLDERGAWHQRIAATLFHQGVPVIGSMSTPGGRAAVAEVALSPAGRQAVETGLRQVDRLTGELEPLRRQLDMLSRRQPGCRALRATQFGVGPVTSVAIWAELGDVRRFGNSDNVIRHTGLDITVYSSDGKRSAGHLSRQGPQLLRWALYESAKCAARPAAPDYRYYAAARERRTGGLATLSVARKLARRCFHTLRELGEEALQPAA

SEQ ID NO: 123965 - protein, 326 aa, unidentified
MDEQHDEVVIGIDISKHKFHVAIFKDNKFKHKTFRNDRHGHAALAAWLKARDVVTAHACMESTNIYGEALAEYLHDLGLTVSIVNPARIKGFAQSELIRTKTDKADAALIARFCVALSPSPWQPDPPEIRALRALARRLDALVEMRQQEVNRQAVANEVLQPTLADHIAYLDQSIREIKQQINDHIDNHPDLKHKRSLLESIPGIGQATIQLVLSEFADITRFKRAKCLASFLGVAPREIQSGSSVRGRTRMSKVGRSQLRKAFFMPALVAMRYNPAIKAMRERMLAAGKPKMAIVGAAMRKLVHIIYGVLKSGVPFDPNYQAKLA

SEQ ID NO: 123966 - protein, 322 aa, unidentified
MKYIGIDVSKATFVVAYSSDKGGEIRIFNNTTTGIKQFIGALPKDGSIHCVMEATGNYSALLLYMLNVARITVSMENPLKIKNFARAMLSTVKTDKIDARLIALYGEKMNPQPFKIQGEAILRLRQKRTVIRQLTKQITAMSNLRGSLACLPVPDKGATHTVDETIKFLEKRRDRLQVELTDLVEVEFSRQLALLTTIKGIGITLATALIITTGGFTYFQNAKQVSRYLGICPTYEQSGTSVNIRGHINRNGDAYTRGLIYVAAWNASRFNAKCGETYTRLRQNGKPGKLAMIAVANKLVRQAFAVVAHDKEYVDGFVSNRP

SEQ ID NO: 123967 - protein, 419 aa, unidentified
MVFSPARAALIRAVWRFPRRRCCAPVRACMMTPSERTGQFSLMAVRMPCPGLGFRACSVDPLHRTAVLSHVINRTGIMDRLSPVTRIRKVGFTMENEQHFIGIDVAKAKLDVDILRPDGRHRGKKFDNTLSGHEELVRWLRSHDVNHAHVCMESTSTYMEDAAIYLSDAGYTVSIINPALSKGFAQSEGLRSKTDKVDARMLAHFCREKRPSAWEAPHPTERALKALVLRHQALTEMQTQEKNRQETAPEVQLASIDVLLECLRAELKRIEKQIKDLTDNNPDMKQRRKLLNSIPGIGEKTAAVLLAYTGLKLRFATARQFAAYAGLTPVQHESGSSVMRASRMSKAGPVHLRKALYMPAMSALYHTAWGKAFRKRLEGNGKRAKVIIGAMMRKLAQVAYGVLKSGEPFDASQHRMQTG

SEQ ID NO: 123968 - protein, 426 aa, unidentified
MNYNTQNKKIESITEKTLIVGIDVGSTTHYARAFDWRNYEYSKKPFAFSNNEEGFMAFKSWIEDIAKKHGKDKIIPGMEPTGHYWFNLGMFLQENDMRTVHVNPHHVKKSKELDDNNPNKNDRKDPKTIAALVNEGRFTYPYIPTGIYAEIRNLSNLRFQTQEEITRIKNRIARWFSIYFPEYKDVYGKVDSVSGMMVLKQAPLPEDIVKLGVEGVNRIWREAKLRAVGYKRAKTLVKLAEHSVGSHEAPNAARVELTNLICDYEMYIERMDLLMETIEQRLTEIPYIDKMLEIKGIGMITVCGFIAEVGDIRRFDNPKQLQKLAGYAIVNNSSGKHNGESHISYRGRKRLRYILYEAAISLVGKNVEFKEIHNYYLTRDNNPLKKMQSIIAVACKVIRIFYAILTKGIDYDGNKMLQDIVRPSVA

SEQ ID NO: 123969 - protein, 312 aa, unidentified
MIEQCFGGIDVSQDRLDVLLLPQATGFSVANDEAGWNALIARLRDLPVAAIGLEPSGGYERGVIRALLTASLSVRRINPNRLRQFARARGALAKNDRLDARLIAEYVATMPTHVVRHDPAAARIAEIVTVRRQLRDEHVAVGNQAAQLEDAMLRRLAKRRLARIEADIRLLDKRLAEMIAADPDLARRYARLTSMPGVGPVLAFTLIALLPELGRMSRKKIAALVGLAPYDFDSGKLRGHRSIYGGRMPVRNVLYMAALSACRYNPALKTFHKRLAASGKKPKVIIVAVMRKMITTLNAMLRDGVSWQPQAA

SEQ ID NO: 123970 - protein, 306 aa, unidentified
MYLGLDVAKDTVVLASEPAGVAGTFATDVAGLTALVAQCQAQGIALCVLEATGGYEAPVAAALAAAGLPVAVVNPRQVRDFAKALGRLAKTDAIDATVLALFAARVRPTPRALPDDATLELQAVLLRRRQLLDMLQAERQRHLRSHGRVRANLRSHIHWLERSLADTDDQLRELITSSPVWRVQDELLQSVPGVGPTLASTLLALLPELGQLDRRQIAALVGVAPLARDSGTLKGRRTCWGGRAPVRAVLHMAALVAARWNPMLRVFYHRLRAAGKPAKLALTAVARKLLVLLNAMLRDGQRWRHA

SEQ ID NO: 123971 - protein, 438 aa, unidentified
MSNKVIFNLDELFISVGIDVGADFSWMSIVLPNQQFVGKPYKILHNSIDSLSTAVSKIKETEELYSLESRIFLESTGIYHYPLFCYLRDKGFNCSVINPIITKNSTNMNIRKVHNDRFDSKKAALVGLKPDLKVSIMPSDLALNCRNLCREYYNLMDNRSAYVNKLQGELRMAFPQYLGIFSKVTINTSLTLLETYTSPAAFIEADKQEIIDTIKSTARFGLTYAKAKYNAIIQAANEAHEFGYIIDSNITRIRLYISFIRKYDEEIKGILDAMHELVDSNEDSNFVKQIHLIETFKGAGFLSSVSLMGEIGDFSAFSKPKQLFAYFGLDPAVKQSGKFEGNKVKMSKRGSSIARRVIHTLTLQSISISRSGEAKNPVLHDYYLAKCEAKPKLVAMGAVSHKVCNMIFAILRDKKPFEIITPKEHIKQYNAVKCDKAA

SEQ ID NO: 123972 - protein, 533 aa, unidentified
MATKRKYRKSRRTGPAVLGKPNGVIQQRVQRVGPERFGVVAVDCAKARSKWMFCDFYGKVLVPPTPVEHTRSDFQLATVRLRQACEQHGIRDRIVAVEMTGVYHRPVQRAFRKAGYETRLVHPFASRHYRQPSHADEKTDDRDLEGIFRAAVNGFGLLEPTCPEIYCLLQLLARHRRDLVEKRAKLQCQIRHYLDRCLPGYAALFPNDKLWKRPLPMYVARRAQTAHAIREAGIPGVTRWVSEEKLRFQSRTIARLVTWAGNAADPDPLAPAISRVWQNLHEDWQAKSRQITQLEQESAQILVKTPYILLLSHPGINVVSAAELAGEMGPIEHYAHARAITGRAGLFPSRYQSDQVDRADGPLAHHRNARLRAAWMRVADNLIKCNAHFHGKFAFWKQRGVDARDIRCRVANRAVRTIFQMVSGRRLYHHPSRLDRQYVLDKLLDFHQQHHTPPDRILRDLRQAAEQIPKHEQAAEAAPLLKKYRRTRRSRQPGPKAIGEVLLAVLARWGIVELESEVEAHGPDANLSDTSTR

SEQ ID NO: 123973 - protein, 382 aa, unidentified
MFALEDDALGAAPTTYIGGTDVADGIRWVGLDVHAHESTIAVLDQATGELTTKRVAGRPHELIERLMDIPVPARMVYEAGPTGYGLARRARAVGIEMAVCAPGRTDRSPSDRIKTDKRDAIRLARRLAAGELTLVTVPSVEHERLRDVVRCREDIRGDLMRARHRLSKFLLRREIYYQGPARAWTQKHRGWLASLKFADRASQLTMADYLHAHDVLLARRATIETELEQLAAGSPWAGTIARLRCLRGIDTLSALGLCAEVGQFDRFEHPDSVSAYLGIVPSEHTTGQQRRQGAITKAGSTHARRLLIEAAYHYQRQPGIGETLQRRQNGQPADIINIAWRAQRRLNARWRQLKHTRKKANGIVAVAIARELAGFCWEIALA

SEQ ID NO: 123974 - protein, 457 aa, unidentified
MYRELFPLRQALSAELKANLSPAVPGIDAEHLLQSYLDRLTMYVGCDVADHILTLFAVDTAGDELGHLSTANDPPGFEQAWDWLEDLRSQHGLRIILLAMETTGVYYWACWDFLAQRPNLARVLYNPRTTAHMTEVLSKKVRNELVDAYALAEQVRLGSTPEVVLSEDTDLLTARFCSRAARDLAGQINRKKNQLRALMRAYNPAISHVFPGSQFHHQAVYALLQQYVFPDECLDAGVEAISAILEAHCRTAFDRQHAERLVARCRDTLSRPIGRDEIRQRVHHLIDDITTCQKRKAYFNKAGYRLIENRPETSLLRDATGAGISNTLALVSEVGDVQRFKSGAHLASFLGLTTSKHISGTTIFVSKHITKQGSPNGRYAAVNVAQHMSQRVPKYQHMYKRIKNRKPPRKGHFVALVAIARDFVTNVLYDMWRFQRPFFLEVEDYRAYRRKNPRLDQ

SEQ ID NO: 123975 - protein, 394 aa, unidentified
MKLVGIDVGKNSHHFCVMDKETGEFNVTPTSFSNNKEGFDFLINSLKPYSKKSILIGMEDTGHYHVALLKFLLSNGYTVALINPKTTDLTRKMEGGITKNDKLDTITICDVLDTPERKKQYRITKVDRFDLYEQRQLTRHHHNLKEELNVYCNRLQKSIDLVFPEFNTLFSSKYSIVYMNLLKTFGSAEAIASTDIRTIRKCFEIKGRGNRISLTPEKLKECAKNSIGISSEVETIQIKHLVSQITLIKEQIAEIDKKIEEFSITNNSPILSIPGISHFSGTSILAELGDIGNYSKPSQIIKFAGVAPYHYESSQYNAQHTGITKKGSKYLRKTLYQIILTVINNNPVFQKYYRLKISQGKGHRCAQGHCIRKLLRIIYHLLETGQSFDPALLR

SEQ ID NO: 123976 - protein, 341 aa, unidentified
MKANTIGLDLAKNVFHMICLDEREKEISKRKLRRHQVLPYFANLAPCWVAMEACAGAHNWARKLIQMGHKVTLIAPQHVKPFLRGNKNDYNDARAIIEAATRPGMPTVEIKTTVAQDLQAIHRLRSQCVKSRTALASSIRGLLCEYGIVIPQRIQNLRKHLPSIIEDDANELSDLFCELLERSYDQLVELDERVLYYTKKLEYLAKEDDACRRLQTVPGFGPIVASAFRVKLGNGHQFTKGRDVSAFLGIVPRQHSTGGKTQLLGITKRGDRYLRSQLIHGARSVVNWAAKKNDPLSRWINGIRLRRGWNKAVVATANKLARIAWAILRYGTTYDPSKACW

SEQ ID NO: 123977 - protein, 350 aa, unidentified
MKIRNTVGMDMGDKVHSICILDASGTVRECAEVSNTRAGIYKFFAKMEPSLIALETGTHSSWVSRILEELGHEVLVGHARKLRMIWNNPQKNDMRDAEMLARIARFDRKLLHPIQPRSMKAQCDLAAIKARNQLVKVRSSLIAHARGLVKSVGARLPTCSPECFAKRAAEAVPEELALALEPVIVSIAELTVRIRHCDQLVQKLADEEYPATKRLQEIPGVGPITSLAFVLTLEDPKRFARSRDVGPFLGMTPRRNQSGQVDQQLPITKAGNAYMRRLLVQCAQYLLGHYGPDCDLRRFGLKLAERGGKNAKRRATVAVARKLAVLLHSLWKTGEEYEPNRCRRQNRKTA

SEQ ID NO: 123978 - protein, 385 aa, unidentified
MSAHPTQIQAAAQLQANTLFASLELSKARWLVTVSAPGSDKLSRHQVPGGDGQALLDLLWRLQATAARRTGAPVMIIVIQEAGLDGFWIHRLLVQNGITSHVVDPASIAVNRRHRRAKTDRIDGVKLLRTLMAWMRGERQVCTMVQPPSPEDEDRRRLARERARLLKERVQHTNRIKGLLSGQGIADYDPLHRDRRARLAALTTGDGRPLPKRLEMEIGRELDRLELVASQLAAVERERDALVAQTAEADARAAPAALIRLRGIGPELAALLWLEALFRRFENRRQIAAYAGLTPSPWKSGGIDREQGIAKSGNPRLRRAMIELAWFWVRHQPGSALSRWFVERVGAARGRVRRIAIVALARKLLVALWRYVTQGVVPEGAVLKG

SEQ ID NO: 123979 - protein, 340 aa, unidentified
MTITTIGLDLAKSVFQAHGIDESGATVLVKKLHRKQMLPFFSKLPPCLIAVEACGTAHYWARTLAAMGHEVRLIPPSYVKAYVKRGKSDALDAEAICEAVQRPTMRFVPVKTIEQQGILMTHRARSLLVRQRTMLANALRAHLAELGHVANPGIGNLAKLAEQVMADRNALPSYARTALEILIRQIMAVSAEIAELDQQLATWHAESEASRRLAAIPGLGIITATAIAATITDAEQFSSGRQFAAWLGLTPQQHSTGGKTRLGGISKQGDRYLRRLLVVGATAVMRHVKDKPTPMADWIRKLSEKKPFRLVSVALANKLARIAWVVLTRKEAYRPYAHLT

SEQ ID NO: 123980 - protein, 366 aa, unidentified
MEVTTVAIDLAKNVFALCGADAKGRVVLRKELRRAQLPDFMRRLGPCVVGMEASGGAHYWARQFAALGHEVRLISPSLVTPYRKGNKTDRNDAEAILEAVSRPTMRFVAVKSVAQQDLLALHRVRSQLVKTRTALCNQLRGLLRERGVVVRVGPIALKRALPSALADEGNELSGEMRELLGEMSQWLRTLEERIASCEAKISRYFKHDERCARLAKVPGVGPLAATALVAAVGNAREFKNGRELSAFLGLVPRQHSSGGKRVLLGITKRGDRYLRTLLIHGARSALRWCTLKDDKQNRWAARIQAERGPNVAAVAMANKNARVLWALLSRGDRYRPDSAIMQTVLRPGSPSPVERARGAKLRLTQN

SEQ ID NO: 123981 - protein, 454 aa, unidentified
MAQRNRRISLKPGKAHAALTLTHPNAAGIDIGSASHYVAVPPDRDDEPVREFPSFTADLEQLAVWLKACGVDTVAMESTGVYWIPLFERLDARGFTVLLVNARHVKNVSGRKSDVLDCQWLQQLMTYGLLRGAFRPADEVCALRSLSRQREMLLRSQGRHVQHMQKALTQMNIQLANVISDVVGETGQKILRAIVAGERDAQALAAMKNVRIRASVDEIAKSLQGNWRAEHLFALKQALAHFDFIGTQLAECDGEIEARLQRLQAHEGSPAKGKKRGRARNAPKFNLRERMFRTCGVDLTRIDGIDVTTALTVISEVGPDMSRFPSVKHFACWLGLCPGTKITGGKVMSGKTKRVANRAAQALRLAAAALRTSQSALGADFRRMCARMDKPKAVTAAAHKLARLIYTMLTKGEEYTDQGQDYFEERYRQRVLRQLSLRAEKLGMRLVDNPQPAC

SEQ ID NO: 123982 - protein, 340 aa, unidentified
MPLYGGIDLHANNSVVVLLNEQDQVIYQKRLPNHLPRILEPLSLHHGEIEGLVVESTYNWYWLVDGLMEAGYRVHLANPAAMQQYNGLKYSDDHSDARWLAHLLRLGVLPEGYIYPKAERAVRDLLRKRAHLVRQHTANVLSVQNIMARNTGARFSVKRMHELTKQELQSWLTEESQVLAVTSSLAVLDCLKHQIKTLEQAVHKRVHHTPSYEQLLTVAGIGTILAQTIALETGAISRFPSVGHYASYCRCVDSHKLSNGKRKGTGNVKNGNPYLAWAYMEAAQFALRFQPAAQRFYQRKLAKSRNNTILARKAVAHKLARACYYMMRDLVPFEATKAFG

SEQ ID NO: 123983 - protein, 352 aa, unidentified
MNYVGIDIHKKYSVLCAQDERGHKLREARIEGHERADYARFFGELAGPSKAVLEACWNWGLTHDLLEEIGEVKEVVLAHPLKTRLIADAQIKTDRLDAFALGTLLRGNLVARAHIPRRETRARKNLLRQRLYWSRLRTMLRNRIHALLDRQHGLELPQCSDIFGVRGLGFLRGLELAEPDHTLLREALALHDLIAQQMRAQEKRIAAEFKLEPSYERLLSLPGVGPTLGAVLAAEIDQIERFKSADKLCGYAGVVPTTHSSGGKVHHGRLLPYCNKWLRWALVEASWVAIGCSPYFGALYRRQRARGKKANTAITIVARRMCRILYQLLHEKRSFEKRPHKVQTHFVPGCSA

SEQ ID NO: 123984 - protein, 463 aa, unidentified
MEGKARRYHRPRKGPSLLERVNPNAAGIDCGSAEHYVAVPQDRDDEPVRRFKTFTADLHRLADWLVGCRIETVAMESTSVYWIPIYEILVARGIKVVLVNARHLKNAPGRKSDVTDCEWLRDLHSVGLLRGSFRPEEGIVTLRSYLRHRETLVQSAATMVTRMQKALVQMNLQLPVVIKDIIGLTGLRIIRDIVKGEIDPAHLAKHRDPHCRASEAEIRAALTGHYRPEHLFALEQNLELFDALQRQVEACDVQIEACLTEQAAKMTSPSPPLPAPRHRRNRRSNEPQFDVRTILYRLVNADLSQLDGIGPHAALRLISEIGTDMSHWRTERHFTSWLTLAPNNRVSGGRLLSSKTQPSANRAAAIFRMAAMSLARTQTALGAFYRRLACRIGKAKAITATARKLAILVYRCLKGEIVYKDPGAAAYDVRHRDSVVRRLRQRAAALGFNLVSGQTGEILDGVS

SEQ ID NO: 123985 - protein, 411 aa, unidentified
MLFVGDDWAEAHHDVEIVDEEGHRLVRRRLPEGVDGLATLHGLIADHLGEDARPGQVLVGIETDRGPWVAALAAAGYTVYAVNPLQVSRYRERHGVSGAKSDPGDAHVLAELVRLDRAHHRPLAADSDVAEQVKVLARTHQSLVWSRQRQTNMLRSMLREFYPSALQAFGADLAGRDSLAVLAVAPSPEQGRGLSRARIAAVLRRAGRQRNIEATAQRIQDALRSDQLALPPGVAGAYAASVRSLVAVISELAAQVQVLQGEVEACFGQHPDAEIYRSQPGLGTVLGARVLAEFGDDPTRFADAKARKNYAGTAPITRTSGTRRVVLARHARNRRLADALYQQAFSALSSSPGARGYYDQQRARGATHHQALRALANRLVGILHGCLRHHMHYDEDTAWAAHHAQTQTTAA

SEQ ID NO: 123986 - protein, 341 aa, unidentified
MGVYVGLDVSLASVAICVIDEDGRVLWEGKAAGDPEAVRVTLEPWLGKIEQLGLEAGPTSEWMGGQLLAAGFQVACLETRHVKAALSAMVVKTDRNDARGIAQIVRAGWFKAVHVKSAGSQRHRTLTTARKFLVRSMAATEQAIRGLLRPFGLKVGAVTRRRFAGRVHELVADDLALAAIIQPLLRAHERLVAETAQLHRLVLQTVRADPICRRLMTMPGIGPVTALTFRATIDDPHRFRRSRSVGAYLGLTPRRHQSGEIDRIGRISKVGDGEARTALFEAANVVLRPSTRWSAMKAWAVRIAKRQGSRRAKVALARRMAVTLHRMWIDDEDFRWASAAA

SEQ ID NO: 123987 - protein, 430 aa, unidentified
MNESVSEQPLSPKVAAFVGIDWADQKHDVVLRSAGDPAKAEHQVIKSEINALNDWIAQIQERFGTKGKVLVCLEQSRGALIYQLMVYELFELYPINPSQLANYRKTFFSSGAKDDRPDADLLSELVMCHRDRLKAWKPDDQLTRELASLNEGRRNAVNRRTELANEIKSQLKLYFPVALQILENDITTALAADLLVQWQTLAELQKVSPGKLRKFFYGHNSRQEKKILERLALIKEAKPLTTDVAIIRPNALRVKLLAQQLKSLLPFIAEYERRIAELFGSHPDRFLFDNLPGAGPALAPRLLTAFGTDRDRFEVAGDLLNLSGIGPVRIASGKKTGKSASVHCRRACPKFLRQSFHEFGECSIRYCPWAQACYQAQRGRGKGHHAAVRAVTFKWIRILFACWKQRTPYDPQRYFQALQTRGSDYAQTTA

SEQ ID NO: 123988 - protein, 336 aa, unidentified
MTIIRIGLDTSKHVFQIHGVDENETPVLRRQLRRGEVARFFAKLAPSRIGIEACGASHHWARLLRGLGHAVMLVPPQYIKPYVKRGKNDAIDAEAICEAMSRPTMRFVPVKTAEQQAALTMLGVRDLLVKQRTMLINAIRGHAAEFGVTVAKGPDQVLELLRRLASGEGVPELAREMVTVLTGQLEAVKAKLKAVEARLMAWHRQDQTSQCLATIPGIGPIGGVSFALKVADPKGFRSGRHFAAWIGITPRENSTAGQHRPGKISRQGDESLRRLLVLGATAVIRQAKPGRAAPWLLALLARKPKKLAAVALANKMARIIRAMMVSGETYRRPQPA

SEQ ID NO: 123989 - protein, 464 aa, unidentified
MQQLRLGVDIACRTPHQASLADNTGRFIWSGRRFRTRTDELEALWASIPGDAEITVVMEPTRNAWVPLASWFRRKGATVVMVPSEQSADLRDYYSKHTKSDRIDSKLLATLPLLHPEGLRPIEHLGPAEPLRRATRLRTSLVKRRTEVVNRIDSLLELLGPQWYSAFDTKIDQLTPLRFLAAGYADPHLCRRLGKARIARFMHRHSHGRWNTTHAAAVLGAANETLELWGDELDYGELADDLAIEAQLALTLTTQIHELEQRIDVMRRALDPTDILRSVPGVGSINAAQILARLADPGRFRSLAGVRSYSGLVPSLNASGRNGAQGGPTKSGDALLREALFTSVDVARKIDPTLAQRYHRLMTEVGKHHNSALCSIAPTLLTRIVACWRSGENYVIRDVDGREITPDEGRRIVSERYTVRPELRALRRTTKPSEWTGRRSKESQGAPSTGPSVIEVRERMHSTA

SEQ ID NO: 123990 - protein, 411 aa, unidentified
MEQIHDRVAGLDVHRDEVAVCVRRPGPRGGMQTEKARFNTTTGGLAALAEWLAGHAVTLAAMEATGVYWKPVYYALEGRFELWLCNAHHVKNVPGRKTDMSDAEWLADVAAHGMVRPSFVPPPAIRELRELTRYRKTQIDVRAAEIARLEKVLQDAGIKLTSVASKVLTQSGRAMIEALIAGQRDPRALAELAKGKLRPKIPQLTAALHGHFGPHHAIVAACILGHLDFLDAAIARLDEQVAARVAEGYQPAARLLADVPGLERRSIEVIIAETGADMSRFPSPGHLASWAGLCPGNHESAGKRRRVATTPGNQWLRRTMVESARAAARTKGSYFGAQYRQIARRRGPSKAAVAVAHSLLDVIWHILTTGEVFTDLGADYFTSRQDKEHQARRLVGQLEKLGFTVQLTEAG

SEQ ID NO: 123991 - protein, 342 aa, unidentified
MRIVMLGIDLGKNLCSLAGLDETGAVVLRRRMKRASVLPFTAQLETCTVAMEACCGAHHLGRQLVAQGHLVRLMSPAYVQPYVKAQKNDERDAEAIAEAATRPTMRYVEIKSEAQLEVQSLHRVRGRLVAERTALINQLRALLLERGIAVPQGRCKLVRYLPEILADERNGLAPRLRQLIEDIREEWRSIDRRIKGYDHELAEQVRNEDTAKRLISIPGIGVLTATALVAAVGNGQTFSCGRDLAAWLGLVPRQATTGGKPRLLHISKRGNGYLRMLLIHGARTALPGLAKKDTPLGRWVKALLARAHRNVVTVALANKLARIAWAVLARDRQYVTVQAIGK

SEQ ID NO: 123992 - protein, 421 aa, unidentified
MDGLPELVKNDDKEARRLATPEQVDVWVGLDVGKEGHFAEVLDDAGERLFTRSVVNDQAALEALLDQAAKHGTPGLVVDQPGSIAQLALAVARSRQVPVAYVPGLVMRRAADLYPGEAKTDKRDAFIIADTGRTRRKQVQWLDAASDELLERLRVLNGFDIDLATDQTRLTNRCRDALAGMSPALERAVGSRLGHAGVRDLLAKYPTPSALKAAGRARVARAVRARSPRLAEKVADNVMAALGAQDLTVPAEATIGRVISELARELDRLFARRDALAAEIEEAFLAHPFGELLSTLSGIGPRTGARILAEVGDGSRFEDGDKLASYAGLAPVTRQSGKSINGESKSRRGNHRLKNAMFLAAFASIRSAESKAYYDRKRAEGKRHNAAVICLARRRCNVILAMLRDRRPYVARPAGDLTEAA

SEQ ID NO: 123993 - protein, 372 aa, unidentified
MQQKSKVFVGLDTSKLKISVAVAEDGRQGEIRFLGEIDNTPEAVRRLVHKLASRHGELLFCYEAGPTGYGLQRQIAALGHECAVIAPSLIPKRPGERVKTNRRDALTLARLHRAGELTAIWVPDPGHEAVRELVRAREAAMADLRGKRQHLQSFLLRHGRIFPGRRPWTQAHARWLAELVFEHPAQYLVLREYRQAIEDAEARLDRLTQQVAEVVATWSMAPVVAAYQALRGVALLTAVTFVAEIGDVRRFDSPRQLMAYLGLVPCESSTGERVRRGGITKAGNARVRRVLIEGAWTYRFPARMSRLLQERQEGLPAAVRAIAWKAQVRLCARYRRLMAAGKRQTVVTTAIAREMAAFLWAIGREVQPRSAA

SEQ ID NO: 123994 - protein, 440 aa, unidentified
MKEKKTKAFPIIYPNAAGIDISSKEHYVAVNPESTEKPIRAFGAFTEDLHALVVFLKECKVDTVAMEATGIYWVSLFLVLEDAGFDVVLVTAKHVKNVRGKKTDVSDADWIRQLHSCGLLSASFQPDKFTRKLRAYMRHRKNLIEMSATHIRMMHKALEQMNIKIQHVIADITGKSGQEIIKSIIAGERNAEILASCCDSRIRAHKKEGIIKSLTGVWKEEHVFELEQSYSIYQFYHAKLKECDAKIEEHLREKSGVDTFVEPQKKEKSNKNNLNFNGKEMLYELTGTDLAEIFGITETNAIEIISEVGLDMSKWPTVKHFTSWLNLAPNNKISGGKVLSSRIPKKKNHAGQIFRMAAFAIQRSKNWLAMFYNRIKAKNGAPKAIVATARKIAAIFYKMIKERVKFNPIPIEKYMDGFKENQIKKLKRQAKNLGLQIVEM

SEQ ID NO: 123995 - protein, 375 aa, unidentified
MMSITHGVARFVGLDVHAATIAVAVAERDGETRFLGTIPNLSTSVYKLIKKLNEGGSWVACYEAGPTGYALYWTLTKAGIPCQVIAPTLVPVKAGDRIKTDRRDALRLAQSFRSGDLTPVWVPDAAHEALRDLVRARESGKRDQLRARHRLSKFLLRHGHRPETKMTTWTQKYMNWARGVKFEQPAQQWTLEDYVNEVEHCSLRIERLEQLIDQAVELAPASMKEVVEALQALRGIAKVSAVTIVAEVGQLSRFATARQFMGYSGTIPSEHSSGESVRRGGITKTGNAHLRRVVVEAAWSQRHGPILSRHRKLRMKGLSPEVQEIANKALHRLHARYVRLEAREKPKQKVVTAVARELLGFIWAIGVSVESNHAA

SEQ ID NO: 123996 - protein, 344 aa, unidentified
MITIGIDPHKSSLTAVAVEPNGQTHRPIRAVVDKTTPEMLLAWAAQWPERQWAVEGATGLGRGIAQQLVAAGEAVLDVPAKLAARARLLGSSSARKTDVADAVSVAAVALHNRRLNRVQVEDHTTIMRLLTERRDDLVAEHTRWINRLHVLLRDLHPGGAEVRLDTTQASVLLAKIRPVTAADQQRKQIARDIVRDLKRHEASIKDLDKQLRAAVNASGTTLTEIQGIGFLTAAKILALTGDIRRFPNQEHYASYAGTAPIDVSSGDQQTHRLSRRGNRQLNAAIHVAAVTQARDPGPGRDHYRRKIAEHKTAKEARRSLKRRISNAIYRRILADQQRLQQAAA

SEQ ID NO: 123997 - protein, 417 aa, unidentified
MLKIVFPICCGIDVHKTFLVATIASTDRSSVTTYQTKRFSTFTKDLENLSKWLLDNQCADVCMESTGKYWIPVYNVLELTCEVILAHPKYVKSLRGKKTDRKDSVWIADLFKHGLVKASFIPEKAIRDLREVMRYRTKLVSMKSSEKNRYQNALTVSNVQLASVVSDTFGKSAQALINQLLQQPKDTSFDVLPFLHGSLKKKAEQISESLNGSIDDIQAQKIRSCTSHMAELDSHIEDLQVAADLIASPFTAALRIIESVPGIGHLSALTILSEIGTDMSKFLSAKHLCSWAGLTPCNDQSAGKKKSTRISRAGCYIKPVLVQCALAAIKDKSFPYYGQRYQVLKHRRGHKKAIISIARMMLSVIYTLLSRGELFSKELYEESLKNPMVILSPEEQFQRLAKKFGYVVVKVHEPVPV

SEQ ID NO: 123998 - protein, 409 aa, unidentified
MRRVKGKRSASSIVGCAPKCAEPHAETPEGVLPQTFRGGRPVSETITSFVGLDVHKDSTAIGEAEAGRENPRFIGTVGPDLGQLLKALKSLGKPETMLVVYEAGPCGYGLARQLRSRGYSCEVVAAGKIARRPGERIKTDRRDALTLARLARSGDLVKVIVPDEGDEAMRDLSRAREEGVRARLKARQQLKALLLRHGHRYGGKSSWTLAHERYLAAVSFAHPAQDIAFAEYRQAVREGHERVERLTEALRTQAEHWRLKPLVAGLATLRGIDFVAAVTLTAEIGDFGRFAHPTELMGFLGLVPSEYSTGDTRRQGDITKTGNSHARRVLVEAAWNYRFPARLSRVLQIRQEGQPKAVREIAWRAQLRLAHRYRRLSSRKLHPNKICVAIARELAGFLWDIARQVKLAT

SEQ ID NO: 123999 - protein, 345 aa, unidentified
MTLYCGVDFHARQQTIAYCNLQDGEILFTQIRHDDRDALQRFYTQFQTPVIVGLEAGGYSEWFERFLSELGIETWFGNPTEVRRRARSRQKNDWRDAELLLDLMIKNEFPRVSRQTAESRAVLAQLRYRHKLVQARTRATNSLHALAIREGLSLRATILTKAGRAKLNALSLTALQARQREEWLALIDQLSENIKRVEEELIQLAAQDEQVIRLRTHPGIGLLTGLALVHTLAPISRFSNSRKVTAYVGLEPREFSSDTRQRWGGISKAGSPLLRFLLVEAAQQAARADTELKNTYQHLSARRGRPKAKVAVARRLLVRAYILLRDEIDYSTYLRRTVAVRSARD

SEQ ID NO: 124000 - protein, 362 aa, unidentified
MSDDATTSEGTKVTVGLDLGDRHIQVCVLDEAGEVIEEARLATKPQALRRRFCGAERLRIVLEAGTHSPWVSRLLAELGHEVIVANPRKLRLIYQNDSKSDRVDAEYLARVGRLDPALLAPLTHRGAETQADLALLRSRNALVRARTSLISHARGTTKSLGARLPACSTESFVARTGACVPDELRPALDPVLVVIAELCAQIRALDERIEKMARQRYPETALLTQVPGVGTLTATVYVLTLEDPERFPRSRSVGSYLGLRPRQRDSGSLQPQLRITKAGDEHLRWLLVGAAHYILGPFGPDTDLRRWGLKLAAQGGRSGKKRAAVAVARKLSVLLLRLWVTGEVYEPLRNARLRDEFLPSPT

SEQ ID NO: 124001 - protein, 466 aa, unidentified
MKKNTKSTKTIPAPLSLLNPKCAGIDVGASELFVCVAKNSSEQEVRVFPTFTADLKRMIDWLKNSGVKSVSMESTGVYWIVPFEMLEEAGFEVLLVNARFFKSVPGRKTDVQDCQWIQQLHSYGLLRGSFRPSHEIVALRTYVRQRSRLFETAGTQVLLMHKALTQMNIQLNHVISDITGVTGLNIIKAILQGKRDPKVLADLSVNGCRKNKDLIEKALEGNFRKEHVFALKQAYEAYEFFHKQIHKCEEAIEAIISSMPVEPPPLPPSSSNKKDPVPFQSKKCARKTKANRSPYYFDAPKAIKKITITDLTTIPGIDANTAMKILSEIGTDTSQWPNAKAFVSWLGLCPGNKISGGRVLSSKTKPSDNRAAQALRMATATLYRSKTAIGAFFRRMRARLGAPKAITAAAHKLARILYRMLTNGENYRELGENFYEQQYQARVVANLTKRAEEFGFTLIPKTASVK

SEQ ID NO: 124002 - protein, 386 aa, unidentified
MRQATTLPAPQRTCSRGDCATLFVSLELSRSTWVATALAPGSSKMSKYTLVGGDGHKLLDLLARLKSRAEQRIAAPVKVVTIHEVGLDGFWIHRLLEANGVESHVVDPASIAVPRRHRRAKTDTIDGETLLRTLMAWQRGEPRVCAMTVPPSPSEEDCRRISRERAKLLQERVRHTNRIRGLLFGQGITNYNPLHKNRREGLEQLRTGDGRSVPAHLKSAILREIDRLELVLRQIGEVETERDEMLQLAQPSSPAALLMRLKGIGAEFATVLYLEGLFRRFDNRRQLAAYAGLTPSPWKSGSIDQEQGISKAGNPRLRTTMVELAWMWVRYQPASALSCWFRQRVGSKRGRIRRISIVALARKLLIALARYLSHGEIPAGAVMTAG

SEQ ID NO: 124003 - protein, 375 aa, unidentified
MTMMQHRQIRYIGLDVHKATISVAIAEGAGTPTSYGRVPNDPAAIRTLMTRLGDPQAALHVAYEAGPTGYALHRQLAKLGIECMVVAPSLIPKRPGDKVKTDRRDALKLARLLRSGDLTPVWVPDEAHEALRSLVRARADAKADQLRAKHRLSKLLLRQGCWPPIGVRNWSQRYFTWLRQLTFKHLPDQVVFADYLTEVTAAGERIKRLETALHQCAPSSSQVALIRGLQAFRGIGFLGAVTLVAEAGDLRRFRTAPQFMAYVGVVPTESSSGGKQQRGSITKTGNRLLRHVLGEAAHHARHAPRVSSALKRRQADQPRELVELAWRAQVRLHTRYRHLSTRIGALKALTAIARELAGFIWAAGHVLQEEVLTTA

SEQ ID NO: 124004 - protein, 345 aa, unidentified
MKITTVGIDLAKNLFQVHAVDERGKAVLRKQLRRAQVAVFFGNLPPCVIGMEACASAHYWGRTLQRFGHTVRLMAPQFVKPYVKTNKNDVADAEAICEAVGRPNMRFVPIKSIEQQAILSVHRVRKGFVKARTAQANQIRGLLGEFGLIIPQGIINVTKRVPELLEDAANELPLAFRQLIERLAQHLKELDRQVKEFEKEIIAWHRSSELSRKLEKIPGIGPLAASALVASIADAHSFDNGRQVSAWLGLVPRQSSSGGKPTLLGISKRGNVYLRTLLIHGARSAILAAKNKVDNTNGWLTNLLQRRHPNIAAVALANKNVRTVWAMLAHGREFKADYVPTRLAA

SEQ ID NO: 124005 - protein, 394 aa, unidentified
MIYVGIDVASTKHDIVISSESGELFKKAFSIKNDLDGYKKLLSEISSAKEFFNDLNVRIGLESTGHYSRNILHFLILAGFEVMFINPLLTNMDRKAASVRKTKTDAIDAKAICMFLIRNQNDFKPYTLSSYHIDELKTLVRQRKSLKTQINKEMNLLHAYVIQAFPEYYKIFKKINSKASMEVLSRYASLSEFKRVRLETLKELIRKSSKGHHGIREAQMLKDLNSSSIGIDSSALSFSIKQTIKRILMIKEQICDIEHEIKHHVDESHTTLLSVPGIGYTTGAIILAEIGDIHRFKTNDQLLAYAGLDPSVYQSGNFEGSYKISKRGSSILRFAIYHVAQAAVKFDPVFKAYYLKKKAEGKRHRVIIGHVTKKILRVIRSILKNNSTYSINTH

SEQ ID NO: 124006 - protein, 418 aa, unidentified
MSEDENTRGTRRYVALDIHKHYCVIAGVDREGRVLLQPVRVEHVDLEGWLKKNLCSTDQVVIESTTNAWHVYDLLAPLVERVVVANPIKVKQIAQARVKTDIRDTLILARLLAANLVPDVWVPPVHVRQLRQLLSQRRQLVETHTQIVNRMHSVAHRYHLKHERGKRFNEKTTGWQKDKILSSLEQFQLQLEMENLAYIEKQIERISKEVRKMCHQKPWAESMTYLMQLPGFGIITAMTVLAAIGDIQRFESPKHLASYSGLTPGLEQSGTKNRGKGITKEGRRELRWALVEAAQRAVKSDPLWKTRFQEMLKRMHRNQAIVAVARHLLEIVWYVLTRRQPYRHFSHERIAYKYLTWAWQMDEAARDGLTRQQFARYYLMRLGIGQDLTRIALNPKYPRRLASEAELLALRPELNHLE

SEQ ID NO: 124007 - protein, 441 aa, unidentified
MKNEPTQNNNSIPAAEPIAAWVGLDWADKKHSLFVRPTDGAATTACELEQKPQALDQFFLQLHQKHPQGRIAVCLEQSRGPVLYALMKYDFVVIYPVNPRCLADFRRAFKVSGAKADPTDADLLSELGCKHHQRLRALVPEDLATRQLRFLVEARRDFVNKRTALANELTATLKSYYPLALEVVGENLEGPMGLEFLRRWPNLAKLQGAKPSVVRAFFYAHNSRSEEKIAARLEAINTAVPLTEDPAIVGSLQLQAAGLARQLAAVQKTVAEYDQQIRVVFEGHTEKWLFEKLPGAGPVLAPRVAAAFGTIRTNLGAALDLLCLSGVAPVKRQSGQQETVHFRFARPKFLHQSLVEFAKCSIGQCDWARLLYEKQITQGKSAYAAIRVVAFKWVRILWRCWKDGQAYDEVKYLRSLKKRGIKLYESLYNALPAETGPVNNS

SEQ ID NO: 124008 - protein, 438 aa, unidentified
MSDLPVLEPRATFVDVGSEQLHVSIAGGPPRVFGTVTAQLAALRAWLLAEGVQAVAMEATGVYWLPLYGVLEDAGLAVTMVNGRQIRNLPGRKTDMQDCQWGATLHAHGLLQAGFVPPAQIRCLQDYLRLRADHITLAASHVQHLQKALERMNVKLHDVISSLTGVSGLAVVRAILAGDRDPERLLALCDNQIQRRKGDRVKEALRGTWAPEHLFALKQALRSWEHYQEQIAECDREIETRLREMTGGNDPPVAPPTRRQSPGVNAPAIPQLRELLVQLCGGQDLTSLPAHSAYSVLQLIGEVGNDLTKWATPKHFTAWLGLAPGSHQSGKRHRTVRRKRNRAGRLLCVMARSLARSKDIALGGFYRRLAARRGGLVANIALARKLATLFWQVMVKGMDYVEHGLAAYEAKVLETKQRTLRRLAAQLGQQLMPLPQTS

SEQ ID NO: 124009 - protein, 339 aa, unidentified
MNTHLKLVLGIDVSKAKVDVALRIPASDEVSAVKLHTANFTNDQPGFARLTRWLRRWTQEPVHACLEATGRYGDAIAEYLDGCGHAVSLVNPNRIHAYGRSKLRRSKTDKADACLIADFCATQQPPLWQPATLHQQELQELTRQLEELKTSQQRVRNRLASGIRSTTVKQLLQEQLDLLEHQIRHLEAEIDQHIQADEQSQHSFALLLSIPGIGPTTAAKFLAEVPDIRRFENADQLAAYAGLVPRHHLSGSSVKGHATLAKLGNSYLRTAFYMPALSAERFNPVIANLAQRLRASTIPKSKMTIVVAIMHKLLVLAYGVLKSQRPFDPHFARNQQLAT

SEQ ID NO: 124010 - protein, 352 aa, unidentified
MTKSRLWAGLDVGAKTTSVCVINCSGEVVHEGVCPSSSKEVRHELTVFRKDRYAAVSLEAGTGTHLARALRTFGYPVILYETRQLAKFLRVRRNKTDAGDAKGVAEASRIGASVVSKVHVKDLRCQSLQSKLAIRRHLIGQRVATVNLIAHQIELFGGQLHLNGKTNELRRAVEMEMKNVFKGEPRTLIDEMRYLVDHCERLRAHEQTFNRDLRALAFESEACRRFMEIPGVGPITALAFYAAVGEPNRFVRTSRVGSYFGLTPRIHQSGLTSRSGRISRMGNTSVRSLLVQAAISFLQYCKVECDLRSWALSIEARRGKGKARVALARKLAIVMLAIWKAGSHYEHNHQPA

SEQ ID NO: 124011 - protein, 405 aa, unidentified
MPYILALDVSMGHSYSVLYKDDTCLFEDEIEHTQRGFHALLEEIQHLPERPLIVFEATGIYSRPVEKFFQDHHFSYCLLNPLEAKKQMEESTLRSWKTDKSDAHRLAQTHLKNQRQPKEVQSNFYLEMRDLARFYQEIEKKITRLRMDLHNCLQLTFPELEQFFSNRLTPYALTLIRLFPHPDFVLASTRTKIKNKLINETRKKISANRAEQKADQIIHYAQCAYPAVEKDSIHCQKTIYYAELLQDLLEQKEALATQMIKKAEGSPCFLLYQTFPGIGALTAALLLGELGDITRFKTHKQLNAFVGIDIRRYQSGKYTGQDRINKRGNPKARKIIFFTIRNMIRQQSAAPNHIVDYYYKLKKQPIPKKDKVATVACMNKLLKCMHAMVRAHTEYDYAYAVSVDH

SEQ ID NO: 124012 - protein, 428 aa, unidentified
MKKANSVKLVTINPSTLIVGVDIAKELQWARFTDYRGLELGKAVKFTNNKDGFANILASIETTCKLSGLEQVIVGMEPTGHYWKPLANYLNLHGLRVVMVNPYHTKRAKELDDNSPTKSDRKDSLTIARLVRDGRYYEVYLPRDVYAELRVLSNTRLSLIKRQNGLKNTITAVMDEYFPEIKKVFKHPLKGKASLQILKSCPFPELILALGIEGVLAEIKKAVKRAVGRKKACELVEAAERSIGVNYGLTGSHLKLRLLIEELELLTIQLEQVKEEMDLALSKTGHKDLLLSIPGVGIVNAASFLGEIGDPLRFDHPNQISRMAGYNLVEDSSGQHQGRTVISKRGRKNLRSILYQMALVMVARNNEMKELYQYLKKRPDNPLKKKQALVVISKKAVTIIYNLVKKQARYEAELVFNQVRKNQIKQVA

SEQ ID NO: 124013 - protein, 418 aa, unidentified
MKSMEITAVGIDVSKSKSTVAIRRPGGVIVARPFDISHSNHDLEKLVSILKTTGGDIRVVMEHTSNYWKPIALTLKEAGFYVSVVNAMLIHDFSDNSIRKLKTDRADSLKIANYALTFWNELPPFNDEDETRLVLREQSRMYERLASTATSLRNGLIALADQTFPSIDQAFGHAIKNADGHEKWVDFFSIYWHRDCVLRLSIEKFTESYSKWCLRRNYKFRTNTAHKLYALAQDAVPTLPKNNGTKALVLQACKSLNAVCEAKQSTQEEMNRLASLLPEYEVVMQMEGTGPITGPALMAEIGDVRRFKNKKALVAFAGIDAPPFQSGNFESKSRHVSKRGSPHLRRAVFLVANIILTLSHKDNSVFCFMDKKRAEGKHYYVYTIAGSAKFLRIYYARVTEYLRTQEIPVAASCLNGNS

SEQ ID NO: 124014 - protein, 400 aa, unidentified
MSTPHERIWVGVDAGKGHHWAVALDADGETLFSTKVMNDESQILTLIAAAREKGDEVRWAVDISGRASALLLALLIAHGQQVVYVPGRTVHRMTGAYRGEGKTDAKDARVIADQARMRRDFAPIELLPELVSTLQLLTGYRRDLIADRVRLINRLRDLLVGICPALERAFDYSGAKGPVVMLTEYQTPAALRRIGVKRLTTWLERRKVRGADHVAAKAVEAAQSQTTALPGEARAAKLVRDLAHQLLALDERIKDNDREIHETFRTDDRAEIIESLPGMGPILGAEFIAIVGDLSGYRDASRLASHAGLAPVPRDSGRRTGNYHRPKRYNRRLRWLFYMSAQSAMMRPGPSRDYYLKKRAEGLLHTQALLALARRRVDVLWAMLRDKRLFTSVPPVTQSA

SEQ ID NO: 124015 - protein, 472 aa, unidentified
MGKGSGNGTTRGDRKRNARRERLRMLLPRGGAVIGIDLAEDKQALAVIDHDMRVLARKTVKVKAFRLGEALDWAVAQARVKGFERVAVACEPTGPRWMQVQRLCAERGLPLVCIQPLVSHIAREQQDYTTHKTDESDCVLIARLAAELHCYIPEELDETWAHLRHLGRRRAQLITAATASVQRIGDFLSVAWPTVTETCAQPFESKTWLAAMQLVTSRCGGQPARLAAMGEEAFTAAVRAAVRDWGGQKAWGPISRRIFTALTDTEGVVAWSRRGLLRRVADELGDLQRIRAQLRATEADMISVLAELGLSRLADIPGLTAVGAAAILAETGDPRRYDGSSSLVKHAGMSPSDNASGAFAGQAHISRRGRPGLRLTVWRAVWPMLQFNPVMAAKYQAMTRAADAAAADAGPQHGTAAQTAARARRAKARVACAASLLRWIYCMVVHGTSWDPEVASGAASCHDAPQHQAEAA

SEQ ID NO: 124016 - protein, 421 aa, unidentified
MSYKIASLDVHKKVLMVVVASTAAEVADAAGAAVEFEKRKFGAGADQRNQLVSWLQQHQVQEVVMESTAQYWKPVWLDLEPHFGKLHLAQAQSNRAPKGRKNDFADAKRLARRLLAGELILSYVPEPEQRQWRLISRGRLQLVCERVRLHSQLEALLEEARIKLSSVISDLLGVSGRRILTALANGESDPVKLAELGDDGLKCTKEQLADALKGSPAAGHIELLKLHLERLHLLDKQIEDLSLMSAKALMAHQNAVVRVAKVPGFGVESAQQMIAEVGVDAEVFPSAGEFASWVGVCPGSNVSAEQNHSSRCPKGNRYVRRLLSEAAQAAVKKKGSHFQNVFRRFLPKLGYSGAIWVVAHRLARLVWKILHDGVNYIEQAQETNPRAKKRRVQKLAQALRNFGYQVTLTELHPAPPIGGSQ

SEQ ID NO: 124017 - protein, 343 aa, unidentified
MDHYAGIDVSLELSRICILDASGQILREAKVTSEPEALAAFLTGLNLPLTRVGLEAGPLSQWLYAGLHRAGFDVVLLETRHVKAALSAMIVKTDRRDARGIAQLLRMGWFCPVHCKSPPAQEVRALLTARKQLQAKMRDIELSLRGLLRGFGLKVGEISKGQFATRVRTLIAGHQMLETIAEAMLRAREALQAEFARLHRTMLAIARDDAVCRRLMSVPGVGALIAVTFTSAVDNPERFSRSRAVGSHFGLTPKKYQSGETDITGAVSRVGDPMVRTALYEAAHILLTRAVRFSALKRWALEVAKRRGMRRAKVALARKLAVILHRMWIDGTTFRWGRECAAA

SEQ ID NO: 124018 - protein, 424 aa, unidentified
MNADRAPEPVRSFGTFTTDLHRLIDWFAECGVDTVVMESTSVYWIPIFELLDARGFAVFLVNARDAKHVPGRKTDVSDAQWLQRLHSFGLLRASFRPKGQIAELRAYLRQRERLLEYGASHIQHMQKALTEMNVQLHHVVTDITGVTGLRIIRAILAGERDPAVLAGMRDRRCHATVETIEKALAGNYRVEHLFALEQALALYDTYQQKAFACDARIEAVLKGLSVHRGREEGQLPAARQNRSSQQNSLLFDVRAALFALLGKDLTQINGLGPYLALKLIAECGDDLSAWPSAKHFTSWLCLAPSNKISGGKVLSARTRRSGSRAAALLRLAARTVGRTDTALGAFYRRLAARIGKAKAVTATARKIAVLFYNAVQHGMNYVDPGASSYETRYRARVIANLHRRAKAFGFVLQPVDPPPGVAVS

SEQ ID NO: 124019 - protein, 364 aa, unidentified
MFIIGCDYHPGFQQIASVDTDTGELSERRLAHREQAEQFYRELKQQNLCARVGMESSGHSRWFERLLQELGFELWIGDPAEIRTKRVRKQKTDRQDAQLLLRLMLENRFPRIWVPDAGNRDLRQLLWHRHRLVQMRTRVMNQLHVVPLNEGLRRKKALWRPAGRKELESIALAPWASRRRQDLLDLLDQLTPKIQGLRHALEEEVEKRPVTRRLMTHPGVGPLTALAYELVIGTPERFHCGKQLASYLGLVPTEESSGDRRRLGHISKQGNVLLRFLLVEAAQVTVRSHQEWRNKFFHLAMRRGRKIAKVAMARKLAVHLYWMWRQGCDYGQTQKLGSHAGEPGNPDGVQSITDVMIGHPAPCK

SEQ ID NO: 124020 - protein, 349 aa, unidentified
MNTIARIGVDLAKNVMQIHAVDQSGHIVTRKAISRANFLNRFANLPPCLVAMEACSAAHYWARRLRSLGHDVRLIPPQFVAPYRKGGSRMKNDALDAEAVCEAASRPQMRFVPVKSPAQQSVLVLHRLRTGYVEERTALVNRLRGLLAEFGVFLPQGIDKLHAHFVEHIEDGTNELTGTAREALMRGWAQWQALDQEIAWFDRQIATHARQDPHAKRCMDMCGIGPLTASATVATIVDARQFKNGRQMAAWLGTVPRQKSSGGKQRLGRITKQGNEYLRMLLFLGARAALNTAHRRNDRLSRWILQLRARIGYNKTLIAVANKHARILWAILAKGEKFDPAHVCPSAAT

SEQ ID NO: 124021 - protein, 320 aa, unidentified
MRNAVGLDISKLTFDASAMVGNAEYSAKFDNDSKGLNQFSDRLKSLGCQNLHICMEATGNYYEEVADYFAQYYSVYVVNPLKISKYAESRFKRTKTDKQDAKLIAQYCRSAQESELVKRQKPTDEQYRLSRMIAAYAQIKSECAAMKNRHHAAKDEEAAKAYAEIIKAMNEQLEVLKEKIKEQTEKPNCKEGVKRLETIPAIGRMTAAVLFHHLTSSKFETSNKFAAFAGLSPQQKESGTSVRGKGKLTKFGNRKLRAVLFMPAMVAYRIRAFPDFIKRLEEKKKPKKVIIAALMRKLAVIAYHVHKKGGDYDPSRYKSA

SEQ ID NO: 124022 - protein, 321 aa, unidentified
MTKDRKIYGIDISKNVFDVYCVATGHMQLKNDEKGFKSFLKTLPKTALVVMEATGYYHYRFAQFLHKHDVTVSVVNPLSVKRFIQMKLAKVKTDKSDAKAICEYGTMNELPIYNAYTEVQAECLQLFRLLDNYIKQRTATKNKLHGEDVLGIPSRMVYSSLKRQLKHLDKEIVMLEKRLLELVKQDQQQQLTLLKSIPGMGVKTALFLIVITDGFKKFETAAQLCSYVGITPTIRASGSSVRGRSRISKVGNKKLRNLLFLCAFSACKHNRACREIYDRIVAKGKSKKLALIAVSNKLLKQAFAIAKSGLPYDENFVSRLA

SEQ ID NO: 124023 - protein, 384 aa, unidentified
MDVHTSNYTLCSLDPGYGVEKDNYFAEVQFTNNFVTNVVNYVSNLKKKLKDCEFVCGYEAGCLGYSTYKDLTKVGIKCVLMAPSTMAVQKGGKKVKNDRRDARVIAQCLAYQTYKEVYVLSEHDEAVRGYLRMRDSHNKALKRIKQQIIAFCTGHGLFSPTKSNWTVAHLKWLKDLKFNDPVEQEILNEYLSSLTFLSDKIKAMDVRIEELASEKQYCENVKKLRCIKGIETNVALTLLAEIGDFNRFSKPTDFASYLGLIPGEQSSGDKVRGTGITKAGNSTLRRKLTESAKGYWRGRIGIKSATFKKLEKELPKEVTEYALKANTRLQRKFFNMTHVKGKNMNVAASACAREMACFVWGLITNHYEKAPAVPKTDEALLDLN

SEQ ID NO: 124024 - protein, 343 aa, unidentified
MQTITTIGLDIAKSVFQVHGVDAAGEVVIRRQLKRRYVLAFFQKLSPCLVGIEACASSHYWSRELQALGHTVRLMPPAYVKPYVKRQKNDMADAEAICEAVTRANMRFVPTKTSEQQSCLMLHRTRHLFIRQQTAVINSIRAHLAEFGIVAPVGRRGVTELLDIVADPSDKRVPEVARACLAALGTQLLRLKEQILEFDRMIMAWHRSNQTSKRLHYIPGVGPMLATALVASVADPRTFRSGRNFSAWIGLVPKQHSSGGKDRLGSISKQGDRYLRSLFVAGALAVIRYAKVHGTKHRPWLTALLGRRPTKVAAIALANKIARMAWAMMAKGERYKQPVALAA

SEQ ID NO: 124025 - protein, 354 aa, unidentified
MLAELVDHVIGVDPDRDWITVAALDSRTAGVITTDRFPATRDGYRDAISWADAHTEESERAWVIEGTASYGRGLTMALQRLDELVIEFDRPMRKATKDGAKSDALDAIRAAREALGRDKLSQPRANEGIREAIRVHTVARAAAVRARTAAVNELKAFIVTADEQLRSELRGLRTNKIVDRCSRFRDSAKRPVDERCTRNAMRALARRVQHLEAEIGEHDAAMKILIDRAAPQLIAERGVGYVTAAAFYLAWSHRGRCHSEAAYARLGGTAPVEVTSGQNQDRHRLNRGGDRQLNRALYFVAVTRQRCCPVTKDYMARRTSEGKTEREATRCLKRFIARRVWRLLEHPELHLDKT

SEQ ID NO: 124026 - protein, 484 aa, unidentified
MAKQKESIQERLRKGRLNRKQRRELNRHLAAADPGLTIVNPNAGGIDVGNESHFAAVPSNRDAQPVQEFGCCTQELIRMAKWLVSCGIDTVAVQATGVYWIGLYDILTSHNLRVVLVNARHTKNVPGRKTDVLECQWLMKLHTYGLLRDSFHLAKELEGIRTMWRLRGRHVAEAGRAVQHMQKALTTMNIQLANALSDITGVSGMRIVTAILNGERDPYRLADLRDKRVRASREEVARSLEGTWRDDLLFELAQALNQYRFIHEQMEQCDRQLAVYLSQIPSAPVAAPASVEPAPSKPKKPKTSGKARGNQPVILNLEAELTRICGVNLCSIDGISVITAQTIVAEIGTNMSAFPTEGHFTSWLGLTPNLDISGGKVVRRGKRKTQNRVAQALRMSATALLNSDSYLGAKYRHLRRQLPANKSAVKAMARILAVLVYRMFTRGKAWVDRGAVFHEQRRTELDLARLQSTARARGFKLIPISQAS

SEQ ID NO: 124027 - protein, 388 aa, unidentified
MDVLLSSACGVDVHEKMIEACILMQKDSQIVPIRQRFSTLPKELSAFVKWLRENQCFDIAMESTGVYWKPVFETIEREIQEKHNIIVGNAYHIKNVPGRKSDVKDAEWIATLLMHGLISKSFVPDKRIRSLRDVARTYKKCVGENCRYRCRIEKFLQTHGYKLSSVMKDIFCVTGRNLLDSLARRGSLTLEDVTACRKGRLKSSALELFDAVNIPLDEIDRQLLSLLLDRLKTSESDLKKVIELMDEIAKPYSRQIEILDSIPGIDRIAALLIIAEISNAPQKDFSSQEKLTSWAGLAPRNDESASKIYSKKVLPGNQYLKTILNQVSWAAVKQRETPFHDWFWTRQGRLGKNKAITAVSRKMLKLIYTLISSNTLYNNVIALSNVNH

SEQ ID NO: 124028 - protein, 403 aa, unidentified
MDVHKETVVVCVLPPDGQEGKPVKKVYGTFHADLGRMRGWLKQLKVTSIAMESTGVYWRPVWNVLEGHGFELLLANPKQVKALHGRKSDKRDSERIAQFLQDRRLDPSFVPPPEIQRLRDLLRYRLYLLEQRNETHNKIRDLFETANIKLSSVASDLLGVTGQNIIEAMIAGEASAERLSWKVKGTLRKKEKEVKRSLAGCFDEFHRGMLEWLWKQYSFLSAQIAEVETCTRRLMEPHRELVELLDQVPGVNETVAWTVIAELGIDMGVFPTAAHVASWAGMCPGTNESAGKQKSGQTRKGNRYLRRVLLQAAWAATRQKDSYLRAFFYRLQHRRGWGKAIIGLGHKLLRIIYEIIKTRTPYYELGANYYDQLNPEKTIRRLVARLEGLGVQVEVRPQAQANA

SEQ ID NO: 124029 - protein, 350 aa, unidentified
MPKRNVPRPAAVYGIDIGENIFHVVGLGSDGVPVQKVRFRRDTLLQFFARAAPAIVGMEPCAGSQWIARKIQALGHKVRLIPAQFVKPYVKSNKTDVIDAEAIAEAATRPTMRFAALKSEEQADLQALHRVRDQMIGTRTRLINQMRAFCLEYGIALRQGAGLFKLDLPQVLEDQSNDLSPAMRKLLANLFADLRQLEHRIGDLTREIEAIANREDVARRLMTIPGIGALGATALLAAIGNGRQFHKARDLAAWLGLVPREYSTGGKQRLLGISKRGNRYVRKLLVHGARSCFRHLDRTRDRLGSWLDGLQARMHPNKAVVALAAKMARIVWVVLTKPGALYERRDPAFT

SEQ ID NO: 124030 - protein, 354 aa, unidentified
MSQTLKTAIAVIGIDIGKNSFHVVGLDQRGAIVLRQKWSRGQVEARLANMPPCLIGMEACVGAHHLSRKLKELGHDARLMPARYVRPYSKGQKNDFRDAEAIAEAVQRPTMKFVATKTADQLDLQALHRVRERLVSQRTGIINQIRAFLLERGVAVRQGLRFLRAELPRILATPPDVLSPRMVRVIEGLAGDWRRLDERIEGLSSEIEAVARQDTACERLMSVPGIGPIISSAMVAAIGTGDVFSKGRDFAAWLGLVPRQISTGDRTILGKISKRGNRYLRVLFVQAAWVVLIKPKSWERHGLKPWIEAAKKRLHRNVLAIALANKLARIAWSVLARGRAFEVRKVDEAAAQPA

SEQ ID NO: 124031 - protein, 393 aa, unidentified
MICVGIDVAKDKHDCVILNSEGKILAGVFTIPNNADGFDTLLQKIRSCTSSDDKIKVGLEATGHYSYNILGFLINQGLPTYVINPLHTNLYRKSMSLRKTKTDRVDAKTIATMLMSNVDLKSYTDTAYHNEELKSLTRYRFDKVRERAQLKQSVSRLVTILFPELEKLVPTLHMSSIYALLIEFPGAKQITEAHLTHLKSLLKDASKGRYGRDMATEIRDAAKHSIGSVMPAKSLELRHTIRLIRELDSEIKDIEAAIEAIMEELQSPITTIPGMGFRMAAMILAEIGDFSFFDSPDKILAYAGMSPSTYQSGHLSLAGTYSHMEKRGSRYLRYALYNATKYVCHWDPGFAAYLAKKRAEGKHYNVALSHAAKKLVRLIYAMEKSRQPYKRAA

SEQ ID NO: 124032 - protein, 343 aa, unidentified
MDKVDTVGVEVSAKVLVVALKSNGQIRACEFANTASGHKQLISYVRRYSQRVRVCMESTGLYGLDLALAVKAQKGMEIMVANPRSVRHFAEAMMKRSKTDPVDAKLLAEYAERMPFQVWQPPSLAARRLCALARAMHQLTEISTMQKNQLHAAGSTETTPKIIVTELRRSLAQQQRAIEHLLKEAIDLLQSDLLLQKRFQLLLGIRGIRELSAVHLLGELVLIPADCDVRQWVAYAGLDPRQYKSGDSVEKKVRISKVGNRHLRRALYMPALVAIRHNPHFRAFYRQLLAKGKLKMVALVAVMRKLLHGIYGIFKSQQPFDATKLFSLSLVSALEPATEKMAC

SEQ ID NO: 124033 - protein, 342 aa, unidentified
MTTIKYSVGVDIASSTFTAAVGEIPWKVVLKPQTFENTEDGYQTLLAWFAQHHLSVSETVVCMEATGVYSEGLAYFLYAKGYRVAVQSPLEVKRTFKPYGPKSDAVDSLQIAEYACRHTDKLSFWKPRSEVLEQVKALLAVREQFVAQNTAHKNALKAIQRKVVRTPFAEQAYQQLIEQVKKQIQAIDTEVRRLIESNPTFKEMLLLLLSVPGVGLLLAAHFILLAQFSLEYKVLASFLGICPNEHSSGTSVFKHATSRHFGPSAIRKLLYLAACSVCTHRPQFGMYLARKTKEGKPARLVLNNVENKLVRIMCAVLTTKTAFIENYHSVQPLVFQKTLTAS

SEQ ID NO: 124034 - protein, 343 aa, unidentified
MKLFVGLDVSLEKTAICVISEHGKIVKEAQVASEPEALLRWIGDQDGAIAAIGLEAGPLSQWLHRGLSEAGQPVVLMETRQVKGALKAMPIKTDRRDAEGIARLLHLGWFRPVHCKSMSAQEVRAVLSARKAVQQGFITLEMSLRGLLRNFGLKVGAISRGRFEERIRELAAGNPMLEAATEPMLRARSALRRELAGLERHVRQLAHEDPVCLRLMSMPGIGAVVSLTYRSAVDDPARFTSSKKVGPWVGLTPSRNQSGERDISGGITKAGDVNLRRALCQAATVMMHRGRATWLRTWAAKLARRRGAKRAVVALARRIAVILHRMWKDDTDFRVDVPAPHAS

SEQ ID NO: 124035 - protein, 363 aa, unidentified
MFSERTSVGLDVHARSVAAAAIDGVTGELFQTKLTPSFDHIRSWVTDLPGPVAVAYEAGPTGFGLYRQLNAAGIRCEVVAPSKLQKPAGERVKTDAKDAIHLARLLRLDDITSVAIPSIDQEAARDLVRVREDCRGDLMRARHRLSKLLLRYGIVYYGGQAWTGKHDMWLRNDALPQLTTRATRLTFDADYETALVTKARRDRLDAMIEEMAADSEFTPLVRRLGCLRGVSTLTGFGLAVEVGDWHRFTGNTIGSFVGLVPSEHSSGGSRSLGSITKTGNGHARRLLVEAAWHHRPRYTIGKTMRDRWNLAPATARIRGDEGNRRLHQRWVKFIDRRKRSTVANVAIARELAGWCWSLAVMED

SEQ ID NO: 124036 - protein, 420 aa, unidentified
MMMTHPKARWTYIGIDSHKDTHTAVFLDCFFGKLGEITFNNIPSDFETFLKQAQKYKIIGTAFAFGLEDVSAYGRQLNVFLTGKKEMVKHVNASLVASERKSHNILHKTDSFDAECAARALISRFDDLPVTNPQDKYYILGNIVARRNSLIKINVALKNHLHALLTNNYPNYKKYFPLVASRTALTFFENYPSPNTLKGTTPEGLREFLHRESSSRLSIAKATEFLTHIEKCGFKPSEYQAEKDFTVKSTVRQIKANLHEIEEVDKLLERFLENFDYKLTSMRGIDTTTAARLIAEIGDIKRFPTSAKLAKYAGVSPVTFSSGKSDVQYANTRGNRQLNEIFFRLALTLTMAVGKTNRIVNPFFYHYYRKKLSEGKTKKQALKCVQRRLVNIIHGMMKNNTPYINPETYDEPKEDDRQAA

SEQ ID NO: 124037 - protein, 346 aa, unidentified
MSKDILLTVDYHDAHCMIRHKNLATGQESVRKVDTERDTLRTWMLTALREAKAQRGRAVWIQESTTGWARMAQLADDCRIEFVLANVLQMPLPPKARRRKTDTIDTARLQREYLNGQLPRAHQPAAEWRQLRRVVALRVNLVRRRTAVSNWIDRYLAHETWIDRPCRGVRSRRGRARVLALSVSPTDRQMLHWKLEELEQLERRIVEVEALLLEYYRQSPDAQRLDDIRGLGPIGAITIVARIGPIDRFGNADQLIAFAGLSPGVRQSDATCRGGRIGGGGTDNCLRHFLIEATIWARTIPRYKTTYQRVHRRRGAKIARLVVARRLLRSIHKMLSTSVPFEPQFA

SEQ ID NO: 124038 - protein, 374 aa, unidentified
MSAPMIYLGLDVHKDSITLAVLPEGTPAPTRVDRLPNDLPKLRRYLTRLARDGTLRICYEASGAGFVLYRALRGWGYHCDVIAPSLIPTKPGVQRKHDKYDAVQLARLYRAGELTPVRVPSEADERIRDLVRCRETIQRELLKSRHYLLKFLARRGFIFRAGKHWTLAHLTWLRELAGPASPLIDEDLEVLREYLALFDYKLGRRQALDQRIAELAQTPTLQTPVQWLQCFRGFQVQGAMVLQTELGDWRCFDSARALMAYVGLIPREDSTGDRERKGSITKAGNAHCRHVLIQAAWSYHHPPKISAALKARQRGQPATVLSHAWKAQHRLHKVYRHLAYRKQPRIAVVAVARELVGFLWAVMRHHEPASVART

SEQ ID NO: 124039 - protein, 297 aa, unidentified
MSVYVGIDVHRKRSQVAVVTEDGKVQLNKNVVNGSEPMLRLIGDLPSGTPVAFEAAFGWGWLVQLLEDYGFEAHLVHPLQCKAIASARLKNDKVDAAILAQLLRADLLPEAWIAPPQVRQLRALLRHRASLVRLGTQQRNRIHAVAADHGYDRSASYWTGPGRGWLAELDLPPASREIVTDCLAVIDGLAPVIERIDGELHQHAKADPRVKALRTLPGVGEFTALMMLAEIGDITRFPSARKLASWAGLTPTVRGSDRTVRHGHISKMVCAGGMVPLRRPGGVRWRWLEDWICTGVS

SEQ ID NO: 124040 - protein, 347 aa, unidentified
MEQVIRIGMDTSKHIFQLHGVDAAEKPVLRKRLGRKAMVDFFAKLPPTVIGIEACGTSHQWARVLAPLGHQVKLIAPQHVKPYVKRNKNDGRDAEALCEAMSRPTMRFVGVKTAEQQAALMLAGIREQMIARRTQVSNMIRGYAAEFGITVPQGLNQIGPLLARLAQDESVPELARDLFAFQGRDYAQLQVELKAIEVKLRAWHRANDDSRRLAKIPGIGPVGATTLVMKVPDPRAFPSGRHFAAWLGLTPKDHSTAGKTRLGKITRAGDERLRSVLVAGATAVIQQAKHGRGHPSPWLIALLKRKPPKLAAVALANKIARIAWKLMARGESYDGARLPEASVAAAA

SEQ ID NO: 124041 - protein, 409 aa, unidentified
MEGGRVIFVGVDWSETHHDVCVMDADGKVLAKGRVPEGVEGVARLHEMVSAHAEGPSDVAVGIELDRGLLVGALVASGYAVHAVNPLSVDRYRDRHRTSGAKSDPGDAKVLADIVRTDRHLHRQVAGDSGLAEAVKVIARAHQGLIWSRQRQLNQLRNALREFYPAALQAFGTDLASVDALAVLEAAPTPTQGRSLSTARIAAALKRGGRRRGIAERAEEIKQALRSSQLEAPEVLSKAYGEVVRSTVRIVTEMTAQIEALRREIEASFEEHPDAEILRSLPGLGSVLGARVLAEFGDDPVRYADPKARKNYAGTSPITKASGRSKVALARFARNRRLADALEMWAFCSLSCSPGARRYYDAHRSRGHTHRRALRSLANRWVGILHGCLRQRERYSEQRAWPTLTEAAA

SEQ ID NO: 124042 - protein, 371 aa, unidentified
MGKCIRFVGLDDSKDRIDVAVAAEGRDGEVRAYGSIPNTPEALKKLVRQLGQPKTLHFVYEAGPCGYGTYRELLALGAHCVVVAPSKTPRRTGDRIKTDRRDAATLARLHRAGELRAVWVLDEATEAMRDLTRAREDAKQAQTKARQRLQSFLLRRGRRYPGRSNWTKSHVKWLSEQRFAHHAQQLCMEEYVKAVEEAGARVERLESAIHELVCGWSLGATAKAMTAHRGVSLVTAATMCAEIGDLTRFDRARDLMGFIGLVPSLHATGQTHRSGAITKTGNGHVRRVLVEAAWAFRHPARRTAVLRARLQDQPEAVQELSWKAQVRLCGRYRRMVARGKHRNKVVTAVARELVGFLWATARVVTPAPSGR

SEQ ID NO: 124043 - protein, 351 aa, unidentified
MKTNTPPKIETQDRIQQLKLGVDWHADHFRVVRMCDGQSPQPAQRFTPAIFLLFVQKQLTLADQVFVVYEAGPGGFHLHRQLTALGVTVFVVHPQKLDPNHKGVVTDKTDARELALNLDRYLRGNQRALSVVRVPTAAEEQRRALSRQREQLRRERQRLAAQGRSLCLTQGIRLRGEWWSQNLSLPEWLEPRLQVWRKLITAVEEQLEVLTKQVEALAPKARPKGLGPLTLGTLLAELCDWSRFKNRKQIGSYTGLCGGVSSSGQSHCDLSITKAGNARVRWSLIELAWRMVLYQPQSKAVQRWKHVLLNSKAAARQKKRALVALARQLAVDLWRWQTGKVTPEQLGWVMV

SEQ ID NO: 124044 - protein, 406 aa, unidentified
MPIYVGVDIGKESHMVCAVSDQEKIILHPFSVENSLSGVELFISKVKALAPIDQILVGMEATGHYWQCFFIQLQTLGFSVCLINPYQTNHFAKTNLKRAKTDKVDALNIAKFLAESKPRSTKLPDELIMVLKELTRLRDSLVKNRSALHNQLVGVLDKAFPEFVQIIKNPTSEKALTILQRYPSATALRKAKLGKLQTLTYGKKQHKIGPDLASALKNQAKRSISSDYAHTAYEIELRSIIAQIQTINEQILVIELKLKEYFSQLNLDNLLSIPGVGFVSVASLVAETEDIDKFSSPKKLVAHFGICPKEDQSGKYRNPHPHMSKMGKSRPRAVAYRVCIPAIRVNPVIKEFYLRLRAEGKPTKVAICACMRKIIHLFWALWKYQRTFDANFAQTCLSRHRSKNKL

SEQ ID NO: 124045 - protein, 531 aa, unidentified
MNRYIGMDLGLSTKHRVAVLDGAERLGKPFSVEVCREGFEELLRRATAGAEGPVRFVLEPTGLAWVPVAAYMAAAGHRVHLVKPQKVSHLRKFLRQHTKTDSVDAETNARLPQVDPKGVHELRLPTPEQMALRRLVNRYERLTQQVGDQKRRVHALMVMVNPPLMSALGDAAFGQAGLAFFRHYADPALVVKMGRAKLEQFWKRHTKGPVDKDLVDRVFKACCTTAELYADLRRTGKLPFDYSEVQEELVAELDWMEHAQLEAKRLEPRITEIYNHLDPDRTLKEIRGIGDVIAPCIEALVGDIERFHNTRQFTSFSGLCPRKKQSGMSDQPMPITKSGQRLLKKYFYLAADVARQWDAEFAAYYARRYARGDHHNHIMIALARKMALRVYALLKRREKARRARQASGSAEPVSFVLRNPVGGAAVTKMQARELVLEKYTRAVANPERYKRERGRVGKGKGTGSAKSEWPSEDATSRRAVPTPQIPQARITRNPVDVQHRGEGSTSIGQVLSSLENLSVEKHVNRKRKNCE

SEQ ID NO: 124046 - protein, 375 aa, unidentified
MHRRRVLDKAITYVGLDVHKETIAVALAEAGVRGDVCEYGKVANTPGAVKALATKLSRVGNALRFCYEAGPCGYGIQRQLTLAGHDCVVVAPSLIPRKPGDRIKTDRRDAINLAKLHRAGELTAVWVPDPAHEAIRDLVRARLAAVRSLRQARQQLSGFLLRHGRHYNRPTWTLMHRRWMAGLRFEQSAHHIVLEDCIAAVEAATVRRDRLEAHIEAALPDWSLAPVVRALQALRGMALVAAATVIAELGDITRFANPRQLMAYLGLVPSEHSSGATRRQGGITKAGNSAARRMLIEAAWSYRFPARISREQLLRQEGLAKPIRDTAWKAQERLCRRYRKLSRAGKSPTVVTTAIARELAAFAWAIAKHVQTANP

SEQ ID NO: 124047 - protein, 327 aa, unidentified
MERICVGIDVSKRELVIRVDPTGEHWVSATTPAAVAAAVARIGALRPHVIVVEATGGYERAVVAGLTAAELPVAVINPRQARAFAQALGRTAKTDAIDAALLAALGARLDVTPRRVNDAATVALAALVARRRQLLEMIGMERNRLEHAAPTGKLTRELRNHIRWLERRVSGVDNEIGTMIQAHPRWRAQEDLLRSVPGIGPTTARTLLAELPELGTLGRRAVSALGGLAPFNCDSGQHRGERHIWGGRAAVRAVLYMATLTATRHNPVLGAFYRRLRDRGKPPKVALVATMRKLLTIVNAMLKHQTRWLQVASTPASPSGRARAATV

SEQ ID NO: 124048 - protein, 315 aa, unidentified
MTPEVFIGIDVARDSLEIAVRPSGEQWTVANTTVGITSLLARARALKPTLIVLEATGGLELPVLGTLGSAGLPVVAINPRQAREFAKASGKLAKTDAIDAQVLAHFADALRPAVRPLPDAATQALGALVTRRRQLVEMLTAEQNRHTSAPLAIRADIQETIVFLRKRLRGIDTELSQAIRSSPLWREQEDLLRSVPSVGPVVSVTLLADLPELGKLGRKQIGALVGLAPLNRDSGTLRGKRTVWGGRATVRAALYMAALVGTRHNPVLRDLYTRLLASGKTKKVALTACMHKLLTILNALLKHGTRWTLSPSVLA

SEQ ID NO: 124049 - protein, 393 aa, unidentified
MICVGIDVAKDKHDCFILSSEGEVLADAFTIRNNREGFETLLQRIQSCTRPTDNIKVGLEATGHYSDNILGFLHDKGLPTYVINPLYTNLYRKCHSLRKTKTDRIDARTIAAVLMSDVDLKSYTDTAYHNKELKSLTRYRFDKVQQRAKLKQSVSRLVTILFPELETLVPTLHMASVYALLSEFPSAQQIANAHLTHLNTMLYDSSKGHYGRDKAIEIREAARCSIGSMMPAKSLELRHTIRLIQELNKEIDEAEAAIEEIMNFIQSPITTIPGMGFRMGAMILAEVGDFANFDSPDKILAYAGLSPSIHESGKLKATGAYAHMEKRGSRYLRYALFNATKNVCIWDPAFADYLAKKQAEGKHYNVAISHAAKKLVRVIFAMQKTGQAYRAVA

SEQ ID NO: 124050 - protein, 321 aa, unidentified
MLAKRSRHSFIGIDVSKQLLEIGVHKSNYRLCCPNDPKKFPALIAELIALRPARIVLEATGGLETPLLQGLHAVGLPAVRINPRQVRDFAKALGLLAKTDRLDARVLAHFAAAVQPPLRPIKATEDIELDALMGRRNQLSDILGAEKNRRGSAATDAARADVEAHIEWLEQRLKALDKQLKDQLKCSAVWQQKDKILQSVKGIGFVTSVSLLADCPELGKLNRHQIAKLVGVAPLNRDSGKQRGARHIFAGRAQVRAKLYMATLTAIRCNPLIKAFYQRLLAKNKLKKVAIVACMRKLLTIINVMVRDNKLWNVKAQSVSA

SEQ ID NO: 124051 - protein, 425 aa, unidentified
MKKTDYLSTLFVGIDIGSRTNVVSAIDFNQDFFIRMKPVPNAKEGAETLESLLVDVLSAHHEFNHVIIGLESTGFYGVHIANYLSASGLLAPFGTEVYCLNPKEVAKYKESFNSLDKNDGIDSFVIADFARVGRISIKPWRGAQYLALQRLTRHRLHITECIAREKTYVLNNIFLKFSEFAMLKKEDHPFSNKYGATAEAILEQYVTNDDIIGASIEELVELIESKSRGRITDPEETAKILKAAANGSYRLDKVVAEPITLSISSSFNCIRAFEKELKAIEKAIEHTVQGLNPVEYQVLKSIPGIGHVYAAGILAEIGTIKAFTGNGALAKYCGIVWKENQSGNFRAEDTKMSKAGNRYLRYYVIEATESVINNCPEYKDFYDKKFAETTTHQHKRALALTSRKFLRMLFGLLDKSQLYSLERSR

SEQ ID NO: 124052 - protein, 365 aa, unidentified
MTEITRAPVARVGVDLSKRVYQVHAVDRRGGVVQAKAMTPQRFFAWCGELPAGCVVAMEACSGAHHVARRLRLVGLDARLIAAHFVTPYRMSGKGGKNDANDAAAICEAAGRPHMRFVPVKTVEQQGQLAVHRLREGYKEERTALINRIRGLLSEFGLVFPQGPEALRAVLADVIEDAGNELPGVARLALQRAHLHWIDIELQLAWCDQRIASHVREDARASKAATLLGIGPITASALVASVGEFAQFANARQFGAWLGLVPRQNSSGGKTSLGRITKRGDDYLRTLLIQGAKSAVMSAGKRSDRISQWLVQLKQRAGWQKAVVALANKNARILWAVLTRDVAFDADHVPQPPAARGGVKLQPAV

SEQ ID NO: 124053 - protein, 367 aa, unidentified
MKKVSTAVTKQSRNISQQKLTIGLDLGDRNSWYCVMDESGQIQLEQRVRTNGKALQEVFGAMPRSRIALEIGTHSPWISRLLSELGHQVIVANARKVRLIGESRKKDDRLDAQTLARLARIDPELLYPVKHRSAQAHADLMTIRARAGLVRARTALVNTARGLAKSYGERLRGCNVRNLDPEKAEGLSPELQRALEPLLATIEELSERIVEYNDRIEALAQTSYPQVELLKQIKGVGTLIALTFLLTLEDPHRFGKSRDVGGYLGLQPGRRNSGDSEPQLHISKEGDPYLRTLLVQGAQHILGPFGIDCDLRRWGLKLAERGGRNGKKRAIVATARKLAVLLHHLWVSGEVYEPLHNSEPTTVAAAA

SEQ ID NO: 124054 - protein, 343 aa, unidentified
MNKLNTIGVDLAKNIIQISVVSAGGRELQNRALTRTKFAEFLGKQKAALVAFEACATAHYWARVAQRHGHEVKIIPAKAVAPFRQGHKTDENDALAVAEAANRPHVKVAPLKSIEQQGLQSIQRSRELLVGDRTALSNHIRGLLMEFGIVIPQGFSALHSRLPEVLEEGDNELPDVYRPTLSLLYGRLCELRDDVKRLTMEIETLVKHNSSCQRLMALEGVGPIGSVLLYATLGTGEAFVNGRQFSAYLGLTPKQFSSGGKVSFVGISKRVANKRLRAVLIQGARAYVHKLKVPKSAKDRWLLALIERGGYGKAAVALANKNVRTAWALLTQGTEYQKYPAID

SEQ ID NO: 124055 - protein, 366 aa, unidentified
MTSVAPAAERIYLGMDVSRDTIAVGVLRPGQDVPAVEVISNDGEMVRRLIGKFADRSVLAACYEAGPGGYELYRLLTSTGVACDVVAPALIPKAAADRVKTDRRDCARLALSHRAGMLTAIRVPSEPEEAVRDLVRTRADLVDDRKRMMQRIGALLQRHGRVWRAPRWTYEHRAWIGRQSFTEPALEAALRTYLAALDARDAELAVLEAQLRGCWASLDPLASMVRRLGCYRGIAELTGLTLAAEVADFRRFPSAPAFMGFTGLTPSEYSSGARTRRGGITKAGPQLIRSALIEAGWAYRHRPAIGATLRRRQQDACPETLARSWKAQQRLHATYTKLTRRGKIPSVAVTATARELAGFVWAEMTS

SEQ ID NO: 124056 - protein, 345 aa, unidentified
MENMYYIGLDVHKKTISYCVKDGSGRIHAEGKIPATRFDLDLWMKTLPRPWTVAMEATIFTGWIYDHLRPHAGAVKVAHPLMLRAIAAAKKKNDRIDAKKIADVLRCDFLPECYMAPTAIRERRRTLRYRNLLVRQTVQLKNRISGLLMEAGVSYNKQKLHKVGYFRELLKTNPDIDESLRPLLQLCRETLVRLQKTESALIRSLARDRLLVERVEHLMTIPAVGPITALTWALEVGEVSRFSSIKKAISYCGLCGDEQSSGEHVKRTPISKQRNKHLQWVLVEAAHMAPRLSPELALLYDREKQKGNANRATLAVARKLVAYLVAIDRSQRDFLLVEKENQAAA

SEQ ID NO: 124057 - protein, 343 aa, unidentified
MEESQALVVGVDTHKDSHSAALVDELGSLVASTDVGANQRGYVQLLDWARSRSSHRTWVVEGTGSYGAGLAGFLAGCGEVVYEGDRPQRRKHGAGGKSDQLDAIKVAREALAREHHAVPRQRGNREAIRVLLSTREGVVTAYRQALNQLYALVVTAPEPIHERLIRLKGEQLVKACLRLRCTAGVIETSVTTRVLRRVAHRIRSLQVEAADYESQLEELVAETVPALLSEPGVGAITAAQLLVSWSHAGRIRNENAFAAMAGVAPVPASSGRVVRYRLNRQGDRRLNRALHVVAVCRSGFHTPTKNYIARRTAEGKSSREIRRCLKRYLARRFFRLLQGLDTP

SEQ ID NO: 124058 - protein, 401 aa, unidentified
MNLLILKGVPMSLKIVYKICCGIDVHKTFVVACIASTNDKGVTSYESHRFSTYTSGLKTLLQWLLKHNCKDVCMESTGKYWIPVYNILENDCSIVLAHPKYVKAIRGKKTDKKDAKWIADLFKHDLVAGSFMPPADIRQLRDLMRYRFKLTCFQSSEKNRLQNCLTVSNIQLGNVVSDTFGKSAQAILDKLLENPADTSFDLEPLVYKSLKKKLPQLRDAINGYITPEQVGKLKVIKAHYESLESRKAELEELIIALAAPYQQELAILQTAPGIRSLFTAIGIISEIGTNMEAFPSAKHLCSWAGLTPTNNESAGKKKSVRVSKAGCYIKPLPVQCANAVVTSKKHPEIRNRYLRLKKRRGHKKAIIAIARMLLTALYHMLKNGENYNAELYRKYDLPPTN

SEQ ID NO: 124059 - protein, 492 aa, unidentified
MAKRGEKRERRSMVLEPNAAGIDIGAEEIYVAVPPDRDEESTRRFSSFTGDLHALADWLGRCRIQTVAMESTGVYWIPLFQILEERGFKVYLVNAHYLKSVPGRKSDVSDCQWIQYLHSVGLLRASFRPPDAICALRTLWRHRGSLLEMAAEHILHMQKALCQMNVQLHHVLSDITGTSGQAILDAILAGKRDPVELAQLCHSRVKSPRDKVARALVGDYRQEHLFTLKQSLEGYRYYQKLILELDQETARLMQALPSATEHPIPPRTKATAYQRKANDPRFDLRSELYRIAGVDLTDIPGVSAATAQVILTEIGTDVSRFRNASAFASWLGLCPEKRVSGGKVLSCKTRQVKHRAATALRMGANSLCRAKGYFGEFFRRMRAKLGTAQAITATAHKIARILYHVLSTKEPYAETVFHRCDEQARQRAEIRLRKQAAHLGFHLLPIPITGELKLVPQEPVSGQLPVWRPSNNWVGSWTQRTTVGYRPGMYLS

SEQ ID NO: 124060 - protein, 345 aa, unidentified
MIIGCDFHPSWQQVDWLDTETGDYGERKLVHASGDAKQFYQQLAAPVLIGMEATGNSQWFVELVEDLGHEIWIGDAAQIRASYVRKQKTDKRDAAHILKLVVEGRFPKLWTPDREQRDQRQLVLHRHKLVEIRSRVKNELQHLSLNKGMQRKGKLWSQAGQKLLRELPLKPWAACRREDLLGLLSMLNQRIGQLDTAVQHAAEENPQARLLMTQPGVGPNTALAYVLTLGDVSRFPRGKQVASYLGLIPREHSSGGRQKLGVITKQGNRMLRSLLVEAAQIAVRFDPGMKKQYLHRCHQKPKGVAKVAAARKLAVRLFWMLRTQVAYPEIVRIESSPRVPLVGAS

SEQ ID NO: 124061 - protein, 335 aa, unidentified
MKKFKIIIGIDISKNKLDVCVIENLNSKQHNYFIVSNDKKGISSILKQVQKCMVKNDEVLVCFETTGVYAMPLCYELQNMNINYAMVPAIEIKRAKGLVRGKSDKADASDIAHYAITHEHKLKCTVLPEVDLMKLKLLLAEREKLVKTITLFDSTKENDGFMDKDICKEVLKHNKKTITILKKQLVEIENIILTIIKNNEQIKAQYTLAQSVPGVGPQTAINLIVNTRCFVAFDNWRKFACYAGVAPFEYKSGTSIRGKTRVSHLANKKMKSLLNMAALSAKRHDKQLKDYYERKIKEGKNGMLVMNAIRCKIISRVFAAIKRETPYVDFLKYSA

SEQ ID NO: 124062 - protein, 469 aa, unidentified
MKRKSRRAKGQKVFPLSGDLKLIEPDAAAVDVGSRSHWVAVNPERDPNPVREFGTFSADLMSLADWFAHCEVKSVVMEATGVYWVNLYDLLEERGFKVYVVDAHTVRHLPGRSKSDVKDCQWLRRLHSYGLLRSSFRPPAQIRQLRNYHRSRSNIVDAAAQQQLRMQKALTLMNIHLHHVISDISGLTGLSIVRAIVGGERDPKQLARLRDPRIRASKETIQKSLEGNWQEELLFDLKIALESYDHFQGQISAYDEQIRQALKEVPSKVDLLQEALPPGRLRVCRKRPGMSHQDQINLREELYRISGVDLTRIDGISLQTAQKVFFEIGTDVGAWDEEKRFTSWLGLSPNHCISGGKVLKRSSRKVVNPLSVALRLAARTLNNSHSALGANFRRLTAKIGMPKAITAMARKLAVLVYRMLKYGTQYVDKGMQHYESKYQATKVHYLRAQAAKLGMILLPKQPAGAGAAA

SEQ ID NO: 124063 - protein, 342 aa, unidentified
MQKIATIGLDLAKNVFQVHAATADGSTVFNRKLRRSEVLAFFAKVPSCLVGMEACSSAHYWARETRALGHDVRLMPPAYVKAFVKRGKTDAGDAEAISEAVTRKTMRFVSVKSAEQQAAAVLVKSRTLLVRQRTQAINALRSHLAEFGIIAGAGVTKVAELIAVVRDASEQRLPLVARKALQEIARQVESLAVQIKRLDRQIVVLSRQDADTRRLTTIPGVGAIIAASVKAFVPDPAGFRSGRHFAAWLGLTPRPHSSGGKERLGRISKMGNPLLRSLLVVGATSVLRVARNNPQASPWIAGLLARRPSRVATVALANKMARIIWALLVRGSVYRAPSIAQA

SEQ ID NO: 124064 - protein, 340 aa, unidentified
MINNFLGIDISKERFDVFLSFISKKGKREARKRSFKNDDNGFQGLLSFLQKHNVEQVKACMEATGCYSGALAEFLHNAGHFVSVINPYCIKSYARSKLVRQKNDQTDAEIIADYCQRQEPSRWTPPSSELKKLKHLYRCSAALKDELTLVNNHLEKKERLPKEVVNAWEDLAMNIEQRIETIKNSVRELLKQHKELLENFQLLLTIPGIGEESAIAILAEVPDIKAFRDARQLAAYAGVIPQNITSGSSVHAKPRLSKIGSRTLCKALFFPAIVAKNHNPIIMSFCQRLKEKGKHNMAIVGAAMRKLLHIIFGILRSKSAFNPDHIKNYRARRLTEVLVI

SEQ ID NO: 124065 - protein, 470 aa, unidentified
MAAVMIGVDPHKASHTAVAISVAEEPLGELRVRACAAQAERLLAWAAAWPQRIWAVEGAGGLGHLLAQQLLAAGERVLDVPPKLGARVRLLAAGDTNKNDPNDARSVAVAALRSAGVREVRPDDHAAVLKIWSKRYRDLGRTRTQVVCRLHAVLCDLVPGGVSRPIYAARAARILEQITPPDAVAAARCELAAAFLEDLRRIDAQIRETRKKLAAVVAATGTSLTGLFGVGPVIAAAVIGDVRDVSRFPGRNHFAAYDGTAPIEVSSGPRKIYRLSRRGNRRLNHAIHMAAVTQVSHRHSDGRACYDKKLAEGKTRKEALRSLKRQVSNAIFACLQAGARRAAAHAKGPGGQQGNDSAACAAGSHPRHRLFGQATPGPGAHPTTPAASPAPGPASARGRAGHSSIAATLPSATPQVQVERPQRSEDERPGGAARQRPYSAARKALGQKFPLKAQRPKGTSHAAKRTDGTP

SEQ ID NO: 124066 - protein, 338 aa, unidentified
MKNYIGMDLHSKSCTLVVMTKDGEITKESQIPTSELNLTNFLAEVDGPKALMFEETGLAQWAWDVTKDKVNRLVVCNPTYLPKKSGPKNDYRDALHLCTQLRAGNFTEVHHEKSLLMDLRTVMRHYSNLVIRLVILKNSFKAVLRNEGVSTQSKWVTSRNKEKCLEIKNPLKRKVAEALFEEMNSLEMMKQKLESEFKQNYFSVPIVKNLMTIPGIGPVRAHVIAAFICSPHRFENKHKLWAYAKLVNHADESDGKLISNRSPHGRSELKEAFVGAAVRVIAYSGESALKNYYNDLIDNKKLDARKARNALARKIAAICLGIMKSGDNFNESMISLKK

SEQ ID NO: 124067 - protein, 346 aa, unidentified
MDKDIILAVDYHDENLEIRRFNMATGEERCENRPTTRGGILEVVDCAVAEAAAAGGQVVWIMESTSGWARVKDLIGSRAQMVLTNVLQMPLPPKAYRRKTDKIDTGRLLREYLNGKLPQAFQPSVWLRRVRRLAGTRESLVRRQTALRNWLTRYLSHETWEDRRGLWSERGLSRLRRLAEVSAGPDRLVLTVKLAELEDQEPLLKTVEKEMIAVYQQWPEAQAVDAIRGIGVISAVSILAHIGPVGRFRKPEALVAFAGLSPGVRESDGTRRSGHIGGGGTDTFLRHYLIEASVWARQIPRYRKTYERVESKRGKKIARIVVARLMLRSIYKMLRYGVSFNQAPAA

SEQ ID NO: 124068 - protein, 317 aa, unidentified
MNAQNDRENYVGIDVSKAQLDIAIGQEGEIWQAANTATGICATILRLQEHLPSLIVVESTGGLEKPLIRALQKAALPVALVHPGRVRKFAAGIGWIAKTDRLDARLLAWYAFAAQPKPRPKPNPACEVLSELIRRRSQVIEMLTAERNRRSTCPITLSDALEEHIAWLTAERDRLTTQIETMLATQPEFRDKDAVLQSAKGVGPIFSATLQADLPELGIYSHKQISALVGVAPFNRDSGGFRGKRRIKGGRSGVRSTLYLATLSAIRYNPVIRAHYQQLVARGKFGKVAVVACMRKFLVILNAMVRDMRTWQPQTLT

SEQ ID NO: 124069 - protein, 342 aa, unidentified
MNATTIGLDIAKMVFQVHGVDRAGKTVLRKRLNRPQVLAFFANLPPAVIGLEACAGAHYWARELQQMGHDARLIAPQFVKPYVKGNKNDANDAEAICEAVSRPSMRFVPLKSPEQQDIQMLHRVRQNLVKQRTAAANQTRGLLGEYGLVVAQGLGQLRRRLPEILEDAENGLSPLARRVFADSYDRLVDLDRQIKAYQNQIETLCQQSPACQKLLAIPGIGPITATALVAALGDGQAFENGRQVAAWMGIVPRQDSSGGKARLLGISKRGDTYLRTLLIHGARAVVRTAGRKDDAQSRWINALVQRRNANIAAVAVANKTARTIWAMLTRGEDYRAPLAQVA

SEQ ID NO: 124070 - protein, 418 aa, unidentified
MKSMEITAVGIDVSKRKSTVAIRRPGGVIVACPFDISHSSHDLEKLVSILKTTGGDIRVVMEHTSNYWKPIALTLKNAGFYVSVVNAMLIHDFSDNSIRKLKTDRADSLKIANYALTFWNQLPPFNDEDETRLVLKEQSRMYERLASTATSLRNGLIALADQTFPSIDQAFGHAIKNADGHEKWVDFFSIYWHRDCVLRLSIEKFTESYRKWCLRRNYKFRTNTAHKLYALAQDAVPTLPKNNGTKALVLQACKSLNAVCEAKQSTQEEMNRLASLLPEYEVVMQMEGTGPITGPALMAEIGDVRRFKNKKALVAFAGIDAPPFQSGNFESKSRHVSKRGSPHLRRTVFFVANIILTLSHKDNSVFCFMDKKRAEGKHYYVYTIAGSAKFLRIYYARVSEYLRTQEPPAAAICLDCKD

SEQ ID NO: 124071 - protein, 419 aa, unidentified
MSQESNLVERVIGFDSHPDSFTAAVLRGPTPAQAITEKIFNKVPMSQLQSWARRQTTDQDLFVLEASGNSFEVVRALKRLARKAEVLESCQMGKLKEAHANNDKISAVRIAKAYLAGTAKKVWVPDAATQERRDWFHAHRKAVKRSTQMRNRLLSYLSDNGVRLIKGTELTGQAKAEKQLRQAKDWTSRQWQVIAGMLMELRHADQQRRHWRSLIAQEVISDPLLLSLVRLCGIRDLVAFALGAIIGDINRFAQPRKLVKYVGLNPALDQSGQGQWEGGIGGHGRKDLRALLIESAQAILRSKDPVAKWGKKLLARKGSVSLAVAAMARKLTVAIWYLMMGRWTALEEFDPRLSRKAGKIISAVGTSALKTIGKTRKQLRQQIEQSLKTGRIYVLDLDKKFVPQKASQKQSLAADYGMV

SEQ ID NO: 124072 - protein, 473 aa, unidentified
MDLTPTKTRKEQKMTLLGRLGSGLPTRYYLGVDVGYKEHVAVVISLNTFVRGDDRWKRARCVHFPSTQAGLHKLQRYLERFSTDSSQFLGLCEPTGGYYGATVFQSLLDQGYDMNLIENATVSRMRKQLFPGLPKTDEMDGRVMARIGYLHEAVGEEFTLRPLKLPDPDDTHLLALCRDSWKISTIITRARNQFTQLMAVTFPELKMFFTGSVSSVAPVNLMAAYPTPALLAEAPEDEVREVLWKAGAYHHAKRAAELCALARDSSGLLPDPGRAWQQEWLTNFILTNFEYQAALDRRIKQLLEQRDDYRLIVTVPYSGPNTLGVILAVTRDVGNYSNYRKYVAYTGYFAGLRKSQTIDRTKMSNRGNRNLKRAYFQIAAPLVWFDKGENPYKELYQRKMAEGKEWYKAMPFVCAALARHIYHCLKFNDPYDVEKAFRGTSPQLASEEEWLDLGANLEEKFEVMEAHLCQIEG

SEQ ID NO: 124073 - protein, 343 aa, unidentified
MYFIGLDVHKKTISYCVKDAAGRVHQEGKIGSTRRELDGWIRTMPQPRTIAMEATIFTGWIYDHLLPHAERLKVAHPLMLRAIAASKKKNDRIDAGKIADCVRCDFLPECHMASTEIRDRRRTLRYRNLVIKQMVQMKNRVSGLLMETGVSYNKQRLHKVGYFAELMTTNKEVHESIRPLLKLSRDMISRSQKLDYALVSSLQRDPVLKERLRRLRTVPGVGPITALTWALEIGDYTRFPSIRQAISYCGLCGDEKSSAEKVMRMPISKQRNKHIQRVLIEAAKLAPSESPELALTHARELEKGNRNRATLAVARKMVCYMLAVERRQQDFVPAEEFSRTMAV

SEQ ID NO: 124074 - protein, 445 aa, unidentified
MFIQSQDDSQCCYSLFIKVVILMMKLKYSICCGLDVHKNVIVATIVTTNKDGISEYLQKSFSTINSDIQRFHNWLIENNCYHVCMESTGKYWIPIFNYLESDIDVCLTHPKYVKAIKGKKTDKKDSKWIADLYKFDLVRCSFIPPKDFRQLRELSRYRFKLVCMKSSEKNRIQNCMTISNVGIASVLSDPFGKTATEIISYLLEHTADSMDEKAVRKLIKKGAKSKSDEIIEAIKGYTIETDQAKKLELARGHLEYLDDMITQTEVELYVRIKPYYEFVEFVSTMPGMTELSSTIVLAETGVDMDIFDDAKHLCSWCGLSPANNESAGKKKSVRIAKAGDYLKPMMVQCALAAIKSKKQPYFAIKYGRIKKRRGHKKAIIAIARMMMVCIYHMVSEKKPFTPTDYEELMDPQNHVESVVLNENNVFAYLESLGYDSSKLVKRNDN

SEQ ID NO: 124075 - protein, 386 aa, unidentified
MQSFDANKSLVVLDQDSTLVAVIELSLSGWLVAGLVPGLKRQPRKQFDPDPDALFALLQRWQSEAIKAGRTIARVALAYEAGRDGFWLARWLKARAVEAYVIHPSSIPVPREHRRRKTDRLDTELLMRAFLGWLRGEVKHCTMAAIATLEEEDAKRPNREHQTLTGERTRLINRLKSCLIRLGIRNFKPTLGKAAERLAELRTPEGVPLPDNTLAELYRDMARLDLVKEQIKAIERQRLQRIAKAPNHRPNVMVRLIAQVIGIGIETADMLVSELLSRNLRDRRAVARYGGLTGSPDESGSRRREKGLPRAGNARVRRGMIEFAWRFLKFQKDSPLAAWYRNQTASGRKDVRKRTIAALARKLLIALWRLATQGVVPAGIALRKAG

SEQ ID NO: 124076 - protein, 423 aa, unidentified
MQMMIKRSAGLDVHQAMVVACVLICEGRKRPHREIRSFATTSRALEDLREWLQAERVTHVGMESTGVYWLPVYAVLEGHFELIVGNARHINNVPGRKTDVKDAEWIAELVCCGLIRPSFVPAKPLRDLRELLRYRRKLVESQAAERNRLLRLPETANIKLASVLSDVLGVSGRAMLRALIDGTASAAEMAELARRRLRRKRAELALALDGRMGEEQRFLLAVQLRRVEAIEQDIEHLEQRIAERLAPYDSEVARLMQIPGVDWVVAATLIAEIGTDMSVFLSAHHLAAWAGVCPGNHETGGQRKNVRARKGNTHLRTALVGAAIAAARTKGSYLKDKFYRLKARRGAMRAALAIAHKILIAAYHMLARGVGYRELGEAYLDQIDHPNCCPPQAQAGAPRLCRLPATQGACCCLTSYTPSALFS

SEQ ID NO: 124077 - protein, 415 aa, unidentified
MDVLYPRCAGLDVHKDSVVAGVRVATGGPATTEVRTFDATTPGLLALSAWLAELGCTHVAMEATGVYWKPVWHILSDGDITLILANAAHVRNVPGRKTDVADAVWLADLLAHGLIRPSFVPEAPTQEMRALLRTRKQLVREQASHVQRLQKTLEDANLKLGSVLTQIMGVSGRAILQALIDGERDPDKLLTLVQRGVKAPPEKLRAALQGRVTEAHRFLLRLHLRQVDALDAAITEIDAEVDRDLDPFRDAVRLLRSIPGVSDLTAQVIVSEIGIDMSRFPTAGHLISWAGLCPRNDESAGKRRSTRLRKGAPWLKTTLVQCAWAASHKKASYLQAQFRRLQHRRGPKKAVCAVAASILTAAYHMLRDGTFYQDLSASHFNRASPEQQVSRYVRQIAKLGFTCVLTPTTGSEVSV

SEQ ID NO: 124078 - protein, 340 aa, unidentified
MEKRHIGIDLHRNRFTCCIRLENERTYVTEWELEDLGKFVKRLRPTDEIAVEITGNTRLFHDAVAQHVARAVVVNTNQFKVIRQSVKKTDPNDARTLALYLSKNMLPEVRMKDKEHAQLASLTQTRDTLVKLRTALKNKINNILSARGLNLPKEALSSEKRLNEVVSLPFDEIVQIELRVIVEQIRSLNKSIADLEKTIGDAGSKLEGHKGLSSIKGIGKITGAILLSVIGDVNDFADEAHLASYFGIVPRVSNSNASEHSGRIHKRGSKLGRTALVQSALIAANYSPYLKRFYEQVKARRGAGKAIIALAKKFLGIIYRTLKNQWVFEDFPNFVLAEAS

SEQ ID NO: 124079 - protein, 410 aa, unidentified
MEPGKTIIAGVDTHKDRHVLCLLDGIGRKVFSASYPADKCGYVQLAEAIGNPSCCLVVGVEGTASFGAGLSTHLISMGYPVVEVLRPKRDKRRKGKGKNDEIDAEIAARNAASENGTSVPKSRDGWVEGVRTLMIARDLEIQTSTKVMNAVKSLLVTAPESFRAKYREYNGSCLMERLSRGRTGSGDVSSGALTTALKSLARTWLELERRSLDLRKLVEGLLLENAPALLEVPGCGAINAADLAIAAGDNPERLGSESAFAALCGASPIEASSGKVTRHRLNRGGNRSANRALHMIVVNRMRHDERTVAYIKRRTSEGKTKREAMRCLKRYVAREIYSVLLDPTATVYPRGSELAVRRSVLGMSQKRIAERLGVPNARISEIEGEKRLHPEIRAEYDRLLNILLENQIQA

SEQ ID NO: 124080 - protein, 400 aa, unidentified
MISVGIDVSKGKSTVCLLKPYGEIVCKPFEVQHTEKDLEDLANLLQKLDGEIKIVMEATGIYHLPILTFLLEKGFFVSVINPLMMKRFSRDNSLRGAKNDRLDSVMIANYGIEKWYKLKKYEVNDRIYAELRLLGRQYYRFMQTHVKHVQELTHLLDYTAPGLKAMFNSWNEHSNRDKLSDFVERFWHFDLITSLSREEFVEQYLLWAKEKKYHQSRSKAEKVYDLASNGIPTLSSHTPSTQMMIQGAINVLRIVNNSLYYILSRMKELAKSLPEYATVRSMGGVGDSLAPRLIAEIGNVKRLRNGHALVALAGIDPPPYESGQFVGTHRRISKRGSPILRKIGFEVMRVLKSHKEPEDNAVYNYILKKEAEGKNKKLSKIAGLNKFLRIYYVRVMEVYQ

SEQ ID NO: 124081 - protein, 339 aa, unidentified
MSIVMGLDQHRAQITAEWLDTVTGEVSRGRIVPADRSGVRKFLARFEGSELEVALEATTGWRFVVEELRRVGARVHLAEAAETSALRGNKQRAKNDRADSRHLRELLMAGRLPECWIAPDHLLDLRARVRLRHTLVDERGEWQQRMQAVLYHHGLPKRAGLLTRENRAWVEQLALPAAGREQITVGLGMIDAVEARITPLDKELRAYARRQAGCRALQAAHYGIGALTSVVILAELGDCTRFSSSREAVRYGGMDITVHASDKRRAPGHLSRQGPPALRWALYEAAQAARRKTSPDYAYYRQTAERLGGNRACLALARKLLKRSYHTLRELGDQALAPA

SEQ ID NO: 124082 - protein, 397 aa, unidentified
MYIVGIDIAKRKHEAAVIDGEGAVIIKPFSFTNNCSGYNRLLAMLTKAKLPLDEVSFAMEATGHYWLALFTRLQKEGFRVQVINPVQTNSIRSFYIRQAKTDPRDALLIAEVIRFGHFSESTLHPENIYELRELCRGRHAIVSMQADVKRKVIALLDQVFPEYETAFTNMFSDTSMAILQTCPTPKELSEMPLEELCHLIEVSSHKRFRMAKAQELQALARGSFGFAMAGDVFSTMIRLYAKHLDFLKQQVREMDRKIAEIMETLDTPITTITGIGPTLGAYILSEIGDINRFSSAAKLAAYAGIDPTMRQSGEYNGVRNRMSKRGSPYLRHAIWLAASSAVLHDPALKLYFQKKRDEGKPYMASVGHACRKMVSIIYAVMRDNKAYTPCIPNEISA

SEQ ID NO: 124083 - protein, 415 aa, unidentified
MKVVFPTCCGVDVHKRFLIATIITSPADSLQPHYQKKRFSTFNSDLNRFADWLHENACLDVCMESTGKYWVPVFNILEMRGIRVVIANPKWVKAVKGNKDDTKDSKWIGDLFRIGLVKSSFIPDKNIRILREFTRYRYKLTSMRSSEKNRYQNAFTVCNVALDSVVSDMFGKSATAITDYLASNETFDAEHCISLLQRSLKKKADAILESIKGFSITDEQKLRISIIREHLDHIIGLIEKMNSCINTLVSEYEGQINLLCTIPGVRRDTAITIISEIGVDMSQFGSSKRLCCWAGLTPGNNESAGKKKSVRISRAGVYLKPALVEVAHAAVKDKASPYYALKYERIAKRRGKKRAIIAIARMILTAIFEMFSTGEIWNPVDLYKVDMPEHLKEKQLAKAVKQAIRFLEAQGVIVS

SEQ ID NO: 124084 - protein, 356 aa, unidentified
MSKGITADGSLTIGLDLGGEYSEACVLEGSGEVLEGFRVRTSQVALDRALARFATARVVLEVGTHSPWVSRLLARQGHEVIVANPRRVRLIAENDSKGDSFDAELLARLGRVDPALLSPIVHRGEEAQRHLVLLRARDGLVRARTQLINQVRGFAKSLGSRLPSSSSEAFPKRVRSAVSEDLFPGLGTMVGMIEQLTDEIRRMDREVERLCAEQYPETEVLRQVKGVGPITALCFMLTLEDPSRFRRSRSVGPYLGLRPRKRDSGEQRPQLRITKAGDESLRRLLVSASHYILGPFGPDTELRRFGLRLAERGGKAAKKRAAVAVARRLAVLLHRLWVTGEEYQPLGYDKTMAKAA

SEQ ID NO: 124085 - protein, 445 aa, unidentified
MFIQSQDDSQCCYSLFIKVVILMMKLKYSICCGLDVHKNVIVATIVTTNKDGISEYKQKSFSTINSDIQKFHNWLIENNCYHVCMESTGKYWIPIFNYLENDIDVCLTHPKYVKAIKGKKTDKKDSKWIADLYKFDLVRCSFIPPKDFRQLRELSRYRFKLVCMKSSEKNRIQNCMTVSNVGIASVLSDPFGKTATEIISYLLEHTADSMDEKAVRKLIKKGAKSKSDEIIEAIKGYTIETDQAKKLELARGHLEYLDDMITQTEVELYVRIKPYYEFVEFVSTMPGMTELSSTIVLAETGVDMDIFDDAKHLCSWCGLSPANNESAGKKKSVRIAKAGDYLKPMMVQCALAAIKSKKQPYFAIKYGRIKKRRGHKKAIIAIARMMMVCIYHMVSEKKPFAPTDYEELMNPQNHVERVVLNENNVFAYLESLGYDSSKLVKRNDN

SEQ ID NO: 124086 - protein, 315 aa, unidentified
MTTTIGVGIDVSKDKLDVALHTGEVLGTIAQDAEAMEQLATTLKSIAPHRVVVEATGGYERPLLAVLHAEGLPVVLIEPARARYFARSRGRRAKTDAIDAHLLAVMAAGEVDDEELWTPKEPALAELTEMVIRRQQIVQQIGDEQRRQKQLPEGHAKRSVRRTLDFLSGEKKRLEKDINEQIKGHEDLKQTSAVLESVKGVGRTTAAVMMSLMPELGDLDRRSVAALFGVAPYTCESGQFRGAQRVQGGRRRPRQLLYMATVVAIRHNAVIRAHYAHLLAKGKKKKVAIVACMRKMAIHLNSLMRQHRQRLEQAA

SEQ ID NO: 124087 - protein, 308 aa, unidentified
MWLKDAVVVACAEPRFPVQSVPNQRAPLRAWLKSLPAGSRIGLESTGDYHELLADLAQTQGHTVFLLNPLDTRHYAKAMGNRAKTDRVDAELIARLIAQEHTRLRAYRPPTANQRKLDRLIRRRATIVRIKGTLKLTMRNLGGFATELKAVMSKLDALIAKIDATMSALAACSPQHQEAQQRVETIVGVGPLVGISLTNTLERVPFRKADAFVAFTGLDPRANDSGHKAGRRRLSKRGPAELRRLLFNAAMSAIKTKVWKPIYEHYRTQGWSTTASLVIIARKIARAAWSIHHYHTTFNPERITKCLT

SEQ ID NO: 124088 - protein, 351 aa, unidentified
MNNAAARKKKQITIGLDLGDRRHTYCVLDEAGKMTREGSLGNTREELAAMARSYPGATLVMEAGTHSPWVSRFLQELGLRVIVANPRKTRAIYENERKSDRRNAMMLARLARMDPTLLHPIEHGSQEAQEDMLQLKLRDSLVRARVALINAVRFSLKSLGYPVSNPSSARFHKQVLNEVPDSIGGMIAHNVAAIAELIERIKALDTSISCLAAERYPQTMYLQQVSGVGPITSLYFVLKVGNPGRFQRARDIGAFLGLCPKRDQSGEIDKELRISKCGDRYLRRLLVSAAQYILGPFGADSALREHGLRLAQEGTAKAKKRSVVAVARKLAVLLLTLWKSREPYESFHTTA

SEQ ID NO: 124089 - protein, 368 aa, unidentified
MPRYYVGLDVHSKNSVFAIQDEAGRTLSQGSVSTTPEGLLGLRNRYALPPGTPVGLETGTVAFYVARILSRMELAPIVIDAHEVRLKAHRPLQKSDRRDALEICEGLRRNSYRSIVHVPPESITTLRDSLSRRRHFVRLQTSEVNAVKRLLRAAGWERSSRPSLRTEAGWDRLLAALTIDPTLRAYVEQHRAVWSCARQQITALETLLAVQQQEFAAEVERLQTVPGVGPIVALTAIAVWSEVQRFPTAKHAASYIGLVPSTDQSGDRDAHGRITRHGSNELRAMLCEAAHHASRPTHPLHPYFVSLAVRRGYKMAVVSVAHRLARILWSMLRHGSNFDVSKLGVEVGPFEKTSVRLYRLKRAAVVPA

SEQ ID NO: 124090 - protein, 409 aa, unidentified
MLFIGDDWAEAHHDLEIEDDTGRLLARKRLPEGLAGISGLHELVAEHLDPTGEPDQVLVGIETERGPWVQALLAAGYVVFAINPLQVARYRERHSPSGAKSDPADAHLLAEIIRLDRAHHRRIAGDSEIAEQVKVATRAHQTMIWSRVRQVNALRSLLREYYPAALTAFGTDLAGRDALAVLTAAPTPDQGRRLTQARLETLLRQAGRQRNLAATATRIRAALASDQLTARPGVVPAYAASASALLAVLTVMVSQTEVLAGQVEQGFGQHPDVEIYRSQPGLGVILGARVLAEFGDDPNRYADAKHRKNYSGMSPITKASGTKRVVLARYARNRRLGDALFLQAFAALNASPGAREFYDRQRARGATHYQALRTLANRLVGILHGCIRTQSCYDEHQAWHTEQEQPTAA

SEQ ID NO: 124091 - protein, 341 aa, unidentified
MNGGKNVVGIDIAKRVFQLHWIDRETGEIVSLQLKRKKFLEHFANRQSCLIGKEACGGAQPWARKLTAMGRPVKLLPGKAVKPFVTGNKNDRQDARAIWTAVQERDVKAVAIKTEEQQAILALHRMRSQSVKFRTAQINGLRGLLTEYGEVMPQGKAGVRKDLAEALSRLADRLPAMVIGTLREQWARIKKLDGEIAAIKQRIQLWLKQDDACKRIAEIPGVGPLTATAAEAVLGDAGAFKSGREFAAFAVLAPRQIGTGGRIKLLGISKRGDTCLRTPLIHGARSVLTHAKDPGPWVTELRQRRLLNVAVVALANKMARTIWAMLAHERTHQKEFVSQPV

SEQ ID NO: 124092 - protein, 406 aa, unidentified
MQVYLGIDCSQHSYEASFVNQAGAVLARLAIPSSPEGFLHLDAARDKLGIPPSDCLVALESAHNLLVDFLWDHGYSQVYVIAPHVIKSCRDRYRHSGARTDPSDAYVLADVLRTDRHRFYPWYPDQPSTRQIRAMNSLIGHLGRTIVRHSNRLRAVLARYYPGLLQAFRDIHGPVALHFIQAYPTPQATAQLTWEQFQLFARQHRYTHRGRVSRCFSRLRTPQPEAAPPIVEAYQQEAVLLAGLLLSLVEKRRALIRQMDLLFERHPDHTIFASLPGAGPQLAPALLAKFGDDRSRFPTPATIQALAGSCPVTDSSGKRRTIRFRRACDREFRHIAQQWARCSLQRSLWAQAYWSQVRPRCSSDSHALRCLANRWLAVAWSLWQKHQPYDEAYHLHQRALKSRLPA

SEQ ID NO: 124093 - protein, 456 aa, unidentified
MAARNARVSRVRRKPGQSRAALTITHPNAAGIDIGSASHFVAVPPDRDDEPVREFPSFTVDLNALADWLRACGVDTIAMESTGVYWIPLFELLESRGFTVLLVNARHVKNVSGRKSDVLDCQWLQQLMTYGLLSGAFRPTEQVCVLRALWRQRGMLLKSQARHVQHMQKARTQMNVQLANVISDVVGETGQKMLRAIVAGERDGQVLGAMKNVRIHASVDEIAKSLQGNWRAEHLFALKQALDAFDFIGTQLAECDLEVEQQLQSLQAHAGEPAKGKKRGRARNAPKFDLRTQLFKMCGVDLTRIDGIDVTTALAVVSETGADMSRFPTVGHFASWMGVCPGTKITGGKVMSGKTKRCANRAAQALRLAAAALRTSQSALGAYFRRMCSRMDKPKAVTAAAHKLARLIYTMLTKGEEYTDQGQDYYEERYRERVLRQLSQRAQKLGMQLVAAEQPA

SEQ ID NO: 124094 - protein, 333 aa, unidentified
MYYVGIDVSKRSLDVCLLAEGSKGSRKTKTLSNGQDSAQILAKWLILHKCELSQTHIIMEATGIYHEYLACGLHQMGILTSVINPCRSREFAKAMGIFTKTDAVDAYILASYGCLKQPEAWMPPAEEVRKLRALLQHRDSLLNDKLRIDNRLNTLKSTEAVQEVMDSLSLVNQYLKSEVARIERLISSHIAQHPELKRDLKLLMSIDGTGKQIGWNMLAVLRGNHFKSAEQLAAYLGVVPVERRSGTSVHGRARLSKIGSSNIRAKLYMGALTAISKNSHIKALYERLLAKGKMKMSALGAAMRKLVHLCYGVLHTQQPYDEKYKAKIINFSS

SEQ ID NO: 124095 - protein, 448 aa, unidentified
MKRKQATPVPEEIPDAEYELVIERVAAIDVAKAFGKVCIRTPRQRRRVSKVWDVEATTGAVSELAGQLAELEVEKVTIESTSDYWRIWYYLLEAAGLDVQLVNARDVKNVPGRPKTDKLDAVWLAKLTEKGLLRSSFVPPAPIRQLRDYTRLRVDLTRERSRYWQRLEKLLEDALIKLSTVASTLDTLSARDMIEALIGGERDPRRLADLARGRMKTKRSALIKALDGRFDDHHGELARMLLDQIDTLTAQINTLTIRIDELLVAAEPAQNDGENPTDQTPVPGEEPSAVERLTEIPGIGSSGAQIILAEIGLDMTQFPTPAHLVSWAKLCPQTIQSGPVTRGGKTGKGNPYLKGALGEAAAAAAKTDTFLGERYRRIVKRRGKLKALVAVARSILVIIWELLSDPSARFHDLGADYHASQINTERRMRNHIAQLAAMGFRVILEPAA

SEQ ID NO: 124096 - protein, 403 aa, unidentified
MDRTAGIDLASEEHRLVVVEADGRRLEERRFVHDEEGVAALVRRLVALEVARIAIEQPNGLVVDRLLEAGITVVAVHPNQLAASRDRYRSGGGKSDGFDAYVLAELARTDMHRLRVLEPDSDQTRALRSLTRAREDLVEQRVALANQLRAQLEAFWPGAARIFSEVDSPIALAFLERYPSPSDAHTLGEKRLAAFLARNGYCGRRSAAQLLDRLRAAPQGRTGELESEARRQVVLALAAALRPLVEQIRLLTSEIRGLLDNHPDGAIFRSLFRDPKSVVTAAELLAEIGDRRDRHPASSSLEAIAGQAPVAVQSGKKKVACFRWACNKTLRSAVSVLADSSRKHNPWANDIYERARARGHDHPHALRILGRAWLRVIWRLWQDGVPYDPTRHGSLNRLLAAEG

SEQ ID NO: 124097 - protein, 400 aa, unidentified
MRSIGMDVHRSFAQVAVFDDGDITQSFRVDMEHDAVVAFGRSLKPEDEVVLEATGNTSAIVRLLTPFVNRVISANPLQVKAIAHARVKTDKVDAKILAQLHAADFLPEVWAADDETLHLRRLVSERDATVRSIRRVKSRVQAILHANLVPKFSGHLFGKGGRNWLSKVPLPRPERDLLGRHLGELDWLTIKLDDLEKVLIRMSPDDGRTRKLMSVAGISSVIATAVIASIGDISRFQSPEKLASYFGLTPRVRQSGERGAIHGRISKQGNATARNMLIEAAWGAASVPGPLRAFFLRIKDRKGANVAAVATARKIASLIWHLLTKDEPYQWARPAFVAMKMRKLELRAGAPKAHGKAGPGRDYWIKELRHRERELVANAEAAYAKMVEAWREKPPNPKET

SEQ ID NO: 124098 - protein, 329 aa, unidentified
MFYLGIDVSKAKLDCCLLLDNTSFKRKDKSIANNHKGFNELLAWIQKQSVALADVHIIMEATGVYHEQAAYALHDAGVKLSLANPAYVRHFANGLAIKTKNDGMDSFVLARYGLSTQPKLWNPAPVEARLLQALLSRREAVAQDLQRERNREEKAQVANVPDKIQQSIETSISFLEQQLKKLQDDIDDHIDKHPKLKQDVKLLESIPAVGERVGNTMLSVLHNHHFESAEQVAAYLGLVPVEYQSGTSVLKRPHLSKTGSASVRATLYMAAVVATKYNPHIKALYERLLAKGKCKMLAIGAAMRKLVHLCFGVWKNQTPYQKNFLPKSA

SEQ ID NO: 124099 - protein, 347 aa, unidentified
MEAVKQVLGVDVAKDELVVTLGRMLADFSIELYAHKVFKNKESGFVTLLEWLEKRTNEHTKVHVVMEATGIYHQKFAFYLYGKGYDLSIVLPNKISNYIRTLEVRTITDKTCSEAIARFGLERKLDPWKQPEKVYKSLQQLTRERDQIVDERSGVKNQLHAESHEAEPNERSLARLKARIQFLNGQEKDIKEDIDKILDNNEVVKKEVELITTIPGIGKLTAVIVLAETNGFELIRSKKQLASYAGLDVKEKQSGTSVKGKPRISKKGNRYLRKAMYLPALTAVKWDDTFRALYARIVAKQGIKMKGLVAVQRKLLETIYVIFKRKENYDKNYEENKQKNRAQIQIV

SEQ ID NO: 124100 - protein, 385 aa, unidentified
MAPIRMPEAVIGLDVGKSSHWACVATRDGEVLLSTPVANREDDLDSLFGRFPDALVVVDQSRNIGALALARARAAGMSAAYLPGLAAHGAARLFAGDAKTDERDAMVIAKTALGIPDALLPVGDPGPTVAAARALAAQRNFLTCENTRNKNRLRSILLESCPAFETLVDLSDGPQLRLMASLGGAWSVADAGPRRAAALTRGAARGKIEALVRSTTSSTRPDASVVAAEDRAVKLLARRISENSAEIEAITAEISALLEGDDTYRCLLTVPGIGPKTASELAISIDIEGFPSHDRLASYCGLAPRNRQSGTSISSVTASRQGNKRLKNLLIFSCNCLTRTEGRWGDYYTRCRERGMSHGKALKALARKRLKVIYAVMRDRVPYAA

SEQ ID NO: 124101 - protein, 455 aa, unidentified
MGKHDNSFKVIHPNAAGIDVGSRSHMVAVNQSREDVREFGIYTKDHEELITYLYAEGIMTIAMESTGSYWQTLFSSLQAAGFEVVLVPGSQTKNVNGRKTDVLDCMWIQKLHSLGLLSGSLLLTDTFQQLRTYYYHRSHLVEQSARYTSKMQKALRLMNIRLDVAINDITGQSGMAVIEAIISGVRDPESLSALVSSRVKKSREEITNSLHGWWRDELLFELGACLEFYRLYEHKIKECDQVIQELLIKFAPEREITEAEHKNLRANKKRRDKHAPSFDLSHLSFSYFNTDLFAINGISYNAVLCLLTNMGHDLHKFPSAKSFASWLGLVPNNKISGGRIISNRTASGKNYIAKALRHAANSIGNQKDHELTPFFKRIAFRKGRIAAIIATARKLAVIIWNMIIKQEPYKREMVEVTSARQKSLKIRQIEKKISALGLSKEELGQMFTKSSLSAI

SEQ ID NO: 124102 - protein, 348 aa, unidentified
MHKQIAVDLAKSVYQVAESVRAGQVSQRKRLNREAFRRYIQEQAEPVEWLMEACGTAHYWGRFAQALGHRVTLLHARYVRPYRRRNKTDRNDCDAILEAARCTGIQPVPVKTHEQQQLQQLHGLRETWKKSRTQRINLLRGIFREMGIEAPAATAAFLRAAHELVERPEVVALRGQLQIVLAEINLHEQCMAECEQQLQRWHADDAVVRKLDEVSGIGILTASALKTAVGQPERFTSGRQLSAWLGMTPREFSSGDRRKLGHISRQGNTYVRTLLIHGARAALLAAQRCQANAPERLTRLQRWAVETAARIGHNKAAVALANKLVRICWAVWCHERRFSGDWQSSKPA

SEQ ID NO: 124103 - protein, 446 aa, unidentified
MSRKKHTHLRGERGQAFADKIRGVPLEQILCVSLDIHKYFHVVMIHNALGEIVTMPFEIDIFQAGFNWLCRAIDEAVARTNAQIVLVGMEPTGHYFENLARHLHHDRRSPQPVTLINSFAVSRNREQQMMRREKDDEIDVAAIGDLLRRGEGTPFQPISGLYLEMQHLSRVRLSRVKIQTALKNQIIGHLDRIFPGLVIQGKVARERYEPLFVADFWSCRTLQHLIRVCPDPRQLTTLAPKDLRTAFHAQRFALGAKTAAKIITYAQKVLLPDPEVIAIRCELLAYDLALLAEVERRVAELEDRLRALLQQTPYWVWTQVRGLSVTQVASLAAAIGDPSHYTHAAQVFRRSGLVSGRNDSGTRRLKGKGKRVVKTGDVYLRRALMTAVMSLIRHQPVLQDYFNELHRTKHAGVARVATARRAIGIVWAMQRDQHSRTLVLKRGAEM

SEQ ID NO: 124104 - protein, 346 aa, unidentified
MKQISTIGLDLAKNVFQIHGADAEGSPILNRKLHRAEVLRFFEKLPPCLVGLEACGGSHYWAREIAALGHDVRLIPPIYVKPFVKRGKTDAADAEAISEAVTRKTMRFVPIKSADQQAAAMVLKTRALLVRQQTQAINALRGHLSELGVIAAIGTAKVAALIEIVRDEADACLPKAARFALAEIADQIEALTRQIGKLEREIVGEAKRDEDMQRLTTIPGVGAITAASVKALVPDPDGFKSGRHFAAWLGLTPKPHSSGGKERLRGISKMGNPTLRSLLVCGATSVLRRVKGNDKAPQHLIALLARRPFKVVAVALANKMARIIWALLTKGGTYRNTGAASSAASA

SEQ ID NO: 124105 - protein, 348 aa, unidentified
MSKRSHSFQSQLSDPMMASVFCGVDVSAATLAVAVQQDGQPLEQREFANTSSGHKALIACLHKRKARARVSLEATGIYSLDLALALDAADEIEVAVLNPKVVNRFAQTLRRSKTDTADAQVLAEYSRRMPFTAWRPPNRNGLALRTISRHLDGLTVEHTREHNRLHAAQGSTATPACVVQDLKRSLASLKRRIVKLRGAALELVRQDELLRSRFELMISVPGIAEISALQLLGELASLSGDMSVRQWVAHSGLDPVHGDSGTSVHRPSRISRAGSRHLRRALYMPALVAVQHDPHLKAFYELLQRRHKAKLQALVAVARKLLHAIYGIFRSQTPYDGNKLFPALSPAS

SEQ ID NO: 124106 - protein, 451 aa, unidentified
MTKKKMELDIINPNCAGIDIGSKSHFVAVGQALEDVREFGVYADDLTAICLHLKEYGITSVAMESTGNYWQNLYVELEKHDMEVTLCNGKFTKHAKGKKTAVKDCRWIQKLHALGLLTGSFLPDETTEQLRTYCRQRTNWIDLAAEASHKMQKYLRLLNFRLDVVVKDICGLTGLAIIADICKGNLDPEKLSMHRNGNCKKSQEEIAKALKGNNRTDFLFGLNQEYDSYLFFQKKIAACDTQINAFLKTQINSNPDKKKFKTDEKIHKRINKNSIKGIDLNQAAYQYFGGVDLMKIEGLSHSTILTIMSEVGPEGFTKFDSSKQFTSWLRLAPNNKISGGKILSNKIPKGSNRLKIALRHAANAIGNLKDTHLADFFKRVAYRKGRATAVSATARKLAVIIWNMISKGVQYKAPTEYLFLDQKRKNNVIQKIKKNIAKLEIKPEDLGFVTV

SEQ ID NO: 124107 - protein, 322 aa, unidentified
MSEPVLGIDIAKQKFDAALLIGGKLKHKSCKNSTEGFELLSQWLRKQGVARLHACLEATGSYGDELALYLHEAGHTVSIVNPARIKGFAQSELIRTKTDKIDSGIIARFCLAMKPQSWIPPSPELRALRALVRRAESLIDMLTQEKNRLGTAHESVIPLIKEHIDYLKKEIEEVRRQIADMIDRDPNLKRKKDLLASIPAIGKVTIASILAEVDDLGRFTHVRELVAFIGLAPKETRSGSSIKGKPRLCKTGHPRLRRALYMPALVSLQCNPLMIAFYRRLKEKGKNGKVIVCAIMRKLVHVIFGVLKSGKMYDPNYKPAFA

SEQ ID NO: 124108 - protein, 351 aa, unidentified
MPRTSTVHAVTAIGIDMGKNTLHMIGLDTRGAIVLREKVSRGRIALRLANLPPCLIGIEAGMATHYVARELAALGHDVKQVPPTYAKPFRQGQKNDFRDAHAVAEAVQRPTTRFVPAKTDEQLDLQALHRVRSRLVSERTAVINQIRGFLLERGIIVRQGLRFLRQMLPDILAKRTDVLSPRMIRIVADLASDWRQLDERIELVTDEIETLAKSDDSCRRVMTVPGIGPIISSAMVAAIGSGAAFAKGRDFSAWIGLVPKQLSTGDRTILGRITKRGNGYLRMLFIQAARVILLRPANWPKHGFGIWLARAAVRLHPNVLAAALANKLARIAWTVLAQERSYEARVTKVAA

SEQ ID NO: 124109 - protein, 308 aa, unidentified
MFIHPIYFGVDFAKEKFTYHGAERCGTLPNTPQGHRRFLALLPPGAHLVCESTGACHRALVAAAHAAGVALTVANPAQVRAFAQGLGRRAKTDPIDAGSLCDFGRLAQPAADLAPSTAQRALAELVVARQQAVLERSALLVQAAQQNLKLVRALTRARLKLLDAQIKKLEAAIARTLAEEEALAVPAARLEEVKGVGALSAATCLALCPELGALSRGQAAALLGVAPFNHDSGQLKGQRHIAGGRYRLRCAVYMAALSAVRANHILKPFYQRLRKAGKPAKVALTAVMRKLFILLNHLLKKPDFKLAT

SEQ ID NO: 124110 - protein, 345 aa, unidentified
MEFFAGIDLGKRKSHIRVIDSDRRVLEDLKIDNDPKTFARIFRKYGKDVIVGCEASSNAFWVWDTLSPIVRKCCVGHTSKIRWIAEARIKTDKIDAGILAELVRADLFPAICIPPKRVRELRELVRGLVRMRRQTTRFRNQVHGLLGRHGVAYQRADTDGKKLGELVRSATLASPARVAAETFLAVEETVKEQEKLLQAEIRKELRDEPEILEQVKLLESIPGVGFFSAALLVLELWDASRFEDGKHLASYIGFVPGTHQTGETMWHGRMTRTGNKLIRWLIVQDAWIASHTHWFFGRLFERHKKRKGGARAIVPVARALLNTILRVWSERKSYDELFKEKILVG

SEQ ID NO: 124111 - protein, 436 aa, unidentified
MPPVANLALWRCEVKPVYSEPFTAYVGMDWADTKHDICLQAAGDDRREFDCIPHQVPRIDEWVKSLYQRFGGPIAIALELAKGPIVYALQKYDFLVLFPINPSTLAKYRLAFKPSRAKDDPTDAEVALDLLMRHPERFAPLHPQSTAMRTLRSLTEQRRELVNDKTRLTNRLTNTLKQYYPQALEWFEQRDTILFCDFLVRWPTLIQAKRAHTASLKAFFHAHNGRRPLVIDARLAAIKAALPLTEDPGVIDPCRLYALVLVDQLRITLQAIDRFDHEIAALAPTLPDFSLFQALPGAGPSLAPRLLVAFGEDRQRFQGADELQKYAGIAPVTERSGKKSWVHWRWQCPLFLRQTFVEWAGQTINKSFWAGAYYRQQREKGSSYQAAVRALAFKWIRILFKCWKTRKPYDEATYLNALRKRGSPLLKNLMLDAKTA

SEQ ID NO: 124112 - protein, 335 aa, unidentified
MKKIYVGIDISKEKCNLCFRSGLEIVREEECSNDVKTLRKAFKSAMKAIGASLEEVLACAEYTGRYIYPLTVACQELEIFLWMDDPTRIKNSMGLTRGKNDVIDAARIAEYAYRYSDKAVRYCIPDAALVSMKNLLADREFLIIDRKRYQSQLTDQKKYMAPGDFKQKNSRWKKVIKSIDEQIAAIDAEIEALIAADPVLTRQKELLVSIDGIGDRIAINMIAITGGFTRFQNARQFCSFAGLTPYKYDSGTSVRSKAKISKRANQTMKALLHMSAVNVATRMKSGEYKDYYERKLKEGKHVMCILNVLRAKLVHRMFSVIKRDTEYTKEYKPAC

SEQ ID NO: 124113 - protein, 345 aa, unidentified
MPNLNHFRDFTYVVGIDIAKSVFQVHSCNTQTGEIQNVPIKRAKLLEHFVNRGKCLIGMEACGSSQYWAREFQKLGHTVRLMDPKRVKPNVRHNKSDRADAEGIYWALVNRVQAVAVRNNIEQDIHTLLTMRSRLMTLRTGNINHVRGLLAEYGQVMPKSPAQFLKHVSDSINNLEGEVDSLVIDMFRSLVEQIKAGEDKLRELDSEITKLAKQTKHAEHFLTVPGVGSLITANLCVLLANPSAFASGRQFAAFVGLVPMHTGSGGKTINTSIPYRCDKRLRALFVEGAQAVARSKHPADWVKNILARKPKKVALIAIANRMARQCWAVAHYEQPWRDTSIATAA

SEQ ID NO: 124114 - protein, 355 aa, unidentified
MNQEKYIGMDVHQATISVAVMDSSGKLIMECILETKAATILEFIAGLRGTLSVTFEEGTSAAWLHDLLKPHVSRVVVCDPRRNALLKDGSKSDRIDARKLAELLHANKLHAVYHGEHGVRTLKELGRSYLTITQDLTRVMSRIKALYRSWAIPCGGATVYAPRHRDEWLAKIPHPGVRLRAELLYQQLDVLQPVRQEARRDLLVESHKHHAVKLLRQIPSIGPIRAALLVALLQTPHRFRTKRQLWAYSGFAVEVHDSGEYRFVRGKLVRNRERITVRGLNHNHNHDLKNLFKGAALSASSRPGPLRDFYVALVEKGMRPTMARLTLARKMAAITLTIWKKGVDFDAKQLNRQAA

SEQ ID NO: 124115 - protein, 402 aa, unidentified
MNAVGIDVSKGKSMVAIMRPFGEIVSTPFEIKHTSSDINSLVKLIKSIEGESRIVMEHTRRYYEVLAHQLSEANLFVSAINPKLIKDFDNDSLRKVKTDKADSVKIARYALDKWQNLKQYSVMDELRNQLKTMNRQFGFYMKHKTAMKNNLIGILDQTYPGVNTYFDSPARSDGSQKWVDFASTYWHVDCVRKMSINAFIDHYENWCKRKKYNFSKSKAEEIYGKAKELVPVLPKDDITKLIIKQAVDQLNSASITVESLRTLMNETASKLPEYPVVMAMKGVGTSLGPQLMAEIGDVSRFTHKGAITAFAGVDPGVNESGSYEQKSVPTSKRGSSDLRKTLFQVMDVLIKTHPQDDPVYQFLDKKRAQKKPYYVYMTAGANKFLRIYYGRVKEYLASLPES

SEQ ID NO: 124116 - protein, 443 aa, unidentified
MEVMHRRVAGLDVHKETVVACVRVTAGRRPTRECRTFTTTTQGLLELLGWLTASRVTQVAMEATGVYWTPVWKILSEGDFTLIVANAAHIKQVPGRKTDMNDAMWIADLLACGLLKASFVPPEEIHELRSLMRTRKQLVREQTRHVQRIEKTLEEANINPGFNPGDLMGVSGRRMIEAMIPTGQARGLKAHGERDPHRLAALAERSVKASPRALHDALHGRLREHHRFLLQLHLRQWDALEAAIRQIDEQVADQIERVDEEAADGQPPFRELIARLCAIPGVSVLSATAILAEIGRDMSRFPTAGHLIAWAGLCPGQNESPTGQARGLKAHGKRKSSRLRKGAPWLKTMLVQCAWAAKRAKHSYYSAQFHRLCGRRGPQKAICAVAASILTAIYHMVRSGASHRDLGADYFDRRTPQARAKRLVAQLAKLGFAAQLQPLAEAA

SEQ ID NO: 124117 - protein, 347 aa, unidentified
MRFYKHTHAFYCGVDLHARSMFTHILDNDGKTVFEADLPASPDAFRKAIAPYRAGLVVGCECMFSWYWLADLCEDDEIPFTLGHALYMKAIHGGKAKNDRIDAAKIAGLLRGGMFPMAYVYPRAKRDTRDLLRRRCFFVNQRAQLTAHIVNTNSQYNHPPLTKKLCYAGNRSDDLAERFTQTSTQASIRADLALIDAYDAQIDEVERTVLKNAKINDPTTLKLLRTIPGIGKILSLVLLYEIDQITRFPDVGNFLSYSRLVRCEHESAGKKKGSGGKKIGNAHLKWAFSEAACLMLRAEADAKKWLDRQARKRGKKKALSILEAKLGRAVYHVWSKQQVFDLRRFFA

SEQ ID NO: 124118 - protein, 399 aa, unidentified
MTPDDIDVWVGLDVGKSAHHAHALDRDGNTLYDKPLRQDEKAIRTMLERLSGHGRVLLVVDQPNTIGSLPLTVARSMGVPVAYLPGSAMRRTAQLLPGAAKTDRRDAYVIAWAALKLPESLRDAGPDDETLAALKILAGHDEDLAHESTRHINRLRSLLLQTHPAFERVLKGERATRDATLALLEHYGGPTGMRGAGIERVRQWARNEGLRAGRIIDDMFKAIGEQTVTVPGTAMAESIIPSIARDIKTIKDRRRDLAAQVERLLDGHPLLTVLTSMPGIGVRTASNILLGIGGDVTHFKSAAHLAAYAGIAPVTSQSGTSIKGERPARGGNKRLKNALWQSAFVASTKHQPSTAYYKRKREQGKHHNAAIICLARRRCDVIYSMLKNGTLYQEQTLAA

SEQ ID NO: 124119 - protein, 324 aa, unidentified
MTTQSVGIDVGKEELVVCIRNANGDSLTPASFPNTSTGIKKFALYLKKHNFTPEDPVLFESTGPYHWKASRMLADLGYFVKVDNPLHTKQIARLSIRKRKTDKVDASHLAFLASQGYGYRFIETAETAKKKALVRHFWKLRRTATNLLVHERYLKEYRNLSRASVSGLLVKRCEKLKKEIVAEWSAGNDVKYLDSIPGITPFLAATILAELLPLERFQRIDQIIAFAGLDPSVKQTGGRRGTHGPISKRGSPTLREALFLAAFGSFSKEPMKSLYKQYKDRGIHHNAVLCILSRKILRIAVSLLKKRRVFDLKKLSTPKELTGT

SEQ ID NO: 124120 - protein, 341 aa, unidentified
MAVAGMDTHKDTLAVAVVDGQGRELDRIELENSSVGHHRLVGWLGRFELERVGIEGSGSYGRAAALALRDAGLQVVEVPPQLTAQARRRQRSPAKTDGIDALLIARIALRDHELPSIRPDGDIEDLRVLVRYRRELRAERNRIANRLHADLGQLHPGYQRRIGRLTTPQNLDRARRLLAGDDRVRARTARQRVTRLRQLNRQIAEVTAEVQERAACFHSGLTTIAGVAGLSAAELLAEIGDVGRYRTKAQFAMANGTAPLPASSGRTQRHRLNRGGNRQLNRVIHFIALTQISRYPEGRAYYDQKKAEGKTTQEAMRCLKRRISDRIFQTLRHQQPRAHLT

SEQ ID NO: 124121 - protein, 401 aa, unidentified
MASMTSEIAFTQPVGAVFGGIDTHKDIHVAALLDSDGGLVGSASFPTTRAGYRQLQAWMRSAGVLGRVGVEGTGSYGAGICRHLSAAGIEVVEVNRPDRAERRRRGKSDVLDAAGAAEAARAGHRITIPKSRDGQVESVRVLRLGRASAVQARTKAVQLMDQLIVTAPEQLRDQIRRLSKMRLIRSCAAWRADPAAAANPVVATRIALKKLACRYLQLNEEVTALDKLLGGLVAEAAPQLITTFGIGVDTAGQLLITVGDNPGRVHSEAAFAMLCGVAPLPASSGKTTRHRLNRGGDRQANRAIHVIATTRKRCDPRTRIYVKNKIANGHTKREATRSLKRLIAREVYYLLHPEGLTPGPVPPSRPNRRRADAVKVEPPTRGTTLTAPSTGTSSKMEEPAA

SEQ ID NO: 124122 - protein, 339 aa, unidentified
MSLYCAIDLHSNNHVITIIDDHDQKLFERRMPNKLDTTLDCLSPYQNELTGIAVESTYNWYWLVDGLMEAGYPLQLVNTAAVKQYEGIKFTNDESDSFHLAHLMRLGILPTGYIYPKAQRAIRDLLRKRGFLVHHRTALTLSAQSLHTRITGRQASCNVIQGDHAERIYLSSYEDTNRKLEMQSNLRMIKALHQQIIEIEKVVMNQMKLAPEFLGLKQVPGIGNILALTIALETGDINRFAKAGNYASYCRAVTSRRESNGKKKGVGNRKNGNKYLGWAFVEAANFMVRYSDDGKRFFQRKLAQKNRAVAVKATANKLAKACFYIMRDKATYDAKMLFS

SEQ ID NO: 124123 - protein, 377 aa, unidentified
MGDYSEAFVGIDTSKLRNAVAIADAGRGGEVRFLGEIENTLAATAKLVRKLAAKYKRLTFCYEAGPTGYGLHRQIKGLGFECVVVAPSLIPKRPGDKVKTNRRDALSLAKLLRADELTAVWVPDGRHEAMRDLTRARETAMLDLRTKRQHVSAFLLRLGRPYPESKKTWTKVHVSWIASQKLEHPQQRLVLEEMMLAIRQAQERLQRLEQAIAAAVPEWSLAPLVTALMAMRGMDLISATTLLAEIGDLSRFQTPTELMAYLGLVPSEASTGDTVKRGPITKAGNRRARRMLVECSWSYQHPPRVGQAKQPKVDAAPPAVREIAWKAQCRLYRRYRTLVRNGKLKTVAIVAVARELAGFIWAVARAVTTAGVAAAPA

SEQ ID NO: 124124 - protein, 319 aa, unidentified
MEVLGIDIGKTRFDACLMGQNLKQSISLANNEVGFAQLAAWLVKQRPNIAAPLHACMEATGNYGLDLAAFLFAEGVTVSIVNPRKIKAFGEAELARNKTDQLDCALIARFCIAQNPQPWTPPAQHIRNLRELVRRCAALKAQRTQELNRQKSGFACEAVRASLLRQLTHLNAEIDIMTAEIRALLAADSQLQRNFDLLNTIPGIGEVSATLLLAEIPNITDFTPKALAAFAGLSPAEHSSGARQRGTGISRIGNAAIRSMLYLGALSASRHNPHLTDFVARMKDAKKPKKVILVAVARKLLVLAQAVLRTQTGFHAHAA

SEQ ID NO: 124125 - protein, 329 aa, unidentified
MTTKNIEMDLTSFTPIGIDISKLTFDACIGEQTYKYDNTKSGFKKFASKLPDNSWCVMESTSTYCYRLADFLHEYGYRVSVVNPLSVKRLAQSGMIRTKTDAMDARLIKKYAKKAQLPIYNPLSPDIIELRDLSSLLDAEIKNRTAIKNKIEAMIQRTQPSKKALKRARQTVKYHDKAIQEIEKDMDAIVKRSCSEAYEKALSVNGIGKRTATLLLAITRGFTMFESPKQLIAYIGTCPRQYESGTSVKGKSHICKMGMKNIRSTLYMCSHSAVRYNNTCKALYQRLLAKGKAKKVALMAVINKLIHQLFACISKNEYFDNNYQKSLGI

SEQ ID NO: 124126 - protein, 438 aa, unidentified
MQVLFSRCSGIDVHKDSVTVCVLVYSGGDGPEVRKREFATHFKALLNLKMWLLAQKVTHVAMESTGVYWKPVWQALEGNFQLILANPFQVKNIPGRKTDARDSQWLAELLAHGLIRPSFVPPRETRDLRDLTRYRVKLTEEKNRVHNRIHKVLEDACIKLDTVASDILGKSGRAMIEAIIDGQQHPDWLADKAKGTLRGKRPQLRLVLRGRISEHHRLMLRELMDDLRFVESKIERLDKAIAPQANREKLERLCTIPGIDVITAWTLLAELGTEMSVFSSPKHAASWAGLCPGNHESGGKRLSNRTRKGNRWLRRALCQSAWAASRKKNCYLAAFFYRKAGKHGIRKAIVALAHRMLVIAFCVLRDGSEYQEVGGDYFDRLNPERTKARLVRRLQRLGLDVFLHPKTSPPESSPPHVSPRKRGRPCKCFERAIPCKHT

SEQ ID NO: 124127 - protein, 333 aa, unidentified
MQTAKKIVGIDVGKDWLDVCYPDGRKEHIRNIRSCRTKLIKKAAKLGAIVCFEATGPYEEPLADECLARGVKAVRLDAWGTRKFAESQGRIEKTDAIDCEMIRDYAASLKDEKLHFIKPRSEAQKRLKKSVRTRKNLLKARAIIANQFEDDLDPETARHLRSALKSLDKNIAKVEAECDAAIASDERLSELDRRFREVKGVGPCLSRTVLAQCPDIGDFNSKSIAKMCGNAPLDHESCTIKYTAKPRRGRSDLKKALYMAAVSASRNNHILREFYQRLVANGKPRKVALTAVARRIAILLNTIAKHPDFKPAQDPKATAKTAGSKRGRPRKAK

SEQ ID NO: 124128 - protein, 338 aa, unidentified
MKLYAGIDLHSNNSMVVIIDEQDRVMFEKRLPNELEHILRALASFKQWLVGVVVESTYNWYWLVDGLMQSGYSVHLAHPAALVQYQGLKYSADEHDARWLAHLLRLGILHEGYIYPRQARAVRDLMRRRMQLVQTRSAQVICMQTQFTRSTAKSPSGNALKRMLPDEIETLLEERNVASGVRANLEVVRTLNREIARLEREVSEQVKLAAQYEPLLSIAGIGRILALAIMLETGAIERFAGVGNFSSYARCVASKRLSNDKKKGEGNSKCGNKYLAWAFVEAAHFAVRYNPRIKRFYERKAAKTNKVVATKAVAHKLARAAYHVMRERVPFDEARAFV

SEQ ID NO: 124129 - protein, 425 aa, unidentified
MANHSEVFIGIDTSKLRNAVAIAEAGRNGKIRYFGEIDTSEAATKKLIASLSRKYRKLTFCYEAGPTGYGLHRHIESLGHSCIVAAPSLVPKKAGDRIKTNRRDAEGLARLLRAGELTAVWVPDARHEAMRELARARDSARQDLTRKRQQVSSMLLRMGLHYPDSRTWSARHRSWLANLKLEHAEHRFVLEELLVAERQAGERIGRLEQAIRDALGNWSLRDIVPALMAMRGIDMISAVTILAEIGDLTRFASPRQLMAYLGLVPSERSTGDAVRRGPITKAGNGRARRVLVEAAWAYRHPARVGFEKQASVAAAPRPAREIDWKAQVRLCKRFRSLTRKGKKSTVVATPSLASWPPSSGPSPMKSRQRRAARHKPEPPMGQRARRSSIRSNIIRAAAGARPWQGNPCKTLRGRSRDNPLIDARF

SEQ ID NO: 124130 - protein, 362 aa, unidentified
MMTWTALPPIPQHDLRLSRKESENEPGHDDRIGYREVYFSSARGRQRLSRSRVLEFFGKLPRCLVGLEACASSHYWARELIKLGHEVKLMPAQYVKPYVKRGKNDAADAEAICEAVTRPTMRFVGVKTIEQQSIMLLHRVRRILMRQRTQLSNALRSHLAEFGIVSPIGREGLDRLLKIVADTDDGRVPAEARVSLEMLAAQLEGVKAKILENDRRIIASARATEVGRRLLEVPGVGPVLASAFVASVANPAIFKSGRDLAAWIGLVPRQNSSGGKERLGGITKAGNGYLRQMLVVGAMAVIRYAQRNSTRRPWLVQLMGRRPTKVAAIALANKTARTVWALMISGERYRDPKVIQAVSATA

SEQ ID NO: 124131 - protein, 412 aa, unidentified
MTVTNQFAAHVGLDWADKKHDVCVQFKNGERVFDVIEHTAEALDAWLTELHQKVKGRIAIALELKKGPVVYALQKYPFITVFPVHALSLARYRQAFSPSGAKDDPQDAELALELMLRYPQKIKAIEPDNADIRLLQQLVEQRRQLVEDKHRFVNRLINTLKQYYPQPLEWFSHRGSLLLCELIIRWPSLQQLKRARRDTIRNFLNAKGGRAMALTEQRVASIDNAIPLTTDPSVIEANALMATALATQIKVVSEIIKTYDERIETLFDTLPDAGLFKSLPGMGPCMGPRMLAALGDNRDRFNNAEEIQNYAGIAPVTERSGQKSWVHWRWQCAKFVRQTFVEWAAKTVNSSYWARLYYQGLREKGKSHQSAIRALAFKWIRIIYRCWKTRTQYDEARYLLALEARHSPLLKP

SEQ ID NO: 124132 - protein, 403 aa, unidentified
MEGPLISLDVSKGKSNYRFFENGTDRKGKKGVIRHDIRGFDSIRDEAEKMEERLRIKPSVIFESTGVYSDVVEKYFTDKGFDVYVISPLLSASMRKEGVRPAKNDSLDTLSIAKVFYSRDDLRKCSENDKKAERLREMSYELDMMNRRIRPMKCQFLRLLDKVWPCLDEVSDYSSRFMLDFIIAFGHPENIKTVKGVLSVIRKSEMGTAGRKDKIAQDLFDYCHTHLSAVSKDSSYVELLKRMAIELKAMAKKKSELIDRMAEEARNKDEFVRLLTIPAVAKTTALKIMARVGDISRFRNAEALVAYCGLDPRVYQSGKMTGEHRTITKKGDCILRSTLFLAVKLMVMLYPDTKVARFVAAKAKNGLSYKQAVVAGSAKLARIIYSMLTHHENYVEFNADIVA

SEQ ID NO: 124133 - protein, 279 aa, unidentified
MQTVTTIGLDIAKSVFQVHGVDAAGQVVMRRQLKRRQVLAFFQRLPACLVGIEACASSHHWARELQLVGHTVRLMPPAYVKPYVKRHKNDATDAEAICEAVARANMRFVTIKTPEQQGCLILHRTRHLLIRQQTSVINAIRAHLAEFGIVAAVGRNGVEQLLGVVADANDKRLPEVARACLAALGVQLRVLKAQILEFDRMINAWHRSNETSRRLDKAPGIGPVLATALVATVADPKTFRSGRNFSAWIGLVPQQHSSGGRTGSAISASKVTAICAIYS

SEQ ID NO: 124134 - protein, 400 aa, unidentified
MRAVFGIDVSKASSEVAILVNGEKVHGYTISNDALGFARLLGDLKTVHKPEIIFEATGVYSRRLQSFLDEHGYAYTRLNPLEAKKQLDSLRVRKTDQIDAEKLAQSQFVLNRKTTYVQEEIYQNLRDLSRFYQNLTEDIVRAKNRLHKALQVTFPELENILSTPSGEQYWNLVIAFPCKDFVLDLSKDELSESIRQSTSKRISDKRVAYLAEKLIALANQSYCAVKKTSPMLEEVRYYAKELFRLSEQRQTILDEMVELAQPLPEYDILLSIPGIAETTATSIIGELGDIRRFQSANQINAFIGIDLRHYESGNFLAKEHITKRGNPYARKILFKCIHNIASASNTNPCHIADFYEKRKRQSQTTSTKPHTIASIHRLIRTMYYLIMHNKLYDYASTQNR

SEQ ID NO: 124135 - protein, 338 aa, unidentified
MRYFVGIDLHSDSNYTGVIDKKDSRIFGKKLPNELGVILKELKPFKKEIQGIVVESTYNWYWLVDGLQEAKYKVHLANPAAMQQYSGMKYTDDKWDSYWLAHMLRLGILPEGYIYPKEIRPVRDLLRKRTMLVRHRTAHVLSLQNMVNRNTGRKLKVNDAKKLSEEEISKQFEDGHLIMAVQSDKAVIDFFNEQIERIEKVVLKEVKLRYPYKELVTVPGIGEILGITIMLETGDINRFPTVSDYSSYCRCVSSKKVSNGKKKGEGNKKNGNKYLAWAYVEAANFMRRYSEPARSWHQRKASKTNQIVAIKALSNKIAKACYFIIKDQKPFDPKKLFQ

SEQ ID NO: 124136 - protein, 312 aa, unidentified
MEAKFVGIDVSKARLDVDCLPVSTARQFSNDAGGIAALVQWLLGSGVERIVVEATGGYEIAVASALAAAGLPVVVVNPKRVRDFAKAQGVLAKSDRLDARVLALFGERIAPPVRALPQAAQRDLTELLDRRHQLVSMRAQEQARLATVLPVARGDVEQHIAWLDQRIRKHETVLLKRLRANEIWDAKVKLLDSVPGIGPVNLFTLVGRLPELGTLNRQQIAALVGVAPFNDDSGKRRGQRYIRGGRAEVRCALYMATLTAKRCNPVIAQMFERLIAKGKPFKVAMTACMRKLLTILNAILKSTQPWENRLAT

SEQ ID NO: 124137 - protein, 423 aa, unidentified
MTGKRKYRAISVKNVNLDSVQELGDGPLTIGLDIAKEEIFAVVRNTAGQFLRPWKAKQPTELRALVDLFLEVAKDRSVVMGLESTGTYGDALRQAMTDAGLEVQRVSGKAKSDYEEIFDGVPSAHDGKDAAILAELVALGKSQPWPHKQASETESRMRGCVYWLDAQQDIYLTWLGRLEAQLARHWPEATRILQLSSATLFRVLAHYGGPAQFAKDPEAAQKLRRWGGHFLEEKKIQALCRSAQTTVGVRMTSEDQLQLQRYASQALETYQEISKVKKQLEEMSKSDESLQCLAGIVGPVTACVLRVSLGDPSKYHSGEAYRKAMGLNLKEHSSGRHKGKMKITKRGSSLARRWLYFAALRLVQKPEVRGWYEAKKKKDKGKGGRAVVAVMRKLALAIWHVVVRGTPFDRSRLFPGKPLPQMN

SEQ ID NO: 124138 - protein, 329 aa, unidentified
MSKQLMYVGVDVGKDEVWATLATTKPKSFAQSTAGVQALRAWMRKNATGARVHVCMEATGIYSQALALRLLTGADDLEVSIINPAQIKAFARAQLRRTKTDQVDAAVILAFAETQTPRPWSPEPSALHTLSRLVAHREALTEDLRRWTNRQHAASCDPRVVQAVDRSQAAIVRILTRELTKIEQALAALMAAEPTLAEQRAVLQTIPGIGPVASLELMAAAKGCLTARTSRQVTAHAGLAPAHRQSGSSVRGHSQIAKQGNVRLRTCLYMPVISAIRHNPVIRMFYQRLRTNGKPKKVALIACMRKLLVIARAILISKKPFDPAYQPLT

SEQ ID NO: 124139 - protein, 372 aa, unidentified
MNNTTIFVGMDVHKESFTLCEYQIETEKASHFRHMPADYKEVLRYLEFLRTIYGRDTIFVCGYEAGCLGYTLYHQLTNHNVNCVILAPTTMLEKHSGKRIKTDKRDAELIAKCLAQHNYSPVHIPTATDEETKEYLRMRDDHKLALKRIKQQILSFCLRHNYRYEGKSHWTVGHVKWLKNLNPEALYKEILDEYLLTYTTLSDKIERIDKRIEELAAKDEYRESVKKLCCFIGVRTHTALSVLVEVGDFKRFPSAEKFAGYLGLVPGENSSGDSTTRLGITKAGNRHVRVLLTEATQGYTRGAVGYKPKALKARQKGNTPQVIAYADKANERLKRKFFKMVLGKSKKHNVAKTAIARELACFMWGMMTDNIA

SEQ ID NO: 124140 - protein, 348 aa, unidentified
MRFYTEQHQHYCGIDLHTRTLYLCIQDQEGNVLLHKNLPCDRTRFLEAIEPYRDDLVVASECIFNWYWLADLCAAEDIPFVLGHALYMRAIHGAKAKNDRIDSLKTVGLLRGGLLPQSYAYPADMRPTRDLLRRRTHFVRKRGQLFAHIQNTFHQYNLPRPQGMLVYKGNRAQVPESFADPMIRKSVEADLDLCTTYDTLIRDLEKSVLRQAKAHDPNTLLCLNTIPGVGKILALTLLYEIHDIGRFESVQRFASYARLVKCEKRSAGKKVGSGGHKIGNAHLKWAFSEAAVTLLSHFPESKKLHTRLKNKSGKGKALSILAHKLGRTVYFMLKRNQAFDQARFLANA

SEQ ID NO: 124141 - protein, 358 aa, unidentified
MQRNKISFKGQKIFIGIDVHKKNWDVAIAPEIGIVKRHPQKASAKELFDFLKKHYPDGDYFAVYESGFSGYSTYYALKEVGIECIVIHAADVPTTQYEEVMKTDRVDSIKLVRSLKAGLLKGIYIREKENIDDRSVVRIRKTIQKQLSGYKARVKHMLHCNGVSLPERFEKPGSHWSKAFIKWLKEDVMLLSSTRNSLDLLIRQVETIRMTLLEATMMMRNLSQTERYRRKFDLLMTVPGIGMAVSMCILTEVYDVKRFRNENQFAAYLGLIPTSHSSGDKVAHGEMTFRGNKQLGPMIIEAAWITICKDAGLGSLYLRYKERMKPQEAIVRIARKLSNIIFAILKNEKEYVPYHPGK

SEQ ID NO: 124142 - protein, 333 aa, unidentified
MNKFKHFLGIDVSKDYFDAVVLVSGKKENAIHNQFSNDLKGIKSLVVWLKEQEADFENTLVCLEHTGMYGKLIVKYLTVYKFTIWVEMSLKIIRSIGVQRGKNDKLDAERIAYYAMKNVDEAQIFTTPRKEIEKIRNLLSLREKLVETQTHLKRNAKELSQFDKEVAKFSATLQKNTLKGIALDLKSIEKQLDTIIKEDENLSRIFKLTTSVIGVGKVTALFLICFTNEFTMYATPRQLACYTGVVPFEYTSGKSVRAKPKVHYMANKKLKKQLHMCALSAITSDPELKHYFERKVGEGKSKMLVINNIRNKIVHRICACIRNNKAFEKRQVA

SEQ ID NO: 124143 - protein, 374 aa, unidentified
MEDYSEAFIGLDTSKLRNAVAIADAGRDGEVRFYGEIENTPTATAKLVRKLSAKYKRLTFCYEAGPTGYGLHRQIKELGCACLVVAPSLIPKRPGDRVKTNRRDALNLAKLLRAGELTAIWVPDGAHEAMRDLTRARETAMLDLRTKRQHISAFLLRLGRPYPQKKTWSKVHVRWIASQKLEHPQQRLVLEEMMLAMRQAQERQQRLEQAIADAVGEWSLAEVVTALRAMRGIDLISAATLLAEIGDLSRFQTPTQLMGYLGLVPSEDSTGDTIKRGSITKAGNRRARRILVECAWSYQHPPRVGSAKQPKVDAAPEAVREIAWKAQCRLYRRYRALIRKNKLKTVAIVAVARELSGFIWAVARAATTDRAALA

SEQ ID NO: 124144 - protein, 315 aa, unidentified
MTTKSTEIYVGIDVSKAKLDVAIWDSEVSWNFRNEAEGWQELVKRLKTCKPTLIVMEASGGLEQSIVAELYLEKLPVAVVNPTRVRDFAGSTGQWAKTDKLDARIIAHFAQAVHPKVRPLRTAEEERLNALVTRRRQVIQILVAEKNRKATTHSSLQERVQQHIDWLEDELLDLDREIEHFIQESPEWQEKAALLRSVPGVGPVTASTMLAELPELGTRNRQQIAALVGVAPVNKDSGKKRGKRRVFGGRAPVRRALYMATLVATRANPVIRRFYERLLAKGKEKKLALTACMRKLLIILNSIIRNRQPWRLNWA

SEQ ID NO: 124145 - protein, 437 aa, unidentified
MLSYLNLNAAGVDIGATEIYIAVPGDRDPQPVRCFSTFTEDLHAAADWLKACHIETVAMESTSVYWIPLFQILEARGFQVFLVNAHHVKNVPGRKSDVSDCQWLQYLHSVGLLRASFRPEQAVCTVRSILRHRDGLVQMASSHVQHMQKALDQMNLQLHHVISDITGRTGITILEAILAGERNPHQLAKLRDRRVKATEETIAKSLVGDYRREHLFTLRQSLAAFRQYQDWITDCDHEIAQYLEQFESKLDPPPGPTSPSEDGSKPKASEQPFDLQTHLHRIFGVDLTQVPGIHVLTAQTLLAEIGPDLSRFEDGSALASWLGLCPDNRISGGKVLSVKTRKVKNRAAKALRMAAQSLHHSQSFLGHFYRRMRAKLGAPKAITATAHKLTRVVYHMVTTGHAYDETICAQNELQHRQRLEARLRKQARELGLQVVAA

SEQ ID NO: 124146 - protein, 478 aa, unidentified
MVARKTPPRKTPQQPAEPRREVAVEALPVQHAHAAGIDVGDASHWVCVDSTPDGSDTTREFPAHTPGLRDLIAWLSQCGVTTVALEASGVYGHVLFLTLIEAGFATVMTSPAFTRQIKGRPKTDRLDCQWIQRLHKHGLLPSVFQPDELTQTLRSYVRQRANLVRLSGQHIQRMQKALELMNLKLTKVLGDITGVTGLKIVRAIVAGERDPQVLAKLRDRRCKRAEPEIAQALDGRYRPEHVCELRCTLAMWEHYQEVIAELDEEIAGHLRTMKRQSELPPLPAKPRVRGRKPHDPKFDVRTALYYATGVDLTAIEGIDEIHALTLVGELGSDFSKWPTVKHFTSWLGLCPNWKKTGGKVKSSHTRKGKNRAAMALRLAAWGLMRSKSYLGAFLRRKRAHMGAPKAITATAHKLARIIYNLMRYGVAYMKKEESAYAEEMRGRQEKSFHRRAKELGYEVKKIDPPKSESIVETPAAPA

SEQ ID NO: 124147 - protein, 431 aa, unidentified
MNYKQKDKKNQRIQQITEHTLIVGADIAKKTHYARSVDFRGIELGTRCIFENDRQGLLKLVLWMKELQRVHQKSDVLFGIEPTGHYWFPLAEFLRKNDIKVVLVNPHHVNKSKELEDNSQTKNDLKDAKVIANLIKNGDYTEPKLPTMIFADLRILMNLREKVNNSQNQVKIRVQNWLDRFFPEYLQVFKKWDGKASFMTLSEFPLPQEIVSLGAEEILRRWKAQVKRSVGIKRAKKLVEYASNSIGLTDGCAGARVELAILLEQYELYEKQLAKIMNEVQELLDRIPGTKEMMTIPGVGEVTLAGFLAEVGNLEDYNHPQQIIRLAGLNLKENSSGKYKGQTTISKRGRSRLRALLFRCMLSLVSKNKEFKYLHFYNIKLKEKPLKKKQSIIALCGKLIRVFYYLGTRRLGYCGKDVLGPMHLNQLQIAA

SEQ ID NO: 124148 - protein, 342 aa, unidentified
MSIVTLIGIDLGKHSFHLHAQDAAGRMVFRKKLTRSQLLGQLANVPACTVVMEACAGAHWIARQLAGLGHTAKLISPQFVKPFVQGNKNDFNDAQAICEAASRPSMRFVTPRNEAQQTLSALHRVREGLVRQRTAATNQIHAFLLEFGISLPKGLAVIKRLPAVLALHPDLPVRLVALLERLRAHFTYLDEQVAEVERELAQQLKEDESSQRLLEIPGIGPITASALSIELGDARQFGSSRQFAASLGLVPRQYSTGGKPTLLGISKRGDKNLRRLLVQCARVLMQRIDKREDSLGRWVRDLLTRRHSNVVACALANKLARIAWAILAKGTHYQSDPAASAA

SEQ ID NO: 124149 - protein, 372 aa, unidentified
MQENSEAFVGLDTSKQKISVAIADTGRSGEVRFFGDIDNTPAMVERMVRKLAKRHNKLWFCYEAGPTGYGLHRQITALGHECVVVAPSLIPQRPGERVKTNRRDAVSLAKLHRAGELTAVWVPDPAHEAVRELARARETAMEELRRARQHLQSFLLRHGRIFTGRTAWSKAHTRWLCEQRFDHPAQHIVLTEYRQAIEDAEVRLERLTQQVTEIVATWSMAPVIAAYQALRGVAFMTAVTFAAEIGDVCRFDNPRQLMAYLGLVPSESSTGERVRRGSITKSGNRRARRVLIEGAWAYRFSARISPTLQERLNGLPKGVREIAWKAQVRLCGRYRKLTANGKRRTVVVAAIAREMSAFLWAIGQQVKPLSAS

SEQ ID NO: 124150 - protein, 344 aa, unidentified
MYLCILNQDGEILVHRNMPAGPEPFLKAVAPYREDLVVCVECIFPWDWLADLCAREGMPFVLGHALSMKAIHGGKAKNDQIDSQKMAVLLRGGMLPQADVYPAAMRATRDLLRRRMHLMRKRAELLAHVQNTNSQYNLPGIGKNIAYKANRDGIAERFPDPAVQKSIAVDLALIGHYDPLLNDVEFSIVHTAKQPDPQTLSRLQSVPGIGKILSLVLLYEIHTIDRFPRVQDFVSYCRLVKGAKESAGKRYGTSGAKIGNAYLKWAFSEAAGLLLRTNPAGQKYLARLEKKHGQGKALTVLAQKLARAVYSMLKRKTAFDMPMFLQSSSGAERVSPTSHWTLSG

SEQ ID NO: 124151 - protein, 387 aa, unidentified
MPEDAPRPAQAAIRTDLGAIFVSLELSRRAWLVTSLSPGGGEKMSKHSVQAGDIAGLLRRFAQLKEKARARTGRDFPVITIQEAGLDGFWIHRVLQSEGIESHVVDAASILTSRRRRRAKTDKIDGETLVRTLLAYKRGEPRVCSMVKSPTPEEEDRRRICRERRALVAERVQHTNRIKGLLFAQGAFDYEPLKRNRRAQLEDLKTGDGRPLPVNLKAQISRELDRLEVVLQQLQTVDAERDALLEPASEASPAPAAMLSQLKGIGPEFATILYTEGLFRGFDNRRQVAAYAGLAPTPWQSGSVDHEQGVSKAGNPRLRTTMIQLAWLWLRHQPDSALSRWFQDRVQRNGGRMRKTTIVALARKLLVALWKYATSGVVIEGAVLKAA

SEQ ID NO: 124152 - protein, 412 aa, unidentified
MKDLLEISCGLDVHKEKIVACILTGPLGKPTRSEIREFTTLIPDMIALRDWIVSQNCHHVAMESTGIYWMPIYEILEDAFSGDITLLVVNARHMKNVPGKKTDMRDSEWISTLLRAGLLNGSFIPEKRIREFRDLNRYRKSVIRDITSQKNRIEKFLQSSGFRLSSFISDIFGASGRNIILHLIEHGQIDKTALDSCLKTKTRNRIDEILMSVNGTLSEHQKAFLRILMTHYDSLKKHLAEIETSLEEDMAPFALQVEQLNSIYGISTTASCAIIAEIGIDMKPFKTAEHICSWAGLCPGNNESAGKRKSTSVTKGNPYIKSMLCEIAWVIAGKRNTYLSAWYWRIKQKKGAKKAIVALARKLLVIIYTMLKQGTLFDESCFETRRKNCEQKQLSRYIRELEKHGYHVEAQS

SEQ ID NO: 124153 - protein, 412 aa, unidentified
MQDLLEICCGLDIHKENIVACLLTGATDVKPSSEIRTFSTMIHGLKELKAWLNDHNCQHAAMESTGIYWIPVYETLESDSENMDLLVVNARHMKNVPGKKTDMRDSEWIATLLRAGLLRSSFVPEKRIRELRHLTRYRKSIVHDVAAQKNRIEKFLQSAGFRLSVFLSDTFGISGRNIMRHLIAHGSIDIKDLDLCLKGQTRRNINNILVSVNGTMSGHEQQFLAISLDHLEMLEAHLKQIEQALEQETKKFEKAMNILTSIPGISNIAATSLLAEIGINMSCFPTAEHLSSWAGMSPGNNESAGKRKSAAVNHGNPYLKSMLCEVAWVIAGNRNAYLSKWYWKLKQRKGAKRAIIALGRKLLVMIYAMLKKGTAYDEECFEQRKRQLENKRVSRMLSELNRLGYHVSCPPA

SEQ ID NO: 124154 - protein, 391 aa, unidentified
MSMYFIGIDISKYKHDCCIISAADQKVVSKVTINNNKAGFDELLTIINSLSNPEDIRIGFESTAHYALNLELFLESSLLTFMEVNPVLISEYKKSKTLRRTKTDSVDCESIARWLMTVEYKPHSKGFYHAYSLKSLTRLRDKLIRQRSFYLVKITNVLDHTFPEFKPFFNERLSKTALYLLENYGSAEKMARMNSASFEKLRSLSRGKFSPQQFLQLKELAANTVGVNNSIFDVELNSLLSLYKSLVKEIDTIEKEINKLIEEVHPHYMSIPGIGPLSAAVIYSEYGDISNFTNSGQMLAFAGIEPGINESGTESHGGKMVKRGSSQLRYTLINCCLPLIRFDMTFATYYAKKRGEGKPHRVAITHVAKKLIRVIYALERQDIDFNAQKLR

SEQ ID NO: 124155 - protein, 363 aa, unidentified
MVVNPSLIIGGVDTHADTHTVAALNSLGQLLGHATFPTGAAGYGALLGWLGEHGQVHQVGVEGTGSYGAGLARHLSDHGITVVEVDRPNRQQRRKNGKSDPADAQAAARAVLAGTATAIPKSRTGVAEALRVLRATQRSAEKARTAALNSLRHMVIAAPEDVREPLDRLKGKALISACAALRPNPGQLNDPRQATTISLRRLARRAAALSAELAEVKADIKTLVTQVAPDLLTHVGVGPDTASQLLVTAGDNPDRLHQDASFAALCGVSPVRASSGRTDRHRVNRGGDRHANSALWRIVLVRMRYHQPTRDYVARRTAQGLSKREIMRCLKRFVARELLPDIHRALTPSATEHTHLQTGAPAA

SEQ ID NO: 124156 - protein, 340 aa, unidentified
MEQVSMIGIDLAKNSFQLHGARADGSVAFRKKLSRGKVLEFLASQPGCAVAMEACAGAHYWGREIGDLGHSVRLIPPQYVKPYVKRQKNDAADAEAICEAASRPTMNFVAIKTAEQQARGMLFRTRDLLVRQRTQTINALRGHLAEFGVVAAQGPAHVGRLAPALEDPDSGLPDAVRELGSLLLEQIADYTAKIDGLEKDIHASARQDADARRLMSVPGIGPITAMAIQAFAPPMEGFRRGRDFAAWLGLVPRQHSTGGKPRLGKISKMGQRDLRRLLITGAMAVVRWAVRRGRTSDPWLASMLMRKPRMLVAVALANRMARIVWALMTKKESYRAPAAA

SEQ ID NO: 124157 - protein, 368 aa, unidentified
MALADEGRSGEVRFYGDIGSGPAPMTALIKKLAKPEVRLHFCYEAGPTGYELYRHIVALGHDCRVVAPSLIPRRPGDRVKTNRRDAISLAKLHRAGELTAVWVPDRGHEAMRDLGRAREAAVDARKRARQQLQSFLLRHDRVYTGRKPWTRAHSTWLCEQKFDHPAHHIVLGDYREAIAEAQVRLDRMTALVTELTASWSMAPVVTAYQAMRGVDLITAVTFVVEIGDVRRFDNPRQLMAYLGLVPSESSTGERVRRGGITKAGNSRARRALVEAAWSYRFPARMSRLIQERQAGVPKAVRDIAWKGQVRGRARSGNPRGYYVADIRRRPPLDRGSPRRTHGNAVSNPRIRVCKPSSHGPVSYHVHQL

SEQ ID NO: 124158 - protein, 318 aa, unidentified
MRIGMDVAKAELVVAAHPTGERWTVANDERGIRTLVERLRGEAPELIVLEATGGYELLCVAAFAAVGRPVVVANPRQGRDFAKATGQLAKTDRIDADSLALFAERGRPAVRLWPDAETQELDALRSRRRQLLEMLGAERPRLGQVFGTGKQRVKKRLQAHITYLEREVRIADTDLGDMVRHSPVWRERDALRQRVPGVGPVLSLPRLAELPELGRLSRRELAKLVGIAPLSRDSGTMRGRRFVQGGRASVRAVLYMGALVATRRNALICAFYQRLLAAGKPKKLALVACLRKLLTILNTIVRTGQRWSPEYAAVPIPA

SEQ ID NO: 124159 - protein, 371 aa, unidentified
MKSILSVGMDVHKNSFSLCAYDGYTGEIVSESTFTSDVKLVIKFIETLKSRYENDVEIKCGYEAGCLGYSLYKSLTSRGVDCVILAPTTMQVSAKNKMVKNDRMDALNIAKNLASGSYKAVYVPDEEDVEIKEYIRMIHDFKKELKRVKQEIYAFVLRHGYQYDGKSKWTIRYMNWIRELEMSEIQRETLDEYLAEMDNLNDKIERFMNRIDEMYQNDRYNEKLSELRCFKGIDTFAAMTIQVETADFERFPNAKAYASYTGLTTGEHSSGDKNNRIGITKQGNTVIRKTLVECAQSLVKGNVYTPKSKRLKSRQKGMDVNIIAYADKATERLKKKYQKLIERNVPRNKAIVAVARELACFIWGMETGNIH

SEQ ID NO: 124160 - protein, 375 aa, unidentified
MNILGEITFDNRPGKFDQFIRDVKKISGDLTPMFGLEDTQGYGRNLAMYLIRKKFPVKSVNSVYTKVVRLSAPTVFKDDSYDAYCVARNLRDMLDKLPDANHEDIFWTIRQMVKRRDSLSKSVLRLHLQLHGQLTHHYPSYRKFFTLVSCPTALYFWEHYPSPRHLQGVTPEELASELRKIGGNACSTSKTKKILSLVETDCDIVKEYQEERDFIVKSIVKEIRYKHEEIAEVDRQLEKIMPQTGYKLETMPGINLNTASHIVSEVGEINRFSNADKLARFAGVAPVHFSSAGKGKEKRSKQGSRLLNATLYFLAVQLVSVRGGKPRNPEFHTYFHRKVSEGKKKSQAIICIQRRLINIIYGMMKNRREYKLLKD

SEQ ID NO: 124161 - protein, 412 aa, unidentified
MQTLVERGCGLDVHQATVVACLLIIGKDGKVQKQIRTFGTTTRELLNLREWLLSQGCTHAAMESTGVYWKPVYAILEGGLQIVVANAQQVKKVPGRKTDVKDAEWIADLLCHGLLRSSFVPPKAIRELRDLTRYRRKLVESQSAERNRLLKLLESANIKLASVATDVFGTSGRLMLRALIAGKATAQEMAELAQRKLRSKIPQLQLALEGKLEGHHRFLLKLQLDRLERAEGDLAVLEQRIQEKLEPYAAQLALLREIPGVDWTLAAVIIAELGVDMSVFQSVSQLASWAGVCPGNNESAGKRKSSRIPKGNVYLKTALVEAAHAAARTKGTYLRDKFYRLKARRGYKRAVVAIGHKILVSVYHMVSQNVSYNDLGDLYLDKLNKNHLTRNLVHRLERLGYSVILAPQQKAA

SEQ ID NO: 124162 - protein, 341 aa, unidentified
MLFFEKQLSPYNDIIGVDVDKNNLTAYSIKHRSTCKVPNNTSGFEQIIGNFNLNKCKNNNKIIIIFEATGDYNLLAMKYFKEQGFCVRQINPILTKRFIKTTVRAKKTDISDAKSIALLFLQNNENCYEIDADTFKSINRKTALRIEQKLTHIQADLKRIKSSLNVKQQSGINVDSIISEINKLISELEKSSKTLWQTAKKDNENNIYNRQEQIIASHIGCGEKLSAIISTEAGNIKRFPSARQFKAYAGLDPKINQSGNKDIKGKITKRGNPILRQALYLAAFTASRHDPELKIYYQKKRNEGKSHKHAICAVARKMCERIYATVVEDRLYVPRYPQEVV

SEQ ID NO: 124163 - protein, 471 aa, unidentified
MKRKTSQRSRSLEKRPSARPRQGLDPVHPNAAGIDVGSEMHWVAVPADRDPKPVRSFRSFTTDLHQLADWLAACGIQTVAMESTGVYWIPLYEILEPRGFEGVLVNARPVRSVPGRKSDLVDCQWLQQLHQFGLLRGSFRPTAEIVALRSYLRHREQLVKEAASCIQRMQKALVLMNVQLHTVISDLTGVTGMSILREILAGETDPQKLARHRDHRCKASAEEIAASLTGHYQPEHCFALRQTVELYDVYQEKIRACDDEIEAQLRELQAHCEPPATPRPAARTTKRPARNEPRFEIRSPLYVLCGGVDLTQLPGIGPYTALRLLSEIGVDMSRWPSENHFVSWMTLSPNQKISGGKILSSRTQPSANRAAKILRLAVMSSSRSDHALAAFYRRLAARIGKAKAITAAARKLALLVYRMLQDKLPYREQTAADYDARQKRRILRGLRRRAEQFGYQLIDAKTGELLGAAVS

SEQ ID NO: 124164 - protein, 373 aa, unidentified
MTSMTVEPAEQVASRQVIIGVDTHKYAHVAVALDHLGSRLGAQHVAANREGYAQLEAWAASLAGNGRVLAYGVEGTGSYGVGLASFLRRTGHRVIEVNRGDRRSRRSNGKSDTLDAEAAARAVLGGQATAIPKSADGTAEMIRQIKIARDTARKARTSAIITLKALIVTVPAELREHLAGTSDKVLIDRCASLRPGAVTSPTASAKHALRTLAKRHQALDAEIRGHDAILDDLTRAHAPTLREGLGIGADTAAEVLIVFGDNPERVRSEAAFAKLCGTSPVPASSGMTNRHRLSRAGHREANAALYRAVIVRMRFHQPTIDYVARPTAEGLSKRDIIRCLKRYLAREVYQAVLTDHRARQSVTTQAPHRSLDL

SEQ ID NO: 124165 - protein, 339 aa, unidentified
MTVKTVGLDLAKDVFQVHGISENGRVIFNRAIKRAKLLAFFEKLPPCVVGMEACGSSHHWGRQLRKLGHEVKLMPAGYVKPYVKRGKSDAVDAEAICEAVRRPTMRFVEIKTEEQQAILSIHRTRDLAVRQRTQLANMIRSLLREFGHILPIGIEAVTAFAKRHQDGDHPDMPEIANGMLGIQCYQFIGLNERISGYSKMIEQHAMLNADARRLMRMPGIGPVTASAIVATIGDAHQFRTGRDLAAWLGLTPLNKSSGGKERLGKITKQGDRYIRKLLVVGMTSRAVMAKRSPEKVDLWTANIIADKPFRLATVAMANKAARAVWAMLTKKQEYRQPAF

SEQ ID NO: 124166 - protein, 350 aa, unidentified
MSHKSAPFTAVRTIGIDLGKNSFHLVGLDQRGAIVLQLKCSRAQLERRLANIPSCLVGMEACSGAHYIARQLAALGHDVRLLPAQYVKPFLKGHKNDYRDAEAIAEAVQRPTMHFVAIKTPEQMDLLALHRVRSRLVSQRTGVTNQIRGFLMERGIIVRQGVVPLRRALPDILSSNTPALSPRIVNLIAELVQDWRRLDERIAAVSAEIESLAEQDEACQRVMTVPGVGPIISSAVVAAIGNGAGFTQGRDFGAWLGLVPKQESTGDRTILGKISKRGNKYLRTLFVQAAHVVLARRPSAAMRGLWPWIEQASRRLHRNMLAIALANKLARIAWAVLARGRAYQPSIVAI

SEQ ID NO: 124167 - protein, 387 aa, unidentified
MRFVGIDIAAETHVFAILGEDGAVLVRPTPFAEDAQGYAKLLQALAPWRPVLIVMEASGHYWKNLFAVLLAAGHDVVLLNPLRARRFQGEDLERTKTDAIDALGLARFGLQKRPGPTRLGDAASDELKELVRHRDRLKQDFDDRVRQLHRLVDLGFPEFTRYVRSLDSMLATSILADYPTAKALAEAAPHRLAKLRYDGRHKVGPELARQLIDAARRSVGQHHGPAYRIQVQDICQDLDLWRRRLKARDGDIERLLARHEVGRLLTTIDGIGPHSAARIIAEIGDPARFATPAALAAYVGVVPALKQSGKRRPGRAGLTPIGHARLRAALWMPVLTAVRRNPWLKAFYTRLIDRGKPPKLALVAALRKLLHAVHSVARHRRPFVPVP

SEQ ID NO: 124168 - protein, 352 aa, unidentified
MEIIALDAHKRYSQVCVQNKKGQFLCEKRIDHRKGMIKQFLSNWTQGAKVALETVGNYYWIVDEIEQAGMKPQLVHAHKSKLMLGSINKTDKLDARGLNRLQRTGTLPTVWIPPGDIRDNRELPRTRMVFANLRARLKNRIHSVIDKYGLHTDFDGISDIFGRRGREQMTLTIKQLPRETRYTLRCLLRELDMVVSQIQRIEKRMKKVFSKTEMVKRLMSLPGIGFILAVAIANEIGDIARFATPQRLASYAGVVPRVHSSGGHTRYGKLRNDVNHYLKWAYCEAGNSTAVNYKRFPLRHTSKLYKRIRERKGHAKAVGAVGRHLAEASFWVLTRNEDYKEPEVKSVSPTAV

SEQ ID NO: 124169 - protein, 433 aa, unidentified
MLKLNYMSTLFVGIDVSSKTNAVYAMDFEENKYISSSFGNNQPGADQLVNMIAECMQKHKNLDTVLIVLESTSVYSVHISNFLSASEVLMPYRPYVFCVNPKAASNYRKSYIGMEKTDPTDAYLIADFGRVGRTKKLEPWRGGQFISLKRLTRHRMHLSECITREKTYMVSNLYLKFSELQLLEGDDKPFGSLYGATSSAVLTEFLSPQEIIDMPEEDLLTFLAGKSRNRISDLSKTSELLRKAARDSYRLDKCMYEPLSISLASSFNCIHAYQKEIKLIEQAIEKCINGMNPNALLILQSIPGIGPIWASGILSEIGDITVFHSSDALAKYAGLYWPKGDSGDFTSEDNKMSKAGSPYLRYYLGEAANSVRKHIPEYADFYARKYAEVTKHQHKRALALTSRKLVRLVFGLLVKNQLYTGEKLDTEYNIESN

SEQ ID NO: 124170 - protein, 430 aa, unidentified
MTKHQPIPAEIVLVAIDIAKMRNEVLLEVPGQRRRRLTVLNTRTEHDRLIGILASLGFPVVAGFEATGNYHRPLVWRLLEAGIDLRLISSVALARTRQALHNGWDKNDPKDAQVILHMLRLGICQRYYDPLAHGINDIQELSKTHDAVAKAKTELLHRIQTHYLPLYFPEIERFQNNSRAEWFFAFLERFPTPASITALDRDAFIAAAWEVVGRKVSKARLLADIYATAQSSIGLPVPLDAPAIAMFRLVLAEARSLVRQRAAIEAAADELLHAHPDYVLLRRVPGIGPINALTILAEAGDVRRFRHHRQFLKFCGLDLATHQSGQYRGQTRLSKFGDARLRRAFWMAAQIAIRQRDNSFRDKFERYIARDRHNADLRRKALSAISAKMARVVHALIKRGDDYRPFCEAAVPGGRTSLRRSREGADATCR

SEQ ID NO: 124171 - protein, 343 aa, unidentified
MQTITTIGLDIAKSVFQVHGVDAAGEVVIRRQLKRRSVLAFFQKLPPCLVGIEACASSHYWSRELQALGHTVRLMPPAYVKPYVKRQKNDTADAEAICEAVTRANMRFVPTKTPEQQSCLMLHRTRHLFIRQQTAVINSIRAHLAEFGIVAPVGRKGVTELLHVVADPSDKRVPAVGRACLAALGDQLLGLKRQILEFDRMIMAWHRSNQTSKRLHYIPGVGPMLATALVASVADPRTFRSGRNFSAWIGLVPKQHSSGGKERLGSISKQGDRYLRSLFVAGALAVIRYAKIHGTGHRPWLTALLGRRPAKVAAIALANKIARMAWAMMAKGERYKQPVALAA

SEQ ID NO: 124172 - protein, 326 aa, unidentified
MQTILHNCCGLDVHKDSVVACILKTSDVSVDGGNSEEVEKEIRVFGTFPNPLKELKDWLESEGCHHVAMESTGVYWHPVYDVLESAFGGDIALLVVNARHMRNVPGKKTDIKDAEWIAKLLRAGLLSGSFIPPHEIRELRQLTRYRKTIVQDITVQKNRIEKTLQSAGFKLSSFLSDIFGVSGRNLMNVLVKKGQLSRDDIEIETKRISAEKKDDIKRAVTGLLTKQQRDFLKLQLKRLDAELSHLNEVERSITKLSAAFQDDIERLDTVPGIAKIAATAIIAEVGTDMSKFPTPEQFCSWAGVSPGDNMSAGKKKAPESPTETHT

SEQ ID NO: 124173 - protein, 366 aa, unidentified
MSSIAAAGGLTYLGLDVHRDTISVAVLSPRRDAAEVDRIANDEPSIRRLVAQFPDRRRLRACYEAGPTGYELARLLDRLEVRCQVIAPTLIPKAPGDKVKTDRRDCRRLARLYRAGELTPIRVPTVDEEAVRDLCRARADMLADRSRARLRLGGFLLRHGRIWRDGSTWTYGHERWLLAQRFDDSALSTTYAHYRATLSARDAALEAIEADLATWYDRPPFADAVARLSAYRGVTRLGALTLASEVGDWRRFASAPQFMGFCGLVPSEYSSGSSTWRGRITKCGGGHLRAQLVESAWAYQHRPQATLELRRRQAGLPPEVVARAWKAQLRLCGRFRRLHARKQCRQVVVIAVARELAGFLWAEMVA

SEQ ID NO: 124174 - protein, 344 aa, unidentified
MEHYAGIDVSLESSSVCVVDAAGRVVREAKVASEPEALIGWFQRLAIEMARIGLEAGPLSQWLYAGMRDAGFAVELLETRHVRDAFKAMPVKTDRKDARGIAQLMRLGWFRPVHCKSLPAQETRAVLTARKLVQSKHHDTEMSLRGILRGFGLKVGKTSQRTFASRVRELVAGHPTLLLVAEALLAARAALGEQLSKLEKRVRSLARGDQRVRRLMSAPGVGAIVGLTFVAAIDDPARFRTSKAVGAHFGLTPKKYQSGETDITGRISKVGDAGVRTMLYEAANVILTKPVKGSSLKSWAMRLAMRAGMRKAKVALARKLAVVLHRMLVDGTDFLAAKAATAAE

SEQ ID NO: 124175 - protein, 405 aa, unidentified
MNTEIFVGLDWAVHTHAVCVIDAAGAVLDRFEIAHDRDGLAELMRRLTRFGQTVHIAIERPSGLIVDALVEAGHHVFPIHPNAVKASRPRYRSHGAKSDASDAYLLADLLRTDGHRWRELSPQSDSIRALRALVRTRDDLVATRVALGNQLQSTLEAFWPGAACIFADITSPIGLAFLTRYPSPASAARLSEAALGRFCRSQHYSGRRSPAELMARLHSAAVGLAGPLTNEAAAQLVRSMVAVLQPLVEQIVHLTRRIERFVESLPDGQIIMSFPRAGHVCAAQILAELGDVRERFPSLDQLASEAGAVPVTYQSGKTRSVAFRWACNHRLRKAVTCLADNSRHANAWARGIYTAARGRGCDHPHAIRILARAWLRVIWRAWTDRKPYDPDLHVGAQKLASEQGG

SEQ ID NO: 124176 - protein, 360 aa, unidentified
MKKNNRESEWKERPERTVGVDLGDRFSDYCVVNRDGEVIEEGRIRNNEEAFRRHWEGEPRQRIALETGTHSPWVYRLLQGLGHQVIVANARKVRAIWENESKNDRQDAGMLAQLGYSNPRLLYPIQHRSVERQRDLNLLRARDALVRARTMLINSVRGLVKSAGGRLPKCAADYFAARVSSALPAELVTATRPLVDQITALTFQIRGLDQAIENLAQRYPEIHILRTAPGVGPVVAAAYVLTLDRVDAVAHSRSIGAFLGLRPKQSQSGESDPEHKISKTGNIYLRRLLVQAAHYTLGRFGPDSALRRWGLKLAQGGKRAKKRAIVAVARKLAVLLHCMWRTGQNYQPFPEQTTAAVGAD

SEQ ID NO: 124177 - protein, 315 aa, unidentified
MVDVPCFIGIDVAKAQLDIALRPAGERWAVPNDASGIAPLVDRLQALHPTLIVLEATGGLERAATAALAAAGLPVVVVNPRQARDFARATGQLAKTDALDARALAHFADVIRPTPRPLPDAQTQELRALLGRRQQLIGMRTAEQNRLVGTNARLAKDIEAHITWLNAGIATLDDDLETMLRASPLWRENDDLLQSAKGIGPVCAHTLLLELPELGTLTRQQIAALVGVAPLNCDSGTMRGRRTIWGGRAHVRTVLYMGTLVATRYNPQIKVFYERLLAAGKVKKVALTACMHKLLTILNAMLKHRTPWQPQEVQN

SEQ ID NO: 124178 - protein, 344 aa, unidentified
MNEVITIGVDLAKNVFQIHGVDGSGGVVIRRQLRRSRMLPFFKKQPPGLVGMEACASAHHWARQLMALGHAVKLMPPHYVKPYVKRGKNDAADAGAICEAVTRPTMRFVSVKGTEQQSVLMQHRSHELLVRQRTMLINAMRAHMAEFGIIAPVGVPQVKKLLRIIADRDDTRLPDVARTCLESLARQFLSLNEEIYAAENQIHAWHRSNEVSLRLESIPGIGPITASALAASITDPEVFKNGRELAAWIGLVPRQNSTGGKQRLGKISKQGDQYLRWLLVAGARSVIRQAKRRGASNPPWLANIIDRKPTMVAAVALANKNARIVWALMKQGGSYQKPVPVPAV

SEQ ID NO: 124179 - protein, 390 aa, unidentified
MFLLGIDIAKLNHVASCIDSSINEIVFSNFKFKNDFKGFSTLLDKIKTFDTKNLIIGLESTSHYGENLINFLFKQHFKVALINPLQTSHLRKANIRDAKNDNLGSLNIAKSLIFAKLNFISEKNINCFSLKKLTRFRSSLIKQRSKAKIQLTSLLDLLFPELQYLFKSKIHSKAIYSLLKKYPSTEEIAALKDDEISNLLYASSKGHFKKEKSIELKSLAKTTVGIKDTSISLHLIQLIELIELYTKQIKDIEIKITDTVNKLDTTLLSVPGISIIACAIILGETNNFENFSSSKKLLAFAGLDPKIRQSGNFNASSCRMSKKGSPYLRYALIFTAWNIVRHSEKFNKYYFLKRSQGKSHYNALGHVAHKLVRILFTLIKKNISYQEEKL

SEQ ID NO: 124180 - protein, 336 aa, unidentified
MNTTQVFEKRKIAVAIGIDLAKDHCDVVAYNADNKICFTKSNWAYPQLMEWLANAQPAVVLMESCKGSMVRARDIADLGHDSRLVKGADVKALRNVTQKNDIRDADYIARLFYVPGTKYVFVKNQRQQSLQFLQNEYKSLQELRIRGGNQIHAGLEEFGCPGSKSKKFIQSRMMAHLEKNAELIPDEVMASFLRRRDMWLNLFEQEEQAKTRMEEIAMTDDDAKRIMTVPGVGAQTAVGMLVHIGGDIGRFKNSGQFAASIGLVPKQNSTGGNITLNGITKCGPKRLRANLVQCGQVILMYADKLKGNFGDWVRKLRDSGKKRGSSRKSVERGLDF

SEQ ID NO: 124181 - protein, 346 aa, unidentified
MEHYAGIDVSLEWSSICVVDALGKIVKEAKISSEPATLVAFFEALGFAVKRIGLEAGPLSQWLHAGLKRAGFEAVLLETRHVKAALSAMTVKTDRKDARGLAQLIRMGWFRPVHAKSIRSQEVRALLVARKQLLGRLIDVELRIRGILRGFGLKVGPVTRKGFEARIRELVTGQATLERIAGAMLSARVALKAEYEKLHKTVLAIVRDDAVCRRLMTVPSVGPLVAITYKSAMDDPNRIPKSKAAGALFGLTPRKYQSGEKDVTSGITRAGDEMVRTALYEAANVLLSRITRFSKLKRWGIDVAKRRGSKRAKVALARKIAVILHRMWVDGSTYRWTETQPIAVQA

SEQ ID NO: 124182 - protein, 317 aa, unidentified
MTKIITLTAGIDTSKAKLDIAVHGHTERWQVVNAPSGWRSLAVDLAKAGVTRVGIEATGGYERRVVLSLRAAGFTVLVLQPIQVRAFARVHLRRAKNDALDAVLIAACAAAIEQPRTEPDARLADLAAHLTYVEQIEEDIARLKVRLEHVDGLRLRRLITTDIARLKARRCAELLRIVRTLREHRDLARRLDLVLSVPGIGERTALALIIRMPELGQISREEAAALAGLAPFDDDSGTHKGQRHIAGGRGRLRRSLFAAALPAAFRWNKALIALYARLIARGKVHNAALVACARKLLIYANTVVQRGTPWTERPAET

SEQ ID NO: 124183 - protein, 347 aa, unidentified
MQHIAIDLGGVKSQVCVRSQDGQILQERKVETLRLGAMLEREPASRVVLETCAEAFRIADLAMASGHEVRVVPATLVKTLGVGARRIKTDRRDAQVLSEVSCRIDLPSVHVPQEIARVRRNMCAAREVLVSCRTAMVNSVRGWARTQLLKIPCGDSETFPKRARKAALASPEGLPEYVERTLRALDSLTEQIAAADEALEQLAKEDPVCKRLMSVPGVGPITSLRFAAALDDRTRFPTAHAVQGYLGLTPEKHSSSERQQRTGITKAGPAPVRRALIQAAWNFRRLRPLDPIAVWATQIEQRRGKFIATVAVARKLAGVLFAIWRDGSTYQAHHRLPAPTSRAPTSP

SEQ ID NO: 124184 - protein, 344 aa, unidentified
MDNHTQYSGFAGVDLAKKVMQIHFVSGDGEITDKQVKRAEFLDFFRNRSKCLIGMEACGASQDWARKLEAMGHEVHLMSPKAVKPFVSGQKNDYNDAIGIYKAMFNGVRRVPVKSTEIRDLQTLRRIRSQVTKDKVKEINHVRGLLAEYGIVMGKSITAFNKGISSALESLKERGDVSPLVAEELQTTVESIKTKIERQKRLDREIEQLARGCKNYENFLKTPGVGPFTAAMLCVLLCDPAIFANGRQFAAYIGLAPRSRGSGGKNFIIGIPSKFNCDSESRAVFVECAQALARYKNKSPWVDGILRRKPKKVAVIAIANKLARQVWAMANKGESFKQMTILTA

SEQ ID NO: 124185 - protein, 326 aa, unidentified
MDVLGIDLAKLSFDATLLLQTGSSHYAAFPNTPEGFLQLATWLREHNVSNLHACMEATNIYWQALASWLHAQGYSVSVVNPARIKGYAMATMQRNKTDKLDSAIIASFCAKHQPSLWQPTSQAQQRLRALTRHRDDLLQTQLQQQNRLRDTTDELVRSSLESLLKAIASQRETVQEHITQQLREQESFQTNLALLTSIVGIGAVTAAKLLAEFADLDQYASAKAAAADAGLTPSHYESGTSVRRRSKLSKMGKAGIRAALYWPAITAMRCSPAIKAFAHRLAARGKPKMVIIGAVMRKLVHICYGVLKHQTPYDPAKAFGHSTPAT

SEQ ID NO: 124186 - protein, 324 aa, unidentified
MNKSKKFFGIDISKDVFDVMDQADTHYQFKNDLSGFRKFGKILTEDSHCVMEVTGSYYQNLATWLFSKSIDVSVVNPLSVKRFIQMRLKTSKTDKSDARMIRIYGEYENPGLWQPPSQYIIEANELHKLIELLLRQRTALKNKMHGLESKGISTSAVVTSVRRQIRNLNKEVSSLEIKLENLIKVWQVDLLTRLCSIPGIGKRTAIFLIVLTQGFERFENSRQLISYFGLNPTIHQSGSSIRGSSRISKTGNNHIRNLLFMCSFTACEHNKSCREIYQRIIAKGKSKKLALIAVANKLLKQSLAIAKSGLLYDENFKSVYVNVG

SEQ ID NO: 124187 - protein, 431 aa, unidentified
MNYNQNKKIAQISSQTLIIGVDIAKFKHVARAQDFRGIEFGSPCQFENTKEGFEHFLKWISEIKKEQRMDKVMVGMEPTGHYWFNLAHILKENGIKFVAVNPLHVKKSKELDDNSPTKNDVKDAKVIAQLVKDGRYAEPTIPQGVYAELRVAKKIRDLLTEDLQTVQGQVHNWIDRYFPEFLSVFKKWEGKAALQFLKLYALPHEIAEFNEDELLIHLRKSVSRSVGINKIRELKQAASKSIGLRQGAEMARLELKTILAKYELIQLQFEELDAKIDGLLDEIPGVPQMLAIKGVGRDTIAGFFAEVGDLSDYTHPRQIIKLAGLSLKENTSGKHKGRTTITKRGRKKLRALLFRVCMILVAKNTAFKTLHAYYTQRPDNPLKKMQSLIALCNKLIRIFFSIGKKQFEFDEGKMLRDIPHLSVKKNAEMAA

SEQ ID NO: 124188 - protein, 397 aa, unidentified
MYIVGIDIAKRKHEAAVIDGEGAVIIKPFSFTNNCSGYNRLLAMLTKAKLPLDEVSFAMEATGHYWLALFTRLQKEGFCVQVINPVQTNSIRSFYIRQAKTDPRDALLIAEVIRFGHFSESTLHPENIYELRELCRGRHAIVSMQADVKRKVVALLDQVFPEYETAFTNMFSDTSMAILQTCPTPKELSEMPLEELCHLIEVSSRKRFRMAKAQELQALARGSFGFAMAGDVFSTMIRLYAKHLDFLKQQVREMDRKIAEIMDTLDTPITTITGIGPTLGAYILSEIGDISRFSSAAKLAAYAGIDPTMRQSGEYNGVRNRMSKRGSPYLRHAIWLAASSAVLHDPALKLYFQKKRDEGKPYMASVGHACRKMVSIIYAVMRDNKAYTPYIPNEISA

SEQ ID NO: 124189 - protein, 370 aa, unidentified
MPHVTSIGLDVHARSVSACAFDPFTGEVTQRVFGTDAGEIAEWVKGFESPKAVYESGPTGFALCNRLRELGVDCVVGAVSKMQRPAADRRRKNDRRDAASLARLLATHNVVEVWVPPAEVEAARDLSRSLDDAREDLQRARQRLSKFLLRRGCVFDEVDALGRRRGAWTVAFWRWVQGLRPAEPAAAAAFDHHAACARCAESDKRALEGRVAEAAATERWRPAVEALSCIKGVDVATAFCLAAEAGVFSRFRSAGAYASWLGLTPSEHSSGETEARGGITKAGNSASRRALVEAAWHFQTCSPKPKGAPRGSSVPAAVKRRCDEATARLCRRHEALRAAGKRPCVANVAVARELACWVWEIGCRAEGTIS

SEQ ID NO: 124190 - protein, 324 aa, unidentified
MDERGRAVLKKQLKRDQVASFFANLPPCLIGMEACGSAHHWARKLTELGHTVKLIAPQFVKPYVKTNKNDAADSEAICEAVARPNMRFVPIKNGGQQAVLALHRARQGFVKARTAQANQIRGLLAEYGIVIAQGIGHIAKRLPEILEDGENNLPGTFRQLLDRLGNHLKELDRQVSALEVQIQSWHRENEASKKLAKIPGIGPITASALVASIGDAKSFENGRQLAAWLGLVPRQHSSGGKQMLLGISKRGDTYLRTLLIHGARAVIRVAERKVGHADSWLARLMDRRNKNVAAVALANKNARTVWALLAHARDYQASYAPTAA

SEQ ID NO: 124191 - protein, 439 aa, unidentified
MPTPCLPVLDPNAAAIDVGSEQLHVSIAGGPPKVFETTTGELHRLRDYFLEQGVRTVAMEATGIYWLCPYEVLEKAGLEVVVVNGKYVKNLPGRKTDMSDCQWQATLHAHGLLKPGFVPPEHIRRLQDYLRLRSDHIMMAGSHEQHMQKALDRMNLKIHEVLSDLTGMSGLKMVEAIVAGERDAEVLVALCDPQVQKHKAKRLRASLEGTWKDEHLFALRQALELWKFYQKKITECDQAIEKVLQAVAGPEDPKNPAPPAVKRGGVNAPQIAELHALLYRLCGGKDATQLPGIADYVLLQLLGEVGTDLHKHWPTEKHFTAWLGVAPGSRQSGKRSGSQRRARNRAGRLFCLIARSVGRSVDKALGGFYRRLKGRRGGLVANMALARKIAELFWRLMVHGTQYVEKGLKKYEEQVAQTEQRLLRKLARKYNLVLKPAAC

SEQ ID NO: 124192 - protein, 452 aa, unidentified
MSNKTKVDWKALDIVHPHAAGIDIGGSEHWVAIAPERDQQPVRSFQCFTADLEQMADWLVDRGVRSVAMQSTGVYWIPVFEILPQHGLEVFRVNARHTKNLPGRKSDIAECQWLLKLHTFGLLNNRFPPSDEIRTARTLWRHRGGLVAQASSAIQRMQKALTEMNIQLANVLSDLSGVSGRRILQAILKGERDPKVLATLADPNVKASRTVIAKSLQGNWRDELLFVLQQEVAMYRMYQERMAACDQKLQGQLQAIESKVDVAAQPLGPRPKGKRARGNAPQFDLRTELYRITGVDWTLVDGIDVPVAQSVIAEVGVDLSAFPSEKHFANWLGLCPTNQTSGGKVLNRRTPKVVNRAKIALRQAASTLIRSQSYLGAQYRRLRTRLGAPKAITAMARKLACLFYRLLTHGKPYTDKGAEFYEAKYREQQIRFVLHRARQLGLEVIQPTKKLA

SEQ ID NO: 124193 - protein, 339 aa, unidentified
MKLYGGMDLHSNNSYMVLIDESGAVVQRSRVGNEMGRVLQTLEAYREQIDSLVVESTYNWYWLVDGLKAAGYQVRLAHPSALQPYEGLKYSDDRSDAHWLAEMLRLGIVPSGYIYPEAQRPLRDLLRQRSFLVRQCTSQLLHMGNILSRNRGRKTSRQQLRQMTVAEVRELFPDRERTLAVESSLRVIEVLEQQIRAIEKQVLERIKPEAGFRNLQTVYGVGPILAMTIWLETGEIGRFKQVGDYASYCRCVTSTRISNAKKKGQNNRHNGNAYLAWAYVEAATYAARFYGQAARFVERKTAQVNRTLALKALAHKLARACYYVLRDQVRFEPARLFGG

SEQ ID NO: 124194 - protein, 427 aa, unidentified
MHSRKATMKDWKEITHYAGFDWAREHHVVVIVDRAGETVADFEFEHSLEGWKSFGEKTAAWPNLAVAIETNQGAAVDQLLQRDYTVYPVNPVAAESYRKRKAPSGNKTDHVDGWGLADALRVDGQGWKALQPLDPLTQKLRLLCHDEVSLIQQRTLLVNQLQQALVEYYPAALEAFDDWTDSFTWAFVIEFPTPQGLVKAGKRRWEKFLHTHKLWRPQTSERRLGIFAQADQFKASDAIVEAKSQLAVSLCKLLRTLDQQLKQYRHQIEKLFKEHPDHDLFGSLPGAKKVLAPRLLAAIGNDPERYGSHQVLQAFAGTAPVNYQSGQVKKTKIRWACDKFLRHTVHLWSDCFRKASAWGQTYYGKKRAEGMSHACALRCLGQRLLKIVFRMLTDKKPYDAELHALNQKKHGSWVLTLVEKPTAKAGE

SEQ ID NO: 124195 - protein, 423 aa, unidentified
MMKLKYSICCGLDVHKNVIVATIVTTNKDGISEYLQKSFSTINSDIQRFHNWLIENNCYHVCMESTGKYWIPIFNYLENDIDVCLTHPKYVKAIKGKKTDKKDSKWIADLYKFDLVRCSFIPPKDFRQLRELARYRFKLVCMKSSEKNRIQNCMTISNVGIASVLSDPFGKTATEIMSYLLEHTADSMDEKAVRKLIKKGAKSKSDEIIEAIKGYTIETDQAKKLELARGHLEYLDDMITQTEVELYVRIKPYYEFVEFVSTMPGMTELSSTIVLAETGVDMDIFDDAKHLCSWCGLSPANNESAGKKKSVRIAKAGDYLKPMMVQCALAAIKSKKQPYFAIKYGRIKKRRGHKKAIIAIARMMMVCIYHMVSEKKPFTPTDYEELMNPQNHVERVVLNENNVFAYLESLGYDSSKLVKRNDN

SEQ ID NO: 124196 - protein, 319 aa, unidentified
MATESNQPHNQITFVGIDVSKDSLDVAAGGNHRTFKNSPTGFRDLLKWIRKSQDEAFQIICEATGGYERPLVKALLAEGVLVSVVTPARVRSLARSFGTYAKTDKIDAALLVRFGEVTRPKPLTPPDRESQNLTELVDFRRQILDQISILKNQQEHLTPGPLLRSSNRVLRTYQAELKLLEKAIDELMKANGRLWEKFQRLMQVEGVGRYTALGVLAYFHEIGSLSRKQAAALAGLAPYNNDSGNRKGSRSIHGGRTKLRGALYMAALTAAHKNPVLSPFYARLKANGKASKAALTAVMRKLIVLLNHLIKHPEFSLAS

SEQ ID NO: 124197 - protein, 312 aa, unidentified
MQHCITTVAGVDTGKAFLDLAVSPGQAHLRVGNDRAGWVQAIDWLRQAGVERIGIEASGGYERGAMAALREAGFTVILHQPVQVRLFARLRLQRAKNDKLDARVIAAFTALPQTVRPPADPALQTLGEHLVFLDQLGQDIARLKTRLEHQRDPRLAGLLKADIAALKTRQRDERRRLEQAVRTHKTLDRRLDLLLSIPGIGLPTALALVIAMPELGTINREQAAALIGLAPFDHDSGKHRGQRHIAGGRARPRQAVFAAALPAAYRWNSQLIALYQRLTAKGKPHKVALVACARKLVIFANTVLQRDRPWTQ

SEQ ID NO: 124198 - protein, 441 aa, unidentified
MAMRKRDDDLVFPNAAGIDVGGSSHWVAVPRHSCDDPVREFGAMTDDLNAMADWLIACGVDTVALESTGVYWIPVYEVLEQRGLKVFLVDARQMKYVPGRKSDVQDCQWLQRLMSQGYLRAAFRPGEEVCVVRAVARQRDVLLVEQASWVQRMQKALVQMNIQLTEVPSDVMGATGHASIRAIVAGERDPKTLARHRNMRVKASEQDIAKALTGNWRDEHLFVLRQALAMYDDIAGHLGECDEKLQSLLAELGQRKVDLGKAPRANSKLRLEFDARQILANWAGVDLTRINGLGLTATMKILSEIGPDLSRFANVKHFCSWLGLCPGTKISGGKVLSAKTKRSANRVRQALKMAAMSLSHSSSALGAFYRRLCSRMDKPRANTATAHKLARMVYFMLTRGEDFVDKGQLHYEEQQRQRSIAALKRRAAALGFAIMPSATPA

SEQ ID NO: 124199 - protein, 431 aa, unidentified
MSKRRYSATEFEEVNWVAMAEQVAGQRIVFGVDVAKDDFFAALLDAERAPLTTVKWTHPQHTRALVEQLVRLSETAQLDVVMEPSGTYGDALRWQLVSLGLDVYRVSPKRVHDAAEVYDGVPSLHDAKAAYLIGRLHLEGASQPWGERSPQRRALAAQLKLLAVYKAREQAGISRLEAQLSRHWPEVIRVLEPASVTLVKLIATYGDAAQVVAQREAARALMRRTGRGALGGEKIEDVLASAEHTLGMPCVEAERCLLQALAQDLLDTREKLHGVERDLLGQVAADVTLARMAALVGKTTSAVLVAVQGAPQDYPNAASSLKSLGLNLKEHSSGKHKGKLKIAKRGPGVARYYLYFASLRWIHNDPVVQRWYRRKVQRDGGLKGKAIVAVMRKLVKGLWYVAQGAPFEPRKLFNLGAGDDGLRAQVHSHRQ

SEQ ID NO: 124200 - protein, 407 aa, unidentified
MNAVGIDVSKGKSMVAALRPMGEVAFLPREFLHTEVGLEQMAYAILALGEDTRVIMEATGRYHEPVAAALHEYGIYVCVLNPLFIKQSGGGSIRKVKTDKADAIKIAKYGLDNWVDLREYTPMDTVRQQLKLCSRQYDLYMKTVISLQNNLISLTDKTFPGVNELFSSPERADGHQKWVDFVMTFWHCDCICRVSEKAFTERYQKWCKRKGYHFSVKKALEVYAGSCGHFTTLPKNDNTKLLIISAAQQLLAGKMTLAALRAEMTRLARQLPEYDTVRAMYGVGDKTAPALMAEIGDVRRFPRRSSIVGFAGIDPGVDESGKHSAKSVPTTKRGSPHLRKTLYQIVCTYLKKSPADEPVYQFLDKKRSEGKPYFVYMTAAQNKFLRIYYARVKECLEAFDVQTTEQK

SEQ ID NO: 124201 - protein, 343 aa, unidentified
MQAPRHIGIDLHRNQFTCCVRLENGRNYLTEWKLEDLPRFVKKLRPNDEIAVEMTGNTRLFRDAIARHVARVVVVDPNQFRVISHSVKKTDPNDARNLALYLEKDLLPEVRMKDKTQAQLASLTQTRDTMVKLRTALKNKINNILSAHGINLEKEALSSEKKLNEVVALHFDPMVRIELKVIVEQIRSLNQSIVELEKTIADEGSKLEGHKNLTSIKGIGPLTGSILLSVIGDIHDFADEGKLAAYLGIVPRVSKSNETERTGRITKRGSKLGRTALVQCALIAQRYSPYLQRYYQRMKAQTHSTGKAIIALARKLLGIIYRTLKNNWVFEDFPNFVLAEAAQ

SEQ ID NO: 124202 - protein, 453 aa, unidentified
MLKQKNKKANGLSSAPVLEPNAAGVDIGATEIYIAVPPDRDAQPVRRFATFTEDLIAAADWLQRCRIETVAMESTGVYWIPLFQILEARGLKVCLVNARHVKNVPGRKTDVSDCQWLQYLHAVGLLRASFRPEQQICVVRSLMRYRESLVQMAAVHLQHMQKALDQMNLQLHHVISDLSGTTGMAILDAILAGERDPIKLANLRDWRIRASEATIVKSLVGDYRREHLFTLRQSLIAYRHYQKQMADTDVEIEQMLVEFSDGAGPDAPALPQPKDTHKPRRNDLRFDLRAHLYRIFGVDLTAIPGINAMTAYVLLSEVGRDLSGFRSAAAFASWLGLCPDNRVSGGKVLSSRTRPVNHRLAHALRLAAQALFRSQSWLGQYFRRMRAKLGAPKAITAAAHKLARIVFHMLTTGQAYDETVFAQQEVQNNQRMQQRLRQQAKQYGFQLVEITAV

SEQ ID NO: 124203 - protein, 422 aa, unidentified
MKKRIYRATELTKVNIEQLAEKVKGKRVVFGVDIAKQDNYGAVMLWAEKEPVMTIKWRHPERSSQMVQVLKDLGASTVEVAMEPSGTYGDPVRKLFWEEDIAVYRVSAKRSHDAAEVYDGVPSWHDAKSGAVIGKLHMDGASTLWEMESFCRRDLTAVVNTMDMIQQQYQQNTHRIEALMARYWPEAGEIVDLGRATFLELLGGFGSPQAIVSSQDKARQLLRRIGGCFLGQEKIDRLIASARTTIGVAMTEIEAEEAGFLARRTRQLQQELRQAKKRVEVQGAQRKSIVAMSKVTGKATAAVLVAGGGDPTEYPTPTQWVKGLGLNLKERSSGRHKGRLKITKRGSGRARRWLYFVVLRFIQHDAVVKAWYERKIARDGGVKMKALIAIMRKMAAGLWHVARGSEFNAHKLFDVRRLGGIC

SEQ ID NO: 124204 - protein, 374 aa, unidentified
MRIIGCDLHARQQSLAMLETTTGEVVNLTLMHEGNEVREFYSELPRPVLVGIEATGSMQWFLNLLEELGIECRVGHPATIRAAAPRKQKNDRLDADLILKLLVENRFPAIWLPTKELLDLRALLLHRHQWVKIRTRIQNALQAIALANGLRRGPGLWSYDGQAKIAFLPLPPHASYRRSALQALYRKMEEEIENLTKQVAEQADQRTRARRLMTHPGVGPVTALATDVFLGDPGRFVDGKALASYVGIIPREYSSGGNQRLGGITKQGSPLLRFLWCEAGAHAVRKDPELKRFYRRKLVQKGLGRARVAVARKLGIRLWIMLRDEIDYEEFCRRGQKHQSGAACAGMLEVAYGANSHRPIDWATRPPWIAREFG

SEQ ID NO: 124205 - protein, 378 aa, unidentified
MKNDNRYVGLDVHAETIAVAVVETDGEVRFLGAIPNRAETVRRLVKRLGPANRLRFCYEAGPTGYVLYWQLTGLGAHCDVVAPTLVPQKPGDRVKTDRRDAEKLAVLYRGGHLTPVWVPDQAHEALRDLVRAREAAKSDQLRARHRLQKFLLRHGRRPPQGVKAWTQKHLDWVRREVHFEALAQEAVLVDHLAEVEHARERIRRLEGAIDTAVKAAPASLRAVIEALQGLRGIAMVSAATIVSEVGSLSRFRKPRQLMGYSGGVPREDSSGERVRRGGITKTGNAHLRRIVGEAAWSYRHRPTVRGELLKRQAGLSEEVKAISWKAQHRLYSRYRRLIGKGKAKQQVVTAVARELLGFIWAIGVHVEPQHGTAARRAA

SEQ ID NO: 124206 - protein, 343 aa, unidentified
MEIHTVGIDLGKTLFHLVGLDSSGSVVVRKRCSRSQLLAFTANLRVQRIGMEACSGSHFLARALRDQGHNVRLMPAQYVKPYVKTNKSDYIDAEAIAEAVQRPTMRFVPIKTEDQLDLQAVHRVRERWVMRRTAVVNQIRGLLLERGLTLPKGRSHVDQALPDILEDATLRLSDSFRALLAQLKLELDQLSARVEQMGAILQHTAKENEACQRLTTIPGIGPVIATALIAAIGNGSGFRRGRDLAAWVGMVPREYTTGGKQKLLGISKRGNSYLRKLFVQGARAVMQHRHNQAPGLSAWLAQLLARSHQNVAIVALANKLLRMAWAVLCKNERYRPPAAVASS

SEQ ID NO: 124207 - protein, 367 aa, unidentified
MFHSDYTVGCDAHKHFSLFAVLNGNGDPLQRTRVDHVPGAIGAFLAQFPEGTPVALETVGNWYWIVDEIEEAGCIPLLAHAAKAKVMMGNIHKTDKLDAQGLATLLYLGKLPSVWIPPADLRDERELPRTRMTFAKHRTMVKNRIRSTLAKYALSLDTASDIFVPKWRPELEAVLQKLPAETERCVRQQLQLLDALNDHIQQLEDRIVDRIQTTPTIQLVQTVPGPAKVLAIVIDRELGSIDRFPSPHHFASYCGLVPKLSASAGRAHYGRMVKQCNTYLKWAFIEAANVIVAHRNAPNWRGKYVVHLYERIRRRKGHSVAVGAVARYLAESTYWVLKKSEPYREPPYWTPAGMNSPVSLSEGQARA

SEQ ID NO: 124208 - protein, 370 aa, unidentified
MNRLFVGMDVHKEKIVVVGLPEEGNHPVCREEFGGNDLSRLVKRFRQLAKSHRVEACYEAGPCGYGLARALLRAGMECRVAAPSLVPRRPGDRIKTDGRDARELALAFRANTLSFVRIPSREEEAVRGLIRCREDIAKEVRRIKHVIAHWLLIHEQRPPKGVKGWSQAHWRWMRGLELSSLDRTVLDHYLDVLHLLVERLNQIEQQVVALAETAPYRERVTRLRAFKGFSPLAAMRVIAEVMEFRRFPRAAAFMKFTGLVPSEYSSSDRVRRGRITKAGNSHLRCVLVEAVQRGRRDAHPGRDLLKRLACVSGPLREVALRCLTRLHHKFWKLTRRGVAGGKVKVALARELAGFVWAMMTLPETPDAAVA

SEQ ID NO: 124209 - protein, 450 aa, unidentified
MSPLALDVVTKTDKTPVLGRMLSKYVGRKTSSIENGITKARNHSRQRGNIMRVVFGIDVSKASSEVAILVNGEKVHGYTIPNDAIGFNRLLGDLRTVYQPEIVFEATGVYSRRLQAFFEDNSYTYTRLNPLESKKQLDSLRVRKTDKIDAEKLATSQFILNRKPSYVQEALYQELRDLSRFYQNLTEDIVCSKNRLHKVLQVTFPELENILSSPTGKQYWNLVMAFPCNSFVLELDDAALRAIIRQSTSKRISEKRVTYLVDKLTKLANHSYCAVKKTSPMMEEVKYYAGELLRLSEYRQSVLEEMITLAQPLPEYEILLSIPGIAETTATSIIGELGDIRRFHSANQINAFIGIDLRHYESGDFLAKEHITKRGNPYARKILFKCIHNIASASHTNPCHIADFYEKRKRQSQVTSTKPHTIASIHRLIRTMYYLITHNKLYDYTSTQNR

SEQ ID NO: 124210 - protein, 467 aa, unidentified
MARFIGGELQAEFMGRLRGIDPDRCLVVPVDVGKSMAMSLVADHYGEVVTAPFEFDLTESGVANLIEAVAQAERSRSAVVVRVGVEAAGHYHRTVVARLRRAGLEVVELNPGAVKQARSQQLLRALKSDARDLGAMAELLTRGAGRPPEERDQALLTQVAWTAHRRRKVKARTALTNQVLAQLDLIFPGLQECFTAGVLSTKAGRVLVRDLVEPSRIKRLGDEGVRRFVARRGVQMSRPKAASITAAARNALSLSEEELVARTAVFSADIVLFDYLDTMIAEADQQLSEVLGATPAAVLTSLPGISVIRASNYGAEIGDPWRFRSAEAAYRFSGLVPASYESAKKARPGQHISKEGSVELREAILDLGKGLAQFDPDFAEYKRRLVSEGKKRSVAAVAVGHRAHRLAFSMLRSGHPYDRDQWARSVATGRSVMAKAPRETHQNDVTCPSPVLTFTEDLIEHKHALLR

SEQ ID NO: 124211 - protein, 329 aa, unidentified
MNYKWFVGIDIAKKTLDVVLYKKELQKKSPYCQILNNSDGFNNLMKWLKEQNVVLKHTLFCMESTGIYGMALVNFITEKVNYCLESPLHIKRSLGLTRGKSDKIDAFQIARFCYLHRDELVPSRPGSKIMLTLRSLINERERLVRTRTIDKTIVKELNYKENKSCIERAKNRINILTEDITQIEKEIKAVLRENLDIERNYNLAKSVTGIGLVNAVMFILFTNNFSSITDARKYACYSGIAPFEHSSGTSILGKTRVSKLSNKRIKVNLTNGARSAIINDPELKLYYKRKTDEGKEHGTVMNAVKFKLITRVFATVKRGTPYVKLRQAG

SEQ ID NO: 124212 - protein, 400 aa, unidentified
MLSIGIDVSKGKSTVCGMKPGGEIVYTPFEIQHTREGMSELVSLLHNSGEEVRAVLESTGSYHCPVVAALLENGIFVSVVNSLRMKRFCSQSIRKVKTDQIDAMQIALYGLAYWQELQPTKLPEDTYRELQLLARQYYQMTSLLIKAKVDFNAICDQVLPGMQELMNDHAGRHKLSDFVLRYRHTTHILEMGETRFRKDYCKWAEKKGYRNCERMAALIFATAQNGIPVLPNAPSTQIVITEAIRVLHTVEASRDAILTQMQALAKTLPEYSLVREMPCIGDTLAPRLIAEIGDVRRFHSKRALIAYAGIDAPPYQSGKFCANNRHISKRGNRYLRKTGYEVMQSYVMHKPANDPIFTFIEKKRGEGKSGKLAMVAGLNKFLRVYYGKVTELYRSLPAIE

SEQ ID NO: 124213 - protein, 358 aa, unidentified
MKTIVLNQEQVVIGVDTHKWEHVAVALNSVGRRLDGITVPATAGGYRAMLEWAMSVGIVAMFGIEGTGSYGSGLSRFLRRNGHTIVEVSRPPRKGERRLSGKSDPIDAEHAARAVLSGKASAIPKLGEGAVETIRLVKIARDGAVRAQSQTMITLKSLLVTAPDELRGELEGLSDFKLVTATAALVGSHRGDAASAVRHVLAALAGRWIHLHEEVKAHTTVLKELTQAAAPNLVAAFGIGPDIAAELLVTAGTNTSRIHSEAAFAKMCGACPIPASSGTSKRHRLNRGGNRQANAALYRAVIVRMRWHAPTIAYVQKRTADGLTKREVIRCLKRFVAREAYHLLPPGPETILTAADAA

SEQ ID NO: 124214 - protein, 333 aa, unidentified
MKSYFIGIDISKDTLDVCIMSDSEEKDIFFKVENTLSGIESMISRNIPENAQLWYCFENTGNYGLLLARILESQEISYYQVPALEIKLSQGIQRGKNDRVDAWRIAKYAKTYCKELKPYLLPSKELLKIKNLLTYRNHLIKVRTQFKNEIKAFYQINKIADVSFEINDIMGHIQQLDKNIALVEEKIKQEIHNQQHLNRNFEKITKVKGVGFLTAAYMIVLTNNFTSFQNPRKFNCYAGIAPFEHTSGTSVQGKTKTSKLRNKRIKTILFNGANSAVIYDEELKSYYQRKKQQGKAHNSIINAVCCKIVYRIFAVVKREEPFVNLTRYNLHMS

SEQ ID NO: 124215 - protein, 476 aa, unidentified
MAQQRKARSALVPIPMLSQETLYIGVDIGKFRHVAGFLSRTLLARHGRFEGCPTFAFEQSREGFRSLVERIRELVPLEQVMVLFEHTGHYHRLLEQYLLELDITVYRVHVQERPKGMLKTDKRDALRLANLLYTQLELGAQVEDKMQLVRRAVAPTGAAAQLRGLIRHRYELSHHGTQLKNKLTAICDEIFPEFTQVFHDPNRPTALSFREQFPPPTALATASLSALQALRVRNFPSDAQLLKLQQLARETIGTKEVDRQKGLLLEQTLLLKELRLVQEHLALLQTEICAIVTNCREGQILLSIPPIGHVQAATIMATIGNIANFEKASELKSYFGWAPRRHQTGVTFDRTKLTRTGVRPVKQMLFLMAACATTMDCEWARLYHRLLPRLASYDERIKDYRGKLKVIGRIAGQMAAMIFALLKTDQELLSQVPAGQEAPPPMLYDPAIHRRHQEGHYRSLKPGTQPRKLIQLPKHS

SEQ ID NO: 124216 - protein, 360 aa, unidentified
MNATTVAVDLAKSVFQLAVADEHWHVIDTQRLTRTQFERWFANRDVGLVVMESCGSAHHWARWLNGLGIDVKLLPAQYIRAYIKRNKTDAVDAAALLEAARSCDIRLVRIKSVEQQALQGLHRIRSLWMGTRTSRINALRGFCREFGIAIPVGARTGIEAISRVLADPRSAVPDMILGTARLLIEEIRLLEARIAQLERELAEIARHSPACTTLLSIPGIGLLTATAMVAATSGDVSHFKDARHFASWFGLTPREYSSGSSRYLGRISKKGDRYLRMLLTHGARSVLRAAAVAVNAGREVCGIRQWALAVQQRTHHNKAACALANKLARICYATLRDHAPLAESERISKKLNRESFAMPA

SEQ ID NO: 124217 - protein, 341 aa, unidentified
MQITTIGLDIAKNVFQVHGIGAAQKVIVRKQLRRGQVMAFFEALAPCLIGMEACATSHHWARELTKLGHMVRLMPAKDVRAYVKRNKNDAADAEAICEAVRRPTMRFVRIKSAEQQGQLMLHRARDLLMRQRTQVINALRAHLAEFGITAAQGREGIKELLAVVVQDEGSRLPVDAHASLTVLAAQLQSVQTMIGTLEKRIIAQHRSNEASKRLETIPGIGVIGATTIAAVVPDPRVFRSGRDFAAWIGIVPRQDSTGGKQKLGPISKQGDQYLRRILIVGAHAFLRRARQQPDKYPWLTQLLARRPFKVVAVALANKMARIAWALLAKGGTYRAPQLAAV

SEQ ID NO: 124218 - protein, 352 aa, unidentified
MHMIAFDSHKRYTVASVQSMEGQIIKETRIDHDRGNIVSFLAQWDKGSPVAVETIGNWYWIVEEIEHAQMQPRLVHARKAKLMLGMINKTDKLDARGLNRLQQTGTLPTVWIPPLGIRDKRELPRTRMVFAHQRTKLKNRIHSVIDKYGLQNKFTDISDIFGKRGRQMIQQSLKLFPEQTRYALETLLHHLDEVERQAGKIEKRMKEVFHPNEETKLLMTMPGIGFILAVVISLEVGDVGRFSGPERLASYSGTVPRVHASGEKVRYGRLRPDTNRYLKWAFCEAGSSIAMNRNKWPHRHVSKVYARVRSRQGHAKAVGAVARHLAETTYWILTKKEQYRERGVSRVSLAEA

SEQ ID NO: 124219 - protein, 344 aa, unidentified
MSNLDSCGIEVSAKELVIQLRRRGELEPLRRFTNTPEGREMVLRHLREAGGVVRVCLESSGLYGLDLSLLLSAAKGIEVMVANPRAVRHFALALMKRSKSDPVDAGVLEEFAARMPFQAWQRPSPRALGLHFLARRLHELVEIETAEKSRQHPAGISDATPTAVRRDLARSLRAQQRAIQRLTRHARQLIAQDPVLNERFELLDSIPGIGETSALQLLGELAVLAPDLDTRQWVAYAGLDPREYTSGSSLHKKPRISKAGNKHLRRALYMPALVAVQHDPHLGAFYQHLLAKGKLKMQALVAVMRKLLHAIHAMFKKHQPYDGSTLFRLPSTLTQEVPCAPVAL

SEQ ID NO: 124220 - protein, 366 aa, unidentified
MGWMAPWRHRCAKMVVVKDHQQQEPSMGDITTIGLDLAKSVFQVHAVDEVGRIVMRKRLRRSQVLAFFAGISPCLVGLEACATAHYWARELIALGHEARLMPPNYVKAYVKRNKHDVADAEAICEAVRRPSMRFVPVKTVQQQSALMMHRARDLLIRQRTMLVNALRAHLAEFGLIEAQGMHKVARLIAVVMDEEDGRVPDIARQVLKVIVNQIEDTQTRIAGLETQVLAWHKSNPVSQRLATIPGIGPIIATAIAATVAEPNVFRSGREFAAWLGLVPRQSSTGGKARLGGISKRGDSYLRRLLVNSAHTVLLCSKQAKTDPWLTSLLSRKPRLVAAVALANKTARVAWAIMSRQDTYRHAAVPA

SEQ ID NO: 124221 - protein, 350 aa, unidentified
MEQGYHIGIDLHKRFSQVAVLNEKGEVLDNRRVDNDPPLLIQHLSPFAKETPVTLEATIGYEWMSDLLAENGFEVNLANPKKVRLIAEATIKTDKVDAVTLAQLERTNFLPTAYLPPPEVRDTRELLRHRMKLVNLRKGLKNRIHAVLAKRGVLFYPVKDIFGKAGREFLSSLQLPSIYRKEVDGYLSLIDQIDSIIKKREKDIKNQVVKENKEAQLLLTIPGISYFSALLLVSEIGDIKRFPSHKKLASYTGLTGTISESADKTYQGSLKKDSNKYVRWILIEASDHAIKKDPGLFAFYRKIAYKKGNNKARVAVAHKLLISIYFMLKNNQVYQLKKPSGKPLFCHGRQ

SEQ ID NO: 124222 - protein, 338 aa, unidentified
MKLTRIGLDTAKQAFQIHGVDAHGKTRLRKQLARARVLEFFANLPPCLIGMEACAGTHYWARELGKLGHTVRLMAGQFVAPYRKSGKNDANDAEAICEAVGRPNMRFVPVKSGEQQAILAVHRARSLLVGERTALVNQIRGLLGEFGIVVAQGIDRLRRALPEILEDGGNELPGLARETFAELLEQLRATDVRVAHYDRRIEALAREMKSAKRLMAIAGIGPVTATALVATVGDAKVFSNGRQFAAWLGLTPRQHSSGGKSKLGRISKRGDVYLRTLLIHGARSALRLTAKKTDPKSRWAECLKQRSGNNIAATALAAKHARVIWAMLARETEYRLAA

SEQ ID NO: 124223 - protein, 523 aa, unidentified
MAHSATRKRSRVRRVDVVQKPSGTFHPRVQKVGPEHFGIVAIDCAKARSKWMLADFYGNVIVRPTLLAHNRPALEAALDQLRQAIRERDLKDVLIAVERTGRYHRTVQRAFANAGFDTRVVHPFATKQFRQPADPGNKTDDTDLAAVHRAAVSGFALVEAELDEAWVTLRLLIRHRRELVRKSAMLRSQIREHLDAAFPGFAANFADLWDRDCAWHLIRHFATPADIQAAGLDGLSRSLDAADVRCQRRTLETILTWAEQAAAPDLATAARRRFALALDDDLVQKAREIQAIERDIAAALGRTPYVLLLSFPGVNVVSAADFAGEMGPIEHYANSRAITGRAGLRPSRYQSDAVDRPNGPLVRCCNRKLRAAILRVADNLIKCNHHFNILAHQWRELKKDPRHTHVKVALRFCRIAYQIVAGRQVFHHPCRQERHYVLAKLMAFQREHDTGSAESLRDLQAALEQVPVREHRAEAKPLHEELNTIQRGGRRGPQLLGDILPIVLARLGVGDVQSRASGEEDPA

SEQ ID NO: 124224 - protein, 410 aa, unidentified
MAERFVGIDVALHEHRVAVLDRDGEAVGQSFTIAASTDGVATLLRTLDARAATAAQTLIGLEASGHLWENLEAALVGAGYRVIVLNPLQTRRYRDVVRRKAKTDDIDAHVIAGLLRSGAAQASYVPDEPIQSLRELARLRARLMADRQDYLRRLVAQLDVVLPEHHAVLGDLLTARARGILAQFPTAQHLATATPRAIRRAAADAGARGFALDDATGVRDSARRSLYSGKAAAARAHVVRTLVGQLERLTTAIDEVDRAATTLLPPSDPGTGPSDAELLQTIPGIGPQTAATLLGELGTLTRFTDARALVAYVGFYPVINQSGDRAATPRLSRVGSRLARHSLYLAAVNAVRRSGEWRTIYLRKKAQGKTGKQALVVVAVKLLHAVYAMLKHRQPYNPSRLLVASATIGT

SEQ ID NO: 124225 - protein, 342 aa, unidentified
MTEYKRIGIDTSKAVFTLHGIDQQDRPVLRINLRRPQLLVFFKKLPPTEIAMEACGSSHYWARELIALGHDVHLIPPQYVKPYVKRGKNDRNDAEAICEAAGRPGMHFVPVKSVTQQAQGMVLKVRETLVGQRTLLINTLRGHAAEFGVIAAKGLHQVGPLLDAIEQETAIPPEAKDMASLLGRQIEELDTRIKELDAKLTAAHKANEVSQRLATIPGVGPITALTLAIEIDPQAFESGRHLAAWAGLTPKEHSTGGKQRMGGISRAGNERLRALLVAGAMSVIRAAARPGSKQMTEWLRGLLARKPRKVAAVALANKMVRVAWALMTRGEVYRRPAGAAAA

SEQ ID NO: 124226 - protein, 409 aa, unidentified
MLYVGIDWSDQALDFQMRDDQDQVLADGQVTATLEGLSELYEKLETHGPPKEIGVVLETCHGAWVQPLLDRGYRVYAVNPKAVERFRQALLLQGDKSDRIDRRVLSIFLKCLHAELRVLRPDAPEIVALRIACQNRLRLVEEHTAKVNELWAVLKGYYPAFLELFGQIDSDIALAFLEAFSTQDQGRSLTEAKFRSWLADHHYTQPHRVDAMVQHLKRPVIEVPEHLQKAEAPLIRYLAGSLRRLGTEIDRRDQDIRDRFEQCPESDWAGSLPGAGPVLGPALLACVGRDKKRFTDATQAQALFGTAPVTVQSGRSRMVHFRWGCWKFARRTLQLLAEQSIRFCGWAEAFYRRQRARGHKHHHALRELAHKWLKIILALQRTGQRYNEQRYVKSLHKHRLKSASPVLVS

SEQ ID NO: 124227 - protein, 322 aa, unidentified
MARERFVGIDVAKGWVDVVELPGGAHTRVANDPDGWAALVERFVADPPALIVLEASGGYEIGVVTSLDLAGLTPVVANPLSTRRFAQSLGQRAKTDRVDAAMLAAYGERLRPTPRPIPDATARHLRELLARHRQLTKMLVEEKNRRQQATPLLRPAIAAHIAWLEGQRDEVDRLLQSVVASDPGWQARVELLDSVPGIGPLTATIVAVGMPELGACSGKAAAALLGAAPYAVESGLLRGQRHIGGGRRLVRHALYEAVTSTIRWEPTLRDHYARLRAARKPHKVAMIACERRLVGILNAMLRDGLTWQETEVGQGRFLHAVP

SEQ ID NO: 124228 - protein, 340 aa, unidentified
MKTITIGIDLAKSVFQVHGVDAAGLITVRKKLRRAEVLTFFASLEPCLVGMEACATAHFWARELSRLGHEVRLMPPSYVKAYLRRQKNDAADAEAICEAVMRPSMRFVPVKSAERQGVLVLHRTRELLVRQRTMLINAIRGHCAEFGMIAPQGARRSAELIGQVQAADAAVLPDLARSALLRLADQLDALAIEIHALERQLMAWHRQDEASQRLATIPGVGIITATALAASVTDPSLFRSGREFAAFLGLVPRQNSSGGKDRLGRISKMGDGYLRKLLVVGATSVIRRAADNASATGAWVRSLMERKPSRVVTVAMANKTARIARAVLSRREDYRAPAMI

SEQ ID NO: 124229 - protein, 419 aa, unidentified
MNRIETKKLRIVNAKTLIVAVDISKTTDVGYCRCPSGKDIKPFEFRNNVDGFKTLWDRICWMKMSHHLEEVVVGFESTGAYGEPLVHYLRQKPVKLVQVNPMHTKRIKELQGNSPGKTDRKDPRVIADIIALGHALSVVVPEGAAAELRRLTLARERSLGRRTALYNQLQDLVSLLFPEFLQVIKDVKSKTAHYLLRHYPTPQDIMKCGVAPLSSILKRVSRGKLGSTQAQALYEAAAESVGLREGTQGIVLEIEEILSCLEACNRFIDKLEAEMLPHLEQIPYHDSLLSVKGIGVITVAGLVGEVGDFRHFHTLREVMKLAGLDLFEISSGNHTGNRHISKRGRPLLRKLLYFAAINTVRKGGVMHTSYQRYLERGMPKMKALIAIARKLLRVLFALVRNHSQYVENYSPKEALKLAA

SEQ ID NO: 124230 - protein, 396 aa, unidentified
MRHYVGLDVGKGAHWACVLGTEGRVLLSRRVEATEEALEAFCSEIAQLGNADERVFGIDLTGGPAALLEAVLIGRNEEVRYVPGTVVNKAREAYAGGEQKSDKRDAFVIADHLRLRWEPFSEVRSREEDVAELRALVAHRRDLLVQDQTRRVTRLRELLVSVFPGLEATLDLTKKGPLCAVSRVARPAAVRRLGEARLARWLEARGVYGAKKLASRVVAAAKAQRHELPAAEAKAVLVAEIASEVLRTKERIDALEARLAELVEAHPEGKLVMSLPGMGTIMTAEFLAEAGDLSRFGSADRFAAAAGIAPVLRASGSVSYRRRAKRGNRVLKRVFYQSAHCAVLCHERSRIYYRRKRAEGKGHTQAVIALARRRVNVLWAMLRDGTFYEDRASLAA

SEQ ID NO: 124231 - protein, 370 aa, unidentified
MLYLAIDQHSKQITVSVRNAAGDTVLRRQVSTRPEKIKAFFQQLTEMDSKFMAILEVCGFNDWLIAELHKWKCQEIVLIHPEKPSKKKTDRRDARKLCDLLWLNRERLAAGELVHGLRRVYMVSQQERENRQLTALRKNLGQRRTRTLNKIQCILNRHNLMWNYPTKTFQTQAGRRWLETLELPEIDRLEMDVLLQEWNIWDEQITRVDEKITERATQSNPGEVFNSTQILMTAPGVSHYSGLALASRIGPVERFPRPRSLANYFGLTPGCRNSGNTQDRLGSITKEGSKMARFLLGQLVLHFLKHDPKMRSWYRRIKTRRGSNIARVAVMRRITTIFWHMLKHREAYSIGGPPPRLRQQNPSTVRSDAA

SEQ ID NO: 124232 - protein, 415 aa, unidentified
MNDREQWYAGVDWASESHYVWLADRDGRRLGERSFKHAGDGLAEMVGWLLKTSGAADCSQIDVAIEVPHGPVVETLIERSFNVWVLNPKQMDRFRDRYSVAGAKDDSRDAKVMASALRTDPHCFRRLAVSDPIIIELREWSRIAEDLAAERTSLVNRLRQQLWRYFPAFLELEGDLSAAWAIELWQAVPTPQAAKRARKASIETILKRHRIRRLSPEQVLDILRQRPLTVAAGTTQAARAHCATLIARLKLIGRQIADAHQQLDTLTAKVGATEQADPGQNKQRDAVILASLPGIGRINLATLLAEASEALQRRDYHALRTLTGVAPVTRRSGKSCTVSRRYAHHSRLANAAYHWARTAAQHDAISRAKYAALRARGHSHGRALRSVADRLLNVACSMLRSGTTFNPSLPNQNAA

SEQ ID NO: 124233 - protein, 327 aa, unidentified
MTSALPIGIDVSKDQVDIFLTWQGESLQLEFSNDQQGFRQFRKWLKKRKITQAHLCMEATGRYADALARFFYEAGYEVSVVNPRRIKAYADSKLRRNKTDTADARIIEDFCRTQQPPLWQPPAPEVEALQMMTRHLDRLKRMRTQEINRLKSGISEPTVRAMIQEHIAYLDRAIQELEAKIQDHIDQHPELKTSAELLQTIPGIGESTAAILLAEIQDIDRFDQASELAAYAGLSPRRRRSGSSVRGASHLSKMGNAVLRRALYFPALTASRFNPGVRTLTERLAARGKQRGVIQGAAMRKLLHIIFGVWKHRRPFNPALAMAGTVS

SEQ ID NO: 124234 - protein, 367 aa, unidentified
MIVIAADTHKSSHSFSAVAEQTGRVEGEKTFGADERGMVRTLRWAKGLGDERVWALEDCRHVSGRLERFLVASGERVIRVAPKLMGQSRRAERQAGKSDVIDARAIARAVLKDGIDTFAMAFLDERAMEIRLLADHRADLVAERTRMQSRLRWHLVELDDALEATIPPGALDRRVWLERVDRRLRRLAQTARVRVARDELRRIRELTRTAAELERELEALIAAHRPELLAWRGCGVLSAATLIGRTAGAARFATDGHFARQAGAAPIPASSGRKDRQRLNRGGDRQLNAALHRIAVAQGRCHPPAAAFLARKQAEGKSRIEALRCLKRHLARHAWQLLRAPHPVQENSLSMTNANNANAPAHALALT

SEQ ID NO: 124235 - protein, 429 aa, unidentified
MGAMSENEVLGQEPQFAALVGIDWADQKHAWCLQAAGTTQRESGEVEHTPEAVEAWVGQLCQRFGNRPIAVAVEQVKGALVFMLSKYGPLHLFPVPPAMSANLREALYPSGAKDDPRDADLLVDLLLQHRDKLRRLSPDSEATRRVQNLVEERRHLVEEKTAQSNRLTNHLKIYFPQMLEWFDRLDTELVCALLEQWPTLEELQKVPPARLRTFFRKQRCHYPELVERRLVGIRQAMPAIRDRAVIEAKSTVVKVSAQLIRSLIRGVADLDRKIEEAAAAHPDFFIFESLPGAGAVLAPRLLAAFGSQRERYANAAEVQAYSGIAPVTERSGKKKWIHFRWACPKFLRQSFHEWAGHSVAHSQWARSYYQQQRERGKGHHAAVRGLAFKWIRIVFRCWKDRVTYDESRYLAALAKRNSPLAAVAAGTIL

SEQ ID NO: 124236 - protein, 409 aa, unidentified
MRVVHETCCGLDVHKKSVVACLVTPGADGLARKTVRLFGTMTDDLLALADWLQAAGCVQVAMESTGVYWRPVFNILEGGCEVLVVNAQHIKAVPGRKTDVGDAEWIADLLRHGLVRGSFVPSAAQRQLRDLTRYRSTLVEERGRLVNRLQKVLEDANLKLAGVASDIMGKSARAMLEGLLAGETDPSRLAALAVGRLRAKRAQLEQALAGRVQPHHCFLLAEQLSHIDYLDEAIARFSAEIAARLQDYAPEIELLDTIPGVSRRVAEVLLAEIGADLHRFPTAHHLASWAGMCPGNNESAGKRKSGKTRKGSRWLRQVLVEAAQAAARGKHTYLGAQYRRLALRRGAKKAIIAVAHSLLVIAYHVLTRHEPYRELGANFFDERDRDSVQRRLVRRLERLGYQVALQPAA

SEQ ID NO: 124237 - protein, 353 aa, unidentified
MTSVTDLRDVVDVVIGVDTHVHTHSAAVVDARTGGVLDEITVEATADGYAELVEFADQHAALRAWAIEGTGSHGAGLTRHLERREEVVIELDRPERAKRRNGAKSDPLDAIRAAREALSRAKLGTPRSGGDRQALSVLLAARRSALNASTDAQRQVFSLVIAAPEPIRERFRDQKLPAMIHTAAGLRLNPAWDVETTTTVVALRSLARRARALAEEAAEHEKTIRAIVRSWRPDLLAQPGIGPIVAATVLCAWSHPGRIHSEAAFAMLAGAAPIPATSGQVIHRHRLNPYGDRQLNRALHTIALSRIRYDQTTRNYVARRTTEGKTSREIKRCLKRYIARDLYRQLEHGPIKA

SEQ ID NO: 124238 - protein, 315 aa, unidentified
MADTIAQSVGVDISKDTLDVPLHPAGAARRFVNTRTGRSGLIAWLAKFTIVRIVFEPTGPYHHAFERHLAEAGLPLAKVNPRQARRFAEAIGRHAKTDRIDAAMLARLAALLEPPIRPAPSQTLDDMAELIVARRARVKDRVAALQRDSVHRSTLLKRQAVQRLAQIERQIAAIDTALRERLAGDLTLRARFDILASIPGIGETTALIMLVEMPELGTLDHRCAASLAGLAPIARDSGQHRGKRFIRGGRSHLRQALYMPALAAVRFNADLKAKYKALRHAGKPPKVALTAIMRKLIILANALMRDGRTWSLKPA

SEQ ID NO: 124239 - protein, 457 aa, unidentified
MPQPKRSRSRTGLSAVHPAAAAIDIGATMHVAAVGPDRDTEPVRTFGTFTEDLHRLADWFARCGVKTVAMESTGVYWIPVFEILEQRGFEVMVVNARDAKHVPGRKTDVSDAEWLQRLHEYGLLRPSFRPQAEIAGLRAYLRQRERLLDYAAAHIQHMQKALMQMNLQLHHVVSDITGVTGMNIVRAIVAGERDPNVLASHRERGCHASVETICQALVGNYREEHVFALSQAIELYDVYQTKVAACDRQIEVILKRLKKSATPPASKLLPPKHRSRQPNAPSFDARAALHAILGVDLTQIHGLGPYLALKLVGECGTNLTAWPTAKHFTSWLGLAPHNKISGGKVLSSKTRRTSNRAASLLRLAAVSVGRTDTALGAFYRRLAARAGKAKAITATARKIAVLFYNTLRHGMSYADPGATYYEERYRQRVLGNLQRRAKSLGYVLHQAERDPVQMVVS

SEQ ID NO: 124240 - protein, 457 aa, unidentified
MKKIKKRNMHNSEFKQINFNAAGIDIGAETHYVAVPEGRDPEGQDVRHFGTFTSDLYALADWLKQCQIDTIAMESTGVYWIPLFEILESKGFDVKLVNPRFIKNVPGRKTDVVDCQWIQQLHSYGLLTGSFRPEEQMSILRSYLRQRTLLVSYASHHIQHIQKALEQMNVKLKQVIRDITGTTGMRIIRAILAGERKPEKLAQLRDPRCKNDIKTIAKSLHGNWRPEHLFLLQQSIELFDFYQKQIADCDLKIEQHLANFEDRSNGQSLDKTRKLTGRNKLTFDARTHLFQMTGVDLTKVPGLDSLTALKIISEIGLDMNRWPTEKHFASWMGISPGSKISGGKILSSKTKKCANRAAHYLRLAAYSLHSSKTAIGAFFRRKKAHLGPAKAITATAHKLARIIYNMLKTGTEYKDMGQEYYEQRYKKRVITNLKRRAKQFGYELKYVKEQQEVMLDV

SEQ ID NO: 124241 - protein, 400 aa, unidentified
MITNHAEIDVFIGIDVGKHDHHAVALARDGTQILSKALPQNEGKLRGLLGKLRTHGTLLVVVDQPATIGALPVAVAQAAGITVGYLPGLAMRRIADLHPGEAKTDARDAAIIAEAARTMPHTLRGIRVSDENVAELSMLCGYDDDLAKQATATSNRIRGLLTQIHPGLEAVIGAHLDHPAMTALLVKYPTPKALRRAGKRRVETLLAKHAPRAWKRWATAIFTALEEQAVVVAGTDAAGIVLPQLATALTQTRSSRNEVFARIEELVESHPLFELLTSMPAVGVRTAARILTEVVGKDFATAGHLASYAGLAPVTWRSGTSIRGDHSSRRGNKVLKRALFLSAFAALKDPLSRAYYDRKRAQGKKHNQALIALARRRCNVLFAMLRDGAYFQVPMEAAAA

SEQ ID NO: 124242 - protein, 421 aa, unidentified
MRAVALDVHRDFCEVAIVERGGLRSGGRIETKPETLELFAQSLDVHDHVALEVTGNAWEIARIIEPRVARVIVVSPSDTGIRQARAKTDRLDARALAKLLWAGQLDSVWMPDECIRAMRRRLARRTQLVRARTRAKNEVHAVLLRCLKGRPPASDLFGVKGRRWLQEQELPIPERETVDAALRQVEFLDAEIVAVEALIAAAALSWPEVKRLMTVPGVNVIVAATFMAAIGDIRRFPDRRKLTGYLGLDPRVRQSGVGPASHGHISKQGSASARHALVEASRSTVRQPGPIAGFYVRIKARRGHSIAIVASARKLACLFWCLLTRGEDYAFAQPSLTKKKMRRLELQAGAPRFQGGRGVWSTNDAMRQAERELALQAQRAYERTVKDWQQNKGASATAGRASSGSSKEQVARQTTRPKSAL

SEQ ID NO: 124243 - protein, 372 aa, unidentified
MSQSSTLYVGMDVHKESIAVAYVAKDHDAAVISLGTFGTRQCDIDALIRKLQSKAKHLVFVYEAGPCGYWLYRYLTKKDYVCWVVAPSLIPKKAGDRVKTDRRDAMQLTRLMRSGDLTPVYVPAVDDEAIRDLSRAREDTLRDLKAAKLRLKAFLLRHDIRYTGRANWSPAHLRWLSEVVCPTPAQQIVFQEYVQTVTEQSERLGRLELELHEQVHTWRLGPVVEAFQALRGVQFTVAVTTVAELGDLTRFENPRQLMNYLGLTPSEYSSGARRQQGSITKTGNTHARRALVEGAWAYRYPAKVSRHLQLRLEKLPTAIQAISWKAQVRLCKRYRQLMAKGKNANQVVVAIARELSAFMWAIAKQVAGLPKA

SEQ ID NO: 124244 - protein, 408 aa, unidentified
MISQPLHLPVRAGGRAIVGIDIGKQHHAAFAINSQGDKIASIASFKNTREGVDILQVRVLDQAGTPPQVLFAMEATGHYWMPLYHELVRRGYQGAVLNPIQTNGEARTRIRKTKTDKRDAEGIARFILTGKAKAARIPDEATQELRILTRRHLQLMQMKGDAERAAQSLSDRIFPEYADCLSKPFLLSGRALIKEIGLVPTRIAEQPDAVRNTLRRASRGRLSAATIDGLLQKASESIGIGYAETVINEELHSSMELIEDIEKQICSLDTLIADLMEERNSPLPSLGIGTSLAAAIHAESDPASDFPSARQYAAYAGLEPTTFKSGNMEGTRAHISKRGSPQLRRALYFAAFSCYKRHEYFARIYSRFRKKGYTHNSALIVVARHLALVIWRLLVENRPFTKKPPKKK

SEQ ID NO: 124245 - protein, 315 aa, unidentified
MEDSQVFVGIDVSQSCLDVAARPTGEVWQVPNDADGISDLAQRLVGMSPFLVVLEATGGLEWALTAELAAAGLPVAVVNPRHVRDFARAVGILAKTDILDAQVLARFGQAMEPEPRPLPDAEAKDLQAMVSRRRQLVEMITAEKNRPRTVIARIRPQVEEHIRWLEKSLTDLDQDLDGFIRSSPMWRTKERVIRSVPGVGPVLSATLLANLPELGELSRGQIAALAGVAPFNRDSGTLKGKRTVWGGRRRVRAALYMAALVASRYNPVIKDFYQRLCSLGKPKKAALTACMRKLLVILNSMVRHGREWQPNLQTP

SEQ ID NO: 124246 - protein, 338 aa, unidentified
MTIVMGLDQHRAQITAEWLNSETGEISRKRIAPADRDGVRRFAATFRGQELDVALEATTGWRFVVEEFQAIGAQVRLAEPAETAARRGTKKRAKSDRADARHLRELVMVGRLPESWIPPEHLLELRARVRLRHTLVDQRREWQQRIQATLYHHGVPPRNWLLGAQSRTWLTTLELPPAAREQITIALALIDAHDAQLAPLDQELREYAKRQPGCQALMRHYGIGPLTSITILAELGDAGRFSSSCEAVRYAGLDITVHQSDARRAPGRLSRQGPPALRWALFEAAQCARRPGSPDHDYYLQTAARLGGNRACLAIARKLLKRSYHTLRELGEEALQPA

SEQ ID NO: 124247 - protein, 414 aa, unidentified
MIGVVNKSCGLDIHKRFFIATILSKSGDKQQKRFDRDEDGILALKNWVVSEKCDVVACESTSDFWVPIYDSLIKHLPVIIGNARDMKAFTHKKTDKIDSEVIAQLALNNMIQPSRVFPKDQREFRSYIRLRLVLVRKRTDIKNEAHAILTSEMFNLHDVLADIFGKNGIAILSGISSGKTVDQIIENLSPNVRKKSSQIRETLDREISQSAAIRLQICLKLIKHLDDEIEALEKEIFNYAYGKHKREMDILMSIPGIGEIGASTLIAEIGNLRDFPSGDKLASWLGIVPNVYQSADKYYKGRITKRGSKVARWILTQIAQAAARKKNSKLKEFFNRKMKSIGYAKAIIALARKIVTIIWHLITNDEMYQDETGYQKGEVHKRKIVETEIFSVDERIKIISGIIAVMGKKEEEST

SEQ ID NO: 124248 - protein, 345 aa, unidentified
MKKVVAGMDLHSNNVVIGIMDLDGKRVASRKVPCELKEVVKFLAPFKKRLEKIAVESTYNWYWLVDGLEALKYPVVLANPAGMEQYNGIKHADDTNDAFFVAELLRLKILPTGHIYDAQLRPVRDLLRRRVTLVHHRTALMLSFKSLYTRTTGQEMTLSQLKELEIKEAQALYIHPANQLIAGMQIKQIEQLSESIQKIEKGVLDSARELPFYANLLTLPGVGKILGMTITMEVGESKRFAGPGNFASYCRTVEAKRTSNDKKKGANNSKCGNKYLAWAFVEAANFAKRYDERCRKWYDRKAAKTSNVIAIKALACKLAKAAWYLMAEGTDYDPARMFGQPAKAK

SEQ ID NO: 124249 - protein, 392 aa, unidentified
MYIIGIDIGKNHHEASIVSPKGRQIGHSLRFATTHKGADSLISFIFKNIGDSPCVFGMEATGHYWYPIYSFLKFKGYTIYVINPIQSDSLRKMYIRQTKNDSIDSFLIAEVIRFGQFEATSMADENILAMRQLCRYRDSVVSSRTEIKLRISTIMEQIFPEYEKQFSSLWLGTSMGILEKYLTPENIQNAPIDELFEIIKDKSHNKLTIKKAVSIKDAAADTFGIKIAQDAFAFQLKQLIDRLNFLNEQLEALDHEILSYYEKFDCYLHTIPGIGMIAAAAILAEIGDIHRFKNSSALVAFAGIDPTVRQSGEFNSIHNHMSKRGSPYLRHAIFLAATTCSFHNSPLNAYYKKKREQGKHHLTATGAVARKLTTVIYAVLRDGKPYEPKSFC

SEQ ID NO: 124250 - protein, 345 aa, unidentified
MNKLVSSSPSTVYCGIDVSASSLAVALIELDDCSAQREFANNASGHKALLGWLGKRNALVRVSLEATGVYSLDLALALDAAAQIEVAVLNPKLVNRFAQTLRRSKTDAADALVLAEYSRRMPFTAWQRPGAGHLRLRTIGRYIESLVVEQAGLKNRLRTAQSTATTPRAVTVDLRQALSAVQRRVAKMRREAIKLVRNEAALWERFQLLVSVPGIAEISALQILSELVLLAPAMTVRQWVAYSGLDPVHQVSGTSVHKPSRISRAGNRHLRRALYMPTLAAVRCDPHMRAFHRALLERHKTGLQALMAVARKLLHAIYGIFKSSRPYNGRLLFPNLLLGLESTAG

SEQ ID NO: 124251 - protein, 366 aa, unidentified
MKPNFEPGKWFMQCVGVDIAKSTFTACLCMYEFDMGCSTNPVVFNNNKTGFNQFVKWSRKEALKGYPLRFLMEPTGVYYEPLAFHLNKLGLDVCVVLPNKAREFAKYEGILTKTDDMDAYTLGMLGCLDKRLKSWTPPSPVHREMRQMTRFVADINKVRTELQNHLEALVHSETTERSTVKHYNKLIDEIDGQLAANQKAIREKIKQEPGLPERIDRIVTIKGVGFMTVVTILAETNGFALITNRKQLTRYAGLDVPAHQSGPVDPKRHISKQGNVHIRTALYFPAIVSTQYNPQMKDFYGRLCARKTQSKMIGVTAAMRKLLLLIYSLWKSGEEYDPERDMPVSSKKKKEAETPEGQPHGIDVGT

SEQ ID NO: 124252 - protein, 367 aa, unidentified
MKKVSTRAAVQSRNISQQKLTIGLDLGDRNCWYCVVDEAGQIQREQRVRTNGKALQEVFGAMSRSRIALEIGTHSPWISRLLSELGHEVIVANARKVRLIGESRKKDDRLDAQTLARLARIDPELLYPGKHGGVQAQADLTLIRARAGLVRARTGLVNAARGLAKSYGERLRGCNVRNMNPEKAESLSPELQAALEPLLRAIESLSERIVEYNERIENLAQQSYPQVVLLKQIKGVGTLIALTYMLTLEDPHRFRKSRDVGCYLGLQPGRRNSGQSEPQMHISKEGDPYLRTLLVQGAQHILGPFGVDCDLRRWGLKLAERRGKSGKKRAIIATARKLAVLLHHLWVSGEAYEPLHNSQQKAMPAAA

SEQ ID NO: 124253 - protein, 327 aa, unidentified
MTTIVGIDIAKAKFDVALLLEDGRVDYGQFDNTPKGFKQFNTWLSKRRSDTLHACMEATGLYSNDLALFLHQQGYTVSVVNPARISAYGDSLLRRNKTDKLDAALIADFCRTQTPPPWNPPDPSWLELQSLARHLQDLEQTRQQQRNRLGSGVRSSLVREQLQRHIALLDEQIDQIKHHIQDHLDQHPDLRQQKELLTSIPGIGDLTAAKLLAQIPNIRAFDDPRQLVAFAGLNPSQHQSGNSRRSKTPISKQGHACLRAALYMPAISAKQHNPLLRAFALRLSQRGLSGLEIVVAVMRKLLHLVYGILKSGLPFDPHFLSHGALSV

SEQ ID NO: 124254 - protein, 356 aa, unidentified
MNDIKYIGMDVHQGSIVIAVVDTSGKLVMESIIETRGETILQFIRGLRGTLHVTFEEGVSADWLHELLVPYVARVLVCDPRKNALLKSGNKNDRIDAHKLAGLLRAGLLTAVYHGESRGRLLKELARSYRALTKDTTRVMNRLKSLYHSQAIRCGGTQVYTQRHRQRWLEQLQETGARRRAERLYQQLDLLQPLRRQARQELVTEACKSVAAARLRGIPFLGPVRVAVLLAIVETPFRFRTKRQFWSYVGLAIETRISGEYQMAGGRVQRTRKRVALRGLNPNHNCELKRLFKSMAVEASTRLGPWHDWFTAKVNQGVRPEMVRLTLARKLAAITLAVWKKGRKYDDGEPLKSRAA

SEQ ID NO: 124255 - protein, 402 aa, unidentified
MNAVGIDVSKGKSMVAIMRPFGEIVSAPFEIKHTASDINSLVELINSVEGESRIVMEHTGRYYEVLAHQLSKANLFVSAINPKLIKDFDNDSLRKVKSDKADAVKIARYTLDKWQNLKQYNVMDELRNQLKTMNRQFGFYIKHKTAMKNNLIGILDQTYPGVNTYFDSPARSDGSQKWVDFASTYWHVDCVRKMSLNSFIDHYQNWCKRKKYNFSQSKAEEIYGKAKELVPVLSKDAITKLIIKQAVDQLNSASTTVESLRTLMNETASKLPEYPVVMAMKGVGTSLGPQLIAEIGDVSRFTHKSAITAFAGVDPGVNESGSYEQKSVPTSKRGSSDLRKTLFQVMDVLIKTHPQDDPVYQFLDKKRAQGKPYYVYMTAGANKFLRIYYGRVKEYLSSLPES

SEQ ID NO: 124256 - protein, 358 aa, unidentified
MKIIGCDLHARQQTIAMLDSETGELQEKTLEHQGETVRKFYSALSGSILVGIEATGSMQWFLELMEELGIECRVGHPAKIRKAETRKQKHDRRDARLLLTLLAENRFPTIWMPSTEQRDLRTLLRHRHQWVRMRSRVQHTLQSMALNHGLRRGRALWSQAGQDELRALPLAPHASERRKALMTLYPRLQESIDELDRQVSEQTQQRTDARRLMTHPGVGPVTALATEVFLGDPMRFSDGKALASYIGMIPSEHSSGRRQRLGAMSKQGNALLRYLWCEAAMHAVERDPELKRFYRRKLVQKGLGKARVAAARKLGIRLWIMMRDEIDYQEFCRRGKARQESGSVRAGMPDRNSGPAEQ

SEQ ID NO: 124257 - protein, 493 aa, unidentified
MEERPVDNPLRYGPIIHLLNQRENDMSKNTRDTQAVSTKKSSVFPKHLEHINLYAAGIDIGATSHFVAVSEGTSETTVREFKTFTSDLYALADWLKQCGIQTIAMESTGVYWIPVYEILEEKGFEVKLVDARQVKNVSGRKTDVLDCQWIQQLHTYGLLNGAFRPADEICELRAYIRQRSMLVQSASRYIQQMQKALTQMNVQLHHVISDITGDTGMKIVRAINKGERDPAVLAEHRDRRCKNSIDDIKAALTGNYRAEHLFSLKQSLELYDLFQEKIQACDDEIAKNMAKFATDSKVIDTPIAQLNPSKKKVSKNSPAFNLGSELHRLTGVDLLAVPGINHISALQLIGEIGLDMTQWNSAKQFASWLGLCPGNKVSGGKRLSSKTKPSNNRAAATLRMAAFTLYRSQTSLGAYLRRLKSHKGPMKAITATAHKLAKIIYNMLRHGVEYKEAGQTYYEEQYRGRVLKNLKRKAAEFGFDLVESTQIMEIKNV

SEQ ID NO: 124258 - protein, 306 aa, unidentified
MLPEQPGELFHLQVGNNNQGFAKILEHTGTGYHFVMEATGVYYIRLAFYLQHRGCKLSVVNSIAIKRYIQMHLERNKSDKKDAGWICRYGIEQQPAYWVMPDSAYFESKQLYNSIREYTEQIKRFNNQLHSLRLLPVPSKDSIKSLERMIVCMEKEIKQLEHKLQLLLEQWQPEQLKRVSSVKGIGKRAAAMLIVFTQGFKHTENHRQLISFAGLAPTEYSSGSSIQGKPRIYKRGGKNLRDVLYMCSMNAMKTNPACKALYERLRANGKTGKQALIAVCNKLLKQVFAVVKNNTLYQPNYCSAKP

SEQ ID NO: 124259 - protein, 351 aa, unidentified
MVIIGVDYHPSDQYIAFVDTETGEYGERQLNHSDRGAEKFYRELATRGVSVRVGMEATGYSRWFERLLAELGIEVWIGDAAEIKTKRVRKQKTDREDARLLLRLMRENNFPRIWVPSPENRDLRQLLWHRHRLVQMRTRIMNQLQAIAMNEGQRRKKKLWNEQGRAQLEKLPLATWASRRRKDLLELLDRMNPTIEELTAAIEREAKKWPEVLRLMTHPGVGPLTALAFVLIIGTPERFKCGKQIGSYVGLIPCEDSSAGHQRLGHITKQGSSLLRFLLGEAAQSAARWDSDWRRRYVHLAMRRQRNIAKVAMARRLAVRMYWMWRNGWEYSEWIKFGSHAGQLGTRHGVN

SEQ ID NO: 124260 - protein, 359 aa, unidentified
MSKITITVLEITIGMDLGNQKHDICVLNSEGKIVEQAKIENNLESLSVYFSNYERPHKIRVALEVGSSSLWISSKLKSMGFNVIVANARKLRMIWDSTNKCDEKDAEKIARVARMDPSLLYGIQHRSMDSQQVLTVLRAREHFVKMRTQTMNSLRGILKSLGVSDLPKCEANRFSEKMYEYVCDDLLPTLGEMLYECQELTDRIERLDDRIELISEESCPEAQHLRQIPGVGPVTALAFVLTIDDPTRFNKSRDIGAFLGLTPKRDQSGEKDKQLRITKHGDRYLRSLLVICAQHIFSDRSPDSDLKRYGHRIASRGGGAGRKKAKVAIARKLAVLMHRLWVSGDNYEPLHKQALKKAS

SEQ ID NO: 124261 - protein, 327 aa, unidentified
MEQEYIGIDLHKAFFQVCAVRPSGERHWEQRWPTTEAGIAGLLTRCGPHSRIAVEASSPTWAFVDRIVDHVGAVHVVDTRKTRIKAGYAAKTDRLDAQRLADALRRDSVVGIYYPPPAIRDLRELCRYRCHLSRLQASLKQRIHALLLRHGVAVPVRSPFSARGTVWLDGLTLPGWGGASLRGLRQILADVRAQQVPVLTALREAAARDPIARVLDTRPGFGPVFSVTLRAEVGVIERFPDGPHLASYAGLVPRVERSGGRHWSGRITKAGSPWLRWVLIEAAIHQLRRPDDFGQWARRLAIRKGVLKARVGVARALCDEVFEVWPR

SEQ ID NO: 124262 - protein, 428 aa, unidentified
MSVKDYNSQVVKRQRIRNTTLVVGVDVGNAFNAVGFMNKEGKVLGSCAKLYNSREGFEQFVKMTEELKRKYRLKDVLIGMEPTGHYWRKLAYFAREQGYEVRFIRTTALKHHREIDESSSAKSDQRDALTIANITREGKYIDTVIEDGTMRQLRTLAKTRERLLRYSVSAKNALHAALDDYFPELHKIFCSMGTRSLWAILERCPFPNDVILMKISSLQELIAKSARKKAGSAQKARALYQAAQESIGLKRVGDADRFRVKICLEEVKRTVLMLKDIDRQMKKVLNEIPSAPYLLSIPGIGSLSAAVFLGELGDPAYFRNARQIVKYAGYDPQESDSGSWVSRKFISKKGRWLMRKCLFFMSMRVVVLSKYFQDYYQRKLETKNRVGQQPKRKEILCAVAIKLIKVIFALLRDKRKFDDGVRAIAAHA

SEQ ID NO: 124263 - protein, 372 aa, unidentified
MGGKSSKLFVGMDVHKDSIDIAVAEEAGEVRHHGRIGGDLAALSKAVRKLESLGRSLVFVYEAGPCGYGIYRMLKARGHECWVVSPSNTPRRVRDRIKTDRRDCLKLAGLGRAGELEPIYVPDPADEAMRDLVRTREDAVAMQRQGRHRLAALLLRNDLRYAGKTAWTAAHRRWISRLSLPSAAQRIAFEEYVQAVTEATARVQRLTQAIEQELAHWRWRPVVAALQACRGIQLIHAARIVAELGDLARFSHPRELMAYLGLIPSEDSSGDRRRQGSITKAGNSSARRAMVEAAWAYQHAPAVSPVIARRQAGLPNSAIEIAWKAQLRLCARFRRLQARGLNRNKIAVAIARELSGFVWAIGQQVRPAPEGT

SEQ ID NO: 124264 - protein, 366 aa, unidentified
MEVNTIAIDLAKNVFAVCGADAAGRVIWRRELRRAQLLSFMRKMAPCLIGMEACGGAHYGARQLISLAHQMRLVSPALVTPYRKGNKTDRKDAEAILEAVTRPSMRFVAIKSLAQQDLLALHRVRSQLLKSRTALCNQLRGLLRERGVAVRAGVMALKRALPTILAEENIEISGEVRVLLSEMGEWLRTLELRIASCDEKLARQFKTDERCKRLAQVPGVGPLAATALVAAVGNAHEFRNGRELSAFLGLVPRQHSSGGKRVLLGITKRGDRYLRTLLVHGARASLRWSVSKTDPYSRWATRIRIERGPNVAAVAMANKNARILWALLNRGDRFRFDKSQHRAVSRPGSPTSIERARAAKLRLAQG

SEQ ID NO: 124265 - protein, 344 aa, unidentified
MDNHTQYSGFAGVDLAKKVMQIHFVSGDGEITDKQVKRAEFLDFFRNRSKCLIGMEACGASQDWARKLEAMGHEVHLMSPKAVKPFVSGQKNDYNDAIGIYKAMFNGVRRVPVKSTEIRDLQTLRRIRSQVTKDRVKEINHVRGLLAEYGIVMGKSITAFNKGISSALESLKERGDVSPLVAEELRTTVESIKTKIERQKKLDREIEQLARGCKNYENFLKTPGVGPFTAAMLCVLLCDPDIFANGRKFAAYIGLAPRSRGSGGKYFVTSIPLKFNCDSESRAVFVECAQAIARYKNKSPWVEDILRRKPKKVALIAIANKLARQVWAMANKGENFKQMAILTA

SEQ ID NO: 124266 - protein, 342 aa, unidentified
MTQPAPARITVGVDTHAEVHVAVAKDNFGRRLDAISVPTTPAGYGELLGWARRLGQIEGWGIEGTGSFGAGLTRFLHRHGQVVVEVNRPDRQTRRRRGKSDPLDAEAAARAVQAREGVIPKAGDGQVEMIRSLRVARATAMKARTQAINALKGLLVTAPDELREQLRALSAVRLVQTAAELEPGPVTTPAAAARLGLRSLARRYQALSAELTILDTELDRLTVTAAPKLLALFGVGSDSAGALLVAAGDNPDRLRSNACFSMLCGASPIQASSGKTQRHRLNRGGDRQANAALYRIVIARLRHDQQTKDYLDRRIREGKSKKEAIRCLKRYVAREVFAALQP

SEQ ID NO: 124267 - protein, 357 aa, unidentified
MEKRLKQSLGIDVSKSNLSLSLGFLSNDLVKEFKARPDVTNELSGYKDLLKWLKKSIDPSVEVLVVMEATGVYHQGIAHYLYSHGYAVCVMQSGRVKRYAQSLDQRSKTDALDSRMLSMLGLERSIRPWHPPSEELQELKALSRERSSLLKDRTMENNRQGAIASSVYSHAKALKRHKIRLKLLSTQIEAVEEEMRVLISKNGVLERKLEFLMSIPGISFISAATVVGETLGFESIVNAKQLASYAGYDVVLRESGNFKGKTRISKKGSSHLRAALHMPSMTCVRCNPTLKQFYNRLKPKKAKPLVALVAVQRKLLILMFTLWKNEEVYDAGFEKKKQQKHEAPAAQDNNLINQLVS

SEQ ID NO: 124268 - protein, 465 aa, unidentified
MIFIHPQSYYTMAKKAKKIKTGKGLKLEIVNPHAAGIDVSSTEMQVCVPENRDPDNNRRFGAFTEDLHYISSWLKACGITTVAMESTGVYWVQLYMILEEDGFDVLLVNAKAIKNIGEKKTDEVDAEWIMLLHSYGLLKASFQPDNRARRIRNLARHRDNLLKASSREVLHIQKSMELMNIKLINVISDILGKSGQDIIRAILSGERDAGKLAALADPRCKSSKEIIEKSLVSNWDDDLLFMLGQSYDLYLYYQTQMKACDKKIESIAQEYLAEISVTAPEKELLRSEKKKAQKNAVTIDIEKYAFQMWGVNLMRIHGISDGALLRLTGELGHDFTDKFETYKEFCCWCNLTPNNKISGGKLLSSKIPKRKNAVGQILRSSANTLKASKTPLGFYFRRIQSKNGYMAAIVATANKLARIIYVMVKTKSEYNESYNQFNEEEILKKKLMATQLALERIQKRIEKAA

SEQ ID NO: 124269 - protein, 337 aa, unidentified
MYSIGIDVSKSSLNIHIPKNNLDLKIENNLKALKALYSKLKKIYKKEIDKLTFVYEPTGSYSALLYRFCAEKKIRVFMINPKQARNFAKAVAQRNKSDKIDAKVLSQAIVVAKESEIVIPYINPIVEEIKELIAYYKLKVKLRVQLNNHLESLKAKEANKTLIASLKKDIAKIKKEEETIMESICNIIIKDKELKAKYESIISIDGIGKVAAIVLLHLFIKYPNANQRQIVSLTGLDPIVKESGSSIRGKTKISKAGGRIYRGTLFMPVMVAIRHNNQIKEFYTRLKENGKHTTVAQVAVMRKLIVIAHSLYKSGEFYDKERYLQNAGIQKEENLAS

SEQ ID NO: 124270 - protein, 321 aa, unidentified
MDKVIGIDVSKATLDGCFIEVSKKESFVVKNNQKGFKKIALKAKGALVVMEASGPYYLQLSNYLYTHGIEVSVVNPLVIKRFSQMNLQRAKTDKKDAETIANYGRIYDPKRWSPNSKNTNSIRQLHSAMELLDKQIRQLKGQQEAFDNSGELVCLLRKELKSMLNFLVKKKLKLSVEVERLAEQEFGDKINKITSIPGIGKKTAIMLNVITDGFTKFEHHKQLTAYIGFSPRVYQSGTSVKGKGHICKMGNSQIRKLLYLCSWTAKFCNKACREMYERLKAKGKPERVIKIAIANKLLKQAFAIGKSKMNYSENHVDNICF

SEQ ID NO: 124271 - protein, 318 aa, unidentified
MSAAENSKVSVGIDVSKNKLDIAVHESGAVWSSNNDSRDCPALAVKLKQLQATSIVLEATGGCETLVTAILAAAGLPVIVVNPRQVRDFAKATGQLAKTDRLDCCVLAHFAAAINPPVRPVKTEETQHLEALLGRRRQIVEMLTAEKNRLASNHDRAVSKDLQAHIAWLERRLKSSDDELQRVLKNSPAWRERDQLLRSVPGVGPVLALTLLAQLPELGQLNRREIAKLVGVAPFNWDSGLWRGSRHIWGGRAEVRSTLFMATLSAIRFNPTIKPFYKRLIRAGKAPKVAIVACMRKLLTILNVMLKTQTSWRTVHSS

SEQ ID NO: 124272 - protein, 398 aa, unidentified
MESQLRVGIDVGCHAHRVGIAGPTGSILEEFDISHSEAGFQEFFRRVEERRAALGFPVAVAMEGYNGYARPLDRLVQEKGYRLFNVNNLKLARFKEVFPGAAKTDPIDARKILELFHLREQLPMAKDVLQEVLPAPEVNEKLKRLSRRRRQLVTEKLRVLNRMQGDLQAVSPELLAATHDADNLWFLRFLSFRDDLRQLAKLRRATIREIPSVGAKYATVIEDWQAKATFSDEVEYVGPMIVDDAKRILDLHQQIHTLDEALAKLAAESEIARRLSTIPGFGKTSIAELAGEIGTVSRFSGEASLALYMGMSPLTRQSGQISRAKAPRQVNTRCRAAMMTTVARHIGCVPQSRAYYDRKRAQGKTHNQAIRALGRHMVRVIWAMLRDGRDYEPRGDTA

SEQ ID NO: 124273 - protein, 386 aa, unidentified
MRPTLLCNGESVACAGSFDPRMAFGQSVAQPEPRTPCAPNSNRCQSGGYHRQLVYVRMSPNTIKIMQPVTVTVYAGVDVAKATLQLHLQGRQAEFANHTAGLVQLCQQLKTVPHVQVVCEATGGYERPLVQALHQAQIPVSVTNPAQVRAAAQAQGQRAKTDRIDAALLTDFGQRYRPKPTPPTTPSQEQLVALTQWLTQLVQARALAKTQAEHHEAAFVCGRHAKLMAHYQSQIGAVEKQIRDLLAQDARLQQRVECLDEIKGVGPRTAWLVLAHLPELGQVNRQEVAALAGLAPWTRESGTMKGMRCIGGGRPEVRLALYMAALSAARCNPVLQPFYQRLRAKEKPAKVALTAVMRRLLVYMNHQLKALQATQAITKIQPPKIP

SEQ ID NO: 124274 - protein, 339 aa, unidentified
MKYLKKVIGIDISKDSFVIRFGTLNTELQQKIGEAYTFSNDLKGFKKFLNSLNKIPGYQDNDNTNCWFIMEATGVYYENLAYFLKNNKYLVSVLLPNKTKYFFKTLNIKSKTDKLDASALAQFGLEKQVPDWTPPSILMKDIKELTREYHNLVVMSTQIKNKMHAKKHSYQPSNENMKRLRQQLNLIKKQITQVKEQLETLVKSDEDLSNRINKIITAKGLGFLTVITIVSETNGFVLVKNIKQLTSYAGFDVIQNQSGNFTGKTKISKKGNKFIRNALYFPALAAVRCDDKFKEFYKRLCIKKVYKKIAIVAVSRKLLTLIYTLWKKNEEYIPNYKPA

SEQ ID NO: 124275 - protein, 376 aa, unidentified
MGTPSAQTLDDVGVREIFQELEEVPLMTMVGGLDVHRAQITFDYVDDDGLVHWGQIRPATRKTLRGWLAEHCPDGDAEFALEGCTGWRYVSEELAGAGVGVHLGDPAEIAVLRGPKKRAKTDRADARLLRTLLLQGRFPESWIAPAHVLEIRTLGRLYCTLMDERRAWQQRIHAQLFHQGCPPVRALLSVTGRAALAGAELSAVGGQYVDTALGRIDELSTEIEPLRAQLVNFARHQTGCQALPRHYGIGWLCAAIIWAEIGDARRFSSSDQLVRFAGLDVTVYSSDGKRSPGHLSRQGSPELRWAAFEAAKCAARRGSPDYGYYRKLAAKRDGHNGKNPTLAVERKILRRCHHTLRELGDAAVALPVAEPQEVAA

SEQ ID NO: 124276 - protein, 334 aa, unidentified
MEHYIGIDAHCEYCDIAVVNKAGRLVSHRSVVTTGENLIEAVRSVKDTRIVVIEESTLAGWLQRTLEPYADHLAIVDPRRNALISRSEDKSDRNDACRLAMLYRGGYSHVIHHTLDAGFLELKEMVLHYHDAVNQVSRFKNKLKAVYRKHGLLRMSEAVYDPVGAAECIRRLPFPSSRHRAQATLSMITQAEETKLKARATIRRMSARFPAIEMFMAIPGVGLIVAATVVAIVETPHRFPSKEKLWKYASLAVAKPESGGKVQGRYASREGNKVLKKVLMLAAHNAAKGDHRFGRAFRRHGEKSCSNAQRTVARMILSTMYGMWKTGECYREMP

SEQ ID NO: 124277 - protein, 415 aa, unidentified
MNNSKSQKTRFIKNEIIVGIDIAKHIHYARILFPDGSESPPFSFNNNKEGFDALVGWFGFQKNKCQQESITIGLESTGHYWEALAFFLDSTPGIRLVQVNPKHVKKTKELYDNSPGKTDQKDAGIIAMLISMGRYQRLVLPRGHFAELRSYAKLREQKVVELGVQRNILHSVVDRVFPEYGDIFNKIESKTSLAILKKYIVPERIVRAGLKRLSTFIRKASRGQHSAERAKMLIEAASITIGTKEGLEARTFIIGRTVETIERIQEDIAVIGDKMNAVLHNIPYANKLQSIPGIGSISLAVILGESGDFGRYKRAGEIIKLAGLNLFEISSGKHQGRRHITKRGRSLLRKSLFFVALRTVKTGGAFREDYLRLTETNQMQKTKALIVISKKILRVLFALARDGVEYKQSILQLAA

SEQ ID NO: 124278 - protein, 355 aa, unidentified
MSKTKYIGFDVHQASISVAVLDESGKLVMQSVLATKASAILEFLDGLRGTLQVTWEEGTYSAWLYDLLVQRISKVVVCNPRKNALLKAGNKSDRIDALKLAELLRGGMLSPVYHGENSTRTLQELGRSYQTLTQDTTRVMSRLKAIYRGQVITSGGKKLYTRPHRQQWLQQLQQPGMRRRAERLYEQLDLLQQLRRQAKQELLVESQKHAVCARLRSVPYLGPIRAAMLVARVQTPYRFRSKRQFWAYCGLGLETRSSADYQQSQGQLQRSRKKVLIRGLNVDHNHDLKNIFKGAAMSASIFPGPLQEFYQERMAAGIKAEMAQLTLARKIAAIALTIWKKGERFDPTRLKARAA

SEQ ID NO: 124279 - protein, 416 aa, unidentified
MNEDPISIPIERYIAIDAHKHYLMVGGMNARQEMVLPTRRVDMENYPKWAKANLRPGDAVVIEATTNTWTLYDVTLPYVSKVVVAHPLEVKQIANARVKTDKHDVNCLARLLVADLVPEVWVPPMEVRELRTLIAHRQRLVKMRTMTHNRLHSVVHRNNLVPPEGGFFADKNRCWWESLRLSPVEKLQARQNLAMLDRLEALIAEVDQELARLSTTAPWSEHAPYLLQLPGFGVINAMTVLSAIGDITRFPTSKKLVGYAGLGGSVHDSGQSHFTGPITKQGRKELRWCLVEAAWVAIEHHPFWKQEFHKLNQRMKTNKAIVAIARRLLVVIWHVMSERVADRKADPEMVAFKLMKWSWQLNDLQRGGLTTRQFVRYQLMQLKLGENMTPFKRAHPISLASVEEILALKPELKPTA

SEQ ID NO: 124280 - protein, 449 aa, unidentified
MSNGSGVSRGDRNRNARLARLRALVPVSNAIIGIDLAEEKQMVVVTDHDSKVLARKTFKCHAWNLGTALDWAAKQAAAKGFAAATVACEPTGHRWRVLGQLADERGMPFVCVQPMLTSWARRSEDLTFDKTDEKDAVLIARLTAQLRCYVPETVDETWGRLRHLGARRAQLIVESGRQVQQIRALLECVWPAVLQSARQPFRSSTWIAALTVVVDRDGGDLARTRRLGPARWESAVRKEIIRRGRKKPCMRIVQALFAALSDPAGVTAHRPGALERVGLVLTDWLDTQHRLADTEARMTAILDRLQLTDLVTSIPGLSAIGAAAILAETGDPHRFASARALVKHAGLAPREKMSGTFIGRTKLTGQGRPGLRLAAWRTVWGAQRANPVYAARFTHLTTREQNKLTVTQAQAVIAAAILRQLHAIITTGRAWDPAIATHGTRTETLPLAA

SEQ ID NO: 124281 - protein, 428 aa, unidentified
MKYNTQNAKIKSITEKTLIVGIDVGSETHFARAFDWRNYEYSKKPLEFSNTEAGFMTLKAWMADFAEKYGKNVVIPGMEPTGHYWFNLGAYLQDNGMKPVHVNPHHVKKSKELDDNNPNKNDRKDPKTIAALVNEGRFSYPYIPTGIYAEIRSLSNLRLQTQEEITRIKNRIARWFSIYFPEIKDVYRNPDSVSGLMILKEAPLPQDIVKLGVDGINKIWRDAKLRAAGLKRAKTLVTAAEHSIGSQEAPDSARIELKNLLNDYEIYKNREEDLMSLTEEKLSEIPHIDKLLEIKGVGLKTVSGFVAEVGDITRFDNPKQLQKLAGYAIVECSSGKHKGESHISYRGRKRLSFVLFVAAISLIARNEEFKEVHRYYRTRKENPLKKMQSVIAVACKVLRIFYTILTKGVTYDGAKMMQDIKRPQMLAA

SEQ ID NO: 124282 - protein, 330 aa, unidentified
MPQGWEELMMTQQTPQHRIFIGIDVATAQRDVAIRPTHTTVTVPTTPDGHATLIERLTPLAPTLIVLEATGGWERTMVAVMVTAGLPVAVIDPRQGRYCARATGQLAKTDTLDARSLAWFGEAMRPPCITLKPEISQTVEALVLRRQQLVEMRTREKNRLGTALSHAKETIQEHVIWLTDQISTIEKQSAAMLQADPQWQATDALLQSTPGGGPILSQTLITRVPELGQLTRRQIAALVGVAPLNRESGALRGTRRMWGGRADVRIVLPMSTVTAIRHHPVIRTMYQHLKATGKKFKVNIVACMRRLLTMLNAMMRTQPPWTEHFSKKLC

SEQ ID NO: 124283 - protein, 531 aa, unidentified
MLMHVSNQLLNPVAGAGVRGETAALYKVSGGAEMTDYPLVRAFASPLISVVRDSSVTLVSTAMCIPFKRSSRIRRFPWHRRSSTMLEQQMAIRKREEEVVFPNAAGIDVGASSHWVAVPRHLADEPVREFGTMTDELNALAEWLLGCGVDTVALESTGVYWIPIYEVLEQRGLKVWLVDARQMKYVPGRKSDVQDCQWLQRLMSLGLLRAAWRPGDEVCVVRAVVRQREVLLVEQGTWVQRMQKALVQMNIQLTEVLSDVMGMTGQAIIRDIVAGERDPAVLARHHNARLKASAQDVRRALTGNWRDEHLFLLRQSLAIFDDLAKRVQECDAKIEALLVPLQRHAVKLNASPKGKGKNNPAFDVRQAMANWAGVDLTRIDGLGVSVVMKLLSEIGTELGRFANVKHFCSWLGLCPGTKISGGKVLSAGTKRSSNRARQALKMAAMSLSRSDSALGAFYRRLCSRMDKPRANTAVAHKLARMVYFMLTRGEDYVDQGRERYEEMQRQRSIASLRRRAAAMGFQIAPAAVPTA

SEQ ID NO: 124284 - protein, 360 aa, unidentified
MRAKLGHAMLYTGIDYHKRYSVVSTQDATGTRIREARIDENDPAAFAAYFGTLPEPSRVVVEACWNWGWLYDELGEIDGIEDIVLAHPFKTRLIADAQIKTDRLDARALATLLRGNLVATVHAPEPATRARKHVIRQRIFLVRVRTMIRSRVHTLIARQRNLARPVFSDQFGRKGLHWLRSLVLPAPDDALLRQDLQNLEHLGMLIKELEEQIASDNAHDEATRRLQTLPGVGPILAAVMAAEIDGIARFPRADKLCCYAGLVPTTYSSGGKTSHGRMLPHSNRWLKWAFVEAAWVAVGCSAYFGGIYKRHRARGKKANTAITIIARRMCTIAWQLLHHARDFTPNPPILALSPVAPSKD

SEQ ID NO: 124285 - protein, 360 aa, unidentified
MRIIGCDLHARQQTLAMLDTVTGEVVNRTLMHEGTEVRKFYSQLPHPVLVGIEAIGPMQWFLDLLAELGIECQVGDAAKIRAAEPRKQKHDRRDAELILKLLVEKRFPAIWMPSKELLDLRALLLHRHQWVRLRTQVQNALQAIALANGLRRGPGLWSYDGQAKIAFLSLPPHASWRRSALQTMYGHMEEEIEKLTAQVTEQVEHRSGAQLLMTHPGVGPVTALATDVFLGDPQRFADGKALASYTGLIPQERSSGRRRRLGRISKQGNPLLRFLWNEAGAHAARRDPELRRFYRRKLMQKGLGKARVAVARKLGIRLWIMLRDQIDYQEFCRRGQKQSGAVCAGMPEVGNGANRNRPVE

SEQ ID NO: 124286 - protein, 425 aa, unidentified
MTYRIAGIDVHKKMLAVVVADVAGEGEFQFQRLLFSTTPEQLKALAQWCVDHEVQEVVMESTAQYWKPVWETLERYWQPVGRKQTGASPMTGSLHLAQAQSNRARGGRKNDFVDAERLVRRYVAQELVLSFVPSADQRLWRTVTRQKQQRVGARVRLRNQMEAFLEEAHIKLSSLVSDLLGQSGRRILEALGEGKTDPQEIALQADRRLRATQAQLCDALSAARELNPVYRKLLKQSLEELGLLDRQIQELDREIARLLAQHEDAVQRLAEVPGLGPDSAQQIIAEVGPAAAVFPTAKNLASWVGVCPGDNISAGESHSTKSPKGNRNMRRILNQAAHAAVKAKGSIFEVMFQRLRRSLCYKEAIWAIAHRLCRLIWVLLHKTVRYEERGPTVSAASKRVRTSRMMRELRRMGYRVDPPTELQDA

SEQ ID NO: 124287 - protein, 430 aa, unidentified
MFTILLEDGPLFATYTVPVTREALTAFAERQLGAEDRLAMEATTNTWAVAGVLRPFVQEIVIGNPLRVRAIAEAKIKTDKVDSRVLAELLRCDYLPMVWQPDKETQRLRRLTHRRAALVSDRTRLKNRLHSILHHTLVPLPDGHLFSKKGIAWLRQVPLAQEEALARDSDWRLLELTELEIAELDELLVREAWQDEKVRLVMSIPGIDYTVAQTCLAAMGDVSRFANAKKLAAYLGLNPSTRQSGGHCYHGKITKQGNAHARWLLVQAAQHLGQYRGPLGQTMRKIIRRKNRSVAVVACARKLAVLLWHVLSSGEPFRYAPPKSLQAKFSRLRVRATGQRRRGGVAKGTPRSAQYGHGRTRALPSLSQVLVENGLPETAPLAKGERVMLERNKLEGFYRELQVPSRIEANARRAQVEECEEDAKSELTQS

SEQ ID NO: 124288 - protein, 342 aa, unidentified
MTQHKLIAIDLAKNVFQVCLMNKNNTVVVNKQLRRSELMAYIQKQEPTTVAMEACYSSHYWARSFQEMGHEVKLIPAQFVKPFVRGNKSDRNDAVAIAEAAQRPNLKAVPIKSLHQQDIQCLHRIRERCVRNRTGLVNQTRGLLSEFGVIAPQGLSSFNQLLCELMEPKENRLTPIFKNQLGRIADEYYAITDRLDEINKELKTLAETIPACRLLMTIPWIGCINATGLYSAIGNGSQFNNGRELAVWLGLNPRQFGSGEKQTSGGITKRGNRYLRKQLVHGARAIASRYKNREDRVAQWCNALMERRGKHKAYVGLANKLARIVWAVLNKNEPYKLTMPAA

SEQ ID NO: 124289 - protein, 384 aa, unidentified
MPSMQLRRDDVIVGVDTHKDNHVAVAIDGFGGRLGDIVVPTTIAGFEELLAFCLAFVGSAGRLIGFGVEGTGSYGVGLARYLRNHGHDVHEIARPARAAERRLAGKNDTIDAEHAARQLLAGHGLSTPKTADGAVETIRLVKIAYDGAVQARTTAMITLKATLATGSEALRAELETLTDHKLILACAALEGPTPLPPVRRGAPAVVVPGDPDVAMRHVLSSMAKRWLALHEEAKAHAASLKALTAAAAPQLVEAVGVGYDTAAQMLITAGDNANRIKSEAAFAKMCGACPIPAGSGKTNSRHRLYRGGNRQANAALYRVVIVRMRWHQPTIDYVARRTAEGMSKREIIRCLKRYLARELFRLLPAPDAIAKPVNGELEIAACST

SEQ ID NO: 124290 - protein, 407 aa, unidentified
MDGRASPGPRHAGVDWSWEHHAVCVLDDAGAVLERFMVKHEAAGLKELCRRLRALKVHQVAIERPDGPAVQALLDDGFEVVVIASRQVKALRLRYGSAGNKDDRFDAYVLADVLRTDGRRLRPVRPDSEATRALRALVRARKDLIKHRLALANQLRANLLQAFPGAIGLFAELDSPISLTFLKRFPTAERAARLTERRLQAWLRSVGYAGRRPTSRLLEHLRDAPAGLTGDAGEGHGIVTAQLVDLLTRVRSRIEVLDERIREALELHPDGVIFTSFPRAGTNRAALLLAEIGDCRERFPDEASLAAAAGVAPSTRASGKHWHVTFRRGCNKKLREALIDFAQDSVQASPWAEDIYRRARERGMRHPHAARVLARAWVRVLWRCWTDRLPYDPSRHAGFNRLQEVPA

SEQ ID NO: 124291 - protein, 393 aa, unidentified
MICVGIDVAKDKHDCFILSSEGEVLADVFTIPNNAEGFDTLLQTIRRCARPEDKIKVGLEATGHYSYNILGFLLNEGLDTYVINPLHTNLYRKSLSLRKTKTDRVDARTIAAMLMSDVDLKSYTDTAYHNEELKSLTRYRFDKVRERAKLKQSVSRLVTILFPELENLVPTLHMASVYALLSEFPGAKQVAGTHLTHLKAVLHDASKGRYGRDMATTFRDAARCSVGSVMPAKSLELRHTIRLIHELDAEIEDIEAAIQSMMDEIQSPITTIPGMGVRMGAMILAEIGDFSRFDSPDKILAYAGISPSTYQSGQLSLSGAYSHMEKRGSRYLRYALYNATKYVCLWNPTFAAYLAKKRAEGKHYNVALSHATKKLVRLIYALEKSKRPYSTAA

SEQ ID NO: 124292 - protein, 344 aa, unidentified
MDTIGLDLHKRESQLCIIGSEGEITEKRIVTTRERFSAVLGGRAPCRILLEASTESEWVARHLESLGHEVIVADPGFAPMYATRSKKVKTDKRDARTLAEACLLGAYRATHRVSVEQRHVRSELLVRDSLVRTRTRYVALIKAAVRREGLRLTSGGAEQTIGKVRAIPLREEVLQEIRPILDLLSPINREIDGADKRLEQLGKADPRVRRLMTAPGVGPVTALAFVAALDDVTRFESAHQVESYLGLVPSEHSSGERQHRGRITKRGNARVRWLLVEAGWRILRSRSSECAPLRAWAMQIAARRGKRIAVVALARRLSGILYAMWRDGNEYELKNNNSREIRAA

SEQ ID NO: 124293 - protein, 400 aa, unidentified
MRSIGMDVHRSFAQVAILDGGRFTEECRIELEHGAVLGFGQRLRKDDEVVLEATGNTAAIVRLLTPFVARVVIANPLQVKAIAHARVKTDKVDARLLARLHASGFLPEVWAADDETQNLRRLVSERAALVRSIRRVKSRVQAVLHANLVSGYAGHLFGKGGRRWLATAPLPKAERDLLARHLDELDWLDTKLEKLNRALARISLDDGRTRKLMSIAGISSVVATSVIAAIGDISRFPSPDRLASYFGLTPRVRQSGDHRAIHGRISKQGNTLARTMLIEAAWSAASVPGPLRAFFLRIKDRKGVNVAAVATARKIAALIWQLLTKEAPYRWARPAFVAMKMRKLELRAGSPRAHGQAGPGRDYWIKEIRHRELDLVAQAEAAYVAMAEAWKDRPPKTQKG

SEQ ID NO: 124294 - protein, 341 aa, unidentified
MTLTARVTSPLLSRATSAGQLGHLTIATTPAGYRRLLEWARGLGSDPRFGVEGTGSYGAGLARFLIAAGCTVIEVNRPNRQTRYARGKSDPVDAEAAARAVLSGEATGLAKVDTDSIGMIRALRVAQRSAVKMRTQTFQQMKALLVTAPAELREQLRLLSHDRLVDTAACLRPGPVTSVGAAVKLALKCLAQRHQLLTAELATLDRDLERLVATAAPTLCALKGVGTDVAGAVLVAAGDNPERLRSEGAFANLCGVAPLPASSGKTTGRHRLNRGGDRHANCALWRVVIVRLATHEQTRNYMARRTQEGMSKPEIIRCLKRYVAREIYRELIPRAALAAVA

SEQ ID NO: 124295 - protein, 366 aa, unidentified
MFTNTIPAARERWVVGLDVHARSISASALDLLTGELINARLTADPATALRFVTGLGADSAVAYEAGPTGFGLARALDQAAIRCVVAAPSKIARAPGDRVKTDKRDATLLARRLAAGDLTAVRVPSPTEEAARDLTRAHEDARADLMSARHRASKLLLRHGIVYSGGSTWSRDHHAWLARTHLDQPPAQDAFEDAYQQVLLLEARKRNLAAKITHLATNSEFTDVVHALGCLRGISVLTAMSLAVEIGDWDRFTGASIGAYLGLTPTEHSSGNSRRLGPITKAGNPHIRLLLAEAAWHHRPGYRVGTTLQARFDAATPAQAARGHEGNLRLHHRWVHFTTQHKRTTIANTAIARELAGWCWSLATTR

SEQ ID NO: 124296 - protein, 402 aa, unidentified
MNCVGIDVSKGKSMIAIMRPFGEVVVSPFEVRHTVNELSELAGLLKSLDGETRVVMESTGNYHAPVAWLLHDAGLYVSVVNAMLVHDYGNNSLRRAKTDKKDAVKLANYGLDHWLTLPRYAPEEDTRLMLKTCYRQYQQYSKVQTMLKNNLISLLDTTFPNANRLFTSPPRADGCEKWVDFVAAFWHCECVCGLSEKAFTAKYQKWCKKHGYNFSEDKALDIYAFACAHFAVMPKTDTAKLLVEQAVSQLRATSAALAAFKHEMQSLAASLPEYPVVMKMFGVGPTLGPQLMAEIGDVRRFHSKKALVAFAGIDAPPYQSGQMDVRSRSISKRGSASLRRTLFLVMSVILQCAPMNEPVYQFMDKKRSEGKPYRVYMMASANKFLRIYYASVKAYLDSLEYD

SEQ ID NO: 124297 - protein, 427 aa, unidentified
MKKADLLSTLFVGIDISSRENVVAVMDFESTKPIASFAVPNNEPGAEEMARKISTFITPESGLKKLVIGLESTSFYGVHIANYLSTCRELMPFHTEVYCLNPKSIANYKKSYIGLSKNDYIDAFIIADFARVGRITTKPWRGCQYLALQRLTRHRLHLVKALTREKTYMLSNIFLKFSEFTMLDTEEQPFSNEFGATASAVLTEFLSTEEIVDMSMEKLVEFICEKGRNRFPDPQKTAKLLQAAARNSYRLDKCLYEPLTVAIASSFTMISTYNAEIKKVNQAIEKTIKGLNTNAFLSLQSIPGIGPVMAAGIMAEIGDITVFKSQESLAKYAGLVWCENQSGQFKADDTSMSKAGNSYLRYYFWEATSHIKLHCPEYREYYSKKYAEVKTHQHKRALALTARKAIKLILGLLAKNQLYSRNRVGQA

SEQ ID NO: 124298 - protein, 327 aa, unidentified
MRLDNGRTYLTTWKLDKLAAFVKKLRPVDEVAVEITGNTRLFYDTVAPRVARVVVVDSKQFRVISRSVKKTDLNDARLLALYLSKDLLPEVRMKNKQQARVASLTQTRDTLVKQRSALKNKVNNVLSARGLNLPKEALSSEKRLAEVLSLPFDELLLVELRVIVDQIRSLNKSIGELDKAIAEASSELEGHTSLTSIKGIGTTTSAILLSVIGDVNDFPDEGRLASHFGIVPRVSNSNQTEHSGRIHKRGSKLGRTALVQSALIAANYSPYLKRFYEQVKARRGAGKAIIALARGTTLLGESCSTPRPIPLSRGTSPPSRTVPISSA

SEQ ID NO: 124299 - protein, 372 aa, unidentified
MKKPVAVALFVGLDVHKDSISVAHVPEDRRADVTYVGRIGTRPADIDRLVRRLQEKADRLIVAYEAGPCGYVLYRHLTRRGITCLVVAPSLIPKKPGDRVKTDRRDAVQLARLLRSGDLDSVYVPSVEDEALRDLCRAREAAVVTLKAAKFRLKSFLLRLGLHYTGRADWNDAHLRYLAEVVCPTPAQQIVFQESLRSVDEQVERLQRIEAELADLVPAWRLAPVVRALQALRGVQDTVAVTMLAEIGDLTRFDNPRQLAAFLGLVPSEDSSGDSRRQGPITKSGNGHARRALVEGAWAYQYPAKISPHIRKRLEDLPQPIQDIAWKAQIRLCKRFRRLVAKGKHPNVVVTAIARELAAFMWAIAKEVPVTA

SEQ ID NO: 124300 - protein, 425 aa, unidentified
MSYRIAGIDVHKRLLAVVVSEVEVYGEYEFERKQFGTSPAQLQALANWLLEQGAQEVVMESTAQYWKPVWGALERHWQPECRKREGHRPTSGGLHLAQAKSNQGPRGRKNDFADAERLVRRLVANELRLSFVPEPEQRLWRTVMRTKYQLRCNQVQLQNRLEALLEEAQIKLSSLVSDLLGASGRRMLAALGEGETHPEVLVALADRRLRATPEQLCDALGACRDLHPLYRRLVKAALEEWQEIESRIEQLEKEMATLLAKHQEQVTRLAEVPGMGVDSAQQVIAEVGPKAETFPSAGDLASWVGACPGKNESAGVNTSSRSPKGNCHMRRILNQAANAAAKLKGSIFEILYRRHITRLGHNKTIGVIAHRLCRLIWKILHQGVRYDERGPAVSHRSKKNRAARMIRELKALGYQVQPAPAGAVV

SEQ ID NO: 124301 - protein, 345 aa, unidentified
MRILGLDLGTPTSKTAASLLDTDSGERQRSMVSTHPSDLMHLVRRWSPQRVVLEATHATGWVVDLLRALGVEVQVVNPRDPAWVNRSVKTDRQDADLLTILSASGQVRTVVIPETGVRHWRSLISYRQRLVASRTRIKNHIKAILRRLGLTTGRLWTVDGLDGLRAMARPLEDCQPDDFWRGELDLELGRLADAEAHLAALSKRLDAIGKADARVRLLMEQDGVGPRLAEAVVAFIDQPRRFATGKQVGAYAGLAARVHQSGQTSRMGGITRMGNPVLRSLLVEVAWLAIRHDGWMRDVYLHVARGDPQRRQRAIVAVARRLLIRLWATLRDGEARPPARSPAAA

SEQ ID NO: 124302 - protein, 331 aa, unidentified
MDEVRRFVGIDVAKAALDVFIGSAGTAFSVANDEVGVRELLRQMKPADFVILEATGGLETPVASALAAAGIAVAIVNPRQVRDFARATGKLAKTDRLDAEVLARFGEAVRPEARPLADEQAQALKALVTRRRQLVEMLTAEKNRRARAPKVLHRSIDEHIRWLEKRLSGFDDELGELIRNTPLWRERDELLRSVPGVGKVLSSTLLAQLPELGMLNRKQIAALAGLAPFNRDSGKLRGSRCIWGGRAQVRRVLYMATVAGVRSNPTIRTFYLRLRTNGKHAKPALIACMRKFLVILNAMLHDKTHWQTPALTSPTSPLSPLLAAVSEHGCC

SEQ ID NO: 124303 - protein, 388 aa, unidentified
MQIITDRPHAPTAIRTDLGAIFVSLELSRSTWLITSLSPGGGEKISKHTVRSGDVAGLWARFSQLKDKVQVRTGQVAPIIVIQEAGLDGFWIHRLLQDEGVESHVVDPASIATSRRRRRAKTDKIDGEALVRALLAYKRGEPRVCAMVRAPTPQEEDRRRICRERKTLTAERVGHVNRIKGLLFAQGISDYEPLRRKRRERLEALRTGDGRLLPEHLKAQIGRELDRLELTLQQIKSVETERDAMLSPSDEGTPAPGAMLKSLKGIGPEFAAVLWAEGLFRSFSNRRQVAAYAGLAPTPWRSGSVAHEQGVSKAGNPRLRTTMIQLAWLWVRHQPRSILTLWFHQRVQLNGGRVRKVLIVALARKLLIAFWKYVTAGVVLEGAETTAA

SEQ ID NO: 124304 - protein, 346 aa, unidentified
MRQVVRIGVDIAKRWFQIHAVDGDDREVLNRKLPRDKVLGFLAALPPCDVALEACSSSHYWGREISRLGHRVRLISPNYVKPYVKRGKSDAHDARAICEAASRPHMRFVRVKTEEQQAALMQHTSRQLLIEQRTAVANSLRGQLAEFGVIENKGIENVGELIRMLDEEDAGLAHIPATAITIMKILADQLRAVDAHLGLIDEQIDAWQRASGSAQALKTIPGIGVLISAALAAHVPDPSIFRSSRDFAAWLGLVPRQNSSGGKERLGRITKQGNPYLRRLLVLGATSSLRWLGKRTDSLAEWTRKLLQRRPARLVTVALANKLARIAWAIMTTGELFHSNAEATTA

SEQ ID NO: 124305 - protein, 410 aa, unidentified
MRYYLGVDWADQTHAVWVVEEDGTKIAARTVPHTAEGLSEWGRELDEWRAQGIELWAAIERREGRVVDFLLDHGVVVYPVNPKALDRARDRFRQSGAKSDPFDARVLADFLRTDHAHLQALQPSSEAAQELKLLTEDYQRQIRQQTRLVNQLTHTLKAYYPRALEIAELTTALTREFLHAYPTPQAVTALTPRQWQRWARAHHLSEARTRDLWTVLQSPQLPVPAHVVRAKARLMLTLVAQLMPVVAAVGHYREAIEDFFGRMPEAQWARTLPIGNHGITAPTLWARLGDAPGRWESFRHLQAHAGTVPVTKRSGKQQRVVHFRFACDKALRYVVDQVAYLSLLSSVWARAYYDQQRARGHAHRHALRALGAKWLKIIFVMWQRQVPYDEQYHLATMTRQQLRQRQERIA

SEQ ID NO: 124306 - protein, 427 aa, unidentified
MNTIRPVAGIDVAKEFSEFCLLAPDNSVLATLTIRHNSPQDIEKAVKLLQKSEKDFGCSPIVIMESTGHYHKILFHALTQREIDVVIVNPIQSDSIKNLDVRKVKNDKWDARRLALLYRIKGESLRTVSVTASDWAALKDLIRQYYVVLDEMTAHKLRLRSLVDRVLLGFEEDFFQISSVTGLAVLKAYPSAKAILHARKATLVKLIAHTSHKGLQKAQLKYEALRKTAQTMLELGDPSEHLALIIRSEITLIEDLQAVQETILQAIEALVEKNRNSDQPAMARSIDLLDSIMGIGFISAATFTAEFGDVASFKSAQSLTAFSGLDASVKQSGKFKGSRNRISKRGSRLIRRALFHVASANIRTNKNNRPNNPYMQAFYQKKCQSKPKMVALVAVMHKLLFVMYAVIRDQRPFELRDPKEHAARLAA

SEQ ID NO: 124307 - protein, 347 aa, unidentified
MKFYTKQHQYYCGIDLHTKNMFVCILDSGGNTRVHQNIRTDPGALLRLLAPFREDIVVSVECMFTWYWIANLCTQENIPFVLGHALYMKAIHGGKAKNDKIDSLKIATLLRGGMLPQAYVYPARMRATRDLLRRRNHFMRKRAELFAHIQNTRSQYNLPDPLGCIAKPQNREGIVERFDDPSVQKSMAVNLEMIEAYDRLLTRLERDIIASAKEHDLRSYALLQTIPGVGRILALVILYEIESIHRFPTVQDFASYGRLVKCLKESNGKSYGPSGKKIGNAHLKWAFSEAAVLFLKGNEPGKKYLERLSRKHGKAKALSILAHKLGRAVYFMLKNKEAFNQKKFLGF

SEQ ID NO: 124308 - protein, 423 aa, unidentified
MTVVYPICCGVDVHKTFFVATLITTEGIVPNYKKRRFSTFNNQILACKAWLLENDCRDVCMESTGKYWIPVFNLLEDSIRVTIANPKWVKTIKGNKDDAKDSKWIGDLFRIGLVPGSFIPGKDVRILREYTRYRFKLVSCKSSEKNRYQNVFTVCNVALDAVVSDMFGKSAASITDYIVNADTFDPAHCVSLLKSSLKKKADEVVESIDGFQMTAPQKERAKLVKDHYDYLLEHIQKLDTMLDVLAKPFEPAINLLCSIPGVRRNSAITVLSEIGTDMSQFDSSKRLCRWAGLTPGNNESAGKKKSVRVTRAGVYLKPALVEAAHAAVQSKATPYYRIKYERIAKRRGKKRAIIAIARMILTAVFHMLSTGEVWNPVDLNQIDMPPELREKELQKSLRRAAKLLVAHGIVAQEAVVFRESIAA

SEQ ID NO: 124309 - protein, 345 aa, unidentified
MPIVGGLDIHRKQLTFDYLDTVTGEVKRGQIAPADRVHLRAWLARFAGRDDVAFAMEGCTGWRYVAEELAAAGIAAHVGEPADTAAARGRKRHAKTDRTDSRHIRTLLAEGRLPECWVPPAQILEYRALLETYHDLRAERTAWVQRIHAVFFHQGAPALGEGTLRTGQGLAALQTAAAAHLSPAGQLQVATALDMIAAVEARLQPLRHQLLAAARHLAGAKVLAARLYGVGPVTALALTCWLAGEGRFSSSRKAVRFAGLDITVWSSDRKGPPGRLSRQGPPVLRWAVYEAGKTHARASAPDHGYYAAVKDRKNGKRAALSEARKIVRQACHILTELGDDALAAA

SEQ ID NO: 124310 - protein, 357 aa, unidentified
MVTGLKHQMEKRSMDHFAGLDVSVKETNVCIVDDTGRIVREAKVASEPEALLQVLAKPTCHFKRIGLEAGPLSQWLFSALAEAGLPVICVETRHMRAALKAQINKTDRNDARGIAQMMRAGLYRPVHVKTLRSQKLRMLLTHRKLLQSKAIAIDNDLRGTLRNFGLKVGIVGTVKFEARIRDLVEDLPDLAVLVEPLLVVRRVLREQLGILHRRLLAIVRDDEVCRRLMTVPGVGPVVALTYRATVDVPARFKNSKAVGAVFGLTPSKYQSGESERSGAISRCGDEMMRVMLYEAAQVMLTRTNKWSWLKAWAVQIARRRGMKKAIVALARRLAVIMHRIWVDGTEFRWAREEAAAA

SEQ ID NO: 124311 - protein, 341 aa, unidentified
MKVSTLGIDLAKNVFQLHGVDHEGHTILRKKLTRAKFVQFVIQLEPCLIGMEACSSSHYFARLFTRYGHEVKLIPPQYVKPYVKMNKTDAADAEAICEAVTRPNMRFVQIKTEEQQAVLALHTERGILIRERIACANSLRATLAEFGITIAAGQSHLTRELPAILEDGENGLSPFVRTSIYRQSKHIRELEEQVKQVEEALASWYRTQEACQRMAKIPGVGMLTATYVVAAVGNARQFSTAKQFASWLGLTPKEHSSGGKQQLGGISKRGDGYFRYLLVHGARALTAWVNRNGAVEENSWLQGLLERKHYNVAVVAMAAKTARIMWSMLSHNTEYQPRQLA

SEQ ID NO: 124312 - protein, 313 aa, unidentified
MEAMLKSCAGLDVHKKTVVCTVLKEDECGNLVKDTREYATFRSNLRDLASWLKKEEVEMAVMESTGIYWRTVYDVLEEAEVKVMLVNAQHVKKVPGRKTDVSDSQWLAELSRCGLLRASFIPPRDMRQLRLLTRYRRKLIETLAGEKNRLQKVLEDGGVRLSSVVSDIDGVSAGRMIDALIEGDEPLDRIAKLALGKLRDKQSELRLSLEGNLSDRHRLLLKTRHILWLHTTISEIDAQVVAAMEPYKQQWGLLQTIPGVDEISAAMLLAEVGTDMSVFGSKDKICSWAGICPGNNESGGKKRVAGQAKETGT

SEQ ID NO: 124313 - protein, 313 aa, unidentified
MAMETREFIIGIDVAKAELVVHFQSNGAQMSLSNTKPEIKKWLKQQPANTALCVEVTNIYHLDVVEMAYEEGFKVYVIDGFQLSNYRKGIGGRSKTDAGDAALLGRYLEREGRELRPWTPPPAVYGKLQGLLRRRSALVTMRTALSQSWGNEQLLKAAFKSFTRQMDKLDLLVQKKLRELLKEAGLLEQVARCQAIEGIGFLTATALVMAFIRGEFKNSDAFIAFLGMDLRVSDSGQKTGRRRLTKRGCSEIRRLLHNASMSASRSAAWKETYEHYRNKGKATTEALVILSRKLARVAFAVMKKEEEYVSKTA

SEQ ID NO: 124314 - protein, 353 aa, unidentified
MLVGELDNTSGATDITSLTVHAGIDYHDDTIRVCVLNDEGEVLVNRDVNNNPGAVRDLVARYGIPKAIAIEACSGAAEFAEELRKQSQWSVRLAHPGYVRKLKQGPDKTDHGDAWLLADLVRVNYLPEVWLADEQTRQLRRLTHYRQGLAAERKNIKLRIRALLREERVKCPLNCRAWTKAWMEWLRIAALGRESRWIMNQEMKRLQRIENDMQEAEDRMQQATADDDLTRRLLEQDGIGLITAVTLRAEIGTFDRFRTGKQLAKFCGLTPCNASSGKREADAGLIRTGNRALRAVIIQAAQRLPRYVVKWKTMKDRLRQRKPANVATAAVANRWMRWLFHQMQPKEKQALVC

SEQ ID NO: 124315 - protein, 315 aa, unidentified
MSEQGVNVGIDVSKDTLEVAASNGEHFVLGNEEAGHGELVQRLRGLQPERIVLEATGGYEQAVVAALGLAGLPVIVVNARQVRDFAKALGRLAKSDAIDAQVLRQFAETVKPPYRPLPEAQTRELEALVTRRRQLLAMVVAERQRLAQAPAVVRRDIHTHIAWLIKRLKDTDRQMGQALRASPWWREQEQLLSPVQGVGPVLLATLCAGLPELGRLGRREVAALVGVAPFNCDSGRFHGKRHCWGGRAEVRAVLYMAALSAKRCNPVIRAFYARLIAAGKPTKVALTACMRKLLSILNAIVRDRSVWNPSLHLST

SEQ ID NO: 124316 - protein, 459 aa, unidentified
MNKVKNKTENRFEKMPVVHLHAAGIDVGSRSHFVAIGQNKEDVKEYGVYTADLHRLCQDLVNSGKTTTALESTGSYWQPLFVLLQHYNLNPILVNGKFTKNVKGRKTDVQDCQWIQKLHTMGMLEGSFIPDLFTETVRQYYRHRQCLVESAAGYINKMQKALRLINIRLDTVLKDVMGKSGKDIIEAILKGEQNPVVLASLAHPNVKASTAEIEAALTGDWRKEYIFELRQCYELYQYYHQKMDECDEEVKKLLTTEIERKQKEEGLAKVECLKIKKKKARKNEARIDIQQLTVDLTGGIDISVIDGVGLGLLLCLVSETGLDLKAFATDKQFASWLQLSPDTKKTGGKVISNKTKKGKNRLAQAFMHAANAIGNMKQGDYLVHFFKRIERRNCRTVAIVATARKLAVIVWNMLVKKKPYKPEMPAEYLCKIRQNQVRNIQRKIRQLNIQEGELLFAAT

SEQ ID NO: 124317 - protein, 411 aa, unidentified
MDKIYDKCCGIDVHKKLIVACFRCGRKQEVREFGATTRELLELADWLKEGGCEMVAMESTASYWKPLFNILESSDLKAMVVNARHMKAVPGRKTDMKDAEWIADLLQHGLLQPSFIPDKDQRELRELVGYRKSLVGERTRELNRLQKMLEGANIKLSGTVSDINGKSARSILEYLLTGQSIDGAKYDEMYEKKVIAHNLKATKEQIIDDLNGVMSPLQRRMMKELLAHLDELNAHIKKLDDEIDNFMKPEEKQASQAIQDVTGIGNTSAQAIISVIGTDMERFPTDKHISSWAGLCPGDNESAKKRKSGKTRKGNALLRTTLITCAHAAVKNKQSYFYAQFMRISAHRGPKRAYVAVAHSMLIAIYHILKDGVIFKDLGADYYNQFNKERKINAYLKKLKALGWESPVVAA

SEQ ID NO: 124318 - protein, 387 aa, unidentified
MQSVTSATAVATTVRAKDITLFASLELSKSKWVVTINSPGSEKFSKHVIEGGDGACLLDLLSRSRAKAEQRYGVGVKATVIQEAGLDGFWIHRLLLADGIESHVVDPASIAVARRHRRAKTDAIDGETLLRTLMAWARGERRVCSMVRAPSPEDEDRRRLTRERGTLLKERIQHTNRIKGLLGGQGVRDYNPLRRDRFERLEALRTGDGRELPAMLKAEIRRELDRIALVTTQLAAVERARDALIRTDAEEPNNPAALLLKLKGLGPEFASLLWLESLFRSFGNRRQVAAYGGLAPSPWQSGGVERDQGISKSGNRRLRKTMIELAWFWLRHQPDSALSRWFQARVGAAKGRIRRIAIVALARKLLVALWRYVTQGVVPEGAVLKAA

SEQ ID NO: 124319 - protein, 423 aa, unidentified
MTKLTSTPAGAVLVAIDMSKKRQEVLIERPEGGRRRRMTVMATKEDYDGFAEQLAAIGRPIVVGFEATGNYHRTLAHRLLTAGFELRLISSVALARTREALHNGWDKNDPKDAQVILHMLRIGATQRYVDPLAAGINDLQELSKTHETISRMKTQTWHRILTHYLPLYFPEIARFAGNSRSDWFLALIERFPTPASITALDREAFSAAAWPLIGRKVSKARLINDIYETASASTALPVPEDSAAITMFRMVIAQGRSLIQQRDEIERLAHTRLADDVDYQLLRNIPGIGPINALTILAEAGDLRRFNHHRQFLKFCGLDLATCQSGTFRGRTKLSKYGNARLRRTFWMAAQVAARQRDNSFRDKLGRYTAGHADDADRRRKAMTALTAKMARVAHAVIKTGTEYRPFLERSDARWKAPSLQVP

SEQ ID NO: 124320 - protein, 387 aa, unidentified
MPQLNDLSRSLVALDQDSTIIAVVELSQSSWLVAGVLPGIERQPQKKLEPSAERLLGLLHRWRDEAVRAGKKITRIALAFEAGRDGFWLARWLNARGVEAHVIHPSSVAVSREHRRAKTDRLDTELLKRGFLGWLRGERGHCSMARVPTIAEEDAKRPNRERECLVGERTRIVNRMKATLARLGVRNFKPTLRKAAERLATVHTPEGTPLPRNVLAELQRDMARLGFVVSQIREIEQARQKRLEQETETGPHAKVRQVARVIGIGIETADMLVHEVLSRPMRDRKAVARYAGLTGSPDESGARRREQGLARAGNARVRRGMIQLAWRFLRFQKESALAQWYRARTADSRLGTRKTMIVALARKLLIALWRFVTTGETLEGVILRPAG

SEQ ID NO: 124321 - protein, 341 aa, unidentified
MNSAAAAISVNEATLSRTGYQRVIGVDVAKDKLDLCDSHEKITGSINNDFDHIHKRLLDHVDPASRTLIICESTASYHLLMMDAAHDRSVDVAVVNARQVRDFAKGQGRLEKTDQIDAGVLCQFGQDVKVHLTAPRTAQEKNHTALVNRREALLKMRGQERMRLEHTHDAEAIKFLEEMLENIQKQLQSVEKRLEAILKELAKEDPKVNILLSHTGVGKVTTSVLLTRLPELGTLNRKQVAKLVGVSPIANQSGRKDGKRPIRGGRQEVRNAMYMAANSARRHDPATKAFYERLRGQGKPFKVAMVACMRKMLSTLNQMVRNGETFDATKYASMAEVQSCR

SEQ ID NO: 124322 - protein, 345 aa, unidentified
MPIVGGLDIHRKQITFDYLDTVTGEVRRGQIAPADRGHLAAWLAGRFTGQDAHFAVEGCTGWRYVAEELAAAGITVHVAEPADTAALRGRKRHAKTDRTDSRHLRVLLADGRLPECWIPPWHVLECRALLETYNDLRVEHTAWVQRIHAALFHQGAPTLGEGGLRTGEGLAALQATAATQLSPAGQLQVAVALDKLAGLDRHLDVLRRRLVTAARQLAGARELHARLYGVGPITALALVCWLGGAGRFSSARKAVRFTGLDITVWSSDRKGPPGRLSRQGPEVLRWCVYEAGKTHARASAPDYRYYAAVKDRIDGKRAAISEARKIIRQAVHILAELGDGALAPA

SEQ ID NO: 124323 - protein, 392 aa, unidentified
MYIVGIDIGKNHHEASIVSPEGKQIGRSLRFATTHKGADSLMRFIFKNIGNSPCVFGMEATGHYWYPIYSFLKAKGYTIYVINPIQSDSLRKMYIRQTKNDSIDSFLIAEVIRFGQFGTTSMADENILAMRQLCRYRDSVISSRTEIKLRIGTIMEQIFPEYEKQFSSLWVSTSMGILEKYLTPENIENAPIDELFEIIKDKSHNRLTRAKAISIKEAAADTFGIKIAQDAFSFQLKQLIDRMNFLDKQIEALDCQILEYYEKFDCYLHTIPGIGMIGAATILAEIGDISRFKNSSSLIAFAGIDPTVRQSGEFNSTHNHMSKRGSPYLRHAIFLAATTCSFHNSPLNAYYKKKRDQGKHHLTATGAVARKLTTVIYAVLRDSKPYEPKKFC

SEQ ID NO: 124324 - protein, 324 aa, unidentified
MFYLGIDVAKAKIDCCLILENSANKKKTKTFSNTPKGFEQLQIWLNQHAATSTQTIILMEATSIYHELLAKYLFDEGYQVSVTNPARARYFAQSMSKLNKTDKVDSEVLARFAMTANLHFWQPLPKHIQLLNALLDRRAVLCEDLQREKNRLEKAESTFTMEPVLQSLHKSIEQLNKHIQGIDQQIDDHIDQNPDLKNDKELLSSIPAIANRTSLLMLSFLRSHTFERASQAAAFVGLVPTQKQSGSSIHGRSHLSKAGSSKIRAGLYMAAIVATRHNPHIKGMNERLLANGKTKMMAIGAAMRKLVHLCYGVLKHQQPYQADY

SEQ ID NO: 124325 - protein, 365 aa, unidentified
MTKVRTWAGLDVHAAATVACVVDVPSGEMSVQRLAGRTSEVTAFCARLPAPVRVAYEAGPTGFELARALAAAGVACVVAAPGKIERPAQDRVKTDRRDAERLVRLLMIGGLHPVRVPSGEEEALRDLVRAREDIRGDLMRSRHRLGKLLLRHDVRYDDTASAWTTAHRAWLSRVDLGERAAQATLLDYLGAIDALVIRRDTIERMIAELVPHSPWAEQVARLRCLRGIDTLSAVGLCAEIGDFSRFDRPGKLASYLGLVPSERSSGQTRRQGAITKSGSRHARRLLVEAAWHYRRPPRRGTTLQRRHEGQPAQVLAISWKAQQRLHHLWRRLDSERGKRKTIVAVAVARHLAGFCWAITTTTPET

SEQ ID NO: 124326 - protein, 405 aa, unidentified
MDIQPLFACAVGMDIHLMVIHVCVILQREGFEPEVHRKQFGTFKRDLRAMAEWIAGFSPDTVVMESTGIYWKSPYTYLERVGLRALVVNAQHVKQVPGRKTDTSDAEWLAMLARAGLLRGSFIPPEQLRNLRQISRYHQRTTAMLAMEKNRLAKVLSDAGIRLSGVVSDLHGIAARAMIDCLLGGGTPEEALDHAGRLRAPKDQLLASLQGELSAEHRFVAQMIRHHIDALETQLADLERRLLEGLKPQEAALQLLLTIPGIDRVAAARLLVEIGDDMAAFGRADRLAKWAGMCPGNHESAGKRKRGTTAPGNRYVRTVLCEIAWAATRTASQFKSRFQGLVIRRGAKKAIVAIGHQVLKIVFVLLSHQVPYHDTAVDYKALVVKRNAPRWIRALKEFGFLPQPT

SEQ ID NO: 124327 - protein, 340 aa, unidentified
MKLYTAFDLHANNSYAAIIDQEGHKVAGKKLNNDPQEVFDFLKPHRKNIVGIVVESTFNWYWLVDNLMDKGYKVHLANTTAIQKYNGLKHSGDKEDAFWLAELLRLDVLPEGHIYPKEERPIRDLLRKRSHLVRLRTSLILSLQNIIDRNCGTRINVKAIKKRKEDMVSPFFTGSDDLSLTGKVSKEAIDFFTTQILTVENFVEDKLELKKPYQYLLSVPGIGKILGLTIMLETGPVERFEKVGNYVSYCRKVSTRWTSNDKTKGKGNKKNGNKYLAWAFSEAAEFSRRYDEKARAYYNRKMQKTNFMVAHNALAHKLARAAYHIMKDQVPFMPDKLFTS

SEQ ID NO: 124328 - protein, 346 aa, unidentified
MRKIAYLGMDLHAMHFTLGEMDGKGEFIGNRQFRTSEKNIMQALESVKAKHKLLTIEEGPLTYWAAQIAHPCVDQVIPCDPRENSLIYKSPYKEDKGDTRRLCRLLRLGELKQVYHPDNDDRAIFKAAARHYIDLRNQLTRFKLKIKAMYRHWGIIDIFTDTVYTSKGRVKYLQQVKHLSIRKQLLQLYHLMDQTEAMRQSALKNMKRLGRKYPEIRDFMKIPGIYDVHAHIYNAFIQTPHRFSKRSQLWKYCRLSITDRSSDGKQLGFKRLDSSGIGELKALSYRAFMSAMRGDNEIKRYYRASLNRCHDHKHARLNTQRKILETMYVIWKKGVPYRPELFSESA

SEQ ID NO: 124329 - protein, 310 aa, unidentified
MEQLFIGIDVSQDRLDAHVRPSDQSFAVARDSEGLAALVERLKAFDPYLVVLEATGGFEVTVAAAVVAAQIPLAVVNPRQIRDFARATGQLAKTDALDAKAIARFAEAVRPEPRPVPNAQARALGELVARRRQIIEMMTAERNRRRQLTSQRLIKSVDRLLTVLQQELSELEQDLDQSIRGTPAWREREELLRSVPGVGNVVARTLIADLPELGRLDRKQIAALVGVAPLNRDSGKMRGKRTTWGGRAKVRCTLYMAALVASRHNPILKAFYQRLLSAGKPKKLALTAVMRKLLTILNAIVRDNIRWQTA

SEQ ID NO: 124330 - protein, 476 aa, unidentified
MSKGSGNGTTRGDRKRNARRERLRGLLPRDGAVIGIDLAEDKQALAVIDHDVRVLARKTVRVKAFRLGEALDWAVGQARAKGFAAVTVACEPTGPRWLQVQRLCAERGLPLVCIQPLVSHIAREQQDYTTHKSDEADCVLIARLAAELHCYLPEELDEAWAQLRHLGRRRQQLITSATASVQRVRDFLSVAWPVAPEACAHPFESVTWLAAMRVVTSRCGGQPEKLAAVGLAEFTALVRQAVAGWGGQRPAGPVCRAVFAALASAEGVVASHRRGLLRRCADELGDLQQTRAQLRAVEAGMAAVLGELGLSRLADIPGLTAVGAAAILAETGDPRRYDSSSSLVKHAGLSPSGNASGAFEGQAHISRRGRPGLRLTVWRAIWPLLIHNSVMAAKYAAMIAAADAAAAQAAQAQSGTGSRQASAAAAARRAKARVACAASLLRWIYSMVVHDTGWDPDVASGAASYQHAPRCQAEAA

SEQ ID NO: 124331 - protein, 337 aa, unidentified
MKYSGIDLHSNNSVVTVIDETGRVVAERRLVNELGRVLAFLQPWRDELAAVAVESTYNWYWLVDGLQAAGFMVQLANTGAIKQYDGLKHSGDETDARHLAELLRLGILPTGSILPPAQRAIRDLARKRMQLVRSRTAHILAVENIVARQLGARISSNQIKRLAEDGIDQLALPADVALAIKSNVAVIVTLNEQIERLERRLREDVGARPGYALLHSVPGIGNVLATAMVLEIGSIDRFPGVGQFASYARCVDSRRVSNGKKKGAGNTRNGNKYLAWAFVEAANFARRYCPEAKRFYERKKARTNAVVAVKALAHKLARACYHILKEGKPFEVQRCFA

SEQ ID NO: 124332 - protein, 318 aa, unidentified
MEKEFIGIDVSKGSLDVAAFTTNKKWHFPNDEAGINQLVKALSGLTPALVVMESTGGYETPLAYALNKAGIPCAVVNPREVRDFAKATKKLAKTDIIDARVLAHFAMAIKPEPRPLSDEQTQELEALITRRRQVIEMLTAEKNRLHMARKPVKDEIKDHIAYLEKRLVEIDVDLRARIEESPIRREKYQLLQSVPGVGPNLSATLVIELPEMGILNRRKIAALVGVAPLNHDSGTKRGKRSPWGGRPQVRAALYMATLVASRHNPVIRQLYRRLCEAGKAKKVALVACMRKLLTILNSMLKHRVPWRFSQPALASSTH

SEQ ID NO: 124333 - protein, 314 aa, unidentified
METPVFIGIDVAKAELVVAVRPTGERWTTPNHPGAWPALVARLQALAPQGIVCEASGGYEVPVAGVLGAAGLPLVVVNPRQVRDFAKATGRLAKTDRLDAALLAHFADAVRPAIRPLPDAATQLFAALVTRRRQLVEMLTAEENRRGLLPAALRAELQDHIADLRRRVAQLDQDLDQHLRASPIWRAQEDLLRSVPGIGPGTARTLLASLPELGTLDRRAIAALVGVAPLARDSGSLHGRRSCWGGRATVRTALYMATLTGVRFNPILAAFYEHLVAQGKRKKVALVACMRKLLTILNAMVRTKTRWAPRPGMA

SEQ ID NO: 124334 - protein, 335 aa, unidentified
MKHDMHVLGIDIAKRVFHAVGMDDRGNIVYRKRLSRHDLIPYIAQLPPVRIGIEACGGAHYWARRFRAHGHEVKLMAPQFVKPYVKSNKNDSRDAEAIAEAVTRPTMRFVPIKDVDQQDLQAPHRVRERLMGARTALVNEVHGLLHEYGIIISKGVAKFRQAVVGKLESEKDKLTSLSREMFWKLVDEFALLEKQLAYDQEKRDTVATTHPECQRLMTIPGIGPFTATALVAAISDASAFKNGRQCAACLGLVPRQHTTGGKERLLGISKRGDTSLRKLLGHGARTTLRWVGRKTDRRSQWMRQLLERRGKNRTAVAVANKNARMVWALLTSHQD

SEQ ID NO: 124335 - protein, 376 aa, unidentified
MKNLRFVGLDVHAETIAVAVAESGGEVRSLGVIPNRAESVRRLIGKLGKPERLRVCYEAGPTGYALYWQLTQLGVKSEVVAPTLVPVRSGDRVKTDRRDAERLARCYRAGDLTPVWVPDAAHEALRDLVRAREAAKADQLRARHRLSKFLLRHGRRPAEGVKAWTVKHWEWVKSQVHFQQPAQTATFIDYVHEVEHGVGRIERLERAIDAAVETVPPQMRVVIEGLQALRGVAKVSAVTLVAELGQISRFARARQLMGYSGAVSREHSSGPRVRRGAISKAGNAHLRRVVIEAAWSYRHRPGIGKTLAARQRRQTEAVKEIAWNAQCRLFHRYRKLMAAGKSKQQAVTAIGRELLGFIWAIGVHLERLPKPHPAAA

SEQ ID NO: 124336 - protein, 355 aa, unidentified
MNVKKYIGMDVHQETISIAVMTADGKLVMESIVETKASTILQFIQGLHGDLHVTLEEGTWAAWLYDLLKPHVTELVVCDPRKNALLKEGNKSDKIDAGKLADLLRGGYLRSVYHGENGLRTLKELARSYLTISQDLTRVMNRVKALYRGWGIACGGQQVYAPRHRSEWLNKIGEAGVRRRAEFFYQQLDAVRTLRQAVRRDLLAESRKHGATKLLRQIPYIGPIRAALLIALIQTPHRFRTKRQLWTYSGLAIETRDSAQYRYVAGQLQRSKKPQQLRGLNENHNHDMKAIFKSAAAMASRREGPFQDFYLELLTKGMRPAMARLTLARKIAAITLILWKKGAHFDAEQLKPQAA

SEQ ID NO: 124337 - protein, 364 aa, unidentified
MALKNDIMEKRLKQSLGIDVSKLGLSLSLGFLTDKLGKEFISHPDVPNDLSGYKEVLKWLKTSVDGTVDLVVVMEATGVYHQGIAHYLYSHGHAVSVMQSGRVKRYAQSLDQRSKTDALDSRMLSMLGLERSLRPWRPPSEELRELKALSRERSSLLKDKVMETNRQGAIDSGVHGNTKALKRHRDRLKLLNGQIAMIEEEMKEIVSKNEVLGRKIGFMMSIPGISFISAATVVGETLGFESITSAKQLTSYAGYDVVLRESGSFKGKTRISKKGNSHIRAVMHMPSMTCVRCNPTLKRFYNRLKPKKAKPLVALIAVQRKLLILMYTLWKSEKFYDAAYETKKQQKRKALAAQDNNLINQLVS

SEQ ID NO: 124338 - protein, 367 aa, unidentified
MDEVSTIGIDIAKHVFQLHGVDGAGEVVLCRRLRRGQVMRFFAALPPCIVGIEACGTAYFWAREIASCGHDVRLMPPSYVKPYVKRNKHDAADAEAVCEAVRRPSMRFVPIRTAEQQAALVAHTVRDLLVRQRTMLVNALRGHLAEFGIVAPRGLHKADELAAVVADENDGRIPASARKALRILVAEFAALDLRITRLETEIVAQAKTDAVARRLATIPGIGPIIASRLSAMVPDPAIFRSGRDFAAWIGLVPRQSSTGGKPRLGGISKRGNGSLRRLLVGGAMAAMFRAKALQNDPWLCQLRARKPVMVAAVALANKIARTIWAVMRRNAVWRPAALRSSSRPHQSGAVLAAVKTMPPAAVAFGQS

SEQ ID NO: 124339 - protein, 332 aa, unidentified
MSIIGCDLHTRYQVIAMLDTETGEVATRRLEHEGGEAKAFYAGLGKRALIGIEATGYTQWFERLVGDLGHELWVGDAAEIRARAVRRQKTDTRDAEHLLDLLIHQRFPRLWIPTPEERDYRQRLKHRDKLVKMQTSVRNQLHFLAMSQGVCRKRRLWSTRGRRELEALPLGQWASIRRQELLALLDGLGPRIEEMDRAVKAEALRRAEAVRLMEQQGVGPVTALAFVLTVGPVERFPSSRKLVSYLGLNPREDSSGGHQRLGHISKQGNEMLRWLLVEAGHTAARLDPELGRLYQRLKFRRGGSVAKVAIARRLAVRLYWKLRNGTAGSHVQ

SEQ ID NO: 124340 - protein, 344 aa, unidentified
MSVRVIGIDLGKTVFHLVGMDEHGNVAVKKRFSRAQLMKFLVNMPPCLIGMEASCGCHHVGRHLAAFGHEVRLIPAQFVKPYVKSQKNDYRDAEAIAEAVQRPTMRFVPIKTEDQLDVQAIHRVRERLLEQRKSLVNQLRAFFLERGLIVRTGRAYLWRVLSDVMAEAEQITSPRMFRLMNAIVQRWRMLEVAIDDIDCEIATIAQNDDACQRLQTVPGVGPLVETAMVAAVGNGSAFQKGREFSAWLGLVPQQCSTGGQTKLLGISKRGNEYLPRLFVHGARSVCLHVNRERHAWGKWITALRERKPSNVATVALANKLARVAWSVLNRNQEYRNLVLSHAAT

SEQ ID NO: 124341 - protein, 313 aa, unidentified
MSQNNTSILHLGLDVAKSSLQLDLAGTSHSLTNDPGGHAQLLKLLRPFPHAHIVCEATGGYEQPVVRILHAAAIPVSVVEAGRVRHFARAKGLRAKTDPIDATILSAYGHTFQPAPRPAPSATQARLSELSSRRCQLIHTLTTETNRAAHYTDKLSRAQSRQLQRLLEKQIAACDAAIALLIAADDTLCTRARRLDAIPGVGPVTAAIVLAQLPELGQISHQAAAALAGVAPYNRDSGDHCGVRHIAGGRTTVRCALYMASLSAVRSDPILKTFYSRLRAAGKKPKVALVACMRKLVVLMNRLLKNPNFHLAS

SEQ ID NO: 124342 - protein, 468 aa, unidentified
MVDDSRKKAQEPEGGTQRKALTPALQVVNPNAAGMDLGSREHYVAVPADRDERPVRHFGCLTPDLHEMARWLKTCRVDTVAMEATGVYWVPVAQVLESRGLEGVLVDASDLKNVKGRKSDVQDCPWAQPLHTYGLLKGAFRPTQAVQVLRGYWRHRETLVEGGAQQIQRMQKALEQMNLQLHKVLSDISGVTGMQILRAILAGERDGAVLARMRNGRVKCSEATRVKALTGDYRPEHLFTLRQAVELYDVYPEKIAECDAEIQKVMARFQTRPARGTRNPKASKRRSSARRKNQCHFDLAEELFRIAGVDVTRIDGIDGLTAQTVFAEVGFDLSAFATEHHFASWLRLCPNNRITGGKVRSSRTRQGQNRVALAFRRAAQSLHHSQSALGGFYRRMVARMGPGKATTAVAHKLARLFYRRVRYGQDYVDQGEKQYQQRYQEHQMHLLKKRARQMGFALVSVETGVVVS

SEQ ID NO: 124343 - protein, 391 aa, unidentified
MIFVGIDVAKDTHYAAVSDDSGAVLVKPFAFQNNAEGFCLLLKKLSEFDRSKLLIGLESTGIYSENLICFLYESGFRLAVINPIQTATLRKTAIRKTKTDKVDTMLIIKSLMVNSYRLYSQRDADSLKLKTLCRFRQNLKKSKARLKIQLAGYVNLVFPEFGKFFKSGIHIAASYALLKKYSSPKEIAALRTSTLCTLLSKASHGRFGKDTAEALKSLALSSVGVKNPYISIQIAQTIAQIELLEQQINDLNSAIEEAMESLNSVLMTVPGIGAVNAACILGEIGDIKRFSKPCKLLAYAGLDPTVRQSGQFTAKSTRMSKRGSALLRYALINSAWQLTLNDTTFKAYYDLKRSQGLNHYGALGHVAHKLTRVIFKLLTSDTPFNPAKLVA

SEQ ID NO: 124344 - protein, 335 aa, unidentified
MDLAKNVIQVHGVDQRGKAVLKKQLPRRRFVEFFANLAPCLVGMEACGSAHHWARQLEKLGHQVKLMAPQFVKPYVKTNKNDAADAEAICEAVSRPNMRFVPIKNGEQQAVLALHRARAGFVKARTAQANQIRGLLGEYGIVLPQGIVHVTKRLPAILEDDESELPGAFRRLLVRLGEHLNELDRQVGELEAQIQDWHREDAASRKLAQIPGIGPLTASASVATIGDARSFQNARQLAAWLGLVPRQHSSGGKTLLLGISKRGDAYLRTLLIHGARSVVRVAERKADIPTWLTQLIGRRHKNVAAVALANKNARIVWALLAHDRDYQAAYAPGPA

SEQ ID NO: 124345 - protein, 466 aa, unidentified
MTTAKLWRNRKERKDWARRLRSEDPGLEVVHPHAAGIDVGNSAHYVAVRPDRDPEPVRRFECFTADLYRLAEWLKSCGVKTVAMQSTGVYWIPLYEILEEHGFEVYLVNARHTKTLPGRKSDVQESQWLLKLHTYGSLNNSFQPPAEIRVLRTYWRQRAEHVSGAATCIQRMQKALTQMNLQLANVISDLSGVTGQAIVRAIIAGERNPQKLAELSDPRIEASREEVAKSLEGNWRPELVFVLRQEVEMYDTYQWRITECDQQLQKHLASFANTVSPQSPEAEPSGKKKAKPTKNAPRFNLGSELQRITGVDLTRIDGIDVMVAQTLLSEVGLDMSRWNTEAHFSSWLGLCPDNRISGDKLLGKGTRHVVNRAATALRLAARNLIRSRSYLGAQYRRLRTKLGAPKAITAMAHRLARLVYRMLKYGQRYVDKGTEYYENRYRQQQIHLLQKKAAKLGLQITIAVQS

SEQ ID NO: 124346 - protein, 340 aa, unidentified
MSTIQVIGIDLGKSNFHVYALGSNPQASFKKHFSRKQLIDFLANQPPTIVAFEACGGAHWLARKCQELGHDAKLIPPQYVKPYVKTNKNDFVDAEAITEAATRHNMRFVSPKTEEQQVIAICHRVRDGYVKERTAVMSRIGATLLEFGLSLQTGHKCMKELFCWLARQEHVTLPPLLLRELEVMHSDYHRLNDQIAEQDRKLKEWAKQEELCELVKSIPGVGDMVATALVMEVGSAVQFKNGREMAAWMGLVPRQYSTGGKQKLLGISKRGNKHLRCLFVHGARAMMSRLGRNKGPYDAWLLKLRESKPFNVVCIALANKLARIAWAVLTTRTPFQGTAC

SEQ ID NO: 124347 - protein, 352 aa, unidentified
MTGTTILAIDLGKYKCVACAYDRATAAAEYRTTPTSRADLERLVRSARPAAVVIEACVLAGWVSDLCGELGVPCRVANTAAEAWKYKHTKRKTDRDDALRLAQLEALGQLPEVVVPEKRVREWRALIAHRQALVTQRVAAQNRIRAILVGQGLPAPRGAKAWTAVGLAGIAQFARPLAECAPEDLWRGRLELALRAYRQAEELVVEAEAKLDEIGKADARVRLLDTVPGLGPRTAEAVVAHLDDPRRFKSGKQVAAYGGLVPRQFQSGEDDRRGRITRRGPAVLRKLLVQCAWAMLRYNRWARAVFERLSRGKARRKQAVVALARKVLVRCWAMLRDAAAWRPDPDPAPAAA

SEQ ID NO: 124348 - protein, 457 aa, unidentified
MSQRNKKPRKSQVSIDSMPKHLRHININAAGIDIGSDRHLVAVPEGRDKVSVRQFGAFTSDLHDMADWLERCGVTTVAMESTGVYWIPVFEILEQRGFEVKLVDARHVKNVSGRKSDVLDCQWLQQLHTYGLLRGAFRPPDEICVLRSYMRQREMLTQASSMHIQHMQKALQQMNLLLHNVVSDITGVTGMKIIQAIIAGERDPNVLAENRQENCRSTKETIAKSLVGNFRDDHMFALKQAVDLYEIYQAKIVECEEAIVKHLATQPDVTDQEPPSGGKPVPARQRMRAGVDVRERLFKLTGVDLFAVPGLGADTLLTLTGEIGVDMMPWKTVKHFTSWLGLCPGTKLSGGKTLSSRTKRNANRAAQAFRMAAATQARSQTALGAFYRRIRSRSGGIQAVTATAHKIARIYYSMLTKGTAYVETGQQAYEQMYKERRINALKKQAHSLGYQLLPAQG

SEQ ID NO: 124349 - protein, 337 aa, unidentified
MTLYCGIDLHSTNSVIAVLDEQDRPVYEKRLDNDLDEILEALDPFKDEIVGCVVESTYNWYWLVDGLIDAGYRVHLAHAGALPQYAGLKFTNDSADARHLAQLFRLGILPTGYIYPKQERALRDLLRRRLLLVRQKTLHHVSLQSLIARHSGQRLNANAIKKLEEEHLSEYLDSPILLGGEITHQARCWLDGAIARIERELRKHIQPRKDYQLLQSIPGVGPALGTTIALETGIIGRFPSAGNYASYARCVKSEKISNGKYKGQGNKKNGNKYLAWAFMEAAHYSAIWNPRIKQYYQRKQAKAHVLVAKKAVANKLARACYHMLKRGEPFDVKRAFG

SEQ ID NO: 124350 - protein, 419 aa, unidentified
MKCFVGLDISSTKLDVCIMTNDIEMKVLFSATFGNDIIGASEIKEQVLRFNDIYHFERIVIGMEATSLYSFHPAIFFHEDSELKQLRVEVMIEQPAKIKKYREAFEENKNDTLDAFYIADYFRIERFTKSYLKEEKYNALQHLTRTRLQLIEQLVRTKQHFIENIYYKCNTLSIELKNHQLSTNIWSATIMTLMVEDYTLDELASLPLEKFVELIQKLGRGKFKAPDKLAKAIQAAITGSYRLSHVQQDSVNTVLSLLAREIRSLEKMIKEIDRAIEDMVEVLPEYQCLTSVPGIGKVFAAGINAEIGQIDRFKDHPQVAKYAGLNWKENQSGNTSSQNTSLVKRGNRYLRYYLVEAADSVRRHNVEYAEFYKKKKDEVPKHKHKRAVVLTVRKLVRLVDVLLRNHQLYTPPRRSMEDN

SEQ ID NO: 124351 - protein, 436 aa, unidentified
MVGGSREEVGTLEVVVGRCAGIDIGKVQVQVCIRVPDGKVQVQVCIRVPDGKGGRRKETRTYETFTSSLESMADWLAAQGITEIAMEATADYWRPVWYVLEDRGFELKLVNARHVKIVPGRKTDVKDAEWLAELLEHGLLRGSFVPPAAIRELRDLTRYRKRLIQTHTAECERIQKTLEGAGIKLASVATDILGVSGMAMLKALVAGERDPAVLAELAKGRLRSKIPELRQALRGRFNDHHALLIGIALDHIEHLDQAIAALDAEVDRVMAPFVEARDRIDTVTGVGKRAAECIIAEIGVDMSVFPSAAHLASWAGCCPGNNITGGKRHSGRTNKGDRWLGEVLNQCAWAAAHSNDTYLSSQFWRLAKRIGKKKAAVAVQHSILVIIWHLLSNECEYTDLGGDYFAKRDTDRQKDRLISQLQGLGYSVTLNPLAAA

SEQ ID NO: 124352 - protein, 413 aa, unidentified
MSIPESPGGVRVTAGVDWAKDDHAVCVVGEQGEVIERFTVAADAAGLKQMARRLLRVGVGEVGIERGDGPVVEALLLAGLILFVIPPGQVKNLRSRYGSAGNKDDRFDAYVLADVVRTDARRLRPMVFDSAATTTLRASVRARRDLVAHRVAVGNQLSAHLQSVFPAAATLFSAVHKGVELSFLERFTTQEQADWLSVKRLATWLRGVSYRGGVEPEVLYARLTAAPRGAVGAHAGVHAVTTRALVALLRTLNAQIQALADSIGAQLEAHPDSAVFTSLPRSGTVRAARLLAEIGDARGRFPTPDSLACLAGVAPSTRQSGKVKAVIFRWGADKQLRDAVCDFAADTRHVNPWAAQLYEQARARGHDHPHAVRILARAWVGIIWRCWQDNTPYDPAAHGALQHLLQQDQQKVA

SEQ ID NO: 124353 - protein, 341 aa, unidentified
MKSVYYVGLDVHKKTISYCVKRAGGELMDRGTVAATRPALDAWAEQLPAPWQGAMEATLFSAWIYDHLEPLADDLAVAHPAMLEAITRAKKKNDQADAEKICDLLRCDLLPRCWTAPAWIRDLRRVLRYRNLLVRQSVRMQNLSSGLLMEYGEEHLKSKLHGKRYFYELLDSLEHTPESAIELLALSRGMYEMFVELETSLRRGLVRHPLLAQRVALLRTIDGVGEVTALTWALEVGEVERFSSVGRAVSYCGLSARQDESAGKSKRGPLSKQRNKHLQTMLIEASKLAPRYNAQLKAVHEKALATGSRNRATVAVARKLVAYLLAVDRSKRPFAMRAKAA

SEQ ID NO: 124354 - protein, 359 aa, unidentified
MNKHKYVGLDVDQATTVVVIEDAAGSFLMETFLPTRAVELREFFKGLKGTIHVALEEGTQATWLYDLIEPLVKEVVVCDPRRNKLIQTGNKGDRIDAGKVARLLRLGELHAVYHGERGTRGLKELVHGYDQLVQDIARTKNRLKGGFRSRGIGCKGDKVYAATERKDWLAKVDVSAVRTRVSSLYEQLDCLKKLRDQAHKEMVKEAQKHPAYKLIIGVSGLGPVRTSQIIASVGSPHRFRTKRQFWPYCGLAVVTHMSSEYEIVEGRRRRKNKPLQTRGLNKNFNRTMKAVFKGASETAIKKGPFKEYYQRLIDNKMRPEMARLTVARKISAITLAVWKKGEKFDPEKVNQAAQDSGKQ

SEQ ID NO: 124355 - protein, 462 aa, unidentified
MAAQRRSPVPRRLTTPSAPKPQPALTVKNPRAAGIDIHDGVHWVAVPPDCDPEPVRRFDTFTADLETLADWLTACGVDTVAMESTGVYWIPLYELLERRGFKVFLVDARAVAKVNGRPKSDIHDCQWIQRLHSYGLLDKAFRPQDEIVVLRGFVRQRQNLIAYASQHIQHMQKALVEMNLKLTLVVSDIVGKTGMAIIKAILAGRRDPVELAKPRDERCKRTEEEIAKALVGNWREEHLLALKQAVELYEFYHCKIAECDRAIDDYLKRLPNRAGENPLESQPRKSRKKDNEPMFDARKRLYEMLGVDLTAIDGISVGVALIIASEIGHDVSAFRNEKAFSNWLGVAPNHKITGGKIKSRKTRPGANRIATALRMAGASLLRTPTALGAFGRRMRSRVGSPKAITAVAHKLAKLVYRMLKHGEEYVKQGAEEYEALYRERRIAALRRNASALGFRLEAQPAK

SEQ ID NO: 124356 - protein, 340 aa, unidentified
MNIKTIGLDIAKTIFHFICLDQYGNQLFKKKLRRGQLLRYFANLEPCIIAIEGCASSYYWQRELTKLGHTVKLLPAQHVKAHLRGNKNDYNDALAIAEASRVPTMREVTPKTIDQQSMQALHRLRDKAIGERTALSNQLRGLLAEFGIIFPQGQSNIREGLYSVLEDAENDLTHTLRAALALKHSQFTQQDDLVAELSRLIKEAGNEQTQVDLLQSIPGYGEILSTAYYSVIGDGKAFAKGRDASASLGVVPKQHSSADKTKQLGISKRGDKYLRKMLINGARSVVNHAHKKDDALSVWVTRLIERRGRNKATVALANKLARIGWAVTVSGKPYQVNYGD

SEQ ID NO: 124357 - protein, 304 aa, unidentified
MFGIGIDVSKATLDVAVHGEQFRQFSNDKRGFVRLIRWLKTWPIKQVVLEASGGCERAALDVLHAAGLPMVRINPARARRFAQGTGRAAKTDRLDATVLAQMAHLLPLTRYVPPAPWQQRLAEFAQCRRQLVQMRVSEMQRLRRLVDPDLIAMKQRHIAQLSDDLKQLDKAIAEQLEGQPGWKNIGALKGVGPILISTLACELPELGSLGSKAIASLVGLAPMNRESGTWQGQRRISGGRAVVREALYMAALTAIRYEPRLRAFYAGLKAKGKASKVALVAVMRKMLVILNARKRDAEVALGCP

SEQ ID NO: 124358 - protein, 461 aa, unidentified
MSNKRQTGRRKRSVPKKVDWKALEIVHPDAAGIDVGGGEHGVAISPDRDPEPVRRFGVFTADLRELARWLIDKGVRSVAMQSTGVYWMPVFEILEQNGLNVYLVNARDTKNLPGRKSDVQECQWLLKLHTFGLLNNSFQPANEIRIARTLWRQRGNLVAQAGSAIQRMQKVLTEMNIQLSNVLSDLSGVSGMKIISAILEGERDPWTLAALVRPEVKATPDDIAKSLEGNWRDELLFVLPQEVEVYRFYQEKIADCDLQLQRHLKSFASTVDIQAQPLGPKPKGKKGSRNAPQFDLRTELYRITGIDWAQINGIDVLTAQTVIAEAGADLSAFPSEKHFTSRLGLCPTNEQSGARILTRRTRKVVNRATVAFRNAAATLLRSQSYLGAQYRRLRTRLGAPKAITAMARKLACLFYRLVKHGQQYVDKGTEYYEARYREQQIRALAKRALKLGLQLVIPETA

SEQ ID NO: 124359 - protein, 347 aa, unidentified
MLIIGCDYHPSWQQICWMDTLTGETGERKLEHAQGEAEKYYRTLPSAALIGMESTGNCQWFTELMASLGHQLWIGDAARIRAAEVRQQKTDRRDAALLLKLLLEGRFPRIWTPSVEERDQRQLLLHRHKLVEMRVRVKNELQHLAMNRGITKGRRLWSKAGERVLCELPLAPWASRRREDLFRLRKMLDEQIAALDAAVKEVAERNDRARLLMTHPGVGPITSLAFVLTMGDVNRFPRGKQVGSYLGLIPREHSSGGKQRTRSISKQGNRFMRTLLVEAAQSVVRYEPEFRKEYLHRCHQSEKGVAKVAAARKLAIRLYWMLRSNTAYPEIVRVESSSRVPLDSQSA

SEQ ID NO: 124360 - protein, 312 aa, unidentified
MEAKFVGIDVSKATLDVDCLPVSTARQFSNDAGGITALVEWLLGSGVERIVVEATGGYEIAVASALAAAGLPVVVVNPKRVRDFAKAQGVLAKSDRLDARVLALFGERIAPPVRALPQAAQRDLTELLDRRHQLVSMRAQEQARLATVLPVARRDVEQHIAWLDQRIRKHETVLLKRLRANEIWDAKVKLLDSVPGIGPVNLFTLVGRLPELGTLNRQQIAALVGVAPFNDDSGKRRGQRYIRGGRAEVRCVLYMATLTAKRWNPAIAQMFERLIAKGKPFKVAMTACMRKLLTILNAILKSTQPWENRLAT

SEQ ID NO: 124361 - protein, 383 aa, unidentified
MMPATITDAETAPIYVSVELSKRSWLVASLLPGASKVALANIPAGDGEALLRHVRKLEARAETRVGGSAAIRLCFEIGYDGFWLARLLRDRGIDTYVLDPASFLVSRRGKRVKTDRIDAEAMIGILKAYLGGDHSVCRLVTVPTPQEEDARRLMRERGDLIRERTKIISRIRALFALHGIKHLRALKGGDWASQLDGMQTGDGRNLDPNLRQQVSRCFERLSLLNSQLKQVEVARKETLADETTGFPCPDKAERLQQLRGIGANGATMLVAEVFCRNYSSRRHLASFLGLAPSPYSSGGVERDQGISKAGNRGARCLMVELAWGWLRYQPNSELAQWYRERFKGKGKRSAKVGIVALARKLLIALWRFVETGLVPQGAELRQA

SEQ ID NO: 124362 - protein, 338 aa, unidentified
MELYAGIDLHSNNSVVSVLDEQDRTVFAQRLPNDLASIIDVLNSYAGRLRGVAVESTYNWYWLVDGLQDAGFSVHLVNTAAVKQYDGLKYSGDFSDARHLAHLLRLGILPTGYIYPREERAVRDLLRKRCQLVRQRSAQILSMSNLIARDLGAHASGSAIKRWHVEEIDAMPLLAEQRLALKANLSIMQCMDAQITVLERSILVKARLRKDYQALTTVSGIGEVLAMTIALETGDIGRFASPGNFASYARTVDSRRESNGKKKGEGNAKCGNKHLAWAFIEAAHFAVRYDATIRRWYQRKCASRLSVIAIKAVAHKLARACYYVMKDGRPFEAARAFG

SEQ ID NO: 124363 - protein, 389 aa, unidentified
MKIYVGIDIAKLNHFAAAISSDGEIIIEPFKFTNDADGFQLLVSKLESFDKNSLIIGLESTAHYGDNLVRYLVTELYQVCVLNPIKTCQMRKNNIRKTKTDKVDTYVIAKTLMMQDNLRFVSFFDLDMMDLKALGRFRQKTIKQRTRLKIQLTTYVDQVFPEIQYFFKSGLHQHAVYALLKEAPSPKEIASMHMTHLANLLKVNSHGHFTKEQAKELRILAQKSVGANDSAISIQITQTIQQIELLDSQLEKIEAEMTDIMKFNDSVIMTIPGIGYINGGMILGEIGDIHRFSNPNKLLAFAGLDPSVYQSGNFQAKTTRMSKRGSRVLRYALVNAAWNVVRNNATFKAYYDAKRAEGRSHYNALGHCAGKLVRVIWKMLTDEVEFNLE

SEQ ID NO: 124364 - protein, 331 aa, unidentified
MKNKQIVGIDVSKNTLDAFVFKANHLFQVTNTPAGFVRLLQESIRISGFSKDSLLFCFENTGCYSKSLSVFLQDAGIAFYAIDALDLKRSMGLSRGKSDKKDAKAIAMYAWRRRDELVCSKLPGPLIDQLSALLSHREMLIKQRTALKNANKGHYNTYSDNEFKFLKDSQIRMIKQLSEEIKVTETEILCIINHHAELKTSFDLLVSIKGIGKILAFYLISLTHNFTKFTDPRKFACYAGIAPFEYSSGTSVKGRTKVHPCANKQIKSLLNMAAMSSIQLPGEYQIYYLRRTAEGKNKMSTLNIIRNKLVFRAFAVIKRGSFYVDLHKFAA

SEQ ID NO: 124365 - protein, 342 aa, unidentified
MQNDTRIAVDLAKSVFEIAVSDRPGRVRRRERLPRAQFLNFFALQQRATIVMEACGSAHYWGRRIEGLGHRVVLLPPHHVRPYVRRNKTDRTDAKGILEASRNEDIRPVPVKTVSQQVLTSLHRLRSGWMSERTARINCLRGLLREFGVFIPAGARQVIPAVWTLVEDADADVPDALRPFLAELCLEIREIEARIDRVEKQLQAMAQQLPVVGQLLTIPGVGLLTATALLAFIGNIRRFPSARHLASYIGLTPREYSSGLRRHLGRISKRGDGYLRTLLIHGARSVLLRARADQSDRLRDWAHRIGKTHVHNKAAVAVANKMARVVWAVWTHARPYQPTLAV

SEQ ID NO: 124366 - protein, 433 aa, unidentified
MDIVHPRVAGIDVHKKVVWVAVRLPGQAPGERTVVIKRFQTFWRPLQKMAAWLTELGVTDAAMESTGVYWWPVYHALAGARIEVCVCNAAHMRNVPGRKTDLKDCQWIAELHEYGLLRPSFIPAAEVAALRARTRYRKRLIEQRTAESQRLSKVLEDAGIKIDSVASRLLGKSGREMIEALIAGERNPGRLADLARGVLRRKTDDLQMACDGRFTDGHGQMCRLHLDAYDHLTAKIAELDALIAEAVAPFAAVIARLVTIPGIGQRTAEVIVAETGGDMTRFATSARLAAWAGLAPGDNESAGKRKYAAARPGNRYLRAAMTESAWATARTRTRPGARFRRLARRFGKGHEKKAAIAVAHTLICIAWAVMARGQDYADAGEDYYDQRDQRNREHLIRHHQQALARLGCQVTLVPPGDGSPPPGTASPHPGQPA

SEQ ID NO: 124367 - protein, 392 aa, unidentified
MIYAGVDIAKTNHVIGAVDETGSEVVRPMAFKNTEAGFERCIAWLESIAESEDDVFIGMEATGHYWMACFAYLVAAGYRVCVVNPMQVRAMRKLKGLCGVKNDRIDSALIAETLRQGDYDQTRLATDEVQALKRLTRYHQALKQELATVKTQAVCVLDAYFPEYAGLFSDMFGTASLKVLAECPTPSEASRKRTSSIARLLSEGSHGRLGAERAAEIKSAAGSSVGIRLGEDAASFQIKTMVTQVEFLNRTIAKVEREVASLLAKVEPNITTVPGISTTTGAQIVAEIGDVKRFKGAASIVKYAGLNSGVDESGMFSAEGVPITKHGSPYLRRSLWLAANRARQYDPKLKAFYDKKRREGKPHRVAVTAVARKLCHVVYAVMRDGEPYDPGK

SEQ ID NO: 124368 - protein, 391 aa, unidentified
MRKPKQCKSNDMSRSLTTLDMHRTLIAVIEMSQSRWLVAGMVPGVERQPLKKLGVDESTLLALLYRWRDEATKAGHTVERIAVAFEAGRDGFWLARWLRARDIEAHVIHASSVAVPREHRRAKTDRLDTELLKRAFLGWLRGERDHCKMVAIPTITDEDAKRPGRERQSLVGEESRIVNRMKATLARLGIRGFNPKLKKAADRVDGLRTPEGEPIPPNTLAELRRDMERRRFVRDQIQQIERARLEQLERAPSDGPHAMVRLLARVIGVGIETADMLVQEVLSRNLRDRRAVGRYAGLTGSPDESGSRRLEKGLARSGNVRVRTGMIQLAWRFLMFQKNSALARWYRARTEAAPGTRKTMIVALARKLLIALWRLVREGVVPDGVVLRPAP

SEQ ID NO: 124369 - protein, 317 aa, unidentified
MIRNKPRGATVYGIDLGKNIFHVVGTDSAGNVVQRVKFRRDTLRAFFERAERAVVGMEACPGSQWLARKLQAMGHTVRIIPAQFVKPYVKSHKNDTIDAAAIAEAVTRPTMRFVQVKQPEQVDLQSLHRIRDQMVGSRTRLICQMRAFCLEYGVAIRQGAGLFKSDLPRVIADECNDLTPTMRRLLNELFEDLMRLEKRIAEITREIEALAASDEKARRLMTIPGIGPLGATALLAAAGNGQQFKKARDLAAWLGLVPQQYSTGGKPQMFGISKRGNRYLRRLLIHGARSCTSIDRETDWGHGSGNYTRGCTSIKSL

SEQ ID NO: 124370 - protein, 364 aa, unidentified
MSTLHYVGMDVHKETIDVSMYKENDSRPYCEKRIPNRDTSIKKLFKGLLKTGSVVACYEAGCMGFTLQRTLEGMGVTAVIAAPGKMPRRSSDRVKTDRRDARTLATYLRNGDIEAIRVPTEEEEVVRDYLRGREDVRLDQARTKQRLQKFLLRHGYVYESVRYWTGPHEKWLRSLEFKNPLMKETFDEYHVGIQELGGKLRMMDKRIDEIALSEPYAAKVKKLRCFKGIDFLTALTLVSEVGDFRRFKSAESFMAFLGLVPSEYSSGGKRRQGGITKAGNTHVRRFLIESSWHYRYSASPSKQLMERRYGQPTDVIAYADRAMKRLQHKFFKLILRGKTSQVAVTAVARELAGFVWGMMVGCTA

SEQ ID NO: 124371 - protein, 358 aa, unidentified
MEQNNKLDFSGQDIFIGLDIHKKNWTVSIFTKDFEHKTFSQNPEVNILVNYLRRNFPGANYHSTYEAGYCGFWIHEALKADGINNIVINPADVPTKDKERKRKNNRVDCRKLARSLRSGDLEAIYVPKRQALEDRSLLRARRNAAKQQTRYKNQIKAYLSFFGIKYPEHFKEGRWSGAFIQWIENIPMKKQTGKIALQFYLDELKHYRKRIADLNRELRQLAAHDLYREKVELLTTIHGIGTLTAMILLLELVDINRFKSLDKLASFVGIVPNEDSSGDDDDVNMTEITPRSHHYLRSILIECAWVAVRKDPALTMCYNELTKRMSGQKAIIRIARKLLNRIRYVLKNNQPYVTAVIE

SEQ ID NO: 124372 - protein, 354 aa, unidentified
MSQTLNAAVAVIGIDIGKNSFHIVGLDPRGAIVLRQKWSRSQVEARFANMPPCLIGMEACVGAHHLSRKLKKHGHDARLMPAKYVRPYSKGQKNDFRDAEAIAEAVQRPTMKFVATKTADQLDLQALHRVRERLVSQRTGIINQIRAFLLERGVAVRQGLRFLRIELPRILAAPPDVLSPRMVRTIEDLAADWRRLDARVESLSSEIEAIARQDSGCERLMSVPGIGPIISSATVAAIGAGDAFSKGRDFAAWLGLVPKQISTGDRTILGKISKRGNRYLRVLFVQAAWVVLIKPNSWERHGLKPWIDAAKKRLHRNVLAIALANKLARIAWSVLARGRAFEVRKVDEAAAQSA

SEQ ID NO: 124373 - protein, 314 aa, unidentified
MEKPAVWVGVDVSKDQLEVALRPSGAQFSLPNDERGLRTLVKRLLPLNCTRIVVEATGGYEAPAVAALKAAALPIALINPRWVRSFAKGLGQLAKTDRIDARVLALYAERAELKVRQLPDAQTLELRALCARREDLVDMIVAEENRLEHASKLLAREIRSHINYLRKRIKHVNREIDAAVRGSELWRSKAELLDSVPGVGPVLRAALLAWLPELGTLNRGEAAALLGVAPFNHDSGAMRGRRAIGGGRAPLRRALYCTTSAAILWNPPLRSYYEHLIAIGKVHKVAMVATMRRLLLMLNAIIKTNTPWRSPCLA

SEQ ID NO: 124374 - protein, 360 aa, unidentified
MEKITRAAGCGEATRVGVDLAKRVIQVHAVNAQGKVLTTRALKREQFIEWSVQLPPGCMVAMEASSSAHHWARKLLAMGLDARIISAQLVSPYRLEGHTGKNDANDAAAICEAASRPQMRFIPVKSVEQQSMLCVHRLREGIKTDRTACINRIRGLLAEFGLVVTQGADKLKDVLSELLEDASNELGTLARLTLQRAQIQWHELDAHLAWCDERIAAHAKANPAVKAAATLMGIGPVSASAAIATVGDFKQFKNGAQFGAWIGLTPRQHSSGGKNSLGGITKRGDTYLRTLLIQGAKSAVMTAHRRQDRISNWALALRERGGWQKAVVALANKNARILWAVMTRGEAFNANHLSVKPTGT

SEQ ID NO: 124375 - protein, 481 aa, unidentified
MAARKKNTSKDAAPGSPAASSQPGDDGAEVAEERVEVVTYAAAIDVAKGFGMVCTRVPGSRPDRKRQKIRCAEASYDSVVALMDHLRCEGIQRLVLESTSDYWRIWYYLAEAAGLEVWLVSARDVKHLPGRGKSDREDCVWLCKLNERGMLRRSFVPPGAIRDLRSLTRTRSRLAQDQVRHQNRVEKILEDALLKISVVISGLFGASGRRFPGALVAGERNPRALAALGHPQLKATPQQLAAAAAGRFRDIHAFEIATHLRLIDAINDEITRLDARIEQQLASVPGVAPACGTCGLIGGGHAPGCASKDTAVPGLVERLDEITGVGARNARVIIAELGTGMSVFPTPGHAAAWARLTPRTLQSGNSARPGRAGKGNPYLRGALGQCVMAASRTDTRLGEQYRRTARRRGKQKGIVAVSRVICEIACVLIGDRAARFTDLGAGYYHAQDPARQTRSRIREIERLNPGMKVTLTPIETAGTAA

SEQ ID NO: 124376 - protein, 425 aa, unidentified
MDVLIECCAGIDIGKDEVVACVRTPAATGRGRRKRTRTFSSFTGSLEAMADWFADEGVTEIAMEAPGSYWKPVWYVLEDRAFGLKLVNAHHVKILPGRKSDVLDAEWLAELLEHGLLRGSFVPPPAIRELRDLTRYRKRLIQAHTSECQRIQKTLEDAGIKLDSVASDVLGVSGRAMLTALVGGERDPRVLAELAKGRLRKKIPALRQALRGRFTDHHALLIGLCLEHTTHLEAAITRLDDRVDAVFATQISKTGQDGEGGVPFARARDRLDTITGVGKRAAETILAEIGGDMSRFPTAAHLASWAGVAPGNNITGGKRGSGKTTKGDVWLIDILTQCAWAAARTRDTYLSAQFWRLARRIGKKKAAVAVAHSILVICWHLLTDDCDYDDLGGDYFTRRNADRQRDRLIKQLHGLGYRVTLDKAA

SEQ ID NO: 124377 - protein, 372 aa, unidentified
MTSIIYVGMDVHTTNYTLCCYSMEDDRFFAEVQVEPDAKNILKYLARIEKQQSRDCRIVCGYEAGCLGYSLYHQLHAHGIDCVILAPTTMMTKPGKRIKTERRDARLISKCLAFHTYSPVYIPTEVDDAVKEYIRMRDDANSALARVKQQIIAFCIRHGKIHDGKSYWTNKHLEWLSSLDLGNKILSEVLQEYLIRYYQLREQVDMYDMRINELAQAEPYRQKVEKLSCFRGIAAHTALSFCVEVGDFRRFATAQQFASYLGLVPGECSSGDKQQYTGITKAGNSHLRKLLVETAQVFGRSATKSGKSVALKERQAKCDSLTVAYADKANARLKKKYFKIAMRSKVNIAKTAVAREMACFIWGMMTDNISCA

SEQ ID NO: 124378 - protein, 366 aa, unidentified
MEQGKGRFVGIDLAKKSMEVCILGEGKAAARSSYKTDAVGRTRLGKILTSDDIVAVEACALAFVVARQLRREVGCTVLVLNPGKLAMIWQSTRKTDKEDARKLASLVQRYPEEELPVVAVPDEREEAMRSTVSMKHYLVRLRTSLLNRLHTLYVQAGMTFVKKSELDSGAARERMAGRLDGFLARFAAVIGRELDATEEEIASLEKELREMVAQHELAPYVMSVPGVGPGVAAAFLAYVGDGSRFSSPAQVANYIGLVPRLDCSGETNRYGHITKEGCRAVRGVILQATWSLIRCKEGGRLKEKFFLLSERRGRTRSAVALARRMVGLMWILVTRREFYADASKEILKKKFRQYGLKFEGWESIAA

SEQ ID NO: 124379 - protein, 321 aa, unidentified
MTYVGIDVSKATFVVAYSSAKNSKTKTFKNTTKGVHEFIQTLSANEHHCVLEATGNYSSLLVYLLSRANITVSLENPLKIKNFARVMLSVTKTDETDARLIALYGERMQPAPYKLRSDAILTLKQKRTVIRQLKKQLIATQNLKGSMEALPFFDPKCKKAIEKTIVFLEKQTKGLEEELAALAQSEYKKQIDLLTSIKGIGVTLAAALIMATGGFTYFDNAKQLTRYLGLSPTYQQSGTSVNVKGHINRNGDSSLRGQLYIAAMASLRCNAECKECFDRLRSNGKPGKVAVVAVANKLVRQAFAVVSQEKPYVDGFKSEKP

SEQ ID NO: 124380 - protein, 374 aa, unidentified
MSKIIRIGMDTSKSVFQLHGVDAAEQPVLRKKLRRIQVLTFFGKLEPTLIGLEACGGAHYWARELIALGHKAILLPPQYVKPYVKRNKNDTADAEAICEAMSRPTMRFVPVKTAEQQAALMLEGMRGSLIRRRTQLCNMIRGYAAEFGLAAAKGLDKMEPLLARIASEQTLPALAKELFATHRKEYERLKVEIAKIEAKLLAWHKDNELSRRLVKIPGIGPIGASLMAMKVADPGAYRSGRDFSAWIGLTPKDHSTAGKKRLGVITRAGDERLRSVLVVGATAVIKLARRGNGQASPWVLALLKRKPPKLAAVALASKNARVAWKLMVSGEHYNPARYGAVAAPAGVPGEGLGAALAGATRRAPRLACAAGLGR

SEQ ID NO: 124381 - protein, 333 aa, unidentified
MHRKRSQVAVINEGGEMLANRNVPNGTRPVLGVIGGLPPGTPVALEAAFGWGWLVELLEDYGFAPHLVHPLQCKAIASARLKNDKVDAAILAQLLRADLLPEAWIAPPPVRQLRAMLRHRAQLVRLRTLLRNRIHAVLADHGYDRPGGCWSSPGRAWLASLELPAVSREVIDDDLALIDALQVPIDRLDWEVHQQARRDPRVKVLTQLPGVGPFTALVLLAEIGEVSRFGSARKLASWAGLTPNVRGSDRVAHYGHISKQGPAWLRWILCEAAQTAKRHPDFAAGYQAIARRRGKKIATTAVARKLLTRAYHLLADAASGGTPTSPEGSPGPG

SEQ ID NO: 124382 - protein, 411 aa, unidentified
MDKIYDNCCGIDVHKKLIVACFKKGNKQEIREFGATTRELLELADWLKTGGCKMAAMESTASYWKPLYNILESSDLNAMVVNARHMKAVPGRKTDVKDAEWIADLLQHGLLQPSYIPDKDQRELRELVRYRKSLVGERTRELNRLQKMLEGANIKLSGTVSDINGKSARSILEYLLTGEFIDSAKYDEMYEQKVIAHNLKATKEQIIDDLNGVMTPLQRRMMKELLAHLDELNAHIRNLDDEIDNFMKPEEKQASNAIQEVTGIGNTSAQAIISVIGTDMGRFPTDRHISSWAGLCPGDNESAKKRKSGKTRKGNVLLRTTLITCAHAAVKNKKSYFYAQFMRISAHRGSKRAYVAVAHSMLIAIYHILKDGVVFKDLGADYYNQFNKERKINAYLKKLKVLGWEVPVVAA

SEQ ID NO: 124383 - protein, 328 aa, unidentified
MRTSVLRTSSLMNKRQNHPTTTQKVNLIKLSADVHKRDFKVCRQIGDQNIQPAQTLEPQEAFQWAVKQLQLAQRVVFCYEAGFSGFSLARRLQAEGVEAVVMCPQQLDERCQRVNTDKRDARRIAGRLDRFVAGNDEALVKVRIPTEKEEDERAVSRQRDQLLKARKQFEAQGRSLLSFKGLSCPAHWWSGSDEQWQAMIKQQAWPPCLVERLEVYRRMALAAHKEVQALTFQLEAAAQEHLPPSMPELPHGFGGLSLESLRREVCSWERFKNRGQVGSFFGMCAAENTSGPNQVQGSITKDGQSSLPTLAHRAGLESLELPARLPGG

SEQ ID NO: 124384 - protein, 338 aa, unidentified
MLHVGLDLHKKYSTVAVMDDDGNIQLEDTLYHDDRPRLIEFFSKLAGKAVVTVEATRDWYWLYELLEELGVTVKLAHARKVRLIAESWLKSDKVDPKSLAQLERTGFLPEAYISPRPVRDNREYLRYRLTLVRLRTGLKNKVHALVDKLGIKHPFADLFCPAGRRFLGQLTLRPAYQEELTNYLALIEDLERRIVAATKEIQRQLKPDPRAKLLMTIPAIGHLTAYLLLNEIGDIKRFPTPGKLCAYGGIVPIVRQSADHRWQGHITKEGNRYIRWALTEVACLAPSKDYVLGSFYRRLKARRGNLKARVAVARKLLVAVWYVLTYGEPYKTTAFPTV

SEQ ID NO: 124385 - protein, 498 aa, unidentified
MKKNRRDLQSDHVSPATPAAAAKRSRRSRPPAQSPATDGLEQINLHAAGIDVGSAENFVCVPASAVKAGEASVRSFKVFTADQDALVEWLQACQVKTVAMEATGVYWMSLFDKIEAAGLEVLLVDPHSVRQVPGRKSDVMDCQWLQQLHTYGLLRGAFRPAAAVRKLRVLCRHRADLVCEGASHLQQAQKALVQMNVQLHLVVSDINGETGLRIIEAILAGQRDPAELAKLRDPRIKKSTVAEMTAALTGHYPEEQLFALRQNIDAWKFFQGQLAACDVQIEAALKAMASAEKAGAPPAPPKPVPTAAPGSAGAKQKRARPLHGNNALTVDLSEQVRRICGVDLMKVCGLNLLSVLMIVAEIGVDMSRWRSAKAFSSWLGLCPGTKISGGKKLSRRTRHVVNRAAILLRLAALAAGQTDTWIGRFYRRKRAHLGAPKAITATAHKLACVIYHLLKYQEEFLPLDVVIYDIKAQEQRTRRLRKQAEELGFELVARKAAA

SEQ ID NO: 124386 - protein, 377 aa, unidentified
MNQAAQVQSSVAVGTLYMAMEMSASKWKLAFGVGRGHRPRMKTIAAGDCVGLLAEIAKAKARFGLEASAKVVSCYEMGRDGFWPHRFLSAQGITNLPIDASSTQVDRRKRRAKTDRLDAEMLLSHLLRHAEGERKVFRIVQVPSPQAEDARHIQRELEVLKRDRARVSNRIRSLLATQGVGVKSCRELLGKLDQTRIWDGSELRTGLAERLKKELQRWVELTDSIREEEERREQELQAGGFGADQARRLAQLKSIGDETACSFSVECFAYRHFNNGREVGAYVGLTPTPFDSGESRREQGISKAGNARLRWRAIEVSWLWQRYQPDSELTKWFKKRFANGSARQRRIGIVAMARKLVVALWRYLEYGIVPEGATLKA

SEQ ID NO: 124387 - protein, 350 aa, unidentified
MQVAIVGLDIAKNVFQLHGTDGYGRVIPRRKLRRQEVVPFFANLRPCTVGIEACGGAHYWARRLTAVGHTVRLMAPQFVKPFVKSNKNDANDAEAICEAVARPSMRFVPPKSVEQQDIQLLHRVRSRLVGARTQIANQVRGLLMEYGIVLPQHLGQLRRGLPEVLEDESNELTALSRRLVASLYSELAELAELDAKIEQLDAELKAVYVASEPCQRIAAVEGIGLLTATAAVAMSDGRVFANGRQFAAWLGLVPRQHSSGGKARLFGISKRGDTYLRTLFIHGARSVVYRASRKTDPRSVWIADKQRRLGTTKACVAVANKNARIVWSLIARGERYRRSGEVQRTIEQTA

SEQ ID NO: 124388 - protein, 346 aa, unidentified
MTTMARITGGVDTHLDVHVAAALNDVGGLLGTASFPTTTAGYRQLLQWLSSFGEVVLVGVEGTGSYGAGLSRFLHSHRVGVVEVDRPNRQTRRLSGKSDPIDAISAARAALGGTANGAAKTRDGNVESLRVLRVAKVSAHKARTQAINQLHSLVCTAPDELRDKLRQLTAVELVRVCAALRPPASTDVTAVTKATLRALARRVHNLDEEIADLQALIRPLVRTTAPELLAHHGVGPDTAAAILIATGDNPSRLRSEATFARLCGAAPIPATSGKTQHRHRLHRGGDRQANAALWRIALTRMSSDPDTRAYVTRRTNEGLSKREVMRCLKRYIARELYPDLPQQMLA

SEQ ID NO: 124389 - protein, 385 aa, unidentified
MGTQTFIPRDYDVFAGLDVDKKSISVTFTDHQGFLKSLNMPYKVEHLVNYVRKHYGDKKVAFAYEAGPTGYGLYDGLQAQAYPCLIASPSMIPKAPGQRVKTNRLDSRGISENLRGGQLKGIHVPTPLYRELRHLTQLRDTLVSEMVRMKQRIKSLLLMEGLEFPPAPAGSQWSFLVKNKLRELPCSTTVRFKLDRLLDSLEFDEKQVLKATREIRRFCQTDPELSQCIEYLKTLPGIGWIVASKLLARVGDWRQIKNIRQLPAFLGLVPTENSTGVRTERGSITHTGDGRLRSKLIQASWSAIRQDGELREFFRTVAKKHPRHLGSRVAIVAVAHKLSVRAAVVLMKQRPYEVRQKVQSAPLTQEETVPQGTTRRLAVPGETNS

SEQ ID NO: 124390 - protein, 333 aa, unidentified
MQDLSTKQHFVGCDVSKDTLDLALYQPKTDYRKFEHVQISNDTEGFKQLLQWLKARKIKKNEVAIAFEHTGAYSIALAEWLHKKKITFSMLHPLDVKNACSRGRNKTDEVDAKFIADYAYTMREKLAPSGPEPKNIKHLRELRNERDLCVRCRASYLCQIKVQSEAQTIARMHKMVDFMTVQIHQIEEEIKKIIAADETIATNYHLLISIPGIGMVNAVNTIVATGNFTRFQTSRQYAKFCSVSPMAVQSGTSVHSGNHVCKKGHNELKATLSEAARSAIIHDPQLRHYYQRKRSQGKSHGCVMNAVKFKLICRMFAVIKRQQPYVNTECYRG

SEQ ID NO: 124391 - protein, 391 aa, unidentified
MPEDAPRPAQAAIRTDLGAIFVSMELSRRAWLITSLSPGGGEKMSKHSVPASDVSGLLRRFAELRRKAAARTGRDFPIIVIQEAGLDGFWIHRVLQSEGIESHVVDAASILTSRRRRRAKTDRIDGETLVRTLMAFKRGEPRVCSMARAPTPQEEDRRRVCRERRTLVGERVQHVNRIKGLLFAQGVFGYEPLRKGRRERLEDLRTGDGRSLPVHLKAQIIRELDRLEVLLEQLKAVEAERDALLKPATEEAISPAAMLARLKGIGPETAAVLWSEGLFRQFDNRRQVAAYAGLAPTPWQSGSIDHEQGVSKAGNPRLRTTMVELAWLWLQNQPTSALSLWFHERVRRLGGRMRKTTIVALARKLLIALWRYTTAGVVIEGAVMKAAPATI

SEQ ID NO: 124392 - protein, 387 aa, unidentified
MYFVGIDISKFKHDCAVIDEIGDTIQPSWSFRNDREGFSLLKERLDSLPGEKKIGLEATGHYGQNLKLFLEANGFAFMEFNPLLVSRFVHGKSLRNTKTDPIDAGNVAQYLMTVEYKPYPPSFYHLDQLKSLTRFRSSLVRQRSRQLVELTNVLDKMFPEFKPFFKGKFSATALYILDHYQSPERIASMNTRSYEPLRKISRGHFSLNDFVKLKTLAKNTVGCTTGFLLQEMSILLELYTQLDAKVEELDDQIEECVHGIDPPMLSIPGVEASSTAVILSEYGDFSKFKNPSKMLAFAGLEPGYFQSGQSESTGHMVKHGSPHLRCALLNCCLPLVSNEPIFAEFCAKKRAEGKTHQVAMTHVAKKLLRVIFTLQTKNIPYDPALIR

SEQ ID NO: 124393 - protein, 350 aa, unidentified
MGDLLRVGVDTSKSVFQLHGVDVEEQAVLRRKLRRGQFLAFFARIQPVQIGMEACGAAHYWARELRAQGHDVVLVPPQYVKPYVQRGKSDAADAEAICEAMSRPKLRKNFVPIKSAEQQATQMLTKLRAQFIARRTQLSNSIRGFAAEFGFTAPKGLSRLGELLADIRADTTIPDMARDMVETLARDYARIDKEIVALDKKLITLHRENEMSRRLAAVPGIGPIGATLLAIKVVDAHGFKSGRDFAAWLGLTPKNHSTAGKNRLGVITRAGDEMLRSVLVAGATAVIGYFRRAGKRTWPWLEALIERKPPKLVAVALANKLARIAWKLMVSGDHYRPVVSAQPDLKTATP

SEQ ID NO: 124394 - protein, 342 aa, unidentified
MQWTVAIGIDTHKHTHVAVALDRLGAQLDAFEAPASSAGYLALYRWAHELGEPVFALEGSGSYGAGLARFLQAAGCSVYECERPKRSERRRGKNDLIDALLAARRLLAGEPLGSPRGLSGPREDLRLLLLERRSAIRARTATLNQLQAIVVTAPARLRARLGDRTSEQLARAVARLRPGKSEQAVVRGVLRRLGRRVLSLDAELAELERELEAIVSALVPELIAECGVGPVCAAQLVVSSGDPSRMASEASFAALAGTSPVDASSGQQQRHRLNRGGDRQLNRALHVIALSRVRYHGETAAYHQRLVASGKTTREARRCVKRMLARYFHRKLCSLPALALTT

SEQ ID NO: 124395 - protein, 343 aa, unidentified
MKIHALGIDLGKTVFHLVGLDASGQVVVRKRCSRTQLLAFTANLQVGLIGMEACSGAHFLGRALRAQGHEVRLMPAQYVKPYVHTNKSDYIDAEAIAEAVQRPRMRFVPIKTEEQLDLQALHRVRERWVMRRTAVVNQIRSLLLERGLTLPKGRSHLDEQLPRILEDAELNLSDSFRVLLAQLKLELEQLAARIGEMDRVIQKTARENEACQRLTEIPGVGPVTATALIAAVGNASAFGKGRNLSSWMGIVPGEYTTRGKQKLLGISKRGNKYLRRLFIQGARSVLQQRDKQAPGLSEWLAQLLARTHQNVVVVALANKMVRMAWAVLCKNERYRAPVLAITT

SEQ ID NO: 124396 - protein, 409 aa, unidentified
MVGIQHGSNRIQGRGASVARDGGLPSDLLDVSNRSKRLSETEEVRRSQEARWLDNQIPIQATSVGKSIINLSSVATVGLDLAKHVFQVHGVDALGRVVVAKPIRRNKLLEFFASLPRCLVGLEASGSAHHWARELIKLGHDARMMPPAYVKPYIRRQKNDASDAAAICEAVTRPSMRFVGVRSLENQAALMRHKAREMLVSQRTQLLNGLRGHLTEVGVIAAQGPRHARELAELIEACDETIPFGVCEALAPLVVQLRNLDEAIARLDRIIAKLAQKDETARRLMSIPGFGPITASAMAATIQDTSSFAGPREFAAYLGLTPKQNSSGGKPKLGRISKMGNRNLRKLLVVGAHAVLFHRKSHTDPLRTWAKKLIEKKPFKLVAVALANKMARIAFAILRGKTVYQEIPA

SEQ ID NO: 124397 - protein, 416 aa, unidentified
MGARRRNKHKPAVVSGPVEIPDAEHELVIERVAAIDVAKAAGKVCVRLPGKTGRRLSRVWDVPARTGAVSELAEQLIESGIEKVTVESTSDYWRIWYYLLEAAGLSVQLVNARDVKNVPGRPKSDKLDAVWLAKLTEKGLLRPSFVPPTEIRRLRDYTRLRVDLTRDRARYWQRLEKLLEDALIKISAVASTLDTLSARDMVEALIAGERDPRRLAELARGRMKAKHWELITALDGRFDDHHGELARMLLGQIDALTTQIDTLSARIEALIAALPDHASLIDHPASDDGPGAGAGADSDADPDPTASTGGANTVRVDPTTGADCVLGIVERLDEIPGIGAHNAQAILAEIGVDMSRFPTPEHLVSWAKLCPRTIQSGAGHPRRQDRQGQPLQRRHRRHGAAVGPGHRRTDTHACDR

SEQ ID NO: 124398 - protein, 396 aa, unidentified
MAAVGIDVAKEFHWVAVVDERSGELVSRRVDNDPAAIQSLIDELEPLQGEHGPLTIGIDVVGGIASLLQSMLLEAGFRVVHVPGLAVNRARQGTSGGEHKSDPRDARVIADQVRTRSELRPIETATEIDVELRLLISRRRELVIDQTRRISRLRDLLASIHPGLERIVDPTQKASLILLSRYVTPAEIRRAGASRLVKHMLASGHLPRPHVERLAEQALAAAKAQQLALPGERLAAELVRELIRETLAVRERLTQLDAQIEDALSHHPDAALIRSLPGMGATLTAEFIAEAGGIGRFPTPDRLAAAAGLAPILKQSGKVRYLQRARGGNKALKRVLYQSAFCSLQHPASRAFYTRKRREGKRHHQAVIALARRRVDVLHAILRTRQPYSANYAKAA

SEQ ID NO: 124399 - protein, 339 aa, unidentified
MKAYAGIDLHSTNNYIGIINDKDQRLFKKRLPNSLDVILSALEPFQQDLHGIVVESTYNWYWLVDGLQDNGYTLHLANPSAIKQYEGLKHTDDQWDSFWLAHLLRLNILPEGYVYPKEERPVRDLLRRRMMLVRQRTTHILSLQSMITRNLGINLSGNAIKRLTGDDAEQMFKDPCLVLAARNSISIMKFLKEKIRLIEQSVLSRVKLRKEFAPLLTLPGIGKILSLTIMLEVDSINRFPKVGNYSSYSRCVKSERISNGKKKGAGNTKNGNKYLSWAYVEAVHHAIRLYPYAKSFYQRKKTQTNGIVAVKALSNKLCRASYYVMRDQVPFDKEKLFRS

SEQ ID NO: 124400 - protein, 523 aa, unidentified
MCWLSNRLPTWSWPGFNDVPACRGLAVAWLKRGANARQVLESGVPVTGLASTWEGEPSMAGVMIGTGPHKASHTAVAISGAEEQLGELRVRASAVQAGRLLEWAVAWPERTWAVEGAGGLGHLLAQQLLAAGERVPDVQPKLAARVRLLATGNVNKNDPNDARSVAVAALRSPGVREARPDDHAAVLKLWSKRHRDLGSARTQVVCRLHAVLCELVPGGVGKKIIAARAAWLLDSVTPPDAVAAARWELAGALIEDLRRIDGQLRETRKKLAMAVRASGTSLTGLFGIGPVTAAIIIGDVRDVSRFASRDQFAAYNGTAPIEVASGKRKACRLSRRGNRRAGHAVHMAAVTQIRQPHSEGRAYYDKKLAEGKTRKEALRALKRQVSDAVFTRLRADARRTAAQVRDPGGQQGNGSAASAAGLHPRNRLFGQATPGPGHHPTTPAASQVPGTTGHSPAAASLPPAAPQVRVEPRSEARTNDLEGRRRQRPHPAARKAAELQNPPAKPQRRRPPRPATKHTDRTA

SEQ ID NO: 124401 - protein, 368 aa, unidentified
MKQLTTYVGLDVHKETIAVALAEAGKRNEVREYGKIANTPAAVKALVAKLARNGHELRFCYEAGPCGYSIQRQLAALKHDCMVVAPSLIPRRPGERIKTDRRDAINLAKLHRAGELTPVWVPDEAHEAIRDLVRARLAAVRTLRQARQQLSGFLLRHGHHYNRPAWTLMHRRWLAGLRFEHAVHHIVLEDCIAAVEAATARRDRLEAHIAAALPDWSLAPVVHALQALRGMALVAAATLVAELGDITRFGNPRQLMAYLGLVPSEHSSGGTRRQGGITKAGNGTARRMLIEAAWSYRFPARISREQLLRQEGLTKPIRDTAWKAQERLCRRYRKLARAGKPPTVVTAAIARELAGFVWAIARQTQSTC

SEQ ID NO: 124402 - protein, 406 aa, unidentified
MDFDVIFPNVVGLDVHLDQITACAISVKAEGKAESQFKVFGSTKTERRKLSAWVHRLKVDLVVMESTGVYWKSVYRALERVGVKVSVVNARHIKNVPGRKTDIADSMWMAMLGRAGLLRGSFVVSADLDALRLISRQRQQLAGLLASEKNRFHKVLADSGVRLSCVVSDLHGQAARRMNACLIAGGEVEDALALSGQRLKASREQLRDALEGELTDAHRFVLREIMEHIRELEERIHRFEEELLRGLAPYDWALALLQTIPGLDVISAAMLLVEIGVDMDVFRDSAHLASWAGVCPGNHESAGKRKSGRTRKGNRWVRRVLCEAAHAARRTSCMLRDKFQTLAIRRGRKRAIMALAHKMLKIIFAMLKRKEPYRDTTVNYEELMVKRNAPRWISALRRYNLLPKTA

SEQ ID NO: 124403 - protein, 352 aa, unidentified
MNEIIRIGMDTSKHFFQLHGVDAAEEVVLRRKLTRKEMEKFFQKLSPTEVGVEACGASHYWARWLQSLGHTVRLMPPQLVKPFVMRNKNDAADAEALCEAMSRPKVRSRFVPVKTAEQQADLMLMSVRERLVHDRTRLSNAIRGHAAELGYAAAKGVAHLVPLLERLQADDRLPERALKLFAMMAEDYQRLTQRLSEIDTELKAWHQSNECSQRLDRIGGVGIICAALLVMKVPDPAAFESGRDFAAYLGLTPKDHSTGGKLRLGRITRAGDEALRCNLVVGATAVIQHVRRTGKGSPWLIELLKRKPPKLVAVALANKTARIAWKLMKTGEAYNPTHAKAAKVQAQRDAIA

SEQ ID NO: 124404 - protein, 367 aa, unidentified
MRELERLVSLIRSLEGEVRIVMEATGAYHLPLVSRFKEAGLFVSVVNPYIMKKYVQSEFRKGKTAKMDSMRIANYGIDKWYKLVDFTFPKEVYAQLRFLGRQYAHYITLKVESKLSLTSILDQTMPGIKKLLKSARSDVPTKDKLADFVEEYWHFDNIKKKSEAQFIRSYCSWAKKKGYHQSETKARAIYSLAHDSIPTLSSSAPSTKMLTLEAVRVLKEINRTLETILTQIRKIASSLPEYDVVRSMNGVGDVLAVRLIAEIGDVRRFHSGSALVAFAGIDSPPFQSGSFVGSQRNISKRGSSLLRKTGYEDMKCLKTSKPTKDAAVYLYMLKKEAEGKPKKVAKIAALNKFLRIYYARVKEVYSA

SEQ ID NO: 124405 - protein, 412 aa, unidentified
MRKSKLQFEEILSNGCGIDVHKETVVVTVSGKGIDQQTRTFSTFTNSLIEMGKWLKKIGIENGAMESTGIYWKPVINILNDYVPNIILVNARYVKNVPGRKTDKKDSEWLCQLLICGLLKGSFIPEEIIRQIRDITRYRTKLVQQLSSEKNRVQKVLEDANIKLSSVVSDTSGVVATKLIKGLISGRKDLKQLINECYHKKLTASKEELQEALTGRLTAHHIYMLRQINQHIIYLEEQIMEIDKELEKRTSPYKAEIKLLETIPGVAQIGATKIISEIGTDMQAFPSEHHLASWAGMCPGNNESGGKKKPSKIRHGNKYLKATLVELAWAATRTKGTYFRSKYDKLASRKGKKKALIAIGHMILCACYHIILKKEPFNELGMDFLEEKLKEKRIEHYAKKLKELGYKIDKIA

SEQ ID NO: 124406 - protein, 432 aa, unidentified
MKHKQYSTQTEKIKRITPETLVIGVDIASQKHCARGFNFRKMELGPQLYFQNDRLGFRTFIKWLESLRNINNCLDVIVGMEPTGHYYFALDHYLKEKGIEVVLVNPRDVKRQWEVENNASIKSDPRDAGIIGKLLTDGRYSPSIRYEGVKAELREVIKTRDMLIEEKTRLVNQIHQWLSTYFPEYRQVFKTGIGKWLITLLKEAPTPAEIARLKPDGIHRLMQTCRRSMSRSKVNKLYELARQSIGIQAGVQEAKERLKMLLKRLEQNQDDLRKKEKKIKTLTEQIKEAKLLTDITGIGNLTAATFLTEVGDIDQYETPKQIEKLAGLTLTSKSSGNKKGRGHISKMGRKKLRTVLYHIALTLSSKNDAFKKLYHYYKDIRKKPGTKALIKLCCKLIRVLFTILKKGEPFDPEKMLADIQWPENMTPGYSLS

SEQ ID NO: 124407 - protein, 316 aa, unidentified
MDQQQVYIGIDVSKKQLDVAIRPGNDFFQVANDDLGLAALVQRLVSLQPQLILLEASGGFETLAAASLRQADLPAQIINPRQVRRFADSTGRLAKTDKIDAGVLAHFAEVLKPPLRPWPEAQQQELAALMTRRRQLVEMVVMEKNRLGTAWSPKVRKSLQVHLQALQEQLKELEQDLDDFIRRSPLYLEKDQLLQSVPGVGALTSQSLMAWLPELATLNRKQIAALVGVAPFNRDSGQMRGRRTVWGGRQQVRPSLYMATIAACRFNPAIQNFYQRLLQAGKRKKVAITACMRKLLTILNAVLKHQQPWRLDTLSP

SEQ ID NO: 124408 - protein, 407 aa, unidentified
MYYLGIDISKKSFTVSALDEEGEAITKFLTYPCTRKGMEKLVDKISSLKLEKDKTVIGIEATGNLWENLYSFLEGYRVIILNPYQTKKYHQVLSKKAKTNKVDALVIAGLLRSKEALASYVPEEEVQVLRELVRLRHHLQKDKKNYLRKAYSLLNLVFPEYTNLIKDPFKKVSSMILKKYPTAIHMARARRTDLVKMARRIQGNNYSSELAGKLIQVAKESIYSGKASEVRGMALRIIIDEIQSLKNKIKEIENKIEEILSSNEPSSPQERLLGIPGVGSKTVAAFLGEVGGDVSRFSSANKLIGFIGWHPRISESGEKKNLHPKMSKKGPSALRASLYMAAVASLKHNPYLRSLYHRKISEGKESKQALICVGKKILSIMYSMLKYEADYDPQRIFLQFEKEQVLI

SEQ ID NO: 124409 - protein, 370 aa, unidentified
MKKDTLFVGLDTDKKHIDVAVAEPLPRGEVRYWGRTANMPASVDRMVKKLGHGGRELVVCYEAGPCGYGLYRQLTGKRGVRCLVVAPSMTPQRPGDRVKTNRRDALKLAKLLRAEELTEVWVPDAAHEAMRDLVRGRSSVVSALTRCRQHISSFLLRQGIPYAGKPWTNKHRAWLGTLKFEHAAHRLLLAELLLALDQAQAQRDRLTDHIRELVPTWSLAWLVEALQALRGYDLINAAVMVAELGDPRRFAKPRQLMGFVGLNVSEASSGETVRRGRLTKTGNKRARKALIEAAWTYSRPAATTSKPATARLPAAVQQIADKARHRLSRRYRHLVRRGKLKQVAIAAVARESLGFIWAIAHAAAPGPAQS

SEQ ID NO: 124410 - protein, 349 aa, unidentified
MEEITTIGVDIAENVFQLHGINAEGQVVLRKALRRGQMQPFFEALSPCLIGMEACATAHHWARTLIASGHDVRLIPPNYIKPYLRRQKNDAADAAAICEAVTRPSMRFVPVKTEDQQATLMLHSARELLISQRTALINALRGHFAELGIVAPQGARNVRQLIAILEDERYSPQAVRTALAPLATVLIEIEGQITKLDKALLAAHRNNDVSIRLATVPGIGPVIATCLSASVSEPKLFEGGREFAAWLGLVPRQHSTGGKPRLGSISKMGNRHLRKLLVVGAYAALYRMKKGTADTPLANWARGLLSKKPFKLVAVALANKIARIAWAIMARNVNFQSEHVSRCSDLIPA

SEQ ID NO: 124411 - protein, 338 aa, unidentified
MKELYYIGLDVHKKSISYMIKQADGGIVGQGEVEARRAALSAWARAIGKPWVGALEATLFTGWIYDHLRPFAEELQVAHPAMLKAIACGKKKNDRLDAEKICDLLRCNLLPRCYMAPAEMRELRRVLRYRHLLLSEAVRMKNKISGLLLEVGEPYVKQKLHRRRYFQELLGNLRDTPASVLEMLAISRGSLELFDGLQRKLLRELRRHPLLAARVERLRTIPGVGEVLALSWALETGSPERFSSLRRAISYCGLCSAQRESAGKNQRGPISKQRNKHLQHVLIEAAKLAPRWNPPLRRLHERELQRGSRNRASLAVARKLVAYLLAVDKSGRAFVPQA

SEQ ID NO: 124412 - protein, 421 aa, unidentified
MTSMTSLTPAAKSERLPGSLFGGIDTHKNTHHVAVVDGVGRPVADREFATTPTGYTEIVAFFHSHGAVEQVGVEGTGSYGAGISRVLSAAGFTVMEIARPNRRHRRLKGKSDPIDAHQAALAAIAGTEAAIPKRGDGVVESLRILMTERHSAVKARSQAMNQIHGLLITSPDQVRQDYRALGGEKLVSVLSRSRPAPGADPTMVARHTLKRLAIRHTLLRDEITVINNQLDTLIRILNPGLLALSGVGVVTAATFLTAAGDNPERLASAAAFAALCGAAPIPASSGQRVRHRLSRGGNRKANSALHRIVLLRMRHQEPRTAAYFERRRAEGLSDRDIIRCLKRHIANEVFRALTSPIPTTPAGALLRQRRQALGIPITTLAATLEIPYQRLRRLEIGTRGDTKLEPQAHHALDQLSSRKTA

SEQ ID NO: 124413 - protein, 365 aa, unidentified
MGDCTDPLYVGIDAHQETLSIAVLPPRDPAPEPVRVIPNEPARVRRYFRGLARRGPIEAVYEAGCLGFVLHRQLTGLGIDCMVAAPSRIPTLPGDHRKTDRLDAQRLAIFLRGHQLTAVSPPTPQLEALRSLMRLRLSTQEDVVRARHRLQKFLLLRGHVFREAGNWSAAHMRWLSQLELELGEDQLTCDFLRMELDGRVSALKILDERIARRALEPDVAERVTALRAFRGIGVLTALCVIAEIGDPRRFRCEEQVASYCGLTPSERSSGEKTRRGAITKAGNPRLRRLLVESSQHAARPLGPGHAREARRARAPAPVVALARQADQRLSLRYRQLCRRKHTNQAKTAVARELVGFLWRALLLVA

SEQ ID NO: 124414 - protein, 345 aa, unidentified
MPIVGGLDIHRKQITFDYLDTATGQVRRGQLSPADREHLRAWLARFAGRQEVAFALEGCTGWRYVAEELTGAGAAAHVAEPADTAFARGRKRHAKTDKTDARHLRQLLAEGRLPECWIPPGRILECRALLELYNDLRREHTAWAQRIHAVLFHQGAPALGESALRTRQGVAALREAAAAHLSPAGQLQVATALEMTEALEARMHVLRHQLLDAARHLTGAKVLAARLYGVGPVTALAMTCWLGGAGRFSSSRKAVRFAGLDITVSSSDRKGPPGRLSRQGPPVLRWAVYEAGKTHARSSAPDHRYYAAVKDRDGGKRATLSEARKILRQACHILTELGDDALTAA

SEQ ID NO: 124415 - protein, 336 aa, unidentified
MSHNSIIYIGIDVHERESQVAVLEKSGKLLLEDRVPTGELEEFISSIEGKKHIAIESVGFIHPIYERLSSIDRCKVYVANSNKLNLISQSSTKNDRNDARILGDLLRMNYLPLAHIRDKETREKLYVVNDRVAYGLRRGELRTTIRWLLKRRGIDIEGRPFSDEWRDELKELHIREIDLRLKELEFVESTIEELDRQIKSIVADDHRARLLDTIPGVAPYTALFLACILDDIDRFPDSKHACAYLGLVPWLDDSADTEHLGHITKKGNKWLRRNLVECARIAVRKDPHIREFYERVKHRRGEKKAIIAVARKLVSYAYWMLKRNITYEEPHPWLLA

SEQ ID NO: 124416 - protein, 383 aa, unidentified
MKAVCGLDVHKDSIFLCILHSDGELFEQVFGVLTFQLEEMRKLLQKHHVFEVCMESTSIYWIPIWRVLSPHFTLRLVNPYFIKQLPGHKSDVKDAQWIAECTMKELVRGSFVPPEIIQQLRQYDRRIFDLNAEIVRKVSKVDGVLQRCNIRLSNYVSNIECKSYRDVVRRLSEGVTNPNELMKLVHGRIVNRHGAETILASLTGVVSQAEIDVLRQLHEEIDIAESHRNECQQRMLKICEKHFPEELERLQKIPGIKERAATSLIAEIGTDMSKFETANHLASWSGLRPRNDESNKKIKSRKITHGNVYLRNTIIQCAWAASRQKDSFFSRFSYHQTIVRRKNKMKVIVAVARKLLIAVWHVLHDKTDYVDFKPDREESANNG

SEQ ID NO: 124417 - protein, 354 aa, unidentified
MKTYYVGMDVHRASIWIVVLNGAGKLVMQSVIETGAERVRGYLKQLRGKVYVTFEEGTQATWLHDIVRSLVTEVVVCDPRHNKLLQSGNKNDRVDAQKLAELLRNGALKAVYHGDHGMRTIKELVRNYDCLVSDSTRVMLRLKAIYRGRAISCAGHDIYRSDRRAQWLEKLREPGARQRASFLYAQLAALKPLRHEAKLVMVKEARRQAAYPWLMSVPRLGSVSVAQLMAVVGTPHRFRTKRQFWPYVGLAVVTRSSADHEIVNGVLRRSRRPIATRGLNRNHNHLLKKVFKSAATSACHSGPFKAGYDARVAQGMDPSLARLTIARQLAAITLAVWKRGEKFNMQMMKQQLAA

SEQ ID NO: 124418 - protein, 370 aa, unidentified
MIRLARAMQYLINTELSSHEETRFEFNRSTGAIKLGIDVHQDFYVVVEQVEGGNPKPPQRFDKQAFLHWASKLKQRGAEVHAVYEACGFGFSLQRNLTALGIKCHVVCPQKLDERNKRVKTDGLDAKALCLKLDRFVQGNRDALALVRVPTEEEERSRAIHRQREQLVGARKRLEAQGRSLMVNHGVDPVQNWWKPRTFATLPVPHWMRELLLNSQPILLALQEKIAVLTLQLQNAAAPNQPRGLGKMTSVVIDREIGDWHRFNNRRQIASYTGLCPGEYSSGNTRLQSCVTKHGNPRLRAALVELAWRLVRFQPNYKPILKWRQILAKGALATGAARKKAIVAVARQLAVDLWRIKTGRLRAQELGLIT

SEQ ID NO: 124419 - protein, 430 aa, unidentified
MPTESLPTALANLPSWMRYERFFGLDIHKQYITVVAINREGEVILQVRRVPTIEWPQWAAKNLGHTDAVVLESTTNAWTVFGQTVDHVGRCVVAHPDRKRRVKTDIQDAKGWAERLLVNDIKEVWVPPQHVRDLRGLISYRIRQITVRVRLKNRLQSIVHSNQLIPPEGALFAAKNRVWWKNLALSQIERFRVQQDLASLDLIELQIKEIDHKLAGFSQDEQWREEFPYLMQLPGVGLIVGMTVLGAIGDISRFESPQQLVGYSGLGASIEQSGDKHRNGGITKTGRKDLRFVMVEAARVAVRQNGRWKKQYERLEPRIGSNKAVVAVARKMLVVIWHLLTKKVVDQFANPDLVAGKIMKLAWQLTEEQRGGMKLKEFIRYYLTILGLGKHVKKLFRGGRNRPIATLEELIARFPELTDLPEFEAALAEP

SEQ ID NO: 124420 - protein, 371 aa, unidentified
MSSIIYVGMDVHTTNYTICCYSITTDKIFAQTTMEPDYKNIVKYLAQLERELGGDCHFQCGYEAGSLGYSLYHQLTGQGLECVIMAPSTMAVPRKKKGIKTDKRDASNIAKCLAYNTYNHVYVPTGEDNAVKEYIRMRNDVKETLKRIKQQTLALCTRHGKRFTEGRTYWTRKHLDWLKKLDFGNAILQETLQEYLTLYHQAVDKVELFDKRIEEFSRMERYNENVRKLSCLIGIKTHTALSAIVETGDFTRFPTAEQYASYLGLVPGEDSSGDTVRRTGITKAGNSHLRKLLVEAGQCYSRGAIGAKSKTLKARQAGVEPKVVAYADRANERLKRKCYRIMFNSKRNIAVTAVARELGCFMWGMMTDNVA

SEQ ID NO: 124421 - protein, 436 aa, unidentified
MTTRKTIQEYDAVLSFDWADEKHDYCLWDAGSNSIEIDTIANRPEVIHDFICQMRFRFQGKAVAVGLEQSKGSLAYQLMEYGFFTIYFTHPTTVAKVREAWTPSGAKDDPDDAELIMGIVRDSNHKLRAWKPATPETRRLMLLCSHRRKFVDLRVKLTNMLRSCLKTYYPLACQVAGDKLNEPLALNFLTKWPTFGELKRARPSTIEKFYALGNGRSTKAIQKRLEAIRDARAATTDPVIIGCHSVQMLALVAQIRTLRESIKQYDKQIAETYSTHSDVEIIKSFPATGKVFGPRLIAALGSDRERFESAHEMECYSGIAPVVDRSGKTAKTYRRYKCSTFIRQSFHEWANETTKHCLWARAYYVQCREKGKGHHQAVRSLAYKWIRIIYKCWKEQVPYDDGHYMSMLKKRGSNLIKLIAEHPDVYRLNGPVKVEF

SEQ ID NO: 124422 - protein, 341 aa, unidentified
MQITTIGLDIAKHVFQVHGIDAEEKVVVRRQLRRSQVIKFFEELSPCLIGLEACATSHYWARELTKLGHEVRLMPAKDVKAYVKRNKNDAADAEAICEAVRRPTMRFVQVKSAEQQAHLMQHRARDLLMQQRTQLINSMRSHLAELGIIAPQGREGVKELLAIAAKDTDTQLPNDARASLVVLAAQLHALQTTIGAIEKRIVVQHRANKESKRLQTIPGIGPIGASAIAATVTNPKIFRSGRDFAAWIGLVPRQMSTGGKAKLGPISKQGDRYLRRLLVVGAVSTLRRAKLNPQRYPWVTRLLARRPFKVVAIALANKMARIAWALMISGKVCRSSWFAAA

SEQ ID NO: 124423 - protein, 269 aa, unidentified
MEATGIYHEYLACGLHQMGILTSVINPCRSREFAKAMGIFTKTDAVDAYVLAFYGCLKQPEAWTPPEEEVRKLRALLQHRDSLLNDKLRIDNRLNTLKSTEAVQEVMDSLSLVNQYLKSEVARIERLISSHIAQHPGLKRDLKLLMSIDGIGKQIGWNMLAVLRGNNFKSAEQLAAYLGVVPVERRSGTSVHGRARLSKIGSSNIRAKLYMGALTAISKNSHIKALYERLLAKGKMKMSALGAAMRKLVHLCYGVLHTQQPYMKNIKQK

SEQ ID NO: 124424 - protein, 372 aa, unidentified
MTEFSVYVGLDVHKATIAVAVAVAGRAEPQYRGEIANTPTAIKRLLHKLSPDGEVLGVCYEAGPCGYGIHRQITAVGHDCIVVAPGLIPRKATDRVKTDRRDALSLARLHRAGELTAVWVPDADQEAMRDLTRAREDLKAIERTARQRLGAFLLRHGQVYPGKSRWTQAHFRWLERVKMPMPVQQIVLTEYVDTVLAAQRRVAALVEQMRLALADWSLRPVVEALMALRGVSLITAMTVLAELGDITRFDSPSQLMAYLGLVPSEHSSGGNRRQGGITKTGNSHVRRVLVEAAWAYRFPARKSYAIQRRAERTSADVQAIAWQAQTRLCGRYRHLIHAGKTTPLATTAVARELAGFIWAIACEVPVNAAKAA

SEQ ID NO: 124425 - protein, 366 aa, unidentified
MTSMPEVRLDGDTSQHTEQVIVGVDTHKDTHVAAVITLVGVPVASRAFPATAAGYRRLLTWASSLGAVRRAGVEGTGSYGAGLTGYLRREGIAVVEVNRPDRAARRRRGKTDPVDAEAAARAVLDGRATVTPKTADGPVEMLRMFRLARASAVKSRTQATNQLRAVLVGADPALREAVSGLTGAALVRACASLPAAQPRNVATATAYTLRCLAQRIGQLTTQARDLQRQITAVINTHAPQLLHRRGVGPDSAAALLIAAGDNPDRLHSDASFAALCGVSPIQASSGKTTRHRLNRGGDRQANAALYRIAFTRLRCDPRTRSYLARRTTQGKTRREAIRCIKRYLAREIYRLLQPLTPQAGTTPRAG

SEQ ID NO: 124426 - protein, 321 aa, unidentified
MDGWEMAELFAGIDISKARLDVAVRGAQVRGWNVKYDEAGVEALVQEFRKLAPTLVVLEASGGLETHILGALAAAGVPVVRINPRQARDFARATGELAKTDEIDARILALFAERIRPEMRPLPSEDLRDLDALMTRRRQLVDIRVSERNRLQQASPVVRASIQEHIEWLDARIDEVTKELQERIEANDLWREKDLVLRSVPGVGPTLSLSLLTSVPELGTLNRQKVTKLVGVAPLNCDSGTMRGQRRIWGGRADVRAVLYMATMSAITHNPVIREFYQRLLARGKIKKVALVACMRKLLTILNRMLKDNTSWDPEFALKAG

SEQ ID NO: 124427 - protein, 350 aa, unidentified
MAQVRTWAAFDVHVSGVVAATLERDSGELRVRRLPGSSDEVAAFAAGLPGPVRATYEAGPTGFVLARRLAAAGVECVVCAPGLIPRGPSDRVKTDRRDAERLVRLLAAGELHRVAVPGVQEEALRDLVRAREDLRGDLMRARHRLAKLLLRHEVRFDGPERNWTQAHLGWLAGVQLAQPASQRALEDYRGAVSALMIRREQLEAEIARALPGSPWAQTAQRLMCLRGIDTLTAAGLCAEIGDFHRFRHPAQVMSYLGVVPSEHSSGERRRRGPITKSGSQHARRLLVEAAWHYRRPPPAARRRQPGAAPDQRRARDRGAVVEGATAAASRLAAHGTAPQAPHNHRRGDRT

SEQ ID NO: 124428 - protein, 388 aa, unidentified
MPQSNDLSRSLAAFDQDRTLIAVIEMSQSNWLVAGLVPGLERRPLKKLSPDEDALLKLVQRWRNEAAQAGREITRTVVAYEAGRDGFWLARWLRRRGIEAYVIHPSSVAVSREHRRAKTDRLDTELLMRAFLGWLRGEKRHCSMAAIPTIEDEDAKRPSREHEKLVGDRTRLVNRMKAMLARFGIRTFKPTLRKAADRLDDLRTAEGTPLPENTRAELRRDMMRLRMVREQIKEIEQERLRKLTAAPAEKGPPTMVRFIARIIGIGIETADMLVSEILSRGLRDSKAVARYAGLTGAPDESGRRRREKGLAKAGNARVRRGMIQLAWRFLIFQKDSALAQWYRARTADAHGATRKRMIVALARKLLIALWRMATTGEIPEGISLRAAT

SEQ ID NO: 124429 - protein, 365 aa, unidentified
MPSVSHLGPTHLGLDVHKDTISVAILTPDRDGPDVDRIPHDEPSVRRLVGRLGDPRWLRACYEAGPTGYELARLLHSMGVRCEVIAPSLIPKAPGDKVKTDRRDCRRLARLHRAGELVAIRIPSVQEEAVRDLCRARADMVEDRTRARHRLSKFLLRHGRPWRGGNAWTLTHERWLLAQRFHEPALAATYAHYRAVLQGRDAQLEAIEADLAVWYDLPPFADAVHRLSAYRGITRLGALTLASEVCDWRRFPRAAAFAGFCGLVPSEYSSGTSMWRGHITKCGNAHLRAQLVESAWAYQHRPAVGVDLRGRQQGLDPQVVTRAWAAQLRLCGRFRRLAARKDSKNVVATAIARELAGFLWAEMAA

SEQ ID NO: 124430 - protein, 402 aa, unidentified
MTVCGGLDWGGSEHGVCVVDRESGQIVVRFAAKHDAAGLADLIKRLARLASPAELPIAIERPSGLVVETLLAAGHPVVPIHPNVVKASRPRYRAAGGKSDLGDAYLLADLLRTDGHRFRPLTTCSDEIKALRALVRGRDDLVAQRVGLANQLRALLEGFWPGAGAVFANIDSPIALAFVQRYPTPDSAARLGERRMKAFMAQHRYCGRRSAAELLDRLCAAPEGLAGEAEAEAKGELARSLAAVLAVLVARIAELTARIEHDVAELPDGRIVMSFPRSGRICAAQILAELGDVRERFQSEEQLAAEAGVCPVTHESGKSRGVVFRWACNHRLRQAVTCFADNSRHGCAWAADVYKRARARGCDHPHATRILARAWIRVLWRAWTDRTEYEPAIHRGAQAVAA

SEQ ID NO: 124431 - protein, 452 aa, unidentified
MEKSRRHRAEREFSCTHPDAGAIDIGSRIHVAAVPPDRDPSEPVRTFGTCTGDLQRLADWFERCGVRTIAMESTGVYWIPAFEILEQRGFEVMLVNARDAKHVPGRKTDVSDAQWLQRLHEYGLLRASFRPKGELAALRAYLRQRERLLDYAASHIQHMQKALMQMNVQLHHVVTDMTGATGMRIVRAIVEGERDPTKLANHRDPLCHASMEEIAAALTGNWREEHVFALCQSVELYDTYQAKIAQCDAQVEAVLERLRSAAATGTQPLPPARHRQATANAPSFDARSALHAVLGVDLTQIHGLGPSLALKLVGECGTDLSAWPDAKHFTSWLCLAPSNKISGGKILSTRTRRSGSRAAALLRLAAVTVGRTQTALGAFYRRLSARIGKAKAITATARKIAVLFYNTLRHGRAYADPGASYYEQRYHARVLTNLQRRAKSLGYVLQKELSPT

SEQ ID NO: 124432 - protein, 320 aa, unidentified
MSDRFAVGIDADSRTLVVAYYGTKGSARIANSASAITKWLSALPARSRIGVEATNRYHELVVQAAQKAGHAVFVLNPRDIKHYAKGVACRGKTDAGDAQVIARYIAKEADNLHEHVARSPAQERLHVLLQQRDSLVRNKATLHLSLGTDAADSAIFGRIFSGLKEAIAMLDREIQRLCRSGEQSDLYRRIMTIPGIGPTVAAFVTHHITRWPLASSDAWVACTGLDPRPNESGARIGRRRLSKRGNAGLRQILYMAAMGLTRSKGGKPLYLAIRERGHSSTASFNILARKLARIAWGVFKSGRDFDPAMLKVGQACFQQA

SEQ ID NO: 124433 - protein, 338 aa, unidentified
MKITTIGLDIAKSVFHAVGVDKAGKLIKKKMLRRKDLLPFLAQIEPCLIVMEACSGANYWAREFELLGHNVKLIAPQFVVPFRQGNKNDYNDALAIAEAAQRPNMRFVKPKSVEQQDVQLLHRMRERLTKQSTALINQVRGMLAEYGIVITKSKSAFKVQFPDILADETNALTTKGRAIFYQLYEEFSDIEKRLKGCDVQVLTETKNNVICQRLETIPGIGPVTATAFYAAVGDGKDFSNGRHFSAWCGLVPKQHSSGGKDNLLGISKRGNPYLRTLFIHGARAVLQHSCHKQDKFSCWAIQLAERRGFNRACVAVANKLARMAWVIAAHDEEYRLPV

SEQ ID NO: 124434 - protein, 343 aa, unidentified
MKITRVGVDLAKKVFQVHGVDVAGRQVWKRQLKRCSWLSVLTEAVEPGCEIGMEACGGAHHWARELKSRGFEVKLISPQFVKPYLKSLKNDVNDAEAICEAMTRHHMRFVAVKTVAQQDIQAMHRVREGLMNYRKAKANQIRGLVAEYGLVAPRQMGPLRKAIPCWLEDAENGLRSAFRILLHGLWEDLQSVDLRLKVLDKEIFALSETHADAKRLKQLRGIGPLTATAMVAQFGDGRHFKRGRQASASVGITPRHTGTGGKNYLFGITKKGNPYLRSILIHGARSVVSKAKHKGDRLSRWVTELANRKHPNVAAVALANKTVRIAWAMLRNGTDYDPELAMA

SEQ ID NO: 124435 - protein, 360 aa, unidentified
MSERDYNRQVVKRERISRATLVVGVDVGNAWNAVGFMDKEGNVLGTCAKLYNSREGFEQFVKMTEGFKERQGMKDVLIGLEPTGHYWRKLVCFAKDQGYEVRFVRTTALKHHRELDESSSAKSDKRDALTIANITREGKYIDTVIEDGVMRQLRTLSKVRERLLRYSVGAENALHAALDDYFPELHEIFWSMNSRSLWAILDRCPFPEDVISMKRSILRELIACSSRKKAGAAQKAKALCQAAKKSIGVKRIGSADRYRVKICLQEVKRTVLMLKDIDRQMKSILKEIPSSEYLLSIPGIGHLSAAIFLGELGDPAYFQNARQIVKYAGYDPQESDSGYRVSRNSYPKRDAGSSGNACSS

SEQ ID NO: 124436 - protein, 437 aa, unidentified
MSDKKPVELRVSVDVGYRRHSVAIGLPSGEVLEEFEISHRPEGFEQFFSRIEKHQKVRSCEVGVAMEGFNGCARPLDRMVRRRGYRLYNINNLKLARFKEIFPGAAKSDRIDARKGLELFQLSDHLPLAKEVLQEVKGTPQENEVLKRLTRRRRRLVDEGVRVISNLQTDLQAVCPGLLEITKNAGNQWFLNFLISAPSLPQLARLRPSTLLKIPAVGRKYASLIEDWQKRAHFSEEVKWVSEMIQEDAQRCLDLDEKIKSLKAKIKEVAKESKIAKILLSIPGFGTICTAELAGEIGTIERFLKEGSLALYLGMATLDNSSGKYQGSKQPKHVNTRAKAAMMIAIDRHRKYVPESQRYYEKKRSEGKKHNQAIRALGRHLSRIIYKMLTEEREYEMRPEKGNTKTKVRSRSCVKTQIRKPKISAKGKKNNIYQQST

SEQ ID NO: 124437 - protein, 398 aa, unidentified
MTESSDYESVQVFIGVDVGKDTHHAVAVNRSGKRLFDKALPNNEAKLRSLISDLKQHGQILLVVDQPATIGALPVAVARTEGVLVGHLPGLAMRRIADLHAGEAKTDARDAAIIAEAARTLPHALRTLKLADEQIAELSMLCGFDDALAAQTTQASNRIRGLLTQIHPALERILGPRLDHPAVLDLLQRYPSPEKLASLEEKKLATQLSKLAPRLGKRLAADITQALTEQTVVVPGTNAAVVVLPRLALQLITLRKQRDEVALEVEQRVLAHPLYPVLTSMPGVGVRTAARLLTEVACRAFASAAHLAAYAGLAPVTRRSGSSIRGEHPSRRGNKTLKRALFLSAFAALRDPISRAYYTRKMSQGKRHNQALIALARRRCDVLFAMMRDGTFYTPTAS

SEQ ID NO: 124438 - protein, 412 aa, unidentified
MLKIVYPICCGIDVHKGFIVACIASTNGQGVTTYQSKRFSTFTNDLRRCAAWLAQNHCKDVCMESTGKYWIPVYNILEASCTIVLAHPKYVKAIRGKKTDKKDAKWIADIFKHDLVSGSFIPPADIRQLRDLMRYHWKLTNFTTGEKNRAQNCLTVSNIKLDDVFSDIFGKAASAITARLLENNEPFDVTPYLTKNIKAPVEKIQAAVDGEMCVQQAEKLRIIRSHMDALELCKLNLQSLILTTAEKYLPQLNLVATAPGIQAFSAIGIISEIGVDMAVFPTSKHLCSWAGLTPQNNESAGKKKTTRISRAGSYIKPLLVQCALCAIRAKQFPEVRRRYLALKKRRGHKKAIIAIARMLLTAIYNMLKKNEPYDPELYRKADRPPVHREVSLEEAIYIIQRQGYLVTAPPTP

SEQ ID NO: 124439 - protein, 340 aa, unidentified
MDEYIGLDVSLKETAVSIRRDGKRIRRGKCASDPQLLAALIRKHAPAAKRVVFETGPLSVWFFHALTAEGMPAICIDARHAKAALDMAANKTDANDADGLAHLAEVGFYKEVRVKSFDSMLTRTLVAARTRLVRVCTELSNQIRGLMKTFGLVVPQAMGSKFARHVEALLADNADLGRIIRPLLEAWHAVRLRAAELGRKLLADARRSEACQLLMSIPGVGVVTATSFVTAIEDPANFKHSRSVGAFVGLTTRRYQSGEIDYDGHISRRGDSHLRGLLYEAATVLLTRSRSECDLRKWGLQLRERLGFKRAAVAVARKLAVIMHSMLITGEPFREKSTAV

SEQ ID NO: 124440 - protein, 340 aa, unidentified
MKNKKYFIGLDVHKERTSYCVRDKQGNILTEAEAATLYSELEPQLKPYLAASIIGLEASTSYYTLYQNFLRNSYHIKVANTIQLRQLIAKNDKLDAQRLSEMLRLGTFPESYIPEEKIQHLRSLVQLRHSLMEEKVRCNNRIQAFLDKNGVVMPSQEAFGKKWRHALVQYMGSGDVSLEMRYEYDHFEFLEKKNTQLDLEMQGYTYKHWPMEYKIIQSITGFGPVLSCYIIAHVHPINRFISNRKLRRYAGVVPTYKESGGTKSKGHIPKTSSRKLLRWALIQAANAAGRTNTKLGRYYRMKKKQKNNASIAHVAVASSMIDIIFKVLTTKKPYTSSCVN

SEQ ID NO: 124441 - protein, 433 aa, unidentified
MLKLNYMSTLFVGIDVSSKTNAVYAMDFEENKYISSSFGNNQPGADQLVNMIAECMQKHKNLDTILIVLESTSVYSVHISNFLSASEVLMPYRPYVFCVNPKAASNYRKSYIGMEKTDPTDAYLIADFGRVGRTKKLEPWRGGQFIALKRLTRHRMHLSECITREKTYMVSNLYLKFSELQLLEGDDKPFGSLYGATSSAVLTEFLSPQEIIDMPEEELLTFLAGKSRNRISDLSKTSELLRKAARDSYRLDKCMYEPLNISLASSFNCIHAYQKEIKLIEQAIEKCINGMNPNALLILQSIPGIGPIWASGILSEIGDITVFHSSDALAKYAGLYWPKGDSGDFTSEDNKMSKAGNPYLRCYLGEAANSVRKHIPEYADFYARKYAEVTKHQHKRALALTSRKLVRLVFGLLVKNQLYTGEKLDAEYNIESN

SEQ ID NO: 124442 - protein, 341 aa, unidentified
MTIVMGLDVHREQITFDALDADTGEVRRGRIRPADRTTLRQFLRRFEGQRVEAALEATTGWRFVVEELRAAGVGTHLAEPAETRALRGTKKRAKTDRLDARHLRDLLLEGRLPESWIPPEHLLELRSKVRLRKTLVDERTAWQQRIHAQLFHHGLPRQPGLLAKDRRLQLLAFELPEAARIQIETAFALIDSIGEQLQPLERELRSFARRQAGCRALMEHFGVGELTSVAILAELGDARRFSSSRHAVRFAGLDITVSESDQRRAAGKLSHQGSPVLRWALFEAAQCACRTGSPDHDYYAAARSRLNAKRATLSIARKLVRRAHHTLRELGDEALAPVANS

SEQ ID NO: 124443 - protein, 354 aa, unidentified
MIIIGADYHPGFQQIAFVDTDTGEFQERRLQHPEEAEKFYRDLGAQGASVRVGMEASGHARWFERLMSELHFELWIGDAAEIRTKRVRKQKTDRQDAQLLLRLMLEDRFRIWVPSWENRDLRQLLWHRHRMVQARTRIMNQLQAVALNEGLRYKKRLWREAGRKQLESFPLAPWASRRRHDLLELLDRLNPTIAELSQAIEQAVEKCPEAQRLMTHPGVGPLTALAFVLIIGRPERFRCGKQIACYLGVVPLEESSGDRRRLGHITKQGNSMLRFLLVEAAQVTVRSDPEWRSKFFHLAMRRGRKIAKVAMARRLAVRLYWMWRKGWNYEQWIKFGSHAGQPGHRHGVQLTPSN

SEQ ID NO: 124444 - protein, 420 aa, unidentified
MKPLKTKKRSFVNGKKLIVTADIGKDNHFGYWRCPDGTDVKPFAIPNNGAGFGEFWERVSRAQKLHNLDGIIFGFESTGPYGEPLAHFMRARGAELVQVNPLHTKRFKEVTDNSPNKTDQKDPKVIADIIAMGRFLTVVIPEGPAAELRRLSQARERSTRRHTALANQIQCLMASIFPEFLQVMKGVKSASAQYLLKHYPTPQEIAAYGLPELTRTLRKVSRGKLGADRAEALYEAAQSTVGVAEGQASMVLEIQELLALMEASQRFTENLELEMIKYLAQIPYSNTLLSLKGIGDVTAAGLIGEVGDFRQFRTMGEVMKLAGLDLFEVSSGRHKGQRHISKRGRPLLRKLLYFAALNTVKKGGAMHQWYRSACDRGMLKTKALVAVSRKLLGILFALVRDHSEYVPHYSETRCQLTEAA

SEQ ID NO: 124445 - protein, 334 aa, unidentified
MENIALIGIDLGKNSFHIHCQDHRGKAVYRKKFTRPKLIEFLATCPATTIAMEACGGSHFMARKLEELGHFPKLISPQFVRPFVKSNKNDFVDAEAICEAASRPSMRFVQPRTESQQAMRALHRVRESLVQDKVKTTNQMHAFLLEFGISVPRGAAVISRLSTLLEDSSLPLYLSQLLLKLQQHYHYLVEQIKDLESQLKRKLDEDEVGQCLLSIPCVGTLTASTISTEIGDGKQYASSRDFAAATGLVPRQYSTGGRTTLLGISKRGNKKIRTLLVQCARVFIQKLEHQSGKLADWVRELLCRKSNFVVTCALANKLARIAWALTARQQTYEA

SEQ ID NO: 124446 - protein, 433 aa, unidentified
MRNLSLGRCDVKPLYTQTFTAYVGIDWADTKHDVCLQAVGSDQREFACIPHQMHRIDEWAKLLHQRFGGTIAVALELAKGPIVYALQKYDFIVLFPINPLTLAKYRQAFKPSRAKDDPTDAELALDLLLRHPERFAPIQPQSVAMRSLISLTEHRRELVGDKTRLTNRLTNTLKQYYPQALDWFEQRDTVLFIDFLTRWPTLAQAKRARIDHLKAFFHAHNSRRTKVINTRLESIKSALPLTEDLGVITPCRLHALMLVKQLRVTLQAIEQFDHEIAELAPTLPDYSLFQRLPGAGEHFAPRLLAAFGEDRQRFQHADELQKYSGVAPVTERSGKKSWVHWRWQCPTFLRQTFIEWAGQTINKSFWAGAYYRQQRVKGSSYQAAVRALAFKWIRILHQCWKTRTPYNETTYLNALRKRGSPLLKNLMPDATNT

SEQ ID NO: 124447 - protein, 343 aa, unidentified
MHVIIGVDPHKASHTAVAVGDDEQELARLVVRATRTQVDRLLAWAQPFTSRTWAVEGSDGMGYLLSQQLVTAGEHVVDVPATLAARTRLLANSRTNKTDPNDALSVALTAQRHRTLRVVAPAGHAEVLRLLAKRNTDIGDQRCRLVSRLHALLIELAPGGIAKEINASDVVSFMARLSPSSPVEQIRYDLAVELLDDIRRLDEQLKASHKRIRTAVAASSTTLTDIFGIGPIIAAALIGHTGDITRFRDRDHYAAYNGTAPVEFSSAGRSVRRLSRRGNRRLNHALHMAAICQLRQPHSEGRAYVDRKVAEGKTKKEAIRSLKRQLSNVVYRRLVADGCRRSG

SEQ ID NO: 124448 - protein, 344 aa, unidentified
MSKHSVRGGDFAGLMERFAQLQAKARLRMGQSFRIIVVQEAGLDGFWIHRALQNEGIESHVVDAASIATSRRRRRAKTDKIDGETLVRALLAYKRGEPRVCAMVKAPTPGEEDRRHLCRERKALTAERVRHVNRIKGLLFSQGISGYQPLRRDRRQRLEELQTGDGRAFPQHLKALVNRELDRLELLLKQIKTVEAARDALLAVKQTAKPAPAAMLLDIKGIGPEFAAILWSEGLFRHFENRRQIAAYAGLAPTPWQSGAVDREQGVSKAGNPRLRTTLIQLAWLWLRNQPRSALSVWFHERVSRNGGRLRKTTIVALARKLLVALWKYVTAGVVIEGVTMKVA

SEQ ID NO: 124449 - protein, 413 aa, unidentified
MKQIRDRVAGLDVHRDSVIVCCRVRQPDGEIALSKERFATTRRGLAELAAFLAEQAVTTVAMEATGVYWKPVYYALEGLFAELWLCNAQHVKNVPGRKSDISDCEWLADVAAHGMVRPSFVPPPEIRELRELTRYRKTQVDARAKEIQRLEKVLQDAGIKLTSVASTVWSASSREMVEALIAGERDPAVLAQMAKSRMRGKIPQLEEALAGHFGAHHAIVCRQIIEHIDFLDSSIAALNEQITARLVPFEGALTIIESITGISRTTAEVIVAETGADMSRFPTAGHLCAWAGLAPASHESAGKRRPAGTRHGSGWLRRTLVEAARAAARSKSSYYSAQYSRIAKRRGANKAAVAVAHSMLAVVWHLLTTGALYEDPGADYFQRRHDPIAELKRLTRKIEALGFDVIVNEKAAA

SEQ ID NO: 124450 - protein, 396 aa, unidentified
MAAIWAGIDAGKTHHHCVAIDGSGRQLLSRRVANDEPELLELLSDVLALGNEVTWGIDLADGGAALAITILFNHDQPVHYISGRAIHRASESYRGEGKTDAKDAAVIADQARIRRDLHPLRTGDETVTDLKILTGRRTDLVADRTRTVNRLRAQLTGIFPGLEQALDLTNTGPLVLLTGYQTPAALRRTGKKRLETWLRNRKVLRADLLAETALEAAGRQHISLPGEKLTAQMVHTLAREVMALNQQVAELDKAIEARFREHRDFEVITSMPGLGVILGAEFLAATGGDMTAFGTADRLAGFGGVAPVPRDSGKISGNLRRPQRYNRRLQRVFYISALFSIRHCDESRRFYERKRAEGKRHIQAVLALARRRVNVLWALLRDRRTYELVPPTAHAA

SEQ ID NO: 124451 - protein, 403 aa, unidentified
MDVIAGIDWASEEHRLCLVDSEGRRLLERRVSHDEEGLSGLCRLLGQRRVCRVAIGRPDGLLVDRLLEAGLTVVPVHPNALAAALSRYQVARGKSDGFDAYVLAELARTDMHRLRVVEPDSDETKALRALTRARQELVRARVSLANQLRAELERFWPGAARIFADIDSPIGLAFCERYPSPDDAHGLGAKRLQHFLARQRYSGRRTPVELLERLRAAPHGRSGELELEARRTVVLRLVASLRPLVEGIQQLDSEIAHAVRAHPHGGIFLSLFRDPKTTLTAAELVAEIGDSRARYPRSAALEADAGMSTVAVESGKHRSASFRRACDHRLRDAVTTLADASRHHHPCANDVYRRARARGCDHPHAIRILGRAWLRVIWRIWQDHIPYEPTRHGGPQRLLAQTG

SEQ ID NO: 124452 - protein, 367 aa, unidentified
MKIIHWIGIDDHADKWTIAQFRGDEDKPAKEFELVPDASGYRKLIKFAKELGGEVRIVYEAGPCGYELYRQLTKAGLKCSVAAPSLTPRKPGDRVKTNRRDAKKLARYLRAGDMLTLIAVPDKERESLRDLVRARHGVQKDLLRNRHQISKLVLRYGHRYREGKTAWSKQFWTWLGKIKLDEQHSQFVLEERIITHERLLEQRGRYDEAIEAAAKAPEYVPYVTALTVLRGIDRLSAMTLLSELGDLRRFKTAPQLMAAIGLVPSESSTGDKTTRFSITKTGNAHVRHIVVEAAWQYQRRITNGPTIRGRRKDQPQGLINIAEKCDRRLNRKFHRMTSRGKRSTVAVVAVARELMGFVWAIGQIIHP

SEQ ID NO: 124453 - protein, 306 aa, unidentified
MEYPQIVETGCGLDVHKDVIVGTISRGNQSFETREFGADTSSLTSLRDWCKQAGVTHVAMESTGIYWKPVFNILEADFEILLVNARHVKNVPGHKTDKKDSAWLSKLLLSGLLKGSFIPPQDIRELRDMVRYKKKLIGQISSEKNRIIKVLEDCNIKLSSVLTDVEGSVGTRIINAIIFGERDVDVLMGFYHGKIKASREDFRKALTGRITPHHIRMLQFHKKHIEDTEWLIEDIDKEIDKAAEAYKVEIDLLQTIDGIGKESAIAIISEIGVDMSRFPNEHHLASWAGVSPGNNESGGKKKVPKP

SEQ ID NO: 124454 - protein, 430 aa, unidentified
MERIRENAAGIDIGARKVFVSVGGKEVKCFFTFTEDFEKLRDYLLENAIETVAMEATGVYWNILYEILEEAGLDVWLVDGSQTKQVPGRKTDVKDWIQQLHSYGLLNRCFVADSDIKELRIYQRLREDHIRSASMHINHMQKALTEMNIRLTEVLNQIHGASGLAIIEAILKGERDKGKLLNLCHIKIIKNKKEEVLKSLNGRYTKSGLFALKQALDSYYFYQNQINQCDAMLEEVLKRISKGKSDQIISSHRKPIRHNKPDIDNLGSIMLKIFDGKDATTLSGITDYTWMQLLSETGTDLSRWESEKHYTSWLGLAPGQHTSGKMKKNKRKLGRPKAGQIFRQIAQSLLTSKHIALGAFGRRLSSRKGSPLAIKAVARKLATLYWRIMVKGMDFVEKGIQQYEEQLKAQKQRSLIRLAKELNMQITNNG

SEQ ID NO: 124455 - protein, 424 aa, unidentified
MNNTQNQKIAQVTDKTLIVGVDIGSENHYARAILARGFEVSKKPFPFTNTEEGFESFVNWTRNLATAHKLTKIMVAMEPTGHYWFAFVAFLKKYDVQVVLVAPQHVKHSKEMDDNTQEKDDRKDPIVIARLVPEGRYLIPYIPEDAFAELRVAFNRRCELVEEQVRIANRMIRWFDIYFPEYRKIYGRIDAKTGIMILKRAPLPADILDIGVDGICQIWKDAKLRGYGQKKAKQIYSAAEHSVGMKGGASVRWKLWQLLEEYELIERQLHDILQLIEGLLYQIPGADKLLKIPGAGLVTVAGFLSEVGDIKRFSDPKQIQKLAGLAVVENSSGKRKGLPGISKRGRSRLRWVLFQLARSMVMFNSEMKAYHQYYTTRKENPLKKLQSLVAISARIARIFYGILKNGTEYDPTMVMKDFNKAVAA

SEQ ID NO: 124456 - protein, 338 aa, unidentified
MKIFAALDVSDKSTHVCVVDGDGVVVWRGVCATDPAVLAMTLERHAPGLERVVLETGPLSAFLYHGLIERGVPAVCICARHAKGALSVRVNKSDVHDAEGLAQLARTGWFKAVHIKDSATHLDRAQLKVREQLIRARLAMGNQLRGLLKLFGLRMGKVTTPAKRAERLNALFAQKPELRPVFAPLVAGLEALDAQIAVSTRSLKARAEADPVCRRLMSVPSVGPIIALSYKSSIEDPGRFRRSEDAGAYAGLVPRRSQSGERDYNGRISKAGDPMLRSALYEAANNLLCRVKRPSPLQTWGKALAATKGAKRARVAVARKLAILLHRLWQSDTDFRWV

SEQ ID NO: 124457 - protein, 345 aa, unidentified
MNIASIGIDLGKTTFHLVALGERNKVLVRKKFSRATLLTYTANLPAALIGLEACAGAHFLGSALRAQGHQVRLIPAQFVKPYRKSNKNDFIDAEAIAEAVTKQNMRFVQIKTQEQLDWQAMHRVRDRLMQRRTALINEIRGFLLEHGLTFAARPIYLRKNLPTVIEDAEQNLSPLLRWLLARLWQEWKQTEIDIKAITDEIERISNHDARCRRLRQIPGFGPLVSTATVAAIGNGSAFRRGRDFAAWVGVVPRQYSTGGKQRLYGISKRGNVYLRRMLIHGARAVLLRVKYDTGGFGQWVHRLAQRAPRNKVVVAIANKLARIAWAVLSSGRNYRHQPLQQQAAA

SEQ ID NO: 124458 - protein, 456 aa, unidentified
MEKTETAVFSEIRRNVAGIDLAWRADNYVCGPRREDGECEIEAFGTTTPELYRMLKWLQERHVESVAMESTSVYWIPIADLLESNSIEVVLVDAREVRMVPGRKSDVKDCQWLQKLHSCGLLHGAFRPPEAVAAVRTILREKGTLMTMRVQAIQQMQKSLDQMNIRVHHAVSDIDGKTGIAIVKAIVNGERNPIKLATLRDGRCKKSEKEIADDLTGTWREEHLFTLAQAFKTLQFLDERIAAYDVKVSQMFTALAGTIDTPSPPTMPSEKPTAKERANAADKAILQQFMGIDLTLIPGIGYDTAAIIASEFGRNFDCFPDERHFASYIGLAPSLGKSAGKNVRQKKRCKNTSRVGQVLRMAASSLYRSQSELGAYLRSVARHTDKKTAVKATARRMAHMIYRGVVYGKEYIDRGAEAYEARIRERTVKTVNRLIKSYGITSSEIAGSGVILAALV

SEQ ID NO: 124459 - protein, 345 aa, unidentified
MHDVTLVGIDLGKNTFHLHGQDCSGRQVFRKKIGRAQLIGFCADLPSCAIAMEACGGAHFIARELIALGHQVKLISPQFVRPFVKSNKNDFVDAEAICEAASRPSMRFVSPKNASQQTLSALHCVRQSLMQDRIRTGNQIHAFLLEFGISLPRRSNLTKHLQIALAERPLPPRMMMLLNQLHEHFIYLQAQIAGIEKELLAQISADDLAQRLLTIPGIGPITASALAAEMGDGMQFTCGRDFAAWLGLVPRQRSTGGKITLLGIGRGKDKPIRTLLILCARSYMLSVQKRSGPLAEWVRSLMIRRPSNIVACALANKMARIAWTIGSQHTQFEPNPTMRQSSGAK

SEQ ID NO: 124460 - protein, 457 aa, unidentified
MKKKKKTVSYKRHQERKRWITGKKVIGIDPAKEKHQVTVLDERGIQMGESFSINVTHKGFNEDLWKKLGKILGEFRKEEVVFAIESSCDLWRVFAGYLHRRGYTVLLVSPLITSKTRATINNDFSKTDPKDAFLVAENAQGGKYNEYKRYCPEINKLHSLCIAHDKLTKDRNRIILRLRSLMEEIFPEYLKCMHVEIQTSLYLLGKYFLPEHFLKLDVKEEQMNIRRISNGNHNAGTLMKLKEYAQNSIGADKRGEEESVRIILDAWISQLRLIHENMKSIGNRMIELAKETEFFEIIVSVPGISDISAARLIGECRDLRLFTHYKQIEKMAGSNIRLCDSGKYAGTRRINGMGNKRLLKLIYIMTTQTARFMPEVRIKFIKRQMRNKSYRKNIFAASSILLRLLMELIKKKRTYEFRDDKVMELARLELKYDPEGMKGKKRKMKRKNKKNAAQEAA

SEQ ID NO: 124461 - protein, 410 aa, unidentified
MGYETLIRRAHVMTRKNTLKSLPTDTEFRVVGLDLAKSDVSVAAIPVDDNTPSLVDRMTYADLLDWAGKISPTLFAMEPCNGYSLLCLQLENLGHEIKVISGSTVSMWINTYLSGQKTDLNDAIALARLAVSDAELTPIRHKSITEIRIQTVQAVRQQLMSQRSKSIVSFKALAQQWGIPCAAGHRNLKKLRESIEAKVDLITRPVANAMLFLLDAVKSLDRQIGQLNQTLQELVMSDERGRLLQSVLGVGTQISARVITVVGNIERFNSPRSLVAYVGVAPRNFITGHKNLTKKKHGNCPDLSHKGQGKISRRGDKLLRSLFIQGAACLYMQFCKDQLPECQLKRWILKQLASQKPYGKLIVSLAAKLIRIVWAVLTYREKFNIQKAGMTRSMWSEMALETPLNKEVPA

SEQ ID NO: 124462 - protein, 363 aa, unidentified
MTVYIGVDFHPYEQSIAYASDEDGEIGYRRFLHSDKQSIRAFYRKCGADAVIGVEATGCLWWFEKMLAGGGHQLKIGDPRMIRRAALSRHKNDFRDAETILDLLMRGAFPSIVPRSEESREVLDLLHYRQTLVQKRTSIANQLQAFARGKGLARFRMPAVQGRRQLVAAPVTEIETLLVTSRLVLFDEITAQMKTLESRLEQLAAADERARLLMTHPGIGVINALALVHTLGEVRRFRRKEEVVAFVGLDPLEKSSGQTKRIGQISKHGSRLARHLLGQAAQACRDHRIRKFYLEVSRRRGRPKAKVAAARKLLINCYVMLRDGIGYEEFQRRGEVGLCEGSGEVSAKASVSGGLRARPAISR

SEQ ID NO: 124463 - protein, 427 aa, unidentified
MSKRDCSKQVEKRQRIKNTTLIVGIDIGNEFNAVALMNKAGEVIGCYPKVYNSRKGFEFFKQTVIKARRQYGLKKALVGMEPTGHYWRKIAFFGKEEGFEVRFVRTTAVKSQRELDESSSAKSDIRDAITIANIVREGKYVDTIIEDGILRQLRTLARVRERIQRYNTGSKHALKAVLDDYFPELKAIFWSMKAKGLWAVLEHYPFPEEVLKAGVDKLIEVIAKSSRRQEEAKQKADKVYKAAQESVGLKTIGIGDRYRVKMYLEEVKRSEAQLKEIELQMKGLLKEVPCAEYILSIRGIGHLSAAVFLGELGNPNNFSRYKQIIKYAGYDPIEHDSGMNIGRRKVSKKGRWLLRKFLYFMGMRVIHRNSYFRKYYDQKLKSTNRYGAPLKKKEALCAVIIKLIKVIFALLRDKRLFTVKAPALVVA

SEQ ID NO: 124464 - protein, 324 aa, unidentified
MSDSILGIDVSKETLDAYCARGQRKQGRSFANSPDGWKLVRAWLKAMGSKQAHVCMEATGRHSLGVALALHEAGHVVSVVNPAQIRDFARTKLGRNKTDKIDAALIREYGELFKPEPWTPPSPAMRRLCELQTMRAGIIRSRAEWKNRMGSGLGDSVAIELAAATIDHFTTQLEAIDRAISETIDQDAELHHRRELLISVIGVGDTLAALLMAKMPEPGVLRRSGEIVAYAGLNPSHHRSGTSIDRPTRISKIGNAELRSALYMPALSAMRFNPAVAALVARLKIAGRLKPKQIVVAAMRKLLVLCFGVLKTGKRFDPAIAMPA

SEQ ID NO: 124465 - protein, 443 aa, unidentified
MRGPGGLGSRPACRLVVAWLSNDVLACRGLAVAWLKRGASARQVFEIRRARCGLHSGTGGKGGAVMAAVMIGVDPHKASHTAVVISGTEETLGEFRVRACAGQAERLLAWAAAWPERTWAVEGAGGMGHLLAQQLLASGERVLDVQPKLGARVRLLAAGDVNKNDPNDARSVAIAALRSPSIREARPDDHAAVLKVWSKRHRDLGSTRTQLVCRLHAVLCELVPGGVPKRITTGLAAQLLGSITPPDAVAAARCELAAAFLDDLRRIDAQLRGTKQKLAVAVRASGTSLTGLFGVGPVIAAAIIGDVRDVSRFAGRDNFAAYNGTAPIEVSSGQRKVHRLSRRGNRRMNHAIHMAAVTQVSHRNSEGRAYFDKKLAEGKTHKEALRALKRQVSDAVFARLQADARRAAARARDPGGQQGNDSAASAAGLHPRNRLFGQATPGP

SEQ ID NO: 124466 - protein, 402 aa, unidentified
MHVTTHRPEDRTATRADLGAIFVSLELSRSVWLITSLSPGGGEKMWKHSVLGGDVAGLLMRLSQLREKARGRTGKSFPIIVIQEAGLDGFWIHRVLESEGIESHIVDAASIATSRRRRRAKTDRIDGEALVRALLAYKRGEPRVCAMVRVPTPEEEDRRRVSRERKILTAERVGHVNRIKGLLFSQGVEYEPLHRNRRQRLEELRTGDGRPLPDHLKRQIRRELDRLELLLEQVKAVEAERDAVLAAAKEAGAPTPATMLTDLKGIGAEFATVLWSEGLFRNFANRRQVAAYAGLAPTPWQSGTVDREQGIAKSGNPRLRTTMLQLAWLWLRHQPDSALSRWFHERVNRNGGRFRKTMIVALARKLLVALWKYVTAGVVIEGATMRTALTSALNPIPQSTGM

SEQ ID NO: 124467 - protein, 332 aa, unidentified
MNNFIGIDVSKSTLQVYIPIIDENISIDNSKKSLKSLYSKLKKYYKKEVQKLVFIFEPTGTYSSLLKYFCSEKNINAFIVNPRQSSNFAKALDNRSKSDIIDAKMLHKFNVMAKDGDITIPVINEAQESLGTMLGYYKLLQKQRNAFSNHLEALEAKEGKNSIEKKLKKEIIKLKKQEEDMVKDMKNLIMTDVKLSKSFECIVSFNGVGDISAIVLLHLFISYPEANRQEITALSGLDVVETSSGTSVHRRSRISKRGNSLYRGILFMPILSSVRNNPYMKAFYNRLKENGKHTTAAQIAVMRKIILITHSLYQNQQIFDNSIYEKRIGWNK

SEQ ID NO: 124468 - protein, 327 aa, unidentified
MSQNTIKNMQTNHHTVYAGIDVAKATLELHLQGHRAEFANQPEGLAQLCKKLQSVPHLQVICEATGGYERALVQALHQAQIPVSVANPAQVRAAAQAKGQRAKTDRIDAALLSDYGQRFQPKLTPANSVSQDKLIALTQWLKQLIQGQALAKTQSEHHQDPFVRRQHTKLLTHLQTQIAAVEKQIKALLATDAALQQRVDRLDEIQGVGPRTAWMVLAHMPELGRLNRQEVAALAGLAPWTRESGTMKGMRCIGGGRPEVRLALYMASLSSVRSNPVLRSVYQHLRSKQKPAKVALTAVMRRLLIYMNYQIKNLADNKPTEKIHEPR

SEQ ID NO: 124469 - protein, 322 aa, unidentified
MQSVIGIDVSKEKLDVCALFDGKSRKKIVDNSVSGFKSLRNWISKNNIDDPHFCMESTGCYSEGVAEFFHELGFKVSVVNPLQIKAFRNTKLIRQKTDSVDAQIIAEFCLQNDPAPWKPRSPEKKELHNINVRISALKTEVNRASNALENKNLSKVILKSIHAEIKFLKKQIALLEDEAQKIINSDQNLKEKFDRITEIKGVGEKLALAIISDMPDVSNFQKSGQFSAFAGVSPSHFQSGSSVRGKSHISRLGSKSIRKVLYMSALVVKNHNPHFQKFVQKLQKKGKTPKVIIVAIMRKLMCILFGMLKNSSNFDPKLAFGD

SEQ ID NO: 124470 - protein, 315 aa, unidentified
MSAPCFVGIDVSKDHLDVHLRPQAEAFRLTNDPEGIAALVRRLVPLAPACIVLEATGGLEVPAAAALGTAGLSPSLVNPRQARDFAKATGRLAKTDQIDAAALAHFAEAIRPPARPLPDAAAQAFTALLTRRRQLIEMRVAESNRLPTAVSSTVRRNIEKHLRWLDGQLKSLDADLAAAVQASPLWRAKEDLLCAVPGIGPTVAFTLLADLPELGTLSRRQIAALVGLAPRNQDSGRFRGRRSIGGGRAGVRSVLYMASLSAARYNPLLRVFYQRLRAAGKLAKVALVAVARKLLTILNAMLRDNRPWDPKALPE

SEQ ID NO: 124471 - protein, 412 aa, unidentified
MPDEAYELYVGVDWATETHQVCLLSPEGQRLSEPAVPHTGAGLAALRTELGRRVSAPSRIAVAIEVPHGAVVDALLEHGCHVYAINPKQLDRFRDRHSVAGAKDDRRDAFVAGDALRTDRRAFRRLHGDDPRVVQVRELSRLHGELVEEHGRLTNRLREQLWRFYPQLLALSPAANEPWLWALLAQAPTPAQGRRLTRSTLRALLARHRIRRLTADAVHAVLQEPALPVSAGTLAAASEHVGLLLPRLQLVHEQRRRCDQRLEGLLEQLATPAAGEEPQEHRDVTILRSLPGVGRVVLATMLAEASGPLAARDYQTLRAQAGAAPITRQSGKTRVVLMRRACNRRLRAAVWHWARNSIRFDAHSRAHYQRLRIRHGHARALRGVADRLLDLLITMLKTRTLYDPARRQRMAA

SEQ ID NO: 124472 - protein, 316 aa, unidentified
MDRTQQFVGIDSSKMRLDLAIYPQGAVESVAYDEPGILHVVHRLQALQPTRIVLEATGGFERGLVRALAAAQVPVIVVNPRHVRAFAKATGQLAKTDTLDARLLARVAEAIRPALRPVPNAAMEEARALVARRRQLIDMLTAEKNRFERAASPVRPRIQRHITWLTAALKRVDADLDASIQRSPIWQTQNDLLQSAPGVGPVMSRTLLAELPEWGPLSHKQIAALVGVAPLNHDSGTLRGRRHVWGGRASVRAALSMAALVATKWHPAIRRFYRPLREVGKAPKGALVACMRKLLIMLNAMLTHQTPWRAEPVLAS

SEQ ID NO: 124473 - protein, 387 aa, unidentified
MASNVARRPDVDCMIEMPSVRWGRRRALRNVVGLATVAISDPPASRSDTRTVEGAYRPDAIRRADQAQRMVAQEGILDKPIVGIDVSKEWLDVAIAGTAGVDRIANDAASVAVWLDRIGPGLVAFEPTGGYERVVRQVLRDRGTLFVRVHPNDVIAFRKSRGIRAKTDKIDAGLIAAFAAEELIRRGLRPTILGDDVLRALAARRRQLVDVLHAERCRLDLTSIPAVRQSLTLVIDALAASLEALEQALAAHVEANPPLAELARLLQSVRGIGPVTAITLIADLPELGCLNAKEIAALVGLAPHSRQSGKARYREHTGHGRPAVRRVLFNAARSAIRHASPMKTFYERLVVQNRRPGKVALGAVMRKLLVTANAIARDRQPWKLNHA

SEQ ID NO: 124474 - protein, 423 aa, unidentified
MPRSIGMDVHRDFCEIAVADGGRARSAGRAATTPEDLGLFAASLAPDDRVVLEATGNALAIARIIEPHVAEVVLAHAQQVRAISHARVKTDKIDARVLADLLAADLIPRVWVGDERTRTLRRLVSRRRGLVKRRTQVKNEVSAVLQRNLKGRPPASDPFGRKGRIWLAAQELPADERLTVDAALRQLDFLGEELAAIDHLVAVEAQGDEDVRRLLTIPGVDVTTAVTLVAVIGDISRFPSSRHLVGYLGLHPRVRQSGSGPAHHGRLSKQGSAAARHVLVEAAWMAAASPGPLHAFAARIAARRGRQVAAVAVARKLSVLSWCLLTRGEDYAFARPGVVRRKLRRLELAAGAPRRRSGPQPDPVWNRDNDAAERRLAEQAERAYERLVADRTASPARVGAGATPGRASSWPSKGEAARQATCP

SEQ ID NO: 124475 - protein, 347 aa, unidentified
MGTPSYEGKQVYMGLDVHREFFVASCICDGVVVKRCRMPGTAEAVISLISKVFGGASVLAAYEAGYSGFWLYRKLVAAGIDCIVVHPASIEVSSRDTVKTDKRDSLKIAQQLAAGRLRGVRVPTEEEEQRRLLTRTREQLMSKKRRVMVQIRMRLHYFGLFPESIQRRIKLQDVEDILVGLEGELQRTIGMLRDEWVELAKRIKEIDRLLVEQAKDDPLDAVYRSVPGVGPLISRILSAELGDMSQFRNERALFSFTGLTPSEYSSGGHICRGHISRQGNTRLRHMLVEASWKAVRKDPVIKEYYIKLSERIGKRKAIVAVARKLAGRIRAALRKNEHYTVDYRTAA

SEQ ID NO: 124476 - protein, 272 aa, unidentified
MTNGSVFVGIDVAKAHLDVAVRPDGDTWRVANDASGIAALVARLDQRRPTLVVLEATGGFERAVAAALSAGGLPVAVVNLRHAAQGAPGDFAKATGKLAKIDTLDAQVLAHFAAAVQPPARPLPDADTQALAAILTRRRQLVTMLTAEENRLHTAPTAIRERIAAHLDWLEAELASVDRELAQAIQQDPAWREREALLRSVPGVGPVLAVTLLAELPQLGSLSRHQVAALAGVAPLNRDSGSHRGIRTVWGGRARVRGRCTWRRWWRRATTR

SEQ ID NO: 124477 - protein, 342 aa, unidentified
MVQPVTVGLDIAKNVFHAHGVDAQGQMVLSRKLRRAQVEAFFAKLEPCLVGIEACATAHHWARTIAKLGHQVRLMPPAYVKPYVKTQKNDAADAEAICEAVTRPNMRFAETKTVEQQSVLVLHRTRTMLIRHRTRMGNTIRAHLAEFGITESIGRIGLSRLVAIIASGEDDRIPDVTRRALMCLVDQYCLLQGQILELDRQVIAWHKSNEASRRLATIPGIGPLAASALVASVGNASSFKNGRSFAAFIGLVPKQSSSGGKERLGRISKRGDHYLRWLLVVGGLAVIRYAQRHGTRRPWLLKLLQRRTTKIAAVALANKMARIAWVLMTRGGAYREPVPAAV

SEQ ID NO: 124478 - protein, 343 aa, unidentified
MHTITTIGLDIAKSVFQVHGTDAAGQVVIRRQLKRRAVLAFFQKLPPCLVGIEACASSHHWSRELQALGHAVRLMPPAYVKPYVKRQKNDMADAEAICEAVTRANMRFVPTKTPEQQGCLMLHRTRHLFIRQQTAVINSIRAYLAEFGIVAPVGRKGVMELLQVVADPSDKRVSEVARACLAALGNQLLSLKEQILEFDRMIMAWHRSNEPSKRLRYIPGVGPMLATALVASVADPKTFRSGRNFSAWVGLVPKQHSSGGKDRLGSISKQGDRYLRSLFVAGALSVIRYAKIHGTKHRPWLTALLARKPTKVAAIALANKLARMAWAMMARGERYRNPVALAA

SEQ ID NO: 124479 - protein, 417 aa, unidentified
MYIVGIDIGKRNHEASIMNAAGKQYGKPIRFANSHTGFNKLMDWVKNISGADDVVFGMEATGHYWLALYTHLCHEGYAVHVINAVQSDALRGMYIRQAKNDSRDSFIIAEVIRFGRFCETAVSAPELHALRELCRHRFWIVDSVSDLKRKVIALLDQVFPEYENLFTNTFGKTSLQLLSEYTTPEELLAVDTDKLAETIYTASRGHHGIEKAQEIQNTARNSFGILLASDSIALLIRQYIEQIRFVEKQVDRIDTEIARLLSAFDNQLTTITGIGPTLAATILSEIGDIRKFASPGKLAAFAGIDPTMKQSGNFVGSHVHMSKRGSSLARRVLHMVALNNVKVDKGSGTPVNPVVYDYYTRKCSGKKKTVAMGAVMHKICNIIFAMLRDNKPFEVITPEEHCRRFAAEHPDKIRKAA

SEQ ID NO: 124480 - protein, 341 aa, unidentified
MTNTIIRQNVGIDISKLSISVAIAQKRLDQSVTILSSKTFANHSVGFEKMDRWVEQFADKSIEVHYTMEATGVYYESLAYWLFERQKPVSVILAKQVKTYAQSLNIKSKTDDIDARVLAQMGVERKLSSWSAVSKQMRTLKQLSRERNALIEQQTVIKNQLHALKHSHEPQQRSIDRIEKHLLLIQGQIKEIEEDMKSILVNDPPLQERVKNVCTIKGVGFITAIAIIAETNGFALFNSRSQLVCYAGYNVVQKQSGSSINSPTKISKKGNKHIRKTLYFPALTAVINDQQMSAIYERIHQKTQIKMKGVVAVQRKLLVLIYTLFKNNQPFNENYGKNKAA

SEQ ID NO: 124481 - protein, 422 aa, unidentified
MLTTTQDNEEIIERVAALDIGKAEVMCCVRVPDEDHPGKRLQEVQAYPTMTRSVLGLADHLASLGVTRVVMEATADYWKPVFYLLEAAGFETWLVNAKDVKHLPGRPKTDKLDAVWLCKVAERQMLRPSFVPPPPIRKLRDLTRYRADLVAARTAEKQRAEKLLEDACIKVSAVIADIFGVSGRDMLTALAAGERNPKVLAQLARRSMRAKITVLEEAFTGHFTDHHAFLLRTMLGRVDAISADIAALDDRIAEQAAPFADAAGRLDEIPGISLASAYVILAEIGTDMTRFPTAGHLASWARLAPGIKESAGKKKGKGSTGHGNAYLAAILGNAAAGASKTDTFLGDKYRRIARRRGSKRAIVALGRSILVIAWHLLSDPDAHFYDLGPGYYAARIDPERRKRSHIRQLEALGCTVTLEPAA

SEQ ID NO: 124482 - protein, 339 aa, unidentified
MSLYAGIDLHGRNHVLLIINHLDELIHKSRIANNINLTLDVLNRFKRKLKAIAIESTYNWYWLVDGLRKNGYNVKLAHPAAFERYDGIKYTNDYSDAFYLAQLLRKGDLPEGNIMNIKRRQIRDLLRKRVMLVQERTKHKLSLQSLIARNSGRMIPMKKVEKMTRSDIDDLFKNEFLRMNATTNINMINNINKELGPIEKKLFSTLKITKDFELIQTVNGIGKILAATIILETGDINRFNQVGNYSSYCRLVKSERRSNGRKKGRNNQKNGNKYLCWAYIEAATSMIQFNEKAKKFYHRKESKTNKIVAKKALANKIARACFYILRDKVEFDDKKLFGA

SEQ ID NO: 124483 - protein, 370 aa, unidentified
MKPNFEPSKWFMQCVGIDIAKGTFTACLCMYEFDQGCSTAPVVFNNDKTGFNQFVKWSRKEALKGYPLRYVMEPTGVYYEQLAAHLNKLSLDVCVVLPNKAREFAKYEGILTKTDDMDAYTLGMLGCLDKRLKPWTPPSPIYKELRQMTRFVADINKVKTELRNHLEALAHSEIAEKSIVKHYNKLIDEIDKQLVSNQKAIREKIKQEPGLSERIDRITTINGVGFMTVVTVVAETNGFALITNRKQLTRYAGLDVPAHQSGPVDPKRHISKKGNVHIRTALYFPAIVSTQCNPQMKDFYGRLCARNTQSKMIGVTATMRKLLLLIYSLWKSGEKYDPTRDMPACDRQKKEAETNTGQPHGIDVGTLAEE

SEQ ID NO: 124484 - protein, 340 aa, unidentified
MGNVTTIGLDLAKNVFQVHGVDAAGAAVLRQRLTRSRVLKFFAKLPPCLVGIEACASSHYWARELIALGHDVKLMPAQYVKPYVKRSKNDAADAEAICEAVTRPTMRFVGIKSPEQQSAMMLHRVRLILNRQRTQLSNALRAHLAEFGIVAPIGRNGIEQLLCVIADTNDGRVPADARMCLEMLVAQLRIVKEQILDNDRRILASARATELGRRLMEVPGVGPLLASAIAATVPDPAVFRSGRDLSAWIGLVPRQNSSGGKDRLGSITKAGHGYLRQMLVVGAMAVIRYAERNGTKRAWLVQILARRSAKVAAVALANKTARTIWAMMASGERYREPRIA

SEQ ID NO: 124485 - protein, 344 aa, unidentified
MTIVDLARPVTGGVDTHLEVNVAAAVDNLGGLLGVAQFPTTAVGHEGLLAWLRGFGEVVRVGVEGTSSYGANLARALRAAGIEVLEVDRPNRQSRRRTGKSDPADAVEAARAALSGRAQGAGKSKDGDVEAIRALLVAKRSARSAGIKTMNQIRHLGFTAPEELREQLKGVSRRDLAAVAASMRPRSSTDPVGFATKTALCMLGRRVLALHAEKEDNLLAKYVERAAPELLGLYGVGVDSAASLLVAAGDNPERVRSEAAWAHLCGVAPIPASSGKVSRYRLDRGGDRQANSALWVIVVTRMGADKTTKAYVERRLAEGKPKPDIIRILKRYVAREVYRYLPRP

SEQ ID NO: 124486 - protein, 338 aa, unidentified
MNIIKQNVGIDVSKNELAICFTVLLEDLSIRIKGTRKFKNTLSGFAKLLSWVENRKDSSLPVSFTLEPTGVYHENAAYFLNNKNQRVHIVLTRKAKKYAESLGTNSKTDKLDSKALGRMGVERNLELWQPGAAVYRTLKVLTRERSAIIKVRVMFLNQKEAMTHSAYQNKKSVNRLKHLIKELDNQINKIEKDIERVVDQNVEIKERLFKLITIPGVAFLTAITIIAETDGFALIKSIKQIVAYAGLDVKIRESGKWKGKAKISKAGNVHIRKALYFPAFSTKKYSEKYNKFYERLVQTKGEKMIAAVAVQRKLLGLIYTLWKNNTTYVENYQSVICR

SEQ ID NO: 124487 - protein, 433 aa, unidentified
MKVLYERVAGIDVHKDMIKVAIRSPGEKPWTRKTEILEFRTFYGVLQAMARELRRRGVTHVVMEASGIYTDPVYYALCEQDFTEVAVINPAHAKALRGHKTDAKDCARLAELFECGLLRGSYIPPAELKEVRDLTRYRMKTVQARASEIQRLAKALESAGIKLGSVASDITGVSATAMIESLIDGERRGAVLADLARGRMRTAGKLTDLSMALTGRFTGHHALLCRLHRDRITVLDEAVAGLDGRIAGKVTRWQREAGLLTSVPGFGDVVTQAWLGEIGPAPHRHFATCEKLASWVTLCPGNNISARKRKHGRTGDAGTYIKPMLIQAAWAAIRVRGRLQARYNRLVRRFGGDKNPAAKKKAITAIAHTLLKIAYQVLKSGTPYQELGADYYTRRESPEQKQAWLERQLQKLHPGCTVTITITSPEAALPRSA

SEQ ID NO: 124488 - protein, 480 aa, unidentified
MEATQQQKQKKGVKRPVQRGWHEMNRKQRREMTRRIQAEDLSLEVMHPEAAGIDIGNESHYAAVPSSRDSQPVRCFGCTTGELRKMAAWLKQCGIRTVALQSTGVYWIPVYEVLEEAGLEVFLVNARDTKNLPGRKSDVQESQWLMKLHAYGLLRNSFRPPQEIRTMRTYWRQRNDLVQSAGRHIQRIQKALTQMNIQLANVLSDVSGMTGQAIIKAILAGERDPWKLAGFRAKRVKATEEEIARGLEGNWQDDLLFLLKQEQDSYEFCQKQIAECDARLEQYLQQRPDRSHGANLPEEKRKGRLQKKAKNPQFDLRTHLFRMTGADLTQIDGIDVRTAATVISEVGWDMSKRENEDHFVSWLRLCPDNRTSGDKIIGKGRLPTNNRLTVALRMAASTLRESDTYLGAQFRRLRSRLEGPVAVKAMAAKLARLVYRMLRYGMQFVDRGALFYEARHRQHQINFLRRKAVKLGFQLVACAN

SEQ ID NO: 124489 - protein, 493 aa, unidentified
MGTCELESGDVALAAIPIRKMTIGIAQTLLLIIDWRIAMPKRTTGDRPELKPVNVGAAAIDIGSKMHMAAVNPASTDVPVRSFGTFTQDLHDLADWFKACGVTSVAMESTGVYWIPVYEILEQRGFEVILVNARYAKNVPGRKTDVSDAAWLRQLHSYGLLRGSFRPDAEIATLRAYLRQRERLVEYAAAHIQHMQKALMEMNLQLHHVVSDITGATGMRIIRAIVAGERNPDVLATYRDVRCHSSIETIRAALVGNDRHEHVFALTQSLELYDVYQAKMLDCDRKLEVLIAALNNKGAKPVGKLSKPRIKTKQVNTPTFDVRSALYGLLGVDLTEIHGLGPSLALKLVGECGTDLRAWPSAKHFTSWLCLAPGNKISGGKVLSSRTRRSSSRAAALLRLAATTVGRSDTALGAFYRRLSSRAGKSKAVTATARKIAVLFYNTLRHGMSYRDPGADYYEQQYRNRVLANLQRRAKSLGFVLQAIPGNANPAVS

SEQ ID NO: 124490 - protein, 387 aa, unidentified
MPQSNDLSRSLAALDQDSTLIAVIEMSQSSWLVAGIIPGVNRQPLKKLAVAETALLGLLHRWRDEATKAGRTVSRIVVAFEAGRDGFWLARWLRARGIEAHVIHATSVAVSREHRRAKTDRLDTELLKRAFLGWLRGERGHCSMAAIPTLEEEDAKRPNREREGLVGERTRIVNRIKSTLARLGIRGFKPTLRRAPERLAAVLTPEGTPPPPNTLAELRRDMARLRFVIGQIREIEAARLERLEQHPQQGAHAMVRRLAQVIGVGVETADMLVHEILSRNLRDRRAVARYAGLTGAPDESGARRREKGLARAGNSRVRRGMIQLAWRFLMFQKDSALAQWYRARTADARGATRKTMIVALARKLLVALWQLVTTGEVPQGVVLRAAA

SEQ ID NO: 124491 - protein, 428 aa, unidentified
MSEKNDTRLQEFRQLQKEIRGSEDYLVVGIDVAKDRHSAFFGTATGKALFRRLVFGNDREGFERLILQAEAMRVQHGLRKVVFGLEPTANYHKPLGEYLITGGHRVVLVSAKSVKRNRELLDGRWDKHDTKDSANVADLISQGKCLYYEYPELRLRELRGLLSLKRRLKRQEHGLRVRIRNHLIAQYFPEFDRYFGRSESEGLAIVRWCLGPSVIASLAYDQFARWVAPGNRALRQQERLRAIWQKASASIGCEVGEAVRFEAKLMVEGLRQIREALGETDEKITDLCIQFPEYEYLLTIPGFGPDVSSKVLGAIGNPFRFERGNQVLKMAGLDLVAERSGKRSDGVVPVISKNGKAELRYALYQAAMIASSRDREFIRWFTNRLRGRQREKGIKTRMRVKLSAKLLIIAWTVMKKREPFNPDYLRIE

SEQ ID NO: 124492 - protein, 416 aa, unidentified
MTFKIVRFICGGMDVHKNLIVATIGTTDRQTLITEYIQQSFSTFYSDLIRLKEWFISHDCYDVCMESTGKYWIPIYNVLETELNICLTHPKYVKAIKGKKTDKRDSKWICDLYKCDLVKHSFIPKKEIREMREIARYRCKLVYMRSSERNRYQNCLTVSNIGLASAVSDPFGKTATNIMKELMQSEVIEDDKILKLIHKNCKDKDKILDSLQGYHIESDQRFKMDTVMNHIEYLDKQIQACEAELIKRAYPLRDYFQHITHIKGISALSAILIVSEIGTDMNQFESDKQLINWAGLSPANNESANKKKSVRISKAGLYLKPLLVQCALSSIKDKNSYFGIKYCRIKKRRGHKKAIIAIARMMLVCIYHMILTGEEFNPCDYESLTNPKPKKEPTMTVESALQFLKDSNFDFSSIQL

SEQ ID NO: 124493 - protein, 389 aa, unidentified
MDARTMNNLPLTATHGAVCCLMAIELSKKSWIVAVNTPLSDKISNHTVKGSKELLELIEKIRSRVGRELKRPAEFISCYEAGYDGFWLHRLLEENGVRNYVIDPASLQVDRRARRVKTDNVDVTKLLRSLMAYLRGEPKVWSVVRVPTVAEEDDRRLHRERDRLINERVQHVNRIKGLCAVHGVYHYEPLRLDRMKRLEQLRTSDERELPPRVKAEIRRELQRLELVLQMIKVIEKERNAMALGKATSTYGNANKVQQLVKIGSIGPEIATVLVGEVFYRQFNNRQQVGSYVGLTPSHFQSGASSRDQGISKAGNPKARTIMLELAWFWIRYQPNSPLTIWFRERVGTAKGRIRRIAIVAMARKLLIALWRYVETGVVPTGAKLKTSNR

SEQ ID NO: 124494 - protein, 342 aa, unidentified
MNEVSIIGLDLAKNVFQAHGAGTDGSVVFRRKLSRAQLLKFLGEQPSCVVAMEACASAHHWGRAIGDLGHEIRLIPPAYVKPFVKRQKNDMADAEAIAEAASRPTMRFVAVKSEAQQAAAMAYRTRDLLVRQRTQTINGLRAHLAEQGIVAPVGPAHVGRLAAVVDGDDGTLPAAVRDLARLLLDQIADLSEKIAGLDAELRQRAGTDDTARRLTTIPGIGPITAAAITTFAPPMETFLKGRDFAAWVGLTPRQHSSGGKERLGRTSKMGQKDIRRLLITGAIAVVRWAARKGAPEGSWLARMLARKPKMLVAVALANRMARTAWALMRKGEDYRDPAMATA

SEQ ID NO: 124495 - protein, 412 aa, unidentified
MTCCGWRLIPRQSEDRYRPFLELTMNVGADKSEPLTAIHIDLGAIFVSLELSRSSWLITSLSPGGGEKMSKHSVPGGDFAGLVERFAQLQEKARLRTGQSFRIIVIQEAGLDGFWIHRALQNEGIESHVVDAASIATSRRRRRAKTDKIDGETLVRALLAYKRGEPRVCAMVKAPTPGEEDRRHLCRERKALIAERVRHVNRIKGFLFSQGVSGYQPLRRDRRQRLEELQTGDGRAFPQHLKALINRELDRLELLLKQIKTVEAARDALLAVEQTAMPAPAAMLLDIRGIGPEFAAILWSEGLFRHFENRRQIAAYAGLAPTPWQSGAVDREQGVSKAGNPRLRTTLIQLAWLWLRNQPRSALSVWFHERVSRNGGRLRKTTIVALARKLLVALWKYVTAGVVIEGVTMKVA

SEQ ID NO: 124496 - protein, 388 aa, unidentified
MNKIIYIGMDVHSSNFTLCSFEPGYGFEADKIFGQTQIKEDIFNSTVKYINKLKSMRTDVDVVCGYEAGCLGYNLHRKLKAKEIESVILAPTTMAVSRNCSKKKNDYRDAITIAKCLASSAYKAVYIPDDKDEDVRDFIRMRDDHKTALKQIKQQLNAFCLRHGHHYDKTKWTGLHLNWLRKLELSKLQRETVEEYLVTYETLTSKITALDIRIEDIASEERYAEKVNKLKCIKGIKTHTALSFVCEIGDFNRFKSADKFAGFIGLVPGECSSGNTERMLGITKAGNRHLRRLVVEISNTYRRGTVGRKSAALKERQKDMPKDVVAYADKATNRCQRKYLRMMFKGKNSNQAVAAVARELCCFIFGMMTGHHSRTAQAEASVYRSELD

SEQ ID NO: 124497 - protein, 385 aa, unidentified
MLAHPTQTQAAARCQANTLFVSLELSKVRWLVTVSAPASDKLSRYDVPGGDGQALLKLLARLQAAASERTGAPVAIVVIQEAGLDGFWIHRLLVRNGIDSHVVDPASIAVNRRHRRAKTDRIDGVKLLRTLMAWMRGERQVCSMVQPPSPEDEDRRRLARERARLLKERVQHTNRIKGLLWGQGIPDYDALHRDRRARLAALTTGDGRSLPERLKTEIGRELDRLELVVSQLAAVERERDALMAQTAEADACAAPAALARLRGIGPELAALLSLEALFRRFDNRRQIAAYAGLTPSPWKSGGIDREQGIAKSGNPRLRRAMIELAWFWTRHQPGSALSRWFAERVGAARGRVRRIAIVALARKLLVALWRYVTHGVVPEGAVLKA

SEQ ID NO: 124498 - protein, 376 aa, unidentified
MLSARPAGVPSTTRICRAGGTAIPTIAHTQPERLTIGVDTHKDVHVACAKDQLGRRLATTLVPTTSAGYAELLGWAGTLGQVEAFGIEGTGCYGAELARFLRSRGQRVLEVNRPDRAARRRHGKSDPVDAEAAARAVQAGEATGLPKAGDGVVEMLRVLRVARQTAMRARTQTINALKSLVVTAPDPLRRQLRDLPTRQLVATTAAFQPDTPATPTMATMLALGALARRYQALDGEIRMLGRQLHRLVGQAAPALLEVFGVGPEIASALLVAAGDNPQRLHSDAAFAALCGASPVEVSSGKTVRHRLNRGGDRQANNALWRIVLVRLRAGHPPTVAYLERRTAQGKSKREVIRCLKRYVAREVFAVLQTMAAQAAA

SEQ ID NO: 124499 - protein, 406 aa, unidentified
MLFVGDDWAEDHHDVEVQDETGRRLAKARLPEGISGIARLHGLVGRFLPEDSDPAEVKIGIETDRGPWVAALVASGYQVYAINPLQSARARQGSGVSGAKSDAGDAHVLADLVRTHCHQLRTVAGDSKQAGAVKVLTRMHQSLIWDRTRQVLRLRSSLREFFPAALEAYEDLDSPDVLELLAKAPEPSSAARLTRAQISAALKRARRRDRDTKTTAIMAALRTEHLTQPPVIAAAYGATVRALAALITTCNEQITALEGPVEACFGQHPDAEIYLSQPGLGSVLGARVLAEFGDDPTRYDGARARKNYAGTSPITRASGKKKVVLARYVRNKRLTNALHQQAFSALSGSPGARAYYDALRDRDIGYNAALRQLGNRLVGILHGCLKTHSRYDEVTAWDQHTQRVAA

SEQ ID NO: 124500 - protein, 401 aa, unidentified
MSATHNTNSTASSAPVLYLALDLGASNWKLAFSVGLGQKPRIKTITARSTLGLVFEIRAAKKRFGLPEDAPVVCCYEAGRDGFWLHRFLLAEGIQNQVVDSSSIEVNRRRRRAKSDSLDAVKLVEMLIRWYNGERKVWSTVHVPTVEQEDQRQLHREMLKLKAERTAQGNSIKGLLAGLGLCVIVDETLPTQMQNLRQWDGAKLPPLLHQRLLREFQRWQLIDCQIRELEAERMATIRDDKTPHVEKVRRLLNLKGIGDNGAWLLVYEFFAWRMIKNRRELASLAGLTPTPYASGESQREQGISKSGNRRVRFMITELAWGWLRYQPESELSQWYMRRFGQGNKRLRKVGIIALARKLLIALWKYVEGGEAPAGAEELGWDNKPRFRAVKSRRKQEVLQTG

SEQ ID NO: 124501 - protein, 340 aa, unidentified
MPNPAVIGLDIAKNVFQVHGADAEGRCVLRRRLRRAEVITFFARLPKALVGIEACPSGHHWARELRSLGHDVRLIPPQYVRPFVKTNKNDAADAEGICEAVVRPNMRFVPIKSVAQQAAMMLHRTRALLLRQRTQLINAVRGHLAEFGLVARRGARNIRELAELVRDTGSDKLPDAARAMLVLLLEQIREAQLRVQKTEHALEAWAKQSDACRRLMTIPGVGIMSATAIVLAMDDPKRFRSGRHFAAWLGLVPRQSSSGERQVLGGISKRGDGYVRTLLIHGARSLTRWRRESWRWLAGLLMRRPTNIAAVAIANKTARTAWAILAYGHQFQPTRRAEAA

SEQ ID NO: 124502 - protein, 401 aa, unidentified
MHDGFGVFVGLDVGKEGHHAVALNPEGKRLHDATLPNTEAGLRRLFDKLGRHGLILVVVDQPASIGALPVAVARACGHQVAYLPGLVMRRLADLHPGTAKTDARDAYVIADAARTLPHTLRRVDTGDEALAELEVLVGYDDDLAGEVTRISNRIRGLLTQIHPPLERVLGPKLQHPAVLELLSRCGGPAGIRKAGQAKLLEIVKARAPRMGTHLVEQILTALDAQTVVVPGTAAAETVLPRLADNLRDLLRQRDQLAGQVEGMLEAHPLAGVLTSMPGIGVRTAARILLEVGDGTAFPTSGHLAAYAGLAPVTRRSGSSIRGEHPPKGGNKQLKRAFFLSAFAALADPASRTYYDRKRAEGKKHNAALICLARRRIDVLHAMLRTKAPYQPKPAHESRLAA

SEQ ID NO: 124503 - protein, 377 aa, unidentified
MKKELYLGLDVHKDCIITAVAEEGRKGEVRDTGVISNDLHAVEKWIGRLRKVHGKEVILRACYEAGPCGFGLARRLGQLGVECEVVAPSMTPTRTGDRVKTDKRDGRKLARLLRAGELTPVYIPEARDEAIRDLCRARSDAVDDRRRSRHRLKGFLLRHGYRYQGKSAWSAAHERYLRELVLPHPAMKVILEEYLQGIAAAGDRIARCEAAMRELLEQWRLAPAVRALMAMKGFRTVAAMILVSELGEVHRFTHPRQVMAYLGLVPTENTSSERRRQGHITKCGNAHARWLLVECAQHYATPPKVSKELSRRQEGQPAQVRAISWRAQNRLHRRYRCLLARRLQRNKTIVAIARELCGFIWELLRTQDCYQAQSTPV

SEQ ID NO: 124504 - protein, 342 aa, unidentified
MNITTIGLDLAKNVVQVHGVNEQGKTVLKKQLKRSQVLPFFANLAPCLIGMEACAAAHHWARKLVTLGHDAKLMAPQFVKPYVKSNKNDARDAEAICEAVSRPNMRFVPVKTPAQQAVLSLHRARQGFIKARTAQANQLRGLLGEFGIAIPQGIRQLSTHVPDIVEDADNGLPGLMRGLVQRLWEHFQELDRQVGELDRDIRRLQREDEASRRLAEIPGIGFLSASAVAATVGDAKAFANGRQLAAWLGLVPRQHSSGGKEILMGISKRGDCYVRTLLIHGARAVIQQAERRNEADSWLKRLLARRSKNVATVAVAAKNARIAWAILAHGRDYDREYQPVAP

SEQ ID NO: 124505 - protein, 358 aa, unidentified
MKIVGCDLHARQQTIAMVDSETGEFTEKTLSHEGNAVREFYAALGGPVVVGIEATGAMQWFLELLEELGIECRVGHPAKIRAAETRKQKHDRRDARLILDLLVMEDRFPEIWVPSIEQRDLRTLLRDRHQWVRMRTRLQHTLQAIALNHALRQGHALWSTAGQSALQALALPPYTSQRRNELLSLYRQLQKRIQELDKEVEAQARQRPQARRLLTHPGVGAVTALATEVFLGEPSRFATGNQVASYIGMIPCEHSSGKRQRLGKLTKEGNSLLRYLWTEATMHAVGKDPELKRFYRRKLIQKGMGKARIAAARKLGIRLWIMMRDQIDYEEFCRRGKLRQKGKAHAGMPDFNSGPARQ

SEQ ID NO: 124506 - protein, 402 aa, unidentified
MNCVGIDVSKGKSMIAVMRPFGEVVISPFEVQHTASELSELAKLLKSLDGETRVVMESTGNYHTPVAWLLHDAGLYVSVVNAMLVHDYGNNSLRRAKTDKKDAVKLANYGLDHWLTLPRYVPEEDTRLLLKNCYRQYQQYSKVQTMLKNNLISLLDAIFPEVNRLFNSSPRADGSEKWVDFVSTFWHCQCVSTLSLKSFSARYLKWCRKHGYYFSQEKAFEIHSKAQSCIGVMPRNETTKLLVQQAIAQLKATSAALAALKQEMQSLAASLPEYPVVMEMFGVGSTLGPQLMAEIGDVRRFHSKKALVAFAGIDAPPCQSGKMDIHSRSISKRGSAALRRTLFLVMGVYLQSAPLDEPVYQFMDKKRSEGKPYKVYMMASANKFLRIYYASVTAYLNTLAQI

SEQ ID NO: 124507 - protein, 430 aa, unidentified
MDTVNGSRLQQFSQFKNEVRGSTEYLVVGLDIGKEKHNAFFGTATGTVLYRGMFFDNTLEGFQKLLAQVEALRAENGFSKVVFGLEPTANYHKPLAEHLIKCGHLVTLVSPFSTVRNRELLDGRWDKHDTKDAGNVADLVAQGKCMYYDYPEAAIRDIRGLLSFKKRLKKEEQAIQVRIRNQLLAQYFPEMDRHFRTEVSMAVVRTCIDPSVIAGMEYDEFCRTVAPGRLTLRQQRLLQRIWQLSHHSIGCRMGETVLFEAQAMVMTIHHLREMIKAVNDKIETLCLPFPEYSCLLSIPGFGPEVSSTVLGAIGDPYRFSSGRQVLKMADFDLSADRSGKNTPNAVPVISKRGKVDLRFALYQAAMVASNMNHHFIKYYGKRLLRRQHEQGIGTKLRVKLAAKLLIIAWTLMKKKEMFDPGCINLGDSKV

SEQ ID NO: 124508 - protein, 362 aa, unidentified
MPKSTTIIAFDQHAATTVAAVLLPGQRTPALHSLSSDVPTLLRFVERLRRSGVVQCCYEAGPCGFELQRALTAHDIPCDVIAPALIPRRPGDRIKTDRRDAAQLAILYRANALTAIHIPTEQEEAARDLLRCREDICVDLLRTRHRLSKFLLRHGRRFTLTKKAWTKRHAAWLQAQRWPLPALEQTHRAYVRAVDDAVARLHAVDAELRDLLTIEPLRARVERLRCFRGIDDLTALTIAAELGDARRFPSASRVMAFTGLVPSEHSSGTKHARGAITKTGNAHLRRVLVESAWHYRHHPFLGRSLRLRQRGAPADVIDRAWHAQWRLHRRYRRLAARGKPKQHIVTAIARELSGFLWAALTQ

SEQ ID NO: 124509 - protein, 415 aa, unidentified
MNPLILWILEKQGKCYFEQKISLCPCMLTSVMVNNSLTGYAGVGEASVASRADTSRRREFDRVPAHEAVTEREPRRRRGTSPNSRLNRPLGTSSHLQVREKTMSEPVYVGIDVAKETFHVASSPELFKTCLPNTLDGHRQLRRMLKEHTIALIVLEATGGYEKPLAAELLEAGLPVVVANPRQVRDFANGLGQRAKTDPIDAHVLAKFAQIVQPAPKTHSTPQTAELAELVRRRRQLNDLRCQESNRLLMIHHPKVKKSIKKMIKTLDFQINEIDQLIREHIDTDDNFKNKDRILQSTPGVGPQTSAMLIANLPELGKLNRQEIAALAGLAPYDRSSGKYNGRAHIWGGRKDVRSVLYMAAFTACRFNPVIRRLAERLKQKGKAYKVVITACMRKLLVILNTMVRNQTLWSLEKL

SEQ ID NO: 124510 - protein, 312 aa, unidentified
MNGIGIDVCKAMLDVAVHRGPFERFHNTPAGHRKLLSWLATQQAGQVVLEASGGYEQQILDALFDAGHQVVRADARRCQAFAAATGLPAKTDRLDATNLACMAATLELRAYQPMEPWRRKLREFVRARQQLVELATSAQNQLEQGTDTSLRRLLQANITQMKKHCVRLEKHIAEQVRQQPQLEAMRSFKGVGAILQAAIASYLPELGTLDGKAIAKLVGVAPIAHDSGTTRGIRRIGGGRIEVRNVLYMACLSAIQHEPRIREFYRSLRARGKPGKVAVVAAMRKMLVILNARARDALAGQAQAGEAQAIPT

SEQ ID NO: 124511 - protein, 354 aa, unidentified
MLKYSLGIDISKKDMHVCLSAIDQLQQVKVKASRKFANQQQGFKELLLWVNKNKRESTIPLVVVLEARGVYYESCALFLFKAGLPVSVLLPNKAKKYMQSVGLKTKNDKIDAAGLARMGAEQCLDVWQPMDDFFYNLRALTRHHQSLQEIRTSIGNQLHADEHSIYSNKKVMKQLKKLIATIENEITETEQEISEQLYSKPEVADRIKHVTGVKGIGILTAATVLAETNGFTLFKSIPQLISYAGYDIVESQSGNHTGKTRISKKGNSRIRRILYMPALSVVKYDLEGFKAFFERILAKHHQKMKAYVAVQKKLLVLIYTLWRKNEAFKPGMQIKQNPSGNEETMPSCTFALKG

SEQ ID NO: 124512 - protein, 418 aa, unidentified
MMGERVTVFCGIDWAERHHDIALVDESGELLAKRRISDDAAGYRMLLELLAEHGDSPESPIPVAIETSRGLLVAALRTGSRKVFSINPLAASRYRDRHGVSRKKSDPGDALVLANILRTDMAVHRPLPADSEQAQAIAVLARAQQDAVWNRQQIGNQIRSLLREYYPAALDAFLAKQGGLAREEARVILAKAPTPAEGSRLSLSQLRSALRRAGRVRGVEEEADRLRGVLRAEYARQPAVVENAFGRQLLALLKQFEAACQASDDLAEAVDAHFRAHPDAEILLSFPGLGVQLAARVLAETGDDRNRFADARGLKAYAGSAPITRASGKKHYVGRRMVKNNRLHHAGYLWAFSSLRSSPGAQAHYRHRRDLGDWHAQAQRHLFNRLLGQLFHCLQKRVLFDEERAFAPPSRSSLAAAA

SEQ ID NO: 124513 - protein, 344 aa, unidentified
MTDFYAGLDVSLELTNVCIVDGDGRPVHESRVGSDPELIATELKRIGDGFVRVGFEAGPLSQWIFFGLKQAGLPAVCIEARHAKAAMVAMNRNKNDRNDARSIAHLIRSGWFKAVHVKSVASQELRSLLVAREFFVNKLRDHENEIRGLLRPFGLKVGRVSASGFDARVRDLVNGNAQLEFCIGALLDGRAAMKARLSTLHRELLKVTANDELCRRFMTIPGVGPVTALAFKTSIDDPARFRRSSDVGAHLGLTPRQYQSGETDVRGRISRSGDAFTRSALFTAAHVMLTRSCQWTSIKAWGRADRQAQHAEEGQDRCRSQAGRRHAPDVARRHSLPLGSAGMI

SEQ ID NO: 124514 - protein, 422 aa, unidentified
MLVNRPAIGIDVAKNFCFYAAVSPTCTTFLKPFRALNTKQGLLFALGQIKKVEEAFNSKPVIVLESTGHYSQRIVHFFLKQGFEVYHINPLISHSIKNSVVRKVKTDRVDALELAKLVFVQAFRPTTMPKEQLTNLKVLTRTRGHLVEQRAKSVNQLQCAIEQIAPLFPSVLNPGSLTALTLVSKFPTPCEWIEKANNKVIMNMLETLPRQGKTYGQQKYAALVACAEDAQVTGISLAAYASTIRCFASVVQSLDVQIKVIDDQIKALSEQLPEVALLRSIPGIGDTLAPIILGEIGDIERFIKAKQLVAFSRIDPSVKQSGNFIGTKNKVTKRGSPFLRHALYIAATTSVRKESKGSQVNSVIYEYYQRKIETKTKKQALAAVMNKLLRIIFSVLKNKQAFRLISPNQQVEMYQQHLKKTA

SEQ ID NO: 124515 - protein, 342 aa, unidentified
MLIIGCDYHPGMEQIAWLDEQSEEYGEQPLEHSTGEAERFYRELKRRGVQVRVGIEASGHTRWFERLLAELEMELWIGNPAKIAAQRVRKQKTDRGDAQLLLQLLREGRFPKLWVPSPENRDLRQLLWHRHRLVQMRTRVKNQLHAIALNEGVQRRSRLWSKAGRAQLESFALAPWTARRRRDLLQLLDQLTPQIAELSQAVEQEAERRPEVQRLMTHPGVGPITALAFVLVLGRPDRFRCGKQVGSYLGLIPCEDSSAGKQRMGHLSKQGNTLLRYLLVEAAQAAVRCDPQWRRRFVHLAMRRQRNIAIVAMARRLAVSLYWLWRKAEDPPAAPQSGSHVG

SEQ ID NO: 124516 - protein, 343 aa, unidentified
MQITTYGLDLAKKVMQLHWVDMETGEIHRKQMKRRALLEFFVNRQPGIVAMEACGSAHYWGRELRKLGHEVRLVAAQFVRPFVKTNKNDAADAAAIWETVQRPDMRFVAVKSEEQQSVLSLHRIREQLIKVRTMQVNQIRGLLYEFGADLPQGRQKGLKEVPDALADLEESLSPMFLDTVRQQLKRLEQMDKDIADIEKRLTLWKKDQEAVTRLMAIPGVGLLTATAIIATVGDMKSFRSGREFAAFLGLVPRQSGTGGKVRLLGISKRGDSYLRKLLTHGARAVVNFQINNRNPWMDKLLCRRPHNVVVVAQANKMARTIWALLVKNTEYVASHTMNAASIS

SEQ ID NO: 124517 - protein, 618 aa, unidentified
MIDDEDDAYRPLPVVLRPVDDELLSSWLARHAAYYGVSKPFFAKWLMPGTRNLSLLDYRLGLAQVARLSEKLRCDPIALIEMTFIETPAGSAELICRNRAPQICRPCADRHARDGASGVVPKHWRKAWRITCPACGAPLSDTSERPDTGETLQDTSPFADVWKEAVAGEAIVEFFLRGDNSFDYSPIALMRALLVHTWRPCGANGREPAAGWALGAIFPKFDNLARPIKRRINHAAVAALPISFRPALLAGISRAIANPAILNAVRDETILRGRSTFERLCETARLEAQAAREIRNRISQAKMAPDRGRWGMPAPFPQTMLRTARSRLMLNSTGLQQAYAVEKSSMKYFAGLDVSVKENSICIVDEAGKICSECKAPSYPEDLVGALKNPKWRLERIGLEAGPLSQWLFSGLAGAGLPAICIETRHTKAFLQAQVNKSDRNDARGIAQMMRVNLICHVHVKTLTSQKRRALLTARKLLQENAVAFENEIRGLLRNFGLKVGVVAVGNFDERIRELVADAPELIEIMEPLLTARQKLRESFTTLHRKLLAIVRDDAVCRRLVTIPGVGPVVSLAFSATIDIPARFKNSKAVGPSLGLTPRLHQSGESCRIAAFLYAETQ

SEQ ID NO: 124518 - protein, 461 aa, unidentified
MSPSRPTPKTLQLEGLPTIHPCAAGMDIGAEEIVVAVPPDRDPEPVRVFRTFTPDLQALVAWLVACNIDTVAMESTGVYWIPIYELLEAQQIVPFLVNARHAKIVPGRKSDWNDAQWLQKLHALGLLRASFRPDADICALRTLVRYRAELIQHRSPHALHMQHALKVMNLQLSEVLTDVLGTTGMAILRAIAAGERDPMVLAQHRTVSCRASVEVIAKALTGTWKDEQIFVVQQALTLYDAYTAQIAACDVQIEAMLTAMESRIAPETPLPELPPAKPSSNSKNAPAFNARAHYARLLGVDLVAVTGLSASTVQTIISEIGTDMSRFPTVKQFCSWLGLVPRNDISGGKVLRSRTGKVVSRANQAFRMAAQAVSRTDTQFGAYYRAMRARKGPQQAIVATAHKLARTVYHLLKYGEAFEEERAEVYAQKRREQELRRLTRRAEKLGYILTQRDSPAAVAAD

SEQ ID NO: 124519 - protein, 406 aa, unidentified
MRGPVITVDVSKGSCHYQPFLENGKPMRKAKVLHDTIEGFSDLKETIEKVKEKGAVDNVPVVFEATGVYHRCLQKYLDDINNPYFIISPLLSSAYRKTNLHGNKTDPLDCAHIAKAYYCEDNLQPFYKQEDRYVRLQKLNRYYETELIHLKKRKVSFRSYLDIICPRLDKCFGANGSLYDPIPMEVLKKYPHPALLLKHKESTIVKVIEKKVDHDKKFVEKIVHKMYECAQHCYSGAEVTDLEVMKLPEMIDELQSQMDMCDSILKELVNEARQIPYFECVKSIVGIGDNLAARIIAELGDLSRFPNRRALSAFAGLNPKILQSGDVDGIHLKISKKGNRHLRCLLYLGASCNYRLKKHDPLYEFNQKKRQQAKSPLKPKAANIATAHKLLIVIYALSRSGEMYRF

SEQ ID NO: 124520 - protein, 403 aa, unidentified
MLPRRACIALDVSKGNSHMQAFYSAGYKATDVMIIQHDKNGFNTLNELIKKIETETGDTVAIVFESTGSYSKPLEHFLWSIHKKYYLVPPLLSAKVRKSDIRPTKTDAIDCETIANVYYLKNLKETDRLNKISLRLKNYSSYYLFYINREVETKIKYRQYLDIVYPKIDEYFDVMALSFIEFIKNNPDPNKLIKRSHEDIYKRFLKFSYCGEIKSKARATSMKQYLSEAMITIDSDNPEITILADVAKVLLEDLNHLENMLNEIIVLAMKTEEYKYIVTIPGLSKNTAARISAEIAGIDRFSSASKFVAYIGIDPTVCQSGKLTGEHLNITHKGNQRLRCLLYLVCVGSLKNRSDYNPIRDFIIKKKNDGLSAKAAIIAGCNKLARIIYAVCSKREPFSLQNQ

SEQ ID NO: 124521 - protein, 402 aa, unidentified
MNCVGIDVSKGKSMIAVMRPFGEVVVSPFEVLHTDSELSKLARLLKNLDGETRVVMESTGNYHAPVAWLLHDAGLYVSVVNAMLVHDYGNNSLRRAKTDKKDAVKLANYGLDHWLTLPRYVPDEDTRLMLKTCYRQYQQYSKVQTMLKNNLISLLDTAFPDANRLFTSPPRADGSEKWVDFVATFWHCECVCGLSKKAFTAKYQKWCRKHGYNFSQDKALDIYASACGRFGVMPKTNTAKLLVEQAISQLRATSAALAALKQEMQSLAASLPEYPVVMEMFGVGPTLGPQLMAEIGDVRRFHSKKALVAFAGIDAPPYQSGQMDIRSRSISKRGSSSLRRTLFLVMSVILQRAPMNEPIYQFMNKKRSEGKPYRVYMMASANKFLRIYYASVKAYLDSLGHD

SEQ ID NO: 124522 - protein, 399 aa, unidentified
MLKGYDEVAVFLGLDVGKQGHHAVAQDRSGKKLLDRALPNDEAKLRELYGRMKVHGPVLLVVDQPATIGALPVAVALDEGITVAYLPGLAMRRIADLHPGSAKTDARDAHVIANAARTMPHTLRALKVDDETIAELTVLSGFDDDLAGQITATSNRIRGLLTQIHPALERVLGPRLDHPAVLDLLETWPTPAALTAAGKTRVRTRLLKKAPRLGGRLTEEIFAALAAQTVVVTGTNAAGIVLPRLAAQLAALRQQRAEVAEKVGELVAAHPLSKVLTTMPGVGVRTCARILTEVVGKDFPTAGHLASYAGLAPVTRRSGTSIRGEHAPRGGNKVLKRALFLSAFAALSDPVSRAYYDRKRAQQKKHNAALIALARRRTDVLYAMLRDNKPYAEPPAAAA

SEQ ID NO: 124523 - protein, 346 aa, unidentified
MRFYTKQHQYYCGIDLHTNKMYICILNKNADIVLHKNIKTNPEIFLHTIKPFRNDIVVSAECMFSWYWLADLCTREKIPFILGHALYMRAIHGGKSKNDKIDSHKIAALLRGGLIPMAYVYPQAMRATRDLMRRRNHFMRKRAELLAHIQNTASQYNLEPVGRIAKSSNREHLPEIFADAAVQISINANLEMINTYDKVITGLERDIIKRAKKHDSTSYALLKTIPGVGRIIALNLLYEIEDINRFPKVQNFVSYCRLVKCAKESNGKKYGSAGRKIGNAHLRWAFSEAAQLFLKNNETGKKYLQRMARKHGKGKALSILAHKLGRAVYFMLKNKQGFDMNKFLAT

SEQ ID NO: 124524 - protein, 411 aa, unidentified
MVKENFIYVGIDLHKETHTAVMIDCYNQKLGEITFPNRPAAFPKLVTKVKKCNTDGKEVVYGLENAYGYGRALAVWLIDKGYLVKDVNTAISHRQAKHRGAMYRKSDSDDAKAIALATLNMLDKLPDACPNDAYWSLGQLVHRRDNIMKQRTRLVNQLHEQLCIAYPSYKQFFNDISRPTALYFWEHYPSRKYLKGKSVEDLRAELVPVSHNKCSTKTCEKILDAVASDKVKNNAYQDARDMVTLSIVSDLQHYDSQLAEVDKMLEQMYKMLGYTLTTIPGVNVITAVKILAEIGDIKRFSNANKLAQFAGIAPLHLSSSGKGKDVATKQGNRRLQATIYFLAIQMVQLSSKGTPRNPVVRAYYEKRKAEGKNSQQALICISRRLISIIYGMLKNGTEYRMPVVENAGENR

SEQ ID NO: 124525 - protein, 444 aa, unidentified
MKTSSSAPVGVVPDVAAWIGLDWADQQHVGCLYDVASGQQESFTLESCPEAIPQWLALLRQRYGRRRVAIVLEQRRGALIHALLGCEFVILYPINPQSLARYRQAYFSSGAKSDAKDAPLLMELVRHHPDRFHPWQPDDPETRSLQLLTEARRGWVDQQTALTNQLTQLLKGYYPQALELAGELTSPGACQFLKRWPRLAALQKARPSQIQKHYQRYGRLTAEELDRRLEQIRQAQALTGDPAVLRHGTLMVQALVDQLLPLFDTLRGFEREIAALFAQHPDRPLFDHLPGAGKVLSPRLLAAFGTQRDRWQQAGEVLTYWGIAPVTEQSGRGRWVHWRMACPKFQRQSWHEFAAHSRQHCGWAQAFYQQLRARGKGHHAALRALAYKWIRILFRCWQTRTPYDEQIYLNSLKQKQSPLLAVIEALPPRSAGRKAAAQLAEAAL

SEQ ID NO: 124526 - protein, 341 aa, unidentified
MKQEMSVLGIDIAKRVFHAIGMDNTGKIVFRKRLSRHDLLPFLVKLPPVLIGMEACGGAHDWARRFRAYGHEVKLMAPQFVKPYVKSNKNDSRDAEAIAEAVTRPTMRFVPIKNVDQQDIQALHRVRERLIGARTALVNEVHGLMHEYGIVMPKGVAKFRQAVVSKLEAEKDKLTALSQEMFWKLVEEFAALEKQLAYYQEKLDTLATTHPECQRLMTIPGIGPLTATALVAAVSDASAFKNGRQFAAWLGLVPRQHSTGGKERLLGISKRGDSYLRKLLVHGARTTIRWVGRKTDRRSQWMRQLVERRGTNRTAVAVANKNARIVWALLTSHQDYQLTTG

SEQ ID NO: 124527 - protein, 456 aa, unidentified
MMAKQKTERPPTIETVNIGAAAVDIGSREHMAAVNPDVTDAPVRAFGTFTHDLHDLAYWFKSHGVTSVAMESTGVYWIPAYEILEQHGFEVILVNARYAKNVPGRKTDVSDASWLRQLHSYGLLRGSFRPTAEIATLRAYLRQRERLVEYAAAHIQHMQKALMEMNLQLHHVVSDITGVTGMKIIRAIVAGERDLDMLAAYRDVRCKASTETIKAALNGNDRPEHIFELTQSLELYDFYQAKMLECDRHLEATLAALGAVTEHDPSELPRPRTKTKQVSTPSFDVRAALFGVLGVDLTQIHGMGPSLSLKLVGECGTDLRAWPSAKHFTSWLCLAPGNKISGGKVLSSRTLRSSSRAAALLRLAAVTIGRSDTALGAFYRRLAARAGKAKAVTATARKIAVLFYNTLRHGMTYKDPGAAHYEERYRNRVLGNLKRRAKSFGYDLQELPLEADMAVS

SEQ ID NO: 124528 - protein, 388 aa, unidentified
MSKPFDLSKSLAALDQDSTLIVVIEMSQSSWLVAARAPGLARDPLKKLPPDPEQLFKLIDRWREESRRAGRVVRRVCVAFEAGRDGFWLARLLRQHDIEAYVIHPTSIPVKRDHRRAKTDRLDTELLMRAFLGWLRGEADHCSMAAIPTLAEEDAKRPTRERESRVNARSRLVNRMKGALARLGIRGFNPKLRKAAEKLEELRTGAGEPLPPNTLAELRRDMAQLRFVADQIKQIEKAREARLEKAPREGAHPMVLMLASIKGVGLETAEMLVAEVLSRKLRDRRAVARYGGLTGSPDESGSRSREKGLARSGNARVRRGMIQLAWRFLMFQKESALAKWFEARTANGPRGVRKTMIVALARKLLIDLWRFVEDGTVLVGVELFDSRA

SEQ ID NO: 124529 - protein, 409 aa, unidentified
MDVVNERCAGLDVHKETVVACVRVPGLDIRRRKVTRTFSTTMAGLQALRDWLADHGVTRAAMESTGVYWRPVYAVLEPCFELLLVNARHVKHLPGRKTDVKDSEWLAQLLEHGLLRGSFIPPAPIRDLRDLTRRRKALSRDRGKEITRVAKTLELANVKLGSVVSDIMGVTGRAILQAMIEGEEDPQILARLARGSLCRKRKELAEVVPGLMRDHHRFLLREQLETIDHLSERIGKLDARIEAVTRPFASAIELLESMPGVARLAAEAILAETGDDMSRFPTAGHFASWARVCPGNHESAGKRRSASTGKGNAWLRAALSQAAWAASRTKGSYYRALYHRHKARGGPKKAIVAVQHAMMVAIWHMFSRGTMHEDLGPDHFQGHDKKRRLRYLVGQLRRLGVDVPLEGAA

SEQ ID NO: 124530 - protein, 384 aa, unidentified
MQMILGQSRLASFGLPYLGFWELNEGEQIVTAPYDYHIGVDYHKSYSHLVVQDSSGKTLRSGRVKNDRQSLGSFLERYRDNSHAVVEATRNWMVMYDWLDDICEDVVLAHPLKVKAIADAKIKTDKIDATVLAHLLRADLVPEAWAPGEYARELRVALRERMFYVRLRTMTKNRIVTVFDRYPEQTALLKRQGDLFGKAGRQQLAAVKVSEIDRIQIDRGLEFVGDIDGRIKQSEATIRAMTKANGNVKLLKTIPGIGEFFARLIDAEIDDISRFRNPKKLAAYAGLVPSTYSSGGKTYHGKIIKQGNKWLRWAFVEAVAPAIATDPQLRTQYEHLKFRGTNKARVAIARKLLTIAFQILRDQRPYERRANGEEGALSTISRLS

SEQ ID NO: 124531 - protein, 391 aa, unidentified
MFYIGVDIAKNNHEASIIDSDGKLVSESFSFSNSIRGLEKFQKFISSFSIDSNNCIIGMEATGHYWLSLYSFLIDLGFSCVVINPIQSDAFRKMYIRQTKNDSVDSFVIAQILRFGEFSVSHFSDEDTFALRNLSRFRFALVDEASDWKRKLVAILDQVFPEYSSLFSNIYGVASKELLSKYPLPEDMISIPADELAKLLSKCSKGHFGIDKAKEIQEKASNSFGVKFALKSFSFQIKQIIAQISFLEDQILEIEDEISSMINSLCPVITSITGIGDVLGAAIFSEIGDMSRFERANQLVAYAGLDVAVKQSGNFNATDTKISKRGSPYLRRAIWLAASVAAFKDPALSVYYQKLRQRGKAHGTAIGAVARKLTNIIFAVLRDNKAYIPNI

SEQ ID NO: 124532 - protein, 433 aa, unidentified
MREVTDEPLYRDRVCGIDIGKAGMAATIRVPSEQDPARRAAETREFGTTKREVLALADWLRCWQVPAVVMEATGDYWKPVLYRLEAEGFECVLADPRQVRNLPGRPKRDPSDSRWLAACFERGAVTPCFVATPEFRLIRLHTRYRRDLTGERTREKQRTEKLLESAAVKLSCVLTDLHGVTGRDIMSHLVAGERDPKVLAELARGRARRKISELRAALEGAEFFTPGHAALLAAMLGRTSQLTAEITRLSEVIEQLLAPWEEQLQQAESMPGWERRTAQDALAETGPDMTRFPTGAHLASWAGRTPVDNQSGQRTGRPKSKKGNRYLAAVTGQTAVAAGKTQTREGERYRRLARRRGKLKAQVALGNTQLKVYHALLSSPGTRYTDLGPDYYERRAGTRRQIAYHVSKLGALGLEVTLSRIPEPEPETPSQAA

SEQ ID NO: 124533 - protein, 393 aa, unidentified
MPDIENTVKSHTRKAKTTLEEKIKGIPVEEIIVDISDEDKLCPQCGTGLELIGKETIRHEIEYIQSISDDLTNVKVGLEATGHYGYNLLGFLLDNGLPTFVINPLHTNLYRKSLSLRKTKTDKVDAHTIASMIMSDVNLKSYSDTSYHNEELKSLTRYRFDKVKERAKLKSSVSRLVCILFPELEKLVPTLHMASVYALLSEFPSALAIASAHLTRLTNLLCESSKGRYGKEAAITFRKSARNSIDSNMPAKALELKHTIKLIRELDTEIKEIENEIKSIMDEINSPILTIPGISYRMGAMIIAEIGDFSRFDSPDKILAYAGMSPSTYQSGQLDNCYSHMEKRGSRYLRYALFIMQPNTSVTGMNPLGLILKRNEPKANITMLLYPTPQRNW

SEQ ID NO: 124534 - protein, 439 aa, unidentified
MPRYVGLDVHKQFIEGCFIDEQGKQLHRCRVAVTRESIQTFVAQCLQPSDHVVMETTTNTWEVADLILPQVAKVAIANPLKVKAIAESKIKTDKVDAGVLAQLLRCDFLPEVWIPDKTTRLLRQMCAYRAGLAADQTRIKNRIQSLLAQRLIPVPVPVLFNGCGRNWLSNLELNPQDRVLVDGCLRVLDQLELEKSGLQKALAQLSYDNDQIRLLMTLPGVGAAGAQALYAALGDWKRFKDGAHVASYLGLSPSTRQSANHCYHGSITKAGNSLARWLLTQAARQVAQHPGPLGVFFRRIHKRKNFNIAVVATARKLVTIGFLMLKNAEPYRYSLPGPTQRKLSVFRVEATGSRRSKSKLRLPMQRREPGTRVQSIPSLDEVYFSENLPPVTKADALASGERRMLQQMGIANLPERLQVVQTRTYQFRKQHPEPKKNPS

SEQ ID NO: 124535 - protein, 330 aa, unidentified
MRTYYVGMDVHQASIVIAVLNGAGKVVMESIIHTGAETVRGFLKQLRGKVYLTFEEGTQATWLYDLVRPLVTEVLVCDPRHNKVVGNKSDRVDARQLAEWLRNGSLRAVYHGDKGVRTLKELVRNYDCLVRDTTRVMNRLKAIFRGRAIDCAGHDVYRHERRGHWLTKLSEPGAQQRASFLYQQLAALKPLRHEAKRLMLKEARRHAAYQLLLSMPLLGPISVAQLIAIVGTPFRFRSKRQFWTYVGLAVVTRTSAEYVLVNGVVRRSSRPVATRGLNRNHNHLLKRVFKSAASSACVDGPFKAAYDARVAQGTTCCTVNAFVQTLQVRG

SEQ ID NO: 124536 - protein, 343 aa, unidentified
MQAVTTIGLDIAKSVFQVHGIDAEGNVIVRRQLKRRHILTFFQKLPLCLVGIEACASSHHWSREIKALGHTVRLMPPAYVKPYVKRQKNDATDAEAICEAVRRPTMRFVETKTPEQQSCLTLHRTRHLFIRQQTAVINAIRAHLAEFGIVASVGRQGVDKLLDIVADARDTRLPEVARACLAALGNQLRMLKAQILNFDRMIAAWHRSNETSKRLDALPGVGPALATALVASVADPKAFRSGRDFSAWVGLVPKQNSSGGKQKLGSISKQGDRYLRSLFTAGALAVIRYAKIHGTGHRPWLTALLARRPTKIAAIALANKIARMAWAMMARGERYREPVALAA

SEQ ID NO: 124537 - protein, 353 aa, unidentified
METPIKQTAGIDCGMQELVVSFGLLVSNGNFIYRLTKSFVNNINGFKQLLQWINEISSKETTVLYVMEATGVYHEKLAYYLIANNCQVSIVLPNKVNAFAKTCTSKKQDDQQASKVLAEFGCVKQLDEWQAPHPLFAALKQLTREKHQLQQELTIIKNQLHAEQTKAITASASIKRMKARCRLIERQIAEIEKEIIDTLNQDAVVKEKVDKVCTIPGVGLQTAVTVIAETNGFNLIRNSRQLVSYAGLDVVQKQSGTSVRGKAHISKRGNPHLRQCLYFPSFSAAKYNKPMQNLYNRLVEKQAIKMKGYVAVQRKMLMLIYTLWKKNEVYNPSIKFLEQPVEAALTELDYIRS

SEQ ID NO: 124538 - protein, 400 aa, unidentified
MRVVFGIDVSKVSSEVAILVNGEKVHNYTISNDAIGFARLLGDLKTVHKPEIIFEATGVYSRRLQAFLDEHDYAYTRLNPLEAKKQLDSLRVRKTDKIDAEKLAQSQCVLNRKPPYVQEEVYQNLRDLSRFYQNLTEDIVRAKNRLHKALQVTFPELENILSTPTGEQYWNLIITFPCKDFVLDLSKYELSESIRQSTSKRISDKRVAYLAEKLIALAKQSYCAVKKNSPMLEEVRYYTKELLRLSEQRQAVLDEMVELAQPLPEYDILLSIPGIAETTATSIIGELGDIRRFQSANQINAFIGIDLRHYESGNFLAKEHITKRGNPYARKILFKCIHNIASASHTNPCHIADFYEKRKRQSQTTSTKPHTIASIHRLIRTMYYLIMHNKLYDYASTQNR

SEQ ID NO: 124539 - protein, 331 aa, unidentified
MKKRVWVGVDVGSRELVVAVERNGKRDGTLSFENTAEGHRKLIHSITKRGASARVVLEATGVYGFDLALALERAPRVEVMVANPRAVSHFGRASLQRSKTDVLDAEVILEFAKRMPFEPWIAPARETLDLRAISRRMEALAKTATQEKNRLHASHQSAESSELVRADIASSLEQLATRVARLRDQALQLIASQPHLRDAFGHLISVKGIADVAGIQILAEIAILPKDMNVRQWVAHAGLDPRQFQSGTSVHKPARISKTGNTHLRRALFMPALVAVQHEPHVTAFYEKLLGRGKTKMQANVAVMRKLLHAIYGMLTHDQDFKGEKFYAIGA

SEQ ID NO: 124540 - protein, 412 aa, unidentified
MNRKARRCCGIDVHKASLSACIRLHGKGRKVSEEIRTFGTTGDELLALHDWLKEHAVTEVAMEATGVYWKPVYYILEDGLRVILVNPAEIKRMPGRKTDVSDCAWLAQLLDHGMLRPSFIPPREIRELRDLVRYRVSLKHDHTRIANRLHKVLQDADLKLSSVMSDILGVSGRQILSQLAKGNCDPVALADLARANLRGKLPQLRQALSGRFNAHHAFLLSRLLADLDNTEEAMAQVAERIEAQLVPFAAELERLCTIPGVKQVAAAAILAEIGADMSWFPSTADLDSWAGMAPGNNQSGGKRRRAKARKGNRWLRTMLVESGNAAGRTRNTALSALYRRMIVRGGRKHAAFVVGRHILNIAYHLLRERTTYRELGPTYFEQRRVEQLKRRCLDQLRNLGFEANLVPLPKAA

SEQ ID NO: 124541 - protein, 352 aa, unidentified
MAIKTLGIDIRKSTFHLIGLDERERPTLKQKLTRAKLMEFAAKLPPCLIGMEACPGSQYLARRFAEYGHTVRLMAAQFVKPYVKSNKSDFLDAEAIAEAVTRPTMRFVPVKNPEQQDLQALHRVRSALVAERTATINQARAFLLEYGLPITRGTRALRHTLPGIIADETNAVSFRVRSILQRLWGQILDLDQRIEDFSGEIEALGREQPACQRLMTIPGIGILTATAFIAAVGDGRVFRSGRELAAWLGLVPAQYSTGGKPKLLGISKRGNVYVRTLLVHGARAVLARGARRDARLSAWLAGLSRRAHPNVAAVALANKLARIAWAVLTRGDTYQGTTARGNAALEGTGMAA

SEQ ID NO: 124542 - protein, 411 aa, unidentified
MDTEPLVFAGIDWASTEHQVCLTSTGNPQQRTFPHDANGIGAMVDWLCMQAEHPERVAVAIETPHGPVVEALMDRGIAVFAINPKQLDRFRDRFSPAGAKDDRRDALVLASSLRTDRHCFRRVEALDPVVVELREWSRMAEELKQERNRLTNRVRQQFWRYYPQFLALADDPGADWVLALWAKAPTPAQAARLSEKKLASVLAAHRIRRITAAGALAILKQPALIVAPGTAEAAQAHIATVAERLRLVNRQIKQVTHRIDALVGQLAGPESKPGQEAEQHDVTILRSLPGVGLIVVATLLAEATQAIRERDYHALRILTGAAPVTKRSGKSCHVEMRQACSHRLRTAVYHWARVAVQHDQASRDRYAALRARGHSHGRALRTVADRLLGVACAMLETRTLFDASKALAKVA

SEQ ID NO: 124543 - protein, 412 aa, unidentified
MLKIVYPVCCGMDVHKSFVFACIASTNDHGVTTYRSGRFSTFTGDLRRLAAWLHAHSCTDVCMESTGKYWIPVYNILESSCRITLAHPKYVKAIRGKKTDKKDATWIADIFKHGLVCGSFIPPADIRQLRDLMRYRSKLTGFSTGEKNRAQNCLTVSNIKLDDVFSDVFGKTASAITQRLLENDTRFDVTPFLNKKLKASADRIQAAVDGHICTHQAGKLRVIRSHMENLTVCKKSLETLILGLAENYLPTLDLILTVPGIQVFAAVGILSEIGADMSVFPTSKHLCSWAGLTPQNNESAGKKKTTRISRAGAYIKPLLVQCALCAIRKKSNPEIRSRYLNLKKRRGHKKAIIAIARMLLTAIYNMIKKNEKYNAALYRKADTPPKNREVSINEAIYILQRQGYLVTAPRSA

SEQ ID NO: 124544 - protein, 339 aa, unidentified
MNEVTLIGIDLGKHSFHLHAQDAAGRMVFRKKLSRQQLLRTLANVPSCRVVMEACAGSHWLARQLAGMGHEPRLISPQLVRPFVAGNKNDFGDAQAICEAACRPSMRFVSPRNEAQQTVSAMHRLRERLVRERTATVNQIHGFLLEFGISLPRGAALMSRLPTVLDHETLPPRLVGLVVRLRAQVHYLEEQLRQVEQDLKASLREDDKSRRLLEIPGIGPITASALAVELGDARQFANARQFAASIGLVPRQYSTGGKPTLLGISKRGDRNLRRLLVQCARAVMQHTASRTDALSLWVKTLSTRRHSNVVACALANKLARIAWAVLARGTHYQARALTT

SEQ ID NO: 124545 - protein, 291 aa, unidentified
MLYENYVGIDVSKLSIDAFIRESRIHRQFRNEESGFKQLIQWIKEHIGETWESLLVCFEHTGLYSLSLALFLEREHITYAMVPALDIKRSLGITREKNDQIDAKRIAEFAYRFNDRVMPTSLPAEDIRKLHSLLAMRDKMMRNMGGYITSRNELFRVIPDRELPVLTSVYENIISTLKNEVHELEREIRSIIMANKELKTTFELITTVKGIGFIVASFLIVYTCNFTRFENWRKFACYSGIAPFEYQSGTSVHARTQVSSIANQQMKRLLHLAAMTAIHFDSELHNYYVRR

SEQ ID NO: 124546 - protein, 357 aa, unidentified
METKVKALVDGVDQFIGIDHHKKTSYITIKDRQGEVIKRGNIDTRPDALSAFLKDGTQEEGAVRMAVLESGRTYRPMWRWLSEEVDEVVLAHPGGLKIISDTVYKDDKLDSGKLADLLMLGMIPRAHAASEEAWERRLTLRHRMMLVRMQVKVKNIMHMIVDLYPDVFPGKPEMTDMFGKQGISWLMRLQIPRDDRRRLDELLEFWEFLEIKIRKSDSLVRKIVKEDERCQWLMTIPGIGYFFAALIVAEVDDINRFPSPKHFVSYIGLVPRRDKSGEVDRGGKMHKRGNRFLRWALVEAAIPATRSNLALKNKYDRISARKGRKKGRNIAKVAIANKLAWIVYAILKEERPYEIRY

SEQ ID NO: 124547 - protein, 310 aa, unidentified
MDATVVGIDVSKDRLDVHVLPSDEAFFEANDAAGLEKLAGRLAALSPRLVVLEATGGFERLAVATLGAAGLPVAVVNPAQVRSFADALGKRAKTDPIDAEVIARFGVASGVKPRPLPDEQSRLLADLVARRRQIMGMIVAEEARLKRADNRQLKQSIRRLLTALRRELKSVDADLDGQVHASPAWRTNEDLMSSVPGVAKTISRTLLAGLPELGTLDRRRIASLAGLAPFTRQSGKWRGKSFVSGGRTSVRAALFMGALVASRHNPVLKAFRDKLIAQGKPRMVALIAIARKLLTILNAIIRDQKPWQTA

SEQ ID NO: 124548 - protein, 384 aa, unidentified
MGSPTFPNTLPGAKALESHLLQLLKDKGFSTLKIATEATSFLDLHLVDFLASSQVLAPFNPSIYQFNPKLVRNFKKAYSDMDKTDPIDAFVIADRLRFGRLPEPYESHRPYLPLRRLTRYRFHLVKAINREKAYFITHLYLKFSAFSLEKPFASLFGATSLALITEFSPDELVHLPLEDLTQFIIKNGKNRFKDPEKIVQTLQRAARESYRLRPALSSTINLILATILQTLRALGEALKEVDQAIEKEFQAFPNTLQSIRGIGPVYSAGIFSEIGDIARFPAEDALAKMAGLTWKHYQSGNFEAEETHLSKMGNEYLRYYLIEAANALRVHNAEYKAYYENKFKEVTKHQHKRALALTARKLVRLVYALLKKGQLYRANYQQEA

SEQ ID NO: 124549 - protein, 403 aa, unidentified
MNKLKRVCGLDVHKDIIFACVKKGKYQSEVKQFSTTTQGLAELSHWIQGEQVERVAMESTGIYWMPVWRALESDFKLLLVNPYFIKQMPGRKSDVQDAQWIATLLDKELLKGSVVPDKTIRVLRDYMRRYAQLQGQMTRCLQQIEKQLSRCNIKIASLSSTIGSKTVIDIVASICKGEYQPEQLLKLVHGRIRNKHGEKVKQALEGIIDEHDIFLLRQIYADYIHIYDQCEALVDQAQKVADEYYQQEIALLQTIPGIKKLSAIIIFAEIGGCINLFATAQNLTGWCGLRPKNDESAGKIKSRSITKGNKYLRRILVQTGWAASRTRNCYLKTKFEQLSIRKSSKKALIAIARKQLVIIWNVLSKKEPYAEPQIVLSPEQIERKQKYYQGKLEKLLKTLEKAG

SEQ ID NO: 124550 - protein, 405 aa, unidentified
MGEGSFAGVDWASQEHAVCVMDADGRIAEGGRYRHDERGLRALCNRLVELGVLLVAVERPDGLLIERLLDAGLPVIAVHPNQLAASRPRFSAAGHKSDSFDAFVLGELARTDSHRFRVLVPDSDATKALRALTRAREDLVETRVALANALRAQLECFWPGAVAIFADIDSPIALAFLKRYPSPADARGLGEQRLERFLARNHYCGRRPARELLRRLRNAADGRAGQLETEARRQLVLGLVAVLEPIVVQIAQLTSEIRGALHDHLDGEIFSSLFRDPKTAICPATFIAEMGDCRPRYPTKAALASDGGQAPVAKESGKSKRAHFRWACDHRLRDAFSTLADSSRHHNPWAADIYDRARARGASHPHAIRILGRAWAGVIWRMWHDHTTYDPALHGNYQQLVTARG

SEQ ID NO: 124551 - protein, 351 aa, unidentified
MMIIGVDYHPSFQQIAFLMEETGEYGEQELDHSKGEAERFYRDLHQRGIRVRVGIEATGFSRWFERLLAELDFELWIGDPAEIKAKRVRKPKTDKEDARLLLKLMLEDRFPKIWVPSPENRDLRQLLWHRHRLVQMRTRIMNQLQALAMNEGRRWKKKLWSEQGRAELEKLGLAPWASRRRKELLELLDRLNPSIEELTAAAEREARKRPDVLRLMTHPGVGPLTALAYVLIIGTPERFHCGKQIGTYVGRIPTEDSSAGKQRLGHISKQGNSLLRFLLVEAAQAAARVNPHWRRRYMHLAMRRHKSIAKVAMGRRLGVRLYWMWRNGCEYSSSLEFGSYAGQLGIVHGVQ

SEQ ID NO: 124552 - protein, 360 aa, unidentified
MAKAKTLVGLDVHATKIVAAVLDAETGQLQTFGMSGDTDGAAGFCAGLPRPVRVAYEAGPTGYGLARELAKRGVECVVAAPSKIPRASGDRVKTDRRDAEHLVRLLLAGKLHAVRVPGDEEEALRDLVRARDAVRMDLMRARHRLSKLLLRHGIRFDDGQAWTERHRQWLATITLDWPAAHTTMLDARGAIDALCHRRDGLEREIVALLPACPWAVQVGRLRCLRGVDTLTAVGLCSEIGDFERFARAGQLSSYVGLVPSESTTGQQRRLGSITKTGSGHARRLLVEASWHYRPRPSIGKALSDRQADQPPEAIAIAWSAQRRLHRTWTRLEARAKRRTIIAVAAARELAGFCWAITQIE

SEQ ID NO: 124553 - protein, 409 aa, unidentified
MFHIGIDWADDHHDIFAVNDIGRHVADFRVKADREGLAHLRDRLGQLSAEAGGKDQVAIGIETSRLLLVDLLLNDGYTVYPINPKAIDRYRDRYTASQAKSDRFDAEVIANALRTDRERFRPIQPDSPLVRELRILVRDQRRLIRTKTMFLNQLQAALKDYYPVVLEFFDDFDGPSALAFLAKYTLPARLGAKPIERLLRSQHHPHPEQKAQQIAAKLSEPFIPVDEFTVRAKSRLVRTLVEQLQALRAQIQGYQKEIENLFEKHPDSNWIQSLPGAGPGNGPRLLTELGDNRARYESPDRLQCEAGTCPVTASSGKSNFVFFRRACRKSFRDTMHQFSFCSMNQSTWARALYDQSRAKGKTNASALRVVGDKWLKIIYHLWKERKPYDENVFLASRMRYQLQQSGAPA

SEQ ID NO: 124554 - protein, 392 aa, unidentified
MIYVGIDVAKDKHDCFAMNSDGEILIENFSFQNNSDGFNLFFNSISQFNESFENIKVGLEATGHYSNNILNFLTSKGFNVFVINPLQTNLFRKGQSLRKTKTDKLDARFIATMLISNNLKPYSNLSYHISELKSLVRHRFRLIEERSKFKVSLSRLVTIIFPELEKIVWSISQNSVLYLLNELPSAKNISECNLKHLTNLLQKHSCGKYSRDKAIEIRDLAKISIGTHSPSISFELRQVIQTILFLQSQIDDIDKELKRLVVELDSPILSIPGISYVTAAFILAEIGDINNFDSPSKLQAFAGLDPSTYQSGKFNATHSVMVKRGSKYLRWALLTATRLVCMRDKNFNDYKKQKLAEGKHYFVALSHTAKKLIRVIYHLLKTNTTYQFQKVA

SEQ ID NO: 124555 - protein, 341 aa, unidentified
MEEYIGLDVSMKETAVAIRRDGVRVWRGKCISDPHIIADLIRKRAPMVKRVVFETGPLSVWFYHALRAEGLPVICIDARHAKAALDMATNKTDANDADGLAHLAEVGFFREVRVKGFDSMLARTLVAARTRLVHMTTELSNQIRGIMKTFGLVVPAGKGSVFEKNVRNLLSSHDDLAHIVLPLLDAWKSLRARAADLGRQLVADAHQSQACRILMSIPGVGAITATSFATAIEEPENFRKSRSVGAWIGLTTRRYQSGEVDYDGHISRRGDRHLRGLLYEAASVILTRSSKQSSLRTWGLQLRERIGFKRAAVAVARKLAVIMHTMLKTGEFFNPTAGVTE

SEQ ID NO: 124556 - protein, 419 aa, unidentified
MSFKILKFNCCGLDVHKTWIYACIGITDSNNRTEYKQSRFSSFSKGLHELCNWLAKYNCKDVCMESTGKYWIPVFNILEQHDIWVTLSHPKYTKPMKGNKTDRKDAKWICDLYMCGMVKPSFIPPADIRDLRDLVRYRFKLTCMITGEKNRAQKCLTVSNLKLDDVFSDVFGKSSRSITEQILQHPGEKFDVSPYVDSRCKTPIAEIQAAVDGAISKEQAVKLRQCLDHIDELQKHISEVEQEILRLSDKYEAALNLIRTVPGFDKNPMTSIQVLSEIGGDMSVFPTAKHLVSWAGCCPRNDKSDRKIKSTRISRAGSYFKPVLVQVANALIKSKKHLEFTTRYKRIKARRGHKKAIIAICRMILTAIWHILTDLKPYTPDGFLESHPVVKEKVLTTSQALNLLKQRGYVIHDEPSPAC

SEQ ID NO: 124557 - protein, 451 aa, unidentified
MPKKRNKVGILPVIEPNAAGIDIGATEIFVAVPGDRDAEPVRSFPTFTVDLERLADWLQQCQIRTVAMESTGVYWIPLFQILEKRKIDVRLVNAHHVKNVPGRKTDVQDCQWIQHLHSVGLLRGSFRPDDEICAIRSLWRHRDNLIQLATLHLQHMQKALDQMNLQIHHVISDLDGTTGLAIMDAILAGERDPHKLAQLRHPRVRASEETIMKSLVGDYREEHLFTLRQSLKAYRYYQQLIQEVDLQVKQMMQRLPSKVADGEKPPKGDKPRPRKIPWRNEPPQLRDDLYRAFGVDLTEVPGINTLTAQMLLTEIGPNLARFPTAAAFCSWLRLCPDPKISGGQVLSSRTRPTKNRAALALRMATQGLHRSDTFLGDYFRRMKARMGVPKAMTATAHKLARIVYHMITTRQEYDATIFQQQEQRRSQQRTARLHAQARMLGFHLVPVDFVP

SEQ ID NO: 124558 - protein, 416 aa, unidentified
MKNSNSKTKKSDRASKPGKARGPIQRDAKEVMAELVAKLSETLAARPTRGSAGGKREAGVAGPNRDRLTAGVDLGEQWSNYCILGLEGETLAEGQLRTTQQDFGEFFQAMAAARVVMEVGTHSAWVREVVAGCGHEVLVANPRQMDGPKRRRRKNDRIDAHKLARLGRVDPQSLFAIEHRSPEVRQDLVALRARDALVAVRTELINATRGLVKTMGGRLPKCSSDSFPHKVEEALPAEVREVLLPLVRLVETLSGCIAGYDQKIEKLASEKYADTELLRQVKGVGPLTSLAYVLTLEDPQRFPKSRDVGPYLGLVPRQEDSGECQPQLRITKAGDVMLRRLLVGSAHYILGPFGPDTDLRRYGLRLCERGGKNAKKRAAVAVARKLAVLLHRLWVSGEVYEPLRHSLPARTEQEAA

SEQ ID NO: 124559 - protein, 340 aa, unidentified
MQITTLGIDLAKSVFQLHGVDADGAVVLQKKLRRGAVLDFLGKLEPCLIGMEACATSHSWARETAALGHEVRLIPPAYVKPYVKRQKNDAADAEAICEAVTRPNMRFVPVKSKEQQSVLVLHRSRDLLMRQRTMILNAIRAHLAEFGIITAQGPCKVVELVTRLRDGDDLDVPDLARSALMALAAQLDSIANQVRSIERHLKAWHRESATSQRLETIPGVGLITATALAASVPDPSVFKSGRQFAAWLGLVPRQNSSGGKERLGRISKMGNGYLRRLLVIGATSVSRRAGTNDSRTGLWVRSLLERKPARLVTVAIANKTARTAWAMLIRGESYSAAARA

SEQ ID NO: 124560 - protein, 410 aa, unidentified
MEVMFDRVAGLDVGKESVTVCVRTPGSRRGRHSETRTFKTMTGSLRVMRDWLVESGVTIAAMESTSAYWKPPFYCLEEVMEVWLLNAAHMKAVPGRKSDVRDAEWIAQLLEHGLLAPSFVPPPEIRRLRMLTRYRVQLMGDRAREIVRLELMLEDASIKLSSVASSLKTVSARVMLTAMINGESDPLRLADMAKGRMRHKIPDLAQALTGHFDANHARLARSMLRRLDLVEQALVELDAVIVDACRPWQHQIELLQTIPGVGPKVAETIVAETGADMSRFPTAAHLAAWAGVAPAMSQSAGRQTPAGKRHGNKWLTAMLVEAAGSVGRMHGKNYLAVQHARLTKRRGMGRAQVAVAHSILVAAYWMLKRDEPYHDLGADWHSRRNDEAHTRRLIAQLEHLGHTVIIDPAA

SEQ ID NO: 124561 - protein, 327 aa, unidentified
MTALSASDNNTFIGIDVGGASFEVAWHRGGCTQYANRPDAIAGFVERLQAGPPIVRIVLEPTGGYENPLLRALRRVGFVVEKIHTSRFKAYRELVGAKAKSDTSDARLLAAYAAAPDEVRGRKAHHVVLPEDAGREELAELAARRDQLKQMIHAESCRLTTVQNEAIRREITLHVDALRASARNIHAAMASLVRQRDDLNRDKQLLRTIKAIGDTSALTMLALLPELGQIDNKAAAALVGVAPFVRKSGTMNAPARICGGRAAVRNAIYMAAVTASRHNPVLRPFYERLIAAGKPVKVALVAVMRRLVVFANAVLKSGQPWRGAIAA

SEQ ID NO: 124562 - protein, 418 aa, unidentified
MTATHSTAPTLLVAIDISKHRHEVLIGIPGKKRRRRITITNTLDDFQRLSAVLTSYDLPVRIGFEATGNYHRTLAHHLGRAGFELKLVSSVGLARTREALHNSWDKNDPKDAQVIMHMLDIGAVQCFHDPLVVGTADIQELSKTHEIVSRAKTELWHRILTHYLPLYFPEAERFHRSSRTDWFLAFLEKYPSPHMISAMSRDAFIADAWDVVGRKVSKELLLSDIYATAVGSVGLPVHPDSDAVRMFRLVLAEGRSLIRQRDEIEARAVELLSDLSDYRLLTTIPGIGPINAMTILAEAGNLRRFRHHRQFLKFCGMDLATVQSGMFRGQSRISKYGNARLRRTLWMAGQTAVLKRTNSFRDKFERYISKDRHNAHLRRKAYTAIAAKMARTVHAVVNHGEPYRPFVEGVSPGGRTTL

SEQ ID NO: 124563 - protein, 351 aa, unidentified
MMIIGCDYHPSDQQIAFVDQETGECSERRLNHSEGEAEKFYRDLQQRGVSVRVGMEATGHARWFERLMAELGFELWIGDPAEIKTRRVRKQKTDRQDAQLLLKLLLEDRFPRVWVPSPENRDLRQLLWHRHRLVQMRTRIMNQLQAVAMNEGIRRKKALWSKSGRVQLESFSLAPWSGRRRQDLLELLDRLNPTIDQLSAAIAQQAEKRPEVRRLMTHPGVGPLTALAFVLIIGSPERFRCGKQIGSYVGLIPCEDSSAGHQRLGHISKQGNSLLRFLLVEAAQIAVRHDPDWRRRFLHLAVRRERRIAKVGMARKLAVRLYWMWRKGWDYQQVLQFGSHAGQPVKAHGVQ

SEQ ID NO: 124564 - protein, 325 aa, unidentified
MKSKQLIAGIDVSKDTLDIYFNDANGAEHYLKVNNDAIGHHFIIEKLSLDRTYVMESSGPYYLKLAFIIKSSGGDIRVENPVVIKRFIQMNLERNKSDKKDAKWLYRYACQHQTMEWKLPEKEQFYCTQIIGSIDLYKRQLVMVENQLHSLDQLPLKSKEVAKSLKQLQVKLKVELIKLERELEQQLETWQATQLNNLKTIPGLGKRAVALLIVYTNGFKKISNYRQLIALTGLAPTEHTSGTSVRGKKGICKMGNGHLRSVLYMCSLSAIKHNKACKDLYARLKAKGKNGKVALIAVCNKLLKQAFAIATKGTTYQPNYKSSLN

SEQ ID NO: 124565 - protein, 320 aa, unidentified
MNETSTKTAGIDTSKKSLDVATFPTSERLRVANAREGHQELVAWLSARKIKRVGIEASGGYERAVVEYLREHGFEVALLQPRQVHAFAIYKLRRAKNDRIDAALIAECAANLGDLHEPPDTRLAAFAEHLLFIEQLEYDIAHLKTRREHFTTKRILKQLERDVQRLQRRREAELLLLQVVVCKHDDLARRLELIVSVDGIGIRTALTLVILLPELGKVSREQISALVGVAPYDDDSGERTGERHIAGGRSRVRRALFNAALPASQRWNTALVALYGRLTNNGKAHRKAIIACVRKLLIFANAVVERGTPWSKSPPANHTA

SEQ ID NO: 124566 - protein, 341 aa, unidentified
MSLIKAIGIDLAKSVFSIHGVDSHDKCQLRKTVKRNKLLAEIAKLPACIIGMEACSGAHYWAREFTKLGHEVRIMASKFVIPYRQNEKNDANDAEAICEAVTRPKTRFVTIKSEEQQAVLCLHRIRQGAIKDRTALINRLRGLLAEFGIVMPKGRYPAQHAISGILEDGENNLPLLARELLDELWAEIKGLNQQILKHDRRLYQLANQMNAAKRLMSIPGVGEITATAVVATVSDAKDFDTSRAFSAWIGLVPRQYTTGGQVKLGRISKRGEKHIRTSLIHGARAVIANCKHKTDRTSLWVQDLIERRGFKRATVALAAKNARLIWALLRSKNEYQIDYVK

SEQ ID NO: 124567 - protein, 361 aa, unidentified
MFSERTTVGLDVHARSVAAEAVDWETGQVFSAQLVPANEVVLGWVATLPGPVAVTYEAGPTGFGLARAFAQAGIRCVVVAPSKLERPPGDRVKTDRRDARRLGRLLHIGEIEGIRIPALEQEDARDLVRAREATRADLMRARHRLSKLLLRQGIVYYGGTAWTDQHDAWLRKQRPLGPGARAAFDEYFDTVLNTTARRARLDTAIAVTALTPRWAPIVNRLCAVRGIATLTGLGLAVEIGDFERFDGSSIGTYLGLVPTEYSSGASRSQGSITKTGNTHARRLLVEAAWQHNKRLGPPGKPLRARRDLVSPAVRARAQAADRRLHQRWQAMQARKKQPNVIAVAVARELAGWCWSLAVMPD

SEQ ID NO: 124568 - protein, 431 aa, unidentified
MTNRLQVGIDFSQKGADFCLMFPNGQPLELHRAFDNSQTGYSLAKQLMLNALDSYQFDGLDISGEATAFYWLPFFLQLATDPDLSPHQMQLFLLNPRWVHWFKKCFAQDDKCDQRDPYYIAERTRTHRPQVGWSPQMDTLPLRFYTRLRFHLVQNLAREKCYFSTFLFLKASAYRRYKPFSDIFGRTSQLVLTHSPSLDDLAALPVHDLAHHLDALSGHHLPDSLDNARKLQRAVTESFALNTSLTEPVQYILDLSLDLIRFLEHQVRQVEDRIATELSSQPAIRQLTTIPGIGPVFSSGIGAEIGDIQRFLQPAKWDKQRQKYRSRNLRDAEDAVAKIAGLWWPRTNSGDFEAEDRRLAKTGNHYLRYYLIQAADKMRQHIPTYAAFYAAKYRQTTKHKHKRALVLTARKSVGLVVGLLHRNEAYRSGEG

SEQ ID NO: 124569 - protein, 338 aa, unidentified
MKLYAGIDLHSNNSVIAVIDEQDRVVFQKRLPNELERILVALASFKQWLIGVVVESTYNWYWLVDGLMQAGYVVHLANPAAIVQYQGLKYSGDEHDARWLAHLLRLKILREGYIYPREARAVRDLMRRRMQLVQTRSAQLACMHTQFTRSTASSPSSDALKRMLPEELETLLEEPNVASGVRANLEVVGTLNREIARLEREVIEQVRLAAQFAPLLSIPGIGRILALAIMLETGAIERFVKVSNFSSYARCVQSKRVSNDKKKGEGNSKCGNKYLAWAFVEAAHFAVRYNPRIKRFYERKAAKTNKIVATKAVAHKLARAAYHVMRERVPFDDTRAFA

SEQ ID NO: 124570 - protein, 416 aa, unidentified
MNAVGIDVSSRKSTVAVLRPLGEVVCLPFDVTHDIAVLASLAEKLKAIDGETRVVMEHTGRYYEAVAKALHEAGFFVCAVNPLLIKEYGANSLRRVKTDKADAIKIARYALDNWADLRDFTPMDAIRYDLKTLNRQFQLASKQRTASANNLIALLEQSFPGIRKCFDSPVRSDGTQKWVDFAHSFWHVDCVRKQPFPAFCERYRKWCKRHAYLFKLSNAEEVYALAKRAVVLTPKSKVVKVLVQEAANQLSSISRSVEVYRAEMDRLAAMLPEYPVVMAMYGVGKSYGPQLMAEIGDVRRFERKQALVTFAGIDPMPNQSGDKNVRSNKSSKRGSPYLRKTLFNVIRPYLQCAPQDEPVFQFLNRKRAEGKPFYVYMLAAANKFLRRYYAKLRDYFASLDTLQPVDPIPTILKATL

SEQ ID NO: 124571 - protein, 346 aa, unidentified
MSIADDVDLVAGVDTPRDTHTAAICDARGRVLSQLQVPATPAGYASLLAWADAAAAGKQLAWAIEGTRHYGLGLARHLAGHGQQVSEIDSTRHVGKRRAGKSDPIDAVRAARELLARPLPGQMRADGDREALRLLMTDRDNAVQAGKTARTVLTSVIVTAPAELREQVRHLPSARRAQACAALACPQDADRLTGVQYQTLIRLGQRIAALAEVAAEIEIQIAGIVEDMAPGLVAAEPGLGALSAAQILLSWSHAGRIRSEQAFAMLSGTAPVPVSSGRTDRHRLNRLGDRQLNRALHVIAVNRMRHHPPTLAYIQRRRAEGKTDKEIRRCIKRYLARHLYRTLSRA

SEQ ID NO: 124572 - protein, 319 aa, unidentified
MAQNDLIVAGIDVAKDKVDVCIRPLSLRRTFASTAEDRRELASWLRRKKVGKAVMEASGGYEREWAKALRDAKIEVRIVDPKRVRDFARSAGRLAKNDTIDAEMIAWFAETFDEAPGQAHDAAREELAQIVNARLGLLDLQTKLLNRGEHTGPEPVQKMQARMLKKIAVEIAKLETVIAIMIKATPRFAELAEIIESVPGLAETTSATLIAKMPELGQVNNKIGAALLGAAPYDDDSGRRRGERHIKGGRRKVRNLFYMACLGAATLHNPVLKAFYDRLIAKGKEKKVALVACMRKLIVILNIMIARRQKWDPNLHVVG

SEQ ID NO: 124573 - protein, 355 aa, unidentified
MSQEKYIGMDVHQATISVAVMDAAGKLIMECLLETKAATIIEFIRGLHGTLSLTFEEGTSAAWLHDLQKPHVSRLVVCDPRKNALLKDGNKSDRIDARKLAELLRTNQVKPVYHGEHGVRTLKELGRSYLTITQDVTRVMNRIKALYRSWAIPCAGATVYAPRHRTEWLAKITEPGVRVRAERLYQQLDLLQPVRLEARRELLAESHKHSGVKLLRQIASIGPIRSALLVALLQTPHRFRTKRQLWAYSGFAVETHASGEYRSVRGKLQRNRERITVRGLNDNHNKEVKNLFKSAAISASTRPGPLHDFYVARVEKGMRPTMARLTLARKIAAITLIVWKKGVGFDPKQLHRQAA

SEQ ID NO: 124574 - protein, 377 aa, unidentified
MKKELYLGLDVHKDCIITAVAEEGRKGEVRDTGVISNDLHALEKWVGRLRKAHGRDVILRACYEAGPCGFGIARRLKQLGVECEVVAPSLTPKRAGERVKTDRRDARKLARLLRAGELTPVYIPEATDEAIRDLCRARTDAVDDRRRSRHRLKGFLLRHGYRYQGKSSWSAAHERYLRELVLPHPAMKVILEEYLQGIAAAGERIARCEVGMRALLEQWRLAPAVRALMALKGFQTVAAMIVVSELGEVDRFAHPRQVMAYLGLVPTENTSSDKRRQGRITKCGNAHARWLLVECAQHYATPPKVSQHLSRRQQDQPAQVRAISWRAQNRLHSRYTRLLGRRLQRNKAMVAIARELCGFIWELLHTQSCYHVQATSV

SEQ ID NO: 124575 - protein, 353 aa, unidentified
MYYTGIDQHKLFSYLTTVDSDGKVVKEEKLINNNFEIVNYFSSLGKEHMATVETTGGWYWMNDLLSSLNIPLKLAHAKYLKAISYAKVKTDKVDSNILAQLLRLDFIPEAYKIPDDIRTLRDTLRARLRLSVKRTSCLNFMHRMLEKFNISDPLLLNCFYRLQYQQFDIQSKLLKEQMLTLEKSLYPSLIPNEDIQRLLWIPGIGKMNAFTILLEVGDINRFETEKNFFSYCRLVPSARNSAGKTKQRSSKDGNRYLKIVFSDAAVHALQYYPVIKRYHSSKLRKKKKQVAKAIISKEIARFVYHVLKDKSNFNNHFKGKELEHKKSIQWPRIIPPKAGLEWEVMRLPKIYLG

SEQ ID NO: 124576 - protein, 370 aa, unidentified
MTSIIYVGMDVHTTNYTLCCYSVVTDEIFARATLEPDYMKIVRYLDQVKRNLGGDCHFKCGYEAGCLGYSLYHQLTRQDLECVILAPTTMATTKKKGIKNDKRDAANIAKCLAYNTYSPVYIPTDEDNAVKEYIRMRNDAKDTLKKTKQQLLAFCTRHGKQFTEGRNYWTKKHIAWMMKLDFGNAILKETLQEYMTLYHQATDKVNLFDKRIAEFAKAERYEEKVKKLSCFIGIKAHTALATIVETGDFIRFPKAQQYASYLGLVPGEDSSGDSIQMTGITKAGNSHVRKLLIEAAQCYSRGKIGTKPKALKERQDGNDTRVIAYADRANERLKRKCYRIMLKSKRNVAVTAVARELACFIWGMMTDNIA

SEQ ID NO: 124577 - protein, 424 aa, unidentified
MKVTYQTCCGVDVHKSFLVATIVKTTGGIEPSYQKKRFSTFNNSILEFKQWLLDNDCHDVCMESTGKYWIPVFNLLEDEINVVIANPKWVKTVKGNKDDTKDSKWIGDLFRLGLVKGSYIPCKKVRILREYTRYRYKLVSCRSSEKNRYQNALTVCNVALDSVVSDIFGKSSTSIIDYLLEQSGTSINHEEIASKLLRSLKSKEDAVIKSVEGYQMTDAQKYRMRLVRAHMDYITAEINDVDKMIENMISSNPDFENAVQFLCTIPGVKRDSAITIISEIGTDMSQFSSSKRLCCWAGLTPGSNESAGKKKSVRITRAGVYLKPALVQCAHAAVKSDKSPYYKKKYESLVKRRGKKRAIIAIARMILTAIYQMLSTGEQWNPSDLYKIDMPVALVEKQKAKAIKQAKKLLQREGLLPPDEPLAS

SEQ ID NO: 124578 - protein, 339 aa, unidentified
MRELKLIAMDTSKYLFTLHGVDERGEVVLRRELRRGQVETFFRKLPPTDVVLEACGGSHHWGRVLGGLGHRVRLIPPQYAKPFVKRGKNDHIDAEAICEGALRPGMTFVPVKSAETQANAMVLSVRELLVKQQTQAINALRGHANEFGAVTAKGTSNVEALLARIAADPAIPQAAQEMFAELSSHVAELSARLLELDRKLIELHKANPLSQLLAEVPGIGPITALTLAMTVDARQFKSGRHFAAWLGLTPKQKSTGGKPRLGGISRQGNERLRQLLVLGATAVIRLVRPGSRQATAWLLGLVQRRPRKVAAVALANKMARAVWAMMTSGEAYRPQQAAT

SEQ ID NO: 124579 - protein, 430 aa, unidentified
MKSNTQNAKIEAITEKTLVLGIDVGSETHYARAFDYRGIEYSKKPFKFSNTEAGFVTFKEWILDLKEKHEKDKVVPGMEPTGHYWFNLGKFLQDNEMKPVLVNPHHVKKSKELDDNNPTKNDRKDPKVIAGLVREGRYMIPYLPDGVYADLRTVSNIRFQLQAELTRIQNRISRWFNIYFPEYKTVYGKPDAKSGMLILKQAPLPEDILTLGIEGVNQIWRDAKMRAVGKARAKTLIEAAEHSVGSKEGAVSARMEIRMLLEDYESRNIRLQEVMTLIAELVNQIPMAEKLLEIKGVGIKTVSGFLAEVGDISRFNNPKELQKLAGLALVENSSGKHNGRTTISRRGRKRLRYLLFEVAMSLVAKNPEFRELHTYYTTRRLNPLKKMQSLMAVAAKLIRVFYVMLTKGVDYDPKKMVGDIKRPAVYLQAA

SEQ ID NO: 124580 - protein, 341 aa, unidentified
MDEYIGLDVSMKETAVSIRRAGERIWRGKCASDPSIVAELIRKRAPSVKRVVFETGPLSVWFYHSLRVEGLPAICIDARHAKAALNMATNKTDANDADGLAQLAEVGFFREVRVKGFDSMLTRTLVAARTRLVRITTELSNQIRGVMKTFGLLVPAGKGSTFEKNVRSLLADQDRLASIVLPMLEAWRGIRVRAAELGRQLVRDARQSRSCRILMSIPGIGAITATSFTTAIEEPDNFRKSRSVGAWIGLTTRRYQSGEVDYDGHISRRGDRPLRGLLYEAAAVILTRSSTHSTLRTWGLQLRERIGFKRAAVAVARKLAVIMHTMLKTGELFNPNAGATA

SEQ ID NO: 124581 - protein, 363 aa, unidentified
MEEEKRRYVGIDLGKREYTMAVIGRNGKMTIHHGKTCIHGRQALYRLLEPTDKIALEAGNLAFLMAREVMEQIGSEVRVLNSAKLPFIWDAPTKTDKEDAMKLAHLVEERRDEKLPIVPLPSEKEMERRKTISSYGREMNNRTRLINTLHAIFVHQGHTTIVKKNLATAERRRQAIQVLTGHEREEAEWLLKYLELHEQRINELRVKIKEEAKNDEDMRRLQSIPGIGPIVAYAYVAHVGDGSRFSKGAQVSNYIGFVPRLDYSGTIQRHGHITKRGNGYLRGLLVQAAWVMTLCKKGGSLSTRYKYYTLCQEASKKKTIVSIARKLAELMYSVLRNKTIYEVRKWDGPKDKPVVSAVQTMCA

SEQ ID NO: 124582 - protein, 360 aa, unidentified
MIVQGTSVGLDVHALSVVAHAVDEETGKLVRARLCPDYGEILGWLHQLRAPVRVAYEAGPTGFGLARAINEDGMECVVAAPSKLQRPAGDRVKTDARDAAHLARLLRLGEITAVRVPERDIEAVRDLVRAREDARADLMRVRHRLSKLLLRQGIVYYGGTPWTCSHEEWLRRHRFADIHLKAAFDHGFDAVLAATAARDRLDEQIMAVAASPRFADPVNRLGCLRGISALTGLALTVEIGDWSRFTGSAIGAYVGLVPSEYSSGSSRTQGSITKAGNTHVRRLLIESAWHHRKSYSTSGPSLRARWAKVDPALRARGHAGNRRLNKRWRSFTERGKNPQVANVAVARELAGWCWSLATMQ

SEQ ID NO: 124583 - protein, 398 aa, unidentified
MRLLTHPLWRRPCKLSLTEAPTAIRTDLGAIFVSLELSRSTWLITSLSPGGGEKMSKHTVLSGDVAGLWARFCQLKDKVQVRTGHVVPIIVIQEAGLDGFWIHRFLQDERVESHVVDPASIATSRRRRRAKTDKIDGEALVRALLAYKRGEPRVCAMVRAPTPQEEDRRRICRERKTLTAERVEHVNRIKGLLFAQGISDYEPLLRKRRERLEELRTGDGRPLPEHLKAQIGRELDRLELTLQQIKSVEAERDAMLSPSDEGTPAPGAMLKNLKGIGPEFAGVLWSEGLFRSFSNRRQVAAYAGLAPTPWRSGSVAHEQGVSKAGNPRLRTTMIQLAWLWVRHQPRSVLTLWFHQRVQLNGGRVRKVLIVALARKLLIAFWKYVTAGVVLEGAEITAA

SEQ ID NO: 124584 - protein, 358 aa, unidentified
MRIIGVDLHTRQQTIAMLDPETGELVEKTLKHEGETVREFYSALPHPVLVGIEATGSMYWFLELLEELGIERQVGHPTEIRAAEPRKQKHDRRDAALLLKLQVENRFPSIWMPSAELRDLRALLRHRHQWVRMRTRVQNTLQAIALSHGLRRGQSLWSQAGQQAIALLPLAAHAAQRRTELQTLYGKLGKEIDELGERVMDQALQRPGAKLLMTHPGVGPVTALATDVFLGDPARFDDGKAVVSYVGMIPSEYSSGGRQRLGGLSKQGNPLLRFLWCEAGIHAVRRDPELKRFYRRKLPQKGLGKTRVAVARKLGIRLWIMLRDQIDYQEFCRRGQMRQKSGGARAGMPERVHSPARS

SEQ ID NO: 124585 - protein, 336 aa, unidentified
MDASNAVLGIDVSKKKLDVALLVGGKTKSKVIDNSAQGHQLLLVWLNKHQVDLAMLHACMEATGVYYEQVATALHDAGIRVSVVNPGCVKGFAHSENLRNKNDAVDAGLIARYCVAMQPLQWVPPSLEQRQLRAWAMRIEALKEIVQQEENRLEALTVSGLNDVAAHVRQHIAWLTGEIKKLNSDVDDHIDRHPGLKHDAELMTSIPGIGSTTVMRILGQVGDLRRFESAKAFAAFLGVTPKQRTSGTSVRGRTMISRTGNASLRAALYMPSLVACRHNPILNRFAQRLLANGMAKKAVLGAVMHKLAHLLYGVIHTGLPFDVNYQSKGLAIQDGI

SEQ ID NO: 124586 - protein, 343 aa, unidentified
MEIIQGVNTFVGIDAHSEKCSIKAVSQQGDCVLQVDVPTSVLRLKRALKCLEGPVWAMVESSCIAPFVKDSIEKEVDRVIVCETRENRWIARSENKSDQADADRLARLLRMGEFKEVHVPRGLRRDRLEALRLYRKVQGDAIRTKNRIKSKYRENGVRVSGKKVYSPRYREQYLNQIGRAQVRFMLEVLYEKLENDEATCELVLKRLYSLMKNTREHKALKTIPGVGPLLASILAAVIDDPFRFAGKRQLWSYSALGVRSRWSGDPSKVRVKGSNSGNRLMKYAAMSAAKAALRGDNRFSRHYKKMVGDGVCPAMARRTVARQILATALAMLKSGEAYEERSS

SEQ ID NO: 124587 - protein, 376 aa, unidentified
MREKLRFLGMDVHAETIAVAVAEPDGEVRSLGTIANREDSVRKLIRKLGSPEHLRACYEAGPTGFVLYWQLTQLGVECAVVAPSLVPKKPGDRVKTDRRDALKLARSHRSGDLTAVWVPDEDSEALRDLVRQREAAKQDQLRARHRLTKLLLRTGQRPPLGLKAWTERYMRWLAQVRYTQPAQEVTRLDCMNEVEHMSARVKRLEEAILEVVKLAPQPMQELIRGLQALRGVAHISAVTIASELGNISSRFESARKLMGYCGVFPSEDSSGKRIRRGGITKAGNAHLRRIVVESAWSYRHLPRVGERLRKRHEGVPAEITEIAWKAQHRLHKRYRTMISAGKEQRKVMTAIARELLGFIWAIGIKAEAAGKQQLAA

SEQ ID NO: 124588 - protein, 447 aa, unidentified
MTLDVVYKTGKAPILVRMLSKYVGRQTSSIENDITKIWNHSRQRGNIMRAVFGIDVSKASSEVAILVNSEKVHGYSMTNDAIGFSRLLKDLNTVSNPEIIFEATGVYSRRLQAFLEENAYAYTRLNPLEAKKQLDSLRVRKTDKIDAKKLAESQFILNRKSTYGQEEVYQNLRDLSRFYQNLTEDMVRTKNRLHKILQVTFPELEQLLSAPTGEQYWNLVFSFPSKDFVLDLSPSELAEVIRQSTSKRISEKRVTLLSDKLTELAKQSYCAVKKTSPMIEEIKYYAQELLRLTERRQVILDEMVNLAQPLPEYEILLSIPGIAETTATSIIGELGDVRRFHSANQINAFIGIDLRHYESGNFLAQEHITKRGNPYARKILFKCIHNIAAASHTNPCHIADFYEKRKRQSQTTSTKPHTIAAVHRLIRTMYYLITHNKLYDYTATQSH

SEQ ID NO: 124589 - protein, 344 aa, unidentified
MTSIDYIGLDIHKKTISFCAKAQDGTILDEGTIPARRDTLRAWAKARPRPWIGAMEATLFTGWIYDLLKPLAHELKVAHPAMLKAITAAKKKNDKVDARTIADLLRCNLLPECYMALSAIRDLRRVLRYRNLVVRQAARMKNRIAGLLMETGTPYNKERLHGRAYFSELLGSLREVPRSVVELLKLSRGQLEFFATIQRRLLKGLCEHPGLRERVARLQTIPGVGEIMALSWALEVGEVNRLPSIAQAASYCGLTSAQHNSAGKEQRGPISKQRNKHLQTILIEATKLAPRHNPQLAVVHERELQRGDRNQATLAVARKLVAYLMAVDKSGKPFAMRASSAEAA

SEQ ID NO: 124590 - protein, 423 aa, unidentified
MMKLKYSICCGLDVHKNVIVATIVTTNKDGISEYKQKSFSTINSDIQRFHNWLIENNCYHVCMESTGKYWIPIFNYLENDIDVCLTHPKYVKAIKGKKTDKKDSKWIADLYKFDLVRCSFIPPKDFRQLRELSRYRFKLVCMKSSEKNRIQNCMTISNVGIASVLSDPFGKTATEIISYLLEHTADSMDEKAVRKLIKKGAKSKSDEIIEAIKGYTIETDQAKKLELARGHLEYLDDMITQTEVELYVRIKPYYEFVEFVSTMPGMTELSSTIVLAETGVDMDIFDDAKHLCSWCGLSPANNESAGKKKSVRIAKAGDYLKPMMVQCALAAIKSKKQPYFAIKYGRIKKRRGHKKAIIAIARMMMVCIYHMVSEKKPFTPTDYEELMDPQNHVESVVLNENNVFAYLESLGYDSSKLVKRNDN

SEQ ID NO: 124591 - protein, 442 aa, unidentified
MTNLSSSATPTEWAAFVAIDWADQKHCWALTPTASEKVERGELNATPEAVEAWAAELNVRFSGRPIAVCLEQKRGALVFMLAKYAHLVIFPVHPKTAAQYRETFCPSGAKSDPADAGWLLDLLLRHRHQLRELRPDTPQTRLLQHLTEYRRRLVDESTRQKNRLTSCLKIYFPQLLHWFDDIGSPVAGALLERWPTLPELQRAHPGTLRRFFHQQNCRSEERIQERISGIAAAVTAVQDEAVVEAESLRARSLVALLTTLRSQIAVFDERIQEVVKNHPEERLFASFPSAGPVLVPRLIAAFGTQRDRYATATDLQSLSGIAPVTESSGKQEWVHFRWACSHFLRQTFHEYAAHSIVKSAWARAYYESQIAAKKTHHAAVRALAFKWIRIMFRCWKDGKTYDEQAYVAALRKRNSPLAALFKTTSIGWQSSAGFQRLSADPS

SEQ ID NO: 124592 - protein, 358 aa, unidentified
MAGKVTETAVVGGVDTHKDLHVAAVVDQNNKVLGTQFFSTTRQGYRQMLAWMTSFGALKRIGVECTGTYGSGLLRYLQNAGLDVLEVTAPDRMERRKRGKSDTIDAECAAHAAFSGIRTVTPKTRNGMIESLRVLKTCRKTAISARRVALQIIHSNIISAPDELREQLRNMTRMQLIRTLGSWRPDASEYRNVTNVYRISLKSLAQRYLELHDEIADLDVMIAAIVDELAPELIKRNAIGYESASQLLITAGDNPQRLRSESGFAALCGVSPVPVSSGKTNRYRLNRGGDRAANSALHIIAIGRLRTDDKTKEYVARRVAEGHTKMEAIRCLKRYISREVYTLLRNQNRQINSIPITA

SEQ ID NO: 124593 - protein, 358 aa, unidentified
MAGKVTEAAVVGGVDTHKDLHVAAVVDQNNKVLGTQFFSTTRQGYRQMLAWMTSFGALKRIGVECTGTYGSGLLRYLQNAGLEVLEVTAPDRMERRKRGKSDTIDAECAAHAAFSGIRTVTPKTRNGMIESLRVLKTCRKTAISARRVAFQIIHSNIISVPDELREQLRNMTCIQLIRTLGSWRPDASEYRNVTNVYRISLKSLARRYLELHDEIADLDVMIAAIVDELAPELIKRNAIGYESASQLLITAGDNPQRLRSESGFAALYGVSPVPVSSGKTNRYRLNWGGDRAANSALHIIAIGRLRTDDKTKEYVARRVAEGHTKMEAIRCLKRYISREVYTLQHNQNRQINSIPITT

SEQ ID NO: 124594 - protein, 543 aa, unidentified
MRRTESAVRFMSMAPDTISTVIHQGPRRAGRNSSPQVPVNNRAVREKNSCEKPLRRDYNGSGRIAPDGSRSYGPQLAKLNRSEPARLSAPALKSERTIAREAPSIRLTEGSAAVCGKPKGTPMMEFKELKHFAGFDWAKDHHCVVVVDQAGEIVSEFEFKHSAQGWKEFSERAAKLPGLGVAIETSSGPAVDQLLRRDFTVFPVNPAASQSYRQRKASSGTKSDHHDAWALADALRTDGRGWKVLNPADPLSVQLRLLCKDEVALIEQRTQMVNQLQQALAEYYPAALEAFEDWTLDFTWDFIIEFPTPEKLARVKEHRWRKFLHTHHLWRPGTAEKRLEIFARATEFQGSSAVVEAKSKLAVSLCKVLRTLEQQLKEYRQQIEELFKNHPDHELFGSLPGAGKVLAPRLLAAIGTDLQRYGNELSVLQAFAGTAPISYQSGKIHKARMRWACDKFMRYAVHLWAECFWKYSPWGKVYYRKKRQEGKSHACALRCLAQRLLKILFRMILDKKPYDAELHARNQEKHGSWVLSLLNKPAPTPCE

SEQ ID NO: 124595 - protein, 405 aa, unidentified
MSKALAGQDADRVVVGMDPHKRSVTIEVMAGDETILGGGRFATTVEGYRAMRAHVAAWAERVWAIEGCAGIGGHVASRLLADGEQVVDVPPKLSARARVFTTGQGRKTDATDAHSVALVGTRMTGLRPVVDDAQLAVLRVLVDRRRSLGEDHTRMVCQLHHLLLQLIPGGAKKDLSAAQAKALLASVRPRDAAGKTRRRVAAELIADLERIYQRKKAADKELTALLAQTGTSLLTLNGIGPSGAARLLVEVGDITRFPSRAHFASWNGTAPIDASSGDQVRHRLSRAGNRQINRVLHIMATVQLRNPTVGRAYYDRRRADGKTSMEAMRALKRRLSDIVYRTMFGDALRPTQAGAAAAQTTGPGGHSGAATSSSAVDSNPSIDASEKSLPGPATGKPTTPLKTAS

SEQ ID NO: 124596 - protein, 355 aa, unidentified
MDSKKYIGMDVHKESISIAVRNAAGKIVMESVIETKANIILQFIDGLRGDLHVTFEEGTSAAWLYDLLKPHVTKLVVCDPRKNKSMREGNQNDKIDARRLAELLRLNHLNPVYHGEHGLRTLKELVRSYLTVTKDLGRVMSRVKAIYRSWAIPCTGKQVYALRHRAEWLGKITEPGVRRRAEFYYQQLDALRTVRQQVRRDLLAESKKHKTWKRLRQIPSIGPIRSAVLLGILQTPHRFRTKRQLWTYSGFGIETHSSADHRRVNGQLERAKKQVSVRGLNRNCNHDLKNLFKGAAIVASSKPGPFQEFYTALLAKGIRPEMARLTLARKIATIVLIVWKRGACFDAQHLKPQTA

SEQ ID NO: 124597 - protein, 350 aa, unidentified
MNVNHYIGFDVHKKSINYCVKMADGQIVEEGRLRATHDALRRWAGRRQEPWRGAMEATLFSGWIYDTLKPFAAELQMGHPAMMKAIGASKKKNDKIDSRKIADLVRCNLLPACYVAPAEMRELRRLLRYRNVVVAQGVRMKNKMSGLLMEVGAEYNKQQLHGKKYFTELMGNLEEVPESVKDLLRLSRGALEMFEATQRQLLDRLQKEPRLVERVAVLESIRGVGEVTALTWALEICDPQRFRSIADAESYCGLTSALDCSADKQHRGPISKQRNGHLQTVLIEAAKLAPRWNPQLAQVHERELERGNRNRATLAVARKLVAYLLAVDKSGQPFRIRNQPAPTTEVATAA

SEQ ID NO: 124598 - protein, 351 aa, unidentified
MQLGVDTHKRTHVLVTLDDEGRHLGTRTIPNTPAGWADALAWAREQQQQHRRWGIENGGSLGKGFAQFLLAQGEVAVQEVSPQRTAQYRRRGRTQDKTDQADALAIARLLLAEGAHLPAIQRDDVSTELRLLSDHRDNLLVDRTRLINQLHAQMLQINPGYQERSGALTARRGLLYCRDLTLPEADGVTQTRLLIARQLVGQILRLEEEITTVTTALSERVRASRTPILALCGVGEVIAARLLGELGTVPRVPSAAALAALAGIAPVAVSSGGRGGFRLNRGGNRQLNRVIHLMALSQRRCDPRAQAYYAKKRAEGKTRRAAMRCLKRRLVDVLYRCFTRDADAQPVAVAA

SEQ ID NO: 124599 - protein, 419 aa, unidentified
MFKIFRRNCCGLDVHKTWIYACVGITDEQGRTTYKQSRFSSFSKGLRELAQWLSTFDCRDVCMESSGKYWIPVFNILEKTCKVVLAHPKYTKPQKGNKTDRKDAKWICDLFMCDMIKPSFIPPPDIRHLRDLVRYRFKLTNCLTGEKNRAQNCLTVSNLKLDDVFADVFGKSAMSITRYILDHPGEPFDVTPFVDGRCKTPIEEIQAALDGCVSPEQATKLREVLRHIDEIKAHRQNIQTEILRLAAPYQSILELMRTAPGLSSDPMTAVAVLSEIGADMSVFKTAKSLCSWAGCCPRGDQSGGKIKSTRISRAGVYLKPLLVQVANAVVHSDRYPECRARYRRIKARRGHKKAIIAICRMLLTAIWNILSKQVPYSADGYLTDRKTGETKIITKAQGLHLLQMRGFIIKDDIPAPASG

SEQ ID NO: 124600 - protein, 417 aa, unidentified
MHYVGIDWADQAHQVCLMTADGRILSEFTITHDGRGFERLRTNLDELGPVEINLERSDGLLVDWLITQGWAIFVTPPRIFASHRPRRSKDDCGDARLLADLRRRNDPDSRPLVVHSETVDELRGLLRAHDQLHKHQVKIGNQLRQTLKDYYLGAVRAFSRINGPVTLAFLTAYPTPEAAQAATYEELAAFLRRHGYTCMQHFDRLYQRLQAPAPQARVAAGHVAHMLALVELLKTLHQQFGQITRQIQHTFAAHPDAEWWQSFPGAGPLTAPRLLAAIGDNPAAFPSYQMLQATAGTVPITRQSGQKRVVKFRWACSHPLRKAATDLARNSIRESGWARSYFYNQRALGHSRSRAHRALANRWLRIIWTVRQRGEVYDEARHIANRSRQGRNSTQPPKLTQPDHAPVLADTCQVAAG

SEQ ID NO: 124601 - protein, 344 aa, unidentified
MKRYIGVDLHKKSFTVCYRSKAGKVKIVEYRVGEKELEEFRKTLSKQDIVAVESTGNTGHFVRAIEDCVGDVKIVNPTQFKVIANSVKKTDKLDAGTIAEYLSKNLIPEVRMRSKEQSQTSSLIGTRDKLVKLRTALKNKIHNILNANGIITKKEMFSSDKSLDRILKLDLDQADLFELGLIVEHIHHLNKTIDTINKELEGRGKKMDGFKNLKSITGISDTSATILLSVIGNIDDFETPDKLAAYFGLVPRVFATGDTVHYGRITKMGNKIGRTTVVQSTLIAIRYNDYLRNFYLRLKAKKGSGKAIIATARKYLAIVYKTLKYDWTFENFNQFQLAKGCLKT

SEQ ID NO: 124602 - protein, 343 aa, unidentified
MQTIATIGLDIAKSVFQVHGVDAAGQVVVRRQLKRRQVLAFFAKLPPCLIGIEACASSHYWARELQALGHTVRLIPPAYVKPYVKRQKNDAADAEAICEAVTRPNMRFVPIKTIEQQGCLVLHRTRHLMVRQQTATINSIRAYLAEFGIVAPVGRRGVEQLLEIITDASDARVPEVARSCIAALGAQLRQLKAQILELDRRITAWHRSSELSWRLNEIPGVGPLLATALVASITDPKVFRSGRDFSAWIGLVPKQKSSGGKDKLGNISKRGDRYLRSLFTAGALAVIRYAKIHGTKHRPWLVALLARRPTKVAAIALANKLARIAWALMTKGSHYRQPAALRV

SEQ ID NO: 124603 - protein, 377 aa, unidentified
MKRIKFVGLDVHAETIAAAIAEQDGEVRSLGVIANREESIRKLVKKLGPVEQLRFCYEAGPTGYVVYWQLTAMGAKCEVVAPTLVPVKSGERVKTDRRDALKLARNYRAGELTPVWVPDAAHEALRDLVRAREAAKKDQLRAKHRLGKFLLRHGRRPPTGVKPWSLNYLSWVKHEVHFEQLAQEATLLDYLHEVEHAEGRIARLDLAIEEAVKLTPPQMRAVIEALQALRGVAQVAAVTIVAELGEVSRFTGARQLMGYGGIVASEHTSGESSWRGGITKTGNAHLRRVVVEAAWAYRHRPSVGKSLQKRQEAVSEEIREIAWKAQHRLHTRYRKLMARGKEKEKVVTAIGRELLGFIWAIGVKAEAAQKKTERLAA

SEQ ID NO: 124604 - protein, 312 aa, unidentified
MNTSYPHLGIDVSKHELEVAVHGQRRTGRFANDAEGISRLVARIVEHQPALVTLEATGGYERPLVMALHEAQLPVAVVNPRQVRDYAKALGLLAKTDQIDACVIARFGHDVQPRCQEKPDENRAKRAELAARRRQLIKMRNAESNRLKQTFDPAVAESIRQIIASLDQQIKQIEKQQHEALAADKQAQRQAKVLQSVDGVGRVTAQTLINELPELGRASRASISALVGVAPFNQDSGKMRGQRSIRGGRANVRNVLYMATLTAIRCNPVIRQHYQQLIARGKKFKVAMTACMHKLLIHLNRLMADEIQATTA

SEQ ID NO: 124605 - protein, 395 aa, unidentified
MNTSYITVGIDIGSFQHRVAIADPNGNIIDEFDLAHHKLGFCDFFKRLAEHEKRMGHPVAIAMEGFNGHARPLDTQIRMRGYPLYNVNNLKLARFKEIFPGPAKSDPIDARKILELFQLRTHLPVAKDVLQEVAACPAVNEQLKRLTRRRRQLVNDKVSLVNRLQADLKAVVPGLLEITGSIDNRWFLNFLTYRKELASLARIQKKSILGIKGVGDTYAEKIVQWQNTAYFAPEVDWVGDMIIEDARRVLELMSSIERLEKQIEPLVQDSEIAGYIQSIPGFGIISSAELAGEIGTVERFATESSLALYIGMAALTNQSGAFKGTKTPRQVNKRAKAAMMVAVARHINHVPSSKRYYDKKRSEGKKHNQAIRALGRHLTRVIWALIKNQRDYEMR

SEQ ID NO: 124606 - protein, 324 aa, unidentified
MSKRSIICAGIDTGKRRLDVALENRAQELQVENTAEGHRQLSAWLRKHKVARVGIEASGGYELAVVSQLRRDGFVVVVFQPAQVRAYAMFHLQRAKNDKIDAGLIAACTAVTKKIYPPPDPRLAPFAEIMTFIDQINEDIARLQTRQESCRDDRIEGHWNSEIRRLRALVRVELKQVVAGIRQHDDLAKRLDLILSVDGVGLRTAVAILVRMPEIGSVTREQAAALVGLAPYDADSADYVGQRHIAGGRERLRGNLYNAALPASFRWNPQLIALYERLIAKGKPHKVALVACARKLLIYVNIVVQRGTPWTKEMPALAMARRSN

SEQ ID NO: 124607 - protein, 465 aa, unidentified
MQHQPRRRAPKPRHSPAALERLHPHAAGIDCGAAEHFVAVPPDRDVTPVQSFPTFTGDLHRLADWLTACRITHVAMEATGVYWIPIFEILDARGFQVILVNARHVKNLPGRKSDVSDCEWLRDLHMLGLLRGSFRPADGIVALRGYLRHRTTLIESAGALVQRMQKALVQMNVQLPLVVSDITGVTGLRILRDIVAGQRDPQHLAQHRDVRCRASEAELIAALRGNYRAEHVFVLQQNLELFDIYQQQLAACDRTIEGHLAQLAVTASSASPLPAARRRPRTAKDNEPAFDLRTPLHQLTGVDLSQIDGIGPYNALRLLSEIGTDMTRWPTVKHFTSWLTLAPQNRISGGRLLSSRTQPSANRAATILRMAAMALGRSQTALGAFYRRLAFRIGKAKAITATARKLAILVYRTLKDHLVYNDPGAEAYEAQDRSRVVRRLRQRAEHLGFGLVNLSTGEVTPGAVS

SEQ ID NO: 124608 - protein, 428 aa, unidentified
MKVMNNNHPINEEFVAFVAIDWADQKHDFSLQVAGQKKKESGSFKQTPEAIVEWVAKLRERFGGRLVAVGVEQSRGALIHALLGYDFLVIFPIHPTTVARFREAFKFSGAKSDPLDTDQILEILSKHLEQLKALVPDTEETRLLARLVADRRKTVDLRTSHIEALQASLKEYFPQALAVLSGNVTSRLACDFLKKWPSFQAFQQAKPSTLKRFFYGHNVRSPTHMEEVLKTAEQSKALTEDPAILESGARLSQMHAEVIQTLNPIIEEYDQKIEELFRDHPEAKLFSNIPGAGPAMAPRLVAAFGTDRSRYESAANLQSFSGIAPVTRQSGRTRAVYCRHACPKFLRQTFHEVARLSVATCQWARNYLDFYTAKGKKYHTIIRALAFKWIRILFRCWKNRTAYDDKKHMEMLKKRGSIFATFHMEKNA

SEQ ID NO: 124609 - protein, 445 aa, unidentified
MQNSCQNDPGSKRQIEGLPVVRRNVAGIDLGSERHWVCAPTVDGTGREIAHFGATTPELMRMGKWLQERQVESVAMESTGVYWIAPHEVLEGMGLEILLVDTRQLAQVPGRDKKSDPRDCEWIQRLHSCGLLRGSFRPREDVCMLRTLVRDKANLVAEAGDWVRRMQKSLDQMNVRVHRAVSDVDGATGMAILRAIVEGERDARELAKLRDRRCRKSEEEIAEQLSGHWREDHLFSLRQSLKMYDAIQQGIADYDQEIMRQLGTMQQEEFQGQPAPPVKNPQKAQAIKKRGQEPMRQALYRMSGADLTSMDAIGVETVQVVLSEYGPDLSRFATEKEFVSHVTLAPHRPTSGGKPVKKKRRNSASTRVAGALRMAALSLRHSANGDAKGRDPVWSKYSCGAAVVQYRSKPPRRSRQRMPRRPPGSSRAGAGKSETLFLPWWLRSA

SEQ ID NO: 124610 - protein, 341 aa, unidentified
MDKELYFGVDVSKKTLDLAYYDGETIDWKNAHIKVSNDDAGFKKIGSWVAKVGKDFDTFLFCMEYTGLYNQNFRLWLESKEYIYGMVEPRKMHRFEPDLDDDQRSLDRIKTDELDAFRIAIYCEQNHKKILRNPSKLPSPVYFKLKRLLAERKQNTKQSVLYKQQLHDICAYDTDLSVERKKLLLKNMQENQKAIDKEIDSYMNEDTSIRKNYNLLTSIPGIGRIIALETIVLTENFTAINNPRKYACYIGIAPFKKESGTSVRKKTGVSKKGFSEAKADLSIAVLSAIKNNPSIRDYWIHKRKEKCGGIVLNAIKFKLVLRMFAVIKRGTPYVETDAYKN

SEQ ID NO: 124611 - protein, 416 aa, unidentified
MDVIVDRCAALDVHKDTVMACVRKPAPSGSRRVKEVREFRTWTSSLRDLREWLADEGVTQVAMEATGSYWKPVWHVLVELDGVELLLCNAHHVKNLPGRKTDVSDSVWLCQLLECGLLRGSFVPPTEIAQLRDLTRYRTKLVQDRARETQRVQKVLEDANIKLDSVASDVMGKSARKMLDALIAGERDVDVMADMAMSRMRPKIGDLRLALEGRFDEHHALMLTMHLAHIDHLSTQIDEIDAEVEHRLVPFVDHARRLRTVPGIGQRTAEVVISEIGVDMSRFPTAAHLASWAGLCPGNHESAGKRRSGKARKGNAALRTALCEAAWSAARTKDTYLQAQFRRFCRRFGKKGESKAIFAVAHTLIVIIWHVLHDEVDYQELGADWFERRADTEAHARRLVRQLEHLGHKVTIEPAA

SEQ ID NO: 124612 - protein, 397 aa, unidentified
MYIVGIDIAKRKHEAAVIDGEGTVIIKPFSFTNNCSGYNRLLAMLTKAKLPLDEVSFAMEATGHYWLALFTRLQKEGFRVQVINPVQTNSIRSFYIRQAKTDPRDALLIAEVIRFGHFSESTLHPENIYELRELCRGRHAIVSMQADVKRKVVALLDQVFPEYETAFTNMFGDTSMAILQTCPTPKELSEMRLEELCHLIEVSSHKRFRMAKAQELQALARNSFGFAMAGDVFSTMIRLYAKHLDFLKQQVQEMDRKIAEIMDTLDTPITTITGIGPTLGAYILSEIGDISRFSSAAKLAAYAGIDPTMRQSGEYNGVRNRMSKRGSPYLRHAIWLAASSAVLHDPALKLYFQKKRDEGKPYMASVGHACRKMVSIIYAVMRDNKAYTPYIPNEISA

SEQ ID NO: 124613 - protein, 342 aa, unidentified
MEEHTTIGVDLSKDVFEIAVSKYPGRVSERKRLNRAKLLPFFSNRPAATVLFEACGSAHYWARQIETMGHRALLLPPHQTRRYVLRDKTDGADAEALLEAHRNEKIIPVPVKTIAQQTLTALHRIRSGWTRTRTARINAIRGVLRELGLFIPRGPRHVLPALAGFLSDPQQPIPVELHAPLLTFAAEIRALEKNLRDTDRQLNAFARRSPDASRFLTIPGIGLLGATALVGFLGPLNRFRSGRRFSSSLGIVPREHSSGPRRHLGSITKRGDPYLRTLLIHGARSALVAASRAKHPDRLQAWALRLKQRRGHNCAAVALANKIARIAWALSVHQTNYQGTAA

SEQ ID NO: 124614 - protein, 429 aa, unidentified
MTRISAGVDVSKNRSTVCIIDQDGKFIMRPFLVWHSTEELDFLADTLKRLNGEVRVIMESTSIYQYPIALQLKERGLFISIVNAYEMKQFANIDFRGGKTDKKDSRTIASYGISYWDKLVEWQIPKDTYFNLDLLNRTYMNAKKHRQIILQELQHYIDCAMPGMDKELHSLNLSTKKDFMLDFVEKFWHRDEIVNMTEAEFTEVFTAWAKEKGYRPGKGKAAKIYAIAKSCIPYYPANPTVKTILQCIVDKLSGVNRTLVTIVTQMIEEAKKLPEYQIVREMPGVGDPLAARFFGSAGDIRRFKNSKALVAYAGIDSPPDESGDFSSTHRHITKKGSKVFRDTGYEIMMALRAQKRTWEKVRKNPEVYDYMLKKEAEEKPRKVAKIAALNKFLRIVYARIKELYDNMALAERAKAKTKSKTKAKTKATA

SEQ ID NO: 124615 - protein, 346 aa, unidentified
MMVIGCDYHPSWQQICWMETTTGETQEKKLEHSRGEAERFYRQVPAPALIGMESTGNCQWFVEMVTTLGHDVWIGDPAKIRASEVRQQKHDRRDAELILKLLLEGRFPRIWTPSGEEKDLRQLLIHRHKLVRIRAQVKNELQHLAMNQGVTKKQKLWSQAGEKVLRKLTLKPWASQRREDLFKVRGMLDEQISLLDAAAVDVAEKNEKARLLMTQPGVGPITSLAFVLTMGDVNRFPRGKQVASYLGLIPREYSSGGHQRLGSISKQGNRFLRMLLVEAAQGAVRCDPGFRNEYLHRCHTKAKGVAKVAAARKLAIRLYWMLRTNTGYPEIVRVESSSRVPLVGAS

SEQ ID NO: 124616 - protein, 346 aa, unidentified
MRILALDLGKYKSVACDYEAETGGHRFTTIPTNPQALHDLIVDREPDRVVIEICSIAGWVSDLVRALGIEIQVVNPNDERWQWRKVKTKNDRADALKLAQLSALNQLRLVHVPQSEIRQWRALIAYRQHLVQRRTKIKNHIRDLLLREGQLLPRYRSAWTQEGIANLEAMSKPFSEVSLDELWRGELGVELAQFKAVQRQLAEVVTKLDELGAANRSVQLLRTIGGVGPRLAEAVVTMFDDPHRFRTAGQVSAYIGMVPKQFDSGETQRAGRITRHGNRLVRSLLVEVAWCALRHNPWARETYQRISGGKKSRKKIAVVAVGRKLLVRCWAMLRKQTEWRTELSVA

SEQ ID NO: 124617 - protein, 520 aa, unidentified
MATARARKRSSRHSSAANLGKPRGILHPRVQQVGPEHFGIVCCDCHKDSSKLLLADFYGNLLIPPTVVAHNRPELDAAGDRIRATFATHNIRDGLVAIERTGRYHRLVQRTFAAAGFETRILHPFVTKQYRQPVDPANKTDDTDLAAIHRATVTGCALLEATRDEAWTTLQLVIRHRRDLVRKGAALQCQIRDHREAALPGFADCFDKRFDSALPWHLLRCFPNAAQLRDAGLTALCQSLQHAGIRFQQRSVEKLLAWAEQAAPGDVAAGQHLRFALALYNDRQQKTPEIQALEREIASRLVQTPYVLLLSFPGINVVSAADFAGEMGPIEHYANGKAITGRAGLPPARYQSNKVDKGDGPLVRNGNRALRATILTIADNLIACNHHFRVLAAAWAAHGKDPRHSRVKVALRFCRIAFQMVAGRQVFRHPCIQGRHYILDKLNAFHRDHDTPMPAVLADLQAAVGQVPPREHAAEGKPLHEELKKIQEGHRRGPRPLADILPLVLARLGVGVVQSPQSGE

SEQ ID NO: 124618 - protein, 396 aa, unidentified
MGTVGIDIGGRVHVAARCREGETKADRGVLRISQSRAGFTALDAWLDAGPEPVELVAMESSGHYWMPLAAHLRRRGIPVAVVNPLAAKYFAKSRLGRTKSDPADARSLAEMAMRDTPPARDPLVGVELRQAARFAMTLVAEQAKVCQRLYRLVELGFPELRELFDDPTCRTARAVLRLAPTARAATRRRTETLANANKGQGRRRLGETRAALLQGAAAETIAVPELDAETAFEIGLLLDQYDLLEAQIEGADRRVAGLLDGEIARRLQTIPGVGPSITATLIAEIGDIGRFTDFDQLLAYAGVHPAERSSGTKGARPGTSWHMSKAGNSHLRAAAYRMAVVGVQHNPVIAAHYARKRDAGKSPMNALGHCMRKALSIVWGVWRNGQDFDPDWGAEA

SEQ ID NO: 124619 - protein, 400 aa, unidentified
MRFAGIDIASKTHMVAIVDQAGSVLRKTTAFDEDAAGYQKLLALLGDPADLLVAMEATGHYGRNLFAALNHQGFRVALINPLRTRRFAEEDLKRAKNDSIDALGIACFAAQKRPEATPLLDDVTADLRELVRFYDRLAQDYGDRLRQLHRLVALCFPEFTRHVPALDTQRATAILRDYPTARAFDGDGCLTRLARIRYDRQHKIGERLARALVEAAKISVAAHHSAVYGSEVQYVCCDLDGLRHRLADLRSDIEARVAQHPVGSLLTTIRGLGAISVARILAAVGDPARLRHGAALAAYVGVVPRTNQSGLRRLDRTSLSPLGNARLRRALYMTTLAAVRLNPWLGAYYERLKARGKLPKVALLAAERKLLMAIYSVAKTRRPFELRLPQPPESSASSPS

SEQ ID NO: 124620 - protein, 334 aa, unidentified
MMNASELIFVGIDVSKDSLEMALDDKSKTLHISNDEKGIAELRAAIKAACTPVEANDAPRTVAAIVLEATGSFEHKAAVALCSAGLPVMVVNPRQARDFAKAMGYLAKTDAIDARVLSHFARTLYHSEKGVQLLMHLPDVQQRALHALMTRRKQLVEMRVAEDNRFAMCEKAQRKSIDAVRKVLNKEIGKIEQDMDSHLKEHFAKQLKLIDKCKGIGPVNQAALMAALPELGTLSHEQIAKLVGVAPLNCDSGKHKGKRITWGGRADVRCALYMATLSAMRYNPIIKSFYDRLISKGKLKKVAIVACMHKLLTILNAIMKSGKPWDDEYLTTIP

SEQ ID NO: 124621 - protein, 485 aa, unidentified
MAKRRMSTFERLESGRLNRKQRRELGRQVAVADPGLTIVHANAGGIDVGNESHYVAVPPDRDPNPVREFGCWTAALNQIAEWLQSCRIDTVAMQATGVYWIALYDVLEQHGIQVVLANAQHTKNVPGRKTDVQECQWLMKLHTYGLLRDSFRLAQEMESVRTIWRLRDRHVKEAGRAVQHMQKALTKMNIQLANVISDINGLSGQEIIAAILQGERDPWKLADLKHYRVRASREEVARSLEGNWREDVLFELQQAVDSYHFAHRQMQECDRKLEGYLASLPARMLDIPVQPENTQAATPKKKTKKAKRPRGNQPHLDLKTELKRICGVDLTSIDGIDVMTALTIVSEIGTDVSRFQDETHFASWLGLTPAKDITGGKTIGRGKRKVKNRVAVALRTAATTLLKSDSYLGARYRSLRRKLPSFASAVKAMGRYLAVLIHRLLTKGEAWVDRGATQFERRHTEQELASLSFKARAKGFKLIPITEAS

SEQ ID NO: 124622 - protein, 338 aa, unidentified
MMCYAGIDLHATNSVLVVIDEADRMLCQKRLRNDLAVILTALAPYQATVKGVVVESTYNWYWLVDGLMDAGYRVHLAHAPALPQYSGLKHADDQHDAQWLAHLLRLGLLPTGYIYPKAERAVRDLLRKRSQLVRHKTMVVLSLHSLLTRLTGHRLSLPRLRQLTAEGLQTLVPFPEHVQAVVSSLAVLQCLEQEIRTIEGTIREAGQTQPGYALLQTVSGIGPILAGTILLEAGDIRRFPTVGHFASYCRCVGSEHLSHGNRKGAGNTKNGNKYLSWAFIEAAHFAIRYEAVIRSFYQRKQARTHPLVALKTVAHKLARACYYILREQVPFDLHRAFG

SEQ ID NO: 124623 - protein, 465 aa, unidentified
MGAGKMNRKQRKELGRRLQSANPGLEVVHPRAAGIDVGNGAHYVAVRPEQDAEPVRRFECFTADLHRMADWLEACEVKTVAMQSTGVYWIPLYEILEQRGFEVYLVNARHTKNLPGRKSDVQESQWLLKLHTHGLLNNSFQPTAEIRVVRTYWRQRGEHVRSASTCIQRMQKVLTQRNVQLANVISDLSGLTGQAIVRAILAGERDPRKLAELSHPRIRAGREQIAKSLEGNWRSELLFVLKQEMEMYDTYQHKIAECDRELEATLKQFAAPERASTEQPKIPNAKKTKRMQRNAPGFNLTGELHRITGVDLSRIDGVNAIVAQTIISEVGLDMTRWKTEAHFASWLGLCPDNRISGDKVLARGTRHVINRAATALRMAATTLIKSQSYLGAQYRRLRSKLGAPKAITAMAHRLARLVFRMLKYGQEYVDKGTQYYEQKHREQQLHLLKKKAATLGFQLVETGVA

SEQ ID NO: 124624 - protein, 409 aa, unidentified
MNTWTSLLWKQQCKKTDRGGNQLYFVGIDISKFKHDCAIVDELGDVITPSWSFQNDREGFSLLKELLDTLDGEKKIGLEATGHYGQNLKLFLENNDFSFMEFNPLLINRFVHSKSLRKTKTDSIDALMIAQYLMTVEYKPYPPSFYTLEKLKSLTRFRDSLIRQRSKQLVELTNILDKVFPEFKSFFKGRFSATALYILFHYASPEKISNMNSKSYEPLRRLSRGRFSMVDFVELKTLARNTVGSTCDYLLQEMEITIDIYNQLQSKVEEIELQIHDCVLALAPPILTIPGIGVASAAVILSEFGDLSKFNSPSKLLSFAGMEPGYFQSGTSESTGKMVKHGSSHLRYAMMNCAQTVINNEPTFAAYYAKKRAEGKEHRVALTHVAKKLLRVIYTLQTKELSYNPDLVR

SEQ ID NO: 124625 - protein, 341 aa, unidentified
MGTLYYIGLDIHKKTISYCVKRVDGTILHQNTVTAERKALRQWVDGIPGPWVGAMEATLFTGWVYDFLTPYAVSLKVAHPEMLKAITAAKKKNDRADAEKICDLLRVDLLPECYMAPVELRELRRVLRYRNLLVRTAVTMKNKISGLLMEVGATYNKRRLHGKRYFADLMERVEDVPESVLSLLRMSRGSLELFQAGQKKLLQALKEHSLIRDRVRRLMSIPGVGEVLALTWVLEIGEPARFRSARHAISYCGLCSAQRESAGKEQRNPISKKRNKHLQTILIEAAKLAPSRNDTLAVLHERELARGNHNRATIAVARKLVEFLLAVDRREAVFEDRKLAF

SEQ ID NO: 124626 - protein, 352 aa, unidentified
MIVLGADTHKRSHTIAAVCARTGEWLGEQTVQSGAKGSAALVRWARGLGAERVWAIEDCRHVSGSLERFLIERGERVLRVHSKLMAASRREARGRGKSDSIDALSVARAALREGLDTLPAAHLDGPELDLRLLVDHRERLVRARVAINNTLQWHLHDLWPDLQIPGSSLFYGKWGPRVARRLARAEQTMRVRIARDELRRLRELTHSIKALEGEIAELVAQIAPHLLTEPGFGPLTAAKLVGEIAGAQRFASDAKLARAAGIAPIPVSSGNTSRHRLDRGGNRQINATIHRIAVTRLRCHAETQDYIARKRAEGKSTKDAIRCLKRHLTRRIWHLLQTPAPIPDQALTPSIS

SEQ ID NO: 124627 - protein, 433 aa, unidentified
MPTNHPYDLVIGLDRSDRKADLHLIDTRTGNVQKQTVATSPEALHDWLARLRQDHPQDRVGLCLEQPAANLIVFLETYSWITLYPINPISLQKFRETFVTSRAKDDGKDAQYLAELLLSHHDKLKPWQPDDSQTRQLQQLVLHRRAVVDQRTGLTNRLKALLKQYFPQALELCGEDLWRPLATAFLLKWPTLQSLRKARKESLKQFYYRQGSRSQTLIEQRLERIDKAVPLTEEIALLQSYTLRVQLLCKELQLLLKTLEQFDQQISKVFQQHTDRQIFEALPGAGPVLAPRLLASMGSERERFARPENLQSFSGVAPVTKQSGGKCYIHRRYCCPKFLRQSFHEYAKESILHSRWAAAYYGQQRNKGCGHHTAVRALAYKWQRIIWKCWQTRTVYKEAIYEAALKKNKSPLIGLLDQIELGKSPVKTRAKKS

SEQ ID NO: 124628 - protein, 399 aa, unidentified
MSNPQSLQLRVGVDVGSRCHSVAIGLSDGRLLEEFEIPHTAAGFREFFSRIEGRAKRHPYPIAVAMEGYNGHVRPLDSLVRARGWQLFNVNNLKLARFKEIFPAPAKSDRIDTRKNLELFQLRDHLPMAGDVLQEVMATPAENDILKRLSRRRRRLVDERGRVLNSIQADLQAVAPGLLQITRYVGNLWFLNFLTCRKDIRKLARLRRASLLKLPAIGPGYADCIQAWQRDACFGPDASLVSGMIRQDAMRIRQLNRQIKALEDETARIAATSTIACQLASIPGYGSVCTAELAGEIGTIARFRSEASLALYLGMAALDNSSGKFRGSKAPKHVNTRAKAAMMAAVDHHRKRVPQSERYYEKKRAEGKKHNQAIRALGRHLCRVIFKMLSEERPYWIDT

SEQ ID NO: 124629 - protein, 373 aa, unidentified
MNYTTVYVGMDVHKETFTLCCYTNEKEKAEYPQKVNGHYSKVLNYINAMRKHYGDDAVFVCGYEAGCLGFTLYHQLTEHNVDCVILAPTTMPQPQGKKKVKTDKRDAMLIARCLAHKDYSPVHIPTDIDEQVKEFIRMRDDHKLALKKVKQQIIAFCLRHDYQYTEGKSNWTEKHLQWLRSLEPDGMYAEILEEYLLTYEYLTSKLEMLESRIKELAELDEYKESVQKLRCFIGIDTITALSLVVEVGDFHRFATAGHFMSYIGLTPGEDSSGQNQNRLGITKAGNRHLRKLLSESSQCISRGKVGAKSVALKKRQQGNPPAVIEYADKANIRLRKRFYHLVLNKGKHRNIAIIAVSRELAGFIWGMMTEQFA

SEQ ID NO: 124630 - protein, 441 aa, unidentified
MAMRKRELTVMHPNAAGIDIGSANHYAAVAPDQSKEPVKEFGCFTEDIEAMADWLIECGVDVVAMESTGVYWIAPYEILESRGLIVYLVNARHVRHVSGRKSDVLDCQWLQQLMSFGLLSGAFRPVGEICALRAISRQRDTLLNEQARQVQRMQKALTQMNVQLTNVIADIVGKTGQDIIRAIVAGERDPHKLAKLRNYRIHASAETIAKSLEGNWRDEHVFCLSQALSLFDAYQALIVAVDAKLEEMIKPMRQHQEALAANKNKGRGKNAPTFDARNALYQWVGVDLTRIGGIDVSTALKVLVEIGPDLSKFENAKRFSSWLGLCPGTKISGGKKLSSASKRIPNRVAQALKLAAQGLHRSHCALGAYYRRMAARMGVGKAITATAHKLARLIFAMLTKGGEYVERSQEKYENQMHKRTVAYLKRKAAAFGFTMQPINAV

SEQ ID NO: 124631 - protein, 347 aa, unidentified
MLIIGCDFHPGFQQVAIFDNRTGKIQEKRLQHRAEAEQFYRSLAGQEVLVGMEACGHYPWFEGLLEELGIELWFGDAARVRASEVRKQKTDRRDAEHLLDLLRENRFPRIWMPSLEVRDVRQLLVHRHKQVQARTRTKNQLQAMALSCGLQKKRKLWTKAGREELEKLPLLPYAAERRKRLLEALDGLEVEIGELHRRVEEEARQRPEAVRLMTHPGVGAVTALAMVLTLGPAERFGSGKQVGSYFGLIPSEESSGGKQRLGKISKQGSWFLRFLLVEAGQTAARLDPQLKRFYRRLAVRKNRSIAKVAVARKLATRLYLMLREDWTYAQLGQAVMQVSPSHSVAGE

SEQ ID NO: 124632 - protein, 389 aa, unidentified
METRTVYNPPPAAPHDDAGRCVLAIELSKKSWIVAVNTPLSEKISRHTLGACDWKELLKLCERIRTRIARELRKDVELVSCYEAGYDGFWLHRLLEAHGIRNYVIDPASLQVDRRARRAKTDRVDVERLLRSLMAYLRGEPKVWSVVCVPSVAEEDDRRLHRERGRLINERIQHVNRIKGLLAIHGIYDYPPLRHDRMQQLEGLRTADGRTLSPRLKAEILRELQRLELVIGMIKTIEAERDAIASAKIETEHSSAKRIQDLAKIKCIGPEFATTLVGEVFYRSFDNRKQLASYVGLTPAHFQSGETCGDQGISKAGNAKARRVMIELAWLWLRHQPASPLSVWFHDRVGKLKGRIRRITIVAVARKLLIALWRYLETGLAPEGAILKV

SEQ ID NO: 124633 - protein, 402 aa, unidentified
MNCVGIDVSKGKSTIAVMRPFGEVVVSPFEVCHTASELSELARLLKSLDGETRVVMESTGNYHAPVAWLLHGAGLYVSVVNAMLVHDYGNNSLRRGKTDKKDAVKLANYGLDHWLTLPRYVPEEDARLMLKTCYRQYQQYSKVQTMLKNNLISLLDTAFPDANRLFTSPPRADGSEKWVDFVAAFWHCECVCGLSKKAFTAKYQKWCRKHGYNFSEDKALDIYVSACGRFGVMPKTKTAKLLVEQAISQLQTTSAALAALKQEMQSLAASLPEYPVVMGMFGVGPTLGPQLIAEIGDVRRFHSKKALVAFAGIDAPPYQSGQMDVRSRSISKRGSALLRRTLFLVMGVLLQCAPMDEPVYQFMNKKRSEGKPYRVYMMASANKFLRIYYASVKTYLDSLEHN

SEQ ID NO: 124634 - protein, 337 aa, unidentified
MKTIMIGLDLAKSVFQVHGVDVAGQVILRRRLRRGQVLGFFAKLAPAVVGLEACGGAHYWARQLSALGHEIRMMSPGYVKPYVKRNKTDGRDAEAICEAMQRPTMRFVAVKGEDQQAVMTVHRTRALLVRQRTMAGNALRSAFAEFGVVAAQGIKGLRALPAQLPRPTGIPPQAHAALAMLARQWQALDADIRALELAIVRAARSDEQSRRIMHIPGVGPLTASAVMAGVVDMRHFRSGRGFAAWLGLTPRQNNSGNRCRSGGISKQGDRTLRSLLVLGATAQLRYRNRLKDPWLSRLLMRRPVKVVAVALAAKTARIIWALLTKGEDYRAPAQLAA

SEQ ID NO: 124635 - protein, 370 aa, unidentified
MIKLARAMQYLINTELSSYEETRCQFNGGRCAIKLGIDVHQDFYVVVEQVGGSNPKPPQRFGKQAFLHWAAKLKQSGAEVHAVYEACGLGFSLQRQLALLGIDCHVVCPQKLDERNKRVKTDGLDAKALCLKLDRFVQGNRDALAIVRVPSEEEERSRAIHRQRQQLVGARKRLGAQGRSLLVNHGLVPVQNWWKPRTFAALPVPQWMRELLLNSQPILLALQQKIAALTLQLQSAAAPNQPRGLGKMTSVIIDREIGDWRRFNNRRQIASYTGLCPGEYSSGNTRLQSCVTKHGNPRLRAALVELAWRLVRFQPNYKPVVKWRQILVKGALATGAARKKAIVAVARQLAVDLWRIKTGRLTAEQLGLTI

SEQ ID NO: 124636 - protein, 320 aa, unidentified
MSATSVVVGIDVAKAYVDVAVLGGQFGARRFENEAEGHSALAATLQALAVALVVMEATGGYEAALACALQAAGLPVAVVNPKQARDFAKAMGRLAKTDRIDAGMLAELAAVLVRRDDLARFIRPLTDAQQQALAALVTRRRQLLTMLLSERQRLQLAIPLVRPSIAAMIQAIRAQLDDVEAQMTGHVRTHFAELDTLLRSVSGIGPIASATLIAELPELGRLNRREVAALVGVAPIANDSGTARGRRRVQGGRFEIRRVLYMAALVAARHNPVIHTFYQRLIDAGKLPKVALVACMRKLLTTLNAMVRTNKPWDSSFHHA

SEQ ID NO: 124637 - protein, 348 aa, unidentified
MVVIGVDSHKRTHTVVAVDEAGRKLAERTAPATADGHLELLGWSRTWPERTWALEDCRNLTRRLEADLLKAGEAVRRVPTKLMAGARRSAREPGKSDPIDALSVARAALREPNLPVARLDGVERELRLLVDYRDVLISDRTGHQSRLRWSLVELGIPEPPSRKLTVPVVLAGVDLQLVGRTEPCARIARDLVARISEMTGAINCLARQIGDLTSTVSPTLLELVGCGPLSAAKIVAETAGIGRFRSRAAFAAHNGTAPIPVWSGNLVRHRLNRGGNRQLNAALHRIAVTQLRCPGPGQAYVAKRLAAGDTKTEAIRALRRRLSDEVYRRLQADEAARAATESVARAAA

SEQ ID NO: 124638 - protein, 350 aa, unidentified
MMIIGCDYHPGFQQIAFVNTETGELGEQRLEHREKAEQFYGDLKGQRLKVRVGMEASGHARWFERLLTDLQFELWIGDAAAVRTKRIRKQKTDRQDAQLLLNLLMENRFPRIWVPDAENRDLRQLLWHRHRLVQMRTRVMNQLHVVALNEGLRRKKALWRPAGRSELESLVLAPWASRRRRDLLDLLDQLTPKIHELTRTIEEEVENRPVARRLMTHPGVGPLTALAFELVIGTPERFHCGKQIASYVGLVPSEESSGDRRRLGHISKQGNSLLRYLLVEAAQVTVRSHPQWRSKFFHLAMRRGRKIAKIAMARKLAVHLYWMWRQGRDYERFEKLGSHAGEPGNRHGVQ

SEQ ID NO: 124639 - protein, 319 aa, unidentified
MAQNDLVVAGIDVAKDKVDVCIRSPSLKRTFVNTIEDRCELTSWLRRNKVGKAVMEASGGYEREWAKVLRNAKIEVRIVDPKRVRSFAQSAGRLAKNDTIDAEMIAWFAETFGEVPGQTYDAAREQLHQMVHARQALKDMQSKLTSQGEHAAPAAVQRIHARIVKTIAVELVKIEAEITALIQATPHFAELAEIIESVPGIGRVTSAALIAAMPELGKASDKIIAALLGVAPYDDDSGRRRGGRQIRGGRRRTRNVFYMACLGAATQHNPVLKAFYDRLVAKGKLKKVALTACMRKLISILNIMIERRQKWDAKRYAVS

SEQ ID NO: 124640 - protein, 427 aa, unidentified
MNYTQNSKIRSITESTLIIGVDIAKHVQYARAFDYRGIELGKIKSFENTAEGFLMFQQWAKAIATENNKNSLIVGMEPTGHYWFNLAYFLKDMDIRVVLVNPSHVKKSKELDDNSQTKNDRKDAKTIAKLVIDGRYSVPYVPEGIYSEIRTAMNMRDDISNALVRIKNKIAQWNDKYFPEFNEVFCNWEGKAALITLKNFPTPEKVIAKGSVQIAMEWKKEIKRGVGLSRATKLVEAAKVSVGIKEGLRLAEKELKLILDQYDLYMNQYKELESEITELTLQIPGAREMLTINGVGIMTVAGFIGEIGDITRFNHPSQIQKLAGLNLIETSSGKHKGKTSISKRGRSKLRSLLFRVTIPLVSKNNEFKLLHKYYTSRIENPLKKKQSLILLSCKLIRIFYAILTKKIKYNPEKLIKDANIVDLPNAA

SEQ ID NO: 124641 - protein, 349 aa, unidentified
MNEPYAGRQIVGFDLHRRRSVLVRMTEAGERLETVRISNDPEYLREVMTRAGEAPEVVLEACYGWYWAADTLAELGATVHLAHPLGVKMFSYRRLKNDERDAADLADLLRMGRLPEAWIAPPATRELRGWVRHRAKLVGLRSNLKCQVHGILANAGITVPMSDLFGASGQRLLATADLATESRSRIDSLQRMITALDFEVELFAKPVAGRLRTHPGYQAIQLIPGVGPILAAVFVAEIGDITRFRRPEQLASWAGLTPKHHESDTTVHRGRITKQGSRLVRWAAIEAVQRLPGHTRIGQVRDRVAARRGRNIGVVAAARELTELVFYGLRDHRVHALAVHSPARTPLPA

SEQ ID NO: 124642 - protein, 455 aa, unidentified
MNRKRSKARIDRKMLMVHPNAAAIDVGATMHMAAVRADRTPEPVRSFGTFTTDLHRLVDWFTECGVETVVMESTSVYWIPIFELLDARGFTVFLVNARDAKHVPGRKTDVSDAQWLQRLHSYGLLRASFRPKGQIAELRAYVRQRERLLEYAASHIQHMQKALTQMNLQLHHVVADITGATGLRIIRAILAGDHDPKVLAQLRDYRCHARAETIEKALTGSYRPEHLFALEQALALYDAYHEKVSACDVRIEAVLKELSIGRGRRSDSLLSPRRPRTNPVNGLAFDVRAALFALLGKDLTQIDGLGPYLSLKLVAECGDDLSAWASAKHFTSWLGLAPSNKISGGKVLSSRTRRCGSRAAALLRLAAVTVGRTDTALGAFYRRLSARVGKAKAVTATARKIAVLFYNAVRHGMEYVDPGASYYETRYRTRVIDNLHRRAKAFGFVLQPVEPSAVS

SEQ ID NO: 124643 - protein, 366 aa, unidentified
MKIIHWIGIDDHADKWTIAQYKGNEAKPAKEFELVPDESGYRKLIKFLKELGGEVRVVYEAGPCGYELYRRLKKAGLSCDVAAPSLTPRKPGDRVKTNRRDAAKLGDYLRSGSLTMIVVPDEGRESLRDLVRARHAVQKDVVSIRNQIGKFLLRYGYRYREGKTAWSQRFWAWVGKIKLTSEYGQFVLDEMIRSHSQRLEQRARYDNAIEAAAKKPEYALYVAAFSVLRGIDGLSAMTILSELGDLRRFPTAPKLMGAVGLVPSEASTGETITRYSITKTGNAHVRHIAVEAAWQYQRRVTNGPTIKGRRKDQPQALVDIAERCDLRLNRKFHRMTSRGKRSTVAAVAVARELMGFIWAIGQIVHP

SEQ ID NO: 124644 - protein, 485 aa, unidentified
MHLPSPVRLLGIDLGVISDHTAVVVDGTGRVHARRRARSTVMSLAALEAAALATAEAGTHLVVVIEPTGPAWRPVAVFYGRRGHTVLRVTSAKAADLRRFLARHAKSNGIDAETLARLPLVAPTGLTAVEFGSPARASLDRRVRAVARLTAEIGRRKTRIRTLAQQLVPMIGGALSEGLSHTDLAVLECYADPRALLAAGPARLTRLITTTSRGQLGAAKAQALRTAAAEAVALWEGDRAAALDDLAAEVASEVRLVRAAEAERARHEHARDAAFAQVDPAGLAASLPGLGPVGTTQLVATMGRPGRFPNGGAFKAFTGLTPRANETGQTDRKHQPMTKAGPRLLRSQLVQSANTARKLDPQLAAVYHAQMTQRGATHRKALCVVAARLAERCWLTLARGEPYVICDLEGRPVTPEQARRLIAERFTVTPEVRRRRRSTKQAGKAPHKALKAQGKSQREAGHEATFPAASLDAPPIIVNNSHAPV

SEQ ID NO: 124645 - protein, 336 aa, unidentified
MSHYCGIDLHSNNHVVVVIDERDKRVFDKRLSNDLSATLNVLAPYRKTLKGIAVESTFNWYWLVDGLQDNAFDVQLVNTAAVKQYDGLKFIGDHGDAFHLAHLMRLGILPTGYIYPKEQRAIRDLLRRRMSLVRSASTQLISVQSQIWRSTGIRIKSGELRKPDFSPPHLDKYTLQAVAAGLMVYQAIQQEINVLEQSAHQAVKLTDAFKILQTVTGIGKILGLTIMLETGDIHRFAGAGNFASYCRCVDATRTSNGKNKGTGNAKAGNKYLSWAYSEAAHFAVRYEPLAQRFYERKKAKTNGIIAIRAVARKLARATWMMLKHQVPYDAKLMFPN

SEQ ID NO: 124646 - protein, 402 aa, unidentified
MNAVGIDVSKGKSMVAIMRPFGEIVSTPFEIKHTASDIHSLVELINSVEGESRIVMEHTGRYYEVLAHQLLEANLFVSAINPKLIKDFDNDSLRKVKSDKADAVKIARYALDKWQNLKQYNVMNELRNQLKTMNRQFGFYMKHKTAMKNNLIGILDQTYPGVNTYFDSPARSDGSQKWVDFASTYWHVDCVRKMSLNAFIDHYQNWCKRKKYNFSQSKAEEIYGKAKELVPVLPKDAITKLIIKQAVDQLNSASTTVESLRTLMNETASKLPEYPVVMAMKGVGTSLGPQLMAEIGNVSRFTHKSAITAFAGVDPGVNESGTYEQKSVPTSKRGSADLRKTLFQVMDVLIKTHPQDDPVYQFLDKKRAQGKPYYVYMTAGANKFLRIYYGRVKEYLASLPES

SEQ ID NO: 124647 - protein, 317 aa, unidentified
MTDTETGAFIGIDVGKMYLDIAVWDSEVYWRVSNDGAGIEKLINRLQKLSPVLIVVEATGGLELPVVTALALAALPVAVVNPTRVRNFARSTGQLAKTDKLDARVLAHFAQAVRPQVRPLRSEEQEYLAALVTRRRQVVQMLTAEKNRKSSARPQIRKRVQKHIDWLTEELRALDEDIAKFIHSHPLWREKEALLRSVPGVGPVTACTILAELPELGTLNRQKIAALVGVAPLNKDSGRKRGKRRVFGGRASVRRTLYMATLTATKFNPVIKSFYENLLRRGKEKKVALTACMRKLLIILNSILRHQRPWQVRPARP

SEQ ID NO: 124648 - protein, 431 aa, unidentified
MLGGNQEKLMSQNQPEIQYAAFVSIDWADQKHVWSLQEANSSTREHGEVGHMPEAIEAWIAQMSQRFAGRPIAVAVEQSRGALVFMLSKYEQLHIFPVPPAMTANLRKAFYSSGAKTDPADTDLLQDVLQMHREKLRRLSPDTEATRLIQNLVEERRKLVDEKTAQSNRLEAHLKIYFPQIPQWFGDVDSPLVCALLVRWSALEALQKARPDTLRSFFRKHQCRKEELIESRIKAIGEAMPALKDRAVVEAQLAVVKVLVQVIQVLHQGIEDFNRQIQEAAAAHPDFFIFESLPGAGAVMAPRLLAAFGSQRERYRNAAEVQTLSGIAPVTESSGKSSWIHFRFACSKFVRQSFHEWAALSITQSQWARAYYELQCRRGKRHHAAVRALAFKWIRIIFRCWKERVAYDEKVYLAALAQHNSPLLAATKIAL

SEQ ID NO: 124649 - protein, 317 aa, unidentified
MAMQVGKLIVGADVAKAELVIHHDDRDEIIKVKNTKPEIKKWLKQQPLNTAIAVEATNVYHLDLVELAHSLGFEVYVIDGFQLSNYRKSVGVRVKTDPTDARLLSRFLRNEGEDLRPWTPPPAVYGKLQSLLRRRAALVTARTAMTQSWANEALLKAAFTTFVKSIDRLDLLIQKKIKEVLREAGLHEQVARCQAVEGIGFLTATALVMAFMRGEFKSSDSYIAFLGMDLRVIDSGQKNGRRRLTKRGCSEIRRLLHNAAMSASRTATWKGIYEQHRNAGKATTQALVILARKLARVAFALMKNQDEYVTKGGKAAC

SEQ ID NO: 124650 - protein, 345 aa, unidentified
MKIIGCDFHPSFQQIAVCDAETGEYQERKLSHGDGEAERFYRELGEPALIGIEATGNSQWFLDLVQQLGHEIRVGDAAKIRASYVRKQSTDKRDARHILTLLLERRFPRLWTPSAAMRDQRQLLRHRDKLVEIRTKVKNSLQHLAMNRGMQKKSRLWTRSGMEQFQQLTMAGWAGTRREDLLHLLKELNPQIEQLDQAVKQAAEQHPQAQLLMTQPGVGPVTALAFVLTIGDVARFAGSKQLTSYLGLIPSEHSSGGKRHLGAITKQGNRFLRKLLVEAAQTTVRKDEGFRKEYQHRCRHRPKGVAKVAAARKLAVRLYWMLRSNVSYPEIARVESNPRVPLGDV

SEQ ID NO: 124651 - protein, 372 aa, unidentified
MNYNTVYVGMDVHKESFSLCAYTIEAEKASHYQRTEADYKKVLNYLEFLRTIYGDDANFICGYEAGCLGYTLYHQLTANNVKCIILAPTTMLEQRSKKRIKTDRRDAEIIAKCLAQHNYSPVHIPTAKDEETKEFLRMRDDHKLALKKVKQQILAFCLRHNYRYDGKSHWTAAHLKWLKALTPEALYKEILDEYLLTYQTLSDKIERLDKRIEELATQDEYKEAVKKLCCFIGVKTHTALSVLVEVGDFKRFASAQHFASYLGLVPGEDSSGDDQNRLGITKAGNRHVRLLLTEASQCYARGQVGFKSKELKSRQSGNTPAVIAYADKANERLRRRYYKMVLNKYKKHNVAKTAIARELACFMWGMMTDNIA

SEQ ID NO: 124652 - protein, 404 aa, unidentified
MEVLYPRCCGLDVHQKTVVACIKTPDGKETKTFKTMTGDLVELADWLAAKGVTHVAMESTGVYWQPVYNLLEQLSFTLLVVNAHHIKTVPGRKTDMKDAEWIAELLRHGLLHGSFIPNRSQRELRELTRYRRSLVQQRAQVVHRIQKLLEGANIKLTAVASNVMGVSGRAMLEAMANGEKSPQVLADLAKGRLRSKLRDLEEALRGLVGPHQRMLLQSQLRHIDFIEAEIGRVDQEVRKRMCSYGDALNRLDEIPGMGRRSAEEILAEIGADVSRFPSAAHLASWAKVCPGSYESAGKRKSGKIGHGNAWLRSSLVEVAQAAGHTRDTYLSARYHRLASRRGNKRAVIALAHTILVIVYSLLRYGRRYQDMGSNYFDERDRHNTLRRSIHRIERLGYQVVLQCA

SEQ ID NO: 124653 - protein, 448 aa, unidentified
MPRTEYPAQAAAQADPATPFDMDAALFAALELSLSSWVVVASAPGEDKASKHKVDACDGPGLLSLLRRLQARAERRCGGPVTVVAMQEAGRDGFWVHRLLEADRVRSYVVDPSSIAVNRRSRRAKTDRIDAEAMLRTLMAWARGERQVCAMVRAPTREAEDARRLGREREALLAERIRHANRIKGLLATQGVFGFEPTGRNRHTRLAELRTPEGCALPPRLLAEIRRQVDRLELAMQQLAAVEDDRDAAFAAERVAVPAVHGVDEAEMANGGEDTSAAGEVLPGGEGSGARLLRLRGVGPETASVLACEAFFRDFRNRREVASYAGLAPSPWQSGGVDHEQGISKAGNHRVRRIMGQLAWLWLRNQPNSALSAWYRERVRDGRGRMERIAITALARKLLVALWRFVTQWPRTYRHGAKACSHGLTRRPAYTTQSAVRPSAGPLIRGGW

SEQ ID NO: 124654 - protein, 348 aa, unidentified
MIIIGVDFHPEFQQIASVDTETGEFQERRLGHREEGETFYRALAGQKVRVGMEASGHARWFERLVAELQFELWIGDAAEIRTKRVRKQKTDRQDAQLILRLLLEDRFPQIWVPSWENRDLRQLLWHRHRMVQARTRIMNQLQAVALNEGLRCKKRLWRDRGRQQLESFRLAPWASRRRRDLLELLDQLNPSIAELSQAIEQEVEKCSEAQRLRTHPGVGALTALAFVLIIGRTERFHCGKQVASYLGLVPLEQSSGNRRRLGHITKQGSSMLRFLLVEAAQGTVRSVPEWRSKYLHLMMRRGRKTAKVAMARRLAVRLYWMWRKKWDYEQVKKFGSHAGQPGNRDGVQ

SEQ ID NO: 124655 - protein, 442 aa, unidentified
MGAQSTVAALTETRGGPSLAGNRLYVGIDVGRHEHVVAAIPRERMENGSWERAAVRRVSTSGRGFRQLTEWLQSLGFALQEVEVGCEPTGGWYAQTVAAWLERHGYVVSWLQNAALHERRELLIGKQVKTDALDARLIARLLYERDCFGLRRGFLHHPPRSTDALRMLVRNRSKLIEQRTRYRLQLTAIEDVLFPELKDFFKNSITGRATRHLLEAYPTPDLVAAAAPADLHRVLVVEGRARRLGAKLMDLQRAAYDSAGLVEGIEPILHAQKWLLAELCLVDDQVGYIEASIKSALLAWPAQERAILDSLPGMSSMRQAVLLSTIGDLFSFSDDRQLRKFLGWYPELRESGTSTSKHRLGLSGNRLARRELWLWSLQLLSPAFPETPFRAYYRRLRVRGMAGQVAMGHVAGKLISVLFFCLRRGQPYDPGRHGRDLGLGDA

SEQ ID NO: 124656 - protein, 329 aa, unidentified
MVDDAGKIVREVKVASEPEALLAVLKNLAYHFKRIGLEAGPLSQWLFSALAEAGLPVICVETRHMQAVLKAQINKTDRNDARGIAQMMRAGLYRPVHVKTTRSQKLRMLLTHRKLLQSKAIAIENDLRGTLRNFGLKVGMVGKVKFEARIRELVENLLPDLAVLVEPMLIVRRTLREQIVILHRRLLAIVRDDEVCRRLMTTPGVGPVVALTYRATVDVPARFRKSKAVGAVFGLTCAKYQSGEVDRNGRISRCGDEMMRVMLYEAAQSMLRSKKWSWLKAWAMQIARRRGMKKAIVALARRLAVIMHRIWVDGTEFRWTREQATAAAA

SEQ ID NO: 124657 - protein, 341 aa, unidentified
MEKFIRTAIDLGKNYFQVHGLESEGGRSISRKVKRSRMHEVYSRIEPCRVGMEACGSAHYWARQLTAMGHEVVLIPPAYIKPYVKRGKNDAVDAAAICEAMSRPDMRFVPIKSADQQAVLMLHKTRELLVKQRTMAVNALRGHLAEFGIVAARGIGRVEELLALAEADAALPHIARAAVACMAQHLEGLDLSLETMEEEIAKAHRQNPTSRLLDEIPGIGTLIASVTAASVPDPGVFKSGRDFAAWLGLTPRQNSSGGKEKLGAITKQGNRYIRKMLVTGATSVLRVAGKRKGALADWINALRARKPERLVAVALANKLARICWAIMTTGEGFRTEMYVKA

SEQ ID NO: 124658 - protein, 340 aa, unidentified
MGAELYCGIDLHSNNGYYGIVDKDGKRLLDKRLPNELGAVLSALTPYKKMIKSVAVESTFNWYWLVDGLMEEGYPVKLANPAKMTQYEGLKDANDKTDCFFLCEQQRLGVLPIGHIYPKVERPVRDLLRRRTLFVHQRTTQTLSLQSMVQRLSGTKTDMRSLLKLEPEEFADLLKDEDSMFTATQNIQTISFLILRIKAIEERVLGKIKLKPEFEKLLSMPGVGKILGMTIMMETGDVGRFPEVGNYTSYCRGARAIHTSNGKKKADNNQKNGNKYLSWAFVEAAHHCMRVCPRAHAFYERKKAKRNAAVAIKALAAKLSKAAYYIMRDQVMFDEKKIFG

SEQ ID NO: 124659 - protein, 359 aa, unidentified
MGLASWLVAGLLPGVNREPLKKIAPDPEVLLRLLCRWRDEAIKAGKEITRIAVAYETGRDGFWLARWLRDRGIDAYVIHATSVAISREHRRAKTDRIDTAMLKRGFLGWLRGERGHCSMALIPTIAEEDAKRPHRERESLVKERTRTINRMKAILAQFGVRNFKPALRKAAEKIAEVRTPEKVPLPPNAAAALRRHIEHFRLTNEQIKAIEKIRLQRLRQNPTDKFNAMVFLLVRIIGLGVETAEQLVHEILFRNLRDRKAVARYSGLTGSPDESGARHREKGLSRSGNERVRKILIQLSWRMLRFQPNSGLVRWFKARTASSRRSRKPMIVAFARKLIIALWRYANTGLVPEGFQLAK

SEQ ID NO: 124660 - protein, 443 aa, unidentified
MAMRRRGFEVAHPNAAGIDVGSASHWVAVPTGSDEQPVREFKSFTEDLQQLADWLIACGVNTVAMESTGVYWIPLFELLEARGLSVHLVNTRHVKNVAGRKSDVLDCQWLQQLMSYGLLSGAFRPREQICALRAVSRQREMLLSYQGRHIQHMQKALAQMNLQLTNVLADIAGKTGQAIIRAIVAGERDPLVLAKFRDPRVRASESDIAKSLCGTWREEHLFALKQAVALYDAYAERLLECDRQLQQMLGLLQRYAGDVGKPKRRSQPKNAPAFDLRNCLYGVCGVDLTRIDGVDVTTALKVICEIGTDMSRFKSGKHFASWLGLCPGTHKSGGKVLSAASKRTTNRAAQALRMAASALRTSQSALGAYYRRLCARFDRPKAITATAHKLARLIYTMLTKGTEYVDQGQTYYEQRYRERVIHHLRQKARKLGFSLAALEPQST

SEQ ID NO: 124661 - protein, 356 aa, unidentified
MIEPIVKCAAGLDVHQGSVTCTALAEESTGAPRRDTRQYATFPRRLKELGRWLKERGVELAVLESTGIHWKSVYAALEEAGIQTYLVNARHVKQVPGRKTDVADSEWLAELARCGLLKASFVPPRDLRELGLLTRYRRKMSGYLAGEKNRLHKVLEDAGMRLGCVVSDIDGVSAQRMIKSLAAGEKDPAKMAALAVGSLRRKQEDLVLALEGDLSDRHRFLLQRITRHIHWLEEQIQELDVQIVAAMAPYQEEWRLMQTIPGIDHLSAAMLLAEFGPDMGRFGSKARLSSWAGMCPGNHESAGGGTRPHPAGQQIHPATLVRSGPQCGEDEQPVQGVLPGARHPTGDQASRDRRGP

SEQ ID NO: 124662 - protein, 350 aa, unidentified
MQGTGRWIGLDLSKETYEMCYFDQKGKVAGSGGLTTKAGRAKLYAKLKPEDIVAMEANSLAFVMEREMRAIGCTVVILDASQLSVIYASTKKTDKEDAVKLARLIKIYEKEDLPTVDVPTDKEWYRRKLIKEYKTLKADRTREINRLHALFLQCGITTMKRSNLQTDVNRQEVLPQLFGYEAMQAKRVCDRLTVLDAQIEELDQLIKKECKEDKDIQRLQTIPGVGDKTALAFAAYVGDGKRFSNGDQVANYLGIVPRVDCSGTINKYGHITKKGNGVVRSLLYQAAWAIVRSKHGGALKAKYFYMTEHGKGKKISITAIARKMAKLLYVVMKNKQMVYQENPVSALQAG

SEQ ID NO: 124663 - protein, 348 aa, unidentified
MTLKYSVGLDISSKKIDASICTIDQDQSIKYKSSCSFSNTRTDFLKLCHWINKWAVDKSIPVVVCLEATGVYHENCAYYLSDNSFQLSIVLPNKAKKYLQSLGLKSKNDKIDAKGLARMGAEQKLSLWTRPADVYVKLRSLTRQYQSIQETITAEKNKLHAEELSAISSKEVIKQIRSLIRFLENQKIEIEQAISSCVKSDKEMKLKIDNICQVRGLSILSVATVIAETNGFDLFNNYKQVVSYAGYDVVENQSGTHHGKTKISKKGNSRIRRILHMPSLTAIGSEGTNFKQLYLRVYERTGIKMKGIVAVQKKLLLTIYYLWKKNVPYEINILKEELVSPSPNTMLV

SEQ ID NO: 124664 - protein, 388 aa, unidentified
MQVVADRAAAPTAIQTDLRAIFVSLELSRSTWLITSLSPGGGEKMSKHSVQAGDIAGLLKRFAQLKEKARARTGRDFPVITIQEAGLDGFWIHRVLQSEGIESHVVDPASIATSRRRRRAKTDKIDGETLVRTLLAYKRGEPWVCAMVKAPTVEEEDRRRLCRERKALIEERVLHVNRIKGLLFSQGVSGYEPLRRDRRRRLDELQTGDGRPLPKHLKTQIGRELDRLELLLEQIKAVEAERDALLGARQVATPAPAAMLLNIKGIGPEFAAILWSEGLFRHFDNRRQVASYAGLAPTPWQSGSVDREQGVSKAGNPRLRTTLIQLAWLWLRNQPQSALALWFKDRVSRNGGRLKKTTIVALARKLLVALWKYVTAGVVIEGAIVKSA

SEQ ID NO: 124665 - protein, 344 aa, unidentified
MSKHSMRSGDVPALLGRFAQFREKAQARTGQRFPIIVIQEAGLDGFWIDRVLQKEEIESHIVDPASIATSRRRRRAKTDKIDGESLVRALLAYKRGEPRVCAMVKVPKPEEEDRRRLCRERKTLTAERVSHINRIKGLLFSQGITGYEPRRRDRRERLEELQTGDGRALPEHLKAQVRRELDRLELLLEQIKAVEAERDVLLAAEHAATPAPAAMLLEIKGIGPEFAAILWSEGLFRHFDNRRQVAAYAGLAPTPWQSGSVDREQGVSKSGNPRLRTTLIQLAWLWVRHQPHSALTQWFEERVRRNGGRLRKTAIVALARKLLVALWKYVTAGVVIEGAAMKTT

SEQ ID NO: 124666 - protein, 412 aa, unidentified
MEVLHAHCAGLDVHKDAVVACARHMVDGAVKREVRSFKTTTKELMALSAWLSVEGCTHLVMEATGVYWKPVWHILADGEFELVLANAAHVKNVPGRKTDVNDATWLAELMAHGLVRASFVPDEPTQEMRNLLRTRKQFMRERSSHVQRIQKTLEDANIKLDSVISDVMGLSGRRMIEALIAGETDPAALAALAHRRIKATPAELEAALRGRVTDHHRFMLGLLLQHIDAIDAAITQIDQEVDGKIEPFRTAIEILSTIPGIHQLSAAVIVAEIGIDMARFPTEAHLISWSGLCPRNDESAGKRRSTRMRKGAPWLKTTLIQCAWAAARKKDSYLQAQFHRLRARRGAKKAIGAVAASILTAAYHMLKNGTLYHDLGPDHFDKRAKAKHVDRLVHRLRNLGFAVALAPLEAAA

SEQ ID NO: 124667 - protein, 385 aa, unidentified
MPQPKFNPSRSLVALDQHKTVIAVVELSLASWLVGGIVPGIERDPLKKLSAPDPEALLRLLYRWRDEAVRAGQAVTRIVVGYEAGRDGFWLARWLRAHGIEAHVMHPTSIAVSREHRRAKTDRLDIGLLKRALLGWLRGEEQHCSMVAIPTAEEEDAKRPHREREQLVGKCTGITNRIKAICIRHGIRGFNPKLRRAAERVSVLHTAEGKPLPPNTLAELGRELEHLRFIKEQIKQIEKTRLAQLEQAPREGLNTTIRDLSRVRGLGIETADMLASEVFIREYRHQRAIGRYVGLTGAPDESGTRRHEKGLAKAGNARVRRALIQLAWRFRKHQTDCGLVQWYEARVAAGKKPKTMIVALARRLLIALWRFVTLGEVPEGVILVN

SEQ ID NO: 124668 - protein, 361 aa, unidentified
MSNGSRKQMKMTAGVDLGDKYSYLCLIDTESGEVIEEGRLRTTPDDLRRRFEPEQQLHIAIEVGTHSPWVSRILEECGHEVLVANARKVRLIYSNKRKSDKLDAEKLARLARADPELLYPVEHRGEDSQAHLALIHSREALVRSRTQLVNHVRGTVKSFGYRLPKCSATSFHKKVRDQLPSEFVETLGPIVEIIGSLTEKIKDYDRRIEELAAERYPETKLLRQVPGVGPLTALTFVLTLEDPQRFAESRSVGAYLGLVPGTDQSGEQDPQKRISGEGDEMLRRLLVGSAHYILGPFASDSDLRRHGEKIAGRGGKNAKKRAAVAVARKLSVLLHRLWVSAEVYEPLHNARCLGVQGEEVA

SEQ ID NO: 124669 - protein, 364 aa, unidentified
MEERKTKTRFVGIDLGKRTYQMAAVGKGGKVTMSNGTTYTAGRQGLYKKLRAEDKVALESCSLAFIMAKEMEAAVGCKVYVLNPGRLSIIYKSMKKTDKEDALKLAHIIEDFAEERLPVVPVPSEKEMNRRKILANSRRAQNNRTRLINLLHALFVAQGITSKVRKDLAEESVRKEAVKELTGIERDEAEYLVQCLALCEKRIEKLDQMIAEESAGDEEIERLQSIPGVGPKVAFAFVSHVGAARFENSGQLSNYLGLVPRVYMSGDTVRYGSITKRGNSYVRALLVQGSWALVRSKADGKLKELYEYMTIEKSKNKKKAIVAVARQLAEMMYTLMRDKTRYVSRKFKPGKEAAVELAQLAMSA

SEQ ID NO: 124670 - protein, 409 aa, unidentified
MEVVHARCAGLDVHPASVVACVRVADGRRVERPLKSFGTTTQERLRLVAWLESHGCTHVAMESSGGYWKPVWHVLEGHFELVLANARHIRNMPGRKSDVNDVTWIADLLAHGLIRGSLVPPTEVRELRDLTRTHKQLTRERAQHVQRIQKVLEDANVKLTGVVSDVLGQSGRAILEAMVAGERDPERLLERTSGRLKASHAVLEEALRGNVTDHHRFMLRLPLGQIDALQAAIAALEQRAKELLRPFRDVVERLTSMPGMSVTSAHVIVAEIGLDMSRFPTAGHLRSWAGLCPRLDMSAGKRLSNRTHRGCPWLKTLLVQSAWAAMRHREGYFHAQFLRLKSRRGPKKAILAVAASMFSAVYYMLRDQADYRDLGEDYFHRRDRTRLARNLVKRLRELGVEVHITPVAA

SEQ ID NO: 124671 - protein, 344 aa, unidentified
MSNLDTCGIEVSAKELVVSLRRQGDLEPLRNFTNTPEGHMIILRYLRRAGRVVRVCMESTGLYGLDLALALSGQEGIEVMVANPRAVRHFAQAMMKRSKNDQIDAGVLEQFALHMPFKPWQRPSVAVLALHALARRLRELVEMQTAEKNRQHAAGLSQAIPAVVRRDLARSLRAQERAIERLTRQARKLIAQDPQLAERFELLDSVPGIGETSAVQLLGELGVLAPDLQARQWVAYAGLDPRQYTSGTSVHRKPRISKAGNKHLRHALFMPALVAVQHDPHLRAFYQHLLAKGKYKMQALVAVMRKLLHALHAMFKTHQPYDGSKLFRLNADAAQEVTHVLVAS

SEQ ID NO: 124672 - protein, 423 aa, unidentified
MNELTLCVGADVHLDEIVLRAVDKSDGHEVLERFHVTNNLPGAQSAATTLAQAAAQGQYTHLEIGWEATGLLWVPFHRFLSTSPLLRPFTPELVCFNPKLVANFKEGLVLRRPKNDERDAWDIAARVRFGEWPVSYVPADYWQGLRRLTRYRYQLARNLSREEMRFQSYAFLKASDWKRVKPFSSVFGATSIALLTEFTVAELTAMSHDQLVEVITHRGHGRFEDPTATARAVQEALRTSYPIDPHMDEMVTATLATGWEHIRYIKRLMKRLDQHIAHYITPVPNPLITVKGLGAVITAGILAEVVDITRFPEHKHVAQYIGLTWEKRSTGNFVSQNTRLTKVGNVYLRYYAILGAEQLRRHNLEYQAYYWRKYQEVAKYQHKRALVLTARKFVRLVHALLTKNQPYVMRHAAPESEELPESV

SEQ ID NO: 124673 - protein, 369 aa, unidentified
MSQNILFIGMDVHKESIEIAIADGANTEVRRYGKIGGTWDAMRKTLRKLVSLGKPLHFCYEAGPCGYELYRHLVSEGHDCWVVAPSLIPKKAGDKVKTDKRDAMQLAKLFRAGELTPVYVPNREDEAIRDLSRAREDTMLVQKSARQRLKSFLLRHDIRYEGKTSWTEAHLRWLADEVRCPSPAQQIVFQEYVNTVTEAQHRLQRINEKIERFVKDWRLYPAVQALMSMRGVKMIVAVTVVSELGDLSRFDNPKQLMSFLGLTPSEYSSGGRQTRGRITKTGNGHVRRILIEAAWCYRYPAKVSPEIQKRQETIPLPIRDIAWRAQLRLTQRYQHMQKKGKPHNVTVVALARELAGFMWAIANKVKYPR

SEQ ID NO: 124674 - protein, 355 aa, unidentified
MTSTKYIGMDVHTESISMAVRNSVGKVVMESVIETKASMILQFIEGLRGDLHVTFEEGTAAAWLYDLLKPHVARLVVCNPRRNALLKVGNKSDRIDARKLSELLRGNQLHPVYHGEHGLRALKELVRSYLTISKDLARVMTRVKALYRSWGIPCSGTQIYSQLHRVTWLSKISEPGVRLRAAFYFQQLDALRTLRQEVRQELLAESHKHSAWKRLCGIPSIGPIRAAVALGVLQTPHRFRTKRQLWSISGFAIETRSSADHRHVNGQLQKVKKRVSIRGLNQNHNHDLKNLFKGAAVIASTKPGPFQEFYTALLAKGIRPEMARLTLARKIATIVWIVWKRGVSFDAQYLKPQTV

SEQ ID NO: 124675 - protein, 459 aa, unidentified
MSKKKKRKYSVKELRALEQINLNAAGIDVGLESLYVAVPTGRDEESVREFGTYTPDILEMVAWLKQCGVETVAMESTGVYWIPVYEMLESAGFEVYLVNARHVKNVTGRKSDVVDCQWLQQLHTYGLLQASFRPAEEIAALRAVVRQREMLIQYRAAHIQHMQKALQQMNLQLTQVLSDIVGVTGMKIMRAIIAGEYDPHKLAAYRNGNCKHSEADIAKALTGNYRPEHLFALKQAVALFDFYGQQIAACDVQLETMYQQLEPAAAPVADLAPQQQKTRRKNQTHFDLRKQLHRLLGIDLTEVDGFDSLTVQTLVSEIGTDVDAWPTIKHFTSWLALSPNNKITGGKVRGRHTKKSSNRANTAFRLAAQSVARSDSAVGAFYRRKRAHLGPAKAIVATAHKLARIFYVILQRREPYQDPGASYYEEQYRQRAIRNLQRKAAILGLQLEPVHSTTQTGVS

SEQ ID NO: 124676 - protein, 412 aa, unidentified
MTITCGIDWAENHHDVALVDETGQLVAKRHINNDAEGYRQLLSLLTEAGDDPQDPIPVAVETARGLLFACLRATGRKVYSINPMAVARYRERHRVTRAKSDHADAVALANILRTDSDVHRPLPADSELAQAISVLARAQQDAVWNRAQLNNQLRSHLKQYFPAALAAFQVRGIGLDSREARAVLAAAPDPTAAARLTRVQLRSLLRKSGRQRNIDTWADRLRAVFTNDYLHQLPLVEKAMGHQTTALVRQLDAACRAADDLAEAAAEAFAQHPDAEILSSFPGIGPLTGARVLGEIGDDRTRFRDARALKAYAGAAPITVASGKSHAVHHRRVKNQRLAAAGYVWIFGALPSPQVKEHYDRRRARGDRHTAAMRNLFNRLLGCLHRCLATRQRFDPAKAFPTPGAPAEAAAS

SEQ ID NO: 124677 - protein, 341 aa, unidentified
MSDYSYFCGIDLAKNHFSLHAVDQNGKVILHKSVTRSKLLTTITNMRLMRIGVEACGGAHYWARTLNKLGHDARIMAVKYVVPYRTKGKNDLNDAVAICEAVQRPSTRFVPVKSPEQQAILSVHRMREHWVRERTALMNRMRALLSEFGLIIPVGRSSLMKQIPLMLEDAENELPHLARTVIADAYHHLGELNQRIADTEQVFDSFAKVSANVQRVMRVRGIGPQTATAILASIGNGSQFDKSRDFSAWLGLVPKQYSTGGKPRLGRITKHGDKYLRTLLVHGARTVIANLGDKQDKLSQWCRGVLERRGMNRAIVALAAKNARIIWSLLHNQTEYENYAA

SEQ ID NO: 124678 - protein, 345 aa, unidentified
MLNQPLFAALDVSLETTTICIMSFDGTITKEAVVATEPDSIAICLGDDLTRIERIGLEAGPLSEWLVRELSVLGIVVTLLETRQVRAALSAMIIKTDRKDARGMAHLLRTGWFRPVHVKSLSAREQRAMLAARSMLVARLKDIENSVRGLLRGFGLRLPRALRGRWEAGVREAIEGHPTLVQIFEPLLMAREALREQLIILDKRVRDAARADRVCRRLMSAPGVGAIVAMTFRAAVDQPDRFRSSKQVGACFGLTPRKYQSGETDRSGSISRAGDASIRVALFEAAHVIMTRVAAWSKLKAWAMNVAKRRGAKRAKVALARKLGVVLHRMWVDESEFRFGNPAQA

SEQ ID NO: 124679 - protein, 356 aa, unidentified
MKNFNSETGKKTVGLDLGDRWSHWCELDSEGGVLERGRVQTEAKALQKLFEGRSSARIAMENGTHSRWVKRVLEAYGHEVVVANTRKVRLIYGDGRKTDRLDAEKLARLARVDVSLLSPIRYRQEQAHADWAVLKARDGLVKARTQLINQVRGMVKTFGARLPAHSGASFARKVGGMIPERLKGALAPLLQVVEDLTVKIGAYDRTVEELSQHYPETRALRQVSGVGPLTSLAYVLVVEDARRFRRSRQVGPYLGLVPRLDQSGAQDKQLRISKAGNDFLRRLLVSSAHYILGPFGPDSDLRRYGGKIASGGGKNAKKRAVVAVARKLSVVLHHLWVSGEVYDPLYNQKRLTSFCA

SEQ ID NO: 124680 - protein, 403 aa, unidentified
MIFVGDDWAEDHHDVYLMDEAGKRLAARRLPEGLAGISQLHELIAERAEDPGQVVIGIETDRGLWVGALVGAGYQVLAINPLAVARYRDRHHVSGAKSDASDAKLLADLVRTDRHNHRPIAGDSADAEAIKVLARAHQSLIWSRTRHTNALRSALREYYPTALVAFEDLAHGDALGVLDRAPTPAEGARLSLPVIQSALKRGGRQRNIAARARDIRTALRTEQLAAPAPVAAAFAATTRAAVGIITELNRQISELETSLAAHFEKHPDADIYRSLPGLGVILGARVLGEFGDDPNRYTDAKSRKNYAGTSPLTIASGKKRAVLARHVRNRRLYDALDQWAFCALTTSPGARAFYDQHRAAKQTHHQALRALGNRLVGILHGCLRHYTRYDEHIAWAHRIPAAA

SEQ ID NO: 124681 - protein, 338 aa, unidentified
MNYVRIDHHRQYSHLTVMDQEGQVFRSGRVANVRVEIGKFLEGLEAVEAVLGTGRSSCTMVDVLEEMGVGVKIAHPNEVKAIARAKIKTDKRDSEVLAHLLRMKMIPEVYRRSQENRQVQRVLRQRAFYVSAMTALKNRVHAFLAQQGEEVREEVAREANIFSENGRKVLLELALAPREKRLLEALLKTYRHLETRIGESTSFVEKLYGESREAQLIRTIPGFGKYLAVLVAVEIADINRFADAAHLHAYAGVIPSTHSSGDRTHHGKIVRAGNRWLRWAAVEAVWPGIRVDYDLRCFFERLARNKGANKAKVATARRLLTIVHKILKEGRNYIEYRR

SEQ ID NO: 124682 - protein, 369 aa, unidentified
MAKYILAGCDHHTKDNLILVAVDDQTPEKLSFRNTDEGRGKMIRELKRRQEQAGATAILFAYESSGLGYSLYDELTEAEVLAFVLAPSKMPRSPKQRKDKTDERDARDILGILRGHVLAGNELPAVWVPDPETRANRSLVRTRLEVADKVTATKNQIHGLLKAHGLKKPASVGGNWTVKHLRWLEELTESQDSPLELSNRLSLASLLRQLQFFEGELAELDRGLKELAAQPRYAHLVRELCTETGVGTLTALVFLTEMGDLSRFENRRQIGAYLGLVPAKWESGDVEDRKGHITRQGPARVRKVLNQAVRSRMVHHPETRAFFKKLDQSAARRKKIYVVAHMRKLAILLWHRGVAAQCRAGSHPDSQRR

SEQ ID NO: 124683 - protein, 373 aa, unidentified
MGEDRTVCVGLDTHKAKIAVAVAEPGREGEVRFHGEIANQPEAVRRLIERLADKHGRLKVCYEAGPCGYGLHRHVTALGHDCTVVAPSLVPRRPGDRVKTNRRDAVALARLHRAGELTAVWIPDPVHEAMRDLVRARTAAMEAVRRARQQLQGFLLRHERVFTGRKTWSPAHRRWLAGLRFAHPAQQIVLQEQIDTIEEAERRRDRLGQQIRELVPDWSMAPVVTALQAMRGVAFLSAVVLVAEVGDFRRFTTPRQLMAWLGLVPSEHSSGAKVERGGITKAGNGRARRVLVEGAWSYRFPARVTSPIQARLDQAPEAVRAIAWKAQVRLCARFRRLVAAGKNVNVVTTAVAREMAAFAWAIACQVQPKEAAA

SEQ ID NO: 124684 - protein, 476 aa, unidentified
MAGSKKAISNMALIPMLPHETLYVGVDVGKSRHVAGFLSRTLLQRHERFEGCPTFVFEQSREGFCSLVDRIREYVPLEQATVLLEHTGHYHKNLEQYLLEWDITVYRIHVQERPKGMTKTDKRDALSLANRLYTQLELGAQVEEKMQLVRRAVHPTQAAMQLRGFMQHRYELSHQRTQLRNKLTAICDELFPEFTHIFHDPNLEVALAFREKFPTPHDIATASLSALRETRVKYFPSEANLLRLQQLAGETIGINNKDRLRGMKLEQELLIKELRLVQGHLERLDTEITDIVRTSREGQILLSMPPIGPVQAATIIATIGHIDNFEKASELKSYFGWAPTRDQTGVTFDRTKLSHRGVRPVKQMLFLMAARATTLDGEWARIYRRWLPCMATYDERVKEYRGKKKVLGRIAGQMVSMIFALLKTDQETLSRVPSGEEPPPPMLYDPEIHRKHQEGSYRSLKPGTQPRKILQLPSKS

SEQ ID NO: 124685 - protein, 365 aa, unidentified
MKITTVGIDLAKNVFAVSAADARGKVVQRKQLRRSQVLEFLHQLEPCMVAMEACGGSNHWARAIKQLGHEVRLLSPARVAPYRHGSKHDRNDADAICEAARRPEMRYVAVKSVAQQDQLALHRVRTQLLKQRIAQSNEMRALLYERGITARLGAAGLRQALAQALEDDNPEVSGVMRQTLIEMSGWLRELEQRLAELTARIKQAVKQDERCVRLMEVPGVGPLSASALVATVGNAREFRSGRELSAFLGLTPRQHSSGGRTMLLGISKHGDRYLRTLLIHGARALLYRKHRSAHPRARWAARLLARRGPNVAAVALANHNARLLWALLSRGERYRSVCPPRSFPPRSSTVVGRAAAENRTMGKPA

SEQ ID NO: 124686 - protein, 359 aa, unidentified
MTENALDHRVTIGVDTHLDVHVAVALDERGVRLREIHVPTTLAGYRQLERWAVGVGPVEVFGIEGTGAYGAGLSRFLRERGHRVVEVNRPDRATRHRLGKSDPIDAEMAARAVLAGVATGTPKASDGRVEMIRMLKIARDSAVKARTQSLNQIRALLVTAPAEPRESLAGLTVGRLLDRCAAFRPGVLDSPTAVARHSLRLLARRNLQLRTEARELQVAIRGQILSTAPELLESFGVGPDGAATFLLTVGDNPGRLRSEAAFAALCGSSPIPASSGKTTRHRLNRGGDRQANAALHRVVVVRLRWHQPTRAYLARRLAEGKTKAEIMRCLKRYVAREIHGLLCPRGSGVGVADHGIEAA

SEQ ID NO: 124687 - protein, 355 aa, unidentified
MERYIGMDVHAASCTLAVISEKGRKLKDFPVETNGQALVEAIRMIPGHKHLVIEEGLQSAWLYETLSPHVDELVVAGITQSRGPKSDKRDAYGLAEKLRVGNLEKHVFKAPRQFTRLREHSRIHMTLVGDVIRTQARIKSVYRSRGILVAGVDVYSPRRREEWIDQLPSTTRTRATRLYDQLDFLLDQKKQAEADLLREAKKHPIVVTLETAPGFGPIRAARLVPIVITPHRFRTKRQFWSYCGLGLVTRSSSDWVQTTDGAWIKSRVPMTRGLSRHHNHFLKSIFKGAATTIITQRNKDPIHARYERLLEGGTKPTLAKLSLARMIAATVLRMWKNEEEYDPGRAGLPTQTRKG

SEQ ID NO: 124688 - protein, 340 aa, unidentified
MQITTIGLDIAKNVFQVHGTGEEGQVLLRRKVRRDQLLTLFSGLEPCLIGMEACATAHHWARELKALGHQVKLMAPAYVKAYVKRNKNDAADAEAICEAVRRPTMRFVAVKSANAQSILILHRSRHLLVRQRTAQVNAMRAHLAEYGVVAPKGREHVRELVDVLNRGKDLLPELARQTLILLATMIEGLSMQIRKIEVALMAWHRADPTCRRLETIPGIGFITATALAATVSDAKVFRSGRQFAAWLGLVPKQHSSGGKQRMGGISKMGDRYLRHLLVIGATAVVRFTRRKKTTISIWADQLLERKPARLVTVAVANKMARIAWAVMVREENYRSVSAGA

SEQ ID NO: 124689 - protein, 376 aa, unidentified
MLSARPARVPSPPRHGEETAITSIAHAAAPQVTIGVDTHLDVHVAHAADQLGRRLDTVQVPTTPAGYAELLAWARRLGEPVAWGVEGTGCYGAALARFLAAQGQVVVEVNRPDRQARRRHGRSDPVDAQAAARAVQAGEATVIPKASTGQVEMIRSLRVARSTAMRARTQTINALKALLVTAPAELREQLRGLSVSRLVGAAATLEPGPITSPQAAAMLALGTLARRYQALSGEINALTTQLDRLTRTAAPKLVALFGIGSDSAGALLVAAGDNPGRVRSDACFSMLCGSSPIQASSGKTIRHRLNRGGDRQANAALYRIVLVRLCYHRPTKDYMARRLTEGKTKKEVIRCLKRYVAREVFAVLNQTSQDTLTTTP

SEQ ID NO: 124690 - protein, 412 aa, unidentified
MHVVHQTCAGMDVHKKDIKVCLVTHDHQGQRQEEVRTFRTMTHDLLAMRAWLQTHGCTVIAMESTGVYWKPIFNVLEGDFTVLLVNPAHIKQVPGRKTDVKDCRWIAELLEHGLLRGSFIPPIEMRDLRDLTRYRRQLVNTHSAEVNRLQKVLEDANIKLASVATDVMGVSGRAILRALLAGVANPEELAELAKGRLRKKKQDLQAALLGRFRPYHTQLLTHILAHIEFLEESIAECEAQLEALCRPFAEAIALLDTIPGVSQRTAQDLIAEIGVDMAWFPSAKHLCSWAKVSPGNNESAGKRKSGRTGKGNKWLRAVLVECAHAASHTKGTYLGTKFRRFASRKGKQRAAVMVAHRILEAAYFIIRDKVPYRDLGSHYIDEHQRGPIIRHHVRRLESLGLKVEIRELPQTG

SEQ ID NO: 124691 - protein, 403 aa, unidentified
MNAVGIDVSKGKSKVTVIQPLGVVVKKPFDVAHTVTELNELADFILSLDGETRVVLEHTGRYSEPIAKTLSEYGIFVSVVNAKLLKDYAGGGDTIRRDKTDKLDAVKIAKFALNKWENLSQYYPEDEDRKILKVFNRQLSEYAKIKTMLSNNLISLLDQVFPGINKLFTSPARESDGHEKWIDFVKTFYHSDCVSTKSFGVFANRYENWCIRNGYNFSLDKAADIHYLASECVTTLSRSDFTKSLILMAVYQLNSLCETIAAVKYNMTQIACELIEYDTVLAMHGVGKTLASQLIAEIGEVPRFNGRTSIARFAGIEPPANQSGAYNQKSRRISKQGSPHLRKSLFMVMKAVLQNKNQDQPTFQFLDKKRAEGKPYKVYMIAGANKFLRIYYARVMECYGLAE

SEQ ID NO: 124692 - protein, 417 aa, unidentified
MNLYVGLDVSLAKLDVCCLTDDEQFSVLLERSFKNDHDGATELKEWILQAYQDYHFDRIVIGMESTSAYSFHPGYFFKEDPELSELNVVVTIEEPSKIKKYREVFSENKNDALDAFYIADYLRIQRFNPSFLKEDQYIALQHLTRSRYQLIKQLTTVKQHFLENLYYKCNTLSMNLKEDGHSTTALSATVISLMTEDYSLDDLANMPLEELGQLIQKLGRGRFKAPENLAKTIQKAIRSSYRLFKVHAQSIDIVLAVLVREIRSLEKAIKELDKGIEDIVQTLPEYQCLTSIPGIGPVYAAGIIAEIGQIERFDSQAKIAKYAGLSWKENQSGKRSSQNTPMIHRGNRFLRYYLVEAANSVKRYLPEYAQFYHKKFQEVPKHQHKRALVLTARKLVRLVDVLLRNHQLYTPPEVLHR

SEQ ID NO: 124693 - protein, 405 aa, unidentified
MRYYLGVDWADVTHAIWVEDAHGTRILSRSVPHTAEGFAEWGRWLDEQRASGAELWAAIERPDGRVVDFRLDHGVVVYPVNPKALDRARDRFRMSPSKSDPFDAHVLAAFLRTDHAHLHAPQPSSEAAQELKLLTRDYARLVREQTRLGNQLTATLKEYYPRALEICGDVTAKRTGAFLRAYPTPAALAALTADQWHTFARAHRWSPEQTATLWELLHEPQLPVPGHVVRAKSRLVQALLAQLEAAVQAVADYRETVMDFFGQLPAAEWATTLPASHGTLVPTIWAELGDAVGRWASWQHLQGHSGVVPVTRRSGKHQGVCFRFACNLHLRRALHQFAFCSLKCSEWARAYYDRYRQRGHRHHAALRALAAKWLKILFVLWRRQVAYDENYHLATMARQHLRQAA

SEQ ID NO: 124694 - protein, 398 aa, unidentified
MTESSDYESVQVFIGVDVGKDIHHAVAVNRSGKRLFDKALPNDETKLRSLISDLKQHGQILLVVDQPATIGALPVAVARSEGVLVGYLPGLAMRRIADLHAGEAKTDARDAAIIAEAARTLPHALRTLKLADEQIAELSMLCGFDDDLAAQTTQASNRIRGLLTQIHPALERVLGPRLDHPAVPDLLQRYPSPEKLASLGEKKLATQLCKLAPRLGKRLAADITRALTQQTVVVPGTNAAVVVLPRLAHQLITLRKQRDEVALEVEQRVLAHPLYPVLTSMPGVGVRTAARLLTEVACRAFASAAHLAAYAGLAPVTRRSGSSIRGEHPSRRGNKTLKRALFLSAFAALRDPISRAYYTRKMSQGKRHNQALIALARRRCDVLFAMMRDGTFYTPAAS

SEQ ID NO: 124695 - protein, 345 aa, unidentified
MHIASIGIDLGKTTFHLVALGERNKVLVRKKFSRAQLLTYYTANLPSSLIGLEACAGAHFMGAALREQGHEVRLIPAQFVKPYRKSNKNDFIDAESIAEAVTKENMRFVQIKTQEQLDVQAMHRVRDRLVQRRTALINEIRGFLLERGITFAAQPIYLRKNLPTVIENAEQNLSPRLRWLLQRMWQEWKQVEIDIKAMTDEIERISNENALCRRLRQIPGFGPLVSTATVAAIGNGAAFRRGRDFAAWVGVVPRQYSTGGKQKLFGISKRGNVYLRRMLIHGARAVLLRVKYDTEGFGQWVHRLAQRAPRNKVVVAIANKLARIAWAVLSSGKDYQHQPLQITAA

SEQ ID NO: 124696 - protein, 405 aa, unidentified
MLVEADRSHAPSAVRTELTAIFISLELSQSTWLITSLVPGNGEKMSKFTVAARDVAGLLARFVELQRKAEARTGKRFGFVVIQEAGLDGFWLHRILEAEGVDSHVVDPASIAVPRRARRVKTDRIDGEMLLRTLLAYMRGDPRVCAMVRAPTPEDEDRRRISRERKALTNERIRHVNRIKGLLFGQGITGYEPLRRDRRKQLDALVTGDGRPLPDCLKAQIGRELDRVELLLEQIKAVEEIRDGLLTAVLPEATPTTNDPEQPGENVALRPSIPAMLIELKGIGPEIASVLWLEGLSRKFDNRRQLAAYAGLAASHWQSGNINNDQGVSKAGNPRLRTTLVQLAWLWVRHQPDSALSRWFIARVTERGPKSKKPAIIALARKLLVALWKYVTAGVVIEGAIVQAA

SEQ ID NO: 124697 - protein, 364 aa, unidentified
MFTERTSVGLDVHARSVAAAAIDGVTGELFQSRLTPSFDHIGSWLAELPGSVAVAYEAGPTGFGLYRHLRAAGIRCEVVAPSKLQKPAGDRVKTDAKDALHLARLLRLDEIVSVAIPTVDQEAARDLVRAREDCRGDLMRARHRLSKLLLRHGIVYSGGDAWTGKHDAWLRNQALPQLKSRATRLTFDNDYEAVMSVKARRNRLDAAIEQMAADSEFTPLVRRLGCLRGVSTLTGFALAVEIGDWHRFTGNSIGSFVGLTPAEYSSGESKLRGSITKTGNTHARRLLVEAAWHHRPCYRVGKTMRDRWDLAPAAARIRGDEGNRRLHQRWVKFIDRKKRNTIANVAIARELAGWCWSLATLEPE

SEQ ID NO: 124698 - protein, 369 aa, unidentified
MDKDTTYVALDDSKRKIVVGILQPGAGEPELREIVNDSRQIRRLFERLKREGPVAACYEAGVSGYDLHRQLTALGVECAVIAPALTPRRPGQRIKTDRRDAAKLVRLFRAGELTAIHVLDESEEAVRDLVRCRDDLRRDVLRWRHRVLKLLARHGRAYLSGKNWSQGHWRWIREQRFDLPPLQRAFEATVFALEQALARQAELDKELEAVAGTAPYREPVGWLRCFRGIDTLSAIILLAEVVDFQRFRRPRKLMAYLGLVPSEYSSGESQRRGALTKAGNSHARRVLVEAAWHYRHRPTIGRALASRSQGQPDEIVGQAWRAQQRLHRRYRHLVGHGKRPPIAVAAIARELVGFIWAAMTRPESRRQAA

SEQ ID NO: 124699 - protein, 430 aa, unidentified
MTKRSPTPANAVLVAIDMSKHRQEVLIERPEGGRLRRMTVMATKADYDRLAADLGEIGRPIVVGFEATGNYHRTLAHRLLAAGFELRLISSVALARTREALHNGWDKNDSKDAQVILHMLRIGATQRYVDPLAAGINDLQEMSKTHEAISKAKTQTWHRILTHYLPLYFPEIERFAGNSRSDWFLALLERFPTPVSMTSLGLEAFTREAWSLVGRKVSKARLINDIYETACASIALPVDEDSVAIAMFRMVIAQARSLIRQRDEIERTAHALLADNRDYQLLRMIPGIGPINALTILAEAGDLRRFAHHRQFLKFCGLDLATCQSGTFRGRTKLSKYGNARLRRTFWMATQVAIRQRDNSFRDKLGRYVAGYGNDPDRRRKAMTALTAKMARVAHAVIKTGAEYRPFVERADTRWKDPSLSCREGATATL

SEQ ID NO: 124700 - protein, 315 aa, unidentified
MSDVPCFVGIDVAKAQLDIALRPSGERWAVANDASGVATLVDQVQTLHPTLIVLEATGGLERAVTSALAAAGLPVVVVHPRQARDVARATGQLAQTEALDARALAHFADVIRPTPRPLPDAQTQELRALLGRRQQLIGMRTAEQNRLAGTSERLTKDIVAHITWLNAAIATLDNDLETTLRASPLWRENDDLLQSAKGIGPVWARTLLLALPELGTLTRQQIAALVGVAPLHCDRGTLRGRRMIWGGRAHVRTVLYLGTLVATRCNPQITVFYERLLAAGKVKKVALTACMHKLLTILNAMLKHRTPWQPQEVQS

SEQ ID NO: 124701 - protein, 408 aa, unidentified
MVYIGIDIAKRSHVLSAVDDDGKAVIESFKFANTDRGFEKLLERLKKAGVEPGGSLSGMEATGHYWIALFDFMTSHGYDVAVINPIQSDAFRDVWTVRKVKTDAIDAAMIADLVRYKRYEPSALGEEATDELRSLARYRMSLVERSTMLKNRATAVLDRVFPELDGLFSGSFGPTQRALLEHCSTPSQVLSTNVRTLERILREASGGKCGREKAEELKAAARSSVGVGFGSRTLAFEIRLLMEELDFVRGQIDEVDGELARLLDETDGKWLLTVPGIGLVLAATIAGEIGDANRFDDAHQLMAYAGMDPTKSESGETVASDGNMSKRGPAALRWAFMQAADSARKYDPYFGDYYAKKKGEDKKHHYVALSGVARKLMGVSLALMKEQRPYEPTPPKHHLPGHLQEAAK

SEQ ID NO: 124702 - protein, 322 aa, unidentified
MERRGFVGIDVSSGRLDVAFRPGTELFQVSNEPRGIARLVRMLERRQPELVVLEASGGYEMAVLERLLAKEVPVALLNPRQVRQFARASGRMAKTDAIDAEVLAHFAEVMRPHPRRWADLETRQLRALVNRRHQLVQMVTAESNRRRLALAVVRDGFGATLRCLKLQITAINKQLAALIRQIPTLRQKAELLRSVPGVGEVATATLLARLPELGSLDRKKIAALVGVAPFNRDSGRFNGKRAIWGGRGDVRTVLYMSTLVAVRRNPSLRDFYQRLRGAGKTPKMALTACMRKLIVTLNAIVKHETHWYCPLSLSGKASPNAT

SEQ ID NO: 124703 - protein, 343 aa, unidentified
MTKVMTVGLDLAKSVFQVHGSDRTGRPVVRKKLRRKQVLEFFAALSPCLVGLEACASAHHWARELQALGHEVRLIPPQYVRPFVKTNKNDASDAEAICEALMRPTMRFAAVKSAEQQSVLLLHRARELLVRQRTMLINALRGHCGEFGIVVAQGAPKVTELIERIEDPDDTRIPALARAALRSLVEQYRKVQAEILGLEKRLKAWHRSNEASRRLEAIPGVGMITATALVATIGDASQFHSGRQLAAWLGLVPRQHSSGGKERLGRISKRGDGYIRRLLVHGARADLRWSRRRKQARSAWQESLLARRPTNVVLVAMANKTARVVWAMLSRGETFRNQAPITA

SEQ ID NO: 124704 - protein, 421 aa, unidentified
MTHVSHDEFAAFVGIDWADAKHDVCLQTAGSAKREYFQLEHTPEAIDAWVTTLRTRFNSQPVAICLELNKGPLVSALRKYDFLVLFPLNPLTLARYREAFTPSRAKDDPTDAALQLELLLTHRDKLQPLQPQSPAMRALAQLVEHRRRVVGDKVRITNRLTSTLKNYFPHVLHWFQEKDTAIFCDFLSRWSTLKAAQLARRSTLETFFRAHHVRYADVIAQRIQAIKAATPLTTDDGVIAPNALLVQALVAQLRVTLQAIADFDTAIAQCAQNHPDFSLFQALPGAGPVFASRLLVAFGEQRERYASAAELQKYAGIAPVTERSGKKSWVHWRLQCPKFLWQTFVEWAAESIRHSFWAQVYYQQQRDKGKAHQAAVRALAFKWIRILYRCWQERTPYDESVSLQALDHRGASLIQGLVKAS

SEQ ID NO: 124705 - protein, 322 aa, unidentified
MSESSVVAGIDIAKLHVDVAVSSAPPLIERFANDSDGHALVIARLAPLAVQLVVMEATGGYEAPLACALQAAGFAVAVVNPRQARAFAQALGRLAKTDRIDAEGLAALARMLLTRADLARYLRPLASTEQQDVAAWVARRRQLVTMLVMERQRLATARRAVRPSIKALINAIEQQLERVDHDMLRHVTAHFTELDRLLRSTDGIGPVASATLIAELPELGRLNRRQIAALVGVAPFARDSGQYCGRRRIQGGRFQLRRTLYMATLTAARHNPVIRAHYQRLLAAGKLKKVALVACMHKLLIILNAMARTHTAFNPDHRPAHA

SEQ ID NO: 124706 - protein, 443 aa, unidentified
MKEKKNGLPVIQADAAGIDISSKEHYVAVNPERDYKPIRCFGAYTEDLHALRDWLKECKVQTVAMEATGIYWVSLFLVLEEAGFEVLLVNARHVKNVRGKKTDMSDAEWIRQLHSCGLLKASFQPDEFTRTLRTYIRHRKNLLEMAATHIRMMHKAMEQMNIKLQHVIADITGKSGMAIIQAILQGERDPENLVRLLDGRIKANKEDVKRSLQGVWKEENIFELEQSFEMYHLYRSKITDCDKRIENIILQKTGPQPNVNESKKQYVKNNKNNLNFDATAMLQQITGTDVTEIFGINDSNALEILCETGFDMNKWPTEKHFTAWLNLAPNTKISGGKILSSRIAKKKNQAGQVFRLAAYAIQRSKNWLALFYHRIKSRSGTKTAITATARKIAVIFYKMLKDKVMFNPVSINEYADSFKQRQLKKLDRQARSFGLKLTPRLTS

SEQ ID NO: 124707 - protein, 322 aa, unidentified
MKFIGIDIGKTNFVAAFPSACGYKTQSFTNSAAGIKKFINTLSAAEHHCVMEATGNYGYLLLYLLHQSGIAMSMINPKQIKHFARMMMTVTKTDAKDACTIALYAEKMNPPIYKMPSQAVMLLKQKKTVIRQLKKQLTATKNLLGSLEVLPVKDRNCMTALTKTITFLTRQIETLEAELANIASTEFEKQVKALTSVKGIGITLATALIIATGGFTYFDNAKQLSRFIGICPTYHQSGTSLNIKGAINRNGDASLRSLLYVASWSAIQHNAACRECYTRLRANGKPSKVALIAVANKLVRQAFAVTSKNSYYIDGYSSSKPV

SEQ ID NO: 124708 - protein, 394 aa, unidentified
MRFAGIDIASETHVIAVVNAEGGVELKATSFTEDAAGYQKVLALLGTPGEVLIAMEATGHYWKNLFAVLAATGHTVALLNPLRTHRFAGEDLERTKTDAIDASGIARFAAQKRPPPTRLPDATTEELRELVRLRQRLLQDFGDHVRQLHRLVDLGFPEFTRYVRGLDSELASAILHDYPTAAAFHGVSVKRLAALRYDGRHQVSLDLARTLIDAARHSVGQHHSPAYRVQVRYACQDLDLLRRRLRELDHDIDGKLREHEVGRLLTTIDGIGPQTAARVIAEVGDPAHFRNAAALSAYVGVIPGLKQSGKRQTTRGGLTTIGNAKLRAALWMPTLCAVRHNPWLRAYYLQLRARGKLPKVALVACMHKLLLAIYSVAKHRRPFVAKLPAQAAST

SEQ ID NO: 124709 - protein, 483 aa, unidentified
MKPKRVEKNKKASCRPTQNNWHEMNRKQRREMTRKIQNEDLSLEVVHPDAAGIDIGNESHYVAVPPTRDSQPVRRFGCTTSELKEMAVWLKQCAIQTIALQSTGVYWIAVYDILEEAGFEVYLVNARETKNLPGRKSDVQESQWLMKLHTYGLLRNSFRPSQEIRTMRTYWRQRNDLVRSAGRHIQRMQKALTQMNIQLANVLSDVSGMTGQAIVKAILGGERDPYQLATLRNWRVKANEEEIARSLEGNWQEDLLFVLQQEQDGYQFCQKQMAECDQRLQQYLQQQEDRSHGASLPEEKRKERLRKKKKGNAPQFDLRVELFRITGTDLTQIDGIDVTTTMTILSEAGWDMSKWKTEHHFVSWLRLCPDNRISGDKIIGKGRLPTNNRVTNALRMAASTLRLSNTYLGAQFRRLRTKLGAPVAIKAMAAKLARLVYRMLRYGMTFVDRGAEFYDAQHRKLQINYLKRKAAHLGFQIIEATAA

SEQ ID NO: 124710 - protein, 462 aa, unidentified
MPRREEREISARSTRPLEGLPVIRASVAGIDLGSERHWVCAPTRDRSGREIASFGATTAELLGMSEWLKTRQVESVAMESTGVYWIAPHEVLEGQGLQVLLVDTRQLARVPGRDKKTDPTDCEWIQRLHSCGLLRGSFRPEEAVCMLRTLVRDKANLVAESGDWLRRMQKSLDQMNVRVHRAVSDIDGATGMAILRAIAGGERDAQKLAQFRDARCKKTEQEIAEQLSGHWREDHVFSLQQALKMYDAVQERIAAYEQEILRKLGEMEPDEPPEPTAPPLHNANKAKMIKKRGQEAKRQALYRMSGVDMTQIDAIGVETVEVVLSEYGPDLSRFPTEKQFVSHVTLAPRVPQSGGKPVKKKKRNSASTRVAAALRMAALSLRHSQTALGSYYRRIAQRRGGDIAVFATARKLATLIYRLLRWGQPYMDEGAAACENRYRQNRIAHLAATAKQLGYQLTPVTA

SEQ ID NO: 124711 - protein, 399 aa, unidentified
MTPDDIDVWVGLDVGKSAHHAHALDHDGNTLYDKPLKQDEKAIRTMLGKLSKHGRVLLVVDQPNTIGSLPLTVARNMGIAVAYLPGTAMRRTAQLLPGDTKTDRRDAHVIAWAALKLPETLRDAGPDDETLAALKLLAGHDEDLAHESTRHVNRLRSLLLQTHPAFERALKGERITRDATLALLERYGGPMGVKRAGIEDVKDWAKSNGLRAGRIIDDMFKAIGEQTVTVPGTLMAETIIPSIAHDIKTIRDRRREVGRQVEKLLEDHPLLTVLTSMPGIGVRTASNILLGIGGDIANFKSSAHLAAYAGISPVTGQSGTSIKGERPSRRGNKRLKNALWQTAFVASTKHPPSVAYYKRKREQGKHHNAAIICLARRPCDAIYSMLKNGTLYQEPALVA

SEQ ID NO: 124712 - protein, 424 aa, unidentified
MLRIIHPICCGIDIHNKFVVATIAKTDPKGVTTYQTKEFKTFNYDLERLRDWLIKNECNQVCMESTGKYWIPVFNYLENSCTVTLANPKYVKALSGKKTDKKDSRWIADLFKHDLVPGSYIPPKEIRMIRELCRYENKLVSNRSSEKNRIQNSLTVSNLALANVVSDAFGKTASRIIEYVVNCDVFDPEHCKTLIDGRIKASHDEVIKSILGYNLVPSQASKIKLSKAHLNFIDDSILNLNETLFELTKPYESQIKILTSMVGVNEKSAIKIISEIDADMSVFNSAKHLCSWAGLTPQNNESAGKKKSSKISRAGVYLKPLLVQCANAAIKSTKNPYFRDKFLKIKKRRGHKKAIIAIARMMLTCIFHMLSKGEIFAPSDVNYSDIPIAVFEKRKHKMVNSAIALLQKNGFQISKVTDNEHLAS

SEQ ID NO: 124713 - protein, 324 aa, unidentified
MSKRSIICAGIDTGKRRLDVALENRAQELQVENTAEGHRQLSAWLRKHKVARVGIEASGGYELAVVSQLRRDGFVVVVFQPAQVRAYAMFHLQRAKNDKIDAGLIAACTAVTKKIYPPPDPRLAPFAEIMTFIDQINEDIARLQTRQESCRDDRIEGHWNSEIRRLRALVRVELKQVVAGIRQHDDLAKRLDLILSVDGVGLRTAVAILVRMPEIGSVTREQAAALVGLAPYDADSADYVGQRHIAGGRERLRGNLYNAALPASFRWNPQLIALYERLIAKGKPHKVALVACARKLLIYVNIVVQRGTPWTKEMPALAMARRNN

SEQ ID NO: 124714 - protein, 314 aa, unidentified
MICGVDVSSKSLDARIGRDGATASFTNDPKGIAQLAEFCQCHKVHLVAMEATGGYEKKPFALLWAAGIQVAVVNPRAVRNFAQGMGLFEKTDRIDAGVIAWYAETKQCVAVSPASAQQQQLKAMVTRLRQLTELRAAQRNQRLLVTDKVVLKSFRKLLDLVQRQIRDLEVAIAGLIAADALWQKLDQSFRSIKGVADRTVARLMAEMPEIGTLSNKRISKLAGLAPLACDSGQWKGKRTVRGGRRTIREILFVVAAGVSRHNPDFRAFRERLAAAGKAKKVIRIALAHKLLVRLNAKAREVRQLSNPSACTSVC

SEQ ID NO: 124715 - protein, 405 aa, unidentified
MKVYIGIDWSENKHDVCYQHENGEVLRSLQIGHIIAGFVELDKVRMQLGLTVGECVVGLETAHNLLLDYLWDQGYEQVYILPPNVVKSAQGRYRQSGAKDDRWDARLIADILRTDQKRYTPWKPDSPLTRQIRAGVRFLYQVNKELVRNSNRLRSVLLRYYPAATQVFSRLDGLITLAFIRTYPAPQAAAALSFEDFKTFLRDHHYTHAKAWAKSYARLQDTYPQPNPGTVAAYSPQAVSLAKILEQLVACKNEGLAKLGELYVQHPDPIIYDHLPMAGALIEPALLAKLGDDRMRYPNPAVLQAVAGTCPVTYQSGKSRNVRFRRACDREFRDIVQQWARLTIDASPWAAAYYRSVRPRCQNDNDAFRRLANRWLEVVWKLWQDRKAYNEEYHLKQHTLRCKSR

SEQ ID NO: 124716 - protein, 383 aa, unidentified
MAKYDDLSRSLVAFDQNSTLVAAIEMGSKGWLVGALVPGLERDPRKKLPPDKQALLKLLHRWCAEAARKGHPIKRICVAYEAGRDGVWLARWLREQGIEAYVIHPTSIPVSREHRRAKSDRLDLMLLLRALLCWLRGVAIPTVEEEDGKRPLRERETLTAEVTRLINRMTSLLVRHGIANFNVKLKKAGEKLAEVKTAWGEPLPPEAVAELQRSFERLRLAKQQIAEIDKARRRRLEKAPEAGMHPMILILARVFGVGLMTAESLVREVLYRNLRDRRAVARYAGLTGSPDESGKKRREQGLAKAGNGRIRRALIQLAWRLLRHQPESALVKWYQARTADGRRDTRKVMIVALARKLLVAVLELGTNGTVPEGMRLHPAKVTG

SEQ ID NO: 124717 - protein, 310 aa, unidentified
MSDPVIGVDVSKAWLDLACRPDDPVERHANSPEGVAGLLARLGRPQLVVVEATGGYELNLVRALHAAGRPVAVVNPRQVRNFARARGRLAKTDALDARIIAEFGALLRPLPMPSPPQGREDFAALVARRRQVIDMMVAEKNRLEHALDGVRGFIAEHLGALKSQLANLDAAIALAVEADPQLCKRRDILTSVPGVGQLTAAVILAELPELGSIGAKQAAALVGVAPINRDSGAHRGERHIGGGRPSVRCAIYMATLSAVRYEPGLKAFYQRLRSGGKRPKVALVAAMRKLVTLLNILLARNQHWKPQHGC

SEQ ID NO: 124718 - protein, 395 aa, unidentified
MFIVGIDIAKRAHVVSVMTSEGQIVCKPFSIRNNCSGYNLLLERLRKISNIKSMFTIAMESTAHYWLPLYTRLRREGWNVLVMNPLQTHAVRELLIRETKTDAVDAQLIADVVRFGRVRSSSVPQEELLALRELCRNRFYLMDLASDLKRKITALLDQVFPEFETQFDSIFCKSGLAVLRRYPTPERLAKAQLGKLTEILQSASNGRFGEWKAREVRECARISFGLPDSEGVYSTLILMYLEQMQHLIDAAATLERHILEHFSRFQTTLTSIPGVGPVLGAAILSEIRDISVFSSSDKLAAYAGVDPRVKQSGETKLGGVHMSKRGSPYLRRAIWRASVVAVQHDPMFKAYYEKKAAEGMRYMNIIGHVTRKMTAVIFAVMRDNKTYQPIMSSAA

SEQ ID NO: 124719 - protein, 410 aa, unidentified
MNTLYVGIDVSSKNNVTYLMKPDGSKHSNFKVANSLDGSKELVKRILSALNSLSLTEVSIGLEATSVYGDNLVYFLRENGSLTPYSKQIHVLNPKQVKKFKDSYNDLPKNDYVDSFIIADCLRFGRINKEVYLDDYRYKALQNLTRARFFAVQNLTKEKQRFLNNLFMKYSSMTQEKVFSNTYSTTAFAVYEEFESAEQLAEMDLQELTEFIVVKGKNRFPDPNAVAQAIKKAARGSYRLPKTINDSINQVLSISISSMRAMESQIKEFDKAIAEQVKLIPNTLQSIPGIGPVYSAGIIAEIGDINRFKNQAALAKYAGLAWSQYQSGDFEAEHTHMIHSGNRFLKYYLCEGAWSLTCCDAEYKRFYDIKYKEVNRCQHKRALALTARKFARLVYSLLKNNRLYIPPISK

SEQ ID NO: 124720 - protein, 519 aa, unidentified
MQARTDSRAAVTPLACGDPPTPTCPRAERTASAAAITSRGGAGAEASGAAERSCGVERSIGIDLGVTSSSRIAVADGARIISNRRVRSTPEALTRAIRDACGEQPVDIVVESTAMAWFVAAVAAERAGIEHTLYRVSGRKAAALRAFYRAHTKSDRIDAPVLARMPRVDDALHAFTLPSAAELALKRLVSYRQRLDQEAIRAVSRVRSLLHWAAPLLLPASGGTNPALLRVLRRWPDLRKLASAHAPSIARQGGISVTRAREVRECARDAVRFYAERVDYALLALELEIGLAHHATLQEQLERLDAVIESEYARQYPNDVLRSIPGVGHVVGSVIRATVGDARNFTNASAFRAYTGLTPREDSSGDRQQRGRISKGGPSLLRWALYLAADTARKHDPQLAALYRRLMEERGRHHNQATCAVASHLADRIYAVLRENRPYQPRDLDGAPVDNAHAKRIAASLAVTPETRKRLRAINKRENRGSREPDSRQPRVTPHGTARPSPHSLPTAQPSTPTGVDTG

SEQ ID NO: 124721 - protein, 342 aa, unidentified
MKITTVGIDLAKQVFQVHGVDERGKAVLKKQLKRDQVLPFFANFQCCLIGMEACGGAHFWASKLQAMGHTVKLMAPQFVKPYVKSNKNDVADAEAICEAVSRPNMRFVPIKTGEQQAVLALHRARQGFVKARTAQANQIRGLLAEYGIIIPQGIGYIGKRLPEILEDGENDLPGIFRHLIARLGNHLKELDRQVQDLEIQIQAWHRESVSSRKLAQIPGIGPITASALVASIGNARNFENGRQLAAWLGLVPRQNSSGGKQTLLGISKRGDTYLRTLLIHGARAVVRIAERKAAYAGSWLAEVMGRRHKNVAVVAQANKNARIVWALLAHERDYEPCYGSAA

SEQ ID NO: 124722 - protein, 453 aa, unidentified
MSRERSRSKPSGLPIIHPFAAGIDIGARFHVAAVSPDLCDEPVQTFQAFTSDLERMANWLVATGTKTVVMESTGVYWVAAFEVLESHGLEVILANAREARAVPGRKSDVNDAQWLQRLHACGLLRASFRPGRDIAELRAYLRAREKHTDYAAAHIQHMQKALTFMNIQLHHVIATITGVTGMRIIRAIVAGERNPDTLAAMRDVRCKESLETIRSALVGNYQPEHVFALKQALALYDFYQRCIDECDVEIERTVAGLNIGKTMPDAPLPKAKHRSKMPSDPKFDVRAALYQLTGTDLTQIHGVGPFLALRFIGECGTDMGRWRSAKHFTSWLTLSPGCKISGGKVLSAHTRKTSSRLTVAIRLAAVTVGRSDTALGAFYRRLAGRIGTAKAVTATARKIAVLFYNAMRYGMDYRDPGADHYEQQYRDRVVKQLHRRAAQFGFALQPQESMASG

SEQ ID NO: 124723 - protein, 442 aa, unidentified
MTAAMEQETFRWFVGIDWGTAEHVVNLADATGRLVEERTIKHTADGVAQLLDWLTAVSGDRLAEVAVAIEIPRGALVEGLLERGAAVFAVNPKQLDRFRDRFSVAGAKDDRLDARVLGSAVRTDRALFRRLALDEPLVIRVRELTRASEVLQGEFQALTNRLRELVHRIAPEWLTLSPNADDAWFWTVVEWAATPALGASLRRRKVQTLLTTARIRRVSVDDVLTAFEHPALTVAPGTVEAVTGHIQLLLPRMRLVQEQRHACEQALARVLTELRTTEPPPPPPDGSSDIQSSSDASTRTPGDVAILESLPGVGLVVTSSFIADAMPLLRLRDYASLRAMTGVAPVRRQTGKNKRGMIAMRYACNVRLRNACYHFARVSTQVDVAARHYYATLRARGHSHGRALRSVADRWLRILISMLTHGTLYDPTRFANVGGTPSADAH

SEQ ID NO: 124724 - protein, 376 aa, unidentified
MKHNRRRPPGKPRVSPTVLDRINPNLAGIGCGAAEHFVAVPPDRDPTPVQSFTTFTNDLLRLADWLAACRVTSVALEATGLYVIPIYEILEARGFEVLLVNARHLKNVPGRKSDVPDCEWIRELHSVGLLRGSFRPTDALVALRAYLRPRQTLIESAGMYLQRMQKALVQMNLQLPLVVSDITGVTGLRILRDIVAGHRDPHQLAEHRDHRCRASKTEMIAALTGHYRAEHLFVLQQNLEFFDSCQAQLAACDGAIDAHVQTLTAHAASPDTPLPAPRVTKKPRDNEPRFEIRAPLHQLTGGVDLTQIDGIAPYTALKLVSEIGTDMRRWATEKHFTSWLTLAPKNKISGGRLLSSRTQPSANRAAAVLRMTAMSL

SEQ ID NO: 124725 - protein, 340 aa, unidentified
MEMETSVVWSGIDVGKKTFFASIDIKSESGARLMLDKLPTKEFKRNLNGVNSFLKWQTELTIEHKNAIVMETTGCYSLELIAWIKMLRPDMTVSLQNARMVSDFMKSLNQPHKTDKTDARAIARFGTERNPEPAVMAEKHWRDLREFERERTALIEVRVDLENRAESLFTLVAKRANQRAISALNMEISEIEREIKLLVLEHEDIHSEVRILTTMPGVNFVSACCILAELGSLKQYDSRQISAVSGLAPRIMSSGSSLNKSFMGRRGSKRLRQILYLDSMSAVNKVPLLSSMYKRLIAKGKSKMTARCACMRKLLLILRAMVVNSKPYEENYFKTFPKSA

SEQ ID NO: 124726 - protein, 362 aa, unidentified
MYYAGLDVHSQYVTIAVVDKSGALVRETEVCTREPEVLRAVLTRFRPLEVVVEASGFWPWVYDLLVPAGITFHLAHAKKLRAIAENAQKSDQVDARLLARMLLSGLIPPAYPKGAAQLERMRLVRHRAALVQERTRLANRIHGQLHQRNIVLPRERLLRQATRHWLHTEAWTQLTAEQQAILTTHFAIIDQLTELLRPVDRRIQQLALSDPVAGLLQTIPGIGVYWAVLVTAEVLPLERFRRPAHLVSYAGLAPRTRSSGGHTRHGPIPAGCNRWLRWALVSAIPSHVRHAPESQLTAAYLELKARLGWRVARVAAARKLARMIYHMLSTHEPWRAALTSTQTARDELQQSAVAQTTCSYSD

SEQ ID NO: 124727 - protein, 339 aa, unidentified
METLYCGIDLHSNNNVVVVTNEGDEVVYRRRLRNELDLVLGALSPFAKRLHGVVVESTYNWYWLVDGLMAQGYRLHLANTGAIQQYSGLKYGDDESDARWLAKLLRLNLLPEGYIYPKGERPLRDLLRKRAYLVRQRTSNILSVKNLFARNTGRGLSASGVRRLTDADVDAMQPGAHLALAIKSSVAVIQCLSAQIKMIEKVALKRMRLRPDFKRLLTVPGIGPILGLTVMLEVGDITRFADVGDFASYARCVGSARISNGKKKGKGNTKNGNKYLGWAFIEAATFAARYNETIQRYYQRKKAKAHLMVAKKTVAHKLARACYCMLRDETDFDVDKAFG

SEQ ID NO: 124728 - protein, 349 aa, unidentified
MTPFEGASVAEASTIGLDIAKHVFQAHGADSSGRVVFRKKITRAKLMQFFASQPRCLVALEACGGAHYWGREIGKLGHTVRLIPPAYVKPFVKRQKNDAADAEAICEAAQRPSMRFVPVKDEAQQANSVVFRARDLLVRQRTQCINALRGHLTEYGHVVPQGTAHVDTLVALVEDATSSVPESARTILTVLIGTFRALQTQITQLDAEIARRAKADPVARRLMTIPGIGPIAATAITALVPAPEGFRTGRDFAAWLGLTPLQKSTGGKQKLGAISKMGERTIRRLLMLGASAVVRWASQRGAAEGSWLARMLGRKPRMLVTVALANKMARIVWALLVKGGTYRVPAAAA

SEQ ID NO: 124729 - protein, 352 aa, unidentified
MKKPNSSSAITIGIDLGDRRHAVCVLDAKGNILKQESIANSRPSLTALSRRHPGALIAMEVGMHSPWTSRFLKELGHRVLVANPRKVRAIYQNTRKSDRNDAELLARIARSDEKLLYPVEHVGEDMQRDLLQIKLRDNLVRQRVDIVSSVRFTLKSLGIALPSPNSESFARHARNTLGKEHADMLALIEPSLRVLDAMTEQIRSLEKSIAAMAAEKYPESEFLSQVGGVGLLTSLTFILTIGDPTRFQRKRDVASFLGLVPRRDQSGETDKQLRISKAGNTYLRKLLVGCAQHILGPFGQDSALRRKGLTLTEKGGPRAKRKAVVAVARHLAVLLLTLWHDEAIYEPNHRAA

SEQ ID NO: 124730 - protein, 362 aa, unidentified
MFRPHTLYIRIRIVRKVHEPVFAMRDQDVSDVIKTKNRTAMQYIGIDVSKATFVVAYSSDKGGEIRTFNNTTAGIKQFIGTLPKDGSIHCVMEATGNYSALLLYMLNVAGITVSMENPLKVKNFARAMLSTVKTDKIDARLIALYGEKMNPQPFKVQGEAILRLRQKRTVIRQLTKQITAMSNLRGSLACLPVPDKGATHTVDETIKFLEKRRDRLQSELTDLVEVEFSRQLALLTTIKGIGITLATALIITTGGFTYFQNAKQVSRYLGICPTYEQSGTSVNIKGHINRNGDAYTRGLLYIAAWPASRFNAQCKETYTRLRQNGKPGKLAMIAVANKLVRQAFAVVAHDKEYIDGFVSNRP

SEQ ID NO: 124731 - protein, 308 aa, unidentified
MTTLHTGLDIAKLNLQLHLAGRVHDLPNTAAGHRRLLKLLATQPGAHVVCEATGGYERDVVAALHTASVPVSVLNPARVRHFARATGQRAKTDHLDAAVLSAYGQALQPKPTAPRTEQEQHLAELIRRRVQVLEILVAQRQQAQRLTVPALRRQAQSLVRRLERDVKQIEAQLKELRTQATALDERVQKLEAITGVGAITALGVLAELPELGTLNRRQAAALAGLAPHPRESGQWHGRRRIGGGRAPVRRALYMAALVAARSHRQLKEFYQRRRAAGKPAKVALTAVMRKLIVLMNHLLKNPNFALSN

SEQ ID NO: 124732 - protein, 317 aa, unidentified
MSKYTTVCAGIDTGKHKLDVAIDGGAERAQVDNNSEGHRSLSAWLRRREVERIGIEASGGYEQAVVSSLRADGFVVIVFQPVQVRAYAKFVLQHAKNDNIDAVLIARCTAAATDIHEPPDARLAPLAQHLTMIEQLTEDVGQLKTRREACREERIREFWKQEINRLKVLLNSELKQLVTAIREYRDLANRLDLIASVDGVGLRTAVAILVRMPEIGRVTREQAAAIAGLAPYDDDSGLRRGSRHIKGGRQRLRQSLYAAALPAVFYWNPQLKAFYRRLLVAGKPHTLALVACARKLLIFVNTVVARGTSWRSSAVTT

SEQ ID NO: 124733 - protein, 456 aa, unidentified
MPHYFFGIDVSKGYSNFVMLDSSKRCVEDDFQIDDTFDGHQKLYSILSEFCIRHPKANIFAAVESTGGYENNWFNALTRFQAHLPIRTARLNPCGVHNNSKAGLDRNITDKISAKNVAKYIIEHPEKVRYQQQDPLASLRKQWGFIKMLKKQKTQLLNQLESNLYTANPEILAYCKDSTPAWVLSLLQRYPTASKLAKARKSSVALIPYVTPQKAKKLIETAKHSVASATDEITSQIIKATVQQIRQLSKVIDAQTKAMTDKCSIPEVEQLKTFIGIGDDSAVGLVLEIGSIERFKSAKHLASFFGLHPVYKKSGDGSWGFHMSKKGRIVPRQILYMVAMVAIQSNPLICEIYEKHTEKGMEKKAALGVCMHKIIRIIYGMLKHNEAFNPEIDRKNREKQTTQGEKKICRDKSRRYQAYDAKAPISRRQAKKREERKQSQSDNIAKCGIKVPVLVF

SEQ ID NO: 124734 - protein, 383 aa, unidentified
MRKTQETLRIKDIIKEAILYIAFELSNSKWKLAFSDGSKIRYKAITAGNLAQLQVEIDLAKRKFKMSEDVRMVSCYEAGRDGFWIHRYLESQGIENLVVDSASLEVNRRKRRAKTDRIDVGKLLRMLLRYWGGEKKVWSVVRVPSEQDEDARHLHRSLENLKDERTMHRNRIKGLLVQQGIKVSNPSQKKFLAVLEKVRTWNGQAVAPELKAQVVREYERLQMVEGQIKALEKEKKERLKNPDTDSLKKVAKLATLYGIGSVSSWTFVMEFFGWRQFQNRREVGALAGLTPTPYDSGKSLREQGISKAGNQRVRALAIEIAWAWLRFQPQSHLSQWYMKRYANGGKRMRRIGIVAMARRLLIDLWRYLEYDKIPEGARLRSAV

SEQ ID NO: 124735 - protein, 314 aa, unidentified
MPRKVGTAIVTIGIDPGKNILHLVGLDARGEIVLREKVARTKIVSRLANMPPCLIGIEAGMGTHYMTRDLLALDHDVRQVPPAYAKPFRQTHKNDFRDAHAVAEAVQRPTTRCVPPKTDEQLDLQALHRVRYRLVGQRTAIINQIRCFLLEHGITVRQRLHWLRHALPDILAQRTDVLSPRMVRILEDLAQDWRRLDDRIEAVSGEIDALSKNTELCRHLMTIPGVGPIISSAVVAAIGDGAAFARGRDFAAWLGLVPKQISTSPNAAIATFARSSCRPPASFCFGQGTGCSTALDLGLPPRLNGCTITCWLRL

SEQ ID NO: 124736 - protein, 339 aa, unidentified
MNFYFIGLDIAKDTFVASIFHKPKESILTKENISNDKCGYDELILWLKEHGITRTNCQVCLEATGVYSQGISYYLLAQGYKVSVECPLKVKRAFHPAGHKSDPVDSRQIAEYAYRFQDELIPWQPKEELLEKIRQLLTLREEFTRQKSATKCSIKAYELERVQLQLIKDAQEETLKGLERQIARIDKELDKLIKEDPHIKNRLDNLKSIPGFGMLLATHLLVMTNNFNKIEEYRPLAAFIGIVPYEYTSGTSVYKRPHIRHYGPKASRKLLRLAAQSVATHDVSFKKYYLRKLAEGKAKALVLNNIANKLLKVACAIVRDNTRYIKEHRSIHPMYVKSI

SEQ ID NO: 124737 - protein, 353 aa, unidentified
MKYYNSTTEFNCGIDLHAHQMYVCLMDRSGKKLVHTNIRNNDFNYFLKLVAPYRHDLTVVCECMFGWYWLADACSEAGIHFVLAHALYLKAIHGGKNKNDRIDSEKLAHLLRSNLIPPSYAYPAQQRPLRALLRQRLTFVWQRSELLTRIQSHQLAHNRLTSASTNRDRWQEHLLASEPNPVYQLNLQNQLALIRHYDTQLTAVETQLQKLTKTFAYQDYTLLQTVTGIGESLGLTILYEVGDIERFPTVKDFLSYCRLVKGTVASAGKIKGLRGRKLGNPYLRWAFGEAAIIAKRDQSLLGPLYQRLEARMNGNKFKANTVLAIKLARCVYYMLKNKTVFDPQRLVASLSHN

SEQ ID NO: 124738 - protein, 352 aa, unidentified
MVVTVGIDVHKNTHCAVAVDQAGRQVGPAVTVRATDAGHRQLQHWAARAFPEDRVEFAVEDCRHVSARLERALLAAAAVVIRVPPKLMAQTRSSARTRGKSDPIDALAIARAALREPNLPRAEHTHASRELRLLVDRREDLVEVRTKAQNRLRWHLHELDPEFDVPARALDLRRHQDRVQSRLEALPGSMVRRLALEILADIRELTGRINALQKEITGLVHLQAPQLLALPGCGPLTAAKLVGETANPARFRSEACFAMHAGAAPIPASSGKTDRHRLARGGNRQLNAALHRIAVTQIRLDGLGRVYYQRRRAQGDTTMEALRALKRRLARIVFNLLRPTDQLAAAVLPQAA

SEQ ID NO: 124739 - protein, 341 aa, unidentified
MFIGVDTHKDTLAASRVDAEGREDARRIFPNDVAGHADLLVWAGPQIGRVGIEGSANFGAGITRFLREHGMDVREVPAKLTGRERTRLRRPGKTDPTDALAIARITARDADLPPARHTGPREDLKVLVDAREELVTNRTAEANRLHADLSILLPGYSAQLPSLIKPDAVDTAADLLESIDGVRAGVARRRVSRLRRIDSEIAEMTTELHQAVKATGTALTDIHGIGPITAARIIGEVGDIRRFPTKHHFAAGNGTAPIPVSSGRTDRHRLNRGGNRQLNRAIHVIARTQAAWHPPAKTYVQKKRNEGKTRAEALRCLKRRLSDVVYQALVQDLKHPDQAAP

SEQ ID NO: 124740 - protein, 414 aa, unidentified
MFYVGIDIAKAFSVCSVINDKEEIIIKPFPFNSSFTGFKKLINNIESLNCDTKDIIFGMEATGLLFENLYRYLKDLNYNVILLNPYQTAQYRNMLTMKYVKNDNIDSLVIALLIKSGRYSKGYVNEEQLQSLKVLFRHKENIKEKLKSLKRETSSLLTVVFPELDKVIKDPYNISSLILLDKYPTAKHFENVTVKIILKLFRKVKGNNFNEAKAEHLLSIAKDTIYSGVAKDARAFFIRSNIKLIRALQEQIKSLEEEMIKIFDKQIESTQENKEDEDYISSVLDNLRTIPGVSDKTLLALLAECGNLDRFKDAKSLIGYLGLYPTQEQSGNTLKYGHLAKRGARYAKKALYLASVAAVRHNSELKQIFRNQVASGRAKKEALIIVARKLAYIIWAIYNHNQPYNPTRVFVAHP

SEQ ID NO: 124741 - protein, 338 aa, unidentified
MVVIGIDPHKGSHTAVAIDEDEHKLGEVRVRADRRQLEALRSWASAFPKRSWAIESANGLGALLSQQLVGVGEEVFDVPPTLSARVRVLASGKSQKNDPNDAFSVAIAALRSDRLRVVVAEDHIAVLRLLWNRHKNLTSHHTQAVCRLHALLAGIVPGGTRRRLSADKAAAVLSGFRAKTAVEKARRDQAQILVGDVRRLDAQLKASKRTMVEALAAVPTSLGELSGVGPVATCIILAHTGDVRRFANEDNYASYNATAPIEASSGPRKRHRLNPRGNRQLNHAMHIIAFSQLSHAGPGRSYYERKIDEGKTQKEAARALKRQISDVVYRQLVRDAQR

SEQ ID NO: 124742 - protein, 456 aa, unidentified
MGQKRDQRQHVLERINLHASGIDVGATGHHVAVPPGSSPDGRDVRECGAFTEDLIGIVEWLQACGVTTVAMESTGVYWIPLYDLLDSHGLDVHLVDPRQLKRVPGRKTDILDCQWLQDLHTMGLLSGAFRPPDQVTALRAFVRQREMLVRYASDHIQHLQKALTQMNVKLQHVVTDITGVTGMAIIRAIVAGERDPKILAAHRQAGCKNDEATIARALEGTWREEHLFSLRQALELLDVYQEKIAACDAAIEAHLAGFPDRTGGGVPPQARRTRRRKNQPAFDLRSSLVRMTGVDLTRIEGLEATTVLKVISETGPDMTPWPTVKHFASWLGLCSGSKKSGGRNFSGRTKPCANRAAAALRVAAQSLHHSKSWLGAFLRRKAMQRGMPKAITATAHKLARLIYFMLKNGTEYVVKTQGEYEQRHRERTLASLTRNAKRLGYALVPVGDPIPSECPA

SEQ ID NO: 124743 - protein, 349 aa, unidentified
MEAYDGPQIVGMDLHRRRSVLVRMTEDGQKLATGRIASSPARLTAEIKRAGLHPKVVLEACYGWYWAADALAAAGAEVHLAHPLGVKAFSHRRVKNDELDARDLADLLRMGRLAEAWIAPPEIRELREITRYRCKLVQIRTSCKDQVHGVLAKLGIEVTCSDIFGAWGTRWLDELPLPQPYSWKVASLRQLIGWLTSEITVLEQVTAELLAGHDGYRAVRQLPGIGPVLGAVIVAEIGDITRFRHPARLCSWAGLTPRHYESDTKVVRGRITKQGSRPLRWALIEAVQRTPAGTPVREARDAIIARRGPQARNIAKVAAARKLLTFVFYAMRDGHVRALAARGAEHEAR

SEQ ID NO: 124744 - protein, 347 aa, unidentified
MKKIFIGIDVSKEKCDATAISAEKGLTEVEKLDYLVFENRPKGFRSLLSWAKRLKPDVAMEDILFICETTGAYDRALCDYIYSKGLDIWRESALQILWSSGVRRGKDDKTDSLMIAEYALHHIDKVHLYESPDSRILEIRALFLYRRKLEQEKTSKLVRIKELEVTAGKSKTLTFIIRDAKKSIRQIEKSIKECENKILELVEADEALSKSYQHLDSVKGLGIVNITALIVYTNNFKAFKTSRKMATYWGVAAFRSKSGTSVDKRADVRNLSSSMLKSYLTQAAMHTIAKGGIYHDYYQRKIAEGKTHSVALNNAKNKLLHLAMSLVTHDMDYEANHVFLRTQRVAN

SEQ ID NO: 124745 - protein, 422 aa, unidentified
MLTGEQDNEEIIARVAALDIGKAELVCCARVPDEGRPGRRLQEVETYSTMTRSLLGMADHLRCLGVTRVVMEATSDYWKPAFYLLETAGFETWLVNAKEVKHLPGRPKTGKLDAVWLAKVAERQMIRPSFVPPPQFRQLRDVTRYRADLIAVRTAEKQRAEKLLEDAQIKLSVVASDIFGVCGRQMLAALIAGERDPAVLAQMARAAMRGKITALREAFTGYFTEHHAFLLAKMLARVDAIDADIAALDARIEQMIAPFTAAAQRLDEVPGINAVAAGVILAEIGIDMDRFPTAGHLVSWAKFAPGVKESAGKKKGKNTTGHGNSYLARVLGNAAVSAGRTDTFLGERYRRIARRRGSQKAVVAIGRSLLVIIWHLLADPTARFTDLGSDFFDTRIDPERRKRNHIRQLQALGYTVTLEPAA

SEQ ID NO: 124746 - protein, 343 aa, unidentified
MEKITIIGIDLAKRFFQLHGATADGQPMLRKKVSRSQLLSFLARQSRAVVAMEACATAHYWGRAIVELGHEVRLIPPIYVKPFVRRQKNDATDAEAIVEAASRPTMRFVAVKTEDQQARAMIFRTRDLLVRQRTQLINALRGHLAEHGIVAAQGIAQVSRLAAALNEAVDATLPALVRELGQQYLEHIDRLSTEITGLEQRLRRLSKDDETAVRLQTVPGIGPITAAAIEAFAPPMTTFRRGRDFAAWLGLVPRQHSSGGKQRLRRTSKMGQRDIRRLLIIGAMGVIRWTIRTGPAEGSWLARMLARKPRLVVAIALANKMARSVWAMLSRGEDYRGSAMVAA

SEQ ID NO: 124747 - protein, 348 aa, unidentified
MLADELDYVVGVDTHRDEHVLAVVVSPAGAVVARRAVAANARGYAQALRFADKCANGTRVWAVEGAGHYGAGLARFLSGRSETVLEAGRSPRGERRLQGKDDGLDAIRAARAALGHELPSPRAGQRREALRLLLVARRSAVDVRREALVQLRSVIVTAPDRLRDELRRLPVQRLLDRCSRLRRSAAATPDELAVRLVLRTLARRIEAATVEAAELEREILAHVRALAPQLLDEPGVGPIVAAQLIVAWSHHGRVRSEAAFARLAGVAPVPASSGQTTRHRLSRGGDRQLNRALHTVILHRRLHDPTTKAYIARRVAEGKSKRDATRLLKRYLARHLYRLLDQRTPLIA

SEQ ID NO: 124748 - protein, 377 aa, unidentified
MKKVRFIGLDVHADTIAVAVAEPDGEVRSLGMIQNRPESIRKLMKKLGPPASLRVCYEAGPTGYVIYWQLTALDVHCEVVAPTLVPTKAGDRVKTDRRDAEKLARSFRAGDLTAVWVPDAAHEALRDLVRAREAAKKDQLRARHRLGKFLLRHGRRPSTAMTAWTQRHLTWVRQVQFEHPAQEATRLDYLHEVDHAVGRIERLERAIDEAVKTAPTAMRAVIDALQALRGIASVSAVTIVAEVGELSRFTRAPQLMGYCGMGAREDSSGPRTRRGGITKTGNAHLRRIAIEAAWAYRHRPAVGGALRKRQATVSEEVKAIGWKAQLRLHARYRKLLGRGKCQQQVVTAVGRELLGFIWAIGVSVERQQRKTSSSIAA

SEQ ID NO: 124749 - protein, 420 aa, unidentified
MRNAGIHANSLLEVRRMYNAVGIDVSKGKSTVAVLQPGGTVIRKPFDVSHTSQNLNELADYLSSLDGTTKIVMECTGRYHEPMIKALSEAGLFISIVNPHLIKNFGNNSLRKVKSDPADARKIARYTLDNWTELRQYSGMDNTRTQLKTLNSQFSFFMKQKVAAKANLIALLDNTYPGVNKLFDSPTREDGSEKWVDYAYSFWHADCVRKIGLKAFTERYKSFCKKHHYIFQQDKPEKLFNASKELVAVFPKEKTYKLLIQQSIQQLNLASEHVERLRREMNELASTLPEYSTVMGIYGVGKTYGPQLIAEIGDVSRFTHREALTAFAGVDPGVDESGQHKSKSNRASKVGSARLRKTLFQIMTTLLQNAPEADPVYRFLDKKRSQGKPYYVYMTAGANKFLRIYYGKVKECLRNLEQTE

SEQ ID NO: 124750 - protein, 414 aa, unidentified
MDIVYRCCAGLDIHKKTVVACVRRVDAAGHVCQDVRTFGTMTCHLLALCDWLVEQGVEQVAMESTGVYWKPVFNILESHLAVLLVNAQHIKQVPGRKTDVKDCAWIAQLLQHGLLRASFVPPPPIRELRDLTRQRAQLVAEKSAAANRIQKVLEDANIKLACVASDVLGVSGRDMLEAIIAGEEDAEKLANKARRRMRQKIPQLQTALQGRVTAHHRFQLRILLDHVTHLEALIGRLGGRIEDIMVPFAEAAERLTTIPGVEQRTAEILIAEVGTDMNQFPTAEHLASWAGMCPGNNESAGKRKSGRTTKGSRWLRQALTQAAWAASHTKDTYLAAQFRRLAARRGKKRALVALGHTVVVIAYHLLKQGTTYHELGGDFLERLNPERLTRQLVKRLEKLGHRVKLEPMPDAACA

SEQ ID NO: 124751 - protein, 307 aa, unidentified
MGEYVGVDVSKKWLDVAVASSGQSWRVANDTAGVAAVVAELQPLAAERIVVEATGGWEQALVLGLSQGGLPVALVNPGRVRFFAHGLGRRAKTDRIDAAMLASFAKLAQPRLTRLPDQGEEELRALIDRRRQVVDMLTSEKNRRQLIHGKTRARLDQHITWLEQEVRSLQGELEAVLAGSPALAASNRLLQSAPGVGLIVAATLQARLPELGQLNRRQIAALVGVAPFNADSGPRRGQRHIAGGRADVRALLYMATVSALKCNPVIRAFKQRLCAQGKPTKVAIVACMRKFLTILNAMVRDQRPWEP

SEQ ID NO: 124752 - protein, 424 aa, unidentified
MSSDLEIVAFIGLDWADQQHVIRLRVAGSATVEAQLLDQKPETLRAWIGQLRQRFGGRPVAIALEQSRGSLLYALMNVDFLLLYPVNPQNLSQFRKAFYPSGAKDDPQDALLLLEMLEKHRDRLRVWVPDDASTRCLRLLAENRRKLVNRRTALTNQLTSLLKESFPQALDWAGPLDSLRACDFLEPWPSLQILQKTSTSRLRKFYRDHTRHDSEAIHQRLDQIHQAQPLTSDSAVLAAAELMIPALVRQLRCLIESIQQFDQQLKDRFQQHDDYTLFHSFPGAGPALGPRLLSAFGSNRDRFECAAEVQTLSGIAPVTERSGKSRWVHWRLACPKFLRQSFHEFAAQSILVSPWARTFYDQLRLHGTSHHAAVRTLAFKWIRILFRCWKNRTPYDEQIYLASLRRHGSPLCAAMASPTTGANL

SEQ ID NO: 124753 - protein, 317 aa, unidentified
MEQRQSSTKVAGIDVGKRCLDVAAHGLEDELRVENSPAGFSELIAWLRAREVGRVGLEATGGYERGVRAALEQAGFEVVVHQPIEVRRFAQLKRWRAKNDRLDARLIAAATAQVEAVKAAQDPRLVELAERLTAYEQITDQIVQLKTFLESVTLNDIAGLMRTQIRSFERAKAKLSLEILRRIKAQADLLARFRLLVSLPGVGPIVAASLVIRMPELGAMKKGQAASLIGVAPFDRDSGQRKGQRFITGGRPRPRRMLYLAAVAAKRCDPGLKAFAERLLASGKPKKLVTVAVMRKLIEAANLVLGRGQPWLKQPTT

SEQ ID NO: 124754 - protein, 355 aa, unidentified
MGMLADRAEYVIGVDTHRDSHTVAVCTPTGAVVAETTVTADAGGYRRLLQFVRARTEGHRVWAIEGTGSFGAGLTGFLLEQGEWVVEVDRPARPARRDGAKSDRLDAARAAREALTRQHLAQPRRRGDREALRVLLASREGAILARTQAVGQLKALIINAPDQLRRQLRQLTTHGQLHRCARLRTNPTHSTEHRATIIALRSTARRALALTAEAAELESELHQLVRTLAPALLAEPGVGPITAAQLLSSWSHPGRFRSEAAFASLAGAAPIPASSGQSIRHRLNRGGDRQLNRALHTIALSRLGHHPETKRYAARRSAEGKTTREIRRCLKRHLARRLYPLIVADLTDAAALHLT

SEQ ID NO: 124755 - protein, 346 aa, unidentified
MKEVVTIGVDLAKNVFQVHGVDAEGAVIVGRQLRRSQVLPFFRKQPPCLVGMEACATSHHWARQLIELGHEVKLMPPNYVKPYVKRNKNDAADAAAICEAVTRPTMRFVAVKSAEQQSVLMLHRTRELLVRQRTMLVNAIRAHMAEFGIVAPVGIPRVIELFAVIADADDDRLPPIARACLEGLARQFMSLHEEIAIAERRIHAWHRSNEASQRLETIPGIGPITATALAATITDPSVFRSGRELAAWIGLVPRQNSTGGKERLGHISKQGDQYLRWLLVAGAMTIIRHAKRRGTSNLPWLANLITSKPTKVAAVALANKMARIVWVLLRTGQDYQKPAITRHMTM

SEQ ID NO: 124756 - protein, 276 aa, unidentified
MKQYVGVSQDQTSICVVDESGRVLWQGKCASTPEAIAATLGSRAPQAERIGLESGPLSIWLCHGLTALGLPVVCLDARHAKAALSLQLNKSDANDARGLAQIVRTGWYREVAIKSLDGQLVRALITARAQLVAQRVDLGNQIRGLLKPFGLLAGKGEGKTFAEKVRSLVPDGPLHEVTEALLRAWEAINKEVATLSRRLVTEARQDDTVCRLMTAPGVGVLVALTYVSTIGDPARFPHSSSVGAYVGLTPRRLQSGETDYTGKISRCGDRLTRTYL

SEQ ID NO: 124757 - protein, 372 aa, unidentified
MEGFCGLDVHKDSVFMCILTDSGEKFEDVFGTLTPELERLRQQLCLHHVKEVALESTSIYWVPIWRVLESEFDVKLVNPYFIRQLPGRKTDVKDAHWIAMVLQKGLIKSSFIPDDQIQQLRHYNRKIFYLNRNLQRAEQGIDLILQRCNIRLSNYVSDIGCKSMRNVIKALSQGNYDPQQLVKLVHGRITNKYGIDCIKDSLTGIISKVDTDMLGMGFAEVEFFEKQLSDCKQKLLDLCRQYYGQQMDLLQTIPGVREHSAASIIAETGVDMKAFLTASSLVGWAGLRPRNDESAGKIKGRKTLHGNKYLRVMLVQCAWGASRTKASRFQIRYNTLKKRMNHNKALVANARKILVVIWHILEKKQPYVASAA

SEQ ID NO: 124758 - protein, 362 aa, unidentified
MTFFIGVDLHKTQFTVHVRTDEMTETLKQIRQYKTDKSGYAEFTERIQAYCESGACVKIGVESTGNTRFFKHQVEKAGAEVTVINTLKFKVINESAKKTDKHDAATISEFLAKDMLPESYLCSKETENIRRLLKSRERLVRSIVGQKNEVHALLVSMGLKDEQRSLQSKKGRQKILDVLESNNDYVLEAQSVKLMVEIISQMEAAVKIIEKQLSELTKDDEMVNRLLTIRGCGKITAWTIRAYTEDISRFSSAKKYAAFCGLVPWVSDSNETIRHGKITKRGPQELRVSFVQMVMGIRRCKDTANWRIMQRYDYMKTHKGSGKSIIAAARKLAEIVWAMLSNNNDFDREKMYGKYKPAPLAV

SEQ ID NO: 124759 - protein, 312 aa, unidentified
MTSEKFIGIDVSKRWLEVNVYGEEATWKVENDAMGFISLIEKMKTIQPKLIVFEATGGYEAEAAHALSESGFAVAVVNPTRVRRFAQALGILAKTDKIDAKIISHFASVVKPAANTLQTPLEEQLAAFVERRRQLLVELVAEKNRLSTCPACVRDEIREHIAWIEKHVEQLEAEIQTCISQNPEWQKRAEIIDSAPGVGSVTASTMVAELPELGQLNRQKIAALVGVAPFSNDSGPKKGKRRIFGGRTGIRRTLFMATLSASKNNPIIRPFYDSLIKRGKEKMVALTACMRKLLVIINAMVRKGEAWQSPPA

SEQ ID NO: 124760 - protein, 367 aa, unidentified
MKQQTSATTETLTKGREIIDFTGKLIYVGIDVHQKDYQVAKLCNGICLGNHRMPASSEGVIKHLRTHYPGATFKCVYESSAWGFNLQRALTAAGMDCIVVHAADVATNDKERKRKTDKVDALKLARWYASGEAKGIHVPDEVIQKERAIIRYRAAVISDITRCKNRLKGLLKYQGINIPDIYAKNNWSRNFINWLEQQAAKDEFLKDSLMLMLEQLKLLRQLLLKTERKLRELRNGKYKQQAELAMSVPGIGPTTAMLFLLEIGDINRFKGFDALNDYIGFCPDTDSSGETDIDTGITVRSHKRLRSVFVEAAWQAIRIDPALLDSYQALTKRMKGQQAIIRIARKLLRRLRAVLISGVKYQVGVKA

SEQ ID NO: 124761 - protein, 392 aa, unidentified
MSKVIMIGCDLHDEKMRLRMAADAGKSVAKSLATADVAGLVDWARDFAVQQGASRIVLAYEASGQGFGLYDALTDAGIECYVLAPTHLPHTPHGRKNKTDDKDAQMILDEVRGHILAGRKLPAVWVPDPQTRDDREIVRMRLEMGEARTRIKNQIRNLAKRSKLAFPAWFTKSGEWSKRSLAWLTEAAQGTAGNLAEGVRTGLTSLLALYGEFSRQLGELDKAVAQLAGRKRYAQVFRKLKLMPGVGTLTAMTFLTELGSLARFANRRQLSAYLGLAPTAFESGQQDDRKGHITRQGPARVRHMLCQASWAALRASDQWRATYEKLKRGSAKRSKIAIVAVMRRLAIAMWHTARSTELDGLLHEIDQQRTSAPARQKGPPLAPYALASACCE

SEQ ID NO: 124762 - protein, 349 aa, unidentified
MIVERTSVGLDVHARSVVATGLDSVTGEVFKTTLVPAHEEVIKWLRTLPGPVAATYEAGPTGFGLYRALTAAGIRCEVAAPSKLTRPSGDRVKTDAKDALLLAQLLRVGQITSVRVPTVTQEAARDLVRAREDVRVDLLRARHRVSKLLLRHGHVYYGGRAWTGVHEAWLRRIRFDLPHQAGTRAAYEADLEAVAFAVARRDRLDATITAMATESEFTPIVRKLWCLRGVSTLTAFALAVEIGDWERFTGASIGAYLGLVPSEHSSGQSRRQGSITKAGNTHVRRLLVEAAWHHQRRYLVGKTPPGPLGPSPRSGPCACPCREPAPSPALGHDERPEEEAHRGEHRDRA

SEQ ID NO: 124763 - protein, 367 aa, unidentified
MKKVSTILAKQSRKSFQQKLTIGLDLGDRNSWYCVLDEVGHIQLEQRVRTSAKGLGEVFGAMPHSRIALETGTHSPWISRLLREFGHEVIVANARKVRLIGESRKKDDRLDAQTLARLARIDPELLCPVKHRSAQAQADLMMIRARAGLVRARTGLVNTARGLAKSYGERLRGCNVRNMNPEKAEGLSAELQAALEPLLAAIESVSDRIAEYNQRIEKLAQESYPQVAVLKQVKGVGTLIALTFLLTLEDPHRFDKSRDVGCYLGLQPGRRNSGQSEPQLHISKEGDPYLRTLLVQGAQHILGPFGVDCDLRRWGLKLADRGGRNGKKRAIVATARKLAVLLHHLWVSGEVYEPLHNNSRVAVTAAA

SEQ ID NO: 124764 - protein, 352 aa, unidentified
MAEYIAFDSHKHYTLVERQDVKTAECVRCRIGHVRGAIRNYLGKLPQRGDAVAVEATGNWYWIVQEIEDAGFKPQLVNPRKAKLMMGTVNKTDKLDVRGLNRLQRAGVLPTVWVPPAELRDLRELTRIRMVMSRGNTRLKNRIGATLSKYGLQGSEASDPFGTKGRAELDGKVSQLPTETSHAVRLLLAQIGLVQKQIGEEEKRLKRLVKKTPEIQLLMTLPGVGLILASVIYLEIGDIRRFASAEHLASYSGTTPRVHSSGDKTTYGGLRADVNRYLKWAFAEAANVLAMQRNQNDGRHVTQLYLRLREHKGHSKAIGAVARHLSEAAFYVLSKKEAYRDPALRRDSSREV

SEQ ID NO: 124765 - protein, 354 aa, unidentified
MRLYQTTTEFNCGVDLHARQMYVCVVDKEGKVLVHRNIKDNDFEFFLKLVAPYRHSLTVCSECCFCWFWLADACMEAGIPFVLAHALYLRSIQADKKKNDRVDSEKIAHLLRTNMIPYAYVYPRGMRPLRSLLRRRMAYVWHRAELVGWQTCGLIAEGKPKAETQAGSRERWEQELLQRHDNEYLKLMVTTDLALIREYDRQVDRLERTIMSAAKQDRWRDLHVLLSVPGIGKVLSMTLLYEIGEISRFSRHQEFCSYARLVKGSVESAGIIKGMRGGKMGNGYLKWAMREAVLVAKRAHPEIRAMAQRLERRHDRPTVNAILAHRLGRAIFYMLKSGMTFSMDLFSKKLERAA

SEQ ID NO: 124766 - protein, 429 aa, unidentified
MQNESTPGARGPVFCGVDTHADLHWLCVLDWRGRKVLSRQFPADAAGHEALAGAIAAAGEPACVAMEGTSSYGAGLTRHLTSLGMPVREALSPAGMQRRRPGQGKCDEADAERAARAAMSGSRLGTPKSQDGWVDGVRCMLAARSGAVKARTSAINTARSLLTTAPEGLRSRFRGMAGPRLMEELPSVRAEGALGAALGALADLWAAALDAALDMERAIEASLEENCPALLAMYGCGPVSAAKLAVAAGDNPGRLRSEASFAAICGACPIPASSGKTVRHRLNRGGDRQANSALHEIARQRVMRDPETAEYAERARARGKSDREVMRCLKRYVAREAYRALMRPHEIRRPEDASELVAARRAARVSQVRAASILGTSEKYISMLERGQRELKPIRRAYEAWVEAGLPLDWDRQAFEAERKMDSKKHLAK

SEQ ID NO: 124767 - protein, 356 aa, unidentified
MKQISYLDFSNQHIYVGLDVHHKQWNVSIVSGNILLGRMSREPNTASLVKYLRTNYPGGEYHCVYEAGFCGFWPYYELTEAGVDCIVVNPADVPTTHKEKDRKNDRIDSRKLARSLSNGELEGIQILDPQSYEHRALLRTREALVKDQTRCKNRIKGLMKFFKIEIKDKDIKSHWSNKYINYLEQIDTLNVSLKISLISYLGQLRHLRSAISDITKQIRNLAMTEKYSKNVELLCSIPGISVLSAMILQLEIGDISLFRNLDKIRSFVGLVPSEHTSDKKKIQNHMTRRGKGILKKIIIEVSWTAIRKDPGLLMVYENLIKRVRGSRAIITIARKMIGRIMFVLKNNEPYKFLSVK

SEQ ID NO: 124768 - protein, 425 aa, unidentified
MEDILTNVCGLDVHKETVVACIIKNKPTIGPVTDPSKATVTTEIRTYSTLYDDLQKLRLWLEAEKCHDIAMESTGIYWHPIYDVLETAYDGDVNLLVVNARHMKNVPGKKTDVKDAEWIATLLRAGLLRGSFIPPEEIRQLRQLTRYRKTIVEDICAQKNRIEKFLQSSGYKLSNFLTDIFGVSGRSLINILINKGKITPRDVELELRGNAKHKIKDMRSALNGVMNDHQRQFLALQLEHLDSLISHQKKVEGDIDALSSQFSNEIDLLTTIPGIGQTAAKAIIAEIGVDMSRFPTADHFTKWAGLSPGDNESAGKKKSTRITFGNTYVKGLICECAWCMVRSRNTYLSQFYWRLKARRGAKKAIIAVARKMLVIIYIMLSNGVPYSEESFEKARKKQDDTRVRKIIKDAARLGLVITQKEEDVA

SEQ ID NO: 124769 - protein, 317 aa, unidentified
MEQRQSSTKVAGIDVGKRGLDVAVHGLEDELRVDNAPGGFSELIGWLKAREVGRVGLEATGGYERRVRAALDGAGFEVVVHQPIEVRRFAQLKRRRAKNDRLDARLIAAATAQVEAVKAAQDPRLADLAERLTAYEQITDLISSLKASLESVTLKDLAVLLRTQIKTLERTKARLSLDVLRRIKAEADLLARFRLLTSLPGIGPIVAASLVIRMPELGGMKRGQAASLLGVAPFDRDSGQWKGQRFITGGRARPRRMLYLAAVAAKRFDPGFKAFAERLTTAGKPKKLVTVAVMRKLIEAANLVLARGNPWSATPTT

SEQ ID NO: 124770 - protein, 359 aa, unidentified
MSVYVGIDVHRKRSQVAVVAEDGKVQLNKNTVNGTEPILRLIGDLPAGTPVAFEAAFGWSWLAELLEDYGFEAHLVRPLRCKAIASARLKNDKVDAATLAQLLRADLLPEAWIAPHSVRQLRALLRHRAGLVRLRTMLQNRIHAVVADFGYDRSGSYLTGPGRGWLAGLELPAISRELVTDYLAVIDGLAPVIERIDGELRQHAKADPRVKTLTTLPGVGQFTALVMLAEIGDITRFPSARKLASWAGLTPTVRGSDLHVRHGHISKQGSAWLRWVLNQAAQTAKRSPEFSASYTAIAKRRGKKIATIAISRKLLTRAWHLLAAAQAPGPATPDGSNGYRRTPPDREGHQAPGELALAA

SEQ ID NO: 124771 - protein, 409 aa, unidentified
MEVMFERVAGLDIGKATLTACVRTPGPRGRHRETRTFSTMSRSLEVMRDWLLANGVTIAAMESTSIYWKPAFYCLEEVMDTWLLNAAHIKAVPGRKTDVKDAEWIAQLLECGLVRPSFVPPPDIRRLRMLTRYRLQLMGDRTREITRLELMLEDASIKLSSVAASLSSVSARAMLMALIGGESDPRVLADLAKGKMRRKIPALAEALTGHFDAGHAQLARSMLHRLDLVESALAELNAVLAEACRPWAHQLELLQTIPGVGEKVAQVILAETGGDMSRFPSAAHLASWAGLAPGVHESAGKRQRPEQQHGNKWLCSMLVEAAGSVGRMKGANYLAAQHARLTSRRGMSRAQVAVAHSMLVSAYYMLTRDEPYQDLGPDWLAKRNDEAHTRRLVAQLERLGHTVVLDSVG

SEQ ID NO: 124772 - protein, 309 aa, unidentified
MKQSVVYIGVDVAKLHLDVAWAAECRRFPNDKRGQAALVAWIKPSLTAVQLICEASGGYEQGLLESLERSEVKFTLVQANRVRQYARAAGILAKTDKIDARVLAAFGAAMQPSPSLPHSAEQKRLRQYDAHRRHLSALLVAEQNRLAQLNCAELRALSRSLINKIQKQIDTLDARIGDLIAHDQQLRAKAQKLISITGVGTRTAALVLAQMPELGKLNRRQTAALGGVAPFNHDSGKVHGQRTIFGGRRALRSGLYMAALCAARHNPILSSFYQRLRAKGKPHKLALTAVMRKLLLALNSCLKPQPILA

SEQ ID NO: 124773 - protein, 354 aa, unidentified
MTIVAHSRPFVVGVDTHAKNHVYAIITAGTGELIATRAFPTTGAGINRAIAWVARHTGADLAALWVVEGAASYGALLAGAVGAAGYEVAEAARMDARQGTGKSDPLDAHRIAAAVLPLDEQQLRQPRLNEGVRAALRILVCAREAMTTDRTRAVNALTALLRVNDLGLDARKPLTGAQIAEASRWRSREEPLALTVARSEGVRLAKRISELDADIKTNNRQITELVQISEAAPLLQEPGFGPVTAAICLTAWSHHGRIRSEAAFASLAGVNPIPASSGNTVRHRLNRGGDRTLNKALHMVALSRMTFDPATIGYVHKRQAEGRTKKEIRRCVKRYLARRTYRTLNATNTDPRHP

SEQ ID NO: 124774 - protein, 442 aa, unidentified
MQQVIIGVDPHKLSATIEVVDDHERRLGEGRFTTDRAGYAAMRTYVKAWPQRVWAVEGANGTGRPVAQRLLESGEDVLDVPAKLAARVRLFDTGHNRKTDAHDAHSIAMVAVRTQGLRVLHVDGELQALRMLVDRREALSRRRVQTVDRLQALLAELLPGQAKKDITTGQAKTMLATVRPRDLAGKTRRRIAAEELAELVAVEAKQKKATAELKAMVTAGGSHLMDLYGVGPVVAARVLADVGDVARFADRNRFASWNGTAPLDASSGENNRHRLSRAGNRRVNHMIHIAAVTQLRLPTDGRVYYRRKRAEGKKPMEAMRCLKRRISDAIYRQLVADAMATTPRVNAGPGGHCGASLVSSAAGFNPHTGTSDQPLPGPAIPTLPANTVLANPPAGAGSPAQAPTCRSRQGGAPHRTNDLDGDKRRRTLQRADPGPLTTEGRR

SEQ ID NO: 124775 - protein, 463 aa, unidentified
MGGKIKGTSDRKRKRLSKHLEQINLYAAGIDIGSSSHYVAVPEGLDTESVRSFSCFTGGLKRMAAWLVEIGIETVAMESTGIYWIPAYEILEESGLEVLLVNARNVKNVSGRKSDVLDCQWLQQLHTYGLLQGAFRPPEHITSLRAYMRQRDTLIKYASSHIQHMQKALRQMNLLLDNVVSDITGKTGMAIIRAILGGERDPEKLAVYRDPRCRKSEEEISASLHGHYREEYILALRQSLHLYETYLEQIHECDLAIKELLDGFESNGDPDSLPPSRERKSASAPQWGAREELFRITGVDLTRIPGISEVTALKIISEIGTDMTRWKSAKHFASWLGLSPGTNVSGGKVLSKKTKRTANRAASALRMAAFAVTNSKSAIGAYHRRMRAKHGSPKAITATAHKLARLIYSMLQDGVEFVDKGMDYYENQYKDRVLKNLKRRASQMGFELTPMENTGALSTSGVM

SEQ ID NO: 124776 - protein, 482 aa, unidentified
MNCRRLVGIDLGIASAHTVRVLDGEGITIAKRKAWPTVESLTDVESAALADCPAGTGLEVIVEPTGPAWLPIAVFFSARGHVVYRVSSAKAADLRRFLSRHTKTNGIDADTLARLPLFDPAGLQPLELPGADRAALDRRVRATDRLTQAGAEHKRRIKDLVRQLLPMTPLTGDLGVADLAVLERFADPNALVKLGLKRLSALIAKASHNHQDTERARQWLDAAEASLELYAGHPAVAFADLAAEVATEVRLLRAIQAELAAHATERENRYRRVDPTELARSLPGLADVGGPALVACMGDPARFERGKQFRRFTGLTPKASETGETDRKGQAMSKAGSSLLRTTMVRAADTARKLDPQLARIYWVQMVERGKDHLGALCVVAAHLAERAWAVMHRGTPYVICGTDGRPVTSEQAKTTIAQHWTVQAEVRARRRSKKVGKAPQKVLAGQSKPRARSARTRGDLPRPASSPSAQQPVKQLATTPT

SEQ ID NO: 124777 - protein, 348 aa, unidentified
MEKIIRIGLDTSKSVFQLHGVNQAEQPVLRRKLRRGQVLAFFAALAATKVGMEACGAAHYWARELRALGHDVVVLPPQYVKPYVKRSKSDAADAEAICEAMSRPSMRFVPIKSADQQALQMLAKLRAQFIGRRTQLANSIRGFAAEFGLVAPKGLARLGDLLADLRIDTTIPDMAKEMFETLACDYARIDEEIAALDGKLLALHRSNEVSRRLAAVPGIGPIGATLLAIKVTDAHGFKAGRDFAGWLGLTPKNHSTAGKNRLGVITRAGDEMLRSVLVAGATAVIQHMRRTGKRAWPWLEALIARKPAKLAAVALANKLARIAWKLMVSGEHYRPLGTVVPVATQAKP

SEQ ID NO: 124778 - protein, 322 aa, unidentified
MTQQAVLGTDVSKLKVDCGLLWADGKYRSKVISNDAAGYAQLWQWLNRLAVGEVHVCMEATGVYWEDLATALAGYGLAVSVVNPAQIKAFGASRLVRSKTDAIDARLIAEFCHAMQPPQWQAPSPSEQALRALVGRLDALQQMRTQESNRLAVARDAVRPSLCEHLEWLDQQIKTVAQQIDHHIDQDPDLRGKRDLLHTIPGVGGRTSALFLAFCGRSNAFATARQCAAFAGLNPQQHQSGSSVQRRARLSKIGHALLRKAMYMPAMVTLYKTAWGTAFRLRLARTGKPAKLIIGAMMRKLIHVAYGVLKSNRPFDPSLHPA

SEQ ID NO: 124779 - protein, 316 aa, unidentified
MTHKEEMFLGIDVSKDWVDAYLLPSNETWHVGTDQVSLEDWAKSLPAGIALVVMEATGGLESTVALILAQRGLPVAVVNPRQVRNFAKSMNLLAKTDALDAHAIALFAQRIRPDARPLKDEQQREFEEMLTRRRQLVAMQTREKNRLGQVRSKQVRTSIESHLAWLQKQIQESDKEMDDAIKSSPLWHERATLLKSVPGVGPVTARTLTCGLSELGQLNRREISALVGLAPFTRQSGKWRGQSFCSGGRGHLRSALYMAAFNASRFNPVLKEFYERLIAKKKPHKVALTACMRKLLVILNTMVQKNQMWKMEGQIA

SEQ ID NO: 124780 - protein, 391 aa, unidentified
MVCVGIDVAKDKHDCCILDSDGMVRADCFTIPNNMDGFKQLLQTIRNCTQKSDKIKVGLEATGHYSYNILGFLLDKDLAVYVMNPLHTNLYRKSLSLRKTKTDRVDARTIATMLLSDVDLKSYTDTAYHNEELKSLTRYRFDKVRERAKLKQSVSRLVTILFPELEKLVPSLHIASVYALLSEYPGAKQISEIHLTKLTNLLATASKGRYEKEKAIQIREAARTSIGSVMSAKSLELKHTIKLIKELTSEIDEIEDSIQQIMDELHPPILSIPGMGVHSAAMILAEIGDFSNFDSPDKVLAYAGCSPSTYQSGKLTNCYAHMEKRGSRYLRYALYNATKYVCHWNPVFAEYLAKKRSEGKHYNVALSHAMKKLVRLIYALQKSGKAYLTAA

SEQ ID NO: 124781 - protein, 402 aa, unidentified
MNAVGIDVSKGKSMVAIMRPFSEIVFAPFEIKHTVSDIHSLVELINSVEGESRIVMEHTERYYEALARQLSEANLFVSAINPKLIKDFDNDSLRKVKSDKADAVKIAQYALDKWHNLKQYSVMDELRNQLKTMNRQFSFYMKHKTAIKNNLIGILDQTYPGVNTYFDSPARSDGSQKWVDFASTYWHVDCVRKMSINAFIDHYENWCKRKKYNFSKSKAEEIYGKAKELVPVLPKDDITKLIIKQAVDQLNSASITVESLRTLMNETASKLPEYPVVMAMKGVGTSLGPQLMAEIGDVSRFTHKGAITAFAGVDPGVNESGSYEQKSVPTSKRGSSDLRKTLFQVMDVLIKTHPQDDPVYQFLDKKRAQKKPYYVYMTAGANKFLRIYYGRVKEYLASLPES

SEQ ID NO: 124782 - protein, 392 aa, unidentified
MTLINIVAANQKYYAFNLLSVFIMVFWSVQYLLQHLLVQTQLSDQLLQPLILIFQLPQTPQFRHARPGKFFLPVNGMDYLLPLRLTVRNVLTKRITMNIVFLGIDLAKNVFQLCGLNQAGKPVYTKRTGRKELLQTLANIPACLIGIEASTGAFYWQREFEKLGHKVKVISPQYVKPFVRGQKNDGNDAQAIAVALMQPTMQFVPPKSPEQQDIQALHRARQRIVNHRTATVCQIRGLLLDRGIPIGSAVSRARRAIPLILEDAENGLSSRMRRTIAELYDLFNDLGRRIHFFDKEIETVFRQSEACQHIAKVKGIGPKTATAVAAAIGKGTEFKNGRHFAAWLGLVLRQHSSGDRQVLMNMTKKATSICGHFLFMVPALSSGLPRITMMVI

SEQ ID NO: 124783 - protein, 403 aa, unidentified
MNSVGIDISKGRSTVAVMRPFGEVVISPFEVRHTDSELSELARQLKSLDGETRVVMEATGNYHAPVAKLLHDAGLYVSVVNAKLVHGYGNNDLRRVKTDRKDAVKLANYGLDRWLTLPRYVPEEDTRLLLKNCYRQYRQYSKVQTVLKNNLVSLLDTVFPNANRLFSSPICRDGSEKWVDFVAEFWHCRCVSEKSEKAFTSKYQRWCRKHGYNFREEKAHTIHAEASGHIGVMPKSETTKLLVEQAVSQLRATSAALAALKQEMQTLASTLPEYPVVMAMFGVGPTLGPQLIAEIGDVRRFYSKKALVAYAGLDAPPNDSGDVTGRHKSMSKVGASSLRRTLFLVMSVYLQNAPLDEPVYQFMDKKRAEGKPYRVYMMASANKFLRIYYATVKAYLESLEHSA

SEQ ID NO: 124784 - protein, 466 aa, unidentified
MASRSSPAGLAALVPKSERTIAHEAPCISVTYDSATMHRKQNMPMKTWKEITHYAGFDWARYRHAVVIVDQQGQIVADFEFDHDANGWKSFREQTAAYPNLAIAIETNQGAAVDQLLQHECTVYPVNPVAAESYRKRKAPSGTKTDHLDGWGLADALRLDGHGWKALQPMDDLTLQLRLLCRDEVVLIGQRTLLVNQLQQALLEYFPAALEAFDDWTQPSAWEFLLAFPTPQTLVKAGKRRWEKFLHTHRLWRPQTAEKRLGMFARAEEFKASLPIVQAKSQLAQSLCRMLRTLQQQLEQYRAQIEALFKDHPDHDLFGSLPGARKVLAPRLLAAIGSDPDRYGSDTNVLQCFAGTAPVRFQSGQIDKVHLRKGCDKFLRHTVHLWADCFRKSSAWGQVYYRKKRQEGKSHACALRCLGQRLLKIVFRMITDKQPYCADKHALNQQKHGSWVLALVNPNAPKSPCA

SEQ ID NO: 124785 - protein, 374 aa, unidentified
MDDHSVAYVALDTSKLRNAVAIAEAGRDGEIRYLGEIDNAPAATAKLARRLAKKHATLTFAYEAGPTGYGLYRQIKNLGHDCIVVAPSLIPHKPGDRVKTNRRDALSLARQLRAGDLTAVWVPDPHHEAVRDLTRARGAAVRDQRAKRQQVSALLLRLGLHYPGKTTWGKAHMAWLAGQKLAHLEQRIALEEMLHAVRQAGDRIARLEQAIHAAVPDWSLAPSATALMALRGIEFIAATTLLAEIGDLTRFRTPRELMAWLGMVPSEHSTGERTRRGPITKSGNRRARSVLVECAWSYRHPPRVSRDKLARLEAAPPAVRDIAWKAQSRLTARYRALRRAGKLDVVAITAVARELAAFIWAVGVAVGSGRTPEV

SEQ ID NO: 124786 - protein, 350 aa, unidentified
MKYIAVDIGKRDCKACIMNSDGTKAEETKYNNTLGEAEIFAYSIVKKYGKCVAVCESTANLWLKTYQAFEKYNIGVKLANPLKTKAIAEAKIKTDTLDARTLAHLLRSDLVAECYIASREIREDRSLLRLRTNLVQDRTRVMNRVRSLLDKYDVKCDYDNIFGVKGIRWLKSLKLSDNDQILLHEYVMQIEFLNTEIKNIESKIICEASKNESVKILMSMTGIDYFSAMMMASEIGDITRFNTPEKLVSWSGLCPSIHQSGNSLYMGRMKYGNKKVRWILIQAANTAARNDDRLKKFYIRIAKRHGHNIAITHVANKMLTIIWYMLVNKKLYNERKHSLYETKLKRIQRT

SEQ ID NO: 124787 - protein, 343 aa, unidentified
MDHFAGLDVSVKETSVCIVDDTGRIVREVKVASEPEALLQVLRNPIHRFKRIGLEAGPLSQWLFSALAEAGLPVICVETRHMRAVLQAQINKTDRNDARGMAQMMRAGLYRPVHVKTLRSQKLRMLLTHRKLLQSKAIAIENDLRGTLRNFGLKVGVVGTVKFEARIKELVENLPDLAVLVEPLLMVRRVLREQFAILHRRLLAIVRDDEVCRRLMTVPGVGPVVALTYRATVDVPARFRNSKAVGAVFGLTPSRYQSGEINRTGAISKCGDEMMRVMLYEAAHIMLLRLAKWSWLKAWAMKIARHRGMKKAIVALARRLAVIMHRIWVDGTEFRWTREVAAA

SEQ ID NO: 124788 - protein, 370 aa, unidentified
MGQSTPLYVGLDVHKDTIAVAHAQGQSADPPVFVGEIGPRQADLDKLLRRLEAKTAALVFAYEAGPCGYGLYRDLTSRGFTCQVVAPSLIPKKPGDKVKTDRRDAVELARLLRSGDLTGVYVPTLDDEAIRDLVRARDAARLTLKNAKLRLKGFLLRLGLHYVGRADWNAAHLRYLAKVVCPTAAQQVVFQESVRAVDEQVDRLGRLEAELLERAPAWRLYPVVQALQALRGVQWLVAITVVAELGDLTRFDSPRQLSAFVGFVPSEYSSGQARRQGGITKAGNGRARRALIEGAWAYRHPAKVSAHIQTRIDGLPKPIQDLGWKAQVRLCKRFRRLTARGKHPNVAVTAIARELIAFMWAIARQVPVTT

SEQ ID NO: 124789 - protein, 383 aa, unidentified
MEQKDSSSTITLFVGIDDHQDTLVVAALGRGARRPERWEVANEGRSIRGLCRKLEQMALGQRVLCCYEAGCNGFVLQRQLRAGGVECKVVAPSLTPRRPGQRIKTDRRDAGKLAEYLRAGLLIEVHPPSEEQEAVRDLCRARDQARRDLTRCRQRVNRLLQRRGVRYPGAGRRWTKQHREWLWSIRLEHEADQWVLEDLFLALEQHQQRLARLEAQITGLAEQTPYQDPVGWLRCFRGIDTVTAMTLVSELHDIWRFQTPRELMAYLGLVPAEHSSGASERRGGITKSGNSHVRRVLVEAAWHYRHRPAISKLLLRRQAGQPAEMIALAQRAQERLNHRYFHLLLHSKKHHNQVIVAVARELVGFVWAALQGPASLATEAVPN

SEQ ID NO: 124790 - protein, 352 aa, unidentified
MQKIRKQITGIDVAKDELVVCLGRIYEDFSTELYAHKVFLNTPKGFESLVKWVEKSGPVGRFVMEATGVYFEGLAYYLSDNGYEVSVVLPNKIVNYFRTLSVKTITDKTASEAIAQFGLERNLDKWEAPKGIYRKLRQLTRERGQVVETRTVAKNQLHAETSEAYPNATSIARIKKHIVFLNKQEIEIKAELNDLLKTDPEMRAILTILCSLPGIGVLTAATVLAETNGFNLIRNKRQLTSYAGLDVIEKQSGISVKGKPKISKKGNRYLRKAMHLPALAAIRHDNRFKGIFIRLVSKHGIKMKAAVAVQRKLLEMMYILFKSQTTYDKNFFINNQQTEDQLMPTKRLEEHQ

SEQ ID NO: 124791 - protein, 366 aa, unidentified
MGWTPPRRPWCARVVVFVTTDQEASVSEVSTIGLDLAKHVFQVHGADASGKVVFRKRLRREKVLEFFAGKPACVVAMEACSSAHHWARELTRLGHIVRLIPPAYVKPFVKRQKNDAADAEAICEAAQRPTMRFVAVKSETAQANAVVFRARDLLVRQRTQAINALRGHLGEYGLVVAKGPGHVIKLVEHVEDPDSNVPDAARLVLRTLVEALRFLRERIDLLDREIARRARENNEVRRLMSIPGVGPITATALAALAPPADAFRKGRDFAAWVGLTPSQHSTGGKQKLGTTSKMGERTLRRLLIIGASSVVRKALRQGTAAGSWLGRMLARKPRMLVIVALANKMARIAWAVQAKGEVYRAPVVAA

SEQ ID NO: 124792 - protein, 461 aa, unidentified
MSKKQVSKGSSQAMMSLPVVNLHAAGIDVGSRFHVVAVGQNKDKDVEQFGVTTPDLHDLCAHLQSRGIRQVVMESTGYYWIPLFWMLQSYGFEVMVVNPADIKRYNRPKTDVHDACWLQQLHALGLLKSSFQMDNFGEMLRSYVRRRRNILQDRTRQMNRMHKVLILMNVQIGTQLTDLGGASGMDIIRDIVGGERAPQKLFRHIRKGVKTPEGELLKALEGTWQPQYLFELSQLLQTYDLAGLQLKACDAEIELLLEHWCTENDITPPDPKEPPTPSERKAKDGKNLPPLRVTKILRSITGVDMLAIGGVNGGCFLDVVAETGRDLHQFPSGQHYASWLGLAPNNKISGGKILSSKTPKRANRAAFAFKQAANAVGRCNSHQLKPFFHAMLKRKGWNGAVTATARKLAVIYYNMVTKQEPFNYQTVEEQQAKRRTAILKKIQKSIKELQFTVDELNLTAA

SEQ ID NO: 124793 - protein, 315 aa, unidentified
MYVGVDVAKGVLDVAVEPTGETWRTTNDPEGIGALVRQLQPRQPTLIVLEATGGFETPLAAQLATAGLAVAIVNPRQVRAFAKSLGRLAKTDRLDAQVLARFADAVRPEPRVLPDEAAQGLSALCARRRQIVDMLTAEQNRLRQADAVVRPGLVAHIHWLRQQLGDLDRDLGAAIRESPIWRQKDDLLQSARGVGRVLSATLLAELPELGMLNRKQIAALVGVAPLNRDSGTFRGKRSTWGGRPQVRSPLYMAALVATRCNPTLRTFYERLLAAGKPKKVALTACMRKLLVILNAMVRDNQRWSVELLVPADSCC

SEQ ID NO: 124794 - protein, 375 aa, unidentified
MHMGLKGGAMNTIYIGVDFHARQQTICYLTTDNGELRLHELKHQNKQEVRAFYSQFEGHVIVGLEASGYSPWFERLLEELGCEVWLGHATEIRRRARWRQKNDRRDAELILDLMLHDEFPRLYLPPLQSREVLRMLRYRQKLVKIRTMEKNSLQALALQSGLAKGSHLFTKAGQQELRAAVMSPAMQWQREQWLQLLEPLNQRLTETQLWLKQQSLADQRIARLRTHPGIGLLTSLCLVHSLEPVTRFRNQRKVVAYAGLEPLERSSAERIRFLGISKAGSRILRYLLVEAAHVAVRKDEELKRFYQRLAERRGRAKAMTAAARKLLIRAYIMLRDEIDYAEFRRRAVAARLARKSQRPEVPEFVIGQPASAEPE

SEQ ID NO: 124795 - protein, 424 aa, unidentified
MNLTQNDRLKQVTSDTLIVGVDVGSKTHFCRAFDWRGFELSRRVFKFSNTGMGFLAFLRWTEELMNKTEMKKVIVGCEPTGCYWLTFQKFLQDHGVQLVTVNPFTVNRSKELDDNSPEKSDLKDPKTIALLVKDGRYSTSYLPSGVYAEIREASVCRDQIMKQHVRLSNQIQGWLQKFFPEYFECYADWDSTSGLMLLKEAPLPRDILKIGAGGINQIWRDAKVRAAGIKRAQTLVEAAQNSVGLEAGEAARLEIWVLVNDYILKGEQLKRLDEYLEEKVREIANVEKLLAIKGVGMSTVIGFIAEVGDIGRFTDPKQIQKLAGLEIVKKSSGKKRGQPRISKRGRKKLRRTMYESARALMQWNPAFQDVFLYYRNRKKNPLGGMQAKIAVACKAIRVFYVVLQTGCDFDEEKFRRDIIRPETA

SEQ ID NO: 124796 - protein, 322 aa, unidentified
MTESNLSLFVGIDVSKERLDVGVGANGASWAVDNNLSGLSSLKDRLKELKPTLIVLESTGGFESLALAELYIAGFSIARVNPGRVREFSKSIGQLAKTDRLDAHLLARYAEAVRPAPSVLPSAADQELAALVNRRRQLLEMHVAEQNRLSTAPKQVRKLILEHIDWLKAAIHKLDQELDDFIQGSPLWKEKGDLLTSVPGVGNITAFTLLAELPELGTLDRKEIAALVGVAPLNHDSGRHSGKRHIHGGRSAVRNILYMATLSASRFNPVIRTFYQRLLKAGKFKKIALVACMRKLLVILNAILRSRLPWRLAPALSQALDI

SEQ ID NO: 124797 - protein, 357 aa, unidentified
MLQVSTIGLDIAKHVFHVHGADGKGRAVFSKRISRGKLLDFFAAQPRCTVALKACGGAHHWARQLTQLGHEVRLIPPAYVKPFVKRQKNDAIDAEAICEAAQRPSMRFVAVKSEQQQAAGLVFRTRDLLVRQRTQLINAIRGHLTEYGWIAPKGPSHVATLADLIEEEAMASSLPEAARTMFRVMLDLFAGLNGKIAGLDKEIARRAREDEVSRRLMTVPGIGPISATAIAALAPPAETFAKGRDFAAWLGLTPLQRSTDGKQKLGVTSKMGERTLRRLLIIGSSAVVSRQANRARRRVRGSNRCWLANRVCWYPRARRNEASSRAFSLSQRASSACARASRTSTSARMSAAFFSCF

SEQ ID NO: 124798 - protein, 335 aa, unidentified
MDIRYYIGIDVSKATLDWAVFDGQAIVLQTQSPNSETGIKAALKLLKALPAFTPQTSVSCCEHTGIYNALILSQLTAACFPIWLESSLQIKQAGGLQRGKSDQIDAQRIAEYAFRFRDRLRLWQPPRQLLQDLTSLSALRQRLLLVRSQLQQPIDEQAGFADPKRQKQLVKNCQASLKAINADLDSVDQQITQLIEADDQLKELFALMTSIPGVGMATATEVILATDEFKAITDPKKLACHAGVAPFEYRSGTSVRGKTRVSQHARKRLKSLFHLAAMSAIRVKGELQDYYRRKVAEGKNKMLVLNAIRNKLIHRIYAVVGRGEKYDKDYVPALV

SEQ ID NO: 124799 - protein, 378 aa, unidentified
MTRSERNASPGVATPEEAPSVGSTAPEPQGLFLSTIAFGSSKDPNGCLNTLVRIHKEGPVKMRKYSTKAAGIDTGKSKLDVAIHGTGERLEVANDSAGHEHLIAWLHAHDVRRVGIEASGGYEKAVTAALRLAGFLVIVFQPMQVRSYAGFELQRAKNDRIDTDLIAKCTALSEELRAAPDPRLEAFAEPLTLIDQLGEDIARWKTRRESFHQAAQRDWASAEIKRLTRLRDLERRRLLRAIRGHADLARRLELMLSVEGIGEPTALSLLIRMPELGSVTREQAAALAGLAPYDHDSGRFKGQRRIAGGRARVRKALYAAAFPAAQRWNPQLVALYNRLKDKGKEHKKALVACARKLLIMVNAVLARGTPWIPTQAVK

SEQ ID NO: 124800 - protein, 343 aa, unidentified
MQTITTIGLDIAKSVFQVDGVDAAGRVVIRRQLKRRHVLAFFQRLRPCLIGIEACASSHHWSRELQAVGHTVRLMPPVYVKPYVKRQKNDATDAEAICEAVARANMRFVPTKTPEQQSGLVLHRTRHLFVRQQTSVINVIRAHLAEFGIVAPVGRHGVEELLGIVADPSDKRVPEVARACLAALGAQLRVLKAQILEFDRMITAWHRSSETSRRLDDCPGVGPALATALVATVADPKAFRSGRNFSAWIGLVPKQHSSGGKDRLGSISKQGDRYLRSLFVAGALAGIRYAKIHGTKHRPWLTALLARRPTKVAAIALANKIARMAWAMMAKGERYKQPVALAA

SEQ ID NO: 124801 - protein, 353 aa, unidentified
MKSDKYMGLDVHQAMTVAAVLDAEGKVVLETIVATEAAALTRLVKGLSRPLHVVLEESTQADWLQGILGSHVSEMVVCDPRRNKLLSEGSKADKIDARKLADLLRTGMVRSVYHGHQATRKLKELVRAYETFSLDTQRAMNRIKAIYRGRGIPTPGRGVYQPKQREQWLQKLTESGLRQRAAWLFEQLDQLKPLRKKAKQTMLTESRAHRAVGLLRTIPQLGPIRAAFIVATVDTPHRFRTKRQLWSYVGLAVVTHMSSEYEMKAGKVVRRRKPVATRGLNRNCNHRLKDVFIGAATGGVRDGAYKAYLERLEHHGMSAEMARLTLARKITAVALAVWKKGKEFDPKELNKTT

SEQ ID NO: 124802 - protein, 354 aa, unidentified
MLIIGCDYHPSFQQIAFVDTDSGEFQERRLEHREEAEKFYRELADQGGKVRVGMEASGQARWFERVLAELNLELWIGDASEIARKRERKQKTDRQDAQHILRLMLKDDFPQIWVPSGENRDLRQLLWHGHRMVQARTRIMNQRQAVALNEGICCKKRLWREKGRQQLESFRLAPWASRRRHDLLELLDQLNPTIAALSQAIEQAVEKCPAAQRLQTHPGVGPLTALAFVLIIGKPDRFECGKQIASYLGLVPLEDSSGNRRRLGHITKQGNSLLRFLLVEAAQVTARSLPEWRSKYVHLTMRRGRKIAKVAMARKLAVRLYWMMRKDWDYQQLKKFGSHAGQPGNRDGVKQNIE

SEQ ID NO: 124803 - protein, 363 aa, unidentified
MMTSPVAGIDPHQDTITVGVVDSNGVAICHDTFPNTASGHCATIELLTTHGVEQVGVEGSASWGAHVAIALVAARFDAHEVPPQRSAAQRRARRLDKTDTVDAYATARALLAEPTLGPVQALEVYDPLVAKIEAVLEHRRMLVDVRTLVLHHAQDQIAKLPTDIRDQLCTDGKIEGRLRRLEQLDTTVVSTTAGAYRLSWLIALIDQDRAARRQIRQLERDLDVLLDQHGTTLRDEPGIGPIAAATLLAEVGDPFRFARESKFARWCGTGAVALSSGEGSGQPVRHRLDFGGNRRINSVLYIASVTQHRDIDEARTYINRKISEGKTRREARRAHKRHLANRVIRRMWNDEQHRLSRQLQPAA

SEQ ID NO: 124804 - protein, 390 aa, unidentified
MGLTSGISGERSESAACDAMDSSGAPERHQSAKASDALGSTRKEESVGKHTTIAMDIAKNVFEVAVSAEPGRVKERRRFTKNQMLRFFANREPARVVIEACGAAHALARELEGYGHEMVLLPPGQVRRYVLRNKTDRTDTKGLLEADRNEEIVPVPVKTVGQQALVAVHRLRSGWMATRTARLNAIRGFLRELGVTVPVGATRVLPALAGALEMGRVPGTLEALLRTTADEVRDLDRRIEEAESTLKRMAREMDAAVRLQTVPGIGLLTATALIGSVGEPGRFPSGRHLASFLGLVPRESSSGDRRRLGAITKRGDGYVRMLFTHGARSVLRAASVRKQNDRLRTWALETQKRKGHNKATVALANKLTRIAWAVWLKDRTYEGRAPEEAL

SEQ ID NO: 124805 - protein, 352 aa, unidentified
MTEITTVGVDLAKEVIVVCAGDRTGRPMFSRQFSFHGFAQWAAMLSKATFGMEACSSAHHWARWLTERGHVARLMAAEHVAPFRMSKGAKNDRNDAQAILTAVLQPAMRFVSVKSVDSQAMLAVHTMRRGWNAERTALLNRTRGLLAEFGIWLGRSSARLLRALPEFTETDTLPAPVRILLRQVREQVAALEQQIDACDRQIEEHAKQSDDAQRLQAVTGIGTITSSAIVATVAHARDFRNGRQMAAWLGLVPCQSSSGGKERLGKITKRGDTYLRGLLTQGARSTLQAALRRAPDKRSRLQAWIVAIHDRIGYHKALVAIANKHARILWAILAHGEHYDPNAWQRYANASH

SEQ ID NO: 124806 - protein, 351 aa, unidentified
MPRKSAVCTVTAIGIDMGKTTLHMVGLDSYGAIVLREKVSRGRIASRLANLPPCLIGIEAGMATHYVARELTALGHDVKQVPPTYAKPFRQGHKNDFRDALAVAEAVQRPTTRFVPPKSNEQLDLQALHRVRSRLVSQRTAVINQIRGFLLERGIIVRQGLRFLRQLLPDILAKRTDVLSPRMVRIVSDLAGDWRQLDDRIEIVTDEIETLAKADDSCRRVMTVPGIGPIISSAMVAAIGNGSAFSKGRDYSAWLGLVPKQMSTGDRTILGRISKRGNSYLRMLFIQAARVILLRPANWPKHGFGAWLVRAIQRLHPNVLAAALANKLARIAWTVLAQERSYEARVTKAEA

SEQ ID NO: 124807 - protein, 403 aa, unidentified
MNNVVGIDVSKGKSMVSVLRPFGEVVAKPFSIGHTGSELKELADYLKSLDGETRVVMEHTGRYYEPVARFLHDEGVFVSAVNPKLIKDYGNNTLRKVKTDKADSRKIARYGLDNWAELRQHTPMDTIRMQLKTLNRQQSLYSKTKTMMKNNLIALLDQTYPGVNTLFDSPVREDGSQKWVDFATTFWHVDCVRNMSLTAFAERYRKWCKRHGYNFSQSKAVEVHAGAQDLIAMLPRDALTKTMVRQAIDALNAISASLERLKAEMQALAAQLPEYPVVMAMHGVGDSLGPQLMAELGDVTRFTHRNAITAFAGVDPGADQSGTHEAKSTRVSKSGPPELRRALFLVMDCLLKTMPQDDPVYRFMDKKRAEGKPYLVYMTAGANKFLRIYYGRVKEYLASLEGN

SEQ ID NO: 124808 - protein, 334 aa, unidentified
MEFKHFVGIDISKGSFDVALIKDNNISGIASSVSSNDPKGIVQLEEFLKKQEINLEETLFCMEHTGIYCRLLSQYLTEQKYHVWLEMPVQIIRSLGVQRGKSDVVDARRIAEYACLKKDKAVLWEPPREVVLQIHDLLSLRDRLCESRKMLKQPIKEFKDTGHKQTAQIIESHCKSTLISLDKEILQIEKELEKLINKDSNLKKLYGLARSVPGIGRITALSLLCFTNEFKLYQNPKQLACYCGVAPFEHTSGTSVKGKTRVSHFANKALKKLLHLVAMSTIKTDKELRTYYLRKVAEGKNKMSVINAVRNKVLHRLCAVIKRGTPYQLEYQFA

SEQ ID NO: 124809 - protein, 494 aa, unidentified
MRMASSSPASRRNAKNALKLKKQTRERAATATSPVEMEKLEPVHRRAAGIDIGSAENYVAVPPETVAPGESSVRVFGVFSEQQDALVEWLRSCQISTVAMEATGVYWLTLYDKLEAARIEVYLVDPHGVKAVPGRKSDWLDCQWLQKLHTYGLLQRAFRPDAPIRRLRTLTRQRTGLVCAAASQQQQMEKALVCLNLQLGLVISDLVGETGISIIRAILLGERDPKVLVERYRSVRCTKASIGEMKQALQGTYNDEDLFVLQQCVDTWDFVQQQVRECDGKIELVLAAIPTARAVELKAPPLPVPTAAEQPKKKANGTQGKNAPQKDFTPILRRICGVDLTQVMGLNLLSVLMLLGEIGTDMSRWRSAQAFCSWLGLCPGAKISGGKVLSRRTRKVTNRAATILRLAAVAVGRTDTWIGLFYRRMKARKGGPKAVTATARKLACIVYHMLKFQEEFMALDMEKYVAHAQAHRLRYLKREAQKLGYELVEAEEVA

SEQ ID NO: 124810 - protein, 324 aa, unidentified
MQKDPLYCAIDVSKERLEVAGAALGLPEQLDNNHAGYRRLIRAAQKYPGVVQFVFEATGPYHLGLALALWEAKLALSVLNPARVRYFAKAQGKAKTDPLDKEIIGAFAQAFGPQPTPAPEPVRGQLMELLQRREGLISSRAAEQNRLGQSHHRVIERQIRRLVRQLSEHIEQIEGLMNKLVDSCAQLKAQVERLCQVKGVGQLTALSLLITVPELGSLGRNRISRLVGLAPLNDDSGRQSNKRFIQGGRRRPRAALYMASLSASRHNPVLRDFYQRLLKAGKPKKVALTAVMRKLLICLNALLRQPLEQKASSEDFGFAKVAAT

SEQ ID NO: 124811 - protein, 408 aa, unidentified
MSRVIIGMDPHKRSATIEIMTSDETVVGGGRYATDAAGHRAMVAEVRRWPERTWAIEGCQGIGRHIASRLLAAGEEVVDVPPKLSARTRVFATGQGRKTDATDAHSVALAATRMPGLRQVVDDQQLAVLRILADRRRSLGEDHTRMVSQLHQLLLELIPGGAKKDLSAAQAKALLARVRPRDAAGKARRRVAAELVSDLERIYQRKKDANKELSGLLAVTGTTLTDLHGMGPSGAARLLVEVGDVTRFPSRGHFASWNGTAPIDASSGDQVRHRLSRAGNRQINRVLHIMAVVQLRNPTQGRAYYDRKVAAGKTPREAMRALKRRLSDIVYHQMIIDARRAQTGPGGHVGAATGSSAAGLHPSAGTSEKSLPGPATSDPMPGKPIHSSGHTRHLPSAPDRRRRQAQSA

SEQ ID NO: 124812 - protein, 320 aa, unidentified
MTYIGIDVSKDSFVAAYPKKSGYTTKTFLNTTSGVRQFISSLPEDCHCVMEATGNYSMLLLYLLQQANIIVSMENPQKIKHFARAMLSTTKTDEIDAKLIALYGEKMEPAPYKIPSESIILLKQKRTVLRQLKKQLIAMTNMQHAMSVLPKQDPTAKVAIEQTIKFLHKQISKLEDEITHLSNKEFKRQMELLTSIKGIGENIASALILATGGFTYFSSAKQISRFLGLCPTYQQSGTSVNVKGHINRNGDTHLRSLMYVVAFSSIRSNTACKETYERLRSRGKSGRVAIIAIANKLIRQAFAVVTNNRPYIDGYVSSLA

SEQ ID NO: 124813 - protein, 362 aa, unidentified
MKQTLATAPVCSPSTIAGEVIGIDLGDRWSRYCVVDQTGTVVEEDRVRTTPEALTAKFGELPATRIVIEVGAHSPWVSRLLQAQGHDVIVANPRKVRLIYESDRKNDRLDARMLARLGRVDVSLLSPVQHRSRQVQADLALVRSRDALVAARTQLINSVRGMVKSMGGRLPRSTTAAFAGKVNLLIPAELKTALGPLVRCIQTLSEQIRGYDERVEQLADKKYPETRLLRQVKGVGPLIALTYVLTVEDPNRFQRSRQIGSFLGLRPRQCESGNSAPQLGISKCGNNHLRWLLVQAAHYILSRLAPDSRLRRWGLQLASRGGKNGKRRAVVAVARKLAVLLHRLWVTGEVYEPLYGLTVEAV

SEQ ID NO: 124814 - protein, 348 aa, unidentified
MRFYNRQHKHYCGIDLHAKTMYVCIINQAGETLLHADMKTAPECLARSIAPYREDLVIAVECLFTWYWLADWCTAQGITFVLGHALYMKAIHGGKAKNDRIDSEKIARLLKAGMLPQAYAYPARMRATRDLLRRRMMFTRQRAELSAHIQNTVSQYNLPGLAARTDKKAGRDSIAAHFPDPVVRQMVALALSVIEHLEEELRVLEQDLAMKAKAHDAFAYHLLRSVPGIGRILALVILYEVEDIGRFPTLGQFASYARLVKCAKESAGKKSGYSGKKIGNAYLKWAFSEAAVLFLRGNPDAQKAIARLASKHGKGKALSILAHRLGRAVYVMLRKRQPFDRERFMATL

SEQ ID NO: 124815 - protein, 350 aa, unidentified
MQIIGCDYHPGFQQIAFVDTETGELQERRVQHREEAEKFYRDLAAQGMKVRVGMEASGHARWFERLLSELHFELWIGDAAEISARRVRKQKTDRQDAQLILKLMLKDDFPQIWVPSWENRDLRQLLWHRHRMVQARTRMMNQLQAVALNEGLRCKKRLWREAGREQLEAFQLAPWASQRRRDLLELLDQLNPTIAKLTQAIEEEVKKCPAARRLKTHPGVGPLTALAFVLMIGKADRFQCGKQIASYLGLVPLEKSSGNQRRLGHITKQGNSLLRFLLVEAAQVTVRSLPEWRSKYCHLTMRRGRKIAKVAMARKLAVRLYWMLRKEWDYEQLRKFGSYAGKPGYRDGVK

SEQ ID NO: 124816 - protein, 312 aa, unidentified
MIAQDKVAGIDVGMDRLDVLVDAQMHLAVSNDAAGLKQLVGWLRRQGVGRVGLEASGGYERLAANCLSQAGFAVVRCDPGQVRAFARAMKVRAKTDPIDATMICRYLIAAGPLPLYQPDPVRDRMEELTAMRRYLIKERSTYAAKLTQLSEPMLIRLVRQRLGRLKAQLTLIETQIRRLIAAHPRLQERTERLQAVPGVGPVLSSTLIAELPELGQCSSRQLASLVGVAPHPRQSGKTNRAGLCSGGRTRVRNVLYMATLSALKARHDRLRPFYERLRASGKPFKLAITAAMRKFLTILNAIIRHNAAYRPA

SEQ ID NO: 124817 - protein, 382 aa, unidentified
MPDVISSAPAAVRMRAALDVHKRTIVCAAQPDDPRAELRLEEIPNTERAVRGLVRRLGGPEGLVVCYEAGPCGYDLFRLLSAMGVACDIVAPALTPVAPGARVKTDRRDAKRLLVLHRAGALKFVAVPTPAQEGLRDLVRCRDDLVCARRAARHRVAKQLLRHGHVFREGKKSWTKTHQAWVRRQRLGDPLAQSALEHMLAHLDSLDAQIAALDHQLDEIAAREPWSDPVRWLCCFRGVTTITALGLLAELGDLRRFATARELMSFLGLTPSEYSSGEQRHRGHITKAGPRHARRLLIEAAWHYQHPPRVSQRIAAVHPHVPPDVAARAFSAQVRLHHRHRHLTSHGKRSTVANVAVARELAGFLWAAMTRQPLPAQEVTAA

SEQ ID NO: 124818 - protein, 345 aa, unidentified
MFVAGVDAHATYCVIAIVSNAGQLVAGPVRIKNADADQLTELLEPFRPLEVVVETSPAWPWLFDRLDGDGVHFVLAHAKRIRVIAESNYKSDEIDAELLARMRLAGLIPEVYPKCIEQREQAVLIRNRARLVRERTRMVNRIHAQLHNVGLYLERGRLLTQDGRQWVRTVAWPLLGDERRLFIDMQWELIDQIVPMIKTLDRRVEHMGRKSPAVALLETVPGIGPYRALLIATETLPIKRFRTPAHLVSYAGLAPRSSQSGLRPIRHGSIPAGANRWLRGTFVRAVVSHVTHAPDSWLSQSYEQIKGRLGWQVARVATARRLARAVHAMLRTGEVWHDEPVTQLN

SEQ ID NO: 124819 - protein, 338 aa, unidentified
MDQQYVGIDFHRRRSVIVRVSASGQRLGLHRIVNEPFELAKVIALCGEAPQVVIEATYGWYWAVDLLQELGAVVHLANPRALNWGDRRVKNDVNDATDLADMLRLNRLAEAWIAPPALRELRELVRYRAKLVQLRSGLKAQVHAVMAKEGVLPAVTDIFGPAGTRQLDQLELGAPFARRIGSLRQLIVAYDGEITALEREIHEHLRHHQGYRAVQAINGIGPISAAVLVAETGDVTRFPTPAHLCSWVGLTPRHRESDLKTRRGHISKQGSRLVRATLIEGISRYRGGPRLDAQYHKLAKRRGRNKARVALARKVLTLVYYGLRDGEIRCLAPVETAA

SEQ ID NO: 124820 - protein, 344 aa, unidentified
MSEVITIGLDIAKNSFHAHGADERGETVFSRKLSRSKLLEFFANQPACLVAMEACGGAHHWARQLAQLGHEVRLIPPTYVKPFVKRHKNDAVDAEAICEAAQRPGMRFVAIKTEEQQAAGMVFRTRDLLVRQRTQLINALRGHLAEYGWVAPRGVAQAAMLADLLDEDEMASSLPEPARAMLRVMTEMLGQLDHRITGLDKEIARRAREDEVARRLMTIPGIGPIAATAIVALAPQATTFRKGRDFAAWLGLAPLQHSTGGKQKLGRISKMGERTIRRLLIIGGSAVVRQATVRGAPAGSWLEGMLARKPRMLVSVALANKMARIAWALMTKQEDYKAPVAVAA

SEQ ID NO: 124821 - protein, 415 aa, unidentified
MDVLFRVRIQGKECVERTTAANHLERNQKLMFYVGIDIAKTKHDLACMDETGETVITNFRFANSYQGFHQLKIKLEQLSPITQDVQIALESTGHYNYNIVAFLREIGYNVFAYNPFIIKQFAKSQSLRKTKTDTKYTLLIARKLRSDVTPDYYQTDKVMDELKELTRYQNRLIQSRSKCKNLYIRLLDIIFPEINSYVSNLHSHFVYELLTKYPSAQKIARARVSSLLKIKRLTADKAHQIQEIAKQTIGNTSTVLSLELVQLIESIKHYDKQINQVQEEINLLMIELNSPITSIPGIGSRLGAIILAEMKTIHNFRNPNQLQAFAGLDPAIYQSGQMDNTGHMVKRGSSYLRYALIQAAKLISIYSPHFKAYLKLKISQGKHYNVAVTLVAKKLIRVIYHLLKTNQTFDEAKLR

SEQ ID NO: 124822 - protein, 394 aa, unidentified
MDSNKVWVGIDAGKEVHWAHVLDASGTKILSRRVENDEADLSGLIDEVLALSEEHLWAVDQPGGSAALLLALLWERDQQVLYLPGLAVERAREAYPGESKTDARDAYVIAEQARMRSDLARLVPGEDDLAELQLLLARRRDLVADRTRCVNRLRDVLLSLFPALERALDLNAKGALVLVRHYQTPSAIRRMGHRRLAAFLKNRSVKGAEGIARKALAAAKAQSVSLPAESVAATICAELAAEALALKESVAALDGQIAGRFFARPEARILSSLPGMGPILGSEFLVSVGDFRASFDSADQLAAYAGLVPVARDSGKRVGNHRRMRGGNKVLKRVFYQSAFASLRGSSHSRAFYDRKRREGKKHTQALIALARRRVNVLWAMLRDETTFQVPPAA

SEQ ID NO: 124823 - protein, 413 aa, unidentified
MAVFCGIDWSEEHHDVAVVDADGNLVARRRISDDVAGFRRLVELLVEVGDSAEDPVPVAIETSRGLLVSCLRATGRSVFAINPMAVARYRERHVVSRKKSDHADAVVLANILRTDMAVHRPLPADSELARAIAVLARAQQDAVWDRTQAHNKLRSLLREYYPAFLAAFRDVRGGIMRPEARAVLAAAPTPAQAADLTCDRLAELLRQSGRQRGVAAEAARLRQVFTAEYLRQPPLVEKAMGRQALALLRALDAACVSADELATAAEKAFDKHPDAEIITSFAGLGRLTGARVLAEIGDDRSRFADAKAVKAYAGSAPVTRASGKSHIVLHRRVKNQRLATTGYQWAFSALTASPGARRHYQRRRAAGDAHTAALRNLFNRLLGCLHHCLQTGQFYQEHIAFAPLDQRELPAAA

SEQ ID NO: 124824 - protein, 382 aa, unidentified
MDPALGLGWDVEVSAAKQETSMNIVRIGLDLAKYVFHLHGVDERGKVVLRKTLRRSGVAPFFANLPRCAVGMEASNGAHYWAKTLSEFGHDVRLISPQFVTPYVKSNKNDRNDAEGICEAVGRPNMRFVPVKSAEPLAIQAVHRIRSRLVASRVRLVNQIRGLLGEHGVVVAQAIGNLRRALPRIIDDEANGLNSIVRALIGELREELSDLDGRITIYDRKIINLYRMSEACQRLGEVEGIGPITATALVAAAGDGKCFKNGRQFAAWIGLVPKQRSSGGRSRLLGISKRGDRYLRTLLTRQETLALLFLREVQVELHDASSVEMEMSLKIRDRTIPVVPDRLVVVWHVRDGFAVENLGMHADDQHLLVIGSVEYADPAALR

SEQ ID NO: 124825 - protein, 392 aa, unidentified
MYIVGIDIGKNHHEASIVSPEGKQIGHSLRFATTHKGADSLMSFIFNNIGNSSCIFGMEATGHYWYPIYSFLKARGYTIYVINPIQSDSLRKMYIRQTKNDSIDSFLIAEVIRFGQFTTTSMADENILAMRQLCRYRDSVISSRTEIKLRISTIMEQIFPEYEKQFSSLWLSTSMGILEKYLTPENIENAPIDELFEIIKDKSHNKLTMKKAISIREAAADTFGIKIAQDAFSFQLKQLIDRMNFLDKQIEALDCQILEYYEKFDCYLHTIPGIGMIAAATILAEIGDINRFKSSSALVAFAGIDPTVRQSGEFSSTHNHMSKRGSPYLRHAIFLAATTCSFHNSPLNAYYKKKRDQGKHHLTATGAVARKLTSVIYAVLRDSKPYEPKSFC

SEQ ID NO: 124826 - protein, 345 aa, unidentified
MKITTIGIDLAKTVFQVHGVDERGKEVLRRQLKRKDVVAYFANVEPCVIGMEACGSAHYWARKLSELGHTVRLMAPQFVKAYVKTNKSDRNDAEAICEAVARPNMRFVPVKTAEQQAVLGLHRSRQGFVKARTAQANQIRGLLAEFGIVIPQGIGHIAKRLPEILEDGENALPGMMRQLIERLGENLKDMDKQVGELERQIKLWHRENEQSRKLEAIAGIGPITASAFVATVGDAKSFKNARQVPAWLGLVPRHEGTGGKVLMGRISKRGDVYLRTMLIHGARAVIRQFERKPDQADGWLKKLLARRNKNIAAVALAARNARIAWALLAHERSYECDYVAIRPAG

SEQ ID NO: 124827 - protein, 352 aa, unidentified
MFYVGLDIHDKRIAICVLNETGQIVRRAQVRTIDEMMRILEALPDRFAVCYEASCGYGHYHDLLKPIAARVTVAHPGRLRLIFRSKDKNDRKDAERLAKLLYLGEAPAVHVPSAEVRTWRELITCRGRVIAKRTRAKNSVRTLLRGAGVVPPRRPALWTKKGLEWLRRLELPTTSQQLRRDLLLEEIESLTNQVRRIEHELNHQAGRSPGVARLRSIPGVGARTAEAVVAFIDDPDRFANAKAVGRYFGVVPSQDQSGDRNRLGHITREGPAVVRQLLAEATWQALRRSPRVRAYFERVRRDDPQRKKIALVATAHYLVRVMLAMLKRGTDWEEGFAPADEPKGVAKAVVRI

SEQ ID NO: 124828 - protein, 320 aa, unidentified
MTYIGIDVSKDSFVAAYPAKSGYTTKTFKNTSSGVHQFIQSLPAECHCVMEATGNYSMLLLYLLQQANITVSMENPQKIKHFARAMLSTTKTDDIDAKLIALYGEKMEPVPYKIPSECIMLLKQKRTVLRQLKKQLTMLLNLQHSLSVLPKQDPTAKVATEKTIKFLRKQISKLEDEITHLSNKEFKRQMDLLTSIRGIGKTLASALIVATGGFAYFSNAKQISRFLGLCPTYQQSGTSVHFKGHINRNGDTYLRSQLYIAAVSSIKFNAACKETFERLKAKGKSGKVAVIAVANKLIRQAFAIVTNNRPYVDGYVSALP

SEQ ID NO: 124829 - protein, 366 aa, unidentified
MGWMAPLRHLSAKLLVERISSNGEPSMGELTTIGLDLAKHVFQVHGVDAEGATVLRKQLRRAQVLAFFSRLPPCLVGLEACATAHYWGRELRALGHDVRLMPAQYVKAYIKRNKHDAADAEAICEAVQRPTMRFVPVKTADQQAAVLLHRGRERLVRQRTGLVNALRGHLAEFGVIAPQGLRNVGKLIAIVRDHGDARLPNLARQVLQVLAAQIEQLEAAVAAIEKQLMAWHKSNPISQHLTSVPGIGPIIATAIAATVVEPSGFRSGREFAAWLGLVPRQNSTGGKHRLGGISKRGNQYLRRLLINGASANLLRSKATKADPWVIGLRRRRPPLVVAVALANKTARIAWAVMLRQEQYQPRAVAA

SEQ ID NO: 124830 - protein, 416 aa, unidentified
MKLFVGLDVSSEKLDACFMTDDSTCSVLKEASYGNSQLGASQIKEYILEFSQKFEIESLVIGMEATSLYSFHPAMFFKEDLELNQLNLMVSVEQPNKIKKYRDIFEENKNDQIDAFYIADYFRIQRQVNSIIKEEEYLALQHLTRTRYQLIKQLVRTKQHFIENIYYKCNTLSKELKAEGGSVLSATLVTLMTEDYTMDQLAELSLEEFANLIQKLGKYRFKNPEGIAKAISKAIRSSYRLGKVHQDSVDIVLGVLAKEIRSLEKLIKDLDKAIDDLVVVLPEYQCLTSIPGIGPVYAAGILAEIGPINRFSDESKLAKYAGLYWRQNQSGNSEYENTPMAKRGNRYLRYYLVEATNSVRRYEPEYHAYYKKKYAETPKHKHKRAIVLTTRKFTRLVDTLLRNHQLYMPPRSVIDK

SEQ ID NO: 124831 - protein, 370 aa, unidentified
MGQYSTVFIGLDVHKDFISVAYAPERRSAEVIFLGPIGTRQRDIDKLVRSLKSKARQLLFAYEAGPCGYSLYRYLTKKGLNCMVVAPSLIPKRAGDRVKTDRRDAVQLARLLRSGDLNPIYVPRPEDEAIRDLCRAREDAVSDLKAAKVRLKSFLLRLDIRYVGRANWNKAHLRWISRVVCPIPAQQIVFQEYLRAVSQRTEQVATLETELEEVTKSWRLYPLVQALQGLRGVKFTTAVTIAAELGDITRFANPRQFMAYLGLTPSEYSSGNTRHLSRITKAGNSHARRALVESAWAYRYPAKVSPSIQLRLESLPKLVQDIAWKAQLRLCKRYRRLSARGKNHNIVVTAIARELTGFIWAIAHEVRLAA

SEQ ID NO: 124832 - protein, 318 aa, unidentified
MGTAPRFVGIDVSKAHLDVAARPDGQQFRLPNSAAGIAALVERLKALPPTLTLIEATGGQERAVALALAEAGVPARIVEPGRVRHFARSIGQHSKTDALDARVLAHYAEAVRPEARDLPDEATRNLQALLDRRRQLVAMRGSEENRLKQGPTPAVQADLGAHIAYLSGQITTIDESIGALIQARPEWKRRDEVLRSVPGIGPQTSRALLGLLPELGELTGKQVAALAGLAPRARDSGTVRGARAIFGGRAQVRTALYMASVSAMRFNPALRAFYQRLREAGKAAKVALVAVARKLLTIVNAMIRDMKPWTPTKSEAAV

SEQ ID NO: 124833 - protein, 352 aa, unidentified
MEQFIGCDAHKNFSVFVAVNEKGHAGEALRVAHDRQQYREFLARLPPHSAIAVEASGHYSWMVDEMEQSGHCPKLCNPLEAKRRMGLRKKTDTLDARGLAILLRNGTLPEVWIPPSELRDQGELLRLRIFLVHLRTRVKNRIHGTLARHNLQVQGADLFGVAARRQLGTRLPELPAHSREAVEQELATLDFLKTQIDSAEQRLEAIMSVSAEADLLKTLPCVGTVLSMVLMLEIGRVDRFPTAAHLASYAGLVPRVHSSGGHTRMGQVCRNVNRNLKWAFVETGSLVVVNQRGLAGTHVVRLYQRIKRAKNHQKAVVAVARHLAEAAWWVLTKQEVYREPQSSRLALSSTHG

SEQ ID NO: 124834 - protein, 459 aa, unidentified
MARRLRRSTRPVTMPILHPNAAGIDLGATEIYVCVPLDRDPEPIRRFGPFTEDLHAVADWLRQSGVTAVAMEATGVYWIPLYQILETRGFEVCLVNARHVKHAPGRKSDMQDCQWLQYLYSVGLLRASFRPPEAVCAVRTLLRHRDSLVQSAAAHTLHMQKALTQMNLQLHHVLSDLTGVTGLAILDAILAGERDPQVLARHRDRRIKASLETIAKALVGDYRPEHLFTLRQSLAAYRHALGLIEECDREVEMRLGAFASTIDPATHPLPPATKKSRRPARDPRPGFDLRTELYRILGTDLTRVPGLSTPSVFTLFAELGPELSAFPTSAHFASWLGLCPDNRISGGKVLSVQTRHVKHRVAHALRLAAQSLSRSQSVLGAFLRRMRAKLGAPKAITATAHKLARIIYHLLATHEPYDETRLAKAEHDHKRRVESRLRAQARALGFQLVPVVPVGSTVS

SEQ ID NO: 124835 - protein, 391 aa, unidentified
MRIVALDLGTKKTTYCEVAQGQVVQRATVSRVSSLESLLGPDQPAARVAIEACREAWYVHDVLIKWGNQVCLVDTTRSRQLGVGAHGRKTDRLDAEALARALERGGIPAAHVLSPSRRELRNVLGVRRCLVETRTSMVNTIRGLAREKGCAVPSCRTTGFVGKARAAFARHPELQRLTDPLLVALETIDIQLAEVEEHLAGCCEQEPVVARLTTVPGVGSIVAAAFVSVVDDAGRFRSAHELESYLGLVPSEDSSGGKRRLGAITKEGNAYLRALLVQAAWVILKWGPKDDPLRLWGSQVAARRSKRIGAVALARRLVGVLWALWRDGTVYDAPHLARQGSRGHRGAIQSAERKIEALQAARKKDSVLIPRNSTAKQPKPPTRIAQLARAS

SEQ ID NO: 124836 - protein, 331 aa, unidentified
MKVANVGNDVAKRWFDICVLLDDQPHEKRFPNTPLGCVQCVDWLSSFGADKINVVLEPTGRYSELIANYLFKQQSITVYQAHPFRFDRFKNSLDFRIKADKKDAWALAVYAEERIGKKDKYPPTPYVPKSPVQKELRDIRVRLRSLYKRKSMLESQLESGFESKTIKADTESELAQIEQRIDGILDFAKGVIESDSRLSRDVELLDSIIGIGWKTALALVCLVDFRKFKSSRDLACFVGLSNRKKSSGTSIHGKDRISKAGDKYIRAALYFPAMTAMQFNPQLRDFARRLQSKGKLHPVIRTAVAHKLITTAWALIQNDTPYDAHYVRSAA

SEQ ID NO: 124837 - protein, 442 aa, unidentified
MAMRKREDDNEVFPNAAGIDVGGSSHWVAVPRQADDKPVREFGVVTDELNALADWLLSCGVDTVALESTGVYWIPVYEVLEQRGLTVWLVDARQMKYVPGRKSDVLDCQWLQKLMSLGLLRAAWRPGDEVCVVRAVVRQREVLLAEQANWVQRMQKALVQMNLQLTEVLTDVMGMTGQAIVRAIVAGEREAKVLARHRHGRVKASAADIERALTGNWREEHLFVLGQALAMFDSLAQRIIECDAKIEALLAPLGCHEVELSGPGKRRGKNTPQFDARTALARWAGVDLTRINGLAVTTVMTILSEIGPDLSRFANVKHFCSWLGLCPGTKVSGGKVLSARTRRSTNRVRQALKLAAMSLSRNDSALGAFYRRLCARMDKPRANTAVAHKLARMVYFMLTRGEAFVDQGQQHYEEQQRQRSIDALRRRATALGFQITPAAQTP

SEQ ID NO: 124838 - protein, 448 aa, unidentified
MKSKLQEPKQALSVKYPDSAGVDVGSREHYVCVPADRDAEPVRSFLAFTEDLLALAQWLTSCGIRQVAMEATGVYWIPLFEVLDRLGFEVILVNGRQTKRPAARKSDVLDCQWIQQMMMFGLLSGSFRPSDALCAVRAVVRLRARLIRDGQRAVQHMDKALVQMNVQLGRLLADLSGKSGMAIIRAIVAGERDGVTLAALCDRRVRTSLEVVAKSLVGNWRDEHLLELKQAVSTFDLVQVHIAECDGKIAQAVTALQQLPDPAPEPRTKARKTKRHTAEQHSGMRTALFQAMGVDLTAIPTIEVDTALVIFTEIGPDLSCFPTSGHFCAWLNLAPGTRISGGKRLGRASMPAINRVGEALKRSAVNARSSETFIGAAHRARMARMPKACAIKATAHHLARLIYAMLTQGQAYIEHGIDRFESEHRDKQLRQLRRKAAQFGLVLTEKAA

SEQ ID NO: 124839 - protein, 300 aa, unidentified
MGYFAGLDVSLEDTALCIVDDAGRIIREARVASEPETLVAFFGACGMTMDRVGLEACSLTAWLHAGLTEAGITAICIEARQAKAAMGAMPNKTDRNDARGIAQIMRTGWYRAVHVKSPSCRSWRALLTARRMVLNKRRDVENGIRALLREVGLKVGAPSRKDFPARVRELAADDPVLMSLTEALLAVIDVMTREVEKLTRRVLDEVRVEPTCRRLMTVPGVGPLTALAFRATIDQPDRFRKSRDVGAHLGLTPRRYQSGETDVQGRISRCGDELARTALYEAAHSLLIAPPSGRHCAPGG

SEQ ID NO: 124840 - protein, 360 aa, unidentified
MPRVQETGFSRGVARPVLVASPNSCLGRQARIVQGRVETSRFRTGGLMTAPTVFVGIDVAKATLDVACRPSGDRWQVAHDPRGIEMLLQRLAPLRELLVVLEATGGYEQTVAAALATAGIAVVVANPRQVRDFARATGQLAKTDAIDAAVLALFAERVRPEPRPLPDEARQSLDALVTRRRQLIEMLLAEQNRLGLARRAVRRSLTDHIRWLERQLGGVDRDLDQAVRASPLWRAQDDLLQSVPGIGPITSRTLLAQLPELGRLSRKEIAALVGVAPLARDSGTLRGRRTIWGGRASVRAVLFMAAATATRWNPVIRTFYQRLRAAGKPAKVALTACMRKLLTIVNAIMRSQTPWRTVGA

SEQ ID NO: 124841 - protein, 428 aa, unidentified
MTNRQPIPTDALLVAIDIAKVRNEVLIEAPNHKRRRRLSVLNTRAEHDRLIETLRAYGKPVICAFEATGNYHRPIAWRLIEAGFDVRLVSSMALARTREALHNGWDKNDPRDAQVILQMLRIGATQRYHDPLRAGINDVQELSKTHEAIAKAKTEIQHRILTHYLPLYFPEIERFRGNSRSDWFFAFLDAFSTPASIMALSKEAFIEAAWDVVGRKVSKERLLADIYETARTSIGLPLPIDAPAIRMFRMVIAEARSLIRQRNEIEDMADAMLRDSADYKALRKVPGIGPVIALTILAEGGDLRRFRHHRQFLKFCGLDLSTQQSGQHRGQTRLSKFGNARLRRTLWIAGQVAIRQRENGFRHKFERYIAKDRDNPDLRRKALTAITAKMARVVHAIIKSGSDYRPFVEGRVPGGRISFCGAVRAPKG

SEQ ID NO: 124842 - protein, 346 aa, unidentified
MTYSTTVGVDLAKNVIQISVVSGRGKELSNRSFTRKKFAEFLGKQKPSLVAFESCATAHYWARAAKRHGHEARIIPAKAVAPFRQGHKTDSNDALAVAEAARRPKIKEAPMKTVEQQGLQAIHRSRDLLNHECTALSNHLRGLLMEFGIVIPKGFASLMKAVPEILEDGENELPDLYRPTLHRMYNRLLELREDIGAMTREVEHLAKAHPICNKLMALEGVGPISALLLYATMGSGTAFSGSREFAAYLGLAPRQYSSGGKTNIVGLSKKIGNSQLRSVLILGARAYVYKFKEPKSSKDKWLKAIIERNGESRAAIALANKNVRTAWAMVTQGTEYQRREQLPMAA

SEQ ID NO: 124843 - protein, 377 aa, unidentified
MTTILQGQDSATGQVLYMALELSNKKWRLGFSNAVKTREVTIEAGDLGVLGKQIALAREKLKLAADCRVVSCYEAGRDGFWLHRYLVGEGIENRVVDSASIEVNRRQRRTKTDSVDVQSLLRLLLRYIGGDRKAMSVIRVPTIEEEDLRRLHRERERLVKERGAHSARIKSLMVAHGVRIEMSADFLNRLERFESAAGYALGEDLKGEIRREFERYALLVKQIDVLESQQRQRAAQVNDGVLGEVNRLMLLKSVGWQTSWVLVMEFFGWREFRNRRELGACAGLTPTPYSSGESEREQGISKAGNRRVRRLMVELGWAWLRYQPDSALSQWYVERYGHGGKRMRRIGIVALARKLLIALWRYLKDGVIPDGAVLKAV

SEQ ID NO: 124844 - protein, 405 aa, unidentified
MKLYIGIDWSQGKHDICFVNTKGVIQSQLVIPHSQTGFWKFEQRRKKLGVPAENCLVGLETSYSILVDFLWDRGYANIFVLPPTLVKGSRTRMRSSAAKDDPGDAYLIADILRTDHGRLQTWQPDSGLTRQIRTKVRFISFLTRNIVRMTNRQRAVLLRYYPVAAELFSSLSTLISQHFILAYPTPQAAAALDLDSFRKFAKQHRYTHKSKLASILAKLDQDDPQADMDIIVACQDEAQGLAHVLLDMIRMKRDNLKQLQQLLDLHPDQNIFASLPGTGVYLQAALISKFGDDRGRFPTPGRVQAIAGTSPVTIRSGKSKYVRFRKSCDYEFRHIVQQWAKQSLRSSVWANAYYARVRPNCDSESHAFRCVANRWLAILWRLWQDHTLYDETYHLKQRALRSQPR

SEQ ID NO: 124845 - protein, 335 aa, unidentified
MNHYAGIDLSMETSHVCVVDADGRKVGALCVDSTPAAIASALERYGPVDRAVIETGRMTPSVALGLRELGVAIVCIDARQAHQSLKAMRANKTDPHDAAGLAQLARTGFYKEVHVKSPAAHGVRSVITARGHLVEARVRLDNTIRGLCATFGIRLGIGQGERFLARMQGATAIPGLGEAVASLLGVRERLVDEIRELDRRLKAISVASPACQALMSIPGVGVQTSAAFAAAIDDASRFKRSRTAGAYFGLVPRRHQSGELDWTGRITKQGDSTVRKLLYEAANSILTRTRQSFALKTWALKIARRRGLRKARVALARRLAVIMHAMLRDGTLFEA

SEQ ID NO: 124846 - protein, 370 aa, unidentified
MSATRMPCGYVNVKWVGLDVAKDAIAVSVLDGSSEATPRLEKIAHDEVSIRRVVSRLGEPARLRACYEAGPTGYELYRLLMSMGVGCEVVAPSLVPVARGDKVKTDRRDARRLVRLYRAGELVTVRVPTREEEGCRDLCRLRGSAMVDRRRARQRLGSFLLRRHLVYRDGTPWTLKHRRWLRSLAFDDTSAQATFAHLLASVEERELRVVAIEADLAGFFERGLFVDEVARLAAYRGIAPLSALGLACEVCDWRRFPAPARFMGFVGLVPCEYSTGASTSRYGITKSGNAHVRNILVEAAWAYQYPPRVSPELHRRHEGLPPEVVARAWAAQIRLCGRFRRLAARKDRRTVVATAVARELAGFVWAEMTA

SEQ ID NO: 124847 - protein, 354 aa, unidentified
MEKITTVGVDLAKQVMAVHGVGAEGRMLLRKVLRRDQLLSWSASLSPCVIAMEACGGAHYWARELTRQGHTVRIIAAEYVQPFRLGGKNDANDAEAICTAARQAHMRFVAIKSVEQQAALCVHRLRQGLVEERTALINRLRGLLTEFGVVAPLSPEKLRREWARCQDPDDPRLPLLVRQLVGEQVRALDQVEERMATYAEQIAAQARGSEVAKRLQTIVGVGPTTAAALVATVSAPQEFSNGRQFSAWLGLTPKQHSTGGKTRLGRITKRGDAYVRTLLILGAKSALQAALRKPPELRHQLQRWIVDTLDRIGYHKTLVAIANKHARIIWTLLVKGEDFDVQRMTLKVAVVAAA

SEQ ID NO: 124848 - protein, 319 aa, unidentified
MKMAKSTTSTGGIDTSKATLDLAVHGGSAALCVTNDEAGWKSTAAHFKRAGVTLVGIEATGGYERGVTRYLQKAGFTVIVMQPVQVKSFAKLHLKRAKTDKIDAVLIAACAHVLGDGHKLPPDARFDALADHLTFIEQLEEDIVRIKTRLEHIADKRLRRIAESDIKRLSKRCAEELQRLQVALRQYDDLAARFDLVQSVPSIGARTALCIVIRMPELGQVSREQIAALAGLAPFDQKSGKHDGQAHIGGGRARVRRALYIAALPGAFRWNQELKALYARLTANGKTHKCALIACARKLLLFANTVVARGTPWEVKAAT

SEQ ID NO: 124849 - protein, 310 aa, unidentified
MGNIIVGIDVSKDRLDVAVRPTGEVFAVERNAAGIDRLIARLEELSPRLVALEATGGFETVVAAALAAARLPVVIVNPAQVRAFAKAIGQRAKTDPIDAGVIAHFAEATKPEPRPLPDEATRSLADLVARRRQIIEMIGAERQREKRVTVPRLKKSITRLLKALEKELATVDTDIDDAVRGSAAWRGKEDLLASVPGVGPTIARTLIAELPELGQLGRKEIAALAGLAPFTRQSGQWRGRSFIGRGRTAVRTALFMGAMVAKKHNPVLKAFFDRLVAAGKPKMVALIALARKLLTILNAILRDQRPWQSA

SEQ ID NO: 124850 - protein, 462 aa, unidentified
MANEDRKGRAERGEAIDEGFAVLRADVAGIDVGSEKHWVCAPARTGRGREVAVFTATTPGVEQLAAWLKDRGVTSVALESTGVYWIAPHEILEAHGFEVVLVDTRELGRVPGRKKTDCRDCEWIQRVHRCGLLRRAFRPVEQVCMLRTLIRDKATLIAERADWVRRMQKTLDQMNVRVHRAVSDVDGATGMAILRAIVAGERDPHQLAALRDPRCRKSEAQIAEQLTGHWREDHLFSLQQAVKMYDALSETIAAYEREILRHLEAMTSIDRRDDQAPPPSGPRKAKTIKSRGEEPLRQALYRMSGVDLTTIDAVGVETVSVVLSEYGPNLTQFPTEKQCVSHVGLAPHKPTSGGKVLKRKKKPASASARVGAALRMGATSLRHSQTALGAYYRQIARRAGADVAVFATARKLAQYIYRLLRWGHPYVDEGAAAYDKRYQLARAKRLAVTAKALGYTLISAEA

SEQ ID NO: 124851 - protein, 336 aa, unidentified
MKKYQFILGIDVSKKTLDLCLILTDHPLEKKAFNTTNTEKGYQAMLNWFKKQKLNIDTGLVVLEHTGIYSLVLCEFLDQQQISYSLVSGLEVKRASGISRGKDDKKDAFMLAMYGYRHQDELKPGMTKQAELLQLQMLQAQRKRLVNNKKSFLLPVKELYQMNMEDKAIVLETNQCNVIEEINNSIKAIEQQIMEIIQNNEQLKKQYELCTSIPGVGMQLTVCLLVTTGAFTLFKTSRKLACFAGVAPFPYQSGTSIRGRNKVSHLADKELKSLLHMASLNAVRADNQLKLYYQRKKAEGKNALLVLNTVRNKLLQRIMAVVDRGTPYVQLAQHAA

SEQ ID NO: 124852 - protein, 413 aa, unidentified
MDTLIERCAGLDVHKATVVANVRVPDEAGGRRVESARFGTTTAELLALAEWLGAHRVQVVGMESTGVYWKPVYYLLEDRFTCWLLNARHMHNVPGRKTDQADAAWIAQLVEHGLVRPSFVPPAPIRELRNLTRYRKAQIEERTREAQRLDKILQDAGIKLSSVASDLLGVSGRRMLSALVAGTTDPEVLAELAKGQLRGKLPALRAALTGRFTGHHALIVGEILAKLDYLDEAIGRLSAEIERVIAPFAAQMALLRTIPGVDRRTAEGLIAEIGVDMDRFGSAERLASWAGLCPGSHESAGKNRSGRTRKGSKWLHTYLSQAAKAAGRSKDTYLGAQYTRLRGRRGAGKATVAIEHSILIAAYHMLERGQPYQDLGADYFQRRRSPDHQARKLIGQLTALGYQVTAIPPSEAA

SEQ ID NO: 124853 - protein, 347 aa, unidentified
MNYNTQHKFYCGVDLHARSMYVHIVDHKGKSVFDRDLTADPDEFLDAIKPYRKNIVVGCECMFAWYWLADLCEDQRLPFALGHALAMKHIHGGKAKSDKIDAGKLANMLRGGLFPLAYAYPRAKRQTRDLLRRRSFFVRQRGQLIAHIVNTNSQFNLPPLPKKLRYAKNRTPELLDRFTDPSTRLMIGADLNLIDHYGEQIAELESYLIRSAKVDDAVTFGLLRTIPGIGPILGLILLYEIDQIARFPEVGNFLSYSRLVRCEHSSAGKVKGSGGKKMGNAHLKWAFSEAACLMIRSVPAVKSWLQRQEKKRGKRKALSVLEAKIGRAVYHLWRKQVPFDAKRFLKG

SEQ ID NO: 124854 - protein, 419 aa, unidentified
MTGDFEWYAGIDWASEQHRVCLLDGGSRRAGEREFAHSGDGLAELCAWLIAMSGCEPQKIAVAIETPHGPVVEMLIDHGFAVHSINPKQLDRFRDRFTVAGAKDDSRDAQVLGHSLKTDAHAFRRLVVDDPMIIELREWSRLGDDLKQERNRLANRLRQQLWRYYPQMLELGGDDIAADWLLALWDEAPTPAKAAEISTQVIAPLLKAHRIRRFEAADVLRILRQTPLTVAPGTIAAASAHIRILAERLRLVNRQVKEANRKLDRLCRKLGQAPESEAGNRPEQRDVAILRSLPGVGRINLAALLAEASEPLKRRDYHALRLMSGVAPVTRRSGKACLVIRRLACNARLARAVYHWTRVASQCDPISQKRYAALRQRGHSHGRALRTLGDRLLGLACTLLRRQVLFDPDYHCKEVAAAA

SEQ ID NO: 124855 - protein, 343 aa, unidentified
MYYIGLDVHKRTISYCVKDAAGQVHQEGKIGSTRRALDAWIKTLPQPRTIAMEATIFTGWIYDHLLPHAEKVKVAHPLMLRAIAAAKKKNDRIDAGKIADCLRCDFLPECYMTSTEIRDRRRTLRYRNLVLKQMVQMKNRISGLLMETGVSYNKQRLHKLGYFTELMSGNEEVDESIRPLLKLSRETIVRSQRLDYALVSSLERDPLLAERLKRLRTIPGVGPITALTWALEIGDVSRFQSVKQAISYCGLCSAERSSADKLVRMPISKQRNKHIQQTLVEAAKLAPRYSHELALVYEREQQRGNKNRATLAVARKMVAYMLAVERRKQDFVPAEQLGGTAAA

SEQ ID NO: 124856 - protein, 333 aa, unidentified
MIILGVDYHPSDQYIAFLDTETGECGERRLNHGDEEAEKFYRELAARGVNIRVGMEATGYSRWFERLLAELGIELWIGDAAKIKTKRVRKQKTDRNDAHLLLQLLLDNKFPKIWVPSPENRDLRQLLWHRHRLVQMRTRIMNQLQALAMNEGQRRKKKLCSEAGRAQLEKLPLAAWASRRRKDLLERLDRMNPSIEELTAAMEREARNWPEALRLMTHPGVGPLTALAFVLIIGTVERFQCGKQIGSYVGLIPCEDSRAGHQRLGHITKQGSSLLRFLLGEAAQAAARCDADWRRRYLHLALRRQRNIAKVAMARRLGVRLYWMWRKGWEYAD

SEQ ID NO: 124857 - protein, 428 aa, unidentified
MKYYTSTSEYNCGIDLHARQMYVCVMNRQGKKLVHTNVLHNDFDYFLKLVEPYKHDLTVCCECMFGWYWLADACQQAGLTFVLAHALYVRAIHGGKNKNDRIDSEKLTHLLRSNLIPPAYVYPADKRPLRALLRQRLFYVWRRSELLARIYSHQLAHNRTPARQTRRVRDSWEEALLKAEDHPLRQIALQNDLAMIKHFDHQIFQLEEELQRQTKKAAGRDYELLKGVPGIGESLGLTILYEIGDVQRFPTVKDFLSYCRLVKGTVASAGKIKGLRGAKLGNPYLRWAFGEAAVIAKRDHYVVGPLSQRLEAQMGGNKFKSNTVVAIKLARAVYFMLKNKTVFDPERLVASMQKCLKPTRKVAAPLSQPDGDLRRLAAAVEKQLSPGRKQPARLTGCAKQARPLPAADQTCCAWSTPVCVGSASNPAL

SEQ ID NO: 124858 - protein, 347 aa, unidentified
MPHKTAATVAHTIGIDTGKNTLHLIGLDDQGAIVLREKISRSRIAARLANVPRCLIGIEAGMATHYLARELSALGHEVKQVPAAYAKPFRQGHKNDFRDAHAIAEAVQRPSTRCVPVKTDDQLDLQALHRVRSRLVGQRTAVINQIRGFLLEHGIAIRQGLRFLRQQLPDILARRGDVLSPRMIRVLVDLSGDWRCLDERIEHITEEIEVLAQGSESCRQLMTVPGIGPIIASAMVAAIGNGAAFAKGRDFAAWLGLVPKQMSTGDRTILGRISKRGNRYLRTLLMQAARVILLRPANWAKHSFGPWLTAAANRLHHNVLATALANKLARIAWTVLVQARSYEARVN

SEQ ID NO: 124859 - protein, 360 aa, unidentified
MEVEQGATGRFVVGGVDTHKDLHVAAVVDEHDRVLGCQCFATTRHGYKLMLAWMRAFGPLRRVGVEATGTYGAGLLRYLQNASIEVLEVTTPDRQDRRRRGKNDDLDAQNAAHAAFAGKRTVTPKSRDGMIEALRVLKACRKTAVAARRVALQMIHNTVVSAPDELRDTARALTRMELIRTLAAWRPDMTDYRNVTSAYRITLRSLARRYLELHDEIADLDGMIRAIVDELAPDLVVRNAIGHESAAQLLLTAGDNVERLHSEAAFAALCGVSPVPASSGKTTRHRLNRGGDRAANSALHIIAIGRLRTDPKTKAYIAKRVAEGHSKLEAIRCLKRYLAREVFSLIRKRSREINQRQIAA

SEQ ID NO: 124860 - protein, 338 aa, unidentified
MKKVARVGLDIAKTVFQLHAVDAHGKTVFRKTLSRGEMLSFFASLTPCLVGIEACAGSHYWARELIKFGHDARLMAAQFVSPYRKSGKNDANDAEAICEAVGRPNMRFVPVKSEEAQAVLAVHRARALTVSERTALINQVRGLLGEFGIVAGAGTAQARKLLAEIGTGGRQLPILARETIGELHDRLRALDERILAYDRKITALAKQSEPAQRLMAIEGIGPITATALVASVGNAQAFKNGRQFAAWLGLTPRQNSSGGKTRLGAISKRGDVVLRTLLIHGTRSALQRMGNKTDQKSLWAEALKTRACSNVAAVALAAKNARIIWAMLARGTEYRVAA

SEQ ID NO: 124861 - protein, 340 aa, unidentified
MTSQVYHLGADISKATIDCHLLPADTASGRAKNATGTSFRVANTPAGYAALDARLRSKIDTGARVLVTAEATGGYERGLHHALTGAGIPVAIVNPKRIRDFGKALGQLAKTDKLDARLIARYGQTFNPRPTPVPSPARQILRDWLPFRTQLAGEIAARAQQRKAYTDPALCALADEELRHLRAKIKDLDRQIAALLEAPAEPEIAATVQILRSFTGVGPIVAALLIAHLPELGTLNAKQIASLAGLAPFARDSGEKRGIRTIFGGRAPIRHALFTVFRVGLRYNPVIRDTFDRLTAAGKPGKVAMVAAMRKTLVILNAMVKTNTTWRKPQPKAMPMPAAA

SEQ ID NO: 124862 - protein, 358 aa, unidentified
MTGSSDYESVQVFIGVDVGKDTHHAVAVNRSGKRLFDKALPNDENKLRSLISDLKQHGQILLVVDQPATIGALPVAVARSEGVLVGYLPGLSMRRIADLHAGEAKTDARDAAIIAEVGCELSMICGFDDDLAAQATQASNRIRGLLTQIHPALERVLGPWLDHSAVLDLLQRYPSPEKLASQGEKRLASQLCKLAPRLGKRLAADITQALGEQTVVVPGTNAAVVVLPRLALQLITLRKQRDEVAMEVEQRVLTHPLYPVLTSMPGVGVRTAARLLTEVACRAFASTAHLAAYAGLAPVTRRSGSSIRGERPSRRGNKTLKRALFLSTRPDIQGLLHTQNEPGKATQPGAYRPGKAAL

SEQ ID NO: 124863 - protein, 414 aa, unidentified
MSDPLVVGIDPHRKTNTVCMMDRHGDEVCDRFTVQNNRPGTESFVHEVALRVLEGDFDAIHIASEATSWYWWHFFQTLDQDPLLNQWPVTLYPFNPRLTANYKKTFVDLDHDDPIDAFVVAERLRMGRDLPAPFHYEDRYFPVRMLTRYRYHLVHQLARVKSYCLAILYFKYSEYSRKDKKPFSNLFGATSRAVIQEFASIEEIAALPFEELVEFIDRKGKRRFSDPTDNARKLQRVVHDSYLLPQAMYQPINLILSLNLRHITMLEGLEKRLKTAIAEGMQPIHHSLDTIPGFGPVFSGGIVTEIGGVERFDFNQAKVAKYAGLKWRKTKSADFQAEETRLTRTGNRYLRYYLCEAANRVRQCAPEYAAYYDRKFHEVRKHQHKRAIVLTARKLVRLVVRLLTTNEPYRPRRC

SEQ ID NO: 124864 - protein, 359 aa, unidentified
MIKQKLNEKGNKGNVTIAKQKVLQSYDHYIALDWSIINMAIARLTPKTNEPKIIDVPSDIKELKLYLKNLQGTKIMTIEETTTSHWLYVELYDYADKIIICDPYRNRLLSDGPKNDKIDAGKLCLLLKNGMLKEVFHSNDKLYDLRKLVSYYDDEVKAGVRLMNQKSALFRAENKSYKNKETIEATGINKFIVSQLDEKINLYIDKKQNYEDEFYKITKGNKTIKSLMSIPGIGIISSVTILSTVVDARRFKSSNHYLSYCGLANHKKMSGGRNYGKRLPRYSRKLKSVYKSAAVRVISTNNPIKEYYAYLIKEKSVTEQNANNAVARYIARVSLGIIKSGKKFKPYSWRKNKKEKDVA

SEQ ID NO: 124865 - protein, 334 aa, unidentified
MQNITLIGIDLGKHSFHIHCQDKSGKALLRKKFTRTKLMLFLATCPPSVVVMEACAGAHFMARCISDFGHETKLISPQFVRPFVKSNKNDFVDAEAICEAASRPSMRFVQPRTETQQAMRALHRVRESLIRDKVKTTNQIHGFLLEFGISLPIGDAVIKRLSLVLAEHEIPEYLSRLLVRLHTHYFYLVEQIAELESELSQSINADDTAQRIMTIPGVGPITASLLSSQLGDGKQFSCSRDFAASTGLVPRQYSTGGKSTLLGISKRGDKNLRRLLVQCARSFIMRLERKHGKLAEWVREQLNKKHSNVVTCALANKLARIAWAITTQKKEYQA

SEQ ID NO: 124866 - protein, 412 aa, unidentified
MRLFAGDDWAEDHHDVEVMDPAGKVLARKRLPEGAAGMAQLHALIGQFVPEDDMDGTEVVIGIETGRGPWVAALIAAGYTVYPVNPLQASRYRERHGVSGAKSDAGDAHMLADMVRTDSHQLRSAAGDSPEAAGIKVLARTHKTMIWERTRAVQRLRHQLREYFPAALEAFDDLDAADTLELLGRAPEPARAARLTRAQVSAALKRARRRNIKDKTDAILAALRSEQLGQPEALTLAYAATVRSLIAVITVLNEQVKALQGQVEEHFGRHPDAEIYLSQPGIGKVLGARVLGEFGDDPARYRDGKARRNYAATSPLTRASGKKKVVAARFIHNDRLVDALNAWAFSSLNASPGARAYYDELRARGIEHNDALRRLANRLVGILHGCLKTRTLYDEAIAWGHRQNLRQSSVAA

SEQ ID NO: 124867 - protein, 441 aa, unidentified
MPQPILAVGVDPAKRLHRAVAVLFPDEVVLDVELPNAFDAVANLDHRLCELANQHGADLVYGLEDHRRYGRLFCQVLTERGRDVRVVNPLWTNRQRAFYGQDKDDAIDGRSIAAVVLRRHHQLPLASDFGEVAQAIREAERSLQDLSEARTQLGNRLHLQLSDTYTAAYEEYFGKLRSPLALRFFRRFPLPQDLVGHNVEMLASLLLDLAGGKVGPHKGGNRLIAMRSKAQAILETSGAMRALPRTLALELKAELIRQLCDELLANHDRIIRLERMLREQLLPATKQTITTITGISTILAATIIGETGSITRFRSPAAFAVYNGTAPARNSTGGRDRHKARRDCNHRLKRAFYLAARAAVLHDPLAKAYHQSCKSRGLSYVEALKRVARRMSDVVYALLKSGKAYDRSIIEHAIERRREQAAHAACKPCETKPSPLPTKKI

SEQ ID NO: 124868 - protein, 337 aa, unidentified
MLGIDLGKNSCSVAGLDMHGAVVLRRRMTRESLVAFASKLPACIVAMEACCGAHFLGRTFAAQGHTVRLMSPEYVQPYVKSQKTDDRDAEAIAEAATRPTMRFVTLKSEEQLDLQVLHRARERLIAARTRLTNQLRAVLLERGVILPKRRAPLRHRLHELMAGELPISPRVIRLLEDLRDEWASLDERIRAYDDELAALTRENQQARQLATIPGIGVINATAFLAAVGDGSAFAKGRDLAAWLGLTPRQHSTGGRTKLLGISKRGNKYLRTQLIHGARAALTHFAKTPTRIGAWTRQLLTRAHPNVVVVALAAKLARIVWAVLRHGRAFEHQGHAVS

SEQ ID NO: 124869 - protein, 324 aa, unidentified
MAKRTTICAGIDTGKRKLDVAIDGSSSQMQVENTAEGHRVLLEWLRHHKVKRIGIEASGGYELPVVTELRRKRFVVVVFQPAQVRAYAKFHLQLAKNDKIDAALIAACTAAVKKIHDAPDPRLQPFAEHLTLIDQIGEDIQLYKNRLETCRDPRIQKLWEEEISRLAKRARAELKALVAAIRQHRDLARRLDLIYSVSGAGMPTAVAILVRMPEIGKLSREQVAALAGLAPYDDDSGERSGARHIDGGRKRLRRALYTAALPASFRWNPHLIALYQRLRAAGKVHKSALIACARKLLIFVNTVVARGTPWQKEQPVRATNPAAA

SEQ ID NO: 124870 - protein, 338 aa, unidentified
MELKRVGLDLAKSVFQVHGVDRNEVVRCRRQLRRSEVLKFFAGRPSCLVGMEACAGAHYWARELTKLGHEVKLMAPQLVKPYVTSQKNDANDADGICEAVGRPKMRFVVVKTVAQQEVQAAHRIRSELIRRRTAKVNQIRGLLAEFGLVVGRRIEVLRRALPELLEDGDKGLSGGMRRLLDGLRRDLVQLDERVAEVEAVIVAEARANEACVRLQTIPGIGPLTASALVSAVGDGRQFKNGRQLAAWAGLVPGQDSSGGKPRLLGISKHGDTYLRTLLIHGGRAVERTCGTKTDARSRWLHDLGERRHRNIAAVAQANRNARIAWALLTRGESFRLPA

SEQ ID NO: 124871 - protein, 350 aa, unidentified
MNTIGLDLHQRESQLCICDADGTITERRIVTSRERFTAVLGDRPRAKILLEASTESEWVARHLESLGHEVLVADPNYAPMYATRSRRTKTDRRDARTLMDACQTGAYRLAHRLSDPRRHVRAELAVRDALVRTRTRYVALAKTLVRRDGLRVASSESHLVAQRIGALSLSPVLAAELQPLFTVLAPLNEQIAAADGRIATLAATDPLVARLATAPAIGPVTASAVVATVDDIGRFRSAHQFEAYLGLVPGERSSGEKRRVGPITKAGNSRVRWLLVEAAWRLLRAKSAEAAALRAWAHGVAGRRGKKIAVVALARRLAGILYAMWRDGVPYDASRIRGPRIAAEVTARAS

SEQ ID NO: 124872 - protein, 277 aa, unidentified
MLLIGCDYRPSVQQIAMLDTETGDYSEYRLKHSDGEAEKFYRDLKLHRAEIRVGLEATGHRRWFERLLTELDCELWVGDAARIATMRVRKQKTDKQDAQLLLKLMLENRFPRVWISGLEDRDLQQLLWHRHRTVQMRTRILNQLQSIAMNEGIQRRGGLRSVQGRKRLEQIPLGRWGARRRKDLLVLLDQLNQRVDELTAAVQQEAEKRPEARLLMTHPGVGPVTALAFVLIVGYPERFPCGKQIGSYVGLIPAESSSGVHRRFRTWRCDVSGRSPK

SEQ ID NO: 124873 - protein, 389 aa, unidentified
MPMNMQYERAFGLDLSKKTFHGCMLDGPDLGNRHFFTGEMGPQGKAKLAGRLCKCDLVLMEAGTSSFSLARFLLENTEAEVVVLNPAKLYNIFNSTLKTDKSDSEKIARIARTMPRDEWPTVSIPTKEEQAERSTVSLEVFLAQEITMLVNRLYALFNSMGHPFIKKSDLKTEEARLTLANRLLCEEALAMEQVIMLSNQIEHVTDQLEQCKQRLREICLSHPMQALSLLSLPGVGLMTTASQIAFLGDGSRFNSPDSYVNYVGLSERRFDSGTKVSKGHISHMGNKCIRRNIIQAAWVASTKLKGNPLSMKYKDLRLRGKNKPVAAVAIAKKMIQLSYILVKSNGIYEFTKQQGLGAFRRKLQYHKLTQNSNTTSLHKTPIPQAYTVA

SEQ ID NO: 124874 - protein, 383 aa, unidentified
MVCRALQHLPKIQDNRSGCGEHSERYCSVKKYIGCDSHARYSVFVSVDETGKASAPVRVDHQARDLRDYLAGLEKGTPVAVEASGGWYWFVDELEAAGLDARLVNPLEAKKRMGGRNKTDELDARGLALLLRSGTLPEVWIPPAGLRDLRGLMRTRLAMRSHTTVLKNRIHAALRRYGTMESTGPADLFTKKNRLLLSVAIGRLPEETRRATLHEWELLDVIDRHIGELEARIRLRIGQLGWVRLLKSLPGVGEILGATIHLEIGEVKRFPTPAHLASYAGLTPRVISSGGKTWHGRTSAQANHYLRWAFVEAADAVVMHRQTYTGDHVMELYDRLKKHKCHGKAAVAVARHLAEASWWILNKREQYRPPRAHAAVVTSSRNG

SEQ ID NO: 124875 - protein, 337 aa, unidentified
MEYFAGLDVSMEETHVCVVDRDGAVVREVKVPSTPADIEVALAGAPACRRVVFETGRMAPMLYHGLTTCGVPVVCIESRQAYQALKSLTTHKTDRNDARGLAHLARTGFFKPVHVKSLPAHAVRALIIARKKLVGQRVTLENQIRGLAVVFGVRLPRGLSPTFIEQALRASEGITGLSVAMRGLIAARDAVLAAVGAIDADMNKMVRASDACRRLMTIPGVGQLTALAFTAAVDDPERFKRSRDIGAYLGLVPRRYQSGEVDYTGSISKCGDRRVRTLLYEAANVMLTRYKGPLKLKDWALAIAKRSTMRKARIALARRLAIIMHAMLRHGTEFKPA

SEQ ID NO: 124876 - protein, 413 aa, unidentified
MAIDTVVQRSAGLDIAKASLVACIRIPGPDGGWRVIKRKFTTMTAELLALQDWLAGHNIARVGMESTSDYWRPVFYLLEQRFDCWLLNARHMRAVPGRKTDMTDAEWICDLVALGLVRPSFVPPPPIRRLRDLTRRRAILLAERTREKQRMEKLLEDAGVKLSVVATDIFGKSGRAMLDALIAGERDPKVLAELALGRLRKKIPALAEALVGRFDDHHAFLARMICDHIDTISRMVAELNTRIDTEIEPYRTEVELLGSLPGVDTRTAEVILAEIGTDMSRFPTAAHLASWAGACPGNNKTGGKSKPSHTRPGDRWLKAALGTAAMGAIRTRQSYANALFRRVAARRGGKRAQTAVAHCLLVAAWHVLATRTPYHDLGGDYFLNRDNPDHRRRRAIAQLERLGYQVTLEPRAA

SEQ ID NO: 124877 - protein, 359 aa, unidentified
MQTQSTELNFEGQNVFVGIDAHLKSWTVSILTDHLFHKTFTQPASVVPLHNYLERNFPGGVYHSVYEAGFCGLWPHYKLKGMGIDNIVVNPADVPTSQKEHLQKDDPTDSRKLARSLRSGDLKAIYIPDPSTLEDRSLVRMRAVLVKDMVRFKQRIKSFLHFYGIDYPQEFEKSGTHWSKRFMKWLNEVSLEHDSGTQTLRILVQEAEQQRKLLLEVLRKIRLLSCSEKYAKNIVLLRTIPGIGFITAITFLTEIEKIERFENTDHFAGFVGLVPDRHSSGEKDNNGEMTFRGNDILRRSLIESSWMAARFDPALMMSYHSYIKRMEPNKAIIRIARKVLNRMYFVLRNKVEYVPGVVK

SEQ ID NO: 124878 - protein, 315 aa, unidentified
MEAERWVGIDVSKARLDVALGVAGELLWVANDARGIASLVARLVELAPELVVLEASGGLQTALVAELGAAQLPVVVVNPRQVRDFARATGQLAKTDALDARMLALFAERIRPQVRPLPGEQELELKALVARRRELVEMITAERNRLDRAPKLLHKEISAHIRWLESRLKDRDRDLDQMLRSSPLWREREDLLRAVPGVGPVLCATLLADLPELGALSRHQIAKLVGVAPLNCDSGTMRGRRAVWGGRAQVRAALYMATLAAVRCNPALKTFYLRLRSAGKPAKVALTAAMRKLLTVLNAMLKHHTHWSPQCPHIN

SEQ ID NO: 124879 - protein, 350 aa, unidentified
MIIIGCDYHPSFQQIAFVDTETGELQERRLQHREEAEKFYRDLAAQGVKVRVGMEASGHARWFERLLSELQFELWIGDAAEISAKRVRKQKTDRQDAQLILKLMLKDDFPQIWVPSWENRDLRQLLWHRHRMVQARTRMMNQLQAVALNEGLRCKKKLWREAGRAQLEAFKLAPWASQRRTDLLELLDRLNPTIAKLTQAIDWEVEKCPAARRLQTHPGVGPLTALAFVLIIGKADRFQCGKQIASYLGLVPLEKSSGNQRRLGHITKQGNSLLRFLLVEAAQVTVRSLPEWRSKYCHLTLRRGRKIAKVAMARKLAVRLYWMMRKEWDYEQLRKFGSYAGKPGHRDGVK

SEQ ID NO: 124880 - protein, 391 aa, unidentified
MIYIGIDVAKDKHDCFITNSDSEVLFKAFTIFNNLDGFNDLYQKIEFVMDDVTKVKVGLEATGHYSYNLLGYLIDKGLPTYVINPLHTNLYRKSLSLRQTKTDKVDARTIASMLMSDVNLKSYSDTSYHNEELKSLTRYRFDKVKERAKLKTSVSRLVCILFPELEKLVPTLHMASVYALLSEFPSAKHVATAHLTRLTNLLSESSKGRYGKDTAITFRDSAIASIGSNMPAKSLELKHTIKLIQGLDSEIDEIENEIKIIMDEINSPILSIPGINYRMGAMIIAEIGDFNRFDFPDKILAYAGFSPSTYQSRQLDGAYAHMEKRGSRYLRYALYNATKYVCHWDPTFAAYLAKKRAEGKHYNVAISHAVKKLVRVIYHLEKTKQQYIKAA

SEQ ID NO: 124881 - protein, 423 aa, unidentified
MTKLTPTPAGAVLVAIDMSKSRQEVLIERPEGGRRRRMTVMATRQDYDGFAEQLAAIGRRIIVGFEATGNYHRTLAHRLLTAGFELRLISSVALARTREALHNGWDKNDPKDAQVILHMLRIGATQRYVDPLAAGINDLQELSKTHETISRMKTQTWHRILTHYLPLYFPEIARFAGNSRSDWFLALIERFPTPASITALDAGAFSAAAWPLIGRKVSKARLINDIYETACASVALPVPEESAAITMFRMVIAQGRSLIQQRDEIERLAHDRLAEHVDYQLLRNIPGIGPINALTILAEAGDLRRFNHHRQFLKFCGLDLATCQSGTFRGRTKLSKYGNARLRRTFWMAAQVAARQRDNSFRDKLGRYTAGHADDADRRRKAMTALTAKMARVAHAVVKTGTEYRPFLERSDARWKDPSRQVP

SEQ ID NO: 124882 - protein, 373 aa, unidentified
MTIRTRAAGFRIGGTKAFGLWRSMIVSGFFICPEWLIELRVRFHKEGLTKMSEINMTAPPSQLCAGIDTGKHWLDVALSDGRSLKRRPNTREGHLALVSELKALGVARAGIEATGGYEAEACSVLRSADFAVQVFQPQQVRAYAMFRLQRAKSDRIDARIIAQCTAEMAELRAPPDPRLSDFAGHLTMIEQIEEDIARARIRSEHAVGERAIAHYKAEIRRLASQRREELKLVGIAIRHHPDLARNLDLVASIDGVGLRTAITIIVRMPEMGSLSREKAASLLGVAPFIRQSGRFEGERHVAGGRARPRTALFACAQAAIKWNPQLARFYKRLRDNGKHYSCAIMACTRKLAIYINTVLKRQSPWQPECQENP

SEQ ID NO: 124883 - protein, 402 aa, unidentified
MNAVGIDVSKGKSMVAIMRPFGEIVSAPFEIKHTASGINSLVELINSVEGESRIVMEHTGRYYEVLAHQLLEANLFVSAINPKLIKDFDNDSLRKVKSDKADAVKIARYALDKWQNLKQYNVMDELRNQLKTMNRQFGFYMKHKTAMKNNLIGILDQTYPGVNTYFDSPARSDGSQKWVDFASTYWHVDCVRKMSLNAFIDHYQNWCKRKKYNFSQSKAEEIYGKAKELVPVLPKDAITKLIIKQAVDQLNSASTTVESLRTLMNETASKLPEYPVVMAMKGVGTSLGPQLMAEIGNVSRFTHKSAITAFAGVDPGVNESGTYEQKSVPTSKRGSADLRKTLFQVMDVLIKTHPQDDPVYQFLDKKRAQGKPYYVYMTAGANKFLRIYYGRVKEYLSSLPES

SEQ ID NO: 124884 - protein, 346 aa, unidentified
MSKPESSAISAIGIDVAKATLSVCFRRPKADESALTLRNTDVDIRKKLLPCLDGFTGRIVMESTGHYHWRVALILTEAGYKVFVVNPILAKQYTSSNIRKVKTDPADASGLARMAELADNLPRCFALTRETLDLRKKLSVIASIAKQMQALKATQRQLTEGHEILRTGASKGEDALDATIKQLTKTADLLEDEFVKESAALETDSTAAALIDGIPGVSPFVAHLVLHWLAVLPDITAKSWIGYAGLDVSSRESGSWHGRCRLTKRGNSFLRRRLYSAAWGATMSDENFQIYYKQMRADGRPHVEALLIIARKIVRIMFKLLETKKKYDPSLFTFGKKTKLTLDAAL

SEQ ID NO: 124885 - protein, 327 aa, unidentified
MDPTTTAARLFAGVDVSKDRLDVCLRWSEAERHQKEEAFVLAYDDSGIDALLSRLLEEPTALVVLEATGGFERTVVVALAAAGLPVVVVNPRQVRDFARATGTLAKTDRIDAAILARFAEAVRPAPKPLPDGEIRALQAIVARRRQLLGMIAAENNRLGSAPKPVAKRIKAHIRWLEKELSRTEGDLEAAIESSPVLGENEALLRSVPGVGPVLARTLLAGVPELGTLTHKRVAALVGVAPLNRDSGTLHGRRSVWGGRAEVRAALYMGALVAARRNPVVRGFYERLLAAGKPKKVALVACMRKLLSILNAVLKHRTPWRFPQYLSP

SEQ ID NO: 124886 - protein, 411 aa, unidentified
MNKLYAGIDVSSTNNHVYLMKPNGDKHSNFSVKNSPDGSKRIAENIVSALLSLNLSETAVGIEATGVYGENLMIYLRDSLTKFNCDYHVLNPKQVENFKKAYSDLPKNDPIDAFVIADNLRFGRITKPMYIDNDYKYKALQTLTRARFFAVQNLTREKQRFANYLFMKCSGLAQEKVFSNHTGATSMALIDEFETVDEIAYMDIDELADFISKKGRGRFANPNAVAEAVKAAARGSYRLPKTINDSVNQALSVSIASIKAMKEPIKTYDNAIAKQLELIPNVLTSIKGIGQVYSAGIISEIGNINRFANHAALAKYAGIAWKEHKSGNFEAEHTNLVKSGNRYLRYYLLEAADSLRKCDSEFRRYYDLKFKEVNRFRHKRALALTARKLVRLVFRLLKDNHLYILPEQFKR

SEQ ID NO: 124887 - protein, 369 aa, unidentified
MADHTLFVGLDVHKRTIAVATASDTAGTACVYYGTIANTPDALRRLCKKLATDGAQLHFCYEAGPCGYVVQRRLSRLGHRCDVVAPTLIPRKAGDRIKNDRRDAMTLAQNLRAGHLVEVWVPDEAHEAMRDLVRMRALAKRDQRRARQQLQSFLLRHGRSHSGTSWSRAHRGWLADQSFAQPAQHLVLQEHIQRIERADELCERIHQAIVDLLPAWTLAPVVEALQALRGISVVNAATLVAEIGCFGRFEHPRQLMAYLGLVPSEHSSGQTIRRGPITKSGNTLARTCLVEAAWTYRFPARVSRIIRDRSAHLPEPIRATAWKAQVRLTRRYRRLMAAGKVAPKVITAVARELVGFIWAIARMVEPKTA

SEQ ID NO: 124888 - protein, 410 aa, unidentified
MDVIHRNCCGLDVHKETISACHLYMLEDGSVKKNQEKFGTMTRDLLRLADWMKEKGTTHVAMESTGVYWKPIWNILEGLFDVLLVNAKHIKQVPGRKTDMKDCEWIAQLLQHGLLPRSFVPPKTIRELRDLTRHRAKIIQQKASIANRIQKTLEDANIKLACVATDILGVSGREMLESMIKGENNPDVLAECAKRKLRGKIPELKLALEGKITEHHRFMLEIAFQQLKDLEDLIKRIDAKIEEHMHPFEKAVSLLKTIPGIDQKNAEAIVAEIGTDMNQFPSEAHLASWAGICPGNNESAGKKKSGKTPKGNHWLRRVLGEAGWAASRSKNTYLSAQYKRLMPRRGKKRAIVAVGHTILTICYWMLKKNMEYKELGVEYFIRLDPEKHKKYHVKKLEMLGFEVILQPQTK

SEQ ID NO: 124889 - protein, 366 aa, unidentified
MKKTSTVQVNGNMIFKGHKLTIGLDLGDRWSFYCVLDEAGQVIVEQKLPTTPEAMKQTFGKIPRSLIALETGTHSPWVSRLLTELGHEVIVAHAQKVQLITKSNRKDDRHDARTLARLARIDPALLGPVRHRSAKAQLHLTVIRARAELVSARTALVNAARGLVKSYGERLPKCGTYQVSEKLAEGLSAELREVLVPLFKEIESLNERIKEYDERMEKIAKEVYPEVSLLKQVKGVGTQIALTYVLTIEDPYRFPKSRQVGCFLGLRPGRRNSGESEPQKGISKEGDRYLRTMMVQGAHYILGPFGEDSDLRRWGRKLAERGGKNAKKRAVVAVARKLAVLLHRLWVGGEVYEPLRNSQKAMREVA

SEQ ID NO: 124890 - protein, 376 aa, unidentified
MTAKTDPQPSSVCEAPLYVAFDLGKTSWTVAMTTGLGVAPWVRAVRAGAWEEVGSVVVRARARFGVAATAPVISCYEAGRDGFWIHRALVAHGWANRVVDSASIEVNRRARRTKTDRIDACKLVVLLVRVCLGDRGAWREVHVPPVEAEAARHATRERMALQKEHTALLNQMRGWLTTWGTALPSRRRDAWWERLRDWRGAALPVAVQARLARASARLALVREQLRALTRAEQRAVQAAAPTSAAGRLMRLRAVGVKGTTTLLGEGLLWRGFTNRRQVGGMLGFAPTHASSGEQHRDQGISHAGNWRWQGTLIQLAWSWVRLQPTSALTQWYLARFGTGKRARRIGIVALARKLLIALWRYATTGLVPAGAVLKTV

SEQ ID NO: 124891 - protein, 419 aa, unidentified
MTQTSHNTFAAFVGIDWADAKHDGCLQAAGAAKQECFQLEHTPEAIDAWVTTLRTRFHGQPVAICLELNKGPLVFALRKYDFLVLFPINPLTLARYREAFTPSRAKDDPSDAELQLELLLTHRDKLQPLSPQSPAMRALEQLVAHRRRVVGDKVRITNRLTSTLKNYFPQVLHWFQDKDTHIFCDFLSRWPTLKAAQLARRTTLETFFRDHHVRSEDVIAQRRHAIKAATPLTTDEGVIAPNALLVQALVAQLRVTLQAIADFDTAIAQRAQSHPDFPLFQALPGAGPVFAPRLLVAFGEQRARYATAAELQKYAGIAPVTERSGKKSWVHWRLQCPKFLRQTFVEWAAESIRHAFWAQLYYQQQRDKGKAHQAAVRALAFKWIRILYRCWQDHTPYEESVYLQALNQRGSSLIHNLAE

SEQ ID NO: 124892 - protein, 356 aa, unidentified
MEHVNKLDFSGQSIYVGLDVHKKSWSVSIFSEQCEHKTFTQPPDVDKLVHYLKRNFPGADYRAVYEAGFCGFWVHDQLRDQGVNCIVANPADVPTTNKERTNKRDRIDCRKLCRNLRSGAIQGIYVPSRPKLEDRSLVRTRQSMMKKQTRCKNQIKSLLFFYGIDLPEELVRSSWSQKFLRWIEGLRMERNSGDMVLKAHLEELKHLKPIIASLNRAIILLSREAEYRDWARLLRTVPGVSTLTAMILLTELCELARFATLDHLASYVGLIPDTKASGETEHIGNLTHRRNAQLRAVLIEAAWTASRKDPILLLAFNEYCKRMRKTRAIVKIARKLLNRIRYVLKNQAEYVPGVVQ

SEQ ID NO: 124893 - protein, 316 aa, unidentified
MDEILRFVGIDVSKDHLDVHVRPDDQQRRFEYDADGLTDLVKMQTEMRPNLIVIEATGGYEQRVVATLAAQQLPVVVVNARRVRDFAKATGQLAKTDRLDAAVLSDFGEKLRPQLRTLPDESREELKALLVRRRQLVDMMTAEKNRQSTAPKRIRRHIQTHIDWLQKQLAGIDEDLAGTIQQSPMWKAKDEILQSTPGIGPTTSTTMLAALPELGSLNRHTIAALVGVAPMNQDSGKFRGRRAIQAGRRSVRTILFMSTLVATKHNPVIRAFYQRLLAAGKPKMVAITACMRKLLTILNAMLKTNSHWNSEHAKTC

SEQ ID NO: 124894 - protein, 497 aa, unidentified
MPNKTSIYSRCNPQLLKLFERAGHPAKVLCVALDYAKAQHTALICNGVGDLLKPSFAIENTAPGAAQLLREVRACAQCRKVRSEHVFFGGEDYPSYAENFVRYLRQEQFLVVRVNAWEAKQQRDNFQASSDSLDLLGIARCCLHRRGQPVRDLPQAYPHLRIATRDRDKLVRMRTAISNRIHSYVDRLFPGFLSAAQSGLEPFCRASLELMEDRFSPAQLRRRPRPSLAQWLGRRGVTQALEKADQLKQLAKQVLPPAPEQTAMLQQSLAQLVGLYRNLEQSIARIDRELAYWLARTPGAWLTSISGLGITLAAGWTAELGPPSQWHSVRQLCSYSGVVPKTKQTGGPDKEPVVGAVGQRCNKRLKNVVLQAAEKVIQYGPEELRHTAQQLQARGAHTAFALAKRLVRLGKYLATTGTVYRPKALMDPDTPQATLAAHYQSVWEKLLPKWKEKADLRDVFAPEHPLGQWRKMVQELYALELRLPPQKAAHQPSALAP

SEQ ID NO: 124895 - protein, 465 aa, unidentified
MKPHRRLPRKKPVAGPSLLERLNPNAAGIDCGADTHYVAVPPDRDATPVRAFKTFTTDLHRLADWLTACGVTTVAMESTGVYWIPLYEILEARGVDVMLVNARHVKNVPGRKTDVVDCQWIQELHSVGLLRGSFRPTAAIAALRAYLRHRETLVQSAATHVQRMQKALVQMNLQLPIVLSDITGVTGLRILRDIIGGQTDPHALAQHRDHRCQASAAEITAALTGHYRPEHVFVLQQNLALFDAYQGQLAVCDAAIEAHVLTLAAQTPAPSGLLPAPRTRKKPRDNEPRFEIRTPLHQLTGVDLTQIDAIGPYSALRLLAEIGTDMSRWPTEKHFTSWLTLAPHNKISGGRLLSSKTQPSANRAAAILRMAAMNLGRTDTALGAFYRRLAYRVGKAKAVTATARKLAILVYRTLREGLVYQDPGAAAYDAQHRVRVLYRLRQRAAHLGFSLLNRETGELLEGAVS

SEQ ID NO: 124896 - protein, 344 aa, unidentified
MEHYAGLDVSLEQTSVCVVDAQGQVVREVKVASEPEALIHFLCAQDLEIARVGLEAGPLSQWLHAGLVTAGYEAVLLETRHVKAALSAMTVKTDRRDARGIAQLLRLGWYRPVHAKSASAQEVRSLLTARKLIQSKLLDIESGIRGVLRGFGLKVGPISRGRFEARICDLVQGQSMLETVVGSMLAARAALQSEFARLHQALLALARADPVCRQLMSVPGVGAVVAITFKSGVDDPTRFRRSRDVGPHFGLTPRKYQSGELDVTGSISKVGDRMVRTALYEAASVMLTRTVRMSPLKSWAMGVAKRRGTKKARVALARKLGVILHRMWIDGTSFRWTGEGAAMA

SEQ ID NO: 124897 - protein, 435 aa, unidentified
MSKASIIRRRVTIGLDVSDRYSHLCVLDARGRVEREDRIRTTPDAVGGWFAVYRGARVVLEVGPHSPWLSRFLKEQGHEAVVANPRRVRLIAEAERKSDRIDAETLARLGRVDPKLLCPIEHRGKAAQQDLALLRVREALVRSRTKLIQCARGLAKAFGARLPASSAPSFAKRVREGGLERLLQQCDELTASIRTLDREVERLGRERYPETRRLRQVPSIGPITSLAYVLTIEDPNRFAKSRSVGAYLGLTPRQRDSGDARPELAISKRGDDFMRRLLIEAAHYTLGPFGPDSDLRRFGLRLLGQGGKRAKKRAVVAVARKLATLLHRLWITGEAYHALGARRARRCEPRRPKVGCAADRRHPGPRSHETGDRTRSTIGPPVRVTAYGAWCRTDVSDASPKLRWQHPLGTDPSVHLECEWKPGTDRDRVRPPRRA

SEQ ID NO: 124898 - protein, 353 aa, unidentified
MLTVGVDAHKQVNSAVALDERGRALGQWHGPNAPHGWQELARWAAGWDMPCQWGIEGAWNYGRGLAQHLVADGTRVYEVNPRWTAQERRAARPQAKNDRLDAQAVARLVWREGTALPQVQGDDEASALDLLVTEREGALAEATRLRNQLHALLMQLDPLYRTHVPCLQTQAGLRCVLAYMTTSTVLLQQSRAASVRRTAERLQLAERHATELAAEIAAHAQQRYAPLTRLCGINLLTAGTLAGILGPGHRFASEAQLAAYAGVAPVEASSAGQVRHRLNRGGNRHLNAILYRIALTQARHSPQARAYLARRTAEGKTKREALRALKRYLIRAIWRLWQECLAVDTRLGPSAAA

SEQ ID NO: 124899 - protein, 354 aa, unidentified
MIIIGCDFHTRYQQIAMAREETSELLGERRLDHESGEAHSFYRSLQSLQEPVRVGIEATGPMHWFERLLAELGHELWIGDSAKIRASEVRKQKTDERDARLILELLLAKRFPKIWVPTPAERDLRQLLWHRHKLVCLRTMLGNQLHFLAMSQGLCRKKKLFTKKGRAELTGLAMGPWTRRRREELLKLLDQVDAPIAELDRAVLEEAQRRDDAVLLMTHPGIGPVTSLAFVLAIGPVTRFCCSRKLVSYLGLNPSEDSSGQRRRLGAISKQGNTMVRWLLIEAVYPAVRKDLALRQDYQRLKFRRGHAVAKVAIARKLAVRMYWMLRSGTAYAQLVRRQGSPGATLVDASPSLG

SEQ ID NO: 124900 - protein, 355 aa, unidentified
MNQEKYIGMDVHAATISAAVKNAQGKVLTECVMETKASTILEFIQGQRGTLAVTFEEGTMAAWLHDLLKPHVSRLVVCDPRKNALMRDGNQNDRVDARNLAELLRTNQVHAVYHGNHGTRTLKELGRSYLTFTKDSTRVMNRIKSVYRSWAIPCGGTSVYSRRHRAEWLAKLVEPGVRIRAEHLYEQLDSLQPVRQAARRELLRESGKHAAVKLLRQIPTIGPIRSALLVALLQTPHRFRTKRQLWAYSGFAVQTYDSGEFRMVRGKVRRNRERITVRGLNRNHNHDVKNLLKGAAISAIERPGPLQDFYAALVEKGMRPSMARLTLTRKIAAITLIIWKKGVSFDPKQLQRQAA

SEQ ID NO: 124901 - protein, 342 aa, unidentified
MKAITTIGIDLAKNSFSVYGVNAKGKCVLQRTLSRSGVITFFANLPECLVGMEACASSEYWAREIESLGHTVRRIHPRYVKAYLLGSKNDANDAAAICEAVQRPNMRFVPHKSPEQMDIQCVHRIRQGHVRSRTALINQIRGLLGEYGIIMRQGAAQVRKNLPTIIEDEGNGLSDCMRRSLISLYNTVCFLDQQIEEQEQILKSIAKENEACKRLMQIPGIGIMTATILLSIAGVASNFKNGREFAAFLGLVPLQNSTGGKTRLLGISKRGDKYIRTLLVHGARAVLRSLVMGKLAEGKQQKWLTELVARRGAKRACVGLANKTARIAWSLLAHGTEYTLAA

SEQ ID NO: 124902 - protein, 337 aa, unidentified
MEYFAGLDVSMEETHICILDREGVLIREGKASSVLKAIAAFLAAGPTCSKVVFETGRMAPMLFHGLTELGIPVVCIESRQAYQALKSLTGHKTDRNDARGLAHLARTGFYKPTHVKSLSAHAIRALIAARKKLVGQRVTIDNQIRGLVVVFGVRLPRALSPAFKDAALKVSDGVPGLHAALRGLFAAREAILTAVAAIDGDIKVMTRRSEVCVRLMTVPGVGPITALAFAAAIDDPKRFKRSRDVGAYLGLVPRRHQSGEVDYTGSISKRGDVRVRALLYEAANVMLTRYAAPLKLKSWALAIGQRGTMRKARVALARRLAIILHAMMRDQTEFQVA

SEQ ID NO: 124903 - protein, 346 aa, unidentified
MMHAGLDLSRKRLDVELMDDQGTRLGHLGVMPDRDGLRSLARQVGRIGQPVRAAIESMNGARFIHDQLELAGWEVAIADAVKVKGLAPLACKTDRIDAWVLAELSRRDLVPEIWLPEPAIRAERERARWRLHLVHHRTALKNRIHQTLISFGHACPVADLFGTQGRALLDHLELPEPWRGTVTASLRLIDDLDRQIDQCAQDLRDLGADHPYVPLLVTAPGISWVLAYTIASEIGDIARFASPTKLVAYTGLCPIVRQSGGRDQRGPLAKNGPKYLRWALIETALVAARLPHYHDRYQRLKRRLGPQRGGKVALVDLARHQAEAIWYMLRRNQPFAPGGAKCVLAA

SEQ ID NO: 124904 - protein, 383 aa, unidentified
MQEVKSRPELAAIRTDLAAIFVSMELSRSTWVITSLAPGAGETMSKHSLPSGDVAKLLQRFSLLKQKARTRTGADFPIIVIQEAGLDGFWIHRVLESEGIESHVVDPASILTSRRRRRAKTDTIDGETLVRTLLAHKRGEPRVCAMVRPPTRQEEDRRRICRERRTVLAERIEHVNRIKGLLFAQGVFDYEPLHRNCRARLDALKTGDGCVLPDHLKAQIGRELDRLELVVTQLKAVEAERDALLEQTREIVTVPARALANLKGIGAEHAAVIWSEGFFRSFANRRQVAAYAGLAPTPWQSGSVDREQGVSKAGNPRLRTAMIQLAGCGCDTNLAQRSADGSTRGSVDMAAARAKRRSLRSRASSSSPCGSMRLPASSSTELS

SEQ ID NO: 124905 - protein, 388 aa, unidentified
MIYVGIDIAKLNHFAAAISSDGEILIEPFKFTNDYDGFYLLLSKLAPLDQNSIIIGLESTAHYGDNLVRFLISKDFKVCVLNPIQTSSMRKNNVRKTKTDKVDTFVIAKTLMMQDSLRFMTLDDLDYIELKELGRFRQKLVKQRTRLKIQLTSYVDQVFPELQYFFKSGLHQNSVYALLKEAPTPTAIASMHMTHLAHLLEVASHGHFGKEKARELRVLAQKSVGANDSAISIQITQTIQQIELLDSQLEKIEAEMTDIMKFNDSVIMTIPGIGYINGGMILGEIGDIHRFSNPNKLLAFAGLDPSVYQSGNLQAKTTRMSKRGSRVLRYALVNAAWNVVRNNATFKAYYDAKRAEGRTHYNALGHCAGKLVRVIWKMLTDEVEFNLE

SEQ ID NO: 124906 - protein, 513 aa, unidentified
MRYKVNGSAEMTDTSLVRAHGVRRRRVASPSLSMVRESSVTLVSGASRIPFERSSRFRRFPWHCHSSTMVEQAMAMRKREDEVFPNAAGIDVGSSSHWVAVPAHCTDAPVREFGAMTDDLQAMAEWLLACGVDVVALESTGVYWIPVYELLESRGLKVWLVDARQVKYVPGRKSDVADCQWLQKLMSHGLLRAAFRPAADVCVLRAVARSREVLLTEQASWVQRMQKALVQMNIQLTEVISDVMGQTGQAIIRDIVAGQRDPEVLARHRHRRIKASEQDIVRALTGHWREEHLFVLGQALGMYDDIARHLRECDEKLRRLLAERSASSVDVGKTPRAGSKARAQFDLRQQLANWAGCDLTRINGLGLDSVMKILSELGTDLSRFANVKHFCSWLGLCPATKISGGKVISARTKRSANRVRQALKMAAMSLSHSDSALGAFYRKLCSRMDKPRANTATAHKLARLVYFMLTRGEAFVDEGQQRYEEQQRERSIAALKRRAAVLGFQINPIGAAA

SEQ ID NO: 124907 - protein, 449 aa, unidentified
MAKTKRRLKGMPVIHHGAAGIDIGSRFHVAAVPPDLSEPSVRTFQAFTSDLHAMADWLIQAGVTTVAMESTGVYWVPVYEILEDRGLEVILANARDARGVPGRKTDVNDAQWLQKLHACGLLKASFRPDRQISALRSYLRQRERHLDYCAAHIQHIQKALTFMNLQLHHVISDITGVTGMKIIRSIVKGQRNPQQLATLRDGRCKATEETICAALAGNYQPEHLFALEQAVLLYDFYQLRVHDCDEKIAIALDVLNQSTSVPEAPLPKPRHKTRQPNALNFDVRVPLYQLAGTDLTQIHGIGPYLALRLISECGTDLSRWPSAKHFTSWLTLSPGSKVSGGKVLSSHSRKTNNRITAHLRLAATTVGRTNTALGAFYRRLSARIGKAKAVTATARKIAVLFYNAMRYGMNYQDPGSDHYEQQYRKRVVKGLHRRAAEFGFTLHEIECVS

SEQ ID NO: 124908 - protein, 422 aa, unidentified
MAKKEDTKVIEVLHPICCGLDVHKETVAACLIVQTATGERIEHREFGTFTCELRALKEWLLDNECPVVAIESTGVYWRPVFNVLEDSIQVILVNARHTKHMPGRKTDMSDSKWLAGLLRHGLVRGSFIPAKEVRQWRDWCRQRKTLVNTVGDYKRRVHKTLEMANIKIDSVLSDLFGATGWNLIQLLLREGPITLDDVRNCLRGSLAGKDRKQKAAQLHDAIQGFFGSHEREVLQPFLRIIGALENEIALIEARLQGLFAPYNDLVDRIDAVPGIAYVSAWAILAEVSPYLDAFPTVQAFCSWCGLSPGNHESAGKRMSVRSPVRKKMIKTVLIEVAWAAIKNKQSYYRDKYFRLKARLGSRKAIVAVAHRIAKALFHIIKHGAEFKDLGKDYLSLLHAQRRYEYLSREAKVIGYKLIPVAV

SEQ ID NO: 124909 - protein, 348 aa, unidentified
MQSTAHLPVIGLDLAKSVFQLHIVDIDSGEIQRRTVKRARLAEFFAKCQPSLVAMEACASAHYWARTISSLGHQVKLLPAQHVKAFLLRDKTDAMDAQAIWVAAQQAHILSVPVKSERQQACMALHGMRRQLMKMRIMQTNALRGIMSEFGIALPVGHNHLLKAIQGELAKAQQEDRLPADLVVTVQEQLRRVDALQNDIDHIGYRLHATIREDRQMQAIQQIPGVGELTASALVAAVGDFSTFKSGRQFASWVGLTPRQVGTGGKTQQLGISKRGDTYLRTLLIAGARAVIAKAQKSDWMMRLLERRHHNVAVVALANKMARTVWAVLARGSAFDRVKWSPLEQVSA

SEQ ID NO: 124910 - protein, 429 aa, unidentified
MKFNTQNAKIASITEKTLIVGIDVGSENHYARAFSWRNYEYSKKPFAFSNDEAGFAAFKEWMDDIAEKHGMEVIIPGMEPTGHYWLNLGAYLQEQGMKPVHVNPHHVKKSKELDDNNPSKNDRKDPKTIAGLVNEGRFSYPYIPTGIYAEIRNLSNLRIQTQEEITRIKNRMARWFSIYFPEIKDVYRNPDAVSGLMVIKQAPLPCDIRELGVEGVNKIWRDARLKGAGIKRATTLVTAAEHSIGNTEAPRSARKEIRNLLEDYEGYKKRMDELMEEIEKTLSEIPYIDKLMEINGIGIKTVSCFIAEVGDIGRFDNPKQVQKLAGYAIVADSSGKHNGESRISHRGRKRLRYALYEAAISVIGKNKEFKEIHSYYRTREKNPLKKMQSVIAVACKLIRIFYTILTKGVDYDGQKMLNDIVRPEIQPAA

SEQ ID NO: 124911 - protein, 369 aa, unidentified
MADRITYVGLDVHKDSIVVAVAAGGLRGEVREYGRIANTPTALDRLLRKLGGDGMRLRFCYEAGPCGYGIQRRLSTRGHECVVVAPSLIPKRAGDRVKTDRRDAASLARLHRAGELTAVWVPDAGHEAMRDLVRARLDAVHSLRRARQQLSGFLLRHGCHYGRPAWTRLHRRWLAGLKFEQAVHHIVLEDYIAAVEAAEARRNRLTAQIEAMLPDWTLAPVVAALQTMRGMALVNAASLIAELGDLSRFANPRQLMAYLGLVPSEHSSGASVKRGGITKAGNAAARRLLIEAAWSYRFPARLSRELLLRQERQPRLIREIAWKGQLRLCARYRRLARTGKPANIVTTAIARELSGFVWAIARQVAVTTD

SEQ ID NO: 124912 - protein, 417 aa, unidentified
MHLTASEARGAVLGLDVGKASHWACLLTPDGEVAVNRPVENTERALDDLFSQVDASTLVVVDQVRNIGALPIVRARATGLPVAYLPGIAAHQASRLFSGDAKTDERDAHVIARTAMGVPDALLPVPERDEALEAARSLASQRDHLVTCGTRDKNRLRSILLESCPAFEALVDPSDARWLRVLERLGGPWGIVDAGRAAFGALTRGADRSAMAAAWDAVASSTRPAEVMVKAENPQVSMLARRISEAMSEVARLDREIAGLLEEDGTYACLMTVPGIGPRTASELAIAIDISAFPDHDHLASYCGVAPRNRQSGTSISSVTASRQGNKRLKNLLIFSCNSLVRSKGRFGEYYRSCRARGMCHGEALKAVARKRLKVIYAVMRDKAPTRPSPAEIEESCRADGLAPAWRESRSLNGENR

SEQ ID NO: 124913 - protein, 366 aa, unidentified
MGWMAPLRHRRAKLVFRRITRNREPSMNEITTIGLDLAKHVFQVHGIDAQGRTVLRKRLRRGQVLAFFSRIPRCVVGLEACATAHYWARELGALGHEVRLMPAQYVKAYIKRNKHDAADAEAICEAVQRPTMRFVPVKTAEQQATALLHRGREQLVRQRTMLVNALRAHLAEFGIVAAQGLRNVGELIAIVRDDGDRRLPDVARQVLQVLAAQLEQIEAAIAALEKQLMAWHKANAVSQRLASIPGIGPIIATAIATTVADPGVFRSGREFAAWLGLVPRQNSTGGKTRLGGITKRGNRYLRRLLINGASANLLRSKATKADPWVIGLRRRRPPLVVAVALANKTARIAWAVMLREREYQPRAVAA

SEQ ID NO: 124914 - protein, 386 aa, unidentified
MQKLNDLSRSLTALEPDGTLIAVIEMSLSSWLVAGIVPGVERQPLKKLAVDESTLLKLLYRWREEAEKAGRRIERIAVAFEAGRDGFWLARWLKACGIEAYVIHASSIAVSREHRRAKTDRLDTELLKRSFLGWLRGERDHCKMVAIPTIKDEDAKRPNRERDSLIRERSRIVNRMKAAFVRLGIRGFNPKLKRAAGRLDGLRTPEGEPIPPNTSAELRRDMERRRLVSDQIRQIEEARLERIEQAPSDGPHAMVRLLARVIGVGIETADMLVHEVLSRNMRDRRAVARYAGLTGSPDESGRKRREKGLARSGNARVRRGMIQLAWRFLLHQKDSALTRWFRARTENARGIRKPMIVALARKLLIALWRLVREGVVPDGVVLRPAQ

SEQ ID NO: 124915 - protein, 422 aa, unidentified
MNTTLLSSSAEEVVIKYVCGIDIGSQSCSGCVTQPNKQMVVRPTAFANTKDGWNVLLARLEQLEADPNQIVIGMEATARYHENLYHELEQRGYQLRLLHPGQTHHFHQQQGLRAKTDRLDAMTIARLLLSGEERVGYIPSEQIATYREMVRLRAQLSKEVARYQNQIHALVVVLFPEFTQVITDPCLPSALAVLKAYPSAQAVAQAGVKAVSQVLKAVPAAHFGRPTAEKLVAVAQTSVSSNRAVSGRASNLRILCDQLEHTQANLTRLEEELEQLMTTDPATKGLQQMPELGPQTVAVLRAELGEVDRFAHTDQAVAYAGMDIEIKESGQWKGKAKLSKHGSGLLRQILFLAALRSMRLEGSAFGAYYHHLVERGLKKMSAIMAVMRKLVAVATHLMKTGEDYDPTKVWAGASSQKTSSGC

SEQ ID NO: 124916 - protein, 336 aa, unidentified
MSQYVGIDLHRRRSQVVILDETGVKLSSVKVENSAAALALAVGEAGPAPEVVLEATWGWYWAAELLTDMGARVHLAHPLGIKGYQNRRVKNDERDATLLADLLRVGSLPEGWIAPSELRETRELVRYRHKLSRLRAGLKSQIHAVLGKEGVIPDLKTLWGPAGSDWLDNQNLAEAYQHRVVSLRRLIGRYDIEVSELDRRIHARLADHTGYQVIQQLDGVGPVLAAVFVAEIGDISRFPTPKRLTSWAGLTPRHRESDTTIHRGPITKQGSALLRWAAVEAVARYRGGAPIRDTYQRVAARKGNKVARVAAARKLLTLIYYGIRDGEIRCLNKEAA

SEQ ID NO: 124917 - protein, 371 aa, unidentified
MKKSSMFIGLDVHKDSIEIAFAEAGRDGEVRSYGGIDGTLDALDKVIRKLVSKGCNLHFVYEAGPCGYDLYRHLTAQGFDCVVVAPSKIPRQSGNRIKNDRRDAQMLARLHRAGELTAVYVPFVEDEAMRDLTRAREDAKAVERKAKQRILAFLLRHGHRYSGKSSWSRAHFRWISILKMPHPAQQIVLQESLDALAECTRRVDRLTEQIQTLSPQWRLFPVTQALQSMRGVSLIVATTTIAEIGDLTRFGRPAELMSYLGLVPSEHSSGQTTRRGSITKTGNGHVRRVLVEAAWAYRLPARVSRKLLIRQEGLSQEVCAISWKAQLRLCARYKRFTAKGKSHQLVVTAIARELCAFMWAIAHEVQGSVKM

SEQ ID NO: 124918 - protein, 434 aa, unidentified
MKTTTRIHAINPNLLKVTFDTGKDSLYAYTELPLAANAVNCLEETIPNRNQPVLKALERFKSLALQHGFAGLCILCEPTGGFERRLLRLARQSGHFTAYLNAESVRKLRVVQSNDASKSDLQDPKTMFTLAKLGKTLTHRQLTGPWLVLRETNAYYDELDRQNVSLRCQIHRVLTQLFCELSFKRDFLFDSTAIPHLVQQFGLNPYRIAAAGQAHFFRRMKKHGVRLRTLERLWNDAQLSCLQHLEPGYSELLEANLRELFEDFWRCQQRLQAAAQNMIELLHQLQSQGQVRLQARKGLINDLLLARILAETGPLEDFKSWPQLLRYGGLNLCERQSGTMIGRRRISKKGRSLLRKVLGQAVLPRVRKTDLYGLYYHGKKAKGMVGQKAMMAVARKFLKLLWGLNRSAQGFAQDRVFHCQSQFQLAAQPVAQAA

SEQ ID NO: 124919 - protein, 355 aa, unidentified
MSQEKYIGMDVHQATISVAVMDGNGKLLMECLLETKAATILEFVQGLRGTLSLTFEEGTSAAWLHDLLKPHVSRLVVCDPRKAALLKEGNKSDRIDARKLAELLRTNQLKAVYHGEHGIRTLKELGRSYLTVSKDVTRAMNRIKSLYRSWAIPCPGTTVYAPSHRLEWLAKIVQPGVRVRAQHLYEQLDNLQPIRQQARRELLLESHKHPAVKLLRQIPSIGPIRAALLVALLQTPHRFRTKRQLWAYSGFAVETHDSGEYRYVRGKVQRNRERITVRGLNDNHNKDLKNLFKSAAISASTRPGPLHDFYVARVEKGMRPTMARLTLARKIAAITLTMWKKGVSFDPQQLSRQSV

SEQ ID NO: 124920 - protein, 340 aa, unidentified
MSEITTIGLDLAKHVFQVHGIDAQGTTVLRKRLRRGQVLAFFSRIPRCVVGLEACATAHYWARELGALGHEVRLMPAQYVKAYIKRNKHDAADAEAICEAVQRPTMRFVPVKTAEQQAAQLLHRGREQLVRQRTMLVNALRAHMAEFGIIAAQGLRNVGQLIAIVRDDGDTRLPDMARQVLQVLANQIEQIETAVAALERQLLAWHKTNPVSQRLASIPGIGPIIATAIATTVADPNVFRSGREFAAWLGLVPRQNSTGGKTRLGGITKRGNRYLRRLLINGASANLLRSKATKADPWVIGLRRRRPPLVVAVALANKTARIAWAVMLREKEYQPRAVAA

SEQ ID NO: 124921 - protein, 356 aa, unidentified
MEQLTTVGIDLAKDVIAACVLDVHGAVIERRVLRRAAFERWAEQLPSCKVAMEACGSAHHWGRWFAAHGHTAQLIAAEFVVPFRKGGKNDTADAEAVAIAARQPTMRFVPIKTIDQQAILAWHNVREGWKEERTALFNRVRGLLAEFGIVIGRSSDRLLTELPRLTEDSRLPDGVRALLLDAREHFAALHARLARCDAQIAVHARTSPAAQRAGELLGVGPLTSSALAATVPDAKVFKSGRQFSAWLGLTPRQHSSGGKTRLGRISLRGNVYLRTLLIQGARSTLQSAINTEPARASRLQRWIIELYGRKGYYKTLIAIANKHARILWAMLAKDESYDASAWQRHPMNQPSLAGNA

SEQ ID NO: 124922 - protein, 412 aa, unidentified
MLFVGDDWAEDHHDIEIVDEKGRRVARRRLPEGLDGVSRLHALIAAAMPAEWAELEEGEAAARVKVGIETERGPWVAALVAAGYEVFAINPMSTARYRERHSTSGAKSDAGDAHVLAEIVRLDRAHHRPVAVDTDNGEAMKLVTRGHQTMIWERTRHVLRLRSALREYFPAALTAFGDLDEPDTLALLAAAPDPDLAARLPKARIAAALKRANRRHIDTRAAEIQAVLRAPALRQPAPVQQAFAVIAAGEVRLIAALNIEVDALGEVVAQHFGRHPDAEIYASQPGLGVILGARVLAEFGDDPHRYADARARKNYAGTSPITRASGTKKIVIARYAKNDRLADALQQWAFGSMRGSSGARAYYDAMRARKIGHQAALRQLANRHVGILHGCLKTRTLYNETTAWRHHNDAAD

SEQ ID NO: 124923 - protein, 332 aa, unidentified
MLYKNYVGIDVSKLSIDAFIRESRIHRQFRNEESGFKQLIQSGLRSILEKLGNRCLFVLNIPDSIRCLSLFLEREHITYAMVPALDIKRSLGITRGKNDQIDAKRIAEFAYRFNDRVMPTSLPAEDIRKLHSLLAMRDKMMRNMSGYITSRNELFRVIPDRELPVLPSVYENIISTLKNEVHELEREIRSIIMANKELKTTFELITTVKGIGFIVASFLIVYTCNFIRFENWRKFACYSGIAPFEYQSGTSVHARTQVSFIANQQMKRLLHLAAMTAIHFDAELHNYYVRSQAEGKSKMATINIVRNKLIARVFAIVKRGTPFVDIQKYVYL

SEQ ID NO: 124924 - protein, 316 aa, unidentified
MVPPPLFVGIDVAKATLDIAVRPTAETWNAPNDAPGIDALVTRLGALAPTLIVLEATGGYQGPLVAALRAAALRVVVVNPRHIRAFAQAVGILAKTDRIDARVMAHLAEAVKPAPRPLPDAQTQELRALLVRRRQLVEMGSVERARLDTAPPGIQKTIQAHTAWLTTPIAELDDTLTHTSQTHPEWQAKDDVLQSIPGVGPVLARTMLGQGPELGALSPKPLAALIGVDPFNRDRGTLRGRRPVYGGRAEVRAVLYMSALVATRHNPVIKAFYKRLLAAGKAKKVALTACMHKLLTIMNAMVRDLKPWQPQEVPSA

SEQ ID NO: 124925 - protein, 351 aa, unidentified
MKLTTIGIDVAKSVFQVHGTDERGKVVLRRQIRRSQLLLFFSNLEPCLIGMEACGGSHHWARKLAGLGHTVRQMAPQFVTPYRKNDKNDGNDAEAICEAVQRPNMRFVPVKSPQQQAELVLHRIRRRLMGERTALINQLRGLLAEFGLVLAQGANHVRSKLPSLLENSSDSVPPLALELFQSLYEELCRLEQCIAGYDRRVQQLYRGNPLCQKLGELQGIGALTATAFVATVAHAAQFKNGRQCAAWLGLTPKQDSTGGKTRLLGISKRGDVYLRTLLVHGARSIMRHTPKRDDPKSRWVEQLRKRRGENIAAVALAAKHARILWALMVQGRSSPQPPSNQSIAPHVQPGS

SEQ ID NO: 124926 - protein, 371 aa, unidentified
MKSIIYIGMDVHKKTYSLCALLKETGEIIGETKIPADVSLIIKFIENAKKSVDSDDVQIKTGYEAGCLGYSLYWQVAGKGIECDILAPSTMHRSAKNKVVKNDRRDAKNIAANLANGTYKSVYVPTDEDVEIKEYIRMMHDFKIELKKVKQHINAFLLRFGHQYPGKSKWVPAHIKWLKELELSDMHREILDEYLSQLEILSEKIERFKHRLEELSQKETYNEKIGQLRCIKGIDTTAAMTMHAETSDFDRFPTANAFASYCGLTPGEDSSGDSYHRLGITKQGNSMIRTTMVEAAQVLVRGTIGKKGKKVKSKQKDQDVKVIDYADKAVVRLQKKYHRMIFRGVKRNIAITAVARELACFVWGIETGHIS

SEQ ID NO: 124927 - protein, 340 aa, unidentified
MSEIKTIGLDLAKHVFQVHGINAAGECVLRKRLRRGQVISFFAELPRCLVGLEACATAHYWARELQAAGHEVRLMPAQYVKAYVKRNKTDAADAEAICEAVRRPTMRFVPIKTAEQQAAVLLHRGRERLVRQRTTLVNALRAHLAEFGVVAPAGLRNVSQLIAIVRDASDRRLPDLARPVLRVLATQVELAQAAVAKVEKELTAWHRSNPLSQRLATIPGIGPIIATAIAAMVVEPSGFASAREFAAWLGLVPRQHSTGGKARLGGISKRGNRYLRRLLINGASANLLRSKATNADPWVIGLRRRRPSLVVAVALANKTARIAWAVMHRQEDYRSLAVAA

SEQ ID NO: 124928 - protein, 388 aa, unidentified
MLQSNDLSRSFTTLNQDNTLIVVIEMSLSSWLVAGIVPGVERQPLKKLEPDEDQLLKLMNRWRHEALQAGHAIERVVVAYEAGRDGFWLARWLRERGVEAYVMHSSSIAVSREHRRAKTDRLDTELLMRAFLGWLRGERRHCSMAAIPTIEEEDAKRPNREHEKLVGDRTRIVNRMKSTLSRFGIRGFKPTLRKADEKLGELRTAEGTLLPENTRAELRRDMTRLRIVREQLKEIEQQRLRKLEAAAPAKKGPHAMVGLIARVTGIGIETADMLVNEILSRHLRDSKAVARYAGLTGSPDESGKRRREKGLARAGNARVRRGMIQLAWRFLRFQKDSVLAQWFRAPAADGRSGTRKTMIVALARKLLIALWGMATSGEIPEGVTFRAA

SEQ ID NO: 124929 - protein, 403 aa, unidentified
MNNVAGIDVSKGKSMVSVLRPFGEVVAKPFSIGHTGSELKELADYLKSLDGETRVVMEHTGRYYEPVARFLHDEGVFVSAVNPKLIKDYGNNTLRKVKTDKADSRKIARYGIDNWAELRQHTPMDTIRMQLKTLNRQQSLYAKTKTMMKNNLIALLDQTYPGVNALFDSPVREDGSQKWVDFATTFWHVDCVRNMSLTAFAERYRKWCKRHGYNFSQSKAVEVHTGAQDLIAMLPKDALTKTMVRQAIDALNAISASMERLKAEMQALAAQLPEYPVVMAMHGVGDSLGPQLMAELGDVTRFTHRNAITAFAGVDPGADQSGTHEAKSTRVSKSGAPELRRALFLVMDCLLKTQPQDDPVYRFMDKKRAEGKPYLVYMTAGANKFLRIYYGRVKEYLASLEEN

SEQ ID NO: 124930 - protein, 327 aa, unidentified
MQSISTIGLDIAKSVFQVHGVDAAGQAVIRRQLKRRFVLSFFEKLPPCLVGIEACASSHYWSRELRTLGHTVQLMPPAYVKPYVKRQKNDSTDAEAICEAVTRPNMRFVPIKTIEQQSCLMLHRVRHLFIRQQTAVIKSIRAYLAEFGIVAPVGRRGVEQLLEVVADPAERRLPEVARACLAALGSQLRALKAQILEFDRRIIAWHRSSATSKRLDAIPGIGPALATALVASVADANAFRSGRDFSAWVGLVPKQNSSGGKDRLGSISKQGDRYLRSLFTAGALAVIRYAKIHGTGHRPWLTALLARRPTKVAAIALANKLARMAWR

SEQ ID NO: 124931 - protein, 392 aa, unidentified
MIYVGIDVVKDKHDCFITNSDGEVLFKSFTIPNNRAGFETLFQRIEAVSDDLTKVKVGLEATGHYSYNLLGFLLDKGLTTFVFNPLHTNLYRKSLSLRKTKTDKVDSRTIATMMMSDMNLKSYSDTSYHNEELKSLTRYRFDKVKERAKLKSSVSRLVCILFPELEKLVPTLHMASVYALLFEFPGADAVANAHLTRLSNLLSESSKGRYGKETAVMFRDTARHSIGSHMPAKSLELKHTIKLIQELTIEIDEIEAAIKRIMDEEIQSPILTIPGISYRMGAMIIAEIGDFSRFDSADQILAYAGMSPSTYQSGQLDNCYSHMEKRGSRYLRYALYHATKYVCHWDKSFGAYLEKKRSEGKHYNVAISHATKKLVRLIFAIEKSGKAYLPAT

SEQ ID NO: 124932 - protein, 436 aa, unidentified
MQQPVEVQVDEHEQIVPRVAAVDVAKASGMVCLRTPHETVPGRRVTKVWPVQATTAALVELGDHLRCERVQRVVLESTSDYWRPFYYLLEAAGLTVWLVNAAQAKNVPGRPKTDKIDAVWLAKLAERSMVTPSLVPTEPMRQVRDLARARFDLVEDRTRVKQRIEKLLEDALIKISSVLTDVLGVSGRAMIEALTAGQRNPKVLAELAKGRARRNRAALERALHGRFTEHHARLARLLLGQLDELTVRIDEVTGLLDTAIRALPTSTSTTPTATTGAGGATNAESSTALPAPAGYDGAIARLCAVPGGGPDSVRAVLGEIGLDMSVFGTAGRLCSWARVAPHTRQSGRHNARARTGKGNPYLKSALAQIATGAAKTDTFLGQRYRRLIKRMPKAKALVALQRSILVIFFHLLADPTAEFTDLIIFEPAKPMEIPAW

SEQ ID NO: 124933 - protein, 396 aa, unidentified
MQRVAGIDVASQTHVVAVMTEADQVLVKPTSFGEDATGYDKLFQLLGPPTEILVAMEATGHYGRNLFAALCERGYPVAVLNPLRTRRFAQEDLRRAKSDSIDALGIARFALQKRPQPTPTFDEPTGQLREFMHLFDRLTQDYGDRLRQLHRLVCLCFPEFTRHVPSLSSQRATAILAAYPTAEAFSDSCLRKLAGLRYDGRHAVGPTLAHDLVDAAKVSVGRHHGPAYRTEMEYLCQDVDRLRSKLHELHAEVDRRLGEHPVASLLATIDGLGVTTVARLVAAVGDPARFRDGAAFAAYAGAVPGTYESGLRQGGSASLCPLGNARLRSALYMTTVAAVRLNPWLREFYQRLRARGKPPKVALLATMRKLLMAVYSVAKHRQPFVPRMRSNSGPSK

SEQ ID NO: 124934 - protein, 315 aa, unidentified
MSESGREVFIGIDVSKEKLDVAVRPTGEFMSFSNNEDGISCGVDFVNSFSPSLVVLEATGGLETAAVGMLADKGLPVVVINPRQVRDFAKATGKLAKTDAIDAHLIARFGEAVRPELRLLKDQEAQKLTALITRRRQIVEMITAEKNRLNAAPKWTSKDIQTNISWLEKCLKKVDKDLKNLLKKSPVWREKDEILQSTPGVGPVLSMTLLSGLPELGNLNRKEIAALVGVAPLNRDSGLFRGKRMIWGGRANIRSVLYMSATCAMRFNPTIRIFYERLRLAGKLHKVAITACMRKLLVILNTMIKNRTYWSTVQP

SEQ ID NO: 124935 - protein, 343 aa, unidentified
MDSYVGLDVSLREVSACVVDEAGTIQFERTLAADPDVIAAWVHAQAPTVRRVGLESGPTSAWLWRELAKRGLPVICIDARHAKAALSMQINKSDRNDAAGIARIMQTGWYREVRVKSPHSHAIRGLLNSRSLLVKVQRDLENQVRGLLKSAGLIVGRAKDGVFSARTKQLLAAHIDLAAIALPLLEAREAIHGQLVQLERRVRQLAKEHRQTSAFMTVPGIGPMTALAFLATVDDPRRFRRARAIGAYVGLTPRRYASGEVDWTGRISKCGDTMLRTYLFEAAGVLLTRVQKWCALKAWGLRLAKRSGMKKARTAVARKLAVILLRMWRDGTQFHWTAAPAAS

SEQ ID NO: 124936 - protein, 417 aa, unidentified
MFKVFRKNCCGLDVHKTWIYACIGITDTNGRTEYKQARFSSFSKGLRELADWLAKFSCIEVCMESAGKFWIPVFNILEKTCFVTLAHPKYTKPQKGNKTDRKDAKWICDLFMCDMIKPSFIPSPVIRHLRDLMRYRFKITNMLTGEKNRAQNCLTVSNLKLDDVFSDVFGKSARSITTYILDHPSEPFDVAPFVNGRCKTPIEEIQDAVDGAISPEQAVKLRQCLAHIDELENHKREIEQAILLLVQPFSAILDLLRTIPGLDSNPMTAIAILSEIGPDMSVFPSSKNLVSWAGCCPRNDQSGGKVKSTRISRAGCYLKPLLVQVANALLKSKKHPEFKEKYHRIKTRRGHKKAIIAVCKMLLTAIWNILHKQEPYTPEGFLEHRPVNESKVLTKAQALELLRKRGYTITDESPVIA

SEQ ID NO: 124937 - protein, 343 aa, unidentified
MIYVGVDLHLRLCFITVLDARGAILRQGRVPNGVDCLRLFFTGLISPDEKEEEILVAVEACGFWCAFVDVVEPLVERVVLVHPAKVKAIASAKLKNDRVDSVTLAQLLRANLLPESWKADVPTRDLREVLRMRIALGQDRTRYKNQIHATLHLHGKQAPVSDLFGIQGRTWLGGVELRAAPRQAIDTGLRMIDQLDREIHALDRQLQQMARQDPDARCLMSIPGIGAFSAMVLKAEIGDIRRFRDKKSLCNYAGLVPVIRESANHKRTGGITHAGSGILRWVMSEAAMTATRYSPAARVWFERLAKRKHRNVARTALARKLLGAVWALWTHGVCFDERIFAAM

SEQ ID NO: 124938 - protein, 411 aa, unidentified
MHERQKHFYVGVDLHKQHHVAVIINCWQEKLDEIKFENRPSAFSTFLLDIYKHMEDGLTPIFGLEDVGGYGRALAKYLADHEQIVKEVNPALSYAERKSNMTTQKSDSWDAECVARILVNKLDQLPDAKPHDLYWSIQQLVSRRNALVKAQGALKNQLHIQLSHHYPSYKKFFSEVDGKTALAFWERYPSPPCLEAVSVKQLTIFLLEASSNTCSVKKASEILKLVKEDGNTIREHQETRDFLVKSIVRDISFKKQEMRYVERELKGLMSLLDFQLDTMPGIDLVTASALIAEIGDVRRFPNANKLARFAGIAPVYFGSGGKGREQKSKQGNRALHALFYNLAVQQVQVAKGSKLPRNPVFHAYYQRKLKEGKTKGQALVCIMRRLVNIIYGMMKHKTAYELPIIKEEEVV

SEQ ID NO: 124939 - protein, 304 aa, unidentified
MVPGINRQPLKKLAADEVALLQLLYRWREEASKAGRTIDRVAVAYEAGRDGFWLARWLRGRGIEAHVIHPTSVAVSREHRRAKTDRLDTERLKRAFLGWLRGEQRHCSMAMIPTREEEDAKRPNRERENLVSERTRIVNRMKSTLARLGIRGFKPTLRKAAVGLDRLHTAEGTPLPPNTLAELRRDMARLHFVIDQIREIEAARLVRLEQNPEQASHAMVRLLAQVIGIGIETADMLVHEVFVRNLPDRKAVARYGGLTGSPDESGAKRREKGLARAGNARVRRGMIQLAWRFLMFQKESALAQ

SEQ ID NO: 124940 - protein, 476 aa, unidentified
MVIPNEEPKGPGKPRPPRKPGKPRQSSVPVPIPTSTAPLNIINPDAAGIDVHSNMHMVCVPADRDADPVRQFGANTVDLHELVAWLKGCRIKTVAMESTGVYWIALFELLEAEGFEVALVEPGQLSRCGARPKTDVLDAQWIQRLHSYGLLRASFRPPDSVLALRAYGRLRQTQIRYAASHVEHMQKALEQMNVKLTEVVSSITGLTGMSIILAILDGERDPQRLAQRRHPQCHRSREEIALALNGTWRVEHLFELRQAYDLYQFHQRQITDCDRQIEAELARFPDRAGDKPHAAKPRKRGRKSNDVRFEATGLLFKALGVDLTLIEGIDVATALVVLAEIGVDVSRFPTEKHFASWLRLCPPQDESNQTKRRHRNRKGTNRLTLALRMAAQAVGRTNTPLGLFYRRIRSRIGGLGAVKATAHKLACLIYRMLRYGEDYVVQSMEEYEAKMRSNALVALERKAAAMGMQLSPLPTP

SEQ ID NO: 124941 - protein, 353 aa, unidentified
MEHYVGLDVGLEETSLCIVDSEGKTVREIKVSTEPAAIRSALEGFADRLSRVGVEASSLGLWLYRELHAGGLPIIVVEARHMRVSLSTMRNKTDRNDARGIAQMMRLGWFRAVHVKDIEMQKMRTLLTNRKLLKRKLVDIENHIRGALRTYGLLVGAVSRGQYETRVRELIERTDIVFSTMIETMLDVRRAIFDGYAKLHRVLLQVVQHDQICRRLMTVPGVGPVASLSFKVGVDDPLRFTRSRTVGAHFGLTPRRHQSGTSIDYEGRITKQGDVSVREALCEAAASLLLRVRKWSALRAWGLRVAKRSSMLCAIVAVARKLAGILHRMWIDGSDFKVGFGAKVTQRLKLKPA

SEQ ID NO: 124942 - protein, 388 aa, unidentified
MQVAADRRQTPTAIRTDLGAIFVSLELSRSTWLITSLSPAGGEKMSKHSMRSGDVPALLGRFAQLREKAQARTGQRFPIIVIQEAGLDGFWIDRVLQKEEIESHIVDPASIATSRRRRRAKTDKIDGESLVRALLAYKRGEPRVCAMVKVPKPEEEDRRRLCRERKTLTAERVSHINRVKGLLFSQEITGYEPRRRDRRERLEELQTGDGRALPEHLKAQVRRELDRLELLLEQIKAVEAERDVLLAAEHAATPAPAAMLLEIKGIGPEFAAILWSEGLFRHFDNRRQVAAYAGLAPTPWQSGSVDREQGVSKSGNPRLRTTLIQLAWLWVRHQPHSALTQWFEERVRRNGGRLRKTAIVALARKLLVALWKYVTAGVVIEGAAMKTT

SEQ ID NO: 124943 - protein, 375 aa, unidentified
MCGLKHQKEKRSMDYFAGLDVSVKETSVCVVDDAGKIVRETRVASEPEALLQVLTSTIYRFKRVGLEAGPLSQWLYSVLAEAGLPVICVETRHMRAVLKAQINKTDRNDGRGIAQMMRVGLYRPVHVKTLGSQKLRVLLTHRKLLQSKAIAIENDLRATLRNFGLKVGVIGTVKFETRIRELVANLPDLAALVEPLLIVRQVVREQLGILHRRVLAIVRDDDVCRRLMTIPGVGPVVALTYRVTVDVPARFRNSKAVGAVFGLTPAKYQSGENERTGAISRCGDEMMRMMLYEAAQSMLVRSTKWSWLKAWAMKIARHRGMKKAIVALARRLAVIMHRMWVDGTEFRWSREVATLELVDSLKALDPRRPIREADK

SEQ ID NO: 124944 - protein, 368 aa, unidentified
MVSSVALPEGLIHLGMDTSKNVIVVAVLWPGEQDPVIERIANEEAAVRRLIGRFADRSVLRCWYEAGPGGFELWRLLASLGVGCEVVVPSLIPKGASDKVKTDRRDARRLARLGRAGELTPVRVPSAAEEGVRDLVRTRTALLADRKRAQQRLTGLLMRHGRIWRDGEYWTVKHRAWLAVQHFDEPALEAAAGYHRAALAVREGELAAIEAELAPWAAREPLAGPVARLGCYRGIAMLGGLSLAAEVVDWHRFPAARAFMSFAGLVPAEYSSGERPRRGHITKAGSQPVRTTLTEAAWAYRHAPAIGVQLRRRQAGADPATLARSWAAQRRLHDRYLHLLHAGKAAPEAVTAVARELAGFVQAEMTAP

SEQ ID NO: 124945 - protein, 393 aa, unidentified
MSLDHHFAEPTAIRINLGAIFVSLELSRSAWLITSLSPGGGEKMSKHGVSAGNIAALLARLSELKQKAFARTGQSFQVIVIQEAGLDGFWIHRVLQSEGVESHVVDPASIATSRRRRRAKTDKIDGEALVRALLAYKRGEPRVCAMVRAPTPEDEDRRRLCRERKTLTNERVQHVNRIKGLLFCQGISGYEPLRRNRRQRLDELKTGDARPLPPHLKAQIARELDRLELLLEQIKAVETERDALISAIKPDGMNADAMRSPPAMLINLNGIGPEFAAVLWSEGLYRSFANRKQVAAYAGLAPTPWQSGSIAREQGVSKAGNARLRTTMLQLAWLWLRHQPQSALARWFHERVTRNGGRLRKTTIVALARKLLVALWKYVTAGVVIDGAVVRAV

SEQ ID NO: 124946 - protein, 413 aa, unidentified
MDVLHPRCCGLDVHKSSISACILVQEAGRVQKHQRRFGAMTQDLQELANWLRQFEVTQVAMESSGVYWKPVWNILEGQFTIVLANAQHIKNVPGRKTDQKDAEWIAQLLQHGLLRPSYVPCEIIRDLRDLTRMRASLSQEASRISSRIQKVLEDANVKLASVATNTLGKSGRAMLEKIIAGQDDPEYLASLALGHLRAKTPQLRLALEGKIRPHHRFLLRRLLDQLHFVEHEIVLLDERLEDIGQERPELSQAVARWDTIPGIDRVAGWTLLAEVGHSMAQFPTAEQLASWASLCPGNHESAGKRLGGKTRKGSPWLRRMACQCAWAAARTKNTYLSAQFRRMASRRGSKRAIIAVAHSLVIIGYYLQKNQRNYEDLGGDYFDRMDSDGLKRYFIKRLEKLGHKVTLAPIKAA

SEQ ID NO: 124947 - protein, 338 aa, unidentified
MAETYYVGLDIHKKVVSYCVKRACGEVVDEGVIAARRKDLLRWGKQLRGRWIGAMEATLFTGWIYDTLKPLAEELKVAHPAMLKAIAVGKNKSDRLDARKIADLTRCNLLVESYMPPPEVRQLRTVLRYRNLLVGQAVQLKNRIAGLLMETGTAYNSKKLHGQRYFRELMSKLEGVPDSVVQLLRLSRNGLESLQQLERQLIRGLLGQPLLAQRVELLRTIPGVGIITGLTWALEIGEVSRIPSIGQGISYCGLCQGLRESAGKAQRGPISKQRNKHLQRTLIEAAKLAPRFHPRLAAVYQKALEQGHANRATIAVARKLVAYLLAVDRSGRPFQLRV

SEQ ID NO: 124948 - protein, 328 aa, unidentified
MNQIIRIGMDTSKHFFQLHGVDATERPVLRRRLRRNEVLAFFAKLPPTVIGMEACGAGHYWARELRKLGHEVKLIAPQHVKAYIKRNKNDGRDAEGLCEAMSRPTMQFVPVKSEEQQAALMLAGVRQRLITRRTQLGNAIRGYATEFGLITAKGLEKLEPLLARIAQDESLPELAREMFAMQGRDYAQLQVELKVIEARLLAWHRANALVMKAPDPRLFPSGRHFAAWIGLTPKDHSTAGKTRLGKITRAGDEMLRSVLVAGATAVIQQARRGRGRASPWLLALLARKPPKLAAVALANKIARIAWKLMTTGESYDGARMPGASALAA

SEQ ID NO: 124949 - protein, 345 aa, unidentified
MQKIVKQVAAIDVDHKLLVTTLGRMSDDWTPELYAQKTFDNTKKGFEALLAWIKKNTVAEVVVRFVMEATGVYHEQLAYFLDDNNEEVTVVLPNKISNYMRTLEVKTITDRTASEAIARFGLERKLELWKRPKGIYKKLRQLTRERDQLVAERTMIKNQLHAEQAEAEPGKSSIARIKARIKMLDKQEQEIKAELSQLIATDAEMKKIIMLLCSLSGIGILTAAIVLAETNGFEFIRNRRQLASYAGFDVKEKQSGTSVKGKPKISKKGNKYLRKAMHLPALSAIRHDERFKGLFVRIVSKHGIKMKAAVAVQRKLLEMMFTLYKTNTKYDKEYLTKSTVLQTQH

SEQ ID NO: 124950 - protein, 456 aa, unidentified
MNNYFLGCDVSKGYADFVIIDERKYVVEKNFQLDDTFNGHNQLFQILKYFIEKDSEAFLYAAVESTGGYENNWFQTFKKFSRELPVKVVRINPFAIAHSNKAAMKRVTNDRISASTIAEYQIHHPEKLQYNQDDAYQTFKRLVTTTLMLKKTKSQFVNELETLLYVANPEIIKYRKSKIPQWLLRVLQYFPDAASLATASVENLSQIAFIKPARANEIIQAAQQSIASASDEMIRLAITSTVETIIALDKKIDQHIKLLQKQLMVPQIELLQTFKCIGLLSAIELYIEIGCIERFPTVKHLVSFFGVHPVYKESGDGIWGVGMSKMGRRKPRAILFMVALNAIQHNELIRSVYQRELKKGKAKMAALGVCMHKILRIIYGMLKNNTAFDPEIDRTNQQKRVTKTKKEKIDNKRRFQKEDLNAPISKKQTRKRKKRKLSQSDNITINGISVPAPSNV

SEQ ID NO: 124951 - protein, 419 aa, unidentified
MSKDNVEIAAFVGLDWADQKHAITLQESGSDQRHRLTLEHTPEALHNWIQSLRDRFGGRPVAIAVEQKRGALIYALMHVEFLHLYPVNPVTVAKMREAFYPSGAKADPSDADLLLDILISHRRHLRVWTPDDALTRSIQLLTEDRRHVVDERTALTNQLTAALKMYFPQALDWFGDLHTARACAFLQRWPSLQQLKQATPSSIRKFYRAQGYRGEDKLDQLLANIKKAQALTQDSAVLLSCSMKVDILVKQIPLLTDAIESYDRKIAALFDQHDDSTLFGSFPGAGPALAPRLLAAFGANRGRFEFASEMQELSGIAPVTEKSGEGIWIHWRLACSKFLRQTFHEFAGCSIHQSDWARTCYDEQRKRGKPHHAALRALAFKWIRIMFRCWKDRKPYDESVYCNSLKTRRSPLADALPAT

SEQ ID NO: 124952 - protein, 339 aa, unidentified
MKYTPVGVDIAKHVIQVHFINEHTGEVVDKQLRRQDFLTFFGNREPCLIGMEACGGSQHWARELTKQGHKVRLLQARFVKAFVMGNKNDVMDARAIWMAVQQPGKEIAVKTEEQQSILVLHRSRRQLVKFRTAQINALHGTLLEFGETIHKGRAAMEREFPEALERMKERLPLYLITVLENQYNRLNELDSLIDDIEKQLTSVARQNETCRRLLDIPGVGPLIATAALAIMGKASVFKSGREFAAYVGLVPRQTGSGGKIRLLGISKRGDKYLRTLFIHGARAAALLTKEPGPWITELKKRRPASVAIVAMANKLARTVWAIAAHGRKYDKNHVSIRPY

SEQ ID NO: 124953 - protein, 421 aa, unidentified
MHKGEDEVYAAFVGIDWADKKHDVCLQVADSAKRERLVLEHRPGVIQAWAEQLRERFGGAPVAVSVELSRGPVVSALLEHDFFRLFPVLPTTVANYRKAFAPSGAKDDPTDAEVILELLVRHRDKLKPLQPESADMRALRRLVEWRRDLVQDRTRLTNRITDALKGYFPQVLEWFPDKEAAIFADFLERWPTLRHAQRARRETLEAFFRAGNVRSAASIEKRIKAIAEERALHTDEAVTGPARLLVEALLPQLRVLSEGISRFEAQIAELAPRQPDYQFFDDLPGAGPTYAPRLLVAFGENRDRFPTASSLQKSSGIAPVMERSGNKAWVHWRYGCSKFVRQTFVEWAAQTIPRSFWAKAFYESHRARGARHQAALRALAFKWIRILHRCWLDRVPYDESRYLMALQKRGAPLLKHAAQTA

SEQ ID NO: 124954 - protein, 316 aa, unidentified
MENIKVQTVVGMDVAQDSLDLFDTRTQQGMSVQYSTAALQSLIESLGTDRPDLIVCEATGGLERRAVAQLVAAGFAVAVVNPRQVRDFAKATGRLAKTDRIDAQVIAAFGLAVQPAARPPKDELAQHLDDQLRRRGQLIEMLTAEKNRLARASRPVSKNIKLHITWLERQIDNVDHDIDTTVKGSSVWQAKLDLLKDFKGIGPVTRASLMAWLPELGQLNRKQIAALSGVAPFNCDSGTLKGQRHIWGVRQTVRNVVYMATLVGVRHNPTLRAHYRQLRARGKAAKVALVACMRKLLVILNAVFRSGLPYVERATT

SEQ ID NO: 124955 - protein, 351 aa, unidentified
MFVLHVGLDLSRRRVDVCLISDQGELIDHFAAPADRDGLYGLTRRVGVYEEPVRGVVESMNGARFVHDELVRYGWEVLVADAQRVKGLAPLACKTDKVDARVLAELSFRDLVPAIWLPTPELRQERERSRWRLHLVKHRSILKNRVHASLIAFGHQVPMADLFGAGGRRLLASLDFPEPWLGHVRASVELIDDLDRRIAEIERWLQRSGADHRYIPLLMTVPGIGWVTGFTIAAEIGDINRFSSPVKLTGYTGLCPRVVQSGDMDRRGPISKHGPRYLRWGLMEAAIHASAHPLYKERYQRTKRRLGRQRGAKVAQIELARKLTEAIWYMLTRNQPFKPFAPASAIIRLTA

SEQ ID NO: 124956 - protein, 363 aa, unidentified
MNYVGVDVHKKYSVLCALDERGRKLREARVEGNTGCGFAQFFRSLEGPSKAVVEACWNWGLIHDELEELDQVEEVVLAHPAKTRLIADAQIKTDRLDAHALGTLLRGNLVARAHVPRRQTRSRKNLLRQRLYWARLRTMLRNRIHALLDRQRGLELPQCSDIFGQRGLFFLRQLQLPEPDGMLLREQLALHDLIAQQMKAQEKRIAAEFKSEVIHRQLLSMPGIGTTLAAVIGCEIDQIERFPTSEKLCAYAGVVPTTHASGGKVAHGRLLPFCNKWLRWALLEASWVAIGCSPYFGALYQQHRARGKKANTAITIVARRMCRIIWQLLSENRDFEKRPFSHRIGPFPGCSAVRLTARSAHGS

SEQ ID NO: 124957 - protein, 369 aa, unidentified
MFKRHLLKDTERDSGMLRKDSPKSYHRRCRMELYSGMDLHSTNTYTAIMDENRKRVIDRRLANQPKVILGFLEPYRADLEGIVIESTYNWYWLVDLLQENGYRVHLANPSAIQQYSGLKYVDDRHDAYWLADLLRLGLLREGYIYPKEIRPTRDLLRKRAHLGRLRTSLLLSAQNIVLRNQAIKVASEDIKKLTTDLLTPHLQESEGLFLTGKISKELIDAFTRQIKAIEAWVMKRLQPDKLFSNLLTIPGVGEILAMTILLETGCIARFPKVGNYVSYCRLVASQRTSNDKIKGKGNHHNGNKYLAWAFSEAAEHARRHYAMCRSFYNRKLSQKNATVAHCALARKLSRAAYYIQKDQVVFDETRLFC

SEQ ID NO: 124958 - protein, 363 aa, unidentified
MKKVSKVVRQMETAKDKPAITVGLDLGDRYSRYCLLNEEGEVIEEGRIQSTETAFRRHFEGEPRQRIALECGTHSPWVSRLLQTLGHQVIVANARKIPAITASQSKNDRNDAELLARFAAHDPKLLSPVQHRSLERQQDLNLIQARATLVRARTMIVNALRGLVKSAGGRLPACSTESLPTCVRASIPPVLKAVALPLLQQIALLSRQIGSMDEQIEKLARKYPEIRVLRTVPGVGPVVASAYVLTLDRPDAAGNRSAGAFLGLRPGQSQSGESDPQRRISKAGDSYLRSLLVQSAQYILGRFGPDSALRRWGLKLAASGGKRGKKRAIVAVARKLAVLLHSMWRSGQCFQPFPQPATAATVA

SEQ ID NO: 124959 - protein, 342 aa, unidentified
MDKITTFAVDLAKRVFSVYWVDIETGEIGAKTMTRTKFEEFMRTREPSRVVLEAGGSAHHWGRWLTRQGHEVRLIAPQHVRPFVRTNKTDGADARAICEAASRPEVKWVAVKSEASQAVLGLHRIRRQLIDMRHMQNNQLKALLYEFGVVLALSAKVSTQQIKQWVSEGRVPGLLAASLREQVVRIARLKAQELELTRRIERHNADDALATQLMAVPGIGVLTASALSAELAASAKSYANGRQFAACKGIAPRLSGTGGKVRAGAISKRGDPYVRTLLIHGARSVITHGRKAKRLSPWLQGLLERRPFNVAVVALANKMARTAWALAAHGRAYQQNYGAQAA

SEQ ID NO: 124960 - protein, 353 aa, unidentified
MPVYVGVDFHVKTQTVCWMDTADGEIHQHTLDHQREDVARFYGQWAAPVTVGVEASGYAQWFHRLVEERGHRLLVGDAHAIRQFARRRQKNDRRDAELLLDLLRHGDFPAVHMPPPASQEVLRLLHHRQRLVRMRTVLKNSVQALALNHRLLRGPSLFTTRGRTELSALPLSVAEEWQRRDAFELLEEIDGRIVALNGELERQAVADPRVQRLRTHPGVGRLTALAMVHTLEPVARFDRSRRIAAYCGLDPQERSSGETVRTGGITKQGNRLLRTLLVEAAWSTIRPGQDAELRRFYFHLAARKPSGVAIVAVARKLGLRLYRLLRDEIDYDEFRRRGRDARCARRMTEVRKA

SEQ ID NO: 124961 - protein, 317 aa, unidentified
MTQTSTLTAGIDTSKEKLDIAVHGQSECWEVANDLRGWRRLAQLLTKAGVRRVGIEATGGYERGVVEHLRAAGFIVLVLQPIQVKAFGRARLRRAKNDKLDAALIAAFAASLEQVRDAPDPRLAELAEQLTFLDQAEEDIKRFKTRLEHIAEPRLRRMVLDDIARLKARRLSQISNIAKQIRAHRDLAVRFDLVLSIPGIGERTALALLVRMPELGRISREQAAALAGLAPFDNDSGQYKGQRRIAGGRGRLRRSLFAAALPAAFRWNKALMALYARLTAAGKAHNAALIACARKLLIYANTVLQRGTPWTEKPLGV

SEQ ID NO: 124962 - protein, 420 aa, unidentified
MKVVYQTCCGVDVHKSFLVATIIKTTSGVEPSYQKKRFSTFNNSILQFKEWLVKNQCRDVCMESTGKYWIPVFNLLEDEINVTIANPKWVKAVKGNKDDTKDSKWIGDLFRLGLVPGSYIPCKPIRILREFTRYRYKLTSCRTSEKNRYQNALTVCNVALDSVVSDIFGKSATSVIDYLIEQPDNSINHEEIASRLLRSLKKKSDSVIESIEGYQMTDSQKYRMRLIRAHLDYITSTINDIDTMLDSLIAPYENAVQLLCTIPGVDRNSAITVISEIGTDMTPFSNSKRLCCWAGLTPGNNESAGKKKSVRITRAGVYLKPALVQVAHAAVKSDKSPYYKQKYERIMKRRGKKRAIIAIARMILTAIYQMLSTGEAWNPTDLFKIDMPEPLKEKQKEKAIKHAMKLLIREGKISESQLAS

SEQ ID NO: 124963 - protein, 349 aa, unidentified
MKHYVGLDVAMEETAICIVDDERRIVREGKAASEPEAIAAFLSATGLTFQRVGIEAGPLAPWLGDGLAVAGLPVICIDARHMKAAVSAMPVKTDRIDARNIACAMQVGWYRPVHLKRPEARKLRLLLSSRQMLLRTRIDLDNHIRGVLKAFGLKVGKVATGQFEARVWELIDEGDAQIRWVVGTLLTTRAAVVSQLALLHRAVLAVVKQDQVCRRLMTVPGVGALTALAFRTAVDEPERFPSSAAVGAYFGLTPSKYASGETDYTGHITKCGDKGVRALLCEAANALLTRVSRWSWVKRWGLEVLKRRGKMRAQIAVARRLAVIMHRMWLDGTDFRWQWEPEAAAGAAA

SEQ ID NO: 124964 - protein, 425 aa, unidentified
MNQSNHYTQNDYAAFIAIDWADKKHVFSLQVTGQTKKEAGTLEHKPEVIGPWVAKLRERFAGRPLAVAVEQSRGALIHALLTYDFLVIYPLHPTTVSKFREAFKSSGAKTDPLDADQILQILTKHLELLKPLTPDTEETRLLARLAEDRRKAVDLRTSHIQALTAALKEYFPQAIELVSGNLTSRLACDLLMKWPTFESFRQAKPSTIKRFYYGHNIRSSEVIQRVLDLAKAKSLTTDPAIVQSGSRLSQMYTQLIRALNPVIDDYDSSIEKAFEAHPEVNLFNRLPGAGPALAPRLLTFFGTDRSRYQSAQNVHSFSGIAPVTKSSGKIRAVYFRVACPKFDRQTFHEFARLSIAKSQWARNYVDYYTDKGKNFHTIIRALAFKWIRILWKCWQDRTPYCEEKYMQALKKRGSVFATLHLQNKS

SEQ ID NO: 124965 - protein, 320 aa, unidentified
MSTKKAKSFIGVDVSKQLLEVAVHESDYQFRCANKTSGFAELIGELIRLRPALIVLEATGGLEIPVTAALQAAGLPVVVINPRQVRDFAKATGQLAKTDRLDARVLAHFAAAIKPPLRPIKSADELELDALVGRRGQLVEILTAEKNRRGSAATETVRQEIDEHIDWLDQRIAALDEQLKGLLKTSARWQSNDAILQSVPGIGPVVSVSMLAELPELGTLNRQRISKLVGVAPLNRDSGPQRGSRHIYGGRKRVRSMLYMATLSATRFNPVIKAFYQRLLAMHKPFKVAITACMRKLLAIINVMIRDRTHWKTEVEPLSA

SEQ ID NO: 124966 - protein, 430 aa, unidentified
MKSNTQNAKIEAITEKTLVLGIDVGSETHYARAFDYRGIEYSKKPFKFSNTEAGFVTFKEWILDIKERHEKDKVVLGMEPTGHYWFNLGKFLQDNEMKPVLVNPHHVKKSKELDDNNPTKNDRKDPKVIAGLVREGRYMIPYLPEGVYADLRTASNIRFQLQAELTRIQNRISRWFNIYFPEYKTVYGKPDAKSGMLILKAAPLPEGILTLGIDGVNQIWRDAKLRAVGKARAKTLIEAAEHSVGSKEGAVAARMEIRMLLEDYESRSIRLQEVMTLIEGLVKQIPMAEKLLEIKGVGIRTVSGFLAEVGDISRFNNPKELQKLAGLALVENSSGKHKGETTISRRGRKRLRYLLFEVAMSLVAKNPEFRELHNYYTTRRLNPLKKMQSLMAIAAKLIRVFYVMLTKGVNYDPKKMVNDIKRPAVYLQTA

SEQ ID NO: 124967 - protein, 407 aa, unidentified
MEEKSKRYIGLDVHKHYLVALGVDADLNVVLPLRRVEFSYLESWLKKNLTKQDDVVLEMTTNTWELYDELIEYAGSVTVVHPPHVALITRSQVMTDKIAASILARLLAKGLLVGIWVPPQEVRELRGLVAQRQKMTRLATQAKNRLHAVIQRHHLKPPEGNPFSKANNAWWEKLSLGKLEKMNLQSDLETLQFAEGQEARVEKEMTTIAAEDESIGRLMHISGFGVITAVTVYAAIGDIQRFAEPKKLVGYAGLGARVHDSGLTTRTGKITKAGRRDLRVALVEAAHIAAQHHPHWKAELARLEPRLGYNKAIVAVARKLLLTVWYVLQGKTDKFAEPKAIAQKMLKFAYSVGKANRAGKSAAQFARERLDLLKMGEELSSVRWGAKKPIPLPPSKLAKKESAVPRK

SEQ ID NO: 124968 - protein, 314 aa, unidentified
MSTEYFVGIDVSKDTLDVCVDPTQDTYRVPNSPDGVDELIKRLKPIEPRLIVFEATGGYETLAVSSLAAAGLPVVVVNPRQIRDFAKSIGRLAKTDVIDAGVIARFASAVRPELRPMKDSPSQELTGLVTRRRQIVEMIVAETNRLTAATRRNRRDIQTHIRWLQKRQAQIDDEIKRDIQNGPLWRTTDQILQSTPGVGPATSAMLISCVPELGQLDRKKIACLIGVAPLNRDSGRYKGRRTIWGGRAQVRSALYMSALSAIQFNPIIRQFYQRLREAGKCFKVAIVACMRKLLIILNAMVRNQTKWRHCEINR

SEQ ID NO: 124969 - protein, 314 aa, unidentified
MKAHVFVGIDVSKRSLDVALPEGVERVRNESASIADLAARLSQTAPALVVLEATGGYETGLVLALQQTNVPVAVVNPRQVRDFARAQGRRAKTDAIDARVLARFGEVMRPAPLPPIDPSREALAGLVARRRQLVEALIAERNHLEHATAAVTAWIDQHLAVLRDQLAQVDAAIAATVAADRALAHRQAIVTSIDGVGPATAAVLLAELPGLGRIEHKQLSALIGVAPINHDSGQFRGQRHIAGGRASVRCALYMATLSAVRHNHTLRLFYQRLRDNRKPAKVALVAAMRKLATILNALVRDNRPWQPALQQDGC

SEQ ID NO: 124970 - protein, 412 aa, unidentified
MEGETVIAGVDTHKDVHVLCLLDGLGRKIWSGSFGADPEGYDRLAEAIGDPGSCMVVGVEGTASYGAGLTRRLVELGYNVVEVLRPKRDKARPGEGKSDPLDAERAARKAASGKGCSVPKSQDGWVEAVRQLYVARRLAVATSTSCVACAKSMLTTAPSALRERFRGRERPKDLMPLLARGRKAGDALEESVLASLRSVATVWKEARSQVESLDERIRALLEANAPALLGVEGCGTTTAAALVVAAGDNPGRLKGEAAFSMLCGASPIPASSGKTERHRLNRGGNRQANWALYEIAIKRMAYDERTKRYVAKRTSEGKSRREAIRCLKRYIAREVYRVLMDPNPDGAAPEGPELAKMRKAMRVTQKKAAAGLGMSAASLGHLEHGRRRSTKLERRYYELLCELKGALPQTAY

SEQ ID NO: 124971 - protein, 371 aa, unidentified
MEGAKYYVGLDVHKDTIAIAYAEASSREEPRFLGTTTHRVGAVTKALSKLGEPAEFCICHEAGPCGYGLVRELRKRGFDCVVIAPSRVARKPADRIKTDRRDALLLARLHRAGELTAIAVPEPEDEALRDLVRARDDAVHDQRQVRQRLRAFLLRQGQVYERKKAWGPAHELFLSRIKFENPAHHIVFSESRIAVKSAAERVARAEEALRGQAESWRWMPVVRALMALRGVDFIAAITIVAEIGDLRRFPHPRELMGYLGLVPSEFSSGDSTHRGQLTKTGNGRVRRILVEAAWNYRFPARIGETITPRLEGLPQGIVDIGWKAQLRLCARYRRLRARGLHQNKTCAAIARELAGFVWDIGQHVLPTSSIH

SEQ ID NO: 124972 - protein, 411 aa, unidentified
MEKIYDKCCGIDVHKKLIVACFRCGRKQEVRDFGATTRELLELADWLREGGCEMVAMESTASYWKPLYNILESSGLNAMVVNARHMKAVPGRKTDVKDAEWIADLLQHGLLQPSYIPDKDQRELRELVCYRKSLVGERTRELNRLQKMLEGANIKLSGTVSDINGKSARSILEYLLTGESIDGAKYDEMYERKIIAHNLKATKEQIIDDLNGVMSPLQRRMMKELLAHLDELNDHIKNLDDEIDNFMKPEEKQASQVIRDVTGIGNTSAQAIISVIGTDMARFPTDKHISSWAGLCPGDNESARKRKSGKTRKGNSLLRTTLITCAHAAEKNKKSYFHAQFMRISAHRGSKRAYVAVAHSMLIAIYHILKDGVIFKDLGADYYNQFNKERKINAYLKKLKALGWEAPVVAA

SEQ ID NO: 124973 - protein, 321 aa, unidentified
METVSFEQVVSRGCGLDVHKETVVATIDGEGLKRTTLEFGTFTSSLTKLKDWLVENKITHVAMESTGVYWKPVYNILEPTGITVWIVNARHVKNVPGHKTDKKDSRWICKLLLAGLLKPSFIPPREQRELRDLTRYRKKLIQDVASNKNRIIRILEDCNVKLSSVLSDTSGITATKLINKLCDGKKVTPEDIDEVYHKKIRATKEEIWEACNGNITDHHIYLMGAIRSNNRHIESSIEELNQKIRQILSPYENVMELLREIPGLSHKTADDLIAEIGLDMEVFPSEKHLASWVGVSPGNNESAGKKKATEQPTVTSRQKQH

SEQ ID NO: 124974 - protein, 449 aa, unidentified
MAQGNGLTRGDWNRNRKVEALREAVRPAWAVLAVDLGEDKQVAVVMDHQGRVLARKIVKAKAHQLAGLLGWGAERAARAGFAGLTVGCEPTGHRWKALMGLADAAGHGFVCVQSLAVHRAREGDDYTLGKTDHRDSYLIGKLVIRLECYLPERADESWARLRHLGARRFALVADVTSCMQQAGDLLGCAWPAPLAAARRPLESVTWLAGMAVITGRCCGDPRRLRKMGYDKFLAAVRRELPRWGGKIVRHSIVQRLWDALADTGGVVAQRPGALERLHLLLDDWRLLRARLADVEQRMVSVLGELGLAELVAGIDGMSALSGAVILAETGDPRRFASGRAVVKHAGLNPSEHTSATISGQTRISRRGRPGLRAAAWRAVWGALRHNTVLAAKYAHLTGRDANRLADGQARVACAAALLRWLWAIVTTGQAWDARIAAGQIPAAPVAAAA

SEQ ID NO: 124975 - protein, 388 aa, unidentified
MLKMDPEESNGGRTVIGIDPCSQFLQLAILTPNKETEFKKLPLSPNITEEIARSTDPETTQIAIESYGSYGKLFVYDLLKRGYDIREVNPHISKKLAGLYSEEHSDQGDAESLAKALLLIPDLPKISITDKKQWLAKLTRTRRKLVKDLNGYLNRLHIALTESYGVVYKSLFKTLFAKKALMFFEDNPTINDSISDEDAKKRLGEEKWELLIQAGKWKDDYYLETLRTEIRGLIGIIRSINSTKIALEENIREIAEQVDEMRILQTFPGIGGIAGATLLSEIGDIERFGQESYLSAYCGVSPVLWQSGTGRIRTKRRRRYSRRLKGILYFISLSQIRINPESRAYYDRKIKEGKTHWQAMNALSRQLIKIIYYMLKYKKPYLRNTLVN

SEQ ID NO: 124976 - protein, 361 aa, unidentified
MQAQINDLNFEGQNIYAGFDAHLKSWQVTILADGLTLKTFIMPPKPEALKNYLNTNFPGANYYSAYEAGFCGLWVHHQLCSLGIKNIVVNAADIPGTQKDRLQKEDRRDSRKIANALRGGNMTAIYTPTESTLNDRSLIRSRNALVRDMVRFKHRIKSFIYFYGIELPDEFKDSNKHWSKRFMKWIEGVPMKEESGRQALKILVDEARSQKELLKSILKNITELSQSKKYHERVKLLRTIPGIALINAMLILTEVEDINRFPNAERFASYIGLIPMTHSSGEKEKVGEITFRSHDYLRSAFIESAWIAIRRDPALLMAYSKLIKRMEPNNAIVRIAKKLANRTYSVLKYNKPYEYGKTNNL

SEQ ID NO: 124977 - protein, 351 aa, unidentified
MKVTTIGIDLAKSVFQVHGTDERGNVVLRRQLRRAQMVLFFSKLESCRIGLEACGSSHYWARKLAALGHTVRLMAPQFVKPYRKSDKNDGNDAAAVCEAVGRPSMRFVSVKSPEQQAELSVHRVRQRLMRQRTALINQLRGLLAEYGLVLAQGATHVRSQLPALLENSSDSLPPLALELFRDLYEELCQLEQRLAHYDRRVERLYRGNPLCQKLGELDGIGALTATAFVATVAHAAQFHNGRQCAAWLGLTPKQDSSGGKTRLLGISKRGDVYLRTLLVHGARSIMRHTPKRDDPKSRWVEQLRKRRGENIAAVALAAKHARILWALMVRSEPSAQLIAAHSIEPPAQPNL

SEQ ID NO: 124978 - protein, 308 aa, unidentified
MQISHFVGIDISKETLDAALYPSRDRKTDFLHFANSTKGLGEMMSWLKSRGVKSSELLICAEHTGIYTNTLIAFAHKKGIALSLNSPLDIKRSIGLARGKNDAVDAARIAEFAYTRRDKLRLYEKPSEGIIKLQYLLTERRQYVRQRTAIINLHSAMGQYETSAGRSRNESAINHTEKLIKKVEEQMHTVISEDPAIKRNFDLVHSVKGIGLINAINTIVYTNNFKSFESPRKYACYIGVAPFDYTSGTSIRGKTQVSKICRTQQKAELSMAARSAIVHDPGLRRYYQRKMKEKGGDKSAHGIVWHCY

SEQ ID NO: 124979 - protein, 392 aa, unidentified
MQVKADRPEAPSAIRSDLGSIFVSLELSRSIWLITSLSPGAGEKMSKHSAPAGDIGALLARLSEFQQKSFARTGRSFPIIVIQEAGLDGFWIHRVLQNEGIESHVVDPASIATPRRRRRAKTDRIDGETLLRALLAYKRGEPRVCAMVKAPTPEEEDRRRLCRERKALIAERIQHVNRIKGLLFCQGVSGYEPLRRDRRQRMGELKTGDGRGLPDHLRAQISRELDRLELLLEQIKVVEAERDALFFAAKVAASTPTPAPVTMLLEIKGIGPEFAAILWMEAFFRSFANRRQVAAYAGLAPTPWQSGSVVREQGVSKAGNPRLRTTLIQLAWLWLRHQPQSALALWFKARVAHNGGRFKKTTIVALARKLLVALWKYVTAGVVIEGAVMKSA

SEQ ID NO: 124980 - protein, 356 aa, unidentified
MVKSNKLDFTGQPIYIGLDVHKKSWSVSIHSALCEHKTFTQPPEVDLLVNYLRRNFPGASYHAVYEAGFSGFWAHDQLREKGVVCTVANPADVPTKDKERRKKRDRVDCRKLGRSLRAGEIEGIYVPCRPRLEDRSLVRTRQGMVRKQTRCKNQIKAILFFYGMAIPEEWEESHWSGPFLRWLESLRMERASGDLALQIHLEELKSLRQIIVKLNREIRVLARTKEYAAQVIWLRTIPGISTLTAMILLTELQEITRFPSLDELACYVGLIPDAHDSGETEHTGGITKRRHGPLRAALIEAAWVAARKDPALMMAFHEYCKRMRKTRAIVKIARKLLNRVRYVLKNQKPYVLGVVS

SEQ ID NO: 124981 - protein, 343 aa, unidentified
MTVVTVGIDLAKNVFAVHGVNAAGKAVLVKPLVRRAKLLELIATLPACLIGIEACTGAHYWAREFQKMGHTVRIMAPQLVSPYRMSGRHGKNDAADAAAICEAVTRPNMRFVPIKSVEQQGQLFVHRAHQGYVSERTALINRIRGLLSELGIVLPQAFKAFLSGVAQVLEDLPGYCNQVIGDLLNELYHMEEKIKNSEKLIQQLARDNSAAQLLMQFRGIGPMTATAIVASIGNGHDFKNGRQFSAWLGLTPRQQSSGGKARLGRITKAGDSYLRTLLVLGARSVLLGAAKNDDPVSRWALQLKERRGYGRALVAIAAKNARMCWAMLHLRDEFIFPAQSTDY

SEQ ID NO: 124982 - protein, 383 aa, unidentified
MDGAPNGIKRAKMVVVESAIWKGRPSVGKSIIDTSSVTRVGLDLAKRVFRIHAVDATGFVVIARSVNRRTLLKFFDTLPRCVVAMEACSCAHHWGRQLLELGFAVRLIPPAHVKPYVRRSKNDAADAAAICEAAGRPGQRFVPVRSVENQAALMRHRARELMVGQRTAALNALRGHLSEIGVVAAQGVPNAYALKKLADGGVDENGEIVVPDCVRFALAPLVRQIDALDEAIEAIDRTLEASAKTDETARRLMTIPGIGPVTAMALLATIQDFAAFSSGREFAAFLGLTPREHSTGGKPRLGRITKMGDRYLRKLLVQGACSALGHRKGHNDALRRWASGMLERKTVKYKFKLTAVALANKLARIVYALATKGGHYDDRPVAA

SEQ ID NO: 124983 - protein, 405 aa, unidentified
MTVYIGIDWSENKHDLCFMHPSGDVLLALQIQHTIAGFRQLDQARQSLGVDKQEVIVGLETAHNLLVDYLWDQGYAHIYILSPSVVKSAQKRFRQSGAKDDPWDARLIADVLRTDQNRYAPWKPDQPLTRQIRAEVRFAQQLGQELVRDGNRLRAILLRYYPAILDAFPQLNSVVFLAFLQAFPTPSQSQSLSFEQLKTFLREHHHTQSHSWPRIYAALHADQPQPDVELVSAYSPLALAQARILEQLVRCRNECLLRLGKLFLLHPDHEIFDSLPMAGALLAPALLSKLGDDRNRYPNPAVLQAVAGTCPVTKRSGKHWHVYFRSACDHEFRHIVQQWARLSLEASPWAVTYYHAVRPHCKTESDAIRRLANRWLEILWRLWIDRKPYDEAFHLKQHTLRSRAI

SEQ ID NO: 124984 - protein, 316 aa, unidentified
MVPSPLFVGIDVAKATLDIAVRPTAETWSASNDATGIDALVLRLGVLAPTLIVLEATGGSQGPLVAALVAAALPVVVVNPRHIRAFAQAVGILAKTDRIDARVIAHFAEAVKPAPRPLPDAETQELRALLVRRRQLVEMVSAERARLDTAPRSIQDASQAHIAWLTTQIAGLDDALTRASQTHPVWQAKDDVLQSIPGVGPVLARTMLGQVPELGTLGPKPLAALIGVAPFNRDSGTLRGRRPVYGGRAEVRAVLYMGALVATRHNPVIKTFYERLLAAGKAKKVALTACMHKLLTIMNAMVRDLKPWQPQEVPSA

SEQ ID NO: 124985 - protein, 314 aa, unidentified
MLHAGLDLSRKRLDYCLLDEAGERVEVGAAPPDRDGLEGFVRRLGEQHPGVPVRAAIESMNGARFVHDTLEQCGWEVEVADAAKVKGLAPLACKTDRIDAWVLAELSRRELVPAIWLPGFQVREERERARFRLFLVRKRSSLKHRVHAQLLASLAMIDDLDGQIKQIDVELKTLGADHRYIPLLMSAPGIAWVLGYTIAAEIGDIDRFQSPKKLCGYTGLCPRVYQSGSTDRRGQLTHAGPKYLRWALMEAAIHACRHPVYSERYQRNKQRLGKQRGAKVAQVDIARRLTEAIWHMLTRNQPFAPAGATRALAA

SEQ ID NO: 124986 - protein, 400 aa, unidentified
MSGLKGGFDSFVGIDVSKDKFDACGIAGDEEKLFQLSATMDRMGFEKLKGHLADVSVSSVLIGMESTASYHVNLFSYLVSEGYNVIIINPLLISNYVKMQLRKTKTDKKDAVVIALFLLMNGSTLIQRVTPSLIADLRDLSRQRESLVDEMTALKINIKRLLNITFPELEHMTLVFTKAMLKLLQQYPSAFALRSADLVQLSEMLIADSYGHKREAFAAELMKAACSSVGTHSAAKEIILKQQVTLLLHLEEDLQEITGILIEMSRNLMEEDINILTSIKGIGDKSAVNFLIELGGDIHQYDGSGKIIAMAGLDPAVYQSGKHEGKGRITKRGNRHLRRIIWMMATRVIHYSDIFKAYYLKRRKEGLPYKMAVLATAHKLIRVIYAMLTHRTTFCPQVNS

SEQ ID NO: 124987 - protein, 445 aa, unidentified
MFIQSQDDSHCCYSFFIKVVILLMKLKYSICCGLDVHKNVIVATIVTTNKDGISEYKQKSFSTINSDIQRFHNWLIENNCYHVCMESTGKYWIPIFNYLENDIDVCLTHPKYVKAIKGKKTDKKDSKWIADLYKFDLVRCSFIPPKDFRQLRELSRYRFKLVCMKSSEKNRIQNCMTVSNVGIASVLSDPFGKTATEIMSYLLEHTSDSMDEHAVRKLIKKGAKAKSDEIIEAIKGYNIETDQAKKLELARAHLEYLDNMITQTEVELYVRIKPYYEFVEFVSTMPGMTELSSTIVLAETGVDMSIFDDAKHLCSWCGLSPANNESAGKKKSVRIAKAGDYLKPMMVQCALAAIKSKKQPYFAIKYGRIKKRRGHKKAIIAIARMMIVCIYHMISEKKPFSPTDYEELMDPQNHVERVVLTENNVFAYLESLGYDSSKLVKRNDN

SEQ ID NO: 124988 - protein, 350 aa, unidentified
MLIIGCDYHPSFQQIASVDTDTGELQERRLEHCEEAEKFYRELAVQGMKVRVGMEASGQARWFERVLAELNIELWIGDATEIARKRERKQKTDRQDAQHILRLMLKDDFPQIWVPSGENRDLRQLLWHRHRMVQARTRIMNQLQAVALNEGKRCKKRLWREKGREQLESFRLAPWASRRRHDLLELLDRLNPTIGALSQAIEQEVEKCPEAQRLRTHPGVGPLTALAFVLIIGKPDRFQCGKQIASYLGLVPLEDSSGNRRRLGHITKQGNSLLRFLLVEAAQVTARSLPEWRSKYVHLTMRRGRKIAKVALARKLAVRLYWMMRKGWDYEQLKKFGSHAGQPGNRDGVK

SEQ ID NO: 124989 - protein, 402 aa, unidentified
MQVTRIGMDIAKQIFDLHGVDRRGKLVLRKTLRRERVLAVLAQLKPCAVGMEACGGAHYWQREISQLGHTVRLLSAHKVKPYVDGNKNNRHDAAAICEAMSRPAMRFVQPKTKAQQDMQTLHRARALLVRDLTALSNQMRGLLHEYGIVLRKGAAALRRALPELLEGNDERLTAVLKAVVAEQFERFQYLAQRRDRYDRQIGGLCQQDDRCRQLLQVPGIGPLSATALVAALGNGHEFKNGRHFSAYLGLVPGHSNTGDKTVMLPITKRGNRYLRTLLIHGGRAAVYAARRRTDSRSSWLNRLRETSCSNVAAVALANKNARVAWAMLRYGEDYRTHRAHRQSADPTAARSARPAKRTLALAPHGARPALQGRAHFSAPPSAQTKGGTKKMLGQKPNKQRQN

SEQ ID NO: 124990 - protein, 384 aa, unidentified
MPSLTASPAIIYLGLDVHKDSVPIAVLPADASAPTRIDKYPNDFAKLRRVFERCAKEGELRACYEASGAGYVLQRAMKEWGYHCDVIAPSLIPIKPGVQRKHDKYDAGQLARLYRAGELTVIRIPREAEERVRDVVRCRETLQREVVKSRHSILKFLARRGFIYRGGVNWRPAHYTWLRQLTGTTSPLASEDQLVFSEYFALLEYKLSRRDVLDAHIETLALQPAYAPAVAALQCFRGLQVHGAMVLATELVDGRRFASPRQLMAYLGFVPREHSSGARERRGSITKAGNAHCRHVLVQAAWSYRLHPKIGPALAIRQRGQPASVTLHAWNAQQRVYTMYHRLSMRRGPQIAVVAVARELIGYLWAVMREITPEATPSATLAAA

SEQ ID NO: 124991 - protein, 433 aa, unidentified
MLKLNYMSTLFVGIDVSSKTNAVYAMDFEENKYISSSFGNNQPGADQLVNMIAECMQKHKNLDTVLIVLESTSVYSVHISNFLSTSEVLMPYKPYVFCVNPKATSNYRKSYIGMEKTDPTDAYLIADFGRVGRTKKLEPWRGGQFIALKRLTRHRMHLSECITREKTYMVSNLYLKFSELQLLEGDDKPFGSLYGATSSAVLTEFLSPQEIIDMPEEELLTFLAGKSRNRISDLSKTSELLRKAARDSYRLDKCMYEPLNISLASSFNCIHAYQKEIKLIEQAIEKCINGMNPNALLILQSIPGIGPIWASGILSEIGDITVFHSSDALAKYAGLYWPKGDSGDFTSEDNKMSKAGNPYLRCYLGEAANSVRKHIPEYADFYARKYAEVTKHQHKRALALTSRKLVRLVFGLLVKNQLYTGEKLDTEYNIESN

SEQ ID NO: 124992 - protein, 353 aa, unidentified
MQHFIGCDVHTRNQVVAWIEEETGEIKKRRLEHAGEEVREFYAQFPRGTVVGIEATCPAYWFERLLGELGLELWVGDAARIRAYEVRDQKYDPRDAGNILDLLRTGRFPRIWVPSLEERDLRQLLVHRMKQVRGRTQVKNQLHALAIGQGVCRKGKLWSAKGRKELESLALLPWAARRRKELLESLDRLDEQVRELDRAVEEAGRARPEVALLRTHPGVGMVVSLAFALTVGPVERFPHSRKLVSYYGLNPRENSSGGRQRLGSISKQGNTMMRWLLIEAAQTAARLDPQLHRTYQRLKHQRNNRGVAKVAVARRLVVRLFWMLRTRHNYAQLVHMSGSPSSAVVPPQGGPNA

SEQ ID NO: 124993 - protein, 335 aa, unidentified
MRIIGCDLHARQQTLAMLDTETGEVVNLTLMHEGNNVRELYSKLPRPVLVGIEATGSMHWFLNLMEELGIECRVGHPAQIRAAEPRKQKHDRRDADLILKLLAQNRFPAIWLPSKELLDLRALLLHRHQWVRMRVRMQNALQAIALANGLRRGPALWSYDGQAKIAFLPLLPHAAYRRSALQAMYKNMQSEIENLTRRVAEQAGNRCGARLLMTHPGVGPVTALATEVFLGDPQRFTDSKRLASYVGIIPREYSSGEHQRLGGVTKQGSPLLRFLWGEAGAHAARRDPELKRFYRRKLVQKGLGTARVAVARKLGIRLWIMLRDEIDYQEFCRRG

SEQ ID NO: 124994 - protein, 344 aa, unidentified
MKTTTIGIDLAKNVFQIHGVNEQGHVVFRKSMKRSEMGKHFSNLEPCLIGMEACGSAHHWARKLASFGHRVRLMAPQFVKPYVKTNKNDVADAEAICEAVTRPGMRFVPVKTEEQQAILAVHRARQGFVKARTAQANQIRGLLGEFGIVFSPSIVQLIKQIPGILEDGDNGLPGVMRQLLERLTEHLRGLSLQVEALEKQIRLWHRENEASLRLEAIPGIGPITASAIVATVGNAREFKSGRQMAAWMGLVPKQHSSGGKSILLGISKRGDTYLRTLLIHGARAVIRFAEHKSAPGSWLRSLMARRNTNVATVALANKNARMIWALLAHDRTFRPDYTSTVVAV

SEQ ID NO: 124995 - protein, 391 aa, unidentified
MTGLAAESAEGGFQRGKIFVAIELSKAKWVVALRVPHLDKVSLFEIAGGDAERLLGLLDRARATVAAQGCDAPEIYTCYEAGYDGFWLHRLLVSRGIRNSVLDSASIQVSRRRRRLKTDRTDAESLIRVFMAWHRGERQACSVVRVPSPEEEDMKRLHRSRANLLRERVRHVNRIRGLLHLQGVVHIHPHREGWTSGLKDLQTRDGRRFPEQLMSEIKREAKLLETVKKLLREVDLELIALVRTQRSRRPSPAREAAHPIASKLVRIRGIGPTVAAVLATELFYRRFDNRRQVASYIGLAPTPYSSGATSRDQGISKAGNNRARHNAIELAWLWLRHQPESRLTAWYRDRVTNAQGRIRRIAIVALARKLIVALWRFLETGLIPEGVLLKA

SEQ ID NO: 124996 - protein, 420 aa, unidentified
MTRIQTKKTQVVNHKSLIVAVDIGKRTNMGYYRFSHNRRAKPFPFGNHAHGFGLFWDRISQVQRQNQLEEIVVGFESTGSYGVPLVHFLKEKGVKLVQVNPMHTKRLKELTGNSPNKTDRKDPKVIADIMELGHALTVIVPEGSAAELRRLTQARERSVRRRTGLLNQLQDLVFLVFPEFLTVMKGVKSKTARYLLNRYSTPGDLVACGDLDLLCSRVKKISRGMIGRERIEPLYLSACSSVGIQEGRNSLVLEIREVLSWIELVDGFIAQLEERMGFHLQQIPYSSSILSIKGVGPITAAGLIGEVGDFGYFRTIPEMEKLAGLDLFEISSGLHKGRRRISKRGRPLLRKLLYFGAVNVVRTGGILHGWYHRALERGMPKTKALVAVARKLLRIVFAVVRDHREFISDYRNQPGLRMTA

SEQ ID NO: 124997 - protein, 349 aa, unidentified
MNSTTVAVDLAKNVFELAIANGEWKITERLRLNRKSFSAFFVHLAPSRVVMEACGSAHYWARHIAGHGHEVQLLPAQYVRAYVKRNKTDRADAAALLEAMRCAEIRPVPVKTLEQQQVLGLHRLRSQWMSTRQRYVNTLRGILREFGIVIAPGVWAAKRHIAQQLAQSPSALSPAIRPLLTQMLQEIADLEHNVEQVERQLTSLSRSDERVQHMRQIPGIGLLTSTAIRATVGDIQRFPSGRHFASWLGLTAREYSSAEHRRLGGICKRGDVYLRTLIVHGARSALLAAHRAQRTGRPLDYLRRWALECERQRGHNKATVALANRLARIIWATWKYERSFDGNWAVPIA

SEQ ID NO: 124998 - protein, 414 aa, unidentified
MDTLVERCAGLDIGKADLKACVRTPGKNARRVREIRTFATTTVGLLQLRDWLTGHQVTVVGMEATGDYWKPVYYLLEDTFEVQLLNARHMRNVPGRKTDVADSAWIAQLIEHGLVRPSFVPPPPIRRLRDLTRYRTAVVQERTREIQRLEKVLEDAGIKLSTVASHTLGKSSRAMIEALIAGERDPQVLADLALARMRNKIPQLRQALLGRFTDHHAFVCRTMLERIDTAENTINKLTERIEQEIAPFHQTVTRLMTIPGVSARIAQILVAETGADMTRFATAAHLASWGGMCPGHHESAGKHHGGATRKGDSWLRGALGEAATAAARTKNTYLQARYRRIAARRGTKRAVVAVGHTILTSAWHMITAEIDYADLGADYYQRHQDRRAATIRLVGKLTQLGYRVTLDDAATVAT

SEQ ID NO: 124999 - protein, 363 aa, unidentified
MTINIGVDLHKTQFTVYARIGDGMYGKYRTTAEGYEQFIRQLHRWRDEGHQIRLAVESTGNTRYFKRQLTLAGYPVTVINPLKFKVINESVKKTDRHDAATIAEFLEKDMLPEAWLCSEQSEELRRLLKVRQSLVRTMVSVKNQIHGLVVSLGVEDRAASLQSKKGRQELLDTLNRAYPGLAVHTLFETIDLLEQQVKKIEKALTDLVAQDKVVQLLRSIPGCGLITASTIRAYTDEVRRFRTYKQYASYAGLVPWVQCSNETVHYGRITKRGPEALRTAFVQLVLGMVRTKKKTVSYRIMQRYRGMKTEKGSGKAIIATARKLSKVVWFMLTTGREFDPRLMIDPKLEEKAELMRLSIAKTA

SEQ ID NO: 125000 - protein, 344 aa, unidentified
MEHFAGLDVSVKETSVCIVDDTGKIVREVKVASEPEALLAVLKNPAYHFKRVGLEAGPLSQWLFSALAEAGLPVICVETRHMRAVLKAQINKTDRNDARGMAQMMRVGIYRPVHVKTLRSQKLRMLLTHRKLLQSKAIAIENDLRGTLRNFGLKVGIVGTVKFEARIKELVENLPDLAALVEPLLIVRRVLREQIIILHRRLLAIVRDDEVCRRLMTTPGVGPVVALTYRATVDVPARFRKSKAVGAVFGLTCSKYQSGEIDRNGRISRCGDEMMRVMLYEAAQSMLHSKKWSWLKAWAMQVARRRGMKKAIVALARRLAVIMHRIWVDGTEFRWTRERATAAA

SEQ ID NO: 125001 - protein, 400 aa, unidentified
MISVGIDVSKGKSTVCIMKPYGEVIRSPYEVAHTINELQELAALLLHLDEEVKVVMEVTGIYHLPILMYLKEKGIFTSVVNPLIMKKYADSSTIRKGKTDRIDSRRIACYGLDNWYHLVEFNAGKERYQELKLLSRQYSHYMRMRIESVLSLTSILDSTMPGITKVLPGWRFETEKDKLSDFVEEFWHYDLITEKTEKQFTDKYVKWAKKKGYRNNQAKASEIFAMAKNGIPAVSSQSLATKLLVQEAVHVLREVDKTLATILAHMQEIAMNLKEYPVVRAMNGVGDRLAPRLIGEIGDITRFKSGSALIAFAGIDAPPYQSGQFFGTNRRISKRGAPGLRKAGYEVMKCLKTNKPVDDSSVYCYIVKKENEGKPKKVAKIAGLNKFLRIYYARVKEVYQ

SEQ ID NO: 125002 - protein, 317 aa, unidentified
MTESVKVNVGIDVSKDFLDVHVGDVALRRVPNRSSGLSVLKRILSRYTVSLVLLESTGGYENLAVTYLQALGYDVCVINPRQARDFARSMGRLAKTDKIDAQILCRLADVIDASPERARFVKPLTDERRQRLVSMVRRRRQLCDLMIAERNRRAKTDAYGSESISTVLDFLTDEVARIDRDIAAHVGSCFSDISSLLQTFTGIGPVTASTLLGELPELGKLNRRQITALVGVAPFNRDSGYMRGRRRISGGRSGVRNVLFMAALSAVRFNPVLKAFFARLVSAGKPKKVALVACMRRMVCILNAMLRDGSRFEGAVG

SEQ ID NO: 125003 - protein, 424 aa, unidentified
MHEEQRWFVGIDWASKEHVVSLLDYGGRKIGQRKVAHGGAGLAEMIAWLLKASGGEPGEIHVAIETPHGPIVEALLERGFNVYSINPKQLDRFRDRFTVAGAKDDSLDADVLGDSLRTDMRLFRKLSVAEPVIVELREWSRINEQLKRERIRLTNRMRDQLWRYYPQILELVDDDLAADWLLALWELVPTPEKAARVRETTIARVLKKHRVRRFDAAHVLSELRKPALTVAQGTIEAATAHIRVAIEQLRFIDRQITDAERQIDRLCEKLAEPVAGEDGVSARGQQLEQRDVAILDSLPGVGRIVLATLLTEAPEALQRRDYHALRTLSGAAPVTRRSGKSRVVLRRYACNRRLRNALHNWARVAIQRDATSRAKYDALRARGRGHARALRSVGDRLLYVACAMLKSGTLFDPSLASRKNAVGS

SEQ ID NO: 125004 - protein, 320 aa, unidentified
MSTSSTVVGIDVAKAHVDVWVLGAKLAAQRFDNEAAGHAALLAALQPLGVALVVMEATGGYEAALACALQAGGLPVAVVNPRHARDFAKSMGRLAKTDRIDARMLAQYASVLVRRDDLASLLRPLPDAQQQTLAALLTRRRQLLGMQLAERQRLQLAIAPVRASLDAMIQAIGLQIQAVDAQMVQQVQAHYSALDQLLRTASGIGPVSSSTLIAQLPELGKLSRREIAALVGVAPMSNESGKSQGQRRIQGGCFEVRRVLYMAALVASRYNPAIKAFYQRLIAAGKLPKVALVACMRKLLTVLNAIVKTNTPWNNSLHCA

SEQ ID NO: 125005 - protein, 392 aa, unidentified
MFFVGIDIAKRSHQVAVTNDSADIVIKPFNIKNSSLGFSSLIEKLTSQSISMDNCVVGMESTGHYWYPLYFFLIEKGFTVKVFNPIQTAAFRDVAIRKVKNDNLDSVMISDFIRFGRFAETIIPNESLLALKNLSRYRFSVTDICTSLKKRTIALLDQVFPEYETIFSDIFGITSRKLLEKFSTPEEFMDVSTTKLTNFIAKISRGRNGREKAELIKSAAHSSIGISYATDSFSFQIKQLIEQIGFIEKQIEDIDKEMEKILAESEYSVITTISGIGPVLGCIIVSEIGDISRFESPSKLVAYAGLDASVKQSGEFNASQNKISKRGSSYLRRALWLAAFMSLQSDPALYNYYCRLKARGKSHRLCVTAVARKLCIIVWAILNSKQPYSPNI

SEQ ID NO: 125006 - protein, 387 aa, unidentified
MKNNSNSKKQARGSEEWTSPKLAALQEAWRQKQGTEEKLTIGLDLGDRQSNYGVLDQSGEVIGRGQVVTQSQPLEVWLGQMPPSRVVIEVGTHSPWVSRLVKQTGHEVVVANARRVKLISESSRKNDRVDAEMLARLGRVDVQLLSPIQHRSKQGQADLIGVRVRAELVELRTSAVNAVRGFVKSFGQRMPKCDAGVMNRSHAKEVDEAIRGEMELVLEVVEKLNEVIEEADGELKKVNAERYEKETAKLEQVTGVGTLTALTYVLTLEDAGRFRRSRDVGSYVGLRPKSSQSGERDPEMRISKEGDVYLRKLLVQCAQYILSKRGPDTDLKQWGLRIASKGKKKAKRRAVVAVARKLSVLLHRLWVSGEVYEPLRQRQRRQHSVAA

SEQ ID NO: 125007 - protein, 319 aa, unidentified
MNPSVMPTPRVIGCDVGKHSIVACDSLTGRTSELANRPETLTAFLADLPRTCLVVCEATGGYETALLLAAAELGMPAHRADARRVKAFIRSLGRIAKTDRIDAQGLARYGQDRHADLPRWQPADTARDDLRTLVRLRTQLVKQRAALTNQIKAPGGTVAKHRLRTLLAAATEQIDAIEADIANLVERQPAIARTVDLIRNIPGCGPVTAVTVTALMPELGTMTGRQAASLAGLAPHPHQSGQRDGYRRTRPGRPDLKRALFMAAMAARNHNPHLRTVYDRLVANGKKPIVAITALMRKLITIINARVRDALAKQSCQLS

SEQ ID NO: 125008 - protein, 502 aa, unidentified
MKSKPQDKTNKTTNHPTQRHWHEMNRKQRREMTRQIQSEDLSLEVVHPDAAGIDIGNESHYVAVPPSRDSQPVQRFGCTTAELKVMAAWLRQCRIRTVAMQSTGVYWIAVFDILEEAGLEVYLVNARDTKNLPGRKSDVQESQWLMKLHTYGLLRNSFRPSQEIRTMRTYWRQRNDLVQSAGRHIQRMQKALTQMNIQLANVLSDISGVTGQAIIKAILAGERNPHKLAEFRDPRVKASEEQIAQSLEGNWQQDLLFVLKQEQDGYEFCQKQMAECDRQLNQYLEHGEDRSHGASLPEEKRKGRLKKKKGNAPQFNLREGLFRMTGTDLTLIDSIDVMTATTVISETGYDMSKWETENHFVSWLRLCPDNRISGEKIIGKGRLPTNNRATIALKMAASNLTTERYLSRSAVSSIPNQARCPLRDQGHGRQAGPLGLPHAALRDEIRGPRSSLLRASTPRDTDQAPQGQSRKARIPSHPNTGGGLTVSGEECRFESYRADQRK

SEQ ID NO: 125009 - protein, 355 aa, unidentified
MSSEKYIGMDVHQATISVAVLDSQGKTLMESILETKASTLLEFLGGLRGTLYVTFEEGTWAAWLYDLLKPHVAKVLVCNPRKISVLKHGSKSDKIDARKLADRLRLNDLKPVYHDDNGVRMLRELARSYLTIVKDLTRVMSRVKAVYRSWGIPCGGRDVYYTRHRQQWLNKIQEPGVRRRAEQLYQQLDMLQPLRQQARRELLRESRKHTITAKLRRIPSLGPIRCALAVALIQTPNRFRTKRQLWTYSGLGLETRDSGEYHYVKGQVRRRKEQKFIRGLNRDYNHDLKGLFKGAALRSTMLPKPFQDFYQRSVAKGIKPTMVRLTLARKIAAITLTVWKKGENFDADKVKPQAA

SEQ ID NO: 125010 - protein, 371 aa, unidentified
MKQRSTKEALEVVGLDVSDRSSTVCRMSMTSGEILERTPIATSATGMESYFATRARMRVALEVGTHSPWISRQLEEYGHEVLVGNAALFQASVSRRKSDRSDAEGLARVARLDPSLLHPVRHRSAAAQRDLAVVRTRDALVRARTRLINECRGQVKSYGHRLPSCSAEAFAARAGAALPEDLRPALDPLLEVVAQLSAQIRAMERTLETLTRQRYPQTLRLRQVRGVGTLTALSFILILDDPHRFPRPRQVGAYLGLVPGRRQSGERNPHQPITKQGDPLLRQLLVQAAHYILGPFGSDCDLRRFGQRLIERGGAGARCRAAVAVARRLAVLLLHLWKTGDEYDPFFVEHRLARTVVPAAASAATTISTHV

SEQ ID NO: 125011 - protein, 345 aa, unidentified
MSVSEYDGRQFVGIDLHRRRTVIVRQGESGEQLGSSRIVNDPLALAAEIGKAGPSPEVVLEATYGWYWAADVLAEAGARVHLAHPLGIKGFAARRVKNDLRDAADLADLLRMNRLPEAWIAPPEVRELRELVRHRAKLVAVRSGFKAGVHAVLAKQGLHIAVSDLFGPRGRAELAQASLDTAYRARVNAYCRLIDTLDREIELAAGWIAARLATHPGYRAIQQIPGVGPTWAAVFAAEIGDVTRFASARHMCSWAGLTPRHRESDTTVHRGPITKQGATLVRWAAVEAVQKLPPTAGWLVSTREQIAARRGRNIAKVAVARKLLILVYYGLRDGHIRALHNAGAA

SEQ ID NO: 125012 - protein, 313 aa, unidentified
MNNKEIFIGIDVSKETLDISIAGKHYKIANSKETISTFYNEHIIDCKVVLCVLESTGGYESNAMRVLQEYGVPVHKAHPNKVHVFAKAKGHFAKTDKLDAVLLESYAKFVAEKEKGDEFISEQEENLKELRSMEHNLENYLHANQCRLDHARGKAKVYLQKQIAFTIKELAEIRKDIEQIINDDQALKAKSNLLTSYKGVGKKTASVLLIELPELGKLTHKQIANLVGVAPRTFQSGKMIGKGHINGGRFFVRKALYMSALVAVRYNEKMKLIYDRLIAAGKSAKIALVAVMRKIIICLNAMLKNNKEFTLDF

SEQ ID NO: 125013 - protein, 289 aa, unidentified
MPLYGGIDLHANNSVVVLLNEQDQVIYQHRFANHLPEILEGFALHQADIQGIVVESTYNWYWLVDGLMEAGYRVHLANPTAIQQYSGLKYTDDHSDARWLAHLLRLGVLPEGYIYPKAARAVRDVLRKRAHLVRQQTANVLSLQNIIVRNTGVRLSAKRIHALTLEEIERLLPVPEHVLAVTSSLVVVHCLAQQIKTLEKMVQQRLKHTSAYAQLQTVDGIGPILAQTIVLETGDMRRFPTVGNYASYCRCVGSTKISRVQSVLFKATGQDKSLLSMSSCFNRKKRKRF

SEQ ID NO: 125014 - protein, 421 aa, unidentified
MIEEIAEEPAELLQRAAALDIGKASLVCCVRVPHESRPGARRQEVRTYDTVTPALLELRDWLICQGVTRVVMEATSAYWKPPFYLLEDDIECWVVNARDVKNVPGRPKTDKLDAVWLCKLAERGMLRPSFIPGRPQRQLRDLTRYRRTLVQERSREKQRAEKLLEDAQVKLSSVISDIFGVSGRDMLAALIAGQRDPYALADLARKSMRAKMSVLRQALTGHFTDHHAFLLGMMLDRTDALTAQIDALTARIEEAIAPFAAQVAQLDEIPGVGITTAQEILAETGTDMSRFPTPGHLVSWAKFAPKARQSAGRAKAAATGKGSPWLGGTIGEAAVSAARTQTFLAARYKRIVRRRGKKRALVAVGNSILTICWHLLSDPGARFTDLGPDWHDRLAPQRRKRQLIAELERLSGMKVTLEKTA

SEQ ID NO: 125015 - protein, 278 aa, unidentified
MDKFIGIDISKQTFDVSFSKKDQQVFKNTRKGFERFLKQVNDNTGLVMEASGPYYLSLANFMYDKGFKVYVVNPLKIKRFSQMNFNRAKTDKKDAEVIRGYALKMQEDLKGWKPESRQIKEMKQLHTALELLNKQLTQVRNQLGAFKDSGSICKELKTSYQSILKKLEKEKDKLESKMLKIGKEEYQQTLKSLTSIPGIGNKTAIMLIAMTSDFDKFEHYKELIAYVGFSPRIYQSGTSINGKGHICKMGKAQIRKLLYMCSWTAKSIIRAAWKCMNV

SEQ ID NO: 125016 - protein, 359 aa, unidentified
MSKIVRRLLAFPKTKAMNLKYSVGIDVAMDKFDVCIVVIDDTQSVVIKATKSFVLKKDYKPLLEWVKKHQKENLPLCFTMEATGNYFEKLAAFLFENGCFVSVVLPNKAKKYFQSHGIKSKTDRIDAKGLAQMGAEQKLKPWQPFSKNIYKLRSLTRQHESLTKQKTAISNQLHGQTYNMYEVKEVIKQLKTIIRLIDKQIDQVASMIAELIEQDPELSSKTKKLLTIPGVGLLTVATVIAETNGFYLIESIGQLISYAGYDVIENQSGNRVGRTKISKKGNSHIRRILFMPSLNVVRLKVTAFKLFYERLYERNKIKMKSYVGVQKKILILLYTLWRTDTSFIPDFDQVIHKKEVVPA

SEQ ID NO: 125017 - protein, 459 aa, unidentified
MQHYYLGIDVSKGYADFVILNNKKRPVEENFQLDDTFEGHCCLYERLLRFFDDHPDSTIYAAVESTGGYEDNWFNALIKFQGTLNLKTARLNPLGVNANSKADLKRNVTDKISAQNVAEYMIAHPEKISYQQQDHLASLRKQWGFIRMLTKQSTQLLNQLESLIYTANPELLVYCKDGTPGWVLRLLIHYPTSSSLSKAKIIKVARIPYISPDRAKELVGNAKKSVASATDKVTGKLIIATVNQILHLKQVIKAQTKLMAQECPVPEVDLLKSFIGIKDFSAIGLMLEIQTVERFLSVKKLASFFGLHPVYKVSGDGIGGFRMSKRGRKEPRQILFMVTLTAIQSNPLIRGIYQEHIQKGMEKMAAIGLCMHKTLRIIYGMLKHNSVFDPEIDRRNREKMVQCNRSVNKDKNRRYQAFDSNAPISRRQHGKREERKQSHSDNITNNGIIAPAPLSTYQI

SEQ ID NO: 125018 - protein, 385 aa, unidentified
MKPNSQMTLDKYFRQCVGIDISKDKFTACLYMYDMASDAGCCTESIDFPNNRTGFNQMVKWSRKESQKGFPLVYLMEPTGSYYEPLAYHLHKIGQTLYVVLPNKARKFCEYEGIKTKTDAMDARCLALMGCKNRKLRPWEPPLPIYRELRQLTRLRADLVKMQTQMLNHMESIDHMEDVAPEVRKSYEKLLDTIEKQLEKNEKDIAAKLAQDKELETKVKRIATAKGIRVGTVTCIVAETQGFHLISNRKQLTSFAGLDVKARQSGKDDPRHHITKKGNAHIRAALYMPALSAAHCNRQMAQAYGRICAKHPDVKMIGVTAIMRKMLLLVYSLWKSGEEYDETRDNTHTPRKKEPQPTNSPEDCLKPNAAPPDWNAADKEGNPPF

SEQ ID NO: 125019 - protein, 343 aa, unidentified
MQAITTIGLDIAKSVFQVHGIDAEGRVIIRRQLKRRYVSAFFQKVPPCLVGIEACATSHHWSRELTALGHTVRLMPPAYVKPYVKRQKNDATDAEAICEAVTRANMRFVATKTPEQQSCLMLHRTRHLFIRQQTAVINAIRAHLAEFGIVAPVGRNGVEELLNVVADSSDKRVPQVTRACLAALGAQLRTLKAQILEFDRQIMAWHRSNEASKRLDEIPGVGPMLATALVASVADPRAFRSARNFSAWIGLVPKQHSSGGKDRLGSISKQGDRYLRSLFTAGALAVIRYAKIHGTTHRPWLTALLARRPTKVAAIALANKIARMAWAMMAKGERYKEPVALAA

SEQ ID NO: 125020 - protein, 317 aa, unidentified
MNNTEIQTPVNVGVDVGKANLDIALHPSGQFYTIPNTEAHIRRFVRILKNYAIERIVVEASGRYEHALVQACDQADLPIIVVNPISVRRYAQAIGVLAKTDRIDAQVIAQYAATLKPEIKPIPDKTSQKIKDLLVRRSQLLEMSTMEKNRLQILPKSLHRSIKSMLKMLQSQIETVTRQIEQEVAKVDQWRTKMEIMTSVPGVGKVLAYTFLSELPELGSLNRKEIAALVGVAPINRDSGKLNGKRRIRGGRHRVRTVMFMAMLSSIQCNPVFKRFYERLKAQGKIPKVALIACMRKMIVVLNTMIKNQESWRGEMA

SEQ ID NO: 125021 - protein, 343 aa, unidentified
MQAMTTIGLDIAKSVFQVHGVDAEGKVLIRRQLKRRYVLAFFEKLPPCLVGIEACASSHHWSRQLKALGHTVRLMPPAYVKPYVKRQKNDAADAEAICEAVTRANMRFVETKTPEQQSCLMLHRTRQLFIRQQTSVINAIRAHLAEFGIVAPVGRKGVEQLLAVVADASDRRVPELARACVAALGAQLRGLKAQILEFDRRILAWHRSNETSRRLDAIPGIGPALATALVASVVDPKAFRSGRNFSAWIGLVPKQHSSGGKDRLGSISKQGDRYLRSLFTAGALAVIRYAKLHGTEHRPWLTALLARRPTKVAAIALANKIARMAWAMMAKGERYKEPVALAA

SEQ ID NO: 125022 - protein, 454 aa, unidentified
MANKRRKREKGEKAAALPVLRPHAAGIDIGATEVFVAVPPEREAKNVRSFPTFTQDLYALAEWLQQCGVTTVAMESTGVYWIPLFQILEARGLEVCLVNARHVKNVPGRRTDVSDCQWLQFLHAVGLLRASYRPEQEVCAIRALLRHRESLVQMAATHVHHMQKALDQMNLQLHHVISDLTGQTGRAIIQAILGGERNPYALAKLRNERIQAGEEVIAKALVGDYRPEHLFALRQSWAAYQSYQKLIEECDREIRQWLEEFPPANPGGAGHADHQRPEAPAASHGGTLRSELQRVFGVDLTKIPGIHTGHAQTLFGEIGPDFTKFRSASAFASWMGLCPDNDISGGKVLWVGTRKVNCRAATALRMAAQSLHHSKSALGDFYRRLRAKLGPPKAVTAAAHKLARIIFHLVTTGQEFDESRFAAQQLRYQKRQEAKLRAKAKALGFQLVPQEQTG

SEQ ID NO: 125023 - protein, 320 aa, unidentified
MQTPTNVRNIGADVAKDEIVVACSEGSFPVRKLANQRTALRAFLKGLPTGSRIGMESTGVYHELFANLAHQLGFVVFVLNPKDARHYAKGVGMRGKTDRVDAEFLARMIAHEHTKLYAWIPPSPEQHEIAQLIKRRAKLSSLRQALGMSLKGVDGFSAELKALRKRFDQVIARIDQRVKALVEASPDRKQHVTHLRTIYGVGPVVSAALVNILERVPLKSADAFVAFTGLDPRPDDSGQHRGKRRLSKRGPSELRRLLYLAALSAIKTKTWKPLYEHYRGKGLSSTAVIVILARRIARTAWSMYTYKTEFDPGLLTRSLT

SEQ ID NO: 125024 - protein, 354 aa, unidentified
MTSVSHLTIGLDLGDNNSDVCVLDQQRREIERRPVKTAPESLKALFERYPGADVVFEVGSQSRWVQQLAKESNMGTVIAADPRQLKLISASRSKNDRKDAYVLCRAAQGLPEMLHPVEHRSEEAHLHLQLLRSRDLLVQQRTALVNRIRGMAKATGSKLPSGDAQYFFRKAPEKLPEPLRKPCAPLFAILAAIHEQLLLITAQVRQLMKNYAAAQLLTTIPSVGDLTALTFVLTIDDPNRIRGARNIAALLGITPRKKESGDSTPQLGITKAGDSNMRRLLVLCAHHLLSRGKDCRLKQWGLQLCQRGGSNAKKRAVVAVARKLAVHMLAIWKSGETYDPWRDVPAEMMPAQAS

SEQ ID NO: 125025 - protein, 368 aa, unidentified
MNTVKFIGMDVHKKTITIAIIDEERNQRARVYGTIANEADALDKFCRKIVSTASRLHFVYEAGPCGYGIYRHLSSKGFDCMVAAPSMIPKKSGDRIKNDRRDAKMLARLHRAGELSAVYVPDCQDEAMRDLTRAREDAVIATRKAKQRLNAFLLRNGLTYTGKTKWSKIFFNWLSDIAMPHPAQQIALQEYIDAVHETGNRINRLTDQIRHLAPTWRLAPVVLAIQAARGVSLVVAVTVLAELGDLNRFNKPSQLMAYLGLVPSEHSSGDSIKRGAITTTGNSHARKVLVEAAWAYRLQARNSRLLLNRQHGLPEKVCQIAWKAQLRLCNRFRRLAAKGKPKQKIVTAIARELSAFLWAIAKQVQPGV

SEQ ID NO: 125026 - protein, 353 aa, unidentified
MKRDKYMGMDVHQATAVVAVIDAEGKIVLETIVATAAAPIRRLIESISGAVHITLEETTQAEWLYELLQGFVAEVVVCDPRRNRLLSEGSKGDRADARKLAELLRTGMVRSVWHGRQTTRGLKEMVRSYETFAADARRTMLRIKALYRSRGIATTGTGIYQVKQREHWLKQLTEVGMRQRAAWLYQQLDHVRELRKQAKAAVLAEGQRHQAVELLRTIPQVGPVRAAQIVATAGTPHRFRTKRQFWSYSGLAVVTHTSAEYELRAGRVVRRNKPVATRGLNPNCNRRLKSVFVSAATAGGVSHPWQPYLDNLKRKGMRADMARLTLARKIAALALAIWKKGEAFDPKKLNWTT

SEQ ID NO: 125027 - protein, 426 aa, unidentified
MNYNTQNKKIASITEKTLIVGIDVGSTTHYARAFDWRNYEYSKKPFAFSNNEEGFMAFKSWIEDIAKKHGKDKIIPGMEPTGHYWFNLGMFLQENDMRTVHVNPHHVKKSKELDDNNPNKNDRKDPKTIAALVNEGRFTYPYIPTGIYAEIRNLSNLRFQTQEEITRIKNRIARWFSIYFPEYKDVYGKVDSVSGMMVLKQAPLPVDIVKLGVEGVNRIWREAKLRAVGYKRAKTLVKLAEHSVGSHEAPNAARVELTNLICDYEMYIERMDLLMETIEQRLTEIPYIDKLLEIKGIGMITVCGFIAEVGDIRRFDNPKQLQKLAGYAIVNNSSGKHNGESHISYRGRKRLRYILYEAAISLVGKNVEFKEIHNYYLTRDKNPLKKMQSIIAVACKVIRIFYAILTKGIDYDGNKMLQDIVRPSVA

SEQ ID NO: 125028 - protein, 312 aa, unidentified
MEAKFVGVDVSKAILDMDCLPVSAPQQFSNDAEGIDALVRRLKGSAVERIVLEATGGYETAAASALAAAGLPVVVVNPKRVRDFAKASGILAKTDRLDARVLAAFGQVIAPPVRALPDAAQRELAELLDRRMQLVTMRAQEKARLGTVLPVARRDIEQHIAWLDKRIGKFDADLRERLRACDIWKEKVTLLDSVPGIGKVSIFTLLARLPELGALNRGQIAALVGVAPFNDDSGRRRGNRYIQGGRAEVRCVLYMATLTATRCNPAIKQFFDRLIASGKPFKVAMTACMRKLLTVLNMVLKNKEPWKNVLAG

SEQ ID NO: 125029 - protein, 320 aa, unidentified
MSAYEFVGVDIAKDKFDSALEINNRCKHAVFSNNEQGYKAFLKWLEQYTISPWVCMEATGHYSEGLADFLAEKGIRVSVVNPFQIKSFAKASLARNKNDRIDAKIIAQFGQRMEPRIYQSNSAEQKEIRELTKVLDMLKAQVIQLTNQLHSIRGHAAQKSLKKMIEKLEQEIKRIQQQIDELINNNQQLKEKFELLLSIKGIGKLTAYHVLARIPDIQCFQTAKQFAAYMGITPKQQQSGSLIGKTTISRLGDSRLRKALYMAALVAKRYNKSLLPFINKLQTKGKTPKIIICAVMRKLAHIIFGVLKNKQPFNENVACF

SEQ ID NO: 125030 - protein, 344 aa, unidentified
MKIKLLGIDLAKNVFQLCALNQANKVLFNRTVRRDRFRSTIARLEPTTIAMEACSSAHYWGRTYEAMGHRVLLVPAQHVTPFVRGGKSDARDALAICEAAQRPGLHPVPIKSIEQQDIQLLHRLRQRQVQHSTALANQIRSLGREYGVLFPPGIRALIKRLPEALEDGSNELSPVARYALADQHRCLLEVRQAMATFLQQIEQLAAQYPAYINLLPLPGIGPMIASAYIAAIGNGRQFKCGRQVSAWLGLVPRQYGTGGKIQLKSVTKNGDRYLRTLMIHGARAVITRGLKNRPELAQWVQPIIDRQGFNKAVVALANKLTRISWVIVTTGEPFDMKQAFKPAA

SEQ ID NO: 125031 - protein, 485 aa, unidentified
MAKRKQSNFERINLERMNRKQRRELGQRLEKSDPGLEIVHPHAAGIDVGNESHFVAVPGNRDPQPVREFGCWTGDLVKMAAWLKGCGIETVLVQATGVYWIALKDIVEQQGIEVVVANAQHTKNLPGRKSDVQECQWLMKLHTYGLVRGSFQLAEDMQGVRAVWRLRGRHVEEAARSVQHMQKALTQMNVQLANALSDISGKSGQAIIGAILEGERDPGKLAELCDRRVQASTEEVAESLRGNWRDEMLFELSQARESYRFAQQQIQSCDRKLESYLKVLPTRQVEIMLPAPPVPSPATPVRARQAPRKQGNTPEIPGMRDELVRICGVDLTTIDGISIVTAQTILAEIGTDTSRFRTEQAFVSWLGLAPNRDISGGKVIRVVRRKVPSRASTALRLAATSLKSSDSYLGARYRHLQRQLPSKASAVKAMARYLGVLVYRLMTKGQAWVDQGAARFEQKRKALSLATLQARALANGYRLVPVTAS

SEQ ID NO: 125032 - protein, 340 aa, unidentified
MKLFGAIDLHSNNNVTVLINEKDEVVYRKRLPNDLKLILGQLAPHQSKIEGIVVESTYNWYWLVDGLMERGHRVHLANTAAIEQYSGLKYTDDDSDARWLAHLLRLGVLPQGYIYPKEQRPVRDLLRKRSQLVRYRTANLLSIQNLFTRNTGQSMSANQIKGLQVEEIDGIVPANDLALAIKANLSVMRSAEEQVEVLEQTVTARVKLRPEFRFLKSVPGIGPILSLTIMLETGDIGRFSTVGNFASYCRCVGSQKLSNGKRKGSGNTKNGNKYLSWAFVEAANFAIRFSPKVRSFYQRKKAKSHPVVAIKAVAHKLCRACYYIMRDRVPFDMEKAFSAK

SEQ ID NO: 125033 - protein, 389 aa, unidentified
MIDCYNQKLGEITFPNRPADFPKLVTKVKKCNTDAKEVVYGLENAYGYGRALAVWLIDKGYFVKDVNTAISHRQAKHRGAMYRKSDSDDAEAIALATLNMLDKLPDACPNDAYWSLGQLVHRRDNIMKQRTRLVNQLHEQLCIAYPSYKSFFNDISRPTALYFWEHYPSRKYLRGKSVEDLRKELVPVSHNRCSTKNCEKIMDAVASDKVKNNAYQDAGDMVTLSIVSDLQHYDSQLAEVDKMLEQMYKMLGCTLTTIPGVNVITAVKILAEIGDIKRFSNANKLAQFAGIAPLHLSSSGKGKDVATKQGNRRLQATIYFLAIQMVQVSSKGTPRNSVVRAYYEKRKAEGKTSQQALICISRRLISIIYGMLKHGTEYRMPVVESASEK

SEQ ID NO: 125034 - protein, 311 aa, unidentified
MREIESYVGIDVSKARLDVYVLPQKEAFSVLQDGEGLAALSERLLALSPRLVVLEATGGLQERAAATLAAAGLSVAVVNPRQVRNFARGRNLLAKTDRLDAQILATFAEVNRPEPRPLPDAERSALIDLVGRRRQLVEMRAAEKIRRPQLQPKLRPKLDEHLDWLTKAIEDLDLEIGEAIRSSSLWRVEDDLLKSVPGIGRIASAVLLAKLPELGKCSRRQIAALVGVAPYNCDSGNFRGKRRIQGGRADVRAILYMATVTATRCNPTIKAFYKHLIAKGKLPKVAITACMRKLLGILNAILKTSAPWKNA

SEQ ID NO: 125035 - protein, 459 aa, unidentified
MAGFEVTLYRWDEKVDPDHVEQLSWAVINALRGAIPKDGGRPVKKHSNSAKKCEPSAKRAQSRVSVVQDVREVMTDLVSQLTRQLDGANLSVVELQGEGRNAIRPNLDRLTVGVDLGDQWSNYCILGLGGETLAEGQFPMSRQEITEFFQGLAISRVVVEVGTHSAWVQEVIAGLGHEVLVANARMMEGSKRRRRKNDRIDAGKLARLGRVDPKSLYPIRHRSSQVREDLLVLRARDALVASRTELINTVRALVKTMGARLSSCSSEAFAKKAETEIPSELRETLQPLLRLIATLNDEIKSYDQKIEQLASKKYSHTKLLRQVTGVGPITALAYVLTLETPQRFARSRDVGPYLGLVPKQEDSGDSQPQLGISKAGDQMLRKLLVGSAHYILGPFGPDTDLRRFGMRLCERGGKNAKKRAAVAVARKLAVLLHRLWASGDVYEPLGHVSPARTAQAAAA

SEQ ID NO: 125036 - protein, 346 aa, unidentified
MNTRMVKQIAGIDVAQKELVVTIGRMDESWTAELYGYKVFPNTAKGFALLLDWVKNKSIPDLPFRFVMEATGVYHESLAYYLDEQQQAVTIVLPNKISNYARTLDIKTVTDKTASEAICRFGLERKLSDWKRPHPVYKRLRQLTRERDQVIQSRTVAKNQLHAETSEAEPYDQSIARINQQIALLDKQEKQIKEEIADMIKQYPEIKAVVELLCSVPGIGVLTAVTILGETNGFELVRNKRQISSYAGLDIQEKQSGTSVKGKPRISKRGNKHLRKSLHLPALAAIRHCERFKAIFTRLVSKHGIKMKAAVAIQRKLLEIVYTVFKTKCRYDNNYLNKQHEIVAHQ

SEQ ID NO: 125037 - protein, 339 aa, unidentified
MNTSYAAIDLHSNNGVLTIIDDQDKVLRQRKLTNDLQEFVRELEPFRATLKGVAVESTFNWYWLVDGLIRNGFPAMLVNTAAIQQYEGLKHSDDKYDAWWLAHMMRLGILPTGYIYPPEERAIRDLLRKRATLVQQRTANVLSIQNLEQRNRGLRLSVNEVKKLDSAKIHETYANEDLALSLTATVNVMNALTEQIKSLEKSVLRRAKLRPEWEMLKTVWGIGDILSLTIMYEAGDMKRFAEAGNFVSYARCVKAVRTSNGKKKSNNNSKNGNRYLAWAFVEAAHFAIRSYPDARRYYDRKAAKTNSIVATKAIAHKLARASYHVLTERVPFVAKRVFC

SEQ ID NO: 125038 - protein, 403 aa, unidentified
MNSVGIDISKGRSTIAVMRPFGEVVISPFEVRHTGSELSKLAKQLKSLDGETRVVMEATGNYHASVAKLLHDAGLYVSVVNAKLVHGYGNNELRRVKTDRKDAVKLANYGLDRWLTLPRYIPEEDTRLLLKNCYRQYRQYSKVQTVLKNNLISLLDTVFPNANRLFSSPIRGDGSEKWVDFVAEFWHCRCASEKSERAFTSKYLRWCRKHGYNFREAKAHTIYAEASGHIGVMPKSETTKLLVKQAVSQLRATSTALAALKQEMQSLASVLPEYPVVMDLFGVGPTLGPQLIAEIGDVRRFYSKKALVAYAGLDAPPNDSGDVTGRHKSMSKIGASSLRRTLFLVMSVYLQTAPLDEPVCQFMDRKRAEGKPYRVYMMASANKFLRIYYATVKAYLESLEHTA

SEQ ID NO: 125039 - protein, 391 aa, unidentified
MIFIGIDVAKGKHDCFVISSDGEVLFDVFTISNTLYGFNDLLAKIKSVSSDLSKTKVGLEATGHYSYNLLGFLLNNGLPTYVLNPLHTNLYRKSLSLRKTKTDKVDARTITSMLMSCVDLKPYTRALYHNEELKSLTRYRFDKVSERAKLKSSVSRLVTILFPELEKLVPTLHMVSVYALLSEFPSAKHIANANLTRLTNLLYTISKGHYNKDTAIRFREAARNSIGSVMPAKSLELKHTIKLICELDDEISEIEAEIKQLVDSLETTILTIPGIGYATAASILAEVGDFSNFETPDKILAFAGMSPSTYQSGQLTNCYAHMEKRGSKYLRFALYNATKYVCKWDSNFAAYLAKKRSEGKHYNVAISHAAKKLVRLIFALEKSRLPYVPAV

SEQ ID NO: 125040 - protein, 342 aa, unidentified
MKITTVGIDLAKNVIQIHGVNEQGKKVFNKQLQRKRMLTHFAQLPPCLIGMEACSSAHFWARKFQGMGHTVKLMAPQFVKPYVKTNKNDAADAEAICEAVTRPTMRFVPIKNGEQQAVLSLHRARQGFVKARTAQANQIRGLLMEYGITIPQGISHITKRIPELLEDAENELPGVFRQLLQRLGDHLKVLDRQAKELDEQIQAWHRGSEDSKKLARIPGIGPLTASALVASIGDARSFKNGRQLAAWLGLVPRQHSSGGKPRLQGISKRGDTYLRTLLIHGARSVIRVATGKTTPMHCWAVNLVERRNKNVAAVALANKNARIVWALMTQDREYQSDFVHVV

SEQ ID NO: 125041 - protein, 436 aa, unidentified
MEEVTDEPLYRDRVCGIDIGKAGMAATIRVPSDENPARRASETREFATTKRGVLALADWLRAWQVPAVVMEATSEYWKPVFYRLEAEGFECVLADAKQVKNLPGRPKRDPSDSRWLAACFERGAVRSCFVPDPEFRIIRLHTRYRRDLTDERTREKNRTEKLLESAAIKLSSVVTDLHGVTGRDIMEHLIAGERNPKVLAQLARARARRKITELEHALDGAEFFTPEHAALLTTMLERIDRLTGDITRLSGVIEQLLAPYEEQLQQAESMPGWGRRPAEDAVAETGADMSKFPTGGHLSSWAGRTPLDSQSGKRTGRARHKKGNKYLAAVTGETAVAAGKTATREGARYRKLARSRGKGKAQVALGNTQLKVYHKLLSSPGMRYQDLGPDYYERQAAIRRKIAYHVREIEALGLDVTLTRPAPEPGPDEPANTPAA

SEQ ID NO: 125042 - protein, 397 aa, unidentified
MYIVGIDIAKRKHEAAVIDGEGTVIIKPLSFTNNCSGYNRLLAMLAKAKLPLDEVSFAMEATGHYWLALFTRLQKEGFRVQVINPVQTNSIRSFYIRQAKTDPRDALLIAEVIRFGHFSESTLHPENIYELRELCRGRHAIVSMQADVKRKVVALLDQVFPEYETAFTNMFGDTSMAILQTCPTPKELSEMPLEELCHLIEVSSHKRFRMPKARELQELARNSFGFAMAGDVFSTMIRLYAKHLDFLKQQVREMDRKIAEIMETLDTPITTITGIGPTLGAYILSEIGDISHFSSAAKLAAYAGIDPTMRQSGEYNGVRNRMSKRGSPYLRHAIWLAASSAVLHDPALKLYFQKKRDEGKPYMASVGHACRKMVSIIYAVMRDNKAYTPCIPNEISA

SEQ ID NO: 125043 - protein, 384 aa, unidentified
MAEQIFKYSVGCDISKDAFNVCILEVSQERSKVKASHKFKNEKSGFREFEAWIKKHKRHDVPTGFYMEATGVYYENLAWYLFEQEYNVFVLLPYKTKHYLKSIGIKSKNDKIDAQGLAQMGAEQKHNPWRPHSKSIYTLRALTRQHESVTKLKTSLENQLHANEHSAVRNATVKKQLNATIRLLKKQLGELADEISNLIDADEKLNEKYCHIELIRGISKLSWATIIAETSGFETFENQRQLVSYAGYDVVENQSGKHVGKTKISKKGNSRIRRILYMPSLVSVRLKEPALFNLYQRVHERTGIKMKGYVAVQKKLLVLIYHIWKNNKAFQSDYSKTFGEKESKSLFPFGFGEAIKESSPDKRATQDEHSYELSSKVLFPLAQI

SEQ ID NO: 125044 - protein, 343 aa, unidentified
MQTITTIGLDIAKSVFQVHAIDAAGQVVIRRQLKRRHVLAFFQKLPPCLVGIEACASSHYWSRQLQAVGHTVRLMPPAYVKPYVKRQKNDAADAEAICEAVSRANMRFVPTKTPEQQSGLMLHRTRHLFIRQQTSVINAIRAHLAEFGVIAPVGRKGVEELLRVVADPNDKRVPEVVRGCLAALGSQLLGLKKQILDFDRMIMAWHRSNQTSKRLNCIPGVGPLLATALVASVADPKTFRSGRNFSAWIGLVPKQHSSGGRDRLGSISKQGDRYLRGLFVAGALAVIRYAKIHGTQHRPWLTALLARRPTKVAAIALANKLARMAWALMARGERYNYPAALRP

SEQ ID NO: 125045 - protein, 453 aa, unidentified
MGMAKPQVIEDEEHERVHERVAAVDVAKDSGMVCTRTPHPSRPSARRSTVWAVKARMGAVRALGRQLKRDGIEMVTLESTSDYWRIWFFVLEACGLAVQLVNASQAKNLPGRPKTDKLDAQWLARLTEMGLLRASFVPPREIRDLRDYTRMRTRLVQERTRCWQRLEKLLEGALVKLSSVASKLTTLSAQDMIKAMIAGQRDPGVLAGLARTSMKAKHDDLVEALDGMFDDHHGELAGLLLDHIAVLDERIAQLSGRAAVLTAAMPAAWGVDADGTTGPQAGTGPDAPVPPAIQRLAEIPGVSPDLARTIIAETGLDMSRFPTAAHLVSWAGLCPSARQSGPRTRAGKKGQGDTWLRGALGQAATGAARTTTFLGERYHRIARRRGKAKAQVAVARSILIIIWHLLKNPEARYTDLGPGYYQARTDKDKKIKNHIRQIEALLGHPITITPKGA

SEQ ID NO: 125046 - protein, 318 aa, unidentified
MSIVTWHVVFVGLDYHASSVQVCVMDADGNMLLNRKCANDWRAVVAAVQERCGKEVQVQAAIESCCGAADLADELIRRGWTVHLAHPGYVARMKHNPDKTDYSDARMLAELQTHGFLPRVWLAPEEVRELRRLVHYRQRLTKDRKNLKLQIGATLREARQKAPANVNAWTKAWLAWLDASAELSPNARYVTNRRLRRLKDVQEELQRVDKRLERQTREDPLVQKLLTIKGIGLVTATTLRAEIGRFDRFRTGKQLARFCGLSPRNASSGKFGLRHSCSTLRSCRSMTLAPTRACSGSRCPTWRASRCGPASIEMGNSP

SEQ ID NO: 125047 - protein, 353 aa, unidentified
MANHTGGVVGGVDAHTDEHHVAVVDLQGWLLGATAFPTTAAGYARMISWLRSHGEVERVGVESTGAYAAGLVRALRAGGISVVEVNQPHRHARQRLGKSDPIDAELAARAALSRTATAVPKQTSGIVEAIRQLQVVRTSALKARHAALQQLNDLIVTAPEQLRSELRHGRTMRAKAALCQKLRPDTQRIHEPAQAAKLALSSLARRIHELDREILELDRQLEQLVRAAAPRTTQLFGVGTQGASQLLIAAGQNIDRFRSEAAFAKICGAAPIQASSGRTNRHRLDPGGDRQANRALHMIAVCRLRYCQRTQAYATKRTADGLNKRDILRCLKRYIARETFHTLRADLKALDST

SEQ ID NO: 125048 - protein, 482 aa, unidentified
MKKRNIYQNQSQELLHIFEEAGSNEKVMCVPMDFAKKDHLVMFCNGNGDIVRKPFSVKNTPEGIAYIDDQVMRSCRKRGIKKKHVFFGGEDANSFAKNFVSTLRSKGFVVANVNAHDAKKQRTSVQASTDRIDLLGIATMLLHCRANCSPAQSGIYRNLRTLVRHRRRLVQMLTEVKNRVHGIVDELFPGFLKESNTGIVPFTQSSLYLMEDRFSPKQIRRRKRQTLIETLKRFNTSKAEKTAAKLQQYAAKVLHAPVEYVDTMQVSLAQHVKHIRCLKESTVQMDKQIALNLAQTQGAFLTSVRGIGIVLAAGVTAEIGDISQQKPLNNLASYAGIVPRVKQTGGIGGKTYTGPVAKRCNRILKDYVVKSAYHVGWHGPDDLMADYKRRDASGQHADFGIGRRYLRLAISLMRTSQVYLPPYLRKDEYSLKDRSGYYLAAWPYFRDKWKKVGALEAAFATDRPLGIWRQIVQQLYDIELKF

SEQ ID NO: 125049 - protein, 359 aa, unidentified
MKTKSSELNFDGQNIYVGLDVHLKSWKITILTDELTHKTFSQPPSPEILAAYLKENFPGGIYHSAYEAGFCGYWIHNKLLSFNINSIVVNAADIPTTNKEIVQKEDKRDSRKIAKSLRNGDLVPIYIPSLKTLEDRGLIRTRSILVRDLTRYKNRIKSFLYLHGIEIPNTFSNPQTHWSKRFMDWLEDVKLTEQTSKISLSALIKESKNLRLSILEVTGNIRALSKSDTYKDRVSLLQGIPGIALLTAMIILTELETINRFSTLDKLSSFIGLVPSTSSSGEIDKVGNITPRKHNLLRASLIESAWVAARTDPVLLNSFHVLCKRMQPNKAIIRIARKLLNRIRYVLKNKQPYVYAVEK

SEQ ID NO: 125050 - protein, 428 aa, unidentified
MKYNTQNAKIKSITEKTLIVGIDVGSETHFARAFDWRNYEYSKKLLEFSNTEAGFMTLKAWMADFAEKYGKNVVIPGMEPTGHYWFNLGAYLQDNGMKPVHVNPHHVKKSKELDDNNPNKNDRKDPKTIAALVNEGRFSYPYIPTGIYAEIRSLSNLRLQTQEEITRIKNRIARWFSIYFPEIKDVYRNPDSVSGLMILKEAPLPQDIVKLGVDGINKIWRDAKLRAAGLKRAKTLVTAAEHSIGSQEAPDSARIELKNLLNDYEIYKNREEDLMSLTEEKLSEIPHIDKLLEIKGVGLKTVSGFVAEVGDITRFDNPKQLQKLAGYAIVECSSGKHKGESHISYRGRKRLRYVLYEAAISLIARNEEFKEVHRYYRTRKENPLKKMQSVIAVACKVLRIFYTILTKGVTYDGAKMMQDIKRPQMLAA

SEQ ID NO: 125051 - protein, 345 aa, unidentified
MERYLGMDVHAQSCTICVLSEAGKEIRREVVETNGQALVGFLKQQAGRLHLCVEEGEWSLWLHEILSPHVAELVSVWPEAKQGAKSDGLDAHGLAERVRTGRLGRVAYKAPRQFAELRELARAYTLLTRDVVRQKNRLKSLFRRRGVACPGEEIFQVEGRQSRLSELPKAMRRTVELLGAQLGHLEELKAEACAAMLAQSRHYPIAAILETAPGMGPIRVAQMLPIVVTPHRFRTKRQFWAYCGFGIVTHSSADWVRQDGRWVKASVTMTRGLNHNHNHTLKAIFKGTATTVISHARPNPLREAYDRLCAQGTKPNLAKLTIARRIAGTVLAMWKRQEVYDPKRA

SEQ ID NO: 125052 - protein, 391 aa, unidentified
MYEYENGKKVIYVGIDVHDETFTCCFYDPDDKQAKKGLRTVKIFSSAARVRRCLADFFKDNPFNISEFTFRCAYEACGYGYELARSLHSSGIDCVLLAPSTINEYHNNQRIKTDKRDAFTIAKGYANGEASPVHIPDKHDEEVDNLIRVRDMYKDTAKRYKQQIIAFVKRLGYKYEEHGHYWTQKYMKWLANLPLSTVNRYVLDNLLNSLAQASDSLAELNGQIASIAENDKRYAERVRRLRGLFGIDTYTAMAIVVKSGDFKRFAKAKSYMAYLGLIPGEASSGGTVHKKSLTKTGNPRLRQLLTESAQCYLRKPNLLKSKAFKKRQEGLPEEFITYADRGLMYIVRKGKKMLYNKKNWNVIVSALARTLAGFIWGAMTTHLDRNPKAAA

SEQ ID NO: 125053 - protein, 385 aa, unidentified
MPGNAFSPTEYDIFAGLDVDRKSISVTFTSHQGFIRSLRMPYRVEHLVHYVRKHFAEQRVAFAYEAGPTGYGVYDGLVAHAYPCLIAAPAMIPRAPGQRVKTNRLDSRALAENLRGGQLRSIHVPSPVYRELRHLTQLRDTVVSQAVATKQRIKSLLLFEGLAFPPAAAGHQWSLQVKAQLRTLPCAPPVRFKLDQLLATLAFAEQQVLQTTREIRRFCRTEPELARCIQYLMTVSGIGWITASQLLARIGDWRELKNIRQLGAFVGVVPTEHSTGEGPQRGAITRTGDARLRAKLIQAAWAAIRHDAELRPCFRAVCQRHPPDRGPRIAIVAVARKLTVRIAVVLRQQRPFVRRDPVPSAPVTQEETVPQGTTRRLAEPGAAAP

SEQ ID NO: 125054 - protein, 394 aa, unidentified
MEFAGIDIGADRHTVAVLGADGTVRVPPTPFGEDAEGYAHCRAVLGAPADTVVALEATGHYWKNVVAFLLAEGFAIVLLNPLRTHRFAQAELQRAKTDALDAVGIARLAAEKRPAPTRLPDAATQELRELVRFRDRMVQDLGDRVRQLHRLVDLGFPEFTRHVRTLDSELATTLLQAYPTAAAFRGVAERELANLLYAGRRSVGRRLARTLLTAAAASVGHHHGAVYQLQVRCLCEDIALLRRRLGGLARDIERTLDDHEVGQLLTTIDGIGTQTAARLVAELGDPAEFRDAAALASYVGVVPAIRQSGKRQPLRAGLTPIGHARLRKALWMPTVAAIRINPWLRAFYLRLRARGKLPKVALVAAMRKLLAAIYSVAKHRRPFVPHVTLLEVPT

SEQ ID NO: 125055 - protein, 358 aa, unidentified
MKYYIGCDAHKKYSVFAGVSEAGEIIPAQRVEHDREKYSSFLKGLPPASQIAIESVGNWYWLIDEMEKAGHIPTLVNAGKAKLMMGNINKTDKLDAKGLAVLSINGTLPAVWIPPRELRDQRELARMRIFLVHIRTSLKNRIHATFAKYAITFEEVSDLFGVRGRNLIEKRLAELPPETRDSVKEQLKLLDQLQRQISMVEEHIRQIVKITPEMQLLMSIPGIGPILAILIALEIGNVARFGDGAHLASYCGAVPRVKSSGGKTYYGKTRPDVNHYLKWGLTEAANVIVLTQHRMTGHHVVTLYRRIRQSKGHAKAIGALRRHLAEASYAVLRSGQPYHEPGTPRKSSVTKEVCARLA

SEQ ID NO: 125056 - protein, 315 aa, unidentified
MNSREAFVGIDVSKEHFDMSVRPTGKTWRLVNDEAGKEQLCRELRKLKPDLIVMEASGGLESALAVKLQEAKLPAVVVNPRQVRDFAKAQGILAKTDRIDAQVLARFAERIRPEVRPLPDEAQRALEGLMVRRRQLVIMMTAEKNRLRRASEEVAQGIRDHIEWLKRQLDGVDRDISRRIQRNDVWKQKEKLLKSTPGVGPVVSRSFLSGLPELGTINGKKISALVGVAPFNCDSGKFKGRRRIWGGREHIRSVLYMGTVAAVRWNPIIRSFFLRLVKAGKSKKVALTACMRKLLVMLNAIIASNEPWKYGKVVY

SEQ ID NO: 125057 - protein, 391 aa, unidentified
MIYIGIDVAKDKHDCFITNSDSEVLFKAFTIANNLDGFNDLYQKIESVMDDVTKVKVGLEATGHYSYNLLGYLIDKGLPTYVINPLHTNLYRKSLSLRQTKTDKVDARTIASMLMSDVNLKSYSDTSYHNEELKSLTRYRFDKVKERAKLKTSVSRLVCILFPELEKLVPTLHIASVYALLSEFPSAKHVATAHLTRLTNLLSESSKGRYGKDTAITFRDAARASIGSNMPAKSLELKHTIKLIQELDSEIDEIENEIKIIMDEINSPILSIPGINYRMGAMIIAEIGDFNRFDSPDKILAYAGFSPSTYQSGQLDGAYAHMEKRGSRYLRYALYNATKYVCHWDPTFAAYLAKKRAEGKHYNVAISHAVKKLVRVIYHLEKTKQQYIKVA

SEQ ID NO: 125058 - protein, 346 aa, unidentified
MTMVGGFDVHRKQITFDYVDDDGLVRWGQIRPATRAVLRGWLGEHCPERDAEFALEGCTGWRYVSEELAAAGVVAHLGDPAEIAGLRGPKKRAKTDRADARLLRTLLLEGRFPESWVPPAQVLEVRTLGRLYCTLMDERRAWQQRIHAQLFHQGCPPITALLSAAGRDALASAELSAAGRQYVDTALRRIDELTAEIDPLRTQLVNFARHQRGCQALQARQYGIGWLCAAIIWAEIGDARRFARSDKLVRFAGMDVTVYSSDGKRSPGHLSRQGSPELRWATFEAAKCAARRGSPDYAYYHKLAARPHSGKNPTLAVERKILRRCYHILRELGDAALAFPPQQVAA

SEQ ID NO: 125059 - protein, 450 aa, unidentified
MTREPQEIEDEEHEQVVERVAAVDVAKASGMVCTRVPHPSRPGRRLSRVWEVAATTGAIIGLAEQLVGQGIEKVTVESTSDYWRPFLYLLQAGGLSVQLVNARDVKNVPGRPKTDRLDAVWLAKLTERGMLRPSFVPPAEIRQLRDYTRLRVDLTHERARYWQRLEKLLEDALIKVSSVASTLDTASTRDMVEALIQGQRDPRVLAGLARGKMKAKHAALVEALTGRFDDHHAELARMLLDQIDALGAQITKLTARIQQLLGAIPAAQGVDADGTTGPGAGSGTDAAVLPAAARLDEITGIGPGAAQVIIAELGLDMGVFPTPGHLVSWAKLCPRTIQSGAKTRAGATGKGNPYLKGVLGEAAAAAAKTDTFLGERYRRLVKRRGKLKALVAVARSILVIVWHLLADPAARYHDLGAGYWADRIDKGKKARNHIRQLEALGFTVTLAPAA

SEQ ID NO: 125060 - protein, 393 aa, unidentified
MAAHSTDTLEFQYVRPVIIEKLRFLGLDVHAETITVAVAEADGEVRSLGTIANREESIRKLIRKLGPVEHLRACYEAGPTGFVLYWQLTQLGVKCDVVAPSLVPKKPGDKVKTDRRDALKLARSHRSGDLTAVWVPDEASEALRDLVRQREAAKQDQLRAKHRLTKFLLRTGQRPPLGVKAWTERYVEWVQQVRYTHPAREATLLDCLNEVQHMEERVKRLEQSIVEVIQLTSVPMQDVVRGLQALRGIAHISAVTIAVELGNITSRFESARDLMGYSGAFPSEDSSGERIRRGGITKSGNAHLRRIVVESAWSYRHRPAIGARLRKRQEGLPAEITEIAWKAQNRLHKRYMTLMARGKEQRKTMTAVARELLGFIWAIGIKAEASCKQQLAA

SEQ ID NO: 125061 - protein, 359 aa, unidentified
MSTITLGVDLAKSVFSVCEMDAAGHVLRRFDLKRDAFVIWLAQQPASTVVAMEACSGAHHWARRCLEHGLVPRIIAAQFVKPFRKGSKTKNDRADAEAIASAARQGNMRFVPVKSVDQQVRLSWHRVREGYKTESLAIGNRLRGLLAEFGVIVAQSDLALRRLLGNLDAQVGLPAELKELLRDLAAHWASLRMALDACDARIEAHARQDERCVRLRAVTGIGPITADAAVATVGNAREFTQGRQMAAWLGLVPTQHSSGGHARLGGISCRGDAYLRTLLIQGARSSLQRAKAVVREKATPEQLWIRTLDGRLPFGKVIVAIANKHARQIWAMLAHDVDYDPCACLSHPMHQEHHAANAA

SEQ ID NO: 125062 - protein, 342 aa, unidentified
MPIVGGLDIHRKQLTFDYLDTVTGEVRRGQIAPADREHLRAWLARFAGRDDVAFAIEGCTGWRYVAGELAAAGIAAHVGEPADTAAARGRKRHAKTDKTDARHLRTLLAEGRLPECWIPPAQILDYRALLETYHDLRREHTAWVQRIHAVFFHQGAPRLGQGALRTEQGLAALRAAAVAHLSPAGQLQVATALDMLAAVGARMEVLRKQLLDAARHLTGAKVLAARLYGAGPVTALALTCWLAGAGRFSSSRKAVRFTGLDITVWSSDRKGPPGRLSRQGPPVLRWAVYEAGKTHARSSAPDHRYYTAVKDRKRAALSEARKLVRQACHILTELGDDALTAA

SEQ ID NO: 125063 - protein, 362 aa, unidentified
MRIIGCDLHARQQTLAMLDTTTGEVVAMILTHEGDNVREFYSALPRPVRVGIEATGSMQWFVNLMEELGMECLVGHPAQIRAAEPRKQKHDRRDADLILKLLMENRFPAIWLPSKELQDLRSLLRHRHQWVRMRTRIQNALQSIALANGLRRGPALWSHDGQSRIASLSLAPHTAYRRSELQAMYKQFEAEIEKLNQRVEQQACQRPGARLLMTHPGVGPITALATEVFLGDPARFADSKALASYVGMIPREYSSGERQRLGGLSKQGNPLLRFLWGEAGAHAARKDPELQRFYRRKLVQKGLGKASVAVARKLGIRLWIMLRDQIEYHEFCRRGQKQQNSSDACAGMPETPYGAKSHRPVD

SEQ ID NO: 125064 - protein, 404 aa, unidentified
MKVTYQTCCGVDVHKSFLVATIVKTTGDIEPSYQKKRFSTFNNSILEFKQWLLDNDCHDVCMESTGKYWVPVFNLLEDDINVVIANPKWVKAVKGNKDDTKDSKWIGDLFRLGLVKGSYIPCKKVRILREYTRYRYKLVSCRSSEKNRYQNALTVCNVALDSVVSDIFGKSSTSIIDYLLEQSGSSINHEEIASKLLRSLKSKEDAVIESVEGYQMTDAQKYRMRLVRAHMDYITAEINDVDKMIENMISSNTDFENAVQFLCTIPGVKRDSAITIISEIGTDMSQFSSSKRLCCWAGLTPGSNESAGKKKSVRITRAGVYLKPALVQCAHAAVKSDKSPYYKKKYESLVKRRGKKRAIIAIARMILTAIYQMLSTGEQWNPSDLYKIDMPVALVEKQKAKAIK

SEQ ID NO: 125065 - protein, 310 aa, unidentified
MGIIVGCDISKGWIDVERVGAEQQPALRLDNSARAVDCFARELPAGSLVGMEATGEMHELLAGKLVKYGHTVFVVNPRWIHQYAKVIGQRGKTDRSDAALIARFIAAEAANLHPYQPPSREQHELRKLLLRRYTVVKLRAATRQSLGDQAREIVRQFDRILERIERRIAELIKAAPDWRELAQRLRTAPGIGPVVAAHLVQVLTRFPFQKADAFVAHTGLDPRPNDSGQKHGRRRLTHHGDATLRTMLFMGAMSACKRREWRALYDASIQKGLPSTAARVVVARKLARVAFGLFKSGETYDPGRFLSTSG

SEQ ID NO: 125066 - protein, 361 aa, unidentified
MGISGMGISGMGISGMGISGMGISGMGRNDISATIWLGIDVSKDTLDGCLLRASGKEKHKQFSNDASRHSKLLRRAEHLVGEESCHFCLESTGSYSTALAHFLAGAEQLVSLVNPALIKYAGMMEGVGNKTDQADARLIANYCRKEQPSLWRAAAPEVRVLVALVRRLHSVQETLVGEQNRLGAPGLPREVVTSLKKTTRFLEAEVKRLQKQIKEHIDNHPGLKGDKELLLSIPGIGDTTAHELLAEMPDVKEFASAQTMAAYAGLAPREHSSGSSVHKRTRLSKQGNSHLRRALYFPAVSAVQWNPLVRALYERLREKGKGKMVALGAAMRKLLMIAYGVLKNKQPFDPQWLQNQAPATS

SEQ ID NO: 125067 - protein, 411 aa, unidentified
MKALYERCCGIDVHKRIVVACLKCGKKQEIREFGTTTEELRSLTEWLSDSKCQMIAMESTGSYWKPLYNIFELSSLAAIVVNARDMRNVPGRKTDIKDAEWIADLLQHGLLRASYIPNREQRELRELSRYRKSLIEERARELNRLQKMLEGGNIKLASVVSDINGRSARNLLTHMLKRDTSLTKEEVSSLVRGRLRHKVESIMKALDGFLTPLQKQLMLKVVDHIDDMTKRIGEMDDLMNQYLTEYHEAIQKLDEIPGIGRQSAETILAETGLDMNRFPTAKHFSSWAGLAPGNNESAGKRRYGRTTKGNITLKTTLIQCAKAAVKKTDSFLSAQYQRLVVRRGANRATVAVAHTMLISIYHMLKNNVPFTDLGADYYNRFNTQSKIQHYLKKLKQLGWELDSATIPTAAV

SEQ ID NO: 125068 - protein, 371 aa, unidentified
MSELPAETRPARLKVEASPRPPGARKPETELGAVSTTAVPHPDSRSGPSPHLQGRVMDEQRTVFVGIDVSKDRLDVHLRPSGEAFCVPREGKGMDDLVIRLQGLSVALVVLEATGGFEATVAAALAGVGLPLCVVNPRQIRDFARAMGRLAKTDTLDAEVIALFAERVRPQARPLREPERVHLAELVGRRRQIIEMIGMETNRGRQAIDKPLARRLARHVAYLQKELDAIDHDIGDAIKHSPAWREAEALLKSVPCIGDVTARTLLAELPELGTVSRHQVAALVGVAPINRDSGLMRGRRAIAGGRTSVRAVLYMAALTATRRRSPFRAFYDQLTARGRPKKVALVAVMRKLLTILNAILRDHTPWRPLNA

SEQ ID NO: 125069 - protein, 424 aa, unidentified
MNDTQNKKIAQVTDKTLVVGVDVGSDKHYARAILARGYEVSKKPFEFANTRDGFERFINWSYHLATENRLTKIFVALEPTGHYWFNLADYLKAYDVKLVLVAPQHVKHSKEMDDNTQMKNDRKDPLVIAKLVTEGRYMFPYIPEDIYAELRAAFNRRCDLVEALTRNANRMIRWFDIYFPEYREVYGKVNALTGLMVLMRAPLPADIVDLGADGICQIWREAKIRAAGINRAKKLVDAAERSIGRKGCEAVRQELWQLMEEHDLLSRQLSNMMQIITELLGRIPGAERLLNVPGAGVITVAGFLSEVGDISRFTDPKQIQKLAGLAVVENSSGKRKGLPGISRRGRKRLRWVLFQLARGMVKSNKEMKAYHQYYTTRKDNPLKKMQSLMAIAGKITRMFFGMLKNGTEYDPAIVMKDLKKAAAA

SEQ ID NO: 125070 - protein, 420 aa, unidentified
MPNIEIGVDSMVKENFIYVGIDLHKETHTAVMIDCYNQKLGEITFPNRPAAFPKLVTKVKKCNTDGKEVVYGLENAYGYGRALAVWLIDKGYLVKDVNTAISHRQAKHRGAMYRKSDSDDAKAIALATLNMLDKLPDACPNDAYWSLGQLVHRRDNIMKQRTRLVNQLHEQLCIAYPSYKQFFNDISRPTALYFWEHYPSRKYLKGKSVEDLRAELVPVSHNKCSTKTCEKILDAVASDKVKNNAYQDARDMVTLSIVSDLQHYDSQLTEVDKMLEQMYKMLGCTLTTIPGVNVITAVKILAEIGDIKRFSNANKLAQIAGIAPLHLSSSGKGKDVATKQGNRRLQATIYFLAIQMVQISSKGTPRNPVVRAYYEKRKAEGKTSQQALICISRRLISVIYGMLKNGTEYRMPVVENAGEK

SEQ ID NO: 125071 - protein, 350 aa, unidentified
MLIIGCDYHPAFQQIAFVDTDTGDCGERRLQHREEAEEFYRDLAAQGRKVRVGMEASGHARWFERLLSELQFELWVGDAAEIRTKRVRKQKTDRQDAQLILKLMLEDRFPQIWVPSWENRDLRQLLWHRHRMVQARTRIMNQLQAVALNEGLRCKKRLWREAGREQLEAFRLAPWASQRRRELLELLDRLNPTIAKLTQAIDLEVEKCPAAQRLMTHPGVGPLTALAFVLIIGRADRFQCGKQIASYLGLIPLEESSGERRRLGHITKQGNSLLRFLLVEAAQVTVRSIPEWRSKYCHLTMRRGRKIAKVAMARKLAVRLYWMMRKEWNYEQVTKFGSHAGQPGHRHGVK

SEQ ID NO: 125072 - protein, 458 aa, unidentified
MKRNRSKAKIDRMMPMVHPNAAAIDIGATMHMAAVRADRTPEPVRSFGTFTTDLHRLVEWFKECGVETVVMESTSVYWIPIFELLDARGFTVFLVNARDAKHVPGRKTDVSDAQWLQRLHSYGLLRASFRPKGQIAELRAYVRQRERLLEYAASHVQHMQKALTEMNVQLHHVVADITGATGQRIIRAILAGERDPKVLTRLRDYRCHSSAETIEKALTGTYRAEHLFALEQALALYDAYREKASACDARIEAVLKELSIGRGHSSDSLPSSGRDRSDQANALAFDARALLFALLGKDITQINGLGPYLSLKLIAECGDDLSAWPSAKHFTSWLGLAPSNKISGGKILSSRTRRCGSRASALLRLAAVSVGRTETALGAFFRRLSARIGKAKAVTATARKIAVLFYNAVRHGMEYVDPGASYYETRYRTRVVNNLHRRAKAFGFVLQPMEPAPGVAVS

SEQ ID NO: 125073 - protein, 373 aa, unidentified
MPRYSTAFGMDVHLRSTTVCALDAETGEAVTRRFRGNPWGEVAEWMSGFPGPSLAAYESGYLGFAPQRELSGLGVDCVVAAVSKVPRSAADLSSKNDRNDAARMAKAILSHDITPVWVPSPEIEGLRDLAGAHDAATARLAAAKQRLLAFLARRGYVYGGTTPAGNPRKYWTYGFLGWLDKVRPADDGSIRALAALRNEVEAADEAREALLAEYRAAVAAGPLSAEVEALQSIKGCGFALAAAFASEVGDFSRFRSGRQVTAYFGLAPKQRSSADSVRLGGISGAGNALVRRLAVEGSWRYAQAGHQPKLMPKGSGVPLEIRMHGRKGSERLLRRREEMLERGMPQAKANAATAAELVRWLWALGMMCREAGE

SEQ ID NO: 125074 - protein, 347 aa, unidentified
MVTFGGDSHKRTHTLVAVDENGRQLGERTVAATPNAHMDALGWARQWPERRWALENCRHLSRVLERDLLSAGEAVVQVSPKLMGLARRTGRELGKSDPIDALAVARAALREPHLPVAQLEGRSREVKLLVDHREDLVGERTRIQNRLLWHLHELEPGYQVVASGLLRRVVLAEVSSRIESHTGVVAEIARDLVARLTELTQSVRRLQRRIEALMYELAPGLLSLPGCAGLSAAKLVAETADVSRFRSSAAYAMHNGTAPIPVWSGNQERHRLNRGGNRQLNVALHRIAITQMRLGGPASDYIARRLTMGNTKTEAIRALRRQISDEVYRRLRQDHSQRSTASIAVAA

SEQ ID NO: 125075 - protein, 343 aa, unidentified
MVHYIGLDVSLKRTSICVVNQVGSVVREGVVESEPEAIAAFVRSKAPGAVRVGLETGPTATWLWTELKRLGLPVICIDARHARAVLKMQINKSDRNDAAGIARIMQTGWFKEVRVKDLDSHSVRALLASRALLVKIKRDLENQIRGLLKNVGLVIGRAKFNVFTMRTEELIADRPQMIAVVGPLLKARQAIEQQTDDLDRKVLKLARYDAQVRRFMTVPGIGPITALCFKATIDDPTRFKRSRSVGAYVGLTTRRHASGEVDWTGRISKCGDAMLRSYLFEAAGVLLTRVPKWSALKAWGMRLAKRNGLRKATVAVARKLAVILHRMWIDGTEFNWSKKEVAA

SEQ ID NO: 125076 - protein, 289 aa, unidentified
MNQLYGGIDLHANNSVIVLVDEQDQVVFEKRIPNDLEKILFHLKPYHSLVQGLVVESTYNWYWLVDGLMAAGYSVQLANTAAIKQYEGLKHTNDHSDARWLAQLLRLGILPTGYIYPKEERAVRDLLRKRSQLVRQKTSNLLSIQNLVARNTGTAITGNHIKTLTAEQVQDVLPTAELALAVTSTLAVMQCLADQIAALEHAIKARVSLRPTFRHLLTVAGIGQPLALPIMLEAGEMHRFPTVGQWASYCRCVNSTKLSNGKRKGQGNTKNGNKYVAWACIEAANFAVR

SEQ ID NO: 125077 - protein, 323 aa, unidentified
MFYLGVDVSKAKLDCLLLDSTTGKVKSKSIQNTNAGFKQLIEWLAEKKAPDAHVIMEPTGVYHEPAALALTDAGLMLSLVNPAQLRQFAQGLGVKNKTDKADSSVLARYGETLKPEAWQPPSKSARHLKALLARRDAIADDLQREQNRQEAIEFAISPDEVKQSINQSISFLKVELQRLDDTIKAHIDSDPDLRGKKDLLETIPGVGERVSSNLTALFAAKTFDSAEQLAAYLGLVPVQWESGTSVRGRPRLSKAGPSHLRKLLYMPAVVARQWNPHIKSFSDRLIAKGKSKMAVIGACMRKLAHLCFGVVHTGRPYDPNYVM

SEQ ID NO: 125078 - protein, 426 aa, unidentified
MCMSWIVLVTVYLTRLHDLKFEVSSILILSKIGDFMYYIGIDIAKRNHEVSIIDADGKSLSKSISIANSQKGLDDFNNYLSSFNVTSQNSIIGMESTGHYWLNLYSSLVNLNFNLFVINPIQTDAFRKMYIRKTKNDSKDSYIIAQIMRFGEFSSSSISDENIFAIRQLSRYRSSLVDECSNWKRKVITILDQVFPEYSDLFSDTFGVTSKELLSKYPLPENMLEVSTKELTSLLNKASKGRFGIEKAQEIKEYATKSFGISFAKETFSFQIKQIINQISFIESQLKELEEKITNILKTLNSEITTITGIGDILGASILGEIGDISRFEKASQLVAFAGLDVAINQSGEFTGTEMKITKRGSPYLRRSIWIAATVACFKDPALSVYYKKLIDRGKKHLTAVGAVARKMCNIIFSVLKNKKPYTPNI

SEQ ID NO: 125079 - protein, 399 aa, unidentified
MNKQRARIWVGIDAGKGHHWAAVVDETGATLWSKKIENDESAILTALGEILDLADEVHWAVDISSRSSALLLALLAAHGQRAVYVPGRTVNRMTGAYRGEAKTDARDAYVIAETARHRRDFTLLDVPAQLAADLALLTAHRTDLITDRVRTVNRLRDVLTGMFPALERAFDYSARKGARVLLTGYQTPAALRRRGLSRLTAWLTNRGVRDPESVATAALEAAQAQQTALPGEDTAAQIVADLATQILDLDDRLRRLDRQIRGTFRTHPQAEIIESLPGMGPILGAEFVVAAGDLTSYTDAGHLASAAGLVPVPRDSGRRTGNLHRPKRYSRRLRRVFYLSAQTSIVRDGPNRDYYLKKHGEGCKHVQAVIALARRRTSVMWALLRDNRSFTPAPPTQTA

SEQ ID NO: 125080 - protein, 430 aa, unidentified
MNDLNAIRLAEFCQFKKEIRGSTEYLIVGLDIAKERHNAFFGTATGRSLHKGMFFDNTYEGFQKLLIQTDALKVQYGLRKVVFGLEPTANYHKPLGEYLIKGGHLVVLVSAAATVKNRELMDGRWDKHDAKDSANVADLIAQGKCLYYDCPGEDLRSLRGLLSLKKRLKKEEHGLRVRIRNQLLAQYFPEMDQHFGSVASLNVVQRCLDPSLISIMEYDEFCRTVSPGKTNMAQQRRLTQIWRAAKQSIGCCVGEAVSVEAQIMVMGLHRVRETIKLVEDKIEDICLKFPEYSFLLMIPGFGPDVSAKVLAAIGDPERFTSGKQVLKMAGFDLCASRSGKTSNSATPVISKHGKSDLRYALYQAAIISSLHYKEFIIYHTNKIRGREREKGIGTKMRVKLAAKLLIIAWTLMKKKEPFDPKYLNLGDSKV

SEQ ID NO: 125081 - protein, 344 aa, unidentified
MDHIAIDLGGRESQICIRTSDGAIGYEGRLATEALPEFLRRPAGRVVMETCAEAFAVADAAAELGHEVRVVPATLVRVLGVGARGIKTDRRDAQALSEVSCRIDLPSVHVPSRWSREVKSMCGMRESLVHARTQLVNTIRGWLRGQLKGSGHRFGGPVSMPNKIRAFFESEKMTVPAFVERQLQAIEHLTLQLKEAHRELESLAEGNELCRRLMTVPGVGPLTVLRFVSAIDRVDRFKGAHQLESYLGLTPGEDSSSDRRRVTSITKAGSAAARWILVQAAWCALRTRSRHPMCDWAREVARRRGTPKAIVALARKMAGILFALWRDGTTYDPFHRVEPVAASA

SEQ ID NO: 125082 - protein, 392 aa, unidentified
MYIVGIDIGKNHHEASIVSPEGKQIGRSLRFATTHKGADSLMRFIFKNIGNSPCVFGMEATGHYWYPIYSFLKAKRYTIYVINPIQSDSLRKMYIRQTKNDSIDSFLIAEVIRFGQFGTTSMADENILAMRQLCRYRDSVISSRTEIKLRIGTIMEQIFPEYEKQFSSLWVSTSMGILEKYLTPENIENTPIDELFEIIKDKSHNRLTKAKAISIKEAAADTFGIKIAQDAFSFQLKQLIDRMNFLDKQIEALDIEIMKYYEQFDCYLHTIPGIGIIGAATILAEIGDISRFKNSSALVAFAGIDPTVRQSGEFNSTHNHMSKRGSPYLRHAIFLAATTCSFHNSPLNAYYKKKRDQGKHHLTATGAVARKLTTIIYAVLRDSKPYEPKKFC

SEQ ID NO: 125083 - protein, 348 aa, unidentified
MLADQLDYVVGVDPHRDVHALAIVEVRTGGVVFEASVAASSGGYARALELADEHAPGRRAFAIEGTGSFGAGLTRFLSGEGERVLEVGRLRRERRSGGKSDALDAIRAARSVLGQKRAAEPRAGGEREALRALMAAREGAVNARRAGLCQLRDLLITTPEPLRSELRPLSRAQLLRRLAAARPERRRDVELRGTLQALRTIARRVRQLTAEERELAGEIETLTRKLAPQLLDQPGVGPLAAAQILISWSHRGRIRSEAAFARLAGCAPIPASSGQTIRYRLDRSGDRRLNRALHMILVTRRRTHPPTIAYINRRVQEGKSGREASRCLKRYLARNLYRLLEHGAPLAT

SEQ ID NO: 125084 - protein, 333 aa, unidentified
MIQLEEGIQMNKPVLGIDISKLKFNICLINSNQKPRHKVFPNTLSGFEQLITWLSAQNAGDAQTCLEATGTYGEALALFLLQAGYYVSVVDPAAVKAFAGAGLSRTKTDKVDADLIARFCLSQEPEVWKPPAPEIRELQALVRRLESLIEMRVSEENRLSSGIVVEVVRRSLEEHIAYLIEQTKHTERMIREHIDNHPDLKRQSELLDSIPGVGQTTAALFLAEIVDIRQYKSARQVAAFAGLVPGERHSGTSVRGKVRLSKIGNARLRKALYFPAITALRCSEFFKQWASGMRERGKCKMSVIGAAMRKLIHLAYGVLKTGKPFDPNWAKTT

SEQ ID NO: 125085 - protein, 403 aa, unidentified
MKHVIAFDISMGKSYMVIYNAHKQCIFEQELKHSKPAFEELQKKILKLTNETGEPPAIVFEATGIYSRQLERFMQNNQYSYCLLNPLEAKLQCDSLRIHKTDRSDAHRLALTHFTVTRRVSHKTDNVYLQLRSLSRFYSELDGELSILRGRMHKVIQLTFPELEKMFTSKSDLFLNFVQLFPHPDYVVPLSKTVIKNRIRANTNKKISTSLAEKKALQILELAKHSYPAVSQDDVLCNQLKVYAKRYQELLHQKQCCINKMVDMAEQRPEYRIILSIPGIGPNTAVRLMAEIGDMTRFENNKQLNAYAGIDIRRFQSGKTFYKDKINKRGNKHLRKLLYLIIQNMIKIRRYGRNHLVEYYDKLKTQPHNKCHRVASIACANKLLKLLLHLITHNIHYDYRLTA

SEQ ID NO: 125086 - protein, 342 aa, unidentified
MKEVTIIGVDLAKHVFQVHGATADGSVVLRKTLSRSQFRRFMAEQPTCVVAMEACATAHYWSRQMAEIGHDVRLIAPIYVKPFVKRQKNDAADAEAIVEAALRPNMRFVPVKSAETQAHTMLFRTREQLVSQRTEAINALRGHLAEFGLIAPQGVSNLPRLVELIDDADSDLPDLARDLARLHLERIAHLSALIDQLAQKIKEVSRKSVVARVLRTMPGVGPICAMAIEAFAPGMDTFKSGRDFSAWLGLIPRQHSTGGKQRLGRTSKMGQRDIRRLLIIGAMSVIASAQRYKRKSGAWLQDKLNRKPRIVAAIALANKMARRIWAMLTKGETYNASVSAPA

SEQ ID NO: 125087 - protein, 425 aa, unidentified
MRAKTSDVDDLMVLYPSCAGLDVHKKTVVACIITTGERGKVSRQVRTFATTTVHLLELSDWLAEHEVSHVAMESTGVYWRPIFNILEATFEVILVNAQHMKAIPGRKTDILDSQWIATLLRHGLLRASFIPPRPIRDLRDLVRYRKSLVYARNQEVNRLHKLLETANIKLGSVASDILGKSGRDMLASLREGVTDHTMLAELARGKLRGKLPDLREALEGRVQAHHRLLLGHLLDHIEFLEQRVQTLEGELEPYLNPYQAEIALLVSIPGIGETTAATIVGEIGVDMSIFPSAKHLASWAGVAPGNRQSGGKRLKAHTTKGNTRLRAALAEVVWVISHTKDNYLSAQYHRLARRIGKAKAIVAVSHSLLVIIYHMLRDNKEYSDLGSTYFETLDQDRVRTRAVRQLQALGYTVTLQTSAPKEESA

SEQ ID NO: 125088 - protein, 419 aa, unidentified
MTDLSIAHSEPILAAIDISKARHEVLIAVPGKKRRRRLTVLNQLDEFNRLTATLTGYDRPVRVAFEATGNYHRALAFHLGAAGFEIKLVSSVALARTREALHNSWDKNDPKDAQVILHMMQIGNEQFYHDPLMQGTNDIQELSKTHDIISKSKTELWHRVLTHYLPLYFPEADRFHRSSRSDWFLAFLERYPSPHFIASMGKEAFIADAWETVGRRVSKERLLADVYETASVSVGLPVEPDSDAIRMFRMILGEGRSLIAQRNKIEDRAVELLKDNPDYQLLTTIPGIGPINALTILAEAGNLRRFNHHRQFLKFCGMDLATIQSGTFRGQTKLSKYGNARLRRTLWLAGQVAILQRANSFRDKFERYISKDRQNTHLRRKAYTAIAAKMARTAHAVVKSGEPYRPFFEGASNGRRTFL

SEQ ID NO: 125089 - protein, 347 aa, unidentified
MLADEVDYVIGVDPHRDSCALGFVQAKTGGVTFEAEIKANEKGYRKALGLAERHAPNNRAWAIEGTGSYGSGLARFLQARGERVLEIGRVKRESRSQPKTDAIDAVRAARSALGKKRQALPRSYGEREALRALMATREGSLKAKRAGLCQLRALIVTCPEPLRSSLTPLTRARLLARLARLRPDKRGEVELRGTLISLRVLALRIQALTLEERELKREIERLVRKLAPALIREVGVGPISAASVLVAWSHSGRVRNEAAFARLAGVAPVPASSGQVVRWRLDHGGDRKLNCALHQIIVSRKKVHRETIAYVERRISEGKSKREAMRCLKRYLARHLFRLLEEAPLAA

SEQ ID NO: 125090 - protein, 410 aa, unidentified
MLLLLVGDDWAEDHHDVEIMDPAGRTLAKARLPEGIAGLARLHALIAGQLGDDAEQVEVRIGIETDRGPWVAALTAPGYTVYAVNPLQAARYRDRHAVSGAKSDAADAHTLADMVRTDAHQLRPIAGDSPDADAVKVVARAHKTLIWERTRQTQRLRHALREYFPAALDAFDDLDAADTLALLAKAPDPTAATRLTRAQISAALRRARRRDVDTKTTAIRAALRTPQLGRPAVVVAAYAATTRAAVAVLATLNAQITALEAQVGAHFRRHPDAEIILSQPGMGPLLGARVLGEFGDAPGRYADAKARKNYAGTSPITRASGRRKTVHARYVHNDRLVDALMLQAQSALQASPGARAYYDRQRARDLDHNPALRQLANRLVGILHGCLKTRTRYDEATAWSHHNEDQQTAA

SEQ ID NO: 125091 - protein, 403 aa, unidentified
MEQIKYGFGIDMAKDKFDACLSTIDTAQQVTVLTRASFDNTQKGFGAFLQWAGKNMPLSLSAVFLMEATGIYYEGLAWYLYDQDCVVSVVLPNKAKKYKESLGLKSKNDKIDAQALSRMCCEQRQTTWQPFSRSIYTLRIITRQIESLCAQTTATSNQLHALQYGMYRDKSTETMLQKQLDMYAKQKAALHQRVKQIVAADPRLKAKFDKICTIKGLGLQTLAVIVAETNGFAAFESAAQLASYAGYDVVENQSGTRIGKTRISKKGNSRIRRAMHFPAFNMVRYKIGGMVGLYTRVYELRRIKMKAYVAVQRKLLTIVYALWKKDEVFDPAYQHPSKTSREMEAVPSLAAAPAADTDAVVLERQQPSDRKEITPSNTDGVTQDRHPSKPRRMPSLATVKLAT

SEQ ID NO: 125092 - protein, 415 aa, unidentified
MDDRQLWYAGVDWGSQSHHVVLTDGDGRKIGERSFKHGGEGLAEMAAWLMAASCAAEPGQILAAIEVPHGPVVETLIERGFKVHAINPKQMDRFRDRFTMAGAKDDSRDAEVMASALRTDPRCFRSLAAADPIIVELREWSRIAEDLGVERNRLINRLREQLWRYFPALLELEDDLGAEWLLELWEAAPTPNTASRLREATIAKLLKRHRIRRFDAASVVNTLRRPPVRVAAGTVEAASAHVALLVPRIRLLNRQIKDAHSRIDGLTARLMPAEAAEPGQKKQHDAEILASLPGVGRTVLATLLAEASDALQRRDYAALRSLAGVAPVTKRSGKSCVVVRRQACHDRLANAVYHWARVAVQHDPRSRAKYAELRRRGHSHGRALRSVADRLLNVACAMLKSGAAFNPSSAAQKPA

SEQ ID NO: 125093 - protein, 460 aa, unidentified
MGRKGKRTKGMEEAHPFTGMSQVNPNAAGVDIGAVEIVVCVAGDESTQIVKAFGNYTVDLQAIGRWLKEYQIRTVAMESTGVYWIPLFEELERQGFECLLISSRSLRRVAGRKSDIEDAQWIQTLHSYGLLESSFRPQAELIALRTLLRHRSQLIEHRSPHIQHMQKALLQMNVQLSQAVSDVTGVTGRAIIWAILAGEREPQKLAALREPGCKKSEEEIGKALTGTWREEHLFVLKQSMEMYVFYTEQVRACEEEIERVYGETRPDWEAGEVKPLSQRKRNSHSKNKPQNEEGIRSHLKCISGVDLSVVDGFGVSLAQTVVMECGSDMSQFPKDEHFCSWLGLAPKHEISGGKVLKNKTLKTKNRAGQAFRMAAQSVKQSDCVFGVMYRRMRARLGPAQATVATAHAIARVVYRMLKYKVEYETISVEEYEKKYKEQQLKYMKKRAKKLGYQLVQLDPA

SEQ ID NO: 125094 - protein, 397 aa, unidentified
MYIVGIDIAKRKHEAAVINGDGAVVIKPFSFTNNCSGYNRLLAMLKRAKLQPSELSFAMEATGHYWLALFTRLQKEGFRVQVINPVQTNSIRSFYIRQAKTDPRDALLIAEVIRFGHFSESTLHPENIYELRELCRGRHAIVSMQADVKRKVVALLDQVFPEYETAFTNMFGDTSMAILQTCPTPKELSEMRLEELCHLIEVSSHKRFRMAKAQELQELARNSFGFAMAGDVFSTMIRLYAKHLDFLKQQVREMDRKIAEIMETLDTPITTITGIGPTLGAYILSEIGDINRFSSSAKLAAYAGIDPTMRQSGEYNGVRNRMSKRGSPYLRHAIWLATSSAVLHDPALKLYFQKKRDEGKPYMASVGHACRKMVSIIYAVMRDNKAYVPCIPSEISA

SEQ ID NO: 125095 - protein, 361 aa, unidentified
MAKARTLVGLDVHAAKVVAAILDAETGELRFQRLGGESGPVVELCRVLPGPVRATYEAGPTGYGLARGLAAAEVQCLVAAPGKIPRGATDRVKTDRRDAEHLVRLLLAGKLSAVRVPGPAEEAMRDLVRAREDLRVDLMRARHRLSKLLLRHEIRFEGPGKNWTERHLAWLATLEFADLAAQATFDDYRGAVEALLHRRGELERQIEGLIPASAWATEVGRLRCLRGIDTLTAIGLCVEVGDFARFGKAGQLMSYLGLVSSEHSSGESRRLGSITKSGSRHARRLLVEAAWHYRNPPRVGREIERRQQGQPAAAVAVAWSAQRRLHRTHSQMRKRNKRSTVTTVAVARELAGFCWAIAQIE

SEQ ID NO: 125096 - protein, 369 aa, unidentified
MKKTIKNIGLDVHKNSISIGIADEGRDGEVRYYGKIDNDMNQLDKVIRKLISKGAILRFVYEAGPCGYAIYRYLTQNAMDCVVIAPSKTPQQSGNRIKNDRRDCLSLARLHRAGELTPVYVPTAEDEALRDLVRAREDATRAVRTAKQQLGAFLLRHDIIYTGRTKWTKAHFNWLADIAIAHPAQQIVFQEYIDTVTNCSNRVQRLSEHVRLQSIQSRQHELIEALQSMRGVSLIVAATIAAELGDLTRFENPGKLMAFLGLIPSEHSSGERVSKGSITKTGNGHVRKALVAAAHAYRFPARKSRAIRKRQEQLPEGVIEISWKAQCRLCTRYQYLTAKGKNANVTKTAIAREIAGFSWAIAQELSQAA

SEQ ID NO: 125097 - protein, 334 aa, unidentified
MDTHKDTHVAAVVTVLGTVLDSRSFPATADGYRQLLSWARSFGVMRRAGVECTGSYGAALTRYLQAEDVSVTEVNQPDKQARRRHGKSDSVDAHAAAHAVLSGRATATAKAGHGSVEMLRLFKLAKASAIKSRTQAINQLKAVLVATDPALRENLSGLSIARLVRACTQLDAGTISTASDAARHTLRLLARRVQNLSEEINDLTTRMKHAVQSTAPTLLDQHGVGPDIAACLLVAAGDNPERLHSEAAFAALAGVSPVEASSGKTQRRRLNRGGDRQANAALHFIVLSRLRWDHRTQDYMQRRLAQGKTRREVIRCLMGLSGSWERLRSVAVSR

SEQ ID NO: 125098 - protein, 346 aa, unidentified
MMIIGCDFHPSWEQIAWLDTETGETGERKLIHADGGAERFYRQLPAPALIGMEATGNSHWLVDLLTELGHELWVGDAAQIRASYVRQQKTDKRDAAHLLQLLVEGRFPRIWMPSSAVRDLRQLLLHRYKLVIIRARVKNELQHLCLNKGVQRQHKLWTKAGQQVLRELPLKAWAGRRRDDLLGLLAMLDQQIEPLDEAVKAEAQRDKMALLLQTQPGVGPITALAYVLTMGDVRRFPRGKQVASYLGLIPREHSSGGRQHLGAITKQGNRMLRMLLVEAAQTAVRLDPEFRKEYLHRCHQKPKAVAKVAAARKLAVRLYWMLRTQKPYPDVVRIESSPRVRLAGEN

SEQ ID NO: 125099 - protein, 370 aa, unidentified
MLDTTTFIGLDVHARSIKAVSLDVMTGEVRAATFGYDAGAVAEWVRSMDPRARCVYESGVTGFDLQKRLSGLGVDCVVGAVSKMIKPSADRRRKNDRNDAEFLARMLSVGNVVEVWVPDDECEAARDLTRALEDARDDLSRSKQRLSKFLLRHGLVFDERTPTGRRKGNWTRAHWSWIESIRFAEGADNDVLAYYVDAVRRAAEEKARLEGLVEAEARKPRWRKRVDSLRCLKGVDTASAADLVFEAGEFSRFRNARSFAAWVGLTPSEHSSGESDRRGAITKAGNKHLRKTLVEAAWHYLTCSGRPKDLARGQAPDRGARRHAAKGVRRLVERREALLARGVHGNKANVATARELACWVWAVGLMAEEA

SEQ ID NO: 125100 - protein, 342 aa, unidentified
MDYYAGIDVSLEASSVCVVDGAGKMVREAKVASEPEALILFFQCLGLPLARIGLEAGPLSQWLYAGMKAAGLAVELLETRHVRDAFKAMPVKTDRKDARGIAQLMRLGWFRPVHCKSVSAQEVRALLTARKLVQSKLHDVEMSLRGVLRGFGLKVGRTTPRLFAGRIVELTREHPALGAIAKALLAVHEVLLREFNGFDKQVRKLARSDGRARLLMTAPGVGAIVALTYVSAIDDPARFSSSKRVGAHFGLTPKKYQSGETDVTGGISKTGDAGVRCVLYEAANVILTKPVRGGSLKSWAAKLARRAGMKKAKVALARKLAVILHRMWADGTAFGAVKASAA

SEQ ID NO: 125101 - protein, 338 aa, unidentified
MEWTVAIGVDTHKHMHVAVALDRFGTQLGSREVATTESGYRSLLAWALELGLPAFAVEGSGSYGAGLVRFLQLAGVAIWECERPRRRERRRGKSDLIDAALAARRLLSGDGLCLPRGGGRREELRLLMIERRSAIQARTAALNQLSAIVVTAPEPLRQRLGRLSGERLAGGAARLRPGDDVRTAVVHRLGRRAERLSHEVTEVDRRLLEILAEVAPALLAECGVGPVCAAQLLVSSGDPNRMASEASFAALAGTSPLDASSGQQRRHRLNRGGDRQLNRALHVIALARIHHHAETTAYYQRLLAAGKTAREARRCVKRALARYFYRRLHEIPPLALTT

SEQ ID NO: 125102 - protein, 355 aa, unidentified
MNDVKYIGLDVHQATISVVVLDSTGHLVMESIIETKAATILQLLHGLSGSLHVTFEEGTCAAWLHDLLKPHVAKVVVCDPRKNALLKAGNKNDRIDARKLADLLRSGLLSPVYHGENGIRTLKELARSYLTLTRDATRVMNRLKALYRSWAIPCAGQRVYAPRYRTEWLAKITEAGVHRRAEIYYQQLDALRSLREQVRRDLLAESRKHRAMNLLRQIPSIGPIRAALLIALMQTPHRFRTKRQLWAYSGLALKTSTSGEYRIVEGQLKRSKKFLAIRGLNANHNHDLKNIFKGAATRAAAVPGPFQEFHAGLVARGMKPTMARLTLARKIAAITLLVWKKGVGFDAEHLKQQAA

SEQ ID NO: 125103 - protein, 389 aa, unidentified
MLFDHPSDRPAAIRTQFGAIFVSLELSRSNWLITSLCPGKGEKMSMHSVTAGDLAGLMKLFADLRSKAQARTGESYPMITIQEAGLDGFWLHRVLQQERIESHVVDPASIATPRRRRRAKTDRLDGETLLRALLAYKRGEPRVCAMVVAPSPEEEDRRRLCRERRALIAERIEHVNRIKGLLFAQGISGYAPTRGDRRRRLETLRTGDGRMLPAHLKAQISRELDRLELLLEQIRQVEAEQDALLAAEARNAAGPEAAPGPVAMLLALKGIGANFTASLCSEAFWRQFANRRQVASYAGLAATPWRSGGIAREQGVSRAGNPRLRTTMIQLAWLWVRHQPQSALTQWFKACSQRGRKRAIVALARKLLVALWKYVTAGVVIEGAVMKTA

SEQ ID NO: 125104 - protein, 409 aa, unidentified
MAYKIAGIDVHKKVLMVVILDAEAMEAPVARRRFGTLASDLQMLAGWLQEQGVEEAVMESTAQYWKPVWYELEDLMTCHVAQAFSNRAPRGRKLDFRDGERLVRRLVAKELFLSFVPGPEQRGWRSMTRMRVQLARDRGRIHSQVEALLEEMRIKLSSVITDIFGDSGQRILWALAKGERDAQRLADLGDERLQCTEEQLRDALTGRATPDQQKLLKLHMERLQLVDEQIAELNRMIAAAMKPHEDAVVRLAEMPGFGVDSAQQYIAEVGPEAATFASAGELTSWSGTNPGANESAEQNHSGRSAKGNKYVRRLLTEVAQATVKAKGSHFQLVFRRLLPRLGYKQALWAVVNRVNRVAWKILHDKVRFVEQSLERDAKAEQDRAKRLARELRKLGYRVFNPPSSAAAHP

SEQ ID NO: 125105 - protein, 345 aa, unidentified
MKITTVGIDLAKNLFQVHAVDERGRAVLRKQLRRDQMARFFANLPPCLIGMEACASAHHWARTLQKFGHTVRLMAPQFVKPYVKTNKNDVADAEAICEAVSRPNMRFVPIKSVEQQAVLSLHRVRQGFVRARTAQGNQIRGLLGEAGLIIPKGVVNVAKRVPALLEDAGDEVPASFRRLIQRLTEHLKELDRQVDELEAQIKAWHRGSELSRKLEKIPGIGPLGASALVASIADATSFDNGRQLSAWLGLVPRQDSSGGKPKLLGISKRGDVYLRTLLIHGARSAILAAQRKAVNTNVWLASLLNRRHPNIAAVALANKNARTVWALLAHGREFRADYAPEASAA

SEQ ID NO: 125106 - protein, 353 aa, unidentified
MKYVGIDLHKQTISVCAVTKDKQILVRKRFYTRETEGIRGFFADLGEFEMVCEATGSYEWLFRLLEPLAARTVLAHPGKLRVIAESTRKSDRHDAQALAERLAEDAVPQSYRPTPRQRDHRRLVRQRIVIQRRITAVKNRLRWLLADYNADVRHLFTEAGRAHFEQAPLSEADRFVGQQYWHQLEFYRSQLRQIGRRLAEFARSAPAREQEARALLRTIPGVGPITTEVVLAEVADIARFRSQKAVVAYAGLAPGQRESAGKRQELHIEKKGSRQLRWIVCQAAWQLVKRSQRWRSVYLKLKARMKAQKAITAIARRLLCLMTSILQSGRPYQPAHPLAPSGTKPLGAAASSN

SEQ ID NO: 125107 - protein, 333 aa, unidentified
MVDGTKGSHRKEGTTKMSENNINAAGIDTGKAKLDVALGGGKARLQIDNASSGWRELATWAKRHNVDRIGIEASGGYERGVVAYLREKGFTVILFQPLQIRAYAGFRLQRAKNDRIDADLIAACTAATPTVRQAPDPRFQAFCEHLTLIEQIEEDIARAKTRREGFRDGRHLELLASEIKRLKVWRTAELKRLLSALFCHDDLANRLTLIESIPGIGSRTALALLIRMPELGSLSREEAAALAGLAPYDDDSGKHQGLRHIAGGRERLRRSLFAAALPAAFQWNPSLVALYARLTAAGKSHKVALIACARKLLIFANTVVARGTPWTELPATH

SEQ ID NO: 125108 - protein, 421 aa, unidentified
MNETTKPVERVIGLDAHPDSFTAAILRGPTPAAAVVEKVFNKVPISQLSRWARKQTTAEDWIVLEASGNSFQIVRTLATVGRQAKVLESCQMGRLKEAHANNDKISAVRIAKAYLAGTAKEVWVPDAKTQERRDWFHAHRKAVKRATQARNSLLSYLSDRGVRLRKGTPLASGPETEQRLRAAQAWSPRQWQVIEGLRLQLRHADEQRRHWRSLIAQEVLADPQLLALVRLCGVREMVAFALAAFIGDIQRFSDPKKLVKYVGLNPAFDDSGQAQWCGGIGGHGRKDLRCLLMEGAQAILRCSKTPLAQWGKRLLARKGQINLVVAAIARKLTVAVWYLMRGRWTPLEEIEDRLALKVGKMISQVGAAGLDKLGKTRKTFRQEIFQSLKTGKTYVLDLDKKFTPKVALKRPSTLTQEYGLR

SEQ ID NO: 125109 - protein, 411 aa, unidentified
MSKTTTGNRPELKPVNVGAAAIDIGSKMHMAAVDPTCTDAPVRAFGTFTQDLHDLADWFNACGVTSVAMESTGVYWIPAYEILEQRGFEVILVNARYAKNVPGRKTDVSDAAWLRQLHSYGLLRGSFRPDGEIATLRAYLRQRERLVEYAAAHIQHMQKALMEMNLQLHHVVSDITGATGMRIIRAVVAGERNPDVLATYRDVRCHSSVETIRAALVGNDRDEHVFALTQSLELYDTYQAKMLDCDRKLESLIAALTDRGTKPVGKLSRPRVKTKQVNTPSFDVRAALYGVLGVDLTEIHGLGPSLALKLIGECGTDLRAWPTAKHFTSWLCLAPGKKISGGKVLSSRTRRSSSRAAALLRLAATTIGRSDTALGAFYRRLSSRAGKAKAVTATARKIAVLFYNTLRHGMT

SEQ ID NO: 125110 - protein, 353 aa, unidentified
MAEVTLWAGLDLGQEYSHVCIVNEAGIPVHEARCVTDLACLTEVLSTATLKSLEMIAVEAGSEPHIVRKLRKAGYPLAIFEARKASRFLAIRRNKSDASDARGLADLARLGRYTVSQVRLKSIECQQLRGQLALRRRLVKVRVATELAIKSQLALYGRRLGKQYSASLLAERVSSQVLQLKAEEGVDLAADLEPLVEMATSLRLHVDQLDKRLQKAASENSVCKHLMSVVGVGPICALSFYSAIEDPERFSKPTDVAAYLGLVPRRYQSGEVSYTRGITKTGSTMTRTHLVNAALVFTTYGPDSALKTWAGGLRERTGVRRARVALARKLSVVLLIMWKTGASFEPFPKAAQS

SEQ ID NO: 125111 - protein, 439 aa, unidentified
MILIREVADASVIMGISKPAGLKSPCGEVKIVNPLFVGIDVSSRSNVAYLMKPDGSKHSSFSVQNNLGGAKMLSERIVSALSSMRLSDVVIGLEATSIYGNNLVYALREDGSLSRFQRKIHVLNPKQVKKFKEAYPDLPKNDFVDAFVIADHLRFGRIAKEVYMDDYRYQALRTLTRARFDVIQNLTREKQRFANYLFLKCSGIAQEKDIQNTSATTIALMEHFETVDDLANTDLDELTDFIAQAGRGRFVDPDATARAVRAAAKGSYRLPKTVNDTVNQAMSVSIASMRALKEQVKVLDKAIEQQFEIIPNTLTSIPGIGKVYSAGIIAEIGDIHRFDSQASVAKFAGLVWTQHQSGEFEAEHSRMIKSGNRYLRYYLLEAANSVRRCDSEFRRYYDLKYHEVNKYQHKRALALTARKLVRLVFRLLKDNRLYIPPEG

SEQ ID NO: 125112 - protein, 396 aa, unidentified
MKSNTQNAKIEAITEKTLVLGIDVGSETHYARAFDYRGIEYSKKPFKFSNTEAGFVTFKEWILDLKERHEKDKVVPGMEPTGHYWFNLGKFLQDNEMKPVLVNPHHVKKSKELDDNNPTKNDRKDPKVIAGLVREGRYMIPYLPDGVYADLRTASNIRFQLQAELTRIQNRISRWFNIYFPEYKTVYGKPDAKSGILILKAAPLPEDILTLGIDGVNQIWRDAKLRAVGKARAKTLIEAAEHSVGSKEGTVSARMEIRMLLEDYESRNIRLQEVMALIEELVAQIPMAEKLLEIKGVGIRTVSGFLAEVGDISRFNNPKELQKLAGLALVENSSGKHKGETTISRRGRKRLRYLLFEVAMSLVAKNPEFRELHNYYTTRRLNPLKKCSHLWRLQPS

SEQ ID NO: 125113 - protein, 344 aa, unidentified
MPTIQIGVDLAKTVFEVAISDAPGVVTARRRLSRAAFPRFLAGQAPAEVLLEACGSAHHWGREAARCGHRVTLLHPADVARYRDGNKTDRADAKALLEASRNHALTPAPVKSVEQQAVLALHRIRQGYLRTRTARINALRGHLRELGHTIPVGARRVTLDARAALTDDTIPPFLHAALLALLEEIHALEHLAESIRTTLAQLVPHMPEARRLMTVPGIGVLTATAMVASVGDIRRFRSGRHFASWLGLTPREHSSGASRCLGSITRKGNSYLRMLLIHGARSALRAGAVTNQPDDLRTWAAEVSRRHCHNVAAVALANKLARICWRAWRDGRDFERREAQVTHC

SEQ ID NO: 125114 - protein, 407 aa, unidentified
MIAGIDVHKKMLAVVIRRQSEQVQYEQRKFGTTRAEIQHLEAWLRARAVEEVVMESTAQYWRPVWYGLESHFRLHLTHPLKTRAPRGRKSDFRDAQRLADRWSAGDLEASFIPGAEQRAWRWLTRTRVQLKKKLGVIHSHVEGLLEQGGIKLSAVVSDLFGVSGWAMLERIAEGVTNVDVLAAEARGVLRNKDAELKEALAGRLEPVYRLLLKQHLEQVRLLRRQVEEIDAALAEAMAEHVAALHRLTRMPGVDLYAAEELVAEIGPRAAAFPSAEQFASWVGVCPGSQESAGVNYSRRSAKGNRYLRRLLCQIAWAAIHTKATFFAGLFARLKPRVEGKGAAWAVAHRIAKVVWRVLHEGVEYQEKGSAPPNERTLVRKFKRMLKEFGRLGLDVRALVDQQLPAPA

SEQ ID NO: 125115 - protein, 342 aa, unidentified
MEHEPANYQLYVGIDIAATTFTAAWMPPGGSPTPPVTHPQTPQGFAALQRQFAATGSAPDTTLVVIEATGSYWIALAVTLHATGYAVSVINPLQAHHFAKAQLRRAKTDPLDAQNLAQLAAALRPAVWTPPPAVYHEVRQRLTARDALVTMRQQTRNQRHALLQWPVVVASVHNHLDGVIAMLDARIADLEAEIAAVLATSDWAESLACLTSAPGIGMLTAAWLLVSTMNFTLCATPEAATAYAGLAPMPHTSGTSVRGRAGIGHGGQGRLRTALYMATLAAVRYNPAIKTFYTRLRTAGKPSKVARCAAARKLLHLAWALVTKQQRYQSNHRSLDSPMLAA

SEQ ID NO: 125116 - protein, 402 aa, unidentified
MKASKQYLRFCGIDMAKQKHVACIIDQDGRYLLRPKSIRNDADGYQQILNCLKQSGRTKSILTGMEATGHYWYSLHDFLTRQGYTVAVLNPIQTAQQAKQAIRKCKTDKYDAFHIANLLRTGQYKAAVVPGEFAMTCRQITRLRYRIVKQAAMIKQLVNSRLHPAWPEYEGLFSNKFGTTSMKLLQTASTPKELMELDPDDLSELIRKASRGRFGPAHTQKILHSAKNSVGMQRGHYGISTGIKFLLEQIVALEPVRKKLDVEIEKLAAKLPEYLFTLPGATELTIVSLYGEVDPIETFKRPSQLTAFAGLDPKVFQSGQYDAPRRHISKRDCPYLRRTLWQMAYRAVCNEGDLRDFWRRKHRQNKHHLVAVTAAANKLCHIVWRIMTDRRDYIPKGYNPKS

SEQ ID NO: 125117 - protein, 335 aa, unidentified
MGKFIGIDLHSNNSVVVITDAEDRVVYQKRLPNNLEAIEAALAPHREEAVGVVVESTYNWYWLVDGLMDRGYRLHLAHATAIKKYEGLKYSGDFADAAYLAQLLRLGLLPEGYIYPREQRAARDLARKRMQLVRQCTAQILAIEGILMRQTGARKSGNTIKRLSAEQVEELEFAPDVALAVQANRAVSDVLQQQIAVLEQRLRERVSLHPEYRLLRTVPGIGEVLATVIMLEAGPVTRFAEVGNFASYCRCVDTLRESNGKKKGEGNGKNGNKYLAWAFVEAANFALRFCPQAKSFYERKTQGVVAIKALAHKLARACYHILREQKPFEVSRCFA

SEQ ID NO: 125118 - protein, 409 aa, unidentified
MNKVDIAPFEVFCGIDVGKSLNHIVALDRHGDKPLINRKVPQEEAEIRAALEEAGDFGLALVIVDQFGAFGRLVVGVAKSMDIPVAHMSPRRFRQVAETYGEDKFDEKDAYILADASRTTPRNIEFVGNRAESMAEIKVLSSRRDDIVEERTRCYNRLHDFIHQVSPPLEELFSKRKLHNDLEIRLIARYGGPIGFRQAGRARASTWAAELKYHCVDGPKKVEQVFDVLDRQTVMLPGAAVIEEQIRSIASRIIELLAEEKRLNLMIEQRAKMIPEVDLLQSIPGVGPVYAALIAVEIGDIGRFRDSNHLASYAGVAPRKEESGTSVHKRRKRKGGNRRLKNALMQSSQRSVQCDPLARAYYERKRAEGKKHLQALRALARHRVTVIFAMLNEGTFYEPPVEVDENGRG

SEQ ID NO: 125119 - protein, 410 aa, unidentified
MAYKVAGIDVHKKVLMVVVCDTEASTWEFQRKRFGTTTFDLQQLSAWLRERGVQQAVMESTAQYWKPVWYELEPQMHLALAQAFSNRAPRGRKHDFRDAERLVRRLVAGELILSFVPEPEQRAWRTMTRMRVQLTRDVSRLRSQMECLLEEMRIKLGAVLSDLLGVSGVRILRALAQGERDPQKLAALGEESLHCSEKHLIQALTGHPEPPHRQLLGLYLDRYQLLREQMQRLDEMIAQAMKPHEEAVIRLAAAVGFGVDSAQQVIAEVGTDAGMFATAANLAGWAGTCPGQEETAQENHSSRSPKGNKYLRRTLNQCAHAAVKTKGSHFQVVFRRLLPRLGYNGAIWAVAHRLCRLAWKILHDKVTYVERGDSDPATKKRRAQALARKLRNLGYQVNITLITQPTAATA

SEQ ID NO: 125120 - protein, 349 aa, unidentified
MVVLGIDAHKRTHTAVAVDEHGKRLGTKTVSATSTGNLELVRWAGQFGEHTFAVEDCRHLSRRLERDLLAAGETLVRVHPKLMARVRRSARERGKSDPIDATSIARAAQREENLPTACLDGPERDVRLLVDHREDLVNERTRSQNRLHWHLHELDPSLELKPGSLDRYKVLDQLAEVCADHEGLVAEIAAELVERIRILTVRINGLERQIAGLVKDLAPNLLDLKGCGALSAAKIIGETAGASRFSDRSRFARFNGTAPIPVWSSNNVRVRLNRGGNRQVNAALHRIAVTQLRSGPGKEYVDRRMAKGNTKKEAIRALRRRISDEVYRRLISDEMARSASNSTCELVAA

SEQ ID NO: 125121 - protein, 388 aa, unidentified
MPQTPNDLSRSLTALEQTTTLVAVVEMSQASWLVAGMIPGLGRQPLKKIAPNEAALLSLLQRWQEEAIKICQTIRRITVAYEAGRDGFWLARWLCSRGIEAHVIHPTSVAVSREHKRAKTDRLDTAMLIRVFLGWLRGERGHCGMVAVPTLEEEDAKRPSRERENLVGERTRIINRMKSALVRLGIRGFKPELRRAPQHLEKLRTPENVPIPLRTLEELRRDMARLAMVRAQIEAIEQIRLQRLEQAPQDVAHAMVRMLANIIGVGVETADMLVREILAKELRDRRALARYAGLTGSPNESGSKRREKGLAKSGNARVRRGLIQLAWRFLRFQKDSALAQWYRTRTEGAKGARKTSLIVALARKLLIALWRLVTIGEVPQGIVLRQAT

SEQ ID NO: 125122 - protein, 312 aa, unidentified
MMLYAAIDIHKRMFQAAVLDVETGETSERRFGATREELNDWAMPLQGKLAAVAIEATNGWRWVWRELSARGFDVRLVDPSQAKALRGRIKRAKTDRLDARWLCVLLAKEMLPESWLPPAEIQTLRDQTRLRKALAEDRTRWAQRLHALLTHEGWPCQRARLLTVEGRRWVASLSLSPAARMQVDRLLRLIEAVETELRALETELRRFARGDRRCVALQTIYGVGPILACHLLAELGEAARFRRARQAVRAAGLDPVVDESGDTRRRGHLAKHGAPVLRWALVEAAQHAQRTNSPDRGLYTQAATRVGSKRAV

SEQ ID NO: 125123 - protein, 407 aa, unidentified
MTKVIIGVDPHKLSITIEVVDGHERLLGSGRFSTDRAGYAAMRTYAKTWPDRTLAIEGSNGAGRPLAQGLLEAGEQVVDVPAKLAARVRLFDTGHNRKTDARDAHSIAIVAVRATTLRVLRPDGELEALRMLCDRRDELTRLRVQTVNRLQRLLAELVPGKGKKDLTALQAKAILATVRPRDIAGKTRRRVAAEELADLVAVEAKMKKATAELKVLVKARGSQLMDLPGVGPVVAARTLADVGDIARFADRNRFASWTGTAPLDASSGEQNRHRLSRAGNRRMNHMLHIAAISQIRLDTDGRAYYRRKRAAGKTKMEALRCLKRRISDAVYRQLLADAERAAHANAPDLVGTGPGGHCGASQESSAVDLPPHIDTSDQPLPGPANPTLQASKPVRKSPRRKSPQTTG

SEQ ID NO: 125124 - protein, 376 aa, unidentified
MREKLRFLGMDVHAETIAVAIAEADGEVRNLGTIANREDSIRKFIRKLGTPEQLRACYEAGPTGFVLYWQLTQLGVDCAVIAPTLVPKKPGDRVKTDRRDALKLARSHRSGDLTAVWVPDEDSEALRDLVRQREAAKQDQLRARHRLTKFLLRTGQRPPLGLKAWTERYMRWLAQVRYTQPAQEVTRLDCMNEVEHMSARVKRLEEAILEVVKLAPQPMQDVIRGLQALRGVAHISAVTIASELGNICSRFQSARKLMGYCGVFPSEDSSGNRVRRGGITKAGNAHLRRIVVESAWCYRHLPRVGEKLRKRHEGVPPAIIEIAWKAQNRLHKRYMRLSMAGKDQRKIMTAVARELLGFIWAIAIKAEASCRQPIAA

SEQ ID NO: 125125 - protein, 355 aa, unidentified
MDSVKYIGLDVHRDTISVAVVDQGGRLVMQSVIPTQAPAILDCVDGIQGSLHVTLEEGTHSAWLYDLLVQRVKKLVVCNPRKNALLKSGSKSDAIDARKLAELLRAGMLSPVYHGENSALEVQHLARAYAMLTDDTTRTMMRLKAVFRSQAVVCTGRKLYGKRHHDDYLKELDQDGPRRRAEYLYQELDGLQKLRRQVRHELVVACRKHPAAKWLQSVPFLGPLRTAVLIGRVKTPHRFRSKRQFWAYCGLALETRDSGEYCMVNGQVERRKRPVLVRGLNWNHNHELKNLFKGAATTASAGSGVFQQFYLGLLNKGMQPEMARLTLARKIAAITLKIWKKGEAFNPEHLKSQAA

SEQ ID NO: 125126 - protein, 366 aa, unidentified
MTTIACTDAPSQTGHVEVAAGVDTHQDTHTAAVIDAAGRLLGHCQFQATQRGYAELLAWLRSFGRLLVVGIEGTGAYGAGLARHLHDEQVPMLEIDRPDRKTRRSAGKSDPIDAEAAARAALARVRSGVPKVRTGRVEALRNLRVARRSAVDQRADCMRRIKTLIVTAPDDLRARLRGLAKQELLNTCAGLRPDTTRIDEPEQATKVALRSLARRHAALSDEISELDALIEPLVCAINPDLLALNGVGADVAGQLLVTAGENTDRIHSEAAFAMLCGAAPIPASSGKSHRHRLNRGGDRQANAALYRIVLCRLRWDPRTQAYMRRRTAEGLSKKDIIRCLKRLIAREIYYVLTADRVEPEQLATAA

SEQ ID NO: 125127 - protein, 370 aa, unidentified
MPSMTATSTTVEPDHMVLGVDTHRDTHHAAVVDHLGREVADAEFTTTPDGYRQLLDWARQHGPIARAGVEGTHSYGTALTRHLRHAGVTVVEGDRPDRRTRRTRGKSDPVDAYAAARTALSRPHAPKPKNADGLVEATRVIRITRRSAVKARTQTINQLKSLLVTGPAELREQLRGLKTPVLVKACIALEITTRPTEPAEATTTALHRLAQRYQQLTTEIRAADRELRPLITAVAPAMLERLGVALEVTGQLLTTIGDNPDRLRSEAAFAHLCGVAPIPASSGRTHRHRLNRGGDRAANNAIYTVVLTRLRLDDRTRAYYRRRTAEGLSKRETIRCPQRYVARELYQLLISLPLSSAPLPAQRRVGTAQP

SEQ ID NO: 125128 - protein, 367 aa, unidentified
MKKVSIVKTKQSRNISRQTLTIGLDLGDRNSWYCVLDEAGQIQLEQRVRTNAKALQEVFGAMPRSRIALEIGTHSPWISRLLSELGHEVIVANARKVRLIGESRKKDDRLDAQTLARLARIDPQLLYPVKHRSAQAQADLMMIRARAGLVRSRTGLVNTARGLAKSYGERLRGCNVRNMDPEKAEGLSPELQSALEPLLSAIEELSERILEYNDRIEALAQKSYPQVELLKQIKGVGTLIALTFLLTLEDPHRFGKSRDVGGYLGLQPGRRNSGESEPQLHISKEGDPYLRTLLVQGAQHILGPFGIDCDLRRWGLKLAERGGRNGKKRAIVATARKLAVLLHHLWVSGEVYEPLHNSTRVTVAAAA

SEQ ID NO: 125129 - protein, 408 aa, unidentified
MRLFVGDDWAEDHHDVELMDVAGRVLAKARLPEGIAGMTRLHAMVAEQLGDAGPDEARVLVGIETDRGPWVAALAAAGYEVFAVNPLQAVQYRKRHAVSGAKSDAGDAHVLADMVRTDAHQLRPVAADSAQAEAVKVVTRMHKTLIWERTRHTQRLRHALRGYFPAALDAFEDLDAAGTLELLAKAPDPASAAKLTISQISAALKRARRRGITGKAAAIQAALRAGHLGQPTVVTAAYAASVRALAAILVTLNEQITALQGQVEDHFGQHPAAEIILSQPGLGPVLGARVLAEFGDDPHRYASAKARKNYAGTSPITRASGKKKVALARFVHNDRLIDALMAQAFSALKSSPGARAYYGKQRARGAEYNAALRQLANRLAGILHGCLKTGTLYDEATAWSHHSEKIAA

SEQ ID NO: 125130 - protein, 317 aa, unidentified
MDGIAFEQIVKRGCGIDIHRDEAVATIGGEGITTETRSFKTFTSSLTELKEWLIENGVTDVAMESTGVYWKPVMNVLEGPELRVWIVNARHIKYVPGHKTDKKDSAWICQLLLAGLLKKSYVPPREQRELRDLTRYRKKLIQNIASEKNRIIRILEDCNVKLDSVISSLEGVTGTALIDLLISNGEVTMDDIDAVYHKKLKASKELLFEACNGKIGEHHKYMLQMIRKDIEQTQRLIDELTFRIAVVLAPYNSALEALSEIPGIDRKTAEDIVAEIGLDMEQFPTEKNLASWAGICPGNNESAGKKKAQKPTTGTNK

SEQ ID NO: 125131 - protein, 347 aa, unidentified
MKEQNNRSEFTIGLDLGERRHRFCALNGKGEVVEEGTLGNDRVSLGRLSARYRGALAVMEAGAHSPWISRYLERLGWEVIVSNPRKVRAIYQQERKSDRRDALMLARIGRMDRALLYPVRHGSEEAQEDLLRIKLRDSLVRARVALINSVGFSLKSLGYAVGNPSSERFHKVAMETLPEVVREMIAPSVQALAELSARIAVLEREISLLARTKYPQTLWLQQVPGVGAITALYFVLKIEDPKRFKNVRDVGAYTGLCPRRDQSGASDPQLRISKRGDAYLRRLLVSAAQYILGPFGPQSALREYGLRLAADGTTRAKKRAVVAVARKLCVLLLSLWKNQTPYQPYPA

SEQ ID NO: 125132 - protein, 413 aa, unidentified
MKVIYNNCCGIDVHKTFLIATIIRTTGRKIDYLKKRFSTHSKDILRFKQWLTQHECYDLCMESTGKYWIPVFNLLEDNMNVVIANPKWVRAVKGNKDDKKDSKWIGELFRLGLVPSSFIPPKDIRILRELTRYRYKLVSTRSSEKNRFQNSFTVCNIALDSVVSDMFGVSASAISNYILTSDTFDSDHCVSLLKGRLKKKSDEVIESIDGYHMMQPQKDRALIIRQHIDYLDQMIATIDAYLDELIQPYEPLVKLLCSIPGVKRQSAIIIISEIGSDMSVFGDQKKISSWAGLAPSSNESAGKKKSVKISRAGVYLKPALVQVAHAAKKSTTTPYYKIKFDRIAKRRGKKRAIIAISRMILVAIYHMIQTGELWNPIDLITIDTPEHILQRKKDKAIKEATKLLIKEGILKVS

SEQ ID NO: 125133 - protein, 325 aa, unidentified
MRQPQSQVKPQTQVGLDVSSQTLDAHIRVDGKSFSVPNTDAGFDQLCDVLSAYTVSMILMEATGGYEDNVACYLQLQGFDVVVINPRFARRFAQSMGRLAKTDRIDAAILAQMAFMIDSGPDRDRYIKPVTDEQRKQLSRLSSRRRQVVDLITIEKQRLTHADDYARESINSIISLLNVELKRIESDILRYVKKNFSELANRLLSIPGVGEQAMIVLIADLAELGHVNRRRISALLGVAPFNHDSGKFKGQRRIRDGRQTVRNVLYMGVISATRFNPVIKAFYDSLLLRGKPRKVAIIACMHKLIRIINAMMRTGKPFDTSLHGV

SEQ ID NO: 125134 - protein, 367 aa, unidentified
MQVLYERCCGLDVHKKTVVACVLITSADGQVHKQVRTAATTTAGLLALADWLAALQISHVALESTGIYWRPVFNLLEEGHTIILVNARHMKAVPGRKTDIKDAEWIAELLRHGLLKASFIPSKPTRDLRDLVRYRKTLVQERAQEINRLHKVLETANIKLSSVVSDVLGKSGRRMLAAMIEGVSDAEALADLARGTLRHKLPQLQQALRGQVQPHHQVLLGQIFAHISYLEHSIQQLQREIEQRLCPFEEAMQLLLSIPGIQEIAAAAILAEIGVDMSRFPSAKHLARLRRGVSRQQTKRRQTSLRQDHQGQRPLALRADRSRLEHQSYERQLSLGSVSSFSPATGQTESRHGGGPQLARHHLPYLE

SEQ ID NO: 125135 - protein, 347 aa, unidentified
MKQSNTISIDLAKSVFQVVILNHNGKVLSNKKIQRAQLIPYITKQPASLIVMESCGGSNHWGRSFQALGHTPKLIAAQHVKPFVKTNKNDANDAVAIAEASRRPNMKFVAIKNLEQQDIQSIHRTRQRLIDSRTNLVNHARGLLAEYGLVYGIGVSRFRKALAHLTNTTEYTGEMTAYLKELCCEWYKELLIVDKAIEKQDKKIKAISMSSDQAKRLMQIEGIGPVTATALVATLGTQAKEFNNGREMAAYLGLTPKQHSSGGKARLTGISQRGDSYLRTLLINGATSVINVVGKKNDPKSQWVNNLLCRMHQNKAKAALANKMVRIAWVILARGETYKPELASAMV

SEQ ID NO: 125136 - protein, 433 aa, unidentified
MLKINYMSTLFVGIDVSSKTNAVYAMDFEENKYISSSFGNNQPGADQLVNMIAECMQKHKNLDTVLIVLEFTSVYSVHISNFLSTSEVLMPYKPYVFCVNPKATSNYRKSYIGMEKTDPTDAYLIADFGRVGRTKKLEPWRGGQFIALKRLTRHRMHLSECITREKTYMVSNLYLKFSELQLLEGDDKPFGSLYGATSSAVLTEFLSPQEIIDMPEEELLTFLAGKSRNRISDLSKTSELLRKAARDSYRLDKCMYEPLNISLASSFNCIHAYQKEIKLIEQAIEKCINGMNPNALLILQSIPGIGPIWASGILSEIGDITVFHSSDALAKYAGLYWPKGDSGDFTSEDNKMSKAGNPYLRCYLGEAANSVRKHIPEYADFYARKYAEVTKHQHKRALALTSRKFVRLVFGLLVKNQLYTGEKLDTEYNIESN

SEQ ID NO: 125137 - protein, 415 aa, unidentified
MFKIIRSKCCGLDVHKTWIYACIGIADSNSRVEYKQARFSSFSKGLKELSEWLAKYECTEVCMESSGKYWIPVFNVLETTCDVTLAHPKYTKPQKGNKTDRKDAMWICDLFMCGMIKRSFIPPADIRELRELIRYRTKLTNMITGEKNRALNCLTVSNLKLDDVFSDVFGKSSSSIIQFMLDNPGVYFDVKPFIDPRCKTPIEEIQAAVDGAMSPAHAVKLRECMSHIDQLESHKHMVEQDIIRLSAPYEQELELIRTVPGFDKNPMTAITILSEIGADMSVFPTAKHLVSWAGCCPRNDQSAKKIKSTRISKAGSCLKPLLVQVANALIKSKNHPEFKERYRRLKARRGHKKAIIAICRMLLTAIWNVLSKAEPYSPAGYLSDHQVSEVRRLTQKQALNLLKSRGYVITDEVPA

SEQ ID NO: 125138 - protein, 346 aa, unidentified
MHQNTVIGIDLAKTSFAVIELGHGGDVKRRKTFRRDGLKRFLAKHEPTMVALEACGSSHYWGRWLETHGHKAVLLPPQHVKGYLRGQKNDYNDAQAIAEACLHGAIRPVAVKSIEQQDEQAFHAIRRSLKVESTRLVNQMRGLLAEYGLTVPKSVSAFCRRVPELLEDADNGLSARFRMLLNRQWRRLQTLLEEQTWYDGQLQQQAKEDETCRRLTGIPGVGPVVASAVKSWMGDGQQFRRGRDASAALGLVPKQYSTGGKQSLYGITKRGDAYLRSLVVHGARAVVRTAKHKDDALSQWALGVEARRGHNRAVVAVANKIVRMAWVVVARHEYYRPAENQMATMA

SEQ ID NO: 125139 - protein, 338 aa, unidentified
MTIKVLGIDLGKRNFHVHGVDEHGKQVVRNKYTRKGLLKFLSNLPACTVGFEACGGAHYWARKAEEMGHTAKLMPAQFVKPYVKSNKNDYLDAEGICEAVQRPTMRFVTTRTPEQQALGAMVRLRDSLVRQRNAVINQVHGFMLEFGFEYPKGRTTVTRLPRMVSENEEHFPAMLVSTLLRLYDEFTFLTLQIQDTEKEMEGYVKQDDRGRRLLEMPGVGLITASCLLAWVGDAKQFKSGRELAAWIGLVPKQYSTGGKQTLLGIGKRGHKKLRTNLIHGARSALQWHIETPSRWNEWAKNMLPIKPKPVLIVALANKLARMIWVILARDESYVAIAA

SEQ ID NO: 125140 - protein, 334 aa, unidentified
MENIALIGIDLGKNSFHIHCQDHRGKAVYRKKFTRPKLIEFLATCPATTIAMEACGGSHFMARKLEELGHSPKLISPQFVRPFVKSNKNDFVDAEAICEAASRPSMRFVQPRTESQQAMRALHRVRESLVQDKVKTTNQMHAFLLEFGISVPRGAAVISRLSTLLEDSSLPLYLSQLLLKLQQHYHYLVEQIKDLESQLKRKLDEDEVGQRLLSIPCVGTLTASTISTEIGDGKQYASSRDFAAATGLVPRQYSTGGRTTLLGISKRGNKKIRTLLVQCARVFIQKLEHQSGKLADWVRELLCRKSNFVVTCALANKLARIAWALTARQQTYEA

SEQ ID NO: 125141 - protein, 351 aa, unidentified
MIIIGVDYHPSFQQVAFADTETGECGERRLSHSDGEAEKFYRDLKLRGVSVRVGMEATGYARWFERLLAELGYELWIGDAAEIKTKRVRKQKTDRQDAQLLLKLLLEDRFPRIWVPSPENRDLRQLLWHRHRLVQMRTRIMNQLQAAAMNEGLRRKAGLWSERGRTQLASLRLAPWATRRRQDLLELLDRLDSTIKELTAAVEQEAKKRPEVLRLMTHPGVGPLTALAFVLIIGTPERFYCGKQIGSYVGLIPCEDSSAGRQRLGHISKQGNALLRFLLVEAAQAAVRHDPDWRRRFLHLAMRRERRIAMVAMARRLAVRLYWMWREGRGYQQSVEFGSHAGELAIGHGVN

SEQ ID NO: 125142 - protein, 360 aa, unidentified
MGKGTWVGLDVHAKSVVAGLIQDDTGELRVVRAPHRTEELVRWVGELDSPVRVAYEAGPTGFGLARALEQEGIGCVVAAPSLIARSPAGRNRKNDAADAEHLARLLRQGELVAVRIPDPADEAARDLVRAREDARADLMRARHRLSKLLLRHGLVYEHGRAWTRAHDAWLRRQDLGHPGARAAFDDAYGAVLTCALRRDTLDGQIAQMATDPRWAACVSRLECLRGVGTLTAFALCVEIGDWHRLTGATIGAYLGLVPSESQSGTRHARGPITKAGNSHARRLLVEAAWHHRQPLRTSVAIEARRMGQRPEVRARAEQAGVRLHHRWHHLEHRRGVRSTIVAVAVARELAGWCWSLAVMD

SEQ ID NO: 125143 - protein, 314 aa, unidentified
MEDHAVYVGIDVSKPQLEVAIGPGGEHFSEVNDARAVRRLVKRLTPLGCTRIVIEATGGYEAPLAAALYAAGLPVVVINPRWARDFARSIGQLAKTDAIDARLLAQYAALPQLKVRALPDAQTRELKALCARREELIDMLVAEQHRLEHVPPRLRREINGHIDYLRKRLKRLDHDLDQAVRTSELFRRQSELLSSVPGVGRVLCVALLARLPELGRLNRAEVAKLVGVAPLNHDSGRLRGARMIAGGRAALRRVLYMAGLSAVRANPLLRAYYRHLRNAGKPAKVALVAVMRKLLLILNAMVKTQSPWRSPCPA

SEQ ID NO: 125144 - protein, 339 aa, unidentified
MKVSTLGIDLAKNVFQLHGVGCNGQTVLKKKLTRDKFLPFLMQLEPCLIGMEACASGHHFARVLRQYGHEVKLIPPQYVKPYVKTNKTDAADAEAICEAVARPNMRFVQIKTAEQQAILVLHTERNILIRERTACANSMRAILAEFGIIMPRTLSQLYKKIPEILEEYDNELSPFVRCSVARQLEHLQSVEDQITLIEQELSRWAKTQPACQRVMKVPGVGLMTATYLVASVGNGQQFHSAKQFAAWLGLVPREFSSGGKQRLGRISKRGDRYFRYLLVHGARAVAAVIERHKDNMPWLYRLLNKKAYNVAVVAQANKTARILWSMLVHHTEYRTLSVV

SEQ ID NO: 125145 - protein, 340 aa, unidentified
MSLYAGMDLHSRNTLVGVINGSFQRVFEKRVCNDLSLIVGTLEPFRSELEGIVIESTYNWYWLVDGLMDAGYSNVRLANPSAIKQYEGLKHTDDRHDAFWLAQMLALGILPEGYIYPKEDRPVRDLLRKRSFLVKHRTAHILSLQSMLEREKAYKLSGNEIKTLRAEDIARMFTEEHLVISAQANRASIEFFGHQIKRIEKAVRKAVKLRKSFEYLLTVPGIGEILALTIMLEVGEIARFARVGNFSSYARCVSSQRLSDGKKKGQGNRKNGNRYLAWAFVEASHHARRYNERLRSYYQRKCAQRNQAVATKAVCNKLARASYYIIRDHVPFREEALFCS

SEQ ID NO: 125146 - protein, 330 aa, unidentified
MSDHPPTPTTIMGCDVSSTEIVMACANANQAVKTVANNRKAITAWLKQLPTDAVIGMEATGRYHDVLADCAARRGHRVYVINPKHLSLYAKGVGQRGKTDPLDARVIARYVAREGDRLHPYTVPTPTQRLLRNLLSQRAGVVKHRGAIQQCLRATESMGCATLKRAHRKALRGLQALIAEIDAQLKASVQTDAALEQKRATLQTITGIGLLNSLALTHRFDRTPFTNSDAVVAAYGMDPRPKDSGNKVGQRRLTKQGNAEDRRLIYLAAQSAAKTKTFKPIYLALRAKGFATTEAIVIIARKLLRIAFAVWTSNKPFDPKKIGFQACKKP

SEQ ID NO: 125147 - protein, 331 aa, unidentified
MDHCAIDLGGRKSQVCLRSPDGPLLFEGPYDTRSLPEFLRLLPRSRVIVETAAEAFRVADAAKEAGHEVRVVPATLVRSLGVGARKTKTDRRDARALSEVSCRIDLPSVHIPSARSREWKAICGMHDALTTARTKLINNLRGWLRGQGLRIGQGKAETFAERMAKFEPLPDYVRSQAEALAALTEKIRGSDKRIEALAKDELCQRLMTVPGIGPSSAVRFVAAIDEIARFESAHKVESYLGLVPGESSSSERQQRLSITKAGSSSVRWVLGQAAWSLQLRCQDPGARPLQLWAAEIARRRGARIATIALARKLAGILYALWRDGTKYEQRP

SEQ ID NO: 125148 - protein, 354 aa, unidentified
MSQTPNTAIAVIGIDIGKNAFHVVGHDTRGAIVLRQKWSRGQVEARLANIPPCLVGMEACVGAHHLSRKLNSLGHDARLMPARYVRPYSKGQKNDFNDAEAIAEAVQRPTMKFVATKTAEQLDLQALHRVRERLVSQRTGIINQIRAFMLERGIAVRQGIGFLRTELPTILATRTDALSPRMLRVIEELAGDWRRLDQRIEGLTGEIEALARQDQACSRLMTVPGIGPIISSAMVAAIGTGDVFSKGRDFGAWLGLVPKQISTGDRTILGKISRRGNRYLRVLFVQAAWVVLVRIKDWERYGLKSWIEAAKRRLHHNVLAIALANKLARIAWAVLAKGRAFELTRTDDASARPA

SEQ ID NO: 125149 - protein, 324 aa, unidentified
MGLDQHRGQITGEWIDTETGEVQRTRVVPADRAAVRRFLWRFGGKELEVALEATTGWRFVVEELRRVGAVVHLAEPAETAGLRGPKKRAKGDRADARHLRELLMLKRLPESWIPPAHILDLRARVRLRHTLSEQRGEWQQRIQATLYHHGCPQRRSLMVGDGREWLAAQPLPTTAREQVTVALTMIDALERQITPLDRELRAYADRQAGCKALMVHYGIGPLVAVTILAELGDCTRFSSSRLAVRYAGLDITVYQSDQRRAPGHLSRQGPPALRWALFEAAQSACRRGSPDRDYYTETAARLGHNRPCLIGRPQAPQAQLPHAA

SEQ ID NO: 125150 - protein, 464 aa, unidentified
MKLPPNQGHNQPVLTEKVSSTLEEINQNAAGIDLGGGEHWVCVPADRTDKNVRRFGCFTPDLIAMVDWLIECRVDTVAMEATGVYWIPVFQILEAKGFEVKLVNAHHVKTVPGRKTDVLDCQWLQKLHTYGLLSGSFRPQDQVCVLRSYIRQRDSLIKSASTHVQRMQKALIQMNLHLHKVISDVTGLTGMKIIKAIVAGEQDPQVLATLKDPRIKSSTADIAKALTGDYRREHLFVLQQELTLYEVYQQQISAIDAEIEKCLASFQPQTLDEPPTTPKKRRKKPTANHPNFDLHKYLYRMAGVDFTLINGLDALTVQTILSEVGLDPKRFPTVKHFTSWLGLCPGQKVTGGKVKSSKTRTVVNRAANAFRMAAFSLTHSRSALGGFYRRLRSRLGAPKAITATAHKLARLFYRMWITAGQYSDPGMDYYEQKYQELILKHLQQKAQAFGLELIPISDSTQCVS

SEQ ID NO: 125151 - protein, 311 aa, unidentified
MDKTIEFARVVDRCCGLDVHKKVIVATVEGTGIARQTREFESTTRSLTELKEWLLGLDVTHVAMESTGVYWKPVINILEPAGFTLLVVNAQHIKYVPGHKTDKKDSAWICKLLRAGLLKGSFIPDRAQRDLRDLTRYRRKKVQEVTAEKNRMQKVFEDANLKLSSVFSNVNGVTCTRIIDEILKGNTDPDYLASLCTHGKLQSSKEQIRDAVEGVFTEHHKFMLKAIRRSIASLEEEIAELEAEIDRRCEPVQEEIERLCTIPGIDKTGAKELIAEIGVNMEVFPTAANLASWSGVSPGNNESAGKKKART

SEQ ID NO: 125152 - protein, 400 aa, unidentified
MQIVGMDIHRSFAQVAILEDGTIIRQLRVDLVHDRLVAFAKTLSLEDEVVIEVTGNSAAVERILRPHVKRVAVANPRLVRAIAYARVKTDKVDAGTLAKLHAAGFLPEVWVADEDTYSRRRQMAERAGVLAQIIQIKGRMKAILHANLIPPYKGYLFGKRGQHWLDSLPLPSEERAMLRRLIAELERVTKQLSEIDKVVAQQALDDPRALKLMTIPGVSSVVASTVLASIGDIARFQSPDNLSSYFGLTPRVRQSGEHPARHGRISKQGNRDARKMLVEAAWSAKTAPGPLRAFFNRMQKKHGPGVAAVATARKLAVMIWHVLTTGKDYAYARPAFTAMKLRKVALKAGAPRAYGKAGPGRDYWIKELREREAGYVARVEQAYERMVAAWKEKPKKVALN

SEQ ID NO: 125153 - protein, 436 aa, unidentified
MAPWRQHAMFNLNHKSMEAKSSTPADKDIQFFLELDKAAGIDVHKKELYVCIMGKGIKKQTKRFGTFTPDLYALRDYLKDNGIKDAVMESTGIYWRPLYAVLEESGMNPVLANAYKVKQIPGRKTDMSDAQWLCKLMLNGMIEKSFIPPQTQQQLRPLTRQRMKYEQQISSVQSRMASLLESSNIKLRSVISNIDTMTGMDIIRSLSKGETDIEKLLALCRGKVRKKLDDMRLALQGRFTEQDRVMLQIHLDDYDHITRQRDKLDKMIDEHIEKHYAEAKEELKKIPGIKDQTSAAFLAEAGVNMNQFPTADHFTKWLGLAPGNHQSANKRKKMRTVGGNGYARWAMICCAWAATRTNGTYWKSLFEFLTQKKKMPSKKAIVVIARKMARMIYKLFKNKQSYQERGIDYLIQNKQKQLQQQLSNYRHKTELIAETI

SEQ ID NO: 125154 - protein, 379 aa, unidentified
MSSSAAAPSIIYLGMDVHKDSITIAVLPMGAKNPTRLERLPNDLPKLKRFLDRVARDGELRVCYEASGAGYVLHRALREWGYACDVIAPSLIPKRPGVQRKHDKRDAADLARYYRAGELTPVRIPTEAEERIRDVVRCRETFQREILKSRHYILKFLARRGFVYRDGTNWCTPHLRWLEHLTSEASPLAPADRLVFREYHALLVYKRQRRDELDRQIEALALTPAVAAAVARLQCFRGIALQGAMVLATEIVDWRRFERPGQLAAYLGLVAREDSSGPRERKGSITKAGNSHCRHVLVQAAWCYHYRPNLSAEIRRRQQGQPPAVVAHAWKAQQRLHQRYQHLAYRKQPQIAVVAVARELVGFLWAVMRDLPTPEVTAA

SEQ ID NO: 125155 - protein, 421 aa, unidentified
MLKKQEDMESTVSFDQVVSRGCGIDVHQKLVVATISGEGLKKETREFGTFTRSLTELKDWLLDNGVTHVAMESTGVYWKPVYHVLEHTSIKVWIVNARHIKYVPGHKTDKRDSAWICKLLLAGLLKPSYIPPRELRELRDLTRYRTKLIQQAASEKNRINRVLEDCNIKLSSVVSSTHGAVATKLIDKLCEGRTITMDDIDAVYHKRLEASKEELYEACQGLMGEHHVYFLEMIRKNIATTEASIEDLNARIREMLSVYDNVLENLRAIPGLSKKTVEDLVAEIGLDMGAFPTEKHLASWAGMCPGNNESAGKKKSGKTTHGNKQVKSVLAEAAWAATRTKNTFYSARYHRLAARRGKKRALIAVGHSILKSVYHVLGGEEAYRELGATYVDERTEKRRRAYLKKELEKMGYDVQLLKPAG

SEQ ID NO: 125156 - protein, 436 aa, unidentified
MMGRVIVGVDPHKRSVTIEVVDEHGRVLSTGRFGTDTAGYRLMNRYVRDQWPHHVWAVEGAQGVGRPLAQRLLAQGEAVLDVPAKLAARVRVFDTGNARKTDAVDAHAVAMVALRTPRLTQLGYDQELIALRLLTDRRDEFSHLRVQTVNRLHRLLTELIPGGANKRDLSALQAKRLLASVKPRTLVGKTIRRMAAEEISDLVAVDAKLKSLKKELRAAVAARGSHLMELFGVGPAGAARILSDVGDVTRFPDRNHFASWTGTAPLDASSGDQIRHRLSRAGNRRMNHVLHIAAIVQIRHDTEGRAYYRRKLAESKTPMEALRCLKRRLSDAVYRQLVADAQAVEEAGPGGHSGATSQSSAADLSTPVIGSSDQPLPEPAPTTLPPAKTTAKTRTSPAPSPSRRRAGAVKVERPTGRTTLTATSAGAHCKGPRPRP

SEQ ID NO: 125157 - protein, 354 aa, unidentified
MTRTDKYVALDVHQATTLASVRSETGPVIARSILPTEGPPLVEFFRGMRGTVHVVFEEGTQAQWLHDLLVPLVHQVVVCDRHGEKRPGNKGDRVDADQLSARLWRGELRAVYHGSAERATLKELTRAYRNLVEDTTRVMLRLKALFRARAIPTRGTRVYQVRERAGWLAQLPERGARFRAEALYAELDVLRELRPRAKTAMLTEARRDPAWRVLRGIPFLGPVRVALLLATLQTPWRFRTKRHLWAYAGLAVVTHSSADHEIQHGRPVRRRRAPLTRGLNPNHNRVMKDVFKGAATAATARAGPLQAFYQGMLARGMREELARVTLTRKLAALTLRLWKKGERYDPTQLTQQAH

SEQ ID NO: 125158 - protein, 437 aa, unidentified
MSDKKPVELRVSVDVGYRRHSVAIGLPSGEVLEEFEIAHRPEGFEQFFSRVERHQKVRNCEVAVAMEGFNGCARPLDTMVRRRGYRLYNINNLKLARFKEIFPGAAKSDRIDARKGLELFQLSDHLPLAKAVLQEVKGTPEENEILKRLTRRRRRLVDEGVRVISNLQADLQAVCPGLLEITKNAGNQWFLNFLVSAETLPQLARLRPSTLLKIPAVGRKYASLIEDWQKRAHFSQEVKWVSEMIQEDAQRCLELDEKIKALKAKIKEVAKDSKIAKILLSIPGFGTICTAELAAEIGTIERFSKDGSLALYLGMATLENSSGKYQGSKQPKHVNTRAKAAMMVALDRHRKYVPESQRYYERKRSEGKKHNQAIRALGRHLSRIIYKMLTEERAYEMRPEKGNTKSKVTSRSLLKTQIRKPKISAKGKNNKNYQQSA

SEQ ID NO: 125159 - protein, 343 aa, unidentified
MKLTRVGVDLAKNVFQLHGVDRAERPIWCKRLKRNRWIKEIEENVEPGVEIGMEACGGAHHWARLLQSKGYRVRLIAPQFVKPYVKSNKTDANDAQAVCEAMSRPSMRYVAVKSIEQQDIQAVHRVRASLISERGAKANQLRGLAYEYGLVAPREIAALRVAVPAWLEDASNGLTVRLRALLCGLYADLRALDERVRELDKEIRAIGRENEAVGRVQELRGIGPLIASALVAMIGDARQFKNGRHVAVALGLTPRQHSSGSKERVLGISKRGDSYVRTLLIHGARSALRTAPGKNDRMSRWALALAKRSHVNVAVTALANKMARVAWALLKHGTAYEPNGLAA

SEQ ID NO: 125160 - protein, 428 aa, unidentified
MKVMYEYVAGIDVHKDMIKVAIRSPGEKPWTRKTEIFEFRTFYGVLQQMARDLRKRGVTHVVMEASGVYTEPVYYALCEQDFTEVAVINPAHARALKGHKTDAKDCARLAELFECGLLRGSYIPSAEQKEVRDLTRYRTKTVQARTSEIQRLSKALESAGIKLGSVASGITGKGATAMIEALIDGERRGGVLADLAIGRMRSAGKLADLSMALAGRFTGHHAMLCRLHLDRIKVFDDAVDGLDRRIAAGAARWQREAGLLKSVPGFGDVVAGAWLGEIGPAPHKWFSRHEKLASWASLCPGNNISARKRKHGRTGDAGTYIKPMLIQAAWSAIRVRGRLQARYNRLVRRFGGPKNPAAKKKAITAIAHTLLKIAYQVLKTGTPYQDLGADFYTRRNSPEEQQKYLERQLQKLHPGCTITITISPPEAA

SEQ ID NO: 125161 - protein, 387 aa, unidentified
MPQPAAVLPHASPDYDRTLVLAIELSSKSWVLAAQVPGLAQVKAKRTIEPTKEALLGALASYRARAAAAGHQIERVVSIYEAGWSGFWLARWLITQGVQVHVVQPSSVLTDRRMRRAKSDGIDAELLLRTLLAWLRGEPRVCSMVPIPDQTDEDARRAVRERGELVAERVALVNRIGAVLATLGAGDYNPLLQSRRRRLNELRTGLGEPLPPHARAKIERLLARLELVLAHITELERERNAVAETAAPDHAAKMIQQLAGLRGIGVQSATVLVREAFVRRFANGKALGAYAGLTATPYSSGGLEREQGIGKAGNRRLRSVMVELAWLWQRYQPGAAQVVWFRERVGKTGRRLRKVMVVALARKLLIALWRYVTDGVVPEGAAMKPAI

SEQ ID NO: 125162 - protein, 356 aa, unidentified
MNHVSKLDFTGQQVYVGMDVHKKSWSISILTDQFEHKTFSQPPEVDVLVNYLKRTFPGAAYKSVYEAGYSGFWIHDQLQEQGIRCLVVNPADVPTKDKERAGKTDRVDCRKLARSLRNGEIEGIYVPTRPKAEDRSLLRTRNSMVRKQTRCKNQIKSILCFYGIHIPDEVANSKWSKRFIAWIETVRMERASGDMALKVHLSELSHIRQTIAELNRAIRMLSVTDGYRDNVRVLKTVPGISILTAMTLLTELHDISRFKTLDKLCSYVGLIPNTNSSGETDRKTGMTGRRNVQLRMVLIESAWMAVRKDPALIMAFNELSKHMTKTKAIVRIARKLLNRIRYVLMHQREYVPAVIR

SEQ ID NO: 125163 - protein, 428 aa, unidentified
MNREDGSRLEQFRQLKKEIRGSERHLVVGIDVSKDRHHAYFRTVMGKTLLKRLVFENSCEGVTKLLDQVARVQLENGLAEVVFGLEPTGNYHKPLGEYLIRRLAQVVLVSGVAAHENRKTLDGRWDSNDPKDAANVADLVSQGKFLFYEYPDPRLRELRSLLALKRRLKRQEHGYRVRIRNHLVAKYFPELDRYFDQSEKYGLAIVRWCLDPRSLSGYQFEEFVRLVAPGRRGGEQNSRLRMILQMAQGSIGCEAGPAVKFEAELMVEGLRQIRLMIEDTDKQIQDLCREFPEYEYLLSIPGFGPDVSSKVLGAVGDPYRFESGRQVLKLAGWDLNAERSGKSAETARPVISKKGKADLRYALYQAALIASIKNQHFVVYYTNLLRGREREPGIKTKMRVKLAAKLLIIAWTLMKKKEPFNPDYLNLK

SEQ ID NO: 125164 - protein, 475 aa, unidentified
MNIKGTKKKNQVVTANIFEQQELLKKSEVIKENLAASTWRELETNGKFDKNKKLSFISDDMLILGCDVGSETHYMRAIDTRGRELSKSAHSFNNNQEGFRSAKEWAVRIAAEHDKSQIVLGLEPTGHYWFCLATWMITNGISVVQVNPYAVKQTKEVEDNSQLKDDRKDPKLIANLVKDGNFGMPYLPEKIYAELRRLSMFRDQLNEDRIRTINRMHREMKIYFPEYKDALGKVDGAFSLELLKEAPFPEELTALGEEGIRQIWHAAKLRGRGYSRAGEILQYAKASVGIKDGSIAGKAAVKWFVQKILELDAELAVIENQINRKCQEIPHTGNVLEISGIGENTLSGILAEMGDISRFDDVKEIQKLSGLGLVACSSGKHKGETKISHRGRKRLRYWLFQAAKSAVAHAEEFKELHMYYTTRADNPLKKMQSLIVIACKLLRIIYTILNTGTFYDPKKMLMDIRRPEKKESTAA

SEQ ID NO: 125165 - protein, 346 aa, unidentified
MDVHTESTSIAVRNSLGKIVMECVIETKASTILQFIDGLRGDLRVTFEEGTWAAWLYDLLKPHVTEVLVCNTRKNVQNGSKSDRIDARKLSEMLYMNNIKSVYHGQHGLRTLKELGRSYLTITKDLTRVMNRLKALYRSWAIPCGGKEVYAPRYRAEWLAKISEAGVRRRAEHYYQQLDVLRLVRQEVRRDLLVEAKKHKAWKLLRHIPGIGPIRAALLMAVMQTPHRFRTKRQLWTYSGLGLETHDSAQYNVAEGQLQRSKKPPMVRGLNKDHNHDLKDIFKGAATRVSDSSRGPLHDFYENLLAKGRKPTMARLTLARKIAAITLIVWKKEVRFDANYLRQQAA

SEQ ID NO: 125166 - protein, 402 aa, unidentified
MNAVGIDVSKGKSMVAIMRPFGEIVSTPFEIKHTTSDINSLVELINSVEGESRIVMEHTGRYYEVLAHQLSEANLFVSTINPKLIKDFDNDSLRKVKSDKADAVKIARYALDKWQNLKQYSVMDELRNQLKTMNRQFGFYMKHKTAMKNNLISILDQTYPGVNTYFDSPARSDGSQKWVDFASTYWHVDCVRKMSLNAFIDHYQNWCKRKKYNFSQSKAEEIYGKAKELVPVLPKDAITKLIIKQAVDQLNSASTTVESLRTLMNETASKLPEYPVVMAMKGVGTSLGPQLMAEIGDVSRFTHKSAITAFAGVDPGVNESGTYEQKSVPTSKRGSADLRKTLFQVMDVLIKTHPQDDPVYQFLDKKRAQGKPYYVYMTAGANKFLRIYYGRVKEYLSSLPES

SEQ ID NO: 125167 - protein, 350 aa, unidentified
MPSLSEIVDVVIGVDTHVETHTAAVVDARTGAVLDALTVPTTPEGYQELVDLADAHSALRVWAIEGTGGHGAGLARHLARGEEVVHELDRPERATRRRGAKSDPLDAVRAAREAISRPLLGTPRAGGDRQALSVLLAARRSAVEASTVAQRQLFSLVIAAPEHLRDRLRSRRMPEMVKTAARLRVQPGWDTETATTAATLRTLARRAQSLTAEAADLEKQILTIVRTWRPDLLAQPGVGPITAAVVLCAWSHPGRVHSEAAFAMLAGAAPIPANSGQVTTRYRLNRHGDRQLNRALTTITLSRQRYHDPTKAYTLRRTSDGKTPREIRRCLKRYIARDLFRLLEHGPSPA

SEQ ID NO: 125168 - protein, 323 aa, unidentified
MQGQKSPERSAQPEVYVGVDVCKDWLDVYLHPIGQKFRVANTPEGLKALKRRIAELPVELIVMEATGKFHRQAHRTLHAAGFAVAVVNPLRARLFAEAAGQLAKTDRLDARVLALMGQALEPSAIAPAPEAVEALQELARARSAAKADQTALSNRRGASQTAFLKAELGRRLKTLAGHIERLDAEIQRRIGVDPALKRRFDILLTIPGVGPVAALALVIGLPELGACSAKAASLLAGLAPLACDSGEKAGERHIKGGRAFVRTGLYLAAIAAARFNPQLRDDYNRLRDAGKKAKVAITAIMRKLVVLANVLIKEDRPWKPIHA

SEQ ID NO: 125169 - protein, 354 aa, unidentified
MSNDKFVAFDVHAATTTYVVLNDKGKVVTQGVTETTADGLLSFVKGISGKVHLTFEESTQAAWLYERLEGHVAKLLVCNPRKNRRRQENKNDRVDALQLARWLRSGDLSPVYHRDHGTKSLKELVRGYENVVDDGTRVKNRLKAIYRSRGLLTPGRDVYNPDERDDWLSKLDSVGLRTRAEWLHTQNDSMDVLVKAARKAVTCEARRHTGCKLLRSVPGIAWIRAATIVAHVKYPFRFRTKRQFWCYCGFAVVMFSSDDWVIAGDGFVRKSRPQTTRGLNKKYNRHLKAVFKGAARTACGTRGILRPHFEYLVASGMRESMATLTVARKIAATSLAIWKKGEKYDLDKAVIRKE

SEQ ID NO: 125170 - protein, 419 aa, unidentified
MKIVFPVCCGVDVHKNVIVATIAITDKSNITQHIVGTFSTINADLYRFRTWLLEHRCFNVCMESTGKYWIPVFNVLEEAGIKVLLTHPKYVRAIKGKKTDKKDSRWIADLFKFDMVRSSFIPPKDIRALRELGRYRYKLVCMLSSEKNRYQNCMTVSNIGLASVLSDPFGKSATDIMRYVLSSDVFNEEHCKTLIRKTAKKKTELILASIRGSRIESDQRFKMNEASAHMDYLEQAILRTEVELYTRIQPHYHLVEHLSNQLPGISQLSAALIISEIGVDMSVFESDKHLNSWAGLAPANNESAGKKKSVRISKAGQFLKPLLVQCALAAVMSNKQPYFATKYQRIKKRRGHKKAIIAIARMMLTCIYHMIQTGESFSPSDYESFNNPAPRKVALTDDNAIAFLAAQGYDVSTLTKLAV

SEQ ID NO: 125171 - protein, 319 aa, unidentified
MLCLGIDVAKLKLDCALRLETGKSRAKVVENTPAGFAKLEAWLRSHTEELPHVCMEATGIYWEAVAEFFARRGYRVSVVNPAQIKAFSQAQMVRTKTDQVDAKVIAEFCAKHGPEAWEPPPLSEQELKAMVLRLDALLAMQTQETNRLDVARDSVRADIEQHIAWLGEQIKQLRKRIRDHINDDPDMRGKRDLLDTIPGVGENTIALLLAYGMHSGRFDNGRQAAAFAGLDPRQHESGSSVKQRPRMSKVGHAHLRKNLYMPAMVTLYRTDWGRQFLTRLQAAGKPAKLVIGAMMRKLVHVAFGVLKSGKPFNQELQNA

SEQ ID NO: 125172 - protein, 328 aa, unidentified
MFYLGVDVSKAKLDCCLLNQDTPEKRKSKVVANSATGVGDLLCWLGKHGAQADNTHVLLEATGVYHEQVATVLHDHGICVSILNPAQVRDFGKGLGLRTKTDVADSGLLARFGLLQQPAAWQPPPAHVKQLRALLRRCHALSEDLQREHNRLEKARATETPERIHRSLQDCIAFLEGQLAQLRQDIDHHIDQHPDLKRDLALLQSIPAVGPRVGSHLLCVMHSSSFRTAEQLAAYLGLVPVERQSGTSVRGRAHLSKAGSARMRALLYMSAVVGIRHNRQVKALYERLLSKGKSKMAALGAAMRKIVHLCFGVLKNQTPYRENFALGS

SEQ ID NO: 125173 - protein, 402 aa, unidentified
MNCVGIDVSKGKSMIAVMRPFGEVVVSPFEVRHTANELSELAGLLKSLDGETRVVMESTGNYHAPVAWLLHDAGLYVSVVNAMLVHDYGNNSLRRAKTDKKDAVKLANYGLDHWLTLPRYIPEEDTRLMLKICYRQYQQYSKVQTMLKNNLISLLDTTFPDANRLFTSPPRADGSEKWVDFVATFWHCECVCGLSKKAFTAKYQKWCRKHGYNFSEDKALDIYASSCGHFGVMPKTNTAKLLVEQAISQLQTTSAALAALKQEMQSLAASLPEYPVVMEMFGVGPTLGPQLIAEIGDVRRFHSKKALVAFAGIDAPPYQSGQIDVRSRSISKRGSASLRRTLFLVMGVLLQCAPMDEPVYQFMNKKRSEGKPYRVYMMASANKFLRIYYASVKAYLDSLEHD

SEQ ID NO: 125174 - protein, 531 aa, unidentified
MEHGPGIDDCVDGGGLVLKKDKSPTPLERMCEFRHPGRVALNSTFDRTAMKPNQQEQHEKTPGRLSPMAWQQMNRKQRREWTRKMQAEEISLQVINPDAAGIDIGNEAHYVAVPPSRDNQSVRRFGCTTAELKDMAAWLKKYRIRTVAMQSTGVYWIAVYDLLEEAGFEVYLVNARETRNLPGRKSDVQESQWLMKLHTYGLLRNSFRPSQEVRTMRTYWRQRNDLIRSAGRHIQRIQKALTQMNLQLANVLSDVSGVTGQAIVKAILAGERNPWKLAEFRDKRVKASEEEIARSLEGNWQEDLLFLLKQEQDGYEFCLRQMAECDERLQQYLKQRKDRSAGASLPEEKRKERLRKKKENKPRFDLRAELFRMTGTDLTRINGIDVRTAATVISEAGWDMSKWRTEDHFVSWLRLCPDNKVSGDRVVGKGRLPTNNPLTVALKMAASCLRQSNSYLGAQFRRLRTRLGPPVAIKAMAAKLARLVYRMLRYGMQFVDRGAEFYEARHRQREINSLRRRAANLGFQVTELTST

SEQ ID NO: 125175 - protein, 350 aa, unidentified
MPRKFDTAVVTIGIDPGKNTLHLVGLDARGEIVLREKVARTKIVSRLANVPPCLIGIEAGMGTHYVTRELLALDHDVRQVPPVYAKPFRQTHKNDFRDAHAVAEAVQRPTTRCVPPKTDEQLDLQALHRVRYRLVGQRTAIINQIRCFLLEHGITVRQRLHWLRHALPDILAQRIDVLSPRMVRILEDLAQDWRRLDDRIEAVTDEIDALSKNTEPCRHLMTIPGIGPIISSAVVAAIGNGTAFACGRDFAAWLGLVPKQISTGDRTILGRITKRGNRYLRMLFLQAARVVLLRPKNWMKHGFGPWLAAAAQRLHHNVLATALANKLARIAWSVLVQQREYEARLSVAAI

SEQ ID NO: 125176 - protein, 348 aa, unidentified
MSKSSQYVGLDVSLKETSICVIDDVGKIVWRGRTESTPEAIASAVKQHAPYAVRIGLESGQLSSWLFHGLKVAGLPVICIDARHAKAALSLKVNKTDANDAFGLAQIMRVGWYREVTVKGLDCQAVRALLVARAQIVSQITTTKNCVRGILKTFGRVLPKGLRSQFPGRVRAAIDGDPILGAIIEPTLRVLEAMRAQLLVYNKAVIQRARGDDTARQLMSAPGVGTVVALAYMTGVEDPARFKRSSSVAAYFGMTPRRYQSGEVDHAGRISKCGDGMVRGLLFESAKVLLSRSARPSALKTWGEALGKRIGPKKATMAVARKLAVILHRMWTTGTTFQWNAEAASPAA

SEQ ID NO: 125177 - protein, 410 aa, unidentified
MIYVGIDWADDHHDIVITDDSAKTLNQFRINHTPDGFTLLHTTIASHQKSPADVLIAIETNRGLLVHELLRAGYTVYAINPKAVNRYKDRHVLSKAKSDILDAQALAHLLRTDRHRFKALVPLPEDYRLLDRLCGDLRKLVDEKSRIINQIISCLKDFYPKALEIFSLDSQIFIDFLKTFPDHNTLSACKKKTFLAFIKKHRYPYPDKIDEFWKTIQSPTLQPDNIAARAGKLRLLMLLDQLENLKTHLNYYEQEIQKILNNLPESNSIKSLPGVGNRLAPELVAALGPNNKDSRHRFHSAGEIAKLSGCVPVIKQSGKWEKVSIRYACVRPLRRTFSDWAFTSLKTSSWARAYYDYHKARNQSHFTILRNLGKKWIKILFAVWSTGTSYDEALHIQNLKARNIPWAMTL

SEQ ID NO: 125178 - protein, 341 aa, unidentified
MNNTIIIGIDLAKNVFQLHGMRADGSVAFRRKVSRARLLPFLAEHPACLVAMEACASAHYWGREIGKLGHEVRLIAPQYVKPFVKRQKNDVADAEAIAEAASRPTMRFVAVKSAEKQSQAMVFKTRDLLMAQRTQTINALRGHLAEYGVIAPQGPQNIGQLAEALDDPETSLPPAVVDLGRELLNHLATLDDRIGALSERVKEIARTDETARRLMAIPGIGPICAAAMAAVAPPPSTFTKGRDFAAWLGLTPKQNSTGGKTRLGKTSKMGQRDLRRLLILGAMAVVQRAARRGATAGSSWLARMLARKPKMLVAVALANKIARVAWALMASGGVYQAPAAA

SEQ ID NO: 125179 - protein, 466 aa, unidentified
MTRGDRRRNARREQLRRTLPRDGAVIGIDLADEKQALAVIDHDVRVLARKTVRVKAFRLGEALGWAEEQARAKGFTSVTVACEPTGPRWLQVQRLCAERGLPMVCVQPLVTHIARQQQDYTTHKTDEADCVMIARLAAELHCYVPEELDEVWADLRHLGRRRAALITSCTASQQRVRDFLSVAWPVVTEASAQPFKSKTWLAALQVVASRCGGQPEELADLGMEAFASLVRSALGGWGGQRLRGPVCQAVFTALTSAEGVVRAHRRGLLRRIAAELGDLQRARDQLRDTEAGMVAALASLGLARLADIPGLTATGAAAILAETGDPNRYDSSSSLVKHAGMSPSDNASGAFDGEAHISRRGRPSLRLTAWRTVWPMLLHNPVMAAKYQAMTAAADQAAAGARDDGTGRAGHPSAAARRRRAKARVACAAALLRWIYSIVVHGTSWDPDVASGSKDHQAALSYREAA

SEQ ID NO: 125180 - protein, 345 aa, unidentified
MTLYGGIDLHSNNNVVALTDETDRVVYRKRLTNDVETVSAALAPYRDEITGVVVESTYNWYWLVDALMEAGYRVHLANTAAIIQYSGLKYADDDTDAAWLAKLLRLGLLPEGYIYPKAERAVRDLLRRRQSLVQQHTANILAVQNLFSRNRGRSISANDARRLTPESVAELVAEPNLALAIQGTVLAMRGQQAAIELLEREAWRQSKETRNWRALQSVSGIGRILGLTILLETGPIERFKSVGNYASYCRCVGSTHVSNGKQKGKGNTKNGNKYLAWAYVEAANFAVRYNPQIKRYYQRKRAKNKTVVAIKAVAHKLARACYHILREGSEFDVNRAFASTQLGMP

SEQ ID NO: 125181 - protein, 397 aa, unidentified
MARVFVGHDWAEVHHDVHVEDEAGRRLGVARLPEGIEGVRRFHELVAGHTDEPGEVTVATETDRGLFIGSLVAAGYRVLAVNPLSTSRYRERHSTSGAKSDPGDAKVLAELARLDGHNHRRVAGDSDLAQAVKALARAHHSMIWNRQRQTNQLRSTLREFYPAALEVFDDLASPDALAVLAMAPTPERGRRLSRSKIAAALRRGGRQRRVEERAIEIQAALRSDQLEAPPVIADAIGASVAALVAVIAELVAQTRQLEVELADRFDQHPDAKIIRSLPGLGMILGARALGEFGDDPNRYTDPKSRKNYAATSPITRASGKQRVVLARYARNRHLADACRMWAFAALNVSPGARAFYDQRRVAGDTHNRALRALANRLVGILHGCLRHHTPYNEHTAW

SEQ ID NO: 125182 - protein, 403 aa, unidentified
MNNVAGIDVSKGKSMVSVLRPFGEVVAKPFSVGHTGSELKELADYLKSLDGETRVVMEHTGRYYEPVARFLHEEGVFVSAVNPKLIKDYGNNTLRKVKTDKADSRKIARYGLDNWAELRQHTPMDTIRMQLKTLNRQQSLYTKTKTMMKNNLIALLDQTYPGVNALFDSPVREDGSQKWVDFATTFWHVDCVRNMSLTAFAERYRKWCKRHGYNFSQSKAVEVHAGAQDLIAMLPRDALTKTMVRQAIDALNAISTSLERLKAEMQALAAQLPEYTVVMAMHGAGDSLGPQLMAELGDVTRFTHRNAITAFAGVDPGADQSGTHEAKSTRVSKSGPPELRRALFLVMDCLLKTQPQDDPVYRFMDKKRAEGKPYLVYMTAGANKFLRIYYGRVKEYLASLEGN

SEQ ID NO: 125183 - protein, 351 aa, unidentified
MVVVGTDVHKRTHTFVAVDEVGRKLGEKTVPATTAGHLKALTWARLEFGEDLLWGIEDCRNLSARLERDLLSARQQVVRVAPKLMAQARASARTRGKSDPIDALAVAHAVLRHPDLPVAAHDTVSHELKLLVDRREDLVGQRTSTINRLRQRVHQLDPAVEPQLANLHREPARARLAEWLGTQDGLLAELAGDELADITRLSAAIDDLAERIGDRVRTVAPALLELPGCGELTAAKLVAETAGVHRFRSEAAFARHSGAAPVPVWSGNTAGRVRLTRSGNRQLNAALHRIAITQIRLTTSAGHAYYRKRLASGNSKTEALRCLKRRLARVVYQRLRTDDLTQHHSHQSTAA

SEQ ID NO: 125184 - protein, 346 aa, unidentified
MVYAGLDLSRRRLDVRVLDGDGATLDETAAPPDRDGLEHLAERLRPLGPIRAAIESMNGARFVHDELERAGWQVELADAQKVKGLAPLACKTDRIDAWVLAELCRRDLVPAIWLPDPSVRAERERARVRLHLVRHRTALKNRIHQTLVAFGVPCPVSDLFGTRGRQLLERLALPEPWRDNVVVTLAFIDDLDRQIAGCERELRRLGASHRYLPLLMSVPGIAWVLGYTIASEIGDIARFSSPRKLAGYSGLCPRVYQSGNQDRRGPLAKNGPKYLRWALIEAAQHAARSPHYRELYQRTKKRLGKNRGAKVGAIEVARRLCEAIWWMLTKAQPFAPAGATHSALAA

SEQ ID NO: 125185 - protein, 397 aa, unidentified
MGYDVVIGLDVGKSMHHAVALDPQGRRLVDREVANAEPALRELFGRAAGEGQVLVVVDQLHSIGALPVTVAHAMGIDVAYLPGLSMRRLADLHPGNAKTDARDAFIIANAALTAPHALRRLDVPDQTRADLAMLLGYDDDLVAQTTAANNRLRALLSQVHPSLEKALGGNISHPAVLHLLAKAGGPAGLRKMGRTRIDSQLRKHAPRIHASLTERIWAGLAEQTVVVPGTAAAERVIPGLAAQLLQLRDERERIARDVEEVLDAHPLAEVLTSMPGVGVKIAARLLAEIGGDVSAFPTAAHLAAYAGLAPITSRSGSSIRSERVNHGGNKRLKNAMFIAAFASLRADPASRAYYDRKRAEGKRHTAALICLARRKTDVLFAMIRDHKTYVPATPAAA

SEQ ID NO: 125186 - protein, 340 aa, unidentified
MTIVMGLDQHRAQITTEWVDTVTGELSRSRVAPAHRESVRRFLARFEDHELEVALEATTGWRFVVEELQRVGAGVHLAEPAETAARRGRKKRAKTDRADARLLRELVMVGRLPESWIAPDHILDLRARVRLRHTLIDERGEWQQRIHAVLYHHGCPHHHGIGLLTGTGREWLSSLELPATAREQVTVALQMIGAVDAQLAPMDKELRAYARRQPGCKALMGLYGIGHLTAVTILAELGDARRFSSSREAVRYSGLDITVHQSDQRRAPGHLSRQGPPALRWALYEAAQSVHRTSSPDRDYYLQAAERLGGNRACLAVARKLLKRSYHTLRELGDGALQPA

SEQ ID NO: 125187 - protein, 345 aa, unidentified
MELHTIGIDLGKTVFHLVGVNLRGEVVVRKKFSRKQLLHFTANLRVKLIGMEACGGAHFLGRALQEQGHEVRLMPAQYVKPYVKTNKSDYIDAEAIAEAVGRPRMRFVPIKTDDQLDLQSLHRVRERWVARRTAVINQIRGLLLERGITLRKGRCHVDAALPGILEDASAKLSGALRVLLAQLRLELDHLETRINEADAVIKKTAGENEACRRLVAIPGVGPVTATAVIAAIGNGAAFRKGREFAAWLGVVPREYSTGGKQKLLGISKRGNSYLRRLFVQGARAVLQQGAKQSSGLSAWLAQLTSRTHRNVAGVALANKLARMAWAVLAKNEPYRPPILVGAATA

SEQ ID NO: 125188 - protein, 321 aa, unidentified
MGKDKVYVGIDVAKAFIDMAVHQSKQRWSFTNDDKGISQAVSCLQELAPVLIVLEATGGIELPLTVALAAAGLPVAVVNPRQIRDFARATGKLAKTDAIDAQVIAHFAAAVELTPRPLPDARAQEFSALLTRRRQVVEMITAERNRLRSAYSKVIRELIRDHIARLEQELAKLDDNLTHSVRGSSVWREKDDLLQSVPGVGPVLSATLLADLPELGTLNRKQIAALVGVAPFNRDSGNFRGKRIVWGGRAKVRATLYMATLSATRHNAVIRTFYQRLCAAGKYNKVALTACMRKLLTILNAMLKQRTSWRYVDSYVIGPCS

SEQ ID NO: 125189 - protein, 394 aa, unidentified
MKLVGIDVGKNSRHFCVMDKETGEFNVTPTSFSNNKEGFDFLINSLKPYSKKSILIGMEDTGHYHVALLKFLLSNGYTVALINPKTTDLTRKMEGGITKNDKLDTITICDVLDTPERKKQYRITKVDRFDLYEQRQLTRHHHNLKEELNVYCNRLQKSIDLVFPEFNTLFSSKYSIVYMNLLKTFGSAEAIASTDIRTIRKCFEIKGRGNHISLTPEKLKECAKNSIGISSEVETIQIKHLVSQITLIKEQIAEIDKKIEEFSITNNSPILSIPGISHFSGTSILAELGDIGNYSKPSQIIKFAGVAPYHYESSQYNAQHTGITKKGSKYLRKTLYQIILTVINNNPVFKKYYLLKISQGKGHRCAQGHCIRKLLRIIYHLLETGQSFDPALLR

SEQ ID NO: 125190 - protein, 389 aa, unidentified
MKYVGIDLHKKTISGCVVVKVRGKKKVAARKRLECRDEAGIKSWFSELGKFEVVVEATASYEWFVKLVEPLAQRVVLAHPKKLRIIAESKRKSDKLDAQVLAEFLASDEIPLAYRPGPRVREHRALVRWRNYIQRRLTSVKNKLRHILAAYNADVPHLFTAEGRAHLATVKLSAADRFVAEQLAVELEQHQERLITANRRLREFAASAPLPEREARAILDSIPNVGPVTTDVILAELGDWRRFHSQADVVCYAGLAPGFRESAGKAKQLGITKEGSRLLRWVMIEFAWRMVGTSRKWGGHYHRLEARVGAKKAIVAIARRLLGMIFALLRTGQKYALALEIPPPASCRSKSPRDTNPSDPTCLRGQPRQASSLGAGVYYGVPLSVPETE

SEQ ID NO: 125191 - protein, 453 aa, unidentified
MKKLSMEIVNPKAAGIDIGSRFHMVAVNQNVDDVKEFGVYTEEHEAMIIWLKENSITTIAMESTGSYWQTLFSALQRAGFEVILVNGQHTKNLKGRKTDVQDCMWIQKLHSLGLLNGSCLPGEYVERLRTYYNHRQHLIEHCSKYVNKMQKALRLMNIRLDVVLNDITGKSGRAILDAILSGEREPMVLASLANIWVKKSKEEIAKSLHGNWREDLMFELQECLSLYDIYCEKLALCDKEFDKVLQSVKSIDMRLPIAVPSGRVVRDRSKHAPVFNVRELAYMHLGVDLFDIKGVSHNTVLCVVSNMSREEMKKFPTVKNFTSWLRLAPNNKKTGGKIISSRTPKGKNQIALALRQAANSIGNQKDHPLTHFFKRIAYKKGRVAAITATARKLAVIIYHMITKQQAYQPINSEEIITRIKKHQISNIKQRLNKLNLLPDELNDIVRSVSLSAN

SEQ ID NO: 125192 - protein, 384 aa, unidentified
MQKPNDLNQSRIVLKQDSTLIAVIEMSLSSWLVAGIVPDVERQPLKKLAVDESALLKLLNRWREEAEKAGRRIERITVAFEAGRDGFWLARWLRARGIEAHVIHASSVAVSREHRRAKTDRLDTELLKRAFLGWLRGERDHCKMVAIPTTKDEDAKRPNRERQSLVGEQTRIVNRMKAALIRLGIRGFNPKLKKAAGRLEDLRTPEGEPIPPNTLAELHRDMERRRLVSDQIRQIEKARLERMEQAPGDGPHAMVRLIARVIGVGIETADMLVHEVLSRKLRDRRAVARYAGLTGAPDESGSKRREKGLAKAGNARVRGGMIQLAWRFLLFQKDSALAQWYRTRTEGGRNRKTIIVALARKLLIALWRLVTTGEVPAGVVLRAA

SEQ ID NO: 125193 - protein, 348 aa, unidentified
MIIIGCDYHTGFQQIAYVDTETGELHERALQHREEAEKFYRELAAQGMKVRVGMEASGHARWFERLLAELNIELWIGDAAEIHRKRERKQKTDRQDAQHILRLLLKDDFPKIWVPSWENRDLRQLLWHRHRMVQARTRMMNQLQAVALNEGLRYKKRLWRDAGRKQLEAFRLAPWASRRRHDLLELLDRLNPTIAELTQAIEREVEKCPEARRLQTHPGVGPLTALAFVLIIGKADRFRCGKQIASYLGLVPLEDSSGSRRRLGHITKQGNSLLRFLLVEAAQVTVRSDPGWRSKYHHLMMRRGRKIAKVAMARRLAVRMYWMMRKGWNYEQLKSSVRTRDNSYQAMV

SEQ ID NO: 125194 - protein, 325 aa, unidentified
MSRMQDKKNQPTTHVYVGIDVSKLHLDVFIRPLGRKRQFNNDIAGIKKLIRQCRSDHVHLVAMEATGRYHRLAHQMLHEANIDVAVVNPYRSRKFADAIGKLAKTDPIDAKVLADFAALLQPKPSQPPSRKQRALSDLNVARRQVLAEIGTLKRQSHETDHPLATRHIRARIKMCERHKFVLEQEIQNQINAQENLKHRFDILTSIPGVGPATATTMITDLAELGQANSREIAALAGLAPMNRDSGARSGPRIIRGGRKYVRNMLYMCAVGQSRREGFLGSFYRHLIKQGKNPKVALTAVMRKLVILANTLIAENRHWQPTPPVK

SEQ ID NO: 125195 - protein, 382 aa, unidentified
MTIMNTLEDFHRLSAALVSYDQPVRIGFEATGNYHRPLAHHLGQAGFDLKLISSVGLARTREALHNSWDKNDPKDAQVILHMLEIGAVQFFHDPLVVGTADIQELSKTHEIVSRSKTELWHRILTHYLPLYFPEAERFHRSSRTGWFLAFLEKYPTPTMITAMSRDAFVADAWQVVGKKVSKERLLSDIYATAVDSVGLPVHPDSDAVRMFRLVLAEGRSLVRQRNEIEARAVELLSDLPDYQLLTTIPGIGPINAMTILAEAGDLRRFRHHRQFLKFCGMDLATVQSGMFRGQSRISKYGNARLRRTLWMAGQTAVLKRTNSFRDKFERYISKDRHNAHLRRKAYTAIAAKMARTVHAVVNHGEPYRPFFEGVSPGGRTSL

SEQ ID NO: 125196 - protein, 335 aa, unidentified
MQIYGIYLAKKKFDVSFFDLTSKKVSNQPSHKVVKNNFKSIGRFLETLPSDAVLVAEHTGVYGDTLLKCCMDSNVKIAFVGGYVIHRYRATPDRAKTDVLDCALLRDFGERYPDKLKYKTFPEEALYELRQLARHREMLVEQRKQLITADKSEDCRPVRSLVVKRSMDRIKEMLDTEIAETEKEMLKVINGHESIRHNYELVKSVDGVGLITAVELLVKTENFTKITTARQYAAYAGTAPYEKSSGKMDKGAHISKIGNRRSKTLLYICAESARLHNKEIKLYYERRTLIDKKPRHYVLNAIANKLLRIIFTLVEKGEYYDANFIRQDPRVVKYN

SEQ ID NO: 125197 - protein, 443 aa, unidentified
MQQEYRRCAGMDVHKDVIEVCVLGPNGSGELTRRRFGTFTADLIQLRMWLVSLRVTDAAMESTGTYWIPLWRQLEGHIPKRVLANPYQVKALAGRKSDRRDSKRIAEFLQDWRLDSSFVPPPEIRQLRELLRMRVTVVQERNRLSNRVEKLLQSYGVKLSSVASDILGKTGERILQAMAQGQTDPERLSWKAVGKLRDKEEELRQALRASFDDHARWVLGELLGSLKENEGQRERLERRILTVMQPYQDRVTRLSTIPGVDQVAAWSLIAELGVDMIVFPDERHCASWAGLCPGSKESAGKQQSTRTRPGNRYLRRVLVQSAWAASRCKKGHLQAVFRRIAGRRGMKKAAVAVAHRILVAAYHILRDNTVYVDLGEDYLDMLNPERTARRLTRRLEMIGYQVTLTRGSQAGKAEPATTTQTARKRGRPCKCVERGFDCKHRGL

SEQ ID NO: 125198 - protein, 364 aa, unidentified
MAQEHPQAEAVSSVTIGIDPHKGSHTAAVLDSRQRVIGQIRVLATVVGYRELRRWAAGWPERRWAVENAGGLGRPVAQWLLADGETVIDVPPKLSARIRVLSTGHGRKTDPADAVSTALAACGPADLQAATLESHATTLRLLSDRRDDLVARRTQVLNRLHALLADLVPGTVPPRLSADTASALLRRSRPPAGPRRVRRALASDLVREARRLDREIAALEDRIDQAVAESRTKLTELFGIGPILAAKILGRVGDVRRFPSAARFASYCGVAPIEASSGDVVRHRLSRAGDRQLNFALYMMALCQARQHPEGRAYFLRKRAAGHSDKEALRCLKRRLADVVYRQLVRDARPAPPTAPSAAPAPRA

SEQ ID NO: 125199 - protein, 343 aa, unidentified
MNSTTIAVDVAKAVFEVAVSEHAGQVRERHRFSRERFRRYLGEQPPATILMEACGSAHYWGREAQTRGHRVVLLPPHAVRPYVVRNKTDRTDAKALLEATRNDEVRPVPVKSETQQALAALHRLRSTWLATRTARINTVRGLLREFGVVIPIGARHVVPALGLLEDDDGGVPSLLRPALAEAAREIRELEGRIRTVEHQLDAVAEQTPVVSRLCSIPGVGLLTATALVAAVGDVQRFPSGRHFASYLGLTPRERSTGQHRHLGAISKRGDAYLRMLLIHGARAVLCHAKTKTAPAPDRLRAWALHLERFRGHNKAAVALANKLARIAWAVWKYDTDFTAAPTA

SEQ ID NO: 125200 - protein, 336 aa, unidentified
MFIIGCDYHPRFQMIAVLEKATGEVKVLRLEHENGEAKKFYSSLPKGVLVGIEATGCTAWFERMVSECGHELWVGDPAEIRARMVRKQKTDERDALHLLDLLLTNRFPRVWVPSPEERDARQLLQHRQKLVGMRTSVKNQLHGLAMGQGLCRKQKLFSESGRKQLEALELGAWASRRREELLTLLDDLNPKIAELDKAVEAEAARRPEVVRLRAQKGVGPVVGLAFVLTLGTVERFRRSRQVVSYLGLNPLENSSGGHQRFGHITKQGNTMMRWLLVEAGQTAARLDAELGRVYKRLKYRRGANVAKVAIARRLAVKMYWILRQAPEPAPAGSHVR

SEQ ID NO: 125201 - protein, 416 aa, unidentified
MKYARTVLPTEPANGLTCGIDWARDDHAVSVVDSRGKEVLRSTIDHSAMGLQTLLSILTRTGVEEVAIERPDGPVVDVLLDAGITVVVISPNQLKNLRSRYGSAGNKDDRFDAYVLADTLRTDRIRLRPLVPDGPATVALRTSCRARKELIGHRVSMANQLREHLNRAFPGAVGMFAELDSPISLAFLTRFDCQDRADWLTPKRLGTWLAKVGYTGGKSPAILHARLTAAPRGVTGEHGTAHAHITHALVATLSVLVEQIKALSEQIADQLATHADAHIFTSLPRSGKIRAAKLLAEVGDCRGRFPTPEALACLAGVAPSTRQSGTMRSVGFRWSCDKHLRDAVTDFAADSRRANPWAQDLYRRARARGHDHPHAVRILARAWLYVIWHCWQHGVGYDPAQHRALQALLQDEQPAA

SEQ ID NO: 125202 - protein, 344 aa, unidentified
MEGYAGQQFVGIDLHRRRSVIVRTTDRGDALETVRISNDVDSLSKVMARAGVCPEVVLEATYGWYWAADALAEVGAVVHLAHPLGVKAFSYRRVKNDVRDATDLADLLRMGRLPEAWIAPPATRELRELVRHRAKLVALRSGCKCEVHAVLAKCGVQVLMSDLFAPTGIGLLERLDAPAPYLARVGSLRRLIDDLDVEIDSFSRLVRGRLVADPGYRAVQTIPGIGPVLAAVFVAEIGDVTRFPGPAQLASWAGLTPKHHESDTHVHRGRITKQGSRLVRWAAIESVQALGPGTGAGRLKHRVGDRRGRNIGKTAAARQQLGYVYYALRDGHVRALTQRPRVAA

SEQ ID NO: 125203 - protein, 367 aa, unidentified
MSNLLFVGLDVDDTAFHATIIAQDTGETWYFKCRPNSTKLIERLLKIHGNSEDFRICYESTYLGFSLCRKLREQDFNCDVIASSLIPEFAGKKVKTDRCDSQKLAQFYMKDLLTIVHVPNEEDESERDLVRSRTLIKDQIVATKNRIQSILRKTGLNFRQDTGKQMLWTIEYKKWLKRKIKEMKLTALKQNLILLTSSLDNLEDSLKAYNSEIDSLAISEKYSTKVKALTAYRGIQVLTAMKIITEIGDIKRFSHPKKLVSYLGLDIREFSSGGKEKKYGITKMGNTVVRTALVEANQKSSTKPAVNHAIKTRRKNVPIDHLRVADKCMNRLFIKSNNLLRREKNKNKVKVACAREMVAPYVRKVGT

SEQ ID NO: 125204 - protein, 357 aa, unidentified
MEKQLKQSLGIDVSKLNLSLSLGFLSERLVKEFKSHPDVSNDEPGYRELLKWLKKSVDSTVDLLIVMEATGVYHQGIAHYLHDKGYAVCVMQSGRVKRYAQSLDQRSKTDALDSRMLSMLGLERSIRLWQPPSKELQQLKALSRERSSLLKDRTIETNRQGAISSSVYSNAKALKRHKNRLKLLECQIALIEKEMQELISKNEVLKQKIGFLMSIPGISFISAATVIGETLGFESIVNAKQLASYAGYDIVLRESGNFKGKTRISKRGNSHIRAALHMPSMTCVRCNPTLKQFYNRLKPNKAKPLVALIAVQRKLLILMYTLWKNEEVYDAGFETKKQQKHKALAAQDNNLINQLVS

SEQ ID NO: 125205 - protein, 376 aa, unidentified
MSNVRFIGLDVHAETIAVAVAEPDGEVRSWGVIPNRPESIRKLVKKLGPTNQLRICYEAGPTGYVVYWQLTALGVTCEVVAPTLVPVKAGDRVKTDRRDALKLARSYRAGDLTPVWVPDTAHEALRDLVRAREAAKKDQLRARHRLGKFLLRQGRRPPAAMKAWTQTHLRWVNTVHFEHAAQEATLLDYLHEVEHMADRIERLEGAIDDAVNTAPTRMRAVIDALQALRGIALVSAVTIAAEVGELSRFAKPRQLMGYSGAVSSEDSTGRRIRRGAITKTGNAHLRRVVIEAAWAYRYRPAVGAALRKRQASVSQEVKALAWKAQHRLHARYRHLTAQGKCKQQTVTAIGRELLGFIWAIGVHVESETGRLKPIAA

SEQ ID NO: 125206 - protein, 339 aa, unidentified
MPLYSGIDLHSNNLTAAIMNEAGKRILKKRLVNDRDVVVATLEPYRTELVGIVVESTYNWYWLVDALMDQGYRVHLANPSAIQQYSGLKYLDDNHDAFWLADLLRLGTLREGYIYPKEDRPLRDLLRKRFHLVKLRTSLIISLKNILSRNFGLQMGSSRIKEESLDTFISGLPEGDNVILVVRTSKASIDFLTVQIDEVESAVLKQTKNKPVYAKLLELPGVGKILALTIQLETGPVDRFPKVGNYASYCRKVQSRWLSNEKIKGKGNVKNGNRYLAWAFSEAAEHARRFDPASRKFYSHKLNQSNAAMAHNALAHKLARAAYYMMRDNVPFEEARMFA

SEQ ID NO: 125207 - protein, 411 aa, unidentified
MAQEQRVVIGGVDTHKDVHVAAVIDERGMILDTAEFKATAKGYRLLVEWMRGFGELSKVGVEGTGSYGAGLARHFAEVEVSVVEVNRPNRQMRQRRGKSDTVDAEAAARAALNGEATVTPKTENGIIESIRVLRVAFTSARNSRTRVALQIRDLIVTAPEELRDPLGSLSTAQRVTRCARFRLGGDIAEPLEATKLALRTLARRYETLSAEWAALESALDELTARANPALRGANGVGTDVAAILLVAAGDNPDRLRGEAAFAAMCGVNPVEASSGKIVRHRLNRSGNRQANHALWRTAFVRLSTDPTTKAYAARRTAEGKSQREIVRCLKRYIAREVYRLIVEPGIVTTGSDLRSIRLSRGFSLALVAAELGTSINTISRLERALIHNTDLAQRYERWLAHAGDGVAKRAA

SEQ ID NO: 125208 - protein, 349 aa, unidentified
MSIVAETVEHVVGIDTHARTHTYCLLHARTGAVIDTATFPTTKAGNARAIGWIVRRGQGSVLAAIEGTSSYGAGISAALLERGFDVAEVRPAARSTHAHAGKSDTLDAEAAARSVIGRDYDTLARPRQSGTRTDLRILLASRSIIDQQRTANRNALTALLRAVDLGVDARKPLTDAQIRTIAAWRTSRAASSEVSAIARREGRRLAVAVLEQTESLKTNHRELRQLTEQLAPGLQEVPGLGPVTAAIIVCAYSHRGRIRSEAAFAALGGIAPLPASSGNTTRHRLSRSGDRQLNRAFDIAVRSRMSYDAATRDYVARRRAEGRSNREIRRCLKRYVCRSVFRQLQTCMA

SEQ ID NO: 125209 - protein, 402 aa, unidentified
MDIEDIDVFIGIDVGKSEHWATALSRDGQKVLDRALPNDEERLRALYKKLADHGNLLVVVDQPATIGALAVAVAQDMGITVGYLPGLSMRRIADLTPGSAKTDAKDAAVIAQAARTMPHTLRAISTSDEEAAALSMLTGFDLDLARQVNQTANRIRGLYTQIHPALEAVLGPWLEHDAVLEVITAWPTPAELKRAGKTRIDARLKKHGCRRHATWAGQIVSALEHQTVVVAGTDAAAVVLPHLARQLTSLHAQRADIAAQVETLVQAHPLYQVLTSMPGIGVRTAAVFLAETLGKTFDTGAQLASYSGLAPVTRRSGSSIRGEHVSHGGNKRLKRAMFLSAFASLRSDPVSRAYYQRKRDQGKRHNQAVLALAHRRILTLHAMIRNGALYDPQPATKLPAAA

SEQ ID NO: 125210 - protein, 349 aa, unidentified
MHYYTSTTEYNCGIDLHARQMYVCVMDSKGKILVHTNIKNNDFAFFLKLIERYRHDITICCECMFGWYWLADACAEANLTFVLAHALYLRMINGGKNKNDKVDSEKLTHLLRSNLIPPSYVYPSDKRPLRALLRQRIYFVWSRAELLARISSHQLAHNRVPAKQSRVDRDPWLDRLLAAEDHPLRQVALTNDMTMIAHFDQQIAKLDWELERQTKKVASRDFSLLLSVAGIGHSLGLTILHEIGDISRFPTVKNFLSYCRLVKGTVASAGKIKGLRGAKLGNPYLRWAFGEAAVIAKRDHSIIGPLAQRLEAKNGGNKFKANTVIAIKLARAVFFMLKNKTAFDPERLA

SEQ ID NO: 125211 - protein, 328 aa, unidentified
MFVVGCDVSKATLDIAWYDEELGRWFTPPNISNTRAGFRKMLQWMRKVCAAELQDISLVIEATCVYHQPLAEYAYTAGVTVFVTNPARAAEHARSQNQLNKTDKLDAQGLQLYGRHLQNCHEYVPHCASVQALQALLSRLRQLDGDLLRERNRLEKTPFVPGSQPMSASIKRHIKYLEKEKNRIQAQIEAVIEQHDRLRHVQKLLLSIIGIGPLTSQALLPLLYRDQFTDARQLAAYLGLTPVHKHSGTSLHKRGRLSGRGDRHLRAQLYMPAVCASRYDPAMRVRYKELIARGKAPKQAVTAIMRKMVHVCYGVVKNDQVYKCPIAA

SEQ ID NO: 125212 - protein, 314 aa, unidentified
MASRPERFIGIDVHKDTLEARVDDREERWEFSNDAAGIEELVTTFGPLSPTLIVVEASGGYERVVVAEGYAAGLPMVVVNPTRVRRLAEALGIIAKTDAIDAQVIARFAAIVRPAVREPQSAEQQRLNALVTRRRQLIAIRTAEKSRLSTCPELMRTDIEEHVAWLDGKIEDLEGEINDMLANNPSWRKLTALVSSVPGIGEVTAATLVAELPELGTINRQKIAALAGLAPYNRDSGPRKKGRRIFGGRAQVRCVLYMAALSATRCNPVIRRFYERLIERGKEKKVALTACMRKLLVIVNAMVRKQEHWEYVPA

SEQ ID NO: 125213 - protein, 334 aa, unidentified
MINSESKITNTTIIGVDISKNYFDIYVLTSGKTMRFDNNTRSIKKFIKYIAPLNPTIVAMEYTGGPERNIFFALQNNNIPCCCLKPINIKNFSKTIDAKAKTDPISAKLIAHYTFLYKPAPQPKPDEKLLLLKDLASRHLQLTQFLSSEKNRLSLSTFAKTKSQINKSIKVVEKLIEDNRKQLKELICLDTELKEKVELLDTMPGVGEHSAMMLAVLLPELGKISGKQIASLCGVAPFVNQSGKAIGKASIRGGRDKVRQILYMVALVAIVYNPSIKEYYNRLIQKGKPAKVALVACMRKIIRILNAMIKNNKPFIPDYYETYVREQNNITKLI

SEQ ID NO: 125214 - protein, 377 aa, unidentified
MHSENIAAYVGLDVHKETLAVAIAAPERLGEVRYYGTINNEAQAVRRLFQKLQGLYGNILSCYEAGPCGFGLYHQLTAMNIKCQVIAPSRIPKSPTDRIKNDHRDAISLARLLRAGELTPVWIPDLTHEAMRDLIRARAAAKRDSRVARQQILSMLLRTDKHYAGKHWTGKHRTWLANQSFSQPSQQIAFQHYCQSLEQIEDRILQLDQEISRLLPEWSLCNLVCQLQALKGVGQLIAITLVAELGDFSRFSNPKQLMAFLGLVPGEYSSGNSIRPRGITKVGNSELRRLLYEAAWSYRTPAKVGAWLIYYRPDSVTQYSKDIAWKAQQRLCSRYRSLTAKGKKSQVAITAVARELTGFMWDIALAAQSSFSQQKQN

SEQ ID NO: 125215 - protein, 372 aa, unidentified
MPSMPEHAPSAQTDTEGEVILGVDTHADQHVAVVITVLGAVVAAETFAATAAGYRALLAWGRGHGLVRKAGVEGTGSDGVALARHLRSAGVEVIEVNRPDRAARRRRGKTDAVDAEAAARAVLGGLATVTPKSADGPVETLRLLKLAKDSAVKSRTQAINQLKAVLVGADPALRESLAGLGRATLVRRCAELPDPPAATEPGAGVAGTVVFTLRLLARRIQHLSAEVKDLTKRITDVIAAHAPQLLERRGVGPDSAATLLITAGDNPERLGHEASFAALCGVSPIEASSGKTRRHRLNRGGDRQANSALYHIALTRLRCDPRTRDYVDRRTAEGKTQREALRCLKRYIAREIYNLIRPTPATTAPTSPPLAA

SEQ ID NO: 125216 - protein, 382 aa, unidentified
MRHGGILLEANDSEGESMKKNTTTNQYVPTDVLKCTVIAVDLAKRVFQVAGQDAAGLTVYEERINSRESFHTFLRKLPTSVTVLVETGPGAQAWAQLLKTQGNPVRILPAQHVANHRSGPKNDRNDALAILRAGRDTSISSVPVKSAAALAMQALHRVRQGYVRRRTAMSNQMRGLLLEHGLAMAQGDSAFSQGIPRILEDATQPLPDMLRELIDELLGEWSQLGERINVLTGRLETAAKNDETAKRLMTVRGIGPIISTAVIAKQTEPERFANARQFAAYFGLVPKQNSSGEKVRLGKMSKHGDAYLRSLAIQGAHAVLRQVKANSEDPDDRRLQRWVSRLGRKEAAVRLANRNLRIIWVLLQNDQTYRRQVNNDLEKAMS

SEQ ID NO: 125217 - protein, 383 aa, unidentified
MKAVCGLDVHKDSIFLCILHSDGELFEQVFGVLTFQLEEMRKLLQKHHVFEVCMESTSIYWIPIWRVLSPHFTLRLVNPYFIKQLPGHKSDVKDAQWIAECTMKELVRGSFVPPEIIQQLRQYDRRIFDLNAEIVRKVSKVDGVLQRCNIRLSNYVSNIECKSYRDVVRRLSEGVANPNELMKLVHGRIVNRHGVETILASLTGVVSQAEIDVLRQLHEEIDIAESHRNECQQRMLEICEKHFPEELERLQKIPGIKERAATSLIAEIGTDMSKFETANHLASWSGLRPRNDESNKKIKSRKITHGNVYLRNTIIQCAWAASRQKDSFFSRFSYHQTIVRRKNKMKVIVAVARKLLIAVWHVLHDKTDYVDFKPDREESANNG

SEQ ID NO: 125218 - protein, 356 aa, unidentified
MDNHKYVGLDVHMATIVAAVHDSAGKCLMQSVIQTRADAIRAFINGLSGTIHVAFEEGTHAAWLYELINPLVADVVVCDPRRNKLLLEGNKGDMVDANKLAHLRRAGLLKAVYHGEHGTRALKELAHSYDSLVSDSIRVMNRLKAVYRGRAIECTGKGIYAKSRRQEWLNKLNEPGVKIRTELLYRELDSLKELRREARKGMIKESRQQKASKLLEGVPGLGEVRAALIIATVVTPFRFRTKRQLWAYIGLAVVTRDSAEYEFDGARLQKRRRKPAATRGLNRNFNRRLKKAFKSAALDAIKTEPLKSYYQGLIQRGLRPELARLNVARKLAAVVLSLWKKGEKFDQEKLTKYIAA

SEQ ID NO: 125219 - protein, 405 aa, unidentified
MFEIEDVGVFLGLDVGKTAHHGHGLTPVGKKVFDKPLPNSEPKLRAVFDKLTAKFGTVLVIVDQPASIGALPLTVARDAGCRVAYLPGLAMRRIADLYPGEAKTDAKDAAVIADAARTMPHTLRSLELTDEITAELTVLVGFDQDLAAEATRTSNRIRGLLTQFPPSLERVLGPRLDHQAVTWLLERYGSPAALRKAGRRRLVELIRPKAPRMAQRLIDEVFDALDEQTVVVPGTGTLDIVIPSLAASLAAVHTQRRAMEAQINALLEAHPLSPVLTSMPGVGVRTAAVLLVTVGDGTSFPTAAHLASYAGLAPATKSSGTSIHGEHAPRGGNRQLKRAMFLSAFACMNADPASRAYYDKQRTRGKTHTQALLRLARQRISVLFAMLRDGTFYESRTPKDVELAA

SEQ ID NO: 125220 - protein, 410 aa, unidentified
MEVLVSRGCGLDVHQATVVACLLTGEPGRLPRKQVKTFSTMTSGLIELRDWLKADGCTAVAMEATGVYWKPVYTILEGHFELVVANARHIKAVPGRKTDVKDAEWIADLLRHGLLQPSYVPPPELRELRSLLRYRVKLVNARSGERNRIIKLLESANIKISSIVSDVFGVSGRLMLEALKRGHATPEEMAELAQKRMRSKIPLLKLALDGRMEAHHRQLLSLQLDRLDRFEADLRQLNAKLEVKLKPYERQMELLDGIPGIDWVVAATVIAEIGVRMSQWPSVGHLTSWAGLCPGQNESAGKRGKSSVRPGNPYLRSALVEAALAVTREKNCYFREKYYRLKARRGHKRAVVAIAHKILVAIYHVLTSDTPYQELGADYLEKLEPERLKLNLVRRLERLGYRVNLEPNRG

SEQ ID NO: 125221 - protein, 336 aa, unidentified
MMNPVIGLDVVKGESQVQAFLDKKQPYKKSFKVTHTLEGLNSLLNFIKEVEDVSGGHPPIILESTGHYHTPIVQYFEDRGYLLIIVNPLISYRAKSSILRKVKTDIIDAHHLCELYYKEDLEPYKQRGIQLLNLRILTRQHKNMTGMFVQTKLQFQVVLDQVFPEYCGVFGSLYSDVSLRTLQAFPTSEEILEADKETIANKIKELCKSRSQQWANSQAEKLMAAAAQNPFQKALYHSLSLSLNMYINMLFEYKKHLSMLEDEIDTLAKNIEECKIIQSIPGIGKKIAATIISEIGEINRFNHPKKLVAFAGIDPSVFESGTFKGTLSKSNYQKRL

SEQ ID NO: 125222 - protein, 453 aa, unidentified
MVRRNARISLKPGKSRAALTITHPNAAGIDIGSGSHFVAVPPDRDDTPVREFPSFTVDLNALADWLKACGVDTVAMESTGVYWIPLFELLESRGFTVLLVNARHVKNVSGRKSDVLDCQWLQQLMTYGLLSGAFRPADQVCVLRSFWRQRGMLLRSQGRHVQHMQKALTQMNVQLANVISDVVGETGQKILRAIVAGERDGQLLGSMKNARIHASVDEIAKSLQGNWRTEHLFVLKQSLDAFDFVGTQLTECDNEIERQLQCLQRHEGEPAKGRQRGRSRNAPKFDLRAQLFKMCGVDLTRIDGIDVTTALAVVSETGADMSRFRTVRHFTSWMNLCPGTKISGGKVLSSKTKRCANRAAQALRLAAAALRTSQSALGAYFRRMCSRMDKPKAITATAHKLARLIYTMLTKGEEYTDQGQDYYEERYRERVLRQLSKRAQALGMTLVATAQPT

SEQ ID NO: 125223 - protein, 402 aa, unidentified
MITCGIDIGKGKHAVAVIDESGRQLVRTRFYDNTKAGAERMLAELLRHAEPSQIHVGMESTGNYWRAYYDFLKGRGCVVDVINPIVTSASSAGDIRGRKTDKRDAESIAEVVLRGKYACRRDEGLQERKLRALTRQRGFIVEERSAAKLHLASLVAEAFAEFESLFEEPYGALALAVLSKYPTASHLARARKSSLAKIVRANTRGKDADAEALRLIGGAKDSISLSCEITDALARCVTSSIRTIMDLDERVKDVEEAIKGFDPPDLASKLMAIKGSGKVMPMVVAAEFGDISRFRNNPKDGSEAGMHKRLLAYAGCEPRIRESGKWKGRKFISKRGSRQLRTALYLLANNIRQWDPYFKAVYERKIGSGKHHNVAVFYVVAKLIEVLCALYKSGRNYAAIQP

SEQ ID NO: 125224 - protein, 367 aa, unidentified
MTVTIVDAARPATGGADTHLDLSIAPRLVTGGVDTHLDLNVAAALDPVGGLLGVAEFPATLAGHRRLLGWLAGFGPVTRAGVEGTGSYGAGLARFLRGAGVEVVEVDRPNRQARRRSGKSDPLDAIEAARAALSGRARGAAKSRDGNVEAIRALVVAKRSARSAKIQALNQIRHLSFTAPDELRQQLAGVSRQQLAARAAALRPATREGADPVIAATKTALRILGRRVLALDEEKARIDALLTTLVTKTAPQLLAVFGVGVDTAAALLVTAGDNPGRLRSEAAWAHLCGTAPIPASSGKVTRYRLNRGGDRQANRALWGIVITRLGNDPRTRAYMARRLGEGRSKPEVIRILKRYVAREIYHRLPRP

SEQ ID NO: 125225 - protein, 320 aa, unidentified
MNATTVAVDLAKSVFELAAADEHWKVVERARLTRGQFDRWFQNRAVRLVVMEACATAHYWARTLGARGIEVRLLPAKYVRAYVKRNKTDAADALGLLEAARGADITPVAVKSIEQQALQALHRLRSGWMSTRTRRINMLRGFCREFGMEISVGAARGLALEEIRLMEARIDSLERELAAIARQSEPCKALSSVPGIGLLTSTAMVAAVGDPRSFQSARRYASFFGLTPREYSSGEHRYLGRISKRGNRYVRTLLTHGARSVLRAATVARRAGRNLDRLRSWALEVQARTNHNKATCALANKLARIAWAVWVKHERYQAAS

SEQ ID NO: 125226 - protein, 366 aa, unidentified
MRSVSQDNQLVYVGLDVHKDSISAGVLTPGREAPEVDRFFADEVCLRRFLEPLGDPKRLRVCYEAGPTGFELARLLQALRVHCEVIAPSLIPRAPGDRIKTDRRDARRLVRLFAAGQLIRIHVPSRQEEAVRDLCRARTDMVIDRNRARHRLSKFLLRHGEVYRGGTEWTDRHQRWLTAIRFADPALTSTFGHYRGVIEARTAELRAVESDLVTWCARDPFAEAVRRLGAYRGVTHLGALSIAAEVTDWRRFPRAETFMGFCGLVPSEYSSGTKTWRGRITGTGNTQLRTHFVESAWSYRHRPAIGRDMAKRHQGLEPEVLARAWHAQQRLCTKFHRLAARKNAQKLVAVAVARELAGFCWAEMTA

SEQ ID NO: 125227 - protein, 344 aa, unidentified
MEHYAGLDISLKLTAVCVVDERGRVVTEGKVPSEPAAIAAFLQPFAETLTVAGLEAGLLAPYLYSGLVACGVRVVCIETRHMKAFAKASPIKTDRKDAHLIALAMKAGLYRAVHVKTDESQRLRFLLTARELLMRQVRQLEGTLRGSFKAFGLRMGNIAKRQFADRARELAQGQGLLAEVMRPMLAARKAMLEQLARLDRMVLLAARRDPVCRRLMTAPGVGTVVALAFRTTIDMPQRFRQSAMVAPHLGLTPRKYQSGQTDRSGRISKYGDAMMRHLLYESATLVLGRLKRPVAVKQWGLQIAERRGIKRARVAVARKLAVILHRMWLDGTDFRWDAPTASAA

SEQ ID NO: 125228 - protein, 365 aa, unidentified
MDQGITFIGLDVHKRSIVVAGRQPGSGVIEERVPHEVPAVKRWAQRWKRRSGGQLLCAYEAGACGYALQRQLEALGVPCQVVAPSLVPRKPGERIKTDRRDARKLAEYLEGGLLTEVRPPTPSEEAARDLCRAREDAKQDRMRCRHRLSKFLLRRGRSYPAGRRSWTLAHRAWLKQQSFEDLSEQAVFDDYRLAVEQVDARIAALDRQIERLAQEPAYRAAVGALRCYRGIDTHTALGLVTELHGIERFDRPSGLMAFVGLVPSEASSGDRQRRGAITKAGNGHARKLLIEAAWHARHKPAIPVALRQRRQGQPPEIIAMADVAQNRLHRRYWRLVQRGKPTTVAATAVARELAGFVWAALRAVA

SEQ ID NO: 125229 - protein, 394 aa, unidentified
MIVIGADTHKGSHALAAVDDGTGKVRGHREITADDAGHLAAVRWARGLDEDRVWAIEDCRHVSQRLEQALIAAGERVVRVPPQRMGASRKGEREPGKSDEIDALAVARAVVKDGVEAFPVAYLDQRAMEIRLISDHRNNLVADRTRVVNRLRWHLLVLCPELESALKRGAFNRARVLDRVERRLRKLPAGARVQIAREQITQLRARNRQIDQLHRELAELVAAHRPNLLAEQGCGAVTAAILIGHTAGNQQFRTEASFAMKAGTPPVPCSSGQRTQHRLNRGGDRELNHALHIIAITRAQRDPATKQYLARKEADGKTSKGALRSLKRHLARRFHKLLAEPPADQQQAHGQPPVKLQPADSNNKPPEIPPRPAPRRPVDPTIKGQGPFPMVCIT

SEQ ID NO: 125230 - protein, 403 aa, unidentified
MAAIRTGGIDWALEAHEVCLSEEGRVLERFSVAHDEEGIAALAAKLAKAGVARVAIERPDGILVERLLEAGIEVLAIHPNQVKAARPRFAVAHGKSDRFDAYVLAELARTDAHRFRALVPDGDETKALKALTRAREDLVGVRVQLANQLRAQLAAFWPGALIFADVDSPISLAFLKRCPSPADAKGFGPKRLAGFLARHRYCGRRSAEELLERMRSAPAGRAGELETEARRAVVLGLVGALEPIVTEISELTSQIRGALAAHPDREVFAPLFRDVKTAISPATLIAELGDCRERYPTEAAMAADAGMSPVALESGKLRVATFRRACDKRLRAAVARLADSTRHWHPWAREVYRSARARGQDHPHAIRTLGRAWIRVLWRCWQNREPYDPARHGNFNRLKAAEG

SEQ ID NO: 125231 - protein, 394 aa, unidentified
MIYVGIDVASTKHDIVISSESGELFKKAFSIKNDLDGYKKLLSEISSAKEFFNDLNVRIGLESTGHYSRNILHFLILARFEVMFINPLLTNMDRKAASVRKTKTDAIDAKTICMFLIRNQNDFKPYTLSSYHIDELKTLVRQRKSLKTQINKEMNLLHAYVIQAFPEYYRIFKKINSKASMEVLNRYASLSEFKRVRLETLKELIRKSSQGRHGIREAQMLKELNSSSIGIDSSALSFSIKQTIKRILMIKEQICDIEREITHHVDESHTTLLSVPGVGYTTGAIILAEIGDIHRFKTDDQLLAYAGLDPSVYQSGNFEGSYKISKRGSSILRFAIYHVAQAAVKFDPVFKAYYLKKKAEGKRHRVIIGHVTKKILRVIRSIMKNNITYSINTH

SEQ ID NO: 125232 - protein, 413 aa, unidentified
MERVLERCAALDVHKAQVTVWARVPDGRGGREDLRARFSTMAADLLALRDWLGELGVTHVAMESSGVYWKPVYYVLEDEFELLLVNAQHVKNLPGRKTDMKDAEWLCQLLECGLLRASFVPPREFRELRDLTRYRKSLIAERQRQANRLHKVLEDAGVKLSCVATDVLGVSGRAMLEALISGTRDPEVLAELARGKLRKKIPQLKQALAGRFSAHHALMVGHILAHLDYLDEAIGQLTGEIEERIAPFAQKAERLDAIPGVGQLTVQAILAELGVDMSRFPTHRHAASWVKICPGNHESAGKRRSGRTGKGNHHLRVALVEAAQGAARTKDTYLRAQYEQIKRRHGHNKAIVAVAHSILIAAYYMLRDDIAYHDLGGDYFARRSDPERTTRRLVAQLERLGHQVTLQTLPQAA

SEQ ID NO: 125233 - protein, 367 aa, unidentified
MKKHTTGNQSLSPSDLAACTTVAADLAKRVFQIAGEDALGQVLYEERIKSREGFQAFLCKLEPHVVVLMETGPGAQAWARQLQDQGNLARILPAGRVADHRSGAKNDRNDALAILRAGRDDRISAVPIKNAAELAMQALHRIRQGCVRRRTAVGNQMRGLLLEHGVAMAQGEAAITQKVPRVLEDATQPLPDMFRELIDELLAEWCHLGERIRGLTGRLEEAAKQDRTTMRLMTIRGVGPIIATAIVAKQTRPERFADARMFAAYFGLVPDQNSSGERVRLGRMTKRGDSYIRSLAIQGAHAVLRQLRHDSDQPDDRRLLQWLNHLGSKKAAVRLANRNLRIIWSLLQNDQTYRREPSNRQETAMSH

SEQ ID NO: 125234 - protein, 355 aa, unidentified
MTKGNILGIDLAKNIFHVCEMNLQGRVVKRARLSREQLSAWVVMHFQGVIAMEACGGSHYWARTFEALGYEVRIIAAQFVKPFVKSNKNDRIDAEAICEAASRPQMRFVATRSEGQQDIQNLHRIRERLVCNRTALANEIRGLLLEYGIIIPKGITHLRNQLPSILETHRDSHSTLWHKTFLDLYREFCDVDSRIEECDSSLKAISRTNEACVRLEKVPGVGTITATAIIAAVGSAKHFKNGREFAAWLGLVPRQHSTGGKSSLGRISKRGDPYIRRLLVVGARSVAIAAEKKRNHKDPNKRSINRTSQWLFNLADRRGGNRAVVALANKTARRIWVVLRGEDFKQPEELMPLAA

SEQ ID NO: 125235 - protein, 420 aa, unidentified
MASHCQFYNYKFQEVILLSFKILKFKCCGLDVHKTWIYACIGITDSNNRTEYKQARFSSFTKGLNELCDWLAKYNCTDVCMESTGKYWIPVYNILEKGCSIVLAHPKYVKAIRGKKTDKKDAKWIADLFKFGIVRSSFIPQKDFRILRELTRYKYKLVNIRSSEKNRFQNALTSGNCKLDMVFTDVFGKSASNIIDLILSDNTYTDEDILSKVHKKCKASPDMDLDSINGTDLTPVQKSRIELVNDHIKQLSSNIQRLDKLIDLMIEPYEDYISFLCQIPGVSINSAITILSEIGVDMNQFTSTRRLTSWAGLTPSSNQSTGKKKSVRISRAGVYLKPCLVEVAHAAVKDKNHPYYANKFNKISKRRGKKCAFIAIARKILVGAYYMLLTGEIWNPADLAEVETPVEQRIKYVNQILNNY

SEQ ID NO: 125236 - protein, 352 aa, unidentified
MNQIKYIGMDVHKAMTVIAVLDSAGKVLAEAIIETKGSTILDFLKSQRGDLHVAFEEGTQASWLYDLIHPHVSAVIVCNPSKIVRHGNKADKIDAKLLAELLRTGALTPVYHGEKSARAVKELALSYISVVADGTRIKNRLKAMFRGRGIECNGAGVYDPDERKEWMAKLDSKAVRARADRQWQELDLVERLIEEAEDDLLAEARTYAATRILRSVPGIGPIRAAVTLGVVGTPHRFRTKKQFWGYCGLAVVTATSAEYELVNGQVRRSKKRPLLRGLNNNYNHAMKEVFKGAAKTVAAGVWKSRFEAMVANGAPESLARLTLARKIAAITLAVWKKGERYDQRKMKTMHAA

SEQ ID NO: 125237 - protein, 322 aa, unidentified
MEPTIVGIDIAKKKFDVALPLGEKTKSGTFHNTPAGFAIFARWLTKHGVERAHVCMEATGTYGEELALYLYRAGHVVSVVNPAKIKGFAQSELSRTKTDKADAALIARFCRAMRPEAWQPPAPPEVKKLQALVRRLEELNGMLTQERNRLATANEVVRPSIEGGIYHLREDIRDTQRLISDHIDQNPKLRANRDLLQSIPGIGPTTSAMVLAEFGDVERFGDARHMASFCGLTPRHRQSGSSVRGKSRLSKTGSSRIRRALYMPALSAIRYNPVIVAFRTRLLANGKSRMVIVGAIMRKLVHIIFGVLRSGRPFDPSIAAAA

SEQ ID NO: 125238 - protein, 263 aa, unidentified
MTSFLGIDVGKATFNATLLFGERTWSKSFPNNKAGLPQLASWLKNRKIESVHACLESTGGFEEALAIDLHERGHIVSVVNPSRVKAFAQSELLRTKTDAVDAALIARFCKAHLPEAWVPSAPEIRALHHPPLREQRDLLITIPGIAGLTASRILGEMPNISEYRSARSVAAFAGLSPREHQSGNSRGRSHLAKTGNSRLRRMLYFPAMSATRRNPLLKALYDRLVARGKPKKVALAAVMRKLLILAYGVLKSNQPFNFAYANA

SEQ ID NO: 125239 - protein, 425 aa, unidentified
MLGVGIDWAEEFHLVALGRQGEGVIEVSRVEHTPGAIDALVGRIASLEPDPAEVRVVLETRHGMLVERLVDAGYVVVPVNPDLVARRRGPAKKKDDAEDARIACLIALDRFEVLRPLVPHGEVAGELRAIARDDLRAGRDERRLLNRLRADLIATFPAALVIAGQDLGSPTFLHMLERWPTQKSLAGASREDLEAFARSAHHGWPGRFADKVHSALGGAHFVPRGYLVRAKADTIRLAATQLIAIGAQRRAWERRMGELLLGAPRRGRAKKPREEDMGEAFPGGEIYLSFPGLGDRLAARVAGEIGDHPEQFSTPNSLQCYAGRAPVTRRSGKSELVVACRLACNRFLADAVHQWAFCSLEHSGWAREFYDAQRARGKRHNAALRALGNRWLEVLWHCLNRVVLYDESLHVANRTRALGRAPEAA

SEQ ID NO: 125240 - protein, 327 aa, unidentified
MQAVTTIGLDIAKSVFQVHGVDAAGQVLIRRQLKRRAVLAFFEKLPVCLVGIEACASSHYWSRELQALGHSVRLMPPAYVKPYVKRQKNDMADAEAICEAVARANMRFVPTKTPEQQSCLMLHRTRHLFIRQQTAVINSIRAHLAEFGIVAPVGRKGVTELLHIVADPSDKRVPEVARACLAALGNQLLSLKEQIVKFDRMIMVWHRSNETSKRLHYIPGVGPMLATALVASVADPRTFRSGRNFSAWIGLVPKQHSSGGKDRLGSISKQGDRYLRSLFVAGALAVIRYAKIHGTKHRPWLTALWRGGRPRSPPSRLPTSLPEWPGP

SEQ ID NO: 125241 - protein, 355 aa, unidentified
MTASYEYHIGVDYHKSYSHLVVQDSAGKTLRSGRVKNDRQSLGGFLERYRENSHAVVEATRNWMVMYDWLDDICDDVVLAHPLKVKAIADAKIKTDKIDATVLAHLLRADLVPEAWAPTDKARELRVALRERMFYVRLRTMTKNRIVTVFDRYPEQTAQLKKLGDLFGKAGRAQLAQVRVSEIDRIQIDRGLEFIADIDGRIKQSEATIRAMTKANANVKLLKTIPGIGEFFARLIDAEIDDISRFRNAKKLAAYAGLVPSTYSSGGKTFHGRIIRQGNKWLRWAFVEAVTPAIVTDPQLRAQYEHLKFRGVNKARVAVARKILTIAFQILRDQRAYEPRGTSPMEGASTISRLS

SEQ ID NO: 125242 - protein, 434 aa, unidentified
MPQALISAMNLTTWRYRRAGIAPVRRFGCTTAELKAMAGWLKQSGIRTVAMQSTGVYWIAVYDVLEAAGLEVYLVNARETKNLPGRKSDVQESQWLMKLHTYGLLRNSFRPPQEIRTMRTYWRQRNDLVRAAGRHIQRIQKTLTQMNIQLANVLSDVSGMTGQTIIKAILEGERDPHKLAAFRDFRVKASEEEIARSLEGHWQEDLLFVLKQEQDGYEFCQKQMAECDRRLKQYLQQREDRSQGATLPEEKRKERLRKKKKGNAPGFDLRAELFRMTGTDLSQIDGIDVTTAMTILSEAGWDMSKWETEDHFVSWLRLCPDNRISGDKIIGKGRLPTNNRVTLALKMAASTLRLSNTYLGAQFRRLRTKLGAPIAIKAMAAKLARLVYRMLRYGMQFVDRGAKFYEAQHRNQQISYLKWKAAKLGFKILEASAA

SEQ ID NO: 125243 - protein, 323 aa, unidentified
MPASEVFVGIDVSKAHLDVAISDSDATWRVANTEAGIEELVARLTGPEPALVVMEATGGFEIPTAAALAAASLAVVIANPRQVRDFAKATGQLAKTDRIDAQVLAQFAARVRPRVRPLPDEETRALDAIIARRRQLIGMITAEKNRLGFALEPVRKRISKHIRWLERELASVDSDLDQMIRSSPVWRAKSDLLRDVPGVGPNLARTLIAELPELGRLSNKEIAALVGVAPLARDSGVLRGKRRVWGGRAPVRSALYMSIWSASKHNPVIRVFYDRLRARGKPPKVAQVACMRKLLTILNAMLRDGRKWDPSIPLEQLRLQHSC

SEQ ID NO: 125244 - protein, 483 aa, unidentified
MNIGEASEHSPRLESTYQPTWAVVFGKVAQMQDDRKDIKGLPVVLHDVAGIDLGSTEHWVCAPMINGVGREVAKFGATTPELIRMAQWLHERKVESVAMESTGVYWIAPHEVLEAQGFELLLVDTRQLARVPGRNKKTDRTDCEWIQQLHSCGLLAGSFRPQEDICMLRTLVRDKANLVAECGDWLRRMQKSLDQMNVRLHRAVSDIDGLTGMSILRAIANGERDPRKLAKFRDPRCSRSEEEIAKELTGHWREDHLFSLRQSLKMYDAIQERIAAYDQEIQRKLAELGQENPPAGPAPELKNPEKARSIKKRGEEPMRQALYQMAGVDLASIDSIGVATIQIVLSEYGPDLSCFPTEKQFVSHATLAPHKPTSGGKPLKKKKRNSASSRVAAALRMAALSQRHSNTALGAYYRNIARRKDGGVAVFATARKLATYIYRLLRWGQPYVDEGAVAYEKRYNEGRVKALMAKANQLGYKLTPATS

SEQ ID NO: 125245 - protein, 424 aa, unidentified
MGRAAREWHHRRCNKTDEVPHAAAEFKRPRPAPGQALSRSLAALDENSTLIAVIEMSQSSWLVAGVVPGVERHPLKKLAPDEGALLRLLERWRDEATKAGRTITRITVAFEAGRDGFWLARWLQARGIEAFVIHPNSVAVSREPRPSPGQAGRAKTDRLDTALLQRAFLGWLRGERDHCGMAAIPTLEEEDAKPPSRERENLVDERTRIGNRIKATLARLGIRGFKPTLRTAPDQLDRLRTPEGAPLPPNTRAELRREMARRRRLAEQIREIEAARCERLQQHPDEGTHPMVRLLAQIVGVGIETADMLVQEVRSRNLRDRRAVARYGGLTGTPDESGARRREKGLAPAGNARVRRGMLQLAWRFLMFQKDSALAQWYRARTADARGATRKTLIVALARKLLIALWRLVTTGEVPEGVVLRPAR

SEQ ID NO: 125246 - protein, 363 aa, unidentified
MQICERAKTLFVGVDVHKDTHTAVGLSPFGEKLFELTIGNYPQDFAELAEKVRVAAETANLSPRIGLEDCNGFGQRLAEYLDNDGYTVTHVPPILVDHKRKKAAHPEKNDSLDARGVAEVMIQKIDTLPVNKITQDSQIAKDIQELSLDREYLVKEQTRLKNQLHLLLHRIWNSEYREKFKDPFSVKGLRFWKKTVPKNTSSFLAKNMKRKVKKLEALRLEIKELESDMETLIEKSGHKVHTANGCGIVLASMIIGEIGDISRFKSPSALAKYAGCAPREHSSGKTHRHRKTRSGNRRLNCAFHRLALSQISRMGNEKAKTYFLRKISEGKSKQQSLVCLRRQIVNIIWMIMKHKTDYDLRKS

SEQ ID NO: 125247 - protein, 349 aa, unidentified
MKHNATYIGLDIAKNVFYAVGKDERGNEVLKRKMSRDQVLTFFANLPAAKVGIEACASAHYWAREISRLGHEVRLIAGQRVSRRVVGNKNDYRDAKAIGEMRAEPETLYVPTNTEAQQDVQMLHRVRQRLVESRTALLLQIRSLLGEYGLSFPQGATPLRKVLPGVLGGEHNGLSPGALETFSDMQEQLTALDKRIEHYDERIQRLARQDAQAARLMELPGVGPLTATAFVAAVGDPHHFHAGRNISANLGLTPHEHSSGGKQQLFGISKRGDRYLRTLLIHGARSALRCAAGKEDRLLQWALKLKEAKGFNVAAVALANKLARVAWAILAHGHRYEAQWNPQPAVTMS

SEQ ID NO: 125248 - protein, 355 aa, unidentified
MRIIGCDLHSRQQTLSMLDAETGEVEEHVLEHEGEEVREFYSGLPGPVRVGIEASCATQWFLQLMEELGVECWVGHPAKIRAYEPRKQKNDRRDARLLMHLLEQDIFPRIWVPSVEQRDVRALLMHRHQWVRIRVRIQNALQSIALGHGLRRGSGLWSKDGQLSLLALSLPEHTDARRNELMTLYSQLEADIEVLDRMVAETAEERPLSRLLMTHPGVGPNTALATEVYLGDPTRFADGKAVGSYVGMIPEEKSSGKKWRLGKLTKQGNTMLRFLWCEAARHAVRHDAELKRFYTRKLAQKGLGKATVAAAASWGYGCGSCCAMRLSTTSSAVVDGSAGKPMRRGLIENVVQRKR

SEQ ID NO: 125249 - protein, 414 aa, unidentified
MNTAREDQTYWVGIDWGAQEHAVAVCDNQRRIVSSFRMETTLEGLNALVTRLHEFERVVGIAIETPRDLVVVRLLEEGYAVYPINPKLSHNWRNCTSVAGVKSDEYDAGMLALELSRRHESLTAIGPKDAAAQEFLGLCDTLRFLIDQRTSHLQRLRAVLRRYYPAALDFWDDITAPSAWAFIKKFPTPTVLAKTRKDTLIKFLRGRRIGLRPCWLERIDKIGQATAWPASPTAAGEELMALACVAQLQALEPRIKMLEKEIAEKGKGFEALDLIESLPGAGKSLAPAITAIVVNLEEGGDAGEQLRRMAGVAPVQDESGKRVKTVIRRRCNKRWRNIFHLFAWCSIRRSAWANAFYKLCRERGDSFATALRKLADKWIRIITCMIREKRPYDENEYIGSLRKGGSPIYERLCG

SEQ ID NO: 125250 - protein, 415 aa, unidentified
METQRNRVCGADIHKKFLVATILSRDGTKKTKRFGMTLDDLLDFKSWVMENQCEQVAVESTGVYWIPIHSVLENAVDLIVANAYKIKHIPGRKSDLIDSEWIAELCLNGMIEPSRIFPKDDRELRRLTRAREGYVNDMTREKNKIHHALESCGIKLSSVLADVFGKSGRYLLNCLLKGIELEEMIEGIPVKSVKLKADQIKEAVKGSLETTQIILIRGGLELIGSIQRRIDELEREIKNRIASRRVDLKIAMSIPGIGFISASTILAEVGDFNDFDKAEQLAAWAGLVPTVYQSADKLITGSITKHGSRHIRRILVEVAQAISRSNKGKLKRFFRRVQAKKGYNVATVALARKVLCILYHLVVNREMYQEDDITRTKTVDVNSSSLPTKLGFEEMIQILTKAGYEIRKTTSGTGG

SEQ ID NO: 125251 - protein, 341 aa, unidentified
MRKTLFCGVDLHCNNAMYVITDGRDKQLFRKRLPNRLPIILESLEPFRQRLKVVAVESTYNWYWLVDGLQDHDYPVVLANPAQMDQYNGIKEADDLTDAAFIARLARLNILPTGYIYPKEDRPVRDLLRRRTLVVQHRTAIKQSLQNMAIRQTGQSFGWRAIRKLSDPERTELLGDNDCLGFVALQQVDLIELLSEKIQRFEKKILEHAHLKPAYVYLLSLPGVGMILALTIMLETGDIGRFETVGDYTSYCRCVRATRTSNGKSKGKNNSKNGNRYLAWAFVEAVHHAIRNCPQAKRFYDRKRAKRNGALATKALAAKWSKAAYYIMKRQETFDLTRVFG

SEQ ID NO: 125252 - protein, 354 aa, unidentified
MNTTQVFEKRKIAVAIGIDLAKDHCDVVAYNADNKICFTKANWAYPHLMEWLANAQPAVVLMESCKGCHVRARDIADLGHDTRLVKGADVKALRNVCQKNAIRDADYIARLLYVPGTKFVFVKNQRQQSLQFLQNEYKSIQELRIQVGNQIHAGLEESGCPGPKSKKFIQSRMMAHLEKNAELIPDEVMSSFLRRREMWLNLFEQEEEAKKRMEEIAKTDDDAQRIMTVPGGGAQTAVGMLVHIGGDIGRFKNSGQFAASIGLVPKQNSTGGNTTLNGITKCGPKRLRANLVQCGQVILMHADKLKGNFGDWVRKLRDSGKKRGVIVCAIAAKIARIVYRLMKDKVDYTPVPSR

SEQ ID NO: 125253 - protein, 342 aa, unidentified
MQNDTRIAVDLAKAVFEIAVSDRPGRVGRRERLPRARFLAFFAQQPAATVVMEACGSAHYWGRRIEDLGHRVVLLPPYHVRPYVRRNKTDRTDAKGILEASRNEDIRPVPVKTVSQQVLTSLHRLRSGWMSERTARINCLRGLLRELGVFIPAGARQVIPAVWALVEDADADVPDALRPFLAELCQEIREIEARVDRVEKQLQAMAQQLPVVGQLLTIPGVGLLTATALLAFIGDIRRFPSARHLASYIGLTPREYSSGLRRHLGRISKRGDGYLRTLLIHGARSVLLRARADQSDRLRDWAHRIGKTHVHNKAAVAVANKMARVVWAVWTHARPYQPTLAA

SEQ ID NO: 125254 - protein, 468 aa, unidentified
MTPRKGKGFGTSARSEPAGSFVLHNPHAAGIDVHSDVHFVAVPRHDVPEGFINPEARLPAGVRKFGANTGDLEALAAWLKDCHVTTVAMEATGVYWIPLFELLERQGFAVILVDPRQTKHAPGRPKSDVLDCQWIGRLHSYGLLTASFRPSDEVVVWRGYQRQREMLIRYAGQHVQHMQKALEEMNVKLTEVVADITGLTGMAIIKDIVKGVRDPLKLAKHRNERCKATEAEIASALYGTWRQEHLFALKQSVKMYEFYHRQLRECDAQIEACLRGFADKSGGKVLTPKPRKCGKKNQTPFDARALLFRVAGVDLTVIEGIDEATALVILSEIGTDLSRFPTEKNFASWLGLCPQHRGSNRRIMSRRVRKGANRAARALRMAAQGCHHAKNALGAFYRRIQARCGGPKAVVATARKIAERVYRLLKYGDVYVRQAEAAYEEQYRLRTLKAMARKAASLGYKLVPETIE

SEQ ID NO: 125255 - protein, 323 aa, unidentified
MLIRAQGEHMQKAMENFVGIDVSKAWLDVAQHEREETFRVSNDEAGIAELVKRMKALKPKLIVVEPTGGFEKLLVAELTHAGLPVVVVNAKRVRDFARATGRLAKTDKLDAKVLAHFAAAIRPAVRRLPNAEEERLTMLLTRRRQVVDMLTVEKNRLVTVRAKMRSDIEAHIEWLANNLEELDKEIEDFVESTPIWKEKDNLLQSVPGVGPVTSATMLGMMPELGKLNRQEIAALVGVAPVNKDSGRKQGRRRIYGGRADVRSVLYMAALSAKKFNPVIKKFYERLIKQGKEKKVALTACMRKLLVILNAMMRSNQPWRSLAT

SEQ ID NO: 125256 - protein, 343 aa, unidentified
MYYIGLDVHKKTISYCVKDAAGQVHGEGKIRSTRQELKAWVNALPEPRMIAMEATIFTGWIYDCLLPHAEKVKVAHPLMLRAIAAAKRKNDRIDAAKIADCLRCDFLPECHMASTAIRDRRRVLRYRNLVVKQSVQMKNRISGLLMETGVSYNKSRLHQRGYFKDLMWMHPEVSDSIRPLLKFCRERIEHSQELDHRLVGFLERDPLLSKRLERLKTVPGVGSITALTWALEIGDYTRFTSTKEAVSYCGLCGDEKSSAEKVMRMPISKQRNKHIQRVLIEAAKLAVRRNHELALVYDKELQRGNPNRATLAVARKLVAYLLAVDRRQQNFMPAEEFRSSSAA

SEQ ID NO: 125257 - protein, 401 aa, unidentified
MNAVGIDVSKGKSTVAVIRAYGEVVAKPFDVSHYPDQLAELVKYIRSLGGESRVVMEHTGKYSEPVAKFLCEAGIFVCIVNAKLIYDYGGDTIRRNKTDKVDSLKIAGYCLDKWAKLERYEPTPDNRQILKTYNRQLSEYTKIKTMLKNNLISLLDQTFPGANDLFTSPARESDGHEKWIDFVAAFPHCHSVAMLSRQVFTTKYEKWCRKNRYNFCVHKAEHVYSAVLNCLPTLPNNDFSKTLIVKTVNQLHNLCETIAAVKSEMSKIASELPEYDTVLAMHGVGKTLAPQLIAEIGDIRRYPKRSSLARFAGLEPPENQSGTYNQHSRRISKQGSPHLRKSLFLVMCCVLQLKHSHEPTFQFLDRKRSEGKPYKVYMIAGANKFLRIYYARVAECFNAAA

SEQ ID NO: 125258 - protein, 404 aa, unidentified
MFYAGIDWADQKHEGLVLDEAGRKLGSIRVPHTPEGLDKLDAWLSSALNGQDKEQMACIIETNHGLLLAFLLEQGWPVYPVNPRTVDRKRSASGSKTDALDAYLLAKTGRADFADLHRLTPESEKIAELKGLTRDEDSLIQMQTRLVNQLTACLKAYYPVALDLFAKLQQRSALLFLQTYPTLEAAQTASVEQIRQVLKSAGHTTASKVAPKLFAQLHQPSLRADAVITRTKSRLAVALIVQLLPLIEQIAAYDKEIEQLFLSHEDNGVFSSLPGAGKRLAPRLLAEIGDDPARYETAASLQALGGTSPVLFQSGNYSKPHRRLGCIKPLRNALHQFARPRTLQEEWALAYYERKRAEGKSHSVAVRALSNIWARIIFAMLQSHEPSDRTTFEKARHLHAPKAA

SEQ ID NO: 125259 - protein, 454 aa, unidentified
MAKRRMSTFERLQHGKLNRKQRRELQRQLHLEDPGLKVVHPDAAGIDIGNESHFVSIPPGRDTIPIREFGSWTNDLREMASWLKEHGIRTVAMQSTGVYWIAVQEVLEHAGLEVYLVNARGTKNLPGRKSDVQECDWLRKLHTYGLLRNSFRPPEQIRAVRTIWRQRDRWVKESGRAVQQMQKALTTMNVQLANAISDISGVTGQAILRAIVSGIRDPWKLAKLRDRRIAASEDEIAYSLQGNWREDVLFELRQVLAAYDFYQNQVAACDQELKKYTAAVATRQITAKQDLPKEASALPSSKPVRRSKTRKKNQSGFDLATELQRTMGVDLTRIDGIDVITAQVIFSEIGPDFSAFPDENHFASWLTLAPQRDISGGKVIRHIPAAGRNRVANALRMAAQSLSRSNSYLGARYRRLRMRLDGPLAVKAMARYLACLVYRLVTKGQAYVDRGAAH

SEQ ID NO: 125260 - protein, 344 aa, unidentified
MTYYTGIDVSLRSVSICVVDDKGEVCLEAKVAAEIDAIVDRLRQFSSDVKTVGFEAGALTQYLTYGLQAAGFEVICLEARQVSVTLAAMRNKTDRNDARGLAQILRTGWYSRVHVKSLHSHQVRALLASRKAILKKCVDLENELRGLLKVFGIRLPSRVGHGAFDAELRDRVSSDEMLACALVPMLDAGTVLYKTYLKLDNAVRGLVRIDPVCRRLMSIPGVGPVTALTFKAAVDDPSRFKSSRTVAAHFGLTPRRFQSGELDNPGHISRAGDADVRSALYVAAHSLLTRNAQWSTLKAWGVGLAKTRGHRRAVVAVARKLAVILHRMWIDGSEFRWGPVVASA

SEQ ID NO: 125261 - protein, 354 aa, unidentified
MKVTRIGIDLAKNVLQVHGVDEHGKVVIRKQLRRRQVMTFFAQRTPCLVGMEASGGAHEWARRLARLGYTVKLMAPQFVKPYVKANKNDAADAEAICEAVSRPNMRFVPIKTPDQQAILALHRARQGFVRQRTAQGNQIRGLLAEYGVTIPVGIRNIRKCLPEILEDGENTLPGMFRHLLRQLGEHLTTLDRLVTEMDQQIQTWHRTNEASQRLTKIAGVGPITATAVVASIGDARNFSSGRQLAAWLGLVPRQHSTGGKSLLLGISKRGDCYLRTLLIHGARAVIRFAGGKRKAGTVPSAAGASTQGRSWVQSIVSRRGTNVAAVALANKNARVIWALLAHDRHYQPSYLAPA

SEQ ID NO: 125262 - protein, 448 aa, unidentified
MDEHDFTLGVDLACSAAHVATLADNAGRLVWSNHRFRTATVELERLWAKVPAQARLQLVIEPTRNAWVPLAAWFRARGVTVILVPPEQSADLRRYYQKHTKNDRLDSVLLARLPLLHPNGLNVCHDLGPADPLRRTVRRRAKLVRQRISSLNRLTALLELLGPGYNDAFSGALATKTAQAVLSRYADPRKLLRTPARRLVQVVSEASRGQHGPILVNQLRGAAAEALALYSMAGVDFAELAADIEAQMRSITTVQAEIDQLDTRIQRLYLDADPDQIVQTAPGVGPVLAPAIHGLFGDPHRFANLGAARAFTGLVPDTNESGISQAPARPTKAGDPGLRTALFVAADLARQTDPTLAAKYRRLVVERKLHHNSAVCHLAAVLATRIVACLRAGTPYQIRGLNGQTITAAQGRVLCQELRVQPHERPRPPRRQPKAGQATPEVAQRLTA

SEQ ID NO: 125263 - protein, 385 aa, unidentified
MSTVIIGMDPHKRSATIEVMDGDESVLGRGRYGTHASGYAAMVRAVRHWPQRTWAIEGCQGIGGHIARRLLADGEQVVDVPPKLSARTRVFSAGQGRKTDATDAHAVALAATRMTGLRPLAGDEQLAVLRIVADRRRSLGEDHTRMVSQLHQLLLDLIPGGAKKDLSAAQARALLDEIWPRDAAGKARRRVAGELVSDIERIHQRKKAADRELRELLKGTGTSLMSLNGIGPSGAARLLIEAGDITRFPSKAHFASWNGTAPIDASSGDQVRHRLSRAGNRQINRVLHIMAVVQLRHRSSEGRAYYDRKVAAGKTPREAMRSLKRRLSDIVYHQMVLDACARTTGPGGHMGTHAGSSAAGSHPAAGTSEKSLPGPAVSQPTATRC

SEQ ID NO: 125264 - protein, 380 aa, unidentified
MIIKYSLGLDISSKDIKACICVIDDQQNVKVKSTRTFSNHKKGLDEMDQWINRWYCQDTASLTVCMEATGVYHENCAYYLYEKGYSVSIVLPNKAKKYLQAIGIKSKNDTIDAKGLAQMGAEQNLEKWEPIGTFYYELRVLTRQYQSLKESLTVESNRLHAAMASARQISFEIKQIKKHIAFLEAQIAQLEKEIKRFINSNQDLKQKFDKVMKIHGISVISSATVIAETGGFLLFKNYKQVVSYAGYDVVENQSGNHVGKTRISKKGNSRIRRILHMPSLTAFSKQESVFGQLYQRVYDRTGIKMKAIVAVQKKLLVMIYYIWTKDIDYDIEYNGNTQAEYTMEPSLPRQEMKKAITSMASHDKQHRLEPVESSLCNANL

SEQ ID NO: 125265 - protein, 358 aa, unidentified
MRYVGVDLHKNKFTAYFADTVRYRDYGTNSVGIMSFIHDCKRSDDCKGVMVGVESTGNTRYFKRMLEAEGIQVKVINTMKFKVIAESVTKTDKHDAATIAEFLEKDMIPEVRLCSDYSEQLRRLLKVRKTLVETIVTIKNQIHGILAAYGYEDTRASLQSKRGRQRILSTLASTENGLVVQPLIQIIDELDEKVKHIEKIIEEFTKHDNQKRLLQTIPGCGDIIATTILAYTDDIRRFKSPKQYAAYAGLVPYVHNSNTMQRHRTITKHGPEPLRTAFVQLVLGTNRVPATRNYRIMKQYRALKQHKGSGKAIIAIARKYAEIVWHMLTYNEPFCPDKQLQIPCECNRSIQVYEQQPA

SEQ ID NO: 125266 - protein, 409 aa, unidentified
MELTPIYKRVIGLDVHQAQISACAIVEQADGSSTLERREFGGFKRDRKALAEWARGIGPDVVVMESTGIYWKSPYAALESVGIVAWVVNARHVKAVPGRKTDVADAQWLATLARAGLLRASFIAKADLRSLRHIARQRQKLGGMLASEKNRLHKLLTDAGIRLGVVVSDLHGQSARAMVKAIIAGESVPEVLSLASNRLRASREDIFEALQAEELSPAHRFVLTEIMAHIEELEARMARFDAELLRSLVEAGYQVPLRLLQTLPGIDLMGAAMLLVEIGADMSVFGSAQRLASWVGMCPGNNESAGKRKSGRIRKGNAWVRRLLCEFAQAAARSRCALKAKFQALSVRKGHKRSIVALGHKMLRTIYAMLSKNAHYVDKTVDYEALMVARNAPRWLQMLVKHGFVPATA

SEQ ID NO: 125267 - protein, 309 aa, unidentified
MDSYVGIDVSKDRLDVHVLPQGEAFEVERNGRGLAALVERLRTLSPSLVVVEATGGFESTTAAAVAGAGLPLAVVNPAQIRHYAQALGKRAKTDPIDAHVIARFAADIRPEARALPDEMTQALADLVARRRQIVEMLQAERQREKRVTLKRARKSIARLITVLEKELADMDQDIDDTVRGSPIWREKEDLLASVPGVGPQTARTLIAEMPELGTLDRKTVASLAGLAPYTRQSGRWNGKSMIGGGRKTVRSALFIAAMVACRHNPILKAFYERLLAAGKAKVSAIIAVARKLLTILNAILRDKKPWQPA

SEQ ID NO: 125268 - protein, 408 aa, unidentified
MEILYPRCAGLDVHKDVVVAAVRCVLAPRHSEVRSFATTTSGLLALSEWLASHACTHVAMEATGVYWKPVWHVLEGDFELVLANAQHVRNVPGRKTDVGDAAWIADLLAHGLIRGSFVPPAPIQALRDLTRTRKQLTREIAQHTLRLQKILEDANLKVASVLSNILGRSGRAMLEALIAGESDPERLADLAQGTARKKRSALIESLNGRVTPHHRALLRLHLQLVDALQAALREIDASLGKALAPIRQAVRRLTTMPGLSDIAAHVIVAEIGLDMGRFPTPAHLISWAGLCPRSDESAGKRRSVRVRKGAPWLKTTLVTVAWAAVRTKDSYLRAQFLRIKARRGAKKAILAVAASMLNACFFMLRDDVDYQDLGSNHFDRFDRRKTIRRLVRRLEDLGCQVEINAHAA

SEQ ID NO: 125269 - protein, 433 aa, unidentified
MHDVQDEPLFAERVAGLDIAKAMVEVTIRVPSDASPGRRQQETRTYGTTRRELDSLADWLRCWGVAKTGMEATSDYWKPVFFLLESRGFDCQLYNAGQVKALPGRPKTDRADSVWLARITERGSVASSFVPPEPIRRLRTHTRYRRHLTQARTAEKQRVEKLLEDGHLKLSSVISDIHGVSGRDMLDAIAAGQRDPKALAQLARGTMRGKIHRLEEALDCSFFTSEHAAVLAMMLAAIDHYTTQIEALTERIEALIAPFLHQVEQLDAVHGIGPTGAQDIIAETGTDMTVFPTASHLASWARWSPQVKQSAGKRKGRNATGRGNPYLGAALGEAVICAGRTQSYLGAKYRRLARRMPKKKAMVATGNSMLAIVHALLSDPEASYYDLGPDYYEQRMHARRQARNHVRSLERLGYKVTIQTINPDTGELLAAVR

SEQ ID NO: 125270 - protein, 434 aa, unidentified
MTTPSSVPKEIPIAVYVGLDWADQQHVVCWQAAGSSQVETATVRQRPEPLQAWVAQLRSRFPEGVIAIALEQSRGPVIAALMHYDFLRLYPINPKSLARYREAFSSSGAKDDPNDAALLLDLLVKHRDRFSPWIPDDALSRQLALRVEHRRQLVDLKTSLTHQLSSQLKLYFPQALDWAGELDSLQACDFLQRWPTLQAVQKARTTQLEKFYTRHNCRRPQLIQQRIEQIGQAQPLTHDIALVAAGSAMVLALVALVRDLICRLQQWQQEISQLFIQHPDQTVFASFPAAGPVFAPRLQAAFGSRRDRFASAQEVLQFSGVAPVTQRSGKSCQVHRRWARPKFVHQSFVEFAALSIPHCGWARALYQQLRARGHRHWAAIRMVAFKWIRILFRCWKDRVPYDEQKYLTSLQRRNPRLWAAIPQPPPEQPKATAA

SEQ ID NO: 125271 - protein, 337 aa, unidentified
MRFCGIDLHSNNSVVVVTDETDKVLLSRRCPNDLSKILALLAPHQGELAGIVVESTYNWYWLVDGLIAAGYAVKLANTVAMKQYDGLKHSDDETDAAHLAHMLRLGILPTGYIHPPAERALRDLARKRVQLVRSRTQHVLAAENILARSLGSRLSATTIKRLDAAEAETLGLAADVALAVQANLAVIATLNLQIGKLEARLLESVKLRPEYVHLLGIPGIGKVLATVIMLETGDISRFAQVGNYASYARCVSSIRISNGKKKGEGNTKNGNAYLVWAFVEAANFARRYSEEAQSFFERKKAKTNSIVATKALAHKLARASYHMLKEGQPFDVKRCFA

SEQ ID NO: 125272 - protein, 395 aa, unidentified
MFIVGIDIAKRSHEAIIIAEDGQVVRKAFSFRNNCTGYNLLLEQVRRLTLVKSQIVFAMESTAHYWLALYARLLKDGYAVMVLNPIQSHSLRELYIRKAKTDARDSLVIADLVRFGRCKASNVPQDKILALRELCRSRAYLVDMAADLKRKLIALLDRIFPEYESLFDSVFSKASIAVLSKYSTPQKVKNANLRKLTDLLMENSNGHFGEWKAHQLKEAACSSFGIDDSGGVYSTLLGMFLEQILSLTAQADSLEKQISVFFQEFNNPLTSIPGVGTVLAATILSEIGDITRFSSADKLLAYAGLDPSVKQSGEFKSNQNRMSKRGSPYLRRAIWLASTVAVHRDPMFQTYYEKKISEGLHYMNVIGHVSRKMTAVIFAVLRDGQPYQPILQSAG

SEQ ID NO: 125273 - protein, 359 aa, unidentified
MLSNNQELNFSGENIYVGIDVHKKSWKVTIQVDELVYKTFSQDPKVKILESYLNKNFPNASYQCAYEAGFSGFWLQQELEKVGINCIVVNPADIPTTDKEKKQKTDARDSRKIARSLKNGELEGIYIPAVEELEDRHLVRTRSTLARDFSREKNRIKSILNFYGVTYPEQFRDENKHWSKGFMNWLNKIELNTANGNYSLQTHVANSLYFREKILDSTRQIRQLSRTEKYAKIVSLLCTIPGIGLLTAMTILTELHKIERFENLDKLCSYIGFIPNTHSTGEKEKVGKITNRGNKYLKNVLIEASWVAIRNDPALLIVFKKLCKVMEPNKAIIRIAKKLANRIRFVLLKNEPYVKGLVK

SEQ ID NO: 125274 - protein, 358 aa, unidentified
MQRNKISFKGQKIFIGIDVHKKNWDVAIAPEVGNVKRHTQKASAKELFDFLKKHYPDGDYLAVYESGFSGFSTYYALKEVGIDCIVIHAADVPTTQYEEVMKTDRVDSVKLVRSLKAGLLKGIYIREKENIDDRSVVRIRKTIQKQLSGYKARVKHMLHCNGVSFPERFEKPGSHWSKAFLKWLKEDVTLLSSTRNSLDLLLRQVETIRLTLLEATKMMRNLSQTERYKHKCDLLMTVPGVGFIVSMCILTEIYDVKRFHNEKEFAAYLGLIPTSHSSGDKVAHGKMTFRGNKQLGPMIIETAWISICKDAGLGSLYLRYKERMKPQEAIVRIARKLSNIIFAVLKNETQYIPYNMYK

SEQ ID NO: 125275 - protein, 356 aa, unidentified
MTKTLMAGIDLHSNNLMIGLVDQAGQRVEHQKLACDLKAVLKFLRPYQRRLKSLAVESTYNWYWLVDGLRAAGYPVVLANPAKIEQYNGLKHADDKSDAYFLAELQRLKILPTGYIYDAELRPVRDLLRRRVSLVQQRTALVLSFKSLYARTTGEAMSLSRLKGMATEAARELYEHPANQLIATLQQEHIAALNGSIAKIEKLVLARARTLPWYEKLDTLPGVGRILGMTIALEVGEIGRFAGPGQFASYCRAVAAERLSNEKSKGRNNRKCGNRYLAWAFVEAANFAKRYDERSRRWFDRKAARTCGVLATKALACKLAKAAWHVMQGNVPYDGDRVFGKAAANQGKGLVHSQRD

SEQ ID NO: 125276 - protein, 312 aa, unidentified
MNRIICGVDVSKDWLDAHIAPAGTVGRFRNDAAGIGDLAGFCRTGGVELVVMEASGGYERQPFLLLWQAEQPCAIVNARNVRHFAEAMGFLEKTDRIDAAMIAGFAAAKPVRPMPPPAAAQMRLRALVGRLAQVTGDITVNKQRRSSTADPEALASLDAVIAFLKTQQRRLEGDIASLIDDDPLWARLAESFRSLKGVAGRTVARLMAELPEIGIVSNKAIAKLAGLAPIANDSGRRTGHRPVRGGRAGPRSVLFLVARLVARYDPHLAAFHQRLQAAGKEKMVIRIALARKLLVILNAKARDARTPAANAT

SEQ ID NO: 125277 - protein, 343 aa, unidentified
MDHFAGLDVSVKETSVCIVDDTGRIVREVKVESEPDALLAVLKNPTYHFKRIGLEAGPLSQWLFSAVAEAGLPVICVETRHMRAVLKAQINKTDRNDARGMAQMMRAGLYRPVHVKTLRSQKLRMLLTHRKLLQSKAIAIDNDLRGTLRNFGLKVGVVGAVKFEGRIRELVENLPDLAVLVEPLLIVRRVLREQIGILHRRLLAIVRDDDVCRRLMTVPGVGPVVALTYRATVDVPARFRNSKAVGAVFGLTPSKYQSGEINRTGAISKCGDEMMRVMLYEAAQVMLTRTIKWSWLKAWAMKIARRRGMKKAIVALARRLAVIMHRIWVDGTEFRWTRDVATA

SEQ ID NO: 125278 - protein, 448 aa, unidentified
MTPLPPALRGPTTGNRGMRRRAPVSDRPGDVLLIEIVLPHDQGDNMLAGIDWATEEHAVCVLDDEGEAVDRFTIAHSAEGFDRLIARLARHDDAVEVPVAIERPDGRLVDRLLEAGHPVVPVKTNAIKSWREAEVLSGAKSDEGDAEVIADYLRQRRGRLRELSPFSAETRALRAVVRSRTDLVEQRVAAANQLEAVLDAFWPGAKAVFADIWSPIALDFLERYPTPASAARLGEACMAAFLTKHGYSGRRPAAELVARLRAAPAGVSAGPESEARRDVVLAIVRVLRAVGQAIKDLNRSIAAHLAEHPDAEVFRSLPRSGKINAAQMLAEWGNCREAFDSPEAVAALCGATPVTKKSGKHQAVHFRWACNKRFRNAMTTFADNSRRASPWAQSIYQAALDRGHDHPHAIRILTRAWIRVIYRCWIDRTSYDPARHGAITRREQPSAA

SEQ ID NO: 125279 - protein, 357 aa, unidentified
MRRPKAKSNDKLIAGIDLHGNNLVIGVINQDGTRLMHRKLDCRLEQVEEFLRPLKLRLQSMAVESTFNWYWLVDGLRARGYQIDLANPAKIEQYSGLKHADDKDDAFHLADLQRLNILPKAHVYDPELRPVRDLLRRRTNLVHQHTALLLSLQSLYARTTGQRLDLGEAKKMEPKQAPQLYEHPANQLIAQVQVEHIGALAKSIHRIEKAVLDCAREIPLYEKLLTLPGVGRILGMTITMEVGDISRFKTAGDFASYCRMVDAKRWSNGKCKADNNQKCGNKYLAWAFVEAANFARRYDESCRRWYDRKAAKAGKIVATKALGCKLAKAAWHVMAQQCNYDEKRMFPELANKPMKTS

SEQ ID NO: 125280 - protein, 319 aa, unidentified
MEKKMYVGIDVSKDTLDVAVHGDKQHWSFPNNEAGIKKIVLKLKGLSAELVVLEATGGFEVSLAAGLGVAKIPTAVVNPRQIRDFAKSVGMLAKTDILDARIIARFAATVQPTPHPILGIEAQELGAITARRRQIVNMITAEKNRLSTASKTVKPRIRAHINWLEKELNNVNMNLRQKIQDSPIWREKDELLQSVPGVGPNLSITILADLPELGTLNRRQIAALVGVAPLNRDSGTFRGKRTIWGGRATVRTALYMAALSAKRYNPVIRRFYERLLVAGKAKKAALTACMRKLLTILNAMLKYHTSWNFGVSQILDPCH

SEQ ID NO: 125281 - protein, 350 aa, unidentified
MKRPTDKVIAGIDLHGNNLVIGVINQDGTRLGHRKLDCQLKDVLEFLKPFKARLQSMAVESTFNWYWLVDGLREQGYEIDLANPAKIEQYSGLKHADDKHDAFHLAELQRLKILPTAYIYAAALRPVRDLLRRRTNLVHQRTALFLSFKSLYARTTGQAMPLATLKSMEPKEARTLYEHPANQLIAKVQLEHIGALDRSIHLIEKAVLASAREIPLYEKLLTLPGVGKILGMTITMEVGEIGRFKADGHFASYCRAVDARRLSNGKQKGENNQKCGNKYLSWAFVEAANFAKRSDAHCRRWYDRKKARTSTVIATKALACKLAKAAWHLMAHKTDYDASRMFPELALKTK

SEQ ID NO: 125282 - protein, 391 aa, unidentified
MIFVGIDVAKDKHDCFILNSEGTVLADVFTIANNRIGFETLLSRIQSCFQGESKIKVGLEATGHYSYNLMGFLLDSGLATYVINPLHTNLYRKSLSLRRTKTDRIDARTIAMMLMSDVDLKSYSNTAYHNEELKSLTRYRFDKVKERAKLKSSVARLVNILFPELEKLVSSLHIAVVYALLSNYPGASDIANANTEELAETLCTASKGRYTKSKTAEIQVAAGASIGSKMPAKSMELKHTIALIRELDKEIAEVESAIDKITSQMDSPIFTIPGIGRHMGAMILAEVGDFSNFASADKLLAYAGLSPSTYQSGQLQNCYAHMEKRGSRYLRYALFNAAKYVCLWCPTFSAYLEKKRSEGKHYNVAISHAAKKLVRLIFAMQRSGKAFLADY

SEQ ID NO: 125283 - protein, 390 aa, unidentified
MIEAMSNPHELASKMDRPSKVCVVSEAEEGSSSLGCGRNETLMEGQPITNSPHTGRFRMTEYIGIDVSKQSLELWDGTHEEEVPNEKGLKTLKKLLKKRYGGEWNETVRFIYEPTGPYSNYLRAFAAEHEVRVYEVNPKKSANFAKVLGNRSKTDVIDAQMLYSFRLLLKESEFSIPKTDEIAEQLGAYLGSYEMIQKTRTMLSNHLQSLEYKSGVAKKLKDSLEKELKHLSTMEDQLENEMEAVAEDHEETREDLHNLLSMNGIGVISAMNLLYLFRKYPGANRNEITALAGLDPVRRQSGSSLNGGRKISRAGDPLLRKVLYLACMNSIQHNECIQAFYKHLVSDNHKKPKVALVACMRKLLLIAHHLYVTKSQYRTLEHDANPCLTS

SEQ ID NO: 125284 - protein, 363 aa, unidentified
MHNDSIAVSLAPSDTTEVRRYGIIGGEHDDVLKLAKKLATAHPGMVLKFCYEAGPRGFALCRCLRAHGLDCLLVCPSKVPRKPGERVKTDRRDADDLARLYRAGELTGIYVPEPEDEAMRDLLRARFQVGRQQHRARQQLKMYLLRHNRRYVGKSSWSPAHLRYLAKIKMPFPVQQIVFQEMLEVITHATTQLERYDQEIERAVPGWRWAPAVRALMSLRGMALLHAATLVAELGDFNRFEHPGQLMGYLGLVPSEHTTGNDRQQGGITKMGNAPARRALVEAAWQYRAPARLSPHLQKRQEGLPKTITDIAWEAQRRLHHRYTHLTRVGKKKSQVAVTAVARELTGFAWAIARQVKPRVALG

SEQ ID NO: 125285 - protein, 371 aa, unidentified
MADYREAFIGIDVAKLRNAIAIADAGRDGEVRFFGEVDASNSGMRHVVQRISAKFDRAHFCYEAGPTGYGLYRLIRSLGHECTVAAPSLIPRKPGDRVKTNRRDAISLARLLRAGELTAVWVPDEGHEAMRDLVRARAAAVETLCVHRQQVSAFMLRHGHVYPRKKGWTMRYLRWLQEQKFDHPAHQIALQEMVEGARIAKERVERLERVIEEFVPAWSLSAIVQALQTLRGVDLIVAVTFATEVGDVQRFENPRQLMGYLGLVPEERSTGATVRRGGITKAGNGRVRHMLVESAWTYRHPPRIGKMKLYRMEQAPSRVREIAWKAQTRLTARYRALSGRGKKTTVVCTAIARELAGFMWAVSREARAATP

SEQ ID NO: 125286 - protein, 312 aa, unidentified
MNTEIFVGVDISKEHLDVAFGPDQAPQRFPYTPEGVNRLLAHLQALSPTLIVLEATGGLEADLMDALSRAGLPFSRVNPRRVRDFARASGVLAKTDRLDARILAEFGQKMRPPVTVLPDEHTRHLEILVARRRQLVEMRAIEEHHWRTAPETARPYIRKHLEWLDAEIATLEREIADWVNQTPLAETVEILDSAPGVALVGAATLVAEVPEIGRLNRKKIAALVGVAPYNRDSGTQKRQRRVTGGRQAAREVLYMLTIAGIRCNPVLRTFYQRLRAAGKPPKVAIVACMRKLLTILNAMVRDRRKWCLELAG

SEQ ID NO: 125287 - protein, 372 aa, unidentified
MTSMPEPTPIDRAHDEREEVVLGVDTHKDLHVAAVLSGLGALLATRAFPTTTAGYRGLVAWARSFGALRRAGVECTGSYGAALTRHLQAEAIEVVEVNQPDKATRRKRGKTDAIDAEAAARAVLSGRATATAKTSNGPVEAMRVLRMARNSAVNASTKAINQLKAVLVGADPALRDSLAGLGPASLVRRCAELPDPTPGSGLSEVDRAVVFTLRTLAARIMALKAEAYQLHKQLRALIAAHVPELLERRGIGPDSAAALLIAAGDNPERLCSEGSYAALCGASPVEASSGKTQRLRLNRGGDRQANAALYRITLSRLRWDSRTQDYLQRRLAEGKTRREAIRCLKRYIAREIFTLITPKAATALANQSANAA

SEQ ID NO: 125288 - protein, 318 aa, unidentified
MSDLTFIGIDVSSQTLEIASSREHATWQVTNDSDGIEQLARQLTGLEPGLIVLEATGGYEFEAACALQAAGLMIAVVNPRAARDFARAMGALAKTDAIDARMLAAFARVLHQHPERDRFIKPLADAELQQLQALVLRRRQIVQMLTSERQRWRLAHAVAKPSLERHIEFLKSELADSDGEVAAHVEKHHAQLAKALASVPGIGAASVAILLAELPELGKLDRRRIAALVGVAPLNRDSGQMRGQRSIYGGRADVRRTLYMATLTAVRHNPPLKAFYDKLVAAGKRKKVALVAAMRKLLGMLNAIAKHGSTWDPSLHSA

SEQ ID NO: 125289 - protein, 412 aa, unidentified
MRRVIGIDIHRTFGEVVFWEEGALRRAGRVDMTRTALEGLGKSLLATDEVVIEATANCMAVSRVLTPFVQRVIIANPLQVKAIAHAHVKTDKVDAGTLASLRAAGFLPEIWTPDATTERKRRLTARRYQVVRHRTRIKNEVHSILHAHLIPKCPHADLFNRRGREWLARQPLPDDEREAINRHVRELDRLAEDLATLDREIAEAALDDHDVKRLMTITGVNLTVATGILAAIGDIGRFDSPGKLVSYFGLNPRVRQSGLGAAHHGRISKVGRSHARAMLVEAAWAAAKAPGPLHAFFVRIRAKRGHQIAAVAVARKLTVLCWHMLTKDQDYVWARPALVANKTRAMELQAGRPQKKGNRRGSAFAYNVKTLRNQEMHIAEQAERSYARFVDRWKTRLGKNEVRERLNSTRNE

SEQ ID NO: 125290 - protein, 424 aa, unidentified
MEVMYERVAGLDVRKAMIVACVRIMTGGVVERECRTFETTTSGLEALLGWLTATGCTHVAMEATGVYWKPVWNILSDGAFELIVANAAHIKNVPGRETDVNDAMWIAHWVARGLVKASFVPDEAIQDLRSMLRARKQLTREQTSHIQRIQKTLEEANIKLDSVITDILGVSGRRMIEAMIAGVGNPARLAELADRRIKAPPKVLYDALHGRLTDYHRFMLQLHLEQYDALGKAIAKIDAAVDAAIARMDEAEEAGHRASFRSLIFLLCSVPGISILAATVILAEIGCDMGRFATAGHLLAWAGMCPGQNESAGKRKSSRLRKGSPWLKTILVQCAWAATRKKDSYYGAQFKRLRAKRGPKKAICAVAASMLTAIHHMLKNGTQHQDLGADHFDRRSSEVKARHHVAQLARLGFHVELQPLAQAA

SEQ ID NO: 125291 - protein, 386 aa, unidentified
MQYPNDSRRCLIVLDQDSTLIAVIEMSLSSWLVAGIVPGIERQPLKKLEADKHALLKLLHRWRDEAVKAGRKITRIAVAFEAGRDGFWLARWLRAHGIEAHVIHASSVAVPREHRRAKTDRLDTEMLKRAFLGWLRGERDHCKVVAIPSLAEEDAKRPNRERESLVGECSRLVNRMKAAFVRLGIRGFNPKLKKAPERLGALRTPEGEPIPPNTVAALRRDMERLRLVREQIRQIELTRLERLQKAPEVGAHAMVRLLARVMGIGIETADMLVQEVLSRELRDRRAVARYSGLTGSPDESGRKHREKGLARAGNARVRRGMIQLAWRFLMFQKNSALAQWFRQRTENAPRTRKTMIVALARKLLIALWRFVREGVVPEGIVLRPAP

SEQ ID NO: 125292 - protein, 371 aa, unidentified
MKQQTKSSNITVGLDLGDRRHRFCALDEWGEVVEQDSICNDRVSLRKLAGRYHGALGVMEAGAHSPWISRFLEALGWRVVVSNPRKVRAIYQHERKSDQRDALMLARIGRMDLALLYPVRHGTAEAQQDLLRIKLRDSLVRARVAVINSVRFTLKSLGYTVRNPSSARFHKVVMEEVPESVREMITPSVQALAELTARIKMLELEINTLAQMKYPQSAQLQQIPGVGPITALYFVLKIEDPNRFAHVRDVGAYAGLCPRRDQSGESDPQLRISKRGDAYLRRLLVSAAHYILGPFGPQSALRAYGLMLAADGTARAKKRATVAVARKLAVLLLSLWKSQQPYQPFPGACLNGEQEDRRSGTIALHRMEATD

SEQ ID NO: 125293 - protein, 386 aa, unidentified
MIYVGIDISKYKHDCFICKDTGEVIVENLSFTNNKKGFQQFLDLLKPYDNSNVHIGLEATGHYGLNLKLFLEKNNYSFMEFNPLLVKEFYKSLSLRKTKTDKVDAVVITQKLMSVPYKPNSKLFYHKYSIKSLTRLRENLVKQRSKYKVQLTNILDIIFPEFKPFFSNSFGVTSLYILNKYKTPNKIVNMRDFDTLNKLSRGSFTYAKFVKLKDLAKNTIGESNDIFEIELSSILDLYENINDHINELDKQISTIIKDLNPPTLSIPGIGVISCASIISEFGDISKFSNPSKMLSFAGLEPGIIESGTMSSKGKMVKRGSGYLRYSIMNVALTVIKFNPTFYDYYYKKISEGKCHRVALSHICKKLIRVIYILETKNIQFDPSLLK

SEQ ID NO: 125294 - protein, 359 aa, unidentified
MLSQSNKIDFNGQHFYVGLDVHLKSWKVSIMAEKLTLKTFSQDPKPELLHHYLVKNFPNGTYHSAYEAGFCGYWIHNKLMALGIDSIVVNPADIPTTDKEKVNKTDKRDSKKIAKSLRNGDLKGIHVSSLKTLEDRCLVRTRGTIMKDLTRNKNRIKSFLYFHGIEIPETFTHSSNHWPNRFINWLRSIELVEYSAKKSLKLIIDESDHLRLLILDANKGIRELSQSETYSNQVHLLQSIPGIGILTAMIILTEIESINRFSNFDQLCSFIGLIPSTNSSGEKEIIGKLTHRGNNFLRSAIVESAWVAARKDMALNKSYHDYCRRMEPNKAIIRIARKLLNRISYVLKNNEPYVYSVVK

SEQ ID NO: 125295 - protein, 367 aa, unidentified
MKKGSTVAAEQSSHFSQQKLTIGLDLGDRSSWYCVLDEAGNVLEERRVSTTTKAMREDFGRMARSRIALETGTHSPWVSRLLSGLGHEVIVAHARNVRLIGESRCKDDRLDAQTLARLARIDPQLLSPVKHRSAKAQADLTVIRARAGLVRARTALVNTARGLAKSYGERLRSCNVRNMNPEKAEQLSPELQTALEPLLAGIEAVSEQIREYNQRIEALAQQSYPEVALLKQVKGVGTLIALTFLLTLEDAHRFGKSRDVGCYLGLQPGRRNSGQSEPQMHISKQGDPYLRTLLVQGAQHILGPFGADCDLRRWGLKLAERGGRNGKKRAIIATARKLAILLHRLWVTGEVYEPFHNRSCLATAAGA

SEQ ID NO: 125296 - protein, 413 aa, unidentified
MKPVSQHFAALIGLDWADKKHDICLLERQQVKEEYTVIKHNPEAIHEWALGLQKRFNNEPIAICLELKAGPVVYALLKYSFITLFPISPKALSKYRDSFAQSGAKDDPTDAFLQLDYLLKHPEALKPLQPDDPQTRILQRLVEDRRHFVQDKVDITNHLTACLKSYYPQALQWFEDIDTALFCAFIKCWSTLAEAQQASPEELTTFFKTHNCVRNTVIERRVSAIKKAMPLTEDEGVIVPMRKLSLRLVCQLKLALQAIHEYDDEIANRFRDHVDYALFDSLPGAGAVFGPRLLAAFGSDRDRYGSADELARFSGVAPVLKRSGQKSWVHWRYACPKFLRQTFVEWAYQTTKYSFWAKEFYEKKRADGKHHQATLRMLAFKWIRILFRCWQTNTPYDESAYLFALKRRKAVEI

SEQ ID NO: 125297 - protein, 392 aa, unidentified
MISVGIDVSKDKHDCFIVNSEGEVLADVFTIHNTMDGFNFLLQRIRECTMPQDKIKVGLEATGHYSYNLIGFLLDNGLATYVLNPLRTNIYRKSLSLRKTKTDRVDARTIAHMLLSDAGLKPYTDTAYHNEELKSLTRYRFDKVKERAKLKSSIARLVCILFPELEKLVPSLHIASVYALLEEFPGAKQIAAAHLTRLKALLETASKGRYKRDMALEIRDSARNSIGARIPAKSLELQHTIRLIRELDAEIAEIEERIQSIMNDLHSPITTIPGMGVRMAAMILAEVGDFTRFVSPDKLLAYAGMSPSTYQSGQLKNCYPHMEKRGSRYLRYALYNATKCVCHWDPTFAAYLAKKRAEGKHYNVALSHAAKKLVRLIFAMEKSKQPYSQLAA

SEQ ID NO: 125298 - protein, 347 aa, unidentified
MRFYTQQHKHYCGIDLHARMMYLCILDAAGAVLLSRNIQCNPKAFLSTVRAFRDDLVVAVECMFTWYWLADLCAHEGIRFVLGHALYMRAIHGGKAKNDRIDAHKIAALLRGGMIPQAYVYPPQMRATRDLLRRRNHLMRKRAELIAHIQNTVSQYNLAPLEHRIQKRCDREQLLAHFPDVQVRNSVALDLAMIEHYDALLPKLERHIRACAKQHEGKTFTLLRSIHGADLILPLVILYEIQDIARFARVQDFLSYCRLVKPGRESAGKLQGHSGKKIGNAHLKWAFSELATTFLRANPRAQAVHERLKARHGKGKALAIVAAKLARAVYYMLSRGKVFDPDKFFHN

SEQ ID NO: 125299 - protein, 355 aa, unidentified
MNQEKYIGMDVHQATISVAVMDGRGKLIMECILETKAATILEFIQGLHGSLSVTFEEGTSAAWLHDLLKPHVAHLVVCDPRKNALLKDGSKSDRIDARKLADLLRLNRLNPVYHGEHGVRTLKELGRSYLTITQDLTRVMSRIKALYRSWAIPCSGTTVYAPRHRAEWLAKIVEPGVHLRAERLYQQLDLLQPVRQQARRELLLESHKHPAVKLLRQIPAIGPIRAALLVALLQTPHRFRTKRQLWAYSGFALETHDSGEYRMVRGKVRRNRERLTVLGLNDNHNHDVKNLFKGAALSASTRPGPLYDFYVGLLQKGMRPTMARLTLARKIATITLTMWKKGVDFDAQQLHRQAA

SEQ ID NO: 125300 - protein, 418 aa, unidentified
MISVGIDVSKEKSTIAIFKPYGEIVAKPFDVKHTKEDLQSLAAMIRHLNDEVRVTMESTGIYHWPVLQTLLANDIFTVVVNPYAMKLYRKQSIRKGKTDKMDAMAIAQYGLDHWVNLESFESTQPIYDELKLLGRRYRHYMRMHIDSLQELTHILDMTMPGINKVFAGWQERSGRNKVADFAAEFWHYDNITKMSESQFVKNYEKWNKEKGYRMNETKAVEVYTLARNSIPTLPVNYSSAKMMVQEAVRVLQSVDATLYKILAQMKELAKSLPEYGVVRNMGGVGDVLAPKLIAEIGDVRRFHSGKALIAYAGLDAPPYQSGKFTGTERHISKRGSSNLRKIGYEVMRCLKCHSAPNDSQVYDFILKKEKEGKNKAVAKIAGLNKFLRIYYARVKEVYRENDYIQNRYQKNLTSKFKK

SEQ ID NO: 125301 - protein, 363 aa, unidentified
MKIMVGIDLHSNNALCGLMDESGQRLAHKKLPCDLTAILQLLDPYKDRIATIAVESTFNWYWLVDGLQDHGYHVVLANPAGMQPYSGMKYTDDVSDAYFLAELLRLNLLPTGHIHDRQTRPVRDLLRRRLLLVRQRTMLILSFKSLNERTLGQRVSLARVKAMKVEEAQARFTAPADQLLSGTEIELMGHLTAAITKLEQHLLGVAGKWPTYQRLQELPGIGKILGLTIALETGDAQRFADAGNFASYCRCVKSLRTSNGKKKGENNRKCGNQYLAWAFVEAAHFACRYDDPCRRFYDRKKQQTNPIIATKSLACKLAKAAWHVMKEDVPYDATRVFGPAKKTDFGETGREPAKGSGHPSQQN

SEQ ID NO: 125302 - protein, 387 aa, unidentified
MEVRMVNTPSADSNNEPVACYVAIELSKSGWLVGFLTPLSDKTGRYQVKAGDAQALLDLIERVHTRVARQLNRPVEVMSCYEAGYDGFWLHRVLEAHGIHNHVLDPASLQVNRRARRAKTDRIDVDRMLRALIQYLRGEPEACSVVQVPRVEEEDAKRLHRERKRLVVERVQHVNRIKGLCAAQGIYNYAPLRPDRWSQLDKLRTGDGRSLPARLKSEIVRELKRLELVLEMIETVEAERDAIIKDPRSRHLNADKIKMLARLRAIGPEFATSLTGEVFYRKFANRRKLGRYVGLDGSPFRSGSVERDQGISKAGNPVARSMMVELAWTWLRYQPDSALSIWFRERVGNLKGRPRRIAIVAMARKLLVALWRYLETGVIPTGAVLKA

SEQ ID NO: 125303 - protein, 422 aa, unidentified
MKVIYPICCGVDVHKTFLVATIIKTTNGIEPSYVKKRFSTFNNSILQFKQWLLDNDCRDVCMESTGKYWVPVYNLLEDQINVVIANPKWVKAVKGNKDDTKDSKWIGDLFRMGIVPASFIPDKNIRILREYTRYRYKLVSCKSSEKNRFQNAFTVCNIALDAVVSDMFGKSASAITDYLITTDEFNPEKCVSLLQRSLKKKSETVIESIEGYKMTQDQKDRMILVRSHLEFIENSISILDNKLDHLVAPYESAISLLCTIPGVNRSSAITIISEIGTDMSQFNSSKRLCCWAGLTPGNNESAGKKKSVRITRAGIYLKPALVQCAHAAVKSNSSPYYRLKYERIYKRRGKKRAIIAVARMILTAIYHMLITGEVFNPCDLYKIDMPLLLQDKQKSKAIKQALKLLTSQGILPSSYETSSVAI

SEQ ID NO: 125304 - protein, 343 aa, unidentified
METIYYIGLDVHKKTIAYCIKMITGKLANQGVISADRKTLRQWVADLPGPWMGAMEATIFTGWIYDFLKPHAVELKVAHPEMLKAITAAKKKNDRADAEKLADLLRVNLLPECVMMSEDLRELRRILRYRNMVVRTAITMKNKMSGLLMEVGATYDKRRLHGKRYFKNLLERVEDVPESVKELLSLSRGGLDLFEGVQKKLIKTLRGNALIRERVERLMSIAGVGEVLALTWVLEIGEVERFSNTRQAVSYCGLCSAQRESAGKERRGPLSKKRNKHLQTMLIEAANLAPRWNPHLAAVHEKEMLRGNKNQATIAVARKLVEYLLAVDRRGTPFTAEAPRLVA

SEQ ID NO: 125305 - protein, 306 aa, unidentified
MQSMYYIGLDVHKKKISHCVKDGSGNVHAEGAIPATRADLDRWMKTLPQPWTAAMEATIFSGWIYDHLKPHATALKVAHPLMLRAIAAAKKKNDRIDANKITDCLRCDFLPECYMASTEIRERRRTLRYRNLLVYQAVQLKNKISGLLMEAGVSYNKQKLHKVGYFKELLATNPDINEGLRPLLRLCRETLVRLQKTESALIRSLQRDSLLAERVERLMTIPAVGPITALTWALEVGDVKRFSSIKKAISYCGLCGAEKSSADTIKRTPISKQRNKNLQSVLVEAAKMAPRLSPELADLRQGEAER

SEQ ID NO: 125306 - protein, 362 aa, unidentified
MDQHSRLFIGLDVSKLKISVAVADGGRGGEVRFFGDIPSDPASVSSIVQKLAKRGAKLHFCYEAGPTGYELYRQLTEMGHDCVVVAPALIPKRPGDRVKTNRRDAVSLARLHRAGELTAVWVPDRGHEAMRDLVRAREAAQEAQKRARQQLQSFLLRHSHIYSGRSSWSLAHMRWISTLKFEHPAHFIVLKEYCQAIEDAEVRLKRLTDLISETVKSWTMAPVVEAYQALRGVSLIAAVVFVAEIGDIRRFENPRQLMAFLGLVPSESSTGEHVKRGGITKAGNSRVRRMLVEGAWAYRFPARVSRTKQAQLEGLPRTVREIGWKGQLRLCSRYRKMILAGKHYAGPAIIGGMNSRGHAACI

SEQ ID NO: 125307 - protein, 358 aa, unidentified
MVDKVTEAAVVGGVDTHKDLHVAAVVDQNNKVLGTQYFSTTRQGYRQMLAWMTSFGTLKRIGVECTGTYGSGLLRYFQNAGLEVLEVTAPDRMERRKRGKSDTIDAECAAHAAFSGIRTVTPKTRDGMIESLRVLKTCRKTAISARRVALQIIHSNIISAPDELREQLRNMTRMQLIRTLGSWRPDASEYRNVTNVYRISLKSLARRYLELHDEIADLDVMIAAIVDELAPELIKRNAIGYESASQLLITAGDNPQRLRSESGFAALCGVSPVPVSSGKTNRYRLNRGGDRAANSALHIIAIGRLRTDAKTKEYVARRVAEGHTKMEAIRFLKRYISREVYTLLRNQNRRINSIPITA

SEQ ID NO: 125308 - protein, 347 aa, unidentified
MDTIGLDLHKRESQLCVLAEDGMIHERRIVTSRERFTAVLGNRTGSRILIEASTESEWVAQHLESLGHEVIVADPNYAPMYAARSRRVKTDKRDARALAEALRVGAYRPAHRVSAKRRHVRAELAVREALVRTRTRYISLAKALVRRDGLRVAGSGAEQVAQRIAELDLSDTLATELMPLFQVLAAINEQIDGADRRIAELSKNDAEVALLTTAPSIGPITASAVVATVDDISRFRSAHQFEAFLGLVPGERSSGEKRRVGKITKTGNSRVRYLLIEAGWRMMRSRSEETAALRAWALQIAARRGKRIAVVALARRLAGILFAMWRDNSPYNAANLHMPRPILAKAS

SEQ ID NO: 125309 - protein, 353 aa, unidentified
MIIIGVDFHPEFQQIASVDTETGEFQEKRLAHREDAETFYRALAGQKVRVGMEASGHARWFERLLAELQFELWIGDAAEIQSKRVRKQKTDRQDAQLILRLMLKDDFPRIWVPSWENRDLRQLLWHRHRMVQMRTRIMNQLQALALNEGLRCRKRLWREHGRQQLESFRLAPWASRRRRDLLELLDRLNPTIAELSQAIEQEAEKYPEAQRLMTHPGVGPLTALAFVLIIGKAERFQCGKQIASYLGLVPLEKSSGNRRRLGHITKQGSSMVRFLLVEAAQVTVRSLPEWRKKYAHLMMRRGRKIAKVAMARRLAVALYWMWRKGWNYEPSKSSVRTRASSEQAMVCSKTPSN

SEQ ID NO: 125310 - protein, 345 aa, unidentified
MPSIVGGLDVHRKQITFDYLDTVTGEVSRGRVAPADREHFRVWLSRRFPRSQEVALAVEGCTGWRYVVEELQRAGIEAHLAEPADTAAARGRKKHAKTDKTDARLIRELLAQGRLPECWIPPGHILECRALLELYHDLRTEHSAWVQRVHAVLFHQGAPAFGDLSRAAAPAQLAELARARLSPAGQAQIATYLRMLEGLEAELAAVRRRLGAAARQLRGARTLTESLYGVGPVTGLALTCWLGGAGRFSSSRKAVRFTGLDITVSSSDSKRPPGYLSRQGPPVLRWCVYEAGKAHARGAAPDHGYYAAVKDRRGGTRAALAEARKIIRQACHILAELGDDALTPV

SEQ ID NO: 125311 - protein, 325 aa, unidentified
MPDVEALLRLLERWRDEAAKASRPITRITVAYEAGRDGFWLARWLSAHGIEAYVIHPNSIAVSREHRRAKTDRLDTARLQRAFLGWLRGERQHCSMATIPSLEEEDAKRPGRERENLVGERTRIGNRIKSTLARLGIRGFKPTLRQAPARLERLRTPEGEPVPPNTLAELRREMARLRLLAEQIREIEAARLQRLEQQPNSGAHPMIRLLAQIRGLGIETADMLAHEAFSRVLRDRRAVARYGGLTGAPDESGARRREKGLARAGNARVRRGMIQLAWRFLMFQKDSALAQWYRARTADARGATRKALIIALARKLLIVLSAHHW

SEQ ID NO: 125312 - protein, 363 aa, unidentified
MPTAHPCTSPLKFVVGIDIAKDTFVACFGQIDARQHLRFGKQTSFDNTLTGFAALLSWTEKQAVLPAPIWFVVEATGVYYEELAYFLSDKAQALSVLLPNKAKHFAQSTEQKSKTDQLDARLLCRLGLERALPAWQPPSPALRQLRALARERQSLTGHGARLKVKIHAYQHSYQPDARSLSRLATQQTLIQQQLLAVDQDLAALLEAEPELGRKLRQLTSVLGIGLTTAIVVVAETSGFVLVDNERQLASYAGLDVVQRQSGLFAGATRISRRGNVRLRTALYLPAISSLRYNPQQMAFYTRLRARHPNGKPGVIAVMRKLLLLCYSLWKNDRMYDPQYHPAVNELAAALESVHPETNEKAPV

SEQ ID NO: 125313 - protein, 351 aa, unidentified
MQCIAFDSHKHYTWALVQDETGKVLREQRVNHVRGALRGFLEPFEQGSPVAVETIGNWYWITDEIEQAGMVPRLVNARRAKLMNGSLNKTDKLDARGINRLQRSGTLPTVWIPPRDLRDARELPRTRMVLVRQRTKLKNRIHANLAKYGLKTDGVTDLFGVRGRQIISQCLEELPVQTRYATQVMLDELDHLKAKIEQMEERMAELFGELKSLGNIKTLPGVGFILGVVILTEVGDVTRFPSASHLASYSGMTPRVHASGGRVRYGRTRPDVNHYLKWAYAEAANAAMMHRRRHPQRHVSRLYERVRSRRGHPKAIGAVGRHLAEATYWVLANDEPYKDPAKRTEESKREA

SEQ ID NO: 125314 - protein, 391 aa, unidentified
MIYVGIDVAKDKHDCFITKSDGEVLFKAFTITNNLDGFNELHQKIASVMDDVTKVKVGLEATGHYSYNLLGYLIDKGLAAYVINPLHTNLYRKSLSLRQTKTDKVDARTIASMLMSDVNLKSYSDISYHNEELKSLTRYRFDKVKERAKLKTSVSRLVCILFPELEKLVPTLHITSVYALLSEFPGAKHIATAHLTRLTNLLSEASKGRYGKDTAITFRDAARASIGSNMPAKSLELKHTIKLIQELDSEIDEIENEIKIIMDEINSPILSIPGINYRMGAMIIAEIGDFNRFDSPDKILAYAGFSPSTYQSGQQDSAYAHMEKRGSRYLRYALYNATKYVCHWDPTFAAYLAKKRAEGKHYNVAISHAVKKLVRVIYHLEKIKQQYIKAA

SEQ ID NO: 125315 - protein, 327 aa, unidentified
MRTPCLAHSRRCKTNVVTIGLDPHPDSHTVAALDENGTTLASLTVSNDTAGLARLHEFAGSFPRYRWAIEGAANRFILPFVSALIAHGETIHHIPPNLTSQYRTRLGRKKNDVVDASNAARALLANPELPVFHPGAGQREFQDLTRTQRRLSEQLKANRMALQALDPGSSARSALTQVIHVLEEQLAELSEQMKKLVKTLAPALLELLGVGPVVASVILGEVGTIERFANEGQFASYCGAAPVERGSGKNSRMQLNHGGNRRLNWALHIIALTRSRCDERTKTLLAKLKARGKTQRASLRILKTYIARELFRHLHQTVTPVLNSGST

SEQ ID NO: 125316 - protein, 348 aa, unidentified
MKRVYVGMDLGSKQCAAVAIDYRGKMVDSEVFRTSERNMIAFFEGLKGSAEVIVEEGELASWVARTIRPHVERVVISDPRRNAWVAKAGNKNDPLDAAKLAELLRLGSYSEVWHPEDEGLAEFKLVVQRYDECSKKLARTKIQIKALLRQQGVITSGKAVYGLKGRQAALSRIESEPVRQLIELEYDTHDFLVLAKARFLRILKQESRKYPVIRRLKKIPGVGPVLAARFVAYVGDPNRFNKRTLASYSCLGVIKRSSDGSPIGRERLSKAGNHTLKDLSRTAFERAKVTKRSNGITEFYARSLARTNSRTNARLNTQRKILAIMLAMWRDGTEYCDEMVTGVAFTGS

SEQ ID NO: 125317 - protein, 454 aa, unidentified
MGKRPGREREFSPVHPKAAAIDIGATMHMAAVGPGCDAEPVRSFGTFTGDLHRLADWFAECGVRTVVMESTGVYWIPAFEILDQRGFEVLLVNARDAKHVPGRKTDVSDAQWLQRLHTYGLLRGSFQPKGEIAVLRAYLRQRERLLDYAAAHIQHMQKALTQMNLQLHHVVTDVTGATGMRIIRALVAGERDPGILASYRDPRCHATLETLGAALTGNDREEHMFALTQALELYDIYQAKVAACDVRIKAVLDRLKAASGKSVGKLPPARHTTKQPNAPAFDVRVALHALLGVDLTQIHGMGPALALKLVSECGTDLSAWPTAKHFTSWLSLAPSNKISGGKVLSSRTRRSSNRAAAALRLAAVTIGRTDTALGAFYRRLSARIGKAKAVTATARKIAVLFYNTLRHGMNYTDPGASYYEERYRQRVLTNLQRRAKALGYVLQEVATPEAGGVS

SEQ ID NO: 125318 - protein, 419 aa, unidentified
MERQYVAVDLHSRRSMIVRENEAADERQVTRIDNDPMALAEALAEAGPDPEVAIEATYGWYWAVDVLQAAGATVHLVNPSGLVWEERRVKNDYRDCCELIDRMRLHKLPEAWIAPPELRESRELVRYRAKLVTLRTSLKAQLKSVLAKHCLHPPVDDLWGVAGPQWLDTLELPDAYTTRVESLRDLVATIDREVAMLERTIHQRLRHDRGYQAIQSLAGVGRVLSAIFVVEIGDVSRFSSPEALCSWAGLTPKHRESDRKTRRGKVTKKGSKLVRWAAIEAVSHVRSGPKLKVDYHRIAQRRGANIARAAVARKLLTLAYYVLSTTGRRVAVPDHLAEPVEVACATARSATSRWSRQGETGTSQPGRELAKRHDPHAPGAVEELIEPAWLWPKTTMRHPRREEMPGSRTPACPPLLVDW

SEQ ID NO: 125319 - protein, 416 aa, unidentified
MTEERRWYAGVDWASESHHVFLTDDRGAKVGERIFRHSGEGLAEMAAWLLSASGAAAPGRINVAIEVPHGPVVETLLERGFSVHAINPKQMDRFRDRFTLAGAKDDSRDAEVMASALRTDPRCFRELAIADPVVIELREWSRIAEDLGADRNRLTNRMREQLWRYFPAMLEFESDLGAEWLLDLWEAAPTPAKAARIRETTIANILKRHRIRRFDAAQLLDALRKPPVQVAAGTTEAASAHIATLVARIRLVNRQLKDAHQRLDVLTARLIPTAEIEPGQRKQHDVEILASLPGVGRTVLATLLAEAFDALQRRDYAALRSLTGVAPVTKRSGKSCIVIRRQACHDRLGNAMYHWARVAVQHDTKSRAKYAALRSRGHSHGRALRSVADRLLNVACAMLKTGTTFNPALAVQKPSC

SEQ ID NO: 125320 - protein, 349 aa, unidentified
MLHVGLDLSRRRVDVCLVSSEGELVEHFRAPADRDGLYGLTRRVAVYREPVRGVVESMNGARFVHDELVKYGWEVLVADAQRVKGLAPLACKTDKVDARVLAELSFRDLVPAIWLPTPELRAERERSRWRLHLVKHRSILKNRVHASLIAFGHQVPMADLFGVAGRRLLADLDFPEPWLSHVQASLELIDDLDHRIGEIERWLRRSGADHRYIPLLMSAPGIGWVTGFTIASEIGDIGRFSSPTKLTGYTGLCPRVSQSGDVDRRGPLSKHGPRYLRWGLMEAAIAASSHPLYKERYQRTKRRLGRQRGAKVAQIELARKLTEAIWYMLTRDQPFKPFAPAGAIIRLTA

SEQ ID NO: 125321 - protein, 393 aa, unidentified
MVYVGIDVAKDKHDCFIANSNGEVLYDVFTIQNDMDGFEDLLFKIKIASKDLNKVKVGLEATGHYNCNLLGFLKSKGLPTIVINPLHTNAYRKSLSLRKTKTDKADARAIASMIMSDVSLKPYSDTLYHNEDLKSLSRYRFDKVSERAKLKQSVSRLVNILFPELEKLVSSLHTKAVYELLSEFPGAHQVASANLKHLTALLSTASKGHFGREKANEIREAARRSISTYLPAKSLELRHTIKLIRELDAEIAEIETEIKKIMDSIDSPILSIPGISYGIGAMIVSEIGDFSRFDSPDKILAYAGCSPTTYQSGQLYSSHAVMEKRGSRYLRWALINAARYVCNWEPTFTAYLEKKRSEGKHYYVALSHAAKKLVRLLYHLETTGEKYIPQTLS

SEQ ID NO: 125322 - protein, 313 aa, unidentified
MHNIGIDMSKDTFHVALNDTRVEIFDNTTAGIKKLIETLTEVGGTKETTIIGTEATGVYHLLLCEQLRKKGWNVKVINPLLTHRMITSSLRRVKTDKHDAISIRKTLMTGVGYTYTDTPDILALKTLVQEREALCKIRASTKQRIHAHKIREKASDIRLHDSFSGPLKLLSYEIKEIERHMDSYVPETQKLLRSIPGVGKVSAATLVATIGDIHRFSQPEKLVAYIGLDSRVHQSGTSINGKGYISKRGNRYLRYILFNAAFIAKRRNPDLKRYFEKKVKEGKHYFSALCAVERKLVHLIYAVWMRGTPFEMR

SEQ ID NO: 125323 - protein, 408 aa, unidentified
MIANPQEGPIHARGRAVVGIDIGKRKHSATAVSPQGEVLARLASFSNTREGIDLLESEVLQKAGGPGKTLIAMEATGHYWICMYWELTRRGYCCVVLNPIQTNARMGARIRKTKTDPIDSLGIARVILSGEARATRVPDEKTVELRLLVRHRWRLVQAHTDMERYAQTLLDRVFPEYESVFSKPLLPSTRALIREIGIDPRQIISRADEVRYLLRRVSRRQISDDKIDQLLQKASHSIGTPQATTLIAQQLHDIFQYFELIEQQVAQIDEQLEARILEAGSPLLSLGIGPVLAASIHAESDSIRDFSTPGQYVAYAGLDPSVHDSGDTVRGRSKISKRGSPTLRRALYQAAFVIYRKHDYFLRRYKKYRRKGRSHTEASIIVADRLARVVWRLLTDNRPFKKRPPKKS

SEQ ID NO: 125324 - protein, 342 aa, unidentified
MDYYAGIDVSLEASSICVVDASGKIIKEAKVLSEPEALIAWFKALPFTLARIGLEAGPLSQWLYAGLKDAGFAAELLETRHVRDAFKAMPVKTDRNDARGIAQLMRLGWFRPVHCKSAPAQETRALLTARKLVQAKLYDVQMSLRGILRGFGLKVGRTTPVGFAVRIRELTEHHPALSAIAKALLAVHEVLLRELNGFEKQVRKQARCDSRVRLVMTAPGVGAIVGLTYVAAIDDPERFSSSKTVGAHFGMTPKKYQSGETDLTGRISKSGDKGVRAVLYEAAHIILTMPVKGGALKSWAAKLAKRAGMQRAKVALARKLAVILHRMLADSAPFDAAKAAAA

SEQ ID NO: 125325 - protein, 438 aa, unidentified
MSRKDKTHIRGERGQAFADKIRGLNLEQILCVSLDISKYFQVVMIHNALGEIVTPTFEIDIFKTGFEQLCQAIDEAIDRTQAQLVLVGLEPTGHYFENLARHLDQRPQPVTLINSYAVSQNRKQQMMRREKDDPIDVAAIGDLLRRGEGSAYQPLQGIYLELQQLDRVRQGKVKMRTMLKNQIIGHLDRIFPGLVIIGDGARERYTPMFATDFWECQTMQHLIRVCPDPRQLVAMSVTDLITAFHAHNFKMGPKTATKIITYTQNVLLPDPEVIAIRSELLHHDLILLDAVAERVVVMEERLVDLVTQTPYQIWTKLKGLSHIQVARLAASIGDPDHYTHAKQIFRRSGLVSGRNDSGIRQNKGKGNKIVKTGDVHLRRALLDAIRTFMLHQPVLFSYYSKLKLTKPDLVARVATARRANGILWATLRDQHSTTLLYK

SEQ ID NO: 125326 - protein, 347 aa, unidentified
MNKSVTTPSATAFCGIDVSAATLAVAVIEQDQPLQQREFANRSSGHKALIGWLGKRKAGVRVSMEATGVYSLDLALALDAAPRVELAVLNPKLVNRFQQTLARSKTDAADAVVLAQYSQRMPFTRWQRPSLQGLQLRALARHISALMTEQSRERNRLHALKNSSTAPRAVIDDLGRSLASVARRIVKMRAAAMELIGAETQLNERFCMLTSMPGIAAISAIQLLAETVLLAPDLTARQWVAYSGLDPMHCNSGASVHKRPRISRCGNRHLRRALYMPALAAVRWDPHLKAFYEALQARHKTKLQALIAVARKLLHAIYGIFKTRTPYDGNKLFPQMNLTPELQSASR

SEQ ID NO: 125327 - protein, 340 aa, unidentified
MQITTIGLDLAKSVFQVHGVDAEGKVAVRRKLRRAQIRQFFARLAPCVIGMEACGTAHFWARELMAMGHQVKIMPPSYVKAYVRRGKNDAADAAAICEAVMRPHMRFVPVKTEEQQAALMLHKARELLVRQQTMLINAIRGHMAELGMSAPQGSAKIKDLIAVIQDSEDQSIPALARAALQPLVRQLHTLDEQVETLDREIKAWHTRNETSRRLATIPGIGVLTASAIAATVPDPSFFSSGREFAAWLGLTPRQNSSGGKERLGRISKKGNTYIRRLLVTGATSMLRFARAKTAAGADWVNGLLQRRPARLVTVAMANKTARIAWAVMVRGKTFEFRSGP

SEQ ID NO: 125328 - protein, 447 aa, unidentified
MLQEGMKAATWRELETNGKFTKNDKLTFISDDMLIIGCDIGSETHYVRAIDSRGRELSQDAFPFSNSSEGFQSAKAWALELAAANDKHQIVLGLEPTGHYWFCLAAWMVSNDISVVQVNPYAVKQTKELEDNSQRKDDRKDPKLIANLVKDGNYGMPYLPEGLYADLRRLSMLRDQLTEDRIRNINRLHREMKIYFPEYRDAFGKLDGAFTLEALKAAPFPEDIVRLGVDGLKDIWHRAKLRGRGYSKADQIVQYAKESIGLEHGRAGGRKAVKIFAEQIESLSEALEEIEAELHQKCREIPYAENILEIRGIGENILAGILAEMGDITRFDDASEIQKLSGLGLVACSSGKHKGETKISHRGRKRLRYWLFQAAKSAVSHGEEFKELHAHYTTRKDNPLKKMQSLIVIACKLLRIIFTLLRTGCRYDPMKMLRDIKRPERAAAQAA

SEQ ID NO: 125329 - protein, 391 aa, unidentified
MEARTVNNLPPAGTDDDAVRCLLAIELSKKSWIVAVNTPLSDKISRHTLKPGDGKELLDLCERIRTRVARETKKRVEIVSCYEAGYDGFWLHRLLEAHGIRNYVIDPASLQVDRRARRAKTDRVDVERLLRSLMAYLRGEPKVWSVVRVPSVAEEDDRRLNRERGRLINERIQHVNRIKGLLAIHGIYDYQPLRRDRMQQLERLRTADGRTLPPRLKAEILRELQRLVLVVGMIKTIEAERDAIASAKIETEQQHSSAKRIQDLAKIKSIGPEFATTLVGEVFYRSFDNRKQLGSYVGLTPAHFQSGAMCRDQGISKAGNGKARTVMIELAWLWLRHQPDSPLSVWFRDRVGKLKGRIRRIAIVAVARKLLIALWRYLETGLVPKGAALKV

SEQ ID NO: 125330 - protein, 394 aa, unidentified
MRFVGIDIASEIHVVAVVDETDAVLVRPTKFTEDAPGYDRLFGLLGTPADTLVAMEATGHYWKNLFAVLVTRGVAVALLNPLRTRRFAYEELARTKTDAIDALGIARFAAQKRPAPTRLPDRATEELRELVRLRDRLVQDFGDCLRQLHRLVDLGFPEFTRHVKSLDSELATAILHDYPTAAAFRNVSARRLAGLRYDGRHKVGDDLARALLAAATRSVGQHHGEAYRLQVRYACEDLDLLRRRLRTLERDIERTLDDHEIGTLLTTIEGIGPQTAARLIAELGNPAEFRSAAALASYVGVIPAIRQSGKWTSSRAGLSPLGHAALRAALWMPVLTAVRKNPWLRAYYQRLIARGKLPKVALIAAMRKLLIAVYTVAKTRRPFVSQRAPQEARA

SEQ ID NO: 125331 - protein, 391 aa, unidentified
MDVLHDRCAGLDVHKKTVVACIRVVGPGGEVTRQVRTLATMTADLLELADWLAASGVNHLAMESTGVYWKPIWHLLEGRFEMMLVNAGHIKQVPGRKTDVKDAEWIAQLLQHGLLWPSFVPPPPVRELRDLTRQRAQLVADRSGVANRVQKVLEAANIKLGSVATDVLGVSGRAMIRGLIAGRSDPARLAEEARGSLRKKVIPLRRALEGRVTEHHRFQLRLLMDQLGQLEGLIARLDARIVEVMEATPSEDRPSPFREAADRLATIPGIAARSAEVIVAEIGPDMSKFATAGHLASWAGLCPGNDQSAGKRRSGRTTKGSRWLRVMLVQAAWAASHTKQTILAATYRKAVKRLGKKKALVALGHKMLRIIYEMLKEKTDYVERLQPGRAA

SEQ ID NO: 125332 - protein, 337 aa, unidentified
MSEISILAIDLAKNSFQVCGVRADGVVVFNRSVSRPRLYQLLAEQDGCIVAMEACATSHHWGRVAQSYGHETRLIPANYVKPFVKRQKNDHADAEAIAEAAVRPSMRFVAVKSAEKQGRAVAFRTHQCFVRQRTQLINSLRGHLAEFGIVAAKGPASLKLLEKVLVDPAVDLPDRVREMGAFYLQQIGRLTAVIEQLAEDLESATKTDEELRRLCTVPGIGPVTAGAIAAFAPDLQMFDCGRNFAAWLGLVPRQRSTGGKTRLGSVSKMGQCDIRKLLIIGAMSVIRWVVRKGGSANRWLASLVARKPRMVAAVALANKMARMIWAMTTKGEDYRMA

SEQ ID NO: 125333 - protein, 350 aa, unidentified
MRIIGCDYHPGFQQIAFVDTETGECGEQRLEHREEAEKFYRDLAAQGMKVRVGMEASGHARWFERLLSELQFELWIGDAAEIRTKRVRKQKTDRQDAQLILKLMLKDDFPQIWVPSWENRDLRQLLWHRHRMVQARTRIMNQLQAVALNEGLRCKKRLWREAGREQLEAFPLAPWASRRRSDLLELLDRLTPTIAELTQTIEQEAEKCPEAQRLRTHPGVGSLTALAFVLIIGRAERFQCGKQIASYLGLVPSEESSGDRRRLGHISKQGNALLRFLLVEAAQVTVRSLPEWRSKYFHLAMRRGRKIAKVAMARKLAIQLFWMMRKEWDYEQVKEFGPHAGQPENRRGVQ

SEQ ID NO: 125334 - protein, 320 aa, unidentified
MTSRGAEKMKNDTIGVDVSKDHLDAHRLADGASRRFVNDTSGRKAFLKWLAEKPVERVVFEPTGPYHRAFESALGAAGVPFAKVNPRQARRFAEATGKLAKTDRLDAAMLARMGALLELEARPARSNALLELKELHSAREALVKDRTAAKNRAKTLTLSLLRKHNAQRLDQIERQIQAIETAILAAIEADADLASRFAILTSIPGVSAVTAFALLIAMPELGALDAGQAASLAGLAPIARQSGRWTGRSFIRGGRADVRQALYMPALVAARFNPDMKAKYTHLINTGKPAKVALTAIMRKLVVLANALLKANRPWTPRIA

SEQ ID NO: 125335 - protein, 368 aa, unidentified
MDDGITSFVGLDVHKDSIAIAVAEAGREAPRFIGTTGPDLAKLLKALASIGKSATLQVVYEAGPCGYSLARHLRSRGYPCEVIAACKNLRPAADRLKTDRRDALTLARLARSGDLVPVLVPDERDEAMRDLSRAREDALGARLKARQQLKALLLRHGHRYTGRTSWTAAHERSLASISFAHHAQEAAFVEYRQAVREAQDRLDRLTQALREECEHWRLKPLVAALATLRGIDFLAAVTLVAEIGDFRRFAHPRDLMGFLGLVPSEFSTGESRHRGSITKTGNGHARRVLIEAAWNYRHPARISRLMQKRQEGQPKAVRDIAWRAQLRLGQRYRRLSSRKVHQNKICVAIARELSGFVWAIAAQIGVAV

SEQ ID NO: 125336 - protein, 422 aa, unidentified
MHKQEESPYAAFVGIDWGDKKHDLCLWVPGHERRERLVLEHRPRAIQAWAEQLRERFGGAQVAVSLELSQGPLVSALLEYEFLVLFPVQPSTVASYRRAFKPSRAKDDPTDAEFALEVLIRHRDKLKRLEPERPAMRTLRSLVEARRDLVHDRTRLTNRITAALKGYFPQILDWFRDKDATIFADFLERWPTLQAAQRARRETLESFFRAGNVRYKKTIERRIDAIRNETPLHSDDAVITPSQLLVEALLSQLRVLSAGIARFDAEIARLAPQLPDYELFAALPGAGPTLAPRLLAAFGERRERFPNAAALQNYAGIAPVIERSGNKCWVHWRYSCSKFLRQTFIEWVGQTIPRSFWAKAFYETCRARGSRHQAALRSLAFKWIRILHRCWVDRAPYDESRYLMALQKRGAPLLKHAAQNAS

SEQ ID NO: 125337 - protein, 361 aa, unidentified
MGQRTSVGLDVHARSVVGRGLDVQTGEVLRARLTPAHDDVIAWLRSLPGPVKATYEAGPTGFGLARALEAAGIDCVVAAPSRLLRPSGDRVKTDAKDALHLAQLLAVGQVTAVAVPDEETEAARDLVRARDDVRGELMSARHRVTHLLLRQGIVYSGGTPWTGVHENWLRGQRFPRPALQMAYDAALAALVGAEDRRDRLDAAIAELAAGSRFTSVTDRLSCLRGICTLTGFGLAVEIGDWSRLSPATIGSYLGLVPGEDSSGESRAQTGVTKTGNSHVRRLLIEAAWHHRPPYRPSTQLRRRWQRAPAVVAAHAAKGNRRLHSRWCAFDDRHKRAVVANTAIARELAGWCWALAVMSPDP

SEQ ID NO: 125338 - protein, 460 aa, unidentified
MTKPKTGDHPDLKMVNPNAAAIDIGSTMHMAAVNPDTDTMPVRAFGTFTQDLHDLAEWFRSCDVTSVAMESTGVYWIPAFEILEANGFEVILVNARYAKNVPGRKTDVSDAGWLRQLHSYGLLRGSFRPEAEIATLRAYMRQRERLTEYAAAHIQHMQKALMEMNLQLHHVVSDITGATGMRIIRAIVAGERDPEVLAAFRDVRCKSSMDTIKAALVGNDREEHVFALTQSLELYDFYKAQIETCDRRLEAAVGALTVRADDDLAPLPKARIKGRQHNAPSFDVRAALYGVLGTDLTQIHGLGPSLAPKLVAECGTDLHAWKSAKHFTSWLCLAPGNKISGGKLLSSRTRRSSSRAAALLRLAAVTIGRSDTALGADRQAKGGDGHGAQDCRFVLQCHPPWHGLPGSGGGSLRRATPATCALKSPASRENTRLCLGAHATGVGCFLGRPRCSSRAKSREV

SEQ ID NO: 125339 - protein, 357 aa, unidentified
MRFYTKQHQFYCGIDLHARTMYVCILDHHGEILLHRNMPARPETFLKAIASYREDIVVAVECIFTWYWLADLGAREGIPFVLGHALSMTAIHGGKAKNDKIDSHKIAVLLRGGMLPQAYVYPAAMRATRDLLRRRMHLMRKRAELLAHIQNTNSQYNLPEIGKKLAYKGNRDSVAERFLDPAVQKSVEVDLALIDHYDRLLRDVELTIVQTAKQHNAQALYRLQSVPGIGKILSLVLLYEIHDITRFPRVQDFVSYCRLVKCAKESAGKRYGTLGKKIGNAYLKWAFSEAAVLFLRNNPQGQKWLARLEKKHGQGKALTILAHKLARAVYYMLTRDTVFEMDRFLNGDGSRVGEPAA

SEQ ID NO: 125340 - protein, 401 aa, unidentified
MKEFNVEAVRIETASALESVRPAQAGRKYPAYIGLDVHKETIAVAVARAGREAPESRGEIANKPKTVAKLVERLNQEFDGEVLLFCYEAGPCGYGLYRQLLALGHDCQVVAPSLIPKKPGERIKTDRRDACKLARTLRNGDLTAVWVPDEEQEAMRDLTRARDDMKGQERKARQQLNAYVLRHGHAWPSNKTRWTKTHYNWLESLKFAHDWQQVVLQEYIDAVKAASQRVADITAQMERVLPQWSLAPVVDSLVALRGIDKLAAMVLLAELGDISRFDSPKQLMAFLGLVPSEHTSGGRRRQGAITKTGNSHARRMLVESAWSYRFPARQTAHLKRKAAKASDEAKVIAWRAQKRLCGRYRTLLQAGKNTKQTTVAIARELAGFIWDIVCHEMPKVQQAVR

SEQ ID NO: 125341 - protein, 314 aa, unidentified
MTGPAVFVGIDVAKATLDIALRPSGERWQLPNEDAALAPLLARLTPAAPALIVLEATGGFEHAVVAALAAVGLPVVVANPRQVRDFARATGQLAKTDAIDAQVLALFAERVRPAPRSLPDEAAQALDAVLTRRRQLLEMLGAERNRLGLARAPVRRGITHHIRWLERQLADVDHDLGQRIEASPVWRATDNLLQSVPGVGPIVSRTLLGELPELGRLTRKQIAALVGVAPLARDSGTLRGKRLVWGGRAPLRTVLYMGALVATRYNPVIRAFYHRLRAAGKPAKVALTACMRKLLVILNAMVRTNTHWRAPARA

SEQ ID NO: 125342 - protein, 373 aa, unidentified
MPKYSTAFGMDVHLRSTTVCALDADTGEAVTRRFPGNPWGEIAGWMGGFPGPSLAAYESGYPGFAPQRELAGLGVECVVAAVSKIPRSAADSASKNDRNDAARMAKAILAHDISPVWVPSPEVEGIRDLAGAYDGATARLATAKQRLLAFLAKRGFAYGGTTPAGNPRKYWTYDFLRWLDKVRPEDDGGVRTLAALRSEVEAAAEARADLLSEYRAAVDASPIAAEVAALQSIKGCAFALAAAFSAEVGDFTRFRSGRQVTAYFGLAPSQRSSGDSVRLGGISGAGNALVRKLAVEGSWCYAAARHQPKLMPRDTGVPIEIRMHGRKGSERLWRRREEMLARGMPRAKANAATAAELVRWLWALGMMCREGAE

SEQ ID NO: 125343 - protein, 341 aa, unidentified
MLEVNTIGLDLAKNLFQAHGSDASGAVLFRKKLRRDHVLRFLAAQPACMVAMEACARSHYWAREIAKLGHDVRLTAPGYVKPFVKRQKNDAADAEAICEAAQRPTMRFVAAKSEEQQAAAMVFRVRDLVVRQRTQTINAIRGHLAEFGLVAAQSLFHVAKLVAAIEDKIPGIPEAARPILSLLVAQLRSLDQRIALFDREIAQRAREDAQARRLMTIPGIGPITATAIAALSPSTQTFKRGRDFAAWLGLTPLQRSSGGKQKLGETSRMGERTLRRLLIIGASAIVRWAMRKGSTADAWLSRMLERKPPMLVIVALANKTARIVWALLARGGTYRATAVTG

SEQ ID NO: 125344 - protein, 439 aa, unidentified
MRRVDEVTDEPLYRDRVCGIDIGKAGLVATIRVPSEKNPARRAQETRSFGTTRREVLELADWLRCWQVPAVVMEATGDYWKGPFYRLEAEGFECVLADAKQVRHLPGRPKRDPSDSRWLAACFERGAITACFVATPEFRVIRLHTRYRRDLTEERTREKQRAEKLLESAAIKLSSVVTDLHGVTGRDIMDHLIGGERDPKALAQLARARARRKISELEEALDGAEFFTPVHAALLQAMLARIDQANAQIAQLTEVIEHLLAPHEEQLAQAESMPGWGRRAAQDALAETGPDMNRFPTGAHLASWAGRTPLDNQSGTRKGKSKSKKGNRYLGGLLGETAIAAGKTQTREGARYRRLARRRGKAKALIALGNTQLKVYHALLSQPGTRYEDLGPDYYDRQRDIRRQVAHHVGKLGALGFEVTLARLPSPDPDPARTGDHAA

SEQ ID NO: 125345 - protein, 336 aa, unidentified
MQPQRYVGIDFHRRRSVIVHKDGAGNLIETVRLDNDRAAFANEIAKAGEHPEVVLEACYGWYWLADLLDELGANLHLAHPLGNNWGHRRVKNDERDAEDLVDLLRLGRLAEAHIAPPELRELRELVRYRAKLVALRSGLKSQVHSVLAKAGIAVPMTDLFGVAGRQLLDTVALGHAYATRTESLRRLISAYNDEITMADSEIDQWLNGDVGYLAIQAIPGVGPILGAVFVAEIGDVKRFSSPERLASWAGLTPRHRESDVHVVRGPITKQGSRIVRWAAIEAAQRRRGFRNARFDAIAERRGSNKIARVALARHLITLVYYGLRDGEIRCLADKTG

SEQ ID NO: 125346 - protein, 336 aa, unidentified
MFKFKAFAGIDISKQTFDAAFILPGAGTMIHQCFPQTKAGFIAFIKWLCDQQVTLQDTLICMEHTGLYTSGIIDFLVEAKAHFWVEMAIKIKRSMGLQRGTDDKASAITIAEYAMRFTDRLKLWKPVDTELSRLRNMIVQRDRIVNSLKQLLVPVDEMKSCGGAKQGKELERLQLPAIKGLEKAKEKIELAINDFIAGEEKINKNIGLICSIKGVGLQTAASLYVYTKGFTAFENAKQLACYCGVVPFSKSSGTSVRYKPGVSPFANHKLKSLLHLCAMSALRWDKEIKAYYERKLKEGKNKMSVINAIRNKLLLRIFAVLRDQRPYVENYQLASV

SEQ ID NO: 125347 - protein, 322 aa, unidentified
MTESMVGIDVAKATFDVAAPLEPKGKYRTKAKLPNTPAGFTLLSDWLDRHVPGAAVCMEATGVYHEALATFLVERGVTVYVANPAQVAAYAKSELSRTKTDHADAKLIARFAMAQLQVGTTLRPWVPPTPAQRKLRALIHRLNDLEGMRQMERNRLDVSDQAVRGSIADVMETLDAQIAELKKEIDNHIDSDPDLRRDAGLLTSIPGIGELTAAFMLGCAGDLRRFDDPRKLDAFAGMNPAIRESGKWVGQSRLSKLGHALLRAKLYMPAMTAIRHNVAVRALFDRLVARGKPRKLALGAAMRKLLHLAWGVTPRLGGYPLR

SEQ ID NO: 125348 - protein, 485 aa, unidentified
MPPRAGTTIPIMKRKARIRRKRKSKIQIDDQWQMVNPHAAGIDLGSKEHWVCVPPGSDVVNIRRFGTYTADLHALADWMEQCGGTTVAMEATGVYWIPIFQILETRGFEVILVNARQTKNIAGRKSDAKDCHWIQRLHTFGLLQGSFRPKDPYCTLRTYLRYRDELIAARSTQCQHMQKALQQMNLQLTQVLSDVTGVSGLAIIHAILEGKRDPVELSKLVDPRVRAKPAAIQKALVGDYRPEHLFVLRQAFELFHTYEAKIEACNQQIVTETAKLPDRVDPALKPLPPRKEGRSKCHDKLAGQDMRPWLHQKFGVDLTAIEGIGITTALVMLTEVGSDLSKFPTEKHFCSWLGLCPDNRISGGKVLCSRTRRVVNRLSDTLRMSAYALEHSQSALGGFHRRMKARLGAPEAITATAHKLARIIYRLIKHGENYVRVGMEEYEHKFQERKLRGLKKLPRRWVLISLRSKQFRREFLRRYGSAFPE

SEQ ID NO: 125349 - protein, 333 aa, unidentified
MGVYGIDLSKDKFDLCFLSGDKEKTKIVRNNFKGICNFLKRVPDDSILVAEHTGSYGDLLVHLCYQKGIKIALVSGYNIKHSLGLQRGKSDLKDAFRIRKYGERFFEELQFAEPKGESIKELRELYTLREQLAKSRKSLILGQKSRNPGASQSIAAHQSAGRAIGYLEAEIGEVEEQIEKVVQNDAELKDNYDLITTIKGIGPVIANNLIIKTENFKRISTAKKAAAYAGVCPYPNSSGKMSKGAKTSHMADKKLKSLLFLAAKKSVAHNREHSLYAERKKLQGKPYYLIMNNVSNKILRSVYGVLQSRKPFDINHVCRDPREFKQKQKSNIA

SEQ ID NO: 125350 - protein, 319 aa, unidentified
MAQNDLVVVGIDVAKDKVDVCIRALGMRQTFPSTTQGHRKLVAWLRKHQVNKAVMEASGGYERGWARVLREAGIEVRIVDPKRVRSFALSAGRLAKNDTIDAEMIAWFAETFSDAPSQKHDAAHEELQALVKARLSLIDFRMRLVSQSEHAAPGLVQKTHAHILKSLACEIARLEAAICAKIKSMPDFAERAEIIESVPGFAETSSANLVAGMPELGQVSNKIAAALIGVAPYDDDSGKRRGERHVKGGRRWVRNAIYMPCVGAATLNNPVLKAYYQRLIAKGKEPKVAIIACMRKLIIILNTLIARRQKWDPSRYVVS

SEQ ID NO: 125351 - protein, 339 aa, unidentified
MPHYAALDVSNDETAIHVVDEAGRTVWRGKRASDPEALAAALRRHAPDLVRVGLETGFLTPWLYHSLKAIGLPIVCLEARHARAATALQRNKTDANDAESLAQLVRTGWYREARVKSFAAHAVRHLVGARAQLKGVSVDLSNQIRSILKTFGLRAGKGAGHPFAIRVRELLKGRPSLAAIIDPLLAAWQAVREQIAVLDRRLIRLAKGDPTCRLLMTCPGVGVIVATSFAASIEAPEHFRRSRSVGAYLGLTPARHQSGETDRTGGISRRGDRLMRTYLFEAAASLLIRVRQDSALKTWGRDLAKRMGFKHAAAALARKLSVVLHAMWRSKTPFRAWPV

SEQ ID NO: 125352 - protein, 521 aa, unidentified
MVEREGPLLGLRARSRVSSFPPGLSRGLTWCLTPDNHKHDDAWHPAILNKGGNTMKSFYMGIDVSKGYADFVIINQRKQPVVKSFQLDDTFDGHSRLHEIVSRFSTDHPQTVICAAVESTGGYENNWYNTLIRLQASLNIKTARLNPLAVMHNSKADLKKNTTDKISAQNIAEYLIAHPEKVVYQQQDKFASLRKQWGFVQMLTKQCTQLLNQLHSLLYTANPELLNYCRNEMPAWVLKLLLKYPTAANLKRAHDKTVAKIPYVSLTRAKQLIAGAKLSVASATDPLTAQLVTATVEQILQLKKTIAAQTDLMAAQCDVPEVKLLKTFVGIGDMSAIGLILEIQSVARFKTVKNLASFWGLHPVYKISGDGSGAFKMSKQGRVNPRKILYNVALSAIEHNPVIKPIYQYHLQQGRHKMDAIGICMHKILRIIYGMLKNNTAFDPKVDAANRQRSLPDMMGSPKTNKNRRFQSYDSKAPVSRRQRKKRLERERSHSVITDTKCGISAPVPIADIISDMLSNI

SEQ ID NO: 125353 - protein, 350 aa, unidentified
MDKELYIGVDVSKQTLDLAYYDGESIDWKKALIKVSNNNAGFKKIGSWVAKVSKGFDIVLFCMEYTGLYTQNFRLWLEEKHYIYRMVEPRKMHRFEPDLDDGLRSLDRIKTDELDSFRIAIYCEQNHRKILRNPSKLPSPVYFKLKRLLAERKQTVKQSVLYKQQLHDICAYDTDLSVERKNGQLKTLNDALKGIDNEIDMYIKEDADISKNFSLLTSIPGIGRVVALETIVLTENFMAIDNPRKYACYIGVAPFKKESGTSVRKGSSVSKKGFKQAKADLSIACLVCMQHIPNIRDYWERKRKEKCSGIVFNAIKFKMILRMFAVIKRGTPYVETDNYRNGKNKQPGVN

SEQ ID NO: 125354 - protein, 345 aa, unidentified
MNKISVIGLDLAKNVFQLHGIDRDGEVIVRKQLKRSQLRQFFAKLEPCLIGMEACGGAHYWSRELSRLGHTVRMMAPVFVKPYLKSNKSDRNDAEAICEAVQRPSMRFVQPKRPAQQAVLHLHHGRRLLVRQRVALSNHMRGILSEYGIVLPQGVKVLPRRLPEILEDADNALPMLARHLLAEFKAEHDELIERLERIEQQLKVWHAKDAVSQRLASIPGIGVLTATALAATVGEGQDFSHGRQLAAYLGLVPRQASSGGKERLLGISKRGDGYLRQLLIHGARAVIHHIRRRLKAGRPSGNPWVEQLLQRCHVNEAAVALANKMARTAWVLVVRNETYCPARPV

SEQ ID NO: 125355 - protein, 383 aa, unidentified
MQPINTVINPTIYLAIELSASTWLIAARLPGSEKPHLHRIDGGDTAALFALISSLRARVARRLDAAIGVVCCFEAGRDGFWLHRLLTAHGVANYVLEPTSILINRRARRAKTDRLDAIGMLRVLAAYLRGDRQSCSMVRVPTPEDEDAKRIHRERENLVQEKLRIENRIEALLFTQGIRKRPSLRSWERDLAVLRTGDGREMPRHLRAELDRLRRRLVTILELIREVEAERDEVVTTNPEHQTSRKIVALCRIRGLGENFAGVLTREVFYRSFDNRRQIASYVGITPMPYQSGSMDRDRRISRAGNPRARTTMIQLAWLWLRYQPGSELAEWFRKRVGTLAGRTRRIAIVAMARKLLIALWRYVETGVLPAGAEIRPESVAAA

SEQ ID NO: 125356 - protein, 344 aa, unidentified
MDHFGGLDVSVKETSVCIVDDTGRIVREVKVASEPEALLKVLGSPTYRFKRIGLEAGPLSQWLFSGLAEAGLPVVCVETRHMQAVLKAQINKTDRNDARGIAQMIRVGLYRPVHVKTLRSQKLRMLLTHRKLLQSKAIAIENDLRGTLRNFGLKVGMVGKVRLEARIQELVENIPDLAGLVEPLLIVRRALREQIVILHCRLLAIVRDDEVCQRLMTIPGVGPVVSLTYRAAVDVPARFRKSKSVGAVFGLTSSRYQSGEIDWSGKISRCGDEMMRTMLYEAAQSMMHSKKWSWLKAWAMQIARRRGMKKAIVALARRLAVIMHRIWVDGTEFRWSREQAAAAA

SEQ ID NO: 125357 - protein, 410 aa, unidentified
MRYYLGVDWADQTHAVWVVEEDGTKIAARTVPHTAEGLSEWGRELDEWRAQGIELWAAIERREGRVVDFLLDHGVVVYPVNPKALDRARDRFRQSGAKSDPFDARVLADFLRTDHAHLQALQPSSEAAQELKLLTEDYQRQIRQQTRLVNQLTHTLKAYYPRALEIAELTTALTREFLHAYPTPQAVTALTPRQWQRWARAHHLSETRTRDLWTVLQSPQLPVPAHVVRAKARLMLTLVAQLMPVVAAVRHYREAIEDFFARMPEAQWARTLPIGNHGITAPTLWARLGDAPGRWESFRHLQAHAGTVPVTKRSGKQQRVVHFRFACDKSLRYVVDQVAFLSLLSSDWARAYYDQQRARGHAHHQALRALGAKWLKIIFVMWQRQVPYDEQYHLATMTRQQLRQRQERIA

SEQ ID NO: 125358 - protein, 286 aa, unidentified
MSIYAGLDVSDKTTHICVVDADGKVLRRDVVASDPDVLAKWLTRHCPDLVRVVLETGTLSTFLYHGLAERGVAVECICARHAKRVLSARVNKSDVHDAEGLAQLARTGWFKRVHMKASATHIDRAALRIRAQLITARTAMANQLRGLLKLFGLRMGTARTPGRRAERLTAFYAQRPDLKALFAPLIASMEAIEEQLCASNRLLNERAKADEVCARLMSVPGVGPITALTYTSTIEDPHRFARSEDVGAYAGLVPRRSQSGERDTSGHISKAGARRFTRPPTSRCPR

SEQ ID NO: 125359 - protein, 315 aa, unidentified
MPMYQLGIDVSKNTLDLCLLREGIKGRIKTRKLKNTADAAKVVAEWLKKQSCELGEVHIIMEATGVYHEPLAYGLHFAGARISLANPHRTREFARGMNILTKNDKVDAWMLACYGSLKEPEAWTPPPESVRYLRALLRRRDALVADSTREKNRLEKSVFTDSPDAVRASIENMLQELSNEIEHLDVLIQEHIKTHPELNQDFRLLTSIKSVGYLLGLNMLAILKSHSFESAEQAAAFLGVVPVERRSGTSVKGKPKLSKIGPLNRPGFPGECFICELRLPDHRFRWKHNKLFLLLPEEYGPAFPAIVDCYTSPPT

SEQ ID NO: 125360 - protein, 427 aa, unidentified
MSGKDYTKQVEKRQKIKRTTLIVGLDIGSEFNAMGFMNKTGEILGRYPKVYNLRVGFEYFKRTIERTKKAHGLKKVLIGMEPTGHYWRKIAYYAKAEGYEVRFIRTTALRHQREVDESSSAKSDIRDAITIANITREGKYIDTVIEDGELRQLRTLAKMREKIQRWNTGTKHRLAAVLDDYFPELKGIFWSMKAKGLWAILERCPYPKDVLKLTVEEITEIIAKSSRRKGEARRKAEEVYKGAQESIGLKYIGIADEYRLKMCLEEIKRSEEELKRVEIEMRKLLRNIPEAEVIQSIPGIGIITTAVFLGELGNPKYFKGAKQIIKYAGYDPKEDDSGKSVGKKIISKKGRWLLRKYLYFMGMRVVHRNKFFRDYYEKKLEKKNRFGQLLKKQEALCAVIIKLIKVIFAILRDNKKFTVERPMVVFV

SEQ ID NO: 125361 - protein, 404 aa, unidentified
MGTNSDLRVSIDVGCYQHSVAIGLPGGELLEEFDLAHGPEGFDQFFGRVDKLQHHYGGSVLVAMEGYNGWARPLDTLVRAHGYRLFNINNLKLARFKEIFPAAAKTDRIDARKGLELFQLRDHFPTARDVLQEIAATPLVNDKLKRLTRRRRALVDERSRLIARLQADLQSVCPGLLEITKDTDNLWFLNFLTHGDDLRKLGRLRKTTILGIAGIGRKFGAIIEHWQKTARFSHDAEWVGPMVVEDARRVLELRRTIKTLEAACKVLMQDSEIAVLTKTIPGFGLTCSSELAGEIGTINRFDKEGSLAMYLGMANLTNSSGKHHGSKNPKHVNSRAKAAMMAAVDKHRKLVPESKRYYEKKRAEGKKHNQAIRALGRHLCRVIFVMLKHGRGYELREENDTNIA

SEQ ID NO: 125362 - protein, 423 aa, unidentified
MHISTLCVGADVHLKEITLRAVDRLTSDEVIAPFNVTNNLPGAQSAASRLAEAATRLGYTHIEIGCEATGMLWIPFHRFLGTCPLLQPFHLQQVCFNPKLVADFKDALVLREPKDDERDAFDVAARVQVGHWPDSYVPDDFWQGLRRLTRYRFKLTRNLSQEKMRFQSYAFLKCSDWKRVKVFSDVFGATSTALLTEFTAAQLRDMPHDQLADLIAHRGHGRFYDPDATARAVRHALRTSYPIDPRMDLMVTVTLATAWEHIRAIKRLIKRLDQHISRCIEPVPNPIITVKGLGPVITAGLLAEIVDIARFPEHKHLAQYFGISWTRRSSGGFVSQNTRMTKVGNPYGRYYFVMGADKLRQFNLEYKAFYWRKYHEVAKHQHKRALVLTARKLVRLVHALLTKNVPYVRPQTPLVLEEADLFQ

SEQ ID NO: 125363 - protein, 341 aa, unidentified
MGSYVGLDVADKQTAICVIDDAGEKRWEGKVRTAPELIAATVRERAPDAVRIGLETGPLCVWLWHALNEAGLPIVALHARQTSAALALQANKTDRNDAAGLARIVRSGWYKAVAVKSLDAHKLRALLATRDQLVGMSTSLVNKIRSTLKTFGVLLGSGRGSAFEKKVREAMPDDPIVRTLIESLLRLWRTVREQRQAIDSRLIAFARHDPVCRLLTTAPGVGAITAISFMTTIGDPRRFGRSADVGAYLGLTPKQYQSGDVKVIGRISKCGDTLTRKLLFEAATVVIARLKRPLAIKTWGEQIARRSGVHKARVAVARKLATVLHQMWLTGEPFRLDLAAA

SEQ ID NO: 125364 - protein, 358 aa, unidentified
MRIIGVDLHTRQQTIAMLDTETGELIEKTLKHDGEEVRKFYSALPGRVLVGIEATGSMHWFLELLEELGIDHQVGHPAEIRKAETRKQKHDRRDAALLLKLQVEDRFPSIWMPSTELRDLRTLLLHRHQWVRMRTRVQNALQAIALGHGLRRGRSLWSQLGQHTIESLPLAPHAAHRRTELLALYRKLSTQIDELDERVMDHARHRPGATLLMTHPGVGPVTALATDVFLGDPARFDNGKALVSYVGMIPSEYSSAGRQRLGGLSKQGNPFLRFLWCEAAVHAVRRDPDLQRFYRRKLQQKGLGKARVAAARKLGIRLYIMLRDQIDYQEFCRRGQMRQKSGGACAGMPEVGHSPAIQ

SEQ ID NO: 125365 - protein, 318 aa, unidentified
MSEPVVVGLDVAKATVDVAVRPSGECWSVPNTDAGAAELVTRLRPLSPALVVCEATGGFERATIAALATAGFPVVVANPRQVRDFARATGQLAKTDRLDAGILALFAERVRPTPRPLPDGAAQLLDAVLTRRRQLLEMLTAEKNRLGFAPKPLHRGIQAHIRWLERQLDDVTKELAGLIEASPVWRAKDDLLQSVPGVGPIVSSTLLGELPELGTLSHKQAAALAGVAPLARDSGTLRGKRMVWGGRASVRTALFMAVLCGRRWNPVLKVFYERLIAAGKPKKVALIACARKLLTILNAMVRNNTRWMNPNAKLQYSC

SEQ ID NO: 125366 - protein, 339 aa, unidentified
MSIGTAAVVAYDRTVAWPTTAWTRQVTVTKIICGVDVSSEKLDARIGHDGPSMSVECSEEGVSALGAFCKNHGVELVVMEATGGYEKLPFALLWGQGLPCAIVNPRAVRNFAKGMGFLEKTDRIDAGIIAWFGETKRLVAQEPASDAQERLRALVTRLRQLTELRTAQTNQRRLVTEAEVRVSIDELVALINRQIRSCEKAIVGLLDSDPLWRVLDKTFRSVKGVAGRTVARLMAELPEIGTIPNKAITKLAGLAPIANDSGKRKGKRPVRGGRTHVRSILFTVAEVVRRYVPEFAALHRRLNEAGKLKKVVRVALARKLLVWLNAKARDARKEFACAT

SEQ ID NO: 125367 - protein, 340 aa, unidentified
MRKYIRIGVDIAKNSFQVHALESEDCSATKRKLSRSGIVKFLAEVEPCAIGMEACGSAHYWARQFRAMGHEVKLTPPIYVKAYVKRGKNDAADAAAICEAMSRPNMRFVAVKSEDQQATLMAHKTRELLIKQRTMSVNALRGHLAEFGVIAAKGISHVEELVERAAAADLPAMVQATLGVLLAQLRSLDAAIDELERAIVADHRRDPVSRLAASVPGVGALAASAILASAPDPHAFKSGRDFAAWLGATPKQNSTGGKEKFGSITKQGNRYIRRLLVLGAISVLRAAPKRKGALCDWLAALRARKPAKVVAVALANKLARIVWAIITTGEAFRSSIYAKA

SEQ ID NO: 125368 - protein, 312 aa, unidentified
MTQIVCGVDVSSEALDARIGRDGAEARFLATPEGIEALAAFCREHQVALAVMEATGGYEKLAFTLLWSHAIPAAIVNPRNVHRFAEAMGFLEKTDRIDAGVIAWYADAKRIVAQEPASQAQERLKALVTRLRQLTELRTMQSNQRRLVGESDINRMFGAIMAMIARQTRELEHEIAALIDADPLWQKLDECFRSIKGVADRTVSRIMAEMPEIGTLSNKAVAKLAGLAPLAKDSGKSQGKRITRGGRANLRNILFVIVENVRRYNPDFAAFHKRLTEAGKAKKVIRIALAHKLLVQLNAKARDVRQELALAA

SEQ ID NO: 125369 - protein, 376 aa, unidentified
MTRPTSNEPTLHAALELSKNSWLLAIQFPDRDKPSLYRLSGGDGDGLLTKLDAARRRMAKVAGQAPKLVLCYEAGYDGFWLARLLEQHGIECKVMDPASLQVDRRARRVKTDRIDVEKLLQTLIAWCRGERHVCSMVVIPSVEEEDLRRTHRERNRLVRERTAHINRIKGLLFGQGIRGINVKSRYKALVPAELVTADGRPLPPRLAREIAREIDRLAQLQEQIREVERERDMASNTCQATEQKRQLLLRLNGVGEATAPILAREVYYRQFANRGQVASFIGLAPSPYDSGESRRNQGISKAGNGLVRAVLIQTAWIWLRHQPNSALSRWFHQRTEGHSKRMRCIMIVALARKLAIALWRYLETGLIPEGATLSAK

SEQ ID NO: 125370 - protein, 372 aa, unidentified
MQSYYVGLDVHSRESVFVVENEAGAIVARGSVPTTINGLKHLRDSCGLPAATGVALETGTSAFFVARELARLELKPVVIDAQEVRRKAQRPEQKSDTRDALELCEGLRRGFYRSIVHVPSPAISDLRTTLSRRRHFIRIQTAEVNAVKRLLRGVGRNSGRRGSLRTDAHWQSLLASDLVPEQLQEHVRHHYAVWRQGAERVRALDLSLGESARERRDAVKRLETVPGVGPIVALTAIAVFAEVGRFESAKHAASYAGLVPSTFQSGERDAHGHITKRGSAELRAMLCEAAHHARRPAHPLHPHFARVCARRGYKTAVVAVAHRLCRLLFAMLRDGTDFSVTRVGVEEGEFERTTTYKYRLRPKSAGRLPAAG

SEQ ID NO: 125371 - protein, 431 aa, unidentified
MLKINPLSTLYVGIDVSSKSNYVCALDFFKNKYINSSFANNQPGAEELALKILECLKEHPDITTVVAALESTSVYSIHIANYLSSCEELMRFKPYVFVLNPKCTANYKKSYIGLGKSDPIDAFVIADYARAGNIESEPWRGSQFLALKRLTRHRLHLVECMTREKTYLVSNLYLKFSELQMLEGDDKPFCDIYGATSSSILMEYLSPEEILDSSEEDLIAFLAEKSRNRIKDISKTADLLKKAARDSYRLDKALYEPLNVSIASSFNCIETFKREIKVIDNAIEKEIKGLNPNAFIILQSIDGIGPVFAGGIIAEIGDITAFHSSDALAKYAGLTWKSNQSGDFDGEDTPMIKAGNRYLRYYLGEAANSMRKHNVEYGAYYRKKYNEVPKHQHKRALALTSRKFVRLVYGLLARNQLYSGVSLDTSIKDTN

SEQ ID NO: 125372 - protein, 392 aa, unidentified
MIPENISSPASQAAPQGLKPHRLIKLGVDVHWREHVVVRQIDGQAPQPAQRFAPEAFVAWVAKQVQQADVVHCCYEAGPFGFVLHRRLERLGVKNLVVRPRNWDEYGKKVKTDRRDALALVSCLDRYVAGNTEALTSIRVPTEAEEQARSVTRQREQMLEHRKRLAAQGLGCARYYGHDLPEEWWRAKKFAALRAELPEFLFGLLEGLQQIALLAHEQLETLSAAIEAAQAEELPTGLGALTAQILDREIGDWRRFKNRRQIASYNGLVPSERSSGEQRRRGAVTKHGNPRVRHVLIETSWRLQHFQPDYRGVKKRRAALDTAKRKGDQATRKKLCVGLAREFIVDWWRIRTGRTTTEKLGLQMSWPAAYVLRGKQPGPAAAAAPATQPAAA

SEQ ID NO: 125373 - protein, 326 aa, unidentified
MNLMPLGIDVAKQKFNVCLRFAHDKLKHKVFTNNQAGFTQLHRWLQQHAGDRVHACLEATGAYGEALALYLHEQGHLVSIVNPAAVKAFAASCLSRTKTDRVDAELIARFCLAQQPPAWAPAPAEVRELQALVRRLASLIEMRVAEENRLAAGPTVAQVQRSLEESLAHLQAQIKRTEKLIRSHLDQHPGLRQQRDLLTSIPGIAETTAALLLAELPHLKQYRSARQVAALAGLVPRARQSGSSVKGRVRLSKIGNARLRKALYFPAITALRCSPFMQRWANGLRERGKSKLSVVGAVMRKLLHLAFGVLKTNQPFDPEWTTRAAC

SEQ ID NO: 125374 - protein, 351 aa, unidentified
MEKEYSTVGLDLGDRFSNFCVLDEQGEVMEEGRLATTQEALARKFSGMDPCRIALEVCTYSPWVSRLLKGLGHEVVVAQAAKVALIYKNHRKGDQIDAQLLAKLARVDPSLLSPIEHRGLKTQQDLQVVRSRNTLVEARTKLINHVRSSAKVFGVRLGYCSAECFHKKIPELLPEALRVTLGHVLETIGVLTAQIHAYEKEMAALCQAYPATELLQQVPGVGPVTALSFVLTIERPERFRKSRDIGPYLGLVPKRDQSGETDKHLRISKAGDVFLRKLLVTCAHYILGPKGPDCALRRWAVARLGTGGANAKKRTVVAVARKLAVLLHRLWITGECYQPFPQGLCDMGPSA

SEQ ID NO: 125375 - protein, 415 aa, unidentified
MALKIVYKICCGIDVHKTFVVACIASTNSKGITTYERHRFSTYTSGLKDLLQWLLKRNCKDVCMESTGKYWIPIYNILENDCSIVLAHPKYVKAIRGKKTDKKDAKWIADLFKHDLVAGSFMPPADIRQLRDLMRYRFKLTCFQSSEKNRLQNCLTVSNIQLGNVVSDTFGKSAQAILDKILENPEDTSFDLEPFVYRSLKKKLPELRDAIDGYITPEQAGKLKVIKAHYESLESRKAELEELILALAAPYQQELAILQTAPGISSGFTAIGIISEIGTNMEAFPSAKHLCSWAGLTPTNNESAGKKKSVRVSKAGCYIKPLLVQCANAAIKSKKHPEIRDRYLRIKKRRGHKKAIIAIARMLLTALYHMLKNGENYNSDLYQKSDILPTTREITVEQAILMAQFQGFRIKSATE

SEQ ID NO: 125376 - protein, 351 aa, unidentified
MKYYTTTTEYNCGIDLHARQMYACVMDRQGKVLLHCNIEGNDFAYFLKRVAPWRHDLTVVCECTFNWYWLADACDAAGITFVLAHALYAAHIHGGKNKNDRIDSEKLAHLLRSNLIPPAYRYPAEKRPVRSLLRQRMNYVWSRAELMTKLSMNQTAEGLVPAAKGGHNRDVWQERILAQITNPYHQLSVRCDMDAIRVYDKLIQTLDGTITLHAREHQSRDYNLLLSVPGIGPVLAMTILYEMDTVARFPTVKDFASYCRLVKGSVASAGRLKGLTGGKMGNAYLRWAFGEVAVICKRAHRIITPYAEKLVSKHGTFKGNAILANQIARAVYFMLQSGQAFDAERMVARRS

SEQ ID NO: 125377 - protein, 370 aa, unidentified
MNATIFVGLDVHKATVSVGIAEGMRGGEVRHLGTFENRVDVLTKMVQRLARGGRPLSFCYEAGPCGYGLFRLLRGLGHDCIVVAPSLIPIKAGERVKTDRRDALMLAKLHRAGELTAVFVPDAAHEAMRDLVRARATAVRVLAKARQHLNGFLLRHGKVYAGQRTWTLAYRRWLTTVRFDHPAQQIVLQDYIHSVEDAEKRVACLVQQIGQLLESWSMAPLVQAIQAMRGIALINAVTLVAEIGDFTRFSSPRQLMAYVGLVPSEHSSGASVRRGGVTKAGNGQARRALIEGAWTYRMQARISRKLHDRIEPLPQEIRDIAWKAQVRLCTRYRRLIAAGKPAVVATTAIAREMVGFIWAIAHRVELLHVS

SEQ ID NO: 125378 - protein, 423 aa, unidentified
MKKRIYRAVDVKALNLDELRKVVKNQKIVLGVDVAKEDFFAALMNEKREVLSTIKWKHPMETGMLLDVMLHKLPWSSLDVAMEPSGTYGDALRALFLGNGIKVYRVSPKRCHDAAEVYDGVPSLHDSKAAAIIGRLHLDGASEEWPLPEKAQRELRAAIKTMELYDDAYYRNINRLESLLARHWPEVTRHLKLTSVTLLELIIAFGCPDRVAAEPEKSAELMRRVGRSNLLVEKIDKVVESAQQSMGVPCIEEERRLLVELCSEVRRLQQKARTAQDRVERLTQDTESVDAMVGIIGKKTAAVLHSELGDVSRYDNAGSYVKSMGLNLKEHSSGKHKGKLKITKRGSGTVRMYLYLAVLRLIQNNFIVQAWYQCKIERDGGIKMKAVVAVMRKLARALWHVGQGKRFDAAKLFDVSRLGLAPV

SEQ ID NO: 125379 - protein, 354 aa, unidentified
MPKSASTQIAVIGIDIGKNSFHVVGHNKQGAIVLRQKWSRGQIEARLSNMPPCLIGMEACVGAHHLSRKLAMFGHDARLMPAKYVRPYAKGQKNDFNDAEAIAEAVQRPTMKFVATKTADQLDLQALHRVRERLVSQRTGIINQIRAFMLERGIAVRQGIRFLRAELPIILASRSDVLSPRMLRVIEDLAADWRRLDERIETLSREIETIARQDAGCDRLMSVPGIGPIISSAVVAAIGSGDVFSKGRDFAAWLGLVPKQISTGDRTILGKISKRGNRYLRVLFVQAAWVVLVKPTSWERHGLKSWIEAAKKRLHHNVLAIALANKLARIAWAVLAKGRGFEVTKKSEVSPQPA

SEQ ID NO: 125380 - protein, 353 aa, unidentified
MTVYVGVDFHARQQTISYCDSADGELQQCELQHQGDQVREFYAQFKGEVIVGLEASGYSNWFEELLESMQHTVWLGNPAEIRRKAPRRQKTDRRDADLILGLMLKGDFPKLHRFSAESRLVLRQLRYRHKLVKVRTIAKNSLAAISLGAGLTEKRGLLSQRGQQRLQALELPPVLGQQREEWLQLVAQLDERIATIEAALEKVAASDEQIKLLRTHPGIGLLTGLGVRHTITPVTRFSTTRKVVAYAGFDPVEDSSAQRRRLGSISKEGSRLLRFLLNEAGQTACRKDPDLKRFYQRLVHRRSRPKAKVAVARKLLVRSFIMLRDQIDYAEFVRRGVAARSARKPHRPTMPVL

SEQ ID NO: 125381 - protein, 368 aa, unidentified
MTNLTIGAVTSDANNRQSAVVTPLALVIKLGIDVHAKEYVVVRQVDEAVSQPAQRFNLEGLLGFVRRQVAVARSVHSCYEAGPFGYVLHRQLSALGVQNLVVRPRDWSTYGERVKTDQRDAAALCSCLDRHLAGNQGALALVRVPSEAEEQARAVARQRQSLVRERVRLTLQGKSAALLRGHRLVGEWWRGNRLAKLAPDLPPELLVILKRWQQVILLLEAQVQALTEQLEQAAPPGLPCGLGSMTWEILSREVGDWHRFRNRRQVASYTGLCPGEHSSGASRQQGSITRHGNPRLRHLLIEAVWRLFRFNPEYRGIAKWRDQFTAARVTQARKKKIVVAIARQLAVDLWRLRTGRTTPAALRLQLSS

SEQ ID NO: 125382 - protein, 353 aa, unidentified
MTSLTDVVDVVIGVDTHVHTHSAAAVDAHTGAVLGEITVEATADGYQRLVGFAEEYLTLRAWAIEGTGGHGAGLARHLAHGEELVVELDRPERAKRRNGAKSDPLDAIRAAREALARTRLGTPRSSGQRQALSVLLAARRSAVDAATEAQQQLFSLVIAAPENLRARFRNQKLPAMVTTAAALRTHRSGDIETTTTVTVLRELARRTQALRAEAAEHETAILAIVRDWRPDLLTQPGVGPIVAATVLCAWSHPGRIYSEAAFAMLAGVAPIPANSGQTTTRHRLNRHGDRQLNRALHTVTLSRQRYHQPTRNYTARRTAEGKTSREIKRCLKRYIARDLYRLLENNTEPLDRP

SEQ ID NO: 125383 - protein, 461 aa, unidentified
MKKQKRRSAAKVDQGSKLSVIQSDVAGIDIGSREMFVCGPADQQGRREMRVFATTTEQIQGCVGWLKQQGVRSVAMESTGVYWIPVLEIMESSGLEVLLVDTRPLSRVPGRKTDAEDCQWLQTLHSHGLLRGAYRPSEQISELRTIVRQKAVLVRQQADWIRRMHQCLDQMNVRVHHAVKDTQGVTGMAMLRAIVAGERDPRNLVKLRDPGCQKSAAEMVELLTGNWRSDHLFNLQQHMAMYDSASSQIAVYEEEIQRRMQEVTPAGRQGVAAPPLANIEKRKTMKKRDQEGKRQAQYRVMGVDLTTIDGIGVETVEVIMSEYGTEMSKFPTEGEFVKHVGLAPHRPVSGGKVLKNKRKKQKGTRTAEVLRNAATSLKHSRSALGAYYRRMARRKDSGVAIFATARKLGGLVYRMLRYGQQYVDLGQAEYEKRYEETRIRALKSTANQLGYNLVKQEAVSA

SEQ ID NO: 125384 - protein, 310 aa, unidentified
MENIFVGIDVSKDRLDVCVRPQGESFVIARDDEAVAGLSVRLGALSPRLIVLEATGGLQVKVAGALAAAGLPVAVVNPRQVRDFARATGQLAKTDRLDAAVIARFAEAVKPDPRPLPDETSSALMALVSRRRELVQLRVAERNRRRQATSRWVQRDLEASIEALTLRIEAIDLEIEDQVKGSPIWRLKEDLLKSVPGVGGIVSRTLIAELPELGHLTRRKIAALVGVAPMARESGAWKGRRQIAGGRPSVRTVLYMAAVTASRCNPVIGALYERLIAAGKAPKVALIAAMRKLLVILNAIARDQKPWTTA

SEQ ID NO: 125385 - protein, 320 aa, unidentified
MSERPVVVGIDVAKRRLDVAVLNAELPEDGYANDAAGHEVLAAALAALEPALELMEASGGYEAALACELVAVGLAVAVVNPRQARDFARAMGRLAKSDRLDAAVLAELAAVLVRRDDLARFLRPPAEAERLDLEALVARRRQLVAMLTAERQRLALARPAVRPSIEALIDALRAQIDELDEEMRTQIAVHHGELDSLLQSAKGIGPTASATIIAELPELGRLDRRQIAALVGVAPYARESGVWRGRRRIAGGRGQLRRTLYMATLTATRHNPVIRAFYERLLAAGKLKKVALVACMRKLLTILNAMVRDGHPFDPQFIHA

SEQ ID NO: 125386 - protein, 402 aa, unidentified
MNAVGIDVSKGKSMVAAMRPFGEVVLSPFEVSHTDRELRELAAKIKSLPGETRVVMEYTGYYHAPVAQVLCDSGIYVSVINPLLVKDYGNNSLRRAKTDKKDAVKLANYALDRWLSLQRYFPAEDTRLMLKTAYRQYEQLIGIQTMQKNNLISLLDSVFPGANRLFSSPQREDGRIKWVDFLARFWHCECVSSLSQKRFTECYRAWCHKKGYNFSEDKAFDIYAEARGHISTMPKCESTEFIVKQAVAQLQSTSTAVAALRKQMQSIASTLPEYSVVIGMYGVGPVLGPQLMAEIGDVRRFHSKGALVAFAGLDAPAYQSGQMNVKSRSISKRGSPSLRRTLFLVMSVILQNAPETEPVYQFMDRKRAEGKPYKVYMMASAGKFLRRYYAIVKKQLDELEEA

SEQ ID NO: 125387 - protein, 333 aa, unidentified
MPITNSPTFSDRRFLVDQYIGIDVAKEALMVYDGKREFSCRNTRGCADLKDHLRQKDLKDIILIFEATGPYSRYLREFCAHQSIRVWIVNPIKSASFTKTLGNRSKTDTIDAKMLYELRKVIKPEDILVPRIDKEAEQLSLYLSSYELMIKTRTALSNHLHALAHTPDVPPELVATLTGEVTRIKEGEESFLNQMEHYVENNEELRDDYHRLLAIKGIGRVSGLGLLILFRTYPDTSRAQITALVGLDPTRTESGTSVKGRRKISKGGNSTIRKILYFPTLNCIQHNQVVKATYERLIRNHKAKKLAVIAAMRKLLLIAHAVYKSKTVYCEAR

SEQ ID NO: 125388 - protein, 318 aa, unidentified
MNTITKQKINVGVDTGKSQLDIYIRPLDIFFCVENNERGIKEAIVELKKYQPERIVVEATGRLEMPFAMACAEAKLPFVIAHPVHIKRFAGAIGRRAKTDKLDAKLIAHFSEVIKPDLTQLKPKAMRAMSDLVTRRNQLLSMQTMEKNRIQIMPKDLAMTIKPILTALGNQIKKVEEKILKMIELTPEFKAKDQLLQSMNGVGKVAAASIISNLPELGYMTNKQAAALVGVAPMSKESGRYKGHRKIQGGRHQVRTVLFMAVMSAIQSNPVFKSYYGKLVSAGKPKKVALIACVRKMVIVLNSMLRDGVMWEAPKALN

SEQ ID NO: 125389 - protein, 410 aa, unidentified
MDVFLERCAGLDIHQASVVCCVLIGAPGRKPQKLLRSFGTTTRELEALRAWLAEHGVTHVGMESTGVYWKPVYAVLEGHVELIVGNAHHIKNVPGRKTDVKDAEWIAQLVRHGLVASSFVPPPAIRDLRELVRHRRTLIKTRTAVRNRVLKLLEGANIKLSGVASDVFGVSGMAMLEALASGTNNASEMAGRARGRMRRKHAALQAALDGRMREHQCFLLGMQLRSLEAIDQDLEALDARIGAQLEPFQAQHRLLMQIPGVDWVTAASIIAEIGTDMDVFAGAQRLAAWAGVAPGNYESAGKPKGAGTRRGYVFLKSALFAAASAAVRTKGSYYRDKYNRLRARRGPVRAIMAIAHKLLIAAFHMLSTGEAFRDLGESYLDQVARKRSTAKLVQRLSNLGYDVMLVPKAA

SEQ ID NO: 125390 - protein, 378 aa, unidentified
MPDVSSTAPEQVRLWVALDVHKLSIVAAALPAQGGTPELHRIETTQAAIRQFIARLGGPAGLAVCYEAGPGGYDLLRLLTRIGVACDVVAPSLVPVRAGDRVKTDRRDAKKLVRLYRAGELRFVAPPSPEHEGLRDLVRCRDDVRRARTAARHQVAKQLLRHGRVYREGKKAWTQRHIAWVRAQRLEHPLAQRALEHARAHLDSLDAQLATIDAELARIARSEPWADPVRWLCAFRGIAYRTALGLLAEIGDWHRFAHPRELAAYLGLVPCEYSSGDQRHRGHITRTGNQHARRLLVEAAWHYQHRPRRTGTDPDVPPEVAARAWRAQLRLHHRHRTLTAHGKRSTVATVAVARELAGFLWAAMTHQPLRTDEEVAAA

SEQ ID NO: 125391 - protein, 315 aa, unidentified
MREEPVFVGIDVSKRCLDVALPERIDRISNDAAGIAAVAERLSKAAPELVVLEATGGYETSLVLALQSNGVPVAVVNPRQARDFARAQGRLAKTDAIDARVLARFAEAMRPAPLPPIDPSREALASLVSRRRQLVDALIAERNHLEHAAPAIATWIDRHIAMLRDQLAQVDAAIAATVEADHALAHRHAILISVQGIGPATAAVLLAELPELGRIEHKQLAALIGVAPVNHDSGQFRGQRHIAGGRASVRCALYMATLSAVRHNTSLQAFYQRLRQNGKPAKVALVAAMRKLASILNAVVRDDRPWQPTLTQHGC

SEQ ID NO: 125392 - protein, 395 aa, unidentified
MRVGVDVGQKSHQVGIAGPDGTILEEFTIPHSQEGFQEFFRRIERRCQEVALPVAVAMEGYNGHGRPLDRLIQEKGYTLYNVNNLKLARFREIFPGPAKTDSLDVRKILELFHLKDHLPLAKDVLQEVPRIPPVNEKLKRLTRRRRQLVNEKVRVISRMQADLQAICPELLSITGSADNLWFLRFLSSREDLRKLGRMHKSSLLAIPGIGNKYATVIQEWQKGSKFSQEVEYVGPMIVSDAKRILELLKEIAALDKAIEELSQESELARRIDSIPGFGKTSAAELAGEIGTFDRFTSEASLALYLGMCPLDRQSGQFHGTKSPRQVNRRAKVEVSAVARHIERVPESRAYYEKKRAEGKKHNQAVRALGRHLVRVMWSMLSQERDYELRETPCPT

SEQ ID NO: 125393 - protein, 340 aa, unidentified
MKVATIGLDIAKNVFQVHGVDGEGVPVLRRKVRRDKLLALFADLEPCLVGIEACATAHHWARKLVALGHDVRLMPPAYVKAYVKRNKNDAADAEAICEAVTRPTMRFVPIKSADAQSVLLLHRARHLLVRQRTAQVSAMRAHLAEYGIVVPKGRAHVRDLVAVLESGAGLLPDLARQTLLLIAQMIAAFSEQIRKIEIELLAWHRTNPISQRLETIPGIGFITATALVATAGDARAFRSARQFAAWLGLVPKQHSSGGKERMGSISKMGDRYLRYLLVVGATAIVRYTKRTATTVSIWANRLLERKPVRLVTVAVANKMARIAWAVMAREETYRPTATAA

SEQ ID NO: 125394 - protein, 391 aa, unidentified
MVCVGIDVAKDKHDCCILDSEGTTLVDCFTIPNNMDGFKSLLQTIQDCSQKSDKIKVGLEATGHYSCNILGFLLDNDLPVYVMNPLHTNLYRKSLSLRKTKTDRVDAKTIATMLLSDVDLKSYTDTAYHNEELKSLTRYRFDKVQERAKLKQSVSRLVTILFPELEQLVSSIHGTSIYALLSEYPGAKQISEAHLTRLANILVKTSRGHYRKDKATHIRDAARTSIGSVMPAKSLELKHTIKLIQELTSEINEIEDAIRKIMDELKPPILSIPGMGFHSAAMILAEVGDFSNFNSPDKVLAYAGCSPSTYQSGKLTNCYAHMEKRGSRYLRYALYTATKYVCYWNPVFTEYLTKKQAEGKHYNVALSHATKKLVRLIYALQKSGKAYLAVT

SEQ ID NO: 125395 - protein, 367 aa, unidentified
MENTLYIGLDTDSKHIDVAVAEPLPNWEVRYWGQIANAPASVERLVKRLRRDGRNLVMCYEAGPCGYGLYRQLNGKAGVRCHVVAPSLTPRRPGDRVKTNRRDCLSLAKLLRAQELTAIWVPDATHEAMRDLVRTRSAILTDLTRCRQRIGGFLLRQGIRYPGKPWTQKHRRWLGQIEFAAAAHRLTLAELLDALDQARARHDRLIDHIRELTSQWSLAWLVEAVQALRGYKLINAVTVVAEIGDPRRFSSPRPLMAFLGAVPSEHSTGDNIQRGPITKTGNGRARKALVEAAWTYTRRIQTPTPTHYPPAVRAIAEKARHRLSGRYRRLLARGKPSTVAVTAIARESLGFIWAIAHAAAPETTRSL

SEQ ID NO: 125396 - protein, 323 aa, unidentified
MLPILGIDIAKATYDVALQCPDGKVRHKAFRNLPDGHAQLLVWVARHAAGPVHACLEATGPYGEAVALALADAGHTVSVINPLAVAAFAASELRRAKTDRTDADGILRYGAAQRPAPWAPMAPEVRTLQALVRRVVTVDQMRVQELNRLEAYPAQDVVRQSIEAVLAQLAAELDHLRALIRDHIDRHPGLRSQRDLLTSIPGIGETTAATLLAELFGPLPCQSVKQTVAAAGLAPRVRQSGSSVRGRGSLSPVGTRRLRKALYFPALSAIRFNPVIAAMAARLSARGKCKMVIVTAAMRRLVHLAFGVLKTQRPFDPSIALSD

SEQ ID NO: 125397 - protein, 343 aa, unidentified
MDYFAGLDVSVKDTSVCIVDSTGKIVREVKVASEPDALLAVLRNPAYDFKRIGLEAGPLSQWLFSALAEAELPVICVETRHMRAVLKAQINKTDRNDARGIAQMMRVGLYRPVHVKTLRSQKLRMLLTHRKLLQAKAIAVENDLRATLRNFGLKVGVVGRVKFETRIKELIESFPDLVALVEPLLVVRRVLREQISILHRRVLAAVRNDEVCRRLMTVPGVGPVVALTYRATVDVPARFRKSKSVGAVFGLTPARDQSGESDRPGAISRCGDEMMRTTLYEAAQVMLLRSAKWSWLKAWAMKIARHRGMKKAIVALARRLAVIMHRIWIDGTEFRWTREAAAA

SEQ ID NO: 125398 - protein, 355 aa, unidentified
MESVKYIGLDVHQSTISVAVLNAEGKLTMQSVIATKATAVRDLLTGLRGVLHVTFEEGTYSAWLYDVVVRDVARVVVCNPRKNALLKSGNKSDQIDARKLAELLRAGMLSPVYHGEQSTRTLQQLVASYTALTEDTGRAMRRIKALYRSQAIACVGKKPFGKRHRGEWLARLTESGQRRRAEWLYQELDAVQMLRREARQAVMVECHKNPAAKLLRSMPFFGPLRAAVLIARVQTPHRFRTKRQFWTYCGLGLETRSSADYVEKDGQILRRRKPVYIRGLNWNYSHELKNVFKSAATTASAMDGPFRAFYEMRVANGMLPAMARLTLARKMAAIALILWKKGETFAAEHLNLQAA

SEQ ID NO: 125399 - protein, 351 aa, unidentified
MPRMSTVHAVTTIGIDMGKNTLHMIGLDSCGAIVLREKVPRGRIALRLANLPPCLIGIEAGLATHYVARELAALGHDVKRVPPTYAKPFRQGHKNDFRDAQAVAEAVQRPTTRFVPAKTDEQLDLQALHRVRSRLVSERTAVINQIRGFLLERGIIIRQGLRFLRQALPDILAKRTDVLSPRMVRVVADLASDWRQLDGRIEPVTDEIETLAKSDDGCRRVMTVPGIGPIISSAMVAAIGNGAAFARGRDFSAWIGLVPKQMSTGDRTILGRITKRGNGYLRTLFVQAARVILLRPASWPKHSFGIWLARAVQRLHRNVLAAALANKLARIAWTVLAQQRSYEARITKAAA

SEQ ID NO: 125400 - protein, 370 aa, unidentified
MKFEVTKNQLTLKSRTMSKVKELNFDGKTIYCGLDVHKTNWKVNIGMDKMELGGFSQNPDPEELIRHLKKNYPGAEVKVVYEAGFCGFGIQRSLKALGIDCIVVNAADVPSSDKERKRKNDKRDARKLRRELSEGELKHGIYVPDIEMEQARTLVRERHRLVQDQSRCKSRIWHMLMFSGIQLGLEQKRWSAKLVKELETLDCPTSLKMALNLALEEYKQIRTIIKQATLAIRKMALEPPFAALQPYLQSIDGIGLIGGMVIQTEIQDIKRFRTLDSLCDYAGYVPDISSTNDKDVIKGITHRRNEFLRETIIESSWILIRKDPAMLMKYQEYAKRMNSNKAIIRIGKHLLSRIRYVWNNKTQYVKGVVG

SEQ ID NO: 125401 - protein, 457 aa, unidentified
MPRPRRRSLQPAAPPLVNPHAAGIDIGATTIYVCVPLERDSAPIRHFGTFTEDLHALATWLEGCGVTSVAMESTGVYWIPLYQILEARGLEVCLVNARHVKHVPGRKTDVQDCQWLQYLHSVGLLRASFRPPEAVCAVRSLLRHRDTLVQLAATHTQHMQKALTQMNLQLHHVLSDLTGVTGLAILDAILAGERDPQVLATHRDPRVKAAPETLAKALVGDYRVEHLFTLRQALESYRHYQRLLGECDAQIAALLAGFASEVDPGAPPLPPARAKTQRHAPRFDLRGELYRILGVDLTAVPGLATLPLTLFAELGRDLRTFPSGKAFASWLGLCPDNRISGGKVLSVKTRQVIHRVANALRMAAQSLQRSRSALGAYYRRMRARLGAPKAITATAHKLARILYHLLTTRQPYEETRVATAEAQYHRRSESRLRAHARALGFQLVPLTAEATSMPPTV

SEQ ID NO: 125402 - protein, 365 aa, unidentified
MNEITTVGVDLAKEVIAVCAADRSGRTVFTRVFRRDAFAAWAVRLPPCLFGLEACGAAHHWARWLTSHGHTPRLMAAEFVRPFRKSRAAKNDRNDAEAVLTAVRQPNMRFVAVKSIEQQACLSWHRMRQGWSEERTALINRLRGLLGEFGVWRSRSAAVLTRALPALEHDEALSLMVRCLLAEARPHLARLDEAIARCEVEIKNHVKGNGSAQRISAISGVGSLTAAAVLATVTNARDFKNGRQFAAWQGLVPRQDSSGGQVRLGRITKRGDCYLRGLLTQGARSALQAALDKEPLLRTRLQCWIVQLHARVGYHKTLVAIANKHARMIWAILAKGEDYDPQAWRRRSRTVPATASAISGASASP

SEQ ID NO: 125403 - protein, 523 aa, unidentified
MATTRSRKRSRSRPQEVLQKPSGVIHPRVQKVGPEHFGIVSVDCAKARSKWMLCDFYGNVVIPPTVVEHNRAGLDGAIAQIRQVLSARGFHDCLVAVERTGRYHRPVQRAFAAAGFDVRIVHPFATKQFRQPSDSGYKTDDTDLAAIHRAAVNGFALMEAQLDDTWKTLQLLIRHRRDLVFKMSLVCCQIREHLEAAFPGFAACFDKLWDRACAWHLVQHFAGPQELIAAGLMGLCRSLDAAKVRYQTPMIQRIFDWAATAAAPDQAAAQHRAIALALNDDRLRKSQEIMGLERQIAACLVRTPYILLLSFPGINVVSDADYAGEMGPMPNYANARCINGRAGLRPCRYQSDQVDRANGPLVRNCNRKLRAAILGIADNLICCNHHFNILHHHWKAAGKDPRDIRIRVGNRFNRIAFQMVAGRQVFRHPSLQGRHYILEKLIAFHRDHNTPGADMLRDLEAAIAQLPRKEYQAEAGPLHEELKKIEAGGRRGPQLLGNILPIVLARLGVGAVQSTASGEQDPR

SEQ ID NO: 125404 - protein, 403 aa, unidentified
MTNWIGIDVSKSTHKYRLVDDGGEPVGKAVSFANSRDGFNAFVQKLRTLEEVKIALEATGPYWLALYDFLTNAGFKVTVLNPLQVNAFRGTGLRKTKCDSKDAYWIAEFLRIGYGKPMSVPEPTVQTLRELSRYRFALVDEICDHKRRVLGMLVRVFPEYEELFSDIFLVSSMKLLETAATPEDILALDTNELVELLSKASRGRFGQEKAHLIREAAAQTIGVGWLADAARIEIVSMLQIIGFLELQVKRLEAELARLMEEQCEFLTTVTGVGPVLGAAIVGEVLDINRFETGKAFVAFAGIDPAVHQSGQFDGQQMHMSKRGSPHLRRALWLVACNAYRDDPDMQAFYARKKAEGKHHNTIIGAIARKMAGRIYAVWKGNQPYRSAGPTEAGTLDANEAHAQ

SEQ ID NO: 125405 - protein, 406 aa, unidentified
MEVIYPRCAGLDVHKQTVVACVRIAGDGPPLQEVRSFASTTSGLLALADWLDSFGVTHVAMEATGVYWKPVWHVLEGHFELVLANAAHVKNVPGRKTDVNDAMWLADLLAHGLIRASFVPPAAVQELRALTRTRKQFVRERSAHVLRIDKVLEDANLKLGVVLTDIMGKSGRAVLQAIIDGHHDPAYLASCVGRVKASRQDILEALRGRITAHHRFMLKLHLDHIDALNKAIAQIEKEVGLGLETFRQAATLLSTMPGLSDIAATVVVAEIGIDMSRFATPAHLLSWACLCPRNDESAGKRRSTRLRRGGKWLKTTLVQAAWAAVKVKGGYLQAQFHRLRARRGAKKAIIGVAASMLTAAWHMLSDGTEWHDLGAAHFDRADAQKTANRLIRRLQQIGYNVQVAPA

SEQ ID NO: 125406 - protein, 357 aa, unidentified
MLTISCLEGEVILGVDTHRDTHAAVLIDPLGRLLATETFATTRRGNRAMIAWAQLRGTVRRAGVEGTGSFGAGVTRALRLEGIEVIEVTRATRVGGRHRGKNDTRDAEAAARSVLSGQATAEPKARDGIVESIRVLRNARASAVKARTQAILHLKNLIVTAPDDLREALGELTNRQLVARCARMHRSARRDTVAATRTALRSLARRHQTLDVEIAELDAILAELTARAAPRLLKESGIGPEIAARMLLVAGDNPTRLRNDAALAALCGASPIEASSGKTTRHRLNRGGDRQGNSALWLIANNRMIHHAETRDYVARRTAEGKSTKEIRRCLMRHIARGLFPLLTADLHDAHQQSTLT

SEQ ID NO: 125407 - protein, 365 aa, unidentified
MGMLADQVDHVIGVDTHRDSHSAAIVAAGTGAVLLDRTVPADAFGYKRLLRFVKLHATGRRVWAIESSGSFGSGLTTFLLAHGEWVVEVERPVRPARRNGAKSDHLDAIRAAREALARKHLAQPRRRGDREAVRVLLVTRRGAMNARTRAINHLKALIVTAREELRHQLRRHDTDELVARCARLRTLPSHSAEHRATVIALRHTARRILALEAEANDLESELEQLIKANVPWLLNEIGVGPISAAQLFCSWSHPGRLRNDGAFAMLGGAAPIPASSGQTVRYRLNRGGERQLNCALHTIVLTRLKHDPATRAYAAKRAAEGKTPREIKRCLKRYVARRLFRQLEANGPASPIPRAPRSRTLGICH

SEQ ID NO: 125408 - protein, 336 aa, unidentified
MGTLPVIVGLDYSDRAVQVCVLDQEGKVVGNRACANDWQEIVKFAQSRGQVVRSAIESCSGAAALADELVARAGWHVDLAHPGYVARMKQSPDKTDYQDARLIADLERVGYLPRVWLAPEPIRDLRRLVRYRQQLVDQRKAVKLRIRALLREQRCRPPAEANAWTRAWLAWAEQAAAVSEHSRWIMARHVEELQRVGKDIKEAEKRLAEATANDPVVGTLRQQKGIGPVTSWTFRAEIGRFDRFRTGKQLARFCGTSPRNASSGDRVADAGLIRAANPTLRATVIEAAHRLIRTDPVWAQLAARLLGRGKPKCVVVAAVANRWIRKLYHQMVSQAA

SEQ ID NO: 125409 - protein, 362 aa, unidentified
MTFQSRRIALISTRHPNASRIIVGVDTHKDQHVAVAVDSLGVRLGQHNLPTTGTGYAGLEHWASSLGEIDAFGIEGTGSYGAGLSRFLRGRGHMVIEVNRPDRSARRRLGKNDPTDAEMAARAVLSGVAHDRPKSGLNEVEMIRMLKGTKDSAIKARTQAVNQIKALVVTAPVELRAELRHMATSELIARCARWHNGYLGTPTDAARYALQSLARRHAQLTREIEAIDAQLAQLTASFAPELMKSVGIGPDTAAALLVTAGSNPDRVRSEAAFAALCGVSPVPASSGKTNRHRLNGGGDRQANAAIHRVVIVRLRYDSRTRTYLQRRMEEGKTKTEVIRCLKRYVAREVFSILRDIGKLHAV

SEQ ID NO: 125410 - protein, 355 aa, unidentified
MNDEKYIGLDVHQATIVVAVMDSTGKLVMESILETKAATILQFFAGLRGTLSVTFEEGTWSAWLYDLLHSRVDKLVVCNPRKNALLKDGNKSDRIDACKLADLLRGNQLKPVYHGETGVRMLRELSRSYLTIVKDLSRVMNRLKAVYRSWAIPCAGRDVYYRRHRAQWLAKIREAGVRRRAERLYEQLDMLQHLRQQARRELLAESRKHAITAKLRQIPYLGPIRVALAVALIQTPHRFRTKRQLWAYSGLALETRTSAEYRFVEGQVRRSKKLLSIRGLNKDHNHDLKGLFKGAATMASVRPGPFQDFYQAALAKGIKPTMARLTLARKIAAITLTLWKKGENFDAEKLKSQAA

SEQ ID NO: 125411 - protein, 387 aa, unidentified
MPQVDDLSRSLVAFDQDATLIVVTEMSEASWLAAGMAPGVDRQSLKKLGPDPDALLRLVERWRDEAVKTGKMIERIALAFEAGRDGFWLARWLQARGIEVHVIHSTSVAVSREHRRAKTDRLDTAMLMRVFLGWLRSERGHCGMVAIPTLEDEDARRPSRERESLVGERTRIINRMKAILTWLGVRGFNPKLRKAPQRLDDLRTPEDLPLPPNTVDELRRDMARLAMVCEQIKALEQARLANLEQAPGTGPHAMVRLIANVIGVGIETADMLVQEVLSRNLRDRRAVARFAGLTGAPNESGSRRRERGLAKSGNARVRRGLIQLAWRFLRFQKDSALAQWYRVRTDGPAGARRTKMIVALARKLLIAFWRMVTVGEIPAGFALRQPV

SEQ ID NO: 125412 - protein, 363 aa, unidentified
MTIYCGVDFHTRQQLIKWCDTRDGEIKEQRLFHDSLDDVRNFYSQFTGEVLVGIEACGYSEWFERMLQDLGHEVWVGDATKIRRRARSRQKTDRRDAELLIDLLLKDEFPRINRLSFESLEVLRRLRYRHRLVQMRTRMRNSLQAIALGSGMVLKSKLRTKRGREKLNDLPLSPVLTQQRSGWLELIEEVECRIAQVEAELEKAAAGDERVRRLRTHPGIGLLTGLALVHTLCPVSRFANSRKVTAYVGLEPREYSSGERKRMGRISKAGSRVLRFLLVEAGIKATREDIEMKKLYYRVMQRREQARAKVAVARHLLIHAFIMLRDEIDYAEFKLRGAEMRSTARTVHRPTMPDHLIERPASV

SEQ ID NO: 125413 - protein, 342 aa, unidentified
MNKVTIIGIDLAKRVFHAHGAAADGSVVFRKRLTRAQVLPFLAGRPRCVVAMEACASAHEWGRAIQELGHDVRLIPPTYVKPYVKRQKNDMADAEAIAEAGSRPTMRFVAVKTEEQQARSMVFRTRDLLVRQRTQSINALRGHLAEHGVVAPQGPAHLKTLAAAMDGAGRSLPQLVRDVGGIYLEQIEQLNRRIADLEKVLRREAQFGTETRRLQTMPGIGPITAMAVEAFAPPMATFKRGRDFAAWLGLVPVQHSTGGKQRLGRTSKMGQRDIRRLLIIGAMAVIQWASRRGAEAGSWLHRMMERKPLMLVAVALANKMARSIWAMLTKKEDYRNPGNAAA

SEQ ID NO: 125414 - protein, 337 aa, unidentified
MYYIGLDIHKKTISYCVKDAAGCVHREGKIGSSRRELDAWVRTLPQPRMMAMEATIFTGWIYDYLLPHAEKLKVAHPLMLRAIAAAKKKNDKIDAAKIADCLRCDFLPECHIARTEIRDRRRVLRYRNLVVKQMVQMKNRVSGLLLETGVNYNKRQLHKVGYFGELMSTNAEINDAVRPLLNLSRGMIRRSSKLEYDLVSSLERDPLLRERLRRLRTVPGVGSITALTWALEIGDYTRFSSNRQAISYCGLCADEKSSADKVMRMPLSKQRNKHIQRVLVEAAKLAPRLSPELAMIRARELERGNPNRATLAVARKMVCYMLAVERRQQDFVQTAAA

SEQ ID NO: 125415 - protein, 322 aa, unidentified
MTPVLGIDISKKDFHVSLLKENRATKPKKFTNNTQGFESLHNWLKQQNVVELHACMEATSIYGEALAEFLYGEGFQVSIVNPARIKGFAKSELLRTKTDSVDAALIARFCAAMKPSLWTPTAPEVKELQALLRRLESVTEMMTCEQNRLETATPTVAALTLEHLEYLKQQQQLIKKLISDHFDQHPHLKQQRDLLTSIPGIGDLTASILLAEIGEVSDYDNARQLAAYAGLTPSERSSGTSVKGKTRLSCTGNVRLRKALYMPAVVAMRYNPLLKAMSERLLGRGKVKMQVIGALMRKLVHLAFGILKSQKPFDPNYLLATP

SEQ ID NO: 125416 - protein, 410 aa, unidentified
MRASGVNQHKEASAMSRFWVGFDVGKASHWVCVLDEEGERLLSRRVDANEADIEAALSEIEKMCAPGERMVGLDLTGGPATLLEALLLDRGERVFRVSGIAVNRARAAYVGGERKSDPGDAQVIADQLRFRWRQLPEMRPADERLAELRVLVSHRRGLGQDNARRIVRLRALLSGVFPALEEALNLGKQGPLLAVTKVATPAAARRLGEARLSRWLKAKGVRKADDLARRIIAAAKGQRRELPAAQAKAALAAEIASEVLRAKERIAALEGRLEKLLATVPEAAIIRTLPGMGTCLTAEFLAEASDPGRFGSADRLAAAAGIAPVLRASGGSVHQRRAKRGNRVLKRVFYQSAFCSLVSSGASRAFYERKRKEGKAHKQAVIALARRRVNVLWAMLRDGRAYEEQSPEPA

SEQ ID NO: 125417 - protein, 353 aa, unidentified
MSVYVGIDVRRKRSQVAVVTGDGKVQVNRNVVNGAEPVLKLIGGLPTGTPVAFEAAYGWGWLVELLEDYGFDPHLVHPLRCKAIASARLKNDRADAAILAQLLRALLRHRASLVRLGTGLRNRIHAVVADFGYDRTGSYWSGPGRGWLAELGLPAVSREIVTDCLAFIDALAPAVDRIDGELRQHARADPRVKVLTALPGVGQFTALVMLAEIGDITRFPSARKLASWAGLTPTVRGSDLAVRHGHISKQGSAWLRWVLNQAAQTAKRSPEFAATYAAITKRRGKKIATTAIARKLLTRAYHLLATAHATQTSTPAGSASRAAATAPQTGRVTKPRARSPLRHEPATRPRSII

SEQ ID NO: 125418 - protein, 466 aa, unidentified
MARKQKSNKSKKHKRPIQSLETIQPNAAGIDLGSREHWVAGPPQEDKIPNVERFGTTTPELLRLADWLTQQGVKSVAMESTGVYWIPLFEILDSKGFEVLLANARQVTHVPGRKTDMLDCQWLQLLHACGLLRGSFRPSDDICRLRALFRERNTMVDQRSDWVRRMQKSLDQMNICVHHAVSDITGVTGMRIIRAIVDGERDPQALARMRDRRCRKSEEQIAAELTGNWRSEHLFNLHQALKMYDQLCTVVADYDSEILAYIQTLQPEDNNDTAVPPPSTKAKARGIAKRGQEPLRQALYRFSGFDMTTIDGIGVDTASVVISELGLDYTMFPEEGNFVSYLRLAPNLSISAGKKVPSKSKASTCTRVASALRMAALTLRNSKTALGASYRRVAWRKGASVAVFATARKLAQLIYRLVRYGQAYVDAGAKAYETRFNQRRLKFYTKALNDMGYNVEPLAAAEANSG

SEQ ID NO: 125419 - protein, 354 aa, unidentified
MIIIVCDFHTRTQVIAMLDTETGVVVEKRLEHAGGEAKAFYEGLKEPALVGIETTGYTRWFAEMLQELGHELVVGDAAKIRAKETRKQKHDRRDAEHILNLLVRGDFPKIWLPPAKERDVRVLIEHRHQLVELRTRARNGLQAIALSYGLRRRGRLWSQAGQGELQKLPLREGMGRRREDLLRLVRQLSTWIEELDQRIDEEVTRREDAQRLMTHPGVGPQTALATVLVLGPPERFPDRQHVTSYLGLIPQEESSGRRQRFGHLTKQGNRLMRFLLVEAAQTASRYDPRLRRAYRRLVFRKGAPIAKVAVARKLAIRLYIMLRDGIDYEEFCRRGPDRLGPGSHAGMLGDVALV

SEQ ID NO: 125420 - protein, 426 aa, unidentified
MKSRLVKAQNQRVERISTSTLVIGIDIAKEKHAAQAINFRGIVLTNRPLSFSNEHAGFEHLISSIRKLQNIHQLNDVVVGMESTGHYWFNIANWLVKQGVSVVLVNPMTTKRNKENRDNSPSKNDPKDALVIADAVSRGFYTPFSPKDEAFRRMRVMVTNREHWVVKSGRIKNRIHRWLDIRFPEYRQAFEDIFTPRSLATLRRFPAPSDIVQLAPEQMVQIWGEYMDRPGGMRGRNKALELQALARHSVGDATALEEDKWELRHLIEEFERICHIIDEADEMIEKLLPEIPCSDLVRSVGVSVPATAALFAFGGDLRKLSHGNQLLRKAGLNLAERSSGKYKGHIKLTKRGNSLLRKHLYFSVFHLLSHNRAFQALHAHNIEVKRMTKMQSMMKLIGKLARMLVAMAREGQTFSANKAQPLLAAA

SEQ ID NO: 125421 - protein, 279 aa, unidentified
MTNVKIGMDLGDKNHEVCVLDQKGHVMDRFAVGNTRKQLRKVFQPYAGALVAMENGTHSPWISRDLKALGCKVLVGNARKLRMIWARSQKTDVKDAEMLARIARFDRQLLYPIRHRSQQAQIDLEQIKARDMLVRLRTDLINHVRSTVKAIGERLPACSADCFHKRAQTFMPDSLRTALMPLVEQIASLSQQIRGYKCKIEQLALTVYPETACLQQIQGVGLITSLAFILTLESPDRFDKSRAVGPHLGLTPRQDQSGSCNKQLRISKEGDVYLRRLGR

SEQ ID NO: 125422 - protein, 313 aa, unidentified
MNENQCFVGIDVSKASLEVALRPSGRQQSFSNDDEGVARLVQWLRGEASSLIVLEATGKFELPLARALAMEGLLFNIINPRQARAFAKAIGILAKTDRIDALVLARFAEVLQPEARTLKTEETEALSDLVTRRRQVVEMITAEKNRQGTASKRIHRDIQTHIRWLEKRLEDLNDDIDELIRKSPLWREKEKLLQSVSGVGPVLVSTLLGALPELGTLNRKQIAALVGVAPFNRESGRYRGKQTILGGRGPVRSVLYMGTLAAIRYNPVIRVFYQRLFEAGKPRKVAITACMRKLLVILNTMIKNGTSWKRQPA

SEQ ID NO: 125423 - protein, 418 aa, unidentified
MNKHNNSGKKSEPTTKRAKPRDPMRRDTKEVLAELVGKLKEKLDPKKPAATSVGEKPKRGKLRPNLDRLTVGVDLGDQWSNYCILDLEGETVAEGQLRTTQEDLAEFFQALNAARVVFEVGTHSPWVQEVIGGCGHEVLVANPRMMDGSKRRKRKNDRIDANKLARLGRVDPQSLHTIQHRSREVRQDLAVLRARDALVAARTELINATRGLVKSMGTRLPKCSSPSFAEKVEGTVPAELRDALLPLVRMAAALSDCIREYDQKIEKLGQEKYGHTALLRQVKGVGPITALAYVLTLENPDRFVKSRDVGPYLGLVPKQEDSGEIQPQLGISKTGDTMLRKLLVSSAHYILGPFGPDTDLRRYGLRLCERGGKNAKKRAAVAVARKLAVLLHCLWVSGEAYEPLRQGMSATTAPAVAA

SEQ ID NO: 125424 - protein, 346 aa, unidentified
MIIVGCDFHPAWQQIAVFDSETGEITEHKQIHGNGEAEQFYRRLPIASRIGIEACGNSQWFVDLLQRLGHEVWIGDAAQIRASYVRKQKTDRRDAAHILRLLIEGRFPRLWTPSAEERDLRQLLVHRHKLVAIRTRVKGGLQHLALNRGLQKKSKLWTAAGQKALRELPLDTWAACRREDLLGLLASLDKQISKLDAAVERAAEEHPQARLLVTQPGVGPITSLAFVLTLGDVSRFQRGKQVASYLGLIPRERSSGGKQRLGAINKQGNSLMRTLLVESAQSVTRLDPGFRKQYLHRCHRMAKGVAKVAAARRLAVRLFWMLRTNTEYPEIVRIESSPTLAVVSES

SEQ ID NO: 125425 - protein, 316 aa, unidentified
MDDKQTVHGVDVSKATLAIGQYESAALMQIANAAEPIVAWLASLPAGSVIAMEATGIYHRLLAHLAHAAGMVVYVLNPQTLKHYARAIGQRGKTDRIDAQMIARYVVHEQTKLRMWQPPRPAADALTRLLVRRLALVRAREALCQSLSGMPTLKKQRQTLLASFKRMIGAVDLLIRTELAHVPEMAALHRRLMSIVGIGEIVATQLVATLSALHFTRANAFIAYTGLDPRPDDSGEHRGKRRLSKHGPALLRCLLYNAGMSAANSKLFKPLYTKLRARGLQSTEAIVVLARKLARIAFALYKSGQTFDAQKHLKTI

SEQ ID NO: 125426 - protein, 465 aa, unidentified
MKRQIRRRAPKVRQSLAALDRLHPHAAGIDCGAAEHFVAVPPDRDPTPVQSFPTFTGDLHRLADWLTTCRITHVAMEATGVYWIPIFEILDARGFQVILVNARHVKNLPGRKSDVSDCEWLRDLHILGLLRGSFRPADGIVALRGYLRHRATLIESAGALVQRMQKALVQMNVQLPLVVSDITGVTGLRILRDIVAGQRDPQQLAQHRDYRCHASEAEIVAALTGNYRPEHLFVLQQNLELFDIYQRHLTTCDAAIEGHLTQLAATTMPPTSSLPAARRRQKPRENEPRFDVRTPLHQLTGVDLSQIDGLGPYNALRLLSEIGTDMTRWPTDKHFTSWLTLAPQNKISGGRLLSSRTQPSANRAAAILRLAAMNLGRTQTALGAFYRRVAFRIGKAKAVTATARKLAVLVYRTLKDHLVYVDPGADAYDAQNRTRVVRRLRQRAEHLGFGLVNLSTGEVVDGSVS

SEQ ID NO: 125427 - protein, 461 aa, unidentified
MVATRARTQRRQVEDLTCVHPNAAGLDIGSEMIVAAVPPDRDEQVVRAFATFTPDLHALVVWLLACGIDTVAMESTGVYWVAIYELLEQAGITCYLVNAQHVKTVPGRKSDWNDAQWLQKLHMLGLLQASFRPDAEIRCLRLLARHRAELIRHRAPHILHMQQALKLMNIQLSEVLSDITGVTGQAIVRAIVAGERDPAKLAELRHPGCKHTEAEIIKALTGTWQEAQIFILEQNLQLYDFYTAQLSTCDREMERCYQAMESRHEKDAPLPDLPKAKPGSRSKNEPNFNVRAQLARIVGVDLVGVMGLSASSAQTIITEIGTDMERFPTVKHFCAWLGLAPRNDISGGKVLRSRTLKVRSRANQAFRQAAESVARSQSSFGRYFRAMRARLGPEQAIVATAHKIARVVYHLLTTKEPYREECAEEADQKRQERELKQLARRAQKLGYTLNPLAATPPASSL

SEQ ID NO: 125428 - protein, 328 aa, unidentified
MNKSTLIFGIDISKDVFDVYNETFGHKRYSNNARDVTSFLRSLPEDSHCVMEATGCYHYRLAMSLHDKSIKVSVINPLVIKRYIQMKLKRVKTDKSDALMIYNYGCTQSMDYWQPEAKYIEQGRELLSLIQMYLKQSTALKNKLHALESRGTNTGKIVTSIKRQLRCLKKEQQLLETEVERLVKENEPSLFSRLKTIPGIGNKTAILLMLYTGNFKEFSNYKQVSSFLGLAPNERSSGSSIRGRSRISKTGDGLVRNHLFMCSFTACIHNHQCKALFDRIVAKGKSKKLALIAVCNKLIKQAFAIAKSGLDYDPKYAKNKSEKVWKLA

SEQ ID NO: 125429 - protein, 387 aa, unidentified
MPQPNDLSRSLVALDQNSTIIAVIEMSQSSWLVAGMLPGIERQPRKKLEPSPERLLALLQRWRDEAVRAGSTITRIALAFEAGRDGFWLARWLEARGVEAHVIHASSIAVSREHRRAKTDRLDTALLQRGFLGWLRGERGHCSMARVPTIAEEDAKRPNRERDCLVGERTRIVNRIKSTLARLGIRNFKPTLRKAAERLATVHTPEGTPLPPNTLAELQRDMARLGVVVSQIRQIEEARQKRLEQQHETGPHAMVRLLARIVGVGVETADMLVHEVLSRPMRDRRAVARYAGLTGSPDESGAQRREQGLARAGNARVRRGMIQLAWRFLMFQKESALALWYRARTADSRKGTRKTMIVALARKLIIALWRFVTTGEPLEGVILRPAS

SEQ ID NO: 125430 - protein, 344 aa, unidentified
MQHVAIDLGSMESQICVRQPDGQISLERKVPTASLKAHLGRQPKSRVILETCAEAFRVADLAMDLGHEVRVVPATLVRSLGVGARRIKTDRRDAQVLSEVSCRIDLPSVHVPTHLARQRRSMCGMREELIASRTALINCVRGWARTQLLKIRSGDVVTFPKRTRDATLKSPSGLPEYVERLLKMVEALTEQISAANQELEALAAQDPLCQRLMTVPGIGPVSSLRFAAALDDCSRFASAHAVQGYLGLTPGENSSSQRQQRTGITKAGPAPVRRLLVQAAWNFRRLCPDDAISLWASAIEKRRGKFVATVAVARKLAGVLFALWRDGSTYEPNHQSRVRNVTSN

SEQ ID NO: 125431 - protein, 383 aa, unidentified
MTLTIVETRAITGGVDTHADVPVAAALDPVGGLLGVGEFSAAQAGYARLLAWLGEFGTVCLAGIEGTGSYGAGLARHVTAAGVRVVEVDRSGRQDRRRRGRSDPLDAVSAARAAQSGRARGAPKGRDGAVEAIGALMAAKRSAAGERTQTINQARALVLTGPGDLRARLARHTPAALVAGLASLRPRPGGTVGYATRIARRELGRRAQFLGGQLERLDELIVPLVTARAPGLPALYGIGPNTAALLLIAAGDHPERLRCEAAWAHLCGAAPLPASPGKTVRHRRNPGGDRQANHALWRIVFTRPGSHPATRAYAERRTQEGKSKAEIIRCLQRYVAREACPHLRPPAGGHSLRGRPGPIFGCRTRWPANDQPAVPGPCLTCRA

SEQ ID NO: 125432 - protein, 373 aa, unidentified
MPRYSTAFGMDVHLRSTTVCALDAETGEAVTRRFPGNPWGEIAGWMDGFPGPSLAAYESGYLGFAPQRELAGLGVECVVAAVSKIPRSAADSASKNDRNDAARMAKAILAHDISPVWVPSPEIEGIRDLAGAYDGATARLATAKQRLLAFLGKRGYAYGGTTPAGNPRKYWTYDFLRWLDKVRPEDDGGIRTLAALRNEVEAAAEARSDLLSEYRAAVDASPIAAEVAALQSIKGCAFALAAAFSAEVGDFTRFRSGRQVTAYFGLAPSQRSSGDSVRLGGISGAGNALVRKLAVEGSWCYAAARHQPKLMPRDTGVPLEIRMHGRKGSERLLRRREEMLARGMPAAKANAATAAELVRWLWALGMMCREGAE

SEQ ID NO: 125433 - protein, 349 aa, unidentified
MNRTTYGLDIAKNVMQLHWVEIETGEIGRKKLARAKLSDHFARLQPVRVVMEACGSAHQWARVLGGLGHQVELLPARQVRPFVRSNKDDAADARAIWLAAQQSDIRRVPIKSVEQQAVLALHRMRQHWVSVRTATINALRGLLYEFGVVLPGGKHAGLKALGAYRAQIDARVPAMMQRLVDGQLAALKDIERSIERLEAEIGAVQKQQAKAVQLRRVPGIGVLGATALAATLGDGSGWRSGREFSASLGLVPAHSGTGGKARVGHLSKRGDPYLRTLLIHGARAVIEHAKDKPKWLEQLLARRPHNVAAAALANKMARTAWALVVHGREYQREWKSTPPTGCTAQAAAA

SEQ ID NO: 125434 - protein, 428 aa, unidentified
MNYNQNQKIAQITSQTLIVGVDIAKSKHVARAQDFRGMEFGKPLYFENTKPGFDGFLSWIQQLIATHDMDQAIVGMEPTGHYWLNLAHFLKEQDVKFVVVNPMHVKKSKELDDNSPTKNDVKDARVIAQLVKDGRYAEPKIPQGVYAELRAARKIRDLLSVDLQSVQGQIHNWLDRYFPEFLTVFKDWEGKAALQLLRLSLLPSELVKISDEEILAHLKKAVKRAVGLGKVRELKRVAGLSIGIREGSELAKLEIRILLDKYDLIKQKFEELEPRIDALLEQIPGVHQMLAIKGIGKDTVAGFLAEVGDLNDYSHPRQIIKLAGLSLKENTSGKHKGQTKITKRGRKTLRALLFRVVMPLVAKNSAFKALHAYYTKRPDHPLKKMQSLIALCNKLIRVLFTIGKKQCEFSEERMLQDIPHMAVMPKVA

SEQ ID NO: 125435 - protein, 454 aa, unidentified
MRHGQKKQRPAQVDENMPAMNPNAAGIDVGSTEVWVSIPPDRDPEPIRRYETFTADLQALAQWLRHRGIESVAMESTGVYWIPVFEILESQGLHVVLVNAKYAKNVAGRKTDWLDCQWLRMLHTFGLLPSSFRPAAAIATLRCYLRHRQMLIDYAAAHIQHMQKALTQMNVQLTNVISDITGSTGIRIIQAILAGERDPQRLAQMRDYRAKNDEATIARALHGNFEPQHLFALKQAFELWDVYQQKRWACDQEIAQYLRGLESAIDVDLQPIPPPRAPKKRRNSPEFNCRLETYRILGVDLTQIDGISESSALTILSEIGTDLSAWKTEKHFASWLTLCPNNKISGGRVLQRRTRKSSNRVHDVLCISAQTLFNSQSALGAFARRMRSRLGPQKAIVATAHKLALLIYRLLRFGKPYLDIGQEAYQQQYQQRKVRALARQAKHFGLQLVAVTET

SEQ ID NO: 125436 - protein, 342 aa, unidentified
MNITTIGVDLAKSVFQVHGIDKHGKAVIQKRLRRSKVLEFFVQLPPCLIGMEACSSAHYWARKLREQGHNVKLMAPQFVKPYVKANKTDAADAEAICEAVTRPTMRFVPIKSVDQHAVLSLHRARSGFVKSRTAQANQIRGLLGEFGIVLPQGIVHVAGRLPDIIEDADNELPMVFRELLLRLRSHLLELNRQIQELEDQIDAWHKNNEDSQRLAKIPGVGVLTASALVASIGDARCFKNGRELAAWLGLVPRQHSSGGKPLLLGISKRGDAYLRTLMVHGARSAVRVAANKQTPTDCWTNKMSTRRHTNVVSVARANKNARIVWALLAHKRDYDGEYQLAV

SEQ ID NO: 125437 - protein, 405 aa, unidentified
MATPAQVDVWVGLDVGKGEHFADVLDDDGERLFARAVANDQADLEALLDRAAQHGTPGLVIDQPGSIAQLALAVAARRGVPVAYVPGLVMRRAADLYPGEAKTDRRDAYVLADTGRTRRKQVHWLDAGSDELLASLRVLNGFDIDLAADATRLSSRLRDALTSISPALERAVGQRLHQPGVRDLLTAYPTLTALRTASQSRIERTIKARSPRIAAKVTTAIAAALAAQDVTVPAEAATGRVISELAAELDRVCARRDALAAEIEEAFLSHPFGELLATMPGIGPRTGARILAEIGDGSAFANGSKLAAYAGLAPVTRQSGTSLAGETRSRRGNHRLKNAMFLAAFASLRDPASKAFYDRKRAEGKRHNAALICLARRRCDVILAMLRTHQPYQPARPATELPNAA

SEQ ID NO: 125438 - protein, 412 aa, unidentified
MEGETVIAGVDTHKDVHVLCLLDGLGRKIWSGSFGADPEGYDRLAEAIGDPGSCMVVGVEGTASYGAGLTRRLAELGYNVVEVLRPKRDKARPGEGKSDPLDAERAARKAASGRGCSVPKSQDGWVEAVRQLYVARRLAVATSTSCVACAKSMLTTAPSALRERFRGRERPKDLMPLLARGRKAGDALEESVLASLRSVAAVWKEARSQVESLDERIRALLEANAPALLGVEGCGTTTAAALVVAAGDNPGRLKGEAAFSMLCGVSPIPASSGKTERHRLNRGGNRQANWALYEIAIKRMAYDERTRRYVAKRTSEGKSRREAIRCLKRYIAREVYRVLMDPNPDGAAPEGPELAKMRKAMRVTQKQAAAGLGMSAASLGHLEHGRRRSTKLERRYYELLCELKGALPQTAY

SEQ ID NO: 125439 - protein, 347 aa, unidentified
MSFIGVDLHQNSFTVCRREADGAESFETLTLSAADMERFCLTLDADDELAIEATGNSAWFRDQVLACVGRVVVVNPSQFKVIRTSVKKTDRNDAAALALFLAKDMLPETRAKTQSESELASLTQTRDLLVKQRTRLLNKIHALHVRKGLKLKKESLGSKRGLAAIDLGLFSACEGIEIKVLREQALSLSASLARLDREIEAVAAAFDGYEGLTSIKGIGARSAAVLLSAIGNVHDFESADKLAAYFGIVPRVSQSNETDNRGRITKRGNKLARTTLVQCSLIAMRYSAYLKTYYDRIRQRRGTGKAIIATARKLLAIIYDTLKNGWVFNDFTQFQRRENPIPAGQSS

SEQ ID NO: 125440 - protein, 343 aa, unidentified
MQIHSVGIDLGKTTFHLVALGAASKVLMKKKFSQKQLLAFTANMQTSLIGLEACSGAHFLGRALRQQGHDVRLIPAQFVKPFVKSNKNDLVDAEAIAEAVERKNMRFVPIKTDDQLDLQAMHRIRDRLVSRRTAVINQIRAFLLERGMVFAQKPAKLKAGMADVLENAENALTPMMRNLIGRLYEEWKAVEEQIDELTDSLEQIAANDAGCCRIRKIPGIGPVVATAIVAAIGNGAAFRKGRDFAAWLGLVPRQYSTGRKARLLGISKRGNTYLRKILIHGARAAAMRLKRDRYSIGAWMNALEARAPRNVLVVAMANKLARIAWAVLSSGEDYRPVASLAAA

SEQ ID NO: 125441 - protein, 409 aa, unidentified
MELLIARCAGLDVHQATVVATVRIPDDQGGRTSVTESFGTMTADLVALREWLQAYGVTHVALESTGVYWKPVYYILEDAVTLLLINMQELKRVPGRKTDVKDSEWLAQLLECGLLKSSFVPPPPIRELRDLTRYRVQQVRDRAQEVNRLCKVLEDAGLKLTSVVTDVMGASGRAMLRALVDGTTDPTVLADLARGKLRKKLPELRRALQGRFRPHHAFLIEQIFAKIDFLDETLDRLMAEIDRRLGPFESMLTALDTIPGVNRIGAIGIVAETGGDMRRFPSAGHLCSWGAMCPGQNESAGKRRSGKTRKGNRYLRGTLIQAALGATHKNGSALQARYHRVKRHRGHKKAVVAVGHQILEIAYYIMRDGVTYDELGADYFDRRHAERAVRRHVRHLEALGFHVTIEKAA

SEQ ID NO: 125442 - protein, 410 aa, unidentified
MGRVIGMDIHRTFAEVVFWETGRLRPAGRVDMTRSGLEGFGRTLDKADEVVVEATGNAMAVVRVLSPYVARVIVANPLQVRAIAHAQVKTDKIDAGVLASLRAAGFLPEVWVPDAGTERRRLVARRNQVVRHRTRVKNEVHAILQAHLVSPCPHADLFGRLGRAWLGQQALPDDERAAIERHLRELDRLGEDLEVLDRDIAQAAIDDPAVKRLLTITGVNLIVAAGLVAAIGDIHRFPSSEKLVSYVGLNPRVRQSGLGLAQHGRISKHGRSHARAMLVEAAWAAFKAPGPLRAFFLRIRAKRGHQVAAVAVARKLAVLCWHLLTHDTDYQWVRPALVATKVRAMELQAGQPAKKGNKRGPAYAYNVKELHDREIEVARQAEQAYEQFVGHWRPRGPGKGRTGAATEERR

SEQ ID NO: 125443 - protein, 359 aa, unidentified
MATKVKKNKINFKGKTVNIGIDMHKISWRITARVEGDTVLAITLARPTYDSFEKILSRFKGNHVRIVYEAGPGGFDLYDRLTDDGIECIVTPPSLIPTESGNKVKTDKKDSYKLAELLEKNMLKAVWVLSPEERAHRQLTRTRRQIVNHRSDVMCQIKSLLLFNSIEIPFKSSQHWTGVFMNWLQKLDLGHDALNRSLKALVDLFNSLNAEKKALTKDVLQLAKEEKYAQRVDLLKTIPGIGPLSAIEILVEIQDITRFKTADELAAYLGLTPSQYSTGEHIRMGHITHAGNGRVRTTLVESSWTLVGKDPEMGRKYEKIKNKRGGKRAIVAVARNFSGRIRRILLDQVPYQLDFQKAA

SEQ ID NO: 125444 - protein, 332 aa, unidentified
MYYVGIDLHKRDLVIAVEDERGPVGKPRRFACRDEAAIVAHLSALRPFRAVIEASASYRWLYDRLKPLGEVILAHPLRLRASIARPAKTDKLDAALLAHLLRMGQIPEAYAPPAAYQELRELTRARARLSRSATEAKNHLHRLLAARNIHPPYRDPFGVRGRRWMRSLEMGVVGNLERDELIGRLEHYDAQRDRLDGALEESAASFPQIESLQDIRGIGTYTALLVVAEIGEPERFSEPGQVASYAGLATRVYQSGGHDYHGHITRQGSPWLRWVLVQAAMKAIGRDRRLANFYERVRKRSSRHIARVAVARKLAEICWIRLRRWHRERAAA

SEQ ID NO: 125445 - protein, 344 aa, unidentified
MDHSAGLDVSVKETSVCIVDDTGKIVREVKVASEPEALLAVLKNPAYHFKRVGLEAGPLSQWLFSALAEAGLPVICVETRHMRAVLKAQINKTDRNDARGMAQMMRVGIYRPVHVKTLRSQKLRMLLTHRKLLQSKAIAIDNDLRGTLRNFGLKVGMVGTVRFEARIRELVESLPDLAALIEPLLIVRRTLREQFCILHRRLLAIVRDDEVCRRLMTTPGVGPVVSLTYRATVDVPARFRKSKSVGAVFGLTCAKYQSGEVDWDGRISRCGDEMMRVMLYEAAQSMMRSKKWSWLKAWAMQIARRCGMKKAIVALARRLAVIMHRMWVDGTEFRWTREQSAVAA

SEQ ID NO: 125446 - protein, 345 aa, unidentified
MKKLFIGIDFSKEKIDATVIIANGLEEMFSRVTYTFASTKNGYNKLVKWVKKNAHEIDKDLWLFCGENTGDYSKPLCNYLYAKGYDMWLENAKCIKDASGLRRLKSDRADASMIAEYAMRNHDRAELYVPLDEILLQLRELFLYRQQLVNQKKAIQVRRGEKKLTLEKSPSKNLISRSGHHLLNEFNKEIAKVEKAIMELIASDEKIKHTYELVTSVPGIGLQNALCLLIYTNNFTRFKFNARKIACYYGIAPFGKDSGTSVHSDPHVHYMANKKLKAMLTQAALAAINYCPLIRDYYYRLITRGKNKEVARNNVKNKLIHIVTSMVKNNQPFNPEYINIHKTAA

SEQ ID NO: 125447 - protein, 349 aa, unidentified
MLADEVDYVVGVDTHRDQHVLAVVAAPAGAVVAQRSVAASGHGYAQALRFANQYAGGGRVWAVEGAGHYGAGLARYLSGRGEVVVEAGRAPRSERRLRGKDDGLDAIRAARATLASGELALPRAGQRREAVRLFLLARRSAVDVRRHALVQLRSVIVTAPDQLRQELQGLPQQRLVERCSRLRRSNSRTPDELAATLVLRTLARRVQTATAEAAELEAEILGHIRALAPQLLNEPGVGPIVAAQLIIAWSHHGRVRSEAAFARLAGAAPIPASSGQTTRHRLSRGGDRQLNRALHTVILHRRLHDPATKDYIARRVSEGKTTRDAVRLLKRYLARHLYRVLNNQAPLMT

SEQ ID NO: 125448 - protein, 366 aa, unidentified
MEKGITYVGMDAHKVAIKVAVLVPGETKPVEWQLANEKAAVRRMVRKVQRLAPGEVRFCYEAGPCGYALQRWIVEAGASCIVVAPSLIPRKPGDRIKTDRRDARKLAELFRAGLLTEVHPPTVEDEAVRDLCRAREDAHEDLVRCRHRVSKMLLRRGWIWNGSKKAWGQGHRLWLRSLRFEQQADQVVFDDYLRAIDQVEERLRALEQHVEAVSQLPAYAEAVGALRCFRGIDTLTAMGLVAELHDFMRFDSARGLMAFLGLVPSEFSSADSQRRGAITKAGNRHARRLLIEAAWHYRHQPNRASLKRRRQGQPAEVIALADKAMYRLNRRFNRMLAKGKPRSKVVVAIARELAGFVWAALHSEAA

SEQ ID NO: 125449 - protein, 342 aa, unidentified
MSAYVGLDVSLKETAVSVRRGGKRIWRGKCASDPKVLADLIRARAPDAERVVFETGQLSTWFYHALKADGVPAICIDARHAKAALDMAANKTDANDADGLAHIAEVGFYREVRVKGFESMLMRTLVAARDQILKVIVQMSNQIRGLMKTFGLVVAKSAGGAFEGHVRRLLADNTQLERIVLPMLDAWRGLRMQAAKLDGQLRAASRLDQRCALLMSIPGIGPVTASSFVAAVEEPGNFKSSRAVGAWLGLTTRRYQSGEVDYGGHISRRGDPRLRGLLYEAAVVILTRSTGESALKQWGVGLRERLGFKRAAVAVARKLAVIMHRMLHTGELFDRTAGAAVS

SEQ ID NO: 125450 - protein, 349 aa, unidentified
MDSMPPTGRDVIGGIDTHQDLHTAAVVDAAGEVLATQTFATTRAGYRAVLAWFRSYGDLARVGVEATGTYGAGIARHLAAAGIPVLEVTGPDRAARRGRGKDDRLDAIAAAQAALTGQRVQVAKDRSGAIEALRVLRTTRKTAVRCRRATLQQLHNTIVAAPDELREQLRHLTRMRLLRTCAAWRPDLIAYRDPAVATKIALRSLARRVLDLGVEIADLERLIAPLVAELAPSLLALPGIGTQNAGELLVTAGENPERLRSEAGFAMLCGACPIPASSGKTTRHRLNRGGNRQANSALHMIVVCRMRRDPRTKAYVSRRSAEGLGKREIMRCLKRYVAREVYHVLVAGA

SEQ ID NO: 125451 - protein, 344 aa, unidentified
MAIVGGLDIHRRQITYDWIDTDSGETGRGQLSPATRVELRAWLARFAGQQADFALEATTGWWFVAEELERAGIAAHLAEPADTRALRGPKRRAKTDRSDAHHLRELLRAGTLPESWMPPAHIADARTQVRLRRALVGERTGWYQRIHAILFHHGLPERSQLLTADGRAWLASIHLPAVARQAVELALRMIDHLEVELDTLDIQLGRIARVQPGCRALQRRYGVGWLTAVAIWAEFGDVRRFANSRQAVRFCGLDITISESDGKRARGHLARQGSPVLRWALHEAAMCAARPSSPDHPYYLQVKQRLGGKRAALSVARKLAREAYHTLRELGDQAVTPAELPTAA

SEQ ID NO: 125452 - protein, 318 aa, unidentified
MTKTICIGIDVAKASLEIALGAQGTVMTYPNTPEGHDELAATLTNYEIDLVVLEATGGYEVSVACVLQTIGLAVAIVNPRQARDFAKAMGNLAKTDKIDAQVLAQLALVLSQRTDRDKIVRILPSAQQRVLQAMIARRRQLVVLSISERQRLGNCHPDIRESITLMISFIQEQLKVIESALSKHIKTYHRSKLDLLSTVKGVGPATIATLIADVPELGKLTRREISALIGVAPFNRDSGFFRGKRTIFGGRAMVRRMLYMATLTAIRFNPVLCAFYKRLTEAGKPNKVAIVACMRKLLVILNAMIKTNKPWDESFHSV

SEQ ID NO: 125453 - protein, 366 aa, unidentified
MLHKLNSAATLIQRTTTEAPRDHMYYIGLDVHKRTISYCVKDAAGHVHQEGKIGSTRRELDAWIKTLPQPRMIAMEATIFTGWIYDHLLPHAEKVKVAHPLMLRAIAAAKKKNDRIDAAKIADCLRCDFLPECHMASTEIRDRRRTLRYRNLVIKQMVQMKNRVSGLLLETGVSYNKRRLHKVGYFADLMSANEEVYESIRPLLRLSREHIVRSQRLDYALVSSLERDPLLAERLKRLRTVPGVGPITALTWALEIGDFTRFRSIKQAISYCGLCGDEHSSADKVMRMPLSKQRNKHIQRVLVEAAKLAPRQCHELAVVRDREMQRGNPNRATLAVARKMVCYLLAVERRKQDFVPAEEFKSTAAA

SEQ ID NO: 125454 - protein, 412 aa, unidentified
MLFVGDDWAEDHHDVEIVDEAGRLLARRRLPEGLQGVTRLHALIAEQMPDDWADLEPGAATGRVKVGIETDRGPWVGALVAAGYEVFGINPLSVARYRERHSTSGAKSDAADAHLLAEIVRLDRAHHRPVAADSAEAEAIKLTARTHQSLIWDRTRHVLRLRSTLREYFPVALQAFPDLDAPDALELLGRAPDPDQAARLSHTTITAALRKARRRHLEDRAHELQRLLRTQGLRQPPVLQDAYAAVVASEVAVIATLNVQIERLGAVVGEHFGRHRDAEIYTSLPGLGVILGARILGEFGDDPDRYLDAKARKNYAGTSPITKASGTKKIVLARYARNRRLGDALQQWAFCSMRGSPGATAYYQQLRGRHIGHQAALRQLANRLVGILHGCLKTHTHYDENTAWAHILNAAA

SEQ ID NO: 125455 - protein, 365 aa, unidentified
MLTSIPQDACILAMDVHKSSISLVVLEPGCTTPADDRIGTDDDSLRRLIGRFNEPRRVWACYEAGPTGYELARTLRSAGMHCEVIAPSLIPTRQGDRVKTDKRDARRLAQLFRAGQLTSVSVPGAAEEAVRDLCRARADMVIDRTRARHRLGKFLLRHGRVFRDGDSWTLRHEAWIRAQRFDEPALNETMAHYQATLTARDAAVAAIEADLVQWCGRAPFADGVRRMAAYRGVTELGGLTLASEVFDWRRFPTAGLFMGFTGLTPSESSSGQRIRRGGITHAGNTHLRAQLVEAAWAYKSKPSVGVTMKRRHEGLDPAVLARAWTAQMRLCAKFRRLDARKSNRKVVVTAIARELAGFLWAEMAA

SEQ ID NO: 125456 - protein, 457 aa, unidentified
MQSKGFLGIDVSKGYADFLLLDPNKKVLEESFQLADNPGGRKQLKELIEKWFSWGIEILYCGVESTGGYENNWYNFLKGKSVQANVKVARLNAKGVKAVSDAALKRTITDAVSAENIAVYMISFPEKINYEKPSVGEAETKFKEGRGHYTCIRMLQKQKVQLSNQLEKLLYQYFGEMLIYCRHGIPGWLFRMLSHYSCATAVIKAGENKLSAIKGISAAKAQALMQKATVSQQIVSRQVQHVIAVTSKEILHKEQLLKTEKNYLTEMYQEDDQVKLLSSIPCVGVESAVALMLEIENVEQFESAKKLAAYFGVHPTFKQSGDGLWGSHMSKKGRGEVRAVLYMAALTGIRHNIILKQLYARFRAKGMKHYQAMGAVMHKLLRIIYGVLKNKTEFDAAIDQKNTEQAKEKQQQEDKQIRQTKKIKEQKRHRYQSATTDAPISRIAAQKIKKQAASQAS

SEQ ID NO: 125457 - protein, 429 aa, unidentified
MDIVDRIRLDKFSQLKKGIRGSEKHLIVGIDVAKDTHNAFFGTATGKTLLKRLVFENNLEGFEKLLRFADSVKIKNALEQEVFGFEPTANYHKPLGEYLVERNFNVVFVSGKAVKNNREMLDGRWDKNDVKDPANIADLMSQSKFLYYDHPVLPLRDLRNLLSLKRRLKKQEHGIKVRIRNHLLAQYFPELDRYYGQSDTVGLSVVNWCLAPKIIAGLDYEEFVRMVAPGNRIRVSQRERLRTIWEKAAESIGCEVGVAMQFEAKMMVEGLKRVRDAIRVTKDKIKEVCLHFPEYSYLQSIPGFGPDVSAKVLAAIGNPFRFDNERQVLKLSGWDLSASRSGKKSETVTPVISKKGKAELRYALYQAAHIASCRNQYFVMYFTNKLRGREREKGIKTKMKVKLAAKLLVIAWTLMKKEESFFPDYLNID

SEQ ID NO: 125458 - protein, 344 aa, unidentified
MHIASIGIDLGKTTFHLVALGERNKILLRRKFSRSQLLAYTANLPSSLIGLEAGSGSHFLGTVLREQGHQVRLIPAQYVKPYRKTNKNDFIDAEAIAEAVTKQNMRFVQIKSQEQLDIQAMHRVRDRLVQRRTALINEIRGFLLDRGLTFAARPIHLRKNLPSVIEDAEQKLSPRLRWLLDRMWQEWNSMEVDIKAITEAIERIGNENALCRRLRQIPGFGPLVSTATVAAIGNGAAFRRGRDFAAWLGVVPRQYSTGGKQKLFGMSKRGNTYLRRMLIHGARAVLLRVKYNTGGFGQWMHRLAQRAPHNKVVVAIANKLARIAWAVLSSGHDYQHQRLQPVAA

SEQ ID NO: 125459 - protein, 349 aa, unidentified
MLHVGLDLSRKRVDVCLVSGEGELVEHFRAPADRDGLYGLTRRVAVYDEAVRGVVESMNGARFVHDELVKCGWEVLVADAQRVKGLAPLACKTDKVDARVLAELSFRDLVPAIWLPTPELRAERERARWRLHLVKHRAILKNRVHASLIAFGHQVPMADLFGVAGRRLLAELDFPEPWLGHVQASLELIDDLDHRIGEIERWLRRSGADHRYIPLLMSAPGIGWITGFTIAAEIGDISRFSSPVKLTGYTGLCPRVSQSGEVDRRGPLAKHGPRYLRWGLMEAAIAASSHPLFKERYQRTKRRLGRQRGAKVAQIELARKLTEAIWYMLNRNQPFKPFAPAGAVIRLTA

SEQ ID NO: 125460 - protein, 428 aa, unidentified
MNSTQNERINQITSSTLIVGVDIAKFEHVARAQDYRGVELGRPITFENNREGFELFVSWFRKIATEQGFKDAIVGMEPTGHYWLNLAYYLGEQQVLCGVVNLLHVKKSKELDDNSPTKNDIKDAKVIAQLVKDGRYAIPNLLQGKYAELREAMKIRDHLSTDLRVVQGRVHNWLDRYFPEFLTVFKDWECKSARQMLSLCLLPHELVTQSEEVLLRHLREVAKRGLGMERMRCLKAAAGRSVGIREGTELAKLELKLLLTQYELLESKFAELEAKLDELLEQIPHVKQLMAIKGIGRDSIAGFLAEVGDIERYRHPKQIIKLAGLNLKENTSGKHKGQTKITKRGRKRLRALLFRVMMPLVAKNRAFKALHQYYTKRPTNPLKKMQSLIALCGKLIRILFGVLKKGHRFSEEKMLQDIPRFTEVSLAA

SEQ ID NO: 125461 - protein, 372 aa, unidentified
MKKRSSSRQNPKPAAKAKRAQQSVTIGMDLGDRNSRYCILSSEGEILREGQVATTKAEMIKTFSRLGRARIAIEVGTHSPWVTRLLQSLGHEVIVANPRQVKLITESSRKDDRLDAQTLARLARIDPHLLRPIQHRSEKAQTALMVIRVRAALLSARTSLVNAARGLAKSLGERLPKCDADQMGVPQGESLPPNVQGVLEPLLKEVESLTEKIKDRDQKIEQIAREDYPETTLMQQVGGVGPLIALTFVLTVENKDRFQKSRDIGCYLGFRPRRSDSGQRQPQLRITKEGDPYLRTMLVQGAHYIISRRGPDTDLKRWGLHLAERGGKRGKKKAVVAVARKLGILLHRLWVTGEVYEPLRNQNLRKERKQAA

SEQ ID NO: 125462 - protein, 344 aa, unidentified
MLERSMPHYAALDVSNEETAIHVVDEAGHTVWRGKRASDPEALATALRRHAPELERVGLETGFLTPWLYHSLKAAGLPVVCLEARHARAATTLQRNKTDAKDAETLAQLVRTGWYREARVKSFAAHAVRHLVGARAQLKGVSVDLSNQIRSILKTFGLMAGKGAGHSFAIRVRELLEGRPSLAAIVDPLLAAWDAVREQIAVLDRRLIRLAKGDPTCRLLMTCPGVGVIVATSFAASIEAPEHFRRSRSVGAYLGLTPTRHQSGETDRTGGISRRGDRLMRTYLFEAAASLLIRVRQNSALKTWGRALAKRMGFKHAAAALARKLAVVLHAMWRSTTPFQAWPA

SEQ ID NO: 125463 - protein, 413 aa, unidentified
MDPPAWWLVADLSTGRGGRPRAPPARRRDLIGAWPTSPVAVLSAVRLVRAAPARAYHTPRKERHGHHSTAGAGVTVGVDSHKDVHVAAAIDQIGRILATTQVATTLRGYAQLERWACELGRVERFGIEGTGSYAAGLARWLTSRGRQVVEVNRPNRHKRRRRGKSDPVDAEAAARAALAGDDTATPKAATGAVEMLRALRVARRSAVKARSQAANQLDSLVVTAPDQLRAQLRQLPAARLVEVAAALRPGELNSPLAAVKLALRELARRHQALSAEIDRLDAHIGKLTSTTAPELLARRGVGAQVATALLVAAGDNPTRLASEAAFAALCGASPIEASSGKTVRHRLNRGGDRQANNALWTIVVTRMAYDERTRRYVERRTTEGKSKKEIIRCLKRYVAREVYRDVRATALST

SEQ ID NO: 125464 - protein, 447 aa, unidentified
MKKVFIGIDVGKFKNSISIIDTEGNPIIKKGLSIENDYYGFAKLEEQIDLIINNYGFTYDDCIAGVESTGHYWFNLRDYLKDIGIETVMIKTDSVKHRRALEEGQKGKNDTLDARVIASCLRNGNYVYIRDNERELRALQKLTRMRNDISDDLVALKNKIHRCIDICNPVFFKIFENLNSKTGVALIKLYPSPEDIINVDLDNIKRELGEIVDKPNMRMVSLYKEECEIWGRLIKEPSYAEKVEMVAYIDKFLLQNKSKEHLDKQIKEIAKNIIPLYSEFEQIKGMPLIQLISVLSEMGDIRNFKNTRAILAFLGLSLKGNASGKYIGERKINKAGSRIVRKHLFNIIDSLVKHNEYFRIAYCYYKSYNHKNPTKKRSMQIAVMCKFVRVMYGMLKHNTDFDYKEMLKGYYFGDCNMKVFKEEFEGEKRTKKIENYKLAYSIFINYS

SEQ ID NO: 125465 - protein, 355 aa, unidentified
MDSAKYIGLDVHKESISIAVLNAAGKIVMEGVIETNATLILQFFRGLRGELHVTFEEGTSAAWLYDLIQPHVTEVVVCDPRQNALLNHGNKSDRIDARKLAELLRMGQLKPVYHGEHGVRTLKELVRSYLTISKDTARVMTRVKALYRSWAIPCTGKQVYAPQHRAEWLAKITEPGVRRRAEFYYQQLDALRSLRQQVRRELLSESQKHPAWKLLCQIPSIGPIRAAVLIGILQTPHRFRTKRQLWTFSGFGIETHSSGDYRSVEGQLRRTNRPVSIRGLNANHNHDLKNLFKGAAVVAAHKPGPLQEFYTALLAKGIRPEMARLTLARKIAAITLHIWKKGAHFDAQFLKPQAA

SEQ ID NO: 125466 - protein, 408 aa, unidentified
MKRYYIGVDWGDRLHQVHVGDEEGKKVKEVKVQESPEGLAEIGRWLDERRAEGIELWAAIEKPAGRIVDFLLDHGVEVYPVNPKAVDRERDRYRMSGSKSDAFDAYVLAEFLRTDHVHLRALRPSSEKAQELKLLSRDQRRVGRHKTRLLNQLITTLKEYYVRPLEVFEDLETEIALDFLQQYPTPAHLSALKRKQFNRFVTTQHHLSKQRCEELWEKLQKPQLGVPEHVVRAKAQLLEVLIEQLRASIKAVKIYHHKVESFFAASPAAEFAKTLPGGKSGTLVAAIWAELGDAQGRWESSRHLQAEAGAVPVTKASGKSRVVHFRFACNKHLRYTMYWFSFVSLNQSEWAKLYYRGQRDKGHSHPQALRALGAKWLKIIFVMWRDHTPYDENYHLANIARQKMRQAA

SEQ ID NO: 125467 - protein, 410 aa, unidentified
MEVVHARCAGLDISKKDAKVCVRIAGSGRRKTTETVTTWGSMTNQVLALREHLVAARVTCAVMEATGDYWKPFYYLLEDAGFELMLVNARHVKNLPGRKSDVSDATWLAQLGAHGLVRGSFVPPEPVRQLRELTRARTAITRERGREVQRLEKLLEDAGIKLSSVASDITGVSGRAMLRAMVEGQRDPVVLADLARRRLRSKIPALTEALTGRFTEHHAFLAGVHLDLIDRHTAAIEEITARIEVVIEPFQAFRELIRTIPGIDTLTADVVIAETGADMSRFPTAGHLASWAGTCPGSNESAGRIKSTTTRPGNPYLQGALGAAAMTCARTDTYLGARYRRIAGRRGPQKANVAIQHKMLITIWHMGTTGTLYADPGADYYTRAHPERAKNRAIHQLEAMGYRVTLEQAG

SEQ ID NO: 125468 - protein, 347 aa, unidentified
MRFYTENRKYYCGIDLHTKTMYVCILDDTGKILAHKNIPAKPGPFLKLIDEYRDQLVVGVECIFSWYWLADLCEAEGIEFLLGHALYMKAIHGGKTKNDKLDSEKIARLMRGGTFPMAFVFPAELRPYRDLLRRRNMLVRMRSEVLAHIKLTNYQYNLPAFEKHIGKRGNRDDLAARFRDATVRKNVEVDLLVADHMHDQINALENYLVRHVKSFDPRTYFRLQSVPGIGKVLALTILYEVGDLSRFPTVQSFCSYSRLVKCPKESAGKLYGYGGGKIGNAHLKWAFSEATALFMRESNRAKAFVAKHEKKHGKGKAMSILAHKLGRAIYFMWRRNDAFDEKYFFQH

SEQ ID NO: 125469 - protein, 351 aa, unidentified
MHRITIGMDLGDKKHQVCVLDEGGRITQSVQLTNKGPAIEKFFLDYKGATVAIEAGSHSPWISRLLESLGCTVFVGNPRKLRFIWKNDNKFDVRDAEMLARIARFDPHLLYPIRHRGKQSQVDLALLKGRDILVKSRSCLINHVRGSAKAIGVKLPGCSSAAFARKAAGVLPAILAKALEPIIEEIAGLTEKIKAYDREIETISSERYPETACLQQVAGVGPLTALAFVLTLEESNRFARSRQVGAFLGLTPRRDQSGETDKQLRITKAGNQYLRRLLVGCSHYILGPFGPDSNLRRFGLRIAERGGKNAKRRATVAVSRKLAVLLHRLWRTGEVYEPFFTARPNLTRKAA

SEQ ID NO: 125470 - protein, 355 aa, unidentified
MNDAKYIGLDVHQATISVAVVDSTDKLAMEAILETKAETILQFIHGLRGSLHVTLEEGTCAAWLHDLLKPHVAQVLVCDPRKNALIKAGNKSDRIDARKLADLLYLNKLNPVFHGETGIRALKEVARSYLALTRDTTRVMNRLKALYRSWAIPCAGQRVYAPRYRSEWLAKITEAGVRRRAEIYYQQLDALRSLREQVRRDLLAEGRKHSAMKLLRQIPSIGPIRAVLLIALIQTPHRFRTKRQLWAYCGLALKTSTRGEYRIVEGRLKRSKKFLAIRGLNANHNHDLKNIFKGAATRAAAVPGPFQEFHAALVARGMKPTMARLTLARKIAAITLIVWKTGVSFDAEHLQQQAA

SEQ ID NO: 125471 - protein, 346 aa, unidentified
MLYAGLDLSRKRLDFHLLDGEGTTVDVGAAPPDADGLHGLSERLAGHGEPIRAAIESMNGARFVHDRLELHGWQVEIADAQKVKGLAPLACKTDRIDAWVLAELARRDLVPAIWLPDPMVRAERERARWRLHLVRHRSSLKQRVHAVLLTHGKPCPVSDLFGVRGRQLLAKLALPEPWQGTIEASLRLIDELEREITDCERELRRLGADHRYVPLLLTVPGISWVLAYTIAAEIGDIARFPTPRKLAGYSGLCPRVYQSGGRDLRGPLSKQGPRYLRWALVEAATHACTSAAYRDRYQQTKARLGKQRGAKVAQIDLARRLSEAIWHMLSRNEAFAPKGATDPLAA

SEQ ID NO: 125472 - protein, 364 aa, unidentified
MTESITFVAFDMHQDSITAAWLRPGAAEPETRRIPHEPKPFRRLVKALLGQGPVRACYEAGPLGYAPQRQLAAWGLPCEVIAPSLTPRRPGERIKTDTRDAKKLVKFYRSGELTPIRIPTPAEEAARDLVRCREAAGVDALRALHRLRKFLLRRDLRCPAGRPGTQTWWRWVHALRLADPAAQRTLEEYTLAATTARARWKALDPEVTALATRAPWVAPVARLRCFRGIDTLGAVTLLLEVFDFRRFGTPRPFMRFVGLVPCEASSGGRRWQGGITKAGNAHLRRILVEAGWHYTRRADRRAAVRKRQQGQPPAVVAVAQQAEQRLYRRFHALVGRRKLRTVAVTAVARELCGFLWAAMVDAPA

SEQ ID NO: 125473 - protein, 371 aa, unidentified
MKQTIRLFVGMDVHKATISISVAEDGRSGPVRFIGVIPNTPEAVGKMAKRLAKHGELDFCYEASGCGYGIHRQLTGLGHKCTVAAPSMIPRKPGERIKTDRRDSEKLAILHRSDDLTPVWVPDTTHEALRDLVRARVDASMHLMRARQQLLAFLLRHGRSYPTGNHWTQRHRCWLAGQTFQEQAHGIVFQDYLETVWAAQERRDALVKRISAMVATWSLGPLVEALRGLRGVDLISAATFIASTGDLSRFESPRLLMGYLGLVPSEQSSGGTIRRGGITKTGNREARRMLIEAAWSYQYPARIAKEKAEILVRLPKSIRDIAWKAQTRLCSRYRSMIAKGKKPTVVVTAIARELAGFIWAIGREMRIPMTT

SEQ ID NO: 125474 - protein, 371 aa, unidentified
MNDLIRIGMDTSKSVFVLHGVDAAEQPVLRRKLRRRQVVEFFDKLPALKVGIEACGGAHHWARELGALGHQVLLLPPQRVKPYVARNKNDAADADAICEAMSRPRMRFVPMKTTEQQAALMLVGVRDQLVARRTELSNSIRGYAAEFGLVAAKGLDKIEPLLERLAMDRTVPALAQELFATLGEDYAQVKLKLRTIEAKLMAWHRQNELSRRLAEIPGIGPIGASLLAMKVPDPKAFRCGRDFAAWIGLTPKDHSTAGKARLGVITRAGDEALRSVLVVGATSVIKQARGQKGHPSPWLVALLKRKPPKLAAVALANKTARIAWKLMVSGQRYNPHLAAKTRFVPPTGSVAPCSRRQGRFAPPAAVACGQP

SEQ ID NO: 125475 - protein, 416 aa, unidentified
MRDDARWFVGIDWASETHQVCLVDADGKIVGERGFPHGGSGLAEMCIWLLVTTRAEPTVIAVAIEVPHGPIVETLLERGFLVYAINPKQLDRFRDRFTVAGAKDDRRDAHVLGDSLRTDRHCFRHLAAEDAVIVALPEWSRMAEDLQQERNRLANRVREQLWRYYPQALKISDDLGADWFLELWAAVPTPAKAARVRESSIDRVLKTHRIRRIAAAEAAQILRQQPLTVAAGTVEAASAHIRAVAARLKLVNRQIKQAHRCLDTLCGKLAVDEEKTASGQEPEQRDVTILRSLPGVGRIVLATLLAEAAEPLRRRDYHALRTLCGVAPVTKRSGKRCIVIMRQACHMRLRSAVYHWARVAIQHDPLSRCRYAELRKRGHSHGRVLRSVADRLLAVACAMLDRQTMFDPSRAEKQAT

SEQ ID NO: 125476 - protein, 437 aa, unidentified
MMLESIPYLSVGLDVGADFTWMSIMLPNGTLTGKPFKIVHSDPHSRELAVTKIKEAQEMYSLKSRCFLESTGIYHIPLLCFLRDKGFDCSVINPIITKNSTNMNVRKLHNDKFDSKKAAKVGLDASLKTSIVPDNAIIDLRNMVRDYYYYKDMQSAIVLKLNAELKVSFPAYLQVFSKITTLASLKLLETYPLAADMLAAPKDEVIKIIRETARFGEKYALSKYNALHAAAEDATVFGRALPSNALRIKLYIETYREYQKHLDSILEELHKAVDELQGKPAHDQICLIQSLRGVGFLSAVVLIAEMGSFDLFSSPKKLYAYFGLDPAVKQSGKFNGDKVHMSKRGSSLARRILHMVSLNNLKIDKGTKMPVNPVIHSYYTDKCKSKKKNVAVGAVMHKICNIIFAMLRDNKPFEMITPQEHCKLYKEEHSPKSDDVA

SEQ ID NO: 125477 - protein, 316 aa, unidentified
MKNYIGIDISKSSIDVYDGKKSYKFKNNKDGFQKVVLLNENIKETVFIFEPTGVYSYPLTEFCDKKSIGCVIVSPKVSRDFARSLKVRSKTDKIDAKVLYKYQSHVELNMIKVPKVNHHAIKIQEMLNVYEGFRESKQKLKNQLESISSTHKYLQRTVNSMIKILDEKIEKLFDKIEGLIFKDDSMKRKYNALLTIPGIGNKSALYLISFFIKYPLANAKELTALIGLDPVMRDSGTYRGKQRISKHGGQQIRNLLFLPTLSSLKCNDRIQLFYTRLTSKAKSKKLAVIAAMRKLVLIAFSIFKSEQNYEPLYVQN

SEQ ID NO: 125478 - protein, 377 aa, unidentified
MESIIYVGIDVHKDTYSLCSFDMQKDLFFSQHTMKASTVNVASYLNKISESNGNAITICGYEAGPTGYKLCLDLQQKGFNCVIMAPTSIAKTAKDKMLKTDRADAQILARTLAYHSYKQVVLPTENILAIKEVVRLRASVLKSCKKAKQNLLSFLLYHGISYPGGGRETYWTVKFFTWLKTVTFESDYLTYCFEEYVSEVSRLIQRLDRLNAKLKELESDKEISEGIKKLKCISGIDTVTAISLIAETGDFNRFKSAKEFASYTGLIPGRHDSGLSVGNSVGITKQGNQNLRHLLVESAKSIKRATALSHGQKSRRLLARQEGMESVIINYADRAALRIKSRMRKLELRGINYNKAAVACARELACFAWGMMTNHIQ

SEQ ID NO: 125479 - protein, 429 aa, unidentified
MIEAVIERCAGIDIGKQFVAVCVMTGPANGEARSEIRQFGTTVGELKQLLEWIKQEGCTDVIMESTGSYWKPVFNILEGSVKVALANPHEVKARKGQKTDNKDAWWLAHLLRHGMVTRSFIPPRWQRELRDLTRRRRKLIQSAAAEKNRVGKVLEDANVKLGSVLTDLFGVSGQLMLEALLKGTADPAEIAAFAKSRAKKKIPQIMASLEENLMRDHHRMMVRFSVEHMRFLEEQILALDEEIRRKIVEAGYVKEWELLRTLPAVRDSAATILAEMGPDPAQFPSEKHLGSWSALCPGNNRSAGRSKSSHTKNGNPWLRGALCESAWAVSRMKQGHLRDKFWRIAAKGDPKKSRPIAIVAVAHDLLKLAYFVLQRGTPYEEERGKPMTEQQKQRLIRHHVRRLGKLGVALRPSPPSNTICRRRKRSLPS

SEQ ID NO: 125480 - protein, 391 aa, unidentified
MNVKARRTKKQVNVENQAITLLSKEELDRKIEAIKKELRSYTWRDLETNGKFAKNDKLSFITDDMLIAGCDIGSETHYIRAIDVRGRELSSGAFEFSNTSEGFENAKAWVLALAAKNDKKQIVLGLEPTGHYWFALAAWMISNGISVVQVNPYAVKQSKEIEDNSQLKDDRKDPKLIANLVKDGNYGMPYLPEKVYADMRRLSMFRDQLTEDRIRNINRLHRELKIYFPEYMDAFGKIDGAFTLEVLKVSAIPTDITALGAEGMKNIWHNAKLRGRGYSRANEIVSYAKKSVGLTDGTDAGREAVKWYAEQILRLDEQLAEIESALHEKCREIPYAENILAINGVGENILAGILAEMGDISRFDDVKEIQKLSGMGLVACSSGKCSAIIKL

SEQ ID NO: 125481 - protein, 458 aa, unidentified
MYRELQPLRQALSCELKASLSPSGTGIDAEPLLQSYLDRLTLYIGCDVADQTFTLYAQTAGGDEVAHRVDIPNRTQGFQQAWSWMENLREQHHLRILLLAMETTGVYYWAWWDFLSSRPNLARVLYNARTTEHMTEVLSKKVRNDLVDAYALAEQVRLGSTPETLLTEDPDLQTARYCSRFARDLAQQVNHKKNQLRSILRAYNPALEQVFPKKQLHHPAVYALLDKYVFPQEFVQAGVEVIAQILVDKCRTAFGEEQAKQLVQLCSQQLVRPIGQDVIQLRIRQLCEDIRTIQRRQKTFLKTGFSLIQDRRETKLLYGSIGAGLSNTLALVSEVGDVSRFPDGEHLASFLGITTSKHISGTTIFHAKHITKHGSPNGRYAIVNLAQHLCRRVPKYQAMYLRIKARKPARIGYLIAVVAVARDFTTNILYDMWHNQRPFFLEVADYRKYRQAHPHSPA

SEQ ID NO: 125482 - protein, 357 aa, unidentified
MRRPKAKSNDKLMAGIDLHGNNLVIGVINQDGTRLMHRKLDCSLEQVEEFLRPLKRRLQSMAVESTFNWYWLVDGLRAQGYPIDLANPAKIEQYSGLKHADDKDDAFHLADLQRLNILPKAHVYDPELRPVRDLLRRRTNLVHQHTALLLSMQSLYARTTGQRLDLGEAKKMEPKQAPQLYEHPANQLIAQVQVEHIGALAKSIHRIEKAVLACAREIPLYEKLLTLPGIGRILGMTITMEVGDISRFKTAGDFASYCRMVDAKRLSNGKCKADNNQKCGNKYLAWALVEAANFARRYDESCRRWYDRKAAKAGKIIATKALGCKLAKAAWHVMAQQCNYDEKRMFPELANQPMKTS

SEQ ID NO: 125483 - protein, 335 aa, unidentified
MQVYGIDLSMKKFDVNFIDAKGKEKNKEVKNGVVSISRFLSSVPEEGILCAEHTGAYGDLLVSLCNQANIPIALVPGYTIKHSLGLVKGKSDPLDSRRIREYGERFTDKLTFTKYDEESIVELKQLHTLRSQLVKARKALLTSEKGRSHLPMQNVSVHNHLQSVLSGLDNEISTVEEEIEALIKVNQDLNENYELAKGVFGIGPVIATDLLIKTGNFKTIDTARKAASYAGVCPFPNSSGKMEGKSKTSPFADKKLKSLLYLGASSAVLYNKEYQLYYQKKQLEGKHHYLIMNNISNKMLRTVYSVVKNKTPYNQDHICLDPRERNINSSTKKVA

SEQ ID NO: 125484 - protein, 491 aa, unidentified
MPSSSRASRRNAKNALKLKAQARKRAASATSPVELEKLEPIHRRAAGIDIGSAENYAAVPPETVAPGESSVRVFGVFSEQQDALVEWLRSCQISTVAMEATGIYWLTLYDKLEAVGIEVYLVDPHGVKAVPGRKSDWLDCQWIQKLHTYGLLQRAFRPDAPIRRLRTLTRQRTELVCAGASQQQHMEKALVCLNLQLGLVISDLAGETGLAIIRAILAGERDPEMLVKHRSVRCTKASIGEMKQALRGTYNDEDLFVLQQSVDTWDFLQEQIGECDGKIELALNAIPTARAVEVKAPPLPVPAAADQPKKKTKGTASKNAPEKDFTPILQRICGVDLTQVMGLNLLSVLMLLGEIGTDMTRWRSAQAFCSWLGLCPGAKISGGKVLSRRTRKVTNRAATILRLAAVAVGRTDTWIGLFYRRMKARKGGPKAVTATARKLACIIYHMLKYQEEFVALDMEKYVAKAQAHRLRHLRCEAKKLGFELVQTQEAA

SEQ ID NO: 125485 - protein, 361 aa, unidentified
MPNAKISSVSRQVVGGVDTHKDLHVAAVVDEQDRILASESFATTRQGYKQMLTWMRSFGEVVRVGIECTGTYGAGLLRYLEQAGITVLEVTAPDKSDRRKRGKDDTLDAGNAAHAAFAGVRTVTPKKRDGMVESLRVLKVCRKTAIQARRVTLQLIQNTIVSAPDDLRESLRTLTRMQLIRTLAAWRPDLSSYRQVTSAYRIALKSLGRRYLELHDEIADLDVMIAALVDDLAPELVARNAIGYEAAAQLLLTAGDNSDRFRSESSFAALCGVSPVQASSGKVTRHRLNRGGDRAANSALHIIAIGRLRTDARTQAYVSRRLSEGHSKLEAIRCLKRYIAREVYGIIQRRNSVINQSTVST

SEQ ID NO: 125486 - protein, 301 aa, unidentified
MHDDITAFVGLDVHKDTVAIALAPAGRDAPRFVGTCGPKLAELIKAVSKLGKPANTLLAYEAGPCGFALARELIAAGWRCQVIAVSKVPVRPGERIKTDRRDALTLAGYLRAGELTPVVIPDAHDEAIRDLSRAREDAARARLKVRQQICAMLLRHGRYYPGKTRWGPTHERYLCEIAFAYPAQQIAWAEYRSAMTEAHERVQRITAALREQAELWRFGPVVNALMCFKGIDFVAAVTLVAEMGDLHRFEHPKQLMAYLGVVPSEHSPGSRARAVASRRPATATYAAFSSKPPGAIATARA

SEQ ID NO: 125487 - protein, 344 aa, unidentified
MKLFIGLDVSLAKTAVCVINEHGKIAKEAQVPSDPQAIVDFANTLEGAVAIIGLEAGPLSQWLHRGLTGARLDVVLMETRQVKGALKAMPIKTDRRDAEGIARLLHLGWFRPVHCKSVSAQEVRALLAARKAIQQGMIALELSLRGLLRNFGLKVGAISRGQFDARIRELVEGNSMLQAASGPMLRARTSLRHELAGLERQVRLLAKDDAVCRLLMTMPGIGAVVALTFRSAVDDPARFSSSKKVGPWVGLTPSRNQSGERDVIGGITRAGDANLRRALCQAATVMIHRGRSTWLRSWAAQVAKRRGAKRAMVALARRIGTILHRMWKDGTEFSTTVPLIAKSA

SEQ ID NO: 125488 - protein, 366 aa, unidentified
MLYLGIDQHAKQLTVSLRNEAGDIILRRQVSTEPERCLEFLTKLNEKAGEDGYIAIVEVCGFNDWLLKLLPQHGCVQSILIQPTKKPKIKTDRRDAHSLSELLWVNQHRLRKGEPVRGVRQVVLPSLHHAGSQRVTLLRQQAGRARTRTTNCIKHILRKHNLQWQMPTKTFPSVRAIAWLKVVKLPNCDRVEMDWHLEELERFTRRMESLETQIVQRCVGDPMIDLIRTIPGCGYYSALSLVCRVGDPQRFPKGKSLAHYWGLTPGVNDSGEGTGRRGRITKTGSTMARWILAQITLHCLRHDPVMKSWYKPIRNRRGSKIARVAVMRKLAVIIRNMLVHQQPYFECRDAMLARRRNQMAIKSPAV

SEQ ID NO: 125489 - protein, 428 aa, unidentified
MSNQEIIRRRQYCQIVKDITGSDQYLVVGIDVGKDKHHAFMGSATGKSLFRKLIFENNMDGFSMLLKTAEAIKSQNSLSKIVFGVEPTGNYHKPLARHLIRCDCNVVLVSGVAVKRNRELLDGRWDKHDTKCAANIADLVSRRRCLYYDSPPPGIIELRSLLSLRRRLKKEEHSLRMRIRNNLLAQYFPELDRFYSVCESESLAIVKWCLDPNKIAGMDFESFFQMVTRTRRGTAQLLRLRKIHQQAIESVGCPMGSAAAFEAQLLVEKLKQVRQQLKETETAIKDVALEFAEYSYLLTIPGFGPYVSARVLASIGDPFRFENRKQLIKLAGYDLCAKRSGKTSDKAIPVISKKGNGELRYALYQAAKVASARVDLFRTYFTRLLRGRERERGIKTKMCVKLAAKMLIIAWTLMKKREVFDPAHLNIE

SEQ ID NO: 125490 - protein, 409 aa, unidentified
MDVLIERGVGLDVHKATVVATVRVPATGGGRLTVTETFGTMAADLLALREWLQAYGVTHVALESTGVYWKPVYYMLEGGFTLLLINMQLLKHVPGRKTDVKDSEWLAQLLECGLLKASFVPPPPIRELRDLTRYRLQQVRDRAQEVNRLCKVLEDSGVKLTSVLTDVMGVSGRSMLAALLQGTTDPVVLAHLARGRLRKKLPELRRALAGRFRRHHAFLVEQILAKIDFLDETVERLNAEIDERLAPFEPLLARLDTIPGVNRVVATTIVAETGGDMTRFPTAGHLCSWAALCPGQNESAGKRRSGTTRDGNRYLRGQLIQGALGASHSKGTALQARYHRVKRHRGHKKAVVAVAHQILEIAYYVMHDGVTYDELGADYFDRRHADRAMRRHVRHLEALGFRVTIEKAA

SEQ ID NO: 125491 - protein, 347 aa, unidentified
MGKSITDLSSVTTVGLDLAKHVFQVHAIGAFGRVIVAKALRRKDVLAFFAQLPECLVGMEACGSAHHWARELIKLGHDARMMPPAYVKPYVRRQKNDAADAAGICEAVTRPSMRFVGVRTLENQAALMHHKAREMLVAQRTQLINALRGHLAEIGVIAAQGLKNARELARVILAEGDETIPVCVRAALAPLVRQLHVLDQEIACSDRTIAAMARDDEMARRLMTIPGLGAVTALAMAASVQDVSAFSGPREFAAFLGLTPRQNSSGGKEQLGRISKMGNRYLRKLLVVGAHAVLYHRKRHEDALRSFAKKLMQTKPFKLVAVALANKMARIAFAIMRGRTTYSTASA

SEQ ID NO: 125492 - protein, 341 aa, unidentified
MLIIGCDFHPTFQQIAFTDTETGEYVERRLHHPREAEQFYRALAKGKARVGMEATGSFRWFRRLLSGLGHELWLGNPTEIRASAPRRQKTDKRDARQLMKLLLEDRFPQVWLPTVADEDLRQLLLHRCRLVRLRTKVRNQLDAIAKNEGLLGQRVGTKKGRQQLQALPLSGWYQQRRQDLFELLDQLERRIVPLNQAVQQAAEERADAQRLMTHPGVGPVVALGYVLAIGDWQRFPRGKYVASYLGLIPEEDSSSNKRRLGHITKQGNSLVRWLLVEAATKAQQCDPGWHRQYLRLARNKHHGVAKVAIARKLAIRLYWMLRSGQDYEQVKERGSHAGQSV

SEQ ID NO: 125493 - protein, 336 aa, unidentified
MHVAVLIDVVGRVVATHSVPTTAIGYEQLIGWTGSFGRLSRAGVEGTGTYGAGLARYMRERGVQVLEINRSDRSRRRLRGKSDPTDAENAARAVLAGDAHAIPKAQSGVVEAMRAINMARRSAVKAKTQAINQLRALLVTAPESVRTTLWKVKPEQCVARCARLQSLGETPLLKALTSTLRMLARRWMSLAKELRQLDTALDELTKWAGRRLLTRFGVGPQTAATLLVTAGDNPDRLRSEAALAALCGVSPLEASSGKTTRHRLNRGGDRAANNALWTISMVRMRSDPRTRAYVARRTTEGLSTKEIQRCLKRYIVRELYPLILADLADAARPNLT

SEQ ID NO: 125494 - protein, 484 aa, unidentified
MPQGIVQREGEEMARAPRRQGGGQPRQRRSSRGRPAQLEQLNLNAAGIDVGATEHWVAVPADRDAQPVQRFGAFTADLYALAEWLRQCQIDTVVMESTGVYWIALFAVLEERGFDVKLVDAHYARQVPGRKTDVKDCQWLQELHTYGLLRGAFRPEDEVCVLRRYLRQRSMLVAMASRTVQHMQKALEQMNLKLTEVVSDITGKTGMTIIRAMLAGERAPQLLATYRDKRCKHDQATIAKALTGHWRAEHLFALQQAVEQYDFIAQQLRACDGHIEGCLQAFVPDVEIDAPQAPSARPWRSSRSNPLSFEVQAYLEAMTGVDLTQIDGIESLTALKVLSEIGRDMTRWPTSKHFAAWLGLCPGNKLSGGKRYRMRSKPSANRAATALRLAAQGVANSHSALGAYYRRRRARLGAPKAITATAHKLARLVYSMLRYGTAYVDAGQQAYEQKYRDRVLTNLQRKAKAFGYKLVHVEDIAGGVASTL

SEQ ID NO: 125495 - protein, 320 aa, unidentified
MAQQGRIVGIDVAKLKADACIRSLQLRLSQPSTAQGQQDMITWLRRNEVGLAVMEASGGYERGWAKALREAGIAVRIVDPKRVRYFAKSAGRLAKNDPIDAEMIAWFAETFAAAAEPAHDADRDALNRLVTARSLLVRLATPIRQLGEHGQPRVVENAQRAILKTIKAQLAKLEAAIEAKIAANAQFLARRAIIASVPGFGDHFVAGALAWLPELGRISNKAAAGLVGVAPYDDDSGQHRGERHIKGGRRDIRTLLYMAALGAATRHNPVVMAYYKRLRAKGKKTKVALVACMRKLVVILNTMLARGEMWNPTPRTTAVA

SEQ ID NO: 125496 - protein, 278 aa, unidentified
MSEATQLKRFSQSPDPDALYAHLVRNYPEAEYHSVYEAGFCGFWIHYRLVGLGIHNIVVNPSDVPTTTSEKLRKTDAVDSAKLARSLRAGELKGIYVPGSESLETRSLIRLRDSITKDQTRLKNRIKSHLRYLGIEIPEEFSGPGRCWNRRFVVWLKGAETGTAYGRQTLDFLVRQYEALRGQRLEMLRAVRALSRTERFEKPLENLMTVPGIGQLTGMSLLSEIDDIRRFKSADQLAAFIGMIPMCHSSGEREGVGDITVRRSGGSGPSLSKPHGWR

SEQ ID NO: 125497 - protein, 414 aa, unidentified
MALKIVYKICCGIDVHKTFVVACIASTNSKGVTTYKSHRFSTYTKGLRELLQWLLDNDCKDVCMESTGKYWIPVFNVLETSCNIVLAHPKYVKAIRGKKTDKKDAKWIADLFKHDLVAGSFMPPAQIRQLRDLMRYRFKLICFMSSEKNRLQNCLTVSNIQLGNIVSDTFGKSSQRIIDKILENPLDTSFDIEPLIHGSMKKKLPELELAIDGYITPEQAGKLKVIKQHYEDLETRKSDLEELILKLAKPYQQEIDLILTAPSFKNIFSAIGVISEIGVNMDVFPTAKHLCSWAGLTPTNNESAGKKKSVRVSKSGCYIKPLLVQCATAVVKSEKHPEIRNRYLRLKKRRGHKKAIIAIARMLLSALYNMLKKKEPYNADLYRKSDVLPVDREITVEQAILLARLQGYRIKSTA

SEQ ID NO: 125498 - protein, 336 aa, unidentified
MNTQNVNTATFFGIDAHPTTHTVLAMNRFEEEKGILTFDNTREGILQFLSWLPTMQADREKVIIGLEGGGNSRHSLIANLLKDYQNIYEVNPLYTKQRRTFGTKEDKSDPRDAKLIAEVLTRKLAELPLITPHDLSSHMLVLKKTVWFYEQTTAQGVEIQNQLHQLKREAGLSLDQTEKKTLRMIIAELEKQLKSVRKTQWKCQDQLATLLEKQGKNLTTIKGIKIIIASKIVAHSGGIERFANLDSFIQYAGIAPREKSSGKTKRHSKSKTGSRKLNHAFYLAAMVQLRWNPKAKEYFEKKIKEGKTKKHALKCLMKRTACIVYGMLKSGEDYRG

SEQ ID NO: 125499 - protein, 412 aa, unidentified
MRVIGLDVHRTFAQVAVLENGLVKDHGRVAMDRQAVLNFAGTLTKEDDVVIEATGNTAIIVRLLEPFVRRVAIANPLQVRAIAWAKVKTDKIDAATLARLHAAKFLPEVWTPTEAVELERRCIAERTQLVSQMTRLKNRIQSILHANLVSRQGKGIYGKDGRLLLEQLPLPPDQMRMALRHHGELLRLAGELAVVDKDLARRALVDPQVKRLMTIGGINSVVACSVLAAIGDIHRFSSPEKLVSYLGLNPSVHQSGDRPAFHGHITRRGRGHARAMLVEAAWALAPAPGPLSSFFQRISKKRGPQVAAVATARKLAVLIWHMLTKDEDYAWSRPALVQWKLRQLELKAGHASRRGGNKPGPARDYSLKAVRDKERTWLGMAQADYERFVAGWREQPPLVDGKPRTRAGRWKH

SEQ ID NO: 125500 - protein, 453 aa, unidentified
MAKTKKPRKHRKLERSWPEMRPNAGGIDIGATEVFVAVPADRDTDSVRSFSTFTQDLHELADWLQRCRVDTVAMESTGVYWIPLFQILEARDIDVHLVNAQHVHHVPGRKSDVLDCQWLQYLHSVGLLKASFRPEQAVCEIRSLMRHRQNLVEMSCVHVQHMHKSLDQMNLQIHHVISDITGVTGLAIVDAIVAGKTNPKELAQWRDYRIKASAETVTKSLVGDYRPEHIFTLKQSLTAYRHYQQLIADCDQEIHQRIQTFHKDDGPIAPALVDSSNSKTATPPKFDLNSNLERIFGVDLTRIPGFDSRLIQIIFSELGVDLLSKFATGDRFCSWLNLCPKDGSSAGRRIRGPKIRTKNRAAQCFRLAAHCLHHNQSYLGDYYRSQRARHGAVKAIKNVAHKLARIFFHVVTTGQPYDETVFAKLDACNQKRRLHKLQSQAKQMGYSLMPANA

SEQ ID NO: 125501 - protein, 379 aa, unidentified
MPTRMRHVGLDVHAETIAVAVAEPDGGVRELGVIRHRPEAVRKLLAKLGPAGQLRVCYEAGPTGYPLYWQLAALGVHCDVIAPSLVPTKAGDRVKTDRKDAARLARCYRAGDLTAIWVPDAATEALRDLVRAREVATQDQLRARHRVSKFLLRHGYHRPEGIRAWTGRHAQWLAALRFPLPTLQVVFDDYRANLALLADRIARLERAIEAALPTLAPAQQALVGALATLRGVRTVTAATVVSELGTLRRFAGPRPLMGYAGLVPREHSSGSKVHRGAITKSGNAHLRRVLVEAAWAYRHRPNLASAVLRHRQQDQPAPVVAIATRAQQRLCARYHRLTHQGKPPLAVATTIARELLGFIWAIGQLVEPPPAAVGTACCA

SEQ ID NO: 125502 - protein, 371 aa, unidentified
MDKYIMVGGDVHDKSMLLKIAEGRDQPWKRSFANDEGGRKAMIQHLKERADAAGGAKIIFAYEASSLGFGLYDTLHDAGIECHVLAPTKIARSADHRRRKTDERDAERLLEILRGHILAGNELPSVWIPDPETRDDREIVRARLDLAEKLTALKAQIRMLLKRTGLRRPSRFSKNWTKAYRAWLRGLLRPSGAMAPGARVALGTLLRQMAAIEQEIAILDTEVQGLSETVRYAEPAYALMDEKGVGLLTAMVFLAEMGDLSRFTNRKQVGAFLGLVPSSDESGESGEHKGHITHQGPWRIRRVLCQATWSRVRHDAEAEAAYQRIVKRNPKHKKIAVVAVMRRLAVRLWHIGRDAQGRGGCFAPAKNTDAA

SEQ ID NO: 125503 - protein, 350 aa, unidentified
MLIIGCDYHPAFQQIAFVDITTGDCGERRLEHREEAEKFYRDLAAQGMKVRVGMEASGQARWFERLLAELNFELWIGDATVIHAKRVRKQKTDRQDAQLILNLMLKDDFPQIWVPSWENRDLRQLLWHRHRMVQARTRIMNQLQAVAINEGLRCKKRLWRESGREQLEAFRLAPWASRRRQDLLKLLDGLNPTIAELTQAIEQEVEKCPAAQRLRTHPGVGPLTALAFVLIIGNVDRFQCGKQIASYLGLVPLEDSSGNRRRLGHITKQGSSMLRFLLVEAAQVTARSLPEWRSQYVHLTMRRGRKIAKVAMARKLAVRLYWMMRKEWDFGTLTKFGSHAGKPGTGDGVK

SEQ ID NO: 125504 - protein, 336 aa, unidentified
MRYIGVDLHTTQLTVCYLKTSAEFEFKQYRLDEIETFLSRLTDGDSLAVEATGNSRWLVNLVKERVSWVVIVNPREFEVIKRSAKKTDRRDALNLARFLAVDMLPEVRPKSEQAEAVARLNETRSKLVGVRTSLLNKIHALAVSRGWKLKKESLSSRKALARAMQLEWSQIERLELEIISEQINALKEGIKRLEAAIGEESRKLSGFENLITVTGIGERSAGVLLSVIGAVEDFETENKLASYFGIVPKVSNSADRVNHGRITKRGSKMGRTTLVQCTLVAIRHNSYLKKYYEQVKARRGHGKAKIAAARKYLGIIYNTLKNNWVFADFNNFELAE

SEQ ID NO: 125505 - protein, 497 aa, unidentified
MLNKASIYPDCNPQVIKLFERAGHPAKVLCVALDYAKAQHTVLICNGLGERLRGTFAVENTPAGARQLLEQVGHCAKQRKLRPEQIFFGGEDYPSFAENFLRHLRQEKFLVLRINAWEAKQQRTNFQASTDGLDLLGIARCFLNRRGQPVEDLPVAYANLRIATRDRDQLVRSATATSNRIHTYVDRLFPGFLSEAKSGLTPLSQASLDLMSERFSPAQIRGRRREALGQWLARRGVCEPHAVAAKLKDLAKGALPPAPEQTVLLQRTLSQLVGIYRGLQGSISAMDRELAYWLARTPGALLTSIGGIGITLAAGWMAELGPPSQWRAVRRMCSYAGVVSKTKQTGGPDKEPVAGYVQQRCNKRLKNVVLQAVEKVRQYGPEDLRRTAQELEARGSHTEFALAKRLVRLSKYLVLSGTIYRPKALMAAETAKEDLVLYYQHTWDKLLQKWKGKADLKDVFAPQHSLGQWRKMAQELYALQLRLPTQRVGRTTSASAP

SEQ ID NO: 125506 - protein, 408 aa, unidentified
MEVVYRCCCGIDVHKKIIVACLNQGGEQSLREFGTTTSEIKSLATWLTESGCEMIAMESTGVFWKPLYNLFELMDLDAIVVNAAHMKALPGRKTDVKDAEWIADLLRHGLLKASYIPSREQRELREITRYRKSLTEERCRETNRLQKILEGANIKLDAVVKDINGKSARKLLERIIEDDVPTSEAEVSRIVHGSMRSKLGQLVTAIEGITTPLQRKLLAQVIDHIDDLNKRISNLDKLVQNYMDEYEAAIAALCEIPGIARRSAEVILAEIGLDMSRFPSAAHLCSWAGVCPGNYQSAGRRKHGKTTKGNKALKTILTQCAKSARSVKQSYFSAQYQRIAARRGKNRATLAVAHSMLIAIYHMLKNSMPFRDLGADYYDSFNRDRKIQGYLKRLKALGWEPDALPGSA

SEQ ID NO: 125507 - protein, 348 aa, unidentified
MKQEMSVLGIDIAKHVLHAVGMDERGKIVLRKRLSRHDLMPFLAKLPPVLIGIEACGGAHYWARRFREHGHEVKLMAPQFVKPYVKSNKNDSRDAEAIAEAVTRPTRRFVPTKDVDQQDIQALHRVRERLIGERTALVNEVHGLLHEYGIVIPKGVAKFRQAVVGKLESEQDKLTSLSQEMFWKLVEEFAGLEKQLVYYQEKLEALAATHPECQRLMTIPGIGPLTATALVAAVSDASAFKNGRQFAAWLGLVPRQHSTGGKERLLGISKRGDSYLRKLLIHGARATLRWVGRKTDRRSQWIRQLSERRGKNRTAVAVANKNARIVWALLTSHQVYEPAKGSSRRRSG

SEQ ID NO: 125508 - protein, 346 aa, unidentified
MANRLLKQVVGIDVAQKELVVSLGKMDENAVTTVYANKVFSNNEKGFVSMEAWVIKQTIAEYPLRYVMEATGVYHERFAYYLTGKGYVVSIIMPNKISNFFRTLEIKTITDKSMSAAIALFGLEKQLDNWVQPKRVYRSLRQVSREREQLIAERTMIKNQLHAEQAEAFPGKDTIRRMQDRIKIINTQLKEILAEIKIAIIKDEDLKHTVATITTIPGIGLLTATIILAETNGFELIRSKKQLTSYAGLDVREKESGISVKGKPRISKRGNKHLRKAMHLPALAAIRYSERYKAIFRRIVSRNSVKMKGVVAIQRKLLEMVYTIYKTNKPFQKDYLKPHNTIAQNS

SEQ ID NO: 125509 - protein, 401 aa, unidentified
MRSIGMDVHRTFAQIAIVEDGLSSDEGRIGVRPEDLRAWAATLEPDDEIALEATTNSDAIATLLRPLVAKVVVSNPRKTRAIAEAKVKTDKVDARILAQLLAADFLPGTWVADDRTRMLRRLVVRRMHLVKARTRVKNQVHAILARNLAPTCPHADMFSGVGRRWLRSQDLPADEWRSVDALLRQLDFHGDELAEVDRDLAIEAIDDPVVARLMTVPGIDVIVAMAVVAAVGDFTRFESPDRLVSYLGLNPKVRQSGNSKATHGRITKAGPAQARGMLVEAAFAASRTPGPLRAFYRRIKDRRGFQVATVAVARKMTVLCWHLVTKDEDYAFGRPSLTAHKRRKLELAAGAESRRGPVAGASRDYHIKRLRDEEKALVEHAERAYEVSVAHWQPQGPRRQG

SEQ ID NO: 125510 - protein, 346 aa, unidentified
MAVTYCGLDVGSSVCYVTAKTVSGGKLFTQEFATSKEELQAVVAKIPGDEIHLHLEVGEMTAWIRRILLSCPRVGRVVVSNPKTNAWIAKDAHKSDEVDSDKLADLLRLGLADRYAVYYADDPNDAVFKQVVQHHQKLTRQQARLKMRLKSFLRSQGVIVKDDTVYTKKGREKYITMLTFTPARDIVRQMYDVLDHTVEAQQAALRLMRREAKRYPVVAQLDRVPGLGIINACRFVAYVQDPHRFSSKRKLWRYARLGICHRTSNGETIGRESLDWNGNGTLKDVSNTSFRGALKRKDDNLFKRTYRASLQRTQSETHARLNTQRKILTVLWTMWKEGTDYLDQKG

SEQ ID NO: 125511 - protein, 388 aa, unidentified
MEWSGGTARAMRHPTTGMNTNNNDGVRVSEKSTGFAKAATVLSEIFLGIDTSAAKHVVTRLIAGEGPKPAEAMSTETLVAKVAKWVNAGVAVHCVYEAGPTGFALYRRLVKTGATCLVVRPKRLEQHQRRRKNDPQDSRLLAEQLAAHHFGYSRLLVPVRVPTEQEELNRLAVRERETINRARHQILNSAKGRALALGYPLPKQWWRPRVWPKIKDAFPPELARLLERTLQTAAAMKLQLTAAEAELKATAPAAPVGVGQVTAAVLEREVCSWERFPSDKKLSSFFGLCPCEDSSAERHHLGAIDKHGSPRLRFWCQEAAWRLFKHQPDYHVIIWARRKMDGANSHRMKQIAVAVARRFLVDWWKVRTGQTTFAALGLRCAESTAAAR

SEQ ID NO: 125512 - protein, 351 aa, unidentified
MIIIGVDFHPSFQQIAFMDQETGECDERQLNHSDGEAEKFYRELKQRGVSVRVGMEATGHSRWFERLLAELGFEMWMGDAAKIKRQRVRKQKTDREDARLVRTLLLENRFPRIWVPSLENRDLRQLLWHRHRLVQMRTRIMNQLQAVAMNEGKRWKKKLFSEQGRAQLEKLQLAPWASRRRKELLELLNCLNPTIEELTAAVEQEAKRRPEVLRLMTHPGVGPITALAFVLIIGTWERFHCGKQIGSYVGLIPCEDSSAGRQRLGHISKQGNILLRFLLVEAAQAAVRWDPDWRRRYLHLAMRRDRRIAKVAMARRLGVRLYWMWRNGREYSQSVEFGSHAGQPEIVHGVQ

SEQ ID NO: 125513 - protein, 310 aa, unidentified
MTTAVGIDVGKAALDLAVEGIPGVVRFTNNAAGIGKLVARLGRLAEPRIVVEATGGYEDSLLDACGDAGLWICRVNPRQARDFARATGELAKTDAIDAALLALMARLFHTRMRRYEAPQPWQRELRHWLRRRGQVVVTLQAQKQQTALALPAVRQLMLRTIAALKRELAAIDAAMHTLLKTHASPALRSSKGMGPIFQATSLALLPELGRLSRQQIAKLVGVAPMNRDSGQTSGKRRIRGGRAPVRVALYMATLSAVRWDPVMRAHYQQLRARGKLGKVALVACMRKLLTIVNARRRDELRAQGGDTLAA

SEQ ID NO: 125514 - protein, 337 aa, unidentified
MIIIGCDFHPSFQLIAMLDTETGATEEHKLMHTSGEAESFYRKLASPAVVGIETVGNDQWFVQLLQKLGHEVRVGDAAQIRASYVRKQKTDRRDAKHILQLLVEGRFPRIWIPDAGMRDHRQLLMHRHKLVQIRTRVKNELQHLMLNQGMQKKQKLWSTEGRAALASLPLEPWTDRRRKDLLNLLAMLDAQLESLDDAVTRVAKEYPGVPLLMSQPGVGAVTALAFVLTLGDVHRFPRGKQVASYLGLVPREHSSGGKQRMGGISKQGNRLLRFLLVEAANIAVRFDPELRKEYLHRCHQKHFTVAKVATARKLAVRMYWMLRTQTPYPQVLSSRVA

SEQ ID NO: 125515 - protein, 476 aa, unidentified
MGDSTTGRQKRKQRGNKRRETGRQGAGGLASMPLLYPDLAGIDIGSRVHYVSVPADRSPDPVRTFGCTTPDLVEMARWLKDCGITHAAMESTGVYWVPVATVLEAEGLQVALVDARESHRLSARKTDVHDCQWIRQLYACGLLRGAFRPASEILPLRSYWRQRQEVVSLCATALHHMHKALELMNLQLHKVVTDIAGATGMRIIRAIVEGQRDPESFLPMVHRACKSAPEEFVKALTGHYAAEHLFALRQALDRYDMYQRQIAELDGELHRATREFASARPRDCGAQEQAQGKPRRGRRKNQCHFDLADEALRMAGVDLTRIEGIDALTAFTIITEQGVDMSPFPTEKHFASHLGLCPDNQITGGRVRKKSTRRVASRAARALRVAAQSLARSKTALGAFYRRIKGRCGAAKAIVATAHKLAKIIYRMLKHGEQYVARGQEEYERQYQERLLKNLARQASRMGCQLVVENSGEVLS

SEQ ID NO: 125516 - protein, 353 aa, unidentified
MRRPKDKLIAGMDLHGNNVVIGVINQDGQRVAHRKVDCELKQVMEFLQPLKSQLQSAAVESTFNWYWLVDGLRQAGYPIDLANPAKIEQYSGMKHADDQHDAFFLAELQRLNILPKAHVYDPQLRPVRDLLRRRTNLVHQRTALLLSFKSLYARTHGESLDLSEAKKMEPKEAPKLYEHPANQLIAQVQAEHMQALEKSISRIEKGVLASAREIPLYEKLLTIPGIGRILGMTITMEVGDIGRFQSDGDFASYCRLVDARRLSNGKCKGDNNQKCGNKYLAWAFVEASNYARRFDEHCRRWYDRKAAKTSKVLATKALGCKLAKAAWHVMVGKCDYDPKRMFPELATKAMKIS

SEQ ID NO: 125517 - protein, 347 aa, unidentified
MHINGQAVLGIDTHKHTHVAVVMDGLGRHLGTLQFPASDDGAAQLLAWSRTHGAPTAAGVEGTGSYGYQLTRSLQAAGISVAEVNRPDRANRRRKGKSDPVDAEAAGRAVLAGQATAVPKNREGAVEALRALTIARNSAVKGTTTASNQIKALLVGAGQDLRDAMHVKSPLQLATRCSQLPAMSGLHAALASLGQRWLQLHDEVLQLDRLIRDLIRRTAPKLIQRPGIGIHSAAQLLITAGGNPERLHSDAVFAALCGASPVQASSGQRQRHRLSRGGDRSANCALWTLANNRMIHDPRTRDFAKKRSQQGDSRNDTLRVLKRYIARETFALIRDALRSEQPITEAA

SEQ ID NO: 125518 - protein, 344 aa, unidentified
MQIAVLGIDLGKNICSVVGLDTAGRVVVRRRLRRESVIKFAAGLAPCIIAMEACCGAHHLGRILRTQSHVVRLMSPEYVRPYVKAYKNDDRDAEAIAEAATRPTMRFVELKSEEHLDMQTLHRARDRLVGERTALINQLRAVLLERGLVIPQGRRKLEQHLAAMLDEGGDVPLSPRVRALVEDMRAEWRELDRRIGEFDDEFAARARTDAVARRLATIPGIGVLNATALIAAIGTGEAFARARDLAAWLGLVPRQATTGGKPRLLGISKRGNKYLRKLLIDGARAALPSLAHAETGLSHWLRALLARAHKNTVVVALAAKLARIVWAVLRSGQSFELRTASAAG

SEQ ID NO: 125519 - protein, 375 aa, unidentified
MNNLTTYVGLDVHKSFISVAVFLPGQKKAIDFKAGTEGKAIRKLSSKLHDLAKGKVEACYEAGCFGFGLKRQLDKLGISCKVIAPSMIPIMPGDRVKTDKRDARKLGRLLKARQLTEVSPPSQEQEAVRSVCRAREQIQKDVISWKHRISKFLLFRGLVYRDGKEWTNAHQQWLRRIQLSEPADQIVFDMYLRGLTESLCMYDEMVANIEELAEIEPYFTAVSYLRCLRGIDTITAFSIVTELFAFFRFENPRALMAYLGVTPAEHSTSGDPKRFGMTKVGNKRIRRLLIQASWHQTKPLRSSARLRNRRSGQPGWVIAIAKKAESRLHRRYWALVKKNKRSVKAIGAVAREMAGFIWALLYQLELDRLEDRKAA

SEQ ID NO: 125520 - protein, 412 aa, unidentified
MKTTVVSSTRYIALDIHKHYAVVAAVDREGEVLLKPRQVTNEQLLDWATAHLFAEDLLVIESTSNAWHVYDLLAPLVAEVKVANPIRIRQIAEARTKTDKRDALILARLLAANLIPEVWVPPVHVRELRQLVSQRRRLVEMHTKVVNRMHSVSHRHHLGHPKGKRFQEKNMSWREQLSEMERFQLDMDLETKQYLKGQINRLTKRLGTLSHQAPWAAQAMYLMQIPGFGVITAMTVMAAIGDISRFETPKHLVSYAGLAPGVEQSGTKKRSKPITKEGRKELRWAMVEVAWRAVRADPVWKRRFEELKRRKHANDAITIIAHQLMIVVWHVLTRQQPYKHYSNERIAYKYLTWSWQLDEDQRRKLTRPQFARYYLMRLGIGDELQRVALDPKHPHRLATVEQIQALFPELRS

SEQ ID NO: 125521 - protein, 403 aa, unidentified
MDFYVGIDVSKFKHTIAIIDQNGEIRKKSFDISNSREGFNLLLNELCLLGEKEQIKIGMEATGHYMNCLARCLISNGYQVQIYNPSLISMFRDSESVNLAKTDNLDAMLIAKYVATHPFTSSPQISYIIEEIRKISRAKYFLFGDKTACYNRLLRYLDEVFPEFVSFFKKNEDGTRKNIGRNLFESPTIRWLLSEYTSPQKMARMRVETGETLRKMSKGSISFNRFNQLRELAKNSIGYSTEVDEQIIRNLVTQVRIIDEEIEMLNELLEPLMEELNSPILTIPGIGINLAAMIIGEIGDIYRFSNPEKLIKFAGLDVKVYQSGTINHKGHIRKRGSPILRYALALSVQKLRIHSPVFSEYYYSKLRQGKATNVAIIATTRKLIRVIWKMMTTNEVFKNIERD

SEQ ID NO: 125522 - protein, 403 aa, unidentified
MTSEPRAVYGGVDTHRDIHVAAALDHTGRLLGTETFPATPAGYRQLHRWLARHGTLAGVGVEGTGSYGLGLARHLADAGVEVVEVNRPNRQTRRRRGKNDTIDAEAAARSALSGDATAVPKSHAGSVESIRVLRIAFRSSRNTRTKVINQLHALVISAPGTLRSDLEELSNEMLVQRCSRFRPGDLTDPVEATKAALRTLARHHQMLTDDIETLRTQLEQLTRSTNPSLCAALGVGSDVASILLITAGDNPERLHSDAAFAALCGVSPIEASSGRVVRHRLNRGGDRQANHALWRIAMVRWSCDPRTKAYIARRRAEGRTNAEILRALKRHIAREIYRLLTNPQPVTSTDDLRPRRLATGTSLRALAQQLGTQPARISELELGTRRPAELEANYRAWLDTHAA

SEQ ID NO: 125523 - protein, 420 aa, unidentified
MQVDQVDQEIIQRIAALDVGKAEVVCCVRVPGPGPSARRMQEVRTFTTMTRSLLSLGDWLAELGVTRVVMEATSDYWRAPFYLLEDRFQTWLVNAKDVKHLPGRPKTDRLDAVWLCKVAERQMLRSSLVPPPAIRELRDLTRYRVDLIGTRTSEKQRVEKLLEDALIKVSVVVSDIFGVSGRAMLAALVAGERDPKVLALMARGSMRSKTGRLEEAFTGRFSEHHAFLLATMLNRVDAITADIATVQARVDTQIAPFGRAVTRLDEITGVGLTTAQTITAEIGVDMSRFPTSAHLVSWARFAPGISESAGRKKGNSGTGHGNRYLARVLGEAAVAASRTDTFLGERYRRIARRRGNKRAVVATGRSILIIIWHLLNDETTRFVDLGSGYYDSRVNLNRKMRNHVRQLQNLGHRVTLEPAA

SEQ ID NO: 125524 - protein, 423 aa, unidentified
MWVAVPGSRDAKPVRRFDAFTRDLYALADWLKQCGIETVAMESTGVYWIPLFQILEERGFEVILVNAKYAKNVAGRKTDMLDCQWLQVLHTYGLLSGSFRPTAEMCVLRSYMRQRQMLIEYAAGHVQHVQKALSQMNLQLEMVISDVVGLTGMRIIRAIVKGERDPHRLAAMRDVRTKNNEETIAKALEGTYQPEHIFSLKQAMELFDFYQQQISDCDQQIADYLRSLESKVNTETNPIKPPRLRKKNRRNTPGFDCRHEAYRISGVDLTQIDGISESAALTILSEIGVDMSRWKAEKNFASWLTLCPNNKITGGKVFHRRTRKSANRVRDLLRICSLSLFNSQSALGAFARRMRSRLGPEKAIVATAHKLALLIYRLLKFGKDYVDIGQEAYEQQFKQRAVKNLARKAKQFGFQLTPSPVTP

SEQ ID NO: 125525 - protein, 356 aa, unidentified
MEKNINETVGCDLGDKMSAVCVLDEGGKVALRTSIGTNSRAMTVFFTRAPVHVVIEVGAHSRWVGELLEGLGHRVTVANPRRVKLISQSDRKTDRNDAELLARLGRADAELLSPIRHRQSQSQADLAVAKARDMLVATRTKLVNHVRGTVKAFGERLPKCSADSFAKKTRALIPVPLKAALDPVYEMLERLHEQIREQDAMIERVAQRYPDVEVVSQIGGVGTLTALVFVLTIEDKTRFEKSRMVGAYLGLCPRKNQSGSGDPQLRITKAGDPFVRRLLVNAANYVLGPFGKDCDLRRWGEAIAKRGGKNAKKRARVAVARKLAVLMHRLWVSGEVYEPLGYGYKVDAPEPAAAAG

SEQ ID NO: 125526 - protein, 434 aa, unidentified
MAKIINFEEIHANAAGIDIGSREIFVSIDGEQVVKFKTFTSDYHSCCKYLKEHGVVSVAMEATGVYWMSLYAMLEGYGIEVCLVHPREVQQVKGRKTDVKDSQWIQKLYSAGLLRESIVAEGDFKELRLLIRERLDLIEMGSTYVNKMQKYLELMNIKLRNVISQIHGVSGLRMIKAILAGERDPEKLVLLCHESIQRKKWDEVIKSLEGNYNESYLMLLKENLRLWEEHQESIKNIERLIEGLLQKMNVNNTHIEVTSPSKPARHHNPKIEGLHQTMVQMYGGVNLTTVAGINDSTMLRLLGEIGNDMSRFPTKKHFISWLGLSPKNKQSGKMKKRLKCPANNAGLIFRQSAQSLSVSKDKAIGVFINRLKGKKGSKVAIKAGARKIAEAFYDSLTKGSDYVEQGAVKYREQQQQRELYVLHKLAKKYNYKIA

SEQ ID NO: 125527 - protein, 345 aa, unidentified
MRHYAGLDVSVQETSICIINETGRVEFERKVTTHPEDLLKVLTNPCYRFVRIGLEAGPLSQWLYSGLADAGLPVVCIETRHTKAFLKAQINKTDRNDARGLAQMMRVNLFRQVHVKTLTSQKHRTLLTARKLLQEKAIALENDMRGLLRNFGLKVGPIGAGKFEERVRELVEGHQELSEITDALLSARRVLREQFSKLHRCLLSIVRSDVVCRRLMTVPGVGPVIALAYRSTIDVPARFGSSKSVGAALGLTPGSTSIRRKQPIGRISLCGDDMLRTLLYEGAQSVMTRSVKWSWLKAWAMNVAKRRGIKKSIIALARRMAVIMHRLWIDGTTFQWTKEALSTSS

SEQ ID NO: 125528 - protein, 366 aa, unidentified
MKKIVKYVGLDVHKDSITIAIADDGRKGTIREYGKISNDMNQLDKVLRKLISQNATLHCAYEAGPCGYNIYRHLARKRIDCTVVAPALIPQKGGVKIKTDRRDAANLAKLHRSGELTAVYVPNQEDEAIRDLVRTRNDISKAVRKLKQQINAFMLRHHRTYHGKSKWSKAHRNWLANMKMDHPAQQVALSEYLDALADNESRRVRITGQMEAFCQTWRLRPVVQALQGMRGINLISAATIICELGDLSRFEQPTKLMAYLGLIPSEHSSGETSKKGPITKTGNTHVRRAFIESAQAYRFPARKSAALRKRQTGLPKEILAISWDAQVRLCHSYRKLRARGKHHNVAITAVARELVGFVWAVAQRVS

SEQ ID NO: 125529 - protein, 315 aa, unidentified
MAMRVSQEKMIIGVDVAKNELVIYHEQYDRLEAIPNTKVAIAKWLKTLAGTSAIAIEATNVYHVLFADMAYEAGCEVYVLDGYQLSSYRKSVNIRAKTDAQDARLLARYLKNEFDELRPWIPPSPLYRQLLSLFRRRAALVQARTGLVQSWANEPLLKTAFANQINSMKRLEALVEKKIRDVLQEAGLMGQVNRCMKVEGIGFLTAARLVTSYQRGEFSGANAFIAFLGLDLRVSKSGQRDGPRRLTKRGDPEARRLLHNAAMSGSRTPAWKPFYEEQRKRGFSTTQALVMLARKMARVVFALLKNQSEYQTKAA

SEQ ID NO: 125530 - protein, 309 aa, unidentified
MKEELVYCGVDIAKSHLDAAIGKEKRCLPNDATGHRQFIKWIKQIEAQVQVICEPSGGYERRLIRALVGAQIKVSLVQANRVRQFARAAGILAKTDTIDARVLCAFGEAMRPQTFSASALEQERLGELESQRRHLTHLLVMEQNRAARVSEVLVRRLNRRLIHQIKKQIEQLDLLIQEHIEASPELSHKASKLTAISGVGERTAALLLAQMPELGQLNRREVAALVGVAPFNRDSGKWRGKRAIFGGRRFVRHGLYMAALVAARHNPILRPFYQRLRVAGKPAKLALTATMRKLLIVLNSALKPQSIYA

SEQ ID NO: 125531 - protein, 487 aa, unidentified
MSRKSKRAHVTPPARHQKAPAAPFRPTSPERFCAQYHDYTGLQVVHPHAAGIDIGGSLSHFVALEIAPETLEVREFGCDTVDLYALRDYLVRYHVTTIALESTGVYWIPVYDILQDAGLEVCLVNPTHVKNVPGRRKDDKLDCRWLLTLHTFGLLSASFRPSKEWLPLRAIWRVRQQLIQMQADELRRMQKCLDEMNLRVHKIISDLAGVTGTAIIQAILSGERDPAVLAQLRDARCRCSEDELQRALTGHYKPELLFLLKLAYERYQHMRAQIAACDAEIEPLLTSLIPMGDADIAAQLTAARSDTRQTATEVRQHLPAYDLQTYLTLLLHGDATKQPGLGPLLVMGIITEVGTDLSRWATEKHFASYTTTAPKHDISGGKILSKHTQKSQQRVAAAFRQAAATVGRTDTALGAFYRRLSSRIGTGKALVATARKIACQFYRFMRYGQAYAEIGAVAYEERYRQNQLRSLEKRAKTLGYQVIPLAA

SEQ ID NO: 125532 - protein, 360 aa, unidentified
MRDVFHLYSQTADGKAVKKKLKRGELLAYIANMPVSLIGMEACGGAHYWAREFTKLGHEVVLLNARFVKGFVVGNKNDFNDAEAIFTAVTRPNKRVIAVKNEAQQDIQMLHRLRQQRIDQRTALVNQIRGLLSERGIVLSQGINQVRKQLPLILEDAENGLTPLSRELFAEQYEQLKALDDDIKTRDSRINRLCQQNALSRRFLEVPGIGPIIATIMASDIGNGKGYTKSRDYAASLGVVPRQHSSGDKQVLLGISKRGNAYLRTLLIHGARSVIKCCHGKSDPLSRWLQALVERRGFNKAAVALANKNARILWAMARLDQPYQAAALIRAGPVYPPFAHSLRAREKGSPSVGTAWLTLI

SEQ ID NO: 125533 - protein, 383 aa, unidentified
MAFLGKRDGTCLKDCWKFSHCLNDYQKLIKGLNPKQTLVGFEATGHYWISLYEFLSKKGFEVVVLNPLQVKSFRDSGIRGSKTDKLDAKLIFNLLLYSDKPLALETYPEKIIELRNLCRLRHKLSQQKTLLTNKVISILDIIFPEYQRVLSPKSLASLSLLRKYPLPGKIATLSLPKLTQILNKGCKGKGRPEEWAKELKEKAGQTIGSKLGLNTFSLEMKIIVQRINQTAKQIKLLDREIKKIFGQLPESKLLLTIPGISDILGATILAEIGDINRFRAKNGGDKIVALAGLDGRVKESGKSAGRTKMSKRGSPDLRWALWQAATVALRCDPALKEVYLKQRAKHKHYYVCVSHVAKKLARIVYSILMNKSSYQPFHPVTRH

SEQ ID NO: 125534 - protein, 355 aa, unidentified
MIIIGVDYHPEFQQIAFLDDETGDFQEKRLAHPAEAEQFYRALAAAGQKVRVGMEASGHARWFERLLAELQFELWIGDAADIQSKRGRKQKTDRQDAQHILKLMLKEDFPQIWVPSWENRDLRQLLWHRHRMVQARTRIMNQLQAVAINEGLRCKKRLWRAGGRQQLESFRLAPWASRRRRDLLELLDRLNPTIAELSQAIEQEAEKCPAARRLMTHPGVGALTALTFVLIIGNAERFQCGKQVAAYLGLVPLEKSSGNRRRLGHITKQGSSLLRFLLVEAAQVTVRSLPEWRSQYFHLLMRRGRKTAKVAMARRLAIRLYWMWRQQLDYQQSTSSVRTQDSSNQAMVCSRTPRN

SEQ ID NO: 125535 - protein, 318 aa, unidentified
MQGRFTVEKMICGVDVSSASLDARIGLDGVYKCFKSTPAGIAALAAFCRDHGVELVVMEATGGYEKAAHKGLYEAGLDVAIVNARSVRHYAESLNYFEKTDKIDAGVIADYGRIKKLVAHAPASPAQEELTALATQLRQIIDTRTSMKNQTRLVESQAVLQSQQRLIQVLNAEIDHIEGLIFERIKQDDTWSRLTESLTTIKGVAERTVAYLLAYLPELGTLSAKTIAKLVGLAPIAKDSGKSQGKRHIRGGRVQIRSPLVFIASIAGRYDPALKAFRQRLLDAGKPKMVVRTAVARKLLVILNAKARDIRAEIKILA

SEQ ID NO: 125536 - protein, 435 aa, unidentified
MNTPNIPESEIAAWVGLDWADQQHVICLQAADSAAVETSVVKQRPEAIQAWVAQLQARFPQGKVAIALEQSRGMVLYALMAYEGLVLYPIPPKTLAKYREAFHSSGAKGDLSDAALLLDLVRRHREHFQAWVPDDPSSRQLRLLVEERRKLVAQKTRLTNELTSRLKSYFPQALDWVGELDTRLACDFLQRWPRLDSLQKARPAQLEQFYRRHHCYRSALIQQRLEQIRQAQPLTRDPAVIAATSLMVQALVRLLGPLLESILQFDQQIEALFAQHPDQALWASFPGAGPVLAPRLQAAFGSDRARFQQALELQQLSGIAPITQQSGKSRHVERRWARPKFLHQTFYEYAAQSRLACGWARAYYEQQRARGSKHPAAVRALAYKWIRLLFRCWQNRVPYNEETYLKALARHNPALRLAAEAAQSQMAKKKEKKAA

SEQ ID NO: 125537 - protein, 355 aa, unidentified
MNDAKYIGMDVHQATISVAVRDSRGNLVMEAILETKADTILEFIHGLRGSLSVTFEEGTWAAWLHDLLQPHVARVLASDPRKNALLKAGNKSDRIDARKLSELLYLNKLSPVYHGEQGIRTLKELARSYITITRDLTRVMSRLKAIYRGWGIPCAGQQVYAPRYRAEWLSKISEAGVRRRAELYYQQFDVLAALRQGTRRELLAEARKHPAMRLLRQIPAIGPIRAALLIALIQTPNRFRTKRQLWAYSGLALRTYTSGEYRFVAGQLKRSKKVLAVRGLNINHNHDLKNIFKGAATRAAATAGPLQGFYQACVARGVKPHLARLTLARKIASITLLVWKKGARFDAEHLKQQAA

SEQ ID NO: 125538 - protein, 328 aa, unidentified
MMNIIIGIDVSKTKIDCAWLRDLETGKVKTKVLKNNADGFKSLINWAEVNIQRPLSTIRFVMEATGIYHEALAYALHAAGADVCVVNPAYIHDYAKSLGTRSKTDKKDSVTIARFGATHSLKAWQPEANEIRHLKALITRHEAIEKDLQRENNRLEKAEITQISVEVINSINTVIKALTKEKDQIRKLIDEHIDQHPTLKQDATLLKSIPGVGPVIAQRMIALIHSRQFISAKQCSAFIGLNPVIRESGTSVRGRSHLSKMGDAKIRAKLYMAAVVAIQHNPDIKQQYERLLQNGKSKMVALGAAMRKLVQICFGVLKHQTPYQPQVV

SEQ ID NO: 125539 - protein, 429 aa, unidentified
MNYTQNKKIMQVKVSTLVVGVDIAKNKHAARAFNFRGIEYDKAFFFGNNEAGFKKLLHWIKKVSEKENKTDVIVGMEPTSHYWLPLEEYLRRKTDFLRVVVNPAHVKKSKSLDDNSPTKTDRKDAKVIAKLVIDGRYSVPHMPEKEYADLRVAMTHRERLVKDIINLSNKIQQLIDKYFPEYSTVFKKWDGKASVAVLKELFLPELILEKTEEEIVEVFKKGANRAVGIKRARKLKKAALNSIGIREGGEFTRFELRNLLEQYELLNKQKELLEEKVEELLENMEEAKYMESINGVGLITVAGFIAEVGNIKDYDHPKQIQKLAGLNLKEHSSGEHLGQTRITKRGRPKLRALLYRVMMPMLANNQEFKQLHEYYTTRRDNPLKPKQSMIALACKLIRIFYALGQKHVKYDGEKLMNDIERNLDLQEVA

SEQ ID NO: 125540 - protein, 348 aa, unidentified
MHTTVGVDFAKNCFQVVEADAQYRLIGRKRLTRTQFSRWMGTYPPCRVVMEACGTAHYWARVLKGYGHQVTLLPAQHVRAYVRRNKTDAADAAALIEASRSGEIRSVEVKSVEQQVLQQLHRVRTQWQAARVARINSLRGMLREFGIDVPLGAVRGIAIIREALEAGDNGLPDALRPFIAQLLREIDEFAERMKEVERSLVGLSTEDATVQRLRTIPGVGLIVSTALRAAVGDIHRFRTGRHLSCWLGLTAREHSSGEKRRLGPISKQGDVYLRTQLTHGARAALLAAKNAAGKGRELDRLRRWALGTEKRVGHNKATITLANKLARIVWATWKHDRTFEGNWSTRTA

SEQ ID NO: 125541 - protein, 350 aa, unidentified
MKLHAIGIDLGKTVFHLVGLNQAGEVQVRKKFSRTQLLRFTANVRVDVIGMEACAGSHFLGKALREQGHEARLMPAQYVKPFVKTNKSDFIDAEAIAEAVIRPRMRFVPIKTDEQLDMQSLHRVRERWIMRRTSVVNQIRGLLLERGITVRTGRCHLDAALPNILEDGLTSLSGTVSFLLVELKRELEQLAEHIEQAEILIQRAAQQSEACRRLDAIPGIGPLTATALIAAIGNGGAFRKGREFAAWVGLVPREHSTGGKQKLLGISKRGNSYLRKLFVQGARAVLKYRDKQCSGLKHWLAELSSRSHYNIVGVALANKLARMAWAVLASGDSYRSPAQAGTTGLQMAAV

SEQ ID NO: 125542 - protein, 350 aa, unidentified
MLYTGIDYHKSFSYLTTMNDKGEIINQKKLPSNGEIVDFLKEFDEEMEVAVEATPSWYWLYDHLDNEGFDVKLSHPLKTKAIAFARVKTDKVDSATLAHLLRSDLLPLSYVPEKAVRLNRELLRYRASLVKIQTGVKNKIHTILAKNNISHSYTDLFSKAGMAFLHSLALAENYKIALEGYLTVLDSVRQEIRAASKKVRQLAEKDPDTLLLMTIPGMGYYSALLTKSEIGDVRRFRSAKQLCNYAGLVPSTYASGNTCFHGHITKQGCRWLRWILVEASIHAVKRPGVLRRFYFKIERKKGGQIAKVATARKLLEWIYHILRDSKTYPEMEEIADLLGRSELGNSSGRA

SEQ ID NO: 125543 - protein, 406 aa, unidentified
MNQNTCITIDVSQNKSHIQGFIGPNKPLSKARTMRNTKQGFQFILILKNLIESKTNETPLIVFEFTGIYHKPLEKFLISQNLKYHIVAPLKAAKARNSEIRKQKTDARDCLSLSKLFYSNNLGIFYSENETYSNLRKLNRYYDTCMKHLIKIKVNFRETLAVVYPNYKKLFSSIYSDDSLTFLKEFPHPSLYTSKLEDRIIEILKNKWDHLESWTSSKVKILTPLINEVVSGCNVTEPDIIMLLSYISQIEYYLNQIEITVSQMNELAKKVPLYNLVHSLPGIQDILTCKFIAEVGDISRFSNYKQIVAYAGIDPMIRQSGDKDGLHLKMSKKGNKRLRTILHLMVSSLIKANREPNAIKDKYQKKTHQLNPLKPKVASMACANQLVRIIFYMHKTSSTYTYHECK

SEQ ID NO: 125544 - protein, 335 aa, unidentified
MIGIDRHKRTHTAAAVEQATGELLGELTRPARERGQGELVRWGRSLGEERLWALEDCRHVSGRLERFLLACGERVVRVPARLMAGLRRSARSRGKSDAIDALAVARAALREPCLPAAQLEGRSREIRLLCDHRDHLVDERTRIQQRLRWHLHELCPELEVPAGALDRRVWLQRIARRLARAQQLTQVRIARELVRRIGELTRRADELELELVGCGTLTAAKLIGETAGVARFASDARLAMHAGAAPLDASSGEQCRHRLNRSGNRQLNCALHRLAVNQGRWHPGAAAYLARKQAEGKSRREALRCLKRHLARVVYKILVNVTQPTAAPATTLALT

SEQ ID NO: 125545 - protein, 387 aa, unidentified
MRVAAHRAEAPSAICVDLGAIFVSLELSRSKWLITSLSPGGGEKMSKHMVAGGDVAGMLSCFAELKRKAQARTGRCLPIIVIQEAGLDGFWIHRVLQAEGIESHVVDPASIATSRRRRRAKTDKLDGEALLRALLAYKRGEPRVCAMLRAPTPEEEDRRRIVRERKALTNERIRHVNRVKGLLFGQGVSGYEPLRSDRRKRLEELETGDGRSLSPNLKAQISRELDRIELLLTHIKDVEEARDTMLESAQAVAPAPKLLLNLKGIGPEFAAVLWSEGLSRHFDNRRQVAAYAGLAPTPWQSGIVDHEQGVSKSGNPRLRSMLIELSWLWVRHQPQSALTIWFKERVKQNGGRFKKSTIVALARKLLIAIWKYVNAGVVIEGAALKAA

SEQ ID NO: 125546 - protein, 385 aa, unidentified
MKNTIVHHEGAASLEVAGKKIKLSGSIIKIGLDVHARTYVAVAQYDQLLPKPARRLAPREFVPWVEALLRAGHTVYVVYEACGFGFNLYRQLKRAGAHCYVIAPRKLDEQSTGVKTDPRDATTLCQRLSRYVDGNTRELAVIRVPTEAEEQARHVSRQREQLVRLRLKLEAQGRSLLVSHNLSSPAHWWKNQTWSRLVRLLPSWIRLRLQVHRPALLALQQQIDALSGELEAAAPADVPAGLGKLTTVVMTREICSWERFTNRRAISSYTGLCPGERTSGTKRVPGSVTKRGNPRLRAALVECAWRMVRFQPNYPPVKQRLAILAKGARATGAQRKKAIVAVARHLAVDLWRIHTARCSAAQLGLHNAETLLVRGEQKAELNLLA

SEQ ID NO: 125547 - protein, 365 aa, unidentified
MQKISTIRMNGKNIFKGHLTIGLDLGDRSSYYCVLDEAGEILLEQKLPTTPEAMKQTFERMPRSRMAMETGTHSPWVSRLLTALGHEVIVAHAQKVRLIVKSRRKDDRLDARTLARLARIDPELLSPVQHRSAQAQLHLTEIRARAGLVSARTALVNATRGLVKSYGERLRKCGTQQVRRESTSGLSAGLREALEPLLREVESLNERIQEYDRRIEKMAKETYPETTLLKQVKGVGDLIATAYVLTIEDPHRFRKSRDAGCFVGLQPGRRNSGESEPQMHISKEGDEYLRTLLVQGAHYILGPFGEDSDLRRWGQKLAARGGKNAKKRAVVAVARKLAVLLHRLWVSGEVYEPLRNSQKAMNAAA

SEQ ID NO: 125548 - protein, 422 aa, unidentified
MNAQPLDSFSAIVGIDWGDTKHDICIQASARSDREFEVIAHRVDVIDRWAKALHQRFGGTIAVALELSKGPIVSVLQKYDFLVIFPINPSTLATYRKALKPSRAKDDPTDAELALNILVSHPDHFEPLRPQSVRLRTLATLVEQRRQLVADKVRLTNRIRSSLKQYYPQVLEWFDDIDTVLFCEFLARWPTLVQAKRARPNTLRAFFNAHNMRFEAVLLTRISAIKAATPLTSDEAVIVPHRMLTLVMVEQLRGLLKAIKEFDAQIADLADGHADYGLFRALPGAGPTLAPRLLVAFGEQRERFKHAEDVQKYAGIAPVRERSGQKDWVHWRWQCPKFLRQTFVEWAAQTVTKSFWAGEFYRQQRDKGCTHQATVRALAFKWIRIVYRCWQTRTQYDESTYPKALERRGSTLLARQPELKSA

SEQ ID NO: 125549 - protein, 339 aa, unidentified
MSEYARIGVDTSKSVFTLRCVDGSGGVVKRRELKRGQFAGFFERLSPCEVVLEACGGSHHWARRLAGFGHRVKLIPPQYVKPFVKRGKNDRADAEAICVAAAQPGMRFVPVKSAAGQAAALTLKLRGLLVAERTRLVNALRGHAGEFGVVAGVGVGRVSALLEKIASDPAVPGAAKEMLAELGEEIARLEARIEALEARVVAEHKANPVSVRLAAVPGIGPIGALSLALEVEAAAFASGRHFAAWLGLTPRDRSTGGKRRLGGISRAGHARLRQLLVLGATAVIRTAKPGGRNATAWLLDLLGRKPRKLAAVALANKMARIVWAMMARGEEYRRSPVAA

SEQ ID NO: 125550 - protein, 355 aa, unidentified
MNAIKYIGMDVHLATISIAVLDSKGKLVMEVTIATQAGALLDLIRGLSGTLHVTFEEGTSAHWLYTVLEPHVAKVVVCDPRQNPRRLGEKKSDRLDARKLAEGLRMGSLKPVYHGNALVPALKELVRSYRTLVSDTTRVMNRLKALYRGRGIGCAGTRVYSPRFRNQWREQLQEPGVRGRADLLYKQLDLLLPLRQEARAAMLAESRKHPAHKILCSIPALGPVRVAVLMALMQTPHRFRGKRQLWTYAGLALVTRTSADYQMVDGQVTRTRKPALVLGLNANHNHTLKGIFKDAAASALAHPGPFKDFYTTRVAQGMKPELARLTLARKIAAITLTLWKKGERFNAEHVKTQAA

SEQ ID NO: 125551 - protein, 363 aa, unidentified
MTRAMIAVLGIDLGKSSCSLVGLDAEGAVVLRKRMRRETVIAFATKLPACVVAMEACCGAHHLGRLLAGLGHEVRLMSPEYVRPYVKAQKNDNRDAEAIAEAATRPTMRFVELKREEQLDLQTLHRVRDRLVGLRTMLTNQLRAILLERGLVFPKGRRKLELAIDALLLEAQPALGVRMQKLIGDLREEWRGIDQRIGSLDTEFVARARADSATRRLMTIPGVGTLTATALVAAVDDAAAFRRARDLPAWLGLVPRQHTTGGKPKLLGISRRGNSYLRRLFIHGAPIGTAHPVEGRHANQRVAQDSAVPGPCQCRGGGACRQDGADRLGDAAAVNRVHARARAGDDRIGGAAQVSGLARAVAG

SEQ ID NO: 125552 - protein, 435 aa, unidentified
MDANYANRLRWFRQFKECINASTNTLIVGIDIGKDKHHAFLGTPAGRTIHRRLIFENSFEGFANLLFYIKRYVCAEKLADVVIGVEPTSVYHKPLSEYLITLGYYVVYVTNSAIKKNRAILDGRWDKNDTKDAANVADLVSRGRCHFYDLPDMNLRDIRSLLSLRKRLKKQEHRLITRIRNNLVAQYFPELDRAWYSCQQENLAIVRFCLSPQKVAQLSFDDFCRMVTRRRRGLRQYKRLRHIHEVAEQSIGCQLGSSVVFEAQLLVESLEQARQQVHEVEEHLYGICESYKEYELLQTIPGFGPFVSAAVLGAIGFAQRFENAKQLVRLAGLDLNALRSGKRSQTAVPVISKAGKADLRYALYQAAKVATSLTAEFKAYFKRLLKGREKEKGIKTKMRVKVSAKMLVIAWTLMKTQQPYKAGLLVIDEPVQRPS

SEQ ID NO: 125553 - protein, 402 aa, unidentified
MTSIGIDVSKGKSTVCILRPYGEVIASPYEVQHCEPEIQKLISCIKAIDGEVRIVMEATGAYHLPLLSSLKDAGLFVSVINPLAMKRYASSSIRKGKTDKMDSVRIANYGIDNWFKLTDYTLPDEIYAQLRLLGRQYAHYITIRIESKLALTDLLDRTMPGIKTLLSGKRSDEPTKDKLCDFVAEYWHFDNITKKSEAQFIRSYCSWAKKKGHHASESKAKAIYALACDGIPTLPSSAASTKMLTLEAVRVLREVNKTLETILTQMQELAITLPEYNTVRAMNGVGDVLAPRLIAEIGDVRRFHSGNALIAFAGIDSPPFQSGSFTGTRRKISKRGSSLLRKTGYEVMKCLKTVKPDQDNAVYLYMLKKEAEGKPKKVAKIAALNKFLRIYYARVSEVYAIG

SEQ ID NO: 125554 - protein, 352 aa, unidentified
MTVTIVETRVQAGAITGGVDTHADVHVAAALDPVGGLLGVQEFPATPAGYAQLLGWLGGFGTVCLVGIEGTGSYGAGLARHIAAAGVRVVEVDRADRQDRRRQGKSDPLDAVSAARAALSGRAAGAPKGRDGAVEAIRALMVAKRTARAERVQTINQARALVLTGPDDIRARFAGHATEALVAELAALRPRPGSMVRYHTLLSLRELGRRAQFLDQQLGRLDELIAPLVTARAPGLLARYGIGPHTAAMLLIAAGDHPGRLRSEAAWAHLCAAAPIPASSGKVKRHRLNPYGDRQANHALWQIVITRMSSHPPTRAYVARRSKEGLSKKEIIRCLKRYVAREVYPHLRPGAG

SEQ ID NO: 125555 - protein, 414 aa, unidentified
MDVLVERCAGLDVHRDTVVATVRFPAESGGRKQREQQTRTFATTTAGITALGDWLAGHRITRVGLESTGVYWKPVYYLLEDTFEVWLLNAEHLHNVPGRKTDVADSAWIARMVEHGLVRPSFVPPPPIRELRDLTRHRRTLVEERTRVVQRLEKVLQDAGVKLTSVASALLTKSGRAILDALLAGEQDPQTLAELAKGLLRAKIPALREALAGRFRTDHHGLLVAQMLAHIDFLDAAIVELDQRLDRLVVPFQPILNRVATIPGVAQRTAIMLLAECGADMSVFPTAAHLASWAGICPGNNASGGKSRSGHTRHGSIALRTALTEAAHAASRTKGTYLAAHHAQIRGRRGLPKAIGATRHDILIAYWHIVHDNVDYQELGPDWASRRLGKEQRTRKLIAQLEALGHTVNLNPAA

SEQ ID NO: 125556 - protein, 389 aa, unidentified
MYFVGIDIAKYKHDCCIINDNHRVVKTSFTFKNDQNGFNELLKVLNRFKSKGKIKIGFESTGHYATNLKVFLSQNKFTFMEFNSLLLHKFIETQSLRRLKTDKVDCEYIANYLTTVEYKPYPSRFYHIYSLKSLVRLYDAMVRNRSLYIVRLTNLLDHIFPEFKPFFNDRLGETALYILNKFPSLDKISNMSDDEFENIHNISRGRFSSNQFHKLKTLASHSVGNSNEFFEIELKSLIAIYHECDSQVNILKKNVEKAINKLKPHILTIPGIGAITAATIYAEIGNFKSFSSANKIVAFAGLEPAFYQSGTSEQNGRMVKHGSSLLRYAIMNATLPLINFCPKFSKYYLKKRSEGKSHYVALSHLAKKLIRVMFTLETKGIDYNSKLLT

SEQ ID NO: 125557 - protein, 341 aa, unidentified
MSNSNTYIGVDLHKKTCYVTVMDSSGKIKKQREISTDVKDVSRFFKRYADIPVAVESTMNWIPFYENLEGLGCKVFLSNPLQTKAIASARIKNDKVDSKILADLLRTNLLPTAYIQPRKIRDLKELVRERASFVEMRTKIKNKIHSVLFKTRHRHNFASLYGIAGMEWLKNIELRDIYRQELDRYIETLKHLNKQVDKISKIIEKTAKLDFDCKLLMTIPGISYYSALMIKSEIGDISRFRNANKLCSYAGLIPSTYASADKIRTGRITKRGSKWLRKTLIDAITSGSKNHNRIAAFYKKLKKSKGTGKAKVAAARKLCSIVFAMLNDQVPFQNFAPIKQR

SEQ ID NO: 125558 - protein, 319 aa, unidentified
MAKQTIEYEQVIERGCGLDVHRDTVVATVMGKGLQTETRTFGTTTSSLKELGEWLEHLQVTDGAMESTGVYWKPVLHVLREYPINLLVVNARHIKNVPGRKTDKADSQWICKLLISGLLKGSFIPPENIQALRDIHRYKKKLVGTVASEKNRIIRVLEDANIKLSSVVSDTSGVTATYLINGLIEGRKDLEKLVSECYHKKLQATPEQIVEAIKGRLTPHLMFLLKSMQKHIQSVEEQIAEIDAEIEKHIKDFEKEIELLQTIPGVGKEGAIGIVAEIGVDMEVFPSEHHLASHSGMCPGNNETAGKKKVQEHDRETNT

SEQ ID NO: 125559 - protein, 338 aa, unidentified
MKQYAGIDVSLECSSVCVVDANGKILREAKVASEPVSLIAWFRSSGFELERIGLEAGPLSQWLFAAMRQAGLAVELLETRHVRKAFEAMPVKSDRNDARGIAQLMRLGWFRPVHCKSMSAQETRTLLTARKLVQSKLQDVENSLRGFGLKVGKTTGLGFAGRIEELVAGHPHLQVVTRALLSVRAVLRSEFAAFEKQTRKMAQSDARTRLLMSTPAVGPIVALTYVSAIDDPARFTSSKQAGAHFGLTPKKYQSGETDYTGRISKIGDSSVRTALYEAAHIMLTKPLKGCTQLKSWAMRIARRAGMSKAKVALARRLAVIMHRMLADRTPFNPDAAVT

SEQ ID NO: 125560 - protein, 338 aa, unidentified
MDNYIGMDAHSSICVFSIVDANGKEVNQAKIATNGQLLVEYIRSIEGSKKLVFEECELSAWLFETLRGEVDELIVCNPTRNQQYKKAKTDKLDAQNLARLLRGGFLTPVYHDGSKTEHLRALMSGYQDIVDTGVSIKNRYKSLFRKAGLPARGAGLYDDSSLLENLSRPDQRFIGRGFYRLLETLEKEREQYIVAIRKSSRAFPEIRLLKAIPGIGDIQAAKIVSQVISAQRFRDKHKFWSYCGLVRHRMESGGHIYGSKRSRGNRILKCVFKMAAQTVVRGENEFRAYYDELRLKGTSDRAAKNAVSRKLAAISLSILKTLRPYDETRIMPQTEQAG

SEQ ID NO: 125561 - protein, 356 aa, unidentified
MDDNHHGIVGGVDTHKDIHFAAVVDTYDRVLASNSFPTTRQGYKSMLTWMQSFGEVRRIGIECTGTYGAGLLRYLQQFDVEILEVTSPDKMDRRRRGKNDAIDAENAAHAAFAGIRTVTPKTRDGMVESLRVLKVCRKTAIAARRIALQMIQMNIISAPESIREPLRAMTRMQLIRTLVTWRPDLGGYRNISTAYKIAVKSLARRYLEFHDEIADLDVMISAIVDELAPDLIAGKAIGYESAAQLLITAGDNPDRLKSEASFAALCGVNPIPASSGKINRHRLNRGGDRAANSALHIIAIGRLRTDNKTKEYVDKRVTQGHTKLEALRCLKRYIAREVYYILKKRNNLINSTQIAA

SEQ ID NO: 125562 - protein, 414 aa, unidentified
MATVFCGIDWAEDHHDVALVDAEGKLIAKRRIGDDAAGFAALIELFAQAGDTAQDPVPVAIETSRGLLVACLRSGGRAVFAINPLAVSRYRDRHSVARKKSDAGDALVLANILRTDAAVHRTLPADSELAQAIAVLARAQQDAVWDRTCAHNKLRSLLREYNPALLTAFADKRGGLLRPEARLLLAAASTPREAARLTATQLRALLKRAGRQRGLDTEAARIQAVLGSNQLHHPPLVEQAYGRQAVALLRQLDAACLGAQELAEAATALFATHPDAGIVTSLPGLGPLTGARVLAEIGDDRTRFADARALKAFAGSAPVTRASGKSRHVMHRRVKNQRLASVGYLWAFAALNASPGARAHYDRRRTSGERHVAAQRNLFNRLIGVLHHCLQTGQHYNENIAFATAIDPPDQVAA

SEQ ID NO: 125563 - protein, 409 aa, unidentified
MDLYCGIDWAEGHHDIAIIDSAGELLAKRRITDDAAGYRDLMELLADHGDTPQDPVPVAIETSQGLLVAALRAGARKIYAVNPLSAARYRDRHGVSKKKSDPGDALVLANILRTDAHAHRPLPADTEQARAITVLARAQQDAVWARQQTANQLRSVLRQFYPALLQAGAIWQNGLTRPEIRELLRIAPTPGTGARLSTARIETALRRAGRSRGITAQAQRIKTIFRGDHARQPQAVEDAMGQQAAGLLLLLDAACQAVDQLGAAVEEAFLTHPDAQILLSFPGIGNQLGARLLAEIGDDRQRFADARALKAYAGSAPITRASGKKKFVGRRFVKNDRLSTVGYMWALSALTGSPGAKAHYKRRRAAGDWHAAAQRNLFNRLLGQLHHCLTTNTQFDETTAFTPPAELAA

SEQ ID NO: 125564 - protein, 312 aa, unidentified
MSKKTLDIAIPQADGQYLHKKIGNDPSGFDKIFPLLPEDCCIVMEATSSYYMPFAYYLHSRQIKVSIVNPLTVNHFSKMRMSRAKTDKKDAAMIAEFGRSETPRLWVPKASHLIALQQMEGILDNLTRHRTSLNNQKEAFVSSGQTTEEVCAILDKQIENTSAEIKVIEDKMYDIGEAHHAELLTNLRSIPSIGKRTALLLLIITDGFTKFDNAKELVSYVGLCPRLYESGTSVKGKARICKMGMGRMRQLLYLCAMSAIKVNAMCKTMYERLKQRGKNGKLALVAVASKLLRQTFAVGVGNIPYNTKIKAT

SEQ ID NO: 125565 - protein, 315 aa, unidentified
MAEQVVVGIDVSKAKLDVAILPSGEQFTVSNARPGVGQLVQRLTQLGPIRVVLEATGKLEHLAASELAAAGLPVAVVNPGQVRHYAKARGKRAKTDKIDARLIAEFARDLQPEIHPLPDAQTQALAALCQRRNQLLEMQQMENNRLERAPRASQKSIKAVVRFLKRQVEQVEKEIDESIKKSPIWQAKRKLLETVPSIAQVSSSTLLARLPELGQFSRQKICALVGVAPYEDDSGEWHGRRHIAGGRARVRQVLYMAALSAVQYNPVLRDYYQRLLARGVEKKAALIAVVRKMLTILNAMVRDNTPWRPPCPTPA

SEQ ID NO: 125566 - protein, 407 aa, unidentified
MRRYIGLDLHKAYVHGYVWQEGTDNKGRHLRFPSDRDGWAKFIKAHVDRDTWIAIEATGSAFHVHDILAPYAGKVVVVNSHQLKRYGDGRHSDKLDAERLAHMLALGTVKPVWVPPEEVRALRSLLYYRQRLVGERTRTINRARAILREAGFSIPRSLDPWRVVREKNLELSRTQLVILHSLGRQREHLENEIDNVTGMVYWSLADNNTARRLISLPGVGPIVAAALIAHIGDAKRFKRAKQVVRYAGLDASIHQSGEQDRRGRISKNGPPLLRSLLVQAAFQIVRTGNGPLAAFYQRKVKQIGTKRAIVAPARKLLVAAWRLMQSERLAHEVNLSAYRRALRELERVPSSKEVLMEAALSPRKRTQPGSTNPVQNTRAQRVGLPCKTVALFPTNNQRRSRLDFHHR

SEQ ID NO: 125567 - protein, 404 aa, unidentified
MEDGMISVGIDVSKGKSTVCILKPYGEIVSSPFEVAHTEAGLKSLVEKLRGLGGKAKVIMEATGVYHLPVFSYLHDKGIFVAVINPLEMKRYANKGIRRVKTDKKDAVTIANYGIDNWFHLQQCKCSDETYTELKFLGRRYAHYMHLHVAALQELTHILDRTMPGIKKHLQSWNEASRKDKLGDFVEKYWHYDNITSKSQEEFSAEYMEWAKEKGYRQDTAKADAIYASAAAGITTLDSSTPSTKMSVQEAVRTLNTINNVLNEILTRMKDLAKTLPEYSVVRSMGGVGEVLAPKLIAEIGDVRRFHSGKALVAYAGIDAPPYQSGQFYGTNRKISKRGSCLLRKIGFETMRVLKSHKEPHDAAVYRFIIKKEAEGKPKKVAKIAGLNKFLHIYYARVMEVYKS

SEQ ID NO: 125568 - protein, 407 aa, unidentified
MEVVYRCCCGIDVHKKVIVACLVNGGKQELREFGTTTSEIKTLANWLTESGCEMIAMESTGVFWKPLYNLFELMDLDAMIVNAAHMKALPGRKTDVKDAEWIADLLRHGLLKASYIPNREQRELREITRYRKSLTEERCREVNRLQKILEGANIKLDSVVKDITGKSARKLLQRIIDDDIPDSDEVSKLVHGRMRPKLDQIVASIEGITTLLQRKLLAQIIDHIDDLNRRIGELDKLVQEYMAEYEAAIEAIDEIPGIARRSAEVILAEIGLDMGRFPSAAHLCSWAGVCPGNYQSAGRRKHGKTTKGNKALKTILTQCAKSAKTVKSSYFFAQYQRISARRGKNRATLAVAHSMLIAIYHILKNKTAFHDLGSDYYDSFNRDRKISSYLKRLKALGWEPDAIPSSA

SEQ ID NO: 125569 - protein, 392 aa, unidentified
MVVSVGIDVSKDKHDCFIVSSEGEVLADAFIIPNTMDGFHYLLQRIRHCTAPQDKIKVGLEATGHYSYNLLGFLLDNGLATYVLNPLRTNLYRKSLSLRKTKTDRVDARTIASMLLSDAGLKPYTDTAYHNEELKSLTRYRFDKVKERAKLKSSVSRLVCILFPEMEKLVSTLHTASVYTLLEEFPGAKQVARAHLTRLKSLLETASKGRYKRDMALEIREAARNSIGSRMPAKSLELQHTIRLIRELDREIDEIEEQIQSIMDELHSPITTIPGLGFRMAAMILAEVGDFTRFDSPDKLLAYAGMSPSTYQSGQLKNCYPHMEKRGSRYLRYALYNATKYVCHWDPAFADYLAKKRAEGKHYNIAISHAAKKLVRLIFAMEKSRQPYCSAA

SEQ ID NO: 125570 - protein, 402 aa, unidentified
MDGNRRYAGIDWAKERHAVCVVDGQGRAVARFEVGHTDAGLRELVRALAGVEGVAIERPDGPVVEALLGADLPVVVIASRHVKALRARHGLAGNKDDRADAYILADALRTDGHRLRPLRPDAPETVALRAGVRARKDLVRHRTALAQQLAAHLALAFPGAVDLFDELASPIARAFLRRFPCPERAAWLSPKRFDHWLAAQGYSGRRSGAELHARLAAAPPGVRGPSADALAGVTLALVAAVAAIDEEAKALEARIVEQLGRHPDRAIFTSLPRAGRVRAAALLAEIGDRRERFPTPESLACLAGVTPSTRQSGQHRAVSFRWTCDKKMRDALIDFAQDSRRANPWAEDLYRRARARGKSHPHAVRILARAWVYVIWRCWQDRVPYDPARHHALQRVILAPAA

SEQ ID NO: 125571 - protein, 339 aa, unidentified
MTIVMGLDQHRGQITGEWIDTETGEVRCTRVTPADREHVRRWLSRFDGRELEVALEATTGWRFVVEELRRVGAIVHLAEPAETADLRGSKKRAKSDRADARHLRELLMLKRLPESWIPPEHVLDLRGRVRLRHTLSEQRGEWQQRIQASLYHHGCPQRRQLMTGEGREWLAAQPLPAAAREQITVATLMIDALDRQLAPLDKELRAYARRQVGCKALMAHYGIGELTAVTILAELGDCTRFSSSRQAVRYAGLDITVYQSDRRRAPGHISRQGPPALRWALYEAAQVARRGERSPDRAYYLEAKERVGGNRACLSVARKLLKRSYHTLRELGEEALAPA

SEQ ID NO: 125572 - protein, 405 aa, unidentified
MKIIALDVHRTFAQVAILENGKIRDAGRLELEREHILKFAERLNVEDEIVLEATVNTKAIVRLLSPRVNRVVISNPLLVGAIAWAKVKTDKIDASVLAKLHASGFLPEVWMPDEETERLRRVVAERVQLVSQMTRLKNRIHSVLHANLIPPFSGSLFSKRGRAWLEALPVAEDQQRVILRHASELDRLGHDLKQIDEDLAQAALQEPRVKQLMTITGVNMIVALSVLAAVGDIGRFSSPEKLVSYFGLNPRVRQSGDKPAYHGRITKQGRSHARAMLVEAAWSVSRTPGPLRAFFQRIKEKRGNQVAAVATARKLTVVIWHMLSKGEEYIWSRPALLDWKLRKLELAAGYPSKRGGRTKGSAADYSLKSVRDREREAVGHAEEVYRRFVTKWKQRSPMADPVSHQ

SEQ ID NO: 125573 - protein, 376 aa, unidentified
MERGSLMLNTTTFVGLDVHARSIKAVALDAMTGEVRSATFGYDAAEVAGWVSSVDPSAKCVYESGATGFDLQKRLSSMGIDCVVGAVSKMIKPPADRKRKNDRNDAEFLARMLSVGNVVEVWVPDDGCEAARDLSRALDDAREDLKRRKQRLSKFLLRHGYVFSETTPTGRRKGSWTAAHWAWIKSISFPEKADDDVLACYVDAVRQAMEDKARLERLVEAEASKPRWKRRIDSIRCLKGIDVTSAADLVFEAGEFSRFKNARSFAAWIGLTPSEHSSGESVRQGGITKAGNKHLRRVLVESAWHYLGCSPHSKDLAKGQVPDPAARRHAAKGVRRLVERRRAMLERGVHKNKANVATARELACWCWAVGRMIENG

SEQ ID NO: 125574 - protein, 386 aa, unidentified
MNVGADKPLTAIRTDLGAIFVSLELSRSSWLITSLSPGGGEKMSKHSVHGGDFAGLMERLAQLQEKARLRTGQSFRIIVVQEAGLDGFWIHRALQNEGIESHVVDAASIATSRRRRRAKTDKIDGETLVRALLAYKRGEPRVCAMVKAPTPGEEDRRHLCRERKALTAERVRHVNRIKGFLYSQGISGYQPLRRDRRQRLEELQTGDGRAFPQHLKALVNRELDRLELLLRQIKTVEAARDALLAVGQTAKPAPAAMLLDIRGIGPEFAAVLWSEGLFRHFENRRQIAAYAGLAPTPWQSGAVDREQGVSKAGNPRLRTTLIQLAWLWLRNQPRSALSVWFHERVSRHGGRLRKTTIVALARKLLIALWKYVTAGVVIDGVTMKVA

SEQ ID NO: 125575 - protein, 475 aa, unidentified
MNLKGTKKKNQVSNANIFEQQELLKKIEVVRENLTASTWHELETKGKFDKNAKLSFICDDMLILGCDVGNETHYLRAIDTRGRELSKSAFSFSNNVDGFSKAKEWAVKIAAEYDKKQIVLGLEPTGHYWFCLATWMISNGISVVQVNPYAVNQTKELEDNSQLKDDTKDPKLIANLVKDGNFGMPYLPEQLYADLRRLSMFRDQLNEDRIRSINRLHRELKIYFPEYKEALGKTEGTFSLELLKQAPFPDDLAALKEDGIRQIWHNAKLRGRGYSRAGEILEYAKASVGIREGKETGKLVVQWFVQKILELDEELALIETQINQKCLEIPHTDKVLEICGIGENTLSGMMAEMGDISRFDDVKETQKLSGLGLVASSSGKHKGETRISHRGRKRLRYWLFQAAKSAVAHAEEFKELHVYYTTREQNPLKKMQSLIAIACKLLRIIFTILKKGIKYDPQKMLKDIRRKSRQESLAA

SEQ ID NO: 125576 - protein, 306 aa, unidentified
MCIRTRSAWQSRKRVGRRRLIGNIADDVAKLLKVLARYGEARGVEVVYEAGPTGYGLQSALARRGYQAQVIAPSLIPKRAGDRVKTDRRDSLRLAELARAGELRAVRIPDPADEAIRDLARAREDAVNTRTQMRQQLKGFLLRHDVRYSGRSSWSKTYYRWLATLSFGASGAQTAFTEYWQAVSAADERVARLTTALVQSIAGWRFEPVVLALQALRGIDQVSAIGLVAEIGDIARFAHPRQLMSYLGLVPSEASTGERVVRGSITKTGNAHARRGGDQSTDMSLIHRRCIARVASPDRSETWASG

SEQ ID NO: 125577 - protein, 340 aa, unidentified
MQPYFVGLDVHKQVIAYCVKTADGGIVDEGMILATRAALDEWVQTVPRPWQGAMEATMFSHWIYWHLKPHAAELKMGHPARMKAISAGKNKSDKIDGRTISDLLRCNLLPECFVISPELGALRQQLRFRRLMIEQQVMFKNKTAGLLMEAGVEYERKRLHGKRYFADLLAQNEWIGNQMRPLLEYSREQIESLQDMDRRLLRMLERHPRLQARIECLQQIDGVGPVTALTWALEVGTPERFGSLKKAMSYCGLTSAFRESAGKQKRGPISKQRNRHLQCALIEVAKIAPLNNEKLRETHRKAVEKGVHKNRATLAVARKLVAYLLAADRAFFQQSDTLPA

SEQ ID NO: 125578 - protein, 320 aa, unidentified
MDGKRVIGVDIGKRWVDVAREGAAEVERHPNEPAAMAALVATFDARSDIIVFERCGGYERKLEAALAAAEVPWAVVHSAAVKAFRQVQGIKAKTDAIDARLLRGFGRDRLNSGKLRLGRTEDVVLDALMARHRQLKAALHAEQCRRETAAIASVQASIERMIAHLEAELAVVAAELSMHESNDAQLAFKEAVLCERKGVAQATARALLAELPELGRLRSKQITALGGLAPRVHQSGRTQWRRGLAPGRISIKVILFNPARSAMRWDPEIRAFCNRLRARGKPGKVIMVAVMRKLLVRLNAAVRDALNQQEVLNPAALAAA

SEQ ID NO: 125579 - protein, 444 aa, unidentified
MQYQKVLKMLESIPYLSVGLDVGADFTWMSIMLPNGTLAGKPFKIVHSDPQSRELAVAKIKEAQEAYSLKSRCFLESTGIYHIPLLCFLRDKGFDCSVINPIITKNSTNMNVRKLHNDKFDSKKAARVGLDTSLKVSIIPDDEVIDLRNLVRDYYYFKDLQSAVVLKLTAELKVSFPAYRKVFSKVTTKTSLKLLDAYPLAEDLLAAPKETVVETIRSTARFGEKYALARYDALRTAAEDAAIFGRALKSNSVRIRLYIDSYREYQKRLDTIMEAIHATVDGLKDSPVYGRILLLQPLRGVGFMSAVVLVAEMGSFDLFPSPKKLYAYFGLDPAVKQSGKFNGDKVHMSKRGSSLARRILHMVALNNLKVDKGSGMPVNPVIHSYYADKCKAKKKNVAVGAVMHKICNIIFAMLRDNKPFEVITPQEHCKRYLAAHPDKVQSAA

SEQ ID NO: 125580 - protein, 402 aa, unidentified
MIFINCLGIDISKSESVVAHYKDEVLVKEMVIQNNQNGYRYLKNYIKHLDSLFILFESTGIYSRGMKRFCEIHKIDYLEMNPLEAKFKTSSLRSWKTDKSDAHKLALLAFRMKDSKVQRHPEEIYFELRERARFHLEMEINQNRLKVELVETLHQTFPGLEKLFTNRYSKIALNIAKAFPHPDFVSTLTHDELVEKVLHSTDKGISVNKAHKYVQKLIEIKNNSFPSVDKSSFLLQKVQYLCDKLLIGIEEMKEFDQEMIDLAKNTTEFENIISIPGIGELTAALLIGELGNIREFKTNKQLNAFVGIDIKRYQSGTSKSRDTINKRGNKKARRLLYLIIMNIIRGRNHYQSHIVDYYYKLREQPHGKTHKTAVIASINRLLKTIHYLIVNNKLYDYQKAPH

SEQ ID NO: 125581 - protein, 442 aa, unidentified
MPDTKKSFDLVIGLDRSDRKADLHLVETASAQTQSHTVDTSPEKLRQWLLELRQRYPQAAVAICLEQPAGHLIPFLESYSWITLYPINPISLQKYREAFVTSRAKDDGKDARYLAQLLLTHSDHFKPWQAQDSQTRLLQQLVAHRRAVIDERTGLTNRLQGLLKTYFPQALELCGEDLWRPLATAFLLKWPTLTAVHKARPATVKEFYYLHGSRSQKLIEQRLQQLAQAVAVTDEPAFNQTLALRVQLICRQLQEVGRTVQQFDQQIAQAFDPHPDRAIFASLPGAGPVLAPRMLAAVGAERERFDSAVNLQCYTGIAPVTKQSGKMRHVHRRYLCPKFERQSFHEYAKESILWSRWAAAYYLQQRTKGSPHHTAVRALAFKWQRIIWRCWKSHTPYREETYEAALRKNGSKLVSLFDQIDVGKNPVKNPAKKSATVTPEKI

SEQ ID NO: 125582 - protein, 369 aa, unidentified
MTFFIGVDLHKTQFTVHVRTEEKVESLDQIKQYPTTVAGYAEFLSRIETYRATGAAVKIGVESTGNTRFFKNQVEKAGAEVTVINTLKFKVINESTKKTDKHDASTISEFLSKDMLPESYLCGKETENIRRLLKSRERLVRSTVGQKNEIHALLVSLGLSDELRSLQSKKGRQRILDTLESNNDYVLEAQSVKLMFEIIERNEESVKIIEKQLVELTKEDEMVNRLLTIRGCGKITAWTIRAYTEDISRFATAKKYAAFCGLVPWVQDSNETIHHGKITKRGPQELRTCFVQLVLGIRRCKDTSEWRMMQRYEYMKKNKGSGKSIVAAARKMAEIVWAMLSDKQDFNAGRMKGVYKPMLLADEALSAIN

SEQ ID NO: 125583 - protein, 343 aa, unidentified
MTKIITIGVDLAKNVFQVHGVDASGAVVLRRQLRRGAVEKFFAQLPPCLVGMEACGSAHHWARVIGRYGHEVKLMPPAYVKPYVKRNKNDGRDAEGICEAVTRPTMRFVPVKSVEQQAALAVHSTRALLVRQRTMAANSMRAALSELGIVAPQGYEGLRELMARLEEPSEEIPQMMRDALLVLARHWQALDADERVLERQIAKAARCDGEARRLMEVPSVGPMIASTILAKVPDPKVFRSGRDFAAWIGLTGKDHGTGGKHRPGRISKQGDRVLRALLISGASAHLRQQKARGITDPWLRDLLARRPYKVAMVAFAAKTARIIWAMLVKGEHYRDRTSVSAAA

SEQ ID NO: 125584 - protein, 405 aa, unidentified
MVDIMVSDFMKGRYNLMKIFVGIDIAKLNHFAAAISSDGEILIEPFKFTNDADGFQLLVSKLESFDKNSIIIGLESTAHYGDNLVRYLVAEFYQVCVLNPIKTCQMRKNNIRKTKTDKVDTFVIAKTLMMQDDLRFVNFYDLDMMDLKALGRFRQKTIKQRTRLKIQLTTYVDQVFPEIQYFFKSGLHQNAVYALLKEAPSPKEIASMHMTHLANLLKVNSHGHFTKEQTKELRVLAQKSVGANDSAISIQITQTIQQIELLDSQLEKIEAEMTDIMKFNDSVIMTIPGIGYINGGMILGEIGDIHRFSNPNKLLAFAGLDPSVYQSGNFQAKTTRMSKRGSRVLRYALVNAAWNVVRNNATFKAYYDAKRAEGRSHYNALGHCAGKLVRVIWKMLTDEVEFNLE

SEQ ID NO: 125585 - protein, 424 aa, unidentified
MKHSIPQRFAALIGIDWANAKHDICLRASGSEAIEHSVVEHSPEAIDVWVRELRQRFGMQPIAMALELDKGPLVYALQKYDGFVLFPVNPTMLAKYRQAFVPSGAKDDPTDAELALQLLLRHPEALKGLKPQSAPMRSLVQLVQDRRRLVNDKVRITNRLTNALKNYFPQPLQWFRDKDTVLFCDFLSRWPTLKQLKRARRSVLEAFFHEHNVRRTTVIEERIQAVRLALPLTEDPAIIEPQSLLALALIAQLRCALEAIARFDSAIEATTAQLPDYAIFSSLPGAGPTFAPRLLAAFGEDRERYPRCEELQKYSGIAPVTERSGQKSWVHWRYRAPTFLRQTFVEWAGETIPRSFWAKAFYEQQRNKGLSHQAALRTLAFKWIRILFRCWQDRTQYDEATYLLALQRSGSPLLKAGAASITSA

SEQ ID NO: 125586 - protein, 530 aa, unidentified
MVTRIKKRKFAGSKKRFIGKPTGQIQERVQAVGPERFGIVSVDCAKRRSKWMLCNFYGKVVVEPTVVEHTTGGLRAMTHVVAVACRAEGLTDTIVAVEMTGIYHKPVQRAFRKAGFDTRIVHPFASNHYRRPLHPDEKTDDHDLEAIFHAAVNGYGLATLPAGEVYQSLQAVSRHRHNLVKQRSRLMVQMRRLLHQTMPGFADLFEDDKLFHKSIALPIALEFSSAEAIRHAGVAGIEGHLTMMKVRFQTRTIERIVAWAGTAAESSELATIHTRQWQQLNEVRQLFDEQVAAAEREMAGFLVKTPYILLLSVTGINVVSAGRLAGEAGPIEHYASAGAINGRAGLYPSRYQSDEVDHADGTLVRQCNRQLRGAAMLVAENLIKCHPHYRGMSALWAQQKVDPRDRRCRIANRAMRMVYQLVGGRQVWRGRGVDREYLLAKLQEFHGLHHTPIDQSIRDLTEAFVWLPKSVYAAEAKPLAELPRRKRRDPQRLGDLLVPLLIRLGLSHKELGVPGEETVESNTSEARSSG

SEQ ID NO: 125587 - protein, 359 aa, unidentified
MEQKRFVGIDLGKRTYEMKIIGINGKVTGTNGQTNPSGRKLLYRKLLATDRVAIEVCSLGMVMAKEIQKEVGCEVVLLNPSQLVLIYRSLKKNDKEDALKLARLVQKYTNEELPKVELPTEHEENLRQILTEIRQLKNDRTKEINRLHAIFVECGITEIKKKDLATIDNRIKCIKMLKGIALAQAERILKRLELVETQTEEVEELLDKEIDGDKNIEKLTEIPGVGKQLASAYVAFIGDGSRFPNASTIGAATGLVPRLDMSSTVCRMGHITKCGNKNLRTLLILAAWSHVRSRDGGALKDKFLYMTRFQSKGKKIAIVAIARKLAELMYILLKNDTSYEKRPSPTISQLVDEAMKFSS

SEQ ID NO: 125588 - protein, 415 aa, unidentified
MALKIVYKICCGIDVHKTFVVACIASTNDKSVTSYESHRFSTYTSGLKTLLQWLLDRNCKDVCMESTGKYWIPVYNILESDCSIVLAHPKYVKAIRGKKTDKKDAKWIADLFKHDLVAGSFMPPADIRQLRDLMRYRFKLTCFKSSEKNRLQNCLTVSNIQLGNVVSDTFGKSAQAILDKLLENPADTSFDLEPLVYKSLKKKLPELRDAIDGYITPEQAGKLKVIKAHYENLESRKAELEELILALAAPYQQELTILQTAPGISSDFTAIGIISEIGTNMEAFPSAKHLCSWAGLTPTNNESAGKKKSVRVSKAGCYIKPLLVQCANAVVTSKKHPEIRNRYLRLKKRRGHKKAIIAIARMLLTALYHMLKNGENYNAELYRKSDLPPVNREITVEQALMIARNQGYKIKSATA

SEQ ID NO: 125589 - protein, 422 aa, unidentified
MLAESHDEEQIIARVAALDIAKAELVCCVRVPSPAGGKRRLQDVRTYSTMTQALTELANRLVELGIERVVMEATSSYWKPVFYLLEAHGLDPWLVNARDVKHLPGRPKTDVLDAVWLCKVAERQMLRPSFVPPWPIRRLRDLTRYRTDLVAARTAEKNRVEKLLEDAGIKLSVVASDIFGVSGRAMLAALVAGERDPKVLAQLARARMRGKIDRLEQAFDGHFADHHRFLLSRMVARIEGLDADIAAVDAQIDVQLAPFAQAATRLDEIPGIGPVAAAAIIAEIGVDMSRFPTAGHLCSWAKFTPGINSSAGKSKGSASSGHGNPYLARVLGEAAVGTTKTNTFLAARYRRIARRRGQPRAVVAVGRSILVIIWHLLQDPEARYHDLGADHYSRHVDPTAKKRSHIRQLEALGYTVTLTPAA

SEQ ID NO: 125590 - protein, 338 aa, unidentified
MKSYAGIDLHSSNNYLGVIDSKDKRLFGKRLPNCIDTITAALKPFRKSLVGIVVESTYNWYWLVDGLQASGYTLHLANPSAIRQYEGLKHTDDKWDSFWLAHMLRLGILPEGYIYPKQQRPVRDLLRRRLLFVRQRATHILSLKSMITRNLGINVPTNEIRKMKEQDVNQLFDDPYLVLTAKCNIATIEFLKTKIRSIEKAVLSQMSLKPEFEILTSIPGIGTILALTIMLEVDDINRFAKAGNYASYSRCVKAERLSDDKKKGQGNRKNGNKYLAWAYVEAAHFIVRYCPEANRFYQRKKAKVNGALATKALANKLARASYYMLRDQVVFDKDKLFR

SEQ ID NO: 125591 - protein, 428 aa, unidentified
MTVKDCTSVKEFWQLKKEIRGSKDYLIVGIDVAKNDHKAFFGTANGKTLLKRLAFKNDIEGFGKLLTRVREMKVKHSLDELVLGIEPTGNYHKPLGDFLIKCGHMVVLVSGVSVKRNRELLDGRWDKHDTKDSANVADLISQGKCLYYEYAPVLLKDLRGLLSLKRRLKKQEHGFRIRIRNSLLAQYFPELDKYYSKWEPEILSVVRWCLDPSVIVGLEYDQFVSLVSPGSKNIRQQGRLEWIWKKAVESIGCDAGEAAEFEGKVMVEELRHIREIIKETNAKIKDVCIRFPEYDYLLTIPGFGPDVSSKVLAAIGNPFRFNSVNQVLKMAGMDLNANRSGKSSDTAVPVISKKGSAHLRFALYQAAFIASCKNKYFIKYYTNTLRGREREKGIKTKMRVKLAAKMLVIGWTLMKKREPFDPVYLKID

SEQ ID NO: 125592 - protein, 350 aa, unidentified
MCSLPVFVGLDYHDASVRVCVLDSDGSELANADRRNDWKAIAEFADRFGRPVQAAIESCCGAADLAEELISCAGWSVDLAHPGYVQRMKQNPDKTDCQDAQLVADLERVSYLPRVWLAPHYIRELRQVVRYRLQLTEQRRATKLRVRALLREQRRHAPKGLNAWTKAWEHWLRHEAELSEQGHWLVKQHLAELGRLGMQIRQVEKRLERLTAHDVEVQRLQEQRGIGPVTAWTIRAEIGHFDRFRTGKQLARFCGLSPRNASSGQRQADAGLIRAANPALRAVLIEAAHRLMNYDRYWQQFAQRLRAAGKPGSVVAAAVANRWIRRLYHEMKTPSGELAVAVGPAPSEDS

SEQ ID NO: 125593 - protein, 360 aa, unidentified
MRIIGCDLHARQQTLAMLDTQSGEVVNRTLMHEGNQVRKFYSELPRPVLVGIEAIGPMQWFLDLLEELGIECQVGDATKIRAAEPRKQKHDRRDAELILKLLVEKRFPAIWMPRKELLDLRALLLHRHQWVRLRTQIQNALQAIALASGLRRGPGLWSYDGQAKIASLPLPPHASLRRSALQAMYGHMDEEIEKLTVQVAEQAEHRSGAQLLMTHPGVGPVTALATDVFLGDPQRFADGKALASYTGLIPQERSSGRRRRLGRISKQGNPLLRFLWNEAGAHAARRDPELRRFYRRKLVQKGLGKARVAVARKLGIRLWIMLRDQIDYQEFCRRGQKQSGAVCAGMPEVRYGANRHRPVD

SEQ ID NO: 125594 - protein, 318 aa, unidentified
MNPACFVGLDVAKAQLDVAVRPSGESWSATNDEAGIAQLVVRLKALRPTLLVAEATGGFEHAAIAALAAGGVPVVVANPRQVRDFARATGQLAKTDQLDAGILALFAERVQPAPRPLPDAAAQLLDALLTRRRQLVEMLVAEQNRLSFAPKPLHRSIRQHIHWLERQLDDVTMELARQIEQSPVWRAKDDLLQSVPGIGPIVSATLLGELPELGTLSHKQIAALVGVAPLARDSGTLRGKRMVWGGRASVRTALYLAALCGRRWNPQLRVFYERLRAAGKPKKVALVACARKLLTILNAMVRSNTRWAIPAPSAQHSC

SEQ ID NO: 125595 - protein, 429 aa, unidentified
MTRTKDTTVVSVLHPVCCGLDIHKQFVTACLMTIDSMGKETSLLESFGTFTDDLVRLREWLLEHECPIVALESTGVYWRPVHNLLEGYLNVVLVNARHIKNLPGRKTDMSDCHWIATLLRVGFLKASFIPPKAVRQWRELTRYRRSLVEALGDAKRQAHKLLESSNIKIDSVVSDLFGKTGRNLMDLLLKDHGELTLQAVHTCLRGRLKPKATELFRAVQGFFDDHHRWMLRQMLESVDQQEANLAKVESRLRNLLQPHDELIDRITQIPGIGATSAYAILSETGSTLESFPNAGALCSWAGVCPANNESAGKRRSTRSPVRRSHLRTHLGEAAWGAVKTKSSYLRSKYFSLKSRLGPKKAIMAIAHRILKALYYIIKQGDSFRDLGENYLIELRRRSITSYLSRQAKKLGMVMVSESTWNQMIDRSPA

SEQ ID NO: 125596 - protein, 475 aa, unidentified
MNVKGTKKKNQVVTANIFEQQELLKKAEAIKESLTASTWRELETNGKFDKNEKLSFISDDMLILGCDVGSETHYMRAIDTRGRELSKSVYSFNNDSEGFQSAKEWAVQIAAEHNKSQIVLGLEPTGHYWFCLAAWMISNGISVVQVNPYAVKQTKEVEDNSQMKDDRKDPKLIANLVKDGNFGMPYLPEKLYAELRRLSMFRDQLNEDRTRTINRMHREMKIYFPEYKDALGKVDGAFSLELLRQAPFPDDLISLGEDGIRKIWHDARLRGRGYSRAGEILQYAKVSVGIKDGAIAGKAAVKWFVQKILELDAELAVIENQINQKCQEIPHAGNILEISGIGENILSGILAEMGDISRFDDVKEIQKLSGLGLVACSSGRHKGETRISHRGRKRLRYWLFQAAKSAVAHAEEFKELHIYYTTRADNPLKKMQSLIVIACKLLRIIYTILKKGIVYDPKKMLMDIRRMEKKEAIVA

SEQ ID NO: 125597 - protein, 313 aa, unidentified
MSEVIIIGLDIAKYVFHVHGADERGRAIFSKRISRGKLLDFFAAHPRCRVALEACGGAHHWARQLAQLGHEVRLIPPAYVKPFVKRQKNDAIDAEAICEAAQRPSMRFVAVKSEQQQAASLVFRTRDLLVRQRTQIINAIRGHLTEYGWIAPKGPSHVTMLADLLEEEEMANSLPEAARAMFRLMLDLLAGLNGKIAALDKEIARRAREDAVSRRLMTVPGIGPISATAIAALAPPAETFAKGRDFAAWLGLTPLQRSTGGKQKLGATSKMGERTLRRLLIIGSSAVVLQASKRGAPKGSWLEQCWRANRACW

SEQ ID NO: 125598 - protein, 311 aa, unidentified
MPTPLNFGIDVAKDTLQIAWAESPAELCLANRRRAIADWLAKLAPGSRIAMEATGRYHLLLAELAHAAGMIVYVLNPCDLLHYARAVGLRGKTDRVDARLIGRYIVREHAELHPYVPPTPVQREIDQLLRRRATVVETKTRLRLSLHGMVGLAADLRIALKRLDGLITKLDQRLRQLATHQAESLRRVESVLGVGPLLGVALTNTFERVPLRNGDAAVAFVGFDPRAKDSGQCIGRRRLSKRGPAELRRLLFNGARSASKTKLWRPLYERYRARGLSTIEATVVLARKLVRVAFSIYRHGTTFDPVRFAHA

SEQ ID NO: 125599 - protein, 413 aa, unidentified
MNDSTQSNKPIALVALDIAKNRHDALILLPSGKRLSMTVANSLEGYQLLLDRCQPERFQVYVAFEPTADYHRNIAYWLATHGCQCFLVSSLSSARAREMLFNTWDKNDRKDASVILYLMRQGLMLPFYDPLLADVMDIQEISNTYHQISMARTRCMNSLFNHYITLYFPEMERYFYSSRSEWFCRFLLKFPTPASITRYRCETFVKRARDVVGRKVNKEQLLKEIYAVAGQSIGLPVVLDSAAVATFKLQLTRFLELTTTRVRLEQQADAFLCSRSDYQHLRSIPGIGPIIALIILAESGDLKRFGHYRQFLAFCGFNLSAQQSGTKYGHYHLSKRGNSRLRYAFWLAATVAIKLRENAFRQKYTRYVKQNPADADLCRKARVAVAAKMARIAHAVVKQDINYIGFYEVSHGT

SEQ ID NO: 125600 - protein, 339 aa, unidentified
MDKRDYASVEVSKDKLLVLVNRDEKTLSEKVFSNTRSGHRAIARHLGGRPTRVIMEATGVYYLDLAIFLCEQEGIEVTVLNPRVARHYAIATLKRAKNDSVDAKVLLDYVMTRPFVPFNPPSEAAYKLRAISRKIRSITGDCARTRSQLHAEKSTIETPKSVIKASERSIRNDEKTIKMLTDEALKIVAGDPKLKRELEILDSVPGVASSGAVQILGELKTLPHHLSTRQVVAFAGLDPVEYKSGSSVNKKKGISKRGSKNLRVALYMAALTAVRHDPHVRAFHEHLKARGKAPIVALIAVCRKLLHSIWGMLKNNETFDSEKFYRLPVKSPSTVISAP

SEQ ID NO: 125601 - protein, 475 aa, unidentified
MNIKGTKKKNQVITANIFEQQELLKKAEVIREKLTASTWHELETNGKFGKNEKLSFVSDDMLILGCDVGSDTHYVRAIDTRGRELSKSAFPFSNTLEGFQGLMDWATKLAASNDKEQIILGLEPTGHYWFCLATWLIGNGISVVQVNPYAVKQTKEVEDNSQLKDDRKDPKLIANLVKDGNFGMPYLPEKLYADIRRLSMLRDQINEDRIRDLNRLHREMKIYFPEYKDAFGKIDGAFCLEVLKVAPFPEDLVTLGAEGIRQIWHEAKLRGRGYVNATSIFENAKKSIGIQDGTESGKLAVKWFVCRMIESNEQLADIESRLHQMCMEIPYAENILAISGIGENTLSGILAEMGDISRFDDVKEIQKLSGLGLVACSSGKHKGETKISHRGRKRLRYWLFQAAKSAVAHADEFKELHAYYTTRKDNPLKKMQSLIVIACKILRVIFAILTKGMTYDPKKMLRDIVRPNEQSVQVA

SEQ ID NO: 125602 - protein, 483 aa, unidentified
MRKRRMSTFERLNSGRITRKLRRELARRVAAADPGLSIVNPHAAGIDVGNASHFAAVPPDRDPTPVREFGFWTADLHKMAAWLVACRIDTVAMQSTGVYWIPLYDILEQHGLRVVLVNAQHTKNVPGRKTDVQECQWLMKLHTYGLLRDSFRLAQHLEGVRTVWRVRGRHVEEAARSVQHMQKALTKMNVQLANVISDVSGLTGQAIVGAILQGQRDPYKLAELSDPHIRASKEEIARSLEGTWREDVLFELQQAVDSYHFAHRQIRQCDDKLKAYLASLESRVLEKPAVPAGTKPLQPKTRKARKQGANAPPMDLTGELVRICGADLTSIDGINIISAMTIVSEVGTDLRQFPDEDHFASWLGLTANENISGGKRVKGAKRKVKNRVADVLRMGATSLLNSASYLGARYRQLRRNAKIPAVAVKAMARHLAVLVYRLLTKGQAWVDRGAELYEQQRRERDLIVLQEKAKRHGLQLVPVAAAN

SEQ ID NO: 125603 - protein, 419 aa, unidentified
MKKDNNSRKKSELNSKRAKSGSTEHRGTKEVLAELVGRLREKLNPKVASADPRQEGPRDRGSLRPNLDRLTVGVDLGDQWSNYCILDLEGDTLAEGKLRTTQEEFSEFFQGLNAARVVVEVGTHSAWVREVIVGCGHEVLVANPRLMEGSKRRKRKNDRIDANKLARLGRVDPQSLHPLEHRSTEVRQDLVMLRARDALVSTRTELINTTRGLVKSMGKRLPSCCSRSFASKTEEGVPVEIREALLPLLQIADAVSDCIKEYDRRMEEMANQKYGHTKLLRQVKGVGPITALAYALTLENPQRFAKSRDVGPYLGLVPKQEDSGESQPQLGISKAGDSMVRKLLVGSAQYILGPFGPDTDLRRYGLRLCERGGKNAKKRAVVAVARKLAVLLHRLWVTGEVYEPLHHSMSLPTGTATAA

SEQ ID NO: 125604 - protein, 336 aa, unidentified
MNIIKQVVGTDISKDTFTVCYGTVDVQQNQQITESITFTNNLKGFRELMSFAKKKRGQLKAPLYFAMEATGVYYENLAYFLNEKHQKVIVILPNKTKNYSKTLNIKSKTDPLDAKMITQFGLERQMQLWSVPSPLMKAIKALTREYNSKKDLVAQIKNQLHAKEYSHMPLKESLKRSQASLSFFEKQIKEIEKEIKELVKQDDDLNDRINKIDKIEGVGFMTIVSIIAETNGFALIQNAKQLASYAGLDVVYNESGLKKHKTTISKKGNKHLRKAVYMPALSAVRHNPKLKQLYIRLVIKKGIKKVALIAVARKLLILIYTIFKKNVDYVPNYNPA

SEQ ID NO: 125605 - protein, 356 aa, unidentified
MVIIAIDLGKFKSMGCIYDNETQEQQFETLLTERSYFRTMFNSYSPELVVVEACGPSGWVSDLCGEMEIPILVCSTHEEAWLRKNVKRKTDRDDALKLARLASMGELVPTHVPTKSVRERRRLIKYRKKQVDRINSCKSSIRSIFVNQGIRISDGAKTWHTGRKLLNENAKPLSDCEPNELWRGELDLELRLLETIETQLESIEKQLNRMAKTDAQVQRVQTINGVGRVTAEAIVSWIDDPHRFKSAREVGAYAGLVPWQYQSGNTDRRGRITKRGPRLLRTLLVECAWCSLQYNTWSRETYDRIHAGKQPRRKKAAVAMARKILVLAWAMMRDEVDYDPDRNVKPKPDMKEKVTA

SEQ ID NO: 125606 - protein, 393 aa, unidentified
MKNRTKVQTRRSKLLSRQTKAQSTQQNLSVQNNDPNDSEQTAKAPLAAVAGIDIGDKHCHLRLINFDGELIDETQLSTRPAPLEKYFRRWPRLRIVIEAGTHSNWIRRTLAGLGHEVLVANPRRLRLIAESYSKTDRHDAWWLAELGRANTELLSPTEPRSVQSEQHRLWLRGRESMVEARTKLINSLRGMAKSQGLRLGTCGPTKWAGKVRAECPRELHPALLPLARTIAGLTREIRQLDKQIEQLADKVYPATARLRQVNGVGALTALAYVLALDNDAGRVKRSRQAGAVVGLRPKRRDSGQSAPQLGITKCGDKLLRRLLVQSAQYQLGPFGQDSAIRQWGLKLAAGTNRRAKRRAVVAVARKLAVLLHVLWSKDVDYEPFYGITPEKAA

SEQ ID NO: 125607 - protein, 345 aa, unidentified
MTSNMQQMYVGLDVHKNFIQGCILDKEGKVILEQKFKNEPHSMDLFLSNIQQDSKVALESCSCWQYVYDYLYDAGYKELVLANPSRVRLIAASRKKTDKHDAKILADLLRMNMLPESYAPPLDTRYERQITRHRLSLVRLRADVKRKVNALLLRHGYQHEYSDLFGKAGMGQLYSMDLPMCDRFELDNYLKTIDFLTEKINNTQDRVEDFVKYNPQARLLMSVKGIDYYSALMISAEIGDVRRFNSAKKIISYAGLNPSISQSGDKCYVGHISKQGNNNLRWILIECANIAIMHDSRFALFYHRIKKRKNHKVAVVATARKLLTIIYAMLMTNRNYIPQRKCKAS

SEQ ID NO: 125608 - protein, 349 aa, unidentified
MLADEVDYVIGVDTHRDQHTLAVVAAPTGAVLAQTVVRAGGAGYARALRFGESHADGVRVWAIEGAGHYGAGLARYLAEHGETVLEVGRHARVERRPRGKDDPLDAIRAARAGLAAETLTLPRAGQHQEALRVLLLARRSAVDVRRVALVQLRSVIVTAPEQLRDELRRLPVTKLIRRCGRFRRSHSRTADELAVVLALRSLARRIEAATEEADELEREIRQHVRALAPELLDEPGVGPIVAAQLIVSWSHRDRVRSEAAFARLAGVAPLPASSGQTIRHRLSRGGDRQLNRALHTVILHRRQHDPATRDYIARRVAEGKTTREATRILKRYLARHLYRVMQNATPLTT

SEQ ID NO: 125609 - protein, 350 aa, unidentified
MKEVITVGMDMGDKKHRVCVLNTEGKVLSMDTVANTSAAIRKYFGDMKPCRIAIEAGTHSGWVSRILEELGYEVLVGNPRKLRMIWNSDEKNDDRDAEMLARIARFDPHLLYPIHHRGSKAQADLAVIKARDMLVKARSILIAHARGVVKSAGQRISACSAESFHCRLLEEMPAELIPALEPIMKSIEDLTCRIRHYDKLIARLSATAYPETNGLRAISGVGPVTALAFILTIEESSRFDKSRAVGPFLGLTPRRDQSGQTDKQLPITKAGDSYLRRLLVGCAQYILGPFGPDCDLKQFGLKLAARGGKNAKRRAVIAVARKLAVLMHALWKSGATYDANYKKNLKKNAA

SEQ ID NO: 125610 - protein, 342 aa, unidentified
MNITTIGIDLAKNVIQVHGVERSGKAVLKKAFKREQVLGYFAKLPPSLIGMEACGSAHYWARKLQEFGHTVRLMAPQFVKPYVKTNKNDAADAEAICEAVSRPNMRFVPIKFPEQQALLAIHRARQGFVKARTAQANQIRGLLAEHGIIIPQGISHIATRLPEILEDGENELPGVFRQLIDRLGSHLKELDRQVNELETQIQAWHRENPDSKKLAQIPGIGPITASALVASIGNAKNFADGRQLAAWLGLVPRQHSSGGKQTLLGISKRGDSYLRTLLIHGARAVVRVAESKLNHAHSWLGGVMKRRNKNIAAVALANKNARIVWALLANDRDYQSNYHLSA

SEQ ID NO: 125611 - protein, 351 aa, unidentified
MKKILKQVCATDVARKELVVTLGRLFDDLTHELYSRKTFPNTKNGFLALLQWVRKLTNDQSVVRFVMEATGVYHESLAYFLDSEGCEVSIILPNKISNYMRTLDVKTITDKTASDAIARFGLERSLQRWQRPNSVFKKLRQLTREREQLIQIRSMTKNQLHAEQVEAEPNEGSVARIKKHIAFLNKQVKELNAEIKTLSMQDEKVKGSMKVICSITGVGLITAANALGETNGFDLIRNKRQITSYAGYDVVEKQSGTSVKGKTKISKKGNKYLRKAMHMPALSAIRHDERFKAIYARLIAKHGIKMKAAVAVQRKLLEMIYTVYKTNTPYDKSYLQRKNNTNQPEESRAVI

SEQ ID NO: 125612 - protein, 363 aa, unidentified
MAKRGPHEGGLTASEEKRSHATYVGLDLSVKQTSVCIVDKAGKVIREVKVATEPMAILAVLTEEALAIERIGLEAGPLSQWLYSALAEAGFPVICVETRHMKAALSAQLNKSDRNDARGIAQMMRVGLYRAVHVKTLASQKRRMLLTSRQLLQAKALDIENDLRGTLRNFGLKVGMVGTVKFEARIRELVADHPDLAAIVEPLLIARRVLREQLGVLHRQLLEIVRQDEVCRRLMTTPGVGPVVALTFRATVDVPSRFKNSKAVGAALGLTPRRQQSGEIDRMGGISKSGDAMMREMLFEAALVLMTHSRKWSWLKAWGMKIARHRGMKRAIVAVARRLAVIMHRMWVDGTEFRWSRKQAAAA

SEQ ID NO: 125613 - protein, 370 aa, unidentified
MTQSSTLYVGMDVHKESIAVAYVAEAHQAEVIYLGSIGTRQCDIDMLVRKLQSKSHHLVFVYEAGPCGYWLYRYLTRKGHICWVVAPSLIPKKAGDRVKTNRRDAIQLAHLMRSGDLTPVYVPQVEDEAIRDLSRAREDALRDLKTAKHRLKAFLLRHDIRYTGRATWSPAHLRWLSEVVCPTPAQQIVFQEYVRAVTEPSERLGRLEQELQDQVHTWRLRPVVDALQALRGVQFTVAVTIVAELGDLTRFDKPSQLMSYLGLTPSEYSTGDHRRQGAITKTGNAHARRALIEGAWAYRYPAKVSRHLQLRLEQLPKPIQDISWKAQVRLCKRYRHLMARGKHPNRVVVAIARELSAFMWAIAQQVPVTS

SEQ ID NO: 125614 - protein, 352 aa, unidentified
MICAAVERCAGIDVGKKFLAVCVMIGPLDGEACVHRRRVGTTTAELESLRDWLKAEDVTHVVMESTGSYWKPVYNVLETSVKVYLANPQEVKNRKGHKTDDKDGWWLAHLLRHAMIHPSFIPPRPIRELRDLTRRRKRLLGDATAEKNRIQKILEDANVKLGNVLTDVFGVSGQLMLDALLKGKARPDEIAQFAKRKAKRKIPEIIQALEGHRMSEHHRQMVRYSLKHLEFLEEQISEIDSAIAEKIKDSGYEPQWQLLQTLPGIQDRSAASILAETGADMQQFPTAKDLSSWAGVCPGNNRTAGKNKSSHTTGGNPWLRSALTECAWAAASKKNCFLKDKFWRITSKIGRR

SEQ ID NO: 125615 - protein, 326 aa, unidentified
MQGKELSEHADGCKSNIGIDVSKDWLDVHILPEAKTLKVPNTKTGLRKLKRWLQGFDVAVIVVEATGKWHRQACRNLHAQGFAVAVVDPFRVRAFAKASGILAKTDRLDAKVLALFAAMMAPQVRVPAPQALEDLAELVTARASAVEEQTALKNQLAATTTSFLRRQLERRLLRIAKDIEAIEREIAKRIAQDEGLARRYAVLTSIPSVGPGVATVLIAGLSELGSVSRRQIGMLAGLAPIADQSGKREGVRVVWGGRSNVRRALYLAALSAARFNPQMKAFHDRLIATGKSAKVALIAVARKLAVLANTLIAENRTWQPMAPQHA

SEQ ID NO: 125616 - protein, 357 aa, unidentified
MLSSNVKYIGLDVHKEAIAIAVLNGAGKLVMESIVETKASTLLDFLHGLRGELHVTLEEGTWAAWLYDVLKPHVQKIVVCNPRRNALLKEGSKSDRVDARKLAELLRTGMLRAVYHGENGLRTLRELARSYLTISKDQRRVMSRLKALYRSWGIPCAGRQVYAPRHREQWLSKMAHAGVRRRAELLYQQLDGLLVLRHTVRGELLAESRKHQAVNILRQVPSIGPLRATLLLALMQTPHRFRSKRQLWTYSGLGVETHDSAQHRYVDGQLQRSKKPQQIRGLNQNHNHEMKEIFKSTALSASRCAGPLQDFYAGLLAKGIKPDMARLTLARKIAAITLALWKKGEHFDAEHLKSQAA

SEQ ID NO: 125617 - protein, 340 aa, unidentified
MNIKTIGLDIAKTIFHLICLDQYGNQLFKKKLRRGQLLRYFANLEPCIIAIEGCASSYYWQRELTKLGHTVKLLPAQHVKAHLRGNKNDYNDALAIAEASRVPTMREVTPKTIDQQSMQALHRLRDKAIGERTALSNQLRGLLAEFGIIFPQGLSKIREGLYSVLEDAENDLTHTLRAALALKHSQFTQQDDLVAELSRLIKEAGNEQTQVDLLQSIPGYGEILSTAYYSVIGDGKAFAKGRDASASLGVVPKQHSSADKTKQLGISKRGDKYLRKMLINGARSVVNHAHKKDDALSVWVTRLIERRGRNKATVALANKLARIGWAVTVSGKPYQVNYGD

SEQ ID NO: 125618 - protein, 394 aa, unidentified
MKLVGIDVGKNSHHFCVMDKETGEFNVTPTSFSNNKEGFDFLINSLKPYSKKSILLGMEDTGHYHVALLKFLLNNGYTVALINPKTTDLTRKMEGGITKNDKLDTITICDVLDTPERKKQYRITKVDRFDLYEQRQLTRHHHNLKEELNVYCNRLQKSIDLVFPEFNTLFSSKYGVVYMNLLKTFGSAEAIASTDIRTIRKCFEIKGKGNRISLTPEKLKECAKNSIGISSEVETIQIKHLVSQITLIKEQIAEIDKKIEEFSITNNSPILSIPGISHFSGTSILAELGDIGNYSKPSQIIKFAGVAPYHYESSQYNAQHTAITKKGSKYLRKTLYQIILPVINNNPVFKKYYLLKISQGKGHRCAQGHCIRKLLRVIYHLLETGQSFDPALLR

SEQ ID NO: 125619 - protein, 356 aa, unidentified
MKKIVKQAVGIDIAQKELVICLGRMYDDWTPELFASKTFANTPKGHESLMVWVGKQMDETVAIRYVMEATGVYHEGLAYFLDDKKQEISIILPNKISNYVRTLEVKTVTDKTAAEAIARFGLERKLDRWEKPKETYRTMKQLTRERNQIVEERSMVKNHLHAEESEAFPNKSTIKRINARIRFLNKQEAAIKAEVETIAKQDTELNGNIELISSIPGVGRLTAAIILAETNGFELIRNKRQLASYAGFDVKERQSGTSIKKKPKISKKGNRNLRKAMHLPALSAVKNDERFRATYARIVAKDGIKMKAVVAIQRKLLELAYTLYKTQTCYKKDYLKTEEQSEIKEATNDMPLLLPG

SEQ ID NO: 125620 - protein, 323 aa, unidentified
MQGQEATEPVSRPKSNIGIDVSKDWLDVHVLPSGLRLRVANDTQGHRQLRRRIAGLDIACVAVEPTGKWHRALCRSLAAAGIALVVADPFRVRMFARASGLLVKTDRLDAAALAAFAAAMATPARPLPPPMIEAIAELVTARDSAVAEQTRLKNQLHAACDSFLKRHLATRIKTAAKVIASLDAEVQRRIAAEPALAERQAILCSIPGIGEVTAALAIAKLAELGSLTDKQIAMLAGLAPIADQSGKRDGQRSVQGGRPSLTRGFYIAAISAARYNPALRVFYQRLRAAQKPPKCALIAVARKLLVLANTLIAQNRMWQPNPP

SEQ ID NO: 125621 - protein, 329 aa, unidentified
MKKEWFVGIDVSKKWLDVAIFVENSDLKGFIHTQVDNDKQGYRELLRWLKVYDVDAFTCTYGMEHTGFYSDGLQHFLDKKGCKYTMLEPAVIKHYPIQPREKNDRLDAAKIADYLFRFKDTIKMGRVPDNTMEELRNLHRERKFYVEDRVCYMNRKQVVGKEEAKRLDKMIAMLDKQIYSIEEKIREIIRNDESLMENYLYLTSITGIAFVNAVNAIVITQNFTAFKTARDYASYLGVAPHTKTSGTTVRWKPKPRKHCDLTAKADISQAAKIAVVHDVELKQFYERKCNGKEDADTIRKAMNAVKFKLVLRMFAVVKQKHSYRQFTTI

SEQ ID NO: 125622 - protein, 347 aa, unidentified
MNYNTQHKFYCGVDLHARSMYVHIVDHKGKSVFDRDLTADPDEFLDAIKPYRKNIVVGCECMFAWYWLADLCEDQRLPFALGHALAMKHIHGGKAKSDKIDAGKLANMLRGGLFPLAYAYPRAKRQTRDLLRRRSFFVRQRGQLIAHIVNTNSQFNLPPLPKKLRYAKNRTPELLDRFTDPSTRLMIGADLNLIDHYGEQIAELESYLIRSAKVDDAVTFGLLRTIPGIGPILGLILLYEIDQIARFPEVGNFLSYSRLVRCEHSSAGKVKGSGGKKMGNAHLKWAFSEAACLMIRSVPAVKSWLQRQEKKRGKRKALSVLEAKIGRAVYHLWRKQVPFDLKRFLKG

SEQ ID NO: 125623 - protein, 373 aa, unidentified
MPKYSTAFGMDVHLRSTTVCALDADTGEAVTRRFPGNPWGEIAGWMDGFPGPSLAAYESGYLGFAPQRELAGLGVECVVAAVSKIPRSAADSASKNDRNDAARMAKAILAHDISPAWVPSPEVEGIRDLAGAYDGATARLATAKQRLLAFLARRGFVYGGTTPAGNPRKYWTYDFLRWLDKVRPEDDGGVRALAALRNEVEAAAEARADLLSEYRAAVDASPIAAEVAALQSIKGCAFALAAAFSAEVGDFTRFRSGRQVTAYFGLAPSQRSSGDSVRLGGISGAGNALVRKLAVEGSWCYAAARHQPKLMPRDTGVPLEIRMHGRKGSERLLRRREEMLARGTPAAKANAATAAELVRWLWALGMMCREGAE

SEQ ID NO: 125624 - protein, 408 aa, unidentified
MECIHARCAGLDVHKRTVVACVRLTEARRAQHEVRTFATTAAGLLALQEWLGATGCTHAVLESTGVYWKPVWHMLEEHLTLVLANATAVRNVPGRKSDVRDAQWLADLLAHGLVRGSFVPPAPIQALRELTRTRKQLGREVTAHSQRIEKVLESADVKLAAVLRPLLGVSGRAILAALAAGETDPDRLVALAHPRLRAKREALRAALPGRVRPHHRVLLQQHLRVVATLQATIAELDAAIEAALAPYRPAVAHLVTIPGVSTTAAQILVAEIGTDMTRFPTAGHLISWAGLCPRQDASAGKHRSTRIRKGAPWLKPVLVQGAWAAVRGREGYLRAQFLRLKPRRGPMKAIVAVAASMLTAAYYMLRNDTDYHDLGAEHFRRADQARLVAGLTRRLQHLGYEVTLRPAA

SEQ ID NO: 125625 - protein, 343 aa, unidentified
MKHHAGLDVSVKETSVCIVDDGGKVCCEIKVPSHPEDLAHALKDPAWCLERVGLEAGPLSQWLFSGLAEAGLPVICIETRHTKAFLKAQVNKSDRNDARGIAQMMRVNLFRPVHVKTLTNQRRRTLLTARKLLQEKAIAIDNDIRGLLRNFGLKVGSVGASKFEARICELVEGMPELGEVVEPLLAARRKLRELFAVLHRKLLAIVRDDAVCRRLMTVPGIGPVVSMAFTATIDVPARFKSSKAVGAALGLTPVLNQSGESKRIGRVSLCGDGMTRTLLYEAAQVMLTRTTKWSWLKAWATKVAARRGIQKAIVALARRLAVILHRMWVSGTDFRWSRDAQSV

SEQ ID NO: 125626 - protein, 390 aa, unidentified
MYFVGIDVSKYKHDCFITNEAGEVIRDLFTFDNTGTGFKQFFDVLSSLGDPKQIKVGFESTGHYMNNLMKHLSVKGYSFTVINPIIVARFRSSTTLRRIKTDTIDARLIAQYLSTVDFKSYHLQVYHFLELKSLTRMRDRLVKQRSLYLVMLTNQLDLVFPEFKEFFHGTLKSKTAQYVLRKYVVPNRIANMNIASYDNLRRLSKGKFSFAHFTRLKELASSTVGCSNETDELLITSLLNLYDKLDEEINIIESKIESIMIKLDSPTSSIPGVGIMSAATIVAEFGDVSRFANASKMLAYAGLDCGRSQSGTQDFKGKMVKHGSGYLRQALMNAAETMIIHAPIFYEYYHKKRNEGKAHRVALSHLARKLVRLIYKLETSHIHFDLSSYR

SEQ ID NO: 125627 - protein, 351 aa, unidentified
MMIIGVDYHPSFQTMAFLLEETGECGEQELNHSDGQAEKFYRDLKQRGIRVRVGMEATGYSRWFERLLAELGFEVWIGDPAEIKAKRVKTLKNDREDARLLRRLMLENNFPRIWVPDPENRDLRQLLWHRHRLVQMRTRIMNQLQALAMNEGYRWRKKLFSEQGRAQLEKLSLAPWASRRRQELLELLDRMNPTIEELTAAVEREARKRPAVQRLMTHPGVGPLTALAFVLIIGTWERFPRGKQIGNYVGMIPSENSSAGKQRLGHITKQGNSLLRFLLVEAAQAAARVHPDWRRRYVHLAMRRHRSIAKVAMGRRLAVRLYWMWRNGCEYSQSLEFGSYAGQLGTGHGAK

SEQ ID NO: 125628 - protein, 356 aa, unidentified
MGQKMVKLFFKFKIKSMQILKRNYLGIDVSKPWFDVSILCVISHQKQPMITERFDNTPGGMKEFKKWLVVQGISFDSNSLLVIENTGVYHRLIWSFCSKHQLPLHIGNAAHIKWSLGITRGKSDKIDSQRLCTYCCKQADELQATPALNPVFMKLKDLMSSRSRLVTQLHSTKNYIKEIQCTDDKVLLAMLDKAHKAALEGIKKSIVQLEELINKIIHEDQAIYNNYQLIKSVPGIGHLTAVYIICCTNNFAAKPSGKQLASYAGVVPFEHSSGISIKGKNRVHKMANKDLKKMLHLCALTAIKYCPEFRQYFDRKKAEGKNGMLVLNAIRNKLLLRVVAVVNNQKPYVENIQIAA

SEQ ID NO: 125629 - protein, 412 aa, unidentified
MRRMIASLDVHKRMLMLIVGDADALQGELRKTRFLTTPSDLERLKQWLLDQGVSEVVMESTAQYWKPIWLALEGPFKLVLAQAWSNRARPGKKADFKDAERLLRRFVAGELVLSFVPDAEQREMRSVTRRREQLVSDRVRVQNQVESLLEETRIKLSSFVTDLFGSSGLRILAALAEGITDPAQLVKLADTRLKCTTEELADALNGSISTVHQKLLKQSLDQLDVIDRQITEVVKMAGDLMAGHQDALKRLAAIPGIRVVTAQHIIAEAGPTASAFDSAAQFSSWVGAAPGRNESAEVNKSSRCAKGNAHLRRVLCQAAQAAVRTKNSFFESKFNRLISRLGYPKAIWAIARHLSVVIWKVLHQGESYIEYGAPTNPQAAKRRIQRLQKEFRALGYLVDLTPITTAPEASRA

SEQ ID NO: 125630 - protein, 339 aa, unidentified
MSKLFKNFVGIDISKTWFDAALIKSDDSSVVIHEQFAQKPDGFKKMQAWLHTHHVLLDEQTLFCMEYTGIYNTGLVHYLVKAKAALWVEMPLKIKKAGGFERGTDDKAAAVKIAWYALRFKDQVKLWQPIDSNIESIKNLIAQRDRIVNGINLLTVPVNELKDCGCAEDAKTLEKLQKAPVAALQKSKLSIEALIAKTIQQDEQLNIKVKRVASIKGIGQVTSVALMVYTKGFTAFENGKQLACYCGVVPFTKSSGTSVRYKSTVSPFANMKLKKLLHLCAMSAIQNDQEMKGYFERKVGEGKNKMSVINAVRNKLIHRVFAVIRDERNYEDNYVRKCA

SEQ ID NO: 125631 - protein, 416 aa, unidentified
MNAAGIDVSSSKSTVAVLRPFGEVIKLPFDVPHSAEELASLAEQLKSIEGETRVVMEHTGRYYESIAKVLHEAGLYVSAVNPLLIKEYGNNSLRKVKTDKADAMKIAKYALDNWSELRDYTPMDTIRYDLKTMNRQFQLAIKQKTATANNLIALQEQSFPGIRKLFDSPVRSDGTQKWVDFTHDFWHTDCVRSGSLNAFTERYRKWCKRNRYQFSTEKAAKVYALAKSAVVLVQKTSVTKTLVQEAANQFTAISRSAETYRSEMNKLASQLPEYSIVMEMYGVGESLGPQLMAEIGDVRRFERKQSLVAFAGIDPAPSESGDYCSRSNRTTKRGSPYLRRTLFNIMKVHLQRAPADEPVFQFIDKKRAEGKPYYVYMTAAGNKFLRRYYGKVMAYFSSLEDLPPVDMDSTGLHHTK

SEQ ID NO: 125632 - protein, 349 aa, unidentified
MSVDPAYKVVRGGALAKEAKWKDRIVIDGLLGIDVSKDTLDASMSSCNKVRAKSFANSPDGWRHLLDWLIGQKIRRVHACLESTGLYSLGIACKLNEAGHVVSIVNPAQIRDFARTKLGRNKTDAVDASHIREYCELFKPAPWSPPSHAHRQLGELQTIRAGIVAGLTEWKNRKNSGMIDVVAQSLADATISHFTSQLGAVEKAIAQAIDNDTDLRRKRDLLLSISGVGETLASVVLAELPGPDVLRSSAEAVAYTGLNPRRHQSGTSIDRLTRISKIGNAVLRAALYMPAMSAMRYNPAIVALVTRLKARGRLNPKQIVVAAMRKLLVLCFGVLKTGKPFDPALAMGC

SEQ ID NO: 125633 - protein, 319 aa, unidentified
MICVGIDVAKDKHDCCILDSEGTTLADCFTIPNNLDGFKRLLQTIKDCTQKSDKIKVGLEATGHYSCNILGFLLDNDLPVYVMNPLHTNLYRKSLSLRKTKTDRVDAKTIATMLLSDVDLKSYTDTAYHNEELKSLTRYRFDKVQERAKLKQSVSRLVTILFPELEQLVSSIHGTSIYALLSEYPGAKQISEAHLTRLANILVTTSRGHYRKDKATHIRDAARTSIGSVMPAKSLELKHTIKLIQELTSEINEIEDAIRKIMDELKPPILSIPGMGFHSAAMILAEVGDFSNFNSPDKVLAYAGCSPSTYQSGKRPGWQ

SEQ ID NO: 125634 - protein, 357 aa, unidentified
MTIVAHTHPFVIGVDTHARNHALAILAAPTGEVIDDAQFPTTAAGLARAVSWAARRTSGDLDVLWVIEGVGTYGARLARAAADAGYAVVEAARMSARANRGVGKSDPLDARRIAQAVLALDVTALRRPRADDGVRAAVRVLVASRDHMSAERTAAVNALTALLRVTDLGIDARRPLTSSQIATVAAWRTRDEDLATATARAEAIRLAKRVTALEEELRTNTKRVTELVMQSPARELLSQPGIGPVTAAVALTAWSHPGRLRSEAAFASLAGVNPIPASSGNTVRHRINRGGDRRLNRALHMAVVTRMRMDPRTRAYVERRTTEGRTPREIRRCLKRYLARQIYRHLNTAAHNAPSMG

SEQ ID NO: 125635 - protein, 372 aa, unidentified
MNYNTVYVGMDVHKESFTLCSCKYEDEKASHYQRTPASYKNVLRYLAFLRTIYGEYTRFVCGYEAGCLGYSLYHQLENFNVECVILAPTTMLEQRSKRRIKTDKRDAEIIARSLAQHNYSPVHIPTETDNQTKEFIRMRDDHKAELKKIKQQILAFCLRQGYQYDGSGNWTAKHVKWLRSLKPAGLYKEILDEYLLTYTILTDKLNRLDQRIEELASKEEYKESVSKLTCFLGIKTHTALSVIVEVGDFQRFVSARKFAGYLGLVPGQHSSGDDRNGLGITKAGNTHVRRLLVESAQSYTRGKIGYKSRVLRSRQAGNSPQVINYADRANERLRRRYYKMVLKDGKKYNIAKTAIARELACFIWGMMTDNIY

SEQ ID NO: 125636 - protein, 441 aa, unidentified
MSDSNVRYIGLDVHKRVVEACIVDAAGTIVQRERFALNRRTLELFATKFLKPADHVAFEATTNCWAVADALRPYVAKLVVSNPMATKAIAQAKVKTDKVDAHVLAQLLRCDFLPEVWQPDPATRQLRELTGRRSTLVGQRTTMRNRIHSVLAMRLIEVTIKELFSAEGLAWLAGLELDAQGRMLIDIDLRQLEFLQKEIATLDQELALRGHASDAVKLLITLPGVDVATAEAMLAAWGDHTRFADGDHAAAYLGLAPSTKQSAEKCYHGPITKRGNSHARWMLIQAAQHLDKHPGPLGNFFRKVMKKKCRNVAVVAGARKLAVIGWMMLKSNEPYRYAIPKTTEAKLAKLRVKATGQRRKGGAGKGVKAVAKLPGGSRTVKSLAGACQSEGLPQPRPLSPGEQRTVERADCAAFVAEIASAHVVPRPPKRRKTQEETAAHA

SEQ ID NO: 125637 - protein, 358 aa, unidentified
MHPLKLTLGIDVAKDDCKCNLSKLSGELEVKVMASKTFVNSQSGLQDVLKWVDKHTKGVKDIALGVVLEASGVYHERFALGLQQAGYRISVVVPGRAKLYMQSLGIKTKNDHIDAKALARMGCEQQLELWSPLSALFHQLRTYTRLHEDIQQKRTDTANQLHALKHSAVQIGDVIQILEKLMDVFDRQLQKVKQLIEDHVNSDQQVKQKIDKVCSIKGVGLLSAATVAAETNGFELMKNIPQLVSYAGYDVVENQSGKRVGKTRISKKGNSHIRRILFMPSLQMKTYQVGAMEALYQRTLDKHGIKMKSYVAIQRKLLILIYTLWKKNEVFDPGYHKKIPSAVEEVVTSFRLSLEEAV

SEQ ID NO: 125638 - protein, 368 aa, unidentified
MSVSAVPVVRANPLPIGREKGMAMTMVSAGLITGGVDTHLDVHVAAALDRIGGLLGVAEFDTTQAGYEALLAWLLSFGSLERVGVEGTSSYGAGLARFLMGHDLEVIEVDRPNRQERSRHGKSDPIDAIEAARAALSGRATGLAKTKDGPVEAIRALLVARRSARNQRISALVQMRHLVFTAPQPLRERFFGLSKTQLVNQTAALRPRDNGDVVTYATKVALKTLAQRVQLLDAQISQIRHMLPPLINAAAPNLLNVYGVGVDNAAILLVAAGDNPERLKSEAAFAHLCGVAPLPASSGKVIRHRLNRGGNRQANHALYQVVISRLASDPDTKRYVERRSKEGKSIGETVRMLKRYVAREVFKHLPAA

SEQ ID NO: 125639 - protein, 408 aa, unidentified
MEQNIVFGIDVSSHSSTVCVVIDRIKQGKPFTISNDSFGYQKLLDHLNRYLITPLVVFESTGVYSLSLQAFLEENHIKYLKLNPLKAKKLMDNNLRHNKTDKLDAYHLALIEFCAPQKLREPQPKEYHEMQNASRYFEELTKNLIVAKNQLHRNLQSTFPQIESIMATPTGKIYWTIVSLFPHAQYVLDSDETRIYQELLSISGIGKQRARYLTARLYSLAEQAYPYDSKDSITVRAIQRNISDLFSLSEERDNVINYLEKLAKIVNSRALTIYQSIPGIARTTALRLIAELGDLRRFDTSAQIDAFIGIDPGRYQSGEMDNHLGITKHGNHIARKILYRVIGQMESTKLSQPCHITDYYDNKKQSSHSRGYKKIAIASVHKLIRTMFALIKQNQLYDYNVATKNKRL

SEQ ID NO: 125640 - protein, 411 aa, unidentified
MKLFVGIDVSSKDLQVAIMSSQTAQELLFSGSVLNDLNGISELKQKILTLNQQNHYEKIVIGMESTSIYSFHPAMFFQLDDDLNQFNLETVVLNPTEVKRFKNIFEENKNDTIDAFYIADFLRLERYSVGIVKEEQYIALQRLTRSRFQLAANLTESKQHFIENLYYKLNKLVVDKLDTSIFGATMMNLLSDEFTIDDLNAIPVEDLAAYLNKQGHGRFADPQKLAKAIKKAVRGSYRLGKVMQNSVDIVLSIYTSEIKTFTKLIKQLDDEITKMMTVIPEAAILQSIPGIGPVYSAGIIAEIGQIDRFDNQAKLAKYAGLTWKQYQSGNFTGQVTRMTHSGDVYLRYYLIEATNSIIRYDETFNRYFTKKQHEVARTPRKRALALTARKLVRVIDKLLRDHQIYRKEEMV

SEQ ID NO: 125641 - protein, 357 aa, unidentified
MYAQARNAENIVAIDLGKFNSAVCIFTKSSFKSKFRTVKTDSQEFHDLFIELEPDIVLFEAGSSAGWIADLLTALNIPFEVANTNHESWKWNKTKKKTDKRDAKKLAMMYAYGGLPTVHMPTKAVRQKRSLITYRQSIVKRITQSKNVIRALLQTVDVKMLNGKNAWTQKGVGYLLSMAKPFEQIGDSEEFWRGQLYTEIEILQAMNEKLKTITKKLDEQAEADKKIALVQTIPGVGPRVAEAVVAIIDDPGRFKSAKHISSYAGLVPEKHDSGQTKRNGRITGHGSGMLRALLVQVSWLGLRNKWIRDIYDRIRRGSKTRSKIAIVAVARHILVRCWAMLRDNSTWRGSVELVTKS

SEQ ID NO: 125642 - protein, 468 aa, unidentified
MEDNRARRRGQRRPSPSVLERINPNAAGIDCGSAEHYVAVPPDRDPQPVQSFKTFTSDLVRLADWLTRCGITSVAMEATGVYWIPLFEILDARGFAVRLVNAHHVKNVPGRKSDVSDCEWLRELQIVGLLRGSFRPSDSIVALRGYLRHRHTLVEQAGIHIQRMQKALVEMNLQLPIVVSDITGVTGLRILRDLVAGQRDPVRLAEHRDHRCRASKADIIAALTGNYRPEHLFVLQQNLELFDTCHAQLAACDRAIEAHVQTMAAAIAAPSAPLPTPRVVRTPRTRDNAPRFDIRTPLHHLTGGVDLTQIDGFTPYTALSLVAEIGTDMSRWPTEKHFTSWLTLAPKNKISGGRLLSSRTARSANRAAGLLRLVVMSLGRTQTALGAFYRRLAARIGKPQAITATARKLAILVYRALKGDLVYRNIGADGYDAQQRARLLNRLRRRAATLGFDLLDHQTGEVLDTARA

SEQ ID NO: 125643 - protein, 393 aa, unidentified
MHNCLAIDVAKSKSMVTLVSSCGEVLIEPYEINHSINDFSNLLNRINKLKLGNVSVIMESTGIYHRPIERFFLENNFRVFVINPIYGKMHKRNLRKTKTDKEDCFNLVNLFFTNTFKEYIKPEQLYLDLNALSRQYFALDELCVNIKNRYRNLLYLCFPEYEEIFKGNMVYSNIALEFIEKYPHADIISNTRIDKLQNFFKKFEYKCWKSKPIKIKEMALKSYPSVNMNDELVSNLSQTARLVNEYQKAIDIIKYKIICLGKKTKYFKSINSIYGIGEFTTSIIIAELGDINRFNNIKELTTYCGLDPSIKQSGKSVNVHGPISKSGNKYMRKILYIAISSIITIVGRTKQENDIEIYYRKKRNEGKHHYASIVACTTKLLRKILALCKQLDK

SEQ ID NO: 125644 - protein, 345 aa, unidentified
MTQYKRIGIDTSKAVFTLHGIDQQDRPVLRINLRRAQMISFFKKLPPTVIALEACGGSHYWARELTALGHTVRLIPPQYVKPYVKRGKNDRNDAEAICEAAGRPGMHFVPVKSVTQQAQGMVLKVRETLIGQRTALINTVRGHAAEFGIIAGKRAGKIEPLLSAIEQEAAIPPGAREMFAVLGRQIDEIDVRIKDVDTKLNTAHKASEVSQRLVTIPGVGPVTALTLAVEIDPAMFESGRHLAAWAGLTPKERSTGGRQRMGGISRAGNERLRVLFVSGATSVINAAMRPGSRQMTDWLRALLLRKPRKAVAVALANKMARTAWAMMKSGETYRRPSAAAGALAA

SEQ ID NO: 125645 - protein, 418 aa, unidentified
MVLFVGDDWAEDHHDVEILDQIGRRLGKARLPEGMAGMARLHELLAEHLDETAIDDETGSLAQGEVIVGIETDRGPWVAALVAAGYQVFAINPLSAARYRERHSTSGAKSDPGDAHVLAEIVRLDRAHHRPVAGDSAEAEALKLVARSHQSLIWERTRHLQRLRQALREYFPAALDALAAAKLELADADALELIERAGDPDRAARLSRSKITAILQRARRREIEVKAEAIQAALRAPALRQPAAIEAAYATIAASQVRLIVGLNAQLPALEEVVAQGFGRHPDAELYLSQPGLGTVLGARVLGEFGDDPERYRDHKARRNYAGTSPITRASGRRTVVLARYARNRRLGDAVHQWAFCALSASPGARAYYDHLRARGANHHAALRQLGNRLVGILHGCLKTRTRYDETTAWAHRQTPAA

SEQ ID NO: 125646 - protein, 393 aa, unidentified
MVCVGIDVAKDKHDCCILDSDGTIRADCITIPNNMDGFKQLLQTIRDCTKRSDKIKVGLEATGHYSYNILGFLLDKGLDTYVINPLHTNLYRKSLSLRKTKTDRVDARTIAAMLMSDVDLKPYTDTAYHNEELKSLTRYRFDKVRERAKLKQSVSRLVTILFPELEKLVPSLHLASVYALLIEFPGAKQVAGAHLTHLKATLSDASKGRYGRDMAVTLRDAARCSVGSVMPAKSLELQHTIRLIRELDAEIEDIETAIQSMMDEMQSPITTIPGIGVRMGAMILAEIGDFSRFNSPDKILAYAGMSPSTYQSGQLSLSGPYSHMEKRGSRYLRYALYNATKYVCLWDPAFAAYLAKKRGEGKHYNVALSHAAKKLVRLICALEKSQQSYRNAA

SEQ ID NO: 125647 - protein, 321 aa, unidentified
MTYIGIDVSKDTFVVAYSPEKSSKTKTFKNTTRGIHEFIRTISKDEHHCVMEATGNYSALLVYLLSEAGITTSLENPLKVKNFARAMLSTVKTDEIDARLIALYGEKMNPAPYKLRSDALLILKQKRTVIRQLKKQLIATRNLKGSMEVLPFFDAKCKRSIEKTIAFLEKQIKDLEEDLATLARSEYKKQMDLLTSVKGIGVTLAAALIMATGGFTYFDNAKQLTRHLGLSPTYQQSGTSVNFKGHINRNGDSSLRSQLYIAACSSLRCNAECRACFDRLRSKGKPGKVAIVAVANKLIRQAFAVVTQEKPYVDGYISSKK

SEQ ID NO: 125648 - protein, 330 aa, unidentified
MNKVGRGSGPNPGATMFVGIDVAKREVVVAVWPSGETWTSATTAAALRTAAKRLRRLAPQLIVLEPSGGYELPVLEALLDAALPVSLVLPERVRDYAKSQGQRAKTDALDARILAQYAAQLQAPRLAVLQPAQRALVRLVMRRQQVEGMLTAERQRLDQDSLYRDSPIRADLQETIRYLEAKLHDLDRDLAAMIAAAPDWAATAALLRSVPGVGPVTAATLLACVPELGTLSRHKIAALVGVAPIAQESGRWKGQRRITGGRSLVRRVLYMAALVASRYNPPLRDFYTRLRARGKTAKQALTACMRKLLVLLNALLKTQERWRAPTPTTA

SEQ ID NO: 125649 - protein, 369 aa, unidentified
MGNRITYVGLDVHKETIVVAVAEGGIRGEIREYGRIANTPTALDRVMRKLGREGVRLRFCYEAGPCGYGIQRQLSTAGHECVVVAPSLIPKRAGDRVKTDRRDAASLARLHRAGELTAVWVPDAGHEAMRDLVRARLDAVHALRRARQQLSGFLLRQRCHYGRPAWTRLHRRWLAGLRFEQAAHHLVLEDYIEAVEAAKARRDRLTAQIAAMLPDWTLAPVVAALQTMRGMALVNAATLIAELGDLSRFANPRQLMAYLGLVPSEHSSGASVRRGGITKAGNGAARRLLIEAAWSYRFPARVSRELRLRQEEQPKPIREIAWKGQTRLCARYRRLARAGKPANIVTTAIARELAGFVWAIARRVPPAAG

SEQ ID NO: 125650 - protein, 404 aa, unidentified
MIFVGVDWAEAHHDVCVLDSEGGVLGRRRVNDTLEGVRDLHALLATCVDDEPEVVVGIEKDRGLVVTALVAAGYEVYAINPMAAAHYRDRHHVSGAKSDPGDAKMLADLVRTDRHNHRPVAGDTPLAEALKVLARAHQNAVWSRQRHVNELRSSLRDYYPGALEAFGTDLAHHDALAVLGVAPTPSQARTLSKAKLVSALRRGGRQRRLEARAQELQAILRREQLAQPALLEHAYGLTTSATVSIIVATNATIDELETGLAQHFEQHPDAKIIRSLPGMGMVLGARVLGEFGDDPNRYADSQSRRNYAGTSPITKASGTKKVVLARRGRNKRLASALDQWAFSSLLQSPGARHYYDELRARQKSHRQALRQLANRWVAILHTCLERGTLYDESLAWPHLTEQAA

SEQ ID NO: 125651 - protein, 456 aa, unidentified
MKPISNDVEEIDGDEVERVLRCAAAIDVAKATGMVCVRRPHPSIEGRRSSRVWEVGSTTNSILALGEDLVTLGVERVVLESTSDYWRPFFYLLEAAGLTVWLVNARDVKQVTGRPKTDKLDAVWLAKLNERGMLRPSFVPPREVRALRDYTRLRTELVEERSRHKQRLEKLLEDALIKLSSVATDLLGVSARAMIEALIAGQRDPKVLADLAQGRLNAKRGALIEALNGRFDDHHGDLSRLLLDQIDACTDKIDRLTTGIERLVAELPEPSPPTDREPRPARDVPVAHDPEVRRLSAVERLDEVPGIAERAAQIIIAEVGLDMAQFPTPAHLVSWAKLSPQTIQSGPRTKAGKTGKGNRYLKGVLGEVAIAAAKTDTFLAARYRRLVRRRGKQRALVAVARSILVIVWHLLNDPDARYIDLGSDYHATRLDPDRKARDLVRQLQALGHTVTLTPAA

SEQ ID NO: 125652 - protein, 416 aa, unidentified
MSVALPQALFFTGIDWASAEHAVCVLDAAGKITARFTIKHSAEGIASLVRRLARYGDPAGLPVAIERPSGRLAGLLLEAGHPVVPVSPNAIKTWREGEVLSGAKSDAGDAAVIAGYLRLRYHRLAPAAPYCDETRALRAAVRTREDLVQMRVAATNQLSALLEAHWPGARAVFADVESPISLEFLTRYPTPAAARHLGHKRMAAFLVKHGYSGRRPAAQLLARLHGAPAGTAGRALTEALQDAVLAVVAVLRALNGAVKDLDRSVAAHLGEHPDGPVFTSLPRPGQINAAQMLAEWGDCRPAYDGPDCVAALAGVTPVTKQSGKYRGVEFRWACNKRFRRAVTTFAGNSRHASPWAAQIYAEARAAGKDHPHATRILARAWIRVIWPCWVNGVPYDPARHRAAAALAGQTPSQPAA

SEQ ID NO: 125653 - protein, 416 aa, unidentified
MNAVGIDVSSRKSTVAVLRPLGEVVCLPFDVTHDIAGLASLVEKLKALDGETRVVMEHTGRYYEAVEKALHEAGLFVCAVNPLLIKEYGANSLRRVKTDKADAVKIARYALDNWADLRDFTPMDAIRYDLKTLNRQFQLASKQRTASANNLIALLEQSFPGIRKCFDSPVRSDGTQKWVDFAHSFWHVDCVRKQPFPAFCERYRKWCKRHAYLFKLSNAEEVYALAKRAVVLTPKAKVVKVLVQEAANQLSSISRSVEVYRAEMDRLAAMLPEYPVVMAMYGVGKSYGPQLMAEIGDVRRFERKQALVAFAGIDPMPNQSGDKNVRSNKSSKRGSPYLRKTLFNVIRTYLQCAPQDEPVFQFLNRKRAEGKPFYVYMLAAANKFLRRYYAKLRDYFASLDTLQPVAPIPTILKAAL

SEQ ID NO: 125654 - protein, 344 aa, unidentified
MEKPNQNQSCQWILGIDVSKESLDACLIHLADGQLFENKFNNNASGFRLLKAWCKQVGCECDHHTLCCMEHTGLYTRLLVHYLISREVSVWLESSLQIKRSQGLIRGKSDRIDAQRIARYANLYQQKAELVQMSALTLEKLKDLQANRRRLMKAKQSLATSTQELKQFDSTSGKLIEKVNREALRGLEKSLDKVDEQIFAHIKDDEQLKQKYDLMLTIKGVGKVLAAMVLVYTHGFNRLTDSRKLACYSGVAPFAYQSGTSIKGKTGVSKFANQELKRVLHMATVSSIQHNKELKEYYQRKVKEGKNKMCAINAVRNKLLHRIVAVVKRGTPYQPTLKNNLISA

SEQ ID NO: 125655 - protein, 439 aa, unidentified
MAMRKREEVFPNAAAVDVGASSHWAAVPPGRTDRPVREFGVMTGNLHALADWLIECGVDTVALESTGVYWIPLYEVLEQRGLKVWLVDARQMKYVPGRKSDVQDCQWLQKLMSLGLLRGAFRPDGEVCVVRAVARQREVLITEQGHWVQRMQKALVEMNIQLTEVLSDVMGATGQAIIRAIVAGERDPKLLARYRDGRVKASAAEIAEALRGNWREEHLFVLTQALAMYDDISRHLHECDAKLRQLLNERAVHAVELGKPPRQGSKQRISFDARQALANWAGVDLTRIPGLGVTVVMTLLTEIGPDLSRFESVKHFCSWLGLCPGTKISGGKVLYSATKRSANRARQALKMAAQALSHSDSALGAFYRRLCIRMDKLRANTAAAHKLARMVYFMLTRGEAFVEQGQQRYDEQQRQRSVAALKRRAAALGFQINPIAQTA

SEQ ID NO: 125656 - protein, 422 aa, unidentified
MQNSTAKKLRQVPEGYLIVGIDPHKKRHAAVIITQDFTVHDKFKLDNTREGLENMVNRVRIRMIETGCRGIMFAIETGGHYWRNIAYFLDERGIPFRFINQYTLKRRREGKDLNRRKNDYRDSEVAAQLLCTGEFTESRIPQGAYADLRTAHNTYRRLVKERTRIINLIKGLLDGLFPEFVQVFKDPCAKTALCILSCTANPSVIARMTEDEFVSDIETHYQGRCLKRKKLRALYLVAKVSIGISAGAQSMATEIYFLVEKLNLIKKHIYATERTLVGLVDETEEGKYLLSITGLNYVAVAGLLAELGCFKSYRTAKQMIKMAGSNPTESESAGKRCARTPMSKQGRPVLRYCAWTSVIPMLRFNADFRAWAKKRRERPVHANPLSGREIVGAALNKLLRLAFALVKNQTLYRSPQLALVNV

SEQ ID NO: 125657 - protein, 330 aa, unidentified
MTHAVLGIDIAKLTFDACLIRPDGSLRHRTRFANSPAGFTELAAWLKKHHVTTTHACLEATSTYADALARDLLERAHRVSVVNPARIHDFGKSRLTRTKTDKADAELIARFCLTQTPPAWTPPLPEITELQGLIRHLETLEAARQQHANQLATATTQIVRDSLTALIRHLEGQVVEVEAAITEHIARHPDLRADVALLVSIPGIGERTAARLLAEIIHLKSYASARQVAAYAGVSPQQRESGTSVRGKTQLSKTGNARVRRAVYLPAVVAKRYNPLIKALCERLAERGKPPMVQIGAAMRKLLHLAYGVLKSRKPFDPNYGRPQQQPHAA

SEQ ID NO: 125658 - protein, 396 aa, unidentified
MKKNHTSPPAPQGRVIGLDLHPDVFSAAALAGRDAATAQVEQSWDRLRTAELEKWARKLQPGDVVVLEASGNSFTAVERLRAAGVPAIVLESQRAGQIRKSYCANDRLDAVKLARIYLSGLAQPVWTPDETTRARRETLATYRKAVVTAVRVRNRLKSFLSDHHVRLGKGAQLTRDSGAKAVLAAAPWSSLQRMVLEEMLAELRMAHDRRQRLSAAIAREVAAYPRILQLMRLLGVRHIIAFAIMAVVGDIERFANPRKLVAYLGLTPSVEDSGLTIRGRGALVSAGRGDLRSLLTQAAQNAMNQKASPLHAWGWKLCLRKGHRNIAVTAVARKLTVSIWYLLKGLFRPLASVDDSLKVKLTKLATAIGLPAIRELGFKSKAAFIEEKEAWLLKPA

SEQ ID NO: 125659 - protein, 322 aa, unidentified
MRDQQVYVGVDVSKDYLDVAVQPTGVAWRVQNNDSEIQELVSRLKDLRPKLVVMEATGRYEMPLAGGLQLKGVPMRVVNPRQAREFARSTGKLAKTDSIDAEALARFGEGAKLEPRALPDEQTQRLSAILTRRSQVLKMLTAERNRRGSAPEAVRPRIESHIEWLKREMSDIEKDLETAVKESPAWRSKDHILKSTPGVGPVVSLTLLADLPELGTLNRKEIANLVGVAPLNRDSGRFRGRRTVWGGRARVRRVLYMAARTAVRHNPVLRDFYDRLRHAGKPDKVAITASMRRLLLILNNMLRNGTRWDPHYASISSPISAH

SEQ ID NO: 125660 - protein, 338 aa, unidentified
MNYHNLIAIDLAKNVFQVCTMSTNNHVLMNKSFNRQGLTEFMLNQPTSVVAMEACYSSHYWARLFKSFGHQVKLLPAQHVKPFVRGNKNDHNDALAIAEASQRPGIKAVPIKTVAQQDIQSLHRLRERCVSQRTSLSNQTRGLLSEYGIVFPAGFKSFKQTLAVLIDPSNTQLTEPLKQQLRYVADEFDRMSARLTELNQVLAQIAQTNPHCQRLMSIPGIGYINATALYSAIGNGSQFNNARELSVWLGITPKQYASGDKQVMAGITKRGNRYLRKQLIHGARALMRYCKKRDDQLSHWLKAIELRRGKNKACVALANKMARLCWTLLQTNQMYRSR

SEQ ID NO: 125661 - protein, 330 aa, unidentified
MTMFGAERPDTKAEVILGVDTHLDVHVAVAVDYLGRRLGESSLPTTAKGYERLLCWAKSFGPVRCAGLEGTSSYGAGLARYLKAQGIEVLEVERPERRQRSSRRNVKSDPSDAESAARAVLAGEASGLPKSGEGSVEMIRALRAARRSAMKARTQAANQLQGLRVTAPEELRHRLRGLSTKELVSVAARFRLGDDPRDVPTATKFALRSVARRYEALSAEIDELDAQLDRLVTQLAPELVSLAGIGTDHAATLLIAAGDNPQRLKSEASFASLFGVSPVEASSGKVVRHRLNRGGKPGRQPSAVHDLSGSNETRSSHTGVRRKAHRRRQE

SEQ ID NO: 125662 - protein, 318 aa, unidentified
MNIIGLDISKDTIDATLHKTNGSIHYIKFKNNDDGLKQFRLWIKGNRIRKAYIGMEATGIYYEKAADMLSSYYTVYVINPLKIKDYGKSRFNRTKTDKADSNLIADYIKRHQDTLIPYQIPKNKALQKLINLKNQLQQHQKQIKNRLHSTEEDFIRNIHQDLIDTIQDKMEQVKIAISEQIKKQTDNNHYRNLQTIPSIGKDTASVLYAQLTEKHFKTANQFVSYAGLSPAIMQSGTSVRGRGRLSRYGNRRLKSTLYMPALCAYRFNAFPKLINNLKKAGKPKMVIIVAIMRKLAKLAYYIVKTGQPYDAERHRLNQ

SEQ ID NO: 125663 - protein, 343 aa, unidentified
MDQYVALDVSLQKTAVCVLNVSGRVLIEADVPSEPAALIAFIQTHAPGAARVGLESGPTSPWLWHSLKAAGLPVVCMDARHAHAALSVRPSKSDRNDAHGLAEMVRMGWYREVQVKSLAAHERMALLGVRRRLVDMRVEIDGQIRGILKTFGLVVGSGNKGAFAQRARMLAQDHPVLSALIDKLIEVREVAVAKVAALDKEIRRFVRNDLTLRRFMTVPGVGPVTALAFRSTIDEPNRFKRARDVGPYLGLTPRRYQSGETDRQGGISKCGDRFTRTCLYEAASVLLTKVQRWSPLKAWGTRLARRIGSKKARVAIARKIAVILRCIWTDGTEFWWTKETATA

SEQ ID NO: 125664 - protein, 345 aa, unidentified
MHIASIGIDLGKTTFHLVALGERNKILVRKKFSRPQLLAYTANLPATLIGLEACAGAHFVGTALREQGHQVRLIPAQFVKPYRKSNKNDFLDAEAIAEAVTKQNMRFAQLKTQEQLDWQAMHRVRDRLVRRRTALINEIRGFLLERGITFAAQPIQLRKNLPAVIEDAEQNLSPRLRWLLDRMWQEWKQTETEIQAITDEIERISNDDARCRQLRQIPGFGPLVSTATVAAIGNGSAFRRGRDFAAWVGVVPRQYSTGGKQKLYGISKRGNVYLRRMLIHGARAVLFRVKYDTGGFGQWVHRLAQRAPSNKVVVAIANKLARIAWAVLSSGQDYRHQPLQQLTAA

SEQ ID NO: 125665 - protein, 408 aa, unidentified
MNTLYVGIDVSSKSNVVYLMLPNGDKHSNFSIANSHEGSTQLVKRILSALTAHSLDTVLIGLEATSVYGDNLMYFLREDATLAPFNRKIHVLNPKQVKKFHDAYNDLPKNDYVDSFVIADCLRFGRINKEVYMGDYRYKALQNLTRARFFAVQNLVKEKQRFMNVLFKKYSTMTQEKVFSDTFSTTALAVYDEFESAEALANMDLHELTDFIIEKGKNRFPDPDAVAKAIQKAARSSYRLPKTVNDSVNQVLSISITSMKALESQIKEFDKAIKAQMELLPNVLISIPGIGPVYSAGIMAEIGDINRFNNQAALAKYAGLAWKQHQSGGFESEVTRLIPSGNRFLKYYLCEAAFSLVRCDKEYSDFYHLKYKEVNRCQHKRALALTARKFVRLVFRLLKDNRLYCPAK

SEQ ID NO: 125666 - protein, 410 aa, unidentified
MRIIRKRCLGLDLHKKQITGHLRVHRGSEAEPERIDIRFGTMPGDLLELRQWVVEHQVTDVVMESTSVYWMHVYELVESVTRPAVVNAAHVKKVPGRKTDVCDAQWLSELHAHGLLRLSFVPPKEIRELRSITRYRTKLVAMRTAAQNRTIKMVEIAGIKLSSVVCDSFGKTGRALLDALAEGTVEASTVIKLAKGSLRKKTVELHAALQTPLSENQRELLAMHLRAYDAIDAQIAETEIKLAERAKPYAAAIEKLDAIPGINPLAAITVLAETGVEMSVYRNAHHLTSLGGLAPGNSISADKRRRIAMPKGNRYLKRICVQIAWAASRKNGSFLRSRFNRLSYRIGRNKAIVATARHILIIVYLMLAGDHSYKDLGSEFYEKRNKERSIKRHVQRLEKLGFTVELKPTE

SEQ ID NO: 125667 - protein, 334 aa, unidentified
MKQVSQVGVDVDSEKLVCMMQRVGQRMPLTTFANTAVGHEKFIRWATKRARSTRVCLEATGIYSLQFALALHDAKNVEVMVVNPRAIKDFARACMQRAKTDAVDAGGILEYLERMPFTAWQPPAPEILQLQAINRRIVQLQTELTREKNRGHASEFAGASGDAVANDIEVNIRHLERRIERMHDSGLQLVHGVPALATKLAHLVSAKGIGEASAMRLLAEVLVLPVDLAAPQWVAHAGLDPRPYESGTSIHRPRRITKVGNRHLRAALYMPALVAIQHEPNVKAFYNKLVAAGKKPMQAVVAVMRKLLHAIWGMLKHDQDFDGNKFFRLAEKTA

SEQ ID NO: 125668 - protein, 398 aa, unidentified
MDLPVYYELETNNGNRDYRIQIGGHYMNYNTVYVGMDVHKESFTLCSCRYEDEKASHYQRTPASYKNVLRYLAFLRTIYGEDTRFVCGYEAGCLGYSLYHQLENFNVECVILAPTTMLEQRSKRRIKTDKRDAEIIARSLAQHNYSPVHIPTETDNQTKEFIRMRDDHKAELKKIKQQILSFCLRQGYQYDGSGNWTAKHVKWLRSLKPAGLYKEILDEYLLTYTILTDKLNRLDQRIEELASKEEYKESVSKLTCFLGIKTHTALSVIVEVGDFQRFVSARKFAGYLGLVPGQHSSGDDRNGLGITKAGNTHVRRLLVESAQSYTRGKIGYKSRVLRSRQAGNSPQVINYADRANERLRRRYYKMVLKDGKKYNIAKTAVARELACFIWGMMTDNIY

SEQ ID NO: 125669 - protein, 328 aa, unidentified
MNVAGIDVSSKTITLAISRDGQIGKAREFKNTPQGHATLINRLRKATVSRVCLEATGQYHLDLALALEDAGLPLMVINPKAAKRFAEAMQTRTKTDVAVLAEFAQRMPFEPWQRPDDLALAIRACARRIAALNKLRTQTKNQLHAAQLTATTPDFLITDRQHSIAHREAQIEHLRRHVLDLIATDEERQQTLERLTSVSGIADASAIQLLGELLVLPDDMSAKQWVAMAGLDPRQHPSGSSVNKKPRISKAGNRYLRMALYMPALSAARHDPYVRAYYHHLIENRGLKKLQALCAIMRKLLHAIHAMRKNRTPFDSSRFYSPSETVAQ

SEQ ID NO: 125670 - protein, 350 aa, unidentified
MNVTHYIGFDVHKKSVSYCVKTADGQMVEEGRLLATRAVLRQWARKRAEPWRGAMEATLFSGWIYDTLRPFAVELQMGHPALMKAIGASKKKNDKLDARKIADLVRCNLLPACYVAPVEMRELRRMLRYRNLVVAQATRMKNKMSGLLMEVGAPYNKQRLHGKKYFDELLDSLEEVPASVKDLLRLSRGALEMFEATQQQLLGRLRQEPLLAQRVILLKSIRGVGEVTALTWALEVGDPQRFSSVGRAVSYCGLTSALDSSAGKQQRGPISKQRNAHLQSVLIEAAKLAPRWNPQLAALHARELERGNRNRATLALARKLVAYLLGVDKSGQPFQIRGQDAAESEKEEAA

SEQ ID NO: 125671 - protein, 339 aa, unidentified
MDKIAGCGLEVSARELVVALGDQRVQRYANTAAGHGKLLETLTRGGQRVRVVLEATGMYGLDVALRLSAAAGVEVMIANPRAVRDFAKAMMQRSKNDPLDAVVLWEYATRMPFRAWQRPSLNRMALWSITRRIQALTEQCRGEKNRQHAAGISQTTPACVRRDIARNLHAQQQAIKKLRREAQKYVAAEAKLQQEYQLLVSVPGIAESSALQILGELAMLPADRDIRQWVAYAGLDPSEHQSGTSVRKPTRLSRSGNRHLRRALYMPALTAIRWEPHLRGFYEHLVHRGKRKKQALLAVARKLLHAIYGMFRTNCSYQGELVFRLAPIEKNLVVAQKCC

SEQ ID NO: 125672 - protein, 345 aa, unidentified
MTTHYIGADVDSRMTNLAVERNGRIIRELCVPTTIPSLRAAVETIPRPRMMTFEEGPMAHWLARNLGPLVDELIVCDPRRNSLINQDGDSDDRIDARKLAVLLRGGFLRGVYHSDNDQHVLLKHWVGLYHDRVKDAVRQINKIRAMCWRHGLRPLRGALRNLPGRQDWLGGLGEHPAVAQLEMLFLGFDAVAQQVEMSRRKLVTLSKPYPIIRLWQAMPGVGPIRAVTLFAYLDTPWRFDSNPHKLWKYCGVGLERSSSGKDRYGRMKVGQLQLAWQVNRRLKAAVMGAALSAIQQGGNVFAQQYERLVRDGLTGGNARHTVARKMLTVMWGMWKTGSPFDPSRA

SEQ ID NO: 125673 - protein, 338 aa, unidentified
MIVVGVDVHKRSLTAVAVDELGRAVAEQTSAASGEAVVEWARSLGAERLWAVEDCRHVTRGLERRLLEAGERLVRVPPRLTAPQRRRGRVRGKSDRIDALAVARAFLQEPLLDGPRAGEETLRELKLLVDHRDDLVAERRRCQQRLRWHLHELDPTLAVPLGALDRAVWLDRLGRQLARREQTTQVRIARDLVGRCRTLTRSIGELERELHARTAALAPRLLQLPGCGPLSAAKLLCEIGPIERFPTDAQLARHAGVAPLDASSGKHQRHRLDRGGNRQLNCALHRLAVTQGRVHPPARAYLERKQAEGKSRREAIRCLKRQLARTIYTTLKNEPLLT

SEQ ID NO: 125674 - protein, 385 aa, unidentified
MSQLNDLSRSLTSLEQDNAIIAVIETSQSSWLVAGIVPGIERHPLKKLEPNEAELLRLLMRWRAEATKMGCTITRIAVAYEAGRDGFWLARWLRAHDIETYVIHPTSVAVSREHRRAKTDRLDTGLLKRVFIGWLRGEPDHCHMVTIPTLAEEDAKRPNREREGLVRERTRIVNRMKSCLARFGVRSFKPTLRKAPERLATLVTPEGVPLPANTLLELRRDMARLRFIMDQIKEVEEARGQRLEQAPQEKSQAMVRLLARVIGVGIETADMLVHEILSRSLRDRRAVARYAGLTGAPDESGSRRQEKGLAKAGNARVRRGMIQLAWRFLLFQKDSALAQWYRTRTESAGKKRKTMIVALARKLLIALWRLVTIGEVPAGVVLRAA

SEQ ID NO: 125675 - protein, 511 aa, unidentified
MTDRKFMDPLATGIDVGSERMYVSIGGATPKVFGSTTSQLHELKDYLVLNQVSQVVMEATGIYWLCLYDVLEQAGLRVLVVNSQHVRIMPGRKTDVKDCQFLATQLATGNITFSGFVPDAQIRRLQDYTRLRQNHVESAAREILRMQKALERMNLKPHDVIRSLSGMSGMNIIRAIVKGERNPERLLDLCADQIIRTKSNRLKDSLRGTWKEEHLFALRQALSAYDFYQGQIKECDSAIETVLRSMTSTNGGGQAVSHPDSRPPDACAEEVHPAQGGTAHWQSGSDPTKVAAGRSEGAVSLISGEEIAAQNRLAAKLANTPDGKAANKAAKKAQRIRGNTPKIADLQGLLMVVCGGNDITVIPGIGLNSLLQIVSEVGTDLTKWPTAKHFVSWLGLAPGSNQSGKRSRSTRRHVNRAGHVFCMIASSVGRSKDTALGGFYRRLKGRRGAPVANKALARKVATLFWQLMVFGITFVEEGLLRYQKRSQESQRRALGKLAAALNCEVVQKTAA

SEQ ID NO: 125676 - protein, 411 aa, unidentified
MVTVGIDIGGRSHVVARCREGNDRADRDALRVSQSRAGFAVLDAWLERQAEPVTLVTMESSGHYWMPLASHLRRRDVPVAVVNPLAAKSFAKSRLARTKSDPADARNLAEMAMREPLDARDPLTGAELRQAARFAMTLVAGQAKVCQRLLRLVDLGFPELGELFDDPTCRTARGVLRIAPTARAATRRRTSTLANANAGPGRRRLGQTKAERLQAAAADSIAVPELDAEVAFEIGLLLDQYDLLEGQIEAADRRVASLLDGETARRLLTIPGVGPSTAATLMAEVGDITRFADVDQLLAYAGVHPAERSSGRKGSSPETAWRMSKAGNSHLRVAAYRMAVVGVQHNPIIAAHYARKRAAGKSKMNALGHCMRKALSIVWGVWRNGHDFDPAWGTSVNSPRVLPTPGSEIAK

SEQ ID NO: 125677 - protein, 365 aa, unidentified
MASVSHLAPIHLGLDVHRDTISVGILTADMQVPEVDKIPHDEPSVRRLVARFSNPRVLRACYEAGPTGFELARLLASVGVSCQVIAPSLIPKAPGDRVKTDKRDCRRLARLHRAGELVAIRIPTLAEEAVRDLCRTRGDMVEDRMRARHRLSKFLLRHGQVWRAGKAWTLAHERWLVTQRFTEPALQTTYDHYRAVLASRDAQLEAIEADLASWYDRAPFAEQVARLAAYRGVTRLGALHLAAEVGDWRRFARASQFMGFCGLVPSEYSSGQVTSRGHITKAGNLHLRTQLVESAWAYQHRPAIGAQIARRQQGLDPQVVARAWAAQLRLCGRFRRLRARKTSTNIVATAIARELAGFLWAEMTA

SEQ ID NO: 125678 - protein, 348 aa, unidentified
MIIIGVDFHPEFQQIASVDSETGEFQEKRLAHPAEAEKFYRALVGQKVRVGMEASGHARWFERLVAELQFELCIGDAAEIRTKRVRKQKTDRQDAQLILRLLLEDRFPQIWVPSWENRDLRQLLWHRHRMVQARTRIMNQLQAVALNEGLRCKKKLWRERGRQQLESFRLAPWATRRRRDLLELLDRLTPTIAELSQAIEQEVEKCPAAQRLRTHPGVGSLTALAFVLIMGEVNRFRCGKQVASYLGLVPLEESSGNRRRLGHITKQGSSMMRFLLVEAAQVTVRSLPEWRNKYLHLVLRRGRKIAKVAMARRLAVHLFWMMRKDWNYQQLKKFGSHAGEPGNRHGVK

SEQ ID NO: 125679 - protein, 391 aa, unidentified
MPDGICWVGLDVHARESTFAIFDRDSGEVITKRVVGRPHELLPLLRGVERPARMVYEAGPTGYGLARGALAEEIELGVCAPSKTERPPADRIKTDKRDAIRLARVLAAGELTLVTIPSVEREQLRDLVRCREDIRADLVRARHRIGNFLLRREIYWEGTGEAWTRKHRSWLTSIKFADHASRSTLADYLHAHDVLISRRDQVEADLATLALTAPCAPTLARLRCLRGIDTLSALGLCAEIGEWERFDHPDQLSAYLGIVPSEHTTGRQRRLGSITKAASTHARRLLVEAAYHYRRGPVVGEALERRQRGHPPEIINISWKAQRRLNARWRQLRDARRKPNGIVAIAIARELSHYCWEIATCTTTRNRHQRQPAASDLPTHADTNSRLTDTH

SEQ ID NO: 125680 - protein, 367 aa, unidentified
MRKHNTVKEPAVTRKRANRELTVGIDLGDRSSRYRILDGEGEVLAEGSMATTRKGLAQVFGSKPRSRLALEVGTHSPWVSRYLADLGHEVIVANARRVRLITDSTRKDDRLDAKTLARLVRIDPELLSPIRHRSAQAQSDLMVIRARAVLVEARTMLVNAARGLTKSCGGRLGSCGTSQVCEELAKSLSEPLKTALNPLLAEAQSVRERIRAYDEQIESIAKSRYPETELLMQVHGVGTLTALTYVLTVDDPYRFRRSRDAGAYFGLRPRRRESGDSRPQLRITKEGDGYMRKLLVQCAHHILGPFGPDSDLRRWGLELAAHGGKNAKKRALVAVARKLAVLLHNLWMTGEVYEPLHVRRAGKAVAA

SEQ ID NO: 125681 - protein, 335 aa, unidentified
MLTVGLDVHQKTSTVCILDENGRHVKTWTLAGRWPKLMAKLAKIPRPWQVCFEATCGYGYLHRQLSRMAERVVMAHPGQLRLIFRSKRKSDRVDAKKLATLLYLDQVPAAHVPPAEVQEWRQLIEWRRRLVDRQTMSKNSIRSLLRTHGVIAPRRLWSRKGLAWLAAAELPSETARLRRDMLLEQLAATKSQVTRVTRVLDRIGQRHPGVLVLTTIPGVGLRTAETIVAYVDDAKRFGRGSQVAAYFGIIPCQDASAGTNRLGHITRQGPPTARKYLVQATWQGVRRSAAIRAYFERIGRGQKPRRKIALVATAHYVLRCMFAMLRTGEAWREAA

SEQ ID NO: 125682 - protein, 343 aa, unidentified
MEYYVGLDVSLKQTSICVVNQVGSVVREGVVDSEHEAIAAFIRSKVPGVVRIGLETGPTATWLWTEPKQLGLPVICIDARHAKAVLKMQINKSDRNDAAGIARIMQTGWFKEVRVKDLDSHSVRALLASRALLVKIKRDLENQIRGLLKNVGLVIGRAKFNVFAVRAEELIEDRPDLIAVVGPLLKARKAIEQQTDDLDRKVLKLARNDAQVRRFMTVPGIGPIIALCFKATIDDPTRFKRSRSVGAYVGLTTRRHASGEIDWTGRISKCGDAMLRSYLFEAAGVLLTRVPKWSALKAWGMRLAKRNGLRKAAVAVARKLAVILHRMWIDRTEFNWSKKEVAA

SEQ ID NO: 125683 - protein, 347 aa, unidentified
MKFYTEQHPHYCGIDLHTRMMYLCILNQAGAIVLHRNMKAEPDSFLKAITPFRQDIVVAVECMFTWYWLADLCAREGIAFVLGHALYMKAIHGGKAKNDRIDAHKIAALLRGGMIPQAYVYPAEMRSTRDLLRRRMHLMHQRAELLGHIQITNYQYNLPEIGKKIAYRSNREGVAERFDDPSVAFNVTFDLKRIDFYDDLLNQIELEILRHAKQHDANTFHLLDSVPGVGKILGLVLLYEIHDIARFPTVQDFASYCRLVKPKKESAGKVSGSSGGKIGNAHLKWAFSEAAVGFLRNNPQGQAYLARLESKHGKGKALTALAHKLARAVYYMLRRKEAFDMKRFVNR

SEQ ID NO: 125684 - protein, 368 aa, unidentified
MSKSITSFVGLDVHKDSTAIGEAEAGGETPRFIGTVGPELGKLLKALKSLGKPEAMLVVYEAGPCGYGLARELCSRGYACEVVAPGKIARPPGERIKTDRRDALTLARLARSGDLVKVMVPDERDEAIRDLSRAREDAVRARLKARQQLKALLLRHGHRYPGKSSWTLAHERYLAEVSFAHPPQDIAFAEYRQAVREGHERVERLTEALRSQTEYWRLKPLVAALSSLRGIDFVSAVTLTAEIGDFSRFAHPSELMGFLGLVPSEYSTGDTRRQGNITKTGNSHARRVLVEAAWNYRFPARLSRPLQVRQEGQSKAVREIAWRAQLRLAHRYRRLSSRKLHPNKICVAIARELAGFLWDIARQVNVAA

SEQ ID NO: 125685 - protein, 418 aa, unidentified
MLANVRKMEAAVITAVGIDVSKSKSTVAVRRPGGEIVLRPFDVRHTNSDLKKLTSTLKKLGGDIRIVMEHTSTYWRPIALTLKEAGFFVSVVNAMLIHDFSDNTIRKLKTDRADALKIANYALTFWDILPPFNNEEETRLLLKMQSRANERITATATALRNGLIALADQTFSGVNIAFAPNTKNANGHEKWVDFFLRYWHKDCVCQYSMEAFTESYRGWCKRKNYKFRTDTAHKIYLLAQESVATLPKCESTKMLITQACKSLNAVCEAKQSTQLEMQRLAAMLPEYEVVMQMEGAGPVTGPALMAEIGDVRRFKNKKALVAFAGIDAPPFQSGAFESKSRHVSKRGSPHLRRTIFIISNIILTRSNPENAVYCFMDKKRSEGKHYYVYTVAGSAKFLRVYYARVTEFLRSQPSYDAY

SEQ ID NO: 125686 - protein, 355 aa, unidentified
MERYIGLDPHGTSCTFGVIGPSGRKLRNDVVETNGKALVSYLRGIPGRKHLCLEEGTQSAWLYEILSPHVEEIVVAATGESRGQKSDVLDAFRRAEELRTGTIKKQVFKAPRMYSRLRELGRVHSMLVRDVVRVQGRVKAMYRARGVGTPGKSVYGPKERERWLRQLPVSSRWATEKLHEQYDLLLELKREAEQELVAEARKHRISKVLATAPGLGPIRVARLLPVVVTPHRFRTRSQFWAYCGLGIVMRSSSDWVQSPNGEWMRAQVQRTRGLSRNHNSSLKNIFKGAATTVVMNMHSDPLYEHYVQLTSAGTKPNLAMLTIARRIAAIVLRMWKDEQEYDPGKLKRKVAPVAH

SEQ ID NO: 125687 - protein, 430 aa, unidentified
MKKKSQLNQKIEAVTLGTLVVGIDIAKEKQWARFVDCRGRECGKAMYFRNDRTGFDSILAKIRQISKENSFGDAIVGMEPTGHYWKSLANFLMKQERIHVVLVNPYHTKKAKELDDNSQTKSDKKDALTIARLVKDGRYSEAYLPHDVYADLRVLTTARNSVNRQKNALENTILAVMDEYFPEFTKVFKHPFKGKAAMQVLKACPFPKYILEMGTEGVKAEIKKAVKRTVGRKRAQLLVDTALASVGVDYGVESAQCKLRLLLESLELANRQLAQIEAEMAAALQKTGISEYLLSIKGVGVVSLAVCLGELGDPLRFDDPRQLSRLAGYNLVEDSSGKNKSGTCISKRGRKGLRRVLYQMALTAVAVNPEMKELYRYLKTRAANPLKKMQALVVISKKLLTLIYTLAKKKQYYDSARVFGEVRRNQLLAA

SEQ ID NO: 125688 - protein, 356 aa, unidentified
MLNDAKYIGLDVHQATISVAILDSAGKLVMEAILETKAETILQFIHGLHGSLHVTFEEGTCAAWLHDLLKPHVTQVLVCDPRKNALIKAGNKNDRIDAHKLADLLYLDKLNPVYHGEAGIRALKEVARSYLALTRDTTRVMNRLKALYRSWAIPCAGQRVYVPRYRSEWLAKITEAGVHRRAEIYYQQLDALRSLREQVRRDLLAEGRKHSAMKLLRQIPSIGPIRAVLLIALMQTPHRFRTKRQLWAYCGLALKTSTSGEYRIVEGQLKRAKKFLAIRGLNANHNHDLKNIFKGAATRAAAVAGPFQEFHAGLVARGMKPTMARLTLARKIAAITLIVWKKGVNFDAEHLKQQAA

SEQ ID NO: 125689 - protein, 346 aa, unidentified
MVLIGCDFHPSWQQVSWLDQCTGETRDQKLVHAPGEVEKFYRQFSAGTVIGMEATGNCQWFLELMASLGHEVRIGDAAKIRASDARQQKHDKRDAQLLLKLLSEGRFPQIWTASIEQKDLRQLLIHRHKLVGVRTQVKNGLQHLAMNQGVLKKRKLWSKAGEKVLRELPLRPWASRRREDLFKVREMLNGQIDLLDHAVVEAAEKNEKARLLMTQPGVGPITALAFVLTMGDVSRFQRGKQVASYLGLIPREYSSGGHQRLGSISKQGNTFLRMLLVEAAQIAVRYDPGFRNEYLHRCHTKAKGVAKVAAARKLAIRLYWMLRTNTGYPEVVRVESSSRVALVSAS

SEQ ID NO: 125690 - protein, 349 aa, unidentified
MGEVSTIGVDIAKSVFQVHGVDASGRVVIRRRIGRAKVLDFFTDLPPCLVGMEACATAHQWARELKKLGHDTRLMPPTYVKAYVKRGKNDAADAAAICEAVTRPSMRFVPIKSVEQQSALMLHRTRDLLIRQRTQLINALRAHLAELGLVAAKGHEGLHQLVTAVTESSDERLPNNARFACQSIVAQLHAVQTQIKGLDKCIIHAHRANADSKRLDAIPGFGVILSTAVVATMTDPKAFRTGREFAAWIGLVPRQNSSGGKERLGSISKQGDRYLRRLLVLGAISIVGTARTRPDKYPWVTELLGRRPAKVVAVALANKMARTAWAVLARGETYRAPTRSSSAAIAVAA

SEQ ID NO: 125691 - protein, 419 aa, unidentified
MTARPRAYCGIDWAEGHHDLALVDGDGTLIAKRRIRDNAQGFTELIALLAEAGDDPEDPIPVAIETPRGLMVAALRATGRRIYPINPLAVARYRERHAVSRKKSDHVDAMTLANILRTDAHVHRPLPADTALARAIAVLARAAQDAIWRRTKATQELRSLLREFYPGFLKAFARNGSTNLAGPEARAVLALAPTPAKGAVVSKARIAAALRRAGRQRRVDAAATTIHQALRTEQLRHPQVVEDAMGRHAAALLATLNTECTNADELAHAASEAFGQHPDYAIITSFDGLADLTGARILAEIGDDPNRFADARALKAFAGSAPVTRASGRSISVTRRTVKNNRLAAVGFVWAFAAIPRPGPARDHYDRRRARGDRHAAALRNLYNRQLGQLYHCLQTRRTYDPAQAFPESPAQPAEHAAA

SEQ ID NO: 125692 - protein, 361 aa, unidentified
MSNIVYGGLDVHKDTIEVCLIDRSTGEIVSEQLPNDRTRLERAVRRWSKLGELHLCYEASGCGFVIKRWLDNVGVHCEVIAPSLVPRAPGDRVKTDKRDARKLATFYAGGLLQPVRVPDQEEEGVRALVRLHDELTRDATRAKNRALKYLATLGYYYRDGKNWTKKHRAWLKALELTPVQDLILRTHIEELDNLVGQLEGVDRKIEEVAHTECYWGKVQRLMSLKGVGLYSAMVLLTEIGDARRFPDAPHLMGYFGLVPREDSSGDSRRTGRITKAGSSRARWVLTEAAWNQMSKPGNCDRLRKHWQGQPAEVVAIGKKAEKRLHDKFWKVALRKDRKTAATAVAREMTGFIWALLTLEVA

SEQ ID NO: 125693 - protein, 416 aa, unidentified
MRVHRNCCGLDVHKLTIAACLISESEDGTSSQQKRIFGTMTQQLRELAQWLAEAKVTAVAMEATGIDWVPVWNVLEPYGFELLLINPEHYKAVRGKKTDLKDGTRIAELLQDGRLAGSYVPPVAIRVLRDLTRYRTKLVQYQSSIANRIQRLLEQCNVKLASVASDVLGVSGQAMLRALAAGETNPQRMADLAKRQLRKKIPALQLALEGCLLPHHRFLLADMLEELDHIGSKIARLEQAIEEQMRPYQKAVDAWMTVPGVKQRLAWNLVAEVGPTVDAFPSAADLVSWAGICPGNNETAGKRKSGTTRNGNRWARKALCEAAWAASKTKATYLQAQFRRLAAIRGSKRAIIAVASTILTIGYHMLKEGTTYRELGGNYFDKRNLLRTTRRLVKRLEALGHRVILAPTPSPLQSSD

SEQ ID NO: 125694 - protein, 339 aa, unidentified
MRLYAAFDLHSSNSYLGISDEKGKRIFKKKLPNDPTTIKETLKPFKADIEGIVVESTYNWYFLVDLLREEGYRVHLANVMKTQQYSGLKYSDDKNDAFWLVEMLRLGILPEGYIYPKEERPVRDLLRKRGHLVRLRTSLIVSLQNIIARNLGSRLKANDVKILTTDRVTPLFQGNEDLALAGKVSKEAIDFMTRQIKAIETTIDGRIHLSNPYDRLLSMPGVGKILAFTIQLETGSIDRFQKVGNYVSYCRKVPSGRFSNDKKKGTGNRKNGNKYLAWAFSEASDHARLFDAESRRYYQRKLQKTNAPIAHNALAHKLARAAYYIMRDGVIFMSDKAFS

SEQ ID NO: 125695 - protein, 412 aa, unidentified
METLVERGCGLDVHQATVVACLLIVRKDGKVQKQVRTFGTTTRELLSMREWLLSQGCTHVAMESTGVYWKPVYAVLEGAFQIVVANAQHVKKVPGRKTDVKDAEWIADLLCHGLLRSSFVPPKAIRELRDLTRYRRKLVESQSAERNRLLKVLETANIKLASVATDVFGTSGRLMLRALIEGKATAQEMAELAKKKLRSKIPQLELALEGRLEDHHRFLLKLQLDRVERVEGDLAVLEQHIQEKLAPYAAQLALLDEIPGVDWTLAVVIIAELGVDMSVFQSVSQLASWAGVCPGNNESAGKRKSSHIPKGNVYLKTALVEAAHSAAKTKGTYLRDKFYRLKARRGYKRAAVAIAHKILVSIYHMISQNVSYNDLGDLYLDKLNKNHLTRNLVHRLERLGYSVTLAPQQKAA

SEQ ID NO: 125696 - protein, 324 aa, unidentified
MKQAHSELFIGIDVCKDRLDIADDSGSPIWSVANDDAGVSTLTARLKSLKPALIVMEATGGLETLPYAALTAAGLPSVVINPRQARDFAKAVGKLAKTDAIDARVLARFGAAVKPAVRPIKDDKAQELAALVTRRRQLIAMLTAEKTRLKQAPKWIRKDIKAHIQTLEQRLLKLGAGIAKNIKNTPGWKEKDDLLKSVPGVGDVLSMNLLANLGELGTLNRREIATLVGVAPLNRDSGRCRGRRMIWGGRAEVRAALYMAALSASRYNPVIKAFYQRLILKGKKPKVALTACMRKLLVILNTMVKNKTTWNPGQFYILDLNHGC

SEQ ID NO: 125697 - protein, 331 aa, unidentified
MEIKEIIGIDVSKLTLDCCHHSSGSHKEFDNNLDTIASMVKWSLQVSGVSKKKLLFVFEHTGLYSDQLVQFLGGGDYLFNVVPGLEIKRSLGIARGKDDKADAKRIALYGYRVKDELKPFQIPSKTLEVLKRLMSVRKKLVTQRAGYIATLKEQARILNKQHNKVLFKVQGKMILTLDKQITIVEQEMNQLIEEDPELLDLYRLITSVKGIGGVTARFLIVYTVGFTTFESWRKFASYCGIAPFPYRSGTSIRGRSKVSHLANKEGKSLLSMCAVSAIQSNPEMKAYYNRRIDQGKNKMSTINIIRNKLLARAFAVVQRRTPYVNTMKFAC

SEQ ID NO: 125698 - protein, 394 aa, unidentified
MIYVGIDIAKDKHDCFIVNSDGEILFDVFTIQNNMDGFEDLLFKIKSVEKNPDKVKVGLEATGHYSCNILGFLKNKGLPTIVINPLYTSLSRKSISLRKTKTDKVDARTIASMIMSDVSLKPYSDTLYHNEDLKSLTRYRFDKVAQRAKLKQSVSRLVNILFPELETLVATLHGKAVYELLSEFPSAQHIASANLKHLTHILDKASKGRFKRVTADEIRETARKSIGSYLPAKSLELKHTIKLIGELNTEIAEIETEIKKIMDAIDSPILSVPGIGQNLGAVIVAEIGDFSRFESPDKILAFAGCSPSTYQSGQLYSSHAKMEKRGSRYLRWALLNAAAYVCKWEPTFAAYLAKKRAEGKHYYVALSHAAKKLVRVLYHLETTGDTYHPTSILS

SEQ ID NO: 125699 - protein, 313 aa, unidentified
MSQNNTSILYVGLDVAKSSLQLDLAGQSYDLTNDAKGHARLLKLLRPHAGMQVVCEATGGYEQPAVRALHAATVPVSVVEAGRVRHFARAKGQRAKTDPIDAAVLSQYGRTFQPAPTPAPTASQVRLAELSARRLQLIQTLIAETNRAAHYQDQFCVRQSRRLCRALDQQIAQCETAIAALIAADEPLQAKADRLDAIPGVGAITAATVLAELPELGRLSDQAAAALVGVAPFNHDSGAHQGTRHIAGGRASVRCALYMAALSAVRHDRILKAFYLRLRQAGKKPKVALVACMRKLVVLMNRLLKNPNFSLAH

SEQ ID NO: 125700 - protein, 356 aa, unidentified
MNQLTTVGIDLAKDVFAVCVLDVTGAVIERRVLRRDAFMKWAERLSSCRVAMEACGSAHHWGRWFSARGHTACLIAAEFVKPFRLGGKNDAADAEAIAIAARQPTMRFVAIKSVEQQAILAWHSVRAGWQEERTALLNRTRGLLAEFGVVIARSADRLLAALPGLVEDARLPDPVRTMLLEVREQLVALNARLAGCDRQIASHARSSDVARRASELLGVGPVTASALAAAVPDAKVFRNGRQFGAWLGLTPRQHSSGGRIRLGHISLRGNVYLRTLLVQGARSTLQSALRGDPAHAGRLQRWIRQLHERKGYYKTLIAIANKHARMLWAMLARGERYDADAWQRHPMNLSVRPATA

SEQ ID NO: 125701 - protein, 428 aa, unidentified
MEIPVASPEVVAWVGLDWADQRHEVRLQAVGSGASESFTVEQKPEALHGWIAELRARFPQGKVALALEQSRGAVIYALMNYDFLLLYPIPPKSLARYREAFASSGAKSDARDADLLLELVRAHRDRLRVWQPDDALTRQLRLLVEHRRRTVADRTRLTNRLTALLKTNFPQALDWAGDLHNPVACQFLRAWPTLEAVEGASRSELRRFFHEHRRLSAEGLQQLFQEIDHAQPLTRDPALVEASALMAQTLAAQLEAVIAALERFDQALGGLFGQHPDRELFDSLPGAGAALGPRLGAAFGTDRHRYQSAEELQQFSGVAPVTESSGKTHWVHWRMACPKFLRQTFHEFASCSLKKSLWARAYYEQRRRGGAFHHAAVRALAYKWIRILYRCWKTRTPYDESVYLQVLKRRRSPVWLAVGTLSIQEAHA

SEQ ID NO: 125702 - protein, 418 aa, unidentified
MNEDGDTRALRRYIGLDIHKHYCVIAAVDREGRVVLQAVRVEHADLEGWLKKNLCSTDHVVIESTTNAWHVYDLLAPLVERVVVANPIRVKQIAQARVKTDIRDTLILARLLAANLVPDVWVPPAHVREMRQLLSQRRQFVETHTQIVNRMHSVAHRHHLHHPAGKRFNEQNTLWQKDRRLSKVEQFQLELEKENREYIEKQISRIGREVAKMSHQKPWAESMIYLMQLPGFGVITAMTVLAAIGEIQRFDSARHLASYSGLTPGLEQSGTKYREKGITKEGRRELRWALVEVAQRAVKSDPMWKTRFQELQKRMHRNQAIVAIARRLLELVWYVLTRRQPYRHFSHERIAYKYLTWAWQMDDEARDGLTRQQFTRYYLMRLGIGHDLTRIALDPKHPRRISSEAELLTLRPELNHIE

SEQ ID NO: 125703 - protein, 316 aa, unidentified
MAYTQQQTALYVGIDVSKETLAVATYPTLKVEVIPNNAAHCEALANALAQQSVQRVLLEGSGGFEKSIVHALQQAGVPMTIVPPQRARYFAKSLRGNLKTDRVDARVLARFASCYPAPEATEVPAVQAPLKELWARREQLVQMLESEKKRLQVATHPLVRASLERTIAGVHEALTQIEAAIAALVASDEALAQKAALLQTVVGVGWVVASGLLAELPELGQVSHKVIAALAGLAPVRRESGRWRGYARIGGGRGRVRRLLYLAAVVAVSHDARWKAVYEGLLAKGKPKKVALCAVARRLLVALNAMVRDGRAYERV

SEQ ID NO: 125704 - protein, 397 aa, unidentified
MDSNYAVYCGIDVGKGEHHAVGLTAAGKKVYDKALPNDEAKLRAVFDRLASHGSVLVVVDQPNTIGALPVTVARACDHEVGYLPGLAMRRIADLYPGQAKTDARDAFIIADTARTMPHTLRRVDTGVEALAELEVLVGFDDDLAGEATRVSNRIRGLLTSIHPALERVLGPRVAHPAVLEILSRCGGPAGIRKVGKRKLTAIAVKHAPRMGTRLVGEILAALDEQTVVVPGTQAAETILPKLADTLKETLQQRKMVAEDVERALDEHPLSRVLTSMPGIGFRTAARVLIEVGDGSAFASAAHLAAYAGIAPVTRKSGSSIRGEHPARSGNKKLKRALFLSAFSALHDPTSRAYYDKKRAEKKKHNAALICLARRRCDVLYAMLKNRELYRAPLPSAA

SEQ ID NO: 125705 - protein, 412 aa, unidentified
MQVRFERVSGLDVHRDTITACVRVPEAKSERREEVRTFGTMTADLLALRQWLQEHGVTHVAMEATGVLWKPVYYVLEGAFTVLLVNPGHIKTVPARKTAVKDTAWIAQVLECGLLSASFVPPKPIRELRDLTRYRTELMHERTREVQRLHKVLQDAGVKLSSVATDIMGASGRAMVEALVAGTRDAGALADLAKGLLRKKLPELRRALEERFDAHHAFMASRILAHIDYLEAEVEEISRRIEEALRPFTSEVEKLSSIPVVKAKASAVIVAEIGVDMKQFPSDKHVGSWAGLAPENNESVDKHKRCGTKPGNKWLRAALVESANAAVKKDDTRLAWLYYRLRPRLGHKKAIVAVAHEILRIVYHVLARGKTYEELGRDYFDRAHKEAMKTRYVRKLERMGFEVKLVAKASAA

SEQ ID NO: 125706 - protein, 339 aa, unidentified
MNSMAVGVDIAKHVFQVHYVDQESGEIVNKPIKRAKFLEHFANRAPCLIGMEACGGAHHWARQLTKMGHEVRLMPAEFVKAFNIRNKNDAADARAIWLAVQQPGKPVAVKTEMQQAMLALHRMREQLVKFRTMQVNGLRGLLTEYGEVMSKGRAALDKEIPLALGRLAQRLPAALIDTLREQWNGLTKLDEQIAEIERRMREWKKEDLAVKAISEIPGVGLLTATAAVAMMGDPKAFSSAREFAAWTGLVPKQTGSGGKVNLHGISRRGDTYLRTLLIHGARSVLSHAKAPGPWVEQIKKRRPPNVVIVALANKMARTIWAVLAYDRPYQKGYVSVKPA

SEQ ID NO: 125707 - protein, 349 aa, unidentified
MVILGADTHKRSHTVVAIDDAGRELAQKTVPATPTGHRQLIVWAMQFNERRFALEDVRHLSRRLEQDLLRAGEHVVRVPTRLMGAARRSGRERGKSDPIDALATARAALREELPEAFLDGEERELRLLVDHREDYVAERTRTENRLLWDLHELFPGHEVKSRSLGLTKTLDAVEALLAPLSGLVAEIARERLGDVRRLTRRINELEREIARRTNELAPTLLELEGCGPLTAAKLVGETATASRFRSRAAFARANGTAPIPVSSGRNDRQRLNRGGNRQLNCALHRIAITQMQRDGRGSVYIDRRLANGDTKREAIRALRRRISDEVFRRMLIDEQARAERLPGCIPAAA

SEQ ID NO: 125708 - protein, 349 aa, unidentified
MRFYTTTHHHYCGVDLHAKTMYLCILDRDGKTVLHKNMRSRPEEFLAAVEPFRNDLVVAVECIFTWYWLADLCRHEGIEFVLGHALYMKAIHGGKAKNDKVDAFKIATLLRGGNLPKAYVYPPEMRATRDLLRRRLHLVRRRANLLAHIQNTHHQYNLEPPAAKIAYKVNRVGVAEAFPDPDVRKSMEIDFAMIEQYDTTLRDLELHLERRAKQHDPQAYHRLRSVPGIGKVLALTILYEINDIRRFERVQDFLSYSRLVKCEHSSAGKKLGTGGSKIGNAHLKWAFSEAAALFLRNNPEGQKHLRRVAGKHGKGKALSILAAKLGRAVYLILTKERVFDMERFLARAS

SEQ ID NO: 125709 - protein, 468 aa, unidentified
MPTNHRPHKRRLDELACVYPNAAGLDIGSAEIVVAVPPERDAEPVRVFLTFTPDLYALVAWLLACGIDTVAMESTGVFWIPIYELLEQHGIVPYLVNARHVKTVPGRKTDWNDAQSLQKLHALGLLQPSFRPDAEIRTLRTLVRYRAELIERRAPHINHMIQALKHMNIQLNLVLTDVTGVTGLAMLRAMVAGERDPQRLAHFRQPGCKHSEAEIVKALTGTWDEAQLFVLRQAIDLFDYYTTKIGECDTKLEQQYQAMESRWEPNAPLPDLPPAKPDSKSKNALNFNARAQIARVIGVDLVAVMGLSAVTVQTILSEIGTDMERFPTVKHFCSWLGLAPHNDISGGKVLRSRTMKVRNRANQAFRQAAQSVAKSDSSFGAYYRAMRARLGPKQAIVATAHKIARTVYQLLKTGEAYREESAAEYDHKRRERERKHLERRAQKLGYILTAIPSTAPESPPEGGCAGSF

SEQ ID NO: 125710 - protein, 404 aa, unidentified
MEVLYPRCCGLDVHQKTVVACAITPEGKQTCTFKTMTDDLLQLANWVVAKEITHVAMESTGVYWRPVYNILEALGITLTVMNAEHIKAVPGRKTDVKDAEWIADLLRHGLVRGSFIPDRPQREMRELVRYRRSIIRQRAQVVNRIQKVLEGANIKLSSVASNVMGASGRAMLEAISQGIEDPERLAEYAKGRLREKKPELQKALQGLVGPHQRTVLQSQLRIITFLDEEVSRMDKEIAERMRPFEETLERVDDIPGMGRRTAEDVLAEIGVDMSRFSSAPQLASWARLCPGNNESAGKRKAGTTGHGNPWLRDTLVEAAWGAIRTKDSYLAAQYHRLAARRGAKRAIVAVAHTILVIVYSLLKNGGEYRELGGNYFDERDKSNAVRRAVRRIERLGYQVELQPV

SEQ ID NO: 125711 - protein, 384 aa, unidentified
MRQTDDLSKSITPFVQGNTLVAIIELSLSSWLVAGVVPGIARQPLKKLEPDEAELQRWRDEAVKSGCAIERLVVAYEAGRDGFWLARWLRAHEIEVHVIHSTSVAVSREHRRAKTDRLDTAMLLRVFMGWLRGERGHCGMVAVPTIEEEDAKRPHRERENLVGEKTRIVNRMKAALIRLGIRGFKPELRRAPLKLDGLRTPEGLPIPPNTLDEIRRDLARLAMVREQIDLIEQARLERITQGPKTGPNAMVRLVASIVGVGVETADMLVREVLSRDLRDRRAVARYAGLTGSPDESGSKRREKGLARAGNARVRRGLIQLAWRFLGFQKDSALTQWYRARTDGVKGASKTKMIVALARKLLIALWRMVTTGEVPEGVRLRPVEV

SEQ ID NO: 125712 - protein, 347 aa, unidentified
MRNIAYLSMDVHARNCVLGYMDDDGNFRGNRSFATSENNIINALKAVKVKCKYLAIEEGTLTYWVAQIASPYVTQVITCDPRENALIYKSSKKKDKVDTRNLCRLLRLGELKHVYHPEDDERAIFKAAVQHYLDISNQQTRIKQKIKAMYRHWGVIDIFTDRVYNADKRDHYLQMVKHQPVRNQLKRLYTLMDKTQAVLKSAFRDMKQLGRNYPEICQFLKIPGIGPIGAHVYDAFIQTPHRFAKKNRIWKYCRLAVTDRSSDGKPIGYKRLDRSGIGELKALSYRAFMAAMKGSNEVKRFYLRSLKRTQNRKHARLNTQRKILSVMYSIWKKGEAYSSELFLDPSI

SEQ ID NO: 125713 - protein, 373 aa, unidentified
MKTNTTPSVVPTTPTPADVVASGSTLGLDLGDRSHHVCVLDAAGQLVREGSLPNTRPALAKLLAEFPHATVALEAGTHSPWISRFLTEGGANVLVANPRKLHAISRNERKCDRRDAQMLARLARVDPALLHPIQHGSAQAQHDFLGLKLRDALVRTRVNLINTVRFTLKSLGHQVCNPSSESFHKMVLADVPADCLPVVQPLLLILAQVTEQIKGMERDLVQRSKKDYPATQRLQQIAGVGPLTALCFVLKIGDPQRFGRGRDVGAYLGLCPRRDQSGGTDKQLRISKCGDGLMRRLLVSAAHYVLGPFGPPCALREHGLRLTGTGSAREKKRAVVAVARKLAVLLLSLWKHDKDYEPRASVAPALVLTPSAT

SEQ ID NO: 125714 - protein, 429 aa, unidentified
MKIIYPRVCGIDVHKKFIVAVICISESVEPIYLKKRFSTFHNDLIRFREWLIQNDCQNVCMESTGKYYIPVYNVLESHISNIVVANPKWVRAVKGEKDDDKDAKWIADLFKFGIVRSSFIPQKDFRILRELTRYRYKLVNMRSSEKNRFQNALTSGNCKLDMVFTDVFGKSASNIIDLILSDNPYTDEDILSKVHKKCKASPDMILDSVNGTDLTPVQKARIELVNDHIKQLSSNIQKLDKLIDLMIEPYEDYISFLCQIPGVSRNSAIIILSEIGIDMNQFTTSRRITSWAGLTPSSNQSAGKKKSVRISRAGVYLKPCLVKVAHAAVKDKKHPYYANKFNKISKRRGKKRAYIAIARKILVAAYHMLLTGEIWNPADLSEVETPVEQRLKYVKNNLKSDIKQLLDIGLTVEELTLMIQQNANIIATQ

SEQ ID NO: 125715 - protein, 342 aa, unidentified
MSPLSPDLVCVGVDVSKETLDVHVDSAKRGFKLPNTPAGRAKLIDRLRGLPLAFVVVESSGGYERPLLFAMLEAGLPASHVNPRVVRDYARSFNLLAKTDPIDGRTLSWFGRERQPRLFTQTDKLRHMLQDLNRCRRQLIEQITALSNQAETAIHPTAKQVLQDAAEALEKQLAVIDRDVQAEIDKLPRLKRRQELLLEVDGIGPITSRTLVIELPELGTIDRRKLAALVGVAPFNDDSGTISNRRIIKGGRPHVRAALYMAALTGIRSNPVLSAYYRHLTDSGKPSKVALVACMRKLLTHLNTIITRDEAGDAADASANAHEAGGSPGAKATPAQGRGEKE

SEQ ID NO: 125716 - protein, 350 aa, unidentified
MVVVGADVHKRTHTFVAVDEAGRKLAEKVVKATTAGHAEAVMWARESFGPEVVWAIEDCRHLSARLERDLMGFGQSVVRVPPKLMAQTRASARTRGKSDPIDALAVARGFLREPDLPVASHDEVSRELKLLVDRREVLVAQRTATINRLLWRVHELDPDHAPKARSLDLAKHRRILGDWLATVPGLVAELARDELADIIRLTETINALTKRIGQRVRHVAPVLLALPGCGELTAAKLVGETAGVTRFKSAAAFARHAGVAPVPVWSGNTAGRVRMTRSGNRQLNAALHRIAVTQIRLNGLGQVYYRKRLADSDSTTEALRCLKRRLARVVFGHLQTDEQNRQQSCQPAAA

SEQ ID NO: 125717 - protein, 413 aa, unidentified
MQQIYDRVAGLDVHRDNVVACFRRLGPRGGVVFEKERFATTTVRLRELAAWLTERRVELVAMEATGVYWKPVYYALESNFTVWLCNARNVKKVPGRKTDMTDAEWLADVAAHGMVRPSFVPPPPIRELRELTRYRKTQSDARAAEIQRLEKVLQDAGIKLTSVASRVLTQSGRAMIEALIAGERDGAKLAELAMGKMRPKVPALTEALTGHFGSHHAVACGRILGHLDFLNESIAALTEQINQRTAAFAPVYASLLPVPGVDRLTIDVIIAETGADMSRFPSPGDLASWVGVCPGSHESAGKRRRVGTTKGNPWLRRALIESARAAARTKGSYFGAQYRQIARRRGPNKAAMAVAHSLITLVWHLLSTGEVYKDLGDDYFTSRQDPERRARRLVAQLEELGFTVTLEAAPATA

SEQ ID NO: 125718 - protein, 422 aa, unidentified
MMHEERRWFVGIDWASREHVVSLCDGEGKKIGQREFIHGGTGISGMIAWLLKASGGEPGEIHVAIETPHGPIVEALLERGFNVYCINPKQLDRFRDRFTVSGAKDDSLDSYVLADSLRTDMPLYRKLSVAEPLIVELREWSRIDEELKVERIRLANRLRDQLWRYYPQMLELGELDEDWMLDLWEATPTPQKAARASKAAIARVLKKHRIRCFDAAQVLSELRKPALSVAQGTIGAATVHIRMAIERLRVVNRQLADAELQLDRLCKKLAEPVAADDGENVPGQRQEHRDATILDSLPGVGRVVLATMLAESPDALQRRDYHALRSLYGTAPVTRRSGKSCIVTRRRACNRRLRNAVFNWGAVAVQHDPISKAKYQALRARGHGHARALRSVVDRLLYVACTMLENGTLFDHSFAEAKKTAA

SEQ ID NO: 125719 - protein, 384 aa, unidentified
MSKSSTLYVGLDVHKDSIDIAVAEAGRDGEVRHVGSIGGDLAALDKALRKLVSRGHPLHVVYEAGPCGFVIWRHLAAQGLACEVVAPSSIPRRSGDRVKTDRRDAMMLARLSRSGDLSAVRVPGAADEAVRDLVRAREDAVRECRNARHRLKALLLRHGTPYAGKSAWTAAHLRWLARLALPQAAQQIAFQEYLHAITEATARIARLEQALRDTLPEWSLMPLVQALQALRGVQLIAAMTLVAELQDFVRFANPRQLMAYVGLVPGEHSSGPKRRQGSITKAGNSAARRMLVEVAWHYQHGPRVSPIIAVRQDQLPKAVTDIAWKAQLRLNAKYKRLVARRVMKTKAVVAVARELAGFVWAIGQEVQISGWQGIKGEPAATAAC

SEQ ID NO: 125720 - protein, 344 aa, unidentified
MSMRIAVLGIDLGKNSCSVVGLEGAGKVVMRRRMQRESVIKLTSSLAPCVVAMEACCGAHHLGRIARDQGHQVRLMSPEYVRPYVKAQKNDDRDAEAVAEAATRPTMRFVELKSTEQLDMQSLHRVRDRLVGERTALMNQLRAVLLERGIVIPKGRRKLEQHVATILDGEDVRLGPRIRSLIEDMRAEWGALDRRIETFDDEFAAHAKTDAAARRLATIPGIGVLNATALVAAVGDAATFARSRDLAAWLGLVPRQITTGGKPRLLGISKRGNKYLRKLLIHGARAALPSLSASATPLGKWLRDLMGRAHKNTVIVALANKLARIVWAVLRHGGTYDAAAVKAA

SEQ ID NO: 125721 - protein, 349 aa, unidentified
MTPFEGASVAEASTIGLDIAKHVFQAHGADSSGRVVFRKKITRAKLMQFFASQPRCLVALEACGGAHYWGREIGKLGHTVRLIPPAYVKPFVKRQKNDAADAEAICEAAQRPSMRFVPVKDEAQQANSVVFRARDLLVRQRTQCINALRGHLTEYGHVVPQGTAHVDTLVALVEDATSSVPESARTILTVLIGTFRALQTQITQLDAEIARRAKADPVARRLMTIPGIGPIAATAITALVPAPEGFHTGRDFAAWLGLTPLQKSTGGKQKLGAISKMGERTIRRLLILGASAVVRWATQRGAAEGSWLARMLGRKPRMLVTVALANKMARIVWALLVKGGTYRVPAAAA

SEQ ID NO: 125722 - protein, 322 aa, unidentified
MNKYKETYGVDISKDVFDVYGSLSGHHQFNNDEYGFKKFLKVLSKNSLVAMEATGYYHYRLAQFLYKNTVVVSVINPLSIKRFIQMKLAKVKTDKSDAKAICEYAKTNKIPIYNALTEVQSECLQLFRLLDTYLKQRTAVKDKIHGEEALGVPSKFVYRSLKRQRKQLDKEVKAIEEKILSLVKKDQEQQLTLLTSVPGIGQKTALFLIVITDGFSKFETASQLCSYVGITPTTRESGSSVRGKARISKVGNRKLRNLLFLCAFNACKHNKGCREIYERIVNKGKSKKLALIAVANKLLKQCFAIAKSGLPYDETYVSILQK

SEQ ID NO: 125723 - protein, 421 aa, unidentified
MGKLIERCAGIDIGKRFLVCCVMTGAAHEEPRSETRRFDTTVPGLKRLRNWLNEERVTDVVMESTGSYWIPVFNLLEGHVTVVLANPEEVKNRKGHKTDRKDAGHLADLLRHNHVKSSYIPAEPVRQLRDLTRRRVQLTQDATRERNRVQKLLEQVNVKIGSVLTDVFGVSGLHMLLALLDGRAAPEEIAGLARGSAKRKTPQLIEAIEGNRMSDHVRFLIRGCLRHLACLEEEMEELDAEILRRMQLSTFQKAFTLLQTIPGVGQLSAATILAETGPDLDSFPTIEQMASWAGLCPGNRESAGIQKGPQTTHGNPYLCTALVQCAWAATRKRDSVFRSRFQRLAPRRGEKRAIIAVAHHMLIILYCMLKRGVPFLGAEHAPKQRRRERRAHHHLRCLRRLGFSVEIRLSSESTPPDTISR

SEQ ID NO: 125724 - protein, 369 aa, unidentified
MTQFNTAFVGLDVHKNSIDIAIADAGRSGEIRHYGAVGGDLDSFGKAVRKLRSRHADLHFVYEAGPCGYEIYRYLSQQGLPCDVIAPSLTPRRAGIRIKTDRRDAKELARLHRAGELVPIYVPHAEDEAIRDLVRCREDAKIAERKARQQLKALLLRNGIRYQGKSSWIPAHLRWLSELKMPLPAQQLAFQEYLNAVTFAAERVRRLEQQIREQVESWRMKPLVEALQTLRGVQLVVAATVAAELGDLRRFDNPRKLSAYVGMVPSEHSSGNSTRRGAITRTGNAHVRRVLVEAAWAYRLPARVSRIIRLRQESQPQEINAISWQAQVRLCARYRRLMAAGKCKQQTTVAIARELLGYIWDIAQQVEIN

SEQ ID NO: 125725 - protein, 392 aa, unidentified
MSVMSDRVVIGMDPHKRSATIEVMAGDETVVGGGRFDTDRDGYTAMRKYASQWPHRVWAIEGCQGIGRHIANRLLTDGEQVVDVPPKLSARARVFATGQGRKTDATDAHSIALVGTRMAGLRPVVNDEQLALLRILVDRRRSLGEDHTRMVSQLHQLLLDLIPGGAKKSLSAAQAKALLATVRPLDVVGKARRRVAAELISDLERVYQRSKDADKELKELVASTGTTLMDLHGIGPSGAARLLVEVGDITRFPNRAHFASWNGTAPIDASSGDQVRHRLSRAGNRQINRVLHIMATVQLRNPTEGRAYFDRKKDTGKTSMEAMRALKRRLSDIVYRHMINDAAAAAAAGPGGQRGTTTDSSVTSSHPQAGSSEKSLPGPAETQLRTPLPMMS

SEQ ID NO: 125726 - protein, 345 aa, unidentified
MNKISVIGLDLAKNVFQVHGIDLDGEVVVRKQLKRSQMRQFFAQLEPCLIGMEACGGSHYWSRELTGLGHTVRMMAPVFDKPYLKTNKNDRNDAEAICEAVQRPSMRFVQPKTPEQQAVLHLHHGRRLLVRQRIALSNHMRGVLSEYGIVLPQGAKAILQRLPELLEDAENDLPMLAHHLLAELKAEHNQLIERIERIEARIKDWHANNNVSQRLASIPGIGVLTASALAATVGEGQDFSNGRQLAAYLGLVPRQVSSGGKERLLGISKRGDGYLRGLLIHGARAVIYHIQRRLRASQPGGDPWVEQLLLRCHPNEVAVALANKMARIAWVLMSRNETWRVVHPV

SEQ ID NO: 125727 - protein, 326 aa, unidentified
MQNQTIVGIDVSSATLDICVSNTSDQRSFIIKNDVKAINKFFRTYEQESLLIGMENTGRYNWALYEALRDLHHRVFVVSPLHLKKSLGLVRGKNDKIDAVRIAAFILKNHTDLPQWKPSSTAVQKLKILLTERNSRIKAKRKILNQQKDHMKMKHLGLGKYLQGLDKQQLAVLNRQIQQIEGEIEILVKADESMQKQAKLIRSIPGVGKILCWTMLAKTENFTLITEPRKMACYSGVVPFSNRSGTSIKGKDRVSTYADKAIKTILHMAAMRAVRLKNDLQIFYLRKVAQGKNKMSVLNAVRNKIIHRIFAVIKNQKAYENHLLLS

SEQ ID NO: 125728 - protein, 366 aa, unidentified
MGWMAPLRHRGAKLVLLENHQEREPSMSEITTIGLDLAKHVFQVHGVDAQGTTVLRKRLRRGQVLAFFSRIPRCVVGLEACATAHYWARELGVLGHEVRLMPAQYVKPYIKRNKHDAADAEAICEAVGRPTMRFVPVKTAEQQATQLLHRGREQLVRQRTMLVNALRAHLAEFGMVAAQGLRNVGELIAIVRDDGDRRLPAVARQVLQVLANQIEQIEAAVTALERQLLAWHKTNPVSQRLASIPGIGPIIATAIATTVTDPNVFRSGREFAAWLGLVPRQNSTGGKTRLGGITKRGNRYLRRLLINGASANLLRSKATKADPWVIGLRRRRPPLVVAVALANKTARIAWAVMLRQREYQPRAVAA

SEQ ID NO: 125729 - protein, 346 aa, unidentified
MQIKSIGIDLGKTTFHLVVLGAQSQVVMRKKFSRQQLLHYTANLPSCLMGMEAGVGSHFLGRALREQGHEVRLIPAQFVRPFVKSNKNDYCDAEAIAEAVERKNMRFVPIKTEDQLDLQAVHRVRERLVSRRTSVINQIRAFLLERGISFRKGPASLRRQMPEILENADEKLTARMRSLLDFLWQEWKHLKLQIESLSEDLEKIANSDAACVRLQQIPGVGPLVATAVVSAIGNGAAFHKGRQFAAWLGLVPRQWSTGGKPKLLGISQRGNPYLRKMFIHGARAAVLRVKREGSCLGRWMNGLETRAARNVVIVATANKLARISWAVLSSGNDYRPMHSSAVVCSS

SEQ ID NO: 125730 - protein, 331 aa, unidentified
MKFKEFIGIDISKLKFDVRIHSNQKESVFENNNTGYENMMHWINKNIRCKKEEILFALEHTGIYSLPISVFLSENQYSFTLLPGLEIKRSLGIQRGKDDRIDSKRIAEYVYQKRDKIKPSQLPFKNILKIRRLLSIRDRLVKHRAGFLKDQGENKMFLEQAENKLLFEIVEKSIHEIDKHISQIETELEDIIKSDELINKQYHLITSIKGVGKQTALFIITYTNCFTRFDNWRKLASYAGTAPFPYSSGTSINGRSRVSHLANKKIKTLLNMCARSAIATNPEMKIYFQNRKAMGENGMSSMNIIRNKLLSRIFAVVKRGTPYVDTYKFAA

SEQ ID NO: 125731 - protein, 482 aa, unidentified
MARTKKSTYERLMSGPLNRQQRRELARRLKTEDPGLEIVNRNVAGIDVGNESHFVAVAPSRDTQPVREFGSWTADLERMAAWLKACEVETVVMQSTGVYWIALYDVLETRGFKVCLVNARDTKNLPGRKTDVQESQWLLKLHTYGLLRDSFRPPDEIRALRSLWRLRDRHVKEAARAVQHMQKSMISMNLQLSNALSDISGVSGQAIIRAILKGECDARKLAKLCDRRVKASEEEVARSLEGNWREDMLFELKQAVAAYDFIQVQIAECDQRLLKLLAGLPAREAQTAAIPAAAAVIAKPRKKKKSPAKNAPRLDLETELTRICGVDLTSIDGIDIMTAQTIVAELGTDYSRWKDEAHFAAWLGLTPSRDISGGKVVGRQSRKVKNRVATALRTAAQTLLRSDSYLGARYRFLRTRLGAPKAIKAMARYLACLVYRLFTHGQAWVDRGATQFEGRRQQRELAALQNKAAANGFKLVSLNNPT

SEQ ID NO: 125732 - protein, 293 aa, unidentified
MLIIGCDFHSRFQQIAMVDTETGELIERRLDHSNGEAKKFYAELQKPVRVGMETTGYAQWFERMLAKLGYELWIGDAAEIRAAMVGKQKTDARDAQHILDLLLTNRFPRIWIPSPGERDLRQLLRHRHKMVCLRTSVRNQLQALAMGQGVYRKRKLWAAGGRTELEGLALDPWASRRRQELLDILDRLDPCLAELDRAVAKEAEQRPAARCLMEQPGVGPVTALMLVLTIGPVERFRRSKQIVSYLGMNPRESSSGGRQRLGAIRKQGNSMARFLLVEAAQTASRYDDELRRD

SEQ ID NO: 125733 - protein, 409 aa, unidentified
MRIIGMDIHRVAAEVVALLDGKLEKLGRIPMLRESLEEFARTELTHDDHVIVEATGNAAAVVEVLSPHVDRVVIANPKQVRLIAHAKIKTDAIDAAVLAKLYATGFLPEVWVPDEATLALRRQVARRTQLIRQRVRLKNLIQSILHAHLIPPCPHGNLTGISGRKWIAAQRLPDDERAAVHRHLAQIDLIEGSLKDVEADIARATMSDPVIRRLMTLPGVDMVVASGVAAAIGDVRRFEDPTKLVGYFGLNPSTRQSGEGPAYHGRITKQGRGQARGMLVEAAWAAARSPGPLRAFFQRVAARRGKPIAAVATARKLTMIIWHMLTKGEDYIWVRPALLARKFRSIELKVGLPPKHAKRGAAYAYNIPEKRAAERVRVEKAESAYADFASRWRTKPRASSRSKKMPAPG

SEQ ID NO: 125734 - protein, 428 aa, unidentified
MNCNTQNAKIASITEKTLIVGIDVGSETHFARAFDWRNYEYTKKPLEFSNTEAGFMMFKAWVEDIAEKQGKTAVIPGMEPTGHYWFALGKFLQDSGMKPVHVNPHHVKKSKELDDNNPNKNDRKDPKTIAALVNEGRFSYPYIPTGIYAEIRSLSNLRFQTQEELTRIKNRIARWFAIYFPEYKDVYGDLMAVSGRMILKEAPLPEDIRILGVNGVNQIWRNAKLRGTGMKRAKILVSAAEHSVGSKEAPETARIELKNLLNDMDVYATRLEELLQNIEGKLKTIPYVDKLMEIKGIGLVTVSGFIAEVGDIRRFDNPKQLQKLAGYAIVANDSGKHNGESRISYRGRKRLRYVLYEAAISLVGKNAEFKEIHGYYRTRKENPLKKMQSVVAVACKVLRVFYAILTKGVDYDPLKLISDIKRPQLQAA

SEQ ID NO: 125735 - protein, 406 aa, unidentified
MTNIAEHSEVYAGVDTHADTHHAAVIDQNGKHLADAEFPTTPAGYAALTAFILMHGTLVRVGIEGTGSYGAGLTRHLASLGHRVIEVIRPNRQVRRMNGKSDPIDAYAAAKTALTETKQPTPKSGDGNVEQIRYLFTARRSAIKARTAAQVQIKSLLVTAPTFLRERFRDVTDVVLIAGLADFDIRPYPEHQGVVIALRALARRHRYIAAEIQTLDQELKTLTEYANPALLAAPGVGPVTAAQLLITGGDNPDRLRSEAAFAALCGASPIPASSGKTSRHRLNRGGDRHANSALHQIALVRMSHEPRTKAYVEKKRAEGKSSKEIIRCLKRAIAREVFTLLTKDVEVPRVDDLRPFRKALGVTLQQAATHFNVWLTKISRIERGLARDDDFAQAYREWLETTASES

SEQ ID NO: 125736 - protein, 433 aa, unidentified
MPTNHPYDLLIGLDRSDRTADLHLIDTRTGKVQKQTVATSPEALHDWLAGLRQDHPQDRVALCLEQPAANLIVFLETYSWINLYPINPISLQKFRETFVTSRAKDEGKDAQYLAELLLSHHDKLKPWQPDDSQTRQLQQLVLHRRAVVDQRTGLTNRLKALLKAYFPQALELCGEDLWRPLATAFLLKWPTLQSLKKARKESLKQFYYLQGSRSQTLIEQRLERIDKAVPLTDEMALLQSYTLRVHLICKELQLLLKTLEQFDQQIAKVFQQHPDRAIFEALPGAGPVLAPRLLASMGSERERFPRPGNLQCLSGVAPVTKQSGNKCSIHRRYCCPKFLRQSFHQYAKESILHSRWAAAYYGQQRNKGCGHHTAVRALAYKWQRIIWKCWQSHTVYKEAIYEAALKKSKSPLVSLLDQIELGKSPVKKGAKKS

SEQ ID NO: 125737 - protein, 385 aa, unidentified
MRSQTFIPRDYDVFSGLDVDKRSISVTFTDHDRFLKSLRMPYSAEHLLNHVRKHFPNKKVAFVYEAGPTGYGLYDGIVAQGYPCLIAAPSMIPKAPGQRVKTNRLDSKALSENLRGGQLKSIHVPSPTYRELRHLTQLRDVLVSELVGMKQRIKSLLLFEGIEFPPAPPGSQWSFMVKDKLRKLPCSGTVRFKLDQLLDSLEFNEKQVLKAIREIRRYCQNDPELSQCMKYLMSLPGIGWITASQLLARIGDWRELNNIRQLGGFLGLVPTEHSTGERTDRGSITRTGDERLRSKVIQASWSAIRQDNELREFFRAVCRKHPREIASRVAIVAVARKLSVRIAVVLMKQRPYEVRQKVHSAPLTQEETSPQGTTRREPEPGEKNS

SEQ ID NO: 125738 - protein, 356 aa, unidentified
MPTSVSITEKGIQLVTITIGIDPHKGSHTAVAVDGNEHVLDEIRVRSCSTQTVRLREWADRFEERTWAVESAHGLGYLLAQQLVAAGEDVVDVPPVRASRVRVLGSGKSQKNDPNDARSIAIAALRADDLTTVCADDHARVLKLLSKRHRDLGRLKNKASCRLHALLLEMIPGGAGFRITTVTRINAVIDEFEPTDAMGRQRQDIARDLAGDIDRYNDLLETSKQRIQTAVAASGTSLTTISGIGPITAAMIIGQAGNIDRFKSKHHFASYNATAPVEASSGSKVRHRLNQRGNRQLNWALHFIAISQLRHDTLGRQYFDRKVAEGKTTKEAIRSLKRRISDVVYCHLAADARQQS

SEQ ID NO: 125739 - protein, 377 aa, unidentified
MITSNKSTSRKRPSEPQAQASALPGTIKAKTIKLGVDAHLGLFVVVRIIDGGTPQPPQRFKRAEFLLWCAKQLTLTEKVFTCYEAGPFGYTLHRQLEKMGITNYVVRPRDWDEYGQKVKTDKRDATALADCLDRYVNGNDRAFCVVRVPTEAQEQARSLSRQRESFQKEKQRLAAQGRSHALYYGCPIQGEWWQKDRWEKLAVQLPPIVVNLLEPLRRLIAAITLELTARTKEVEAAAPSALPVGLGKLTSEILEREVADWDRFQNRRQVSSYTGLCPREDTSSGRRFQGSINKHGNRRLRPVLVECAWRLMVFQPGYLAVKKWKSVLADPKAGKARRKKKAIVALARTFAVDWWRIRTGRCQAKDLGLQLNPALAN

SEQ ID NO: 125740 - protein, 455 aa, unidentified
MNKQGFLGIDVSKGYADFILMDETKSIIEQSFRLNDTGKDHKQLGELIDKWLASGLETIFCGVESTGGYENNWYNYLQGLGSGKAVKVTRLNARGVKGISDAALTRTITDQVSAVSIAYYLVCFAQKVRYSGDCKDASSSFRDARSHYNFIRMLQKQKVQVSNQLEKILYEHFNEMLIYCRHGVPLWLLNMLKRYPSASAVKKAGIKGLEKIKGISPGKALSILKKAAASSREPGGTITYTLSSMAEEILYKEEQIERHKFKLSRGFTDNEDVKLLQSMPGIAIDSAVGLIIEIEHIDRFTTCKKLCAYFGVHPTFRQSGDGTWGSHMSKKGRSAVRKILYMSALTAIRWNPSLKQLYARKRSNGFNHYQAMGVIMHKLLRMIFGMLKNKSTYNIAVDNANQQKAQQKQQETQDDQKKQRKENKKNLFRYQDPTLEAPISRQAAEKIKKQMTSQT

SEQ ID NO: 125741 - protein, 265 aa, unidentified
MIMLGIDVSKTKIDCCIFPQGLTGKRKNKIFTNTESGFGSLLKWLITLKIEPDQVTAIMEATSVYHENLGYYLYDAGVKVCVANPSRVRAFAKGMSMLNKTDKADSEALSRYGYTAKLIIWQPEPENVRLLKALLGRRDVYLGSLLQEKNRLEKAQSTHTSVVVIKLLEENIEYLNQQLEHIDKLINNHIDQDPTLKQDLKLLQTIPSIGERSGLLLLGLFHSHKFEKASQAAAYVGLVPVHQLSGSSVVNGILKLTPFTLQIAK

SEQ ID NO: 125742 - protein, 338 aa, unidentified
MKLFVGLDVSLVKTSICVISEYGKIIKEAEAESEPGLLARWLNELDGSIAAIGLEAGPLSQWLHRGLTEAGLDTVLMETRQVKGALKAMPIKTDRRDAEGIARLLHLGWFRPVHCKSVSAQETRAVLGARKAIQQNMIALEMSLRGLLRNFGLKVGAISRGRFEARIQELAEGNPMLETATAPMLRARATLRQELAALEKQVRQLAQDDPVCHRLMTMPGIGAVVALTFRAAVDDPTRFRTSKRVDLTPSRNQSGERDVSGGITKAGDVNLRRALCQAASVMMNRGRSTWLRTWGVQLAQRRGRKIAMVALARRIAVILHRIWIDNTTFHPDAAPNLA

SEQ ID NO: 125743 - protein, 364 aa, unidentified
MKRKVYVGMDVHKETIQIAYLTSNSKEILKEQQIKHNEVQIKKFIKKLKLEWNEIHCCDEAGVTGYPLYRYLKSLGVNCILVAPGKIPRQNTDKIKTDKRDAIKLARLMRSGELESIHVPSEEDEAVRDYLRSRDSLRLDLGRNRQRLMKFLLRKDIKYSTTKYWTVSHYKWLNNLHFNNEILQETFNDYYSRVRVQEENLKSMDKKIQEIAESEPYREKVGILRCFRGVDYLTAMFLLCEVNDFKRFKTAGSFMSFLGLVPGEYSSGSKRKQTGITKTGSPRLRRILTEAAWQHRFPGTGSKIITARRSGQPALVVALSEKASLRLHKKFRNLQLRGKTPQVMITAVSRELSGFLWAAMNLVA

SEQ ID NO: 125744 - protein, 343 aa, unidentified
MQISTIGIDLAKTVFQVHGVDSAGKVVLAKQLRRPKMLEFFGNLPPCLIGMEACATAHHWARELSKLGHEVKLIPPSYVKAYVKRQKNDAADAAAICEAVTRPSMRFVPVKSVEQQATLSVHRTRALLIGQRTQLTNALRAHLAELGLVADHGRDGLAKLMAMVKEESTLRSLPIALLQALRALIGQLASVQQQIGDLDRAIHDQYRASAVSRRLESIPGVGVIGATALAATVTDPRAFKSGRDLAAWIGLVPRQNSTGGKERLGGISKQGDRYLRRLLVAGAMAVVQHARRHPDKRPWVTKLLARKPAKVVAIAVANKTARIAWAIMVRGETYRAPALAAAA

SEQ ID NO: 125745 - protein, 342 aa, unidentified
MQVTTIGLDIAKNVFQVHGIDAAEKVVVRKQLRRRQVLEFFKALPPCLVGMEACATAHYWARELTKLGHRVRLMPAKDVKAYVKRNKNDAADAEAICEGARRPTVRFVQIKSTEQQGRLMLHRARDLLMRQRTQVINAMRAHLAELGIVAAQGRDGIKELLKIIASEADARLPVDAHTSLVVLAAELQAMQTLIGSIEKRIMVQHRLSEASKRLKSIPGIGLIGATAIAATVPDPKVFGSGRAFAAWIGLVPREDSTGGKQKLGPISKRGDRYLRRILVVGACAVLRYARHKPEKYPWLTKLLERKPFKVVAVALANKMARIAWALLAKGDTYRVPALAAAA

SEQ ID NO: 125746 - protein, 337 aa, unidentified
MQYLGIDWGTRRASWCAIDAHGARREGAIPADHDGLSRLALTLDSGEVRGCIEMMSGAVWVRDRLATAGWDIRLADARKVKAIAPLACKTDRVDARVLADLARRDLVPEVWVPSLEERANRERLRRRAHLIRLRTSAINRTFGLLTQWGLRRNLTALRKPGAIDELAEHGVAPVWLQSIQTLLGVIDDLDAQLAPLEAELRPHARADHRVKLLMTIPGVAELLGLTLASEIGEVARFSSAGKLVGYSGLTPTIKQSGQTARTGRISKAGPATLRWAAVEAAQQAWRPTNPWHRLYADTKRRHGKSNPAKAAVARKVLIAAWHVLARQESFKPSRAPA

SEQ ID NO: 125747 - protein, 442 aa, unidentified
MSNRTVNRLSRGDRRRNAKLRDLRSLVRPDLAICAVDLADANQAAVVADHDSVVLGRRMFRCSAWGIDQILDWAIPIAQQAGFAGVVVACEPTGHRWKPVAERARARGLNVVCVQPLLVHRAREAEDFTRDRSDYKDATIIARLTSERRCYRPEVTTPTWARLRHLGQRRAAVLQAATAARQTLRDLLGVSWPSVLDAAAQPLDSLTFRACLAVATDPARIVAMGYDAFAGAVAAELPRWGGKRRRHQILRAVFAAAQAPGGVAAERVGAAERASFAVADWHRALQELGEVQGRMVAVLDQLHLTRLVTTITGLSAVGAAAILAETGDPARYDIARTWAKHAGLCPRDNTSGRFQGQTTTSGRGRPGLRTAAWRAIWGLLPHNPIFAARYAHLTGRAHNPLNDGQARAALAAGLLRQLHAVCTHQVAWDPKIAAGEVTATAA

SEQ ID NO: 125748 - protein, 368 aa, unidentified
MGDGVDAPRRHLRAKVTVSNCHLKEASMEQTITIGLDIAKYVFQAHGADAAGHVLFRKRLTRAKLLGFFAAQAPCVVAMEACAGSHYWGREISKLGHTVRLIPPAYVKPFVKRQKNDAADAEAICEAAQRPSMRFVPVKDEEQQANGVVFRARDLLVHQRTQCINALRGHLSEYGYVFPQGITHAPTLIAHVEGPNSSLPESARAILKLLIDTFSALETQIKELDAEINRRSKADPVARRLMTIPGVGPIAATAITALVPAAGSFRVGRDFAAWLGLTPLQKSTGGKQKLGAISKRGERTIRRLLILGASAVIRQACLRGVPAGSWLAQMLPRKPKMLVTVALANKMARIVWALLVKGGVYRAPATAA

SEQ ID NO: 125749 - protein, 370 aa, unidentified
MKTLNKYVGLDVHKDTTVIAVAESGRDGEVRLYGQIASDLAALEKVLRKLGGEHIALHVVYEAGPTGFVVYRRLQQLEIDCIVVAPSKIPQTNGPRQKTDRRDALQLARLHRAGELTAIHVPDAVDESIRDLTRARADAVHDLTRAKQRLKSFLLRLGYRYPGSANWSESHMRTLRKLTLPLPALRSVLEEQLLAIEQTMQRVARLDELLAVQVPQWRLYPAVQAVMCLRGFQLTSAAIIVAELGDVRRFAHPRNLMGFLGLVPKENTTGNTRRLGAITKAGNAQARWCLVEAIQKALTPPKVSARLSLRQQGQPALYRELGWKTQVRLHKRGWHLIQRGVMKAKVNVALARELAGFLWDLLRQVPTPQA

SEQ ID NO: 125750 - protein, 353 aa, unidentified
MSVTINATQPMIIGGVDAHSLTHHVVALDHLGRRLGDHQFSVSTKGYEQIIGWLGGFGAIDYVGVESTGSYAAGLTRFLTNHQVHVIEVNRPHPHLRAKVGKDDAIDAEAAARKAMSGQARVTPKLTTGIVESIRIIRVARDSAVRSRTRAIVQMRDLLVTAPAGLREQITETSITTLVIRCANLRPDPARLDEPTQAMKAALRCLARRVQAFDEEITATDRSLDVLVKQAAPTLISKLGIGTGHAAQLLITAGQNIDRIHSEAGFARLCGVAPIPVSSGKTQRMRLHRGGDRKANSALHMIAVCRMRYHEPTKAYVQRRLAEGLSKKDIMRCLKRFIAREVYHDLKTDLGLT

SEQ ID NO: 125751 - protein, 399 aa, unidentified
MLAVGIDISKSKSVAAILNQDGSMHTSPFEFHHTQPELDAFIKYILNSKQSATILMENTGHYHYPVLKAFQEAGLPVCMVNAYQIKKFGDMDLRKAKTDKKDAVRIARYALEKSYSLVPYTSMEQKYEDLRFLARQYNQRMLTLKTNKVFLLNLLDETMPAITTTLPLTTRTPETSLSVLFINRFKSYDRIKKMGKSRFLDAFEKIARKSRNRQTKTYGLAIYEAALRNITTRGENEYTLAAQDQCLELVCESQKAADSIILKMKTLAETLPEYAVLRSMAGVGNRLGPLILAEIGDIRRFHSGKALNAYAGNDAPPYQSGTFESHNRHISKRGNAALRKYCFEVMQALKLTRPQNDPVYLFLLKKEQEGKPYNVAKMAGVNKFLRIYYARAMETLKQQ

SEQ ID NO: 125752 - protein, 380 aa, unidentified
MLIGMDVHKRMVNITEMEEDGSVKENYEIENSEEAWNTFVERYSSIKPEIALEQSTSGKYVAKFLRNRGFSVHLADPEKIALVFNSPKKNDREDSYKLVKLLRLGELPEVHIPSEYSDELKSLVRYRKSLGEEATAIKNKIHAILSLHGITVDATDIFGKKGMREIEGSFKKMNENEKIIMDDMLKRIADLLNREREIENRIALAVKEDKRVNILMTIPGINVYSAAVIISEIDDISRFPTKEKFASYAGLVPRQDQSGNRDIRGHITKRGPSMLRFILVTASHIAVKRSVKMKKKYLSIVRRVGKNRAIVAVARILAEIIFTMLKNNSEFMDRIDSLTERKMRSMNQKAMDAKVSYNIAQSVKLIRERLLTKTSEQLFS

SEQ ID NO: 125753 - protein, 400 aa, unidentified
MFVGWDWASTTHDVTVIDDAGNIVDRWAPEHTEMGLDATMARLIRHGRPEQLPVAIERPSGLVVDRLLAAGHPVIPIHPNAFHAARPRWGAAAAKSDPGDSFKLADYLRTDGHRLRRLRPLDAATRELQALSRLRDDHVAAKTAASNQLGALLDAHWPGAKQIFSRIGSQIALAFLDAYPTPESAARLGEARLAGFCRRHSYRGGRSPGELLGRLRSAPAAPVGLAPEVLAELVVAQVRLLRTLLATIAELDRALGAGLLGHAKAGLLAPLPRIGEISLAQVVAEVGPILDRASTVEHATAECGAAPVTKASGKTKAVTFRWAANTKARNALATFASNSRHSSPWAAKVYADARRRGKHHPHAVRILARAWLRVIWACWHNDTIYDPARHGAERRLAART

SEQ ID NO: 125754 - protein, 352 aa, unidentified
MDKDNKLDFRGQHIYVGMDVHKKSWSVSIHTEQFEHKTFTQPPEVEKLTHYLQRTFPGATYHTVYEAGFSGFWLHDQLKEKGIDCMVVNPADVPTKNKERAGKTDRIDCRKLARGLRNGEIKGIYVPSRMKVEDRSLVRTRQSMVRKQTRCKNQITSILFFYGITIPEESHWSRQFINWIESIRMERASGDFALKAHLEELKHLRQIIANLNRAILSLSRTEEYRADVLLLKSVPGISTLTAMILLTELADISRFSSLDKLASYAGLVPDIKSSGETEYSTGITFRRNAALRGLLIESSWVAVRKDPALIMAFNKLSMRMKKTQAIVHIARKLLNRIRFVLKNRQKYVPAVV

SEQ ID NO: 125755 - protein, 356 aa, unidentified
MQAVIGVDPHKHVLSAVALDARGGRLGQWTGSTTRPDTQALRAWATRLAPDAVWAIEGSNALGRRLALALVDDGADVRDVCPTRTAERRRRRPSRGKSDAVDAEAIARELLAHPDLPHAFKTTAPGRPAPAREALAVVLRTRHQVVDHHRRLLNEADVLLGELPTHLGERLPVGSKVEPRLMAAARLHLTGDRVTDLRLRLLRAQAQQARALARERDALEREIVPLLKELGTSLPTLFGLGHLGAAELLVEAGDPRRFRSPDAFASYTGTAPIPASSAEARGQPVHHRLSRYGNRRLNSVLHIMAVTRLRADPETQAFIARTTTRGKSSRDALRIVKRRLARLVWLTMIRDLPVAS

SEQ ID NO: 125756 - protein, 393 aa, unidentified
MICVGIDVAKDKHDCFILNSEGEVLADVFTITNNAEGFDILLQTIRSCSRPEDKIKVGLEATGHYSYNILGFLLNKGLATYVINPLHTNLYRKSLSLRKTKTDRIDARTIATMLMSDVDLKSYTDTVYHNEELKSLTRYRFDKVRERAKLKQSVSRLVTILFPELEKLVSSLHSASVYALLSEFPGAKQISSTHMTHLKAVLKNASQGRYGQEMAETIRNAARSSVGSVMPAKSLELQHTIRLIRELDAEIEDIETAIQAIVDEMQSPITTIPGMGVRMGAVILAEIGDFSRFDSPDKILAYAGMSPSTYQSGQLSLSGAYSHMEKRGSRYLRYALYNATKHVCHWDPTFAAYLAKKRAEGKHYNVALSHAAKKLVRLIFAMEKSQRPYCAAA

SEQ ID NO: 125757 - protein, 422 aa, unidentified
MLTTTHDNEEIIERVAALDIGKAELMCCVRVPDGDHPGRRLQEVQACPAMTRAVLGLADHLARLGVTRVVMEATADYWKPVFYLLEAAGLETWLVNAKDVKHLPGRPKTDKLDAVWLCKVAERQMLRPSFVPPPPIRQLRDLTRYRADLVAARTAEKQRVEKLLEDACIKLSAVVADIFGVSGRDMPAALVAGERDPKVLAQLARRSMRAKIAVLEEAFTGHFTTHHAFLLRTMPGRVDAISADIAALDDRIAAQAAPLAGAVARLDEIPGISLASAHVILAEIGTDMTRFPTAAHLASWARLAPGISESAGKKKGKGSTGHGNAYLASVLGNAAAGAAKTDTFLGEKYRRIARRRGSKRAIVALGRSILVIAWHLLSDPEGRFYDLGPGYHAARIDPERRKRTHIRELEALGYTVTRKPAA

SEQ ID NO: 125758 - protein, 461 aa, unidentified
MKKTKLTGPQKGSARAKVDWKALDVVHPEAAGIDVGGSEHWVAISPDRDPEPVRCFGCFTVDLREMAKWLIDKGVRSVAMQSTGVYWMPVFEVLEQNGLEVYLVNARHTKNLPGRKSDVQECQWLLKLHAFGLLNNSFQPTHEIRIARTLWRHRGNLVAEAGSAIQRMQKALTEMNIQLGNVLTDLSGVSGLKIIGAILEGERDPQALAALARPEVKATPEDIAKSLEGNWREELLFVLKQEVELYRFYQQKIIDCDRQLRQHLESLKSTVDLQAQPLGPKPKGKTRSRNAPQFDLRTELYRITGIDWTQINGMDVLTAQTVIAETGADLSAFPSEKQFASWLGLCPTNEQSGGKILNRRTRKVVNRATGAFRNAAVTLIRSQSYLGAQYRRLRTRLGAPKAITAMARKLACLFYRLIKRGQQYVDKGIEYYEAKYREQQIRSLAKRAQKLGLQLVIPKTA

SEQ ID NO: 125759 - protein, 402 aa, unidentified
MYQPVLSIDVSKSSSYAATFLSYEKPHHKPFSFSHSPNDMDNLISCLVSLEEQTCVKPDVILEATGNFSRPLVEFFENEGYRVITLNPLQTHQQKKKSIRKVKTDPVDANRIAQVYYLSDFNLHGKISNTLLDLRNLCRQYEGFNALYTESQLRFRSTLDLVFPNYDTVFSHLCCKTSLNLISNFPTPKAVLSASKTDLIAALKISRLGDTWSNEKADKLINAAKESLPIVSSQESNLRILKDYIEILLTHQRILTQIRDQILQWASLQSDYELLCSIPGVGPLTAATILGEIGDICNFPSSKQLVAFAGLDPSVYQSGKFTSTNNKISKRGSTYLRKALYQATVVAISNRKKGPVNEILFEFYSKKKSEGKASKVAIVATSSKLLRMIYGVLKSKVPYTVN

SEQ ID NO: 125760 - protein, 387 aa, unidentified
MGYAAKLELVAQSHMRREEPAVSEGITFVGLDVHKESIAVAIVEGWSPHGPSFVIENRPEAVKRLAKRVRLGGGEVRACYEAGPCGYTLFRQLKALDVPCEVIAPSLIPKRPGDHVKTDRRDARQLATLYRAGLLTTVRVPTEKEEGLRDLARTRDVLRGQNVAAQHRLLKLLLRHGRTFAHGKNWTEAHVRWLRGQRFETGNTQLAFDEYLAHWDYLTQRQRTLETMLLQLAQEEPHQAAVARLCSLRGFSELRSILLLAEVVDFRRFVGPDSLAAFLGLVPGKDASADRNPRMPITKAGNSRARRILVEAAWSYARPPSIAQRLKRRLAGQPAKVVELSWTTQRRLHERYGYLVSRGKEPVVAVVAVARELCNVVWAMMNVADGV

SEQ ID NO: 125761 - protein, 341 aa, unidentified
MNVTTVGIDLAKSVFQIHGVNKHGKAVLRKQLRRQQMAEFFANMPPCLIGMEACGSAHHWARKLQAMGHTVRLMAPQFVKPYVKTNKNDAADAEAICEAVARPNMRFVPIKNVEQQAVLALHRARQGFVTARTAQANQVRGLLAEYGLVFSQGFATLVLRVPELLEDATNELPGSFRLLIQRLLDHLKEIDRQVQEIEAEIVAWHRDNALSRKLAAVPGVGPITASALVATVGDAKSFASGRQMAAWLGLVPRQNSSGGKNVLLGISKRGDTYLRTLLIHGGRAVIRAAQRKRVQIDGWLGELLQRRHKNVAAIAMANKNARILWALLAHGREFEAEYKAA

SEQ ID NO: 125762 - protein, 325 aa, unidentified
MTLSLGVDVSKSKFDAALMTAQGKYRSKVFNNTAGGFEEFLKWIDANVERGRLNVQVCMEATGVYHEALANFLFDSQVKVFVINPLRIKRFVESEGLRNKTDKGDAKALARFALHNQLDAWEAPSTGVRELQALVIRLESLQTMRHSELNRLDVAHPSICDSIAAVVAALDAQIETVRLLISKTIDDDPDLRQRQDLLETIPGLGATTIASLLAYIGRPERFKTVKSLVAYAGLTPAIRQSGTSVDKRQGLHPVGHPALRKALFYPAMTAARYNPIVAAFWQRLKAQNKPGKVILVACMHKLLSIAYGVLKSKRPFDPSLAPNNA

SEQ ID NO: 125763 - protein, 407 aa, unidentified
MICVGIDVSKRKSTVFFMAPGDKIIRRPFDVKHTKEELQPLVDEIRVQAKYDEIKVVMESTGVYHLSIAYFLQQNGIFVSVVNALKVANFNKAENFRHTKTDSIDSTNIARYGIAYWAKLPQFDLNGDKYFLLKRLCDAYLNFSEERSRILLQLQSQLEQTMPGIFDLFGGFDINSGKDKLLDFLERYCHIEDIIAKSEAEFVASYREWAKEKGYRSNESKAATIYAQAKNGIPSIPNNPIVRETIMWYVGLLRRADEALMASLTRMEDIAKDLPEYELVGEMGGVGRVTRVALIAQIGDVRRFKNKHSLICFAGLTPSIHESGKFRASQNHIVKKGPARLRKVLYQVMMSLVMHKIPKDDAVYRFIKKKEAEGKYKKVAKVAGMAKFLRIYYGRVMHLYRDLGLAA

SEQ ID NO: 125764 - protein, 357 aa, unidentified
MLSSNVKYIGLDVHKEAIAIAVLNGAGKLVMESIVETKSSTVLDFLHGLRGELHVTLEEGTWAAWLYDVLKPHVREIMVCNPRRNALLKEGSKSDKIDARKLAELLRAGLLRAVYHGENGLQTLRELARSYLTISKDLKRVKNRLKALYHSWGICCAGKQVYAARHREQWLGKIAQVGVHRRAELFYQQLDGLLVLRNTVRGELLAESRKHQAVKILRQVPSIGPLRSALLLALMQTPHRFRSKRQLWTYSGLAVVTHDSAQHRYVDGQLQRSKKPQQIRGLNQNHNHAMKEIFKGAALNASRCAGPLQDFNARLLAKGMKPDMARLTLARKIAAITLALWKKGGSFNAEHLKSQAA

SEQ ID NO: 125765 - protein, 411 aa, unidentified
MDRIYDNCCGIDVHKKLIVACFRKGNKQEIREFGATTRELLEMADWLKDGGCEMAAMESTASYWKPLYNILESSGLNAMVVNARHMKAVPGRKTDVRDAEWIADLLQHGLLQPSYIPDKEQRELRELVRYRKSLVGERTRELNRLQKMLEGANIKLSGTVSDINGKSARNILEYLLTGASVDGPKYDEMYEQKIIAHNLKATKEQIIDDLNGVMSPLQRRMMKELLAHLDELNIHIKNLNDEIDNFMKPEEKQASHAIQDVTGIGNTSAQAIISVIGTDMERFPTDRHISSWAGLCPGDNESARKRKSGKTRKGNSLLRTTLITCAHSAVKNKKSYFHAQFMRISSHRGKKRAYVAVAHSMLIAIYHILKDGVVFKDLGADYYNQFNKERKINAYLKKLKALGWEAPVVAA

SEQ ID NO: 125766 - protein, 450 aa, unidentified
MMAEPQEIEDEEHEQVLERVAAIDVAKASGKVCVRVPHESKPGRRVSRVQDVDATTRAVIELGDHLVCQGVEKVTVESTSDYWRIWFYLLEAAGLDVQLVNAREARNVPGRPKSDKLDAVWLAKLTERGMLRPSFVPPAEIRQLRDYTRLRTDLVQERTRHWARLEKLLEDALIKVSAVASKIDTLSVRDMIEALIAGERSPRVLADLARGKMKAKRAALIEALTGRFDEHHAELARMLLDQIDQLNAQIAKLTDRIGELIGVMPAARGVDADGSTGPSAGAGPDAAVVPALQRLDEIPGIGPGGAQVILAEIGLDMSRFPTAGHLVSWAKLSPRTIQSGARTRGGRTGKGNPYLKGILGEAAAAAAKTDTFLGERYRRLVKRIGKLKALVAVARSILVIIWSLLADPQARYHDLGAGYYASRIDTGRKARNHIRQLEALGFTVTLAPAA

SEQ ID NO: 125767 - protein, 349 aa, unidentified
MLIIGCDYHPSFQQISFLDTKTGDCGERRLGHPDEAEWLYRELGRQPNPVRIGMEASGHSRWFERLIGELGFELWIGDPAQIRARQVRKQKTDRQDAELLLRLLVEDRFPRIWVPDPMNRDLRQLLWHRHRLVQMRTRVVNQLHAVALNEGLRRKRALWRPAGRAELEALALAPWSGQRRADLLALLDRLGPTIAKLTAAVQQEAIQRAEVVRLMTHPGVGAITALAFVLIIGDPQRFANGKKLSSYLGLVPAEQSSGDRRRLGHISKQGNTLLRFLLGEAAQAAVRSDPEWRRQFVHLAMRRERAIAKVAMARKLAVRLLWMWKNASDSAPAKFGSHAGQPGTALGAP

SEQ ID NO: 125768 - protein, 382 aa, unidentified
MDGFLSTTRAGGLMVWTAPYGISCARMRLLRSQTREPSVEQIIRIGMDTSKHFFQLHGIDAAERPVLRKKLRRNEVLGFFAKQPSTAIGMEACAAGHYWARELGKLGHEVKLIAPQHVKAYIKRNKNDGRDAEGLCEAMSRPTMQFVPVKTEEQQAALMLMGVRQQLMTRRTQLSNAIRGCAAEFGLITAKGLDKIEPLLAQIAQDESLPALAREMFTLQGRDYARLQVELKAIEAKLMAWHRANADSRRLVKIPGIGPIGSTALVMKAPDPRLFPSGRHFAAWLTPKDHSTAGKTRIGKITRAGDEMLRSVLVAGATAVIQQAKCGRGRPSPWLLDLLKRKPPKLAAIALANKTARIAWKLLTTGENYDGARMPGASALAA

SEQ ID NO: 125769 - protein, 358 aa, unidentified
MQKQGTKIDFNGQNIYVGIDTHLKSWKVALYHDEIALKTFSQDPNPKLLVNHLRKNYPNANYQCAYEAGFSGFWLQKALTKQGIKCIVVNPADVPTTDKEKKFKTDKIDCHKIARSLRNNELDAIYVPSDEGLEERSVVRLYKDMVRNRTRYKNKIKSILNFYGITYPEQFKDSKRHWTISFCNWLKSLQLNTDAGTWMLQFYLLEYEHSNELVQKASKQLHVLSVQNKYASKLRLLRSVPGIGLVSAMTILTEIEDINRFKTLDELCGYIGLVPNTSSSGDTDLIGNMTNRGNPFLKTTIIEAAWMAVRHDPALLLSFQKLKSKMEANNAIIRIAKKLVNRIRFVLKNETEYVKSVL

SEQ ID NO: 125770 - protein, 343 aa, unidentified
MEKIITVGLDLAKSVFQVHGIAENGKVLVRRTLRRSQVLPFFRSLPACLVGMEACASAHHWAREIAALGHSVRMMPPAYVKPYVKRNKTDVADAEAICEAVTRPTMRFVPVKTAEQQAASMILRTREMLMRQRSQTANALRAHMAELGIIAGTGMASIAKLLVLLRDEGDNRIPGAARFALIQLAEQIELLTTRIEKLDREILVAVKNDPDARRLMSIPGVGPLIAATVRTSVLDARAFATARDFAAWTGLTPRAQSSGGKERLGAISKRGNRQLRTLLIVGATSIIKLAKRGLKVPHWIRTMLQRRPVKVVSVALANKIARTIWALLVRGGIYQAPAAMLKS

SEQ ID NO: 125771 - protein, 427 aa, unidentified
MSYRIAGIDVHKKMLAVAVADVEVDGDFHFERQRVGTTPIDLRRLADWLVEHEVDEVVMESTAQYWRPVWEALEQHWRSQRRACDSAPPLAGTLHLAQAQSNRGPGGRKRDFPDAERLVKRLVAQELTLSFVPDAEQRLWRTVMRRKYQVTRNRVQLQNRLEALLEEAHIKVSSLVSDLLGISARRMLQALADGETDPAALATRATARLRATPEQLCDAFQACPTLHPVYRRLLKLTLEELRVIEDHLGQLDQQMADLLTAHHDAVQRLAEVPGLGVDSAQQIIAEVGATAATFPSSKQLASWMGACPGNEESAGVNYSHRCPKGNRQMRRVLNQAANAAVKAKGTIFAIVYRRLVPRLGHAQAIGAITHRLCRLIWKILHQSVRYEERGPAVSEEAKKVRARKMIRELRSLGYRVEPLQAPSTNPA

SEQ ID NO: 125772 - protein, 476 aa, unidentified
MEAQKQGARRPDERSWHEMNRKQRREIARRIQSEDLRLEVVHPDAAGVDIGNESHYVAVPASRASQPVRRFGCTTAELKDMATWLKQCGILTVALQSTGVFWIPVYDILEEAGLEVYLVNARDTKNLPGRKSDVQESQWLMKLHTYGLLRNSFRPPQEVRRMRTYWRQRNDLVRSAGRQIQRIQKALTQMNLRLANVLSDVSGVTGQAIIKAILTGERDPRKLAAFRDKRVKASEEEIARGLEGNWQEDLLFMLKQEQEGYEFCQKQIAECDARLEQYLQQTPDRSQGASLPEEKRKGRLQKKAKNPQFNLRTALFRITGTDLTQIDGIDVRTAATVISEAGWDMSKWENENHFVSWLRLCPDNRISGEKVIGKGRLRTNNRLATALRMAASTLRESDTYLGAQFRRLRTRLEAPVAIKAMAAKLARLVYRMLRYGMQFVDRGAMFYDARHRQRQINSLKRKAAKLGFQIVLAPAT

SEQ ID NO: 125773 - protein, 429 aa, unidentified
MAEKEHTEFEKFRQLKREIRGSQQHLIVGIDVAKERHHAFFGTSTGKTLHKRVVFENSKTGFERLLVHVEALKKQHGLTKVVFGMEPTANYHKPLGEYLIRMGEEVVLVSGVAVAKNRELLDGRWDKHDTKDSANVADLISQGKVIYYEFPSDDTRDLRELLSLKRRMKKQEHGLRVRIRNNLLAQYFPEMDSYYGEGKPEGYKIVKWCLAPSSIAKFSYDRFERLVRPGARMTLGQRQRLMAIWKCAPDSIGCKAGDALGFTARMMVEALEDIKKALGDLDKRILEICKRMPSYPYLLTIPGVGPAIAAVLIAAIGDPHRFTRAKEVIRLAGLDLSANRSGRTSQDAVPVISKKGNAFLRYALYQAALIASVKNPAFMSYYSTLLEGREREQGIKTKMRIKLAAKMLVIAWTLMKKQERFNPEYLRRN

SEQ ID NO: 125774 - protein, 315 aa, unidentified
MSEVTTFVGMDVHKKKIAVALLAPGHRESVTWQLPNEPAAIRRLARRLLRESDGDLFACYEAGPTGYALQRQLRAAGVACQVVAPSLTPVKPGARIKTDRRDARKLAELLRADLLTEVHPPSESDEALRDLCRCREDVREDLTRARHRMSKFLLRRHCYYGAGKRAWLRCFRGIDTVTAVTLVAELHDFQRFPSPRALMAFLGLVPSEHSSGESQRRGPITKTGNRHVRRLLVEAAWHNRYRPAVGLPLRRRREGQPQRVIDLADRAAGRLHRRYVRLTARGKPTQKAVVAVARELAGFLWMTLHPEGLPAQIQE

SEQ ID NO: 125775 - protein, 424 aa, unidentified
MNKVQKLLLVHSSDIIFVGVDVAKKTHYARIINHIGLEVIKPFKFNNSIDGYERLVSKILEAKEKSKATKILIGFEPSGHYWKPLAWFLKEKGYTVVIVNPYHVKQRKEEEDNSPSKNDRKDALIIARLIKEGKFLNCLLPQNTYADLRNLSVARKQLIKKLNSVKNKIIAILDEYFPEFEEVFKNLWGKAALWILRNCPFPSIILKLSKEEIAEQLKKATNNRVGMKRAEKLIEAAKKSIGVKEGIKGAQIRLNIYLDELEFLKTQLETIEKAMEELLKKIDIAEYLLSIPGIGVITVAGFLAEVGDIGKYTHYKQIQKLGGLNITDNQSGKHRGKTKISKRGRPELRNLLYKASLTLVAKNKEFKALYNYFLRRRENPLEKKQALIAISIKLIRVMFTLAKKKEKYDSQKVLGEYRMKQIKD

SEQ ID NO: 125776 - protein, 418 aa, unidentified
MKSMEITAVGIDVSKRKSTVAIRRPGGVIVACPFDISHSSHDLEKLVSILKTTGGDIRVVMEHTSNYWKPIALTLKEAGFYVSVVNAMLIHDFSDNSIRKLKTDRADSLKIANYALTFWNELPPFNDEDETRLVLREQSRMYERLASTATSLRNGLIALADQTFPSIDQAFGHAIKNADGHEKWVDFFSIYWHRDCVLRLSIEKFTESYRKWCLRRNYKFRTNTAHKLYALAQDAVPTLPKNNGTKALVLQACKSLNAVCEAKQSTQEEMNRLASLLPEYEVVMQMEGTGPITGPALMAEIGDVRRFKNKKALVAFAGIDAPPFQSGNFESKSRHVSKRGSPHLRRAVFLVANIILTLSHKDNSVFCFMDKKRAEGKHYYVYTIAGSAKFLRIYYARVTEYLRTQEIPVAASCLNGNS

SEQ ID NO: 125777 - protein, 453 aa, unidentified
MELEIINPNTGGIDIGSKSHFVAVGQSIEDVKEFGVYAEDLTSICLHLQSYGITSVAMESTGDYWQNLYTELIKHEIEVVLCNGKFTKHAKGKKTDVKDCRWIQKLHALGLLTSSFLPDETTEILRTYCRQRNNWIDLSSSASHKMQKYLKFLNFRLDVVVKDVCGLTGLKIIEDICNGNLDPESLAEHRHYNCRKSKEEIAKALHGNNRQDYLFGLKQEYESYNFFQKKIKDCDKEIERLVKTELKKDPAKIKLKTTEKPYKRINKNAPEIKNLNQIAYQYFGGIDLMAIEGVSHATVLSIMSEIGPGGFKKFGTSKEFGSWLRLAPNNKISGGKILSNRIPKGSNRLKIALRRAANAIGNLKDTHLSDFFKRVAFRKGRQAAVSATARKLATIIWTMVTKKVPYKPPTDYLFLDQKRRLKVMQSIKKNIVKFDIKAEDVGFSNSLNMSYGI

SEQ ID NO: 125778 - protein, 345 aa, unidentified
MGVSKKLHGLEAQSREVGLMSKITVGLDVGDRFSQVCAVNIDGVIIQEGRVATTREALRDRLPARPSCRVILETGPHAGWISRELSAAGHEVLVANGRKLRWLYANEHKTDRVDAQYLARVGRWDPTLLSPIRVRSASADGALRLLRARASLVRARTRLINHVRGAVKSVGCQLPAELHDALQPLLTQIAALTQLIANYDRHVEQLATRYPETARLRQVTGVGALTALAFVLTIDDPARFRNGRAVGAYFGLTPRRADSGAQRPQLGITKCGDGLVRQLLVQAAHYILGPFGPDCRLRRWGMALSERGGKNAKKRAIIAVARKLAALLFSLWIHQSDYEPEPLEQ

SEQ ID NO: 125779 - protein, 412 aa, unidentified
MQTLVERGCGLDVHQATVVACLLMVRRDGKVQKQMRTFGTTTRELVSLREWLLSEGCTHVALESTGVYWKPIYAILEGALEIVVANAQHIKKVPGRKTDVKDAEWIADLLCHGLLRSSFVPPKPIRELRDLMRYRRKLVESQAAERNRLLKVLETANIKLANVATDVFGMSGRLMLRALIAGKATPQEMADLAKGRLRKKIPELQLALEGKLEEHHRFLLELQLQRLEAADKDLAALEQRVQQKLEPYAAQLALLDEIPGVDWTLAAVIIAELGVDMSVFGSVSQLASWAGVCPGNNESAGKRKSSRVPSGNVYLKSGLVEAANAAARAKGTYLRDKFFRLKARRGYKRAAVAIAHKILVAIYHMLSQQVSYNDLGDLYLDKLNKNHLTRNLVHRLERLGYAVTLTLQQEAA

SEQ ID NO: 125780 - protein, 456 aa, unidentified
MNYYLGIDVSKGYADFALINEQKQPMVNNFQLDDTPDGHNKLGDFIRTLFKQHQDLTVVATAESTGGYENNWLDCLKKLQRCYAIKVARLNPKGVHHHHEAKLNRSITDAISARLIAEYTLSHQDIIPFDQPDQTYWLRKQWTLIKLLSVQNTQLLNQLDNLVYQANPELMVYHRNSWPAWLLQLLASYPTAKDLVQASLEQLVKIPHLDRSRANNILDQARQSVASATDPVSGEMIKTIVAEITHKNKLINVCKQSLIDNCSLPDVELLTSIIGIGKFSAVGLIVEIGTWLRFESAAKMASFFGLHPILKQSGDKNWVARMSKQGSKEVRALLFMCALVAIQRNPVIRDLYAYSLKKGKSKMSALGICMHKLLRIIYGVLKSGNSFDPAIDQANRTRKPVQRKFAKQEIRRLQPVDANAPVSARQNKKRKEQSQSQGELVTIGEIKAPALSRCTT

SEQ ID NO: 125781 - protein, 341 aa, unidentified
MTKNVYFVGLDIAADDFVASIYQSPKQSVITKEGIKNTFDGFDVFIPWLKEHGLSKTNCIICMEATGVYNEAIAHYLVTQGFRVSVEPPLKVKRAFDPVGHKTDPVDSKQIAEYAYRYSDELRFWQPKDEIIEKIKHLLTAREQFTKQSTAIKNAMKSYEKHIVQVPLIVKAHRQTLREIKKHITEIDKELDRIIRQNPSISNMSNQLKSIPGFGLLLSASLITLTGAFSDISHYKTLAAFLGICPYQHQSGKSIYRQPHMRSFGPAYPRKLLTLAARSVATHNDVFKKYYARKLAEGKAKQLVLNNISNKLIKLACALIKNNSRYTVTYRSINPMFLNIS

SEQ ID NO: 125782 - protein, 425 aa, unidentified
MGKSKSTTLVQGGEIMIYVGIDWADDHHDVAITDDSAKTLSQFQISHDSSGFATLHGQLAKFKQSPDQILIALETSRGLLIHELLRSDYSVYAVNPRAVNRYKDRYVLSKAKSDSLDALALAHLLRTDRQRFKALRPFPEDYRLLDRLCQDLRKLVEEKSRISNQMTSVLKEFYPKALELFSLDSRIGIAFLKAFPDPQALRSCKKKTLKAFLKKHHYSRPNKIEELWTLIQTPALEPDVVICKAGRFRLLALLDQLIPPREHLALYEKEVKTILDKLPEAKSINSLPGVGNRLAPELTAALGPKGSGSQSRFQSAEEIMNLSGCVPVTRQSGKWKTVSVRYACVKSLRRTFRDWAFASLGQSVWARAYYDFYKAMNMPHSTILRNLGKKWARILFALWAQGAVYNEALHIQSLKNHNVRWAMAL

SEQ ID NO: 125783 - protein, 363 aa, unidentified
MVRTTMAQPTSSGVVVGVDTHKDTHVARAKDALGRRVGEQLVPTTPAGYRQLLAWARGFGEVEAFGVEGTGSYGAGLARYLRSEGEVVIEVIRPNRQARRRNGKSDPADADAAASAVLSGDAAGLPKGADGRVEMLRALRVARSTAVKARTQAVNALKALVVTAPSDLREQLRASSTARLVYACARLRPGELVDATAATKVALRSLATRSEALEAELERLNAVLARLVGDAAPELVARFGVGPDSAGALLVAAGDNPGRLRSEAAFAMLCGASPIEASSGKIVRHRLNRGGDRQANAALYHVVMSRLRWDRPTQDYMARRTAEGRTKREVIRCLKRYVAREIYLALKGMSSDRVTTTLAHEVA

SEQ ID NO: 125784 - protein, 351 aa, unidentified
MLIIGCDFHTRFQKIAMMDTTTGELVTRRLEHGTGEAERFYAALAAPVRVGIEATLATQWFEKMLRHYGHELWIGDAAEIRAAMVRKQKTDDRDALHILDLLMQNRFPRIWVPSPAERDVRQLVRHRHKLVRFRTSVMNQLHALAMGQGLCLRKKLWTTVGRQKLESLTLDPWASRRRRELLELLDQLDPSIGELDRAVISEAESRPTAVCLMQQVGVGPVTALAFVLTVGPVSRFPNSKKLVSYLGLNPSEESTGGRQRLGAISKQGNTMLRCLLVEAAQTSARLDPELRRNYQRLKLRRGNSGVAKVAIARKLAVRLYWKLREADRPNTAARMQGSPASPVVGESLSAN

SEQ ID NO: 125785 - protein, 342 aa, unidentified
MQISTIGLDIAKNVFQVHGIDAAEKVVVRKRLRRRQVLEFFKALPPCLIGMEACATAHYWARELTKLGHRVRLMPAKDVKAYVKRHKNDAADAEAICEAVRRPTMRFVRIKSAEQQGQLMQHRTRDVLIRQRTQIINALRAHLAELGLVAAQGNAGVNELRAIVTDEQDTRLPIDARASVIVLAAQLEALESVIGAIEKRIKMQHRSSEASQRVEAIPGIGVIGATAIVATVADPTIFRSGRDFAAWIGLVPRQDSTGGKQKLGPISKQGDRYLRRILVVGAIAVLRRAQENPGKYPWLTQLLARRPFKVVAVALANKMARMAWALLAHGGTYRAPELAETA

SEQ ID NO: 125786 - protein, 326 aa, unidentified
MESVKYLGFDVHQSTISVAVVNADGKLVMQSVIATHAATILDFIHGLRGTLHLTFEEGTHSAWLYDLLARRVARVVVCNPRQNALLKAGNKSDTSDARKLAELLRAGLLAPVYHGEGSTRTLQELVRSYAALTEDTTRVMGRVKALYRSQAIACAGKKPYGRRHRREWLSKLSEAGLHRRAERLYEELDALQGLRRAAKRELVMESRKHAAAKLLRTVPLLGAIRAALLIGRVQTPHRFRSKRQFWAYCGLALETRSSADYRFEDGQLVRAKKPVFIRGLNRNLLAKGMQPAMARLTLARKIAAITLSVWKKGESFDAEQLKPQAA

SEQ ID NO: 125787 - protein, 345 aa, unidentified
MPIVGGLDIHRKQITFDYLDTVTGEVNRGQIAPADREHVRAWLARFAGRGDAAFAVEGCAGWRYVSEELAAAGIAAHLGEPADTAALRGRKRHAKTDKTDARHLRTLLAEGRLPECWIPPAHILEYRALLETYHDLRTAHTAWVQRIHAVFFHQGAPPLSDDALRTEAGLAKLRAAAAAHLPAAGQQQVATAVDMIAATEARMGPLRRQLRDAAAHLTGAKVLAARLYGVGPFTALALTCWLGGADRFSSSRKAVRFTGLDITVHSSDRKGPPGRLSRQGPPVLRWAVYEAGKTHARTAAPDHACYAQVKDRKNSKRACLSEARKIVRQACHILTELGDGALTTI

SEQ ID NO: 125788 - protein, 412 aa, unidentified
MTAINQFAVHVGLDWADKKHDVCVQFKNGERTFHVIEHTPEALDVWLTELHQKVKGRIAIAVELKKGPVVYALQKYPFITVFPVHALSLARYRQAFSPSGAKDDPQDAELALELMLRYPQKIKAIEPDNADIRLLQQLVEQRRQLVEDKRRFVNRLINTLKQYYPQPLEWFSHRGSLLLCELIIRWPSLQQLKRARRDTIRNFLNAKGGRAMALTEQRVVSIDNSIPLTTDPSVIEANALMATALATQIKVVSEIIKTYDERIEALFDTLPDAKLFKSLPGMGPCMGPRMLAALGDNRGRFNSAEEIQNYAGIAPVTERSGQKSWVHWRWQCAKFVRQTFVEWAAKTVNSSYWAKLYYQGLREKGKSHQSAIRALAFKWIRIIYRCWKARTQYDEAKYLLALEARHSPLLKP

SEQ ID NO: 125789 - protein, 461 aa, unidentified
MPNSQKSEDRPGSTRTIAGLPIVRAQVAGMDIGSERHWVCAPGLEGSGREVADFGATTAELVRMAEWLKKRRVESVAMESTGVYWIAPHEVLEKDFEVLLVDTRQLARVPGRNKKTDPSDCEWIQRLHSCGLLNGSFRPQEQVCMLRTLVRDKAILVAESADWVRRMQKSLDQMNVRVHRAVSELNGVTGMAMVRAIAAGERDAQKLAQFRDRRCRQSKEEIAEQLSGHWREDHLFSLRQSLQMYDAIRERITAYEQEILKKLATLEIEESPGGAVPPVKNLEKGKAIKKRGQEPMRQALYRMSGVDVTQIDAIGVETVEVVLSEYGPDLSRFPTEKQFVSHATLAPRVPKSGGKPLKRKKRNSASTRVAAALRMAALSLRRSPTALGAYYRRLARRIAGDVAVFATARKLATLIYRLLRWGQPYVDEGAEAFELRYRQQHIKGLAARAKELGYQLMPTIT

SEQ ID NO: 125790 - protein, 342 aa, unidentified
MNHYAGIDVSLECSSVCVVDANGKILREVKVASEPEALIAWFRSPGFGLERIGLEAGPLSQWLFAAMKAAGLAVELLETRHVRDAFKAMPVKSDRNDARGIAQLMRLGWFRPVHCKSLSAQETRATLTARRLVQSKLRDVENSLRGILRGFGLKVGKTTEREFAGRIKELVTDHPHLQRIADALLAVREALRKEFSAFEKQTRKMVRSDMQARLLTSIPAVGPIIALTYASAIDDPGRFKSSKRVGAHFGLTPKRHQSGETDYTGRISKIGDGSVRTALYEAAHLMLTKPVKGCSQLKSWAMRIARRAGMSKAKVALARRLAVIMHRMLADGTPFNAAAAAT

SEQ ID NO: 125791 - protein, 361 aa, unidentified
MLYSTSIGLDVHARSISAAAFVFETGEVVQRTFGYDPDAVAAWAATLPQPAGCLYESGPTGFDLQRRLVALGLPCHVGAVSKMVRPSGDRVKTDRRDAHFLSRLLAVGEFVECAPPTTAMEAARDLSRAREDAREALMRARHQLSKFLLRKGHVWPKGRSAWTKAHREWLRSIELDDPCERLVLEEYVAQVRECEERRDRLDSAIAERSGADDLAGVTSRLRALRGVSTVTAFGIAVEIGDFSRFASPRALMSYVGLVPSESSSGETTSRGRITKTGNPHVRRLLVEAAWHHARPLSPASETDVASSAGLPAEAAGIAARANRRLHRRYLDLRARGKGANVTNVAIARELVGFCWALALCG

SEQ ID NO: 125792 - protein, 424 aa, unidentified
MRCPVSPREAINFPKTHSIRCKKERPDMKKNTITGLQAASKASKGKVKQVHRMAAQPRMTVGLDLGDRTSRYCILDEAGEKASEDKLPTTKTGLTSVFGKMPACRIALEVGTHSPWVSRHLAAMGHEVIVANAHKVKLITQSVKKNDRMDAERLARLARVDSKLLSPIQHRGPEAQADLAVIRARAALVDARTELINSARGLAKPMGERLKKCDAEYVKETLADGMGEAVQAVIRPLLKSVEEISKQVGEYDQKIEGIAKRYPEMKILTQVYGVGTLIALTYILTIEDPNRFDHSRDVGPYLGLTRKQRESGDSEPELGITKAGDQLLRRLLVQGAHCILRQGAPDSDLKAWGTAHLPNGGKEGGGKHGKNRKGSKKAKKKAIVAIARKLAVLLHRLWVTGEVYDPRYNRKAAEAAKGKGKVAA

SEQ ID NO: 125793 - protein, 346 aa, unidentified
MNQIIRIGMDTSKHFFQLHGVDAAERPVLRRKLRRNEVLAFFAKQPPTVIGMEAGGAGHYWARELGKLGHEVRLIAPQHVKAYVKRNKNDGRDAEALCEAMSRPTMQFVSAKTQEQQAALMLMGVRQQLMTRRTQLSNAIRGYAAEFGVIAAKGLVKVEPLLAQIARDESLPALAREMFVIQGRDYARLQVELKAIEARLIAWHRANADSVRLAKIPGIGPIGATALVMKARHPQLFPSGRHFAAWIGLTPKDHSTAGKTRIGKITRAGDEMLRSVLVAGATSVIQQAMKGRGRSSPWLVALLARKPPKLAAVALANKNARIAWKLLTTGGSYDGALMPVASKQAA

SEQ ID NO: 125794 - protein, 318 aa, unidentified
MLIHYIDIAKRNFVIAVSSLSKTKTETNNPKGIAHTIEYLKKHKVALVVTESTGGLEIPAAKAIRRAGIAVIIANPRQTHQFAQSQPLTKTDAKDAKMPAFFAQMTAQKEDSQTMPYQPPTEAEEVLEALVNRRNQSADMRTAEKNRLHQVHETQVGSVKQLIAHFDRLIDELDKQIDDHTHTHFDGKAQVAEQIKGIGSITTATLMAMLPELGRLSHKRIASLAGIAPHPRESGETKFKSRCFGGKSAVRKALYMATVAATRFEPLIRDFYQRLLSEGKPYKVAVTACMRKLLETFAKFLSLPTAETQTQVFVYFRS

SEQ ID NO: 125795 - protein, 315 aa, unidentified
METGPLYVGIDVSKAQLDVAERPSGERAVIPHTEQDIAALVEQLGARRPACVVLEATGGLQAPLASALAIAGISVAVVNPRQVRDFARATGQLAKTDAIDAQILARFAEAVRPAPRPLPDEATQAFSALLTRRRQLIEMLVAEQHRMRTAPRPIQRQIQAHLTWLKQQLAMLDEDLTHRIQATPLWREQEDLLRSVPGIGPVVSRTLLGELPELGRLTHKQIAALVGVAPLNRDSGSLRGRRIIWGGRAVVRGVLYMSAVVAARRNPIIKAFYQRLRTAGKAPKVALVACMRKLVTILNAMVKLRTPWRLSAQST

SEQ ID NO: 125796 - protein, 319 aa, unidentified
MNTIGLDISQKTIDATLHKTDGSTYHTKVGNNREGLKDLEEWIKANKVRKCVIGMEATGIYYEAAAEQLSETHTVYVINPLKIKEYGKSQFNRTKTDKADSNLIAEYTKRHADKIMPYSKPKNRYLQKLINLKQQLKDHQKQIKNRLHSSDDELIQTIHEELIKTYQEKIDQTQTAIDAQIEQVETDGHYRNLQTIVGIGKDTAAILYAQLTDKTFQTANQFVSYAGLSPQTEQSGTSVHKKGRLSRYGHRRLKRSLYMPALVAYRVNAFPQLILNLTNAGKPKMVIIVAIMRKLAKLAYYIVKTGKPYDSTRHKAAQA

SEQ ID NO: 125797 - protein, 343 aa, unidentified
MRIVEVTGGVDTHADVHVAAAVDHNGGLLGVESFPASETGYEELLAWLVGFGPVTRIGVEGTGSWGVGLTRYLTAKDMAVLEVDRPNRQQRRKVGKSDQTDAVSAARAALSGEATVTPKSRNGRVEEMRVLLVARRSARQQRIQSLNQLRHLVFTAPEKIRVRFKDRPKRGLVSEAANMRPRKGSDPIAYQTNQVIRGLARRIQGLNAEIKTIDQTLRLLIETEAPGLVALHGVGTDTAASLLVAAGDNPDRIHSETSWAHLCGVTPIPASSGKVTRHRLNRGGDRQANAALHRIVLTRMSSHEETRTYVARRREEGLNTAEIMRCLKRYVARQTYRHLPHMI

SEQ ID NO: 125798 - protein, 390 aa, unidentified
MDVLYQSCAGIDVHQANIVVCILHGPLTSTRPKREMATFDTTTKGLRACHDFLSQFHVEAVGMESTGVYWRPVWHALCDDFELILAQPAHMKAIPGQKTDKKDAHWIAKLTRIGLLPRSFVPDEIIQELRELTRQRKHYVESRNRETNRIHKILQSGGIKLTTYIEDIMGLSGRNLLQLLVDGTPITPRIVRQSVYTSLKKKVPQLLEALDGYFSDHHCFMLKQSLEIYDFYQKQIELLEERINVYLSQYENHVEILDSIPGIDVITASVIISEVGVDMSQFPTSGHLASRAGLCPGNNESAGKKRSTKIRHGNSYLKKCLCQAAFAVKKQKGSPLAARFYQIQSRRGSQKATIALAHQLLKIAYILLKEQITYPEFLAQKKTTRDELVA

SEQ ID NO: 125799 - protein, 352 aa, unidentified
MMIIGCDFHPRFQQISFLWEETGECGQRRLMHTAEAVEYYRSLRGTKVRIGIEATGSYGWFRRLLSELGHELLVGDATQIRASNPRRQKTDKRDAEHILGLLVADRFPAIWQPPAENEQLRQLLLHRSRLVRLRTRVTNQLDGMAKNEGFVVPGGWSGKRRQAIEALPLPGWYGERRKDLLGLLDRVEERIAPLNKAVGQAAANNAEACLLMTHPGVGPVVSLAYVLTIGNWQRFPRGKQVGSYLGLIPCEESSGDKRRLGHISKQGNTLLRWLLVEAASTAQRYDASWHRQYLRLSMTKHHGVAKVAIAHKLAVRLYWMLRSGEDYQHVRERGSHARQSECPGGRSRRPIE

SEQ ID NO: 125800 - protein, 419 aa, unidentified
MNKIETKKQRIVNAKTLIVAIDIGKTTDTGYCRCPSGKDIKTFEFSNNAEGFKKLWDRICWMKMSHHLEEVVVGFESTGAYGEPLVHYLRQKPVKLVQVNPMHTKRMKELEGNSPGKTDRKDPKVIADIIGLGHALSVVIPEGPAAELRRLTLARERSIRRRTALYNQLQDLVYILFPEFLQVMNNIKTQSAQYLLRHYPTPQDIVACGSEALTLILKRVSRGKLGKARSQALYDAAAQSVGLPEGRRGILLEIEEILSSLEACQRFIEKLEEEMLPYLEQIPYSKSLLSVKGIGEITVAGLIGEVGDFRQFQTLREVMKLAGLNLFEISSGKHQGNRHISKRGRPLLRKLLYFAAINTIRKGGVMHTCYQRHLETGMPKTKALIAIARKLLGILFALVRDHSQYDEQYSQKEVLRLAA

SEQ ID NO: 125801 - protein, 414 aa, unidentified
MKLFVGIDVSSNHLDTCLMNMEGEQLAYFRVDNNLPGAQHLRDRIVAKADELLPAEIHIGLEATSIYSWHPAMYLHEDEALKQRKTKVFTINPKLINKFKAAYADLDKTDRIDAWIIADRLRFGRLTTTIVMQEQYMALQRLTRMRFHMVHNLTREKQYFLQNLFYKCNAFRSEVDSSVFGHAIMEMLSEKYSLDEIASMEVTDLADYLKDKGKNRFPNPENVAKCIQKAARASYRLSKVMEDSIDLVLGTSIQTIRSIQAQLKDMDKAIAKILDGILGSKCLRSIPGIDLVYAAGILSEIGDIERFDDQAALAKYAGLTWRKHQSGSFEAEETKRIKSGNRFLRYYLVEAANSVKNREPEFGEFYRKKFNEVTKHQHKRALVLTARKLVRLVDALLRNGQLYTPGRKVNNARD

SEQ ID NO: 125802 - protein, 326 aa, unidentified
MHIIGVDISRNTIDFHCYGHSVTADPVANNLKGFGQFQKWIRQQVSKTKEEVMIVMEHTGIYTYNIERFLHAKGWSYVKRPALDIKRSVGIQRGKSDHTDARMISKYGWMNKESLAPMEPVNDNRVNLQQLMSYREKLVTDRTAHQVRIKELQGQMGNKLCDQIRRSTQRMIKLLTIEIEKMEEAVKACLAKEASLQKNYELLITVSGIGFVTAVSLLITTENFTRFDNHRKFACYCGVAPFTHRSGTSIRGKTRISQLANKPIKSLLTMSALSAVRNDTELKAKYEQKCKEGKAKMSVLNIIRAKLIERVFSVINRQTPYLKAAA

SEQ ID NO: 125803 - protein, 351 aa, unidentified
MPHKLNSAIAVIGIDIGKNSFHVVGHDKRGAIMLRQKWSRGQVEARLANLPPCLIGMEACVGAHHLSRKLQMLGHDARLMSAKYVRPYSKGQKNDFRDAEAITEAVQRPTMKFVATKTTEQLDLQALHRVRERLVSQRTGIINQIRAFLLERGVAVRQGLRFLRAELPRILAAPCDALSPRMLRVVEDLAGDWRRLDERIEGLSSEIEALARQDKGCERLMTVPGIGPIISSAMVAAIGTGDAFSKGRDFGAWLGLVPKQISTGDRTILGSISKRGNRYLRALFVQAAWVVLVKVGPKHWERYGLKSWIEAAKKRLHHNVLAVALANKLARIAWSVLAHGRTFETSKIQAA

SEQ ID NO: 125804 - protein, 414 aa, unidentified
MAPRKGSSRSPRGSGIDVHDDFVVACFSRVEQGQRKKEVQRFRAVTGDLIALRNWLLERGCTHVAMESTGVYWRPVYDRLFGFFELTVANAQHMKAVPGRKTDKQDAEWIADLLQHGLLKKSFVPHREQQDLRGLTRLRTTLVQERARLANRLHKVLQEANIKLSGVLSDILGVSGKAILHALATGETDGHRLARLAHPSVRCTQEQLADALESEIGEHHQFLIQELLTLIEGLDHSITHLEHQIEERLQPFEKTLARIEEITGVSWLVLQVLFAEVGTDMSRFPDDAHLASWAGMCPGQHESAGKRLSGRTRKGNRWLRAALIQAAHATGRTQTYLGEQYRRISKRRGKKRAAVAVGHSILVIYYHMMLTGEHYQEKGGEFFQQRDKQQNERRLVQRLEHMGYQVTLQPRPAA

SEQ ID NO: 125805 - protein, 407 aa, unidentified
MLFERVAGLDVGKASVTVCVRTPGPRGRRSEIRTFSTMTRSLQVMRDWLTASGVTIAAIESTSTYWKAPFYCLEEVLEVWLLNAAHMKAVPGRKTDVRDAEWIAQLLEHGLLRPSFVPPPDIRRLRMLTRYRVQLMGDRTREATRLELMLEDASIKLSAVASSLTTVSARAMLTAMINGERDPRVLADLAKGKMRAKIPQLTEALIGSFDAHHARLARAILHRLELVEAALAELDEVIATACRPWAHQLELLQTIPGVGEKVAQVILAETGGDMSRFPSAAHLAAWAGVAPGVHESAGKRTPVGARHGNKWLTAMLVEAAGSVGRMKGANYLSAQHARLTARRGMGRAQVAVAHSILVSAYYMLSRDEPYAELGADWLARRNDEAHTRRLIAQLERLGHTVVLDPVA

SEQ ID NO: 125806 - protein, 354 aa, unidentified
MPKTASAQIAVIGIDIGKNSFHVVGHDSRGAIILRQKWSRGQIETRLANLPPCLIGMEACVGAHHLSRRLKAFGHDTRLMPAKYVRPYAKGQKNDFNDAEAIAEAVQRPTMKFVATKTADQLDLQALHRVRERLVSQRTGIINQIRAFMLERGIAVRQGIRFLRTELPIIFASRTDVLSPRMLRVIEDLAGDWRRLDERIEALSREIETIARQDAGCDRLMSVPGIGPIISSAVVAAIGSGDVFSKGRDFAAWLGLVPKQISTGDRTILGKISKRGNRYLRVLFVQAAWVVLVKPMSWERHGLKSWIEAAKKRLHHNVLAIALANKLARIAWAVLAKGRGFEATRTVNGSTQPA

SEQ ID NO: 125807 - protein, 473 aa, unidentified
MLPCACEPSSTWENKGMSQRKRKARKSKINVNSLPQHLRHINLHAAGIDIGSDRHLVAVPEGSDDVSVRQFGTFTSDLHEIADWLEKCGVTTVAMESTGVYWIPLFEVLEQRGFEVKLVDARHVKNVSGRKSDVLDCQWLQQLHTYGLLQGAFRPPDEVCVLRSYARQKEMLTQASSMHIQHMQKALQQMNLLLHNVISDITGVTGMKIIKAILAGERDPNVLALNRQESCRNSEETIAKSLVGNFRDEHMFALKQAVELYETYQAKIAECQQALIKHLGTQPDVTDDQPPDPGKTLRKRERVRADVDVREKLFKMTGVDLFATPGLAADTLLTLASEVGFDMTPWKSVKHFTSWLGLCPGTKISGGKTLDRRTKRNANRGAQAFRMAASSLARSQTALGAFFRRIRSRTDGRRAITATAHKIARIYYSMLTKGTSYVEAGQQAYEQKYKERRINALKKQALSLGYQLMPSAS

SEQ ID NO: 125808 - protein, 409 aa, unidentified
MRYYLGVDWADQTHAVWVVDERGLKIAGRAVPHTVDGLTEWARELNEWRAQGIDLWAAIERPDGRVVDFLLDQGVVVYPVNPKALDRARDRFRQSSAKSDPFDARVLADFLRTDHAHLRALQPSSQAAQELKLLTDDCQRHIRQQTRLVNQLTATLKAYYPRALEVAALTSALAREFLPAYPTPAALTALTERQWQRWARAHGLSAARAGDLWALLRQPHLPVPAHVVRAKARLMRTLMEQLLPVVAAVAQYRKAIDDFFASMPAAQWARTLPIGKHGITTPTLWARLGDAPERWESFRHLQAHAGAVPVTKRSGKQQVVHFRFACDKALRHLVDQVAFLSLLSSAWARAYYDQQRARGHSQRQALRALGAKWLKIIFVMWHRQVPYDEQYHLAMMTRQQLRQRQKQVA

SEQ ID NO: 125809 - protein, 356 aa, unidentified
MTNTTKYIGMDVHKESISIAVRNAAGKIVMECVIETKANVILQFIEGLRGDVHVTFEEGTWAAWLYDLLRPHVTKLLVCDPRRNALLQEGNQNDRVDARKLAELLQNNQQRSVYHGDHGLRTLKELVRSYLTITQDLTRVMTRVKAIYRSWAIPCSGKQVYGTRHRGEWLGKIVEVGVRQRAEFYYRQLDELRLLRQQVRRDLLAESKKHKAWKQLCEIPSIGPIRAAVLLGILQTPHRFRTKRQLWTYSGLGIEVHSSADHQVVKGQLQRKKKHVEVRGLNENCNHDLKNLFKGAAVVASTKSGPFEKFYAALLTKGMRPEMARLTLARKIATIVLIVWKRGVCFDANHLKPQTA

SEQ ID NO: 125810 - protein, 406 aa, unidentified
MSVQGVVTGDSPVVVAVDVGKRTVALSVTDAARHRLLGPVDFEMTGRGLDGILTLIKSRLAGMDAPVRVGIEAAGHYHRPLLTPSVWPADWQVLELNPAHVAEQRRVQGRRRIKTDALDLEAITELVLSGRGLPVTAREAVIGELGAWAAHRTRRVQARTATKNQLLGQLDRAFPGLTLVLPDVLGTKVGRLIAAEFTDPKRLAALGTARFIRFAAVRGLHVRQPLAERLVRAARDALTTADAAVARQVLAADLDLLTELTAQIDASEAEFARLLPLSPFATLTTTPGWGVVRAGNYGGALGDPHRWPGPSQIYRASGLSPTQYESAGKRRDGSISREGNVALRRALIDLGMGLWFNDAPSRTYAAALRTRGKHGGVIACAMAHRASRIAYAMVRDQATYDPGRWK

SEQ ID NO: 125811 - protein, 355 aa, unidentified
MNQEKYIGMDVHAATISVAVKNAQGKLLMECVLETKAATILEFIQGLRGTLALTFEEGTLAAWLHDLLKPHVSRLVVCDPRKNALLRDGNQNDRVDARNLAELLRTNQVHAVYHGQQGICALRELGRSYSTLTQDSTRVMNRIKSVYRSWAIPCAGTSVYSRRHRAEWLAQLVEPGVRIRAEHLYQQLDSLEPVRQAARRELLRESRKHAAVKLLRQIPAIGPIRSALLVAILQTPHRFRTKRQLWAYSGFAVQTYDSGEYRVVRGKLQRNRERITVRGLNRNHNHDLKNLLKGAAISAIQRPGPLQDFYAARVEKGMRPSMARLTLARKIAAITLTLWKKGVSFDPKQLQRQTA

SEQ ID NO: 125812 - protein, 349 aa, unidentified
MTDQRIPYCGRIVYVGIDVHKETYTVTCVCNKQIVKTVTMQADPAALAASLPRWFPGATLYSVYEAGFSAFVLHRVLTKAGITNIIVNPASVAVAANDKVKTDRRDSKKLAIDLADGRLRGIYVPTEAEELARLLPRTRAQIVKHRATIARQIKAKLHQFGLIAPASRRLISSRYLREIAAWSLPPELSVSLTLLAEQWRFATRQLIAMRRLLRDQAQAQEEIEKVYRSVPGIGEVVARTLATELGDMPRFANERALFSYTGLTPSEYSSGASVRRGHISRQGSSRVRHLLVETAWRALPRDGVLKEMFDRIAATRGKKRAIVAIARRLTGRIRACFRQGTTYAVGTYA

SEQ ID NO: 125813 - protein, 429 aa, unidentified
MNNEALIRIMQFRQFKERIRGSEEHLIVGIDISKNQHHAFFGTANGKTIKRRLIFKNDFKGFMDFLSMAQVLRDQNGLSQIVFGMEPTGNYHKPLGTFLIKRNQEVVLVSGIATQRNRELLDGRWDKNDTKCAANVADLISQGKCLFYDYPAPEISALRSLLSLRERMKKNYHILRMRIRNNLVAEYFPEFDRYFGQSPKQTLSIVKYCLDPVKINQMEFKEFLLKVTTTNRGLAQEKRLRKIHALASESIGCESNRYTEFEAKILVDQMEQTTIFIKEIEDKIAEAAGEFEEYHFLLTIPGFGPYISALVLAKIGNPFRFEIRKQVLKMSGFDLSAKRSGKGSDKAYPVISKKGSNALRYALFQGAVIASSRNNYFIQYFTNTLKGREKERGIKIKMRVKLAAKLLVIAWTIMKTKKAFDPALLHSVK

SEQ ID NO: 125814 - protein, 409 aa, unidentified
MKMAGIDVHKKVLMVVVVDTSALQEKPARRRFVTLPSELQRFRIWLQEQGVEEAVMESTAQYWRSVWLELEPHMHLHLAQAFSNRAPRGRKHDFKDAERLVRRLIADELILSFVPNGEQRIWRSLTRMKVQLTRDRVRLQNQMECLLEEMRIKLSIVVSNLLGASGLRILHALAQGETDPKKLAELGDERLHCTEEQLVDALTGRVQPMHRGMLALQLQRLQLIDQQMAQLNHMIAQAMKSHQDAVIRLAEVPGLGVDSAQPIIAEVGAQASTFSSAAELAAWVGTCPGKEESAEQNQSSRSAKGNKYLRRVLNQAAHAAVAKKGCHFQVVFRRLMPRLGYKSAIWAVAHRLCRVVWKILHEGVRFIEQGREVGPREKKQRAQLLARALRKLGYEVTITPINQPAPKPA

SEQ ID NO: 125815 - protein, 420 aa, unidentified
MEVVVERCAGLDVHKDLVVACVRVPGSGGERVSMFAEFSAFTVDLLGLRDWLVAHGVTRVGMEATGVYWKPVFYVLEDVLECWLLNARHMRNVPGRKTDMADAEWICRLMEHGLVQPSFVPPPAIREIRNLTRYRKTRIEERTREAQRLDKVLQDAGVKLSSVASDLLGMSGRDMLDALVAGSTDAAVLADLARGRLRSKIPQLQDALTGRFGAHHALLVGEILAHLDYIDEAIERLSDAVDAAIAPFAEARDRLATIPGVDRRVAEAIIGEIGVDMTRFPTAGHLASWAGMCPGQHESAGKARHGTARQGNSWLQRHLTVAAMGATRTKDSYLAAQYRRIAPRRGKRRARKAVGHSILVAAWHMLSTKSDWSDLGADYFERRDDPTRRAARKLNELRALGWTVTTNPDGTNTLQPPAAA

SEQ ID NO: 125816 - protein, 323 aa, unidentified
MDYYMGIDISKQTLSLFDGKEDGIVANTPKLEEFQAYLQESYGKRWKKVRLIYEPTGPYAYALRRFASGQGMKVFVLNPKQSAHFKRALGLRSKTDVMDARMLYRFKDLLKEEEAKVPTIDPTTARLSSYLKTYALIQKVRKIVGSHLYAHGYDEHFPIPLTQAMQAEASRLQQLETALVEALKTFAETTEELREDFALLQSIPGVGTLSAAVLLELFRRYPPTNRSRIVALAGLDPTRKESGTSVHGRSRISKAGSDLLRRILYFSCLSAVRSNDRLQAFYQHLLEEHKPKKVALIACMKKMILIAHQIYTKKEGYRPMVLT

SEQ ID NO: 125817 - protein, 349 aa, unidentified
MRFYNGQHRHYCGIDLHVKTMYVCILNATGDILLHRNVATTPAAFLAAVAPYRDDLVVCVECMFTWYWLADLCAAEGITFVLGHALAMKAIHGAKAKNDKIDSHKIAVLLRGGLVPQAYVYPAAMRATRDLLRRRLHLVRKRGQLLAHIQMTRAQYNLPPFERRLAYPANRDGVSAHFPDPAVRKSVEVDLALIDQYDGLIADLEQVLVREAKCDDADAFHRLRSVPGIGPILALTILYEIHDVHRFDRVQQFASYARLVKGRHESGGKVLGAAGAKMGNVHLKWAFSEAAVLFLRHAHAPRLQRQLARWEKQHGKGKALSILAHKIGRAVFYMLARGTVFSIDKFLPA

SEQ ID NO: 125818 - protein, 313 aa, unidentified
MSYTSRFVGIDISKSSLDVCVLPDGQMAAYQNTPAGIADFLTFVVSLEGIERLVLEPTGGYERHVVAALQAARLPVAKVNAKQVRQFARAGGQLSKTDRIDAFILADYARRMETRILLQRSSRERVLADFVSRYRQLSHMIVQEKNRREKASGQTKDWVEESLNFLLDQRQTVVDAMTACLKADADLGRKAEVLMSLKGIGLRTACFILADLPELGHIDKGQIAKLVGVAPLNRDSGLMRGKRMIAGGRRHLRDALYVAVLPAIRFDPDMKAFFLRLKQKGKPSKVALVAVMRKMIIILNARIRDANATVLDT

SEQ ID NO: 125819 - protein, 345 aa, unidentified
MNYVGIDWAYGRAAYCAMGEGGEIKAEGLISADEDGLAKLVLKLGTQAKAAVEMMSGAVWVRDRLEVAGWQVQVAHARKVRDVAPLACKTDRVDARVLAELRRRELVPELWLPSPEDRALRERLRRRAHLVKTRTSARNRIFGLLTQFGLRISHARLRKPDGIELLERRGVPAVWRASITELLELSKEMDWRIDPIDRELAPLARRDERAKLLATIPGVGPLLSLTFAAEIGEVSRFSSPRKLVGYAGLAPRINQSGDRSATGALSKAGSRTLRWAAVEAANQAWRPSNPWHEHYLRIAARHGKNPAKSAVARKLLIAAWHMLSRQEPFRPYEPAPANSSLFLTA

SEQ ID NO: 125820 - protein, 353 aa, unidentified
MEQFIGCDAHKKFSLFIAMNEEGEYGRPIRVGHERERMRAFLEALPVGSQIALETSGSYYWLVEEMERAGHRPQLAHALTAKRRMEGRHKTDERDARGLAMLLRNGTLPRVWIPPAALRDQREMLRLRMILVESRSQVKNRIHGVLLRYNVELKGKDIYTQGGREELDGHLTELPEWTRESVHKQLGMVDHLDQQIEACEQSLEIMLEPNAERDLLKTLPGVGKILSAVIALEIGDIARFGNAERLVSYAGLVPAARESAGRKRPGKCPSACNTYLKWAFVEAGNVIATHHHKWPERHVAQLYVRVKHNTKMHGKATVAVGRHLAEAAYWILSKQELYREPKSNRQALSSTHG

SEQ ID NO: 125821 - protein, 410 aa, unidentified
MYYVGLDVHESRSSIEILDCNGKLFKRTEVKGRWPLLIEELKKVPKPFAICYEASCGYGHLYEQFSKLAQEVKVAHPGALAWIFKSKRKHNRIDAIKLAKLLFLDEVPAVHVPSAMVRTWRQTIEFRQKLLRSRVMAKNQLRAFLRERGIAAPKSLWTRKSQAWLKTLELEEGEAIRRDLLLDELEESDQKVKRVDKYLNKIGANHPGVTLLKTIPGVGPRTAEALVAYIDDARRFGGLKRAGAYFGLVPCQDASADKNRLGHITRDGPGTVRKLLCEAAWTGVRCSPTIRSYYQRLTHDDPDRKKIAIVATAHHLVHVAVSMLKTGQCWKESAKEDSSPKTHRGGGENPSRPQGFSPPPVTCDGSSQASPPPPLSASPFSPEASEGQGSECDKDSGNEQTVERPETVGA

SEQ ID NO: 125822 - protein, 426 aa, unidentified
MRWIALDVHRDFCEVAIAEAGRARLAGRVKTDPEALALFAGSLAGDDEVTLEATGNALAIARILEPYVARVVLANPRAVRGSATSALKTDKVDARMLARLLAGGLLPGVWLPDERTRRLRRLVSRRAQLVRQRTRAKNQVHAALIRNLKARQPMRDLFGVAGRRWLAQQDLPDDEEETVASCLREIDFLAEEIERIERSIALEVLATEEMRRLLSLPGISGVAACVLMSAIGEIGRFPSPGQLVSYFGLNPTVRQSGSEKPRHGRISKQGPGEVRHVLVEAAWHAMRTPGPLRIFAERVAAKRGANVAVVAVARKLVVIAWHMLSKGEDYAFARPSLVREKIRRLELLTGTGRKRGERGSVPIYASRKQRDLELELARQAERAYQRLVRDWQPVMKKGAGAAPGRASCRPSSGQAARQETAPAPAL

SEQ ID NO: 125823 - protein, 328 aa, unidentified
MFYLGMDVAKAKLDCCLLLDEASGKRKTKVVSNTKSGIVDLLAWVAKQNVSPEALHVVMEGTGVYHEQAALALADAGVTVSIVNPAQVKDFGRGLAVRTKTDGVDSLVLARYGALLKPKAWVPPAPEARILQALLARRVAIAQDLQRERNRQEKADATDTPDRIQKSLADSIVFLVKQLAELQQVIDEHIDKHPDLQKDMALLQSIPAVGPQVGGNMLSVMHSHHFNSAEQLAAYLGLVPVERQSGSSVLGRARLSKAGPARIRAVLYMAAIVATRCNPHVKAIYERLLARGKSKMSALGAAMRKLVHLCFGVLKTQQPYEHDHANNA

SEQ ID NO: 125824 - protein, 331 aa, unidentified
MFPVGIDVSKDTLDLCMLYDGIKGRVKTRNIKNDRSAVENISRWLRLQHCGSEDVHVVMEATGVYHERLATALHDAGFYVSLANPHRSREFARGMGIMTKTDKVDAYMLACYALLKKPHRWEPPAADISHLSALLRRRDVILADAVREENRLEKYQSTDTPADVVSSCIRMAQLLREEVKSIERQIKAHIKASPDLKRDYALLTSIKSVGPQLGMHMLVVLRSHHFESADQAAAFLGVVPVEKRSGTSVRGRPRMSKIGPPQLRAKLYMSALCGKIHNKRMRTVYEEMCLRGKPKMVAIGALMRKLVHWCYGVLKTGTAYNDGGPRAALNT

SEQ ID NO: 125825 - protein, 385 aa, unidentified
MMLIGIDPHKSTHTATAIAPDTNQEAASIRIDATLREYRRMLTWARQWPQRRWAVENAEGLGRHLTSWLLARGEDVVDVPTTATARVRQLSRGGGRKNDRIDAGAAACVAALQGDARPLEAESYVDAMAVLDERRVNLAQSRVRAVNQLHALLRALIAGGAPRDLSATTAAALLRTVRPNGAVEQARKAVAKDLVTEIRTLDTQLKANAQAIARLVAATGSTLTEVVGVGPIMAGRLISRTGRASRFPTASAFANYAGAAPVEIASAEKSRHRLSRHGDRQLNSALHTIAITQIRIPSSRGHRYYKSKIAEGKTPREAARCLKRRLADHLWRTMINDERRAVGPGGQLGTTLQSSVAGPTPTTNSSDKSLPGPATHDSTTAKPAA

SEQ ID NO: 125826 - protein, 408 aa, unidentified
MNPLYVGIDVSSKTNVVYLMLPNGDKHSNFSVANSQDGSTQLVKRILSVLTSHSLDTVLIGLEATSVYGDNLVYFLREDAALAPFNRKIHVLNPKQVKKFKEAYNDLPKNDYVDSFVIADCLRFGRINKEVYVGDYRYKALQNLTRARYFAVCNLVKEKQRFMNVLFKKYSTMTQEKVFSDTFSTTALAVYDEFESAEALAKMDLQELTDFIMKKGKNRFPNPDSVAKAIQKAARSSYRLPKTVNDSVNQVLSISITSMKALESQIKEFDKAIAAQIELLPNVLISIPGIGPVFSAGIMAEIGDINRFENQAALAKYAGLAWTQYQSGGFEAETTRLIRSGNRFLKYYLCEAAFSLVRCDKEYSDFYHLKYKEVNRYQHKRALALTARKFVRLVFALLKDNRLYRPAK

SEQ ID NO: 125827 - protein, 429 aa, unidentified
MRTESTPGARGPVFCGVDTHADSHWLCVLDWRGRKVLSRQFPADAAGYEALAGAIAAAGEPACVAMEGTSSYGAGLTRHLASLGMPVREALSPARMQRRRPGQGKCDEADAERAARAAMSGSRLGTPKSQDGWVDGVRCMLAARSGAVKARTSAINTARSLLTTAPEGLRSRFRGMGGPRLMEELPSVRAEGALGAALGALADLWAAARDAALDMERAIEASPEENCPALLAMYGCGPVSAAKLAVAAGDNPGRLRSEASFAAICGACPIPASSGKTVRHRLNRGGDRQANSALHEIARQRVMRDPETAEYAERARARGKSDREVMRCLKRYVAREAYRALMRPHEIRRPEDASELVAARRAARVSQVRAASILGTSEKYISMLERGQRELKPIRRAYEAWVEAGLPLDWDRQAFEAEHKLDSKKHLAK

SEQ ID NO: 125828 - protein, 397 aa, unidentified
MFYCGIDIAKHKHEASVIDSEGKALIESISFSNTKEGCEKITAVFEKLGASVSDVVIGMEATGHYWLSVYTFFLELGFSVKVINPIQSEAFRKMYIRQTKNDSVDSFIIAQIMRFGEYSSSGLAEEYIIALRQLSRYRLALVDACGDCKRRVIALLDQVFPEYNSLFSDTFGKTSEEILLSCPTPEELLEVSTRKLTNILNKASHGRFGKEKAEQLKTAAKETFGIAFAKDAFSFQIKQLMEQIVFLENQLSELEEQISGLLHETNQYITTISGIGDTIGAIIVSEIGDINRFERPNQLVAYAGLDVTVKQSGEFSGTKNRISKRGSPYLRRAIWLASQRAAFCDPILSEYYQSLRARGKHHLTAVGGVARKMCNIIFVILKENRPYQPLPPKHFKN

SEQ ID NO: 125829 - protein, 343 aa, unidentified
MKDTIYDHYIAIDWSIINMAIARMTKKSNKITAIDVPSDIEDLQAYLKNLRGTKILTIEETTTSQWLYTELKEFVDRILICDPNRNKLLDEGPKTDKIDASKLVQLLKAGLMKEVYHSADKFLYLRRMVSGYEDLVKAGVRLKNQRYALLRACGKSGDEKTGSTLDSQGEQFVLGCLDRQIEAYEEEKEGYEKEFEKLARTHPEIKHQKSLPGIGTINAVKIVARVVTPYRFPDNGHYLSYTGLIKLEKTSGGRSYGKKNSRYSRQLKSVYKSGVLAAIQGNNPISDYYTHLIQEKGYPEHNARQKACRRLAILSLGVFKSGKKYQPYRRDHVKGSKEGTSGL

SEQ ID NO: 125830 - protein, 414 aa, unidentified
MLYIGIDWATASHTVTFLAPSGEVLDSLAIENRLAGFLKLLEAIRKHLRKLEPTATPDAVLFAIEDQNQRLTDFLLAQGFQGYLIEPSRMKGYRLRYRSSGNKTDPDDSFVLADVLYRDHDQLPRIAPDSDVVRALKTLLRDRESFVHDQTRLTNRLTACLRQYYPEALDFFEDVAGKTVLDFIAAFPDFAAASRLSRREVKRFLVEHHCHREAQLERIMTVLGSSPTPVPTVVVRTKRQQALAIIQQLRMVQTTVAGYDAEIERLGKENDEVKRFRGMPGGGPITGAGLATLFGEDRSRFNSAMAVQSLAGTAPKTIQSGQFRTACFRFGCIRFYRMLAQQMALGALRSSVWAKQYYRGKRKEGKTHQHALRCLANLLLKIAYAIWRDRTEYSEDHHLAQIMRHRLRPTSNSV

SEQ ID NO: 125831 - protein, 375 aa, unidentified
MQEKLRFLGLDVHAETIAVAVAEPDGEVRSLGTIPNRAESIRKMIKKLGPAEKLRACYEAGPTGYVVYWQLAELGIQCEVVAPTLVPVKAGDRVKTDRRDAEKLARCYRSGDLTAVWVPDEGSEALRDLVRSREAAKQDQMRARHRLSKFLLRSGQRPPTGVRPWTRPYLIWVAQLRFPQIAQEATRQDYLHEVEHMRERVARLEQAILEAVKLASPALQQVINDLQALRGIADISAVTIATELGQVSRFDSARQLMGYCGAVPSEDSSGKRIRRGGITKTGNAHLRRIVVEAAWSYRRPPCIWYGLRRRQESISEEAKEIAWKAQHRLHKRYMKLGAAGKAQGKIITAVARELLGFIWAIGTRAETIVGQRAAA

SEQ ID NO: 125832 - protein, 408 aa, unidentified
MQVTFGIDVSKSTSTVCELIGESKNELTITNDRPGFIQLLHELTAFSKHPQIIFEATGVYSRRLQAFLEDYGYEYVVLNPLKAKKEMDMGLRHNKTDKTDAYHLALIQRLYRHPVNQSESQTYKQLNALSRFYDQLTSDLVIAKNRLHQALQSTFPEIENLFSSAKGKNYWQIVVRYPHCDLVRREDKKQLINWLMSLKGIAFKHALRTADKLIELAYQAYPVVSCSSIEVEQVQYYAHRLLNLSDQRENLIARMVKLAKTLPNHDLENLESIPGFAQTTAVRVLAELGDLRRFSNPNKINAFIGIDPGRYQSGEMDSNLSITKHGNAVARKLLYRAIGQIDNAAKTNPCHIADYYESKKLSSQTKGFKKIAIASIHKLIRTIYALIINDQPYDYNVATHNQKDFSRN

SEQ ID NO: 125833 - protein, 417 aa, unidentified
MEEEQKARPCRYIALDIHKYYSVVAGVDREGEEILPACRVEHMDLENWLAKHLLPTDRVVIESTTNAWHVYDLLEPLVAEVLVANPIKVKQIACARVKTDKKDTFILARLMAANLVPTVWVPPQHVRELRQLISHRRRMASMHTQVVNRMHSVAHRHHLNHPKGKDFQAKNTGWQKDESLSRLEKMQLELDMETRAHLETQIGRMTRELGRMSHEEPWASDMLYLMQVPGCGVVTGMTILAAIGDITRFETPKTLASYSGLVPGLEQSGAKLRGKGITKEGRRELRWVMVEVAWQAVKADPHWKKYFEELKRRMHPNQAIVAIARHLLTMVWYVLIRHEPYSHYSPERIAYKYLTWSWALDEEQRQGMTRPQFARHYLMRLGIGNELKRVALNPKYPYKLASMEEVLALKPEFRPPE

SEQ ID NO: 125834 - protein, 464 aa, unidentified
MTDKKLWRNRKERKEWAQRLQSENPGLEVVHPHAAGIDVGNGMHYVAVRPDRDSQPVRRFECFTADLHRLAEWLQRCGVKTVAMQSTGVYWIPIYEILEERGIQVYLVNARHTKNLPGRKSDVQESQWLLKLHTYGLLNNSFQPPSEIRVLRTYWRQRGDHVHGAATCIQRMQKALTQMNVQLANVISDVSGLTGQAIIRSIVAGEHDPRKLAELSDPRIHASREEVAKSLEGNWRSELLFVLRQEVAMYDTYQQRITECDQRLQEHLASFANIIPLQPTEEEPKRKKTKLAKNAPRFELRSELQRVSGVDLTRIDGIDVMVAQTLISEVGLDMSRWKTEAHFSSWLGLCPDNRTSGDKVLARGTRRVVNRAATALRMAAITLMRSRTYLGAQYRRLRTKLGAPKAITAMAHRLARLVYRMLKYGQHYVDKGAEYYEHSYRRQQIEFLTKKAAKLGFQITLAHT

SEQ ID NO: 125835 - protein, 343 aa, unidentified
MKLHVLGIDLGKMVFHLVGLDSTGKVVIRKRCSRRQLLAFTANLQVQLIGMESCSGSHFLGRALRDQGHQVRLMPAQYVKPYVQTNKSDYIDAEAIAEAVQRPRMRFVPIKSEEQLDLQALHRVRERWVMRRTAVVNQIRSLLLERGLTLPKGRRYVEEALPRILEDAELPLSDSFRLLLAQLKLELEQLSARIEQLDVVILQRAKEDEACQRLTTIPGVGPVTATAVIAAVGNGSAFGRGRDLAAWIGMVPGEHSSGGKQTLLGISKRGNSYLRRLFVQGARSVLQQRHRQAPGLSSWLAQLLARKHQNVVIVALANKLVRMAWAVLCKGERYRASVLAVST

SEQ ID NO: 125836 - protein, 287 aa, unidentified
MTEITMIGVDLAKSVFQVHGIDAEGAVVPRRQLRRSQMLSFFQGIPACLIGMEASAGAHHWARELGMLGHDVRLIPPSYVKPYVRRGKTDQADAEAICEAVTQPSMRFVPVKDEVTQALLMAHKTREFLVRQLTQVTNAIRAHLGEFGIAAPKGMYNVGRLLEAGERADLPAAARVPLRLLAEQFFETRDWETRDWIDALTKDIRREAETSKAAKRLQTIPGIGPITATALAATLPDVRVFRTSRDLSVWLGLTPEPHSSGGKEKLGRISKMGNRYLRRLLYLGASC

SEQ ID NO: 125837 - protein, 390 aa, unidentified
MIYVGIDVAKDKHDCCILGPDTEELFQVFTIRNNSDGYGELFHKIESVSKDKSQIKIGLEATGHYSYNILGSLLDHGYHTFVINPLHTNLYRKGQSLRKTKTDKVDARSIAEMLVTDKTLKPYTGTSYHSEELKSLTRYRFELVKERAKMKTSVSRLVNILFPELESLVPTLHMNSVYRLLQELPGAYFIASSNLTHLKALLADASKGRYGREKAIEIRETAKSSIGSLMPAKSMELRQTIHRIDTLTSDIKEVEQSIQKIMDECGSPITTIPGIKYRMGAMILAEIGDFTRFSNADQVLAYAGLSPSTYQSGQLISSYARMEKRGSKYLRYALFNAAIYVSGWDERFRIYLSKKRAEGKHYYVAISHVVKKLVRTIFRMEITHTSYQPL

SEQ ID NO: 125838 - protein, 317 aa, unidentified
MSNKPSIVCAGIDTGKRKLDAAIDGRPDQLQVDNDPDGHRVLSAWLRRQRVKRVGIEASGGYEQAIVRQLRGDGFEVVVFQPAQVRAYATFHLQRAKNDKIDAALIAACTAAAKKIHAPPDPRLAPFAEPLTLIEQLSEDIAHLKTRRESCRDPQNRQFWAQEISRLNKLRSSAVKTLAAAIRQYPDLANRLDLIASVQGIGLQTAIIILVRVPEIGRLTREQVTALVGLAPYDDDSGDRLGARHIAGGRERVRTSLYRAALPAAFRWNPQLIALYQRLIATGKLHKVALVACARKLLIYANTVVERGTPWVPQSAR

SEQ ID NO: 125839 - protein, 335 aa, unidentified
MHYLYYVGLDVSKETFDASLVAFEDANEMAHRKFANSRKGICSCLHWVEKRHGILLDDVIFCAEDVGSYISEMAVCASDRTLTFNFSLISPLVIKYSMGIARGKTDRVDARRIAEYAITHYRKIALYLPAEKELCQLRTWLILRAHLAKQRVAKLVLLEKLDYKEKFADVSIQRSMLQEEIAYAETHMKTIEREMKELIAADSNICRNYKLLTSIKGVGPITAIVMLCSTLNFTKITDHRKFACYCGLAPFEHSSGISVRGGCHTSSMANRDIKVQLNRSALIAIRCDPQLKAYYERKVAEGKHKFSVLNAVRAKIAARCFAVVRRGTPYVALQI

SEQ ID NO: 125840 - protein, 438 aa, unidentified
MSNKVIFNLDELFISVGIDVGADFSWMSIALPNQQFVGKPYKILHNSIDSLTTAVSKIKEAEELYSLESRIFLESTEIYHYPLFCYLRDKGFNCSVINPIITKNSTNINIRKVHNDRFDSKKAALVGLKPDLKVSLMPSDLALNCRNLCREYYDLMDNRSAYVNKLQGELRMAFPQYLGIFSKVTINTSLTLLETYTSPSAFLKADRQEIIDIIRSTARFGLTYAQNKYNAIIQAATDANQFGYIIDSNIKRIRLYISFIRKYDEEINSILESLHELADANEDADFVKQIHLIETFKGAGFLSAVSIMGEIGDFSAFSKPKQLFAYFGLDPAVKQSGKFEGTKVQMSKRGSAIARRVIHTLTLQSISISRNGEAKNPVLREYYLKKCDSKPKLVSMGAVSHKVCNMIFAILRDNKPFKIIAPQEHIKQYNAAKCDIAA

SEQ ID NO: 125841 - protein, 338 aa, unidentified
MDTYAGIDLHSSNSFVGVINDEDQRLYGKRHSNRLDDILRALDPFQDTLKGVVVESTFNWYWLVDGLQEHGYQVHLANPSAIQQYEGLKHTDDKWDSFWLAHMHRLGILPEGYIYPKEHRAVRDLLRRRLLFVKHRTSHILSFQSMISRNLGFKMSNNEIKRLKPEDIGDMFECPNLSFMADNSLAAINFLKKIILDIEKKVKSQVKMRKEFLMLLTIPGIGNILGLTTSLEVGDIGRFPAAGDYSSYSRCVESKRLSNGKKKGENNKKNGNRYLAWAYVEAAQFCRRYCAKAQSFYQSKEAKKNSIVATKALSNKLSKASYYIMRDQVAFEEEKLFG

SEQ ID NO: 125842 - protein, 343 aa, unidentified
MQIHSVGIDLGKTTFHLVALGAAGKVLVRKKFTPQQLLTYTANLQTSLIGLEACSGAHFLGRVLRKQGHDVRLLAAQFVKPFVKSNKNDFVDAEAIAEAVERKNMRFVPIKTDDQLDLQAIHRVRDRLISRRTAVINQLRAFLLERGLVFAKTPAKLRAAMSDILENAEADLTPQMRNLINLLGDEWKTVEQQIEVLSLELERISAADAGCTRIRQIPGIGPIVATAIVAAIGNGAAFHKGREFAAWLGLVPRQYSTGGKAKLLGISKRGNVYLRKILIHGARAAVLRIKRDRSSIGAWMDALDARAPKNVVVVATANKLARIAWAVLSSGENYRPMAKRLAA

SEQ ID NO: 125843 - protein, 338 aa, unidentified
MEREQQYVGIDLHRRRSVIVRRNEAGETLETVRIDNSAMALATELAKAGEHPEVILEATYGWYWMADVLAESGASVHLAHPLGNNWGHRRVKNDERDATDLVDLLRLGRLAESWIAPPALRELRELIRYRAKLVHLRTGLKAQVHSVLAKEGVAVPMSDLFGVAGQRLLDEVQLARAYRIRVESLRDLIELCNREIAMLEKEVAPYFAGDLGYHAVQAIPGVGPVLASIFVAEIGDVTRFSSARHLCSWAGLTPTHHESDDKVNRGHITKQGSRLVRWAAVEAVTRQRGATPIRAHHHRVAERRGTRIGRVAAARKLLTLVYYGLCDGEIRCLAEAKE

SEQ ID NO: 125844 - protein, 455 aa, unidentified
MPVIHAHAAGIDVGATSHWVCVPEDAVAEGQSPVREFGAFTKDLDELVEWLRKCQVKTVAMESTSVYWIPLFQKLEAAGLEAVLVNARHVRHVPGRKTDCKDCQWLQRLHSYGLLNGSFRPSDDICSLRSLMRHRDNLSKACGQQVQHMQQALNYMNIHLHHAVSDLNGETGLRILDAILRGERDPRELVKLRDPQITRSTVEEMEAALRGDWRAEHLFVLRQSLENYRHLLKQMEVCDGELEQALAKVVVNPATVAEAERPKNPPAAEPKSKKQKKFKKLKAGTGLKRDCSAELTRICGVDLTRIIGLNVLGVLILISEIGVDMSRWRNAKAFCAWLGLCPGNKISGGKVLSSRTVHVVNRVAVLLRTVAPAVGRSDTWLGIFHRRMRARLGPAAANTATARKLACMIYHLLKYKEEYIDVDCLIYQEKIRKSRIAKLCKQAEELGFDMIKKAA

SEQ ID NO: 125845 - protein, 347 aa, unidentified
MVTLGADAHKRSHSLVAVDDIGRKLGAHTVAATSTGHLEALRWARRWRPRRWAVEDCRHVTRSLEKDLLRAGEVVVRVPPHVAAEGRRSLRERGKSDPIDALAVARTALREADLPEAHLDDHCREVKLLLDHREDLVGERTRIQNRLQWLLHELEPEFQVASGALSRRPAIKRVEALLEGRHGVVAELARELTVRTAQLSSRIDELEQQLAAMMPALAPSLLALPGCGVLTAAKLLGETAGVRRFRSRAAFAMHNGTAPIPASSGKQQRHRLNRGGNRQLNAALHRIAVSQIRRAGRSHDYFQRRLAAGNTKREAYRALRRRLSDEVFRLMLTDQQTDASGVQAPAA

SEQ ID NO: 125846 - protein, 329 aa, unidentified
MSAFVCGLDVHKDSTYATILDPDGKVVSQMRMNNERVLSYLANFNVDRVAMESSNQVVALYRQLVKRGYCMFVSHPKKTRYIAEAKIKSDRVDSKAIAELVRLDALPLAYIPDEETAALREKVRRRAFLVRERVKLRVKIKSILTYEGLKWPSDHGLFTEKGEAWLHGLNLESVESYLRVLKVLDDEIRLLSKNLRGLAENDDNVKLLMTIPGIGYYSALLVKSEIGDVNRFAFGDRLCSYAGLVPSTHASGSTVRHGGITKEGSRWLRWVIVEAAQTHVHKYDTTITKAYHRIAEGRGRRVAVVAAARKLLMCCYSVLKNKRPYHDQT

SEQ ID NO: 125847 - protein, 317 aa, unidentified
MSAGAVFVGIDVSKGRLDVHALPQADAFSVGNDPAGHEALAARLKPLRPALVVLEATGGLERRCAAALAAAGLPVSVVNPRQTRDFAKAMGRLAKTDTIDAAGLAEFARRVGPPVRPLPDGHARAFEALLRRRQQLLEMRAMEHNRLGLARDGREHASLEEHIAWLSRQLEQLDKELASAVEASPVWRVNDELLRSIPGIGPVVSRVLLGALPELGTLDRQHIAALAGLAPVADDSGTHRGRRVIKGGRAEVRCALYMAALPAARYNPALRAFARRLKAAGKAARVCLVAVARKLLVIANAVLRDQRPFDPALAAAQ

SEQ ID NO: 125848 - protein, 344 aa, unidentified
MEHYAGIDVSLERSSVCVVDATGRIVREAKVASEPEALVRLFGQLGLPLTRVGLEAGPLSQWLHAGLTEAGFEAVLLETRHVKAALSAMIVKTDRKDARGIAQLLRMGWFRPVHRKSPPAQEVRALLVGRKLLQGKLLDVELSLRGILRGFGLKLGEVSRGRFAARVRELASGQPTLERVVEPMLRAREALRAEFHVLHRAVLAIVREDAVCRRLMTVPGVGALVAVTFASAVDDPARFRRSRSVGAHFGLTPKKYQSGETDVTGGISKAGDAMVRAALYEAANVMLTRSGKFSTLKRWALEVAKRRGPRRAKVVALARKLSTVLHRLWVDGSEFRFGKEGAAA

SEQ ID NO: 125849 - protein, 453 aa, unidentified
MPRKRVNKSKKVALPILNPDAAGIDIGATEIYVAVPADRNPEPIRMFATFTQDLSELADWLQQCRIRTVAMESTGVYWIPLMQILETRGLEVYLVNAKHVKNVPGRRTDVSDCQWLQYLHSVGLLRASFRPAQDVCALRSLLRHRASLVDMASCHVQHMQKALDQMNLQLHHVISDITGTTGLAILDAILDGNRDVHALATLRDPRIRASHETIAKSLVGDYRREHLFTLRQSVALYREYQRQITICEQEMHLLMKDLETKADPTATLPTAKDSVKKCKVMAPARAMALREEAYRIFGVDLTAIPGISVLHVQCVLGELGHGISKFNSSGAFSSWMGLCPDNDISGGKVLWTGTRKVKNRIAVTLRMAAQSLQQSESALGVFYRRMRTRLGAPKAVTAAAHKLARIIFHMLTTREPYDESVFAQAEQKNLQRMEHRLKIQARALGYTLLPAQP

SEQ ID NO: 125850 - protein, 329 aa, unidentified
MGVNNNFVCCQKRFQRVIGVDISSEKIDIHDSQNKLSGEVLNTFAAVKNRLLSKLDPTEDVLVICEATGGYEYVLVDSLHDAGINVCVANPRQVRDFAKGHGFLEKTDKLDAAMICKFGQDVDVHLTSKRSPQERAFQALVRRRQQVLQSLAAEQNRVPQTHDASMVELIKESIEQLKTQLKTIDQRIAVALKEQAKTDPKVEILQSVPGVAVVTTATLIAELPELGSLNRGQIAKLVGVAPMANQSGKSDKKRGAKGGRSGVRKVLYMATLVATRCNPVIKLFYQRLLSRGKPKKVALVAAMRKLLTILNDMVRNQESWRKADLSLSK

SEQ ID NO: 125851 - protein, 450 aa, unidentified
MGGRCAGVDWASEKHDVLVAEASGERVLQATFAHDERGLRALCAALVRLQVELVAIERPDGLLVERLLDAGLRVMALHPNQVHAARPRFRASGGKSDRFDAFVLCELARTDSHRFRVLVADSDATKALRALSRAREDLVQTRVELANQLRAELERFWPGAAIVFGDIDSAIALAFLERYPSPADARGLGEQRLAAFLARHGYCGRKPAAALLEKLRAAPEGRAAEGETEARRQVVLAYVAALRPIVAKITELTSEIAHRLHAHPDGHVFLSLFRDARSVVCAAALLAEIGDCRARYPTAEALAADAGMSAVAVESGKRKVACFRRGCDKRLRDATSTLADATRHWHPWAADRYAAARARGQDHPRAIRTLGRAWCRVLWRCWQDGVAYDPARHRGLQQHIAVTIAHPSRAGLDLIATERMGGAAVTHRAARTAEREALDGQPSTATRLEG

SEQ ID NO: 125852 - protein, 430 aa, unidentified
MKSNTQNAKIEAITEKTLVLGIDVGSETHYARAFDYRGIEYSKKPFKFSNTEAGFVTFKEWILDLKERHEKDKVVPGMEPTGHYWFNLGKFLQDNEMKPVLVNPHHVKKSKELDDNNPTKNDRKDPKVIAGLVREGRYMIPYLPDGVYADLRTASNIRFQLQAELTRIQNRISRWFNIYFPEYKTVYGKPDAKSGMLILKAAPLPKDILTLGIDGVNQIWRDAKLRAVGKARAKTLIEAAEHSVGSKEGAVSARMEIRMLLEDYESRNTRLQEVMVLIEELVRKIPMAEKLLEIKGVGIRTVSGFLAEVGDISRFNNPKELQKLAGLALVENSSGKHKGETTISRRGRKRLRYLLFEVAMSLVAKNPEFRELHNYYTTRRLNPLKKMQSLMAIAAKLIRVFYAMLTKGVDYDPKKMVSDIKRPAVYLQAA

SEQ ID NO: 125853 - protein, 333 aa, unidentified
MRHWIGIDVSKATLDVALLDAAGSVVGEEQVTNTAAGLKGLLRRWTKTFGLVKGEYLVCLEPTSYYGHLALGVLVELEVPTWLAHPNDIRASIGMTRGKSDRVDATRIATYAWRFMDKARLVTTDQLKMNKLKQLLTKRQNYVVRKTMHQRQIKDMNKHLDKDLRAVFTRLDKAQIKLLNKAIEELEGMIEDTIYAEPELSRRFELLKTVEGVGLILASHLLAYTDGFTRFATPRQLACHAGCAPFEHRSGTSIRGRSRVSPNANHALKRSLHMSAVGLIRFPGEFQDYYKRKVAEGKHKMLVFNAMRNKLIHRVCAVMKRGTPYIPKPLAMS

SEQ ID NO: 125854 - protein, 341 aa, unidentified
MKNLFIGVDFSKEKVDVAIVFADGLTETAPRVFNEFKTTVSGYKQLVKWVEKNSYGIAPSLWLFCGENTGDYSKGLCNFLYGKGYDMWLENAKSIKDASSLRRLKSDRTDASMIAEYAMRNHDRAIMYEPLSESLAQLRELFLYRQMVVRHRCSFQVRRGEKKLTMEKSPIKTMISQSGRHIVSELNKEVEKIDKRIAELIKSDEELTEVFTIVTSVPGIGTQNAVCLMVYTDNFRRFNYDSRKIACYYGIAPFGKDSGTSVHSDPHVHYMANRQIKAILTQAAQAAVKFNPVMVRYYIHLVERGKKKQVALNNVKNKLVHLVTAMVRNRKTFTPEYKISA

SEQ ID NO: 125855 - protein, 348 aa, unidentified
MLAEVVDAVVGGDTHRDTHALELTAPSGATIATLMIGNDERGFAEAIAWVAEHAPGPRVVVGLEGTRSYGIGLARVLQAAGLTVVEIERPRRGERRRGKSDPIDAHLAALHALRLDADRLPTPRADGDREALRILLGARRELTTAKTRTINRLRALLLTGSDADRALSRGALSSDRLAAITRRRGGQHETREYAVRRAEARRLALAISGIDRELADNKWHLADLVTHLAPQLLAKRGVGPVSAAQAIVSWSHPGRCRNDAAYAALAGASPIPASSGRIVRHRLNRGGDRHLNRTLHDILLTRWRTCPRTRAYIARRRAEGKTDPEIRRCLKRYIARELYRSLNTAMAA

SEQ ID NO: 125856 - protein, 412 aa, unidentified
MIYAGVDIAKVDHVIGAIGETGEEVAKPMPFKNSKEGFERCVAWLEGVAETQDEVVVGMEATGHYWQACFSYLTSCGYRVAVINPMQVKAVRKLKSLSKVKNDRIDSVVIAETLRIGNFDETALATDELQSLKTLTRYRQSLKEQVAAVKTHVICLMDTYFPEYGGIFSNMFGKASLAVLAKCPLPADIARVRESTLEKIVMEASHGRSGAGQAAKIKERAKASIGFALGSEAASFEVRSYISQIEFLLDRVAEADERIAALLESLEPLILTVPGISTTTGAQIVAEIGDVSRFKNAAAIVSYAGINSSVNQSGKFELEGGSITKHGSPYLRRALYLAAQGAYRLDPGLRAFYDKKRSEGQMPQGRGDGGGQKALPHHLRDPPRSSPVRVAGLKTCQPLFPRRPYGASIHCA

SEQ ID NO: 125857 - protein, 341 aa, unidentified
MQVITIGIDLAKNVFQVHGVDANDKVVFNKPLRRSQVLPFFAKLGPCLIGMEACASAHYWGRELKKLKHNVRLMPAKDVKAYVKRNKNDAVDSTACCEAVRRPTVRTVPVKTPEQQGQLMQHRVRDLLIRQRTQAINALRSHLGELGIVAPQGYEGLRVLLAIVADSSDTRLPEHARASLSALVAQIASCQAQIGAIDKLLLAQHRKNADSKRLETIPSIGVLGASAIVATVPDATIFKRGRDFAAWIGIVSREDSTGGKQRLGPISKQGDRYLRRILIVGAFAVLRQARAHPEKYPWVTQLLARKPAKVVAVAIANKTARIAWAVLTKKEIYRVQTTVAA

SEQ ID NO: 125858 - protein, 428 aa, unidentified
MKYNTQNAKIKSITEKTLIVGIDVGSETHFARAFDWRNYEYSKKPLEFSNTEAGFMTLKAWMADFAEKYGKNVVIPGMEPTGHYWFNLGAYLQDNGMKPVHVNPHHVKKSKELDDNNPNKNDRKDPKTIAALVNEGRFSYPYIPTGIYAEIRSLSNLRLQTQEEITRIKNRIARWFSIYFPEIKDVYRNPDSVSGLMILKEAPLPQDIVKLGVDGINKIWRDAKLRAAGLKRAKTLVTAAEHSIGSQEALDSARIELKNLLNDYEIYKNREEDLMSLTEEKLSEIPHIDKLLEIKGVGLKTVSGFVAEVGDITRFDNPKQLQKLAGYAIVECSSGKHKGESHISYRGRKRLRYVLYEAAISLIARNEEFKEVHRYYRTRKENPLKKMQSVIAVACKVLRIFYTILTKGVTYDGAKMMQDIKRPQMLAA

SEQ ID NO: 125859 - protein, 348 aa, unidentified
MLMGHEPKPVTWQLANEPNAVRRLVRKLEREAPGAVRVFYEAGPCGYALQRQVTTSRVSCDVVAPALIPRKPGERVKTNRRDARKLAELGRAGLLTAVQPPTAEDEAVRDLARARDDAREDLQRCRHRLGKLLLRRGLHYVGRNWTRAHRQWIERVTWTHAAERIVVDDYLLAIDHTEARLLELDARLAEIAEREPYREPVGWLRCFRGIDTLTAMLILAELHDFRRFASAPALMAYLGLVPGEDSSGEKHRRGRITRTGNALVRRLLVETAWHYQHRPTVGTALTRRRKGQPARVIAIADKAQQRLCRRFRKLAAEHKPAPKIAVAIARELTGFLWAALQREPATVN

SEQ ID NO: 125860 - protein, 419 aa, unidentified
MKKHSKSSQRSEPSLKRTKARGPVQRDAKEVLAEVLEKLRGKLEAPAVSTSAKENRRGNTVGPNRDRLTVGVDLGDRWSQYCILGLEGETLAEGQLRTTQEDIREFFQALTVARVVIEVGTHSAWVQDVMTEWGHEVLVANPRLMEGSKRRKRKSDRIDANKLARLGRVDPQSLYPIRHRSREVRQDLVVLRARDALVSVRTELINTARGLVKSMGTRLPRCSSPSFAEKVKDAIPVEVREALLPLVQLTETVNDCIARYDQKIEEMGQKKYGHTTLLRQVKGVGPITSLAYVLTLEDPQRFSSSREVGPYLGLVPKQEDSGDSQPQLGISKAGDRMLRRLLVGSSQYMLGAFGPDTDLRRYGLRLCERGGKNAKKRAVVAVARKLAVLLHHLWVTGDVYEPLHHTGVETRTAQATAAA

SEQ ID NO: 125861 - protein, 387 aa, unidentified
MVYIGIDISSDKFNVCILYSDSSKSIDLSFRQSRKGFEKFHSKLLNIHEDVLIAMESTGVYHMSLYEFLSSKGFEVLLLHPYTLKHFLKAYSHSKTDSIDARSIALVLSQLSNSIHLSNVPSDQLNALRELVRFRNSIVQQRSNLYRRLHNFLRLDMPEILKFFDINSKVLHALLIRFPTRSDIISNQQDVVQFLSSFKNWNESKAQSLISALKDSIGLRDTFGSHSFIISSIITQVKSLSEQLERIEEKISELLSQFSDNPISSIKGIGPVTLAQIISEVGDISRFSSSKAFVAYSGLDPVIHQSGKSFHSGGISKKGNSILRYTFYNLAVRIVRYPGKYRDKYLSLLERGKPKKVALVAIARKLAVLVYTLWTRGEKFDPNIAVT

SEQ ID NO: 125862 - protein, 371 aa, unidentified
MKQQTKSSNITVGLDLGDRRHRFCALDERGEVVEQDSICNDRVSLRKLAGRYHGALGVMEAGAHSPWISRFLEALGWRVVVSNPRKVGAIYQHERKSDQRDALMLARIGRMDLALLYPVRHGTAEAQQDLLRIKLRDSLVRARVAVINSVRFTLKSLGYRVRNPSSARFHKVVMEEVPESVREMITPSVQALAELTARIKMLELEINTLAQMKYPQSAQLQQIPGVGPITALYFVLKIEDPNRFAHVRDVGAYAGLCPRRDQSGESDPQLRISKRGDAYLRRLLVSAAHYILGPFGPQSALRAYGLMLAADGTARAKKRATVAVARKLAVLLLSLWKSQQPYQPFPGARLNGEQEDRRSGTIALHRMEATD

SEQ ID NO: 125863 - protein, 348 aa, unidentified
MLTERADTVIGVDTHAERHAFCLLDARSGLVLAACELPATRAGYREALRLARRRGQGRRVWSLEGTGCYGAGLARLLAQKGERVLEVERPRRRGRDGRLKSDALDAERAARAVLAGDRLASPRRGGEREALRVLLAVREQEVGVRRGGLNELRALVVTAPEQLRERLRGLRGDALVAACLRLRRQAGAEPAAAACRLALRSCAERVAQASARAGELEREIAALVRALCPQLLAEPGVGPISAGYLLVAWSHKGRLRSEAAFARLAGVAPIPASTGKTIRHRLDRGGDRKLNRALHTILLSRRRTDTDTIAYLKRRVSEGKSEREALRCLKRYLARSLYRLLERCATTA

SEQ ID NO: 125864 - protein, 402 aa, unidentified
MNCVGIDVSKGKSMIAVMRPFGEVVVSPFEVRHTASELSKLAGLLKSLDGETRVVMESTGNYHAPVAWLLHDAGLYVSVVNAMLVHDYGNNSLRRGKTDKKDAVKLANYGLDHWLTLPRYVPEEDTRLMLKTCYRQYQQYSKVQTMLKNNLISLLDTAFPDANRLFTSPPRADGSEKWVDFVATFWHCECVCGLSKKAFTAKYQKWCRKHGYNFSQDKALDIYASACGRFGVMPKTNTAKLLVEQAISQLQTTSAALAALKQEMQSLAASLPEYPVVMEMFGVGPTLGPQLMAEIGDVRRFHSKKALVAFAGIDAPPYQSGQMDVRSRSISKRGSAALRRTLFLVMGVYLQSAPMGEPVYQFMDKKRSEGKPYRVYMMASANKFLRIYYASVTAYLNTQTQA

SEQ ID NO: 125865 - protein, 350 aa, unidentified
MKKFFGCDAHKRYSVFASMNEAGQKGASIRVENNRSLFCRFLSKLPPGSSIALETVGNWYWMVDEMEKAGHMPQLAHATKAKLMMGQINKSDKLDAHALALLLRNGTLPVVWIPPGELRDQRELSRMRMALVRTRTKFKNRIHATLSKYGLQIPEVSDIFGVQGRLLLRNCLGELPSYTSQSVETQLELLDQVETHIRWCEKKIEEVVNKTPAMELLLTLPGVGDILAVVMAMEIGDVRRFPTSHHLASYAGTVPRIKESGGRHYYGKVRPDVNRYLKWALVEAANIIVINQGRWSDRHVVRLYWRIKERKGYPKAVVAVARHLAEAAFWVLKRNEPYKEPQGSKTFSST

SEQ ID NO: 125866 - protein, 347 aa, unidentified
MDYYAGIDVSLESSSVCIVDGSGKSIREAKVASEPEALIGWFGSLGLELARIGLEAGPLSQWLYAAMKQQGLAVELLETRHVSEAFKTMPVKSDRNDARNIAQLMRLGWFRPVHCKSMSAQETRAILTARKLVQSKLLDVENSLRGILRGFGLKVGKPTRAGFAGRIAELVKGHPNLEVIGEALLNVRAVLLCEFKAFEKRVRTMSRLDAKARLLMSTPAVGPIVSLTFAAAIDDPSRFTSAKRAGPLFGLTPKKYQSGETDYSGRISKLGDASVREVLYEAAHIMLTKPIKGCVQLKSWAMRIARRAGPSKAKVALARKLAVIMLRMLMDNAPFNQAAKPTTAAAK

SEQ ID NO: 125867 - protein, 347 aa, unidentified
MDHYAGIDVSLEASSVCVVDGAGKILREAKIASEPAALIGWFASLGLDLARIGLEAGPLSQWLYAAMKEAGLAVELLETRHVRTALQTMPVKTDRNDARGIAQLMRLGWFRPVHCKSMAAQETRALLTARKLVQSKLYDIEMSLRGILRGFGLKVGPTTPKRFARRIEELVAGHSTLEVIAKALLSAHAALLRELDMFEKLVRAMARRDKRARLMMSAPGVGAIVALTYVSAIDDPARFSSSKRVGPHFGLTPRKYQSGETDVTGRITKIGDAGVRTALYEASNVILTRPVKGAGLKSWAMKLARRAGMKKAKVALARKLAVILHRMWIDGTAFDARKAAFAGVAAA

SEQ ID NO: 125868 - protein, 517 aa, unidentified
MLSDTMSPQLNTSSQRKGDETFALSSVDRLTWLAFGQADVPEITARREYFRPVERFFGLDIHREYLVATAVDRDLRVVCGPTRLTWDRFENWISRTLTPRDAVVVEMTTNTWAVHDALVNHVHSVTVVHPPHVKLITQSPVMNDKKAAEALAVLHAAGLLRGVWVPDPMVRDRRQLVAQRHDRVRAATQAKNRLHAILFRHQFEKPDSSLPFSPKRHDFWRSLPVSAVEKLAIELDLETIDQVEAQRERIENIMTQMAATDERLPYLVQLPGISALGALTILAAIGPIERFPTPKALVGYAGLGGRVHDSGQTHRAGKITKAGRRDLRGVMVNAAQAATRSHPFWKSEFERLERRIGRNKAMVAMARKLLVVVWHVLTKHEADQHADAQNVAQNILNTVYTHIGARHLPDGQTAPEFVRRSLDRLGLGKDLQRVRRGQHEYLLPPSALPGAAPAAEPIGRGRRQNTKAAQEKRQADAAAKRAALEAKQAEAEARMGRPRKTRSDKGAKRGAKVNVTA

SEQ ID NO: 125869 - protein, 339 aa, unidentified
MELYGAIDLHSTNCHLAMVDGQRNRVFYRKFPNRKETVLNALSPFEAQIRGIAVESTYNWYWLVDALMEQGYQVHLVNTTQVIQYSGMKYGDDRHDAFWLATLLSLGILPEGYIYPRKERPLRDLFRKRAHLVRVWTALLLSQQNMILRNRGLKVSAYELKRFSHDGVASLFQGDPELTLAAEANKAVIDLLTIQIDRLEKAIRVRMVPREGFTKVMSLPGVGDILAMAILLETGPIDRFQQVGDYASYSRKVPGVWLSNGKIKGRGNTRNGNRYLAWAFSEAADHARRHHALSRAFYQRKLAQSNAAVAHHALAHKLARAAYYIMRDNVVFDEGKMFR

SEQ ID NO: 125870 - protein, 334 aa, unidentified
MKYKFFVGIDVSKSTFDVAVLCRDNSQQIVHHVFSNDEKGIKEMGQFLKESFSDYNHTNTLFCMESTGMYCNALLNFFKETSTDVWVENAIQIKRSSGITRGKQDKIDACRIALYAYKNADTARLWKPAREVMEQIRNLASLRDRMVQTQKKLQTPINEFEAVGEKKMAALLAKSISKSLKAIDADIKQIELKITTLMKQDESLNHLFKLVSSVVGIGFVTATNLIIHTNEFTIMKDCRKLSCFCGVAPFPNQSGTSIRGKTRVSHMANKKLKTNLHMASLTAVKFDPELKTYYERKVAEGKHKMSVLNAVKCKLLARVVSVVNNQKEYVKKAA

SEQ ID NO: 125871 - protein, 385 aa, unidentified
MRSEATREGETSVGGQVLYMALELSDRTWKVLFASPAGRRRERSVAARDVAALLEEIAAAKRRLGLSAQARVVSCYEAGRDGFWLDRALRANGIDNLVVDSSSIEVARRARRAKTDRVDLVKLMGLLLRWVVGERKVWSVVRVPGAEAEDIRQLSRSIERLKGEHGRHVTRIKALLATQGIKLTRIGTRDWGKRVGELRRWDGSALGRWLQRDLVLEGERLAVVAEQLASLKAERDRLVAEGREAAAVKARELARLGAIAAESSFVFATELFGWRTFSNRRQLAGSVGLTGTPYNSGQSAREQGISKAGNKRMRTMLVEIAWCWLRYQPGSALSRWWQGRFANTGGRARRIAIVALARKLLVALWRYLEHGVVPQGAQLKTRAAA

SEQ ID NO: 125872 - protein, 350 aa, unidentified
MPATIGCDAHKQFSVFVTIDGKGKTAPAVRVEHQRQEYVAFLRSLPPGSEIALEATGHWYWMVEEMEKAGHHPHLANPTEAKKRMGKTNKTDALDAKGFAILLHNGTLPESWIPPGELRDRRELLRTRMVLRDLRSSLKHRIHAAIDRYGLQATGISDLFGVKGRVYIDAVLDRLPWDAAAMIQVQLTSLDQLEVQIEEIEDRIAVALKPSPEVRLLRTIPGVGEILAPLVWLEIGDIGRFPRAENLAGYAGLVPKIIASGGRIRHGGTCRNVNHYLKWGFVEAATCAVRLKAYRDSHVGLLYHRLAPGKGHRRAIVAVARHLAEASYWVLRKRQPYKSPAPRPIEIDAA

SEQ ID NO: 125873 - protein, 339 aa, unidentified
MNNSVIGLDIAKHIFHLFTVGADGKPTKKKLKRHELLAFFANYPVSIIGIEACGSAHHWARELTKLGHEVILLNARFVKNYVVGNKTDFNDAEAIHEAVTRPNKRVAAIKTIAQQDIQLVHTIRKELVDQRTALVNQTRGLLSERGIIINQGLTQFREQLPLIVEDAENTLTDLSRELFAEQYEKLKLLDDEIKTQDQRINRLCNANDLSKRFLDVPGIGPLTASMVAADIGDGGKGYKSSRDYAASLGVVPKQHSSADKPHYLGISKRGNRYIRTLLIHGARAVLKNCTKKTDKLSLWLQALIQRRGFNKAAVALANKNARILWAMASNGKDYEALTA

SEQ ID NO: 125874 - protein, 318 aa, unidentified
MMIEEEKSYIGIDISKALLDVYVLPCKKYMRFQNNSTGIRKMREKLKLFSNVSIVMEATGGYEKAVAQSLQMGGWSVSIVNPRPIRDFAKSLGKLAKTDRIDAEIIALFAEKIQPKETIVYNENQQQITELNARRRQIIDMITMEKNRLDKASDELKKSIQRIIKALEKELQAINEALEKSIQNDTDCAGKNRLLKSIKGVGSIVAAGMIADLPELGNVNAKQISALAGLAPYNRDSGTWRGKRTIWGGRASVRTMLYMATLVAIRHNPQIKCFYERLCSVGKLKKVAITACMHKLLIIMNAMIKHGELWRMAAIVEI

SEQ ID NO: 125875 - protein, 298 aa, unidentified
MQISGCVIGVDVGKFELQVAGHEKSIVSGVLPNNRSSIVGWLKRLPAGSVIGMEATGGYQELLARLAHERGFVVYVLNPTHVHHYAISLGNRGKTDRLDAEVIAQYIAQRHTKLHPYEPISPELQQVRALQALRTTVVRVSTSLRLSAQRHGCASVHQKKALAGLSSWAEQLERELIAKIKAQSEWAKIYGLLTGICGIGPINGVALTALFTRVHFTSSDAVVAFCGLDPRPKESGRKVGRRRLSKQGDKAARSLLYNAASSAVRTPHFKDYYAALRARGLASTAALVVIARKLLRIA

SEQ ID NO: 125876 - protein, 428 aa, unidentified
MPAMNQENPEPQFAAFVAIDWADQKHVWSLQSASSTTRERGEVEHKPEAIDAWVAKIMQRFENRPIAVAVEQTRGSLVFMLSKYESLHLFPVPPAMTANFRKALYPSGSKDDPKDTDLLLDLVQMHREKLRRLAPDTEATRLIQNLVEERRKLVDEKTAQSNRLEAHLKIYFPQIPQWFEDIDSPLVCDLLERWPTLEALQKVRTDALRSFFRRHHCRKQELIESRIQAIREAMVALKDRAVVDAKVQAVKVSVQLIQVLHQGIKVLDGQIQEAAEAHPDFFIFESLPGAGAVFAPRLLAAMGSQRDRYQNADEVGTKSGIAPVMASSGKSRWVHFRFACPKFLRQSFHEWASLSITKSEWARAYYQQQRARGKKHHAAVRALAFKWIRILFRCWQDRIAYDENIYLAALAKRNSPLIATKMVPVSAL

SEQ ID NO: 125877 - protein, 389 aa, unidentified
MVYVGIDLHRKRSHLTALDESGELVLSRRVLSQPAEILRVFGELSPQPMEVAFEATFGRGWLADLLADAGIPAHMAHPLATKAIAAGRVKDDAVDARMLAHLLRGNLLPEAWIAPPEAREARRLARMRAGLMRISSRLKCQVHAVLAEHGVTPPLSDAFGKSGRRLLGQLALPEISARRVEANLRLIDSIAVEVKLADRELTFHFAQDPRVKRLLPIPGIGFITAAIVVAEVWDVSRFRTAAQLSSWSGLAPKERSSPRAHPPRPGAARLLPQGPPGESGPQQDRPRGGRSPSPHALLLCPPRRGRLPGLPGRPMNTHTLPVKAHSTGVMASPGRRPRRRCCARTSPSARTDTAGARAGQRCSPGRTARSGRSWTSPRSMRTTRCGGRR

SEQ ID NO: 125878 - protein, 369 aa, unidentified
MDVPHPLRHRSAKVVVRVNHLPRGDVQMQITTIGLDLAKQVFQVHGVDERGRTVLSKRLRRAELESFFASLPPCLVGMEACAGAHHWARVLGELGYSVRLMPPQFVKPYVKSNKNDARDAEAICEAVSRPSMRFVPIKGAEQQAVLMMHRVRQLLVRQRTMVANAIRGHLAEFGVVIRQGVKALPQALPSLLQEADTDLPPTARSMLALLSEQLRYFSERVSQVERELLRWHRASEPSRRLEAIGGVGPITATAIVASVGDARSFRSARQFAAWLGLVPGQHSSGGKQRLGPISKRGDTYLRTLLIHGARSSLRALQHHPHQQSPWLARLLRRRHPNVVTVAMAHKHARIIWAMLTSGGSFRPELSTQR

SEQ ID NO: 125879 - protein, 366 aa, unidentified
MFTERTSVGLDVHARSVAAAAIDSVTGELVQATLTPDYGDVRGWLDRLAGPVAVAYEAGPTGFGLYRHLQAAGVRCEVAAPSKLQRPAGDRVKTDAKDAIHLARLLRLDEITSVAIPTIAQEAARDLVRAREDCRGDLMRARHRLSKLLLRHGIVYYDGKAWTGKHDIWLRHDALRRLPSDAATRLTFDADYDAVLTVKARRDRLDTAIEEAAADCEFTAIVRRLGCLRGIGTLTAFALAVEIGDWTRFTGNTIGSFVGLVPSEHSSGGSRSQGSITRTGNGHARRLLVEAAWHHRPRYTVGKVLRARWDLAPAAARARGNDGNRRLHQRWVQFIDRRKRSTVADVAIARELAGWCWSLAVLDTST

SEQ ID NO: 125880 - protein, 292 aa, unidentified
MLVNRKLANDAVGIQLLIRTTFSVEEQQGIVDVQAAIESCTGAANLADELINTAGWNVTLAHPGIVSRMKQNPDKSDHTDAFVLANLKRIGYLPKVWLAPEEIRQLRSLVRHRAQLVKQRTRIKLRIRALLREHRVSSPMGVRPWTQVWLAWLMRVPFNAASAFLREEYLEEIQRLNNKILRLEKKLIAQTADDALVKRLLQMEGIGPITAITMRAEIACFDRFDSGKQLSRYCGVTPRNASSGQKAGGCRSRESRESRFAGGADPGRSETDVVQFPLEYFCHATQTKCKAA

SEQ ID NO: 125881 - protein, 350 aa, unidentified
MLIIGCDYHPSFQQIAFVDTETGEFQEQRLSHREEAERFYRDLAAQGRKGRVGMEASGHARWFERLLAELKVELWRGDAAKIQAKRVRKKKTDREDAQHILQLMLKDDFPQIWVPSWDNRDLRQLLWHRHRMVQMRTRIMNQLQAVALNEGLRCKKRLWGERGRQQLESIGLAPWASRRRRDLLELLDRLTPTIAELTKQIEQEVEKYPAAQRLMTHPGVGALTALAYVLIIGEPERFECGKQIAAYLGLVPEEDSSGERRRLGHISKQGSGLMRFLLVEAAQVTVRSDPEWRSKFFHLALRRGRKIAKVAMARRLAVRMYWMWRQQWDYEQLKKFGPHAGQPGTAHGVK

SEQ ID NO: 125882 - protein, 349 aa, unidentified
MKIFVGIDVSLASSAVCVLDERGQILKQAQIASDPEAYISFLSDLPWPIEAIGLEAGPLSQWLHRGLQEAGFELILMETRQVKAVLKAMPIKTDRRDAEGIARLLRMGWFRPVHCKSVSAQEMRALLSTRKAVQKALLDIEQSLRGVLRNFGLKLGPVSKTRYEARIREMVTGNSALETASAAILRARAVLRSELSALERRVLALARHDDACRLMMTMPGVGAVVALTVRSAIDDPTRFHSSRDIGPWAGLTPRREQSGERDVSGRITKAGDASLRTALFNAATVLMHRAKPCWLKAWGLQVAKRRGQKRATVAVARRIGVVLHRMWLDGTEFRMKRCSNEAPGTAATA

SEQ ID NO: 125883 - protein, 362 aa, unidentified
MNAIHYIGFDVHKKTISYCVKTADGRIVEEGTLQAQRTVLRRWAEGRQQAWYGAMEATLFSAWIYDTLKPYAQQLFMGHPARMKAISAGKKKSDRIDARTIADLLRCDLLPKCYVLPPEVRDLRRLLRYRNLIVQQSVRMQNKMAGLLMESGTAFNKDKLQGKKYFASLMKTLQEVPESVKDLLRMSRGSMEMFESTQKQLIKRLLAEPALQQRVERLESIGGVGPITALTWALEVADPHRFSSIADAASYCGLTAAFRSSAGKQQRCPISKQRNAWLQTALIEAAKLAPRWNPQLAALHAQQLERGHANRATLQVARKLVAYLLAVDKSGQPFQPHTPTPLPITTRSRKKKKKAAALAPAA

SEQ ID NO: 125884 - protein, 288 aa, unidentified
MTSIIYVGMDVHTTNYTLCCYSMEDDRFFAEVQVEPDAKNILKYLARIEKQQSRDCRIVCGYEAGCLGYSLYHQLHAHGIDCVILAPTTMMTKPGKRIKTDRRDARLISKCLAFHTYSPVYIPTEVDDAVKEYIRMRDDANSALARVKQQIIAFCIRHGKIHDGKSYWTNKHLEWLSSLDLGNKILSEVLQEYLIRYYQLREQVDMYDMRINELAQAEPYRQKVEKLGCFRGIAAHTALPFCVEVGDFRRFATAQQFASYLGLVPGECSSGDKQQYTCLLYTSDAADE

SEQ ID NO: 125885 - protein, 381 aa, unidentified
MTTLTTHNPQDTTTEGTLFVAFELSEKTWKLGFTTGHGQKPRERTVTARHQERVLAEIAQAKRRLGLPDTAPVVSCYEAGREGFWLHRFLQAQGITNYVVDSSSIEVNRRRRRAKSDGLDVRKLLSMLMRYHHGERQVWQVVKVPSVEAEDQRHLHRDLETLKQERASTTTRIQGLLSSQGIRLTSLNQLPEQLDALRLWDGSPIPPGLRRRVLRVYAHHTFLSEQIAAVEAERRAQLQTATEAHIDKVRQLMQLKGIGINGAWLLVMEFFGWRAFKNRREVGGLAGFTPTPYQSGDSAREQGITKAGNRHVRWMTTELAWSWLRFQPDSALSVWFRERFGKGGKRLRRIGIVAVARKLLIALWRFLETGVIPAGAVLKEV

SEQ ID NO: 125886 - protein, 341 aa, unidentified
MSTVTLIGIDLGKHSFHLHGQDSAGRRVFRKKCSRQQLFTLLGNTPRSTVVMEACAGAHWMARRIQALGHQAKLISPQFVRPFVQGNKNDFADAQAICEAASRPSMRFVSVRNEAQQTISALHRVRESLVRERTGVINQIHAFLLEFGISLPRGQAIIRRLPAVLAEHELPPRLVALLERLQAHFKCLDEQVAQIERELCQQLREDERSQRLLEIPGIGPITASVLMTELGDAQQFGSARQFAASVGLVPRQYSTGGKPTLLGISKRGDKNLRRLLVQGARAIMQHIDRRTDRLGVWVRELLARRHSNVVACALANKLARIAWAILANGTNYRSQQAVSAT

SEQ ID NO: 125887 - protein, 456 aa, unidentified
MSHCTANKKAASAFVRRNSIPTTGAVAKALFNSAIGIDVHHDILVCAYQYCNRESDEITTEVCSFGTTASELTKFTDWCRNHHPEQILMESTGVLWFSPYEALESVGFTNRQLSLINARDFKAIVGRKSDKQDAERLALYARIGNVRSSFVPAKCFREMRAVSRLLSKTTDEQSRARSRYLKTLNFIGCRASSVFSDVRGKAATAILEVLAEGTRERLIDAIKIHGRRLRKSAAEILDALDFAVSPAMAMQLRIQKQHMEALSQTCEELYALLKVMQANYQPWINRLMTVPGIKERAARVIFAEVTNDLSSFPDAAHLASWVGVCPGTMESAGKRYSGRAAKGNRYLRRILVECSQAIGLMRKGALYSLFQAFKERKGTRRAVVAMAHHLVKIIYCLFTKGGNFEAQSTDALTKVRKQKYLSAVANIKKQNFEILTSGSLVDKATGAITAVDPLTV

SEQ ID NO: 125888 - protein, 419 aa, unidentified
MEPWNEITCYAGLDWASDHHDLVAVDQQGKMVRQFRIAHTGDGWKELAAQLRGLGKVAVAVETNRGFTIERLLASGVTVYPVNPKSAERYRERKAPGGVKNDQLDAWSLADALRLDGHGWKPLAAEDPLITELRLLTRDEVALIEQRTALVNQLIAALRDYYPAALEAFDDWTLSGAWAFVERFPTPQSLVKAGKRSWEKFLHTHRLYRPETCERRLEIFARADQFTGSAALTAAHSLLATTLAAMLGTLEAQLKLYRQRIEELFAQHPDHDLFGSLPGAAAKLAPRLLAELGSDRTRFETPQSLQCYAGTAPVTIQSGQMIKRMIRHACHHGLRATVHLWANTSRLKCAWAQAYYQAHRDKGKSHACALRCLGQRWLKILWKMWQTKTPYDAELHAKNQQKHGSWVLKLEPVNAAKPA

SEQ ID NO: 125889 - protein, 334 aa, unidentified
MEQITTVGIDLAKNVFSLHGVDAAGKTVFKRTVRRDRLVETVAALSPCLIGMEACSGAHEWGRRFQQHGHSVKLMAPKFVAPYRKSDKNDGNDAEAVCEAVGRPSMRFVPVKSLEQQALLAMHRVRQGFVVERTAVVNRLRGLLSEFGVVLPLRSVTVRRQAAAAAEGLPELARRAIVDLLEQLRLLDERIDAYDKEIEAQARLSEPARRLMKIRGIGPTTALAIVATVGNAREFKNGRQFAAWIGLVPGQYSTGGKSRLGHISKRGDAYLRNLLVQGARSVLQTAPAHQDRLSRWALELQERRGYYRTLVAIANKNARIAWALLAKNDPLRAE

SEQ ID NO: 125890 - protein, 350 aa, unidentified
MLYTGIDYHRSFSYLTTMDEKGGIIGQKKLPSNGEIVDFLKEFDEEMEIAVEATPSWYWLYDHLESEGFQVKLSHPLKTKAIAYAKVKTDKVDSATLAHLLRSNLLPLSYVPEKVVRLNRELLRYRASLVKIQTRVKNKIHTILAKNNVTHSYTDLFGKQGIAFLRSLPLAEHYKIALEGYLSVLDAVRQEIREASKKVRQVAEEDPDTLLLMTVPGMGYYSALLTKSEIGDVRRFRSAKQLCSYAGLVPSTYASGNVCFHGHITKQGSRWLRWILVEAAIHAVKRPGVLRRFYFKVERKKGGQIAKVAAARKLLEWIYHILRDGRTYQEMEKIADLLGRGEPGKKSGSA

SEQ ID NO: 125891 - protein, 462 aa, unidentified
MKFFCHPKFHIMSKVSLKKQKKKHVATFPLVNIDSAGIDISDKEMMVAVPVDRDEEFVRAFGSFTCELHQIAKWLKSCKISTVAMESTGVYWVQLFLILQDYGFEVYLVNSRYVKNVTGRKTDESDAMWIQKLHSCGLLKNSFQPDNATRTLRALVRHRKSLVKGGSAYVNRMQKSLEQMNIKVHTVISDILGKTGTLIIEAILSGERSAATLAGLADRRIKASKEDMVKSLEGDWRAEHLFELKHSYEIYSYHQTKIEECNQQIEQQLLEQIADKNGGDISFLDANKTATKSGQKNQVSFDLKLYLKSLLGVDPTEIFGISEISTLEIVSETGTDMSKWPSEKHFASWLGLAPNNKISGGKIISSRIMKKKHNAGQAFRMAANSLYRSQNPLGDYYRRIKARQGAGKAVVATARKLAVIYYNMVSKKEGFNPNQLLEYQEKYKQKKIRSLEKRLADLKEAS

SEQ ID NO: 125892 - protein, 406 aa, unidentified
MQVVYGCCCGIDVHKKMIVACLNQGGRQELRQFGTMTANLREMCDWLLQNDCEMIAMESTASYWKPLYNLFELVGLKAMVVNAAHMKALPGRKTDVKDAEWISDLLRHGLLKASFIPDREQRELREISRYRKSMVEERARELNRLQKMLEGANIKLDSVVKSINGKSSRRLLDHIIAGRSLAEDEVSALLHGKMRPKLNQIILAIDGFATPLQRRLLAQVVDHIDDMTRRISDLDTLIFDYMNQYEQAIAAIDALPGIARRSAETILAEIGVDMNRFPSAAHLCSWAGLCPGNNESAGKRYSGRITKGNQTLKTALVECAKAARNVPGSFFNAQYQRISIRRGKNRATIAVAHSMLIAIYHVLRDGVPFVDLGSDFYTKFNREKKIAACLKKLHDLGWQPTATAPA

SEQ ID NO: 125893 - protein, 427 aa, unidentified
MNQNKMATNFAATLGLDWADQKHDLWIQAATGGKPEHQVIQQTPEALHEWVAKIRARFPQGRLAIAIETSRGAVISALAAYDFLVLFPINPAMLCSYRQAFCVSGAKDDRTDSMLLEEYVRLHGAKLRPLEPDTELTRQLGGLVENRRGLVDERTRLVNQLHSLLKTYYPLMEVLFEDMTLPLAADFLLKWPDLASVQKAGPAPLRKFFYGHNCRSDKLMEERLQAVQKAEPLTQDPALIAPAVLKAQALAGMLQVLHQSIGQMEKMIEQTTDAHPDAAIFRSFPAAGPALAARLLVAFGTHRDRFASAQEVQQFYGIAPVKKQSGQSKVIAMRHRCPKFGRQTFHENASHAVRQEGWAKKCYEQQRERKKGHHAAVRSVAFKLIRIYFRCWKDRKCYDANLYEAALENHGSPLAGLIKKAALAKGE

SEQ ID NO: 125894 - protein, 367 aa, unidentified
MTSIAKYVGLDVHKDSIQIAVAPEGRDAPRHVARIPSDYIKLMKQLDKLGARASLHVCYEAGPTGYGVYRKLVDSGIDCIVVAPTKIPSMTGDRVKTDRRDAAKLAHYHRSGDLTAVWVPGHEVEALRDLVRARTAAKEDERAVRHRLSKFLLRHDRIYPGKTAWTGMHLDWIRKQDFEPLPQTLVLCEHLNALEDLRARIKTFDHAIDVEGRASSLWPLIHGLQALKGVRTLTATAIAAEIGDLQRFDNARDFMSYVGLVPSERSTGDSKKRGNITKTGNTHVRRLLIESAWSYRHSPKKSTHLRGRTKGLDSKLTRIGWRAQQRLHGRYRRLLGRGKRPQVVVTALARELAGFVWCIGQEVQLSA

SEQ ID NO: 125895 - protein, 430 aa, unidentified
MEIVYPRSCGVDVHKSFIVAVICISESVKPKYIKKRFSTFNNQLIQFRDWLIENNCQNVCMESTGKYYIPVYNALEGHISNVVVANPKWVKAIKGEKDDNKDAKWIADLFKFGIVRSSYIPEKDIRVLREFTRYQYKLINMRSSEKNRFQNALTTGNCKLDIVFSDIFGKSASAIVNTILSNDPYTSEDILSKVHAGCKASHEDILSAVDGIQLNQFQKARIKIVQKHMDYLDSLLDEIQHHINLMVANYEDYIQLLCTIPGINRKSAITIISEIGTDMSQWSSHRKLAAWAGLAPGCNESAGKKKSVKVSKAGVYLKPCLVQVAHAAVKDKECEYYADKFNKISKRRGKKRAIIAIARKILIAVYHLLKTGEAFNPTDMADVETTKKQRIEYVKNNLRNAFNQLSRTGLSEAEILQLIRKESKNSPQIE

SEQ ID NO: 125896 - protein, 370 aa, unidentified
MQCIGIDLHTNKFTCSYRDEHTPVDAKKGKRTETFCLTAHGLAAFYKTLTADTYVLVEATITTFSFVRLIQPLVKEVIVANTYELKQISLARVNTDKIDANILSRILKMLVLSGEQAGFAVTVPPVEIQDLRGLFTTYRLYKKQTTQIKNRIHSLLKEKLYGFTQEEIFGKKDRELLRGLTSDTVLSFQINQLLDVLETVEISISALEDKIKEQAEPYMREIEILTSMKGVGVFTAIAIIADIIKVDRFKNSKAFTSYLRSAPRVSNSNTSVSIRGTNKKGRKLSATLLTQSLNHVLDASPKLNNWYTKLTQYKKAGLVRTGLRRRVFAEIYQMLKKGEYHYGRETRIHEAKIHQYKKFLEKRKILLKSA

SEQ ID NO: 125897 - protein, 341 aa, unidentified
MKLYGGIDLHSNNSVINLVDEKGKVVFKKRIVNDLSTIITHLDSYFDAIVGLVVESTYNWYWLVDGLMEAGFKVHLANTAAIQQYSGLKHGDDDSDANWLANMLRLAILPEGYIYPKEERMVRDLLRKRLQLVQQNTLNLLSIQGLYVRHLNNRLSSNKLKQLTQEQLALDFTDSNVCMAVSGNLVVMQCLTQQIKLIEISLKQQLKLKEAFIHLTSIDGIGLILALTIMLETGDISRFKKVGQYASYCRCVNGARYSNGKSMRNTNTKNGNKYLAWAFIEAANFSIRYNDTVKRYYQRKLAKTNVIIARKAVAHKLARACFYVLRDQVEFDVNKAFGYSK

SEQ ID NO: 125898 - protein, 419 aa, unidentified
MTRRIAGIDVHKRVLMVVVLSVSEDGAAASTREKTKCGTLSTELEELRQWLREKGVTEVVMESTAQYWKPVWLALEGGFELGLAQAWSNRAPRGKKSDFRDAERLARRHVAGELTMSLVPGAEQRQMRELTRRTAQLNRELVRIQNHIESLLEPARIKLSSVISDLFGATGRRILQALAQGESDPEKLAALADDRIRCSPARLAEALRGSRTPMQRRLLKQMLQDAELAEAHKKELEEMTGELMKQHSGAIRRLTGVPGIRLRTAEDVIAEIGPDARAFPSAARLASWVGACPGREESAEHNHSARCAKGNMSLRRALCEAAQAAVNTKNCRFQQKFRRLLPRLGYAKAIWAIVRLLCIVIWNILHQGADYIERGGQTTPGAIRRRAQRLNKELRAAGLSLVIVPLTPQTQTVSAAPAV

SEQ ID NO: 125899 - protein, 352 aa, unidentified
MNDPKYIGMDVHMAMTVIAVLNSAGKVVAEAIIETTASAILDFLKSQRSTVHVTFEEGTQAAWLYDLIHPHVAEVVVCDPRQIAEQGNKSDRTDAKRLAELLRTNGLKAIYHGEHGTQALKELAHSYGSIIRDGTRVKNRLKGLFRGRGIVCRGTGVYSEEERDQWVKRLDHAALRVRICRLWKELDLLVQLRKEAEKDLMAEAHKHPEIKILRSIPGIGPLRAAVILSFAITPYRFRTRKQFWRYCGLGLRSKVTSEYALVQGRVCRSKKRPLVRGLDPDYNHALKEAFKGAAVTAAMGPWKSHFDAMVENGTRAPLALLTLARKIAVIAWVLWKKGERYDENKVKFVHAA

SEQ ID NO: 125900 - protein, 425 aa, unidentified
MSQQNVEIAAFVGLDWADQKHAATLQEANSDQRQRFTLDQTPEALQSWIQQLRNRFAGRAVAIAVEQKRGALIYALMHVDFLHLYPVNPQTLSQFRKAFYPSGAKDDPIDADLLLEILMAHRQHLRVWIPDDVLTRSIQLLTEDRRHLVDERTALTNQLTAALKMYFPQALDWFGDLHTARACAFLQRWPSLQQLKRATSSSVRKFYRAQGYRGEDKLEQLIASIPEAQPLTQDGAVLLAGSMKVQALVTQIPLLTESIDRYDQQIASLFEQHDDSTLFGSFPGAGPSLAPRLLAAFGSNRGRFEFAAEMQQLAGIAPVTEKSGTGIWIHWRLACSKFLRQTFHEFAGQSITQSDWARACYDELRKRGKSHHAALRALAFKWIRILFRCWKTRTPYDEARYCKSLQLRRSPLAGKLAATEKIVLT

SEQ ID NO: 125901 - protein, 386 aa, unidentified
MERYVGVDAHAQSCTLAVMSATGQHLRSLVVETNGEALVQAVQGIGGRVHVCLEEGTQSAWLYELLKPHVAEIAVSMPPEKRGAKSDERDAWTRANELRTGTIETRAYKAPAQLAALRCAVRAYDFAVTDLARAKNRLKSVFLSRGVRAESGVYDPQRRAEWLKQLAAPYQRLARWICREIDELLPLREEAEVQLAEEVKRHPIIRKLSTVPGMGPIRSAHVVAIGGTPERFRTRRQFWSYAGLGIITRTSAEWGQERGGEWVRAPKVQTRGLSRRRQPRLKAVFKGAATTVISQLPEHPLHADYQRSLRSGTKPPLVCGPSKSPLPVSPPVAMASWERSMLYRAAPDTLSGEAKAVRRSFWYCARVPLLRIPTTPTTPTTTSSSR

SEQ ID NO: 125902 - protein, 372 aa, unidentified
MSEESEAFVGLDTSKTKISVAVADGGRCGEVRFYGDIDSSPDAMNRLVKKLSARYQCLHFCYEAGPCGYGLHRQLMALGHQCDVVAPSMIPSRPGDRIKTNRRDAITLARLHRAGELTPVWVPDEAHEAVRDLVRAREGAMLDLRMKRQQLTAFLLRHDRIFPGRKTWSRAHVRWLCEQRFEHPAHQIVMQEYRHTIDDAETRLDRLEGQLAEVVPQWSMAPVVEAFQAMRGVGFLAAVIFVAEVGDVRRFESASQLMGYLGLVPSERSTGDRVRRGGITKAGNRRARWVLIEGAWTYRLPARVGRTLQARLDGLPKAVRDIAWKAQTRLCGRYRRLTAAGKKPCLVTTAVAREMAAFLWAIGQQVAPRLAG

SEQ ID NO: 125903 - protein, 349 aa, unidentified
MKIVGCDFHPGWQQVAIFDEATAELEELKLSHGKGEAERFYGALPVPSLIGVEACGNSQWFIDLLEQLGHEVWVGDAAQIRASYVRKQKTDKRDAGHILKLLVEGRFPRLWVATAEQRDLRQLLIHRHKLVEIRTRVKNGLQHLALNRGVQRKRKLWTAKGRAELEKLPLEGWAGVRRADLLGLLKQLNMQIDVLDQAVETAAKENPQARLLMTQPGVGPITALAFVLTIGEVSRFPRGKQVASYLGLIPREHSSGGRQRLGAISKQGNSFARMLLVEAAQTATRLDEGMKKQYVHRTHHKPKGVAKVAAARKLAVRLYWMLRTNVGYPEIARIESSPRVALVGLMQDR

SEQ ID NO: 125904 - protein, 348 aa, unidentified
MQFYTKQHKFYCGIDLHTKKMYVCILDEKGEIREHRNMNTNPENFLAAIAPFREDIVVAVECMFTWYWLADLCQKEGISFVLGHALYMKAIHGGKAKNDKIDSKKIAVLLRGGMIPMAYVYPEKMRSTRDLMRRRNHLMRKRAELLAHIQNTNSQYNLEESFGCIAKPYQRRGKDLVGAFDHPAVKKSMEVNLKVIATYDVLLDDLERTILKLARYHDPVSYALLQSVYGIGKIGALTILYEIENIKRFPRVQDFVSYARLVKCEKTSAGKSYGTGGNKIGNAHLKWAFSEASVLFLRGNEPAKKWFERLTKKHGKGKALSILAHKLGRAVYFMLKNQEPFDMQKFLR

SEQ ID NO: 125905 - protein, 332 aa, unidentified
MSLEQIHIGLDTHRETIHGTALDKNGGIIKSNAFPNTREALQDFVKEFPTWNTTIAIEACNFWRGCHKILKEKGYVVKLANPVTCHKIAHEKKTDKVDSKILADLSRVNYLPEIYIPSDEINALRDLTRHKMHFTRFRVKIQNKIKSCLSRNGISYEDDLWNNEGLMWLKKSKDYEIESYLRLYENIVKEEGVIKEKIEKVAQNKKETTLLETIPGIGYFGATLIYAEIGDIKRFPTVKYLHAYAGVAPGIYQSGTKTRMPTRKSVNYWLKWIVMQCTGRVTLKNTKPNKLRNYYLKIKDKKGWKTARKATARKMLTIVWFVLNKNIPYQES

SEQ ID NO: 125906 - protein, 375 aa, unidentified
MAEITRALIARVGVDLAKQVIQVHAVDAQGRRVVARAFKREQFMAWCVQLPTGCVVAMEACSSAHHWARKLRALGLDVRLIAANFVSPYRMEGKSGKNDATDAAAICEAASRPSMRFVPIKSREQQGVMSLHRVREGFKEERTACINRIRGVLAEFGLVFNKSPKALRAQLADVIEDAQNELDARARWVLQRAYDHWRELDEHMRWSDRQVGQHVRSCPQAKRAAKINGIGELGASAMTASVGDFKQFKAGHQFGAWMGIVPSQNSSGGKASLGRITKRGDDYLRTLMIQGAKSLVMSASKRDDPTSRWLVQLTARVGWQKACVAMANKNARILWAVMTREAGFDAQHVSEKPLAKKTVKERMAAVVPPLGACAA

SEQ ID NO: 125907 - protein, 450 aa, unidentified
MISKAYRATRVNEVDWDRLARGNEGVDITLGIDVGKHDLWPVCRWASGRFERPWRVKNPEGIPTLIALIQRMSTGRKLVVALESSGTYGDALRQALADAEVAVQRVSNKASHDYAEVFDGVPSQHDGKDAAVVAELAALGKAQPWAYHPASSWEQELTYWVEWMVSHRQILTTWQGRLEALVARHWPEATGVLKLSSGTLLRVLKHYGDPKALAADPRAAQHLARWGRAFLSPEKIERLLAGARSSVGVRVGEWERRQIGDYAEQALASRREVARAERHLRHLAVGHAVLQAQGKVVGVPTACVLWTSTGDPREYHAAAAYRKAMGLNLVERSSGSYQGRLRISKRGSARARHWLYFATLRLVQRCGVRPWYEAKKAREEDDARRVLVAVMRKLALALYQVGVHDEEFQPRRLFGQIGRRCSSPEPPQSGTRSRRQAREGAAPGTRATVS

SEQ ID NO: 125908 - protein, 348 aa, unidentified
MTMIGGFDVHRQQITFDCVDDDGLVHWGQIRPATRTRLRDWLAKHCPDGNGEFGLEGCTGWRYVSEELLAAGARVHMGDPAEVAALRGPKKRAKTDRSDARLLRTLLLEGRFPESWIPPAHVMEVRTLGRLYCALMDERRSWQQRIHAQLFHQGCPPITALLSHAGREALAGAELSAAGRQYVGTTMRCIDQLNAEIVPLRAQLVDFARHQPGCQALQARHYGVGWLSAAIMWAEIGDARRFHSSDQLVRFAGVDITVYSSDAKRAPGHLARQGSPELRWAAFEAAKCAARPGSPDYAYYHQVAARKDGKRPTLAVERKILRRCYHTLRELGDTALAVPSTKINHIAA

SEQ ID NO: 125909 - protein, 408 aa, unidentified
MEVVVVVGAGLDVHKKRIVACCLDGRSSPPTVVTCTFGTFRDELERMRKWLLARECTHVAMESTGVYWMPVYQVMEGHFEIVLGNPRHMANVPGRKTDVSDAHWIAKLLRHGLIQPNFVPPRGIRDLRQATRYRRKLIQTRTACLLRVEKLLQCANIKLSSVASNIFGVSGRLMLDRLSNNMTDPRELSELAKGTLRGKRGMLMRAFRGSFSKEDASLLRVELKVIADLEAQLKRLEKLIDQKLGPLEEVIERLDTIPGVNRTLAIDLIAEIGTDMTAWPSDRHFAAWSGTCPGNRESAGMRRKAKTREGNPYIKTILIQAAVCARQTLGSHLSARFHRLAARRGPRRAAVAIAREIAVAVYHMISKQLPYIPPRSEDPESAREQRSRHLIHELKKLGYEVNRNLHST

SEQ ID NO: 125910 - protein, 355 aa, unidentified
MNQEKYIGMDVHQATISVAVMDGRGKLIMECILETKAATILEFIQGLHGSLSVTFEEGTSAAWLHDLLKPHVAYLVVCDPRKNALLKDGSKSDRIDARKLADLLRLNQLNPVYHGEHGVRTLKELGRSYLTITQDLTRVMSRIKALYRSWGIPCSGTTVYAPLHRAEWLAKIVEPGVRRRAERLYQQLDLLQPVRQQARHDLLVESHRHEAVKLLRQIPAIGPIRAALLVALLQTPHRFRTKRQLWAYCGFALETRDSGEYRIVRGKVRRNRERLTVLGLNDNHNHDLKNLFKGAAISASTCPGPLYDFYAGLLQKGMRPTMARLTLARKIATITLTIWKKGVDFDAQQLNRQAA

SEQ ID NO: 125911 - protein, 416 aa, unidentified
MNAAGIDVSSRKSTVAVLRPFGEVVKLPFDVRHSAEDLAALAAQLKSIEGETRVVMEHTGRYYESVAKVLHEAGLYVSAVNPLLIKEYGNNSLRKVKTDKSDAMKIAKYALDNWTELRDYTPMDTIRYDLKTLNRQFQLASKQKTATANNLIALQEQSFPGIRKLFDSPVRSDGSQKWVDFTHDFWHVDCVRSGSQDAFAERYRKWCKRNRYQFSMEKAAEVYALAKSAVVLVQKTSVTKTLVQEAANQLTAISRSVETYRSEMNKLASQLPEYPVVMEMYGVGESLGPQLMAEIGDVRRFERKQSLVAFAGIDPAPSESGDYCSRSNRTTKRGSPYLRKTLFNIMTVHLQRAPADEPVFQFLNKKRAEGKPYYVYMTAAGNKFLRRYYGKVMAYFSTLEGLPPVDMDSTGLHHTE

SEQ ID NO: 125912 - protein, 451 aa, unidentified
MPKNKKQAQQLPVLRPDAAGVDIGASEIFVAVSQDRDLKPVRSFATFTRDLNALADWLQRCGIRTVAMESTSVYWIPLYQVLEERGLEVCLVNAQYVRNVPGRKTDVSDCQWIQYLHSVGLLRASFRPPAEICAVRSLWRHRASLIQMAAEHVLHIQKALDQMNLQLHRVLSDITGESGLRILDAILAGQRDPVLLSRLCNGRVRSSHDTIAKSLEGDYRGEHVFALRQSLTAYRYYQQLIIEVDREIGSYVADLATDRASGSEIPTQTKKTKHRRQHHEPIVFDLRGELYRIFGVDLTDVPGISSVTAQTILCEVGTDLTRFRNASAFASWLGLCPERQISGGKVLYTKSRRVKSRLAIALRIGANSLHHAKNFLGEFFRRIVRKLGKAQAITATAHKLSRIVYHMLVTKEPYREEVFQRTEEDTLRRAARRLQRQAAQLGFTVTPAVTV

SEQ ID NO: 125913 - protein, 421 aa, unidentified
MLKIVYPICCGIDVHKKFVVATLATTNSNNVTTYQTKQFSTFTDDLLNLASWLKDNNCSEVCMESTGKYWIPIFNVLETSCHIILANPKYIKAIPGKKTDKKDSIWIADLHKHGLVRSSLIHPKPIRDLKDVVRYRRKLVSMRSSEKNRVQNSLTVSNIMIASVVSDTFGKSSSAIINHMISSPEDTNFDYESLLHKKLKSKTSDIGRSIAHHTLSATQASKMSVAFKHFDYINECIDLMDETIAILASPFQSEINHICTIPGIKELAATTIVSEIGVDMSKFDSSKHLCSWAGLTPQNNESAGKKKSVRIIKAGSYLKPLLVQCALAAIKDKDSPFRIKYERIKRRRGHKRALIAIARTMLTCIYHMLSKEEDFNHELYLTSVIKEPSVIPSTYQLNQAILLLQQNGYTVNILDPILPST

SEQ ID NO: 125914 - protein, 355 aa, unidentified
MNKINSNFAGQTIFVGMDIHKTSWNLGIHLNDMFVKNVHQKPNPAIMANYLKQHFPGGHYKAAYEAGKFGFWIQRQLAQLDIECLVVNPADIPKSQKDSLQKTDPRDARNLGLRLQSGVLRGIHIPDEQQEADRVFFRHRKRIWKDLARCKNRIKGCLAFSGIDIPEQYDNASWSHNFINWLKALDCKQQSRRKALDYMISQMEFLRKELLGISNAIRKMMREQRYNTNYYLLRTIPGIGPLTAASILVEIGDIKRFETFYHLNSFVGLLPMEHSSGQSENKLSLTVRKHRQLRSDLVESAWTAKRTDPAMALYFQEQVKRKDTKIVIIKIARKLLNRIRFVLINQQPYEFGIVK

SEQ ID NO: 125915 - protein, 356 aa, unidentified
MEIISFSVGVDVAKDTFVCYIESLFTNRTTKRVNRRKFNNNKTGIKLFLKWLKKNCKAVPLIHVTMEATGRYHEPLAYALFDAKLRCSIVLPNRIKSFAYSLNEYSKTDPIDARIIASYASMHNPAAWTPANKSMRQLRELTREREDVMKSRTQAKNRIAALQVGHLPPAKTIKRLSAQIKLLNAQIKAIDADMERLKDKDAQLAESVDLLVSIPHIGAITAYAIIAETNACNLFENRNQLIKYAGLDIVERQSGSSIFGKSKISRRGNSHLRSAPYPGALSVKRSQSVFQETYCRAITNGKEKKQAHTAVVRQLLQVAYGVHKSGIPYDEEIHRLRLKKSVDELKGSPTVTSLAN

SEQ ID NO: 125916 - protein, 385 aa, unidentified
MRTFKTTTGELLALAEWLDGHGVNHVVMEATGVYWKPVWHVLDDGERQLVLANAAHVKNVPGRKSDVSDCDWLSDLEAHGLIRPSFVPDNQTQELRSLLRTRKQLVRERTSHTLRIQKTLEDANIKLDSVISNIVGVSGRRMIEALVAGESDPAALACLADRRIKAPPEVLCEALRGRVTKHHRFLLGLHLGHIDAIDEAIDKIDQEVAASLQPFCAAVGLLTTIPGVSDLAAQGIIAEIGLDMSRFETCGHLISWAGLCPRSDESAGKRRSTRIRKGAPWLKTLLVQSAWAASKTKATYLHAQFLRIRSRRGARKAIVAVAASILTAAYHMLKTATPYRDNGPQHFDSRHNQAQITKLLTRLRNLGVVADFDTLKRPDQAAVSC

SEQ ID NO: 125917 - protein, 338 aa, unidentified
MNIVFLGIDLAKNVFQLCGLSQAGKPVYTKRTGRKELLQTLANIPACLIGIEASTGAFYWQREFEKLGHKVKVISPQYVKPFVRGQKNDGNDAQAIAVALMQPTMQFVPPKSPEQQDIQALHLARQRIVNHRTATVCQIRGLLLDRGIPIGSAVSRARRAIPLILEDAENGLSSRMRRTIAELYDLFNDLKRRIHFFDKEIETVFRQSEACQRIAKVKGIGPKTATAVVAAIGKGTEFKNGRHFAAWLGLVPRQHSSGDRQVLMNMTKKGDKHLRTLFIHGARAVVRVATNNNDGHMNQWVNQLKERRGFNKTTVAVANKNARIIWSMLRNDTGYQVV

SEQ ID NO: 125918 - protein, 370 aa, unidentified
MAEPPNIQRWIGLDIHKAYFVAVGVDAKKQTVFGPHKIPNDQLETWSARHLQPSDAIVMEMTTNTYLFYDTLVPQVGSVIAVHPPNVRLVTGVKVKTDNKAALALAQLHAAGLLTGVWIPPVEVRELRAVIAQRAKMVRMATQAKNRLSSLLIRIHRERPAQPFKPEQRSWWESLPLAPIEKSVLRSNLDTLEFAEKQVKAIEEVLRQEAARDERVPLLTQLPGIAMLNALTILAAIGPIERFEDAKHLVGYAGLGASVHDSGQMHATGHITKAGRRDLRYTMVEAANVAVCHHPFWKKEFVRLEFRLGRSKAIVAIARHLLVAVWHILESETVDRHADLTSVAASMLQLAYQIKKRNLPHRRERQGICP

SEQ ID NO: 125919 - protein, 388 aa, unidentified
MVTILRPFGEVVASPVEVCHTDSALGELADTLKGLSGETKVIMENTGGYHLPIAYFLHEAGLTVCVVNALIIHNYGNNTIRKVKSDSADALKIANYGLSHWLELSVYVPENEIRHMLKAYSRQYNKYMKVKTALRNNLISLTDQVFPGVNELFSSPDRKSDGHRKWVDFVIRFWHPHCISLLSQKAFTTAYRNWCKSSGYNFSTSKAEDIYIESLGHINILPKNESTKMLITSAAKLINSISEIAHATAAEMKRLASLLPEYPIVMDFYGVGDILGPQIMAEIGDIYRFPKKSSLVCFAGLEPVENSSGKFRGDERISKQGSPHLRRALFLVMDCILMRAPANDPIFAFIDRKRTEGKHYYSYMAAGAAKFLRIYYARVKEHLDEIYP

SEQ ID NO: 125920 - protein, 339 aa, unidentified
MKLYSAIDLHSNNSVLVILDENDKVVYERRHPNELPIILEQLAPHRENIQAIAVESTYNWYWLVDGLMEAGYTVKLVNTVAVKTYDGLKYSSDEHDARHLAHLLRLGILPTGYIYPKEERAVRDLLRKRALLVRNRTIHILSIQNLVSRNTGKGIVAPAIRKLDKKAINLACGGNKILALAITSSLSVLRCLDEEIKGLERIVLAQARLKPEFKQLLTVYGIWHILGMTIMYETGSIERFATVGQFASYARCVSTSRWSNGKKKGEGNRKNGNKYLAWAFIEAAHYAVHYNERIRKFYQRKKAKTNTVIALKAVAHKLARACYHVIKDRAPFDEARAFA

SEQ ID NO: 125921 - protein, 429 aa, unidentified
MQNESTPGARGPVFCGVDTHADSHWLCVLDWRGRKVLSRQFPADAAGYEALAGAIAAAGEPACVAMEGTSSYGAGLTRHLASLGMPVREALSPARMQRRRPGQGKCDESDAERAARAAMSGSKLGTPKSQDGWVDGVRCMLAARSGAVKARTSAINTARSLLTTAPEGLRSRFRGMGGPRLMEELPSVRAEGALGAALGALADLWAAARDAALDMELAIEASLEENCPALLAMYGCGPVSAAKLAVAAGDNPGRLRSEASFAAICGACPIPASSGKTVRHRLNRGGDRQANSALHEIARQRVMRDPETAEYAERARARGKSDREVMRCLKRYVAREAYRALMRPHEIRRPEDASELVAARRAAKVSQVRAASILGTSEKYISMLERGQRELKPIRRAYEAWVEAGLPLDWDRQAFEAERKMDSKKHLAK

SEQ ID NO: 125922 - protein, 325 aa, unidentified
MQGKEASEQETLNCTVGIDVSKTWLDAHALPSSASLRVANGAEGIRQLKRWLLRHKPKLVAVEATGKWHRELCRSLQASEIAVAVTDPYRVRMFAKAQGNFAKTDRLDAKVLAQFAAVMAPACRAATPQALEAMKELVTARASAVAEKTALKNQCAAAEGCFLKRQLTRRIVQLEVHIKALERECLRQIKADQGLAERYVILTSIPSFGAVVAMTLIACLAELGSLSNKQIGMLAGLAPVADDSGERQGARVIWGGRPAVRRILYLAALSAAQRSQDMKAFYRRLIGKGKPPKVALVAVARKLVLLANTLIAQSRPWQPTAPQHA

SEQ ID NO: 125923 - protein, 399 aa, unidentified
MNAVGIDVSKGKSTVAVMQPLGVVAASPFEVNHTEAELRELVKFLKSFSGETKIVMEYTGNYYEPIARYLRSEGLFVCVVNAILIHNYGGNSVRKAKTDKKDAVRIACYALDRWLDLEEYAPADDVRSTLKLLNRQYTAACKHKTQLKNNFISLIDQSFPGVNKLFKSSARLSDGHEKWIDFVIKFPHCNCVSGISRSAFKDKYSRWCKKEHYRYIEAKADGFYDYAGTIIATLPNSECIRTMIEQSANQLNCACETVSAIRKCMTETAEQLPEYDTVIGMYGVGEVLAPQLMAEIGDTRRFHNRKAITAFAGLDASPYQSGMIDIKSRRISKRGSPHLRKTLFQVIDVILKNSPVDEPVYLFLDKKRSEGKPYKVYMTAAANKFLRIYYARVNEVLAA

SEQ ID NO: 125924 - protein, 344 aa, unidentified
MSRARTVAWASATRKPASQGRVQLVSQVTSNPSLASAGIDVAKDSLDLALTHEPGTRSFRNSPEGHQQIVALLQQQSLRNIVIEATGRLEISLAAALAAANLPVVVVNPRQVRDFAKALGILAKTDAIDARVLARFGESIQPEIRPIPTEKARHLQELLTRRSQLVQMKTAESNRLATVSAKPVRKSIEKIINVLEKQIAALDRDLDERIKACPAWKEKEDLLLSVPGVGPQTARTLVAELPELGQCSRQRIGALVGLAPFNNDSGAMRGLRTIRGGRSGVRTVLYMATLSATKHNPTIKLVYQRLVAAGKKKKVAIVACMHKLLTILNAMIRTKKPWENLQPA

SEQ ID NO: 125925 - protein, 344 aa, unidentified
MITIGIDPHKASHTAVALDEAGRVLGELRVVATKAMLERLLRWAERWPDRVWAVEGATGLGHFLAQQLVARQETVLDVPATLAARARLLAPGHGRKTDGIDAGSVARVAQSQSNLRRVGPEDHSGVLRLLSDRRDELTQERRTVVNRLHRLLRDLHPGGAPTELSAEAASELLGHIRPVAVVDLERKAMARALVTDLRRIDRALVENRTRCAAAVMASGTTLTSVFGISDVLAAKILGHAGDINRFASSDHFARYTGTAPIEISSGEVTRHRLSRSGNRSHNNALHLAARVQTMHPGAGRDHYERKLAEHKSSREALRSLKRQLAKVVYRHLVADREHHLAVAV

SEQ ID NO: 125926 - protein, 371 aa, unidentified
MADYREAFIGIDCAKLRNALAIADAGRDGEVRFFGEVDASSSSMRHIVHRIAAKFDRAHFCYEAGPTGYGLYRLIRSLGHECTVVAPSLIPRKPGDRVKTNRRDAVSLARLLRAGELTAVWVPDESHEAMRDLVRARAAAVETLGVHRQQVSAFMLKHGRVYPRKKGWTMRYLRWLQEQKFDHPAHQIALQEMVEGVRIAKERVERLESVIEEFVPAWSLAPIVQALQTLRGVDLIVAVTFATEVGDVQRFDNPRQLMGYLGLVPQERSTGETVRRGGITKAGNSRVRHMLVESARTYRHPPRIGKMKLYRMEQAPSRVREIAWKAQTRLTARYRALRGRGKKTTVVCTAIARELAGFIWAVVREASAAKP

SEQ ID NO: 125927 - protein, 350 aa, unidentified
MIIIGCDYHPGFQQIAFVDTDTGELQERRLEHREEAEKFYRDLAAQGLKVRVGMEASGHARWFERLLAELQFELWIGDATEISAKRVRKQKTDRQDAQLILRLMLKDDFPQIWVPSWENRDLRQLLWHRHRMVQARTRLMNQLQAVALNEGLRCKKKLWRDAGREQLEGFQLAPWASQRRRDLLELLDRLNPTIGKLTQAIDLEVEKCPAARRLKTHPGVGSLTALAFVLIIGKADRFQCGKQIASYLGLVPLEKSSGNQRRLGHITKQGNALLRFLLVEAAQVTARTLPEWRSKYCHLTLRRGRKIAKVAMARKLAVRLYWMLRKEWDYEQLRKFGSHAGKPGTGDGVK

SEQ ID NO: 125928 - protein, 310 aa, unidentified
MGGVNAAIDVGKRQLAVALGSAGEQFTEPNEPRAIKRLIKRLAEAGCERVLVEGGSYQNLLVAALRTAELPVVIINPRRVREFAKSIGRLAKTDQLDARVLALYGERLQPPLRELPDEQSQALRALWLRREQLIEMLVMEQNRLEHAGKALQRSLRAHIDYLRKEIKHSEDELDHTVRNSPLWDRYEVLSSVPGVGPILSVALLADLPELGRLNRGEIAALAGVAPFNQDSGSSQGVRAIEGGRGRLRRVLYMATVAAVRCNPVLRPFYQGLRARGKLPKVALVAAMRRLLLILNAMLKSHTTWRPPCPA

SEQ ID NO: 125929 - protein, 346 aa, unidentified
MLAGIDTHKDTLAVAVIDLAGRPVLVTELANTEAGFDALEELVKEHSVSRVGIEGSGNYGRGAAIRLVIVGGLEVVEVPPSLTARERSGRPGAGKTDPGDAVAIARLTARETGLPPVRLAVGQAADLRALADYRAQLVAERTALASRTHAELHGLLPGYQDRVPRLTAPTFITAATDLLAGDTSVRATLTRRRLVRLAELTAEIQEVHGLITDAVKQVKTGLTDLYGLGPVSAATILGEVADIRRYRSRHAFAAANGTAPIPASSGRTSRHRLNRSGNRQLNRVLYTMAITQIRADTEGRAYYLRKRAEGKTGREALRCLKRRLSDVVYRTLHEDLATTAQPVMTG

SEQ ID NO: 125930 - protein, 359 aa, unidentified
MNVTSQRALKATRQKKKNAVKKDAVTIGIDTAKSVFQIHGVDEDGNVVLRRRVKRNRFIEFMAQLPTAIVGIEATGASHHWARELIKFGHDVRLMNPKRVKAYRDSDKSDRNDADAICEAVSRKRMKFIAVKTLDQQGMQVLHRGRSRLMKNRTALVNQARGLLSECGIVMHKGIRVFRSELPEILDEQAGSIPEILRVMLLEMYDELIVLDKQIEKFDKQFERLTDADPMCRKLKKVKGIGPLTALALVSKIGDANIFNGSREMSSYFGLAPQECSSGEKKHMFGISKRGDRYIRTLLIHGARSVVWKASGKDDSLSRWINKIKDKSGPNVAAVALANKNARIVWALMTKDEEYREAT

SEQ ID NO: 125931 - protein, 428 aa, unidentified
MSNQEIIRRRQYCQIVKDITGSDQYLVVGIDVGKDKHHAFMGSATGKSLFRKLIFENNMDGFSMLLKTAEAIKSQNSLSKIVFGVEPTGNYHKPLARHLIRCDCNVVLVSGVAVKRNRELLDGRWDKHDTKCAANIADLVSRRRCLYYDSPPPGIIELRSLLSLRRRLKKEEHSLRMRIRNNLLAQYFPELDRFYSACESESLAIVKWCLDPNKIAGMDFESFFQMVTRTRRGTAQLLRLRKIHQQAIESVGCPMGSAAAFEAQLLVEKLKQVRQQLKETETAIKDVALEFAEYSYLLTIPGFGPYVSARVLASIGDPFRFENRKQLIKLAGYDLCAKRSGKTSDKAIPVISKKGNGELRYALYQAAKVASARVDLFRTYFTRLLRGRERERGIKTKMCVKLAAKMLIIAWTLMKKREVFDPAHLNIE

SEQ ID NO: 125932 - protein, 373 aa, unidentified
MDVHLTSFSVCCVQPEIFEEDKVFGHMKLKPEVRSVQRYIDKISDHLEKAGVSAHFIFGYEAGFSGYSLYHDMTAVGLECIILAPSTMKQRPKHAIKTDKRDAEHIAKCLAYGDYQPVYIPTADDEQVRDYLRMRNDHQQAWKKVKQQINAFCLRLGKHFTGGRNKWTELHLDWLHDLVLDPLHREILDEYLITYDLHVTRLAAFDERINELAALDCYRERVHQLSCFLGIKTYTGLSLLVETGDFTRFSRADCFASYLGLTPGEQSSGETIRRGGITKAGNKELRRLLVEAAQSIGRGRIGYKSKALKARQKGNDSKVIAYADRANERLRRKFYRMTRQGKKYNVAITAIARELACFIWGMMTNHLDVRQAG

SEQ ID NO: 125933 - protein, 372 aa, unidentified
MASIIYVGMDVHTTNFTFCCYTVDSDRGFAVAQTEPDYRQVIKYMERVQKQRGEECKFVCGYEAGCLGYSLYHQLTRCGVDCVILAPSTMHQEKGKRIKTDRRDAENIARCLAFSLYSPVYVSTTEDDAVKEYIRMRDDIKADLKRVKQQIIAFTTRHGFAFDGKSYWTQKHLKWLEALVFEHPLYKETLQVYLILYYMLDEKVAVYDTRIEEMSHLEHYEENVQKLCCFRGVAAHTALSLLVEVGDFQRFRSAKHSAAYLGLVPGEHSSSDKQIRTSITKAGNTHLRRLLVEAAQSYNRGAIGKKSAALKARQGGNPAEVIAYADKANERMQRKYYRIAFKSRHNIAKTAIARELACFVWGMMTGNISNAA

SEQ ID NO: 125934 - protein, 352 aa, unidentified
MRKECNTVSFKNQVIFCGIDVHKQSWTVCIRHCGMQRENFSMNPDPRELVEHLKRNYPGAEYRSVYEAGFSGFGTHRILCELGVKNIVINPADVPTSGKERKYKNDSLDSRKLARELENGSLECIYIPEEDNLDLRDLTRRKEQLTGNITRVKNRIKGHLHFRSLKFISWAGGSLKIMESDAEKRHDEALLSDLRELRFLREERIRVIRAEHECLKRLNREKVQKNLESIPGIGFDTAVVLQAELWDMKRFKDKDHLNSYVGLAPHLVGSGEHEKVKSAGNRKKKKLHYMLIEAAWRAVRYNPEYGAQYGRLIAKGFCKQKAISIIAKKLLLSVRAVWLQDREFQVSRPAAE

SEQ ID NO: 125935 - protein, 428 aa, unidentified
MDQVNHNRLEEFRQLRQEVRHSGEYLIVGIDIAKDRHYAFFGTATGKTLLRRLVFSNDHEGFRKLLDQAEALRVQHGLKKVVYGMEPTANYHKPLGEYLIGLGRTVVLVSGVTVKRNRETLDGRWDKHDIKDSANVADLISQGKCLYYEHPSAELRGLRGLLSLKRRLKKQEHGYKVRIRNHLIAQYFPEMDRDYAQLGAEGLSIVRWCFPASQIVQLDVDPFIERVTSRRIRVEKRRRLEVIWEKAGESIGCDGVPGVEHEAKVMVEGLRQIREMIKETEEKILGLCKQFPAYPYILTIPGFGPDVSAKVLGAIGDPDRFQNGKQVLKMGGLDLSADRSGKDSDKATPVISKRGKADLRYALYQAAFIASTKNRDFMLYYTNKLRGREKEKGIHTKMLVKLSAKMLLIAWTLMKKKEAFDPAYLITE

SEQ ID NO: 125936 - protein, 417 aa, unidentified
MKCAPIFLPDQPANGLTAGIDWARDDHALAIVDARGKQIYRDTVEHSDAGLRALLKLLANHGVGEVAIERPDGPVIDALLDGGLTVVVISPNQVKNLRGRYGSAGNKDDRFDAFVLADTLRTDRARLRPLTPDSPATVALRRACRARKDLVAHRVALANQLREHLRRVFPGAVGLFADIDSPISLSFLSRFDCQDRADWLSPKRLAAWLASVGYCGRTDPAVLYARLTDAPRGATGDHGTAESRVTQAYLAVLASLTDQIKALSIQIDEQLALHTDAHIFTSLPRAGRIRAARLLAEIGDCRARFPTPESLACLAGVAPSTRQSGKIRSVGFRWSCDKQLRDAVTDFAGDSRRANPWAADLYDRAIARGHDHPHAVRILARAWIYVIWHCWQDNTAYNPDQHGALQRLIQSRNHAAA

SEQ ID NO: 125937 - protein, 343 aa, unidentified
MPHYVGLDVSQKTTAICVVDEQGRRLWRGVCATDPEPISARISKYAGVDAKVGVETGSMTPWLVHGLRGAGLNVQCLDARRVKAALQMQLNKTDENDAEGLAQIMRTGWYRAVHVKSLDAHRARALLGARAQLVGMTTRLSNMIRGVLKTFGLLPGAGRGLRFDRKVEALLEGAPEIALVVRPLLATWRQLREQIAVFDKAVLQQVRADPICRLLMTVPGIGALSSLMYVSTVENPSRFSRSRAVGAHLGLTPRRYQSGETDRSGHISRCGDALARTLMYEAATVILHRVKRPLHLKDWAEAIERRSGSGKARVAWARKLSVILHSVWRSGEPFRCAAPAMAV

SEQ ID NO: 125938 - protein, 423 aa, unidentified
MAAMKECCCGVDVHKSFIVAVIARFKGREVTFSSYTRFSTFTKGLREFKDWLRDNNCFEVCVESTGKYYIPVYRIISDETFHVDVVHPKYVKSPRGKKNDKRDAKRIADMYMRDHIAEYSIIPSADILAIRDVTRYRRKTVNQITSEKNRMSNCLTVSCIKLDEVLSDTYGKSGQAVIQQIIAHGGCDFDPIPYIDKRVKAAPELIRMAMDGNVTPSTLTKMSMIQKRLKFLENQKAELEQTMASLSKDFSRQLEILDSAPGVDSISAISIIAEIGTDMKQFGSVKRFLSWGGVVPQNNESAGKKKSTRIGIGNTWLKPVIVQCANAAIKDKKHPEIREKYLAIKKRRGHGKALVAIAKRLLTAIYYMLLRDELYKPYLGKDSAPDRGKIEIEKLIEYYQQKGYTIVSNGQFVSTLSYVDNAI

SEQ ID NO: 125939 - protein, 378 aa, unidentified
MKKGRSDNGKVAACSNTKTKPLKERPMKLMKYIGMDVHKAMTVIAVLDEAAKVLAEAIIETKGSTILDFLKSQRGTVHVVFEEGTQAAWLYDLIQPRVASVTVCDPRKIVRQGNKADKVDAKLLAELLRTGALKSNYHGEKSTRAVKELALSYMAVIEDGTRIKNRLKSLFRGRGIECSGTAVYSTDGRKDWLAKLDNTAVCARARRLWDELDCIERLIEEAEKDLLAEARKHAATRILRSVPGIGPIRAAVILGVAVTPQRFRTKRQFWAYCGLAVVTSTSAEYQLVNGRVCRSKKRPLLRGLNNNYNRALKSVFKSAAKTVLAGVWKSRFDSIVDNGTPESLARLTLARKIAAITLAIWKKGERYDQRKLKTMHAA

SEQ ID NO: 125940 - protein, 354 aa, unidentified
MIIIGVDFHPEFQEIASVDTDTGEYQEKHLAHPEEAEQFYRALASVGQMVRVGMEASGHGRWFERLLEELRIELWRGDAEVIRAKRGRKQKRDREDARHIFKLLLKDDFPRIWVPSWENRDLRQWLWHRHRMVQARTRVMNPLQAVALNEGLRCKKKLWRTHGRQQLESFRLAPWASRRRRELLELLDRLNPTIAELSRAVEEEAEKCPEAKRLMTHPGVGALTALAFVLIMGNAERFRCGKQVASYLGLVPLEESSGNRRRLGHITKQGSSIVRFLLGEAAQVTVRRLPDRRTKYVHLMMRRGRKTAQVAMARKLAVRLYWMWRKGWDYEQWKKFGSNVGQPGHRDGVQPNTE

SEQ ID NO: 125941 - protein, 381 aa, unidentified
MTTAVTHITHEHISEATLFVAFELSEKKWKLGFTTGPGQKPRERTVTARDQDRVLDEIASAKRRLKLPETAPVISCYEAGRDGFWLHRFLEAHGIANHVVDSSAIEVSRRQRRAKSDGLDVRKLLSMLMRYEQGERQVWRVVNVPSVEAEDQRHLHRDLETLKRERASTTTRIKGLLSSQGIQVTSLTKLPEQLDALRLWDGSPIPPGLRQRVLRVYAHHQFLSEQIAQVEAERRALLDDSTDASINKIRQLMMLKGIGINGSWLLVMEFFGWREFTNRREVGGLAGFTPTPYQSGESAREQGISKSGNRHVRWMTTELAWSWLRYQPDSALSKWFRERFGNGGKRLRRIGIVAVARKLLIALWRFLETGVLPEGAVLKTG

SEQ ID NO: 125942 - protein, 377 aa, unidentified
MERVKFVGLDVHAETIAVAVAEQGGEVRSLGVIPNREESVRKLVRKLGPVELLRFCYEAGPTGYALYWQLTKMGAKCEVVAPSLVPVKAGDRVKTDRRDALKLARNYRAGELTPVWVPDAAHEALRDLVRAREAAKKDQLRARHRLNKFLLRHGRRPPMGVKPWTMKYLEWVKREVHFEQLAQEATLLDYLHEVEHAGARIARLDGAIEEAVKLAPPPMRAVIEALQALRGIAHVSAVTIVAELGEMSRFAGAKQLMGYGGIVASEDSSGERRRRGQITKTGNAHLRRVVVEAAWAYRYRPAVERTLRKRQEHVSEEVKEIAWKAQQRLHQRYRKLLARGKNKGVVVTAIGRELLGFIWAIGIKAETTQKESLQRAA

SEQ ID NO: 125943 - protein, 351 aa, unidentified
MHATTVAVDLAKDVFEVATANRTGRIIGRKRLTRRQFEVFVDGLPAGTAVVMEACGTAHYWGRRCQARGHHVQLLPVQYVKPYVRRNKTDRRDTEALLEAARCAGIQPVPVKTPEQQALQALHRVRTQWQRTRTARINALRGMLREHGMPMALGARTVLTKLPLIVEDADNGLPAHLRQALALVHDEVRALERRLHQIDRQLARLAAADPVAQRLLTIPGIGVITATALLGAVAHIHAFRRARHFASWLGLTPSERSSGLRRRLGRISKRGDVYLRCLLTHGARAVLLTAQRTLRATGQGTRLQHWAVAVAARRGHNKAAIAVANKLARIVWAVWYREQDFQVGPRVAVAA

SEQ ID NO: 125944 - protein, 408 aa, unidentified
MKATPTFAGIDWSWQHHALCIVDNDGQRIEEATVSHTRPGMAKITALLRRHGVDRVGIERGDGPVVEHLIRDGFQVFIISARQVKSLRARYGSAGNKDDRFDAFVLADALRTDAGRWAVVQPDTQETIALRMLVRARHDLIGHRIAVHNQLLAVLQHNFPGAIGLFSQLDIPISLAFLRRFPTEAKAAWLTAGRGELRMGHWLQANHYCGRHTPARLITHLRGAATGRITGPAAEASELIVLTLVDLLTTLRTQQADLEARIKEALLAHPDGPIFQSLPRAGTVRAATLLAEIGDCRARFPDAASLAAAAGVAPSTRQSGKHRNVAYRRGCNKQLRAALVDWAQDTPRANAWARDTYDRARHRGCRHPHAARILAQGWTRILWRCWHDQVPYNPDLHGRLGTLQQEAA

SEQ ID NO: 125945 - protein, 307 aa, unidentified
MRFYTKQHQFYCGIDLHARTMYLCVLHQDGEILVHRNMPAGPEPFLKAIAPYREDLVVCVECIFTWYWLADLCAREGIPFVLGHALYMKAIHGGKATNDKIDAQKIAVLLRGGMLPQAYVYPAEMRATRDLRRRRIHLMRKRAELLTHVQQTNSQYNVPEIGKKIAYKTNRPGVAERFADPAVQKSVEVDLALLDYYDQLLRDLELAIVKTAKQHDANTLYLLQTVPGIGKILSRVLLYAMHDIARFPRVQDFVSYCRLVTCAKESAGKRYGTSGTKIGNASLTWAFSEAAVLFLRNNPAGQKYLAR

SEQ ID NO: 125946 - protein, 392 aa, unidentified
MQGFDVVVGLDVGKSFHHLYALGSDGSELVNQRIDQSERVLTETFAAIKEYGSVLVVVDQPNNIGSLAVACARRSGCSVAYLPGLAMRRAAGILPGDAKTDERDAFVIAMTAHSMPQALRAMPEENTLRADLIALASCDDDARCDMTRESNRLRSHLVETHPAFERALSSDVTSPFALKLLMRFGGPWGMRKAGTGAVMRWARAQKRPALKLLERLLASLEEMAETPPGAHLREEVGIPACTRRIVELTAIRQDIERRAVHLLKDCPTFQLLTGMPGVGTKTAIAFIIHVDIACFDSASKLASYAGIAPKTHQSGTSIKGESAGRSGNKALKNALFLSAFASLRTDLLSREYYDKKRAEGKKHNAAVICLARRRLKIMFAIVRDQRPYRLAA

SEQ ID NO: 125947 - protein, 351 aa, unidentified
MKILALDCGKYKSVFVDYQTANGPREFGKVLTRAADLHDLLVARRPDVLVLEIGPDAGWIYDMACALDIDTKVVNTNDERWQWKATRNKNDRKDALKMAQITEMGSLPTVHMPPAKVRQWRSLIGYRHGLVDRRTAVKNSIRSTFERQGQRLPSGHKAWTEAGIKQWSKEAIALSECPAEQLWRGSLHEELQQLNSVQQSIDAVEARLDELAGADARIKQLRTAPCVGPRLAELTVATIDDAHRFENGKQVGAYAGLTPRQWQSGQSCREGHISRMGNRILREVLVEVCWLGIRTNAWMKQVYEEVRRGSDKRKKIAIVAVARRLLVRLWAMLRDGTEWIEPAAPAMAALT

SEQ ID NO: 125948 - protein, 291 aa, unidentified
MKRIAVDLAKSVYQVAESVRFGQVVQRTRLNREAFRRYIQEQAEPVEWVMEACGTAHYWGRLAQSLGHQVKLLHPRYVRPYRRRNKTDRNDCDAMLEAARCTDIHPVPVKSRDQQQLQQLHGLRETWKKSRTQRINLLRGMLREAGIEAPASTTAFIRAASELVDQPELATLSRLLHIVLAEIDLYEQCMAECEQQLKRWHADDDIVRKLDEVSGIGLLTASALTAAVGKPERFANGRQLSAWLGMTPREFSSGNSRKLGHISRQGNVCKTESRKIISITKQHSLIRELTL

SEQ ID NO: 125949 - protein, 427 aa, unidentified
MNGNEAIRYEKFCQFKAEIRSSGDYLIVGIDVAKDRHHAFFGTAAGRTLLRRLIFDNNQAGFKQLIARASQLQIEYGLGRVVYGLEPTGNYHKPLSNWLQEQDQMLVLVSSKSISDNRQTLDGRWDKNDTKDSANVADLIAQGKCQFFEKPDTRLVQLRNLLSLRRRLKKVEHSVRMQIRNGLVCKYFPELDRHWGSGLTENLAIVRWCLDPHKITAMGYEEFVKRVTRRDRGIRQHKRLERIYEAAEVSIGCPMDEAANFEAHLLVERLEKIKERIGQTESEIKDLCDSFPDYRRLLSIPGFGPYVSSIVLARIGDPHRFIGRRQVIRLGGLDLNANRSGKRSNAAVPVISKRGNSELRYALYQAAQIATYHSDRFRALFTRSLEGRENERGIKTKMRVKIAAKMLVIAWTLMKNNMDFDPLLIKA

SEQ ID NO: 125950 - protein, 367 aa, unidentified
MVKNSTAFVGIDLGDKRSNLYVLDPEGELIEETRIPTTESAFRRKFASLPPCRVAMEAGTHSRWASRLLEQLGHEVLVANPRKLRLIYGDPRKADEADAEHLARLARLDPQLLSPIRHRGPEAQAHLTVIRSRDSLVRARTLLINHVRGSVKSSGARLLACSADSFHHRVEPSIPAELQPALLPIIETIASLTAQIHAYNRQIEQLCQKRYPETQGLRAVGGVGPITSLAYVLTLDDPDRFRKSREVAPALGLVPKRDQSGDRDPQLRITKTGDSYLRRLLVGSAQYILGPFGPDCDLRRWGLKLAQRGGKNANKRAVVAVARKLAVLLHHLWVTGEVYDPFYHSHPDQTSVTQTNLLVPQPEAVCT

SEQ ID NO: 125951 - protein, 438 aa, unidentified
MSNKVIFNLDELFISVGIDVGADFSWMSIALPNQQFVGKPYKILHNSIDSLTTAVSKIKEAEELYSLESRIFLESTGIYHYPLFCYLRDKGFNCSVINPIITKNSTNINIRKVHNDRFDSKKAALVGLKSDLKVSLMPSDLALNCRNLCREYYDLMDNRSAYVNKLQGELRMAFPQYLGIFSKVTINTSLTLLETYTSPSAFLEADKQEIIDIIKSTARFGLTYAQNKYNAIIQAATDANQFGYIIDSNIKRIRLYISFIRKYDEEINSILESLHELVDANEDADFVKQIHLIETFKGAGFLSAVSIMGEIGDFSAFSKPKQLFAYFGLDPAVKQSGKFEGTKVQMSKRGSAIARRVIHMLTLQSISISRNGEAKNPVLREYYLKKCDSKPKLVAMGAVSHKVCNMIFAILRDNKPFKIIAPQEHIKQYNAAKCDIAA

SEQ ID NO: 125952 - protein, 363 aa, unidentified
MKKGSREQEMQWKQRPGRTVGIDLGDRYSRYCVLNEDGEVLEEGRVRTSAEGFRRHWEGEPRQRMVLETGTHSPWSSRLLAGFGHQVIVANARKVRAISENESKNDRQDAEMLARLGYCNPKLLSPIQHRSAERQHDLHRLRARDTLVRARTMLINSARGLVKSAGGRLPAASSESFAARVSADVPAELMPALQPLLHQIAALTVAIKGLDQAIEKLAGRYPEIYILRTVPGVGPVIAAAYVLTLDGVDAVAQSRSVGAFLGLRPKQSQSGDSDPEHNISKTGNRYLRRLLVQAAQYTLGRFAPDSALRRWGLKLAVGGKRSKQRAVVAVARKLAVLLHHLWRTRQNYLPFPPTAAATTRSVT

SEQ ID NO: 125953 - protein, 337 aa, unidentified
MFMQVYGIDLSKEKFDVSFINTKGDEKKKEVKNRVTSISKFLSTVPDDGILCAEHTGIYSDLLVYLCNQVGIPIALVPGYTIKHSLGLLKGKDDPLDAARIREYGERFSDKLKFIEYDDESISELKQLYALRSQLVRARKILLTSDKGRDHLPLQSISAHNHLVPVLRGLDAEIEAVEREMEALIKTNEDLYENYEFAKSVTGIGPVIATDLLIKTGNFKKIDTARKAASYAGVCPFPNKSGKMVGKSKTSSFADKKLKSLLYMGAKSAVKHNKEYKLYYQKKQLEGKPHYLIMNNISNKMLRTIYSVVKNKVSYSQDHICLDPRERNINSSTKKVA

SEQ ID NO: 125954 - protein, 338 aa, unidentified
MLFSGIDLHKRSVAIHTLDAAGTVVRTAKLPAHRRALATYFDALPGPHRAVVECTGMWYWVRDLLVPQGIDLRLGHAKYLKAISYAKVKTDAVDAATLAQLLRVDLIPEAHMISSALRETRDLLRARLVLVGRRLRCQRSLGALLEKYNVAMPADLPELPRLEAALHTEQHALLKSQVRRIEQQLRDRVLPTPDAQRLVWIPGIGPLVAYTLLLEIDDIRRFPTVRHFHSYCRLVPGADDSAATRKHKRSRDGNRYLKLAFHHAAVRAAQYNPEIQAEYRRLIRRKGKAIARALIAKELGSIVYHVISRQEAFNGRFRGLQLTRLKPRRWPRLASPPA

SEQ ID NO: 125955 - protein, 377 aa, unidentified
MSKLRFGGLDVHADTIAVAVAEAGGEVRSLGIIPNRLESIRKVIGKLAPIETLKGCYEAGPTGYVLYWQLAQMGVGCEGIAPSLIPTKAGDRVKTDRRDAEKLARCYRAGELTPVWVPDANHEALRDLVRAREAAKKDQLRHRHRLGKFLLRHGKRPTDAGKAWTQKYLNWIRIHVRFEQPALEATMKHYQEEVDHIAERIVKLEQAIDEAVKQAPAEIRVAIEALQALRGVAQTTAATVVAELGSLSRFASPSQLMGYSGLVSREYTSGNRVQRGTITKSGNAHLRRVLVEAAWTYRHRPNVQGRVLRRQKALALSEEAVKIAWKAQQRLHKRFAALTARGKESNVAAIAIARELLGFMWAIAVHTEAQQKQAKAA

SEQ ID NO: 125956 - protein, 431 aa, unidentified
MPYRIAGIDVHKAMLAVVVADVEVDGDWQFERRQFGTIPSQLRLLTEWLSEQEVEEVVMESTAQYWRPVWDALERDWQPTQRRRADAGPTTGALHLAQAQSNHGRHGRKRDFPDAERLVKRLVAHELTLSFVPDVTQRLWRTVTRRKYQLTRNRVQLQNRLESLLEEAHIKVSTLVSDLLGASARRMLRAIAAGETDPAAVAALGSSRLHATPEQLCDALGAAVDVHPLYRRLLAMTLTELDLLESHMQQLDEELAAPLRVHQDAVQRLAAVPGLGVDSAQQIIAEVGPTATTFATAKRLASWVGACPGHEESAGINRSHRAPSGNRQMRRLLNQAAHAAVKTKGSIFELLYRRFIGRLGHAQAIGAIAHRLCRLVWKILHDGVTYEERGPVVSKARAHRRAAKMLRELRVLATTSSSPWRPQGTRCDRIP

SEQ ID NO: 125957 - protein, 352 aa, unidentified
MNRFFGCDAHKRYSVFASVDEAGQKQAAVRVENTRALFRRYLSALPCGSLIALETVGNWYWMVEEMEQAGHTPRLAHAAKAKLMMGQVNKSDKLDAYALALLLRNGTLPSVWIPPGELRDQRELARMRMALVQVRTRFKNRIHATLDKYALQIPEVSDIFGTKERLLLKQRLRELPSLTSQSVETQLELLDQVQAHLDGCEKRIEEVTKKTPAINLLMTLPGVGFILAVVMAMEIGDVSRFPSSSHLASYAGTVPRLRESGGKMFRGKVRADVNRYLKWAFVEAANIIVIHQARWSSCHVVRLYQRVRERKGHAKAVVAVARHLAEAAYWVLRKNQPYKQPQADKPISSTRK

SEQ ID NO: 125958 - protein, 343 aa, unidentified
MQTITTLGLDIAKSVFQVHGVDADGQVVVRRQLKRRYVLAFFQKLPPCLVGIEACASAHHWARELQALGHTAKLMPPAYVKPYVKRHKNDAADAEAICEAVTRANMRFVATKTPEQQSCLTLHRARHLLMRQQTSVINAIRSHLAEFGIVAPVGRNGVEQLLGVVADSNDRRLPEIARACVAALGAQLRVLKVQILEFDRMIRAWHRSSEASKRLDQVPGVGPVLATALIASVADPKAFRSGRDFSAWIGLVPKQNSSGGKERLGNISKRGDRYLRSLFTTGALAVIRYAKIHGTKHRPWLTSLLARRPTKVAAIALANKLARMAWAMMAKGERYKEPAALAA

SEQ ID NO: 125959 - protein, 354 aa, unidentified
MKKFFIGVDVSKDTVDVSFFDDDRMKSPEYLAQYSNSPKGFREMVKDLRMCCHGVSSGQWLFCCETTGRYDHPMCHWLVDHGMVVWRESALQIKWSSGIQRGKNDRVDSLRIAEYAWRHQDKMQKFVKPSESLPNLKAAFTHRRRLVEKRTATRCQLKSMSSEKGLSASVARMIVRDLSREIERLSASIATMDESIQKIIRSDSELDRNYRHIISVKGVGPITAVALIVCSGNFKAITSAKKMACYCGVASFRSQSGTSINRKASVSNLSNRQIKSLLSMAARSASRSNPVFAEYFNRTLSRGKPVALVYNNLRNKIITVVYKLIERDCDFDVDYMRMHSTGQRANEPAIREAV

SEQ ID NO: 125960 - protein, 340 aa, unidentified
MNRIGLDAHSASFTMAVVNEAGKVTRCLSRPTSASNLIELVSAVAGPKELVVEESTVAQWVKETLDPYVDRLVVCDPRRNRWIAKEEFNDDRTSAIKLAQLWRGGYIKPITHPSAEEAPLRQSFGHYADLNEQVRRFKNKLKATYRQAGVAVTGHRIYEEDSHAEWLARLDGSPALRRQAQHLFVLIDEIEQMKQECLKSLMRTARKDKGYRRLLQMPGIGPVVACGYIALIGTPHRFSRKNKLWRYAGLANTLHVSDEKVYQDRPSPSGNRLLKWVVMQHFMGAVERTKKPNVFKGRYERLCQRGLADKVARRHVCRSLLSVVRAVWMKGEPYRETPLT

SEQ ID NO: 125961 - protein, 326 aa, unidentified
MQTIYIGVDFHARQQTICYLTTETGELVTCELKHQDKEAVRAFYAAFRGQVIVGLEASGYSPWFERLLEELGYEVWLGHATEIRRRARWRQKNDRRDAELILDLMLHNEFPRLHRPALQSREVMRMLRYRHKLIKMRTMSKNSLQALALQAGVAKRSGLFTRAGKQELDAALMSPAMQWQREHWLQLLQPLDQQVLEAMAWLKAQSKDDVCIARLRTHPGIGLLSSLCLVHTLQPVTRFRNTRKVAAYAGFDPVERSSAEHKRFLGISKAGSRLLRHLMVEAANIAVRKDEDLKRFYQRVAGRRGPSQGQGGGGPKTSHPCLHHVA

SEQ ID NO: 125962 - protein, 329 aa, unidentified
MNYKWFVGIDISKNTLDLVLYRRELQKKSPYLQISNNLTGFKTINNWLKEHNAKLQDTLFCMEHTGIYGLDILEFLQNKAECCVESSLHIKRSLGLTRGKSDRIDAYHIARFCYLHKEELTPKKLPTRTMLILKSLINERERLVKARAIDKCITTELKFETNSTCFVRAKNRINILTADIEQIESEIDKVIEENLDIERNYRLAKSVTGIGRVNAVMFILFTNNFSSITEARKYACYSGVAPFEHTSGISIRGKTKVSKLANKRIKVALTNGARSAILNDPELKLYYKRKRAEGKEHGTVLNAVKFKLITRVFATVKRGTPYVKLRQAE

SEQ ID NO: 125963 - protein, 339 aa, unidentified
MKTVCTVGIDISSQWLDVALVVDPSAKPLSLFRVKNSQEGIESMFKRLKKEVPAGSPPWFCMEHTGNYGLLLCCLLQEKGMTYSVIPAREIQQSLGVTRGKSDRTDAERIGVYALIHHHKLRPFVIPQKSILQLKELISYRASLVQQHTQNVNSLKSRSKLNIVIDNHLVTEDLEQHIQRLEKSIKAVNEAIEKVIASDPELKQNFDLMKSVKGIGLIAATMMLVITQNFTQFDDGRKFACYAGTAPFEHSSGLTKGRTRVHPMANKQMKAILLNGANSAMIYDPEIRVYCQRKKAEGKHHKVIANAVACKLINRVFAVIKRKTPFVLTYEKKINQNVA

SEQ ID NO: 125964 - protein, 333 aa, unidentified
MGFEPEPSKEGSWMMAQNGLVVAGIDVAKGKVDACIRALSQRRTFESTAEGRRQLISWLRKHKATKVVMEASGGYEREWAKALREKQIAVRIVDPKRVRHFAQSAGRLAKNDAIDADTIAWFAETFGEAPGQAYDADREKLLQIVNARRGLLETETMLANQGEHSVPDVVRKMQARLLKKIALEVAKLDAAIAAMIKATPHFAKLAEIIESVPGLGEGASAGLIAGMPELGQVSNKVAAALLGVAPYDDDSGKRRGERQIKGGRRRIRNLFYMPCMGAATRHNPVLKAFYDRLIAKGKLKKVAIVACMRKLIVILNIMIARGEKWDAKRYAVG

SEQ ID NO: 125965 - protein, 350 aa, unidentified
MIIGVDYHPSFQAIAFLFEETGECGEQELNHSDGQAEKFYRDLKQRGICVRVGMEATGYSRWFERLLAELGFEVWMGDPAEIKAKRVKKQKFDREDARLLLRLMRENNFPQIWVPGPENRDLRQLLWHRHRLVQMRTRIMNQLQALAMNEGYRWKKKLFSEQGRAQLEKLALAPWASRRRQELLELLDRMNPTIAELTAAVEREARKRPEALRLMTHPGVGPLTALAFVLIIGTPTRFQRGKQIGTYVGMIPCEDSSAGKQRLGHISKQGSSLLRFLLVEAAQAAARIHPDWRRRYMHLAMRRHKSIAKVAMGRKLAIRLYWMWRNGCEYSPSLEFGSYAGQLEIGHGVK

SEQ ID NO: 125966 - protein, 389 aa, unidentified
MSPTQGTDFTPGEGFMAASLELSKGSWKIALHDGKRDSPAIHTVSSEQAATRLKEAAAVIEATKKKWGISEHTRTVVSYEAGQDGFWIHRALTALGYEVLIVDPASIPVERQTRRAKTDRLDAIKLVNCLLAWLRGERDRMHVIRVPGTEAEAQRHLARDRGELQKEIQQHRDRTRKLLRTVGCWDSVEGKFAKRLEQGEVCCQDGHPLPAHMKARLERECARMALAETQLAALETSMIEALPKAVSGRIDQLTQLKAIGRIGAFRLVLELYWRNFDNRRQVGSCVGLAPQPYDSGESRVDQGISKQGNRRVRALLIEMAWFWLRYQPDSALSKWFAQRTGGAGKNKRGKRIAIVAVARRLAIALWRYLKDGVIPEGAKLKAVTAPKAA

SEQ ID NO: 125967 - protein, 346 aa, unidentified
MTNRSQAKIKVFAGLDVSARQISVARHRGQEQELGVASFAHSTSGHKALVAYLLREPERARVCLEASGHYSLDLALTLQAHPHIEVSLVNPRRARRFAESLGERSKTDPVDARVLCEYAERMPWQAWQPPSLRALRLRAITRAIEALGVLHTQEKNRAHALASSQALPAMVLQERQRHQRYLEHRMERLRREALRLITRNRELDRRFRLMLTVPGIAQTSALQILGELAVLSDTLHARQWVAFSGIDPSQFTSGSSVEKRPRISRGGSRHLRRALYMPALVALRREPHLRGFYQRLLSRGKARLQAVVAVMRKLLHALFAMFRSNQSYDGSKLCPIALQSSPFKVA

SEQ ID NO: 125968 - protein, 313 aa, unidentified
MIITPRCVGIDVSKHHLDIFDEGIGVSERVANTPHAITELVARWRCDALVVFEATGVYDLELRAALRAADIRFARINPARARDFARASGQLAKTDPIDARMLAAFARAMRPATEQVSTPARNALARLAKRRDQLVLMRAQEKNRRSEAGDRAMVERICRLIEVLDHEIAEIEADISALITAEPEIADDAQLMRSLPGVGPVACMQLIAQMPELGHVGPKQAAALAGLAPFNVDSGAYRGKRKIGGGRKRVRNALYMAALNAVRRADRFKAFYAKLRQAGKPAKLALMAVARKLLTILNAIMRDRKAYIPAQQS

SEQ ID NO: 125969 - protein, 367 aa, unidentified
MTVTIVDAARPVTGGADAHLEVNVAPGLVTGGVDTHLDLNVAAALDGIGGLLAVAEFPATLAGHRELLGWLSGFGPVARVGVEGTGSYGAGLARFLRAAGVAVVEVDRPNRQARRRAGKSDPLDAVEAARAALSGRARGAAKSRDGNVEAIRALVVAKRSARSAKIQALNQIRHLSFTAPEQLRQRLAGVSRHQLAARAAALRPASREGADPVVAATKTALRILGRRVLALDEEKARIDALLAGLVTQTAPQLLEVFGVGIDTAAALLVTAGDNPGRLRSEAAWAHLCGTAPIPASSGKVTRYRLNRGGDRQANRALWGIVITRLRNDPRTKAYMDRRLGEGRSKPEVIRILKRYVAREVYHHLPRT

SEQ ID NO: 125970 - protein, 451 aa, unidentified
MAKTKRKKHRKLDRTLPVMRSNAGGIDIGATEIVVAVPADRDTESVRSFATFTQDLHALADWLQQCRVDTVAMESTGVYWIPLFQILEARNIEVHLVNAQHVHHVPGRKSDVLDCQWLQYLHSVGLLRASFRPEQAVCEIRSLMRHRENLVQMACVHVQHMHKSLDQMNLQIHHVISDITGVTGLAIVDAIVAGITDPKELAKLRDHRIKASIETVKKSLVGDYRPEHIFTLKQSVTAYRQYQRLIADCDQEIQQRVQTFQSKDDHPSATADSSSTTTSTPSTFDLHSHLERILGVDLTLIPGFDTLRVQTIFSELGADLSSKFPSDDSFCSWLNLCPKDGTSAGRRIRGPKTKTKNRVTQAFRMAAQCLHNNKSYLGDYYRSQCARFGPLKAIKNAGHKLARIVFHLLTTRQPYDETVFAKLEARNQKRRLRNLQVRARQMGYILVEAHA

SEQ ID NO: 125971 - protein, 336 aa, unidentified
MSHYCGIDLHSNNHVVVVIDERDKRVLDKRLSNDLSLTLEVLSPYQETLRGIAVESTFNWYWLVDGLQDYGFDLHLVNTTAVKQYDGLKYSEDHREAYHLAHLLRLGILPTGYIYPKEQRAIRDLLRRRMSLVRSASTRLISVQSQIWRSTGIRIKSGDLRKPEFAPPPMDQYTLLAIAAGLSVYQSIQQQINVLEQSAYQAVKLTDAFIILQTVTGIGKILGLTIMLEIGDIHRFASAGNFASYCRTVDATRTSNGKKKGTGNAKAGNKYLSWAYSEAAHFAVRFEPLAQRFYERKKAKTNGIIAIRAVARKLARATWMMLKHQVPYDAKLMFPN

SEQ ID NO: 125972 - protein, 358 aa, unidentified
MEQITRGECGRVVVRVGVDLAKRVIQVHAVDAAGRLVTGRALARDRFIAWCAQLPGGCVVAMEASSSAHHWARKLSSLGLDARIIAAHLVKPYRKQGSSGKNDANDAAAICEAASRPSMHFVPIKSVEQQSMLCVHRLREGIKEERTACINRIRGLLAEFGLVFAQSPKVLRLALADTIEDASNEMGTLTRLTLQRAHAQWRELDEHLAWCDERIAEHTRTNEQVKTATTLLGVGPLTASPVVATVGDFRQFRNAAQFGAWIGLTPKQHSSGGKTRLGRITKRGDTYLRTLLIQAAKSAVLTAHRRSDRISNWLCMLRERSGWQIAAVALANKNARILWALMTKGAAFNANHLSAKPA

SEQ ID NO: 125973 - protein, 578 aa, unidentified
MSTSTLSPPVIGVGIDTARYGHHVTFLREDCQPAAEPLAMVESRAGYDQLRQRLERLLRRTPQVRFCVRIDAAGQYAANLERFLRGLPLPMDVSVGEPARNKAYRQAHFPKRKADVTDSYCNARYAVKEGPAPTPEVPPAFAALREVASQLQGQVRQSTRLTNQLHNRLARAFPELAVVVSDIAAAWVLNLLAKYPTAEKVARAKLASLKAVRYIPAGKAEAVQQAARDSVASFAGPQAEALILALVAQRQASQKAEKALEKLLVQAFRALPPGGHRQLPTILGIGEVTAAVLVAAIVDIVRFPDDAHLVSYFGIIPEENTSGVDKHGRPIPPGTMCMSRKGNDLVRKYLWMAAWSAIQCNPAVKAVYARQRAQGKQGGVAMGHAMRKIVQQVFAVWTTNRPFDPDAYPHRKAEQQAAADRQARIEKKAAGRKGDKAPRRQAVTATTSSIEPEPPASKKAAPAKRAPAKTPTVDFAALRREVTVQQILSHWGHFQQLGGRGPQRRGPCPLHPSERGKSRCFSVNLEKNVCQCFHPPCAFKGNVLDLWAAYHKLPLREAALHLAETFHIQLPRTEKRNP

SEQ ID NO: 125974 - protein, 427 aa, unidentified
MPYRIAGIDVHQRMLAVVVTDVAVEDDFHFERQKVGTTPGDLRELAEWLIAQDVEEVVMESTAQYWRPVWEALEQHWRPARRARDGAPPLAGTLHLAQAQSNRGPGRRKKDFQDAERLVKRLVAQELTLSFVPDSEQRLWRTVMRRKYQVTRNRVQLQNRLEALLEEAHIKVSSVVSDLLGISARRMLQAVADGETDPAALAALAAPRLRATAEQWRDAFSAGRTLHPVYRRLLKLTLEELRLLEEHLAQLDQQMADLLAEHHDAVHRLAEVPGLGVDSAQQIIAEVGASAATFPSPKHLASWMGACPGNEESAGVNYSHRCPKGNRQMRRVLNQAANAAVKAKGTIFAVVYRRLVPRLGHAQAIGPITHRLCRLIWKILHERVRYEERGPAVSEEAKKVRARKMIRELRSLAYRVELLQAPSSNPA

SEQ ID NO: 125975 - protein, 316 aa, unidentified
MSVETWFVGIDVAKDRLDVAVHPTDERWTGSNDPAGIEALSEQLVRLAPQLVVLEATGGFEVPLVGALGARGLPVVVVNPRHVRDFAKALGRLAKTDRIDATVLAECAARVRPVVRPLPDEEARELHAWLARRRQWVEMMTADENRRQQAAAPIRRPIEGHLRWRRCQLAALERELTTRVRRSPVWRESETLRRSTPAVGPVLARTLLADVPDLGRLTGQQIAALVGVAPFNRDSGPRQGHRSLWGGRAPVRGVLDLAALVATQHNPVIRAFSQRRVAAGKPWKVVLTACMRKLLTILNARMKHRTAWKPVPALGA

SEQ ID NO: 125976 - protein, 343 aa, unidentified
MQTITTIGLDIAKSVFQVHGVDADGRVVVRRQLKRRYVLAFFQQLPPCLVGIEACASAHHWSRELQALGHTAKLMPPAYVKPYVKRHKNDAADAEAICEAVARANMRFVATKTPEQQSCLTLHRTRHLLMRQQTSVINAIRSHLAEFGIVAPVGRNGVEQLLGVVADSNDKRLPEVARACVAALGAQLRVLKVQILEFDRMIRAWHRSSEASMRLDQVPGVGPVLATALVASVADPKAFRSGRDFSAWIGLVPKQNSSGGKERLGNISKRGDRYLRSLFTTGALAVIRYAKIHGTKHRPWLTSLLARRPTKVAAIALANKLARMAWAMMAKGERYKEPAALAA

SEQ ID NO: 125977 - protein, 337 aa, unidentified
MKYNVISIDLAKNVFQVCAMNSTNQVVLNKKCSRNKLLDVLRQFESTTIVMEACYTAHPWGRAIEALGHTVKLIPPYQVKPFVVGNKNDHNDAIAIAEASFRPKATFVPVKTLEQQDIQSLQRIRERQMKQRTATANQLRGLMAEYGIVVPVGLHNLRKLVPDILENAEQPLTPVARTFIHRLYRELTHHDQQIEALEEELAALLKHNKDYQRLQTIPGIGPMIAATLIASVGDAHYFKNGRQMAAWAGLTPRQYASGEKSYHKGITKRGDRVLRKLLIHGARTVLNWCEKKNDKLSLWLKALSKRAHPCKVVVALANKLARIAWAILASQQPYKTA

SEQ ID NO: 125978 - protein, 329 aa, unidentified
MKVQHIIGADLSKRSIDLVYHLSKSHIKINNSTDGFNDLMRWLQKLNIDISEAMIVMEHTGLYSYRFEDFLHQQQIAFCKVSALEIKRSVGLVRGKTDRLDAARIAGYGHEKKARLIINQPLSNDLKRLQVLHSTYQRLVRHRAALINALKEYIYIGIAERDLIIQTQRQLIKNFDKQIKKLMSEIQMIINQQGALKQNFLLLQSIKGVGKILALTVIIKTHNFTRFISARKFACFCGTAPFDHSSGTSIRMKTRVSHLADKQMKTLLDLSAKSAIQYDKELREYYLNRTQNGKSKMSTINVVRNKILYRMFAVIKRQTPFTENYSQAA

SEQ ID NO: 125979 - protein, 377 aa, unidentified
MEQATRFVGMDVHKETIVVAVTSAGEVGKATHHGTMPNTPAALENLVRRLRTAGSGALKFCYEAGPCGYGVHRTLTRLGEDCMVVAPSMIPRRSGDRQKNDKRDAAALAVLHRGGLLTAVWVPDTAHEAMRDLVRARQAAVRAVRAARQQLSAFLLRHERIFPSDGRPWTKTHRSWLADQRFDQPAQQIVLEESIEAVRLAEQRRDRVDGYLRAQIPSWSLFTLVRNLCALRGVDVIVGAGLAAAIGDPSRFATAPDFMAYLGLVPSEHSSGQRRRVGAITKAGDIHARTMLIEAAHSYRLPARIARRKLKAVDAVPDAVREIAWKAQTRLCQRYRQMMARDKLKQVVVTAVARELAGFVWAIACTTSDPSAHRSIS

SEQ ID NO: 125980 - protein, 350 aa, unidentified
MNVNHYIGFDVHKKTINYCVKMADGQIVEEGRLRATHDTLRRWAGRRQEPWRGAMEATLFSGWIYDTLKPFAAELQMGHPAMMKAIGASKKKNDRIDARKIADLVRCNLLPACYVAPAEMRELRRLLRYRNVVVAQAVRMKNKMSGWLMEVGAEYNKQQLHGKKYFTELLGKLEEVPDSVKDLLRLSRGALEMFEATQRQLLDRLQKEPRLVERVAVLESIRGVGEVTALTWALEICDPQRFRSIADAVSYCGLTSALDCSADKQYRRPISKQRNGHLQTVLIEAAKMAPRWNPQLAQVHERELQRGNRNRATLAVARKLVAYLLAVDKSGQPFRIRNQPAPTTEVETAA

SEQ ID NO: 125981 - protein, 422 aa, unidentified
MAKKAKKTQTDKGLKLKIVNPNAAGIDIASGEMQVCVPQDRDGDNNRTFGSFTNDLKAICKWLKLCQIDTVAMESTGIYWIPLYFMLQQEGFDVILCDAKSVKNYSGRKTDESDAEWIMLLHSYGLLKACFQPENTARMMRNLTRHRNNLLKSCSKETEHMQKSLDQMNIKLCNVISDLLGKSGQSIISAIINGNHDARSLSTLADSRCKASPEIIEASLNGTWDEDHLFTLRQSYELYQYIQEQIKECDNKIEALMSQYKAAVSTETPVKFIKNNKRIAKKNAISFDVQTYAFSLWGINPLDIPGMSNGAIMQLIGELGHDFTEKFETATKFCSWCNLVPNNKISGGKLLSSKVPKHKNHVGQIFRLCANSLKSEKTTMGFYFRRIQSKSGYLQAIVATAHKLAKVFYTMVKNKTSYDEKK

SEQ ID NO: 125982 - protein, 337 aa, unidentified
MDYFAGLDVSLEKTHICVLDRNGSVVLETSAASTPEAISAALEGAPACKRVVFETGRMAPMLYHGLVELDAPVICIESRQAYQALKTLATHKTDRNDARGLAQLARTGFFKPVHVKSLPSHAVRALIMARKKLVGQRITLENQIRGLAVVFGVRLPRGLSPAFVEEVIAMSDGIPGLSSAMRGLVAARDAVLTAIAAIDADMKRLVRASDACRRLMTIPGVGPLTALAFTAAIDDPGRFRRSRDLGAYLGLVPRRYQSGEIDYAGSISKVGDRRVRTLLYEAANVMLTRFKGQLKLKDWAIAIAGRSNMRKARIALARRLAIIMHAMLKHGTEFKLA

SEQ ID NO: 125983 - protein, 397 aa, unidentified
MIAVGIDISKAKSTVAVIDSDGTVLASPFTMAHTQPEMEAFVSYLKGLGEPTTILMEYTGHYHYPVLKKLQDEGFPVCIVNPYQMKKYGDVEIHKAKTDKKDALRIAAYALEKSYKLVPYSSMEQKYEDLKFLSRQYNQRISYVAKLKVQLIALLDQTMPGITRILPLNSRNPEKCALLLFIKRFKSFDEIQRIGKARFLASYDVLAKKASERNASSKGLSIYELAVDSITTRGEDPYIWLSQNQCVDLLSATQNAADEIISQMRNIAETIPEYKVLRAMHGVGDRLGPIILAEIGDVHRFHSGKALNSYAGNDAPPYQSGQFESRNRHISKRGSSALRKACYEVMQALKLIKPQDDPVYLFMLKKEQEGKPFNVAKMAGVNKFLRIYYARAMELYK

SEQ ID NO: 125984 - protein, 406 aa, unidentified
MQVYLGIDCSQHSYEASFVNQAGAVLARLAIPSSPEGFLHLDAARDKLGIPPSDCLVALESAHNLLVDFLWDHGYSQVYVIAPHVIKSCRDRYRHSGARTDPSDAYVLADVLRTDRHRFYPWYPDQPSTRQIRAMNSLIGHLGRTIVRHSNRLRAVLARYYPGLLQAFRDIHGPVALHFIQAYPTPQATAQLTWEQFQLFARQHRYTHRGRVSRCFSRLQTPQPEAAPPIVEAYQQEAVLLAGLLLSLVEKRRALIRQMDLLFERHPDHTIFASLPGAGPQLAPALLAKFGDDRSRFPTPATLQALAGSCPVTDSSGKRRTIRFRRACDREFRHIAQQWARCSLQRSLWAQAYWSQVRPRCSSDSHALRCLANRWLAVAWSLWQKHQPYDEAYHLHQRALNTRLPT

SEQ ID NO: 125985 - protein, 350 aa, unidentified
MNILALDLGKYKTVFCDYNSDNGEHQFGKVKTTPQAIHDLIVEKEPQRVVLEVCHIAGWVVDIARALGKETETANTTHDAWRWKNVKKKNDREDALKLAKLSAMNQLPTVHIPTKQVREKRAFIKYRQRLVKHRKSIKNAIRAIFSREGITTVPRGKNAWSKDGLRWLRTHAKPLEEIADIKQLWRGQLHVELETFEAISESLKKVEDKLNKLGACDEQIKRLQTIPGVGPRLAETVVAFLDDPKRFQNSKQVGSYAGLTPKQYQSGQTERQGRISGQGNKLLRNLLVEVCWISLRCNPWALDTYNRLLRGSPSRKKIAITALARKLVVRCWVMLRDEQDWKNDIQKNVA

SEQ ID NO: 125986 - protein, 409 aa, unidentified
MTVMIGVDPHKGSHTAVAVDAAERSLAELRVRSGPKQLERLLKWAEQFSERTWAIENATGLGYLLAQQLVAAGERVLDVQPKLAARVRLLATESTNKNDPHDALSVAVAALRSPSPKEVGVEDHAAVMKLWSRRHRNLSSSRTQIACRLHAVLCDLVAGGVPDEIYAEKAASLLADVEPDTAVAAARAELAEELLDDLRRVDHQLAASKKRLEQVVAASGTTVIDIFGVGPVVAATVVGVTGDIARFPTRDRFAAFNGTAPIEVSSGGRKVWRLSRRGNRTLNHAIHMAAVTQLRFAHSPGRGYYDRKIAEGKTPKEALRALKRRISDALWTAMVADARRAAATTPRTSRKAGPGGQPGNDSVASAAGSHPETPALRPSHSRTRPKATTNKRSPGRTTSRTPATARRTA

SEQ ID NO: 125987 - protein, 346 aa, unidentified
MRFYTKPHKHYCGIDLHARTMFVCIVDQQGNVLLQRNIPTRPDEFRRLIEAFREDLVVSAECVFCWYWLADFCAAEGIPFVLGHALYMRAIHGAKAKNDRIDAFKIASLLRGGNMPVSYVYPAAMRATRDLLRRRLYPVRERGFLLAHVQNTHHQNNLPTPGASLQWRSNREGVAEHFTDECVRRTVEVDLNVVSHLDVVIRELELFLTNTTKEQDAESFHLLRSIPGVGKILAMSILYEVHDIARFPTVQDFASYARLIRCSRESAGKRSGTSGSKIGNAHLKWAISEAAVLMLRHGDVEKLQNRLRRKHGKGKAMGVLTHKLGRSIYYMLLRKKPFDLERFLAA

SEQ ID NO: 125988 - protein, 374 aa, unidentified
MEEYTRFVGIDQHKNSLSIAVAYAGRDKEEYLGRVPNDPAVIARWIRRQGLVWGGLSKTLWCYEAGPCGFGLHRQLTRMKLDCQVVAPGLTPRKPTERVKTDRRDAEKLARLLRSGDLTPVWVPDEEHEALRDLVRARETARDDLARQRHRLQKFLLRQGVHCPEGINAWTGRYEGWLNTVKFGWVTHQEVWAEQRQAIREAEGRLARLSKALEEAIESSRWRPVVESLQCLRGIKVVTAATLVVELGERAEFCGPEQLMSYSGLVPGEDSSGEKIRRSGITKAGNAHVRRVLVEAAWHYRHRPAVGQVLKRRQQGQPVKVLEISWRAQQRLHTRYRKLLGRGKDKNKVVVAVARELLAFVWEIMQVVPMSTSV

SEQ ID NO: 125989 - protein, 411 aa, unidentified
MEVLHPHCAGLDVHKDTVVAAVRHMVGGTVTRQVRTFKTTTKDLMALSQWLASEGCTHVAMEATGVYWKPVWHILDDGDFVLVLANAAHVKNVPGRKTDVNDATWLAELMAHGLIRGSFVPAAGIQELRALLRTRKQFTRERSSHVQRLQKTLEDANIKLDSALSDVLGLSGRRMIEALIAGVSDPDDLVGLAHRRVKAPPETLREALRGRVTAHHRFLLQLHLQQVDAIDAAIVQIDREVDAKIEPFCRTALMLTTIPGVSDLSARVIIAEIGPDMSRFPTQGHLISWAGLCPKNDESAGKRRSTRMRKGAPWLKTTLIQCAWAAARKKGSYLQTQFHRLRARRGGKKAIGAVAASILTAAYHMLKDGTFYHDLGPDHFDCRAKARQARNLLTRLHNLGYAVQITPLAAA

SEQ ID NO: 125990 - protein, 415 aa, unidentified
MMEQRNKVCGVDIHKKFLIATILSRDGDKIQKRYSTDIDDLLNFRDWILENNCDCVAIESTGVYWYPVNAVLENKVELILANAHQIKHTPGRKTDSIDSEWIAEVALNNLIDPSRIFPKEERDLRRLTRTRESLVKIRSQFKNQVHQGLESCSIKLSSVLSDNFGKSGRHILDGLIQGKSIDSIIEEIPSKRVKKNEGQIRSAIRTGLDETQIFLIQSHLNTIDALTKKLDEIEYEIKQRISKKKDDLKIAMSVPGIGFKAATTILAEVGNYRDFSTPDKLASWCGIVPNVYQSADKLITGSITKQGSKHIRWMLVQVAQAALKKRDSKLRKFFLRIKARKGHNVAVVALARKILCILYHLLMNQEMYQEDGVTKSRQSKVDWSSARTDPMSLQTMIEIIAKAGYEVKKIEGYGG

SEQ ID NO: 125991 - protein, 419 aa, unidentified
MMSEVITAVGVDVSKGKSMVAVRRPGGEVILPPTQVNHTAEELARLVERLREIGGNIRIVMEHTGMYWRPIAHALKEAGFFVSVVNAILIHNFSDNSLRKVKTDKADALKIANYCLTFWTELRNFSDEDETRQMLKMQCRLYERTQKTSVELRNGLISLLDQTFPGINKVLPSPYCSKRGHYKWVDFVKTFWHKDCVKKHSLNTFSNSYQRWCKKEGYRFRETEAEKIYNAAQSAVATFPANESTKILIVQAVDCLNAVYHTLWHPYGRFLVLRAEMRRLASLLPEYEVVMAMQGAGNITGPKLMAEIGDVRRFTSKRALVAFAGVDAPPFQSGIFEAKSRHVSKRGSPHLRRTLFQIMSVVLQHSSVDNAVYLFMDKKRTEGKHFYVYMVAGAAKFLRIYYARVKEYLAASEADKSAA

SEQ ID NO: 125992 - protein, 348 aa, unidentified
MGGVDTHKDLHVAAVVDQNNKVLGTQFFSTIRQGYRQMLAWMTSFGALKRIGVECTGTYGSGLLRYLQNAGLDVLEVTAPDRMERRKRGKSDTIDAECAAHAAFSRIRTVTPKTRNGMIESLRVLKTCRKTAISARRVALQIIHSNIISAPDELREQLRNMTRMQLIRTLGSWRPDASEYRNVTNVYRISLKSLARRYLELHDEIADLDVMIAAIVDELAPELIKRNAIGYESASQLLITAGDNPQRLRSESGFAALCGVSPVPVSSGKTNRYRLNRGGDRAANSALHIIAIGRLRTDDKTKEYVARRVAEGHTKMEAIRCLKRYISREVYTLLRNQNRQLNSIPITA

SEQ ID NO: 125993 - protein, 403 aa, unidentified
MNNVAGIDVSKGKSMVSVLRPFGEVVAKPFSIGHTGSELKELADYLKSLDGETRVVMEHTGRYYEPVARFLHDEGVFVSAVNPKLIKDYGNNTLRKVKTDKADSRKIARYGIDNWAELRQHTPMDTIRMQLKTLNRQQSLYSKTKTMMKNNLIALLDQTYPGVNALFDSPVREDGSQKWVDFATAFWHVDCVRNMSLTAFAERYRKWCKRHGYNFSQSKAVEVHTGAQDLIAMLPRDALTKTMVRQAIDALNAISASMERLKAEMQALAAQLPEYPVVMAMHGVGDSLGPQLMAELGDVTRFTHRNAITAFAGVDPGADQSGTHEAKSTRVSKSGPPELRKALFLVMDCLLKTMPQDDPVYRFMDKKRAEGKPYLVYMTAGANKFLRIYYGRVKEYLASLEGN

SEQ ID NO: 125994 - protein, 473 aa, unidentified
MEKRRKDKREEVTKLLTLQKIRDVKELESYKLSVCHPHSAGIDLGSKEIYVALDPRIAAEMSLPIVHVFNTFTSGLLSCRDLLCSCGITTVAMESTSVYWTTIYSILKSSGLEVCLVNPKKFRMVPGRKTDVLDCQWLQTLHLYGLITGSFHPEEKIAELRSYMRERGRIIKDRGRYVCRMQKALTKMNLLLHNVLDDIMGKTGMAIVRAILDGERDPHKLASLRSGRCKYTEDEIAESLNGYYKKDQLFLLKTNYDAFSFFDNKLTEIDSQITNLLEEFPLKKEKVEETEEKKPKYRKKNKNDIRSEKDLQDMLYHILGTDMTAITGLQPNTVLQIIAEVGTDMSKFPTCNHFASYLGFVPRNQITGGEIISTKTDRVKSSAAQAFKKVVPSISRGKSALAAFYRRIAPRIGTGKAIVAVSRKLAIIFYNTLVHGSQYVEYGQEKYLQQIEEREKRLVIKLAKKHNWEVKYS

SEQ ID NO: 125995 - protein, 334 aa, unidentified
MDKVTTVGIDLAKNTFSLHGVDASGQVVLRKTVSRARLMVVVTQLAPCTVGMEACSGAHEWARRFQAAGHTVKIMAPKFVVPYRRSGKNDGNDAEAICEAVQRPSMRFVPIKSVEQQAILAMHRVRQGFIEERTATINRVRGLLAEFGTVLPQRAAEVRRGAAAAAEALPPLARHAVEDLMSHLAGLDERIKSYDRELESLARSSETVQRLMTVPGVGPLGALATVATVGHAHEFRDGRQFAAWLGLVPRQWSTGGKPRLGRITKHGDAYLRTLLIMGARAALQMAAGRGDRLSRWAIALKERRGYHRAVVALAAKNARILWAMLAHGAEYRIA

SEQ ID NO: 125996 - protein, 367 aa, unidentified
MKDSITVVGLDVHKNSIEIVTADADGAMEVRRFGRIGGTMDALDRAVRKLVSRGSTLRFVYEAGPCGYEIYRHLTGKGFSCKVVAPSKIPKKSGDRIKNDRRDAETLARLERAGELTSIYVPREEDEAMRDLTRAREDAVQSLKTARHQLNAFLLRYGKRYPGKGSWTPAHMRWFSDIALPHPSQQIVLQEYITTVRVCTERTTRLTDQIAKLLPEWRLYPVVKALQALRGVAPIVAATTVAEIGDLSRFENPRQLMAYLGLVPSEDSSGESTHRGSITKTGNGHVRRALVEAAHAYGFPARVSRHLLKRQEGLSETVLAIAWKAQVRLCGKFRRLMARGKLKNKIVTAIARELSGFMWAIAREVEV

SEQ ID NO: 125997 - protein, 348 aa, unidentified
MTKRLLKQVVGIDVARKELVVSLGNMDEEAVTHIYAYKTFSNTEKGFMSLILWVKKHTIENSPLRYVMEATGVYHESLAYFLSGKTYAVSIVMPNKITNFFRTLEIKTVTDKSMSEAIALFGLEKKLEDWIQPQQAFRELRQVTRERDQLIAERTMLKNQLHAEQVEAHPSKMTISRMQFRIKVINTQIRETLAETTTVINNDPEIKRAVTLITSIPGIGLLTAAIIMAETNGFELIRSKKQLTSYAGLDVKEKESGTSVKGKSRISKRGNRYLRKAMYMPAMAAIRHSERYKAIFVRIVSRNGIKMKGCVAVQRKLLEMAYTIYKTNTPYQTNHLQTQQENQLVLNN

SEQ ID NO: 125998 - protein, 338 aa, unidentified
MLHIGLDLHKRFSTIAAMDDDGNVRLEDKLYHDDRARLTEFFSGVAGKAVVTVEATRNWYWLYEHLEELGVTVKLANARKVRLIAEARLKNDKVDPKTLAQLERTGFLPEAYIPPRAIRDNREYLRYRLTLVRLRTGLKNKVHALLDKLGIRHQFADLFCPAGRRFLSQLQLRPVYQEELTNYLALISDLERRTVAVTKEIKRQLKPDPRAKFLMTIPGIGHLTAYLLLNEIGDIKRFPTPGKLCSYGGIVPVVRQSADHRWQGHITREGNRYIRWALTESACLAPSKDYSLGSFYRRVAFRRGPLKARIAVARKLLVAVWYVLTYGEPYKVTAFPTI

SEQ ID NO: 125999 - protein, 334 aa, unidentified
MKNIALIGIDLGKNSFHIHCQDHRGKAVYRKKFTRPKLIEFLATCPATTIAMEACGGSHFMARKLAELGHFPKLISPQFVRPFVKSNKNDFVDAEAICEAASRPSMRFVQPRTESQQAMRALHRVRESLVQDKVKTTNQMHAFLLEFGISVPRGAAVISRLSTLLEDSSLPLYLSQLLLKLQQHYHYLVEQIKDLESQLKRKLDEDEVGQRLLSIPCVGTLTASTISTEIGDGKQYASSRDFAAATGLVPRQYSTGGRTTLLGISKRGNKKIRTLLVQCARVFIQKLEHQSGKLADWVRELLCRKSNFVVTCALANKLARIAWALTARQQTYEA

SEQ ID NO: 126000 - protein, 459 aa, unidentified
MSGAASPQTSVTRVSGGTTDCGSSWRKHAQQNLRILDTPSGLFSEGAMDVVYGRCCGLDIHKKLVVACLITPGQGTAAQKEIRTFGTMTDDLLALGDWLAGAGCTHVAMESTSVYWKPIYNLLEGSFELLLVNARHIKAVPGRKTDVRDCEWIADLLRHGLLRPSFVPDREQRELRDLTRYRTALVRERSSEANRLAKTLEGANVKLGSVATDILGKSGREILTELAAGATDPAALADLARGKLRTKLPELERALVGRFGAHHRFLVAQQLGHIDYLDEAIAHLSAEIAERVRPFEDELARLDAINGVGRMTAEVIVAELGTDMSRFPSDRHAASWAALCPGNHESAGKRQSGKTRKGNRYLRAALVEAAQAAGRSRNTYLSAQYHRLAARRGKKKAAVAVAHSILVISYHLLKDGTDFHDLGGDYFDRRDQDALERRLVQRLEALGNKVSLEKADRVA

SEQ ID NO: 126001 - protein, 338 aa, unidentified
MNIVFLGIDLAKNVFQICGLNQAGKPVYTKRTGRKELLQMLANIPACLIGIEASTGAFYWQREFEKLGHNVKVISPQYVKPFVRGQKNDGNDAQAIAVALMQPTMHFVPPKSPEQQDIQALHRARQRIVNHRTATVCQIRGLLLDRGITIGAAVSRVRRAVPLILEDAENGLSVRMRSTIAELYDLFNDLERRIHFFDKEIETVFRQSEACQRIAKVKGIGPKTVTAVVAAIGKGTEFKNGRHFAAWLGLVPRQHSSGDRQVLMNMTKKGDKHLRTLFIHGARAVVRVAANNNDSHMNQWVNQLKERRGFNKTTVAVANKNARIIWSMLRNETEYQVV

SEQ ID NO: 126002 - protein, 351 aa, unidentified
MKDYTGKKIYLGIDVHKKTYAVTALCEKAVIKKATLPASPEGLVTFCKKFFPGAVVESAYEAGFSGFHLHRVLERNGIKNLVVHAAGIEVAVGDRVKTDKRDSLKIATQLEANRLKGIHVPSEEREEKRALTRLRDTIVEHRMTTANQIKALLHQHGLISPTAKKKVCPKWIESLKKLPMRDGIRFALNHLVDMWLQLTVRIKEINAEMAKQAAEDHALEMVYRSTPGIGPVGARILANEVEDMSYFDNERQLFSYTGLTPSEHSSGGHIRKGHISRQGKAVIRKVLVLASWKAIQQDAQLRAVYDRISIRAGGKKAIVAVARRLIGHIRACFRKKCFYRAEVKTVVAVAA

SEQ ID NO: 126003 - protein, 339 aa, unidentified
MSIVMGLDQHRGQITGEWIDTETGEVQRTRVVPADRAAVRKFLDRFRGRKLEVALEATTGWRFVIEELRRVGAVVHLAEPAETADLRGSKKRAKGDRADARHLRELLMVGRLPESWIPPDHMLDLRARVRLRHTLSEQRSEWQQRIQATLYHHGCPQRRGLMVGDGRAWLAAQPLPAAAREQITVAIAMIDALEVQLAPLDKELRAYARRQVGCKALMAHYGIGELTAVTILAELGDCTRFSSSRQAVRYAGLDITVYQSDRHRAPGHISRQGPPALRWALYEAAQVARRGERSPDRAYYLQAKERIGGNRACLSVARKLLKRSYHTLRELGEEALAPA

SEQ ID NO: 126004 - protein, 374 aa, unidentified
MNYVLVLDVAKGKSMFMLSSDIGEVLLEPTEYIHNKSYFEKIDSYINKLNIKDSLTVVMEATSIYHKSPERFFKENNYHVIVFNPLIGKEITNTIRKTKTDKQDCIKLTNLFWKGSIPDRNYTEDEIYTKLNELSRQYYHLDEGLNRHKNRYKELIQLCFPEFELCFKDGKTYDLTALNFIKEFPHAYIIKDKRVDALTSYPGVNKNSKDVDNLKQLANIIINLTEQKDEVKNQMIELAKETKNFECINSLFDIGELSASLIIAELKDITRFNNIKQINASCGLDPTIVQSGKSINYHGPISKRGNRYARKILFNCSRNIITLSAKCDKENSIYVYYQKKKQEGKHFYACLTACSTKLIRIIYALCMNNSQQQN

SEQ ID NO: 126005 - protein, 359 aa, unidentified
MRGQRNEISFRGQKIYVGIDVHLKSWSVTVLSETSVLKKFSQHPSPEALYGFLTRSYPGAEYHSVYEAGFCGFWIHERLTALGIDNIVVNPADVPTKSSEKLRKTDTVDSGKLARSLRANELKGIYTPDSVSLEMRSLIRLKNSITKDTTRQKNRLKSQLRYLGIEIPQEFLTPFSNWSKRFFAWLKEIETLTPSGRQALDIHIRHLEELRRQKLEMTRALRTLAKTDRFREPLRLIMSVPGFGQATGMAFLSEICDITRFRNAEQLAAYIGMIPMCHSSGEKDGTGDITIRKHAVMRCNLIEAAWVAVRQDPAMNLFYTEQCKRMPKSKAIVKVARKLVNRLFFVLKHQTEYVNSIVS

SEQ ID NO: 126006 - protein, 429 aa, unidentified
MTNPQSTPEAVVWVAIDVAKDRHEALIEAPGWKSRKKFRVQNTAEEFRAFAEFLHGLALPVRIGFEPTGNYHRALAYFLHSEGFHLELISSVALARTREAMHNSWDKNDPKDAQVILHLLKGRLTQHFHDPMVHNINDLQELSKTHHHVSLEKTRTQHRLLTHYLPLYFPEIARYHSSSRSEWLWNLLIEFPTPCSMTQLPREEFVRKAWTLVGRKVAKERILTDIYLTAQSSVGLPAEENSEAVAMLRFVLRQLLTLCQLRATIEERADDLLSSNEDYQRLRRIPGIGPISALTILAEAGDLRRFSHHRQFLKFCGFDLATEQSGQFRGLSRLSKRGNARLRAVFWMSASVAVRMRENSFRAKFERYMRSDPSSADRKRKAYVAVAAKIARVTYALVRSGADYRCFHEVAVPGGRTRSARAVEAILTS

SEQ ID NO: 126007 - protein, 335 aa, unidentified
MNLTHFVGIDVGKEKFTFCILEHNTKVVEAELSNNDSGVLKLIQFFRQELEIDIAQVVFCMEHTGVYSLILLHALHAAGANVSVENATRIKLSLGLTRGKSDQLDARRIAEFASRFVDKLSFWKPRSKAIQQLQHLTALRDRLIKIRTQLQVPIDEAEGFLDEEDLELIAQPSLKVLDTLSTQIEQVEHKIDRIIASDAKLKRMVKQIDSIPGVGIVTATELIIRTNEFKDFQNAKKLACHVGIAPFEHSSGTSMRGRTKVSHKAHKRLKTLLHLCSMAAIKSDNEFRRYYQLKISQGKNKMSIINAIRNKILHRAFAIILNDTIYHENYQYKFA

SEQ ID NO: 126008 - protein, 340 aa, unidentified
MELGVLGIDLSKNLFQLHGVDLAGRAVLRKRLRRDQLLPFIAALAPCTIGIEACASAFHWAREFERAGHVVRIISPQFVKPFVRGNKNDGNDAEAICEAVQRPNMRFVPAKTVAQQDIQSLHRCRQRLVNHRTALISQMRGILLDRGIVFGKSASRARRLIPQIVADQGNALTVMAREMLASLFEFLQQLDERIRDFDRRIEAVFRQDPACQRIAKLEGVGPKTATAIVAAVGDAKDFENGRHMSAWLGLVPRHQATGGRIVMGGISKRGDQHLRTLLVHGAREVVRVSVGRKDPKSQWVNNLVKRRGTNRAIVAVANKNARLIWSLLAKGEEYRRPAAA

SEQ ID NO: 126009 - protein, 400 aa, unidentified
MLFVGDDWAEDHHDLYLMNEAGDRLASRRLPEGLAGIRLLHDLIAAHADDPAQVAVGIETDRGLWVEALTGAGYQVYAVNPLAVARYRDRHAVSGAKSDAADAKLLADLVRTDRHNHRLIAGDTPDAEAVKVLARAHQNLIWTRNRHTNALRSALREYYPAALEAFDDLSDRDALAILGHAPDPRQASSLSLAKIRSALKAAGRQRNIDIRAQEIQAALRSEQLAAPAAVTAAFAATTRATVGLVVELSRQIDDLENELAAHFETHPDADIYRSLPGLGVILGARVLGEFGDDPNRYTNAKCRKNYAGTSPLTIASGRKRAVLARHIRNRRLYDAIDQWAFCALTRSPGARQFYDHRRAEGDLHHQALRALGNRLVGFLHGCLRHRTRYDEHKAWAHRTP

SEQ ID NO: 126010 - protein, 354 aa, unidentified
MSQKLNTAIAVIGIDIGKNSFHVVGLDKRGAIVLRQKWSRGQVETRLANMPPCLIGMEACVGAHHLSRKLKGLGHDARLMPAKYVRPYSKGQKNDFRDAEAIAEAVQRPTMRFVATKTAEQLDLQALHRVRERLVSQRTGVINQIRAFLLERGVAVRQGLRFLRAELPDLLATRTEALSPRMTRVIEDLAGDWRRLDERIESLSTEIAALAHQDAACNRLMTVPGVGPIISSAMVAAIGTGDVFSKGRDFGAWLGLVPKQISTGDRTILGKISRRGNRYLRVLFVQAAWVVLIRPKTWERHGLKPWIEAAKKRLHHNVLAIALANKLARIAWAVLSKEREFEYARTDKMTSRSA

SEQ ID NO: 126011 - protein, 357 aa, unidentified
MKQVNKLSFKGQSIYLGIDVHLKSWHVSILTDDIELATKSFPPCAKTLGSYLKRMYPDAKYRSVYEAGYCGYWVHENLISEGIDNIIVNPADVPTKDKEKKRKNDGVDSRKLARNLRSGELEGIFIPDKKQQEDKLLLRTRRMFVKRQTGCKNQIKSTLSFYGIQLSDEKINAHWSKAYIGWLRKLSEDNPISSKAIRLKVLLDFLEGLRKTVSDLTRQVRSLSQEFPYKEKADLLRTIPGIDTLSAMTILTEFGDIKIYSKLDHLCSYAGIVPNEYSSSDTAKTPVITKRGNKYLKKVIVDSSWVAIRKDPELLSSYNQYKRKNKSMKCIIKICRKLLNRIRCVLVSGKPYQLLTT

SEQ ID NO: 126012 - protein, 351 aa, unidentified
MLLIGVDYHPSFQTIAFLDEESGECGEQELNHSDGQAERFYRGLQQRGICVRVGMEATGYSRWFERLLAELGIEIWMGDPAEIKAKRVKKRKTDRNDALLLLRLLRENNFPQIWVASPENRDLRQLLWHRHRLVQMRTRIMNQLQALAMNEGYRWKKKLFSEQGRAQLEKLVLAPWASRRRQELLELLDRMNPTIEELTAAVEQEAKKRPEVLRLMTHPGVGPLTALAYVLIIGTPTRFQRGKQIGTYVGMIPCEESSAHKQRLGHISKQGNSLLRFLLVEAAQAAARSHPDWRRRYLHLALRRHQSIAKVAMGRKLAIRLYWMWRNGSEYSRSLEFGSYAGQLGTGHGVK

SEQ ID NO: 126013 - protein, 312 aa, unidentified
MSACFIGIDISKDQLDVAIRPINESIAFANDDEGIDLLIKRLQTLQPDLIVMEATGSYHQLVLGRLLASGFAAIAINPRQARDFARAIGRLAKTDRIDAHVLAEFAEKIRPELRAIADEATQQLDAICTRRRQLVGMIAAEKNRYHSGPASIRAQIKKHIIWLEKQVAELENDLDKLIRSTPAWREKDDLLRSCKGIGPTTSHTMLACLPELGSLSRHRIAALVGIAPFNRDTGKQRGQRHIQGGRSEVRCVLYMATLAAIRSNIVIRAFHKKLIAAGKPKKVAITACMRKLLTILNAMVRSNTRWNPDFAA

SEQ ID NO: 126014 - protein, 333 aa, unidentified
MDDYDRLLGTASFPTTRHGYKTMLVWMRSFGKVSRVGVECTGTYGAGLLRYLQRAGITTLEVTTPDKTVRRKRGKDDTLDAENAAHAAYAGIRTVTPKTRDGMIEALRVLKVCRKTAVAARRVALQMIQTQVISAPEDLRDLLRNLTRMQLIRTLASWRPDLSGYRDVTMAYRIALKSLARRYLELHDEIADLDVMIKAIVDELAPELLSRVAVGYESSAQLLITAGDNPDRLGSEASFAALCGVSPIPASSGKTQRHRLNRGGDRAANSALHIIAIGRLRLDATTQAYVARRVAEGHSKLEAIRCLKRYIARELYYVLRNRHREIHKVQIAT

SEQ ID NO: 126015 - protein, 342 aa, unidentified
MKDSIYDHYIAIDWSIKNMAIARMTKKSNKITVIDVDSDIEDLQAYLKNLRGTKILTIEETTTSQWLYTELREYVDRIIICDPNRNKLLNEGAKTDKIDASKLVQLLKAGLIKEVYHSTDKFLYLRRIVSGYEDLIKAGVRLKNQRYSLLRVCGKSGNEKIGSRFGGQAEQFVLECLDRQIEAYEKDKQGYEMQFAKLAQSYPEIKHQRSLPGIGVINAVKIVARVVTPYRFPDKGHYLSYTGLIKLAKISGGRSYGKRKPRYSRQLKSVYKSGVLAAIGGNNPINDYYNSLIQDGYAQHNARQKACRRLAILSLGVFKSGKRYQSYRRNHVKGRKVGTSSL

SEQ ID NO: 126016 - protein, 375 aa, unidentified
MQSLVRQPRLSSTVHWSKNSWLLALQSHDRAQPSLYPIRGGDTEGLMAKRKAARDRCAKVNGEAPSIVLCYEAGYDAFWLARFLKARGIECLVVDAASMQVNRRARRAKTDRIDVGMLLQALIAWGQGDRHVWSVVRIPSFDEEDLRRSHRERDRLVRERTAHVNRIKGLLFGQGIRGINVKTKYKTLQIDKLVTGDGGPLPPRLASEITREIARLALIQEQIATLERERDQAPTPCKATEKKRVQLMCLTGIGPAIAAVMTREVYYRQFDNRRQVAGFLGLATSPHDSGDVERSQGISRAGRGQVRGTIIQAAWLWLKHQPKSAITRWFVQRTAGQSGRIRRIMIVAVARKLAIALWRFLEQGLVPQGAMLANR

SEQ ID NO: 126017 - protein, 440 aa, unidentified
MIEPNAAGIDIGHREHWCAVPSDRCERPVRAFGTFTEDLERMADWLQECGIKTVAMESTGVYWIAAFQVLERRGFEVRLVNTRQVKNVSGRKSDVLDCQWLQRLHSYGLLNASFRPVDAMCVLRTYLRYRDELVGARSVQCQHMQKALQQMNVQLHQVLSDVTGVSGLRIIEAILAGEREGKKLAGLADRRVRASQATIEKAMRGDYRAEHLFVLRSAFELYQTYEAKIQRCDEQIIAQMATLPTHAEGEKKPLPPRKPGRPLRCDLVAGTDLRKELYRCAGVDLTAIEGIGVLTAQVVISEIGLDMSRWPTEKRFSSWLGLCPDHRISGGKVLSRHTRHVLNPVADALRIAATTLQNSKTALGAFYRRMRARLGAASAITATAHKLARIIYRLLKHGEHYVQQGLEAYEKKYRQRLLHNLKKTAAALGFELTQKQQLPP

SEQ ID NO: 126018 - protein, 350 aa, unidentified
MKIVGCDFHPKWQQVAVFDVETGEIGEHKLMNGDGEAERFYRDLAAPALVGLEACGNSQWFVDLLQRLGHEVWIGDAAQIRASYVRKQKTDRRDAGHILRLLMEKRFPRLWVPSAAERDLRQLLIHRHKLVEIRTRVKNGLQHLALNRGFQQQARLWSVRGRAFLKELPLAGWTARRRQDLLELLAELDRQVEELDQPVSAAARADARARLLMTQPGVGPVTALAFAVTIGDVHRFATSAQVASYVGLIPREHSSGGKQRLGAITKQGNCFLRQLLVEAVQTTCRLDEGFRKQYQARCHKKPKGVAKVAAARKLTVRLYWMLKTQTGYPEIAHIESSSPVPMADTNTPSF

SEQ ID NO: 126019 - protein, 369 aa, unidentified
MRADKKSKRKGCKLNSIVAGIDLGDRESLATVLSPIGDVADRFSFLMNEEGYAYFASRVPKDARIAFESTIMAYPIARAFKMHGYNDITVAHPKELAWIVKSKKKNDRVDSLKIAKLHMVGMLPESHLLDRDEQIVRDLLVQRVKLGVEIGRLKNSVIGYLKREGIYDSLPKSGDNFSVKRRHAILSLRFDDKRDLILRTMMDRLEFLEGQCIPLEDSVRMNARVSDDVKLLMSITGVDYYLASLLSSFIGDVERFPSDDHLASFFGIVPTSRDSADVKRRGKMTKDGSSIARWALSVMVDTVMLHNDPIREYYTGVKKRTGSGKLAHVATMRKLTRMLYHMLKTRQHWKWENTLLTEKKMAKLEDGWR

SEQ ID NO: 126020 - protein, 333 aa, unidentified
MNKFKHFLGIDVSKEYFDAVLILNGAKEKPIHNQFVNDSKGIKALNQWLKKQGATTQQTLVCLEHTGMYGKLIIKYLMGFNYSLWVEMSLKIIRSMGLQRGKNDKIDAERIAIYAMKNLQEAIIYKAPSRTVEKIRSLMSLREKLTLTKASLIRNSKEMKSLDPEVSKLSEKFQKQTIKGITSDLKQIEKQLDLFIKEDSNLNKIYSQAISVPGVGKVTTLYLICFTNEFTAYCTPRQLACYAGVVPFEHTSGKSIRSKPKVHHMANKKLKKQLHMCALSAVNHDPEMKEYFKRKVQEGKNKMLVINNVRNKIVHRICACIRDNKTFEVRKSA

SEQ ID NO: 126021 - protein, 383 aa, unidentified
MENSSSNCCPKTSVIVSVELSKRNWLVASLSPGAAKPSLRPIPAGNSAALISHLRNLECKAADRIGEPVTIRLCFEIGYDGFWLARLLRSNDIDTYVLDPASFLVSRRGRRAKTDRIDAEAMIGILKAYLAGDKSVCRVVAVPSPEEEDARRVMRERGDLVHERTRIVSRIRGLLALQGIRSVKAIKGGDWSSQLDDMRTGDGRPLPPNLRRQIERCFGRLALLNDQIKDIERDRAEVVLHDESTFPCRDKAVRLEQLKGIGPNSAAMLVAEVFCRKFESRRHVAAFLGLAPAPFASGDVSRDQGISKAGNRSTRVQMVELAWCWLKYQPSSELTVWYRSRFKGNGARAAKVGIVALARKLLIALWRFVETGLVPQGAELRAA

SEQ ID NO: 126022 - protein, 344 aa, unidentified
MSELTRIGVDTSKAVFTLHGIDAAERPVLRINLRRAQMVPFFRKLRPTIVAMEACGSSHYWARELAALGHTVRLVPPQYVKPYVKRGKNDRNDAAAICEAAGRPGMHFVPAKSLEQQAGGMVLKARDTLVGQRTALINTMRGHAAEFGIVAAQGAAKVDVLLFAIEQQPDIPPEAREIFILLHQQITDINARIAELDAKLNASHKANPVSQRLATIPGVGPITALTLAIEIDPAQFESGRHLAAWTGLTPKEHSTGGKQRLGGISRAGNERLRCLLVAGATSVIQAASKPGSRQMTEWLRALLARKPRKLAATALANKMARIAWALMTSGQTYRRDATVGVVKA

SEQ ID NO: 126023 - protein, 317 aa, unidentified
MESKSAADRFVGVDVSKCWVDVHVRPDGIALHCDTDGDGLAELARRLKPLAPVVVVMEASGGYESIVAVSLAEAGLPVAIVNPRQVRRFAEAIGKLAKTDAIDAAVIAHFAQAVRPPARPLPDASIAQLQELLGRRRQLVVMVNAERQRLARAESAVMQRSHKAMLRSLEAERERIDRAIDKLVTASPIWCAKLDLLTSVPGIGDIVARTLLAELPELGSVDRHKIAALAGIAPFSRDSGRRKGKRFIRGGRVQVRAPLYMACLVAIRYNPQLRTFYQRLRQIGKPPKLAIVAAMRKLLTILNAMMRDSKPWRAVEA

SEQ ID NO: 126024 - protein, 374 aa, unidentified
MADYNEVFVGIDTSKLRNAVAVAEGGRNGEVRYYGEIENTEVATGKLVKKLAAQHRRLTFCYEAGPTGYGLYRLIKALGHECVVVAPSLIPKKPGDRVKTNRRDALNLAKLLRAGELTAVWVPDARHEAMRDLVRAREAAVDDLKSKRQQVLSLLLRLGRHFAGKRTWTRAHMNWLVSQKLAHREQRIAFEEMLLAVRQADERVIRLEKAIAAAVPDWSLAKVVMALMAVRGLDLISATIFLAEIGDLSRFASPRQLMAYLGLVPGEASTGDRVWRGGITKAGNHRARRILVECSWSYRHPPRVGKKKLAKVEAAPAAVQEIAWKAQARLTARYRALARRGKRPTLVVTAIARELSGFIWAVSRAVGAPATPAT

SEQ ID NO: 126025 - protein, 463 aa, unidentified
MRKAKKGARKKRGKSLQEIIEGLPPLNLNAAGIDVGNAEHTVAVPPGRDPQPVRTFGSFTADVHRMGRWLVACGVDTVVMQATGVYWVGLYQILEMYGLIVKVVNARYTKTLPGRKTDVQECQWLQKLHTFGLLNNSFLPNEETRVLRTYLRQRENLVAAAATCMQHIQKALTEMNVQLANVISDLSGVTGMAILRAMVSGERNPQRLAELKNQHIQASREEIARSLEGDWREELLFVVEQSLQMYDTYHQKIVACDGRIEAQLKSMDAKVDVVAQPIPEPRRVKWPRKHRPAYDLRGELYRVTGVDLTQIDGLDVGTIQTVISEVGVDMTPWKTEHHFSSWLGLSPDNRISGGKVLKRGTRKVVNRAATALRLAAWSLLRSQSALGANFRRLRARLGAPKAITAMAHKLARLIYRMLKYGKEYVDKGMAYYEEKHRQQQLKWLTKQAAALNLQLVPATAVAR

SEQ ID NO: 126026 - protein, 363 aa, unidentified
MIVIGADTHKATHTCAAVAAATGQLAGELTVAARKQGFAELLGWGRGLDAERVWAIEDCRHVSGALERFLVAAGERVVRVPPKLMGQSRRGERSAGKSDPIDALAVARAALREGPETLPAAHLDAAALELKLLLDHREDIVKARSADQQRLRWHLHDLWPELELPAGCLDRPAWLDRLARKLARAEQSARVRVARELVIEIRRRARRAIELEGEIAALVSRRAPELLELKGCGTLIAAKLVAETAGAARLGSDAKFARLAGVAPVPASSGKRLRHRLDRGGNRQLNCALHRIAVCQGRVHPPAREFLERKQAEGKSRREALRCLKRHLARRVWKLLIESEREISPTPVDSQRGTPAPHFVAAT

SEQ ID NO: 126027 - protein, 421 aa, unidentified
MNVFPVAGVDVSKRFSDMCILTPGNEVFDRVKVYHDTTSMDRALSLLQCAEQQFAAKPVIVMESTSHYHLILFQFFSDAGYEVIVVNPLQSNALKNINVRKIKTDKVDAYRLALLYRMNVLRRSQVPTEMLRSLRMLCRQHYELKGDITRYKNRLTALLDQTFPGFSKVFSDPAAAGALAVLEQYPTPGYILAATPSELARIVQKASHKSSEYGSRKAALLLDIAEQAARIGIHAPGDPVLMRAVITILRQLMESVNLIDRKIKSLAAQDDYIQKNVTLLQTIPGVGLFSAAVLLSEIGDFSLFRKPNQLAAYFGLDPSERQSGTIQSTRNKISKRGSPYVRAVLYMVAHNTVHTNCFGSVGNPVLAEFYQKKCRSKPSNVAICAVMHKLSNIIYAVLRDQAPFELRPPETHAKIICGKAA

SEQ ID NO: 126028 - protein, 343 aa, unidentified
MYFIGLDVHKKTISFCVKDAAGRVHQEGKIAATRRDLDCWVRTLPQPRTIAMEATMFTGWIYDHLLPHAEDVKVAHPLMLRAIAAAKKKNDRIDASKIADCLRCDFLPECHMAPTAIRDRRRVLRYRNLVVKQMVQMKNRVSGLLMETGVSHNKQRLHKVGYFGELMSTNADISDAVRPLLNLSRGMIRRSGKLEYDLVSSLERDPLLKERLRRLRTVPGVGSITALTWALEVGDYTRFSSHKQAISYCGLCADENSSADKMIRMPLSKQRNKHIQRVLIEAAKLAPRESPELAIVRARELERGNPNRATLAVARKMVCYMLAVERRQQDFVPAGECIPTAAA

SEQ ID NO: 126029 - protein, 312 aa, unidentified
MGTHWIGIDVAKPWLDVARRDGEDVVRYANTEASIAELLTRLRTEEPAGIVLEATGGYEQAVVRALWDAGLPVAVINPERARAFARALGARAKTDALDARMLAQFGSRMQPEPRPQPDETRTALDDLVTRRRQLQEMLTAEQLRRERAPARIRPGIEAHLDWLRQQLADLEREIAEVIAADRVLSAKARALRSIPGIGPVVAATLLGGVPELGTLSRQEVAALVGVAPINRDSGGRTGVRAIAGGRRAIRAPLYMAALAASRRGPFKPVYDRLIAAGKPPKVALVALMRKLVVVANALLRDGTTWSAQQTPV

SEQ ID NO: 126030 - protein, 352 aa, unidentified
MEKTTRRLRKAQATIGLDLGDKRHTFCVLDTGGEVVNKGSMRNERNELAKLASAYPGALVVMEAGMHSPWTSRFLDSLGMEVVVANPRKTRTISQSERKSDERDALVLARLGRADRNLLSPIVHGSEETQHDLLQVKLRDSLVRARVALVNSVRFTLKSLGYRVSNPSSERFHKLVVEELPESVRALIVHSVASIAELTARIKALEISIARLASEKYPQTIYLQQINGVGPITSLYLVLKIENPQRFTRTRNIGAFVGLGPKRDQSGETDKELRISKCGDRYLRRLLVSAAQHILGPFGTESALRDYGLRLAQDGTAKAKKRAVVAVARKLAVLLLTLWKSRQPYEPFPTMA

SEQ ID NO: 126031 - protein, 346 aa, unidentified
MKKIFIGIDFSKEKFDATVIKAEGVEERAERQHEVFDNKVSGFRRLLRWVKSVADEPDAGLWLFCGENTGGYSKALCNHLYGSGYDMWLENALSIKRSYALQRVKSDKADSGVIAEYAMRNYDQMRLYKPLGKNLERLREVFLYRHNLVKMKASMTVRKGEKKLTQEKSDISRFMAQSSKHLISEFNKKIAECDMRIDKIISEDKELRRNFEIITSVPGVGTQNAVCLMVYTDNFSRFDYDSRKIACYYGVAPFGRQSGTSVNTPPHVSPFANKLIKALLTQAALASVNFCPQMAVYYRRLVEAGKKKPVAVNNVKNKLLHVITAMVRNGAMYNPDHDYYAALKVA

SEQ ID NO: 126032 - protein, 395 aa, unidentified
MNKIVHYIGLDVHKETIAVSIAPQNSTEVRRYGIIGGTLDAVDKLVKKLAKEHTELRLVYEAGPCGFVLCRHLRNKGLHCEVIAPSLIPKKASDRVKTDRRDADQLARLYRAGELTAIHVPDQQDEAIRDLVRARTSAMTDQRQARNRLKGFLLRLGFRYTGKSSWNDAHKRYLSGLVMPQGPQQIAFQEYIHAINDATDRLERLAQAVQDALPGWKWEPVVRALMSLRGVQVLTAMTLVAEVGDFSRFDDPRSLMHFFGLTPSEHSSSDKRVQGGITRCGNAHCRRVLTEAAWHYRLKPKVSETIQKRQEGQSKQVRLIAWKAQERLHKRFHQLSAKKKSVVAATAVARELVGFVWAIACQVKPAEQPAAPEIIRTCRGKVYRLDPEKKFQKNK

SEQ ID NO: 126033 - protein, 356 aa, unidentified
MAKKSITHWQDIVEESNNGANIWVGVDVHKRSYSVAVLSANGVIHTYSTSSDNLALINQFKSRGIKVTRLVYEAGLTGFTLARACQQDGVPVMVVSPNKIPRPATSGAKTDAIDCIRLATLAGKGMLKPIAIPTVEQEEKRALVRRRTQLSQSIRVAKQRIKSLLTCHGLEEPSGLKHWSNSGRELLAKLPVSQRLRRTLDSLMRELDFLEREKKDLEAEIKQDILPQDDVLQTVPGIGPTIAAAFRAEVFAPERFTHGDQLSSFLGLAPCVRQSGEGKSRGRLMPAGQAHLRSLLIEACWILIRQEKWAADFYLRVKQRSGCFQRAISALARKLGVLLWRLLLENRAYQSNYGRN

SEQ ID NO: 126034 - protein, 320 aa, unidentified
MEANGYIGIDVAQEWLDIAARPNDDAWRVRNDEAGMTELTSQLVERAPRLVVLEATGGLETALAAALTMAALPFVIVNPRQVRDFARATGQLAKTDAIDARVLAQFGEAVGPEPRPLPEAVTRELAALMARRRQVVGMLTAEKNRLRSAARRVRRDIQQHIHWLERRLAGLDGDLGKTIRQHAQWQDRDRVLRSTPGIGPVSSGTLLANLPELGRLNRKEIAALVGVAPLNRDSGTLRGRRTCWGGRSHVRSALYMATLVGVRCNPVLRAFYERLLAAGKPKKVALTASMRKLLTILNAMARSNTSWQDPAPTLALQDSC

SEQ ID NO: 126035 - protein, 345 aa, unidentified
MKIVGCDLHTRYQQIAMLDQETGELVERRLEHANGEAKQFYESLSGSVRVGIEATGHTRWFERLLAELGHELWVGDAARIRAAEVRKQKTDARDAALLLELLLSGRFPRLWRPSSEDRDLRQLLWHRQQLVWMRTSIANQLHALAMGEGLCKKKQLFTKQGRAELEALNLDPWASRRRQELLRMLDQLDVSLKQFDEAVNEQAAQSAEAVRLMTHPGVGPVTSLAFVLMVGPVTRFQRSKQLVSYLGLNPREHSSGGKQKLGSISKQGNPMLRGLLVEAGHTAARLDPELRRDYQRLRLRRGGSVAKVAIARKLAVRMYWMLRRQENYTQLVRMQGSSRGTLVQS

SEQ ID NO: 126036 - protein, 403 aa, unidentified
MIFVGDDWAEDHHDVYLMDETGTRLAVRRLPEGLTGIRLLHELIGAHAEQPEQVVIGIETDRGLWVDALAAAGYQVYAVNPRAVTRYRDRHHISGAKSDASDAKLLADLVRTDRHNHRPIAGDSAGAEAIKVLARAHQRLIWTRTQHTSRLRSGLREYYPAALEAFEDLADRDALAVLDRAPTPEQAAALPLSAIRSALKRGGRQRNIDTRARAIQARLRTEQLAAPAPLTAAFAATTRAAVAIIVELNRQISELETSLAAHFETHPDADIYLSQPGLGVILSARVLGEFGDDPNRYTDAKSRKNYAGTSPLTIASGKKRAVLARHVRNNRLYDAIDHWAFCALLASPGARAFYDQHRAAGDTHHQALRALGNRLVGILHGCLRHHTPYNEHTAWAHRIPAAA

SEQ ID NO: 126037 - protein, 324 aa, unidentified
MNKSKHFLGIDISSNVFDVVDHEDKHTQYSNDLPGFKKFGKTLTEHSHCVMEVTGCYYQCLATWLYSKSIDVSVANALSVKRFIQMRLKSTKTDKADAKMIRLYAESEELKLWNPPEQYIIEATEIHSLIDMLIRQRTALMNKTHGVEAKGISVSVVSKAIKKQIRTLTREIDRLGVALEQLIKECQGDLLSRLCTIPGIGKKTAIFLIVLTHGFEKFENSKQLISYFGLNPTIRVSGTSIRGKSRISKTGNQNIRNLLFMCSFTACEHNKACKEIYGRLVAKGKSKKLALIAVANKLLKQSLAIAKSGLIYDENFRSVNPNFS

SEQ ID NO: 126038 - protein, 334 aa, unidentified
MEEVTTVGIDLAKNVFSLHGVDAAGKTVLRRTVRRDRLVQTVASLSPCLIGMEACSGAHEWGRRFQLHGHTVKLMAPKFVAPYRKSDKNDGNDAEAVCEAVTRPSMRFVPVKSVEQQALLTMHRVRQGFVVERTALINRLRGLLSEFGVVLPLRSVTVRRQAADAAEVLPELARRAIADLLEQLHLLDGRIDAYDKEIEAQARLSEPARRLMKIRGIGPTTALAIVASVGNAREFKNGRQFAAWIGLVPGQYSTGGKARLGHISKRGDAYLRNLLVQGARSVLQTAPAHQDRLSRWALELQERRGYYRTLVAIANKNARIAWALLAKNEQPHKN

SEQ ID NO: 126039 - protein, 376 aa, unidentified
MEHDSTVYVGLDVHKESITVAYAIGMGEVELLGKIGTTKADIDRLCKRLQSKGRCVRIVYEAGPCGYGLYRQLVEKGFDCMVCAPSLIPKKPGERVKTDRRDAIKLVRALRAGDLSAVYVPGVEDEAFRDLARAWVTAKDDLKQARQRLKSFLLLHGVRYTGSANWGPAHRRWLSEYSFGNEWQQLAFEEHRRTIEDRLAQCERLETALREAVPNWRFYPAVLGLQAMRGVQFTTAVGMLAELGDLSRFEHPRQLMAWLGVTPSEHSSGGKRRQGSITKTGNSYARKLLVEAAWSYRHPARVSPDIQRRHEGIPKAIIDRAWDAQLRLCRRYRKLAARGKNPNIATVAIARELAGFIWDITRLTMSLAVPRTAHAA

SEQ ID NO: 126040 - protein, 370 aa, unidentified
MSVRRILAKTIDTDLEYEAIGIDLAKNCVSAALLTTDGEVVCIDRLDYSELEKSAQALSSTTFAMEPCTEMNYLVQKLEAWGHRCLVIGGKNVQNYVENHFSGQKTDLNDAQALAFLAQDTQLRTIKAKDVEQQKYASLTTLREQYIKQYRQTIVSLKGICQAWGLNISKGISGKARLKDLIENHAAFPEELKESLVDMVTHAQTAQKALNKITKTLEELAKSDKVCQLIQTIPGLGSICSCRLRATVGDIKRFKSPKDFPAYYGLVPRSIATGHNERKGKITHRGDRTMRSLMVQAAGSLVNMATKGKLKSKQLTKWILKKQKEKMPWGKLVCAVAAKLLRIVRAVLISNKPYNSKIAGVAKCSLPKRS

SEQ ID NO: 126041 - protein, 379 aa, unidentified
MRKSIMYVGMDQHKESIEIATADEGRDGEVRRYGRIDGELDSLDRVVRKLVASGTELRFVYEAGPCGYHLYRYLRSRGLECKVVAPSLIPKKSSDLVKTDRRDAVNLARLERAGELTAVYVPQVEDEAMRDLSRAREDAKRAETRARQQLLALLLRHGLKYSGKTAWSQPHLRWLARIKLPQPAQQIAFQEYVEAISEAAARVERLTTQIRMLLPQWRMAPVVEALQALRGVSLVTAVIAVAEVGDLTRFTNPRQLMAYLGLVPSEHSSGSRRRLGAITKAGNSHLRRVLVESAWAYRLPARVTRIIRLRQEQLPKPVCDIAWRAQLRLCARYRRLTIKGKTKQVVVTAIARELVAFMWAIAVEVKVTSSWSAAKSNNR

SEQ ID NO: 126042 - protein, 366 aa, unidentified
MWMEAPVKRHRTSVGLDVHARSVVGCALDGDTGEVFQRRLSPDHREILEWLRSLPGWVAVTYEAGPTGFGLARFLIAAGIMCLVAAPSKLQRPAGDRVKTDARDAAHLARLLHLGQIVEVTVPTVSQEAARDLVRAREDCRGDLMTTRHRISKFLLRQGIVYYGGQAWTGKHELWLRGQHFDDPALTLTYESALDAMVTCVHHRDRLDAAIVAMAADSEFTPVVTRLCCLRGVCTLTAFGLATEIGDWDRLTGRTIGAYLGLVPTEYSSGATRSQGSITKTGNGHARRLLIEAAWHHRPGYRPSRDLRKRWDAAPVAVRERGHAANHRLHSRWAGFDARKKRPVIANAAIARELAGWCWSLAVMTD

SEQ ID NO: 126043 - protein, 341 aa, unidentified
MSIITVGIDLAKSVFAVHGVNDSGKAALVKPKVQRADLLPLIAQLPPCLIGMEGCSGAHHWARLFRQYGHTVKLMAPKFVAPYRMTGKRGKNDAADAAAICEAVTRPNMLFVPVKEEHQQIILCLHRTRQGFVEERTASYNRLRGLIAEFGIVLPQKVVCLRREIGAHLEELPGYANLCVGDLLAHADELDKKISEYDRAIAKAAREDARSKRLMQRPGIGPVTASALLASIGCGHDFSSGRQVAAWIGLVPGQYSSGGKARLGRITKAGDGYLRSLLVMGARAVLNSLGDKQDRFSRWARSLQERRGYWRAVIAIAAKNARLAWAVLKYGEDFKGEPGKD

SEQ ID NO: 126044 - protein, 402 aa, unidentified
MNSVGIDISKGRSTIAVMRPFGEVVISPFEVRHTDSELSELARQLKSLNGETRVVMEATGNYHAPVAKLLHDAGLYVSVVNAKLVHVYGNNDLRRVKTDRKDAVKLANYGLDRWLTLPRYVPEEDTRLLLKNCYRQYRQYSKVQTVLKNNLISLLDTVFPNVNRLFSSPVRGDGSEKWVDFVAEFWHCRCVSEKSQKAFTNKYQRWCRKHGYNFSEAKAHTIHAEACGHIDVIPKSETTKLLVEQAVSQLRATSTALAALKHEMQSLASMLPEYPVVMDMFGVGPTLGPQLIAEIGDVRRFYSKKALVAYAGLDAPPNDSGDVTGRHKSMSKIGASSLRRTLFLVMSVYLQTAPLDEPVYQFMDRKRAEGKPYRVYMMASANKFLRIYYATVKAYLESLEQV

SEQ ID NO: 126045 - protein, 405 aa, unidentified
MKQLPKLHYAGIDWATKTHAVCVVDQAGQIRARFQVPNTGKGLTGLIKRLGSLGVAVVAIERSDGPLVEAMLEADLRVVVVTPRQVKSLRSRYRASGAKSDPADAYLLADVLRTDGHRLAALTPDSEPTKILRALSRTRKDLVEARVALVNQLTSQLEGWVPGAIGLFHELHSPTAVAFLRRYPTGHAAAALTQATLAALLRRLHYSGRTPVSELLRRLQTAPAAGISPAEAAGRAVCVLALLDAIQVTSRQERELEAEIIERLEVHADQHIFTSLPRAGHGVRAAALLAELGDVRARFPTEEALAAQGGAAPVTITSGKRRVVKFRWACDKKLRAALLDFADDSRHASPWAAKIYAEAIQRTRHHPHAVRILARAWIRVIWRIWQDGVAYDPTKHRGAVRLLAT

SEQ ID NO: 126046 - protein, 346 aa, unidentified
MLYAGLDLSRKCLDFHLLDSAGATVEVGAAPPDADGLLGLTQRLDRHREPIHAAIESMNGARFVHDRLELAGWQVEIADAQKVKGLAPLACKTDRIDAWVLAELTRRDLVPAIWLPDPSVRAERERARWRLHLVRHRSSLKQRVHAVLLTHGKPCPVSDLFGVRGRRLLGRLGLPEPWQGTIEASLRLIDELDREIGDCERELRRLGADHRYVPLLLTVPGIGWVLAYTIAAEIGDISRFTAPRKLAGYTGLCPRVYQSGERDLRGPLAKQGPRYLRWALVEAATHACTAPVYRDRYQQTKARIGKQRGAKVAQIDLARRLSEAIWHMLSRGEPFAPKGATDPLAA

SEQ ID NO: 126047 - protein, 350 aa, unidentified
MQITTIGLDLAKSVFQVHGIDVSGRVVVVKALRRGQVLGFFAKLPPCLIGMEACSTAHHWARELAKLGHEVRLMPPAYVKPYVRRGKNDAADAAAICEAVTRPSMRFVPVKPIEQQAALMAHRSRDLLIRQRTQLINALRGHLAELGLVAAQGREGMTTLIARVTTDGAEALPPAVRAGLLPLVGQLEGLQQQIGGLEKVIHAQHRASEASRRLETIPGIGVIGATAIVATITDPGAFKTGRDLAAWIGLVPRQNSSGGKERLGGISKQGDRYLRKLLVVGAAAVLRHARAHPDKHPWLIQLLARRPAKVAIVALANKMARIAWAVLARGETYRTPALVANEAKGSAMAA

SEQ ID NO: 126048 - protein, 387 aa, unidentified
MYYVGIDIAKLNHFASVVSADGEVLVKPFKFTNDNDGFCKLLSALASYERNSLIIGLESTAHYADNLVEFLVSRRYQVCVINPIQTSTMRKNNIRKTKTDKVDTLVIARTLITQPHRFFSQEDIDLMHLKNLGRFRQKNIKERTRLKIQLTAYVDRVFPELQYFFKSGLHQKAVYALLKEAPTPELIASMHLTHLAHLLEVSSHGHFSKEQAKELRILARKSVGSSDRALSLQVTQSVEQIELLDRQIKDVESQMTEIMLGLDSVIMTIPGIGYVNGGMILGEIGDIHRFQKPCQLLAFAGLDPSVYQSGNFNASHTRMSKRGSRVLRYALINAAHNVVKNNATFKAYYDAKMAEGRTHYSALGHCAGKLVRVIFKMLTDDVAFNLE

SEQ ID NO: 126049 - protein, 419 aa, unidentified
MSFKILKNNCCGLDVHKTWIFACIGITDSNNRTEYKQARFSSFTKGLQELCDWLAKYSCNDVCMESTGKYWIPVFNVLEKNNIWVTLSHPKYTKPQKGNKTDRKDAKWICDLYMCGMVKPSFIPPADIRELRELVRYRFKLTCMITGEKNRVHNCLTVSNLKLDDVFPDIFGKSSRSITEQILQHPGETFDVTPFVDSRCKTPIEQIQAAVDGAVSAQQAVKLRQYLNHIDELEMHKAEIERKIFRLSDKYEDILTLIRTVPGFNKNPMTAIQVLSEIGGDMSVFPTAKNLASWAGCCPRNDQSNQKIKSTRISRAGSYFKSVLVQIANALVKSKKHPEFTTRYRRIKARRGHKKAIIAICRMILTAIWHILTDLKPYTPEGFLEPRPVNESKTLTTSQALNMLKQRGYIIKDEAVPVA

SEQ ID NO: 126050 - protein, 505 aa, unidentified
MAAPTTGHQPASSLPPTGQPAQAQAHRQAYNRRKTRAKVRSEAFRQREAAQVEALPVQHPHAAGIDIGSRSHWVCVGFTTDAASCLIREFPAHTAGLKAIAAFLREHQVTSIALESTGIYWVPLYELLQAEGFEVLLVDPSYSHQLRGRPKTDRRDCQWIYRLHSVGLLAAAFRPDEQTCQLRAYLRQRGNLVRQASRHVQHMQKALEQMNLKLTEVLSDITGKTGRAILRAILRGTRAPEKLARYRDKQCKASEAEMAQALTGTYREEHLFELKLAYEAWQFTLGQVDKVDGQVALQLGRMKGDRALPPLKPKARPKRRANSPRFDVRAALYYVVGLDLTEIEGVSALTALTVISEVGPGVSRFATVKKFCSWLGLCPNWQKTGGQIKSSRTRRGVNRAAQALRLAAQSLHHSQGALGGFLRRMKGRLGTQPALTATAHKLARIVYLALRHGLTYVRQTQEEYEAQMKEKQLKALRRKARQLGLEVVEKPSVSGAPAAAGPAQG

SEQ ID NO: 126051 - protein, 354 aa, unidentified
MTDPSMPDPDRLVTLGVDTHLDNHVAAVLDERGVLLDSMTLPTTPAGYQALLDWAAEFGTIDRVGLEGTGCYGAGLARWLRGAGLVVLEVDRPDRRARRQHGKSDPLDAEAAARAVQSGRATGLPKGGTGAVEAIRALRIARNSAMDARSRVTNQLHALRVTAPDALRDELRALSLSGLLRRASGFRLPAVIEEPSAATRMALRSLARRHQALSAEIAALDGHLRRLVSAAAPRLVARPGIGVHSAGQFLVTAGDNPARLRSDAAFGMLTGTSPVPASSGKTVRHRLNRAGDRQANCSLHMVVLSRMGHDERTKAYVRRRTSEGKTTKEIMRCLKRYVAREVYGLLLQSPGLTS

SEQ ID NO: 126052 - protein, 374 aa, unidentified
MFYLAIDQHSKQVTINLRNEEGEVCLRRQIGTKPERVKAFFEMLSEQTAADGGYVAIVEVCGFNDWLLALLAEPWTNCHEVVLVQPEKRSKQKTDRRDANKLGETLWVNRHRLLAGKPLQEVRRVLPPTAEEAADRQLTALRQRHVNRRTRVINKAWRIVQKHNLQHGRPTKGLQTKRARQWLLELELPPIDRLELDHLLAEWEMLEEHLESVNQQIEKRHRENDKAQLVSTIPGLAKYGGLAVASRVSQIERFPRGASLANFFGLAPGCRNSGNDDNNNGKITKRGSSMVRSVLGQVVLHVLRKDAWMRQWYRQVKKRRGSKVARVAVMRRLATILWSMLKHNMPYICGGPKEFRRALECRDTLQGKTMAAGA

SEQ ID NO: 126053 - protein, 455 aa, unidentified
MNRRPADSREGLPIVSAHAAGLDIGSEEIWACVPVGCAREPVRKFGTFTPDLYVLADWLTECGIETVAMESTGVYWIPVYEVLEARGFKVQVVNARQLHNVPGRKTDIQDCQWIQRLHSYGLLRGSFRPEGEMCALRAYLRHRAELLEHRAAHIQHMQKALQQMNIQLTQVLSDITGVTGLAIIRAIVAGERNVHKLAAMRDRRCAHGEQEIVKALTGNYRGEHLFALKQALALYDFYTTQVVECDAEVERQFANLQPATDDDLPPLDPHDKASTHSKNEPNYDARTYLYHLAGVDLVAISGLNGSTVQTIVSEVGLDMSRWPSEKHFCSWLGLAPHNDISGGQVLRSRTLKTRNRAGQAFRLAAQAVSHNSRTAYGAYFRHMRARIGPAQAIVATAHKIARAFYHMLKNHTPFHELSEEDYQKHARERELAQLHKKAAKLGFTLTPAPAFVPTT

SEQ ID NO: 126054 - protein, 411 aa, unidentified
MENIFPCCAGLDVHRDSVEACVRRIEPNGRWHQQTHHWGTMTRDLLAMADWMAAQGVTQVAMESTGVFWKPIYNILESRFTMLLVNARHLKQVPGRKSDVRDCQWIAQLLQYGLLKGSFIPPRSQRELRDLTRHRTQLVEQKTRTANRIHKVLQDTNIKLSSVATDVLGVSGRAMLEALITGEEDPVKLAHLAQRKLRSKIPELEKALEGHLTEHHRFMLQLLWKQLAQQEELIAELDRKIEEQTRPFAAEIDRLDAVPGVDRRVAEVVLAEVGADMKPFSAHENLASWAGMCPGNEESAGKRRRRRITPGNPWLKPTLAQAAWAASHTKNSYLASQYRRLAGHRGRKRALIAVGHSILVIFYHMLKTGTSYTDLGGDFFDRLQPERLTRYYVKRLERLGHKVTLESRAAA

SEQ ID NO: 126055 - protein, 403 aa, unidentified
MSFNGAPVMAATVVAVDVGKNKAALSVTDADRHRLFGPAEFAMTAPAVAAVLQRVCSVLPAAPVKVAVEAAGHYHRPLLGSGVWPTGWEVVELSPARVSEQRRVQGRRRVKTDAIDLEAITELVLAGHGVPVTARSATITELSGWAMHRGRRVQTRTATKNQLLAQLDRCFPGVTLALPDVLGTKVGRLVAAEFADPHRLATLGVARFIRFAANRGLRVRRSTADRLVAAARTALPAPEAVVARQVLADDLVLLACLDAQIAAAEAQIARLLPDTPFAPLMSVPGWGTVRAGNYGAAVGDPGRWPGARQLYRASGLSPAQYESAGKRRDGHISREGSVALRRALIDLGIGLWRADPAARRYGQQLRARGKKGGVIGCAMANRANKIAYAMVRDQSGYDPDRWA

SEQ ID NO: 126056 - protein, 374 aa, unidentified
MGQHSRAFVGIDTSKLRNAVAVAEEGRDGEVRYFGEIDTTEAATRKLVTKLAAKYRQLTFCYEAGPTGYGLYRLIGKLGHDCIVAAPSLIPKKPGDRVKTNRRDAVGLAKLLRAGELTAVWVPDERHEAMRDLSRAREAARKDLKGKRQQVSSFMLRLGRHYPGKKTWGPAHMKWLMLQKLEHREQRIVLEELLGAVRQESERVERLEQAIRDAVPEWSLAEVVTAVQAMRGIDLVAAVTVLAEIGDLSRFQTPRELMAYLGLVPSESSTGDTVNRGGITKAGNGRARRILVEAAWSYRYPPRVSREKQMKVAAAPRAVREIAWKAQMRLCGRFRSLTRKGKRPTVVATAIARELAAFIWAINREVVRSHAMAN

SEQ ID NO: 126057 - protein, 401 aa, unidentified
MSKKNTRNALDTSLSYAVIGLDLAKADCAVAAVPCSDDELGLIDRMDYESLFEQAEKLKPTLFAMEPCCGYSQISLRLQNMGHEVKVISGHAVKNWIATHKSNQKTDLNDATALAKLALYDHDLQPIRVKNVEECRIASVQAIRIQLRTQATKSLVCFKSLCQCWGIVIRRGSLNTKKMAEAVAAVEKLLGAEVASSLMILRDAYKFTMKQINALDKLLDALVEANEQARTMKTVLGIGTQTAARLAVTTGDIKRFPMPRSYVAYFGLAPRNIITGHSGTPNPSKRGALKPVSSRGQGKVSRRGDRVARSFIIQGAATIYMLYCKDMLPECQLRRWLHEQIKRGKPYGKIIVSLAAKLLRIVWALLTYGEKFDSHKAGVPRSVLAAMEKPLKHDAAAESAA

SEQ ID NO: 126058 - protein, 453 aa, unidentified
MEKFADVGGFASVDGVVLGVDTHLDLHVAVALDQLGRRLGALTVPTTTRGYERLLCWAEGFGPVGCAGIEGTSSYGAGLARYLKARGISVVEVERPKRRHRRRNSKSDPIDAEAAARAVLAGEAVGEPKSGDGRVEMIRTFRSARRSAVKARSQAANQLKALLVTAPEGLRQRLRGLSTKKLVATCARLRPGDDPDNIETATKFALRSVSRRHETLSKEITELDAQLERLVAETAPGVISLPAIGTHHAATLLIVAGDNPERLASEASFANLCGVSPIEASSGKVVRHRLNRGGNRDANRALHMICVVRMGSDRRTREYVARRTAEGKSKWEIVRCLKRYIAREVYRVLVCRLLRYRRRQGPIHKRRCGDKLGLTLDYKSVTLLPRRGVLGNWVAGYGRSRKLSGHKKQLSLKSRGKSVRRPPGSAVPEHSVEDNQQLAHTGHQRHLLRLAGG

SEQ ID NO: 126059 - protein, 319 aa, unidentified
MFVGIDVAKAELVVAIHPTNERWTVANDERGVRTLVERLRTVPPTLIVLEATGGYELLAVAALVAVALPVVVANPRQVRDFARGTGQLAKTDRLDADILATFAERVRPAVRPLPDAEAQELDALLTRRRQLLEMLGAERTRLGQVFGKGKRPVKKSLTAHLAYLERELKSTDHELGDLVRASPAWRERDDLLRSVPGVGPVLSRTLLADLPELGRLSRREIAKLVGVAPLSRDSGTLRGRRFVHGGRASVRAVLYMGALVATKRNAIIGAFYRRLVAAGKPKKLALVAWMRKLLTILNTIVWTRQPWCAEHIAPALATA

SEQ ID NO: 126060 - protein, 429 aa, unidentified
MQNESTPGARGPVFCGVDTHADSHWLCVLDWRGRKVLSRQFPADAAGYEALAGAIAAAGEPACVAMEGTSSYGAGLTRHLASLGMPVREALSPARMQRRRPGQGKCDESDAERAARAAMSGSRLGTPKSQDGWVDGVRCMLAARSGAVKARTSAINTARSLLTTAPEGLRSRFRGMGGPRLMEELPSVRAEGALGAALGALADLWAAARDAALDMERAIEASLEENCPALLAMYGCGPVSAAKLAVAAGDNPGRLRSEASFAAICGACPIPASSGKTVRHRLNRGGDRQANSALHEIARQRVMRDPETAEYAERARGRGKSDREVMRCLKRYVAREAYRALMRPHEIRRPEDASELVAARRAAKVSQVRAASILGTSEKYISMLERGQRELKPIRRAYEAWVEAGLPLDWDRQAFEAERKMDSKKHLAK

SEQ ID NO: 126061 - protein, 369 aa, unidentified
MKFVGIDLHTNRFTCCYLTDNSKEKQTETFDLDATGLRSFYSTINKDTYVLVEATINTFAFVSLFKDLVKEVIVANTYQLKSVGVPGKKTDKIDAYKLAEKLKAEVISGVQQIIPVTVPPKEIRDLRALFATYRALRKEIGQTKNRIHSLLKENLYPFTKEYIFGKKARKEIRNISSDYLLSFQINLLMDSLEHLEGSFDKLVDEINKAGASFMSQIEILTSMTGISVITAIAIIADVSDVSRFKNSKHFASYLRSAPRVESSNDKTIIKSTTKAGRKLSITLLSQSLNHFRDNNKELTRFYERTSIYKKKGIIRMALCRRVITQIYQMLKKQEYHYYYNPVLHVKKMSDYRKLLEKEHIIFQEFSKAA

SEQ ID NO: 126062 - protein, 366 aa, unidentified
MKKTSTVRVNRNKIFKGHKLTIGLDLGDRWSCYCVLDEAGEILLEQKVATTPEAMKQTFAKIPRSLIALETGTHSPWVSRLLTELGHQVIVAHAQKVQLISKSNRKDDRHDARTLARLARIDPELLGPVRHRSVQAQIHLTVIRARAELVSARTALVNGARGLVKSYGERLPKCGTQQVSRELAAALSTELRDVLEPLLKEIESLNERIKEYDERMEKIAKEVYPEVSLLKQVKGVGTQIALTYVLTIEDPHRFLKSREVGCFLGLKPGRRNSGESEPQKKISKAGDRYLRTMMVQGAHYILGPFGADSDLRRWGRKLSERGGKNAKKRAVVAVARKLAVLLHRLWVSGEVYEPLRNSQKAMRAVA

SEQ ID NO: 126063 - protein, 402 aa, unidentified
MNAVGIDVSKGKSMVAIMRPFGEIVSAPFEIKHTASGINSLVELINSVEGESRIVMEHTGRYYEALAHQLSEANLFVSAINPKLIKDFDNDSLRKVKSDKADAVKIARYTLDKWQNLKQYNVMDELRNQLKTMNRQFGFYIKHKTAMKNNLIGILDQTYPGVNTYFDSPARSDGSQKWVDFASTYWHVDCVRKMSLNAFIDHYQNWCKRKKYNFSQSKAEEIYGKAKELVPVLSKDAITKLIIKQAVDQLNSASTTVESLRTLMNETASKLPEYPVVMAMKGVGTSLGPQLIAEIGDVSRFTHKSAITAFAGVDPGVNESGSYEQKSVPTSKRGSSDLRKTLFQVMDVLIKTHPQDDPVYQFLDKKRAQGKPYYVYMTAGANKFLRIYYGRVKEYLASLPES

SEQ ID NO: 126064 - protein, 344 aa, unidentified
MANLNQFCNFTKIIGIDIAKSVFQIYSCDTQTGEITNVQVKRDKVLESFANCGKCLIGMEACGSSQYWARQLQALGHTVWLMDPKLVKPFVRHNKSDKADAEGIYHALVSGVRAVTVKTETERDIQTLLTMRALLVKQRTARINHVRGLLAEYGHVMPRNVNQFDTKVDECINSLEGDAVQLVINMMRDTVKSIRDDQDRIKTLQREISRLANQTRNAKHFLTVPGVGETIMAYMCVLLADPTQFSSARQFAAYLGLVPMHTGSGGKTVTTKIPGRCDKALRAVLVQGAHAVARSKCRTDWVKNILAKKPKKVAMVAIANRMARQCWAVASKGQDWRRMPVTAA

SEQ ID NO: 126065 - protein, 360 aa, unidentified
MDTNTSALASIGIDIGKEVFHIVGFGTNGKIAFRRKIKRLALVDTFKGLPSCVVGMEACLSAHFVSRALRQLGHQPRIIPSIYVKPFVKGQKNDYNDAEAIAEAALRPNLRTVREKTQDQLDLQALHRVRSRLVSRRTATINQIRAFLIEQGIAVRTGARALRNSLMAILENRQDEISPRMRGLIADLYEDWVGLDERIETIAGEIETIGEKEANCQRLMSVPGIGPLISTAVVAAIGTGEAFERGRDFGAWLGLVPRQYSTGGRSILGRISKRGSKYLRTLFIQAAKVILMRPHNWERFSFGAWLLNATPRLHRNKLATALANKLARRLRVGKRNLHFAAMVGAAMCSACLRGTHDRWP

SEQ ID NO: 126066 - protein, 349 aa, unidentified
MSQNLNSAVAVIGIDIGKNSFHVVGLDNRGAIVLRQKWSRGQIEARLANLPPCLIGMEACVGAHHLSRKLQALGHDARLMPAKYVRPYSKGQKNDFRDAEAIAEAVQRPTMKHVATKTVEQLDLQALHRVRERLVSQRTGIINQIRAFLLERGVAVRQGLRFLRAELPRILATPPDVLSPRIVRVISDLAEDWRRLDDRIDQLSSEIAVLARQDAGCERLMSVPGIGPIISSAMVAAIGTGDAFSKGRDFAAWLGLVPKQMSTGDRTILGKISKRGNRYLRVLFVQAAWVVLIKPMSWDRHGLKHWIEAAKKRLHRNVLAIALANKLARIAWGVLAGGRTFEASKLQIA

SEQ ID NO: 126067 - protein, 373 aa, unidentified
MNYSTVYVGMDVHKETFSLCCYTNEKEQAEYSQKVDGHYSKVLNYLEAMRFHYGDDAVFICGYEAGCLGFTLYHQLTSHNVKCVILAPPTMPKPAGKKKAKTDKRDAALIARCLAHRDYSPVHIPTEQDEQVKEYIRMRQDHKLALKKVKQQILAFCLRHNYRYDATKNHWTQAHLQWLRSLKPDGLYQEILSEYLSSYDQLTDKLERLDRRIEELAAQPEYQEKTQHMSCFLGIKTQTALSTLVEVGDFKRFASAQQFASYLGLTPGEDSSGGDQNRLGITKAGNSHIRTLLIETAQSYTRGQIGYKSKTLKARQYGNPADIITYADKANERLRRKYYRMVLNQGKKANVAKTAVARELACFIWGMMTGNTQ

SEQ ID NO: 126068 - protein, 408 aa, unidentified
MNPLFVGIDVSSKNNVAYLMKPDGSKHSSFSVQNNLGGAKLLSERIVSALGSMQLERVVIGLEATSIYGDSLVYALREDGRLGRFQRKIHVLNPKQVRKFKEAYSDLPKNDWVDAFVIADHLRFSRINREVYMDDYRYKALQTLTRARFDVIQNLTREKQRFANYLFLKCSGMAQDKDIQNTSATTIALMEHFETVDDLANADLEELTAFITETGRGKFADPDATAKAVRAAAKGSYRLPKTVNDTVNQAMAVSIASMRALKGQVKVLDKAIEQQFEIIPNTLTSIPGIGKVYSAGIIAEIGDIHRFDSQASVAKYAGLVWNRSQSGDFEAEHSRMIKSGNRYLRYYLLEAANSVRRCDSEFRRYYDLKFKEVNKYQHKRALALTARKLVRLVFRLLKDNRLYIPPEG

SEQ ID NO: 126069 - protein, 391 aa, unidentified
MLPTRLREQNESDKFLIKGDSMSVRRILAKTIDTDLEYEAIGIDLAKNCVSAALLTTDGEVICIDRLDYSELEKSAQTLSPTTFAMEPCTEMNYLVQKLEAWGHRCLIIGGKNVRDYIESHFSGQKTDLNDAQALAFLTQDTQLRTITAKDLEQQKYASLTTLREQYIKQYRQTIVSLKGICQAWGLNISKGISGKARLRELIENHTAFPKELREGLVDMVTHAQTTQKTLNRITKTLEELAKNDQICQLIQTIPGLGPICSCRLRATIGDIKRFKKPKDFPAYYGLVPRSIATGHNEKKGKITHRGDKTMRSLMVQGAGSVINMATKGKLKSRQLTKWVLKKQKEKMPWGKLVCAVAAKLLRIVRAVLNSGRPFNPKIAGVAKCSLPKVL

SEQ ID NO: 126070 - protein, 494 aa, unidentified
MVKSKRKSYKRRQHIQKVKGRRFTDEIRDLDLEKVLVVPIDGGKNSHKALVANYFGDILHDPFEFTNSTTGVKMFNNIIKSISSSIKAQKIIIGLEFTGHYYENLYRSLIRLGYDVAMINPSSVYSQRSGQLNWCKTDEIDLCAIGQVLIDNQATETSLPEGLYYNLRQLGRLHTDEIRKRARLKVQIRVLCDHIFPGLQKSEIFSDFWGKSSILLLENYPTPTSIIRLGTNRLGKFFKRYNTKLGLYTAERLVNLAKNSLSVKVKKVNLEAHLLNLKFKIADLKMANEKIRRLNIELARYLVQTPGILLLSIKGINVPSAAKFLAEVGPLKQAGNAKKVIARAGLNPSRFQSSEYERADSPITKHGSNHLRSISLTISQDLIGLNPHSSLPYNPYFRGFFDHLIEEGKDKMLAKVACANKFIRVSWAMMVGRKFFSPPTWKKNKASDDPLAKLKKFLSLNKAKELFKDLANIAKEQMPSNYHSHLYEEQNSLN

SEQ ID NO: 126071 - protein, 391 aa, unidentified
MDKVWAGIDAGKELHWAHVLDASGQGIFSRSVRNDEADLSGLIDEVLALAEEAVWAVDQPGGSAALLLALLWEREQRVLYLPGLAVDRARDAYPGESKTDARDAYIIAEQARVRSNLAQIVPGEDALAELQLLLARRRDLVADRTRSINRLRDVLLSLFPALERALDLSAKGALILVRHYQTPSAIRRVGHRRLATFLKNRGVKGAEDIARKAITAAKAQSVSLPAEDVAATICAELAEETLALKESIDNLDRELGQRFFARPEARILASLPGMGPILGSEFLVSVGDLSAFESADQLAAYAGLVPAAQDSGKRVGNNRRMRGGNKVLKRVFYQSAFASLRGSPHSRAFYDRKRREGKKHTQALIALARRRVNVLWAMLRDETTFEARPAA

SEQ ID NO: 126072 - protein, 365 aa, unidentified
MNQITNGSIEQEGTERKGNWVLKLGLDVHYRQVTVAMQEGDGRIKAVGKMGHDAFGNWVEKKLKAGFEIYSCYEAGASGYWLHRDLAELGVKNLVIAPKAMGQDKRQKTDRRDSTQLCDALDRYLRGTRTALSPVAVPTAEQEEKRALIRYHRQIMADRSRCEARGKGLLCAQGIEVGGKWWQPKTWKELKTHPRFKSWMEQALQAWRSKLLAAEAEQQELRRQVEALAPALLPKGVGAYSAVALEYETKGLARFKHAGQISSYTGLCPGIYSSDGRAKEGSINRCGNAAVRWNLVEMVWRLLKWQPYYRPVRQLAAELVKSKRAKKRLVVKAARHLAIDLWRLQTGRSTPEALGLIMQPTAKAK

SEQ ID NO: 126073 - protein, 357 aa, unidentified
MIVVGVDCHKKTHTAVGLDRATGECKGELTVKARDGGHQRLLEWARSIDPEITFALEDCRHVSGRLERHLVVSGETVLRVPPKLMAGARRSSRTRGKSDPIDAEAVARAAIREPGLPVARLDGIERDVRLLVDHREVLVNERTRAQCKLLWLVHGIDPEISVRPKGLDSYCHLDRLEEHLAALDQTVEVRIARRLLVRCRELTREVNALEREITSLVRTLVPELLAVPGCGPLTAGKILGEVAGVTRFSSEAKLALHAGVAPLEVSSGERRRHRLNRTGNRQLNTSLHRIAVTQVRMHDRAKIYIARRMSEGLTKREALRCLKRHLAKIVYRRLGEAERRRREASCPSTDTVAVAAA

SEQ ID NO: 126074 - protein, 411 aa, unidentified
MDKVYDICCGIDVHKKLIVACLRNGNKNAIREFGATTRELLSLADWLKESDCKMIAMESTASYWKPLYNILESSGLNAMVVNAHHMKAVPGRKTDVKDAEWIADLLQHGLLQASYIPDKDQRELRELVRYRKSLTGERSRELNRLQKMLEGANIKLSGTVRDINGKSARNLLESLITGERFDEAKFDEMYSKKVIAHNLKASREQIIDDLNGVMSPLQRRMMKELLVHLDELNAHIKNLDDEIDNFMKPEEKKASEAIQSIPGIGNTSAQAVVSVIGTNMNRFPTDSHIASWAGLCPGDHESAKKRKSGKTRKGNALLRSTLVTCAHSAVRNKQSYFYAQFMRISAHRGKKRAYVAVAHSMLIAIYHILKDGMVFKDLGADYYNQFNKERKINAYLKKLKALGWEAPVVAA

SEQ ID NO: 126075 - protein, 355 aa, unidentified
MNSEKYIGLDVHQATISVAVMDSMGKLIMESILETKAATILEFVAGLRGTLSVTFEEGTWAAWLYDLLKPHVDELVVCNPRKNALLKDGNKSDRIDARKLADRLRLNDLKPVYHGETGMRMLRELARSYLNLVKDQTRVMNRLKAMYRSWAIPCAGRDVYYARHRAEWLGKIREAGVRRRAEHLYQQLDMLQHLRQQARRELLAESRQHPITAKLRQIPSLGPIRSALAVALIRTPHRFRTRRQLWAYSGLALETRTSGEYRCVEGQIRRSKKQISIRGLNKDHNHDLKGLFKGAAIRASVQPGPFQDFYQRSLAKGIKPTMVRLTLARKIAAITLTLWKKGENFDAEKLKSQAA

SEQ ID NO: 126076 - protein, 284 aa, unidentified
MRFYTNQHRHYCGIDLHTKTMYVCILDRDGQVLVHKNLPSNPEAFLEVVAPYRDDLVVAVECIFTWYWLADLCAAEGIPFVLGHALYMKAIHGGKAKNDKIDALKIAMLLRSGMLPQAYVYPAGMRATRDLLRRRLHLVRKRGQLLAHIQMTNQQYNLPAFAKRIAYPSNREGVADHFEDRVVRKSVAVDLALLDRYDTLLTDLESYLVRQAKQHDPQAFQLLRSIPGIGKVLALTILYEIHDVHRFDRVQQFASYARLVKCAKESAGKKHGTSGAKMGNVHLK

SEQ ID NO: 126077 - protein, 390 aa, unidentified
MKCFVGLDVSSTKLDVCIMLNDTSTPVTASLSNDLSGATEIKNHILDLNHTYHFERIVIGMEATSLYSFHPAMFFHEDSQLKELHVEIMVEQPNKIKKYRDAFEENKNDTIDAFYIADYFRIERFSPSFLKEEKYMALQHLTRTRLQIIEQLTRTKQHFIENIYYKCNTLAYQFKKEELSTNLWSSTMMTLITDEMTLDELANMPLQELADWLQQLGKGHFKDSEKLAQTIQAAIRGSYRLSKLQQDSVNVILGLLAREIRNLEKMIKEIDKAIEDMVETIPEYQCLTSIPGVGKVYAAGIIAEIGQIERFKDHPQVAKFAGLNWREKQSGNSNSQHTSLVNRGNRYLRYYLVEAANSVRRYDDEYKDFYKKKYHEVPKHQHKRAIVLNR

SEQ ID NO: 126078 - protein, 349 aa, unidentified
MIARPDAACFVGIDLHKDTLTACVLRGRDREVSYVKLACKCRDQIRSFFASLPQPSAVAIETVGFYRWLWTELEPLAGQLVLCDARGARALAGRRIKTDREDALNVALLLADGRLPLAWAPPENVQLLRNWTRHRNGLTRQHAKVLHHVKSTLNRLNFPGPVRLDAAALQRYLLAGVERFSADDLTMLWQHQRRLIEIEQDRAQSERRISELMRAPEFARIREIIESVPGVGLVTAATVIAEIGDFSRFPDSKAIGRYAGLAPTVYASGNSSRLGHISKTGAPDLRWVLQQAAWTAIRCDAGFKKTWLRIAKTAGKKAAAVAIARKILVLMWTLVRKDEPYKSREPIAA

SEQ ID NO: 126079 - protein, 346 aa, unidentified
MSAIDAANGAVAEQSLPTDPSAIAAALDELAPQTIEHIAVEASATAVHLVRELRARGYPILVCETRQVSRYLRVRVNKTDTNDARGLAEIAKMGLSKISNVHVKSSAIQRVRSQLMFRHKLNLHRVACEGMIRSLIRLHGGKVKTALRTATFKRNVETALEQMMTDLNVDLSEEILPLLSLSLSLRAFLATLLDRLTSWAEAHPVCSRFMEIPGVGAICAISFYSAIEDPDRFDRSEDVGAYLGLTPLVLQSGKSLRHAGISKRGNKLTRSHLTMAASVILLRSRPSPLRAWGLALSARAGPGKARVALARKLAVLMLALWKSGERYDPEFGVERRPKDAMISDGG

SEQ ID NO: 126080 - protein, 341 aa, unidentified
MENCGIDLHQKSSQVTVVDQEGETLERATIPTTRVGLERWFGRRERMRILLEASGSSPWVVRVLRELGHEVGVVDPRRVRMIAESTLKTDRIDADTLAELARLRTRLRTLVWQRSELTQRQRGHLRVRRALVEARARFIVTVRGLLRSFGARVASCRSDRFAARCEATVIPTELAEVIAPLLAAIRELDARIAAMDAVVETVGRGYPAVESFQAIPGVGPVVALAYVLSLEDPTRFRHSRDVPGYLGLRPSLRASSEVVRRGRITKQGDPDVRRLLVQAAHALLRSHVDSALKRWAESLVPRIGKRKTIVALARKLAVLMHRLWITGEVYQPFPRDVAEAA

SEQ ID NO: 126081 - protein, 369 aa, unidentified
MKQRLLYVGLDVHKKTTDVAIANGRSNGKVRSYGKIASTLDALNKLIKKLQDGDKELRFVYEAGPCGYQIYRHLDAKGIYCSVVAPSMIPRRSGDRIKTDRRDAINLVRLFRAGELTSIYVPTVEDEAIRDLIRCRDDMKRFERKARQRLLSFLLRHGYQYSGKRNWTKGFYNWLATVGFSHSAQQVTLQEYLDATNECGERIKRITQQIQVHVEEWSRAPFVKAYQAMRGVSLIVSTTVAAEIGDMRRFQNPKQLMAYLGLIPSEHSSGKTVRRGPITKTGNSHVRRVLIEAAWTYKMQARVSSILLKRQKGLPKNICEISWKAQTRLCARYRRLYARGKSRQTVVTAIARELSAFIWAIDRQVQLTL

SEQ ID NO: 126082 - protein, 370 aa, unidentified
MNEDIKFFVGLDVHKDTIAVAVAEAGRAPARLVGTITHDVNRLLKMLARYGEPAQVQPVYEAGPTGYGLQRVLARRGYQAQVIAPSLIPKRAGDRVKTDRRDSLRLAELARAGELRAVWIPDPADEAIRDLARAREDAVNARTQVRQQLKGFLLRHDVRYAGRTSWSKTYYRWLATLRFAEAGAQTAFTDYWQAVSAADERVGRLTTALVESTAGWRFESIVAALQALRGIDQISAIGLVAEIGDIGRFAHPRQLMSYLGLVPSEASTGERVIRGSITKTGNAHARRLLTEAAWNYRFQPRIGIRAQRRAEDLPQAIRNVAWKAQLRLSGRFRRLRARGVHLNKVCTAVARELAGFVWAVARARTELPQS

SEQ ID NO: 126083 - protein, 333 aa, unidentified
MVYAAIDIHKRVFQAAVLDAETGELVQARLPATREALADWATRWAGKLEAVALEATTGWRWVWRELSSRGFEVRLCDPGQARALRGSKRRPKTDRLDAAWLARLLAKEMLPTCWLPPDDIQYLRDRTRLRRALAQDRMRFAQRLHALLTHEGWPCSRGRLLSVSGQRWARSLALPPAALANVEAMFALIAVLDEQLAVIDAELRQRARSDPRLKALCTIFGVGPVLAAHILAEVGQADRFRRARQVVRVAGLDPVVSESAETRRRGKLSKQGSPELRWALVEAAHHACQRRSPDHSLYLAGKERSGSKRAALTVARKIARRAHHVLAELEQAA

SEQ ID NO: 126084 - protein, 338 aa, unidentified
MALYCGIDLHSTNCWISIIDEERKVVREKKLGNDLAAILEFLDPHRTEIEGIAVESTFNWYWLVDGLAEAGYQMHLTNTWAIKQYEGLKYADDRHDARWLAHLLSLGILPEGYIYPKEERALRDLLRRRAFLVHKRTSFLLSMRGAFECRTGMRTTSNDIKHWTPADVEQHIDDPLAALGITCLLEPMAALNDQIRILEKEALKRGNLRDDFKRLQTVWGIGKVLGLTIMYEVGDIGRFDKVGNFASYCRLVKSDRLSNGKRKGSGNSKNGNPYLSWAYSEAAHFSVRHHEQARKFVQRKRAKTNGIVAIRALAHKLARASYYIMKDRVDFDPDRAFG

SEQ ID NO: 126085 - protein, 344 aa, unidentified
MDHFAGLDVSVKETSICIVDDTGRIVREVKVASEPEALLAVLKNPAYHFKQIGLEAGPLSQWLYGALAEAELPVVCVETRHMRAVLKAQINKTDRNDARGMAQMTRVGLYRPVHVKTLRSQQLRMLLTHRKLLQSKAIAIENDLRATLRNFGLKVGMVGTVKFEARIKELVENLPDLSVLVEPLLTVRRVLREQTAILHRRLLAIVRDDDVCRRLMTIPGIGPVVALTYRATVDVPARFKNSKAVGAAFGLTPSKYQSGESDRTGRISRCGDDMMRSMLYEAAQSLLFRSAKWSWLKAWAMKIARHRGMKKAIVALARRLAVIMHRIWVDGTEFRWTREEAAAA

SEQ ID NO: 126086 - protein, 355 aa, unidentified
MNQTTAQSNSTEHWVGLDVSKQTFDAAVMRCGQRVGITPLSVLPARSFARTPEGVDAFVGWLEDLFADAENEIGVRCVMEATGRYSTELSVWLVERRATLAPAIEPPRQTAAFMESLGIRTMTDQVAARALAAYGMERQPEAYQAASPVELELREVCRYRHSLVEQRTALLNQADECSLGRFVARNQAKRIALLDGDIKRAEAEMRRLVKECKELQGDIALLDSVYGVGFVTAVTVRVELGDLRRFTRARQLNAFAGLNPSFHHSGTSVRGRARMCKRGNARARHALYMSAITIIRGDNDLQRSYTRLIQNGKTKMAAIGAVMRKTLCVMRAILISGKPYNRNWKTRGKLVHAHA

SEQ ID NO: 126087 - protein, 394 aa, unidentified
MILVGIDIGKKQHIFSIIDKQTGEILSNPFVFNNNQDGFLLLIGKLSSYAKSQLLIGMEDTGHYHFALLKYLLDRRYTVALINPTTTDLTRKLQGGITKNDPLDSLTICDVIGSNQRKKPYRITTVNRFDLYEQKQLTRHHHNLKEELNIYKNRLQKCIDIVFPEFNSLFRSKYGIVYMNVLKRFASAEKIANSDIRTIRKCFEYEGRGKRIQLSAEQLKTTAKDSVGISSVAEEIQIRHIVCQIEMIEEQLSEIDKKIEEFSLQNNSPILSIPGISHFSGTSILAELGDICNYTKASQIIKFAGVAPYHYESSQFIAQHTAITKKGSRYLRKTLYQIILPVINHNRVFTVYYHKKLAEGKSHRCAQGHCIRKLLRVIYHLLSTGQTFDPALLI

SEQ ID NO: 126088 - protein, 366 aa, unidentified
MKKNSTVANSGKQIFTGKKLTVGLDLGDRWSFYCVMDETGQVILERKLSTTPEAMKQTFGKIPRSLMALETGTHSPWVSRLLIELGHEVIVAHAQKVQWITKSSRKDDRHDARTLARLARVDPELLGPVRHRSVQAQLHLTVIRARAELVSARTALVNAARGLVKSYGQRLPKCGTYQVSRELATALSAELRDVLEPLLQAIESLNERIKEYDERMEKLAQDVYPEVSLLKQVKGVGTQIALTYVLTIEDPYRFAKSREVGCFLGLRPGRRNSGESEPQKGISKEGDRYLRTMMVQGAHYILGPFGEDSDLRRWGLKLAERGGKNAKKRAVVAVARKLAVLLHRLWVGGEVYEPLRNSQKAMRAVA

SEQ ID NO: 126089 - protein, 439 aa, unidentified
MHRQKSKAIRSKSVNLQGLPVIHPDAAGIDVGAKEHVVAVPCDRDPQPVRTFQAFTPELHELARWLKRCGIKTVALESTGIYWISLYEVLEQYGFEIRVVNARHVKHVPGRSKTDVLDCQWIQKLHSFGLLNGSFRPDQQIRTLRTYMRLRDNLVGSRTQAVHHMQKALFEMNVQLTNVISDITGETGLHIVQAIIAGERDPKQLAALCSSRIKAPRETVAKSLHGNWDQALLHCLKSALESYQFIERQMQECDLCVHRELAQMESRAPLPKPALTLKAQLHRVCGVDLTKIPGIKEQAAQVIISEVGLDMTKWDTEKQFSSFLGLCPDNSISGGKVLRRSTRKVYNRAADTLRLCAQSLTHSKSALGAKYRRLRARLGAPKAVVAMAHHLARLVYRMLRYGQSYVEKGIHQYELKFRLQRIKWLRKEAKSLNLQLLPA

SEQ ID NO: 126090 - protein, 313 aa, unidentified
MPSPMDFGVDVAKDTLQIASARSPTQLSLSNRRSSISAWLAKLPRGSRLAMEATGRHHLLLAELAHAAGMIVYVLNPCDLRHYARAVGLRGKTDRVDARLIARYLLREQAELHPYVPPTPVQREIDQLLRRRATLVNTKTRLQLSLRGMASYAADLRRVLKRLEALIAKFDQRLRQLATHQADAQRRVESTLGIGPLLGVALTNTFERVPLHNGDAAVAFVGFDPRAKDSGQFKGRRRLSKRGPAELRRLLFNGARSASKTKLWHPLYERYRNRGLSATEATVILARKLLRIAFSIYRHGTTFDPARLRSCLT

SEQ ID NO: 126091 - protein, 393 aa, unidentified
MVVSVGIDVSKNKHDFFIVSSEGEVLADVFTIPNNMDGFYALLEKIRACTTPQDKIKVGLEATGHYSYNILGFLLDNGLATYVLNPLRTNLYRKSLSLRKTKTDRVDARTIAAMLLSDVGLKPYTNTAYHNEELKSLTRYRFDKVKERAKLKSSISRLVCILFPELEKLVSSLHLATVYALLEEFPGSKQIAKAHLTRLKTLLGNASKGRYGRDMAVTIRSAAQNSVGSCMPAKSLELQHTIRLIRELDAEIAEIEAEIETMMDKIQSPITTLPGMGFRMAAMILAEIGDFSRFESPDKLLAYAGMSPSTYQSGQLKNCYPHMEKRGSRYLRYALYNAAKYVCHWDPTFAVYLAKKRDEGKHYNVALSHATKKLVRLLFALERSRQPYCSLAA

SEQ ID NO: 126092 - protein, 290 aa, unidentified
MSDGVLIAVDPHKAHNTLVVLDPASRAVLDEAEFANSGPGYQELVRFVRQWRSRRWAVEGCHGAGRSLAQQLVAGGEPVVDVPAKLAARVRVFSRGHGRKTDRDDAVSIGLAALEAAGVQAVTADDALVALRLLCDRRDELVAARTQAVCRLHRLLAELTPGGLRRELTTGKAAAVLAGVRPRDVAGKIRRQLAVQHLSGIRALDRKIAAVRAQITVMVEDSGTGLGRLFGIGPVIAGRILAEVGDIRRFPSKDHFATYNGTAPLDVSSGEQVRPGYHGQATGASTTPST

SEQ ID NO: 126093 - protein, 378 aa, unidentified
MGGDSTVVGLDTHKAAIHVAMLLPDAIQPVQWQIANEPAAVRHLARKLRRAAEGEVRCCYEAGPCGYALQRQLEAAGVSCTVVAPSLIPVKPGERIKTDRRDARKLAELFRAGLLTAVAPPTAAEEAVRDLCRAREDAVEDRLRARHRLGKFLLRRGLIWRGGKKAWTQRYRDWVRGLRFEDAADQAVVATYLLAIEQVEERVRTLEGQLEAVAQAEPYRERVGWLRCFRGIDTVTAVTLLAELHGFQRFTTPRALMAYLGLVPSEHSSGEAQHRGGITKAGNLHARRLLIEAAWHYRHPPAIGKALRRRRQGQPARLLAVADRAQQRLHRRFSRLSARGKMANKVVVAVARELVGFIWAALTPAAAVRTPRRAARTA

SEQ ID NO: 126094 - protein, 286 aa, unidentified
MEHELHYIGIDTAKEKLDVDVLRPDGRHRTKKFANTTKGHDELVSWLKGHKIDHAHICIEATGTYMEPVAECLYDAGYIVSVINPALGKAFAQSEGLRNKTDTVDARMLAEFCRQKRPAAWEAPHPLERALRALVVRHQALTDMHTQELNRTETAREVQRPSIDAHLLWLEAELKRLEKQIKDLTDDDPDMKHRRKLLESIPGIGEKTSAVLLAYIGLKDRFAHARQFAAFAGLTPRRYESGSSVRGASRMSKAGHVSLRRALYMPAMVATSKTEWGTGVPRPSGG

SEQ ID NO: 126095 - protein, 355 aa, unidentified
MSQEKYIGMDVHQATISVAVMDAGGKLIMECLLETKAATIVDFVRGLHGTLSLTFEEGTSAAWLHDLLKPHVSRLVVCDPRKNALLKDGNKSDRIDARKLAELLRGDQLHPVYHGEHGVRTLKELGRSYLTITQDVTRIMNRIKALYRSWAIPCAGATVYSPRHRAEWLAKIAEPGVRVRAERLYQQLDLLQPVRLEAMRELLAESHKHSAVKLLRQIPSIGPIRSALLVALLQTPHRFRTKRQLWAYSGFAVQTHDSGEYRSVRGKLQRNRERMSVRGLNDNHNRDLKSLFKSAAISASTRPGPLRDFYVARVEKGMRPTMARLTLARKMAAISLTVWKKGVEFDPKQLQRQAA

SEQ ID NO: 126096 - protein, 347 aa, unidentified
MNITTIGFDLAKNVFQVHGVNEHSKAVLRKTLKRAEVMSFFAKLQPCLIGMEACGSAHFWARKLGELGHMVKLMAPQFVKPYVKTNKNDARDAEAICEAVARPNMRFVPLKTVEQQGLLALHRARQGFVAARTGQANQIRGLLAEFGIVIPKGIRNLERRMPEILEDAENGLRATSRELFNRLFGHFRVLDRQVSELELQIKAWHLESTESLRLEAIPGIGPITASALVASIGDARTFKNGRQLAAWLGLVPRQDSSGGKERLLRISKRGDTYLRTLLIHGARSVLLRLKCHAEQAEGWLARLARRRNPNIAAVALANKNARIVWALLAHERDYQAGYVSARSEAAA

SEQ ID NO: 126097 - protein, 340 aa, unidentified
MSKESVSSHVTVYAGIDVSAATLAVAVQREDRTGFEQRQLANSAMGHKQLIGWLLKCGGIVRVSLEATGIYSLDVALALDLAENIEVAVLNPKIANRFAQTLRRSKTDPADAVALAEYSRRMPFVAWQRPGRIELELRAISRHIVTLTDEHTRLSNRLHAAEASDTTPRCVRQDLKHSIDALKKRIVRLRKAALALVEQNETLAMKFKQLIEIPGIAEASALQLLGELAPLDPQMTARQWVAHSGLDPAHQVSGSSVHKPSRISRHGNRYLRRALYMPALVGVRFDPHMKAFYLQLQVRHKTKLQALMAVARKLLHAIYGIFKSRTPYDGRKLFPQLDAA

SEQ ID NO: 126098 - protein, 360 aa, unidentified
MTTSIPSKTTVSYDSVKLGIDAHAKYYWVSRQLDGATPQPVQKMTYDELLLFVVKQQKLTPNLVTCYEAGAFGFHLHRTFEQLGIKNYVVQPQDWDERGKGVKNDRLDAAALCQRLDRYQRGNTKAFSTVRVPSEDQERERAISRQRQQLMRERQRISAMGRSLLATHNIHVTGKWWKGKTWTVVQKLAPAWVVERLEVFIIILKPLEEQELKLMHQLQEAAQEQKIPRGVGPLTFEILRREVGDWGRFNNRRQVSSYTGLCPREHSSGGKRRSGSVSKSGNPRVRAMLVEMVWRMMRWQPEYKPLRKWAHVLYSLTPNAAAKKKAVVAIARQLAVDLWRIFTGQCKAETYGLIYLPEAA

SEQ ID NO: 126099 - protein, 340 aa, unidentified
MQVSTIGLDIAKNVFQVHGIDSEGRTVLSRKVRRERLVKVFECLEPCLVGMEACATAHHWARQLTALGHQVKLMPPAYVKAYVKRNKNDAADAEAICEAVRRPTMRFVPIKSADAQSVLMLHRARYLLVRQRTAQVSAMRAHLAEYGVVAPKGIAHVRDLLTVLQAGAPMLPELARQTLLVIAQMISALSLQIRKIEVELLAWHRTSAVSRRLESIPGIGFITATALAATVGDARTFRSGRQFAAWLGLVPRQNSSGGKERMGGISKMGDRYLRHLLVVGATAIVRYTRRKATAVSIWANRLLERKPARLVTVAVANKMARIAWAVMARQEAYRAAPTAA

SEQ ID NO: 126100 - protein, 453 aa, unidentified
MRPRRPAQKPVRQRPAAIRVDAAGIDIGARLIHVAVPADRDPRPVREFQTFTQDLYALADWLEFCGIRTVAMESTGVFWIPLFQMLDARGLEVCLVNARHVKHVPGRNTDIADCQWLQYLHAVGLLTASFRPAQRICGLRSLLRHRESLIQSAAAHVQRMQKALDQMNLQLHHVISDLTGVTGLAIIDAIVAGERDPTTLAALRNWRVRASAETMTKALVGDYRPEHVFTLRQSLSAYRYYQQLVADCDVEIERHLTALPAAHPGAASSPAPIARRKRRGNEPHFDLRTHLHRIFGVDLTTIPGIDVLTVHTLLTEIGPDLSKFPTPDAFASWLGLCPDNRISGGKVLSVKTRRVKNRAALALRMSAQAVQGSRAALGAYYRRMRAKLGGPKAITATAHKLARVVYHLIATGHSYDESVFLKYEARHRDRLQKRLHAQATALGFTLVPTSVVP

SEQ ID NO: 126101 - protein, 347 aa, unidentified
MRFYNNQHPFYCGIDLHARSMYVCIVNHDGEIVLHRNMKAAPEPFLNAIAPYRDGLVVAVECIFTWYWLADLCAHEGIAFVLGHALYMKAIHGGKAKNDKIDSQKIAALLRGGMLPQAYVYPAEMRATRDLLRRRTHLMRKRAELLAHVQNTNSQYNLPEIGKKIAYKANRDGVAERFDDPAVQKTIEVDLALITYYDALLTDLELVIVKTAKQHNAHTFYRLRSIPGVGKILALVLLYEIHDIHRFPSVQDFVSYCRLVKCARESAGKRYGTSGKKIGNAHLKWAFSEAAVLFLRNNPAGQQHLARLENKHGKGKALTILAHKLARAVYYMLKRDTVFDMDKFLHG

SEQ ID NO: 126102 - protein, 506 aa, unidentified
MKVQASKPTFTIGYYPIGQYGSNICRQDIGRRRPYRSLLRQRYWAWSFTSKLITMAKVAKRKQTSKGLRLEVVNPNAAGIDISPKEMQVCVPSDRDGECNRTFGVYTEDLHYIAEWLKACCIDTVAMESTGIYWLPVFRILKESGFDVILVNASDVKNFSGRKTDASDAEWLMMLHSYGLLKPCFQPENIARTMRNLVRHRDNLIRSASREVLHLQKAMEQMNLKLDNVFSDILGKSGQSVIKAILNGERDPKVLADLADPRCRTSKEEIEKSLQATWDEEHLFEMRQSDSLYQFYQQLIAECDAKINEIAMQYSATVDAPKTELLRSGKYNAKKNRIGFDVEKVAFELWGVNVMRIPGMSRGALLRLVGELGADFTTKFVDVKHFVSWANLVPNNKISGGALLSSKVPKKKNPVGIIFRQAANTLKAAKNPLGNYFRHMRAKGGHLQAMVATGKKLASIFYCMVQRKVEYNEIVYCNHRKQELQNKVAYLHKRLQRMESELANCG

SEQ ID NO: 126103 - protein, 311 aa, unidentified
MTQHTIGVDISKAHLDAFRLEDGAAHRFENSAEGFRALQKWLGRAPIARIVFEPTGPYHKAFEAAFSKTFRLVKVNPLQARRFAEARGTRAKTDAVDAQMLAQMGAAFNLEPQAPCSKKTLVLRDLNVTRSGLIKDRTRLRNRAQTQSIALLKRQTKARFTQVERQIAELDAEIAALIEAHGATARNRDILCSMPGIGAVTAAAMLTLLPEIGTLQRKQVASLTGLAPITRQSGQWQGKSFIGGGRKPLRDALYMPALVAMRFNPELKAKYEALRTVGKPAKVAIVVVMRKLIEMANALVKADRMWTLKTA

SEQ ID NO: 126104 - protein, 415 aa, unidentified
MEPIHKRVAGMDVHRMEHVVTILLEQEDGTVLNETHKFGGFKRDMRALVDWLRSHRIQLVVMESTGIYWKSVFSHLEAAGIPALVVNAFHVKNVPGRKTDVSDSEWLAQLARFGLLRGSFIPPKDLRELRVVSRYRRKLVQTLTGEKNRLHKVLDDAGIKLGGVVSDIDGVCARKMVEGLIAGKTPAELSALGRGKLKSSDEVLQASMDGDLSPRHRLVLSTAWNHLRYLEQQVAQLDRYLIEAIKPYAWAWRLLQTIPGIDEISAAMILIEIGVDMQRFGSASRLASWTALCPGNHETAGKRKSGKIRHGNPIVRYLLCEAANATRRTKTVFQAKYTSLVIRRGHKKTIIAIAHKLIRTIYFVLTRRKPYHDTTVDYEAAIVARNAPRWIKALKKYGYWPKAAAANPATATAMA

SEQ ID NO: 126105 - protein, 467 aa, unidentified
MKNYDYNLFVGIDVSKGKADAAVLAVPELRSVKPRFLRKKLSFKFIKSDVVEFLNTVRKYSSDPHCLHTYFALEVTGIYSTNVYSFIKENCNSDEEIHQLNTDFVNKWRESHNISKSDPLDAQTISTIIGTDDDVRYVSDSVFENKNGYQDLKALVHRHYQIKKLHSQETNRLIALCDCYFPELQYVFEPKSAAFLAVLSQYPTSHDIINASKNEVFSLVYEASKHRCNMDKIDKLFNYAQDTLVPHVSDHIRCVISNTVESIVNIRTQLKLIEKDIRKLASTFNVYSLLMTITGCGPLTAAVIIAETGDIFRFKNADHYVSYSGSSPRNKRSGKSVEIMGKISKKGSKYLRHALYMIAEFARRHNPVLKHLFERVKNGNKKRHKLAVIAVANRIARYIYSIMKNESSFVIMHENIMRLPEETRNTFFNSISLDFPKNTRKQIYQYSDVNGEIHRFVYKNETTESIV

SEQ ID NO: 126106 - protein, 343 aa, unidentified
MKLIRVGVDLAKSVFQVHGVDRLEKAVWRRKLSRGEWLKTLLERIEPGCQIGMESCAGAHHWARQLEAKGFTVKLIAPQFVKPYVKSNKNDANDAEAICEAMSRPHMRFVAVKSVEQQDIQATHRIRSGLIEQRTAKANQIRGLVAEYGLVAPQQLGHLRSALPEWLEDAENGLSSHFRRLLNGLWGDLRTLDARVAELDAEIKKIAQSYPAAERLQQLRGVGPITATALLAAVGHGEQFANGRQMAASLGLTPKQHSSGGKDRLLGISKRGDSYLRMLLVHGARSAMRCSKDKTDRLSQWVTSLSARSHPNVAAVALANKTARMAWAMLRNGTEYQPGLVAH

SEQ ID NO: 126107 - protein, 452 aa, unidentified
MLDKPQEIVDEEHEQVCERVAAIDVAKATGMVCVRVPDDARPGRRVSRVWEVQATTRAVIELGDHLACEGIEKVTLESTSDYWRIWFYLLEAAGLDVQLVNSRDVRNVPGRPKSDKLDGVRQAQLTERGMLRPSFVPPAEIRQLRDYTRLRTGLIQERTRHWSRLEKLLEDALIKVTAVASKIDTKSVRAMLEALIAGERSPRVLADLALGKMKARRAALIEALTGRFDDHHAELARMLLDQVDQLDRQAGRLTGRIEELIAAIPAARGVDAGGTAGPGAGAGPDAAVRSAVARPDEIDGIGPRGAQVVLAEIGLDMSRFATAGHLVSWAGLSPRTIQSGARSRGGRTGKGNPYLKGIPGGAAAAAAKTGTFLGERYRRLVKRIGKLKALVAVARSILVIIWHLLAGPTARYQDLGAGCYASRTGKDRKLNSHIRQIEAPGYTVTLMPAQAA

SEQ ID NO: 126108 - protein, 410 aa, unidentified
MQTLVERGCGLDVHQATVVACLLIALKNGKVQKQVRTFGTTTRELLKLREWLLAEGCTHVAMESTGVYWKPVYAILEGALEIVVANAQHIKKVPGRKTDVKDAEWIADLLCHGLLRCSFVPPKPIRELRDLTRYRRKLVESQTAECNRLLKLLETANIKLASVATDAFGVSGWFMLEALVEGKATPQEMAEMAKGKLRKKISELEPALEGKLEEHHRFLLRLQLDRLQAVEKDLALLEQRIQAKLQPYEAQVTLLDEIPGVDKTLAAVIIAEMGVDMSIFQSVSQLASWSGVCPGNNESAGKRKSSRIPKGNVYLKTALVEAAHAAAKAKGTYLRDKFYRLKARRGLKRAAVAVAHKILVATYHILSHRVCYNELGDLYLDKLNKHHLTRNLVHRLERLGYNVTLQEKAA

SEQ ID NO: 126109 - protein, 419 aa, unidentified
MYNTRTKNPSEYQVIIAIDWADQKHDLRILKDCEEECKVISSDLLTLKNFFDTLILETVNGSIAIVIESCQSALMNLLISFTELDIYVVHPTTASKFAKTFHLSGAKSDRADTKSLLELYLKHPDKVQKVDSSFSKGKLKRLNIKRRDLVDDRTRLTNQLTALLKIYYPNALKVVGNHLYADMFLDFLDKYPSPQDVINAHQIGITKFFNKRSTNHSKTKERVQILRSSVIVVNDEDELDYYIFEIQQFCHRIRSLNKVIKAYDEKIEQAYRSNEDYEMFQSFPGAGPSIGPRLMAFFGDDRDKFKSVNEVLKISEIAPVTIQSGKMNIVRRRFLCDRFTQLSFVEFANNSIRSSIWAHEFYYHKKALNIPHFTILRALAYKWIRIMYRCWKTNTPYNEKTYLEVLERRRPAWFQKFVN

SEQ ID NO: 126110 - protein, 329 aa, unidentified
MNVQQIIGADLSKRSIDLASYQRQTHLKIENSPVGFKRFAKWLHQQKINPEKALIVMEHTGLYSYWFERFLQKENICFAKVPALAITRSLGLIRGKTDKIDAARIALYGFEKQHLLSPSLPQSPQLLRLQILHSTRQRLVKQKTAMLCALEEYEHIGISKTDPIIKSQLAVIGTIDKQVDKLDNEIEILINQDQDLQKNYNLLVSIKGVGKVVATAMIIKTANFTRFTKPKKFACFCGIAPFEHTSGTSIRGKTRVSHLADKEMKALLHLSAQTAVKNDKELRMFYLRKTENGKPKMSTLNIVCNKIVSRMFAVVKRQTPYITYNLQVA

SEQ ID NO: 126111 - protein, 355 aa, unidentified
MEYFKDIKNFVVSKHVFCGIDIHFGHWNLCFVCDGEVVEKTKIPNSYETLNMRLSKYLQARKISIVYEAGFSGFWLYRRLISDDYDCIVTPPSKIPKSENKVKTDKRDAQKLAFYLSAGLLKVVYVPPADIESDRRVVRRRAQLVKKQTRAKNHIKSFLHLHGLKTPENIKTNWSNLYLAWLEKLHFDHESDNFTLSQLIRNYRRIREDLAEVTRYLRMFSRSEKYQENYKRVTSARGVGLITAMTFLLEIFDFGRFAKEDDFSSYLGMTPSQFSSGDKVRFGHITRQGNSNLRRVLIESAWTVIKHDPHLREKYDRIKARGANGKKAIVAVARSLAVRLRRCILDETEYVIGVC

SEQ ID NO: 126112 - protein, 342 aa, unidentified
MSEKRYIGVDLHRRVFTCCMRLESGRQFLSEWRLEQLSQFVKKLRATDEVAVEITGNTRLFYDAVAPHVARVVVVDANQFRVISQSVKKTDPNDARNLALYLAKGLLPEVRMKEKQQAQVASLTQTRDRLVKLRTALKNKVNNLLSARGMELEKEALSSEKGLTRVLTMEVEELTGFELQVIVEQIRSLNHSISELEKVIEQEGKKLKGHRNITSIKGIGSLGASILLSVIGDVRDFPEEGRLASYFGIVPRVHNSNETERSGHITKRGSKLGRTALVQCALIAKRYSPYLANYYQRIRGRRGTGRAIIALARKLLGIIYHTLKNNWVFEDFPNFVLREATA

SEQ ID NO: 126113 - protein, 409 aa, unidentified
MNPLYVGIDVSSKNNVAYLMNPDGSRHSSFSVQNNRGGANMLSERIVAALDSMQLSDAVIGMEATSIYGDSLVYALREDGRLGQFRRKIHVLNPKQVRNFKEAYPDLPKNDFVDAFVIADHLRFGRMAREVYMDDYRYKALQTLTRARFYAVQNLTREKQRFANYLFLKCSGLAQEKVLPHNTSATTIALMEQFDSVDELAYANLDELTEFIARSGRGRFADPAATAKAVKAAAKGSYRLPKTVNNSVNQVMAVSITGMRAIESQMKTLDKAIKQQFEMIPNTLTSVPGIGTVYSAGMIAEIGDIHRFRTQAAVAKFAGLVWTQHQSGDFEAQHTKLIKSGNRFLRYYLLEAANSVRRCDSEFRRYYDLKFKEVNRFQHKRALALTARKLVRLVFRLLKDNRLYIPAEE

SEQ ID NO: 126114 - protein, 452 aa, unidentified
MPAGKDKTMHYKKVLAMIADIPYLSVGLDVGADFSWMSIMLPNGTLTGKPFKILHSDPSSRELAVTKIKEAQEMYSLESRCFLESTGIYHIPLLCFLRDKGFDCSVINPIITKNSTNLNIRKLHNDKFDSKKAAKIGLDASLKISIVPDDDIIDLRNLVRDYYYFKDLQSAIVLKLNAELKVSFPAYLQVFSKITTQTSLKLLEAYPLASDMLNAPKDEVIETIRTTARFGTKYAFTKYESLCAAAKDAAVFGRALPSNAIRIRLYINSYQEYQKYLDSILEELHKAVDKLQGKPAYDRICILQSLRGVGFLSAVVLIAEMGSFDLFSSPKKLYAYFGLDPAVKQSGKFNGDNVHMSKRGSSLARRILHMVALNNLKVDKGTKLPVNPVIYDYYVRKCSSKKKKVAVGAVMHKICNIIFAMLRDNKPFEIITPEEHCDRYAAEHPEIINKAA

SEQ ID NO: 126115 - protein, 347 aa, unidentified
MTYFAGLDVSLEETTICVVDETGRLTKELRTASEPEPLVAALTGLGLPLERIGLEACSLTAWLHDELRAAGLPAVCIETRLANAAMKTMPNKTDRNDARALAQIMRTGWYRQVHVKSRQSRLWRSLLVARRTVLNEMRAIENVVRAILREGGIKLGTPARAAFAGRVREMAGDDPLILPLVTPLLAILATMLEQLDRLTRQVLTIVRGEAVCRRLMSVPGVGPITALAFRATIDEPERFRQSRNVGAHLGLTPSRYQSGETDIQGKVSRCGDELARTALYEAAHSLLTRSRKWSSLRAWGMQVAKHRGMARARVAVARKLAVILHRMWSDGTEFRFGKEPAAAFAAA

SEQ ID NO: 126116 - protein, 326 aa, unidentified
MNLSAAALGIDIAKLKFNVCLINRSGKLKHKVFLNNVSGFEQLIRWLDSQKAGEPHACLEATGTYGEALALYLFDAGYLVSVVNPAAIKAFSTACLSRTKTDKVDAALIARFCLAQQPPAWLPPTPEVRELQALVRRLEALIEMRVAEENRLSSGITVGAVKHSLEQHIAYLREQINQTEQLIQKHINNHPDLKEQSNLLDSISGIGTATAALLLAEIVNIKQYKSARQVAAYAGLVPRERRSGTSVRGRVQLSKIGNARLRKALYFPAITALRCSNFFKAWADGLRERGKCKMSVIGAAMRKLIHLSYGVLKTGKPFDPNWAKSV

SEQ ID NO: 126117 - protein, 413 aa, unidentified
MALKIVYKICCGIDVHKNFVVACIASTNNQGVTTYKSHRFSTYTKGLKELLQWLLESDCKDVCMESTGKYWIPVYNILEKDCSIVLAHPKYVKAIRGKKTDKKDAKWIADLFKHDLVTGSFMPPADIRQLRDLMRYRHKLTCFMSSEKNRLQNCLTVSNIQLGNVATDTFGKSSKRILDKILENPLDTSFDIGPLIHGSMKDKIPELELAVDGYITPEQAGKLKIIKKHFEDLESRRTELEKLILALASPYQQKLDLILTAPSFKNIFSAITIISEVGVNMESFPSAKHLCSWAGLTPTNNESAGKKKSVRVSKAGCYIKPLLVQCANSVVKSEKHPEIRNRYLQLRKRRGHKKAIIAIARMLLTALYNMLKKNKPYNAELYRNSDIIPINREITVEQAIQLAKFQGYRIKSA

SEQ ID NO: 126118 - protein, 354 aa, unidentified
MSRKLNAAIAVIGIDIGKNSFHIVGHDHRGAIVLRQKWSRGQLETRLANLPPCVIGMEACVGAHHLSRKLHMLGHDARLMPAKYVRPYSKGQKNDFRDAEAIAEAVQRPTMKFVATKTADQLDLQALHRVRDRLVGQRTGAINQIRAFLLERGIAVRQGLHALRFELPGILATRADVLSPRMLRIIEGLAEDWRRLDERIEGLSNEIETLARQDQACQRLMTVPGIGPIISSAMVAAIGTGDVFSKGRDFGAWLGLVPKQISTGDRTILGSISRRGNRYLRALFVQAAWVVLVKVRCWERYGLNSWIEAAKKRLHHNVLAIALANKLARIAWAVLNKGRAFTCVKTEETASGSA

SEQ ID NO: 126119 - protein, 353 aa, unidentified
MHTHRQLSEPVATIGLDIGKNTFHLVGLDRRGAIAMRIKVSRNQLVRRLVNLPPCLIGLEAGSGSHHIARQIQSLGHDVRLIPAQYVKPFLKGHKNDYRDAEAIAEAVQRPTMNFVAIKTPEQSDLLSLHRVRSRLVRQRTAIINQIRGFLIERGITVRQGPGPLRKVLPEVLCSPPEALSPRLLRLISELDQDWRRLDDRLEVLSGEIESLSENDAACQRLMTVPGIGPIISSAVVAAIGTGTGFKQGRDFAAWLGLVPKQESTGDRTKLGRISKRGNKYLRTLFVQAAHVVLERRPAAAMRALWPWIAQASKRLAHRNLLAIALANKLARIAWAVLARGRDYEPRITPNAP

SEQ ID NO: 126120 - protein, 377 aa, unidentified
MQSIIYVGMDVHTENFTFASYEYGKEDVFAVNQVIGASWKDAIKYMKTLQKQRSEEKIHFVCGYEAGCFGYSLYNELMAAAITEKDLSLQCVILAPTTMAIQGNAPKTDRRDARMIAKNLAYGTYSSVYVVSEEDNGVRDFLRMRDDTKKKIKSTKQQINALCLRYGKNYTANKWTGTHYEWLQKLELGDIYSNITLKEYLHQLTQLEENVSRYDKEIEEIAKRERYATAVAKLRCLKGIETVTALALVAEIGDYSRFPTAEKFAAFLGLVPGERSSGGTINRTGITKHGNSFLRRLLTEAAQGYSKGTPYTKSKRLKARQVGQDKEVLDYCDRARLYLGKKYIRLKEKGKNRNVCKTAVARGLACFIWGLMTDNIA

SEQ ID NO: 126121 - protein, 343 aa, unidentified
MSKLTVGLDVGDRFSQVCAIDGDGAIVEEGRVATTREALRERLPAQPRCRVILETGAHAGWISRELSTVGHEVLVANGRKLRWLYANEHKTDRVDARYLARVGRWDPTLLAPIRVRSASADGALRVLRARASLVRARTRLINHVRGAVKSVGCRLPPADATSFARRMATQLPPELESALQPLLAQIAGLTQVIASYDHQVEELARTHYPETASLRQVTGIGALTALAFVLTIDDPARFRNGRAVGAYFGLTPRRADSGSQHPQLGITKCGDGLVRQLLVQAAHYILGPFGPDCRLRRWGLALSARGGKNAKKRAIIAVARKLAALLFSLWIHQSHYDPEPLTR

SEQ ID NO: 126122 - protein, 340 aa, unidentified
MSVYVGIDVHRKRSQVAVINEGGEVLANRNVPNGAQPVLGVIGGLPPGTPVAFEAAFGWGWLVELLEDYGFAPHLVHPLRCKAIASARLKNDKVDAAILAQLLRADLLPEAWIAPPPVRQLRALLRHRAQLVRLRTLLRNRIHAVLADYGHDRPGGCWSGPGRAWLASLPLPAVSREVIDDDLALIDALQVRIDRLDWEVHQQARRDPRVKVLTQLPGVGPFTALVLLAEIGEVSRFGSARKLASWAGLTPNVRGSDRVAHYGHISKQGSAWLRWILCEAAQTAKRHPDFAASYQAMARRRGKKIATTAVARKVLTRAYHLLAAASGGTPTSPEGSPGPG

SEQ ID NO: 126123 - protein, 359 aa, unidentified
MDATTAAVDLAKNVFQIAWADQHFKILATSRLTRAQFQRCFHNRHVALVVMEACGSAHYWARQIEALGIEVRLIPPRYVRPYVKRNKTDAADAAALLEAARCAEIQPVRIKSIEQQSLQSLHRVRALWMTTRTARINALRGFCREFGFDVALGARVGLEQIARLLADPNSTLPALLRPTLRALIDEIRLLEARISELERELAALARQSSACTTLLSVPGIGLLTATAMVAATAGQVSHFKDARHFAAWFGLTPKERSSGQTRRLGRLSKRGDRYLRMLLTHGARAVLNAARLGARMHRPLDPLRTWALNLQQRIHHNKAVCALANKLARICYAVLRDQKPYAGDHIHRKSQRATFPMPA

SEQ ID NO: 126124 - protein, 314 aa, unidentified
MAQFTPRVGIDCSDARLDVHIHPLAIGFSVANDPAGWSELDTRLKTVEAEIVAIEASGGCERDVSRFLLARGYSLRLVDPYRVRQFAKAAGKLAKNDRIDAATIALFVATLPTRPMVRHKQLERLAELVTARAQLLEHATVAQNQARRREDSLLRRVDARRAKALDADIKLLDRRIAELVEADAALNAKNAVLRSMKGVGPVLAHTLLALLPELGQLTRKQIAALVGVAPFEDQSGKRQGVRFIQGGRPAIRAPLFMAAMVAGVHNPTLKAFRDRLRAAGKKPKVAIVAVMRKMITTLNAILRDTTPWQNRTAP

SEQ ID NO: 126125 - protein, 332 aa, unidentified
MYLGIDVHKRHAQVAVMDEAGEIVEEVRVENANLDDLAQRYAGAQAAIEATSNYYHIHDTLSEHLDVTVAHPTKLTQIANTDKKTDRVDAKELARMVRLNSVPESYVPTDEAREARALVRGRQTLVENRTKYANKIHGLLSDHGITEDVKPLSVEGREFLRELSVPTPWDALLESYLELIETLTEEIQRLEATIEERAGSLRETQLLMTIPGVSYYTALAIYAELGEIDRFDGHKEVVSYVGLNPVIRESGGSRIEGSISKRGSDRVRWLLVQAAHTAVHTCNDEYLSRFYGRLASRKNSQKAIVATARKMLVSIYHMLDRDEVYDPPGVSA

SEQ ID NO: 126126 - protein, 381 aa, unidentified
MFESITYVALDDHKKKHQVAVLLPGVDRGDAITWRIENTRAGIRKMVRKVLKMAPGDVRFCYEAGPNGYVLQRRIEGFDGVSCVVVAPTKTPRRSGDRVKTDRRDAKKLVGLFRAGELQGIVPPMPEEEAIRDLCRCRRAAQRHLMASRHQLDKFLTRNGFVYWEGKNWTRRYREWLRTLSFDDWRREKTFHSYLFGEEQDEDRVKRLDAEIIRAAEEEPYRTLVGFVRCFRGLDTLSAMILITELYAVGRFMTAPAIMGFVGMVPSEDTTGWDPHRGPITKTGNGHVRRILVEAAKHYRHPARISRALATRRKGQPDWVIAIADKAQARLHQKYWKLVMGKGKHPNVATTAIARELVGFIWSVLSRAATEMPSVADELVA

SEQ ID NO: 126127 - protein, 387 aa, unidentified
MEVRVVSTPSAGADNVPVHCYVAIELSKSSWIVGFQTPLTNKTSQYQVKACDANALLELIERIRTRVARELRRPIEVMSCYEAGYDGFWLHRVLKAHGIHNHVLDPASLQVNRRARRAKTDRIDADRMVRALIRYLRGEPEACSVVRVPSVEQEDAKRLHRERRRLIAERVQHVNRIKGLCATQGIYHYAPLRKDRLARLDDLRTGDGRALPTRLKAEIARELKRLEVLLEMIATVETERDVILTSAASTHLNAGKIKMLAKLKAIGPEFATTLVGEVFYREFANRRKLGSYVGLGSSPFCSGPVDRDQGISKAGNPTARSMMIELAWTWLRYQPGSALSIWFRERVGNLKGRPRRIAIVAMARKLLVALWRYLQTGLVPTGALLKA

SEQ ID NO: 126128 - protein, 341 aa, unidentified
MLSTIVKRAAGLDVHKKIIVATVQIQLSNEEVEEYTQEFSTFEHSLHELVKWLKNYNIEQIVMESTGIYWKRLYALLEEAELKTLVVNARHAKQVPGRKTDVMDSQWLATLARYGLLRGSFIPVKDLRELRLLASYRMKLIGQLSGEKNRLHKILDDAGIRLGSVVTDINGVSAKSIINGIIDGKSLSELVQCVRGRLIKKIPEIELSLAAPLESRHRFVLKHIQEHIVELEKRIHTMDDYLFESMKPYQASWDLLQTIPGVDAISAAILIIVLGVDMERFGNQQQLSSWAGVCPGNNESAGKKKVPVLEKGIDFCDKYFVNLLMPLRKQIVSSKVNIKVL

SEQ ID NO: 126129 - protein, 333 aa, unidentified
MQSAKKIVGIDVGKEKLDICYPSGQKETVRNIRSCRTKVIKKTAKLGAFIAFEATGPYEEPLADECLARGVKAVRLDAWGTRKFAESQGRLEKTDAIDCEMIRDYAASLKDEKLHFIKPRTEAQKRLKKSVRTRKNLLKARAIIANQFEDDLDPETARHLKSALNSLDKNIAKVEAECDAAIASDERLRELDRRFREVKGVGPCLSRIVLAQCPDIGDFNSKSIAKMCGNAPLDHESCTIKHKAKPRRGRSDLKKALYMAAVSASRNNHILREFYQRLVANGKPRKVALTAVSRRIAILLNTIAKHPDFKPAQDPKASAKAGGAKRGRPHKVK

SEQ ID NO: 126130 - protein, 412 aa, unidentified
MDIVHERAAGLDISKRDAKVCLRLPGQRAGTYTSTVTTWGATTGQILALRDFLEREHVTTVVMEATSDYWKPFFYLLEETLPVMLVNAKAARNIPGRKTDVSDAAWLAQLGAHGLLRASFVPPEPIRELRDLTRARAIATRDRTREIQRLEKFLEGSGIKLSSVVSDLTGVSSRAMLEALVSGERDPEVLAGLAKGTLRSRIPELVEALTGRFKSHHAFMARLHLDQIDAQSRIIDALTGRIEEAMEPFRAAREFLATIPGVSLKVADVIIAETGADMSRFETPGRLASWTGVCPGANESAGRIKSAHILPGNKYLKGALGIAALSASRSKDTYLAAKYWRVAARRGPMKATVAVEHSILTAVWHMLADGECYADPGADHFTRLDPIKAKNNAINKLKSLGFNVTITAANAA

SEQ ID NO: 126131 - protein, 447 aa, unidentified
MATRNRSVSMSGLSLTHPNAAGIDVGSASHWVAVAAHLDEQPVREFASFTADLQALAQWLRKCGVDTVAMESTGVYWIVLYELLDSLGFEVILVNARHVKNVSGRKSDVLDCQWLQQLHSFGLLAGAFRPAEAVCELRAITRHRAMLLRNQARSVQHMQKALTQMNIQLANVISDVAGVTGRAIVREIVAGERDAQVLAAYRDRRIKASEEEIAKSLQGNWRAEHLFTLKQALATFDFCGVQLTECDDEIERRLKALQKHEGSPAKGKKRSKSKNAPKFDVREHLFKVCGVDLTRIDGIDVTTAMTVISEIGPDMSRFPTVKHFTSWLGLCPGTKISGGKVLGARTKRCANRATQALKLAAAALRSSHSALGAFYRRMSARMDKPKAVTAAAHKLARLIYVMLTRGEEYTDQGQQYYEERYRERVVRQLNKRARQLGFELTPNQQPA

SEQ ID NO: 126132 - protein, 480 aa, unidentified
MVRESSATLVSAAMRIPFVRLSQIRRFPWCCHLPMIVEDAMTVRKREDEVFPNAAGIDVGGSSHWVAVPTRSSDDPVREFGAMTEDLNAMASWLIACGVDTVALESTGVYWIPVFEVLEQRGLKVWLVDARQMKYVPGRKSDVQDCQWLQKLMSLGFLRAAFRPDVEVCELRAVSRQRDILLTEQASWVQRMQKSLVQMNIQLTEVLSDVMGLTGELIIRDIVAGERDPKALARHRHSRVKASTEDIIKALTGNWREEHLFVLGLSLGMYDDIARHLTECDARLNAGLKDLGQKNVELGKPPRSGSKQRKEYDTRQILANWAGVDLTRINGLGLAAVTKILTEIGPDLSCFPTVKHFCSWLGLCPGTKISGGKVLSAKTKRSVNRVRQVLKMAAMSLAHCDSALGAFYRRLCARMDKPSANTAVAHKLARMVYFMLTRGEEFVDQGQQRYEQQQLERSVAALKRRATALGFTITPVASGA

SEQ ID NO: 126133 - protein, 329 aa, unidentified
MGCRSSGSTSAREKLHCAWLRDAARRQVRPKSVANTADGHAALLAWATRVTGAAAAELHVVLEATGVYHEAAATFLHDAGCHVSVVNPLQVKRFAESLGVRTKTDRHDGLILALFGDARRPAAWTPPPGEIRQLKALLGRLAALEQDFARELNRLETARAEPAPDAVLVSLQTMLDVLAAEIARLRRQIDDHLDSHPELKEQRALLESIPGIGAKLSLWFLALFRSRTFASARQAAAFLGLVPVEFQSGSSVLKRPRLSKAGDARWRARLFLPAMVAARWNPLVRAQYQRLLAAGKSKMSALGAAMRKLVHIAFGVLKHHKPFDPNVAA

SEQ ID NO: 126134 - protein, 339 aa, unidentified
MSLHCAVDLHGNNGYYGIVDETGQRVFGKRLPNCLDTVLAVLEPYRDRLEDGVVVESTFNWYWLVDGLNEHGYQARLANPAAMKQYNGLKNTNDKTDTFFLTELSRLGILPEGFIYPKEERPVRDLLRRRLLLVKQRTAHILSFQNLVARERGEQISSNTIQKLWPNEVSRFFDDQRLVLMGQTNIEAIRFLSGQIKQIEDVVLGEVELRPEYEKLTTVPGIGKILALTIMLETGEINRFKKVGNYTSYCRCVKSSRTSNEKTKGENNRKNGNRYLNWAYIEASNFMRRHCPEAKRWHQRKAARSQQVVATKALASKICKACYFIIKDQVDFDLKRIFG

SEQ ID NO: 126135 - protein, 317 aa, unidentified
MEVSLIFVGIDVSKAQLDIEIRPSGEKESFANDKVGIKALVKRLAKIEPTLIVLEATGGYERQVARALVSADLPVVVVNPRQVRDFAKATGQLAKTDSIDAAVLAHFAEVIRPELRPLPDAVTLELRALTARRRQILEMIAAENNRMEMTSKAVRKSIGAHVRWLEQELERANQELDRAIEQSPIWKENEELLRSAKGIGPVTSRTLLAELPELGTLDRKQISALVGVAPFNRDSGSLKGRRSIWGGRAPVRCALYMATLVATRRNPVIRDFYNRLIAKGKLFKVALVACMHKLLTILNSMIKHKTFWSETFSRQTT

SEQ ID NO: 126136 - protein, 316 aa, unidentified
MNTQNHNEINIGIDASQSMLDIYVRPQGDFQSFENNAKGIRSAIRFIKSFKPTRVLIEATGRLEMAFFCAAHKAGLPVCVCNPIQVRNFAKSTGRLAKTDKLDAQDIAHFGEALKPALTDLKPEKLRLLSDLLTVRSQCLDMSTMQKNRLQRMPKTVHQPIRNILKKIIQEIACIDQQLDKLIAEIPQWQDKVNQLTSAKCVGKVLAYTLLSELPELGHLNRKQIAALVGIAPMNRDSGRHKGKRYIRGGRHKVRTVLFVSMMSAIQCHPKIKPMYERLVAAGKPKKVAIVACMRKQLTILNTMVRNGTYWDENMI

SEQ ID NO: 126137 - protein, 373 aa, unidentified
MPRYSTAFGMDVHLRSTTVCALDAETGEAVTRRFRGNPWGEVAEWMSGFPGPSLAAYESGYLGFAPQRELSGLGVDCVVAAVSKVPRSAADLSSKNDRNDAARMAKAILSHDVTPVWVPSPEIEGLRDLAAAHDAATARLAAAKQRLLAFLARRGYAYGGTTPAGNPRRYWTYGFLRWLDKVRPADDGGIRALAALRNEVEAAAETRDDLLAEYRAAVAAGPLSAEVEALQSIKGCGFALAAAFASEVGDFSRFRSGRQVTSYFGLAPKQRSSADSVRLGGISGAGNALVRRLAVEGSWSYVQASHQPKLMPKGSGVPLEIRMHGRKGSERLLRRREEMLERGMPQAKANAATAAELVRWLWALGAMCREAGE

SEQ ID NO: 126138 - protein, 341 aa, unidentified
MDKELYFGVDVSKKTLDLAYYDGETIDWKNAHIQVSNDDAGFKKIGSWVAKVGKDFDTFLFCMEYTGLYNQNFRLWLESKEYIYGMVEPRKMHRFEPDLDDDQRSLDRIKTDELDAFRIAIYCEQNHKKILRNPSKLPSPVYFKLKRLLAERKQNTKQSVLYKQQLHDICAYDTDLSVERKKLLLKNMQENQKAIDKEIDSYMNEDTSIRKNYNLLTSIPGIGRIIALETIVLTENFTAISNPRKYACYIGIAPFKKESGTSVRKRTTVSKKGFSEAKADLSIAVLSAIRNNPSIRDYWIRKRKEKCGGIVLNAIKFKLVLRMFAVIKRGTPYVETDAYKN

SEQ ID NO: 126139 - protein, 389 aa, unidentified
MKYVGIDLHKKTISGCVVVKERGKKKVAARKRLECRDEAGIKSWFGELGRFEVVVEATASYEWFVKLVEPLARRVVLAHPKKLRIIAESKRKSDKLDAQVLAEFLASDEIPLAYRPCPRVREHRALVRWRGYIQRRLTSVKNKLRHILAAYNADVPNLFTAEGLAHLATVPLTASDRFVSEQLVTELEQHQERLRAANNRLREFAAAAPLAEREARAVLASIPQVGAITADVILAELGDWRRFGSQAEVASYAGLVPGFRESAGKAKHLGITKEGSSLLRWVMIEFAWRMVGASRKWGGHYHRLEARVGAKKAIVAMARRLLGMVFALLRTGQKYSLALELPPPASCRSKSPRDTNPSDPSCLRGQPRQASSLGAGAYYGGPLSVPGKE

SEQ ID NO: 126140 - protein, 363 aa, unidentified
MKNYIFVGCDSHEKTLVNKIAHNDGPLETKRFSARRAGRQKLIENLRERSRQAGGAQVVVAYEASSHGFILCDELRAAGFLCHVLAPTKIERSIKQKRNKNDDRDAERLLDIVRGHYLAATKMPAVWVADLQTRDDREPVRARQDLSEKQTTVKTQVQMLLKRQGIEKPEGVGTSWTKRYRLWLEALSAEGPAIQSGMRQTLKSLLRQLQFLEHEIEQMDQAMRELANTPRRKPIVDELMKEKGVGLATAMKYVTDIGDFKRFSRGRQIGAFFGLVPSTAESGENNDRKGHITREGSPSARKVLCQATWSRVQHDKQERDVYRRLVARNPKKKKIALVACMRRLAVRLWHIGFQAQLKMEAAG

SEQ ID NO: 126141 - protein, 458 aa, unidentified
MKRNRSKPKSERTMPMVHPNAAAIDIGATMHMAAVRADRTPEPVRSFGTFTTDLHRLVDWFTECGVETVVMESTSVYWIPIFELLDARGFAVFVVNARDAKHVPGRKTDVSDAQWLQRLHSYGLLRASFRPKGQIAELRAYVRQRERLVEYAASHIQHMQKALTEMNLQLHHVVADVTGATGLRIIRAILDGERDPKVLAHLRDYRCHSGAETIEKALTGNYRAEHLFALEQALALYNAYQEKASACDARIEAVLKELSISRGLNAGPLPSPRRRLHGKANGPDFDVRAALFALLGKDLTQIDGLGSYLSLKLIAECGDDLSAWPSAKHFTSWLCLAPSNKISGGKVLSSRTRRCGGRASALLRLAAVTVGRTDTALGAFYRRLSARIGKAKAVTATARKIAVLFYNAVRHGMEYVDAGASFYETRYRTRIINNLHRRAKAFGFVLQPAELAPGVVVS

SEQ ID NO: 126142 - protein, 342 aa, unidentified
MKEASIIGLDLSKRSFQAHGALADGSVAFRKKLTREKVLGFLAEQPRCTVAMEACGSAHHWGRAIHDAGHEVRLIPPAYVKPFVKRQKNDAADAEAIAEAASRPTMRFVAVKTAEQQARAMLFRTRDLLVRQRTQLINALRGQLSEHGVVAPQGPANVAILAQAIDDMTPSLPLLVVELARVYLDQIDRLSEKVAGLEKAIACEAKRGAMTRRLQTMPGVGPITAMAIETFAPPMEVFRRGRDFAAWLGLVPLQHSTGGKQVLGKTSKMGQRDIRRLLITGAMVIVRWACRKGAQEGTWLHRMLGRKPRMLVAIALANKMARSIWAMLTKREDYRGPVAATL

SEQ ID NO: 126143 - protein, 338 aa, unidentified
MSKVTVYVGLDYHKDSIQVCIMNSTGQVLANRRCHNQVEALVKLVATFSDDVQAAVESCSGAAALADELVARHGWSISLAHPGYVARMKQTPDKTDWTDARVIADLVRIGYLPKVWLAPEQVRDLRRVVRFRQDLVRQQTATKLKIMALLREHRVVIEGTRWTKKWLEAVTNLAELPGGTRYILKRHLQGLTRLSDEIAKVEAQLRKMTANDELVAKLMQQRGIGAVTAWTIRAEIGRFDRFHTGKQLSRFCGLSPRNASSGNRQADAGLIKAGNPGLRTTLIEAAHRLTRYDVRWATFKAKQRAAGKPGSVIAAAVANRWVRWLFHQMQPAAWEGAA

SEQ ID NO: 126144 - protein, 354 aa, unidentified
MIVIGVDPHKQSHTAAVVEQATGELLGARTIKACRGGFEQLLAWARSLDGERLWALEDCRHVSIALERFLLASGERVVRVPPKLMAGARRSARERGKSDEIDALAVARAALRERGLPSAALEGASREIRLLLDHRDDLVAERTRAQNRLRWHLHELEPELAIPAAALDRQVWLQRIGRRLARREQVAQVRICRELVRRIAELTRRARELERELAALVAAEAPALLELPGCGVLTAAKLVGETAGADRFADDARLAMHAGAAPLPASSGKRQRHRLNRSGNRQLNCALHRIAVTQGRWHPPARAYLARKQAEGKSRKEALRCLKRHLARIVYRTLSTSTEKMTSTTELAVTPALT

SEQ ID NO: 126145 - protein, 408 aa, unidentified
MNAVGIDVSKGKSMVAALRPMGEVALLPQEFLHTEVGLEQMAYAIIALGENTRVIMEATGRYHEPVAAALHEYGIYVCVLNPLFIKQSGGGSIRKVKTDKADAMKIAKYGLDNWVDLREYTPMDTVRQQLKLCSRQYNLYMKTVVSLQNNLISLTDKTFPGVNELFSSPERADGHQKWVDFVMTFYHCDCICRVSEKAFTERYQKWCKRKGYHFSAEKALDVYAGSCGHITTLPKNDNTKLLIATAAQQLLSGKMTLAALRAEMTRLAKQLPEYDTVRAMYGVGETTATQLMAEIGDVRRFPRRSSIVGFAGVDPAVDQSGKHSAKSVPTTKRGSPHLRKTLYQIVCTYLKKSPVDEPVYQFLDKKRSEGKPYFVYMTAAQNKFLRIYYARVKECLEAFDAQQDTSQR

SEQ ID NO: 126146 - protein, 381 aa, unidentified
MTTAATHHEQSNTTEAMLFVAFELSEKTWKLGFTTGHGQKPRERTVTARHHEHVLDEIAQAKRRLGLPATAPVVSCYEAGREGFWLHRFLQAHGITNHVVDSSAIEVNRRRRRAKSDGVDVRKLLRMLMRYAQGERHVWQVVKVPAVEAEDQRHLHRDLETLKQERASTMTRIEGLLSSQGLRVTSLTKLPEQLEALRLWDGSPIPPGLRRRVLRVYAHYTFLSEQIAAVEVERRTLLQTSAEASLDKIRQLMQLKGIGINGAWLLVMEFFGWRAFKNRREVGGLAGFTPTPYQSGESAREQGITKSGNRHVRWMTTELAWSWLRFQPDSALSCWFRERFGGGGKRLRRIGIVAVARKLLIALWRFLETGVLPAGAVLKEA

SEQ ID NO: 126147 - protein, 340 aa, unidentified
MDTIGLDLHKRESQLCVLTEAGEIVERRIVTSRERFTAVLGSQPSARILVEASTESEWVARHLESLGHEVIVADPNFAPMYATRRRGVKTDRRDARTLAEACRLGAYRPVHRASAPQRHVRAQLAVRDALIRTRTRYVSVVKALVRRDGLRLPPGNPVHTDAKLAALPLPVPLARELAPLRALFEPLNNEITAADERLAAVAAADPVVERLRTAPGIGPVTAVAFVATLDDVTRFASAHHVAAYLGLTPREYSSGEQQHRGRISKTGNARMRYLLVEAAWRMLRTADPAAAVLRAWADGIAQRRGRSVAAVALARRLAGILYAMWRDGKDYQAPPPAAAP

SEQ ID NO: 126148 - protein, 431 aa, unidentified
MVVRQQNQKGGQDMSRKDSNAVLSVVHHDCCGLDIHKDKVSAALIMTHEDGTVEENISEFGTFTEDLYRLKEWILDQGCHVVAMESTGVYWRPVHNVLEDTCQVILVNARHVKHLPGRKTDVTDSRWLASLLRHGLLKGSFIPEKHIRRWRDLARLRKTYVESLADYKRRVHKLLECANIKIDSVATDLFGVTGRNLMDLLISGDEITLESVIGCTRGRLKGKAEELFKSIKGFFTEHHRFQLVSIFTLIESVEKQIAVVHERLSSLLSDRREKVDRLMQVPGISDVSAQALLSEIGDTLDQFQTAASLASWAGLCPGNNESAGKRHSGRSPVRGSIVKTIMIEITWAAIRKKGSYYREKYYSLRARKGFRKAIVAVAHRILNAVFHIIKFNRPYHDLGESYLIQLNNKARLHNLYNQAAKLGYKLVSAQA

SEQ ID NO: 126149 - protein, 342 aa, unidentified
MEITTVGIDLAKSIFQVHAVDAAGHVVVRKALRRAQVVPFFAKLPRCLVGIEACGTSHHWARELTKLGHEVRLMPPAYVKPYVKRGKTDANDAAAICEAVTRPSMRFVPVTSTEQQAALALHRTRDLLVKQRTQLVNMIRGLLAEFGIEMARGLRHALELAARLSAGDAAEVPPLAQRVVTGLADQIGALQIQLTRLEKELLAWHRENDLSQRLATIPGVGIVSATALAASVSEPERFRSGRQFAASLGLTPLQNCSGGKERLGRISRMGDRYLRRLLVVGMTSLVRRAKAAPTSVDSRLPALLQRKPVRVVTVAAANRTARVAWAIMTRGGTYRAPAATAA

SEQ ID NO: 126150 - protein, 350 aa, unidentified
MSIIGCDFHTGYQVIAMLEGEAGEIVTRRLEHENGEARAFYGGLPKPSLIGMEATGYTQWFEQMVKDLGHELWVGDAAEIWARSVRRQVTDTRSAEHLLDLLLTKRFPRIWVPTAEERDLRQLLKHRDKLVRMQTSVRNQLHFLAMSQGVCRKKKLWSAKGRAELETLSLGPWASQRRKELLELLDSLGPRIEELNQAVRVQAGRRGDCRELMKVKGVGPVTALAYVLTLGPVERFPKSRRVVSYLGLNPSEHSSGGRQRLGHISKQGNSMLRWLLVEAGQSAAQFDPELRRKYQRLKFRRGSHVAKVALARHLAVRLYWTLRQAGSATSPVPMSGSPGDSVEAARPSRS

SEQ ID NO: 126151 - protein, 369 aa, unidentified
MNKTLYVGLDIHKDTIAVAVAEDGRSGEIRFHGIVVNSADAVLRLTMRLSKNDHTPSFCYEAGPCGYGLHRHLTKLGFECAVVSPSMIPRKVGDRVKTDRRDAEMLARLWRAGELTPIWTPDEEQEAMRDLIRTRKQTMDAVKVSKQQLLSFLLRHGLRYENGGYWTQRHRRWLAELRRFRVSHQQLAFEELKRAIDQAEARIVTLDQAIEDAIPGWHFAPVVDALRALRGVNTTIAATVVAEIGDITRFQNPRQLMSWLGLVPSEHSSGSKTRRGRLTKAGNVLARTMLIEAGWSYRHPPKEGHPYLKRSAHLPQQIKDIGWKAQTRLCKRYRDLSRTGKPQPRVLAAIARELAGFIWDIARKTPLAT

SEQ ID NO: 126152 - protein, 382 aa, unidentified
MKNQNQQPTPTSHEQTEAKAEVIKLGIDIHKRQYVVVQQVDGEAPKSPQKFTPEAFLRQAAKMKARAKRVVSCYEAGCFGYVLHRQLLSMGIENQVVRPRNWDEYGSNVKTDGRDARELCSCLDRWLAGNEHALSIVRVPTEEQERARSLSRQRDTLAKEQKRLQNVGVSKGRYYGFELPMSWWKPCRFRKLEEELPGWFLDIIRPIQEILVAIASQLKAATAREECKANRKLPVGLGALTASVLDQEFRDYTRFNNRREVASFTGLCPSEQSSGGTRRQGSINKHGNPRIRSKLVEFGWRLLQFQKEYEPVKKWQKKLAEQPKGKASKKKMIVAIAREFSVDWWRINTGQIEPEDVGLRVDYPTAYATRALREGRMVQHYN

SEQ ID NO: 126153 - protein, 329 aa, unidentified
MNQTFICILDERGKIVYEDQVYTDPHKISQSLEKSCFPLETIGFESGSLSGYLTRTLKELGYPVICIDSRKMAAILSVTINKTDKNDARGIADAVRCQHYKVVHPKTEEEESLGVLLKSRHCLVNQRKDLKNTIRGFLKTSGIRLGSVSPLRFSALVRSHFENLLTETVQGLGALLTCFDQLTEQIKTLEKELKKIARQDNQIQNLMTVPGVGLIVSLSFKASLGDPSRFSKSISVRAYYGMTPRQYASGETMKQGSISKCGSSQMRYLLTEAAVVLLTRIKSRSHLKTWGLKLKAKYGLKKAATAVARKLSVLMHRMLITGESFKYGS

SEQ ID NO: 126154 - protein, 346 aa, unidentified
MQYTAFDAHKHYTWARVEGADGTLVREKKILHERGAFQQFLAGCEPGSPVAVETVGNWYWIVDEVEAAGCLPQLVHARKAKLMLGTVNKTDRLDARGLVRLQRTGTLPVVWIPPRELRDARELPRTRMVLVQQRTRLKNRIHASLNKYGILLPDVSDLFGQRGRQELRARMSELPPHTGFVVSRLLEQVEGLDREIKGLEQRMEALFAVDDATRLLMTLPGVGFILGTVIGTEIGDVGRFGRHEQLAAYAGTVPRVHESGGRRHYGPVRSDVNRYLKWAFVEAANGVCRTRRTHSQRHTSRLYERIARRRGHQKAIGAVARHLAEATYWMLTKGEPYREPGMSRGA

SEQ ID NO: 126155 - protein, 371 aa, unidentified
MKKYSIFVGMDVHKNSIEIAIAQRGRNGEVHSYGKIDGTLDALDKVVRKLVSKGGRLHFVYEAGPCGYGIYRHLTAKGYDCSVVAPSRVPKKSGDRIKNDRRDACLLARLDRAGELTPVYVPCAEDEAIRDLTRAREDAKTDEKRAKQRLKSFLLRHGLRYAGTASWSKAHMHWLSDIKMDHPGQQIVLQEYIDTIGECSRRVHRLTDQIRQLVAQWRMAPIVKALQALRGVSLIVAATTVAEIGDLNRFENPAELMSYLGLVPSEHSSGEKTRRGSITKSGNGHVRRVLTEAAWAYRLPARVGRGLLKRQEKLPEKVCDISWKAQVRLCSRYRQLWAKGKPRQVVVTAIARELCAFMWAIAREIEVPPTT

SEQ ID NO: 126156 - protein, 424 aa, unidentified
MKNCNKQNEKIELVDEKTLVIGVDIGSYDEYARAFTCRKQELSKKPLHFYNTAEGFKTFKDWAVNIMKANGLEKIIVGMEPTSIYWEALATYCKDNGMILVHVNPAAVHKSKELDDNDPSKNDRKDPKVIAGLVADGRYQFPYMPEEEYAELRELSNLRIRTQESLTQCKNRLSRWYSRYFPEFKGAYKNVVSKTAMMILDLYPLPEDIVTLGVEGILQIWRSKKVRGAGERKARKLYEAARNSIGRKEAASIARIEFKSIKEDLDRYQERLDEIEKKADEILPKIKNVDKLFEIKGVGKATVLTFLSEVGEISRFDNPKEIQKLAGYAIVTNESCKHQGEKRISYRGRKRLRWVLYQTALSVIAKNAEFRQIHAYYTTRANNPLKGIQSVVAVACKMIRIFYKILTDGVSYDGTKMTQDIVHA

SEQ ID NO: 126157 - protein, 344 aa, unidentified
MNHYAGIDVSLEYSSVCVVDGTGKILREAKVASEPEALIAWFRSLGLPLERVGLEAGPLSQWLYAALREAGLAIELLETRHVRDAFRAMPVKSDRNDARGIAQLMRLGWFRPVHCKSVEVQETRAILTARKLLQSKLRDIENSLRGVLRGFGLKVGPTTERTFAKRIRDLVAGHPGLAVVAHALLEAHAVLRREFDGLDKHVQKLARSHPQARLLMTTPSVGPIVALTYASAIDDPKRFRSSKATGAHFGLTPKKYQSGETDYTGRISKIGDASVREALYQAAHVMLTKPVKNCSALKGWAMRIARRAGMRKAKVALARKLAVILHRMLADATPFNPMVKATAS

SEQ ID NO: 126158 - protein, 377 aa, unidentified
MKNVRFVGLDVHAETIAVAVAEPNGEVRSLGIIPNRAESIGRLMRKLGKPEQLRVCYEAGPTGYVLYWQLSELGVKCEVVAPTLVPVKAGDRVKTDRRDAAKLARSYRSGDLTAVWVPDAAHEALRDLVRARLAAKRDQLRARHRLSKFLLRHGRRTPEGTSPWTEKYLHWVKSAVHFEHTAQEVTLSDYLHEVEHAAARVLRLERSIDAAIETLPVKMRAVIDALQSLRGIAQISAVTIMAELGQLSRFEHPRQLMAYSGAVSSEHTSGQRVRRGAISKSGNAHLRRIVVEAAWAYRHRPAVGKTLAVRQRRSTAAVTALAWKAQHRLHLRYARLLGRGKSKQQTVTALGRELLGFIWAIGVHVERQVHTPLHQAA

SEQ ID NO: 126159 - protein, 414 aa, unidentified
MDVIHGRCAGMDVSKRDAKVCVRIAGRGRRKTVETVRTWASTTNAVLALREHLVEEQVSLVVMEATGDYWKPFYYLLEDAGFEVMLVNARQVKNLPGRKSDVSDAAWLAQLGAHGLVRGSLVPPAPIRELRDLTRARTMMTRERGRDIQRLEKLLEDAGIKLSSVASDITGVSGRLMLQALIDGQRDPAVLADLAKRRLRHKLPELTEALTGRFADHHAFLARMYLEAIDQRSRAITELTARIEVVIEPFRSFCNLICTVPGIGVRCAEVIAAETGADMSVFPTAAHLASWAGTCPGSNESAGRVKSTVTRPGNPYLKAALGAAALSIANTRGTYLAAKYRRIAARRGPKKALVAVEHAILIAIWNMAHTGAEYDDLGADYYTRRDPERVRLHAMNQLQRLGYHVTLSPAATSA

SEQ ID NO: 126160 - protein, 428 aa, unidentified
MQSSTARKLAQIPGKSLIVGVDPHKRTHAAVMITQQAEVCARLKIENTRVDFEHLVKRAQAERIKAGADSIIFAIEAGSHCWRNLAYYLHEQKLAFRLISPYTLKRQREGEDLTRRKNDYRDAMMAAELLRTGKFTETRLLEGGYAELRARNQCYRRLRSVHSRIRNQIRALLDGVFPEFCSEFSDPCGQTSAAVLSSGPLPSVIASQNSMAFIATVRQAYVGQRLAIGKLEALHALAASSVGIEADAKAVAEELGLLVQQQRLVAGQIERVEHELREMLPTFDESPYLLSIDGLSALTAAGIMAEIGPFGNYRDAKDLVKLAGVNPTQSESGGKSQSHTPMSKKGRAGLRGCLWQGAVSMLRANQEYREWAEKMQNRSAANHPLHRREVLGAAMNKLLRLCFALVTKKQMYRRPEAEPKLVPVAVAA

SEQ ID NO: 126161 - protein, 341 aa, unidentified
MKATTIGIDLAKEAFQVHGVDEHGKRLFNKQLKRSQIASFFTNIPPCLVGMEACASAHFWANKLQGLGHTVKLMAPQFVKPYVKTNKHDAADAEAICEAVTRPNMRFVPIKSPEQQAVLALHRSRQGFIKQRTAQANQIRGLLAEFGIVMPIGIHQLLRRLPEILEDAEIQLPSLFRVQLSLLQKHIEYLFDVVSTLDKQIEQCHQQNALCQRIGKIPGIGPITASALIATIGNANNFQNGRQLAAWLGLVPRQHSSGGKQLLLGISKRGDTYLRTLLIHGAGAVLQSVKRKQDTLSGWASRLLERRNNNIASVALANKNARIVWALLAKDQEYCAPVMNV

SEQ ID NO: 126162 - protein, 447 aa, unidentified
MNTRNLNSGAFELMHPNAAGIDIASQMHYIAVPMDRAEQSVRKFGSFTEDLHEMARWLKSCNIDTVAMESTGVYWVQPFLVLEEYGFDVFLVNARYIKNVSGRKSDVKDCQWIQQLHSYGLLNKSFQPEELIRELRTYVRQRKNLTQNSATQIQLIQKAFDQMNIKLHNVISDITGKSGRLIIDAILRGERDAGILAEFADIRIKASKEDVVKSLQGIWRQDNLFELKQAYELYQIFKDKIMECDNQIETVLQRLVNDSDKAQNKKENRKTKSKNKFSFNATDYLNIITGVNLTDIFGISELTVTEIVSEIGTDMSKWATEKNFTSWLNLAPNTRTSGGKRLKGKSIKKINKAGQAFRIAASTLKASNNWLGEFYRRIKAKSGTPVAIKATARKLAIIFYKMLKDKVDFNPLPIEEYNQYFKERKLKYINKQATNYGLKLVPVDFVS

SEQ ID NO: 126163 - protein, 430 aa, unidentified
MKSNTQNAKIEAITEKTLVLGIDVGSEMHYARAFDYRGIEYSKKPFKFSNTEAGFLTFKEWIRDIKERHEKDKVVPGMEPTGHYWFNLGKFLQDNEMKPVLVNPHHVKKSKELDDNNPTKNDCKDPKVIAGLVREGRYMIPYLPEGVYADLRTASNIRFQLQAELTRIQNRISRWFNIYFPEYRTVYGKPDAKSGMLLLKTAPLPEDILTLGIDGVNQIWRDAKLRAVGKARAKTLIEAAEHSVGSKEGAVSARMEIRMLLEDYESRNTRLQEVMILIEELVRKIPMAEKLLEIKGVGIRTVSGFLAEVGDISRFNNPKELQKLAGLALVENSSGKHKGETTISRRGRKRLRYLLFEVAMSLVSKNQEFRELHNYYTTRRLNPLKKMQSLMAIAAKLIRVFYAMLTKGVDYDPKKMVSDIKRPAVYLQAA

SEQ ID NO: 126164 - protein, 399 aa, unidentified
MLAVGIDISKSKSVAAILNQDGSMHTSPFEFQHTQPELDAFIKYILNSKQSATILMENTGHYHYPVLKAFQEAGLPVCMVNAYQIKKFGDMDLRKAKTDKKDAVRIARYALEKSYSLVPYTSMEQKYEDLRFLARQYNQRMLTLKTNKVFLLNLLDETMPGITNILPLTTRAPGTSLSVLFINRFKSYDRIKKMGKSRFLDAFEKIARKSRNRQTKTYGLAIYEAALRNITTRGENEYTLAAQDQCLELVCESQKAADSIILKMQTLAETLPEYAVLRSMAGVGDRLGPLILAEIGDIRRFHSGKALNAYAGNDAPPYQSGTFESHNRHISKRGNAALRKYCFEVMQALKLTRPQNDPVYLFLLKKEQEGKPYNVAKMAGVNKFLRIYYARAMETLKQQ

SEQ ID NO: 126165 - protein, 325 aa, unidentified
MTLHVLGIDIAKETYQVVLLRDDKKRSHTFRNHPDTFAELTAWLAKHHVAQVHACMEATGRYWEDLAVFLFQAGHLVSVVNPARIHGYAKSKLSRNKTDKLDAALIADFCATQNPPLWTPPPPEVHELQAMVRHLEALHQMRTQEGNRLASGVPSDQVLQMLREHVAFIDEQIDALKQRIQDHINQHPGLKQQQDLLTTIPGIGDLTAAKLLGENIQSFSSTRSLAAYAGLSPQKGESGTSVHRRSKLCKVGNGSLRKALYFPAICAMRFNPLIMDFCDRLAQRDKHTMVIIGAAMRKLLCLALGVLKSGVPFDPYHVENVQLTA

SEQ ID NO: 126166 - protein, 450 aa, unidentified
MAKKSIRTRKKKSVPSRRKTNPNAAGIDLGATVHYVAVPAERDSEPVRHFGTLTEDLQALADWLKACAITTVAMEATGVYWIPLFQILEDRGFEVYLVNARHVKNVPGRKSDVQDCQWLQYLHSVGLLNASFRPPAAFCALRSLMRHRESLMRGGCQHLLRVQKALDQMNVQLHHAVTDITGLTGMAILDAIVAGERDPEVLAGHRHYRCQKSEAQIAKALKGDWREEHLFTLRQSLEAWRFHQKLMANCDQEIAAHMSALEDQEEGPAPPSNKKGNKAPDEPMRQHLFAKFGVDLTAVEGVSIQTVLAFLGEVGTDVSKFPSAEHFGSWLGLCPDNRITGGRTHAAHTRKVNNRLATALRMAAQSLFRSQSALGDWFRRLRAKLGAKAAITAAAHKLARVLWAMIKYRRPYDPGRLGNPELRRARKERFLRRQAEQLGFTLTPLGGEVS

SEQ ID NO: 126167 - protein, 341 aa, unidentified
MTEVSTIGLDLAKNVFQAHGASAAGEVLFRRKLRRDQVLGFFAAQPPCLVAMEACPGAHYWGREIGKLGHTVRLIAPAYVKPFVKRQKNDAADAEAICEAAQRPTMRFVAVKSEAKQTSAVIFRTRDILVGQRTQLINAIRGHLSEYGLIAPRGPFHVGRLIAHIEDPASSVPEAARSCLALLVEGVRHLQEQIGKLDAEISARAKADEMTQRLMTVPGIGPLIATAIEALAPPAETFRSGRDFAAWVGLTPVQRSTGGKERLGRTSRMGERTLRRLLIIAASAVIRWAKRKGVPKGSWLGRMLERKPPMLVIVALANKNARIAWALLTKGESYRAPAVPA

SEQ ID NO: 126168 - protein, 380 aa, unidentified
MIFVGIDVAKDKHDCCILGPAGELLRDSFSFANTRQGFEALRTAIQEAVGSQDNLQIKAGLEATGHYSENLVAFLRTSGVEPVVFNPLRVKLFRQALSLRKTKTDKVDARCIASLLMSDDSNPVAQSYQIQELKSLTRHRSRLVSSRAKAKIHLARLVDILFPELPSVCWSLSQKSILSLLKELPGATRIAGCRIDRLTNLLSENSHGKYKQGKAEEIKILARQSVGRGSEALSFELIQVIESIQFFERQIHVLDKQLAGFVKALGTPLLSIPGIGCTLAAIILAEIGDINRFASPDKLLAFAGLDPSTYQSGRFVAGKTPMVKHGSTYLRWALMQAARLVAMRCPDFRQFQAKKLAQGKHHFVVLGHVAKNSYALFSTF

SEQ ID NO: 126169 - protein, 366 aa, unidentified
MPSVAHLGPTHLGLDVHKDTISVAILAPDRDGPDVDRIPHDEPSVRRLVGRLGDPRLLRACYEAGPTGYELARLLASMHVHCEVIAPSLIPKAPGDKVKTDRRDARRLARLHRAGELVAIRIPTAQEEAVRDLCRARADLVEDRTRARHRLSKFLLRHARPWRGGNAWTLTHERWLLAQRFDQPALAATYAHYRAVLDVRDAQLEAIEADLATWYDAAPFADAVHRLAAYRGVTRLGALTLASEVCDWRRFARAAAFTGFCGLVPSEYSSGTSTRRGHITKTGNAHLRAQLVESAWAYQHRPAVGVDLRERQRGLDPAVVARAWAAQLRLCGRFRRLAARKDSTNVVVTAIARELAGFLWAEMLVA

SEQ ID NO: 126170 - protein, 449 aa, unidentified
MNASPPPDPSSPTAAESAARLSSTAFSTLTHYGGLDWARGHHDLCLVDPAGAIVFELRIDDTPQGWADLRAKLAALKAPDGSPAVVGFAIETNNGPAVERLLEAELPVFPLNPKAAERYRDRKAASGVKNDRLDAFCFADALRTDGHLWRPLRPQDPLTHELRLLCRDEITLIGQRTALVNQLQAALNEYYSTALAAFDDWTAPPSWEFLIAFPTPHQLASAGKRKWEKFLHTHKLYRPQTSARRIELFASAARAASPNAAVTAAKSLLAVSIAKQLRTLQTQLDEYRARIIDIFGKHPDADLFGSLPGAGEKLAPRLLAELGSDRRVFDNPQALQCYAGAAPLTQQSGGKRRVLFRRACNTTLRATVHLWADHSRVKSPWAQAYYRQKRDQGMDHAAALRCLAMRWLKILWKMWTERQTYDADRHLRDQTRHGSWVIRLIPQPAPRPD

SEQ ID NO: 126171 - protein, 344 aa, unidentified
MTNRNLIAIDLAKDVFQICRVSKQGKTLSNKPVSRKKLKELLINSPPSIVAFEACGSSHYWGRYASEHGHEVRMLPAKAVKAFRQGHKTDETDAQAIAIAAQHQPIRSCALMNIEQQTLQSFETSRRYISKQCRALSNHIRAIAYEYGLTIPKGNGQLFKRVAIILEEAENGFPHALRATFHSLCEQLKVQQALLKMIEKEKNQFVKCIEPCQRLIALEGVGPVGASMLYSCIGKGEMFKNGRNASTYLGVTPKQHSSGGKTILVGIDKKGGNKMLRAVLYQGALSVISRLPEKPLTVKQEWLIQLVKRVGVKRACIALANKTVRTAWALLSSGEAYSPKPLTV

SEQ ID NO: 126172 - protein, 408 aa, unidentified
MRVIGLDIHRVFAEAVALEAGRCTRLGRIEMRRDRLTAFARSLTHDDHVVIEATGNAAAVAEVLRPHVGRVVIANPQQVRLIAHAKIKTDRIDASVLARLYASGFLPEVWIPDESTQALRRQVTRRNQLVRQRTRLKNMVQSILHAHLIPPCPAADLFGPKGRAWLSQQILPPDEREAVERHTREYSRLGEDLSVVERDLARNALADERAKRLMTIPGIHMVVAVGIIAAIGPIERFASPQHLVSFLGLNPSVHQSGNGPVHHGRITKRGRGHARGMLVEAAWVAARVPGPLRAFFLRIRARRGQHIAAVAAARKLAVLIWHMLRRHEDYAWIRPALHARKIRDLELRAGHPAQRGQRGAAYAYNLSTVRQRERWRVEQAEKAYQRLVKGWTQYGPKVRTGAAKEERQ

SEQ ID NO: 126173 - protein, 344 aa, unidentified
MVYVGMDVSSKSFVVHAVNERKRVVWRGEVAATPSGLKRAMAALGEHTKLVVFEAGNQMKWIARELGRLKGVRLHIVHPNEVKWISQSSGKTDKVDARKLAELARGDLLPRKVHVVEGPVRELRELVGARHTLQSKRVALMNTLRGYLKQEGQRLPEKFFGRTDWQAALAKLEVGASTQQIVASFKGGIEALAHAEGELTRRIVAIKDRRIELLESIPSIGELSARVLLGALDEAKRFDNKKCVAKYGALSPRIYQSGDVVHLGRINRDGRQEVRHVLLQCAHTLTRMRSPGARPLRAFFERVLKRRGKKIAIVALARKLLTTAYGVLKAGEFYDPHKLLPCAG

SEQ ID NO: 126174 - protein, 355 aa, unidentified
MNGLRYIGLDVHQETISAAVLDREGKLIMQSVFATRAAAILDFLDGIKGTLHVTFEEGIHSAWLYDLLQRRVARVVVCDPRKNKLLKSGNKGDLIDARKLAELLRINSLSPVYHGEMSSLEVQHRTRSYTMLTGDTTRVMNRLKAVFRSQAIACPGRKLFRPDKRDSFVAQLATPGLRQRAESLYRELDALHPLRLRAKREMLAECRKHPAMKWLRSVPFLGKVRTAVLIGRVQTPHRFRTKRQFWSYCGLALQTHDSAEYRVVHGQLQRKSRPAQVRGLNWNHNHELKSLFKSAATMAAFRKGIFREFYSGLLAKGMRPEMARLTLARKIAAITLKIWKEGETFNAEHVKTQAA

SEQ ID NO: 126175 - protein, 428 aa, unidentified
MSEQHHSLLSKSSVEPNFAAYIGIDWSDRKHDICLYDVGTQNHTYLKLEHRAEVIHEWVASLRQQYEGRPVAIGLEQKRGPLIYALSQYDFLVLYPINPRTAAKYRQAFVPSRAKDDPTDADLLLELLCKHRDKLSPWEPDSDTLRQLRQLVESRRTLVGEKVRLTNRITAALKNYYPQVLSWFRDKDTQVFCEFVEQYPTLKAAQAASEEELRTFFKSHHVVRESAIQRRLSQIQTDVPLTEDESIIEPLQLLVQAWMQQLKVVLRNLQTFDHRIEDLFEQHPDAALFKALPGAGPQLAPRILVAFGDDRDRYQSAQDILRYTGIAPVKEKSGKKEWIHWRWSCPKFLRQTFVEWADQSRQHSFWADAFYEQQRRIGKTHPMAIRALAFKWIRILFRCWQDRVPYDEAKYLMALKKKGSPLVKHLAT

SEQ ID NO: 126176 - protein, 406 aa, unidentified
MITCGIDWAEGHHDVAVLDDAGRVLTRRRIDTGITGFSELMSLLAEHAEDPVTVPVAIETDKNLIVVALQAAGLAVFAINPRAVARYRERHGQSGKKSDPGDAALLADVLRTDRHQHRTLPKISPAGLAMKALARQHQEAIWALHMTTSRLRSVLLEFYPQALKAFPNLKHKAALTVLASASTPELGNKMTRRRLVALLHRCGRRNDAALVEQIIADLTTPALRQPAPIETALGQAVVTLIGILTAMHTAVEQLETALETEFGQHQLAPILRSAPGLGPILAARVLAEVGDDANRFTTANGLRAFAGTAPVTRASGRSRRVFARRVRNKRLGDACHWWAFAMLTKSPGARAHYDRRRAAGDHHNAALRNLANKLIGRLWWCLQNEQHWDETAAWNDPATTPIPAAA

SEQ ID NO: 126177 - protein, 396 aa, unidentified
MEVYSKYVGMDVHKETIAVAVAEANGGEVRYLGEYRNTPEAVVKLVKQLRKGGAVLSCCYEAGPCGYGLHRQLVEMGVANQVIAPSLTPKKPGVRIKTDRRDSLTLARMLRAGELTAVWVPDVSQEALRDLTRGREDLKHLEKQAKQRLQAFLLRHGKVYAEEKKWTRMHFRWLESLTFELPVQQIVFQEYLDTLQSLTRRVDALDGQIHQAGAESKSAPVIAALMALRGVNQLTATTLMAEIGDLRRFPTAPQMMTYLGLVPSENSSGETRSRGPITKTGNGHVRRVLVEAAWTYRFPARKTTYLQQRAKRAPEVVQEIAWKAQTRLCARYRTLEGRGKLKVKVCTAIARELIGFIWAIGQAVPGPEANASGPSVKPQCVGSRTDHGGRTLQDPM

SEQ ID NO: 126178 - protein, 443 aa, unidentified
MSDLAVLDPRAAFVDVGSEKMHVSIAGGQPAVFGTVTSQLHSLRDYLAEHQVRSVAMEATGVYWLPLYGVLEAAGMEVVMVDGRQTRNLPGRKTDMKDCQWGATLHAHGLLRAGFVPPADIRRLQDYLRLRGDHIAAAAGHVQHMQKALERMNIKLHEVISSLTGASGLAVIRAIVAGERDPQVLLGLCDIRIRNVKAERVVESLRGDWAEEHLFALAQAVQCWDHYQGLIAACDHQIEVVLRQMPDANTPPSAASTQTGKSRTRPGVNAPDIADLREILARICGAKDLTTLPAHSEYSVLQLIGEIGTDLTKWRTEKHFTSWLGLAPGSAQSGKRKVPVKRRRNRAGQLFCVMARALARSKYVALGGFYRRMAVRRGGLVANKALARKLATLFWRVMVKGLDFVETGVAQYEAKVVETKRRILHRLARQLGQQIVPSPAAAV

SEQ ID NO: 126179 - protein, 343 aa, unidentified
MNQYIGLDVSLKDTAISIRQDGKRIWRGKCPSDPKLLAEVIRKHAPQARGVVFETGPLSTWFYHALTAEGVPAICIEARHAQKVLNETLNKTDANDADGLAQLAEAGFYKAVRVKSFDAMMARTLVAAREQLLYISTQLGNQIRGLMKTFGLIIPKGKGWVFDDDVRKLLDGNNELAKIILPLLEAWHDIRKRAADLGRQLLIVARRSEATKLLMTIPGIGAVTAVSYVTAIESPKNFRTSRSVGAWLGLTTRRYQSGEVDYDGHISRRGDNRLRGLLYEAATVLLTRTSTRTESSLKRWGLKLRERLGFKRAAVAVARKLAVIMHSMLKTGEVFNASAGATI

SEQ ID NO: 126180 - protein, 337 aa, unidentified
MKVTLIGIDLAKSIFQVCGVNQAGKRVFNRQLRRAKLMEFLLQHPAATIAMEACSGSNYWGRTLQQHGFKVMLIPPQHVKPFVKGNKNDRNDAFAITEAARRPNLKCVEPRTLAQTDMIQVHRVLDRMTRQRTALINQIRGFLNEYGIVVAQGKERLLSAMPDLLEDARNGLTAPARLLYQQLLEQWRQANEAIKQIEKGLKGQAKTDDDAQRLMKMRGVAVKISTATIAHAGNGHGYKSGRHFSANLGLVPKERSSGGQQKLGGITKRGNQYLRSLLIQGAWSVVRNVDKNDDRLSRWAKELVERRGKHKAVVAVANKMARIMWSMLYHQTEYRAN

SEQ ID NO: 126181 - protein, 355 aa, unidentified
MNEAKYIGMDVHQATISVAVRDSRGNLVMEAILATKAETILQFIRGLRGSLYVTFEEGTWAAWLHDLLQPQVTRVLASDPRKNALLKAGNKSDRIDARKLSELLYLNKLSPVYHGEQGIRTLKELARSYITMTRDLTRVMSRLKAIYRSWGIPCAGQQVYAPHYRAEWLAKIAEAGVRRRAELYYQQFDALAALRQGMRRELLAEARKHPAMRLLQQIPAIGPIRAALLIALIQTPNRFRTKRQLWAYCGLALRTYTSGDYRFVAGQLKRSKKVLAVRGLNINHNHDLKNIFKGAATRAAATAGSLQDCYQACVARGVKPHLARLTLARKIAAITLLVWKKGVRFDAEHLKQQAA

SEQ ID NO: 126182 - protein, 422 aa, unidentified
MRSVALDVHLDFCEVAIVEDGEVRSAGRIETKPEQIELFASSLGPGDRVALEVTGNAWEIARTIQPHVAEVLVVSPSDTGIRQARAKTDRLDARTLARLLAAGSPDGVWMPDRWTWVMRRRLSRRSQLVWARSRAKNQVHAVLMRQLVGRPPVADLFGVKGRRWLSELQLAPEESETVSAAMRQIEFFEKEIAEVEQLIALAAMESAEIKRLMSVPGVNVIVAASFMAAIGNIHRFQSPRKLVGYLGLDPRVHQSGVGPASHGHISKHGSVRARHALVEACWTTVRQPGPLHAFYQRIRARRGHSVAIVAAARKLASLFWCLLTRGEDYAYQQPSLTRKKLRRLQIAAGAERYTPKASGIWSANDAVREAERELARQAEVAYARTVRDWHAAQAVKVGASVTPGRASKKPSKGEAARQTTSP

SEQ ID NO: 126183 - protein, 409 aa, unidentified
MKLFVGIDVSSKDLKVCIMNHEGDTLKSFTVDNNLHGSGHLRDQIIELADEHSCQDIQIGMESTSVYSWHPAMFLNEDEALKNRQAKVYTINAKLINKFKEAYVDLDKTDDIDAWIIADRLRFGRLPKTMVMQEQYVALQRLTRMRYHLTHNLVREKQYFLQNLFFKCSAFTNEVESSVFGNAIMELFLEQFSIEEISSMDVSNLADFLKEKGKNRFPNPEQVAKCIQKAARSSYRLSKCVEDSIDILLATSIETIRSLKAQIKQLDKAIEKILDGIPNTLQTIPGIGPVFCAGILSEIGDINRFKDQASLAKYAGLTWRRRQSGDFEAEETKRIRSGNRYLRYYLVEAANSVKTYEPEFRSYYQKKYREVPKHQHKRALVLTARKLVRLIDTLLRNDQIYTPERKVNR

SEQ ID NO: 126184 - protein, 339 aa, unidentified
MGFYSGLDLHSNNCVVGVMDKDGKRLRKKRVPNELPAVEAVLAPYREELLAVVVESTYNWYWLVDGLKAGQYPVRLAHPAGNKPYSGLKHTDDGDDAYFLADLARVNCLSEGYIYPRETRGVRDLLRQRGRLVRERTAHVLSIKNMIVREGGQALTRSQVEGLSDEAIAQLVRDSYGQVGIKALGTVLGVLSEQIRHLEKTVLAQAKPDPVYQRLQSIYGVGPVLAVTIRLESGDMSRFPTVGDFTSYCRGTGSRRLSNGKPKGENNKRNGNAYLAWAFLEAAHFAVVNYPLAQRFFERKRAESNRILASKALASKLSKAAFYVMRDQIDFDPERLFRS

SEQ ID NO: 126185 - protein, 342 aa, unidentified
MRIIGCDLHAAQQTIAMLDRETGEIVERTLRHDGTAVRDFYAALPPPVVVGIEATGSMGWFLRLMEELGVTCSVGDPAKVRKVETRRQKHDRRDAALLLELLTEDRFPAIWMPPAELCDLRALLRHRDQWVRIRARVKNALQGLALAHGVRRGAGLWTREGQATLAALSLAPHAGHRRSELQALNDHLTEQIDALDQHVGEQARARPQSRRLMTHPGVGPVTALATEVFLGDPSRFADAKALASYVGMIPSEYSSGARQRLGSLTKQGNPMLRFLWCEAAIHAVRRDAALGRFYRRKLQQKGLGKARVAVARKLGIRLWILLRDQIDYAEFCRRAPAPATAR

SEQ ID NO: 126186 - protein, 308 aa, unidentified
MTTIYTGLDIAKLNLQLHLLGRRHDLPNTAAGHRRLVKLLAALPGAHVICEATGGYERDLVAALHEARIPVSVLNPARVRHFARATGQRAKTDPLDAAILTAYGQALQPPPTAPRTPQEHHLSELIRRRVQVLALLVAQRQQAQRLTVPALRRQAQSLVRRLERDLKQIETQLGQLQAQAKALDERVQKLIAITGVGTITALGVLAELPELGTLNRRQAAALAGLAPHPRESGQWHGRRRIGGGRAPVRRALYMAALVAARSNRQLKAFYQRLRAAGKPAKVALTAVMRKLIILMNHTLKNPNFVPQN

SEQ ID NO: 126187 - protein, 463 aa, unidentified
MQTRPLEAVAGFASVSGSSAHLWVERRDEVPTRPAMPQGSGMQGATLAHVTTSTIDPTLTEAAATEVFAGIDWGGSFHQICLIDEDGKVLRQQRVPHDAAGFDELDRLLTCHRARLRVAIERAEGLLVEQLHLLGVEIFCVSPKISARARERYRMAAAKSDAFDAFVLADTLRHEHRHWRALTPPSPVLAELRAISRDRDRIVIAQQATENRLRAVLDAYHPAPLHLFSTLDRDITLDFITDYPTPEQAGRVGTARMDGFCRRHGYSGRTQPEVLVERLRPHLLSAGEGTVAGKAFSASLFTEQLRMLNTHLRAYDKRLDELLERHPDTPIFTSFPGVGPLVAATLISEMGDDRHRFPAPGALLAEAGLSPVTRASGRTRQVRFRYASNRRMRHMIDWWMFTAIREDDWTRQAYDHARARGQGKYRALRGLGSRWTRILWRCWTDHTRYDPAIHHRNPEPTTA

SEQ ID NO: 126188 - protein, 336 aa, unidentified
MTILYVGEDVAYASFEGVAWSKRTPRQVERYDNTPSGFRQFAKRVEALRRAEGASAIHLILEPTAGYQAALVLFAHRRGWRITQVNPLQVRRWAQGAGRRAKTDVQDALLLAEYGERMQPAPQEQTPPEIQELDLLLRRRQDVEDLLQRERNRLFTLKKHPHPPASVRQSLERTIQQLEQELAQLEEALEAFLKAHPALQEQQRRLRSVPGVGARSVLRLLVLLYRFYALTAAQGTAKQFVAFLGLDPVPHRSISSVYRPPSISKKGDKSMRTLLYMAAFGGVSGYNPLGHFYRSLIARHKPKKVALVAAARKILVWAWAVFRSAQPFQTALKPVP

SEQ ID NO: 126189 - protein, 392 aa, unidentified
MRKPKKQKMPPLNDLSRSLTAFDPNQTLTVVVELSKKNWLVAGIIPGVERQPLKKLPTDENELLKLLERWRAEAEKAGHKITRIAVAFEAGRDGFWLARWLRARGIEAHVIHAASVAVPREHRRAKTDRLDTQLLKRSFLGWLRGERDHCKMCAIPTFAEEDAKRPHRERETLVGEHTTIINRIKANLARLGIRSFDPQLEKASLEKLRTPEGEPIPSNALAELARDLARKQFVAEQIQQIEKVRLEQLKQAPKIGTNLMVLLLMRVIGIGIETADMLVKEILSRHLRDRRAVARYGGLTGSPDESGSSSREKGLSRSGNARVRRGMIQLAWRFLRFQKQSVLAEWFEARTKNARTSRKKMIVALARKLLIALWRFVRDGVVPEGVALRPAH

SEQ ID NO: 126190 - protein, 384 aa, unidentified
MKESSTLYVGLDVHKDSIDIATADAGREGEVRHVGSLGGDLVGLDKALRKLISKGHRLHVVYEAGPCGFVIWRHLSTQGIDCEVVAPSSIPKRSGDRVKTDRRDAMMLARLSRSGDLTAVRVPGAADEAVRDLARSREDAVRECRNARHRLKALLLRNGIGYAGKSAWTAAHLRWLATLKLEYAAQQIALQEYLHAVTEATTRVGRLEQAMRDTLPEWGLAPVVQALQAMRGVQLVAAMTLVAELQDFLRFDNPRQLMAYVGLVPGEHSSGPKRRQGSITKAGNSAARRMLVEVAWHYQHSPRVSPIIAKRHDALPKGVTDIAWKAQLRLNAKFKRLVARRVLKNKAVVAVARELTGFVWAIGREVQTSGWQGIKTEPARSAAD

SEQ ID NO: 126191 - protein, 369 aa, unidentified
MDDITFVGLDVHKATICIAVAEGTRGGEVRQLGVFENRPEILRKVVSRLSKGGRRLSFCYEAGPCGYGLHRLLTGYGHECVVVAPSLIPMKAGDRVKTDRRDALMLAKLHRAGELTAIWIPDAAHEAMRDLVRARATAVRVLVKARQHLQGFLLRHERIYRGARAWTLAYRRWLSTVRFDHPAQQIVLQDYIHAVQEAETRRDRLTQQIEELLPNWSMAPVVAALQSMRGVALVVAVTVVAEVGDFRRFANPRQLMAYLGLVPSEHSSGSSVRRGGITKAGNALARRVLIEGAWTYRMSARVSRKLHDRLEGLPAAVRDIAWKAQLRLCARYRRLAATGRPKVVVTTAIAREMVGFIWAIARVAQPALV

SEQ ID NO: 126192 - protein, 397 aa, unidentified
MIAVGIDISKAKSTVAVIDSDGTVLASPFTMAHTQPEMEAFVSYLKGLGEPTTILMEYTGHYHYPVLKKLQDEGFPVCIVNPYQMKKYGDVEIHKAKTDKKDALRIAAYALEKSYKLVPYSSMEQKYEDLKFLSRQYNQRISYVAKLKVQLVALLDQTMPGITRILPLNSRNPEKCALLLFIKRFKSFDEIQRIGKARFLASYDVLAKKASERSASSKGLSIYELAVDSITTRGEDPYIWLSQNQCVDLLSATQNAADEIISQMRNIAETIPEYKVLRAMHGVGDRLGPIILAEIGDVHRFHSGKALNSYAGNDAPPYQSGQFESRNRHISKRGSSTLRKACYEVMQALKLTKPQDDPVYLFMLKKEQEGKPFNVAKMAGVNKFLRIYYARAMELYK

SEQ ID NO: 126193 - protein, 435 aa, unidentified
MISAAIERCAGIDVHKKFLAVCVMMGPLDGEPRVEKRRYGTTTIELSGLREWLRSQSVTHVVMESTGSYWKPVFNVLEEAVKVYLANPQEVKNRRGHKTDDKDGWWLAHLLRHAMIRPSFIPPRLVRELRDFTRRRKRLLGNATSERNRVQKILEDANVKLGNVLSDVFGASGQLMLDALLEGHATPEQVAHLAQRKAKKKIPEIIAALEGHQMTAHHRKLIRYSLEHLQFLEEQISKLDDDIAAKIREAQLEPQWQLLQTVPAIRDTSAAAILAETGGEMSTFPSVKNLSSWAGLCPGNNRSAGKNKSSRTTGGNPWLRSSLVECSWAATVKRGCFLKEKFWRIVSKSRDHKKGPALIAVAHTLLQLVFQVLSTGKPYAERGLAPLDERQRNRIVRHHVRRLGRLGIAIYSLQPTTAAGVGRPLKAVILGPEPQ

SEQ ID NO: 126194 - protein, 391 aa, unidentified
MSLYFVGIDISKYKHDCCIISATDQKVISKFSIKNDKVGFEELITTFNSLSSPEDIRIGFESTAHYALNLELFLENAHHSFMEVNPVLIKEYKKSTTLRRTKTDSVDCESIARWLMTVEYKPHSKGFYHAYSLKSLTRLRDRLIRQRSFYLVKITNVLDHTFPEFKPFFNERLSKTALYLLENYGSAEKMARMNSVSYEKLRSISRGKFSPQQFIALKELASNTVGVNNSIFDVELNSLLTLYKTLVTEINTLEKEINLLIEEVHPHYLSVPGIGPISAAIIYSEYGDISNFDNPGQMLAFAGIEPGINESGTESHGGRMVKRGSSQLRYALINCCLPLIRFDMTFATYYAKKRAEGKPHRVAITHVAKKLIRVIYALERQNTDFCVQKLR

SEQ ID NO: 126195 - protein, 319 aa, unidentified
MSEVIIIGLDIAKHVFHAHGADGKGRAIFGKRISRGKLLDFFAAQPSCTVALEACGGAHHWARQLTQLGHEVRLIPPAYVKPFVKRQKNDAIDAEAICEAAQRPSMRFVAVKSEQQQAAGLVFRTRDLLVRQRTQLINAIRGHLTEYGWVAPKGPSHVTMLTDLIEEEETASSLPKAAHAMFLLMLDLLTDLNGKVADLDQEIARRAREDVVSRRLMTVPGIGPISATAIAALAPPAETFAKGRDFAAWLGLTPLQRSTGGKQKLGATSKMGERTLRRLLIIGRSAVVQQASKRGAPKGVVARTDAGSQTADAGNRRTR

SEQ ID NO: 126196 - protein, 379 aa, unidentified
MVSIVMGIDQHRAQITAEWIDVATGEISRARVRPADRVGVRRFLERFAGEQLEVALEATTGWRFLVEELRAVGAVVHLAEPAETAALRGNKRRAKSDRADARHLRELLLAGRLPESWIPPDHILDLRAQVRLRHTLIEQHCQWQQRIQAVLYHHGCPQRRQLMVGDGRDWLDAQSLPETARQQITVAIAIVDALERELAPVTRELRFYARRQTGCKALIEAYYGIGELVAVTVVSELGDCRRFANSRDAVRYGGLDVTVYQSDRHRAPGHLSRQGPPALRWALYEAAQVARHPRSPDRAYYEQAAERLGGNRACLALARKLLKRCYHTLRELGDDALAAPVEQKARSGAGSAAVRPASSGSSSTTKPAATHERADALAA

SEQ ID NO: 126197 - protein, 344 aa, unidentified
MLENARALTGGVDTHADVHVAAVIDPVGGLLGVEAFPADPAGYGRLEAWMAGFGRIALVGVEGTGSYGAGLARHLARAGLAVVEVDRPNRQERARAGKSDPLDAIEAARAAQSGRAFGVAKTRDGKVEAIRALVVARRSARESRTKALNQIRQLVYTAPDELRERFRGVPVWRLAEGVAAMRVRADADPVRMATKISLTSLARRALALAEEGAFLDAQIARLVDEVAPELVELVGVGPDTAAMLLVAAGDNPSRLRTEATWAKLCGVAPLEASSGKVTRHRLNRGGDRQANHALWRIVITRMSCHAPTKAYVARRTKEGKSKREIMRVLKRYVAREVYRYLPQT

SEQ ID NO: 126198 - protein, 421 aa, unidentified
MAAGIDVHRDTLAVTVRRSDGARERAETRTFDTFQDDIARMVAWFVECSVEVVALESTGVFWKPVVRELQLGCQAVVWLINPLQAKRVPGRKTDVSDSQWLSKLAMYGLVAPSFLPGPEQEELRKLTRHRVRVVQDRVRWVNRTIREMQAAGIKLDSVCSDPLGMSGRAMLEAIIEDNSSPAQIAELAKGRLRSKLPTIQRAVQGSFSEVSKMLLRQCLAQIDGMTELIGHIDAKIAQLSQPQLEQMRALDAIPGIDHVAAAAILAETGTDMSVFDSAKHLASWAGLSPGSNESAGKHKGARARKGDKYLRTILVQCATAASRAKGTFWKAKSGRLLRLGSKKAHVAIARKLLVCIYHMLRDGQPYLEPVAALPTAKQIERRTNAYKHQIELLGFKVTIEPAPAAPPPRALAERQLAALVS

SEQ ID NO: 126199 - protein, 336 aa, unidentified
MESKYFVGIDISSDYFTASFYSKEDKKSHTFSDFANSEKGFLSLLKELSLASVNVEESIYCMEATGVYGEHLAHFLYKKGYFVCVENPLKVKRSFGISNKKSDAIDSKRIAEYAYRFMDELRNWKPKPQIVEEIRMFLTQREQIIKQKVANINSKKALERKYQQSPEAIKNIKDMIVIQVKLIKNIEKIIIDLIKANPEYMQTYSNIISIPGIGNIIGAHILVMTNGFSEHLNYKELASYLGIVPEIYESGTSVRRRSSSSGLGPGTLRKLLYLASMTSRLHNKSMKEYFLRKVANGKSKKLVLNNIGNKLLKLIVALIKSGNSYNENFRSINSVF

SEQ ID NO: 126200 - protein, 401 aa, unidentified
MESPIVSIDVSNGNSHYMCFIKNNKRFGKVKKIDHDIEGFKRLLEDIQKLEAETNEKVCAVFEATGVYTKPLERFLSKNSIKTYIINPLESARKRKEEIHNKKTDKLDPISISKVYYDKEDMMELKKKDETYNWLRKKNRLYEDQLNHLRKYKVTFQNQLSICFPGYLDLFRDGYSDIPMTILKKYPHPDLLKNKKAETVARYLEKNTCHTHKISLEYALKIIGFAKKTYPGCEKDDVEVEIFKILLDKVIETQRECEKTLNEMITVASTLEEYRYISSIDGIGPNLAARIIAEIGDIEEFKSREALVAYAGLDPHIYQSGDQDGKHLKISKKGNKYLRCLLFLAVGCSIRGAKDNPVNRFYQKKKQQSNPLNSKAAKTACTAKLLKIIYGICKNKTTYER

SEQ ID NO: 126201 - protein, 322 aa, unidentified
MRYIGIDVSKATFVVAYSSDKGGEIRTFNNTTTGIKQFIGALPKDGSIHCVMEATGNYSAMLLYLLNVAGIAVSMENPLKIKNFARAMLSTVKTDKIDARLIALYGEKMNPQPFKIQGEAILRLRQKRTVIRQLTKQITAMSNLRGSLACLPVPDKGATHTVDETIEFLEKRRDRLQSELTDLVEVEFSRQLALLTTIKGIGITLATALIITTGGFTYFQNAKQVSRYLGICPTYEQSGTSVNIRGHINRNGDAYTRGLLYVAAWTASRFNTKCGETYTRLRQNGKPGKLAMIAVANKLVRQAFAVVTHDKEYVDGFVSNRP

SEQ ID NO: 126202 - protein, 422 aa, unidentified
MDVLYERVAGLDVHKDTVVACVRMVVDGKTTRECRTFAATTEQLVELRAWLEERRCTHVAMEATGVYWMPVFRILGEGDFELIVANAAHIKNVPGRKTDMNDAMWIADLLACGLLKASFVPDEEVQELRALTRTRKQLIREQTRHVQRIEKTLAEANIKLGSVISDIMGASGRRIIEAMIAGVRQPNRLAELAGKQIKATPKELYDALHGRLTDHHRFLLALHLKQWDGLDDTIRKLDVEIAQRIERMEAKTGGKTPFRDLIGLLTTIPGVSAVAAPAILSEIGADMSRFPTAGHLVAWAGLCAGQNESAGKRKSSRLRKGAPWLKTMLVQCAWAAKRKKDSYYRAQFFRLQAKRGPQKAICAVAASILTAIYHILKDGTEHHDLGAAYFDRRPVELKASRLVARLKKLGFTVQLQPIAEAA

SEQ ID NO: 126203 - protein, 374 aa, unidentified
MNKYSTKYVGMDVHKETIAVAIANEGRRDPVYYGEIPNSAEAIRKLVKKVASNGEVISFCYEAGPCGYEVYRQLIDLGQKCDVVAPSLIPRKSGDRVKTDRRDANTLSRLHRAGELTAVWVPDKEQEAMRDLTRAREDMKAMEWHAKQRLGSFLLRHGKRYPGRSKWTQAYFRWLEGIKFEIPVQQVVFQEYVDTLKQMQGRVASLEEEMRRAVEGWSLAPVVTGLMALRGIDIIAAMTVIAELGDISRFDSPRQLMAHLGLVPSEYSSGSCRQRGGITKTGNGHARRVLIEASWCYRLPARKTAHLRRRAEKASETVQAIAWKAQKRLCKRYWYLINKGKLPVEACTAVARELSGFLWAIACEVMGKNVRFTI

SEQ ID NO: 126204 - protein, 450 aa, unidentified
MREPMEVEDRQDEQAVARVAAVDVAKASGVVCTRVPRAGEPGRFTTKVWPVDATTNAILELADHLTALEIEKVVLESTSDYWRPFFYLLEAAGLRVELCNARDVKNAPGRPKTDKLDAVWLAKLAGWGMLRPSFVPPAEIRQLRDYTRLRTDLTRERTRHWQRLEKLLEDALIKVTTVASRIGTMSVRDMIEAMIAGQRDPRKLADLARGRMKAKRTALIEALTGRFDDHHAELAAILLAQIDSLTAQIDQLTARISELIRAVPAAQGVDADGSTGPTAGRGPDAPVLPAIDRLQEIPGISAHAAQVIIAEVGLDMTRFPTAGHLVSWARLCPRTIQSGARSRPGKTAKGNPYLKGVLGDAAAAAGKTSTFLGERYRRLVKRRGKLKALVAIARTLLVIIWHLLADRAARYDDLGDNYYVTTISTDRKLRSHIRQIEALGYNVALTPAAA

SEQ ID NO: 126205 - protein, 412 aa, unidentified
METVVERPAALDVHKERVTGCVRVPGDGGGREQHIAEFSTTVRGLLALHDWLAAHGVTQVTMEATGVYWKPVWAILEDDFECVLVNARHVKNVPGRKTDVSDAAWICQLAEAGLLRASFVAPKPIRRLRNLTRYRKTQIQERQREANRLHKALEDTGIKLDCVASDILGVSGRAMLAALCEGTTDPEVLAELARGKLRKKIPALREVLEGRFDRHHAVWIGAILNHIDFLDEQIDALSELIEEEIGPFAPVVELLCSHVGIQARSAQCIIAEIGVEMTVFPSEKHLASWAGQCPGNDQSAGKRRSGKTRKGSKWLDWTLEEAALAAIRANNSYLAAQYQRLRPRRGHKKALGAVKHTILTNLWHMLSTGQLYNDLGPDYFRKRDPERITKRLIAQLESLGHKVTLEELPQAA

SEQ ID NO: 126206 - protein, 332 aa, unidentified
MAMLIESVDAVIGVDTHRDTLAAAAVSTLGAVMADTQVGADAGGYAALLDFAAVHAPGRRCWAVEGAGSYGAGLAIYLAAHGERVVEVARPKRPARAGARKSDQIDAVRAAREALSTEHLIAPRGRGHREALRVLMSTRASAVTARTRSINHLKALIVSAPETLRAEFRAKTSDAQISYASKLRPRPTQDIEHRMTLRVLRCTAERILALRAEADDLEREITHLVTAARPQLLELPGVGAISAAQVLISWSHPGRFRSEAAFAAFSGAAPIPASSGLTTRHRLNRSGDRQLNRALHTIALTRARIDPATRDYLARRTAEGKTMREAKRCLIG

SEQ ID NO: 126207 - protein, 354 aa, unidentified
MLSIGCDAHKRYSQFEVQDQHGHVHGQTRVNHQRGAIQEYLSGFPEGTPVALESVGNWYWIADEIEAAGCLPLLTHAAKAKVMMGHVNKTDKLDAAGLATLLRNGTLPAVWLPPGSVRDERELPRTRMALSGMRTAIKNRIHATLAKYALSPTGVTDLFSKKGCIWLEGALKALPSNTSKCVKQELELLDSFNSQIQALESRMRQQIQTTANMQVLKTLPGVGDILATVIEREIGSIDRFQLAEQLAGYSGTTPKVHASGGKIHYGPMRQEANHYLKWAFIEAGNVIALNHAKTSWQRKHVSQLYERIRKRKGHSVAIGAVARHLSEAAFWILKKQEPYQEPKSFQPRQGQARR

SEQ ID NO: 126208 - protein, 393 aa, unidentified
MFNPLKVRLMRAVCGLDVHKDSVYLCILTGEGELIEKVFGVLTFQLQQMRDLLLAHNVDEVSMESTSVYWIPVWRVLAPHFHMRLVNPYFIRQLPGRKSDVADAQWIAECTLKNLVSGSFVPPEDIQQLRQYDRRIFDLDEEIVRKLSKLDAVMQRCNFRLSNYVSNVDCKSYKDVVRKISEGVTDPESLIGEIHGRIIKHHGRETILASLAGVISQAEIDVLRQLREELALAEEHKRECLERMLEICQEKYPDELRRLQTIPGVKERTATSLIAEIGTDMSKFETANHLSAWSGLRPRNDESNKKFKSRRITHGNIYLRKNIIQCAWAASRTKGCFFSRFSYHQTQVRKKNKMKVIVAVARKLLVAAWHVIHDKTDYADFQKQDRQAPASNG

SEQ ID NO: 126209 - protein, 412 aa, unidentified
MDAIVECCAGLDVHQETVVACVLKGALEGRPRGQLRTFGTTVAGLLELSDWLQEQGVTAVAMESTGIFWRPVWNILEGQEFELLLANARKVKNVPGRKTDQRDAEWLAQLLRCGLIERSYVPAVEQRDLRDLTRRRRRLLQTLAQEKNRVHKTLQDANVKLTTSVSDIFGVSGRALIQALRSGQKLDSEEVLALLKGKLRQKAPEVAAALEGRVRPHHLEMIEFSMDHIDFLERQVEVIEGRIEATLAPPFREARDLICSIPGIERASATEILAEIGIDMSVFHSEAHLASWAGVSPGNFESAGKSKSGRTGRGDRYLKAVLVQAGWAASKTKATRLSGRYQRLARRLGRDGKKKAVVATAHTLLRIVYFVLTTRRPYQEYGAEYGVASVEARTRRVIAQLQRQGYTVTKAA

SEQ ID NO: 126210 - protein, 337 aa, unidentified
MEYFAGLDVSMEETHVCVVTRNGSVMHEAKVPSTAASIAAALARVPACRRVLFETGRMAPMLYHGLSRLGLPVVCVESRQAYQALKSLATHKTDRNDARGLAHLARTGFFKPVHVKSLPAHAVRALIIARKKLVGQRVTLENQIRGLAVVFGVRLPRALSPAFIRQALQASEGIPGLSAAMRGLVAARAAVLAAVVAIDGDIRKMARASSACRRLMSIPGVGQLTALAFTAAVDDPGRFRRSRDIGAYLGLVPRRYQSGEVDYTGGISKCGDRRVRTLLYEAANVMLTRYKGPLKLKHWALAIAKRSTMRKARIALARRLAIIMHAMLRHGTEFKPA

SEQ ID NO: 126211 - protein, 338 aa, unidentified
MDNVAVFVGMDYHQEFVQVCVLDPQGQQLGNRECANDWQTISNYVARFGSRVQAAIESCAGAADLCDELMTRAGWSVDLAHPGFVSRMKQNPDKTDFQDAHLLADLERVGYLPRVWLAPQPVRELRQLVRYRQQLTEQRRSTKLRMRAILREQRCSAPPEINAWTRAWQAWLQKEAELSVQGRWVMEQHVRDLDRLAKAIQEVEKRLAEVTADDPEVARLQEQKGIGPVTAWMLRAEIGRFDRFRSGKQLARFCGLSPRNASSGNRQADAGLIRAANPQLRAMLIEAAHRLARFDPKWRTLALRLRTAGKPGSVTAAAVANRWVRWLFHQMQPTAVAA

SEQ ID NO: 126212 - protein, 344 aa, unidentified
MGEVITIGLDIAKAVFQVHRIDGVGAVVIRKRVSRAKMLEFFADLPRCLVGIEACPSAHHWGRELQALGHTVKLMPPSYVKAYLKRGKNDANDAAAICEAVTRPSMRFVPIKTKEQQTALMLHRTRQLLVRQRTMLSNALRGHLAELGIVSTKGRNGTGELLRIIADGADSRLPPAVRGILDVLARQYGAIGAEILSIDKNILALHRSCEASRRLAEIPGIGPIVATALVAEIGDWKTFSSGRSLAAWIGLVPKQHTTGGKDRLGSITKQGNRYLRWLLVVGAMAVIRYAKMHGTKNRPWLGRLMERRPTKVAAVALANKIARMAWAIMVHGDRYKEPKLLLAA

SEQ ID NO: 126213 - protein, 310 aa, unidentified
MLAGARTFRQEFENHPRGFRALRQWLERSGAQAVHAGLESTGRYGLALARFLHAQGFTVSVLNPLALHHYAQSRLQRSKHDRLDADLIAEYVAKESPAAWTPPTAAQTQLQELSRLLQARKRDLARERNRLASLPQSRAAKAAIQRFIRLLEKEVDKLQAQLLASLHLDPGMLSDWELLLSIPGIAELTAAIILAELPRTLPTARAAAAYSGLTPARHQSGTQDTTKGLTPIGNHTLRRALYFPALTAITHNPPIHSKAARLRLKGKAELCIIGAAMHQLLRQAWGVLKHKKPFDPSWTSRPLISVSAAV

SEQ ID NO: 126214 - protein, 346 aa, unidentified
MMIIGCDFHPSWQQIAWLDTETGETGEQKLVHASGDAKSFYGQLPQPVLIGMEATGNSQWFIELVQDLGHEIWVGDAAQIRASYVRKQKTDKRDAAHILKLVVEGRFPRLWTPDREQRDLRQLVLHRHKLVEIRSRVKNELQHLSLNKGMQRKAKLWSQAGQKLLRELPLKPWAACRREDLLGLLTMLNQQIGKLDEAVQHAADEHPQAQLLMTQPGVGPNTALAYVLTIGDVSRFPRGKQVASYLGLIPREESSGGRQKLGAISKQGNRLVRSLLVEAAQIAVRFDPGFRKQYLHRCHQKPKGVAKVAAARKLAVRLYWMLRTQTAYPEIVRIESSPRVPLVGAS

SEQ ID NO: 126215 - protein, 336 aa, unidentified
MKSNKMEVPAIQWVGIDLAKLTFQVALWGHLDFPEMQTRSFDRTRKAMKPFLAWLKEQAPAGARLGLVMEATGTFAEEVASWVLDLDPTLWVAIMNPGQTSAFIQSLGFRNKTDDLDAKGLAKYGHERRPAPWERPTPEMAVLKDLVRIRMNLINTRTAMHLRLRDHQRASKTASSAMRKVILSLKAQIQVLDLAIKDHVAANKEIAHQVRLYTSICGIAQVTATTVMVELGDLRRFPRSRQMTAFAGLSPKKKQSGTSVHGKTRMCKQGSSRVRAALFMAAGSAVRFNPDMRATYLNLLAHGKEKRAALGAVMRKLLVLMRAVLMADRNWQGKAA

SEQ ID NO: 126216 - protein, 365 aa, unidentified
MSMIGNDVSFPFHGYCICEKTGEAFPFTSRPNASKLISTLKKIESKGFSLKLCYEACYLGFALYRELEAAGIQCDVVASNMIPSKPGERVKTDRKDSEKLALLYMKDMLTPVHVPTKEDENDRDLVRSREFLREQLNSFQRHLISLCRRSALHFKDETGKLCHWTKTHVRWIQDKISSLPGGSLKNNLNFLMMQITELRETISSYDAEIEKLSREKKYKKKVQALTCFKGLSELSAMTVITEIQDIRRFPHPKKLVSYLGFDISEYSSGGKEKKYGITKMGNSRVRKRLVESCQKCHMPTFGHSKKFRDRSLVPKNVLSIADKCSKRLFKKSTRLIAREKNRNKVKVACAREMSTFIWESLMMVA

SEQ ID NO: 126217 - protein, 416 aa, unidentified
MNGKSPGTFERFLGIDLHKHYLVVGGVNAEQEVVLPPRRVNLENWLKWAEANLKPTDAVVLEATTNAWEIYDQVLPVVGRAVVANPVQVKWIASARVKTDRVDVGRLACLLAAGLVPEVWVPPVEVRELRSLLAHRRRLVKMQATIRNRLHSMIHRHNLTLPKGEVFSHERRSWWLGLEISRTENLRIRQDLATMDHLEPQIAEIDTELNRLSTCAPWVEQVPYLLQLPGFGLITTMTLLAAIGDITRFESARKLVGYSGLGAGVHASGQTHHSGRITKQGRAELRWVLVEAAWVAATTHAHWKREFERLSRRMSPKKAIVAVAHKLLVVVWHVLAERTADTEANAEMVASKLIGWSGRLGEEGRGGLTTRRFVRYHLMKLKLGDDLKGVRQGRTTRLLASPEEVLALRPELKFVC

SEQ ID NO: 126218 - protein, 327 aa, unidentified
MNSICLSTDSLPVLGLDVAKKSVQAELRRAGGKTVRFGFENNAKGFAQLARVLKEHNVPKVWAGLEATGPYSHALALWLHGAGHRVSLLNPRRVKQYARSAGKRNKTDLLDAAIIADFVCAHRPAPWQPPTLEVAQLRALVRRREELSLMLQAEKNRLEGVASNVSCSLRRIIATLSAERARLEKLITQQIRSHQQLSCDHQLLCSIKGIGSLTAAILLAEMARPGQVERARQAAAHAGLVPRREESGTSVRRNRGLGKEGHRYLRKALYMPALVAIKYNAPLRHFASRLRAAGKPKMSIVCALMRKLVHIAFGVLKHQKPFNPSLA

SEQ ID NO: 126219 - protein, 333 aa, unidentified
MSQFFDASRSLTALEQDSTMIAAIEMSQSNWLVAAIVPGVERQPLKKLDADEEALLKLLHRWRHEAGLAGRQIKRIVVAYEAGRDGFWLARWLRARDVEAYVIHPTSVAVSREHRRAKTDRLDTELLKRSFLGWLRGEKRHCSMVAIPTIEEEDARRPNRERGNLVTEQTRIVNQIKAILTRFGIRAFRSTLREVEEKLERVRTAEGTPLPENTRAELRRHLARLCVVREQIRAIEQERLRKLAATPAGEKGPHVMVRLIARLLGVGVETADMLVNEIFSRHLRDRKAVARYAGLTGSPDESGRRRRERGLARAGNARVRCGMIQLAWRFLRF

SEQ ID NO: 126220 - protein, 342 aa, unidentified
MTIAVLGIDLGKNSCSLVGLDAGGRVVLRRRMRRETVIAFGAKLTPCVVAMEACCGAHHMGRALAAQGHTVRLMSPEYVRPYVKAHKNDDRDAEAIAEAATRPTMRFVVIKSEAQLDMQTLHRVRDRLVGERTALMNQIRSILLERGHVVPQGRAKLAGFLTSLLEAEEGVILTPRMQALVADVRERWQLLDQRIAALDAEFAEQARTDEAARRLTTIPGIGALNATALVAAIGDVATFARGRDLAAWLGLVPRQVTTGGRPKLVGITKRGSKYLRKMLIQGARATMPTLRQSDTRLGQWLRGLLARAHANTAVVALAAKMARIVWALLRHERVYEATAVAA

SEQ ID NO: 126221 - protein, 341 aa, unidentified
MEQVTTIGLDIAKHVFQVHGAGAAGHVLLRKRVTRTKLIGFLAAQTPCVVAMEACAGAHYWAREIGKLGHRVRLIPPAYVKPFIKRQKNDAADAEAICEAAQRPSMRFVPVKTEEQQANGIVFRARDLLVRQRTQCVNALRGHLMEYGYVFPKGITHVATVVALVEDLQSSLPDSVRLILKLLVGTFTALEAQITALDAEINQRSKSDPTARRLMTIPGVGPITSTAITALVPAAEGFPAGRDFAAWLGLTPLQKSTGGKQKLGAVSKRGERTIRRLLIIGASAVVQQASRRGAPKGSWLAQMLARKPKMLVTVALANKMARIIGALLVKGGTYRTPAVAA

SEQ ID NO: 126222 - protein, 342 aa, unidentified
MDYYAGIDVSLEASSVCVVDASGKIVKETKVSSEPETLIAWFKALPFGLARIGLEAGPLSQWLYAGVKQAGFAVELLETRHVRDAFKAMPVKTDRNEARGIAQLMRLGWFKPVHCKSALAQETRALLTARKLVLGKLLDVQMSLRGILRGFGLKIGRTTKAGFASRVVELTEHHPALKAIAKALLAVHAVLLRELDGFEKQVRKLAKGDARTRLLMTAPGVGPIVGLTYVGAIDDPARFASSKSVGAHFGMTPKKYQSGETDVSGRISKMGDKGVRAALYEAAHVILTTPVKGGALKSWAAKLARRAGMQKAKVALARKLAVILHRMLADASPFEAAKAAVA

SEQ ID NO: 126223 - protein, 343 aa, unidentified
MNDSEMNNAELRNSEINGSNGPALRFAGIDVSKAQLELALEGEGKNTVFDNDARGIRALLAKLKEAGPLGAIVLEATGGLEREAALALCAAGLPVMVVNPRQAHDFAKALGYLAKTDAIDARALTQFARTLYHSDKREALLMRMPEPQCLALEVLVTRRGQLVAMRVAEGNRLPGAAKPAQKSIRAVMNLLNREIAKLDRDIAASLGGHFAEKLKLLKGLKGVAAGTQAALMAGLPELGTLTHRAIGKIVGVAPLNRDSGKMRGARTTWGGRTGVRSALYMATLTAVRHNEVLRAFHHRLRAKGKPKKVALVACMHKLLSIMNAIFKTNTPWNPNFHNPTTIA

SEQ ID NO: 126224 - protein, 368 aa, unidentified
MKNITTYVGVDAHKKDLFIAMLVGDQTTPVTWQLANEPNAVRRLVRKLERDAPGPVHVCYEAGPCGYALQRQMTTPRVSCQVIAPALIPRKPGERIKTNRRDARKLGELLRAGLLTEVRPPTPEEEAVRDLCRARDDAREDFQRCRHRLGKFLLRRGLHYSGRNWTQAHRRWIDSLEWTQPAERAVVDDYLLAIDHTEARLIELDARLTEIAQADPYREPVGWLRCFRGVDTLTAILILAELHDFRRFHAPRALMAYVGLVPGEDSSGEKHRRGRITRTGNALVRRLLVEAAWHYQHRPGVGVALTRRRKGQPGRVIAIADKAQQRLCRRFRRLAEHHKPAPKIAVAIARELAGFLWAALQPAPARRN

SEQ ID NO: 126225 - protein, 441 aa, unidentified
MKSFEKMQIVNPNAAGIDVGSRSHFVAIGQDENQIREFNVYQSGLCALVAYLQENKIRSVALESTGSYWQSLFMILQGNGFEVLLVQGTQTKNLKAKTDVKDAQWIQKLHSLGLLRGSFLPSETTLQIRTLHRHRSSLIEQSSGFVNKMQKALRLMNFRLDVVISDITGVSGIRVIEMILSGETSGEKLAEYCDKRVKKSKEEIADALQGKINNEYLHELSDCYDIYRLIQDKIKNTDTRIDQVLKNQTREIVLSEDIELVKKQNKGKNQPKFDVQKYSLKLFGVDLFAIESVCSGTVTSFLAEIGTDIYKFKTSKQFVNWLRLAPNNKISGGKVLSSRTPKGKNKFALTLRNAANTIERKKEGYLVMFFKRISFKKGRGAAITATARKIAVIIWNMIVKKQHYIPINTDQYIQEMKNKKTIQIKKMIKKYGIETTSLSIP

SEQ ID NO: 126226 - protein, 338 aa, unidentified
MQQQQRHYVGIDLHRLRSVIVTMDDDGNVLDSVRVQNDPLEFVEAVTRRGGDLEVALEATYGWYWAADLLEAQGATVHLVHPLGLHWDTRRVKNDQRDATELANRLRRGDLPEVYIATPAERELRELVRYRAKLTSFCTSAKAQIHAVMAKEGILPTEKDMFSMAGNRALDEMPVSGVFAVRLESLRDLLEIFERERKMIDGHLERRLRGHPGYLAVQAIYGVGPVMAAIFVAEIGDVTRFSSARHLCSWAGLTPTVHSSDDKTTRGHISRQGNGLIRWAAVEAVARYHGGAPIAPAYHRIAERRGNKIARVAAARKLLGLVYYGLRDGEIRCLAKAG

SEQ ID NO: 126227 - protein, 340 aa, unidentified
MNEITTVGLDLAKHVFQVHGVDAEGTTVLRKQLRRGQVLAFFSRLPRCLVGMEACATAHYWARELRALGHEVRLMPAQYVKAYVKRNKNDAADAEAICEAVARPTMRFVPAKTAEQQAAVLLHRGRERLVRQRTMLVNALRGHLAEFGVIAPQGLRNVGRLIAIIRDEKDARLPGLARQVLQVLAVQIEQLEAAIAALEKQLMGWHKSNPVSQRLATIPGIGPIIATAIAAMVAEPSGFRSGREFAAWLGLVPRQNSTGGKNRLGGISKRGNQYLRRLLINGASANLLRSKATNADPWVIGLRRRRPSLVVAVALANKTARIAWAVMHRQENYQRMATAA

SEQ ID NO: 126228 - protein, 339 aa, unidentified
MDEGYFRKVWSLADFRHHSAQYGIQKVPSDWRLHSMKYTPVGVDIAKHVIQIHFINENTGEVVDKLIRRQDFLTFFSNREPCLIGMEACGGSQHWARELKKLGHEVQLLQARFAKAFVMGNNNDVMDARAIWMVVQQPGKEIAVKTEEQQSVLVLHRTRRQLVKFRTMQINSLHGTFLEFGETLHKGRAAMDREFPEALERLKERLPPYVISALENQFNRLNELDLQIDDIEKQLTSVAKQNETCKRLLDIPGVGPLIATAAVATTGETSAFKSGREFAAYVGLVPKQTGSGGKIRLLGISKRGDTYLRTLFIHGARAAALLTKEPRQPGGCKSGCGRI

SEQ ID NO: 126229 - protein, 374 aa, unidentified
MISIIYVGMDVHTTNYTLCCYSMEDDRFFAEVQVEPDAKNILKYLARIEKQQSRDCRIVCGYEAGCLGYSLYHQLHAHGIDCVILAPTTMMTKPGKRIKTDRRDARLISKCLAFHTYSPVYIPTEVDDAVKEYIRMRDDANSALARVKQQIIAFCIRHGKIHDGKSYWTNKHLEWLSSLDLGNKILSEVLQEYLIRYYQLREQVDMYDMRINELAQAEPYRQKVEKLGCFRGIAAHTALSFCVEVGDFRRFATAQQFASYLGLVPGECSSGDKQQYTGITKAGNSHLRKLLVETAQVFGRSATKSGKSVALKERQAKCDSLTVAYADKANARLKKKYFKIAMRSKVNIAKTAVAREMACFIWGMMTDNIERKAA

SEQ ID NO: 126230 - protein, 387 aa, unidentified
MLSVGIDVAKRSHQACVLDDSGQMVGQSFKFPSSRSGADTLVAILQELGSPATIALEASGHYWQGLYHYLVSQGFPVIVVNPLQTEAYRSTGVRKVKNDRRDAFVIADFLRIGRAQPNYVPGEVTVQLRELTRYRMDLEDQIGDAKRRILTMLDRVFPEYPGLFSDAFIDSSRALLKAAVSATDFAMFDLQELTSILRQASRGRLGEGKAREVQKKAKESLGMAFLGPVARVKVGILLEQIDLLNRQVQEVELTITELMEQQPQYLTTIKGIGPVLAATLLAEIGDIRRFPSLESLVAYAGIDPSIFESGEFTGRRQHMSKRGSPYLRRALWLAAHSTRQWNPDLNDYFQRKMAEGKPYKVAMGALCRKLLARIYVVLKENRPYQVR

SEQ ID NO: 126231 - protein, 344 aa, unidentified
MDHFAGLDVSVKETSICIVDDAGKIVREVKVASEPEALLAVLKNLAYHFKRIGLEAGPLSQWLFSALAEAGLPVICVETRHMQAVLKAQINKTDRNDARGIAQMMRAGLYRPVHVKTIRSQKLRMLLTHRKLLQSKAIAIENDLRGTLRNFGLKVGMVGKVKFEARIRELVENLPDLAVLVEPMLIVRRTLREQIVILHRRLLAIVRDDEVCRRLMTTPGVGPVVALTYRATVDVPARFRKSKAVGAVFGLTCAKYQSGEVDRNGRISRCGDEMMRVMLYEAAQSMLRSKKWSWLKAWAMQIARRRGMKKAIVALARRLAVIMHRIWVDGTEFRWTREQATAAA

SEQ ID NO: 126232 - protein, 375 aa, unidentified
MKEKVRFIGLDVHAETIAVAIAEPDGEVRSLGTIPNRSESLRKLVRKLGPAEKLRACYEAGPTGYVVYWQLTELGVPCEVVAPTLVPVKAGDRVKTDRRDAEKLARCYRSGDLTAVWVPDEGSEALRDLVRAREAAKQDQMRARHRLSKFLLRSGQRPPTGVRPWTRPYLIWIAQLRFTQIAQESTRQDYLHEVEHMRERVARLEQAITEAVKLASPALQQVINDLQALRGIADISAVTIAAELGQVSRFHSARQLMGYCGAVPSEDSSGKRTRRGGITKTGNAHLRRIVVEAAWSYRRPPCIWYGLRRRQESISEEAKEIAWKAQHRLHKRYMRLGAAGKDQRKIAVAIARELLGFIWAIGARAETIVRHRVAA

SEQ ID NO: 126233 - protein, 343 aa, unidentified
MTKIITIGVDLAKNVFQVHGVDASGAVVLRRQLRRGAVEKFFAQLPPCLVGMEACGSAHHWARVIGRYGHEVKLMPPAYVKPYVKRNKNDGRDAEGICEAVTRPTMRFVPVKSVEQQAALAVHSTRALLVRQRTMAANSMRAALSELGIVAPQGYEGLRELMARLEEPSEEIPQMMRDALLVLARHWQALDADERVLERQIAKAARCDGEARRLMEVPSVGPMIASTILAKVPDPKVFRSGRDFAAWIGLTGKDHGTGGKHRPGRISKQGDRVLRALPISGASAHLRQQKARGITDPWLRDLLARRPYKVAMVAFAAKTARIIWAMLVKGEHYRDRTSVSAAA

SEQ ID NO: 126234 - protein, 417 aa, unidentified
MKSARNTLPEEPLNAVTAGLDWARDDHAVSVVNARGREIDRCLVEHSAAGLRNLIAMLGRNGVGEVAIERPDGPVVDALLQAGVTVVVISPNQVKNLRGRYGSAGNKDDRFDAFVLADTLRTDRTRLAPLTPDSPATVALRRACRARKDLIGHRVAVANQLRAHLRNVFPGAVGLFKDLDSPISLAFLTRFDTQDRADWLSPKRLAAWLAGVGYSGKKDPAVLHAQLTAAPRGLTGADAEVQAHITHALLAVLTTLAEQIKTLSSQIADQLTAHADSHIFTSLPRSGRVRAARLLGEIGDCRARFPTPESLACLARAAPSTRQSGKLRSVAFRWACDKQLRDAITDFAADTRHVNAWAADLYQRARDRGHDHPHAVRILARAWLFVIWHCWQDGTAYDPTKHRALQRILNPTEPQAA

SEQ ID NO: 126235 - protein, 452 aa, unidentified
MCLEDRPIRVLHAAGIDIGAREIFVAVPPDRDENPVRIFGTFTESLQAMAQWLVQCGITTVAMESTGVYWIPPHDVLEQHGLKVCLVNARNMKNVPGRRTDWHECQWLQYLHSVGLLRAAFRPEGAVCAVRSLMRHRNDLVLMANQHVQHMHKALTQMNLQIQHVINDITGLTGLAIVDAILAGERDAAVLAQLRDRRVKASAETIRQSLVGNWRPEHLFTLKQSRQMYRNYQEQIAACEEEIEKLVVRFEPRVNPDDRPLPPDGKQKQRRSKKKTVNPKTGFDVRSESYKLFGVDLTQVPGLAKNVLVLFTEVGRDMSKWPTAAHFVSWLALCPDNDISGGKVLWRGTRHRHNRAGQMFRLAAHALHHDQTPMGNYLRRMKSKLGPKGATTATAQKIAIIFYTMVNNQVEYDATLWAQRDAQREQRYQEKLQRQARQLGYKLVPIEEKPAA

SEQ ID NO: 126236 - protein, 313 aa, unidentified
MAFLHQQPLLCLGFDIAKDTITVSDGTTTRTIANQRRAIRAFLKSHKHADLVVCEPTGGHEGLLLEECLRAGIACHRADTLKVKGFIRSYGTHGKSDAIDAGMLSGYGRERWAKLDLWQAPDPDETDLRALVRRRQELITMKVAEKNRAKAPGGRRLAASFDAVIKVVERQIQAIDAAMRELIANSSTLKHRAAVCMAMDSLGPIVAAKLLAILPELGSMTRRKAAALAGVAPHPNDSGLKRGYRKIRGGRPDVRTTLFMPALRAAAGKGEFAVFYKRLIANGKKPMVAIVAVMRKIVVTLNARLRDAAIPQS

SEQ ID NO: 126237 - protein, 482 aa, unidentified
MPARNNNATNQKDAAGKGAAPGGADEAPEHGGDGAEVAEERVQVVEYAAAIDVAKGSGMVCTRVPGSRPDRRRQKVWRVEATYPEVIALMDHLRCEGIQRLVLESTSDYWRIFYYLAEAAGLEVWLVNARDFKHLPGRGKSDRLDCVWHCKLNERGMLRRSFVPPQAVRDLRALTRTRARLAQDQARHQGRVEKILEDALLKVSVVISDLFGASGRRFLDALVAGERSPAALAALGDPRLKAARQELEDALTGRFRDIHAFEIKTHLRLIDAINAEITRLDEAIEQQLAKVPRTAPCCTACGLAGGGHAPGCAEEERTPLGLAGRLDEITGVGECNARVIIAELGTDPSQFPTPGHAAAWARLTSRTMQSGESARPGRTGKGNRYIRGALGQSAMAAAHTDTRLGAMYRRIARKRGKQKAIVAVSRLICEIAWLLICDPGARFEELGPDYYRPRSPARQTRDKIREIERLNPGKKVILADAA

SEQ ID NO: 126238 - protein, 355 aa, unidentified
MKQQAIQYVALDVHQATLVVSVREEQGSVVMRATVATEAKAIVGLVRGLGSRVHIAFEEGTQAQWLHDVLKPHAERVVVCNTRGRSTTDNKSDRIDADRLSELLRLGSLKSVYHGASGLLTLKELVRSYVNLVEDGTRVMLRIKALFRACAIKTPGNSVYQPSKRKGWISQLEGRGARMRAEALFKELDVLQELRPKAKTAMIAEARRQPGWKVLRSIPFLGPVRVAEILAIMATPWRFRTKRQAWPYAGLAVVTRSSADQEFAGGKLRRRKRAPLTRGLNRNHHPLLKSVFKGAANAAAATDGPLKNIYDACVARGVREDMAKLTLARKIVAIALRLWKTGELWDATKLNMQAT

SEQ ID NO: 126239 - protein, 342 aa, unidentified
MYYIGLDVHKKTISYCVKDASGQVHQEGQIGATRWELDGWMKTLPQPWTVAMEATIFTGWIYDHLLPHALQVKVAHPLMLRAIAAAKKKNDRIDAGKIADCLRCDFLPECHMASTAIRDRRRTLRYRHLLVRQMVQMKNRISGLLMETGVSHNKRRLHKVGYFRELLSSNAEVNESIRPLLRVSRDSIVRLQKTEYALVSSLQRDPLLAERIKRLRTVPGVGPITALTWALEMGEVSRFPSIREAISYCGLCGDEKSSADKVMRTPLSKQRNKHIQRVLVEAAKLAPRQNHDLALVYEREKQKGNANRATLAVARKMVAYLLAVDRGQRDFVPFADPRSVAA

SEQ ID NO: 126240 - protein, 349 aa, unidentified
MILLGVDPHKSTHTATAVEPVSNQQVGSMRIQASLADYRRLPAWAKRWPQRKWAVEKANGLGRHLAQWLIARGESVVDVPAAATSRVRELSRGGRRKNDQIDAAAAATVAYLQGEGRDLAPEDHTTALALLDERRVNLAQARVRTVNQLHALLRDLLPGGAPTQLSADLAAKLLRSVRPAGDIETVRKDIAWDLVAEIRKLDKQLTDNAARTQSLVKASSSTLMDTPGIGPVMAARLIGRTGRAHRFPTSAAFANYAGAAPVEIASADKARHRLSRSGDRQLNSVLHTIAVVQIRMPKSPGHAYYQRKLSEGKTPKEAKRCLKRRLADHVWRVMIADERKAKSLPNHGT

SEQ ID NO: 126241 - protein, 425 aa, unidentified
MSAKTSDVDDLMVVYPCCAGLDVHKKTVVACIITTGERGKVSRQVRTFATTTVHLLELSDWLAEHEVSHVAMESTGVYWRPIFNILEATCEVILVNAQHMKAIPGRKTDILDSQWIATLLRHGLLKASFIPPRPIRDLRDLVRYRKSLVYARNQEVNRRPLLLETANIKLGSVASDILGKSGRDMLASLRQGVTDHTLLAELARGKLRGKLPDLREALEGRVQAHHRLLLGHLLDHIEFLEQRVQTLEGELEPYLNPYQAEIALLVSIPGVAETTAATILGEIGAEMSAFPSAKHLASWAGVAPGNRQSGGKRLKAHTTKGNARLRAALAEVVWAISHTKDNYLSAQYHRLVRRIGQAKAIVAVSHSVLVIIYHLLRDKKEYSDLGSTYFETLDQDRVRTRAVRQLQALGYTVTLQTSAPEEESA

SEQ ID NO: 126242 - protein, 434 aa, unidentified
METEFAAFVAIDWADQKHAWILRATGSSDRQAGTIDHTPEAVDVWAAELRLRFSGQPVAVALEQSRGPLVFMLTKYEHLIIFPIHPTVLVNYRKSFRPSGAKDDPSDARLLLDILMLHRDKLRRLNPDTPETRTLQFLVEERRKLVHEKTRYSNRITAHLKMYFPQVLDWFDEVASNIVAEFLERWPNLERLQRAKPATIERFFIDHNSRDPDRIANRLEQIRKAIPATNDAAVVITCSTAIVAWTGLLKQVLAAIAVYDEKTDTIARAHPDYALMKSLPGAGPALAPRLIAALGSQRERYESAHELQCYSGIAPVVASSGKQRWVHWRWACPKFLRQTFHEWALHSIAHSQWAREYYEQQRAKGKRCNTAIRALAFKWIRILFRCWKERKPYDETVYQRALAARRPKKQPVAQPVGLQWKNVAGFSKIAISGT

SEQ ID NO: 126243 - protein, 445 aa, unidentified
MSVGHEEIPDADHESVIERVCAIDVAKATGKVCLRVPHPAIEGRRVSRVWDVPATLAAVTELATELVVAGVQRVTVESTSDYWRIWFYVLEAAGLQVQLVNARDVKNVPGRPKTDKLDAVWLAKLTEKGMLRPSFVPPAQVRQLRDYTRLRIDLTRERTRHWQRLEKLLEDALIKVSAVASTITAMSVRDMLEALIGGERDPHRLADLARGKMRSKRGVLAAALTGRFDAHHAVMARVLLNQIDALTAEIADLDEHINGQLAAITTALPESAPADAVTVGVTGLQAVQRLSEVTGIGVRTAQIIIAEIGMDMTKFPTAAHLVSWAKLSPRTVQSGAVVQGGRTGQGNPYLKGALGEAAAVAARTDTFLGERYRRLVKRRGKLKALVAIARSLLVIVWNLLADPRSRYHDLGPDHFAGRTDTQRRVRNHLSQLAALGYRVTVEPAA

SEQ ID NO: 126244 - protein, 412 aa, unidentified
MDTMYRCCAGLDVHKETVAACVRRVDAAGRVVKEVRTFGTTTGALLQLLDWLTAEGVQAAAMESTGVFWKPIWNILEGSVKVILVNARHIKNVPGRKTDVKDCDWIAQLLQHGLLRASFVPERPQRELRDLTRQRSQLTAEQSRVSNRIHKTLEDANIKLGSVATDILGVSGREMIRALIGGQEDPNQLADLARRRLRAKLPALREALRGHLTDHHRFMLRQLMDHLDYLDRQIAAFDKRIEVLMRPFQEAIARLMTMPGVGLLTAQNVLAEIGTDMSRFPTDQHLASWAAMCPGNRESAGKRKSGHTNHGNRWLRTALVQAAWAASHSKKTYLAAQYRRLAGRRGKKRAIVAVGHTMLVMMYHMLRDGVEYQELGPDYLDKLQPLRLTTYLVKRLESLGHQVKLTPLDQAA

SEQ ID NO: 126245 - protein, 423 aa, unidentified
MLKIVYSICCGIDVHKKFVVATVTSTNENNITTYATKQFSTYSKNLFHLKEWLSEHNCKEVCMESTGKYWIPIYNILEDSCNITLANPKYVKNIPGKKTDKKDSLWLADLHKHGLVKGSFIPPKAIRELRDLMRYRFKLTNFRSSEKNRFQNSLTVSNIMISSVVSDTFGKSSSAIIKYAMEHPDKLDIDYTQFLHKSMLSKADEIKIAMQGSISKNQTAKMSVCLNHYDYINNCISQLDTAISLISSEFKSQIELIASAPGITTQSATTIISEIGVDMSVFPDAKHLCSWAGLTPQNNESAGKKKSVRISRAGAYLKPILIQCANAAIKNKSCPYFKYRYESIKKRRGHKRAIIAIARMLLTCIYNMLLKNEAFDNSIHEKYLKRENTSRHFQPNIDRIILFLQAQSFEVTKVSQEISPKIS

SEQ ID NO: 126246 - protein, 393 aa, unidentified
MNSDGGERVVVGMDPHKRSVTIEVMTADETVVGGGRYATDAAGFRAMLKSLRAWPERVWAIEGCEGIGRHIARRLIADGEQVIDVPPKLSARARVFATGQGRKTDATDAHSVALVGTRMAGLRPVVADEQLEVLRLLVDRRRSLGEEHTRKVSQLHALLLELIPGGAKKDLSAAQARRLLAGVRPRDAVGKTRKRVAMELVVDLEKIYTRTKAADKELKQLVKATGTGLLDLHGIGPSGAARLLVEVGDITRFPDRGHFASWTGTAPIDASSGDHVRHRLSRGGNRQINRVLHIMAVVQLRNPTEGRAYFDRKKAAGKTSMEAMRCVKRRLSDIVYKTMLVDLVTTQTTGPGGQPGNDSDSSATGSQPTTGSSDKSLPGPATTDPRPAVPAVS

SEQ ID NO: 126247 - protein, 429 aa, unidentified
MNSTQNKKIEQVKETTMIVGIDVGSEKHYFRAFNWRGIELTRKPVAFSNSMEGFNRFYNTIVELMQKSELEEALVGIEPTGHYWFDLGQFMGEKSIKFVMVNPHHVHKTKELDDNSPSKNDRKDPRVIAGLVRDGRYFYSYMPTGVYAELRNASNRRFVLVEEQTRAKNRLQKWIAVYFPEYKGIYTHIDAKGGLLVLKQAPTPEEIVKLGEEGIIKIWKDAKLRGNGNKRALKILNAAMRSIGLRTGLTEARMEIQDLIEDYELQTKRLERVNDLIKELCQQIRYADKLLEIKGIGITTVAGFIAEVGDITRFDSTKELQKLAGLELVADSSGKHNGKTKISKRGRKRLRYLLFEAAISVVGKNEEFKEIHRHYTTREKNPLKKMQSLIAVACKLIRVFHVILTKGVSYDASKMLEDIRHPGEQLKAA

SEQ ID NO: 126248 - protein, 486 aa, unidentified
MKTKPFQSIVERSEGPIRPAASLPVINPHAAGIDIGASEHYVCVPADAVSAGQSPVRRFGAFTQDLDQLVEWLRSCGVRSAAMESTGVYWVALYEKLEAAGITPVLVNARHLGQVPGRKSDVKDCQWLQQLHSYGLLNGSFRPGPEFCRLRTLLRYRGNLVEQKTRQVQQMQSSLQQMNVLLHHVVSDLDGDTGFRIVDAILAGERNPARLVQLRDYRIKRSTEAQMEAALQGRWQDEHLLILSQARQAYQFFEQQMSQCDASIERVLKTLPSAEPSPVPAPTPQPEVAGAASQSAPVEAESTKKKRKRKAGGNAPKQDFLPELNRICGSDLSKIGGLNMLSILILISELGTDMSKWRSEKAFCSWLGLAPGNKISGGRVLSSRTPFVINRISTLLRTLAINIGRTDTWLGSHHRRMRARLGPAAAATATAHKLACVIYHLLKTREPYVDINRLVYEEKIRKHRLAKLRKQAEELGLQIVEIQKAA

SEQ ID NO: 126249 - protein, 344 aa, unidentified
MIVIGIDAHKRTHTAVVADQNGSQLSTRTIRTTSKDHLALLRWGAEQCDDRMWAIEDCRHLSRRLERDLLAAGERVVRVPPKLMANVRNGARTYGKSDPIDALAVARAALREPNLPEARLDGMEREVRLLVDHRDDLVAERTRIIGRLRWHLHELDPGWTPPKRLDRASAYDKVEAFLSELSGLVSDLAARLVDHLRRLTVEIKELATEITTRITVLAPSLLAIPGCAPLTAAKLIGETAGVDRFRSKDAFARHNGTAPLPVWSSNRARHRLSRTGNRRLNAAIHIIALTQAHCHDDARALLSRRKANGDGGMEALRILKRRLSDVVYRAMLADRPLMGSATAA

SEQ ID NO: 126250 - protein, 476 aa, unidentified
MIRSVGIDLHQGQHRARCLDARAQPYDSFSFQTTPEGLATLEERVFRDGSNPIIVLEPAGLPWLMVAVYLRSRHPDCRLVKAKTQKVAALRRYLRGPVKSDRIDALTLAKMPFIDPEQMDAIYLPPAEIHALQRLTRQRKRIEQDITGRKIRISAIVDGYLPGVRRTFNDAWSSPFRAFMRSRLNPFIVVRDGEDALHAFMSKASPRSKWSRAQTRLVFLACQSLAAVCQLCEPAGTVNEEFFMDLQDEIGRELRMLEADEVESEALARCIAELYRKLHPSNNLRTIPGVGEHTAPIFLATVGDPARFHNQSAFANWEGVVPGARQSSDVQAKGLRMTKAGPSIMRMALYQAGDIGRRWDPQIAAVYYRQMVYHGKNHRQAMGAVMSHLGARVWRVLKEDRPYELKDPDGNPISWDAARKLIFSKYHVPEDIRRERRRRNSKNRQSSRIQKSGDSDLQDTRGSEAPQPVKVEAVSR

SEQ ID NO: 126251 - protein, 344 aa, unidentified
MDHIGIDVHKRQSQICIVTEVGEVIERAIQTTRDRFAAVLGERPRARILLEASTESEWVAQCLEALRHEVIVADPNYAPMYPERRRRVKTNRRDARTLATACRLGAYRPAHRASAEQRRVRQQLTVRDVLVRTRTRAIAMTGALVRSEGLRVRSGKPEQFVTRLHELPLPPALRATLAPTLSLLETLDGEIRQADGAVAQIAVQDPVVTRLMTAPGIGPVTAAAFVATLDRADRFAGAHQVESYLGLVPREDSSADYRRRGHITKAGNPRMRWLLVQAAWAVWHSTHADAQALRAWAQRIASRRGTTVAIVALARRLAGMLFAMWRDETPFDAARLGRRPTTVR

SEQ ID NO: 126252 - protein, 423 aa, unidentified
MRIIYRRCCGMDVHKKKLTVCVMSTDGVSPVQVRKRACGTYTREVKKLRHWLLACKVTHVAMESTGVYGKPVWNVLEGKFTILLVNAAHYKGVDGRKTDQIDCEWRAELLQCGLLKASFIAPQEIRALRDWTRMRVPVVQEENRVQNRIEKVLESAHIKLSVAVSDTLGVSGKLMLKAIVRGQDDPGWLADYARGSLRSKRKELELALAGKVTDQHRFLLQECLDPIEFLEGKVARLEGRIGEMLQPHADLIRRLDAIAGVDEITAWTLLAEIGLHMDVFQTSERLASWAGMCPGNRQSAGKRSSGKTRKGNRWLRRALVQCGWAAARAQDSYLRSVFWRIAGRQGKKKAAVAVGHRILKIAFYLVRDGVEYQDLGPAYFDRLNPVRTAQKLDHRLERLGFAVNILPASAQAIAEGGSNIANA

SEQ ID NO: 126253 - protein, 409 aa, unidentified
MLWGERRENGIIVAATKPTGCPMPQPNDLSRSLAALDENSTLIAVIEMSQSSWLVAGMIPGVERQPAKKLTPDEGGLLRLLHRWRGEAQKAGRTIDRIAVAYEAGRDGFWLARLLRAQGIEAHVIHPNSIAVSREHRRAKTDRLDTALLKRAFLGWLRGEREHCSMAAVPSLEEEDGKRPSRERENLVGERTRIGNRVKSTLARLGIRGFKPTLRTAAERLERLRTPEGEPVPPHTLAELRREMARLRLVAEQIREIETARLERLERQPNRGAHPMIRLLAQVRGLGIETADMLAREAFSRRLRDRRAVARYGGLTGAPDESGARRREKGLAKAGNARVRRGMIQLAWRFLRFQKDSALAQWYRARTADARGATRKALIIALARKLLVALWRLVTTGEVPHGVVLRPAS

SEQ ID NO: 126254 - protein, 343 aa, unidentified
MNTTTYIGMDLHKSTSTFCVMDKEGNIKREQQVATSHSDIKRFFNSLGKNQKSSLAMEPVSQWYTYADFIESLGVEVHLAHPRKLKAIATATSKTDKLDARVLADHLRTNHLPEAYFSPKEVRGWKETVRSRSALVNMRTQTKNRIHAVLFKNGLKSPFVSLYTKRGIEWLKMQKMEPHFKLSIEKYLSVIEHLDDEIKDMENVIKQTVKETKEMSLLKTIPGIGDILSATIMAEIGEIERFKTYKQLQAYAGLVPWVRNSGGKQWSGHLTKQGSAWLRFASVEAVVKIKCTRKSSDLKDYYLRIQKNKNNKTAVVATARKLLAIVWSVLQNEREFKARYSAI

SEQ ID NO: 126255 - protein, 392 aa, unidentified
MYIVGIDIGKNHHEASIVSPEGKQIGRSLRFATTHKGADSLMSFIFKNIGNSPCVFGMEATGHYWYPIYSFLKAKGYTIYVINPIQSDSLRKMYIRQTKNDSIDSFLIAEVIRFGQFGTTSMADENILAMRQLCRYRDSVISSRTEIKLRIGTIMEQIFPEYEKQFSSLWVSTSMGILEKYLTPENIENAPIDELFEIIKDKSHNRLTRAKAISIKEAAADTFGIKIAQDAFSFQLKQLIDRMNFLDKQIEALDCQILEYYEKFDCYLHTIPGIGMIGAATILAEIGDISRFKNSSSLVAFAGIDPTVRQSGEFNSTHNHMSKRGSPYLRHAIFLAATTCSFHNSPLNAYYKKKRDQGKHHLTATGAVARKLTTVIYAVLRDSKPYEPKKFC

SEQ ID NO: 126256 - protein, 403 aa, unidentified
MAAVMIGVDPHKGSHTAVVIGPAEELLGELRVRASAAQAEKLVEWAAAWPERTWAVEGAAGLGHLLAQQLVAVGERVLDVQPKLASRVRLLQAGDTNKNDPNDALSVAVAALRSKAARPVMAEDYPAVLKVWSKRHRDLARLRNQVACRLHAVLCDLVPGGHQKEISAAQAARILAQASPSGAVALARAELAAEFLADLRRLDAQLRETRKKLAAAVRASGTTLTQVFGVGPVIAGTIVGDVGDVARFPGRDHFAAYNGTAPVEVSSGNRKIHRLSLRGNRRINHAIHMAAITQLRHKHSEDRAYYDKKVTEGKTHKEALRSLKRKVSDAIFSRLQADARQARAKGPGGQLGNDSDSSAVSSHPERQLFGPATPGPDTTIRPGTTAGTLSSPKPAWKKTRPAT

SEQ ID NO: 126257 - protein, 354 aa, unidentified
MKRARKELQAGDRVFVGIDLHKKKWHVTVRTAEFELFSGSIPGHWKALQQILNRYKGHQIETVYEAGYFGFWLHDHLIKYGAECIVTPPSLIPQEYGNKVKTDRRDSRKLAHFLAKGMLKRVWVPTKKERYHRQVTRRRRQLVGDRIRTQSRIKAELKLYGIELPEPDGKWTKIYLGNLGRIRFNNRWMQESFKCLLEQYHFLDGQIVKQTKLLRELSKTELYRERVELLMTIPGIGLIAAMELLLELQDVSRFQRADQLAAYVGLTPSQYTSADKVRMGRITRVGKNSLRATLVQASWALIRKDGVMQEKYDRLKSRSGGKRAIVAVARTLLIRVRRMLLDNNPYVIGLVAAN

SEQ ID NO: 126258 - protein, 410 aa, unidentified
MKVLHRRCAGLDVHKAEVVACARVFAGRKVVHEVRRFGTTTRELMALAAWLKSLKVTHVAMEATGVYWKPVWHILEADLTLILANAQHVRNVPGRKSDVNDATWIADLLAHGLIASSFVPPQPIRELRDLTRTRRQAVGEAVRHQHRIEKMLQDANIKLSSVLSDPMGVSGRRMLAAMAAGETDAGKIAELGSPRLECGRGALIEALSGRVSEHHRYLIGWHLRLLDEIEAKIAELDQRIEAQIAPFRAAIERLTGIPGIKQVAASAIIAEIGADMSIFPTAGHLLSWARIVPRLDESAGKKRSRRVKKGGAWLKPVLVQCARAAARKRDSYYGAQYRRLKARIGDQKAIIAVAASILTAIYHMLRDGTEHADLGAAYLSRREGDSKAIAHQLARRIRALGYQVDLREAA

SEQ ID NO: 126259 - protein, 319 aa, unidentified
MTQDDLAVVGIDVAKDKVDVCIRALALWRTCPNTAQGRRKLVTWLRKHQVGKAVMEASGGYEREWRKVLHDTGIEVRIVDPKRVRSFAQSAGRLAKNDAIDAQMIAWFAETFSQTPSQAHDAAQEELAALVKARLALVELKIRLQSQSAHAAPGPVQKAQARVLKSLTAEIEKLELAIAAKVKATPHLAERAEIIESVPGFAETTSAVLVAGMPELGQVSDKIAAALVGIAPYDDDSGKRRGERHIKGGRRWVRNAIYMPCLGAATQNNPATKAFYRRLIAKGKQPKVALVACMRKLICILNVMIARRQKWDPARYTSA

SEQ ID NO: 126260 - protein, 343 aa, unidentified
MKLMRIGVDLAKNVFQIHGVDRHEQPVWRQRLPRDRWLQTVLEKIEPGCEIGMESCGGAHHWARQLQARGFRVRLIAPQFVKPYVKSNKNDANDAEAICEAMSRPSMRFVAVKTIEQQDIQATHRIRAGLIEQRTAKANQIRGLIAEYGLVAPKELLMLRRAIPCWLEDADNGLTARFRRLLNGLWDDLRALDERVSELDGEISAIAASEPSAVRLQQLRGVGPMIATALVAAIGDASQFANGRQLAASLGLTPKQHSSGGKDRLLDISKRGDAYLRTLMIHGARSALRTAKSKDDRLSQWAVRLAERSHPNVAAIALANKTARMAWAMLRNGTDYQPGRAAA

SEQ ID NO: 126261 - protein, 343 aa, unidentified
MQAVTTIGLDIAKSVFQVHGVDAEGKVLIRRKLKRRYVLAFFQKLSPCLVGIEACATSHHWSRELKALGHTVRLMPPAYVKPYVKRQKNDAADAEAICEAVTRANMRFVETKTPEQQSCLMLHRTRHLFIRQQTSVINAIRAHMAEFGIVAPVGRQGVEALLEVAADGGDNRVPEVARSCLAALGAQLRALKAQILEFDRRITAWHRSNETSRRLDAIPGVGPALATALVASVADPKAFRSGRNFSAWIGLVPKQHSSGGKDRLGSISKQGDRYLRSLFTAGALAVIRYAKIHGTKHRPWLTALLARRPTKVAAIALANKIARMAWAMMARGERYKEPVALAA

SEQ ID NO: 126262 - protein, 467 aa, unidentified
MYRELHPLRQALATEVSATLPGLAGVEPDKLLASYLDRLTLYVGLDVADASFTALALDAGREVLGELRSCPNRHAGFVRFQDWVESLQAKFNLRLVAIAAETTGVYYWALWDYLAEHSPFARVLFNPRTTQPMGEVLSVKVRDDLVDALLLAEQLRLGSTPEVQLCEDADLLSARLCSRAARDLARQINRKKCQVRAYLRAYSPAVNHTFPKAKFHHPAVAALLKQYLFADEFIAAGEAELTRLLTQNCRSAFDQTEVQQLLAECQHVIARPIQREVFRYRVHCLLDDLHTLAQQQQHFLKLGYQLIKKRPETPLVKAIPGAGISNTLALVSELADVARFPSGAHLASFLGLTTSKHISGTSLYQAKHITKQGSPNARYAAVNLASFLVRTVPRYQQMYHSIRQRKPPRKGHFVALVAVARDFVTNVLYDMLTQHRPFFVEVEAYRKYRQQRQFSASSEPTSASGQA

SEQ ID NO: 126263 - protein, 409 aa, unidentified
MVVHAAPVTPSTVVVAIDVGKNEFAVSVTDVTRTKLLRPRLGCPMTGSSVRDVVGTIQRLLPPDALVKIGIEAAGHYHRPLLTAASWPAAWELLELNPGHVTEQRRVLGKRTIKTDAVDLEAMTELLLAGRGLPVRDRNGVLTELTAWSAHRTGRVLIRTATKNKLLGQLDRSFPGLTRALPDVLGTKVGRLIAAEFADPARLAALGSSRFIRFGATRGLQIRRATADKLIAAARDALPMPDAAVARAVLAADLALLADLDTQIDAADGELERLVRRSPFKTLLTVKGWGSVRAGNYGGALGDPARFATSRQIYRTAGLNPIQYESAGKRRDSVISREGSIELRRALIDLGLGLWLNDPAAKQHATALKARGKTGLVIACAMAHRANRIAFALVRDQADYDPTRWIRED

SEQ ID NO: 126264 - protein, 423 aa, unidentified
MAPNVKETGFAEQFHLYVGFDWASAHHDVVAVDRAGQVVLELTLPDTADGWDGLRQGLAGAAGGHLAGVAVAVETNNGPAVERLLDWGCAVYPLNPKAAQRYRERKAPVGGKSDRLDAWSFADALRTDGHGWRRLTPDDPLTQELRLLCRDEVDLIRQRTALVCALKQALRLYYPAAVEAFEDWTLPGAWAFVEAFPTPAQLVQAGRRKQEKFLHVHKLYRPETYQKRLEIFARADQFGGWPALTSAKSRLAVALAAQLRLLQKQLDQYRQAIAGLFARHPDHDVFGSLPLAHGKMGPRLLSEIGDDRGRFKQAEGLQCYAGSAPVTLQSGRYRRVRFRTGCNKHLRHAVHLWANLSRQKSAWAEAYYQHKRQQGMSHACALRCLAHRWLKIIWKMWQTRTRYDEALHTRNQVAHGSWILKPA

SEQ ID NO: 126265 - protein, 344 aa, unidentified
MGEVSTIGLDIAKSVFQVHGVDVAGAVVIRKRISRSKVLEFFAGLPPCLVGIEACPTAHHWGRELQALGHTVKLMPPSYVKAYVKRSKNDANDAAAICEAVTRPSMRFVPIKTKEQQAALMLHRTRQLLVRQRTMLSNAIRGHLAELGIVSAKGRNGTGELLGIIADVVDNRVPPAARGILDVLARQYSTIGAEIRSIDKSILAWHRSCEASRRLEEIPGIGPIIATALVAEVGDWKAFPSGRSLAAWIGLVPKQHTTGGKDKLGSITKQGNRHLRWLLVAGAMAVIRYAQKHGTEKRPWLGRLMERRPTKVAAVALANKIARVAWAIMVHGDRYKEPKLLPAA

SEQ ID NO: 126266 - protein, 410 aa, unidentified
MTAINQFAAHVGLDWADKKHDVCVQFKNGERVFHVIEHTAEALDAWLTELHQKVKGRIAVALELKKGPVVYALQKYPFITVFPVHALSLARYRQAFSPSGAKDDPQDAELALELMLRYPQKIKAIEPDNSDIRLLQQLVEQRRQLVEDKRRFVNRIINTLKQYYPQPLEWFSHRGSLLLCELIIRWPSLQQLKRARRETIRNFLNAKGGRAMALTEQRVVSIDNAIPLTTDPSVIEANALMATALATQIKVVSEIIKTYDERIETLFDTLPDATLFKSLPGMGPCMAPRMLAALGDNRDRFNSAEEIQNYAGIAPVTERSGQKSWVHWRWQCAKFVRQTFVEWAAKTVNSSYWAKLYYQGLRERGKSHQSAIRALAFKWIRIIYRCWKTRTQYDEAKYLLALEARHSPLL

SEQ ID NO: 126267 - protein, 366 aa, unidentified
MKIVGCDFHPSWQQVAVFDPESGEIAEVKLVNGDGEAERFYQELEVPALIGIEACGNSQWFIELLERLGHLVWVGDAAQIRASYVRRQKTDRRDAGHILRLLMEGRFPRLWVPSAEQRDLRQLLIHRHKLVEIRTRVKNGLQHLALNRGLQKKRSLWSARGRAGLEKLSLEGWTRRRREDLLRLLGELDRHVGELDEAVTHAAEEHPQARLLMTQPGVGPITSLAFVLTIGDVSRFKHSNQVASYVGLIPREHSSGGHQRLGSISKQGNRFLRQLLVEAAQSVTRLDEGFRKQYAARCHHKPKGVAKVAAARKLAVRLYWMLRQNVGYPEIALIESSPRVPLTGACGASGSPLRGSPGAAHARSKG

SEQ ID NO: 126268 - protein, 355 aa, unidentified
MKDQAIHYLGLDVHQATIVATSRNESGAIVLKATVPTEAKAIVGLVRGQGPRVHVAFEEGTQAQWLHDLLQPVAERVIVCNVRGKKELVNKNDDIDSGLLSERLRLGSLKGVYHGAASVLALKEMVRSYGNLVEDSTRVMQRIKAMFRARAIPTPGTGVYGTRQRADWMSKLKGSGVRLRAESLFAQLDALLPLRRKAKEAMIAEARRQPAWKILRSIPFLGPVRVAQIIAIVGTPFRFRGKRRFWPYIGLGVVTHSSADKEIVAGTIRRRRRAPLTRGLNRNHNPVLKDVFKGAATAAAHKDGPLKNFYKESLDRGVDADMALLTLARKISSVALRLWKKGELWDPAKLTTQAT

SEQ ID NO: 126269 - protein, 353 aa, unidentified
MQTVTTIGLDIAKSVFQVHGVDAAGQVLIRRQLKRRYVLAFFQKLTPCVVGLEACASSHYWSRELQAVGHTVRLMPPAYVKPYVKRQKNDMADAEAICEAVTRSNMRFVPTKTPEQQSGQVLHRTRHLLICQQTSVINALRAHLAEFGITAPVGRRGVEELLRVIADPKDSRVPELVRGCLAALGHQLLGLKKQILEFDRMILAWHRSNERSKRLNCIPGVGPVLATALVASVGDPKSFRSARHFSAWIGLVPKQHSSGGRERLGSISKQGDRYLRSLFVGGALAVIRYAKLHGTNHRPWLTGLLARRPTKVAAIALANKLARMAWALMARGERYNYPVALRPSEIAPRSGVM

SEQ ID NO: 126270 - protein, 342 aa, unidentified
MKYIGLDCHKKFDHATMIDTETGEVKAKRLAHVKEDFAEFIGERSDTRLVMESCWNWCKTYELVKDLVEEVTLAHPLKVRAIASAKIKTDAIDSRTLVKLLMADLVPEAHLREAENRIKQRIIRHRAFLIAMRTRLKCRIHDLVDSQLLSRDAVQAKPVNIFSKKGMKWLCSLVFNTEEDRKMLESYLKLLEAINHEIASSNEMVEEIYDKDKDAQLLATIPGIGVTLATLISTEIDGIERFKSSSRLCSYAGLVPSTRSSGGKTYHGRITSEGNRWLRWGLIEAVVPASYADAEIRRQLSDLRRIKSGNVAKTIMARRLLKIVYHVLKEHRAYVPDYPGRL

SEQ ID NO: 126271 - protein, 336 aa, unidentified
MWHVGVDLHRKTVVIAAVHDSGEVRPPVRLQNSETERIKETFCAFGSFRAVVEATGTYRWFHKLVSPLGTVLLAHPGKLRIMVQRRCKTDTLDAQLLANLLRINQIPLAYIPPDEYQLLRDITRQRARLVRGQVSVKISLRALLARYNMEPIFKYPFGPRGLCWLSKHDFGFVDNVVRDELIARFRHYAAQIEGVNERLAKLEAMYPQIESLTVLRGIGAYTAMVIIGELGDVRRFRRAKQVASYAGLTARVHQSGEHCYHGHISKQGSPWLRWLLIEAAMKLVHQDVPLANFYQRIRKRSSAKIARVAVARKLAEICWKRLVSWERQHHPEVAVA

SEQ ID NO: 126272 - protein, 378 aa, unidentified
MERVTTIGLDLAKRVFQVHGVDAAAAVTVRRSLRRRQVLAFFAKLPPCLVGIEACATAHYWAREIARLGHDVRLIPPAYAKAYVRRNKNDPADAAAICEAVSRPSMRFVTVKTEVQQAAAGIHKVREMLIKQRTMLINTLRGLMAEFGIVVAEGPRHISELVAILADPADQRIPAPLHDGLMAIVETLRGLERRIERVEKQIVGWGRGSATCRHLITIPGYGPILSTAMAAMVVNPAAFTSGRHLSASLGLVPRQDGTGGKVKLGPISKRGNGYLRRLLVNGAMSVLCSKRAKADPWLVKLLETKQRKVAACALANKMARIGWAVMMRQEDFRRGSWSARCSTRSDHWATISGSARWSPPPPAAVSWWRTICRADIAC

SEQ ID NO: 126273 - protein, 458 aa, unidentified
MGKSSHIQGRKGTKFSQQLRGVNLEQVLIVAIDAAKLHQKALICNYFGDIIEKPFFFSANNSGMELLCKKINQAVTATEAVRLFLGIEATGHYYEDIVREMAKRGYHVQILNPYTTFEERAGALNWCKTDDLDLVAIAHAIKSNKATENQLLNGVQRQLHVLTRARRSETRKRASLRTEIRALMDLIWREYQGYADYSAGRARKIKVFSDFWGKASLFFMEHYPHPAAVLKLGETGLRKLSIQHNLKLRNTTIQKLLHVAEQALSRNLQELRPELMLLKMKLRDLRTFDAKINVLEQEIENLLLQTDGRLLLTVPGLGVTTAAELYAEIGDVSQYSNANQLIKKAGTNPIVKQTGGGKGSYRKISKQGNDHLRYAVYLAGKSLCMHNKDLKPFYDRLKEKGKHERAIFVAMGNKMLKVAFAMLRDRLPFQSQCSDYHILDEVNKKLNFNCVMPTLAVA

SEQ ID NO: 126274 - protein, 352 aa, unidentified
MKIVGCDFHPRWEQIAVFDVETGEMSEHKLLHSDGEAERFYRALPAPALVGIEACGNSQWLIEMLKELGHEVWVGDAAQIRASYVRKQKTDRRDAGHILRLLMENRFPRLWTPSAEQRDLRQLLMHRHKLVEIRTRVKNGLQHLALNRGLQKKSGLWSVRGRACLEKLPLTGWTARRREDLLKLLAELDRHLGELDQAVDQAAQEHPQARLLMTQPGVGPVTSLAFVLTIGDAGRFRHSNQVASYLGLIPREHSSGGRQRLGAISKQGNRFMRQLLVESVQTVNRLDEGFRRQYAARCHHKAKGVAKVAAARKLAVRLYWMLRQNVGYPEIAHIESSSRVPLTGPKPGRDIE

SEQ ID NO: 126275 - protein, 365 aa, unidentified
MNKCHLNTELSSHEGTRCQFNGGTGAIKLGIDVHQDFYVVVMQEGGANPKPPQRFGKQAFLHWVAKLARSGSEVHAVYEACGFGFTLQRQLSALSIRCYVVCPQKLDEQNRRVKTDGLDAKALVLKLDRFVEGNRSALALVRVPSEEEEQKRAIHRQREQLVKVRKQLEAQGRSLMVNHGFEPVKSWWKQRTFAALQLPAWMKELLLANTQPLLLALQEKIGALTVQLQSAADPKQPRGLGLMTSVIIDREIGDWNRFNNRRQIASYTGLCPGEYSSGNTRLQSCVTKHGNPRLRAALVELAWRLVRFQPNYKPIFKWRRLLAKGAFATGAARKKAIVAVARQLAVDLWRVRTGRCKAQALGLFI

SEQ ID NO: 126276 - protein, 373 aa, unidentified
MIVIGTDTHKRTHTCGAVDAFTAAARGELTAAARTGSFGKLLRWARALDPERVWAIEDCRHVSGGFERFLIARGERIVRVAPKHMAGARRSSRERGKSDSIDAFSVARAALKEGIENLPGAQLDGAALDIRLLVDHREDLIAARTADQQRLRWHLHDLWPELEIPAGALDTNKWLGKISRRLARAPQATRVRVARELVRQITARTTRARELEAELAALVESYAPQLLAERGCGPLTAAKLIGEIAGADRFATDAKLARTGGAAPIPASSGNTNRHRLDRGGNRQLNCALHRLAVNKANWDPDTAAFLARKQAQAQSRKEALRSLKRHLARRVWRLLRSTTAPNATLPPTDIPDSPKARETIPGTAPHPMTCIS

SEQ ID NO: 126277 - protein, 346 aa, unidentified
MGKSISDFSSVTTVGLDLAKHVFQIHGIDASGRVVVAKAMRRNKLLEFFASLPPCLVGLEASGSAHHWARELIKLGHDARMMPPAYVKPYVRRQKNDASDAAAICEAVSRPSMRFVGVRSLENQAALMRHKTREMLVSQRTQLLNGLRGHLTEVGVIAAQGPRHARELAELIEACDDTIPVEVCEALAPLAVQLRTLDEAIAQLDRAITKLVQKDETARRLMSIPGFGPITASAMAATVQDASSFAGPREFAAFLGLTPKQNSSGGKQKLGRISKMGNRNLRKLLVVGAHAVLFHRMSHTDPLRMWAKKLLEKKPFKLVAVALANKMARIAFAILRSKTTYREIPA

SEQ ID NO: 126278 - protein, 410 aa, unidentified
MRIIYKRRCGLDVHKKVIVACLLVLDRHGELHKEIKKFGTMTRDLPELLDWLGQSGCTHVAMESTGVYWKPVYNILEGHLEIVVVNARHLKGVPGRKTDVLDSEWLAECFRMGLLKAGFIPPSPVRELCDPTRRRTLLVRERSRAANRLQKVLEDANIKLAGVVTDIQGVSSWAMLREIVSGNADPESPADLAKGLLRKKRPQLLEALTGRVKPHHRFLLAELLRHIEYLEESIGRISKEVEESLRPFEEDVDLLDSIPGAGSRTAEVPLAEIGWDMSRFPGGRHLASWAGMCPGNNESAGKRRNGKTRKGGRWLRHALIEAAHGAARTKNKYLKVHYHRVAAHRGKKKALVAVGHSILVIGCHLLTRRQSYSDLGANYFDERDRNSVRQRCVKRLEKLGYNVNLQPMSA

SEQ ID NO: 126279 - protein, 339 aa, unidentified
MKFKRIAIDTSKHVFTLHGVDEQEKPLLRRDLKRSQIVPFFSKLADTEVVLEACGGSHHWARVLGELGHHVRLIPAQYVKPFVKRSKNDRNDAEAINEAAARPSMRSVPIKTVDQQAQGMILKHREMLVSQRTQAINALRGHATEFGVVAAKGTSKVTALIELLAAESGLPAAAIAMFKQMGAHIEALNDRILALDADLAELHKANSLSQFLAAIPGVGVLGAITMTLTVDPANFASARHFAAWLGLTPKEKSTGGKQRLGSISKAGNERLRQLLVVGAMSVIRFAKPGSKSASAWLLKLLERKPRKLAAVALANKMARIIWAMMAHGEAYRRQPMTTA

SEQ ID NO: 126280 - protein, 421 aa, unidentified
MLKIVYPICCGIDVHKKFVIATIATTNDKNVTSYQTRRFNTFKNDLIALNNWLVENKCKDVCMESTGKYWIPVFNVLEDFCTITLANPRYVKNIPGKKTDKRDSIWLADLHKHALVKGSFIPSKPIRELRDLIRYKSKLTNVSSSEKNRVQNSLTVSNIMLANVVSDTFGKSASSIIKHMIENPDIIDFDYSSMLHKSLKKKSDEIEQAVAGKFSKEQAAKLSVCYEHYNSVEKCIEILEATILELSLPFKEQIDIIATLPGMKQASATAILSEIGTDMSVFTSDKHLCSWAGLTPQSNESAGKKKSVRISRAGVYIKPLLVQCANAAVKDKSCTVFKNRYEAIKKRRGHKRAIIATARMILTCIYHMLSKNEPFNPLLYDDNAKSKKRNQQDSLSIEQAIAFLQANGYTVNISDLVAITN

SEQ ID NO: 126281 - protein, 338 aa, unidentified
MKKNVIRVDVSKEKLDFCFQVENMFVKEWTLSNATAAIKKSLKTLLKDSRCEVSDVLVCAEYTGQYTYPLCCACEELGLSLWLENPAQIKHSSGVQRGKNDRLDARRIADYACRFQDKARLFSLPEKNIASLKQLISERDLYIADKAKYQGQLKDQKQFMSPEDYKRKSKRLEELMNCLEKTIAIIEQQIQQLIDNDDTLSNQHKLLCSVDGIGDRTATKMLVATNAFKNFDNARKFSCHAGVAPFQYTSGSSVFSKNRVFQRADKSIKSLLHMAALVAATRMKDGELREYYLRKVAEGKNKMLVLNAIRAKLIARMFAVIKNNQPYEKNYQFCLQIS

SEQ ID NO: 126282 - protein, 403 aa, unidentified
MKSVLSIDVANGKSEVLLITEYGEVLIEPYVVKHCLSEFNLLKEKIDNFNLNDLTIFMESTSTYHLPIQRFFTKNNYNVQVINPILGKNNTRNLRKTKTDIEDCYNLADLFFKNTVKIHTKNMNDIYSSMIELSRQEKHLTESLVRSKNRFKQIIANAFPEYIKCFTANDIFGKTSLNFIKEFPHADIIKEKRIDALANNLYKSSKNGCSYNKCLSKAKKIKELANNSYPGIDVDSYEVNNLINIVDVISYNGSKLNDVKQDIVKLARQTPYFNIINSIYGIGETSTAQIIAELGDINRFENIKQLNAFCGLDPTIIQSGKSINYHGPISKRGNRNARKILFITCCSIIRASVLHNMDNEILLYYRKKQAENKHFKECIIACSTKLLRTIFAMCKNNSLYVQK

SEQ ID NO: 126283 - protein, 458 aa, unidentified
MGRNRSTDKSRRAMPMVHPNAAAIDIGATMHMAAVSADRTPEPVRSFGTFTTDLHRLVDWFAECGIDTVVMESTSVYWIPIFELLDARGFAVFLVNARDAKHVPGRKTDVSDAQWLQRLHSFGLLRASFRPKGQIAELRAYLRQRERLLEYGASHIQHMQKALTEMNVQLHHVVTDITGATGLRIIRAILGGERNPAVLARMRDRRCHATVETIEKALAGNYRAEHLFALEQALALYDTYQQKASACDARIEAVLKELSARRGHEVGPLPSPRQNRSRQQNSLLFDVRTALFALLGKDLTQINGLGPYLALKLIAECGDDLSAWPSAKHFTSWLCLAPSNKISGGKVLSSRTRRSRSRAAALLRLAAVTVGRTDTALGAFYRRLSARIGKAKAVTATARKIAVLFYNAVRHGMDYVDPGASSYEIRYRARVIDNLHRRAKAFGFMLQPMAPTPGMAVS

SEQ ID NO: 126284 - protein, 608 aa, unidentified
MLTANTNPTQPHATTNPTQQPVRIGVGIDTSRYGHYAVFLRHDLQPVADELPFAESANGYTQLRQRLEHIAGRHHTVTFDIRLDAAGQYADNLLHFLQQLANHPQTKTCAISHAGITLSCGDPQRNKNYRAALFGSKKSDPIEARAAARFALSERPKAMPLPATELRTLRQVAGRLQATVRQRTRAINQFHHLMALAFPELALLVKDISQGWVLELVHRYPTATLLATATPKELAHIPYMPAQRIDPLLVQTCTSIASLSGVVTEELVRDQVRQLRDVQARQKRLENMLIHAYRQLPKPNHLDTIPGIGEVTAAVLTAFILDIDRFDTPGKLVAYFGVLPIEMSSGIDRDGQPRGSRRYVMSKRGNDLVRRYLWMAALSAIRCNPAVRALYRRVVAKHPGHKAIAVGHGMRKLLHLVFALWKSDRPFAAKHYAWEGESETTGMAADKRLSVNVAETPSSDIEVSANKQTAGHTPEAIPAEQVVTAACDVTVADEVAGDESIFIDFAHLKSQLSMVRVLEHLGLLSRLRGSGPQRRGACPLHRGDGRSRTFSVNLEENVFHCFASCCGKEGDVIDLWAARHQLSLRAAAVDLVQTFGVEPAAATEKRHS

SEQ ID NO: 126285 - protein, 330 aa, unidentified
MSEITTIGLDLAKHVFQVHGIDAQGTTVLRKRLRRGQVLAFFSRIPRCVVGLEACATAHYWARELGALGHEVRLMPAQYVKAYIKRNKHDAADAEAICEAVQRPTMRFVPVKTAEQQATQLLHRGREQLVRQRTMLVNALRAQGLRNVGQLIAIVRADGDTRLPDVARQVLQVLANQIEQIETAVTALERQLLGWHKSNAVSQRLASIPGIGPIIATAIATTVADPKVFRSGREFAAWLGLVPRQNSTGGKTRLGGITKRGNRYLRRLLINGASANLLRSKATKADPWVIGLRRRRPPLVVAVALANKTARIAWAVMLRQKEYQPRAVAA

SEQ ID NO: 126286 - protein, 430 aa, unidentified
MSKEKFLSVGIDVGSTFSWMSIVDPNETLILKPFKIIHNDLDSLNRALTEIKKAEELYSLKSHTFLESTGIYHFPLFCYLMESGFEAFVINPLITHSIKNIGIRKVKNDKLDSIGIAKLGLKPDLKVSVIPAKLVLELRSLTRNYYNLVDIRSSYVNQLKTHLHTVFPQYLDIFCDVTGNTSMMILEQYPTPDNILKAHKDCLISKISKASRKGIKKSTEKYEKLIQAAKAAKIFGCNSESVYFIISTILTLIKGLNSAISDTLGKIQSLVKEHHSEKFIQQIHWLDSITGIGFLSAVTIMCEIGDFSVFKSPKQLFAYFGMDPEVNQSGKFNGTQVHMSKRGSRIARRAIFAAALACIRKKRNGEAINPYLYDYYQKKAAAKPKMVALGAIMHKISNYIFAVLRDEKEFSLRSPEEHCQAYQPPHILAA

SEQ ID NO: 126287 - protein, 375 aa, unidentified
MNNNNTLYVGLDVHKESITVVYAINSEPVELMGKIGTSPTDIQNLCKRLRSKSSQVSIVYEAWPCGYGLYRRLVKSGFDCMVCAPSLIPKKPGERVKTDRRDAIRLVRSLRAGDLSAVYVPGIEDEAFRDLARAWASARDDLRHARQRLKSFLLVHGVHYVGRADWGPAHRRWLSKYSFESPWRQLAFDEHRRTIEDRQAQCERLESALKEAVTEWRLYPVVEALQAMRGIQFITAVGLISELGDLTRFEHPRQLMSWFGITPSEYSSGGSRHQGSITKAGNSYARKLLVEAAWSYRHPARISPAIQKRQENLPRPVIDRAWDAQLRLCKRYRKLQAKGKNVNITIVAVARELAGFIWDMGRIAMSVAQQPQCHK

SEQ ID NO: 126288 - protein, 435 aa, unidentified
MEVVYARCCGLDVHKKMVVACLIILDSLGQRKKEIRTFRTTTQELLLLLDWLVSAGCTHVALEATGVYWKPIYNVLDGAMELLVVNARHIKAVPGRKTDVRDAEWIADLLQHGLLTSSFIPPAAQRELRELTRYRTSLVEERARAVNRLQKTLEDTNIKLGDVATDILGKSARAMLEALLDGQTDPAILADLARGRLKAKRAQLEEALVGTLKPHHRFMLTEHLALIDTLDEAIARATQEIEARMGPPDPATQGPAKAEEEEHPEHQEMSPLSWDEAVRLLDSIPGINPRAAQGILAEIGTDMSRFPSARHLASWAGMCPGNHESGGKRLSGRTRKGSPWLRKLLIEAAHAAAHTKNTYLSALYRRIASRRGAKIAMMAVGHSILVIIYHMLCEHVSYTELGSNYFDERDRQATEKRLVRRLEKLGYHVELQEVA

SEQ ID NO: 126289 - protein, 381 aa, unidentified
MTNEMLRSDDTKPVRLLVALELSLSKWGLSAAVEGQPRKRVKTVAGGDYPALLEAVTEFKVRFKLPLDAPVVFCYEAGRDGFYPYRRLTELGHDVWVIDSASIEVSRHRRNAKSDGIDADKLVELMQRKAGGERRALRIVRVPNASVEDQRQLPRERETLLTDRRRLLNQIESVLFLHGYREMPQSSGALKDWLEQPRELGAQLRERLQRDVERLALVESQLAGVEKRMKEQLHEEQSGSIGRVALALMQLCGIGLIGAWVLASEIYGWRQFRNRKEVGSALGLTPTPYSSGNDQREQGISKAGNKRARSLLVELSWLWLRYQPDSALSRWFRERFSGGGKRLRRIGIVAVARRLAVALWRYTAQGVVPDGARLKSAATAV

SEQ ID NO: 126290 - protein, 315 aa, unidentified
MNIIGLDISKDTIDATLHKTNGSIHYIKFKNNDDGLKQFRLWIKGNRIRKAYIGMEATGIYYEKAADMLSSYYTVYVINPLKIKDYGKSRFNRTKTDKADSNLIADYIKRHQDTLIPYQIPKNKALQKLINLKNQLQQHQKQIKNRLHSTEEDFIRNIHQDLIDTIQDKMEQVKIAISEQIKKQTDNNHYRNLQTIPSIGKDTASVLYAQLTEKHFKTANQFVSYAGLSPAIIQSGTSVRGRGRLSRYGNRRLKSTLYMPALCAYRFNAFPKLINNLKKAGKPKMVIIVPSCANWRSSPITLLKPASLTMRKDTD

SEQ ID NO: 126291 - protein, 417 aa, unidentified
MNSPPETIPIQRYIGIDIHKYYMMIGGQNAHQEWILRPRQVQTVHFRTWAEKNLKEGDAVVVEATGSVWDIYDIVAPLVSKTVVANAHKVRQIAEARVKTDKEDIKRLITLLIADIVPEVWVPPIHVRELRSLISFRWRLTKQITMSKNRLHSVVQRFNLNAPKGGLLTDKNKSWWEKQEFTDLTGFQVDRDLEIVKILEEQKEAIDQKLAELSNTEPWASDIAFLMQIPGFGLIFSMVVLSAIGDVSRFSDPKKLVGYAGLGAGVHASGEKYQEKSITKAGRKELRWALVEAAWVAVRFDPYWKAQFIRLKKRMHVNKAIVAIARRMLVSIWYILTKRESYRHFDEETIAYKMLIWAQAIGKEGRQGLTRQQFAKYGLLRLGIGQDLERIVKGGGPRRIAPTEEVLALKPELAPPR

SEQ ID NO: 126292 - protein, 338 aa, unidentified
MMYGAIDLHLRYSEIRVVEADGRVVRERRVVTSRATLTAAFAGLGVLRVLLETGTESEWVAQTLEAAGHAVVVADPNYAPMYGEVRRRVKTDRRDVAALAEANRHGWYRATHRRSRAQRTLQQILRSRRQLVAMRTGSISVVRALLRQEGYRLPSGSAAQVPARLARVPLPDELAATLAPLRQVIDTVTRELAAIDTRVRTTAAADPVVTRLQTVPGVGPVVALTFRATLDEVTRFQAAGQVSAFLGLVPREDSSAERRHRGHITKAGSGELRSLLIQAAWACWKSRGSGTLRAWAERLAGRRGRRIAVVALARRLSRILYAVWRDGTTFDGARVAAA

SEQ ID NO: 126293 - protein, 416 aa, unidentified
MKQSQNTRGYERYFAIDTHREYHLVGGQNEDQEWVVPPRRVSIEKFPEWAQKTFCAGDIVVLETTTNVWDTYDIVAPLASRVLVANAAAVGEIAGARVKTDKEDIKRLLKLLFGGIVPEVWVPPAHVRELRGFISYRNRLVKMATMIRNRLNSLLHKHSLLLPKEGILDQDWWDAQSSISPLEKMQIRQELYLLAEIKKLQSAVNEELEKQSVGELWGKQALQLMQLPGVGFIVAMTVLSAIGDITRFESAKKLVGYAGLGAGVHSSGKTHKEKRITKKGRKELRWIMVEAAWRAVRMSPYWKGEYEKYLRRMRKPNQAIVVIARKLLVAIWHVLTKEETDVHASEEDLAYKMLLLSWSLTENVRQGMTYKQFAKYALMKLGVEKDITRFVRKDVARRLAPKDEVLARMKELGLTF

SEQ ID NO: 126294 - protein, 377 aa, unidentified
MKAPSTRPAAVLGLDVGKSSHWACLVDRDGEVLASAPVRNREGALDALFSSAPAGTLVVVDQFRNIGSLAVRRARAAGLGVAHLPGLAASRAAGLFAGEAKTDERDAAVIARTALGVPDSLSGVPGRGEALEAARALSSQRDHVVACATRDKNRLRAVLLESCPALEAAVDLSDRRWLELLAGFGGAWGIARSGAGGPRAEAAGEAAAASTAPPPALVEAENRQVMFLAARISEALDEAGALEAETAALLEGDETYACLLTVPGIGPRTAAQLAVSVDIGRFPDHDHLASYRGIAPRVRSSGTSVRSVRASRRGDARLKSLLIFSCNSLVRSSGRYGEYYRACRARGMGHGRALKAVARKRLRAIYAVMRDRVPYRE

SEQ ID NO: 126295 - protein, 400 aa, unidentified
MNPVIGLDVSKGESQVQAFLDKGKPYRKSFKVSHTIEGLDLLVKFLEEVKRETGKQPPIVLEATGHYHASLVQYLEDRGYLLIIINPLISYKAKSSSLRKVKTDAVDAYHLCELFYKEDLEPYKKRGVQLLNLRNLTRQHENITGVLIQTKLQFQAILDQVFPEYRGVFGDLYSVVSLLTLSEFPSSEDILEASVETIADKIAQLCKSRSYRWANEKAIQLKAAADRNPFEKTLYQSHILSLGMYINIILQYKEHLSKLESEIDALAKEVEEYNIIKSIPGIGEKIVATIISEIGVAFTGVNPSVFESGKFTATKNRITKRGSSRLRHALYMAVRCAIRDCRKSKTSDEIIPRNKKLREFYDKKREEGKPFKVAVIACVNKLLHWIFALLKNKTTFQDIA

SEQ ID NO: 126296 - protein, 345 aa, unidentified
MTEAYDGRQVVGIDLHRRRSVIVRMTGDGRKLETVRITNSAAALRREIAKAGKHPRVVVEATYGWYWAADVLEAAGAEVHLAHPLGVQAYSCRRVKNDQRDAADLADLLRMGRLPEAWIAPPEIRELREITRYRHKLVQARTSVKDQVHAVLAKLGIPVTCTDIFGVHGQAWLDGLRLPQPYAGKVTSLRQLAGELSAEITLLEQVLGDLLAGHEGYAAIRQLPGIGPVLAAVIVAEIGDITRFRKAGQLACWAGLTPRHRESDAKVTRGHISKQGPRILRWALCEAIQHQPAGTRPQQVKDRIIARRGPQARSIAKTAAARELLTLIFYALRDGRVRRAASPAA

SEQ ID NO: 126297 - protein, 425 aa, unidentified
MREHDTQAEAGTVNIPGKGAMFEIEDVGVFLGLDVGKTAHHGHGLTPAGKKIFDKPLPNSEPKLRAVFDKLTEKFGTVLVIVDQPASIGALPLTVARDAGCRVAYLPGLAMRRIADLYPGEAKTDAKDAAVIADAARTMPHTLRCLELTDEITAELTVLTGFDQDLAAEATRTSNRVRGLLTQFHPSLERVLGPRLDHQAVTWLLERHGSPAALRKAGRRRLVELIRPKAPRMAQRLIDDVFDALDEQTVVVPGTGTLDTVVPSLAASLASVHTQRRAMEAQINTLLEAHPLSPVLTSMPGVGVRTAAVLLVTVGDGTSFPTAAHLASYAGLAPTTKSSGTSIHGEHAPRGGNRQLKRAMFLSAFACMNADPASRTYYDRQRARGKTHTQALLRLARQRISVLFAMLRDGTFYEPRTPKNVELAA

SEQ ID NO: 126298 - protein, 443 aa, unidentified
MTRKNQKRFEVVHPDCAAVDVGGSEHLAAVDPAKCADPVQRFSAFTDDLHAMADWFSSMGVKVVAMEATGVYWIPLFEILDRRGFEVYLVNSRATRQITGRKSDVLDCQWILQLMTHGLLRGAFRPSDEVCSLRSLVRQRANKVRDQAKSLNRMQKSLVQMNIQLAQVISNIAGVTGMSILRAIVEGERSPDVLARLRDKRVKADEATVARSLRGNWRAEHLHALSQELAAYDFLEKQIGECDQAIADALDRLPVLQSDVTTPTKTLRSAHRSNEQQLALHQALNKVMGVDLTAIPTIGIDTALVLASELGADLSRFPTSQHFCSWLGLAPPTRISGGKPLPGKSAKVINRSAQALKQAASIARNDKSFIGASHRARLTRMDTCCAIKATAHQLARLIYAMLTKGQPYVEKGIEEFEERSRDRQLRALERKARKLGLQLVKAA

SEQ ID NO: 126299 - protein, 461 aa, unidentified
MNRKKSRGGRKGSAQKKVDWKALEIVHPDAAGIDVGGSEHWVAISPDRDSEPVRRFGTFTTDLHEMARWLVERGVRSVAMQSTGVYWMPVLEILEQHGLEVYLVNAQHTKNVPGRKSDVEECQWLLKLHAFGLLNNSYQPTDEIRIARTLWRHRGNLVAEAASAIQRMQKVLIEMNIQLGNVLSDLSGVSGMTIIGAILKGERDPWMLAALVQPEVQATRLEVAKSLEGNWREELLFVLSQQVELYRIYQSKIVDCDLQLRKHLETLGSKVDLQTQPIGPKPKGKKGSRNAPQFDLRTELYRITGIDWAQINGMDVLTAQTVIAEAGADLSAFPTEKQFTSWLGLCPTNEQSGGKVLKRRTRKVVNRASGAFRTAATTLLRSQSYLGAQYRRLRTRLGAPKAITAMARKLACLFYRLIKHGQQYVDKGTEYYEAKYREQQIRSLATRAQRLGLQLVIPETA

SEQ ID NO: 126300 - protein, 329 aa, unidentified
MIQVHGIDANEKVVVRKQLRRGKLIAFFEALSPCLIGIEACATAHHWARELTKVGHEVRLMPAKDVKAYVKRNKNDAADAAAICEAVRRPTMRFVRIKSPEQQGQLMQHRTRDLLMRQRTQLINALRAHLAELGIVAAKGDSGVKELLAIVADEEDTRLPIDVRASVIVLAAQLGAVQTLIGSIEKRIKTQHRANEASRRLETIPGIGVIGATAIAATVADPTVFRSGRDFAAWIGLVPRQDSTGGKQKLGPISKQGDRYVRRILIVGAHSVLRRAQENPEKYPWLTQLLARRPFKVVAVALANKMARMAWALLAHGGTYRVPELAQAA

SEQ ID NO: 126301 - protein, 315 aa, unidentified
MPSTIAQTVGVDISKATLDVYLHPEAIARQFPNTMAGVADLLSWLEQRPVHRVIFEPTGAYHHRLERQLGTAGVPMVKVNPLQARRFAEAIGQRAKTDAVDAAMLARFGALDALQVRPMVSQTLSDMKELLVARRGLVKDRVAASNRNHTHRAPLLKRLADQRLRQVERQIAAIDAALRALCQADAELKARLDILVSIPAIGEATALALLIEMPELGAMDNKCAASLAGLAPVARDSGQHSGKRFIRAGRAHLRQALYMPALVAIRFNADMKAKYQALVAAGKPPKVAITAVMRKLLILANALLREHRNWTPKPA

SEQ ID NO: 126302 - protein, 321 aa, unidentified
MTYVGIDVSKATFIVAYSSAKSSKTKTFKNTTKGVHEFIQTLSANEHHCVLEATGNYSSLLVYLLSRANITVSLENPLKIKNFARVMLSVTKTDETDARLIALYGQRMQPAPYKLRSDAILTLKQKRTVIRQLKKQLIATQNLKGSMEALPFFDPKCKKAIEKTIVFLEKQTKGLEEELAALAQSEYKKQIDLLTSIKGIGVTLAAALIMATGGFTYFDNAKQLTRYLGLSPTYQQSGTSVNVKGHINRNGDSSLRGQLYIAAMASLRCNAECKACFDRLRSNGKPGKVAVVAVANKLVRQAFAVVTQEKPYVDGFKSEKP

SEQ ID NO: 126303 - protein, 433 aa, unidentified
MKKHTYRAKNINVICVEKLGEKLMRGKTVVAVDVAKHDFFAGIAEANGNVVEHVKFTHPLQTRQFVDMLETLRRRGDVEVVLEPTGTYGDAMVDQLRQRGFAVFAMSPKRCHDAAEVFDGVPSLHDAKATMILARLHVQGLSKPWPEPDDERRALRAAVARREIYAVPLESHRGRLEALLSRYWPELDQQLDLSDCKTAIALLVEYPGPEAVAHAPDEAARLMVKYSRHKLSKEKIAKVVASAQGSLGVPMCEEERKLLSALAEQMLELWKMVDRIDDEIGRMAEAHPASRLLSPTVGKVTSAILVAMLGPANAYRSADAYVKAMGLNLKEHSSGSSKKKGTGLHLTKRGPGLVRKYLFMATLRLIQNDPVCREWYERRRAYRRGEKLKAVVALMRKLSRALWHVGQGERFDATRLFDMRRLKKHRRAQLASG

SEQ ID NO: 126304 - protein, 417 aa, unidentified
MNDPQQWQQHRAFGALDWAREKHSVIVLNPTGKVIEEFEIEHSALGWKKFREKLQAYGSIPFAIETSQGAAVEQLVEAGMMVYPLNPKSAQAYRDRKAPSGVKDDWLDAWSFADALRVDGQGWKALRPEEALIKELRLLCRDEVSLIEQRTAFIQQLRDALAQYYPAALEAFDDWTRVSAWMFLQRFPTPDALAQAGKRKWQNFLHSRRLWAGQEGTRRMEIFARATEFAGSPPTVKAKSLLALSLVQMLFAIEKQLSLYRQRIEELFARHPDHDLFGSLPGAGPKIAPRLLSEIGDDRERFGGDAQNLQCLGGTAPVTKRSGKRRYCYIRWACNKHLRYAIHLFAEQSLSRCVWAERYYQHHRQKGQSHANALRRLGHRWLKILHKMWIDRNPYDAELHHRNQLNHGSWIFQLKAL

SEQ ID NO: 126305 - protein, 423 aa, unidentified
MEIMYERVAGLDIHKATIVACVRLGAGRNVTRECRTFDTTTDGLRALLAWLEECRCSHVAMEATGVYWMPVWKILGEGDFALIVANAAHIKNVPGRKTDLNDAMWIADLLACGLIKPSFVPEEDVQELRSLLRTRKQLGREQTRHVQRIQKTLAEANVKLDSVLSDIMGGSGRRIIEAMIAGVRDPRRLAALANTRIKATPKQLYDALHGRLTDHHRFLLTLHLRQWDNLDATIREIDQEVEARIARMDEEVKADEAPFRDLIGLLCTIPGVSTLSATTILSEIGRDMSRFPTAGHLVAWAGLCPGQNESAGKRKPARLRKGAPWLKTMLVQCAWAAKRKKDSYYKAQFFRLQARRGPQKAICAVAASILTAIYHILKNGTEHHDLGADHFNRRSTEGQTKRLVAQLTRLGFEVQLQRTAEAA

SEQ ID NO: 126306 - protein, 385 aa, unidentified
MGSQAFIARDYDVFAGLDVDKKSISVTFTDHQGLLKSMRMPYSVDHLVNHVRKYYGDKKVAFAYEAGPTGYGLYDGLVAQQYPCLIASPSMIPKAPGQRVKTNRLDSLGLAENLRGGQLKSIHVPTTLYRELRHLTQLRDALVSEVVAMKQRIKSLLLMEGLEFPPAPPGSQWSFLVKAKLRKLPCSSVVRFKLDQLLDNLEFGEKQVLKVTREIRRFCHNDPELSQCIDYLKSLPGIGWIVASQMMARIGDWRQIKNIREVPAFLGLVPTESSTGERTTRGSITHSGDPRLRSKLIQASWSAIRQDGELLKFFRTVAKKHPRHLGPRVAIVAVAHKLCVRAAVVLMKQRPYEMREKVQSAPLTQEETVPQGTTRRRRVPGEKIS

SEQ ID NO: 126307 - protein, 343 aa, unidentified
MNTLYYIGLDIHKRIIAYCIKVIDGRLVAQGKIAADRKTLGEWVKGLPGPWIGAMEATIFTGWVYDFLKPHAVALKVAHPEMLKAITAAKKKNDRADAEKIADLLRVNLLPECHMLSEELRDLRRILRYRNHLVRTAVKMQNKMSGLLMEVGVPYSKKRLHGKKYFHELLEGVEEIPSSVKGLLQLSRSGYEMFRSFQKRLIAVLREESLIRDRVEHLMSIPGVGELTALTWVLEIGDPKRFPSIRDAVSYCGLCSAQRESAGKEQRGPISKKRNKHLQTMLIEAAKIAPQWNKQLSCLHEKELKNGNRNRATLAVARKLVAYMMAVDRNQTFFKQPAETQAA

SEQ ID NO: 126308 - protein, 407 aa, unidentified
MTVFVGDDWAEAHHDVHLMDEAGDRLARKRLPEGLDGIAEFHAMVADHARDPSEVVVGIETERGMWVQALIAAGYQVYAINPLSVSRYRDRHNVAGAKSDPGDAKVLADLVRTDRHNHRPVAGDSADAAGIKVLARAHQNLIWDRTRHTNRLRNDLREFFPAALEAFDDLAHPDAIAVVAKAPSPDQAARLSVAQIRSALRRGGRQRNLDTRAAEIQQALRSPQLSAPGAVAAAFAATTTALVEVIASLNTAIAELETELASSFEQHPDADIYLSQPGLGDVLGARVLAEFGDDPERYDTAKSRRNYAGTSPLTDASGKRHIVKHRHIKNHRLADAINQWAFCSLQASPGCRSFYDQRRAAGDLHHQALRTLGNRLVGYLHGCLRTRTHYNEHTAWAHRQPEQPQAA

SEQ ID NO: 126309 - protein, 323 aa, unidentified
MSDPINNYAMIGVDVAKLKLDIAIDDKTILTIDNHEESFKKLLKSIPNIDQVCFVMEATGGYERKLVSFLQAKGVAVAVVNAKRVRDYANSMGAYAKNDRIDAQMIRHYAQAAFAKNRLKLREPRTEIAQRLEDLLRRRNQLVGQRAVEKQHLEAAGDKESVRSITRMIKQFDKEIDRIEVKITAYIDADDHLKKSMEQLLQVQGIGEVTVLTLLTQLPELGKLSNKEIVALVGLAPYCKDSGKKTGRRTIFGGRILIRSTLYMATLSAVRYNKPIREFYQHLLAKGKLKKVALVACMRKLLTILNSMAKTESEWDPYFGKTA

SEQ ID NO: 126310 - protein, 330 aa, unidentified
MLGIDVSKNTLVATLVEGTTHHTCWKQSVGNTEAGIASLLSRTPAGTPLVLEPTGRFGHLLVAQASAAGYPVLLAPPRKAKAFLSSISSRAKCDPLDSRGLALFALSQPLARYRLKSQIVEQVDQLLSARKGISSALARLSLQQRELPHAAAVLLEAIGALKEQRAALDKQIAELSAKSPELGAVARLRQVPGIGPVTAAAVASRLASKDFAHPDAFVAYIGLDVGVVASGKKQGERGLTRQGDAELRRLLYLAAQANLRCKESPFKEQYARERAKGLSTTGALCAVARKLAKLCWSLSRHGSTYDPSRVYQQPGSRRTAGESSQQEIAS

SEQ ID NO: 126311 - protein, 321 aa, unidentified
MTGIICGVDIGSSSLAARIGQDGAAATFANTPEGIAELAAFCKTHQVALIAMEATGGYEQRAFAQLCGHGLPVAVVNPRAVRQFAQSMGWLEKTDAIDAGMIAWYAETKKSQPLCLAPPTQLELRARVTRLRQLTEVRTAQLNQQRLVTNEAVQKSFGAMLTFLAGQIRELEQAIAALIQADPLWRELNQAFRTIKGVADRTVARIMAEMPEIGTLSNKTISKLAGLAPLANDSGKHQGKRAVRGGRAAVRDILFLVGSVVARYEPDFLCFQQRLRAVGKPPKVVRIAVAHKLLVRLNAKAREVRQQSAHTQLSCSASQQP

SEQ ID NO: 126312 - protein, 343 aa, unidentified
MQHIAIDLGGKESQICIRQPDGTIVEEQKVPTRKLTELVSTWPASRVVMETSAEAFRIADAAIAAGHQVRVVPGTLVRLLGVGDRGVKNDKRDAQQLSKASWQTDVPSVHIPSKLARELKSICGARDVLVGTRTKLINNVRGWMRTQLWKIRGGTTATFADRVRGHAAAVGESLPEHIERQLRMLSAVIEETKGADKQLQTLAAEHAVCRRLMTVPGVGPLTAVRFVATIDEPGRFATAHRVQSYLGLTPGEHSSSERERRTGITKAGPMELRCTLIQAAWVAMCRVRTSHPMIDWARRLAERRGRPVAAVALARKLAGILFAMWRDGTSYQSKRSAEAVQHS

SEQ ID NO: 126313 - protein, 449 aa, unidentified
MERVFQRCCGLDVHKMTVAACIRIPGKRGRRDQEVRTFGTTTRELLELRDWLEANGVTHVAMESTGIYWKPIFYVLEGSFTCLLANAAHIAQVPGRKTDVKDCVWIAQLLEHGLLRGSFVPEAPIRDLRDLTRYRKGLVHERTRISNRLHKVLEDAGIKLASVATRVLGASGRAMMEALVGGTTDPTMLADLAQGRLREKLPALREALTGRFRAHHAFLVSQLLAHVDYLDEAIQVASVQIETLMAPFASEIERLDTIPGVNRRTAEVLIAETGADMSRFPTAKHLASWAGLCPGNNESAGKRMAGTVRKGNRWLRTALVEAALSASRAKDSALAARYRRVMRHRGHKKAVIAVAHAILISTYYILARQVPYQELGPDYFDQHHAERARRRAPANPGTPGLQGDHRAGRIARAAFGAPSPGFSEQAGIPPPSAPCPFRGDERTYGKGLG

SEQ ID NO: 126314 - protein, 343 aa, unidentified
MKHTTFSVDIAKNVFEIAVSYEPGIVRESHRVARAKFLEFFAKREKGTVVMEACSSCHFWGREVEKLGHRAVLLPPHAVRPYVQRNKTDRADAKGILEAYRNKEIRPVPVKTVAQHTVTALHRMRSMWLEARTSRLNTLRGLLREIGIFIPVGAKHVVPQVSELVEDADSDIPNALRAPLHEMCLEIRGLESRMRQAERELEALARQMPVVVRLRDIPGVGLLTATALVAFVGDVQRFRSGRQFASYLGLTPREHSSGSIRRLGRISKRGDSYIRMLLTHGARSVLWASKRVKAPDRLRAWALEVQRRRGHNKAAIALANKLARIAWVVWKRDVEFVSQPLAA

SEQ ID NO: 126315 - protein, 406 aa, unidentified
MIFVGVDWAEAHHDVHIEDEDGKRLGGGRLPEGVEGIARFHDLVGDHVEEPGDVVVGIETDRGLFVTALVAAGYEVFAVNPMSTSRYRDRHSTSGAKSDPGDAKVLADMVRTDRHNHRAVAADTETVQVVKVLARAHQTMVWSRQRQTNLLRSTLREFYPAALVAFDDLASGDALEVLRMAPTPELGQTLSLQKIAAALRRGGRQRRIEERAAEIQGALHAEQLASPAVVSSAMGASVTASVAVIATMVAQIATLAEELEAGFEQHPDAEVVRSLPGLGTILGARVLGEFGDEPNRYRTAKSRKNYAGTSPITRASGTKRVVLARYARNHRLADAIYLWAFAALSASPGARALYDTRRAAGDTHHAALRALGNRLVGILHGCLESHTAYNETIAWGHRPAPLAEVA

SEQ ID NO: 126316 - protein, 373 aa, unidentified
MKYFVGLDVGLEETNVCVIDSEGLTVREVKVSTEPAAIRSAVEGYADRLDRVGVEASSLGIWLYRELQPAGVLIIVVEARHMRVSLSTMRNKTDRNDARGIAQMMRLGWYRAVRVKNIDVPKMRSLLANRKLLKRKLIDIENHIRGTLRACGLLIGAVGRGGHEARVRELLEHGDPIFSVMIEAMLDVRRSIFEGYERLHRVLLQVVQHDAVCCRLMTVPGVGPVAALSFKVGVDDPRRFAQSRTVGAHFGLTPRRHQSGTSIDYEGRISKQGDVAVREALCEAAASLLLRVRKRSALRAWGLRIAKRSSMLCAITAVARKLASILHWMWVSETDFHVGFGAATAMEACTVIAAGSRRMSAGVASSMLRRSKD

SEQ ID NO: 126317 - protein, 379 aa, unidentified
MQTTATQRQAYREEEVLYLALELSNASWKLGSGVRHGSKVREQTIRSGDLVSLHREIARAKQRFGLSATARVVSCYEAGRDGFWLDRHLQEAGIENLIVDPASVKVPRRRRRAKTDRLDVRTLLGELIRFSRGERNVWSVVRVPSVQEEDQRQLHRELEVLKRERIRHTNRMTSLLITQGVRVKISRRFLAELSEVRLWDHSSLSAGLVARLEREYARWEVTCQQIQVLEKLRREQLREPATASEKVASRLYRLRGIGENYAWLAAMEAFGWRRFQNRRQVGAMAGLTPTPFASGDLQRDQGIGKDGNRRLRAATVEIAWGWLRFQPDSQLSHWFRQRYGPGSSRSRRVGIVALARKLLIALWRYLETGVPPAGAVLKI

SEQ ID NO: 126318 - protein, 346 aa, unidentified
MEQISRVGMDTSKRFFQLHGVNAAEEVVLRKKLRRKEMVEFFQALAPTVIGIEACGSSHHWARLLRSFGHEVKLIAPQLVKPYVKRGKNDGADAEALCEAMSRPTMRFVPVKTAEQQAALMLIGLRERLIGNCTQLSNAIRGYAAEFGFTAAKGMAHLDPLLERIQADESLPLAARELFAVQSKEYAQLRGQINEVEAKLKAWHKSDECSQRLIKIPGVGPIGAVLLKMKTPAPEQFRTGRQFAAWIGLTPQDHSTAGKVRHGGITRAGDEALRAVLVAGATAVIQQAVRYGGRASLWLDALLKRKPPKLAAVALANKMARVAWKLMVTGDSYSTKSAPAALASRV

SEQ ID NO: 126319 - protein, 399 aa, unidentified
MVNNSLIGKSAVRLAGKAGACEASEASRASTSRRREFGRVQVFKAVTEQEPRRHRGTSPNSRLNRRRPTRTASSYLQVREKTMSETVYVGIDVAKETFHVATCPNVLKTQLPNTHQGHRQLSQSLKNHTIALIVLEATGGYERPLTAELLSDSLPVVVVNPRQVRDFAKGMGQWAKTDPIDAQVLAKFAQIVKPAPKTHSTPQTAELSELVRRRRQLNGLRTQESNRLLMIHHPKVKKSIQKMIKTLNFQIDEIDRLIREYIDADDNFKNKDRILRSTPGVGPQTSAMLIANLPELGSLNRQEIAALAGLAPWDRSSGKSDGKAHIWGGRKEVRSVLYMAAFTACRFNPVIRALAERLKQKGKAYKVVITACMRKLLIILNTMVRNQTLWTPQKSVKNT

SEQ ID NO: 126320 - protein, 337 aa, unidentified
MQHDAPSRKIIIGIDTHKDTHAAVALNALGVRLGATIVPVNRVGYRCIDAWARSFGTVTAFGIEGTGSYGAGLARALREAGHHVLEVNRPDRSTRRRNGKTDMLDAEAAARAVLSGQASAEPKTGTSTVEMIRHLKIARDAAVKAKTQAMQTLKSIIVVAAAELREQLESIRGPITLVRHLASMRPGPLTSPLASAKTALRATARRWLALHQEIEGHDRDLDALVAATAPHLTAAPGIANTTTAELLLLVGDNPERIRSEGAFAKLCGACPIPASSGRTKPPQTEPWRQPTSQCRPAPDRSDENALTPTHNRLRAAADQRRKDEAGDHALPEALRRP

SEQ ID NO: 126321 - protein, 426 aa, unidentified
MRAIGLDIHLEFCEVAISEQGRVRSAGRIETKPEQVELFAQSLGKDDRVALEVTGNAWEIKRLIEPHVAEVIVVSPTDTGIRGARAKTDRLDARTLARLLASGELEAVWMPDRETQVMRRRLQRRSQLIWGRSKAKNQIHAVLMRQLVGRAPFSDLFGKRGRQWLAGLELPIEERESVDSALRQIEFLDSEIEAVERLVATEALESPEIRRLMTVPGVNVICAATFLAAIGDIGRFETPRKLVGYLGLDPKVRQSGTGPATHGRISKQGSASVRHALVEASWSVVRQPGPIRAFYQRVRSRRGHRVAVTAAARKLACLFWCLLSREEDYAYAQPSLTQKKLRLLQIRAGAKTLKGTPTGTWATRQKMRTAEKGLAAQAEAAYRRSVRDWHATQAKRRGAGATPGRASNGPSSGQAARQDEAPTPAL

SEQ ID NO: 126322 - protein, 329 aa, unidentified
MEEILIIGVDVSKSTLDIFVKPAGLTSHIENNESGFKKWYQELQRINQSCSKPLVVMEHTGQYSYRFEAFLRTQGIGYCKMAALEIKRSLGMIRGKNDKVDAKRIAEYAWLRKDILLADPFCSEKTQRLKRLLSLRAIIVKDRAGYIVRLKEMKAAGVCTKIDLEGRVQQQLIGFLTTKIKLLETEIRTLITEDEAMKKTCQLLRTIKGVGWIIAAYMIGYTENFTRFTNARKFNCYAGLAPFAHESGSSIKGKARVSHLANKEAKTLLNLAASSAIRYNEEMRTYYQRRVQEGKRKMSCLNIIRSKIVARMFAVIKRQTPYQERPLAA

SEQ ID NO: 126323 - protein, 347 aa, unidentified
MRFYTKTHQHYCGIDLHAKTMYLCILDSEGTVLLHRNIPCDPEKFLHAIAPYRADLVVAVECMFTWYWLADLCARQGIAFVLGHALYMKAIHGAKAKNDKIDSKKIAALLRGGLIPKSYVYPAEMRATRDLFRRRTHFVRHRGQLLAHIQNTHHQYGCVSPGKRIAYKSNREGIAEAFDDIAIQTSLAADLELVDYYDAIIGNLELTVLRQARGHDRDAYERLKTIPGIGKILALTILYEIHDIGRFPRVQDFASYCRLVKCQSSSAGKIKGSSGAKMGNAHLKWAFSEAAVLLLAKCPEGKKLVDRLAKKHGKGKALSILAHRIGRAAYFMLKRKRAFDLERFLKA

SEQ ID NO: 126324 - protein, 368 aa, unidentified
MPEPARSDAEVVPVTVGVDTHLDLHVAVALDHLGRRLGELTVPTTEAGYAELLGWAEVLGDLERIGIEGAGSFGAGLARFLRARGVEVLEVLEVLEVGRPKRRDEHRSGKSDPIDAELAARAVPAGTAIGEAKGSEGTVEMIRVLRTARRSAVKARAQAAKQLKALLVTAPEDLRTELRSLSTAKLVRRAAGFRPGDLPGDVAAATKLALRSIARRHRALSEEIRELDGHLARLVTETAPALVALGGVGVDTAATLRTSFAVGRDPKRLKSEAAFAHMCGVAPIPASSGKVVRHRLNRRGNRDANRALHVVAAERMSRDERTRAYAQRRTAEGKSRRETMRCLKRHIARELYKILVSTVVPTAPLPVP

SEQ ID NO: 126325 - protein, 354 aa, unidentified
MSQTQNATIAVVGIDIGKNSFHIVGHDERGAIVLRQKWSRGQVGARFANMPPCLIGMEACVGAHHLSRKLRALGHDARLMPAKYVRPYSKGQKNDFRDAEAIAEAVQRPTMKFVATKTADQLDLQALHRVRERMVSQRTGIINQIRAFLLERGVAVRQGQRFLRAELPRILATPPDVLSPRMVRIIEDLARDWRRLDERVEGLSNEIEAIARQDAGCERLMSVPGIGPIISSAMVAAIGAGDVFTKGRDFAAWLGLVPKQISTGDRTILGKISRRGNRYLRVLFVQAAWVVLIKPKIWERHGLKPWIEAARKRLHHNVLAIALANKLARIAWSVLARGRAFEARKMDQAANQSA

SEQ ID NO: 126326 - protein, 453 aa, unidentified
MASKKGSPEFSVVHPNAAGIDIGATFHVVAVSPDRDPNPVRRFQSFTTDLHELSKWLHDMGVKSVAMESTGVYWIPAFEILESDGFEVILVNAREVKQVPGRKTDYNDAQWLQKLHQFGLLRASFRPTEHIATLRAYLRHRERLIEYSAAHIQHMQKALMQMNVQLHHVVSDITGATGMKIIRDIVNGERDAARLATHRDIRCKESEKTITAALTGNYRAEHIFTLKQAVELYDFYKDRISECDIQIERAMAKLNQNKRSPDVPLSKPRNRTKTRHEPDFALRAALYTLTGVDLTQITGFGPYTVLRLIAECGDDMSKWPTEKHFTSWLSLSPGNKVSGGKVLSSKTGRTTNRATTLLRIAAVNVGKTETALGAFYRRLAGRVGKAKAVTATARKLAILFYSLMKHGVSYIEPGAEYYETQYRNRVVMSLKKRAKRLGYELIAKSEPHYAEVS

SEQ ID NO: 126327 - protein, 412 aa, unidentified
MEVRYACCCGIDVHAKMLVACLLKVGRKEVRTFSTMTEDLLRLLDWLTQAGCTHVAIESTGVYGRPVFNLREGVMEVLLTNARDAKGYKARKTDVIDAEWLADLLRHGLLKPSFIPPLPIRELRDLTRYRESLVREQTALANRVQKLSESAHIKLGQVASDALGVSGKLMLRALAAGETDAEQMSHLAQRTLKRKQPQLQQALEGRFTPAQRWILGQLLDQYDHVEAALQSVAERSRQEVDRSADPFVPEAVKLLDTIPGIGETVAQSIVAEIGVDMERFSTANHLASWAGMCPGNNESAGKRKSGKTTKGSRYVRAALVQAAWAARQQKGTYLAAQDKRLVRRMGKKKALVAVGHSILVIAYHVLQNRTPYQDLGGDYFERRNVDKQRKRLIRQLESLGVKVTVEEVKEAA

SEQ ID NO: 126328 - protein, 341 aa, unidentified
MMLYAQVESVDMLINVGIDVGKESLDLCILLDKTTGKMKSKKFKNKKEGFDGAFEWITKTTCNAPGKTLITMEATGVYHEGVAYYLYSQGFQIFLSNPGKAKKFAQSLGFVHKTDKSDAAMLAKYGSIQLDSIAFWIPEDDDVRVIKTLIRRLNALEKDKLRESNRLEASTISDAAERVIQSTVYLISVLEGEITEIQDEIDRLISCNPEMNKNRELLLSVIGIGKVMARELVYLFSAKKFTSAKQVAAYVGLIPRLNESGVFKGRSSLSKSGPSRIRSKIFLAAVCAGTHNPDIKAQKIRLTHAGKTKMQALGAAMRKLIQICYGVIKNQTRYQPQIVLI

SEQ ID NO: 126329 - protein, 436 aa, unidentified
MEIVHPRVAGIDVHKKIIWVAVRLPGQGPGERAVTVRRFASFWRSLQTMAAWLAELGVTDAAMESTGVYWWPVYHALAGAGIEVCVCNAAHMRNVPGRKTDLRDCQWIAELHEHGLLRASFIPAAEVAALRQRTRYRKKLIEQRSSELQRLSKVLEDGGIKIDSVASTLTTASARDMIEALIGGQRDPAVLAQLARGVMRKKIPELQMACDGRFTGSHGQMCRLHLDAYDHLTTQIAELDLLVAEAAAPFAAVIARLVTIPGIGPRTAQVIVAETGADMARFASPARLAAWAGLAPGDNESAGKRKRAAARKGDQHLRTAMVEAAWTVSRTATRPGARFRRLARRFGRGNEKKAAVAVAHTLICIAWAVMRYDGDYAEAGADYYDRRDARNRDYLIRHYQQALTRLGYQVTLTPPGDGRPPPGTDTPSADNPSQAA

SEQ ID NO: 126330 - protein, 336 aa, unidentified
MSQNYLGIDVHKKWCVYTQIDSTGKVIRQSRFRNTLEEVSNFTGSLNSKIHLVLEPVLNYLWLLDQFEPYVGSVHVATPFKVRVIAESKSKTDKYDSRMLAELLRTNFLPESWVPPSDIRLLRGLIRQRYHLVKGMVMSKNRIRHLLFQHGIHLKVFDIASPKARLELQKLCLPDITRQTIDQCLKIIAVFDDQIRGISKHIWACVKDNPTVELLQTIPGIGKLRSAVVYAEVGNVTRFHSAKALASYTGLAPTIRSSGDSVWTGGITRNGSKPLRHALVEASINVIRRSPDLNRLYHRILYRGNIQKARVAVARKLAIIIYAMLNRNEPFRMETA

SEQ ID NO: 126331 - protein, 356 aa, unidentified
MDGRKYIGMDVHQASISAAVRDANGKLVMESIFETKASTILEFVQGLHGTLWITFEEGTGAGWLYDLLKPHVAKVIVCDPRKNAVSKKRNKNDCIDARTLSELLRAGLLSPVYHGDTGVRTLKELARSYLSLTQDVTRVMNRLKGLHRSWGVRCAGRAIYARSHRGDWLEKLPEAGVRRRAQRLYEELDYLQPLRQQARKELIAESRKHPVCEFLREVPSLGPIRVALVIALIQTPHRFRTKRQLWTYSGLAVNTQVSGEYSFTGGELQRARKRPIPRGLNENHNHDLKNVFKGAAATAATALGGPFQDFYAALLAKGMRPTMARLTLARKIAAITLSIWKKGEHFDKEHLKPQAA

SEQ ID NO: 126332 - protein, 363 aa, unidentified
MTYERSTLVNSEKYIGLDVHQATISVAVMDSKGKVVMESILETKAATILEFFAGLRGTLLVTFEEGTWAAWLYDLLKPHVAKLVVCNPRKNALLKHGNKSDRIDARKLADLLRLNDLEPVYHGETGVRMLRELARSYLTIVKDLSRVMNRLKALYRSWAIPCAGRDVYYTRHRSEWLGKIPEAGTRRRAEQLYLQLDMLQHLRQQARRELLAESRKHTITAKLRQIPSLGPIRSALAVALIQTPHRFRTKRQLWTYSGLGLETRDSGEYRYVHGQLRRSKKQISIRGLNKDHNHDLKGLFKAAATRASVQPGPFQDFYQRSLAKGIKPTMVRLTLARKIAAITLTLWKKGEDFDAEKLKSQAA

SEQ ID NO: 126333 - protein, 368 aa, unidentified
MKKNTNTKQNASKGKRTEQRETFAFYIGIDLGDKNSDVCVLNPAGEVHKEFRIRMNAAAIDEYFAGIGRSRVAIEVGGQSQWVAEVIEKYGHEVHVANTRKVAYIHESDDKDDPGDAYKLAELVHFKPRLLHPVRHRSRALQADLTWIRAREAAVAGRTHLINTVRSLSKGFGERLQRCSTEAFTAKLAEQIPTAIRSAVAPLLEMIDHFNEQIRYYDQMEEHIARERYGKYTLLSQVDGVGVHTALSYMLTMGDPNRFEKSRQVGAFLGMRPRKKDSGASQPQLGITKAGDEYLRKTLVNCAHYILGPHGRDCDLRRFGQRICERGGKNAKKRAVIAVARKLSVLLHRLWVTGEVYEPLRNSHKKAA

SEQ ID NO: 126334 - protein, 321 aa, unidentified
MTMVKSKPVFVGIDVGKETFDYCLRPGGEAGTLPCTSEGIGELLALLRRQSSVELIVMEATGGYEKKIARELLGAKLQTAIVNPRQIRNFAKASGRQAKNDRLDAEVIAHFAEGIRPEVRPLPSAELEVFMELVARRQQLIGCQTAEKNRLHTARGPKVRKSINAMLKLLKQQLAELDDEIDRTIENSPVWRVKSELLQSMPGVGETTARVLLAECPELGELNRHEAAALIGLAPYDHDSGKCKGLRCISGGRATVRSALYMAALSATRVNERMRRFFQRLRKAGKPFKVAITACMRKLLLILNAILKTGQPWRENQPLQA

SEQ ID NO: 126335 - protein, 425 aa, unidentified
MNNVEKKQLAYGDVLVVGIDIAKKVHWARVLEPMGVDVIKPFKFHNTREGFVRLESKINEARNKTGIQRVIVGMEPTGHYWKPLAYYLKEREYSVVIVNPHHVKKSKELVDNSQTKSDRKDAGIIADLVKSGRFLNCLLPTGIYAELRNLSTARIQARKLFNGALTQLQAILDEFFPEYTQVFKNVLGKASTWVLRHYPFPKNILSLTEKELTIKLKQASNNRVGLKRAKQLQNVAKESIGIKEGLEGAHLKLMTIMDRLEYAASEISKIEAALERTLEKTGLAEYLLSIPGIGVITAAWLLAEVGDLSKFDDWRQIRKLAGLNLVENSSGMRIGSKKISKRGRPGLRSVLYLASLVLVAKNAEFKALYNYFKTRAENPLKKKQALIAISMKLIRVIFALVKNRTLYDPAKVFGEYRAAQLQQAA

SEQ ID NO: 126336 - protein, 319 aa, unidentified
MDNLSHGRVIGIDVSCDWLDVHCLPDGHRCRVPNAPAGHAAVADLARDRDAVVCFESTGGQEWQLWALLEAEGVAGRQVPPAQVKAFAQSRGTRAKTDRIDAELIARFFAFRPEAGRSLPAEKLRLLRALTSKRAQLVEMRKRLLAQIRAHQKLGTAAMFEDIDTELKQRIDSLIRELEDRIIRAITSDDRLAEMAIVLRSIPGIGPVASAMLIAEMPEIGTITGEEAAALTGLAPVAHDSGTLRGKRAIAGGRRALRHVMFQAALVAAHHNPSMRTFADRLRKAGKPHKVIITAVARKLVTIANALCKSRQKWAAPAP

SEQ ID NO: 126337 - protein, 430 aa, unidentified
MKSNTQNAKIEAITEKTLVLGIDVESETHYARAFDYRGIEYSKKPFKFSNTEAGFVTFKEWILDLKERHEKDKVVPGMEPTGHYWFNLGKFLQDNEMKPVLVNPHHVKKSKELDDNNPTKNDRKDPKVIAGLVREGRYMIPYLPDGVYADLRTASNIRFQLQAELTRIQNRISRWFNIYFPEYKTVYGKPDAKSGILILKTAPLPEDILTLCIDGVNQIWRDAKLRAVEKARAKTLIEAAEHSVGSKEGAVSARMEIRMLLEDYESRNTRLQEVMVLIEKLVRKIPMAEKLLEIKGVGIRTVSGFLAEVGDISRFNNPKELQKLAGLALVENSSGKHKGETTISRRGRKRLRYLLFEVAMSLVSKNQEFRELHNYYTTRRLNPLKKMQSLMAIAAKLIRVFYAMLAKGVDYDPKKMVSDIKRPAVYLQAA

SEQ ID NO: 126338 - protein, 340 aa, unidentified
MTIATIGIDLAKNVFAVHGVDHNGKTVLVKSRVTRAALPELIAGLPPSVIGMEACSGAHYWARLFRQYGHEPRLMAAKFVSPYRMAGKSGKNDAADAQAICEAVRRPHMRFVPVKDESQQAMQCLHRTRQGFIEEKTAIYNRLRGLISEFGVIAPQSTDALRRIVSEQKSYLPLQVQQCVDDLLEHIDRIEDKVSEYDRTLSCMAKTDHRSQRLMELKGIGPTTACALVASIGNAHDFKNGRQLAAWLGLTPSQYSSGGKSKPGRITKAGDSYLRTLLVQGARSVLIGAEKRSDSFSRWVCSLVERRGYWRAVVAIAAKNARLCWASLHYGDDFKLYSAS

SEQ ID NO: 126339 - protein, 343 aa, unidentified
MYYIGIDVSTKESALCILDGNGKIVRETKLPTDPEIIARFIADTGLAIERIGLEAGCTAAWLFAGLQQHGWPVICIDARHAAAALQAGFRNKNDRNDARGIADLMRVNKYRPVWVKSPEAQRQGRLLTARATLQSQLVSLENTIRGLLRQEGIGLTDKRTAFEAAVREVIADDRLLQAAVLPLLETRTAVLHHRATLDRQILRIVRVDPVCRLLMTAPGVGAIVSLAFKVGVDDPRRFSRSRDVGAHFGLTPREYSSGEVSYRGHISKMGDREVRRLLYLAAARILRRDAALWCPLKVWAVRLAQRVGLSKARVALARKLAVVLHAMWSDGQVFQWRRSAASA

SEQ ID NO: 126340 - protein, 402 aa, unidentified
MNAVGIDVSKSKSVVAIMRPFGEIVSTPFEIKHTASDIHSLIELINSVEGESRIVMEHTGRYYEVLAHQLSEANLFVSAINPKLIKDFDNDSLRKVKSDKADSVKIARYALDKWHNLKQYNVMDELRNQLKTMNRQFGFYMKHKTAMKNNLIGILDQTYPGVNTYFDSPARSDGSQKWVDFASTYWHVDCVRKMSLNAFIDHYQNWCKRKKYNFSQSKAEEIYGKAKELVPVLPKDAITKLIIKQAVDQLNSASTTVESLRTLMNETASKLPEYPVVMAMKGVGTSLGPQLMAEIGDVSRFTHKSAITAFAGVDPGVNESGTYEQKSVPTSKRGSSDLRKTLFQVMDVLIKTHPQDDPVYQFLDKKRAQGKPYYVYMTAGANKFLRIYYGRVKEYLASLPES

SEQ ID NO: 126341 - protein, 321 aa, unidentified
MDENSLTVVGIDVAKRTLEVALPGKKSLEIKNNTKEITNLLKKLPEAGQALIVLEATGGYENLLVGELLVAGYHVARVNPRQVRRFAQALGILAKTDRIDAAVITRFGEQIRPRTLSPLSQPHVELQQLVLRRRQLVDLRTMESNRLEQVTAKPAIKSIRKVLKVIESQIAELDEEIAQRIDSDEQWKNQAALLSSVPGVGTVTAATLITDLPELGELNRQEIAALAGLAPFNRDSGKQRGKRSIFGGRARVRALIYMAAVTAMRWNPALREFNQRLESQGKLFKVRVTACMRKLLVILNTIKKTQTPWQSPHERAHPAVG

SEQ ID NO: 126342 - protein, 326 aa, unidentified
MARKSNATAVTLGVDPGKNTFHLIGLDARGAIVLREKVARDRVVARLANVPPCLIGIEAGMGTHYVTRELLAVGHDVRQVPPVYAKPFRQAHKNDFRDAHAIAEAVQRPTTRCVPAKTDEQLDLQALHRVRYRLVGQRTAIINQIRSFLLEHGITVRQRLHWLRHALPDILAQRTDVLSPRMIRILADLAQDWRRLDERIDAVTIISSAVVAAIGNGTAFTRGRDFAAWLGLVPKQMSTGDRTILGRITKRGNRYLRMLFMQAARVVLVWPSKWMKHSFGPWLAAAAQRLHHNVLATALANKLARIAWSVLAQHRAYEPRVGAGAA

SEQ ID NO: 126343 - protein, 412 aa, unidentified
MLFVGDDWAEDHHDVEVVGEDGRRLAARRLPEGPGGIAALHALIARFVPEEWAELDPLAAAARVKVGIETDRGPWVAALSAARYEVFAINPMSVSRYRDRHSTSGAKSDAGDAHLLAEIVRLDRAHHRPVAVDSTLSQAMKLVARSHQSLIWERTRHVLRLRSTLREYFPAALVAFEDLDSSEALELLAAAPDPDRAARLSKARIAAALRRAHRRKVAERAEIIYSTLRDAALRQPDAIQAAFAVITASEVRLISVLTGEIDSLGEVVAEHFGRHRDADIYASQPGLGVTLGARILGEFGDAPGRYVDARARRNYAGTSPITKASGTKRVVLARYARNRRLSDAVRQWALGSLRGSPGARTYYDTMRDRKIGHEAALRQLGNRLVGILHGCLKTHTLYDETIAWAHWNTLAA

SEQ ID NO: 126344 - protein, 343 aa, unidentified
MDHFAGLDVSVKDTSICIVDDTGRITREVKVASEPGALLAVLMNASHRFKRIGLEAGPLSQWLFSALAEAGLPVICVETRHMRAVLKAQINKTDRNDARGIAQMMRVGLYRPVHVKTLRSQKLRMLLTHRKLLQSKAIAVENDLRATLRNFGLKVGMVGTARFEARIKELVENVADLVVLVEPLLVVRRVVREQIGILHRRLLAIVRDDEVCRRLMTVPGVGPVVALTYRATVDVPARFRKSKSVGAVFGLTCSRDQSGERDRPGAISRCGDEMMRAMLYEAAQAMLLRSAKWSWLKAWAMQIARRRGMKRAIVALARRLAVIMHRIWVDGTEFRWTRETALA

SEQ ID NO: 126345 - protein, 387 aa, unidentified
MSQTAAALIPAPVAYGSTLVLAIEVSNKSWVLAAQVPGLPHTKAKRTIHPEAGALLAAIAGYRARAAATGHTIERVIAVYEAGWSGFWLARWLIRHGVEVYVVQPSSVPVDRRMRRAKSDGIDAELLLRTLLAWLRGEPRVCSMVPVPDEADEDARRCVRERTELISERVGLTNRIGAVLATLGVTDYNPLLRSRCRRLAELRTGLGEPLPANAHAKIKRLLARLELVLTQIAELERERDAVVETEASDKAGKMIQQLISLRGIGVQSATVLVREAFVRRFANGKALGSYAGLASSPYNSGGINRDQGIGKGGNRRVRTVMVELAWLWTRYQPSAAQVCWFRERIGPTGRRVRKIMVVALARKLLIALWRFIIDGVVPEGAVLKPAA

SEQ ID NO: 126346 - protein, 402 aa, unidentified
MNAVGIDVSKSKSVVAIMRPFGEIVSTPFEIKHTASDIHSLIELINSVEGESRIVMEHTGRYYEVLAHQLSEANLFVSAINPKLIKDFDNDSLRKVKSDKADAVKIARYALDKWQNLKQYNVMDELRNQLKTMNRQFGFYMKHKTAMKNNLIGILDQTYPGVNTYFDSPARSDGSQKWVDFASTYWHVDCVRKMSLNAFIDHYQNWCKRKKYNFSQSKAEEIYGKAKELVPVLPKDAITKLIIKQAVDQLNSASTTVESLRTLMNETASKLPEYPVVMAMKGVGTSLGPQLMAEIGNVSRFTHKSAITAFAGVDPGVNESGTYEQKSVPTSKRGSADLRKTLFQVMDVLIKTHPQDDPVYQFLDKKRAQGKPYYVYMTAGANKFLRIYYGRVKEYLSSLPES

SEQ ID NO: 126347 - protein, 423 aa, unidentified
MNRSTLCVGADVHLDEIVLCAVDKAENHEVCERFRVTNNLPGAQAAATAIAAIAESLGYSRVEIGWEATGMLWIPFHRYLRDCSQLQPFERELVCFNPQLVTKFKDGLVLRRPKDDKRDASTVAARLRIGEWPLSYVPGDFWQGLRRLTRYRFQLSRNLSREKMRFQAYAFLKCSDWKRVKVFSDVFGATSIALLTEYTVAELNQMSHDQLVDLIRRRGRGHFEDPTATARKVREVLRSSYPIAPQTDEMVTAALATAWDHIRFIDRLMKRLDQQIAHFIDPIPNPIITVSGLGAVITAGLLAEIVDIQRFAEHRHLAQYCGLTWEKRSSGNSVSQNTRLTKVGSKYLRYYFVMGANTLRRFNLEYKAFYWRKHNEVSKYQHKRALVLTARKLVRLVHALLTKNVPYVRPQALAGIEEVGSLQ

SEQ ID NO: 126348 - protein, 339 aa, unidentified
MQLYSGIDLHSNKLVLGISDETGKRIMKKNLPNDSETVLATLEPFRAELVGVVVESTYNWCWLVDALMEDGYRVHLSNPCANQQYSGLKYRDDNHDAFWLADLLRLGTLKEGFIYPKQDRPLRDLSRKRLHLVRLRTSLILSLKGFIVRTCGIGIKTDSIKEDDINTLLRHMPTEENIRLLVKSNKDSIDFLGTQIDQLETSLLAQLKGKPLFKNLLTLPGIGKVLAWTIQLETGPISRFGKVGQYSSYCRKVQSRWTSNDKTKGKGNAKNGNKYLAWAYAEAAEQARRFYPACRKFYNRKLSQTNAAVAHHALAHKLTRAAYYVLRDNVPYDEAKLFG

SEQ ID NO: 126349 - protein, 409 aa, unidentified
METVVERPAALDVHKESVTACVRVPGAGGRREQHLHAFKTTVAGLLTLRDWLRAHGATQVAMEATGVYWKPVWAILEDDFDCLLVNARHVKQVPGRKTDVQDAAWLCQLLEAGLLRRSFVPPKPIRTLRNLTRYRKAQLRERQREANRLHKILEATGIKLDCVASDILGVSGRAMLEALAAGTTDPAVLAELARGRLRKKLPALREALEGRFTDEHALVVSSILAHLDFLDEQIERLSEAIEQAIAPFANAVELLCTIPGMQRRTAEVIVAEIGVDMSQFASAGHLVSWAGLCPGQDESAGKRRNAHTRKGSKWLRSALLEASLAATRTTDTYLAAQYRRLKPRRGHGRASIAVCHSILAACWHMLTTGELYRELGGDHFQRRDPERTTRRLVRQLEALGHTVILEAAA

SEQ ID NO: 126350 - protein, 347 aa, unidentified
MNTQITAQPKLYIGIDIHKRSWKVHCATDLFTGKTFAMPPKPELLKDYVDRHYWGLEVSTAYEAGCCGYYSHRVFVGYGWRSLVVNPADIHRKGKEKYTKTDKIDAQLIARELKDNRLESIHIPDIEREQLRSLFRRRNDLVKDYRRIKSHIKMQLLYFGISIPERFDNDHWSHKFRNRLDGIVFEYPTARETLSSRLRSFRFIDQELRDISTKIRAYCRKHYKKDYYLLRSVPGIGGIVACGIISELGDLRRFRSIKHLAGYVGIAPGIHQSGDNQRHTGITMRAHRLMRSYFIEASWQAIRTDPVMQVYYRKNVKTIIIEVARKLLSRTLAVIKTETPYTIGVVE

SEQ ID NO: 126351 - protein, 360 aa, unidentified
MRIIGCDLHARQQTLAMLDTISGEVVNRTLMHEGSEVREFYSELPRPVLVGIEAIGPMQWFLNLLEELGIACQVGDAAKIRAAEPRKQKHDRRDAELILRLLVEKRFPEIWKPHKELLDLRALLLHRHQWVRLRTQIQNALQAIALANGLRRGPSLWGNDGQAKIAFLPLPPHASYRRSALQATYRKMQEEIENLTDQVAEQAGQRCGARLLMTHPGVGPVTALATDVFLGDAQRFPDGKALASYVGLIPREYSSGERQRLGAITKQGSPLLRFLWNEAGAHAARRDPELRRFYRRKLVQKGLGKARVAVARKLGIRLWIMLRDEIDYQEFCRRGQKQSGAVCAGMPETGFGANRHRPVD

SEQ ID NO: 126352 - protein, 387 aa, unidentified
MSQTIAALIPAAVDYERTLVLAIELSNKSWVLAAQVPGLPHAKASRTVNPEAEALLAAIAGYRARAAATGRSIERMIAVYEAGWSGFWLARWLMRHGVEVHVIQPSSVPIDRRMRRAKSDGIDAELLLRTLLAWLRGEPRVCSMVPVPDEADEDARRCVRERSELISERVGLTNRIGAILATLGVSDYNPLLRNRKCRLAELRTGLGEPLPRNAHAKIERLLARLELVLAQIAELERERDAVVETEASDKTSKMIQQLTRLRGIGVQSATVLVREAFVRRFANGKALGSYAGLASSPFNSGGIEREQGIGKAGNRRVRTVMVELAWLWTRYQTDAAQVCWFRERVGPTGRRVRKIMVVALARKLLIALWRFVTDGVVPEGAVLKPAA

SEQ ID NO: 126353 - protein, 343 aa, unidentified
MTTTMIGIDPHKGSHTAVAIDSNEHVLDEIRVRSCSTQTVRLREWADCFEERTWAVESAHGLGYLLAQQLVAAGENVIDVPPVRASRVRVLGSGRSQKNDPNDARSIAIAALRADDLATVCADDHARVLKLLSKRHRDLGRLKNKASCRLHALLLEMVPGGAGFRITAVTRVNAVIDGFEPADAMGRQRHEIARELATDIGRYNELLDASKHRINVALAASATSLTTICGVGPICAAMIIGETGNIDRFSSKHHFASYNATAPVEASSGPKARHRLNQRGNRKLNWAIHVVAISQLSHDTAGRAYYDRKVAEGKTSKEAIRALKRRLSDVIFRHLVADARQQR

SEQ ID NO: 126354 - protein, 317 aa, unidentified
METQELFVGIDVSKSVMDVAVYPTMEIWQVGNDPAGMTSLVQRLQTLAPKLIVLEATGGYQNLAVACLGAVGLPVVAVNPRRVRYHARALGRLAKTDRLDASVIAHFAYAVRPAVRPLPDEAMQHLSATLARRQQLTGMLTSEKNRLDTAHLHIRERIQSHITWLEQELVDLDKEIGQQISGSTLWQEDRDILQSFKGVGPISALTLIADLPELGHLDRKQIAALVGVAPLNNDSGIRRGQRSIWGGRARIRSVLYMAALSASRFNPVIRAFYQKLIAAGKKPMVALVACMHKLLTILNAMMKHRTLWVPDYHGAAA

SEQ ID NO: 126355 - protein, 309 aa, unidentified
MTHSIVGVDVSKDWLDAYRRTDSKNRRFANTKQGRQSLTRWAEGARVAFEPSGPYHRALEQHLAVAGIGAVKINPLQVRRFAEAVGTRAKTDTVDARLIAVMAAQLELPATPPLDQITRDLKALQIARQGLVKDRTTAKNRAQSHECRFLKSQAAARLRHVKSQLRALDAEIATLIAGDEHLARRRDILLTIPGISAITAAALLAEAPELGALEGKAAASLAGLAPMTRQSGKWNGRAMIRGGRAHLRHALYMPALVAARFNPDLKALYDRLISAKKPPKVALTALMRKLLILANALLRDGRPWTEKPA

SEQ ID NO: 126356 - protein, 437 aa, unidentified
MSSTVVNVGIDLGVKSMHQAVGFDTEGQKITGLIKFNTTTADLDKLIDELGREKQLRFMMEPTAMAWMPVAQYLLAKGYQAFLVSAEKVHDLRKFYSKHAKNDRLDAETLARIPFICPDALSPPSIDDSEVNMLRRWVKMQDRLTHTIADCKRRILDLVGFTVPKLKIDTRTFFSPVGRLILKEYLSPHKVKNMGHRFFKEALMPFITQEQGEAFIDALYEALSDADMLYGDGGVLDWEGLQEEIRINIELLEHNENALKKVGERIQVLYKSLHPSGNLETIYGVGKETAPVYVAALSGRQFKEKGFRSFCGVIPKTKQSGYSNQKEKMTKSGPPWLRRALYMSADTARKWDPQMARLYYQHRMRGAPHTKAICAVMARMADRILKIFEEDRDYELQDLEGRSISSSTAKQIIKERFTVSKKTMIRQRKWNRDLISA

SEQ ID NO: 126357 - protein, 355 aa, unidentified
MNQEKYIGMDVHTATISAAVINAQGKVLTECVMETKASTILEFIQAQRGTLALTFEEGTMATWLHDLLKPHVSRLVVCDPRKNALMRDGNQNDRADARNLAELLRTNQVHAVHHGKHGVRALRELGRSHLTLTQDSTRVMNRIKSVYRSWAIPCGGTSVYSRRHRAEWLAKLVEPGVRIRAEHLYAQLDSLEPLRQAARRELLRESRKHAGVKLLRQIPSIGPIRSALLVAILQTPHRFRTKRQLWAYAGFAVQTYDSGEFRMERGKLKRNRERITVRGLNRNHNHDVKNLLKGAAVSAIQRPGPLQDFYAALVEKGMRPSMARLTLARKIAAIILIIWKKGVSFDPKQLQRQAV

SEQ ID NO: 126358 - protein, 403 aa, unidentified
MNNVAGIDVSKGKSMVSVLRPFGEVLAKPFSIGHTGSELKELADYLKSLDGETRVVMEHTGRYYEPVARFLHEEGVFVSAVNPKLIKDYGNNTLRKVKTDKADARKIARYGLDNWAELRQHTPMDTIRMQLKTLNRQQSLYAKTKTMMKNNLIALLDQTYPGVNALFDSPVREDGSQKWVDFATAFWHVDCVRNMSLTAFAERYRKWCKRHGYNFSQSKAVEVHTGAQDLIAMLPKDALTKTMVRQAIDALNAVSASLERLKAEMQALAAQLPEYPVVMAMHGVGDSLGPQLMAELGDVARFTHRNAITAFAGVDPGADQSGTHEAKSTRVSKSGPPELRRALFLVMDCLLKTQPQDDPVYRFMDKKRAEGKPYLVYMTAGANKFLRIYYGRVKEYLASLEEN

SEQ ID NO: 126359 - protein, 351 aa, unidentified
MDNVTIGMDLGDKKHQIHILDVEGKTIKVCQISNTAKALNRFFSEYPKALVAIEASTHSPWISRLLEKIVSKVLIGNPRKLRMIWDSDQKDDMRDAEMLARIARFDSKLLYPISHRGEQCQADRSLLKSRDILVKVRTSLVLHVRGSVKSMGGRLPSCSTESFHKKVEHEVPADLKLGLQPVVDQIRDISGKIKELDKMITEVSQKRYPATNIVQQVGGIGPVTALAYVVTIGDPSRFKKSRDVGPYLGLTPRRDQSGDTDKQLRITKAGDRYLRRLLVQSAQYILGAFGSDSNLRRFGLKIAERGGKNAKRRAVVAVARKLAVLLHRLWLTGEVYEPLYKPTKTVEEIAA

SEQ ID NO: 126360 - protein, 341 aa, unidentified
MKKFIRTAIDLGKTYFQVHGLESEGGQSISRKMKRSKMREFYEQIEPCRVGMEACGSGHYWARELVAMGHEVVLIPPAYIKPYIKRGKNDAVDAAAICEAMSRPGMRFVPIKSADQQAVLMLHKTREMFVKQRTMSVNALRGHLAEFGIIVAKGIGRVDELLALAQSDTELPQIAKSTVAGLAQHLEGLDQSIEAVGDEIARAHKQNPTSRLLDEIPGIGVLIASVIASSVPDPSVFKTGRDFAAWLGLTPRQNSSGGKEKLGSITKQGNRYIRKMLVVGATSVMRVAGKRKGALADWINALQAKKPKRVAAVALANKLARICWAIMTTGEGFRVDTYVKA

SEQ ID NO: 126361 - protein, 313 aa, unidentified
MSNYSTFFGIDIGKSEVFVAKHGTKSSLAFPNSKEGIKKLFKTYKAELANAFIVLETTGGYETLVLNALLDKNISVHRANTRYVKSFIRSWGKLGKSDALDAQALALYGYERHKNLPLFQKQPPELIQLIALTQRKLDLTQMLVQEKNRLKSPQNNPSIIQCCSQLIQTLQTHIASVTKEIDSLIKNNALWLKKKEVLESIPGVGPIISSMLLALMPELGQINRRQIASLAGLAPHPYESGQKIGYRRTKGGRQQIRPILFIAAMAARNSNSPLKAFYEKLIAKGKKKMVALTALMRKILLIANAKIKPLNLC

SEQ ID NO: 126362 - protein, 357 aa, unidentified
MGRRVPLIIARTVAWATSPDVARLGPVFLMEGKMAGSEKERVFVGIDVSKARLDIGVRPTGEGWQVENNLEGIHELVKKLGQLTPSLIVLEATGGFEMASAAALASAGLPVAVINPRQVRDFAKSLGRLAKTDQIDANILARFGEAIRPEPRPLPDDQAQQLQALLVRRRQILEMIVAEKNRLHLAHKSVIPDIQEHVAWLEKSLGELDKELHDLLRNSSIWREKDDLLRSVPGVGPVLATTLLAELPELGLLNRKQIAALVGVAPFNCDSGKMHGKRAIWGGRASIRAVLYMAALSASRFNPVIRIFYDHLIQAGKVPKVALTACMRKLLTILNAMVHNNKHWEPTLAASKNQAMA

SEQ ID NO: 126363 - protein, 336 aa, unidentified
MQVLKQVLGVDVAQKELVVTLGRLNADLSTELYSHRVFKNTTAGIESLIKWVKKLTNTDIPVQYVMEATGVYHQKFAYYLDENGFDVSIVMPNKISNYMRTIENKTITDKTSSEAIAQFGLERKLDHWHRPEGVYKKLQQLTRERDQIVAERVMVKNMLHAEQSEAEPNPSSVSRLKARIQFLNKQEFQVKKELDIWVESQSELKKDVQNICTIPGVGKLTAVIALAETNGFNLIRNKKQLTSYAGLDVKEKLSGTSVKGKSRISKKGNTALRKAMHLPSLSAIKHDERFKEVYVRLVSRHGVKMKAIVAVQRKLLELIYLVHKNKTVYQKDYEKK

SEQ ID NO: 126364 - protein, 421 aa, unidentified
MDRTRRCIGLDVHRDFAQVAIWQAGQVVQAGRFDATPQGVREFAAGLGPDDEVALEATGNTWAMVTVLASHAGRVVVANPAKTRAIAEAKVKTDKVDAAILAQLLAADYLPPVWRPDAATGALRRQVLRRAHIVRQRTRLKNQVHAILHRNLVHRCPAADLFGLKGRSWLAAQDLPPDEQAALTALMRQLDFHARELALIDADLGQAALARPEVLRLMTIPGVDATVALSIVAAVGDFTRFRSPERLVSYLGLNPRVRQSGGQPASHGRITKAGPAHARGMLVEAAWSAAKAPGPLRAFYQRVQARRGMQIAVVATARKLAVLCWHLNIKGQDYAFALPSLIAHKQRKLELRAGASPARGRKGRSASYSLKAVRAAERDLAAQGEAAYRTMVAAWQPARPARKKAAGAAASKGTRLFKPAG

SEQ ID NO: 126365 - protein, 318 aa, unidentified
MESVAALYVGIDVAKAKLDVALDADGEVFEVTNDPIGLTGLIDRLKRQSVALVALEASGGYETLAVATLGAAGFPVALVNPRQVRDFARSTGRLAKTDAIDAKLLARFALTIKPRITALAESGRTELSELLGRRNQLVGMQVAERQRLAQARSKRVRKDVQDMIDFIAKRLDKAEDDLGKFIAARPEWQVKDDLMRSVPGVGPTTSRVLLGRLPELGELTTKAIAALVGIAPINRDSGSFRGKRTIAGGRADVRTALYMAAFSATRCNPVIRAFYQRLRAQGKPFKVALVACMRKLLVILNAIMKSGTPWQHAPAHAA

SEQ ID NO: 126366 - protein, 341 aa, unidentified
MAEYVGLDVSMKETAVSIRRDGKRIWRGKCGSDPRLIAEVIRRRAPGAARVVFETGPLSVWFSHALTAEGLPAICIDARHAKAALDMAPNKTDAHDADGLAQLAEVGFFREVRVKGFDSMLGRTLVAARNRLVQITTELSNQIRGLMKTFGLVVPAGKGSRFEAHVRALLADQEGLAPILLPLLEAWRAVRLRAAELGRQLVTSARRSEACQILMSVPGVGAVTATSFATAVEDPENFRRSRSVGAWLGLTTRRYQSGEVDDDGPISRRGDPHLRGLLYEAATVILTRTSAESSLRTWGLKLKERIGFKRAAVAIARKLAVVMHAMLRSGQLFDRTAGMAA

SEQ ID NO: 126367 - protein, 402 aa, unidentified
MNCVGIDVSKGKSMIAVMRPFGEVVVSPFEVLHTDSELSKLAGLLKSLDGETRVVIESTGNYHAPVAWLLHDAGLYVSVVNAMLVHDYGNNSLRRAKTDKKDAVKLANYGLDHWLTLPRYVPEEDTRLMLKTCYRQYQQYSKVQTMLKNNLISLLDTAFPDANRLFTSPPRADGSEKWVDFVATFWHCECVCGLSKKAFTAKYQKWCRKHGYNFSQDKALDIYASACGRFGVMPKTNTAKLLVEQAISQLQTTSAALAALKQEMQSLAASLPEYPVVMEMFGVGPTLGPQLIAEIGDVRRFHSKKALVAFAGIDAPPYQSGQIDVRSRSISKRGSASLRRTLFLVMGVLLQCAPMDEPVYQFMNKKRSEGKPYRVYMMASANKFLRIYYASVKAYLDSLEHD

SEQ ID NO: 126368 - protein, 341 aa, unidentified
MTENIYYVGLDIAANTFVTSIYRCPEKPVITKEGFENTLDGFNIFISWITVQDINPENCVICMEATGVYSEGIAHFLVSQGFKVSVEPPLKVKRAFDPIGHKTDPVDSRQIAEYAYRYSDELRFWQPKDEIIEKIRHLLTAREQFTKQSVALQNSMGAYKKHVVQVDLITAAHSRILKEVKIQIAQLDKELEQLVRKNPTIFNMKNQLMSLPGYGLLLSSSLIAMTGAFRDITSYKTLAAFIGICPYQHQSGSSVYRQAHIRPFGPQYARKLLMLAARSVVMHNANFKKYYLRKLAEGKAKKLVLNNVANKLIKIACAMVKNNSRYESAYRSINPMCLISA

SEQ ID NO: 126369 - protein, 426 aa, unidentified
MWDAQRRVLKIKSLKHGIIQDKRGNVMRAVFGIDVSKTSSEVAILVNGEKVHGYTILNDAFGFNRLLGDLKTVHNPEIIFEATGVYSRRLQAFLEEYGYAYTRLNPLEAKKQLDSLRVRKTDKIDAEKLAKSQLVHNRKPTYVQEEVYQHLRDLSRFYQNLTEDLVRAKNRLHKVLQITFPELENLLSTPTGEQYWNLVMAFPCKEFVLRLSQSDLCEIIRQSTSKRISEKRIAYLTDKLIKLAKQSFCAVKKNSPMLEEVRYYAQELLRLSERRQVVLNDMVTLAQPLPEYDILRSIPGIAETTATSIIGELGDIRRFQSTNQINAFIGIDLRHYESGKFLAKEHITKRGNPYARKILFKCIHNIASASHTNPCHIADFYEKRKRQSTIASTKPHAIASIHRLIRTMYYLITHNKLYDYSLTQNR

SEQ ID NO: 126370 - protein, 387 aa, unidentified
MTVRTVTNLPAVTHGETVRCLFAIELSTMSWVVAFNTPLSEKISRHTLTGCKWKRLLELIEEVRARVSREMGRAVEVVSCYEAGYDGFWLHRKLEAHGIRNYVIDPASLQVDRRARRVKTDRSDTDRLLRSLMAYLRGEPKVWSVVRVPCVAEEDARRLHRERDRLVSERVQHVNRIKGLCALQGIYDYNPLRPQAMARLEQLRTAQGGAFPPRLKSEIMRGLQRLEMVVEMIATLEAERNAIVENEASTHLNAKKIQTLHKLKAIGPEFAAVLVGEIFHRDFNNRRQVASYVGLAPSPFQSGNVAHDQGISKAGNRKGRTTGIELAWMWLRYQPESDLSVWYRARVGATKGRIRRIAIVALARKLLVALWRYLETGLVPRGAVLKG

SEQ ID NO: 126371 - protein, 457 aa, unidentified
MVCKEMAAVMEPQEIEDEEHEQILERVAAVDVAKSAGMVCTRVPHEMRPGKRRTRVWQVDAATNAILELADHLRCQGIEKVTLESTSDYWRIWFYLLEAAGLDVQLVRARDVKQAPGRPKTDKLDAVWLAKLTERGMLRPSFVPPGEIRQLRDYTRLRTDLTRERTRHYSRLEKLLEDALIKVSAVASKLDTLPVRDMLEALIAGERDPQALARLARGKMRAKHDRLVQALTGKFDDHHAELARMLLDQIDALSAQIGKLTTRIEELIAAIPAAQGIDPGGTTGPAAGQGAGAPVLPAVDRLDEVSGIGREAAQALIAEVGLNMAQFPTPAHLVSWTKISPQTIQSGARNRAGHTGKGNPYLKGILGEAAAAAGKTDTFLGERYRRLARRRGKLKALVAIARSILVIVWHLLADRSTRYHDLGAGYYASRIDKNRKTRSHVRQLEALGYTVTLTQAA

SEQ ID NO: 126372 - protein, 354 aa, unidentified
MLKQIHNPDESHGVIGGVDTHKDMHVAAVVTTTGDVLGTEAFSTTRAGYRAMLRWFRSHGAVLRVGVEQTGSFGAELTRHLALAGVPVLEVTGPDPAQRRAKGKDDWLDAIAAARAAQNGQRVQVAKDRSGAVEALRVLRTTRRSAVKCRRATLQQLRNTIVAAPDEVREPLRHLTRMQLIRTCAGSRPDMMAWRDAAVATRIALKALARRILELNDEIAGLDEMIKPLVAELGPGLIELEGVGTENAGAFIVAAGDNPERLKSEASFAMMCGASPIPASSGKVQRHRLNRGGNRQLNSALHMVVVCRMRTDERTKIYVARRTLEGLSKRETMRCLKRYVAREIFTTLVGKEDH

SEQ ID NO: 126373 - protein, 424 aa, unidentified
MSGERSWRPMLEHWVRRIGCRLDWHFRAFDPVKELTRRLPPNDQLEARKHPVTSDRSLAGPFTPIEGSASPNERRIAMSFIGVDLHQNSITVCRREPDGAQSFETLTLSAADMERFCLSLDADDEVAIEATGNSAWFRDQVLPCVGRVVVVNPSQFKVIRKSVKKTDRNDAAALALFLSKDMLPETRARTQDQSELASLTHTRDVLVKQRTRLLNKIHALHVRKGLKLKKESLGSKRGLAAIDLDLFSRCEVIEIEVLREQALSLSASLAHLDREIEGVAATFDGYEGLTSIKGVGPRSAAVLLTAIGNVHDFASADKLAAYFGIVPRVRQSNETDHRGRITKQGNRLARTTLVQCTLSAIRYSPYLKGYHNRIRERRGFGKAIIATARKLLTIIYDTLKNGWVFNDFTQFQRREDLIPAGQSS

SEQ ID NO: 126374 - protein, 344 aa, unidentified
MSKHSIRAGDVAGLLVRLAQLKEKARGRTGRDFPIIAIQEAGLDGFWIHRVLQSEGIESHVVDAASILTSRRRRRAKTDGIDGETLVRTLLAYKRGEPRVCAMVKVPTPEEEDRRRICRERKTLVGERVEHVNRIKGLLFAQGVSNYEPLKRNRRARLEELKTGDGRPLPAHLKAQIGRELDRLELVLPQLKAVEAERDALLKPVSEGCPTPAAMLAQLKGMGPEFTAILWSEGLFRSFSNRRQLAAYAGLAPTPWQSGSVAHEQGVSKAGNPRLRTTMIQLAWLWLRHQPTSALSVWFQERVQSKGGKIRKTTIVALARKLLVALWKYSTSGVVIEGAAMKTI

SEQ ID NO: 126375 - protein, 428 aa, unidentified
MSNQEIIRRKQYCQIVKEITGSDQYLVVGIDVGKDTHHAFMGSATGKALFRKLIFENNLDGFSRLLKTADEIKSQNGLCKIVYGLEPTGNYHKPLARHLIRCDSNVVLVSGEAVNKNRSLLDGRWDKHDTKCAANIADLVSRARCLYYDSPSPSIMELRALLSLRRRLKREEHGLRMRIRNNLLAQYFPELDRFYNACESESLAIVQWFLNPDTIAAMEFGEFFHLVTKTRRGVAQTLRLRKIHGLATESVGCPMGPAAEYEADLLVEKLKQVRQQIQKTADSIEDFCLEFDEYSYLLTIPGFGPYISARVLASIGDPFRFENRKQLIKLAGYDLCAKRSGKTSDKAVPVISKKGNGELRYALYQAASVAAARVDLFRTYFTRLLRGRERERGIKTKMRVKLAVKMLVIAWTLMKKREVFDPAHLNIE

SEQ ID NO: 126376 - protein, 363 aa, unidentified
MSESMTVTVGLDVHARSIRLAAVRADVLLEERTLPYDEEAVERVLRRWSAVRCCYEAGPTGFGLQRYLVGRGIDCRVVAPGLVPQRPGERVKTDSRDARMLARLLAGGLLQPIHVPTPELEAARDLVRAREDARLDRMRDRQRLSKFCLRHGLRMPTSSWTVVRRKWLSEQRFEFPARQQTFDTYVHAVDLVDARIGQLERAIREAAEQEPWCTLVDKLRCLRGIDTLTALALVAEIGDFSRFKTAEEFMAFVGLVPSEHSSGEKRRQGSITKVGNSHVRRLLVEAAWHARRRPKVGYDLARRQRGQHAEAIERAWRCQQRLYRRWQRMAGRGKPQQKIVVACARELAGFIWAIATEQPLRSN

SEQ ID NO: 126377 - protein, 416 aa, unidentified
MKQKDVIEFEQVVERGCGMDVHKETVVVTIRGKGIKTVTKSYSTFTNSLIKMKEWLLKFGITHVAMESTGVYWKPIFNVLGDDFTILLVNARHVKNVPGHKTDKRDSRWLAKLLLSGLLKGSFIPERAFRELRDLARYKTKLTNMVAADKNRLLRILEDANIKLSMVLTDVFGASGTKMIHHILSYENYRPDELMQYVHSRVKASREDIKEALTGYVTDHHRFMMRTILDNMARTKSTISEVDNRLDVALEPYKLEKELLETIPGVGSDIAIVIIAEISTDMSNFPDHKHLASWAGMSPGSNESAGKNKSGRITYGNKHLRSYLTEAGWAASHTKGTYFSSKYKSLVGRRGKKKTIIALGHKILIASYFIIKDKVKFKELGEAHLNNFRRDKLIAYYKKQIERLDPDHEFEIEKVA

SEQ ID NO: 126378 - protein, 461 aa, unidentified
MNGPEDVADGEHEQIVARVAAVDIGKRIGKVCTRLPHETKEGRRHTRVWDVPSITGSIIELADHLACQGVERVVLESTSDYWRPFYYLLEARGLSVWLVNARDVKNVPGRPKTDKLDAVWLAKLAERGMLRPSFVPPPEIRRLRDLTRLRHDLTTERTRHKQRVEKILEDALIKLSTVLTDIFGVSGRAMLDALVAGERDPKRLAGLARGRVRATRAELAAALTGQFSDHHAYLVRTLLAQIDTLDHQIAEITTRIDEQVAALPTPDSDDPTPPPEDTATGGHQAPDTEPVPFGTDLLDRLDEIPGISRHTAQVVLAEIGTRMDQFPTPGHLASWAKLSPRTIQSGATTRSGKTGKGNSYLRGALGEAATAAAKTKTFLGARYRRLVRHRGKLKALVAVARSILIIIWQLVNDPTARFHDLGADYHTNRLNKNHRKRALLRELADLGATPTEITTALAASA

SEQ ID NO: 126379 - protein, 386 aa, unidentified
MQKLNDLSRSPNPLDPDGTLIAVMELSLSNWLVAGIVPGVERQPLKKLAVDESALLKLLHRWREEAAKAGHRIKRIAVAFEAGRDGFWLARWLSARDIEAYVIHASSVAVSREHRRAKTDRLDTELLKRSFLGWLRGERDHCKMVAIPTTKDEDAKRPNREHESLVGEQSRIVNRMKATLIRLGIRGFNPKLKKAAERLDGLRTPEGEPIPPNTLAELRRDMVRRRLISDQIRQIEDARLERLKQAPDDGPHAMVRLLARVIGVGVETADMLVQEVLSRSMRDRRAVARYAGLTGSPDESGRRRREKGLTRSGNARVRRGMIQLAWRFLMFQKDSALAQWFRARTESARGTRKTMIVALARKILIALWRLVREGVVPDGVVLRPAQ

SEQ ID NO: 126380 - protein, 343 aa, unidentified
MHYIGMDCHITTLDFAVVNETGKVTKTSKVATSAKNFMEFAKSVRQPRTVYMEEGTLAAWALEVCVRFGEKLVITDPKKNRWIGSSGQKDDTIDALKLAQLARGGYIKEIHHPVGQRRRFRELMIAYHDTNRNVTRIKNKIKAKFRQNGVQCTGQTVYSKAHREEWRQKLPQDSTLLVILDGLWLQLDQTERTEKDILSIAKAHGKQYPEIRLFEEIPGIGFINAATISAILETPHRFADKRKIWMYAGLGIVRRSSGGKLYTEKLTNEYNRLLKYTAKQAAQAAIQAKDNPFRRAYLEMTLIKGIAPHRAILTIARDILSTMWAMWRNGEKYNPDIDKKVKT

SEQ ID NO: 126381 - protein, 442 aa, unidentified
MLWPSVDTEGPFISQAIWVRSLQGGNLLRAITQKKGERTMFCLGIDVSKKSCRYLLLNHEGQKAKIFSLDNTHEAFQDLLKRLKDLSIPKEDLLIGLEASGGFWENLYSFLKDNGFRVVLLNPYHTNKFREALAKKAKTDDIDALVIAQLLRTGEYVQSQVAEELIQSLRELTKLRYELMTERKNFQRQVFSLLSIIFPELEKTALKNPFSVASMAILQRFPTAIDLAQAKPKQIEKIVRSIQGNNFNIEEIGKLIQTAQASIYSGRAKEARATSLRILLRHVETLSSSIEELEAQIKEILSPQEPQGSFPGENLLTIPGVGDKTLAAVLSYLGANGSSFSSSTKAVGYVGYFPKIFQSGQTRRENTICKRGPKLLRWALYMAAVASLKHNPEMRTLYHRKLSQGKTEKQALICVGKKLLQIMLAMLKSGEPYNPAKVFVTC

SEQ ID NO: 126382 - protein, 443 aa, unidentified
MKKRIYRRMPVNDFQPDSISLADLGGKLVFAIDIAKVDMVAAIAAADRRVLRILSWKAPEQNRAVLDMLCHFRGQGVSVETVMEPSGTYGDVLRLQLERDGFPVFMVSGKRTFDGRELFDGVPSLHDAKAATIIAKLHADGLSTRRRDEGPDRRQLRAALAIMDLYQERYLQLVHRLESWLARHWPELPKLIELTSSSLMALLARVGGPADVAAAPDKATKVLLGISHRLLADDTVAAVIASAKASVGVPLVGLERDALMAIADDAYRAHRAFTTAKTQVDALAATTPAAALAPAVGHTTAAAVFAEVGDAKSYSCARAFLKAMGLNLKEKSSGTMQGQLKITKRGPSRVRQYLWLAVFRWIQNDPIANAWYQRKKKRDGNRASRAAVGLMRKLAKALFHVGRGATFDSSKLFDVRRLQLSEGRPSVAAQSALRKSVVCLEAP

SEQ ID NO: 126383 - protein, 376 aa, unidentified
MSKNTLYVGLDTDKKHIDVALAEALPGGEVRSWGKIANEANSVGRLVKRLQAGGRRLEVCYEAGPCGYGLYRLLNSKPGVRCRVVAPSLTPRRSGDRVKTNRRDAVMLARLLRAEALTAVWVPDATHEAMRDLVRARGAAVADLVRCRQRITGFLLRQDIRYAGKPWSKKHRAWLGQLVARLPLPAHRLVLGEALQALDEATARRDRLTDHIAELVPGWSLAWLVEALQALRGFALINAVTLAAEIGDPRRFAKPRQLMAYLGLVPSEHSTSDRVRRFGLTKTGNGHTRKALIEAAWTYSRPARAPRDAARHAPAVAAIATKACHRLSRRYRRLTARGKRPVIAVAAIARELSGFVWAIAQAAGPAAATPQRSPRR

SEQ ID NO: 126384 - protein, 440 aa, unidentified
MNTSAANVPSSGTPVGAALVACAELDHFVGFDWAQETHDVVAVDRDGKIVLTLTFPDTAEGWAQWRAKTAPLGKIGVAIETSRGPAVERLLEAGGTVFPMNPKAAERFRDRKAPSGVKDDLLDAWSFADALRTDGHGWRPLRPEDPQTQLLRILCRDEIGLIEQRTALVNQLRQALHEYYPAALEAFADWTIPSAWAFVAQFPTPELLARAGRRRWQTFLHTQRLYRSTTAEERLAIFARATQFASPSVAVTSAKSLLAVTLVHQLQTLQKHMDEYRRRIEQAFAEHPDSGLFGSLPGGGRKLAPRLLGEIGAHREVFESAQSLQCYAGTAPVTNQSGKRCFVHVRRACNKVLRTTVHLWVNESRRKCAWAEAYYQQKKSRGCGHAHALRCLGQRWLKILWRMWQEHVPYDEALHMRSLARSESWVLSLLPPPEAAPTTN

SEQ ID NO: 126385 - protein, 482 aa, unidentified
MKKRNIYQNQSQELLSLFEAAGNSAKVMCVPMDYAKKDHLVMFCNGHGDILRKPFSVKNTPEGIAYIDDQVTRSCRRRGIQKKHVFFGGEDANSFAKNFVSTLRSKGFLVANVNAHDAKKQRGNVQASTDRIDLMGIATMLLNCRANCGPAQSGIYRNLRTLVRHRRKLVQMLTEVKNRVHGIVDELFPGFLNEKNSGIIPFTQSSLYLMEDRFSPKQIRRRRRQKLIEILKRFGTSKAEKTAAKLQQYAAKVLHAPVEYVDTMQLSLAQHVKHIRCLKESVAQMDKEIALNLAQTQGAFLTSVRGIGLVLAAGVTAEIGDLNEQKPLNNLASYSGIIPRVKQTGGSDGKTYTGPVAKRCNRILKDYVVKSAYHLGLHGPQDLMTDYKRRDASGQHANFGMGRRYLRMAINLMRTSQVYLPPNLRKDDYTLEERAGYYLMSWPYLKEKWKKVGAFEAAFAKDRPLGLWRQIVQELYDIKLKL

SEQ ID NO: 126386 - protein, 482 aa, unidentified
MKAQQPEKGKPAIPARRCKWHEMNRKQRREIMRRLQSKDLSMEVIHPDAAGIDIGNESHYVAVPQQRGSQPVRRFGCTTAELRAMADWLKQCGIRTVAMQSTGVYWIAVFGILEEAGFEVYWVNARERKNLPGRKSDVQESQWRMKLHTYGLLRNSFRPAQEIRTMRTYWRQRNDLVRSACRHIQRIQKTLTQMNIQLANVLSDLSGATGQAIIKAILGGERDPHELAGFRDPRVKASEEEIAQSLEGHWQPDLLFVLKQEQEGYEFCQRQIAQCDRQLEQYLLQREDRSHGAPLPEEKRKIRLKKKRNGNKPQFDLRAELFRMTGTDLTRIDGVDVMTATTIISEAGYDMSRWQTENHFVSWLRLCPDNRISGDKIIGQGRLPTNNRATIALKMAASTLRTNQTYLGAQFRRLRTKLGAPVAIKAMAAKLARLVYRMLRYGMNYVDQGVEFYEAQHRKLQINSLKWKAAQLGFQIVEAPAT

SEQ ID NO: 126387 - protein, 465 aa, unidentified
MKHHRRPHEKKPTSRPSLLERMSPNAAGVDCGSEAHYVAVPPDRDAAPVRSFKTFTTDLHRLADWLTACGVTTVAMESTGVYWIPLYEILEARGLDVVLVNARHVKNVPGRKTDVVDCQWIQELHSVGLLRGSFRPTAAIAALRAYLRHRETLVQSAATHVQRMQKALVQMNLQLPVVISDITGVTGLRILRDIVAGRTDPHALAQHRDPRCQASEAEITAALTGHYRPEHVFVLQQNLELFDAYQRQLAACDAAIEAHVQTLAAQAPAPAGPLPAPRTRKKPRDNEPRFDIRTPLHQLTGVDLTQLDAIGPYSALRLLAEIGTDMSRWPTEKHFTSWLTLAPHNKISGGRLLSSKTQPSANRAAGILRMAAMSLGRTETALGAFYRRLAYRVGKAKAITATARKLAILVYRTLKDGLVYHDPGAAAYDAQHRQRVIRRLRQSAANLGFALVDRGTGELLEGAVS

SEQ ID NO: 126388 - protein, 316 aa, unidentified
MAKQVEALLVGADVSKAEIVVCVYGRSGVETLANERSVLRRWLRSLSGPIRLGLEATNTFHLALVEEAHALGHVVYVIDGYRLNRYRESVGGRAKTDRTDAQLLLRYLEREGEDLRPWIPPPAGYASLQRLLHRRATVVHARQSLLQSLGDLPELKSSVRSLLRRFQQLDGLLKKRIAQVAAETGIAAQMQRCQGIEGVGPLTAAALANVFRRGAFSSSDAFIAYLGLDVRVRESGTYRGRRRLTKQGDSEVRRLLFNAAMAARRSLRWKPFYQRHLERGLKPTQVLVILSRKLARIAFALMKTQSDYQPSLLGAA

SEQ ID NO: 126389 - protein, 410 aa, unidentified
MIYVGIDWADDHHEVAITDDSAQTLSQFHISHDSSGFAVLHGQLARFHQPPDQILVALETSRGLLVHELLRSDYSVYAINPKALNRYKDRYVLSQAKSDPIDALALAHLLRTDRNRFRVLSPLPEDYRLLDRLCQDLRKLVDEKARVCNQITSLLKEYYPKALELLSVDSKIGTAFLRAFPDPQALRACSKKTFMAFFKKHRYSRPNRVKDLWALAQAPTVRPDGVILKAGRLRLSALLDQLVPLKEHIASYEKEVKAILDKLPEAQSIGSLPGVGNRLGAELTAALGPKEPDGQSRFQSAEEIMKLSGSVPVTRQSGKWKTVSVRYACVKSLRRTFRDWAFASLKRSVWARAYYDFHKAMNMPHSTILRNLGKKWTRILFILWSQGATYDEALYIQGLKRRKVPWAMSL

SEQ ID NO: 126390 - protein, 388 aa, unidentified
MSPSFDASKSLTALDQDSTLIAVIEMSQTKWLIAATVPGFERNPLKKLDADPDSVLRLLRRWRSEAIQAGREVRRIVVAYEAGRDGFWLARWLQAHAVEAYVIHPSSVAVSREHRRAKTDRLDTELLMRAFLGWLRGEKRHCSMAAIPTINEEEARRPNRERDNLVRERTRIVNRIKAILARFGIRAFKPNLRKAAEKLEALHTAEGMPLPERSRAELRRNLGRLHLLREQIHEIEQERLRQLSVVPDAEKGPLAMVRLLSRIIGVGIETADMLVNEILSRGLRDRRAVARYAGLTGAPDESGQRRREKGLARAGNARVRYGMILLAWRFLQFQKDSALAHWFCARTADGRSGTRKTMIVALARKLLIAFWRLITTGEIPTGVALRPV

SEQ ID NO: 126391 - protein, 341 aa, unidentified
MSIAGAFDVHRRQLTFDYLDTMTGEVNRGRIAPADREQLRVWLARFAGQDEVHFALEGCTGWRYVVEELDAAGIVAHLAEPADTAALRGRKRHAKTDKTDSRHIRSHLAAGDLPECWIPPAHVLEARATVRLYKDLLDERDGWHQRIAATLFHQGVPAGPSMCTAQGRAAVAGMDLSPAGRQAVETGLRQIDRLTSELDPLRRQLDMISRRQPGCRTLRATQYGVGPVTAVAIWAELGDVRRFGNSDDVIRHTGLDITVYSSDGKRSAGHLSRQGPQLLRWALYESAKCAARPSAPDHGYYTAARDRRTAGLATVSVARKLARRCYHTLRELGEQALAPAA

SEQ ID NO: 126392 - protein, 343 aa, unidentified
MQFVTVGLDLAKNVFQVHGIDSVGGAVVRRRLRRAEVLPFFEGKTPCLVGLEACASAHHWAREIAKLGHEVRLMPPQYVRPYVKRNKNDATDAEAICEAVTRPTMRFVPIKSIDQQAVLMLHRSRDLLIRQRTALVNALRGHFAELGIVVGQGIWKVAKLVDEVATANLERVPAIARAVLDVLTSQLGALQQQIRLLEAELLAWHRANAASQRLATIPGVGPITATAIVATITSAAQFRSGREFSAWIGLVPRQHSSGGKDRLGGISKRGDAYLRRLLIHGARTALRWRRAGAVDRSSWARGLLERRPPNIVAVAIANKTARIAWAVLGRDQPYRSPVPAEAA

SEQ ID NO: 126393 - protein, 316 aa, unidentified
MSQPLVYVGLDVSKATLDIAMRPTEEQWQLPHTEEGIRDLVTRLAGVHPSLIVLEATGGLEVSLVAALAMAKLPVAVVNPRQVRDFARATGKLAKTDRLDAQVLAHFAQAVHPTPRPLPDAGLQALEGLLTRRRQVVGMLTAEKNRLASARPPVRQDIQDHIAWLEQRRAKLDAELRHTLHASPLWREKDDLLQSVPGVGPVLSLTLLAELPELGTLDRKQIAALVGVAPLNRDSGTLRGRRTVWGGRARVRATLYMAALVASRCNPVIMAFYQRLCSAGKPKKVALTACMRKLLTILNAMLEHHVPWQPHHAPTP

SEQ ID NO: 126394 - protein, 416 aa, unidentified
MDTLFTRVAGLDVHLKSIQCAVRCRQESGLLTQVRSFGTMTRDLRALADYLEALGVTHVALEATGVLWKPVWNILEGRFALVLVNPRHLKKVPGRKTDVSDAEWIAQLLAYGLLRGSFVPPREVRDLRDLTRHRAQLAGEHTRVANRIHKLLEDANIKLGAVASDVLGKSGRAMLRALLDGQQDTEMIAELALGRLRGKIPQLKLALEGYCTEHHRFVLRRLLSHVGYLEKESQAFSTRIIRKLNELLPPAAFARLDGIPGVNRLTIENVIAEIGVDMAVFPDEHHLASWCGVCPGNEESAGKRLRSRIRKGNRWLRRALTESAWAASHVKDSYLASQYRRLAARRGKQRALIAVAHSLLVIFYYLLKDNVEYRDLGPDYFDRLQPQRLKRSLVKRLQTLGYDVTLSPKNPDDCAA

SEQ ID NO: 126395 - protein, 349 aa, unidentified
MSMVCGLDLHRQQITFDALETESGEVWRGRVWQPDRERFRRWLCRDVARRAGGEPVAMAVEGCTGWRYVVEEIVAAGYEAHLAEPADTQAARGRKRHAKTGRSDARMLRELLQSGDLPESWIPPTDVLEWRERVRLYKSLVDQRRVWIQRIHAELFQHGVAVPEGAIRSTATRDRLLSNDVALTSAGRQRVRVGYSMLEATDAEAQSLKRDLQRFGHRQPACRALVEETYGIGGLIAVAVWSELGDCHRFSRSEQVVRHSGLDVSVDSSDRHRAHGHLTRQGPPTLRWALFEAAMNASHHRSPDHAYYSAVKDRHDGKLAAISVARQFARRCYHVLHNLDPDVVYAMPD

SEQ ID NO: 126396 - protein, 405 aa, unidentified
MEIVVERACGMDIHKDNITACILTSNGKEIQTFPTKTVFLLQLIDWIKQHECTHVAMESTGVFWKPIVNLLEAEGIEFLVVNAQHMKALPGRKTDVKDSEWIAKLLRHGLLKASFIPDRNQRELRELVRYRRSIIEERARQHNRIQKVLEGANIKLSSVVSDIMGVSSRDMLHAIADGEDDPEKLANFARRTMKRKKDELELALHGYVNPHQRLMIKTILTHIDFLSEQITLLDQEVATRVVPFHDDVERLDSIPGIATRMAEQILAEIGTNIKKQFPSAAHLCSWAGLVPGHNESAGKRKSAKAKNGNKYLKSALVEAAHSVAASKNYLGAMYRRTAARKGRKRAAISVAHAMLRIAYYLLTREEMYVDLGEDYFDKQKQQSIVKYAVRRLEKLGYSVTIAEVS

SEQ ID NO: 126397 - protein, 340 aa, unidentified
MGVFVGIDVSLENSAVCAVDEHGKLLKETKVASDPGALNACIRSMPGVVEAIGIEAGPLSQWLHKSLTDLGLPVVLMETRQVKAALKAAPVKTDRRDAAGLARLLQMGWFRPVHCKSLSAQELRALLGARRSVQDAAINIEMSIRGMLRNFGLRLGRIGKVSFEDRVRELTDGNKLIQLSIEPMLRARAALRSELVRLERMARDITREDPVCRLMMTMPGIGPVVALTVRSTIDDPGRFRRSKDVGPSIGLTPRRYQSGETDIIGGVTKAGDMDMRTALYQAATVVIHRSKKPNWLRAWAEQVVRRRGVKRAAVALARRMGVILHRMWVDNTEFQAAKMA

SEQ ID NO: 126398 - protein, 341 aa, unidentified
MIGLDIAKSVFQVHGEDAGGRMVLQKRLRRSQVKEFFATLPPARIGIEACGSAHYWARELSALGHEVRLIPAAYVKPFVRRNKTDARDAAAICTALGRPDMRFVAIKSVGQQASRGLERSRDLLVRQHTQLMNSVRGQLAEFGIVAAQGRRGFAELAAAVAAGSAAVPTVLLEAVRLLVQQIDRLALAIAVLERRIVAAARTHPAMRRLATIPGVGPLTAHAIVTAIGEGRQFDRARDFAAWCGLTRRVDQSADKRRERGISRQGDNGVRKLLVLGASAAMRQVRAAPERASAWQHGILARRPVKVAVVAQAAKNARIAWAMLQSGESYRRPRSAGAAVLA

SEQ ID NO: 126399 - protein, 425 aa, unidentified
MKNSAANKLRQVPEGYLIVGIDPHQKKHAAVAMTKDFTIRCKFKFNNSREGYNLALERIREEMIKAGSKGVMFAIETGGHYWRNLAYFLDERGFPFRFINQYTLKRRREGKDLNRRKNDYRDSEVAAQLLCTGEFTESKLKQGVYAELHAAHNSYRRMVKERTRITNLIKGLLDGLFPEFPRIFKDACCLNALSVLVVCPIPGVISSMTEEEFINTIRANHRGLLKKKKLRSLYHVAGISVGIEVGAKAVSLEIGFLVEKLRLIKRQLQILEEILIKLVDKTEEGKYLLSIRGLNYIGVAGLLAELGCFRLYRSAKQMIKMAGSNPTEKESGGKRGLRTPMSKHGRPALRHCAWTSVVPMLRFNTDFRAWAKQRRERPAHANPLCGKEILGAALNRLLRLAFALAKNRTYYQVSRPELALAAVSK

SEQ ID NO: 126400 - protein, 451 aa, unidentified
MPKLRNKAVSLPVIEPNAAGIDIGATEIFVAVPADRDPEPIRCFPTFTVDLERLADWLQQCHIRTVAMESTGVYWIPLFQILEKRKFDVRLVNAHHVKNVPGRKTDVSDCQWIQHLHSVGLLRGSFRPDDEICAIRSLWRHRDNLIQLATLHLQHMQKALDQMNLQIHHVISDLDGNTGLAIMDAILAGERDPHKLAQLRHPRIRASEETIIKSLVGDYREEHLFTLRQSLKAYRYYQELIQEVDSQVKQMMQRLPSKVADGEQPPQGNKRRARKVPWRNEPPQLRADLYRTFGVDLTEIPGINSLTAQMLLTEIGPDLARFPTAAAFCSWLRLCPDPKISGGQVLSSRTRPTKNRAALALRVATQSLNRSDNFLGDYFRRMKARMGTPKAMTATAHKLARIIYHMVTTQQEYDVSIFQKQEERRRQQKSVRLHTQARELGFQLVPIGFVP

SEQ ID NO: 126401 - protein, 319 aa, unidentified
MEKGTTFVALDDSKRKLVVAILRPGPSEPEQRELPKEPHLIRRLFQRLAREGRVRTCYEAGVSGYDLYRQIVACGVECAVIAPALTPRRPGQRIKTDRRDAAKLVRLFRAGELTPIHVPNEAEEAVRDLVRCREDVRRDVLRWRHRLLKFLDRHGRLYVTGKNWSQRHWTWIRAQHFDLPVLERTFEATLFALEQALARRAALDREVAALAESEPYRTPVGWLRCFRGIDTLSAMILIAEIVDFQRFRQPRALMAYLGLVPSEYSSGDTQRRGAITKTGNTHARRALVEAAWHYRHRPSVAGALRHRIEGQPPAVVSHA

SEQ ID NO: 126402 - protein, 348 aa, unidentified
MEYIGLDLGKTSSQVCIQTEDGELLERRIKTERECLSKLLGERPPARILIEASTESEWVARHLEGLGHEVVVADPNFAPMYATRHKKIKTDKRDARTLCEACRIGAYRPAHRTSDKQRHIRAQLAVRETMVRTRAKYISLIGAIVRREGWRIPPGSSSAFLNRVKALELPKHLRTEIMPLLALMKTLNEQIKRADDRLEKIVKDDAVVKRLATVPGIGPVTATAFAATIDEASRFSGAKQVRSYLGLVPRELSSGEKQRRGHISKAGNKRARYLPIEAAWALLHIKRGAGSDALRGWATRIAGRRGKRVAAVALARKLTGILYAIWRDGAVYDPQLLQPGCSRAELAA

SEQ ID NO: 126403 - protein, 400 aa, unidentified
MDKRKRYIRFCGIDVAKNKHVFCVIDREGRTILRSRSFTNTQEGYRRLLHSLQDIGSVRSLLVGMEATAHYWYSLHDFLVRHGYPVAVLNPIQTAQQAKKCIRKCKTDKVDAFHIATLLKNGEYRAALIPGELGMICRQLTRLRCRLVQHTAALKQLIWSRLHPVWPEYEKLFKDPFCATSRTLLYTAPTPTDLLSMRQDELSELIRKASRGKYAQAQAKKILHAAAHSAGMHRSLDGARIGIRTLLTQIEAVRPVREKLEQEIARLAEDLPAYIFSLPGINPVRAVSLFGETDPITTFEKPAQLVAFAGLDVSVFQTGQYEGSYRHISKRGSPFLRETLWNMAFQAIYQEGDIRDYWLRKMAGGLKHKAAITATSIKLCHVAWRILTDKRDYLPEGRPN

SEQ ID NO: 126404 - protein, 369 aa, unidentified
MKDVERRFVGIDLAKRSYVAKVLQPGTDKGRILKGSTSPEGLKKLYHSLNSQDRVSLEACAQGFWLARRLIETVGCEVVVLNAGDLAIIYRSTKKTDLNDAEKLAWIIKRLPLKELPVVALPTEEEESRRSMVSELHFEKRLRTMQINRLHSIFTRVGQTEIRKKHLATIEARKESIQSLPGRAHREALRLLEVICLIENHIQLIEEEMAVSLSGEELAEHLLSMPGVGVQTAMAFLAHVGDGSRFSKGRQVSNYVGMTPRIYSSGETERMGHISKHGCLALRSIIVQSAWSAVHTRRSNVFKTKYEELVPRIGKKRAIVAIARRMLETMWILVTRKEDFRGYDEFSKRLKLRKIQIKVEKLEKTGLVA

SEQ ID NO: 126405 - protein, 330 aa, unidentified
MENVLQFVGADLSKRTIDLVIHSTQNHLCIENSNPGFKQMLGWLKQSKLDLQQIVLVMEHTGLYSFCFEKFLHLKGIRFSKVNAVDIKFSIGLTRGKSDKVDAARIARYGAEKPERLKIQTQISKALESLKMLNTSRDKLVRTRAGLKTSVEEFRNIGMGDREPALRAQLRIIKSLDKEIKILNDQIQATIRHERELSTNYDLLTSIQGVGPVVATNTLIKTGNFTRFNNGRKFACYCGIAPFEHTSGTSIKGKTRVNHMADKAMKSLLDLAAKRAIQCEPEIRVFYEKRVAMGKSKMSTINIVRNKIVGRMFAVIKRQTPYKTERMQVT

SEQ ID NO: 126406 - protein, 354 aa, unidentified
MSQKRNTAIAVIGIDIGKNSFHVVGLDQRGAIVLRQKWSRGQVETRLANIPPCLIGMEACVGAHHLSRRLKGLGHDARLMPAKYVRPYSKGQKNDFRDAEAIAEAVQRPTMRFVATKTAEQLDLQALHRVRERLVSQRTGVINQIRAFLLERGIAVRQGLRFLRAELPDLLATRTEVLSPRMVRVIEDLAGDWRWLDERIESLSTEIAALAHRDAACNRLMTVPGVGPIISSAMVAAIGTGDVFSKGRDFGAWLGLVPKQISTGDRTILGKISRRGNRYLRVLFVQAAWVVLIRPKSWERYGLKPWIEAAKKRLHHNVLAIALANKLARIAWAVLNKERNFECVSMDKMASRPT

SEQ ID NO: 126407 - protein, 416 aa, unidentified
MNAAGIDVSSRKSTVAVLRPFGEIVKLPFDVRHSAEDLAALAEQLKSIEGETRVVMEHTGRYYESVANVLHEAGLYVSAVNPLLIKEYGNNSLRKVKTDKADAMKIAKYALDHWTELRDYTPMDTIRYELKTLNRQFQLASKQKTATANNLIALQEQSFPGIRKLFDSPVRSDGTQKWVDFTHDFWHVDCVRSGSQNAFAERYRKWCKRNRYQFSMEKATEVYALAKSSVVLVQKTSVTKTLVQEAANQLTAISRSVETYRSEMNKLASQLPEYPVVMEMYGVGESLGPQLMAEIGDVRRFERKQSLVAFAGIDPAPSESGDYCSRSNRTTKRGSPYLRKTLFNIMKVHLQRAPADEPVFQFLDKKRAEGKPYYVYMTAAGNKFLRRYYGKVMAYFSTLEGLPPVDMDSTGLHHAE

SEQ ID NO: 126408 - protein, 387 aa, unidentified
MQSVTSATAVATTARANNITLFASLELSKSKWVVTINSPGSEKFSKHVVEGGDGAGLLDLLSRSRAKAEQRYGVQIKTIVIQEAGLDGFWIHRLLLANGVESHVVDAASIAVARRHRRAKTDAIDGETLLRTLMAWARGERRVCSMVRAPSPEDEDRRRLTRERGTLLKERIQHTNRIRGLLSGQGVRDYNPLRRNRFERLEALRTGDGRELPAMLKAEIRRELDRIALATTQLAAVERARDALIRTDAEEPNNPAALLLKLKGLGPEFASLLWLESLFRSFGNRRQVAAYAGLAPSPWQSGGVERDQGISKSGNRRLRKTMIELAWFWLRHQPDSALSHWFQARVGAAKGRIRRIAIVALARKLLVALWRYTTQGVVPEGAVFKAA

SEQ ID NO: 126409 - protein, 341 aa, unidentified
MNNSVVAFNPCGIEVSHRTLVVALRAHDHDEPLREFPNTPEGHQGVLRFLERSVRPVRVALESTGLYGLDLALALHQAGVAVMVANPRAVRHFAHALLERSKNDQLDAAVLREFAARLPFQPWRPPSASALKLLAVARRLEALTDMMAAEKNRLHAASLSEALPAIIRRDIQRSIQTQQRAVQRLTRAAQEFIAADPSLAERYQLLLSIPGLGPTSALHVLAELLLLGPDLDVRQWVAYAGLDPRQYTSGSSVHKKARISKAGNKHLRRALYMPALVAVRHDPHLRAFYEHLVERGKTKLQALVAVMRKLLHAIYGIFKHHQPYDGAQLFALPSPQEVICP

SEQ ID NO: 126410 - protein, 346 aa, unidentified
MEHFAGLDVSVKETSVCIVDETGKIVREVKVASEPAALLAVLKNPAYRFKRIGLEAGPLSQWLFSALAEADLPVICVETRHMRAALKAQINKTDRNDARGIAQMMRAELYRPVHVKTLRSQKLRMLLTHRKLLQSKAIAIENDLRATLRNFGLKVGMVGTVKFEARIKELVENLPDLAMLVEPLLVVRRALREQIGILHRRLLAIVRDDEVCRRLMTIPGVGPVVALTHRATVDVPARFRNSKATGAVFGLTPSKYQSGEVDRTGAISKCGDEMMRAMLYEAAHIMLVRSTKWSWLKAWAMQIARRRGLKKAVVALARRLAVIMHRIWVDGTEFRWTREQPAAAAA

SEQ ID NO: 126411 - protein, 452 aa, unidentified
MTLPVRHGVCDRLVRCRATERYPLGRRARLELDGIAVKRHEEVVTLSITCGIDWAEAHHDVALIDEHGVAVARSRIDTGAAGFSALLALIAEHGGGVDDTPVAVETDKNLIVVALVEAGFTVYPINPRGVARYRERYGQAGGKSDPGDAAVLAHILRTDRHLHRQLPTNTNQAGAIKVLARQHQEAIWALHQTVSRLRSVLLEFYPQALQAFPNLQHHAATTVLAAVPTPAAAGKLTRTRVATLLRRSGRGNQAALAERILTELRVPSLRQPSCVEEAYGHTVQGLVGAVEAMRTAADALEKALACEFDQHPQSDLLRSVPGLGPVLAARVLAEIGDDPARFDNPQSLRAYAGTAPVTIASGRSRYVKARKVRNKRLADACHWWAFTTLTKSGGARAHYDRRRAAGDHHNAALRNLANKLIGRLWWCLANNQPWDEDDAWPNIARTEKATAA

SEQ ID NO: 126412 - protein, 386 aa, unidentified
MPQLNDLSRSLVILEQDATLIAVIEMGQSNWLVAGIVPGVERSPLKKLAVDESALLKLLNRWREEAEKAGHRIERIAIAFEAGRDGFWLARWLRARGIEAHVIHASSVAVSREHRRAKTDRLDTELLKRAFLGWLRGERDHCKMVAIPTLAQEDAKRPNRERESLVGEQSRIVNRMKAALARLGIRGFNPKLKKAVERLDGLRTPEGEPIPPNTLAELKHDMERRRLVRSQIRDIEGTRLERLKQAPGDGPHVMVRLLARVIGVGVETADMLVQEVLSRNLRDRRAVARYGGLTGSPDESGKKRREKGLARSGNARVRRGMIQLAWRFLMFQKGSALAHWFYARTKNAPQTRKTMILALARKLLIALWRLAREGAIPEGIVLRPAL

SEQ ID NO: 126413 - protein, 391 aa, unidentified
MFYIGIDIAKHNHEVSIIDDNGKALGKSFSISNSQKGVDKFNTYLDCFNITSENCVIGMESTGHYWINLFSFLVNLKFNVFVINPIQSDAFRKMYIRKTKNDSKDSYIIAQIMRFGEYSSSNISDENIFALRQLSRYRTSLVDECSSWKRKIISILDQVFPEYSNLFSDTFGVTSKELLSKYPLPENMLELSTEELTNLLNKASKGRLGNEKAQEIKESAKNSFGVSFAKQTFSFQIKQIINQISFIESQLKELDNEISNMLKELNSEITTITGIGDVLGACILSEIGDISRFEKASQLVAFAGLDVAVKQSGEFTGTEMKITKRGSPYLRRAIWLAATVASFKDPALSIYYKSLIARGKKHLTAIGAVSRKMCNIIFSVLKNKKVYTPNI

SEQ ID NO: 126414 - protein, 338 aa, unidentified
MYYTGIDLHKLTSYLTTVDSSGNIIKEADIKNVNHNFVQYFADLGNENITTVESTMTWYWLNDLLSSLNIPMVLAHAKYVKAIAYAKVKTDKVDSHTLAQLLRMDYIPVAHKISNDNRLLRDALRARLKIVQRHTSVTNSMHLLLAKYNLDSPEQLDTIPRFQFDQLSEVEELLKEQILDLEKQLYPFLIPNDDIQRILWIPGIGKMNAFTILLEVDNINRFEDVKHFFSYCRLTPAARNSGGKSKQRSSKDGNKYLKVAFSDAAVHACQYYPIIRNYHNSLLRKKNKHVAKTIVAKEIAEIVYHVLKNKFDFNNKFKGKDLIERKSFQWPRVVNPYA

SEQ ID NO: 126415 - protein, 318 aa, unidentified
MNTKINQSINVGVDTGKTQLDIHIRPLDLFFSVENNDKGIKKALKTIKSHSPERIVIEATGRLEMPFVLACAEAQLPIVGTNPVHIKRFAGAIGRRAKNDRLDAELIAHHGEAIKPALTVIKPKNIRLMSDLVIRRNQLLSIQTMEKNRIQILPASLHPTIKPMLTTIKNQITKLEEKLVKLIKDSPEYQAKNTILQSVPGIGNIAAASIISNVPELGYITNKKAASLIGVAPITRESRRYKGKRVIQGGRAQVRTVLYMAMMSAIQCNPVFKVTYARLLAAGKPKKVAIIACVRKMVVTLNSMLRDGAMWNENTAKN

SEQ ID NO: 126416 - protein, 353 aa, unidentified
MKKLFIGIDFGKEKFDAAIIEACGLKEFGNREYGTFTNDKKGYRQFFKWVKTNADKSVENEWLFCGEDTGSCSLGLSKWLYGKGLDIWIENAYSIKHSSGIQRVKSDKADSSMIAEYAWRHQDKAVLFEPLRESLSQLREVFLYRHKLVQQHIAMDVRKQDKEAAEPSKAISFIKRKSKHLMSEIDNAIKECDLMIDRIIESDAELKENYAIITSIKGVARQNGACLLIFTNNFRRFDLDARKIACYYGVAPFGKDSGTSIHSPAKTSHFANKLIKSLLGQAAHCAKKFNPEIREYYNRLIGRGKKPQVALNNVKNKLIRIIVALVRKKVYYDPKTYMFYNAKFTDVKKMLNS

SEQ ID NO: 126417 - protein, 377 aa, unidentified
MKKELYLGLDVHKDCIITAVAEEGRKGEVRETGAISNDLHAVEKWIGRLRQAHGKEVILRACYEAGPCGFGLARRLKQFGVECEVVAPSLTPKRSGDRVKTDRRDARKLARLLRAGELTAVYIPEATDEAMRDLCRARSDAVDDRRRSRHRLKGFLLRHGYRYQGKSSWSAAHERYLRELVLPHPAMKVILEEYLQAIAAADQRIARCEAAMRDLLEKWRLAPAVHALMAMKGFQTVAAMILVSELGEVHRFGHPRQVMAYLGLVPTENTSSERRHQGHITKCGNAHARWLLVECAQHYASPPKVSKELSRRQQGQPNEVRAISWRAQNRLHRRYTRLLARRLQRNKAIVAVARELCGFIWELLRTQPCYQAQSTPV

SEQ ID NO: 126418 - protein, 345 aa, unidentified
MPIVGGLDIHRKQLTFDYLDTVTGEVKRGQITPADRAHLRAWLARFAGWDDAAFAVEGCAGWRYVAEELAAAGIAAHVGEPADTAAARGRKRHAKTDRTDSRHIRTLLAEGRLPECWVPPAQILEYRALLETYHDLRRERTAWVQRIHAVFFHQGAPRLGEGALRTGQGLAALQTAAAAHLSPAGQLQVATALDMIAAVEARLQPLRHQLLAAARHLAGAKVLAARLYGVGPVTALALTCWLAGEGRFSSSRKAVRFAGLDITVWSSDRKGPPGRLSRQGPPVLRWAVYEAGKTHARASAPDHGYYAAVKDRKNGKRAALPEARKIVRQACHILTELGDDALAAA

SEQ ID NO: 126419 - protein, 344 aa, unidentified
MSVYVGIDVHRKRSQVAVIDQSGEVLANRNVPNGVEPILKVIGGLPPGTPAAFEAAFGTGWLVELLKDYGFDPHLVHPLRCKAIASARLKNDKVDAAILGQLLRADLLPEAWIAPPEVRQLRALLRHRAQLVRLRTLLRNRIHAVLADYGHDRPSGCWSGPGRAWMASLQLPAVSREVVDDDLALIDALETVIDRLDWEIHQRARSDPRVKVLTQLPGVGPFTALVILAEVGDISRFGSARKLASWAGLTPTVRGSDRVAHYGHISKQGSVWLRWVLCEAAQTAKRSPQFAAGYQAIATRRGKKIATTAVARKLLTRAWHLLTDAEHAAATQPAAASAPQAGTR

SEQ ID NO: 126420 - protein, 319 aa, unidentified
MERTKTQKEVNVGVDTGKEQLDIFIRPLNIFFTVSNDSKGISEAVNIIKQHNPARIVIEATGRLEHEFIMACAKASLPFVVANPIHVRKFAGAIGQIAKTDKLDASLIAHYSEAIKPKLSQLKPENLQLMSDLLARRRQLMTMQTMEKNRLQIMPKEITSSIKPILTAIKNQLAKVDQKLLNIIESCDDLKTKNDIIQSMPGVGNVVAISLLSNMPELGYLTNKEASALVGVAPINRESGSYQGQRKIRGGRHQIRTVMYMAMMSAMQHNPVFKATYQRLVTLGKPKKIAIIACIRKMIVILNSMVRDGVHWNPKPLNN

SEQ ID NO: 126421 - protein, 347 aa, unidentified
MLHLGLDLSRKRLDVCVLNEAGTKLAVTQAPPDLDGLRHLAKEVAVLGGPVNAAIESMNGARFVHDSLELMGWDVEIADAQKVKGLAPLACKTDKIDAWVLAELSRRDLVPAIWLPDPEIRAERERARFRLHLVRHRVMLKNRIHSSLLAFGKPCPVSDLFGKSGRERLGRLELPDPWTKNIATALSMIDDLDSEIDACEKELRSLGADHPYVSLLQSAPGIAWVLGFTIASEIGDISRFSSPNKLMGYTGLCPRVYQSGGKDFRGPISKNGPKYLRWSLIEAAVHASSHPVYRDHYDRTKARLGRQRGAKIARIEVARKLTEAIWHMLQTGSMFAPARSHAVPLVA

SEQ ID NO: 126422 - protein, 405 aa, unidentified
MNAVGIDISKGKSMVAAMRPLGELLVKPYEVIHTADELEKLAGSLKKLDGETRVIMECTGRYHEAVAGALNEAGIFVSTVNPILIHGYGNNSVRRAKTDRKDAMKIAKYGLDNWADLREYTPMDAVRQNLKTFSRQYNLYIKTKTALKNNLVALLDQSFPGANNLFDSPARADGRQKWVDFVMEFWHCECVTGLSERAFTERYRKWCKKNGYNFSEGKAADVYAAAAGHFVTMPKNEHTKLLITGAATQLTAVSSTVEMFRAEMQRLAQSLPEFPVVMAMYGVGNTLGPQIMAEIGDVRRFERKQSLVAFAGVDPEPNQSGTHDPKSRPASKRGSPALRKSLFLVMSALLQKSPAGDPVYQFIDKKRAEGKPYYVYMTAGANKFLRVYYGRVKEYLNSLEHNSDT

SEQ ID NO: 126423 - protein, 344 aa, unidentified
MKSVPFYVGIDISNDDFAASIFTDPKISIRTLTKIPNEFSGFEKFESWLIDNQVQKDNCVICLEATGVYGESLCYFFFAKGFQVAVEPPLKVKRAFSDKSHKNDKADSKKISEYAYRYYDELQFWRPKANIIEQIKVLLMTREQLVGQRTASSNTLTALRKKVVQTPLANDIYQKNVERLNMQIKKIEKELEKLIDKHPDFKRTVKFLDSIPGVGMLLAANFLVATDGFENEMAYQYRKAAAFIGICPYEHSSGTSVYKRPRIPKYGPAKLRKLLHLAARSVVTHNEQFFLYYQQKIAQGKEPKLVLNNVSNKLLKIMCAVTRTQKPFVENYVSIHPQFALIKP

SEQ ID NO: 126424 - protein, 315 aa, unidentified
MASEPIYVGIDVAKATLDVCTTAGDAWQVANDDRTVQGLCARLAKMQPALVVLEATGRYELRAAAALAAAGLPVAVVNPRQVRSYARSTGQLAKTDRLDARAIARFGAAVRPEPRPLPDAETRELEALIVRRRQLVAMITAEQARLETAPPVTRKQIQAHVGWLRTQLAKIEGAIDSTIRRSPLWRAKDELLQSIPGVGATTSCTLLALLPELGTLKEKEITALVGLAPFNQDSGTMRGRRRIWGGRARVRTVLYMAALVGARWNPVIKAFYTRLRAAGKPGKVALTACMHKLLIILNAMVRDGRAWDATHAARA

SEQ ID NO: 126425 - protein, 337 aa, unidentified
MKYSGIDLHSNNSVVTVTDEQDRIVTEKRLPNDLAKILELLMPWREEMAGVVVESTFNWYWLVDGLQAAGFEVHLANTTAIKKYEGLKHSGDETDARYLAHLLRLGILPTGTILAPEQRAVRDLARKRMQLVRSRTMHILAVENITARQQGARINSNQVKRLTAQTVDQMPLPADVALALKANVAVIETLSAQIEVLEKRLQEKVGTRAEYGLLTSVPGIGQTLATTILLETGPIERFAAAGNFASYARCVDSVRTSNGRKKGEGNTKNGNKYLAWAFVEAANFALRYCAEAKRFYERKKAKTNTVVAIKALAHKLARACFHILKERKPFEMARCFA

SEQ ID NO: 126426 - protein, 351 aa, unidentified
MMIIGCDFHTRFQQIAMLDPTTGEVMERRLEHENGEAEKFYATLSGSARVGMEATMNAPWFERVLRTHHHELWVGDAARIRAARVRKQKTDSRDAVHILDLLLTNRFPRIWIPTSADRDARQMLRHRHKLVRFRTSVMNQLHGLAISQGLYRKSRLWSQVGRRELEALVLDPWASRRRQGLLQLRDQLTPWIVDLDRAVLQEAQRRPDAVHLMKQPGVGPVTALAFVLTIGPVGRFQRSKQVVSYLGLNPSEESSGGKQRLGSISKQGNAMMRHLLVEAAQTASKYDPELRRYYQRLQFRRGVRGVAKVAIARKLAVRLYWKLREAAQPVPLARMQGSPTKPMVEETPSPS

SEQ ID NO: 126427 - protein, 321 aa, unidentified
MKLYGAIDLHSNNNVTVLIDETDKVIYQKRLTNDLPLILEQLSPYALSMVGIVVESTYNWYWLVDGLMEKKHRVHLANTAAIQQYEGLKYTDDDSDARWLAHLLRLGILPEGYIYPKEERAVRDLLRKRSQLVRQKTANILSIQNLYSRNTGSSISANRIKQLSSEKVDALFAHADLALAVKANLTVMRSLETEIAILERVVKERTKLRAAYRYLLTVRGIGQTLALTIMLETGDIRRFSKVGNFASYCRCVGSEKLSNGKRKGTGNTKNGNKYLSWAFVEAANFAIRFDPLIARYYQRKKAKSHRVVAIKAVAHKLARAC

SEQ ID NO: 126428 - protein, 344 aa, unidentified
MTYYAALDVSLRTVNICVIDEAGAIHAEGKVASEVADIVAYLDSIDREICAVGLEAGVLTQYLSYGLQSQGYEVICMEARQVKAALSAMRNKTDKNDARGLAQILRCGWYSRVHVKSLESHRIRALLSSRKAVLSKCVDLENEVRGLFKVFGIKLPPTLGHGGFDEAVRTTIEADAALAHALLPLLDARLVLYRTFRELDNRVRRRAQQDRVCQRLMTAPGVGFVTALTFKAAVDDPSRFKRSRTVAAHFGLTPRRFQSGEKDNPGHISRAGDPEVRCVLYAAANVLITRSATWSSLKVWGIQLAKSRGHRRAAVAVARKLAVILHRMWLDDTPFRWSAQEANG

SEQ ID NO: 126429 - protein, 385 aa, unidentified
MTNPAQGSSFIPRDYDIFGGLDVDKKSMAVTFTDHATMRKSFKLPNSGRALLNYTRKQFPGQRVAFVYEAGPTGFGLYDELTAANHPCLVVSPSMVPTVQRKRVKTNRLDSNKLSDGLRGGQLRGIHVPPPGYRELRHLVQLRDTQVAQLTASKLRIKSLLLYEGIPFPAANGQWSGQVLRQLQGLPCSRAVRFKLDQLIDALEFHFQSAARIQKEIRHYCQNDAELRQSISFLTSLPGVGTITATHALARLGDWRQISNVRQIAGFLGLVSSEHSTGDKENRGEITRIGDSRLRNKLIQCAWTAIRKDPELRAFYRRIYQRQPKKVAARKAIVAVARKLTTRMYAVLKEQRPFVIRPDSAITPLTAEETVGPRERLDTAQNEQP

SEQ ID NO: 126430 - protein, 428 aa, unidentified
MQQPKGYPMKTWKELTHYAGLDWAKDHHCVLVLDRQGTIVADFEFEHSLEGWKSFSDKIAAWPQLAVAIETNQGAVVDQLLQREHTIFPVHAVAAKSYRQRKAPSGNKTDHLDAWALADALRTDGHAWKGLDPLDALTQQLRLLCRDEVVLIQQRTALVNQLQQALLEYYPAALEAFDDWTRPSSWEFVLGFPTPDALVTAGKRKWEKFLHSHRLWRPDTAQTRLEIFARADKFKASKPVTLAKSQLAVSLCKLLSTLDKQLALYRSQIEELFDKHPDKDLFGGLPGARKVLGPRLLAAIGSDAKRYGSHDVLQCLAGTAPISFQTGQMNKVMVRRGCDKFLRHTVHLWADCFRRASVWGQTYYRQKRSKGMSHACALRCLGQRLLKIVFKIIETKKPYDAEVHARNQQKHGSWVLKLVPAGDPEPCE

SEQ ID NO: 126431 - protein, 320 aa, unidentified
MSKKKSKSFIGIDVSKQQLEVAGHESDYHFRCPNKASAFGKLIAELIALRPALIVLEATGGLERSVVSALQAVGLPVVVVNPRQVRDFAKALGQLAKTDRLDARVLAHFAAAIKPPLRSLKSKDEQELDALNGRRGQLIEILTDEKNRRASAATDSVRDQIKEHIDWLEKRIAELDQQLKALVQSSAPWQAKDQILQSVPGIGPVVSFSMIADLPELGTLNRQQISKLVGVAPLNRDSGQHRGTRHIYGGRARLRSVLYMAAITAARHNSVIKEFYQRLRANQKPFKVAITACMRKLLSIVNEMVRDSSCWKIKEAPVFA

SEQ ID NO: 126432 - protein, 345 aa, unidentified
MKITTIGLDLAKRVFQVHGVNGTGEVVVRKTLRRAQVLGFFERLDPCLVGIEACGTSHHWAREIRRLGHEVRLMPPAYVKPYVKRGKTDASDAEAICEAVSRPTMRYVAIKSCEQQAALTVHRTRDLFVKQRTQLVNMIRGLLAEFGIEIRRGIAHALSLAERIVAGEMPGIPALAAKMIASLAGQILDLQARLREIERELLAWHRSSDIALRLATIPGVGTICATAFAASVTDPHQFRSGRQFAAWLGLTPLQHSSGGKERLGRISKMGDKYLRRLLIVGMTSLVRRAKYKPDAVDPWLAALLLRKPARVVTVALANKAARVIWAIMSRGEIYRAPQTASAVVA

SEQ ID NO: 126433 - protein, 369 aa, unidentified
MPYAPWGDRARAVDDTPAHPILCERSDSIFGPTMVVSLHSQGRLREESIMNFILGIDVSKAKLDIALRRPDGKVRSKVVANTPQGFTELSTWLRRQAATDLHACLEATGTYWEAVAEYLTDAGHTVSVVNPAQIKAYGAARQVRTKTDAVDARLIAAFCASQLPAPWVPPPPALRELRALVARREALVGMRTQEHNRLLIAHASVRQDIAAHLEHLDRAIGEIEAEIRRRIDDDPGLKGQRDLLDSVPGLGDKTVPVLLSFYGGPPRFDNARQAAAFAGLDPRQRESGSSVRGKPRLSKVGHAALRKALYMPAMVALARTAWGRAFRDRLAAAGKPPMVILGAMMRKLVHVAFGVLKSGQPFNPTLHGA

SEQ ID NO: 126434 - protein, 417 aa, unidentified
MLKIVFPICCGIDVHKTFLVATIASTDRSSVTTYQTKRFSTFTKDLENLSKWLLDNQCTDVCMESTGKYWIPVYNVLELTCEVILAHPKYVKSLRGKKTDRKDSVWIADLFKHGLVKASFIPEKAIRDLREVMRYRTKLVSMKSSEKNRYQNALTVSNVQLASVVSDTFGKSAQALINQLLQQPKDTSFDVLPFLHGSLKKKAEQISESLNGSIDDIQAQKIRSCTSHMAELDSHIEDLQVAADLLASPFTAALRIIESVPGIGHLSALTILSEIGTDMSKFLSAKHLCSWAGLTPCNDQSAGKKKSTRISRAGCYIKPILVQCALAAIKDKSFPYYGQRYKVLKHRRGHKKAIIAIARMMLSVIYTLLSRGELFSKELYEESLKNPMVILSPEEQFQRLAKKFGYVVVKVHEPVPV

SEQ ID NO: 126435 - protein, 320 aa, unidentified
MEAMVKRCAGLDVHQETIVACVLKGELDKKPESEIRTFGTYTKDLEELHEWLLQERVEQVAMESTGVYWKCVWNIIEDEKYEIKLANAREIKNMPGRKTDVKDAQWIAELLRCGLIKGSFVPDIEIRELRDLTRYKRKIVQQISSEKNRIHKILQDANIKITTDISDIFGDTGRKLIEKIIEGKRITDEDLLEITSGRGKTSLKNKIPQIKDGLKGTTREHHRKMMKLIYEHLKYLEKEKKEIEDLIDEKCKEYKKEIELLDSIPGINEDSAKAIIAEMGVNMYQFPTVKHLTSWAGMSPGNNESAGVKKKERQRMETRH

SEQ ID NO: 126436 - protein, 446 aa, unidentified
MLKDTQQSAAPEDSLPVLEMPAETRGSRRELSKRRRRMERIAGKTLVIGLDVARRRQALTFGHGREITGRQRIEVAPQHLGAAIVPVARQLCERDGLERVVVGLEPAGCYWELAAEGFEREGLGYAVVHTLAVRREREATRYNLEKYDPRDGDVIFELVSDGKFTETRLFDTPQRARLNALAREYLLVRKRMAGERTRLTNFWTRVLPEVFELFKAMEGITALALSQAMLPFSELAALTPAEWLARVRAHAEGRILHRRSTALLEHIRAAHQDPHRRAGEGIPVRIALAAQRHRLLSAQKQLLREQLLALYAAMPEAVWLNSIPGSDPLYHALTLALVGDFSLYDSPRAVVKLAGSEVNWHESGDWRGKSRISHRGRSLLRSAAYQQARKLVANENPVYRARFHHLLHRTTRPALTLKQAYTALGNSYLRTAHELVTQQKVWEAPN

SEQ ID NO: 126437 - protein, 328 aa, unidentified
MDNPLYYVGIDIAKAKFDVAIKLQNGKHKHKVFKNNPEGFQSLMQWLNTFGETFHCVIEATNIYHEALADFLFQQQITVSVINPKCSANFTKTDNLRSKTDKIDAKMLADYADEKRHKLPIYQPISPAQRELLRKNRQLDHLKKQLAQEKTRLTMLLDSDCIASTQQMIAFIKAQIKALEKTIKQCINADNTLKNNVKLLCTIPAIGFATAVQLIAHLGDGNRFKNAKAAATFAGLTPMIKSSGKSLNTVIGISKIGQSDIRKALFCPAMNFAFGSYKNSVYRSFVLRLLECGKPKMVIITALMRKLVTIAQAVLQKQTAFNLDTFMK

SEQ ID NO: 126438 - protein, 370 aa, unidentified
MKQVSRAATTKQKPEITIGLDLGDRFSHYCMLNSDGDAVETGRIQTTEEALRRHFQSEPAMRIAVECGTHSPWVSRLLEQLGHQVIVANARKIRAITASESKNDKNDAEKLARFALYDPRLLSPIQHRSLQRQQDLNLIHARSTLVRARTMIVNALRGLVKSAGSRLPACSTQGFESRVEASIPPALATAARPLLDQIAALNANIQQMDRGIEQLGNRYPEIQLLRTTPGIGPLIAAAYILTLDRPDAIQHSRQAGAFLGLRPRQSQSGDSDPQHRISKTGNVYLRSLLVQAAHYVLGRFGPDSELRRWGLKLAASGGKRGKKRAIVAVARKLAVILHRIWQTGNPWQAFPLSNRNTANNQAASQNPCMA

SEQ ID NO: 126439 - protein, 332 aa, unidentified
MTAVSTLGIDLAKNTFSVHGVDAQGVVTVRRTVSRAKLGELVARLPPCLIGMEACSGAHEWARRFSEAGHTAKLMAPKFVTPYRKSGKNDGNDTEAICEAVGRPNMRFVPIKSVQQQCDLSLHRVRLGFVEERTATLNRIRGLIAEFGYVVPLGTERLRREVRDLLERLPARAASCVRDLLEHAERLRSKALEYEREIRSSLQHNELALRAHTRPGIGPITASALVATVGNGHDFRNGRQFSAWLGLVPRQYSTGGKTRLGHITKRGDPYLRTLLVMGARSVLQRAYRETDPLSRWALALQQRRGYHRACVAIAAKNARVAWALLAKGAAAA

SEQ ID NO: 126440 - protein, 392 aa, unidentified
MIFIGVDIAKDHHDIIIIDDFGEIIKEHFQISNDLVGYKKLHTEINSCMKSVKDIHIGMEETGIYHENLRDFLISNGFTVYTINPLLTSYSRKASSTRLTKTDKIDSTAICRYIMSNYKFLHSYTPSLYYIDELKQLSRLYHDKNHQLSKTKDELKRLLQMSFPEFLKHFNPYAKWALNILVEHPMPRDFKGLHTGALVSRIKTKSNRLYNAVLLKKIAKDSIGKCNDLQSFLIRSTIQDFLHYEYQIEGLKKIIIQKMIVFPKIMSVPGVGPINGATILGETGDINRFSNRDEYYAFWGCDPIVHESGNYKLKNSKLSKRGSKYLRTALFSASRVACVAPKTKLNKFRCKYLDMTSKNNKHHYTILFAVGKNMVRSIYHILKTNEFYDDNK

SEQ ID NO: 126441 - protein, 406 aa, unidentified
MKIMYVLALDVSMGKSYVVIYHENTCLFEQEILHDKTHFNALLQEIYALPERPQIVFEATGVYSRVIETFCQKNHFAYCLLNPLEAKKQLNIDLRSVKTDKQDAHRLAQTHGQFLRKQKQSQTEVYKQTRDFARFYQQIERDIKRTRMNLHTALQLTFPELETLFTNRLSKLALNLVELFPHPDYLAHLSQTKVKNVLKKNTDKKISDQKALAKAQTLLSLAQNSYPAESGQSISVQKVVYYAQQLKQLLVTKEQLAKQLVEIAKQTIEFDFYQSIPGIGELSAGLIIGELGDIRRFSSHKQLNAFVGVDTRRYQSGKYTAKEHMNKHGNPKARKNLYFIMMNMIRQQAAGPNHLVDYYYKLKTQPSPKKHKVALVACINKLLKCLHSMVRHSSPYDYSYTASNDQ

SEQ ID NO: 126442 - protein, 311 aa, unidentified
MATHVGIDIAKRSFDLAFEPKQKARHFDNDASGIRQCCTMLKQLQPDLIVMEPTGGYEAALQIQLQAADLPVAVINARQIREFAKACGRLAKTDKLDAQIIARFAAVMQPAAQKPVDAQTRVLKALVARRRQLVQMHTAEANRMEHADDNAIKQSIHKMLELLENQIDSADRQIQEQVESMPKLKDRTEQLLSAPAIGPTTAALLVIELPELGQLNRRQIAALVGVAPINRDSGTYRGKRMTGGGRRDLRARLFMPTLCAIRCNPVIREFYQRLLDKGKAKMTAVVAAMRKLLTILNAMLKKNESWNPKTT

SEQ ID NO: 126443 - protein, 419 aa, unidentified
MTYRIAGIDVHKRMLAVVVADVAVDGGYAFDRRTFGTAPEQLRQLAAWFLASGVDEVVMESTAQYWRPVWDLLEQDWVPQRRSQPGAPPTAGTLHLAQAQSNRGPLGRKKDFPDAERLVRRLVAGELILSFVPDAEQRLWRTVTRRKYQLTCSRVQLQNRLEALLEEMHVKLSSLVSDLLGPSARRMLEAIAEGATDPTAVAALANQRLRATPEALADALGACADLHPVYRRLLQLALTELRGIEAQIEALNLEMGGLLRRHQDAVQRLAAVPGLGVDSAQQIIAEVGPDAVTFPAPKQMASWVGVCPGAEESAGVSYSRRAPKGNRQMRRLLNQAANAAVKTKGSIFELAYRRLVPRLGHRQAIGAIAHRLCRLIWKILHDGVTYEERGPAVTKERLRARTAKMIRELKTLGYRVEPA

SEQ ID NO: 126444 - protein, 383 aa, unidentified
MKKNTTTAKKSPKTLSNSKKNQIRQMAAKQRLTIGLDLGDVTSRYCILDEAGEKVSEDRLPTTKVGLSSLFGKMPPSRIALEVGTHSPWVSRHLAGMGHEVIVANPHKVKLITQSVRKNDQIDAEQLARLARVDPKLLSPIQHRGPEAQADLAVIRARAELVDSRTGLINCARGLAKPMGERLKKCDADQVKGSLADGLSEEVKKVIGPLLKSVEEISKQIGVYDERIEEIGKRYPEMKLLTQVHGVGTLIALTYILTIEDAQRFEHSRDVGPYLGLQPKQRDSGDSKPQLGISKSGDQLLRRLLVQGAHCILRKGAPDSDLQAWGLPRLQSGGKSAKKRTIVAIARKLAVLLHRLWVTGEVYDPQYNRKATQAAKGKAKVAA

SEQ ID NO: 126445 - protein, 378 aa, unidentified
MNRIIKIGMDVHTTNYTLCIFEPSFEHDGTVHCITQVKPEVKNIIHIIEIFKKKHENEELNIVCGYEAGCLGYSLYHELKEKGIECVILAPTTMKTEKGGRKLKNDYRDAKMIAECLAYGGYSAVHVPTELDNSVKEFIRMRDDIKENLKSIKQQIIAFLTRNGKQFEGKSFWTRKHIDWINTVSFSEPLLQDTLKEYMIEYNHLCNRVETLDRQIEEISLKEEYVEKVQQLQCLIGIKTHTALSLIVETSDFNRFKKGNMYSAYLGLIPGDDSSGGHENKLGITKAGNSHLRRLLVEAAQGYTRGRVGFKSKDLKSRQEKCSSEVVAYADRANERLRRKYYRMTLRGKKFNVAKTAIARELACFVWGIMTDHIDLCN

SEQ ID NO: 126446 - protein, 312 aa, unidentified
MDAIIVGIDVSKDRLDVVVRPSEESFVVARSGAGIGELVTKLAAMAPRVIAIEATGGFETVVAAGLAAANLPIVVVNPAQVRAFAMALGKRAKTDPLDAAVIAHFAEATKLQPRALPDEMTRLLADLVARRRQIVEMMAAEGQRERRLTDKRLRKSIARLRKAMEKELAELDDAIDDQVRGSPVWAEKEDLLASVPGIGPVIARTLIAELPELGSLDRRKVAALVGLAPWTRQSGQWRGKSFIGGGRKSVRSVLFIAAMVASRHNPTLKLFRDRLVAAGKPKLVALIAVARKLLTILNAILRDKRPWQPKIA

SEQ ID NO: 126447 - protein, 343 aa, unidentified
MEHYVGLDVSLKLTAICIVDRTGKIVREGVVTSDPETIAAFIKSHAPRVVRVGLETGATATWLWTELNKMGLPVICIDARHAKAALKMQINKSDRNDAVGIARIMQCGWYKEVRVKDLNSHAIKAVLISRALLVKIKRDIENQIRGLLINLGLVIGRAKMNVFAVRAAELAEARPELAAAVEPLLKAREAVGRQIADLDRKVMRMARNDAQVRRFMTAPGVGPITALCFLATIDDPTRFKRSRSVGAYVGLTTRRYASGEIDWTGRISKCGDKLLRSYLYEAANVLLTRVARWSTLKAWGIRLAKRSGLRKAKVAVARKLAVILHRMWIEGTEFKWSSKEVIA

SEQ ID NO: 126448 - protein, 347 aa, unidentified
MLHAGLDLSRRKVDVCLLSEAGAHLDQLATPPDAESLRRLARRIEEVHGQPVCAVVESMTGARLVHDTLEQEGWDVEIADAQKVKGLAPLACKTDKIDSLVLATLSQRDLVPAIWLPDPRVREERELARFRLHLIKHRSMLKHRIHSTLINFGRPCPVTDLFGVEGRRLLERLQVPEPWRGNVTASVMLIDDLEDQIAEINRRLKEGHADHPYIPLLMSAPGIGWVLAFTIAAEIGEISRFESPAKLAGYTGLCPRVNQSGDSDRRGPLTKHGPRYLRWALLEATMHALKHPAYRERYQRNKRRLGKQRGAKVAQIDIARRLSHAIWHMLSRQEKFAPRGAALRLAA

SEQ ID NO: 126449 - protein, 372 aa, unidentified
MQDDSEVYVGLDTSKLKISVALASAGRSGEVRFFGDIDSRPEAVEGLVRKLAKRHQRLSFAYEAGPTGYGLQRQIVALGHDCAVVAPSLIPKRPGERVKTNRRDALTLAKLHRAGELTPVWVPDPAHEAIRELVRAQEVAMEDLRAKRQHLQSFLLRHGRVYTGRTAWSRAHTRWLGELRFTHPAHYLVLAEYRQAIADAEKRLEGLRQQVAEVVPTWSMAPVIAAYQAMRGIALLAAVTFAAEVGDVRRFDTPRQLMAYLGLVPSESSTGAQIRRGSITKAGNRRVRRVLIEGAWTYRFPARKSRKLEERQADLPKAVRDIAWKAQRRLCGRYRKLMARGKLKAVVTTAIAREVAAFLWAIGREVEPLRVS

SEQ ID NO: 126450 - protein, 372 aa, unidentified
MNYNTVYVGMDVHKESFTLCSMTIEDEKASHYQKTEADYKKVLKYLEFLRTIHGGNAKFICGYEAGCLGFTLYHQLTSQHVECIILAPTTMLEQRSKKRIKTDKRDAEIIAKCLAQHNYSPVHIPTATDEQIKEFLRMRDDHKLALKKIKQQILAFCIRHNYRYDGNSHWTAAHLCWLKSLQPEALYKETLDEYLLTYTTLNDKIERFDKRIEELASKDEYKESVQKLRCFIGVRTHTALSVLVEVGDFNRFASAKNFASYLGLVPGENTSSDDHNLLGITKAGNRHVRLLLTEAAQSYARGQIGYKSKDLKSRQSGNSAQVIGYADKANERLRRRYYKMVLGQSKKHNVAKVAVARELACFMWGMMTEHIS
